United States Patent Application Publication US 2006/0150283 A1 - sequence listing, part 17

SEQ ID NO: 66565 - DNA, 1461 bp, Triticum aestivum
  misc_feature (1)..(1461): Ceres Seq. ID no. 14313350
aagagaccacacacgaccgtccaacgcatcccctctctacccctcaaaagatggccggctggacctccatcccggcggagctactcgcggaaatctccggccgcctgccaggtgacgcggaccggatccacatccatcaggtatgctcccactggcgcgcatccacttcccggctggccgcctgccgtccatggatcatcgccggccgcgaaccatggagcctggttggcccggtcggcgaacactcgttttggctgccccttggcggccgacggatctacttgggcacgcccacgccggcgggcctaccatattgctgcggcacgccccttggctggcttgctctcatggacaacctgcaatccccaacgcggtttgtcctctgggagcccctctctgaagctgagatctttctgccctgtttgcccgccgttgtccaagtcttcctctcaggagacccgctcacctcgcctgactggatggcgattgcaagccagaagctctacagcactggcacttgcatgggccagacgctcttcttctggcggcctggagatgccgcatggactatgcagctcgagcggccaaacggcagaatcgatagctcagcattccatcaggggaaattctacttcaccgacatcgggtggacccttcacgtctatgatcttgaccgctcccctcccaagcttgtccggagcacgtacctttacagtgctctgcgagagcgccatggatttcggcagttccctggcggtggcaggccggcgtggtatgtggtcgcattcaatggcgagttgctgcttgttgtgatgtaccgtgcgcccaacataaaggctgtcgaagtttaccgcccggattgggcagcggagcgcctggagctgcgggacaaggtcacggatctcggcgagtactcgctcttcttgggccgcggtgatgcgtttgccctctgtgcaaaggacttcactatgatcaggagaaattgtctctactttgtagagcacgatacagtcaagcatcaagattgggctattgtgttagacttggggtcaaatgttttccaacaaattccatatcccggagagcagatggagggcacgggcagaaataatcactggacggcgtattcgtggttctgtctcagaagacccttcttgaagggtgaagcccagtaaggtggtagatcttcactgaccatcttattatatgaaagtaaccgaatcagtattggagcagcaacagagcttcccatgtttgaatgatctaaacaccacaccaacaccagcacgtatgtcttgtcacttcagattattcctcccatgaatccttgttgaatcatggactccaacagcccaattactaaccctttggcatagaagtgttaagagctgatttatactcctagatagcaccattgttgtatctctatttctcttgctactaatataactgtcattatac

SEQ ID NO: 66566 - protein, 390 aa, Triticum aestivum
  peptide (1)..(390): Ceres Seq. ID no. 14313351
ETTHDRPTHPLSTPQKMAGWTSIPAELLAEISGRLPGDADRIHIHQVCSHWRASTSRLAACRPWIIAGREPWSLVGPVGEHSFWLPLGGRRIYLGTPTPAGLPYCCGTPLGWLALMDNLQSPTRFVLWEPLSEAEIFLPCLPAVVQVFLSGDPLTSPDWMAIASQKLYSTGTCMGQTLFFWRPGDAAWTMQLERPNGRIDSSAFHQGKFYFTDIGWTLHVYDLDRSPPKLVRSTYLYSALRERHGFRQFPGGGRPAWYVVAFNGELLLVVMYRAPNIKAVEVYRPDWAAERLELRDKVTDLGEYSLFLGRGDAFALCAKDFTMIRRNCLYFVEHDTVKHQDWAIVLDLGSNVFQQIPYPGEQMEGTGRNNHWTAYSWFCLRRPFLKGEAQ

SEQ ID NO: 66567 - protein, 374 aa, Triticum aestivum
  peptide (1)..(374): Ceres Seq. ID no. 14313352
MAGWTSIPAELLAEISGRLPGDADRIHIHQVCSHWRASTSRLAACRPWIIAGREPWSLVGPVGEHSFWLPLGGRRIYLGTPTPAGLPYCCGTPLGWLALMDNLQSPTRFVLWEPLSEAEIFLPCLPAVVQVFLSGDPLTSPDWMAIASQKLYSTGTCMGQTLFFWRPGDAAWTMQLERPNGRIDSSAFHQGKFYFTDIGWTLHVYDLDRSPPKLVRSTYLYSALRERHGFRQFPGGGRPAWYVVAFNGELLLVVMYRAPNIKAVEVYRPDWAAERLELRDKVTDLGEYSLFLGRGDAFALCAKDFTMIRRNCLYFVEHDTVKHQDWAIVLDLGSNVFQQIPYPGEQMEGTGRNNHWTAYSWFCLRRPFLKGEAQ

SEQ ID NO: 66568 - protein, 275 aa, Triticum aestivum
  peptide (1)..(275): Ceres Seq. ID no. 14313353
MDNLQSPTRFVLWEPLSEAEIFLPCLPAVVQVFLSGDPLTSPDWMAIASQKLYSTGTCMGQTLFFWRPGDAAWTMQLERPNGRIDSSAFHQGKFYFTDIGWTLHVYDLDRSPPKLVRSTYLYSALRERHGFRQFPGGGRPAWYVVAFNGELLLVVMYRAPNIKAVEVYRPDWAAERLELRDKVTDLGEYSLFLGRGDAFALCAKDFTMIRRNCLYFVEHDTVKHQDWAIVLDLGSNVFQQIPYPGEQMEGTGRNNHWTAYSWFCLRRPFLKGEAQ

SEQ ID NO: 66569 - DNA, 1731 bp, Triticum aestivum
  misc_feature (1)..(1731): Ceres Seq. ID no. 14303087
acctcacctcacctcaccgcccgcatatgaaaccccgcgcgcgcgcgcacacgcacgtacggtagataaaaagcaggtagcgccgccgtcacgtcgtgctcgtcatgggcgtcgacgccgcgctgcatggggcggcggcggaggcggcgctgcatggggcgctctcgctgcagccgcacgtggccggcgccttcttcgcgctcgcggcgtgcaccgtggcgctcgccgccctgctggccgtggcgcgcacgcgcccgccgtggtggtgcgactgcgccgtctgcgaggcctacctcacggcgtcctgggccggcgagttcgacaacctctgcgactggtatgcgcacctgctgcgccgctcgccgtcgcagaccgtgcacgtccacgtgctccgcaacgtgctcaccgccaaccccgtcaccgtcgatcacatgctgcgcgcgcgcttcgataactaccccaagggcaagcccttctccgccatcctcgccgacctgctcggccgcgggatcttcaacgtcgacggggacgcgtggctgttccagcggaagctcgccgcggctgagctggcctccccggcgctcagggctttcgcctccggcgtcgtggcctccgagctgcggggccgtctcgttcccctgcttgactctgcatgttcccacgacgacgacgacgacgacgacgacggtggcaaggtgctggacctgcaggacgtcttccgtcgcttcgccttcgactgcatatgcaagatctccttcggcctcgacccgggctgcctcgagctgtccatgccggtatcggcgttcgtggacgcgttcgacacggcgtccatgctctctgcgaggcgcgccaccgcgccgttgcagatcatatggcgcctgaagcggttcttcaacgtcggggacgagagaaagctccgggaatccgtgcgcctcgtcgacgggttcgccgcggaggtcacgcggcaacgacacaagctcggcggcgccgcgtccggcagcgacctcctgtcgcggttcatgggctccatcagcgacgagaagtacctcagggacatcgtcgtcagcttcatgctcgccggccgcgacaccatcgcctcagcgctgaccgccttcttcctgctcctctccgatcacccggaggtcgccgcggccatccgggacgaggtgtcacgcgtcgcgggcgacgacgacaacggccggccgagcttcagcaagctcaaggacatgcactacgtgcacgcggcgctgtacgagagcatgcggctgttcccgccggtgcagttcgactccaagttcgcggcgggcgacgacacgctcccggacggcacggccgtggccaagggcacgcgggtcacctaccacgcctacgccatggggcggatggagtccgtgtggggccccgactgctccgagttccggcccgagcggtggctccgcgacgggcagttcgtcccggtgagcccgtaccggtacccggtgttccaggccggcgtgcgcgtctgcgtcggcaaggacctcgcgctcatggagatgaaggccgtcatcgtcgccgtcgtccggggcttcgacatcgaggcgatcgaccggagctcgcgccggcccaagttcgcgccggggctgacggccacgttcgccggcgggttgccggtcagggttcgccggcgagggcgtccggcgagcgggcacagcccaccaacctgatacggaataaacaactgttggtgccctg

SEQ ID NO: 66570 - protein, 532 aa, Triticum aestivum
  peptide (1)..(532): Ceres Seq. ID no. 14303088
MGVDAALHGAAAEAALHGALSLQPHVAGAFFALAACTVALAALLAVARTRPPWWCDCAVCEAYLTASWAGEFDNLCDWYAHLLRRSPSQTVHVHVLRNVLTANPVTVDHMLRARFDNYPKGKPFSAILADLLGRGIFNVDGDAWLFQRKLAAAELASPALRAFASGVVASELRGRLVPLLDSACSHDDDDDDDDGGKVLDLQDVFRRFAFDCICKISFGLDPGCLELSMPVSAFVDAFDTASMLSARRATAPLQIIWRLKRFFNVGDERKLRESVRLVDGFAAEVTRQRHKLGGAASGSDLLSRFMGSISDEKYLRDIVVSFMLAGRDTIASALTAFFLLLSDHPEVAAAIRDEVSRVAGDDDNGRPSFSKLKDMHYVHAALYESMRLFPPVQFDSKFAAGDDTLPDGTAVAKGTRVTYHAYAMGRMESVWGPDCSEFRPERWLRDGQFVPVSPYRYPVFQAGVRVCVGKDLALMEMKAVIVAVVRGFDIEAIDRSSRRPKFAPGLTATFAGGLPVRVRRRGRPASGHSPPT

SEQ ID NO: 66571 - protein, 423 aa, Triticum aestivum
  peptide (1)..(423): Ceres Seq. ID no. 14303089
MLRARFDNYPKGKPFSAILADLLGRGIFNVDGDAWLFQRKLAAAELASPALRAFASGVVASELRGRLVPLLDSACSHDDDDDDDDGGKVLDLQDVFRRFAFDCICKISFGLDPGCLELSMPVSAFVDAFDTASMLSARRATAPLQIIWRLKRFFNVGDERKLRESVRLVDGFAAEVTRQRHKLGGAASGSDLLSRFMGSISDEKYLRDIVVSFMLAGRDTIASALTAFFLLLSDHPEVAAAIRDEVSRVAGDDDNGRPSFSKLKDMHYVHAALYESMRLFPPVQFDSKFAAGDDTLPDGTAVAKGTRVTYHAYAMGRMESVWGPDCSEFRPERWLRDGQFVPVSPYRYPVFQAGVRVCVGKDLALMEMKAVIVAVVRGFDIEAIDRSSRRPKFAPGLTATFAGGLPVRVRRRGRPASGHSPPT

SEQ ID NO: 66572 - protein, 359 aa, Triticum aestivum
  peptide (1)..(359): Ceres Seq. ID no. 14303090
MFPRRRRRRRRRWQGAGPAGRLPSLRLRLHMQDLLRPRPGLPRAVHAGIGVRGRVRHGVHALCEARHRAVADHMAPEAVLQRRGREKAPGIRAPRRRVRRGGHAATTQARRRRVRQRPPVAVHGLHQRREVPQGHRRQLHARRPRHHRLSADRLLPAPLRSPGGRRGHPGRGVTRRGRRRQRPAELQQAQGHALRARGAVREHAAVPAGAVRLQVRGGRRHAPGRHGRGQGHAGHLPRLRHGADGVRVGPRLLRVPARAVAPRRAVRPGEPVPVPGVPGRRARLRRQGPRAHGDEGRHRRRRPGLRHRGDRPELAPAQVRAGADGHVRRRVAGQGSPARASGERAQPTNLIRNKQLLVP

SEQ ID NO: 66573 - DNA, 1515 bp, Triticum aestivum
  misc_feature (1)..(1515): Ceres Seq. ID no. 14303083
acgaccttccattccacccgagcagccgcgccgcctccccgatagatgaagcttctcccgcgcctctgcatggccaccagcagcgccgccgccgcgggcgacagcgacgccagcagcaacaagctcgcctcggtcgcctccacctcctcctccaccgtctcaacctcctcctccgccgccgcggccgcggtctccgaggcgtcctcctccacgtccctcccttcgctctccaccgccacgtcgaatgccgcctccttcgcccacgtcgccacgctcctccctccgcccacggcggcgtcgacggcagcggccgtcgcggtggtggacgtctcccgcggcttcgtcgtcgccaggccggcgtccgtcgcccttcacgacctcggcaccctcgagccgacgtccacctccgacccgggccacgacaccgcgaccgccggctcggtcaagtgcgtggcgcacgtccacggtggcaaggccgtgacgggccaccaggacgggaggctgcgcctgtggcgggtctcttcgcgcgcgcccgcccggatccgcctcgccgccgcgctccccacggtctccgaccgcctccgccggttcccgctcccgtccaaccacgtcgccgtccgacgccaccaccgccggctctggatagagcatgccgacaccgtgtccggcgtcgccgcgtccacggacggccgcctcctcttctccgtctcctgggacaagacgctcaaggtctgggccatcccgtccctccgctgcttgcagtccttgccggcgcacgacgatgccgtcaacgcggtcgccgtcgcccccgacggcacggtgtacaccggctccgctgacaggcgcgttcgtgtctgggcgcccaggcccgcgtccgacaagaccaccaagcgtcagagcaagaagccggtttactacctggcggccaccctctcccgccacacggcggcggtgaacgccgtggccgtcgggtgcggggggcaggtgctctactccggcggcaacgatcgctgcgtggtggtgtgggagcgggaggacagcgcgagccacatggtcgcgatcggggcgcttcgggggcaccgcaaggcggtgctctccatcgcgagcacggggggcgggctggttgtgagcgggtcggcggatcacacggttcgggcctggcggcgcgagacggacggacgtggccacacgtgcgtcgccgtgatcgacgggcacggcagcgccgtccgttcggtggcggtggctctcgttccgggcaagaagcagctgcaggggggagaagacggcgatgacggcggcgaggaatggagggtgtgcagcgccagctttgacggcgaggtgcgggtctggtcgttgcgggtgacgacgggtttgtagtaggttggatttgctacgatttttgacgttggaaagagtgttttcctgatttttgatctgatcttgatagctgagatagagatacgtacggtcgtgtacatacaggaaagaggtaatttatctacctgtattttttgg

SEQ ID NO: 66574 - protein, 443 aa, Triticum aestivum
  peptide (1)..(443): Ceres Seq. ID no. 14303084
MKLLPRLCMATSSAAAAGDSDASSNKLASVASTSSSTVSTSSSAAAAAVSEASSSTSLPSLSTATSNAASFAHVATLLPPPTAASTAAAVAVVDVSRGFVVARPASVALHDLGTLEPTSTSDPGHDTATAGSVKCVAHVHGGKAVTGHQDGRLRLWRVSSRAPARIRLAAALPTVSDRLRRFPLPSNHVAVRRHHRRLWIEHADTVSGVAASTDGRLLFSVSWDKTLKVWAIPSLRCLQSLPAHDDAVNAVAVAPDGTVYTGSADRRVRVWAPRPASDKTTKRQSKKPVYYLAATLSRHTAAVNAVAVGCGGQVLYSGGNDRCVVVWEREDSASHMVAIGALRGHRKAVLSIASTGGGLVVSGSADHTVRAWRRETDGRGHTCVAVIDGHGSAVRSVAVALVPGKKQLQGGEDGDDGGEEWRVCSASFDGEVRVWSLRVTTGL

SEQ ID NO: 66575 - protein, 435 aa, Triticum aestivum
  peptide (1)..(435): Ceres Seq. ID no. 14303085
MATSSAAAAGDSDASSNKLASVASTSSSTVSTSSSAAAAAVSEASSSTSLPSLSTATSNAASFAHVATLLPPPTAASTAAAVAVVDVSRGFVVARPASVALHDLGTLEPTSTSDPGHDTATAGSVKCVAHVHGGKAVTGHQDGRLRLWRVSSRAPARIRLAAALPTVSDRLRRFPLPSNHVAVRRHHRRLWIEHADTVSGVAASTDGRLLFSVSWDKTLKVWAIPSLRCLQSLPAHDDAVNAVAVAPDGTVYTGSADRRVRVWAPRPASDKTTKRQSKKPVYYLAATLSRHTAAVNAVAVGCGGQVLYSGGNDRCVVVWEREDSASHMVAIGALRGHRKAVLSIASTGGGLVVSGSADHTVRAWRRETDGRGHTCVAVIDGHGSAVRSVAVALVPGKKQLQGGEDGDDGGEEWRVCSASFDGEVRVWSLRVTTGL

SEQ ID NO: 66576 - protein, 278 aa, Triticum aestivum
  peptide (1)..(278): Ceres Seq. ID no. 14303086
DLPFHPSSRAASPIDEASPAPLHGHQQRRRRGRQRRQQQQARLGRLHLLLHRLNLLLRRRGRGLRGVLLHVPPFALHRHVECRLLRPRRHAPPSAHGGVDGSGRRGGGRLPRLRRRQAGVRRPSRPRHPRADVHLRPGPRHRDRRLGQVRGARPRWQGRDGPPGREAAPVAGLFARARPDPPRRRAPHGLRPPPPVPAPVQPRRRPTPPPPALDRACRHRVRRRRVHGRPPPLLRLLGQDAQGLGHPVPPLLAVLAGARRCRQRGRRRPRRHGVHRLR

SEQ ID NO: 66577 - DNA, 1775 bp, Triticum aestivum
  misc_feature (1)..(1775): Ceres Seq. ID no. 13658513
attccgatcagccacacgagtccatcaaggcaccgtccgtccctctctctctcgcccaaacgaagaggaagaagaaaaggggggaaaccgcacgcggcggcggcttccaccgccgaacgcgcccccaaaactaaatccctccaccaaaaccccaatccccatctccatccccatccccatggcgaccggctcgcgtgcgccgcgacgccgccgcccccgctcgccgccgacgctgatcgacgacctcgtgcgcgagatcttcctgagcgtacccgtggacgaccccgtgaccatcgtccgcggcgccgccggctgcaggagctggcgcagcatgctgtccgcccccgacttcgcccgcgactaccgcagggcccgcagtgcgtcgcccgtgctgggcttcctccacaacaccaccagcgaaccggaggatcgcttcgcctcctcccacttcgtccccaccgcggccttccgcttccgccccccggcgtacgaggacctctcccgctgggacgtcctcgactcccgccatggcctcgccctcctccacgcccccaagagcaagaggaacaagggcttcgttgcctgcgacctcgtcaccggccagcggtgggaattcggcgamcccgagtgccacaacgtcatgtggtggccgcacggcgatcacatggacaagcgcwtacgctgtagtgccacggtgctctgcgccaaggcccgatgtgaccagctcgactgccatggcgatggcggccctttccgcgtggccttggtgggcaccgactatagaaacttgagatcctacgccaccgtctactcatcagagactcgtgagtggagggacaccatctctgttcacaacctggaatttcgtcaatggcagggggaacagtgctgttgtgggaaataaggtctatgtccaatgtgtagagagtgacaaagtcgtggagtacaacatgcatgagcaaaaactagcwttmwyvtgatcaccctgccatttgaggaccaggaggggatcgacgagagcattgacctcatgggggtggacgacggcagtctgctctttgcatccgtgctgaaggctaaactctgcctatggactatggaggctggtcccggcggagctgcggggtgggcgcgacgctgggctatcgagctcaaaccatcgctccctgctcgtttcctcacagacaaggcaaatatgctggttggctttgctgaaggtgttggtgtcatcttcctgagtacaagggcggggctgtacgcaattgagctcaattcaggcaaaggcaacagggttcacaaagggttttttgataagatcataccctacaggagcttctgcactagagcaataggggggttggccgacctcgcacgcgcagttagccggcgtacaggagcttctgtactagagcaatagggcggttgcccggcctctgatgaagcttcacgcgcagttgttggtgctagaaggatataactaaatggcgtcaggaccttggtttactgttttgcggcccaggaagaatttgaagtgaacttgagcctcatttgctgctggttgtgttgaatagtctggttagggtggatgcgcttttgttccatttctgcttgtgcgaaaaacttgaatcctttcgtccgagttgggtgcaacgcaaactgactgcgaggagaaattttggtgatccgttgacggttttgtggcatgaattgttgcaaatttcttcttccctatctctggctgatagagatgatattattgccttgaaaatgcactg

SEQ ID NO: 66578 - protein, 300 aa, Triticum aestivum
  peptide (1)..(300): Ceres Seq. ID no. 15220644
  misc_feature (207)..(207): Xaa is any aa, unknown or other
  misc_feature (226)..(226): Xaa is any aa, unknown or other
FRSATRVHQGTVRPSLSRPNEEEEEKGGNRTRRRLPPPNAPPKLNPSTKTPIPISIPIPMATGSRAPRRRRPRSPPTLIDDLVREIFLSVPVDDPVTIVRGAAGCRSWRSMLSAPDFARDYRRARSASPVLGFLHNTTSEPEDRFASSHFVPTAAFRFRPPAYEDLSRWDVLDSRHGLALLHAPKSKRNKGFVACDLVTGQRWEFGXPECHNVMWWPHGDHMDKRXRCSATVLCAKARCDQLDCHGDGGPFRVALVGTDYRNLRSYATVYSSETREWRDTISVHNLEFRQWQGEQCCCGK

SEQ ID NO: 66579 - protein, 241 aa, Triticum aestivum
  peptide (1)..(241): Ceres Seq. ID no. 15220645
  misc_feature (148)..(148): Xaa is any aa, unknown or other
  misc_feature (167)..(167): Xaa is any aa, unknown or other
MATGSRAPRRRRPRSPPTLIDDLVREIFLSVPVDDPVTIVRGAAGCRSWRSMLSAPDFARDYRRARSASPVLGFLHNTTSEPEDRFASSHFVPTAAFRFRPPAYEDLSRWDVLDSRHGLALLHAPKSKRNKGFVACDLVTGQRWEFGXPECHNVMWWPHGDHMDKRXRCSATVLCAKARCDQLDCHGDGGPFRVALVGTDYRNLRSYATVYSSETREWRDTISVHNLEFRQWQGEQCCCGK

SEQ ID NO: 66580 - protein, 228 aa, Triticum aestivum
  peptide (1)..(228): Ceres Seq. ID no. 15220646
  misc_feature (208)..(208): Xaa is any aa, unknown or other
  misc_feature (226)..(226): Xaa is any aa, unknown or other
IPISHTSPSRHRPSLSLSPKRRGRRKGGKPHAAAASTAERAPKTKSLHQNPNPHLHPHPHGDRLACAATPPPPLAADADRRPRARDLPERTRGRPRDHRPRRRRLQELAQHAVRPRLRPRLPQGPQCVARAGLPPQHHQRTGGSLRLLPLRPHRGLPLPPPGVRGPLPLGRPRLPPWPRPPPRPQEQEEQGLRCLRPRHRPAVGIRRXRVPQRHVVAARRSHGQAXTL

SEQ ID NO: 66581 - DNA, 1778 bp, Triticum aestivum
  misc_feature (1)..(1778): Ceres Seq. ID no. 13590394
aatttcctcttcgtgggcgccgcctcctcctcctcccccattctcctcctaaagccctaactaaacccatcccccctcctcgcgccgccgccgccgcaatggccgccgccgcagtgctccggggcggctcccgccgcgtcctcgcctacccggccctccgcgccgccgtgatctccggccccgccgcgctccccgacgtgcccgcggccgccgggccccagccgccgccgccctcgccgctggccgctggcctatgggcgaggtccatggccaccttcacccgcacgaagccccacgtcaacgtcggcaccatcggccacgtcgaccacggcaagaccacgctcaccgccgccatcaccaaggtgctggcggaggctgggagcgccaaggcggtggcgttcgacgagatcgacaaggctcccgaggagaaagccagaggaatcaccatctccacggctcatgtcgagtatgagaccgctaagaggcactatgctcacgtggactgtccagggcacgccgattatgtcaagaacatgatcactggtgctgctcaaatggatggtggtattcttgttgtgtcagctcctgatggccccatgccacaaactaaggagcatattcttctagctcgacaggttggtgtgccatcacttgtttgtttcttaaacaaagttgatgctgttgaagatgaagagctactagaacttgtggagatggagcttcgagagctcctcagtttctacaagttcccaggcgatgatattcctatcatccgtggatctgccttgtcagccttgaatggaacaaatgaggagattggaaagaatgctattttgaaactgatggatgccgtcgattcttacatccccgatcctgtgagggtgcttgataagtctttcttgatgccaattgaaggcattttctcaatccagggtcgtggtactgttgtgactggacgtattgaacagggggtaattaaaactggtgaggatgttgaggtcataggtttgacggagagtggtcctgtgaagactacagttactggtgttgagatgttcaaaaagatgatggatcatggagaggctggtgacaatgttggtcttcttctccgtggtcttaagcgtggtgatgtcgagcgtggccaggtggtttgcaaacccggtactgtgaagacctacaaaaagtttgaggcggaaatttacgtccttaccaaggatgaaggtggtcgccacactgcattcttctcgaattacagcccacaattctacttcaggacagctgatatctgtgggaaaatcgagttgcctccggacgtgaagatggttatgcctggtgacaacgtaaccgcaatctttgagttgatgttgcctgttccgctcgaaccaggtctaagattcgcgctgagggaaggagggaggaccgtcggcgccggagttgtcgccaaagtcatgagctaataacaataatatgttccagacctttctctttttttggcgtagtgaattttagcgaacaaatgaatgttgatatgaaggatttgtccgaccggaaacacgagataaacgagagtcgagagcaaggggactggcatggatgcatcttgtgtggatgcattcagccaaccaacttcctacggataatggtttgttaccattccgaagaattgctattttttcttctcatgttgggtagtttgctgtatcataccgcagcttgttacctagacacgcttctctggcatatattagctcggtgattcaataagaccgtcttgtttc

SEQ ID NO: 66582 - protein, 484 aa, Triticum aestivum
  peptide (1)..(484): Ceres Seq. ID no. 15220964
FPLRGRRLLLLPHSPPKALTKPIPPPRAAAAAMAAAAVLRGGSRRVLAYPALRAAVISGPAALPDVPAAAGPQPPPPSPLAAGLWARSMATFTRTKPHVNVGTIGHVDHGKTTLTAAITKVLAEAGSAKAVAFDEIDKAPEEKARGITISTAHVEYETAKRHYAHVDCPGHADYVKNMITGAAQMDGGILVVSAPDGPMPQTKEHILLARQVGVPSLVCFLNKVDAVEDEELLELVEMELRELLSFYKFPGDDIPIIRGSALSALNGTNEEIGKNAILKLMDAVDSYIPDPVRVLDKSFLMPIEGIFSIQGRGTVVTGRIEQGVIKTGEDVEVIGLTESGPVKTTVTGVEMFKKMMDHGEAGDNVGLLLRGLKRGDVERGQVVCKPGTVKTYKKFEAEIYVLTKDEGGRHTAFFSNYSPQFYFRTADICGKIELPPDVKMVMPGDNVTAIFELMLPVPLEPGLRFALREGGRTVGAGVVAKVMS

SEQ ID NO: 66583 - protein, 452 aa, Triticum aestivum
  peptide (1)..(452): Ceres Seq. ID no. 15220965
MAAAAVLRGGSRRVLAYPALRAAVISGPAALPDVPAAAGPQPPPPSPLAAGLWARSMATFTRTKPHVNVGTIGHVDHGKTTLTAAITKVLAEAGSAKAVAFDEIDKAPEEKARGITISTAHVEYETAKRHYAHVDCPGHADYVKNMITGAAQMDGGILVVSAPDGPMPQTKEHILLARQVGVPSLVCFLNKVDAVEDEELLELVEMELRELLSFYKFPGDDIPIIRGSALSALNGTNEEIGKNAILKLMDAVDSYIPDPVRVLDKSFLMPIEGIFSIQGRGTVVTGRIEQGVIKTGEDVEVIGLTESGPVKTTVTGVEMFKKMMDHGEAGDNVGLLLRGLKRGDVERGQVVCKPGTVKTYKKFEAEIYVLTKDEGGRHTAFFSNYSPQFYFRTADICGKIELPPDVKMVMPGDNVTAIFELMLPVPLEPGLRFALREGGRTVGAGVVAKVMS

SEQ ID NO: 66584 - protein, 396 aa, Triticum aestivum
  peptide (1)..(396): Ceres Seq. ID no. 15220966
MATFTRTKPHVNVGTIGHVDHGKTTLTAAITKVLAEAGSAKAVAFDEIDKAPEEKARGITISTAHVEYETAKRHYAHVDCPGHADYVKNMITGAAQMDGGILVVSAPDGPMPQTKEHILLARQVGVPSLVCFLNKVDAVEDEELLELVEMELRELLSFYKFPGDDIPIIRGSALSALNGTNEEIGKNAILKLMDAVDSYIPDPVRVLDKSFLMPIEGIFSIQGRGTVVTGRIEQGVIKTGEDVEVIGLTESGPVKTTVTGVEMFKKMMDHGEAGDNVGLLLRGLKRGDVERGQVVCKPGTVKTYKKFEAEIYVLTKDEGGRHTAFFSNYSPQFYFRTADICGKIELPPDVKMVMPGDNVTAIFELMLPVPLEPGLRFALREGGRTVGAGVVAKVMS

SEQ ID NO: 66585 - DNA, 1762 bp, Triticum aestivum
  misc_feature (1)..(1762): Ceres Seq. ID no. 14302071
attttgtcctgtctccctatattcccagtgtctcgctgctcgttcccatatatgcacgcacctcgcgcgtggtcaccgtgtgaagtgcctctgccagagtgccggctaccaaccccgttgccccccggaagtggaacctaggataccgcggcagccgtcgatttcatggcgccggaagaagcaagcacggccaccaccggtggcccgcgccgccgccgcgtgctagtcttccctatcccgtaccagggccacatcaaccccatgttccagctcgccggcctcctccaagaccgcggctttgccgtcaccgtcttccacacccacttcaacgcccccgacccgtcccgccaccccgcctacggcttcgtccccgtccccgacggcttgccggcgggcagccccggcacggtggcggcgaccgtcgagcacatcttcgccatcaacggctcctgcgaggcgccgttccgggagcgcctggccgccctgctggaggctcctggcggcagggacgaggtcgcgtgcctggtcgcggacgcgcacctgctgaccctcatggacgtggcgcggcagcaaggcgtgccgacgctggcgctgcgcaccggcagcgccgcctgcttccgcaacttcatggccaccccgatgctctgcgacaagggctaccttccggtgagcgcggagtcgcagctggacgcgccggtgagggagctgccgccgtaccgcgtccgggacctgatggccgtcaccagcagccgccacgagcacgatctggtgtgcaagctgctggcccgggccgtcgaggcagtgagcacctcggctggattcatactcaacaccttcgacgcgctggaggccgacgacctggcggcgacccggcgggacctcgccggcgtgccggtgttcgaggtcggcccgctccacaagatctccccggcgtcgtccagcagcctcctgccgcaggaccgctcctgcctggactggctggacgcgcaagccccggcgtccgtgctgtacatcagcttcggcagcctggcgagcatgagcggcgaggacctggccgaggcggcgtggggcgtcgccaacagcaggcagccgttcctgtgggcgctccggccgggcctcgcccgcggcgccgccctgcccgacgggttcggcgcggagaccgaaggccgtggactggtcgtgggctgggcgccgcaggaggaggtgctggcgcacggcgccgtgggcgggttctggacgcacggcgggtggaactcggcgctggagggcgcgtgcgggggcgtgccgatgctctgccggccctgcttcggcgaccagatgggcaacgcgaggtacgtggagcacgtgtggcgcgcgggcatcgcgctggacggcggcgtgctcgagcggggagcggtggagcgggccgtccggaggctcatgcggagcgaggagggggaggagatgagggggcgagcccgggagctcgggagcagagcggcggaggccatcgccgagggtgggtcgtctcgccacagtgtcgacaagctggtgaaccacatcatgtcgctgtggaagtgagttccgagtactgccagtagaccgatgcttgcattttgtcctctttaaaatgtttggatcttttcatgactatataagacttcattgaaatcaccggcacaaaaccatggaagttttatttgttgatcaagtgtcctcaaaagcttccatgttttatcccttttttccaacgcaggctcaccatatatgcccgtgaatctcc

SEQ ID NO: 66586 - protein, 464 aa, Triticum aestivum
  peptide (1)..(464): Ceres Seq. ID no. 14302072
MAPEEASTATTGGPRRRRVLVFPIPYQGHINPMFQLAGLLQDRGFAVTVFHTHFNAPDPSRHPAYGFVPVPDGLPAGSPGTVAATVEHIFAINGSCEAPFRERLAALLEAPGGRDEVACLVADAHLLTLMDVARQQGVPTLALRTGSAACFRNFMATPMLCDKGYLPVSAESQLDAPVRELPPYRVRDLMAVTSSRHEHDLVCKLLARAVEAVSTSAGFILNTFDALEADDLAATRRDLAGVPVFEVGPLHKISPASSSSLLPQDRSCLDWLDAQAPASVLYISFGSLASMSGEDLAEAAWGVANSRQPFLWALRPGLARGAALPDGFGAETEGRGLVVGWAPQEEVLAHGAVGGFWTHGGWNSALEGACGGVPMLCRPCFGDQMGNARYVEHVWRAGIALDGGVLERGAVERAVRRLMRSEEGEEMRGRARELGSRAAEAIAEGGSSRHSVDKLVNHIMSLWK

SEQ ID NO: 66587 - protein, 432 aa, Triticum aestivum
  peptide (1)..(432): Ceres Seq. ID no. 14302073
MFQLAGLLQDRGFAVTVFHTHFNAPDPSRHPAYGFVPVPDGLPAGSPGTVAATVEHIFAINGSCEAPFRERLAALLEAPGGRDEVACLVADAHLLTLMDVARQQGVPTLALRTGSAACFRNFMATPMLCDKGYLPVSAESQLDAPVRELPPYRVRDLMAVTSSRHEHDLVCKLLARAVEAVSTSAGFILNTFDALEADDLAATRRDLAGVPVFEVGPLHKISPASSSSLLPQDRSCLDWLDAQAPASVLYISFGSLASMSGEDLAEAAWGVANSRQPFLWALRPGLARGAALPDGFGAETEGRGLVVGWAPQEEVLAHGAVGGFWTHGGWNSALEGACGGVPMLCRPCFGDQMGNARYVEHVWRAGIALDGGVLERGAVERAVRRLMRSEEGEEMRGRARELGSRAAEAIAEGGSSRHSVDKLVNHIMSLWK

SEQ ID NO: 66588 - protein, 335 aa, Triticum aestivum
  peptide (1)..(335): Ceres Seq. ID no. 14302074
MDVARQQGVPTLALRTGSAACFRNFMATPMLCDKGYLPVSAESQLDAPVRELPPYRVRDLMAVTSSRHEHDLVCKLLARAVEAVSTSAGFILNTFDALEADDLAATRRDLAGVPVFEVGPLHKISPASSSSLLPQDRSCLDWLDAQAPASVLYISFGSLASMSGEDLAEAAWGVANSRQPFLWALRPGLARGAALPDGFGAETEGRGLVVGWAPQEEVLAHGAVGGFWTHGGWNSALEGACGGVPMLCRPCFGDQMGNARYVEHVWRAGIALDGGVLERGAVERAVRRLMRSEEGEEMRGRARELGSRAAEAIAEGGSSRHSVDKLVNHIMSLWK

SEQ ID NO: 66589 - DNA, 1773 bp, Triticum aestivum
  misc_feature (1)..(1773): Ceres Seq. ID no. 14303105
cttccacgcgcttgtctgccggccgaatcgattccaagtccaactctgagctgttccccatcgccattttccgtctccatttctccccaccttccccgacccccaaatccccacgcgaatccgcccccgccgccatggcctccccgccgggcgccgcccgcctcgccgccctgctgctcctcgcgctcctcgccgggcccgccgcgtcccgcttcgccccggcggacaaccacctcatcgcctgcggcgcgacggccccggccgtcctccccgacggccgccgcttcgtcccggactccggctgcgcgtccatgaccctccgctccgcggcccccgccctcccgtccgccgcccccgctgcgcccgcgcacgagccgccctcccctctccacgccgccgcgcgcgtcttctcctgccacgcctcctacgacctcgccgtgcgccgccgcgggcgccacgtcctgcgcctccacttctaccccttcagccccgccctcgcctccgcgcgcttccacgtcggcgccgggggcttcctcctcctccacaacttcaccgcctcgtcccccgtcgtcaaggacttcctgctccccgtcgacgccgacgtcctcgtcctcaccttcgtccccgaggccggatccgccgccttcgtcaacgccatcgagctcttctcggcgcccgaggagctcgtcggcgacatcgccaccctcgtcgccgctgacggcgtcaaccgcaccgacgggctctcctcgcaggtcttcgagacgctctaccgggtcaacgtcgccggccgcaaggtcaccccgttcaacgacacgctgtggcggacatgggtcaacgacgagggcttcctcgtcaacaaggaatcatccagcagcaaggcatggtcattcggtggccggattgcttaccccaaggacagcaggttgatgacccgagaggtggctccggacaacgtctacaactcggcgaggtcggtgaggtcagacggcaatctgacatggggtttccctgtgcccgctcgcaaccggtacctcgtgcgcatgcacttctgtgacattgtgagcaaggcactgtatcagctctacttcagtatctatgtcaatggtcatctcgcagtgaaggattttgacatttccagcaccactggatacttggcctatccgtattacatcgactatgttgtggacgttgaggatgaagggatgctgaaactggccattggtggctccaagatgagccagcctggagaagcgagtggtttcctgaatgggctcgagataatgaggatgaacaaaacgggtggcggcatggacggggatttccctgttgttctggacatggggtacctggtcagtaaggggtttggggaattcgctcgctcactgctgtgtggtttagtcttcgccgggctgtttttggttttggtcatgctggtgctgaggttgaggaccgagctgaaaaacaatggaacgctttggttcagccagtcagtggattctggtgaggggaagttggctaaagcatatcagcttgtgcccaccaagacagactattaagcagcatgagatctgagaagcttcaacttgtgtctgttatctgtatcccatggcctaatcttgtgcttcgtttgtaagtattgtagttttctagttctacatttctatgcctttcatggttgaagtttcaattgtttgagcttggccagtgcagagcacaactattgtgtgtacttaagaattaagacgtgtttgtattgctactacttcgctaaat

SEQ ID NO: 66590 - protein, 517 aa, Triticum aestivum
  peptide (1)..(517): Ceres Seq. ID no. 14303106
STRLSAGRIDSKSNSELFPIAIFRLHFSPPSPTPKSPRESAPAAMASPPGAARLAALLLLALLAGPAASRFAPADNHLIACGATAPAVLPDGRRFVPDSGCASMTLRSAAPALPSAAPAAPAHEPPSPLHAAARVFSCHASYDLAVRRRGRHVLRLHFYPFSPALASARFHVGAGGFLLLHNFTASSPVVKDFLLPVDADVLVLTFVPEAGSAAFVNAIELFSAPEELVGDIATLVAADGVNRTDGLSSQVFETLYRVNVAGRKVTPFNDTLWRTWVNDEGFLVNKESSSSKAWSFGGRIAYPKDSRLMTREVAPDNVYNSARSVRSDGNLTWGFPVPARNRYLVRMHFCDIVSKALYQLYFSIYVNGHLAVKDFDISSTTGYLAYPYYIDYVVDVEDEGMLKLAIGGSKMSQPGEASGFLNGLEIMRMNKTGGGMDGDFPVVLDMGYLVSKGFGEFARSLLCGLVFAGLFLVLVMLVLRLRTELKNNGTLWFSQSVDSGEGKLAKAYQLVPTKTDY

SEQ ID NO: 66591 - protein, 473 aa, Triticum aestivum
  peptide (1)..(473): Ceres Seq. ID no. 14303107
MASPPGAARLAALLLLALLAGPAASRFAPADNHLIACGATAPAVLPDGRRFVPDSGCASMTLRSAAPALPSAAPAAPAHEPPSPLHAAARVFSCHASYDLAVRRRGRHVLRLHFYPFSPALASARFHVGAGGFLLLHNFTASSPVVKDFLLPVDADVLVLTFVPEAGSAAFVNAIELFSAPEELVGDIATLVAADGVNRTDGLSSQVFETLYRVNVAGRKVTPFNDTLWRTWVNDEGFLVNKESSSSKAWSFGGRIAYPKDSRLMTREVAPDNVYNSARSVRSDGNLTWGFPVPARNRYLVRMHFCDIVSKALYQLYFSIYVNGHLAVKDFDISSTTGYLAYPYYIDYVVDVEDEGMLKLAIGGSKMSQPGEASGFLNGLEIMRMNKTGGGMDGDFPVVLDMGYLVSKGFGEFARSLLCGLVFAGLFLVLVMLVLRLRTELKNNGTLWFSQSVDSGEGKLAKAYQLVPTKTDY

SEQ ID NO: 66592 - protein, 414 aa, Triticum aestivum
  peptide (1)..(414): Ceres Seq. ID no. 14303108
MTLRSAAPALPSAAPAAPAHEPPSPLHAAARVFSCHASYDLAVRRRGRHVLRLHFYPFSPALASARFHVGAGGFLLLHNFTASSPVVKDFLLPVDADVLVLTFVPEAGSAAFVNAIELFSAPEELVGDIATLVAADGVNRTDGLSSQVFETLYRVNVAGRKVTPFNDTLWRTWVNDEGFLVNKESSSSKAWSFGGRIAYPKDSRLMTREVAPDNVYNSARSVRSDGNLTWGFPVPARNRYLVRMHFCDIVSKALYQLYFSIYVNGHLAVKDFDISSTTGYLAYPYYIDYVVDVEDEGMLKLAIGGSKMSQPGEASGFLNGLEIMRMNKTGGGMDGDFPVVLDMGYLVSKGFGEFARSLLCGLVFAGLFLVLVMLVLRLRTELKNNGTLWFSQSVDSGEGKLAKAYQLVPTKTDY

SEQ ID NO: 66593 - DNA, 949 bp, Triticum aestivum
  misc_feature (1)..(949): Ceres Seq. ID no. 15179836
aattagtcttgcaggagcaagagcgatgtctccgactgatccccgcctcctcttcatcctgtttgtcgtctttgccccggttccggccagggcggtcgacccgaccgtattggccacttttgcgggcatggggatccgcgtctccaccatggagttcgtcatcgacctggacgacctcaacatgaggcaggacatgctgataaccgtggcgacggcgagaagcatgaagagcgtcgagggactaaaggtggcgctcaagcagaccgacatcacggagctgccgacggaagtagtcctcctcaacttggtggtgccggagcggggctcctgcacgctggcgattcgagctgacaatttttatctgttagcatacacaaatgaccgtttggagtggcaggcattcctcgggagggagcacctggttccgacatcgaccccgctcccgttcacgtcggagtacaacgaaagaggcatggggccccgcaccggcctcgcggcgctccagctgagcagggcggccgtgatcgcggcggtcaacacactgctctcctcccgtcggggcgacacgggcgaccaaggccccctcaagcgcgcgctggccacgatcacgctagtcttctgcgaaggctccaggttccgcttcgtccgcgaccgggtcagagcaggctgggagaccgggagccagatcacgaaggatgaggcgctgagggtgacactctgggcaaagatcagctgcgccctcgccaagggctggaccgggggggcgacagccaggctcgcagaaagaggtggcttcccaaatactctcgagggtgccaagtcttttctgctggtactagtttacggcacgaaatgcttgagcgtcatggacgctctccctgtaacctaatctgtggctgcacctttgtttcgccaatgaataataaagaataaaggatggctccgtttc

SEQ ID NO: 66594 - protein, 287 aa, Triticum aestivum
  peptide (1)..(287): Ceres Seq. ID no. 15179837
MSPTDPRLLFILFVVFAPVPARAVDPTVLATFAGMGIRVSTMEFVIDLDDLNMRQDMLITVATARSMKSVEGLKVALKQTDITELPTEVVLLNLVVPERGSCTLAIRADNFYLLAYTNDRLEWQAFLGREHLVPTSTPLPFTSEYNERGMGPRTGLAALQLSRAAVIAAVNTLLSSRRGDTGDQGPLKRALATITLVFCEGSRFRFVRDRVRAGWETGSQITKDEALRVTLWAKISCALAKGWTGGATARLAERGGFPNTLEGAKSFLLVLVYGTKCLSVMDALPVT

SEQ ID NO: 66595 - protein, 253 aa, Triticum aestivum
  peptide (1)..(253): Ceres Seq. ID no. 15179838
MGIRVSTMEFVIDLDDLNMRQDMLITVATARSMKSVEGLKVALKQTDITELPTEVVLLNLVVPERGSCTLAIRADNFYLLAYTNDRLEWQAFLGREHLVPTSTPLPFTSEYNERGMGPRTGLAALQLSRAAVIAAVNTLLSSRRGDTGDQGPLKRALATITLVFCEGSRFRFVRDRVRAGWETGSQITKDEALRVTLWAKISCALAKGWTGGATARLAERGGFPNTLEGAKSFLLVLVYGTKCLSVMDALPVT

SEQ ID NO: 66596 - protein, 295 aa, Triticum aestivum
  peptide (1)..(295): Ceres Seq. ID no. 15179839
ISLAGARAMSPTDPRLLFILFVVFAPVPARAVDPTVLATFAGMGIRVSTMEFVIDLDDLNMRQDMLITVATARSMKSVEGLKVALKQTDITELPTEVVLLNLVVPERGSCTLAIRADNFYLLAYTNDRLEWQAFLGREHLVPTSTPLPFTSEYNERGMGPRTGLAALQLSRAAVIAAVNTLLSSRRGDTGDQGPLKRALATITLVFCEGSRFRFVRDRVRAGWETGSQITKDEALRVTLWAKISCALAKGWTGGATARLAERGGFPNTLEGAKSFLLVLVYGTKCLSVMDALPVT

SEQ ID NO: 66597 - DNA, 1003 bp, Triticum aestivum
  misc_feature (1)..(1003): Ceres Seq. ID no. 12784040
agaaacaaccccaagcggcagccgaagaactcagaacctccgagagagacgacccaactcagaattcgcaagcctcgcttactcgccggagcagcccacgcaccagatggccgcggcaatggaggtcgacgccggcggagagaagccgtcggagaaggagctcttcctcgccgcggagtccggggacgccagcgtcttcgcctccctcgcccccgccgacctcgccgccgctctctccctccgcaacgaggacggccgctccctcgtccacgtcgccgccgcctccgcccgccccgaggccgtcgccgcgcttgtggctgcggggggcgacgccgtggcgagcgccgtgaacgggaaggacgaggaagggtgggcgccgattcactcggtggccagcagcggcaacgccgagatcctcgacatcctgctcggtcacggtgcaaatgttgatttgactactgatgctggccgaactgctcttcactatgctgctagtaaagggaggcttaacattgctgaaacgctgatagctcatcgtgcaaatgtcaacaagaaagataagtttggctgcacacccctgcatagagctgcaagtactggaaatgctgagctgtgtgaatacctgcttgaagaaggcgcagatattgatgcagttgacaagctaggacaatcacctctaatgcatgccgtcatatgcgaggacagaggggttgcccttctgctgatcagacatggtgccgatgttgacattgaagacaaggagggctacactgtccttggccgagcctctgatagcttcaggcctgcactgattgatgcggccaaggcaatgctcgaaggctgaggatgtttagctgccctaaggtaaaagatagatgggagaacatctggaacagaaaaaccgtcgttgtgtacctcgtgatacaagtatgagctgtttccctccaaaatcagattgaccagtcagactttttgttcgtggttaatgattctcgtgttgaag

SEQ ID NO: 66598 - protein, 280 aa, Triticum aestivum
  peptide (1)..(280): Ceres Seq. ID no. 12784041
ETTPSGSRRTQNLRERRPNSEFASLAYSPEQPTHQMAAAMEVDAGGEKPSEKELFLAAESGDASVFASLAPADLAAALSLRNEDGRSLVHVAAASARPEAVAALVAAGGDAVASAVNGKDEEGWAPIHSVASSGNAEILDILLGHGANVDLTTDAGRTALHYAASKGRLNIAETLIAHRANVNKKDKFGCTPLHRAASTGNAELCEYLLEEGADIDAVDKLGQSPLMHAVICEDRGVALLLIRHGADVDIEDKEGYTVLGRASDSFRPALIDAAKAMLEG

SEQ ID NO: 66599 - protein, 245 aa, Triticum aestivum
  peptide (1)..(245): Ceres Seq. ID no. 12784042
MAAAMEVDAGGEKPSEKELFLAAESGDASVFASLAPADLAAALSLRNEDGRSLVHVAAASARPEAVAALVAAGGDAVASAVNGKDEEGWAPIHSVASSGNAEILDILLGHGANVDLTTDAGRTALHYAASKGRLNIAETLIAHRANVNKKDKFGCTPLHRAASTGNAELCEYLLEEGADIDAVDKLGQSPLMHAVICEDRGVALLLIRHGADVDIEDKEGYTVLGRASDSFRPALIDAAKAMLEG

SEQ ID NO: 66600 - protein, 241 aa, Triticum aestivum
  peptide (1)..(241): Ceres Seq. ID no. 12784043
MEVDAGGEKPSEKELFLAAESGDASVFASLAPADLAAALSLRNEDGRSLVHVAAASARPEAVAALVAAGGDAVASAVNGKDEEGWAPIHSVASSGNAEILDILLGHGANVDLTTDAGRTALHYAASKGRLNIAETLIAHRANVNKKDKFGCTPLHRAASTGNAELCEYLLEEGADIDAVDKLGQSPLMHAVICEDRGVALLLIRHGADVDIEDKEGYTVLGRASDSFRPALIDAAKAMLEG

SEQ ID NO: 66601 - DNA, 841 bp, Triticum aestivum
  misc_feature (1)..(841): Ceres Seq. ID no. 13663461
accgcccagcccagcccagacgccgaccgacgccgctcgcgctcccgtctctcggcgatcctacctcctccgacgaccggctgcaaccccggccgccctcgccgccagatccgcgcggccacgcccacccgcctcgctcctcctctcgggcctcggcagatctacgcgggccgcgaccgtccctagccatgattaatttcgtgctcctaatcagccgccagggcaaggtgaggctcaccaagtggtactcgccttacacccagaaggagaggactaaggtcatccgtgagcttagtgggctcattcttactcgagggccaaaactctgcaactttgtcgagtggagaggttacaaggttgtgtacagaaggtatgccagcctctatttctgcatgtgtatcgatgctgatgataatgagctcgaagtccttgaaattatccatcattttgttgagatactggaccgttatttcggcagtgtatgcgagctggatttgatattcaatttccacaaggcgtactacgtactggatgagattctcatttctggtgagcttcaggaatctagcaagaagaatgttgcaagacttattgctgcacaggattcgttggtagaggctgctaaagaggaagctggctccatcagtaacatcattgcccaggctacgaagtaaaagtccgcgtctgatgatgccccgctgctctttggtttatgcatatgttggtaaatttgatgtaatagctcctttgctgtatccattttcccaaagaaatacgacttcccggattcaggcctgttcagaatgagtgatatgtaactacaatgcatgtgttcctttgc

SEQ ID NO: 66602 - protein, 223 aa, Triticum aestivum
  peptide (1)..(223): Ceres Seq. ID no. 13663462
RPAQPRRRPTPLALPSLGDPTSSDDRLQPRPPSPPDPRGHAHPPRSSSRASADLRGPRPSLAMINFVLLISRQGKVRLTKWYSPYTQKERTKVIRELSGLILTRGPKLCNFVEWRGYKVVYRRYASLYFCMCIDADDNELEVLEIIHHFVEILDRYFGSVCELDLIFNFHKAYYVLDEILISGELQESSKKNVARLIAAQDSLVEAAKEEAGSISNIIAQATK

SEQ ID NO: 66603 - protein, 161 aa, Triticum aestivum; identical to SEQ ID NO: 56184
  peptide (1)..(161): Ceres Seq. ID no. 13663463

SEQ ID NO: 66604 - DNA, 1031 bp, Triticum aestivum
  misc_feature (1)..(1031): Ceres Seq. ID no. 13658873
aacggcgacgagcgaatcgcgtgaatgagatgagatgggactgggagacgccggcgacggaagcggaggcggaggcgttgcaggagcgcatctgggacctccacgacaagctcagccacgccatcctcgccctctccgcctgcgccggccttccggcctgccgctgccggggcgcccccaacggccacgtaatcctcaaggggcagcggccgccgcaggggggagggcacgtcgaccttgccgcggcggcggcggccatggcggacgcgcggggcctgcacgccatccgcaccgcgctcgaggaccttgagggccacctccacttccttcgcgatgttcagtcacaacagcgtgccgatcgagatgccgcgattgctagggtgcagcaaagtcgtattctccttgctgcaaggttggctgaacatagaggaaaggggcatggagtcattgaggaagccttgggttttgtgggtgatgtgcgtgacaagagccattttgtctcgcccgaagatgtgtatgggatgcacagccaatcaggggaagatgaggaggatcgcagggggcatggttcaaacatggtggtgcgtgtggtatcctgcagttttgctttagccaagaacattttaagattcgagacgatgggtagtgtgctgggtaatgctactgtgtttgcagtaagtatgctcacattcttgcagcttcatcaattggcctctggtaaacaaatgccagcggtccagtataggagaaccgacaatgtttctctctctggagggtcaagaaaagacactaaaggaaagcatctggaagtgttattagctagaggttgagcaatcatcagatacaggaagctttgttctcctttgagttttggtcggttttgttaggtcactaggcactagccattgcattcttttggatggggctggtctacagtctaccttcatcgttagaagctgtaccacacaggatgtaaatggtttgagattagcaatagatgcactggaagaatctgcaagtcggttcccttt

SEQ ID NO: 66605 - protein, 275 aa, Triticum aestivum
  peptide (1)..(275): Ceres Seq. ID no. 13658874
RRRANRVNEMRWDWETPATEAEAEALQERIWDLHDKLSHAILALSACAGLPACRCRGAPNGHVILKGQRPPQGGGHVDLAAAAAAMADARGLHAIRTALEDLEGHLHFLRDVQSQQRADRDAAIARVQQSRILLAARLAEHRGKGHGVIEEALGFVGDVRDKSHFVSPEDVYGMHSQSGEDEEDRRGHGSNMVVRVVSCSFALAKNILRFETMGSVLGNATVFAVSMLTFLQLHQLASGKQMPAVQYRRTDNVSLSGGSRKDTKGKHLEVLLARG

SEQ ID NO: 66606 - protein, 266 aa, Triticum aestivum
  peptide (1)..(266): Ceres Seq. ID no. 13658875
MRWDWETPATEAEAEALQERIWDLHDKLSHAILALSACAGLPACRCRGAPNGHVILKGQRPPQGGGHVDLAAAAAAMADARGLHAIRTALEDLEGHLHFLRDVQSQQRADRDAAIARVQQSRILLAARLAEHRGKGHGVIEEALGFVGDVRDKSHFVSPEDVYGMHSQSGEDEEDRRGHGSNMVVRVVSCSFALAKNILRFETMGSVLGNATVFAVSMLTFLQLHQLASGKQMPAVQYRRTDNVSLSGGSRKDTKGKHLEVLLARG

SEQ ID NO: 66607 - protein, 190 aa, Triticum aestivum
  peptide (1)..(190): Ceres Seq. ID no. 13658876
MADARGLHAIRTALEDLEGHLHFLRDVQSQQRADRDAAIARVQQSRILLAARLAEHRGKGHGVIEEALGFVGDVRDKSHFVSPEDVYGMHSQSGEDEEDRRGHGSNMVVRVVSCSFALAKNILRFETMGSVLGNATVFAVSMLTFLQLHQLASGKQMPAVQYRRTDNVSLSGGSRKDTKGKHLEVLLARG

SEQ ID NO: 66608 - DNA, 1231 bp, Triticum aestivum
  misc_feature (1)..(1231): Ceres Seq. ID no. 14303051
actcgacccagccacagcctggttgcttggcgtcctcgttgccttacccttccaaacgagctccatcgtctccactttccacagcccacctccacctaccgcagcagcaagggcccttgtcgcgcggcggcggcggggaggatgtcatcgccgccggcaccggtattcgagaggctggccgggatccggcccctcgccgagtccggccgcttcaaggcatggttcctggaccagttcggtgttcttcatgacgggaagaaaccctacccgggcgccattttggcattggagaagctcgctgggaatggcgccaagatggtgataatcagcaattcctcaaggcggtcgtctgtaaccatggagaagctgcagagccttgggtttgacacgtcttgtttcctcggggcgatcaccagcggggaactcacccatcagtaccttgacaagagggatgacccatggtttgcatctctgggaaggaagtgtgtccatctgacatggggcaatcgaggtgcaatttctctggagggacttggtttgcaagttgtgaacaatgttgacgatgcagagtttatactagcccatggtactgaagccctgggtttaccttctggtgatccactttcgaaaagtcttgaggagcttgagcagattctagtgcttggtatacaaaagcgacttccaatggtggtagctaatccagattatgtcactgttgaagctcgaaacctgcgtgtcatgcctggcaccctggcagcaaaatacgagagtcttggtggtgaagtaaaatggatggggaagcctgataaggttatctatacatcagcaatgtccctagcaggtgttgaagcacatgaatgtatcaccgtaggtgattcgctgcaccacgacatcaaaggcgcaaatggagccggaatggcatctgcattcatcactggaggtatccatgcggctgaacttggactcggtgaatttggagaaactgctggagatgatgccgtcagtgcgttgtgttgcaagcatagctcatacccatcttacgttttgccttcatttgcatggtagaaaacacggtttagattcaggcacaccgtttaaacgggattgcggtctaggataatgatgctcttttcagttgtcaaagtgagcatcaagaccgtggaggtgtttcagtgccgcgctaaattattagcgttatgcattttccggaaataaaatatctgttgaaatg

SEQ ID NO: 66609 - protein, 354 aa, Triticum aestivum
  peptide (1)..(354): Ceres Seq. ID no. 14303052
TRPSHSLVAWRPRCLTLPNELHRLHFPQPTSTYRSSKGPCRAAAAGRMSSPPAPVFERLAGIRPLAESGRFKAWFLDQFGVLHDGKKPYPGAILALEKLAGNGAKMVIISNSSRRSSVTMEKLQSLGFDTSCFLGAITSGELTHQYLDKRDDPWFASLGRKCVHLTWGNRGAISLEGLGLQVVNNVDDAEFILAHGTEALGLPSGDPLSKSLEELEQILVLGIQKRLPMVVANPDYVTVEARNLRVMPGTLAAKYESLGGEVKWMGKPDKVIYTSAMSLAGVEAHECITVGDSLHHDIKGANGAGMASAFITGGIHAAELGLGEFGETAGDDAVSALCCKHSSYPSYVLPSFAW

SEQ ID NO: 66610 - protein, 307 aa, Triticum aestivum
  peptide (1)..(307): Ceres Seq. ID no. 14303053
MSSPPAPVFERLAGIRPLAESGRFKAWFLDQFGVLHDGKKPYPGAILALEKLAGNGAKMVIISNSSRRSSVTMEKLQSLGFDTSCFLGAITSGELTHQYLDKRDDPWFASLGRKCVHLTWGNRGAISLEGLGLQVVNNVDDAEFILAHGTEALGLPSGDPLSKSLEELEQILVLGIQKRLPMVVANPDYVTVEARNLRVMPGTLAAKYESLGGEVKWMGKPDKVIYTSAMSLAGVEAHECITVGDSLHHDIKGANGAGMASAFITGGIHAAELGLGEFGETAGDDAVSALCCKHSSYPSYVLPSFAW

SEQ ID NO: 66611 - protein, 249 aa, Triticum aestivum
  peptide (1)..(249): Ceres Seq. ID no. 14303054
MVIISNSSRRSSVTMEKLQSLGFDTSCFLGAITSGELTHQYLDKRDDPWFASLGRKCVHLTWGNRGAISLEGLGLQVVNNVDDAEFILAHGTEALGLPSGDPLSKSLEELEQILVLGIQKRLPMVVANPDYVTVEARNLRVMPGTLAAKYESLGGEVKWMGKPDKVIYTSAMSLAGVEAHECITVGDSLHHDIKGANGAGMASAFITGGIHAAELGLGEFGETAGDDAVSALCCKHSSYPSYVLPSFAW

SEQ ID NO: 66612 - DNA, 1176 bp, Triticum aestivum
  misc_feature (1)..(1176): Ceres Seq. ID no. 13659066
aaagaaaacgcaatccaatcgagaccattcttggcgaggagaagggggagaagaaagcagatcggcgccggcgccggccgtggccgcactgatcgactcggactgtgggtgtggtcttccgcccgagcacccataaacatgggtccagaggcgcctgagcttcaaccaaaccccgtcaatcccgctggacgccttttgccagagcacagctcgatggcgatcgccgatgtcaacatgggtctacaggcgcctgaacttttgtcatatcacatcaatcgcgcacgacccttctatgatgaaaagtggaaaagtatgaatgtggggaagaagaagacgaagaagaagattttccgggttccgcagcatgagctggatgacatactttcctatcaggtgcccgcttggccgaaagtggataaacgctgtccttcagccgccatagagatggaaaagatgaaggaatacttcttggccgggcgggagaagatgaggcgagagtatgaggcccatggctatgctacttttgaagcagaggtcaccgatgatgaggaggaggaagacgcagcaatgactcctcctcacgaggagaaggatgttgtgcgagcgacatcttttcatgacaagaatgacgatgcagcagcgactcatcctcacgaggagaaggatgatgtgccagcgacatcttatcacgacaaaaatgacgaagcagcagcgacgactcctcacgaggagaaggatgatgtgccagccacatcttattatgacaagaatgacgatgcagcagcgacgactcctcacgaggagaaggatgatgtgccagccacatcttattatgacaagaatgacgatgcagcagcgactcctcctcacgaggagaaggatgatgtgccagccacatcttattatgacaagaatgacgatgcagcagcgatgtcttctccgtggattattccacgaggaagaggccgaagaagatttcgcccaggagttgtcaagcaagcaagcggtgttaagaaaataacttagatgtattagttgttttcagtgttagttttggctgttggattagttggttccagtttctgggactgtattgtgtcatctttatttataacttcttgtgtaaaacctacagctgataatttgtcagccgacttgatataatatgataaattt

SEQ ID NO: 66613 - protein, 341 aa, Triticum aestivum
  peptide (1)..(341): Ceres Seq. ID no. 13659067
KENAIQSRPFLARRRGRRKQIGAGAGRGRTDRLGLWVWSSARAPINMGPEAPELQPNPVNPAGRLLPEHSSMAIADVNMGLQAPELLSYHINRARPFYDEKWKSMNVGKKKTKKKIFRVPQHELDDILSYQVPAWPKVDKRCPSAAIEMEKMKEYFLAGREKMRREYEAHGYATFEAEVTDDEEEEDAAMTPPHEEKDVVRATSFHDKNDDAAATHPHEEKDDVPATSYHDKNDEAAATTPHEEKDDVPATSYYDKNDDAAATTPHEEKDDVPATSYYDKNDDAAATPPHEEKDDVPATSYYDKNDDAAAMSSPWIIPRGRGRRRFRPGVVKQASGVKKIT

SEQ ID NO: 66614 - protein, 295 aa, Triticum aestivum
  peptide (1)..(295): Ceres Seq. ID no. 13659068
MGPEAPELQPNPVNPAGRLLPEHSSMAIADVNMGLQAPELLSYHINRARPFYDEKWKSMNVGKKKTKKKIFRVPQHELDDILSYQVPAWPKVDKRCPSAAIEMEKMKEYFLAGREKMRREYEAHGYATFEAEVTDDEEEEDAAMTPPHEEKDVVRATSFHDKNDDAAATHPHEEKDDVPATSYHDKNDEAAATTPHEEKDDVPATSYYDKNDDAAATTPHEEKDDVPATSYYDKNDDAAATPPHEEKDDVPATSYYDKNDDAAAMSSPWIIPRGRGRRRFRPGVVKQASGVKKIT

SEQ ID NO: 66615 - protein, 270 aa, Triticum aestivum
  peptide (1)..(270): Ceres Seq. ID no. 13659069
MAIADVNMGLQAPELLSYHINRARPFYDEKWKSMNVGKKKTKKKIFRVPQHELDDILSYQVPAWPKVDKRCPSAAIEMEKMKEYFLAGREKMRREYEAHGYATFEAEVTDDEEEEDAAMTPPHEEKDVVRATSFHDKNDDAAATHPHEEKDDVPATSYHDKNDEAAATTPHEEKDDVPATSYYDKNDDAAATTPHEEKDDVPATSYYDKNDDAAATPPHEEKDDVPATSYYDKNDDAAAMSSPWIIPRGRGRRRFRPGVVKQASGVKKIT

SEQ ID NO: 66616 - DNA, 944 bp, Triticum aestivum
  misc_feature (1)..(944): Ceres Seq. ID no. 13658653
ccactcacgctgccgcggcggccacccccgcccgccgctgcgctcgcattcgcgtctccaccggtccttcccgcgccacggccgcgcacccgacctgatcccccgcgccgctcgcgagccgccatccagcagagatgccggccctgaggccgccgccgccgcgcctcatgctcaacgccgtctcctgcatgcggaacgcgcagacggttctccgggacatcaacgtcagcgtccacgacggcacggcgctcgtcctcacgggcgccaacggctccggcaagaccaccttcctgcggatgctggccggcttctcgcgcccctcggccggggagatcctctggaacggccacgacgtcacctccccgggggtcttccagcagtacaagctgcagctcaactggatgtcgctcaaggacgccgtcaaggagaagctcaccgtgctggagaacgtccagtggttcgagctcctcgagggcaagcacggcaggtccgcccccgccatcgagctcatgggcctcggccggctcatgaacgacaaggccaggatgctctccatggggcagaggaagcgcctgcagctcgccaggctgctcgccatcgaccgcccgatctggctcctggacgagccctccgtcgcgctcgactccgagggtgtcaagctgctcgagtacatcatagcggagcaccgcaagaagggtgggatcgtcatcgtcgccacgcatttgcccattgagatcgaggattccatgaacctccggcttccgcagcggttccccaggaggaaaactctggttgatcttgtgcgttgattgattggagctcaaaatatgtagctgtatctttctaattcttctccagccatacaagttttgcgttggagcaacttctgatggtgcaattttgtgacactttcttctggaaaataagaacatatttgccatgcc

SEQ ID NO: 66617 - protein, 243 aa, Triticum aestivum
  peptide (1)..(243): Ceres Seq. ID no. 13658654
HSRCRGGHPRPPLRSHSRLHRSFPRHGRAPDLIPRAAREPPSSRDAGPEAAAAAPHAQRRLLHAERADGSPGHQRQRPRRHGARPHGRQRLRQDHLPADAGRLLAPLGRGDPLERPRRHLPGGLPAVQAAAQLDVAQGRRQGEAHRAGERPVVRAPRGQARQVRPRHRAHGPRPAHERQGQDALHGAEEAPAARQAARHRPPDLAPGRALRRARLRGCQAARVHHSGAPQEGWDRHRRHAFAH

SEQ ID NO: 66618 - protein, 224 aa, Triticum aestivum
  peptide (1)..(224): Ceres Seq. ID no. 13658655
MPALRPPPPRLMLNAVSCMRNAQTVLRDINVSVHDGTALVLTGANGSGKTTFLRMLAGFSRPSAGEILWNGHDVTSPGVFQQYKLQLNWMSLKDAVKEKLTVLENVQWFELLEGKHGRSAPAIELMGLGRLMNDKARMLSMGQRKRLQLARLLAIDRPIWLLDEPSVALDSEGVKLLEYIIAEHRKKGGIVIVATHLPIEIEDSMNLRLPQRFPRRKTLVDLVR

SEQ ID NO: 66619 - protein, 213 aa, Triticum aestivum
  peptide (1)..(213): Ceres Seq. ID no. 13658656
MLNAVSCMRNAQTVLRDINVSVHDGTALVLTGANGSGKTTFLRMLAGFSRPSAGEILWNGHDVTSPGVFQQYKLQLNWMSLKDAVKEKLTVLENVQWFELLEGKHGRSAPAIELMGLGRLMNDKARMLSMGQRKRLQLARLLAIDRPIWLLDEPSVALDSEGVKLLEYIIAEHRKKGGIVIVATHLPIEIEDSMNLRLPQRFPRRKTLVDLVR

SEQ ID NO: 66620 - DNA, 820 bp, Triticum aestivum
  misc_feature (1)..(820): Ceres Seq. ID no. 14301905
ttccccatctcaggcacacaagccctaaacccgtgcatggcattccccgcctctcgccgtctctccgccgccgccgctccgaaactctcctccctcttcacgcccggacccactcctaagcctcgcccgctgccgccggagtccggcgatgatcctaggcggcggaagccgaggccgagatcaaggcacccgtggggggaggatgcggcagcgcttctccggcggcttcacgaggggcgatacctgccgggaccctacctcccggatgcgccgcatgtagtatcccccgacgctgtcaaggccgccgccgagcggttcggcaacgatcaccaggtcgtcgccaaatggttgtcgggaagtgacttgaagaaggtagcattgtttggctgcccatctgttgagcgaagaacagtttttgcatcaaaaagattacgagctttcttcaacttgccagaagagaaagtatgcagctcttgcaagataagaagttcatgccagtttattaaccaggaggtgcctaggtatgataaagtgatcttgtcagatactatgaggatccttgctttgtttgtactggatgcatatcctgagccactacaggttactgctgaagtaaaagctagtgtccgcaaacttctcaaggacaccataaatctaagcatttaagtgctttgaggataattcgtaatcagtggaggtactatgtacatgtcaggtagatttaggttcattttcccactcttaattttcttttgtgcctcaagcattgtaacatgacctgaagcaactaatagagtgatggccacatttatttgatgtt

SEQ ID NO: 66621 - protein, 221 aa, Triticum aestivum
  peptide (1)..(221): Ceres Seq. ID no. 14301906
FPISGTQALNPCMAFPASRRLSAAAAPKLSSLFTPGPTPKPRPLPPESGDDPRRRKPRPRSRHPWGEDAAALLRRLHEGRYLPGPYLPDAPHVVSPDAVKAAAERFGNDHQVVAKWLSGSDLKKVALFGCPSVERRTVFASKRLRAFFNLPEEKVCSSCKIRSSCQFINQEVPRYDKVILSDTMRILALFVLDAYPEPLQVTAEVKASVRKLLKDTINLSI

SEQ ID NO: 66622 - protein, 209 aa, Triticum aestivum
  peptide (1)..(209): Ceres Seq. ID no. 14301907
MAFPASRRLSAAAAPKLSSLFTPGPTPKPRPLPPESGDDPRRRKPRPRSRHPWGEDAAALLRRLHEGRYLPGPYLPDAPHVVSPDAVKAAAERFGNDHQVVAKWLSGSDLKKVALFGCPSVERRTVFASKRLRAFFNLPEEKVCSSCKIRSSCQFINQEVPRYDKVILSDTMRILALFVLDAYPEPLQVTAEVKASVRKLLKDTINLSI

SEQ ID NO: 66623 - DNA, 990 bp, Triticum aestivum
  misc_feature (1)..(990): Ceres Seq. ID no. 15179852
tgtatccagccgcagccgttgccaactactcctcctctcgaatcgcggcaaggcaatcaaccggggccggcgggtcggttgaggaaggaggccgggggcgcggcatggactgcggcggtgaggagcaggcgaggcagaacggccatgccggcgacggcggcgacccggcggagtggaagaaggtggccgagctccgggccgtggtggaggcgcaggaccccgcagccaaggaggaggacgacttcatgctgcgccggttcctgcgcgcccgagaccacaacatcagcaaggcgtcggcgatgttcctcaagtacctgagttggaagcgcggcgccaagcctcgcggctccatcaccgaggccgaggtgcgcggcgagctcgtgcaggacaagctctacattcagggcttcgacaagacgggccgccccatgatctacctcttcggcaaccgccacttcgccgccaagcgagaccttgaggagttcaagcgatacgtcatctacatccttgacaacacctgcaccaagttgccggtagggcaggagaagtttgcgtcggtggtggatctcaaggggtgggggtacgcgaattgcgacatccgggcgaagctggcggcgttggagatcatgcagaactactacccggagcggctgggccgggtgttcttgatccacgtgccttacgtgttcatggcggcgtggaagatggtctaccccttcatcgacgacaacaccaagaagaagtttgtctttgttgcagacaaggaccttgacggcacgcttcgggacgccatcgacttgtcccagctgcccgagcagtacggcggcaagctcagactcgagggatacaagagctcgtcgacaacgctatagtcaacgtgtgactgatttggtttattaagggtgtccagttgtgtgaaagtatgctacattgccccgcttgataagcaagtaatactcatcctttcatctatgcagggccgtttaactc

SEQ ID NO: 66624 - protein, 289 aa, Triticum aestivum
  peptide (1)..(289): Ceres Seq. ID no. 15179853
YPAAAVANYSSSRIAARQSTGAGGSVEEGGRGRGMDCGGEEQARQNGHAGDGGDPAEWKKVAELRAVVEAQDPAAKEEDDFMLRRFLRARDHNISKASAMFLKYLSWKRGAKPRGSITEAEVRGELVQDKLYIQGFDKTGRPMIYLFGNRHFAAKRDLEEFKRYVIYILDNTCTKLPVGQEKFASVVDLKGWGYANCDIRAKLAALEIMQNYYPERLGRVFLIHVPYVFMAAWKMVYPFIDDNTKKKFVFVADKDLDGTLRDAIDLSQLPEQYGGKLRLEGYKSSSTTL

SEQ ID NO: 66625 - protein, 255 aa, Triticum aestivum
  peptide (1)..(255): Ceres Seq. ID no. 15179854
MDCGGEEQARQNGHAGDGGDPAEWKKVAELRAVVEAQDPAAKEEDDFMLRRFLRARDHNISKASAMFLKYLSWKRGAKPRGSITEAEVRGELVQDKLYIQGFDKTGRPMIYLFGNRHFAAKRDLEEFKRYVIYILDNTCTKLPVGQEKFASVVDLKGWGYANCDIRAKLAALEIMQNYYPERLGRVFLIHVPYVFMAAWKMVYPFIDDNTKKKFVFVADKDLDGTLRDAIDLSQLPEQYGGKLRLEGYKSSSTTL

SEQ ID NO: 66626 - protein, 208 aa, Triticum aestivum
  peptide (1)..(208): Ceres Seq. ID no. 15179855
MLRRFLRARDHNISKASAMFLKYLSWKRGAKPRGSITEAEVRGELVQDKLYIQGFDKTGRPMIYLFGNRHFAAKRDLEEFKRYVIYILDNTCTKLPVGQEKFASVVDLKGWGYANCDIRAKLAALEIMQNYYPERLGRVFLIHVPYVFMAAWKMVYPFIDDNTKKKFVFVADKDLDGTLRDAIDLSQLPEQYGGKLRLEGYKSSSTTL

SEQ ID NO: 66627 - DNA, 1248 bp, Triticum aestivum
  misc_feature (1)..(1248): Ceres Seq. ID no. 13658672
cccccctcccgaagcttctcgatccctccccccgcttccgtttccgtttcgtccccgccgtcgccccctcgccgcggcggcggagtcgcccgcactcgctgcgcgcaggaacgatgagccgacgtagtaacggccgcaccatctacgtgggcaacctccccgaggacatccgcgagagagagattgaggatctcttctacaagtatggtcctattgtcgatatcgatctgaaaattcctccaaggcctcctgtttatgcttttgtcgagttcgaagacccacgtgatgctgatgatgcaatttatggccgtgatggatatgactttgatggccacaaattgcgggtggagttagctcatggggggaaaggcccttattttattcgaccaagcagctatagtagttctggacgtcatggtgcagttaggcgttctgattaccgcgttattgttaccggattaccttcttcagcatcatggcaagatctcaaggatcatatgcggcgagctggtgatgtctgtttctctgatgtttatcctgaggctggagcaattactggaatagttgagtataccaactacgaagacatgaaacatgcgataagaaagcttgatgattcagagttccgtaatgcattttcacgagcatatatcagggtgagggagtacaatgctaggcgtagccgctcttactcgagaggtagaagccgaagctgctcttactcaagaagcagaagtcacagttatagcaggagcaagagtccaaggtctagacctgcttctcggtctccttcacctgttaaagcaaggtcatcatcaagatccctatcacctgccgctcctgcccatgacaagtctgcaagcaggagccccgtcaggagcagaagtttaccccgttctcagtctcctgtgaaatctgagtgaagccagatgcactcgaagtcagggaaaaaaaacatatcaggatttgttggattaggacaatataatatggattgtgggtgctctgtcccaagaagtaccattgctgttccttggaaggaaaaacgtcaactttgtggtttgagatcaatgtaggagtctggtgttgttttacttctgcactcagttgcgagaacgtaaaagcgtgaactcatggctttaactttagtatgctatagtttcgcgtcaaaaaacttcatgccacagcagagtaaaaaaaaaaaaaaaaaagcttatcgatamcgkcgacctcgagggggggsccggk

SEQ ID NO: 66628 - protein, 306 aa, Triticum aestivum
  peptide (1)..(306): Ceres Seq. ID no. 15219911
PLPKLLDPSPRFRFRFVPAVAPSPRRRSRPHSLRAGTMSRRSNGRTIYVGNLPEDIREREIEDLFYKYGPIVDIDLKIPPRPPVYAFVEFEDPRDADDAIYGRDGYDFDGHKLRVELAHGGKGPYFIRPSSYSSSGRHGAVRRSDYRVIVTGLPSSASWQDLKDHMRRAGDVCFSDVYPEAGAITGIVEYTNYEDMKHAIRKLDDSEFRNAFSRAYIRVREYNARRSRSYSRGRSRSCSYSRSRSHSYSRSKSPRSRPASRSPSPVKARSSSRSLSPAAPAHDKSASRSPVRSRSLPRSQSPVKSE

SEQ ID NO: 66629 - protein, 269 aa, Triticum aestivum
  peptide (1)..(269): Ceres Seq. ID no. 15219912
MSRRSNGRTIYVGNLPEDIREREIEDLFYKYGPIVDIDLKIPPRPPVYAFVEFEDPRDADDAIYGRDGYDFDGHKLRVELAHGGKGPYFIRPSSYSSSGRHGAVRRSDYRVIVTGLPSSASWQDLKDHMRRAGDVCFSDVYPEAGAITGIVEYTNYEDMKHAIRKLDDSEFRNAFSRAYIRVREYNARRSRSYSRGRSRSCSYSRSRSHSYSRSKSPRSRPASRSPSPVKARSSSRSLSPAAPAHDKSASRSPVRSRSLPRSQSPVKSE

SEQ ID NO: 66630 - DNA, 1013 bp, Triticum aestivum
  misc_feature (1)..(1013): Ceres Seq. ID no. 13658673
attgcataaatatgtgaaatcattatttcattaccagctgtgttaccagaggtgtaaagttaaaatggaatatatactaagctagagccgagaggtttcaaactatttgcattctaattccagcctttcaattttccaacagtatttcaatcaaatattaatgaccgtacttgacgtgctgggtgactccgatccatctactagggagattgctttgtctttaattgctgagatgctcaacaatcagaaagacgctatggaagaatctattgagattgttcttgaaaaacttctgcatgtgacgaaagatgtggtggcaaagatttcaaatgaagcgaacagatgcataaatgttttgttggcaaaatacgatcctttcagatgtcttgctgttgtagtacctcttttggtcagtgatgatgaaaagatgctcgttgtgtgtatcaactgtttgacaaagcttgtcgcgcaccttccccaagaggaattgatggatcagctgcctacatttttgccagcactgtttgatgcttttagtaaccaaagtccagatgttcgaaagagtgttgtattctgcttggtggacatctacatcatgctggggaaagcgtttgtgccgtacctggaagggctgagcagcacacagctgcgcttggtgaccatctacgcgaaccggatttcgcaggcaaggtccggcacggcgattgacagcgctaaccaatgaggtgtaacattcttctgttttatatggacattttgtttggtaggggagtgagatttttggggggtcccgtttgtttgtgtaggtttgtgtatagtatataagcaaacgattcccttgtatttgggtgtttcctggctttggttctttgtgtgattatgtattccttttaactttttctttttcttttggttagcatgtggagaggagtgttagcgagcttgtgttgtcttgggttgtacaactaggtgacaatgtacaaagaaaggaaatgtaacgtaatggagaaagt

SEQ ID NO: 66631 - protein, 187 aa, Triticum aestivum
  peptide (1)..(187): Ceres Seq. ID no. 13658674
MTVLDVLGDSDPSTREIALSLIAEMLNNQKDAMEESIEIVLEKLLHVTKDVVAKISNEANRCINVLLAKYDPFRCLAVVVPLLVSDDEKMLVVCINCLTKLVAHLPQEELMDQLPTFLPALFDAFSNQSPDVRKSVVFCLVDIYIMLGKAFVPYLEGLSSTQLRLVTIYANRISQARSGTAIDSANQ

SEQ ID NO: 66632 - protein, 163 aa, Triticum aestivum
  peptide (1)..(163): Ceres Seq. ID no. 13658675
MLNNQKDAMEESIEIVLEKLLHVTKDVVAKISNEANRCINVLLAKYDPFRCLAVVVPLLVSDDEKMLVVCINCLTKLVAHLPQEELMDQLPTFLPALFDAFSNQSPDVRKSVVFCLVDIYIMLGKAFVPYLEGLSSTQLRLVTIYANRISQARSGTAIDSANQ

SEQ ID NO: 66633 - protein, 155 aa, Triticum aestivum
  peptide (1)..(155): Ceres Seq. ID no. 13658676
MEESIEIVLEKLLHVTKDVVAKISNEANRCINVLLAKYDPFRCLAVVVPLLVSDDEKMLVVCINCLTKLVAHLPQEELMDQLPTFLPALFDAFSNQSPDVRKSVVFCLVDIYIMLGKAFVPYLEGLSSTQLRLVTIYANRISQARSGTAIDSANQ

SEQ ID NO: 66634 - DNA, 676 bp, Triticum aestivum
  misc_feature (1)..(676): Ceres Seq. ID no. 13663146
cctaatcgaaaatttattcctgcaccaccggaagttgcaatgcgtatgttgagggagcagggtgggccaccacctttcgagccgaatgctggtccacgtcctaggaaagcaggaagggctggtggtcccccaatgggtggtccatcaccaatccttaatgctccacttcctataatgcatgatccacgtatgcaagatccacgcatgcaagatccccgtaaaatacgaagctatcaagatctggacgctcctggagatgaagtgacagttttggactaccggagcctgtagtcgtgtgctgtacggccttttaatcttcgaagccgtggacgataccaccaccgcaacgggaccttgctcatctccattagtttgaccgtggcggaggaacactgatgcggtgccccgtcccgtgagctatgttatactactcaatggtgcttctaaaactgaaccacatgaaatcaaagcaactggcgcactgaaagcacggttgtggagtgtgtatttccaacagaattttttagcttttcaaaatttccaccatctagagagagagagagtagaggtctctgctgccgtatccagaactccagaccagatattcctcaccgtgtatgcaatctgtaatttatatacaggaaaaaacggttggtagatggaaccctgattggtc

SEQ ID NO: 66635 - protein, 96 aa, Triticum aestivum
  peptide (1)..(96): Ceres Seq. ID no. 13663147
PNRKFIPAPPEVAMRMLREQGGPPPFEPNAGPRPRKAGRAGGPPMGGPSPILNAPLPIMHDPRMQDPRMQDPRKIRSYQDLDAPGDEVTVLDYRSL

SEQ ID NO: 66636 - protein, 83 aa, Triticum aestivum
  peptide (1)..(83): Ceres Seq. ID no. 13663148
MRMLREQGGPPPFEPNAGPRPRKAGRAGGPPMGGPSPILNAPLPIMHDPRMQDPRMQDPRKIRSYQDLDAPGDEVTVLDYRSL

SEQ ID NO: 66637 - protein, 81 aa, Triticum aestivum
  peptide (1)..(81): Ceres Seq. ID no. 13663149
MLREQGGPPPFEPNAGPRPRKAGRAGGPPMGGPSPILNAPLPIMHDPRMQDPRMQDPRKIRSYQDLDAPGDEVTVLDYRSL

SEQ ID NO: 66638 - DNA, 719 bp, Triticum aestivum
  misc_feature (1)..(719): Ceres Seq. ID no. 13658677
acatggtaatggattttcaaaagaagaacaggaagcgaaagaccaaggtggaaacctcagacgacgagttatcacaggcgtcacttgatgaacaggcgccacttgatgaacggtcaccaaaagccaatgcggtaaccttaaatgagaagtatcacagacggtctttcctcctgttgtaaacaaaactggcatccagattgaacaggcgccacttggtgaacgagagaagtacattgttgagctggaaaggaagttgagtgaaagggatagagaattggaagctttgaagtttgatcataaaaaggcaggatcttcttgcagtgcagacgaaatagcttgcaaaagacagtgccatggagcgcgaagcgaggatgctcagggagaacacttactttgatgtggatctgtgcagcggcggacgatgctaccgcaagctgatggtgcctgggcttagtggaggatgtttgggaccttgtttgtgcgttttatcttcagctctgagcatcccctttctttcagactttattctctattgctggtgtcgtctgcttttcgccccataacaattgttttgatggtgagcattttctgtgggtttcaaaaaaaaaaaaaaaaaaaaaaaaaaaaaaaaaaaaaaaaaaaaaaaaaaaaaaaaaaaaaaaaggaaaaaaaaaaaaaaaaaggtttatcgataccgccaacctcaagggggggcccgg

SEQ ID NO: 66639 - protein, 86 aa, Triticum aestivum
  peptide (1)..(86): Ceres Seq. ID no. 13658678
MFGTLFVRFIFSSEHPLSFRLYSLLLVSSAFRPITIVLMVSIFCGFQKKKKKKKKKKKKKKKKKKKKKEKKKKKGLSIPPTSRGGP

SEQ ID NO: 66640 - protein, 69 aa, Triticum aestivum
  peptide (1)..(69): Ceres Seq. ID no. 13658679
MEREARMLRENTYFDVDLCSGGRCYRKLMVPGLSGGCLGPCLCVLSSALSIPFLSDFILYCWCRLLFAP

SEQ ID NO: 66641 - protein, 63 aa, Triticum aestivum
  peptide (1)..(63): Ceres Seq. ID no. 13658680
MLRENTYFDVDLCSGGRCYRKLMVPGLSGGCLGPCLCVLSSALSIPFLSDFILYCWCRLLFAP

SEQ ID NO: 66642 - DNA, 520 bp, Triticum aestivum
  misc_feature (1)..(520): Ceres Seq. ID no. 13658646
gtgagccgtccacatcctgtcgcgccgtcaagtaactgctacatggcctggtgcgccctgcgcagccgcctcctcccgctctccccctcctcctccgccgccgccgccgccgcgacgccccaccggctcctcctctgcctcctctccaccgcggccccgcgccactcccacggccaccaccaccgccgccgccactcgcccgccgcctacgccgccgcggccgaggagtcgccgcgccccatgccgcccatcggtcgcgccacgcgccaccccgcgggggccacccccatcgcgcgcttctacgccgacgccaactcccagcggcccaaggagtactgggactacgaggcgctcgacatcgagtggggggagcaggatgggtacgaggtgctgcggaaggtgggcnagggcaagtacagcgaggtgttcgagggattgcggaccgggagcgaagagaggtgcgtcatcaagatcctcaagcccgtgaggaagaagaagatwaagagggaaatamagatac

SEQ ID NO: 66643 - protein, 173 aa, Triticum aestivum
  peptide (1)..(173): Ceres Seq. ID no. 13658647
  misc_feature (136)..(136): Xaa is any aa, unknown or other
  misc_feature (167)..(167): Xaa is any aa, unknown or other
  misc_feature (172)..(172): Xaa is any aa, unknown or other
VSRPHPVAPSSNCYMAWCALRSRLLPLSPSSSAAAAAATPHRLLLCLLSTAAPRHSHGHHHRRRHSPAAYAAAAEESPRPMPPIGRATRHPAGATPIARFYADANSQRPKEYWDYEALDIEWGEQDGYEVLRKVGXGKYSEVFEGLRTGSEERCVIKILKPVRKKKXKREIXI

SEQ ID NO: 66644 - protein, 159 aa, Triticum aestivum
  peptide (1)..(159): Ceres Seq. ID no. 13658648
  misc_feature (122)..(122): Xaa is any aa, unknown or other
  misc_feature (153)..(153): Xaa is any aa, unknown or other
  misc_feature (158)..(158): Xaa is any aa, unknown or other
MAWCALRSRLLPLSPSSSAAAAAATPHRLLLCLLSTAAPRHSHGHHHRRRHSPAAYAAAAEESPRPMPPIGRATRHPAGATPIARFYADANSQRPKEYWDYEALDIEWGEQDGYEVLRKVGXGKYSEVFEGLRTGSEERCVIKILKPVRKKKXKREIXI

SEQ ID NO: 66645 - protein, 93 aa, Triticum aestivum
  peptide (1)..(93): Ceres Seq. ID no. 13658649
  misc_feature (56)..(56): Xaa is any aa, unknown or other
  misc_feature (87)..(87): Xaa is any aa, unknown or other
  misc_feature (92)..(92): Xaa is any aa, unknown or other
MPPIGRATRHPAGATPIARFYADANSQRPKEYWDYEALDIEWGEQDGYEVLRKVGXGKYSEVFEGLRTGSEERCVIKILKPVRKKKXKREIXI

SEQ ID NO: 66646 - DNA, 1916 bp, Triticum aestivum
  misc_feature (1)..(1916): Ceres Seq. ID no. 14302746
ctcgctcctcctccgtccatccacaactcaattgctgccaaatcttagcgctgcacccaccgcctccgtttggttccctggattcttctccgcgcccgcgagaaatctgggtgatgagatgatgaggacggcggcggtgctgttcctctgctttttcgccttcgccggcagcggctggggcggagcgcgggtcgcggccgtatgggcggagggggtcagacagacggcggcggtggtggtggaccctgcctggcgcttccctagcccgcggctgcgggacgcgtacgtcgcgctgcagacatggaagcagcaggccatcttctccgaccccaagaacctcaccggcgactgggtgggtcccgcggtctgcggctacaccggcgtgttctgcgcgcctgctccgtcgtcgggcgagctcgccgtcgccggcatcgacctcaaccacggcgacatcgcgggctacctcccgtcggagctcggcctcctctgcgacctcgcgctgctccacctcaactccaaccgcttctgcggcctcgtgcccgacaccttccgccggctcgtcctcctccacgagctcgacctcagcaacaaccgcttcgtgggcgcgttcccgaccgtcgtgctcgacctcccgtccctcaggttcctcgacctccgcttcaacgacttcgagggcggcgtgccgcgggagctcttcgaccgcccgttcgacgccatcttcctcaaccacaatcgcctccgcttccagctccccgacaacttcggcaattcgcccgtgtccgtcatcgtcctcgccaacaaccacttcggcggctgcctcccggcgagcctcggcaacatgtccgacacgctcaacgagatcctcctcatcaacaacggcctcacctcgtgcctcccggcggaggtcgggatgctccgggaggtgacggtgttcgacgtcagcttcaacgccctcgcagggccgctgccgccggaggtggccgggatgcaaaaggtggagcagctcgacatcgcgcacaacctgctgtcggggaccgtgccggaggccgtgtgcgacctcccacggctcaagaacttcaccttctcctacaacttcttcaccggcgagccgccgtcctgcgcgcgcgtcgtgcctgccgacggcgaccgccggaactgcctccccaaccgccccgcccagcgcatgccgcagcagtgcgccgctttctatgcccgcccgcccgtcgactgcgcagctttccagtgcaagccgtttgtcccacctcggccacccccaccgccagcataccccggcccgttgccgccagtgtaccccatgccatacgcgtcgccgccgccgcctccacgttaccgatgattctttgacaacagaagcattgccagtttcactttcccttgccgcaccccttgccgccggtgtggaagagccagcggagctcgccgtcacaaaagtacgtggtcattgttgttcgtggattaccagttcttgattgatagctaccggcgtaaagaagaacgtggtgcatatatccttttcttgtttttttgcattggttggtgtctgttttccgcatcgtcgtcttcgatcatccgtttgcgcggtggcgatggcgaaaaggattggagcatggtgataaggaaatttgaaaggtgggagcaaattgggcttggattgatggctaattgggttgtgaataataaactggctgagagagacaggttaagctgagattgagaaatccatggaaaagttgtgatgcgggatgtatagaatgatacttttagttcggtaaagctctagttgagggtcagagataagtttctacatcaagagatttgtcctactgaattcctcttgtgtcacagctgcttactgttattcgattattattattaagatgtttagttgggcttct

SEQ ID NO: 66647 - protein, 451 aa, Triticum aestivum
  peptide (1)..(451): Ceres Seq. ID no. 14302747
SLLLRPSTTQLLPNLSAAPTASVWFPGFFSAPARNLGDEMMRTAAVLFLCFFAFAGSGWGGARVAAVWAEGVRQTAAVVVDPAWRFPSPRLRDAYVALQTWKQQAIFSDPKNLTGDWVGPAVCGYTGVFCAPAPSSGELAVAGIDLNHGDIAGYLPSELGLLCDLALLHLNSNRFCGLVPDTFRRLVLLHELDLSNNRFVGAFPTVVLDLPSLRFLDLRFNDFEGGVPRELFDRPFDAIFLNHNRLRFQLPDNFGNSPVSVIVLANNHFGGCLPASLGNMSDTLNEILLINNGLTSCLPAEVGMLREVTVFDVSFNALAGPLPPEVAGMQKVEQLDIAHNLLSGTVPEAVCDLPRLKNFTFSYNFFTGEPPSCARVVPADGDRRNCLPNRPAQRMPQQCAAFYARPPVDCAAFQCKPFVPPRPPPPPAYPGPLPPVYPMPYASPPPPPRYR

SEQ ID NO: 66648 - protein, 412 aa, Triticum aestivum
  peptide (1)..(412): Ceres Seq. ID no. 14302748
MMRTAAVLFLCFFAFAGSGWGGARVAAVWAEGVRQTAAVVVDPAWRFPSPRLRDAYVALQTWKQQAIFSDPKNLTGDWVGPAVCGYTGVFCAPAPSSGELAVAGIDLNHGDIAGYLPSELGLLCDLALLHLNSNRFCGLVPDTFRRLVLLHELDLSNNRFVGAFPTVVLDLPSLRFLDLRFNDFEGGVPRELFDRPFDAIFLNHNRLRFQLPDNFGNSPVSVIVLANNHFGGCLPASLGNMSDTLNEILLINNGLTSCLPAEVGMLREVTVFDVSFNALAGPLPPEVAGMQKVEQLDIAHNLLSGTVPEAVCDLPRLKNFTFSYNFFTGEPPSCARVVPADGDRRNCLPNRPAQRMPQQCAAFYARPPVDCAAFQCKPFVPPRPPPPPAYPGPLPPVYPMPYASPPPPPRYR

SEQ ID NO: 66649 - protein, 411 aa, Triticum aestivum
  peptide (1)..(411): Ceres Seq. ID no. 14302749
MRTAAVLFLCFFAFAGSGWGGARVAAVWAEGVRQTAAVVVDPAWRFPSPRLRDAYVALQTWKQQAIFSDPKNLTGDWVGPAVCGYTGVFCAPAPSSGELAVAGIDLNHGDIAGYLPSELGLLCDLALLHLNSNRFCGLVPDTFRRLVLLHELDLSNNRFVGAFPTVVLDLPSLRFLDLRFNDFEGGVPRELFDRPFDAIFLNHNRLRFQLPDNFGNSPVSVIVLANNHFGGCLPASLGNMSDTLNEILLINNGLTSCLPAEVGMLREVTVFDVSFNALAGPLPPEVAGMQKVEQLDIAHNLLSGTVPEAVCDLPRLKNFTFSYNFFTGEPPSCARVVPADGDRRNCLPNRPAQRMPQQCAAFYARPPVDCAAFQCKPFVPPRPPPPPAYPGPLPPVYPMPYASPPPPPRYR

SEQ ID NO: 66650 - DNA, 576 bp, Triticum aestivum
  misc_feature (1)..(576): Ceres Seq. ID no. 13658253
accaccaattaagttcgcgccaaattaggcaagctagcgcgcactgcacgtacgcgtgggcgcgctctgtctgctgccaaaaggcgtgcaaaccaaagcttgattagtagcggaggccggcgatgaggccacggccgccggctctcgtgagcagcctcctcctcctcctcctactattcgcggtgccgaggcatgccgccgcggcgggaggggacggcggtggcatggtgcgggtggacggcacgcggttcgtggcgggggacggcgaccggacggtgtacctcagcgggttcaacgcctactggctcatggagatggcctccgacccgtcccggcggggcggggtggtgtcggcgttccggcaggcggccgcgcacggcctcaacctcgcgcgcacctgggccttcagcgacggcggcgaccgaccgctgcagtcctcgccgggcgtctaccacgaggacatgttccagggcctggacttcgtcatcgccgaggcgaggcggcacgggatatacctcctcctctgcctcaccaacaacttcgacgacttcggcggcaagcgccagtacgtccagt

SEQ ID NO: 66651 - protein, 151 aa, Triticum aestivum
  peptide (1)..(151): Ceres Seq. ID no. 13658254
MRPRPPALVSSLLLLLLLFAVPRHAAAAGGDGGGMVRVDGTRFVAGDGDRTVYLSGFNAYWLMEMASDPSRRGGVVSAFRQAAAHGLNLARTWAFSDGGDRPLQSSPGVYHEDMFQGLDFVIAEARRHGIYLLLCLTNNFDDFGGKRQYVQ

SEQ ID NO: 66652 - protein, 128 aa, Triticum aestivum
  peptide (1)..(128): Ceres Seq. ID no. 13658255
MPPRREGTAVAWCGWTARGSWRGTATGRCTSAGSTPTGSWRWPPTRPGGAGWCRRSGRRPRTASTSRAPGPSATAATDRCSPRRASTTRTCSRAWTSSSPRRGGTGYTSSSASPTTSTTSAASASTSS

SEQ ID NO: 66653 - protein, 117 aa, Triticum aestivum
  peptide (1)..(117): Ceres Seq. ID no. 13658256
MVRVDGTRFVAGDGDRTVYLSGFNAYWLMEMASDPSRRGGVVSAFRQAAAHGLNLARTWAFSDGGDRPLQSSPGVYHEDMFQGLDFVIAEARRHGIYLLLCLTNNFDDFGGKRQYVQ

SEQ ID NO: 66654 - DNA, 1440 bp, Triticum aestivum
  misc_feature (1)..(1440): Ceres Seq. ID no. 13658257
gccggacgcagaagcagaagcagcagcgcagccagcagcaaagaatcacgaggagatggcggcggcgacggcgacggcgacggtgcaagcgcagccaggactcgacgcgcgcgagtgggacgaggcggcgtaccggcggggcatcctgcgggagcgcgacctctcctgccgcaccctcttccgcgccgtcttctacgaccagcgcgacgaacccgacccggacgtcctcctcgccgccgcctccagcgacggatccctcgcgtccttctcgctgtcctcctgcatcgcctcctccgcctccgcccacgccgccccacagttggctgccgccgcgctggtcgaccccgtctgcatcgtccaagcgcacagcggccccgtctacgacgccaagttctacaacgatccgattcagccgctgctcttcagctgcggggatgacggccacatccggggttggagatggcacgagatgcagagctgccttctgccactctctctgcaaggggatcatgttgaaccaatacttgacttggttaaccctcagcatgaaggcccttggggtgcacggtctccaataccagaaaataatgccattgcaattagcaaacaggatggatctcttttcgcggcagcgggtgatgcatgtgcttattgctgggatgtggaaagtggaaagtgtaaaatgacctttaaggggcatactgactatttgcatagtatcgcagttcgtgaggcaaaccaccaggtggtaactggatcagaggatgggacagcccgtatctgggattgcagaagtgggaagtgtacgcagacgatacgtccagtacagaacaagaaatttgagggctcgtgggtcggttgcattgccattgatgcgagtgaaagttggctggcttgtggtacttcttgtggtatatcagtttggagtcttctttcaaatgagtgcatcttcaacgcagattgtggtgctcctgttcaagatttgttgtttgacaaaaatcaaattttagcggttggcgctgaacctgcgctctcccgtttcacgatcaacggggttgttgtttcgcaaataaagtgcgctcctccgtcggcattttccgtctccatgcattcatctgggatggcagctgttgctgggcatggaggtctggtggatgtcatctctggattcgggagccatctttgcgcgtttcgttgccgtggcctggataggtaatcagttaccgagtgctgatgaagcgttactgtgcaatttccatttgccactcccacattagtcagtggagcgcgaaactgtatttcttttcccccctcactgttgtaatacttgtttcagttcagtctgcggaatgatttcctgacaaggatagattctttgtaaatgtccttgttctagatattctgttggaggtttcaatacaatccgtctcaatctgtttc

SEQ ID NO: 66655 - protein, 404 aa, Triticum aestivum
  peptide (1)..(404): Ceres Seq. ID no. 13658258
PDAEAEAAAQPAAKNHEEMAAATATATVQAQPGLDAREWDEAAYRRGILRERDLSCRTLFRAVFYDQRDEPDPDVLLAAASSDGSLASFSLSSCIASSASAHAAPQLAAAALVDPVCIVQAHSGPVYDAKFYNDPIQPLLFSCGDDGHIRGWRWHEMQSCLLPLSLQGDHVEPILDLVNPQHEGPWGARSPIPENNAIAISKQDGSLFAAAGDACAYCWDVESGKCKMTFKGHTDYLHSIAVREANHQVVTGSEDGTARIWDCRSGKCTQTIRPVQNKKFEGSWVGCIAIDASESWLACGTSCGISVWSLLSNECIFNADCGAPVQDLLFDKNQILAVGAEPALSRFTINGVVVSQIKCAPPSAFSVSMHSSGMAAVAGHGGLVDVISGFGSHLCAFRCRGLDR

SEQ ID NO: 66656 - protein, 386 aa, Triticum aestivum
  peptide (1)..(386): Ceres Seq. ID no. 13658259
MAAATATATVQAQPGLDAREWDEAAYRRGILRERDLSCRTLFRAVFYDQRDEPDPDVLLAAASSDGSLASFSLSSCIASSASAHAAPQLAAAALVDPVCIVQAHSGPVYDAKFYNDPIQPLLFSCGDDGHIRGWRWHEMQSCLLPLSLQGDHVEPILDLVNPQHEGPWGARSPIPENNAIAISKQDGSLFAAAGDACAYCWDVESGKCKMTFKGHTDYLHSIAVREANHQVVTGSEDGTARIWDCRSGKCTQTIRPVQNKKFEGSWVGCIAIDASESWLACGTSCGISVWSLLSNECIFNADCGAPVQDLLFDKNQILAVGAEPALSRFTINGVVVSQIKCAPPSAFSVSMHSSGMAAVAGHGGLVDVISGFGSHLCAFRCRGLDR

SEQ ID NO: 66657 - protein, 248 aa, Triticum aestivum
  peptide (1)..(248): Ceres Seq. ID no. 13658260
MQSCLLPLSLQGDHVEPILDLVNPQHEGPWGARSPIPENNAIAISKQDGSLFAAAGDACAYCWDVESGKCKMTFKGHTDYLHSIAVREANHQVVTGSEDGTARIWDCRSGKCTQTIRPVQNKKFEGSWVGCIAIDASESWLACGTSCGISVWSLLSNECIFNADCGAPVQDLLFDKNQILAVGAEPALSRFTINGVVVSQIKCAPPSAFSVSMHSSGMAAVAGHGGLVDVISGFGSHLCAFRCRGLDR

SEQ ID NO: 66658 - DNA, 674 bp, Triticum aestivum
  misc_feature (1)..(674): Ceres Seq. ID no. 12620586
aagcgaatccacggacgacgcaagcggagagattgcttgcgcacccgaccatcgacgtagcgtagccaggcgaagggagccaggcaggcggccatgaggggcgaggcgaggatgctgtgcgcgctgggcctggtgctactctgcctcgcggcgcacctccagggcgcgcactgccgcggcggcggcggcgggggacacggcggaggtggaggtggaggccatggagggggcgggggcggaggtcgtggaggcggaggctccgggagagggcgctcaggcgggagggcccgtccgatcatcgcaggcgcgggtgcgggagccctcgctggggccggcgcgggcgcgctcgccggcagggccgcgtcggggtcgcacggccgcagcgctgcgggcgagccgcgcgtcgcctggagggcctccggcgccgccgccgccctcgcggccgccgcgctcgttcggtggctctgagcggcgtgaatctcggtacacacgggtgaatttactgaattactagtagcagttagctgtgctagattggtgggtgtaatccaggcttcgaagaggatgtaatccagactgacggtcgtgaattagtggtttggtagtactagtgctgatgcacgtgtaattatggcgaatttacggcacccttgaacagagctttgcgaggatcc

SEQ ID NO: 66659 - protein, 124 aa, Triticum aestivum
  peptide (1)..(124): Ceres Seq. ID no. 12620587
MRGEARMLCALGLVLLCLAAHLQGAHCRGGGGGGHGGGGGGGHGGGGGGGRGGGGSGRGRSGGRARPIIAGAGAGALAGAGAGALAGRAASGSHGRSAAGEPRVAWRASGAAAALAAAALVRWL

SEQ ID NO: 66660 - protein, 118 aa, Triticum aestivum
  peptide (1)..(118): Ceres Seq. ID no. 12620588
MLCALGLVLLCLAAHLQGAHCRGGGGGGHGGGGGGGHGGGGGGGRGGGGSGRGRSGGRARPIIAGAGAGALAGAGAGALAGRAASGSHGRSAAGEPRVAWRASGAAAALAAAALVRWL

SEQ ID NO: 66661 - protein, 97 aa, Triticum aestivum
  peptide (1)..(97): Ceres Seq. ID no. 12620589
MEGAGAEVVEAEAPGEGAQAGGPVRSSQARVREPSLGPARARSPAGPRRGRTAAALRASRASPGGPPAPPPPSRPPRSFGGSERRESRYTRVNLLNY

SEQ ID NO: 66662 - DNA, 1818 bp, Triticum aestivum
  misc_feature (1)..(1818): Ceres Seq. ID no. 13659025
accgatagaattttagaatgggttgggtgaggactgacgctggtgtttcgagggttggcctccgagatgcttcgtctcctccacctcctttcctttgggtcccctcatcaattccagtccactagcacagctcgtcttgtcccatcggccgcttgcaggtttcacctgctttgccaagaagactctgcgcctgctcatcgccttcttcttccccgtcgtcttccagccaagacaagattcgagccgtccgtggtgaccgatcgtcagtccagagacgccgccgggaacggaacaccgtcgcgacgccgccagattaaatcgccgcctccagactagcattcaacatgccgaacagcagcggcgtgaccgtgttcgacgacctgcccgagtggcttgtcgttgacgagatccttgtccggctgccggccaaggatgtacttcggtagcgtgccgtccgccagtcgtggcgcagcggcacttccaccaacgcgttcatcctcaaccaccaccaccgccagccctcgctccccatcatcaaaaacatagagggcatctaccgccatgccggatcccctagtgatcaaaagatacagcgtgtcctccggaacgcagatccctttaaaaacgagatgactctatgtcatgccgcttgtgatggcttcctcatcctggagaagcaatccaatttctacatctgcaaccctaccacccgcaagtgtgcttccctgccacatcctccacgacggccaggcttcagcgccttcggcgtagtcggcttctactggctccacacatctggagaacaccgggttctctgggcgtcatacttgaaccaaatgccgtacttggtactcattggggctgccgtcccaactgagttgcctgattacttcgtactcacagttggatcggaccagccaagatgcatccaatggctgacaatttgaaaatatgggtttcctaccctgtccttcaatactccaccagtccacaatcgtgctcgcctgcactgggcaacatgggcaacaggcctcaacataacggtatttgacaccgtagccgagacattctggcagatgagccgcccagcacagttgggtgataaggtgacattgttggatatgtgcggctcccttgccttgtgctgcaccaccaatgactgtgtcaatttagatgtttgggtgttgcaggactatgatgctgaaacctggggctttcagtaccggtttaacttgtcagcaatggaggcattgccaccatttaagtttgacctcaatgctctccctaggatggctgtgatcaatgagcgtgagctgttgatcgagcagtgtgttggccgtctgttgcattgtgacattgatggtgtgtttttaggatatgtgcgagccaaggagcctgggaaccactttatgctaactatgcagcgcctccaagagagcatgatttcagtcccattgtttgaggcgcaggaagaagatgctgtgaacaaggagtctccattcgtcatggtgctataagatgccaggctccatcttaatgatttcgactagctgtttgttgtgcccttgggagtatctatcctgtatgaaccttgctttctgttctgtcttcttactttttagtactagtagaaccgaacactttgtatgtctgaagtagcgcctcatcacttggtgcttgttatgctatcttgagcatcatgttgatgttgtaaaaaattgtgtgtctatgctattgctatgtagaactgctataatgttcatgttcacccctgttgactttcagtttgcgttgttattaaggcatggttgcagtttg

SEQ ID NO: 66663 - protein, 146 aa, Triticum aestivum
  peptide (1)..(146): Ceres Seq. ID no. 15219941
MSRPAQLGDKVTLLDMCGSLALCCTTNDCVNLDVWVLQDYDAETWGFQYRFNLSAMEALPPFKFDLNALPRMAVINERELLIEQCVGRLLHCDIDGVFLGYVRAKEPGNHFMLTMQRLQESMISVPLFEAQEEDAVNKESPFVMVL

SEQ ID NO: 66664 - protein, 131 aa, Triticum aestivum
  peptide (1)..(131): Ceres Seq. ID no. 15219942
MCGSLALCCTTNDCVNLDVWVLQDYDAETWGFQYRFNLSAMEALPPFKFDLNALPRMAVINERELLIEQCVGRLLHCDIDGVFLGYVRAKEPGNHFMLTMQRLQESMISVPLFEAQEEDAVNKESPFVMVL

SEQ ID NO: 66665 - protein, 105 aa, Triticum aestivum
  peptide (1)..(105): Ceres Seq. ID no. 15219943
MTLCHAACDGFLILEKQSNFYICNPTTRKCASLPHPPRRPGFSAFGVVGFYWLHTSGEHRVLWASYLNQMPYLVLIGAAVPTELPDYFVLTVGSDQPRCIQWLTI

SEQ ID NO: 66666 - DNA, 753 bp, Triticum aestivum
  misc_feature (1)..(753): Ceres Seq. ID no. 12626339
accagctcgatccccccttctattgctcgcagcctccttcctctctcagacgcacaatccatcgcagcctcctccctcctccgctgaagccgtgccgcggctacgacgagctcgtccgactggccggccggagagtccctcgtcgcatagtctaaccatcggaggaagtggtccgtcagttggtctgagcttctcatacgatccctgtgcctacaaggatggagaggagagcggcgaggggcacctctgatcaccgtaggcgaatgcagatgccgccggcgccggtggggcagaagcagcagcagccgcagcgccgcggggggccgaagagctgccagagaacgccgccgccgccgggctgcttcaccatccagctgctcatggtgttcctctgggtggccgcgtcgctcgccttcctgcccctcgtgctcccgccgctgcccccgccgccgctctcgctgctgctcgtgcccgtctgcctgctcgccgtcctcgccgcgctggccttcgtcccgctcgacgcccacaacaacgtcgtcgtcggcggctcgtcttgtttgtagggaggctgcatttttttttcttttccgtgtcggtcagagctggctgttaccagatctagcctgtagtacaaactgtgaacctttttttaagattagaattattaggattaattaagagaggactactttttgactttgtaatcacttgaactccggcaatgtcaattgagacctcacggtatttatgctc

SEQ ID NO: 66667 - protein, 114 aa, Triticum aestivum
  peptide (1)..(114): Ceres Seq. ID no. 12626340
MERRAARGTSDHRRRMQMPPAPVGQKQQQPQRRGGPKSCQRTPPPPGCFTIQLLMVFLWVAASLAFLPLVLPPLPPPPLSLLLVPVCLLAVLAALAFVPLDAHNNVVVGGSSCL

SEQ ID NO: 66668 - protein, 99 aa, Triticum aestivum
  peptide (1)..(99): Ceres Seq. ID no. 12626341
MQMPPAPVGQKQQQPQRRGGPKSCQRTPPPPGCFTIQLLMVFLWVAASLAFLPLVLPPLPPPPLSLLLVPVCLLAVLAALAFVPLDAHNNVVVGGSSCL

SEQ ID NO: 66669 - protein, 97 aa, Triticum aestivum
  peptide (1)..(97): Ceres Seq. ID no. 12626342
MPPAPVGQKQQQPQRRGGPKSCQRTPPPPGCFTIQLLMVFLWVAASLAFLPLVLPPLPPPPLSLLLVPVCLLAVLAALAFVPLDAHNNVVVGGSSCL

SEQ ID NO: 66670 - DNA, 1654 bp, Triticum aestivum
  misc_feature (1)..(1654): Ceres Seq. ID no. 12779833
ccagtttcccctcctccaaacccttcaccgctctcggcgccgactgccgattcctcagtttcccctccccaaacccttcaccgctctcgtctcctcagttccgccgccgccgccatggcttcgtccccctgcgacatcgccctcaaggcagccctcggcggccaactccgcctcctcaagagaatggccaagaaggtggatctccggcgagccaaggacgataaagggcaaaccgcacttcatttcgctgcggccaaggggtgcctggacagctgcaagttcctggtggaggaatcagggcttgatgtcgattccgccacgaaaacagatgtgacaccgatgttctacgccgcatttgggggaaatgtcgaggttatgaggtaccttctcgaccgcggcgcagacccatccacggccgatgacaggggctctgtgtcattgcacaatgcagcagaggaaggacactgcgaggctgtgaggctattgctgttgaaaggggttcatgtggatcctatggatcatcggggcacaccattacacttggcggttgcaaaggaccatgttgaggttgtgaaggttctgctggagcatggtgctaatcccaacagagtggctaatcacgtcttttcaccactcatgatggccgtctgtggaaaggccttgaaatgcatgaagctactgattgaggctggcgctgatgtgaatgttcatggttactctggaccaactcctttaacggaggcagttgatgatggcttaatggactttgtcatgattttactagaggctggagccgacgctaacatccctaaccagcatggcgcagttccaattgagctagcagcagctcgtggtcaacgtgagcttgttgaaattctgtttcctaagacaaaacccattccatctcagccagtttggagcgttaatgggataatgaatactgcaagatcaccacgtatcaagcatcaggacgcatcttctgtggaacaacggatagctgatttgaagtcacgaggaaaggaagcatttggaaaggaagactatattacagcgatgtacttctatggcctggtaatggatatagacccacttgatgccaccatgtttgctaaccggagcctctgctggctgcggatgcgagaaggggacagagctttggaagatgcacggcaatgcataatgatgcggccccattggtccaaggcatggtaccgtgagggcaaagctctcagtttcatgaagacgcgttcctgaaagcacaggaactggaccctaagagtgacgagatcaccaaagctctgagggaggctgtcagtgcgatggaggagctgcgcgtgtgatataagcagctgccagtgccgggtcgctcggagaggaggaagaagagaacgagacgggctggctttgattcattctcccatctctgtatcgaccctgctgtattttccttgcaccagatgctaccctagtagtagtactacactaggtattactgctcgtgtgtcagaaggtgttgcagctggctagctaaccagtccccaagctgtgctggatcaggggtctcgattttggtaggctacggcgatgttttgtgacagacggcatatgcctgatggtgtgctctgcaatgatatggtcgttaccgtttcttttc

SEQ ID NO: 66671 - protein, 417 aa, Triticum aestivum
  peptide (1)..(417): Ceres Seq. ID no. 12779834
PVSPPPNPSPLSAPTADSSVSPPQTLHRSRLLSSAAAAMASSPCDIALKAALGGQLRLLKRMAKKVDLRRAKDDKGQTALHFAAAKGCLDSCKFLVEESGLDVDSATKTDVTPMFYAAFGGNVEVMRYLLDRGADPSTADDRGSVSLHNAAEEGHCEAVRLLLLKGVHVDPMDHRGTPLHLAVAKDHVEVVKVLLEHGANPNRVANHVFSPLMMAVCGKALKCMKLLIEAGADVNVHGYSGPTPLTEAVDDGLMDFVMILLEAGADANIPNQHGAVPIELAAARGQRELVEILFPKTKPIPSQPVWSVNGIMNTARSPRIKHQDASSVEQRIADLKSRGKEAFGKEDYITAMYFYGLVMDIDPLDATMFANRSLCWLRMREGDRALEDARQCIMMRPHWSKAWYREGKALSFMKTRS

SEQ ID NO: 66672 - protein, 379 aa, Triticum aestivum
  peptide (1)..(379): Ceres Seq. ID no. 12779835
MASSPCDIALKAALGGQLRLLKRMAKKVDLRRAKDDKGQTALHFAAAKGCLDSCKFLVEESGLDVDSATKTDVTPMFYAAFGGNVEVMRYLLDRGADPSTADDRGSVSLHNAAEEGHCEAVRLLLLKGVHVDPMDHRGTPLHLAVAKDHVEVVKVLLEHGANPNRVANHVFSPLMMAVCGKALKCMKLLIEAGADVNVHGYSGPTPLTEAVDDGLMDFVMILLEAGADANIPNQHGAVPIELAAARGQRELVEILFPKTKPIPSQPVWSVNGIMNTARSPRIKHQDASSVEQRIADLKSRGKEAFGKEDYITAMYFYGLVMDIDPLDATMFANRSLCWLRMREGDRALEDARQCIMMRPHWSKAWYREGKALSFMKTRS

SEQ ID NO: 66673 - protein, 356 aa, Triticum aestivum
  peptide (1)..(356): Ceres Seq. ID no. 12779836
MAKKVDLRRAKDDKGQTALHFAAAKGCLDSCKFLVEESGLDVDSATKTDVTPMFYAAFGGNVEVMRYLLDRGADPSTADDRGSVSLHNAAEEGHCEAVRLLLLKGVHVDPMDHRGTPLHLAVAKDHVEVVKVLLEHGANPNRVANHVFSPLMMAVCGKALKCMKLLIEAGADVNVHGYSGPTPLTEAVDDGLMDFVMILLEAGADANIPNQHGAVPIELAAARGQRELVEILFPKTKPIPSQPVWSVNGIMNTARSPRIKHQDASSVEQRIADLKSRGKEAFGKEDYITAMYFYGLVMDIDPLDATMFANRSLCWLRMREGDRALEDARQCIMMRPHWSKAWYREGKALSFMKTRS

SEQ ID NO: 66674 - DNA, 1435 bp, Triticum aestivum
  misc_feature (1)..(1435): Ceres Seq. ID no. 13658847
gtgcccgccccgacctcaaactcccgtcgccacccgctctcctcccctctcccctcccctcccctcccctcgcgccggccacgatcgaggcatggcgacgatgacgaccacgaccaccacgacgaagacggcgctgcgccaccgcgggtgctgcgggcacgcgccggcgccggcggaggacggcggcgacctggtggcgctgtcgagcgcggcggcggaggggctcgggaaagaggccgccaggtgggccggcgggctgccgcggctgaagcggttcgaggagctgccggactacctccgcgacaacgagttcatccgcggcggctaccgctgcgagtggtccgtccgcgacgcgctccgcagcgtcttcgcctggcacaacgagacgctcaacgtctggacccatctggggggcttcttcctgttcctggggctcgccgtcgccggccagacggagtggcggccggccggagcagccgcggcgccggggttcatgacgatggtgatgacgtccgccaacgcgtcgtcgttggcgaccaacaacagttcgagcacggcgatccagagcgcgctggcgtcgggcatcggcggcgcggggcacgcggtggcgcggtggccgcggacggtgttcgtgttgggggccatgacgtgcctgtcggtgagcgctgcggcgcacctgctggcaagccactcgcgccgcttcaaccggctcttctggcagctcgactacgccggcatcgccgtcatgatcgtcgcctccttcttcccgccggtctactacaccttcctcggcagccccgtcgcacagctcgcctacctctccgccatcacgctgctcggcgtgctcgtcgtggcggcgctcctggtgccggcccgctcgtcgccgcggctgcggcacctccgcgccggcctgttcgtgtccatggggctctcgggcgtcgtgccggcgctgcacgcgctctggctcaactggggccacccggagtgctacctggcgctgtcgctggagctggccatggggctcgtgtacgccacgggcgccggcttctacgtcgcgcgcgtgccggagcggtggcgcccgggcatgttcgactgcgtcggccacagccaccagatcttccacgtgctggtgctcgtcggcgccgtcacgcactacgccgccaccgccatcctcatcggctggcgcgacgccctggccgcggccgcgtcggcgctcttgtgacgccgcgcgtaggatgcataggcgtagggtgtgccattgattcgttgattcgtgtaactagcttagatgattctttgaacgtgtatcagatcaagtttgtgctcctggctttcttactgtcggtctgcactctgtgtttctgtaatgttgaatggcgtacagcggctgaggtgcaaaaggaaaagggacgagcactgcaacttttttacttgc

SEQ ID NO: 66675 - protein, 478 aa, Triticum aestivum
  peptide (1)..(478): Ceres Seq. ID no. 13658848
VPAPTSNSRRHPLSSPLPSPPLPSRRPRSRHGDDDDHDHHDEDGAAPPRVLRARAGAGGGRRRPGGAVERGGGGARERGRQVGRRAAAAEAVRGAAGLPPRQRVHPRRLPLRVVRPRRAPQRLRLAQRDAQRLDPSGGLLPVPGARRRRPDGVAAGRSSRGAGVHDDGDDVRQRVVVGDQQQFEHGDPERAGVGHRRRGARGGAVAADGVRVGGHDVPVGERCGAPAGKPLAPLQPALLAARLRRHRRHDRRLLLPAGLLHLPRQPRRTARLPLRHHAARRARRGGAPGAGPLVAAAAAPPRRPVRVHGALGRRAGAARALAQLGPPGVLPGAVAGAGHGARVRHGRRLLRRARAGAVAPGHVRLRRPQPPDLPRAGARRRRHALRRHRHPHRLARRPGRGRVGALVTPRVGCIGVGCAIDSLIRVTSLDDSLNVYQIKFVLLAFLLSVCTLCFCNVEWRTAAEVQKEKGRALQLFYL

SEQ ID NO: 66676 - protein, 406 aa, Triticum aestivum
  peptide (1)..(406): Ceres Seq. ID no. 13658849
CPPRPQTPVATRSPPLSPPLPSPRAGHDRGMATMTTTTTTTKTALRHRGCCGHAPAPAEDGGDLVALSSAAAEGLGKEAARWAGGLPRLKRFEELPDYLRDNEFIRGGYRCEWSVRDALRSVFAWHNETLNVWTHLGGFFLFLGLAVAGQTEWRPAGAAAAPGFMTMVMTSANASSLATNNSSSTAIQSALASGIGGAGHAVARWPRTVFVLGAMTCLSVSAAAHLLASHSRRFNRLFWQLDYAGIAVMIVASFFPPVYYTFLGSPVAQLAYLSAITLLGVLVVAALLVPARSSPRLRHLRAGLFVSMGLSGVVPALHALWLNWGHPECYLALSLELAMGLVYATGAGFYVARVPERWRPGMFDCVGHSHQIFHVLVLVGAVTHYAATAILIGWRDALAAAASALL

SEQ ID NO: 66677 - protein, 376 aa, Triticum aestivum
  peptide (1)..(376): Ceres Seq. ID no. 13658850
MATMTTTTTTTKTALRHRGCCGHAPAPAEDGGDLVALSSAAAEGLGKEAARWAGGLPRLKRFEELPDYLRDNEFIRGGYRCEWSVRDALRSVFAWHNETLNVWTHLGGFFLFLGLAVAGQTEWRPAGAAAAPGFMTMVMTSANASSLATNNSSSTAIQSALASGIGGAGHAVARWPRTVFVLGAMTCLSVSAAAHLLASHSRRFNRLFWQLDYAGIAVMIVASFFPPVYYTFLGSPVAQLAYLSAITLLGVLVVAALLVPARSSPRLRHLRAGLFVSMGLSGVVPALHALWLNWGHPECYLALSLELAMGLVYATGAGFYVARVPERWRPGMFDCVGHSHQIFHVLVLVGAVTHYAATAILIGWRDALAAAASALL

SEQ ID NO: 66678 - DNA, 1877 bp, Triticum aestivum
  misc_feature (1)..(1877): Ceres Seq. ID no. 13663328
cccactgtaggtgggcagtagtacttggtcatgtgccaccgtctcgtgcccctttgcatcttccaagctctctctgggctggagactctcacgcgtttgcttcaagcattgacccgagcataaatcttccagccacttgttcctggcctcttcttgatttctttctatcccctgcctgtcagtgtagtgctcagatttggtcatcatgaagccatgaacagagctggcgcctctggtgcaggatcctgacgacctgcgtctctgaagggggagaagggcttcttttctcagatcttcttgaagacttgtgaaaaatgaagccgcctttggaaaggaacccatccaggaagcgccattcatggtggtgggatagtcacattagccccaagaactcaaaatggcttgcagaaaacctcgaagaaatggataagcaagtgaaggaaatggtgcagcttattgaggaagatggcgactcctttgcaaagaaagctcaaatgtattatcagaggcgcccagtcctcgttacccatgtcgagaacttctaccggatgtaccgcgctttagctgagcgctacgacaatgttaccggtgaactgcgcaagaacatcccttcaaggatgcagtcccaaggatctttatccggttctgagttcggttcagagctgcaaaggtcgcccacaccatctcctgagccccagaagtcctggacaagggagcagagccctagagccgccggtttcaatttctttctgagtaacaagagcaatgactcaccgtcctcaaggaaggagcctgggtcagcttcacagtcagaatctgacatgaagtctgaagatggtgaggatgatggcattacctacacattgcaccagagagttctcgagctcgaggatgatctcaatgcggcaaaccggaagctgcttgacgcaaacgaaaagctcgaggttttcgaggagaggatcctgaggtgccattgcgattataaggaaaatggaaatggcgccgatcatgctaccaaaattagagacattgatggagagttcgtgtcaactaaggagaagctacaatcttcacaagtggagatcaacaatcttgaaaggaggctcgaagacgctgcaattttgtcagaagagcactccaggctgctggaacaaaacaagggactggaagctgaaattgtgagtctgaaggaagagatgacttcagctagacggcgtttcaacgacaaaatatccgagagtgatgccgagatcagccagtacaggcaagagcttgccaccgcgtccgagaagctgttgcaggagaagtccaccaacagcacagaggtaggaaagctgcaagaaatgaaccggatcaccagtctcaagctggagaaagtttctgaagagaagtctctagtggaggaccaggtgaaggagctggaggaggcgaacgccgaagccgaaaggcagaggcaggagctcgtccatgccgccgaaatgctgtcggaggacaagttcagacatgaagctgagatcctgacgatgcagcagagcatcgaggacctgaagccgaaacttgagagcatcgcaagagagaaatcgctgctgaaactctggttcgcggatctggagcgcgtcgtggagcgaggaaggagcgttgtcattcccccggaataacccggtttcgtctggaaattcagtagctagaatttagcaaactagcagtgctatctctttgtttttttggcctgagatgtaacatcatacggaactgtgaaaccctaccgtggacatcagcttttccttttcttggattatttcttgcactgtgaggtgatgggtggtggtcgtggtgtatgaaacatttgcactgaatgcatttcctttggcmcttct

SEQ ID NO: 66679 - protein, 447 aa, Triticum aestivum
  peptide (1)..(447): Ceres Seq. ID no. 15220219
MKPPLERNPSRKRHSWWWDSHISPKNSKWLAENLEEMDKQVKEMVQLIEEDGDSFAKKAQMYYQRRPVLVTHVENFYRMYRALAERYDNVTGELRKNIPSRMQSQGSLSGSEFGSELQRSPTPSPEPQKSWTREQSPRAAGFNFFLSNKSNDSPSSRKEPGSASQSESDMKSEDGEDDGITYTLHQRVLELEDDLNAANRKLLDANEKLEVFEERILRCHCDYKENGNGADHATKIRDIDGEFVSTKEKLQSSQVEINNLERRLEDAAILSEEHSRLLEQNKGLEAEIVSLKEEMTSARRRFNDKISESDAEISQYRQELATASEKLLQEKSTNSTEVGKLQEMNRITSLKLEKVSEEKSLVEDQVKELEEANAEAERQRQELVHAAEMLSEDKFRHEAEILTMQQSIEDLKPKLESIAREKSLLKLWFADLERVVERGRSVVIPPE

SEQ ID NO: 66680 - protein, 411 aa, Triticum aestivum
  peptide (1)..(411): Ceres Seq. ID no. 15220220
MDKQVKEMVQLIEEDGDSFAKKAQMYYQRRPVLVTHVENFYRMYRALAERYDNVTGELRKNIPSRMQSQGSLSGSEFGSELQRSPTPSPEPQKSWTREQSPRAAGFNFFLSNKSNDSPSSRKEPGSASQSESDMKSEDGEDDGITYTLHQRVLELEDDLNAANRKLLDANEKLEVFEERILRCHCDYKENGNGADHATKIRDIDGEFVSTKEKLQSSQVEINNLERRLEDAAILSEEHSRLLEQNKGLEAEIVSLKEEMTSARRRFNDKISESDAEISQYRQELATASEKLLQEKSTNSTEVGKLQEMNRITSLKLEKVSEEKSLVEDQVKELEEANAEAERQRQELVHAAEMLSEDKFRHEAEILTMQQSIEDLKPKLESIAREKSLLKLWFADLERVVERGRSVVIPPE

SEQ ID NO: 66681 - protein, 404 aa, Triticum aestivum
  peptide (1)..(404): Ceres Seq. ID no. 15220221
MVQLIEEDGDSFAKKAQMYYQRRPVLVTHVENFYRMYRALAERYDNVTGELRKNIPSRMQSQGSLSGSEFGSELQRSPTPSPEPQKSWTREQSPRAAGFNFFLSNKSNDSPSSRKEPGSASQSESDMKSEDGEDDGITYTLHQRVLELEDDLNAANRKLLDANEKLEVFEERILRCHCDYKENGNGADHATKIRDIDGEFVSTKEKLQSSQVEINNLERRLEDAAILSEEHSRLLEQNKGLEAEIVSLKEEMTSARRRFNDKISESDAEISQYRQELATASEKLLQEKSTNSTEVGKLQEMNRITSLKLEKVSEEKSLVEDQVKELEEANAEAERQRQELVHAAEMLSEDKFRHEAEILTMQQSIEDLKPKLESIAREKSLLKLWFADLERVVERGRSVVIPPE

SEQ ID NO: 66682 - DNA, 846 bp, Triticum aestivum
  misc_feature (1)..(846): Ceres Seq. ID no. 13658113
gagacttcatcggggaaatggaggaggaggagataaatctggccggcgccggcggaggggaggtgaagcaggaggtgggggaggaggaggagatcgagttcgagccgacggaggacgagctggtgctgcacttcctgcggccgcagctgcgcgggttcgcgccgcgcgtggcgggcgcggtggtggaggcggacccgtgcgcgtcgcccccctgggagctgctggcgcggcacggcctgctgcggcgcgggcacggctacttcttcgcggcgcggcggcgcgggaaggtgcggcgcaccccggagggcggcggcggcgcgtggatgcacagcggcaacaaggaggaccgccggtccgtgacggagctgggcgtggtggcgcgctggaccatgacgcggtactgcttctacctccgcggcggcgacggggcgcagcaggggcggcggagcaccgggtgggtgatgtccgagtacgagatcacggacccgcggtgctaccgccgcgccgacgacggcgaggaggaccagtactgggtgctctgccacgtccgccgcagcatcagggagaacgtcaagccgcgctcccgcaggcggtagcgggtcagtattactcagcaggctgccgcgcctcggctcggtcgccggccggcgcaagcccgtgtcagttcgtcctcgtcgttcgtcgctaagtcgccatgtgtgtgatctgatctgccatgtccgtctgtcggtgcgcggcacactgtctgtatttaagcagaatttggtcccttggattttgctggcttttgccagagtgtactgctctgccgtttgcaagtctaaaaatatgtcaaattttttcccc

SEQ ID NO: 66683 - protein, 228 aa, Triticum aestivum
  peptide (1)..(228): Ceres Seq. ID no. 13658114
RLHRGNGGGGDKSGRRRRRGGEAGGGGGGGDRVRADGGRAGAALPAAAAARVRAARGGRGGGGGPVRVAPLGAAGAARPAAARARLLLRGAAAREGAAHPGGRRRRVDAQRQQGGPPVRDGAGRGGALDHDAVLLLPPRRRRGAAGAAEHRVGDVRVRDHGPAVLPPRRRRRGGPVLGALPRPPQHQGERQAALPQAVAGQYYSAGCRASARSPAGASPCQFVLVVRR

SEQ ID NO: 66684 - protein, 197 aa, Triticum aestivum
  peptide (1)..(197): Ceres Seq. ID no. 13658115
DFIGEMEEEEINLAGAGGGEVKQEVGEEEEIEFEPTEDELVLHFLRPQLRGFAPRVAGAVVEADPCASPPWELLARHGLLRRGHGYFFAARRRGKVRRTPEGGGGAWMHSGNKEDRRSVTELGVVARWTMTRYCFYLRGGDGAQQGRRSTGWVMSEYEITDPRCYRRADDGEEDQYWVLCHVRRSIRENVKPRSRRR

SEQ ID NO: 66685 - protein, 192 aa, Triticum aestivum
  peptide (1)..(192): Ceres Seq. ID no. 13658116
MEEEEINLAGAGGGEVKQEVGEEEEIEFEPTEDELVLHFLRPQLRGFAPRVAGAVVEADPCASPPWELLARHGLLRRGHGYFFAARRRGKVRRTPEGGGGAWMHSGNKEDRRSVTELGVVARWTMTRYCFYLRGGDGAQQGRRSTGWVMSEYEITDPRCYRRADDGEEDQYWVLCHVRRSIRENVKPRSRRR

SEQ ID NO: 66686 - DNA, 389 bp, Triticum aestivum
  misc_feature (1)..(389): Ceres Seq. ID no. 12620877
gttttaaccgcacgctgctcaatccaatccaatcagtcccttgcttggatccatccatcccctccccaccaaataccgtcgatctctattcacctctcccaaagtcttcgtctggtcttctccacctcgacgcagacatggccgccgccgccgcgycggatctggagagcaaggccaaggaggccttcgtcgacgacgacttcgagctggccgccgagctctacacccaggccattgaggcggggccggccaccgcggaactctacgccgaccgagcccaggcgcacatcaagctgggcagttacactgaggctgtagctgatgccaacaaagcaattgaacttgatccttcgatgcataaagcataccttcggaagggctctgcttgc

SEQ ID NO: 66687 - protein, 129 aa, Triticum aestivum
  peptide (1)..(129): Ceres Seq. ID no. 13658637
  misc_feature (52)..(52): Xaa is any aa, unknown or other
FNRTLLNPIQSVPCLDPSIPSPPNTVDLYSPLPKSSSGLLHLDADMAAAAAXDLESKAKEAFVDDDFELAAELYTQAIEAGPATAELYADRAQAHIKLGSYTEAVADANKAIELDPSMHKAYLRKGSAC

SEQ ID NO: 66688 - protein, 105 aa, Triticum aestivum
  peptide (1)..(105): Ceres Seq. ID no. 13658638
  misc_feature (52)..(52): Xaa is any aa, unknown or other
VLTARCSIQSNQSLAWIHPSPPHQIPSISIHLSQSLRLVFSTSTQTWPPPPXRIWRARPRRPSSTTTSSWPPSSTPRPLRRGRPPRNSTPTEPRRTSSWAVTLRL

SEQ ID NO: 66689 - protein, 84 aa, Triticum aestivum
  peptide (1)..(84): Ceres Seq. ID no. 13658639
  misc_feature (7)..(7): Xaa is any aa, unknown or other
MAAAAAXDLESKAKEAFVDDDFELAAELYTQAIEAGPATAELYADRAQAHIKLGSYTEAVADANKAIELDPSMHKAYLRKGSAC

SEQ ID NO: 66690 - DNA, 2432 bp, Triticum aestivum
  misc_feature (1)..(2432): Ceres Seq. ID no. 14302351
ctctctcttcttcctcttcctctccccttcaccggcctcctccttcctccgcttcctcctcacgcccccaccccacccgctacctcgaaagcccgaaccctaaacccacgcagaagcggcggcggcgcggcctccgcctgtcgcatgcccgctgcctcctagcagcctgggccgccggcgatcgccggagtcggggagggcggcgagctcccgtgcgtcggagagagatgggggcgggcgggaagggctggccggagacggcgagccgcggggtgaggacggcctggttcatggtggtcatggtggcgtcgctgctcgtcgcgtcggcgcccgtcgtggtggccgccggcgacgtggccgtcacgctctggctcgaggcgcgcctcggctgcccgcgctgccgcggcctccgggaccacctccgggggtacgccttccggagctcgctcgtggacataccgctcctctccgtccttcgctccttcgccatcacctgcgtatacctcgtgtgtgatacttctggtctctctcacggcccgtaccttggaaccacaaccttctgttccttggcttcgctgctcatcttgctcatgaaggcctgcgtttacagtccagctcaggacattgggcctgagctctcgccgtcattggcggaccacaggctaaatatgaagaagctatggggaatgcctgcgcttttcctgtcatccttgatctttgctctcggccattttgttgtcgcttacagaacgagctgcagggctcgacgaaagctgctcatccatcgcattgaccctgaatcgattctggcttacaagaatgcctttcctggatgctacaaggttcctcggtcgcccactccgcacagtgcgaaactttattcaaggagcgagagcgagacaaagagaaaaactcttgtgcacgatgacagggatattccaatcagttttcttgctgatagtgatagcatgttcactgcttgccaggggatcactgtacactacaaaatgtctgatccatcaagttgcatacctccagctcctgaattgtttccagaaactaatcatgatgctgtttcgtcaagcatttctcctagaagacagaggcatgagagcccaccaacagcttcctcgagtacccgtcgtcttttgcataggagctttagtcatcagtaccaccaaacatcgttatatgcaccattgttggtagaaccgctgacctctccaacggtgtcagatggcatcccctttctcagtctcgacgacgacagcttacaggtgtgttcgagacctatgggctttgatctcgaggctggagagcacgggaaatttgctgttgttttggtccatgggtttggagggggagtatttgcatggagacatgttagtaatttgcttgctcgacaagtgggttgcactgtgctggcctttgatcgccctggatgggggttaacatctcgacctcgcagaaaggactgggaagacaagaatttgccaaacccgtacgagcttgagtcacaggttgatcttctgatttcattttgcttagacatgggcttgggctcggtcattttagttggtcatgatgatggcggcttgctggcactgaggaccgcagaaaagttacgtgcttctggagattctaggaaggttgaagtgaagggagttgttcttataggcgtaagcttatcaagagaagtgattcctgcatttgctcgtatactcctgcatactcctctgaggaaaaagcacatggtgcgcccacttctacgtactgaaatcactcaggtgatcaatcgacgagcatggtttgatgctaccaagttgacaacagatgttcttaatctttacaaggctccactatatgtcgagggctgggacgaagcactccatgaagtaggccgtctttcattttccaccgtcctatcatcaaaaagagcaacggaactactaagatcggtggaagacctccctgttttggtggtagcaggctctgaggatgctcttgtttctctgaagtcagcacaaactatggcttcagaacttgtaaattctaggctagtaactatatcaggatgtggtcatctgccacacgaagaatgtgccaatgcattgctctcagctctttctccgttcatctcaaaattggtatcatcagatgattcattgcaaagattgtagcatacacctgtccatcttcccttttgaattttgctctcttctgtgccctctacattgagtagatgacctctagctgttgcgagttggtgtgagcccatgttagttgcaaagtagtggagcctgacccaaaatctcaagggtcctagagctcccctaatttattttttggtcatatgtatttctgttcctgatctgttcaattgagcaagttgaatctgtacagcccatgcctgcagtgttccagttcacgtc

SEQ ID NO: 66691 - protein, 725 aa, Triticum aestivum
  peptide (1)..(725): Ceres Seq. ID no. 14302352
LSSSSSSPLHRPPPSSASSSRPHPTRYLESPNPKPTQKRRRRGLRLSHARCLLAAWAAGDRRSRGGRRAPVRRREMGAGGKGWPETASRGVRTAWFMVVMVASLLVASAPVVVAAGDVAVTLWLEARLGCPRCRGLRDHLRGYAFRSSLVDIPLLSVLRSFAITCVYLVCDTSGLSHGPYLGTTTFCSLASLLILLMKACVYSPAQDIGPELSPSLADHRLNMKKLWGMPALFLSSLIFALGHFVVAYRTSCRARRKLLIHRIDPESILAYKNAFPGCYKVPRSPTPHSAKLYSRSESETKRKTLVHDDRDIPISFLADSDSMFTACQGITVHYKMSDPSSCIPPAPELFPETNHDAVSSSISPRRQRHESPPTASSSTRRLLHRSFSHQYHQTSLYAPLLVEPLTSPTVSDGIPFLSLDDDSLQVCSRPMGFDLEAGEHGKFAVVLVHGFGGGVFAWRHVSNLLARQVGCTVLAFDRPGWGLTSRPRRKDWEDKNLPNPYELESQVDLLISFCLDMGLGSVILVGHDDGGLLALRTAEKLRASGDSRKVEVKGVVLIGVSLSREVIPAFARILLHTPLRKKHMVRPLLRTEITQVINRRAWFDATKLTTDVLNLYKAPLYVEGWDEALHEVGRLSFSTVLSSKRATELLRSVEDLPVLVVAGSEDALVSLKSAQTMASELVNSRLVTISGCGHLPHEECANALLSALSPFISKLVSSDDSLQRL

SEQ ID NO: 66692 - protein, 650 aa, Triticum aestivum
  peptide (1)..(650): Ceres Seq. ID no. 14302353
MGAGGKGWPETASRGVRTAWFMVVMVASLLVASAPVVVAAGDVAVTLWLEARLGCPRCRGLRDHLRGYAFRSSLVDIPLLSVLRSFAITCVYLVCDTSGLSHGPYLGTTTFCSLASLLILLMKACVYSPAQDIGPELSPSLADHRLNMKKLWGMPALFLSSLIFALGHFVVAYRTSCRARRKLLIHRIDPESILAYKNAFPGCYKVPRSPTPHSAKLYSRSESETKRKTLVHDDRDIPISFLADSDSMFTACQGITVHYKMSDPSSCIPPAPELFPETNHDAVSSSISPRRQRHESPPTASSSTRRLLHRSFSHQYHQTSLYAPLLVEPLTSPTVSDGIPFLSLDDDSLQVCSRPMGFDLEAGEHGKFAVVLVHGFGGGVFAWRHVSNLLARQVGCTVLAFDRPGWGLTSRPRRKDWEDKNLPNPYELESQVDLLISFCLDMGLGSVILVGHDDGGLLALRTAEKLRASGDSRKVEVKGVVLIGVSLSREVIPAFARILLHTPLRKKHMVRPLLRTEITQVINRRAWFDATKLTTDVLNLYKAPLYVEGWDEALHEVGRLSFSTVLSSKRATELLRSVEDLPVLVVAGSEDALVSLKSAQTMASELVNSRLVTISGCGHLPHEECANALLSALSPFISKLVSSDDSLQRL

SEQ ID NO: 66693 - protein, 629 aa, Triticum aestivum
  peptide (1)..(629): Ceres Seq. ID no. 14302354
MVVMVASLLVASAPVVVAAGDVAVTLWLEARLGCPRCRGLRDHLRGYAFRSSLVDIPLLSVLRSFAITCVYLVCDTSGLSHGPYLGTTTFCSLASLLILLMKACVYSPAQDIGPELSPSLADHRLNMKKLWGMPALFLSSLIFALGHFVVAYRTSCRARRKLLIHRIDPESILAYKNAFPGCYKVPRSPTPHSAKLYSRSESETKRKTLVHDDRDIPISFLADSDSMFTACQGITVHYKMSDPSSCIPPAPELFPETNHDAVSSSISPRRQRHESPPTASSSTRRLLHRSFSHQYHQTSLYAPLLVEPLTSPTVSDGIPFLSLDDDSLQVCSRPMGFDLEAGEHGKFAVVLVHGFGGGVFAWRHVSNLLARQVGCTVLAFDRPGWGLTSRPRRKDWEDKNLPNPYELESQVDLLISFCLDMGLGSVILVGHDDGGLLALRTAEKLRASGDSRKVEVKGVVLIGVSLSREVIPAFARILLHTPLRKKHMVRPLLRTEITQVINRRAWFDATKLTTDVLNLYKAPLYVEGWDEALHEVGRLSFSTVLSSKRATELLRSVEDLPVLVVAGSEDALVSLKSAQTMASELVNSRLVTISGCGHLPHEECANALLSALSPFISKLVSSDDSLQRL

SEQ ID NO: 66694 - DNA, 480 bp, Triticum aestivum
  misc_feature (1)..(480): Ceres Seq. ID no. 13658214
gctgggtctgcccaccttcttcctccgcctccgtccgtttctcttctctacgaacgcagcacgcaacgtggtcgagactacacaacctagaaaaaatcccatcgatctgctccagctttgcggcgcggcagccagccagccagcacccatggcggtggaagggataaccgagggcgtgaggggcctcaaggtggaggacggcgagggggcggcgggcgccgcggccgacgcgccggccgccgccgccgccggcggggaggggcagaggcggggcgccagcgccagcagcaaccgcatccaggtgtccaacacgamsaagcccctcttcttctacgtcaacctcgccaagaggtatatgcagcagcacggcgacntcgagctctcggcgctcgggatggccattgcgactgttgtaactgtggcggagattctgaagaacaacggcctcgctgttgagaagaagattagaacatccacggt

SEQ ID NO: 66695 - protein, 159 aa, Triticum aestivum
  peptide (1)..(159): Ceres Seq. ID no. 13658215
  misc_feature (105)..(105): Xaa is any aa, unknown or other
  misc_feature (125)..(125): Xaa is any aa, unknown or other
LGLPTFFLRLRPFLFSTNAARNVVETTQPRKNPIDLLQLCGAAASQPAPMAVEGITEGVRGLKVEDGEGAAGAAADAPAAAAAGGEGQRRGASASSNRIQVSNTXKPLFFYVNLAKRYMQQHGDXELSALGMAIATVVTVAEILKNNGLAVEKKIRTST

SEQ ID NO: 66696 - protein, 110 aa, Triticum aestivum
  peptide (1)..(110): Ceres Seq. ID no. 13658216
  misc_feature (56)..(56): Xaa is any aa, unknown or other
  misc_feature (76)..(76): Xaa is any aa, unknown or other
MAVEGITEGVRGLKVEDGEGAAGAAADAPAAAAAGGEGQRRGASASSNRIQVSNTXKPLFFYVNLAKRYMQQHGDXELSALGMAIATVVTVAEILKNNGLAVEKKIRTST

SEQ ID NO: 66697 - DNA, 761 bp, Triticum aestivum
  misc_feature (1)..(761): Ceres Seq. ID no. 13658261
aggctgataatagcttaaagtttgtagcaaggtaccaggttcatgaaacaaacatcaattccccatcgcataggcatctctaataaagtagtagtaataacaatagataatccccaatgaaatgccaaaatagcagcactcctcggtggatcaaggctcggggtcagcaccttactcctccgtggggggcggagcagtcaccgacgaaccctccgactcttcaccgctcggttccgcgggggtctctggagctgcggcggcggcagcggcgcgcgacttggcgagctcgaggaggcggcggctgacctccttggagtaggcctggaggacctcgatcccgtcctccagggaggcgggggaggcggcggcggactccgaggcggcggcgaaggcctcggcctcgacggcggctgcggcgacctcggcctcgggctcggggatggcgccgtagcgctgagagaggacgctgggcgcggacagggtctgcacgacgcgccggacaacggcgtcgcgtgtgcgctgcgacggcggccagatgctgagcgacgggagcagcgtctccgacgaggacttctctgccgacgccgaaggggcagctgcgtcggcgaaggattcagtgggcgcggggtggatgtcctcagcgccggcgttgggggcgtcctcggccatggcgtggagagcggagagcaagggggagggggcggagagggagagatctgtggcgtggagtgggaggagagcgaggtgtgcttctgtgggtt

SEQ ID NO: 66698 - protein, 75 aa, Triticum aestivum
  peptide (1)..(75): Ceres Seq. ID no. 13658262
MLSDGSSVSDEDFSADAEGAAASAKDSVGAGWMSSAPALGASSAMAWRAESKGEGAERERSVAWSGRRARCASVG

SEQ ID NO: 66699 - protein, 62 aa, Triticum aestivum
  peptide (1)..(62): Ceres Seq. ID no. 13658263
MKCQNSSTPRWIKARGQHLTPPWGAEQSPTNPPTLHRSVPRGSLELRRRQRRATWRARGGGG

SEQ ID NO: 66700 - protein, 43 aa, Triticum aestivum
  peptide (1)..(43): Ceres Seq. ID no. 13658264
MSSAPALGASSAMAWRAESKGEGAERERSVAWSGRRARCASVG

SEQ ID NO: 66701 - DNA, 922 bp, Triticum aestivum
  misc_feature (1)..(922): Ceres Seq. ID no. 13658282
atcgcctcgccacacaaactccagaagaaaatggcggcttgtgctgcgcccccttgcgtccgcatctcctgctccacaccttcaccgaccgctctccgccggccacgccgccggcgcgtcgcctccgcccgatgctccctcgccgcagcccccggtctccgggcgccgccggagctcgtcgactccatcctctccaaggtgaaggggactgaccggggcgtgctgctgccggaggaaggccaccaggaggtcgccgacgtcgcgcagcagctggggaagtactgcatcgacgagcccgtcaagtccccgcttatattcggagactgggacgtggtgtattgctcggtgccgacatcccccggagggatttaccgcacccctctcggacggctggtgttcaagaccgacgacatggttcaggtggtggaagcccccgacatcgtcaggaacaaggtctccttctccatctttggcctcgatggcgcggtgtctctgacaggcaagctgaatgtattggacagtaagtggattcaggtcatatttgagcccccggaactgaaggtaggctccttgggtttccgatatggtggcgagagtgaggtcaagctggaaatcacctatgtcgatgagaagatcaggctcgggaaaggatcccgaggctcgcttttcgtcttcctgagacaagattagaagggtaggttgcatattttgcatgtgctcgacgccacaagggatatcggccatatgggcgtctacgcaactgcttgcagatgtaaattcagagataaagcccacaaagtagttttttatgatattcatttctaccttaagcagattgccttgttgtgagcgaaaatgtttgcggtactcatgctgatcttgtttctggatgtacttatgataatactggggtttgagcagg

SEQ ID NO: 66702 - protein, 229 aa, Triticum aestivum
  peptide (1)..(229): Ceres Seq. ID no. 13658283
IASPHKLQKKMAACAAPPCVRISCSTPSPTALRRPRRRRVASARCSLAAAPGLRAPPELVDSILSKVKGTDRGVLLPEEGHQEVADVAQQLGKYCIDEPVKSPLIFGDWDVVYCSVPTSPGGIYRTPLGRLVFKTDDMVQVVEAPDIVRNKVSFSIFGLDGAVSLTGKLNVLDSKWIQVIFEPPELKVGSLGFRYGGESEVKLEITYVDEKIRLGKGSRGSLFVFLRQD

SEQ ID NO: 66703 - protein, 219 aa, Triticum aestivum
  peptide (1)..(219): Ceres Seq. ID no. 13658284
MAACAAPPCVRISCSTPSPTALRRPRRRRVASARCSLAAAPGLRAPPELVDSILSKVKGTDRGVLLPEEGHQEVADVAQQLGKYCIDEPVKSPLIFGDWDVVYCSVPTSPGGIYRTPLGRLVFKTDDMVQVVEAPDIVRNKVSFSIFGLDGAVSLTGKLNVLDSKWIQVIFEPPELKVGSLGFRYGGESEVKLEITYVDEKIRLGKGSRGSLFVFLRQD

SEQ ID NO: 66704 - DNA, 1741 bp, Triticum aestivum
  misc_feature (1)..(1741): Ceres Seq. ID no. 13663345
aaaagaaacaaacacgcacacgccacctcacgccgccccgcgcacactgcggccgcgccactcgcacacggccaccacctgctaggctgcgagcggcgagcggcgagatcggcggcgggcggaggaatggtggcgccggcgggaggagggtcgccgtcgcggtggccgtcggatgaggagcttgacattgtgcggaagaatgtggtcgagattagtggaagagatgcgagagaggttagggtggttgcttgcccctacaggatttgtcctttgggggcccacattgatcatcagggcggaatagtgactgctatgacaatcaattatggagtacttcttggctttgtgccctctgatgatgctgaggttgtactccagtctggtcaatttaaaggcattactcgattcagagttgatgacttgcaaaagcctattgagaaccgaggaaacataacttgggaaagctatgcaagaggtgcagtttatgccctgcaaaatagtggatatgatctcagaaagggtataataggttatatttctggagtgaatggacttgacagttcagggcttagttcgtctgcagctgttggcatcgcctatttgctggctttagaaaatgtaaatgatctggttttatcaccagttgataacattcagttggacaagtccattgaaaatagatatttgggtcttgaaaatggcattctagatccatcagccattttattgtctcgatatggctacctcaccttcatggattgcaagactgcctcaccttcctacgtctacttctcggaactaagtaaaagccagcaacctcaaggtcggccgccattcaagattttgttggcattttcaggtttgcaacataacctacccaagtcgcgtgggtataatatgcgagtcttcgagtgcaaagaggctgcacgtgctcttttatgtgcgtcaggctctgaagatgcaccaatactccgtaaagttgatccaggtgtatatgaggcccaaaagtgtatattagatgaaaatcttgccaagagagctgagcactatttctctgaaatgaagcgagttgttaagggaagagaggcatgggctcgtggagacctacaagaattgggacagctgatctctgcatctggccgcagctccatagtcaactacgaatgcgggagcaaagagatgatacagctgtacgagatcctcctgaaggcgccaggggtcctcggcgcgcggttcagcggcgctggcttcagaggctgctgcctcgccatcgtcgaaagcgaccgtgccgaggaggcggcggcgtacgttggcgccgagtacgagaggtcccagccagagctggtgagcaagatccccgcggatcgtcgcgtgctggtctgcgagcccggggactccgcgcaggtcatcttgcagtcatgagcgtcctgttagtcgggactttgtgaaggtgagaacacgtgcaaaattcgtacgtcctcgtccatctggaactccaccccctaaattctactccctccgtcccataatataggacgttttttgacactagtgtagcgtcaaaaaacatcttacattatgggatgaagggagtagacatttagtccaagataagactagcgttgttgtgtatgaactgtactcagtcgagctcccagatagctcatctgtgtatgtgtggaaccatttgattcattcatttccacgtaagcaataatcagtaatgcaaaggttctctttc

SEQ ID NO: 66705 - protein, 473 aa, Triticum aestivum
  peptide (1)..(473): Ceres Seq. ID no. 13663346
KRNKHAHATSRRPAHTAAAPLAHGHHLLGCERRAARSAAGGGMVAPAGGGSPSRWPSDEELDIVRKNVVEISGRDAREVRVVACPYRICPLGAHIDHQGGIVTAMTINYGVLLGFVPSDDAEVVLQSGQFKGITRFRVDDLQKPIENRGNITWESYARGAVYALQNSGYDLRKGIIGYISGVNGLDSSGLSSSAAVGIAYLLALENVNDLVLSPVDNIQLDKSIENRYLGLENGILDPSAILLSRYGYLTFMDCKTASPSYVYFSELSKSQQPQGRPPFKILLAFSGLQHNLPKSRGYNMRVFECKEAARALLCASGSEDAPILRKVDPGVYEAQKCILDENLAKRAEHYFSEMKRVVKGREAWARGDLQELGQLISASGRSSIVNYECGSKEMIQLYEILLKAPGVLGARFSGAGFRGCCLAIVESDRAEEAAAYVGAEYERSQPELVSKIPADRRVLVCEPGDSAQVILQS

SEQ ID NO: 66706 - protein, 431 aa, Triticum aestivum
  peptide (1)..(431): Ceres Seq. ID no. 13663347
MVAPAGGGSPSRWPSDEELDIVRKNVVEISGRDAREVRVVACPYRICPLGAHIDHQGGIVTAMTINYGVLLGFVPSDDAEVVLQSGQFKGITRFRVDDLQKPIENRGNITWESYARGAVYALQNSGYDLRKGIIGYISGVNGLDSSGLSSSAAVGIAYLLALENVNDLVLSPVDNIQLDKSIENRYLGLENGILDPSAILLSRYGYLTFMDCKTASPSYVYFSELSKSQQPQGRPPFKILLAFSGLQHNLPKSRGYNMRVFECKEAARALLCASGSEDAPILRKVDPGVYEAQKCILDENLAKRAEHYFSEMKRVVKGREAWARGDLQELGQLISASGRSSIVNYECGSKEMIQLYEILLKAPGVLGARFSGAGFRGCCLAIVESDRAEEAAAYVGAEYERSQPELVSKIPADRRVLVCEPGDSAQVILQS

SEQ ID NO: 66707 - protein, 369 aa, Triticum aestivum
  peptide (1)..(369): Ceres Seq. ID no. 13663348
MTINYGVLLGFVPSDDAEVVLQSGQFKGITRFRVDDLQKPIENRGNITWESYARGAVYALQNSGYDLRKGIIGYISGVNGLDSSGLSSSAAVGIAYLLALENVNDLVLSPVDNIQLDKSIENRYLGLENGILDPSAILLSRYGYLTFMDCKTASPSYVYFSELSKSQQPQGRPPFKILLAFSGLQHNLPKSRGYNMRVFECKEAARALLCASGSEDAPILRKVDPGVYEAQKCILDENLAKRAEHYFSEMKRVVKGREAWARGDLQELGQLISASGRSSIVNYECGSKEMIQLYEILLKAPGVLGARFSGAGFRGCCLAIVESDRAEEAAAYVGAEYERSQPELVSKIPADRRVLVCEPGDSAQVILQS

SEQ ID NO: 66708 - DNA, 1693 bp, Triticum aestivum
  misc_feature (1)..(1693): Ceres Seq. ID no. 15169615
agatctacatcctccctccaccccgtctcgccggccgcccggccgccccccaatcgtgcgtcggacgaggccacggcgatggatctcctctcggacgcccagccccagtggctcctcgccggcgccgcgctgctgctcgccaccgtcgccttcctcagggtcctcctcggctccggcggccgcggcaagcgggcgccgccgacgatcccgggggcgcccgtcgtgggcgggctcctgcgcttcctgcggggccccatcccgctcatccgggccgagtacgcccgcctcggccccgtcttcaccgtccccatcctcacccgccggatcaccttcctcatcggccccgacgtctcggcgcacttcttcaagagcaacgagtccgacatgagccagcaggaggtctaccgcttcaacgtccccaccttcggccccggggtcgtcttcgacgtcgactaccaggtcaggcaggagcagttcaggttcttcaccgaggcgctcagggccaacaagctccgcagctacgtcgaccagatggttgccgaggccgaggagtacttctcaaagtggggagaaagcggcactgtggatctgaagtatgaactggagcacctcatcatactgactgctagccgatgcttgttgggaagggaagtgcgagaaaaattgtttgatgatgtttctgctctcttccatgatcttgacaatgggatgcagccaatcagtgtcatctttccctacctcccaatccctgcacaccgtcgccgtgaccaggcacggacacgtttggcggagatctttgccacgatcatcaagtcccgcaaggcctctggacagtccgaggaagacatgctgcagtgcttcattgattccaagtacaagaatggccgccagaccacagaaagtgaggtgactgggctacttattgcagccctgtttgctggacagcacactagctcgatcacctcaacctggactggggcctacctgcttaagttccagcagtactttgcagaggctgttgaggagcagaaggaggtcatgaagaggcatggtgacaagatcgatcacgacatattggcagagatggatgtcctctaccggtgcatcaaggaggcgctccggctccacccgccgctgatcatgctgcttcgccaatcacactctgacttcagcgtgaccacgagggaaggcaaagagtttgatatccccaagggccacatcgtcgcaacatctcctgctttcgctaacaggctcccccatatcttcaagaacccggactcgtatgaccctgaccggtttgcagctgggagggaggaggacaaggttgcgggtgccttctcgtacatctcctttgggggtggcaggcacgggtgcctgggtgagcccttcgcgtacctgcagatcaaggcgatatggacacacctcctgaggaactttgagtttgagctggtctcaccgttcccagagaacgactggaatgcgatggtcgtcggcatcaagggcgaggtgatggtcagctacaagcggcggaagcttgtcgtcgacaactagagagcgggtggtcccatagggggtgtttgcttctgtatttgttccatttaagttttttctattcgcacgccaacctgtagggtatctatcttgccattgttttagggtactttgatttgcttccagtgattatttagacgtg

SEQ ID NO: 66709 - protein, 516 aa, Triticum aestivum
  peptide (1)..(516): Ceres Seq. ID no. 15169616
RSTSSLHPVSPAARPPPNRASDEATAMDLLSDAQPQWLLAGAALLLATVAFLRVLLGSGGRGKRAPPTIPGAPVVGGLLRFLRGPIPLIRAEYARLGPVFTVPILTRRITFLIGPDVSAHFFKSNESDMSQQEVYRFNVPTFGPGVVFDVDYQVRQEQFRFFTEALRANKLRSYVDQMVAEAEEYFSKWGESGTVDLKYELEHLIILTASRCLLGREVREKLFDDVSALFHDLDNGMQPISVIFPYLPIPAHRRRDQARTRLAEIFATIIKSRKASGQSEEDMLQCFIDSKYKNGRQTTESEVTGLLIAALFAGQHTSSITSTWTGAYLLKFQQYFAEAVEEQKEVMKRHGDKIDHDILAEMDVLYRCIKEALRLHPPLIMLLRQSHSDFSVTTREGKEFDIPKGHIVATSPAFANRLPHIFKNPDSYDPDRFAAGREEDKVAGAFSYISFGGGRHGCLGEPFAYLQIKAIWTHLLRNFEFELVSPFPENDWNAMVVGIKGEVMVSYKRRKLVVDN

SEQ ID NO: 66710 - protein, 490 aa, Triticum aestivum
  peptide (1)..(490): Ceres Seq. ID no. 15169617
MDLLSDAQPQWLLAGAALLLATVAFLRVLLGSGGRGKRAPPTIPGAPVVGGLLRFLRGPIPLIRAEYARLGPVFTVPILTRRITFLIGPDVSAHFFKSNESDMSQQEVYRFNVPTFGPGVVFDVDYQVRQEQFRFFTEALRANKLRSYVDQMVAEAEEYFSKWGESGTVDLKYELEHLIILTASRCLLGREVREKLFDDVSALFHDLDNGMQPISVIFPYLPIPAHRRRDQARTRLAEIFATIIKSRKASGQSEEDMLQCFIDSKYKNGRQTTESEVTGLLIAALFAGQHTSSITSTWTGAYLLKFQQYFAEAVEEQKEVMKRHGDKIDHDILAEMDVLYRCIKEALRLHPPLIMLLRQSHSDFSVTTREGKEFDIPKGHIVATSPAFANRLPHIFKNPDSYDPDRFAAGREEDKVAGAFSYISFGGGRHGCLGEPFAYLQIKAIWTHLLRNFEFELVSPFPENDWNAMVVGIKGEVMVSYKRRKLVVDN

SEQ ID NO: 66711 - protein, 388 aa, Triticum aestivum
  peptide (1)..(388): Ceres Seq. ID no. 15169618
MSQQEVYRFNVPTFGPGVVFDVDYQVRQEQFRFFTEALRANKLRSYVDQMVAEAEEYFSKWGESGTVDLKYELEHLIILTASRCLLGREVREKLFDDVSALFHDLDNGMQPISVIFPYLPIPAHRRRDQARTRLAEIFATIIKSRKASGQSEEDMLQCFIDSKYKNGRQTTESEVTGLLIAALFAGQHTSSITSTWTGAYLLKFQQYFAEAVEEQKEVMKRHGDKIDHDILAEMDVLYRCIKEALRLHPPLIMLLRQSHSDFSVTTREGKEFDIPKGHIVATSPAFANRLPHIFKNPDSYDPDRFAAGREEDKVAGAFSYISFGGGRHGCLGEPFAYLQIKAIWTHLLRNFEFELVSPFPENDWNAMVVGIKGEVMVSYKRRKLVVDN

SEQ ID NO: 66712 - DNA, 1083 bp, Triticum aestivum
  misc_feature (1)..(1083): Ceres Seq. ID no. 13659098
agcccacacccccctcgtcgctctcaccccctcccgaatcaccctgtatccctctcatcctcgtccacccatgaaaccctagcccccttctcctaatcgccactgccgccttctccctcccagatccaatcctgctcgcgtcggccacctccctccagcggagctcgacccccaccccccgccgctgctccaccctctcccatgagggtctctgaggcccgcgcgcgcacaacctccgtcccctgttgctccaatccggccagcgctccctccacctcgtctctcccgatcccaccggtcggcggtgaccttcaccctagcagtcatactccaccctagcagtcgatcccgaccatcgctgcttcaccagcctcctcatctggcatctccccgagggcggccgatgccagacaggccgtcgacgcgccggacctcaaggccggtcgtgctgctccttctgcctgcgtcccctcgaccgctgtctgcaagatctccctcctcaaggagatgcagcatcggaacatcatcaggctgcaggacgtggtgcataacgagaagagggagggcgccatggcgaagaaggagggaccttgcggccattgcggagtcacaagtgtattgttcctgtacccgagtggctacatcagggaagacccacttggagtccccaacaacctgagccctatgtgcagcaagtcgttgtcgggaggcgcctgcgctgacggtttatgggaccgaatacaacaccaaggatggaataggggtggtgaaattatggtacagaataccagaaattcttctgggtgcgaggcagtattctacccttgttggtgaagtgcgaatccatgttcgaagttttgaagcatatcgacaaagagtagcatattatgtgttgtaattgtaggcagtagtaggcatatctgagttgtaatatactataacgattgtaatagattaatgtagtattggttttggaccaatttcatttgctctttggtctgttcgaaagaatgttgtgcatgtgatttgaatacccatgaaatggaaacctgacaagtgggtcaaggttataatggttgtttg

SEQ ID NO: 66713 - protein, 108 aa, Triticum aestivum
  peptide (1)..(108): Ceres Seq. ID no. 13659099
MQHRNIIRLQDVVHNEKREGAMAKKEGPCGHCGVTSVLFLYPSGYIREDPLGVPNNLSPMCSKSLSGGACADGLWDRIQHQGWNRGGEIMVQNTRNSSGCEAVFYPCW

SEQ ID NO: 66714 - protein, 91 aa, Triticum aestivum
  peptide (1)..(91): Ceres Seq. ID no. 13659100
MPDRPSTRRTSRPVVLLLLPASPRPLSARSPSSRRCSIGTSSGCRTWCITRRGRAPWRRRRDLAAIAESQVYCSCTRVATSGKTHLESPTT

SEQ ID NO: 66715 - protein, 87 aa, Triticum aestivum
  peptide (1)..(87): Ceres Seq. ID no. 13659101
MAKKEGPCGHCGVTSVLFLYPSGYIREDPLGVPNNLSPMCSKSLSGGACADGLWDRIQHQGWNRGGEIMVQNTRNSSGCEAVFYPCW

SEQ ID NO: 66716 - DNA, 1563 bp, Triticum aestivum
  misc_feature (1)..(1563): Ceres Seq. ID no. 15179860
acagatttcctcccaccttccttttccctccccccctctccggccggcgaagaatctcaccgccgccgccccctcctcgccggcccgccatggcgctgtaccgccgcgcggcctccgcgatccggcggcgcggggccctgcccctgctcccggcgcgggcgatggcgtcgctcttcggccacgtcgagccggcgcccaaggaccccatcctcggcgtcaccgaggccttcctcgccgacccctcccccgacaaagtcaacgtcggcgtcggcgcctaccgggacgacaacggcaagcccgtggtgctcgactgcgtgcgcgaggcggagcgccggatcgccggcaacctcaacatggagtaccttccaatgggagggagtatgcacatgattgaggagtcactaaagctggcgtacggcgaggactccgagttcatcaaagataaaagaattgcagcggtgcaggcactttcaggaactggcgcatgccgtctcttcgctgatttccagaagcgtttcttgccggattcgcagatctacatacctacaccaacgtggtccaaccatcataatatttggagggatgctcaagtgccacagaggacattctcatattaccatccggaatcgagagggcttgactttgcaggattgatggatgatatcaagaatgctccaaatggttcgttctttttgcttcatgcatgtgcccataatcctactggagtagatcctactgaggaacaatggcgagaaatatcctatcagttcaagttgaagaatcatttcccattttttgacatggcataccaaggatttgctagcggtgatccagagagagatgccaaggcaatccgtatattccttgaagatggacaccaaattggatgtgctcagtcatatgcaaagaacatgggtctttatggccagagagcgggatgtctgagtatcctctgcgaggatgagatgcaagcagttgctgttaagagccaattgcaacagattgcgagaccaatgtacagcaacccacctgttcatggtgcgctggttgtttcaattatccttagtgatccagaattgaagaatgtatggttgggagaggtcaagggtatggctgatcgtatcattggaatgcggaaggcacttagggagaatcttgaaaagttaggttcaccttcatcatgggagcatgtcaccaatcagattggaatgttttgctacagtggaatgacaccggaacaagttgaccgcttgactagtgaataccatatctacatgacacgcaacgggagaataagcatggccggcgtaacgacgggcaacgtcgcctacttggctaacgccattcatgatgttaccaagtgaaattgaggaccatcttcagcgaatggagggagagcgttttccctttgtttgtagggctattcgctttatactctcacatgctagagaaataaataagttctaggaagtaaacctgttgcggctgtccaacaacggaaaattctacctgtatgtatggaggagcagagacgtcctgacttattttttgcgagattatcct

SEQ ID NO: 66717 - protein, 453 aa, Triticum aestivum
  peptide (1)..(453): Ceres Seq. ID no. 15179861
RFPPTFLFPPPLSGRRRISPPPPPPRRPAMALYRRAASAIRRRGALPLLPARAMASLFGHVEPAPKDPILGVTEAFLADPSPDKVNVGVGAYRDDNGKPVVLDCVREAERRIAGNLNMEYLPMGGSMHMIEESLKLAYGEDSEFIKDKRIAAVQALSGTGACRLFADFQKRFLPDSQIYIPTPTWSNHHNIWRDAQVPQRTFSYYHPESRGLDFAGLMDDIKNAPNGSFFLLHACAHNPTGVDPTEEQWREISYQFKLKNHFPFFDMAYQGFASGDPERDAKAIRIFLEDGHQIGCAQSYAKNMGLYGQRAGCLSILCEDEMQAVAVKSQLQQIARPMYSNPPVHGALVVSIILSDPELKNVWLGEVKGMADRIIGMRKALRENLEKLGSPSSWEHVTNQIGMFCYSGMTPEQVDRLTSEYHIYMTRNGRISMAGVTTGNVAYLANAIHDVTK

SEQ ID NO: 66718 - protein, 424 aa, Triticum aestivum
  peptide (1)..(424): Ceres Seq. ID no. 15179862
MALYRRAASAIRRRGALPLLPARAMASLFGHVEPAPKDPILGVTEAFLADPSPDKVNVGVGAYRDDNGKPVVLDCVREAERRIAGNLNMEYLPMGGSMHMIEESLKLAYGEDSEFIKDKRIAAVQALSGTGACRLFADFQKRFLPDSQIYIPTPTWSNHHNIWRDAQVPQRTFSYYHPESRGLDFAGLMDDIKNAPNGSFFLLHACAHNPTGVDPTEEQWREISYQFKLKNHFPFFDMAYQGFASGDPERDAKAIRIFLEDGHQIGCAQSYAKNMGLYGQRAGCLSILCEDEMQAVAVKSQLQQIARPMYSNPPVHGALVVSIILSDPELKNVWLGEVKGMADRIIGMRKALRENLEKLGSPSSWEHVTNQIGMFCYSGMTPEQVDRLTSEYHIYMTRNGRISMAGVTTGNVAYLANAIHDVTK

SEQ ID NO: 66719 - protein, 400 aa, Triticum aestivum
  peptide (1)..(400): Ceres Seq. ID no. 15179863
MASLFGHVEPAPKDPILGVTEAFLADPSPDKVNVGVGAYRDDNGKPVVLDCVREAERRIAGNLNMEYLPMGGSMHMIEESLKLAYGEDSEFIKDKRIAAVQALSGTGACRLFADFQKRFLPDSQIYIPTPTWSNHHNIWRDAQVPQRTFSYYHPESRGLDFAGLMDDIKNAPNGSFFLLHACAHNPTGVDPTEEQWREISYQFKLKNHFPFFDMAYQGFASGDPERDAKAIRIFLEDGHQIGCAQSYAKNMGLYGQRAGCLSILCEDEMQAVAVKSQLQQIARPMYSNPPVHGALVVSIILSDPELKNVWLGEVKGMADRIIGMRKALRENLEKLGSPSSWEHVTNQIGMFCYSGMTPEQVDRLTSEYHIYMTRNGRISMAGVTTGNVAYLANAIHDVTK

SEQ ID NO: 66720 - DNA, 991 bp, Triticum aestivum
  misc_feature (1)..(991): Ceres Seq. ID no. 12620986
cctccctcccctttctcctccccctgcccccgaggaaagaaagaaagaagaacagagtccacacggcagaggccagcggcggagaagcgggatgccgatcctgtacgcggtggtggcgcggggcgcgacggtgctggcggagcacagcgcggcggcgaccaacgcgggcgccgtcgcgcgccaggtcctcgagcgcctccccggcggcggcgccgacagccacgtctcctacacccaggaccgctacgtcttccacgccaagcgcaccgacggcatcaccgccctctgcatggccgacgacgccgccggacggcgtatcccatttgctttcctcgaggatatccatggaaagtttgttaagacatatggccgtgctgcactgacagctcttgcttatgcaatgaacgacgaattctcaagggttctcagtcagcaaatggactactattcaaatgaccctagtgcagatcaaatcaacctaatgaggggcgaaatcagtcaggttaggagtgttatgattgataatattgataaagtccttgaaagaggtgaccgtttagacctattggtggacaagactacaactatgcaaggaaatacggttcgattcaaaagacaagctcgccgctacagaagcacaacttggtggagaaatgtcaaactcacggccgcgttgatactcctcctgcttgtaatagtatacatcgccctcttcttcgtgtgccacggcttcaccttgccgacttgcatcaggtgaggggggccaggggcatataaattcgcctcgtggtgtgcttgtgtccatggcttgcctgtctcccagcccaggagagcgaccgttgcagcaccagtgcaaccagtcgcattgcaaaattattttttgtgtgtagagaggaaggggagggacctgagcctgctatttattctgtaattgtgacgccttggattgtgaagactccttttggaacgtaatcgagtgccttgctcattc

SEQ ID NO: 66721 - protein, 251 aa, Triticum aestivum
  peptide (1)..(251): Ceres Seq. ID no. 12620987
LPPLSPPPAPEERKKEEQSPHGRGQRRRSGMPILYAVVARGATVLAEHSAAATNAGAVARQVLERLPGGGADSHVSYTQDRYVFHAKRTDGITALCMADDAAGRRIPFAFLEDIHGKFVKTYGRAALTALAYAMNDEFSRVLSQQMDYYSNDPSADQINLMRGEISQVRSVMIDNIDKVLERGDRLDLLVDKTTTMQGNTVRFKRQARRYRSTTWWRNVKLTAALILLLLVIVYIALFFVCHGFTLPTCIR

SEQ ID NO: 66722 - protein, 221 aa, Triticum aestivum
  peptide (1)..(221): Ceres Seq. ID no. 12620988
MPILYAVVARGATVLAEHSAAATNAGAVARQVLERLPGGGADSHVSYTQDRYVFHAKRTDGITALCMADDAAGRRIPFAFLEDIHGKFVKTYGRAALTALAYAMNDEFSRVLSQQMDYYSNDPSADQINLMRGEISQVRSVMIDNIDKVLERGDRLDLLVDKTTTMQGNTVRFKRQARRYRSTTWWRNVKLTAALILLLLVIVYIALFFVCHGFTLPTCIR

SEQ ID NO: 66723 - protein, 155 aa, Triticum aestivum
  peptide (1)..(155): Ceres Seq. ID no. 12620989
MADDAAGRRIPFAFLEDIHGKFVKTYGRAALTALAYAMNDEFSRVLSQQMDYYSNDPSADQINLMRGEISQVRSVMIDNIDKVLERGDRLDLLVDKTTTMQGNTVRFKRQARRYRSTTWWRNVKLTAALILLLLVIVYIALFFVCHGFTLPTCIR

SEQ ID NO: 66724 - DNA, 837 bp, Triticum aestivum
  misc_feature (1)..(837): Ceres Seq. ID no. 12621257
cattgccctccacgagccacaggttgacgctggcccggattctgttcggtggcgcctagagccgtcgggacaattctccaccaagttcctctaccgggctatcgccccctcctccgccccacctcccctcacggcggtttggcatgtccgccttcccctgaagatctgaatcttcatgtggcaatggatccgcggacggattccgtctggcgtagaggtccgcaagcgcaatggccccggtaccggcctttacccgctttgtggcgtccctgaagactcgaatcacatcttcttcacttgcttttccgcccaatttctttggggctgttttcgtgaggtggttggtggcaactggtgccacaccaatttccccgacatgttcgctgaactccaggcctcctccccgcattctcgccacattaggtggttggagattgggactcttgcttggaccctctggacgatccgcaatagatttgtgatctagcgcattccgcttcagcgtgctactgacgctctcttcaaactgtctggttacttgcagctctggcagccgcttagccgccccaggatcgggacgccatctctgccttcatcgccgacctccgctcgatggtcgtccacttatcgccgccgctccctccgccacctcccgagccggattaggggtcgggtccctccccggccccattttgtgtttattttgggcttgttgaggtgtgccctcagcaaaaccttttgtactctgtcttgtgagacttgtgtgtgtgtggtgtgaaccttcttgtgtactggtgctatgtggcggtttgctttatttataaagcagggcgaaag

SEQ ID NO: 66725 - protein, 103 aa, Triticum aestivum
  peptide (1)..(103): Ceres Seq. ID no. 12621258
MWQWIRGRIPSGVEVRKRNGPGTGLYPLCGVPEDSNHIFFTCFSAQFLWGCFREVVGGNWCHTNFPDMFAELQASSPHSRHIRWLEIGTLAWTLWTIRNRFVI

SEQ ID NO: 66726 - protein, 83 aa, Triticum aestivum
  peptide (1)..(83): Ceres Seq. ID no. 12621259
MAPVPAFTRFVASLKTRITSSSLAFPPNFFGAVFVRWLVATGATPISPTCSLNSRPPPRILATLGGWRLGLLLGPSGRSAIDL

SEQ ID NO: 66727 - protein, 55 aa, Triticum aestivum
  peptide (1)..(55): Ceres Seq. ID no. 12621260
IALHEPQVDAGPDSVRWRLEPSGQFSTKFLYRAIAPSSAPPPLTAVWHVRLPLKI

SEQ ID NO: 66728 - DNA, 1881 bp, Triticum aestivum
  misc_feature (1)..(1881): Ceres Seq. ID no. 15176077
accattcgaaagatccaccgaagatttttctcctcactctcctcgacctcacagctctcctctgccagcagcgcagatttatagacacaagctagcacacagcaagctcagagcacctcgctggtctaagtgatccttctcaaggatcatttggatggcctcttcctcctcctcctgtgcatcctcatttctgcggccatcgtgtcctacgcccaccacgtaatccggcggcaacgccagggctgcgctcatggccgccatgagcaagccgccctcaagctgccccctggctccatgggcctgccttacatcggcgagaccctccagctctactcccaggaccccagcgtcttcctctcctccaagcagaagcggtacggcgagatcttcaagacgcacctcctcggctgcccgtgcgtgatgctggcgagcccggaggcggcgcggttcgtgctggtgtcgcgggcaaacctgttcaagccgacgtacccgcggagcaaggagcgcctcatcggcccgtcggcgctcttcttccaccagggcgactaccacctccgtctccgcaggctcgtccagggcccgctcggccccgaggccctgcgcaagctcgtgccggacatcgaggccgccgtgcgggcaaccctcgcggcctgggcggacggcgacgtcgccagcaccttccacgccatgaagaggctctcgttcgacgtcggcatcgtgacgatcttcggcgggcggctggacgagcggcggaaggaggagctccggcggaactacgccgtcgtggagaaaggctacaactccttccccaacagcttccccgggacgctatactacaaggcgatccaggcgaggcggcggctgaacggcgtgctgagcgacatcctgcacgagaggagggagcggggcgagcccggcgacgacctgctcggctgcctcatgcggtcgcgggccggcggcgacgacggcgacgagggcgcgctgttgacggacgagcaggtcgccgacaacgtcatcggcgtgctgttcgcggcgcaggacacgacggccagcgtgctcacctggatcgtcaagtacctccacgaccggccgaagctgctggaggccgtgagggcggagcacgccgcgatccacgaggccaacgacggcgggaggcggccgctgacatgggcgcagacgaggagcatgacgctgacgcacagggtgattttggagagcctgaggatggcgagcatcatctccttcacgttcagggaggccgtggccgacgtggagtacaaagggtttcttatccccaaggggtggaaggtgatgccgctcttcaggaacatccatcacagcccggactacttccaggatccacagaagttcgacccttcgagattcaaggtggcgccgcggccgagcaccttcacgccgttcgggagcggggtgcacgcgtgccccgggaacgagctggccaagctcgagatgctggtgctcatccaccacctggtcaccggctacaggtgggaggttgttggatcgagcgacgacgtcgagtacagcccattccctgttccccagaacggcctgctcgccaggttacggcgggatgacagcgtctgcgtgggtaggaaggggtgcccgactgatgacaactacgacgacgaagacgaagtgatagtgtgattagtcaacgtagatagctagagggctcttctctccctttttgttgttattgttgttgttgttgttgtggcattcttctctaggaaaatcattagagaagaaacaacagaacgactttttaggatgacgatgatcatgtaccgtagtggttatgttgtcaatgatgtattgtcattgatacacgcataaaatgacgcttcctttttccgg

SEQ ID NO: 66729 - protein, 458 aa, Triticum aestivum
  peptide (1)..(458): Ceres Seq. ID no. 15176078
MGLPYIGETLQLYSQDPSVFLSSKQKRYGEIFKTHLLGCPCVMLASPEAARFVLVSRANLFKPTYPRSKERLIGPSALFFHQGDYHLRLRRLVQGPLGPEALRKLVPDIEAAVRATLAAWADGDVASTFHAMKRLSFDVGIVTIFGGRLDERRKEELRRNYAVVEKGYNSFPNSFPGTLYYKAIQARRRLNGVLSDILHERRERGEPGDDLLGCLMRSRAGGDDGDEGALLTDEQVADNVIGVLFAAQDTTASVLTWIVKYLHDRPKLLEAVRAEHAAIHEANDGGRRPLTWAQTRSMTLTHRVILESLRMASIISFTFREAVADVEYKGFLIPKGWKVMPLFRNIHHSPDYFQDPQKFDPSRFKVAPRPSTFTPFGSGVHACPGNELAKLEMLVLIHHLVTGYRWEVVGSSDDVEYSPFPVPQNGLLARLRRDDSVCVGRKGCPTDDNYDDEDEVIV

SEQ ID NO: 66730 - protein, 416 aa, Triticum aestivum
  peptide (1)..(416): Ceres Seq. ID no. 15176079
MLASPEAARFVLVSRANLFKPTYPRSKERLIGPSALFFHQGDYHLRLRRLVQGPLGPEALRKLVPDIEAAVRATLAAWADGDVASTFHAMKRLSFDVGIVTIFGGRLDERRKEELRRNYAVVEKGYNSFPNSFPGTLYYKAIQARRRLNGVLSDILHERRERGEPGDDLLGCLMRSRAGGDDGDEGALLTDEQVADNVIGVLFAAQDTTASVLTWIVKYLHDRPKLLEAVRAEHAAIHEANDGGRRPLTWAQTRSMTLTHRVILESLRMASIISFTFREAVADVEYKGFLIPKGWKVMPLFRNIHHSPDYFQDPQKFDPSRFKVAPRPSTFTPFGSGVHACPGNELAKLEMLVLIHHLVTGYRWEVVGSSDDVEYSPFPVPQNGLLARLRRDDSVCVGRKGCPTDDNYDDEDEVIV

SEQ ID NO: 66731 - protein, 327 aa, Triticum aestivum
  peptide (1)..(327): Ceres Seq. ID no. 15176080
MKRLSFDVGIVTIFGGRLDERRKEELRRNYAVVEKGYNSFPNSFPGTLYYKAIQARRRLNGVLSDILHERRERGEPGDDLLGCLMRSRAGGDDGDEGALLTDEQVADNVIGVLFAAQDTTASVLTWIVKYLHDRPKLLEAVRAEHAAIHEANDGGRRPLTWAQTRSMTLTHRVILESLRMASIISFTFREAVADVEYKGFLIPKGWKVMPLFRNIHHSPDYFQDPQKFDPSRFKVAPRPSTFTPFGSGVHACPGNELAKLEMLVLIHHLVTGYRWEVVGSSDDVEYSPFPVPQNGLLARLRRDDSVCVGRKGCPTDDNYDDEDEVIV

SEQ ID NO: 66732 - DNA, 1667 bp, Triticum aestivum
  misc_feature (1)..(1667): Ceres Seq. ID no. 13658768
ccatatccccaaaccgaatccttcgctcccagatcaagaaagaatccttcgccccccaaagagctttttacgcgtctccgccaacgccgcagccgacgaaaccctagcatcgcgatgttgtcgtcgaaggagcccctgggtcctggacatgcctttcccggcgactgctatcccagccatctgcccagcttcgaaatccccacagatctttttggtccctttccccggcatgttcatgagactcgcgaggaggcccccatcgatgtgtttagattcgaaatcgccccagatctattcggttctacccaccatcgtctccttgatgcgttcgaggaggaggaggaggaggaggtggtggtggtgttggcggagaagaaagagagagggttcctcgagagcgaatcagagtctgaatctgagttgcctagctgggacgacattctcgtgggcgctggtgttgaacctgttgatggcgtcaacttgtccgacttgatggattacgatccgctggcagtggatgccgacaacgaggagacaaactgcccagggaagaaatttcccgaggcaacagcagcgaaagtagacgatatatggagtaggatttacaccagacgcaacatcgagtaccagaagaagtgtgaggagattgaagcaagtgaagatgagaatgccacatttccttcttatcctctcaaaatactccctgaggcaacaggtctatgtgtcttgaggggcttttgccaccaccgtgaatataaaacccatgatacttccactactagatcaagtcttgggctacgtgatccaagactgatgctacagatctttgcgatgcatttatcaatctccgaatcctattcctaccccgttagcgtctatggaattgttgctgttcgggatgccttggagccactacggaatcttgtgtttaaccgtccctgcagagatgatgcttttacggttgaccaggattccttaaccttgcctctttgtagtcctcgtcgaggaatgtatatagtaagggacagagcattactagaagttgatctttgggtaaaggaggaaggagatgggtcatctgacaaacagttgctttctttgtatgctgagtttgaggggatgtacgagttagatgaaatgctagatggagaggttagtagtgaccttggcagcttggtcattgactatctcttgcttgatgagagtgttgaggctgtaatacaagtctctgcaaagattgactgccctcatcatatgagattcactgcattcactagtggctttgatggtgagattgtgctgtttgatgataagttctctgggaatggaaaactgttccagtatgttgtcgcggtgaaggctgaggggaaattggatatttgcttaaaaatggaggaatcattgttttggtggactttccaggaaggagctgttggagctgttaggttccctgatgactcagttttaaattacgggcagtttgaggtgacggtgctttttgctcctaagaaatttaccatggatgactgaaacctgatctgtaatatcggtgtttttttatcttctatacttcctctgtaacttaatatacattgatcattactnccaaaaaaaaaaaaaaaaaagcttatcgataccgtcsacctcccragggggrgrrcccggst

SEQ ID NO: 66733 - protein, 509 aa, Triticum aestivum
  peptide (1)..(509): Ceres Seq. ID no. 15219916
PYPQTESFAPRSRKNPSPPKELFTRLRQRRSRRNPSIAMLSSKEPLGPGHAFPGDCYPSHLPSFEIPTDLFGPFPRHVHETREEAPIDVFRFEIAPDLFGSTHHRLLDAFEEEEEEEVVVVLAEKKERGFLESESESESELPSWDDILVGAGVEPVDGVNLSDLMDYDPLAVDADNEETNCPGKKFPEATAAKVDDIWSRIYTRRNIEYQKKCEEIEASEDENATFPSYPLKILPEATGLCVLRGFCHHREYKTHDTSTTRSSLGLRDPRLMLQIFAMHLSISESYSYPVSVYGIVAVRDALEPLRNLVFNRPCRDDAFTVDQDSLTLPLCSPRRGMYIVRDRALLEVDLWVKEEGDGSSDKQLLSLYAEFEGMYELDEMLDGEVSSDLGSLVIDYLLLDESVEAVIQVSAKIDCPHHMRFTAFTSGFDGEIVLFDDKFSGNGKLFQYVVAVKAEGKLDICLKMEESLFWWTFQEGAVGAVRFPDDSVLNYGQFEVTVLFAPKKFTMDD

SEQ ID NO: 66734 - protein, 471 aa, Triticum aestivum
  peptide (1)..(471): Ceres Seq. ID no. 15219917
MLSSKEPLGPGHAFPGDCYPSHLPSFEIPTDLFGPFPRHVHETREEAPIDVFRFEIAPDLFGSTHHRLLDAFEEEEEEEVVVVLAEKKERGFLESESESESELPSWDDILVGAGVEPVDGVNLSDLMDYDPLAVDADNEETNCPGKKFPEATAAKVDDIWSRIYTRRNIEYQKKCEEIEASEDENATFPSYPLKILPEATGLCVLRGFCHHREYKTHDTSTTRSSLGLRDPRLMLQIFAMHLSISESYSYPVSVYGIVAVRDALEPLRNLVFNRPCRDDAFTVDQDSLTLPLCSPRRGMYIVRDRALLEVDLWVKEEGDGSSDKQLLSLYAEFEGMYELDEMLDGEVSSDLGSLVIDYLLLDESVEAVIQVSAKIDCPHHMRFTAFTSGFDGEIVLFDDKFSGNGKLFQYVVAVKAEGKLDICLKMEESLFWWTFQEGAVGAVRFPDDSVLNYGQFEVTVLFAPKKFTMDD

SEQ ID NO: 66735 - protein, 345 aa, Triticum aestivum
  peptide (1)..(345): Ceres Seq. ID no. 15219918
MDYDPLAVDADNEETNCPGKKFPEATAAKVDDIWSRIYTRRNIEYQKKCEEIEASEDENATFPSYPLKILPEATGLCVLRGFCHHREYKTHDTSTTRSSLGLRDPRLMLQIFAMHLSISESYSYPVSVYGIVAVRDALEPLRNLVFNRPCRDDAFTVDQDSLTLPLCSPRRGMYIVRDRALLEVDLWVKEEGDGSSDKQLLSLYAEFEGMYELDEMLDGEVSSDLGSLVIDYLLLDESVEAVIQVSAKIDCPHHMRFTAFTSGFDGEIVLFDDKFSGNGKLFQYVVAVKAEGKLDICLKMEESLFWWTFQEGAVGAVRFPDDSVLNYGQFEVTVLFAPKKFTMDD

SEQ ID NO: 66736 - DNA, 1238 bp, Triticum aestivum
  misc_feature (1)..(1238): Ceres Seq. ID no. 14303696
tttgctacattgtaaatctcaaagtatttgcactgtaatatcttgttgagttttacagtgatttacattgtaattctcgtagtggatttacagtgtaattctcaaagtattttcactgtaatatcttttagtgtttctctcacggtatttgtagtggatttttcgcactgtaattatcttgtttgattatagtgtaattctcatagtatttacactgtaatttttcgcactgtaattacagtgtaattctcatagtatttacactgaatttttttagtgtaaatctcaaatgattttacactgtaattgtcttgtttgatctagtgtaattatcttgttttgatagagtaaatctcaaattatttatactgtcttagtggatttacagtgtaattctcatttttggatttacactataattattttgtttttttgcatttttactgtgtaactatcattggatttacactgtaactatttactggttttgttagtgggttttacaccgcaattcttagtggttttacttgtaaatctgagaaccatttgtactagtatccatttgctttgctctaatgatatagtcttattttcttcattgtaacaagcactttaattctaccgatagcactttattttctttctaacatgaaaaggattaacttcgaagagtttcatgtgttgtacccagctgtccctaagcaagataatcggtatttaagtttttctgccttttcatgttcttgtttaatttttatacagatttgtatgaaagctttatttttcttatttgtgttcttttttatcttttcagccatgaatgtggtgtcttcacatttaagtatatggagatattcacaccaagaactcagatggcaaactttttctctagtgcagacattccaaatcttaggatcagatatgcgaatgacatgtttttcagccccatgaacagttgcgacaagtctttcgtaactgatttctatcatgatggagaggcaatgccgggtgaggttaaacatgtgcgcggtcctagcacaaatggtggctgagttcttttttcagtagcatgtaatctggacaaagtagcatgcaatctgagcatatcagtatttttgatttagtagtggtttgtatgttttttcattttgattgtaatgtcatgtctttatgcctgtaactctgcagtacgtatttcgagcagctttttgattctatatcaagggcccttttttgtt

SEQ ID NO: 66737 - protein, 104 aa, Triticum aestivum
  peptide (1)..(104): Ceres Seq. ID no. 14303697
MFLFNFYTDLYESFIFLICVLFYLFSHECGVFTFKYMEIFTPRTQMANFFSSADIPNLRIRYANDMFFSPMNSCDKSFVTDFYHDGEAMPGEVKHVRGPSTNGG

SEQ ID NO: 66738 - protein, 100 aa, Triticum aestivum
  peptide (1)..(100): Ceres Seq. ID no. 14303698
MKRINFEEFHVLYPAVPKQDNRYLSFSAFSCSCLIFIQICMKALFFLFVFFFIFSAMNVVSSHLSIWRYSHQELRWQTFSLVQTFQILGSDMRMTCFSAP

SEQ ID NO: 66739 - protein, 68 aa, Triticum aestivum
  peptide (1)..(68): Ceres Seq. ID no. 14303699
MEIFTPRTQMANFFSSADIPNLRIRYANDMFFSPMNSCDKSFVTDFYHDGEAMPGEVKHVRGPSTNGG

SEQ ID NO: 66740 - DNA, 722 bp, Triticum aestivum
  misc_feature (1)..(722): Ceres Seq. ID no. 12621078
atcgatagcagagcaattctcttgcaacttgataagatcgagatacttccagacacacgcgcacacatagggccggagatagaagaatagttatggcttcatcggcggtgagccacagccacggcgggcagcaccagcagcacctgccggcggcggcagggagcatgatggcgcgggtggaccggctggacctggtggtggggtacctggaggagatgcgccaccacagcggcggcagcggcaggtcgtccaccaccgcgaccaggacgctgtcatcgtcatccccgaccacgcctaggtcttcccggcctcatgggtgccggccggcggaggagctgctgcgggaggccaaggccaaggggagcctggtggagcgcatagcgttcctggaggaccgggtgctccggatggaggaggagcgcatggatctgtcgtccagcatggatacggcggagcagaccacgccgacctcgtcggggaggaggacgatgaggatgatgatgagcggcagcggcggggccggggatgagcatgggagtggcgggagcgggaagaaagggaagaaggggctcaagagcttggtcaagtcatgcgttcgagcaggcgccaagctcaaggccaaggaatagtctagtctttcttttgtttctttattaatagtcgtgtgtgtacgtgcatatgttcacgtgtacgtacaccatgtacagtaaacgtatgtgtaa

SEQ ID NO: 66741 - protein, 178 aa, Triticum aestivum
  peptide (1)..(178): Ceres Seq. ID no. 12621079
MASSAVSHSHGGQHQQHLPAAAGSMMARVDRLDLVVGYLEEMRHHSGGSGRSSTTATRTLSSSSPTTPRSSRPHGCRPAEELLREAKAKGSLVERIAFLEDRVLRMEEERMDLSSSMDTAEQTTPTSSGRRTMRMMMSGSGGAGDEHGSGGSGKKGKKGLKSLVKSCVRAGAKLKAKE

SEQ ID NO: 66742 - protein, 154 aa, Triticum aestivum
  peptide (1)..(154): Ceres Seq. ID no. 12621080
MMARVDRLDLVVGYLEEMRHHSGGSGRSSTTATRTLSSSSPTTPRSSRPHGCRPAEELLREAKAKGSLVERIAFLEDRVLRMEEERMDLSSSMDTAEQTTPTSSGRRTMRMMMSGSGGAGDEHGSGGSGKKGKKGLKSLVKSCVRAGAKLKAKE

SEQ ID NO: 66743 - protein, 153 aa, Triticum aestivum
  peptide (1)..(153): Ceres Seq. ID no. 12621081
MARVDRLDLVVGYLEEMRHHSGGSGRSSTTATRTLSSSSPTTPRSSRPHGCRPAEELLREAKAKGSLVERIAFLEDRVLRMEEERMDLSSSMDTAEQTTPTSSGRRTMRMMMSGSGGAGDEHGSGGSGKKGKKGLKSLVKSCVRAGAKLKAKE

SEQ ID NO: 66744 - DNA, 1360 bp, Triticum aestivum
  misc_feature (1)..(1360): Ceres Seq. ID no. 14301568
aacccgattccattccgccccactcccactcgtcgccctcccgattcggtttgaaaagagacaaaagggatgctcgaccggtccctccggccggcggaggccggcgccggcgcggccggccccggcgaggtccgcgggaacgtggatcgggtcctcttcaaggacctggtcgacatggtgccgctcgtcgagtccctcatggatcggaggacgaacccgtcgtactcgcggcgcgcctcgctggtgtacacgccggcgccggccaagaagggtggtgatttgaaaagcgcaaagacaccacaaaccttgtcggcaaaaaagcggagggatcctggagacacaggaaataaaagcacacctgattcaaatggagagaacggctccgttgccccgatgactcaatcgggagcagaaaataaacccaaagacaaggatgagattggcttgctgcgtgagcaggtcgatgagctccaaaagcaacttgtcgaaaaagaggaggcattgaggtctgccgagagtactgtgagtgagatgaatgcggtgtattcgacagttgatgggttgaaacgccaagttgctgagaaagaagctttgatcaaatatgctaattctcagttacaaaatgcaaagattatgcttgcagacaagcaagcatccttagaaaaattggaatgggaggtaaagacctcaaataagaaggtggaagatcttcaaggggacgtctccatatggagtttgagataagttcattcgtgacattattcgagaaaatctcggagaatgtttcagatgattgtcacgatggtagcataccatcttatgatctagaggcacttcaatcagtgagtgaaatcgacaagattgaagtggacaagatagagcaggaaagagttacatatgctgaagctcttgctgctgcaagagcaaaccctaacgaagaacagttgagttcagttgcggaggcgcggtcaaggctgcaggtccttgttgtacaataatgcacgaggtgccagttgtagtgtatgtacgatgatgcacgggggtgccaattgtagtgtatgtacgataattttaagtcactgatgtaattataattgtgggcttgagctggttcatgtgtgtgaccggtgtgactgtaaccaatcgagcacttgaaactggacaattgttttagttttcggatcacatttacctggttctgtgctctccgttgtggattatattagaaggaaaactttggctgttgttttgatgatgagcactgggcagtgctgctatctagtgtgattttagtgtttttagacttggttgaatgtccgggcacagattgctgctaagttttatgatgttggaatttttg

SEQ ID NO: 66745 - protein, 224 aa, Triticum aestivum
  peptide (1)..(224): Ceres Seq. ID no. 14301569
MLDRSLRPAEAGAGAAGPGEVRGNVDRVLFKDLVDMVPLVESLMDRRTNPSYSRRASLVYTPAPAKKGGDLKSAKTPQTLSAKKRRDPGDTGNKSTPDSNGENGSVAPMTQSGAENKPKDKDEIGLLREQVDELQKQLVEKEEALRSAESTVSEMNAVYSTVDGLKRQVAEKEALIKYANSQLQNAKIMLADKQASLEKLEWEVKTSNKKVEDLQGDVSIWSLR

SEQ ID NO: 66746 - protein, 189 aa, Triticum aestivum
  peptide (1)..(189): Ceres Seq. ID no. 14301570
MVPLVESLMDRRTNPSYSRRASLVYTPAPAKKGGDLKSAKTPQTLSAKKRRDPGDTGNKSTPDSNGENGSVAPMTQSGAENKPKDKDEIGLLREQVDELQKQLVEKEEALRSAESTVSEMNAVYSTVDGLKRQVAEKEALIKYANSQLQNAKIMLADKQASLEKLEWEVKTSNKKVEDLQGDVSIWSLR

SEQ ID NO: 66747 - protein, 181 aa, Triticum aestivum
  peptide (1)..(181): Ceres Seq. ID no. 14301571
MDRRTNPSYSRRASLVYTPAPAKKGGDLKSAKTPQTLSAKKRRDPGDTGNKSTPDSNGENGSVAPMTQSGAENKPKDKDEIGLLREQVDELQKQLVEKEEALRSAESTVSEMNAVYSTVDGLKRQVAEKEALIKYANSQLQNAKIMLADKQASLEKLEWEVKTSNKKVEDLQGDVSIWSLR

SEQ ID NO: 66748 - DNA, 1492 bp, Triticum aestivum
  misc_feature (1)..(1492): Ceres Seq. ID no. 14302734
atcccttcccccccgcctccacccctcccactgcccccacgcagcagcccgcgcccccaacccacccaacgcgccgccgccgctagggtttctccccctccccccgccgccgcccgcgcagagccccgaatctccctacccgcggcagccatgagcgacggcaaggacaccctcgacctctccgccctcggcgccgccgtccccaacgccgcagagctcagcgccgaggacaaggccaacctcgtggagtcgattaagaacacgctgcagggattggcggcgcggcacacggacgtgctcgagagcctggagcccaaggtcaggaagcgcgtcgaggcgctcagggagatccagagccaacatgatgaatttgaggcaaagttttttgaggagagagctgcacttgaagctaaatatcagaagatgtatgaaccactgtactcaaagcgtcatgatgttgtcaatggtgtggttgaggcagaaggcgtaaccaaagattcaggtgaagccgctccagatgagaaagaggaaaagggtgtgccagatttctggttgaatgcaatgaagaaccatgaaatccttgctgaggagattcaagagagggatgaggaagctctcaagtacctcaaggatatcaagtggtacagaattactgagccaaagggtttcaagcttgagttccacttcaatactaatccattcttcaagaatgaagtgctttcaaaaacgtaccacatgatcgatgaagatgaaccaatcctagagaaggctattggaactgaaattgaatggtatcctggaaagagcttgacacaaaaggtgctaaagaagaagccaaagaaggggtcgaagaacactaaacctatcacgaaaatcgaaaattgcgagagcttctttaatttcttcagtccacctcaagttcctgatgatgatgaggaaattgatgaggatacagctgagcagttgcagaaccagatggagcaagattatgatatcggatctaccatcagagacaagattattccacatgctgtttcatggtttactggagaggccgctcaagatgaggactttgatggcatcatggatgatgatgaagatgacgacgaagatgacgaggaggatgaagatgaggatgaggacgacgaggaagatgaagacgatgacgatggtgataagaagaagggcgggcgagttcctgcaggggaaggtcaggcaggggagcggcccgcagagtgcaagcaacagtgagatccttcccagacgaagactatttttcttggctgaagaatgtttggttctgcttgatgctatgtctttgagtttggttccgaggagccagtgggggattgattgagttgggttttgtggaagaaccggtggggggtttctttgtgggggacatggtattatatactggtagcatttcaattgttgtattgggttgaaatactttgtccgctgctgcgagtgatcatcgatggtgcccgtt

SEQ ID NO: 66749 - protein, 416 aa, Triticum aestivum
  peptide (1)..(416): Ceres Seq. ID no. 14302735
IPSPPPPPLPLPPRSSPRPQPTQRAAAARVSPPPPAAARAEPRISLPAAAMSDGKDTLDLSALGAAVPNAAELSAEDKANLVESIKNTLQGLAARHTDVLESLEPKVRKRVEALREIQSQHDEFEAKFFEERAALEAKYQKMYEPLYSKRHDVVNGVVEAEGVTKDSGEAAPDEKEEKGVPDFWLNAMKNHEILAEEIQERDEEALKYLKDIKWYRITEPKGFKLEFHFNTNPFFKNEVLSKTYHMIDEDEPILEKAIGTEIEWYPGKSLTQKVLKKKPKKGSKNTKPITKIENCESFFNFFSPPQVPDDDEEIDEDTAEQLQNQMEQDYDIGSTIRDKIIPHAVSWFTGEAAQDEDFDGIMDDDEDDDEDDEEDEDEDEDDEEDEDDDDGDKKKGGRVPAGEGQAGERPAECKQQ

SEQ ID NO: 66750 - protein, 366 aa, Triticum aestivum
  peptide (1)..(366): Ceres Seq. ID no. 14302736
MSDGKDTLDLSALGAAVPNAAELSAEDKANLVESIKNTLQGLAARHTDVLESLEPKVRKRVEALREIQSQHDEFEAKFFEERAALEAKYQKMYEPLYSKRHDVVNGVVEAEGVTKDSGEAAPDEKEEKGVPDFWLNAMKNHEILAEEIQERDEEALKYLKDIKWYRITEPKGFKLEFHFNTNPFFKNEVLSKTYHMIDEDEPILEKAIGTEIEWYPGKSLTQKVLKKKPKKGSKNTKPITKIENCESFFNFFSPPQVPDDDEEIDEDTAEQLQNQMEQDYDIGSTIRDKIIPHAVSWFTGEAAQDEDFDGIMDDDEDDDEDDEEDEDEDEDDEEDEDDDDGDKKKGGRVPAGEGQAGERPAECKQQ

SEQ ID NO: 66751 - protein, 275 aa, Triticum aestivum
  peptide (1)..(275): Ceres Seq. ID no. 14302737
MYEPLYSKRHDVVNGVVEAEGVTKDSGEAAPDEKEEKGVPDFWLNAMKNHEILAEEIQERDEEALKYLKDIKWYRITEPKGFKLEFHFNTNPFFKNEVLSKTYHMIDEDEPILEKAIGTEIEWYPGKSLTQKVLKKKPKKGSKNTKPITKIENCESFFNFFSPPQVPDDDEEIDEDTAEQLQNQMEQDYDIGSTIRDKIIPHAVSWFTGEAAQDEDFDGIMDDDEDDDEDDEEDEDEDEDDEEDEDDDDGDKKKGGRVPAGEGQAGERPAECKQQ

SEQ ID NO: 66752 - DNA, 2130 bp, Triticum aestivum
  misc_feature (1)..(2130): Ceres Seq. ID no. 14302419
agctagcgcagatcccaccccgcaaatggcagctcgcctcctcctctagcccactcctctagcccactcccctccacccacccacctaccctcctccgcacgcaaccatgccggggctcgccgcagcggacgcgtcgccgccggccgcggcgccggcgccgcggcggctctcctcgccgctgccgaggcgggcgccgccgtcgccgtccccctcctccgcgtcccgcgccgtcgggaagccggcgcggaagtcgctcgggcagggccagcacccggaggcgacggacgaggcggcgctggacaacccggatctgggccccttcctgctcaagcaggcgcgggacgccatggtgtccggcgagggcgggggcgcggcgcgcgcgctcgagttcgccgagcgtgcggcccgcgcgctcgagcgccgcggcgagggcgccgagctcgagctcgccatgagcctccacgtcgccgccgcgatccactgcgggctcggccggcacgccgacgccgtgcccgtgctcgagcgcgccgtcgccgtcgtcaccccgccgcccgcgccggcccccgtggccgagggtgaggaggtgccgcagccggaggaggaggtggatgagcgcaagggggaggagtgggcgctcgccgccttctccggctggatgcagctcggcgacacccacgccatgctcggccgcatggacgagtccatcgcctgctacggcaagggcttcgagatccagatggccgcgctcggcgaccgcgacccccgcgtcgccgagacctgcaggtatctggcggaagcgcatgtgcaagctctgcagttcgatgaggcagagaaactgtgccgcaaagccctcgagatccaccgggagcacagtgcacctgcatccctcgaggaggcctccgatcgccggctgatggcccttatcctggacgccaagggtgactatgacggcgccctggagcaccttgtactggcttccatgaccatggttgccaatggacgcgacgtcgaggttgcgacgattgatgtcgcgataggcaacacttacctggcccttgctcgtttcgacgagtctgtcttctcataccagaaggctttgactgtactcaagtctgcccgtggcgacgaccacccttcagtggcatctgtcttcgtccgccttgctgatctctatcaccgcacagggaagctccgtgagtccaaatcctactgtgagaatgctctccgtgtctatgcaaagcccgcgcctggtgctgcccctgatgaggttgctggaggcctaatggagattgctgccatctatgaggcgcttggagaccttgatgaggccctaaagcttcttcaaagggcactgaagttgctcgaggactcaccagggcagtggagcactgttgctgggatcgaagcacaaatgggtgtgttgtactacatgatagggaggtatgccgattcaaggaactcgttcgagagcgcggtttccaaattgagggccagtggggaaaggaagtcggcatttttcggtgttctgctgaaccagatggggctagcttgcgtacagctgttcaagattgatgaggctgcacagctgtttgaagaagcacgggcagttctagagcaggagtgtggtgcctctcatcctgatactcttggcgtatacagcaacctggctgcgatctatgatgccatgggaagggtggaggacgcgattgagatcctggagcatgtgctgaaggtgcgggaggagaagctgggcacggcgaacccggacgtggaggatgagaagaagcggctggcggagctgctgaaggaggcggggcggtcccggaaccggaagcagaagtcgctggagaacctgttcgggtccggcggtgctgcgcggggcgccaagaaggacggctccgggggcaggcggtggaccaacttcgggttcaggagctgagctgagaagaaaacagtggtgtgggcctttgtaacataagaggagagagaaagagagaaaaggaagggaggagagagaagcatgtgtaaagaaagaaaggtgttgctggtagagtaggaaggaaggaagatgagatgattgtgattgcagtttgttttgagtttcttctacatgttctgcatctactctc

SEQ ID NO: 66753 - protein, 610 aa, Triticum aestivum
  peptide (1)..(610): Ceres Seq. ID no. 14302420
MPGLAAADASPPAAAPAPRRLSSPLPRRAPPSPSPSSASRAVGKPARKSLGQGQHPEATDEAALDNPDLGPFLLKQARDAMVSGEGGGAARALEFAERAARALERRGEGAELELAMSLHVAAAIHCGLGRHADAVPVLERAVAVVTPPPAPAPVAEGEEVPQPEEEVDERKGEEWALAAFSGWMQLGDTHAMLGRMDESIACYGKGFEIQMAALGDRDPRVAETCRYLAEAHVQALQFDEAEKLCRKALEIHREHSAPASLEEASDRRLMALILDAKGDYDGALEHLVLASMTMVANGRDVEVATIDVAIGNTYLALARFDESVFSYQKALTVLKSARGDDHPSVASVFVRLADLYHRTGKLRESKSYCENALRVYAKPAPGAAPDEVAGGLMEIAAIYEALGDLDEALKLLQRALKLLEDSPGQWSTVAGIEAQMGVLYYMIGRYADSRNSFESAVSKLRASGERKSAFFGVLLNQMGLACVQLFKIDEAAQLFEEARAVLEQECGASHPDTLGVYSNLAAIYDAMGRVEDAIEILEHVLKVREEKLGTANPDVEDEKKRLAELLKEAGRSRNRKQKSLENLFGSGGAARGAKKDGSGGRRWTNFGFRS

SEQ ID NO: 66754 - protein, 530 aa, Triticum aestivum
  peptide (1)..(530): Ceres Seq. ID no. 14302421
MVSGEGGGAARALEFAERAARALERRGEGAELELAMSLHVAAAIHCGLGRHADAVPVLERAVAVVTPPPAPAPVAEGEEVPQPEEEVDERKGEEWALAAFSGWMQLGDTHAMLGRMDESIACYGKGFEIQMAALGDRDPRVAETCRYLAEAHVQALQFDEAEKLCRKALEIHREHSAPASLEEASDRRLMALILDAKGDYDGALEHLVLASMTMVANGRDVEVATIDVAIGNTYLALARFDESVFSYQKALTVLKSARGDDHPSVASVFVRLADLYHRTGKLRESKSYCENALRVYAKPAPGAAPDEVAGGLMEIAAIYEALGDLDEALKLLQRALKLLEDSPGQWSTVAGIEAQMGVLYYMIGRYADSRNSFESAVSKLRASGERKSAFFGVLLNQMGLACVQLFKIDEAAQLFEEARAVLEQECGASHPDTLGVYSNLAAIYDAMGRVEDAIEILEHVLKVREEKLGTANPDVEDEKKRLAELLKEAGRSRNRKQKSLENLFGSGGAARGAKKDGSGGRRWTNFGFRS

SEQ ID NO: 66755 - protein, 495 aa, Triticum aestivum
  peptide (1)..(495): Ceres Seq. ID no. 14302422
MSLHVAAAIHCGLGRHADAVPVLERAVAVVTPPPAPAPVAEGEEVPQPEEEVDERKGEEWALAAFSGWMQLGDTHAMLGRMDESIACYGKGFEIQMAALGDRDPRVAETCRYLAEAHVQALQFDEAEKLCRKALEIHREHSAPASLEEASDRRLMALILDAKGDYDGALEHLVLASMTMVANGRDVEVATIDVAIGNTYLALARFDESVFSYQKALTVLKSARGDDHPSVASVFVRLADLYHRTGKLRESKSYCENALRVYAKPAPGAAPDEVAGGLMEIAAIYEALGDLDEALKLLQRALKLLEDSPGQWSTVAGIEAQMGVLYYMIGRYADSRNSFESAVSKLRASGERKSAFFGVLLNQMGLACVQLFKIDEAAQLFEEARAVLEQECGASHPDTLGVYSNLAAIYDAMGRVEDAIEILEHVLKVREEKLGTANPDVEDEKKRLAELLKEAGRSRNRKQKSLENLFGSGGAARGAKKDGSGGRRWTNFGFRS

SEQ ID NO: 66756 - DNA, 1187 bp, Triticum aestivum
  misc_feature (1)..(1187): Ceres Seq. ID no. 13659131
acttagaacatcctaatcgaaaactcatattcttcattcacagcagcattcttactatgcaccattgtctgcaagtggcgtatctattcctgttgagaccacatccatccccccagtaccaggttcttattatagctatccttccgtcactatggctgccactgaagtagcggttgaatcttctggatactatgcttcatcaacctctgccatttctagtggtgaattagataacaaaacaagcttggcctcccttgttgcaaatagtaatgtgaatactgtggagtctgataaagtgatatccaaggagcccacagttgcgtctttgagccaatcagtaggagcagtatcttcaggaccaacagtacatggaagttctactcaagcttctactagctccactaatcagactaaagttcctcgtactaagaagcgacctgttgctgttgcatcatcactgagatctaataagaaggtctcaagtctggtggataagtggaaagctgcaaaggaggagcttcgtgatgaagaggaagaggagcctgaagatgctttggagtacctagaaaggaaacgccggaaggaaatagatgggtggcgtaagcaacaaatagctagtggagaagccaaggaaaatgctaattttgttccccttggtggtgactggcgtgaccgtgtaaaacgcaaaagagctgaagcaaagaaggaagcaaagactgaacctattcgtgcagctgccgaacaacacaaaggggagcctgatctctcagagctctccaagggttttccttctgggtggcaggcatacatagacgagtctacgaagcaagtgtactatgggaacaacctcacttccgagacgacttgggatcggcctagcaaataaagattggattagttgaagatggtctagttttctctgtagatatccctgtacctcgatatatacgttgcctgtcttgaatggaacggatatgacagtcacgccctgagaagcaaccggtttctgatgttaccttggttttgaggctgtattgtttcttctattttccactgggagatcgtagtggggggaaggagagttcgttttggtatagaggcacccttgtaagagtggcaacttgagatcgaattactgaagcaaaatctactagttagttgctgaccaaggaaaaatgtgccttgtc

SEQ ID NO: 66757 - protein, 244 aa, Triticum aestivum
  peptide (1)..(244): Ceres Seq. ID no. 13659132
MAATEVAVESSGYYASSTSAISSGELDNKTSLASLVANSNVNTVESDKVISKEPTVASLSQSVGAVSSGPTVHGSSTQASTSSTNQTKVPRTKKRPVAVASSLRSNKKVSSLVDKWKAAKEELRDEEEEEPEDALEYLERKRRKEIDGWRKQQIASGEAKENANFVPLGGDWRDRVKRKRAEAKKEAKTEPIRAAAEQHKGEPDLSELSKGFPSGWQAYIDESTKQVYYGNNLTSETTWDRPSK

SEQ ID NO: 66758 - DNA, 947 bp, Triticum aestivum
  misc_feature (1)..(947): Ceres Seq. ID no. 13658132
aattggaaaaccaacaagctgccgtggtgactgtaagcgaagcacacgactgcctgtcctttccccaataatgcgcggcatcgcctccgccggaacgctccgccccgggccatccgcagctgtccgatcaaaatccaacgcgggagaccgccccaccctccaccgacgacccctcatccacctccggcgatcgccggaaccctctctgccgtccatccgccgcagccgccgcctcatgcctcctcttaccgcggcctcccgggccaccagcagcggcggcgacgccttcagcgagttggcctctgccgccgacttcgccggcatcgcctctcccgacggcctcatctccgtcatcggcttcggctcccttctttccgagcggagcgcgaggagcacgttcccggagctggaggggttccgtgtggcggcgctgcgagggttccggcgcgtcttcgcccacgccgcccccatcttcttcgagcgcggcatcgccattgaggccactaaggagttctcaagcttaagcgtggagcattgtgagggagaaatgatagttgtcactgtgtttgaaatcaaggaggaggaggtgccagccttcatcgagagggaactcgagttcagatttcttgctgtggtccctgaaggactggatggagtgccttttccaaatccagctgtaagggcctgtattttgggactgaatttctagcttaattttttgtttgatctgcctgcaatgcagttattattcatcttcatggaatttattggttcaggttgtctgtgcacgctatagcgatgaagagtatttccaagtgagatgcaaaggttgaatctatatgacactcaaatttctttcagtcctgcatttcactttaatgacttttctactgactttgtaatgttattgacattgggttatcagcatatcagttgtccgtttgact

SEQ ID NO: 66759 - protein, 235 aa, Triticum aestivum
  peptide (1)..(235): Ceres Seq. ID no. 13658133
IGKPTSCRGDCKRSTRLPVLSPIMRGIASAGTLRPGPSAAVRSKSNAGDRPTLHRRPLIHLRRSPEPSLPSIRRSRRLMPPLTAASRATSSGGDAFSELASAADFAGIASPDGLISVIGFGSLLSERSARSTFPELEGFRVAALRGFRRVFAHAAPIFFERGIAIEATKEFSSLSVEHCEGEMIVVTVFEIKEEEVPAFIERELEFRFLAVVPEGLDGVPFPNPAVRACILGLNF

SEQ ID NO: 66760 - protein, 212 aa, Triticum aestivum
  peptide (1)..(212): Ceres Seq. ID no. 13658134
MRGIASAGTLRPGPSAAVRSKSNAGDRPTLHRRPLIHLRRSPEPSLPSIRRSRRLMPPLTAASRATSSGGDAFSELASAADFAGIASPDGLISVIGFGSLLSERSARSTFPELEGFRVAALRGFRRVFAHAAPIFFERGIAIEATKEFSSLSVEHCEGEMIVVTVFEIKEEEVPAFIERELEFRFLAVVPEGLDGVPFPNPAVRACILGLNF

SEQ ID NO: 66761 - protein, 157 aa, Triticum aestivum
  peptide (1)..(157): Ceres Seq. ID no. 13658135
MPPLTAASRATSSGGDAFSELASAADFAGIASPDGLISVIGFGSLLSERSARSTFPELEGFRVAALRGFRRVFAHAAPIFFERGIAIEATKEFSSLSVEHCEGEMIVVTVFEIKEEEVPAFIERELEFRFLAVVPEGLDGVPFPNPAVRACILGLNF

SEQ ID NO: 66762 - DNA, 1048 bp, Triticum aestivum
  misc_feature (1)..(1048): Ceres Seq. ID no. 13658590
atcttttgtcctcctcctccgttgcgcagttggctcgcttgcttgcttgctgtaggtgagtgctgctggagacgggagccgggccgaggcggatcggggagaaggtgggaggcgggcgggtggtagatccggcgggcgtggctcgcgagaaggttggtgcgaggttggtggaggaggggagagaaggaggggatggagcggaaggcggtggtggtgtgcgcgctcgtcggcttcctcggcgtcctctccgccgcgctaggcttcgccgccgagggcacccgcgcgcaaggcctcctacctccatgacctcgcccgcaagtatgcgtcggggatcctctccgacgacaacatcgttgccatggacgaccgctccctcgccgccatgctcaccatggtcaacggcatcggcgcctggagtgttcacatgttcatgatcttctccctagcgcgcccggatgtgctcccctccgcggatctcgggatccgcaagggcgtgcagatgctgtatgggctggaggatgtgccccggccgtcgcagatggagaagctctgcgagcgctggcgcccttaccgctccgtcgccgcgtggtacatgtggcgcctcatcgagtccaaggcggcgcagacggcaggggccatgcctgtagtgccacctgcaatgcctgcgcccagtgaggagttcatgctccagcagcaccagcagcagcaccaccatcagcatcagcagcaacagcaacaagctgccatccaaatgctcgatccggttcagatgcttccaggattggggtgaatttggtatatactcgctctgctcatttgttcttgatgtgaaatggatgtcttaaacctgaatttgtcacttcatttgtgtatcattgttctgtatcggttgagaagtgtagcattggacaggaggatctcgaggcaacttcattatcagttatagttggtgttgtgttgttcatttgtaaatttntgctattttagacattgttgccctagacatatttgtatccgacgaataaatttagaccnagctgttatgtcc

SEQ ID NO: 66763 - protein, 143 aa, Triticum aestivum
  peptide (1)..(143): Ceres Seq. ID no. 13658591
MDDRSLAAMLTMVNGIGAWSVHMFMIFSLARPDVLPSADLGIRKGVQMLYGLEDVPRPSQMEKLCERWRPYRSVAAWYMWRLIESKAAQTAGAMPVVPPAMPAPSEEFMLQQHQQQHHHQHQQQQQQAAIQMLDPVQMLPGLG

SEQ ID NO: 66764 - protein, 135 aa, Triticum aestivum
  peptide (1)..(135): Ceres Seq. ID no. 13658592
MLTMVNGIGAWSVHMFMIFSLARPDVLPSADLGIRKGVQMLYGLEDVPRPSQMEKLCERWRPYRSVAAWYMWRLIESKAAQTAGAMPVVPPAMPAPSEEFMLQQHQQQHHHQHQQQQQQAAIQMLDPVQMLPGLG

SEQ ID NO: 66765 - protein, 132 aa, Triticum aestivum
  peptide (1)..(132): Ceres Seq. ID no. 13658593
MVNGIGAWSVHMFMIFSLARPDVLPSADLGIRKGVQMLYGLEDVPRPSQMEKLCERWRPYRSVAAWYMWRLIESKAAQTAGAMPVVPPAMPAPSEEFMLQQHQQQHHHQHQQQQQQAAIQMLDPVQMLPGLG

SEQ ID NO: 66766 - DNA, 1481 bp, Triticum aestivum
  misc_feature (1)..(1481): Ceres Seq. ID no. 14313362
actctatccgcgtcgactggtagctgaaactccaaaaagccgccaccactccggttcctgcgttcgtactccactcctgccagtccaagatccagctcaagatccaggcagggtcagccagccatgtgctgcggcgagtgcggctgctatgacgcactctgcgaccgctgctgcctctgcgtctccaccggcgcgcgcgacaccatcctctgctgcgcgtgctgcctcgccgtcctcgccggcgtcggcctcctcctcgtcctcctcgcggccttctgcttcatccgccacgccgaggtcgccgtcaccgacgcctccctcacgcgcctcgcgctggccgcgtcccccgccaccgccttcgcctacaacctctcgctcacgctcaccgtccggaacaagaactgggcaatgagcgtcaagaacacccagccgctcgaggccgactacagcttcgacggccagcgcttcgagcgggtcaggctcgccgacgagggctccacgcaccccgccggcaagacccaggtgtaccacctcgtctccggctccgacggcgcctacgtcgcgctcggcaacgccggcgtggccgagttcaaggaggagaacaagacgggggtgttccaggtggaggtggcgctgtcgggccaggtcaggtaccaggcgcacttcaccaagtgcaagttccaggccaattgcccgctcaagctgcagctcgcgccgcccggcacgccggccgtcgtcttccagaaggtcaagtgcaagctcgctccggcgagcaggtactgctagtgattggtacgattggtggctagtgatttctgtcggtagattgggaggactaagtatagttgccgggaacggggaacgatgccgcgtcccctgtaccgggaacatcgacccggatcgagggtcggggtcgacacagggaacgacgcgattcggtgacgggaacgcgacccggaaaggcaggttcgcagctccgtttcagtgatcgcaaatacactggatctcgacccaacttgccaatgaacgggaggccaaatggatagaatcgagacttacctgaagtccatggcatgagccttccgctgtcgaccaaaacgatgcgcgccggaggctagtgtgcatgtgcgaacgcggtgcccagcggcgccggcggctggtgtcgacgtgcagactgcggatgcgatgcccagcggcgccggcggctggtgtcgacgtgcagactgcggatgcggtgcccggcggcgctaacggctggtgtcgacgtgcagactatgcggtgctcggtggcggactgcggacgctgtgctagatggccggacggcggcggcggctgccgtggaccagcgaatgtggtgcccgcttcccactgcccatcctcttgattggaatttgggaatcatacggggcagatttcatggagtagattactttctgctgtcaaaactttccgcgggatatttgcacattttcccttcctc

SEQ ID NO: 66767 - protein, 220 aa, Triticum aestivum
  peptide (1)..(220): Ceres Seq. ID no. 14313363
MCCGECGCYDALCDRCCLCVSTGARDTILCCACCLAVLAGVGLLLVLLAAFCFIRHAEVAVTDASLTRLALAASPATAFAYNLSLTLTVRNKNWAMSVKNTQPLEADYSFDGQRFERVRLADEGSTHPAGKTQVYHLVSGSDGAYVALGNAGVAEFKEENKTGVFQVEVALSGQVRYQAHFTKCKFQANCPLKLQLAPPGTPAVVFQKVKCKLAPASRYC

SEQ ID NO: 66768 - protein, 136 aa, Triticum aestivum
  peptide (1)..(136): Ceres Seq. ID no. 14313364
LYPRRLVAETPKSRHHSGSCVRTPLLPVQDPAQDPGRVSQPCAAASAAAMTHSATAAASASPPARATPSSAARAASPSSPASASSSSSSRPSASSATPRSPSPTPPSRASRWPRPPPPPSPTTSRSRSPSGTRTGQ

SEQ ID NO: 66769 - protein, 125 aa, Triticum aestivum
  peptide (1)..(125): Ceres Seq. ID no. 14313365
MSVKNTQPLEADYSFDGQRFERVRLADEGSTHPAGKTQVYHLVSGSDGAYVALGNAGVAEFKEENKTGVFQVEVALSGQVRYQAHFTKCKFQANCPLKLQLAPPGTPAVVFQKVKCKLAPASRYC

SEQ ID NO: 66770 - DNA, 954 bp, Triticum aestivum
  misc_feature (1)..(954): Ceres Seq. ID no. 14301807
cccagttcatcgcgatctaagttctaaaataaataaaaagctcatcgcgatctccgtccaactcctcccccaaatcacactcgccggagtgctccgccgtgtaatctagtcccccccttcccaatccctcctgattcgagcgcgcggacgggaggattgcttcgatgcaccggcgtcggcgcgagcggtcgggcaggcggtggccggagctttgcgccggcggccgcctgagatggggaggaagatggaggccaggcgtcggcgtgtgccccttcttcccgcgcggtgcaccagcgatggccggaagggggtgggtggagcgggaggacggcggccagtcggaccatcatgagcatgatcacacccatgaccctggtgtttcctccgtaagcattttttgcgaaggggagatggatctctaaaagtaaaaagtgctgacatatgccggatgaagggactactctctatccagtggaatgtctcaatgctttgcctttcagatttgcacagatgggagaacaaattgctatgtgttctgctccgctctcgttatggaccacttccatgttatccatctgcaatgagtgtatatgacactttacatggatctcccaacagattgaatgtgccgcgcatgaacgagatcgtgcccatcagcagaaacctcaaccgggaagagcgggagccgggcttccaggattgcctgctgaaggaataggccagagacaccaagtttctctctctgcttctcctttttcgcggggtggatctccagctccatgattttgagctttgcggctgcatccagaacttgttcttcaaatgcttaggctcaactgtgcttgaactgacatgaagcgtacgcgaggtgtatgtatatcgacctggccgtttcattgttggaacctggccgtcgtgccgtccactgctgttctcatatgagtcaacaacttc

SEQ ID NO: 66771 - protein, 89 aa, Triticum aestivum
  peptide (1)..(89): Ceres Seq. ID no. 14301808
MKGLLSIQWNVSMLCLSDLHRWENKLLCVLLRSRYGPLPCYPSAMSVYDTLHGSPNRLNVPRMNEIVPISRNLNREEREPGFQDCLLKE

SEQ ID NO: 66772 - protein, 85 aa, Triticum aestivum
  peptide (1)..(85): Ceres Seq. ID no. 14301809
MHRRRRERSGRRWPELCAGGRLRWGGRWRPGVGVCPFFPRGAPAMAGRGWVEREDGGQSDHHEHDHTHDPGVSSVSIFCEGEMDL

SEQ ID NO: 66773 - protein, 77 aa, Triticum aestivum
  peptide (1)..(77): Ceres Seq. ID no. 14301810
MLCLSDLHRWENKLLCVLLRSRYGPLPCYPSAMSVYDTLHGSPNRLNVPRMNEIVPISRNLNREEREPGFQDCLLKE

SEQ ID NO: 66774 - DNA, 1524 bp, Triticum aestivum
  misc_feature (1)..(1524): Ceres Seq. ID no. 12779935
acaatctttcaagtacacctccccagcttccatttaagaatggagatcactagaataggccaatggttaagtcttctgatatgtgtactactattactgcagacagaaggggttcctgtgggaatcacttttgttgaaaatgcagtggcaaaaggggctgtttgtttggatgggagtcctccagcttaccacttccacaagggatctggagcagggattaacaactggatagttcactttgagggaggaggatggtgcaacaacgttactacttgcctttcccgtagggacactcgattaggttcatctaagaaaatggatacatcactttccttttctgggtttttcagtaacagtaaaaagttcaatccagatttctatgattggaacagaatcaaggttaggtattgtgatgggtcatcatttactggtgatgttgaagctgttgatccgaaaaccaatttgcacttcagaggagcaagggtttttgctgtggtcgttgaggatttattagcaaaaggaatgaaaaatgctcaaaatgcaattatctccggatgttcagctggaggattggcttctattctaaattgcgatcgattcaaatcactactacctgcaacaactaaagtgaaatgccttgcagatgctggtttttttatcaatgtaaaggatgtctctggagcacagcgcattgaagagttctacagtcaagttgttcaaacacatggctcagcaaagaatttgcctacatcctgcacttcaagactcagaccagggctgtgctttttccctcaaaatgtcgtgtcccaaatcagtaccccaatcttctttgtaaatgcagcctatgactcatggcagatcaaaaacattttggcaccaggtgctgctgatccccgtggccaatggcgtgaatgcaagcttgatatcaaaaactgctcacctaatcaactcagtgtaatgcaaggattcaggacagatttcttaagggcatttagtgtggttggcaacgccgcatctaaagggcattttatagatggttgctatgcacactgccaaactggaatacaagagacatggctgagaaatgactccccagtggtggccaagacatcaattgcaaaggcagtgggtgattggttttatgatcgaaggcccttccgtgagatagattgtgcctacccttgcaaccctacttgccataatcgtatttttgatcagaatgagcgtccagacgtatagattcatttaaaagagtatgcttatttatttattactacaaactatactttattagttatctagtttttattgaacgagatgtgtcacttgcactcatggctttgtggtttgagatctcaaaccatcaaagtatgggttcgattgttgcatcaacaaaaaacaagctgtgattgatgatttaaaaggttccaaagtgtaagggtaggcaacctgataaaggatgataattgtctaccatgtaaacataacatttttattatcaataaagggtatatctgtaattct

SEQ ID NO: 66775 - protein, 412 aa, Triticum aestivum
  peptide (1)..(412): Ceres Seq. ID no. 12779936
TIFQVHLPSFHLRMEITRIGQWLSLLICVLLLLQTEGVPVGITFVENAVAKGAVCLDGSPPAYHFHKGSGAGINNWIVHFEGGGWCNNVTTCLSRRDTRLGSSKKMDTSLSFSGFFSNSKKFNPDFYDWNRIKVRYCDGSSFTGDVEAVDPKTNLHFRGARVFAVVVEDLLAKGMKNAQNAIISGCSAGGLASILNCDRFKSLLPATTKVKCLADAGFFINVKDVSGAQRIEEFYSQVVQTHGSAKNLPTSCTSRLRPGLCFFPQNVVSQISTPIFFVNAAYDSWQIKNILAPGAADPRGQWRECKLDIKNCSPNQLSVMQGFRTDFLRAFSVVGNAASKGHFIDGCYAHCQTGIQETWLRNDSPVVAKTSIAKAVGDWFYDRRPFREIDCAYPCNPTCHNRIFDQNERPDV

SEQ ID NO: 66776 - protein, 399 aa, Triticum aestivum
  peptide (1)..(399): Ceres Seq. ID no. 12779937
MEITRIGQWLSLLICVLLLLQTEGVPVGITFVENAVAKGAVCLDGSPPAYHFHKGSGAGINNWIVHFEGGGWCNNVTTCLSRRDTRLGSSKKMDTSLSFSGFFSNSKKFNPDFYDWNRIKVRYCDGSSFTGDVEAVDPKTNLHFRGARVFAVVVEDLLAKGMKNAQNAIISGCSAGGLASILNCDRFKSLLPATTKVKCLADAGFFINVKDVSGAQRIEEFYSQVVQTHGSAKNLPTSCTSRLRPGLCFFPQNVVSQISTPIFFVNAAYDSWQIKNILAPGAADPRGQWRECKLDIKNCSPNQLSVMQGFRTDFLRAFSVVGNAASKGHFIDGCYAHCQTGIQETWLRNDSPVVAKTSIAKAVGDWFYDRRPFREIDCAYPCNPTCHNRIFDQNERPDV

SEQ ID NO: 66777 - protein, 307 aa, Triticum aestivum
  peptide (1)..(307): Ceres Seq. ID no. 12779938
MDTSLSFSGFFSNSKKFNPDFYDWNRIKVRYCDGSSFTGDVEAVDPKTNLHFRGARVFAVVVEDLLAKGMKNAQNAIISGCSAGGLASILNCDRFKSLLPATTKVKCLADAGFFINVKDVSGAQRIEEFYSQVVQTHGSAKNLPTSCTSRLRPGLCFFPQNVVSQISTPIFFVNAAYDSWQIKNILAPGAADPRGQWRECKLDIKNCSPNQLSVMQGFRTDFLRAFSVVGNAASKGHFIDGCYAHCQTGIQETWLRNDSPVVAKTSIAKAVGDWFYDRRPFREIDCAYPCNPTCHNRIFDQNERPDV

SEQ ID NO: 66778 - DNA, 971 bp, Triticum aestivum
  misc_feature (1)..(971): Ceres Seq. ID no. 12454684
attgtcaagtggttcaaggcttgaggcatccggaatttgagaccaaagcagtcttgtttctctgcagcagccgacgctgctgatgcccgagccccaccaaatccaccaacccccgcccccgcccccgcctccaaccgatccaaaccccgttgcctccacggctgcaaatgcccggcgcaatccggccccgctgccgctgccgttgcctttgccggatgcggcgtcggcttcagcgtcggcatcacgctcgccggtgtcggcgtcgggctgccacagcacggcatcatcgggaaccactaccacggtggaggttttgcaagcaatgtcccattcgaatcagcaagggttttacctcttgaccatgctaaaaggtatggcatgggatgccatcagttatgcgagcaacgtcgcagctatgaggaaagaatctcgacagaagcttttaagatgtcaggagaatcctcaagtttcaggaggagttgatctgcccaagctggggaaaggaatgtccagcagctttcgatcaacgatggagtgtatcaaggccttcacaaatcagcattggcctccataggcagcacccaagtaaactgaagattgataaaccgagctttgtgtgcaaaccacccaaccgggatcaaagcctgggtagtggtacccctttcactgagtgacaatcgggtagtcggatgcaggtggctcgtatggcgtccaccacagggttgacgtcccttttaatgaagaattaaggacttgtactttatgaataagaacccccatagcacatatttnttcatcatatgtttgtggcatgagcaagtttaaatttttatggttataaggggaaacaattccagctgaagaacatgntagcctgtaatctagctagtgatgaatcgatgtgtaactataacaatgatgttcatccatgcncttcgcagaatcttgtattgtgaaatgaaactccattc

SEQ ID NO: 66779 - protein, 163 aa, Triticum aestivum
  peptide (1)..(163): Ceres Seq. ID no. 12454685
MPEPHQIHQPPPPPPPPTDPNPVASTAANARRNPAPLPLPLPLPDAASASASASRSPVSASGCHSTASSGTTTTVEVLQAMSHSNQQGFYLLTMLKGMAWDAISYASNVAAMRKESRQKLLRCQENPQVSGGVDLPKLGKGMSSSFRSTMECIKAFTNQHWPP

SEQ ID NO: 66780 - protein, 83 aa, Triticum aestivum
  peptide (1)..(83): Ceres Seq. ID no. 12454686
MSHSNQQGFYLLTMLKGMAWDAISYASNVAAMRKESRQKLLRCQENPQVSGGVDLPKLGKGMSSSFRSTMECIKAFTNQHWPP

SEQ ID NO: 66781 - DNA, 1030 bp, Triticum aestivum
  misc_feature (1)..(1030): Ceres Seq. ID no. 12784913
gtagttctcgtgctcactgcccacccagctcatctcgtctcaatctcacccgtctcttcctccaccgtctagaagcttctcgaaggcaggcgccatacacttctctcctctcgccatgggcaacgggctgtctccctgcgtgaacatgccggcggccgccgaggtgcccgccgcggcccggctggtgtactggggcgggcggacgagggcgctgccagtctacgaggacgaggagggtgatggcgagggcaacggcggtgtctcctgcacggcggcggacgtgacggccgagctgctcccggcggaccacgtggtctgcccggccgactccttcttcgtcggcctcccggtccccgtcgcgtcgccgggggagcggctgctgccgggccggacctacttcgtgctcccccgccgcctcctctcctccccctcccccggcggcaacggcaaggcggccgtgctcaccgcggccacgctcgcgtcgctgtcggccgcgccggggggcaggaagacggtgcagctcgccgggcccggccagtgcccgttcgagtacgtcaagggcggcgaggacggtgccgcggcgctcatccgggtcctgccgcagttcatcgagaaggtcatcacctgcgacggcggcaacggcaacggcgacgctgccggccggcgcgggtcgggcaaggtggctgcgtccgcgacggagctgtgcagcacgccggagctgaagcggcactacgcgcagctcgtgggcgccaagggccggccgtggtcgccggggctggagaccatctccgagcgcagcaagaggaggatcttcccgtcgccggccaggctgctgctctcttcgcaataatgtaattagctaatgagcgtagatcgttttcggattagagattaatcgagattaattaggtagggaacacagcgttcgattttacttgtacaatagttggaactgaaatacaaatgtataaatttgtcgaaaacatttacatatgtacctaggatttttggaagtgagatactacaagtc

SEQ ID NO: 66782 - protein, 244 aa, Triticum aestivum
  peptide (1)..(244): Ceres Seq. ID no. 12784914
MGNGLSPCVNMPAAAEVPAAARLVYWGGRTRALPVYEDEEGDGEGNGGVSCTAADVTAELLPADHVVCPADSFFVGLPVPVASPGERLLPGRTYFVLPRRLLSSPSPGGNGKAAVLTAATLASLSAAPGGRKTVQLAGPGQCPFEYVKGGEDGAAALIRVLPQFIEKVITCDGGNGNGDAAGRRGSGKVAASATELCSTPELKRHYAQLVGAKGRPWSPGLETISERSKRRIFPSPARLLLSSQ

SEQ ID NO: 66783 - protein, 234 aa, Triticum aestivum
  peptide (1)..(234): Ceres Seq. ID no. 12784915
MPAAAEVPAAARLVYWGGRTRALPVYEDEEGDGEGNGGVSCTAADVTAELLPADHVVCPADSFFVGLPVPVASPGERLLPGRTYFVLPRRLLSSPSPGGNGKAAVLTAATLASLSAAPGGRKTVQLAGPGQCPFEYVKGGEDGAAALIRVLPQFIEKVITCDGGNGNGDAAGRRGSGKVAASATELCSTPELKRHYAQLVGAKGRPWSPGLETISERSKRRIFPSPARLLLSSQ

SEQ ID NO: 66784 - DNA, 1333 bp, Triticum aestivum
  misc_feature (1)..(1333): Ceres Seq. ID no. 12784099
acaaaacaaaacgaccgcccctccgcccttctcccgccctcgcccctctccctctcctcctcccctccttccccggcaagactagggtttgcagccaccgggcctcaccatgtacaacggaggcgaccactacgacgggaacggcggcggcgccgccaacgccaacagcctcttcagcggcggcgggttcatgccctcgcagaccaccaacaccccggagggcagcggcggcatcaccaagactcgcggcgcgcagacgctgctcccgctcaccgtcaagcagattatggacgcgtcccagaccaacgacgacaagtccagtttcgctgtcaatggcaccgaggtgtccacggttaggcttgtaggacgcatgatgaataaggcagagcggatgacagatgtacaattcattcttgatgatggtacaggcaggatagaagtgaatcgctgggaaaatgagacatcggacactacagaaatgagtttagtcaaggatggtgactatgttattgtcaatggtggtctgaaaagctttcaagggaagcgtcacattgttgcttattccgtgcggcttgtaaccaactacaatgatataacacatcactttctgtactgcatttatgtgcatttggatcttgccaaggctaagaaatctgggacacagcctcaagtaactgctaatgcatcatggaaccaagctccaccccctaataatcaggccccaacactatctgcatctgggaatgctggtgggcaagatttaactgatatggtcatgaatgtttttcatgacccagtgcttgtaaacctggagcatggagttagtatcgaacaggttgcaagccgtcttaacatatcagatgcacttgccaggtcgactgttacacatcttattgatgttggcaacctctatccaactatcgatgacaaccattacaagtctacactgaatggttgatatggctgtgcccacgcgtgcaagcgttaggctcccctggagcgatcgaataatataagcactcttgcaagagttgtttttgcagagtggcttgctggtcctctagacagtcgcaaggagagcaacttaacggctaggttaagttgcatatctaagcacttgcgccttatgtgtaatggatatgagtaggttagatctctaggtgctttcgtttgtgtttgctactgcagtacctcgagaacatccatgcctgtgtgacctgcaattagtttgcgacttgtttgtggttatgactctgccctgcatattgtttctggattcagttaacgtttgccctaaaaatgcatatcatgcatctgattatttctggattcc

SEQ ID NO: 66785 - protein, 282 aa, Triticum aestivum
  peptide (1)..(282): Ceres Seq. ID no. 12784100
MYNGGDHYDGNGGGAANANSLFSGGGFMPSQTTNTPEGSGGITKTRGAQTLLPLTVKQIMDASQTNDDKSSFAVNGTEVSTVRLVGRMMNKAERMTDVQFILDDGTGRIEVNRWENETSDTTEMSLVKDGDYVIVNGGLKSFQGKRHIVAYSVRLVTNYNDITHHFLYCIYVHLDLAKAKKSGTQPQVTANASWNQAPPPNNQAPTLSASGNAGGQDLTDMVMNVFHDPVLVNLEHGVSIEQVASRLNISDALARSTVTHLIDVGNLYPTIDDNHYKSTLNG

SEQ ID NO: 66786 - protein, 255 aa, Triticum aestivum
  peptide (1)..(255): Ceres Seq. ID no. 12784101
MPSQTTNTPEGSGGITKTRGAQTLLPLTVKQIMDASQTNDDKSSFAVNGTEVSTVRLVGRMMNKAERMTDVQFILDDGTGRIEVNRWENETSDTTEMSLVKDGDYVIVNGGLKSFQGKRHIVAYSVRLVTNYNDITHHFLYCIYVHLDLAKAKKSGTQPQVTANASWNQAPPPNNQAPTLSASGNAGGQDLTDMVMNVFHDPVLVNLEHGVSIEQVASRLNISDALARSTVTHLIDVGNLYPTIDDNHYKSTLNG

SEQ ID NO: 66787 - protein, 223 aa, Triticum aestivum
  peptide (1)..(223): Ceres Seq. ID no. 12784102
MDASQTNDDKSSFAVNGTEVSTVRLVGRMMNKAERMTDVQFILDDGTGRIEVNRWENETSDTTEMSLVKDGDYVIVNGGLKSFQGKRHIVAYSVRLVTNYNDITHHFLYCIYVHLDLAKAKKSGTQPQVTANASWNQAPPPNNQAPTLSASGNAGGQDLTDMVMNVFHDPVLVNLEHGVSIEQVASRLNISDALARSTVTHLIDVGNLYPTIDDNHYKSTLNG

SEQ ID NO: 66788 - DNA, 1237 bp, Triticum aestivum
  misc_feature (1)..(1237): Ceres Seq. ID no. 14301782
gtattctctctttgtgtttacttgctcttaaaaattatctcacctgctgtgttgttatcagcagtatatctacctacctgtatacagccatacacatcaccagaggtttttcactgttgttgctgcacctgaatctgcaatgggtaggtccccagggccaaggagggggagtgccctgcttctgcctctgtttctcacctgcttcttctcaggggcaacgaggcgggcggagtcggcccgggagttcacgctcatcaaccagtgcaagacggaggtgtggccggcggtgacgccgggcgagagcttcgggggcggcgggtatgcgctccgtgcaggcgagtcggtggtgttcaccgcccccgtggggtggtcgggccgcgtgtggggccgcaccggctgcacctttgactcggccggcaacggcacgtgcgagacgggcgggtgcggcacgtcgctgcagtgcgaatcggcgtcgggggccgctccggcgacgctggcggagttcacgctggcggcgactgactactacgacgtgagcctggtggacggcttcaacctccccgtggtggtgaccccgaccccgacgagcgccaactggacaggctgcgccccggcggggtgcgacggtgacctgcgccggggctgcccgtcggagctggccgtgaagggcgacggggggaaggtggtggcttgccggagcgcgtgcgacgtgttcgggaccgaccagtactgctgccgtggtcagtatgccaacccggtggcctgccagccgaccttctactcgaagaagttcaaggcggcatgcccggccgcctacagctacgcctacgacgacccctcctccatcttcacccgcgcccagtcgcccgactacaccatcaccttctgctccagcaacatgaagcaatcggtgtgttcgtaccgcgacagccggcttgtctgcagcggctccggcaggagcacctcctctggtctaatgctgctgctgctgctctccagcttcgtggcattgcaatttgcaaccccagtgtgactgattggttgattaaggcctaatcatccaagagcaagctgacctgaccctcttcttgatatagttctttttggatttgttttctactatgagaaacagagagtaggtgattcatggatcaaatttctgcactgtcagacagtcagtactcagtaccatttgaatgagagttatacagagatagcataagtgaatgtttcgttc

SEQ ID NO: 66789 - protein, 297 aa, Triticum aestivum
  peptide (1)..(297): Ceres Seq. ID no. 14301783
MGRSPGPRRGSALLLPLFLTCFFSGATRRAESAREFTLINQCKTEVWPAVTPGESFGGGGYALRAGESVVFTAPVGWSGRVWGRTGCTFDSAGNGTCETGGCGTSLQCESASGAAPATLAEFTLAATDYYDVSLVDGFNLPVVVTPTPTSANWTGCAPAGCDGDLRRGCPSELAVKGDGGKVVACRSACDVFGTDQYCCRGQYANPVACQPTFYSKKFKAACPAAYSYAYDDPSSIFTRAQSPDYTITFCSSNMKQSVCSYRDSRLVCSGSGRSTSSGLMLLLLLSSFVALQFATPV

SEQ ID NO: 66790 - DNA, 1096 bp, Triticum aestivum
  misc_feature (1)..(1096): Ceres Seq. ID no. 14301761
aacacaaagtcttgcttcagtctgcgcctagtcctagcaggtcgcgaatttcgccggttctattgtttctctaattatcttcgagcagatcactagcaggcaccgacggatttggagcagctctgatctttagcggccatggtcaagaaaggaatccagtatgtcgtggtggatgccttcacggcccagccgttcaagggcaacccggcggcggtgtgcttcctggaggacgacgcggccgcccccgcgggggacgggcggtggatgcagtccgtcgccgtcgagttcaacctctcccagacggccttcttctcccgtgactcgtcctgcgcagccgacgccaccacgccgcggttccacctccgctggttcacccccgtcaccgaggtcgcgctctgcggccacgcaacgctggccaccgcccacttcctcttcacgtctgtcctcgcggagcgccatggcgtggttgagttcgcgaccaagtccggggtcctgaccgccaagaaggttcctgcaccggaggctgaggagcaggggaagctgttcattgagctggacttccccatgagtgattatgtgggttgcgatcccgccgacgagctgccgtccatcccggagacgctcaacggcgcgcccgtcgtcagtgttcacaaatcagtggccaccaacgacttcattgttgaactttcatcaggaaaagaggtcgccgatgtccttcctaacatcgaagaaataagaaagtgtgccggcagaggtgtgattgttacagcaccggcgcctgctggatcgggttatgacttcttcacacgcttcttctgcccaaaatttgggattgatgaggatcccgtatgtggcagtgcacactgtgttttggcaccctactggggtggaaagctggggaagcaaaaactgatagcgtttcaggtatctccaaggagtggggcactatacctggagctggatgttgcgaatcagcgagtgcggattcagggagaagctgttactgtcatggctgggacactcttcgcttagctagcatattgaccatccattgacttgctctatgaacttgggagaaataaatatatttgctgcc

SEQ ID NO: 66791 - protein, 297 aa, Triticum aestivum
  peptide (1)..(297): Ceres Seq. ID no. 14301762
MVKKGIQYVVVDAFTAQPFKGNPAAVCFLEDDAAAPAGDGRWMQSVAVEFNLSQTAFFSRDSSCAADATTPRFHLRWFTPVTEVALCGHATLATAHFLFTSVLAERHGVVEFATKSGVLTAKKVPAPEAEEQGKLFIELDFPMSDYVGCDPADELPSIPETLNGAPVVSVHKSVATNDFIVELSSGKEVADVLPNIEEIRKCAGRGVIVTAPAPAGSGYDFFTRFFCPKFGIDEDPVCGSAHCVLAPYWGGKLGKQKLIAFQVSPRSGALYLELDVANQRVRIQGEAVTVMAGTLFA

SEQ ID NO: 66792 - protein, 255 aa, Triticum aestivum
  peptide (1)..(255): Ceres Seq. ID no. 14301763
MQSVAVEFNLSQTAFFSRDSSCAADATTPRFHLRWFTPVTEVALCGHATLATAHFLFTSVLAERHGVVEFATKSGVLTAKKVPAPEAEEQGKLFIELDFPMSDYVGCDPADELPSIPETLNGAPVVSVHKSVATNDFIVELSSGKEVADVLPNIEEIRKCAGRGVIVTAPAPAGSGYDFFTRFFCPKFGIDEDPVCGSAHCVLAPYWGGKLGKQKLIAFQVSPRSGALYLELDVANQRVRIQGEAVTVMAGTLFA

SEQ ID NO: 66793 - protein, 155 aa, Triticum aestivum
  peptide (1)..(155): Ceres Seq. ID no. 14301764
MSDYVGCDPADELPSIPETLNGAPVVSVHKSVATNDFIVELSSGKEVADVLPNIEEIRKCAGRGVIVTAPAPAGSGYDFFTRFFCPKFGIDEDPVCGSAHCVLAPYWGGKLGKQKLIAFQVSPRSGALYLELDVANQRVRIQGEAVTVMAGTLFA

SEQ ID NO: 66794 - DNA, 1370 bp, Triticum aestivum
  misc_feature (1)..(1370): Ceres Seq. ID no. 14313268
aaagagagagaaaagcgcacgaaaagaaaacagagagaaatgaaactgccctgctgctgctgaggtcggcctcctggcgatgagcccccgccgccgtcccccgctgctcctcctcgccgccgtcgccgtcgcctgcgcctgcgccgccgcccgcccctgcgcggccctcgtccgcctcggtgccgcctccttcctcgacgcccccgcgcgcttcgggccccgggtgaccggcgacgggatatgcgggtcgctgcgcgccgcggagcccgccgacgcgtgcgcgcccgtccggggcgcccccggcgggagcggcgggatggcgttcgtgctcatcgcgcgcgggaactgcagcttcgagggcaaggtgcgggcggcgcagcgggccggcttcgacgccgcgctcgtccacgacgacgaggacaaggccagcctctactccatggttggcgatcctgagggcatacacatacctgcggtattcgtatccaaaatggctggggaaaccttgaagaagtttgccagaggtgaagatggggaatgctgtataaactcgtcgatggatgagactgcagggacagtgttggtgatgtcgttcgtatcacttgttgtcatcatatcagttgtagcttcatttcttttcgctcggaactgccgacttttacgcaatggagttgataatcgcccaccttacatcaagaagcatgtggtggaaaagcttccttctgtggtatataaagctccctgctcaagtggcaacaattgtgaagaagcctgtgccatttgtttagaagactatgataatggtgacatgcttagacttctcccatgcaaacatgagtttcatgtggagtgtattgatccctggctgacaaagtggggcacattttgcccggtatgcaaacttgaggtactcacaggtggataagcaggcaagctaggagtaagtctcaggtgaataagcaagcctccgttactgcatactcccttcgtccggaaatacttgtagaagaaatgggtaaaaatggatatatgtagaactaaaacacatccagatacatccattcccccgacaagtatttccggatggagggagtatatacaagtagtgctcggcggcatgacggttatatccaggcgtgctgaactggttgatctgttgttggctgggtttgcaagatagatcaatgccgaacattttatcatgaggatggggtatgggctgtgcggtctctgggactgggcccgtcttgatacccagtagaagattgaattgtgtcgttaacattgagatgaactgtttaattgaggtgtagtatgtggaagccatcttgtaattatatgtcagaagttcaattgcttctttcccatgc

SEQ ID NO: 66795 - protein, 281 aa, Triticum aestivum
  peptide (1)..(281): Ceres Seq. ID no. 14313269
MSPRRRPPLLLLAAVAVACACAAARPCAALVRLGAASFLDAPARFGPRVTGDGICGSLRAAEPADACAPVRGAPGGSGGMAFVLIARGNCSFEGKVRAAQRAGFDAALVHDDEDKASLYSMVGDPEGIHIPAVFVSKMAGETLKKFARGEDGECCINSSMDETAGTVLVMSFVSLVVIISVVASFLFARNCRLLRNGVDNRPPYIKKHVVEKLPSVVYKAPCSSGNNCEEACAICLEDYDNGDMLRLLPCKHEFHVECIDPWLTKWGTFCPVCKLEVLTGG

SEQ ID NO: 66796 - protein, 202 aa, Triticum aestivum
  peptide (1)..(202): Ceres Seq. ID no. 14313270
MAFVLIARGNCSFEGKVRAAQRAGFDAALVHDDEDKASLYSMVGDPEGIHIPAVFVSKMAGETLKKFARGEDGECCINSSMDETAGTVLVMSFVSLVVIISVVASFLFARNCRLLRNGVDNRPPYIKKHVVEKLPSVVYKAPCSSGNNCEEACAICLEDYDNGDMLRLLPCKHEFHVECIDPWLTKWGTFCPVCKLEVLTGG

SEQ ID NO: 66797 - protein, 161 aa, Triticum aestivum
  peptide (1)..(161): Ceres Seq. ID no. 14313271
MVGDPEGIHIPAVFVSKMAGETLKKFARGEDGECCINSSMDETAGTVLVMSFVSLVVIISVVASFLFARNCRLLRNGVDNRPPYIKKHVVEKLPSVVYKAPCSSGNNCEEACAICLEDYDNGDMLRLLPCKHEFHVECIDPWLTKWGTFCPVCKLEVLTGG

SEQ ID NO: 66798 - DNA, 818 bp, Triticum aestivum
  misc_feature (1)..(818): Ceres Seq. ID no. 14302986
cccatccccaaactccagatcgatcgcaccgggagattgctgacgcccgcccgccgcgatggaggaggagaagaagatgaagctctgcttctccatcccctcgaaacccaaggtcaagcccgccacgcctcccgccgccttctccgtcgccgccgtggcccccggccccgccccgcggttcgtcaccgtgttcgatccctcggaaaccctcaccccagcgcccgccgcgcccgtcgtcattgcgccccttcccgactcgcgcaaaccctccccagctgctgccgcgccggccgcgcccgtcgtcatcgcgccccttcccaacacgcgcaagctcgccgaggcccccgccttcgtgctcggcgcctccgacagcccctcctccagcgcagcctacggcctcaccgtccgcaatacggattcgaagaggaagcttgatccccaggacgatgctgctagggagcagccgtcgcctccaggccccagcggcgaggacctgatgctgcggcggttcaaggaggacatggccgttctcccggaaatcgaaggtacggacgagtatgacgaggtgcctgtggaggggttcggtgctgctctcctcgctggctatggctggaaggaaggggattctattggaaagaaatacaagggcatgggcgctgtcaaggttcgtgagtacggccgccgccgctgcggcacgcagggtctaggctcgtagggttgccaggtcgtgacagtttctgtttcttgtttattttcttgatttcggttatctgtaactgtaagtatgtatggttcatcagactttgtctttgcctatc

SEQ ID NO: 66799 - protein, 218 aa, Triticum aestivum
  peptide (1)..(218): Ceres Seq. ID no. 14302987
MEEEKKMKLCFSIPSKPKVKPATPPAAFSVAAVAPGPAPRFVTVFDPSETLTPAPAAPVVIAPLPDSRKPSPAAAAPAAPVVIAPLPNTRKLAEAPAFVLGASDSPSSSAAYGLTVRNTDSKRKLDPQDDAAREQPSPPGPSGEDLMLRRFKEDMAVLPEIEGTDEYDEVPVEGFGAALLAGYGWKEGDSIGKKYKGMGAVKVREYGRRRCGTQGLGS

SEQ ID NO: 66800 - protein, 212 aa, Triticum aestivum
  peptide (1)..(212): Ceres Seq. ID no. 14302988
MKLCFSIPSKPKVKPATPPAAFSVAAVAPGPAPRFVTVFDPSETLTPAPAAPVVIAPLPDSRKPSPAAAAPAAPVVIAPLPNTRKLAEAPAFVLGASDSPSSSAAYGLTVRNTDSKRKLDPQDDAAREQPSPPGPSGEDLMLRRFKEDMAVLPEIEGTDEYDEVPVEGFGAALLAGYGWKEGDSIGKKYKGMGAVKVREYGRRRCGTQGLGS

SEQ ID NO: 66801 - protein, 144 aa, Triticum aestivum
  peptide (1)..(144): Ceres Seq. ID no. 14302989
PIPKLQIDRTGRLLTPARRDGGGEEDEALLLHPLETQGQARHASRRLLRRRRGPRPRPAVRHRVRSLGNPHPSARRARRHCAPSRLAQTLPSCCRAGRARRHRAPSQHAQARRGPRLRARRLRQPLLQRSLRPHRPQYGFEEEA

SEQ ID NO: 66802 - DNA, 1621 bp, Triticum aestivum
  misc_feature (1)..(1621): Ceres Seq. ID no. 14313244
gcagggaaaatcaaaaatgttccccggcgacgggaatcgaaagtgaggtaaccttaccggccccgaaacgctcgcccccacatgccaccacggcccgcactgcacgcgcctcctccctcctccccctcctaaccctagaatcttccagaatcagcgggaagcagggagggcgaggcgcgcgccgcgcttccggaagcttctagaagctctaggggggaaggagccgagatggggacgtcggatctggaccggcagatcgagcagctcaagcggtgcgagccgctggcggaggcggaggtcaaggcgctctgcctcaaggccatggagatcctcgtcgaggagagcaacgtccagcgcgtcgacgcccccgtcacgatatgtggagacattcatggacagttctacgacatgaaagaacttttcaaagttggaggtgactgcccaaagacaaactacctgttccttggggattttgtcgaccgaggattttattctgttgaaacatttttgcttcttttggccttaaaggttaggtacccagatcgtataactttaatacgaggaaatcatgagagcaggcagatcacacaagtttatggcttctatgatgagtgtcttcgtaaatatggctcggtgaatgtctggagatattgcacagaaatatttgactatttaagtttgtctgcacttattgagaacaaaatcttcagtgtccatggaggcctttcccctgctattacgacactggatcagatcagagtaatagatcgcaagcaagaagtgcctcatgatggtgccatgtgtgaccttctttggtctgatccagaggatgctgtagacggctggggattaagtcctcgaggtgcagggttcctctttggtggaaacgttgtctcttcatttaaccactcaaacaacatagattatatttgccgtgctcatcaactagtcatggaaggattcaagtggatgttcaataacaagattgttactgtatggtctgctcctaactattgctacaggtgtggcaatgttgctgcaatcctagagcttgatgagaacttgaataagcagttccgtgtatttgaagctgctccacatgaatcaagaggtgttcctgccaagaggcctgccccagattactttctttgagactgcacacatggcatgtgacacgctgtcttttcatgcccttgagcaccagcgggccgatagggggtattgaaggcgtgccatgttggcagatgggcgcgtgctttgcaagagattagccaggaggtgctttcgggatgtataaatcgattgttctgtgtccgtccaggtctattgtttgtaacaaagttgatgtcggtatccacttctccccaaaatagctccaatttgagctttgagaaaatgcctccgagaagggagtggtgtagatgaagccactctgggcccatgatgtaaaattttgatgccagtcccttcctcccctgggaatccgtacattttctagaatgtagaatggtatgcaaatgtgtgccttgagtttaccttttagttgcattgcaggcagctgtaggaaatcttgtagttttgatgttttgcatggaagtattctgaggaagcacacatcagc

SEQ ID NO: 66803 - protein, 307 aa, Triticum aestivum
  peptide (1)..(307): Ceres Seq. ID no. 14313245
MGTSDLDRQIEQLKRCEPLAEAEVKALCLKAMEILVEESNVQRVDAPVTICGDIHGQFYDMKELFKVGGDCPKTNYLFLGDFVDRGFYSVETFLLLLALKVRYPDRITLIRGNHESRQITQVYGFYDECLRKYGSVNVWRYCTEIFDYLSLSALIENKIFSVHGGLSPAITTLDQIRVIDRKQEVPHDGAMCDLLWSDPEDAVDGWGLSPRGAGFLFGGNVVSSFNHSNNIDYICRAHQLVMEGFKWMFNNKIVTVWSAPNYCYRCGNVAAILELDENLNKQFRVFEAAPHESRGVPAKRPAPDYFL

SEQ ID NO: 66804 - protein, 276 aa, Triticum aestivum
  peptide (1)..(276): Ceres Seq. ID no. 14313246
MEILVEESNVQRVDAPVTICGDIHGQFYDMKELFKVGGDCPKTNYLFLGDFVDRGFYSVETFLLLLALKVRYPDRITLIRGNHESRQITQVYGFYDECLRKYGSVNVWRYCTEIFDYLSLSALIENKIFSVHGGLSPAITTLDQIRVIDRKQEVPHDGAMCDLLWSDPEDAVDGWGLSPRGAGFLFGGNVVSSFNHSNNIDYICRAHQLVMEGFKWMFNNKIVTVWSAPNYCYRCGNVAAILELDENLNKQFRVFEAAPHESRGVPAKRPAPDYFL

SEQ ID NO: 66805 - protein, 247 aa, Triticum aestivum
  peptide (1)..(247): Ceres Seq. ID no. 14313247
MKELFKVGGDCPKTNYLFLGDFVDRGFYSVETFLLLLALKVRYPDRITLIRGNHESRQITQVYGFYDECLRKYGSVNVWRYCTEIFDYLSLSALIENKIFSVHGGLSPAITTLDQIRVIDRKQEVPHDGAMCDLLWSDPEDAVDGWGLSPRGAGFLFGGNVVSSFNHSNNIDYICRAHQLVMEGFKWMFNNKIVTVWSAPNYCYRCGNVAAILELDENLNKQFRVFEAAPHESRGVPAKRPAPDYFL

SEQ ID NO: 66806 - DNA, 759 bp, Triticum aestivum
  misc_feature (1)..(759): Ceres Seq. ID no. 13659085
aaggttcagacgaagtgccgagcacgaacatagcggcgctgcaacctctccgccccctacgaagagagagaaaaccatggcggcggtcggcggcgcgggcaacggagccggcgaggaggcaggcggggcggagttctacctgcggtactacgtggggcacaagggcaagttcgggcacgagttcctcgagttcgagttccgccccgacggcaagctccgctacgccaacaactccaactacaagaacgacaccatgatccgcaaggaggtcttcgtctccccttccgtgctccgcgaggcgaggaggatcatccaggactcggagataatgaaggaggacgacagcaactggccggagcccgaccgcgtcggcaggcaggagctcgagattgtcatgggcaacgagcacatctccttcaccacctccaagatcggctccctcgttgacgtccagaccagcaaggacccggagggcctccgcatcttctactacctcgtccaggaccttaaatgtttcgtgttttcacttatcaacctccactttaagatcaagcctattcaactttgagctctgtttggttctcccggttgtgttgtggtactgcgagtgttagagaattctgtacttatgtaacatgcaatgagttgctcctggtgcgatttggtatgcgttgaagattccttttggcatcgcctgaggttgttggattgtgcaaactttgagtgcccattgatatttatatgcatgtttgttttgcg

SEQ ID NO: 66807 - protein, 188 aa, Triticum aestivum
  peptide (1)..(188): Ceres Seq. ID no. 13659086
RFRRSAEHEHSGAATSPPPTKREKTMAAVGGAGNGAGEEAGGAEFYLRYYVGHKGKFGHEFLEFEFRPDGKLRYANNSNYKNDTMIRKEVFVSPSVLREARRIIQDSEIMKEDDSNWPEPDRVGRQELEIVMGNEHISFTTSKIGSLVDVQTSKDPEGLRIFYYLVQDLKCFVFSLINLHFKIKPIQL

SEQ ID NO: 66808 - protein, 163 aa, Triticum aestivum
  peptide (1)..(163): Ceres Seq. ID no. 13659087
MAAVGGAGNGAGEEAGGAEFYLRYYVGHKGKFGHEFLEFEFRPDGKLRYANNSNYKNDTMIRKEVFVSPSVLREARRIIQDSEIMKEDDSNWPEPDRVGRQELEIVMGNEHISFTTSKIGSLVDVQTSKDPEGLRIFYYLVQDLKCFVFSLINLHFKIKPIQL

SEQ ID NO: 66809 - protein, 104 aa, Triticum aestivum
  peptide (1)..(104): Ceres Seq. ID no. 13659088
MIRKEVFVSPSVLREARRIIQDSEIMKEDDSNWPEPDRVGRQELEIVMGNEHISFTTSKIGSLVDVQTSKDPEGLRIFYYLVQDLKCFVFSLINLHFKIKPIQL

SEQ ID NO: 66810 - DNA, 1704 bp, Triticum aestivum
  misc_feature (1)..(1704): Ceres Seq. ID no. 14316045
agtacacagctacgcagaatcataagaggaccggactaaccaccacaggcccatggtagtacagtgtggtagtcccccatgagccccttcgtttgcactctactcttccccgatacaccccttctcccgcggaagcccgcgcctttcaaacgcgctacaaccatccgatgccgcgccgcgccgcccccgggagacgccgctctccgcgccttccgcgtgcaccacatcgctgggcacttcctcggcgccaaccccgccctgttgcccgccctcgcggcctgcgcgcggctgctgacggcggcggccgaagccgagcagatccacgccctcctcttcaagtccggcctccctagttccgtctccggcgtctacgcctccacctccctcgcccgtgtctactcgcggctcggccgcctgggtgacgcgcggaaggtgtttgatggaatgcctgagaggacgttggtttcttggaacgtgcttcttgacggccttgtcagagccagcgatttggatgccgcctgggaggtgtttgcggaaatgccggagcggaatgtgtcttcttggaatactgttatggctggtttcgttagtcatgggtgggctcaagaggcagtggagttgttttctgagatgacagaggtttatggtttgacgccggatgaggccacgatggttggctttgtatctgctgttcgcagtctcggtctacttggacttgggaggaccgcacatggttatgtaatccggcaggagttctcactggatggtgctcttggtgttgctctgatcaacatgtacacaaggtgtgggtgcatgggtgcggcataccaatgcttctcaagcgtcatcagcaagaatgtggagcactggacctctgtcatcgggggtttcgcagcacatggtcacccagagatggcactgaaattgtttgccgagatgaggcaattgggcgtcaagcctaatggtgtcaccttcgtggccgtcttgaatgcctgcagccatggtggtcttgttgatgaaggttttaggtacttcaacctaatgcgcaacatgggtatcaggccatcgatccagcactatggctgcttggtggatcttcttggtcgtgctgggttcttggaagaagccttcaacctcgctagcagtctaccagaagagcagggctttgtgatgtggagctcactactagctgcttgccaaacccatggcaatgtcgacatggcagaggttgctgcccagaagttggcagacacaaagccaagccatggcagctcatatattttgctatcaaacgcctatgcacgtgctggtcaatgggacgacttgaagaggacaagaagcaggatggaggagcatagggtggtgaagaagcctgggctcagctggatcgaggttgatggcagtttacattcctttgtcactgcagacaagttacacacagaatgcgaagatatttatcatatgttggaagacttgaaacttaatttgatatcagctggttccgaacctgaaacatttgatcttcctgaagtttgattcagtaagttactgttgtttatattgaatatatcgtttttcttttttggaagggttacattttttgttgttgatagaaatacatcacatgagaggtctgttcatgatcatgtgaacaatggggcatcggaatatatcatattgatttggtaaatttcaggttggttt

SEQ ID NO: 66811 - protein, 485 aa, Triticum aestivum
  peptide (1)..(485): Ceres Seq. ID no. 14316046
MSPFVCTLLFPDTPLLPRKPAPFKRATTIRCRAAPPPGDAALRAFRVHHIAGHFLGANPALLPALAACARLLTAAAEAEQIHALLFKSGLPSSVSGVYASTSLARVYSRLGRLGDARKVFDGMPERTLVSWNVLLDGLVRASDLDAAWEVFAEMPERNVSSWNTVMAGFVSHGWAQEAVELFSEMTEVYGLTPDEATMVGFVSAVRSLGLLGLGRTAHGYVIRQEFSLDGALGVALINMYTRCGCMGAAYQCFSSVISKNVEHWTSVIGGFAAHGHPEMALKLFAEMRQLGVKPNGVTFVAVLNACSHGGLVDEGFRYFNLMRNMGIRPSIQHYGCLVDLLGRAGFLEEAFNLASSLPEEQGFVMWSSLLAACQTHGNVDMAEVAAQKLADTKPSHGSSYILLSNAYARAGQWDDLKRTRSRMEEHRVVKKPGLSWIEVDGSLHSFVTADKLHTECEDIYHMLEDLKLNLISAGSEPETFDLPEV

SEQ ID NO: 66812 - protein, 363 aa, Triticum aestivum
  peptide (1)..(363): Ceres Seq. ID no. 14316047
MPERTLVSWNVLLDGLVRASDLDAAWEVFAEMPERNVSSWNTVMAGFVSHGWAQEAVELFSEMTEVYGLTPDEATMVGFVSAVRSLGLLGLGRTAHGYVIRQEFSLDGALGVALINMYTRCGCMGAAYQCFSSVISKNVEHWTSVIGGFAAHGHPEMALKLFAEMRQLGVKPNGVTFVAVLNACSHGGLVDEGFRYFNLMRNMGIRPSIQHYGCLVDLLGRAGFLEEAFNLASSLPEEQGFVMWSSLLAACQTHGNVDMAEVAAQKLADTKPSHGSSYILLSNAYARAGQWDDLKRTRSRMEEHRVVKKPGLSWIEVDGSLHSFVTADKLHTECEDIYHMLEDLKLNLISAGSEPETFDLPEV

SEQ ID NO: 66813 - protein, 332 aa, Triticum aestivum
  peptide (1)..(332): Ceres Seq. ID no. 14316048
MPERNVSSWNTVMAGFVSHGWAQEAVELFSEMTEVYGLTPDEATMVGFVSAVRSLGLLGLGRTAHGYVIRQEFSLDGALGVALINMYTRCGCMGAAYQCFSSVISKNVEHWTSVIGGFAAHGHPEMALKLFAEMRQLGVKPNGVTFVAVLNACSHGGLVDEGFRYFNLMRNMGIRPSIQHYGCLVDLLGRAGFLEEAFNLASSLPEEQGFVMWSSLLAACQTHGNVDMAEVAAQKLADTKPSHGSSYILLSNAYARAGQWDDLKRTRSRMEEHRVVKKPGLSWIEVDGSLHSFVTADKLHTECEDIYHMLEDLKLNLISAGSEPETFDLPEV

SEQ ID NO: 66814 - DNA, 772 bp, Triticum aestivum
  misc_feature (1)..(772): Ceres Seq. ID no. 14313260
aacccccgtgaagcatcatccatcttctctccttacgccgccttgcactgcattccagcctccatctccaacagcaacccatggccggcatgaaaaccatcgttctccttgccgtgatctcggccgccgccttgggcaccgcgtcagcggcgacccaccgcgtgggcgagccgggcggcgcgtgggacctcaccaccgattacggcagctgggcgtcctccagggagttccacccgggcgacgagctcatcttcaggcaccagccaggggcgcacaacgtgctcgaggtcagcgaggtcgactacgactcctgcaacgccaccagccccatcaccaccttgggctccggctttttcacctacgtcgcccttccggccgtcggcacccgctacttcatctgcggtttccctggccactgcaccaccaccggcaccggcggcatgaagctcaagatcgacgtcgtgccaggttccccctcgtcgtcgcccgccccggccatgccgccgccctcctccgccgcggcctctgccggggctacaataggatctggccttgtcgtcctgctggcggccggtctcatggcttgaaatgcatgtattcttcattagctgatgatgcccggtgcattcaaccgatgtaaagactgtagcctgtaggtttccccccttctaaaaaaacaaaaaaaaagttgagttgccgcagcagacacataccagcttatactatattgttaactggttattattgttgaatacatacaattaattttttg

SEQ ID NO: 66815 - protein, 212 aa, Triticum aestivum
  peptide (1)..(212): Ceres Seq. ID no. 14313261
TPVKHHPSSLLTPPCTAFQPPSPTATHGRHENHRSPCRDLGRRLGHRVSGDPPRGRAGRRVGPHHRLRQLGVLQGVPPGRRAHLQAPARGAQRARGQRGRLRLLQRHQPHHHLGLRLFHLRRPSGRRHPLLHLRFPWPLHHHRHRRHEAQDRRRARFPLVVARPGHAAALLRRGLCRGYNRIWPCRPAGGRSHGLKCMYSSLADDARCIQPM

SEQ ID NO: 66816 - protein, 168 aa, Triticum aestivum
  peptide (1)..(168): Ceres Seq. ID no. 14313262
MAGMKTIVLLAVISAAALGTASAATHRVGEPGGAWDLTTDYGSWASSREFHPGDELIFRHQPGAHNVLEVSEVDYDSCNATSPITTLGSGFFTYVALPAVGTRYFICGFPGHCTTTGTGGMKLKIDVVPGSPSSSPAPAMPPPSSAAASAGATIGSGLVVLLAAGLMA

SEQ ID NO: 66817 - protein, 165 aa, Triticum aestivum
  peptide (1)..(165): Ceres Seq. ID no. 14313263
MKTIVLLAVISAAALGTASAATHRVGEPGGAWDLTTDYGSWASSREFHPGDELIFRHQPGAHNVLEVSEVDYDSCNATSPITTLGSGFFTYVALPAVGTRYFICGFPGHCTTTGTGGMKLKIDVVPGSPSSSPAPAMPPPSSAAASAGATIGSGLVVLLAAGLMA

SEQ ID NO: 66818 - DNA, 690 bp, Triticum aestivum
  misc_feature (1)..(690): Ceres Seq. ID no. 12784095
gaccgaccattccaaaccctcgcatccaagccgcctccgcctccgcctccacctccccgcggatctcccatccatccatggccgccgccgccccggcccgcaggctcctcctgcgcctgcgtctcccactccccctctgcaacccaccgccgtcccccgtcccgctcctctcccacctgacgccgcacctccacccaccaccgccaccgcagccaacgctcccgggcgccccggccccggacccgaagctccgggacctcctcttcgccttccaccccgccgtgcacgtatatccgtccctcgtcgacgtcccgagaggagggctgggcgaccttgacgcgcgcgaggacggagggggggccaaggaggcggaggtgtgggcggacagcgtcaagaagaagcggaagcgcaagatgaacaagcacaagctccgcaagctccggaagcgcctccgccgccagacctgagctcatggatcccggcttgaggattgtgattgcaagaaggtcctccggtgccgctgccacaccggtttcaagctgatggtttcttccagttattttggtttggttataggagtagcagttctggtaccaacaacgcaattgctgcgactgggcacgtacctacaaacactgtaatgacaaggagccaggaacgggctgtttcatgtctggatttctggcaggc

SEQ ID NO: 66819 - protein, 154 aa, Triticum aestivum
  peptide (1)..(154): Ceres Seq. ID no. 12784096
PTIPNPRIQAASASASTSPRISHPSMAAAAPARRLLLRLRLPLPLCNPPPSPVPLLSHLTPHLHPPPPPQPTLPGAPAPDPKLRDLLFAFHPAVHVYPSLVDVPRGGLGDLDAREDGGGAKEAEVWADSVKKKRKRKMNKHKLRKLRKRLRRQT

SEQ ID NO: 66820 - protein, 129 aa, Triticum aestivum
  peptide (1)..(129): Ceres Seq. ID no. 12784097
MAAAAPARRLLLRLRLPLPLCNPPPSPVPLLSHLTPHLHPPPPPQPTLPGAPAPDPKLRDLLFAFHPAVHVYPSLVDVPRGGLGDLDAREDGGGAKEAEVWADSVKKKRKRKMNKHKLRKLRKRLRRQT

SEQ ID NO: 66821 - protein, 111 aa, Triticum aestivum
  peptide (1)..(111): Ceres Seq. ID no. 12784098
TDHSKPSHPSRLRLRLHLPADLPSIHGRRRPGPQAPPAPASPTPPLQPTAVPRPAPLPPDAAPPPTTATAANAPGRPGPGPEAPGPPLRLPPRRARISVPRRRPERRAGRP

SEQ ID NO: 66822 - DNA, 1029 bp, Triticum aestivum
  misc_feature (1)..(1029): Ceres Seq. ID no. 13598045
aaaaaaataaacgcatcggcgccgtcaagtcccccagccgaggtcacacaagcccgcacccgcacccgcacccgcacccgcacaacagagacccagagcaggcgacacaccgcccaggcccagctccagctccggcgagatctccggcgacccttcgagatgagccgcggatcgggcgcgggctacgaccgccacatcaccatcttctcccccgagggccgcctctaccaagtcgagtacgcgttcaaggcggtcaagtcggcgggggtcacctcgatcggcgtccgcggcaaggactccgtctgcgtcgtcacccagaagaaagtcccggacaagttgctggatgacaccagcatcacgcacctcttctcgattaccaagtacaccggcttgcttgccaccggcctcacagctgatgcgaggtccttggtctcccaagcaagaaatgaagcagctgagttccgtaaaaaatggggatacgagatgcctgtggatgtattagcaaaatggatagcagacaaagcacaaatatacacgcagcatgcgtacatgagaccccttggtgtagttgccatggtcttgggttatgatgaagagaaaaatgctcagctcttcaagtgtgaccccgcaggtcacttctttggacacaaggcaactagtgccggactgaaggagcaggaagcaataaattttctggagaagaaaatgaaggatagcccgcagttcacatatgacgaaactgttcagattgcagtttctgcattgcaatctgttctgcaggaagatttcaaggctaccgagatcgaggtcggtgttgtgaggaaagaagaccgtgtcttccggtcgctcacgacagaggagattgatcagcacctaacagccattagcgagcgcgactgagctatgagactgtagctgtcaatgcaccataaactgttattttgtttcatagccagccaagaaacattcagtgaatcatttcatgtgtagcaagaaagacgggcatccactctgccatgtattagttgg

SEQ ID NO: 66823 - protein, 299 aa, Triticum aestivum
  peptide (1)..(299): Ceres Seq. ID no. 13598046
KKINASAPSSPPAEVTQARTRTRTRTRTTETQSRRHTAQAQLQLRRDLRRPFEMSRGSGAGYDRHITIFSPEGRLYQVEYAFKAVKSAGVTSIGVRGKDSVCVVTQKKVPDKLLDDTSITHLFSITKYTGLLATGLTADARSLVSQARNEAAEFRKKWGYEMPVDVLAKWIADKAQIYTQHAYMRPLGVVAMVLGYDEEKNAQLFKCDPAGHFFGHKATSAGLKEQEAINFLEKKMKDSPQFTYDETVQIAVSALQSVLQEDFKATEIEVGVVRKEDRVFRSLTTEEIDQHLTAISERD

SEQ ID NO: 66824 - protein, 246 aa, Triticum aestivum
  peptide (1)..(246): Ceres Seq. ID no. 13598047
MSRGSGAGYDRHITIFSPEGRLYQVEYAFKAVKSAGVTSIGVRGKDSVCVVTQKKVPDKLLDDTSITHLFSITKYTGLLATGLTADARSLVSQARNEAAEFRKKWGYEMPVDVLAKWIADKAQIYTQHAYMRPLGVVAMVLGYDEEKNAQLFKCDPAGHFFGHKATSAGLKEQEAINFLEKKMKDSPQFTYDETVQIAVSALQSVLQEDFKATEIEVGVVRKEDRVFRSLTTEEIDQHLTAISERD

SEQ ID NO: 66825 - DNA, 574 bp, Triticum aestivum
  misc_feature (1)..(574): Ceres Seq. ID no. 12779958
aatcactctcgcgtcagagaaaaaagagaggggcgcacatctccgtctccgccctcccctccccgtccccctctccctccgctcccgatccgctctgcgtcgcggccgcagcggcgacgacccccccatgatctgaccgcattgccgcgcgcggtaacccgatggaggcgctgaacgagctctgcgacctggtggccgcgcacccggatctcctcctcgccgacaagctcacctggctcacctcccgctgcgcgccgcccgcgtcccccgcgtcccccgcgcagcgcgcgacccgggcgcacctccactcgctcctcgccctcgcgcgcctcctccccgcgggcgccggcccgccggcggccccgctcctcgccttcctcgcctcccgcgccttcctcgcgccggccttctggccgcagtccttcgcgcccgcgcccttcctcgccaagctcctccctctcctcgccgccgcgcccgcctcccccgccctctcctccgcgctctccgccgtgctcctcgccttttatctcaactgggatccttgaccatatatgaaaataaatgcaaattagcc

SEQ ID NO: 66826 - protein, 127 aa, Triticum aestivum
  peptide (1)..(127): Ceres Seq. ID no. 12779959
MEALNELCDLVAAHPDLLLADKLTWLTSRCAPPASPASPAQRATRAHLHSLLALARLLPAGAGPPAAPLLAFLASRAFLAPAFWPQSFAPAPFLAKLLPLLAAAPASPALSSALSAVLLAFYLNWDP

SEQ ID NO: 66827 - DNA, 698 bp, Triticum aestivum
  misc_feature (1)..(698): Ceres Seq. ID no. 12621228
tttttttcagcgtccacaccgttccctttgtccggtggagtgccgcggcgaggggctgtgggaggagatggccttcgcgtcgtggctagtggcgccgcctcctgccgcgagggcagggtggaggcccgcgagggcggcccctcgccggctcgtcctggcggcatccagccgaggcggcggcccggccccggccccgccgacgttcgacaggctgcgggagcagctcctccaactccacgccgaagccgacctcacccagtccaaagcaaacagtgctcgggtgaggcttatgcggttgaccgaggccgctgagaatcttaagaagagagccgtagtcagtgtccggatgggcagagagaatgaggcagtggaattacttgtgcagaagaagaagttgaccaatgctttggagaacataaaggagcgcattgagctgcttgacaagctttccgcaaagattagtgagctatggagaccgcttagcaagcggcgcgatcgggacgtcattgacaacatcatcacgggtctccgctcctcggcctcagcacttgctcctccgccaccaccaccccctcctgagcccgattagacgtacttttcttttctttggggcttgtcttgctgtgcccccagcgatgatttgagacttgtttgtactttgaacatgacttgttggatgcttggtgttggtgctttat

SEQ ID NO: 66828 - protein, 195 aa, Triticum aestivum
  peptide (1)..(195): Ceres Seq. ID no. 12621229
FFQRPHRSLCPVECRGEGLWEEMAFASWLVAPPPAARAGWRPARAAPRRLVLAASSRGGGPAPAPPTFDRLREQLLQLHAEADLTQSKANSARVRLMRLTEAAENLKKRAVVSVRMGRENEAVELLVQKKKLTNALENIKERIELLDKLSAKISELWRPLSKRRDRDVIDNIITGLRSSASALAPPPPPPPPEPD

SEQ ID NO: 66829 - protein, 173 aa, Triticum aestivum
  peptide (1)..(173): Ceres Seq. ID no. 12621230
MAFASWLVAPPPAARAGWRPARAAPRRLVLAASSRGGGPAPAPPTFDRLREQLLQLHAEADLTQSKANSARVRLMRLTEAAENLKKRAVVSVRMGRENEAVELLVQKKKLTNALENIKERIELLDKLSAKISELWRPLSKRRDRDVIDNIITGLRSSASALAPPPPPPPPEPD

SEQ ID NO: 66830 - protein, 103 aa, Triticum aestivum
  peptide (1)..(103): Ceres Seq. ID no. 12621231
FFSASTPFPLSGGVPRRGAVGGDGLRVVASGAASCREGRVEAREGGPSPARPGGIQPRRRPGPGPADVRQAAGAAPPTPRRSRPHPVQSKQCSGEAYAVDRGR

SEQ ID NO: 66831 - DNA, 825 bp, Triticum aestivum
  misc_feature (1)..(825): Ceres Seq. ID no. 13659221
actgtaatactcctgctcagtagcacaagcagtggtactactgctcagtgcacaccacccaactcacccacactttccccgcggcgatgggtcgcacgaagcacgcggtggcggcgacggcggcgacgacggagacgaagaagcggctccgcttcgagctctccccgcgctggaggccgccgccggcgctgcgccaggtaccgccggagccgcagccggagaagaagaagaagcgggcgtaccggttccggccgggcacggtagcgctgcgggaggtcaggaagtaccagaagtccaccgggccgctcatccccttcgcgcccttcgtccgcctggttaaggagatcaccgacgacttgacgaagggcgagatgaaccactggactcctcaggcgctcttctcgttgcaggaggctgcagagtatcacatagtcgatgtatttgaaaaggcaaatctatgtgccatccatgctaagcgtgttaccatcatgcaaaaggacatacagctcgcgaggcgtatcggggggagaaggccttggtgatactaatggaagatgttttctgcatcatagggagcaaagactggtgatttggtggtactaatggtagatgttttctgtattaggggtgcaatgcaaaggcgctgatggtagtggcccagtatgtttgtgagtgtatcgttaggaagtaatgtaggtgtattttcatttagttagcatgtcttcgaagttgatctggttcattgcatggttgggatcatctgacctccctgctttgctccatttgaattgatctaattcagacagcgtttctgcgaacatccgg

SEQ ID NO: 66832 - protein, 151 aa, Triticum aestivum
  peptide (1)..(151): Ceres Seq. ID no. 13659222
MGRTKHAVAATAATTETKKRLRFELSPRWRPPPALRQVPPEPQPEKKKKRAYRFRPGTVALREVRKYQKSTGPLIPFAPFVRLVKEITDDLTKGEMNHWTPQALFSLQEAAEYHIVDVFEKANLCAIHAKRVTIMQKDIQLARRIGGRRPW

SEQ ID NO: 66833 - protein, 87 aa, Triticum aestivum
  peptide (1)..(87): Ceres Seq. ID no. 13659223
TVILLLSSTSSGTTAQCTPPNSPTLSPRRWVARSTRWRRRRRRRRRRSGSASSSPRAGGRRRRCARYRRSRSRRRRRSGRTGSGRAR

SEQ ID NO: 66834 - DNA, 970 bp, Triticum aestivum
  misc_feature (1)..(970): Ceres Seq. ID no. 13664189
aaaagaggcatgctcccttctcgcttcctgctcctcccgcactgccccaccgcgccggccccgactccgactccgacaccccccggcggcgcgcgctcgccgagctcggtcgcactgcggttcggatcccccggaggcgtgcggcttcgtcgcgggcgagggtcggcggcggtcgcgatggcatccgacgggcgcgtggagcggatcgcgtccagcatccgcgccatccccaacttccccaagccagggattttgtttcaggacatcacaaccttgcttctcgatccgcaggcattccgtgacaccactgacctctttgtcgagcggtacaaggacaaagacataactgtagttgctggtgttgaagccagaggattcatttttggtcctcccattgcattagccataggtgcaaagtttgttccaataaggaagccgaaaaaattacctggtgaggtgatatcggaagaatattctctggaatatggcactgacaaaatcgaaatgcacgtaggagctgtgcagcccaatgaccgagtccttattgtggatgatctaattgccacagggggaaccctttgtgccgctgccaaacttattgagcgtgttggagcaaaggtggttgagtgtgcctgtgttattgaactgccagagctgaagggccgggacaagttgggggacatgccagtttttgtcctagtgcaggcagacgaatcagtatgaaacaagttgtgactcttgagttgttccaatgatgttccccttctggaactatactggaagcagcaaagatatccgttacaatcttagctagttcctatctggagctgctcaataaaagtttcatttttaaatttgtccttctggaactgtttgggaatggagacttgattgttgttccctgtaatacgtggcttatttctgtcaaaaacagtgcaaattattcatgtcaatgaaggatgatagtctg

SEQ ID NO: 66835 - protein, 240 aa, Triticum aestivum
  peptide (1)..(240): Ceres Seq. ID no. 15220289
KRGMLPSRFLLLPHCPTAPAPTPTPTPPGGARSPSSVALRFGSPGGVRLRRGRGSAAVAMASDGRVERIASSIRAIPNFPKPGILFQDITTLLLDPQAFRDTTDLFVERYKDKDITVVAGVEARGFIFGPPIALAIGAKFVPIRKPKKLPGEVISEEYSLEYGTDKIEMHVGAVQPNDRVLIVDDLIATGGTLCAAAKLIERVGAKVVECACVIELPELKGRDKLGDMPVFVLVQADESV

SEQ ID NO: 66836 - protein, 237 aa, Triticum aestivum
  peptide (1)..(237): Ceres Seq. ID no. 15220290
MLPSRFLLLPHCPTAPAPTPTPTPPGGARSPSSVALRFGSPGGVRLRRGRGSAAVAMASDGRVERIASSIRAIPNFPKPGILFQDITTLLLDPQAFRDTTDLFVERYKDKDITVVAGVEARGFIFGPPIALAIGAKFVPIRKPKKLPGEVISEEYSLEYGTDKIEMHVGAVQPNDRVLIVDDLIATGGTLCAAAKLIERVGAKVVECACVIELPELKGRDKLGDMPVFVLVQADESV

SEQ ID NO: 66837 - protein, 181 aa, Triticum aestivum
  peptide (1)..(181): Ceres Seq. ID no. 15220291
MASDGRVERIASSIRAIPNFPKPGILFQDITTLLLDPQAFRDTTDLFVERYKDKDITVVAGVEARGFIFGPPIALAIGAKFVPIRKPKKLPGEVISEEYSLEYGTDKIEMHVGAVQPNDRVLIVDDLIATGGTLCAAAKLIERVGAKVVECACVIELPELKGRDKLGDMPVFVLVQADESV

SEQ ID NO: 66838 - DNA, 932 bp, Triticum aestivum
  misc_feature (1)..(932): Ceres Seq. ID no. 13659177
gacttcctctcctctctgtgccccccaatcctcctcgccaactcattcccagagcaccaagaagatctggagaagagaggaggccattgctagctccccaccatccccttctccctctatctgcctagcgttcttgcttggtcgccatggccaccatcctggagaacatccagaaggcgcggttcctgccgacgaggccgctgagggacgacctgcccaccttccagggcggcaaggaggaggagagccacctcatgggcctgcggaagcgcctctccagcttctccggcaagatccagcccatctcctccgcgtccgccgagtgggcgttcaggcggacccggtcggcgccgtcgctcgccgccgagttcgcgggcggcccgctcaagcgctggtgggactggggcctcggctggctgctctccaagaagctcggcttcgccggcgacctggagatgaacgaggaggaggcggccgcgctcggccgccaaagcaggggcacctgggcccacgtcctctacaaggtgcgctccggggtccgccgcctcgtcgcgtccgaccactcgctgcccaccacgcaccaccgcaaggcctcgctgcccccgtcctcctccgcgcaccagcactgcaagcccgcgccgcagttcgcctacacccagagcttccagtacggccaagcaatggcgcactaagcagcttgctttgcatcttgttctggtggtgtccgcgagatccaaatagacacgacgacgggaaggaagctcgtgaagaaggagaagattcaggtctcaggtgagatcgatggggaagatggctcgctacacaattatatctgggaatttagagttgttagtttaccgtgctgctttcttttttgtgggtagatctaatgtctctacgtataatagataccgagtgtatgctggtggtcc

SEQ ID NO: 66839 - protein, 264 aa, Triticum aestivum
  peptide (1)..(264): Ceres Seq. ID no. 13659178
TSSPLCAPQSSSPTHSQSTKKIWRREEAIASSPPSPSPSICLAFLLGRHGHHPGEHPEGAVPADEAAEGRPAHLPGRQGGGEPPHGPAEAPLQLLRQDPAHLLRVRRVGVQADPVGAVARRRVRGRPAQALVGLGPRLAALQEARLRRRPGDERGGGGRARPPKQGHLGPRPLQGALRGPPPRRVRPLAAHHAPPQGLAAPVLLRAPALQARAAVRLHPELPVRPSNGALSSLLCILFWWCPRDPNRHDDGKEAREEGEDSGLR

SEQ ID NO: 66840 - protein, 181 aa, Triticum aestivum
  peptide (1)..(181): Ceres Seq. ID no. 13659179
MATILENIQKARFLPTRPLRDDLPTFQGGKEEESHLMGLRKRLSSFSGKIQPISSASAEWAFRRTRSAPSLAAEFAGGPLKRWWDWGLGWLLSKKLGFAGDLEMNEEEAAALGRQSRGTWAHVLYKVRSGVRRLVASDHSLPTTHHRKASLPPSSSAHQHCKPAPQFAYTQSFQYGQAMAH

SEQ ID NO: 66841 - protein, 145 aa, Triticum aestivum
  peptide (1)..(145): Ceres Seq. ID no. 13659180
MGLRKRLSSFSGKIQPISSASAEWAFRRTRSAPSLAAEFAGGPLKRWWDWGLGWLLSKKLGFAGDLEMNEEEAAALGRQSRGTWAHVLYKVRSGVRRLVASDHSLPTTHHRKASLPPSSSAHQHCKPAPQFAYTQSFQYGQAMAH

SEQ ID NO: 66842 - DNA, 659 bp, Triticum aestivum
  misc_feature (1)..(659): Ceres Seq. ID no. 13659133
caaatgctcaagattttcaaggaacatgtcagcaagacctcaattttggatgactttgcattttacgagaaccgacagaagttgatgcaagaaaagagagcaaagcaacaaccgcttcaggggcagggtgttgatgagaaggagaagagcgcagttaacgggaattccgctgcacagaagcagacaccgagcaaggagagcaccacccctgccgccggtgaagagccgaacgcttccaaacccaccacagctgaaagcggcggcgcgagtgccaactagcgtgatatatttcttacgctcgttgctgtaacatgcggtagtccattgcgcaaaactcggtcaggcttcggaatatgcgcggatcatacatgggaaactaaatttaggtcgtgtgacttggttctcatcgtttaggtctcttatatacttggtgacatcaggttcttatatggcccctttcctattcctatttttgtttcggagtcttgttggtttagtaatttcagctatttgttattgtttagactaaaggagccgattttcgatacttctagacaacatttaaggtactaagtttttatgagtgttgtagtgctggagaaagtaataagaacaaagaactcctggtttttctagtcaaaaaaaaaaaaagaaaaaaa

SEQ ID NO: 66843 - protein, 92 aa, Triticum aestivum
  peptide (1)..(92): Ceres Seq. ID no. 13659134
QMLKIFKEHVSKTSILDDFAFYENRQKLMQEKRAKQQPLQGQGVDEKEKSAVNGNSAAQKQTPSKESTTPAAGEEPNASKPTTAESGGASAN

SEQ ID NO: 66844 - protein, 91 aa, Triticum aestivum
  peptide (1)..(91): Ceres Seq. ID no. 13659135
MLKIFKEHVSKTSILDDFAFYENRQKLMQEKRAKQQPLQGQGVDEKEKSAVNGNSAAQKQTPSKESTTPAAGEEPNASKPTTAESGGASAN

SEQ ID NO: 66845 - protein, 64 aa, Triticum aestivum
  peptide (1)..(64): Ceres Seq. ID no. 13659136
MQEKRAKQQPLQGQGVDEKEKSAVNGNSAAQKQTPSKESTTPAAGEEPNASKPTTAESGGASAN

SEQ ID NO: 66846 - DNA, 1100 bp, Triticum aestivum
  misc_feature (1)..(1100): Ceres Seq. ID no. 15179873
aatgttttcacggacttttgacttcagcccaagtcaaggttcccaaaaggccgaagccgccagcccaccgcacactgcccctcccctcctcgcccaatccccccttcttcgtcccacgacagaccaatttcttcccaaatcgccaccgccaccgccatgatgtcgtcaccggcagataccgcgccgtcatcctcctccgcggcctcggccgctccgaatcagcatccacagccgccggcgcagcaggctgatacgaaggagcggcggatggagtcgctcgggtggctgacggagtccacggtgatgcccaagaagcacaaggccatcgagggcgtcggcgcggcatccatactcgacctcaaggcccagctctaccgcactcaggaggaagcccgcaattccaccgccgctgacgccgcctccagcgagttccgccgcgccaagaaacgctcgggccccgccgaccccctgggcgccaagaactcaggtgtagacgctcgtgcccacaaggataagctggagctgaaagctgtgaaagatggtactgcatgttattctgccctagaaaagaaggctgagctgtatgagaaattatccaggggtgagctacctgatgaagaagaccaggagaaatattgcgttgatttcttccagaaaagttttcatcaagtcagcgtgcgccggcagccagagactgctactgcccctgagcatgtagaacaagaaaatgagagtgtcgattctatgccaaatcccaagccaatgggccttggacgaactggtacaacagttgaccaagatgagcacaaacgctttgtcagggaggttcacgacgaagtaagtcaagcaaggcagaaggcttcaacgatgaaacaccggcgacaagagcaggagtcggctcgtagagagaaactcaggcaagctttcctcaagaagcgccttgacaagttgatggctgaaaagcaagcatcttcagcgagtgatgaccaaccaaatagctaatcgagattttgtatgtcttacacttgtgcccaggaagcagttgttgtagctcatgtggtaatggttcatgcaactgaaaatgagaaaacttgccctac

SEQ ID NO: 66847 - protein, 281 aa, Triticum aestivum
  peptide (1)..(281): Ceres Seq. ID no. 15179874
MMSSPADTAPSSSSAASAAPNQHPQPPAQQADTKERRMESLGWLTESTVMPKKHKAIEGVGAASILDLKAQLYRTQEEARNSTAADAASSEFRRAKKRSGPADPLGAKNSGVDARAHKDKLELKAVKDGTACYSALEKKAELYEKLSRGELPDEEDQEKYCVDFFQKSFHQVSVRRQPETATAPEHVEQENESVDSMPNPKPMGLGRTGTTVDQDEHKRFVREVHDEVSQARQKASTMKHRRQEQESARREKLRQAFLKKRLDKLMAEKQASSASDDQPNS

SEQ ID NO: 66848 - protein, 280 aa, Triticum aestivum
  peptide (1)..(280): Ceres Seq. ID no. 15179875
MSSPADTAPSSSSAASAAPNQHPQPPAQQADTKERRMESLGWLTESTVMPKKHKAIEGVGAASILDLKAQLYRTQEEARNSTAADAASSEFRRAKKRSGPADPLGAKNSGVDARAHKDKLELKAVKDGTACYSALEKKAELYEKLSRGELPDEEDQEKYCVDFFQKSFHQVSVRRQPETATAPEHVEQENESVDSMPNPKPMGLGRTGTTVDQDEHKRFVREVHDEVSQARQKASTMKHRRQEQESARREKLRQAFLKKRLDKLMAEKQASSASDDQPNS

SEQ ID NO: 66849 - protein, 244 aa, Triticum aestivum
  peptide (1)..(244): Ceres Seq. ID no. 15179876
MESLGWLTESTVMPKKHKAIEGVGAASILDLKAQLYRTQEEARNSTAADAASSEFRRAKKRSGPADPLGAKNSGVDARAHKDKLELKAVKDGTACYSALEKKAELYEKLSRGELPDEEDQEKYCVDFFQKSFHQVSVRRQPETATAPEHVEQENESVDSMPNPKPMGLGRTGTTVDQDEHKRFVREVHDEVSQARQKASTMKHRRQEQESARREKLRQAFLKKRLDKLMAEKQASSASDDQPNS

SEQ ID NO: 66850 - DNA, 1162 bp, Triticum aestivum
  misc_feature (1)..(1162): Ceres Seq. ID no. 13663517
aacatcctaatcaaaaactaataaatcccccacccccggatcgacaaagcttcccattcctccgcatcggcaggcagcagcaaaacaacagcccaatcgagggtcactccacaccaccaccactctcttcccccaatcccctcctcctccccgaaaccctagctggaatggagcccaaatccaccacccctccgccgccgggccccgtgctgggcgcgcccgtcggctacccgccggccgccgtctacccggccgccccgccccccggctacccgcacgcgccggccctctacgcgccccagccgccccccgccgccgtcgccgccgcgtcgcagcagaccgccgcgcagcagcagcagcagctgcaggtgttctgggcggagcagtaccgcgagatcgaggccaccaccgacttcaagaaccacaacctgcccctcgcccgcatcaagaagatcatgaaggccgacgaggacgtccgcatgatcgccgccgaggcgcccgtcgtcttcgcccgggcctgcgagatgttcatcctcgagctcacccaccgcggctgggcgcacgccgaggagaacaagcgccgcacgctgcagaagtccgacatcgccgccgccatcgcccgcaccgaggtcttcgacttcctggtggacatcgtgccgcgggacgaggccaaggacgccgaggcggccgtcgccgccgggatgccccaccccgccgccggcatgcccgccgccgacatggggtactactacgtcccgcagcagtaacacctgcagtatgttacagcggatttaagttgcatctaagattgtgctgttgatttagtgctctcctatgtttgtttgttcaccgctgaataatttaagatgttgccattatttgaggggcctcctctatgttacaagtgattcgatccgagaagaacccggctaggttcttctgatcgaggcagtccgtatgatgctcatgcatgtctaactgannanaaaaaaaaaaaaaaaaaaaaaaaaaaaaaaaaaaaaaaaaaaaaaaaaaaaaaaaaaaaaaaaaaaaaaaataaaaaaaaaaaaaaaaaggttaatcaaaaccgccaaccccaaggggggccccggaaccaaattcccccaaaaaaaagccaaaaaacgcgcgccaacggcccgcc

SEQ ID NO: 66851 - protein, 254 aa, Triticum aestivum
  peptide (1)..(254): Ceres Seq. ID no. 13663518
HPNQKLINPPPPDRQSFPFLRIGRQQQNNSPIEGHSTPPPLSSPNPLLLPETLAGMEPKSTTPPPPGPVLGAPVGYPPAAVYPAAPPPGYPHAPALYAPQPPPAAVAAASQQTAAQQQQQLQVFWAEQYREIEATTDFKNHNLPLARIKKIMKADEDVRMIAAEAPVVFARACEMFILELTHRGWAHAEENKRRTLQKSDIAAAIARTEVFDFLVDIVPRDEAKDAEAAVAAGMPHPAAGMPAADMGYYYVPQQ

SEQ ID NO: 66852 - protein, 199 aa, Triticum aestivum
  peptide (1)..(199): Ceres Seq. ID no. 13663519
MEPKSTTPPPPGPVLGAPVGYPPAAVYPAAPPPGYPHAPALYAPQPPPAAVAAASQQTAAQQQQQLQVFWAEQYREIEATTDFKNHNLPLARIKKIMKADEDVRMIAAEAPVVFARACEMFILELTHRGWAHAEENKRRTLQKSDIAAAIARTEVFDFLVDIVPRDEAKDAEAAVAAGMPHPAAGMPAADMGYYYVPQQ

SEQ ID NO: 66853 - DNA, 898 bp, Triticum aestivum
  misc_feature (1)..(898): Ceres Seq. ID no. 13663563
aacacctcactccctctcctcactcctcactcgcaagcctcgctcctctccctccgctcgctctcctcgctcggccgcagcgacaagaagcatgggcctctcggtgatcgctccgccggccggcgactcggcgtccccggcgcaccgccgcgcgcgccgcgccttcctcgtgtccaactacatgatcctcggcgcggcgtccgggtgcggcttcctcacgctctcgctccgcctggtgccctccgtcgacggcttcctcctcatcctgctccacgcgctcaccgtggcggccgccgtggccgggtgcgccgtcatcgcggcgcccgacccgccgcggggccgcgtctacaccgcccacatgtccgccaccgtcgtcgtgtccatcctgcagggcgccgccgccgtgctcgccttctcccgcaccgccgagttcctcgcctacgggctccggtcctacgtccgcgaggaggacggcgccatcatcctgcgcatgatcgggggcctcggcatcgccatcttctgcctcgagtgggtcgccctcgcgctcgccttcgtcctcaggtactacgcctacgtcgacagggagtgcggcggcaaccccatgcgccgcagcgccaaggtcggcggcgaggacggcgccggcaactggccgtggccgttccaggtctgatctgatccgccacaaggatgatgatgcagcaagcaatttatgatgttggggccttgggggaggggtgtctcaagacgagaagagctgagaaccgatagttcttgggagaaaaactagtgtttggtgatattactattcgtttattgggttgtattgtgtggtgtggtatatgattatgttgtactgcggctgttgccacctctataatattatttgaaattcctgttc

SEQ ID NO: 66854 - protein, 224 aa, Triticum aestivum
  peptide (1)..(224): Ceres Seq. ID no. 15220232
NTSLPLLTPHSQASLLSLRSLSSLGRSDKKHGPLGDRSAGRRLGVPGAPPRAPRLPRVQLHDPRRGVRVRLPHALAPPGALRRRLPPHPAPRAHRGGRRGRVRRHRGARPAAGPRLHRPHVRHRRRVHPAGRRRRARLLPHRRVPRLRAPVLRPRGGRRHHPAHDRGPRHRHLLPRVGRPRARLRPQVLRLRRQGVRRQPHAPQRQGRRRGRRRQLAVAVPGLI

SEQ ID NO: 66855 - protein, 222 aa, Triticum aestivum
  peptide (1)..(222): Ceres Seq. ID no. 15220233
TPHSLSSLLTRKPRSSPSARSPRSAAATRSMGLSVIAPPAGDSASPAHRRARRAFLVSNYMILGAASGCGFLTLSLRLVPSVDGFLLILLHALTVAAAVAGCAVIAAPDPPRGRVYTAHMSATVVVSILQGAAAVLAFSRTAEFLAYGLRSYVREEDGAIILRMIGGLGIAIFCLEWVALALAFVLRYYAYVDRECGGNPMRRSAKVGGEDGAGNWPWPFQV

SEQ ID NO: 66856 - protein, 192 aa, Triticum aestivum
  peptide (1)..(192): Ceres Seq. ID no. 15220234
MGLSVIAPPAGDSASPAHRRARRAFLVSNYMILGAASGCGFLTLSLRLVPSVDGFLLILLHALTVAAAVAGCAVIAAPDPPRGRVYTAHMSATVVVSILQGAAAVLAFSRTAEFLAYGLRSYVREEDGAIILRMIGGLGIAIFCLEWVALALAFVLRYYAYVDRECGGNPMRRSAKVGGEDGAGNWPWPFQV

SEQ ID NO: 66857 - DNA, 696 bp, Triticum aestivum
  misc_feature (1)..(696): Ceres Seq. ID no. 15179877
accagcaccagccctccttttcaaatcgctttcaaacaggaacacatcgccgcctcctcctccccttcctccgctccctcccccatccatccagtgatccatggccgccgcctcgcccgagttcttcaacccggcggacgccttctcgccgcgcatgcacctcctctccgccggcgctggagacggcggctgtggcgacggcgacgaatactaccgctgctgcaggacgcccacgggcgccgggatcggctgcctgggccaggcggccacctgcccgccggcgccgcggaagccgcgcgcgcagcccgacgcggcctgccggaagcgcctcttcgacgtccaggtcatcagcctccgcttcgacgacctcgacgccatcttccgcccctcgccgccgccgccctgccacgaccgcaacaacaagcagcagcagcggcggcagcggagccgccgcgtgctcggcaggctcgccgctggctccaccggccggcgcagccgcgccagcttaaattaagtgcctgccattagcagtcagtacccagtagttgagttgagttgacacttgtgtggatggatgattgagttatcagccatcttcaggtaaaaacagtagtggtagccacgacccatacttcgctttgcacacccatcctctgtaatcatccgtcataataatattattatttctactgtcat

SEQ ID NO: 66858 - protein, 175 aa, Triticum aestivum
  peptide (1)..(175): Ceres Seq. ID no. 15179878
TSTSPPFQIAFKQEHIAASSSPSSAPSPIHPVIHGRRLARVLQPGGRLLAAHAPPLRRRWRRRLWRRRRILPLLQDAHGRRDRLPGPGGHLPAGAAEAARAARRGLPEAPLRRPGHQPPLRRPRRHLPPLAAAALPRPQQQAAAAAAAEPPRARQARRWLHRPAQPRQLKLSACH

SEQ ID NO: 66859 - protein, 168 aa, Triticum aestivum
  peptide (1)..(168): Ceres Seq. ID no. 15179879
QHQPSFSNRFQTGTHRRLLLPFLRSLPHPSSDPWPPPRPSSSTRRTPSRRACTSSPPALETAAVATATNTTAAAGRPRAPGSAAWARRPPARRRRGSRARSPTRPAGSASSTSRSSASASTTSTPSSAPRRRRPATTATTSSSSGGSGAAACSAGSPLAPPAGAAAPA

SEQ ID NO: 66860 - protein, 137 aa, Triticum aestivum
  peptide (1)..(137): Ceres Seq. ID no. 15179880
MAAASPEFFNPADAFSPRMHLLSAGAGDGGCGDGDEYYRCCRTPTGAGIGCLGQAATCPPAPRKPRAQPDAACRKRLFDVQVISLRFDDLDAIFRPSPPPPCHDRNNKQQQRRQRSRRVLGRLAAGSTGRRSRASLN

SEQ ID NO: 66861 - DNA, 1176 bp, Triticum aestivum
  misc_feature (1)..(1176): Ceres Seq. ID no. 15179881
agatgccgcattagccaccaacgcactcccccgtctccccctccaatcttcaccaatccaagcctccctccggcggcggcgacggcggagagatcggcgagatttccctcttcctcccactctgtctctgtctgagctcgaggagagggagagagattgagagggcctccgtgcggattggctcggttcctctggttcttgctcccagcccggcccgcgcgccatgacggtggtcgacgccgagacccggttccacgtcctggcggtggacgacagcgtcatcgaccggaagctcatcgagatgctgctcaggacctcctcctaccaagtcaccacggtggactccgggagcaaggcgctggaggtcctgggacttagagacgagggggacgactcctcctcctcctcctcacccccttcctcctccgcccctgaccaccaccaggaggtgggcgtgaatttgatcatcactgactactgcatgcctggcatgacaggatacgatctgctgaggagggtcaaggggtcatcttcattgaaggacattccagtggtgatcatgtcgtctgagaatgtgcctgccaggatcagcaggtgcttggaggacggcgcggaggagttyttcctcaagcccgtgaagctcgctgacatgaagaagctcaagtcgcacctggtccggcggaagcagccccagctccagccgcagacacatgagaagccacagccgcaaccacagcagcagcaacagaaaccacagccagagcagcagctgaaggcagagcaagcgccagccgagccggcggcggaggaggaggcagtgacggccggcggaatcacgggtgactgcggcggcggcagcaggaagcggaaggcggcgatgatggagcaggacggggcgagcacgagcctctccagcggcagcagcggcctggcggtggagacctgaatcctgaagaaactcaacagagacacccccaaccaagaaacctcatgtttctcttggctcctgcaatttttttggggtttacttgctcatatgggagaatcatcatcgtcgtcatggctaatagtagctcctggggtggggtaaaatatttacttagttctaagtgaagaactagaaaaaacatactacttttacactagctgaattttggtgtagtgccctgttcgctc

SEQ ID NO: 66862 - protein, 240 aa, Triticum aestivum
  peptide (1)..(240): Ceres Seq. ID no. 15179882
  misc_feature (133)..(133): Xaa is any aa, unknown or other
MTVVDAETRFHVLAVDDSVIDRKLIEMLLRTSSYQVTTVDSGSKALEVLGLRDEGDDSSSSSSPPSSSAPDHHQEVGVNLIITDYCMPGMTGYDLLRRVKGSSSLKDIPVVIMSSENVPARISRCLEDGAEEXFLKPVKLADMKKLKSHLVRRKQPQLQPQTHEKPQPQPQQQQQKPQPEQQLKAEQAPAEPAAEEEAVTAGGITGDCGGGSRKRKAAMMEQDGASTSLSSGSSGLAVET

SEQ ID NO: 66863 - protein, 214 aa, Triticum aestivum
  peptide (1)..(214): Ceres Seq. ID no. 15179883
  misc_feature (107)..(107): Xaa is any aa, unknown or other
MLLRTSSYQVTTVDSGSKALEVLGLRDEGDDSSSSSSPPSSSAPDHHQEVGVNLIITDYCMPGMTGYDLLRRVKGSSSLKDIPVVIMSSENVPARISRCLEDGAEEXFLKPVKLADMKKLKSHLVRRKQPQLQPQTHEKPQPQPQQQQQKPQPEQQLKAEQAPAEPAAEEEAVTAGGITGDCGGGSRKRKAAMMEQDGASTSLSSGSSGLAVET

SEQ ID NO: 66864 - protein, 154 aa, Triticum aestivum
  peptide (1)..(154): Ceres Seq. ID no. 15179884
  misc_feature (47)..(47): Xaa is any aa, unknown or other
MPGMTGYDLLRRVKGSSSLKDIPVVIMSSENVPARISRCLEDGAEEXFLKPVKLADMKKLKSHLVRRKQPQLQPQTHEKPQPQPQQQQQKPQPEQQLKAEQAPAEPAAEEEAVTAGGITGDCGGGSRKRKAAMMEQDGASTSLSSGSSGLAVET

SEQ ID NO: 66865 - DNA, 898 bp, Triticum aestivum
  misc_feature (1)..(898): Ceres Seq. ID no. 15179885
agtctgctgtctgctctgtgcgccgacccacgcttgtctttctccccaatctccaaactctctctagtccccaccacaacccgctccccatggcgacggccgccgccaccgccgccaagccggcggcgaggacgacggtgaacgtggccggggccgtgtaccgcgtgcagctggccctcctcgacggcgcagcggcctccaacgagcccctcctccacgcggccgccgctatcctctcccgcgccgactacgacgacgtcgtcaccgagcgctccatcgccgaggcgtgcggccacccagcgtgcaccagctccctccccgaccccgccaaccccaaggcggcgccgcggttccacatctccctccgcgagcaccgcgtctacgacctcgaggaggcccgcaagttctgctccgagcgctgcctcgtcgcctccgcggccttcgccgcctcgctcccgcccgaccgccccttcgggatcccgcccaacaggctggacgccctggtcgcgctcttcgagggcagcggggacggtccggggctagggtttcggtcggacggtgggaagaaggaggacgaggggaggaaggtggagattgtggagaaggagacgcctgggcctggggaggtgacgctgcaggagtggattgggccgtcgggcgccatcgagggctatgtgccccgccatcaccccattcatgaaggtgattgtttcatactgaactctgttatttactttgacaattttgtagtctggatattcattcttgcatttgattatgttgccattggttgactggaggacactaggattgttgagaatagctgaggcattttactgtctttgtgtgctgggaattttatgtggattgatctgaataactgagaaattttatcgtc

SEQ ID NO: 66866 - protein, 263 aa, Triticum aestivum
  peptide (1)..(263): Ceres Seq. ID no. 15179886
SAVCSVRRPTLVFLPNLQTLSSPHHNPLPMATAAATAAKPAARTTVNVAGAVYRVQLALLDGAAASNEPLLHAAAAILSRADYDDVVTERSIAEACGHPACTSSLPDPANPKAAPRFHISLREHRVYDLEEARKFCSERCLVASAAFAASLPPDRPFGIPPNRLDALVALFEGSGDGPGLGFRSDGGKKEDEGRKVEIVEKETPGPGEVTLQEWIGPSGAIEGYVPRHHPIHEGDCFILNSVIYFDNFVVWIFILAFDYVAIG

SEQ ID NO: 66867 - protein, 234 aa, Triticum aestivum
  peptide (1)..(234): Ceres Seq. ID no. 15179887
MATAAATAAKPAARTTVNVAGAVYRVQLALLDGAAASNEPLLHAAAAILSRADYDDVVTERSIAEACGHPACTSSLPDPANPKAAPRFHISLREHRVYDLEEARKFCSERCLVASAAFAASLPPDRPFGIPPNRLDALVALFEGSGDGPGLGFRSDGGKKEDEGRKVEIVEKETPGPGEVTLQEWIGPSGAIEGYVPRHHPIHEGDCFILNSVIYFDNFVVWIFILAFDYVAIG

SEQ ID NO: 66868 - DNA, 1171 bp, Triticum aestivum
  misc_feature (1)..(1171): Ceres Seq. ID no. 13659286
cccccctcccgtaaaaacaccagttcttccccaaatcttgcaaaacctaaccctcagccccgaccacacggccgccgccgccaccaaccactcgaccgcagcgccggcttcctcccggaacacagtcgccgccgaccgcctagtcgtcgccgagcacccttctctaccaaggaaaccttcgccgcttcgtccccatcccccgcgcacctagcgcctgcttcctcccgaggaatgccgcagaccgccctccatccccaccacaacagcgacctcctccacaggtttcctccgccgagcaggcctcctcctcctcaagctttctccscccgaacagggcctcctcctccacgagcatccttccccgagcactaagttgggccgcatcctggttccctcacccgagcagcggaccttcctgtacggcccctctcctgagaagctccacctcctctacatcctcccccaggtgcagcgccacctccttgctcaccgagagcacttggctgtgtgcatcttgtttgtcctctccaccaagcagcatcggctactccatacaagcacataagcttatgctcttatgattatatatttaccaatgactattatggttgatagttttaaagtctttgcttctatctatgcagttgagaatgacttataagttcatggcaaaagcagcaacatgagtacgcaaccacaagcaagctgaggggttatttctagacaaaactttaggaaccgagttcactacaactcgaagtcttgtgcatggaggagaattgagatatttgcgcattctgtactggtcaaaaggttggcatcatggttggaagatcttctatgctactctctacatgatgtttcttctacatgatagcgcttgaagtctacatgatgtttcttgtattcatagctcaaaccatttgtttagcttagtttgaacaaaaaatattattgtcttacatgtaaataatgtttactaatgtagctggatgctactgaacgcatgtacgaaagtcaaaatactaaagtgttagtcattacgtgtttgacaaaaaaaaaaaaaaaaaaaaaaaaaaaaaaaaaaaaaaaaaaaaaaaaaaaaaaaaaaaaaaagaaaaaaaaaaaaaaaaargyttatcratmccgycaacctcaagggggggcccgg

SEQ ID NO: 66869 - protein, 123 aa, Triticum aestivum
  peptide (1)..(123): Ceres Seq. ID no. 15219960
  misc_feature (109)..(109): Xaa is any aa, unknown or other
PPSRKNTSSSPNLAKPNPQPRPHGRRRHQPLDRSAGFLPEHSRRRPPSRRRAPFSTKETFAASSPSPAHLAPASSRGMPQTALHPHHNSDLLHRFPPPSRPPPPQAFSXRTGPPPPRASFPEH

SEQ ID NO: 66870 - protein, 69 aa, Triticum aestivum
  peptide (1)..(69): Ceres Seq. ID no. 15219961
PPPVKTPVLPQILQNLTLSPDHTAAAATNHSTAAPASSRNTVAADRLVVAEHPSLPRKPSPLRPHPPRT

SEQ ID NO: 66871 - DNA, 1147 bp, Triticum aestivum
  misc_feature (1)..(1147): Ceres Seq. ID no. 14303047
gtcctcccggcaccgcacaccgcaacctctaagctcaaaccacaacgcgcacccacacaaagccgagagcgcgctctcgctcgctcgccggcggcgacagaggacaggcatggccgtgtacatccgcctggacgacgccgtgcgcgcgcgcctccgcggggacgggggtggcaccagcagcggcagcgaccacgacgcctccgcctgcctctccgacctcgtccaggccttcctcgagacggacgccgccggcaacggggacgacgcggccgggccggccccgaaaggacgtgacgggtacgactccgacgacgcggacggcgccgcggaggcggccgcgtccgtgcgggagctgctcgacccgccggccgcggaggaccccttccggatcaggctggcggccgccgtgtccgcggcgctggacgcggaggcgccgctgcgggggcacggcgcggcgttccggcgcgcggtgatgcggcggctgcgtgccgctgggtacgacgccggcgtgtgcaggtcgcgctgggagacgtgcggcaacctgacggccgggacgtacgagtacatcgacgtggtcgtgccggccgcggggaaggcggcgaggtacattgtggacgcggacttccgggcggggctggaggtggcgcgcgcgacggcggagtacgcggtcgtcgtggccgcggtgccggccaaggcggtggtcgcgcgggaggaggccgtggggcgcgccgtgcgcgtggccgccgacgccgcgcgccggtcgctccgggcgcacggcctgcacgtgccgccgtggcgcaagagccggtacatgctcgccaagtggctggggccctacaagcggtcgccgtcctcctcatcatcggcgtccggcgcaatgccggcgcccggcggccccgggatggacatcatcaagtgccgcgccgtcgggttcttcccgtcccagacggccgcgccggcggcgaggatcaagtaaaagctcctcggcaccgctaattctccgcgcgcgtctctggaagatgtcatagtctgataagtagatgtagagagatgatcgatgagttggagcgtgcctcgaattcgtttttgtacaaacatttttggtctacctagactatgaaaggagcaaattgttggtcaaaaaaac

SEQ ID NO: 66872 - protein, 324 aa, Triticum aestivum
  peptide (1)..(324): Ceres Seq. ID no. 14303048
SSRHRTPQPLSSNHNAHPHKAESALSLARRRRQRTGMAVYIRLDDAVRARLRGDGGGTSSGSDHDASACLSDLVQAFLETDAAGNGDDAAGPAPKGRDGYDSDDADGAAEAAASVRELLDPPAAEDPFRIRLAAAVSAALDAEAPLRGHGAAFRRAVMRRLRAAGYDAGVCRSRWETCGNLTAGTYEYIDVVVPAAGKAARYIVDADFRAGLEVARATAEYAVVVAAVPAKAVVAREEAVGRAVRVAADAARRSLRAHGLHVPPWRKSRYMLAKWLGPYKRSPSSSSSASGAMPAPGGPGMDIIKCRAVGFFPSQTAAPAARIK

SEQ ID NO: 66873 - protein, 288 aa, Triticum aestivum
  peptide (1)..(288): Ceres Seq. ID no. 14303049
MAVYIRLDDAVRARLRGDGGGTSSGSDHDASACLSDLVQAFLETDAAGNGDDAAGPAPKGRDGYDSDDADGAAEAAASVRELLDPPAAEDPFRIRLAAAVSAALDAEAPLRGHGAAFRRAVMRRLRAAGYDAGVCRSRWETCGNLTAGTYEYIDVVVPAAGKAARYIVDADFRAGLEVARATAEYAVVVAAVPAKAVVAREEAVGRAVRVAADAARRSLRAHGLHVPPWRKSRYMLAKWLGPYKRSPSSSSSASGAMPAPGGPGMDIIKCRAVGFFPSQTAAPAARIK

SEQ ID NO: 66874 - protein, 167 aa, Triticum aestivum
  peptide (1)..(167): Ceres Seq. ID no. 14303050
MRRLRAAGYDAGVCRSRWETCGNLTAGTYEYIDVVVPAAGKAARYIVDADFRAGLEVARATAEYAVVVAAVPAKAVVAREEAVGRAVRVAADAARRSLRAHGLHVPPWRKSRYMLAKWLGPYKRSPSSSSSASGAMPAPGGPGMDIIKCRAVGFFPSQTAAPAARIK

SEQ ID NO: 66875 - DNA, 1367 bp, Triticum aestivum
  misc_feature (1)..(1367): Ceres Seq. ID no. 13659338
catccatccacccgcccccaagttatctcgtgccgtcttctcttctcttctcttctcttctcccctcccgcatccggtagcagcaagcactctgcgtctctccctttatccccgcccgcatggctgctctcctccgcacggcggccgcccttgcgccccgcccttcgcctgcccgcgagtccccgcgccggccgtgcgctgcgtccctcgcctgctcccgccggccgccggtgcggtcgctccgcgcccagttgcttacgacccggcgcgctccgggccacgtcgcgagccggctgcggcgattgggggctaccgaggccgacgagtctgcgcagacggccacgcaggaggatacagaaactgaagttactgggggcactgttgccgatgatggttctgcaggcacagaagagactccctctgttctcatcacagcattgcaatcatacaaagaagctttgatgaatgatgatgaagcaaaaattgcggagatagagtcctttctacttactattgaggatgagaaaaattctctaatgggcaaaatcactgctttagatgcagaattgacaactgagagagatcgtatcgtgcggattagttctgactttgataactacaggaagaggacagaaagagagaagctttctttgatgacaaatgtgcaaggagaagttgttgagagcttgttgcctgttcttgacaactttgaaagagcaaaaacacagataaaggtggaaacagagcgtgaagctaaaataaatgacagctaccagagcatttataagcaacttgttgaaattctgaaatcactgggtgttgaagatgtggaaactgttggcaaaccttttgatcctatgcttcatgaggctattatgcgagaagaatcggtggaatatgaagatggggttgtcctccaggaattccgcaagggtttcaagcttggtgagagattactacgtccggcgatggtcaaggtgtctgcaggaccaggccctgaaaagtcgggagatgacgatactacaataggtgaagatagtgtagggcctcaagcgttcgacgacggtgaagacgatggttttgatgatgccgatgccgagtaattgtgctcggtttctaatttggaaacaagaaattccagaagttttgatgttttttctggagggtgccacatgatagagttagatattctgctcctcaaatgtgctggttctctcttcctgctcttgacatggaagtgttgataattgtgtcaaaagtttctatatcctcatggtacggtcattatcatggttaggaattattgttgggtcaagcaacaacaatgttatatatatacgaggtaaattgtgtttgatttgttggag

SEQ ID NO: 66876 - protein, 327 aa, Triticum aestivum
  peptide (1)..(327): Ceres Seq. ID no. 13659339
MAALLRTAAALAPRPSPARESPRRPCAASLACSRRPPVRSLRAQLLTTRRAPGHVASRLRRLGATEADESAQTATQEDTETEVTGGTVADDGSAGTEETPSVLITALQSYKEALMNDDEAKIAEIESFLLTIEDEKNSLMGKITALDAELTTERDRIVRISSDFDNYRKRTEREKLSLMTNVQGEVVESLLPVLDNFERAKTQIKVETEREAKINDSYQSIYKQLVEILKSLGVEDVETVGKPFDPMLHEAIMREESVEYEDGVVLQEFRKGFKLGERLLRPAMVKVSAGPGPEKSGDDDTTIGEDSVGPQAFDDGEDDGFDDADAE

SEQ ID NO: 66877 - protein, 213 aa, Triticum aestivum
  peptide (1)..(213): Ceres Seq. ID no. 13659340
MNDDEAKIAEIESFLLTIEDEKNSLMGKITALDAELTTERDRIVRISSDFDNYRKRTEREKLSLMTNVQGEVVESLLPVLDNFERAKTQIKVETEREAKINDSYQSIYKQLVEILKSLGVEDVETVGKPFDPMLHEAIMREESVEYEDGVVLQEFRKGFKLGERLLRPAMVKVSAGPGPEKSGDDDTTIGEDSVGPQAFDDGEDDGFDDADAE

SEQ ID NO: 66878 - protein, 188 aa, Triticum aestivum
  peptide (1)..(188): Ceres Seq. ID no. 13659341
MGKITALDAELTTERDRIVRISSDFDNYRKRTEREKLSLMTNVQGEVVESLLPVLDNFERAKTQIKVETEREAKINDSYQSIYKQLVEILKSLGVEDVETVGKPFDPMLHEAIMREESVEYEDGVVLQEFRKGFKLGERLLRPAMVKVSAGPGPEKSGDDDTTIGEDSVGPQAFDDGEDDGFDDADAE

SEQ ID NO: 66879 - DNA, 1242 bp, Triticum aestivum
  misc_feature (1)..(1242): Ceres Seq. ID no. 15179888
ccgcgttatctcgttgcctccacccctccgccccattcccgctgctgctgctcctctctcctcttagcccaaacacacctcacctcgctccccgtcccgccgatctcttctcttagggtcgtccgcgatggcggctccggtggtggacgccgagtacctgcgccaggtcgacagggggcgccgcgctctccgcgccctcatcgcctccaagggatgcgcccccatcatgctccgcctcgcatggcatgatgctggcacgtatgatgtgaacacaagaactggtggtgcaaatggttcaattagatacgaggaagagtacacccatggttcaaatgctggcttaaaaattgctattgatctcctcgagcctattaaagcgaagcatccaaagattacatatgcagacctttatcagcttgctggagtagttgcagttgaagtcaccgggggtccaaccgttgagttcatccctggaagacgtgattcgtcagtttgtccccgtgaagggcgccttcctgatgctaagaaaggcgcaccacatctaagggacatcttttatcgaatgggcttaacagacaaagatattgtagcactatctggggggcacagcctgggaaaggcacatcctgaaaggtctggttttgacggtgcatggactcgtgaccctctgaagtttgacaactcatactttcttgagctactgaagggggaatcggagggtcttctgaagctccctactgataaggcattgttggatgatcctgaatttagacgttatgtggagctttatgcaaaggacgaggatgctttcttcaaggactatactgaatcacacaagaaactttctgaacttggcttcacaccacggatcagtggcccagcttctacaaaatcagatgtttcaactgctgttgtacttgcacagagtgcagtgggggtagcagttgcggcagctgtagtcatcgcgggctacctgtacgaggcttccaagaggagcaagtaaggggtttcatgagttcttggatggcattgccttatttagtaagtatcaagttattcttaaaaaaataagtgccaagttcaaataatagaactctagtgatgaacaaccaacagcagtcttaaaatatttcaggcattcttgaggacatctccttcatgtatacatcatacttgaatatttcagtgacaatgaatgcttactattaaaagcatttttgggcatgtatcttgtgcaatacg

SEQ ID NO: 66880 - protein, 291 aa, Triticum aestivum
  peptide (1)..(291): Ceres Seq. ID no. 15179889
MAAPVVDAEYLRQVDRGRRALRALIASKGCAPIMLRLAWHDAGTYDVNTRTGGANGSIRYEEEYTHGSNAGLKIAIDLLEPIKAKHPKITYADLYQLAGVVAVEVTGGPTVEFIPGRRDSSVCPREGRLPDAKKGAPHLRDIFYRMGLTDKDIVALSGGHSLGKAHPERSGFDGAWTRDPLKFDNSYFLELLKGESEGLLKLPTDKALLDDPEFRRYVELYAKDEDAFFKDYTESHKKLSELGFTPRISGPASTKSDVSTAVVLAQSAVGVAVAAAVVIAGYLYEASKRSK

SEQ ID NO: 66881 - protein, 258 aa, Triticum aestivum
  peptide (1)..(258): Ceres Seq. ID no. 15179890
MLRLAWHDAGTYDVNTRTGGANGSIRYEEEYTHGSNAGLKIAIDLLEPIKAKHPKITYADLYQLAGVVAVEVTGGPTVEFIPGRRDSSVCPREGRLPDAKKGAPHLRDIFYRMGLTDKDIVALSGGHSLGKAHPERSGFDGAWTRDPLKFDNSYFLELLKGESEGLLKLPTDKALLDDPEFRRYVELYAKDEDAFFKDYTESHKKLSELGFTPRISGPASTKSDVSTAVVLAQSAVGVAVAAAVVIAGYLYEASKRSK

SEQ ID NO: 66882 - protein, 146 aa, Triticum aestivum
  peptide (1)..(146): Ceres Seq. ID no. 15179891
MGLTDKDIVALSGGHSLGKAHPERSGFDGAWTRDPLKFDNSYFLELLKGESEGLLKLPTDKALLDDPEFRRYVELYAKDEDAFFKDYTESHKKLSELGFTPRISGPASTKSDVSTAVVLAQSAVGVAVAAAVVIAGYLYEASKRSK

SEQ ID NO: 66883 - DNA, 1740 bp, Triticum aestivum
  misc_feature (1)..(1740): Ceres Seq. ID no. 14303197
ccatatctccgactcctctgccctgccgcgcgggcccaactcggcgccaaaaaatccatctcgcatctcacgctcttctagctctctccccccgccatggaagaccggcaagccaccggcggcgccggcgccgcgaccaaggtccgcgtgaacggcacgacggccgaagcgacactctccaccacaggcggctgccccgagctccggtggcgctgcgctagggccacggcggagaggagcctctcgctggaggccgacgtgctcggagccgaggcgagcggcaaggaggtcgtcgtcagggccttcgtggcggaggatgccgcgagaccgccgtcgcgcgccaaggcgagagggaagaggcgcaggagggagtacgtcttcgagatggccgacggcgagggcgcggccgcggcctggggcgagacgctacggggctgcttggactcgatagggcggcccaagagattgttcgtcctcatcaacccctacggaggcaaaagacgggcgagcaagatctacgaggcagaaatcaaacccctgttcgaagccgccggcgtcgaagtcacaatgcaagagacccggtaccgggggcatgcccgggaggtggcgtcctctctcgaccttgcaagatacgacgggatcgtctgcgtcagcggcgatggcgtcctcgtggagcttgtgaatgggattctgcaaagatcagactgggaggaagcaataaagatgccaattggcatagttccagctggcacaggaaacggcatggccaaatcacttctccatgctgccagcgagacgtgctcagtttcagacgccgtatttgccattatcacaggtcacaagcaggccttggatgtctgcaccatagtgcaaggggaaaaaaccgttttcagcgtgctgtcaactacttggggtttggtggccgatgttgacatcgagtctgagaaatacaggtggatggggagcgcacggttcgacttttatgctctggttcgcataatgaacttgcgccgataccgcggaagcgtccactttgtgcctgccccgggctacgaggcatacggagatcctgtcaagcaagccgagactcccatcgtggagcgaaacggggaatctcaggtgtgctcttatcaaggccctacggccgagtttcaatgttcagactggagatccatcgatggcccatttgtgggtgtgtgcgtctacaacgtgccatgggctgctgaaaacgccatggcagctcctgaagccaagttctcagatggctacatggacgcggtcatactgaaagactgtccgaaggccgatcttttggctctgctgctgaagatgagcgatgggagctacgtgaaatcgccacatgttacatatttcaaggtgaaatccttccggttatcgccggggcagctcatggaggatcccaaaaggggcggcatcgtagacgtggacggcgaggtggttgccagaggagaaggaacgtacggcatgaaccaggatcaagatttgatggcctatggcccttctgttcagctgaccgtgcaccagggcttggccactgtatactgtcccaaatgatcctaccttgccttctcctctcaccagagattgtccctttgtgtcaattgctttattcttgttcatatttaaaaaagtactctattgtattcaaaacaagattctttcaagaaaaggtcacacgtctctgagcaaaaaaaaaaaaaaaaaaaaaaaaaaaaaaat

SEQ ID NO: 66884 - protein, 492 aa, Triticum aestivum
  peptide (1)..(492): Ceres Seq. ID no. 14303198
MEDRQATGGAGAATKVRVNGTTAEATLSTTGGCPELRWRCARATAERSLSLEADVLGAEASGKEVVVRAFVAEDAARPPSRAKARGKRRRREYVFEMADGEGAAAAWGETLRGCLDSIGRPKRLFVLINPYGGKRRASKIYEAEIKPLFEAAGVEVTMQETRYRGHAREVASSLDLARYDGIVCVSGDGVLVELVNGILQRSDWEEAIKMPIGIVPAGTGNGMAKSLLHAASETCSVSDAVFAIITGHKQALDVCTIVQGEKTVFSVLSTTWGLVADVDIESEKYRWMGSARFDFYALVRIMNLRRYRGSVHFVPAPGYEAYGDPVKQAETPIVERNGESQVCSYQGPTAEFQCSDWRSIDGPFVGVCVYNVPWAAENAMAAPEAKFSDGYMDAVILKDCPKADLLALLLKMSDGSYVKSPHVTYFKVKSFRLSPGQLMEDPKRGGIVDVDGEVVARGEGTYGMNQDQDLMAYGPSVQLTVHQGLATVYCPK

SEQ ID NO: 66885 - protein, 396 aa, Triticum aestivum
  peptide (1)..(396): Ceres Seq. ID no. 14303199
MADGEGAAAAWGETLRGCLDSIGRPKRLFVLINPYGGKRRASKIYEAEIKPLFEAAGVEVTMQETRYRGHAREVASSLDLARYDGIVCVSGDGVLVELVNGILQRSDWEEAIKMPIGIVPAGTGNGMAKSLLHAASETCSVSDAVFAIITGHKQALDVCTIVQGEKTVFSVLSTTWGLVADVDIESEKYRWMGSARFDFYALVRIMNLRRYRGSVHFVPAPGYEAYGDPVKQAETPIVERNGESQVCSYQGPTAEFQCSDWRSIDGPFVGVCVYNVPWAAENAMAAPEAKFSDGYMDAVILKDCPKADLLALLLKMSDGSYVKSPHVTYFKVKSFRLSPGQLMEDPKRGGIVDVDGEVVARGEGTYGMNQDQDLMAYGPSVQLTVHQGLATVYCPK

SEQ ID NO: 66886 - protein, 335 aa, Triticum aestivum
  peptide (1)..(335): Ceres Seq. ID no. 14303200
MQETRYRGHAREVASSLDLARYDGIVCVSGDGVLVELVNGILQRSDWEEAIKMPIGIVPAGTGNGMAKSLLHAASETCSVSDAVFAIITGHKQALDVCTIVQGEKTVFSVLSTTWGLVADVDIESEKYRWMGSARFDFYALVRIMNLRRYRGSVHFVPAPGYEAYGDPVKQAETPIVERNGESQVCSYQGPTAEFQCSDWRSIDGPFVGVCVYNVPWAAENAMAAPEAKFSDGYMDAVILKDCPKADLLALLLKMSDGSYVKSPHVTYFKVKSFRLSPGQLMEDPKRGGIVDVDGEVVARGEGTYGMNQDQDLMAYGPSVQLTVHQGLATVYCPK

SEQ ID NO: 66887 - DNA, 1227 bp, Triticum aestivum
  misc_feature (1)..(1227): Ceres Seq. ID no. 13502809
cgaaaaaaaaaagaccgatcgtgaaccaccccgtgccctacaacctccgcccccgtccccgtccccgtccccgcgtgccttacacaactcctcctccgcctctgccgcgccgcgcgtcgcctccgtcgccgtccctggggttcgaggatgcaacagcctacaggcgagatggagatgaagaaggcgcctctgccagcgcctgctttccacaaagagtacactcttcctagagcacgacactaccttgatcaacactattcactccgccctcctctctccaaggatgattactccaaaaaggatcctacaagcgagatggagaagaagaagaaggcgccgctgccaacacctcatttccacaaagagcggcctcttcctagagcagagcggtcccccgatcgacgctactcgccttaccctcctccgtccatggatggttgctctggaaagaatgctggatcttggcctcttcccccgatttactatgggcctccatctgaagcctttcatgtcgactggcgcaataaagacggggttgtggacatggagcattacagcacagagctgtttgcagcgatggacaaacatagtattttgtcggtgcaccgttgtacacgcccacagtttggaccaaacgtcagcgctgagtatgtgcttgatcctatatttgaggatacgttccttgccaatccccgttttagctacctgcttcccttgatcggccacaaagtatcttctgcagctgaggctcccaattcaaccacgcaggttggcacaactactggatactggcagtgtgatggttctatagaagtccctgtccgcgaagttgctgctttgaagatttctgacaactagccacctatgtgcccaaccaagttgctcccagaagatgaaaatcaagattttcatggagggccctgagtttcatattgagattacgaacccgttagcagtaactatgtattagctacatctaccctatgtgtgggccgcatcttcaagatcaatgcgtgcaggatatattaattttaacttggtgtctgcgctgcgccgcatctatctatctatctatctatctatatagtgcaagatatttataagcttggttcaggttgtgtctgagaaagagtggcaatctgtcacagatgatgccattcgtcttatatatgcatatgaactggaaaagtttatctgcggtggtgactatttcmcaatatgcttytc

SEQ ID NO: 66888 - protein, 236 aa, Triticum aestivum
  peptide (1)..(236): Ceres Seq. ID no. 15223197
MQQPTGEMEMKKAPLPAPAFHKEYTLPRARHYLDQHYSLRPPLSKDDYSKKDPTSEMEKKKKAPLPTPHFHKERPLPRAERSPDRRYSPYPPPSMDGCSGKNAGSWPLPPIYYGPPSEAFHVDWRNKDGVVDMEHYSTELFAAMDKHSILSVHRCTRPQFGPNVSAEYVLDPIFEDTFLANPRFSYLLPLIGHKVSSAAEAPNSTTQVGTTTGYWQCDGSIEVPVREVAALKISDN

SEQ ID NO: 66889 - protein, 229 aa, Triticum aestivum
  peptide (1)..(229): Ceres Seq. ID no. 15223198
MEMKKAPLPAPAFHKEYTLPRARHYLDQHYSLRPPLSKDDYSKKDPTSEMEKKKKAPLPTPHFHKERPLPRAERSPDRRYSPYPPPSMDGCSGKNAGSWPLPPIYYGPPSEAFHVDWRNKDGVVDMEHYSTELFAAMDKHSILSVHRCTRPQFGPNVSAEYVLDPIFEDTFLANPRFSYLLPLIGHKVSSAAEAPNSTTQVGTTTGYWQCDGSIEVPVREVAALKISDN

SEQ ID NO: 66890 - protein, 227 aa, Triticum aestivum
  peptide (1)..(227): Ceres Seq. ID no. 15223199
MKKAPLPAPAFHKEYTLPRARHYLDQHYSLRPPLSKDDYSKKDPTSEMEKKKKAPLPTPHFHKERPLPRAERSPDRRYSPYPPPSMDGCSGKNAGSWPLPPIYYGPPSEAFHVDWRNKDGVVDMEHYSTELFAAMDKHSILSVHRCTRPQFGPNVSAEYVLDPIFEDTFLANPRFSYLLPLIGHKVSSAAEAPNSTTQVGTTTGYWQCDGSIEVPVREVAALKISDN

SEQ ID NO: 66891 - DNA, 1157 bp, Triticum aestivum
  misc_feature (1)..(1157): Ceres Seq. ID no. 14302407
gaataacccgcacctatccacgacaccgagggagaggagcaactgatccccgacgccccaaatggcgcctcccctcctcctcctcctcctcgtccctctcgtcgccgccaccgcaccgtgcgcccacccggcccacccgagccagccggcgtcgtgcgccgcggagcccgtgctggcgccggagcgccgggaggcgcacggcgggggccgcatcctggacatcacccactactaccgggaggacatgccctcgtgggagtccggcgccggggtgggccagttcctctggctgcccgcctccatgcgcaacggctccctcgccaacaactccgagatgcggatgcccacccacaccggcacccacatcgacgcctccggccacgtcttccagcactacttcgacgctggcttcgacgtcgacaccctcgacctcgacgtcctcaacggtcctgcactgctggttgatgttccaagggatgaaaatattactgctaaaacgatggaatctttgcatattcctaaaggagttcaacgggtactttttagaacattaaacactgacaggaacctaatgtggaagaaagagtttgacacaagctatgtgggttttatgaaagatggtgcccaatggttggtagacaacacggatattaagcttgtcggaatagactatttgtccgttgcagctttcgatgacttgatcccttcacatttagttttacttgaaaaccgggatatcattcttgtggagggcctcaaactggagaatgtcatacctgggatatactcgttgcattgcctgccacttcggttgcgtggagctgaaggttcgccgatcagatgcatccttataaagtgaaagacatttgcatcccgctgcggcggtttagtttgataccgcaagcacttatatataaaaatagaatgtgtatagcagcaaaactcgtgtctttgataccagaggagtactgtcatgtgtccagaaacatggtggcacttcgatgcttagtaaggagcgacaaacggctagggatgcaaatgtgtagcctctagggtaccctccgaacctttagttgggctatagaagggatggattacaatacaaaccgcaatgttcggtggtaccaaaatcccaaaaaaaaaaaaaaaaaaaaaag

SEQ ID NO: 66892 - protein, 265 aa, Triticum aestivum
  peptide (1)..(265): Ceres Seq. ID no. 14302408
MAPPLLLLLLVPLVAATAPCAHPAHPSQPASCAAEPVLAPERREAHGGGRILDITHYYREDMPSWESGAGVGQFLWLPASMRNGSLANNSEMRMPTHTGTHIDASGHVFQHYFDAGFDVDTLDLDVLNGPALLVDVPRDENITAKTMESLHIPKGVQRVLFRTLNTDRNLMWKKEFDTSYVGFMKDGAQWLVDNTDIKLVGIDYLSVAAFDDLIPSHLVLLENRDIILVEGLKLENVIPGIYSLHCLPLRLRGAEGSPIRCILIK

SEQ ID NO: 66893 - protein, 204 aa, Triticum aestivum
  peptide (1)..(204): Ceres Seq. ID no. 14302409
MPSWESGAGVGQFLWLPASMRNGSLANNSEMRMPTHTGTHIDASGHVFQHYFDAGFDVDTLDLDVLNGPALLVDVPRDENITAKTMESLHIPKGVQRVLFRTLNTDRNLMWKKEFDTSYVGFMKDGAQWLVDNTDIKLVGIDYLSVAAFDDLIPSHLVLLENRDIILVEGLKLENVIPGIYSLHCLPLRLRGAEGSPIRCILIK

SEQ ID NO: 66894 - protein, 185 aa, Triticum aestivum
  peptide (1)..(185): Ceres Seq. ID no. 14302410
MRNGSLANNSEMRMPTHTGTHIDASGHVFQHYFDAGFDVDTLDLDVLNGPALLVDVPRDENITAKTMESLHIPKGVQRVLFRTLNTDRNLMWKKEFDTSYVGFMKDGAQWLVDNTDIKLVGIDYLSVAAFDDLIPSHLVLLENRDIILVEGLKLENVIPGIYSLHCLPLRLRGAEGSPIRCILIK

SEQ ID NO: 66895 - DNA, 1104 bp, Triticum aestivum
  misc_feature (1)..(1104): Ceres Seq. ID no. 13660394
cattacctagaacatcctaatcgaaaaatgaatgaatgtcactgaggcataaaccccctgttcctcttgttcctccccttcggcctccggcgcagttggttgccacgacgaggggcggacccacccatcggacgaggtccgtcgccggacattccagccggtggtgagcggagggcggcaaggcgtgggagctcgcggcgacgtacaaggctgggtgagagtggcgcttgaggcggacggccaactccgacagcggacccctcagccgacgacgccaccgaagttggtcagcattagctccttcaggcttctggccggtgtgaaaagttgctaggtcaccatggatgtcgatcgacaagaaacgatggaagagaccattctcgtcggtgatgatcttatgcgtgggccaccttcccctgtcgtaccgaaagagattgcatcccatgtccttgaaggtgttgagctttgtgatggtatcctgaagaatcttttcctatgcttgcaaatcaatgatattgagccattttgtcaagacgaaattgtgctatacaaacaatgtgctgagaaaagggataaggaaataagggaacgacttcaggatagtgagtataaattaggtttctcgatgcccctcgaagatgcaaaggaaagagtcactcaactccaatcagaactcacactgctcgaaaggcgcatgattcttgctagtggtcttccgggtatggaaggatttcgccaacgatggagcttgcatggacagcttggcgatacaaggaaaaggttggaggcgctgaacagtgggatggcaaaaagagagagcccaagtcctccaggcgaaggcacaacacctgcagttaagaagaggtggttcttttagtacgttagcgcatatttttccgacttgcaaaacgttgtaactaatgctgtgttagtggcaatgtcatccactctttcttggtttggggttctacctccaaagtaactactactgtgtttgctaacagtggtttcgccacagctgcacttttgattaaaaatatggaaatacttggcctgtaaaccttgaacataccatttgaattacccacgaaaatggtgatatgc

SEQ ID NO: 66896 - protein, 178 aa, Triticum aestivum
  peptide (1)..(178): Ceres Seq. ID no. 15219233
MDVDRQETMEETILVGDDLMRGPPSPVVPKEIASHVLEGVELCDGILKNLFLCLQINDIEPFCQDEIVLYKQCAEKRDKEIRERLQDSEYKLGFSMPLEDAKERVTQLQSELTLLERRMILASGLPGMEGFRQRWSLHGQLGDTRKRLEALNSGMAKRESPSPPGEGTTPAVKKRWFF

SEQ ID NO: 66897 - protein, 170 aa, Triticum aestivum
  peptide (1)..(170): Ceres Seq. ID no. 15219234
MEETILVGDDLMRGPPSPVVPKEIASHVLEGVELCDGILKNLFLCLQINDIEPFCQDEIVLYKQCAEKRDKEIRERLQDSEYKLGFSMPLEDAKERVTQLQSELTLLERRMILASGLPGMEGFRQRWSLHGQLGDTRKRLEALNSGMAKRESPSPPGEGTTPAVKKRWFF

SEQ ID NO: 66898 - protein, 159 aa, Triticum aestivum
  peptide (1)..(159): Ceres Seq. ID no. 15219235
MRGPPSPVVPKEIASHVLEGVELCDGILKNLFLCLQINDIEPFCQDEIVLYKQCAEKRDKEIRERLQDSEYKLGFSMPLEDAKERVTQLQSELTLLERRMILASGLPGMEGFRQRWSLHGQLGDTRKRLEALNSGMAKRESPSPPGEGTTPAVKKRWFF

SEQ ID NO: 66899 - DNA, 1699 bp, Triticum aestivum
  misc_feature (1)..(1699): Ceres Seq. ID no. 14302742
actgctcctccctcctccctcctcctccacctcttccctcccctgacccctcgcctccaaattactatctccgtcggacgcacgcacgcgcgcggaaaggtttggttttgcggtgaccatgcaggcagcgacggtggcagcggcggcgaacggcgggggcgacgtgcagaagcagcagcaggtgggggcggcgccgctcccggcggtggcggcgctggcgccgccgccccattgggtggccatgccgttcgcgccgccgggcgccgcggccatggtggtgccgcaccagatggcgccggcgccgccccaccagttcgcgccgcacttcgtgccgttccacgccgtcgcaccgccgcccccgccgctgcagccgcgcccggcgcacgtcgccatgggctcgcccgcccccgccgcgcagcccggccaggaggagaacaagaccatctgggtcggcgacctccattactggatggacgagaactacctccacacctgcttcggctacaccggcgaggttgtcgcaatcaaggttattcgtaataagcaaaccggacaatcagaaggatatggatttgtagagttctacagtcatgctgcagctgaaaaagtacttgatggttttgctgggcatataatgccaaatactgaccaaccttttaggataaactgggcatcatttagcatgggggataggcgctcggacattgcttcagatcattccatatttgtaggcgatcttgcctctgatgtcaatgatactgcattgctagagactttctccagcaggtactcctctgtcaaaggtgcaaaagttgttattgatgctaacactggtagatccaagggctatggctttgtgcggtttggagatgatagtgagaagacaaacgccatgactgagatgaatggagtgtattgctcaactaggcccatgaggattggccctgcaactcccagaaaatcttcaggtacttctggatctactgtttcatctgctcgatcagacggagatttgacaaacacaactgtatttgtcggtgggcttgacccaaatgttagtgaagatgatcttaagcaaaccttctcccagtatggcgagatttcctctgtgaagattccagttgggaaacagtgcgggtttgtgcagtttcttcagagaaagaatgcagaagatgcattgcaagggctgaacgggagcaccattgggaaacagaccgtgcgcctttcatggggtcgcaatccagcaaacaagcagttgaggagtgacaacggcaaccagtggaacaacgggatgtactacgcgccctcgcccttctacaacgggtacggctaccccgcggcaccgttccctgacccgggcatgtacgccgctgcctatggcgcataccccgtctacgggaaccagcaacaggtcagctgaagatcggaggatcacacgcccatcgatccctcgacaacaacccgaggcgcgcacgcagtagctgtagctcttgctagagaaagaaggtagacgatgacggcttcttaggtgagctagatgtagtgactggtcatgtaaagtacattactattacgaagaactagcaccactaaggcacctaaaatgactcgaccgccatggccgtctagctggattgttctagggaaaaaaaaagttttggcatagagctgcaatataaggtagaacaataatctattc

SEQ ID NO: 66900 - protein, 433 aa, Triticum aestivum
  peptide (1)..(433): Ceres Seq. ID no. 14302743
MQAATVAAAANGGGDVQKQQQVGAAPLPAVAALAPPPHWVAMPFAPPGAAAMVVPHQMAPAPPHQFAPHFVPFHAVAPPPPPLQPRPAHVAMGSPAPAAQPGQEENKTIWVGDLHYWMDENYLHTCFGYTGEVVAIKVIRNKQTGQSEGYGFVEFYSHAAAEKVLDGFAGHIMPNTDQPFRINWASFSMGDRRSDIASDHSIFVGDLASDVNDTALLETFSSRYSSVKGAKVVIDANTGRSKGYGFVRFGDDSEKTNAMTEMNGVYCSTRPMRIGPATPRKSSGTSGSTVSSARSDGDLTNTTVFVGGLDPNVSEDDLKQTFSQYGEISSVKIPVGKQCGFVQFLQRKNAEDALQGLNGSTIGKQTVRLSWGRNPANKQLRSDNGNQWNNGMYYAPSPFYNGYGYPAAPFPDPGMYAAAYGAYPVYGNQQQVS

SEQ ID NO: 66901 - protein, 392 aa, Triticum aestivum
  peptide (1)..(392): Ceres Seq. ID no. 14302744
MPFAPPGAAAMVVPHQMAPAPPHQFAPHFVPFHAVAPPPPPLQPRPAHVAMGSPAPAAQPGQEENKTIWVGDLHYWMDENYLHTCFGYTGEVVAIKVIRNKQTGQSEGYGFVEFYSHAAAEKVLDGFAGHIMPNTDQPFRINWASFSMGDRRSDIASDHSIFVGDLASDVNDTALLETFSSRYSSVKGAKVVIDANTGRSKGYGFVRFGDDSEKTNAMTEMNGVYCSTRPMRIGPATPRKSSGTSGSTVSSARSDGDLTNTTVFVGGLDPNVSEDDLKQTFSQYGEISSVKIPVGKQCGFVQFLQRKNAEDALQGLNGSTIGKQTVRLSWGRNPANKQLRSDNGNQWNNGMYYAPSPFYNGYGYPAAPFPDPGMYAAAYGAYPVYGNQQQVS

SEQ ID NO: 66902 - protein, 382 aa, Triticum aestivum
  peptide (1)..(382): Ceres Seq. ID no. 14302745
MVVPHQMAPAPPHQFAPHFVPFHAVAPPPPPLQPRPAHVAMGSPAPAAQPGQEENKTIWVGDLHYWMDENYLHTCFGYTGEVVAIKVIRNKQTGQSEGYGFVEFYSHAAAEKVLDGFAGHIMPNTDQPFRINWASFSMGDRRSDIASDHSIFVGDLASDVNDTALLETFSSRYSSVKGAKVVIDANTGRSKGYGFVRFGDDSEKTNAMTEMNGVYCSTRPMRIGPATPRKSSGTSGSTVSSARSDGDLTNTTVFVGGLDPNVSEDDLKQTFSQYGEISSVKIPVGKQCGFVQFLQRKNAEDALQGLNGSTIGKQTVRLSWGRNPANKQLRSDNGNQWNNGMYYAPSPFYNGYGYPAAPFPDPGMYAAAYGAYPVYGNQQQVS

SEQ ID NO: 66903 - DNA, 841 bp, Triticum aestivum
  misc_feature (1)..(841): Ceres Seq. ID no. 13663564
acaagaggacagggaagaatcttgttcgcgttgagccgccgcagaccttccctttccccacgcccaggcgatcccctcaaatcccccgcaccatccccctctccttcgatcggatccgcccgcccgcccgcctgccgcaccggtcgatcgacgatgacgctgggcagctccggcgccggatcgagcgtcgtcgttcctcggaacttcaggctgctagaagagcttgagcgcggggagaagggcattggagatggaacggtcagctatggaatggatgatgctgatgacatatacatgcggtcatggactggcaccattattggtcctcacaatactgtccatgagggtcgcatctaccagctgaagctgttctgtgacaaggactaccccgagaaggcaccatctgttagatttcattcaagaatcaacatggcttgtgttaatcacgagaccggggcggttgacccgaagaagttcagtgtgctggcgaactggcagcgagagtacactatggaacatgtcttgacccagctgaagaaagatatggcggcgacgcagaaccgcaagctagtgcagcctccagaagggacattcttctagcggggtgttttcctgcccatctccagttccaacagcagcgatctatgtcactcccatgggatttgaaatgtagattcagcgtctgctgcctgcagatcttttcccagttttatgtgaaaccgtgttcctcgcgatctgcccgattgccgttaaggagatggaatgaaacatgtaccggtttgccgttaaggagtactaattaaggtctgtaattgaagaaacaacccgtgtcaaggaaata

SEQ ID NO: 66904 - protein, 199 aa, Triticum aestivum
  peptide (1)..(199): Ceres Seq. ID no. 13663565
TRGQGRILFALSRRRPSLSPRPGDPLKSPAPSPSPSIGSARPPACRTGRSTMTLGSSGAGSSVVVPRNFRLLEELERGEKGIGDGTVSYGMDDADDIYMRSWTGTIIGPHNTVHEGRIYQLKLFCDKDYPEKAPSVRFHSRINMACVNHETGAVDPKKFSVLANWQREYTMEHVLTQLKKDMAATQNRKLVQPPEGTFF

SEQ ID NO: 66905 - protein, 148 aa, Triticum aestivum
  peptide (1)..(148): Ceres Seq. ID no. 13663566
MTLGSSGAGSSVVVPRNFRLLEELERGEKGIGDGTVSYGMDDADDIYMRSWTGTIIGPHNTVHEGRIYQLKLFCDKDYPEKAPSVRFHSRINMACVNHETGAVDPKKFSVLANWQREYTMEHVLTQLKKDMAATQNRKLVQPPEGTFF

SEQ ID NO: 66906 - protein, 109 aa, Triticum aestivum
  peptide (1)..(109): Ceres Seq. ID no. 13663567
MDDADDIYMRSWTGTIIGPHNTVHEGRIYQLKLFCDKDYPEKAPSVRFHSRINMACVNHETGAVDPKKFSVLANWQREYTMEHVLTQLKKDMAATQNRKLVQPPEGTFF

SEQ ID NO: 66907 - DNA, 981 bp, Triticum aestivum
  misc_feature (1)..(981): Ceres Seq. ID no. 14302396
agtagacaacagaaaatttccccattcttctccgaaccctagctccccgcttcccgctcctcacgcctctcgccgtcgccgtcccgccgagcccatggctaagacgcgtccgcccaagaagatcctcgagtcctacaccatcaaggggtccgacaaagtcatcaagcctggggactgtgtgctaatgagatcagctgatacatcaaagccaccatatgtggcaaaagttgagtccattgaggcagcagggtctcgaggcacaaatgtgagagtacgggttcgatggtactatcgtccagaagaattcattggtgggaggcgaccatttcatggttccaaagaggtattcctctctgaccactatgatgtacagagtgctgacacaatagagggaaaatgcaatgtccacagcttccgtagctacacaaagcttgattctgtgaatgccgaggacttcttctgtcgctttgactacaaatcagcatctggcagtttcgtgcccgaccgtatagctgtgttttgcaagtgtgagatgccgtacaatcctgatgaccttatgatccaatgtgaggaatgctctgactggtttcacccttcttgtattggaatgaccattaaagaagcaaagaaacgagaacactttttctgccagagctgtactgctgaaaatgggaagacaactgagaattttcatgaagccacggcagagtcagaagaaaagctggtggagtcgaaaaggcggagaaggtgatgggctggattaatttgatggaattcccacacggatatacaaactacatagccttctagtatgaggtctgtggtgatgtttgtggcagtctgtgaccccttctaatgtcaggcatgcagtgtacataacgtgcaacctgagattgttgtattaggagaaaatagaatttggacgctagtgtcagagtttgagcagtatggcaccatcaagatcccttgtgatcttccctc

SEQ ID NO: 66908 - protein, 249 aa, Triticum aestivum
  peptide (1)..(249): Ceres Seq. ID no. 14302397
VDNRKFPHSSPNPSSPLPAPHASRRRRPAEPMAKTRPPKKILESYTIKGSDKVIKPGDCVLMRSADTSKPPYVAKVESIEAAGSRGTNVRVRVRWYYRPEEFIGGRRPFHGSKEVFLSDHYDVQSADTIEGKCNVHSFRSYTKLDSVNAEDFFCRFDYKSASGSFVPDRIAVFCKCEMPYNPDDLMIQCEECSDWFHPSCIGMTIKEAKKREHFFCQSCTAENGKTTENFHEATAESEEKLVESKRRRR

SEQ ID NO: 66909 - protein, 218 aa, Triticum aestivum
  peptide (1)..(218): Ceres Seq. ID no. 14302398
MAKTRPPKKILESYTIKGSDKVIKPGDCVLMRSADTSKPPYVAKVESIEAAGSRGTNVRVRVRWYYRPEEFIGGRRPFHGSKEVFLSDHYDVQSADTIEGKCNVHSFRSYTKLDSVNAEDFFCRFDYKSASGSFVPDRIAVFCKCEMPYNPDDLMIQCEECSDWFHPSCIGMTIKEAKKREHFFCQSCTAENGKTTENFHEATAESEEKLVESKRRRR

SEQ ID NO: 66910 - protein, 188 aa, Triticum aestivum
  peptide (1)..(188): Ceres Seq. ID no. 14302399
MRSADTSKPPYVAKVESIEAAGSRGTNVRVRVRWYYRPEEFIGGRRPFHGSKEVFLSDHYDVQSADTIEGKCNVHSFRSYTKLDSVNAEDFFCRFDYKSASGSFVPDRIAVFCKCEMPYNPDDLMIQCEECSDWFHPSCIGMTIKEAKKREHFFCQSCTAENGKTTENFHEATAESEEKLVESKRRRR

SEQ ID NO: 66911 - DNA, 849 bp, Triticum aestivum
  misc_feature (1)..(849): Ceres Seq. ID no. 12626698
aaaaaaaagaaagaatgccctattattttcatccccttcacaatttccctcacaccctcaccccgcagcccatttgccccctgaccaagccgccgccgccgccatctccggccaccccgcctctcccccctctccctccccggcctcnccgccgccgacccataccggaacaggaggaccgccaccgcngtaaagcctccgtgccagctgcctccccgtcggccacgctgcaaccagagcaagatcccgcccctggtcgcatctcagaatggcgaccctgaggaacctgaagatcaagacgtcgacgtgcaagaggatcgtcaaagagctgcgctcgtacgagaaggaggtggagaaggaggccgccaagaccgccgacatgaaggagaagggcgccgacccctatgatctcaagcagcaggaaaatgttttagctgagtcgaggatgatggtcccagactgccataagcggcttgaagctgcactgacagacttgaaagcaactctggccgagttgaaggagtcaaatgaacaaggcactgagatcggtgaggctgaggctacaatcactgaagttgaagctgtctacacgccaacagaagctgaagattaagctcgcaacttccttttcgctgaaatgtcagtatgcatcaccagacttgctcttgtcgacaagttagtcccattcatatgatgttgacgcgaaagcttgtatgtatcacgactcatgatctgtctcgagatgtgcaactggtaatatcactgtactggaatatggttaggcgtttatgatgtgctggaaatgctgcatgttgttggcattgttccatttgagtctcggatgcatat

SEQ ID NO: 66912 - protein, 114 aa, Triticum aestivum
  peptide (1)..(114): Ceres Seq. ID no. 12626699
MATLRNLKIKTSTCKRIVKELRSYEKEVEKEAAKTADMKEKGADPYDLKQQENVLAESRMMVPDCHKRLEAALTDLKATLAELKESNEQGTEIGEAEATITEVEAVYTPTEAED

SEQ ID NO: 66913 - protein, 92 aa, Triticum aestivum
  peptide (1)..(92): Ceres Seq. ID no. 12626700
  misc_feature (49)..(49): Xaa is any aa, unknown or other
  misc_feature (63)..(63): Xaa is any aa, unknown or other
KKERMPYYFHPLHNFPHTLTPQPICPLTKPPPPPSPATPPLPPLPPRPXRRRPIPEQEDRHRXKASVPAASPSATLQPEQDPAPGRISEWRP

SEQ ID NO: 66914 - protein, 88 aa, Triticum aestivum
  peptide (1)..(88): Ceres Seq. ID no. 12626701
  misc_feature (45)..(45): Xaa is any aa, unknown or other
  misc_feature (59)..(59): Xaa is any aa, unknown or other
MPYYFHPLHNFPHTLTPQPICPLTKPPPPPSPATPPLPPLPPRPXRRRPIPEQEDRHRXKASVPAASPSATLQPEQDPAPGRISEWRP

SEQ ID NO: 66915 - DNA, 2132 bp, Triticum aestivum
  misc_feature (1)..(2132): Ceres Seq. ID no. 14307896
caccgcatcgcacgaaaaacaccgaccttttttccagccgagacacgatgatccaccgccattagcagcggcggggaagcggcgatcgatcttccgtggccccgcgctcgcgtgctcgctctcgccggatcgggcctggcaaatggcgcgcgcggcctccctggcggcgctctgcctcctcctcctcgccgccgccgccgccgccggagctcgaatggacccgatttattctggccaactggtgccggactggagcagggaacccaagattaaaccgcagaatttctccctgaatcgagaggataatcttcagctcctaagcaggtcacgagatgtgactcgcaggaaattgggggagaggaccggtgtaataaagatggaaacagtacagcaggatgatgaagccctggttaaacttgagaatgcaggttttgagcgttcaaaagcagttgattctgctgtgctgggaaaatatagtctatggagacgcgaaaatgaaaacgagaaggcggatgcaaatgtccgtctgatgcgggaccaaatgatcatggctagaatatattccgtgcttgccaaatccagggacaagctcgatctttatcgggagctactcgccaggatcaaggaaagccagcgctcccttggggaagctactgctgattctgatctccctaagagtgcttctgagagagcaaaagcgatgggtctagttttatcaaaagcaagggatcaattgtacaattgcaaggaaattacccatcgtttaagatcaatgcttcagtcagctgatgagcaggtccggagcttaaagaagcagagcaccttcctcagtcagttggcagctaagacaataccgaatggcatacattgcttgtccatgcgcttaacaatagactattaccttctctctccagagaaaagaaagttccctaatagtgagaatttggaagatcctgatctttatcactatgctcttttttcggacaatgttctggcagcatcagttgtggttaactcaaccatcgtgaacgcaaaggagcctgagaagcatgtctttcatcttgttactgacaaactgaactttggggcaatgaacatgtggttcttgttgaatccacctggggatgccacaatccatgttgaaaatgtggatgacttcaaatggttgaactcttcgtactgccctgttttgaagcagctcgagtctgcagccatgaaagagtactactttaaggcagatcgtcaaaaaactctctctgctgggtcctctaatctgaagtaccgaaacccaaaatatctgtccatgctcaaccatctaagattttacctgccacaagtctatcctaagttgaataaaatccttttcctcgatgacgacattgtggtccagaaggacttgaccggactgtgggatgttgatcttaatgggaatgtaaatggtgctgtggaaacgtgcggggagagcttccaccgatttgacaagtacctcaatttctcgaacccaaatatttcgcagaattttgatcctaacgcatgtggttgggcttatggaatgaatatatttgatctggaggagtggaagaagaaggacattactggaatttaccataagtggcagaacatgaatgaaaacaggctgctgtggaaactggggacgcttccgccaggcctgatgactttctacaagctgacgcaccccctggacaaatcatggcatgtgcttgggttagggtacaacccgacggtcgagcacgcggagatcgacaccgccgccgtcatccactacaacgggaacatgaagccgtggctggagattgcgatgaccaagtaccggccttactggacgcagtacatcaactacgagcactcctatgtccggggctgcaagatcagtcaataggcagtagctagaagaggagcattcgcttcgacaggactactaaagaaagaaagtgtttccctgttggtagtgcagttatagcgcatgttcttcgttcgtgttattagatttgttttggttggtatcttttctgctgtatgtagcttcctcgcccgattcgttgtgctgcctcgactagtctgctgcggcacgtgttacatgttattctcttgaaaagaatggtgaacttggc

SEQ ID NO: 66916 - protein, 632 aa, Triticum aestivum
  peptide (1)..(632): Ceres Seq. ID no. 14307897
TASHEKHRPFFQPRHDDPPPLAAAGKRRSIFRGPALACSLSPDRAWQMARAASLAALCLLLLAAAAAAGARMDPIYSGQLVPDWSREPKIKPQNFSLNREDNLQLLSRSRDVTRRKLGERTGVIKMETVQQDDEALVKLENAGFERSKAVDSAVLGKYSLWRRENENEKADANVRLMRDQMIMARIYSVLAKSRDKLDLYRELLARIKESQRSLGEATADSDLPKSASERAKAMGLVLSKARDQLYNCKEITHRLRSMLQSADEQVRSLKKQSTFLSQLAAKTIPNGIHCLSMRLTIDYYLLSPEKRKFPNSENLEDPDLYHYALFSDNVLAASVVVNSTIVNAKEPEKHVFHLVTDKLNFGAMNMWFLLNPPGDATIHVENVDDFKWLNSSYCPVLKQLESAAMKEYYFKADRQKTLSAGSSNLKYRNPKYLSMLNHLRFYLPQVYPKLNKILFLDDDIVVQKDLTGLWDVDLNGNVNGAVETCGESFHRFDKYLNFSNPNISQNFDPNACGWAYGMNIFDLEEWKKKDITGIYHKWQNMNENRLLWKLGTLPPGLMTFYKLTHPLDKSWHVLGLGYNPTVEHAEIDTAAVIHYNGNMKPWLEIAMTKYRPYWTQYINYEHSYVRGCKISQ

SEQ ID NO: 66917 - protein, 585 aa, Triticum aestivum
  peptide (1)..(585): Ceres Seq. ID no. 14307898
MARAASLAALCLLLLAAAAAAGARMDPIYSGQLVPDWSREPKIKPQNFSLNREDNLQLLSRSRDVTRRKLGERTGVIKMETVQQDDEALVKLENAGFERSKAVDSAVLGKYSLWRRENENEKADANVRLMRDQMIMARIYSVLAKSRDKLDLYRELLARIKESQRSLGEATADSDLPKSASERAKAMGLVLSKARDQLYNCKEITHRLRSMLQSADEQVRSLKKQSTFLSQLAAKTIPNGIHCLSMRLTIDYYLLSPEKRKFPNSENLEDPDLYHYALFSDNVLAASVVVNSTIVNAKEPEKHVFHLVTDKLNFGAMNMWFLLNPPGDATIHVENVDDFKWLNSSYCPVLKQLESAAMKEYYFKADRQKTLSAGSSNLKYRNPKYLSMLNHLRFYLPQVYPKLNKILFLDDDIVVQKDLTGLWDVDLNGNVNGAVETCGESFHRFDKYLNFSNPNISQNFDPNACGWAYGMNIFDLEEWKKKDITGIYHKWQNMNENRLLWKLGTLPPGLMTFYKLTHPLDKSWHVLGLGYNPTVEHAEIDTAAVIHYNGNMKPWLEIAMTKYRPYWTQYINYEHSYVRGCKISQ

SEQ ID NO: 66918 - protein, 561 aa, Triticum aestivum
  peptide (1)..(561): Ceres Seq. ID no. 14307899
MDPIYSGQLVPDWSREPKIKPQNFSLNREDNLQLLSRSRDVTRRKLGERTGVIKMETVQQDDEALVKLENAGFERSKAVDSAVLGKYSLWRRENENEKADANVRLMRDQMIMARIYSVLAKSRDKLDLYRELLARIKESQRSLGEATADSDLPKSASERAKAMGLVLSKARDQLYNCKEITHRLRSMLQSADEQVRSLKKQSTFLSQLAAKTIPNGIHCLSMRLTIDYYLLSPEKRKFPNSENLEDPDLYHYALFSDNVLAASVVVNSTIVNAKEPEKHVFHLVTDKLNFGAMNMWFLLNPPGDATIHVENVDDFKWLNSSYCPVLKQLESAAMKEYYFKADRQKTLSAGSSNLKYRNPKYLSMLNHLRFYLPQVYPKLNKILFLDDDIVVQKDLTGLWDVDLNGNVNGAVETCGESFHRFDKYLNFSNPNISQNFDPNACGWAYGMNIFDLEEWKKKDITGIYHKWQNMNENRLLWKLGTLPPGLMTFYKLTHPLDKSWHVLGLGYNPTVEHAEIDTAAVIHYNGNMKPWLEIAMTKYRPYWTQYINYEHSYVRGCKISQ

SEQ ID NO: 66919 - DNA, 1422 bp, Triticum aestivum
  misc_feature (1)..(1422): Ceres Seq. ID no. 14302776
atcccgcacccaccattgagagaagcagcagcacgagcagcacatgtcacagagggccagcgtcccacactcctcctgcatagccttcgccctccattcccacctcctcgtgtcctctgagatgtgccccagctcctactgggaatagaatagccacccccgcccaaatcccacacctttttcgtttttgatttcctctcttctttagattttttttctagatctttgggggcctccaattcgtccgtccgcgagggggaagcgaggggaagatgggcgtcaaggggttcgtcgagggcggcatcgcctccatcgtcgccggctgctccacccaccctctcgacctcatcaaggtccggatgcagctgcagggggagtcctccgcggccgcggcccagcccgcgctccgcccggcgctcgccttccaggccggggcgcacaccgtgacgctcccgcacgcgcccacgccggtgcccaagcccggcccgattggcatctgcacgcagatcctgcgcgccgagggcgccgccgggctcttctccgggatctcggccaccatgctgcgccagacgctctactccaccacgcggatggggctctacgacatcctcaagaagcgctggacccaggagaacgccggcgtgctgccgctgcaccgcaagatcgccgccggcctcatcgccggcggcgtcggcgcggccgtcggcaacccggccgacctggccatggtgcggatgcaggccgacggccgcctcccgctggccgaccgcaggaactaccgcagcgtgggcgacgccatcgcccggatgacgcgcgacgagggcgtgcgcagcctctggcgcggctccgcgctcacggtcaaccgcgccatgattgtcaccgcgtcgcagctggccacctacgaccaggccaaggaggccatcctggcccgccgcggcccggccgccgacgggctgggcacgcacgtggccgccagcttcgccgcgggcatcgtggccgccgccgcgtccaaccccgtggacgtggtcaagaccagggtgatgaacatgaaggtggcgcccggcgcgccccctccgtacgccggggccctggactgcgcgctcaagacggtgcggtcggagggcgtgatggcgctctacaaggggttcatccccacggtgtcgcgccaggggcccttcaccgtggtgctcttcgtcaccctggagcaggtgcgcaaggtcttcaaggacgtcgagttctaatgcagtgcagaccaccgcacggcgcggcgccatggatccatgatgatgacgacaagaagctgcccattgatgccgctgctgctaagaataactagtagtaccgctggagggatttctccagttcctgcctctcattttattcggatgaatttgatcgattttgaatgaaattctcattttc

SEQ ID NO: 66920 - protein, 322 aa, Triticum aestivum
  peptide (1)..(322): Ceres Seq. ID no. 14302777
MGVKGFVEGGIASIVAGCSTHPLDLIKVRMQLQGESSAAAAQPALRPALAFQAGAHTVTLPHAPTPVPKPGPIGICTQILRAEGAAGLFSGISATMLRQTLYSTTRMGLYDILKKRWTQENAGVLPLHRKIAAGLIAGGVGAAVGNPADLAMVRMQADGRLPLADRRNYRSVGDAIARMTRDEGVRSLWRGSALTVNRAMIVTASQLATYDQAKEAILARRGPAADGLGTHVAASFAAGIVAAAASNPVDVVKTRVMNMKVAPGAPPPYAGALDCALKTVRSEGVMALYKGFIPTVSRQGPFTVVLFVTLEQVRKVFKDVEF

SEQ ID NO: 66921 - protein, 293 aa, Triticum aestivum
  peptide (1)..(293): Ceres Seq. ID no. 14302778
MQLQGESSAAAAQPALRPALAFQAGAHTVTLPHAPTPVPKPGPIGICTQILRAEGAAGLFSGISATMLRQTLYSTTRMGLYDILKKRWTQENAGVLPLHRKIAAGLIAGGVGAAVGNPADLAMVRMQADGRLPLADRRNYRSVGDAIARMTRDEGVRSLWRGSALTVNRAMIVTASQLATYDQAKEAILARRGPAADGLGTHVAASFAAGIVAAAASNPVDVVKTRVMNMKVAPGAPPPYAGALDCALKTVRSEGVMALYKGFIPTVSRQGPFTVVLFVTLEQVRKVFKDVEF

SEQ ID NO: 66922 - protein, 227 aa, Triticum aestivum
  peptide (1)..(227): Ceres Seq. ID no. 14302779
MLRQTLYSTTRMGLYDILKKRWTQENAGVLPLHRKIAAGLIAGGVGAAVGNPADLAMVRMQADGRLPLADRRNYRSVGDAIARMTRDEGVRSLWRGSALTVNRAMIVTASQLATYDQAKEAILARRGPAADGLGTHVAASFAAGIVAAAASNPVDVVKTRVMNMKVAPGAPPPYAGALDCALKTVRSEGVMALYKGFIPTVSRQGPFTVVLFVTLEQVRKVFKDVEF

SEQ ID NO: 66923 - DNA, 1283 bp, Triticum aestivum
  misc_feature (1)..(1283): Ceres Seq. ID no. 13663895
atagcaaaggactctatccttctccccttgcgcctccggtgttccaaattccaaattccaaaacccacccccgaggcgaggaaaagcaccgcaccctcctcgcgatacaaaaggcgcagagagaaagtgaggagcggcccccgtaccgcatcccaccaccccggcccgaacccctgcacgccgcaaccgcccgcccgcccgcctgcctgcccggccgcgatgatccagctcctcttcaccttgctgggcgcggaggcgggcgtggcggccgtcctgctcttcaagacgccgctgcggaagctggcgatgctcgcgctcgaccgcctcaagcgcggccgggcccccgtcatggtgcgcaccgtcgccgccaccgtcctcgtcgtcctcgcctccagcctccacagcatggccaagatccacggccacgccggcgccggcgagctcgacgcgcccggcgcgctcagccccaccgaccaggtcctcctcgcccgccacctcctcgaggcctccctcatgggatatattttattccttgctctcgtcattgaccggctacacagctacatcagagagatgcgagggctgaagaagaacctggaggctgtgtcgaagcagaacaagaccttagaagaagcaaaatctggaaggtccgacgagagcaagccacaccacaacgacattgcttcgctgaacgaggagatcaagaagctgaagcggcaactgaaagaaaaggcggaggaggccaaggatgcagaggccaaagcactagctgcccagacgcagtctgaaggtcttgcgcgcaaatatgaccgcctgctggaggacaacaagcatctccatgaccagctgcagtcaggagacatcccgctgtcgcgttcggatggcaagaagaatgcctaagttgtggttggtcctcatcaagctagtcggaaactcctgcaagcctgaagacagttgcgagatgaaaatgacgtcggttactgataatcagccatcggagtagtaccatctttacataaatgttctggtactgtgtaccagaacgcaaaaatatcactcaacctcttacagccaggttagccgagactatgcgaagatgctcgcctgtaaacatctgatggtgttcgactgaatgttcttagtctgatcaagtcgtagttagaacatgagaggtattcatatctcgacaaatctggctgctggttgtcttcgccatcgacttacttgtccaaacatagagaagccgtcattgaactctggttaccctttcataaatttcggct

SEQ ID NO: 66924 - protein, 299 aa, Triticum aestivum
  peptide (1)..(299): Ceres Seq. ID no. 15220263
IAKDSILLPLRLRCSKFQIPKPTPEARKSTAPSSRYKRRREKVRSGPRTASHHPGPNPCTPQPPARPPACPAAMIQLLFTLLGAEAGVAAVLLFKTPLRKLAMLALDRLKRGRAPVMVRTVAATVLVVLASSLHSMAKIHGHAGAGELDAPGALSPTDQVLLARHLLEASLMGYILFLALVIDRLHSYIREMRGLKKNLEAVSKQNKTLEEAKSGRSDESKPHHNDIASLNEEIKKLKRQLKEKAEEAKDAEAKALAAQTQSEGLARKYDRLLEDNKHLHDQLQSGDIPLSRSDGKKNA

SEQ ID NO: 66925 - protein, 226 aa, Triticum aestivum
  peptide (1)..(226): Ceres Seq. ID no. 15220264
MIQLLFTLLGAEAGVAAVLLFKTPLRKLAMLALDRLKRGRAPVMVRTVAATVLVVLASSLHSMAKIHGHAGAGELDAPGALSPTDQVLLARHLLEASLMGYILFLALVIDRLHSYIREMRGLKKNLEAVSKQNKTLEEAKSGRSDESKPHHNDIASLNEEIKKLKRQLKEKAEEAKDAEAKALAAQTQSEGLARKYDRLLEDNKHLHDQLQSGDIPLSRSDGKKNA

SEQ ID NO: 66926 - protein, 197 aa, Triticum aestivum
  peptide (1)..(197): Ceres Seq. ID no. 15220265
MLALDRLKRGRAPVMVRTVAATVLVVLASSLHSMAKIHGHAGAGELDAPGALSPTDQVLLARHLLEASLMGYILFLALVIDRLHSYIREMRGLKKNLEAVSKQNKTLEEAKSGRSDESKPHHNDIASLNEEIKKLKRQLKEKAEEAKDAEAKALAAQTQSEGLARKYDRLLEDNKHLHDQLQSGDIPLSRSDGKKNA

SEQ ID NO: 66927 - DNA, 578 bp, Triticum aestivum
  misc_feature (1)..(578): Ceres Seq. ID no. 12621638
attagacacacttaaaccctcctagctcactctcaccagcagtacctactagctagccggcagcaatggcgtccaggaccttctcggcggcgtgcctgctggcgctgctggtggccaacacgttcctcgccggcgatgcctgcggcagctgcaagcaccaaaccccgccgccggcctccccgtccccgcccccaccatcgccgtctacgacgccgtgcccacctccttcgtcaggcggtgggcgcgccggcgggggtgctgggcgggctggcgctggcggaagggccgagctacctggaggacaagatcgaggacgacgtggcggagaaggtggaggacgtcctggccggcggcggctacgacgacgacgactactagagaaaacgaaaacgatgggcacctcctgagagattgttgtacacgctggtgttgactagccagctatcttctgtacttttattatgaccggatttgttgaataaatacgggaaacaacttaacatcgagtgtagcagtacatccaatcgaaatgttttacgtggccttggccccaacaaattgttgaacacagcaacgtt

SEQ ID NO: 66928 - protein, 113 aa, Triticum aestivum
  peptide (1)..(113): Ceres Seq. ID no. 12621639
MASRTFSAACLLALLVANTFLAGDACGSCKHQTPPPASPSPPPPSPSTTPCPPPSSGGGRAGGGAGRAGAGGRAELPGGQDRGRRGGEGGGRPGRRRLRRRRLLEKTKTMGTS

SEQ ID NO: 66929 - protein, 80 aa, Triticum aestivum
  peptide (1)..(80): Ceres Seq. ID no. 12621640
MPAAAASTKPRRRPPRPRPHHRRLRRRAHLLRQAVGAPAGVLGGLALAEGPSYLEDKIEDDVAEKVEDVLAGGGYDDDDY

SEQ ID NO: 66930 - DNA, 1127 bp, Triticum aestivum
  misc_feature (1)..(1127): Ceres Seq. ID no. 15179896
caaaccacacatgacacgccatctcccacatctctctccacaaaagacaggcagcctgcagttgcacagcctttccctccctctctcgcgtatcatctccgtcgacctctctccacaaagctagctagctcttgagtcttgagttcgtgtgaatttgccaagcataaagcacgagctagctctaggctgtcttgctgcctacttggtatacttgatatatacatacatacacaccagagagggagagagagaaaggggtagtcatgtgcgactacttcttgaagagggctgagggccaccagcaggccggagacctcaccgacatcgtccgagccggcggggccatgccggctggctctgcggatcccccgtcgacggccaccgagtggctgcagctgccggctgacccgatcctcttcccgctgccccagacgtcgtcctcggacggtgctgggccgagcagcgcagacgctctcggtgacccgttctccggcctcccggatgccttcagcaccgactacccctcctcctccggcagcgccgccgccgatttcttcgacgccgtccaggacgcgatgggtgtcggcatggccaagcaggtcggcttcgtcgacacgaccggctgcggcggcggtggaacaactgccggtgctggtggcgggttcctggacatgaggaatcaccatatgtttccaggggagatgccgatgcgcgggctgtcgccgtacgcgctgatgggcggtggcgcggcgaagctcggcgtgccgatggccgggcacgggctggcggctggcccgtgcgcgttcgacgccgtcgcagggctgcagatgtcgtcctcaccgcgtggcggggggatcaagcgcaggttcggcaccggccatcgttagctagctgtctgttcagtcagatctacacaagtgcgccttaatttcttcgattcctcccgacaagtgtaattaagcacggagttccttgtcgtcggggcactgttcagggtttcgtaatttagggaaagtttgcagctccatttcctcctaccgtgcttagtttttcctcattctgcaactcccaacaatgtaaggatcgagatgaaagaagaaacttaaatgcatcgccagctttgggac

SEQ ID NO: 66931 - protein, 207 aa, Triticum aestivum
  peptide (1)..(207): Ceres Seq. ID no. 15179897
MCDYFLKRAEGHQQAGDLTDIVRAGGAMPAGSADPPSTATEWLQLPADPILFPLPQTSSSDGAGPSSADALGDPFSGLPDAFSTDYPSSSGSAAADFFDAVQDAMGVGMAKQVGFVDTTGCGGGGTTAGAGGGFLDMRNHHMFPGEMPMRGLSPYALMGGGAAKLGVPMAGHGLAAGPCAFDAVAGLQMSSSPRGGGIKRRFGTGHR

SEQ ID NO: 66932 - protein, 180 aa, Triticum aestivum
  peptide (1)..(180): Ceres Seq. ID no. 15179898
MPAGSADPPSTATEWLQLPADPILFPLPQTSSSDGAGPSSADALGDPFSGLPDAFSTDYPSSSGSAAADFFDAVQDAMGVGMAKQVGFVDTTGCGGGGTTAGAGGGFLDMRNHHMFPGEMPMRGLSPYALMGGGAAKLGVPMAGHGLAAGPCAFDAVAGLQMSSSPRGGGIKRRFGTGHR

SEQ ID NO: 66933 - protein, 103 aa, Triticum aestivum
  peptide (1)..(103): Ceres Seq. ID no. 15179899
MGVGMAKQVGFVDTTGCGGGGTTAGAGGGFLDMRNHHMFPGEMPMRGLSPYALMGGGAAKLGVPMAGHGLAAGPCAFDAVAGLQMSSSPRGGGIKRRFGTGHR

SEQ ID NO: 66934 - DNA, 1489 bp, Triticum aestivum
  misc_feature (1)..(1489): Ceres Seq. ID no. 15170690
cgcagaaaggcagaagctccttcctcccccaaaaaaagcgagacgacgggacgagacagcgagggcgagacagacagacaggaggccgaggccgaggccgaggcgcgacccacccaagcaagccctaggcgacgagacgcgacggcgacgacggcggcggcgaaggcgtatcccgcgtccgcgtgcccggattcggggctcatccggtcggctcggccatgtccaccaagagggttctttgcaagttcttcatgcatggtgcttgcttgaaaggagagtattgtgagttctcccacgactggagtgaccaagcaaataatgtttgcacgttttaccagagaggctcatgctcttatggtaaccgttgcagatatgaccatgtcaaggtttctcgtaacaacccagtgcctccactaccatcatcaagtaccgcaacacgtaattccccacttcgcccgccaccatcatcaagtactgcgacacatgttgcatctacatctccacaacttttaagttctggacgtcctcttcacttgggacaccaaacaaattcaagcaaccaacggcaacagatatctatggataagctggcagtttctgaaagtaagcctgcatggaggaatgaggtccaacttaacagtgtatcagaggatgggattggctggtcatccattcaaactgcgcaaaaccaaacttccatgaaacttgctgatatgccaatttgttcttttgctgctggtggtaactgcccgtatggggaagagtgtcctcacatgcatggggatttgtgtgcgttctgtgggaaaatgtgcttgcatccttatcgtcctgatgagaggcaggagcatatcaagctatgtgaaaagaaccacaagcgtcttgaggctttgaaacgtagccaagaaatagaatgcagtgtctgcttggaccgcgtgctctcaaagtctactgctgcagaaaggaaatttggactattatctgaatgtgatcatcccttctgtatttcatgcataagaaattggcgtggcaactctcctacatctggtatggatgtgaactcagcactgagagcttgcccaatatgccgcaaactttcgtactatgtcattccaagtgttctttggtacttctcgaaagaggaaaagttggagatcactgaaaactacaaagcaaagctcaagtcaatagattgcaagtacttcgatttcggaacgggcacttgccccttcgggacaagctgtttctacaagcatgcttacagagatggccgcttggaagaagtcgtattgcgacatcttgattgtgatgatggaagtacacttattgctaagaacattaggttgtcagacttcctcggccggttgcatctttagggacctgcttcatatatatcgaattattccgaagacatcagtttaaatcgaggcatcttggaaaactgctgctttatctccaatttttttggtggttgctttgtcgccaaacatac

SEQ ID NO: 66935 - protein, 384 aa, Triticum aestivum
  peptide (1)..(384): Ceres Seq. ID no. 15170691
MSTKRVLCKFFMHGACLKGEYCEFSHDWSDQANNVCTFYQRGSCSYGNRCRYDHVKVSRNNPVPPLPSSSTATRNSPLRPPPSSSTATHVASTSPQLLSSGRPLHLGHQTNSSNQRQQISMDKLAVSESKPAWRNEVQLNSVSEDGIGWSSIQTAQNQTSMKLADMPICSFAAGGNCPYGEECPHMHGDLCAFCGKMCLHPYRPDERQEHIKLCEKNHKRLEALKRSQEIECSVCLDRVLSKSTAAERKFGLLSECDHPFCISCIRNWRGNSPTSGMDVNSALRACPICRKLSYYVIPSVLWYFSKEEKLEITENYKAKLKSIDCKYFDFGTGTCPFGTSCFYKHAYRDGRLEEVVLRHLDCDDGSTLIAKNIRLSDFLGRLHL

SEQ ID NO: 66936 - protein, 373 aa, Triticum aestivum
  peptide (1)..(373): Ceres Seq. ID no. 15170692
MHGACLKGEYCEFSHDWSDQANNVCTFYQRGSCSYGNRCRYDHVKVSRNNPVPPLPSSSTATRNSPLRPPPSSSTATHVASTSPQLLSSGRPLHLGHQTNSSNQRQQISMDKLAVSESKPAWRNEVQLNSVSEDGIGWSSIQTAQNQTSMKLADMPICSFAAGGNCPYGEECPHMHGDLCAFCGKMCLHPYRPDERQEHIKLCEKNHKRLEALKRSQEIECSVCLDRVLSKSTAAERKFGLLSECDHPFCISCIRNWRGNSPTSGMDVNSALRACPICRKLSYYVIPSVLWYFSKEEKLEITENYKAKLKSIDCKYFDFGTGTCPFGTSCFYKHAYRDGRLEEVVLRHLDCDDGSTLIAKNIRLSDFLGRLHL

SEQ ID NO: 66937 - protein, 264 aa, Triticum aestivum
  peptide (1)..(264): Ceres Seq. ID no. 15170693
MDKLAVSESKPAWRNEVQLNSVSEDGIGWSSIQTAQNQTSMKLADMPICSFAAGGNCPYGEECPHMHGDLCAFCGKMCLHPYRPDERQEHIKLCEKNHKRLEALKRSQEIECSVCLDRVLSKSTAAERKFGLLSECDHPFCISCIRNWRGNSPTSGMDVNSALRACPICRKLSYYVIPSVLWYFSKEEKLEITENYKAKLKSIDCKYFDFGTGTCPFGTSCFYKHAYRDGRLEEVVLRHLDCDDGSTLIAKNIRLSDFLGRLHL

SEQ ID NO: 66938 - DNA, 1495 bp, Triticum aestivum
  misc_feature (1)..(1495): Ceres Seq. ID no. 13659881
ataaatgtaaatatttctattgatggaccatcctgatttattgggctggctacgccactggcaggggggacgacctctcgctcggcttcaatgccggcgccgccgcggccgcggccgcggccgcctccggcgccgcgctgggggccgggctctggggcccggcgtccgcgtcctcctcgtcccccgcctcgcgccaggcggccctgaactacggcatggcggccggcgacgtggggatggtggtggtcgcccctgcggcctcgttccaccacacgcaccaccatcaccaccaccacgacgcggccgccgcggccgctgcctccgacgccatcttcccgctgctctccgcgggctcctgcgtgctcgaccccgaggcggccaaggccgcggccgccagcggcggcatccagttctggcagtccgcgcagcaccatcagcagcagcactcgccgtcrgccgcgggcggcggcggcggcaaccctaaccctagcctcggccccttctacctcaagaagcccttcccgatgctcgacaccggcggcgacgggtcctccggctccggcaccaccacctgccaggactgcggcaaccaggccaagaaggactgcacccacagccgctgccgcacctgctgcaagagccgcggcttcgactgctccacgcacgtcaagagcacctgggtccccgccgcccgccgccgcgagcgccagcacctcggcggctccgcctcgtcccccgccaccgcctccaccgccgcgggatcgaagaagcctcgcctcctctcctcccagcaggccaccacgtcgtacacctccacctccaacgccaccacgccgcgcagctacgacaccacctccagccatcaagacgcatcgttcagggggaacctgccgcggcaggtgcgcgcgccggcggtgttcaggtgcgtgcgcgtgacgtccgtcgacgacggcgaggacgagtacgcgtaccaggccacggtgaccatcaacggccacgtcttcaagggcttcctctacgaccagggcgtggacgacggccgcgccagcaatgacatcgactcgagcaccggcggcgccgtgcccaacatgtccgagctccacctcgggggcggcggcaatgccgcgaggggaggcgggggttcctcctcgatggcgccctccgacatgtacggcggcggtggcgccggaggagcaggcggagggggaggaggccagcacatactcggcggcgggtccagctatggtaacaccatgaactgagccgagctgctagaagagtaaggtcacatagtagatcattactacagtaccattctttcctttcttctcttcattgctagtaagtacaaacctgtcaaccctctcatggccggggtgcaatgcaatgcatggtgttcgccattaatttgttcatgctgtatgacatcaagtgttaatcgttggaacgggaggggrgttaaaaaaaaaaaaaaaaaagcttatcgataccgtcg

SEQ ID NO: 66939 - protein, 348 aa, Triticum aestivum
  peptide (1)..(348): Ceres Seq. ID no. 15220681
  misc_feature (80)..(80): Xaa is any aa, unknown or other
MAAGDVGMVVVAPAASFHHTHHHHHHHDAAAAAAASDAIFPLLSAGSCVLDPEAAKAAAASGGIQFWQSAQHHQQQHSPXAAGGGGGNPNPSLGPFYLKKPFPMLDTGGDGSSGSGTTTCQDCGNQAKKDCTHSRCRTCCKSRGFDCSTHVKSTWVPAARRRERQHLGGSASSPATASTAAGSKKPRLLSSQQATTSYTSTSNATTPRSYDTTSSHQDASFRGNLPRQVRAPAVFRCVRVTSVDDGEDEYAYQATVTINGHVFKGFLYDQGVDDGRASNDIDSSTGGAVPNMSELHLGGGGNAARGGGGSSSMAPSDMYGGGGAGGAGGGGGGQHILGGGSSYGNTMN

SEQ ID NO: 66940 - protein, 341 aa, Triticum aestivum
  peptide (1)..(341): Ceres Seq. ID no. 15220682
  misc_feature (73)..(73): Xaa is any aa, unknown or other
MVVVAPAASFHHTHHHHHHHDAAAAAAASDAIFPLLSAGSCVLDPEAAKAAAASGGIQFWQSAQHHQQQHSPXAAGGGGGNPNPSLGPFYLKKPFPMLDTGGDGSSGSGTTTCQDCGNQAKKDCTHSRCRTCCKSRGFDCSTHVKSTWVPAARRRERQHLGGSASSPATASTAAGSKKPRLLSSQQATTSYTSTSNATTPRSYDTTSSHQDASFRGNLPRQVRAPAVFRCVRVTSVDDGEDEYAYQATVTINGHVFKGFLYDQGVDDGRASNDIDSSTGGAVPNMSELHLGGGGNAARGGGGSSSMAPSDMYGGGGAGGAGGGGGGQHILGGGSSYGNTMN

SEQ ID NO: 66941 - protein, 245 aa, Triticum aestivum
  peptide (1)..(245): Ceres Seq. ID no. 15220683
MLDTGGDGSSGSGTTTCQDCGNQAKKDCTHSRCRTCCKSRGFDCSTHVKSTWVPAARRRERQHLGGSASSPATASTAAGSKKPRLLSSQQATTSYTSTSNATTPRSYDTTSSHQDASFRGNLPRQVRAPAVFRCVRVTSVDDGEDEYAYQATVTINGHVFKGFLYDQGVDDGRASNDIDSSTGGAVPNMSELHLGGGGNAARGGGGSSSMAPSDMYGGGGAGGAGGGGGGQHILGGGSSYGNTMN

SEQ ID NO: 66942 - DNA, 1117 bp, Triticum aestivum
  misc_feature (1)..(1117): Ceres Seq. ID no. 15179900
acactggtctctcacgcacgcacgcagctgccaacaccagccatcgtcaaagcgctagctccaccggaagccatggcgcgcgccttcgtgcgctccatctccttccctctcagcccctcgaggtctcccaaggcgcgcgctccctccttgtcgtaccacgggcggtccgtgagcctgccatgccgctcgcacccgatcttggcgcacctccacacccacatccgcgccgtgcgcgcctgggcgcagcagggcccagcggcgttgttctcctccgtcgcagcggggctcgcgcacgttgatgcgctccacaccgccgtcggcgacctgctcgacctgcccgaggcccaggacgcgctctccggcgccggcggcagcgtggaccgcctcctcgactccttcctccgcctcgccgacgcgcacggctgtttccaggaggccgtggttgcgctcaagcatgacgtggccgaggcgctggccgccgtgcgccgtcgcgacggtgcacgcctggcatcggccgtgcgggcgcagcgcagggccggcaaggagctcgcccgcctcgccgccgcggccaaagagtgtgccagccgtccctcgcgcctgagcatcctcggaggtggccaaggcagcgcggcggaggtggaggtgacggggctgctgatggagtcggccgcggcgacggcgtcggcgtctgccgcgctgttcggggccgtggcggccatgtccgggtccgtggaggcggagtcgtgctcgtgcaagggcacggcggcgctggtgtgcctcgtgaagaagagcaagaagaagtcgtcggcgccggccgggtgtggggaggaggggatggcggtggcggccgtggcggagaggctggaggagctggaggagtgcatcgaggagctggaggccgggagcgagaaggtgttccggagcctggtgcagaccagggtcgcgctcctcaacatccacacgctccacatcttctagctttactactatcactatcatcgatgatccatccatcttaattctagtacaaatgaaattagtgctagcaatcctgtgtaactgtaaaaaaaagttaagtagatgatgaatagaagaaggaatttgtgcaactcctgcg

SEQ ID NO: 66943 - protein, 325 aa, Triticum aestivum
  peptide (1)..(325): Ceres Seq. ID no. 15179901
TLVSHARTQLPTPAIVKALAPPEAMARAFVRSISFPLSPSRSPKARAPSLSYHGRSVSLPCRSHPILAHLHTHIRAVRAWAQQGPAALFSSVAAGLAHVDALHTAVGDLLDLPEAQDALSGAGGSVDRLLDSFLRLADAHGCFQEAVVALKHDVAEALAAVRRRDGARLASAVRAQRRAGKELARLAAAAKECASRPSRLSILGGGQGSAAEVEVTGLLMESAAATASASAALFGAVAAMSGSVEAESCSCKGTAALVCLVKKSKKKSSAPAGCGEEGMAVAAVAERLEELEECIEELEAGSEKVFRSLVQTRVALLNIHTLHIF

SEQ ID NO: 66944 - protein, 301 aa, Triticum aestivum
  peptide (1)..(301): Ceres Seq. ID no. 15179902
MARAFVRSISFPLSPSRSPKARAPSLSYHGRSVSLPCRSHPILAHLHTHIRAVRAWAQQGPAALFSSVAAGLAHVDALHTAVGDLLDLPEAQDALSGAGGSVDRLLDSFLRLADAHGCFQEAVVALKHDVAEALAAVRRRDGARLASAVRAQRRAGKELARLAAAAKECASRPSRLSILGGGQGSAAEVEVTGLLMESAAATASASAALFGAVAAMSGSVEAESCSCKGTAALVCLVKKSKKKSSAPAGCGEEGMAVAAVAERLEELEECIEELEAGSEKVFRSLVQTRVALLNIHTLHIF

SEQ ID NO: 66945 - DNA, 913 bp, Triticum aestivum
  misc_feature (1)..(913): Ceres Seq. ID no. 15179903
aagctagctagcgaaagcagcagccttccgctgattgccagagatcgagcgagcgaggctgacgccggccatgagcgaccagccccagcccgtccgcaccggggacgtctacccgccctcggccgccgctcacgacgcgcgccgccagcgcgacgaagtcctcacccatgatgatcagcagcagaaacaagatgatcgccgcggccagctccgggtcaccgagaccgacgagccacacgctgggagacgcgtcgtcaccgccaccgccggcggccaggtgatggcgcagttcacggtgccggtgccggacrccggtgtggaggaggcgacagacgcggtgaccatcggcgaagctctacaggccgcggcgcagacgtccgcgggtgagaggccggtcgacctcgcggacgcggctgcggtgcaggccgccgagacgcgcgcgacggggctgggccgcgtcatccccggtggcgtggcggctgccgcgcagcaggccgcggagaccaacatgaggccccgggtcagtgacggtgagaagttgcggctgagggacgtgctggacagcgccgcggcggtgctgccggccaacaaggtggccacgagggaggacgccgttgcggtggccacagcagcggagcgctacgccgctgcgggagcaggtggaggaggcaagggtgtggccgacgcggtggccgtggccgccgagatgaacgacaagaggatgacgcgcacgcggcaggcttaggctaggtagcaggctagcagcctagcagaagaacgtgcgtggccactgtgatacgttgtactgcgtatgcaccacgcatatcactactacgtacgtaacgtacttctctatccgtgttgtaatctacatcatattgtacgctttttcagtagtataaaacgttcttac

SEQ ID NO: 66946 - protein, 224 aa, Triticum aestivum
  peptide (1)..(224): Ceres Seq. ID no. 15179904
  misc_feature (81)..(81): Xaa is any aa, unknown or other
MSDQPQPVRTGDVYPPSAAAHDARRQRDEVLTHDDQQQKQDDRRGQLRVTETDEPHAGRRVVTATAGGQVMAQFTVPVPDXGVEEATDAVTIGEALQAAAQTSAGERPVDLADAAAVQAAETRATGLGRVIPGGVAAAAQQAAETNMRPRVSDGEKLRLRDVLDSAAAVLPANKVATREDAVAVATAAERYAAAGAGGGGKGVADAVAVAAEMNDKRMTRTRQA

SEQ ID NO: 66947 - protein, 154 aa, Triticum aestivum
  peptide (1)..(154): Ceres Seq. ID no. 15179905
  misc_feature (11)..(11): Xaa is any aa, unknown or other
MAQFTVPVPDXGVEEATDAVTIGEALQAAAQTSAGERPVDLADAAAVQAAETRATGLGRVIPGGVAAAAQQAAETNMRPRVSDGEKLRLRDVLDSAAAVLPANKVATREDAVAVATAAERYAAAGAGGGGKGVADAVAVAAEMNDKRMTRTRQA

SEQ ID NO: 66948 - DNA, 1673 bp, Triticum aestivum
  misc_feature (1)..(1673): Ceres Seq. ID no. 14303209
aaaaaacaaaccgagtctgcagttgcaattcctatacgacctcgatccccctcctcccccaacaagtcgaatccgcccgcgttgaggaaggatgtgctcccaagcccccaaatccctagacctagacctcgacctcgacccctccccagtccccagatccctagacctcgaccccgaatcccaaccctgccccggcgtgacgacgacggccgagctccccgacgaagcggagaacccctgcttgtcgcggtttcgccaccggcgactcctcgccttcctctcgcgccagcgctacgatgtcgccttcaacgggctgatgctacaggcgagtgagcccttctgcttggagcgtctgcaggggctcgtgaggaagggcctgtgggaggatgccatcgactaccttgatggcttcctgcctgccggccccaggagcctccacgcccacgccttccgcaacttcctcttgatgcaccactacttggccagcatcgccgccggggatgagtccgccatggacaagctccgggcccaccattggatgcaacacgtcgttgatgcctggaaaacgaaagcgaaccacacatttcctcgtgtcatggcccaagccctgctctcgtcggagcagctccgggcgtccatggactgggatggagtgaggagggaggctgcgtacatcctctccaggttagcttcgaggaccccagagctcaacaggccgctcacattgccgacttgctacaccaagccgcaccaagtgcttcccattgacgttgcctctggattgtgcaggcggcggcgcgtgaaggaacagcgtccccatctacaaccagctgctgttgccagggccatccttttcagggggagtcagcgttacacaagatctctagccaactcaagtttcgaattcattgagaatgcaaaggaatggtttgcgactatcatggatgaaagcttacgagctggttcaggtaaagcgacttccctgctccaacaaattatgaaggaaggtgctcctgttgctccagtttcactgataagtcctgctaaaagttctggtacctcgtcattgacaaatgcaggtgctcctgtttcttcagtgtgccagactctgaacatgacaagagacgctgaaaactatggtatctcatcagtgacaagtccaggcccagaaaagagtcaagaaggtgcctgcggtggtttcaatcccagaaagaatccacgggcagaattggcaactattgatgaatatttggattcaaaaaggcaacgtactactgggacttttggggaagcaagtatggtgccggtgaatgaagtttgggctgaagctcactagctggctggtgaagtcaaccacctagattcataaccgagatatggtgacaatggtggtggtggtggtgtacctgctaactcgcacttcatttatgctttgaacttggatgttaattatacaactttgtttccaagtgcctactatgagctagtacttcataagtaattctgctagtgttggttaatcaggctgcttactgccagcattttctatcactgaaatgaaaattaatcagattattggatcatatcattcagtaacagtattgccaaaagatacacgtaagtgtgacctcaagcattgctttatgaagttgctcagaaaaaaaaaaaaaaac

SEQ ID NO: 66949 - protein, 414 aa, Triticum aestivum
  peptide (1)..(414): Ceres Seq. ID no. 14303210
MCSQAPKSLDLDLDLDPSPVPRSLDLDPESQPCPGVTTTAELPDEAENPCLSRFRHRRLLAFLSRQRYDVAFNGLMLQASEPFCLERLQGLVRKGLWEDAIDYLDGFLPAGPRSLHAHAFRNFLLMHHYLASIAAGDESAMDKLRAHHWMQHVVDAWKTKANHTFPRVMAQALLSSEQLRASMDWDGVRREAAYILSRLASRTPELNRPLTLPTCYTKPHQVLPIDVASGLCRRRRVKEQRPHLQPAAVARAILFRGSQRYTRSLANSSFEFIENAKEWFATIMDESLRAGSGKATSLLQQIMKEGAPVAPVSLISPAKSSGTSSLTNAGAPVSSVCQTLNMTRDAENYGISSVTSPGPEKSQEGACGGFNPRKNPRAELATIDEYLDSKRQRTTGTFGEASMVPVNEVWAEAH

SEQ ID NO: 66950 - protein, 339 aa, Triticum aestivum
  peptide (1)..(339): Ceres Seq. ID no. 14303211
MLQASEPFCLERLQGLVRKGLWEDAIDYLDGFLPAGPRSLHAHAFRNFLLMHHYLASIAAGDESAMDKLRAHHWMQHVVDAWKTKANHTFPRVMAQALLSSEQLRASMDWDGVRREAAYILSRLASRTPELNRPLTLPTCYTKPHQVLPIDVASGLCRRRRVKEQRPHLQPAAVARAILFRGSQRYTRSLANSSFEFIENAKEWFATIMDESLRAGSGKATSLLQQIMKEGAPVAPVSLISPAKSSGTSSLTNAGAPVSSVCQTLNMTRDAENYGISSVTSPGPEKSQEGACGGFNPRKNPRAELATIDEYLDSKRQRTTGTFGEASMVPVNEVWAEAH

SEQ ID NO: 66951 - protein, 289 aa, Triticum aestivum
  peptide (1)..(289): Ceres Seq. ID no. 14303212
MHHYLASIAAGDESAMDKLRAHHWMQHVVDAWKTKANHTFPRVMAQALLSSEQLRASMDWDGVRREAAYILSRLASRTPELNRPLTLPTCYTKPHQVLPIDVASGLCRRRRVKEQRPHLQPAAVARAILFRGSQRYTRSLANSSFEFIENAKEWFATIMDESLRAGSGKATSLLQQIMKEGAPVAPVSLISPAKSSGTSSLTNAGAPVSSVCQTLNMTRDAENYGISSVTSPGPEKSQEGACGGFNPRKNPRAELATIDEYLDSKRQRTTGTFGEASMVPVNEVWAEAH

SEQ ID NO: 66952 - DNA, 936 bp, Triticum aestivum
  misc_feature (1)..(936): Ceres Seq. ID no. 13597953
attcattcattctctcacagccatcgatccatctaaactaggtggagcagtacatacacagcaaagcaaggcataatggcctcgggagtgttcggtacccccatttcagagaagacggtgctggccactggagagtataaggaacccatcactcaaaaggatgttgcggactataccatgaagatgatcaacgccggtggtaaggatattaacgcacaaaccttcgtcgacaacctcaaggagaggtacggtaacggaatatctgtaaaatgcctcatctacaatgccaccggtgccactttgaacttggctaactacaaagactggcacggccatatctacgatacaccctacccatcagatattcagaatgggcaatggggggcatttctccacgtccacccaagtggcgctgcggttggttcagctggtgccgttgtgtatcgtaccaaggtcccatccagcagcagctcctgcgattggttgttctcctggaccgtcccctacattggtgccaatgggatctacaccgaaatccgtgaggaagggcactacccaagtgtgggaagctgggattatatctatgacgtgaagctggaaaatgcaaatctcaactctactgataaaaactatggatatgtttccgagactaacatcggtgaaggctctaccatgaacgctcgtggagttttccagtttccctactagatctctttgccagcatcgaggggttattgtggtcttcaaagtcttttgtggcgaggacgtttggggctgttatcttcctttactatatttgtggtgcactccactagtagaaaaagggcctaatgtgaagctcattagtcccggtttgtaattgaaccggcactaatgtgaccattagtgctgcttccaacggctaggcgggcggagctcaaaataatgaagctttgt

SEQ ID NO: 66953 - protein, 210 aa, Triticum aestivum
  peptide (1)..(210): Ceres Seq. ID no. 13597954
MASGVFGTPISEKTVLATGEYKEPITQKDVADYTMKMINAGGKDINAQTFVDNLKERYGNGISVKCLIYNATGATLNLANYKDWHGHIYDTPYPSDIQNGQWGAFLHVHPSGAAVGSAGAVVYRTKVPSSSSSCDWLFSWTVPYIGANGIYTEIREEGHYPSVGSWDYIYDVKLENANLNSTDKNYGYVSETNIGEGSTMNARGVFQFPY

SEQ ID NO: 66954 - protein, 176 aa, Triticum aestivum
  peptide (1)..(176): Ceres Seq. ID no. 13597955
MKMINAGGKDINAQTFVDNLKERYGNGISVKCLIYNATGATLNLANYKDWHGHIYDTPYPSDIQNGQWGAFLHVHPSGAAVGSAGAVVYRTKVPSSSSSCDWLFSWTVPYIGANGIYTEIREEGHYPSVGSWDYIYDVKLENANLNSTDKNYGYVSETNIGEGSTMNARGVFQFPY

SEQ ID NO: 66955 - protein, 174 aa, Triticum aestivum
  peptide (1)..(174): Ceres Seq. ID no. 13597956
MINAGGKDINAQTFVDNLKERYGNGISVKCLIYNATGATLNLANYKDWHGHIYDTPYPSDIQNGQWGAFLHVHPSGAAVGSAGAVVYRTKVPSSSSSCDWLFSWTVPYIGANGIYTEIREEGHYPSVGSWDYIYDVKLENANLNSTDKNYGYVSETNIGEGSTMNARGVFQFPY

SEQ ID NO: 66956 - DNA, 1715 bp, Triticum aestivum
  misc_feature (1)..(1715): Ceres Seq. ID no. 14303301
agacgcttttaaattcgagattttattgtccgccttccccgacgcgcagctgcctcgctgccccggtgctgctgctcccctcccacccgccgcgccccgccgacgcctccgccgatggaccgggaagaaggtaaggcagcggcgagcctgccggatttgggagcgactgtggctaattttggggacgattcccgttggtgtgcagtgacggagttcctgggccaggtgcccctcctgcagtgcctccccggctcctccatccgcaggatcgccgaggccgtccaggtcaagcactacgaacctggtgattatgttgcccgtgaaggtgaacccgtagatggcctttgcatcatattggatgggcaggctgaagtttctgctcctgcaaacacagaagaagcaaaccgtccagactatgtgttaaataagtatgactactttggttacgggaccaatagttctgtacatcaagtaaatgttattgccgtgacaaagctgtcctgctttgtattgccgagtcaatatggacatctgctgcaaaccaagacaatttggaatgcagaagaaacacctgaaagccattcattgatggaacaaattttacatttagagaaattagaggttgatatatttcgtggatttactttgccagaagctccaacttttaatcaagtttttggaggacaattgattgggcaggcactagcagcagcatccaagactgtcgattgcctgaaacttgtgcatagtctgcatgcaatttttctaatagcaggagacaataatatgccaataatatatcaagtgcatcgggagcgtgatggaaccagctttgccaccagaaaagtggaggcaaagcagaaaggccttgttatgttcactttaattgtttctttccagaaggaagaattagggtttgagcatcaggctgcaatcatgcctgtcgttcctcctccagaacagctcctgaatatggaggagatacgggaaagaagactcactgatccacggtttccgatgcaatataggaactcagctgccaagaaaaagtttgtaccttggcccattgaaatgaggttctgccaagattctaaatctcagcatgaaccaagcctgcattattggtttagagctagaggaaaactttcggatgatccagctctgcatagatgcgttgtagcatatgcttcggatctactatattcaggcgtcagcctaaatccgcaccgtaagaggggtttgaagacatactctctcagtcttgatcactcgatgtggttccacaagcctgtgaaagctgatgactggttgttatatgtgatcgacagcccatccgcacatggtggcaggggattcgtcaccggacgtatgttcaaccggcaaggagagcttattgtgtcgctgacccaagaggcgttgattaggagggccaagacacccgggcaaaccccaaggccgaagctttgagatgtgcagaagagccatggctgtactttaatattttctttccccttgctgttccgtatttttatcttatatagtacacggagacaatggtgagatttatgtataggagtacagcttacagcttgaatttggcacacatgtgaacgattgtatcctcgcatgctgattcacattcaggttttcctttgcatatgtggatggcaattgccatccaacacgcggcacatgaatgtagacagatgtacctc

SEQ ID NO: 66957 - protein, 450 aa, Triticum aestivum
  peptide (1)..(450): Ceres Seq. ID no. 14303302
MDREEGKAAASLPDLGATVANFGDDSRWCAVTEFLGQVPLLQCLPGSSIRRIAEAVQVKHYEPGDYVAREGEPVDGLCIILDGQAEVSAPANTEEANRPDYVLNKYDYFGYGTNSSVHQVNVIAVTKLSCFVLPSQYGHLLQTKTIWNAEETPESHSLMEQILHLEKLEVDIFRGFTLPEAPTFNQVFGGQLIGQALAAASKTVDCLKLVHSLHAIFLIAGDNNMPIIYQVHRERDGTSFATRKVEAKQKGLVMFTLIVSFQKEELGFEHQAAIMPVVPPPEQLLNMEEIRERRLTDPRFPMQYRNSAAKKKFVPWPIEMRFCQDSKSQHEPSLHYWFRARGKLSDDPALHRCVVAYASDLLYSGVSLNPHRKRGLKTYSLSLDHSMWFHKPVKADDWLLYVIDSPSAHGGRGFVTGRMFNRQGELIVSLTQEALIRRAKTPGQTPRPKL

SEQ ID NO: 66958 - protein, 292 aa, Triticum aestivum
  peptide (1)..(292): Ceres Seq. ID no. 14303303
MEQILHLEKLEVDIFRGFTLPEAPTFNQVFGGQLIGQALAAASKTVDCLKLVHSLHAIFLIAGDNNMPIIYQVHRERDGTSFATRKVEAKQKGLVMFTLIVSFQKEELGFEHQAAIMPVVPPPEQLLNMEEIRERRLTDPRFPMQYRNSAAKKKFVPWPIEMRFCQDSKSQHEPSLHYWFRARGKLSDDPALHRCVVAYASDLLYSGVSLNPHRKRGLKTYSLSLDHSMWFHKPVKADDWLLYVIDSPSAHGGRGFVTGRMFNRQGELIVSLTQEALIRRAKTPGQTPRPKL

SEQ ID NO: 66959 - protein, 226 aa, Triticum aestivum
  peptide (1)..(226): Ceres Seq. ID no. 14303304
MPIIYQVHRERDGTSFATRKVEAKQKGLVMFTLIVSFQKEELGFEHQAAIMPVVPPPEQLLNMEEIRERRLTDPRFPMQYRNSAAKKKFVPWPIEMRFCQDSKSQHEPSLHYWFRARGKLSDDPALHRCVVAYASDLLYSGVSLNPHRKRGLKTYSLSLDHSMWFHKPVKADDWLLYVIDSPSAHGGRGFVTGRMFNRQGELIVSLTQEALIRRAKTPGQTPRPKL

SEQ ID NO: 66960 - DNA, 1706 bp, Triticum aestivum
  misc_feature (1)..(1706): Ceres Seq. ID no. 13590739
aggaagaaggaaagacagatcggtgcgtgtgaggcagccccgctccgctaaacctcgcaacaacccccgtgggcgaccaacccagcccagccgcccccctctcctcaccaacccccgagccggaagcagagccgcgatggccggcaccgtgcccaagctcgccgccccgaggccggcggccgcggggccgctcccctcgcagcccctccgcgccgccgcgctcgccttcgccccctccgcccgacgcttccgcgtctccctcgccggccgcgccaggagccccgtcattgcgatggcttccgccaaggaagggaacggtgcggtgacgaagaggaccacgctccatgacctctatgagcaacagggtcagtccccgtggtacgacaacctttgccggcctgtcaccgatttgctgccctacatcgccaacggtgtccgtggagtcaccagcaacccaacgattttccagaaagccatctcttcatcaaacgcctatgacggtcagttcaaggagcttatatcagctgggaaggatgcggagagcgcttactgggaactcgtcataaaggacatccaagacgcgtgcaagctgtttgagcccatctacgacgagactgatggggctgatggttacgtttcagtggaggtgtctcctaggctggcaaatgacacccaaggaaccgtcgaagctgcgaagtggttacacaaagtggtcaaccgccccaatgtgtacataaagatcccagctacagcagaatgtgttccttctatcaaggaagtcattgctaatggcatcagcgtcaatgtcactcttatcttctctgttgcaagatacgaggctgtgattgatgcttacctcgacgggcttgaggcttctggtttgagcgacttatcccgagtaaccagtgtagcatccttctttgtcagccgagttgacagtctgatcgacaaaatgcttgagaagattggaacaccggaagctcttgccctgaggggaaaggctgccgtagcacaagcaaagatagcaaatcagctttacctgaagaaattctctggcccgaggtgggaggctttggtgaagaagggagccaagaagcagaggttgttgtgggcatccaccagcgtgaagaacccggcttacttggacactctttacgtcgatcctctcatcggacctgacaccgtctctacgatgcccgaccaagctctggacgcgttcatcgaccacggcacagttgctaggacaatcgacgcgaacgtatcagaagctgagggcatatacagtgccctggagaagctgggcatcgactgggaagaggttggcaagcagctggagcacgagggcgtgagctccttcaaggggagcttcgacagcctgctcacgagcttggaggagaagggcaatgccctcaagaccgccgccaacctgtaggcgctaaaattgttggatagaatggtttggtaccggcgctggccatcaaacgattacccaataaaaatgccagcttgctggctctccccttccattcggaaatgaaatgctcccagttatctgggtgagcttctttgtattctaggcgtgcctggctgtcattgtgtaactgaggtttgttgctcgcaactgctatcgttttctgatcaattgtttttgagcaagtcagccatatttgtgtatctttggcaaatgcatttctccttactgttgt

SEQ ID NO: 66961 - protein, 476 aa, Triticum aestivum
  peptide (1)..(476): Ceres Seq. ID no. 15221001
GRRKDRSVRVRQPRSAKPRNNPRGRPTQPSRPPLLTNPRAGSRAAMAGTVPKLAAPRPAAAGPLPSQPLRAAALAFAPSARRFRVSLAGRARSPVIAMASAKEGNGAVTKRTTLHDLYEQQGQSPWYDNLCRPVTDLLPYIANGVRGVTSNPTIFQKAISSSNAYDGQFKELISAGKDAESAYWELVIKDIQDACKLFEPIYDETDGADGYVSVEVSPRLANDTQGTVEAAKWLHKVVNRPNVYIKIPATAECVPSIKEVIANGISVNVTLIFSVARYEAVIDAYLDGLEASGLSDLSRVTSVASFFVSRVDSLIDKMLEKIGTPEALALRGKAAVAQAKIANQLYLKKFSGPRWEALVKKGAKKQRLLWASTSVKNPAYLDTLYVDPLIGPDTVSTMPDQALDAFIDHGTVARTIDANVSEAEGIYSALEKLGIDWEEVGKQLEHEGVSSFKGSFDSLLTSLEEKGNALKTAANL

SEQ ID NO: 66962 - protein, 431 aa, Triticum aestivum
  peptide (1)..(431): Ceres Seq. ID no. 15221002
MAGTVPKLAAPRPAAAGPLPSQPLRAAALAFAPSARRFRVSLAGRARSPVIAMASAKEGNGAVTKRTTLHDLYEQQGQSPWYDNLCRPVTDLLPYIANGVRGVTSNPTIFQKAISSSNAYDGQFKELISAGKDAESAYWELVIKDIQDACKLFEPIYDETDGADGYVSVEVSPRLANDTQGTVEAAKWLHKVVNRPNVYIKIPATAECVPSIKEVIANGISVNVTLIFSVARYEAVIDAYLDGLEASGLSDLSRVTSVASFFVSRVDSLIDKMLEKIGTPEALALRGKAAVAQAKIANQLYLKKFSGPRWEALVKKGAKKQRLLWASTSVKNPAYLDTLYVDPLIGPDTVSTMPDQALDAFIDHGTVARTIDANVSEAEGIYSALEKLGIDWEEVGKQLEHEGVSSFKGSFDSLLTSLEEKGNALKTAANL

SEQ ID NO: 66963 - protein, 379 aa, Triticum aestivum
  peptide (1)..(379): Ceres Seq. ID no. 15221003
MASAKEGNGAVTKRTTLHDLYEQQGQSPWYDNLCRPVTDLLPYIANGVRGVTSNPTIFQKAISSSNAYDGQFKELISAGKDAESAYWELVIKDIQDACKLFEPIYDETDGADGYVSVEVSPRLANDTQGTVEAAKWLHKVVNRPNVYIKIPATAECVPSIKEVIANGISVNVTLIFSVARYEAVIDAYLDGLEASGLSDLSRVTSVASFFVSRVDSLIDKMLEKIGTPEALALRGKAAVAQAKIANQLYLKKFSGPRWEALVKKGAKKQRLLWASTSVKNPAYLDTLYVDPLIGPDTVSTMPDQALDAFIDHGTVARTIDANVSEAEGIYSALEKLGIDWEEVGKQLEHEGVSSFKGSFDSLLTSLEEKGNALKTAANL

SEQ ID NO: 66964 - DNA, 1204 bp, Triticum aestivum
  misc_feature (1)..(1204): Ceres Seq. ID no. 13659351
gttttctattccttccctcttttgttttctcccgcgagcagctcgtgcgacagctgagctgcggccgccgccgccacactttgcttcgctgtgagcggtcccgagcgtgagccggtgggggtgtcggcgaggcgcgcgagggtcaggcagcgaggagaccgccgccgctgcagcctggtgtgcgcgcgctccaggctgctccgccactcagccaccgggttgcagatgccgccattgctcctgctaggctgctaccgtccgtcgccagccgtccgcgctgctgctgccaccttcgccgcgcacctgaccgcgccgccgcccgggaattgcccgacgcggccgtctcgtgttgccctctgccggcgcgcgcggcagacgacgcctttgacgtctatctttctggccaaacgcattcctcgggcatacagaggctaaagtcaaccttaaaatggaggatgctaacgcagtagtagattggaatgttgacattattggcccagatggtggtagcggcgcttgccgcaaattggcaaaaactgaagaccctgatgccacagagtgttcaagttcctttggggacacactatctggatctcaggatgatgcaaagccttcagagattagtgacattgaagtagactcaccattctgccgttatcctcataatggtgatgctgctgcactcttggatgcagctgctgctgacaatttggatagattattgaaaaagaaaaaagtgaccgatcattggagaagctatatcagcccattaatgtggagatgccaatggttagagctgcggatgaaagacttgcaatctcaagtatccagatatgacagggagcttgcagtacttaaacatgagaaagagttgcagacaaaaatgattgagttggactgttcctcgtcaagatcagtgcccttctcttctcattgctgcaggaagactatgaagaggaagaagaggaagagaaatgaggagaaaatcaatgctccctcatacatcgcaacccacaccatattgtcttattatgaaaaagagaccagcggatggctttgatacctggtacttgtttgcatgatatgctgttcccaagttatctccagagtgctgagcaccaactcccatcaaatcaagataatgttgatagtgngatataatgccattcatattatcaatggaccctttaccacagatggcatc

SEQ ID NO: 66965 - protein, 203 aa, Triticum aestivum
  peptide (1)..(203): Ceres Seq. ID no. 13659352
MEDANAVVDWNVDIIGPDGGSGACRKLAKTEDPDATECSSSFGDTLSGSQDDAKPSEISDIEVDSPFCRYPHNGDAAALLDAAAADNLDRLLKKKKVTDHWRSYISPLMWRCQWLELRMKDLQSQVSRYDRELAVLKHEKELQTKMIELDCSSSRSVPFSSHCCRKTMKRKKRKRNEEKINAPSYIATHTILSYYEKETSGWL

SEQ ID NO: 66966 - DNA, 827 bp, Triticum aestivum
  misc_feature (1)..(827): Ceres Seq. ID no. 13659433
attcacatcgattgatcatcgcagctagctaggttgcggcaacatggagagcggcagcacggcggcgtcgagcgacgaggccgtgagatcgcccggcgggacgacggcggtggcggccgcccggccgtactacgagtgcgtgttctgcaagcgcgggttcaccacggcgcaggcgctgggcgggcacatgaacatccaccgccgggaccgcgccaagcccgcccgcctcacgacgtcagcttcccggagcacagagtgcaacttggcgtaccccccagcgccgccggccacgtccctgatgagcagcggcgacttcgccatgttgtactacggccggcacaccggagccggagtggacgccgaggccgtgagccctggtagcccgatcccgagggagctgagcctgttcggcgcggacgacgacagtcacgacgaccgtgacgactgcttgcaactgggcctccggtgccatggaagcagcagcggcgacgggttcgagcggcggccggacggcgagctgccggagaggaagctggacttggagctcaggctcgggcccgggcctcgtccgaggcactgatcactcgcacggtaccctggtgcaactcagacacaggaacgcactcatctatatacatgcatgggcttcctagctagtattacttcagwtcttktgttgcttgatatcattattgctattctcatcttctgctgcttgtttatatgactaaatatatttatatttcgccataacaacaagagcagatgctttgatgtattgaatgtacatggagagctatatatgcttggctcttgttttgattcgc

SEQ ID NO: 66967 - protein, 178 aa, Triticum aestivum
  peptide (1)..(178): Ceres Seq. ID no. 15219972
MESGSTAASSDEAVRSPGGTTAVAAARPYYECVFCKRGFTTAQALGGHMNIHRRDRAKPARLTTSASRSTECNLAYPPAPPATSLMSSGDFAMLYYGRHTGAGVDAEAVSPGSPIPRELSLFGADDDSHDDRDDCLQLGLRCHGSSSGDGFERRPDGELPERKLDLELRLGPGPRPRH

SEQ ID NO: 66968 - protein, 130 aa, Triticum aestivum
  peptide (1)..(130): Ceres Seq. ID no. 15219973
MNIHRRDRAKPARLTTSASRSTECNLAYPPAPPATSLMSSGDFAMLYYGRHTGAGVDAEAVSPGSPIPRELSLFGADDDSHDDRDDCLQLGLRCHGSSSGDGFERRPDGELPERKLDLELRLGPGPRPRH

SEQ ID NO: 66969 - protein, 93 aa, Triticum aestivum
  peptide (1)..(93): Ceres Seq. ID no. 15219974
MSSGDFAMLYYGRHTGAGVDAEAVSPGSPIPRELSLFGADDDSHDDRDDCLQLGLRCHGSSSGDGFERRPDGELPERKLDLELRLGPGPRPRH

SEQ ID NO: 66970 - DNA, 1369 bp, Triticum aestivum
  misc_feature (1)..(1369): Ceres Seq. ID no. 13659840
agcttaggccccactcaagtcaacttacccttcttcctcctcgatccacatatgtacgcctgcagctagctagcaagtactcagatctctgggagtacttgctaggtccgcttcaagtagtagcaaggagccaaggagaccgagatctcgtttctctcttcccagcaaggatcccgcaagctattgttcctctcaagatcatcagagatggccaccgcaagtagtaacctgcaactaccggcagaactaccctacgattttgtgaagaaaattacaaatgacttctctaaggagcgagaaattagtgacaatccatttggaaaactttacaagggaattaatccagatgatggcacagtgattgctgtgaagaaacttcaggaaaacgcaccaatgccagctggcaagatatttataaatgaggttcagaatattatggtgctcaaacacgcaaacattgtaaaaatggttggatactgcagtgaaacaacaaagaaattggtgcagttcgatcatcgatatattcaggcagatgttactgaaagtgtactctgctatgaatatttacctaaaggggaccttgcaaagaatctatttggtaaactcattatcgattgggatacacgtttcaaaataatcaaggggatctgcaaggggttactttatctacacaaattagatattcccataatccatatggatctgaagcccgagaatatattgttggatgaagatatggtgcctaagattgcggactttgcactctctagagtctttggcgaagcacaaacccgattgtgcacacagactgtcgtgggatcatatggatatatggctccagaatatctatacaggggtgaaatctcagcgcaatcagacatatatagtttaggcctactcataattgagatcaccacaggagagaagaattgtcctgaaaccaaccaaccgtccgcaagaaattttattgataatgtacaaaaaaattggacagaggattacataacattcaagtactcaagtttaaccccagattgcctcaatcaagttaagcgatgcatcaaaattgggctggaatgtgttactatcgatcggaaaggcagacccactatagaaaaaattattgacaccctcaacggaataaactgaattgcgaacaaggtcttcgatcaggtctacagtgagcatgaaagatgggtctgttgggatccggtgaagaaaccatgcatgtccccattattgctaagtgtactttattttattttggaaataagtccctttgattgatgtcgtgtcattgtggaaataccaaatgtaatttctcgagaattgctgtagattttttgtgttgatcaagcatcaagatgtg

SEQ ID NO: 66971 - protein, 313 aa, Triticum aestivum
  peptide (1)..(313): Ceres Seq. ID no. 15220678
MATASSNLQLPAELPYDFVKKITNDFSKEREISDNPFGKLYKGINPDDGTVIAVKKLQENAPMPAGKIFINEVQNIMVLKHANIVKMVGYCSETTKKLVQFDHRYIQADVTESVLCYEYLPKGDLAKNLFGKLIIDWDTRFKIIKGICKGLLYLHKLDIPIIHMDLKPENILLDEDMVPKIADFALSRVFGEAQTRLCTQTVVGSYGYMAPEYLYRGEISAQSDIYSLGLLIIEITTGEKNCPETNQPSARNFIDNVQKNWTEDYITFKYSSLTPDCLNQVKRCIKIGLECVTIDRKGRPTIEKIIDTLNGIN

SEQ ID NO: 66972 - protein, 251 aa, Triticum aestivum
  peptide (1)..(251): Ceres Seq. ID no. 15220679
MPAGKIFINEVQNIMVLKHANIVKMVGYCSETTKKLVQFDHRYIQADVTESVLCYEYLPKGDLAKNLFGKLIIDWDTRFKIIKGICKGLLYLHKLDIPIIHMDLKPENILLDEDMVPKIADFALSRVFGEAQTRLCTQTVVGSYGYMAPEYLYRGEISAQSDIYSLGLLIIEITTGEKNCPETNQPSARNFIDNVQKNWTEDYITFKYSSLTPDCLNQVKRCIKIGLECVTIDRKGRPTIEKIIDTLNGIN

SEQ ID NO: 66973 - protein, 237 aa, Triticum aestivum
  peptide (1)..(237): Ceres Seq. ID no. 15220680
MVLKHANIVKMVGYCSETTKKLVQFDHRYIQADVTESVLCYEYLPKGDLAKNLFGKLIIDWDTRFKIIKGICKGLLYLHKLDIPIIHMDLKPENILLDEDMVPKIADFALSRVFGEAQTRLCTQTVVGSYGYMAPEYLYRGEISAQSDIYSLGLLIIEITTGEKNCPETNQPSARNFIDNVQKNWTEDYITFKYSSLTPDCLNQVKRCIKIGLECVTIDRKGRPTIEKIIDTLNGIN

SEQ ID NO: 66974 - DNA, 1255 bp, Triticum aestivum
  misc_feature (1)..(1255): Ceres Seq. ID no. 12780029
gtggataattttaccggcgagggcgcggtgacgcggcacctctccatccagacacccgaactccgccgctctccagccgccgccagcacgccatgctcccgctcgccgccgcaagggcctgcctttcctccccggcgccgacgccgagacccccatccccatcccgagcggcgtctctctccccccttctccgtcgcagctccaccgccaggcagctcagacccgccaggctccccctcctccgcccgctccaggccgcaacgggcgccggcgcgccgggcgcgtcctcgcggcccgcgagggaccgcgtgatcgacttcggcaagcacaagggccagatgctgggcacgctgccgccgtcctacctgcgctgggtggtcgcggagctcgactacggggacacggcggcctgggcgcgcctggcgcgcgaggtgctcgacgaccccgtctacgtcgactgcgtcgagtgggagcacgcgcaccgcttcctccgcggcgactccaagttcgactacgtctacgacgacgccggcgaagacggcgacgggccgctccaggagatggccgagcgcttcggctgggacctctccgacgaggacggctggggccgcctcgacttccgcctcctcggcacctcctacggcggccgcatcccgaggaaggccgaccggcgccagagcaccggcaacagatccccccgcggcggcggcggcgccctgttcgacgccggggcggacgggccgagggggaagagggacgagaggcgggagcggatgcggacgaggagggaggagcaggtgaggacggccaaactggatgtgctcggcgtgaacgccggcgcgaaggatggcggcgcactggggacggcgaggaaggcccgcattggtgtggcggcaaagaaggagatcctggggctgggccgctgcggcgagagggcggcgccgctgaaaggcggcgagggagggaacccgttccccggccggcaagccttcctcgacaaggtcaggaagctcaagggcgatgatagctagcgccagcagctaggctaggtgatatcaggatcgtttagtgctcaatagacgtaaattttgggcagttcatggaagcaagcagattgtattccttagataaattacagtacaagagtgagatctactctagcagacaagcaaggcactaggaatttaagaacttctttacgggaacattgacactgtttgagttgctgctaggaatttaagaatttaagatcgtc

SEQ ID NO: 66975 - protein, 312 aa, Triticum aestivum
  peptide (1)..(312): Ceres Seq. ID no. 12780030
MLPLAAARACLSSPAPTPRPPSPSRAASLSPLLRRSSTARQLRPARLPLLRPLQAATGAGAPGASSRPARDRVIDFGKHKGQMLGTLPPSYLRWVVAELDYGDTAAWARLAREVLDDPVYVDCVEWEHAHRFLRGDSKFDYVYDDAGEDGDGPLQEMAERFGWDLSDEDGWGRLDFRLLGTSYGGRIPRKADRRQSTGNRSPRGGGGALFDAGADGPRGKRDERRERMRTRREEQVRTAKLDVLGVNAGAKDGGALGTARKARIGVAAKKEILGLGRCGERAAPLKGGEGGNPFPGRQAFLDKVRKLKGDDS

SEQ ID NO: 66976 - protein, 230 aa, Triticum aestivum
  peptide (1)..(230): Ceres Seq. ID no. 12780031
MLGTLPPSYLRWVVAELDYGDTAAWARLAREVLDDPVYVDCVEWEHAHRFLRGDSKFDYVYDDAGEDGDGPLQEMAERFGWDLSDEDGWGRLDFRLLGTSYGGRIPRKADRRQSTGNRSPRGGGGALFDAGADGPRGKRDERRERMRTRREEQVRTAKLDVLGVNAGAKDGGALGTARKARIGVAAKKEILGLGRCGERAAPLKGGEGGNPFPGRQAFLDKVRKLKGDDS

SEQ ID NO: 66977 - protein, 156 aa, Triticum aestivum
  peptide (1)..(156): Ceres Seq. ID no. 12780032
MAERFGWDLSDEDGWGRLDFRLLGTSYGGRIPRKADRRQSTGNRSPRGGGGALFDAGADGPRGKRDERRERMRTRREEQVRTAKLDVLGVNAGAKDGGALGTARKARIGVAAKKEILGLGRCGERAAPLKGGEGGNPFPGRQAFLDKVRKLKGDDS

SEQ ID NO: 66978 - DNA, 1818 bp, Triticum aestivum
  misc_feature (1)..(1818): Ceres Seq. ID no. 14302867
cgaaaaaaaatctatcggttttggtctctctcgccgccggatcgccggtccccaacccccacggccgcctccgtcagtaaggcatcgccatgtctgccgctccagaagctcctccttccgaaggtcctccatcgttcatcgccatgtctgccgctccggaagctcctccttccgaaggtccttcatcgtcggtcgccatatccacctcccccttccccaactggatactgctggagagctttgtcttccgcagggacgacaagaagtcttttccggacgacacaaaggcacccatcagggcgtccggcatcacctcctggaacgctcccttccggattgccttctcccttgccaagcccccgctcgcttcccgcctctatgcaaagttgcgacgctttccagatcctagtcaagagacgcctttagccatagtggcgacccacttcaatctactgctgcttcgcgtaggtaccaaaatccctgcacgagggctagtgcaggacttctttatctgcaatgcctatgaaccttccacgctcaaagctttgcctccttgtagagagccctacacagattatagccgcagcagcggtgacaacctacctcgtggtcgacccctccagaaggaggagcgacgcctgcttgaggttcaatcaatggggctcttgtgcggaggcggggagaagtttgcggtggcagagctctgcgttttcaagaccatccacttaaaatcatatgctgacatttgtttgctatgctctcccacatcagccgcccctgtccttggcggcaattggaactcgttccgtgtaccaatccttggcattgacagcaatgatccatggcacatttgttgctgggacactgacactgtcattacttttaggcactggctgtgctggatcgattatcatcgtggtattctattctttgacgtgttcggagagcctgtccctaccgtcacattccttgcttttcctcttgatgagtatccttccccgcacagtctcaaagaggtcaagccatccagccctctcaaatccagccggttgtatcgtggtgcgtctgtcttatttggtggcaatatgatcaaatttgtcaatgtcacccgccacgacggcattggttatggagaactcaaacctcgttcaggcttcaccatcacctgccacaccctcgagttaggcgacaccccagtgataggcaatgcaaggtggaagttagactacaagattacttctgatgagctttggtccgccaatcctcctgagcatcttccacacaacattctcatgttccctcaaatagacttagacatgccacatctagtgcactttatcatcagcgagtttgaattcgttattaagaagatgtggttggtgtccattgatatgaaaactaaggaggtgaaatcatttgctccgtacatcagtgggaaggaaggacttgaaacagacgacgcagacttgatcagagaaaggtctgacgctcccatgcccttcctaccctgtgatttctccaggtttctccgtctctcaaggttgagcaaggatatggaatgactcacggtgtacatttaagttcagctaccatgccaagactttccaaaggcaaacaacaagagaaatgacgcaatgacggacgatatacattaatacattattagatcctcacagacatcaagataacggtgtactacataagctgcgtatgagtagtctctcccaaagcttcatccttgtaattattgtagttgaacttgaattgtagaccgtaaagctatccagattgatgaagttggcacacgtgagtcattcc

SEQ ID NO: 66979 - protein, 490 aa, Triticum aestivum
  peptide (1)..(490): Ceres Seq. ID no. 14302868
MSAAPEAPPSEGPPSFIAMSAAPEAPPSEGPSSSVAISTSPFPNWILLESFVFRRDDKKSFPDDTKAPIRASGITSWNAPFRIAFSLAKPPLASRLYAKLRRFPDPSQETPLAIVATHFNLLLLRVGTKIPARGLVQDFFICNAYEPSTLKALPPCREPYTDYSRSSGDNLPRGRPLQKEERRLLEVQSMGLLCGGGEKFAVAELCVFKTIHLKSYADICLLCSPTSAAPVLGGNWNSFRVPILGIDSNDPWHICCWDTDTVITFRHWLCWIDYHRGILFFDVFGEPVPTVTFLAFPLDEYPSPHSLKEVKPSSPLKSSRLYRGASVLFGGNMIKFVNVTRHDGIGYGELKPRSGFTITCHTLELGDTPVIGNARWKLDYKITSDELWSANPPEHLPHNILMFPQIDLDMPHLVHFIISEFEFVIKKMWLVSIDMKTKEVKSFAPYISGKEGLETDDADLIRERSDAPMPFLPCDFSRFLRLSRLSKDME

SEQ ID NO: 66980 - protein, 472 aa, Triticum aestivum
  peptide (1)..(472): Ceres Seq. ID no. 14302869
MSAAPEAPPSEGPSSSVAISTSPFPNWILLESFVFRRDDKKSFPDDTKAPIRASGITSWNAPFRIAFSLAKPPLASRLYAKLRRFPDPSQETPLAIVATHFNLLLLRVGTKIPARGLVQDFFICNAYEPSTLKALPPCREPYTDYSRSSGDNLPRGRPLQKEERRLLEVQSMGLLCGGGEKFAVAELCVFKTIHLKSYADICLLCSPTSAAPVLGGNWNSFRVPILGIDSNDPWHICCWDTDTVITFRHWLCWIDYHRGILFFDVFGEPVPTVTFLAFPLDEYPSPHSLKEVKPSSPLKSSRLYRGASVLFGGNMIKFVNVTRHDGIGYGELKPRSGFTITCHTLELGDTPVIGNARWKLDYKITSDELWSANPPEHLPHNILMFPQIDLDMPHLVHFIISEFEFVIKKMWLVSIDMKTKEVKSFAPYISGKEGLETDDADLIRERSDAPMPFLPCDFSRFLRLSRLSKDME

SEQ ID NO: 66981 - protein, 301 aa, Triticum aestivum
  peptide (1)..(301): Ceres Seq. ID no. 14302870
MGLLCGGGEKFAVAELCVFKTIHLKSYADICLLCSPTSAAPVLGGNWNSFRVPILGIDSNDPWHICCWDTDTVITFRHWLCWIDYHRGILFFDVFGEPVPTVTFLAFPLDEYPSPHSLKEVKPSSPLKSSRLYRGASVLFGGNMIKFVNVTRHDGIGYGELKPRSGFTITCHTLELGDTPVIGNARWKLDYKITSDELWSANPPEHLPHNILMFPQIDLDMPHLVHFIISEFEFVIKKMWLVSIDMKTKEVKSFAPYISGKEGLETDDADLIRERSDAPMPFLPCDFSRFLRLSRLSKDME

SEQ ID NO: 66982 - DNA, 1160 bp, Triticum aestivum
  misc_feature (1)..(1160): Ceres Seq. ID no. 12784064
aaaaatcctcgatctcaccaacataagccttcctcattcattcattcagctgtacaactctgatcatcgaccagcagcgggattctcctcgtctgatttgttcatccgacacccgatcgatccgcagcagcaggtgatccggctacaatggaggcagcggtagctcgcgccgacacagcagcattcttctcgggccaggaggacgcggccggggggagcatatccagactaccggctcgggtcgccggctcgatcgtccgcggcgtgatcaccttcatcttcgccacagtgggcacgattctgggagccatcacgggcgggatgatcgggctggcgacggagagcggtctcgtccgcggcgcgggcatcggcgccatctccggcgccgtggtggccatggaggttgtcgacaggtccatggccatgtggcgctccgacgagtgcggcatctggagcgtcctatacgtgcttgacgtgatctggagcctcctgacgggtcgtctggtgcgcgagaaggtggaccccgcagtgcagaacgcggtcgacagccagatgaacgccgcgggcgacgggttcagcgacagcccgccgacgctctccgagatgtttgacatgggctccgcctccttcaaaggcatggctgcagacgccatcgccgagctccccgcgacgacgatcaccgagcagcaagccgccgtgcaggacgggggctgctccgtgtgcctccaggagttcgaggccggcgaggcggcgcggagcctgccggagtgccgccacacgttccacatgtcgtgcatagacgggtggctttgccggcatgcgtcgtgcccgctgtgccgccgcgccgtctaggcctggcgtgcccggctcgttaggatcgatgtgtgcatagccagcgtatatacacacgtgttacgcgcgtgtgtgagtgtggcgctagcacgtacggcacgcgcacgcacatacgggaagttcgttaatttgttatacgtagttagctactagttgggttgagactgacatgacatgacacttgtgccgacaagttctttcgtgacttgttcgttgccttcatttctgcggaaattatgattgtattgctacaccacacgcgcggctggttgcgaatatctatacagaaaatcatcagcgtttagatt

SEQ ID NO: 66983 - protein, 234 aa, Triticum aestivum
  peptide (1)..(234): Ceres Seq. ID no. 12784065
MEAAVARADTAAFFSGQEDAAGGSISRLPARVAGSIVRGVITFIFATVGTILGAITGGMIGLATESGLVRGAGIGAISGAVVAMEVVDRSMAMWRSDECGIWSVLYVLDVIWSLLTGRLVREKVDPAVQNAVDSQMNAAGDGFSDSPPTLSEMFDMGSASFKGMAADAIAELPATTITEQQAAVQDGGCSVCLQEFEAGEAARSLPECRHTFHMSCIDGWLCRHASCPLCRRAV

SEQ ID NO: 66984 - protein, 176 aa, Triticum aestivum
  peptide (1)..(176): Ceres Seq. ID no. 12784066
MIGLATESGLVRGAGIGAISGAVVAMEVVDRSMAMWRSDECGIWSVLYVLDVIWSLLTGRLVREKVDPAVQNAVDSQMNAAGDGFSDSPPTLSEMFDMGSASFKGMAADAIAELPATTITEQQAAVQDGGCSVCLQEFEAGEAARSLPECRHTFHMSCIDGWLCRHASCPLCRRAV

SEQ ID NO: 66985 - protein, 151 aa, Triticum aestivum
  peptide (1)..(151): Ceres Seq. ID no. 12784067
MEVVDRSMAMWRSDECGIWSVLYVLDVIWSLLTGRLVREKVDPAVQNAVDSQMNAAGDGFSDSPPTLSEMFDMGSASFKGMAADAIAELPATTITEQQAAVQDGGCSVCLQEFEAGEAARSLPECRHTFHMSCIDGWLCRHASCPLCRRAV

SEQ ID NO: 66986 - DNA, 1379 bp, Triticum aestivum
  misc_feature (1)..(1379): Ceres Seq. ID no. 13659489
aaaacacggcagagttttcccctttcccccctcctccctccccactcgccaaaaatcctcgatccaaatccccactcccggcgacgcgacgcggccatgcgcagctgccgataggcgacgactgcagcgaccacgcacgagcggccatggacgagggctacgccagcctccccaccagccacctcctcggctccgtccccgctgtggctgtggctcccgatgagaggaagcccggtgcccccgccgaagttggaaatgccgctgccacctcgcgccttcagcagtttccgcctgctcctgctgccaacggaggagggtaccagcctccagggagtcctctaggtggagatgtagaaacacagacaaactggaaaggatacttcaatgttgcctcttatactccatatttcaatgttgatactgatgtcgttgttgacagacttatcagttcagtttatccaatggatgggtttttcaggaagatagatgctaatcctgacatgtatggacccttatggatcaccactacactgatattcatgctggctgcattcggaaactttgccacttatctaatgcaaaggaaaagtgatctgaatatatggaactttgatgtcagctatttcagtttggcggcatcagtcatgtacggttatgctatcgtggtacctgctgcattctttttcctgtttcagtactttggatcacgcccaagccttctccggttttggtgtatgtggggctattctctgttcatcttcgtgccggcatctatactgctccttattcctgtggaatttcttcgctgggtcatcatagctggtgctggtggtgcatcatcttggttcatctttttaaacttgaaggaatgcaccgaaggagctgatatgatggctttaatcgcaagtgcagcagtgctgcagtttgctctggcactgttcatcaaagttttcttttttgcctgagatctattctgtgttgcttcaggtgagctggatgttttctttgtgtccccgtcgttctgttctgccattcatctttccgaggaccaggcagtggactagtttcaccctacatacatattgaccctagatttgatagaccttgggagtgtctgttttcaagatttttgactcctgtagttaagggaatttcactgtgtgcgttccagtgcgaagttactaagtttgcatctaaatttgtacctggtgaactttctgccaccgtgttgtacaacaacggtggttagcaagaatgtgaagctcttttttgtttgtacaatccattgctgtgaatgcatggttttctcatgtttctatccagcataaaaaaaaaaaaaaaaaagcttatcgataccgtcgacctcgagggggggcccg

SEQ ID NO: 66987 - protein, 320 aa, Triticum aestivum
  peptide (1)..(320): Ceres Seq. ID no. 13659490
NTAEFSPFPPPPSPLAKNPRSKSPLPATRRGHAQLPIGDDCSDHARAAMDEGYASLPTSHLLGSVPAVAVAPDERKPGAPAEVGNAAATSRLQQFPPAPAANGGGYQPPGSPLGGDVETQTNWKGYFNVASYTPYFNVDTDVVVDRLISSVYPMDGFFRKIDANPDMYGPLWITTTLIFMLAAFGNFATYLMQRKSDLNIWNFDVSYFSLAASVMYGYAIVVPAAFFFLFQYFGSRPSLLRFWCMWGYSLFIFVPASILLLIPVEFLRWVIIAGAGGASSWFIFLNLKECTEGADMMALIASAAVLQFALALFIKVFFFA

SEQ ID NO: 66988 - protein, 272 aa, Triticum aestivum
  peptide (1)..(272): Ceres Seq. ID no. 13659491
MDEGYASLPTSHLLGSVPAVAVAPDERKPGAPAEVGNAAATSRLQQFPPAPAANGGGYQPPGSPLGGDVETQTNWKGYFNVASYTPYFNVDTDVVVDRLISSVYPMDGFFRKIDANPDMYGPLWITTTLIFMLAAFGNFATYLMQRKSDLNIWNFDVSYFSLAASVMYGYAIVVPAAFFFLFQYFGSRPSLLRFWCMWGYSLFIFVPASILLLIPVEFLRWVIIAGAGGASSWFIFLNLKECTEGADMMALIASAAVLQFALALFIKVFFFA

SEQ ID NO: 66989 - protein, 167 aa, Triticum aestivum
  peptide (1)..(167): Ceres Seq. ID no. 13659492
MDGFFRKIDANPDMYGPLWITTTLIFMLAAFGNFATYLMQRKSDLNIWNFDVSYFSLAASVMYGYAIVVPAAFFFLFQYFGSRPSLLRFWCMWGYSLFIFVPASILLLIPVEFLRWVIIAGAGGASSWFIFLNLKECTEGADMMALIASAAVLQFALALFIKVFFFA

SEQ ID NO: 66990 - DNA, 885 bp, Triticum aestivum
  misc_feature (1)..(885): Ceres Seq. ID no. 13660037
agaacatcytaatcgaaaasgggagccgamccaaataggcaacctaaagtagaaaacagtccacgccgccgcggcaccgagcgaccccgcgggcgtccttggaagaagacgaagcggcggcgacgacgacctaggcagaccgctcgctcgtgttggagcctggatggcgtccggaggcatcgcccgcggccgcctcgccgaggagcgcaagtcgtggcgcaagaaccacccccatggcttcgtggccaagccggagaccctgccggatgggtccgtcaatctcatggtctggcggtgcgtcatccccggcaagccagggactgactgggaaggtggatatttcccgctaactctgcaatttgatgataattacccaacaaccgctcctagctgcaggttcccagcaggtttcttccatatcaatgtctatgattctggagtagtatgcctatcgatactgggtgatgcatggaaaccttcaattacagtgaagcaggttttggtaggcatccaggagttgctggatgacccaaatcctaactcagccgcacagcatcgatgctatgaactctataagaagaacatgccagagtacaggaacaaagtccgtgagcagaccaagcgctacccttcgcgcatgtagctactctagtagtgcataatattagtgtgcatttcgttggggactgaagtctagagttgcgccgcgatgggggtgtagttagcgcaatggtagtgtatttgttggaactgctgaactgcacttttgagtacatcttcgctacgaattgttccgggcctcggtagcttatctcaatgtagtttgggtgagctttgctgacccttttttttactttgtgatgaaaagagatatccttttcttcc

SEQ ID NO: 66991 - protein, 159 aa, Triticum aestivum
  peptide (1)..(159): Ceres Seq. ID no. 15220007
MASGGIARGRLAEERKSWRKNHPHGFVAKPETLPDGSVNLMVWRCVIPGKPGTDWEGGYFPLTLQFDDNYPTTAPSCRFPAGFFHINVYDSGVVCLSILGDAWKPSITVKQVLVGIQELLDDPNPNSAAQHRCYELYKKNMPEYRNKVREQTKRYPSRM

SEQ ID NO: 66992 - protein, 119 aa, Triticum aestivum
  peptide (1)..(119): Ceres Seq. ID no. 15220008
MVWRCVIPGKPGTDWEGGYFPLTLQFDDNYPTTAPSCRFPAGFFHINVYDSGVVCLSILGDAWKPSITVKQVLVGIQELLDDPNPNSAAQHRCYELYKKNMPEYRNKVREQTKRYPSRM

SEQ ID NO: 66993 - DNA, 762 bp, Triticum aestivum
  misc_feature (1)..(762): Ceres Seq. ID no. 12626722
aagactttgggctcacccgatgcttttcccctcccccacagccctcgtcctcttggtcggatcttctctctcgagtcttgtccaggccgcgccgccacagccacgccgcctagtgctatagttcttccctcccctcccctccctccatcccaccggccgcctgcgtccaatccgtcctgttgattccgaattttcaatcaatctttctaacaacagctagcttcttctcccccttccgcagatggagatgccgacgggttcttcgcaggcaggtggccgcttccctgtgccgcacaagtccctctccttggatatcaagggcaacaagactgacattgttatcagcaaatacgaagataactttctggtcattgtgacacagattggatgcatgggaaccatattagctgctaagaaagatgaaagtgttttctctgatccaacctacaatgtatctgttctttttgggaagagggatgagccactcctgctagtttgtgcacgccaacttatcgagcatataagtggtagtggctcagctcgtccgttggtgatctcttttggtttgaaggatcattcccagggaacatcgaaagatgtagtttcttccatcgttgacaaccgcctatggtgataactttgcaaaggttgggatgggcatttacagtttcggttcatcttcagagatattgacatacacaagctgtcagagcaaaaccagcccttccttaccatgcatgaatctctagaaactatgtaatg

SEQ ID NO: 66994 - protein, 130 aa, Triticum aestivum
  peptide (1)..(130): Ceres Seq. ID no. 12626723
MEMPTGSSQAGGRFPVPHKSLSLDIKGNKTDIVISKYEDNFLVIVTQIGCMGTILAAKKDESVFSDPTYNVSVLFGKRDEPLLLVCARQLIEHISGSGSARPLVISFGLKDHSQGTSKDVVSSIVDNRLW

SEQ ID NO: 66995 - protein, 128 aa, Triticum aestivum
  peptide (1)..(128): Ceres Seq. ID no. 12626724
MPTGSSQAGGRFPVPHKSLSLDIKGNKTDIVISKYEDNFLVIVTQIGCMGTILAAKKDESVFSDPTYNVSVLFGKRDEPLLLVCARQLIEHISGSGSARPLVISFGLKDHSQGTSKDVVSSIVDNRLW

SEQ ID NO: 66996 - protein, 80 aa, Triticum aestivum
  peptide (1)..(80): Ceres Seq. ID no. 12626725
MGTILAAKKDESVFSDPTYNVSVLFGKRDEPLLLVCARQLIEHISGSGSARPLVISFGLKDHSQGTSKDVVSSIVDNRLW

SEQ ID NO: 66997 - DNA, 1627 bp, Triticum aestivum
  misc_feature (1)..(1627): Ceres Seq. ID no. 15226673
aagaacgtgacatgggcgcacattgacattaggctgctgctgccattccttcctctttcccctccttccacatcccagtcttctccacccacgccaccaaacccccgagatcacgcgagctatatatactgcatattctcccggccctgcaaagcgaggcctctattacttactgatatccccgccgaaatcaagatggggctgcggacctgcggcgccatggaaggcgagcacgttgtcgcctcgcctttcttcgagtggttgaagccgccgccggcgtcgccgtcctcgtcgagatcgtcgtcgactttctcgtcctcctcgtcgtctatggcgtctgggcaccaagaggatcgcagcagcgtggcatgcttgcccctgctccgcatgctcgaggaggggaagggggctggtggtgaccatgatcaccctgcacctccagtcaaggaagagatcatgggcagcggcgcggccgaggtgctggggcctggcgtggatctgaatatcggcttgccggttggtggatcttgcgatgatgacatcatggaggaggagagccaggaggaagatgatgaccacgactgtgacgaagaggaggaggaagagatggatgagttggaacctaaccatggcggttgcaaggtggaggcagaggagaaagagaagcacggcgagccggtggtctcggtggaaggatcaaacagcgtcagcatgccggaattcggcgtgctcggagcagagagcggcgtgcccatgagctgcgggtactggatcccgacgccggcgcagatcctcgtcggcccggtgcagtttgtctgccatgtctgtaacaagagcttcaacagatacaataacatgcagatgcacatgtggggccacgggcgcgagtaccgcaagggcccggagtcgctcaagggcacgcagacgctggcgctcctgaagctgccgtgctactgctgcgccgccgggtgccggaacagcgtggcccacccgcgcgcgcggccgctcaaggacttccgcaccctgcagacgcactacaagcgcaagcacggcgccaggcccttccgctgccgccgctgcgccaagcccttcgccgtcaagggcgactggcgcacgcacgagaagaactgcggcaagcgctggttctgcgcctgcggctccgacttcaagcacaagcgctcgctcaacgaccacgtccgctcattcggcggcgaccacctccccgtcgccctcgacggcgcccccgcccccgcccccgcccccgtcgaggaccgccgcatcatacgcttccaacggtgagatcgtacgtcgaccgagctagctgatcgtactacatagatcatatatatgcatgcatgcatgcagtgcatgctagggtgcatgcaggaggagcaacgaggtaagtgatagcgcaataagggggttctcgaccagttgctaaaagctgtgaagtagctgaattttcttcagccggactgtgggagctgcaggcagtgctattagctaggctgtcaatgcagctttgtaatggagaaaatttatcagcttcacaggctaactaaactggtatttggacctagtactgtatacatagcattttgaacatgagacatagcaatttatgagc

SEQ ID NO: 66998 - protein, 432 aa, Triticum aestivum
  peptide (1)..(432): Ceres Seq. ID no. 15226674
KNVTWAHIDIRLLLPFLPLSPPSTSQSSPPTPPNPRDHASYIYCIFSRPCKARPLLLTDIPAEIKMGLRTCGAMEGEHVVASPFFEWLKPPPASPSSSRSSSTFSSSSSSMASGHQEDRSSVACLPLLRMLEEGKGAGGDHDHPAPPVKEEIMGSGAAEVLGPGVDLNIGLPVGGSCDDDIMEEESQEEDDDHDCDEEEEEEMDELEPNHGGCKVEAEEKEKHGEPVVSVEGSNSVSMPEFGVLGAESGVPMSCGYWIPTPAQILVGPVQFVCHVCNKSFNRYNNMQMHMWGHGREYRKGPESLKGTQTLALLKLPCYCCAAGCRNSVAHPRARPLKDFRTLQTHYKRKHGARPFRCRRCAKPFAVKGDWRTHEKNCGKRWFCACGSDFKHKRSLNDHVRSFGGDHLPVALDGAPAPAPAPVEDRRIIRFQR

SEQ ID NO: 66999 - protein, 367 aa, Triticum aestivum
  peptide (1)..(367): Ceres Seq. ID no. 15226675
MGLRTCGAMEGEHVVASPFFEWLKPPPASPSSSRSSSTFSSSSSSMASGHQEDRSSVACLPLLRMLEEGKGAGGDHDHPAPPVKEEIMGSGAAEVLGPGVDLNIGLPVGGSCDDDIMEEESQEEDDDHDCDEEEEEEMDELEPNHGGCKVEAEEKEKHGEPVVSVEGSNSVSMPEFGVLGAESGVPMSCGYWIPTPAQILVGPVQFVCHVCNKSFNRYNNMQMHMWGHGREYRKGPESLKGTQTLALLKLPCYCCAAGCRNSVAHPRARPLKDFRTLQTHYKRKHGARPFRCRRCAKPFAVKGDWRTHEKNCGKRWFCACGSDFKHKRSLNDHVRSFGGDHLPVALDGAPAPAPAPVEDRRIIRFQR

SEQ ID NO: 67000 - protein, 359 aa, Triticum aestivum
  peptide (1)..(359): Ceres Seq. ID no. 15226676
MEGEHVVASPFFEWLKPPPASPSSSRSSSTFSSSSSSMASGHQEDRSSVACLPLLRMLEEGKGAGGDHDHPAPPVKEEIMGSGAAEVLGPGVDLNIGLPVGGSCDDDIMEEESQEEDDDHDCDEEEEEEMDELEPNHGGCKVEAEEKEKHGEPVVSVEGSNSVSMPEFGVLGAESGVPMSCGYWIPTPAQILVGPVQFVCHVCNKSFNRYNNMQMHMWGHGREYRKGPESLKGTQTLALLKLPCYCCAAGCRNSVAHPRARPLKDFRTLQTHYKRKHGARPFRCRRCAKPFAVKGDWRTHEKNCGKRWFCACGSDFKHKRSLNDHVRSFGGDHLPVALDGAPAPAPAPVEDRRIIRFQR

SEQ ID NO: 67001 - DNA, 1072 bp, Triticum aestivum
  misc_feature (1)..(1072): Ceres Seq. ID no. 15225398
cccactgccactgtacccgtgacgagctgctgctgctaagggacacgcgcgcgcgcgtacacgcgaacagcagtgtcacgagcacgaccgacggccatggcgagcggcgacccgaagccggacgaaaactactcctccgatggcggtgacaccaccgacgccgagtcctccgacgagtccccgcatcagccgcggaggggcccccgcgccaaccccatactgacgcgcctctccgtgtcgcggaatccgagcccgctctccgccgccaccgcggcgcctggggtctgcctcctccgcttcgcctgggagtcggccgccggttccctcgtcggcgccgtcgttggatatggaaaaggtttggttactacaaaagggtttaaaggctcatttgctgacgctgcctcttctgctaagatatttgctgttcttgccggcgttcaaagcttggtttcttgctctttgagaaagctacgtggcaaagatgacgttattaacgcaggagttgcaggctgttgcactggccttgctttgagttttccaggtgcaccgcaaactctgattcagagctgtctggcctttggaactttctcgtacatcatagaaaagctcaataggcagcaacctgcgcttgcgctaccgtcagccgctggcctgaaggatctgaaggctggcccgagtgttcttccccccttcacgcttaacatgccgcacgatgcgatggaaggtttttcttcgtttcaaaactttttgtcaaagttccgagaaagctgaaggacctgggggcatgatactttgatatctgtccatgtaaatgcatcgagctgagctttttgtttccagtttagtgtatcgcgaaggatgatcattctactctgcctttgaacagttttgcaaattaccctccagaaggaaatcagcttagctggtgtccaacctgatgaataatcgtgtataacctgggcagcagattgcctgaacctttgtgatagtcctttactagcgaatgctcttgtatatgacgggtactcggtaatgtttcatcaggtctcagaataagactagactgataact

SEQ ID NO: 67002 - protein, 224 aa, Triticum aestivum
  peptide (1)..(224): Ceres Seq. ID no. 15225399
MASGDPKPDENYSSDGGDTTDAESSDESPHQPRRGPRANPILTRLSVSRNPSPLSAATAAPGVCLLRFAWESAAGSLVGAVVGYGKGLVTTKGFKGSFADAASSAKIFAVLAGVQSLVSCSLRKLRGKDDVINAGVAGCCTGLALSFPGAPQTLIQSCLAFGTFSYIIEKLNRQQPALALPSAAGLKDLKAGPSVLPPFTLNMPHDAMEGFSSFQNFLSKFRES

SEQ ID NO: 67003 - DNA, 1229 bp, Triticum aestivum
  misc_feature (1)..(1229): Ceres Seq. ID no. 13663874
tgaacccgtctcttactttacctccttggaggaaaacccaactggagcccctcctttttctgccttcggcttgggtcctatattataaaccaaagggaggaaggacagctagctagctgtatcagagagccccatacctagtcgatcgtctgctctcttctgcctagctaggtttaccctccttatctgcgtgtttggcagagttccgggctgagactaagaagaggtcgagatggggaggggaaggattgagatcaagaggatcgagaacaccactagccggcaggtgaccttctgcaagcgccggaacgggctcctcaaaaaggcctacgagctctccgtcctgtgcgacgccgaggtggcgctcatcgtcttctccagccgcggccgcctctacgagtactccaacaacagtgtcaaggctacaattgacaggtacaagaaggcacatgcttgtggctcaacctctggggtacctctcatagaagtcaatgctcagcaatactaccagcaagaagctgcaaagctgcgccaccagatccagatgctgcaaagcactaacaagcacttggttggtgattctgttgggaacctgtcactcaaggagctgaagcaactcgaaagccggcttgagaaaggcattgcgaagatcagggccaggaagaatgagctcctatcttctgagatcaactacatggtcaaaagggagatagagcttcagagtgacagcattgatctcagaaccaagattgcggaggaggagcagcggttgcagcaggtgactatcgccaggccctcggtggcgccggagctgaaccctttcaccgcactggacatgaagtgcttcttccctgccaacctcttcgaggcggcggtgcatgcgcacgcgcaggcacaggctcaggctcaggctcaggcctcgcttcagctgaacctaggctaccagcagcttgctccaccgggcgccggcgatgtggctcatcagttctagtcaacctgcaggagctcttgcttgactacacacactgcaataaaactggaaagtcgtcggcagtgttatcagtactcaactgttccggtcaaaccgtctggctaagatatatgtgtgctaagttttattgtctcaagtacctctaaatttgccgctggtgtagaaccaaatttctgagataaaacctattgattaataattatttttttccttttcttttttgatgaaaaggaggtcg

SEQ ID NO: 67004 - protein, 252 aa, Triticum aestivum
  peptide (1)..(252): Ceres Seq. ID no. 13663875
MGRGRIEIKRIENTTSRQVTFCKRRNGLLKKAYELSVLCDAEVALIVFSSRGRLYEYSNNSVKATIDRYKKAHACGSTSGVPLIEVNAQQYYQQEAAKLRHQIQMLQSTNKHLVGDSVGNLSLKELKQLESRLEKGIAKIRARKNELLSSEINYMVKREIELQSDSIDLRTKIAEEEQRLQQVTIARPSVAPELNPFTALDMKCFFPANLFEAAVHAHAQAQAQAQAQASLQLNLGYQQLAPPGAGDVAHQF

SEQ ID NO: 67005 - protein, 148 aa, Triticum aestivum
  peptide (1)..(148): Ceres Seq. ID no. 13663876
MLQSTNKHLVGDSVGNLSLKELKQLESRLEKGIAKIRARKNELLSSEINYMVKREIELQSDSIDLRTKIAEEEQRLQQVTIARPSVAPELNPFTALDMKCFFPANLFEAAVHAHAQAQAQAQAQASLQLNLGYQQLAPPGAGDVAHQF

SEQ ID NO: 67006 - DNA, 1082 bp, Triticum aestivum
  misc_feature (1)..(1082): Ceres Seq. ID no. 15179906
cccaaccgacacgcgaagccgagccagcagccccgccaaaccctccctccggcgaccccggcgatctactcccccggagacggccgccgcgtctccagctgccgcgctctcttcccaccgtgcctttattggctatcaactgtatagtttgtagtggtttctggggttcttcgcaaaatggtgaagctgacaatgatagcacgtgtcaccgatggccttccgctggcagaagggctggatgacgggcgggatcagaaggattctgatttctacaagcagcaagctaaacttcttttcaagaacttgtcaaaggggcaacatgaagcctcacggatgtcaattgagaccggatcatactttttccattacatcattgaaggccgagtatgctatctaacaatgtgcgaccgttcttatccaaagaaacttgcattccagtacttggaagatctgaaaaatgaatttgagagggtcaatgggagtcaaattgaaactgctgcaaggccttacgctttcattaagtttgatacatacatacagaagactaagaaactgtatttggataccagaacccagaggaacattgcgaaattgaacgatgagctctatgaggtgcatcaaatcatgactcgcaatgttcaagaagttytcggtgtcggtgagaagctagatcaggttagtgaaatgtcaagtaggttgacatttgacacgagaatytatgctgataaggcaaaggatttcaatcgccaggccttcattcggaagtatgctccggttgccattgtgattggggttgtaataatactgttytgggccaagaacaagatatggtgattttactaaacaaggaagccggcctgttataacactggagaaagaaattctggatcaagcgatgcttcgatgacttgtatcccgtatctgcccgttcaagggagtagtttgaagccacctttacacctcgttacaagcagttattcaagtgaatgaattcgttggttgtagtatagaccatatggcggacttgattttgtgaaccctgggaaccgtgcatacaagagctctgtagagtcgagttttcg

SEQ ID NO: 67007 - protein, 218 aa, Triticum aestivum
  peptide (1)..(218): Ceres Seq. ID no. 15179907
  misc_feature (158)..(158): Xaa is any aa, unknown or other
  misc_feature (180)..(180): Xaa is any aa, unknown or other
  misc_feature (211)..(211): Xaa is any aa, unknown or other
MVKLTMIARVTDGLPLAEGLDDGRDQKDSDFYKQQAKLLFKNLSKGQHEASRMSIETGSYFFHYIIEGRVCYLTMCDRSYPKKLAFQYLEDLKNEFERVNGSQIETAARPYAFIKFDTYIQKTKKLYLDTRTQRNIAKLNDELYEVHQIMTRNVQEVXGVGEKLDQVSEMSSRLTFDTRXYADKAKDFNRQAFIRKYAPVAIVIGVVIILXWAKNKIW

SEQ ID NO: 67008 - protein, 213 aa, Triticum aestivum
  peptide (1)..(213): Ceres Seq. ID no. 15179908
  misc_feature (153)..(153): Xaa is any aa, unknown or other
  misc_feature (175)..(175): Xaa is any aa, unknown or other
  misc_feature (206)..(206): Xaa is any aa, unknown or other
MIARVTDGLPLAEGLDDGRDQKDSDFYKQQAKLLFKNLSKGQHEASRMSIETGSYFFHYIIEGRVCYLTMCDRSYPKKLAFQYLEDLKNEFERVNGSQIETAARPYAFIKFDTYIQKTKKLYLDTRTQRNIAKLNDELYEVHQIMTRNVQEVXGVGEKLDQVSEMSSRLTFDTRXYADKAKDFNRQAFIRKYAPVAIVIGVVIILXWAKNKIW

SEQ ID NO: 67009 - protein, 166 aa, Triticum aestivum
  peptide (1)..(166): Ceres Seq. ID no. 15179909
  misc_feature (106)..(106): Xaa is any aa, unknown or other
  misc_feature (128)..(128): Xaa is any aa, unknown or other
  misc_feature (159)..(159): Xaa is any aa, unknown or other
MSIETGSYFFHYIIEGRVCYLTMCDRSYPKKLAFQYLEDLKNEFERVNGSQIETAARPYAFIKFDTYIQKTKKLYLDTRTQRNIAKLNDELYEVHQIMTRNVQEVXGVGEKLDQVSEMSSRLTFDTRXYADKAKDFNRQAFIRKYAPVAIVIGVVIILXWAKNKIW

SEQ ID NO: 67010 - DNA, 1907 bp, Triticum aestivum
  misc_feature (1)..(1907): Ceres Seq. ID no. 13660049
gcataaaggcggcaatgcaaaccgagcaactggaaggaatccccgcaccacgataatcacgaagcgcgacgcaagcgccacaactcaactcccccactgactgcctgtctcctccccaaaccccgcgccgcccaagcgcctcctcgccgccgccgccgccggacccagctagggttccggcgagctcgcggcctcgccgccccgccgcgcctccttcctcgagggctccgctcctcggtgagggcgcccgcccctgcgcccccttgctggatttggtagcagctatgcaaaaggatacaggctctggtgatgtttctccttctcatgtaggacgtgttagacatcggaggcgccctaatgagactgccaccgatgggaatagagccaatgggacggttttgcttgtcagcgaccagaacaagtacaagtcaatgcttatccgtacatattcaagtttgtggatgattggaggctttgtgttcgtagtttatatgggtcatctttatatctgggccatggtggttgtgattcaaatatttatggcaacagagctttttaacctactcagaagatccagcgaagagaaacaactgccagggttcaggctcctgaattggcacttcttcttcacggcaatgttgtttacttatgggcgttttcttagccgggagcttgttaacacagtaacttcagatcacttgctgtataagctcgtcagcggcctaataaagtatcagatgtttatttgctattttctttatattgcaggatttgtatggtttattttgactctgaagaagaagacatacaattatcagttcaaacagtatgcctggacgcacatgatccttttaacggtttttgcccaatcttctttcaccgtggcaaatatatttgaagggatgttctggtttcttctccctgcttcgctcattgtgatcaatgacattgctgcgtatttatttgggttttttctcgggagaacaccattgatcaagttatcaccaaagaaaacatgggaaggttttattggtgcatcggtgacaaccatcatctctgcttttctgttggcaaacgtaatgggtcattttcagtggttaacctgcccaagaaaggacctgtcgacaggatggcttacctgtgatcccggttctatgtttaagccagagcattactttttgggggattgggtgccacaatggtttccatggaaagaagttttccttttacccgtgcagtggcatgctttagcccttgggttgtttgcatcgataatagcaccatttggaggatttttcgcaagtggcttcaagagggcttttaaaataaaggattttggcgacagtatacctgggcatggtggaattactgaccgaatggattgtcaaatggtcatggcagtctttgcatacatatatcaccaatcatttatctcaccccacaatttctctgttgacacaatcttggatcagattgtaagaaacctaacctacgaggagcagaagtccttataccagcaactaggagagatcttccgtgaaaggcagtttatgcaaagctgaagatttatttgcatgaaccacacaaccacacaagacagctgcgtatggttcattatgtagttctagatctatgtacagcatcatagctcctctgtaccgtgatagagtgatgtccttatccagaccattgtacagaacggagtgtggataggggtttaggttcttgatccgctctccacttatgttgcttcttttaatcatctgcgctaattctctccttgttcgttatcatcagtgttcttgtaaaaacagagctggaaatgcttattcgtgtatatcactttgtcggtcttcgcatcaaatattttgtaagcccttagtttgccagtgtcctttgtttttttg

SEQ ID NO: 67011 - protein, 425 aa, Triticum aestivum
  peptide (1)..(425): Ceres Seq. ID no. 13660050
MQKDTGSGDVSPSHVGRVRHRRRPNETATDGNRANGTVLLVSDQNKYKSMLIRTYSSLWMIGGFVFVVYMGHLYIWAMVVVIQIFMATELFNLLRRSSEEKQLPGFRLLNWHFFFTAMLFTYGRFLSRELVNTVTSDHLLYKLVSGLIKYQMFICYFLYIAGFVWFILTLKKKTYNYQFKQYAWTHMILLTVFAQSSFTVANIFEGMFWFLLPASLIVINDIAAYLFGFFLGRTPLIKLSPKKTWEGFIGASVTTIISAFLLANVMGHFQWLTCPRKDLSTGWLTCDPGSMFKPEHYFLGDWVPQWFPWKEVFLLPVQWHALALGLFASIIAPFGGFFASGFKRAFKIKDFGDSIPGHGGITDRMDCQMVMAVFAYIYHQSFISPHNFSVDTILDQIVRNLTYEEQKSLYQQLGEIFRERQFMQS

SEQ ID NO: 67012 - protein, 376 aa, Triticum aestivum
  peptide (1)..(376): Ceres Seq. ID no. 13660051
MLIRTYSSLWMIGGFVFVVYMGHLYIWAMVVVIQIFMATELFNLLRRSSEEKQLPGFRLLNWHFFFTAMLFTYGRFLSRELVNTVTSDHLLYKLVSGLIKYQMFICYFLYIAGFVWFILTLKKKTYNYQFKQYAWTHMILLTVFAQSSFTVANIFEGMFWFLLPASLIVINDIAAYLFGFFLGRTPLIKLSPKKTWEGFIGASVTTIISAFLLANVMGHFQWLTCPRKDLSTGWLTCDPGSMFKPEHYFLGDWVPQWFPWKEVFLLPVQWHALALGLFASIIAPFGGFFASGFKRAFKIKDFGDSIPGHGGITDRMDCQMVMAVFAYIYHQSFISPHNFSVDTILDQIVRNLTYEEQKSLYQQLGEIFRERQFMQS

SEQ ID NO: 67013 - protein, 366 aa, Triticum aestivum
  peptide (1)..(366): Ceres Seq. ID no. 13660052
MIGGFVFVVYMGHLYIWAMVVVIQIFMATELFNLLRRSSEEKQLPGFRLLNWHFFFTAMLFTYGRFLSRELVNTVTSDHLLYKLVSGLIKYQMFICYFLYIAGFVWFILTLKKKTYNYQFKQYAWTHMILLTVFAQSSFTVANIFEGMFWFLLPASLIVINDIAAYLFGFFLGRTPLIKLSPKKTWEGFIGASVTTIISAFLLANVMGHFQWLTCPRKDLSTGWLTCDPGSMFKPEHYFLGDWVPQWFPWKEVFLLPVQWHALALGLFASIIAPFGGFFASGFKRAFKIKDFGDSIPGHGGITDRMDCQMVMAVFAYIYHQSFISPHNFSVDTILDQIVRNLTYEEQKSLYQQLGEIFRERQFMQS

SEQ ID NO: 67014 - DNA, 1142 bp, Triticum aestivum
  misc_feature (1)..(1142): Ceres Seq. ID no. 13659378
ctagaacatcctaatcgaaaaagctaggcagagcccgacccgtcaatcctttcccctccagaaccctccctcccgccccctcccctccccgccaccacccgccgccgccgcctcgccgcggaaaccctagacccctcccccgtccgccccgtccgttcgccgctccgtcgccgccgccacccgcttcagatctcgacgacttccgcccgcgatggaggactgggagaatgatgattttcaaccaatcgcgcctgttgtgaaagctcaacctcttaaaagtaactgggaagatgaagatgtggatgaagatgatgtcaaagaatcttgggaagaggaggaagagaaacctaagccacaacctgtagaaaagcctgctccaaaacctagtgctaaagctgctgtgaaaaaaggcaaacagccctcaacgagtactgaagtagttgatgatgatgttcttgatgatcctatttcagagaagcttcgccaacaaaggctagtggaagaagctgactttaaggcaacagcagagctttttgcaaagaaggacggcagtgaaaagtcactagagactttcatcccgaagtctgagagcgactttgcggaatatgctgagcttatcgcaaacaaaattcgcccgtatgagaaaagctttcactacatgggtctacttaagaatgtcatgagactttccatggcatcgttgaaaggtgcggatgcgaaagaaatatcctcctctgtcacggcaattgctaatgaaaagatcaaggctgagaaagaagctgcagcaggcaaaaagaaaggaggagcaaaaaagaagcagctccatatagagaaaggagaggaggactttgttgcccgaccgggtgcatcttttgacgatcccgacgagttcgacttcatgtgattggctgggaggggaatagcctcttccgtgtaatacctttgaggcaaagcagagactagggtttgcggcggtctgtattcccttcagaggcacctgaacacttggaactgcgtgggaacatgtcttatctatttgaggttgattttgacactcggagaataagaagaacgcttgcggctccctgaggcgtttttcttgttcaaaaaaaaaaaaaaaaaagcttatcgataccgtcgac

SEQ ID NO: 67015 - protein, 230 aa, Triticum aestivum
  peptide (1)..(230): Ceres Seq. ID no. 13659379
MEDWENDDFQPIAPVVKAQPLKSNWEDEDVDEDDVKESWEEEEEKPKPQPVEKPAPKPSAKAAVKKGKQPSTSTEVVDDDVLDDPISEKLRQQRLVEEADFKATAELFAKKDGSEKSLETFIPKSESDFAEYAELIANKIRPYEKSFHYMGLLKNVMRLSMASLKGADAKEISSSVTAIANEKIKAEKEAAAGKKKGGAKKKQLHIEKGEEDFVARPGASFDDPDEFDFM

SEQ ID NO: 67016 - DNA, 796 bp, Triticum aestivum
  misc_feature (1)..(796): Ceres Seq. ID no. 12621592
atattattattaggcttcccgtcgtgggccgctcactgggcttctcctctgcttctctcggccgaaaccccagctcagcgagcagagacccggcggcggcggcgatatgcagttcctccgggcggtcggcggcgggggaggaggggcggggtcgacggcgtgggaggcgttcaggaggcatttctcgcggaagcgggcggtggacatccggcggatcaaccccaaggtgcccaaggaggaggccgtggccatctccggccgcctcctccagatcctcgccgaccacgggcccctcaccgtcggcaacacctggaaccacgccaaggatgctgcgatcgatggcctgaacagcaagacccacatgaagatcctgctcaagtggatgtgggggaggaggatcatcaagctctcctgcacgcaggccggcaacaccaagaagttcctctactccccgttcaccgccgacgacgccgaggcggccgaggagccatcgccagccgaggagcagccgaagaagaaagggtggaaagggaaacacccaaagtaccagaccaagaaacagcctgcggcagcagcttgaccctggtctgctgagcattctttcgggcattttcccgctgctgttggcttttctgttttacttagcacggaagagttcaccgccatatctgtttgacaacaaaacatatattttgtgatggaccatttgggtgggcacaaattacgctggcaggccgatttgttcggctctgtgttgtagactctgtctggtagaataatgatgacacgataatcc

SEQ ID NO: 67017 - protein, 197 aa, Triticum aestivum
  peptide (1)..(197): Ceres Seq. ID no. 12621593
ILLLGFPSWAAHWASPLLLSAETPAQRAETRRRRRYAVPPGGRRRGRRGGVDGVGGVQEAFLAEAGGGHPADQPQGAQGGGRGHLRPPPPDPRRPRAPHRRQHLEPRQGCCDRWPEQQDPHEDPAQVDVGEEDHQALLHAGRQHQEVPLLPVHRRRRRGGRGAIASRGAAEEERVERETPKVPDQETACGSSLTLVC

SEQ ID NO: 67018 - protein, 157 aa, Triticum aestivum
  peptide (1)..(157): Ceres Seq. ID no. 12621594
MQFLRAVGGGGGGAGSTAWEAFRRHFSRKRAVDIRRINPKVPKEEAVAISGRLLQILADHGPLTVGNTWNHAKDAAIDGLNSKTHMKILLKWMWGRRIIKLSCTQAGNTKKFLYSPFTADDAEAAEEPSPAEEQPKKKGWKGKHPKYQTKKQPAAAA

SEQ ID NO: 67019 - protein, 114 aa, Triticum aestivum
  peptide (1)..(114): Ceres Seq. ID no. 12621595
IIIRLPVVGRSLGFSSASLGRNPSSASRDPAAAAICSSSGRSAAGEEGRGRRRGRRSGGISRGSGRWTSGGSTPRCPRRRPWPSPAASSRSSPTTGPSPSATPGTTPRMLRSMA

SEQ ID NO: 67020 - DNA, 1629 bp, Triticum aestivum
  misc_feature (1)..(1629): Ceres Seq. ID no. 14301826
cctaagtacctctcccgcacctctcctccttcccgtcggcaccgccgccatctttgctaggtcttcctccagatccaactcacagcttccatgcccataggtaccgccgcaaccaccatgcccaccgttgcctcctggatcctcctccatgtccatgccaccgtccgccaacctcccaaaaacgcctccgccgtcgcccactcgagcaataacgagaaaatatatgcttcccttctccgccagcgcccgccggttccctccaatctgtacgtgtactgcgcagacggcacattcggagagaccccccgcgtgctgtcaatggtggacgacatcatcctcttccacgcatacatcggtcctgcgttcccctcccccaagccatggaagggggacttcttcatataccggtctgactccaatcgacggtctctggagcgtctaccgcacccccaaggtatgatcggaagggacgatccattcggcatctttccccgagagggcgacagctacacaatcgcggcgctgttacccagcatatcctctatgtacgattttgaactccacctcttcgactcggagactcggatttggagcaggaagaatctgactgttgggtcgcgacaggaaaggttcaaggttgatatccccatcaacataagtcagatcttacaccataacacatccactgtgatcactcttggaggctccatgtgctgggttgatctttggcgtggtatattgttctgtgacatgctctccgagaaacatgcactcacaggtgttccactgccactgccattgatctactattctggtgatagaagcaagatcctaggacctgcgaagtgtcaccgtagcattgcttttcttgatggatgcaccaggctcgttgaggtgaattctgatgtcagtattgccgaaggaactgaatttggttgtggccgaactgaagactggacgattaccacatggtacaacaataatgtgcataataattcttatgatgattggcatccggacatcacactaaaagcttccaacatcatcctgggcaaccactccgtgaagctgccgttaggcttgcagtacctttttttctgacccaactatttgcatgaacaatagggatggctatattgtttacctgactgccagggagaagtatatgcattctaagtcatggattattgctattgatttgaaaaagcgcaaggtgcaaagtgtggttctgtctggtcctgtacctccgccaatgccgcgcattgacactaactactgcacttgtagtatctccaagtactgtaccagcacttcaacagtatcaggtggtacttaagatgctgagcagtcgtgtggcagtaaattcaatgtacgatgtctacaagttcctggtggctgagattgaggaatgcatgtgtttatcacttactacattccaaacaatatattgttctcctggtcctgcttgacatcatatatctatcctaattagctatatcctatgtagtgaactggttaattattattggcagtgaactgattacttgttcttgttggacattatgtatcttgaacattttgtactagcatgtttatggtttaatttttttgttcggtctgcttggcttt

SEQ ID NO: 67021 - protein, 336 aa, Triticum aestivum
  peptide (1)..(336): Ceres Seq. ID no. 14301827
MPIGTAATTMPTVASWILLHVHATVRQPPKNASAVAHSSNNEKIYASLLRQRPPVPSNLYVYCADGTFGETPRVLSMVDDIILFHAYIGPAFPSPKPWKGDFFIYRSDSNRRSLERLPHPQGMIGRDDPFGIFPREGDSYTIAALLPSISSMYDFELHLFDSETRIWSRKNLTVGSRQERFKVDIPINISQILHHNTSTVITLGGSMCWVDLWRGILFCDMLSEKHALTGVPLPLPLIYYSGDRSKILGPAKCHRSIAFLDGCTRLVEVNSDVSIAEGTEFGCGRTEDWTITTWYNNNVHNNSYDDWHPDITLKASNIILGNHSVKLPLGLQYLFF

SEQ ID NO: 67022 - protein, 327 aa, Triticum aestivum
  peptide (1)..(327): Ceres Seq. ID no. 14301828
MPTVASWILLHVHATVRQPPKNASAVAHSSNNEKIYASLLRQRPPVPSNLYVYCADGTFGETPRVLSMVDDIILFHAYIGPAFPSPKPWKGDFFIYRSDSNRRSLERLPHPQGMIGRDDPFGIFPREGDSYTIAALLPSISSMYDFELHLFDSETRIWSRKNLTVGSRQERFKVDIPINISQILHHNTSTVITLGGSMCWVDLWRGILFCDMLSEKHALTGVPLPLPLIYYSGDRSKILGPAKCHRSIAFLDGCTRLVEVNSDVSIAEGTEFGCGRTEDWTITTWYNNNVHNNSYDDWHPDITLKASNIILGNHSVKLPLGLQYLFF

SEQ ID NO: 67023 - protein, 260 aa, Triticum aestivum
  peptide (1)..(260): Ceres Seq. ID no. 14301829
MVDDIILFHAYIGPAFPSPKPWKGDFFIYRSDSNRRSLERLPHPQGMIGRDDPFGIFPREGDSYTIAALLPSISSMYDFELHLFDSETRIWSRKNLTVGSRQERFKVDIPINISQILHHNTSTVITLGGSMCWVDLWRGILFCDMLSEKHALTGVPLPLPLIYYSGDRSKILGPAKCHRSIAFLDGCTRLVEVNSDVSIAEGTEFGCGRTEDWTITTWYNNNVHNNSYDDWHPDITLKASNIILGNHSVKLPLGLQYLFF

SEQ ID NO: 67024 - DNA, 1898 bp, Triticum aestivum
  misc_feature (1)..(1898): Ceres Seq. ID no. 15224862
acttttccttgcggacggacgtgccaaccgtttccttccgaaaacaagaaccggcggccgccgcccgagctcgaactcgacagccatggcctcccaactagggccgccgacggcgagatatgccccacctgctcccagcaccatcacttctataggcgacgaccttctccgcgagatcttcctccatctcccctccctcccgagcctcgtccgcgccgcccttgcctgccgcaccttcctccacgctgtccgttcgtcccccgtcttccgccggggattccggtcgctccacccatccccattccttggcctctttatcgagtcctacagctgttccctcccttctttcgtccccctccgccgccggtccgacccggacctcgccgccgcaatacgcggcggcgatctcttcctcactcgactcccggaggacaacgacgacccctctcccgggtgggagatccagggctgccaagacggctacgtcgtcctgctcaaccggagcaccgagcagattgccgcctacaaccccctcacactggctctggatttcctccctccactgccccatgagatgtcccgctcccgctccctcgagatccacgtcgtcttctcccaagagggccaggggtcgttccgtgcggtctgcgtccgccacggcaggtccctgcggcgggcgcgggcgcgcatcgccgtcttctcatcggacgacaggggcaaggggtggctggttatgccggcggtggacaccgcgacgccacagcctggggatggtggagttgacaagcccatgtttcacactggcaccctggtgaatggattcatctattggaagcgcaagacccaagcctgcatgctcgtgctcaacactgcgacattgcagttctctgaaatggatttgccgcagcccctaaaagggaaacactccacaaacttcaggcttggtcagaccaaggatggcgagctctgtatcgtttgcgcagacgactcccgtgcaaaggagtggacgcttgctgtttggttctggagagccgacgatggcggtgtcaagagatggatggagaagaggtttccgttgcacaagtttgttgagttcaccgagtgttcaggagaagatcatgtcgtggtgaacagtttggcagttgtcgacggctttgtgtacctgtctagttactgtcacgcaagtactgaatctcctgagtggtttctatccttctgccttgaaacagcggagcttatcaaactcttccggggtacatttgacagccctctccatccctacatcatggcctggccaccttctttggtatgcaacaaggaggattcagagaccaaagtaactggggccaatgttgtagaagatggtttgtaagcacagagaaatttccctctgttctcgtcagtgttgcagtcatgcaaagaagctttggttagtgatgatggggcaaaatttgcagagatagaggcctttttactttctagggtgagaagaagtctgagcaaaatggctgctctacatacagaattgacaactgcgaggagtcacatcttgaggataggtgttcttcgatagctacagggaatagacagaagcagagagctgatgatcaatttacaaggagaggcagtggagaacctgtgaccacttatttgccagttgaacttgcctctttggaatggtcaccgcgtatttcttctgttgagatgatcggcgtatttcttctgttgagatgagcttttattcagcgtgcctagctcccaagagaccgagtgagcttttatcttgatcttcattgaggtttctgtattgctgtctatgattgagtttgttgttgcacttgatccatcttacagcactttatgtccatcctaatattttagtttaaacagttcttctc

SEQ ID NO: 67025 - protein, 456 aa, Triticum aestivum
  peptide (1)..(456): Ceres Seq. ID no. 15224863
LFLADGRANRFLPKTRTGGRRPSSNSTAMASQLGPPTARYAPPAPSTITSIGDDLLREIFLHLPSLPSLVRAALACRTFLHAVRSSPVFRRGFRSLHPSPFLGLFIESYSCSLPSFVPLRRRSDPDLAAAIRGGDLFLTRLPEDNDDPSPGWEIQGCQDGYVVLLNRSTEQIAAYNPLTLALDFLPPLPHEMSRSRSLEIHVVFSQEGQGSFRAVCVRHGRSLRRARARIAVFSSDDRGKGWLVMPAVDTATPQPGDGGVDKPMFHTGTLVNGFIYWKRKTQACMLVLNTATLQFSEMDLPQPLKGKHSTNFRLGQTKDGELCIVCADDSRAKEWTLAVWFWRADDGGVKRWMEKRFPLHKFVEFTECSGEDHVVVNSLAVVDGFVYLSSYCHASTESPEWFLSFCLETAELIKLFRGTFDSPLHPYIMAWPPSLVCNKEDSETKVTGANVVEDGL

SEQ ID NO: 67026 - protein, 428 aa, Triticum aestivum
  peptide (1)..(428): Ceres Seq. ID no. 15224864
MASQLGPPTARYAPPAPSTITSIGDDLLREIFLHLPSLPSLVRAALACRTFLHAVRSSPVFRRGFRSLHPSPFLGLFIESYSCSLPSFVPLRRRSDPDLAAAIRGGDLFLTRLPEDNDDPSPGWEIQGCQDGYVVLLNRSTEQIAAYNPLTLALDFLPPLPHEMSRSRSLEIHVVFSQEGQGSFRAVCVRHGRSLRRARARIAVFSSDDRGKGWLVMPAVDTATPQPGDGGVDKPMFHTGTLVNGFIYWKRKTQACMLVLNTATLQFSEMDLPQPLKGKHSTNFRLGQTKDGELCIVCADDSRAKEWTLAVWFWRADDGGVKRWMEKRFPLHKFVEFTECSGEDHVVVNSLAVVDGFVYLSSYCHASTESPEWFLSFCLETAELIKLFRGTFDSPLHPYIMAWPPSLVCNKEDSETKVTGANVVEDGL

SEQ ID NO: 67027 - protein, 265 aa, Triticum aestivum
  peptide (1)..(265): Ceres Seq. ID no. 15224865
MSRSRSLEIHVVFSQEGQGSFRAVCVRHGRSLRRARARIAVFSSDDRGKGWLVMPAVDTATPQPGDGGVDKPMFHTGTLVNGFIYWKRKTQACMLVLNTATLQFSEMDLPQPLKGKHSTNFRLGQTKDGELCIVCADDSRAKEWTLAVWFWRADDGGVKRWMEKRFPLHKFVEFTECSGEDHVVVNSLAVVDGFVYLSSYCHASTESPEWFLSFCLETAELIKLFRGTFDSPLHPYIMAWPPSLVCNKEDSETKVTGANVVEDGL

SEQ ID NO: 67028 - DNA, 1549 bp, Triticum aestivum
  misc_feature (1)..(1549): Ceres Seq. ID no. 14316017
acacgccccggctccaaagcgcaggccttctctttccccacaccacaccacccaccggcctcctcccacccgaacccccattaaccccagaggagagatcccccgtcctctgacgccagcggccatgtccgtcacgcgggttcttgcgctgcttgtcgcggcggcgctggcggccgcggcgccggcgcgcgtgggcgcggcgggggcgtgcgcggcggagaggttctccaagaaccgcgtgtacgccgcctgcaccgacctgcccaccctgggcgcgtccgtgcactggacctacgacccggcggcctcctccctctccgtggcgttcgtcgccgcgccgccctcgtccggcggctgggtcgcctggggcctcaacccctccggcgacggcatgagcggcacgcaggcgctcgtcgcctcgcccacgggcagcggcggcgcgtacggcgtccagacgttcgacatccagggcacatcgctcggatcgccgggccccatcgcctacaagacgtccgacctcgccgccgaggtcggcgccgacggccgcgtccagatgttcgggaagctcgcgctccagaacggcaccggggaggtgaaccaggtctggcaggtgggaccggcgtcgggcgggagcatcggcatacacgccatggccgccgccaacatgggggccaaggggaagctcaacctcgtcacgggggcgaccacagccgtcagcggaggcagcatcctcaggaagaaaaatacccatggaattctgaatgctgtgagctgggggattcttctgccaatgggaggcatagttgctagatacctcaagacattcaaatcagccgaccctgcctggttctaccttcacgttgcttgccagctgatcgggtatgctgtgggagtgtctggctgggccaccggcattcatctaggaaatctgtccaagggaatcacctactcgcttcacaggaacatcgggatcgccgtatttgctctcggtaccgttcagatctttgcgctgttcctgaggccgaagaaggatcacaagctgcgggtgtactggaacgtgtaccaccactcggtgggctacaccatcatcatcctgggcatcgtcaacatcttcaagggcatgagcatcctggacgtggcgcagaagtggaagacgggctacatcatcgccatcggcatcctgggcggcgtcgcggtggcgctggaggtgatcacctgggccatcgtgctcaagaggaggaagacggaggacaaggcctacaacggcggcgcctccaacaacaacaacggccatctgcccatgtgatgcgatgtgatgtgattctttctcggtggccggagtctgtgggctgtgttgagctgagctgcgtgtgtgtgagcatggattggcagatgctatgtaggttagggccgggccttagtggccttcgtctctctgtttctttttttatgatgatgatgatgattgatagatctgtgtgtatagtactgctgcacattatattagttattatatactggaatgagagaggtgatgccggtcgatgct

SEQ ID NO: 67029 - protein, 434 aa, Triticum aestivum
  peptide (1)..(434): Ceres Seq. ID no. 14316018
HAPAPKRRPSLSPHHTTHRPPPTRTPINPRGEIPRPLTPAAMSVTRVLALLVAAALAAAAPARVGAAGACAAERFSKNRVYAACTDLPTLGASVHWTYDPAASSLSVAFVAAPPSSGGWVAWGLNPSGDGMSGTQALVASPTGSGGAYGVQTFDIQGTSLGSPGPIAYKTSDLAAEVGADGRVQMFGKLALQNGTGEVNQVWQVGPASGGSIGIHAMAAANMGAKGKLNLVTGATTAVSGGSILRKKNTHGILNAVSWGILLPMGGIVARYLKTFKSADPAWFYLHVACQLIGYAVGVSGWATGIHLGNLSKGITYSLHRNIGIAVFALGTVQIFALFLRPKKDHKLRVYWNVYHHSVGYTIIILGIVNIFKGMSILDVAQKWKTGYIIAIGILGGVAVALEVITWAIVLKRRKTEDKAYNGGASNNNNGHLPM

SEQ ID NO: 67030 - protein, 393 aa, Triticum aestivum
  peptide (1)..(393): Ceres Seq. ID no. 14316019
MSVTRVLALLVAAALAAAAPARVGAAGACAAERFSKNRVYAACTDLPTLGASVHWTYDPAASSLSVAFVAAPPSSGGWVAWGLNPSGDGMSGTQALVASPTGSGGAYGVQTFDIQGTSLGSPGPIAYKTSDLAAEVGADGRVQMFGKLALQNGTGEVNQVWQVGPASGGSIGIHAMAAANMGAKGKLNLVTGATTAVSGGSILRKKNTHGILNAVSWGILLPMGGIVARYLKTFKSADPAWFYLHVACQLIGYAVGVSGWATGIHLGNLSKGITYSLHRNIGIAVFALGTVQIFALFLRPKKDHKLRVYWNVYHHSVGYTIIILGIVNIFKGMSILDVAQKWKTGYIIAIGILGGVAVALEVITWAIVLKRRKTEDKAYNGGASNNNNGHLPM

SEQ ID NO: 67031 - protein, 304 aa, Triticum aestivum
  peptide (1)..(304): Ceres Seq. ID no. 14316020
MSGTQALVASPTGSGGAYGVQTFDIQGTSLGSPGPIAYKTSDLAAEVGADGRVQMFGKLALQNGTGEVNQVWQVGPASGGSIGIHAMAAANMGAKGKLNLVTGATTAVSGGSILRKKNTHGILNAVSWGILLPMGGIVARYLKTFKSADPAWFYLHVACQLIGYAVGVSGWATGIHLGNLSKGITYSLHRNIGIAVFALGTVQIFALFLRPKKDHKLRVYWNVYHHSVGYTIIILGIVNIFKGMSILDVAQKWKTGYIIAIGILGGVAVALEVITWAIVLKRRKTEDKAYNGGASNNNNGHLPM

SEQ ID NO: 67032 - DNA, 1681 bp, Triticum aestivum
  misc_feature (1)..(1681): Ceres Seq. ID no. 15169501
acttctccaccgtgactgcgactgccactgcgactgcgactgctctctcctgactggagtcagtgtctcgggtgctgctgacccgccgtcttctccgcttgccgtgccgccatcgccatggatggggtttcgacggagcctcgccacccgctcctgcaggccgttctcgacggcgacctccgcctcctcaaagagatggcgggcgtcgtggcggcggacgtcggcatcagggcgcgcgcgctgactgtggcggtcatggaagggcggctggacatctgtaggtgcctcgtcgaggaccacggcgtcgatgtcaaccagcgcaccttcacaggtgacactcctctggccatttctacgacttatgggacgcctgctaccaccagatatcttctggatcgtggtgctgatccaactttagctggtgccctgtggccacctcttcatgctgctgcaatttttggacaatgtgagatagtggaattgctgctttcaactggaattgatgtggatcatttcgattctgtgtatgggaccgcattgcatgttgccgctactaatggtcaagatggctcgatgaatattttgttgcagcatcatgcagatcccaataaggttttccgccttgatagtaccccgttaaggctggccatgatttctgaatcactggaatgtgtgaagctactcattaaggctggcgctgatgtgaataaaattgactatactggtgttacttacttgatgatagcagcgggcaatggcttatctgataccctgaaatgcttactagatgctggcgctaacccagatattgatgatgggtttggtacaactccaatcgaaattgccgccctccaagccagatgggatatggttgcgatgttatttcctttaacttctcccatttcaagattgccggattggagtgttgatggaattatttctcatgtgcaatctttcggtttgaagccgagggatatacatctatgtgaagcgaaaagagctgaactaaagttgcaagctacagaggcttttaagagaaaggaatatatcatagcaggagacctatatacttgtgcaatgagttttcagcctagtccaaaaggtcttgcaaacctgctagcacataggagtttctgtatgttgcacgcgggaataggaaaagaggctctctccgactctgctaggtgcacagtgctacgacctctttggcccaaaggttactatcgactaggagcagcctttatgttgctacaggactatggaaaagcagctcagacgttcgaagctggcttgaaactggaccctacaaatgcggatatggcaaacgctttaagggaagcccaagagacggcgaggaatcctcctcgcaccaggggggctggagtgccttcacccatttggaatgagacgttcctggagtgattgaggcgctgtttcgttgctatgtccagtccagggtatgcatgcctgcctgttattctcttttcctatgtccagtccaaggtatgcgtgcctgttattctctggagagactgagactctgtttcgttgcttaagactctgttttgtgttgaaccgtccaagagtactgatctcatgtgctatattgtagaccgtgtaaacatggctatctgtacattgtggttatatgtcgtctccgtgaaccattgtggttatatac

SEQ ID NO: 67033 - protein, 434 aa, Triticum aestivum
  peptide (1)..(434): Ceres Seq. ID no. 15169502
MDGVSTEPRHPLLQAVLDGDLRLLKEMAGVVAADVGIRARALTVAVMEGRLDICRCLVEDHGVDVNQRTFTGDTPLAISTTYGTPATTRYLLDRGADPTLAGALWPPLHAAAIFGQCEIVELLLSTGIDVDHFDSVYGTALHVAATNGQDGSMNILLQHHADPNKVFRLDSTPLRLAMISESLECVKLLIKAGADVNKIDYTGVTYLMIAAGNGLSDTLKCLLDAGANPDIDDGFGTTPIEIAALQARWDMVAMLFPLTSPISRLPDWSVDGIISHVQSFGLKPRDIHLCEAKRAELKLQATEAFKRKEYIIAGDLYTCAMSFQPSPKGLANLLAHRSFCMLHAGIGKEALSDSARCTVLRPLWPKGYYRLGAAFMLLQDYGKAAQTFEAGLKLDPTNADMANALREAQETARNPPRTRGAGVPSPIWNETFLE

SEQ ID NO: 67034 - protein, 408 aa, Triticum aestivum
  peptide (1)..(408): Ceres Seq. ID no. 15169503
MAGVVAADVGIRARALTVAVMEGRLDICRCLVEDHGVDVNQRTFTGDTPLAISTTYGTPATTRYLLDRGADPTLAGALWPPLHAAAIFGQCEIVELLLSTGIDVDHFDSVYGTALHVAATNGQDGSMNILLQHHADPNKVFRLDSTPLRLAMISESLECVKLLIKAGADVNKIDYTGVTYLMIAAGNGLSDTLKCLLDAGANPDIDDGFGTTPIEIAALQARWDMVAMLFPLTSPISRLPDWSVDGIISHVQSFGLKPRDIHLCEAKRAELKLQATEAFKRKEYIIAGDLYTCAMSFQPSPKGLANLLAHRSFCMLHAGIGKEALSDSARCTVLRPLWPKGYYRLGAAFMLLQDYGKAAQTFEAGLKLDPTNADMANALREAQETARNPPRTRGAGVPSPIWNETFLE

SEQ ID NO: 67035 - protein, 388 aa, Triticum aestivum
  peptide (1)..(388): Ceres Seq. ID no. 15169504
MEGRLDICRCLVEDHGVDVNQRTFTGDTPLAISTTYGTPATTRYLLDRGADPTLAGALWPPLHAAAIFGQCEIVELLLSTGIDVDHFDSVYGTALHVAATNGQDGSMNILLQHHADPNKVFRLDSTPLRLAMISESLECVKLLIKAGADVNKIDYTGVTYLMIAAGNGLSDTLKCLLDAGANPDIDDGFGTTPIEIAALQARWDMVAMLFPLTSPISRLPDWSVDGIISHVQSFGLKPRDIHLCEAKRAELKLQATEAFKRKEYIIAGDLYTCAMSFQPSPKGLANLLAHRSFCMLHAGIGKEALSDSARCTVLRPLWPKGYYRLGAAFMLLQDYGKAAQTFEAGLKLDPTNADMANALREAQETARNPPRTRGAGVPSPIWNETFLE

SEQ ID NO: 67036 - DNA, 1635 bp, Triticum aestivum
  misc_feature (1)..(1635): Ceres Seq. ID no. 14316049
gagaaaaggactcgaataataaaaactcataaacaactccgccctcgggaccgagaccgagacccgaagaagagggagatcgctcgctcgctgcacaacgcccgcccacgccgccgtctccctctccctctccgcctccctccgtccaaccgcagcccgctccacctcatggcgtcgctctccctctccctccgcgcctccgcctcctcggccgcagccggatcccgcgccgccgccccaatcaaggcgtcgtgtgtgaggagcaaggttacctgcagcttaccatccatcagagctacctcctcacctgctagaagcattgagcccgtaagagccaccgccacacaggcgccccctgccacccctcaatcttctagcggagagaagacaaaggtcggcatcaatggttttgggcggattgggaggttagttctgcgaattgcaattgatagagatgacattgaagttgtggctgtcaatgatccgtttatcgatgctaagtacatggcctacatgtttaagtatgattccacacacggtccattcaaaggaaccataacagttctggatgagtcaaccttggagattaatgggaagaaagtctcagttacaagcaaaagggacccgtcagatatcccttggggtaactttggagctgaatatgttgttgaatcatctggtgtttttacaacagttgagaaagcttcagcacatttgaaggggggtgcaaagaaagtggtgatatcggctccgtcagcggatgctcccatgtttgttgttggagtaaatgagaagaattacaaccctagcatggatgtcgtctctaatgctagttgtaccaccaactgtcttgctcctgttgccaaggttgtccacgaggagtttggcattcttgaaggcctaatgacaactgtccatgccacaacatccactcaaaagactgttgatggtccttcaatgaaggactggaggggaggacgtggtgctggtcaaaacatcatccctagctctacgggtgcagcaaaggctgttggaaaggtccttccagctttaaatggaaagctcactggcatggccttccgggttcctacacctaacgtatctgttgttgatctgacctgccgacttgagaaaaatgcttcatatgaagatgtgaaagcagctatcaaggacgcatcagaaggttcgcttaaaggtattctaggctacacagatgaggatgttgtttcaaacgatttcgttggtgacacaaggtcgagcatatttgatgccaatgctggtatgggactaagttcatctttcatgaagctcgtctcctggtacgacaacgagtggggctacagcaaccgtgtcctcgatctgatcgggcacatgtctcttgttgcctaacgatgatgccacgatacgatttagcacagaaggtctcctcgcgtagtgtaggaagtgaaggctgcaattttgatggccattttcgtatcctggaataataataattctgtacgatgaaaacaatcaaatcaatcggcgtcgacttgaagctgcagaacgctcatgctggtctgtaaaaccccataattgaactgttgtgggtggacaataaacccaatctccgactcgtcgagtcatagtgctgtt

SEQ ID NO: 67037 - protein, 462 aa, Triticum aestivum
  peptide (1)..(462): Ceres Seq. ID no. 14316050
EKRTRIIKTHKQLRPRDRDRDPKKREIARSLHNARPRRRLPLPLRLPPSNRSPLHLMASLSLSLRASASSAAAGSRAAAPIKASCVRSKVTCSLPSIRATSSPARSIEPVRATATQAPPATPQSSSGEKTKVGINGFGRIGRLVLRIAIDRDDIEVVAVNDPFIDAKYMAYMFKYDSTHGPFKGTITVLDESTLEINGKKVSVTSKRDPSDIPWGNFGAEYVVESSGVFTTVEKASAHLKGGAKKVVISAPSADAPMFVVGVNEKNYNPSMDVVSNASCTTNCLAPVAKVVHEEFGILEGLMTTVHATTSTQKTVDGPSMKDWRGGRGAGQNIIPSSTGAAKAVGKVLPALNGKLTGMAFRVPTPNVSVVDLTCRLEKNASYEDVKAAIKDASEGSLKGILGYTDEDVVSNDFVGDTRSSIFDANAGMGLSSSFMKLVSWYDNEWGYSNRVLDLIGHMSLVA

SEQ ID NO: 67038 - protein, 406 aa, Triticum aestivum
  peptide (1)..(406): Ceres Seq. ID no. 14316051
MASLSLSLRASASSAAAGSRAAAPIKASCVRSKVTCSLPSIRATSSPARSIEPVRATATQAPPATPQSSSGEKTKVGINGFGRIGRLVLRIAIDRDDIEVVAVNDPFIDAKYMAYMFKYDSTHGPFKGTITVLDESTLEINGKKVSVTSKRDPSDIPWGNFGAEYVVESSGVFTTVEKASAHLKGGAKKVVISAPSADAPMFVVGVNEKNYNPSMDVVSNASCTTNCLAPVAKVVHEEFGILEGLMTTVHATTSTQKTVDGPSMKDWRGGRGAGQNIIPSSTGAAKAVGKVLPALNGKLTGMAFRVPTPNVSVVDLTCRLEKNASYEDVKAAIKDASEGSLKGILGYTDEDVVSNDFVGDTRSSIFDANAGMGLSSSFMKLVSWYDNEWGYSNRVLDLIGHMSLVA

SEQ ID NO: 67039 - protein, 294 aa, Triticum aestivum
  peptide (1)..(294): Ceres Seq. ID no. 14316052
MAYMFKYDSTHGPFKGTITVLDESTLEINGKKVSVTSKRDPSDIPWGNFGAEYVVESSGVFTTVEKASAHLKGGAKKVVISAPSADAPMFVVGVNEKNYNPSMDVVSNASCTTNCLAPVAKVVHEEFGILEGLMTTVHATTSTQKTVDGPSMKDWRGGRGAGQNIIPSSTGAAKAVGKVLPALNGKLTGMAFRVPTPNVSVVDLTCRLEKNASYEDVKAAIKDASEGSLKGILGYTDEDVVSNDFVGDTRSSIFDANAGMGLSSSFMKLVSWYDNEWGYSNRVLDLIGHMSLVA

SEQ ID NO: 67040 - DNA, 445 bp, Triticum aestivum
  misc_feature (1)..(445): Ceres Seq. ID no. 13660231
aatcacgcgcgtcaggctccgtaattgttaccgatccgagtctgatttcgccatcacgcgtcccaggctccataaattccagggatcgtccttatggcggtttcggcgactgagattttgcagcatccgctagaggagtaggtccagaggattcgagatctgccttgcccgatccttgggggagattatggccgtgataaaggtgcgagtgagcaaactccgcgaggcaaagagtgttgaggacagcaggcacaagagtgccagtcgcgagccaaaggaaggccagagcagcaacccaaagagggccaatggcgaggcaccagttgagcctcagcagagggaagtttgtgcattttgcgacgatggtggtgaattaatctgctgtgatggtggatgtctgagatccttccacccaaccaaagaacatggtgaaagatctatgtgc

SEQ ID NO: 67041 - protein, 86 aa, Triticum aestivum
  peptide (1)..(86): Ceres Seq. ID no. 13660232
MAVIKVRVSKLREAKSVEDSRHKSASREPKEGQSSNPKRANGEAPVEPQQREVCAFCDDGGELICCDGGCLRSFHPTKEHGERSMC

SEQ ID NO: 67042 - protein, 43 aa, Triticum aestivum
  peptide (1)..(43): Ceres Seq. ID no. 13660233
ITRVRLRNCYRSESDFAITRPRLHKFQGSSLWRFRRLRFCSIR

SEQ ID NO: 67043 - DNA, 867 bp, Triticum aestivum
  misc_feature (1)..(867): Ceres Seq. ID no. 13659322
aacggctcgccacaaagccaacaaacccagcagccccagccctttccgcctccccccgctcccaaaccaagccccgcccccgttctgtccctccgcaaaaccctagctccgtacacgcgcggcgacctccaccatgaagggcaaggccgacacctccaagaagggcgagggcaggctcaaggccgccggcggcgccagcaagaggaagaaggacgccgctgccgctggcaagcccaagcgcccaccctccgccttcttcgtcttcatgtctgagttcaggcagcagtacaacgcggagaaccccaacaacaagagtgtcgccaacgtgagcaaggcggcgggtgagaagtggagagctatgtctgatgaggacaaagcaccttatgtggaaaaggctgaacagaagaagaaggactatgagaagaccaaagccacctttgataacaaggagagtgcgagctccaagaaggccaagactcagaacgatgaggaggtcaaatctgaggtcgaagatgagggtagcgatgaggaaaacgaggacgatgatgagtaaatagtgtatcagagtatgaggtagcaaattgggtgtttggtccccgcttagtgtactagtttgctatcctgctatcctcagtgttagatgatgagatttggaagtagatgttgtgtttgtgtgttaagggggcccttttagacttgtggactcatggtttgagaagttgcttagtagtgtattagcagagaggaagctgagaatgctaccagctgttccaatgcttttctcttgctaaccacctgtgtaagaacttgttttcattcgctaatctgatgactgcccagccattggctcttggttaatttcgcctt

SEQ ID NO: 67044 - protein, 139 aa, Triticum aestivum; identical to SEQ ID NO: 51863
  peptide (1)..(139): Ceres Seq. ID no. 13659323

SEQ ID NO: 67045 - protein, 95 aa, Triticum aestivum; identical to SEQ ID NO: 51864
  peptide (1)..(95): Ceres Seq. ID no. 13659324

SEQ ID NO: 67046 - protein, 90 aa, Triticum aestivum; identical to SEQ ID NO: 51865
  peptide (1)..(90): Ceres Seq. ID no. 13659325

SEQ ID NO: 67047 - DNA, 1123 bp, Triticum aestivum
  misc_feature (1)..(1123): Ceres Seq. ID no. 13659393
acctcactcactcacccgaccgcgcgccggcccgctcctgcactacacccagaggcttcctcccaccggacgcaggatcgcgaccgcctagctacctagagcagagcttggggaattcttacggctcagagcctgcctgggctctccggtggttgttccttccagcatcgatctgcttcttgggcgatcttggtagctgatggaggcggcattggttctggtggtggcggtgctccttgggtcctcagcccttgttgcctcagatttctgcgtgtgccggtcggagcagccgacggcggtgctgcagaaggcgatcgactacgcgtgcgggcagggcgcggactgcacggccatcgcgcagagcggggcgtgctacagccccgacgaggtcgccgcgcactgctcctgggccgccaacagctacttccagaagttcaggtccaccggcgccacctgcgacttctccggcgccgccaccctctccaccaccgaccccagtttctctggttgcacgttcccatccagtgccagtgccgccggcaccaccacgggaaccgggacagccacgacgggcaccggcaccaccacgggcaccgggacgaccacggggggcaccttcagccccgggatgggcaccggcttcaacagcaccgggttcagcccgacaaccgggagcatggacggcaccgccgcggcggccggcttgcttccgtcgatcagactggcggcctccatcgccgtcctcctcctctcctacttggcgctgccatgaactctgcctgcctgtccgtctcttctcatggcagaacacattagcagttagcttcagtggccttctggcctggcctgccagaagcaagctgagagtgtggatttgtctaatggaatccatcgatctggaagagttgatcgccgttattgttccctagtgtcatgggctggttagctgggggtgtcattttggttctagcttaattttaatttatatatggcctcccacaggctggaggagtggtgtatgatttggtaggatggctgtctctttccctctgcaaggacccttgtcttccatgtctgtttttatactgttggcctctcttaatttttaagcattttttgcttg

SEQ ID NO: 67048 - protein, 190 aa, Triticum aestivum
  peptide (1)..(190): Ceres Seq. ID no. 15219965
MEAALVLVVAVLLGSSALVASDFCVCRSEQPTAVLQKAIDYACGQGADCTAIAQSGACYSPDEVAAHCSWAANSYFQKFRSTGATCDFSGAATLSTTDPSFSGCTFPSSASAAGTTTGTGTATTGTGTTTGTGTTTGGTFSPGMGTGFNSTGFSPTTGSMDGTAAAAGLLPSIRLAASIAVLLLSYLALP

SEQ ID NO: 67049 - DNA, 2303 bp, Triticum aestivum
  misc_feature (1)..(2303): Ceres Seq. ID no. 13659394
atcacccattctcctcctccctcttctccgtccgtcaatccccctctatctcctccccgcaccagctcttgtactactcggagcacctccacccctgaccccgactccgaccacccatccatccgcttcttgcttcttccgctgtccgggccaagaatctgagatcctgtccggcgccgccgcttgtttcttgatggccgcatagatggcaggatcaacttcattttgagcttgtcccacaaggttgcaatcaccagtatgtcagctaaggcttcagaacgtacatatagatgctcagatgattcacaaatggcgtactacaacaactcggtgcctttagcagaaaatggacggttctatatgatgcaaaatcatctggatgttcactacacatcttcaggtgatgggtcacagaaaattagttccaatcctcaagtatttgaagcacagtactgcacactcgaatcatcatcggcaaatggtgtttatcctacacagagctccacatcttctcatagcatctcccctataagtgggagccccctgtctcagaatgatagccactcataccacacatatgattcacccccaactgcttcatgtgttaccgagataccggatttccagagtaaactgaaggagctagaaaatgcaattcttggacctgaattggacatagcctctgacagccccgagagcttattgcaagccaaccatcctttgaaacaagataactggagacagcttctgggaattaacacaggagacttgaagcaggtgatcatagcatgcggtaaggctgttgctgcgaatgatatgtatgcaacagaactattgatatctgagctaggtcagctggtgtctgtctctggagatccaatgcaacgcctaggggcatatatgttggaaggccttgtggccaggctctctttctctggaagtaagctgtataaatccttgaagtgcaaagaacctacaagctctgagctcatgtcttacatgcatctcctctgtgagatctgcccgttctacaagtttggttacatgtcggccaatggtgccatagcagaggctatcwrwggcgagaacttcgttcacatcattgatttccaaatcgcacaggggagccagtggataactatcattcaggctcttgcagcgaggcccgggggtccaccattcctaagaatcactggtatagatgactcaaactctgcttatgcccgaggtggtggactggatatggttgggacaagattgcatagcatctctgcttcgtgtggccttccctttgagttcaatgctgtccatgctgctagccatgaggtttatattcagcatcttgacacaagacctggggaggctattgtagtgaattttgcctatcagctgcaccatactcctgatgaaagcgtgagcgtggaaaatcaccgggacaggatcataagaatgatcaagagcctgtccccctagggtggtgactcttgttgagcaggagtcgaacacaaacacaagtgcattcttgccaaggtacttggagaccctcgactactatacggcaatgtttgagtcaatagatgttgctctaccaagggatgataagaggcggattagcacggagcaacactgtgtggcaagggatatcgtcaatttaatcgcgtgcgagggtgctgaaagggttgagaggcacgaggtgtttgggaaatggaaggcgaggtttgcaatggctggattcaggccgtacccgctgagttcggtggtgaacaacaccatcaaaacgctgctggatagctaccacagttgctacaggcttgaggagagggacggagtcctttaccttggttggaagggcagagtgttggtcgtgtcttctgcgtggtgctgacatgtcttgaggagaagctcatgtcatgtatgtacactgtttttattgttgaaacttaattcttgagtgattcgtgttacgtcgatccacgatatttctatagcctgacttgtcctttacccaatttcagatggaacctgagcttatcagtttcagatggaacctgagcttatataagggctttgctgcttgtctgcaccaggagttgctgtgatgataccgcgacagccgtgacttagaagaaggcatagtgattaaataaataaatatgttcatagctaggaatttggtgtgttgtggtttgctcccgttgttctaggattgacatgcttgtaatatactgtactactaattagaggatgtttagagacgattaaagggtatgcaggcacaagaggcggctgttgcatgtgtcctc

SEQ ID NO: 67050 - protein, 404 aa, Triticum aestivum
  peptide (1)..(404): Ceres Seq. ID no. 15219966
  misc_feature (274)..(274): Xaa is any aa, unknown or other
MSAKASERTYRCSDDSQMAYYNNSVPLAENGRFYMMQNHLDVHYTSSGDGSQKISSNPQVFEAQYCTLESSSANGVYPTQSSTSSHSISPISGSPLSQNDSHSYHTYDSPPTASCVTEIPDFQSKLKELENAILGPELDIASDSPESLLQANHPLKQDNWRQLLGINTGDLKQVIIACGKAVAANDMYATELLISELGQLVSVSGDPMQRLGAYMLEGLVARLSFSGSKLYKSLKCKEPTSSELMSYMHLLCEICPFYKFGYMSANGAIAEAIXGENFVHIIDFQIAQGSQWITIIQALAARPGGPPFLRITGIDDSNSAYARGGGLDMVGTRLHSISASCGLPFEFNAVHAASHEVYIQHLDTRPGEAIVVNFAYQLHHTPDESVSVENHRDRIIRMIKSLSP

SEQ ID NO: 67051 - protein, 387 aa, Triticum aestivum
  peptide (1)..(387): Ceres Seq. ID no. 15219967
  misc_feature (257)..(257): Xaa is any aa, unknown or other
MAYYNNSVPLAENGRFYMMQNHLDVHYTSSGDGSQKISSNPQVFEAQYCTLESSSANGVYPTQSSTSSHSISPISGSPLSQNDSHSYHTYDSPPTASCVTEIPDFQSKLKELENAILGPELDIASDSPESLLQANHPLKQDNWRQLLGINTGDLKQVIIACGKAVAANDMYATELLISELGQLVSVSGDPMQRLGAYMLEGLVARLSFSGSKLYKSLKCKEPTSSELMSYMHLLCEICPFYKFGYMSANGAIAEAIXGENFVHIIDFQIAQGSQWITIIQALAARPGGPPFLRITGIDDSNSAYARGGGLDMVGTRLHSISASCGLPFEFNAVHAASHEVYIQHLDTRPGEAIVVNFAYQLHHTPDESVSVENHRDRIIRMIKSLSP

SEQ ID NO: 67052 - protein, 370 aa, Triticum aestivum
  peptide (1)..(370): Ceres Seq. ID no. 15219968
  misc_feature (240)..(240): Xaa is any aa, unknown or other
MMQNHLDVHYTSSGDGSQKISSNPQVFEAQYCTLESSSANGVYPTQSSTSSHSISPISGSPLSQNDSHSYHTYDSPPTASCVTEIPDFQSKLKELENAILGPELDIASDSPESLLQANHPLKQDNWRQLLGINTGDLKQVIIACGKAVAANDMYATELLISELGQLVSVSGDPMQRLGAYMLEGLVARLSFSGSKLYKSLKCKEPTSSELMSYMHLLCEICPFYKFGYMSANGAIAEAIXGENFVHIIDFQIAQGSQWITIIQALAARPGGPPFLRITGIDDSNSAYARGGGLDMVGTRLHSISASCGLPFEFNAVHAASHEVYIQHLDTRPGEAIVVNFAYQLHHTPDESVSVENHRDRIIRMIKSLSP

SEQ ID NO: 67053 - DNA, 1763 bp, Triticum aestivum
  misc_feature (1)..(1763): Ceres Seq. ID no. 15178236
cccaacgcgccctaaatcccccccaccactctgccgccggcgcgtccatcagcccccctaccgcctctctccctcgcgcgcgcgtcgccgccgccgccgtccttcctccccggggcaccgcgctcccgccgccccgtccgcgttgctcggccattgagcctccctcgaggtggtaatttttgtcaaggttgttgttaccatggaggtcaacggtcgtcacaagcctacaagagagtatatcgacagagggtgcaatggtgtaaaatcgcccaataatttcggcgaagttgatccctggaccgcgtgggcgtacagaccacggaccatctcgttgttactcatgggaacctgctttttaatttgggcaagtggtgctcttaatccagaaggaagcttctctgctgaccgtgtctcatctgtaaaaaggggtgtctttgcgatgattgctgttttcttggcttattcttttattcaggcaccttcaactgtgctcatcagaccacatcctgcaatttggcggctggtccatgggatggcagttgtttaccttgtggccctcacatttttgcttttccagactcgtgatgatgctaggcagttcatgaagtaccttcaccctgaccttggtgttgaattacctgaaagatcctatggaaccgactgccgtatatatgtacctgatcatccgaaaagcaggtttaacaatgtttatgacatcctttttgacgagtttgttattgcccatatccttggatggtggggaaaggctataatgatacgaaaccaaccacttctatgggtgttatcaattggctttgagttaatggagctaacttttcgacatatgttgccaaattttaacgaatgctggtgggatagcattgttctagacatattgatctgcaattggtttggtatctgggctggtatgaagactgtgagatattttgatgggaggacatatgaatgggttggcttgagtcgccagcccaatattatgagtaaggtgaaaaggacactaggtcagttcacaccagcacagtgggacaaggatgagtggtaccctctgctcggcccttggagattcatccaagtgctaagcctgtgcgtaattttcatgaccatcgaacttaacacattctttcttaagttctgcctctggattcctccccggaatcccttgattgtctaccgactggtcctttggtggttgattgcgataccaaccatccgcgaatacaacacctatttgcaggacaggaactctgtgaagaaggtggggtctttctgttggctttcgctggctatatgcatcatagagcttctgatctgcatcaagtttggccatggtctcttcccgaagtcgatgccgtcgtggctgatcatattctggacgacggtggccacgcttctcacgatgttcctttttgtgtggacatggaaaatttaccgaacaatgattagaaaaaggttgtgattgcaaccaaagccattgttttctctggcccacaccattcttttctcctccgattcaatattgccgtgtaaatatccattcaaattgtgtacatgtagcagtaggccattaatcggtgaccgcgtgaaggtcagccttagaaatttcttgtcgatccaccagcagaataagccccccttccttccgttcattcatgtaccgtgtcaatcaactccgaaactctgaaattcatttggtccgacctacttcgatttaatgaaagtaatgaaataaggttattctgtcc

SEQ ID NO: 67054 - protein, 425 aa, Triticum aestivum
  peptide (1)..(425): Ceres Seq. ID no. 15178237
MEVNGRHKPTREYIDRGCNGVKSPNNFGEVDPWTAWAYRPRTISLLLMGTCFLIWASGALNPEGSFSADRVSSVKRGVFAMIAVFLAYSFIQAPSTVLIRPHPAIWRLVHGMAVVYLVALTFLLFQTRDDARQFMKYLHPDLGVELPERSYGTDCRIYVPDHPKSRFNNVYDILFDEFVIAHILGWWGKAIMIRNQPLLWVLSIGFELMELTFRHMLPNFNECWWDSIVLDILICNWFGIWAGMKTVRYFDGRTYEWVGLSRQPNIMSKVKRTLGQFTPAQWDKDEWYPLLGPWRFIQVLSLCVIFMTIELNTFFLKFCLWIPPRNPLIVYRLVLWWLIAIPTIREYNTYLQDRNSVKKVGSFCWLSLAICIIELLICIKFGHGLFPKSMPSWLIIFWTTVATLLTMFLFVWTWKIYRTMIRKRL

SEQ ID NO: 67055 - protein, 378 aa, Triticum aestivum
  peptide (1)..(378): Ceres Seq. ID no. 15178238
MGTCFLIWASGALNPEGSFSADRVSSVKRGVFAMIAVFLAYSFIQAPSTVLIRPHPAIWRLVHGMAVVYLVALTFLLFQTRDDARQFMKYLHPDLGVELPERSYGTDCRIYVPDHPKSRFNNVYDILFDEFVIAHILGWWGKAIMIRNQPLLWVLSIGFELMELTFRHMLPNFNECWWDSIVLDILICNWFGIWAGMKTVRYFDGRTYEWVGLSRQPNIMSKVKRTLGQFTPAQWDKDEWYPLLGPWRFIQVLSLCVIFMTIELNTFFLKFCLWIPPRNPLIVYRLVLWWLIAIPTIREYNTYLQDRNSVKKVGSFCWLSLAICIIELLICIKFGHGLFPKSMPSWLIIFWTTVATLLTMFLFVWTWKIYRTMIRKRL

SEQ ID NO: 67056 - protein, 345 aa, Triticum aestivum
  peptide (1)..(345): Ceres Seq. ID no. 15178239
MIAVFLAYSFIQAPSTVLIRPHPAIWRLVHGMAVVYLVALTFLLFQTRDDARQFMKYLHPDLGVELPERSYGTDCRIYVPDHPKSRFNNVYDILFDEFVIAHILGWWGKAIMIRNQPLLWVLSIGFELMELTFRHMLPNFNECWWDSIVLDILICNWFGIWAGMKTVRYFDGRTYEWVGLSRQPNIMSKVKRTLGQFTPAQWDKDEWYPLLGPWRFIQVLSLCVIFMTIELNTFFLKFCLWIPPRNPLIVYRLVLWWLIAIPTIREYNTYLQDRNSVKKVGSFCWLSLAICIIELLICIKFGHGLFPKSMPSWLIIFWTTVATLLTMFLFVWTWKIYRTMIRKRL

SEQ ID NO: 67057 - DNA, 2008 bp, Triticum aestivum
  misc_feature (1)..(2008): Ceres Seq. ID no. 14313228
atccgcacgagcgcacacgcacagcgataaagccagcgcagcagcaaagccggagcagagccatcaaaccacgccgcgactcctccccctcccctgctcctcccggcgactcgcggggtgctgctgctgacggctcatgggctgctgccgctcgtcgctgcgggcggtgacgcacccccacccggagaagccgccggggacgggcgcgggggcggcgccgatggccaggcggccgtccttctcggcgagcgcgcaccgggccgcgccgcctccgccggcggcggcggcggcggcatcgtcctccgaggcggggttcgccgagttctcgctggcggagctgcgcgcggccacgggcgggttcgcgccggagaacatcgtgtccgagagcggcgacaaggcgcccaacttcgtctacaggggccgcctgcagcaggggcaggggcagggcccccgccgcgcgatcgccgtcaagaagttcggcaagatggcctggcccgaccccaagcagttcgcggaggaggccaggggggtgggcaggctgcgccaccgccggctcgccaacctcatcggctactgctgcgacggggacgagcgcctgctcgtcgccgagttcatgcccaacgacaccctcgccaagcacgtcttccactgggaaaaccagactattgaatgggctatgcgtctaagagtcgcgtaccacatagctgaggcgctggactactgcagcaacgagggtagacctttatatcatgacctaaatgcatatagggtcctttttgatgagaatggtgatcctcgcctttcatgctttggtttgatgaaaaacagcagagatgggaaaagttatagcacaaaccttgcatacacacctccagaatatttgagaactggaagagtcactccagaaagtgtcatattcagctttggcaccgtactactggaccttctaagtggaaaacgcatacctccttcccatgctcttgacatgatgcgaggcaacaatatccaaatgttgatggattcacatttggaaggaaactactcaacagaagaggcaaccgctttggtagatcttgcctcccagtgtttgcagtatgaagctagggaccgccccaatacaaaaaagctggttaacatacttgagcccttgcaaacaaaattagaggtaccgtcctacgagatgcttggcataccaaagcatgaggaagaagtacctccacctcctgccccacaaccaccacaacaccctctttctcccatggctgaggcctgttctaggatggacctgacagctatccagcagatccttgtatcgacacattacagagacgacgaaggcagtaatgagctatcattccaggaatggacgcagcagatgagggacatgttggacgccaggaaacgtggggatctagcttttcgtgacaaagatttcaagacagccatagaatgctatacacagtttgttgatgtgggcacaatggtatcgccgacggtgtatgcccgaaggagcttgtgtcacctcatgtgcgaccagcccgacgctgccctccgggacgcgatgcaagcgcaatgcgtgtaccccgaatggccaactgcattctatatgcaagccgtcgcgctttcgaagccagatatgcagagcgacgccaaggacatgttgagtgaggcttcgcagctagaagagaagaagcaaaagaactcgagatgatgtcgagagcgtggtctttgtaaagatgtgtcggttcggtctcttttgcggctcaaatgtttacgtcgattgaggcgtgctattccgtcctttggaaaagaaaaaaactgtgagatattcgaggttgagttagggagaaactgcagggaagaagtgccgccgtagagtcgtgtggttgtaactatttggtttggcatttctgcgatgcattattttttgggtctatatatatatatatatgacatttttaaaagctataatcaggcataatgcttaagctaatgccgtagcttccac

SEQ ID NO: 67058 - protein, 524 aa, Triticum aestivum
  peptide (1)..(524): Ceres Seq. ID no. 14313229
MGCCRSSLRAVTHPHPEKPPGTGAGAAPMARRPSFSASAHRAAPPPPAAAAAASSSEAGFAEFSLAELRAATGGFAPENIVSESGDKAPNFVYRGRLQQGQGQGPRRAIAVKKFGKMAWPDPKQFAEEARGVGRLRHRRLANLIGYCCDGDERLLVAEFMPNDTLAKHVFHWENQTIEWAMRLRVAYHIAEALDYCSNEGRPLYHDLNAYRVLFDENGDPRLSCFGLMKNSRDGKSYSTNLAYTPPEYLRTGRVTPESVIFSFGTVLLDLLSGKRIPPSHALDMMRGNNIQMLMDSHLEGNYSTEEATALVDLASQCLQYEARDRPNTKKLVNILEPLQTKLEVPSYEMLGIPKHEEEVPPPPAPQPPQHPLSPMAEACSRMDLTAIQQILVSTHYRDDEGSNELSFQEWTQQMRDMLDARKRGDLAFRDKDFKTAIECYTQFVDVGTMVSPTVYARRSLCHLMCDQPDAALRDAMQAQCVYPEWPTAFYMQAVALSKPDMQSDAKDMLSEASQLEEKKQKNSR

SEQ ID NO: 67059 - protein, 496 aa, Triticum aestivum
  peptide (1)..(496): Ceres Seq. ID no. 14313230
MARRPSFSASAHRAAPPPPAAAAAASSSEAGFAEFSLAELRAATGGFAPENIVSESGDKAPNFVYRGRLQQGQGQGPRRAIAVKKFGKMAWPDPKQFAEEARGVGRLRHRRLANLIGYCCDGDERLLVAEFMPNDTLAKHVFHWENQTIEWAMRLRVAYHIAEALDYCSNEGRPLYHDLNAYRVLFDENGDPRLSCFGLMKNSRDGKSYSTNLAYTPPEYLRTGRVTPESVIFSFGTVLLDLLSGKRIPPSHALDMMRGNNIQMLMDSHLEGNYSTEEATALVDLASQCLQYEARDRPNTKKLVNILEPLQTKLEVPSYEMLGIPKHEEEVPPPPAPQPPQHPLSPMAEACSRMDLTAIQQILVSTHYRDDEGSNELSFQEWTQQMRDMLDARKRGDLAFRDKDFKTAIECYTQFVDVGTMVSPTVYARRSLCHLMCDQPDAALRDAMQAQCVYPEWPTAFYMQAVALSKPDMQSDAKDMLSEASQLEEKKQKNSR

SEQ ID NO: 67060 - protein, 408 aa, Triticum aestivum
  peptide (1)..(408): Ceres Seq. ID no. 14313231
MAWPDPKQFAEEARGVGRLRHRRLANLIGYCCDGDERLLVAEFMPNDTLAKHVFHWENQTIEWAMRLRVAYHIAEALDYCSNEGRPLYHDLNAYRVLFDENGDPRLSCFGLMKNSRDGKSYSTNLAYTPPEYLRTGRVTPESVIFSFGTVLLDLLSGKRIPPSHALDMMRGNNIQMLMDSHLEGNYSTEEATALVDLASQCLQYEARDRPNTKKLVNILEPLQTKLEVPSYEMLGIPKHEEEVPPPPAPQPPQHPLSPMAEACSRMDLTAIQQILVSTHYRDDEGSNELSFQEWTQQMRDMLDARKRGDLAFRDKDFKTAIECYTQFVDVGTMVSPTVYARRSLCHLMCDQPDAALRDAMQAQCVYPEWPTAFYMQAVALSKPDMQSDAKDMLSEASQLEEKKQKNSR

SEQ ID NO: 67061 - DNA, 1901 bp, Triticum aestivum
  misc_feature (1)..(1901): Ceres Seq. ID no. 13663734
cattacctagaacatcctaatcgaaaaaaagcctctcttcccctcaccccccacagatcgatccctcccggacagaaacgcagcaaggccgactaccttccaccgccgcttcgacactagggttcagccgttacatcgtcggcggggcttggcccgccgccgccggagatgggcgtcgcggagattgcgaagaaggtcgacgccctcaaggccgagctcgccgccaagtcgtcccgcatcgccgacctggaggcccgggtctcgctcctcgaagccgagaacgcgcgcttgaggaaggccatgtccgagggagttgcgatgaaccgtagagccaaaaagggtccaacctttggtcgattggaggagggtctcggcggaaacaagcaaaagtcagccgacatcgcgggcgggcatctgatgaatgatgtcatagaggtcagcgacggcgaggaagarggsgatggctgtggatgtcaacagcggggaggagggcgttcctccggtcccgactcctagcaagtgtgcggtgcgggtggtgaccggcaagaggggtgttgcagaggagattaaggacgccgatggaggtggtgggcgagaccatgggagcgttcgctgtgatggcaatgtgattctggacgacgatgatgttttgatcacgccacgaggcaagaagcgcacagcgacacgggtaatcagtgacagtgagagtgaggatgaagatgagaatggtcaagggcatggagatggtgaggtgggtgttagaagcagcaggaaatgtttgttgcgtggagtcagtgacagtgcgagtgaggatggcagtgagggtgttcgtgtggttaatcaaaaacctgtttcacctctagttacgacaggggtcgagagtgaggatgacgatggtgaattacatgagatggaggggcgttctactccggcaacaaggcgcttcgctcggttggctgaaggtcaatcaaagagaatgcgacctacacgtcggaaacttgagttttttgaacccaagaatcatgaagagagcgaggatgattcagaagaggatgataatatggaaaattttatagtagatgattcagattgttcagaaaattctgctgattctgttgaagaatcctctgctggaccagaagagtctgacgacgaggaaacttataaagagcttatggataggatacgcggcaaaaggaatgccaagaataaggattggaagattgagccagagatgctatcagcatttgatgaataccctgaacttcgcctgaaagctgtttgtgccctctatcgaaagcagacccaggaagaacaggcaggaaaagctattatcatgcacaacaaaaaaggatttaaccagatagacgcccgaaggggttctaacatagcgcagtttcttctggatggtgatgctgctgggccgcttaagaagactgcacaagacttggaaaattacgatcggtatgctcttgagttctgtcacaagatggctttacgttactcgaagcagttgtttgcaatatatcagaataaggagtacccctactttccatgactctggtgtcagttatcacttacttcatatgttgacctttctgtgacccttgtacctccccaatcagtcagtcagagtcttttgtatatatgggtttagttttgtgtcttaagtaatctgtagttagggcatgctaaagttagtttatcactaggatgcacgctgttaagtgaagcacgtgtctgacagggtctatgttgtttagctgaactgcttgtgctccctgtaatatccatgcatagtaaatctatctctatccttgaaatgttacccaaggagttgttcaaaaaaaaaaaaaaaaaagcttatcgataccgtcgacctcgagggggggcccggtacc

SEQ ID NO: 67062 - protein, 365 aa, Triticum aestivum
  peptide (1)..(365): Ceres Seq. ID no. 15220724
MAVDVNSGEEGVPPVPTPSKCAVRVVTGKRGVAEEIKDADGGGGRDHGSVRCDGNVILDDDDVLITPRGKKRTATRVISDSESEDEDENGQGHGDGEVGVRSSRKCLLRGVSDSASEDGSEGVRVVNQKPVSPLVTTGVESEDDDGELHEMEGRSTPATRRFARLAEGQSKRMRPTRRKLEFFEPKNHEESEDDSEEDDNMENFIVDDSDCSENSADSVEESSAGPEESDDEETYKELMDRIRGKRNAKNKDWKIEPEMLSAFDEYPELRLKAVCALYRKQTQEEQAGKAIIMHNKKGFNQIDARRGSNIAQFLLDGDAAGPLKKTAQDLENYDRYALEFCHKMALRYSKQLFAIYQNKEYPYFP

SEQ ID NO: 67063 - protein, 215 aa, Triticum aestivum
  peptide (1)..(215): Ceres Seq. ID no. 15220725
MEGRSTPATRRFARLAEGQSKRMRPTRRKLEFFEPKNHEESEDDSEEDDNMENFIVDDSDCSENSADSVEESSAGPEESDDEETYKELMDRIRGKRNAKNKDWKIEPEMLSAFDEYPELRLKAVCALYRKQTQEEQAGKAIIMHNKKGFNQIDARRGSNIAQFLLDGDAAGPLKKTAQDLENYDRYALEFCHKMALRYSKQLFAIYQNKEYPYFP

SEQ ID NO: 67064 - protein, 193 aa, Triticum aestivum
  peptide (1)..(193): Ceres Seq. ID no. 15220726
MRPTRRKLEFFEPKNHEESEDDSEEDDNMENFIVDDSDCSENSADSVEESSAGPEESDDEETYKELMDRIRGKRNAKNKDWKIEPEMLSAFDEYPELRLKAVCALYRKQTQEEQAGKAIIMHNKKGFNQIDARRGSNIAQFLLDGDAAGPLKKTAQDLENYDRYALEFCHKMALRYSKQLFAIYQNKEYPYFP

SEQ ID NO: 67065 - DNA, 1091 bp, Triticum aestivum
  misc_feature (1)..(1091): Ceres Seq. ID no. 13663630
acctagaacatcctaacgaaaaaaatcacattcgtcccgttctctatctcggtatctccattcccgaacagaaaaaaagggaacacacacacaggcggacgcgtagagcccaatccccgcagggccgagatccccgccccactcctccggacaaccgccgccgactcgccggccctcgccgccttccgcgtcgccggcaccgccgccgtattgcagggcttcgtgtgctgttcctcaccagtgccgtctaagatggtgtcctttgagatgaatgaccttaagaagatagggctaggcctgacaggctttggagtattcttctccttcctgggaatcgttttcttctttgacaaggggcttattgctatgggcaatatactcttcctgtcaggtttgggtatgacaattggtctgaaatcaactatgcagttcttcacaaagcctaagaattacaagggtaccatctcatttggcgcaggctttttcctggttctcattggatggcctttctttggcatgctcttagaggcatatggttttatcgtgctcttcagtggattctggccaacactcgcagttttcctgcaaaggattcctatccttggctggatttttcaacaaccatttgtcacttcgttccttgaccgttacagagggaaacgagtgccggtgtagtatcacttcgcgctatgtttcttatgatgtagcagctgaagtttttttccttccctggggataacagcaagtagttgtgccatcctggcctttccctttgcctgtttacttactggtgactgtcctttgtaaattacacccctggatggttttatcaaagaccaagatgcaaattgtcccatggtatgggctgaagaaacttcataagcgaacccggacgattcaaatatgtagctgtagagggatgctgttgaagtagaagctacatcctatccgtctcttctgtacttatgttcagatatagatattctgttctctcgagtcttgagcttgtgtttgctttatttttgtgcgcgcttcatagcttgaagaaagtcaaatatgtgctggaactgaaattaattcatgattcatac

SEQ ID NO: 67066 - protein, 140 aa, Triticum aestivum
  peptide (1)..(140): Ceres Seq. ID no. 15220241
MVSFEMNDLKKIGLGLTGFGVFFSFLGIVFFFDKGLIAMGNILFLSGLGMTIGLKSTMQFFTKPKNYKGTISFGAGFFLVLIGWPFFGMLLEAYGFIVLFSGFWPTLAVFLQRIPILGWIFQQPFVTSFLDRYRGKRVPV

SEQ ID NO: 67067 - protein, 135 aa, Triticum aestivum
  peptide (1)..(135): Ceres Seq. ID no. 15220242
MNDLKKIGLGLTGFGVFFSFLGIVFFFDKGLIAMGNILFLSGLGMTIGLKSTMQFFTKPKNYKGTISFGAGFFLVLIGWPFFGMLLEAYGFIVLFSGFWPTLAVFLQRIPILGWIFQQPFVTSFLDRYRGKRVPV

SEQ ID NO: 67068 - protein, 102 aa, Triticum aestivum
  peptide (1)..(102): Ceres Seq. ID no. 15220243
MGNILFLSGLGMTIGLKSTMQFFTKPKNYKGTISFGAGFFLVLIGWPFFGMLLEAYGFIVLFSGFWPTLAVFLQRIPILGWIFQQPFVTSFLDRYRGKRVPV

SEQ ID NO: 67069 - DNA, 1902 bp, Triticum aestivum
  misc_feature (1)..(1902): Ceres Seq. ID no. 15170655
aagtgttgtgccaacggatgctggttttacattttataaacttgtcatggtattaagctgttgccccatggctgacgtatatctatgtttatatgatttactttgggccttatttgtatggtccagcagccgggcccatacacgtagtatttgaactaaattccacgaggatgggctgggatccgtgtccaccctagtctgtccaaattaagccttattgtgcaatgtctatttttaagtgatgtttaaggttgttgcttttcgtatgaaagtttttttttttaacatgtgacacacttgcttcttgagccttgtttgctgcatacctaaatgctaaaaccactcttgcaggttacagacagaaagtaaaagacattgtgcagggtgctctgtttcctgaggttggtgttgacaaaaggactggttctgctggaggaactggagggcaagttgttgttcgtgatatcgatctttattcatactgtgagtcttgcttacttccgttcagcatacaatgccatgttggatatgtgccctccggtggaagggtcgttgggttaagcaagctttcaagagtagctgatgtctttgccaagagatttcaaaaccctcagagattagctaatgaagtttgtggtgcattgcatgttagcatacaacctgctggtgttgctgttgctatgcagtgctggcacataccgttgccggagaacttcaaatgcaaaaattcgcgagctttgattagaacctcacattcatctcgttcgggagtttttgagggcgagaacagctccttttggaatgattttgtggctcttcttaagcttagaggcatagacatggagatggacagccgttctgcttctttaacttggtgccccttaaggcctcatgaggttccgctttgcaatgggcacgcaaagaagattacaaccaatggtgctagctcagcaaaatcggcatccattccatctaatatggtttctgctgtcagctcaatgctcctgtctcttggtgaggaccccctaaggaaagaacttctaggcagtcctcagcgttacgtgcaatggctgatgaggttcagagcatgcaatcttgatgtgaagctgaatggttttacacttaacagtgcaagtgtatatgagagaccaggcgaagatgctactgatcatcgagcaattggttctgagctgcatttgccattttgtgcccagtgcgagcaccacctcctgccgttctacggagtagtgcacattggttactttggcagtggagacggtgaagggatcaaccgctcacattttcaggctctggttcatttctacgggtgcaagcttcaggtccaggaaaggatgacaagacagatagctgaagcagtttattccgtctcacatcgtggagccatagttgttgtagaagcaaaccatatctgcatgatatcaaggggaatagagaaaatcaggagtagtacagcaacaattgcagttttgggtcagttttcaaccgattcttctgccaaggcatcctttctacagaacgtcttagatactgctaatcaggaagtatgagtggcttcagatcatatactgatagaatctcagcgaaaagatacaatgagtctaatccctggtcgtcatttcagcaaggcaggcactgcgacgactatatatatggtttgaagttgtcatgcagctatggcatggttgccattttaccagccattgcaggtgggagcgaccaggacctcgtcgcgtggaatgttgtgtctgaagaagattaaccagaagcaccagaaagttttggttctcccgtgttgtaccattttcgtttgaacgacatgtcaaagttatcctagcgttgtaggtgtggcggctgtgccgagcaatacagtataaatgtttt

SEQ ID NO: 67070 - protein, 295 aa, Triticum aestivum
  peptide (1)..(295): Ceres Seq. ID no. 15170656
MQCWHIPLPENFKCKNSRALIRTSHSSRSGVFEGENSSFWNDFVALLKLRGIDMEMDSRSASLTWCPLRPHEVPLCNGHAKKITTNGASSAKSASIPSNMVSAVSSMLLSLGEDPLRKELLGSPQRYVQWLMRFRACNLDVKLNGFTLNSASVYERPGEDATDHRAIGSELHLPFCAQCEHHLLPFYGVVHIGYFGSGDGEGINRSHFQALVHFYGCKLQVQERMTRQIAEAVYSVSHRGAIVVVEANHICMISRGIEKIRSSTATIAVLGQFSTDSSAKASFLQNVLDTANQEV

SEQ ID NO: 67071 - protein, 242 aa, Triticum aestivum
  peptide (1)..(242): Ceres Seq. ID no. 15170657
MEMDSRSASLTWCPLRPHEVPLCNGHAKKITTNGASSAKSASIPSNMVSAVSSMLLSLGEDPLRKELLGSPQRYVQWLMRFRACNLDVKLNGFTLNSASVYERPGEDATDHRAIGSELHLPFCAQCEHHLLPFYGVVHIGYFGSGDGEGINRSHFQALVHFYGCKLQVQERMTRQIAEAVYSVSHRGAIVVVEANHICMISRGIEKIRSSTATIAVLGQFSTDSSAKASFLQNVLDTANQEV

SEQ ID NO: 67072 - protein, 240 aa, Triticum aestivum
  peptide (1)..(240): Ceres Seq. ID no. 15170658
MDSRSASLTWCPLRPHEVPLCNGHAKKITTNGASSAKSASIPSNMVSAVSSMLLSLGEDPLRKELLGSPQRYVQWLMRFRACNLDVKLNGFTLNSASVYERPGEDATDHRAIGSELHLPFCAQCEHHLLPFYGVVHIGYFGSGDGEGINRSHFQALVHFYGCKLQVQERMTRQIAEAVYSVSHRGAIVVVEANHICMISRGIEKIRSSTATIAVLGQFSTDSSAKASFLQNVLDTANQEV

SEQ ID NO: 67073 - DNA, 775 bp, Triticum aestivum
  misc_feature (1)..(775): Ceres Seq. ID no. 13663631
aatatgcagcaccagtagtatatagcagtaaaaaatactttgtacactcgtggcatcgccatcgatttgtcttgaactctcgatgagcaacaatcaatgggacatcaagatagtgctacgccgcgccgcatcgccgtccgcgctggccggccggcaacggagctgcgacgaagaccggcgaggcggagcggcaacgcgcgacggcggccggccatcagtattcagtaggggcgcatgccgacgtagttgccgggcgggtcgtagttgcaggtgatgaaggtgccgcggccgccgtagcactcgaccatggcgcaccccacgcgggtgctgccgcgccacacgatctgcgtgtagtgcccgcacatgccgccgctgcagcggttgctccagtagtcgtaccggggccgctccgccagccacgcccccacggcctgcgcgggcgcccagccggtgccgctgccccagaagaggttctcgccgtagggccccgacgagtgcaccagcgcgcagtccccgcgccgcgactcggcgtacgaccgcgcgtacgccgccacccgctcgtcccacctcagcgccggcagccccatcgccgcccgcgccgcgttctgctggaacaggaactgcgccctgtagtccccgccgccgccgcgggggtagccggcgtccaccacgacgacgaggaacgccgcattgcacagcgcgacggcgaggagggcgatggccagctgggctcgagtacaagtggaggaggccatgggaggtgggtggtgatgct

SEQ ID NO: 67074 - protein, 63 aa, Triticum aestivum
  peptide (1)..(63): Ceres Seq. ID no. 13663632
MSNNQWDIKIVLRRAASPSALAGRQRSCDEDRRGGAATRDGGRPSVFSRGACRRSCRAGRSCR

SEQ ID NO: 67075 - protein, 43 aa, Triticum aestivum
  peptide (1)..(43): Ceres Seq. ID no. 13663633
MGHQDSATPRRIAVRAGRPATELRRRPARRSGNARRRPAISIQ

SEQ ID NO: 67076 - DNA, 1041 bp, Triticum aestivum
  misc_feature (1)..(1041): Ceres Seq. ID no. 12622531
ataggttaccactagtaggccacgaccaaccgctcccgtcgcccgatccatcatctgattgccgccgccgcttgccgcccatcggtccagctcacactgaccgctacgtctcactctctcctccctctcctagctaattgcctagctactggtagagctagctagctggtgatcaccacgcgcgcccgcccgcagctcgttttaagccggccgggtcggacacggcatgcgctgctctgcccgcacggcaaacgatggctccagcttccgcctcgctcctgcccgccgccggcgccaagcgccctttcgccgcccccgacgctgctgagcaagagcagccactcgcgcaggagagcgcggtgaccaagaagaacggcgagagccagcagcagccgaagctggagtgcccgcggtgcagctccaccgacaccaagttctgctactacaacaactacagcacggcgcagccgcgccactactgccgcacctgccgccgctactggacgcacggcggcacgctgcgcaaggtccccgtcggtggcgcctgccgccgcggctccggcagcagcagcaagcgccgcaggtcctccgccgagccccacacgccctcctccgactcgacgccaccgccgcagccagacctgccagacacgctcccccagctccctgtcttcccgttcctcaccgacggcggccccgtcttccttccgcagttcgacctcgggctcggcgggttcccgtggacggcatcgtcagtcacagacaacctttacgacagtctcgcgccgtgggctgcctgcgacggcgcgctcgcccccaccggcgcatgggaggacttcggtggcctcgagctcacctggccaccgccaccacccccggcggccggcaactgatgatcggcgtcgtcgtgacagtcgccggcgcgttcgaggctcctgttttatcatcgcagcctcgatcgatcagctagttgttgcttaccttcaccagtttgcagtgtgtctgtctcctctgctaggaattaatgtactcatgcagctc

SEQ ID NO: 67077 - protein, 212 aa, Triticum aestivum
  peptide (1)..(212): Ceres Seq. ID no. 12622532
MAPASASLLPAAGAKRPFAAPDAAEQEQPLAQESAVTKKNGESQQQPKLECPRCSSTDTKFCYYNNYSTAQPRHYCRTCRRYWTHGGTLRKVPVGGACRRGSGSSSKRRRSSAEPHTPSSDSTPPPQPDLPDTLPQLPVFPFLTDGGPVFLPQFDLGLGGFPWTASSVTDNLYDSLAPWAACDGALAPTGAWEDFGGLELTWPPPPPPAAGN

SEQ ID NO: 67078 - DNA, 1323 bp, Triticum aestivum
  misc_feature (1)..(1323): Ceres Seq. ID no. 14303067
acacacatcccacccacacacatcatccatccacccgtagaaacatcgagcatacacttggcgacatccagctagctagctctcgtcggcgtcgacgatggcggggaggcggcaggcagcctggtgcctggtggtcatcgctctggcagtgacgctggcggtggcgtcggcgcagcccgtgcagccgagggtgggcgggccggggaagaaaggcggcaagatgccgccgggcaagttcgagacggtgaccttcgccaagaacaacaagcgcaagtacgaggtggcctgcaccgacaaccgcggcccgccctgcgtcgtctcctgccccaagacctgccccaacaagtgcctcgccttctgcgagtactgcatgaccttctgcatgtgcgacatgttcccgggcacgtcgtgcggggacccgcgcttcacgggcggcgacggcaacaccttctacttccacggaaagaaggaccaggacttttgcatcgtctctgacaaggacctccacatcaacgcgcacttcattggcaaccacaaccctgatatgaagcgtgacttcacgtgggtgcaggccctcggtgtcaccttcgtccatggcggcgccgaccaccgcctctacgtgggtgccaagaaggtcgtcgagtgggacgaggaggaggaccatgttcaaatcaccctcgatggggtgcccgtggaggtggaggccggcaagaatgcccaatgggtctctagggccatgccggggctctccgtcactcgcaccgacacggtgaacaccgtcgtcgtggagctcgacggcgtgttcagcatctcggccaacgccgtgcccatcactgacgaggactcccggatccacaactacgggaagaccaaggacagcctcatgcacctcgacctagggttcaagttccacacccttactaacggcgtcgacggcgtgctcggccagacctaccgcttagactacatcagcaaggtcaacgtcacggccaagatgcccatcatgggcggcgcgcccaagtacctctcggccagcctcttctccacagactgcgccgtctccagcttccaccgtaacggtgacgccgccatcgagacgttcgcctcataaaccattggttcatggaacctacacgagaaataaacaaatatcaaccggaagggagtgatatcatctccatcatgttgttgtggagtatatatgtgtgcatctcacacgattgaggttgtgaaataagtttcaagtcaataattgaagcaaagtgtgtaccatgttagtaacttaacatttttttaagaaaagaagcatcgtgcttacatagt

SEQ ID NO: 67079 - protein, 337 aa, Triticum aestivum
  peptide (1)..(337): Ceres Seq. ID no. 14303068
MAGRRQAAWCLVVIALAVTLAVASAQPVQPRVGGPGKKGGKMPPGKFETVTFAKNNKRKYEVACTDNRGPPCVVSCPKTCPNKCLAFCEYCMTFCMCDMFPGTSCGDPRFTGGDGNTFYFHGKKDQDFCIVSDKDLHINAHFIGNHNPDMKRDFTWVQALGVTFVHGGADHRLYVGAKKVVEWDEEEDHVQITLDGVPVEVEAGKNAQWVSRAMPGLSVTRTDTVNTVVVELDGVFSISANAVPITDEDSRIHNYGKTKDSLMHLDLGFKFHTLTNGVDGVLGQTYRLDYISKVNVTAKMPIMGGAPKYLSASLFSTDCAVSSFHRNGDAAIETFAS

SEQ ID NO: 67080 - protein, 296 aa, Triticum aestivum
  peptide (1)..(296): Ceres Seq. ID no. 14303069
MPPGKFETVTFAKNNKRKYEVACTDNRGPPCVVSCPKTCPNKCLAFCEYCMTFCMCDMFPGTSCGDPRFTGGDGNTFYFHGKKDQDFCIVSDKDLHINAHFIGNHNPDMKRDFTWVQALGVTFVHGGADHRLYVGAKKVVEWDEEEDHVQITLDGVPVEVEAGKNAQWVSRAMPGLSVTRTDTVNTVVVELDGVFSISANAVPITDEDSRIHNYGKTKDSLMHLDLGFKFHTLTNGVDGVLGQTYRLDYISKVNVTAKMPIMGGAPKYLSASLFSTDCAVSSFHRNGDAAIETFAS

SEQ ID NO: 67081 - protein, 246 aa, Triticum aestivum
  peptide (1)..(246): Ceres Seq. ID no. 14303070
MTFCMCDMFPGTSCGDPRFTGGDGNTFYFHGKKDQDFCIVSDKDLHINAHFIGNHNPDMKRDFTWVQALGVTFVHGGADHRLYVGAKKVVEWDEEEDHVQITLDGVPVEVEAGKNAQWVSRAMPGLSVTRTDTVNTVVVELDGVFSISANAVPITDEDSRIHNYGKTKDSLMHLDLGFKFHTLTNGVDGVLGQTYRLDYISKVNVTAKMPIMGGAPKYLSASLFSTDCAVSSFHRNGDAAIETFAS

SEQ ID NO: 67082 - DNA, 830 bp, Triticum aestivum
  misc_feature (1)..(830): Ceres Seq. ID no. 12621847
aaaactcacagcaagacttggtaaaggcggccgaagaagcaaagctgactaatctgcaaccatgaagatgaagagatgcatcctgctgatgctcgcacttgaggccgccgtcctcgtcgccggccgcccctccgctgttgccgtctccaacgacgtgggcaccattctcatgccgaccgaaggcaaagggcaagtgggaacggcggcggcttccaggccatgggattgctgcgacaacaccatatgcaccaggtccttgccgccaatctgcatctgtctggacgaggtcgacgagtgcgcctccacctgcatggcctgcgtgccgtccgtctcaaacccattccgccgcgtctgcggagaccggtactacggcgaccccgggcccaagtgcacctacaacaccgtcgccggcgacaacaacgacgacgccctcgtagcggcggcggcagaggaggagaagccgtgggagtgctgtgacatggctctgtgcaccaggtcatacccgccgatgtgccgctgcgtggacgaggtcgagcagtgcgctgcaacctgcaagagctgcggggtgtccatcttgaacccgttccgccacgtctgcaacgactggtacaacggcttcccaggtcgcaagtgcaccgaggccgcccacgccggcggtaataactagcacctgcgttgatcaacgccatcaagagtgcacttgaatttcccctgcatgcaatgtgttacaaattacaataaaataaaataaaaaatggatggccggctggctggcctgctaccgctactgcttgcctgaatggtgatcagacaagcatgcatgcatgaat

SEQ ID NO: 67083 - protein, 201 aa, Triticum aestivum
  peptide (1)..(201): Ceres Seq. ID no. 12621848
MKMKRCILLMLALEAAVLVAGRPSAVAVSNDVGTILMPTEGKGQVGTAAASRPWDCCDNTICTRSLPPICICLDEVDECASTCMACVPSVSNPFRRVCGDRYYGDPGPKCTYNTVAGDNNDDALVAAAAEEEKPWECCDMALCTRSYPPMCRCVDEVEQCAATCKSCGVSILNPFRHVCNDWYNGFPGRKCTEAAHAGGNN

SEQ ID NO: 67084 - protein, 199 aa, Triticum aestivum
  peptide (1)..(199): Ceres Seq. ID no. 12621849
MKRCILLMLALEAAVLVAGRPSAVAVSNDVGTILMPTEGKGQVGTAAASRPWDCCDNTICTRSLPPICICLDEVDECASTCMACVPSVSNPFRRVCGDRYYGDPGPKCTYNTVAGDNNDDALVAAAAEEEKPWECCDMALCTRSYPPMCRCVDEVEQCAATCKSCGVSILNPFRHVCNDWYNGFPGRKCTEAAHAGGNN

SEQ ID NO: 67085 - protein, 192 aa, Triticum aestivum
  peptide (1)..(192): Ceres Seq. ID no. 12621850
MLALEAAVLVAGRPSAVAVSNDVGTILMPTEGKGQVGTAAASRPWDCCDNTICTRSLPPICICLDEVDECASTCMACVPSVSNPFRRVCGDRYYGDPGPKCTYNTVAGDNNDDALVAAAAEEEKPWECCDMALCTRSYPPMCRCVDEVEQCAATCKSCGVSILNPFRHVCNDWYNGFPGRKCTEAAHAGGNN

SEQ ID NO: 67086 - DNA, 1041 bp, Triticum aestivum
  misc_feature (1)..(1041): Ceres Seq. ID no. 14303031
aaatcccatgccagaaacgcggaacgacctgccgatggagccgtcgttcgggtccaactccgcgagcaccgaggaggcgtcgacccggcgcgtggccaaccgcatcatccgcgcgctgcagcaccacctccagctgctgcaccgcgccggcgcggacttcttcgtgctgggcgccacgggcaacgtgtacacggtgacgctggcgaccacgccggcgtgcacgtgccccgaccccggcgcgccctgcaagcacatcctcttcgtgctgctccgcgtcctcggcctgtccctcgacgaggcctgcgtgtggaggcagtcgctgcggccgtgccaggtcgcgcggctcgtcgccgcgcccacgtacccggaggtgctcgccggccctcgcgcccgggagaggttccaccagcagtgggcggcccacgcggcggctgcagccgcaaaggccgctgaccagcgccggcaggagtccgccggtccgtcgttgggccgcctcgacggcgccgcctgcccggtgtgcctcgaggagatggcgccgtcggcagaggcacaaggcggcgcggcggcaacggggccggcgccgctgctgacgtgcggcacctgccggaactcggtgcacgccgagtgcttcgcgcggtggaagcgcagccgcgcgaggcgggcggcgacgtgcgtcgtgtgccgcgcgaggtggcggaagccgagccgggaccgggagcaggaccagcagcagtacatgaacctgtcggcgtacatgaacgaggagaacgacgtggtggacatgcaggtcgaggacggggctccgtgtggcggatagaggaacttgttacggcggttcatatactgtatgaaatttaagaagctgtacagagggagtagcatcccaattcattcggactcgtgacatttctttcttatttttcttaggatctgacttattacatgcatgtacagaacttatatgtcaataaaatcactgtgttctgaagaaattatcgatgatgacagatatgccctctgtgataggaaacaatttttggg

SEQ ID NO: 67087 - protein, 271 aa, Triticum aestivum
  peptide (1)..(271): Ceres Seq. ID no. 14303032
NPMPETRNDLPMEPSFGSNSASTEEASTRRVANRIIRALQHHLQLLHRAGADFFVLGATGNVYTVTLATTPACTCPDPGAPCKHILFVLLRVLGLSLDEACVWRQSLRPCQVARLVAAPTYPEVLAGPRARERFHQQWAAHAAAAAAKAADQRRQESAGPSLGRLDGAACPVCLEEMAPSAEAQGGAAATGPAPLLTCGTCRNSVHAECFARWKRSRARRAATCVVCRARWRKPSRDREQDQQQYMNLSAYMNEENDVVDMQVEDGAPCGG

SEQ ID NO: 67088 - protein, 269 aa, Triticum aestivum
  peptide (1)..(269): Ceres Seq. ID no. 14303033
MPETRNDLPMEPSFGSNSASTEEASTRRVANRIIRALQHHLQLLHRAGADFFVLGATGNVYTVTLATTPACTCPDPGAPCKHILFVLLRVLGLSLDEACVWRQSLRPCQVARLVAAPTYPEVLAGPRARERFHQQWAAHAAAAAAKAADQRRQESAGPSLGRLDGAACPVCLEEMAPSAEAQGGAAATGPAPLLTCGTCRNSVHAECFARWKRSRARRAATCVVCRARWRKPSRDREQDQQQYMNLSAYMNEENDVVDMQVEDGAPCGG

SEQ ID NO: 67089 - protein, 260 aa, Triticum aestivum
  peptide (1)..(260): Ceres Seq. ID no. 14303034
MEPSFGSNSASTEEASTRRVANRIIRALQHHLQLLHRAGADFFVLGATGNVYTVTLATTPACTCPDPGAPCKHILFVLLRVLGLSLDEACVWRQSLRPCQVARLVAAPTYPEVLAGPRARERFHQQWAAHAAAAAAKAADQRRQESAGPSLGRLDGAACPVCLEEMAPSAEAQGGAAATGPAPLLTCGTCRNSVHAECFARWKRSRARRAATCVVCRARWRKPSRDREQDQQQYMNLSAYMNEENDVVDMQVEDGAPCGG

SEQ ID NO: 67090 - DNA, 585 bp, Triticum aestivum
  misc_feature (1)..(585): Ceres Seq. ID no. 13659740
accccagcccgtccccaaatctccaaagcgcgagcgacaaccggccctgcctcaaccccccggcgcgtctccgactccatggcccgcaccaagcagacggcgaggaagtccgaggggcttaagcagacatttgccgcggtggaaacactggaaggagccctgcgggagtgctccaagggagagggctactttggtggtgagaccgtcgggcttgtggacatttcacttgggagcctgctctcctggttgaacgcgacagaagtgatgtccggaaccaagatatttgatcctgttaagactccgctcctggcagcgtggatggagcgctttagcaagctcgatgctgccaaggcggcgttgccagaagttgatagggtggtcgaatttgccaaagaagagacaagcacaggctgctgccgccgccgctgcttcagagaccaagtaaacatcatggggacgtgacttccattgaataaaaaaaagtgcatgttttctatatagcatatatgattgttgtttgtatgtcgatttttgttgtaatggtgccaaggataattaatgcatgtgatattttgtgaaggtttt

SEQ ID NO: 67091 - protein, 153 aa, Triticum aestivum
  peptide (1)..(153): Ceres Seq. ID no. 13659741
TPARPQISKARATTGPASTPRRVSDSMARTKQTARKSEGLKQTFAAVETLEGALRECSKGEGYFGGETVGLVDISLGSLLSWLNATEVMSGTKIFDPVKTPLLAAWMERFSKLDAAKAALPEVDRVVEFAKEETSTGCCRRRCFRDQVNIMGT

SEQ ID NO: 67092 - protein, 127 aa, Triticum aestivum
  peptide (1)..(127): Ceres Seq. ID no. 13659742
MARTKQTARKSEGLKQTFAAVETLEGALRECSKGEGYFGGETVGLVDISLGSLLSWLNATEVMSGTKIFDPVKTPLLAAWMERFSKLDAAKAALPEVDRVVEFAKEETSTGCCRRRCFRDQVNIMGT

SEQ ID NO: 67093 - protein, 82 aa, Triticum aestivum
  peptide (1)..(82): Ceres Seq. ID no. 13659743
PQPVPKSPKRERQPALPQPPGASPTPWPAPSRRRGSPRGLSRHLPRWKHWKEPCGSAPRERATLVVRPSGLWTFHLGACSPG

SEQ ID NO: 67094 - DNA, 904 bp, Triticum aestivum; identical to SEQ ID NO: 64285
  misc_feature (1)..(904): Ceres Seq. ID no. 13584363

SEQ ID NO: 67095 - protein, 119 aa, Triticum aestivum; identical to SEQ ID NO: 64286
  peptide (1)..(119): Ceres Seq. ID no. 13584364

SEQ ID NO: 67096 - protein, 90 aa, Triticum aestivum; identical to SEQ ID NO: 64287
  peptide (1)..(90): Ceres Seq. ID no. 13584365

SEQ ID NO: 67097 - DNA, 1233 bp, Triticum aestivum
  misc_feature (1)..(1233): Ceres Seq. ID no. 13502960
ccacttagaccgcctccgcccacgcatcatcgacggtgaagcgtaggtagcgagcgcctccacagatcgggatcaggcggcgatcgacttctccggcgatgtcaagcaggcgatcccccgcccggccgtcgctttcggcggcgtcggcagcgctggcgatcacggcggtgcacaaggtcgcccagggtccccggtgcagggctttccagcagcagggacagctccctggccgctgcgcgcggcgccgacgggggcaatgccaagttcgcgtggtacggcgcgccgtcggcggacgtggccgcggcggtggagcacgggttcgggaggaccaacagccgggtcctcggccatcgcgcgcacggcgacagcgtccacctctcgccgcctcagtctccttacgccagcgcaatgctagcaaatgcagatgagaacggcgaggcgcacatcgtgctgtgccgtgttctgatgggccggccagaggccatcccagccgggtcctcccagctccaccccagcagtgacgattacgacagcgccgtcgacaacatgcagaatccccagtggtacgttgtttggagcaaggatatgaacacgaggatcctcccagagtacgtcgtcagcttcaagtgccccagcctccatcagatgcaaggatcatcgggagcgacctccgccctaaagaagccttcgccggtggctcgtgacatgtttccgacgcttctagcagagatccagcggttcgtgccatcctccaagctggagacattgcaggggacctacaatcgcttcaagaaagggcagatgaagaaggatcagttcatccggttcttgcgcgccttcatcggcgacagggtgttgacagcagttgccaagaaactccgaggatactgatggacagtgcaagggtgttcttctgctagttctgttgtcgtcaaagtggtgtgctggtggtgaggtggtagctcattcggctgactccatagaaccggaagggtgtgcgtgtcgggtatcaaccagatagttcttcatttcttatgtcgccgtagtttagccgagaatcgttgttgatctcaagaacatagaggggttacgggcaatcttccattaaccaacacaaagttagattttattcttggtttctgctatattttacttggtattttgttacctgcaatctgtacagactgaaagttttaccaatttatgcctgaaagcaatcatttgttcgacgcc

SEQ ID NO: 67098 - protein, 160 aa, Triticum aestivum
  peptide (1)..(160): Ceres Seq. ID no. 13502961
MLANADENGEAHIVLCRVLMGRPEAIPAGSSQLHPSSDDYDSAVDNMQNPQWYVVWSKDMNTRILPEYVVSFKCPSLHQMQGSSGATSALKKPSPVARDMFPTLLAEIQRFVPSSKLETLQGTYNRFKKGQMKKDQFIRFLRAFIGDRVLTAVAKKLRGY

SEQ ID NO: 67099 - protein, 141 aa, Triticum aestivum
  peptide (1)..(141): Ceres Seq. ID no. 13502962
MGRPEAIPAGSSQLHPSSDDYDSAVDNMQNPQWYVVWSKDMNTRILPEYVVSFKCPSLHQMQGSSGATSALKKPSPVARDMFPTLLAEIQRFVPSSKLETLQGTYNRFKKGQMKKDQFIRFLRAFIGDRVLTAVAKKLRGY

SEQ ID NO: 67100 - protein, 114 aa, Triticum aestivum
  peptide (1)..(114): Ceres Seq. ID no. 13502963
MQNPQWYVVWSKDMNTRILPEYVVSFKCPSLHQMQGSSGATSALKKPSPVARDMFPTLLAEIQRFVPSSKLETLQGTYNRFKKGQMKKDQFIRFLRAFIGDRVLTAVAKKLRGY

SEQ ID NO: 67101 - DNA, 1466 bp, Triticum aestivum
  misc_feature (1)..(1466): Ceres Seq. ID no. 13659640
gtttttaactcgacttagccaagtttggcaaacgaacaggccccgtggccccgcccccgcgcgacagcgaccgggcgcccgaagtgtctcgcgctcgcccacggcacccgagcggagcccccgcccctaccatgtgctctccctgcccgcagacccctcaaaacccacccgcgcccgcacccaggcaccgagcacccagcagaaagaaacgcaccaaatctttatcccctgccctcagcagtgccgacctgagcgccggagatctgcggcgagcgagatgaaagtggaggagcagacggtggtgggaggaggaggaggggggctctgggggctggccgggcggccgtgcgacacgtgcgccgtggacgcggcgcggctctactgccggtcggacggcgcctacctctgcgccgggtgcgacgcgcgcgctcacggggccggctcccgccacgcgcgcgtctggctctgcgaggtctgcgagcacgcgcccgccgcggtcacctgccgcgccgacgccgccgcgctctgcgccacgtgcgacgccgacatccactccgccaacccgctcgccagccggcacgagcgcctccccgtcacgcctttcttcggcgcgctcgccgacccgccccagcccgccccctccccgtcctccgccgccgcgacgcaggaggacgcggacgacgacgggagcaacgaggccgaggcggcctcctggcttcttcccgagcctggcgatagccccgaggacagcaccgctaccttcttccctgactcggacgcgtacctcgatctggacttcgtccggtctatggacgggatcaaggccatcggggtgcccgtcgccccttccgagctcgacgtcgccggcggcgctctcttctaccccgaacactccatgaaccacagcatgtcaacgtccgaggtcgcggtggtgccggacgcgctgtcagccggcggggccccggcgccggcgccgtcggtggcggtggtggctagcaaggggaaggagcgggaggcccggctgatgcggtaccgggagaagcgcaagaaccggaggttccagaagaccatccgctacgcgtcccgcaaggcgtacgccgagacgcggccgcgcatcaagggccggttcgccaagcgcaccgccgaggacgacgcgctggagcgggacgggccgttctcgcccgcgtcgtcggcgcacctggcgtcggacggtgactacggcgtcgtgccgtccttctgaggagaccggcgacggcgacggcgactctgctgtagttttggcgcgcgcatccatccgagtgcgctcgcgtgcggtggctgcgacgcgcgctccgtgtaacattgaataatctgtacagttttgttccatgggattagtgccgtgaccgtgccgacctgaaaaaaaaaaaaaaaaaaaaaaaaaaaaaaaaatgtttaaacacaataaagttggaacgggagggggg

SEQ ID NO: 67102 - protein, 412 aa, Triticum aestivum
  peptide (1)..(412): Ceres Seq. ID no. 13659641
FLTRLSQVWQTNRPRGPAPARQRPGARSVSRSPTAPERSPRPYHVLSLPADPSKPTRARTQAPSTQQKETHQIFIPCPQQCRPERRRSAASEMKVEEQTVVGGGGGGLWGLAGRPCDTCAVDAARLYCRSDGAYLCAGCDARAHGAGSRHARVWLCEVCEHAPAAVTCRADAAALCATCDADIHSANPLASRHERLPVTPFFGALADPPQPAPSPSSAAATQEDADDDGSNEAEAASWLLPEPGDSPEDSTATFFPDSDAYLDLDFVRSMDGIKAIGVPVAPSELDVAGGALFYPEHSMNHSMSTSEVAVVPDALSAGGAPAPAPSVAVVASKGKEREARLMRYREKRKNRRFQKTIRYASRKAYAETRPRIKGRFAKRTAEDDALERDGPFSPASSAHLASDGDYGVVPSF

SEQ ID NO: 67103 - protein, 320 aa, Triticum aestivum
  peptide (1)..(320): Ceres Seq. ID no. 13659642
MKVEEQTVVGGGGGGLWGLAGRPCDTCAVDAARLYCRSDGAYLCAGCDARAHGAGSRHARVWLCEVCEHAPAAVTCRADAAALCATCDADIHSANPLASRHERLPVTPFFGALADPPQPAPSPSSAAATQEDADDDGSNEAEAASWLLPEPGDSPEDSTATFFPDSDAYLDLDFVRSMDGIKAIGVPVAPSELDVAGGALFYPEHSMNHSMSTSEVAVVPDALSAGGAPAPAPSVAVVASKGKEREARLMRYREKRKNRRFQKTIRYASRKAYAETRPRIKGRFAKRTAEDDALERDGPFSPASSAHLASDGDYGVVPSF

SEQ ID NO: 67104 - DNA, 815 bp, Triticum aestivum
  misc_feature (1)..(815): Ceres Seq. ID no. 12626708
agatcgagtcgctcgctcccttttccgaataggaaaagagtgagagaaaggagagaactccatggcagccgagggttccagcggcgtcggcgtcggcggccggaaaacatcgttgtctcataacccaagagagcgcggagtggcgaaattcctcaccggcttgccagcgcgaggaaacttctcctcaagttccatctcttccaatctgggaggcctcagggtttatgtctgcgagcacgacacaaatcctccagagggacaagtgatcgagacggatacgacaaatatcttaatcagacatctgcaactaaagaagaaagagagtgaggccaaagacgcaggttctaggactccaggggaaagtggcaagggtaaaagatgtgctgccagaagtttgggtgtgcagaagtcatcaaaaaagcccaacttgggcagttcttccggattgtcttcctctgatgaagcaatatctggcttttcacagcacacactgcagtccttcaccgtagagaggttgcgtgcacttctccgacaaagtggcctcacaaccaaggggaaaaaggacgaactgatcactcgcttaagagaggcgcagagttgatttcaatctcaagtttctgccttgtttgtgattgatcaattgcctactggcactgtaaaacgttgctgagctgaatgaatcatcaggctttacttgttgacattttgtaggtgtatgacttaaggtgatgtagtgatttactcgggctcaggctatcatgaatttgaagacttgtagcgaactttcactatatgcttgtcagaattcttgtttc

SEQ ID NO: 67105 - protein, 179 aa, Triticum aestivum
  peptide (1)..(179): Ceres Seq. ID no. 12626709
MAAEGSSGVGVGGRKTSLSHNPRERGVAKFLTGLPARGNFSSSSISSNLGGLRVYVCEHDTNPPEGQVIETDTTNILIRHLQLKKKESEAKDAGSRTPGESGKGKRCAARSLGVQKSSKKPNLGSSSGLSSSDEAISGFSQHTLQSFTVERLRALLRQSGLTTKGKKDELITRLREAQS

SEQ ID NO: 67106 - DNA, 1264 bp, Triticum aestivum
  misc_feature (1)..(1264): Ceres Seq. ID no. 13659643
actwkawyrtsyttaatcgaaaagaaacccttttagctcctggcctcttcccggcccatggccatcgattcgctgatacgacgctcgcggacagcagccaccgctcgaatctccgcgccggctccggccacggaagtgttctcccccaccatcaccatggctcaggctccaggccgcgccgcctcctccatgcggctcttcgacgcgcactgccacctgcaggacccccgcatcgcggcggccgcccccgccctcatacgcgccgccacagcctccggcgtcggccggttcgcggtcaacggcacctccgagaaagactggcacctggtgaagcagatggcccaggagcacccggctgtcatcccctgcttcggcctccacccatggtgggtgccggagaggtcgcctgattggatggattcgctccggcagttcttctcggagaccccagaggcggctgttggagagactggtctcgacaagggatcgcatggaaaaactattgacttcagagaacaggttgaagtattccaacgacaacttgaacttgctaaggaattggagaaacctgtttctgttcattgtgtacgtgccttcggcgatcttctggaaatactaaagcgtactgggcctttcccagcaggtgtgctgttgcattcttatctggggtctgcagaaatggtgcccggccttgcaaatttaggttgttacttttcgttgtctggtttccttacaggcatgaaatctactaaggcaaagaaaatgctcaaagcaatacccttggacaggattctgttagagacagatgcaccagatgcagtaccaaagttggacaatgtttctctagttacagtccctgtggacatttcaaatgcagatattgaaaaattccacggcgattctacctcttcaaaagaatccttgaatcatccagctaacatccacattgttttgaagtatgtggcatcactgcttgaaatgccggaagcagaactcgccgaggcgagctacaggaacgccaccaaactgttctcctaccctggatccaaagttcatcccgaagctgaaactgtgtgaatggggtggtgcggatggccatccaatacgaaccatgctcatcggaatcctggtgcgttctgcctctggatgtttgcctgtataccgcatgtatattgttgtactagtatatataatcggcctaagacaaagtaacaatcagagaagaaataataaagcggttcatggctggccgtgccatgttgcc

SEQ ID NO: 67107 - protein, 339 aa, Triticum aestivum
  peptide (1)..(339): Ceres Seq. ID no. 15219975
MAIDSLIRRSRTAATARISAPAPATEVFSPTITMAQAPGRAASSMRLFDAHCHLQDPRIAAAAPALIRAATASGVGRFAVNGTSEKDWHLVKQMAQEHPAVIPCFGLHPWWVPERSPDWMDSLRQFFSETPEAAVGETGLDKGSHGKTIDFREQVEVFQRQLELAKELEKPVSVHCVRAFGDLLEILKRTGPFPAGVLLHSYLGSAEMVPGLANLGCYFSLSGFLTGMKSTKAKKMLKAIPLDRILLETDAPDAVPKLDNVSLVTVPVDISNADIEKFHGDSTSSKESLNHPANIHIVLKYVASLLEMPEAELAEASYRNATKLFSYPGSKVHPEAETV

SEQ ID NO: 67108 - protein, 306 aa, Triticum aestivum
  peptide (1)..(306): Ceres Seq. ID no. 15219976
MAQAPGRAASSMRLFDAHCHLQDPRIAAAAPALIRAATASGVGRFAVNGTSEKDWHLVKQMAQEHPAVIPCFGLHPWWVPERSPDWMDSLRQFFSETPEAAVGETGLDKGSHGKTIDFREQVEVFQRQLELAKELEKPVSVHCVRAFGDLLEILKRTGPFPAGVLLHSYLGSAEMVPGLANLGCYFSLSGFLTGMKSTKAKKMLKAIPLDRILLETDAPDAVPKLDNVSLVTVPVDISNADIEKFHGDSTSSKESLNHPANIHIVLKYVASLLEMPEAELAEASYRNATKLFSYPGSKVHPEAETV

SEQ ID NO: 67109 - protein, 295 aa, Triticum aestivum
  peptide (1)..(295): Ceres Seq. ID no. 15219977
MRLFDAHCHLQDPRIAAAAPALIRAATASGVGRFAVNGTSEKDWHLVKQMAQEHPAVIPCFGLHPWWVPERSPDWMDSLRQFFSETPEAAVGETGLDKGSHGKTIDFREQVEVFQRQLELAKELEKPVSVHCVRAFGDLLEILKRTGPFPAGVLLHSYLGSAEMVPGLANLGCYFSLSGFLTGMKSTKAKKMLKAIPLDRILLETDAPDAVPKLDNVSLVTVPVDISNADIEKFHGDSTSSKESLNHPANIHIVLKYVASLLEMPEAELAEASYRNATKLFSYPGSKVHPEAETV

SEQ ID NO: 67110 - DNA, 1601 bp, Triticum aestivum
  misc_feature (1)..(1601): Ceres Seq. ID no. 14303043
tttttttcttgtaaatttccgaatggaaaactagtttttcttcccaaaaaacccacgaacacgagggttttgcccccgtcgacccacggtcgccattggccactctgctccgccgctccatgctcctccctagcctcctccgcggcgcccacctgctgcggccgtgccaccctcctcgccgccacctctcccgcctcctagaccgctacggcttcgtgccgccggcctccctgacccccaccgcgaaagagatctcccacggcacaggcgccgccgccgaccagaagcgtcggaccaagaagcccccctaccggccgccctcttcgctggaccgcggagaccgcccggcctcccactccgacctccccttcgatttccgcttcagctacacggagagctccccggacgccaagcccatcgggctccgcgagcccaagtactcccctttcggccccggtcgcctcgaccgcccctggaccggcctctgcgcgcccgccgtcgacaccacgctccggagcgtcgacgccgaggaccccgcccccgccgccgagaaggacctggaggaggcccggcggcgcgagcgagagcgcgtgctcggcgagccgctcacccccgcggagcgctccttcttggtcgacaaatgccagaagaaccgcaccaagcggcagatcaatctcgggagagatgggctcactcataacatgctgaatgacattcacaaccactggaagcatggcgagggggtcagggtgaaatgccttggtgtgccgacggttgatatgcaaaatgtgtgccgtgagctcgaggataaaactggtggccttatcatccacaggcatggtggccagttaatactatacagagggaggcattatcatccaaagaaaagacctgttattccgttgatgttatggaagccagctgaaccgatctacccaaggctaattaaaacaacaatagaagggctgacagttcaggagacaaaggaaatgaggaagaagggcctacatgctcctgtcttgacaaagcttgcaaagaacgggtattatgctagtctcgtgtcgatggttcgagatggttttctggccgatgaattggttcgtatagattgtaaaggattgccaaagagtgattatcggaagattggagtcaagctcagggaccttgttccttgtattcttgtgtcttttgacaaggagcaaattattgtttggagggggaaagaccatgatgaaagcatacaggataatatgcacaaggcattcccttcagttcttcaattagagagtgcagcaggagagaatgaacaggaagaagcatcaagtgagagtgtagcaggagagaatgaacatggtgaaaaagaagaaacatcagttgactgttcttctgatgagtggtctgagatcagtagctctgacgatgtgccagatgataagtaggacatttccagggtagaatatctttagatcgatctgacatatccagaggactcaatctgccaccaggtgttcacaaagttggcatgtcatccaacaccaccaacttgtccattcttaccagtgatgattatgttctatcactagtcgcaaccaaatccagtt

SEQ ID NO: 67111 - protein, 439 aa, Triticum aestivum
  peptide (1)..(439): Ceres Seq. ID no. 14303044
MLLPSLLRGAHLLRPCHPPRRHLSRLLDRYGFVPPASLTPTAKEISHGTGAAADQKRRTKKPPYRPPSSLDRGDRPASHSDLPFDFRFSYTESSPDAKPIGLREPKYSPFGPGRLDRPWTGLCAPAVDTTLRSVDAEDPAPAAEKDLEEARRRERERVLGEPLTPAERSFLVDKCQKNRTKRQINLGRDGLTHNMLNDIHNHWKHGEGVRVKCLGVPTVDMQNVCRELEDKTGGLIIHRHGGQLILYRGRHYHPKKRPVIPLMLWKPAEPIYPRLIKTTIEGLTVQETKEMRKKGLHAPVLTKLAKNGYYASLVSMVRDGFLADELVRIDCKGLPKSDYRKIGVKLRDLVPCILVSFDKEQIIVWRGKDHDESIQDNMHKAFPSVLQLESAAGENEQEEASSESVAGENEHGEKEETSVDCSSDEWSEISSSDDVPDDK

SEQ ID NO: 67112 - protein, 245 aa, Triticum aestivum
  peptide (1)..(245): Ceres Seq. ID no. 14303045
MLNDIHNHWKHGEGVRVKCLGVPTVDMQNVCRELEDKTGGLIIHRHGGQLILYRGRHYHPKKRPVIPLMLWKPAEPIYPRLIKTTIEGLTVQETKEMRKKGLHAPVLTKLAKNGYYASLVSMVRDGFLADELVRIDCKGLPKSDYRKIGVKLRDLVPCILVSFDKEQIIVWRGKDHDESIQDNMHKAFPSVLQLESAAGENEQEEASSESVAGENEHGEKEETSVDCSSDEWSEISSSDDVPDDK

SEQ ID NO: 67113 - protein, 219 aa, Triticum aestivum
  peptide (1)..(219): Ceres Seq. ID no. 14303046
MQNVCRELEDKTGGLIIHRHGGQLILYRGRHYHPKKRPVIPLMLWKPAEPIYPRLIKTTIEGLTVQETKEMRKKGLHAPVLTKLAKNGYYASLVSMVRDGFLADELVRIDCKGLPKSDYRKIGVKLRDLVPCILVSFDKEQIIVWRGKDHDESIQDNMHKAFPSVLQLESAAGENEQEEASSESVAGENEHGEKEETSVDCSSDEWSEISSSDDVPDDK

SEQ ID NO: 67114 - DNA, 1482 bp, Triticum aestivum
  misc_feature (1)..(1482): Ceres Seq. ID no. 14303071
gttgatgctcgacacctttgtatcttgtgtttggtgtgtgctgtgtgcgatggtagtgtgtgtttgttcggctttcggttgtaatcgatggttgtaatcggtgatggttactttataatactccagcctgtggacaacaacgcttgcttgctctgattttgatgtgataaatttgagccagcctagagctgcgggagctgctccccgctgaatcctaggccgctgcgaggtgtcgtcaggccatggccaccaagatgcgcaagctgccgagcgccgttttgctgctcctcttggtcgcgaacctgggatgggcatgggcgctgatcccttcctcccccgcaggcctctccgccaggcgctacgactccatcttcagcttcggcgactcctacgccgaaaccggcaacaaccccgtcgtcttcgccgccaactccgtcttcaaccttgtcacgcgcccaccctacggctccaccttcttcggccgccccaccggccgcaactccgacggccgcctcatcatcgacttcatcgctcagcgcctcggcctgccgctcgtcccgccgtccctggcgcacaacgggagcttccgccaaggcgccaacttcgccgtcgggggcgccaccgctctggacgccgctttcttccacgacgggtccgatcccggcaacaagttccctctcaacaccagcttgggcgtccagctgcagtggttcgaggctctcaagccttccctctgccgcacgacccaagagtgcgaggccttcttcggcagatccctcttcttcgtgggcgaattcggggtcaacgactaccacttctccttccccaccaagagcctgcaagagatcacggcgttcgttccggaagtgatcagggccatctcaatggcaatcgagaggctgatcaagcacggggccacgagtttcgtcgttcccgggacaatcccgtcgggatgcacgccgcacattctcagctccttcgccaaagacgaccccgcggaatacaactccaccaccgactgcctggaagattacaacaagctagggatgcaccacaacctgctgctgcaggaggccctggagaagcttcggggcaggcacccggacgccatgatcgtctacgccgacctcttcggccccatcattgacatggttgagtcacctcgcaagtatgggtttgaagatgttcttaccaactgttgcggagggcctggggcacttatctgcggcgaccaaggtgcacatgtatgtgagaaaccggctgctcgtctgttctgggatgtcgcgcacttgacggaggcggcttaccgctacatcgccgatggctggctgggcagcatagactcccctgcaactgcaagagagagcaggtatcagttagtgaggtagcagaagctgccctgattcatggactgatagctatctgaagtctggcctgtctgaactgaaaaacactggaattgaaatggaagcatgcaagttt

SEQ ID NO: 67115 - protein, 381 aa, Triticum aestivum
  peptide (1)..(381): Ceres Seq. ID no. 14303072
MATKMRKLPSAVLLLLLVANLGWAWALIPSSPAGLSARRYDSIFSFGDSYAETGNNPVVFAANSVFNLVTRPPYGSTFFGRPTGRNSDGRLIIDFIAQRLGLPLVPPSLAHNGSFRQGANFAVGGATALDAAFFHDGSDPGNKFPLNTSLGVQLQWFEALKPSLCRTTQECEAFFGRSLFFVGEFGVNDYHFSFPTKSLQEITAFVPEVIRAISMAIERLIKHGATSFVVPGTIPSGCTPHILSSFAKDDPAEYNSTTDCLEDYNKLGMHHNLLLQEALEKLRGRHPDAMIVYADLFGPIIDMVESPRKYGFEDVLTNCCGGPGALICGDQGAHVCEKPAARLFWDVAHLTEAAYRYIADGWLGSIDSPATARESRYQLVR

SEQ ID NO: 67116 - protein, 377 aa, Triticum aestivum
  peptide (1)..(377): Ceres Seq. ID no. 14303073
MRKLPSAVLLLLLVANLGWAWALIPSSPAGLSARRYDSIFSFGDSYAETGNNPVVFAANSVFNLVTRPPYGSTFFGRPTGRNSDGRLIIDFIAQRLGLPLVPPSLAHNGSFRQGANFAVGGATALDAAFFHDGSDPGNKFPLNTSLGVQLQWFEALKPSLCRTTQECEAFFGRSLFFVGEFGVNDYHFSFPTKSLQEITAFVPEVIRAISMAIERLIKHGATSFVVPGTIPSGCTPHILSSFAKDDPAEYNSTTDCLEDYNKLGMHHNLLLQEALEKLRGRHPDAMIVYADLFGPIIDMVESPRKYGFEDVLTNCCGGPGALICGDQGAHVCEKPAARLFWDVAHLTEAAYRYIADGWLGSIDSPATARESRYQLVR

SEQ ID NO: 67117 - protein, 279 aa, Triticum aestivum
  peptide (1)..(279): Ceres Seq. ID no. 14303074
MGMGADPFLPRRPLRQALRLHLQLRRLLRRNRQQPRRLRRQLRLQPCHAPTLRLHLLRPPHRPQLRRPPHHRLHRSAPRPAARPAVPGAQRELPPRRQLRRRGRHRSGRRFLPRRVRSRQQVPSQHQLGRPAAVVRGSQAFPLPHDPRVRGLLRQIPLLRGRIRGQRLPLLLPHQEPARDHGVRSGSDQGHLNGNREADQARGHEFRRSRDNPVGMHAAHSQLLRQRRPRGIQLHHRLPGRLQQARDAPQPAAAGGPGEASGQAPGRHDRLRRPLRPHH

SEQ ID NO: 67118 - DNA, 1561 bp, Triticum aestivum
  misc_feature (1)..(1561): Ceres Seq. ID no. 13659644
cacgggtccgctacggataaacggtcgctactcgctagtcgtccggtgaagccgcgcaagcagctgccgccgggataaaccgtttgttggccaggtccctctatccggtttcacccctcaaattatatcgcccaagcagccgcgccgccgggcaaaaatgctctcgctgcgggcgccgccccgtactctgtcgccctcgccgtggcggagacggggccgcctcgacggtttcgccgcgccgcgttgtgtcagcgccgcgccacctgcgacaaccctagagacggctaccgcgcggccggcaggcgtctccttcccgattctggtgaatggctgcactggtaaaatgggggtatctgttgctgaggcagctacttcaaggggtcttcacctagttcctgtttcattcagtagtagagagaaccttgacaaaacaatacaaattggtgatatagatgttgagatatatggcccttctgcaagagaagatgttctttcatctgtcatcgacgaattcccagatgtcattgtggtggactacacggcgcctaattctgtgaactctaatgccgagctctattgcaagcttggtgtgccatttgtaatgggcacaactggtggcgatcagcagttactgtacaaatcagtgcaagattcaaataactacgcactaatatctccacaaatgggcaaacaggttgttgcatttcttgctgcaatggaaacaattgcggagcagtttcctggggccttttcaggctatcgtttggaggtactggaatcccatcaagcaggaaagctggacacatctggtacagctaaagctgtaattgcttgtttcgagaagttaggcgcggtctttgacatggaccggatggttaagatcagggatcctgagcaacagctttatatggtgggtgtccccgaagaacacattgaagggcatgcattccatctgtaccatctaacttctcccgatgacagcgtttcatttgagttccagcacaatgtttgtggccgttcaatctacgccgaagggtcagttgatgctgccgtatttctgtataagaaggtacaatcaatggatcctaagagaatttacaacatgattgatgtcttgcaagaaggcgatatgcggtgaagttaattgattacctcttaatggatctgagtgaaattttgaaacaaatcttcccatatcttgcggaaacacaggggattgggagggggtagtatttagtgagtagtgtggactgtggagtactagagttgatatatgtactgaactgcgaatagtttagtccagaaccttaaactgtacgaacagaagtggggcaggacgtcaatattgttcatgtgggtggtagcctggttggtactctgctccgttccataatgtaagacgttttttgaaactagtgtcaaaaaacgtgactaatgtagtgtcaaaaacatcttacaataactgttaagcaagtttttctgggcatcccgctcattcatctaaaaaaaaaaaaaaaaagctkatcgcagtaccgtcgacctygagggggggmycggtgat

SEQ ID NO: 67119 - protein, 326 aa, Triticum aestivum
  peptide (1)..(326): Ceres Seq. ID no. 15219978
MLSLRAPPRTLSPSPWRRRGRLDGFAAPRCVSAAPPATTLETATARPAGVSFPILVNGCTGKMGVSVAEAATSRGLHLVPVSFSSRENLDKTIQIGDIDVEIYGPSAREDVLSSVIDEFPDVIVVDYTAPNSVNSNAELYCKLGVPFVMGTTGGDQQLLYKSVQDSNNYALISPQMGKQVVAFLAAMETIAEQFPGAFSGYRLEVLESHQAGKLDTSGTAKAVIACFEKLGAVFDMDRMVKIRDPEQQLYMVGVPEEHIEGHAFHLYHLTSPDDSVSFEFQHNVCGRSIYAEGSVDAAVFLYKKVQSMDPKRIYNMIDVLQEGDMR

SEQ ID NO: 67120 - protein, 264 aa, Triticum aestivum
  peptide (1)..(264): Ceres Seq. ID no. 15219979
MGVSVAEAATSRGLHLVPVSFSSRENLDKTIQIGDIDVEIYGPSAREDVLSSVIDEFPDVIVVDYTAPNSVNSNAELYCKLGVPFVMGTTGGDQQLLYKSVQDSNNYALISPQMGKQVVAFLAAMETIAEQFPGAFSGYRLEVLESHQAGKLDTSGTAKAVIACFEKLGAVFDMDRMVKIRDPEQQLYMVGVPEEHIEGHAFHLYHLTSPDDSVSFEFQHNVCGRSIYAEGSVDAAVFLYKKVQSMDPKRIYNMIDVLQEGDMR

SEQ ID NO: 67121 - protein, 178 aa, Triticum aestivum
  peptide (1)..(178): Ceres Seq. ID no. 15219980
MGTTGGDQQLLYKSVQDSNNYALISPQMGKQVVAFLAAMETIAEQFPGAFSGYRLEVLESHQAGKLDTSGTAKAVIACFEKLGAVFDMDRMVKIRDPEQQLYMVGVPEEHIEGHAFHLYHLTSPDDSVSFEFQHNVCGRSIYAEGSVDAAVFLYKKVQSMDPKRIYNMIDVLQEGDMR

SEQ ID NO: 67122 - DNA, 1961 bp, Triticum aestivum
  misc_feature (1)..(1961): Ceres Seq. ID no. 15170647
actctatactcaaccggattgcagcttctcatctcatctcatatatatacgcgccctcccaatctcttctccgagcgcgaaatctgacagagcagtgccagaccgttgttgagcagggagtggaaggggcaattcaattcgcaatggaatccctagccgccgccacgttctcgccctcgcgcctcgccgcccaccccgccccgcccgcggctgcggcggcgggcagatcgagggcggtggcggcacgagggaggaggaggagcagcagcggcctgaggtgctcgcctaccgctgcctcgtccccgaggacgacatggacacccccagcttcctcttcgagtccgtcgagcaggggctcgaggggaccaccaacgttggtcgttacagcatggtgggagcccacccggtgatggaggtggtggccaaggagaacaaggtcaccatcatggaccacgagaaggccgaggtgacggagaagatcatggatgatcctatgcaggttcccaggagcataatggagggatggcacccgcaggagatcgaccagctccctgaggccttcagcggtggatgggttgggttcttttcctatgatacagtccgctatgtcgaaaagaagaagatacctttctctggtgctccccacgacgataggaaccttcctgatgttcacttggggctttatgacgatgttcttgtctttgacaatgttgagaagaaagtttatgtcatccattgggtaagtgtggaccgacatgcatccactgaggaagcgtataaagatggcaggtcccggttgaagcggttgctttctaaagtttacaatgctaatgtccccaagctctctccaggatttgtgaagctacatactcggcagttcggtacacccttgaataaatcgaccatgacaagtgatgaatacaagagtgctgttatgcaggctaaggagcatattctggccggtaatattttccagattgttttaagccagcgttttgagaggcgaacttatgccactccatttgaggtttaccgtgctttacgaattgtcaacccaagcccgtacatggcttatgtgcaggcgagaggctgtatcctggtagcatctagtcctgaaattcttacaaaagttgagaagggaaaggttattaaccggccacttgctgggactacccgaaggggtaagacagagcatgaagataaattgcaagaggaacaactattgaatgatcaaaagcaatgtgctgaacacattatgcttgtagacttgggaaggaatgatgttggcagggtatccaaatctggatctgtgaaggtggagaagttgatgaacattgagcggtactcccatgttatgcacatcagctccacggttagtggagagttagatgatcatctcgaaagctgggatgcactacgagcagcattgcctgttggaacagtcagtggggcaccaaaggtaaaagccatggagctaatagatcagttggaagtcacaagacgaggaccatacagtggtggtttaggagggatatcatttgatggtgacatgcttattgctcttgctctccgcaccattgtattctcaacagctccaagccacaatacgatgtactcatacaaaagctcagataggcgccgagagtgggttgctcaccttcaggctggtgcgggcattgttgctgatagtatcccagacgatgagcaaaaagaatgtgagaataaggcggctgccctagctcgggcaattgatcttgcagagtcagcttttgtagacaaagaatagagtgcttattaaattatttttgttagttgttcatcatttttcatccagtttatgttggaaagttgttcatcatttcttcacccagtacatgttgggaagaaagaagcaataaccttctgctgtcctgtgaattgaataaatctggagctataataagatgtattttggttctcng

SEQ ID NO: 67123 - protein, 490 aa, Triticum aestivum
  peptide (1)..(490): Ceres Seq. ID no. 15170648
MDTPSFLFESVEQGLEGTTNVGRYSMVGAHPVMEVVAKENKVTIMDHEKAEVTEKIMDDPMQVPRSIMEGWHPQEIDQLPEAFSGGWVGFFSYDTVRYVEKKKIPFSGAPHDDRNLPDVHLGLYDDVLVFDNVEKKVYVIHWVSVDRHASTEEAYKDGRSRLKRLLSKVYNANVPKLSPGFVKLHTRQFGTPLNKSTMTSDEYKSAVMQAKEHILAGNIFQIVLSQRFERRTYATPFEVYRALRIVNPSPYMAYVQARGCILVASSPEILTKVEKGKVINRPLAGTTRRGKTEHEDKLQEEQLLNDQKQCAEHIMLVDLGRNDVGRVSKSGSVKVEKLMNIERYSHVMHISSTVSGELDDHLESWDALRAALPVGTVSGAPKVKAMELIDQLEVTRRGPYSGGLGGISFDGDMLIALALRTIVFSTAPSHNTMYSYKSSDRRREWVAHLQAGAGIVADSIPDDEQKECENKAAALARAIDLAESAFVDKE

SEQ ID NO: 67124 - protein, 465 aa, Triticum aestivum
  peptide (1)..(465): Ceres Seq. ID no. 15170649
MVGAHPVMEVVAKENKVTIMDHEKAEVTEKIMDDPMQVPRSIMEGWHPQEIDQLPEAFSGGWVGFFSYDTVRYVEKKKIPFSGAPHDDRNLPDVHLGLYDDVLVFDNVEKKVYVIHWVSVDRHASTEEAYKDGRSRLKRLLSKVYNANVPKLSPGFVKLHTRQFGTPLNKSTMTSDEYKSAVMQAKEHILAGNIFQIVLSQRFERRTYATPFEVYRALRIVNPSPYMAYVQARGCILVASSPEILTKVEKGKVINRPLAGTTRRGKTEHEDKLQEEQLLNDQKQCAEHIMLVDLGRNDVGRVSKSGSVKVEKLMNIERYSHVMHISSTVSGELDDHLESWDALRAALPVGTVSGAPKVKAMELIDQLEVTRRGPYSGGLGGISFDGDMLIALALRTIVFSTAPSHNTMYSYKSSDRRREWVAHLQAGAGIVADSIPDDEQKECENKAAALARAIDLAESAFVDKE

SEQ ID NO: 67125 - protein, 458 aa, Triticum aestivum
  peptide (1)..(458): Ceres Seq. ID no. 15170650
MEVVAKENKVTIMDHEKAEVTEKIMDDPMQVPRSIMEGWHPQEIDQLPEAFSGGWVGFFSYDTVRYVEKKKIPFSGAPHDDRNLPDVHLGLYDDVLVFDNVEKKVYVIHWVSVDRHASTEEAYKDGRSRLKRLLSKVYNANVPKLSPGFVKLHTRQFGTPLNKSTMTSDEYKSAVMQAKEHILAGNIFQIVLSQRFERRTYATPFEVYRALRIVNPSPYMAYVQARGCILVASSPEILTKVEKGKVINRPLAGTTRRGKTEHEDKLQEEQLLNDQKQCAEHIMLVDLGRNDVGRVSKSGSVKVEKLMNIERYSHVMHISSTVSGELDDHLESWDALRAALPVGTVSGAPKVKAMELIDQLEVTRRGPYSGGLGGISFDGDMLIALALRTIVFSTAPSHNTMYSYKSSDRRREWVAHLQAGAGIVADSIPDDEQKECENKAAALARAIDLAESAFVDKE

SEQ ID NO: 67126 - DNA, 1527 bp, Triticum aestivum
  misc_feature (1)..(1527): Ceres Seq. ID no. 14313381
accgcaaatctagcggagggtcagctcgggctcggcggcgaccagagaggaggagggaagtggcgtggttctctctcgcgcgcgcgcgtgcggcggagacggagaagggcgccggctgctccaggctgtaacctctggactggagtccttgtcgcgcctagatgctccgcgcctcctcgccacagcggcaagacggcgtcctgtgggccaaggctgcttcctcggccgccctccaccagtactatgccctcccaaagaagggcaagccgcagggccgcgagtccaccgtcctcgctgccttcctgctctcctctccagagaacccactgaaccccaccgtcctctccctcgccaccggcaccaagtgcctcggtgcagcacgcctcggacctcgcggtgacctcgtccatgacgcccacgccgaggtcgtcgcccgccgcgcgctgctccgcctcatttatgccgagattggcacagacaacccaccaagttggctggttgcatctggcgctgatgggcggtggaggctgagggacgggcatcagctgcatctctacatcacccagatcccctgtggggtcatgccggtgccgccgtcatccttggaggttcgaatggaacagctggataccatggtgaatggatgcagtgacgttggattcgtgcaaaggaagccagggcgtggtgatacaacattgtcggtgagctgttttgacaaaattactcgctggtgtgtcgttgggatccaaggtgcattgctgtcacacattcttgaacccttgtatttgtccaccattaccattggacaatcacctgatggtgcacctgacgggttttgtattgaaagtaatgttgtaaaagttcttggtgctcgcctgtcctgtctatccagaaaattccctgaccctttcaaactgaacaagccactattttttgaggcacctatcccccctcaagagtttcaacagacttcaggagatataccgcctttgacttgcgggtactcaatatgctggaataaatccggtttgcatgaagttgttttaggaacaactgggagaaaacaaggtacatcttcaaaggcagcatcctcaccctccactgagtcattgctctgcaagataagattggcagaggccttcgtatcacttgaacatccattagtcacaaaattccggcatgagaaactttcttatcgtgcaattaaggacatggcttgtgagtaccagcagatgcttgagcttcttagaaaggctccattttttggccggtggcgtgctaagccagcatccgttgatttgtttacagttccacggtgataaccaaatcttgaagttctatgctgtgtccgagaggctggttcttgaagttccttgatttcaccataattttagcagttttctgtaccagctctttcaacttatttgtagcatgtatgcttgtgcacaatactgaagtattgaacagtggtagcctgtaacaaacctataaagccctgtgatgtttcgcaccatgaggtggatgttt

SEQ ID NO: 67127 - protein, 385 aa, Triticum aestivum
  peptide (1)..(385): Ceres Seq. ID no. 14313382
MLRASSPQRQDGVLWAKAASSAALHQYYALPKKGKPQGRESTVLAAFLLSSPENPLNPTVLSLATGTKCLGAARLGPRGDLVHDAHAEVVARRALLRLIYAEIGTDNPPSWLVASGADGRWRLRDGHQLHLYITQIPCGVMPVPPSSLEVRMEQLDTMVNGCSDVGFVQRKPGRGDTTLSVSCFDKITRWCVVGIQGALLSHILEPLYLSTITIGQSPDGAPDGFCIESNVVKVLGARLSCLSRKFPDPFKLNKPLFFEAPIPPQEFQQTSGDIPPLTCGYSICWNKSGLHEVVLGTTGRKQGTSSKAASSPSTESLLCKIRLAEAFVSLEHPLVTKFRHEKLSYRAIKDMACEYQQMLELLRKAPFFGRWRAKPASVDLFTVPR

SEQ ID NO: 67128 - protein, 245 aa, Triticum aestivum
  peptide (1)..(245): Ceres Seq. ID no. 14313383
MPVPPSSLEVRMEQLDTMVNGCSDVGFVQRKPGRGDTTLSVSCFDKITRWCVVGIQGALLSHILEPLYLSTITIGQSPDGAPDGFCIESNVVKVLGARLSCLSRKFPDPFKLNKPLFFEAPIPPQEFQQTSGDIPPLTCGYSICWNKSGLHEVVLGTTGRKQGTSSKAASSPSTESLLCKIRLAEAFVSLEHPLVTKFRHEKLSYRAIKDMACEYQQMLELLRKAPFFGRWRAKPASVDLFTVPR

SEQ ID NO: 67129 - protein, 234 aa, Triticum aestivum
  peptide (1)..(234): Ceres Seq. ID no. 14313384
MEQLDTMVNGCSDVGFVQRKPGRGDTTLSVSCFDKITRWCVVGIQGALLSHILEPLYLSTITIGQSPDGAPDGFCIESNVVKVLGARLSCLSRKFPDPFKLNKPLFFEAPIPPQEFQQTSGDIPPLTCGYSICWNKSGLHEVVLGTTGRKQGTSSKAASSPSTESLLCKIRLAEAFVSLEHPLVTKFRHEKLSYRAIKDMACEYQQMLELLRKAPFFGRWRAKPASVDLFTVPR

SEQ ID NO: 67130 - DNA, 1292 bp, Triticum aestivum
  misc_feature (1)..(1292): Ceres Seq. ID no. 14316021
attgccaactccacgcatcatcgtctcggcaattagacaccacttccaagttccaactacaaacctccggcgagcggcggacaggttcacggccatggcttcttcttcttctccgaggacgatgagagccgtgcagtacgacaggtacggcggaggagccgaaggcctcaagcatgtggaggtgccgatcccgtcgcccaagaagggcgagctgctgctcaggatggaggcggccagcatcaaccgggtggactggaagttccagaacggcaaggcgcggcccttcctgcccagcaagttccccttcacccccgtctgcgagctcgccggcgaagtcgtggagctgggcgccggagtcagcggcttcagccagggcgacaaggtcatcgccgtcaacttcccgggtggcggcgggctggccgagtacgcggtggtgccggcgtcgcaagcagcgctgaggcctccagaggtgtccgcggtggagggcgcctgcctgccgatcgccgcgttcacggcgctcgccgcgctcagggcggccggggtcggcctcgacgccggcgacggccgtcccaagaacgtgctggtgaccgcggcctcgggcggcgtcggcaccttcgccgtgcagctggcgagcctcgcggggcaccaccacgtcacggccacctgcggcgcgcgcaacctggacctcatccggagcctgggggccgacgaggcgctggactatgacaccccggagggcgccgcgctgcgcgggccgtccggcccgaagcacgacgcggtggtgcactgcggggaggggttcccgtggtcggccttcaagccggcgctggccgacgccggcggcgtggtggtggacctcaccccgcgcctcgcgtccgtcgccgtcgcggtgctccattgggtgctcttctccaggaagaagctggtgccgctgatcgcgtctgccaaggaggaggacatggaggcgctgctgggcatggtgagtcaggggaagctccgggtggtgatcgactcgcggtacccgctgagcagggcgcacgagggctgggctaagagcatgagcggccacgccaccggcaaggtcgtcgtcgacatgggcgtcgccgatgacacagagtgatgatgctagtactactacaatacgtaaattcaaagtaaatagttgcagtgataccgattgccgaagatgatagagctgctcccatctgtccaagaatgtaaagaagcccattgcgatacatcatgtgattaatgacgtcttgataatcttcaacaggctgaagtttctacag

SEQ ID NO: 67131 - protein, 372 aa, Triticum aestivum
  peptide (1)..(372): Ceres Seq. ID no. 14316022
LPTPRIIVSAIRHHFQVPTTNLRRAADRFTAMASSSSPRTMRAVQYDRYGGGAEGLKHVEVPIPSPKKGELLLRMEAASINRVDWKFQNGKARPFLPSKFPFTPVCELAGEVVELGAGVSGFSQGDKVIAVNFPGGGGLAEYAVVPASQAALRPPEVSAVEGACLPIAAFTALAALRAAGVGLDAGDGRPKNVLVTAASGGVGTFAVQLASLAGHHHVTATCGARNLDLIRSLGADEALDYDTPEGAALRGPSGPKHDAVVHCGEGFPWSAFKPALADAGGVVVDLTPRLASVAVAVLHWVLFSRKKLVPLIASAKEEDMEALLGMVSQGKLRVVIDSRYPLSRAHEGWAKSMSGHATGKVVVDMGVADDTE

SEQ ID NO: 67132 - protein, 341 aa, Triticum aestivum
  peptide (1)..(341): Ceres Seq. ID no. 14316023
MASSSSPRTMRAVQYDRYGGGAEGLKHVEVPIPSPKKGELLLRMEAASINRVDWKFQNGKARPFLPSKFPFTPVCELAGEVVELGAGVSGFSQGDKVIAVNFPGGGGLAEYAVVPASQAALRPPEVSAVEGACLPIAAFTALAALRAAGVGLDAGDGRPKNVLVTAASGGVGTFAVQLASLAGHHHVTATCGARNLDLIRSLGADEALDYDTPEGAALRGPSGPKHDAVVHCGEGFPWSAFKPALADAGGVVVDLTPRLASVAVAVLHWVLFSRKKLVPLIASAKEEDMEALLGMVSQGKLRVVIDSRYPLSRAHEGWAKSMSGHATGKVVVDMGVADDTE

SEQ ID NO: 67133 - protein, 332 aa, Triticum aestivum
  peptide (1)..(332): Ceres Seq. ID no. 14316024
MRAVQYDRYGGGAEGLKHVEVPIPSPKKGELLLRMEAASINRVDWKFQNGKARPFLPSKFPFTPVCELAGEVVELGAGVSGFSQGDKVIAVNFPGGGGLAEYAVVPASQAALRPPEVSAVEGACLPIAAFTALAALRAAGVGLDAGDGRPKNVLVTAASGGVGTFAVQLASLAGHHHVTATCGARNLDLIRSLGADEALDYDTPEGAALRGPSGPKHDAVVHCGEGFPWSAFKPALADAGGVVVDLTPRLASVAVAVLHWVLFSRKKLVPLIASAKEEDMEALLGMVSQGKLRVVIDSRYPLSRAHEGWAKSMSGHATGKVVVDMGVADDTE

SEQ ID NO: 67134 - DNA, 1652 bp, Triticum aestivum
  misc_feature (1)..(1652): Ceres Seq. ID no. 14313252
gcccgcccgcctccgcgaacgaaaggccaaacctctgcccccctccttggctcctcctcctcgtgactccctcctgcggcccctcccccctccctcgccggtcaaaccctaacgcgcgcacccacccacccacccgtcaatcccttctcccatggcggcgctctccgtgcctctccgcaccgcggcggccctgtcctcgtccggcgccggatcccgcgccgccgccgacccctccaaggtgtcatgcgtgaggagcacccgctccgctcattttgactgcagcttcccctccattgcggcttcctcttcatctgccaggaacattgagccacttagagctatagctacacaggcacccccggccgtcccacaatatttgagtggagagaagacgaaggttggcatcaatgggttcggacggattgggaggttggttctgagaattgcaaccagtagagatgatattgaagttgtggctgtcaatgatcctttcattgatgctaagtacatggcctatatgttcaagtatgactccactcatggcccctttaaaggatccatcaatgttgtggatgattcaaccctggagatcaatgggaagaaaatcactataacaagcaaaagagatcccgcagagattccttggggtaactttggagctgactatgttgttgaatcttctggtgtttttacaaccatcgataaagcatcggtacacttgaagggtggtgctaagaaagtggtgatatctgctccatccgcagatgctcccatgtttgtggttggagtaaatgagatgagctacgatcccaagatgaatgttgtttctaatgcaagttgtaccactaactgtcttgctcctcttgccaaggttgttcatgaagaatttggcattcttgaaggtctaatgacaactgttcacgccacaacagccacccaaaagactgttgatggtccttcaatgaaagattggagaggagggcgtggtgctggtcaaaacataattcctagctccactggtgcagcaaaggctgttgggaaagttctccctgagctaaatggaaagcttactggcatggctttccgagttccaacaccaaatgtctctgtggttgacttgacctgccggcttgagaaaagtgcctcttatgatgatgtgaaagcagccatcaaggcggcatcagagggtgcactgaaaggcattttaggctacacagatgaggatgtggtatccaacgattttgttggtgacacaaggtcaagtgtatttgatgctaatgctggcatggggctgagctcttccttcatgaagctcgtgtcgtggtacgacaacgagtggggctacagcaaccgggttcttgatctcatcgcccacatggctcttgtctccgccaagcactgatcacctccgagtgctactaataggctgcaattttgccggttctttttattttcagaatttattattgcctttgttgtgccttttgagcacaggcagaaatgggtactcggatctatgacttgcttgtagcagtggatgaaatttacaccgtagcgttatgagcacgtcgtgggatttgttgagcgaatctcatttgtatcggtggtttgatttgttgctaaagaaagaaatcacaaattgtcccctttgg

SEQ ID NO: 67135 - protein, 416 aa, Triticum aestivum
  peptide (1)..(416): Ceres Seq. ID no. 14313253
MAALSVPLRTAAALSSSGAGSRAAADPSKVSCVRSTRSAHFDCSFPSIAASSSSARNIEPLRAIATQAPPAVPQYLSGEKTKVGINGFGRIGRLVLRIATSRDDIEVVAVNDPFIDAKYMAYMFKYDSTHGPFKGSINVVDDSTLEINGKKITITSKRDPAEIPWGNFGADYVVESSGVFTTIDKASVHLKGGAKKVVISAPSADAPMFVVGVNEMSYDPKMNVVSNASCTTNCLAPLAKVVHEEFGILEGLMTTVHATTATQKTVDGPSMKDWRGGRGAGQNIIPSSTGAAKAVGKVLPELNGKLTGMAFRVPTPNVSVVDLTCRLEKSASYDDVKAAIKAASEGALKGILGYTDEDVVSNDFVGDTRSSVFDANAGMGLSSSFMKLVSWYDNEWGYSNRVLDLIAHMALVSAKH

SEQ ID NO: 67136 - protein, 297 aa, Triticum aestivum
  peptide (1)..(297): Ceres Seq. ID no. 14313254
MAYMFKYDSTHGPFKGSINVVDDSTLEINGKKITITSKRDPAEIPWGNFGADYVVESSGVFTTIDKASVHLKGGAKKVVISAPSADAPMFVVGVNEMSYDPKMNVVSNASCTTNCLAPLAKVVHEEFGILEGLMTTVHATTATQKTVDGPSMKDWRGGRGAGQNIIPSSTGAAKAVGKVLPELNGKLTGMAFRVPTPNVSVVDLTCRLEKSASYDDVKAAIKAASEGALKGILGYTDEDVVSNDFVGDTRSSVFDANAGMGLSSSFMKLVSWYDNEWGYSNRVLDLIAHMALVSAKH

SEQ ID NO: 67137 - protein, 294 aa, Triticum aestivum
  peptide (1)..(294): Ceres Seq. ID no. 14313255
MFKYDSTHGPFKGSINVVDDSTLEINGKKITITSKRDPAEIPWGNFGADYVVESSGVFTTIDKASVHLKGGAKKVVISAPSADAPMFVVGVNEMSYDPKMNVVSNASCTTNCLAPLAKVVHEEFGILEGLMTTVHATTATQKTVDGPSMKDWRGGRGAGQNIIPSSTGAAKAVGKVLPELNGKLTGMAFRVPTPNVSVVDLTCRLEKSASYDDVKAAIKAASEGALKGILGYTDEDVVSNDFVGDTRSSVFDANAGMGLSSSFMKLVSWYDNEWGYSNRVLDLIAHMALVSAKH

SEQ ID NO: 67138 - DNA, 1782 bp, Triticum aestivum
  misc_feature (1)..(1782): Ceres Seq. ID no. 15170175
aatgcacactcgttcagctagtagcccaacatctcttgacttttgagaaaaatggcttttgaccttgcagcggcggcagcggcagtgccatggagctacctcctgtacgggctcacgggctctgcgctcctgtggcaggcccgcctgctgctggaccggctgtggtggcgcccgcggcggcttgagcggacgctgcgcgcgcagggcgtcggcggcacgccgtaccgcttcctcatgggcgacctcaaggacttcggccggctcaacgacgaggcctgggccaagccattgccgctgcgctgccacgacatcgtcccccgcgtcatcccgttcctccacaacaacgtccgggacaacggcaagccgtgcttctcttggttcggaccggtggccaacgtggccatcactgaccctgagcttatcaaggacgtgctgtccaacaagtttggccacttccagaagccccagttcccggctctcaccaagctgctcgccaacggcctcacgacccatgagggggagaaatgggtcaagcacaggaggatcctcaatcccgctttccatcttgagaagctcaagctcatgctaccggctttttctgcaagctgtgaagagcttgtcaccagatggaaggagttgcattgttctggcggatcgtgcgaggtggatgtgtggccggagctccagaacctcaccggggatgtcatttctcgcacagctttcggcagcagttatctcgaaggaaggcggatattccaactgcagtccgagcaagctaagctctttgttggtgcggtccagaggattattattccgggttacctattcttgcccaccaagaacaatttgaaaatgcgcaaaaacaataaggaggttgaatcagttttacaaggtctaatcaataaaagaatgcgagctatggaagaaggtgaaaaatcggaaaatgatctgctaggcctgttgctagagtcaaatatgaaggacatggacgagaatggccaacctagccaaggaatggcaatggaagatgtcatcgaggagtgcaaactattctacttggcaggaatggagacaacgtcggtgctgctcacgtggacaatgattgtactaagcatgcatccggagtggcaagaccttgcgagggaggaggtcctaggtttatttaggaagaacaaacccgagtacgagggccttagccgactaaaaatggtgaccatgatccttcacgaggttcttcggttgtatccatcggctacagtttttagccgaaaaacatacaaggatatggatatcggaggggtcagatacccctcgggtgtgttcatcgaggtgccagttctatttatcaatcatgatccagacatatggggaagtgatgtcaatgagttcaaaccagaccgatttgcccaggggatttccaaggcatctaagcatccgggcgccttcttgtcatttggttgggggccacgggtgtgcatcggccagaactttgcaatgctcgaagccaagatggcactaagcatgatccttcagcatttcgagtttgagctcgcgccatcatatacgcatgcaccgcacaccgtgatgacattgcaaccaatgcatggtgcgcaaattaatctcagagctatctgactaggtacacatttaagccaatatttggttgttcttagttatcggtgtaaacaatgttggcttttgtaagatgaactctctattttaactattcgtgtaaacaatattgatttgtgtaagatgaactatgcatttgaattatctggc

SEQ ID NO: 67139 - protein, 527 aa, Triticum aestivum
  peptide (1)..(527): Ceres Seq. ID no. 15170176
MAFDLAAAAAAVPWSYLLYGLTGSALLWQARLLLDRLWWRPRRLERTLRAQGVGGTPYRFLMGDLKDFGRLNDEAWAKPLPLRCHDIVPRVIPFLHNNVRDNGKPCFSWFGPVANVAITDPELIKDVLSNKFGHFQKPQFPALTKLLANGLTTHEGEKWVKHRRILNPAFHLEKLKLMLPAFSASCEELVTRWKELHCSGGSCEVDVWPELQNLTGDVISRTAFGSSYLEGRRIFQLQSEQAKLFVGAVQRIIIPGYLFLPTKNNLKMRKNNKEVESVLQGLINKRMRAMEEGEKSENDLLGLLLESNMKDMDENGQPSQGMAMEDVIEECKLFYLAGMETTSVLLTWTMIVLSMHPEWQDLAREEVLGLFRKNKPEYEGLSRLKMVTMILHEVLRLYPSATVFSRKTYKDMDIGGVRYPSGVFIEVPVLFINHDPDIWGSDVNEFKPDRFAQGISKASKHPGAFLSFGWGPRVCIGQNFAMLEAKMALSMILQHFEFELAPSYTHAPHTVMTLQPMHGAQINLRAI

SEQ ID NO: 67140 - protein, 466 aa, Triticum aestivum
  peptide (1)..(466): Ceres Seq. ID no. 15170177
MGDLKDFGRLNDEAWAKPLPLRCHDIVPRVIPFLHNNVRDNGKPCFSWFGPVANVAITDPELIKDVLSNKFGHFQKPQFPALTKLLANGLTTHEGEKWVKHRRILNPAFHLEKLKLMLPAFSASCEELVTRWKELHCSGGSCEVDVWPELQNLTGDVISRTAFGSSYLEGRRIFQLQSEQAKLFVGAVQRIIIPGYLFLPTKNNLKMRKNNKEVESVLQGLINKRMRAMEEGEKSENDLLGLLLESNMKDMDENGQPSQGMAMEDVIEECKLFYLAGMETTSVLLTWTMIVLSMHPEWQDLAREEVLGLFRKNKPEYEGLSRLKMVTMILHEVLRLYPSATVFSRKTYKDMDIGGVRYPSGVFIEVPVLFINHDPDIWGSDVNEFKPDRFAQGISKASKHPGAFLSFGWGPRVCIGQNFAMLEAKMALSMILQHFEFELAPSYTHAPHTVMTLQPMHGAQINLRAI

SEQ ID NO: 67141 - protein, 350 aa, Triticum aestivum
  peptide (1)..(350): Ceres Seq. ID no. 15170178
MLPAFSASCEELVTRWKELHCSGGSCEVDVWPELQNLTGDVISRTAFGSSYLEGRRIFQLQSEQAKLFVGAVQRIIIPGYLFLPTKNNLKMRKNNKEVESVLQGLINKRMRAMEEGEKSENDLLGLLLESNMKDMDENGQPSQGMAMEDVIEECKLFYLAGMETTSVLLTWTMIVLSMHPEWQDLAREEVLGLFRKNKPEYEGLSRLKMVTMILHEVLRLYPSATVFSRKTYKDMDIGGVRYPSGVFIEVPVLFINHDPDIWGSDVNEFKPDRFAQGISKASKHPGAFLSFGWGPRVCIGQNFAMLEAKMALSMILQHFEFELAPSYTHAPHTVMTLQPMHGAQINLRAI

SEQ ID NO: 67142 - DNA, 1549 bp, Triticum aestivum
  misc_feature (1)..(1549): Ceres Seq. ID no. 15169565
atctgcgcctactcgcaacgccgccgcatttctccaaccctctcaccgcttcctcaccacctccaaaagctcagcaggccatggctggatagacaagcatgtccgctgatcgagcagcttaagccctccatgccctgcgctcgtgcgtgattcgcatctatgactgctcagcagagttccttgttctgaaaattcggaattagttcgcgttccgaaggctccagatctgaagttaggaattggagggtattcgagcattagttggttcgatggatcgcaagtttctgaatatggtcctgcacgagtatggcagtagaatgtattcgctgtgccgcatcaagctctccactcatctcttctatccgacagcaaaagacgcaacaacagcccatgaagatgcaaatgcaaggaagaagaagcatgggggatggccatcaacgatctcgagctgcaagcgcccgccaagtactttggtcaacttctcggtgccacccagcactgctgccgccagtaacatgcgtttcttctccctcctgcctgagcagggagagtcctctgtcatgttcactgacccttcttgcaactccgcagtctacgatatggacatgaagtctttcgttctcgcacccagctcatacttctgcaaaccgtatgattccatcaccgtgtccattaggaaccgatgcagcagtggcaatttcttggaccacgaagatgatcacggcctctacgtcatgaacagcttggacgacagctttgagttcttcaattactgcaaggttggcttatctacctatccgttgctgtacaataagtggtactggagtcctctgccgtctccaccgtcccgcaccagtcctcttgttgcagcggcggtgattgacaactccaccatatgcgcgtcatccaagaacggcacatacacctttgatatttcgagggaggtgtggagccacactggcagctgggtgctgcccttccaccgcgcagcagagtatgtccctgagcttggactctggttcggcctccaggcccctggcacctggcaaaatcgcttatgtgcatttgacctttcatcctctgccatggcggaatctgctccttcacccctgcatgattgggaatacctcgatctcctccccgacgagttgctgccggtggggcgtgccttggtgaacctgggctcgggcaagttttgcatcgcgacccactgcaggaaggataggtctgcactccaggaggaggacgagctggagaatattaggagtttgggtggaaatgggggtgtgcaaactctcttgactggcgtggaggtggtccgctgcgccgacgggctccagcttatccaccacaagtcccaacgttacaacattgaaaacttaagtatccactgtgtgctctgactcgttttattacctatccgatcatcccaatctgagccatgtagtactagttagttagctttacctagtggctggatgcatcactctgttatgattacctgtaagtcgggacttacaaaataatactcctactactttatttaaag

SEQ ID NO: 67143 - protein, 377 aa, Triticum aestivum
  peptide (1)..(377): Ceres Seq. ID no. 15169566
MDRKFLNMVLHEYGSRMYSLCRIKLSTHLFYPTAKDATTAHEDANARKKKHGGWPSTISSCKRPPSTLVNFSVPPSTAAASNMRFFSLLPEQGESSVMFTDPSCNSAVYDMDMKSFVLAPSSYFCKPYDSITVSIRNRCSSGNFLDHEDDHGLYVMNSLDDSFEFFNYCKVGLSTYPLLYNKWYWSPLPSPPSRTSPLVAAAVIDNSTICASSKNGTYTFDISREVWSHTGSWVLPFHRAAEYVPELGLWFGLQAPGTWQNRLCAFDLSSSAMAESAPSPLHDWEYLDLLPDELLPVGRALVNLGSGKFCIATHCRKDRSALQEEDELENIRSLGGNGGVQTLLTGVEVVRCADGLQLIHHKSQRYNIENLSIHCVL

SEQ ID NO: 67144 - protein, 370 aa, Triticum aestivum
  peptide (1)..(370): Ceres Seq. ID no. 15169567
MVLHEYGSRMYSLCRIKLSTHLFYPTAKDATTAHEDANARKKKHGGWPSTISSCKRPPSTLVNFSVPPSTAAASNMRFFSLLPEQGESSVMFTDPSCNSAVYDMDMKSFVLAPSSYFCKPYDSITVSIRNRCSSGNFLDHEDDHGLYVMNSLDDSFEFFNYCKVGLSTYPLLYNKWYWSPLPSPPSRTSPLVAAAVIDNSTICASSKNGTYTFDISREVWSHTGSWVLPFHRAAEYVPELGLWFGLQAPGTWQNRLCAFDLSSSAMAESAPSPLHDWEYLDLLPDELLPVGRALVNLGSGKFCIATHCRKDRSALQEEDELENIRSLGGNGGVQTLLTGVEVVRCADGLQLIHHKSQRYNIENLSIHCVL

SEQ ID NO: 67145 - protein, 361 aa, Triticum aestivum
  peptide (1)..(361): Ceres Seq. ID no. 15169568
MYSLCRIKLSTHLFYPTAKDATTAHEDANARKKKHGGWPSTISSCKRPPSTLVNFSVPPSTAAASNMRFFSLLPEQGESSVMFTDPSCNSAVYDMDMKSFVLAPSSYFCKPYDSITVSIRNRCSSGNFLDHEDDHGLYVMNSLDDSFEFFNYCKVGLSTYPLLYNKWYWSPLPSPPSRTSPLVAAAVIDNSTICASSKNGTYTFDISREVWSHTGSWVLPFHRAAEYVPELGLWFGLQAPGTWQNRLCAFDLSSSAMAESAPSPLHDWEYLDLLPDELLPVGRALVNLGSGKFCIATHCRKDRSALQEEDELENIRSLGGNGGVQTLLTGVEVVRCADGLQLIHHKSQRYNIENLSIHCVL

SEQ ID NO: 67146 - DNA, 2707 bp, Triticum aestivum
  misc_feature (1)..(2707): Ceres Seq. ID no. 14313284
cgcccctaaacccaccctccaccattctatcccaagtataaaccctagcccagccccttatcctttcgtctccccctcccagacaccgcgccggaacccaaaccatccgaacgaccaaccaccagcgagcgccgcgacgtctgcctctcccatggcgcccgcgctgagcaggaccctgggcccgtcctcggtggcggcgctgcggccgagcccgtcgcgggggctgctgcgggccgcgctcgcgccgcaggggaggaggcccgccggcgccagaggagtcaggtgggaggccgggaggggccggctggtcggggccaggtgcgcctccgccgttgccgagaagaccgccggggaggaggaggaggccgccggcgagaagttcgagtaccaggccgaggttagccgcttgatggatttgattgttcacagcctctacagccataaggaagtgttccttcgggagcttgtaagtaatgcgagtgatgccttggataagctgagatttctcagtgtaactgacccgtccgtgctggctgatggtggtgacatggaaataaggattaaacctgaccctgatgctggcacaataactatcactgatagtggcattgggatgacaaaggatgagctcaaggactgccttggaactatcgcacaaagtggtacctccaaatttttgaaggctctgaaggagaacaaggagcttggtgcagataatggacttattggtcaatttggtgttggattttattcggcttttcttgttgcagagaaggttgtggtgtccactaagagtcccaagacagataagcagtatatatgggaagctgaggctaacagtagctcatacgttatcagggaagagactgatcctgagaaaatgctgacacgtggaacacagattactctctttttaagagaggatgataagtatgaatttgctgaccctacgaggattcaaggtctagttaagaactactcgcagtttgtttcgttccccatttttacatggcaggagaaatctagaacagttgaggttgaagaagaggagtcaaaagaagccgaagagacagcagagggtgagaaggagaagaagaagaaaactatcactgagaagtactgggattgggaattggcaaatgaaacaaagccaatatggatgagaaatccaaaggaagtcgaggaaaccgagtacaatgaattttacaagaaggcattcaatgagtttttggatcctctagctcatgcacactttacaacagagggtgaggtggaatttagaagtgttctctacatcccaggaatggcaccacttagcaatgaggagataatgaaccctaagaccaaaaatatcaggttgtatgtcaagagggttttcatttctgatgactttgatggcgagctgttccccaggtacttgagctttgtcaaaggtgttgttgactcgaatgatctccctctgaatgtttctcgtgagattcttcaagaaagtcgtattgtcaggatcatgcgcaagagacttgttaggaagacttttgatatgattcaggatattgctgacaaggataacaaggaggactacaagaaattttgggagagctttggcaaatttatgaaacttggttgcattgaggactcaggaaatcagaagcgccttgctcctttgctgcggttttattcctctaaaaatgaaacggatttgataagtctcgatcagtatgtggagaatatgcccgagacccaaaaggctatctattatattgccacagatagtcttcagagtgcaaagaccgctccattcttggaaaagctgcttcagaaagatattgaagttctataccttatcgaaccgattgatgaggtagctattcagaatctgcagacgtacaaagagaaaaagtttgttgatatcagcaaggaagacctagaattgggcgatgaggatgaggacaaggaagaaaccaagcaggaatacactcttctttgtgactggataaagcagcagctgggtgacaaagttgccaaggtccaaatttcaaagcgactcagctcttcaccatgtgttcttgtatctggcaagtttggttggtcggctaacatggaaaggcttatgaaagcacaaacgcttggtgacacatcaagcttggagttcatgagaggaagaagaatttttgaaatcaaccccgaccaccctattgtcaaggacttgagtgctgcttgcaagaacgagcctgagagcaccgaagccaagagggcagttgagttgctgtacgagactgccctgatctccagtggatacactcctgagagtccagcggagttggggggcaagatctacgagatgatgaccatcgcccttggcgggagatggggtagatccggcaccgaggaggctgagaccaatgccgacgtcgactcttctgaaggtgttgtaacggaggtcgttgagccatccgaagtcaggactgagaacgagaatgacccatggagagattagttagttctgtaggcatccattttttttaaataccctggaggtggatgagcaaaaaatagaagtatcactggagccagagtgatgatgacatcgagcgatggactgtctttgtaagaacactgagctccaaaatcttgtttgttatcgccaaaggctaaattttgtaggtgacttttttgacggccgtgaaataatttatctttattactg

SEQ ID NO: 67147 - protein, 831 aa, Triticum aestivum
  peptide (1)..(831): Ceres Seq. ID no. 14313285
APKPTLHHSIPSINPSPAPYPFVSPSQTPRRNPNHPNDQPPASAATSASPMAPALSRTLGPSSVAALRPSPSRGLLRAALAPQGRRPAGARGVRWEAGRGRLVGARCASAVAEKTAGEEEEAAGEKFEYQAEVSRLMDLIVHSLYSHKEVFLRELVSNASDALDKLRFLSVTDPSVLADGGDMEIRIKPDPDAGTITITDSGIGMTKDELKDCLGTIAQSGTSKFLKALKENKELGADNGLIGQFGVGFYSAFLVAEKVVVSTKSPKTDKQYIWEAEANSSSYVIREETDPEKMLTRGTQITLFLREDDKYEFADPTRIQGLVKNYSQFVSFPIFTWQEKSRTVEVEEEESKEAEETAEGEKEKKKKTITEKYWDWELANETKPIWMRNPKEVEETEYNEFYKKAFNEFLDPLAHAHFTTEGEVEFRSVLYIPGMAPLSNEEIMNPKTKNIRLYVKRVFISDDFDGELFPRYLSFVKGVVDSNDLPLNVSREILQESRIVRIMRKRLVRKTFDMIQDIADKDNKEDYKKFWESFGKFMKLGCIEDSGNQKRLAPLLRFYSSKNETDLISLDQYVENMPETQKAIYYIATDSLQSAKTAPFLEKLLQKDIEVLYLIEPIDEVAIQNLQTYKEKKFVDISKEDLELGDEDEDKEETKQEYTLLCDWIKQQLGDKVAKVQISKRLSSSPCVLVSGKFGWSANMERLMKAQTLGDTSSLEFMRGRRIFEINPDHPIVKDLSAACKNEPESTEAKRAVELLYETALISSGYTPESPAELGGKIYEMMTIALGGRWGRSGTEEAETNADVDSSEGVVTEVVEPSEVRTENENDPWRD

SEQ ID NO: 67148 - protein, 781 aa, Triticum aestivum
  peptide (1)..(781): Ceres Seq. ID no. 14313286
MAPALSRTLGPSSVAALRPSPSRGLLRAALAPQGRRPAGARGVRWEAGRGRLVGARCASAVAEKTAGEEEEAAGEKFEYQAEVSRLMDLIVHSLYSHKEVFLRELVSNASDALDKLRFLSVTDPSVLADGGDMEIRIKPDPDAGTITITDSGIGMTKDELKDCLGTIAQSGTSKFLKALKENKELGADNGLIGQFGVGFYSAFLVAEKVVVSTKSPKTDKQYIWEAEANSSSYVIREETDPEKMLTRGTQITLFLREDDKYEFADPTRIQGLVKNYSQFVSFPIFTWQEKSRTVEVEEEESKEAEETAEGEKEKKKKTITEKYWDWELANETKPIWMRNPKEVEETEYNEFYKKAFNEFLDPLAHAHFTTEGEVEFRSVLYIPGMAPLSNEEIMNPKTKNIRLYVKRVFISDDFDGELFPRYLSFVKGVVDSNDLPLNVSREILQESRIVRIMRKRLVRKTFDMIQDIADKDNKEDYKKFWESFGKFMKLGCIEDSGNQKRLAPLLRFYSSKNETDLISLDQYVENMPETQKAIYYIATDSLQSAKTAPFLEKLLQKDIEVLYLIEPIDEVAIQNLQTYKEKKFVDISKEDLELGDEDEDKEETKQEYTLLCDWIKQQLGDKVAKVQISKRLSSSPCVLVSGKFGWSANMERLMKAQTLGDTSSLEFMRGRRIFEINPDHPIVKDLSAACKNEPESTEAKRAVELLYETALISSGYTPESPAELGGKIYEMMTIALGGRWGRSGTEEAETNADVDSSEGVVTEVVEPSEVRTENENDPWRD

SEQ ID NO: 67149 - protein, 695 aa, Triticum aestivum
  peptide (1)..(695): Ceres Seq. ID no. 14313287
MDLIVHSLYSHKEVFLRELVSNASDALDKLRFLSVTDPSVLADGGDMEIRIKPDPDAGTITITDSGIGMTKDELKDCLGTIAQSGTSKFLKALKENKELGADNGLIGQFGVGFYSAFLVAEKVVVSTKSPKTDKQYIWEAEANSSSYVIREETDPEKMLTRGTQITLFLREDDKYEFADPTRIQGLVKNYSQFVSFPIFTWQEKSRTVEVEEEESKEAEETAEGEKEKKKKTITEKYWDWELANETKPIWMRNPKEVEETEYNEFYKKAFNEFLDPLAHAHFTTEGEVEFRSVLYIPGMAPLSNEEIMNPKTKNIRLYVKRVFISDDFDGELFPRYLSFVKGVVDSNDLPLNVSREILQESRIVRIMRKRLVRKTFDMIQDIADKDNKEDYKKFWESFGKFMKLGCIEDSGNQKRLAPLLRFYSSKNETDLISLDQYVENMPETQKAIYYIATDSLQSAKTAPFLEKLLQKDIEVLYLIEPIDEVAIQNLQTYKEKKFVDISKEDLELGDEDEDKEETKQEYTLLCDWIKQQLGDKVAKVQISKRLSSSPCVLVSGKFGWSANMERLMKAQTLGDTSSLEFMRGRRIFEINPDHPIVKDLSAACKNEPESTEAKRAVELLYETALISSGYTPESPAELGGKIYEMMTIALGGRWGRSGTEEAETNADVDSSEGVVTEVVEPSEVRTENENDPWRD

SEQ ID NO: 67150 - DNA, 1326 bp, Triticum aestivum
  misc_feature (1)..(1326): Ceres Seq. ID no. 14301839
tcttcgccacccgctccccgctccagaccgccgccgccgccgccgccgtgcgccatggtgaggctcaacgccgacctgatatggaagagcccgcacttcttcaacgccatcaaggagcgcgagctcgacctccgaggcaacaagatcgccatcatcgagaacatcggcgccaccgaggaccagtttgacactattgacttgtcggacaacgagattgtcaagcttgagaacttccctttcatgaatcgccttggcactctgttaatcaacaacaacagaattacacgtatcaatcccaaccttggtgagtttttacccaagatgcatactttggtgctgacgaacaatcgccttacaagtcttgcggagattgaccccctggcctctcttccaaagctgcaatttctcagcttactggataataccgtaactaagcaaccagattaccggttatatgtgatccacaaactgaagcatctgcgtttgctggacttcaagaaagtgaaacaacaggagagagctgacgcagcacaaaagttccactcaaaggaggcagaggaggcggcaaagaaggttgctgccaaagcttataccccagtagtgatggatgctcaaggtaccacaaaagaccagggccctaaagtagtcgctccaacgcctgcacaaatcacagctatcaaggctgctatcattaactcgcagacgcttgacgaagttacaaggcttgagaaggcattgagcactggccaagttcctgctgagtttgcgctccccaagcctgacaccaacatggctgaggcgtcagaggaagctgaagctgagaagatggagacagatggccaggaccaggaggaggatggggctgatgagcagaagcaagcagatgaaagcaccccgattcaggaggattgatgtcatgcatacacctgaatctgcctgttctcgtggggggatgaaaccatgtgcggcgactcggcgatctcgtgggggaattctcgactcggcgatctagtgtcagtatattgattgatgtatcctgtggatgctaacaacgcttttcagtacatggtactgttgtccgagtcgaggaaggtttacgcccaggggacctagatgtgttggatgttttagaagacgatgcgttgcgcgctgaatgaatgttgctgagactctactcccgcggtgtgtcgacaacgccgacttgcttgggctccattgttgttaaatttgctacgctacctattgatagatggtttttcttggaatttggatcttgctggggttgtaattcatcaggagaggatgtatctccatcagatttttggt

SEQ ID NO: 67151 - protein, 303 aa, Triticum aestivum
  peptide (1)..(303): Ceres Seq. ID no. 14301840
SSPPAPRSRPPPPPPPCAMVRLNADLIWKSPHFFNAIKERELDLRGNKIAIIENIGATEDQFDTIDLSDNEIVKLENFPFMNRLGTLLINNNRITRINPNLGEFLPKMHTLVLTNNRLTSLAEIDPLASLPKLQFLSLLDNTVTKQPDYRLYVIHKLKHLRLLDFKKVKQQERADAAQKFHSKEAEEAAKKVAAKAYTPVVMDAQGTTKDQGPKVVAPTPAQITAIKAAIINSQTLDEVTRLEKALSTGQVPAEFALPKPDTNMAEASEEAEAEKMETDGQDQEEDGADEQKQADESTPIQED

SEQ ID NO: 67152 - protein, 285 aa, Triticum aestivum
  peptide (1)..(285): Ceres Seq. ID no. 14301841
MVRLNADLIWKSPHFFNAIKERELDLRGNKIAIIENIGATEDQFDTIDLSDNEIVKLENFPFMNRLGTLLINNNRITRINPNLGEFLPKMHTLVLTNNRLTSLAEIDPLASLPKLQFLSLLDNTVTKQPDYRLYVIHKLKHLRLLDFKKVKQQERADAAQKFHSKEAEEAAKKVAAKAYTPVVMDAQGTTKDQGPKVVAPTPAQITAIKAAIINSQTLDEVTRLEKALSTGQVPAEFALPKPDTNMAEASEEAEAEKMETDGQDQEEDGADEQKQADESTPIQED

SEQ ID NO: 67153 - protein, 223 aa, Triticum aestivum
  peptide (1)..(223): Ceres Seq. ID no. 14301842
MNRLGTLLINNNRITRINPNLGEFLPKMHTLVLTNNRLTSLAEIDPLASLPKLQFLSLLDNTVTKQPDYRLYVIHKLKHLRLLDFKKVKQQERADAAQKFHSKEAEEAAKKVAAKAYTPVVMDAQGTTKDQGPKVVAPTPAQITAIKAAIINSQTLDEVTRLEKALSTGQVPAEFALPKPDTNMAEASEEAEAEKMETDGQDQEEDGADEQKQADESTPIQED

SEQ ID NO: 67154 - DNA, 1354 bp, Triticum aestivum
  misc_feature (1)..(1354): Ceres Seq. ID no. 13590307
aggtttgcagtagcgaggagtccatcccaccaagcttaaataacggccacccattcgcctcgtctcactatctctcccgttgtcgtcgcctcctcctaaaccactctccctatccccgtgtccagaagctaccccccggctccratggcggcgaaggaaccgatgcgcgtgctcgtcaccggcgccgcaggacaaatcggatatgctcttgttcccatgattgccaggggagttatgcttggtgcagaccagcctgttattctgcatatgctggatattgaatttgctgctgaagctcttaaaggcgtcaagatggagttgatcgatgccgcatttccacttctcaagggagttgttgcaacaactgatgttgtcgaggcctgcactggtgtgaatgttgcggttatggttggtggattccccaggaaggaaggaatggaaaggaaggatgttatgacgaaaaatgtttcaatctacaaagctcaagcatctgctcttgaagctcatgcagcccccaactgcaaggttttggttgttgccaacccagcaaacaccaatgctctcatcctgaaggagtttgctccatctatccctgagaagaacatcagttgtttgacccgcctagaccacaacagggcactcggtcagatttctgagagacttggtgtccaagtttctgacgtgaagaatgctattatctggggtaatcactcgtccagtcagtaccctgatgttaaccacgccactgtgaagacttccagtggagagaagcctgttcgtgaacttgttcaagatgatgaatggctaaacggggagttcattgccactgtccagcagcgtggtgctgcaatcatcaaagcgaggaagctctccagtgctctctctgctgccagctcagcttgtgatcacatccgtgactgggttctgggaaccgccgagggaacatttgtttccatgggtgtgtactctgatggttcatacggtgtgcctgctggtcttatctactccttcccagtaacgtgcagtggtggtgaatggacaattgttcaagggctcccgatcgatgagttctcgaggaagaagatggatgccaccgcccaggagctgtcggaggagaaggcgctggcctactcatgcctcgcgtaaatccacattcgaagggcagctgctcctctgatgttttgaataaatgaaaccttccgctccttagaaactctcgtctccacccagaacagccgcacatcgcgatgcatgctccttttcgctggttttcccagtgtgtatgaatgaggcttgtagctccccttttgcctgatgatttacaggacagtacatttgctggaggggggaaagg

SEQ ID NO: 67155 - protein, 333 aa, Triticum aestivum
  peptide (1)..(333): Ceres Seq. ID no. 15220958
MAAKEPMRVLVTGAAGQIGYALVPMIARGVMLGADQPVILHMLDIEFAAEALKGVKMELIDAAFPLLKGVVATTDVVEACTGVNVAVMVGGFPRKEGMERKDVMTKNVSIYKAQASALEAHAAPNCKVLVVANPANTNALILKEFAPSIPEKNISCLTRLDHNRALGQISERLGVQVSDVKNAIIWGNHSSSQYPDVNHATVKTSSGEKPVRELVQDDEWLNGEFIATVQQRGAAIIKARKLSSALSAASSACDHIRDWVLGTAEGTFVSMGVYSDGSYGVPAGLIYSFPVTCSGGEWTIVQGLPIDEFSRKKMDATAQELSEEKALAYSCLA

SEQ ID NO: 67156 - protein, 327 aa, Triticum aestivum
  peptide (1)..(327): Ceres Seq. ID no. 15220959
MRVLVTGAAGQIGYALVPMIARGVMLGADQPVILHMLDIEFAAEALKGVKMELIDAAFPLLKGVVATTDVVEACTGVNVAVMVGGFPRKEGMERKDVMTKNVSIYKAQASALEAHAAPNCKVLVVANPANTNALILKEFAPSIPEKNISCLTRLDHNRALGQISERLGVQVSDVKNAIIWGNHSSSQYPDVNHATVKTSSGEKPVRELVQDDEWLNGEFIATVQQRGAAIIKARKLSSALSAASSACDHIRDWVLGTAEGTFVSMGVYSDGSYGVPAGLIYSFPVTCSGGEWTIVQGLPIDEFSRKKMDATAQELSEEKALAYSCLA

SEQ ID NO: 67157 - protein, 309 aa, Triticum aestivum
  peptide (1)..(309): Ceres Seq. ID no. 15220960
MIARGVMLGADQPVILHMLDIEFAAEALKGVKMELIDAAFPLLKGVVATTDVVEACTGVNVAVMVGGFPRKEGMERKDVMTKNVSIYKAQASALEAHAAPNCKVLVVANPANTNALILKEFAPSIPEKNISCLTRLDHNRALGQISERLGVQVSDVKNAIIWGNHSSSQYPDVNHATVKTSSGEKPVRELVQDDEWLNGEFIATVQQRGAAIIKARKLSSALSAASSACDHIRDWVLGTAEGTFVSMGVYSDGSYGVPAGLIYSFPVTCSGGEWTIVQGLPIDEFSRKKMDATAQELSEEKALAYSCLA

SEQ ID NO: 67158 - DNA, 1583 bp, Triticum aestivum
  misc_feature (1)..(1583): Ceres Seq. ID no. 13662164
atcctaatagaaaactaaatgctttaatgaaaatggacttccctcatgtactcacatttcgtcggtacaccattagttgtcctatgtacacatgattttcccacctcattagttacttattagcctgtccggttcatcatagttacatgattggtctcctctgtttgtcagtttcatgtggagattgttgtgtgcttctactcaaccaacatcattaacctgcaggaagtgctggtgatgttctagaagacaatcctgttggcaagttgaaggttttcgtctacgacttgccaagcaagtacaacaagaggcttgtcaccaaggatccccgatgcctcaaccacatgtttgccgctgagatattcatgcaccgtttcttgctctctagtgcagtgaggacggttaatcctgaagaggccgattggttctacgctcctgtttacactacttgtgatctaactcgtgctggacttccgttaccgttcaagtctccaaggatgatgagaagcgcgatccagttcatttcaaagaggtggcctttctggaatagaactgatggaggagatcatttctttgtcgctccacatgattttgcggcatgctttcactaccaggaagagaatgctattgcgcgtggaattcttccgttgctacgccgtgctacattggttcaaacatttggacagaagaatcatgtttgcttgaaagaggggtctattacaataccaccatttgcgccaccacagaaaatgcaggcccacttgattcctcctgatactccccgttcaatcttcgtttacttcagaggtttgttctatgacaatgggaacgaccctgagggtgggtattacgcaagaggtgctcgagcttcattgtgggagaacttcaagaataatcctctgtttgatatctccaccgaacaccctgccacttactacgaagatatgcagcgctccgtcttctgcttatgtccgttggggtgggcgccatggagtcctaggttggtggaggctgtggtttttggctgcattccagtcatcatagctgacgacatcgtgctgcctttcgcggatgcaatcccttgggacgaaattggtgtttttgttgatgaggaggatgtgccaaagcttgattcaattctgacatcgattccgattgatgatatcctaaggaagcaaagattgctcgccaacccatcaatgaagaaggccatgctgttcccgcagccagcgcaacctagagatgcattccatcagattctaaatggccttgctcgcaaactcccgcacccagagaccatatacttacaaccaggtgagaagcatctcaactggacagctgggcctgttggagacttgaagccttggtaacataaaagcttccttgcaagacctggctttgttgatcttgtgaaaagttctgtttcttttatcacctttctctgagaagtccgaagatccatagaattatacgatattgaagtgtgttatatcctctgatgtcactctaactaaaaatagtggatcttacataaacggttgtaacgttgtaactgtattaattgtataaagaagtaaagaaac

SEQ ID NO: 67159 - protein, 341 aa, Triticum aestivum
  peptide (1)..(341): Ceres Seq. ID no. 15220162
MFAAEIFMHRFLLSSAVRTVNPEEADWFYAPVYTTCDLTRAGLPLPFKSPRMMRSAIQFISKRWPFWNRTDGGDHFFVAPHDFAACFHYQEENAIARGILPLLRRATLVQTFGQKNHVCLKEGSITIPPFAPPQKMQAHLIPPDTPRSIFVYFRGLFYDNGNDPEGGYYARGARASLWENFKNNPLFDISTEHPATYYEDMQRSVFCLCPLGWAPWSPRLVEAVVFGCIPVIIADDIVLPFADAIPWDEIGVFVDEEDVPKLDSILTSIPIDDILRKQRLLANPSMKKAMLFPQPAQPRDAFHQILNGLARKLPHPETIYLQPGEKHLNWTAGPVGDLKPW

SEQ ID NO: 67160 - protein, 334 aa, Triticum aestivum
  peptide (1)..(334): Ceres Seq. ID no. 15220163
MHRFLLSSAVRTVNPEEADWFYAPVYTTCDLTRAGLPLPFKSPRMMRSAIQFISKRWPFWNRTDGGDHFFVAPHDFAACFHYQEENAIARGILPLLRRATLVQTFGQKNHVCLKEGSITIPPFAPPQKMQAHLIPPDTPRSIFVYFRGLFYDNGNDPEGGYYARGARASLWENFKNNPLFDISTEHPATYYEDMQRSVFCLCPLGWAPWSPRLVEAVVFGCIPVIIADDIVLPFADAIPWDEIGVFVDEEDVPKLDSILTSIPIDDILRKQRLLANPSMKKAMLFPQPAQPRDAFHQILNGLARKLPHPETIYLQPGEKHLNWTAGPVGDLKPW

SEQ ID NO: 67161 - protein, 290 aa, Triticum aestivum
  peptide (1)..(290): Ceres Seq. ID no. 15220164
MMRSAIQFISKRWPFWNRTDGGDHFFVAPHDFAACFHYQEENAIARGILPLLRRATLVQTFGQKNHVCLKEGSITIPPFAPPQKMQAHLIPPDTPRSIFVYFRGLFYDNGNDPEGGYYARGARASLWENFKNNPLFDISTEHPATYYEDMQRSVFCLCPLGWAPWSPRLVEAVVFGCIPVIIADDIVLPFADAIPWDEIGVFVDEEDVPKLDSILTSIPIDDILRKQRLLANPSMKKAMLFPQPAQPRDAFHQILNGLARKLPHPETIYLQPGEKHLNWTAGPVGDLKPW

SEQ ID NO: 67162 - DNA, 795 bp, Triticum aestivum
  misc_feature (1)..(795): Ceres Seq. ID no. 12627322
acacttgattagctgaggaggaagagagaaaaaccatggcaataacactcaacaatggcttcaagatgcctatcattggattgggcgtgtggcgcatggaagatcttgtttcatcgggcttggttcgcagcatagggatcagcaactatgatatctttctgaccagagattgtttagcatattccaagataaagcctgctgtaaatcagattgaaactcatccatacttccagcgtgattctctagtcaaattttgtcagaagcatgggatttgtgtcactgcacacactccactaggaggtgctgcagcaaatgctgaatggtttggaacagtttcatgtttggatgaccaagttctcaaaggtctggctgaaaaatacaaaaagactgccgcccagatcagccttcgctggggaattcaaaggaacactgtggtcattcctaaatcgtcaaaactggagaggttgaaagagaactttcaggttttcgattttgagttgtctaaagaggacatggagctcattggaagtatagatagaaaatatcgaaccaatcaaccagctgtgttttggggcatagatttgtatgcgtgagaatgcccttcctaagtctgtatcatggctgtttgaccttgtgttaagattcagatttggtataagctgatctttcaggctccttagtagctcagtttatttgataatgtaaactttctttgttgatggttgaaaaatcatcttctcatcccatatccaatctcgtggactaaataagagagacttctgaatgttgttgctc

SEQ ID NO: 67163 - protein, 185 aa, Triticum aestivum
  peptide (1)..(185): Ceres Seq. ID no. 12627323
MAITLNNGFKMPIIGLGVWRMEDLVSSGLVRSIGISNYDIFLTRDCLAYSKIKPAVNQIETHPYFQRDSLVKFCQKHGICVTAHTPLGGAAANAEWFGTVSCLDDQVLKGLAEKYKKTAAQISLRWGIQRNTVVIPKSSKLERLKENFQVFDFELSKEDMELIGSIDRKYRTNQPAVFWGIDLYA

SEQ ID NO: 67164 - protein, 175 aa, Triticum aestivum
  peptide (1)..(175): Ceres Seq. ID no. 12627324
MPIIGLGVWRMEDLVSSGLVRSIGISNYDIFLTRDCLAYSKIKPAVNQIETHPYFQRDSLVKFCQKHGICVTAHTPLGGAAANAEWFGTVSCLDDQVLKGLAEKYKKTAAQISLRWGIQRNTVVIPKSSKLERLKENFQVFDFELSKEDMELIGSIDRKYRTNQPAVFWGIDLYA

SEQ ID NO: 67165 - protein, 165 aa, Triticum aestivum
  peptide (1)..(165): Ceres Seq. ID no. 12627325
MEDLVSSGLVRSIGISNYDIFLTRDCLAYSKIKPAVNQIETHPYFQRDSLVKFCQKHGICVTAHTPLGGAAANAEWFGTVSCLDDQVLKGLAEKYKKTAAQISLRWGIQRNTVVIPKSSKLERLKENFQVFDFELSKEDMELIGSIDRKYRTNQPAVFWGIDLYA

SEQ ID NO: 67166 - DNA, 1601 bp, Triticum aestivum
  misc_feature (1)..(1601): Ceres Seq. ID no. 15174852
ctcctgagtcctgacctagagttgccgccgtgccgtagcttgtggcgtcaccgacgacgcctcacccccaatccccttagcttctcacacgcgccgccgctacggctgctacctccgctgccatcgccttccccgcgtgcctgcagtttccaccccgtccgcaacctcggacactgtttctcgaggtaaaccgaaagggaggaaatcatggccaagttcaagaagaatctgaaccctcaggtcttcttggaaatatccatcgatgggcgacctgccaagagaatcacgtttgagctctttgctgatgtagttccgaagacggcagagaacttccgagcgctttgtactggtgagaaaggcctcggagaatctacaaagaagccactttattttaaaggaacacacatccatcggattatcccaggatttatggctcaggctggtgatttttccagaggagatggacgtggtggagagagcatatatggtggaaaatttccagatgaaaacttcaagttaaagcatgatcaacctggtattctttccatggcaaactctggagaaaacaccaatggatcccaattttttataacattcaaggctgtgccacatcttgatgggtattacttatttgctttagtcattttactaattttttgggacgccgataactgccacacgtgtgggcgttaaggggtctgcccacacgttttgtgtggtgcctaagaggaccagcccacacgcctacgtgtgggcaaaacaactagcgcccacacgcctctttttttcccttgcggtccctctcacacgcctacatgtgggcgaaatgcataacgcccacacgacctctctcagccacctacctcacggtcccgcacgcccagcgtgacagtcaccacgcgtccccgcagttgccatggtccggaccctcttcaatgtccgtttacctgcagttgccatgtcgctgaactacagttgccatgtcggacaactacagttgccatggttgctcaactgcagttgccatctcaggttcaagtgtcagatgccattttggacaactgcagctgttgccatgtatggtctggtttactatagttgccatgatttgaaaactttagaggttgccacctactaacactaagcagttgccatgcatggtctggtttactacagttgccatgatttgaaaaccttaggagttgccacctactaacactaggcagttaccgtgtagcgctacaaagagacatggcaaaacaacatgttcgggtaaaagagagagttgccatctgcttacaagcacactagaggcagttgccgtgtaccctgcaaaacatatggcaactgacatgttcgggtaaaaaaaagagagagttgccatctgcttacaagcacactagggcagttgccatgtacactgcaaaacgcatggcaactggcagcttgggtgtgggagaggagacgggcgtgtgggcgagatggcaaatgcccacacaccagcccttgtgcgtgagtgaaaactggtgtgtgggcgaactgctaaacgcccacacaccggcccctccgtgtggtgaaacggacgtgtgggcgaccgggtg

SEQ ID NO: 67167 - protein, 161 aa, Triticum aestivum
  peptide (1)..(161): Ceres Seq. ID no. 15174853
MAKFKKNLNPQVFLEISIDGRPAKRITFELFADVVPKTAENFRALCTGEKGLGESTKKPLYFKGTHIHRIIPGFMAQAGDFSRGDGRGGESIYGGKFPDENFKLKHDQPGILSMANSGENTNGSQFFITFKAVPHLDGYYLFALVILLIFWDADNCHTCGR

SEQ ID NO: 67168 - protein, 87 aa, Triticum aestivum
  peptide (1)..(87): Ceres Seq. ID no. 15174854
MAQAGDFSRGDGRGGESIYGGKFPDENFKLKHDQPGILSMANSGENTNGSQFFITFKAVPHLDGYYLFALVILLIFWDADNCHTCGR

SEQ ID NO: 67169 - DNA, 1108 bp, Triticum aestivum
  misc_feature (1)..(1108): Ceres Seq. ID no. 13659645
ctctctctccaatccgtctccctaactgcagatgatcgccggcaccccgttcccgtacctgagctgcttcgtggccaggttccggcacgacgagcgcaaggccatcgtcctgcgcgccgtcaagtgcatcttcgcctccatcaaagcgatgagctcggtggagtaccagccgtcgaccatggcgctggcgtccatcctggtcgcgcgcggcggcagggaggggacggggacggccccgaacctagaggaggagctcaaggcgatcctgggctcatcatggcagcaattacacaccgggcatgtgtattcctgctacagcgtgatgattcaggaggaggacaggtccacgcagtcgggcagggaggtggcttcctccggcgtctctgccgccgcccccgccgggagcccgggcacctccgtcgccatggccatggtccgtggaggggtggttgaacaggaccccgtggagagggctggttgaacagtagccggtggaggagcggtggaggctagatgaacatgagtccgtggatgagaagggtccattcgcctcagggccagtaggcagccagtaggaggagctgtgtgaatgttggctggagttcagctcgcactctagctgctgctaatttctgtcaccccccctagccttagcccttttttttttcattagcttgagcagtgattttggtggtggtggtggctaaatagggggcaggacttgattcttgtgattgtgcaattattgcagctgattggtaagttaggatcggaaagattttggttttcaggagatctttcccatccaggctttaaaaggctgtgtaaagaggagaggtagagagagaaagtcccagcaggagtactgcactactgctgcaaagagctctcagctcagctcaaagtgaggtgaaaagaaaagagagcacaacaaagcctaggcatgatatgagtggggagccatttttttctccttcctttgtgtacgtgtgtgtgtttggatagtgtgcgagctagctggacctctatcctctcgtcctcttctggtcactccatcagtgacaagtaatacagtacgtaatagttaagcagatattcattcattcat

SEQ ID NO: 67170 - protein, 150 aa, Triticum aestivum
  peptide (1)..(150): Ceres Seq. ID no. 13659646
LSLQSVSLTADDRRHPVPVPELLRGQVPARRAQGHRPARRQVHLRLHQSDELGGVPAVDHGAGVHPGRARRQGGDGDGPEPRGGAQGDPGLIMAAITHRACVFLLQRDDSGGGQVHAVGQGGGFLRRLCRRPRREPGHLRRHGHGPWRGG

SEQ ID NO: 67171 - protein, 149 aa, Triticum aestivum
  peptide (1)..(149): Ceres Seq. ID no. 13659647
MIAGTPFPYLSCFVARFRHDERKAIVLRAVKCIFASIKAMSSVEYQPSTMALASILVARGGREGTGTAPNLEEELKAILGSSWQQLHTGHVYSCYSVMIQEEDRSTQSGREVASSGVSAAAPAGSPGTSVAMAMVRGGVVEQDPVERAG

SEQ ID NO: 67172 - protein, 110 aa, Triticum aestivum
  peptide (1)..(110): Ceres Seq. ID no. 13659648
MSSVEYQPSTMALASILVARGGREGTGTAPNLEEELKAILGSSWQQLHTGHVYSCYSVMIQEEDRSTQSGREVASSGVSAAAPAGSPGTSVAMAMVRGGVVEQDPVERAG

SEQ ID NO: 67173 - DNA, 1849 bp, Triticum aestivum
  misc_feature (1)..(1849): Ceres Seq. ID no. 15169631
acttactactagtacatacagtacatataaacatatcacgtctctgcaagctgcaagccaacaagctgcctgccatggaggggtggttaagcttgtgtttcatagccggatccacgctactggcaatttggtttctcgagctctcccgtcgcaaccccaataagaagctgcctccagggccatggactctccccatcgtcggcagcctcctccacgtcgttggcgccttcccgcaccgcaccattgcagaactgtctcgccggcacgggccgctgatgcacctcaggctaggcgaagtcgccaccatggtggtctccagcgccgaggtggcggcgctggtcttgaagaccaacgaccttacgttcgcggaccggcctcgcactgtgacgcagaacatcttcggcagtggcggcaaggacatcgcctttgccccctacggcgccgcgtggcgccagatgcgcaaggtgtgcgtcatggagatcctcggctccaagcaggcgaggcgcacggagcgcatcaggactgaggaggtcggcagcctccttcgctccatcgtcagcgcctcggccgtcggcggcgccggcgctacggttaacgtcagcgagaaggtggcgatgcttagcaacgacgtcgtttcgcgggcggttttcggcgggaaggtcgcgcagcgggacgagtacatccgcgagttgggcgaggccatggagctcgtgaccggcttctgcctcgtcgacatcttcccctcgtcgcggctggtgcggtggcttagcagcgtcgagaggcgtatgaggaggagctacggccgtatgcagagcatcatcgctgacatcctcgacgagcgcaaggccgcacgagctgccggcgatggctcctgcagcaccgacgatgaggacctgctggaagtgctgctcaggctgcaggccgaggactcgttggaattccctctaaccacagagattataggcgccgtcatgtttgacatgtttgctggtggcacggataccaccgcaaccgttttggagtgggctatgtcggaactcgtgaacaatcccgaagccatgactaaagcacaactagaggtccgagaggtgcttggtgaagaccgagttatcattaccaactgtgacattgctaaactcccctacatgaggatggtcatcaaggaggttctgaggttgcatccacccattcctctagtccctcgcatggctagagatgattgcacaattatgggttatgacatgcttaaaggcaccaatgtattagttaatgtcttcgcaatttccagagattcaagatattgggaaaatcctgaagagtttaagcccaagagatttgagaacaacaatatggattacaatgtgacgtattttgaatttattccctttggggctgggcgacggcagtgccctgggatgttttttggcatgtcgacagtacacatcacattggcaaacatgttgtatcacttcaattggatgcttcctgaaggggcttgtctgacttcatttgacatgtctgagaaatttgggttgacaataagacgaagatatgacctgcagctcagagctattacacgggtgggcgtcaaagatatactgtcgaagtgatgcaaacaacatggtatctatcttgtgatgtatgttcagatatattcctcttagcgtatgaatttattacattgcatatttgcacactagaataagaaaagctcgttgggactgtactacttttcacaaattacattactttgtactacaaggcatagatatcttaattgtattagttttgtgtttgtgaacatatgaatgatgcaatatgcataaggaagtaacatggtcttttatct

SEQ ID NO: 67174 - protein, 535 aa, Triticum aestivum
  peptide (1)..(535): Ceres Seq. ID no. 15169632
LLLVHTVHINISRLCKLQANKLPAMEGWLSLCFIAGSTLLAIWFLELSRRNPNKKLPPGPWTLPIVGSLLHVVGAFPHRTIAELSRRHGPLMHLRLGEVATMVVSSAEVAALVLKTNDLTFADRPRTVTQNIFGSGGKDIAFAPYGAAWRQMRKVCVMEILGSKQARRTERIRTEEVGSLLRSIVSASAVGGAGATVNVSEKVAMLSNDVVSRAVFGGKVAQRDEYIRELGEAMELVTGFCLVDIFPSSRLVRWLSSVERRMRRSYGRMQSIIADILDERKAARAAGDGSCSTDDEDLLEVLLRLQAEDSLEFPLTTEIIGAVMFDMFAGGTDTTATVLEWAMSELVNNPEAMTKAQLEVREVLGEDRVIITNCDIAKLPYMRMVIKEVLRLHPPIPLVPRMARDDCTIMGYDMLKGTNVLVNVFAISRDSRYWENPEEFKPKRFENNNMDYNVTYFEFIPFGAGRRQCPGMFFGMSTVHITLANMLYHFNWMLPEGACLTSFDMSEKFGLTIRRRYDLQLRAITRVGVKDILSK

SEQ ID NO: 67175 - protein, 511 aa, Triticum aestivum
  peptide (1)..(511): Ceres Seq. ID no. 15169633
MEGWLSLCFIAGSTLLAIWFLELSRRNPNKKLPPGPWTLPIVGSLLHVVGAFPHRTIAELSRRHGPLMHLRLGEVATMVVSSAEVAALVLKTNDLTFADRPRTVTQNIFGSGGKDIAFAPYGAAWRQMRKVCVMEILGSKQARRTERIRTEEVGSLLRSIVSASAVGGAGATVNVSEKVAMLSNDVVSRAVFGGKVAQRDEYIRELGEAMELVTGFCLVDIFPSSRLVRWLSSVERRMRRSYGRMQSIIADILDERKAARAAGDGSCSTDDEDLLEVLLRLQAEDSLEFPLTTEIIGAVMFDMFAGGTDTTATVLEWAMSELVNNPEAMTKAQLEVREVLGEDRVIITNCDIAKLPYMRMVIKEVLRLHPPIPLVPRMARDDCTIMGYDMLKGTNVLVNVFAISRDSRYWENPEEFKPKRFENNNMDYNVTYFEFIPFGAGRRQCPGMFFGMSTVHITLANMLYHFNWMLPEGACLTSFDMSEKFGLTIRRRYDLQLRAITRVGVKDILSK

SEQ ID NO: 67176 - protein, 444 aa, Triticum aestivum
  peptide (1)..(444): Ceres Seq. ID no. 15169634
MHLRLGEVATMVVSSAEVAALVLKTNDLTFADRPRTVTQNIFGSGGKDIAFAPYGAAWRQMRKVCVMEILGSKQARRTERIRTEEVGSLLRSIVSASAVGGAGATVNVSEKVAMLSNDVVSRAVFGGKVAQRDEYIRELGEAMELVTGFCLVDIFPSSRLVRWLSSVERRMRRSYGRMQSIIADILDERKAARAAGDGSCSTDDEDLLEVLLRLQAEDSLEFPLTTEIIGAVMFDMFAGGTDTTATVLEWAMSELVNNPEAMTKAQLEVREVLGEDRVIITNCDIAKLPYMRMVIKEVLRLHPPIPLVPRMARDDCTIMGYDMLKGTNVLVNVFAISRDSRYWENPEEFKPKRFENNNMDYNVTYFEFIPFGAGRRQCPGMFFGMSTVHITLANMLYHFNWMLPEGACLTSFDMSEKFGLTIRRRYDLQLRAITRVGVKDILSK

SEQ ID NO: 67177 - DNA, 1616 bp, Triticum aestivum
  misc_feature (1)..(1616): Ceres Seq. ID no. 14302384
ctttttcgtagcagcacctgttttatccaccacgacctcttctcctccgatcccacaagagagccgagcgaggactcgctcgaccccagccgccattgatggctcgtgccacctccgcagcgctcgcgctgctcatcttcctcctctgccggcacgcccacgccgacgcgggcacgacgctgtcgcaagggcagtcgctggcgggcaacgagaagctcctgtcagccaacggcgccttctcgctctccttcttctccccgcgcggcggcgacggctcgcgggtgtacctgggcgtcatgttcgccagggccgcggagccgaccgtgccgtgggtggccaaccgcgacgcgccggtgcgcgccacggccccgtcctactccgccaccgtcacggactccggggacctccgggtgctggagggggagcgcgtcgtgtggcggaccaacacgacctcgtcggcggggaacttcacgctgacgatccaggacacggggaacctcgtgctcgccggcggcagcggcgcgcaggcggtgcagctgtggcagagcttcgaccaccccgcggacaccttcctccccgggatgaacatcacgctggcccggcgcggcggcgccgtcgtcaggcagacgctgttccggtcgtggaggagccccgacgacccggcccccgggaacttcacgctggggcaggacccgctgggctcggcgcagctcttcatatggcgccgcggccaggacggcaaggacgtgacgcactggaggtccgggcagtgggccaagggcagcttcgtgggcatcccgtatcggccgctcaacctctacggcttccagctctccggcgacccgtcccagagcaacggcctgttctacaccttccagcgcttcaactcctcgcagtacaggttcgtgctccagcccaacggcacggagacgtgctaccagcttgtggacgccaccggcgcctgggaggtcgtctggtcgcagccgacgatgccgtgccaggcctacaacacgtgcggcccgaacgccgagtgctccgctgccgaccactgcacctgcctcagaggttttgagccgaaatccgaagaggagtacagcaacggggtgtggacgcaggggtgcgtgaggagcagccagctgacctgcagcgagaggaacgtgagcatgagcggcagcgacgcgttcgccgtcctctccggcgtgaagctgccggacctggcggcgtgggagtcggcggtcatcagcgcggacgcgtgcaggcagtggtgcctggccaactgcacgtgcaacgcgtacagctatagcggcggcaccgggtgcctgacctgggcccacgagttggtggacgtctaccagttccccagcggacagttccccaacggacaagggtttgacctgcacatcaaggtcccggcttctctattaggtaagctcatcaacgttgatgatttgttaacctttgaagttctaaattgggtttagaaaactgcagctaggaaacttctcggttgttgaggaaatgtcgataaacgcttagactgtagaaattgttgtttttgttgtgtgcttgtggcaagacttgcacgactgatttgggttgttacaacccgaaaatcc

SEQ ID NO: 67178 - protein, 460 aa, Triticum aestivum
  peptide (1)..(460): Ceres Seq. ID no. 14302385
MARATSAALALLIFLLCRHAHADAGTTLSQGQSLAGNEKLLSANGAFSLSFFSPRGGDGSRVYLGVMFARAAEPTVPWVANRDAPVRATAPSYSATVTDSGDLRVLEGERVVWRTNTTSSAGNFTLTIQDTGNLVLAGGSGAQAVQLWQSFDHPADTFLPGMNITLARRGGAVVRQTLFRSWRSPDDPAPGNFTLGQDPLGSAQLFIWRRGQDGKDVTHWRSGQWAKGSFVGIPYRPLNLYGFQLSGDPSQSNGLFYTFQRFNSSQYRFVLQPNGTETCYQLVDATGAWEVVWSQPTMPCQAYNTCGPNAECSAADHCTCLRGFEPKSEEEYSNGVWTQGCVRSSQLTCSERNVSMSGSDAFAVLSGVKLPDLAAWESAVISADACRQWCLANCTCNAYSYSGGTGCLTWAHELVDVYQFPSGQFPNGQGFDLHIKVPASLLGKLINVDDLLTFEVLNWV

SEQ ID NO: 67179 - protein, 394 aa, Triticum aestivum
  peptide (1)..(394): Ceres Seq. ID no. 14302386
MFARAAEPTVPWVANRDAPVRATAPSYSATVTDSGDLRVLEGERVVWRTNTTSSAGNFTLTIQDTGNLVLAGGSGAQAVQLWQSFDHPADTFLPGMNITLARRGGAVVRQTLFRSWRSPDDPAPGNFTLGQDPLGSAQLFIWRRGQDGKDVTHWRSGQWAKGSFVGIPYRPLNLYGFQLSGDPSQSNGLFYTFQRFNSSQYRFVLQPNGTETCYQLVDATGAWEVVWSQPTMPCQAYNTCGPNAECSAADHCTCLRGFEPKSEEEYSNGVWTQGCVRSSQLTCSERNVSMSGSDAFAVLSGVKLPDLAAWESAVISADACRQWCLANCTCNAYSYSGGTGCLTWAHELVDVYQFPSGQFPNGQGFDLHIKVPASLLGKLINVDDLLTFEVLNWV

SEQ ID NO: 67180 - protein, 356 aa, Triticum aestivum
  peptide (1)..(356): Ceres Seq. ID no. 14302387
FFVAAPVLSTTTSSPPIPQESRARTRSTPAAIDGSCHLRSARAAHLPPLPARPRRRGHDAVARAVAGGQREAPVSQRRLLALLLLPARRRRLAGVPGRHVRQGRGADRAVGGQPRRAGARHGPVLLRHRHGLRGPPGAGGGARRVADQHDLVGGELHADDPGHGEPRARRRQRRAGGAAVAELRPPRGHLPPRDEHHAGPARRRRRQADAVPVVEEPRRPGPRELHAGAGPAGLGAALHMAPRPGRQGRDALEVRAVGQGQLRGHPVSAAQPLRLPALRRPVPEQRPVLHLPALQLLAVQVRAPAQRHGDVLPACGRHRRLGGRLVAADDAVPGLQHVRPERRVLRCRPLHLPQRF

SEQ ID NO: 67181 - DNA, 1632 bp, Triticum aestivum
  misc_feature (1)..(1632): Ceres Seq. ID no. 14316013
aaaaaagaagcaaagctttcctcctccacacaacgcactcacaggctcacagcccaacacaatcaccatggccccaaccagcagcaccaaccgcggccgccgccgcgtggtcctcttaccgctgccataccaaggccacatcaaccccatgctgcgcctcgccgccgcgctgcactcccgcggcctcgcggtcactatcctccacccggagacccgcgcgccggaccgcgggaagctccctgcggactaccgcctggtcaccatcccggacagcataccgccggagctcgccgcgtccgaggacatcgcgtcgttcgtcttcgcgctgaacaagaactgtgcggcgccgttccgggactacctggccggcgcccttagagaggaggaggacggccacgtcgccttcgtggtcgccgacgtcgactggttcgcgccgctctccgtggccagggagctgggcgtggccgctctggccctcatgaccagcagcgccgccaggttcctggtgtacttggcgtacccaagcctgtgccacaagggctatttgcccgtccaagagtcgaatttcaacactacagttgaggagcttccccccttccttgtacgagacttggatcgcgtgatggacatggctcgacacctcgcgtacgccgatctcctcgctcacatcgtcgccggcgtgaggcaatcatccggcctaataatcaacacatccgaagacatggagggcatggagatcgagaggatccgcagcgagatcgcccgcccggtgttcgccgtcggccctctgcacatgatgacgccgtctctatccgtccatagcagcctactgacagaagatcgcagctgtttggactggttggacacacaacggccaaactctgtgctctacgtgagctttgggagcctggtgggcatcgacacagacgagttcttggagatggcctggggcctggccgacagccagcgcccgttcgtgtgggtggtccggccggggctggtgcacggctgtgagctcagcgcgctccctgaagagctgcaagagaagataggtagcataggtagagtagtcagttgggctccgcagcaggaggtgctgaagcatccgtctgtggtcgcttttctcacgcactgcggctggaactcggcgacggagagcatatccgaaggcgtgccgatgatatgcagaccgttgtccagcgatcagatgggcactagcaggtatgtgtgtgatgtgtggaaggtgggggttagggtggaggtggagaaccagctgaagagagggggcgtccaggcggccatcacaagactgatggaaggaaaggaaggtgaagaggtcagggaaagaatgaaagatctgaggcatgcgatgagcaagtgtactgatgaaggtgggacatctgatgttgctttgcaacgtttagtggatttcagtgtttaagctagcacttaactatttagactatggctagaaaacatgtccgtgaattgcaacagaagaaatgtctctagctcatggaccagtgcaatgcaacgggacgggagtcaagtgatgcttttttctttttgcggggacggtaaacatgctcagtgcggctcttcctcaatcatcaatgcaagatttctataaag

SEQ ID NO: 67182 - protein, 479 aa, Triticum aestivum
  peptide (1)..(479): Ceres Seq. ID no. 14316014
KKKQSFPPPHNALTGSQPNTITMAPTSSTNRGRRRVVLLPLPYQGHINPMLRLAAALHSRGLAVTILHPETRAPDRGKLPADYRLVTIPDSIPPELAASEDIASFVFALNKNCAAPFRDYLAGALREEEDGHVAFVVADVDWFAPLSVARELGVAALALMTSSAARFLVYLAYPSLCHKGYLPVQESNFNTTVEELPPFLVRDLDRVMDMARHLAYADLLAHIVAGVRQSSGLIINTSEDMEGMEIERIRSEIARPVFAVGPLHMMTPSLSVHSSLLTEDRSCLDWLDTQRPNSVLYVSFGSLVGIDTDEFLEMAWGLADSQRPFVWVVRPGLVHGCELSALPEELQEKIGSIGRVVSWAPQQEVLKHPSVVAFLTHCGWNSATESISEGVPMICRPLSSDQMGTSRYVCDVWKVGVRVEVENQLKRGGVQAAITRLMEGKEGEEVRERMKDLRHAMSKCTDEGGTSDVALQRLVDFSV

SEQ ID NO: 67183 - protein, 457 aa, Triticum aestivum
  peptide (1)..(457): Ceres Seq. ID no. 14316015
MAPTSSTNRGRRRVVLLPLPYQGHINPMLRLAAALHSRGLAVTILHPETRAPDRGKLPADYRLVTIPDSIPPELAASEDIASFVFALNKNCAAPFRDYLAGALREEEDGHVAFVVADVDWFAPLSVARELGVAALALMTSSAARFLVYLAYPSLCHKGYLPVQESNFNTTVEELPPFLVRDLDRVMDMARHLAYADLLAHIVAGVRQSSGLIINTSEDMEGMEIERIRSEIARPVFAVGPLHMMTPSLSVHSSLLTEDRSCLDWLDTQRPNSVLYVSFGSLVGIDTDEFLEMAWGLADSQRPFVWVVRPGLVHGCELSALPEELQEKIGSIGRVVSWAPQQEVLKHPSVVAFLTHCGWNSATESISEGVPMICRPLSSDQMGTSRYVCDVWKVGVRVEVENQLKRGGVQAAITRLMEGKEGEEVRERMKDLRHAMSKCTDEGGTSDVALQRLVDFSV

SEQ ID NO: 67184 - protein, 430 aa, Triticum aestivum
  peptide (1)..(430): Ceres Seq. ID no. 14316016
MLRLAAALHSRGLAVTILHPETRAPDRGKLPADYRLVTIPDSIPPELAASEDIASFVFALNKNCAAPFRDYLAGALREEEDGHVAFVVADVDWFAPLSVARELGVAALALMTSSAARFLVYLAYPSLCHKGYLPVQESNFNTTVEELPPFLVRDLDRVMDMARHLAYADLLAHIVAGVRQSSGLIINTSEDMEGMEIERIRSEIARPVFAVGPLHMMTPSLSVHSSLLTEDRSCLDWLDTQRPNSVLYVSFGSLVGIDTDEFLEMAWGLADSQRPFVWVVRPGLVHGCELSALPEELQEKIGSIGRVVSWAPQQEVLKHPSVVAFLTHCGWNSATESISEGVPMICRPLSSDQMGTSRYVCDVWKVGVRVEVENQLKRGGVQAAITRLMEGKEGEEVRERMKDLRHAMSKCTDEGGTSDVALQRLVDFSV

SEQ ID NO: 67185 - DNA, 1611 bp, Triticum aestivum
  misc_feature (1)..(1611): Ceres Seq. ID no. 13598067
agaacatcctaatcgaaaactcctccatttcgtttgtatctcatctgctctgctctgctgccgctctggtctgtagatctgggaggatcagagtcagacattggggttttgtgattagactagaagaggcgcgttaatgtcgcaagaactggtgcgtacggcaatggcggccgcgcccggtgatgttccgccgcctttggccactcctgctcttcttccgcaggccaaaagggttaaggaagacccaagttttccccaagcctcgccggtggttccggccatgacggcggaagactggtccaaatggtccacacttccgcccgacctcgtccgctgcatcggcgactccctcctgtccaccaacgacctcgactgctacattcacttccgcgccgtttgccccggctggcgcgccgccgccgacgaccccatgagcgacacctccgacccccgcttccacccgcgccggtggatcgtcctcaacgaggacttccagagcgaagggaagctgctcctgctgaacactgacaacggccgcttcgtccatagaaagctcccgctgctcagcgaccactacgtcgtagccacaactcgcaatggctacttggtcctggcggacaaaagccctcctcactctgcaagcgtcctcaaccctctgaccggcgtcgtcatccgtttcatggcgcctgtgccccctgaggtgggacacgctgctgtctcccttgccagctctgccctcgggctcaccttgtttggcgactcatctcacaagatttactcggcctatcccgacaacaagagttccgtcgtccacgaggctcagcaagcagcttatgttttcttccgtaatgcggtcgtgggcggtgtctactcagacactatagggcatgccgtgattgtccgtttatgcagatcgctgatgcctccagatgcaaaccacctttgttttccagtggctttgggtagagaaatgctgcttgtcgggactgcagagagatcgttctttatttttaaaacagacatcgagttaagtaagctggaggatgtggacaccatcaacaactatgccattttcattggtcatcagaggtgcctggctgtctatgctgataagttcataggcattgaggcaaactgcatctactacactgaaaatctgggttcgtccgctcgtatatgcaagtgcggcatcaaggacagaaaagtagagaagatctctgaaactgccgatttcatcaagaaggacaagaagtttgtcctcgttgctgaccgtccttcgacgatcatcgaccttctcgccagctacaccatcaacatcccggactctcggctggccttgcaacagattccataaggcgccggcagatcttcgttcaactctggggatctcgatgaccaactgacaaggctatgctttcgctaagtaattgctcctaattactgtctagtcccctgctttgttattttggatatgccttgccttgtagtaacatgtaagaagcaggttgatcctaggttagatcacctttagtggaactaccgtttttttgtcttaaaaaaaaaaaaaaaaaagcttatcgataccgtcgacctcgagggggggcmcggtrc

SEQ ID NO: 67186 - protein, 405 aa, Triticum aestivum
  peptide (1)..(405): Ceres Seq. ID no. 15222249
MSQELVRTAMAAAPGDVPPPLATPALLPQAKRVKEDPSFPQASPVVPAMTAEDWSKWSTLPPDLVRCIGDSLLSTNDLDCYIHFRAVCPGWRAAADDPMSDTSDPRFHPRRWIVLNEDFQSEGKLLLLNTDNGRFVHRKLPLLSDHYVVATTRNGYLVLADKSPPHSASVLNPLTGVVIRFMAPVPPEVGHAAVSLASSALGLTLFGDSSHKIYSAYPDNKSSVVHEAQQAAYVFFRNAVVGGVYSDTIGHAVIVRLCRSLMPPDANHLCFPVALGREMLLVGTAERSFFIFKTDIELSKLEDVDTINNYAIFIGHQRCLAVYADKFIGIEANCIYYTENLGSSARICKCGIKDRKVEKISETADFIKKDKKFVLVADRPSTIIDLLASYTINIPDSRLALQQIP

SEQ ID NO: 67187 - protein, 396 aa, Triticum aestivum
  peptide (1)..(396): Ceres Seq. ID no. 15222250
MAAAPGDVPPPLATPALLPQAKRVKEDPSFPQASPVVPAMTAEDWSKWSTLPPDLVRCIGDSLLSTNDLDCYIHFRAVCPGWRAAADDPMSDTSDPRFHPRRWIVLNEDFQSEGKLLLLNTDNGRFVHRKLPLLSDHYVVATTRNGYLVLADKSPPHSASVLNPLTGVVIRFMAPVPPEVGHAAVSLASSALGLTLFGDSSHKIYSAYPDNKSSVVHEAQQAAYVFFRNAVVGGVYSDTIGHAVIVRLCRSLMPPDANHLCFPVALGREMLLVGTAERSFFIFKTDIELSKLEDVDTINNYAIFIGHQRCLAVYADKFIGIEANCIYYTENLGSSARICKCGIKDRKVEKISETADFIKKDKKFVLVADRPSTIIDLLASYTINIPDSRLALQQIP

SEQ ID NO: 67188 - protein, 357 aa, Triticum aestivum
  peptide (1)..(357): Ceres Seq. ID no. 15222251
MTAEDWSKWSTLPPDLVRCIGDSLLSTNDLDCYIHFRAVCPGWRAAADDPMSDTSDPRFHPRRWIVLNEDFQSEGKLLLLNTDNGRFVHRKLPLLSDHYVVATTRNGYLVLADKSPPHSASVLNPLTGVVIRFMAPVPPEVGHAAVSLASSALGLTLFGDSSHKIYSAYPDNKSSVVHEAQQAAYVFFRNAVVGGVYSDTIGHAVIVRLCRSLMPPDANHLCFPVALGREMLLVGTAERSFFIFKTDIELSKLEDVDTINNYAIFIGHQRCLAVYADKFIGIEANCIYYTENLGSSARICKCGIKDRKVEKISETADFIKKDKKFVLVADRPSTIIDLLASYTINIPDSRLALQQIP

SEQ ID NO: 67189 - DNA, 1981 bp, Triticum aestivum
  misc_feature (1)..(1981): Ceres Seq. ID no. 14307908
gtagtcgcgtgcctccacctccactacaccgcaccgcgccatcagaaggccggccgggtcggtcggtgcaaggatattgcacacacacgctcgcagacacggtgtgacagcaattgcctccggcgatgtccgtttcttggccggcgccgtcgacgtgcgcggccgccggggccctcctggccgccgcgtggctgctgtgcttcaggctgttcccggccgtggcgaggccgagaaggcgggcgatgaagacgggggcgcagctccctcccggcatcttcgggtggccggtcgtcggcgagacgctggacttcgtctcctgcgcctactccccacgccccgaggcgttcgttgacaagcgccgcctccggtacggcagcgcggtgttccggtcgcacctgttcgggtcggcgacggtagtgacggcggacgcggaggtgaaccggttcgtgctgcagagcgacgcgcggtcgttcgtaccgtggtacccgcggtcgctgacggagctcatgggcaagtcctccatcctcgtcatcaacggcagcctgcagcgccgcgtccacggcctcgtcggcgccttcttcaagtcgccgcagctcaaggcgcaggtcaccgccgacatgcagcgccgcctcgccccggcgctcgccgcctggcgcgagcagggccccggcgcgcgcctccgcatccaggaccacgccaagacgattgtgttccagatcctggtgcgggctctgatcgggctggaggcaggcccagagatgcagcagctcaagcagcaattccaggaatttattgtcggactcatgtcccttcccattaagctgccagggactaggctctacagatccctccaggccaagaagaggatggcgagggtcgtacagaggatcatacaggagaagaggaggaggagggccctggacggcggcggcgcgccgagagacgccatcgacgtgctcatgggcgacggcagtgaggagctcaccgacgagctcatatccgacaacatgatcgacttcatgatccccgccgaggactccgtgccggtgctcatcacgctcgccgtcaagttcctcagcgagtgccccctcgccttgcaacagcttgaggaggagaacatgcagctcaagatgagaaaaaccgacctgggtgaaaccttgcaatggactgactacatgtccttgtcattcacgcagcatgtgataacggagacgctgcggattgggaatatcatcagtgggatcatgcgcaaggcggtccgcgacgtcgaagtgaaggggcatctcatccccaaaggatggcgtgtgttcatgtacttccggtcggtccacctcgacgacatgctctacgaggatccctgcaagttcaatccatggaggtggaagtgtgtcaatcaacaggagaaggacatgagcactagcagcttcaccccttttggtggtgggcagaggctgtgcccgggcctggatctggccaggctggaagcttccatctttctccaccacttggtcaccagcttcaggtgggtggccgaggaggaccacatcgtcaacttccccaccgtgcgcctcaagggaggcatgcccatcagggtcaccgccaaagactagctacccgttactcggaccatcgtccttgatcaactccccgcagcagccaagccagccaaaggctcaagttacatgtgcatatacataatgctactgctacaagtatgtggtgttatccatagcaaggttaaaagccccttcaaggagtaagctagctaggcaacatctgatgtgagtacataggggggtatgttgaagtgttgtaggggagcttaattagccaaggagtagtaggtgccactgatgatcactgtggctcgttaatcatagccgagggagactctgaccgatgatgcatgctgttatagtagtataagtagtagtatagtgctggtgtcacaaggaatagatatatcatctatgtatacatg

SEQ ID NO: 67190 - protein, 494 aa, Triticum aestivum
  peptide (1)..(494): Ceres Seq. ID no. 14307909
MSVSWPAPSTCAAAGALLAAAWLLCFRLFPAVARPRRRAMKTGAQLPPGIFGWPVVGETLDFVSCAYSPRPEAFVDKRRLRYGSAVFRSHLFGSATVVTADAEVNRFVLQSDARSFVPWYPRSLTELMGKSSILVINGSLQRRVHGLVGAFFKSPQLKAQVTADMQRRLAPALAAWREQGPGARLRIQDHAKTIVFQILVRALIGLEAGPEMQQLKQQFQEFIVGLMSLPIKLPGTRLYRSLQAKKRMARVVQRIIQEKRRRRALDGGGAPRDAIDVLMGDGSEELTDELISDNMIDFMIPAEDSVPVLITLAVKFLSECPLALQQLEEENMQLKMRKTDLGETLQWTDYMSLSFTQHVITETLRIGNIISGIMRKAVRDVEVKGHLIPKGWRVFMYFRSVHLDDMLYEDPCKFNPWRWKCVNQQEKDMSTSSFTPFGGGQRLCPGLDLARLEASIFLHHLVTSFRWVAEEDHIVNFPTVRLKGGMPIRVTAKD

SEQ ID NO: 67191 - protein, 455 aa, Triticum aestivum
  peptide (1)..(455): Ceres Seq. ID no. 14307910
MKTGAQLPPGIFGWPVVGETLDFVSCAYSPRPEAFVDKRRLRYGSAVFRSHLFGSATVVTADAEVNRFVLQSDARSFVPWYPRSLTELMGKSSILVINGSLQRRVHGLVGAFFKSPQLKAQVTADMQRRLAPALAAWREQGPGARLRIQDHAKTIVFQILVRALIGLEAGPEMQQLKQQFQEFIVGLMSLPIKLPGTRLYRSLQAKKRMARVVQRIIQEKRRRRALDGGGAPRDAIDVLMGDGSEELTDELISDNMIDFMIPAEDSVPVLITLAVKFLSECPLALQQLEEENMQLKMRKTDLGETLQWTDYMSLSFTQHVITETLRIGNIISGIMRKAVRDVEVKGHLIPKGWRVFMYFRSVHLDDMLYEDPCKFNPWRWKCVNQQEKDMSTSSFTPFGGGQRLCPGLDLARLEASIFLHHLVTSFRWVAEEDHIVNFPTVRLKGGMPIRVTAKD

SEQ ID NO: 67192 - protein, 367 aa, Triticum aestivum
  peptide (1)..(367): Ceres Seq. ID no. 14307911
MGKSSILVINGSLQRRVHGLVGAFFKSPQLKAQVTADMQRRLAPALAAWREQGPGARLRIQDHAKTIVFQILVRALIGLEAGPEMQQLKQQFQEFIVGLMSLPIKLPGTRLYRSLQAKKRMARVVQRIIQEKRRRRALDGGGAPRDAIDVLMGDGSEELTDELISDNMIDFMIPAEDSVPVLITLAVKFLSECPLALQQLEEENMQLKMRKTDLGETLQWTDYMSLSFTQHVITETLRIGNIISGIMRKAVRDVEVKGHLIPKGWRVFMYFRSVHLDDMLYEDPCKFNPWRWKCVNQQEKDMSTSSFTPFGGGQRLCPGLDLARLEASIFLHHLVTSFRWVAEEDHIVNFPTVRLKGGMPIRVTAKD

SEQ ID NO: 67193 - DNA, 964 bp, Triticum aestivum
  misc_feature (1)..(964): Ceres Seq. ID no. 15173087
aaccattccttggacaatcttcttcctcttcccctgctatacactctagcccttcttgtccgtgcatttctccctggctttgactggttgttgatgaagctgcaggagccagccccctagctatctgtctgtctagctgctccatcgcctccggactgtccttcgggtccacccccggctccgtcatggccacgctctgcttcttcatggccgtcttcatgctgggcctcgccttcccgtaccaccactggacgacgccggggaaccacatcgggttcgtggtgctgtacgcgctcaccttcttcttcgccaacttcgggcccaactccaccaccttcatcgtgccggcggagatcttcccggcgaggctccggtcgacgtgccacggcatctccgccgccgccgggaagctgggggccatcgttgggtcgttcgggttcctgtacctggcgcagaacaaggacccggccaaggtggaccacgggtacaaggccggcatcggggtgaggaactcgctcttcatcctcgccgcctgcaacttcctgggcatgggcttcaccttctgcgcgcccgagtccaacggcatctcgctcgaggagctctccggcgagaacgacgacggcgaggcggccgcgccggcgcacgccaggacggtgcccgtgtgagacagtcctcgtcagatagtatattctgcaggtttggatggatgtatggatcattttaatggttggagcgttcaaactcaggagtcagagtacaagaataatcgtgtgatgggtcgagttgtccaggttaattcattagagttgctggtcgggttagcagtaatagggagtgatacaagttaagagtgtagtagtgcatcaaagaggcacgcatatgtacgcgatatgatggaaaactttcatgcattttggcctgtgtggactggacaatatattatacagtactaaattctatcgct

SEQ ID NO: 67194 - protein, 159 aa, Triticum aestivum
  peptide (1)..(159): Ceres Seq. ID no. 15173088
MATLCFFMAVFMLGLAFPYHHWTTPGNHIGFVVLYALTFFFANFGPNSTTFIVPAEIFPARLRSTCHGISAAAGKLGAIVGSFGFLYLAQNKDPAKVDHGYKAGIGVRNSLFILAACNFLGMGFTFCAPESNGISLEELSGENDDGEAAAPAHARTVPV

SEQ ID NO: 67195 - protein, 152 aa, Triticum aestivum
  peptide (1)..(152): Ceres Seq. ID no. 15173089
MAVFMLGLAFPYHHWTTPGNHIGFVVLYALTFFFANFGPNSTTFIVPAEIFPARLRSTCHGISAAAGKLGAIVGSFGFLYLAQNKDPAKVDHGYKAGIGVRNSLFILAACNFLGMGFTFCAPESNGISLEELSGENDDGEAAAPAHARTVPV

SEQ ID NO: 67196 - protein, 148 aa, Triticum aestivum
  peptide (1)..(148): Ceres Seq. ID no. 15173090
MLGLAFPYHHWTTPGNHIGFVVLYALTFFFANFGPNSTTFIVPAEIFPARLRSTCHGISAAAGKLGAIVGSFGFLYLAQNKDPAKVDHGYKAGIGVRNSLFILAACNFLGMGFTFCAPESNGISLEELSGENDDGEAAAPAHARTVPV

SEQ ID NO: 67197 - DNA, 764 bp, Triticum aestivum
  misc_feature (1)..(764): Ceres Seq. ID no. 13659204
aacttctccttccgttgcctccgcttcgccttttcccgttccgtccaaataaaacgctcgagctaccaaaccctaggtagggctcctttcgatccgattcgagtcgatctcagttgggtgcgagattggactggagggggatgacgatacctagtgccgagggattcctcccggcggcgagctgcctgccgtgcacggcggaggaggaaagggcgaccgtcgacgcactcacgcgggaggccgacgcgaatgtcaaagacggcgatctccgctatctcatctcacaaagctggtggaccaactggcaatcttatgtgggcttactcagttatggggagaatgacactgacattcctcttcaacctgcaagtagacctggagagattgataacagaaagcttgttttggaggaaactagcagtggcagtgaagatacagagctccaaagaaccttaagagaaggggaggactacactttggtgccacaagatgtctggagaaaactatatgactggtatgcagttgcaacggcacgcaatatatgtttttcattgtttctttagccctgtttactgcactttgtagcaggaacttggctagacctataatatcacctccgccatcctgcttgttggcattagttgttgccttttatttttctctcgcctgccactagtagttttggaccacattatgtaaatacttctgtatatgtatatcccaccatttttggtgtgtgtttgctccttggtggttggtttgtg

SEQ ID NO: 67198 - protein, 140 aa, Triticum aestivum
  peptide (1)..(140): Ceres Seq. ID no. 15219954
MTIPSAEGFLPAASCLPCTAEEERATVDALTREADANVKDGDLRYLISQSWWTNWQSYVGLLSYGENDTDIPLQPASRPGEIDNRKLVLEETSSGSEDTELQRTLREGEDYTLVPQDVWRKLYDWYAVATARNICFSLFL

SEQ ID NO: 67199 - DNA, 1342 bp, Triticum aestivum
  misc_feature (1)..(1342): Ceres Seq. ID no. 14303129
attattcgatcttttttccttttgcccttgtcttcttcctcgccgctcgtccccttaaaccctcccatggcggcccgcccatgctcccgcggctgccccaagctccggcgcctcctctcctccgccgccgccgcgaacctccccctcctgtgatcctagaggcgcacggccaagggctccctggcggatttggatgaatgccaccggccggccgccccatctcctctccccagcgagatctaggctgcagccccaaagagaactaaatattctccctctccaactcgcgcgagcttcgatccggtgccctgcggccggcgtccccgagaccggccccggccccaaacgcggttcccaacccgacgcccccctcccgcacgcttgcggcctccgggagcatcgcgcggtcctacatttcgttgcgggtgactcctttccgctcagtgtttatggtgccgcctgtgtaccaggagcctagtatcatgccgatcaatacaagaacggagaaggagttggaagaaaaggaggtgttatgcacgcacaaaaagcccaaagctacagggtgtgttgcccaaccgcagcaggaaactgaactcgccattgagagtgagaataaagggcatggtgatccttcaccaaaagagtctgcttgtgttgtgctgagcaatggtgaagcaaatggttgcagtgaggggcatgttcttggcaaatgtcatgtccaaattccgaagacatgactcgggtagaaaggatcattacagttcaaatattccatacaggcggtgcaaatgaagaaccagaagcaaggtcgagactggctcaactctgcagtgcaattggctggaagagtccaacatatgagtttcaagaacatggacatggccatacaaaactgttcacatgcaaggtgagtgttcttgtggagacgttcacagacactgttgtggagtgcatcagtgagcccaaaccccagaagagagctgcccaggaacaaggtgctgaaggtgtgttatggaccctcaagcgccttggtcatgtgaaatagctctagacgtcctccatcaggcgtggcgcgacgtctgtgtaccctcttgttaccatccgatccatcataagagcggtatctgatctttcttgaatccatgactcaacctgcgatcatgttgtcagctgatgcttatgcacggttaaacttgttgctctgtcggtcgtgttctaattttatattgctttagatctctatacaaacgagtgaagtgaacccatctccaatagtccaataattcttatctttagaccattctgagccatttacgaacattacagcgaatatgatcaagac

SEQ ID NO: 67200 - protein, 111 aa, Triticum aestivum
  peptide (1)..(111): Ceres Seq. ID no. 14303130
MSCPNSEDMTRVERIITVQIFHTGGANEEPEARSRLAQLCSAIGWKSPTYEFQEHGHGHTKLFTCKVSVLVETFTDTVVECISEPKPQKRAAQEQGAEGVLWTLKRLGHVK

SEQ ID NO: 67201 - protein, 103 aa, Triticum aestivum
  peptide (1)..(103): Ceres Seq. ID no. 14303131
MTRVERIITVQIFHTGGANEEPEARSRLAQLCSAIGWKSPTYEFQEHGHGHTKLFTCKVSVLVETFTDTVVECISEPKPQKRAAQEQGAEGVLWTLKRLGHVK

SEQ ID NO: 67202 - protein, 95 aa, Triticum aestivum
  peptide (1)..(95): Ceres Seq. ID no. 14303132
MVPPVYQEPSIMPINTRTEKELEEKEVLCTHKKPKATGCVAQPQQETELAIESENKGHGDPSPKESACVVLSNGEANGCSEGHVLGKCHVQIPKT

SEQ ID NO: 67203 - DNA, 1582 bp, Triticum aestivum
  misc_feature (1)..(1582): Ceres Seq. ID no. 14303185
ctggccagaccgagctgctcttcctcctccagttcagacgtggcggtttgactttctgacctcggaaacgatcgaaggcgccttccgtgggaaaaatcccggggcgattcctggagaagaagccgcggattcaggggcggtagaggagagcgcgcctcgccgttaccaggattttcgcccccgccctcgctccgatcgaggagaactttattaactactgaagataactggtagcggaatgaaggcaccatcactgcttgttcagtgtttccctggcttgcttccaagcaaggccactagttgtgtgccgattatatcagagagggatctgcatctaccatcaccagctgttgaactaatcccttcaaagagtgctcatccttacaaatatgctggagagaaggtcgatgtccaaggtcttgatgttttcaaggggaaggtcagtgtagcagatatgatagccttttccccttctgaagtagcatcatcaaagcatgatggtagtctcaaatattgggagagttccatcactattgtgaatattattaagaatgagatccgtgatgggcagctgagcttcaggggcaagcgagttctagagcttggatgtggatctggccttgctgggatttttgcctgcttgaagggtgcgtctatagttcacttccaggacacaaatgcagaaaccataagatgcagaacaatgcccaatgtgcttgcgaatcttgagcaggctcgggacagacagaacagaccatcagagagcccagttacaccatccagacagttgttagctcccgttgtccatttctatgccggggagtgggatgagctccccacaattctctcagttgtgcatccacctgcacaaccaacaaaccttagcttctctgaggatgattttatggatggctgcagtagccatgacggaagcagtatagttggtcaggaccccaggcgatcgaggaagctttctggcagccgtgcatgggagagggccagtgagactgacccagcagatggaggatacgatgtaattttgatttctgagatccctaatgcggtgaactctctaaggaagctctatgcccttatcactaagtgcctacgccctccttatggagtcttgtatgtggcttcaaagaagaacttggttggttcaaacggcggcgcaaggcagcttaaaagtttgatggaggaggaaggtgtccttggtggtcacttcttgactgagatatctgaccgggagatatggaagttctttttcaagtaaaccggcaaatgttggagctgaaaaagatgatcctggccatggcctcgtatacaaaaagaattcgtttgtctactcgcagcgctgtacataccgcgaagcttagttcgattaattctttggtgataggtccaagtatgcgtctcagttgttaaacctgcaaatgtgttggcattttaacccttttgtagatctcctatctcctaggtaactgttgagcttttgcataccgaatctatggtgctggcctatcacagcacgctatcagcaatatgtacaaatggaaatggttactgtacttgcttgtcggcc

SEQ ID NO: 67204 - protein, 344 aa, Triticum aestivum
  peptide (1)..(344): Ceres Seq. ID no. 14303186
MKAPSLLVQCFPGLLPSKATSCVPIISERDLHLPSPAVELIPSKSAHPYKYAGEKVDVQGLDVFKGKVSVADMIAFSPSEVASSKHDGSLKYWESSITIVNIIKNEIRDGQLSFRGKRVLELGCGSGLAGIFACLKGASIVHFQDTNAETIRCRTMPNVLANLEQARDRQNRPSESPVTPSRQLLAPVVHFYAGEWDELPTILSVVHPPAQPTNLSFSEDDFMDGCSSHDGSSIVGQDPRRSRKLSGSRAWERASETDPADGGYDVILISEIPNAVNSLRKLYALITKCLRPPYGVLYVASKKNLVGSNGGARQLKSLMEEEGVLGGHFLTEISDREIWKFFFK

SEQ ID NO: 67205 - protein, 272 aa, Triticum aestivum
  peptide (1)..(272): Ceres Seq. ID no. 14303187
MIAFSPSEVASSKHDGSLKYWESSITIVNIIKNEIRDGQLSFRGKRVLELGCGSGLAGIFACLKGASIVHFQDTNAETIRCRTMPNVLANLEQARDRQNRPSESPVTPSRQLLAPVVHFYAGEWDELPTILSVVHPPAQPTNLSFSEDDFMDGCSSHDGSSIVGQDPRRSRKLSGSRAWERASETDPADGGYDVILISEIPNAVNSLRKLYALITKCLRPPYGVLYVASKKNLVGSNGGARQLKSLMEEEGVLGGHFLTEISDREIWKFFFK

SEQ ID NO: 67206 - protein, 189 aa, Triticum aestivum
  peptide (1)..(189): Ceres Seq. ID no. 14303188
MPNVLANLEQARDRQNRPSESPVTPSRQLLAPVVHFYAGEWDELPTILSVVHPPAQPTNLSFSEDDFMDGCSSHDGSSIVGQDPRRSRKLSGSRAWERASETDPADGGYDVILISEIPNAVNSLRKLYALITKCLRPPYGVLYVASKKNLVGSNGGARQLKSLMEEEGVLGGHFLTEISDREIWKFFFK

SEQ ID NO: 67207 - DNA, 1838 bp, Triticum aestivum
  misc_feature (1)..(1838): Ceres Seq. ID no. 15178685
atactctctatcgctttgtcccctcgctccaaacccgccgccgccgccgccgccgcccacgctagggttcgctcgcacgccgccgtcgccgccccctaaccccacagcacgtcgccgatagccagccagcaatggaaaatctccccgatgaattgctcgcggacatcctccgcagttttcctccacggagtctcgcggtgtgccggagcgtctgcaagcactggtgcgctgtcgtcgatgcccgcgggctgctcctcgcggtcgcgcgtcaagttccgtgctctctgcacggcatctacgttaactacgccatgatgcgaaggtcctgattcttctcccgcgtcgctccgcggactactagcccaatcgatggcatgctcagtttcctgcctggccagctgatgcgctatcgtagcgtcctggaccaccgcaacggtctcctcctgtacgaaaacagtcaggggatgtatgtgtgcaacccagcgacacgacggtgggcgaccctgtcggagccgccgcgcacggaaacttcctacagccacctgtttttctaccgccatcgtatgtatctaatgttcgatccaactatgtctctgcactacaatgtattattcttccctgatgtgcctgagaagccaaagccaccccatcttcaacctggtgagtcacaaatttcaagagcagattacgagcatgagcgtaactctttgggatcaatggaatggccaccatacatctacccactgcaagtgttctcgtcaaaaactgggcggtgggaagagaaacaatttattcgtgaaggtgatgcagcagttactgtgtcggatgtgtggttagatgcattggcaccaagtagcagccgcaactcgcttcaacgacatgcagtccactggcgagcttcgttttatgtacattgtgactctggtttcatcatgaggttgttattggaaaaacaaaactatctagtgatcaaaacccccaaactagataccactgggtttggtgtcgatgcaactgggcgcgagacacatcttacgacatacgggtatttgggtaaatccaagcatggtgtctattacaccactttgtgtggatacacacttcaagtgtgggtattgtgcaaaacattagaatcatgtcaaacaccggagtgggagctgaagcatcaagctaaccttacaaatttaaatctacaccatgaccaacacttaagaggagaaaggtatgaaaagtgctggatcttaaatggtcggagtgaagaatccgagcatggatgggattctagtgatgacagtgccattgatttagaaggagggtcggacatggattacaaagattatcactttgccgtggacttcttgggataccatccttacaaagaaattgctttcttgggcaaccgctttcaaggatttgcttactacctggaaaactccaagttaaagtacttgggatcaccttatccaccatacctaggcaactgtgattatggtttgcgacccatactcgagtcattcatctacactccttgcatggatgatctgcttcctattcagaatgatgcatgatgagctgatacttcacttaatttgatattaagtgggcaatataggttcaaggtgggataataaccgtgcggtcgttgggatgctattttgatgattgaataatgttcttttcaacacatggacaatttggttgttgttacgttttcttttaggttctccgtattgttatgtgaacttctgagtgatgtgtttggtttcaggagttgtaaaagtcaattaatattttggttgaaacatgttaatacatacagtataattttttattgctcc

SEQ ID NO: 67208 - protein, 397 aa, Triticum aestivum
  peptide (1)..(397): Ceres Seq. ID no. 15178686
MLSFLPGQLMRYRSVLDHRNGLLLYENSQGMYVCNPATRRWATLSEPPRTETSYSHLFFYRHRMYLMFDPTMSLHYNVLFFPDVPEKPKPPHLQPGESQISRADYEHERNSLGSMEWPPYIYPLQVFSSKTGRWEEKQFIREGDAAVTVSDVWLDALAPSSSRNSLQRHAVHWRASFYVHCDSGFIMRLLLEKQNYLVIKTPKLDTTGFGVDATGRETHLTTYGYLGKSKHGVYYTTLCGYTLQVWVLCKTLESCQTPEWELKHQANLTNLNLHHDQHLRGERYEKCWILNGRSEESEHGWDSSDDSAIDLEGGSDMDYKDYHFAVDFLGYHPYKEIAFLGNRFQGFAYYLENSKLKYLGSPYPPYLGNCDYGLRPILESFIYTPCMDDLLPIQNDA

SEQ ID NO: 67209 - protein, 388 aa, Triticum aestivum
  peptide (1)..(388): Ceres Seq. ID no. 15178687
MRYRSVLDHRNGLLLYENSQGMYVCNPATRRWATLSEPPRTETSYSHLFFYRHRMYLMFDPTMSLHYNVLFFPDVPEKPKPPHLQPGESQISRADYEHERNSLGSMEWPPYIYPLQVFSSKTGRWEEKQFIREGDAAVTVSDVWLDALAPSSSRNSLQRHAVHWRASFYVHCDSGFIMRLLLEKQNYLVIKTPKLDTTGFGVDATGRETHLTTYGYLGKSKHGVYYTTLCGYTLQVWVLCKTLESCQTPEWELKHQANLTNLNLHHDQHLRGERYEKCWILNGRSEESEHGWDSSDDSAIDLEGGSDMDYKDYHFAVDFLGYHPYKEIAFLGNRFQGFAYYLENSKLKYLGSPYPPYLGNCDYGLRPILESFIYTPCMDDLLPIQNDA

SEQ ID NO: 67210 - protein, 367 aa, Triticum aestivum
  peptide (1)..(367): Ceres Seq. ID no. 15178688
MYVCNPATRRWATLSEPPRTETSYSHLFFYRHRMYLMFDPTMSLHYNVLFFPDVPEKPKPPHLQPGESQISRADYEHERNSLGSMEWPPYIYPLQVFSSKTGRWEEKQFIREGDAAVTVSDVWLDALAPSSSRNSLQRHAVHWRASFYVHCDSGFIMRLLLEKQNYLVIKTPKLDTTGFGVDATGRETHLTTYGYLGKSKHGVYYTTLCGYTLQVWVLCKTLESCQTPEWELKHQANLTNLNLHHDQHLRGERYEKCWILNGRSEESEHGWDSSDDSAIDLEGGSDMDYKDYHFAVDFLGYHPYKEIAFLGNRFQGFAYYLENSKLKYLGSPYPPYLGNCDYGLRPILESFIYTPCMDDLLPIQNDA

SEQ ID NO: 67211 - DNA, 1125 bp, Triticum aestivum
  misc_feature (1)..(1125): Ceres Seq. ID no. 14301707
atcttttgtcctcctcctccgttgcgcagttggctcgcttgcttgcttgctgtaggtgagtgctgctggagacgggagccgggccgaggcggatcggggagaaggtgggaggcgggcgggtggtagatccggcgggcgtggctcgcgagaaggttggtgcgaggttggtggaggaggggagagaaggaggggatggagcggaaggcggtggtggtgtgcgcgctcgtcggcttcctcggcgtcctctccgccgcgctaggcttcgccgccgagggcacccgcgtcaaggtttcagatgtgcaaaccgactcttctccaggtgaatgcatatacccaagaagccctgcgttaggccttgggttgatgtctgcagttgcccttatggtcgcacaggctattataaatacagttgctggttgcatctgttgtaagaggcatccggttccctcagacactaactggagtgtggctctgatctcattcatcgtatcttgggtcactttcataatcgcgttccttctcctgctgaccggagccgcgctgaacgaccaaaggggccaggagaacatgtacttcggcagcttctgctacgtcgtcaagccgggggtcttctccggaggggcggtgctctccctcgcgagcgtggccctggccatagtctactacgtggccctgacgtcgtcgaaagccccgccgagctggggcccacagcagaaccagggcatctccatgggccagcccgtgatcccgcagcagagcagcgagccggtgttcgtccatgaggacacctacaaccggcaacgtttcccatgagtgatcacagccatattcaagccagccatttcgagggtcgcccatgaggacacttgcaaccggcagcagttcccgtgatcgcagtcgtagtacctaagccgtttctacggcccgcatgaacgctatgttggcgagtttggtttgtatagccctgcaggttagaacaatagcagcagtttggttaccgttattattagctaggttcatcagtcttctctttttctttgtttgagacttgagaaaggcggcggcatgcctgtttcgtcggtatggatatttgaattttaaatgaactgggtaatgttgaggttg

SEQ ID NO: 67212 - protein, 206 aa, Triticum aestivum
  peptide (1)..(206): Ceres Seq. ID no. 14301708
MERKAVVVCALVGFLGVLSAALGFAAEGTRVKVSDVQTDSSPGECIYPRSPALGLGLMSAVALMVAQAIINTVAGCICCKRHPVPSDTNWSVALISFIVSWVTFIIAFLLLLTGAALNDQRGQENMYFGSFCYVVKPGVFSGGAVLSLASVALAIVYYVALTSSKAPPSWGPQQNQGISMGQPVIPQQSSEPVFVHEDTYNRQRFP

SEQ ID NO: 67213 - protein, 149 aa, Triticum aestivum
  peptide (1)..(149): Ceres Seq. ID no. 14301709
MSAVALMVAQAIINTVAGCICCKRHPVPSDTNWSVALISFIVSWVTFIIAFLLLLTGAALNDQRGQENMYFGSFCYVVKPGVFSGGAVLSLASVALAIVYYVALTSSKAPPSWGPQQNQGISMGQPVIPQQSSEPVFVHEDTYNRQRFP

SEQ ID NO: 67214 - protein, 143 aa, Triticum aestivum
  peptide (1)..(143): Ceres Seq. ID no. 14301710
MVAQAIINTVAGCICCKRHPVPSDTNWSVALISFIVSWVTFIIAFLLLLTGAALNDQRGQENMYFGSFCYVVKPGVFSGGAVLSLASVALAIVYYVALTSSKAPPSWGPQQNQGISMGQPVIPQQSSEPVFVHEDTYNRQRFP

SEQ ID NO: 67215 - DNA, 857 bp, Triticum aestivum
  misc_feature (1)..(857): Ceres Seq. ID no. 14301696
ctcccggtgcgctcctttgtgattggttgctgctgctcgggatcaatgggtactcctactccataccaccatctgtctccaagaaccatcgtcaccaagatcatcagcatgaagcggcaggagccagagccgccgccgccgcccaagatcatcctgcagccacggcaccggaccagccccgcgatgtggtgcgctgccatcgtctgcttcgccttcagcgtcctcctcatcctcgccggcctggtgatcctcgtcgtcttcctgacggtgaagccaaggacgccgtccttcgacgtcgcccacgcagccctcaacagcgtctacatcggctcgcccccgccctacttcaacggcgacatgacgctgacggccaacatctccaaccccaaccgcaagatcggcgtcgtgatccagtccggcgccgtcgagctcttctttcggggcaggctggtgtcggcccaggcgctgccgtcgtttgcgcagcggcgggggcagttcacagtcctcagcgtccacatgctgtctagccaggtcgtgctaccgccggaggtggccgtggagctgctgaaccagatgaagagcaacaagatcctcttcaccatcagagggaccttcaaggtccgggaaaggttctggtcttggcactacacctaccggatgactgccatttgtgacctggagctcaccgcgcctccctctggatttctcgtacataggagatgcacaacatcaacgtgattggtacctggatgctcttttcatcttcttttgttgcatcaaattttcaaggatgtatagcagtacgaaactattttggatgtattttttttatgtaaagtaaaacccaagtaaaccac

SEQ ID NO: 67216 - protein, 245 aa, Triticum aestivum
  peptide (1)..(245): Ceres Seq. ID no. 14301697
LPVRSFVIGCCCSGSMGTPTPYHHLSPRTIVTKIISMKRQEPEPPPPPKIILQPRHRTSPAMWCAAIVCFAFSVLLILAGLVILVVFLTVKPRTPSFDVAHAALNSVYIGSPPPYFNGDMTLTANISNPNRKIGVVIQSGAVELFFRGRLVSAQALPSFAQRRGQFTVLSVHMLSSQVVLPPEVAVELLNQMKSNKILFTIRGTFKVRERFWSWHYTYRMTAICDLELTAPPSGFLVHRRCTTST

SEQ ID NO: 67217 - protein, 230 aa, Triticum aestivum
  peptide (1)..(230): Ceres Seq. ID no. 14301698
MGTPTPYHHLSPRTIVTKIISMKRQEPEPPPPPKIILQPRHRTSPAMWCAAIVCFAFSVLLILAGLVILVVFLTVKPRTPSFDVAHAALNSVYIGSPPPYFNGDMTLTANISNPNRKIGVVIQSGAVELFFRGRLVSAQALPSFAQRRGQFTVLSVHMLSSQVVLPPEVAVELLNQMKSNKILFTIRGTFKVRERFWSWHYTYRMTAICDLELTAPPSGFLVHRRCTTST

SEQ ID NO: 67218 - protein, 209 aa, Triticum aestivum
  peptide (1)..(209): Ceres Seq. ID no. 14301699
MKRQEPEPPPPPKIILQPRHRTSPAMWCAAIVCFAFSVLLILAGLVILVVFLTVKPRTPSFDVAHAALNSVYIGSPPPYFNGDMTLTANISNPNRKIGVVIQSGAVELFFRGRLVSAQALPSFAQRRGQFTVLSVHMLSSQVVLPPEVAVELLNQMKSNKILFTIRGTFKVRERFWSWHYTYRMTAICDLELTAPPSGFLVHRRCTTST

SEQ ID NO: 67219 - DNA, 1217 bp, Triticum aestivum
  misc_feature (1)..(1217): Ceres Seq. ID no. 14303126
tcacgagattttctaggctgaactgtacatgatatggcagaattagtagctcattagaagtacccttgtgattagagcaacactagcttcaaatgcatctttttctcaatcttttgtgcatagtaattaatgatgcaaaggccagggcccaaccttttctctaaaaaaatacataaaagaattctggggaacaaaaaattatcccattaaagtgcatctgaaccccattgtagtactactggttaatgaaactatcccattataataattatcacaagagctttacacacacacaaagagggctgattccttagacttatttccatcgaaacacatgaattaaaacttgcacgtaccagcttactagtatatataggatatcgcttggctgcagctttgcttttcccccggtttttataggctgtttctgggacagaaatgaccatctttgcattgcattgcattgcattgcattgcatactgaaatgaaatgaaacagggttcgatgtggaggagacttcggttgacggccccgacgacgtccaagggctggacgcatccgccgcacacatagcaaacctgctatcgtccgagccctctgatgtgaggcttgggataggcggtttcagcatgggagccgccactgcgctccactctgccgcatgttatgctcatggaaggttctcaaacggtgttgcctaccctattaccctcagcgctatcattgggttgagcggctggcttccctgctccaggaccctgaggaccaagattgagagctcacagactgctttcaggagggctgctgccttgccgataatgcttggccatggaagaggcgacgaggtagtcacgtacaggaacggcgagaggtcgtccgagtttctgcggaattcgggcttttcgtacctgaatttcaaagcctacaacggactgggccatcacaccatccctgaggaaatggacgatgtctccaagtggctcagggcaaggctcgggcttgatcgctcttgcggctaattaagtggagaagcttgtgccttggtggctgacacatgacatgagagaaatgtattgacactatagaggaggagaaggttgatatatataggttaatcatatgaagagatcacgaccggcatgtgttgatatataactcctcactactgaatttcatgttacacttatattgtactactaagagttgtaccccagct

SEQ ID NO: 67220 - protein, 129 aa, Triticum aestivum
  peptide (1)..(129): Ceres Seq. ID no. 14303127
MGAATALHSAACYAHGRFSNGVAYPITLSAIIGLSGWLPCSRTLRTKIESSQTAFRRAAALPIMLGHGRGDEVVTYRNGERSSEFLRNSGFSYLNFKAYNGLGHHTIPEEMDDVSKWLRARLGLDRSCG

SEQ ID NO: 67221 - protein, 66 aa, Triticum aestivum
  peptide (1)..(66): Ceres Seq. ID no. 14303128
MLGHGRGDEVVTYRNGERSSEFLRNSGFSYLNFKAYNGLGHHTIPEEMDDVSKWLRARLGLDRSCG

SEQ ID NO: 67222 - DNA, 1819 bp, Triticum aestivum
  misc_feature (1)..(1819): Ceres Seq. ID no. 14307871
cccgttccgtgtcggcgagccctccaccaccaccaccacctcctttccccctcctcgccctcccgcggccaccaaccggccccgatcccggatccggcgcggcagatccggatcccggcgatggcgtccacggcggcgaggcggctcagggagctgcaggggcagcccgggaacaagacgtgcgtcgactgcgcgcagaggaacccgcagtgggccagcgtctcctacggcgtcttcatgtgcctcgagtgctccggcaagcaccggggcctcggcgtgcacatcagcttcgtccgctccgtcaccatggactcctggaccgagccgcagctccgcaagatggaggccgggggcaacgaccgcctcaacgccttcctcaccgcgcggggcgtgcccaaggacacgccccacatccccaagtacaactccaacgccgccgccgcctaccgcgaccgcatcgtcgccctcgccgagggccgcgcgtggaccgacccgcccgtcgttaaggagacgcccggatctggcgcccccgcccccgccaggaggccgcccttgcccgccggagtagggggcggaggcggtggcggtggcggtggatgggacgattgggacgacgaggtccgtccggatatgcgtaggaaccaatcggccggatcgtttgctggcgctggagcggattcggggagacagccgacgaggtccaagtccactcaggacatatacaccaagcaggagcttgaggcgtcggcggccagcaaggaggattttttcgctaggagaatggcggagaacgagtccaagcctcaggggatccctccctctcagggcggcaagtacgttggcttcggatccaccccgccgccgtcggcgaacaggaacaacaacggtgctgcccagggcgatgtcatgcaggtcgtttcccagggatttggacgcctttcgcttgttgcagcatctgctgcccaatctgctgctactgttgtccaagttggcacaaaagagattcaatcaaagatgagggaagggggttatgatcagaaggtgaatgaaactgtcaatgttgtaaccaataaaactgcagagataggaagcagaacctgggggattatgaaaggagtgatggcattggcgacacaaaaggtagaggaatatgccaaggaagggggagtgggtggtggctggggtgatgattggcaacaaagggagcagcagaacaacagcaacgagccttaccgcaggtatgatcaggagaccagcaacggcaacggctggaattctccgcaagatggatcagcgaagaaccagaaccacaattccaattcttgggatgattgggatgaccaagacaagaaggaagagcctgccaagacaagccagagcagcgactcgtgggccggctgggatgatgcgaaagatgacggttttgatagttacagccatcacagcccagccaacaagggtgggagcaatcagaatggaactgcgggggggtcatattgggccgacggcggcttccgctgatgctggtctctttgtgagagccatatactttgcagagttatatgccagaaaaatgtgagcgtggttattatttcaggatacctaagtgttggagagtaaaagagttttttttttgtaagttgtctacaattgttatgtctagcggcatgttcatatggccaagcctcatttgaaactgccatccccagctattaagaagcgtcgaattgaaattgtaatctacacatacatacttcccctgcagattctttattccttgtgctgatttgtcgtagttgcaagtggcaagaggggtggc

SEQ ID NO: 67223 - protein, 506 aa, Triticum aestivum
  peptide (1)..(506): Ceres Seq. ID no. 14307872
PVPCRRALHHHHHLLSPSSPSRGHQPAPIPDPARQIRIPAMASTAARRLRELQGQPGNKTCVDCAQRNPQWASVSYGVFMCLECSGKHRGLGVHISFVRSVTMDSWTEPQLRKMEAGGNDRLNAFLTARGVPKDTPHIPKYNSNAAAAYRDRIVALAEGRAWTDPPVVKETPGSGAPAPARRPPLPAGVGGGGGGGGGGWDDWDDEVRPDMRRNQSAGSFAGAGADSGRQPTRSKSTQDIYTKQELEASAASKEDFFARRMAENESKPQGIPPSQGGKYVGFGSTPPPSANRNNNGAAQGDVMQVVSQGFGRLSLVAASAAQSAATVVQVGTKEIQSKMREGGYDQKVNETVNVVTNKTAEIGSRTWGIMKGVMALATQKVEEYAKEGGVGGGWGDDWQQREQQNNSNEPYRRYDQETSNGNGWNSPQDGSAKNQNHNSNSWDDWDDQDKKEEPAKTSQSSDSWAGWDDAKDDGFDSYSHHSPANKGGSNQNGTAGGSYWADGGFR

SEQ ID NO: 67224 - protein, 466 aa, Triticum aestivum
  peptide (1)..(466): Ceres Seq. ID no. 14307873
MASTAARRLRELQGQPGNKTCVDCAQRNPQWASVSYGVFMCLECSGKHRGLGVHISFVRSVTMDSWTEPQLRKMEAGGNDRLNAFLTARGVPKDTPHIPKYNSNAAAAYRDRIVALAEGRAWTDPPVVKETPGSGAPAPARRPPLPAGVGGGGGGGGGGWDDWDDEVRPDMRRNQSAGSFAGAGADSGRQPTRSKSTQDIYTKQELEASAASKEDFFARRMAENESKPQGIPPSQGGKYVGFGSTPPPSANRNNNGAAQGDVMQVVSQGFGRLSLVAASAAQSAATVVQVGTKEIQSKMREGGYDQKVNETVNVVTNKTAEIGSRTWGIMKGVMALATQKVEEYAKEGGVGGGWGDDWQQREQQNNSNEPYRRYDQETSNGNGWNSPQDGSAKNQNHNSNSWDDWDDQDKKEEPAKTSQSSDSWAGWDDAKDDGFDSYSHHSPANKGGSNQNGTAGGSYWADGGFR

SEQ ID NO: 67225 - protein, 427 aa, Triticum aestivum
  peptide (1)..(427): Ceres Seq. ID no. 14307874
MCLECSGKHRGLGVHISFVRSVTMDSWTEPQLRKMEAGGNDRLNAFLTARGVPKDTPHIPKYNSNAAAAYRDRIVALAEGRAWTDPPVVKETPGSGAPAPARRPPLPAGVGGGGGGGGGGWDDWDDEVRPDMRRNQSAGSFAGAGADSGRQPTRSKSTQDIYTKQELEASAASKEDFFARRMAENESKPQGIPPSQGGKYVGFGSTPPPSANRNNNGAAQGDVMQVVSQGFGRLSLVAASAAQSAATVVQVGTKEIQSKMREGGYDQKVNETVNVVTNKTAEIGSRTWGIMKGVMALATQKVEEYAKEGGVGGGWGDDWQQREQQNNSNEPYRRYDQETSNGNGWNSPQDGSAKNQNHNSNSWDDWDDQDKKEEPAKTSQSSDSWAGWDDAKDDGFDSYSHHSPANKGGSNQNGTAGGSYWADGGFR

SEQ ID NO: 67226 - DNA, 2552 bp, Triticum aestivum
  misc_feature (1)..(2552): Ceres Seq. ID no. 14303011
aaagaaccggaaggagtaggacacacctttggtcttcgctccgccgctcagttcgacgaaatgccgcattcgctccctcctcaggcaggctgtctccgcgtacacatcccacccctccccccacccttcccttcatatggatacggtggagccgtggaggtcctccggcgagacactacgatggcgctcaaagaagctctgctgcgcgtgccgcgtgcgatatggccctgggtcctctgcgccgtattccaggagaaagtatgaggatagaggcctaggtcaaggcgaaagcgcccacctacgaggctgcactcttgcccagtgatcagggtactatcggtattgggcgaacgtttggttgggcgctgctcgcaaggtgctcgaccaaatgcccaggtagagtgtgtcgactgaaatattttttatcttcttctttatctcacaatggtattaagcttgatgttgaagtttttaggatctaaatcatctacttttcatatgataattctgtgaaaaatatcaaaaagtttctaagttttgtcatgatattctgccatttattttctacttctgatggatcactatttgaaggctgaattgtagttcattatcttgctgcttgatgtatatggattagttgtaagaattgcttgtttccagtggcaatttcaaatattgtatagcaggattagcactaaatataaattcaagtgcacagtcactgtaaataaaatgaaaaatctacgccactccaaaagaaaaggttgcttctgtgctgctttaaaatgtctgaatcccatgctgaacaatttaaccagatcagaataacaagtctgctaatctagaaataataatgcctctgctagtgacaggttgttaattttattatttccactggatcccatgctaaacaatgtaacccgatcagaagaacaagtctgctaatctaatctgcgagtgacaggtttagtattatatccggatctgaatttgaccaacctttcagcctttccattgtctggtccgaagatagaaaataagaaagcatgctggccctactattgctgctgataagcagccagaagcccagaaacgacatccccgttgatcatagacaaaagaagtattgaacttccggtactttttcagcgttgtcatcctaatttgattcctgcagatccaagatctggtgtttagccttgctccaagtaaagccatagcctccaaacagatggtgcatatgaatcaaggacaaggggaaacaagctatgcacacaactccagtatccagaacgctcagcagaacaggatgaagcccctgatagaagcggccatcattgacttgtgcggcagcaaaagcaccttgttccccgaaaagatgctgattgcggacttgggctgctcttatggcccaaatgcgctagcactggtatcgactgccgtcaaggccatcatcaaccactgccttcagttccagcaaccaccacccgaagtgtgtgtgctcctcaatgaccttcctgacaatgacttcaacacggtggtgaagagcctggccacgctccgtcaaaataacaacaagcttgttgttgtgactggtgtagcaccggggtcattttacgagaggctcttcactagtgactccttgcatcttgtctgctcgtccaacagcttgcattggctctccatggtgtgaatttatcacccttcaatggatctatccattgcattacttatttattttgtaaaagaaaccttatcctcgcaggctcccgaagatctgacaatgaaccagatccctgcgtacgacatggatgagcatgctaggcgtgaaagactccctacggtccgtgaagcatatgcacgccagttcaggaaagatttcatacttttcctggagctgagagccaaagaattggttccaggaggccgaatggttgtttctcttgtagggcggccttctaatgtaaaagcctccaaattctttcacctttgggaaactctagttcagattctaagtgtcatggccttagagggtgtgatcgacaaagcgaagtttgattctttctatgtgccggtgtatggaccctctggtgaagagctgagggagatcatccaagacgagggctccttttctatcagggatatgcgggtatatgacgctacaactgatatggacagcatgctcttcaccccaagctcgtttgtgaattatctgagagccatatttgagccgataatagtcgagcattttggagaggtcatggatgaatttgtgaggaccgcggagcggcgctggagcctcgagggcagcatgcaaaacgagcgtgctaggaatccatgagctatgctggctgtatcccttgtaaaggcatgattatcaggtactttatagtacatcacatttggttaggtttattgctttatttgaggtgacaatgtgtgccaacttcattgtgtaaactacatcctgtatggtgttctgcgaagatatcgacgctcaagagattaagaatgaactatcatttatatagattagcagactgttgttgccc

SEQ ID NO: 67227 - protein, 210 aa, Triticum aestivum
  peptide (1)..(210): Ceres Seq. ID no. 14303012
MDLSIALLIYFVKETLSSQAPEDLTMNQIPAYDMDEHARRERLPTVREAYARQFRKDFILFLELRAKELVPGGRMVVSLVGRPSNVKASKFFHLWETLVQILSVMALEGVIDKAKFDSFYVPVYGPSGEELREIIQDEGSFSIRDMRVYDATTDMDSMLFTPSSFVNYLRAIFEPIIVEHFGEVMDEFVRTAERRWSLEGSMQNERARNP

SEQ ID NO: 67228 - protein, 185 aa, Triticum aestivum
  peptide (1)..(185): Ceres Seq. ID no. 14303013
MNQIPAYDMDEHARRERLPTVREAYARQFRKDFILFLELRAKELVPGGRMVVSLVGRPSNVKASKFFHLWETLVQILSVMALEGVIDKAKFDSFYVPVYGPSGEELREIIQDEGSFSIRDMRVYDATTDMDSMLFTPSSFVNYLRAIFEPIIVEHFGEVMDEFVRTAERRWSLEGSMQNERARNP

SEQ ID NO: 67229 - protein, 177 aa, Triticum aestivum
  peptide (1)..(177): Ceres Seq. ID no. 14303014
MDEHARRERLPTVREAYARQFRKDFILFLELRAKELVPGGRMVVSLVGRPSNVKASKFFHLWETLVQILSVMALEGVIDKAKFDSFYVPVYGPSGEELREIIQDEGSFSIRDMRVYDATTDMDSMLFTPSSFVNYLRAIFEPIIVEHFGEVMDEFVRTAERRWSLEGSMQNERARNP

SEQ ID NO: 67230 - DNA, 1319 bp, Triticum aestivum
  misc_feature (1)..(1319): Ceres Seq. ID no. 13663665
aatcccgtgtgcgtcccgctgttcgcttctcccgcatcccgatagcaccagcaagcaaaacccccctcccctctccatccagttccccctccccctcccccgvccgccgtcccatggcgtctctcctccgcacggccgccgcgctcgcgcccccaccgtcgtccgcccgggagacgcggcggccgtcgtgcgccgcctccctcgcctgctcccggcgcgcgccggcgagtccgctgcgcgctccgcctctgcccgggccatggcgattggggcccgatgaggccgcgcgtacggccactcagtttctctgccgatacatgagaagagatgggcatgaaggtgatgggagaacgcaaggacaagacgaacctagtatgtttgsgccagatgatgacgatggtgcaaagattcctactcaggtggaaactcttgttagaggcactgcaatagttgatgctccagaatacaagccgctcccagatctcgattaccttcaggaattgctggctattcagcagcaaggaccccgatcaataggtttctttggtacccgcaacatggggtatatgcatcaacaacttattgagatcttgagttatgccatggtcataacaaaaaatcatatattcacatctggtgcttctgggactaacgcagctgttattaggggtgctttgagagctgagaagccagaattgcttaccgtaattttgcctcaaagtctaaagaagcaacctcctgaaagccaagagctattatccaaagtacaaaacttgattgagaaacctcagtatgaccatttaccactaattgaggctagcaggttatgcaacatggacatcatctcgaaggtccaacaggtgatatgctttgcgtttcatgacagcaggctgctgatggagacctgccaggaggcaaagaacatgcggaagatcgtaacgctcttctacttggattagctagcacctcggggcgcttctcccctttttgtccgtaggccggtgaacgggatgctgtcattcctgtatacactaaagctctggagtaggttcaggtttggggcataacagtgcgtcttcgggcattttgcccattattcaaattcttggtagaaaccaaataagcttgtcgatatgtctagtctgtcagtaaagaaaataattcaagttcttattactagtaatttcaaaggctacagtattgaaaaaactgtttccactctcaatcaaaaagaaaaaggaaaaactgtttccgaaaaaaaaaaaaaaaaaagcttaatcgataccgtcgaccntcgaaggggggggcccgggtaccca

SEQ ID NO: 67231 - protein, 318 aa, Triticum aestivum
  peptide (1)..(318): Ceres Seq. ID no. 15220250
  misc_feature (34)..(34): Xaa is any aa, unknown or other
  misc_feature (127)..(127): Xaa is any aa, unknown or other
SRVRPAVRFSRIPIAPASKTPLPSPSSSPSPSPXRRPMASLLRTAAALAPPPSSARETRRPSCAASLACSRRAPASPLRAPPLPGPWRLGPDEAARTATQFLCRYMRRDGHEGDGRTQGQDEPSMFXPDDDDGAKIPTQVETLVRGTAIVDAPEYKPLPDLDYLQELLAIQQQGPRSIGFFGTRNMGYMHQQLIEILSYAMVITKNHIFTSGASGTNAAVIRGALRAEKPELLTVILPQSLKKQPPESQELLSKVQNLIEKPQYDHLPLIEASRLCNMDIISKVQQVICFAFHDSRLLMETCQEAKNMRKIVTLFYLD

SEQ ID NO: 67232 - protein, 281 aa, Triticum aestivum
  peptide (1)..(281): Ceres Seq. ID no. 15220251
  misc_feature (90)..(90): Xaa is any aa, unknown or other
MASLLRTAAALAPPPSSARETRRPSCAASLACSRRAPASPLRAPPLPGPWRLGPDEAARTATQFLCRYMRRDGHEGDGRTQGQDEPSMFXPDDDDGAKIPTQVETLVRGTAIVDAPEYKPLPDLDYLQELLAIQQQGPRSIGFFGTRNMGYMHQQLIEILSYAMVITKNHIFTSGASGTNAAVIRGALRAEKPELLTVILPQSLKKQPPESQELLSKVQNLIEKPQYDHLPLIEASRLCNMDIISKVQQVICFAFHDSRLLMETCQEAKNMRKIVTLFYLD

SEQ ID NO: 67233 - protein, 213 aa, Triticum aestivum
  peptide (1)..(213): Ceres Seq. ID no. 15220252
  misc_feature (22)..(22): Xaa is any aa, unknown or other
MRRDGHEGDGRTQGQDEPSMFXPDDDDGAKIPTQVETLVRGTAIVDAPEYKPLPDLDYLQELLAIQQQGPRSIGFFGTRNMGYMHQQLIEILSYAMVITKNHIFTSGASGTNAAVIRGALRAEKPELLTVILPQSLKKQPPESQELLSKVQNLIEKPQYDHLPLIEASRLCNMDIISKVQQVICFAFHDSRLLMETCQEAKNMRKIVTLFYLD

SEQ ID NO: 67234 - DNA, 2057 bp, Triticum aestivum
  misc_feature (1)..(2057): Ceres Seq. ID no. 14316029
gtgcagtgacagaatcacaaaaaatacagctctctgcgcactcgtccattcggcgactagtcgacgcagctgacgccaccacgcggcggcggcgcttgttcccatcgccgccaccggcatggccgagggcaccgacacggtgcgcgcgcccggcgacgcggaggagatggagaagggagagatcgcaggcgccgccgccggtgccgacggcgactccgccgcgccccagccggtggagcccacctgggctttctggatcggcaacggcaacccgcaggaggattccgccggccgggggaacaccgtccacaccttctccaccgtcgacgacttcttgagcctttacaataatatcctccaccctagtaaattgggtgtgggagctgacctccattgcttcaagaataagattgagccgaaatgcgaaggccccatatgtgctaatggaggtgcatggaccatcagttgtggcgaagggaaatcgcagccattgtggttggatacactactggcattgattggtggacaattcgaatatggtaatgaaatttgtggagcggtccttagcgtgtgtgggaagcaggaaacaatagctatatggattaaagatgctactaacgaagctgctcagctaagcattggcaagcagtggaaggaatttctggagtacaaggactcagttgagttcattgttcatgatagtgatgcaacggcagtacaatgctggtcttccacgtttcccgatgatccccttgacgtcatctacaacaaggtccccagtcactgcagccgcgtgcgctttgctgccgtctgcagatcgtggtgcactgcagcttcgcggcaccccgcgctgcctgaactcccgtggctgctcctctcaccacgcgaccgtgacacaacgaagcgcctctactgtcctgaggacagcaagatcctgtgcatctcgctcccgagcgatttcatcggcaactggttcgtcggctgtcatggtggtggctgggttgcatcattcgaaccaccaccgttcaggatcttgaacattttctccagtgttgaggttgcgctctccgagaaacagaaggggatcgtttgcccaggccgccttggccagatcatcatttggaaaatcatcttctccaaaccacccacctcaagtgactgtatcattgctgccatcaccgacaatcacggcatcgcgctctgcagggttgggtgtccgaacggtgggtggacaacaaaaggacatgtaagctacaccatggagcttgcagacatcgccttttgcaacggtaagctctatggtctcacacgggacagatgggaacttgtcaagtttgagatcggtgctgatgaagatggtgcgcccgtggtcacagccgttgatcggctagtggtcactgtcgagcaccagcagccccccagtgtctgggccaaccgggtggatgccagctacatttttgagctacacggcaagcttgcgacggcggtgaggtccccatggtcacccaacctcagacctttcttcaaagtgttcgaacttgttgacatcgacaccagcgaggggatggcacatggcacacacaaatggacagaggtgatgagcttgggtgactttgccctattcctgggtccaaacagctccaaggcggtgcatgtgtcagcagacaggcgcggcggtgtgaagagaaaccacatctactactcctaccatcgccgcttagcacagaaggaggtccttctcagcactgacctggtgttcctgacaagctccaacgctgatggtgattccgtgtactacagggaagatgaaagcttatccgcagccgtgggcggggttcataggattggggcagtaggatactatgtcaggggtagccctaatcctccagtgtggcttctccccctagcatagtggctttttatatacattgtattgcttagctgctgcacatgcctgaaaattgtaccgttagctgtataaccgtaaatgctctatggtttcaaccatgttgtatttagaacgaatgtacagcaattataattaatctgtactcatg

SEQ ID NO: 67235 - protein, 597 aa, Triticum aestivum
  peptide (1)..(597): Ceres Seq. ID no. 14316030
MAEGTDTVRAPGDAEEMEKGEIAGAAAGADGDSAAPQPVEPTWAFWIGNGNPQEDSAGRGNTVHTFSTVDDFLSLYNNILHPSKLGVGADLHCFKNKIEPKCEGPICANGGAWTISCGEGKSQPLWLDTLLALIGGQFEYGNEICGAVLSVCGKQETIAIWIKDATNEAAQLSIGKQWKEFLEYKDSVEFIVHDSDATAVQCWSSTFPDDPLDVIYNKVPSHCSRVRFAAVCRSWCTAASRHPALPELPWLLLSPRDRDTTKRLYCPEDSKILCISLPSDFIGNWFVGCHGGGWVASFEPPPFRILNIFSSVEVALSEKQKGIVCPGRLGQIIIWKIIFSKPPTSSDCIIAAITDNHGIALCRVGCPNGGWTTKGHVSYTMELADIAFCNGKLYGLTRDRWELVKFEIGADEDGAPVVTAVDRLVVTVEHQQPPSVWANRVDASYIFELHGKLATAVRSPWSPNLRPFFKVFELVDIDTSEGMAHGTHKWTEVMSLGDFALFLGPNSSKAVHVSADRRGGVKRNHIYYSYHRRLAQKEVLLSTDLVFLTSSNADGDSVYYREDESLSAAVGGVHRIGAVGYYVRGSPNPPVWLLPLA

SEQ ID NO: 67236 - protein, 581 aa, Triticum aestivum
  peptide (1)..(581): Ceres Seq. ID no. 14316031
MEKGEIAGAAAGADGDSAAPQPVEPTWAFWIGNGNPQEDSAGRGNTVHTFSTVDDFLSLYNNILHPSKLGVGADLHCFKNKIEPKCEGPICANGGAWTISCGEGKSQPLWLDTLLALIGGQFEYGNEICGAVLSVCGKQETIAIWIKDATNEAAQLSIGKQWKEFLEYKDSVEFIVHDSDATAVQCWSSTFPDDPLDVIYNKVPSHCSRVRFAAVCRSWCTAASRHPALPELPWLLLSPRDRDTTKRLYCPEDSKILCISLPSDFIGNWFVGCHGGGWVASFEPPPFRILNIFSSVEVALSEKQKGIVCPGRLGQIIIWKIIFSKPPTSSDCIIAAITDNHGIALCRVGCPNGGWTTKGHVSYTMELADIAFCNGKLYGLTRDRWELVKFEIGADEDGAPVVTAVDRLVVTVEHQQPPSVWANRVDASYIFELHGKLATAVRSPWSPNLRPFFKVFELVDIDTSEGMAHGTHKWTEVMSLGDFALFLGPNSSKAVHVSADRRGGVKRNHIYYSYHRRLAQKEVLLSTDLVFLTSSNADGDSVYYREDESLSAAVGGVHRIGAVGYYVRGSPNPPVWLLPLA

SEQ ID NO: 67237 - DNA, 1338 bp, Triticum aestivum
  misc_feature (1)..(1338): Ceres Seq. ID no. 15169519
aaagcaaagcccgcaacacgtaccaactctcctacgagctgagcgagcgaacgggagagagggtcggcgtcggagaaggaagatggatcacgcggcggacacgttccggacggacctgatgaccatcacgcggcacgtgctgaacgagcagagccggcacccggagtcgcgcggcgacctcaccatcctcctctcccacatcgtcctcggctgcaagttcgtcgcctccgccgtcaacaaggccggcctcgccaagctcaccggcctcgccggcgagaccaacgtccagggggaggagcagaagaagctggacgtgctctccaacgaggtgttcgtcaatgccctcgtcagcagcggccgcacctgcgttcttgtgtccgaggaggacgagaaggtgacgttcgtggaccctaagctccgtggaaagtactgtgtctgctttgaccccctggatggatcctccaacatcgactgcggcgtctccatcggaacgatctttgggatctacatgatcaagaaccaagacaccgtgactctggaggaagtactgcagcctgggaaggacatgattgctgccggatactgcatgtatgggagttcctgcacgcttgtcctgagcactggaaatggtgtcaacggcttcacgcttgacccctctctcggggagttcataatgactcatccagatatcaagataccgccgaaaggaaagatctattcggttaatgaagggaacgccaagaactgggacacgcctactgcaaagtacgtggagaagtgcaagtaccccacggatggttcatcacctaaatcccttagatacatcggcagcatggttgctgatgtgcaccgcaccttgctatacggcggcatatttctgtaccccgcggacaagaagagcccaagcggaaagctccgtgtgatgtatgaggtgttccccatgtcattcctgatggaggaggctggaggccagtctttcacaggcaaaggacggtcgctcgacctgatccccaccgacatccacgagagatcgccgatattcctcggcagcagcgacgacgtggaggagatcaaggcactgtacgcggaggaggccaagaaggcagggtctgcatgatgatcggcggccgtcgcgtgtgaatcgatggcgacccatgggcctttgctggcaatgtgattcgtatgtcaggcatttcttttctatacgtccgtgtcattcagtgtaatatagcgtgtggaggcctcgaacagcttcattcatgagcagccaaggcttctgcctctcacaacaatccactgatgatggcacgtaatatacctccataactacatgtttcc

SEQ ID NO: 67238 - protein, 371 aa, Triticum aestivum
  peptide (1)..(371): Ceres Seq. ID no. 15169520
KQSPQHVPTLLRAERANGREGRRRRRKMDHAADTFRTDLMTITRHVLNEQSRHPESRGDLTILLSHIVLGCKFVASAVNKAGLAKLTGLAGETNVQGEEQKKLDVLSNEVFVNALVSSGRTCVLVSEEDEKVTFVDPKLRGKYCVCFDPLDGSSNIDCGVSIGTIFGIYMIKNQDTVTLEEVLQPGKDMIAAGYCMYGSSCTLVLSTGNGVNGFTLDPSLGEFIMTHPDIKIPPKGKIYSVNEGNAKNWDTPTAKYVEKCKYPTDGSSPKSLRYIGSMVADVHRTLLYGGIFLYPADKKSPSGKLRVMYEVFPMSFLMEEAGGQSFTGKGRSLDLIPTDIHERSPIFLGSSDDVEEIKALYAEEAKKAGSA

SEQ ID NO: 67239 - protein, 344 aa, Triticum aestivum
  peptide (1)..(344): Ceres Seq. ID no. 15169521
MDHAADTFRTDLMTITRHVLNEQSRHPESRGDLTILLSHIVLGCKFVASAVNKAGLAKLTGLAGETNVQGEEQKKLDVLSNEVFVNALVSSGRTCVLVSEEDEKVTFVDPKLRGKYCVCFDPLDGSSNIDCGVSIGTIFGIYMIKNQDTVTLEEVLQPGKDMIAAGYCMYGSSCTLVLSTGNGVNGFTLDPSLGEFIMTHPDIKIPPKGKIYSVNEGNAKNWDTPTAKYVEKCKYPTDGSSPKSLRYIGSMVADVHRTLLYGGIFLYPADKKSPSGKLRVMYEVFPMSFLMEEAGGQSFTGKGRSLDLIPTDIHERSPIFLGSSDDVEEIKALYAEEAKKAGSA

SEQ ID NO: 67240 - protein, 332 aa, Triticum aestivum
  peptide (1)..(332): Ceres Seq. ID no. 15169522
MTITRHVLNEQSRHPESRGDLTILLSHIVLGCKFVASAVNKAGLAKLTGLAGETNVQGEEQKKLDVLSNEVFVNALVSSGRTCVLVSEEDEKVTFVDPKLRGKYCVCFDPLDGSSNIDCGVSIGTIFGIYMIKNQDTVTLEEVLQPGKDMIAAGYCMYGSSCTLVLSTGNGVNGFTLDPSLGEFIMTHPDIKIPPKGKIYSVNEGNAKNWDTPTAKYVEKCKYPTDGSSPKSLRYIGSMVADVHRTLLYGGIFLYPADKKSPSGKLRVMYEVFPMSFLMEEAGGQSFTGKGRSLDLIPTDIHERSPIFLGSSDDVEEIKALYAEEAKKAGSA

SEQ ID NO: 67241 - DNA, 1556 bp, Triticum aestivum
  misc_feature (1)..(1556): Ceres Seq. ID no. 13660024
attacctagaacatcctaatcgaaaagcaaagcagaggaaactaagcttggcagccaacggctattaatacctcaccaccttgttcgcaccatccaaagaaacagagttccagcagagaaaagtgagatctgccttcttcccccatcatggctgccatgtggtatccgatcatcggtctcctccttctcatgctcccactcgggccctcctccgccatcaagttcccactcataggcaacgtctaccctgatggccacttctatgctacgttgcagattggtaagcccttgaagccctacttcctggacatcgacactggcagcaacctcacttggctggagtgtgagcacccagatcacggctgcaagggctgcaaccagaggacaccacacccatattacaagccagcagctcataacttgatggtgagatgtgacagctggatatgtgctcaactgcgcaaagaccagcctggtagtcctcaatgccccaacagcgatccacatcgatgccactatgatatccaatatgtctccgggaggtcaaaaggcgaccttgccaacgacatgatctttatcaataggagagatgatatgaactacgttttcggatgtggatacgagcaggaggagccattagagcagccatcgccaccggcggtagatggcatccttggactcgggaggggaagcgtaggatttgtcgctcaactcaaggcacaaaagaagatagtcaggaatgtcattggacattgcctcagcatccatggaaatgggaacctgtacattggggacttcaggctgcccccaggcgacgtcacctgggcacccatgagtacatctttgccttactactcacccggcccagcaacactgctctatgacgaacagccgataagaggtagtccagcattcacgacagtatttgacagtggagccacctacacctacatgcctggccagatatacaatggccttgtttcaaaggttcaagacaccctccacaaatcatcacttaaagaggtgaaggatcgtgctctgcctcaatgctggaaaggaaaaatgccattcagatctgtcgacgatgtgaagaatgaattcaagtcactgtcgctaaaaattacccatgcccgcggcaccagcaacctggacatccctcctgaaaactacctcatcgtgacgaaagacgggaatgcgtgcttggccatcctcgatggctcgtcggatcgtgttctgaggcatctcatcttaattggagatgctatgatgcaggatctgtttgtgatatatgacaacgaggtcaaccgtatcggatgggtccgtgcacagtgcgacaggatgcaggaccttgagtctggcatcattgattcacgtctctgaataaagttcgaatcgacatagacaaaaaccttagcaacaacaaaagagtgctctcgtacggtattcaaaagattgtatggcgctcccgtttataatgaaacatgttgacatgttgaggaataaataaagtgtaaagagagaatcaagtggkaarggwtaaggggggatccagtggg

SEQ ID NO: 67242 - protein, 410 aa, Triticum aestivum
  peptide (1)..(410): Ceres Seq. ID no. 15219998
MAAMWYPIIGLLLLMLPLGPSSAIKFPLIGNVYPDGHFYATLQIGKPLKPYFLDIDTGSNLTWLECEHPDHGCKGCNQRTPHPYYKPAAHNLMVRCDSWICAQLRKDQPGSPQCPNSDPHRCHYDIQYVSGRSKGDLANDMIFINRRDDMNYVFGCGYEQEEPLEQPSPPAVDGILGLGRGSVGFVAQLKAQKKIVRNVIGHCLSIHGNGNLYIGDFRLPPGDVTWAPMSTSLPYYSPGPATLLYDEQPIRGSPAFTTVFDSGATYTYMPGQIYNGLVSKVQDTLHKSSLKEVKDRALPQCWKGKMPFRSVDDVKNEFKSLSLKITHARGTSNLDIPPENYLIVTKDGNACLAILDGSSDRVLRHLILIGDAMMQDLFVIYDNEVNRIGWVRAQCDRMQDLESGIIDSRL

SEQ ID NO: 67243 - protein, 407 aa, Triticum aestivum
  peptide (1)..(407): Ceres Seq. ID no. 15219999
MWYPIIGLLLLMLPLGPSSAIKFPLIGNVYPDGHFYATLQIGKPLKPYFLDIDTGSNLTWLECEHPDHGCKGCNQRTPHPYYKPAAHNLMVRCDSWICAQLRKDQPGSPQCPNSDPHRCHYDIQYVSGRSKGDLANDMIFINRRDDMNYVFGCGYEQEEPLEQPSPPAVDGILGLGRGSVGFVAQLKAQKKIVRNVIGHCLSIHGNGNLYIGDFRLPPGDVTWAPMSTSLPYYSPGPATLLYDEQPIRGSPAFTTVFDSGATYTYMPGQIYNGLVSKVQDTLHKSSLKEVKDRALPQCWKGKMPFRSVDDVKNEFKSLSLKITHARGTSNLDIPPENYLIVTKDGNACLAILDGSSDRVLRHLILIGDAMMQDLFVIYDNEVNRIGWVRAQCDRMQDLESGIIDSRL

SEQ ID NO: 67244 - protein, 396 aa, Triticum aestivum
  peptide (1)..(396): Ceres Seq. ID no. 15220000
MLPLGPSSAIKFPLIGNVYPDGHFYATLQIGKPLKPYFLDIDTGSNLTWLECEHPDHGCKGCNQRTPHPYYKPAAHNLMVRCDSWICAQLRKDQPGSPQCPNSDPHRCHYDIQYVSGRSKGDLANDMIFINRRDDMNYVFGCGYEQEEPLEQPSPPAVDGILGLGRGSVGFVAQLKAQKKIVRNVIGHCLSIHGNGNLYIGDFRLPPGDVTWAPMSTSLPYYSPGPATLLYDEQPIRGSPAFTTVFDSGATYTYMPGQIYNGLVSKVQDTLHKSSLKEVKDRALPQCWKGKMPFRSVDDVKNEFKSLSLKITHARGTSNLDIPPENYLIVTKDGNACLAILDGSSDRVLRHLILIGDAMMQDLFVIYDNEVNRIGWVRAQCDRMQDLESGIIDSRL

SEQ ID NO: 67245 - DNA, 1621 bp, Triticum aestivum
  misc_feature (1)..(1621): Ceres Seq. ID no. 14307889
acgcacgcttccccaatcccatccagcaagcaagcagcagcgaggggtctccccgccgtcttccccgtcgccgtccgttaccgtcgtcgtcgccgcggtccagccctccggtcggcgctggttgctgacgcgtaggcgaaatccgtgcgagttctgcagatcgtcgccggcagacaatgtggggcgagagggctcatcacaggcatgggcaccatcacgaccacgttccgtccgggggttccaaggaccggcagcccaagttcatagcagacaactacagctcggtagatgaggtcattgctgcattgagagaagctgggcttgaatcatcaaatctaattcttggcatcgacttcaccaaaagcaatgaatggtcaggtaggcattcctttggaagaaaatctctgcatgccattagtggcactccaaatccatatgagcaagccatctctataattgggcgaacactatcaccttttgatgatgataacttgataccatgctttggatttggtgatgcttctacgcatgatcattctgtcttcagcttttaccaagaaaaccgtccttgccgtggttttgaggaggttcttgacagatacagacaaattgttccacatttgaacctttcaggaccaacttcttttgcacctcttatctacgcggcgatgtcagttgtcgaaagcagtaactgccaataccatgtcctcgtcatcatagctgatggacaggtgaccacttcaacttcaggtggaagattaagtccacaagaacaggcaactatacaagcgattgttgatgctagcttctatcctctttcaattgtgatggtgggggtgggcgatgggccatgggatgcaatgcagcattttgatgactgtattcctgacagagccttcgacaatttccagttcgtgaacttcactggtatcatgtcatcaagcaaggatatgtcaaagaaggaggccgcatttgcgcttgcagcgctgatggaaatacccacccaatacaaagcgactcaaggcctccgacctccagagaggcacgcacaaaacgccaaccctccgaggatccttccccctcccagcaaagttcttgaacgtgacaatattgtcgcagcttctcatactccagccgcaacctcgcagtcaaccgacgttggctacaccgtttcggatgaaaaggtatgtcccatctgcttaacgaatccaaaggacatggctttccaatgcggccatctgacatgcaaggaatgcgggccgacgctatcgacatgccccttgtgccgcgcgccaatcactgtccgtgtaaggctcttttcataaagatgatgcagacttctggaagtgaagaatcagccattcatgcaatatgttatcggcagtaatcaaggagcaagaagttgggcgggcaaggagatatgtacatgttcataaagctttactgtataacatgtccagcgccaactgtttcggctgtctgagtctgatgaataatttccatcacctcttgtgcagtttattcctgtcatcttgtaaaaaaagtagcagcagtagtcgtagttgaaaatcgtgttttcctgtaaaacctaaatgaatcaatacttcctccgtttttattg

SEQ ID NO: 67246 - protein, 382 aa, Triticum aestivum
  peptide (1)..(382): Ceres Seq. ID no. 14307890
MWGERAHHRHGHHHDHVPSGGSKDRQPKFIADNYSSVDEVIAALREAGLESSNLILGIDFTKSNEWSGRHSFGRKSLHAISGTPNPYEQAISIIGRTLSPFDDDNLIPCFGFGDASTHDHSVFSFYQENRPCRGFEEVLDRYRQIVPHLNLSGPTSFAPLIYAAMSVVESSNCQYHVLVIIADGQVTTSTSGGRLSPQEQATIQAIVDASFYPLSIVMVGVGDGPWDAMQHFDDCIPDRAFDNFQFVNFTGIMSSSKDMSKKEAAFALAALMEIPTQYKATQGLRPPERHAQNANPPRILPPPSKVLERDNIVAASHTPAATSQSTDVGYTVSDEKVCPICLTNPKDMAFQCGHLTCKECGPTLSTCPLCRAPITVRVRLFS

SEQ ID NO: 67247 - protein, 218 aa, Triticum aestivum
  peptide (1)..(218): Ceres Seq. ID no. 14307891
MSVVESSNCQYHVLVIIADGQVTTSTSGGRLSPQEQATIQAIVDASFYPLSIVMVGVGDGPWDAMQHFDDCIPDRAFDNFQFVNFTGIMSSSKDMSKKEAAFALAALMEIPTQYKATQGLRPPERHAQNANPPRILPPPSKVLERDNIVAASHTPAATSQSTDVGYTVSDEKVCPICLTNPKDMAFQCGHLTCKECGPTLSTCPLCRAPITVRVRLFS

SEQ ID NO: 67248 - DNA, 1766 bp, Triticum aestivum
  misc_feature (1)..(1766): Ceres Seq. ID no. 13659615
aaaaaatagaaactccccgacgacttgctcctcctccccctcacttccctcccccatcttggaccgttgcacaccgatctcgcgccggcccccaaatcgccggcgaagcccgcctccgcctccgtcccccgccgcgccgatctgctcgcaagattcgtaggccggaggaggaggacgaggaagggaggaagttgagttcttgttggtttcttccgcgggagccgaccgcacatgccaacaaccccccggagcagaagccaagctaggaccaccaggtcttggatcttgtcaggcatggacttcggtgacacgagacgcaagcctaatttcgccggaaagatcgcggtggctgctgccctcactgttatgtgcatacttgtgttgaagcagtctcctggttttggcggcactagcgtgttctctcgccatgaaactggggtgactcatgtgctggtgactggaggtgctggatacattggctcacatgctactcttcgtctccttacggacaactaccgagttaccattgtggataacctttcgagagggaacatgggagctgtcagagctctccagaggttgtttccagagcctgggaggcttcagtttatatacactgatttaggcgatccgaaagctgtgaacaaaatgttttcggagaacgcgtttgatgctgttatgcacttcgctgctgttgcttatgttggtgagagcacgcaggagccactaaggtactaccacaacataacatcaaatacgttgacagtgcttgaggcaatggcagcacataatgtaaaaactctgatttactcgagtacttgtgcaacatatggtgaacctgacacaatgcctattgtagaaacaactcctcagatacctatcaatccatacgggaaggcaaaaaagatgtccgaggacatcattctagatttctcaaagaaatcgaacatggctgtgatgatcttaagatacttcaatgtgattggatcggaccctgaggggcgccttggggaagctccaaggcctgaactgcgtgagcatggaaggatttctggtgcgtgttttgatgcagcatcaggaatcattccagggctaaaggttcgaggaacggactaccctaccgctgatggaacttgcgtaagggactacatcgatgtcacagatcttgttgatgcccatgtcaaagctcttggtaaagctgagcctagcaaagttggaatctacaatgtcggcacagggaaaggtaggtcagtgaaggagtttgtagaagcgtgcaagaaggcgactggagcaaccatcaaggttgactacctcgatcggagagctggggattacgccgaagtatacagcaacccggccaagatccgcgatgagctgaactggacagcccaacacacggacctccgtgagagccttgcgacggcctggaaatggcagaaggcgcacccgggcggatacgggtcggcctgatcccgtgctcggtaggttcaacgcaagttcgccaacacagacccacaggtccatgtgcagtgatatggccttgagaacactggtccttcaccgtagacacgtagcaggcagccacagaagtgtagtgatgttatttcgcagcacctggaagaagatacagagagaatggcctgcctggcttagaagaaatcatatatagttttcttttttcttttcttttcgtcagtgacatttaatttattttgctgttcgttggctgaggcataatatatgacacaaatacggagttgtgctgt

SEQ ID NO: 67249 - protein, 412 aa, Triticum aestivum
  peptide (1)..(412): Ceres Seq. ID no. 13659616
MPTTPRSRSQARTTRSWILSGMDFGDTRRKPNFAGKIAVAAALTVMCILVLKQSPGFGGTSVFSRHETGVTHVLVTGGAGYIGSHATLRLLTDNYRVTIVDNLSRGNMGAVRALQRLFPEPGRLQFIYTDLGDPKAVNKMFSENAFDAVMHFAAVAYVGESTQEPLRYYHNITSNTLTVLEAMAAHNVKTLIYSSTCATYGEPDTMPIVETTPQIPINPYGKAKKMSEDIILDFSKKSNMAVMILRYFNVIGSDPEGRLGEAPRPELREHGRISGACFDAASGIIPGLKVRGTDYPTADGTCVRDYIDVTDLVDAHVKALGKAEPSKVGIYNVGTGKGRSVKEFVEACKKATGATIKVDYLDRRAGDYAEVYSNPAKIRDELNWTAQHTDLRESLATAWKWQKAHPGGYGSA

SEQ ID NO: 67250 - protein, 391 aa, Triticum aestivum
  peptide (1)..(391): Ceres Seq. ID no. 13659617
MDFGDTRRKPNFAGKIAVAAALTVMCILVLKQSPGFGGTSVFSRHETGVTHVLVTGGAGYIGSHATLRLLTDNYRVTIVDNLSRGNMGAVRALQRLFPEPGRLQFIYTDLGDPKAVNKMFSENAFDAVMHFAAVAYVGESTQEPLRYYHNITSNTLTVLEAMAAHNVKTLIYSSTCATYGEPDTMPIVETTPQIPINPYGKAKKMSEDIILDFSKKSNMAVMILRYFNVIGSDPEGRLGEAPRPELREHGRISGACFDAASGIIPGLKVRGTDYPTADGTCVRDYIDVTDLVDAHVKALGKAEPSKVGIYNVGTGKGRSVKEFVEACKKATGATIKVDYLDRRAGDYAEVYSNPAKIRDELNWTAQHTDLRESLATAWKWQKAHPGGYGSA

SEQ ID NO: 67251 - protein, 367 aa, Triticum aestivum
  peptide (1)..(367): Ceres Seq. ID no. 13659618
MCILVLKQSPGFGGTSVFSRHETGVTHVLVTGGAGYIGSHATLRLLTDNYRVTIVDNLSRGNMGAVRALQRLFPEPGRLQFIYTDLGDPKAVNKMFSENAFDAVMHFAAVAYVGESTQEPLRYYHNITSNTLTVLEAMAAHNVKTLIYSSTCATYGEPDTMPIVETTPQIPINPYGKAKKMSEDIILDFSKKSNMAVMILRYFNVIGSDPEGRLGEAPRPELREHGRISGACFDAASGIIPGLKVRGTDYPTADGTCVRDYIDVTDLVDAHVKALGKAEPSKVGIYNVGTGKGRSVKEFVEACKKATGATIKVDYLDRRAGDYAEVYSNPAKIRDELNWTAQHTDLRESLATAWKWQKAHPGGYGSA

SEQ ID NO: 67252 - DNA, 870 bp, Triticum aestivum
  misc_feature (1)..(870): Ceres Seq. ID no. 14313370
gaaaccgaagctcggctttggaaatctggggaaggcgacgagcaatccgaggagctccgcccctcttcttctcccccacccccactggcgacggcgacggaggcgagggtgaaaattccccaccaaccggagcgcgtgcttgctgatggaggtctcggccaggctccgcccgccgcccgccgcctcgacggcgccgccccgccgcggcggagggcccctgcgactgcgacggctgctcccttcgtctcggcccgcctcccgcgcggtctccgccaagatcagagcaagtgcaattaatgacctgcaaagaagcaagagtagcctggaagcactgttctgctacgacaaagctgttccagaggagaatatcgggaaacctgctggcctagatttggaaaagaagaatgttgggaagaatcctccatgcgtgcgctgcgaaactaaaggtgctgtgctgtgcgcaacctgcgctggttcaggcttgtacgtcgactcgataatggaaagccaaggaattatcgtaaaagtcagatgcctaggctgcggaggaactggaagcatcatgtgctccacatgcggaggccgtggacacacctgaattgtctgttgatgtttctcacaaacaaggcaatgaaattcaagtagcatcctcttggtgtacgtccatcatcgccgggaactatcatttttgcagtaatctgtatacattttactgacgattcatagttgaacgatgttcagagcatgctgcgaacaatttcactgtactaaaggattcgatgctgagtcgggtgttgtaccttgagtctacttagttcagagcgtgtgacatcgttttgcttttgtatcaaaaattgtttcagttgtaac

SEQ ID NO: 67253 - protein, 150 aa, Triticum aestivum
  peptide (1)..(150): Ceres Seq. ID no. 14313371
MEVSARLRPPPAASTAPPRRGGGPLRLRRLLPSSRPASRAVSAKIRASAINDLQRSKSSLEALFCYDKAVPEENIGKPAGLDLEKKNVGKNPPCVRCETKGAVLCATCAGSGLYVDSIMESQGIIVKVRCLGCGGTGSIMCSTCGGRGHT

SEQ ID NO: 67254 - protein, 98 aa, Triticum aestivum
  peptide (1)..(98): Ceres Seq. ID no. 14313372
ETEARLWKSGEGDEQSEELRPSSSPPPPLATATEARVKIPHQPERVLADGGLGQAPPAARRLDGAAPPRRRAPATATAAPFVSARLPRGLRQDQSKCN

SEQ ID NO: 67255 - DNA, 1572 bp, Triticum aestivum
  misc_feature (1)..(1572): Ceres Seq. ID no. 14303205
acacaaacttgttttcgattcctgctgctgtaggctgtagctcccccaaatctcatccaccggccggccctaatggcgctcccagatgaacttctggaggagatcttcctccgcctccccgcggccgccgacctcgcccgcgcctccacggcctgcgtctccttccgccgcgtcatcaccggccatcccttcctccgccggttccgcaccctccacccgccgtccctcctcggcatcctctgcggcggcctcatccccgcccagccgccccacccttccgccgcagcggcagccacctacgccgacgccgacttgtcgtgctcctttatgcccccaccccgcgaccgctggcgccaccgcgacggccgcgcccttttctcccccgccctcgaggggatcggcggcgactacagccctagccacctggtcacggagttcgccgtctgcgaccccctgcaccgtcgttacctcctgctgcctgccctccccgaccttctagtcggtcaagtccataggccggacatcgtggactgcgaggccttcctcgctcctcctggccctgacgacgttggggctgactggtcgtcattcagagtcatgtacttggtgcgttgcacagccaagctcttgctcttcgtcttctccacctgcgccggacaatggctcgctaatcctgttacagttgacgtgtttcgatgcggggcggcgttgcaccgcttctacgcccatggctgcttctattgggaggttttccggtctaacaagttgctcgtgctcgatgcgcgcaggatagagttctccactgttgacctcccgcctccacctggccctgatgtgcgaaagatggccattgtagaggcaggaggaggaaggcttgggatgcttactatctctgagcatcctgaacctggtgcagatcatctcctgtatgccgtacagtctaaggatgtgaatggcagaaaccagtggcaatccaagtcagtaatttatttgccggaaaattatcgctatggcatcatgggtgtagctggtggatacttactcctaactgggtatccagaagacgacatgccaatcagctatttttcactgaatctccagaattttcaggttgagtgcttctgtcagactggtgataaagtcatttttggtgacctgtatgccgatctcccaccgtccttgtccccaccaactctttgaactggacctcccagagaatgcgctgatggcaaagactcgcaagcgtgactaatgtcatgttaaggagaataaatgtaagaacttttgaaagggtgaaagtggtttgcactcgacagcaacttgcagctaagagaagaagaaggcagaagttgttgatgaccggcgcatccaccattttttcttgttaaaattctcacgacgtttctgctttttgttgcagtacttttatgcctggcaagagactagactatcttattatgccgctttgtttgaactgagtgctaggtaagctttgcggcttcagcaaccctggaaatagtttgcttttggtggtgtatgattctagtatcagtatgtatgtatggcataccc

SEQ ID NO: 67256 - protein, 375 aa, Triticum aestivum
  peptide (1)..(375): Ceres Seq. ID no. 14303206
MALPDELLEEIFLRLPAAADLARASTACVSFRRVITGHPFLRRFRTLHPPSLLGILCGGLIPAQPPHPSAAAAATYADADLSCSFMPPPRDRWRHRDGRALFSPALEGIGGDYSPSHLVTEFAVCDPLHRRYLLLPALPDLLVGQVHRPDIVDCEAFLAPPGPDDVGADWSSFRVMYLVRCTAKLLLFVFSTCAGQWLANPVTVDVFRCGAALHRFYAHGCFYWEVFRSNKLLVLDARRIEFSTVDLPPPPGPDVRKMAIVEAGGGRLGMLTISEHPEPGADHLLYAVQSKDVNGRNQWQSKSVIYLPENYRYGIMGVAGGYLLLTGYPEDDMPISYFSLNLQNFQVECFCQTGDKVIFGDLYADLPPSLSPPTL

SEQ ID NO: 67257 - protein, 290 aa, Triticum aestivum
  peptide (1)..(290): Ceres Seq. ID no. 14303207
MPPPRDRWRHRDGRALFSPALEGIGGDYSPSHLVTEFAVCDPLHRRYLLLPALPDLLVGQVHRPDIVDCEAFLAPPGPDDVGADWSSFRVMYLVRCTAKLLLFVFSTCAGQWLANPVTVDVFRCGAALHRFYAHGCFYWEVFRSNKLLVLDARRIEFSTVDLPPPPGPDVRKMAIVEAGGGRLGMLTISEHPEPGADHLLYAVQSKDVNGRNQWQSKSVIYLPENYRYGIMGVAGGYLLLTGYPEDDMPISYFSLNLQNFQVECFCQTGDKVIFGDLYADLPPSLSPPTL

SEQ ID NO: 67258 - protein, 200 aa, Triticum aestivum
  peptide (1)..(200): Ceres Seq. ID no. 14303208
MYLVRCTAKLLLFVFSTCAGQWLANPVTVDVFRCGAALHRFYAHGCFYWEVFRSNKLLVLDARRIEFSTVDLPPPPGPDVRKMAIVEAGGGRLGMLTISEHPEPGADHLLYAVQSKDVNGRNQWQSKSVIYLPENYRYGIMGVAGGYLLLTGYPEDDMPISYFSLNLQNFQVECFCQTGDKVIFGDLYADLPPSLSPPTL

SEQ ID NO: 67259 - DNA, 2315 bp, Triticum aestivum
  misc_feature (1)..(2315): Ceres Seq. ID no. 14303002
atgttgagctagggtttagtcttgtagtactagatacagggtttaggatccgggaggagcccggctcccctcccaaaccgctctcatgtcgtcttcctcccaagtaagggttgggactctggttccctttgttgaaggcaaatctgggtcaccgagtgcgtcgtcgctgccaatgccaagcattcccatcttcaagggctccaatgtcgtcgggaggagtaatttggtggctgttgacaagagggtcagccgcaagcatttgagcctgcgcgccttgcctgatggctctctcgaagtcgttgtggaggggccaaatcccattgttgtccgatcagagggtcagagaagaaaagtttgtgctcagcagagagccaagattatgcacgatgatgtcctggagctgattcccggtgaatattttatgaagtatgtgaatatgagtgatgagcgtaaaagttccacatcagtcgaatcacatgacttaaagaaagggaagaggcatagcgaggaagatagtgtagttgcaaagagaaatcgacaagttatggaagatgaggctttggcaagaacatcgcaggaaagctttgcagaagagagtacatctgttactgaggtagtaagttcacttgatagtgctggttcttccgagagaaacaaagagagaacacattctgtcggccctttgaaagatgtacttccgttgacttttcgactcatgcgtgtccaacgtcttccatcatggactaacacttcaacagttaccattccggatgtcatacagggtgaagtgcttcttgctgtactctcaaattatatggtggacatggattggttgcttactgcatgtccaagtctaaggaaagttccacatgtcctagttctgcatggagaagatggtgcttcattggagcgcttgaagaaaacgaagcctgcaaattggatccttcacaagcccccgctcccaatatcatttggaacacatcattcgaaggccatgctgcttgtatatcctcaagggattcgtgttgttgttcacactgcaaatttgatacatgttgactggaataacaaaagtcagggattatggacgcaagattttccatggaagaaagcaaatgatacgagtacaaatattggttttgagaatgacctggttgattatctcagggcacttaagtggcctgagttcagggtaaatctcccagttgccggtgatgtcaacatcaatgcagcattctttcggaaatttgattatagtagctcaacggtcaggttgatcggatctgttcctggttatcatgtcggtcccaatatgaaaaagtggggccatatgaagcttaggagtgttcttgaagagtgcgtatttgaaaagcagttttgcaagtcaccacttatttatcagttttcgtccttggggtcacttgatgagaaatggatgagtgagtttgcatgttcgttatcagctggtaaagcagatgatggatcacagttgggtattgggaaaccactgattgtatggccaacagtggaggatgttaggtgctcaatagagggctatgcagctggcagttgcattccaagtcctcaaaagaatgttgagaaagatttcttgcgaaaatattggtccaggtggaaagcagaccacgtaggccgttgccgtgctatgccgcacataaaaacttttactcgctacaatggtcaaaatattgcatggtttctgcttacctcatcaaatttaagcaaagctgcttggggagcactgcagaagaacaatacacagctgacgatacgatcatatgagttaggtgtattgttcttgcccaaaactctccagtctgttccacaattttcatgcacagacaagagccgctcaaacctggataaacttgcccttggtaagaacatcaagaccaagctggtgacactttgctggaaaggtgatgaagaaaaggatccatctgcagaagttgtgagattgccagtgccatatcaagtccctccacaactctacggcccggaagatgtcccatggtcgtgggatcggaggtacacgaagaaggatgtgtatggttcagtctggccacgccatggctagcttagctgagctgcgtgccgatgattattaagcgtgttcaggtccacaggaacctggtgtatgttgattgatcactggtggaatcatcggttataggacctgattgctcgtgcaccctgtttctaggcctctcgctctcagccaactgtgggagaaaccataagcaatggaacgaacatttggttgacagaattatttggaacgttggatattttgagct

SEQ ID NO: 67260 - protein, 669 aa, Triticum aestivum
  peptide (1)..(669): Ceres Seq. ID no. 14303003
MSSSSQVRVGTLVPFVEGKSGSPSASSLPMPSIPIFKGSNVVGRSNLVAVDKRVSRKHLSLRALPDGSLEVVVEGPNPIVVRSEGQRRKVCAQQRAKIMHDDVLELIPGEYFMKYVNMSDERKSSTSVESHDLKKGKRHSEEDSVVAKRNRQVMEDEALARTSQESFAEESTSVTEVVSSLDSAGSSERNKERTHSVGPLKDVLPLTFRLMRVQRLPSWTNTSTVTIPDVIQGEVLLAVLSNYMVDMDWLLTACPSLRKVPHVLVLHGEDGASLERLKKTKPANWILHKPPLPISFGTHHSKAMLLVYPQGIRVVVHTANLIHVDWNNKSQGLWTQDFPWKKANDTSTNIGFENDLVDYLRALKWPEFRVNLPVAGDVNINAAFFRKFDYSSSTVRLIGSVPGYHVGPNMKKWGHMKLRSVLEECVFEKQFCKSPLIYQFSSLGSLDEKWMSEFACSLSAGKADDGSQLGIGKPLIVWPTVEDVRCSIEGYAAGSCIPSPQKNVEKDFLRKYWSRWKADHVGRCRAMPHIKTFTRYNGQNIAWFLLTSSNLSKAAWGALQKNNTQLTIRSYELGVLFLPKTLQSVPQFSCTDKSRSNLDKLALGKNIKTKLVTLCWKGDEEKDPSAEVVRLPVPYQVPPQLYGPEDVPWSWDRRYTKKDVYGSVWPRHG

SEQ ID NO: 67261 - protein, 640 aa, Triticum aestivum
  peptide (1)..(640): Ceres Seq. ID no. 14303004
MPSIPIFKGSNVVGRSNLVAVDKRVSRKHLSLRALPDGSLEVVVEGPNPIVVRSEGQRRKVCAQQRAKIMHDDVLELIPGEYFMKYVNMSDERKSSTSVESHDLKKGKRHSEEDSVVAKRNRQVMEDEALARTSQESFAEESTSVTEVVSSLDSAGSSERNKERTHSVGPLKDVLPLTFRLMRVQRLPSWTNTSTVTIPDVIQGEVLLAVLSNYMVDMDWLLTACPSLRKVPHVLVLHGEDGASLERLKKTKPANWILHKPPLPISFGTHHSKAMLLVYPQGIRVVVHTANLIHVDWNNKSQGLWTQDFPWKKANDTSTNIGFENDLVDYLRALKWPEFRVNLPVAGDVNINAAFFRKFDYSSSTVRLIGSVPGYHVGPNMKKWGHMKLRSVLEECVFEKQFCKSPLIYQFSSLGSLDEKWMSEFACSLSAGKADDGSQLGIGKPLIVWPTVEDVRCSIEGYAAGSCIPSPQKNVEKDFLRKYWSRWKADHVGRCRAMPHIKTFTRYNGQNIAWFLLTSSNLSKAAWGALQKNNTQLTIRSYELGVLFLPKTLQSVPQFSCTDKSRSNLDKLALGKNIKTKLVTLCWKGDEEKDPSAEVVRLPVPYQVPPQLYGPEDVPWSWDRRYTKKDVYGSVWPRHG

SEQ ID NO: 67262 - protein, 571 aa, Triticum aestivum
  peptide (1)..(571): Ceres Seq. ID no. 14303005
MHDDVLELIPGEYFMKYVNMSDERKSSTSVESHDLKKGKRHSEEDSVVAKRNRQVMEDEALARTSQESFAEESTSVTEVVSSLDSAGSSERNKERTHSVGPLKDVLPLTFRLMRVQRLPSWTNTSTVTIPDVIQGEVLLAVLSNYMVDMDWLLTACPSLRKVPHVLVLHGEDGASLERLKKTKPANWILHKPPLPISFGTHHSKAMLLVYPQGIRVVVHTANLIHVDWNNKSQGLWTQDFPWKKANDTSTNIGFENDLVDYLRALKWPEFRVNLPVAGDVNINAAFFRKFDYSSSTVRLIGSVPGYHVGPNMKKWGHMKLRSVLEECVFEKQFCKSPLIYQFSSLGSLDEKWMSEFACSLSAGKADDGSQLGIGKPLIVWPTVEDVRCSIEGYAAGSCIPSPQKNVEKDFLRKYWSRWKADHVGRCRAMPHIKTFTRYNGQNIAWFLLTSSNLSKAAWGALQKNNTQLTIRSYELGVLFLPKTLQSVPQFSCTDKSRSNLDKLALGKNIKTKLVTLCWKGDEEKDPSAEVVRLPVPYQVPPQLYGPEDVPWSWDRRYTKKDVYGSVWPRHG

SEQ ID NO: 67263 - DNA, 1616 bp, Triticum aestivum
  misc_feature (1)..(1616): Ceres Seq. ID no. 15224908
aaactcctttttttcctgacacggctagctaagcttgaaccgactgctggacgacggagagggagaccaaggccgagcagacgccggcgggatcccaactgaattgtgaggggggccgccgaggcggcggatggcgccctcgttgctcgtctcggcgagccaaatcctcgccgttgccggccggggaggccgtaggcggcgtctggtcatcgccaactccggcggtgccggcgctcccccgaagctggtgactttcctcggcaagggaggctccggcaagaccacggcggccgccatcgccgctcagtattatgctagtgaaggcctgaagacatgcctggttatacagtcacaagacccgacagcagagcaattgatgggctgtaagatcgggaactcgctcacagaatgtgctgctaatctttcgaccattaagcttgagaccagtaaaatgctacttgagccccttgaccggttgaagaaagtagatgcccagagcaatctcactcaaggagttcttgaggggattgtaggggaggaacttggagtcttacctggaatggattcgatctgctcagtcttgtctcttcagaagctgctcaacttcttttcagttggaacgaatagtccacagggggaatttgatgtcgtagtgtatgactgcaataatacagaggaatttctacggctcactggtgctactgagagggcaagatcttacttgaagtatgtgagggagctagcagagaagactgacataggaagactggcgtcgccatcgttactgaaactgatttatgatgccgcgagaccaagtggtagaactggtgaagtaagaatgagtgcagagatatggaatgaaatcgaacaacttcttgagaaaatctcgctttggtttgctgatccctcaaaacttgcgtgcttcctcgtcatggacccgagaggatcaatctcggtgtcctctgcgctaagatactggggttgcaccatccaagctggcgcgcaaatatgtggagcatttggttatgctgaagacccttctgaaatgcaccaaggagttgctgagaagtttttgccattgtctttctcgtttctgccatttgtaccaactgattcttctgcggattggggcagagcgttaaattcattgaatcaaaatacaaaggggctgttgaggaatgcaagcaaggtttatccttcagttagttttgattctgcacagaagtcggtgacccttttcatgccaggatttgacaagtctgaaatcaaactatatcagtataggggcggttcggagctactgatcgaagccggcgaccagaggcgcgtaattaagctgccaccggcgatgcaggggaaggtcggtggcgccaagttcgtcgacaggaatcttgtcattaccatccggtaggcggcagcagggccttgggtgatccggaaatcggagcacaggctcgagaaaccaaaccggtggagaaccgtgcagcaccgtaatgtaaacccgatatagaccggttcctggtgatgtctgtcagcatcgtttttccattttgctgtaaacatggtgagatttctcacaacggcattatagaagtggaagaaaaagggcagtccac

SEQ ID NO: 67264 - protein, 426 aa, Triticum aestivum
  peptide (1)..(426): Ceres Seq. ID no. 15224909
MAPSLLVSASQILAVAGRGGRRRRLVIANSGGAGAPPKLVTFLGKGGSGKTTAAAIAAQYYASEGLKTCLVIQSQDPTAEQLMGCKIGNSLTECAANLSTIKLETSKMLLEPLDRLKKVDAQSNLTQGVLEGIVGEELGVLPGMDSICSVLSLQKLLNFFSVGTNSPQGEFDVVVYDCNNTEEFLRLTGATERARSYLKYVRELAEKTDIGRLASPSLLKLIYDAARPSGRTGEVRMSAEIWNEIEQLLEKISLWFADPSKLACFLVMDPRGSISVSSALRYWGCTIQAGAQICGAFGYAEDPSEMHQGVAEKFLPLSFSFLPFVPTDSSADWGRALNSLNQNTKGLLRNASKVYPSVSFDSAQKSVTLFMPGFDKSEIKLYQYRGGSELLIEAGDQRRVIKLPPAMQGKVGGAKFVDRNLVITIR

SEQ ID NO: 67265 - protein, 344 aa, Triticum aestivum
  peptide (1)..(344): Ceres Seq. ID no. 15224910
MGCKIGNSLTECAANLSTIKLETSKMLLEPLDRLKKVDAQSNLTQGVLEGIVGEELGVLPGMDSICSVLSLQKLLNFFSVGTNSPQGEFDVVVYDCNNTEEFLRLTGATERARSYLKYVRELAEKTDIGRLASPSLLKLIYDAARPSGRTGEVRMSAEIWNEIEQLLEKISLWFADPSKLACFLVMDPRGSISVSSALRYWGCTIQAGAQICGAFGYAEDPSEMHQGVAEKFLPLSFSFLPFVPTDSSADWGRALNSLNQNTKGLLRNASKVYPSVSFDSAQKSVTLFMPGFDKSEIKLYQYRGGSELLIEAGDQRRVIKLPPAMQGKVGGAKFVDRNLVITIR

SEQ ID NO: 67266 - protein, 319 aa, Triticum aestivum
  peptide (1)..(319): Ceres Seq. ID no. 15224911
MLLEPLDRLKKVDAQSNLTQGVLEGIVGEELGVLPGMDSICSVLSLQKLLNFFSVGTNSPQGEFDVVVYDCNNTEEFLRLTGATERARSYLKYVRELAEKTDIGRLASPSLLKLIYDAARPSGRTGEVRMSAEIWNEIEQLLEKISLWFADPSKLACFLVMDPRGSISVSSALRYWGCTIQAGAQICGAFGYAEDPSEMHQGVAEKFLPLSFSFLPFVPTDSSADWGRALNSLNQNTKGLLRNASKVYPSVSFDSAQKSVTLFMPGFDKSEIKLYQYRGGSELLIEAGDQRRVIKLPPAMQGKVGGAKFVDRNLVITIR

SEQ ID NO: 67267 - DNA, 954 bp, Triticum aestivum
  misc_feature (1)..(954): Ceres Seq. ID no. 14301680
agcattttgagaaaataaaattggacagagaaccatcaacccaaaaattgaggagaagcagcaggtgctccgcctctgccgccgccggtgacccgccgtagcagccgctcgccccgccgcccctgaccctcttcaatctactgttccattccaccccgacccaaaccaaacacacactaaacaccggcgccgacctctcctaggtttcgtcccatctcaccggagatggccggggcagcgtcgtcggtagcgcccgttctcgtcatctgcttgctttctcttgctctcttcctccacaggtgccggagctgtgaggctgtggagagagagaggacgttggcaatgatcaagccggatggtttgtctggcaactacaaggaaaaaatcaaggaggccatcttggggtctggatttgatatcatagaagaggcagttgtccatctggatgcagagagggcatcactcttctatgctgaacatgccgatagaagcttcttcaacagcctagtgaagtacatgacgagtggtccagtttgtgctatggttctggaaagccctgatgccatttcacgctggcgaaatttgatagggccaactgatgcaagaaaggctaaaacttcacaccctgacagcattagagcaatgtgcggcttggactctgagaaaaattgtgtgcatggttcagattcaccgcaatctgcagccagagagatttcgtttttcttcagagatgataaatctgaagcgctggaacatgacgagctgtagacaattggcatgtatcctcaaaaggcagataatttttgaagtttgatttgccccttccagctattagttgatgaaaatgtctgtacatcacatatgttgatctgacatcaaacttctccagttgatagcttcatcccttggttgccaaaggctgtgacggtgaaatcaccacagcgaaattttgtc

SEQ ID NO: 67268 - protein, 180 aa, Triticum aestivum
  peptide (1)..(180): Ceres Seq. ID no. 14301681
MAGAASSVAPVLVICLLSLALFLHRCRSCEAVERERTLAMIKPDGLSGNYKEKIKEAILGSGFDIIEEAVVHLDAERASLFYAEHADRSFFNSLVKYMTSGPVCAMVLESPDAISRWRNLIGPTDARKAKTSHPDSIRAMCGLDSEKNCVHGSDSPQSAAREISFFFRDDKSEALEHDEL

SEQ ID NO: 67269 - protein, 141 aa, Triticum aestivum
  peptide (1)..(141): Ceres Seq. ID no. 14301682
MIKPDGLSGNYKEKIKEAILGSGFDIIEEAVVHLDAERASLFYAEHADRSFFNSLVKYMTSGPVCAMVLESPDAISRWRNLIGPTDARKAKTSHPDSIRAMCGLDSEKNCVHGSDSPQSAAREISFFFRDDKSEALEHDEL

SEQ ID NO: 67270 - DNA, 1619 bp, Triticum aestivum
  misc_feature (1)..(1619): Ceres Seq. ID no. 15170659
aggttagggaaacgctaccaaatccctccctccgctctcttcttcctcgccgcggtgattctttcctcactccccaccccagcccgctcggcgcttgctcactactgatctcacggggagggcccggcggccaatcgccgcctccagcatcgtcgagcctcgcgcctcacgcctcctcctctcactcccgagccggcaaccgcggcagcaggagcggcgagaggagggcaaggcgaagacccgagaggacgcaatggagtacagaagagtgaaggatcaggagagttatgacgccatatctcagaaggacatagaaagccctgatgggaggtctctttctagcactgcagcaacttccccccttggcaccgtaggaggttcgaagggcaagaatagctggaagcaaaagtctattgtaacaattgcattgacattactaacaagttcccaggcaatactgattgtgtggtcaaaaagagctggaaagtatgaatatagtgtcacaacagcaaatttttcggtggaagctttaaaatgtctattatcacttctagccctgtacagaacatggaacagtcaaggtgttacagaagataataggttaagtacatcatttgatgaagttagtgtttatcctatccctgccgtactttacatggtaaagaatctattgcagtattacatcttcgcctatgtggatgcaccagcttaccagatcctgaagaacctgaatattatcagcactggtgtcttataccgtatcattttaaagaaaaaattaagtgaaattcagtgggctgcatttattctcttatgtgctggctgcactacggctcagctaaacccctcatcagaccatgttcttcaaacgccaattcaaggttggatgatggccattgtgatggctcttctaagtggttttgctggggtatacacagaagctataataaaaaaacgtccttcgagaaacatcaatgtgcagaatttctggctgtacatttttggaatgctcttcaacttagttgccatttgtgttcaggactttgatgctgtcatgaacaaaggcttttttcatggctactcatttattacacttctgatgattcttaaccatgcactcagtggcattgctgtatcaatggtgatgaagtatgctgacaatattgtcaaggtgtattcaacttcagtcgcaatgcttctgacggcaattgtatcggtcttcttgttcggcttcaacctatcccttgcattcttcctcggatctacggtcgtttcaatctcggtgtatctgcattctgtcgggaagccacagcagcagaaatgagttcctcccccatctttctttccaagattggcagcgagcgcctcgatgcggcgtcgtggaacggattatggacggcacggcagcatcgaaggggaataggcttcgttctaggtcatggcactgttgttgaggcaaggcgattcgcccggtgacatattcaggttcaccatccgtttgaactgcttctttggtggcatacctggctcacttttgcttcgtgaccagggtggatgacatacgctagtttcttatctgggtaggccggcgagaatgcgagacgctggctatcttcttc

SEQ ID NO: 67271 - protein, 356 aa, Triticum aestivum
  peptide (1)..(356): Ceres Seq. ID no. 15170660
MEYRRVKDQESYDAISQKDIESPDGRSLSSTAATSPLGTVGGSKGKNSWKQKSIVTIALTLLTSSQAILIVWSKRAGKYEYSVTTANFSVEALKCLLSLLALYRTWNSQGVTEDNRLSTSFDEVSVYPIPAVLYMVKNLLQYYIFAYVDAPAYQILKNLNIISTGVLYRIILKKKLSEIQWAAFILLCAGCTTAQLNPSSDHVLQTPIQGWMMAIVMALLSGFAGVYTEAIIKKRPSRNINVQNFWLYIFGMLFNLVAICVQDFDAVMNKGFFHGYSFITLLMILNHALSGIAVSMVMKYADNIVKVYSTSVAMLLTAIVSVFLFGFNLSLAFFLGSTVVSISVYLHSVGKPQQQK

SEQ ID NO: 67272 - protein, 222 aa, Triticum aestivum
  peptide (1)..(222): Ceres Seq. ID no. 15170661
MVKNLLQYYIFAYVDAPAYQILKNLNIISTGVLYRIILKKKLSEIQWAAFILLCAGCTTAQLNPSSDHVLQTPIQGWMMAIVMALLSGFAGVYTEAIIKKRPSRNINVQNFWLYIFGMLFNLVAICVQDFDAVMNKGFFHGYSFITLLMILNHALSGIAVSMVMKYADNIVKVYSTSVAMLLTAIVSVFLFGFNLSLAFFLGSTVVSISVYLHSVGKPQQQK

SEQ ID NO: 67273 - DNA, 2061 bp, Triticum aestivum
  misc_feature (1)..(2061): Ceres Seq. ID no. 15169557
atcgtaggcccggcgcttcccccctcattctgttgtgcccaggatccttcgcgcctgctgcgatctggattcggatgatcaatcgagcagcttttcgtccggttcttcctggatgatcctctatctggttggggatttttcttcgatcggcttgtcctcttaagagaaagaacgctgcaatttctttgacacacatctccaagttcatcattctctgtctctgctcaaccaataatacagacttcagtcacacataaagaaatgggtcacaccattggagttgcagatgatgaaatagcagacataccatgttcagatgcttcaccaattctgaccgaatatcacatcacagtccctacccttcacgatggactaatgcaaggggcagaccagcacgagagacggcttctggatgtcctcaaagcaacgccttcagtgcaatggctgaaggacatcaacgtctgcggtccactgggaaaaattcagctgccatcgatcggcgtccaccgctacctccatgtccacttcatcagaacagtcgactggagctcactgctcgccatctgcaagaaccacctcaagcatcctctcaacatcgccctactcatctggctgctatgcgtcgccgccgccggcgccatgctaggactgctcctgttggggctgctgaacaaggcattcccttccagggccttgaggcaccactggatagagatcgacaaccagatcctcaacgccctcttcacgctcatgagcatctaccagcatcccatcctcgtccaccacctcgttctcctctgccggtggcggccggaggacgccgcccagctaaggaaggtgtactgcaagaatggcgcccgccgtcccaacgagcgagcgcacatgtccttcgtggtggccctcctccacgtcacctgcatctcgcagtacatggagtgcagcctctactggggctacccaagcaggtcgcgctccgagctcgcggagaacttcttcttcatcctcggcgtcgccgcgccggtcgtcgccggcgctcacgcggtgtacagccctctaggcagagacgacgacgccgccgccgcctcctgcgaagagaccaagcagctccacgcagccggagccgaagaatcgccggaagaaatgacggtggtcggcaacccgatgtgggcgggggagctgctggactgcggcgaggacccggcggcgtgctacctgtcgttcctctgcaccttctgcgtgttcggctggaacatggagcggctggggctgggcaacatgtacatgcacacggccatgttcctgctgctgtgcgtcgcgcccttctgggtgttcaacgtcacggcgctcagcatccacgactacgccctcagcgatgccttcggcgccgccggggtggtgctctgcttcctcgggctcctgtacgggggcttctggaggatgcagatgaggaagcggctcgggctgccccggagcaggtggtgctgcggctcgtcgtcgctgacggactacgcgcagtggctcctctgctggccgtgcgcgctcgcgcaggaggtgcgcacggcgaacctgtacgacccgaggggcgacggcggtttctacgggaagctggtggacggcggtgacccggagcgagggccggacgtgccggtctccgctgaagtgcaggaggtggtcggcggtgttgtcaatccgacggtggacggcgagatgatcccgcccgtgcagccggtggtggagtctggacggcagaggcaagccggccacgaagaaattgttgcaaatggcagtagcgtccagctcaaaagttgaccgcagctgttggatggtgactgatgctgtagagtattcgcaagctgacggatatattcttcctttttgggggatcgatgtcaccattttgacattgttatgctcctggtttgtcatgctctgcacgggactttaggtcgttataagtcattagttagtccagttttattcagatcagctaccttgacactccaacagatgtcatctttcatcgattcttttcgtattgcacgttactggaagaagaagaac

SEQ ID NO: 67274 - protein, 515 aa, Triticum aestivum
  peptide (1)..(515): Ceres Seq. ID no. 15169558
MGHTIGVADDEIADIPCSDASPILTEYHITVPTLHDGLMQGADQHERRLLDVLKATPSVQWLKDINVCGPLGKIQLPSIGVHRYLHVHFIRTVDWSSLLAICKNHLKHPLNIALLIWLLCVAAAGAMLGLLLLGLLNKAFPSRALRHHWIEIDNQILNALFTLMSIYQHPILVHHLVLLCRWRPEDAAQLRKVYCKNGARRPNERAHMSFVVALLHVTCISQYMECSLYWGYPSRSRSELAENFFFILGVAAPVVAGAHAVYSPLGRDDDAAAASCEETKQLHAAGAEESPEEMTVVGNPMWAGELLDCGEDPAACYLSFLCTFCVFGWNMERLGLGNMYMHTAMFLLLCVAPFWVFNVTALSIHDYALSDAFGAAGVVLCFLGLLYGGFWRMQMRKRLGLPRSRWCCGSSSLTDYAQWLLCWPCALAQEVRTANLYDPRGDGGFYGKLVDGGDPERGPDVPVSAEVQEVVGGVVNPTVDGEMIPPVQPVVESGRQRQAGHEEIVANGSSVQLKS

SEQ ID NO: 67275 - protein, 477 aa, Triticum aestivum
  peptide (1)..(477): Ceres Seq. ID no. 15169559
MQGADQHERRLLDVLKATPSVQWLKDINVCGPLGKIQLPSIGVHRYLHVHFIRTVDWSSLLAICKNHLKHPLNIALLIWLLCVAAAGAMLGLLLLGLLNKAFPSRALRHHWIEIDNQILNALFTLMSIYQHPILVHHLVLLCRWRPEDAAQLRKVYCKNGARRPNERAHMSFVVALLHVTCISQYMECSLYWGYPSRSRSELAENFFFILGVAAPVVAGAHAVYSPLGRDDDAAAASCEETKQLHAAGAEESPEEMTVVGNPMWAGELLDCGEDPAACYLSFLCTFCVFGWNMERLGLGNMYMHTAMFLLLCVAPFWVFNVTALSIHDYALSDAFGAAGVVLCFLGLLYGGFWRMQMRKRLGLPRSRWCCGSSSLTDYAQWLLCWPCALAQEVRTANLYDPRGDGGFYGKLVDGGDPERGPDVPVSAEVQEVVGGVVNPTVDGEMIPPVQPVVESGRQRQAGHEEIVANGSSVQLKS

SEQ ID NO: 67276 - protein, 437 aa, Triticum aestivum
  peptide (1)..(437): Ceres Seq. ID no. 15169560
MFRCFTNSDRISHHSPYPSRWTNARGRPARETASGCPQSNAFSAMAEGHQRLRSTGKNSAAIDRRPPLPPCPLHQNSRLELTARHLQEPPQASSQHRPTHLAAMRRRRRRHARTAPVGAAEQGIPFQGLEAPLDRDRQPDPQRPLHAHEHLPASHPRPPPRSPLPVAAGGRRPAKEGVLQEWRPPSQRASAHVLRGGPPPRHLHLAVHGVQPLLGLPKQVALRARGELLLHPRRRRAGRRRRSRGVQPSRQRRRRRRRLLRRDQAAPRSRSRRIAGRNDGGRQPDVGGGAAGLRRGPGGVLPVVPLHLLRVRLEHGAAGAGQHVHAHGHVPAAVRRALLGVQRHGAQHPRLRPQRCLRRRRGGALLPRAPVRGLLEDADEEAARAAPEQVVLRLVVADGLRAVAPLLAVRARAGGAHGEPVRPEGRRRFLREAGGRR

SEQ ID NO: 67277 - DNA, 1059 bp, Triticum aestivum
  misc_feature (1)..(1059): Ceres Seq. ID no. 14307883
acttgtagtggcccactgtgaaaggccagcgtctggctcctctgctcctcctcatcccctccgccgccgcgctgctgctcaaccagaacggagagcttgcaagatcagcgttgcggtccacacgctcggccccgcaaggtcgccgcctctgtgaaggccgccccaccgaataagaagaaggggaagaaaccaaacctcgtcatgaagagcttccctgtggccggcggccgcagcgtctccctcgccctcttctccgatgtctccaacagccgggagctcctagatctgatgcagtcagggaagctggagccggaggccgcttttctcaatgcatcactggtgccgggcgtgttcccggtcctcgcggcggcgcacaaagcgctgctctccaagtcgagggagtcgctgaccacgagaaccctgcactcggagcttgtctataattgctctggctcgaagcatataactgagtccctaaagcggtgcggtatcgctgatgacacgcagtatatccttgcggctcggtttgatgcttcagatgaagagatgaaagctctggaaaagctcatcagcggaaccgagattgatctgtcggaattggagacaagagcagaccaaccaaagattctgaagcaatacaaaataactccacaagaattatcaatatctacactgccagaggcaatcgtgtgcaggattgctgctcgagacgccctctgaggtcttaaaaacgatggccaggacgttctgcagctgtgtgtgtcaaattctttggacgatcaccgcatctgccgcacctcctgtcgatggtcaagctcgtggcggcaggatgtttcaactcatgaacttaggaattgcattacggtaacattcagtcctggatgctgtagcgacaactgaataatatgtatggtcacaggctcacggcttgagtgtttctaagatcacttcatcaagatttaatgcaagcaaccttcagttgatatcgcgatgttgactcggatctgttgtttcggtgacactgcagaacatgagtaaaatcagcgaaatatgtgtggc

SEQ ID NO: 67278 - protein, 172 aa, Triticum aestivum
  peptide (1)..(172): Ceres Seq. ID no. 14307884
MKSFPVAGGRSVSLALFSDVSNSRELLDLMQSGKLEPEAAFLNASLVPGVFPVLAAAHKALLSKSRESLTTRTLHSELVYNCSGSKHITESLKRCGIADDTQYILAARFDASDEEMKALEKLISGTEIDLSELETRADQPKILKQYKITPQELSISTLPEAIVCRIAARDAL

SEQ ID NO: 67279 - protein, 143 aa, Triticum aestivum
  peptide (1)..(143): Ceres Seq. ID no. 14307885
MQSGKLEPEAAFLNASLVPGVFPVLAAAHKALLSKSRESLTTRTLHSELVYNCSGSKHITESLKRCGIADDTQYILAARFDASDEEMKALEKLISGTEIDLSELETRADQPKILKQYKITPQELSISTLPEAIVCRIAARDAL

SEQ ID NO: 67280 - DNA, 2403 bp, Triticum aestivum
  misc_feature (1)..(2403): Ceres Seq. ID no. 15178728
aaaaagctaggagaggtccaagataccagctggaccttggttccctttttttttttcttggctcattgtaaggtcctgccagccatctgcgttcgtggcgaccggcgcaagagagcgtggggttttgggagcattagaatcaatcatctggttttatttccttggtgcgctggggcgaaattgtttcaggtgccgtgttcatggcccaagggtattgattggtggggatcccggcgcttgcgacggttttgtgcaaggcagcctgttgcttcctgtaaatcagaaaaaggcaagtcttggattttttgcgatcacaatctcaggtccctagaaatcaagagaagcaaccgtaatcgccggagttggtgaggcaaggggttgcctggattttcgcaagaacaggggcgttacagattgaggaatccctccggtcacttccagttgattattgggcttggacatggagaggcagaccagcttccgcctgggcgcgctggagaagctcaagagcttccgggggatggacaacttccggcggagcaaggacagccccggcaagcgcggtgacacgccgctccacctcgcggcgagggccggcaacgtctccaacgtccagaggatccttgccgaatccggccaggagatggccggcgagctggccgcccggccgaaccaggacggggagacggcgctgtacgtggccgccgacaaggggcacacggaggtggtgcgcgagatcttgaaggtgtctgatatgcagacggcggggatcaaggccagcaacagcttcgacgccttccacatcgcggcgaagcagggccatctggatgttctgaaggagctgctgcaggcctttcctgctcttgctatgactacaaactctgtaaacgccacagctttggaaactgctgccattcagggtcacattgatattgtcaacctcctactgaaaactgatgctagccttgccaaaattgcgagaaataatgggaaaacagttttgcattccgcggcgaggatgggccatgtggaagttgtaagatccttgttaaataaggatccagggattggtttaagaacagacaagaaggggcagacggcgctgcatatggcgtccaaaggaacgaatgctgaaattgtggttgagttgttgaagcctgatttctcagttagccatctagaagataacaaggggaacaggccactgcatgttgcgactcggaagggcaatatcgttatagtgcagactctactgtcagttgaggggattgatgtcaatgcagttaacaggtctggagagactgctcttgccattgctgagaagatgaacaaccaagaactcgtcaacattctgagagacgccggcggcgtcgtaactgcaaaagagccagtgcatcctgcaaacccggcaaagcagctgaagcaaaccgtgagtgatatcaggcacgacgtccagtcccagatcaagcagacacggcagaccaagatgcaggtccagaagatcaagagcaggctggagaagctccacatcggcggcctgaacaacgccatcaactccaacaccgtggtggcggtgctcatcgccaccgtcgccttcgctgccatattcaccgtgcccggcaacttcgtggaggacatgagccaggcgccccccggcatgtcgctggggcaggcgtacgtggccagcgaaccggccttcataatgttcctggtgttcgactcgctggcgctcttcatctcgctcgccgtcgtggtcgtccagacgtcgctgatcgtggtggagcagaaggccaagcggaggatggtcttcgtgatgaacaagctcatgtggctggcgtgcctcttcatctccgcggcgttcatagcgctgacctacgtcgtggtcggccgcggcgactggtggctggcctggtgcaccatggtgatcggcgcggtgatcatgctcaccaccctcggctccatgtgctactgcatcgtggcgcacaggatggaggagaagagcatgaggaagatcaggaaggcctccgcgagccagtcccggtcatggtccatgccggtcgactcggacccggagctgatcaacaccgagtacaagaagatgtacgcgttgtaggtcagggtgacgatcgcgtcgcggggatctgtacatagttattatcatcaaggcgctgtttcgctcgagtctcttcgatcgaatgatgaataacgttcagtggggttttgacattttgacatgaaccgaaggtacttttgctgctgaaacaatatcacctcagctgtgcttgtattgcagcctggatggagataaggcacctggatctgtctgttgcatgctgtatggactcgtggtagtccttgtaagtggcttcttgtggatgaaccaaacccaattctcaccggatc

SEQ ID NO: 67281 - protein, 550 aa, Triticum aestivum
  peptide (1)..(550): Ceres Seq. ID no. 15178729
MERQTSFRLGALEKLKSFRGMDNFRRSKDSPGKRGDTPLHLAARAGNVSNVQRILAESGQEMAGELAARPNQDGETALYVAADKGHTEVVREILKVSDMQTAGIKASNSFDAFHIAAKQGHLDVLKELLQAFPALAMTTNSVNATALETAAIQGHIDIVNLLLKTDASLAKIARNNGKTVLHSAARMGHVEVVRSLLNKDPGIGLRTDKKGQTALHMASKGTNAEIVVELLKPDFSVSHLEDNKGNRPLHVATRKGNIVIVQTLLSVEGIDVNAVNRSGETALAIAEKMNNQELVNILRDAGGVVTAKEPVHPANPAKQLKQTVSDIRHDVQSQIKQTRQTKMQVQKIKSRLEKLHIGGLNNAINSNTVVAVLIATVAFAAIFTVPGNFVEDMSQAPPGMSLGQAYVASEPAFIMFLVFDSLALFISLAVVVVQTSLIVVEQKAKRRMVFVMNKLMWLACLFISAAFIALTYVVVGRGDWWLAWCTMVIGAVIMLTTLGSMCYCIVAHRMEEKSMRKIRKASASQSRSWSMPVDSDPELINTEYKKMYAL

SEQ ID NO: 67282 - protein, 530 aa, Triticum aestivum
  peptide (1)..(530): Ceres Seq. ID no. 15178730
MDNFRRSKDSPGKRGDTPLHLAARAGNVSNVQRILAESGQEMAGELAARPNQDGETALYVAADKGHTEVVREILKVSDMQTAGIKASNSFDAFHIAAKQGHLDVLKELLQAFPALAMTTNSVNATALETAAIQGHIDIVNLLLKTDASLAKIARNNGKTVLHSAARMGHVEVVRSLLNKDPGIGLRTDKKGQTALHMASKGTNAEIVVELLKPDFSVSHLEDNKGNRPLHVATRKGNIVIVQTLLSVEGIDVNAVNRSGETALAIAEKMNNQELVNILRDAGGVVTAKEPVHPANPAKQLKQTVSDIRHDVQSQIKQTRQTKMQVQKIKSRLEKLHIGGLNNAINSNTVVAVLIATVAFAAIFTVPGNFVEDMSQAPPGMSLGQAYVASEPAFIMFLVFDSLALFISLAVVVVQTSLIVVEQKAKRRMVFVMNKLMWLACLFISAAFIALTYVVVGRGDWWLAWCTMVIGAVIMLTTLGSMCYCIVAHRMEEKSMRKIRKASASQSRSWSMPVDSDPELINTEYKKMYAL

SEQ ID NO: 67283 - protein, 489 aa, Triticum aestivum
  peptide (1)..(489): Ceres Seq. ID no. 15178731
MAGELAARPNQDGETALYVAADKGHTEVVREILKVSDMQTAGIKASNSFDAFHIAAKQGHLDVLKELLQAFPALAMTTNSVNATALETAAIQGHIDIVNLLLKTDASLAKIARNNGKTVLHSAARMGHVEVVRSLLNKDPGIGLRTDKKGQTALHMASKGTNAEIVVELLKPDFSVSHLEDNKGNRPLHVATRKGNIVIVQTLLSVEGIDVNAVNRSGETALAIAEKMNNQELVNILRDAGGVVTAKEPVHPANPAKQLKQTVSDIRHDVQSQIKQTRQTKMQVQKIKSRLEKLHIGGLNNAINSNTVVAVLIATVAFAAIFTVPGNFVEDMSQAPPGMSLGQAYVASEPAFIMFLVFDSLALFISLAVVVVQTSLIVVEQKAKRRMVFVMNKLMWLACLFISAAFIALTYVVVGRGDWWLAWCTMVIGAVIMLTTLGSMCYCIVAHRMEEKSMRKIRKASASQSRSWSMPVDSDPELINTEYKKMYAL

SEQ ID NO: 67284 - DNA, 2162 bp, Triticum aestivum
  misc_feature (1)..(2162): Ceres Seq. ID no. 15170171
cccagatctccccgcccgcctctccctcgctccccaccccgcgccgcaatggccgacgagcccctcgacgcgtcgccggcgcccgcggcccccgctgcggcgtcggaccccgccccctcccccgtgcccgccccagcccccgcacccgcgcccgcggcgaccgcatccctggtcctccggccgcggcgggagtcgttcgagcacggcctcctgccgatccccaagctggtcttcccggagggcacgctcacgcaaaccctagcgcagctcagggcgaagctcgcggcgccgggggccgggcgcgtgggcgccgcggcgctcgcggaggcgctgcagatccccgccgaccaggccgcgctcgcgctcgggacgctcgccgcggtcctccccggcgaaggcgacggccccgccgcggacggcgcgtgggcggccgacctccgcgacgtgctcctcttcctctacatccagtcctacaagcgcctcgtgccgcgcgcccacaaggactcgccgtccgtcgccgacgtctggccctccacctccgccttcgacggctatctctccgcgctgtccccgatccagcttgtacgcagtaatagccgtcggtttatgccttcgcaagcagatgaagaagctcatcagttatcttatttacaaaagcatatggccaatgttttaactcttttggcagattctgttgatggagagggtgatgaatctatggtactgacaatggagacttttgagcaccttggattcttgttgcagttctccgaaggaactcctttaagccaagctgctccattttttgcgaattctgatccagacatgcctgctgctcctgttccggctactcaagttcatgactggattctgcagaatatagcttcttccttggaatatactgcagaaaaagctataaccaaggaaaacaatcaacggagtgtatctgatcctgatgtggcaatggctgatgctgtcacaaatacaagaatccagagcagctcatcaactggtgcttctgtgcaaaacaatcctggatactaccgaaatacatcttttgtggagggtatctccaaaacttctgttgtcaaacacgggtctgatattaaagggcattcaataaaggttttgaactgccatgattctgttatctacatcctagcccctctcaaatatgctacggtgtatggatgttctgacacaactgttgttcttggtgctattggcaaggtggtaaaagttgagcattgtgaacgtgtgcaaatagttgtggcttctaaaagaatttgtattgccaattgtcgagaatgtatcttctacttgggagtaaatcaccaaccacttatcgtgggggacaaccataaattacaagttgctccatttaatacttgttatccacaacttggggagcatttggcacaagttggtgtggaccctaacgtcaacaagtgggatcaaccttttgtgctgggagttgttgatccacacgattcattatctcatcctgcaggggtttctgatgtccaagccgagtctgccacttgtctagatcctgatctattcacagacttcatgattcctagttggtttgaggcagaaggtcctaccaaatacaatccatttacgttacctgaagtttactgggcatcacagaggaaaaagaatgcttccctggaagacattcaaaagaatatacgagagctggagcttgatgataaccggaaaaaagaattggcatgtgcccttcatgctcaattcaaggactggctatatgcttcaggaaatatccgccagctttactgtttgcaaggcgaataagcatatatgatcttcatccgtaagtgcttaggcacacctgtgaagattgtgcatcctttgcccggtccccttccatagtccagtcctgtccatccgaccgcatcatccacgctgacttctcgtcgactgagctgattcaaccatgtagtgtttgtcaatgtaaaagaaataatgtactgcccattttgtctattaattttgatcggcttccccttgtgttggttgtggttggtgcaaggatctaaatgggggtttggtagtttcatatttatatcctttgtaacatatacgaccatgaaagcggttactcgattctttagtggaaataaacatttttttgctcg

SEQ ID NO: 67285 - protein, 605 aa, Triticum aestivum
  peptide (1)..(605): Ceres Seq. ID no. 15170172
PRSPRPPLPRSPPRAAMADEPLDASPAPAAPAAASDPAPSPVPAPAPAPAPAATASLVLRPRRESFEHGLLPIPKLVFPEGTLTQTLAQLRAKLAAPGAGRVGAAALAEALQIPADQAALALGTLAAVLPGEGDGPAADGAWAADLRDVLLFLYIQSYKRLVPRAHKDSPSVADVWPSTSAFDGYLSALSPIQLVRSNSRRFMPSQADEEAHQLSYLQKHMANVLTLLADSVDGEGDESMVLTMETFEHLGFLLQFSEGTPLSQAAPFFANSDPDMPAAPVPATQVHDWILQNIASSLEYTAEKAITKENNQRSVSDPDVAMADAVTNTRIQSSSSTGASVQNNPGYYRNTSFVEGISKTSVVKHGSDIKGHSIKVLNCHDSVIYILAPLKYATVYGCSDTTVVLGAIGKVVKVEHCERVQIVVASKRICIANCRECIFYLGVNHQPLIVGDNHKLQVAPFNTCYPQLGEHLAQVGVDPNVNKWDQPFVLGVVDPHDSLSHPAGVSDVQAESATCLDPDLFTDFMIPSWFEAEGPTKYNPFTLPEVYWASQRKKNASLEDIQKNIRELELDDNRKKELACALHAQFKDWLYASGNIRQLYCLQGE

SEQ ID NO: 67286 - protein, 589 aa, Triticum aestivum
  peptide (1)..(589): Ceres Seq. ID no. 15170173
MADEPLDASPAPAAPAAASDPAPSPVPAPAPAPAPAATASLVLRPRRESFEHGLLPIPKLVFPEGTLTQTLAQLRAKLAAPGAGRVGAAALAEALQIPADQAALALGTLAAVLPGEGDGPAADGAWAADLRDVLLFLYIQSYKRLVPRAHKDSPSVADVWPSTSAFDGYLSALSPIQLVRSNSRRFMPSQADEEAHQLSYLQKHMANVLTLLADSVDGEGDESMVLTMETFEHLGFLLQFSEGTPLSQAAPFFANSDPDMPAAPVPATQVHDWILQNIASSLEYTAEKAITKENNQRSVSDPDVAMADAVTNTRIQSSSSTGASVQNNPGYYRNTSFVEGISKTSVVKHGSDIKGHSIKVLNCHDSVIYILAPLKYATVYGCSDTTVVLGAIGKVVKVEHCERVQIVVASKRICIANCRECIFYLGVNHQPLIVGDNHKLQVAPFNTCYPQLGEHLAQVGVDPNVNKWDQPFVLGVVDPHDSLSHPAGVSDVQAESATCLDPDLFTDFMIPSWFEAEGPTKYNPFTLPEVYWASQRKKNASLEDIQKNIRELELDDNRKKELACALHAQFKDWLYASGNIRQLYCLQGE

SEQ ID NO: 67287 - protein, 403 aa, Triticum aestivum
  peptide (1)..(403): Ceres Seq. ID no. 15170174
MPSQADEEAHQLSYLQKHMANVLTLLADSVDGEGDESMVLTMETFEHLGFLLQFSEGTPLSQAAPFFANSDPDMPAAPVPATQVHDWILQNIASSLEYTAEKAITKENNQRSVSDPDVAMADAVTNTRIQSSSSTGASVQNNPGYYRNTSFVEGISKTSVVKHGSDIKGHSIKVLNCHDSVIYILAPLKYATVYGCSDTTVVLGAIGKVVKVEHCERVQIVVASKRICIANCRECIFYLGVNHQPLIVGDNHKLQVAPFNTCYPQLGEHLAQVGVDPNVNKWDQPFVLGVVDPHDSLSHPAGVSDVQAESATCLDPDLFTDFMIPSWFEAEGPTKYNPFTLPEVYWASQRKKNASLEDIQKNIRELELDDNRKKELACALHAQFKDWLYASGNIRQLYCLQGE

SEQ ID NO: 67288 - DNA, 1640 bp, Triticum aestivum
  misc_feature (1)..(1640): Ceres Seq. ID no. 12784444
aagtttgacagtcgccacttctcaaagcgaagaaagaaacatcgagaaaagaaagcgagagaagcgctccaagtcgtgactcgtcggccatggcgcagccgtcggcggcggcgaggaagccctcggcagcgccaaccgtcgtcctgacacttgtcctggccctcgcctccgcgagcctcctcttcctcctagtccacctgtccccttcgtcgccatccgcgcacccgcacccccaccgccgcctccgcctgcgtggtgcccacctcaggcacggaggcgccaccccgcaccagatcccgttcgaccccgtcatcgccgacctcgagcaccgcctggacgaccgcgagtgggagcgcctggctgccgcggggctgcacgcgccgggcatggagtctgcccccgtcccagaggacctcgcagactatgaggacgagtacatcaatgacgccgcgcggttcaacatgacgctgcgcgtggcggcgctcttccccaagatcgacgtggaccccgccgacgacgccgtgacgggcgccgagctggccgcgtggaatctcgcgtccgcgcggcgggaggtgctgcaccgcaccgcccgggagctcgacctgcacgaccgcgaccacgacggccgcgtcgccttctccgagtacgagaggcccagctgggcttggcggttcgacgataataactcaaccagtgatgggatgggatggtggaaggaggggcacttcaatgctgcggatatggacggtgacggctttctaaatctgacggagtttaacaacttcttacatccagctgatactaccaacccaaagctaatacattggttgtgcaaagaagaagtcagggaaagagacaaagataatgacgggaagctcaatttccaagagttttataatggattgttttattcagttcgacattacgatgatgaaacttcaacagatgactccaatggctctgatgcaccggctagaaaatcgttttcacagcttgatctggataatgatgggcttttgtcagcagacgagctaaaacctatcatcggaaaactccatccagcagaaaacttctatgccaagcaacaagctgactatgtgatatcacaggctgacacaaacaaagatggacagctgagtttgaatgagatgattgagaacccctatgtattttacagtgctttattcacagaagatgattatgggtctcatgacgagctccggtagttccttcaagtaggtggtattcaggacctttcaacgcttggttagacatttgctgcagatatatatcttcaatgatctgttggccccatctactgccttgccaagcacatttcaggcgatttccatgtataacacaagcgtgcatttccacacgcctgttttagcaacagagcattcatttgttacattaagagttcttgaattagtttcatgttttgcatggcaagttagcattggttcttccatatatagtttttggtgtgcaaaagtaggttgttgttccaggatcacacacttgtaaactatgaaaaccaggaaggtgcagctgtagggcttgtatgtatgtaactggcattcctgaaccctatctgtaaacattgtgaagttatgttctatgaaagtgattctattctg

SEQ ID NO: 67289 - protein, 378 aa, Triticum aestivum
  peptide (1)..(378): Ceres Seq. ID no. 12784445
MAQPSAAARKPSAAPTVVLTLVLALASASLLFLLVHLSPSSPSAHPHPHRRLRLRGAHLRHGGATPHQIPFDPVIADLEHRLDDREWERLAAAGLHAPGMESAPVPEDLADYEDEYINDAARFNMTLRVAALFPKIDVDPADDAVTGAELAAWNLASARREVLHRTARELDLHDRDHDGRVAFSEYERPSWAWRFDDNNSTSDGMGWWKEGHFNAADMDGDGFLNLTEFNNFLHPADTTNPKLIHWLCKEEVRERDKDNDGKLNFQEFYNGLFYSVRHYDDETSTDDSNGSDAPARKSFSQLDLDNDGLLSADELKPIIGKLHPAENFYAKQQADYVISQADTNKDGQLSLNEMIENPYVFYSALFTEDDYGSHDELR

SEQ ID NO: 67290 - protein, 279 aa, Triticum aestivum
  peptide (1)..(279): Ceres Seq. ID no. 12784446
MESAPVPEDLADYEDEYINDAARFNMTLRVAALFPKIDVDPADDAVTGAELAAWNLASARREVLHRTARELDLHDRDHDGRVAFSEYERPSWAWRFDDNNSTSDGMGWWKEGHFNAADMDGDGFLNLTEFNNFLHPADTTNPKLIHWLCKEEVRERDKDNDGKLNFQEFYNGLFYSVRHYDDETSTDDSNGSDAPARKSFSQLDLDNDGLLSADELKPIIGKLHPAENFYAKQQADYVISQADTNKDGQLSLNEMIENPYVFYSALFTEDDYGSHDELR

SEQ ID NO: 67291 - protein, 254 aa, Triticum aestivum
  peptide (1)..(254): Ceres Seq. ID no. 12784447
MTLRVAALFPKIDVDPADDAVTGAELAAWNLASARREVLHRTARELDLHDRDHDGRVAFSEYERPSWAWRFDDNNSTSDGMGWWKEGHFNAADMDGDGFLNLTEFNNFLHPADTTNPKLIHWLCKEEVRERDKDNDGKLNFQEFYNGLFYSVRHYDDETSTDDSNGSDAPARKSFSQLDLDNDGLLSADELKPIIGKLHPAENFYAKQQADYVISQADTNKDGQLSLNEMIENPYVFYSALFTEDDYGSHDELR

SEQ ID NO: 67292 - DNA, 1334 bp, Triticum aestivum
  misc_feature (1)..(1334): Ceres Seq. ID no. 13659957
acggttcgcccaaacagggtatccccttatcctccttcgtcccagcccccaatccctagcccctcctttccaccgtccgtaccgccgccagcgaccagaagcgctcaaggacctcggcaatctcctgatccggtgggaaatcgtcaacgagccagaccagatccaccggagcaatcaagaatgtgagcaaaaagaatgtgccaagcgtgaggttgctcgctctcgtgataattacatgtcatggagtgatgattgtaccaagtatatgcttgagtggtatatcgagaagcaaagggacaagccaccaaccttcaagtggaaggcacaacaccatctacaatgtgctaatgatttgaatgacaagtttggaattacagctacagcgaaacaagttgatcgacactttaggtcattcaaggagaaatggaagtggataaagctagcaaaggggaggagtggatatggcttcgataaagtacttaacaaatttaacattgacaagtcagagaaatcaccaagcaagcttggcaaaataaaatttaactaccttactcattccatcaagttttatcatctcttggaagaactgtttagtgactcatctcatgcggatggctcacttgctattgatgtgaataatgcaagtgagaatgtggaatctgatggtagtagtgaaacaagcagccacacatccactgctgaacaaggtcttagtgattctgacatgattgcacccaacagtccagcagaaggcactagctcaaatctgaagcgcaagcatgttaaagcaccacataagaagaaaccaaaggtcaaggcgcgtcgagccagagtgttagatgatgatgtggcagcgagcattgtgagtcttgctgaaactgtgaaatctgccgcccctattcagccaatagcagctacagaccctaatgccaatctttggaagcacattgagtcgctaactctcccagcaaatgagaaaattgagttagcaacctatcttgctaagccagaacaagaagttttccgtggtttcctgaattgtgctagcgaccagacttttaatgcttgggtccttgattatttcgcgcacaagtacgacggcaaagatcccgcaactgctgatccatcaatctgaatgacatgtttggtggctttcttttggcaagtgcttttgtagtctacttagctgctttccatgcacttatgctaagtggattcctgtgctctaagggtgtttagagggtcttaccttttgtaatgcattgctgtagcacaaatctgaattaagctagtttgtaagaaattacttgatggtggatggccttgtgcatgct

SEQ ID NO: 67293 - protein, 377 aa, Triticum aestivum
  peptide (1)..(377): Ceres Seq. ID no. 13659958
RFAQTGYPLILLRPSPQSLAPPFHRPYRRQRPEALKDLGNLLIRWEIVNEPDQIHRSNQECEQKECAKREVARSRDNYMSWSDDCTKYMLEWYIEKQRDKPPTFKWKAQHHLQCANDLNDKFGITATAKQVDRHFRSFKEKWKWIKLAKGRSGYGFDKVLNKFNIDKSEKSPSKLGKIKFNYLTHSIKFYHLLEELFSDSSHADGSLAIDVNNASENVESDGSSETSSHTSTAEQGLSDSDMIAPNSPAEGTSSNLKRKHVKAPHKKKPKVKARRARVLDDDVAASIVSLAETVKSAAPIQPIAATDPNANLWKHIESLTLPANEKIELATYLAKPEQEVFRGFLNCASDQTFNAWVLDYFAHKYDGKDPATADPSI

SEQ ID NO: 67294 - protein, 299 aa, Triticum aestivum
  peptide (1)..(299): Ceres Seq. ID no. 13659959
MSWSDDCTKYMLEWYIEKQRDKPPTFKWKAQHHLQCANDLNDKFGITATAKQVDRHFRSFKEKWKWIKLAKGRSGYGFDKVLNKFNIDKSEKSPSKLGKIKFNYLTHSIKFYHLLEELFSDSSHADGSLAIDVNNASENVESDGSSETSSHTSTAEQGLSDSDMIAPNSPAEGTSSNLKRKHVKAPHKKKPKVKARRARVLDDDVAASIVSLAETVKSAAPIQPIAATDPNANLWKHIESLTLPANEKIELATYLAKPEQEVFRGFLNCASDQTFNAWVLDYFAHKYDGKDPATADPSI

SEQ ID NO: 67295 - protein, 289 aa, Triticum aestivum
  peptide (1)..(289): Ceres Seq. ID no. 13659960
MLEWYIEKQRDKPPTFKWKAQHHLQCANDLNDKFGITATAKQVDRHFRSFKEKWKWIKLAKGRSGYGFDKVLNKFNIDKSEKSPSKLGKIKFNYLTHSIKFYHLLEELFSDSSHADGSLAIDVNNASENVESDGSSETSSHTSTAEQGLSDSDMIAPNSPAEGTSSNLKRKHVKAPHKKKPKVKARRARVLDDDVAASIVSLAETVKSAAPIQPIAATDPNANLWKHIESLTLPANEKIELATYLAKPEQEVFRGFLNCASDQTFNAWVLDYFAHKYDGKDPATADPSI

SEQ ID NO: 67296 - DNA, 2027 bp, Triticum aestivum
  misc_feature (1)..(2027): Ceres Seq. ID no. 14313366
tccgcccgatccccttccgccccctcccgacgatcgcccccgctcgtcccaccgcggtgggcgatcgctcctctcctccgtgcgcgcgattcctgaggcgaggcgaccgacaccagattccgccggccggcccacctcccccgcttcgccgatcggatcgcgtgctccatgaggtagaggtgacgataaagcatagttgttgacttagcttgcagtggttctttatcgaagctaaggcagataataattggcgttatggcatatcgaatggtatgcgctccccaagtcattgatctcgagtctgagcgagggcatcctcatgttcattctgaaagtttaattcacaatgggaatgatttgtccgaccaaggcagtcaatatactgtcagagttgtaggcaatgctatgaatgctggtctttctgatacacagggttactacaatatgagcatgaatcatccacatcagcctgttcatagttctccgccaaatttaggcgttgattcaggttttgtcttcccatcaaatatgtacaacccttgcatgtcaacatctatgaacagatatgtctctcatgctcagagctttggattgcctttaaaccaagttgtctcaggaagtatgtatggaagtactagaaatgaaaatgtcagcgaaactgctagaggattcattaaaaggaaaaatgccgcagtggcaggaacttgtcattttgttaatggatctgcaagctcaagctcatcctctcatacatctcaaaatcctacacataggccatgggatccttcttttgagtcaaatgtttttcctaatgtcacaccattcaacccatcagaatatcatagccacagcacttggccatctgtggaaggatcttccattactggatcaaatgggtttaatttgatggctgctcacccagaatcagcacagcatggtaactatacatttcaatcaagtcatgctagtcagtgctttcaacctgccagcactacttgggtttcccaggctgcaactggaattgtggaaggagtaccacagtggtcatacatcaatgcaatgtctagtgttccaggcagatttgcacattcaggggccacagaaatagtgaatggaggctttcatgaatatcagaatggcccttcaaccatttctcaagggcatttaccttattttcatcaacatgctgtgcatagcatgcaacctcataatccactggatcatacacgagtgcaagtcccttaccaacaaggccacaataatggcatcttgcatagtggggtaaatcattctggtaaccggttccacttgagtccaagaactccaggtctcttctctaattctgagcggtcttttgggcctccacagcatccgttcctggtgaacccagttaatcataggaacttaagaattttgccacctctgcagcatggtgcaatcatggatttttcgaggttgtatgaggggtcaaatgtagtagatgagcatagagatatgcgtctagatatagacagcatgacctatgaggagcttttagcattagaagagcacattggagacgtcaatacaggtctggcaaaaagccacattgtagataaattgaagactagcttatatgtgccaggagcaacctgcgtgtctaatcagtcatctgaaccttccacagagaatgaggcttgcataatatgccaggaggagtacgaggctgaggactgcgttggaatcctggattgtggccacagataccatgcggtgtgcttaaaacagtggctgacggtaaagaacctatgccccatctgcaagacaacagctttgtctgcgggtagaagaagttgataacaaacaggattaatctttatcagttatttgcttgacaaacattcagatcaattttgtacataagaagcggtagactattctgctacctgtatttgttgttcaccttgtgattgggagtaactcggcttccaaaaactgtacagacataacattgatcgttctattcaaatgtagaatgtttataaatt

SEQ ID NO: 67297 - protein, 526 aa, Triticum aestivum
  peptide (1)..(526): Ceres Seq. ID no. 14313367
MAYRMVCAPQVIDLESERGHPHVHSESLIHNGNDLSDQGSQYTVRVVGNAMNAGLSDTQGYYNMSMNHPHQPVHSSPPNLGVDSGFVFPSNMYNPCMSTSMNRYVSHAQSFGLPLNQVVSGSMYGSTRNENVSETARGFIKRKNAAVAGTCHFVNGSASSSSSSHTSQNPTHRPWDPSFESNVFPNVTPFNPSEYHSHSTWPSVEGSSITGSNGFNLMAAHPESAQHGNYTFQSSHASQCFQPASTTWVSQAATGIVEGVPQWSYINAMSSVPGRFAHSGATEIVNGGFHEYQNGPSTISQGHLPYFHQHAVHSMQPHNPLDHTRVQVPYQQGHNNGILHSGVNHSGNRFHLSPRTPGLFSNSERSFGPPQHPFLVNPVNHRNLRILPPLQHGAIMDFSRLYEGSNVVDEHRDMRLDIDSMTYEELLALEEHIGDVNTGLAKSHIVDKLKTSLYVPGATCVSNQSSEPSTENEACIICQEEYEAEDCVGILDCGHRYHAVCLKQWLTVKNLCPICKTTALSAGRRS

SEQ ID NO: 67298 - protein, 522 aa, Triticum aestivum
  peptide (1)..(522): Ceres Seq. ID no. 14313368
MVCAPQVIDLESERGHPHVHSESLIHNGNDLSDQGSQYTVRVVGNAMNAGLSDTQGYYNMSMNHPHQPVHSSPPNLGVDSGFVFPSNMYNPCMSTSMNRYVSHAQSFGLPLNQVVSGSMYGSTRNENVSETARGFIKRKNAAVAGTCHFVNGSASSSSSSHTSQNPTHRPWDPSFESNVFPNVTPFNPSEYHSHSTWPSVEGSSITGSNGFNLMAAHPESAQHGNYTFQSSHASQCFQPASTTWVSQAATGIVEGVPQWSYINAMSSVPGRFAHSGATEIVNGGFHEYQNGPSTISQGHLPYFHQHAVHSMQPHNPLDHTRVQVPYQQGHNNGILHSGVNHSGNRFHLSPRTPGLFSNSERSFGPPQHPFLVNPVNHRNLRILPPLQHGAIMDFSRLYEGSNVVDEHRDMRLDIDSMTYEELLALEEHIGDVNTGLAKSHIVDKLKTSLYVPGATCVSNQSSEPSTENEACIICQEEYEAEDCVGILDCGHRYHAVCLKQWLTVKNLCPICKTTALSAGRRS

SEQ ID NO: 67299 - protein, 476 aa, Triticum aestivum
  peptide (1)..(476): Ceres Seq. ID no. 14313369
MNAGLSDTQGYYNMSMNHPHQPVHSSPPNLGVDSGFVFPSNMYNPCMSTSMNRYVSHAQSFGLPLNQVVSGSMYGSTRNENVSETARGFIKRKNAAVAGTCHFVNGSASSSSSSHTSQNPTHRPWDPSFESNVFPNVTPFNPSEYHSHSTWPSVEGSSITGSNGFNLMAAHPESAQHGNYTFQSSHASQCFQPASTTWVSQAATGIVEGVPQWSYINAMSSVPGRFAHSGATEIVNGGFHEYQNGPSTISQGHLPYFHQHAVHSMQPHNPLDHTRVQVPYQQGHNNGILHSGVNHSGNRFHLSPRTPGLFSNSERSFGPPQHPFLVNPVNHRNLRILPPLQHGAIMDFSRLYEGSNVVDEHRDMRLDIDSMTYEELLALEEHIGDVNTGLAKSHIVDKLKTSLYVPGATCVSNQSSEPSTENEACIICQEEYEAEDCVGILDCGHRYHAVCLKQWLTVKNLCPICKTTALSAGRRS

SEQ ID NO: 67300 - DNA, 1509 bp, Triticum aestivum
  misc_feature (1)..(1509): Ceres Seq. ID no. 14313264
aagagtctctgtgcacgttgccacccttttttctccctttcccatccccatctttcgtccagccctccccgccccctcccccctctcgccgcggaccccatccgccccccgccgccgccgccgccgccgttgacactacccgcgaatctccttcttccgagtggcggagaggaggcatggcactccggaggctgcttcaggggattgtcctaccgcggacgacgggccggcatgttggggcatcgttttccacggaggctggggagactatccgcgcaaccctgtttcccggtgatggcatcgggcctgagatcgccgagtcggtcaagcaggtattcaatgttgcaggtgtaccgatagaatgggaagaacattatgttggtacggaagttgatcccagaacagagagctttttgacatgggagagcctggagtctgtgcgtagaaacaaagttggcttgaaaggtcctatggctacacctattggaaaaggccaccgttctttgaatcttacattaaggaaagaacttggactctacgccaatgtcagaccttgcaacagcctcccaggctacaagactagatatgatgatgtgaaccttgtgacaatccgtgaaaatactgaaggagagtatagtggccttgagcatcaggttgtgaggggtgttgtggaaagtttgaaaattattacccgccaagcaagtttgagagtggcagagtatgctttccattatgccaaagccaatggcagggagagggtctctgcgatacataaagctaatatcatgaggaaaacagacggacttttcctcaagtgttgccgtgaagtagctgagaagtaccctgaaatcacatatgaggaagtcattattgacaattgctgcatgacactcgtgaagaatcctggtacatttgatgtattagtgatgccaaatctgtatggtgacattattagtgatctatgtgctggtttgatcggaggattgggcttaactcccagctgcaacattggtgaaggtggcatttgtctggcagaggctgttcatggttctgcacctgatatctctggcaagaaccttgcaaacccaactgctcttatgttgagtgctgttatgatgttgcgccacttgcaattcaatgaccaagcagaccggatccacaatgccatcctccagacaattgccgaggggaagtacagaaccgctgatcttggtgggaagtcatcaacatcagactacacaaaagcagtttgcgatcatatctgagcaccagctgctctttctctcgattatttgcctcccacctaattttgttgcataccaggagctttagcctgagtaggttaagtggcaggcacctcgatttccttgggtgttaagacaccatttaaggctcctgaataattctcgcattcttgtccttggaaaagttttaccagcattgcagtcaagctgaagaatcgtatgtaataatcattggcagcatcagcgcatataatttgttcgttct

SEQ ID NO: 67301 - protein, 420 aa, Triticum aestivum
  peptide (1)..(420): Ceres Seq. ID no. 14313265
ESLCTLPPFFLPFPSPSFVQPSPPPPPSRRGPHPPPAAAAAAVDTTRESPSSEWRRGGMALRRLLQGIVLPRTTGRHVGASFSTEAGETIRATLFPGDGIGPEIAESVKQVFNVAGVPIEWEEHYVGTEVDPRTESFLTWESLESVRRNKVGLKGPMATPIGKGHRSLNLTLRKELGLYANVRPCNSLPGYKTRYDDVNLVTIRENTEGEYSGLEHQVVRGVVESLKIITRQASLRVAEYAFHYAKANGRERVSAIHKANIMRKTDGLFLKCCREVAEKYPEITYEEVIIDNCCMTLVKNPGTFDVLVMPNLYGDIISDLCAGLIGGLGLTPSCNIGEGGICLAEAVHGSAPDISGKNLANPTALMLSAVMMLRHLQFNDQADRIHNAILQTIAEGKYRTADLGGKSSTSDYTKAVCDHI

SEQ ID NO: 67302 - protein, 362 aa, Triticum aestivum
  peptide (1)..(362): Ceres Seq. ID no. 14313266
MALRRLLQGIVLPRTTGRHVGASFSTEAGETIRATLFPGDGIGPEIAESVKQVFNVAGVPIEWEEHYVGTEVDPRTESFLTWESLESVRRNKVGLKGPMATPIGKGHRSLNLTLRKELGLYANVRPCNSLPGYKTRYDDVNLVTIRENTEGEYSGLEHQVVRGVVESLKIITRQASLRVAEYAFHYAKANGRERVSAIHKANIMRKTDGLFLKCCREVAEKYPEITYEEVIIDNCCMTLVKNPGTFDVLVMPNLYGDIISDLCAGLIGGLGLTPSCNIGEGGICLAEAVHGSAPDISGKNLANPTALMLSAVMMLRHLQFNDQADRIHNAILQTIAEGKYRTADLGGKSSTSDYTKAVCDHI

SEQ ID NO: 67303 - protein, 264 aa, Triticum aestivum
  peptide (1)..(264): Ceres Seq. ID no. 14313267
MATPIGKGHRSLNLTLRKELGLYANVRPCNSLPGYKTRYDDVNLVTIRENTEGEYSGLEHQVVRGVVESLKIITRQASLRVAEYAFHYAKANGRERVSAIHKANIMRKTDGLFLKCCREVAEKYPEITYEEVIIDNCCMTLVKNPGTFDVLVMPNLYGDIISDLCAGLIGGLGLTPSCNIGEGGICLAEAVHGSAPDISGKNLANPTALMLSAVMMLRHLQFNDQADRIHNAILQTIAEGKYRTADLGGKSSTSDYTKAVCDHI

SEQ ID NO: 67304 - DNA, 2019 bp, Triticum aestivum
  misc_feature (1)..(2019): Ceres Seq. ID no. 14303201
tttttttccttcttccctttctctgggtttcaagctctggttcgttctcgtcaggctcaggggtcagggcaagaggaagcaactggttggctggctgctgctgatccatgaacgtcccggtgggcttcatcgccaagctctggagcctcgtgtcattcttgcccttcttcgtcctcctcctgctgctcggctccgccaaagctcttttgatcggcccggtcgtcgcggccatcgttttcctcggcgattcagccgtcatcatcggcctgtggcctgcgcatttcgtctggacgtactgctgcgtgctagccacgaagcgaattgggccggttctgaagatccttgccgtggtattcctgccactgccgttgctcctgttgccggtgcttggcattgtagggagccttctggttggtatcggttatggagtgttcactcccctcatggcgacttttgaggctgttggcgagggtgtcgcggacaagctctctcattgctttttggatggtactgctagcacaataaggggagcttgtatggtggtgcgtgatgttaccgacttctgcttccactcatacttctccttcatggacgagctttccgagaaaatgggggatgacgaagaacctactgacatcaagttgtcttatctaccgcggagcttccttgttgcgctggttgccgttcctctggatgtattgatgattactggggtggcattgtggaaaagcccctgcatgttgttgaaaggatggcaaagactctgcgaggatctagtagggagggaagggccttttctagagactgtttgtgtccctttcgctggtttggccattatattgtggccgcttgccgtcattgcaggagtgattgcatcatttcttagcagcttcttctttggcctccatgctggattaattgcttatcaggaggcttcatttcaaatggggctatcatacatgatctctgcagtagcattgtatgatgaatacacaaatgatcttctttatttgagagaaggttcttgtttgccaaggcccaagtaccggaaagcgggttctgcgaagtatgagaccggccgcaacaaagatgagcacaacgttacagctgcatctgcagagaagcaacatcaaggccagcgtaagcataggagggttctacaccggtcaaagacattcatggaaactatccaaagactaagacccattcaaatatgggattggctcttccgatcttgcgagataaatgggaggatattactgagcgagggactgataagctctgaagatatagaggaatttataaccaaaggaaagggaaagaagctgagcataaaactacctgcctggtgcatccttcactgtctgatacgatccgcgaaacacgacacgcacggtttgctcatatctgatgacgttgaggtgaccaacttcaattggccaaaggacaaggtgttcgactggatgctcggaccactgctggttctgaaggagcagatgaagaaactggagctcaccgaagacgaggagctgtgcttgcagaagctcatcatgacgaacgcgaacgaaaaaccgtcggattgggacgactgcggtttcccgtcaagcgacggcgtgaagagagctcagctacaggcgatcatcagaaggttgcaagggatcgtggccaatatgtcccggataccgagcttcaggagacggttcatgagcctggccagggcactgtacctggaggcgatcgacgcgggcaccatcgacgggtcgcggaaggtggagcgcaaggtcaaggctgacatcgcctccgaggaacttcagagcagagatgtcggagatacgaagggttcatcgaatgggacgtctgtggacgttgacatggtctgatgttgttgtgctgtgcaaacatattcttttgcagaactctctacctgctgcgatgtgcattagttgttttattagacgttggtaacacacatcacgcaacgcgtggacacgatggatgactgtgcctgctgggatcaag

SEQ ID NO: 67305 - protein, 590 aa, Triticum aestivum
  peptide (1)..(590): Ceres Seq. ID no. 14303202
MNVPVGFIAKLWSLVSFLPFFVLLLLLGSAKALLIGPVVAAIVFLGDSAVIIGLWPAHFVWTYCCVLATKRIGPVLKILAVVFLPLPLLLLPVLGIVGSLLVGIGYGVFTPLMATFEAVGEGVADKLSHCFLDGTASTIRGACMVVRDVTDFCFHSYFSFMDELSEKMGDDEEPTDIKLSYLPRSFLVALVAVPLDVLMITGVALWKSPCMLLKGWQRLCEDLVGREGPFLETVCVPFAGLAIILWPLAVIAGVIASFLSSFFFGLHAGLIAYQEASFQMGLSYMISAVALYDEYTNDLLYLREGSCLPRPKYRKAGSAKYETGRNKDEHNVTAASAEKQHQGQRKHRRVLHRSKTFMETIQRLRPIQIWDWLFRSCEINGRILLSEGLISSEDIEEFITKGKGKKLSIKLPAWCILHCLIRSAKHDTHGLLISDDVEVTNFNWPKDKVFDWMLGPLLVLKEQMKKLELTEDEELCLQKLIMTNANEKPSDWDDCGFPSSDGVKRAQLQAIIRRLQGIVANMSRIPSFRRRFMSLARALYLEAIDAGTIDGSRKVERKVKADIASEELQSRDVGDTKGSSNGTSVDVDMV

SEQ ID NO: 67306 - protein, 478 aa, Triticum aestivum
  peptide (1)..(478): Ceres Seq. ID no. 14303203
MATFEAVGEGVADKLSHCFLDGTASTIRGACMVVRDVTDFCFHSYFSFMDELSEKMGDDEEPTDIKLSYLPRSFLVALVAVPLDVLMITGVALWKSPCMLLKGWQRLCEDLVGREGPFLETVCVPFAGLAIILWPLAVIAGVIASFLSSFFFGLHAGLIAYQEASFQMGLSYMISAVALYDEYTNDLLYLREGSCLPRPKYRKAGSAKYETGRNKDEHNVTAASAEKQHQGQRKHRRVLHRSKTFMETIQRLRPIQIWDWLFRSCEINGRILLSEGLISSEDIEEFITKGKGKKLSIKLPAWCILHCLIRSAKHDTHGLLISDDVEVTNFNWPKDKVFDWMLGPLLVLKEQMKKLELTEDEELCLQKLIMTNANEKPSDWDDCGFPSSDGVKRAQLQAIIRRLQGIVANMSRIPSFRRRFMSLARALYLEAIDAGTIDGSRKVERKVKADIASEELQSRDVGDTKGSSNGTSVDVDMV

SEQ ID NO: 67307 - protein, 447 aa, Triticum aestivum
  peptide (1)..(447): Ceres Seq. ID no. 14303204
MVVRDVTDFCFHSYFSFMDELSEKMGDDEEPTDIKLSYLPRSFLVALVAVPLDVLMITGVALWKSPCMLLKGWQRLCEDLVGREGPFLETVCVPFAGLAIILWPLAVIAGVIASFLSSFFFGLHAGLIAYQEASFQMGLSYMISAVALYDEYTNDLLYLREGSCLPRPKYRKAGSAKYETGRNKDEHNVTAASAEKQHQGQRKHRRVLHRSKTFMETIQRLRPIQIWDWLFRSCEINGRILLSEGLISSEDIEEFITKGKGKKLSIKLPAWCILHCLIRSAKHDTHGLLISDDVEVTNFNWPKDKVFDWMLGPLLVLKEQMKKLELTEDEELCLQKLIMTNANEKPSDWDDCGFPSSDGVKRAQLQAIIRRLQGIVANMSRIPSFRRRFMSLARALYLEAIDAGTIDGSRKVERKVKADIASEELQSRDVGDTKGSSNGTSVDVDMV

SEQ ID NO: 67308 - DNA, 1778 bp, Triticum aestivum
  misc_feature (1)..(1778): Ceres Seq. ID no. 15170139
ctagtttcccatcctgccgcatctcttttcgccgctgattctcgcgaaagcgcaccatggcttcaacgcccgtcgaccgccatctctctctacacgcggatcgtgaggagggcccgacaaggaacacggtgttcctggcgtagttaagctgctattggagacaccctccggcttcgcaattttctcttttgccgaggattacctcgacaaagatatccagatcatctggcttcacgacttccaaatgtttgaggacaaatccagtgccattaaccttactacccggcgattaggcgccaaactcgcccagatgatcatgaagtgctccttctatgatgacaaactagttgttggaaggtctgaatataaagaaataattgaagaatcactgggtctaacctgtgtgtacaatgatcatgtgatggaggtgatgtggggtctgcagaatctcatgcatacttcttttcctgaagaaaaatctaagatgtctagggatgaccagctcctcgtgagcaaaggattgtatatggtcttagatcgacacggcattaagatcaaggcagagatgcttaatgagcatattattaagaagacccgcgatgtacgtaatactgatttacgtgaagatgcagttgcaattgtgttgcacgaaatggttgatgcctatttcgaggagttttctaaaattgataccgaggaatggagtttattcaaactagcattagctttgaaagtaatgattgatcctcatggaggacttaaagctggtgacccttatgagatgttcacacatgacgagttaatagtgatggggcgtgacgcatctaaatatgaaggtactcttgataagaaaactgtcttggcaatgtacaatgacgctgttgttctccgtgaggacaagatggatttgctgtacgaattggactgcttggttgaggaggctaaaggagcactggaaactgaagaagtgctggagaagcttgcaacattaagtgttgactccaagcagcaaactgactgtacatcttcaacagcggtgagtctgacagtacccaaccaaagcagcatctataaggagcaacactgtcctatcacagcagatgcagatggcgcggagatctcgccaaccactccagatgaagttactgctgaaagggatgctgtccgggaaaatacacaggctcaagaaactactgctgaaggaagaaaggagatcggtactgctgaaggaagaatgaacctcggtactgctgaaggaagaatgaaccttggtactgctggaggaagaataaacctcggtactgctgaaggaagaaaggagctcagtcgcattattgctcagaaggtgcccccttgtcattatcaagaatggaagcctcttcacattccgcagctcattccaaccactccatatggtgcggagatcttgccaaccactccaaatgaagttactgctgaaaggaatgctgtccgggaaaatacgcaggctcaagaaactaccgctgaaggaagaaaggagatcggtcacattcttggtcagtagttagccctgcgttgttatcttgacagtggtaactctcttcacgactagtgtgttccacttcccgcaacagactgctagcgtctcccacttctactagtcgctacctaagttgtttaggcgcttccactgattacgttgataatggcatgccttctcaggagtgccaagcttctcctaattatgcccctcgacatttgtattgcctaggtacctatgaaatgctttttgttatttg

SEQ ID NO: 67309 - protein, 432 aa, Triticum aestivum
  peptide (1)..(432): Ceres Seq. ID no. 15170140
MFEDKSSAINLTTRRLGAKLAQMIMKCSFYDDKLVVGRSEYKEIIEESLGLTCVYNDHVMEVMWGLQNLMHTSFPEEKSKMSRDDQLLVSKGLYMVLDRHGIKIKAEMLNEHIIKKTRDVRNTDLREDAVAIVLHEMVDAYFEEFSKIDTEEWSLFKLALALKVMIDPHGGLKAGDPYEMFTHDELIVMGRDASKYEGTLDKKTVLAMYNDAVVLREDKMDLLYELDCLVEEAKGALETEEVLEKLATLSVDSKQQTDCTSSTAVSLTVPNQSSIYKEQHCPITADADGAEISPTTPDEVTAERDAVRENTQAQETTAEGRKEIGTAEGRMNLGTAEGRMNLGTAGGRINLGTAEGRKELSRIIAQKVPPCHYQEWKPLHIPQLIPTTPYGAEILPTTPNEVTAERNAVRENTQAQETTAEGRKEIGHILGQ

SEQ ID NO: 67310 - protein, 410 aa, Triticum aestivum
  peptide (1)..(410): Ceres Seq. ID no. 15170141
MIMKCSFYDDKLVVGRSEYKEIIEESLGLTCVYNDHVMEVMWGLQNLMHTSFPEEKSKMSRDDQLLVSKGLYMVLDRHGIKIKAEMLNEHIIKKTRDVRNTDLREDAVAIVLHEMVDAYFEEFSKIDTEEWSLFKLALALKVMIDPHGGLKAGDPYEMFTHDELIVMGRDASKYEGTLDKKTVLAMYNDAVVLREDKMDLLYELDCLVEEAKGALETEEVLEKLATLSVDSKQQTDCTSSTAVSLTVPNQSSIYKEQHCPITADADGAEISPTTPDEVTAERDAVRENTQAQETTAEGRKEIGTAEGRMNLGTAEGRMNLGTAGGRINLGTAEGRKELSRIIAQKVPPCHYQEWKPLHIPQLIPTTPYGAEILPTTPNEVTAERNAVRENTQAQETTAEGRKEIGHILGQ

SEQ ID NO: 67311 - protein, 408 aa, Triticum aestivum
  peptide (1)..(408): Ceres Seq. ID no. 15170142
MKCSFYDDKLVVGRSEYKEIIEESLGLTCVYNDHVMEVMWGLQNLMHTSFPEEKSKMSRDDQLLVSKGLYMVLDRHGIKIKAEMLNEHIIKKTRDVRNTDLREDAVAIVLHEMVDAYFEEFSKIDTEEWSLFKLALALKVMIDPHGGLKAGDPYEMFTHDELIVMGRDASKYEGTLDKKTVLAMYNDAVVLREDKMDLLYELDCLVEEAKGALETEEVLEKLATLSVDSKQQTDCTSSTAVSLTVPNQSSIYKEQHCPITADADGAEISPTTPDEVTAERDAVRENTQAQETTAEGRKEIGTAEGRMNLGTAEGRMNLGTAGGRINLGTAEGRKELSRIIAQKVPPCHYQEWKPLHIPQLIPTTPYGAEILPTTPNEVTAERNAVRENTQAQETTAEGRKEIGHILGQ

SEQ ID NO: 67312 - DNA, 1988 bp, Triticum aestivum
  misc_feature (1)..(1988): Ceres Seq. ID no. 14313373
acacatctcaccacgccacaaacaccaaagagaggtgtactacgagggagtgagaggcgcccggctcgcctgcgtccgtctccacttctcgcgagcccggcgtcacccgccgccgggcacgcaccacgctcaacgccaaagaaaatagtgtaggtcgtgtaggcgaaggccgacctgcaaactaaacactagtcgatcaagatggtggtggagggatacgaagccgacaagaacatccagatatggaaggtgaagaagctgatcaaggggctggacggggcgaggggcaacggcacgagcatgatctcgctcatcataccgccgcgcgaccaggtgtcccgcgtcgccaagatgctgggcgacgagtacgggaccgcctccaacatcaagagccgggtgaaccgccagtccgtgctggccgccataacctccgcccagcagaggctcaagctctacagccgggtgccccccaacggcctcgtgctctacacgggcaccgtcgtcaccgacgacggcaaggagaagaaggtcaccttcgacttcgagcccttccggcccatcaacgcgtcgctctacctctgcgataacaagttccacaccgagccgctgaacgagctcctcgagtccgacgacaggttcggcttcatcgccatggacggcaacggcacgctctacggcacgctgagcggcaacagccgggaggtggtgtacaagttcagcgtggatctgcccaagaagcacgggcggggagggcagtcggcgctccggttcgcgcgcctgcgtatggagaagcggcacaactacctgcgcaaggcggccgagctggccacgcacttcttcaccaaccccgccaccaaccagcccaacgtggtcgggctcatcctggccggctccgccgatttcaagaccgagctgggcaagtccgagatgttcgaccagcggctccaggccaagataatcaagtcggtcgacgtgtcgtacggcggggagagcggcttcaaccaggccattgagatgtctgtggaggtcctctccgaggccaagttcgtccaggagaagaagctccttcgcaagtacttcgaggagataagccaggacaccgggaagtacgtcctgggcgtgcaggacaccatggcggccctcgagatgggcgcggtccacacgctgatcgtgtgggagaacctcgacgtcaggcggtacgagctgaagaactccgccacgggggagacggtggtgaagtacatcaacggcggccaggaggcggaccagagcaacctcggtgtcgacgaggcggcgtgcggggagctggacgtcgtcgacagggtgctgctgctggagtggttcgccgagaactaccagcaatacggctgcaagctggagttcgtcaccaacaggtcccaggaaggatcgcagttctgccggggcttcggcggcatcggcgggatcctccgctacccggcggacgtcgccgcctacaacgacgacgacgacgacgacatgctggatgacgacgtctatgaaggcctcgaatagcaatcaactgaagcttcactgcacacggtctgggaggagcctgcgctggccccgaccgcgccgccgggacgagaccctgctgaaacatccaaacgatcggtgcaagggaaacgaggaggtgggacagaagaaaggatctcagcaattatagttcggaccttgagcaaagcacgatgatggcgttgatggtttggagttgaaggtctcttcctctctggatccatcccttcaaatttggttatgctactaagcagccgtggctgccttctcttgctgcatcagagaatatgcttattagagtcgtattagttgcgagtgtgagagtggtgttccttataatctactcctgagtcgccttatgagcttatatgctactacaacaactgcttgaaataatgttgtgtattattgtgttcgattttatatgtgagatttattgctatggtaagatactg

SEQ ID NO: 67313 - protein, 443 aa, Triticum aestivum
  peptide (1)..(443): Ceres Seq. ID no. 14313374
MVVEGYEADKNIQIWKVKKLIKGLDGARGNGTSMISLIIPPRDQVSRVAKMLGDEYGTASNIKSRVNRQSVLAAITSAQQRLKLYSRVPPNGLVLYTGTVVTDDGKEKKVTFDFEPFRPINASLYLCDNKFHTEPLNELLESDDRFGFIAMDGNGTLYGTLSGNSREVVYKFSVDLPKKHGRGGQSALRFARLRMEKRHNYLRKAAELATHFFTNPATNQPNVVGLILAGSADFKTELGKSEMFDQRLQAKIIKSVDVSYGGESGFNQAIEMSVEVLSEAKFVQEKKLLRKYFEEISQDTGKYVLGVQDTMAALEMGAVHTLIVWENLDVRRYELKNSATGETVVKYINGGQEADQSNLGVDEAACGELDVVDRVLLLEWFAENYQQYGCKLEFVTNRSQEGSQFCRGFGGIGGILRYPADVAAYNDDDDDDMLDDDVYEGLE

SEQ ID NO: 67314 - protein, 410 aa, Triticum aestivum
  peptide (1)..(410): Ceres Seq. ID no. 14313375
MISLIIPPRDQVSRVAKMLGDEYGTASNIKSRVNRQSVLAAITSAQQRLKLYSRVPPNGLVLYTGTVVTDDGKEKKVTFDFEPFRPINASLYLCDNKFHTEPLNELLESDDRFGFIAMDGNGTLYGTLSGNSREVVYKFSVDLPKKHGRGGQSALRFARLRMEKRHNYLRKAAELATHFFTNPATNQPNVVGLILAGSADFKTELGKSEMFDQRLQAKIIKSVDVSYGGESGFNQAIEMSVEVLSEAKFVQEKKLLRKYFEEISQDTGKYVLGVQDTMAALEMGAVHTLIVWENLDVRRYELKNSATGETVVKYINGGQEADQSNLGVDEAACGELDVVDRVLLLEWFAENYQQYGCKLEFVTNRSQEGSQFCRGFGGIGGILRYPADVAAYNDDDDDDMLDDDVYEGLE

SEQ ID NO: 67315 - protein, 393 aa, Triticum aestivum
  peptide (1)..(393): Ceres Seq. ID no. 14313376
MLGDEYGTASNIKSRVNRQSVLAAITSAQQRLKLYSRVPPNGLVLYTGTVVTDDGKEKKVTFDFEPFRPINASLYLCDNKFHTEPLNELLESDDRFGFIAMDGNGTLYGTLSGNSREVVYKFSVDLPKKHGRGGQSALRFARLRMEKRHNYLRKAAELATHFFTNPATNQPNVVGLILAGSADFKTELGKSEMFDQRLQAKIIKSVDVSYGGESGFNQAIEMSVEVLSEAKFVQEKKLLRKYFEEISQDTGKYVLGVQDTMAALEMGAVHTLIVWENLDVRRYELKNSATGETVVKYINGGQEADQSNLGVDEAACGELDVVDRVLLLEWFAENYQQYGCKLEFVTNRSQEGSQFCRGFGGIGGILRYPADVAAYNDDDDDDMLDDDVYEGLE

SEQ ID NO: 67316 - DNA, 1736 bp, Triticum aestivum
  misc_feature (1)..(1736): Ceres Seq. ID no. 13660287
aatctctcttctcctagctaccaacccttacgagcatcatggctggcggggacgagcatgagcatgacgcgccgggtcggctggagagcatcctgacggacaagtcggcgccgctcgcggagcgcgcgtgggcggcgggagcggtcgagctccggctgctgtcgcggctggcggcgcccgcggtagtggtgtacatgatcaactacgtcatgtccatgtccacacagatcttctccggccacctcgggaacctggagctcgccaccgcctcgctcggcaacaccggcgtccagaccttcgcctacggcctcatgctaggtatgggcagtgcagtggagaccctctgcgggcaggcgtacggtgcacacaagtacgacatgctcggaatttacctacaacgctctatcgttctgttgggcttaactggcataccacttgctgtgatgtacgccttctcggagccactcctcttgttgatgggacagtcaccggagatagcccgtgccgcatcgatcttcgtttacggcctgattcctcagatcttcgcgtacgctgtcaacttcccgattcagaagttcctgcaggcgcagagcatcgtcctgccaagtgcttacatctcaacggcaacactcattctacatgtgttgatgagttgggtgctcatatacaaggttggccttgggctgctcggtgcctccttggtgctgagcgtgagctggtggatcatggtcgccgcgcaatttgtgtacatcatcgtcagcccgacatgccggcacacgtggacggggttcaattggcaggccttctccggtttgccgagtttcttcaagctctccgccgcgtctgcggtgatgttgtgccttgagacatggtactttcaggtgctggtgatcattgctggattgctccccaaccctgagattgccctggattccctctctatatgtatgacaatttatggttgggtgttcatgatctcagttgggttcaacgccgctgcaagtgtaagagtgagcaatgagcttggcgccggcaacccgaagtctgcatttttctctgtgtgggtcgtgaccgggatctctgcaacaatctctaccatccttgctgttgtgatcctttgccttcgcaaccacatcagctacttgttcacagatggtgaagcagtttcggatgcggtggcggatctctgcccatttctcgccgtcacactcgttctcggtggcatccaacctgtactaacaggtgttgctgttggatgtggatggcaacaatttgtttcttacgtgaacatcggctcttactacatcgtaggtgttccacttggtgttgttcttggatttttcttcaatcttggcgcaaagggtatttggggtggtttgattgggggaacggccttgcagacagtcattctattatgggtcaccataagaacggactggacgaaagaggtagaggaggcacataaaaggttgaacaagtgggatgataagaatgagcccctccttacaggcttcaaggacaataactaatgagtgggtcagtctagatgtcttttttcacctcaacagcacataagcatgctggtttcgagaatcgctgtcagcgtgggggtgggagggactggattcaggtgttttaaatctcacataaatttatgtcccgatttggatgacatgccaattataggcttattagtatatattgtagtcttggttaaarraaaaaaaaaaaaagct

SEQ ID NO: 67317 - protein, 496 aa, Triticum aestivum
  peptide (1)..(496): Ceres Seq. ID no. 15220690
MAGGDEHEHDAPGRLESILTDKSAPLAERAWAAGAVELRLLSRLAAPAVVVYMINYVMSMSTQIFSGHLGNLELATASLGNTGVQTFAYGLMLGMGSAVETLCGQAYGAHKYDMLGIYLQRSIVLLGLTGIPLAVMYAFSEPLLLLMGQSPEIARAASIFVYGLIPQIFAYAVNFPIQKFLQAQSIVLPSAYISTATLILHVLMSWVLIYKVGLGLLGASLVLSVSWWIMVAAQFVYIIVSPTCRHTWTGFNWQAFSGLPSFFKLSAASAVMLCLETWYFQVLVIIAGLLPNPEIALDSLSICMTIYGWVFMISVGFNAAASVRVSNELGAGNPKSAFFSVWVVTGISATISTILAVVILCLRNHISYLFTDGEAVSDAVADLCPFLAVTLVLGGIQPVLTGVAVGCGWQQFVSYVNIGSYYIVGVPLGVVLGFFFNLGAKGIWGGLIGGTALQTVILLWVTIRTDWTKEVEEAHKRLNKWDDKNEPLLTGFKDNN

SEQ ID NO: 67318 - protein, 444 aa, Triticum aestivum
  peptide (1)..(444): Ceres Seq. ID no. 15220691
MINYVMSMSTQIFSGHLGNLELATASLGNTGVQTFAYGLMLGMGSAVETLCGQAYGAHKYDMLGIYLQRSIVLLGLTGIPLAVMYAFSEPLLLLMGQSPEIARAASIFVYGLIPQIFAYAVNFPIQKFLQAQSIVLPSAYISTATLILHVLMSWVLIYKVGLGLLGASLVLSVSWWIMVAAQFVYIIVSPTCRHTWTGFNWQAFSGLPSFFKLSAASAVMLCLETWYFQVLVIIAGLLPNPEIALDSLSICMTIYGWVFMISVGFNAAASVRVSNELGAGNPKSAFFSVWVVTGISATISTILAVVILCLRNHISYLFTDGEAVSDAVADLCPFLAVTLVLGGIQPVLTGVAVGCGWQQFVSYVNIGSYYIVGVPLGVVLGFFFNLGAKGIWGGLIGGTALQTVILLWVTIRTDWTKEVEEAHKRLNKWDDKNEPLLTGFKDNN

SEQ ID NO: 67319 - protein, 439 aa, Triticum aestivum
  peptide (1)..(439): Ceres Seq. ID no. 15220692
MSMSTQIFSGHLGNLELATASLGNTGVQTFAYGLMLGMGSAVETLCGQAYGAHKYDMLGIYLQRSIVLLGLTGIPLAVMYAFSEPLLLLMGQSPEIARAASIFVYGLIPQIFAYAVNFPIQKFLQAQSIVLPSAYISTATLILHVLMSWVLIYKVGLGLLGASLVLSVSWWIMVAAQFVYIIVSPTCRHTWTGFNWQAFSGLPSFFKLSAASAVMLCLETWYFQVLVIIAGLLPNPEIALDSLSICMTIYGWVFMISVGFNAAASVRVSNELGAGNPKSAFFSVWVVTGISATISTILAVVILCLRNHISYLFTDGEAVSDAVADLCPFLAVTLVLGGIQPVLTGVAVGCGWQQFVSYVNIGSYYIVGVPLGVVLGFFFNLGAKGIWGGLIGGTALQTVILLWVTIRTDWTKEVEEAHKRLNKWDDKNEPLLTGFKDNN

SEQ ID NO: 67320 - DNA, 754 bp, Triticum aestivum
  misc_feature (1)..(754): Ceres Seq. ID no. 13598076
agcaagccttagctagttagctttacacagcctccattgaagtgcaagaaccaaatccttagcttacacgtccatcaaacacctcagttggctaccatccgttggagagatgaacacgttgtgcgccaagcccatggggttctctggtggcgtgaagtgccagcggcgggcgcgggtgagggtgtcggccgtggcggcggcgccggagagggtgacgatgtacgacgtgctggcggtggggaacgcggcggggccggaggagatcaaggcggcgtacaggcgcgccgcgcggcggtggcacccggacgcgtgcccgggcggcgccgaccggttcatgagggcgcgcgaggcctacgaggtgctctccgaccccgagcgcaggcggggctacgacatccagctgcgctgtggcgcgggcgcgggcgccgccgggtcccgctccagccccgcgccgcgcgcgggcttcgccgactgggaagcacagctggccgggctgcagtggcggatggcggacacgcgaggcgaaacgtgggggagcaggatgcgccgcggcgccgcgcagccgacattgttctaatctctaaaccgcagcgccggctcgtgctctgtgttttctactgtagtactgtatattctacgtagtttcgccttgttctctccttccattccattttacgcggtgggattcggttggtgatgaaactgtatagtgtagtacagacagtgtacaaaagtacggtagtttttttctttg

SEQ ID NO: 67321 - protein, 155 aa, Triticum aestivum
  peptide (1)..(155): Ceres Seq. ID no. 13598077
MNTLCAKPMGFSGGVKCQRRARVRVSAVAAAPERVTMYDVLAVGNAAGPEEIKAAYRRAARRWHPDACPGGADRFMRAREAYEVLSDPERRRGYDIQLRCGAGAGAAGSRSSPAPRAGFADWEAQLAGLQWRMADTRGETWGSRMRRGAAQPTLF

SEQ ID NO: 67322 - protein, 147 aa, Triticum aestivum
  peptide (1)..(147): Ceres Seq. ID no. 13598078
MGFSGGVKCQRRARVRVSAVAAAPERVTMYDVLAVGNAAGPEEIKAAYRRAARRWHPDACPGGADRFMRAREAYEVLSDPERRRGYDIQLRCGAGAGAAGSRSSPAPRAGFADWEAQLAGLQWRMADTRGETWGSRMRRGAAQPTLF

SEQ ID NO: 67323 - protein, 119 aa, Triticum aestivum
  peptide (1)..(119): Ceres Seq. ID no. 13598079
MYDVLAVGNAAGPEEIKAAYRRAARRWHPDACPGGADRFMRAREAYEVLSDPERRRGYDIQLRCGAGAGAAGSRSSPAPRAGFADWEAQLAGLQWRMADTRGETWGSRMRRGAAQPTLF

SEQ ID NO: 67324 - DNA, 775 bp, Triticum aestivum
  misc_feature (1)..(775): Ceres Seq. ID no. 13660635
atgtaaaatctaactacaccaattcattctactgggatactctcccagtaccaccatttctaggcgatgactatggaagaaccattgacatttgttcctccatgatgatcaatggctcgaccatatgcatatcctctgtcgagaagggcgctggcacctacaccttttgatatagtgacaaagttatggactcaggctgggaatttgggtgctgcccttctacggcaaagcagagtatgttcccgagctcaacctttcgttcgctctatctgctgacagcccccaccgcttgtgcgctttaacctgcacttcaatgcaccatgggggcccaccagcattgcagcatacttttgatgagctcgacctgccggagaattggtcgccatacaagtgccacctggttaacctgggctcaggcaacttttgcatcatttccttctgtaagaccatgaactgtgagtttgccgtcttcaccggcgtggaggtgaaaccctgcatcaatggcgacggtcctctccggatgatcaagcacctgtctaagagtttcagccttggatctcatagcatcaaaagtgtgctctgaaccatctaattgattgcctggatgccgatatggaacttagtctgtaatctgtgctattttgttttctgcctcttagctgttctaaagcccgctgctgtttatcggtcttgatatgctgcatttaatccgacagcgcatgactatgtaaagactatttgcttaaatgatttttaaacttgcttaagttcattg

SEQ ID NO: 67325 - protein, 89 aa, Triticum aestivum
  peptide (1)..(89): Ceres Seq. ID no. 13660636
MHHGGPPALQHTFDELDLPENWSPYKCHLVNLGSGNFCIISFCKTMNCEFAVFTGVEVKPCINGDGPLRMIKHLSKSFSLGSHSIKSVL

SEQ ID NO: 67326 - protein, 55 aa, Triticum aestivum
  peptide (1)..(55): Ceres Seq. ID no. 13660637
VKSNYTNSFYWDTLPVPPFLGDDYGRTIDICSSMMINGSTICISSVEKGAGTYTF

SEQ ID NO: 67327 - protein, 54 aa, Triticum aestivum
  peptide (1)..(54): Ceres Seq. ID no. 13660638
MARPYAYPLSRRALAPTPFDIVTKLWTQAGNLGAALLRQSRVCSRAQPFVRSIC

SEQ ID NO: 67328 - DNA, 1877 bp, Triticum aestivum
  misc_feature (1)..(1877): Ceres Seq. ID no. 14301689
tccaattcgagatagaagcgcgggatcccctccccgcgcgccctattctgtgtggacagatccattgagaggcgcccttgattcctggctgttgtatcatggggttgctagctctgaagatgctcatgtctaggcggcgggatagcaagcatctttgcggccagattcaagcccgtaatagattggttacttcagtggttaaaagaaagatctcttcatgccaacacaataacaatcaaggttgcaagagagtggcattttcaggggcagaccttccagaggacatctggcgccatatacattccctactgccgctgcgagatgctgcccgtgttgcctgcgtatctcatgcatttttacgttcctggaaatgccatcccaacctctccttcactaggaaagcactgggcctgaatagaattccacgtcaaagtgatgtaattgcaagggatctcactatgaaagtcgaccacattctcaaaaaacactcaggcaaaggagttaagaaattcaggatcgaattacacatgccagttgatccctgctatcttaatagctggcttcagattgctgctgaactacgggttgaggaactcgccgttgttctaccttcaacctgcaatgcaaatgactacgatttcccttgtgcactttttgttgatgatgggtgtagaaacgcaatagagcatctctgccttggcggttgtgccttccatcccacagctggatttggttacttgagaaagctgcggctgttttgggtgcatattacggtggatgaattagaatgccttatttccaaatctccagctttggagcacttggcactcaagtattgctatacgatcacttacctgaagatacctagcctgctacagcatctcagctacctgatggtagctgcatgcgctaatctgcagacaatagagtgtaaagctccaaatctctccactttttacttcagtggtcgacaagttgaacttctgtttggatgttcagttcaagtgaagaccatggaaatgcgttgttctactcagtgtaacaccatttataatgcttgtgccaacctgccatccattgtgccaaatattgaaactctcagcatatcttctgttagtgaggtggtcaatataccaatcgtgcctgtaaaattcctccacctcaagtatctgtctatttctcttgaaggaaatggggctttttccccagactatgattacttttctctggtttctttgctggatgcttgtcctgtcttggaaactttcaacttgtttgtgtcacaggatcgcatgaaacacgattcggttcttggagacccgtcgtcacgtcttaggcagatgcctgaataccgccacgacaacattaagaatgtgaggattattgggttttgctctgcgaagagcatggtcgagctggcatgccatattctcgagaatgcaacatcactcgagtgccttactttggacacgatacgtgctttcagtattgacagacacattcacaaaactggtgaatgtggccacataggcaggcatatgatcagagaagcacgtaaggcgctcttggctgtcaaaagatatatcgtgggaatagttccctccacggtcaagttaaatgtcttgcagccttgcaagctatgccatgctttggctgcttagatgtggcaatatcataaatttgtaaattacattgttgactgaacactgttgcatgagttgccacttgcagcaggaatgtccaaacgggtcacttaaacaccagcgtagaagtatagggacaagcaattatggtatttgatatataaaagaagatatcaggaactatttagtattgtagctgttgatatattttcttataaaattcggtcaggattt

SEQ ID NO: 67329 - protein, 520 aa, Triticum aestivum
  peptide (1)..(520): Ceres Seq. ID no. 14301690
MGLLALKMLMSRRRDSKHLCGQIQARNRLVTSVVKRKISSCQHNNNQGCKRVAFSGADLPEDIWRHIHSLLPLRDAARVACVSHAFLRSWKCHPNLSFTRKALGLNRIPRQSDVIARDLTMKVDHILKKHSGKGVKKFRIELHMPVDPCYLNSWLQIAAELRVEELAVVLPSTCNANDYDFPCALFVDDGCRNAIEHLCLGGCAFHPTAGFGYLRKLRLFWVHITVDELECLISKSPALEHLALKYCYTITYLKIPSLLQHLSYLMVAACANLQTIECKAPNLSTFYFSGRQVELLFGCSVQVKTMEMRCSTQCNTIYNACANLPSIVPNIETLSISSVSEVVNIPIVPVKFLHLKYLSISLEGNGAFSPDYDYFSLVSLLDACPVLETFNLFVSQDRMKHDSVLGDPSSRLRQMPEYRHDNIKNVRIIGFCSAKSMVELACHILENATSLECLTLDTIRAFSIDRHIHKTGECGHIGRHMIREARKALLAVKRYIVGIVPSTVKLNVLQPCKLCHALAA

SEQ ID NO: 67330 - protein, 513 aa, Triticum aestivum
  peptide (1)..(513): Ceres Seq. ID no. 14301691
MLMSRRRDSKHLCGQIQARNRLVTSVVKRKISSCQHNNNQGCKRVAFSGADLPEDIWRHIHSLLPLRDAARVACVSHAFLRSWKCHPNLSFTRKALGLNRIPRQSDVIARDLTMKVDHILKKHSGKGVKKFRIELHMPVDPCYLNSWLQIAAELRVEELAVVLPSTCNANDYDFPCALFVDDGCRNAIEHLCLGGCAFHPTAGFGYLRKLRLFWVHITVDELECLISKSPALEHLALKYCYTITYLKIPSLLQHLSYLMVAACANLQTIECKAPNLSTFYFSGRQVELLFGCSVQVKTMEMRCSTQCNTIYNACANLPSIVPNIETLSISSVSEVVNIPIVPVKFLHLKYLSISLEGNGAFSPDYDYFSLVSLLDACPVLETFNLFVSQDRMKHDSVLGDPSSRLRQMPEYRHDNIKNVRIIGFCSAKSMVELACHILENATSLECLTLDTIRAFSIDRHIHKTGECGHIGRHMIREARKALLAVKRYIVGIVPSTVKLNVLQPCKLCHALAA

SEQ ID NO: 67331 - protein, 511 aa, Triticum aestivum
  peptide (1)..(511): Ceres Seq. ID no. 14301692
MSRRRDSKHLCGQIQARNRLVTSVVKRKISSCQHNNNQGCKRVAFSGADLPEDIWRHIHSLLPLRDAARVACVSHAFLRSWKCHPNLSFTRKALGLNRIPRQSDVIARDLTMKVDHILKKHSGKGVKKFRIELHMPVDPCYLNSWLQIAAELRVEELAVVLPSTCNANDYDFPCALFVDDGCRNAIEHLCLGGCAFHPTAGFGYLRKLRLFWVHITVDELECLISKSPALEHLALKYCYTITYLKIPSLLQHLSYLMVAACANLQTIECKAPNLSTFYFSGRQVELLFGCSVQVKTMEMRCSTQCNTIYNACANLPSIVPNIETLSISSVSEVVNIPIVPVKFLHLKYLSISLEGNGAFSPDYDYFSLVSLLDACPVLETFNLFVSQDRMKHDSVLGDPSSRLRQMPEYRHDNIKNVRIIGFCSAKSMVELACHILENATSLECLTLDTIRAFSIDRHIHKTGECGHIGRHMIREARKALLAVKRYIVGIVPSTVKLNVLQPCKLCHALAA

SEQ ID NO: 67332 - DNA, 1481 bp, Triticum aestivum
  misc_feature (1)..(1481): Ceres Seq. ID no. 15176966
ggcccactgcccacgcgcacccggtcgccgtcacgctagcctcgcttcgcctcctccgtccgccgcgccgtcgtttccgcggccgtcgcgctcccgcctccccacgacgacaaaacgccccacgcgccgtgcgcccgcgcgaatatacccaccacggcaccaccccaccattcccctcgccgccgagccgcgcccctctcgcacacactgccacatcccccagaccccgggcaaatatcgccatggccgcctccgcggcgccactccgggccgcgctcgcccgcagccccgcccccgccgccgcgcgcgctccgcccggcttcctcccactccctccccgcgcccgccgcgtccgcctcggtccggtcgccctcgtctccgggagggggaggaggatccgcgcggaggcgacggcgaggacgcggcaggagaaggagcagcaggaggccgaggtgtccgccgtcgaggactccttcgccgtcagggaggcggccgcagctcctcccccggaagaaggtggattcgatgaggagctcaccctcgccggcgaggacggcgactgggtcgtcaggttcgagcagtccttcaacgtattcctcacggatactgtcatctttatactcgatattctgtaccgcgaccgcgactacgccaggttcttcgtgctcgagacaatcgccagggtgccctatttcgcgtttatatcggtgcttcacttgtacgagacctttggctggtcgagaagagctgataacatcaaagtgcactttgctgaaagcatgaatgagttccatcacctcttaatcatggaagcattgggtggcaactctgtatggcttgatcgctttcttgcgcggtttagcgcctttttttactacttcgtcactgttggcatgtacatgctgagcccaagaatggcataccacttttctgaatgtgttgagaggcatgcatactcaacttatgacaagttccttaagctcaacggagaggagttgaaaaaactaccagctccagaggtggctgtaaactattacatgaatgaggatctctacatgtttgatgagtttcaaacatcaagagctccaaattctaggaggcctaaagttgataacttgtatgatgtattcgtgaatgtacgggacgatgaggcggagcattgcaagacaatgaaggcttgtcaaacgcatgaaaccctccgttctcctcatgccgtgcagagctcagtagaagctgatgcagaatgattctgtcaagaagtcccttggaaatgaagactgaccggttgtacgtacctccgtgctatagcgtcgtagagtatcatactaaattttggtgatatattgtattccatcctttttctcccttctcttcgtatgtagacattagccagactttcttacttgtgaatcttacatagggaatataggtttataaatgcatcacatatttacaatgagagacgtgcattgtttgtcagg

SEQ ID NO: 67333 - protein, 414 aa, Triticum aestivum
  peptide (1)..(414): Ceres Seq. ID no. 15176967
PTAHAHPVAVTLASLRLLRPPRRRFRGRRAPASPRRQNAPRAVRPREYTHHGTTPPFPSPPSRAPLAHTATSPRPRANIAMAASAAPLRAALARSPAPAAARAPPGFLPLPPRARRVRLGPVALVSGRGRRIRAEATARTRQEKEQQEAEVSAVEDSFAVREAAAAPPPEEGGFDEELTLAGEDGDWVVRFEQSFNVFLTDTVIFILDILYRDRDYARFFVLETIARVPYFAFISVLHLYETFGWSRRADNIKVHFAESMNEFHHLLIMEALGGNSVWLDRFLARFSAFFYYFVTVGMYMLSPRMAYHFSECVERHAYSTYDKFLKLNGEELKKLPAPEVAVNYYMNEDLYMFDEFQTSRAPNSRRPKVDNLYDVFVNVRDDEAEHCKTMKACQTHETLRSPHAVQSSVEADAE

SEQ ID NO: 67334 - protein, 334 aa, Triticum aestivum
  peptide (1)..(334): Ceres Seq. ID no. 15176968
MAASAAPLRAALARSPAPAAARAPPGFLPLPPRARRVRLGPVALVSGRGRRIRAEATARTRQEKEQQEAEVSAVEDSFAVREAAAAPPPEEGGFDEELTLAGEDGDWVVRFEQSFNVFLTDTVIFILDILYRDRDYARFFVLETIARVPYFAFISVLHLYETFGWSRRADNIKVHFAESMNEFHHLLIMEALGGNSVWLDRFLARFSAFFYYFVTVGMYMLSPRMAYHFSECVERHAYSTYDKFLKLNGEELKKLPAPEVAVNYYMNEDLYMFDEFQTSRAPNSRRPKVDNLYDVFVNVRDDEAEHCKTMKACQTHETLRSPHAVQSSVEADAE

SEQ ID NO: 67335 - DNA, 856 bp, Triticum aestivum
  misc_feature (1)..(856): Ceres Seq. ID no. 13659500
actagtgcctaccggaagtccacaacacacctttgccgtctcccctctccttttatatttgtctcatgcaagcttataatcgctcaaagacaagacgagaagagcaagaagagaagcatatgacgcagatggaggagctcgtgcaccagtgcgacatggaggtcatgaagatggccatgctcaagcacgagcagacattcaggcagcaggtgcatgatctacaccggctgtaccgagtccagaagcagctcatgggcgaccagagcgggcgcccgtcggtgccaccctgccatcaggtgcagcggcgcagggagcacccccgccggccggagctgagcctgcagctccctgtcgacgacgacgagtacgccgtcgtcagcggcggcacaggccgcctagcgacgccgccgtccatggagagcgaggacgagctggagctgacgctggccgtcggcggcggcggcgggaacggcggcagcagccggagccagaggaggaggcgggagagtgcgacggactgctccggcagaagaagcccacagacgccgtcttcgtcgaccgactccgacgacgcgctccgcacggtgccgcaccaccagagggcgacggcgtgtgatctccggggaggggtgatggtgtcgaagcagccgcaatggctggtgcgctgtctcagccttaggatggcttgatcgatttcacgacgagacctctactgtagacttttgttaaattgctaccggtttccccgcgtggttactggtactccctcctctgtcccataatagcgttttttacactacactagtgtcaaaaacactcttatattataagacggagggaatagtaaattagattg

SEQ ID NO: 67336 - protein, 207 aa, Triticum aestivum
  peptide (1)..(207): Ceres Seq. ID no. 13659501
MQAYNRSKTRREEQEEKHMTQMEELVHQCDMEVMKMAMLKHEQTFRQQVHDLHRLYRVQKQLMGDQSGRPSVPPCHQVQRRREHPRRPELSLQLPVDDDEYAVVSGGTGRLATPPSMESEDELELTLAVGGGGGNGGSSRSQRRRRESATDCSGRRSPQTPSSSTDSDDALRTVPHHQRATACDLRGGVMVSKQPQWLVRCLSLRMA

SEQ ID NO: 67337 - protein, 189 aa, Triticum aestivum
  peptide (1)..(189): Ceres Seq. ID no. 13659502
MTQMEELVHQCDMEVMKMAMLKHEQTFRQQVHDLHRLYRVQKQLMGDQSGRPSVPPCHQVQRRREHPRRPELSLQLPVDDDEYAVVSGGTGRLATPPSMESEDELELTLAVGGGGGNGGSSRSQRRRRESATDCSGRRSPQTPSSSTDSDDALRTVPHHQRATACDLRGGVMVSKQPQWLVRCLSLRMA

SEQ ID NO: 67338 - protein, 186 aa, Triticum aestivum
  peptide (1)..(186): Ceres Seq. ID no. 13659503
MEELVHQCDMEVMKMAMLKHEQTFRQQVHDLHRLYRVQKQLMGDQSGRPSVPPCHQVQRRREHPRRPELSLQLPVDDDEYAVVSGGTGRLATPPSMESEDELELTLAVGGGGGNGGSSRSQRRRRESATDCSGRRSPQTPSSSTDSDDALRTVPHHQRATACDLRGGVMVSKQPQWLVRCLSLRMA

SEQ ID NO: 67339 - DNA, 1476 bp, Triticum aestivum
  misc_feature (1)..(1476): Ceres Seq. ID no. 13664061
cgcgttgcgtttgcgttgcccaccccccgccgcaactctctcatccatcgcatccccgcgcctcctaccgccatcccatccaactcctcttccccacgcacgcgcttcgcgcctcaaatagcacgaacggggcaatggcagcggcgcggccctgttgcagcagcagccaccggcaatcgcgcctcctcgtcctcgccgcctgcgcgtcgcccacgccgctgctgctgctttagccgtccccgacttccgctccgaggtgatcgctcccccggccggatgggtgatctgggcgtccgggttgtgggcagaggctgcgccgcgccgatggagccgcgcaaggagatggtggcgccgtcgctggagcagcaggggcagcagcagcatcctcccctcttcatggatttctcccgacgagatggagtcgcagatggcggcaacgggcggaagcggccgcgcgagaccgtggcgccgccggcacgcctcttctccctacaggcgccgcagggttctcccgggcacaaggtgatacacctggcgcagctgcaccggcggccggcggcgacgggcctgcggctcgacttcgacgagggaggctcggagcacgtggcgtgcacgtcgtcgacgtcgtcccttctccccggcgagctcgccgctcagtgcgggcggcacaacaacgagatcgaccggctgctccaggaacacgcggagagactccggcttgcgctggccgacacgaggcgtcggcagaaccgctcgctgctgggcgccgcagaggcgctggccgccggcgggtcagggaggtggaggcggagaccttcaaggcggcacggcgcggcgtcgagctggaggagcggctggccaggctgagggcggaggcggcgtcgtggcaagccaaggcaatgtccgaccagtccacggcggccgcgctgcacgcgcagttgcagcaggaagcggccacagcgcaggcgaggagtggcaaggccgccgaggaggccgagggagcggcggacgacgccgagtccggcttcatcgaccctgacagggtggtggaggtggtggccccgccaccggccaggccgtgccgcgcgtgccggctccggccggccaccaccgtgctgctcccctgcaggcacctctgcgtgtgcgccgcgtgcgatcccggcgcctctgcctcccaagccggcaccgccgccgccgcggcctgccccgcgtgccgctgccccatcaccggcaccgtgcaggtcttcttcgcgtgaaacgggtccccgccggatcatgaaatcagaaccatggaaaagctgtagtagatcagatcagacagggtgcataattccttcctctcttttctcccgtgctagtgaactgatccctccatgatcgcttcacctcttttgctggtgatctagtaaatctttactaatttgatttgaatcttgcgtgacagtttttactgctagcaacgcgttgattaggtgg

SEQ ID NO: 67340 - protein, 288 aa, Triticum aestivum
  peptide (1)..(288): Ceres Seq. ID no. 13664062
RVAFALPTPRRNSLIHRIPAPPTAIPSNSSSPRTRFAPQIARTGQWQRRGPVAAAATGNRASSSSPPARRPRRCCCFSRPRLPLRGDRSPGRMGDLGVRVVGRGCAAPMEPRKEMVAPSLEQQGQQQHPPLFMDFSRRDGVADGGNGRKRPRETVAPPARLFSLQAPQGSPGHKVIHLAQLHRRPAATGLRLDFDEGGSEHVACTSSTSSLLPGELAAQCGRHNNEIDRLLQEHAERLRLALADTRRRQNRSLLGAAEALAAGGSGRWRRRPSRRHGAASSWRSGWPG

SEQ ID NO: 67341 - protein, 196 aa, Triticum aestivum
  peptide (1)..(196): Ceres Seq. ID no. 13664063
MGDLGVRVVGRGCAAPMEPRKEMVAPSLEQQGQQQHPPLFMDFSRRDGVADGGNGRKRPRETVAPPARLFSLQAPQGSPGHKVIHLAQLHRRPAATGLRLDFDEGGSEHVACTSSTSSLLPGELAAQCGRHNNEIDRLLQEHAERLRLALADTRRRQNRSLLGAAEALAAGGSGRWRRRPSRRHGAASSWRSGWPG

SEQ ID NO: 67342 - protein, 180 aa, Triticum aestivum
  peptide (1)..(180): Ceres Seq. ID no. 13664064
MEPRKEMVAPSLEQQGQQQHPPLFMDFSRRDGVADGGNGRKRPRETVAPPARLFSLQAPQGSPGHKVIHLAQLHRRPAATGLRLDFDEGGSEHVACTSSTSSLLPGELAAQCGRHNNEIDRLLQEHAERLRLALADTRRRQNRSLLGAAEALAAGGSGRWRRRPSRRHGAASSWRSGWPG

SEQ ID NO: 67343 - DNA, 1735 bp, Triticum aestivum
  misc_feature (1)..(1735): Ceres Seq. ID no. 14302343
tcaatttgggctctggtgtttaatttcgttagccttcttcctccgctcgtgtcgtcgtctccaccacttcctagccacgtctctgtcttcctctccctctcgttctccatctcgttacctctctgctgccaacccgacccaaggttgttcgtcgccagcatgggtctggcgaaggatggcgccgagatggaggagggcacattggagattggcatagagtataggactgtctccggtgtggcagggccattggttattttggacaaagtaaagggcccaaagtatcaggagattgtgaacatccgattgggagatggcaccactcgtcgtggtcaagtcctcgaagttgatggtgaaaaagctgttgtgcaggtatttgaaggtacttcagggatagacaacaagtatactactgtgcagttcacaggcgaggttttgaaaactcctgtctcacttgatatgcttggacgcatttttaatggttctggaaaacctattgataatggcccccctatattgcccgaggcttacttggatatttctggaagttctatcaacccaagtgagagaacctatccagaagagatgattcanacaggaatatccaccattgatgtcatgaactcgattgctcgagggcaaaaaattcctcttttctctgctgctggacttcctcataatgaaattgctgctcaaatttgtcgtcaagctggcctcgttaaaaggttggagcaaagcaagcatgcagcagaggaaggtgaagaagacaatttcgcaattgtgtttgctgctatgggagtaaacatggaaacggcacaatttttcaagcgtgacttcgaagaaaatggttcgatggagcgggtcacacttttcctgaatttggcaaatgaccccactattgagcgtattatcactcctcgaattgccctaacgactgctgaatatttggcatatgaatgtgggaagcatgttcttgtgattctgacagatatgagctcatatgccgatgcacttcgtgaggtctcagcagcacgagaagaggtacctggtaggcgtggttatcctgggtatatgtatactgatctggccaccatatatgagcgagctgggcgtatcgagggaagaaaaggatcaattactcaaattcctattcttacaatgcctaatgatgatatcactcatccaactcctgatcttacgggatacattaccgaagggcagatatatattgacagacagcttcataatagacagatatacccacccatcaacgtcctgccatctctttctcgtctgatgaagagtgctattggtgaaggtatgacacgccgggatcattcagatgtgtccaatcagctgtatgccaactacgccattgggaaggatgttcaagccatgaaagcagttgtcggagaggaggctctttcatctgaggacctgctctatttagaattcctcgacaagtttgagaggaaatttgtagcgcaaggagcatatgatactcggaacatttttcagtcacttgatctggcatggacattgctacgcatattcccccgtgaacttctccaccgtattcctgcgaagaccttggatcagttctacagcagagatgccacccattgatccattttgttcataaaaattcatttttttcatgatgaacagcttgaataagagaagaatccaaacttgtatcattttgctacgttatatagtcagatcctattcttcc

SEQ ID NO: 67344 - protein, 541 aa, Triticum aestivum
  peptide (1)..(541): Ceres Seq. ID no. 14302344
  misc_feature (198)..(198): Xaa is any aa, unknown or other
SIWALVFNFVSLLPPLVSSSPPLPSHVSVFLSLSFSISLPLCCQPDPRLFVASMGLAKDGAEMEEGTLEIGIEYRTVSGVAGPLVILDKVKGPKYQEIVNIRLGDGTTRRGQVLEVDGEKAVVQVFEGTSGIDNKYTTVQFTGEVLKTPVSLDMLGRIFNGSGKPIDNGPPILPEAYLDISGSSINPSERTYPEEMIXTGISTIDVMNSIARGQKIPLFSAAGLPHNEIAAQICRQAGLVKRLEQSKHAAEEGEEDNFAIVFAAMGVNMETAQFFKRDFEENGSMERVTLFLNLANDPTIERIITPRIALTTAEYLAYECGKHVLVILTDMSSYADALREVSAAREEVPGRRGYPGYMYTDLATIYERAGRIEGRKGSITQIPILTMPNDDITHPTPDLTGYITEGQIYIDRQLHNRQIYPPINVLPSLSRLMKSAIGEGMTRRDHSDVSNQLYANYAIGKDVQAMKAVVGEEALSSEDLLYLEFLDKFERKFVAQGAYDTRNIFQSLDLAWTLLRIFPRELLHRIPAKTLDQFYSRDATH

SEQ ID NO: 67345 - protein, 488 aa, Triticum aestivum
  peptide (1)..(488): Ceres Seq. ID no. 14302345
  misc_feature (145)..(145): Xaa is any aa, unknown or other
MGLAKDGAEMEEGTLEIGIEYRTVSGVAGPLVILDKVKGPKYQEIVNIRLGDGTTRRGQVLEVDGEKAVVQVFEGTSGIDNKYTTVQFTGEVLKTPVSLDMLGRIFNGSGKPIDNGPPILPEAYLDISGSSINPSERTYPEEMIXTGISTIDVMNSIARGQKIPLFSAAGLPHNEIAAQICRQAGLVKRLEQSKHAAEEGEEDNFAIVFAAMGVNMETAQFFKRDFEENGSMERVTLFLNLANDPTIERIITPRIALTTAEYLAYECGKHVLVILTDMSSYADALREVSAAREEVPGRRGYPGYMYTDLATIYERAGRIEGRKGSITQIPILTMPNDDITHPTPDLTGYITEGQIYIDRQLHNRQIYPPINVLPSLSRLMKSAIGEGMTRRDHSDVSNQLYANYAIGKDVQAMKAVVGEEALSSEDLLYLEFLDKFERKFVAQGAYDTRNIFQSLDLAWTLLRIFPRELLHRIPAKTLDQFYSRDATH

SEQ ID NO: 67346 - protein, 479 aa, Triticum aestivum
  peptide (1)..(479): Ceres Seq. ID no. 14302346
  misc_feature (136)..(136): Xaa is any aa, unknown or other
MEEGTLEIGIEYRTVSGVAGPLVILDKVKGPKYQEIVNIRLGDGTTRRGQVLEVDGEKAVVQVFEGTSGIDNKYTTVQFTGEVLKTPVSLDMLGRIFNGSGKPIDNGPPILPEAYLDISGSSINPSERTYPEEMIXTGISTIDVMNSIARGQKIPLFSAAGLPHNEIAAQICRQAGLVKRLEQSKHAAEEGEEDNFAIVFAAMGVNMETAQFFKRDFEENGSMERVTLFLNLANDPTIERIITPRIALTTAEYLAYECGKHVLVILTDMSSYADALREVSAAREEVPGRRGYPGYMYTDLATIYERAGRIEGRKGSITQIPILTMPNDDITHPTPDLTGYITEGQIYIDRQLHNRQIYPPINVLPSLSRLMKSAIGEGMTRRDHSDVSNQLYANYAIGKDVQAMKAVVGEEALSSEDLLYLEFLDKFERKFVAQGAYDTRNIFQSLDLAWTLLRIFPRELLHRIPAKTLDQFYSRDATH

SEQ ID NO: 67347 - DNA, 1218 bp, Triticum aestivum
  misc_feature (1)..(1218): Ceres Seq. ID no. 14313358
acacaagcactgccttccttccctagtcattgggaaggagaagaacacacagttagatacatccatctgatctgcttagttaccgtgctctgtactcctgatcaggatggcagaagggctcttctccatggctcacccgtgggcctccgcctttggcatcctaggcaacatcatatccttcctggtgttcctcgcgcccacgccgacgttcctgcgggtgtaccggaagaagtcgacggaggggttcagcgcggtgccgtacgtggtggcgctcttcagctgcatgctgtggatcttctacgcgctggtcaagaccaactccagcccgctgctcaccatcaacgcctttggctgcgtcgtcgagggcttctacatcctgctctacgtggtgtacgcgcccaggcacgccaggcaccgcgccctcgccttcttcctcctcctcgacgtcgccgccttcgccctcatcgtcgccgtcaccgtgttcctcgtgccccagcccagccgcgtcaaggtcctcggcagcgtctgcctcgccttctccatggccgtcttcgtcgccccgctcagcgtcatcttcgtggtgatcaagaccaagagcgccgagtacatgcccttctcgctctccttcttcctcaccctcagcgccgtcgcctggttcttctatggcctcttcaccaaggacatctacgtcaccctcccgaacgtgggcgggttcttctttggggtggcccagatgacgctctacttctgctaccgcaagccggacacgtcggccctggtgctgccgacggggatccacgacgtgtccacggagccggcggcgcagcaggaggtggagctgccggagggcacccacccggcggtggccatgctgacggtgagcacgctgccgatgctggcggagctgcagaagatggagcaggagatcagctcgcccaccccgcgcaagggctacatcaaggctttctgatccgatcgagatgaccgatgcacgcacgggcgcatgcattcaggagatgaatcaatcgctaatgattggcgaaccgaccgccagcagagatacgtttatatagttcttaatttcagtcgttcgtttgtaatggtctgtactagtagcacagtcgtgtgtgtgttgtcgtccaagggtctgatataccggccggccgggcaagtaattcatctaccaatccacgtgccctgggaaataaagttataaac

SEQ ID NO: 67348 - protein, 327 aa, Triticum aestivum
  peptide (1)..(327): Ceres Seq. ID no. 14313359
TQALPSFPSHWEGEEHTVRYIHLICLVTVLCTPDQDGRRALLHGSPVGLRLWHPRQHHILPGVPRAHADVPAGVPEEVDGGVQRGAVRGGALQLHAVDLLRAGQDQLQPAAHHQRLWLRRRGLLHPALRGVRAQARQAPRPRLLPPPRRRRLRPHRRRHRVPRAPAQPRQGPRQRLPRLLHGRLRRPAQRHLRGDQDQERRVHALLALLLPHPQRRRLVLLWPLHQGHLRHPPERGRVLLWGGPDDALLLLPQAGHVGPGAADGDPRRVHGAGGAAGGGAAGGHPPGGGHADGEHAADAGGAAEDGAGDQLAHPAQGLHQGFLIRSR

SEQ ID NO: 67349 - protein, 287 aa, Triticum aestivum
  peptide (1)..(287): Ceres Seq. ID no. 14313360
MAEGLFSMAHPWASAFGILGNIISFLVFLAPTPTFLRVYRKKSTEGFSAVPYVVALFSCMLWIFYALVKTNSSPLLTINAFGCVVEGFYILLYVVYAPRHARHRALAFFLLLDVAAFALIVAVTVFLVPQPSRVKVLGSVCLAFSMAVFVAPLSVIFVVIKTKSAEYMPFSLSFFLTLSAVAWFFYGLFTKDIYVTLPNVGGFFFGVAQMTLYFCYRKPDTSALVLPTGIHDVSTEPAAQQEVELPEGTHPAVAMLTVSTLPMLAELQKMEQEISSPTPRKGYIKAF

SEQ ID NO: 67350 - protein, 280 aa, Triticum aestivum
  peptide (1)..(280): Ceres Seq. ID no. 14313361
MAHPWASAFGILGNIISFLVFLAPTPTFLRVYRKKSTEGFSAVPYVVALFSCMLWIFYALVKTNSSPLLTINAFGCVVEGFYILLYVVYAPRHARHRALAFFLLLDVAAFALIVAVTVFLVPQPSRVKVLGSVCLAFSMAVFVAPLSVIFVVIKTKSAEYMPFSLSFFLTLSAVAWFFYGLFTKDIYVTLPNVGGFFFGVAQMTLYFCYRKPDTSALVLPTGIHDVSTEPAAQQEVELPEGTHPAVAMLTVSTLPMLAELQKMEQEISSPTPRKGYIKAF

SEQ ID NO: 67351 - DNA, 1677 bp, Triticum aestivum
  misc_feature (1)..(1677): Ceres Seq. ID no. 13598075
actacaataagcggcgcctttttcgtctagcatccctcgtgtgtgtgtctccacggtcaaatcgggataaagcaacggcgacgtcatggcctcgccggcgacgccgaggccggcgctgatccggccgcgggcctcgcgcagccgctcccagttgggcgccgtcagcctcgcttccgaccacgccgccgccacggcctcctcgggccgccgccgcgacttcgtcttcgtcgtcaacccctccggcgccaatggccggacgggcaagcagtggaagcagctgctccccttcctccacacccgcctcgccgaccaatgcaacatttgcgagtgcatcacatcgggcccgtcgcacgccatagatgtcacgagggaggctataaaggacggcgctgatgctgtgatcgccgttggcggggatgggacgcttcatgaggtggtgaatggcttcttttggaaaggaagcccggtccgtgctcttgatcgagggcctgaccacttgacggcgcttggtctcatcccacttggaactggctcagactttgctaggacatttggctggtcaaatgatccccatcaggcgattgatcgaattgtgagaggagttaaatcaaaactagacattggcatgatggaaggtccaaatggagatccacatttctttataaatgttgctgatatccatctgagtgccaaggcaggttattttgcttctatgtacaagagatttggcaacttatgttatgttctgggagctttaagaggcttttggggacatagtaatcgagatttgagaataaaggtgaatggaggggaatggagaacagttgataaagtcactgctctatgcgtaggaaatgccaagtactttggaggtggcatgaagattactccaacagttgatccttttagcggtgaccttcaggttgttattatacaagatttcaagtggtacagttttcttcttaagctacataggctttatggaggcacacacttaacggtgaatggcgtgtcatcaataagagttcaatcaattgaagtggtagaggtggtgcctaacggcgacgtctttgtgcaatctgacggggagcatttcggttttcttccgaccaaattctcagttctgcctggtgcagtagatttcttcagctagatcgctgtgctgtttcttcctgttggatgttgacagacagaagatgcatgatccttggccgacttgctctgttcacctagatcacgacgttcttcctcctgttacgctagcttaagatgacgcggcaatcaggttgctccactcactcatcttctggtctgatatggtagtacggacatgaaacaaattactgctgtgcagcggcacccaccatgtatttctatgcctgcatgcagcatacagtagccgagtcgtcgatgttcatagacaagccgtagagtcacagcacagcggccatgagtgtaaatttcacaattgtttcttcagtcttgtgagtaccgtgtgcaatgatacggctgcttgttgttcgaacagctgaagtgcctgcagatccagtgtgaagttgatgcatttcccaacctccaaggtaaatgctgtcgcgaaagctctgtaacttttactctgccccctggttgagtgtactccacaagtgtgagaaaataatctagtgcttcttttggagt

SEQ ID NO: 67352 - protein, 355 aa, Triticum aestivum
  peptide (1)..(355): Ceres Seq. ID no. 15222252
MASPATPRPALIRPRASRSRSQLGAVSLASDHAAATASSGRRRDFVFVVNPSGANGRTGKQWKQLLPFLHTRLADQCNICECITSGPSHAIDVTREAIKDGADAVIAVGGDGTLHEVVNGFFWKGSPVRALDRGPDHLTALGLIPLGTGSDFARTFGWSNDPHQAIDRIVRGVKSKLDIGMMEGPNGDPHFFINVADIHLSAKAGYFASMYKRFGNLCYVLGALRGFWGHSNRDLRIKVNGGEWRTVDKVTALCVGNAKYFGGGMKITPTVDPFSGDLQVVIIQDFKWYSFLLKLHRLYGGTHLTVNGVSSIRVQSIEVVEVVPNGDVFVQSDGEHFGFLPTKFSVLPGAVDFFS

SEQ ID NO: 67353 - DNA, 1638 bp, Triticum aestivum
  misc_feature (1)..(1638): Ceres Seq. ID no. 13660029
acctagaacatcctaatcgaaaaagcaaacacttccccgtcctcgacgcaaactagcaacctcaagagaacagaccagcttcttctccaagtccagttccttctacccattggccggccgccattgagagtttgcttcctccgctccgtgtcatctctgcaggaaatccgccatcgctcgcccgggtgtactgaccatgtctgccatgcaatcatcgtatcttcctgctaccactgagtcaattgcaatggctcaggaagctaaggatgcttcagagtccattttaatcctctaccgtgtgcttgaagacccgtcttcttcttcagatgcagttagaacaaaagaagttgccattacaaatctgacaaactatctcacaaaagagaacagagccgaggagcttaggaatctgttgacccagctcaggccatttttcgcactgattcccaaggcaaagaccgcaaagattgtacgtggcatcattgatgccgtttccaagatacctggaacatctgatcttcagatctcactctgcaaggagatggtggaatggacacgggcagagaaacgtaccttcctcaggcagcgtgtggaagcaagactagcagcccttcttttggaaagtcaggagtacactgaagctcttacccttcttcctggtcttatcaaggaagtgaggaggctggatgacaggttgcttcttgttgacattgaccttctggagagcaaactccatttctctctaaggaaccttccaaaggccaaggcttctctgactgccgcaagaactgcagcgaatgccatttatgttccgccagcgcagcagggcactattgacctgcagagtggaatccttcatgccgaagagaaggattacaagaccgcctacagttacttctttgaagcgtttgaagggtttaatgcactggacgaccctaaggccatcttctgcttgaagtacatgcttctgtgcaagataatggtcaaccaagctgatgatgttgcaggagtaatctcgtctaaggcaggcctgaagtatgttggtcctgatgtggatgctatgaaagctgttgcggatgcctactcgaaacgatctctcaagtactttgaaaccgctcttggtgactacaaggcccagctggaggaggatcctattgtccacaggcacctctcgtctctgtatgataccctcctggagcagaacctgtgcaggctgattgaagcctactcaagggtggagattgcgcacgtagcagagatgatcgagctgccaatcgagcatgttgagaagaagctgtcacagatgatcctggacaagaaattcgcagggactctggatcagggtgcgggctgcctcatcatcttcgaagacgccaagacggaggcgatcttccctgctacgctcgaaacaatttcgaatgtggggaaggttgtcgagagcctttacatgaggtcagcaaagatcatggcttgaggagatgttttgttccccagttaaatcttacacttgagctctgctagagtctccaggacatgaaatgcctgtgtgttgccattatttattgcttgcaaattgtcttctgttagctctataaaatgtctatgtctgcgtgatggaaatacagttagcacttgctg

SEQ ID NO: 67354 - protein, 425 aa, Triticum aestivum
  peptide (1)..(425): Ceres Seq. ID no. 15220004
MSAMQSSYLPATTESIAMAQEAKDASESILILYRVLEDPSSSSDAVRTKEVAITNLTNYLTKENRAEELRNLLTQLRPFFALIPKAKTAKIVRGIIDAVSKIPGTSDLQISLCKEMVEWTRAEKRTFLRQRVEARLAALLLESQEYTEALTLLPGLIKEVRRLDDRLLLVDIDLLESKLHFSLRNLPKAKASLTAARTAANAIYVPPAQQGTIDLQSGILHAEEKDYKTAYSYFFEAFEGFNALDDPKAIFCLKYMLLCKIMVNQADDVAGVISSKAGLKYVGPDVDAMKAVADAYSKRSLKYFETALGDYKAQLEEDPIVHRHLSSLYDTLLEQNLCRLIEAYSRVEIAHVAEMIELPIEHVEKKLSQMILDKKFAGTLDQGAGCLIIFEDAKTEAIFPATLETISNVGKVVESLYMRSAKIMA

SEQ ID NO: 67355 - protein, 422 aa, Triticum aestivum
  peptide (1)..(422): Ceres Seq. ID no. 15220005
MQSSYLPATTESIAMAQEAKDASESILILYRVLEDPSSSSDAVRTKEVAITNLTNYLTKENRAEELRNLLTQLRPFFALIPKAKTAKIVRGIIDAVSKIPGTSDLQISLCKEMVEWTRAEKRTFLRQRVEARLAALLLESQEYTEALTLLPGLIKEVRRLDDRLLLVDIDLLESKLHFSLRNLPKAKASLTAARTAANAIYVPPAQQGTIDLQSGILHAEEKDYKTAYSYFFEAFEGFNALDDPKAIFCLKYMLLCKIMVNQADDVAGVISSKAGLKYVGPDVDAMKAVADAYSKRSLKYFETALGDYKAQLEEDPIVHRHLSSLYDTLLEQNLCRLIEAYSRVEIAHVAEMIELPIEHVEKKLSQMILDKKFAGTLDQGAGCLIIFEDAKTEAIFPATLETISNVGKVVESLYMRSAKIMA

SEQ ID NO: 67356 - protein, 408 aa, Triticum aestivum
  peptide (1)..(408): Ceres Seq. ID no. 15220006
MAQEAKDASESILILYRVLEDPSSSSDAVRTKEVAITNLTNYLTKENRAEELRNLLTQLRPFFALIPKAKTAKIVRGIIDAVSKIPGTSDLQISLCKEMVEWTRAEKRTFLRQRVEARLAALLLESQEYTEALTLLPGLIKEVRRLDDRLLLVDIDLLESKLHFSLRNLPKAKASLTAARTAANAIYVPPAQQGTIDLQSGILHAEEKDYKTAYSYFFEAFEGFNALDDPKAIFCLKYMLLCKIMVNQADDVAGVISSKAGLKYVGPDVDAMKAVADAYSKRSLKYFETALGDYKAQLEEDPIVHRHLSSLYDTLLEQNLCRLIEAYSRVEIAHVAEMIELPIEHVEKKLSQMILDKKFAGTLDQGAGCLIIFEDAKTEAIFPATLETISNVGKVVESLYMRSAKIMA

SEQ ID NO: 67357 - DNA, 1866 bp, Triticum aestivum
  misc_feature (1)..(1866): Ceres Seq. ID no. 15174867
atcagtcgacatcgccacaggttgccgctagcagcagttaatcactactcagctggcctattaactcactgatccttctgctaagctgcttgatagttcgactgcattaattccctcgcaccccaccccacgcatggctccaccgtcgcagtgcttcgacgccatgcacagcgcggccaacaatggcgccgccccggcggtggctgacgcaaagccgcagtgccccgccgtgctcgacgccgacgtgttccggcgccagggacacgaggtcatcgacttcattgccgagtactacggcggcatgggggactaccccgtgcaccccagcgtcacgcccggcttccttcgcaatgtgctccccgcggaggcgccgtcccgcccggagcccgacgcgttcggctccgcgctgcgggacgtccgcgacctcatcctcccgggcatgacgcactggcagagcccccgccacttcgcgcacttcccggcgtccagcagcaccgtcggggccctcggggaggcgctcattgccggcatcaacgtggtgcccttcacgtgggccgcctcgccggccgccaccgagctggagatggtggtcgtggactggctcggcaaggcgctgcatttgccggagagcctcctgttcgccggcggcggcgggggcacgcttctgggcacctcgtgcgaggccatactctgcgccctcgtcgccgccagggacaagaagctcgccgagatcggcgagaggaggatcggcgaccttgtcgtctactgctccgaccagacccatttcgccttccgcaaggctgcgcgcatcgccgggatcccgcgggaccactgccgcgcgatacacacgtgccgcgaagacatgttcgcgctctcgcccacggagctgcaggccgccatgcaggccgacgtggacgccgggctggtgccgctgttcctgtgcgcgaccgtcgggaccacccagacgaccgccgttgaccccatcggcaagctctgcaccgtggcggcgtcccacggcgtgtgggtccacgtcgacgcggcctacaccggctcggcgctggtctgcccggagttccggcacgtgatcgacggcgtagaggccgtggactcgttcagcatgaacgcccacaagtggctcctggccaacaacgactgctgcgcgatgtgggtgaagaggccgagcgagctcgtggcggcgctgggcacggagcaggagtacatcctcaaggacgcggcgtcgaaggggcacgacgtggtggactacaaggactggaccatgacgctgacccgccggtttcgcgcgctcaagatgtggctcgtgctccgctgctacggcgtggacggcctgcgcgaccacatccgctcccacgtgcgcatggccgaggcgttcgaggacatggtgcgggccgacgagaggttcgaggtggtgacggacaggcagttcgcgctggtgtgcttccggctccggtcgccggagaggttcggcggcgagaagacggccaacgagctcaaccggggcctgctcgaggaggtgaacgcggtcggcccgggcccgtacatgagctccgcgaacgtgggcggcgtctacatgctcaggtgcgccgtcgggagcacgctcacggaggagcaccacgtcgctgacgcatggaaggtggtccaggatcgggcctcggtaatcctccggaaaatggaaattatttacagcgtgcttggttaaagttcgggcgaggtgaatatatatgtttctctatgtaaaatctacctgcagacattacttgatcctaattaagtctcgacctcaattaggtcgtcggaaccatgcggatttgtatttgatatttatatatatgaagcaatttactggtt

SEQ ID NO: 67358 - protein, 527 aa, Triticum aestivum
  peptide (1)..(527): Ceres Seq. ID no. 15174868
MAPPSQCFDAMHSAANNGAAPAVADAKPQCPAVLDADVFRRQGHEVIDFIAEYYGGMGDYPVHPSVTPGFLRNVLPAEAPSRPEPDAFGSALRDVRDLILPGMTHWQSPRHFAHFPASSSTVGALGEALIAGINVVPFTWAASPAATELEMVVVDWLGKALHLPESLLFAGGGGGTLLGTSCEAILCALVAARDKKLAEIGERRIGDLVVYCSDQTHFAFRKAARIAGIPRDHCRAIHTCREDMFALSPTELQAAMQADVDAGLVPLFLCATVGTTQTTAVDPIGKLCTVAASHGVWVHVDAAYTGSALVCPEFRHVIDGVEAVDSFSMNAHKWLLANNDCCAMWVKRPSELVAALGTEQEYILKDAASKGHDVVDYKDWTMTLTRRFRALKMWLVLRCYGVDGLRDHIRSHVRMAEAFEDMVRADERFEVVTDRQFALVCFRLRSPERFGGEKTANELNRGLLEEVNAVGPGPYMSSANVGGVYMLRCAVGSTLTEEHHVADAWKVVQDRASVILRKMEIIYSVLG

SEQ ID NO: 67359 - protein, 517 aa, Triticum aestivum
  peptide (1)..(517): Ceres Seq. ID no. 15174869
MHSAANNGAAPAVADAKPQCPAVLDADVFRRQGHEVIDFIAEYYGGMGDYPVHPSVTPGFLRNVLPAEAPSRPEPDAFGSALRDVRDLILPGMTHWQSPRHFAHFPASSSTVGALGEALIAGINVVPFTWAASPAATELEMVVVDWLGKALHLPESLLFAGGGGGTLLGTSCEAILCALVAARDKKLAEIGERRIGDLVVYCSDQTHFAFRKAARIAGIPRDHCRAIHTCREDMFALSPTELQAAMQADVDAGLVPLFLCATVGTTQTTAVDPIGKLCTVAASHGVWVHVDAAYTGSALVCPEFRHVIDGVEAVDSFSMNAHKWLLANNDCCAMWVKRPSELVAALGTEQEYILKDAASKGHDVVDYKDWTMTLTRRFRALKMWLVLRCYGVDGLRDHIRSHVRMAEAFEDMVRADERFEVVTDRQFALVCFRLRSPERFGGEKTANELNRGLLEEVNAVGPGPYMSSANVGGVYMLRCAVGSTLTEEHHVADAWKVVQDRASVILRKMEIIYSVLG

SEQ ID NO: 67360 - protein, 471 aa, Triticum aestivum
  peptide (1)..(471): Ceres Seq. ID no. 15174870
MGDYPVHPSVTPGFLRNVLPAEAPSRPEPDAFGSALRDVRDLILPGMTHWQSPRHFAHFPASSSTVGALGEALIAGINVVPFTWAASPAATELEMVVVDWLGKALHLPESLLFAGGGGGTLLGTSCEAILCALVAARDKKLAEIGERRIGDLVVYCSDQTHFAFRKAARIAGIPRDHCRAIHTCREDMFALSPTELQAAMQADVDAGLVPLFLCATVGTTQTTAVDPIGKLCTVAASHGVWVHVDAAYTGSALVCPEFRHVIDGVEAVDSFSMNAHKWLLANNDCCAMWVKRPSELVAALGTEQEYILKDAASKGHDVVDYKDWTMTLTRRFRALKMWLVLRCYGVDGLRDHIRSHVRMAEAFEDMVRADERFEVVTDRQFALVCFRLRSPERFGGEKTANELNRGLLEEVNAVGPGPYMSSANVGGVYMLRCAVGSTLTEEHHVADAWKVVQDRASVILRKMEIIYSVLG

SEQ ID NO: 67361 - DNA, 1392 bp, Triticum aestivum
  misc_feature (1)..(1392): Ceres Seq. ID no. 14301936
cacactcagaacactagctactgtcctgccattctgctccgcgcttatcttcctcagcttcccaagtctgcctaagcatcaaacgctagcacgtccaagccgagaagttccaagcatgtggaagtttcttgcagcaacggcgctgccgatcctggtctcgctgctcgccgtgcgcgcgcgcggcgtcgacgactacacggcgttcgtgtacgccgggtgctcgcaggcgcgctacgacgccggcacccagtacgccgcggacgtcgacaccgtgctctcgaccctcaccgacaccgcggcctccaccccctacgccaactacacccccccgtccggcgccgccacgggcctagtcggcctctaccagtgccgctccgacctcccggccgccgtctgcggcgtctgcgtgaaggcgtccgcctccaagctctcctccctctgcaactcggccgccggcggcgcggtgcagctgcgcgcgtgcttcgtccgctacggcaacgactcgttcctcgggaagccggacaacacggtgctgttcaagaagtgcggcggcgagagcggggacgccggcgtcgcggcgctgcgcgacgcggcgctcggagcgctccaggccgcgtcgtcccccgcggccggcggctcgtaccgcgcaggcgcggccgggtacgtgcaggccatgtcgcagtgcgtgggggacctcggcgccaaggcctgcaccgactgcgtctccgtcgccgcctcgcagctcaaggccggctgcggcgacgcctccgccggggaggtctacctcggcaagtgctacgcgcgcttctggtccaatgccggcaccggcaccggcgggaccacccccggaggaggcaacgtcatcggcggcggtaacgccggccccatcggtgacggcggcaatggcatcgctggcggaggcaatggcatcgccggcggcggcaccgtcggcgtcccgggcgcaggcagcggatacggatacgggttcgtgccgcgtccgtacggcgacgtccaagatggttccgggaagaccctcgccatcatcatcggcatcgtggcggcggcggccatcatcatcatcttcctctccttcgtccgaagagcccgcgccgccaatggcaaaagctaagctaagggttgcagcagggatggtcgccactcgccactattagctcagatttggatcggtcggtggcttttggcttcggcgttgctttagtatctctccttttatcttttatggtctcttttgccgtgccagaaaaacaaagggaggccatgccgccactgtgccgaagtagggaactgaagattccagctgcatgctactagccactaaggaaaatattactacgcaagaataagaagatatatatttgttgaagtgaccac

SEQ ID NO: 67362 - protein, 375 aa, Triticum aestivum
  peptide (1)..(375): Ceres Seq. ID no. 14301937
TLRTLATVLPFCSALIFLSFPSLPKHQTLARPSREVPSMWKFLAATALPILVSLLAVRARGVDDYTAFVYAGCSQARYDAGTQYAADVDTVLSTLTDTAASTPYANYTPPSGAATGLVGLYQCRSDLPAAVCGVCVKASASKLSSLCNSAAGGAVQLRACFVRYGNDSFLGKPDNTVLFKKCGGESGDAGVAALRDAALGALQAASSPAAGGSYRAGAAGYVQAMSQCVGDLGAKACTDCVSVAASQLKAGCGDASAGEVYLGKCYARFWSNAGTGTGGTTPGGGNVIGGGNAGPIGDGGNGIAGGGNGIAGGGTVGVPGAGSGYGYGFVPRPYGDVQDGSGKTLAIIIGIVAAAAIIIIFLSFVRRARAANGKS

SEQ ID NO: 67363 - protein, 337 aa, Triticum aestivum
  peptide (1)..(337): Ceres Seq. ID no. 14301938
MWKFLAATALPILVSLLAVRARGVDDYTAFVYAGCSQARYDAGTQYAADVDTVLSTLTDTAASTPYANYTPPSGAATGLVGLYQCRSDLPAAVCGVCVKASASKLSSLCNSAAGGAVQLRACFVRYGNDSFLGKPDNTVLFKKCGGESGDAGVAALRDAALGALQAASSPAAGGSYRAGAAGYVQAMSQCVGDLGAKACTDCVSVAASQLKAGCGDASAGEVYLGKCYARFWSNAGTGTGGTTPGGGNVIGGGNAGPIGDGGNGIAGGGNGIAGGGTVGVPGAGSGYGYGFVPRPYGDVQDGSGKTLAIIIGIVAAAAIIIIFLSFVRRARAANGKS

SEQ ID NO: 67364 - DNA, 901 bp, Triticum aestivum
  misc_feature (1)..(901): Ceres Seq. ID no. 12627162
aaccgcaaagcgaggcaatccatcctcctctccggcggccgcgcgagagagagcgatctccggccacgagaggcgggcgggaccacgagagcctccgccgcccaccaaagccgcggagaaccgcaccggacgccttgtatctccgcccattctcaaaggtcttgaaacatggtggccatgtcaacgcttgccgctggatcgttgccgggaactgtggtccccaatggtcttctaacaaggaggtttcaaggctcacaatttcagacaactcaagttaaccgcatctcatttgagcgggaagtttctactaaagcaacactgaggagtgtaaaatgcagtgctcaaacccaaagtgttcagcgcaaatcttcaaccgcgactgtcaaacgatctgaccccaaaggaaaggttcaaggacctaagttggacgatggaagcggtgggttccctccgttccgtttcggcaaaggaggcggcggaggtggaggcggtgggggtggtagcagctactttggcgggttcctcctcttcacnatcgtgctgctcctggattacctcaaggagtttgagaagtacctgctcgctcgaaagcatcgtgccggagacgacgatgacgcgggctatgacacgagcggtgggatgctaggacaatcaccatgatgagtcttgttagcagtagtcgtccctagctactagaagtgcatcagtcagttaactggctttggttacgttacataaccttatcttggaaaattcatgcctatgcagagctcaaaatatttataggattgtgtggtgagatgcttaaacttgatgccatctggctgttgtgccgaagtatgaagaaattccatctatgtacaacaaaggttttgctactagaaatttccatgtctggatc

SEQ ID NO: 67365 - protein, 163 aa, Triticum aestivum
  peptide (1)..(163): Ceres Seq. ID no. 12627163
  misc_feature (122)..(122): Xaa is any aa, unknown or other
MVAMSTLAAGSLPGTVVPNGLLTRRFQGSQFQTTQVNRISFEREVSTKATLRSVKCSAQTQSVQRKSSTATVKRSDPKGKVQGPKLDDGSGGFPPFRFGKGGGGGGGGGGGSSYFGGFLLFXIVLLLDYLKEFEKYLLARKHRAGDDDDAGYDTSGGMLGQSP

SEQ ID NO: 67366 - protein, 160 aa, Triticum aestivum
  peptide (1)..(160): Ceres Seq. ID no. 12627164
  misc_feature (119)..(119): Xaa is any aa, unknown or other
MSTLAAGSLPGTVVPNGLLTRRFQGSQFQTTQVNRISFEREVSTKATLRSVKCSAQTQSVQRKSSTATVKRSDPKGKVQGPKLDDGSGGFPPFRFGKGGGGGGGGGGGSSYFGGFLLFXIVLLLDYLKEFEKYLLARKHRAGDDDDAGYDTSGGMLGQSP

SEQ ID NO: 67367 - protein, 91 aa, Triticum aestivum
  peptide (1)..(91): Ceres Seq. ID no. 12627165
PQSEAIHPPLRRPRERERSPATRGGRDHESLRRPPKPRRTAPDALYLRPFSKVLKHGGHVNACRWIVAGNCGPQWSSNKEVSRLTISDNSS

SEQ ID NO: 67368 - DNA, 1853 bp, Triticum aestivum
  misc_feature (1)..(1853): Ceres Seq. ID no. 13598695
atgagccagggtggcaatggcatgcctaacttaattcctgtttgattccctcctgctgcttattagttagctgccaaattgcctccaaaatatagctcgctggcaaatatggaacgcatgcatgtaattaacatggttgatttgtctatgcaatgtggatactcctatatggagtagtacgctactgcacacccgtatttggaagcattttacttcctcattgattaggatatatctcgcttgattaactccttgtttatgtgtagctatataggtgcgtcactcccttgctatgcgctcgttaaatatacgtcgtccagggattttcctatcgatcggctcgatcttgcttccactactcgatccattgaaacgatggtgaagacgagggccggtgccgtccggccgtgggcgcttctcgctcttgctctcctcctcatcgccggcagctgcgtggaggcggcggacgagcaggcggcgaacggcggtggcaggaggaggaggacgcatcgacgttccgcggcggcggtcgcggacatgatggtgcccatcaccttcctcaacgcctccgtcgagaagggcgccgtgtgtatggatgggacgccggccgcttacgacctggacccgggctccggggcagggagcaagagctggatcgtcaacctcgagggaggcgggtggtgcaacaacgcgaggacgtgcaggttccggacaaggactcaccatggctcctccaacttcatggagcggcagatcgccttcaccggcatcatgagcgccagccccgccgagaatcctgatttctacaactggaaccgggtgaagatccgctactgcgacagcgcctccttcgccggcgacaccttcgacaagggtaccgggctctacttccgggggcagcggatttgggaggaagccatccagcacctcctctccatcgggatggcgtcggccgaccgggcgcttctcacgggctgctccgccggtgggctggcggcgatactccactgcgaccagttcggcgccttcttcgccggccgaagcaccaccgtcaagtgcctcgccgacgcaggcctcttcctcgacgccgttgatgtttccgggggccgcagcttgagatcttactacggcgacattgtagccatgcagggagtggctccaaaccttccgcccacctgcaccgatcacctcgacgccacctcgtgcttcttccctcagaatataatcgacagcatcaagacccccatcttcttgctcaacgcagcctacgacgtctggcagattgaggaaagcctggccccaagcaaagccgaccccagccgcgcctggcgagcctgcaagttcaaccgctcggcctgcaacgcgtctcagataaacttcctgcaaggtttcagagatcagatggtggcatccgtgagaggcttctccggttccaagagcaacgggctcttcataaactcgtgtttcgcccactgccagtccgaactgccggccacctggaatggcacccctgccattcagaacaagaggatcgcgaaatctgtcggcgattggtactttggccgggccgaagtgaaggcgatcgattgcccatacccttgcgacaacacatgccgcaacatcatataagaagatcttgcaagcaagggccgattcgaacctcatgattaggatttagaactcgaggcaagtatttgttagtttttcataaagacttcacttcaggccggatatatgtctttgtgtatgatgtaattatgaaggtctcctcagaataaacttgttaaatgtaaaaaaaaaaaaaaaaaagcttatcgataccgtcgacctcgagggggggcccggtacccaat

SEQ ID NO: 67369 - protein, 456 aa, Triticum aestivum
  peptide (1)..(456): Ceres Seq. ID no. 15222399
MCSYIGASLPCYALVKYTSSRDFPIDRLDLASTTRSIETMVKTRAGAVRPWALLALALLLIAGSCVEAADEQAANGGGRRRRTHRRSAAAVADMMVPITFLNASVEKGAVCMDGTPAAYDLDPGSGAGSKSWIVNLEGGGWCNNARTCRFRTRTHHGSSNFMERQIAFTGIMSASPAENPDFYNWNRVKIRYCDSASFAGDTFDKGTGLYFRGQRIWEEAIQHLLSIGMASADRALLTGCSAGGLAAILHCDQFGAFFAGRSTTVKCLADAGLFLDAVDVSGGRSLRSYYGDIVAMQGVAPNLPPTCTDHLDATSCFFPQNIIDSIKTPIFLLNAAYDVWQIEESLAPSKADPSRAWRACKFNRSACNASQINFLQGFRDQMVASVRGFSGSKSNGLFINSCFAHCQSELPATWNGTPAIQNKRIAKSVGDWYFGRAEVKAIDCPYPCDNTCRNII

SEQ ID NO: 67370 - protein, 417 aa, Triticum aestivum
  peptide (1)..(417): Ceres Seq. ID no. 15222400
MVKTRAGAVRPWALLALALLLIAGSCVEAADEQAANGGGRRRRTHRRSAAAVADMMVPITFLNASVEKGAVCMDGTPAAYDLDPGSGAGSKSWIVNLEGGGWCNNARTCRFRTRTHHGSSNFMERQIAFTGIMSASPAENPDFYNWNRVKIRYCDSASFAGDTFDKGTGLYFRGQRIWEEAIQHLLSIGMASADRALLTGCSAGGLAAILHCDQFGAFFAGRSTTVKCLADAGLFLDAVDVSGGRSLRSYYGDIVAMQGVAPNLPPTCTDHLDATSCFFPQNIIDSIKTPIFLLNAAYDVWQIEESLAPSKADPSRAWRACKFNRSACNASQINFLQGFRDQMVASVRGFSGSKSNGLFINSCFAHCQSELPATWNGTPAIQNKRIAKSVGDWYFGRAEVKAIDCPYPCDNTCRNII

SEQ ID NO: 67371 - protein, 363 aa, Triticum aestivum
  peptide (1)..(363): Ceres Seq. ID no. 15222401
MMVPITFLNASVEKGAVCMDGTPAAYDLDPGSGAGSKSWIVNLEGGGWCNNARTCRFRTRTHHGSSNFMERQIAFTGIMSASPAENPDFYNWNRVKIRYCDSASFAGDTFDKGTGLYFRGQRIWEEAIQHLLSIGMASADRALLTGCSAGGLAAILHCDQFGAFFAGRSTTVKCLADAGLFLDAVDVSGGRSLRSYYGDIVAMQGVAPNLPPTCTDHLDATSCFFPQNIIDSIKTPIFLLNAAYDVWQIEESLAPSKADPSRAWRACKFNRSACNASQINFLQGFRDQMVASVRGFSGSKSNGLFINSCFAHCQSELPATWNGTPAIQNKRIAKSVGDWYFGRAEVKAIDCPYPCDNTCRNII

SEQ ID NO: 67372 - DNA, 838 bp, Triticum aestivum
  misc_feature (1)..(838): Ceres Seq. ID no. 13660639
atagccgcccgcgccactagtccactagagtagaacagagtgccgagccaacttcgcccaagagccaagaagcttccgagctccctcagttcccccacgagaaacacccttccgctgaagatcaagctgcagcggcgagcgatggctctagcccggaggttcctgttcctcttccctgccgccgtcctgacatggctcgcctcggcctccgcgtcgccctttctgtcggacagagtattccaggccagcaccggatccacgtgaggagcttgctgcagaccaagagggactgccctatagactttgagtaccagaactacacaatcatcacaagcaggtgcaaagggccacaatcgccccctacggaatgttgtgatgctttcaagaaatttgcatgcccatttgccgtgtacatcaacaaccagagcactaactgtgcagacacaatgttaacctacatcaacggccgtggctcatacccagcaggaatgttcgctgccgagtgcctaaaaggcaagcaaggggtttcttgcgaaggcatcccagggatagacaccggcgtgccaagcggcgggcgacgagctcacgggatttcaggtcgtttgatcgctctcttgtgtggactaggaggattgctgttccattgagtgataccttgcacttctccaaagatggaatgtttgtcggttggaagttgtaagtagtaaggctcatttgcttctccttgacgctctcttggtgtagtgactggacaattggcttttccaagcgatatctcttcagaaactccttaatacttgactaacacctcttaaaaatgcatttggttactattccg

SEQ ID NO: 67373 - protein, 151 aa, Triticum aestivum
  peptide (1)..(151): Ceres Seq. ID no. 13660640
MARLGLRVALSVGQSIPGQHRIHVRSLLQTKRDCPIDFEYQNYTIITSRCKGPQSPPTECCDAFKKFACPFAVYINNQSTNCADTMLTYINGRGSYPAGMFAAECLKGKQGVSCEGIPGIDTGVPSGGRRAHGISGRLIALLCGLGGLLFH

SEQ ID NO: 67374 - DNA, 1088 bp, Triticum aestivum
  misc_feature (1)..(1088): Ceres Seq. ID no. 15169533
ataacaaaacatggctcccctgactcccagacttgtggtgcccatagatgtgaagaagaagccatgggagcagaaggttcgtctccataaccgctggcatccggatatccctcctgttgctgatgtaactgaaggggaattattccgtgttgagatggtcgattggactggaggacgggttagagatgatgactctgcagatgatatcaaatttctggacctcaaaattattcaagaagggactgctgaatggcaaaaaattgcaaatgaagcagcaagaactattcctggaagagagaatggggggaattgtgacataaagaatctaagcagaggttccaaagtttatctaccagtatttgttgacggagcaaatctgagtactggcgatatgcacttttcccaaggtgatggtgaagtgtcattttgcggagcaatagaaatgagtggattccttgagctaaagtgtgagatcataagaggtgggatgaaggaatacttgactcctgttggtccaacagcacttcatgtgaatcctatctttgagataggtccagtggagccacgtttctcagaatggttagtctttgagggcatcagtgtagatgagtcggggaaacagcatttccttgatgcatcagttgcatacaagcgtgcagttctcaatgccattgagtatctttccagatttgggtactccaaggagcaggtctatcttttactgtcatgctgtccatgtgagggtaggatatctggaatagtagacgcccctaatgcagtggcgacacttgcgatccctacagcaatattcgaccaggatataaagccaaaacgcctggggcatggaccgaaattgagaagacttccggatgttctgagatgaaggtgcagtagacaccttcctgtaacacaggaccaatatcatgtttagaatatctaacaataaatctaaataatcatctttagtattccacaaccatctatgtttgtgcaacacgaatgtggacgtgttgttgtaatatggggtttcttgtttctcgatacttgataatttatatatcagacaatcgacgtatatgaaggcaccc

SEQ ID NO: 67375 - protein, 290 aa, Triticum aestivum
  peptide (1)..(290): Ceres Seq. ID no. 15169534
MAPLTPRLVVPIDVKKKPWEQKVRLHNRWHPDIPPVADVTEGELFRVEMVDWTGGRVRDDDSADDIKFLDLKIIQEGTAEWQKIANEAARTIPGRENGGNCDIKNLSRGSKVYLPVFVDGANLSTGDMHFSQGDGEVSFCGAIEMSGFLELKCEIIRGGMKEYLTPVGPTALHVNPIFEIGPVEPRFSEWLVFEGISVDESGKQHFLDASVAYKRAVLNAIEYLSRFGYSKEQVYLLLSCCPCEGRISGIVDAPNAVATLAIPTAIFDQDIKPKRLGHGPKLRRLPDVLR

SEQ ID NO: 67376 - protein, 242 aa, Triticum aestivum
  peptide (1)..(242): Ceres Seq. ID no. 15169535
MVDWTGGRVRDDDSADDIKFLDLKIIQEGTAEWQKIANEAARTIPGRENGGNCDIKNLSRGSKVYLPVFVDGANLSTGDMHFSQGDGEVSFCGAIEMSGFLELKCEIIRGGMKEYLTPVGPTALHVNPIFEIGPVEPRFSEWLVFEGISVDESGKQHFLDASVAYKRAVLNAIEYLSRFGYSKEQVYLLLSCCPCEGRISGIVDAPNAVATLAIPTAIFDQDIKPKRLGHGPKLRRLPDVLR

SEQ ID NO: 67377 - protein, 163 aa, Triticum aestivum
  peptide (1)..(163): Ceres Seq. ID no. 15169536
MHFSQGDGEVSFCGAIEMSGFLELKCEIIRGGMKEYLTPVGPTALHVNPIFEIGPVEPRFSEWLVFEGISVDESGKQHFLDASVAYKRAVLNAIEYLSRFGYSKEQVYLLLSCCPCEGRISGIVDAPNAVATLAIPTAIFDQDIKPKRLGHGPKLRRLPDVLR

SEQ ID NO: 67378 - DNA, 843 bp, Triticum aestivum
  misc_feature (1)..(843): Ceres Seq. ID no. 13545965
atcgaccatctccggctcgctcgtcgcccacccccaccctctcatcctccctccctcccccgaccgattttgacgactcctttgacctctcgcgctgtccctcccccgccccgccccgcctgcgtcgccgcgccaagctccaggcgcccccgccccctggtcggtggattccatggccaacagcaacctcccccgccggatcatcaaggagacgcagcggctgctcagcgaaccagcgccggggatcagcgcctcgccgtcggaggagaacatgcgctacttcaatgtcatggtccttggccccgcgcagtcgccctacgaaggtggagtcttcaagcttgaacttttcttacccgaggaatatccgatggctgctcctaaagttaggtttctcacaaaaatataccatcccaacattgacaagcttggtagaatatgcctcgacatcctaaaggacaagtggagtccagctcttcagatacgcactgttcttcttagcattcaggcactgctgagcgccccaaacccagatgatcccctctcagaaaacgtcgcaaaacactggaaatccaatgaagctgaagctgttgagacagcgaaggaatggactcgtatgtatgccagtggcgcatgacaagctaacgctgttatggatgtaataacaccgtgtcatagttgggcctaatcgaaaaccatttgcttgataaaaacacacttgaaatgatttgcgatggacgaatgtatccagagtggcatcatttctagttggtggttgtatttgtggtgcgtgttctggcacgcttcataacttgctgcttatagaacatgctctgtttctcgttc

SEQ ID NO: 67379 - protein, 153 aa, Triticum aestivum
  peptide (1)..(153): Ceres Seq. ID no. 13545966
MANSNLPRRIIKETQRLLSEPAPGISASPSEENMRYFNVMVLGPAQSPYEGGVFKLELFLPEEYPMAAPKVRFLTKIYHPNIDKLGRICLDILKDKWSPALQIRTVLLSIQALLSAPNPDDPLSENVAKHWKSNEAEAVETAKEWTRMYASGA

SEQ ID NO: 67380 - protein, 149 aa, Triticum aestivum
  peptide (1)..(149): Ceres Seq. ID no. 13545967
RPSPARSSPTPTLSSSLPPPTDFDDSFDLSRCPSPAPPRLRRRAKLQAPPPPGRWIPWPTATSPAGSSRRRSGCSANQRRGSAPRRRRRTCATSMSWSLAPRSRPTKVESSSLNFSYPRNIRWLLLKLGFSQKYTIPTLTSLVEYASTS

SEQ ID NO: 67381 - protein, 120 aa, Triticum aestivum
  peptide (1)..(120): Ceres Seq. ID no. 13545968
MRYFNVMVLGPAQSPYEGGVFKLELFLPEEYPMAAPKVRFLTKIYHPNIDKLGRICLDILKDKWSPALQIRTVLLSIQALLSAPNPDDPLSENVAKHWKSNEAEAVETAKEWTRMYASGA

SEQ ID NO: 67382 - DNA, 1478 bp, Triticum aestivum
  misc_feature (1)..(1478): Ceres Seq. ID no. 15178724
ccatcgaggcggccacgagaactgggtgacgaacaaagcccctgcagctcgtctctcgtcttctccgccgccatggcctccgacctcgggcaaccgtcgccggcgaaacgcccgccgacggcgcccaccacgattaccgctatcggcgaagacctcctttgcgagatcttcctcctccttccctccctcccgagcctcgtccgcgccgccctcgcctgccgcaccttcctccacgccgtccgttcgtcccccgccttccgccgccgattccgggcactccacccgccgcagatccttggcttcttttgcgacccgggccgcgaagccgtccctcccttcgtccccctccgcagccgctccgacccggacatcgccgccgccgtccgcggcgccgatttcctcctcacccggatcccagaagacagcggcgattccaccctcgggtgggagctgcagagcttccacggcggctacgtcgtcctcgtcaacaacgccaccgaccagatcgctgcctacaaccccctcacgcaggcactgcatctcatcccccacccacccgaagatatcatcttctccatctcccctgagttccacatcctcttgtcggaagaggaccagagggtgttccgtatggtctgtgtccaacaccaggacacgccgagcctcgccgtcttctcaaccgcgaccagggagtggcaggttttgccgtgggtggagaccccgccacaacctgaaggcgacatccgcttgttctaccatggcacgcagctgaatggatttgtttactggaaacacgcgagccaagcctatgtgctcgctctcaacaccgcgacaatgcaattctctagagtgaacttgccgcatttcttggcagagatagatcatatgctgtttaggcttggtcagaccaaggatgggaagctctgtatggttgcagcagatgactctgacccaaagataggaacgcttgttgttcgtgtctggggagccgatgatgacggtgttgagaagtggatgctggaagatactttttcactgagtaaatttgttgatgtcaccaagtcttcaacagagtatgataccacggtgcagattgaggcattcgtcgatggctttctgtacctctgtattaagtatggtgagcataccgagtctctggtatccctctgcctggaaacaggaaagctaaacaagatatttgatgatacatatacaagccctgctcatccctacatcatgtcatggcctccttctttggtttgcaacaaggaggattcacaaaccaagattactggaggcagtgttgaggacgctggttctgtgggcacaaaagaaactccctctgttttagtcacagcgccacaatcgcacaaaattgattgatgacgatgaagccaaagtcatggagatagagttttttttactttgtattggggatgataaaaactcagcaagcaaaatcactgcatatgcataac

SEQ ID NO: 67383 - protein, 460 aa, Triticum aestivum
  peptide (1)..(460): Ceres Seq. ID no. 15178725
PSRRPRELGDEQSPCSSSLVFSAAMASDLGQPSPAKRPPTAPTTITAIGEDLLCEIFLLLPSLPSLVRAALACRTFLHAVRSSPAFRRRFRALHPPQILGFFCDPGREAVPPFVPLRSRSDPDIAAAVRGADFLLTRIPEDSGDSTLGWELQSFHGGYVVLVNNATDQIAAYNPLTQALHLIPHPPEDIIFSISPEFHILLSEEDQRVFRMVCVQHQDTPSLAVFSTATREWQVLPWVETPPQPEGDIRLFYHGTQLNGFVYWKHASQAYVLALNTATMQFSRVNLPHFLAEIDHMLFRLGQTKDGKLCMVAADDSDPKIGTLVVRVWGADDDGVEKWMLEDTFSLSKFVDVTKSSTEYDTTVQIEAFVDGFLYLCIKYGEHTESLVSLCLETGKLNKIFDDTYTSPAHPYIMSWPPSLVCNKEDSQTKITGGSVEDAGSVGTKETPSVLVTAPQSHKID

SEQ ID NO: 67384 - protein, 436 aa, Triticum aestivum
  peptide (1)..(436): Ceres Seq. ID no. 15178726
MASDLGQPSPAKRPPTAPTTITAIGEDLLCEIFLLLPSLPSLVRAALACRTFLHAVRSSPAFRRRFRALHPPQILGFFCDPGREAVPPFVPLRSRSDPDIAAAVRGADFLLTRIPEDSGDSTLGWELQSFHGGYVVLVNNATDQIAAYNPLTQALHLIPHPPEDIIFSISPEFHILLSEEDQRVFRMVCVQHQDTPSLAVFSTATREWQVLPWVETPPQPEGDIRLFYHGTQLNGFVYWKHASQAYVLALNTATMQFSRVNLPHFLAEIDHMLFRLGQTKDGKLCMVAADDSDPKIGTLVVRVWGADDDGVEKWMLEDTFSLSKFVDVTKSSTEYDTTVQIEAFVDGFLYLCIKYGEHTESLVSLCLETGKLNKIFDDTYTSPAHPYIMSWPPSLVCNKEDSQTKITGGSVEDAGSVGTKETPSVLVTAPQSHKID

SEQ ID NO: 67385 - protein, 256 aa, Triticum aestivum
  peptide (1)..(256): Ceres Seq. ID no. 15178727
HRGGHENWVTNKAPAARLSSSPPPWPPTSGNRRRRNARRRRPPRLPLSAKTSFARSSSSFPPSRASSAPPSPAAPSSTPSVRPPPSAADSGHSTRRRSLASFATRAAKPSLPSSPSAAAPTRTSPPPSAAPISSSPGSQKTAAIPPSGGSCRASTAATSSSSTTPPTRSLPTTPSRRHCISSPTHPKISSSPSPLSSTSSCRKRTRGCSVWSVSNTRTRRASPSSQPRPGSGRFCRGWRPRHNLKATSACSTMARS

SEQ ID NO: 67386 - DNA, 2010 bp, Triticum aestivum
  misc_feature (1)..(2010): Ceres Seq. ID no. 14301836
aacttttttcccctcgtcgtccccacttttttttctcccactccgcccccgattctccccaatcccctctcgccgccgccaggaggcagcaccggaatcgcggcgaccgaagatcccctccgacccacgccaaggaatcccgccgatccgctcgcgcctcccggatggccctgcaccagcaccacgcggggtcggcgtccgggtcggcgtcggcgtccagctccagttcggggctgcacctgcccgcctcgcccttcggggacaccacccacaccaagctcttcgtcgggggcctcgcctgggagaccaccagcgagaggctccgccgcttctacgagcgcttcggggacatcctcgaggccgtcgtcatcaccgaccgccactccggccgctccaaaggatacggcttcgtgacgttccgcgatgccgaggcggccaccaaggcctgcgaggaaccgtcgccggtcatcgatggcaggcgggccaactgtaacctggcgtcgctaggtcgcgcccagccttccacacccctcgggcggccacgatcagctggctcctactttggtgttcctgtcccaaggggcatttatgtaggtggttatggtcagcaccgaccccttccgcttgggtactaccagtaccagggatttccggttccacaatacagttactccgcatatggcaccgactacatctatccacagggtacattaaacccatatgttggtcagcaatatgttccagtttacggtgtctcagctgcagcaaatactgctaaccaaccatttagccaattgagcccatccatttctggtgggggcaacggctatccgatgatgcatggttacagtatgccaggaaatcaatttgtgcatctcactgggtcaaacttaattaattcatccccaacaaatcgtcccaccattcaggctccctttttagtagcagcaccggttccctcccatccacacttagttgtaccagcccactcacctcagtttacacaagctagtggttcagactaaagagcaagctgaactatgcacccaacaatttataccttgaggtaactttagtttgcagcaggactaaaagaacagtgctgctgtatttgcagcacttgttcttacctggaaaaaaatcatccttgtattcataaggttgtccttatcatggttgacatatgtacctggagatcatgaactgtcccgatggatggggcggtatcgcaagagcgacggctgctcttatcagtttggcttggttaaaatcctgtcctggtgggggactgtgatcgtcgatgtctagatacagcattattgattctgtatctgacaagtcatggatatatggtggatgctggaatggagtccagcaccctgtaagtttgactaatccaaggggattagtcatgatggcactcttaagaatcagggatgagtcacgatttgatggcactgagatgagtatccatctgaagagtcgccaagttagtgtgctttagtgtcgcaaagtttgagtcttgcacaagcaaaagtcagtgtcatgatctatcactctggtttggcactaggcctattgatagccacattatggatttacaatgctccgcttgaccgtaagcaggatgttcagtttgcccaaagggtggccggagatggtcctgcgtctgtaccaatttccccttagagcttctctgcgttattacacaattattgatcagatcaaggtgcattttgatccgtgttacagttggtgtcggttcaagaaccactgttgttttgtaatatgtcccagaagttctaatttagattcatgatgccctgagcttggtagctccaagatcggagtcttgttgtacttgaataataataaatccatctgctctgagtccagtgattgggtgcctgtcataatggattttcatgaacttggtggcatgaaaagatgtactgttggtacaattgagctgtgtgttaactcaagaaaaatagtttgtgaacaatgttc

SEQ ID NO: 67387 - protein, 340 aa, Triticum aestivum
  peptide (1)..(340): Ceres Seq. ID no. 14301837
LFSPRRPHFFFSHSAPDSPQSPLAAARRQHRNRGDRRSPPTHAKESRRSARASRMALHQHHAGSASGSASASSSSSGLHLPASPFGDTTHTKLFVGGLAWETTSERLRRFYERFGDILEAVVITDRHSGRSKGYGFVTFRDAEAATKACEEPSPVIDGRRANCNLASLGRAQPSTPLGRPRSAGSYFGVPVPRGIYVGGYGQHRPLPLGYYQYQGFPVPQYSYSAYGTDYIYPQGTLNPYVGQQYVPVYGVSAAANTANQPFSQLSPSISGGGNGYPMMHGYSMPGNQFVHLTGSNLINSSPTNRPTIQAPFLVAAPVPSHPHLVVPAHSPQFTQASGSD

SEQ ID NO: 67388 - protein, 286 aa, Triticum aestivum
  peptide (1)..(286): Ceres Seq. ID no. 14301838
MALHQHHAGSASGSASASSSSSGLHLPASPFGDTTHTKLFVGGLAWETTSERLRRFYERFGDILEAVVITDRHSGRSKGYGFVTFRDAEAATKACEEPSPVIDGRRANCNLASLGRAQPSTPLGRPRSAGSYFGVPVPRGIYVGGYGQHRPLPLGYYQYQGFPVPQYSYSAYGTDYIYPQGTLNPYVGQQYVPVYGVSAAANTANQPFSQLSPSISGGGNGYPMMHGYSMPGNQFVHLTGSNLINSSPTNRPTIQAPFLVAAPVPSHPHLVVPAHSPQFTQASGSD

SEQ ID NO: 67389 - DNA, 2424 bp, Triticum aestivum
  misc_feature (1)..(2424): Ceres Seq. ID no. 13660025
attacctagaacatcctaatcgaaaagtgaagcccgtttgaagctccctccagagcatgtccactgagactttttagagaaagaagaagagtcaactcaacgctgaacggcagcgagcatactctctgctcatcacaagcttagcttccacttctggctgcttgtctactgtcgccaattcctcatgccatgctccacctgcacgcgagtctctcccacggcgatctccgccacctcttcctcctcccggacagtgctccgcatactccccttccgctccccgcgcgggccgtatggacgcgggctctgccttcctggctccataaggtgcactgcggaggtcgttgacgcggcaatgcacgcgcccaagccgccggagcccaagccgcgcgtcctggtcgccggcggggggatcggcggcctcaccttcgcgctcgcggccaggcggaagggcttccaggtgctcgtgctggaaaaggacatgagcgmcgtccgcggggagggcaagtaccggggccccatccagctgcagagcaacgcgctcgccgtcctcgaggccgtcgacatgcccgccgcggaccagatcatggacgccggatgcatcaccggcgaccgcgtcaacgggatcgtcgacggcatctccggctcctggtacatcaagtttgataccttcactcctgctgctgacagagggctcccggtcacaagggtcattagccgcatgacgctgcagcagattcttgcccgtgcagtcggcgacgacgctataatgaacgattgccacgttgtcgactttactgataatggcaacaaggtcaccgcgatattggaggatgggcggaaatttgaaggtgatctcttggttggagcagatggcatatggtcaaaggtgaggaagtcgctttttggcgaaacggatgcatcttattcagaatacacttgctacaccggaattgcagactttgtgcctcctgatattgacacagtcgggtaccgagtgtttcttggtcacaaacaatatttcgtctcctcagacgttggtggtggtaaaatgcagtggtatgcatttcacaaggaacctgctggtggtacttatcctgagaatggcaaaaagaaaagactgctcgagatatttagcggttggtgtgataatgtcattgatctgctaaatgcaactgaggaggaagcaattcttcgccgggatatatacgatcggccacctactatcaactgggggaaaggtcgtgtcaccttgcttggtgactctgtccatgctatgcagccaaatctgggacagggtggctgcatggctattgaggatggttaccagctggctgtagagcttgagaaggcctgggaagagagtgtcaagtctagaactcctgtggacgttatttcctccttgaggagttatgagaaggagagaaagctacgtgttgctatcatacatggattggcaagaatggcggcaatcatggctaccacttacagaccatatctaggtgtgggtctgggacctttgtcgtttttgacaaagttgaggataccgcatcctggaagagttggtggcagatttttcatcaaggttggaatgcctttgatgctgagctggattttaggtggcaacagctcaaagctagaaggaagaccgttaagttgccggctttctgacaaggcaagcaaccagcttggtcgatggtttcaggatgacgatgcattggaacaagctatgggtggagagtggtacctcttccctatgagctctggagatgactctgccttgcagcccattcgtttgatcagggatgaacagaggacactctctattggaagcaaaccagatccgagcaattctgattcttcgttgtcgttccccttgccacaagtatcagagatccatgctactatcacatgcaagaataagggtttctatttgaccgatctcggaagcgagcatggtacatggtttaacgacaacgaaggcagacgctaccggttacctccgaacttcccagttcgtttccacccttctgatgccattgagtttggttcagataagaaggccatgttccgggtgaaagtgctcagcacgcttccatacgactccgcgagaggtggagaagttctgcaggcagcatgagtggggacttcagcgacaccttgtcaccagccactgtacagcattcttcagtaaacagccgacactgcatcatcgccaaggaaagaaaaagaattgtaatttttgcactcatccagatatcccagaacaggattttgaatagcttctgacagaattactacgttgcagttctacgaaaaagaactgagggtgtacaataggggtaggcaattttagctgttgccactgtaatactgtacccagtacagtacattgttgtgcctattaacacgtgttcatactgc

SEQ ID NO: 67390 - protein, 651 aa, Triticum aestivum
  peptide (1)..(651): Ceres Seq. ID no. 15220001
  misc_feature (102)..(102): Xaa is any aa, unknown or other
MPCSTCTRVSPTAISATSSSSRTVLRILPFRSPRGPYGRGLCLPGSIRCTAEVVDAAMHAPKPPEPKPRVLVAGGGIGGLTFALAARRKGFQVLVLEKDMSXVRGEGKYRGPIQLQSNALAVLEAVDMPAADQIMDAGCITGDRVNGIVDGISGSWYIKFDTFTPAADRGLPVTRVISRMTLQQILARAVGDDAIMNDCHVVDFTDNGNKVTAILEDGRKFEGDLLVGADGIWSKVRKSLFGETDASYSEYTCYTGIADFVPPDIDTVGYRVFLGHKQYFVSSDVGGGKMQWYAFHKEPAGGTYPENGKKKRLLEIFSGWCDNVIDLLNATEEEAILRRDIYDRPPTINWGKGRVTLLGDSVHAMQPNLGQGGCMAIEDGYQLAVELEKAWEESVKSRTPVDVISSLRSYEKERKLRVAIIHGLARMAAIMATTYRPYLGVGLGPLSFLTKLRIPHPGRVGGRFFIKVGMPLMLSWILGGNSSKLEGRPLSCRLSDKASNQLGRWFQDDDALEQAMGGEWYLFPMSSGDDSALQPIRLIRDEQRTLSIGSKPDPSNSDSSLSFPLPQVSEIHATITCKNKGFYLTDLGSEHGTWFNDNEGRRYRLPPNFPVRFHPSDAIEFGSDKKAMFRVKVLSTLPYDSARGGEVLQAA

SEQ ID NO: 67391 - protein, 594 aa, Triticum aestivum
  peptide (1)..(594): Ceres Seq. ID no. 15220002
  misc_feature (45)..(45): Xaa is any aa, unknown or other
MHAPKPPEPKPRVLVAGGGIGGLTFALAARRKGFQVLVLEKDMSXVRGEGKYRGPIQLQSNALAVLEAVDMPAADQIMDAGCITGDRVNGIVDGISGSWYIKFDTFTPAADRGLPVTRVISRMTLQQILARAVGDDAIMNDCHVVDFTDNGNKVTAILEDGRKFEGDLLVGADGIWSKVRKSLFGETDASYSEYTCYTGIADFVPPDIDTVGYRVFLGHKQYFVSSDVGGGKMQWYAFHKEPAGGTYPENGKKKRLLEIFSGWCDNVIDLLNATEEEAILRRDIYDRPPTINWGKGRVTLLGDSVHAMQPNLGQGGCMAIEDGYQLAVELEKAWEESVKSRTPVDVISSLRSYEKERKLRVAIIHGLARMAAIMATTYRPYLGVGLGPLSFLTKLRIPHPGRVGGRFFIKVGMPLMLSWILGGNSSKLEGRPLSCRLSDKASNQLGRWFQDDDALEQAMGGEWYLFPMSSGDDSALQPIRLIRDEQRTLSIGSKPDPSNSDSSLSFPLPQVSEIHATITCKNKGFYLTDLGSEHGTWFNDNEGRRYRLPPNFPVRFHPSDAIEFGSDKKAMFRVKVLSTLPYDSARGGEVLQAA

SEQ ID NO: 67392 - protein, 552 aa, Triticum aestivum
  peptide (1)..(552): Ceres Seq. ID no. 15220003
  misc_feature (3)..(3): Xaa is any aa, unknown or other
MSXVRGEGKYRGPIQLQSNALAVLEAVDMPAADQIMDAGCITGDRVNGIVDGISGSWYIKFDTFTPAADRGLPVTRVISRMTLQQILARAVGDDAIMNDCHVVDFTDNGNKVTAILEDGRKFEGDLLVGADGIWSKVRKSLFGETDASYSEYTCYTGIADFVPPDIDTVGYRVFLGHKQYFVSSDVGGGKMQWYAFHKEPAGGTYPENGKKKRLLEIFSGWCDNVIDLLNATEEEAILRRDIYDRPPTINWGKGRVTLLGDSVHAMQPNLGQGGCMAIEDGYQLAVELEKAWEESVKSRTPVDVISSLRSYEKERKLRVAIIHGLARMAAIMATTYRPYLGVGLGPLSFLTKLRIPHPGRVGGRFFIKVGMPLMLSWILGGNSSKLEGRPLSCRLSDKASNQLGRWFQDDDALEQAMGGEWYLFPMSSGDDSALQPIRLIRDEQRTLSIGSKPDPSNSDSSLSFPLPQVSEIHATITCKNKGFYLTDLGSEHGTWFNDNEGRRYRLPPNFPVRFHPSDAIEFGSDKKAMFRVKVLSTLPYDSARGGEVLQAA

SEQ ID NO: 67393 - DNA, 1552 bp, Triticum aestivum
  misc_feature (1)..(1552): Ceres Seq. ID no. 14313292
agaacccacacacctcctctgtattttctccctctttaaacccacaaatctctgtctgtccttacactcagagagaccatcaaaatggttgcggaggcgaagcagaacggcgtggccaccatggcgggcagcaaggtgcagctgatgtcggtgaagcgcggcgagccgacgctggtgtcgccggcggaggccacgccgacgggggagcagtactacctgtccaacctggaccagaacatcgcggtgatcgtgcagaccgtgtactgcttcaagtgcccatcgggccgcggcaacgaaggtgccgcggacgcgctccgggccgcgctggctcgcgtgctcgtccactaccacccgctcgccggccgcctcggcatcagcccggagatgaagctcatcgtggagtgcaccggcgagggcgtcccgttcgtggaggctgaggccgcttgcgacctcgccctcatcggggacctctccaccccggaccccgccgcgctgggccagctcgtgtactccgtccccggcgccaagagcatcctcgagatgccgcccatgacggcgcaggtgaccaggtttgaatgtggcggcttcagcatcgggttggccatgaaccactgcatgttcgacggtctgggcgccatggagttcgtcaactcctgggccgagatggcgcgcggcgccacggagctcaccgtgccaccgttcctcgaccgctccgtgctccgcgcgcgcgaccctccggtgatctccaacccgcaccacgagttcgaggagatcgctgacgtctcggaaatggcggcgctctacggcggccaggagctggtgtaccgctccttctgcttcgacccggacaggcttgagcgcgtccgcggcctcgccctcgccgacggggatctcgagcgctgcaccaccttcgaggcgctctccggcctcgtctggcgcgctcgcacccgcgcgctggggctcgcgccggagcagcagacgaagctgctgttcgccgtggacgggcgccgccgcttcgtgcctccgctcccaaaggggtacttcgggaacggcatcgtgctgaccaacgccctagcgacggcgggggatctgctgtcggcgccggtgtcgcgcgcggccgggaaggtgcaggaggccgtgcggatggtgacggacgagtatatgcggtcggcggtggactattttgaggcgacgcgctcgcggccatcgctggcgtcgacgctgctcatcaccacgtggtcgcggctcgcgttcaacggcgccgacttcggctggggcgagccgaccatgtccgggccagtcacgctgccggagaaggaggtcatactcttcctcgcgcacggcaaggagaggaagagcatcaacgtgctgctcggcctgccggcgtccgccatggacactttccaagagctcatggacgagatatgatcggcccagaccgattggatacgtcagcgactgcgctcggtgtttctatgcttgttttgcatgtgtttgttacttgttagcatggttatgttaattgtattattaagtgtgcgtcatttaattg

SEQ ID NO: 67394 - protein, 447 aa, Triticum aestivum
  peptide (1)..(447): Ceres Seq. ID no. 14313293
MVAEAKQNGVATMAGSKVQLMSVKRGEPTLVSPAEATPTGEQYYLSNLDQNIAVIVQTVYCFKCPSGRGNEGAADALRAALARVLVHYHPLAGRLGISPEMKLIVECTGEGVPFVEAEAACDLALIGDLSTPDPAALGQLVYSVPGAKSILEMPPMTAQVTRFECGGFSIGLAMNHCMFDGLGAMEFVNSWAEMARGATELTVPPFLDRSVLRARDPPVISNPHHEFEEIADVSEMAALYGGQELVYRSFCFDPDRLERVRGLALADGDLERCTTFEALSGLVWRARTRALGLAPEQQTKLLFAVDGRRRFVPPLPKGYFGNGIVLTNALATAGDLLSAPVSRAAGKVQEAVRMVTDEYMRSAVDYFEATRSRPSLASTLLITTWSRLAFNGADFGWGEPTMSGPVTLPEKEVILFLAHGKERKSINVLLGLPASAMDTFQELMDEI

SEQ ID NO: 67395 - protein, 435 aa, Triticum aestivum
  peptide (1)..(435): Ceres Seq. ID no. 14313294
MAGSKVQLMSVKRGEPTLVSPAEATPTGEQYYLSNLDQNIAVIVQTVYCFKCPSGRGNEGAADALRAALARVLVHYHPLAGRLGISPEMKLIVECTGEGVPFVEAEAACDLALIGDLSTPDPAALGQLVYSVPGAKSILEMPPMTAQVTRFECGGFSIGLAMNHCMFDGLGAMEFVNSWAEMARGATELTVPPFLDRSVLRARDPPVISNPHHEFEEIADVSEMAALYGGQELVYRSFCFDPDRLERVRGLALADGDLERCTTFEALSGLVWRARTRALGLAPEQQTKLLFAVDGRRRFVPPLPKGYFGNGIVLTNALATAGDLLSAPVSRAAGKVQEAVRMVTDEYMRSAVDYFEATRSRPSLASTLLITTWSRLAFNGADFGWGEPTMSGPVTLPEKEVILFLAHGKERKSINVLLGLPASAMDTFQELMDEI

SEQ ID NO: 67396 - protein, 427 aa, Triticum aestivum
  peptide (1)..(427): Ceres Seq. ID no. 14313295
MSVKRGEPTLVSPAEATPTGEQYYLSNLDQNIAVIVQTVYCFKCPSGRGNEGAADALRAALARVLVHYHPLAGRLGISPEMKLIVECTGEGVPFVEAEAACDLALIGDLSTPDPAALGQLVYSVPGAKSILEMPPMTAQVTRFECGGFSIGLAMNHCMFDGLGAMEFVNSWAEMARGATELTVPPFLDRSVLRARDPPVISNPHHEFEEIADVSEMAALYGGQELVYRSFCFDPDRLERVRGLALADGDLERCTTFEALSGLVWRARTRALGLAPEQQTKLLFAVDGRRRFVPPLPKGYFGNGIVLTNALATAGDLLSAPVSRAAGKVQEAVRMVTDEYMRSAVDYFEATRSRPSLASTLLITTWSRLAFNGADFGWGEPTMSGPVTLPEKEVILFLAHGKERKSINVLLGLPASAMDTFQELMDEI

SEQ ID NO: 67397 - DNA, 857 bp, Triticum aestivum
  misc_feature (1)..(857): Ceres Seq. ID no. 14313232
aaaaacgatcagaaaaccacaaccaggagcaacaggaatgggttcctttgctaatggccagaatggttcggagcttggcatccagatgccggccatggggagcagcgcggtgccggagcctcccacaacatctgtagcagcaagatgtccacggctggacatggccatggtggccaccagagctgcagccctcgtgatggcgctgctctcaatgtcgctcatggtctccgccaagcaacggggtagtctcatcatctttggcatcgagattccactgtatgccaaatggtccctctctgattcgctgaaatccttggttgggctatctgcggcagcagctgcctactctctggcacaacttctgtcgattgcgtacaaggccttgaagaaagtccctgtggttccatccaggcgctatgcctggatgctgttagctggtgatcaggtctttgcgtatgcgatgttgagcggggggtcagcagcggcggccgtcgcaaatttgaaccgcaccggcatccggcacacggcgcttcccaacttctgcaagcccttgccacgtttctgcgacctatcagcagcctccatcgcgtgcgcctttctcagctgcgccttccttgccgcatccgctgtaatcgatgttatctggctgtcaaatctgtgagaatgtgagatagatggtggcaaactagtacaccccttggcagggagttcaactttcagggtgctgtgcctttagatgatgtgccgaacctgaacctgtaaagtgtcctgaagtcctgtgagttggctgcttgtacaaattggagcccccttggtgcaatggatggcatcacctggatgttgattgttgatttgct

SEQ ID NO: 67398 - protein, 219 aa, Triticum aestivum
  peptide (1)..(219): Ceres Seq. ID no. 14313233
KTIRKPQPGATGMGSFANGQNGSELGIQMPAMGSSAVPEPPTTSVAARCPRLDMAMVATRAAALVMALLSMSLMVSAKQRGSLIIFGIEIPLYAKWSLSDSLKSLVGLSAAAAAYSLAQLLSIAYKALKKVPVVPSRRYAWMLLAGDQVFAYAMLSGGSAAAAVANLNRTGIRHTALPNFCKPLPRFCDLSAASIACAFLSCAFLAASAVIDVIWLSNL

SEQ ID NO: 67399 - protein, 207 aa, Triticum aestivum
  peptide (1)..(207): Ceres Seq. ID no. 14313234
MGSFANGQNGSELGIQMPAMGSSAVPEPPTTSVAARCPRLDMAMVATRAAALVMALLSMSLMVSAKQRGSLIIFGIEIPLYAKWSLSDSLKSLVGLSAAAAAYSLAQLLSIAYKALKKVPVVPSRRYAWMLLAGDQVFAYAMLSGGSAAAAVANLNRTGIRHTALPNFCKPLPRFCDLSAASIACAFLSCAFLAASAVIDVIWLSNL

SEQ ID NO: 67400 - protein, 191 aa, Triticum aestivum
  peptide (1)..(191): Ceres Seq. ID no. 14313235
MPAMGSSAVPEPPTTSVAARCPRLDMAMVATRAAALVMALLSMSLMVSAKQRGSLIIFGIEIPLYAKWSLSDSLKSLVGLSAAAAAYSLAQLLSIAYKALKKVPVVPSRRYAWMLLAGDQVFAYAMLSGGSAAAAVANLNRTGIRHTALPNFCKPLPRFCDLSAASIACAFLSCAFLAASAVIDVIWLSNL

SEQ ID NO: 67401 - DNA, 1451 bp, Triticum aestivum
  misc_feature (1)..(1451): Ceres Seq. ID no. 13660544
catcctaatcgaaaaaaccgatcatagaaatatctcctttcttctttccttttgctttgcacacatactagtgggcagtggcaccggcagcaagtagtctattcatctcagatctgaagttcactccctctcccggtgttctcttcccagcgtggatcctaaatcgcggacgccggacgaggagcgttcctctccaagttgtaatcgatcgcatcggcagcttcttacatcatcagcaattaatggccaccggaggtatgaccctggagagcctaccgaacgagctaccattagacttcttgagcaaaatcacaaataacttctccggtgagctactacttggtcagggcgcgttcgggtcagtttataaggggatcctggacgatggagtggttgctgtgaagaagctcgcagaaaattcgcctgtaccacgtgacacaatattcgcgaatgaggttcagaatattatggtgctcgagcatgaaaatatcgtcaagttggttgcctactgccgggaagcacaaaacaaattggtgcagagcaacggacgatatattattgcagagatcactgacactgtactctgctatgaatacttgcctaaggggagccttcacaagaatctttttggtgaatccagtagcattgattgggatatgcgctttaaaataataaagggaatatgtgaaggtatacattttctacataccttgcctagtcccgttctccatttgggtctgaagccttagaatatactactgggtgacaacatgacaccgaaaattgcggattttggtttctccagaatattcggccaagatcaaacccgaaagaacacacgaagtgtcgtgggatcgattgggtacatggccccggagtatctgtacaatggcgaaatctcggctcggtcagacatatatagtttaggcctaatcataatggagatatccacgagagagatgaatagttctagcactgaccagaagcatgcaaggaaatatattgatggagtaaaagaaaattggacactggagaaaataatgtgtgagtacattgagttagaagaacatggtttcaatcaagtagaagcatgtatcaatattggtctacagtgtgtagagattgatcagaagaagagaccttccatagagaacattgtcaatatgctcaataagcttccagtgagcgaggaggtctccctgtccacgtgagcacaaaacatcccacttttcagtgagagatgccgaacatcaagtaaaacaagatcagtgctacaaaagtggatgatgaaaccaatgtttgcattcaataaagcaagccatgatggcctttttgtaaaaaagtattaatgagaagtgtattgtgaacatgacccattgatatcacacaattgcaaatatatttagttttactcaaaaaaaaaaaaaaaaaagcttatcgataccgtcgac

SEQ ID NO: 67402 - protein, 168 aa, Triticum aestivum
  peptide (1)..(168): Ceres Seq. ID no. 13660545
MATGGMTLESLPNELPLDFLSKITNNFSGELLLGQGAFGSVYKGILDDGVVAVKKLAENSPVPRDTIFANEVQNIMVLEHENIVKLVAYCREAQNKLVQSNGRYIIAEITDTVLCYEYLPKGSLHKNLFGESSSIDWDMRFKIIKGICEGIHFLHTLPSPVLHLGLKP

SEQ ID NO: 67403 - protein, 163 aa, Triticum aestivum
  peptide (1)..(163): Ceres Seq. ID no. 13660546
MTLESLPNELPLDFLSKITNNFSGELLLGQGAFGSVYKGILDDGVVAVKKLAENSPVPRDTIFANEVQNIMVLEHENIVKLVAYCREAQNKLVQSNGRYIIAEITDTVLCYEYLPKGSLHKNLFGESSSIDWDMRFKIIKGICEGIHFLHTLPSPVLHLGLKP

SEQ ID NO: 67404 - protein, 146 aa, Triticum aestivum
  peptide (1)..(146): Ceres Seq. ID no. 13660547
MTPKIADFGFSRIFGQDQTRKNTRSVVGSIGYMAPEYLYNGEISARSDIYSLGLIIMEISTREMNSSSTDQKHARKYIDGVKENWTLEKIMCEYIELEEHGFNQVEACINIGLQCVEIDQKKRPSIENIVNMLNKLPVSEEVSLST

SEQ ID NO: 67405 - DNA, 463 bp, Triticum aestivum
  misc_feature (1)..(463): Ceres Seq. ID no. 13660548
atgtcgtcttcctcgccaccacaccacaccactgcagtgccgtcgcgtcatctcccacctctcccatcgggccagcggaagcagcagctgcgtgcggaaccaaccatgctccccttcctcctctccctccttctcctcaccggcgccgcggcgggggtacagggccacgacgacgcggcggcgcggcggacgatggaggagttcgccggcttccccgcctccgacgacggcgagggcggccgcgcctcccccttgcgcgtagactccgaaagtcthdagcgccagattgatgaactggcctcgttctccgactcgccggcgcrgtcggtgacgcgtgttctgtacagcgacaaggatgtgcaagctcgaaggtatattaaagggataatgaaacagcttggcctctctgttcgagaagatgccgttggcaacatatttggccgctgggtgggtyctgaggcag

SEQ ID NO: 67406 - protein, 154 aa, Triticum aestivum
  peptide (1)..(154): Ceres Seq. ID no. 13660549
  misc_feature (92)..(92): Xaa is any aa, unknown or other
  misc_feature (93)..(93): Xaa is any aa, unknown or other
  misc_feature (108)..(108): Xaa is any aa, unknown or other
  misc_feature (152)..(152): Xaa is any aa, unknown or other
MSSSSPPHHTTAVPSRHLPPLPSGQRKQQLRAEPTMLPFLLSLLLLTGAAAGVQGHDDAAARRTMEEFAGFPASDDGEGGRASPLRVDSESXXRQIDELASFSDSPAXSVTRVLYSDKDVQARRYIKGIMKQLGLSVREDAVGNIFGRWVGXEA

SEQ ID NO: 67407 - protein, 119 aa, Triticum aestivum
  peptide (1)..(119): Ceres Seq. ID no. 13660550
  misc_feature (57)..(57): Xaa is any aa, unknown or other
  misc_feature (58)..(58): Xaa is any aa, unknown or other
  misc_feature (73)..(73): Xaa is any aa, unknown or other
  misc_feature (117)..(117): Xaa is any aa, unknown or other
MLPFLLSLLLLTGAAAGVQGHDDAAARRTMEEFAGFPASDDGEGGRASPLRVDSESXXRQIDELASFSDSPAXSVTRVLYSDKDVQARRYIKGIMKQLGLSVREDAVGNIFGRWVGXEA

SEQ ID NO: 67408 - protein, 95 aa, Triticum aestivum
  peptide (1)..(95): Ceres Seq. ID no. 13660551
  misc_feature (92)..(92): Xaa is any aa, unknown or other
VVFLATTPHHCSAVASSPTSPIGPAEAAAACGTNHAPLPPLPPSPHRRRGGGTGPRRRGGAADDGGVRRLPRLRRRRGRPRLPLARRLRKSXAPD

SEQ ID NO: 67409 - DNA, 1432 bp, Triticum aestivum
  misc_feature (1)..(1432): Ceres Seq. ID no. 14302378
acccaatccatccctccgagcctttccactccactccgtgcgcccccaaccacgccgcacacttctcgcggcctccaaaacccaaatccctgaccgccggcggcggcgatgctcctctgccaccgcatcctccctcgcctcctctccctcccctccagcgccacctcgaaactcctcatccgcccctcccgcctccctcctcgccgccccttcctgcctcgctgcgccgtgctctctcagcttgcggccccccaaactgtagaccacgccgacgccgaagaatccgctgaccacctcgacgccgaagagccgcaggagccccaggagccgcaggaggtgctggtaaagctccccctcgaccggctcttcctgccaccgggggcgagcgtgaccccgggggacgaggaggtcgtgaccgcgcgtgtcctcaagggttccaacatcgtgctgggcacgtacgcgcggggcgatgcgcaggtggttaacgcggatttcataaagagcagcgtgcgacccgatgactgccccagggatgggctgcccgagttcgcgctcgtcggccgctccaacgtcggcaagtcgtcactgctcaactcgctcgtccgccgcaagcgcctcgcgctcacctccaagaaacctggcaagacccagtgtatcaatcattttaaaataaatgacagttggtaccttgttgacttgcctggttatggatatgcttcagcaccacaggtagctcgtaaagattgggatgagtttactagaaattacttccttagcagggataatctggtgtcagtttttctccttatagatgcaagtattcctgctaagaagattgatcttgactatgctagttggcttgggcaaaacaaggtcccaatgaccctcgtgttcacaaagtgcgacaagcgcaagaagaagaaaaatggcggcaagagaccggaagaaaacgtagaatgcttccagagtctgattcgcgaatattttgaggcggcgcctccgtggataatgacgagcagcgtaacgaaccaaggcagagacgagatacttctgcacatgtctcagctcagaaactattggcgcaagcattaagaggaggaattacaagagtaggactgaagcaatagcaaaccgcatgcaggcggcagccgcacctttgcaatcaggatttcaccaaccaatccgccttgccttttgagctgttgattgtccacgattgcatgatgattactcaatcaacaggaaggccgagaatacagacaagccgctgaaatcaactaccctgtttttttcttctatatttgtacaaccgtacagtctcaacgttttgtctttgttactttctgattataagattgtgcgtcctgtatgtagattaaagaaactcccgtgtcagctaatcatcatcgggaatcccacacgtttgtttgtc

SEQ ID NO: 67410 - protein, 327 aa, Triticum aestivum
  peptide (1)..(327): Ceres Seq. ID no. 14302379
MLLCHRILPRLLSLPSSATSKLLIRPSRLPPRRPFLPRCAVLSQLAAPQTVDHADAEESADHLDAEEPQEPQEPQEVLVKLPLDRLFLPPGASVTPGDEEVVTARVLKGSNIVLGTYARGDAQVVNADFIKSSVRPDDCPRDGLPEFALVGRSNVGKSSLLNSLVRRKRLALTSKKPGKTQCINHFKINDSWYLVDLPGYGYASAPQVARKDWDEFTRNYFLSRDNLVSVFLLIDASIPAKKIDLDYASWLGQNKVPMTLVFTKCDKRKKKKNGGKRPEENVECFQSLIREYFEAAPPWIMTSSVTNQGRDEILLHMSQLRNYWRKH

SEQ ID NO: 67411 - DNA, 1653 bp, Triticum aestivum
  misc_feature (1)..(1653): Ceres Seq. ID no. 13660693
aggagcatcatttttcttagagtcgctcaagctgagtaagccaacccaagctcaatggcggcgaatcagcagcaatcgacccgctcggaaccctagcctggcccgccgagtcgccatggcatgccctccttgcccgccgtcgccgctcgccagggtgcggctcgacgacgtggcgccccacgacggcgcggccgccccgggctacgcgcgcgccgtcggcgccctcgccgcctcgctcgcccgccgcggcgccgccgtgctcgagctccccgccgcggacgcggccgtcgtccgctgcgccctcgagtccgcccgcgccttcttccgcggccgccacgccgcctacctctaccgcgccgggaggactttggaagatggagagttgtcccctgcttgcatggctgatgctttcagatgtttgggcaaagcagcccgggccgccctctgtgcaatagcacggcacctgcgcctacgtaccgacgtattcaatcaattagttgatgatactccactgccggttaacgaggtctcctcatcagagttgctggtagcatattctcatgaacagctccaaagtggtctgacactcatgggatgtcccagcaggtcctcaatgcctcaagttgataggggatttgtgacgctagttgcttccgataatccaggaattgaggtttgtgacccaaatggccattggtacctagctgatggggtttcaggcccaaataatctattgcttctgactggaagggccctaagtcacgttactgctggtctttgcccaatttcccagtacagggtcactaatgaaaatagggcatcactcacctttaggttggtgcctcatgccaacgctatattggattgctctccaattttagctgctgggcattgcatacgacaggtgtaccaacccatacctgcaggccaatttatggatgattcttatgctgaagagcacgctgtttccagtcacttggaagaaccttctgaatctcagggcaactttgttagtgatccatcgctgagaagtgtcctgtcagaccctctgtctggggcttttcttgaagatgctatggttctccaatgtgggcactcatttggtggcgtcatgctgaagaaagtcattgaaatggctagatgcaccatttgcaatggagaagttgacccatcctccttgtttcctaatctcgctttaagagcagtagctacggtggtgaagatggaggatgacaggagactgtttcataacgccgctcttcggaagcgcaggaaagatgtgaccgagcatacggatgtggtgaagcggagtgggagtcgcaaaggaaacagtgagcttgctctggatgctgaaagcccggtggcattcaagggtgtgcagtacccatttgtagtgggcgagagggtcctgatcatggggaacaaaaggacgcccgagaaatttgtcgggaaggaggcggtcatcacttcacagtgtctgaatggctggtatcttgtgaaggcgctcgacagcggagagagcacacggcttcagtaccggtcgctgaagaaagtgccggggctgcaactgcagacgcaagcgaggctgcagcccctggcatttctcggaggcagacaataagagacggcgatgacggatcatgtgtggaccat

SEQ ID NO: 67412 - protein, 539 aa, Triticum aestivum
  peptide (1)..(539): Ceres Seq. ID no. 13660694
GASFFLESLKLSKPTQAQWRRISSNRPARNPSLARRVAMACPPCPPSPLARVRLDDVAPHDGAAAPGYARAVGALAASLARRGAAVLELPAADAAVVRCALESARAFFRGRHAAYLYRAGRTLEDGELSPACMADAFRCLGKAARAALCAIARHLRLRTDVFNQLVDDTPLPVNEVSSSELLVAYSHEQLQSGLTLMGCPSRSSMPQVDRGFVTLVASDNPGIEVCDPNGHWYLADGVSGPNNLLLLTGRALSHVTAGLCPISQYRVTNENRASLTFRLVPHANAILDCSPILAAGHCIRQVYQPIPAGQFMDDSYAEEHAVSSHLEEPSESQGNFVSDPSLRSVLSDPLSGAFLEDAMVLQCGHSFGGVMLKKVIEMARCTICNGEVDPSSLFPNLALRAVATVVKMEDDRRLFHNAALRKRRKDVTEHTDVVKRSGSRKGNSELALDAESPVAFKGVQYPFVVGERVLIMGNKRTPEKFVGKEAVITSQCLNGWYLVKALDSGESTRLQYRSLKKVPGLQLQTQARLQPLAFLGGRQ

SEQ ID NO: 67413 - protein, 501 aa, Triticum aestivum
  peptide (1)..(501): Ceres Seq. ID no. 13660695
MACPPCPPSPLARVRLDDVAPHDGAAAPGYARAVGALAASLARRGAAVLELPAADAAVVRCALESARAFFRGRHAAYLYRAGRTLEDGELSPACMADAFRCLGKAARAALCAIARHLRLRTDVFNQLVDDTPLPVNEVSSSELLVAYSHEQLQSGLTLMGCPSRSSMPQVDRGFVTLVASDNPGIEVCDPNGHWYLADGVSGPNNLLLLTGRALSHVTAGLCPISQYRVTNENRASLTFRLVPHANAILDCSPILAAGHCIRQVYQPIPAGQFMDDSYAEEHAVSSHLEEPSESQGNFVSDPSLRSVLSDPLSGAFLEDAMVLQCGHSFGGVMLKKVIEMARCTICNGEVDPSSLFPNLALRAVATVVKMEDDRRLFHNAALRKRRKDVTEHTDVVKRSGSRKGNSELALDAESPVAFKGVQYPFVVGERVLIMGNKRTPEKFVGKEAVITSQCLNGWYLVKALDSGESTRLQYRSLKKVPGLQLQTQARLQPLAFLGGRQ

SEQ ID NO: 67414 - protein, 407 aa, Triticum aestivum
  peptide (1)..(407): Ceres Seq. ID no. 13660696
MADAFRCLGKAARAALCAIARHLRLRTDVFNQLVDDTPLPVNEVSSSELLVAYSHEQLQSGLTLMGCPSRSSMPQVDRGFVTLVASDNPGIEVCDPNGHWYLADGVSGPNNLLLLTGRALSHVTAGLCPISQYRVTNENRASLTFRLVPHANAILDCSPILAAGHCIRQVYQPIPAGQFMDDSYAEEHAVSSHLEEPSESQGNFVSDPSLRSVLSDPLSGAFLEDAMVLQCGHSFGGVMLKKVIEMARCTICNGEVDPSSLFPNLALRAVATVVKMEDDRRLFHNAALRKRRKDVTEHTDVVKRSGSRKGNSELALDAESPVAFKGVQYPFVVGERVLIMGNKRTPEKFVGKEAVITSQCLNGWYLVKALDSGESTRLQYRSLKKVPGLQLQTQARLQPLAFLGGRQ

SEQ ID NO: 67415 - DNA, 2018 bp, Triticum aestivum
  misc_feature (1)..(2018): Ceres Seq. ID no. 15176862
cccattggccgcgcccacggacgcaggccgacagtttcccgtcctgcccctccctcgtcgctagtcgttgcttgctccgattttccacccacaatccggggcaaaacacccggggagcgaagcaagaaaccgagggctctcctcccaggcgcggatctaccagcctaccagggcgcggaccgcgcgaggctctggccttccgctcctccagcatgaggggaaaaaagatgatatatggattctccatttcccttatcctcatcaacctggcttccataatggagcgggctgatgagaatctcctccccgctgtttacaaggaagtcagtgccgccttcgatgctggtcctactgatctggggtaccttacgtttataatgaactttctgaagtccatagcatctcccttggcaggtgtccttgctcttcagtatgatcgccccactattcttgcggtcggaactgtcttctgggctctatcaacaggggccgttggtgtcagccagtattttcagcaggttgcattctggagaggtgtaaatggtgttggacttgccattgtcataccatcacttcagtccttcattgctgatagctacagagagggcacccgtggcgccggatttggtttgttgagtctcattggctcaataggtggtataggaggaagtattgtggcgacagttatggctggaagggattattggggatttcctggatggcggtttgcatttattgtggtcgcgtttgcaagcttgttgattgggcttcttgtttacttttacaccgttgatcctagaaaaacatctccagggaattttggtgacgacgacacccatgagaggtcacgtttggttggtaacagtgttttccctccactgtccatctggaaggattcatggataacagcaagatctgtcatgaaagtgcggacatttcaaatcatcgtcctgcaaggcatagtcggctccttgccatggactgctgtcgttttcttcacaatgtggtttgagctaattggtttcgataacaaaagctcggcggggttaaacagcctattcgccatcggctgcgcgagtgggtcatttcttggtggagtaattgcagaccgcgtgtcaagacactacccggattcaggccgcatcatgtgtgctcagttcagtgccttcatgtgcatccctttcacatggatcctcctcacggtcatcccgcagtcggtcgactactggtacagctacgccgtcacgctgttcctgatggggctcaccataagttggtgcgccacctgcgcaaacaacccgatgttcgcggaggtggtccctcccaagcaccgcaccatgatctacgcgtttgaccgcgcgttcgagggctccttctcctcgctggccgctcctgccgtcggcatggtgaccgagagggtatatggctacaacgcaaagacggtgaatctagcggacgggtcggtggcaggggcgtatgcgctctcgagagggctgctgaccatgatgattgttccttttggtctgtgctgcctgttctacaccccgctgtactttgtgttcaagcgcgaccgtgagaacgcgaggttggcggccagtgccaaggatctggagctaatgtgatgctccgcggtttttttttatcagctgcagtgttcgttaatgcggttagttgattcagcttggggttgaaatggtgcagttgacagaatactacaggtttcaccttcttcagacagatgagaagtacaccttcagacaaatgaaaagaaatacacgagtacaccttcagacagatgacaagatatacacgggtagagtcggtgattttaattttgtcaattagagaggatatatattgtactaatacattgtgtaggtaaataaatggcagctgtcatgttcaatctcaccgcaattaggatttattttttcttttgtcgcctgtaatcctgagctgaatttttggatgaagatggcattgcccctgatcctgaagtaatgaactaaacttggttc

SEQ ID NO: 67416 - protein, 539 aa, Triticum aestivum
  peptide (1)..(539): Ceres Seq. ID no. 15176863
HWPRPRTQADSFPSCPSLVASRCLLRFSTHNPGQNTRGAKQETEGSPPRRGSTSLPGRGPREALAFRSSSMRGKKMIYGFSISLILINLASIMERADENLLPAVYKEVSAAFDAGPTDLGYLTFIMNFLKSIASPLAGVLALQYDRPTILAVGTVFWALSTGAVGVSQYFQQVAFWRGVNGVGLAIVIPSLQSFIADSYREGTRGAGFGLLSLIGSIGGIGGSIVATVMAGRDYWGFPGWRFAFIVVAFASLLIGLLVYFYTVDPRKTSPGNFGDDDTHERSRLVGNSVFPPLSIWKDSWITARSVMKVRTFQIIVLQGIVGSLPWTAVVFFTMWFELIGFDNKSSAGLNSLFAIGCASGSFLGGVIADRVSRHYPDSGRIMCAQFSAFMCIPFTWILLTVIPQSVDYWYSYAVTLFLMGLTISWCATCANNPMFAEVVPPKHRTMIYAFDRAFEGSFSSLAAPAVGMVTERVYGYNAKTVNLADGSVAGAYALSRGLLTMMIVPFGLCCLFYTPLYFVFKRDRENARLAASAKDLELM

SEQ ID NO: 67417 - protein, 469 aa, Triticum aestivum
  peptide (1)..(469): Ceres Seq. ID no. 15176864
MRGKKMIYGFSISLILINLASIMERADENLLPAVYKEVSAAFDAGPTDLGYLTFIMNFLKSIASPLAGVLALQYDRPTILAVGTVFWALSTGAVGVSQYFQQVAFWRGVNGVGLAIVIPSLQSFIADSYREGTRGAGFGLLSLIGSIGGIGGSIVATVMAGRDYWGFPGWRFAFIVVAFASLLIGLLVYFYTVDPRKTSPGNFGDDDTHERSRLVGNSVFPPLSIWKDSWITARSVMKVRTFQIIVLQGIVGSLPWTAVVFFTMWFELIGFDNKSSAGLNSLFAIGCASGSFLGGVIADRVSRHYPDSGRIMCAQFSAFMCIPFTWILLTVIPQSVDYWYSYAVTLFLMGLTISWCATCANNPMFAEVVPPKHRTMIYAFDRAFEGSFSSLAAPAVGMVTERVYGYNAKTVNLADGSVAGAYALSRGLLTMMIVPFGLCCLFYTPLYFVFKRDRENARLAASAKDLELM

SEQ ID NO: 67418 - protein, 464 aa, Triticum aestivum
  peptide (1)..(464): Ceres Seq. ID no. 15176865
MIYGFSISLILINLASIMERADENLLPAVYKEVSAAFDAGPTDLGYLTFIMNFLKSIASPLAGVLALQYDRPTILAVGTVFWALSTGAVGVSQYFQQVAFWRGVNGVGLAIVIPSLQSFIADSYREGTRGAGFGLLSLIGSIGGIGGSIVATVMAGRDYWGFPGWRFAFIVVAFASLLIGLLVYFYTVDPRKTSPGNFGDDDTHERSRLVGNSVFPPLSIWKDSWITARSVMKVRTFQIIVLQGIVGSLPWTAVVFFTMWFELIGFDNKSSAGLNSLFAIGCASGSFLGGVIADRVSRHYPDSGRIMCAQFSAFMCIPFTWILLTVIPQSVDYWYSYAVTLFLMGLTISWCATCANNPMFAEVVPPKHRTMIYAFDRAFEGSFSSLAAPAVGMVTERVYGYNAKTVNLADGSVAGAYALSRGLLTMMIVPFGLCCLFYTPLYFVFKRDRENARLAASAKDLELM

SEQ ID NO: 67419 - DNA, 2031 bp, Triticum aestivum
  misc_feature (1)..(2031): Ceres Seq. ID no. 14313288
tttgccctgatcataccggtagctggtacacacattcatacatacattcttcttcagcatccactcattgctagctagcttgcgaggcagtgtgtgagctgttagtttgagcgggagaagctgggtggacggagagcacggcgctagctagcttgctggtgcaagatgaggagccgtggtagcttcgctctgaaccatgcggtggcgtttctcgtgtggtggatggtgcattgcggcagtgagctcgttgccgccgtgcctcctgatggttggtacgattacactgcccacacggactgcagaggccgcccggagccggcgcagtacaacggcgggattctcaagtacggcaacggcgacgacccgaacgggtacaagacgacggagactggcgtcctgtccccggcgttcgtggtctacaacctcaacaagtccacaatgtacaccttctcaggctgggtgaagctggaaggctctccctcggctctgatcaccgcgaggctggccccggacaactccggcacacggtgcatcgggacggtcctcgccaggagcgactgctgggcgttcctcaagggtggcttcgtcctcgactggccaactcagacctccgtcatcttcttccagaatgctgataggaccccgatgaagatcaccactgcgagcgcctcgctccagccgttcacgacggatcaatggtcgatgcaccagaaagatacgatccggaagaggaggaagaggatggccaccgtccacgtcgccgacccgcacggcacccgggtggtcggcgcgtcggtgtccgtgcagcagacggctaaggacttcccgcttgggtcggcgatcgcctccaccatcctgggcaacgacgcgtaccagaagtggttcgtggaccggttcaacgcggcggtgttcgaggacgagctcaagtggtactcgacggagccggcgtcggggctgctccggttcgacgtgccggaccagatgctggcgttcgtgcggtcgcaccgggtgatggtgcgcgggcacaacatcttctgggagaaccaggacgccacgccccggtgggtcaagggcctgtcgccggacgacctccgctccgccgtgaacacgcgcatccagagcctcatgacccgctaccgcggcgagttcgcgcactgggacgtcaacaacgagatgctgcacttcaacttctacgagcagcggctgggccccaacgccaccatggagttcttcagcgtggcgcaggacgccgacccgctcgccacgctcttcatgaacgagtacaacgtggtggagacctgcgacgacgtgtcctcgaccgtcgacgcgtacgtggcccgactcaaggacctccgggccggcggcgccgtgctggaggggatcggcctcgagggccacttctccaagcccaacatcccctacatgagggccgtgctcgacaagctggccacgctcaacctgcccatctggttcaccgagatcgacatcaacaacaagttcgacgcgcagacgcaggccgtgtacctggagcaggtgctgcgggaggcgtacgcgcacccggcggtgagcggcgtcatgctctggacggcgctgcacgagaacgggtgctaccagatgtgcctcacggactggaacctcaagaacctgcccgtcggggacgtcgtcgaccgcctgctgcaggagtggcagacggggcaggtcgccgggccgacggacgtgcacggcgcctacagcttcagcggctacctcggcgagtacgtggtcaccgtgaacgccggcaacacgtcgaagcaggccaccttctcgctgtccccaggggacgagaccaggcacatcaccgttcagatatgacactggttgtgtcgtagtatatgtgagtggccggtggcacgctgtactgcccgcacttgttgtttcgggcttctacctgcgatgacacatatcgtcgcttgtgggtagtggttactaaactatatactcgagcaaacgattatgtcttcgaaaaaacaaaacaaatgattatgacatggt

SEQ ID NO: 67420 - protein, 561 aa, Triticum aestivum
  peptide (1)..(561): Ceres Seq. ID no. 14313289
MRSRGSFALNHAVAFLVWWMVHCGSELVAAVPPDGWYDYTAHTDCRGRPEPAQYNGGILKYGNGDDPNGYKTTETGVLSPAFVVYNLNKSTMYTFSGWVKLEGSPSALITARLAPDNSGTRCIGTVLARSDCWAFLKGGFVLDWPTQTSVIFFQNADRTPMKITTASASLQPFTTDQWSMHQKDTIRKRRKRMATVHVADPHGTRVVGASVSVQQTAKDFPLGSAIASTILGNDAYQKWFVDRFNAAVFEDELKWYSTEPASGLLRFDVPDQMLAFVRSHRVMVRGHNIFWENQDATPRWVKGLSPDDLRSAVNTRIQSLMTRYRGEFAHWDVNNEMLHFNFYEQRLGPNATMEFFSVAQDADPLATLFMNEYNVVETCDDVSSTVDAYVARLKDLRAGGAVLEGIGLEGHFSKPNIPYMRAVLDKLATLNLPIWFTEIDINNKFDAQTQAVYLEQVLREAYAHPAVSGVMLWTALHENGCYQMCLTDWNLKNLPVGDVVDRLLQEWQTGQVAGPTDVHGAYSFSGYLGEYVVTVNAGNTSKQATFSLSPGDETRHITVQI

SEQ ID NO: 67421 - protein, 542 aa, Triticum aestivum
  peptide (1)..(542): Ceres Seq. ID no. 14313290
MVHCGSELVAAVPPDGWYDYTAHTDCRGRPEPAQYNGGILKYGNGDDPNGYKTTETGVLSPAFVVYNLNKSTMYTFSGWVKLEGSPSALITARLAPDNSGTRCIGTVLARSDCWAFLKGGFVLDWPTQTSVIFFQNADRTPMKITTASASLQPFTTDQWSMHQKDTIRKRRKRMATVHVADPHGTRVVGASVSVQQTAKDFPLGSAIASTILGNDAYQKWFVDRFNAAVFEDELKWYSTEPASGLLRFDVPDQMLAFVRSHRVMVRGHNIFWENQDATPRWVKGLSPDDLRSAVNTRIQSLMTRYRGEFAHWDVNNEMLHFNFYEQRLGPNATMEFFSVAQDADPLATLFMNEYNVVETCDDVSSTVDAYVARLKDLRAGGAVLEGIGLEGHFSKPNIPYMRAVLDKLATLNLPIWFTEIDINNKFDAQTQAVYLEQVLREAYAHPAVSGVMLWTALHENGCYQMCLTDWNLKNLPVGDVVDRLLQEWQTGQVAGPTDVHGAYSFSGYLGEYVVTVNAGNTSKQATFSLSPGDETRHITVQI

SEQ ID NO: 67422 - protein, 470 aa, Triticum aestivum
  peptide (1)..(470): Ceres Seq. ID no. 14313291
MYTFSGWVKLEGSPSALITARLAPDNSGTRCIGTVLARSDCWAFLKGGFVLDWPTQTSVIFFQNADRTPMKITTASASLQPFTTDQWSMHQKDTIRKRRKRMATVHVADPHGTRVVGASVSVQQTAKDFPLGSAIASTILGNDAYQKWFVDRFNAAVFEDELKWYSTEPASGLLRFDVPDQMLAFVRSHRVMVRGHNIFWENQDATPRWVKGLSPDDLRSAVNTRIQSLMTRYRGEFAHWDVNNEMLHFNFYEQRLGPNATMEFFSVAQDADPLATLFMNEYNVVETCDDVSSTVDAYVARLKDLRAGGAVLEGIGLEGHFSKPNIPYMRAVLDKLATLNLPIWFTEIDINNKFDAQTQAVYLEQVLREAYAHPAVSGVMLWTALHENGCYQMCLTDWNLKNLPVGDVVDRLLQEWQTGQVAGPTDVHGAYSFSGYLGEYVVTVNAGNTSKQATFSLSPGDETRHITVQI

SEQ ID NO: 67423 - DNA, 1667 bp, Triticum aestivum
  misc_feature (1)..(1667): Ceres Seq. ID no. 14301676
ctcgcctctcacccccacacagagctgccaaaacattctgcaacaagcagagagagcgagacaaaacatgtcgtggactactcgtgtccctctcctcgtcggcgccacctccatctgcttcctctccgccgccgcggcgtccaactacacctcgttacgccccggccaccacctcctgacccagctctcgcaatggcgggagcactacctgtccgacgcttcctcgcacgccgccggcaccgggggcgtgcgccggcacaccgtcctcgcgtgggtcctggccttcctggccgcgtccgtgtcgagcgccggcggcgtcgggggcgggtcgctgttcctgcccatcctgaacctggtggcggggctgaccctgaagcgcgccaccacctactcctccttcatggtcaccggcggcgccgcgtcgaacgtgctctacaacctctggcgcgcgcggggccggccggcgctgatcgactacgacatcgcactgctgttccagccgtgcctgctcctgggcgtcagcgtcggggtggtgtgcaacgtcatgttcccggagtggctcatcacggcgctcttctcgctgttcctcgccttctgcaccgccaagacgtgccgcgccggggccaagatctggcggtccgagagcgccggcgcccccgccaccgccaccgccgcgcgtcacgaccacaaggagcccctgcttctcggcggcctcccgcagcccgtccaggacgacgggggccaagcagctcgcaatggcggctctggcgccggcgccggcgctgggttcccgtggaaggacgtggcggtgctcctggtggtgtggctctgcttcttcctgctccacgtcttcatcggagataagcacgggaagggagtgatcagcataaagccctgcggagtggcatactggcttgccaccgtgtcccaggtgcctttcgccgtggctttcacagcctatatcatatacgcaaagaggaagaagcaggttgcacatcaccacgaagatggcaaggcacattcttctgtgcacacgaagacggagaccttgccggcgctcgcgctcccgctggccgctttcgtgaccggatctctgagcggcctcttcggcatcggcggagggctgcttctcaaccctgtcctccttcagatcgggatacccccgcagacggcggcggcgacgtcttcgttcatggtgctgttctgcgcgtccatgtcgatggtccagttcatcctgctgggcatggacgggatcggggaggcctcggtctacgcggggatatgcttcgtcgcctcgatcgccggggtggtcttgatcgagcgggtcgtcaggaagtccgggcgggtgtcgatgatcgtcttcttggtcaccgccatcatggcgctcagcactgtgatcgtcacctgcttcggagccctagatgtctggacgcaatacactggcggagcgtacatggggttcaagctaccttgtacgtagtttacccatgcatatatgagagcatgggtgagaggtgcttagttactaattgcttcttctggcttggcgtttatgtcttttctgaagaaaggttttgttcgtggtgttgctatggctgtttatgggctatatataattttgtgtgaataaatatatgcttctggaatgaagcttacatggcactgcg

SEQ ID NO: 67424 - protein, 492 aa, Triticum aestivum
  peptide (1)..(492): Ceres Seq. ID no. 14301677
SPLTPTQSCQNILQQAERARQNMSWTTRVPLLVGATSICFLSAAAASNYTSLRPGHHLLTQLSQWREHYLSDASSHAAGTGGVRRHTVLAWVLAFLAASVSSAGGVGGGSLFLPILNLVAGLTLKRATTYSSFMVTGGAASNVLYNLWRARGRPALIDYDIALLFQPCLLLGVSVGVVCNVMFPEWLITALFSLFLAFCTAKTCRAGAKIWRSESAGAPATATAARHDHKEPLLLGGLPQPVQDDGGQAARNGGSGAGAGAGFPWKDVAVLLVVWLCFFLLHVFIGDKHGKGVISIKPCGVAYWLATVSQVPFAVAFTAYIIYAKRKKQVAHHHEDGKAHSSVHTKTETLPALALPLAAFVTGSLSGLFGIGGGLLLNPVLLQIGIPPQTAAATSSFMVLFCASMSMVQFILLGMDGIGEASVYAGICFVASIAGVVLIERVVRKSGRVSMIVFLVTAIMALSTVIVTCFGALDVWTQYTGGAYMGFKLPCT

SEQ ID NO: 67425 - protein, 470 aa, Triticum aestivum
  peptide (1)..(470): Ceres Seq. ID no. 14301678
MSWTTRVPLLVGATSICFLSAAAASNYTSLRPGHHLLTQLSQWREHYLSDASSHAAGTGGVRRHTVLAWVLAFLAASVSSAGGVGGGSLFLPILNLVAGLTLKRATTYSSFMVTGGAASNVLYNLWRARGRPALIDYDIALLFQPCLLLGVSVGVVCNVMFPEWLITALFSLFLAFCTAKTCRAGAKIWRSESAGAPATATAARHDHKEPLLLGGLPQPVQDDGGQAARNGGSGAGAGAGFPWKDVAVLLVVWLCFFLLHVFIGDKHGKGVISIKPCGVAYWLATVSQVPFAVAFTAYIIYAKRKKQVAHHHEDGKAHSSVHTKTETLPALALPLAAFVTGSLSGLFGIGGGLLLNPVLLQIGIPPQTAAATSSFMVLFCASMSMVQFILLGMDGIGEASVYAGICFVASIAGVVLIERVVRKSGRVSMIVFLVTAIMALSTVIVTCFGALDVWTQYTGGAYMGFKLPCT

SEQ ID NO: 67426 - protein, 359 aa, Triticum aestivum
  peptide (1)..(359): Ceres Seq. ID no. 14301679
MVTGGAASNVLYNLWRARGRPALIDYDIALLFQPCLLLGVSVGVVCNVMFPEWLITALFSLFLAFCTAKTCRAGAKIWRSESAGAPATATAARHDHKEPLLLGGLPQPVQDDGGQAARNGGSGAGAGAGFPWKDVAVLLVVWLCFFLLHVFIGDKHGKGVISIKPCGVAYWLATVSQVPFAVAFTAYIIYAKRKKQVAHHHEDGKAHSSVHTKTETLPALALPLAAFVTGSLSGLFGIGGGLLLNPVLLQIGIPPQTAAATSSFMVLFCASMSMVQFILLGMDGIGEASVYAGICFVASIAGVVLIERVVRKSGRVSMIVFLVTAIMALSTVIVTCFGALDVWTQYTGGAYMGFKLPCT

SEQ ID NO: 67427 - DNA, 1670 bp, Triticum aestivum
  misc_feature (1)..(1670): Ceres Seq. ID no. 13660269
aatcgcccgccctcgctccccatcaaccccttcctagctagctagcgaagcaccagtttgggcagccgccgggcaggatggaagggctggacgtgtaccagcactaccgcttgaaccctacagatgtggacgccgtgacttactacctgccacgcctcatcgccggccagacgctgcacggcgccgataaattcatccaccacgtcgacatctacagctgcgagcccaaggatctggccgcccggattgcgcccgtgccgcaggccgccagcagcggcgaccgcttcttcttcaccacgcgcaagagcaagaacggaagcaaaacccagagcgtgcgcaccgccggcggcggcacctggaccgtcaacgctaccacggccgtcaaacacgccggagtcgaggtcggcgagaggaagaacctgtcgttcaggaagaagggcaagtccaccggttgggtcatggaggagtacaaatgcttgctgccagaggccgtcgtcgccgacggggtgaaggtgttctgcaagatccacttggctcagcatcctcctgacgcggcccgccaggaatcagccgcgtacaagcatcaagcagaaccgcaaccagaggccgtgactgcgagcatgcacgcacagaagaggccagcaatagctcccgccgccgatcctcatccgccgcgccccaacaagaggatgcgaggatcagtccctgtccccgcacctgccccaccgtcgttcttgacgtatgatgaggcagcgagtgcaatgtatggcccgctggctcgtaccatcttccctgttcaagatgctctggatataccagcgtcaatcgaaggtccttcagcatcatgcgagtccactacaacatccaaccactccggcgttgcttcttcctcagataatatgcagcgacaagctcaagctactgagatttcctcccagtcagatgtgctggagtctgtcaagaattacagccaacaacagatgattgttcctgaggctggctcaagcattgcaaggagcacatatgaagaggatgtctttcagccattggagcctctttccgatttgccgggtggggaggcagatggttttgacattgaagaactaatgagaatgatggaagacgacccaattgaggttgagacggtcactggagccaacactggcgtggagatgggccaacaggaacctctgtacctggataccttggaccaaggcatgctggaggacatgctgcagtccgattgcccttacccaatgtcgggatcagaggatcgggccatgcacaaccctgccttccatgatgctgacaaagagaagaggtacaatgccgcgtcggatcttgacgctccatcgcttcagggacaggaccactcgttcaaacagcccttcgatccatttgaagcagcatggaaggccgaagaggcgcacgagaaggagaagagggacaatcttcacgctggaccgcttggaggacacaacaacttcttctggcctgcaagtgtctattaagtccgatgttgaaattgttttcaaagtgtatacgaggatactcactggctgatatattagttcgtccttatacgatcgccacacgtgtacctctgagcaatttgctccacttgttcatgtaagctaaaactgttgttgttcttcttgcccctctgatgg

SEQ ID NO: 67428 - protein, 477 aa, Triticum aestivum
  peptide (1)..(477): Ceres Seq. ID no. 13660270
MEGLDVYQHYRLNPTDVDAVTYYLPRLIAGQTLHGADKFIHHVDIYSCEPKDLAARIAPVPQAASSGDRFFFTTRKSKNGSKTQSVRTAGGGTWTVNATTAVKHAGVEVGERKNLSFRKKGKSTGWVMEEYKCLLPEAVVADGVKVFCKIHLAQHPPDAARQESAAYKHQAEPQPEAVTASMHAQKRPAIAPAADPHPPRPNKRMRGSVPVPAPAPPSFLTYDEAASAMYGPLARTIFPVQDALDIPASIEGPSASCESTTTSNHSGVASSSDNMQRQAQATEISSQSDVLESVKNYSQQQMIVPEAGSSIARSTYEEDVFQPLEPLSDLPGGEADGFDIEELMRMMEDDPIEVETVTGANTGVEMGQQEPLYLDTLDQGMLEDMLQSDCPYPMSGSEDRAMHNPAFHDADKEKRYNAASDLDAPSLQGQDHSFKQPFDPFEAAWKAEEAHEKEKRDNLHAGPLGGHNNFFWPASVY

SEQ ID NO: 67429 - protein, 350 aa, Triticum aestivum
  peptide (1)..(350): Ceres Seq. ID no. 13660271
MEEYKCLLPEAVVADGVKVFCKIHLAQHPPDAARQESAAYKHQAEPQPEAVTASMHAQKRPAIAPAADPHPPRPNKRMRGSVPVPAPAPPSFLTYDEAASAMYGPLARTIFPVQDALDIPASIEGPSASCESTTTSNHSGVASSSDNMQRQAQATEISSQSDVLESVKNYSQQQMIVPEAGSSIARSTYEEDVFQPLEPLSDLPGGEADGFDIEELMRMMEDDPIEVETVTGANTGVEMGQQEPLYLDTLDQGMLEDMLQSDCPYPMSGSEDRAMHNPAFHDADKEKRYNAASDLDAPSLQGQDHSFKQPFDPFEAAWKAEEAHEKEKRDNLHAGPLGGHNNFFWPASVY

SEQ ID NO: 67430 - protein, 296 aa, Triticum aestivum
  peptide (1)..(296): Ceres Seq. ID no. 13660272
MHAQKRPAIAPAADPHPPRPNKRMRGSVPVPAPAPPSFLTYDEAASAMYGPLARTIFPVQDALDIPASIEGPSASCESTTTSNHSGVASSSDNMQRQAQATEISSQSDVLESVKNYSQQQMIVPEAGSSIARSTYEEDVFQPLEPLSDLPGGEADGFDIEELMRMMEDDPIEVETVTGANTGVEMGQQEPLYLDTLDQGMLEDMLQSDCPYPMSGSEDRAMHNPAFHDADKEKRYNAASDLDAPSLQGQDHSFKQPFDPFEAAWKAEEAHEKEKRDNLHAGPLGGHNNFFWPASVY

SEQ ID NO: 67431 - DNA, 1436 bp, Triticum aestivum
  misc_feature (1)..(1436): Ceres Seq. ID no. 13500573
ggagatgctctgacgtgtgactttaccacagcaagtcggagaatctggttttgactctccctcgccggcggccggcgccgtgctcccgcagcggcgcagcccccgtgtccaaccccaacatctacgccccgttgagtcacgtgccgtgcccgcacgaacacctgctcccatatccctggccgcgctccgcgctaccgcggcgatcgggcgtccactgcccagtcgagcaccttccctcgccgtacgaatatggcccctgttcccgctcctatcgcgcgcctccccctcctccctcgccgtgtccacacccccctccctcatccccgaccgtcagcaccggcggaggcacgacacaccgcgcgcacgagggcgccgcagcggatcggaggagtggatccggggggaagggagacggcgcggggtagcggcacatcactccggagcacggggcgactggcgcggcgggcgccatggctaaaaaggcgcggcatgtgaaccaccctagttgacattttgcttcgcctgatgcgtatccggttgctggattgactcgtacgcttccagggctcggataagggggggttcttcacggagtacggcgaggcgacccgataccaggtcggcgaagtggtcggcaaaggcagctacggcgtcgtggcgtctgccgtcgacacccacaccggcgagagcgtcgccatcaaaaagatcgacgacgtcttcgagcatgtcgccgacgccacccgcattctccgcgagatcaagctgctccgccttctgcgccatccagacatcgtccagatcaagcacatcatgctcccgccgtcgcgccgcgaattccgtgacatctacataatcttcgagctcatggagtccgacctccaccaggtcatcaaggccaacgacgacctcagcccggagcaccatcagttctttttctaccagctgcttcgtgggatgaagtacatacacgctgccaatgtcttccaccgggacctcaagcccaagaacattctagccaatgccgattgcaagctcaagatttgcgacttcggccttgctcgggtttccttcaatgacaccccgtccgcgatattctggacggattatgtagcaacaaggtggtatcgtgctccagaattatgtggctccttcttttcaaagtatactcctgcgattgatatttggagcataggatgtatatttgcagaaatgcttacagggaggccgctctttcctggcaaaaatgtggtacatcaattggatctcatgactgatctactcggcactccttcggcagaatctatttctagggtgagttcaattccccgcttctaaaataaataaatcagttagagacttatctcgtgcgtgatttatttaccaactctttgtgcttgtggttaccatttcctttatcaagatgaaatattcctgcg

SEQ ID NO: 67432 - protein, 174 aa, Triticum aestivum
  peptide (1)..(174): Ceres Seq. ID no. 13500574
MLPPSRREFRDIYIIFELMESDLHQVIKANDDLSPEHHQFFFYQLLRGMKYIHAANVFHRDLKPKNILANADCKLKICDFGLARVSFNDTPSAIFWTDYVATRWYRAPELCGSFFSKYTPAIDIWSIGCIFAEMLTGRPLFPGKNVVHQLDLMTDLLGTPSAESISRVSSIPRF

SEQ ID NO: 67433 - protein, 156 aa, Triticum aestivum
  peptide (1)..(156): Ceres Seq. ID no. 13500575
MESDLHQVIKANDDLSPEHHQFFFYQLLRGMKYIHAANVFHRDLKPKNILANADCKLKICDFGLARVSFNDTPSAIFWTDYVATRWYRAPELCGSFFSKYTPAIDIWSIGCIFAEMLTGRPLFPGKNVVHQLDLMTDLLGTPSAESISRVSSIPRF

SEQ ID NO: 67434 - protein, 126 aa, Triticum aestivum
  peptide (1)..(126): Ceres Seq. ID no. 13500576
MKYIHAANVFHRDLKPKNILANADCKLKICDFGLARVSFNDTPSAIFWTDYVATRWYRAPELCGSFFSKYTPAIDIWSIGCIFAEMLTGRPLFPGKNVVHQLDLMTDLLGTPSAESISRVSSIPRF

SEQ ID NO: 67435 - DNA, 875 bp, Triticum aestivum
  misc_feature (1)..(875): Ceres Seq. ID no. 14301449
accacccacttcctgcagctcgcaaccaagcctcccaaccagctgagagctagcaggagcagcaagcgaaccaacgactcctccggtcgctcgtcggagccaggcaaggcaacgcagcatgtgtaacctcatcacgatcccgtcggtcgcctggctgcgccgcgccgtgcgccggtggcgcgcccgccgctccacctccaccccggtgccggcggggcacgtcgcggtctgcgcggacggcgcgcggttcatgggtgcggctggcgcacctcagccaccccgcgttcctggagctgctcaggcaggcggaggaggagtacggcttcccgtccggcgcctccggccctgtcgcactcccctgcgacgaggaccgcctccgcgacgtcctccgccgcgtctcttcctcgtccgactccacggagccgcgccgctcctccttctgccgccgccgcggcgactcgcggccgctgctgcaggcggtggccttcctgtgagcgcgcccgcgcggcggcaccgaacgatccagcaacgcagcgcccaatttctgggtgccagagcagcaactggtgacagactcagcactccggacgcgggaaaaagacgaaggccatcaagaccgttcgggccagcgtggcggcgtgctcccgtgccgtgcccagcgtattgccggccggcgatcgggcgcgtactggagctgcgtagtacagtgcgtgatggggaagtgatgttacatgctagtaactgattgattgaggaaggcgacgattttttgggttctttttctctgtaacgaccactcaactcgcctgtgcaaatccttgccgaggcataggagtaaattaattaataaagatttgattgattgttcttgctgc

SEQ ID NO: 67436 - protein, 208 aa, Triticum aestivum
  peptide (1)..(208): Ceres Seq. ID no. 14301450
MCNLITIPSVAWLRRAVRRWRARRSTSTPVPAGHVAVCADGARFMGAAGAPQPPRVPGAAQAGGGGVRLPVRRLRPCRTPLRRGPPPRRPPPRLFLVRLHGAAPLLLLPPPRRLAAAAAGGGLPVSAPARRHRTIQQRSAQFLGARAATGDRLSTPDAGKRRRPSRPFGPAWRRAPVPCPAYCRPAIGRVLELRSTVRDGEVMLHASN

SEQ ID NO: 67437 - protein, 164 aa, Triticum aestivum
  peptide (1)..(164): Ceres Seq. ID no. 14301451
MGAAGAPQPPRVPGAAQAGGGGVRLPVRRLRPCRTPLRRGPPPRRPPPRLFLVRLHGAAPLLLLPPPRRLAAAAAGGGLPVSAPARRHRTIQQRSAQFLGARAATGDRLSTPDAGKRRRPSRPFGPAWRRAPVPCPAYCRPAIGRVLELRSTVRDGEVMLHASN

SEQ ID NO: 67438 - DNA, 1079 bp, Triticum aestivum
  misc_feature (1)..(1079): Ceres Seq. ID no. 13660443
aaaccctccccaaaaccctagctgattcggggaactagggttcctccccgcctccaccgccgccgccgccaagctcccgccgagctcagaagatacttaccatgggtaagtcaagcaagaagtctgctgttgcggttgcacctgctgctgggctggtcccagatggaaaatctttaaagaaaggcaagaggaatgcggaagatgacatcgagaaggctgtcagtgccaagaagcagaaaactgcacctgagaaggccgtgcctgtgaagaatgatcttaaagtcaagaagctccctccaaagaaggtcgagagcagcagttctgatgaggattcttcagaatccgaggacgaggtgacggttcaaccaaagaaggctgcaccgtctgctaaacaggagtccagttttgatagcagcgatgagagcagttctgatgacgaacctgcaaaaaagcctgctactgcttcaaagaaacctgctgcacttgctagcaatggttcaaagaaagtcaagtctgacagcagcagctctgacagcagctctgatgaggatgtgatggtcccacccaagaaggctgcacaatctgctaaacaggagtccagctctgatggtagtgacgagagcagctctgatgatgaacctgcaaagaagtctgctgccacttcaaagaaacctgctgcaaagactgaagattcagatagcagcagctctgatgaggatgaagatatgcttcccgctaaagcaccagcagcagccaagaagattgacgaatccagtgaaagttccgattttggtagctctgctctgatgatgccgtcagagcacaacttgctcgttttcagcatgaggaagaagatgatttgacagggagcaacacagcttgcttgttttgtttctctgtagcaagttattctataaatactgaacactatgcaaggaaatcagcagctgccattgttcaagaatgtactaattctctgaacattgttttgtttttctatagcaagttatttctataaatactgaacactgcaaggaaatcagcagctttcattgttaagagaatgagctaattctctg

SEQ ID NO: 67439 - protein, 253 aa, Triticum aestivum
  peptide (1)..(253): Ceres Seq. ID no. 13660444
MGKSSKKSAVAVAPAAGLVPDGKSLKKGKRNAEDDIEKAVSAKKQKTAPEKAVPVKNDLKVKKLPPKKVESSSSDEDSSESEDEVTVQPKKAAPSAKQESSFDSSDESSSDDEPAKKPATASKKPAALASNGSKKVKSDSSSSDSSSDEDVMVPPKKAAQSAKQESSSDGSDESSSDDEPAKKSAATSKKPAAKTEDSDSSSSDEDEDMLPAKAPAAAKKIDESSESSDFGSSALMMPSEHNLLVFSMRKKMI

SEQ ID NO: 67440 - DNA, 1273 bp, Triticum aestivum
  misc_feature (1)..(1273): Ceres Seq. ID no. 14302998
ctccactctaggaagcaatctagctagctatcaaggcgcctagccatgtccaacccgtacaccttcctcaggcctcatatagatcgtcctttcttccccttccaaagaagcctagtctctccatcctctcccccaaaacaagcactccctctcctaagccttctcccttcgagccatgatcacagcaagatccttggttgtgggtatgccggtgatgatgatcatcatcaacttaagaaggaagatgaggatgtgaacatctcactccaaattgggccgccgaatccgaaccccgcgcctaatcttttaaggagtactgtgagtgatggtggttgcgatgatgcaacaggaacaacacaggatcagtgtggtggtggcgatcacagcagggcggacgagcaggaggaagaggaagacgacgatgatgatgccgccggtgatggtctttgttcggagtactttgccgctggtaagcttaccaagggcaagtattggatccctacccccgctcagatcctcattgggcccactcacttcgcctgcccggtgtgctgcaagaccttcagcagatacaacaacctgcagatgcacatgtggggacacgggtcgcagtaccgccgcgggcctgactccctccgcggcacgcagccggcggcgatgctccggctgccgtgcttctgctgcgcgccggggtgccggagccacgtggaccacccgcgggcgcggccgctcaaggacttccggacgctgcagacgcactacaagcgcaggcactgtgccaagccattcctctgccgcaagtgcggcaaggcgctcgccgtgcgcggcgactggcgaactcacgagaagaactgcggccgccggtggcactgcacctgcggctctgacttcaagcacaagcgctcgctcaaggatcacattcgggccttcgggcaggaccacgtcgagcggccgcccgccgccaaaatgtgaccgtcgagagccacggacgataaatatgcatggccaaacggcctgccagtgattatacgattgcttgtgcaatattaggggaccgattgatttgggtatccatggtattctccttcgcataataagcattactatgttactagctgctagctgaactcagtttgattattacacttttttttaactattttgttcttattcaagtgctatgtgcgtattttagcgtgttaatcgtagacttgtaagttatggcaacttaatttgttcagtaatattcttattttgtatttgtttcatggtc

SEQ ID NO: 67441 - protein, 308 aa, Triticum aestivum
  peptide (1)..(308): Ceres Seq. ID no. 14302999
MSNPYTFLRPHIDRPFFPFQRSLVSPSSPPKQALPLLSLLPSSHDHSKILGCGYAGDDDHHQLKKEDEDVNISLQIGPPNPNPAPNLLRSTVSDGGCDDATGTTQDQCGGGDHSRADEQEEEEDDDDDAAGDGLCSEYFAAGKLTKGKYWIPTPAQILIGPTHFACPVCCKTFSRYNNLQMHMWGHGSQYRRGPDSLRGTQPAAMLRLPCFCCAPGCRSHVDHPRARPLKDFRTLQTHYKRRHCAKPFLCRKCGKALAVRGDWRTHEKNCGRRWHCTCGSDFKHKRSLKDHIRAFGQDHVERPPAAKM

SEQ ID NO: 67442 - protein, 232 aa, Triticum aestivum
  peptide (1)..(232): Ceres Seq. ID no. 14303000
MVVAMMQQEQHRISVVVAITAGRTSRRKRKTTMMMPPVMVFVRSTLPLVSLPRASIGSLPPLRSSLGPLTSPARCAARPSADTTTCRCTCGDTGRSTAAGLTPSAARSRRRCSGCRASAARRGAGATWTTRGRGRSRTSGRCRRTTSAGTVPSHSSAASAARRSPCAATGELTRRTAAAGGTAPAALTSSTSARSRITFGPSGRTTSSGRPPPKCDRREPRTINMHGQTACQ

SEQ ID NO: 67443 - protein, 228 aa, Triticum aestivum
  peptide (1)..(228): Ceres Seq. ID no. 14303001
MMQQEQHRISVVVAITAGRTSRRKRKTTMMMPPVMVFVRSTLPLVSLPRASIGSLPPLRSSLGPLTSPARCAARPSADTTTCRCTCGDTGRSTAAGLTPSAARSRRRCSGCRASAARRGAGATWTTRGRGRSRTSGRCRRTTSAGTVPSHSSAASAARRSPCAATGELTRRTAAAGGTAPAALTSSTSARSRITFGPSGRTTSSGRPPPKCDRREPRTINMHGQTACQ

SEQ ID NO: 67444 - DNA, 1655 bp, Triticum aestivum
  misc_feature (1)..(1655): Ceres Seq. ID no. 14308045
acccgatgcgcctggctggctttcgattgatcacacgagacatgtagaaaccacatgcgtttccaacctagttagatagaaggatggacgccttggcggggctctcggcctttgccgcggtggcgctgccgctcctcctgctgtacagcgtgcaccggtggaggaaccctcggtgcaacggccggctcccgccggggtccatgggcctcccgctcgtcggcgagacgttccagttcttctccccggacgcctccttggacgtccctcgcttcatccgagacaggctcacgaggtacggcccgatcttcaagacgagcgtggtggggcacccggtggtggtgtcggcggacgaggagctgaaccacatggtgttccagcaggagggggagctgttccagagctggtacccggactcgttcgtggagatcctcggccgcgacaacgtcggggagcagaagggcaccatgttcaagtacctcaagaacatggtgctcaggttcttcggcccggagagcctcaaggagtccatcctccgcgacgtccagcgcgccgtctgcagctcgctctgcacctggtccaccctgccggccgtcgacttcaaagaagccgtctccaccatggtgtttgaactttcggcgagcaagctgctcggcctggagccgtcgaggtccaaggttctacggaagagcttcttcgacttcgttctagggctcatctccttcccgctctacctgccaggaacagcctactacgcatgcatgcagggacggatgagtgtaatggaggtgctgcagcaggtgttggaggagaggacgagatcagctgaggcggccggaggaggggaagcacggtgccacggcgacttcctggactacgtcgtccaggagatcaccaaggagaagccggtcctgacggagggaatggcgctggacctcctgtttgtgctcctcttcgccagcttccacaccacgtcgctggccatcaccctggccgtcaagctcctcaccgacaaccctcgcgtcctggaggaactcacggtggagcatgaaacgattctgaacgagcgtgaggcaggcggtgagactgatggcgacagacttacatggaaagagtacaaatccatgacattcacatcccaggtgataaacgagacggtccgactggccaacattgcgcctggcatcttcagaaagacactgaaagatgtacagttcagagtctacacaattccagctggatggggagtgatggtctgccctctcgcggtgcacctgaatccagatatttaccctgaccccctcaccttcaatccttcaaggtttaaggataaactagaggcaaaccgtgggtcaagacacttcatggctttcggaggaggtctccggtcctgtgttggagcagacttcagcaagctacaaatggccattttccttcactttcttgtcaccaaatataggtggatacaactaggtggaggcaagatagtccggtgtccagggctggaatttcctgatggttacctcattcagattagacagagagactaatcaacacctgctttcaagtcatgctagcagtaggaaaagcttatatcacacgtgtacaattgttctagcatgttgtttgatgaaataacagttgtgcagaagtattat

SEQ ID NO: 67445 - protein, 487 aa, Triticum aestivum
  peptide (1)..(487): Ceres Seq. ID no. 14308046
MDALAGLSAFAAVALPLLLLYSVHRWRNPRCNGRLPPGSMGLPLVGETFQFFSPDASLDVPRFIRDRLTRYGPIFKTSVVGHPVVVSADEELNHMVFQQEGELFQSWYPDSFVEILGRDNVGEQKGTMFKYLKNMVLRFFGPESLKESILRDVQRAVCSSLCTWSTLPAVDFKEAVSTMVFELSASKLLGLEPSRSKVLRKSFFDFVLGLISFPLYLPGTAYYACMQGRMSVMEVLQQVLEERTRSAEAAGGGEARCHGDFLDYVVQEITKEKPVLTEGMALDLLFVLLFASFHTTSLAITLAVKLLTDNPRVLEELTVEHETILNEREAGGETDGDRLTWKEYKSMTFTSQVINETVRLANIAPGIFRKTLKDVQFRVYTIPAGWGVMVCPLAVHLNPDIYPDPLTFNPSRFKDKLEANRGSRHFMAFGGGLRSCVGADFSKLQMAIFLHFLVTKYRWIQLGGGKIVRCPGLEFPDGYLIQIRQRD

SEQ ID NO: 67446 - protein, 448 aa, Triticum aestivum
  peptide (1)..(448): Ceres Seq. ID no. 14308047
MGLPLVGETFQFFSPDASLDVPRFIRDRLTRYGPIFKTSVVGHPVVVSADEELNHMVFQQEGELFQSWYPDSFVEILGRDNVGEQKGTMFKYLKNMVLRFFGPESLKESILRDVQRAVCSSLCTWSTLPAVDFKEAVSTMVFELSASKLLGLEPSRSKVLRKSFFDFVLGLISFPLYLPGTAYYACMQGRMSVMEVLQQVLEERTRSAEAAGGGEARCHGDFLDYVVQEITKEKPVLTEGMALDLLFVLLFASFHTTSLAITLAVKLLTDNPRVLEELTVEHETILNEREAGGETDGDRLTWKEYKSMTFTSQVINETVRLANIAPGIFRKTLKDVQFRVYTIPAGWGVMVCPLAVHLNPDIYPDPLTFNPSRFKDKLEANRGSRHFMAFGGGLRSCVGADFSKLQMAIFLHFLVTKYRWIQLGGGKIVRCPGLEFPDGYLIQIRQRD

SEQ ID NO: 67447 - protein, 393 aa, Triticum aestivum
  peptide (1)..(393): Ceres Seq. ID no. 14308048
MVFQQEGELFQSWYPDSFVEILGRDNVGEQKGTMFKYLKNMVLRFFGPESLKESILRDVQRAVCSSLCTWSTLPAVDFKEAVSTMVFELSASKLLGLEPSRSKVLRKSFFDFVLGLISFPLYLPGTAYYACMQGRMSVMEVLQQVLEERTRSAEAAGGGEARCHGDFLDYVVQEITKEKPVLTEGMALDLLFVLLFASFHTTSLAITLAVKLLTDNPRVLEELTVEHETILNEREAGGETDGDRLTWKEYKSMTFTSQVINETVRLANIAPGIFRKTLKDVQFRVYTIPAGWGVMVCPLAVHLNPDIYPDPLTFNPSRFKDKLEANRGSRHFMAFGGGLRSCVGADFSKLQMAIFLHFLVTKYRWIQLGGGKIVRCPGLEFPDGYLIQIRQRD

SEQ ID NO: 67448 - DNA, 721 bp, Triticum aestivum
  misc_feature (1)..(721): Ceres Seq. ID no. 12783233
atgtaggttctttcttccgctccggtcctggaatttgggcagccagcactgagccttcatcaccccttccgccagaggcaaagcaagactctgaactaactgaagggactgttttgactggctgtgaagaaggcccaaggaggaggcggccatgagcgagtctgggcagaggtcgagggcgtggccaccgggggacgccgcgatgacgccgtccgagccggctgcggccgcggacgcgacgggcgaggcgacgacgctgagggacttcggcacgtccatggacgccatctccttcggcttcgcggccacggccatcctcatctccatcttcctcctcatggccatcttcgagcacctcatcaggccccaggccttccaggcgccggccgactccccgggcggcagacgccggcgtggccaccgctcgcccggcaaaccccggagcccgcccatggtgcagacggtgctgcaggcggcggacctgtcggtgctgatgccggggcagcggtacccgacctacctcgcgcagccggcgccattgccgccgccgtgccccagggagggggtgcactggccgccgcacgaccaccaccgctcccacatgccaccctgaccatctcactcggtcgaaagtttcgttcagtttttgtacagcgggagattgttgtaaaagccggagaatgtgaacaaaaatcctggtttgttgtcggtgccgttctcc

SEQ ID NO: 67449 - protein, 153 aa, Triticum aestivum
  peptide (1)..(153): Ceres Seq. ID no. 12783234
MSESGQRSRAWPPGDAAMTPSEPAAAADATGEATTLRDFGTSMDAISFGFAATAILISIFLLMAIFEHLIRPQAFQAPADSPGGRRRRGHRSPGKPRSPPMVQTVLQAADLSVLMPGQRYPTYLAQPAPLPPPCPREGVHWPPHDHHRSHMPP

SEQ ID NO: 67450 - protein, 136 aa, Triticum aestivum
  peptide (1)..(136): Ceres Seq. ID no. 12783235
MTPSEPAAAADATGEATTLRDFGTSMDAISFGFAATAILISIFLLMAIFEHLIRPQAFQAPADSPGGRRRRGHRSPGKPRSPPMVQTVLQAADLSVLMPGQRYPTYLAQPAPLPPPCPREGVHWPPHDHHRSHMPP

SEQ ID NO: 67451 - protein, 111 aa, Triticum aestivum
  peptide (1)..(111): Ceres Seq. ID no. 12783236
MDAISFGFAATAILISIFLLMAIFEHLIRPQAFQAPADSPGGRRRRGHRSPGKPRSPPMVQTVLQAADLSVLMPGQRYPTYLAQPAPLPPPCPREGVHWPPHDHHRSHMPP

SEQ ID NO: 67452 - DNA, 462 bp, Triticum aestivum
  misc_feature (1)..(462): Ceres Seq. ID no. 13660322
attatttcaaaaaactcctccgtattttcgtctactactccgaattaataataatcccgcaaaatctctccgtccccagctactcccccggatccgatcgccaccgccggaatatccgatctctctgccgccgccgccgcccgagacctgctcgtcggaattccccgcggcggcgcatgtcgctggcgtgcgggctgccgctgctggagtgtgtctactgcctggggtgcgcgcggtgggcgtggaagcggtgcgtccactccggccaccacgacagcgccacctggggccacgccgccgccgccgacttcgcgcccgtgccccgcatgtgccgcctcgtcatggccaactacgccccgcccgacctcctcgccgccccgccgctcctcctcgacccctcaaacgtcgtgcgccgccgcacctacgccgacacggggggccgcgtcacgccctacctcgtct

SEQ ID NO: 67453 - protein, 153 aa, Triticum aestivum
  peptide (1)..(153): Ceres Seq. ID no. 13660323
LFQKTPPYFRLLLRINNNPAKSLRPQLLPRIRSPPPEYPISLPPPPPETCSSEFPAAAHVAGVRAAAAGVCLLPGVRAVGVEAVRPLRPPRQRHLGPRRRRRLRARAPHVPPRHGQLRPARPPRRPAAPPRPLKRRAPPHLRRHGGPRHALPR

SEQ ID NO: 67454 - protein, 153 aa, Triticum aestivum
  peptide (1)..(153): Ceres Seq. ID no. 13660324
YFKKLLRIFVYYSELIIIPQNLSVPSYSPGSDRHRRNIRSLCRRRRPRPARRNSPRRRMSLACGLPLLECVYCLGCARWAWKRCVHSGHHDSATWGHAAAADFAPVPRMCRLVMANYAPPDLLAAPPLLLDPSNVVRRRTYADTGGRVTPYLV

SEQ ID NO: 67455 - protein, 95 aa, Triticum aestivum
  peptide (1)..(95): Ceres Seq. ID no. 13660325
MSLACGLPLLECVYCLGCARWAWKRCVHSGHHDSATWGHAAAADFAPVPRMCRLVMANYAPPDLLAAPPLLLDPSNVVRRRTYADTGGRVTPYLV

SEQ ID NO: 67456 - DNA, 1204 bp, Triticum aestivum
  misc_feature (1)..(1204): Ceres Seq. ID no. 15169545
ctagtaaaaccgaccagagccgcaacaaacactatcgaaccgaagccggaggtctggcgattcgaccctcgagaggcggccgagccgagcagacgccatggaccgcgagtggggctccaagcccggcagcggcggcgccgccacctcccagaatgaggccatcgaccggcgggagcgcctgcgccgcctcgcgctcgagaccatcgacctcgccaaggacccctacttcatgcgaaaccatctcggcagctatgagtgcaagctctgcctgacgctccacaacaacgaggggaactacctcgcgcacacgcaggggaagcggcaccagaccaacctcgccaagcgtgccgcccgcgaggccaaggacgcgcccgcgcagccccagccaaacaagcgcaagctcgcgccccgcaagtctgttaagattggcagacctggatatacagtaactaaacagtatgatcctgacacgaagcaacactcttttctctttgagattgagtatcctgaaatcgaagataatagcaagccaaggcaccgtttcatggcatcatatgaacagaaaatccaatcttgggataagaggtaccaatatctgctttttgcagcggagccctatgaagtcattggctttaagataccaagcacagagattgacaaatcaacagacaagtttttctcgtattgggatccggacaagaagtcatacattctgcaactatacttcaagccaagagcaccggagattaacagacaaccagcagctcctggtactgtcccaaatgggacaggaggccctcctggtgctccaccaaggccaccatcccagccacaggctctgccgccacctccaccgaatgcacctatgggaatgccccctaggatcccgccaccaccaatgagcggtcttcaacctccaccccctccgcctccgcttgcaaatggtcctccgcgttcaataccacctccacctccttctggtggtccaatggctaactttactcctggagcacctccgccacgctttccgatgcaaggctaccctggacctcagcagtaggtgatctgagtgtgggcaagagagatcaggctacaaattttgaacacttgctttatccaaaccagtatgtgctacattgttgtctgaaattttactgtataagcagattaaattatttaagtgcgctttcaagcaaagcattct

SEQ ID NO: 67457 - protein, 320 aa, Triticum aestivum
  peptide (1)..(320): Ceres Seq. ID no. 15169546
MDREWGSKPGSGGAATSQNEAIDRRERLRRLALETIDLAKDPYFMRNHLGSYECKLCLTLHNNEGNYLAHTQGKRHQTNLAKRAAREAKDAPAQPQPNKRKLAPRKSVKIGRPGYTVTKQYDPDTKQHSFLFEIEYPEIEDNSKPRHRFMASYEQKIQSWDKRYQYLLFAAEPYEVIGFKIPSTEIDKSTDKFFSYWDPDKKSYILQLYFKPRAPEINRQPAAPGTVPNGTGGPPGAPPRPPSQPQALPPPPPNAPMGMPPRIPPPPMSGLQPPPPPPPLANGPPRSIPPPPPSGGPMANFTPGAPPPRFPMQGYPGPQQ

SEQ ID NO: 67458 - protein, 276 aa, Triticum aestivum
  peptide (1)..(276): Ceres Seq. ID no. 15169547
MRNHLGSYECKLCLTLHNNEGNYLAHTQGKRHQTNLAKRAAREAKDAPAQPQPNKRKLAPRKSVKIGRPGYTVTKQYDPDTKQHSFLFEIEYPEIEDNSKPRHRFMASYEQKIQSWDKRYQYLLFAAEPYEVIGFKIPSTEIDKSTDKFFSYWDPDKKSYILQLYFKPRAPEINRQPAAPGTVPNGTGGPPGAPPRPPSQPQALPPPPPNAPMGMPPRIPPPPMSGLQPPPPPPPLANGPPRSIPPPPPSGGPMANFTPGAPPPRFPMQGYPGPQQ

SEQ ID NO: 67459 - protein, 171 aa, Triticum aestivum
  peptide (1)..(171): Ceres Seq. ID no. 15169548
MASYEQKIQSWDKRYQYLLFAAEPYEVIGFKIPSTEIDKSTDKFFSYWDPDKKSYILQLYFKPRAPEINRQPAAPGTVPNGTGGPPGAPPRPPSQPQALPPPPPNAPMGMPPRIPPPPMSGLQPPPPPPPLANGPPRSIPPPPPSGGPMANFTPGAPPPRFPMQGYPGPQQ

SEQ ID NO: 67460 - DNA, 1993 bp, Triticum aestivum
  misc_feature (1)..(1993): Ceres Seq. ID no. 13660790
acctagaacatcctaatcaaaaaggcagcgtagcagaagcatttccggcaccgaaatttccatcgatctgaacgcccccaccggccggtcgaccctccaccaccacctaccggccccgtcgccgtcgccgtcgtctccagccccccctccgcccccaaaaccctagccccggccccggccccgccgcccccagagcccccaccatgtccaccaacggcagctccccgagggtcagggacacggagagcagcctggagaaggtgaagcggcagctgtcgacgggatccgggaggtacctgctgcagggccccctgctgaagcgatctgagacgctacggaaatggaacgaaagatggataatattggacccaacgtctggcaagatggaatacaaacttcggaggaatgaaactgctgttaagggaaccattctatttgatgcttcaagcaccattactttgtctcctgtaaattttcaaggcatgccaaagtatgacggatgctgtttctacattggaactcctcagaaaaaggattactttctttgcgctgaaactcctggtgctgccaaagcttgggtatctacattgcatgcaactcagttagtactacaagcgcataaagaggcagtaaattctttagctgggaatggctctccttctacattaggcacggttgctactgcagttgctaatgctaatgcaactgctttggaggcaatgaaggagatagatgcagcactgaaggtttcaatgagggcagctcttgggttgggtacaaataattcgaatgtgggtcaacttgatgatttgactatcatgaaggagactctccgagtgaaagatgaggagttgcagcatttggctaaggacattcgtgctcgtgacgccacaattcaggaaattgcagagaagttaacagagaccgcagaggctgcagaagcagcagcttctgcagctcatacaatcgatgaacagagacggcttctatgttcagagattgagcgtctgaaaaaagcaatggaaacacaaatggaacaatccatgcttaagctacggcaatctgaagagaaggtaattagcctgagcaaagagaacgaccagttgctgaaggaaagagacgccgcatttcaggaagcatatatgtggcgcactgaactaggaaaagctagagagcaagcagtgatacaggaagcagcaattgcccgagcagaggaaaaggtaagggtgtctgaagcggatgccgcggttcggcatcaaggaagctgctgaaaatttgcatgctgctgagaaagaaaaagaagaacttctagcccttattggtgttctccaatcacaagtgcagagagaacaaagcagcacgaagcaagtatgcgaggagagatccgagtcatgctccggcgccgacaactcccctccgctgacgaagcacgtcgacgcatcggacgacgacgtggacaaggcgtgcgtgagcgattcgagatcggtcttggtctcgagcgagagcacggaggtccagctggccgtggatggggtggacatccgccccatcggcgacccagagtggggcagcttccagcagccggaagcgctgattgccgacgtgcgggaggtctccccggaggcggaaggcagcagcctggatatcccggtggtcaacccggcaccggccaatgatcatatgcagggaggggcaacacatccctgaaggcctggaggtcttggagctgaccattgctttcttgggtggtttgtgattattgaggagactggcagggatttgaatcctctcgagaattacttttgtgtttttctttttgcgctgtttccgggttgtgtctccgttgtatttaagtatgcaactcaataaaaagatgatagcggtttgtcgtgtgattgtaaattattattcacgtcaaaaaaaaaaaaaaaaaagcttatcgattgtttaaacacaataaagtyggamcksgagggggggcccggtacccaat

SEQ ID NO: 67461 - protein, 355 aa, Triticum aestivum
  peptide (1)..(355): Ceres Seq. ID no. 15220057
MSTNGSSPRVRDTESSLEKVKRQLSTGSGRYLLQGPLLKRSETLRKWNERWIILDPTSGKMEYKLRRNETAVKGTILFDASSTITLSPVNFQGMPKYDGCCFYIGTPQKKDYFLCAETPGAAKAWVSTLHATQLVLQAHKEAVNSLAGNGSPSTLGTVATAVANANATALEAMKEIDAALKVSMRAALGLGTNNSNVGQLDDLTIMKETLRVKDEELQHLAKDIRARDATIQEIAEKLTETAEAAEAAASAAHTIDEQRRLLCSEIERLKKAMETQMEQSMLKLRQSEEKVISLSKENDQLLKERDAAFQEAYMWRTELGKAREQAVIQEAAIARAEEKVRVSEADAAVRHQGSC

SEQ ID NO: 67462 - protein, 295 aa, Triticum aestivum
  peptide (1)..(295): Ceres Seq. ID no. 15220058
MEYKLRRNETAVKGTILFDASSTITLSPVNFQGMPKYDGCCFYIGTPQKKDYFLCAETPGAAKAWVSTLHATQLVLQAHKEAVNSLAGNGSPSTLGTVATAVANANATALEAMKEIDAALKVSMRAALGLGTNNSNVGQLDDLTIMKETLRVKDEELQHLAKDIRARDATIQEIAEKLTETAEAAEAAASAAHTIDEQRRLLCSEIERLKKAMETQMEQSMLKLRQSEEKVISLSKENDQLLKERDAAFQEAYMWRTELGKAREQAVIQEAAIARAEEKVRVSEADAAVRHQGSC

SEQ ID NO: 67463 - protein, 262 aa, Triticum aestivum
  peptide (1)..(262): Ceres Seq. ID no. 15220059
MPKYDGCCFYIGTPQKKDYFLCAETPGAAKAWVSTLHATQLVLQAHKEAVNSLAGNGSPSTLGTVATAVANANATALEAMKEIDAALKVSMRAALGLGTNNSNVGQLDDLTIMKETLRVKDEELQHLAKDIRARDATIQEIAEKLTETAEAAEAAASAAHTIDEQRRLLCSEIERLKKAMETQMEQSMLKLRQSEEKVISLSKENDQLLKERDAAFQEAYMWRTELGKAREQAVIQEAAIARAEEKVRVSEADAAVRHQGSC

SEQ ID NO: 67464 - DNA, 1652 bp, Triticum aestivum
  misc_feature (1)..(1652): Ceres Seq. ID no. 13660333
gaacatcctaatcgaaaaaaatgcccccgaacagctgccgcgcaccgccatgccctctgcatcgacggccaccaaccagctccccttcctcctctcacctccccagcagatcacgcggcgagggaacgaagcccaccaccgacaaactcctccttctcttccagcttcccctcctccggcgccggtcctgcggcggccatggggatggtgcgggcggcgtggtttctgctcctgttggcgttgctcgcggcggcggacgcaaggaggcagaagggcggcgagacggcctgcgacaaggggtgggagtgcagcggcagcaggttctgctgcaacgagaccatcaccgactacttcaaggcctaccagttcgaggagctcttcgccaagcgcaacaactccctcgcccacgccgccggcttctgggactacaaggccttcatcaccgccgcggccctctacgagcctcgtgggttcggcaccaccggcggcagggagatgagcatgaaggaggtcgccgccttcctcggccacgtcggcgccaagacctcgtgtggatatagtctagctgacggtggttcattggcttggggtctttgctacaaccatgaaatgagcccaagccagagctactgtgacgacagcaacgaattataccgttgtgctgaaggagttgagtactatggtcgaggcgcccttcctgtttactggaactacaactatggtatcgtgggtaagggtatcaagcaggatctgttgaaccacccagagttattggaacaaaatgccactctagcatttgaagcagcgatctggaggtggatgactccaatgaagaggaagcagccatcagcccatgatgcctttgttggcaactggaaaccaaccaagaaagacactttgtccaagaggtatcctggcttcggtgcgacaatgaacattttgtatggtgatgccatctgtggtaaagggtccattgataatatgaatggcattatatcccactatcaacattatcttgatttgatgggagttggtgctcagcactctggagataacttggattgtgccgaccaagtgccattcaatccatcatcaaagagtcccgactcataaccaagttgcatgtcagatccatgtatattccccctgtacatttgaggtgcagctatcttgcatccgcaacgatagaagtattgtgtgcaattctatatgatagtactccctccgtttttatttagtccgcatattagctttggtcaaagtcaagctttgtaaactttgactaagtttataaacaaaaatattaacatatacaataaaaaatcaataccactagattcattattgaatgtactttcacatcatatagatttgttatggtaaatgtttatatatttttctataaatttggtcaaactttgcaaagtttgacttcggtcaaacctaatatgcagactgaataaaaacggagggagtatttattagtagctctgaggacgactgttgcatttgtgtagtctgtaacctatttatgtaagcccgtaaccttctctcattttgtgtttttgccatgtatattacagcagagaactcgcatttgaacacatgatgacttccttgtaaattatattacttctgttactaaaggtggg

SEQ ID NO: 67465 - protein, 370 aa, Triticum aestivum
  peptide (1)..(370): Ceres Seq. ID no. 15220020
EHPNRKKCPRTAAAHRHALCIDGHQPAPLPPLTSPADHAARERSPPPTNSSFSSSFPSSGAGPAAAMGMVRAAWFLLLLALLAAADARRQKGGETACDKGWECSGSRFCCNETITDYFKAYQFEELFAKRNNSLAHAAGFWDYKAFITAAALYEPRGFGTTGGREMSMKEVAAFLGHVGAKTSCGYSLADGGSLAWGLCYNHEMSPSQSYCDDSNELYRCAEGVEYYGRGALPVYWNYNYGIVGKGIKQDLLNHPELLEQNATLAFEAAIWRWMTPMKRKQPSAHDAFVGNWKPTKKDTLSKRYPGFGATMNILYGDAICGKGSIDNMNGIISHYQHYLDLMGVGAQHSGDNLDCADQVPFNPSSKSPDS

SEQ ID NO: 67466 - protein, 304 aa, Triticum aestivum
  peptide (1)..(304): Ceres Seq. ID no. 15220021
MGMVRAAWFLLLLALLAAADARRQKGGETACDKGWECSGSRFCCNETITDYFKAYQFEELFAKRNNSLAHAAGFWDYKAFITAAALYEPRGFGTTGGREMSMKEVAAFLGHVGAKTSCGYSLADGGSLAWGLCYNHEMSPSQSYCDDSNELYRCAEGVEYYGRGALPVYWNYNYGIVGKGIKQDLLNHPELLEQNATLAFEAAIWRWMTPMKRKQPSAHDAFVGNWKPTKKDTLSKRYPGFGATMNILYGDAICGKGSIDNMNGIISHYQHYLDLMGVGAQHSGDNLDCADQVPFNPSSKSPDS

SEQ ID NO: 67467 - protein, 302 aa, Triticum aestivum
  peptide (1)..(302): Ceres Seq. ID no. 15220022
MVRAAWFLLLLALLAAADARRQKGGETACDKGWECSGSRFCCNETITDYFKAYQFEELFAKRNNSLAHAAGFWDYKAFITAAALYEPRGFGTTGGREMSMKEVAAFLGHVGAKTSCGYSLADGGSLAWGLCYNHEMSPSQSYCDDSNELYRCAEGVEYYGRGALPVYWNYNYGIVGKGIKQDLLNHPELLEQNATLAFEAAIWRWMTPMKRKQPSAHDAFVGNWKPTKKDTLSKRYPGFGATMNILYGDAICGKGSIDNMNGIISHYQHYLDLMGVGAQHSGDNLDCADQVPFNPSSKSPDS

SEQ ID NO: 67468 - DNA, 882 bp, Triticum aestivum
  misc_feature (1)..(882): Ceres Seq. ID no. 13660334
aaaggcaaaccccaagaaaccccaaccggccaccaccaccaccacctcccgtcccgaccccgagacaaacacctcccactcgcggccatgcccccctgccaccgccgctgctgactagccatctgcgccgcgaccggtcaacatctatctcgccggaacatctgaatcaacatggacccggcccaggaggagctcgagcgccgcagccgctacctcagctcgctcgttcgccgcaccaggctcgacgacccgccccagccggagccggagccggagcgagagctcaaggtggagcggaaatcggcggcggagcccagcggcggggagggcaaggccgctaagccggaggccaaggacaacagggaggcggcgaaggtcaaaggggacgccgcgagcggggaggggaggaaggtggcggtgcgggtgcgcgcggcggacatgccgctggcgctgcagcggcgcgcgatctggatcgcccgggaggtcgtcctctccacgccgcgcctcgagagcaagcgcctcgcgctcgcgctcaagaaggaattcgacacgacatacgggcctgcttggcactgcattgtcggcacaagctttggctcctacgtcactcactccttaggaggcttcctgtacttttccgttgacaaggcgtacattcttctcttcagaaccgctgtcgagccactgagtaaaccgtgatgaggcctggaacctatcttctcacacacaagtgtagatttagcgcaaatgtgtaatttaaactgctgttttaggagctcgacggtagcaagtgtaagcagtggagaaggatcacctctccgcatacagaagtgtagcaaacatgcctctatgacctttaagtatctacgtaagctgctgctg

SEQ ID NO: 67469 - protein, 175 aa, Triticum aestivum
  peptide (1)..(175): Ceres Seq. ID no. 13660335
MDPAQEELERRSRYLSSLVRRTRLDDPPQPEPEPERELKVERKSAAEPSGGEGKAAKPEAKDNREAAKVKGDAASGEGRKVAVRVRAADMPLALQRRAIWIAREVVLSTPRLESKRLALALKKEFDTTYGPAWHCIVGTSFGSYVTHSLGGFLYFSVDKAYILLFRTAVEPLSKP

SEQ ID NO: 67470 - protein, 112 aa, Triticum aestivum
  peptide (1)..(112): Ceres Seq. ID no. 13660336
RQTPRNPNRPPPPPPPVPTPRQTPPTRGHAPLPPPLLTSHLRRDRSTSISPEHLNQHGPGPGGARAPQPLPQLARSPHQARRPAPAGAGAGARAQGGAEIGGGAQRRGGQGR

SEQ ID NO: 67471 - DNA, 996 bp, Triticum aestivum
  misc_feature (1)..(996): Ceres Seq. ID no. 12780822
atacttctctagtttatactaccccggatccccttgctttgcgcgcgctagtaggagtacgccgcctgccgccatctccgttagactagtcgccagcgccatatggaggactacggcggcgtggcgagcctggtggcgtccggggtggtgttgtggtcgacggcgttcctgctgctgcgggcgctgctccccaagcgctcctacgacttctgcaaccgcgcggtctccaccatgcacgccgtcgccggcgtcgccctcggctgcctctccgtgcaggactgggcctcccccgtctcccccgtcgcctcaccctcctcgccaagccagatgagggcgctggcggtgacgctgtcctacatgatctacgacggggcgtgctgccacctgagcggcgacgcgcggttggacaacgccttgcaccacctcatcagcatcgtcggcctcgccgccggcctcgcctaccagaggtgtgggacggagctggtggcgtgcctgctcgtcacggagatatccagcccgctgctgcacctcagggagatgctcaaggagctcggcgtcaaggacacggacctcaacctcctcgtcgacatcctgttcgcggtgaccttctcggtggcacggatggtttgcgggacgtacgtcacctaccgcactgtcacggctgacaaccccatcctcatcaaggcgatggcgacgagcttgctgctggtgagcgcctactggttcttgaggatcctcaggatggtcaggcacaagattgggaagaagaggctggcgtccaaagccgccggcaaggaatctatgtgatgccacaagtggtgtctcgccgcaattattgttgaaaatgcacgttatgtagtagtactactatctagcgcattaatcgtgtggtgggtaaaggatgatgtcccaagcatgagatgcatgtattctggtcattttcattttattaatgtgcatgaactgttaatgtcacaagcatgagctgtttcgctc

SEQ ID NO: 67472 - protein, 234 aa, Triticum aestivum
  peptide (1)..(234): Ceres Seq. ID no. 12780823
MEDYGGVASLVASGVVLWSTAFLLLRALLPKRSYDFCNRAVSTMHAVAGVALGCLSVQDWASPVSPVASPSSPSQMRALAVTLSYMIYDGACCHLSGDARLDNALHHLISIVGLAAGLAYQRCGTELVACLLVTEISSPLLHLREMLKELGVKDTDLNLLVDILFAVTFSVARMVCGTYVTYRTVTADNPILIKAMATSLLLVSAYWFLRILRMVRHKIGKKRLASKAAGKESM

SEQ ID NO: 67473 - protein, 191 aa, Triticum aestivum
  peptide (1)..(191): Ceres Seq. ID no. 12780824
MHAVAGVALGCLSVQDWASPVSPVASPSSPSQMRALAVTLSYMIYDGACCHLSGDARLDNALHHLISIVGLAAGLAYQRCGTELVACLLVTEISSPLLHLREMLKELGVKDTDLNLLVDILFAVTFSVARMVCGTYVTYRTVTADNPILIKAMATSLLLVSAYWFLRILRMVRHKIGKKRLASKAAGKESM

SEQ ID NO: 67474 - protein, 159 aa, Triticum aestivum
  peptide (1)..(159): Ceres Seq. ID no. 12780825
MRALAVTLSYMIYDGACCHLSGDARLDNALHHLISIVGLAAGLAYQRCGTELVACLLVTEISSPLLHLREMLKELGVKDTDLNLLVDILFAVTFSVARMVCGTYVTYRTVTADNPILIKAMATSLLLVSAYWFLRILRMVRHKIGKKRLASKAAGKESM

SEQ ID NO: 67475 - DNA, 2112 bp, Triticum aestivum
  misc_feature (1)..(2112): Ceres Seq. ID no. 13660894
aaaaaagaactcattgccacagttgaatgaatgccgccgccactttcactgctccacgcgcgcaagctccacgcgacgctcctcaagtccggtcaccatggcgacgcctaccgctgcaacctcctcctccgcgcctacacccgcggcggcgcactggccgacgcccgccacctactgbacctcatgccgtccccgaccctcgtctcctacaacaccgtcctctccggctacgcctcctcctcgacccccggcctccttgacgccgccctgcacctgctagacgggatgcccgaaagggactcctggtcctggaacaccgccatatctggccttgcacgcgccggccgggctcgcgacgcgctgcgaaggttcctgcagatgacgcgcacccccgtggcgccggacgctttcacgtactccatcgtctcgccgtgctgtggcgttgacctaggatccgcgggtcaggtccacgcgcgggctctcaaggccggggtgttcgcggacgcctgcgtcggcactagtttcatcaagctgtacgcagagctgggcctgatggaggatgcacgcaaggtgttcgattgtatgccgctgagagatctagtgtcatggaatgtgctcctggactgcggtgtgaggtccggcgaagcaggatcatgtatgaaggagtttcttagcatgaccggctgcggggttcggcctgatgagttcacctttgccactgtcttgaatggtttggctgagcggtctgcaggtctagaggcaatgcaggtacactcagttattctaaaatctggatatcttagggatcttttcctatgcaattgtttgctggacgtgtacgggagatgcggttacgttgacttggccaagaagctgtttgatgctatgcttgagaaggatgttgtgtcgtggaccgctgtgatttcagggcttgcagcctgcggttaccaggctgatgccttcgacatattttgccagatgctgaaagctgcaatgctgcccaattcattcacatttgggagcatagtaagctcatgtgcatatgtgaatgaccttggcagtgggaggcagtgtcatgctcttgctgtcaagcatgggttagaacttgttcctatagttgccagctgttttatcgatatgtactcaaagtgcgccaagatggatgatgcaataagaatgtttgagatcatgccacagagagacattgtatcttggaatgcaatgatatgtggattagctcagaatggtcaatcagcgagatctcttgagctgtatgatgaaatgatgcgacttcattgtgaatcggtcaccccaaactcagtaacttttgtgagtgtcctgagcgcatgcagccatgctggtaatgtccaaaaaggttgcagctactttactcaaatggttaatgacttccacatcgrgaaccaatttcagagcactacacttgccttatcgatctctttgcgcgagctggatggttagatgaagcagaagagatcatttcaaacttacctttcaaacatgatgctgttatcctgggcaccatgcttaatggctgcagaaaatatggtaaccttgacatggctaagcgctttgctaagaggcttctagtgaataatccagataatgcatcggccatttttctactctcaaatatgtacattgcaaatgaagaatggagtaatgcctcggagctgagggatgctgcgatttcaagtggaactcataaagtcatggggaatagctggattgatgttggtggtcatgtacaatgtttcagagcgggttctagtccagatgcataattcgaacatatatatgatgttctgcaacaacttcagttgatgatggtagatgctgacaagctggtcacacagattaactccttatgtacttatattaacagtgagtagtgacaactatgctttattttgatgagtttcaaattcaaattaagtagtatgtgctacttgggttgtttttgcaagaccgatttggatagtatttatatgcgagaaggttagttatttatgcaatgcaacctactacgtcagtcaaaahaaaaaaaaaaaaagcttatcgataccgwcgacctcgagggggggcccggtaccc

SEQ ID NO: 67476 - protein, 482 aa, Triticum aestivum
  peptide (1)..(482): Ceres Seq. ID no. 15220063
  misc_feature (50)..(50): Xaa is any aa, unknown or other
  misc_feature (463)..(463): Xaa is any aa, unknown or other
MPPPLSLLHARKLHATLLKSGHHGDAYRCNLLLRAYTRGGALADARHLLXLMPSPTLVSYNTVLSGYASSSTPGLLDAALHLLDGMPERDSWSWNTAISGLARAGRARDALRRFLQMTRTPVAPDAFTYSIVSPCCGVDLGSAGQVHARALKAGVFADACVGTSFIKLYAELGLMEDARKVFDCMPLRDLVSWNVLLDCGVRSGEAGSCMKEFLSMTGCGVRPDEFTFATVLNGLAERSAGLEAMQVHSVILKSGYLRDLFLCNCLLDVYGRCGYVDLAKKLFDAMLEKDVVSWTAVISGLAACGYQADAFDIFCQMLKAAMLPNSFTFGSIVSSCAYVNDLGSGRQCHALAVKHGLELVPIVASCFIDMYSKCAKMDDAIRMFEIMPQRDIVSWNAMICGLAQNGQSARSLELYDEMMRLHCESVTPNSVTFVSVLSACSHAGNVQKGCSYFTQMVNDFHIXNQFQSTTLALSISLRELDG

SEQ ID NO: 67477 - protein, 431 aa, Triticum aestivum
  peptide (1)..(431): Ceres Seq. ID no. 15220064
  misc_feature (412)..(412): Xaa is any aa, unknown or other
MPSPTLVSYNTVLSGYASSSTPGLLDAALHLLDGMPERDSWSWNTAISGLARAGRARDALRRFLQMTRTPVAPDAFTYSIVSPCCGVDLGSAGQVHARALKAGVFADACVGTSFIKLYAELGLMEDARKVFDCMPLRDLVSWNVLLDCGVRSGEAGSCMKEFLSMTGCGVRPDEFTFATVLNGLAERSAGLEAMQVHSVILKSGYLRDLFLCNCLLDVYGRCGYVDLAKKLFDAMLEKDVVSWTAVISGLAACGYQADAFDIFCQMLKAAMLPNSFTFGSIVSSCAYVNDLGSGRQCHALAVKHGLELVPIVASCFIDMYSKCAKMDDAIRMFEIMPQRDIVSWNAMICGLAQNGQSARSLELYDEMMRLHCESVTPNSVTFVSVLSACSHAGNVQKGCSYFTQMVNDFHIXNQFQSTTLALSISLRELDG

SEQ ID NO: 67478 - protein, 397 aa, Triticum aestivum
  peptide (1)..(397): Ceres Seq. ID no. 15220065
  misc_feature (378)..(378): Xaa is any aa, unknown or other
MPERDSWSWNTAISGLARAGRARDALRRFLQMTRTPVAPDAFTYSIVSPCCGVDLGSAGQVHARALKAGVFADACVGTSFIKLYAELGLMEDARKVFDCMPLRDLVSWNVLLDCGVRSGEAGSCMKEFLSMTGCGVRPDEFTFATVLNGLAERSAGLEAMQVHSVILKSGYLRDLFLCNCLLDVYGRCGYVDLAKKLFDAMLEKDVVSWTAVISGLAACGYQADAFDIFCQMLKAAMLPNSFTFGSIVSSCAYVNDLGSGRQCHALAVKHGLELVPIVASCFIDMYSKCAKMDDAIRMFEIMPQRDIVSWNAMICGLAQNGQSARSLELYDEMMRLHCESVTPNSVTFVSVLSACSHAGNVQKGCSYFTQMVNDFHIXNQFQSTTLALSISLRELDG

SEQ ID NO: 67479 - DNA, 488 bp, Triticum aestivum
  misc_feature (1)..(488): Ceres Seq. ID no. 13660895
actgacaacttattaattcggccacatcgccgcctgtcccagccagccagtccaacccgcccgccgtccaacaccccgcgcgcacaccaccgccgccgccgtcgaccccttcctccctcgcacccatggcgttcgcactcaaggcctccgcctcccccgccctcgccgctgcctcctcggcggcgtcgtccccctccttctcggccgcctccgcggcgccgaggggccgcgccgccgcggcgaggagggtctcgctccgcggggccgcgcaccccgttgccgccatcagggcgtccgccaccgccngtggccggggacaagcgcaccatctccggcacgttcaccaacctcaaggagcaggacaagatcgcgttcatcccgttcatcgtcgccggcgaccccgacttggcgaccacggcgaaggcgctaaaggttctcgatgcgtgtggttctgatgtgatcgaattgggcgtgccgtactctgatcc

SEQ ID NO: 67480 - protein, 162 aa, Triticum aestivum
  peptide (1)..(162): Ceres Seq. ID no. 13660896
  misc_feature (102)..(102): Xaa is any aa, unknown or other
TDNLLIRPHRRLSQPASPTRPPSNTPRAHHRRRRRPLPPSHPWRSHSRPPPPPPSPLPPRRRRPPPSRPPPRRRGAAPPRRGGSRSAGPRTPLPPSGRPPPXVAGDKRTISGTFTNLKEQDKIAFIPFIVAGDPDLATTAKALKVLDACGSDVIELGVPYSD

SEQ ID NO: 67481 - protein, 109 aa, Triticum aestivum
  peptide (1)..(109): Ceres Seq. ID no. 13660897
  misc_feature (61)..(61): Xaa is any aa, unknown or other
MAFALKASASPALAAASSAASSPSFSAASAAPRGRAAAARRVSLRGAAHPVAAIRASATAXGRGQAHHLRHVHQPQGAGQDRVHPVHRRRRPRLGDHGEGAKGSRCVWF

SEQ ID NO: 67482 - DNA, 1892 bp, Triticum aestivum
  misc_feature (1)..(1892): Ceres Seq. ID no. 13660898
ctagctcagatcccccatcgcacccctcctccctcatccccatctcctcgccgccgccgccacctcctccccgtcctctgcaccactcctcgtcgccaacctcgccgccgccacctcttccccgtcccctgcaccactccctgatccctcctccggccccatccccggccatccccggccatccgtcccagtcgctgctctctctcggttcagtgagatgggatccactcccgcagccgccgctccaccctcaccgtcaacgacccatgccgccgccgcacaccaccgcgccctcccctcaccttggccccaagtcgggcagtgcgaggcggcgcttccagaccgcgatggccgcaaccttgcccactccgatctggatccatggtgcactccttcctccctctggatcgatggccgcagcctcgccgatggatccagcgcctgccggagacgagggctgccagatccgcgacctgggacgctcctcctgtaggatacgggagcagcacaccgcaccctgcagtcgtcggtccgggacgagcgcagcagctcgaggaagccggcgacaaacgccggcgctcctctgctccatcgacctggacggctgctactccgccaaagacgccgcctacaggaggtgctctactcttgcgcatgtctggtggcgtctccggcgcagtggtacttcttgaggtgactggcgtgacggcggctgtgtatggcggtgaccacaagctctccggtccggcttgtggggattgtcagcggcaaggcagagcggaacacggacgtgtccttcacgctcgacgacggcaccggccgtatcgacttcatcagatgcctggagcagaaggtgattccataatgcaaggtggctgactaggcggtgctcatcaacgcctactgcccctctcgccccctaaagcgcaactacatgtatgcttatacttccagccaaactcaacaacctcatcgacggtccgtgctgctgcctcccacaagtgttgatgtatgtagagaagctggtgagttgatgtgtagcttcatttgcctaatataagtgtaatctaactgctcagagctcaagataacctgtgatatgacatgctacggtactaattggaacatttctgatgcctgggagccacccgtccttagtttctgctttggttactcgctgtgctttgtgattaagtgagctgttgtaatctccgtactagcttacaagttggaatgcaaaattgcttgtgtcaatgctatgtgtagttgtgtcgtgtgtactactttgaaacgtcggtctatggttgtagaagctctactttatgctaatacttgcttggtccttcatatcaaagcttgcatgtactgtagaagctctactttatgctaatacttgcttgtgtaacatttttcatggcatacttctaaatggacaagtacgtgcgacttccagcgtcaacgatgatgcggaccatatgttcaactgcagccccatccattgcatcgacacaaagatgttttgcatcagcctgtcattgctaagggagaagcgggacttggagaggaaatctttccattaagcagattacatgtttggttgctgtgaagtaccagataggctagttctatttttttcacgtcctggagtatttcagcagcgccatgcaaatgcattagcgttaggtttctgattcaccttttgtaaaaacttagttagcccgcagtcagtcagtagtagctcagccagccagccagcctcaaatagtattgctggaatgaatgcttgtaatataataacattgcacgttgctttgaaaatgtatgagaactgggctaggcctaagataacttgtggtgtgatgtgttgtaatgtcaatggcataatatttttt

SEQ ID NO: 67483 - protein, 229 aa, Triticum aestivum
  peptide (1)..(229): Ceres Seq. ID no. 13660899
SSDPPSHPSSLIPISSPPPPPPPRPLHHSSSPTSPPPPLPRPLHHSLIPPPAPSPAIPGHPSQSLLSLGSVRWDPLPQPPLHPHRQRPMPPPHTTAPSPHLGPKSGSARRRFQTAMAATLPTPIWIHGALLPPSGSMAAASPMDPAPAGDEGCQIRDLGRSSCRIREQHTAPCSRRSGTSAAARGSRRQTPALLCSIDLDGCYSAKDAAYRRCSTLAHVWWRLRRSGTS

SEQ ID NO: 67484 - protein, 165 aa, Triticum aestivum
  peptide (1)..(165): Ceres Seq. ID no. 13660900
MVHSFLPLDRWPQPRRWIQRLPETRAARSATWDAPPVGYGSSTPHPAVVGPGRAQQLEEAGDKRRRSSAPSTWTAATPPKTPPTGGALLLRMSGGVSGAVVLLEVTGVTAAVYGGDHKLSGPACGDCQRQGRAEHGRVLHARRRHRPYRLHQMPGAEGDSIMQGG

SEQ ID NO: 67485 - protein, 141 aa, Triticum aestivum
  peptide (1)..(141): Ceres Seq. ID no. 13660901
MPPPHTTAPSPHLGPKSGSARRRFQTAMAATLPTPIWIHGALLPPSGSMAAASPMDPAPAGDEGCQIRDLGRSSCRIREQHTAPCSRRSGTSAAARGSRRQTPALLCSIDLDGCYSAKDAAYRRCSTLAHVWWRLRRSGTS

SEQ ID NO: 67486 - DNA, 1758 bp, Triticum aestivum
  misc_feature (1)..(1758): Ceres Seq. ID no. 14303079
acacgacgcctctctcccgttcacccgtcccgattccggatcactccctctcctctcctctcttctccactcccccgccgagatatttcacgcggcccgcccgccatgtcgctgctcgccgtcgtcaccagccgcgccgcgcccgtgcgcccgctccgcgcctcggcggcctcgggagaggcggcggcggccgccgcggaccagccgggggagcggaggccggtcaagataatactgcccaagaagaagccgcagaagtggtccacggggatggagccggggtcgtacggcggcggcccgaccaccatcaagccgcgcaagtactggatggggaaggaggaccgcgaccccattggcaacaccgacgacttcatctggaacaagaacttcctcccccacatggagcgcgtcatcgccaacggcggtacggacacgcccgccaccatcccccgcgtcacgccggcggacgaggactcagggtttctaagcttcaaccgcgcaatggaccttgacagtgtggatgttgatctgagcaaggagcttatggcaccggccaagtcaatcttgcagacgcagctcaaggctgcccgccgtggtcgatccactagcgttgaggctgtcaatagacccacctacattagatggaagctagctccgactcgacgggagcaggagcaatgggaccgagcgaccagggcaaccaccggtggcattgatgtcatactaagggagtcgcagcagaaagtgcagctgaaaggggaccctaaggtggtggcagctgaggccagagagcaatacctgaagttgaaagaaaggttgcagctgcttactttaggtattggtggcgtcggggtggtttctgcttatgtttcatacactcctgaaattgctgcgagctttagtgcagggctgattggatctctggtgtatctccgcatgcttggaaccagtgtggattctttagcgggtggaactaaagcagctgccaagggcgctgcggcacagccaagattgcttattccaatggttcttgtgatgatgtacaatcgatggaatgcgtaagtagatcaagtcttttaaaatacttcctctgcctcttgaactgcaaaaacgtcttatatttagaggcagagggagtattttctgctgaaatattttcgtaatatgtcaaacaaacaaaaaaaaacgtacatgcatgtttgcctttgctttttctgatgcaggatactggttccagagtacggcttcatgcacctggagttgatacccatgctccttgggttctttacctacaagattgctatgtttactcaagcgattcaggaatcagtacctgatgctggaaaccgcgaagtttgaacactgttttggctaatagaaaaacaaagagaaggtcttattaaaggttttagaagagtctaatctggggcctggagatgccgccaggtacgtagatgagatgcacgctgaggctgaggatactgtctgaacatattaccaacattccgcggagaaagtttactttgttgactgtacaaaagggagttggccaacacaaattcaagttccgtgtagtgtacacctttgaacttttggtgcactgaccccgactcctatggttgagctggcatctaacattatttacgcaaggaggtcggcaggattcggatcagtacagaatgtaaatagcgcgagctgtcaatatactagctcgggaagctctatattttacaaagtgctaaaaaaatgatatattac

SEQ ID NO: 67487 - protein, 353 aa, Triticum aestivum
  peptide (1)..(353): Ceres Seq. ID no. 14303080
TRRLSPVHPSRFRITPSPLLSSPLPRRDISRGPPAMSLLAVVTSRAAPVRPLRASAASGEAAAAAADQPGERRPVKIILPKKKPQKWSTGMEPGSYGGGPTTIKPRKYWMGKEDRDPIGNTDDFIWNKNFLPHMERVIANGGTDTPATIPRVTPADEDSGFLSFNRAMDLDSVDVDLSKELMAPAKSILQTQLKAARRGRSTSVEAVNRPTYIRWKLAPTRREQEQWDRATRATTGGIDVILRESQQKVQLKGDPKVVAAEAREQYLKLKERLQLLTLGIGGVGVVSAYVSYTPEIAASFSAGLIGSLVYLRMLGTSVDSLAGGTKAAAKGAAAQPRLLIPMVLVMMYNRWNA

SEQ ID NO: 67488 - protein, 318 aa, Triticum aestivum
  peptide (1)..(318): Ceres Seq. ID no. 14303081
MSLLAVVTSRAAPVRPLRASAASGEAAAAAADQPGERRPVKIILPKKKPQKWSTGMEPGSYGGGPTTIKPRKYWMGKEDRDPIGNTDDFIWNKNFLPHMERVIANGGTDTPATIPRVTPADEDSGFLSFNRAMDLDSVDVDLSKELMAPAKSILQTQLKAARRGRSTSVEAVNRPTYIRWKLAPTRREQEQWDRATRATTGGIDVILRESQQKVQLKGDPKVVAAEAREQYLKLKERLQLLTLGIGGVGVVSAYVSYTPEIAASFSAGLIGSLVYLRMLGTSVDSLAGGTKAAAKGAAAQPRLLIPMVLVMMYNRWNA

SEQ ID NO: 67489 - protein, 263 aa, Triticum aestivum
  peptide (1)..(263): Ceres Seq. ID no. 14303082
MEPGSYGGGPTTIKPRKYWMGKEDRDPIGNTDDFIWNKNFLPHMERVIANGGTDTPATIPRVTPADEDSGFLSFNRAMDLDSVDVDLSKELMAPAKSILQTQLKAARRGRSTSVEAVNRPTYIRWKLAPTRREQEQWDRATRATTGGIDVILRESQQKVQLKGDPKVVAAEAREQYLKLKERLQLLTLGIGGVGVVSAYVSYTPEIAASFSAGLIGSLVYLRMLGTSVDSLAGGTKAAAKGAAAQPRLLIPMVLVMMYNRWNA

SEQ ID NO: 67490 - DNA, 1876 bp, Triticum aestivum
  misc_feature (1)..(1876): Ceres Seq. ID no. 14307892
atattcccgagagagaaagaatccagcccccacccgccgccgcgccgctgatagcgagcgtgacagagtcctcccccattaaacccccccgcccgccgccgcgtccaccgccaccgccagaccacgcagcccgcaatcgccgaccgaggcaccgccggtggtcggagaagcgctacgaacgccgaggacgcgcgccatggagggcagagcgccgctgctgccccggcgccaagaggcggccaagagcggcgggtggcgttgcggggcggcggcggcggaggccaggaaggtcgcgcacgtggcgctgccgatggcggccgtgagcgtggcgcagtacgccgtgcaggtggcctccaacatgatggtcggccacctccccgggggcgtgctggcgctctccgcctccgccatcgccacctccctcgcctccgtatccggattcagcctcctcattggaatgtcaaacggcttagaaactctctgtggtcaagcttacggggccgaacaatatggcagattgggagtgcaaacctacagagctatggtcaccctgacggctgtcagcattccaatctcacttctctggatattcatgggaaaactcctgaccctcataggccaggaccccgtgatctcgcatgaagccgggagatacataatgtggttgattccggccctctttgcatatgctgtcagccagcccctaacaaagttcttacagtctcagagtctgataatccctatgctctggtcctccattgcaacattgctcttgcacattcctgtttgctggttattggtgttcaagaccagccttgggtacattggagccgctttggcgataagcgtatcatactggttgaacgtgttcatgcttgttgcgtacatcggatgctcaaactcttgtaaggagacattctcgcctcccacactcgatgctttcagtggagtgggtgtgttcatgcgcttagccctgccgtctgcactaatgttatgttttgaatggtggtcatttgaggtcattattcttctgtctggacttctacccaatccagagctgcaaacttcagttctttctacatgcatgacaacaatcacattgatgtatactatagcgtacggaattggtgctgctggaagcactcgtgtatcaaatgaattaggtgctgggaatcctgaaggtgctcgactggctgtccgcgttgtgatgtctattgctgtgactgaggcagttctcatcactggggcactgttagcatcccagcacatcttgggctacgcatacagcagtgataaggaggttgttgattatgtcaatgcaatggttccgttcatctgcatctcagttgctgctgatagcctacaaggagttctctcaggtatcgctcgagggtgcgggtcgcagcacctgggcgcctatgttaacctcggttcgttctatctgtttgggattccaatgtccctcctactcgggtttgttctgaagatgggaggaaaggggctctggatgggcatttcctgcggctccatagtgcaattcctacttctgtccggcatagtgttcttcagcaactggcaaaagatgtctgacaatgcgagggagagggttttcggcggaaccccggcggagaaggagcctttgatgtctgatgtaacgggcgctgcctaattttctcgcgagttgctcaatcccttgacccgaacttgaagcggacgacacggcagcttaatcttgtcgctgtagatgacagtctcagagatgtgtgtatatagagaggcgagtttgctgaagaaccgaagaacttaagaactaactggtgcccgtagttgtaatgttgcaattttgctgaggtcggaaaagaatgatacatacagt

SEQ ID NO: 67491 - protein, 490 aa, Triticum aestivum
  peptide (1)..(490): Ceres Seq. ID no. 14307893
MEGRAPLLPRRQEAAKSGGWRCGAAAAEARKVAHVALPMAAVSVAQYAVQVASNMMVGHLPGGVLALSASAIATSLASVSGFSLLIGMSNGLETLCGQAYGAEQYGRLGVQTYRAMVTLTAVSIPISLLWIFMGKLLTLIGQDPVISHEAGRYIMWLIPALFAYAVSQPLTKFLQSQSLIIPMLWSSIATLLLHIPVCWLLVFKTSLGYIGAALAISVSYWLNVFMLVAYIGCSNSCKETFSPPTLDAFSGVGVFMRLALPSALMLCFEWWSFEVIILLSGLLPNPELQTSVLSTCMTTITLMYTIAYGIGAAGSTRVSNELGAGNPEGARLAVRVVMSIAVTEAVLITGALLASQHILGYAYSSDKEVVDYVNAMVPFICISVAADSLQGVLSGIARGCGSQHLGAYVNLGSFYLFGIPMSLLLGFVLKMGGKGLWMGISCGSIVQFLLLSGIVFFSNWQKMSDNARERVFGGTPAEKEPLMSDVTGAA

SEQ ID NO: 67492 - protein, 452 aa, Triticum aestivum
  peptide (1)..(452): Ceres Seq. ID no. 14307894
MAAVSVAQYAVQVASNMMVGHLPGGVLALSASAIATSLASVSGFSLLIGMSNGLETLCGQAYGAEQYGRLGVQTYRAMVTLTAVSIPISLLWIFMGKLLTLIGQDPVISHEAGRYIMWLIPALFAYAVSQPLTKFLQSQSLIIPMLWSSIATLLLHIPVCWLLVFKTSLGYIGAALAISVSYWLNVFMLVAYIGCSNSCKETFSPPTLDAFSGVGVFMRLALPSALMLCFEWWSFEVIILLSGLLPNPELQTSVLSTCMTTITLMYTIAYGIGAAGSTRVSNELGAGNPEGARLAVRVVMSIAVTEAVLITGALLASQHILGYAYSSDKEVVDYVNAMVPFICISVAADSLQGVLSGIARGCGSQHLGAYVNLGSFYLFGIPMSLLLGFVLKMGGKGLWMGISCGSIVQFLLLSGIVFFSNWQKMSDNARERVFGGTPAEKEPLMSDVTGAA

SEQ ID NO: 67493 - protein, 436 aa, Triticum aestivum
  peptide (1)..(436): Ceres Seq. ID no. 14307895
MMVGHLPGGVLALSASAIATSLASVSGFSLLIGMSNGLETLCGQAYGAEQYGRLGVQTYRAMVTLTAVSIPISLLWIFMGKLLTLIGQDPVISHEAGRYIMWLIPALFAYAVSQPLTKFLQSQSLIIPMLWSSIATLLLHIPVCWLLVFKTSLGYIGAALAISVSYWLNVFMLVAYIGCSNSCKETFSPPTLDAFSGVGVFMRLALPSALMLCFEWWSFEVIILLSGLLPNPELQTSVLSTCMTTITLMYTIAYGIGAAGSTRVSNELGAGNPEGARLAVRVVMSIAVTEAVLITGALLASQHILGYAYSSDKEVVDYVNAMVPFICISVAADSLQGVLSGIARGCGSQHLGAYVNLGSFYLFGIPMSLLLGFVLKMGGKGLWMGISCGSIVQFLLLSGIVFFSNWQKMSDNARERVFGGTPAEKEPLMSDVTGAA

SEQ ID NO: 67494 - DNA, 1649 bp, Triticum aestivum
  misc_feature (1)..(1649): Ceres Seq. ID no. 13660260
cattacctagaacatcctaatcgaaaagttgctgtagtccaaccaaaagtagctgacgggctcccttgtttgtatgtcccccactcccggcgaccgcgagcctctcgtccactcccgacaccgagccgaaagccgcgtggattcgccgcccgatccagcgatggattcagcctccagagttgccccgccgccggtcagcgctggtgtccgcgtccgcgcgccgctggtagagtccgtctcctgttactgcagattagatacaggccttaaaactgtcgtggatgctagaaaatttgcttctggagcaaagatgtgcatgcaacctgatgtcaaacaaaccaagcgcaagtcaaggggctcgcggaaggagaggtgccgagctcaagcaccacttttgcctggccttcctgatgatcttgcaattgcctgtcttatacgggttccacgagtggaacaccccaatctccggacagtttgtaaaagatggaaccgccttttgtcaggaaattactattattccttgcgcaagaaactcagcatggcagaagaatgggtttatgtctttaaaagggatcgtgaggggaaaatatcctggcatgccttcgatccactgaaccagctctggaagtcccttccacctgttccaccagagtattcagaagcgttgggttttggctgtgctgttctgagtggttgctatctgtacttatttggcggtaaggatcctttgaggggctctatgagacgtgttgtattttacaatgcccggaccaacaaatggcatcgagctccagatatgttacgaaagcgacacttttttggttcctgtgttataaacaattgtctatatgttgctggtggagagtgtgaaggcatacaaaggactcttcagtctgctgaagtttatgaccctaataggaacagatgggtctgcatccctgagatgaacaacgggatggtgcctttcatcggagttgtatatgatgacaagtggttcctaaaagggcttgactcccatcgccaagtgacatgtgaagtgtacctaccgtcatccaatttgtggtcaaccattgatgatgaaatggttacaggttggcgaaacccaagcatttccttcaatggacgtctctattcatctgattgccgggatggctgcaagcttagagtctatgatgcaaacacaggaacatgggcacgattcatagacagcaggcaccatctaggcagctcacgagccttcgaagccgcaggcttggtgtctttaaatggtaagctttgcattattcgcaacaacatgagcatcactcttgttgatatcttggatccaacaatgagtatcgagaccgacagtgcatgcatgtggaaaactgttgcgcgtaagggtcagcacaagtcatttgtggcaaacttgtggtcgaccattgcaggacgtaacctgaagagtcacataatccattgtcaggtgctgcaaatttgagttcagctgttgcgaatcgggacatgatgaaatcagcgaaacaacacctccattacaagatcaaatgctcaccgcctgaacaaatctttgtacatttgattactagaagctgcaattcaagattctggcaatatcatgagctctctatatatattaatgaattttgaagtgc

SEQ ID NO: 67495 - protein, 467 aa, Triticum aestivum
  peptide (1)..(467): Ceres Seq. ID no. 15220687
MSPTPGDREPLVHSRHRAESRVDSPPDPAMDSASRVAPPPVSAGVRVRAPLVESVSCYCRLDTGLKTVVDARKFASGAKMCMQPDVKQTKRKSRGSRKERCRAQAPLLPGLPDDLAIACLIRVPRVEHPNLRTVCKRWNRLLSGNYYYSLRKKLSMAEEWVYVFKRDREGKISWHAFDPLNQLWKSLPPVPPEYSEALGFGCAVLSGCYLYLFGGKDPLRGSMRRVVFYNARTNKWHRAPDMLRKRHFFGSCVINNCLYVAGGECEGIQRTLQSAEVYDPNRNRWVCIPEMNNGMVPFIGVVYDDKWFLKGLDSHRQVTCEVYLPSSNLWSTIDDEMVTGWRNPSISFNGRLYSSDCRDGCKLRVYDANTGTWARFIDSRHHLGSSRAFEAAGLVSLNGKLCIIRNNMSITLVDILDPTMSIETDSACMWKTVARKGQHKSFVANLWSTIAGRNLKSHIIHCQVLQI

SEQ ID NO: 67496 - protein, 438 aa, Triticum aestivum
  peptide (1)..(438): Ceres Seq. ID no. 15220688
MDSASRVAPPPVSAGVRVRAPLVESVSCYCRLDTGLKTVVDARKFASGAKMCMQPDVKQTKRKSRGSRKERCRAQAPLLPGLPDDLAIACLIRVPRVEHPNLRTVCKRWNRLLSGNYYYSLRKKLSMAEEWVYVFKRDREGKISWHAFDPLNQLWKSLPPVPPEYSEALGFGCAVLSGCYLYLFGGKDPLRGSMRRVVFYNARTNKWHRAPDMLRKRHFFGSCVINNCLYVAGGECEGIQRTLQSAEVYDPNRNRWVCIPEMNNGMVPFIGVVYDDKWFLKGLDSHRQVTCEVYLPSSNLWSTIDDEMVTGWRNPSISFNGRLYSSDCRDGCKLRVYDANTGTWARFIDSRHHLGSSRAFEAAGLVSLNGKLCIIRNNMSITLVDILDPTMSIETDSACMWKTVARKGQHKSFVANLWSTIAGRNLKSHIIHCQVLQI

SEQ ID NO: 67497 - protein, 388 aa, Triticum aestivum
  peptide (1)..(388): Ceres Seq. ID no. 15220689
MCMQPDVKQTKRKSRGSRKERCRAQAPLLPGLPDDLAIACLIRVPRVEHPNLRTVCKRWNRLLSGNYYYSLRKKLSMAEEWVYVFKRDREGKISWHAFDPLNQLWKSLPPVPPEYSEALGFGCAVLSGCYLYLFGGKDPLRGSMRRVVFYNARTNKWHRAPDMLRKRHFFGSCVINNCLYVAGGECEGIQRTLQSAEVYDPNRNRWVCIPEMNNGMVPFIGVVYDDKWFLKGLDSHRQVTCEVYLPSSNLWSTIDDEMVTGWRNPSISFNGRLYSSDCRDGCKLRVYDANTGTWARFIDSRHHLGSSRAFEAAGLVSLNGKLCIIRNNMSITLVDILDPTMSIETDSACMWKTVARKGQHKSFVANLWSTIAGRNLKSHIIHCQVLQI

SEQ ID NO: 67498 - DNA, 1458 bp, Triticum aestivum
  misc_feature (1)..(1458): Ceres Seq. ID no. 14303006
ctccgtcattaccaaggtaattgcactgcccagcatgcatcttcgtcttaatccactctatcggtgcttcgtcttgcgtcccgtggcagcctgtgccgccatgcctgttgcctaatttcctactgatgcagtatcgcaatgcactcctgagctgacagttttagattttagcaagtgcctgtgcatctcccggcctgctcactcgcctctgttttgagttcctagctttcttttcgagaaattacaccctgctttgccgacagagattctcgctgctagtacgagattatttatttataaactgatgtctgcttcggcctctgcttttctgaattttgttgccacgcgtagtacagtagtactggaagattgcaagctctggttttctgaatattcgagctgcttcagatcgagttcagaagtttttctgaattccgtgccattattaatttggaagttgagagcgcaggaaggaagatgggctcgttggaggcgacgcgggcggagctggggctggcggtgctgtacctgaacaaggcggaggctcgggacaagatctgcagggccatccagtacggctccaagttcatcagcaacggccagcccggcaccgcgcagaacgtcgacaagtccaccaccttggctcgcaaggtcttccgcctcctcaagtgggtgaacgatctgcacgccctcatcagcccggccgccaaagggacccctctcacgctggtcttgcttgggaagtccaagaatgcgctgctgtcgactttcctgttcctggaccagttcgtgtggctaggaagatcggggatttaccagaacaaggagcgcacggaccgcatcgccaggatgtccctctactgctggatggcctcctccgtctgtgcaagtctagtcgagcttggtgagctcaagagactatcaaaggcgatgaggaagcgcgccaaggagcttaggggcgccgacaaatacgaggacgagcagtacctggggaagatgaagcagtcggacgaccggctgctggcgctggtgaaggcgggcatggacgtggtggtggccgtggggctgctgcagctggcgcccaagaagatcacccccagggtcaccggggccttcggcttcgtcacctccctcatctcctgctaccagcaactcccgtcccgcgctcccctggccaaactcaaggcgtgaggaacggacgctacaccatgcatgctagtccagatgctgcctccgcttaactcaagccgatgctgtgctccagcatggaatccgagatgttttattcctgtgtacgtagcagtatagaatgatgatgtcgattgtctgtacgtacggtttttatacatatacatgtacacggtatatgctatgaatagtagtaatggacatggtatgtctggtcgatcatgtgttggtgcatgctgcttatatatgccaacagtgttgccacttgcg

SEQ ID NO: 67499 - protein, 237 aa, Triticum aestivum
  peptide (1)..(237): Ceres Seq. ID no. 14303007
MGSLEATRAELGLAVLYLNKAEARDKICRAIQYGSKFISNGQPGTAQNVDKSTTLARKVFRLLKWVNDLHALISPAAKGTPLTLVLLGKSKNALLSTFLFLDQFVWLGRSGIYQNKERTDRIARMSLYCWMASSVCASLVELGELKRLSKAMRKRAKELRGADKYEDEQYLGKMKQSDDRLLALVKAGMDVVVAVGLLQLAPKKITPRVTGAFGFVTSLISCYQQLPSRAPLAKLKA

SEQ ID NO: 67500 - DNA, 1498 bp, Triticum aestivum
  misc_feature (1)..(1498): Ceres Seq. ID no. 15169541
aacaaaagcaccacccccacccgccttccttcctgccttcctgccctcagtcagccggagccggattgctcctcccgccatggcgctcctcaccgatctcctcaacctcgacctcaccgactccacggagaagatcatcgccgagtacatatggatcggcggatctggcatggatctcaggagcaaggccaggaccctccccggcccggtcacggatcccagcaagctgcccaagtggaactacgacggctccagcaccggccaggcccccggcgaggacagcgaggtcatcctgtacccacaggccatcttcaaggacccgttcaggaagggcaacaacatccttgtcatgtgcgattgctacaccccagctggagtgccaatccccaccaacaagagatacaacgctgccaagatctttagcaaccctgatgttgccaaggaggagccatggtatggtattgagcaggagtacaccctcctacagaaggacatcaactggcctctcggctggcctgttggtggattccctggtcctcagggtccttactactgtagtattggtgctgacaagtcgtttgggcgtgacatagttgacgctcactacaaggcctgcctctttgccggtgtcaacatcagtggcatcaatggcgaggtcatgcccggacagtgggagttccaagtcggcccgactgttggcatttctgctggcgaccaagtgtgggtcgctcgctaccttcttgagaggatcactgagatcgccggagttgtcgtcacatttgaccccaagcccatcccaggcgactggaacggtgctggtgctcacacaaactacagtaccgagtcgatgaggaaggacggcgggttcaaggtcatcgtggatgccgtggagaagctcaagctcaagcacaaggagcacatcgccgcctacggcgagggcaacgagcgccgcctcaccggcaagcacgagaccgccgacatcaacaccttcagctggggcgtcgcaaaccgtggcgcgtcggtgcgcgtgggccgggagacggagcagaacggcaagggctacttcgaggaccgccggccggcgtccaacatggacccatacgtggtcacctcgatgatcgccgagaccaccatcctgtggaagccctgaagccgatcggcgccgatcgccgtgcgatgatcagtgatgggttgggttggatttggtgggtggccactggaggatttggacgaaattcttccaacatatttgattttccgtttggttgcatactacgcgtagtccgcttaggtaggtcgcatcatcgtcgtcgtcgtcatgcatcagggtgtctggtcgctcttctctcgtctctgggtggtgggtggcaagaggcgtgtcaaacacacaaggctactattgattgttttcccttgccgtttgggtgctctggtcctcgtgtaatcatcaattgatatggtaataaaatggtccgtaccgctgccgtggtaccacacc

SEQ ID NO: 67501 - protein, 382 aa, Triticum aestivum
  peptide (1)..(382): Ceres Seq. ID no. 15169542
TKAPPPPAFLPAFLPSVSRSRIAPPAMALLTDLLNLDLTDSTEKIIAEYIWIGGSGMDLRSKARTLPGPVTDPSKLPKWNYDGSSTGQAPGEDSEVILYPQAIFKDPFRKGNNILVMCDCYTPAGVPIPTNKRYNAAKIFSNPDVAKEEPWYGIEQEYTLLQKDINWPLGWPVGGFPGPQGPYYCSIGADKSFGRDIVDAHYKACLFAGVNISGINGEVMPGQWEFQVGPTVGISAGDQVWVARYLLERITEIAGVVVTFDPKPIPGDWNGAGAHTNYSTESMRKDGGFKVIVDAVEKLKLKHKEHIAAYGEGNERRLTGKHETADINTFSWGVANRGASVRVGRETEQNGKGYFEDRRPASNMDPYVVTSMIAETTILWKP

SEQ ID NO: 67502 - protein, 356 aa, Triticum aestivum
  peptide (1)..(356): Ceres Seq. ID no. 15169543
MALLTDLLNLDLTDSTEKIIAEYIWIGGSGMDLRSKARTLPGPVTDPSKLPKWNYDGSSTGQAPGEDSEVILYPQAIFKDPFRKGNNILVMCDCYTPAGVPIPTNKRYNAAKIFSNPDVAKEEPWYGIEQEYTLLQKDINWPLGWPVGGFPGPQGPYYCSIGADKSFGRDIVDAHYKACLFAGVNISGINGEVMPGQWEFQVGPTVGISAGDQVWVARYLLERITEIAGVVVTFDPKPIPGDWNGAGAHTNYSTESMRKDGGFKVIVDAVEKLKLKHKEHIAAYGEGNERRLTGKHETADINTFSWGVANRGASVRVGRETEQNGKGYFEDRRPASNMDPYVVTSMIAETTILWKP

SEQ ID NO: 67503 - protein, 326 aa, Triticum aestivum
  peptide (1)..(326): Ceres Seq. ID no. 15169544
MDLRSKARTLPGPVTDPSKLPKWNYDGSSTGQAPGEDSEVILYPQAIFKDPFRKGNNILVMCDCYTPAGVPIPTNKRYNAAKIFSNPDVAKEEPWYGIEQEYTLLQKDINWPLGWPVGGFPGPQGPYYCSIGADKSFGRDIVDAHYKACLFAGVNISGINGEVMPGQWEFQVGPTVGISAGDQVWVARYLLERITEIAGVVVTFDPKPIPGDWNGAGAHTNYSTESMRKDGGFKVIVDAVEKLKLKHKEHIAAYGEGNERRLTGKHETADINTFSWGVANRGASVRVGRETEQNGKGYFEDRRPASNMDPYVVTSMIAETTILWKP

SEQ ID NO: 67504 - DNA, 2194 bp, Triticum aestivum
  misc_feature (1)..(2194): Ceres Seq. ID no. 13660912
cccccctccactgatcatctcatctctttcttcttggtgcctccccccctggtttttgcttctgccactccatgtctcaatcttctcctttcttttccattgcccccgcacatgctggagcaggagggcaagctgcggctgccgctctcctgctccgttgccctgccgctcagctgccacctgccattcactgcttccgtctggctaaagtgtcgcctgccaagacactgagctcgcacctggtgcttccgcgcgccacactctcctcctttgcaaacgctgacgatggctccggtgcaaactcagatgcctcgggggagcagagcggaggatccgaactgtcagagatggcaaaggcattccatatttcaccacggatggccatgtcaatctctgtggtgattgcatttgcagctctcactgttcccctggccatgcgctcactgctcttccatgggacgaccaagatgaaggtgctggcatatctgaccctcttgtcaggattctacatggcatggaacattggagccaatgatgtggcaaatgccatggggacgtcggtcggatctggggctttgactctccggcaggcagtgttgactgcagctgtgctagagttctctggtgcattccttatgggcacccatgtcaccagcaccatgcagaagggcatcctcgtcacatccgtcttccaaggaaatgattctctgctctttgctggattgctgtcctccctcgctgctgctggtacatggttgcaggttgcttcctcttatggctggcctgtgtcaactacccattgtattgttggggctatggttggttttgggctggtatatggaggggtcaatgcagttttctggagctccttggctagagtatcttcatcatggcttatttctcctctgatgggtgctgcagtctcatttcttgtttacaagtgcatacgcaggttcgtgtacagcgcaccaaatccaggtcaagctgcagctgcttctgcacctattgcagtttttactggtgtcactgcaatctcgtttgccgctttccctctcagcaagacattttccattgccgttctgcaagcattagtatgtggggcaataggagctgtctttgttagcagggcaatcaaaaaacagcttggtgatctactgtcttcggaagcagaaaagatagcaacagctgacaatacagatgttcagcaaggtggatttgacgtcgctggccctagaggagctcaactgcagattgtctacggcgtatttggctacatgcaggtcctgtcagcatgcttcatgtcattcgctcatggaggcaatgatgtctccaatgccatagggcctctggccgcagctttgtctcttcttcaaggcgtagcaagcagcgctgagatagtcataccgactgaagtccttgcttggggtggttttggaattgtcgcagggcttacaatgtggggttatagagtcatagcaacaattggcaagaaaatcaccgaattaacacccacaagggggttcgcagcagagtttgcggccgcttctgtggtcttgtttgcatctaagcttgggttgccaatatctgctacacatacacttgttggtgcagtgatgggtgtaggatttgcaagaggtctcaacagagtcagagcagagactgttcgtgaaattgtggtctcctgggtggtcacaattccagttggtgctttgctatcagtcatctatacattaatcttgaccaagattctgaaatactttatgtgagtgctttgtgagatacagttgctgttttgagaggtccagccgttgtccctaaattttttatgctgtaaaagaatgtgtaacagtgaatagatgagccagctccgggagtttccagcagagaaattgaaaagatttgtcagagaaaataatcattttcctggcaacaaaacatgattaggataaagggtttacggtaaataatcatgtttgagactcccagcttcttcatcttttatctctaatgtaccacctatatgactatatctttatattttcttccagaaggtggaatatttcaatttcttgtagagatatgattaattgatcatacataatagacaatggttcgtctcactacccttgtaattatgccacattgacgattttgctgtttcagcgccactataaatgtgaatctttttctttgg

SEQ ID NO: 67505 - protein, 564 aa, Triticum aestivum
  peptide (1)..(564): Ceres Seq. ID no. 15220696
MSQSSPFFSIAPAHAGAGGQAAAAALLLRCPAAQLPPAIHCFRLAKVSPAKTLSSHLVLPRATLSSFANADDGSGANSDASGEQSGGSELSEMAKAFHISPRMAMSISVVIAFAALTVPLAMRSLLFHGTTKMKVLAYLTLLSGFYMAWNIGANDVANAMGTSVGSGALTLRQAVLTAAVLEFSGAFLMGTHVTSTMQKGILVTSVFQGNDSLLFAGLLSSLAAAGTWLQVASSYGWPVSTTHCIVGAMVGFGLVYGGVNAVFWSSLARVSSSWLISPLMGAAVSFLVYKCIRRFVYSAPNPGQAAAASAPIAVFTGVTAISFAAFPLSKTFSIAVLQALVCGAIGAVFVSRAIKKQLGDLLSSEAEKIATADNTDVQQGGFDVAGPRGAQLQIVYGVFGYMQVLSACFMSFAHGGNDVSNAIGPLAAALSLLQGVASSAEIVIPTEVLAWGGFGIVAGLTMWGYRVIATIGKKITELTPTRGFAAEFAAASVVLFASKLGLPISATHTLVGAVMGVGFARGLNRVRAETVREIVVSWVVTIPVGALLSVIYTLILTKILKYFM

SEQ ID NO: 67506 - protein, 472 aa, Triticum aestivum
  peptide (1)..(472): Ceres Seq. ID no. 15220697
MAKAFHISPRMAMSISVVIAFAALTVPLAMRSLLFHGTTKMKVLAYLTLLSGFYMAWNIGANDVANAMGTSVGSGALTLRQAVLTAAVLEFSGAFLMGTHVTSTMQKGILVTSVFQGNDSLLFAGLLSSLAAAGTWLQVASSYGWPVSTTHCIVGAMVGFGLVYGGVNAVFWSSLARVSSSWLISPLMGAAVSFLVYKCIRRFVYSAPNPGQAAAASAPIAVFTGVTAISFAAFPLSKTFSIAVLQALVCGAIGAVFVSRAIKKQLGDLLSSEAEKIATADNTDVQQGGFDVAGPRGAQLQIVYGVFGYMQVLSACFMSFAHGGNDVSNAIGPLAAALSLLQGVASSAEIVIPTEVLAWGGFGIVAGLTMWGYRVIATIGKKITELTPTRGFAAEFAAASVVLFASKLGLPISATHTLVGAVMGVGFARGLNRVRAETVREIVVSWVVTIPVGALLSVIYTLILTKILKYFM

SEQ ID NO: 67507 - protein, 462 aa, Triticum aestivum
  peptide (1)..(462): Ceres Seq. ID no. 15220698
MAMSISVVIAFAALTVPLAMRSLLFHGTTKMKVLAYLTLLSGFYMAWNIGANDVANAMGTSVGSGALTLRQAVLTAAVLEFSGAFLMGTHVTSTMQKGILVTSVFQGNDSLLFAGLLSSLAAAGTWLQVASSYGWPVSTTHCIVGAMVGFGLVYGGVNAVFWSSLARVSSSWLISPLMGAAVSFLVYKCIRRFVYSAPNPGQAAAASAPIAVFTGVTAISFAAFPLSKTFSIAVLQALVCGAIGAVFVSRAIKKQLGDLLSSEAEKIATADNTDVQQGGFDVAGPRGAQLQIVYGVFGYMQVLSACFMSFAHGGNDVSNAIGPLAAALSLLQGVASSAEIVIPTEVLAWGGFGIVAGLTMWGYRVIATIGKKITELTPTRGFAAEFAAASVVLFASKLGLPISATHTLVGAVMGVGFARGLNRVRAETVREIVVSWVVTIPVGALLSVIYTLILTKILKYFM

SEQ ID NO: 67508 - DNA, 1551 bp, Triticum aestivum
  misc_feature (1)..(1551): Ceres Seq. ID no. 13664395
gcagatttgtttgccatcttttggggttttcttgatgagttcttggttggtatgagtggagtggtttgcgattctctttttcctgcttggaggaaggattaggttcttccatttcttgctgggtccgtgctcttgtgtgggcgtctagcttcttccatttcttgttgcattcctgctgatctctgtgggtgccagagatgagcgtaccgcacctgttccggtgtccgatcagcctggacatcttcacggacccggtgacgctctgcacggggcagacgtacgaccgtcaatgcatcgagcggtggctcgctgacggccaccgcacctgccccgtcacaatgcaggccctcggcgacgccgacaccaccgtgctcgtgcccaaccgcaccctgcgccacctcatcgagcgctggctctccgccgccaccgaccacagcctcccggagtcggcggacgacgatccatcgcttgcggcgctcaagcggtgcctccagtccgacgccacctccgccgccgccaagatcggcgcgctcaagaaggtcttggcgctggcgtccgagtccgacgtcggccgcgcgtgcatgctgcagctggggttcctctgcgtgctcctgccgctcgtcttccacgccgcgccgaccgcgccagcgcagcgccacgcggaggcggaggagctcgcgctgcagtgcgcgctcagcctcatgccgtcgaacgccgccgcgccgcagctggactgcctcaacatgctcaagaaggaggacaacctggcgtccttcgtccggctgctggggcgaggcagcggccgggccaaggcaggcctgtgccgcctcctggagaccgtcgccacggccgcggcgacgcgggacctggcgctcgtcgtggccgcctcgccgcgcgtgtggcaggcgctcctgccgctcctgcagcagcacgccggcccggcccccgacgcgcgcgcctcggaggctgcagtgcgcgcgatcgctgcggtctgcgcggccgagccggcgcgtggcagtgccatccaccacggcgcggtcggcgcgctcttcaggcacctgtcgtggtgggcgtacggcaagggcggcggggccgtgtccagcgcgctggcggcggtggaggcgctggcggagacggaggccggccggagggcggtggcgcgcgcgcccggcgcaacgcggattctcgtgaggcacgtgttcatgatgtcatcgagcaacgacgggagcgagcacgcggcggcggcgctgctagccgtgtgcagggagtcgcgggcggcgcggagcgaggcggtgggcgccggggtggtgacgcagctgctgctgctgcttcagagccagtgcggcgccagggctaaggccaaggcgagggcgctgctgaagctgctcaaatccaggtgaactagagctgagtactcattagagttagcgaggatttagatgttcttgtaagctgtaagtttctgcgtcaagaatgtctgccaatgacatggtattcaattccgggcaatttatgtagtaactctgggggattaaattgcccgggcgtttt

SEQ ID NO: 67509 - protein, 400 aa, Triticum aestivum
  peptide (1)..(400): Ceres Seq. ID no. 13664396
MSVPHLFRCPISLDIFTDPVTLCTGQTYDRQCIERWLADGHRTCPVTMQALGDADTTVLVPNRTLRHLIERWLSAATDHSLPESADDDPSLAALKRCLQSDATSAAAKIGALKKVLALASESDVGRACMLQLGFLCVLLPLVFHAAPTAPAQRHAEAEELALQCALSLMPSNAAAPQLDCLNMLKKEDNLASFVRLLGRGSGRAKAGLCRLLETVATAAATRDLALVVAASPRVWQALLPLLQQHAGPAPDARASEAAVRAIAAVCAAEPARGSAIHHGAVGALFRHLSWWAYGKGGGAVSSALAAVEALAETEAGRRAVARAPGATRILVRHVFMMSSSNDGSEHAAAALLAVCRESRAARSEAVGAGVVTQLLLLLQSQCGARAKAKARALLKLLKSR

SEQ ID NO: 67510 - protein, 353 aa, Triticum aestivum
  peptide (1)..(353): Ceres Seq. ID no. 13664397
MQALGDADTTVLVPNRTLRHLIERWLSAATDHSLPESADDDPSLAALKRCLQSDATSAAAKIGALKKVLALASESDVGRACMLQLGFLCVLLPLVFHAAPTAPAQRHAEAEELALQCALSLMPSNAAAPQLDCLNMLKKEDNLASFVRLLGRGSGRAKAGLCRLLETVATAAATRDLALVVAASPRVWQALLPLLQQHAGPAPDARASEAAVRAIAAVCAAEPARGSAIHHGAVGALFRHLSWWAYGKGGGAVSSALAAVEALAETEAGRRAVARAPGATRILVRHVFMMSSSNDGSEHAAAALLAVCRESRAARSEAVGAGVVTQLLLLLQSQCGARAKAKARALLKLLKSR

SEQ ID NO: 67511 - protein, 272 aa, Triticum aestivum
  peptide (1)..(272): Ceres Seq. ID no. 13664398
MLQLGFLCVLLPLVFHAAPTAPAQRHAEAEELALQCALSLMPSNAAAPQLDCLNMLKKEDNLASFVRLLGRGSGRAKAGLCRLLETVATAAATRDLALVVAASPRVWQALLPLLQQHAGPAPDARASEAAVRAIAAVCAAEPARGSAIHHGAVGALFRHLSWWAYGKGGGAVSSALAAVEALAETEAGRRAVARAPGATRILVRHVFMMSSSNDGSEHAAAALLAVCRESRAARSEAVGAGVVTQLLLLLQSQCGARAKAKARALLKLLKSR

SEQ ID NO: 67512 - DNA, 1742 bp, Triticum aestivum
  misc_feature (1)..(1742): Ceres Seq. ID no. 15169619
tggagtttggaaggaaatcttgggtggctgcagtcctctgatccttctcattctggaggcgtattcagtacaaaccaatattctggttggtgattgtcagcatggagatggcaagtagcgccaagtggtttgctgtggctcttgttttcatcactgtgatcctactcagggtcataagaggaaggaggatggccgctgctccagccagtgagaaaccacctccacctgtggtgaatggttttgctttactaggacttctacctaggcttcttacaatggaccttcgaactaagataaattgcctgcacgataagtatggcagtgtgttcacagttagtccttttggactaactaatgtaacctttctgatcggcccggaggtccaatcccatttctttcaagggttggagtcagagattaaccatggcaatcttcttgagttccttgtgctgatgtttggacaagagataggtcaaggtgtcgatgcagccactcggactgagcagtcccgcttttatctcgatgcattaaagcaatccaagttgaggagacatcttgatccaatgcttcaagaggtcgagagctactttggcaaatggggcctggaaggagaagttgatttaaaacatgagtttgaagagttgctcatgttgatatcgagccgatgtctactaggaaaagaggttcgggagaagatgtttgatgagttctataaactatttcgtgatgtcgaaaatggagtgaacatgatcagtgtcttcttcccatatattccaattcctgcaaaccgtaggcgtgacaaagcacgtcttaagctcatcgaattactttctggaactgtgaggtcacgtaagagctccccctcagtggaggaagatgtgctacaaagattgatagattccaagtataaagacggccgctccacaacggaaacagaggtaaccgggatgatcattgcattgatctttggtggaaagcacacaagttccctcgctagtacctggaccggagcttgcctactcacccatccaaagttcttagcggctgcatcccaggagcaaaaggaaatcatgatgaaatacgaggacaaaatagaatatgatgccttgttagagatgaatacccttcataattgtatcaaagaggcacttcggttgaacccaccaacaacaatgttggttcgcaaggcacttaaacatttcacagtgcggacaagacaaggccaagagtatggcattcccaaggggcatactcttgcaagtcccataatacaaaacaattacttgccttacatttataaggaccccgaggtatatgatccagatcggtttggtcccgtaaggcaggaggacgtggttggcggcaagttttcttatacatcctttggtggtggaaggcatttttgcagtggggatgcctatgcttacatgcaagttaaagttatatggagccacttgctcaacaactttgatctcaaattattatctccttatcccaagactgactggagtaagttaatcccagagcctcaagggaatatgatggttagctacaagagacgccagctgctaggctagcttgctatatatatcatttgcatgaggagcaccggcttgcatgcttgtgtttgtatgggtgcatcacttattacttgtatttgtgtatgtttttatgattgtaataattttcagtaacccttggatgagctatatatggtcttctcatagtgtgtgccactagtg

SEQ ID NO: 67513 - protein, 491 aa, Triticum aestivum
  peptide (1)..(491): Ceres Seq. ID no. 15169620
MEMASSAKWFAVALVFITVILLRVIRGRRMAAAPASEKPPPPVVNGFALLGLLPRLLTMDLRTKINCLHDKYGSVFTVSPFGLTNVTFLIGPEVQSHFFQGLESEINHGNLLEFLVLMFGQEIGQGVDAATRTEQSRFYLDALKQSKLRRHLDPMLQEVESYFGKWGLEGEVDLKHEFEELLMLISSRCLLGKEVREKMFDEFYKLFRDVENGVNMISVFFPYIPIPANRRRDKARLKLIELLSGTVRSRKSSPSVEEDVLQRLIDSKYKDGRSTTETEVTGMIIALIFGGKHTSSLASTWTGACLLTHPKFLAAASQEQKEIMMKYEDKIEYDALLEMNTLHNCIKEALRLNPPTTMLVRKALKHFTVRTRQGQEYGIPKGHTLASPIIQNNYLPYIYKDPEVYDPDRFGPVRQEDVVGGKFSYTSFGGGRHFCSGDAYAYMQVKVIWSHLLNNFDLKLLSPYPKTDWSKLIPEPQGNMMVSYKRRQLLG

SEQ ID NO: 67514 - protein, 489 aa, Triticum aestivum
  peptide (1)..(489): Ceres Seq. ID no. 15169621
MASSAKWFAVALVFITVILLRVIRGRRMAAAPASEKPPPPVVNGFALLGLLPRLLTMDLRTKINCLHDKYGSVFTVSPFGLTNVTFLIGPEVQSHFFQGLESEINHGNLLEFLVLMFGQEIGQGVDAATRTEQSRFYLDALKQSKLRRHLDPMLQEVESYFGKWGLEGEVDLKHEFEELLMLISSRCLLGKEVREKMFDEFYKLFRDVENGVNMISVFFPYIPIPANRRRDKARLKLIELLSGTVRSRKSSPSVEEDVLQRLIDSKYKDGRSTTETEVTGMIIALIFGGKHTSSLASTWTGACLLTHPKFLAAASQEQKEIMMKYEDKIEYDALLEMNTLHNCIKEALRLNPPTTMLVRKALKHFTVRTRQGQEYGIPKGHTLASPIIQNNYLPYIYKDPEVYDPDRFGPVRQEDVVGGKFSYTSFGGGRHFCSGDAYAYMQVKVIWSHLLNNFDLKLLSPYPKTDWSKLIPEPQGNMMVSYKRRQLLG

SEQ ID NO: 67515 - protein, 462 aa, Triticum aestivum
  peptide (1)..(462): Ceres Seq. ID no. 15169622
MAAAPASEKPPPPVVNGFALLGLLPRLLTMDLRTKINCLHDKYGSVFTVSPFGLTNVTFLIGPEVQSHFFQGLESEINHGNLLEFLVLMFGQEIGQGVDAATRTEQSRFYLDALKQSKLRRHLDPMLQEVESYFGKWGLEGEVDLKHEFEELLMLISSRCLLGKEVREKMFDEFYKLFRDVENGVNMISVFFPYIPIPANRRRDKARLKLIELLSGTVRSRKSSPSVEEDVLQRLIDSKYKDGRSTTETEVTGMIIALIFGGKHTSSLASTWTGACLLTHPKFLAAASQEQKEIMMKYEDKIEYDALLEMNTLHNCIKEALRLNPPTTMLVRKALKHFTVRTRQGQEYGIPKGHTLASPIIQNNYLPYIYKDPEVYDPDRFGPVRQEDVVGGKFSYTSFGGGRHFCSGDAYAYMQVKVIWSHLLNNFDLKLLSPYPKTDWSKLIPEPQGNMMVSYKRRQLLG

SEQ ID NO: 67516 - DNA, 1197 bp, Triticum aestivum
  misc_feature (1)..(1197): Ceres Seq. ID no. 13663748
gaccaacttggagcctccctgttcttaaaaaatcaaccaacttgccagcgaacgagcgaccaccgacggctcctcgtcgccgccggtgatcgaggtgggccccgcaggccggatctcgggaggaggaggaggagcaatgtcgcgggcgtcgctgtccccgtcgtcgtcgggcgacgaggaggaggaggacgacgagggggtcgacgggtaccgcaagggcggataccacgccgtcctcctcctcctcctcgcctccccgcggccacacctcgactcgctccctcgagatcatctgttccatccttttgaggctgagatggcggctaccttcaatgttaatgctgaggcaggccttaaaaagcttgatggctaccttctgtctcgcagttacatctctggataccaagcttccaaggatgacttggctgtgtattcagagttctcagttgctccaccatcaacttgcaccaatgttgcaaggtggtacaatcacattgatgcactcctgaagctgagtggagttactgcccctggtcaaggtgtgaaggttctgtcatcagttgtccctgaaacctcaactactgatgttgctgaggctcctgcagctgatgatgacgatgacagcgatgttgacctttttggagaggaaaccgaggaggagaaaaaggcagctgaagagcgcgctgccaaagcaaaggcttctaccaagaagaaagaatctggcaagtcatcagttttgcttgatgttaagccatgggacgatgagaccgacatggtcaagctggaggaagctgtccgaagcatcaagatggagggccttctgtggggtgcttccaagctcatgcccgttggatatggcatcaagaagctccagattatgatgaccatcattgatgacctcgtctctgtcgacactcttattgaagaccatctctgcgttgaaccagccaacgagtacatccagagctgtgacattgttgccttcaacaaaatctaaatcttcctgaggcaggtgatggcggtgggcgcacaatatatctacagttttctgttgccgtgatggtgtcgtagctaaagcaagcataacatatctgccctgtgaggtttttggaccttagatcgagttgattcgtagtattactactgagtgttatttgcttcgtatgaaatgagacaatgtggttggattcctgttgc

SEQ ID NO: 67517 - protein, 286 aa, Triticum aestivum
  peptide (1)..(286): Ceres Seq. ID no. 13663749
MSRASLSPSSSGDEEEEDDEGVDGYRKGGYHAVLLLLLASPRPHLDSLPRDHLFHPFEAEMAATFNVNAEAGLKKLDGYLLSRSYISGYQASKDDLAVYSEFSVAPPSTCTNVARWYNHIDALLKLSGVTAPGQGVKVLSSVVPETSTTDVAEAPAADDDDDSDVDLFGEETEEEKKAAEERAAKAKASTKKKESGKSSVLLDVKPWDDETDMVKLEEAVRSIKMEGLLWGASKLMPVGYGIKKLQIMMTIIDDLVSVDTLIEDHLCVEPANEYIQSCDIVAFNKI

SEQ ID NO: 67518 - protein, 226 aa, Triticum aestivum
  peptide (1)..(226): Ceres Seq. ID no. 13663750
MAATFNVNAEAGLKKLDGYLLSRSYISGYQASKDDLAVYSEFSVAPPSTCTNVARWYNHIDALLKLSGVTAPGQGVKVLSSVVPETSTTDVAEAPAADDDDDSDVDLFGEETEEEKKAAEERAAKAKASTKKKESGKSSVLLDVKPWDDETDMVKLEEAVRSIKMEGLLWGASKLMPVGYGIKKLQIMMTIIDDLVSVDTLIEDHLCVEPANEYIQSCDIVAFNKI

SEQ ID NO: 67519 - DNA, 813 bp, Triticum aestivum
  misc_feature (1)..(813): Ceres Seq. ID no. 13663751
gcatccaacccctcctgctgctgctgtgttgcccgtgttgccgccccgaccgccgcctccaccacccacccacccacaccgcgccggcctcttccccctgtcccgtctccctcatggcctccgccgccgcatccgccgtctccttcgccaggcccgtcaaggcaatcaatgccaactcggtctccttctctgctccaaggaaaggcaatgtatccttccgtcttcagccagttccccagagattttctgtttcctgtgctgccaaaaaggagacagtagaaaaggtttgtgatattgtgaagagccagcttgcgcttgctgacgacactgtagtttctggctcctctacgtttgctgatcttggtgccgattccttggacacggttgagattgtcatgggcctcgaggaggctttcgggatcagcgtggaggagtcgagtgcgcagaccatcgcaacggtggaagacgccgccaacctcatcgacagccttgttgcaaactaaacatatttctttgcaataatgggctacccactgcaatcgttgctgctggagatgatcccgtttgacgtgctagattttactgtggagagtcggtgacatctgtatcagtgtttttgcctgtcttgccatattaagacattatttattaagcgaatgttgaaggaattttttcttgttgaagctgtgttggagactgatttcagggtctgaacatgctgtgctggaattaactacccctgtctttcttgggttcaaagaaaaaaaaaaaaaaaaaagcttatcgataccgtcgacctcgagggggggcccg

SEQ ID NO: 67520 - protein, 166 aa, Triticum aestivum
  peptide (1)..(166): Ceres Seq. ID no. 13663752
IQPLLLLLCCPCCRPDRRLHHPPTHTAPASSPCPVSLMASAAASAVSFARPVKAINANSVSFSAPRKGNVSFRLQPVPQRFSVSCAAKKETVEKVCDIVKSQLALADDTVVSGSSTFADLGADSLDTVEIVMGLEEAFGISVEESSAQTIATVEDAANLIDSLVAN

SEQ ID NO: 67521 - protein, 129 aa, Triticum aestivum
  peptide (1)..(129): Ceres Seq. ID no. 13663753
MASAAASAVSFARPVKAINANSVSFSAPRKGNVSFRLQPVPQRFSVSCAAKKETVEKVCDIVKSQLALADDTVVSGSSTFADLGADSLDTVEIVMGLEEAFGISVEESSAQTIATVEDAANLIDSLVAN

SEQ ID NO: 67522 - protein, 96 aa, Triticum aestivum
  peptide (1)..(96): Ceres Seq. ID no. 13663754
HPTPPAAAVLPVLPPRPPPPPPTHPHRAGLFPLSRLPHGLRRRIRRLLRQARQGNQCQLGLLLCSKERQCILPSSASSPEIFCFLCCQKGDSRKGL

SEQ ID NO: 67523 - DNA, 1894 bp, Triticum aestivum
  misc_feature (1)..(1894): Ceres Seq. ID no. 15169623
aacccaaattaacagtagcccgcggcggcctgcgcgtgagcgatgcccgccgcggcattcgcctccgcgttcgcgtctcctcctcctccgtgggccccacgaccgcctcctcgccacgccagcctccgcctgcccccgccaaggagcagcagcaacaacagcggcggcggcggaggggacaagcccaccacctcgtgggtcagccccgactggctgacgtcgctgtctcgctcggtgctcggccgggggaacgacgactcggggatacccgtcgcctccgccaagctcgacgacgtgcaggacctcctcgggggcgcgctcttcctgccgctcttcaagtggttccgcgaggaagggcccgtctaccgcctcgccgcggggccgcgcgacttcgtcatcgtcagcgaccccgccgtagccaagcacgtcctccgcgggtacggcacgcggtacgagaaggggctcgtcgccgaggtctccgagttcctctttggctctgggttcgccatcgccgagggagcgctctggacggtgagacgtagagcagttgtaccatctctacacaaaagatttctctcagtaatggtcgataaagtgttctgtaaatgtgctgagagattggtggaaaagctcgagacttatgctttgagtggtgaacctgttaatatggaagcgaggttttcgcaaatgacgttagatgtgattggtttatccttgttcaactacaactttgattccctcacatcagatagtcctgttattgatgctgtttacactgcactcaaagaagcagaggctcgttctacagatcttttaccatactggcagatcgatttgctgtgcaagattgtccctagacagataaaagcagaaaaagcagttaacacaataaggaataccgttgaagacctaattacaaaatgcaaggcaattgtagatgctgaaaatgaacagattgagggtgaagaatatgtcagcagtttgcagttacgtgatgatctattgtcaatgttagttgctggtcatgaaacaacaggttctgtactgacatggaccatttatcttctcagtaagggtccagtagcactaaggaaagcccaagatgaggtagatcgtgttctacaaggtagactccccagatatgaagatgtaaaagagctgaagtacttgatgcgctgtatcaatgagtccatgcggctatacccacatcctcctgtgctgatacggcgtgcactagttgatgatgtgcttcctggaaactacaaggttaagactggtcaagatgttatgatttctgtgtacaatatacacagatcacccgaggtatgggacagagcagatgaattcattccagagagatttgatttggagggtcccattccaaatgagtcaaacactgatttcaggtttatcccttttagtggaggtcctcgaaaatgtgttggagatcagtttgctcttttagaagcaattgtggcacttgcaattgtcatacaaaagatggacattcagcttgtggcagatcaaaaaatcagcatgaccactggggccactatccatacaaccaatggactgtatatgaatgtaagtctgcgtaaagttgagcaagaagctgacttagcactgagtccatcgggctagacaaaagcaaagcaaaacagggtgggattagtacaggcagaggcaacagaattgtcaatacgtgagatgcctctgcaattaaatttggacatgtttggaatgtttccttgtccagaaatttgagatacctctcttcagttcttgtatcttttcagcaggttccagctatcaatggctaataggttgcgtaaactgtaaagaaatggatcattgacttgctgattttgacagttaatgtaaatcggtggtacct

SEQ ID NO: 67524 - protein, 532 aa, Triticum aestivum
  peptide (1)..(532): Ceres Seq. ID no. 15169624
MPAAAFASAFASPPPPWAPRPPPRHASLRLPPPRSSSNNSGGGGGDKPTTSWVSPDWLTSLSRSVLGRGNDDSGIPVASAKLDDVQDLLGGALFLPLFKWFREEGPVYRLAAGPRDFVIVSDPAVAKHVLRGYGTRYEKGLVAEVSEFLFGSGFAIAEGALWTVRRRAVVPSLHKRFLSVMVDKVFCKCAERLVEKLETYALSGEPVNMEARFSQMTLDVIGLSLFNYNFDSLTSDSPVIDAVYTALKEAEARSTDLLPYWQIDLLCKIVPRQIKAEKAVNTIRNTVEDLITKCKAIVDAENEQIEGEEYVSSLQLRDDLLSMLVAGHETTGSVLTWTIYLLSKGPVALRKAQDEVDRVLQGRLPRYEDVKELKYLMRCINESMRLYPHPPVLIRRALVDDVLPGNYKVKTGQDVMISVYNIHRSPEVWDRADEFIPERFDLEGPIPNESNTDFRFIPFSGGPRKCVGDQFALLEAIVALAIVIQKMDIQLVADQKISMTTGATIHTTNGLYMNVSLRKVEQEADLALSPSG

SEQ ID NO: 67525 - protein, 352 aa, Triticum aestivum
  peptide (1)..(352): Ceres Seq. ID no. 15169625
MVDKVFCKCAERLVEKLETYALSGEPVNMEARFSQMTLDVIGLSLFNYNFDSLTSDSPVIDAVYTALKEAEARSTDLLPYWQIDLLCKIVPRQIKAEKAVNTIRNTVEDLITKCKAIVDAENEQIEGEEYVSSLQLRDDLLSMLVAGHETTGSVLTWTIYLLSKGPVALRKAQDEVDRVLQGRLPRYEDVKELKYLMRCINESMRLYPHPPVLIRRALVDDVLPGNYKVKTGQDVMISVYNIHRSPEVWDRADEFIPERFDLEGPIPNESNTDFRFIPFSGGPRKCVGDQFALLEAIVALAIVIQKMDIQLVADQKISMTTGATIHTTNGLYMNVSLRKVEQEADLALSPSG

SEQ ID NO: 67526 - protein, 324 aa, Triticum aestivum
  peptide (1)..(324): Ceres Seq. ID no. 15169626
MEARFSQMTLDVIGLSLFNYNFDSLTSDSPVIDAVYTALKEAEARSTDLLPYWQIDLLCKIVPRQIKAEKAVNTIRNTVEDLITKCKAIVDAENEQIEGEEYVSSLQLRDDLLSMLVAGHETTGSVLTWTIYLLSKGPVALRKAQDEVDRVLQGRLPRYEDVKELKYLMRCINESMRLYPHPPVLIRRALVDDVLPGNYKVKTGQDVMISVYNIHRSPEVWDRADEFIPERFDLEGPIPNESNTDFRFIPFSGGPRKCVGDQFALLEAIVALAIVIQKMDIQLVADQKISMTTGATIHTTNGLYMNVSLRKVEQEADLALSPSG

SEQ ID NO: 67527 - DNA, 1073 bp, Triticum aestivum
  misc_feature (1)..(1073): Ceres Seq. ID no. 13664032
gattgacgcgcttccactcctgttcttggagccgctgattcggagccttccgggtctggttggtgctgggttttttgatcggcttttgagttgaccggagaagggaggagctgctgctctgtttcttggctaacttcggtgggcggcgatgccggactccgacaacgactccggcgggccgagcaacgcggacttctcgtcgcccaaggagcaggacaggttcctgccgatcgccaacgtgagccggatcatgaagaaggcgctgccggccaacgccaagatctccaaggacgccaaggagacggtgcaggagtgcgtgtccgagttcatctccttcatcaccggcgaggcctccgacaagtgccagcgcgagaagcgcaagaccatcaacggcgacgacctgctgtgggccatgaccacgctcggcttcgaggactacatggagccgctcaagctctacctgcacaagttccgcgagctcgagggcgagaaggccgtcggcgccggcggcgttggcgcgttaccctcccccggcggctccagctcgcagcagagggagtcgacgccaaggaacaatgcgggaggcggtgaggccggcggctacggcggcatgtacggtggcgccggggcaggaggcagcggcggcggcatgttcatgatgatggggcagcccatgtacgggtccccgccggcggcagggtaccaacatccgcagcatcaccaccagatgatgacgggagggcaaggcgggtacggctacggcgacgccggcgccggcggcgggtcttcgtcgtcctcagggttcggcaggcaagacagggcatgaccgtcccagcttgcacgagcttgttcgttggcgtatctgttttactggtaaccggagttgccaacggccagccgccaggccagttaatctctacagtaccttttttgtgttctaaatgcggtttaagtcggtcaattttattccaaattagcagcaccagcgcgactagttgcatttagcccgctactgtaaatgggctactgacaaggtgcatttacatacaaaaattaatggcaagtgcattttg

SEQ ID NO: 67528 - protein, 225 aa, Triticum aestivum
  peptide (1)..(225): Ceres Seq. ID no. 13664033
MPDSDNDSGGPSNADFSSPKEQDRFLPIANVSRIMKKALPANAKISKDAKETVQECVSEFISFITGEASDKCQREKRKTINGDDLLWAMTTLGFEDYMEPLKLYLHKFRELEGEKAVGAGGVGALPSPGGSSSQQRESTPRNNAGGGEAGGYGGMYGGAGAGGSGGGMFMMMGQPMYGSPPAAGYQHPQHHHQMMTGGQGGYGYGDAGAGGGSSSSSGFGRQDRA

SEQ ID NO: 67529 - protein, 191 aa, Triticum aestivum
  peptide (1)..(191): Ceres Seq. ID no. 13664034
MKKALPANAKISKDAKETVQECVSEFISFITGEASDKCQREKRKTINGDDLLWAMTTLGFEDYMEPLKLYLHKFRELEGEKAVGAGGVGALPSPGGSSSQQRESTPRNNAGGGEAGGYGGMYGGAGAGGSGGGMFMMMGQPMYGSPPAAGYQHPQHHHQMMTGGQGGYGYGDAGAGGGSSSSSGFGRQDRA

SEQ ID NO: 67530 - protein, 137 aa, Triticum aestivum
  peptide (1)..(137): Ceres Seq. ID no. 13664035
MTTLGFEDYMEPLKLYLHKFRELEGEKAVGAGGVGALPSPGGSSSQQRESTPRNNAGGGEAGGYGGMYGGAGAGGSGGGMFMMMGQPMYGSPPAAGYQHPQHHHQMMTGGQGGYGYGDAGAGGGSSSSSGFGRQDRA

SEQ ID NO: 67531 - DNA, 1584 bp, Triticum aestivum
  misc_feature (1)..(1584): Ceres Seq. ID no. 13661001
atcactcgcaccccgcgaatactcttctcttcccttctcttctcttctcttctccgcacagcatcactgcctccggccgtgtcgagcaaaccaaaccaaaatctcctgagttgtctcgctcgcctcatcaatccttggcgtcgctagcttcatctggaggcgaggaggcggacggtttgaacccgatcatggatatggcgcacgagagggactcgagcagcgaggaggaggtgatggccggcgacctccgccgcgggccgtggacggtggaggaggacatcctgctcgtcaactacatcgccgctcacggcgagggccgctggaactcgctcgcccgatcagcaggtctgaagcgcaccggcaagagctgccgcctcaggtggctcaactacctccgccccgacctccggcgcggcagcatcaccccgcaggagcagctgctcatcctcgagctgcactcgcggtggggcaaccgctggtccaagatcgcgcagcacctccccgggcgcaccgacaacgagatcaagaactactggcgcacgcgcgtgcagaagcacgccaagcagctcaagtgcgacgtcaacagccagcagttcaaggacgtcatgcgctacctctggatgccccgcctcgtcgagcgcatccaggccgccgccacggccgacgcggtgcaggccgccgctgacacgcccctgtcgtggcagcacggcgccgacgacgctctctacgagtcaccggagctccctgtcgacgcgtgctggccaacggagtacgccgccgtggccggcgggcagctgcccaacgcctcggtcgcggagctgtcgagcactactaccgccggctcttcctcgccgtccaccacggactctggcgccggcgcccagcccagctggcctgcagcagtcgacggtgccgagtggttcaccaccgcctgcgacgcctccagcgccgccgccaccatatgcgacacggaccagctgatccagcagcaggcaccgtcccagcccgcgggtgcgtggacgtccgagccgctgccgagcctcgggttccccgagctgggcgtcgcggacttcgagatgggcagcttcgacgtagacagcatctggagcatggacgacttgtggaacacgcagccgcagttcgtgtgaaaagtcaagacggtggcatggaaatcctcagctgcgacggtgcccgcgggggggcgtgcggcctccgggtccggggacgcgtagcagatccagcggagggaaacggattagaagaagaaggagaggaaccacctgggactgggaggattaaaacaagactaatttaccctgcacgtgaagatctcccggcctgttctgctccagttctgcgccgtcttgtctcctgtgttaatttattactacgtacaagggtaaacagatacgtaaaagtgtagcagaagcagatgatctactagtgttagctgtgccgccgttaattatgctatgttccgtttaatcttactcattcttttcgagtgattactactacatatttaagtacaaaaaaaaaaaaaaaaaagcttatcgataccgtcgacctcgagggggggcccgg

SEQ ID NO: 67532 - protein, 381 aa, Triticum aestivum
  peptide (1)..(381): Ceres Seq. ID no. 13661002
HSHPANTLLFPSLLFSSPHSITASGRVEQTKPKSPELSRSPHQSLASLASSGGEEADGLNPIMDMAHERDSSSEEEVMAGDLRRGPWTVEEDILLVNYIAAHGEGRWNSLARSAGLKRTGKSCRLRWLNYLRPDLRRGSITPQEQLLILELHSRWGNRWSKIAQHLPGRTDNEIKNYWRTRVQKHAKQLKCDVNSQQFKDVMRYLWMPRLVERIQAAATADAVQAAADTPLSWQHGADDALYESPELPVDACWPTEYAAVAGGQLPNASVAELSSTTTAGSSSPSTTDSGAGAQPSWPAAVDGAEWFTTACDASSAAATICDTDQLIQQQAPSQPAGAWTSEPLPSLGFPELGVADFEMGSFDVDSIWSMDDLWNTQPQFV

SEQ ID NO: 67533 - protein, 319 aa, Triticum aestivum
  peptide (1)..(319): Ceres Seq. ID no. 13661003
MDMAHERDSSSEEEVMAGDLRRGPWTVEEDILLVNYIAAHGEGRWNSLARSAGLKRTGKSCRLRWLNYLRPDLRRGSITPQEQLLILELHSRWGNRWSKIAQHLPGRTDNEIKNYWRTRVQKHAKQLKCDVNSQQFKDVMRYLWMPRLVERIQAAATADAVQAAADTPLSWQHGADDALYESPELPVDACWPTEYAAVAGGQLPNASVAELSSTTTAGSSSPSTTDSGAGAQPSWPAAVDGAEWFTTACDASSAAATICDTDQLIQQQAPSQPAGAWTSEPLPSLGFPELGVADFEMGSFDVDSIWSMDDLWNTQPQFV

SEQ ID NO: 67534 - protein, 317 aa, Triticum aestivum
  peptide (1)..(317): Ceres Seq. ID no. 13661004
MAHERDSSSEEEVMAGDLRRGPWTVEEDILLVNYIAAHGEGRWNSLARSAGLKRTGKSCRLRWLNYLRPDLRRGSITPQEQLLILELHSRWGNRWSKIAQHLPGRTDNEIKNYWRTRVQKHAKQLKCDVNSQQFKDVMRYLWMPRLVERIQAAATADAVQAAADTPLSWQHGADDALYESPELPVDACWPTEYAAVAGGQLPNASVAELSSTTTAGSSSPSTTDSGAGAQPSWPAAVDGAEWFTTACDASSAAATICDTDQLIQQQAPSQPAGAWTSEPLPSLGFPELGVADFEMGSFDVDSIWSMDDLWNTQPQFV

SEQ ID NO: 67535 - DNA, 580 bp, Triticum aestivum
  misc_feature (1)..(580): Ceres Seq. ID no. 12622913
ggcacggaggcgccaccggcggccccacggggacgcacggcgccgccgccgccgcgggcaccgggcagctccagccgaccagggacgaccacaagaccgacggtgtcctgcgccgctccggcagttccagctccagctcgtctgaggacgacggcgctggcgggaggaggaagaaagggatgaaggagaagatcaaggagaagctccccggcggagcccacaaggacgccaccgggcagcagcacacgccggcggccggcgagtacgccgggaccggcaccggcacgcacggcgcggaggccaccggcgagaagaagggcgtcatggacaagatcaaggagaagcttcccggcgggcagcactaagctaagatgggcagctagcgatcgacctgtgtctgtgttcgcctgttcggtcaaagctctgtcgcatgcatgcgtacttctacatgcgttcctacgggataaataatcggcgccgatcgaggtgccggagtatatatgttgtgtgtgtgacgtatttgtggaccccgtacgtgtacatgtatttgtatctccatcgtaataaagcgctcgtttat

SEQ ID NO: 67536 - protein, 120 aa, Triticum aestivum
  peptide (1)..(120): Ceres Seq. ID no. 12622914
HGGATGGPTGTHGAAAAAGTGQLQPTRDDHKTDGVLRRSGSSSSSSSEDDGAGGRRKKGMKEKIKEKLPGGAHKDATGQQHTPAAGEYAGTGTGTHGAEATGEKKGVMDKIKEKLPGGQH

SEQ ID NO: 67537 - protein, 61 aa, Triticum aestivum
  peptide (1)..(61): Ceres Seq. ID no. 12622915
MKEKIKEKLPGGAHKDATGQQHTPAAGEYAGTGTGTHGAEATGEKKGVMDKIKEKLPGGQH

SEQ ID NO: 67538 - protein, 60 aa, Triticum aestivum
  peptide (1)..(60): Ceres Seq. ID no. 12622916
GTEAPPAAPRGRTAPPPPRAPGSSSRPGTTTRPTVSCAAPAVPAPARLRTTALAGGGRKG

SEQ ID NO: 67539 - DNA, 1529 bp, Triticum aestivum
  misc_feature (1)..(1529): Ceres Seq. ID no. 14303161
ctttaacagcataccctaaactggttacctatattcatcccattgcatctatctctattcaagggtgccaacacactccaaataaattgtagtacaatgcatcaaacaatgattcaaatactttccataatccaccacaggttaggttaattttttaggaatacattgcatgtcaaatgattcaaatattatcagagctctttatggtgaatgctgatagttatgcaagttagtttaagtaattttaccacatgcatggagatggtagcatcagctgcatgacgcataccttctgaattatgtaattcctccattgcggttgtcccctagttcttttagatatttcataccttattttgttgtccagccattttttgtattaagatctcattagttgttagggtttagttggtacctcaacacaaagtcggtcagcactgagtaaagttcatcatatcatcaattggcttgttaactgccactgttttgattgtttagaatgctgtatcgctgtcttttattcactcttcaccgcttgcaggtacctgagaaacatggcagtggtggccatttaagttactttcttgttgtatgcgcaattggtggagtggtaactgtctattgtatgcttgaaaaaactcagtatgtggatgttgatgaagatgtagtacttcctgactttgttgactggtctgctgcgcctgcatttgttgatatggttcatccaagctacaatttccattgcggttccttctgggctgtcgttgctgttaaatccattgaggcggagtatgccataaaaaatggtgtggttttgaatttgtcagttcaacaagttatagactgtgctgccattgagggctgcaaaggttcttcccttatgaaggcctatagatacatcaaggttgctggcttgaccactgaagagtcatatcctggcccaccatccccaggcaggtcatttttgcatggtctgtttcgtggttattgccggatggagggcaagcctgttgctgtgagaattgaaggtgttcagagggtacgggccacggaggatcacttgatgagagctcttcaatcttcccctgttgctgtgtatgttaacgtaaatgaccgatttagaaaataccgcggggagggttatcttgatatcaatgactgcccacctcgttctgtaaagcctgggggaaggcatgttcttttgctagtaggctatggcaccgacagcgatggcaccaaatactggaaggtaatgaatacttgggggacatggtggggtaagcatggttacggcaagtttatcagggatggtcacccacacggtgtggcaggtatcaccgagtacaatgggtttaggcccgtgctcagcaagagctgttgcaagtaggttggttttaggcaagtagtttggttttaggcctgtgctcagcaagagctgttgcaagtagtttggttttaggtgcaaccctagaagtctgaatatgtaactctgacagccttttactgtgagcggcaaatataacctgctg

SEQ ID NO: 67540 - protein, 295 aa, Triticum aestivum
  peptide (1)..(295): Ceres Seq. ID no. 14303162
MLYRCLLFTLHRLQVPEKHGSGGHLSYFLVVCAIGGVVTVYCMLEKTQYVDVDEDVVLPDFVDWSAAPAFVDMVHPSYNFHCGSFWAVVAVKSIEAEYAIKNGVVLNLSVQQVIDCAAIEGCKGSSLMKAYRYIKVAGLTTEESYPGPPSPGRSFLHGLFRGYCRMEGKPVAVRIEGVQRVRATEDHLMRALQSSPVAVYVNVNDRFRKYRGEGYLDINDCPPRSVKPGGRHVLLLVGYGTDSDGTKYWKVMNTWGTWWGKHGYGKFIRDGHPHGVAGITEYNGFRPVLSKSCCK

SEQ ID NO: 67541 - protein, 253 aa, Triticum aestivum
  peptide (1)..(253): Ceres Seq. ID no. 14303163
MLEKTQYVDVDEDVVLPDFVDWSAAPAFVDMVHPSYNFHCGSFWAVVAVKSIEAEYAIKNGVVLNLSVQQVIDCAAIEGCKGSSLMKAYRYIKVAGLTTEESYPGPPSPGRSFLHGLFRGYCRMEGKPVAVRIEGVQRVRATEDHLMRALQSSPVAVYVNVNDRFRKYRGEGYLDINDCPPRSVKPGGRHVLLLVGYGTDSDGTKYWKVMNTWGTWWGKHGYGKFIRDGHPHGVAGITEYNGFRPVLSKSCCK

SEQ ID NO: 67542 - protein, 223 aa, Triticum aestivum
  peptide (1)..(223): Ceres Seq. ID no. 14303164
MVHPSYNFHCGSFWAVVAVKSIEAEYAIKNGVVLNLSVQQVIDCAAIEGCKGSSLMKAYRYIKVAGLTTEESYPGPPSPGRSFLHGLFRGYCRMEGKPVAVRIEGVQRVRATEDHLMRALQSSPVAVYVNVNDRFRKYRGEGYLDINDCPPRSVKPGGRHVLLLVGYGTDSDGTKYWKVMNTWGTWWGKHGYGKFIRDGHPHGVAGITEYNGFRPVLSKSCCK

SEQ ID NO: 67543 - DNA, 1712 bp, Triticum aestivum
  misc_feature (1)..(1712): Ceres Seq. ID no. 14302990
atcaggaaaaagaaaacccttcctccttcctccctccctcgctcgcacgcccaaaaagcccaaccaaccgcccggccccgacccccgaccaaacccgcaccggacgccgcgcgcgggcgctcgcgagagagggacgggagcggccgccgcgcctcgcgcctcgctcgctcgctcgccgacgcggtccggcggtggtgggggcctcgccgcgatggattgggcggcggtggcgtacacggcggccgcgctgctgtgcgccgcggcggccaccgtcatcacgctcggccacatctaccgccacctgctccactacgccgagcccatcttccagcgcttcatcgtccgcatcatcttcatggtcccggtctatgcagtgatgtcatttatttcccttatcctaccagacaatgcaatatattttacctctatccgagaaatctatgatgcttgggtcatctacaatttcttttcactctgcttggcatgggtgggaggacctggtgctgtggtggtgagtttgaatggccgaaccctgaaaccatcgtggtttctgatgacttgctgtttcccggctattcctctagatgggcgttttatacggagatgcaaacaaggctgtttgcagtttgttattcttaagcctatcctggtggttattaccttcatcctttatgctaaaggaaaatatgaagatggaaacttcagtgtcaaccaatcctatttatacatcactattatttacacaatctcatactcgatggcgttatatgctcttgcattgttctatgcggcatgcagagatctactccggccatataatcctgtcccaaagtttattataatcaaatcagttgtgtttctcacatactggcagggtgtcctggttttccttgctgccaagtctcgatttatcaagaatgctgaaaaagctgctgatctccagaactatgtattgtgcgttgagatgctcatagcagccattgggcacctatttgcctttccttacaaggagtatgcaggtgcaaatgctcgcccttcgggtggcttcagggaaagccttcttcatgctttaaaattcaacgatttctaccacgacactgttcaccagtttgctcctacctacaacgaatatgtgctgtacaaccacaatgagggagagagtgcaccaacaaagtttccttcagggagcgccgtgccaagtgtccgggatgtggagttggccggcatcaccgtgatgccgccctcaaatagtccagtgacctcaagcgtgtcatccaaccacgtagaccaggacgagtcaatgaccactccgatcaggaacaaagtggacccgcctggaggaatgtacgacctcacggacctgctcgacgtggacttgtctagctaccccgccaaggttcctgcgatctctgatgtaagaaaacaatgaccaggtgcgacagccaatgtgtctcggtagcgactgggggaaattgtggccttccattttgtcatagataacgctgtaaaaatgtgtgtgtactacttccggttccagcctttccccattgaagaaggggggtttattcatgactgcactgcagctgtgcgcacggcctctctcgccctactcttcgacatagttgttttggtgcgttgtgagctcaaggtgaactgttgtgacatgagactatgaataccatactaatagtttgctgatagcagttttggtg

SEQ ID NO: 67544 - protein, 475 aa, Triticum aestivum
  peptide (1)..(475): Ceres Seq. ID no. 14302991
SGKRKPFLLPPSLARTPKKPNQPPGPDPRPNPHRTPRAGARERGTGAAAAPRASLARSPTRSGGGGGLAAMDWAAVAYTAAALLCAAAATVITLGHIYRHLLHYAEPIFQRFIVRIIFMVPVYAVMSFISLILPDNAIYFTSIREIYDAWVIYNFFSLCLAWVGGPGAVVVSLNGRTLKPSWFLMTCCFPAIPLDGRFIRRCKQGCLQFVILKPILVVITFILYAKGKYEDGNFSVNQSYLYITIIYTISYSMALYALALFYAACRDLLRPYNPVPKFIIIKSVVFLTYWQGVLVFLAAKSRFIKNAEKAADLQNYVLCVEMLIAAIGHLFAFPYKEYAGANARPSGGFRESLLHALKFNDFYHDTVHQFAPTYNEYVLYNHNEGESAPTKFPSGSAVPSVRDVELAGITVMPPSNSPVTSSVSSNHVDQDESMTTPIRNKVDPPGGMYDLTDLLDVDLSSYPAKVPAISDVRKQ

SEQ ID NO: 67545 - protein, 405 aa, Triticum aestivum
  peptide (1)..(405): Ceres Seq. ID no. 14302992
MDWAAVAYTAAALLCAAAATVITLGHIYRHLLHYAEPIFQRFIVRIIFMVPVYAVMSFISLILPDNAIYFTSIREIYDAWVIYNFFSLCLAWVGGPGAVVVSLNGRTLKPSWFLMTCCFPAIPLDGRFIRRCKQGCLQFVILKPILVVITFILYAKGKYEDGNFSVNQSYLYITIIYTISYSMALYALALFYAACRDLLRPYNPVPKFIIIKSVVFLTYWQGVLVFLAAKSRFIKNAEKAADLQNYVLCVEMLIAAIGHLFAFPYKEYAGANARPSGGFRESLLHALKFNDFYHDTVHQFAPTYNEYVLYNHNEGESAPTKFPSGSAVPSVRDVELAGITVMPPSNSPVTSSVSSNHVDQDESMTTPIRNKVDPPGGMYDLTDLLDVDLSSYPAKVPAISDVRKQ

SEQ ID NO: 67546 - protein, 357 aa, Triticum aestivum
  peptide (1)..(357): Ceres Seq. ID no. 14302993
MVPVYAVMSFISLILPDNAIYFTSIREIYDAWVIYNFFSLCLAWVGGPGAVVVSLNGRTLKPSWFLMTCCFPAIPLDGRFIRRCKQGCLQFVILKPILVVITFILYAKGKYEDGNFSVNQSYLYITIIYTISYSMALYALALFYAACRDLLRPYNPVPKFIIIKSVVFLTYWQGVLVFLAAKSRFIKNAEKAADLQNYVLCVEMLIAAIGHLFAFPYKEYAGANARPSGGFRESLLHALKFNDFYHDTVHQFAPTYNEYVLYNHNEGESAPTKFPSGSAVPSVRDVELAGITVMPPSNSPVTSSVSSNHVDQDESMTTPIRNKVDPPGGMYDLTDLLDVDLSSYPAKVPAISDVRKQ

SEQ ID NO: 67547 - DNA, 1830 bp, Triticum aestivum
  misc_feature (1)..(1830): Ceres Seq. ID no. 13660129
actaaagggaacaaaagctgcagctccgccgcggyggcggccgctctataactastgkakcccccggkctgcakrtaattcgcrcgacgaccattacctagaacatcctaatckaaracgcctcacaatctctctccctctctctgtctccagcgcggggtgagctgagccatggctgagctgccgctcgcggggggcttgctggacctccgccccggcaagctctccccgaagcccccgcccccgccgctgcccatgcccggcgcggatgccccggcctcgccgcggccggagctgcgcgtcgacgagccgaatccacagattccacacacggcagctgacgccggtgagacgctggcctcgtcggaggcgccggtaccgaccgtcggctccggtgtcggtgtctgtgtcgaagcggagtccgagctggctggtggaagggcggttctcccggccgattgccagctcgatactgacggcaatggagttgagcttggtgccttggaggagagtgggactgtggtatcggacacgacggcgccggctggtttggaggaggtggatgcggatgcgggagcttcgccggaaggctctgccactcaggattctgacactggcgtggatgcagagtctagaggcgacgaccaaggggccacggaatccagagttaccatcccaccaacagcgggagaagttcacaacaaggtggattgggaaaagaacacttcagaagtgaagagttctgataagacggctccagtagcctcatcagcgcttttgttgacgtcaggtgctgcaatcttgcctcatccttcgaaggcagcgacaggcggagaagatgcttattttattgaagactatggttggtttggtgtggcagatggagttggtcagtggtcatttgaaggaatcaacgcagggctttatgcaagagagcttatggatggctgtaaaaaggtaattgcggaaagtgaaggaggctctgagcttgcgcctgagcaagttctctccaaggctgcagcagaagcaagctctcctggttcttcgactgtcttagttgctcactttgatggccagcttcttcatgtatcaaatattggagactcggggtttctggtgataaggaatggagaagtatgcgcaaaatcaaaaccaatggtttatggcttcaattttccacatcaaatcgagaaaggggttgatcccttaacccttgtagagaattataccattgacatagaggaaggcgatatcattatagcagcgaccgatggcctcttcgacaacgtctacgaacaagaaatggcagccatgatctcgaaatctttgcaggcagatctaaagccagcggagatggccgagcaccttgctgccagggcacatgaggtggggaggtctggagcagggagaagcccattttcagactctgccgtcgcggcgggttacctaggtttcagcggggggaaactggacgacacagccatcgttgtgtcgattgtccggagatccgaagcttgagctatagaaggcccccgaggtgacaagctattttggttgcaggcagctgcacgcactgtctatgaaagcgttgcatcagtagttcagaaactgcgacacgtgcaaagttcgcctgtgtaaagtagtctagttcaagaaccacaattcgcctatctaagtgatataaatttaagtttggtgttggtgctgtgtgtaaattttgggctgtagaaatatgatgcatgaaaatgtaattttgtgctcttgaatcgtgaggaagtggtaggaaggaaccaagccatctagtcaaagttgaaatataatcatgcattt

SEQ ID NO: 67548 - protein, 448 aa, Triticum aestivum
  peptide (1)..(448): Ceres Seq. ID no. 15220012
MAELPLAGGLLDLRPGKLSPKPPPPPLPMPGADAPASPRPELRVDEPNPQIPHTAADAGETLASSEAPVPTVGSGVGVCVEAESELAGGRAVLPADCQLDTDGNGVELGALEESGTVVSDTTAPAGLEEVDADAGASPEGSATQDSDTGVDAESRGDDQGATESRVTIPPTAGEVHNKVDWEKNTSEVKSSDKTAPVASSALLLTSGAAILPHPSKAATGGEDAYFIEDYGWFGVADGVGQWSFEGINAGLYARELMDGCKKVIAESEGGSELAPEQVLSKAAAEASSPGSSTVLVAHFDGQLLHVSNIGDSGFLVIRNGEVCAKSKPMVYGFNFPHQIEKGVDPLTLVENYTIDIEEGDIIIAATDGLFDNVYEQEMAAMISKSLQADLKPAEMAEHLAARAHEVGRSGAGRSPFSDSAVAAGYLGFSGGKLDDTAIVVSIVRRSEA

SEQ ID NO: 67549 - protein, 420 aa, Triticum aestivum
  peptide (1)..(420): Ceres Seq. ID no. 15220013
MPGADAPASPRPELRVDEPNPQIPHTAADAGETLASSEAPVPTVGSGVGVCVEAESELAGGRAVLPADCQLDTDGNGVELGALEESGTVVSDTTAPAGLEEVDADAGASPEGSATQDSDTGVDAESRGDDQGATESRVTIPPTAGEVHNKVDWEKNTSEVKSSDKTAPVASSALLLTSGAAILPHPSKAATGGEDAYFIEDYGWFGVADGVGQWSFEGINAGLYARELMDGCKKVIAESEGGSELAPEQVLSKAAAEASSPGSSTVLVAHFDGQLLHVSNIGDSGFLVIRNGEVCAKSKPMVYGFNFPHQIEKGVDPLTLVENYTIDIEEGDIIIAATDGLFDNVYEQEMAAMISKSLQADLKPAEMAEHLAARAHEVGRSGAGRSPFSDSAVAAGYLGFSGGKLDDTAIVVSIVRRSEA

SEQ ID NO: 67550 - DNA, 732 bp, Triticum aestivum
  misc_feature (1)..(732): Ceres Seq. ID no. 13660311
ctctccagcctctgcctgtcccctccaccctgcctgcagcctccccctcgtctcctccgttcccgattaaatcgcaatccaaaacctctcccccggaactccagcccccgtgccccgcctcgccccgccatgtcgccggccgctggaggcgccgcgcccacgcaaccggcggccagcgccgccccggcgccgacggtgatcgccgcgccgccgccgccccaggccccgtcgcgggagaacccgcgcgatccggccgcgcaggcggagggggccgatcccggcaatgcggcggcgaggaagacggcgtggaacgtgccgccgccgcccccggcacccgtcggcggcatcatgggcggcgacgagtcgtggccggcgctcgccgacacggccgcgcgggcctggcccaagtcctcctcctccgactccctcaagtccctctccgacggctccgccccctccgcgccggaggatccgattgtgccactggtgccgctgccgcagccacagtcagtttctactctgatctccactgcctcaagtccaggctctgcctctacttctcctcctcccactgccaccaccacggcctcgccgccacagaacagcagcacaggccagccaattttagttcggcatggtggcagtaacggtggtaacaatggagagggcggcggtggcaatgtgagcactcatagccagagcactggtaattacagtagtgatgggaacagc

SEQ ID NO: 67551 - protein, 244 aa, Triticum aestivum
  peptide (1)..(244): Ceres Seq. ID no. 13660312
LSSLCLSPPPCLQPPPRLLRSRLNRNPKPLPRNSSPRAPPRPAMSPAAGGAAPTQPAASAAPAPTVIAAPPPPQAPSRENPRDPAAQAEGADPGNAAARKTAWNVPPPPPAPVGGIMGGDESWPALADTAARAWPKSSSSDSLKSLSDGSAPSAPEDPIVPLVPLPQPQSVSTLISTASSPGSASTSPPPTATTTASPPQNSSTGQPILVRHGGSNGGNNGEGGGGNVSTHSQSTGNYSSDGNS

SEQ ID NO: 67552 - protein, 214 aa, Triticum aestivum
  peptide (1)..(214): Ceres Seq. ID no. 13660313
LQPLPVPSTLPAASPSSPPFPIKSQSKTSPPELQPPCPASPRHVAGRWRRRAHATGGQRRPGADGDRRAAAAPGPVAGEPARSGRAGGGGRSRQCGGEEDGVERAAAAPGTRRRHHGRRRVVAGARRHGRAGLAQVLLLRLPQVPLRRLRPLRAGGSDCATGAAAAATVSFYSDLHCLKSRLCLYFSSSHCHHHGLAATEQQHRPANFSSAWWQ

SEQ ID NO: 67553 - protein, 201 aa, Triticum aestivum
  peptide (1)..(201): Ceres Seq. ID no. 13660314
MSPAAGGAAPTQPAASAAPAPTVIAAPPPPQAPSRENPRDPAAQAEGADPGNAAARKTAWNVPPPPPAPVGGIMGGDESWPALADTAARAWPKSSSSDSLKSLSDGSAPSAPEDPIVPLVPLPQPQSVSTLISTASSPGSASTSPPPTATTTASPPQNSSTGQPILVRHGGSNGGNNGEGGGGNVSTHSQSTGNYSSDGNS

SEQ ID NO: 67554 - DNA, 1909 bp, Triticum aestivum
  misc_feature (1)..(1909): Ceres Seq. ID no. 15169561
atcccccatcatctatcgccagagaaatctctaggcacaatggctcacacccctggctcgtcctcacgacctcatggtcccctccccggcgactgggcgaggtactccgtctcgcgcctctggctgagcgagctgcagaggcaggggtaccttccccccaccggcgctcgttcctgtccgcacaagactgatttccatggatggccaagcatttgtcgagaacttccctgctccaaacaacgaagagagggtatgcttcgtgccttccttctccagggtctgggttttcccgttcacccattcctgcaaggtctattggaattttacgggatccagctccacaaccttacccaagaatccatactacatatttgcggcttcgtggcgctttgtgagatattcctgagttgcaaggcccactttgatctatggagaaaatatttttgccttgttcctcgtacccatgaaaggtcaatctttgaagtaggccgggccaaggtctggcggatagctgggacagggtgtcccatcgggacccatgaaaagatcctgaagaatggacctcataatggttctaaatcaaagatgtccccctctatccagtccggagagggctacccgaatactccagcgccccgctaaagaagcagttcaattggtgacccaagagtccttccaagagaacaatgcagaggtgcgccttctagccaccaatgtttggttgctagctcacagcaaactgaccatggtcaaggtaatggccattgccatatttcggtgcgggcaacaatttcagcaaagaatgcatcctttgtggtgctacaacgggacgagcgacgcgacccgctacaagtgacaagggaccgacaaccaagcggctatggccaagatactagccgacctcttcaagggagaggaagaagacttagttcagctgggtattcgggacgggtgctccagctacaatccgcctgaatgggtaagttttaatcccttgttttaagttcaaagactgtgtctggacattcgtcggatctattccccttttgaacagagttggaggcctcggatcgaatccgtctattcccaattccccacagccagaatatcattatcatgatgatgacccgaggtatcatgtcgatccgaagacatctttcgatttcgaggacggggtcttttatcaagagagccttgacgacaccaaggtcaccctaacagtggaccatcccggggcacttccttcttctataggtcgtcgcactgcgcgcctatggaaggagcatgagatatgacggcctcgacccgtaatggggcgtccaagcagaaggcctccgctggagcggcaatgatggccccctcggctcaaagaagaaaagttccttggcgctaatccggagactctctgggcgtgccgaggcgcaatcccaaccttggatcttcggcgcaggctagggaccatgttggtcctgcggtgaccagcgccctccggaggatcctgacgaagtctcggtcaccaattctgaagtagaaagtgtgatgaatcactgttaggcataatcttgagtttgtgtctagttttctagttggcttgcatgccacgtaggtaagctaagttttagttttgatagtactagttggtatacagtttggttgagtccaacgtgttaggtatcctgatgctagtagtactaggatgagtcggtataggattaacttagcggcttcccgttggttttgtggagtcgtacgtggaagagcttatggctgagtccggtttggactcaagagcattagtcggttggtccttgcatgtaaattttcccgtgaagggctgcagctttgtaacgtggggggggaaaattgaaaagaaataaaaagaagaaggggcccgacccgttcccttggg

SEQ ID NO: 67555 - protein, 213 aa, Triticum aestivum
  peptide (1)..(213): Ceres Seq. ID no. 15169562
IPHHLSPEKSLGTMAHTPGSSSRPHGPLPGDWARYSVSRLWLSELQRQGYLPPTGARSCPHKTDFHGWPSICRELPCSKQRREGMLRAFLLQGLGFPVHPFLQGLLEFYGIQLHNLTQESILHICGFVALCEIFLSCKAHFDLWRKYFCLVPRTHERSIFEVGRAKVWRIAGTGCPIGTHEKILKNGPHNGSKSKMSPSIQSGEGYPNTPAPR

SEQ ID NO: 67556 - protein, 200 aa, Triticum aestivum
  peptide (1)..(200): Ceres Seq. ID no. 15169563
MAHTPGSSSRPHGPLPGDWARYSVSRLWLSELQRQGYLPPTGARSCPHKTDFHGWPSICRELPCSKQRREGMLRAFLLQGLGFPVHPFLQGLLEFYGIQLHNLTQESILHICGFVALCEIFLSCKAHFDLWRKYFCLVPRTHERSIFEVGRAKVWRIAGTGCPIGTHEKILKNGPHNGSKSKMSPSIQSGEGYPNTPAPR

SEQ ID NO: 67557 - protein, 129 aa, Triticum aestivum
  peptide (1)..(129): Ceres Seq. ID no. 15169564
MLRAFLLQGLGFPVHPFLQGLLEFYGIQLHNLTQESILHICGFVALCEIFLSCKAHFDLWRKYFCLVPRTHERSIFEVGRAKVWRIAGTGCPIGTHEKILKNGPHNGSKSKMSPSIQSGEGYPNTPAPR

SEQ ID NO: 67558 - DNA, 2251 bp, Triticum aestivum
  misc_feature (1)..(2251): Ceres Seq. ID no. 13501807
tttttttctccccttcgatatccccgataaaacctccatctccatccccatccccgcccctcctatcgccacttcgccagccagctcgcccgcccgcccgcctagtcttctccgaaggaaggaacgaaggaaggaagcggccgcacgctcatggccctctcctgcatgaggtgcccggcggcggcggccggcggcggccccctcgcgcgccgcccgcaaccgccgccctcctcgtccctcgccttctccttcgccagatgcggagccgccaaggggtggcgcatccacgccgtcgccgggaaaggagtgaaagctcccatggatgctgtggagaacgctgtcgcccccgccgccccgtcaacggtggcaaatggcacttcttcagcaatcaccgtcgaggaatttgaagatttagcctctctagtgaaggatgatgaggcgtcggttagcatcaccgtagttggagcgtctggtgaccttgcgaagaagaagatatttcctgcccttttcgctctttactatgaaggttgtcttcccaagcatttctccatctttggctatgcgcggagtaaaatgacagatgctgaactgagagacatggtcagcaaaacactgacttgcaggattgataaaagggagaactgtagtgagaaaatggaagagtttctgaaacgatgcttctaccactcaggtcaatatgactcagaggaagatttcagggagctaggcaagaagatcaaacaacatgagggtcccagagtatctaaccatcttttctacttgtcgatacctccaaatatattcctggatgttgtaaaatgtgcaagcaaatcagcatcatctgtgagtggctggacaagggtaattgttgaaaaaccctttggccgggactcagagtcttctgctgccctaacgaaaggtctgaagcagtacctgacagaggaccaaatcttcaggattgaccattacttgggaaaggaactggtggagaacttgtctgtccttcgcttctcgaatcttgtttttgagcctctgtggtcaaggcaatatattaggaatgtgcaactgatattctcggaagactttggcactgaagggcgaggagggtactttgatagctatggtattatccgagacataatgcagaatcatcttcttcagatactagctctatttgcaatggaaactcctattagcttggaagcagaggacatacgaaatgagaaggttaaagttttgcgctccatgaagccattgcgactagaagatgtggtaataggacagtataaaagtcatacaaagggtggtattacataccctggatacactgaagataagacggtgcccaagggtagtctgactccaacatttgctgcagctgcgctttttataaataacgctagatgggatggagttccctttctcatgaaggctggaaaagctttgcatactaaacaggctgagattagagtacagtttcgacatgttcctggaaatctctacaaggggtcttttggaaccgatcttgacagggctactaatgaacttgtgatacgcgtgcaaccagatgaaggaatttacctaaagattaacaacaagattcctggtcttggtatgagactagataggagtaatctgaatcttcactatgcagcaaggtaccccaaggagataccagatgcgtacgagaggctcctgctcgacgcgatagaaggagagcgaaggctcttcatccggtcggacgagctggacgcagcgtgggagctcttcacgcccctcctgaaggagctggagcagaagcggatggcccccgagctatacccctacgggagccgcgggcccatgggcgcccactacctggcagccaagtacaaggtgagatggggcgacctgggtggctcggaacactaggaagagagcgtggtttcacacgggaggtgatgatttctgtttttggcgtcgcaatttctgcaaaaggccttgcagcgcacgcccagctagtgggggtgtgcgaggaacagatctgaataagggtgagcggttggcgatgcttgtgttcatcgatcgatcgaccgtgagtgagtatatttgttggtaccactggcttacatattctatgattcttaagaggaagcccagagcagaaagctcattcatcctggctgttcgtcggctcatttggttgtctggctgggccgggctgttgtattgggactgctgattgtgtaactgcaaaagctgttacttcttt

SEQ ID NO: 67559 - protein, 586 aa, Triticum aestivum
  peptide (1)..(586): Ceres Seq. ID no. 15223152
MALSCMRCPAAAAGGGPLARRPQPPPSSSLAFSFARCGAAKGWRIHAVAGKGVKAPMDAVENAVAPAAPSTVANGTSSAITVEEFEDLASLVKDDEASVSITVVGASGDLAKKKIFPALFALYYEGCLPKHFSIFGYARSKMTDAELRDMVSKTLTCRIDKRENCSEKMEEFLKRCFYHSGQYDSEEDFRELGKKIKQHEGPRVSNHLFYLSIPPNIFLDVVKCASKSASSVSGWTRVIVEKPFGRDSESSAALTKGLKQYLTEDQIFRIDHYLGKELVENLSVLRFSNLVFEPLWSRQYIRNVQLIFSEDFGTEGRGGYFDSYGIIRDIMQNHLLQILALFAMETPISLEAEDIRNEKVKVLRSMKPLRLEDVVIGQYKSHTKGGITYPGYTEDKTVPKGSLTPTFAAAALFINNARWDGVPFLMKAGKALHTKQAEIRVQFRHVPGNLYKGSFGTDLDRATNELVIRVQPDEGIYLKINNKIPGLGMRLDRSNLNLHYAARYPKEIPDAYERLLLDAIEGERRLFIRSDELDAAWELFTPLLKELEQKRMAPELYPYGSRGPMGAHYLAAKYKVRWGDLGGSEH

SEQ ID NO: 67560 - protein, 581 aa, Triticum aestivum
  peptide (1)..(581): Ceres Seq. ID no. 15223153
MRCPAAAAGGGPLARRPQPPPSSSLAFSFARCGAAKGWRIHAVAGKGVKAPMDAVENAVAPAAPSTVANGTSSAITVEEFEDLASLVKDDEASVSITVVGASGDLAKKKIFPALFALYYEGCLPKHFSIFGYARSKMTDAELRDMVSKTLTCRIDKRENCSEKMEEFLKRCFYHSGQYDSEEDFRELGKKIKQHEGPRVSNHLFYLSIPPNIFLDVVKCASKSASSVSGWTRVIVEKPFGRDSESSAALTKGLKQYLTEDQIFRIDHYLGKELVENLSVLRFSNLVFEPLWSRQYIRNVQLIFSEDFGTEGRGGYFDSYGIIRDIMQNHLLQILALFAMETPISLEAEDIRNEKVKVLRSMKPLRLEDVVIGQYKSHTKGGITYPGYTEDKTVPKGSLTPTFAAAALFINNARWDGVPFLMKAGKALHTKQAEIRVQFRHVPGNLYKGSFGTDLDRATNELVIRVQPDEGIYLKINNKIPGLGMRLDRSNLNLHYAARYPKEIPDAYERLLLDAIEGERRLFIRSDELDAAWELFTPLLKELEQKRMAPELYPYGSRGPMGAHYLAAKYKVRWGDLGGSEH

SEQ ID NO: 67561 - protein, 530 aa, Triticum aestivum
  peptide (1)..(530): Ceres Seq. ID no. 15223154
MDAVENAVAPAAPSTVANGTSSAITVEEFEDLASLVKDDEASVSITVVGASGDLAKKKIFPALFALYYEGCLPKHFSIFGYARSKMTDAELRDMVSKTLTCRIDKRENCSEKMEEFLKRCFYHSGQYDSEEDFRELGKKIKQHEGPRVSNHLFYLSIPPNIFLDVVKCASKSASSVSGWTRVIVEKPFGRDSESSAALTKGLKQYLTEDQIFRIDHYLGKELVENLSVLRFSNLVFEPLWSRQYIRNVQLIFSEDFGTEGRGGYFDSYGIIRDIMQNHLLQILALFAMETPISLEAEDIRNEKVKVLRSMKPLRLEDVVIGQYKSHTKGGITYPGYTEDKTVPKGSLTPTFAAAALFINNARWDGVPFLMKAGKALHTKQAEIRVQFRHVPGNLYKGSFGTDLDRATNELVIRVQPDEGIYLKINNKIPGLGMRLDRSNLNLHYAARYPKEIPDAYERLLLDAIEGERRLFIRSDELDAAWELFTPLLKELEQKRMAPELYPYGSRGPMGAHYLAAKYKVRWGDLGGSEH

SEQ ID NO: 67562 - DNA, 738 bp, Triticum aestivum
  misc_feature (1)..(738): Ceres Seq. ID no. 12622778
gatttttcattatgtagtttattctttttcgtgctaatggggcatgttttaatttctatgcagttacaggcgcattgtagaatacaaaacagcttactattcattctatttgccggtcggttgtgcactgctgttgtccggtgggagtttggatgattatgttcaagtgaagcatatcctagttgaaatgggtatttacttccaaattcaggacgattatcttgactgttttggtgatccagaagttatgggcaagattggaactgatatcgaagacttcaagtgctcttggctgtttgttcaagcactagtgcgtgtcgatgagaggcaaaaagacatcttatttgaaaattacgggaaatcagatcctgcttgtgttgcaaaagtgaaggcgctgtataaagagctcaatctggaggcggtgttctctgagtacgaaagggagatttacgaaaagctgatctcagacatcgaagcgcagccgaatgaagctgtgcaggcagtgttgaaatcgtttttgcataaaatctacagaaggatgaagtaggaatgttcttgcgtacaaagagattgttgggtggaatgagttctttggtgtcggcgcatgcaagatgaatagtagtattaaatacttatgaataagcagtatgactgatcatattgaatagtcagagtttttgctttatattcgcgaacaacaaagcatttccatgcaaaagaacagaatataagaaattt

SEQ ID NO: 67563 - protein, 119 aa, Triticum aestivum
  peptide (1)..(119): Ceres Seq. ID no. 12622779
MGIYFQIQDDYLDCFGDPEVMGKIGTDIEDFKCSWLFVQALVRVDERQKDILFENYGKSDPACVAKVKALYKELNLEAVFSEYEREIYEKLISDIEAQPNEAVQAVLKSFLHKIYRRMK

SEQ ID NO: 67564 - protein, 99 aa, Triticum aestivum
  peptide (1)..(99): Ceres Seq. ID no. 12622780
MGKIGTDIEDFKCSWLFVQALVRVDERQKDILFENYGKSDPACVAKVKALYKELNLEAVFSEYEREIYEKLISDIEAQPNEAVQAVLKSFLHKIYRRMK

SEQ ID NO: 67565 - DNA, 2080 bp, Triticum aestivum
  misc_feature (1)..(2080): Ceres Seq. ID no. 13659971
gaaatagttttcgcagagccgttaagctcacctccttcgaggccggctgctccacctccacctccacctaatccccattcgcctcgcctccccgcccaccgccaccacccgtcgatggcggccatcaagccgccgccgcctgaccggccgccgcaggccgcgcggctgccgtccccttcctcttcctcctcggcggtggcggcggccaagcgaggcgccacaggctcccgcgggctgctcatggggcgctacgagctgggccgcgtcctgggcaaaggcaccttcgccaaggtgtaccacgcgcggcacgtgcagaccggcgagagcgtggccatcaaggtgctcgaccgggagaaggccgtgcggagcggcctcgtctcgcacatcaagcgcgagatcgccgtgctccgctgcgtgcgccaccccaacatcgtgcacctcttcgaggtcatggccaccaagaccaagatctacttcgtcatggagctcgtccgcggcggcgagctcttctcccgcgtctccaagggccgcctcaaggaggacattgcgcgccgctacttccagcacctcatctccgccgtcggcttctgccacacccgcggggtcttccaccgggacctcaagccggagaacctcctcgtcgacgaggcgggcaacctcaaggtgtccgacttcggcctctccgccgtcgccgagccgttccagccagagggtctcctccacaccttctgcggcacgccggcctacgtcgcgcccgaagtcctcgcccgccgtggatacgaaggcgccaaggccgacatatggtcctgcggtgtcatcctctttgttctcatggccggatacctccctttccatgaccagaacctcatggccatgtaccgtaaggtttacaagggagagttccgatgtccaaggtggttctccaaggaccttactagcttgatcatgcgttttcttgacacaaacccaagcaccaggatcaccttgccggaggtcatggagagccggtggttcaagaaaggtttccggccagtcaagttctatattgaagatgaccagctgtacaacgtcattgatgccgagaatgatatgctcgacttgggtctccctgaccctcttcctcaaccattgcttcctccaccttcatctccatctccgcaagaagttgatggagatgactcagggtcagaatccgacgcatcagtcgtgtcctgccctgccacatcgtcatttgaagagcgccacaggctccgcgggccactcccacgccccgcaagccttaacgcgtttgatatcatatcattctcaaggggattcaacttgtcggggctgtttgaggaaaaaggggacgaggtgagattcatctcgagtgaacctatgtcgggcattataacgaaattagaggagatcgcaaatgtgaagagcttcgcggtgcggaagaaggattggcgggtgagcctagagggcacaagggaaggggttaaggggccactaacaatctgcgcggagatatttgaactcacaccctcccttgtagtagtggaggtaaaaaagaaggcgggggataaggaagagtatgatgatttctgcaacaaggaattgaagccaggaatgcagcatcttgtgcaccagatggccccagttccaattacacctaccatttctgagtaggccgaaaggccttcaaggtaacaggcgccaccgcccctagagctaacggggatagggggagcgactctccaagctagaaagaaactggagtcgggtgcaactgacaggagcaagagttcttgtagtctcgggcactgacgatgatgagcgcggttacttggttaactctggagagcatacgtaatgttatccgagacgggagctagattgtggctgtatatggtgtcaccctagctgctgtttaaatgtttgtacttttctctacttaatttgctgatgatgattgtgtatgtactcccgctgttggtttatcagcagaaccgaataattttgggcaatcgttaattcaaggaccaaactgattgaggaataaattgggtgcaacatgcattgcatgcaccctttggcc

SEQ ID NO: 67566 - protein, 556 aa, Triticum aestivum
  peptide (1)..(556): Ceres Seq. ID no. 15219995
EIVFAEPLSSPPSRPAAPPPPPPNPHSPRLPAHRHHPSMAAIKPPPPDRPPQAARLPSPSSSSSAVAAAKRGATGSRGLLMGRYELGRVLGKGTFAKVYHARHVQTGESVAIKVLDREKAVRSGLVSHIKREIAVLRCVRHPNIVHLFEVMATKTKIYFVMELVRGGELFSRVSKGRLKEDIARRYFQHLISAVGFCHTRGVFHRDLKPENLLVDEAGNLKVSDFGLSAVAEPFQPEGLLHTFCGTPAYVAPEVLARRGYEGAKADIWSCGVILFVLMAGYLPFHDQNLMAMYRKVYKGEFRCPRWFSKDLTSLIMRFLDTNPSTRITLPEVMESRWFKKGFRPVKFYIEDDQLYNVIDAENDMLDLGLPDPLPQPLLPPPSSPSPQEVDGDDSGSESDASVVSCPATSSFEERHRLRGPLPRPASLNAFDIISFSRGFNLSGLFEEKGDEVRFISSEPMSGIITKLEEIANVKSFAVRKKDWRVSLEGTREGVKGPLTICAEIFELTPSLVVVEVKKKAGDKEEYDDFCNKELKPGMQHLVHQMAPVPITPTISE

SEQ ID NO: 67567 - protein, 518 aa, Triticum aestivum
  peptide (1)..(518): Ceres Seq. ID no. 15219996
MAAIKPPPPDRPPQAARLPSPSSSSSAVAAAKRGATGSRGLLMGRYELGRVLGKGTFAKVYHARHVQTGESVAIKVLDREKAVRSGLVSHIKREIAVLRCVRHPNIVHLFEVMATKTKIYFVMELVRGGELFSRVSKGRLKEDIARRYFQHLISAVGFCHTRGVFHRDLKPENLLVDEAGNLKVSDFGLSAVAEPFQPEGLLHTFCGTPAYVAPEVLARRGYEGAKADIWSCGVILFVLMAGYLPFHDQNLMAMYRKVYKGEFRCPRWFSKDLTSLIMRFLDTNPSTRITLPEVMESRWFKKGFRPVKFYIEDDQLYNVIDAENDMLDLGLPDPLPQPLLPPPSSPSPQEVDGDDSGSESDASVVSCPATSSFEERHRLRGPLPRPASLNAFDIISFSRGFNLSGLFEEKGDEVRFISSEPMSGIITKLEEIANVKSFAVRKKDWRVSLEGTREGVKGPLTICAEIFELTPSLVVVEVKKKAGDKEEYDDFCNKELKPGMQHLVHQMAPVPITPTISE

SEQ ID NO: 67568 - protein, 476 aa, Triticum aestivum
  peptide (1)..(476): Ceres Seq. ID no. 15219997
MGRYELGRVLGKGTFAKVYHARHVQTGESVAIKVLDREKAVRSGLVSHIKREIAVLRCVRHPNIVHLFEVMATKTKIYFVMELVRGGELFSRVSKGRLKEDIARRYFQHLISAVGFCHTRGVFHRDLKPENLLVDEAGNLKVSDFGLSAVAEPFQPEGLLHTFCGTPAYVAPEVLARRGYEGAKADIWSCGVILFVLMAGYLPFHDQNLMAMYRKVYKGEFRCPRWFSKDLTSLIMRFLDTNPSTRITLPEVMESRWFKKGFRPVKFYIEDDQLYNVIDAENDMLDLGLPDPLPQPLLPPPSSPSPQEVDGDDSGSESDASVVSCPATSSFEERHRLRGPLPRPASLNAFDIISFSRGFNLSGLFEEKGDEVRFISSEPMSGIITKLEEIANVKSFAVRKKDWRVSLEGTREGVKGPLTICAEIFELTPSLVVVEVKKKAGDKEEYDDFCNKELKPGMQHLVHQMAPVPITPTISE

SEQ ID NO: 67569 - DNA, 1204 bp, Triticum aestivum
  misc_feature (1)..(1204): Ceres Seq. ID no. 14303652
aaaaccaatcgtacgctcgctcgctcatcaatttcagcagccattccacgaccgcccagagaagactcgcctcctcccgagctcccctctccgtcctcgtcgtctccctctcccgcttccccccacccaaccaacacgctacgccaggcgcgagaggcaccagcggccatgaagggcggcggagccatcaggagcggcggcgggggaggcggcgggctgatgcggacgcggctgcggctccccgtggtgctcctctcctgctccctcttcttcctcgccggcttcctcggctccctcctcttcacccaggatccgcagggggaggaggacgtggagcggccgctgcggagggagcggctcatggaggcggtctggccggagatggcgtacggggagtccggcgagcccacgccctccttgatcccttaccagattttgagctggcaaccccgtgcattatattttccacaatttgcaacagcagaacagtgtgagaatgtagtaaaaactgcgaaggcacggcttaggccatcaacattggccttaaggaaaggagaaagcgaggagactaccaaaggaataaggacaagctcaggcacattccttagtgccgaagaagatccaactggagcccttgcagaaattgaaacgaagattgcaaaggctaccatgatgccaagaagtcatggagagccatttaatgtccttctgtatgagattggacagaagtatgcttcacactatgatgcatttgacccggctcaatatggtccacaaaaaagtcaaagggtggcatctttcttgctctacctcacggatgtcgaggaaggtggagaaaccatgttcccatatgagaatggggataatatgaacataggctacgactacgaacagtgcatcggcttaaaggtgaaaccgaggaagggggatggcctcttgttttactcccttatgctaaatggtaccattgatccgacttcacttcatggaagctgcccagtggtcaaaggagagaaatgggtcgccacaaaatggattagagacagaggctccacgtcctaaatagatcaacacatacatagtaatcatttttttctacaccatcttgtacctgtacattacatttattcaatttccatcggccttcatgaaccagtgaggtaggggaaaaaacaacttgcagtttccatctgctaatttgacg

SEQ ID NO: 67570 - protein, 353 aa, Triticum aestivum
  peptide (1)..(353): Ceres Seq. ID no. 14303653
KTNRTLARSSISAAIPRPPREDSPPPELPSPSSSSPSPASPHPTNTLRQAREAPAAMKGGGAIRSGGGGGGGLMRTRLRLPVVLLSCSLFFLAGFLGSLLFTQDPQGEEDVERPLRRERLMEAVWPEMAYGESGEPTPSLIPYQILSWQPRALYFPQFATAEQCENVVKTAKARLRPSTLALRKGESEETTKGIRTSSGTFLSAEEDPTGALAEIETKIAKATMMPRSHGEPFNVLLYEIGQKYASHYDAFDPAQYGPQKSQRVASFLLYLTDVEEGGETMFPYENGDNMNIGYDYEQCIGLKVKPRKGDGLLFYSLMLNGTIDPTSLHGSCPVVKGEKWVATKWIRDRGSTS

SEQ ID NO: 67571 - protein, 297 aa, Triticum aestivum
  peptide (1)..(297): Ceres Seq. ID no. 14303654
MKGGGAIRSGGGGGGGLMRTRLRLPVVLLSCSLFFLAGFLGSLLFTQDPQGEEDVERPLRRERLMEAVWPEMAYGESGEPTPSLIPYQILSWQPRALYFPQFATAEQCENVVKTAKARLRPSTLALRKGESEETTKGIRTSSGTFLSAEEDPTGALAEIETKIAKATMMPRSHGEPFNVLLYEIGQKYASHYDAFDPAQYGPQKSQRVASFLLYLTDVEEGGETMFPYENGDNMNIGYDYEQCIGLKVKPRKGDGLLFYSLMLNGTIDPTSLHGSCPVVKGEKWVATKWIRDRGSTS

SEQ ID NO: 67572 - protein, 280 aa, Triticum aestivum
  peptide (1)..(280): Ceres Seq. ID no. 14303655
MRTRLRLPVVLLSCSLFFLAGFLGSLLFTQDPQGEEDVERPLRRERLMEAVWPEMAYGESGEPTPSLIPYQILSWQPRALYFPQFATAEQCENVVKTAKARLRPSTLALRKGESEETTKGIRTSSGTFLSAEEDPTGALAEIETKIAKATMMPRSHGEPFNVLLYEIGQKYASHYDAFDPAQYGPQKSQRVASFLLYLTDVEEGGETMFPYENGDNMNIGYDYEQCIGLKVKPRKGDGLLFYSLMLNGTIDPTSLHGSCPVVKGEKWVATKWIRDRGSTS

SEQ ID NO: 67573 - DNA, 1389 bp, Triticum aestivum
  misc_feature (1)..(1389): Ceres Seq. ID no. 13663942
atacttctggctagtcaaactgtgatccctcgctcctccgcaccgccgccgccgctgcgatgtccaccgccgccgccgccgccggccgaggtctcaaatccgtctcccgcgccgccttctcctggaagccgacgggccgggcgcagcagacgctcgcggcggcggtgagcaggtcgggcgtgggactccactcgggcgcgcgcgccaccgccaggttgctccctgcgcgcgccggcgaggggaggtacttcgtcgtggaggaggcgagggtggcggcggaggcggggaatgccgagccacagtctccgctctgcaccacgctgcggagcgggagcggcggcgcgcgggtgcgcacggtggagcacctgctctcggccatggaggcgttcggtgtcgacaactgccgcgtcgaggtcagcggcggcgatgagatccctttgcttgatggatcagcgcaagagtgggtggaggccattcggggtgcaggtctgtgtgcggccgaggatatcggtggacagaagttggagaaactggcacccaagatcgacgagcctgtttacctgcgtaaggacgattgctttgtagctgcattcccttcctcgcaaatccacatcacctatggaattgattttccaaaggcgccagcgattggttgtcaatggttcaatactttcctggatgctgatatatactcaagcaagatagctcctgcaagaactttctgtatttttgaagaggttgaaaaaatgcgtgatgccgggcttataaaaggaggatcactggaaaatgctatggtttgcagtatgtctggtggttggcttaacccaccacttcgttttgatgatgaaccttgccgccacaagattttagatcttataggtgacttctcacttcttgcacggaatggcagccagggttttccaattgctcatgtagttgcctacaaggctggccatgccctgcacaccagtttcctacaccatttatcgggggagaccagtgtggaccaaggaacgcttgcttggtgatcttgaagcgtgtgcatgtggagcgggtactgttcatatgttggtgatagtgatgctcgacaggaagacggcagatttcagcatataccgtactaataaccatctgatggccctcgccctcactctgacagtcggaccggttgtactgtacatctcctccatctttggcaagtgatttctttagttcacgagccatatacagtatcattatcacatgctttggggagattgatccgaagaattatgtttgtacaccatgtgttatagttgtacctgaacacgtttcagtaaaaaaaaaaaaaaaaaagcttatcgataccgtcgactgtttaaacacaataaagttggaacgggagggggg

SEQ ID NO: 67574 - protein, 322 aa, Triticum aestivum
  peptide (1)..(322): Ceres Seq. ID no. 13663943
MSTAAAAAGRGLKSVSRAAFSWKPTGRAQQTLAAAVSRSGVGLHSGARATARLLPARAGEGRYFVVEEARVAAEAGNAEPQSPLCTTLRSGSGGARVRTVEHLLSAMEAFGVDNCRVEVSGGDEIPLLDGSAQEWVEAIRGAGLCAAEDIGGQKLEKLAPKIDEPVYLRKDDCFVAAFPSSQIHITYGIDFPKAPAIGCQWFNTFLDADIYSSKIAPARTFCIFEEVEKMRDAGLIKGGSLENAMVCSMSGGWLNPPLRFDDEPCRHKILDLIGDFSLLARNGSQGFPIAHVVAYKAGHALHTSFLHHLSGETSVDQGTLAW

SEQ ID NO: 67575 - protein, 216 aa, Triticum aestivum
  peptide (1)..(216): Ceres Seq. ID no. 13663944
MEAFGVDNCRVEVSGGDEIPLLDGSAQEWVEAIRGAGLCAAEDIGGQKLEKLAPKIDEPVYLRKDDCFVAAFPSSQIHITYGIDFPKAPAIGCQWFNTFLDADIYSSKIAPARTFCIFEEVEKMRDAGLIKGGSLENAMVCSMSGGWLNPPLRFDDEPCRHKILDLIGDFSLLARNGSQGFPIAHVVAYKAGHALHTSFLHHLSGETSVDQGTLAW

SEQ ID NO: 67576 - DNA, 1472 bp, Triticum aestivum
  misc_feature (1)..(1472): Ceres Seq. ID no. 13660172
cattcctatgatagtatcttttttctgaaataattgccagggtagtattggtttgatgcaaagtacaatcccttgatttgttgaagaatgttttttatattccctaacattcatttgcttggcaagatagagtcttgtccgaatgaagaagttcttctatgaagacaaagatttgatttgagaaaattagtttcgtgaagagaagataaagagagttgtattgggtagtccatgagaagattaaatgaagcgaagttcatttgaagtacttttgagacttttcaaacattgaggaacttgaagcgaatgattttacgaagatgctctttatgaggatcaccgtacttagtcattatacaagaaatttgtacaagaaacttggatactagggcctggacatgtagctgtgttttgcaacacttgcttccatgttgatggaaaatgtgtgtaagttgttgactgtgcgtcgtcaagattcatagagggcacactgcatttgaactgtgatggtaacatgagaggcccacacactctatngaatacttcttgccctcttttttgtctgttatcccattaatttcatttatcctactttgtctaatgaagtcgttatacgcagggagccccgagggtttgcatttgtggagtttgttgacccttatgatgcctctgatgcacaatatcacttgaaccacacagtattttttggccgagagataactgttgttgttgctgccgagtcacggaaaaggccagatgatatgcgtaatagggctagaatcagggggtattctggtgaacctgaaaggcgtcattcccgttatgggaggtctcgttcccgttcatgttcctactctcctcgctatcggggccgtcctcggtcaaggtcaaggtcaaggtcatactctcctgctccaagacggcgagatgactactctgcttccccgccaagatcacatcacacacagtctcctaggcgtctgccaaaagaacatgaagaagacgagcggagatcctattctcctgctggtagaggtggcggcgagcgtgatgccaatactaatggaaagaggtcaccaccatctgacattgatggatcacctccacgcatccggaggtcacccaggcaatcctcaggatcacccgtggggtcgcgctcaaggtcccctgaagcttctcctgcccgcagcgactgatgaaattggtgcctcccatattgccgcgtctcccacagcggcgcggccatgtactctatctctagcttcattgtctgagtaaaacccatctgggatgtgttggctagtgttgcggtgcctctttagttagcagatatgactggttggctgttcttttgctgcttggtgttgttgaaccttgtaccatggtagtgttttaatgtgaactgagccacaactgagccacaattgtgtttggatttgtgattttaaatgcattttgaatgcctttaactt

SEQ ID NO: 67577 - protein, 173 aa, Triticum aestivum
  peptide (1)..(173): Ceres Seq. ID no. 13660173
MICVIGLESGGILVNLKGVIPVMGGLVPVHVPTLLAIGAVLGQGQGQGHTLLLQDGEMTTLLPRQDHITHSLLGVCQKNMKKTSGDPILLLVEVAASVMPILMERGHHHLTLMDHLHASGGHPGNPQDHPWGRAQGPLKLLLPAATDEIGASHIAASPTAARPCTLSLASLSE

SEQ ID NO: 67578 - protein, 151 aa, Triticum aestivum
  peptide (1)..(151): Ceres Seq. ID no. 13660174
MGGLVPVHVPTLLAIGAVLGQGQGQGHTLLLQDGEMTTLLPRQDHITHSLLGVCQKNMKKTSGDPILLLVEVAASVMPILMERGHHHLTLMDHLHASGGHPGNPQDHPWGRAQGPLKLLLPAATDEIGASHIAASPTAARPCTLSLASLSE

SEQ ID NO: 67579 - protein, 144 aa, Triticum aestivum
  peptide (1)..(144): Ceres Seq. ID no. 13660175
MRNRARIRGYSGEPERRHSRYGRSRSRSCSYSPRYRGRPRSRSRSRSYSPAPRRRDDYSASPPRSHHTQSPRRLPKEHEEDERRSYSPAGRGGGERDANTNGKRSPPSDIDGSPPRIRRSPRQSSGSPVGSRSRSPEASPARSD

SEQ ID NO: 67580 - DNA, 1734 bp, Triticum aestivum
  misc_feature (1)..(1734): Ceres Seq. ID no. 14303539
acggtttccaccagatgtgtactcgtgcggtgtgtgcccgcgcacttctggcagcactgcgcacagcgcacgtagagcgtcgttcatcggcacatcaacttttcatggctctgtatgtctccggaatctaccatggcacactgtcacagaagatcaacatcctctgattgcccgatccagcgtgccagcaaaagagcaaagcgtcatcctaggtacaggcgtacagccattagccagacaccactccttgcttccagttccaccccgcgctcgtagaagcacctcccaacggagaccgatggccgctgctaagccagcctgctccgctcccgccaattccgccgacgcagccaaaccggcggcggcgccagaacccgagcagcagctgctggaggtggcggaggaggaggtggtcgtctacttcaagcccaacgccaagtgccgcgtcgacctccgcctccgctcgctgcacccgacgctccccgtcgccttcaaggtgcagacctcctccccgctcaagttcctcgtcagcccgccgcgcggcgccctgcagccgctctccacggccaccatccgcgtcgtgctccgcccgcagccgcacgcgccgccgtccttcccgcgctcccgcgccgaccgcttcctcgtcctctcctccctctccgccgcgcacctcgactccgcggcctccgtgcccggcggcgccggcgtcggcatcggcgccatccgcctccgcgtgttcttcggcgggccctacctgctccgcctcgccgcggacgccggggactccgcggccgtgcgcctcatcctgcgccggcagccgcacctcctgccggttctcgaccccgaggcggccgtgccggacgccgagccgtgggcgccgctgcacgcggctgccgcgcggggcgactgcggagaggtgaggaggctggggcaggaggcgctcgcggcgcgcgacaaggacggcaggacggctctgcacgttgcggccgccgccggggaagcagaggccgtggcagagctggtggacatgggcgccgactccgccgcggccgacgcgcgcgggcggactccgctggacgtggcacgagagaagggctacaaggaggtggtggacgtgctgcagcggtgggagcaggtgatgacggcggcgaggcggggcgacctccggagcctggagttcctcctcagcaagcgcacgggcctccgcggccgcgaccagtacgggctgacggcgctccacgtggccgccatcaagggccactgcgacgccatcgccctgctggcggggtcggggtgcatggacgtggagtgcgaggacgtggaagggcaccggccgctgcacctcgccgtcgagggcggctgcgccgacgccgtcgacctgctgctcgacatgggcgccgacgcccacgccaggaccaagcggggcgccacgccgctccagatggccgacaccatgggctatgacgacatctcgaagctgctgcgcgcccggggcgccgacgaggcggcggcggcggcggcggcaggtgacgcgcagctgtgcatcgcgtcgtcgtcttcctcgtcgatatcctgtgcataaggcctggtttgcgtctcccattcagagttgatcgcaaagacaatgttaatactgcactgtataggtgacagaagtgattactgttttttttctgtggctgttgatatggacttaacaataagatgggactttgcgttcccctgagcagttct

SEQ ID NO: 67581 - protein, 526 aa, Triticum aestivum
  peptide (1)..(526): Ceres Seq. ID no. 14303540
RFPPDVYSCGVCPRTSGSTAHSARRASFIGTSTFHGSVCLRNLPWHTVTEDQHPLIARSSVPAKEQSVILGTGVQPLARHHSLLPVPPRARRSTSQRRPMAAAKPACSAPANSADAAKPAAAPEPEQQLLEVAEEEVVVYFKPNAKCRVDLRLRSLHPTLPVAFKVQTSSPLKFLVSPPRGALQPLSTATIRVVLRPQPHAPPSFPRSRADRFLVLSSLSAAHLDSAASVPGGAGVGIGAIRLRVFFGGPYLLRLAADAGDSAAVRLILRRQPHLLPVLDPEAAVPDAEPWAPLHAAAARGDCGEVRRLGQEALAARDKDGRTALHVAAAAGEAEAVAELVDMGADSAAADARGRTPLDVAREKGYKEVVDVLQRWEQVMTAARRGDLRSLEFLLSKRTGLRGRDQYGLTALHVAAIKGHCDAIALLAGSGCMDVECEDVEGHRPLHLAVEGGCADAVDLLLDMGADAHARTKRGATPLQMADTMGYDDISKLLRARGADEAAAAAAAGDAQLCIASSSSSSISCA

SEQ ID NO: 67582 - protein, 427 aa, Triticum aestivum
  peptide (1)..(427): Ceres Seq. ID no. 14303541
MAAAKPACSAPANSADAAKPAAAPEPEQQLLEVAEEEVVVYFKPNAKCRVDLRLRSLHPTLPVAFKVQTSSPLKFLVSPPRGALQPLSTATIRVVLRPQPHAPPSFPRSRADRFLVLSSLSAAHLDSAASVPGGAGVGIGAIRLRVFFGGPYLLRLAADAGDSAAVRLILRRQPHLLPVLDPEAAVPDAEPWAPLHAAAARGDCGEVRRLGQEALAARDKDGRTALHVAAAAGEAEAVAELVDMGADSAAADARGRTPLDVAREKGYKEVVDVLQRWEQVMTAARRGDLRSLEFLLSKRTGLRGRDQYGLTALHVAAIKGHCDAIALLAGSGCMDVECEDVEGHRPLHLAVEGGCADAVDLLLDMGADAHARTKRGATPLQMADTMGYDDISKLLRARGADEAAAAAAAGDAQLCIASSSSSSISCA

SEQ ID NO: 67583 - DNA, 1909 bp, Triticum aestivum
  misc_feature (1)..(1909): Ceres Seq. ID no. 13500385
agaacatcctaatcgaaaaatccacagcaacagcttcctcttcctcctcagacccaccctcgctacctcctagctgcatctgctgctaagctccgcctccacccgcgcgctgtctgctagctcgtcgcgttgaaggtcgttcaggagcattttgaaggttgaaagtaaccttcggctgttggaagatgtatcgggccaagagagccgcattgtcaccaaaggtgaagcgccgtgtcggcaagtatgagctcggccgcaccatcggggaagggacctttgcaaaggtcaggttcgcaaagaacactgaaactatggagcctgttgctatcaaaatcctcgacaaggagaaggttcagaagctcagattggttgaacagattaggcgcgaaatttgtactatgaagttaataaagcatcctaatgttgttcgactgcacgaggtgatgggaagtaaagcaagaattttcattgttctggaatacattactggaggggaactctttgataccatttataccaatggaaggttgaaagaagaggaggcacgcaaatactttcagcaactgataaatgccgttgactattgccacagcaggggtgtgtatcacagagatttgaagttagaaaatttgttgcttgatgctgctggaaacctcaaagtgtccgacttcggtttaagtgctttaactgagcaagtgaaggctgacgggttgctgcacacaacatgcgggactccgaactatgttgctcctgaggtgattgaggatagaggttatgatggtgcagctgcagatatctggtcttgcggggtaatcctttttattctgcttgccgggtttttacctttcgaggatgaaaacatcatcgccctttataagaagatctcagaagctcaattcacatgtccctcttggttttctactggagctaagaagctgatcaccagaattctggaccctaatcctgcaactcgtatcaccattcctcagatactggaggatccttggttcaaaaagggattcaagccacctgtttttgacgataagtatgaaactagctttgatgatgtctatgctgcatttggagactcagaggaccagcatgtgaaagaggagactgaacataagccaacctcaatgaatgcatttgaactgatttcactgaatcagggactgaatctggacaacttgttcgaggcaaaggaggagcataaaagagagacacgattcacctcgcaatgccctccaaaagaaatcatcagcaagattgcagaagctgcaaggccacttggttttgacattcagaagaaaaactacaagatgcggatggagaacccgaaagcaggtagaaaaggcaatctcaatgttgcaaccgaggtgtttcaagtagctccatccctacatgtggttgagctgaaaaaggcgaagggggatactctggaatttcaaatgttctacagatctctgtcgacccagctcaaggacgtagtttggaagtgcggcggcgaggtagaagataacggcaccgcggcatgaagcacgttttccatgtacatagtccctactgtagttcatatgtgggatggatggcgggtgggctgcggaatgggttgtgcagatcgagttctttcgttggtttgttaatgatgatgatgatgatgaataggctccgatgaaacagcgggcgcgcagcccactgtggaagagcctatctatggcttcgttagtttgcttattattacatattcatggtccagagggagattaaagctagaggcgaaaggccgattgttgtaagattgtattggtaggaggttatattgaacagcgcaatgtgttgaactttgttctctactctacttagcattgtactgtagctatagccggaataataaataaataaaccgctg

SEQ ID NO: 67584 - protein, 449 aa, Triticum aestivum
  peptide (1)..(449): Ceres Seq. ID no. 13500386
MYRAKRAALSPKVKRRVGKYELGRTIGEGTFAKVRFAKNTETMEPVAIKILDKEKVQKLRLVEQIRREICTMKLIKHPNVVRLHEVMGSKARIFIVLEYITGGELFDTIYTNGRLKEEEARKYFQQLINAVDYCHSRGVYHRDLKLENLLLDAAGNLKVSDFGLSALTEQVKADGLLHTTCGTPNYVAPEVIEDRGYDGAAADIWSCGVILFILLAGFLPFEDENIIALYKKISEAQFTCPSWFSTGAKKLITRILDPNPATRITIPQILEDPWFKKGFKPPVFDDKYETSFDDVYAAFGDSEDQHVKEETEHKPTSMNAFELISLNQGLNLDNLFEAKEEHKRETRFTSQCPPKEIISKIAEAARPLGFDIQKKNYKMRMENPKAGRKGNLNVATEVFQVAPSLHVVELKKAKGDTLEFQMFYRSLSTQLKDVVWKCGGEVEDNGTAA

SEQ ID NO: 67585 - protein, 407 aa, Triticum aestivum
  peptide (1)..(407): Ceres Seq. ID no. 13500387
MEPVAIKILDKEKVQKLRLVEQIRREICTMKLIKHPNVVRLHEVMGSKARIFIVLEYITGGELFDTIYTNGRLKEEEARKYFQQLINAVDYCHSRGVYHRDLKLENLLLDAAGNLKVSDFGLSALTEQVKADGLLHTTCGTPNYVAPEVIEDRGYDGAAADIWSCGVILFILLAGFLPFEDENIIALYKKISEAQFTCPSWFSTGAKKLITRILDPNPATRITIPQILEDPWFKKGFKPPVFDDKYETSFDDVYAAFGDSEDQHVKEETEHKPTSMNAFELISLNQGLNLDNLFEAKEEHKRETRFTSQCPPKEIISKIAEAARPLGFDIQKKNYKMRMENPKAGRKGNLNVATEVFQVAPSLHVVELKKAKGDTLEFQMFYRSLSTQLKDVVWKCGGEVEDNGTAA

SEQ ID NO: 67586 - protein, 378 aa, Triticum aestivum
  peptide (1)..(378): Ceres Seq. ID no. 13500388
MKLIKHPNVVRLHEVMGSKARIFIVLEYITGGELFDTIYTNGRLKEEEARKYFQQLINAVDYCHSRGVYHRDLKLENLLLDAAGNLKVSDFGLSALTEQVKADGLLHTTCGTPNYVAPEVIEDRGYDGAAADIWSCGVILFILLAGFLPFEDENIIALYKKISEAQFTCPSWFSTGAKKLITRILDPNPATRITIPQILEDPWFKKGFKPPVFDDKYETSFDDVYAAFGDSEDQHVKEETEHKPTSMNAFELISLNQGLNLDNLFEAKEEHKRETRFTSQCPPKEIISKIAEAARPLGFDIQKKNYKMRMENPKAGRKGNLNVATEVFQVAPSLHVVELKKAKGDTLEFQMFYRSLSTQLKDVVWKCGGEVEDNGTAA

SEQ ID NO: 67587 - DNA, 622 bp, Triticum aestivum
  misc_feature (1)..(622): Ceres Seq. ID no. 13660351
tcggtatagcagctcccgtccactaccttgctcctcgccgcaatccccacattcatagcgagaatccccaaatcccaaccctgactgacgaccggcggatctgttccggcgcctcctcccgccgtcgaccatggcgtcttccaactccggcggcatccccatcaatgtggaacaggattcggacggctcggcccagagcacagctgatatgactgcttttgtgcaaaatcttctagttcagatgcaaaccaggttccaaactatgtcagagaacatcattacaaagatagatgaaatgggtgcaagaatcgatgaattggagttgagcataaatgacctcaaggctgaaatgggcagcgatggtatgacccctactaaagtgaaggacgaagaatcaaagccagcagacagctctgcctgagtcaagcagaagtagcagaagcaagtcgtattagtcttgggttcatgtcaatatcatcagccattcatcactaacttcatgcatgttatgagatgttattcgcactgttatatgcatttgagatatgcagtacctttcgatgagagatttctctgtacgcattgatgcttgctgagtggtctgctataaattttagtactc

SEQ ID NO: 67588 - protein, 96 aa, Triticum aestivum
  peptide (1)..(96): Ceres Seq. ID no. 13660352
MASSNSGGIPINVEQDSDGSAQSTADMTAFVQNLLVQMQTRFQTMSENIITKIDEMGARIDELELSINDLKAEMGSDGMTPTKVKDEESKPADSSA

SEQ ID NO: 67589 - protein, 70 aa, Triticum aestivum
  peptide (1)..(70): Ceres Seq. ID no. 13660353
MTAFVQNLLVQMQTRFQTMSENIITKIDEMGARIDELELSINDLKAEMGSDGMTPTKVKDEESKPADSSA

SEQ ID NO: 67590 - protein, 69 aa, Triticum aestivum
  peptide (1)..(69): Ceres Seq. ID no. 13660354
GIAAPVHYLAPRRNPHIHSENPQIPTLTDDRRICSGASSRRRPWRLPTPAASPSMWNRIRTARPRAQLI

SEQ ID NO: 67591 - DNA, 987 bp, Triticum aestivum
  misc_feature (1)..(987): Ceres Seq. ID no. 13660598
atgcgcagaccgtgggtgggaggcccacgcgtctgtgagattacgtgatatttcggccaagaatccacctacgcgtagttctgccgcacgttacgtggataaaaaggcaggaccgttcggggggcgaagaattgcgcacagcaaccaaccgtgtcagggaaggaattgaggcgagcgagagagaaccccacatcacatggcgaacggcgtgggctcggcgaaggcggagatctgcgccgggctgggcatgccgatggcggagctggagcaggtgttccggcgctacgacgccaacggcgacggcaagatctcggcggacgagctggcgtccgtgctgctcgcgctgggcgcgcccccgggggccaggggaggtgcagagcatgatggaggagatggacgccgacagggacggcttcgtcgacctccacgagttcgccgccttccactgcgggccctgcaagggcggcgcggccgcagacgccaaggagcaggaggccgccacggaggcggagctcaaggaggccttccggatgtacgacgccgaccgcaacgggctcatctccgcgcgggagcttcaccgcgtgctccgccagctcggggagaagtgctccgttgctgactgctcgcgcatgattcgatccgtcgacgccgacggcgacggcagcgtcaacttcgaggaattcaagaagatgatgggcggcggagggaggagctaggtcggtaagggccggccatgagcaaacaatgctgcatctgcatgcctcgttgagggttttgttcctccatggtgcttaatttaatttaattaatctcaaagtgaaaggcttaggctccccgtaatgcgaatactaatgatgatgcgggtgaagtgattaattatgtaaatctaatcttctagtagtagtagtactactaatgatgatgggtgtactaagaaatttggtctggggttgtttgcaatgaattagaactcgtttgaaactcttc

SEQ ID NO: 67592 - protein, 140 aa, Triticum aestivum
  peptide (1)..(140): Ceres Seq. ID no. 13660599
MANGVGSAKAEICAGLGMPMAELEQVFRRYDANGDGKISADELASVLLALGAPPGARGGAEHDGGDGRRQGRLRRPPRVRRLPLRALQGRRGRRRQGAGGRHGGGAQGGLPDVRRRPQRAHLRAGASPRAPPARGEVLRC

SEQ ID NO: 67593 - protein, 123 aa, Triticum aestivum
  peptide (1)..(123): Ceres Seq. ID no. 13660600
MPMAELEQVFRRYDANGDGKISADELASVLLALGAPPGARGGAEHDGGDGRRQGRLRRPPRVRRLPLRALQGRRGRRRQGAGGRHGGGAQGGLPDVRRRPQRAHLRAGASPRAPPARGEVLRC

SEQ ID NO: 67594 - protein, 121 aa, Triticum aestivum
  peptide (1)..(121): Ceres Seq. ID no. 13660601
MAELEQVFRRYDANGDGKISADELASVLLALGAPPGARGGAEHDGGDGRRQGRLRRPPRVRRLPLRALQGRRGRRRQGAGGRHGGGAQGGLPDVRRRPQRAHLRAGASPRAPPARGEVLRC

SEQ ID NO: 67595 - protein, 111 aa, Triticum aestivum
  peptide (1)..(111): Ceres Seq. ID no. 13660602
MMEEMDADRDGFVDLHEFAAFHCGPCKGGAAADAKEQEAATEAELKEAFRMYDADRNGLISARELHRVLRQLGEKCSVADCSRMIRSVDADGDGSVNFEEFKKMMGGGGRS

SEQ ID NO: 67596 - DNA, 1729 bp, Triticum aestivum
  misc_feature (1)..(1729): Ceres Seq. ID no. 13579945
gtccatcacccatcagttcctcccccctttgtctcatcccagttcctccccccaccaagaacctagggttagggttagggaggcggcggctgctttattcccgatcccgcccgatcgccatggtcatcgcaggcgagccagagccggaggaggtggccgtcatgttctccgataggttgagggcggaggaggagaccgtcgtcttccccggctgggtgatgctggatcgcatcggccgcacccactgcgacggcgacctaggagctgctcgtgaggctgtcaacgggaacaagaccgccgttcaagtcgagatggacagcggccactccttctacgtgtccttcaccctcgcgcctcctccacaaggggcctcttaccttgatctccactggccgctggaaggctcagccaaatccgtgcccccctacaagcagcctgcctatcccttcgtccgggcaatcgacaaggacctcgtcctcttccacatctccatcccgagcctgcctcaccgcaacttcgtcccgccagatctgttcgtctacaatgccgctggtcaccccccctcggtgcagcagctccctctgtacaggagaaggtcattcctcagggttaacttcaccacaggcatcctgcggcgccaaaacggcagctacatcgtttccgacctcaatgtctacccaaaaaaggagggcactggtaataattccatgtgcgccgaactctgcgtcttcaactccaatacacgggcgtggagcttcttcagcaaggatgctccgcagccccaggaccagagcaatggccagttccccaccctctggtcaaccgaccatgtgcttgcttttgacggccgtttcctgtgctgggttgactacttcagcggtgtcctgctatccgacttctccaatctgcgctcccgggtgctccacttcgtccctttccctggagaaggagagtaccctgctaaggtacgggttcaaaggtgcttcccagacagattccgaagcgtgtccatcagcaacggcaagatgtgcttcgtccacattgacaatgacttccatgagagaatccacactggctcgcaagggcagcagcctcgcaaaaaaatcaccatttggactttgaacatgatggatggtaactccaggttcaagtgggagccacatcatgtgatcgacctggatcgtctttggctgacacctagtgtacctcggcgtcttcctgagtatccaatcatcgcccccaataacccggatgttctgtactgcctgttaaggaagcaggaatttcatggtgaggcctccatgatcatggttgacatgaaccctgcatctccgtggttgtgtactccatatatcaatcggcggtctgtgcatgtgaaagatcacaaaagcgagtttcctaatatgcccctccttccaactgtcttcttcaaataccttgaaagttcaacagggatgccatgggacaatgacaagtttgcaactcgtccttcaaagaaattaaggtctgcaacgtgtgaagacctggagtctggtgactggtgttgaacatttcgggtatgctcatattgaaaatgatgtttgtcagtggtctggtacagttagaaccaagtcaggcaaaatatggcattgatgtgatgaagatgatgcactgatgttatctatttgagtgaacgatgcatgttcctgtaatcgtatgtttaattaagagccagtatgttttaagatcc

SEQ ID NO: 67597 - protein, 514 aa, Triticum aestivum
  peptide (1)..(514): Ceres Seq. ID no. 13579946
PSPISSSPLCLIPVPPPTKNLGLGLGRRRLLYSRSRPIAMVIAGEPEPEEVAVMFSDRLRAEEETVVFPGWVMLDRIGRTHCDGDLGAAREAVNGNKTAVQVEMDSGHSFYVSFTLAPPPQGASYLDLHWPLEGSAKSVPPYKQPAYPFVRAIDKDLVLFHISIPSLPHRNFVPPDLFVYNAAGHPPSVQQLPLYRRRSFLRVNFTTGILRRQNGSYIVSDLNVYPKKEGTGNNSMCAELCVFNSNTRAWSFFSKDAPQPQDQSNGQFPTLWSTDHVLAFDGRFLCWVDYFSGVLLSDFSNLRSRVLHFVPFPGEGEYPAKVRVQRCFPDRFRSVSISNGKMCFVHIDNDFHERIHTGSQGQQPRKKITIWTLNMMDGNSRFKWEPHHVIDLDRLWLTPSVPRRLPEYPIIAPNNPDVLYCLLRKQEFHGEASMIMVDMNPASPWLCTPYINRRSVHVKDHKSEFPNMPLLPTVFFKYLESSTGMPWDNDKFATRPSKKLRSATCEDLESGDWC

SEQ ID NO: 67598 - protein, 475 aa, Triticum aestivum
  peptide (1)..(475): Ceres Seq. ID no. 13579947
MVIAGEPEPEEVAVMFSDRLRAEEETVVFPGWVMLDRIGRTHCDGDLGAAREAVNGNKTAVQVEMDSGHSFYVSFTLAPPPQGASYLDLHWPLEGSAKSVPPYKQPAYPFVRAIDKDLVLFHISIPSLPHRNFVPPDLFVYNAAGHPPSVQQLPLYRRRSFLRVNFTTGILRRQNGSYIVSDLNVYPKKEGTGNNSMCAELCVFNSNTRAWSFFSKDAPQPQDQSNGQFPTLWSTDHVLAFDGRFLCWVDYFSGVLLSDFSNLRSRVLHFVPFPGEGEYPAKVRVQRCFPDRFRSVSISNGKMCFVHIDNDFHERIHTGSQGQQPRKKITIWTLNMMDGNSRFKWEPHHVIDLDRLWLTPSVPRRLPEYPIIAPNNPDVLYCLLRKQEFHGEASMIMVDMNPASPWLCTPYINRRSVHVKDHKSEFPNMPLLPTVFFKYLESSTGMPWDNDKFATRPSKKLRSATCEDLESGDWC

SEQ ID NO: 67599 - protein, 461 aa, Triticum aestivum
  peptide (1)..(461): Ceres Seq. ID no. 13579948
MFSDRLRAEEETVVFPGWVMLDRIGRTHCDGDLGAAREAVNGNKTAVQVEMDSGHSFYVSFTLAPPPQGASYLDLHWPLEGSAKSVPPYKQPAYPFVRAIDKDLVLFHISIPSLPHRNFVPPDLFVYNAAGHPPSVQQLPLYRRRSFLRVNFTTGILRRQNGSYIVSDLNVYPKKEGTGNNSMCAELCVFNSNTRAWSFFSKDAPQPQDQSNGQFPTLWSTDHVLAFDGRFLCWVDYFSGVLLSDFSNLRSRVLHFVPFPGEGEYPAKVRVQRCFPDRFRSVSISNGKMCFVHIDNDFHERIHTGSQGQQPRKKITIWTLNMMDGNSRFKWEPHHVIDLDRLWLTPSVPRRLPEYPIIAPNNPDVLYCLLRKQEFHGEASMIMVDMNPASPWLCTPYINRRSVHVKDHKSEFPNMPLLPTVFFKYLESSTGMPWDNDKFATRPSKKLRSATCEDLESGDWC

SEQ ID NO: 67600 - DNA, 496 bp, Triticum aestivum
  misc_feature (1)..(496): Ceres Seq. ID no. 13663935
aaaaacctccaaaacaattccaattcctcccctcccacagttccactccatccctcgcccccgcccctcctcgctccggagcctcctcccgggccaccgccatgctgcccgcgcgcttcctcaagctctcgctgctacgccgcctcggcaccgcccgtgcggccggagtgcccccgccgtggcagaccaggcaatttccggtgcggggttaccagcctcgaggttattctaccggaggaagctccaagtatgatagaccgatgagacagtttgctgaagataacgagtcaaattctcagccactaatatattacattgtcccatctgccattctagcctttgttggactagccacttatgttcactataatgatgagaggcgtgcagttcccttaggtaaacaagcacagcagaccagtattcccaaaaggtgcactaccaacagacctgcaatcggaggaccatttaagctctatgatacagaaaacaatgtggt

SEQ ID NO: 67601 - protein, 164 aa, Triticum aestivum
  peptide (1)..(164): Ceres Seq. ID no. 13663936
KPPKQFQFLPSHSSTPSLAPAPPRSGASSRATAMLPARFLKLSLLRRLGTARAAGVPPPWQTRQFPVRGYQPRGYSTGGSSKYDRPMRQFAEDNESNSQPLIYYIVPSAILAFVGLATYVHYNDERRAVPLGKQAQQTSIPKRCTTNRPAIGGPFKLYDTENNV

SEQ ID NO: 67602 - protein, 131 aa, Triticum aestivum
  peptide (1)..(131): Ceres Seq. ID no. 13663937
MLPARFLKLSLLRRLGTARAAGVPPPWQTRQFPVRGYQPRGYSTGGSSKYDRPMRQFAEDNESNSQPLIYYIVPSAILAFVGLATYVHYNDERRAVPLGKQAQQTSIPKRCTTNRPAIGGPFKLYDTENNV

SEQ ID NO: 67603 - protein, 87 aa, Triticum aestivum
  peptide (1)..(87): Ceres Seq. ID no. 13663938
KNLQNNSNSSPPTVPLHPSPPPLLAPEPPPGPPPCCPRASSSSRCYAASAPPVRPECPRRGRPGNFRCGVTSLEVILPEEAPSMIDR

SEQ ID NO: 67604 - DNA, 1515 bp, Triticum aestivum
  misc_feature (1)..(1515): Ceres Seq. ID no. 14302511
acccaaccaggcaaccaccacatcccggctccaactcctacatcgtgcgcgttccaactccggtagcgtactcctcctcagaaaaaactccggtggcgtactactagaaaacagcagagacggctgtgccctgctccaccttctcgccggtgccttctgctcgaggcaaacgaaacccatcctcctcctcctgcccctctctcccacgcttcccccttcgtctccgtcgaggagaggcgaggcgaggcgaggcggcgacgatgcaggtgaagcagaaggtctacgagctctacaaggggacggtggagcgggtcacgggcccgcgcactgtctcggcgttcctcgagaagggcgtcctctccgtccccgagttcatcctcgccggcgacaacctcgtatccaagtgccccacctggtcctgggaggcgggcgatccgagcaagagaaagccatacctcccctccgataagcagttcctcgtcaccaggaacgtgccctgcctaagacgagctgtggcggtcgaggaagagtatgatgcagcgggagctgaggttgttctcgatgatgatgaggatggcgaaggctggctcgcaacacatgggctgcaagcatcagagtcaaaagaggaggaagacataccgtctatggatacattggacatagggaaagttgaagagatcaaatctatcccctcctactttggtgctggtgaaaagccagatgacgaggaggatatacctgatatggacacctatgaagacacaggagatcattccacagctacccctcagccttcatattttgtcgcagaagagcctgatgatgacaacattcttctcaccagaacatatgatgtcagcatcacatatgacaagtactaccaaactccacgtgtctggcttacaggctatgatgaggcaagaatgccattaaagcctgaacttgtgtttcaagatatcagtcaagaccatgcacacaaaacggtgactatcgaagaccaccctcacttgttagtgggacagcacgcttcagtgcatccttgcaagcacgctgctgtgatgaaaaagatcattgatgttatagtgtctcaaggaggtgcaccagaagttgacaagtaccttttcatatttctgaaattcatggcttctgtcatacccaccattgagtatgattacactatggacttcgatctgggcagtacaagcacataagtcgcccattgaagaaaagctgaaacttccaagaaggcaggctggtcattgtcgccgaataattgctgctcttcggaaggatctgtacattgtgtccgtgtgtgttggttcgtctggaaatgaactttcaattgtaaactctgatgctctgcaggaagattgtgccgatttgtcctcttacggtgcagcgccgcactgatgacatttgtgattcttcgccaacaaatctgaattttgttgaaaaactgaaggatagtaaaatccctgcactgaaaaaaaaaaaaaaaaaaaaaaaaaaaaaaag

SEQ ID NO: 67605 - protein, 316 aa, Triticum aestivum
  peptide (1)..(316): Ceres Seq. ID no. 14302512
MQVKQKVYELYKGTVERVTGPRTVSAFLEKGVLSVPEFILAGDNLVSKCPTWSWEAGDPSKRKPYLPSDKQFLVTRNVPCLRRAVAVEEEYDAAGAEVVLDDDEDGEGWLATHGLQASESKEEEDIPSMDTLDIGKVEEIKSIPSYFGAGEKPDDEEDIPDMDTYEDTGDHSTATPQPSYFVAEEPDDDNILLTRTYDVSITYDKYYQTPRVWLTGYDEARMPLKPELVFQDISQDHAHKTVTIEDHPHLLVGQHASVHPCKHAAVMKKIIDVIVSQGGAPEVDKYLFIFLKFMASVIPTIEYDYTMDFDLGSTST

SEQ ID NO: 67606 - protein, 188 aa, Triticum aestivum
  peptide (1)..(188): Ceres Seq. ID no. 14302513
MDTLDIGKVEEIKSIPSYFGAGEKPDDEEDIPDMDTYEDTGDHSTATPQPSYFVAEEPDDDNILLTRTYDVSITYDKYYQTPRVWLTGYDEARMPLKPELVFQDISQDHAHKTVTIEDHPHLLVGQHASVHPCKHAAVMKKIIDVIVSQGGAPEVDKYLFIFLKFMASVIPTIEYDYTMDFDLGSTST

SEQ ID NO: 67607 - DNA, 434 bp, Triticum aestivum
  misc_feature (1)..(434): Ceres Seq. ID no. 13663708
agcaaaactcaccggtatctagccaagttagctcgagctccattgtcacaatacgagcgtctacacacccacattgcacctccagggccaggccaacctcgaacgccatggaagcccctctgcaccagctggcccccatgcagcaagcactgctcgcccgtcctcagaactgcaagcacgacgccgcggcgaccatggccgcgacggacatggcgtgcctccagcagcagcagcagctgatgcagctgcagccggcggtggcgaacccgaacacgccctcgggcgcggcacgggagcagtgcccgcggtgcgcgtctcacgacaccaagttctgctactacaacaactacaacacgtcgcagccgcgccacttctgccgcgcctgccgccgctactggacgctcgggggctcctccgcaacgtcccatcggggc

SEQ ID NO: 67608 - protein, 144 aa, Triticum aestivum
  peptide (1)..(144): Ceres Seq. ID no. 13663709
QNSPVSSQVSSSSIVTIRASTHPHCTSRARPTSNAMEAPLHQLAPMQQALLARPQNCKHDAAATMAATDMACLQQQQQLMQLQPAVANPNTPSGAAREQCPRCASHDTKFCYYNNYNTSQPRHFCRACRRYWTLGGSSATSHRG

SEQ ID NO: 67609 - protein, 109 aa, Triticum aestivum
  peptide (1)..(109): Ceres Seq. ID no. 13663710
MEAPLHQLAPMQQALLARPQNCKHDAAATMAATDMACLQQQQQLMQLQPAVANPNTPSGAAREQCPRCASHDTKFCYYNNYNTSQPRHFCRACRRYWTLGGSSATSHRG

SEQ ID NO: 67610 - protein, 99 aa, Triticum aestivum
  peptide (1)..(99): Ceres Seq. ID no. 13663711
MQQALLARPQNCKHDAAATMAATDMACLQQQQQLMQLQPAVANPNTPSGAAREQCPRCASHDTKFCYYNNYNTSQPRHFCRACRRYWTLGGSSATSHRG

SEQ ID NO: 67611 - DNA, 860 bp, Triticum aestivum
  misc_feature (1)..(860): Ceres Seq. ID no. 12627045
aatcgattgggttgggttgggtttgcgggtggaccgatgacggtggccgccgcacgctgcctcattctcacccccacaatctcctcctcctccgccgttctccggctcccccggatcgcccgccgccgcccgctctcctgctcggcctcgccgctcgccgtgttcgccaccatggagtcgccgcccgagggctaccgcaccaacgtcggcatctgcctcgccgaccccaccctcaccaagatcttctccgcgtccaggatcgacatccccacggcgtggcagatgcctcagggtgggatagacccaggggaagagccacgagcagctgccatcagggaattgagggaagaaaccggtgttagatctgccgaggttgtcgccgaggcccccaattggttgacatatgatttccccgcggatgtcaaagacaagctgaatgctaggtggggaaccaactggaagggccaggctcagaagtggtttctatttaggcttacggggggtgatgacgagatcaacctgatgggcgatggatccgagaagccggagttctccgagtgggcatggatgacccctcagcaagtgattgagaaggctgttgatttcaagaaacctgtctacaaggagacactgaagcacttcgccccatatctacagtcagatccaacagcttcgtcatagactttgcagtctcccacgggctttatacgtagaggggctgtgtcaatcaataatttctcaaaaatgtattggggccacggagtatttctagaacgtctggcgtatcgccgccgcctgctatcccggcattggatccccgtagcccgatcatgcgcaacgagatgagtacgttgtgtcgc

SEQ ID NO: 67612 - protein, 226 aa, Triticum aestivum
  peptide (1)..(226): Ceres Seq. ID no. 12627046
NRLGWVGFAGGPMTVAAARCLILTPTISSSSAVLRLPRIARRRPLSCSASPLAVFATMESPPEGYRTNVGICLADPTLTKIFSASRIDIPTAWQMPQGGIDPGEEPRAAAIRELREETGVRSAEVVAEAPNWLTYDFPADVKDKLNARWGTNWKGQAQKWFLFRLTGGDDEINLMGDGSEKPEFSEWAWMTPQQVIEKAVDFKKPVYKETLKHFAPYLQSDPTASS

SEQ ID NO: 67613 - protein, 214 aa, Triticum aestivum
  peptide (1)..(214): Ceres Seq. ID no. 12627047
MTVAAARCLILTPTISSSSAVLRLPRIARRRPLSCSASPLAVFATMESPPEGYRTNVGICLADPTLTKIFSASRIDIPTAWQMPQGGIDPGEEPRAAAIRELREETGVRSAEVVAEAPNWLTYDFPADVKDKLNARWGTNWKGQAQKWFLFRLTGGDDEINLMGDGSEKPEFSEWAWMTPQQVIEKAVDFKKPVYKETLKHFAPYLQSDPTASS

SEQ ID NO: 67614 - protein, 169 aa, Triticum aestivum
  peptide (1)..(169): Ceres Seq. ID no. 12627048
MESPPEGYRTNVGICLADPTLTKIFSASRIDIPTAWQMPQGGIDPGEEPRAAAIRELREETGVRSAEVVAEAPNWLTYDFPADVKDKLNARWGTNWKGQAQKWFLFRLTGGDDEINLMGDGSEKPEFSEWAWMTPQQVIEKAVDFKKPVYKETLKHFAPYLQSDPTASS

SEQ ID NO: 67615 - DNA, 682 bp, Triticum aestivum
  misc_feature (1)..(682): Ceres Seq. ID no. 12784091
atccgccgcgcgcggtgcagcttctcgtggatttccccctagctagctagagccacagctacagcaatggaagctctcgcctcgtcgccgcgggctctcttcgcccgcaccgcctctccgacgacggcgctggtcacgccagcaagatggacgccgtcatcgagcaggcgtgtcaaggccgccgccgccgccgagccggccggcgaggcgaagccggctgccgcagcggcgccgtcggcacccaagaagatcctcaagaagaagcccgtatactccatgaagaaagggcagatcgtgcgcgtcgagaaagaaaagtatctgaacagcatcaattacctatcagtggggcacccacccttctacaaggggctagactacatatatgaagaccgcggcgaggttttggacatcagaatctttgaagagaccggagagtatgctctgatcgcgtgggtggggattccaaccccgccggcatggctcccaacttatatgctcatcaagtcagacaaactcgactacgagaggatatgattgttggatgagcagttgcaagggagaacgatgttctctgaataaatcaatgttgctatgtggccatgttgtgacattgctccatggatgcaaaacgaagcagttgtaaattgaagaaacaatagtgaaatatatccaaagttttttt

SEQ ID NO: 67616 - protein, 155 aa, Triticum aestivum
  peptide (1)..(155): Ceres Seq. ID no. 12784092
MEALASSPRALFARTASPTTALVTPARWTPSSSRRVKAAAAAEPAGEAKPAAAAAPSAPKKILKKKPVYSMKKGQIVRVEKEKYLNSINYLSVGHPPFYKGLDYIYEDRGEVLDIRIFEETGEYALIAWVGIPTPPAWLPTYMLIKSDKLDYERI

SEQ ID NO: 67617 - protein, 85 aa, Triticum aestivum
  peptide (1)..(85): Ceres Seq. ID no. 12784093
MKKGQIVRVEKEKYLNSINYLSVGHPPFYKGLDYIYEDRGEVLDIRIFEETGEYALIAWVGIPTPPAWLPTYMLIKSDKLDYERI

SEQ ID NO: 67618 - protein, 79 aa, Triticum aestivum
  peptide (1)..(79): Ceres Seq. ID no. 12784094
MDAVIEQACQGRRRRRAGRRGEAGCRSGAVGTQEDPQEEARILHEERADRARRERKVSEQHQLPISGAPTLLQGARLHI

SEQ ID NO: 67619 - DNA, 739 bp, Triticum aestivum
  misc_feature (1)..(739): Ceres Seq. ID no. 12622129
agaggaaatcaatcaagaaggcgaggaggagcatcgtcggcgatggaggggtgggacaagggcacgaagagcgtggtgggcgagatcccgctgctgtcgacgcgggcgggcccccgggacggcgatccgtggcggcagcggctcaaggaggagtaccgcgccttcatcgcctacacctccgtcaacaaggccaaggacaatgactggttcagcatctccgccgccaacccggagggcacccgctgggagggtacctgctggtacgtccacaacctccgccgttacgagttccccctccagttagacatccccgtcgcctaccctcaggtcgcccccgagatcgagctccccaccctcgacggcaagacccacaagatgtaccgcggagggaagatctgcctcaccgtgcacttcaagccgctgtgggccaagaactgcccgcggttcgggctcgcgcacgctctctgcctcgggctcgcgccgtggctcgctgcggaggtgcccatcctggtcgattcgggcatggtgaagcacaaggacgacgaggctgctcctgcagatgccgctgctgcgtctggttctgccgctgcctcttagttgcaagacagttacagtatgtcttttctgttgttgctgacagtgacagttacagtatgatggttgtcaaggggattggaggattgaaaatccactcggttgtggactaataagagcaagcaatacatatactctagttgtc

SEQ ID NO: 67620 - protein, 198 aa, Triticum aestivum
  peptide (1)..(198): Ceres Seq. ID no. 12622130
RGNQSRRRGGASSAMEGWDKGTKSVVGEIPLLSTRAGPRDGDPWRQRLKEEYRAFIAYTSVNKAKDNDWFSISAANPEGTRWEGTCWYVHNLRRYEFPLQLDIPVAYPQVAPEIELPTLDGKTHKMYRGGKICLTVHFKPLWAKNCPRFGLAHALCLGLAPWLAAEVPILVDSGMVKHKDDEAAPADAAAASGSAAAS

SEQ ID NO: 67621 - protein, 184 aa, Triticum aestivum
  peptide (1)..(184): Ceres Seq. ID no. 12622131
MEGWDKGTKSVVGEIPLLSTRAGPRDGDPWRQRLKEEYRAFIAYTSVNKAKDNDWFSISAANPEGTRWEGTCWYVHNLRRYEFPLQLDIPVAYPQVAPEIELPTLDGKTHKMYRGGKICLTVHFKPLWAKNCPRFGLAHALCLGLAPWLAAEVPILVDSGMVKHKDDEAAPADAAAASGSAAAS

SEQ ID NO: 67622 - protein, 100 aa, Triticum aestivum
  peptide (1)..(100): Ceres Seq. ID no. 12622132
EEINQEGEEEHRRRWRGGTRARRAWWARSRCCRRGRAPGTAIRGGSGSRRSTAPSSPTPPSTRPRTMTGSASPPPTRRAPAGRVPAGTSTTSAVTSSPSS

SEQ ID NO: 67623 - DNA, 915 bp, Triticum aestivum
  misc_feature (1)..(915): Ceres Seq. ID no. 15225803
ccatccattccggttccacctcctccgctcgtctcctactctcccgccatggccaccgcagcgcgcgccgtcgccgccgccgcgcgcccggcgcggccggtgctccagccgcggcgcctcccgtgcccatccgctcgccccgcgcggcctcgcgtcggccgcgccgtccgctgcatggcgcggcggcccgacgcctcgtactcgccgctgcggccggggcagggcggggaccgcgcgcccacggagatggcgccgctgttccccggctgcgactacgagcactggctcatcgtcatggacaagcccggcggcgagggcgccaccaagcaccagatgatcgactgctacatccagaccctcgccaaggtcgtgggcagcgaggaggagtcgaagaagaggatctacaacgtgtcctgtgagcgctactttgggtttgggtgcgagattgacgaggaaacgtccaacaagctggaaggcctcccgggtgttctttttgtgcttccggattcctatgttgatgctgagaacaaggactatggtgccgagttatttgtgaacggagagatcgtccaacgatcaccggaaaggcagagaagggtggagccggtgcctcagagagctcaagatagaccgcgttacagcgaccggactcgctatgtgaagaggagggagaaccaggcctaccaacggtgacatgtccccgtcggtgtaccgcacaagtggcccactgctatcgctccttgccctagatatagcaactgctccacgcccgaaatgcccctcgtcgtctttgctgcattgtagcctcgccatatctgggcgtttttttcttcacgaactgtaggttaaggactgcatgtactactgtgagtgacttgttccgttgttttggtaacggtatcttggtttgcggcg

SEQ ID NO: 67624 - protein, 230 aa, Triticum aestivum
  peptide (1)..(230): Ceres Seq. ID no. 15225804
PSIPVPPPPLVSYSPAMATAARAVAAAARPARPVLQPRRLPCPSARPARPRVGRAVRCMARRPDASYSPLRPGQGGDRAPTEMAPLFPGCDYEHWLIVMDKPGGEGATKHQMIDCYIQTLAKVVGSEEESKKRIYNVSCERYFGFGCEIDEETSNKLEGLPGVLFVLPDSYVDAENKDYGAELFVNGEIVQRSPERQRRVEPVPQRAQDRPRYSDRTRYVKRRENQAYQR

SEQ ID NO: 67625 - protein, 214 aa, Triticum aestivum
  peptide (1)..(214): Ceres Seq. ID no. 15225805
MATAARAVAAAARPARPVLQPRRLPCPSARPARPRVGRAVRCMARRPDASYSPLRPGQGGDRAPTEMAPLFPGCDYEHWLIVMDKPGGEGATKHQMIDCYIQTLAKVVGSEEESKKRIYNVSCERYFGFGCEIDEETSNKLEGLPGVLFVLPDSYVDAENKDYGAELFVNGEIVQRSPERQRRVEPVPQRAQDRPRYSDRTRYVKRRENQAYQR

SEQ ID NO: 67626 - protein, 172 aa, Triticum aestivum
  peptide (1)..(172): Ceres Seq. ID no. 15225806
MARRPDASYSPLRPGQGGDRAPTEMAPLFPGCDYEHWLIVMDKPGGEGATKHQMIDCYIQTLAKVVGSEEESKKRIYNVSCERYFGFGCEIDEETSNKLEGLPGVLFVLPDSYVDAENKDYGAELFVNGEIVQRSPERQRRVEPVPQRAQDRPRYSDRTRYVKRRENQAYQR

SEQ ID NO: 67627 - DNA, 1476 bp, Triticum aestivum
  misc_feature (1)..(1476): Ceres Seq. ID no. 15176114
aacccaggtcgcgcacaaatccgccgcgcacgcacacaacctccatctcttcccccccccccccccccctcctctccctcccgcagaaccctagctctccacaagcctcttcgtcggcgatggcggcggctgagaacgccggggacgtggcggcgggggagagccgcaagctgttcgtgggtggcatcccgtcctcagcgcaggagacggagctgcggggccactttgcccgcttcggtgcggtgcgctcaatcgtcgtgatgcgggacaaggagtcgggccacggccgcgggttcgggttcgtcgagttcgaggacgaagaagcggccgccaaggcgctcggtgacggggagaggcccaagcacttcatctgcggccgactggtcgacgttaagagggcgcgtgctagacctccgcggaacttgggcgagcaacctgtgcatcagcatcagcatcagcatcagctggaacagggtccggttcagggtcaccaagacgctggggacagtaccggggccagtagtgacagtatgagctatgcttcaaagaaggtattcattggtggtttgcgtgacaacatcacagaggaggagttcagagcttactttgaggcgtttggcactgtaacagatgttgttgtgatatacgacagcctgacaagcaggtcaaggggttttggttttgtcacctttgattctgaggaagctgtgagaaaggtgatgaggcaaagctttcatgacttgaaagggacaagggtggaagcaaagatcgctatccccaaggatgctcagtattaccgtaatggccgaggtcgtggctcaagaacctttggtggaaggggtcctgttggctttgatggttcaacataccaaccgtacaataaccgacatggtttctacaatggctatatgccacaacctgttcccacacatccctactatcatggcctctattttggtatgggaggcaatccctatgcaaatgcatatccaaaccatgcagtcatggcaaatgttccaaacatggtggcaaggcgtccagtatatagcccatatcccccaatgtatcctggctatggttttgcatacagaagtggttatgcgggtgctgcgccttctgttccgtatggcgttaatggtggcagggattacatgaatgaccaagactctatggatgtacaagaacttgacagcgctgctaccattgctacaaagtttgaatacatgaagctaggttcacaatgacgttctgcagggcaaatatttctacactgatgacagcgggaagtcgcaactgtgaagacatgagctgagattctttggttgacaagtacatcattggaaattatcaacttacccccattccttgtttcaactgcatgtagactgaaaacattcaagtttcaactggctgttgagctcacatgccttgtaccaatgcttaaatccttttaatgtatcagaatcagaacatttg

SEQ ID NO: 67628 - protein, 413 aa, Triticum aestivum
  peptide (1)..(413): Ceres Seq. ID no. 15176115
PRSRTNPPRTHTTSISSPPPPPLLSLPQNPSSPQASSSAMAAAENAGDVAAGESRKLFVGGIPSSAQETELRGHFARFGAVRSIVVMRDKESGHGRGFGFVEFEDEEAAAKALGDGERPKHFICGRLVDVKRARARPPRNLGEQPVHQHQHQHQLEQGPVQGHQDAGDSTGASSDSMSYASKKVFIGGLRDNITEEEFRAYFEAFGTVTDVVVIYDSLTSRSRGFGFVTFDSEEAVRKVMRQSFHDLKGTRVEAKIAIPKDAQYYRNGRGRGSRTFGGRGPVGFDGSTYQPYNNRHGFYNGYMPQPVPTHPYYHGLYFGMGGNPYANAYPNHAVMANVPNMVARRPVYSPYPPMYPGYGFAYRSGYAGAAPSVPYGVNGGRDYMNDQDSMDVQELDSAATIATKFEYMKLGSQ

SEQ ID NO: 67629 - protein, 374 aa, Triticum aestivum
  peptide (1)..(374): Ceres Seq. ID no. 15176116
MAAAENAGDVAAGESRKLFVGGIPSSAQETELRGHFARFGAVRSIVVMRDKESGHGRGFGFVEFEDEEAAAKALGDGERPKHFICGRLVDVKRARARPPRNLGEQPVHQHQHQHQLEQGPVQGHQDAGDSTGASSDSMSYASKKVFIGGLRDNITEEEFRAYFEAFGTVTDVVVIYDSLTSRSRGFGFVTFDSEEAVRKVMRQSFHDLKGTRVEAKIAIPKDAQYYRNGRGRGSRTFGGRGPVGFDGSTYQPYNNRHGFYNGYMPQPVPTHPYYHGLYFGMGGNPYANAYPNHAVMANVPNMVARRPVYSPYPPMYPGYGFAYRSGYAGAAPSVPYGVNGGRDYMNDQDSMDVQELDSAATIATKFEYMKLGSQ

SEQ ID NO: 67630 - protein, 327 aa, Triticum aestivum
  peptide (1)..(327): Ceres Seq. ID no. 15176117
MRDKESGHGRGFGFVEFEDEEAAAKALGDGERPKHFICGRLVDVKRARARPPRNLGEQPVHQHQHQHQLEQGPVQGHQDAGDSTGASSDSMSYASKKVFIGGLRDNITEEEFRAYFEAFGTVTDVVVIYDSLTSRSRGFGFVTFDSEEAVRKVMRQSFHDLKGTRVEAKIAIPKDAQYYRNGRGRGSRTFGGRGPVGFDGSTYQPYNNRHGFYNGYMPQPVPTHPYYHGLYFGMGGNPYANAYPNHAVMANVPNMVARRPVYSPYPPMYPGYGFAYRSGYAGAAPSVPYGVNGGRDYMNDQDSMDVQELDSAATIATKFEYMKLGSQ

SEQ ID NO: 67631 - DNA, 1603 bp, Triticum aestivum
  misc_feature (1)..(1603): Ceres Seq. ID no. 13663832
ctagaacatcctaatcgaaaaatcaaatctttacacgttatcagccatgctagcctcgaccaacagagcacgaacaagaagagacgagaaggtgagatggcagggatgaacctgcatagaatcgccactgcccttgttcgattcatttgacgggagatccgtcgatctgccagacgccacagtgctggtgttcctcgccattggggcccaggcaacggccgccgtggtcgtcgtggtcgtcaggatcaccctggccccgccgccgcagagcaggcaggaccaagcaacccatctgccgccgtccaccacgcctaccaggcacccccgatgccggccttcgtcgctccgcaaatggactgggctcccgccgatgcagcagccctgttcctgggagaggaggacttcttcgacgccgctcaggccccgccaccgcccgggatcttctccggcaacggcatggacgtaggcgtggccttctgtctggtgcacggatacgccccttgccctgcccgcgatttctgccccgtgcacgggtacgggccgtgccctccaccgccggccactccaccaccagaaccggaggtcatcgacgagccgctcgcctacccggacctcccaatgccgacgcccgccgacgaagacgaggagcacttcgcccctccaggctatggccctgtgcccgccatgatggagtgggaggtgacgccgaacgaagaggaggagcagtggctcaactccgttgtgaagcaggagccaaccacgccggcggagaccaaagaacccggcgccaccatccccgacctcaacactgccacctgcgtgaagatcgaggaagcggcgtcgtcttccaaggccccagcatctccgccgcctccgcccccggcaagcccgctaacgcctccaccggcggctccccggatcctttgcccgtttcgcggcggcgctggagcagcaccgccccggcctccgctccggctcctgggcccctgcaggcctccacctccccggctacgccgcggggggaccctcctcctcctgaagatcgccggcgctgggcgccatcggcggcggccggcgggatcccgtggaggtggcggtggaaagggggggakkkmmycsaavcgccncccchccwtcccagtcccccttatccgctcgatgtctccatcagtggcgccgccatgggcctgggccgaaaggcctcgtgggctgtggcccatgttgcaacgactaggaaaaaaatacccaacgggttataggctagattgcagaaaaatccttttattatcgggatttcgtgcattagtccaactactagcactaatttagtgcttgtcatgttttagccccgtaaatttgggaattcgcagatacgttcaactactagtgctgtaattaagtattgtcatgttttagaccttgtatctcgatgtggttatatattgtactcgattaaattgtgtattgatgtttagaccatattatttctwhtdkdnnnaaaaaaaaaaaaaaaaaaaaaaaaaaaaaaaaaaaaaaaaaaataaaaaaaaaaaaaaaaargtttatcgataccgycaacctcaagggggggcccggwacccaa

SEQ ID NO: 67632 - protein, 333 aa, Triticum aestivum
  peptide (1)..(333): Ceres Seq. ID no. 15220254
  misc_feature (262)..(262): Xaa is any aa, unknown or other
  misc_feature (263)..(263): Xaa is any aa, unknown or other
  misc_feature (264)..(264): Xaa is any aa, unknown or other
  misc_feature (265)..(265): Xaa is any aa, unknown or other
  misc_feature (267)..(267): Xaa is any aa, unknown or other
  misc_feature (269)..(269): Xaa is any aa, unknown or other
  misc_feature (270)..(270): Xaa is any aa, unknown or other
MPAFVAPQMDWAPADAAALFLGEEDFFDAAQAPPPPGIFSGNGMDVGVAFCLVHGYAPCPARDFCPVHGYGPCPPPPATPPPEPEVIDEPLAYPDLPMPTPADEDEEHFAPPGYGPVPAMMEWEVTPNEEEEQWLNSVVKQEPTTPAETKEPGATIPDLNTATCVKIEEAASSSKAPASPPPPPPASPLTPPPAAPRILCPFRGGAGAAPPRPPLRLLGPCRPPPPRLRRGGTLLLLKIAGAGRHRRRPAGSRGGGGGKGGXXXXRXPXXPVPLIRSMSPSVAPPWAWAERPRGLWPMLQRLGKKYPTGYRLDCRKILLLSGFRALVQLLALI

SEQ ID NO: 67633 - protein, 325 aa, Triticum aestivum
  peptide (1)..(325): Ceres Seq. ID no. 15220255
  misc_feature (254)..(254): Xaa is any aa, unknown or other
  misc_feature (255)..(255): Xaa is any aa, unknown or other
  misc_feature (256)..(256): Xaa is any aa, unknown or other
  misc_feature (257)..(257): Xaa is any aa, unknown or other
  misc_feature (259)..(259): Xaa is any aa, unknown or other
  misc_feature (261)..(261): Xaa is any aa, unknown or other
  misc_feature (262)..(262): Xaa is any aa, unknown or other
MDWAPADAAALFLGEEDFFDAAQAPPPPGIFSGNGMDVGVAFCLVHGYAPCPARDFCPVHGYGPCPPPPATPPPEPEVIDEPLAYPDLPMPTPADEDEEHFAPPGYGPVPAMMEWEVTPNEEEEQWLNSVVKQEPTTPAETKEPGATIPDLNTATCVKIEEAASSSKAPASPPPPPPASPLTPPPAAPRILCPFRGGAGAAPPRPPLRLLGPCRPPPPRLRRGGTLLLLKIAGAGRHRRRPAGSRGGGGGKGGXXXXRXPXXPVPLIRSMSPSVAPPWAWAERPRGLWPMLQRLGKKYPTGYRLDCRKILLLSGFRALVQLLALI

SEQ ID NO: 67634 - protein, 290 aa, Triticum aestivum
  peptide (1)..(290): Ceres Seq. ID no. 15220256
  misc_feature (219)..(219): Xaa is any aa, unknown or other
  misc_feature (220)..(220): Xaa is any aa, unknown or other
  misc_feature (221)..(221): Xaa is any aa, unknown or other
  misc_feature (222)..(222): Xaa is any aa, unknown or other
  misc_feature (224)..(224): Xaa is any aa, unknown or other
  misc_feature (226)..(226): Xaa is any aa, unknown or other
  misc_feature (227)..(227): Xaa is any aa, unknown or other
MDVGVAFCLVHGYAPCPARDFCPVHGYGPCPPPPATPPPEPEVIDEPLAYPDLPMPTPADEDEEHFAPPGYGPVPAMMEWEVTPNEEEEQWLNSVVKQEPTTPAETKEPGATIPDLNTATCVKIEEAASSSKAPASPPPPPPASPLTPPPAAPRILCPFRGGAGAAPPRPPLRLLGPCRPPPPRLRRGGTLLLLKIAGAGRHRRRPAGSRGGGGGKGGXXXXRXPXXPVPLIRSMSPSVAPPWAWAERPRGLWPMLQRLGKKYPTGYRLDCRKILLLSGFRALVQLLALI

SEQ ID NO: 67635 - DNA, 1128 bp, Triticum aestivum
  misc_feature (1)..(1128): Ceres Seq. ID no. 13660155
atccactactcacctagtcacctgcgttgtgtgtgtgcagctggtgctctgtcttccactcttccgttcatcgtctaggcgctgtccaacctgtcaagatggaatcctacgccaacggagccaaatttgattgcttgctgtttgacatggatgacaccctctacccactgatcttaggaatcaacttagcctgccgcaacaacatccaagactacatgctgaacaagcttcagatcgaggagagcctggtccccaagatgtgcctggatctgtacaaagaatatggaactacgatggccggtctgaagcttatgggttacgaattcgactacgacgaattccacgccagcgtgcacggtaaattgccatacgagaagctgaagccggaccctgtcctgaggaacctgctgctttcgatgccacagaggaaaatcatattcaccaattctgacgaggcccacgcggcgaccgtcctggagaagatggggctggagggatgcttcgaggggatcatatgcttcgagaccctgaaccccaagaatccaggtgacacagacgctagctctggcaagagggtcctctgcaagccgtccctggagtccatggaagccgtggtggagatcgccaagctcgaccccaagaagacagtgttcttcgacgacagcccgcgcaacatcgcctcagggaaagcggcaggcttccataccgtcatcgtagggagctcggcgctcgtgcccggggcggacgtggcgctagagagcatccacaacatcagggaggcgctgccggagctgtgggaggcgggcggcgaccacgtcgaggccgccgtcgacatccggtccgccgccgtggccgagaccacggtgctcgcgtgagccgccggcgctgcctgccagatgattaatatgcttcgtccgccttgactatattaacacaaaaaaggcggaggcgaacgactgaatccaggaaaaacccgtatatgctatggtttactcgaccatgatccatggtgatcagtgatcactgatgaatgcgtaggtattaaatgtacaggtgtactacttgtgtactgatgtgatcgaaacaccgtaataataagcaccgtaaatcttaaagattcgctcattg

SEQ ID NO: 67636 - protein, 258 aa, Triticum aestivum
  peptide (1)..(258): Ceres Seq. ID no. 15220014
MESYANGAKFDCLLFDMDDTLYPLILGINLACRNNIQDYMLNKLQIEESLVPKMCLDLYKEYGTTMAGLKLMGYEFDYDEFHASVHGKLPYEKLKPDPVLRNLLLSMPQRKIIFTNSDEAHAATVLEKMGLEGCFEGIICFETLNPKNPGDTDASSGKRVLCKPSLESMEAVVEIAKLDPKKTVFFDDSPRNIASGKAAGFHTVIVGSSALVPGADVALESIHNIREALPELWEAGGDHVEAAVDIRSAAVAETTVLA

SEQ ID NO: 67637 - protein, 242 aa, Triticum aestivum
  peptide (1)..(242): Ceres Seq. ID no. 15220015
MDDTLYPLILGINLACRNNIQDYMLNKLQIEESLVPKMCLDLYKEYGTTMAGLKLMGYEFDYDEFHASVHGKLPYEKLKPDPVLRNLLLSMPQRKIIFTNSDEAHAATVLEKMGLEGCFEGIICFETLNPKNPGDTDASSGKRVLCKPSLESMEAVVEIAKLDPKKTVFFDDSPRNIASGKAAGFHTVIVGSSALVPGADVALESIHNIREALPELWEAGGDHVEAAVDIRSAAVAETTVLA

SEQ ID NO: 67638 - protein, 219 aa, Triticum aestivum
  peptide (1)..(219): Ceres Seq. ID no. 15220016
MLNKLQIEESLVPKMCLDLYKEYGTTMAGLKLMGYEFDYDEFHASVHGKLPYEKLKPDPVLRNLLLSMPQRKIIFTNSDEAHAATVLEKMGLEGCFEGIICFETLNPKNPGDTDASSGKRVLCKPSLESMEAVVEIAKLDPKKTVFFDDSPRNIASGKAAGFHTVIVGSSALVPGADVALESIHNIREALPELWEAGGDHVEAAVDIRSAAVAETTVLA

SEQ ID NO: 67639 - DNA, 1827 bp, Triticum aestivum
  misc_feature (1)..(1827): Ceres Seq. ID no. 15170107
gaccggttaaacacacttcgacgctgacgggtgggcctcacgtggcaggaacggaaacacaccgcgaagctttggctaatccaacccacagagacggcgcgcatggcgaccgcggcggcggcggcggtggcgtcgctccggtacttcccctcttccgtcaggaaccgcagctatcccggaactatcggcggcggcgctgtggtcacgttttctccgcggcggggccgctgtgcgacggcggccgtggccgcgccttcgcgggaggcggagccggcctcctcgctcggggacctcacccgcgtagacttccccatcctcgaccaggaatttgatggtaacaaattagtttacttcgacaatggtgcaacatcacagaaaccctctcatgtgatgaaagccttagacgactactaccgattttataattcgaatgttcaccgtggcattcatgctctcagcgcaaaggctactgatgcatatgagagtgcaagaaggaaagttgcaaatttcgtcaatgcggctgatagtagagagattatttttactcgtaatgctacagaagctatcaatttagtagcttattcatggggcctatctaacttaaaacaaggagatgagattattcttacagttgcagagcatcatagtgcgattgttccttggcaatttgtatcccaaaaaactggtgctgtcctaaagtatgttgggctgactaaagaagaggttccagacatggagcagttaaaagggcttctgtcaagcaagacaaagattgttgttgtccatcatgtttcaaacgtcctgggttcaatgcttcctattgaggaggtcgtatcatgtgcaaacaaagttggagctaaagttcttgtagatgcttgtcaaagtgttcctcatatgccagttgatgttcagaagcttggtgcagattttcttgttgcatcctcgcataagatgtgtggccctacaggcgtcggattcttgcatggaaaatttgagatcttgtcatctatggagcctttcttaggtggtggtgaaatgattgcagatgtgttcgaagacaaatctacatatgctgagccgccttctagatttgaggctggaactcctgcaattggagaagctataggattgggggttgcgatagattatctgtcacactttggcatgcagacgatccacgagtatgagaaagagttggggtcgtacctttatgagagccttctctccgttccaaatgttcgtatctatggtccagcgccttctgcaagtgatcaccgtgctcctttatgttctttcaatgttgagaatgttcatccaacagatattgccgaaattcttgatctccagcatggcatagcgattcggtcagggcatcattgtgcacagattttgcatcgcacccttggtatcaatgcgagcgcccgtgctagtcttcacttttacaacacaaaagaggaggtggatgccttcatccatgggctaaaagctaccattgatttccttacttcccaccactagttcagttcagttagcaaacattagcttcctcgttgtctctcactagttgaagtgcgatagaaggcctacctgctcaaactgtctgatgtctttcagctttttcgtgtaaaccatgcacgggcaagtttatctactccagtactcttgccctctggaagtttcgagataaagtactgtcggctatgtagcctgggcggctccgtttatttcctatatataaaccgtattatacctggaccgttggccagttcatctgtaatttacgatctgtcaataactccataacagtaagcatggtggatacttgtg

SEQ ID NO: 67640 - protein, 471 aa, Triticum aestivum
  peptide (1)..(471): Ceres Seq. ID no. 15170108
MATAAAAAVASLRYFPSSVRNRSYPGTIGGGAVVTFSPRRGRCATAAVAAPSREAEPASSLGDLTRVDFPILDQEFDGNKLVYFDNGATSQKPSHVMKALDDYYRFYNSNVHRGIHALSAKATDAYESARRKVANFVNAADSREIIFTRNATEAINLVAYSWGLSNLKQGDEIILTVAEHHSAIVPWQFVSQKTGAVLKYVGLTKEEVPDMEQLKGLLSSKTKIVVVHHVSNVLGSMLPIEEVVSCANKVGAKVLVDACQSVPHMPVDVQKLGADFLVASSHKMCGPTGVGFLHGKFEILSSMEPFLGGGEMIADVFEDKSTYAEPPSRFEAGTPAIGEAIGLGVAIDYLSHFGMQTIHEYEKELGSYLYESLLSVPNVRIYGPAPSASDHRAPLCSFNVENVHPTDIAEILDLQHGIAIRSGHHCAQILHRTLGINASARASLHFYNTKEEVDAFIHGLKATIDFLTSHH

SEQ ID NO: 67641 - protein, 375 aa, Triticum aestivum
  peptide (1)..(375): Ceres Seq. ID no. 15170109
MKALDDYYRFYNSNVHRGIHALSAKATDAYESARRKVANFVNAADSREIIFTRNATEAINLVAYSWGLSNLKQGDEIILTVAEHHSAIVPWQFVSQKTGAVLKYVGLTKEEVPDMEQLKGLLSSKTKIVVVHHVSNVLGSMLPIEEVVSCANKVGAKVLVDACQSVPHMPVDVQKLGADFLVASSHKMCGPTGVGFLHGKFEILSSMEPFLGGGEMIADVFEDKSTYAEPPSRFEAGTPAIGEAIGLGVAIDYLSHFGMQTIHEYEKELGSYLYESLLSVPNVRIYGPAPSASDHRAPLCSFNVENVHPTDIAEILDLQHGIAIRSGHHCAQILHRTLGINASARASLHFYNTKEEVDAFIHGLKATIDFLTSHH

SEQ ID NO: 67642 - protein, 261 aa, Triticum aestivum
  peptide (1)..(261): Ceres Seq. ID no. 15170110
MEQLKGLLSSKTKIVVVHHVSNVLGSMLPIEEVVSCANKVGAKVLVDACQSVPHMPVDVQKLGADFLVASSHKMCGPTGVGFLHGKFEILSSMEPFLGGGEMIADVFEDKSTYAEPPSRFEAGTPAIGEAIGLGVAIDYLSHFGMQTIHEYEKELGSYLYESLLSVPNVRIYGPAPSASDHRAPLCSFNVENVHPTDIAEILDLQHGIAIRSGHHCAQILHRTLGINASARASLHFYNTKEEVDAFIHGLKATIDFLTSHH

SEQ ID NO: 67643 - DNA, 913 bp, Triticum aestivum
  misc_feature (1)..(913): Ceres Seq. ID no. 15172974
ccattttccccattcgttgggagtcaggacgagggagggaagagcccctgacgatgtcggtgccggaggcggggcaatcggcggggagggacgagcaggagatggacaattacgagcagcaccagaccagagtgctcatggcgctgatgcagggcttgtgcgccgcgaggtaccgcaaggccgacaacaccccctgcctcgtcgaccagggcctctacctgggttctgttggagcagcactgaacaacgaggctctgaagagcttgaacatcacccacatcttggttgttgccagatcactgaatcccgcctttccagcagaatttacatacaagaagatcgaggtacttgacagcccagacactgatttgggaaagcatttcggtgaatgctttactttcatagatgagggtatctgcactggtggcaatgtgctggttcactgctttgcaggtcggtcacggagtgtcacagttgttcttgcatatcttatgaagaagcatcagatgagcctgcaaagtgccatgtcactagttagaagcaaacgacctcaaatagcacccaatgcgggctttatatcccagctggtgaactttgagaagtctctgcaagatgcatggatccatgggaggattccgtaaagagagacctgaaggggactggaatatcaccaaagaactagccatgtgcagggaagtgtggaagttagctatccacgtgcagggaagtgtggaagttagctagccacgtgccagaaccatggctaggttttgagatcttataggtttcaattctagcttaccccaacttgtttgggactgaaaggctttgttgttgtgcatggatccaagtattagatgtcattggtaccatgactcaattgtattaatcgtattcactaagttttcactcg

SEQ ID NO: 67644 - protein, 212 aa, Triticum aestivum
  peptide (1)..(212): Ceres Seq. ID no. 15172975
IFPIRWESGRGREEPLTMSVPEAGQSAGRDEQEMDNYEQHQTRVLMALMQGLCAARYRKADNTPCLVDQGLYLGSVGAALNNEALKSLNITHILVVARSLNPAFPAEFTYKKIEVLDSPDTDLGKHFGECFTFIDEGICTGGNVLVHCFAGRSRSVTVVLAYLMKKHQMSLQSAMSLVRSKRPQIAPNAGFISQLVNFEKSLQDAWIHGRIP

SEQ ID NO: 67645 - protein, 195 aa, Triticum aestivum
  peptide (1)..(195): Ceres Seq. ID no. 15172976
MSVPEAGQSAGRDEQEMDNYEQHQTRVLMALMQGLCAARYRKADNTPCLVDQGLYLGSVGAALNNEALKSLNITHILVVARSLNPAFPAEFTYKKIEVLDSPDTDLGKHFGECFTFIDEGICTGGNVLVHCFAGRSRSVTVVLAYLMKKHQMSLQSAMSLVRSKRPQIAPNAGFISQLVNFEKSLQDAWIHGRIP

SEQ ID NO: 67646 - protein, 179 aa, Triticum aestivum
  peptide (1)..(179): Ceres Seq. ID no. 15172977
MDNYEQHQTRVLMALMQGLCAARYRKADNTPCLVDQGLYLGSVGAALNNEALKSLNITHILVVARSLNPAFPAEFTYKKIEVLDSPDTDLGKHFGECFTFIDEGICTGGNVLVHCFAGRSRSVTVVLAYLMKKHQMSLQSAMSLVRSKRPQIAPNAGFISQLVNFEKSLQDAWIHGRIP

SEQ ID NO: 67647 - DNA, 2128 bp, Triticum aestivum
  misc_feature (1)..(2128): Ceres Seq. ID no. 15170135
tcacgctctcggtttcctttcgtctcgtcccgttccgccgtcccgtgccggaccgccccacccaccacctccacctcccactccggagcagttcacagtctccactccacctcccacctataagtttcctcatcgccaccattcctcgtcccgttctcagttcctcactcccccccttccacaatcccctcgcttcgcacggcgaagcagccagagccagagcccgccttccagaaccagcccgcccgccatggcgagcttcgcgaggcaggagcaccagttcctcgccgagctcggcctcgcgccgcgcaacccgggctccttcgcctgcggcgcctggggcggctcgggccccgtcgtcaccaccaccaaccctagcaacaacgaggtcattgctgaggtcgtcgaggcgtccatggacgactacgagaaggggatgagcgcctgcttcgacgccgccaagacctggatggctgttccggcaccaaaacgaggagaaattgttaggcagattggtgatgcactgagagcaaagcttcatcaccttggcagacttctctcactcgagatggggaaaattctccctgaaggaattggggaggttcaggaaattattgacatgtgtgattatgctgtggggctaagtcgtcagctaaatggatccatcataccatctgaactcccaaaccatatgatgatggaggtctggaatcctcttggagttgttggtgtcatcactgcattcaatttcccttgcgccgtgctgggttggaatgcttgcattgctttggtgtgcggcaactgtgttgtctggaagggcgctccaactactccattgatcactatcgcaatgactaaaatagtggctagtgtatttgaaaagaacaacttgccaagtgcaatcttcacagctttttgtgggggtgctgaaattggccaagcaattgctcttgacacaaggatacctttggtttcattcacaggaagtacaaaggtaggtcaaatggttcagcaacaggttagcgcgagatttggtaaatgccttcttgaacttagtgggaacaacgccattattgtcatggatgatgcagacattccactagctgtgcgttctgttctgtttgctgctgttggcacagcaggacagcgatgcactacatgtcgtaggctgcttcttcacgaaagcatatatcaaacatttcttgatcaacttgttgaggtttataaacaagtccgtattggggatcctatggaaaagggcaccttgctgggaccactgcacactactacatcaaaggaaagctttttgaaaggcatccaaactatcaaatcccagggaggaaaaatccttttaggaggatctgctattgaatcagaagggaactttgttcagccaacaattgtggaaatttcacctgatgcgccagttgtgagggaagaattgtttggtcctgtcctttatgccatgaaatttctgacactgaaggaagcaattgaaatcaacaattctgttcctcaaggattgagcagttctatatttacaaggaaaccggatgctattttcaagtggattgggcctcatggcagtgattgtggtatagtgaatgtaaacatacccactaatggtgctgaaattggtggagcttttggtggagaaaaagcaaccggtggtgggcgagaagctggaagtgattcttggaagcagtacatgaggagggccacttgtacaatcaactatggaagcgagctgcctctagcacagggaattaactttggctagtttggtgctgaaggactgccagtgaaacgtcgtgctgcagcatggggattggggataatgtgttgagatatctggagcgtgcagccatcatcttcaggaaattctctgtgtcgatcattgcacccaaattgcgacgctgctgctgagtacatataataagagatgtgttgatctcatgtatgcattgttcatgccttttggcatgtttagccatctgtgccctggacctagtctattaataaactggaaaaatagcatatcttccggtgagagtaacattttacgcatgctaccttgagatcggactgctcgaaataaaaggagatcgtagccttcaggccgttgtgt

SEQ ID NO: 67648 - protein, 592 aa, Triticum aestivum
  peptide (1)..(592): Ceres Seq. ID no. 15170136
HALGFLSSRPVPPSRAGPPHPPPPPPTPEQFTVSTPPPTYKFPHRHHSSSRSQFLTPPLPQSPRFARRSSQSQSPPSRTSPPAMASFARQEHQFLAELGLAPRNPGSFACGAWGGSGPVVTTTNPSNNEVIAEVVEASMDDYEKGMSACFDAAKTWMAVPAPKRGEIVRQIGDALRAKLHHLGRLLSLEMGKILPEGIGEVQEIIDMCDYAVGLSRQLNGSIIPSELPNHMMMEVWNPLGVVGVITAFNFPCAVLGWNACIALVCGNCVVWKGAPTTPLITIAMTKIVASVFEKNNLPSAIFTAFCGGAEIGQAIALDTRIPLVSFTGSTKVGQMVQQQVSARFGKCLLELSGNNAIIVMDDADIPLAVRSVLFAAVGTAGQRCTTCRRLLLHESIYQTFLDQLVEVYKQVRIGDPMEKGTLLGPLHTTTSKESFLKGIQTIKSQGGKILLGGSAIESEGNFVQPTIVEISPDAPVVREELFGPVLYAMKFLTLKEAIEINNSVPQGLSSSIFTRKPDAIFKWIGPHGSDCGIVNVNIPTNGAEIGGAFGGEKATGGGREAGSDSWKQYMRRATCTINYGSELPLAQGINFG

SEQ ID NO: 67649 - protein, 509 aa, Triticum aestivum
  peptide (1)..(509): Ceres Seq. ID no. 15170137
MASFARQEHQFLAELGLAPRNPGSFACGAWGGSGPVVTTTNPSNNEVIAEVVEASMDDYEKGMSACFDAAKTWMAVPAPKRGEIVRQIGDALRAKLHHLGRLLSLEMGKILPEGIGEVQEIIDMCDYAVGLSRQLNGSIIPSELPNHMMMEVWNPLGVVGVITAFNFPCAVLGWNACIALVCGNCVVWKGAPTTPLITIAMTKIVASVFEKNNLPSAIFTAFCGGAEIGQAIALDTRIPLVSFTGSTKVGQMVQQQVSARFGKCLLELSGNNAIIVMDDADIPLAVRSVLFAAVGTAGQRCTTCRRLLLHESIYQTFLDQLVEVYKQVRIGDPMEKGTLLGPLHTTTSKESFLKGIQTIKSQGGKILLGGSAIESEGNFVQPTIVEISPDAPVVREELFGPVLYAMKFLTLKEAIEINNSVPQGLSSSIFTRKPDAIFKWIGPHGSDCGIVNVNIPTNGAEIGGAFGGEKATGGGREAGSDSWKQYMRRATCTINYGSELPLAQGINFG

SEQ ID NO: 67650 - protein, 454 aa, Triticum aestivum
  peptide (1)..(454): Ceres Seq. ID no. 15170138
MDDYEKGMSACFDAAKTWMAVPAPKRGEIVRQIGDALRAKLHHLGRLLSLEMGKILPEGIGEVQEIIDMCDYAVGLSRQLNGSIIPSELPNHMMMEVWNPLGVVGVITAFNFPCAVLGWNACIALVCGNCVVWKGAPTTPLITIAMTKIVASVFEKNNLPSAIFTAFCGGAEIGQAIALDTRIPLVSFTGSTKVGQMVQQQVSARFGKCLLELSGNNAIIVMDDADIPLAVRSVLFAAVGTAGQRCTTCRRLLLHESIYQTFLDQLVEVYKQVRIGDPMEKGTLLGPLHTTTSKESFLKGIQTIKSQGGKILLGGSAIESEGNFVQPTIVEISPDAPVVREELFGPVLYAMKFLTLKEAIEINNSVPQGLSSSIFTRKPDAIFKWIGPHGSDCGIVNVNIPTNGAEIGGAFGGEKATGGGREAGSDSWKQYMRRATCTINYGSELPLAQGINFG

SEQ ID NO: 67651 - DNA, 1091 bp, Triticum aestivum
  misc_feature (1)..(1091): Ceres Seq. ID no. 12623011
agagtcgcaacgaaaccaaacaaaccacccgagtcgaccgcttcgagaagcctcgccaccaaggcacccagacccagacctcctcccgggaatcggaaccgcgtcccagccagccccaacccattcgtcgctcccctgatccatccggcgacgcggcggagcgaggaaccaaggctcgagcagcgggcgggcgggcggagaggagccggagagatggcggagaacccgcagctgttcgggaacgggatgcccgtgcccttccacggcgagatgttcgtcctcgcccgcgacggcgtcgagttccacgtcgacaagatcccctcggcgcccggcggtcacgcaaaaacaaagggcaccatatacctgtctaacataaggatggtgtttgtcgccgccaagcctgttgggaacttctttgcctttgatatgcccctgctgtacgtgcacggtgagaagttcaaccaaccgatatttcactgcaacaatatttctggattcgttgagccggttgttccagagagccagaacagggctctgtactcgacccacaccttcaagatcttgttcaaggaaggtggatgtggtacctttgtgccactcttcctgaacctgataacatcagtgcggcgctacaatcagtttgaagcccagcctgctactgtgccccgtgtggaccccatgcaggcagcgcaaactcctgtcgacgacatgatgcgccatgcgtatgtcgatccacatgatcctaccaagatcttcctccagcagcccgcaccggaatcccagctgaggaggagaaactaccacggccccgcggacaacgcgtactgatgctttggcctgattgcgaagtgcatgtgttttcgatgatctatgtggcgcacacgagcaatatatctgtttggtgtcattctggtgattctcactgaaggatgtgatggaagtatagtagtgtgatgatgatgtcagacaattgtgtgcttcactgttggattcaatccagatctaagtataataatgtacatacaaggtgatctgctggattgtatgttgctgatctcgtcgtatagagttaagaattggtctgaatgctg

SEQ ID NO: 67652 - protein, 275 aa, Triticum aestivum
  peptide (1)..(275): Ceres Seq. ID no. 12623012
RVATKPNKPPESTASRSLATKAPRPRPPPGNRNRVPASPNPFVAPLIHPATRRSEEPRLEQRAGGRRGAGEMAENPQLFGNGMPVPFHGEMFVLARDGVEFHVDKIPSAPGGHAKTKGTIYLSNIRMVFVAAKPVGNFFAFDMPLLYVHGEKFNQPIFHCNNISGFVEPVVPESQNRALYSTHTFKILFKEGGCGTFVPLFLNLITSVRRYNQFEAQPATVPRVDPMQAAQTPVDDMMRHAYVDPHDPTKIFLQQPAPESQLRRRNYHGPADNAY

SEQ ID NO: 67653 - protein, 204 aa, Triticum aestivum
  peptide (1)..(204): Ceres Seq. ID no. 12623013
MAENPQLFGNGMPVPFHGEMFVLARDGVEFHVDKIPSAPGGHAKTKGTIYLSNIRMVFVAAKPVGNFFAFDMPLLYVHGEKFNQPIFHCNNISGFVEPVVPESQNRALYSTHTFKILFKEGGCGTFVPLFLNLITSVRRYNQFEAQPATVPRVDPMQAAQTPVDDMMRHAYVDPHDPTKIFLQQPAPESQLRRRNYHGPADNAY

SEQ ID NO: 67654 - protein, 193 aa, Triticum aestivum
  peptide (1)..(193): Ceres Seq. ID no. 12623014
MPVPFHGEMFVLARDGVEFHVDKIPSAPGGHAKTKGTIYLSNIRMVFVAAKPVGNFFAFDMPLLYVHGEKFNQPIFHCNNISGFVEPVVPESQNRALYSTHTFKILFKEGGCGTFVPLFLNLITSVRRYNQFEAQPATVPRVDPMQAAQTPVDDMMRHAYVDPHDPTKIFLQQPAPESQLRRRNYHGPADNAY

SEQ ID NO: 67655 - DNA, 1100 bp, Triticum aestivum
  misc_feature (1)..(1100): Ceres Seq. ID no. 13660597
aatcaggcaatgttttgctagtggttctgtggaatattttctcctttgtcctaatcaaactcagctattaggtacttcacaggtctgttatcaccctggaaaggtatattgctatttggtccaccaggaacaggaaagacaatgctggcaaaagctgtggctaccgagtgcaaaacaacttttttcaacatttcagcctcatcaattgtcagcaaatggcgtggtgactcggagaaactagtaaaagtcttatttgagcttgcaaggcatcatgcaccatctaccattttccttgatgagattgatgctatcattagccaacgtggtgaagctcgtagtgaacatgaagccagtcggcgactgaagactgaactattaatacagatggatgggttgactaagacagatgagcttgtttttgttctggcggccacaaatttaccatgggaactagatgcagcaatgttacgccgattggaaaaacgtattcttgtgcccttaccagaggcagaagctaggcatgctatgtttgaagagttccttccatcgactccagacacaatgaagattccatatgatgttcttgtggagaacactgaaggatattccggctctgatatacgccttgtttgtaaggaggcagcaatgcaaccacttagacggttaatggcagttctagaaggcagacaagaagaaatgccagaggatgagttgcctgaagttggcccaatagcggcagaagatatcgaacttgccttgaggaatacacggccgtctgctcatctccatgcacatagatatgagaaattcaatcaagattatggcagccatgtcattggctaaaggtgagcagtgaaaacaaggcttttgaccgcccgccttaggtttgtctaagcatgcctagaacatctttttgcaggagcatgttgatatgacctcgtttgcaccctgtatggagctttagtattcgtcggcagaaaggataattaccatccatgtatttccagctcgtaagcattgcttgtgcataatatttattccatcatcatgtatattaccatttatatcacaagcaataagccctttgggcattcaagctc

SEQ ID NO: 67656 - protein, 233 aa, Triticum aestivum
  peptide (1)..(233): Ceres Seq. ID no. 15220043
MLAKAVATECKTTFFNISASSIVSKWRGDSEKLVKVLFELARHHAPSTIFLDEIDAIISQRGEARSEHEASRRLKTELLIQMDGLTKTDELVFVLAATNLPWELDAAMLRRLEKRILVPLPEAEARHAMFEEFLPSTPDTMKIPYDVLVENTEGYSGSDIRLVCKEAAMQPLRRLMAVLEGRQEEMPEDELPEVGPIAAEDIELALRNTRPSAHLHAHRYEKFNQDYGSHVIG

SEQ ID NO: 67657 - protein, 152 aa, Triticum aestivum
  peptide (1)..(152): Ceres Seq. ID no. 15220044
MDGLTKTDELVFVLAATNLPWELDAAMLRRLEKRILVPLPEAEARHAMFEEFLPSTPDTMKIPYDVLVENTEGYSGSDIRLVCKEAAMQPLRRLMAVLEGRQEEMPEDELPEVGPIAAEDIELALRNTRPSAHLHAHRYEKFNQDYGSHVIG

SEQ ID NO: 67658 - protein, 126 aa, Triticum aestivum
  peptide (1)..(126): Ceres Seq. ID no. 15220045
MLRRLEKRILVPLPEAEARHAMFEEFLPSTPDTMKIPYDVLVENTEGYSGSDIRLVCKEAAMQPLRRLMAVLEGRQEEMPEDELPEVGPIAAEDIELALRNTRPSAHLHAHRYEKFNQDYGSHVIG

SEQ ID NO: 67659 - DNA, 778 bp, Triticum aestivum
  misc_feature (1)..(778): Ceres Seq. ID no. 13660340
acacacactcactcaagccagcgccactcgcaccacagtcatccactcacaagctaagctagcggcgcagtagctcacttcagtccagtcggcatggcggctccgaggggcgcggcagtggtgctggcgatggtgctcgcggccatggtggtggcgccgccggcgacggtgcacgcggccatatcctgctccacggtgtacagcacgctgatgccgtgcctgcagtacgtgcagcagggcggttcgccggcccggggctgctgcaccggcatccagaacctgctggcggaggccaacaacagccccgaccgccgcaccatctgcggctgcctcaagaacgtcgccaacggcgcctccggcgggccctacatcacccgcgccgccgcgctcccctccaagtgcaacgtcgccctcccctacaagatcagccccagcgtcgactgcaactcgatccactgaacgaactgaagcgccttggcccgtgtgtcgacgtacgtctgccgtgcgaggagtcccatgtccggagaataaattgctgctactagtactgaagcttagctaggccttggcggccagatccgtgtcgttctacctagtcgtcgtgtgtggttttagggtcgatggatctgtgtgcatgcagtccatggtgttctggcctgggtgtcggtaggctccgcaagcagagcagagtggtgaactgatattgtgtgcgtcgtactatgcgcgtgcctatgtaatgtgcgtgctttatctataaactatccctcgttaagtatct

SEQ ID NO: 67660 - protein, 121 aa, Triticum aestivum
  peptide (1)..(121): Ceres Seq. ID no. 13660341
MAAPRGAAVVLAMVLAAMVVAPPATVHAAISCSTVYSTLMPCLQYVQQGGSPARGCCTGIQNLLAEANNSPDRRTICGCLKNVANGASGGPYITRAAALPSKCNVALPYKISPSVDCNSIH

SEQ ID NO: 67661 - protein, 109 aa, Triticum aestivum
  peptide (1)..(109): Ceres Seq. ID no. 13660342
MVLAAMVVAPPATVHAAISCSTVYSTLMPCLQYVQQGGSPARGCCTGIQNLLAEANNSPDRRTICGCLKNVANGASGGPYITRAAALPSKCNVALPYKISPSVDCNSIH

SEQ ID NO: 67662 - protein, 104 aa, Triticum aestivum
  peptide (1)..(104): Ceres Seq. ID no. 13660343
MVVAPPATVHAAISCSTVYSTLMPCLQYVQQGGSPARGCCTGIQNLLAEANNSPDRRTICGCLKNVANGASGGPYITRAAALPSKCNVALPYKISPSVDCNSIH

SEQ ID NO: 67663 - DNA, 1296 bp, Triticum aestivum
  misc_feature (1)..(1296): Ceres Seq. ID no. 13659759
gcatatctgcacacggtagcctactggtctcttcatccattgctgaggtgacaaagctagctgcattggattggagcgcaagaagatggagggggagacgaccaagaggctggccacgctggtgggctgcaactacgtgggcacgcgctacgagctccgcggctgcatcaacgacgtcgacgccgtgcgggacaccctcgtcgcccgcttcggcttcgcgccggccgacgtcgccgtgctcaccgacgggcgcggcgccgaggtgctcccgacgggagccaacatccggcgcgcgctggcggacatggtcgcccgcgccgctcccggggacgtgctcttcttccactacagcggccacggcacgctcgtcccgccgcaccacggcgactccggcgcggaggaggaagcgatcgtgccgaccgacttcaacctcatcacggacgtggacttccggcagctggtggaccgggtgccgccgggcgcgagcttcaccattgtgtccgactcgtgtcacagcggcggcctcatcgaccaggagaaggaacagatcgggccctccgtcggctccgaccccagcgcggggtccacggcgcccgcgcgcaccgcccggttccttccctacggcgcgatcctcgaccacctctccgccgtctcgggcatgccttcctcccaccacgtcgccgaccacctcgtggcgctcttcggcgccgatgccagcgccaagttccacgttcacggcggcagcggcaacggcagcaccccgtccaccacacccgcaccggcgccaacgccgccgcgcccggacgagggcatcctgctgagcgggtgccagacgaacgagacctcagcggacgtgccggcgtacgaggccagcggaggcaaggcatgcggggcgttcagtagcgcggtgcagagcgtgctggcggcgcaccctgcgccgctgagcaaccgggagctcgtggcgaaggccagggcggtgctggaagagcaggggttcgagcagcacccgtgtctctactgtaccgacgccaacgccgaggcacggttcctttcgcaggacaagaaggaggagacagcggtgggcgcggcaagcccggccatgtcggcggcgctgctgtagagcacgttcagctcacgagctacggagcgggcatgcgtttcatgtgtcgtgttttactgtttctgcgcacgtcgaattgaatgaggggccaaactcacgtgctatattgtttgtgtgtggatcaagtttataagtgtgtgtattatatatacacggatttgttatgactcacttgc

SEQ ID NO: 67664 - protein, 344 aa, Triticum aestivum
  peptide (1)..(344): Ceres Seq. ID no. 13659760
MEGETTKRLATLVGCNYVGTRYELRGCINDVDAVRDTLVARFGFAPADVAVLTDGRGAEVLPTGANIRRALADMVARAAPGDVLFFHYSGHGTLVPPHHGDSGAEEEAIVPTDFNLITDVDFRQLVDRVPPGASFTIVSDSCHSGGLIDQEKEQIGPSVGSDPSAGSTAPARTARFLPYGAILDHLSAVSGMPSSHHVADHLVALFGADASAKFHVHGGSGNGSTPSTTPAPAPTPPRPDEGILLSGCQTNETSADVPAYEASGGKACGAFSSAVQSVLAAHPAPLSNRELVAKARAVLEEQGFEQHPCLYCTDANAEARFLSQDKKEETAVGAASPAMSAALL

SEQ ID NO: 67665 - protein, 272 aa, Triticum aestivum
  peptide (1)..(272): Ceres Seq. ID no. 13659761
ISAHGSLLVSSSIAEVTKLAALDWSARRWRGRRPRGWPRWWAATTWARATSSAAASTTSTPCGTPSSPASASRRPTSPCSPTGAAPRCSRREPTSGARWRTWSPAPLPGTCSSSTTAATARSSRRTTATPARRRKRSCRPTSTSSRTWTSGSWWTGCRRARASPLCPTRVTAAASSTRRRNRSGPPSAPTPARGPRRPRAPPGSFPTARSSTTSPPSRACLPPTTSPTTSWRSSAPMPAPSSTFTAAAATAAPRPPHPHRRQRRRARTRASC

SEQ ID NO: 67666 - protein, 271 aa, Triticum aestivum
  peptide (1)..(271): Ceres Seq. ID no. 13659762
MVARAAPGDVLFFHYSGHGTLVPPHHGDSGAEEEAIVPTDFNLITDVDFRQLVDRVPPGASFTIVSDSCHSGGLIDQEKEQIGPSVGSDPSAGSTAPARTARFLPYGAILDHLSAVSGMPSSHHVADHLVALFGADASAKFHVHGGSGNGSTPSTTPAPAPTPPRPDEGILLSGCQTNETSADVPAYEASGGKACGAFSSAVQSVLAAHPAPLSNRELVAKARAVLEEQGFEQHPCLYCTDANAEARFLSQDKKEETAVGAASPAMSAALL

SEQ ID NO: 67667 - DNA, 1140 bp, Triticum aestivum
  misc_feature (1)..(1140): Ceres Seq. ID no. 14302860
accactcgaccagagtccacagtccacagtccatagtccgtccacagtgtactgaccaagtagtgctcagaattcagggagcccaccgccatggcttcccctaagcttctcctcctgctcgccaccctcctcccaagctgcggcctcctcctggcggacttcgccccgatgaccctcaccgtggtgaacaactgcgcgtacccgatttggccgggcatccaggggagcgccggcagcgaggtcctggaggggggcggcttcttcctcccgtcgctctcccaccgctccttcccggcgcccacccacgcctggtccggccgcatctgggcgcgcaccggctgcacgcctgcaggggccgggcagctccgctgcgccacgggcgactgcggcgggcggctccagtgcgggggcctcggcggcgcggcgcccgccacgctggcgcaggtctccctccaccacggcggcgacgaccagtcgtcgtacggggtgagcgtggtggacggcttcaacgtgggactgtcggttaccccgcacgagggccgcggcaactgccccgtcctcgcctgccgcaaggacctgacgcagagctgccccggcgagctgcaggtgcgcgcggcggcgggcggcggcgtggccgcgtgcaagagcggctgcctggccttcggcaccgacgagctgtgctgccgcaacgcgtacaacagcccggccgcctgccgcccctccaagtactcggacttcttcaagaacgagtgcccgcaggccttcacctacgcgcatgacagcccctcgctcacccaccagtgctccgcgccgcgcgagctcaaggtcatcttctgccactagactagaggtagtccagcggcgctcgcggtgccgccgccggccgtcagcagctatgtctgggtctgggatcgatgtggtgtagtgcgtgtcatctcatctgtcatgtgtgagtgttcgattaggctttggagactgccaggctgaccggagtgcttggtgtagttcgtgctctgtaggcgttcacctctcgtctagtagtatggtgttagctgctctgattccagtctgaaataacatgtttagatgggcattgatctgatcacatgtttcaatcacgccttttgtgcatttgagttc

SEQ ID NO: 67668 - protein, 250 aa, Triticum aestivum
  peptide (1)..(250): Ceres Seq. ID no. 14302861
MASPKLLLLLATLLPSCGLLLADFAPMTLTVVNNCAYPIWPGIQGSAGSEVLEGGGFFLPSLSHRSFPAPTHAWSGRIWARTGCTPAGAGQLRCATGDCGGRLQCGGLGGAAPATLAQVSLHHGGDDQSSYGVSVVDGFNVGLSVTPHEGRGNCPVLACRKDLTQSCPGELQVRAAAGGGVAACKSGCLAFGTDELCCRNAYNSPAACRPSKYSDFFKNECPQAFTYAHDSPSLTHQCSAPRELKVIFCH

SEQ ID NO: 67669 - protein, 224 aa, Triticum aestivum
  peptide (1)..(224): Ceres Seq. ID no. 14302862
MTLTVVNNCAYPIWPGIQGSAGSEVLEGGGFFLPSLSHRSFPAPTHAWSGRIWARTGCTPAGAGQLRCATGDCGGRLQCGGLGGAAPATLAQVSLHHGGDDQSSYGVSVVDGFNVGLSVTPHEGRGNCPVLACRKDLTQSCPGELQVRAAAGGGVAACKSGCLAFGTDELCCRNAYNSPAACRPSKYSDFFKNECPQAFTYAHDSPSLTHQCSAPRELKVIFCH

SEQ ID NO: 67670 - DNA, 858 bp, Triticum aestivum
  misc_feature (1)..(858): Ceres Seq. ID no. 13660855
atcctgtccgggagcacggagccgcttcgttatccgctggccgctgctgctgcttctctgcgagtgagcgagtgaggaaagaggacggcgacgatggccggcatggcggcgctgcagggcgccatgggggcgctctccgtctcggccgcgagcaccagcgcattctggggcaacccgctcgccgccaccttctccgccgcgccgtctggggtcagattcatggccaagacaagcccaattgaaatgaggcttaagcgatgggaacggaagaagtgtaagccaaacagtcttcctatgctgcacaagatgcatgttagggtcggcgacacggtgcaggtcatcgcaggccgtgagaaaggtaaagttggggaagtcgtacggctttataagcacaacagcactgtgatagtgaaggatctgaacttgaagtcaaagcacaagaaaggcactgaggatgaaccgggtgaaattgtcatgattgaaggccccattcatagctcgaacatgatgctctactcaaaggagaagaacgtgacgagtagggttgggcacaaaatcctcgaggatggcaccaaggtccgctacctgaagaagaccggtgaagtaatcgacagcgttgacaactgggtgaaggtgttcaaggaaggagattctgagtcatcatcgtagtatggaaatgctgcgcatgctctcaaccttagctgcgcttattgctgcccaaacgcttactcggctggtgccactgcttgtactgtcagtttttttctagcttcagagcctcttttgtaaattactactactactacaaagttgtcaccatttttgcaacgcttggtccaacaagaaggccttcgtttt

SEQ ID NO: 67671 - protein, 191 aa, Triticum aestivum; identical to SEQ ID NO: 51758
  peptide (1)..(191): Ceres Seq. ID no. 13660856

SEQ ID NO: 67672 - protein, 188 aa, Triticum aestivum; identical to SEQ ID NO: 51759
  peptide (1)..(188): Ceres Seq. ID no. 13660857

SEQ ID NO: 67673 - protein, 181 aa, Triticum aestivum; identical to SEQ ID NO: 51760
  peptide (1)..(181): Ceres Seq. ID no. 13660858

SEQ ID NO: 67674 - DNA, 1568 bp, Triticum aestivum
  misc_feature (1)..(1568): Ceres Seq. ID no. 14303531
aatataatttcgtaatcgccgaccgttgcctctcctccccccttccccgctccaccctgcccagccaacggctaccgtctccacgagagaaaagggggagatggcggcggagagccctagatccgcgccacggcggacaccggccgccaagagcggcgcgggcctgctcagcccccggttccgctcggcggcggagctggccggctgggacgaggagtccatcctcctcgctgcgctcgtcgtcgaggacaccccggtccgcgagtcccgccgcaagaggcggccctccggctcctccaccgcgggcggcagcgccggatctaacaccaggaagcggaggtcgcggaggcagtcggcggatgaggcaccgataccgcccgtggcgcttgtgctcgacgacgacgagaagccgaatgacaatgaagttgccaagaaggaggtgaagcaggcggaggaggagaaggagaaggtttctgtcgtggagggaaaggagaagtccggatctaccaaggaaggagaagcagcggcgaccggcgagctgccgtgcatggatcggctaagggaggagctatcttgcgctatttgcttggatgtctgctttcagccaagtaccacgccttgtggtcacagcttttgcatgcaatgcttaaaacatgccgcctctaagtgtggaaagcggtgcccaaaatgccgtcagttaatcagtaattcaagatcttgcactatcaacacagtactttggaacaccatccaactcctatttcctagcgaagttgaggcgaggaagagctccatggcctcatcctcagcaagcaaggacgatgtgaagcaaagcctgccaagaagcaacaactatacacaagttggcattaggaacaccagtggcagtagcagcttcaccacacaggactacactagaataggcaacagcaccaggagctccttagcagcagacggcagaagaagtatgccggtcccaggaaccatgaacaccagcagtgggagctttgacacacagggtaggagcacaagaagcagagacagtggcagaggctttgtccgggcgtcagagttggttggcaccaggagttcagcgcggtcaggccaatctgacgacgcttcacttgcatacaggttgcagcaggaggagttcatgacggctttcgataatgatgggggagagaggcagccacagaacaccatatctactgcccgagcaaatttgagagctatggcttcccgggccgagagggcagttctccttcgtgctcgtggctggcctctttagttttgactgattttcagtttcccagtacctgaatctttctctggaagaatgtagcataagtaccatggtgtgatcaatcacttgtattgtgtgaaagtaaaacgatgacaagccagccatatgtgtttcctgtaatacacacaaatttagattgctttactagataatggtcgtatagccctgcattttctctagctggattaaggaatttctcgatccggtagttagatcaaagaactcttttacatttttggaattataaaggaagctatttttttgg

SEQ ID NO: 67675 - protein, 395 aa, Triticum aestivum
  peptide (1)..(395): Ceres Seq. ID no. 14303532
MAAESPRSAPRRTPAAKSGAGLLSPRFRSAAELAGWDEESILLAALVVEDTPVRESRRKRRPSGSSTAGGSAGSNTRKRRSRRQSADEAPIPPVALVLDDDEKPNDNEVAKKEVKQAEEEKEKVSVVEGKEKSGSTKEGEAAATGELPCMDRLREELSCAICLDVCFQPSTTPCGHSFCMQCLKHAASKCGKRCPKCRQLISNSRSCTINTVLWNTIQLLFPSEVEARKSSMASSSASKDDVKQSLPRSNNYTQVGIRNTSGSSSFTTQDYTRIGNSTRSSLAADGRRSMPVPGTMNTSSGSFDTQGRSTRSRDSGRGFVRASELVGTRSSARSGQSDDASLAYRLQQEEFMTAFDNDGGERQPQNTISTARANLRAMASRAERAVLLRARGWPL

SEQ ID NO: 67676 - protein, 246 aa, Triticum aestivum
  peptide (1)..(246): Ceres Seq. ID no. 14303533
MDRLREELSCAICLDVCFQPSTTPCGHSFCMQCLKHAASKCGKRCPKCRQLISNSRSCTINTVLWNTIQLLFPSEVEARKSSMASSSASKDDVKQSLPRSNNYTQVGIRNTSGSSSFTTQDYTRIGNSTRSSLAADGRRSMPVPGTMNTSSGSFDTQGRSTRSRDSGRGFVRASELVGTRSSARSGQSDDASLAYRLQQEEFMTAFDNDGGERQPQNTISTARANLRAMASRAERAVLLRARGWPL

SEQ ID NO: 67677 - protein, 216 aa, Triticum aestivum
  peptide (1)..(216): Ceres Seq. ID no. 14303534
MQCLKHAASKCGKRCPKCRQLISNSRSCTINTVLWNTIQLLFPSEVEARKSSMASSSASKDDVKQSLPRSNNYTQVGIRNTSGSSSFTTQDYTRIGNSTRSSLAADGRRSMPVPGTMNTSSGSFDTQGRSTRSRDSGRGFVRASELVGTRSSARSGQSDDASLAYRLQQEEFMTAFDNDGGERQPQNTISTARANLRAMASRAERAVLLRARGWPL

SEQ ID NO: 67678 - DNA, 1450 bp, Triticum aestivum
  misc_feature (1)..(1450): Ceres Seq. ID no. 13660685
gctgaccggacgaattgccccgtcgtctcttggtagcgacgggcatccaacaagaccgaccgaatcgcgatggagacctgggtccgcgccgccgtggaggccatccactcgtctcgagcccaagccgtcatctatctcgccggcggcgcctcccaggcgctcggttggctcctgtccgtgcccggcgcttctggcagcgtcctcgaggtcgtcgtgccctactccagggcctccatggcgcagctgctcggcaagttgcccctgcaattcacaagcaagcaggccgcggaggacatggcactggccgcgttcaaccgtgccctgaagctttctgggccaggtctacaagtaatgggtgttggatttactgggtcactcgctagcgcacgcccaaaacatggtgaccacaggttttatgtgtcaacgcgcacgcaaaattgcctcaggmcatcacatgtaacattgtcgaagggtttacggagcagagaggaagaagacaaggtctcaagctgttttgtgcttaaggcaatcgcagatgcatgcagaatttctgcaaccattcagtcagacgttcaagaacctgaaattccaaaagaaagtgtggaacaatttgatgaagaccaagagctccagcaagttattgatggtcaagtctgcatgaaagtttaccactttgctgatccaacggaaaagaacttcgacaggaaactaattctacctggttcattcaatcccttgcatgatggccaccttaggttgttagaagttgcatcaagcatgtgtgatgatgggtttccgtgctttgagatatcagcaataaatgcggacaaaccccccctgtctattgcagaaattaagcgccgtgtcgagcaattcagaaaagcagggaagaatgtgatcatatctaaccaaccgtacttttataagaaagcagaacttttcccaggcagtgcttttataattggtgcagacactgcagctaggcttgtaaatcctaagtattatggaggtgactacaacagaatgctggagattcttcttgaatgtaaaagcactggcacaacatttctggttggtggtcgagagattgaaggagtattcaaggtccttgaagaattaaatattccaacagagttgaaggacatgtttatctctataccagaggagaagttccgcatagacatttcatctactgaattaagaaaaaaacaagggctctgatgtctcgaacacttggtcctatcctacaccagattcaagatgtttttctcttgggcgaagctttgcaaatagtcatggcagtgtttgatttcgtagttttgccatgcaaataataactgttatgtttgtattagtaaaggcaaaaacacattccattagtactacagatgtcagaaggcgatggtggccctgttatttttttcttgaaacgccatgtaatctttctgtt

SEQ ID NO: 67679 - protein, 383 aa, Triticum aestivum
  peptide (1)..(383): Ceres Seq. ID no. 15220049
  misc_feature (127)..(127): Xaa is any aa, unknown or other
METWVRAAVEAIHSSRAQAVIYLAGGASQALGWLLSVPGASGSVLEVVVPYSRASMAQLLGKLPLQFTSKQAAEDMALAAFNRALKLSGPGLQVMGVGFTGSLASARPKHGDHRFYVSTRTQNCLRXSHVTLSKGLRSREEEDKVSSCFVLKAIADACRISATIQSDVQEPEIPKESVEQFDEDQELQQVIDGQVCMKVYHFADPTEKNFDRKLILPGSFNPLHDGHLRLLEVASSMCDDGFPCFEISAINADKPPLSIAEIKRRVEQFRKAGKNVIISNQPYFYKKAELFPGSAFIIGADTAARLVNPKYYGGDYNRMLEILLECKSTGTTFLVGGREIEGVFKVLEELNIPTELKDMFISIPEEKFRIDISSTELRKKQGL

SEQ ID NO: 67680 - protein, 328 aa, Triticum aestivum
  peptide (1)..(328): Ceres Seq. ID no. 15220050
  misc_feature (72)..(72): Xaa is any aa, unknown or other
MAQLLGKLPLQFTSKQAAEDMALAAFNRALKLSGPGLQVMGVGFTGSLASARPKHGDHRFYVSTRTQNCLRXSHVTLSKGLRSREEEDKVSSCFVLKAIADACRISATIQSDVQEPEIPKESVEQFDEDQELQQVIDGQVCMKVYHFADPTEKNFDRKLILPGSFNPLHDGHLRLLEVASSMCDDGFPCFEISAINADKPPLSIAEIKRRVEQFRKAGKNVIISNQPYFYKKAELFPGSAFIIGADTAARLVNPKYYGGDYNRMLEILLECKSTGTTFLVGGREIEGVFKVLEELNIPTELKDMFISIPEEKFRIDISSTELRKKQGL

SEQ ID NO: 67681 - protein, 308 aa, Triticum aestivum
  peptide (1)..(308): Ceres Seq. ID no. 15220051
  misc_feature (52)..(52): Xaa is any aa, unknown or other
MALAAFNRALKLSGPGLQVMGVGFTGSLASARPKHGDHRFYVSTRTQNCLRXSHVTLSKGLRSREEEDKVSSCFVLKAIADACRISATIQSDVQEPEIPKESVEQFDEDQELQQVIDGQVCMKVYHFADPTEKNFDRKLILPGSFNPLHDGHLRLLEVASSMCDDGFPCFEISAINADKPPLSIAEIKRRVEQFRKAGKNVIISNQPYFYKKAELFPGSAFIIGADTAARLVNPKYYGGDYNRMLEILLECKSTGTTFLVGGREIEGVFKVLEELNIPTELKDMFISIPEEKFRIDISSTELRKKQGL

SEQ ID NO: 67682 - DNA, 911 bp, Triticum aestivum
  misc_feature (1)..(911): Ceres Seq. ID no. 12621905
cttccccgtgagctcgtgcgcctcgcagtcgtcgtgtggtagtcgcttcccccggctggactccttcctccgtgtccgtcgccttcgcctccccagatccggtccctatggcgaggaatccgggctgcgccgtctacataggtaacttggatgaaaaggtctcggagagggttttgtatgagattcttattcagatctctgggcaagacaaggcctcttcaaatgtcaatgttcctgtaacacctaaaatgaacccactaccaaatccacctcaaccaatgagatttggtgatactcctgtgtcacaacatagagtggtaaatggtaggattgcaggctatggtgtttctccaaatcattcttatgatttccattcccaagcatcaagtggggtagcaagtagaggattaagtgatggtacatatgattatagtagacgtgtatttggttctgttctgaatgatgttagccgtcgagctgacagacaaccagttccatacccgtcctactagcatactgagctccaatgaatgaaacatcggccagtgcagccattgttgtctcagcccttccgtagggtcatctgggtacttgccattacatccatgtaaatatggcttatggtagtgaatgtgcgtgtctgtctggttgttctgttgttttctgcatggtatggaggcctgtcgctgatggttaggttccatgccttatcttcctgataggatattgcccccactaatgttgctgtagtactttccctagtcatagggatggggttaccgtattctcagttcaaaatatgtgaactagtatgttatttgttgtttgtcatgtgagttggatctgtattatgttgggacatgaatgggtaaaaaaccctacaaatctgccatctgtctttaaacttatcc

SEQ ID NO: 67683 - protein, 134 aa, Triticum aestivum
  peptide (1)..(134): Ceres Seq. ID no. 12621906
MARNPGCAVYIGNLDEKVSERVLYEILIQISGQDKASSNVNVPVTPKMNPLPNPPQPMRFGDTPVSQHRVVNGRIAGYGVSPNHSYDFHSQASSGVASRGLSDGTYDYSRRVFGSVLNDVSRRADRQPVPYPSY

SEQ ID NO: 67684 - protein, 87 aa, Triticum aestivum
  peptide (1)..(87): Ceres Seq. ID no. 12621907
MNPLPNPPQPMRFGDTPVSQHRVVNGRIAGYGVSPNHSYDFHSQASSGVASRGLSDGTYDYSRRVFGSVLNDVSRRADRQPVPYPSY

SEQ ID NO: 67685 - protein, 77 aa, Triticum aestivum
  peptide (1)..(77): Ceres Seq. ID no. 12621908
MRFGDTPVSQHRVVNGRIAGYGVSPNHSYDFHSQASSGVASRGLSDGTYDYSRRVFGSVLNDVSRRADRQPVPYPSY

SEQ ID NO: 67686 - DNA, 1962 bp, Triticum aestivum
  misc_feature (1)..(1962): Ceres Seq. ID no. 13664013
catagcttcattccgtctcgatctctgccttctcctgagagactcgtatcagtcggctgcccaccatcgccggtccaagaagccgcctgctcgtcggctactccgccgccccactcgcccatccacccacctcccttccccggattcaggaccggatcggccttcccctctgtagatggacatcacaatcaattccttgacgtacaaaggttcgattccagatgcaattaatcaatcaagaagggagaaaaaactctttgtaatttacatatcaggtcaagatgaaacctcaagtagtttggaacagtctacattggttgatgaacatgtggctgcagtgataagcagatgttgcatattcttgcaactaaaacaaggcaatgttgacgcgcttcaattttcagctatctatccacagaagtctgtcccaagtatatctgtcgttggactgaatggtgctatgctatggaatcatgaggggtatattagcccagaagagcttaaggaaagcattgataaagcttgggctgcacttcaactgcaggagacagcggcaaccctgttagctgcatcacttgcttcaagaatgtctgaacctgcgaatactgcttcgacaactatgcctggtgaagatggttcatctacttcagaaaatcattccaattcatcaggtcaatcctcagagtcttctgcagtccgtgggtttgctaattctactgctttggtagcacaaccacctagtagcacaagccatgctgaacttctcaagacaagtaaaatcccaaaatcagattcagctccatgcaacataaccgctgaggaaaagctagattcagcatgtcaggctctgttgccagattttccagcaagctcaaatgtggacagttccacagatccaaatcagacaggcagtacaccttcgccaaaaaggaagaatatggtggatgggaatagccctaaagttccctccaagccagcttctagcataccaactaggagtactccacagttgcctgtggaacaagataaggcaactactagcagagctattgaagtgaccacagattctgcaaagacagatgatattcagctggccattcgtatgcctgatggacctagtctgcagattaaactgacaaaagaagatgttttaaggaaggtgaagacttttgtggatgaaaaccaagatagtgggattggatcatataatcttgcaatgctttatcctagaaaagtgttcacggaacaagatctggaaaccacattgtatgagctgggtattgaaacccgccaggcccttgttgtcgttccgaatcgtcaatctgttaaagtggtaaggcaccaatcgtcattgccatccagtgatctggatcgcactggggctacagacaggtcgggtggttggggttttctgggggcagcgttatcatacgtgaatccattgtcctacttgagaggaaatcccaccccatcaaatcctgatcgactgggaaatgaaggctcgcagcagtacagaccgaactctgaatcccaacctcttcgtagtgatggaagtcaacaaacagctactcatagctctggaaataccttgagaaggcggccccgacagttcggtggcaacattcacactctaagcagtgaagaacaagatccatctgataatagaaatgtcttctggaatgggaattctacagagtttggaggtgatgaaaagaaataggggatgaccggactgcatcgaagttagatgatacttgaaccatttaatggggaaataaatatgttgggaacgaactgaggtgttaaactacagtgcttatacatatgtttggaacaaattgaggtgttaaattacagtgcttatacataacaagtaatatggcacgtgcaaccctagaatttactttgttcaccccaggaatgacctttgttatttccgtacgagcatatataatttgatgt

SEQ ID NO: 67687 - protein, 514 aa, Triticum aestivum
  peptide (1)..(514): Ceres Seq. ID no. 13664014
MDITINSLTYKGSIPDAINQSRREKKLFVIYISGQDETSSSLEQSTLVDEHVAAVISRCCIFLQLKQGNVDALQFSAIYPQKSVPSISVVGLNGAMLWNHEGYISPEELKESIDKAWAALQLQETAATLLAASLASRMSEPANTASTTMPGEDGSSTSENHSNSSGQSSESSAVRGFANSTALVAQPPSSTSHAELLKTSKIPKSDSAPCNITAEEKLDSACQALLPDFPASSNVDSSTDPNQTGSTPSPKRKNMVDGNSPKVPSKPASSIPTRSTPQLPVEQDKATTSRAIEVTTDSAKTDDIQLAIRMPDGPSLQIKLTKEDVLRKVKTFVDENQDSGIGSYNLAMLYPRKVFTEQDLETTLYELGIETRQALVVVPNRQSVKVVRHQSSLPSSDLDRTGATDRSGGWGFLGAALSYVNPLSYLRGNPTPSNPDRLGNEGSQQYRPNSESQPLRSDGSQQTATHSSGNTLRRRPRQFGGNIHTLSSEEQDPSDNRNVFWNGNSTEFGGDEKK

SEQ ID NO: 67688 - protein, 419 aa, Triticum aestivum
  peptide (1)..(419): Ceres Seq. ID no. 13664015
MLWNHEGYISPEELKESIDKAWAALQLQETAATLLAASLASRMSEPANTASTTMPGEDGSSTSENHSNSSGQSSESSAVRGFANSTALVAQPPSSTSHAELLKTSKIPKSDSAPCNITAEEKLDSACQALLPDFPASSNVDSSTDPNQTGSTPSPKRKNMVDGNSPKVPSKPASSIPTRSTPQLPVEQDKATTSRAIEVTTDSAKTDDIQLAIRMPDGPSLQIKLTKEDVLRKVKTFVDENQDSGIGSYNLAMLYPRKVFTEQDLETTLYELGIETRQALVVVPNRQSVKVVRHQSSLPSSDLDRTGATDRSGGWGFLGAALSYVNPLSYLRGNPTPSNPDRLGNEGSQQYRPNSESQPLRSDGSQQTATHSSGNTLRRRPRQFGGNIHTLSSEEQDPSDNRNVFWNGNSTEFGGDEKK

SEQ ID NO: 67689 - protein, 377 aa, Triticum aestivum
  peptide (1)..(377): Ceres Seq. ID no. 13664016
MSEPANTASTTMPGEDGSSTSENHSNSSGQSSESSAVRGFANSTALVAQPPSSTSHAELLKTSKIPKSDSAPCNITAEEKLDSACQALLPDFPASSNVDSSTDPNQTGSTPSPKRKNMVDGNSPKVPSKPASSIPTRSTPQLPVEQDKATTSRAIEVTTDSAKTDDIQLAIRMPDGPSLQIKLTKEDVLRKVKTFVDENQDSGIGSYNLAMLYPRKVFTEQDLETTLYELGIETRQALVVVPNRQSVKVVRHQSSLPSSDLDRTGATDRSGGWGFLGAALSYVNPLSYLRGNPTPSNPDRLGNEGSQQYRPNSESQPLRSDGSQQTATHSSGNTLRRRPRQFGGNIHTLSSEEQDPSDNRNVFWNGNSTEFGGDEKK

SEQ ID NO: 67690 - DNA, 1542 bp, Triticum aestivum
  misc_feature (1)..(1542): Ceres Seq. ID no. 12613390
ccaaacaaacgccaccgtcttccccacctctcccgtccccggtccggtccaccaaccgcctccaggccgcaaccatgcacggccgccgccatctggcggcctccctggcgagagccctgtcccaggccccctcccgctccatctcctccaccccgtccctcctccaaaccctcgacccgaccccgcagtcccctcccctcgccgcgcccgcggcggggcggctcgcggagatgcggaggcggctgcaggcggagacgccgtcgctgggggacttcgcgtactcggtggaggtggggacgcggaagaagccgctgcccaagcccaagtggatgaaggagacgatccccggcggggccaagtacgcggccatcaaggccaagctgcgggagctgaagctgcacactgtctgcgaggaggcgcgctgccccaacctcggcgagtgctggtcgggcggcgagaccggcaccgccactgccaccatcatgatcctcggtgacacctgcacgcgtggatgcagattttgcaatgtcaagacatcacgaacccctcctccaccagatcctaatgagcctgccaatgttgcgcaagctattgcatcgtggggccttgaatatatagtcatcacaagtgtggaccgggatgatttacctgatcaggggagcggccattttgctgaaacagtacagaggttgaagactttaaagccagatatgcttattgaagcgcttgttcctgatttccaaggagatcgaagttgtgtagaaaaggtagcaacttccgggttgcatgtttttgcacacaatattgaaacggtggaagagcttcaaagaagtgtgcgagaccaccgtgcaaattttaagcaatcaatggatgttctgaaaatggcgaaggagtatgcccctcctggcaccctcacaaagacatcagtcatgctgggttgtggggagactcccgatcaggttatcagcacaatggaaaaggtgcgagctgctggtgttgatgtcattacatttggtcagtacatgaggccgtcaaagcgacatatgccagtgtctgagtatattacacctgaagccttcgagaactaccgcgcccttggtgttgaaatgggatttcgttatgttgcatctggtccgatggttcggtcctcctacaaagcaggcgaattctacatcaaagccatgatcgaagatgaccgagcaaaatcaggtgctgttgcagaatcaagttcatagttgacacacctccagtcattgacatggctacgctgcaaataagatgttctaattggagaaacatgtttgtctttttacatcttggtaaaactgatattctttttgagagaataaattcttctgcctcttcacttcaaaaaattatttacatttcttcatactatctcctcctttgtactactatacgtggctataatcatccattgtaagttgtaacagtagcagggatagagtccgtcaatgtaccccaccgaatattattgaggccattattgtgcctcatgtgatgtgcttgtacagagttttg

SEQ ID NO: 67691 - protein, 410 aa, Triticum aestivum
  peptide (1)..(410): Ceres Seq. ID no. 12613391
KQTPPSSPPLPSPVRSTNRLQAATMHGRRHLAASLARALSQAPSRSISSTPSLLQTLDPTPQSPPLAAPAAGRLAEMRRRLQAETPSLGDFAYSVEVGTRKKPLPKPKWMKETIPGGAKYAAIKAKLRELKLHTVCEEARCPNLGECWSGGETGTATATIMILGDTCTRGCRFCNVKTSRTPPPPDPNEPANVAQAIASWGLEYIVITSVDRDDLPDQGSGHFAETVQRLKTLKPDMLIEALVPDFQGDRSCVEKVATSGLHVFAHNIETVEELQRSVRDHRANFKQSMDVLKMAKEYAPPGTLTKTSVMLGCGETPDQVISTMEKVRAAGVDVITFGQYMRPSKRHMPVSEYITPEAFENYRALGVEMGFRYVASGPMVRSSYKAGEFYIKAMIEDDRAKSGAVAESSS

SEQ ID NO: 67692 - protein, 386 aa, Triticum aestivum
  peptide (1)..(386): Ceres Seq. ID no. 12613392
MHGRRHLAASLARALSQAPSRSISSTPSLLQTLDPTPQSPPLAAPAAGRLAEMRRRLQAETPSLGDFAYSVEVGTRKKPLPKPKWMKETIPGGAKYAAIKAKLRELKLHTVCEEARCPNLGECWSGGETGTATATIMILGDTCTRGCRFCNVKTSRTPPPPDPNEPANVAQAIASWGLEYIVITSVDRDDLPDQGSGHFAETVQRLKTLKPDMLIEALVPDFQGDRSCVEKVATSGLHVFAHNIETVEELQRSVRDHRANFKQSMDVLKMAKEYAPPGTLTKTSVMLGCGETPDQVISTMEKVRAAGVDVITFGQYMRPSKRHMPVSEYITPEAFENYRALGVEMGFRYVASGPMVRSSYKAGEFYIKAMIEDDRAKSGAVAESSS

SEQ ID NO: 67693 - protein, 334 aa, Triticum aestivum
  peptide (1)..(334): Ceres Seq. ID no. 12613393
MRRRLQAETPSLGDFAYSVEVGTRKKPLPKPKWMKETIPGGAKYAAIKAKLRELKLHTVCEEARCPNLGECWSGGETGTATATIMILGDTCTRGCRFCNVKTSRTPPPPDPNEPANVAQAIASWGLEYIVITSVDRDDLPDQGSGHFAETVQRLKTLKPDMLIEALVPDFQGDRSCVEKVATSGLHVFAHNIETVEELQRSVRDHRANFKQSMDVLKMAKEYAPPGTLTKTSVMLGCGETPDQVISTMEKVRAAGVDVITFGQYMRPSKRHMPVSEYITPEAFENYRALGVEMGFRYVASGPMVRSSYKAGEFYIKAMIEDDRAKSGAVAESSS

SEQ ID NO: 67694 - DNA, 1048 bp, Triticum aestivum
  misc_feature (1)..(1048): Ceres Seq. ID no. 12587797
ggatgctggagccaccgctccaaaacacacagaaacacacacacagcttcttgctttctcaaacactgatcttgcagcttcagcgtcgtccaccgtcggaaagaaggcatggcgggcgcatcctcgtggtcgtcgtcctgctcatgcacgtcgtcgctcggctccttggatgacgacgacgtggtctgcgtggtgaaaccgggttcccccggggcggcagagggcagcgtcaagttcctgtgcagctacgggggtatgatccttccacgccaccccgacgccgccctccgttacgtcggcggcaacaaccgcgtcctctccgtcgaccgctccctccaattttacgagctgcaacggaagctgatggacatgtgcggatgcgaggcgatgagcctgcggtgccagctgccgacggaggacctggacgcgctcgtctccgtcacgaccaacgacgacctcggccacctgctggaggagtacgacgccgctagcagggaccggctccagccgctcaagataagggcgttcctgttcccaaggtccaaaacgccgcctctctcgccgtccaccccgtcgtccaggccaacaccggcgtacgtccgccaccagcaccacacggctcgcccccctccggctcgtgtgcattcgggccaccggcgcccacaccagctcctgctcctccacaacggcagtcggttgcaataacagcgggattagcagccgcgtgctggtgtattagcttggcagtcgtgagatcgtccatggggcgctgtgccgctgtcacagatttgtaagccctgctttgcatgtttcataacatatactccctccgttcccaaatatttgtctttctaggcatttcaaatgaaaacaacatatgaatgtatgtagacatattttagagtgtagattcacttattttgctccgtatgtagtcacttgttgaaatctctagaaagacaaatattttaaaacggagggagtacatactactgtagtaacagacttattagcttggcttattttaaataagattcagagtctgtcc

SEQ ID NO: 67695 - protein, 198 aa, Triticum aestivum
  peptide (1)..(198): Ceres Seq. ID no. 12587798
MAGASSWSSSCSCTSSLGSLDDDDVVCVVKPGSPGAAEGSVKFLCSYGGMILPRHPDAALRYVGGNNRVLSVDRSLQFYELQRKLMDMCGCEAMSLRCQLPTEDLDALVSVTTNDDLGHLLEEYDAASRDRLQPLKIRAFLFPRSKTPPLSPSTPSSRPTPAYVRHQHHTARPPPARVHSGHRRPHQLLLLHNGSRLQ

SEQ ID NO: 67696 - protein, 149 aa, Triticum aestivum
  peptide (1)..(149): Ceres Seq. ID no. 12587799
MILPRHPDAALRYVGGNNRVLSVDRSLQFYELQRKLMDMCGCEAMSLRCQLPTEDLDALVSVTTNDDLGHLLEEYDAASRDRLQPLKIRAFLFPRSKTPPLSPSTPSSRPTPAYVRHQHHTARPPPARVHSGHRRPHQLLLLHNGSRLQ

SEQ ID NO: 67697 - protein, 113 aa, Triticum aestivum
  peptide (1)..(113): Ceres Seq. ID no. 12587800
MDMCGCEAMSLRCQLPTEDLDALVSVTTNDDLGHLLEEYDAASRDRLQPLKIRAFLFPRSKTPPLSPSTPSSRPTPAYVRHQHHTARPPPARVHSGHRRPHQLLLLHNGSRLQ

SEQ ID NO: 67698 - DNA, 1674 bp, Triticum aestivum
  misc_feature (1)..(1674): Ceres Seq. ID no. 12779098
atttaagagcctcgctagtcctttcatcatcaaaccccacacacgcacacgcgcgcgcgcacacacacacaaaaaaaaagcagagagggaggagatggccggagacgggcgtcgcgtggtggtcttccccttcccgttccacggccacgccacccccctcctccgcctcgccagcgttctccacacccgcggcttcgcggtgaccatcttccacaccgagctccgggcgcccgacccggccgagtaccccgcggactaccgcttcgtgcccctgcgcgtggacgtgcccccggagctgatggcgtccgaggacatcgcggggatggtcacggccatgagcgagtactccgaggcgcccttcaaggaacgcctgaccgcggcgctcgccgaggaaggcgccggtgtccggtgcgtcatcgccgacgtcgcctggtacaaggccctgtcggtgtccagcgccctcggcgtgccggcgatgggcgtcatgacggccagcgccgccaactaccgggtctacatggcgtacccgatgttgattgagaagggctacctgcctgtacaagaggcgcgcagggaggatctggtccaggagctgccgccgtaccgtgtgaaagatctgctacggctcgaggcatccagcctccagggcttcgccgacctgctccggaacaccatcgaggcaccgcgccagtccgcaggcctcatattcaacaccttgagggccattgaggccgacgacctggacacgatccgccaggaggagtccctcccggtcttcgccctcgcccctctccacaagctggcgccgccgggcaacaccagcagcagcctgtacggcgagacgcaggcggaccgcgagtgcctcgattggctcgacacgcaggaaccaggcagtgtggtgtacgtgagcttcgggagcctggccgccatggacccgcacgagttcgtggagctggcgtgggggctcgccgccagcaagcggccgttcctctgggtcgtcaggcccacgctcatccgcggctacgagtccggccagctgcccgacgggctcgacgagcagatccgtgatcatggcaggctcgtcagctgggcaccgcaggtggaggtgctcgcccaccctgcggtaggcgccttcatcacgcacagcggctggaactccacggtggaagccgtgtcggagggcgtgccgatgatatgcctcccgttgcacggagaccagttcagcaacgccaggtacgtgtgcgatgtctggaaggtgggagtggagatcgaggcgtcgtcggcggctgggcagaacctggagagagggaagatcaaggctgccatcgacaagattgtgcacgacaaagggattagagagaggatggatgccttcaaattagctgcagatgaagcagttaactcccaaactgaggtgaaagctttggttgatctcataaactcgttttaattaattcagagccttccacttcatatacctcacttaattatgtaatcatcatccatctttggcgatcgacctactgtactgctactccaccctctgtaataagtattcgatttccataccccttttcttttaatgtctccaactgtgatgattgattccaaatgtgatgatttctccaaatgtgatggttgattcgaataaagaaaagcttattttccaagtgt

SEQ ID NO: 67699 - protein, 482 aa, Triticum aestivum
  peptide (1)..(482): Ceres Seq. ID no. 12779099
FKSLASPFIIKPHTRTRARAHTHKKKAEREEMAGDGRRVVVFPFPFHGHATPLLRLASVLHTRGFAVTIFHTELRAPDPAEYPADYRFVPLRVDVPPELMASEDIAGMVTAMSEYSEAPFKERLTAALAEEGAGVRCVIADVAWYKALSVSSALGVPAMGVMTASAANYRVYMAYPMLIEKGYLPVQEARREDLVQELPPYRVKDLLRLEASSLQGFADLLRNTIEAPRQSAGLIFNTLRAIEADDLDTIRQEESLPVFALAPLHKLAPPGNTSSSLYGETQADRECLDWLDTQEPGSVVYVSFGSLAAMDPHEFVELAWGLAASKRPFLWVVRPTLIRGYESGQLPDGLDEQIRDHGRLVSWAPQVEVLAHPAVGAFITHSGWNSTVEAVSEGVPMICLPLHGDQFSNARYVCDVWKVGVEIEASSAAGQNLERGKIKAAIDKIVHDKGIRERMDAFKLAADEAVNSQTEVKALVDLINSF

SEQ ID NO: 67700 - protein, 451 aa, Triticum aestivum
  peptide (1)..(451): Ceres Seq. ID no. 12779100
MAGDGRRVVVFPFPFHGHATPLLRLASVLHTRGFAVTIFHTELRAPDPAEYPADYRFVPLRVDVPPELMASEDIAGMVTAMSEYSEAPFKERLTAALAEEGAGVRCVIADVAWYKALSVSSALGVPAMGVMTASAANYRVYMAYPMLIEKGYLPVQEARREDLVQELPPYRVKDLLRLEASSLQGFADLLRNTIEAPRQSAGLIFNTLRAIEADDLDTIRQEESLPVFALAPLHKLAPPGNTSSSLYGETQADRECLDWLDTQEPGSVVYVSFGSLAAMDPHEFVELAWGLAASKRPFLWVVRPTLIRGYESGQLPDGLDEQIRDHGRLVSWAPQVEVLAHPAVGAFITHSGWNSTVEAVSEGVPMICLPLHGDQFSNARYVCDVWKVGVEIEASSAAGQNLERGKIKAAIDKIVHDKGIRERMDAFKLAADEAVNSQTEVKALVDLINSF

SEQ ID NO: 67701 - protein, 383 aa, Triticum aestivum
  peptide (1)..(383): Ceres Seq. ID no. 12779101
MASEDIAGMVTAMSEYSEAPFKERLTAALAEEGAGVRCVIADVAWYKALSVSSALGVPAMGVMTASAANYRVYMAYPMLIEKGYLPVQEARREDLVQELPPYRVKDLLRLEASSLQGFADLLRNTIEAPRQSAGLIFNTLRAIEADDLDTIRQEESLPVFALAPLHKLAPPGNTSSSLYGETQADRECLDWLDTQEPGSVVYVSFGSLAAMDPHEFVELAWGLAASKRPFLWVVRPTLIRGYESGQLPDGLDEQIRDHGRLVSWAPQVEVLAHPAVGAFITHSGWNSTVEAVSEGVPMICLPLHGDQFSNARYVCDVWKVGVEIEASSAAGQNLERGKIKAAIDKIVHDKGIRERMDAFKLAADEAVNSQTEVKALVDLINSF

SEQ ID NO: 67702 - DNA, 1305 bp, Triticum aestivum
  misc_feature (1)..(1305): Ceres Seq. ID no. 13595877
attccaagctgcctaccgcacacactagccgcgagcagtaccatcactactggccaaaacgtgaccccctccagtcaacttcctcgtcgccaccacacgaccgcacctctcccatggcgtcctcctcgccgccgcacgtcgtggaggacgtgcccccgttcctgcagctcctcagcgacggcacggtgatccgcttcactgacgcctacccgctccccatcccgtcgccgccgcccggccagcccgtcgtcgactggaaggacgttctgtacgacgccagccacggcctcaagctccgcatctacaggccggcggcggcctcctcctccgggaacaagctcccggtgatcgtctacttccacggcggcgggtacagcatcggtagcttcgacatgcccaacttccatgcgtgctgcgtccgcctcgccggcgagctccccgctttggtgctctctgcagactaccgcctcgcccccgagcaccgcttccccgcgggtctcgacgacgcggcgaacgtcgtgtcctgggtgcgcgcccaggcagcggctgttggggacaacgccgacccatggctctcggagacggcgaacttcggccgggtgttcgtcgccggggactcggccggcgggggcgtcgtccaccacacggccgtccgcctcgcgtcgggccggctaggccccctcgaccccgttcgcgtcgccgggtgcgcgatgctctgcccgatgttcggcggggaggagaggacggcgtcggaggcggagttcccgccgggcccgttcctgtcgctgccggcggtcgaccaggcgtggcgcctggtgctgccgcctgggtccacgagggaccacccgctggccaacccgttcggcccggacagcccggcccttgacggcgtcgcgctgcctccgatgctcgttgtggccgccgcgcgcgacctgctgcgcgaccgcgccgcggactatgccgcgaggctcaaggccatggggaagccggtggagctcgtggagttcgaggggcagcaccacgggttcttcgcggtcgagccgtacggcgacgccggcagcgaggtggtccggctcgtcaaacggtttgtctacggcaacggcggcgcctccgactaaattggagatcgagcaaagctgttgagggctcctttgattcaaaggatatctttagaatttttgaaggattgaaatttttaggaattttttttatattggccttttgattcatagaattggatcctataggaatttatcctatgaaatcttttgtattacatttcataggaaatctaacatccacttc

SEQ ID NO: 67703 - protein, 371 aa, Triticum aestivum
  peptide (1)..(371): Ceres Seq. ID no. 13595878
SKLPTAHTSREQYHHYWPKRDPLQSTSSSPPHDRTSPMASSSPPHVVEDVPPFLQLLSDGTVIRFTDAYPLPIPSPPPGQPVVDWKDVLYDASHGLKLRIYRPAAASSSGNKLPVIVYFHGGGYSIGSFDMPNFHACCVRLAGELPALVLSADYRLAPEHRFPAGLDDAANVVSWVRAQAAAVGDNADPWLSETANFGRVFVAGDSAGGGVVHHTAVRLASGRLGPLDPVRVAGCAMLCPMFGGEERTASEAEFPPGPFLSLPAVDQAWRLVLPPGSTRDHPLANPFGPDSPALDGVALPPMLVVAAARDLLRDRAADYAARLKAMGKPVELVEFEGQHHGFFAVEPYGDAGSEVVRLVKRFVYGNGGASD

SEQ ID NO: 67704 - protein, 334 aa, Triticum aestivum
  peptide (1)..(334): Ceres Seq. ID no. 13595879
MASSSPPHVVEDVPPFLQLLSDGTVIRFTDAYPLPIPSPPPGQPVVDWKDVLYDASHGLKLRIYRPAAASSSGNKLPVIVYFHGGGYSIGSFDMPNFHACCVRLAGELPALVLSADYRLAPEHRFPAGLDDAANVVSWVRAQAAAVGDNADPWLSETANFGRVFVAGDSAGGGVVHHTAVRLASGRLGPLDPVRVAGCAMLCPMFGGEERTASEAEFPPGPFLSLPAVDQAWRLVLPPGSTRDHPLANPFGPDSPALDGVALPPMLVVAAARDLLRDRAADYAARLKAMGKPVELVEFEGQHHGFFAVEPYGDAGSEVVRLVKRFVYGNGGASD

SEQ ID NO: 67705 - protein, 241 aa, Triticum aestivum
  peptide (1)..(241): Ceres Seq. ID no. 13595880
MPNFHACCVRLAGELPALVLSADYRLAPEHRFPAGLDDAANVVSWVRAQAAAVGDNADPWLSETANFGRVFVAGDSAGGGVVHHTAVRLASGRLGPLDPVRVAGCAMLCPMFGGEERTASEAEFPPGPFLSLPAVDQAWRLVLPPGSTRDHPLANPFGPDSPALDGVALPPMLVVAAARDLLRDRAADYAARLKAMGKPVELVEFEGQHHGFFAVEPYGDAGSEVVRLVKRFVYGNGGASD

SEQ ID NO: 67706 - DNA, 1173 bp, Triticum aestivum
  misc_feature (1)..(1173): Ceres Seq. ID no. 12625120
ccaactcaacccaatccaacgtcccgtccgccgctgaaagcacccctcccagtcccagcagccgccttgctccccttgtttccactacgctttggatccatcgatcgatcgagccttctccagttagcctttcccgccacctaaaaaggcaccccacgtctccatccatccatgtgcggcggcgccatcatctacgactacatcccggcgcaccgccgccgggtgtccaccgccgacttctggcccgacgccgaccattccgacgcccacagcgccgcccccgacaaagcgccgcgcgcgaagcgggggcggacgaaccagtaccgcggcatccggcagcggccgtggggcaagtgggcggcggagatccgcgaccccgtgaagggcgtccgcgtctggctcggcacctaccccaccgccgaggccgccgcgcgcgcctacgaccgcgccgcgcgccgcatcaggggcgccaaggccaaggtcaacttccccaacgagatcctggtcggcgcgcccgcgcacgaggccccgtgcacgatggcggccgtgctcccttcccccaagaaagaggaggagcccgcggcgtgctcctgcgaggaggtgaaggcgctctccgaggagctgatggcgtacgagagctacatgagcttcctcggggtcccctacatggagggcggggccgcggccgcggccgcccctgccgccgtcggtgtcgccgccgaggatgcaccggccgagctatggagcttcgaggacagctactacccggggcctctggggctctgattgtgtcgtgctcgtagtctcctgccagtcgcagaaaacagagtcgattcgctctttcccttgtgttttgttgaattcattttttctctctttgttactgtggtgaatgcctcaatgtaatctcacaaattttccatgtaaattttatcaacggaaagcgctcttccccgacgcacgggcggtgctgctgcaacgctgcatccttctgttggacacgcggcgtggggaactacttcggatcgtctagagatgaacaggttggccaagtgagagtgtgagacgactactcccactggaactgctgtgtgcctctccaacctgtgggctgacgttaccagtggcagccctattggtttctttatatatgaaaatcggagaggaaaagcc

SEQ ID NO: 67707 - protein, 266 aa, Triticum aestivum
  peptide (1)..(266): Ceres Seq. ID no. 12625121
NSTQSNVPSAAESTPPSPSSRLAPLVSTTLWIHRSIEPSPVSLSRHLKRHPTSPSIHVRRRHHLRLHPGAPPPGVHRRLLARRRPFRRPQRRPRQSAAREAGADEPVPRHPAAAVGQVGGGDPRPREGRPRLARHLPHRRGRRARLRPRRAPHQGRQGQGQLPQRDPGRRARARGPVHDGGRAPFPQERGGARGVLLRGGEGALRGADGVRELHELPRGPLHGGRGRGRGRPCRRRCRRRGCTGRAMELRGQLLPGASGALIVSCS

SEQ ID NO: 67708 - protein, 204 aa, Triticum aestivum
  peptide (1)..(204): Ceres Seq. ID no. 12625122
MCGGAIIYDYIPAHRRRVSTADFWPDADHSDAHSAAPDKAPRAKRGRTNQYRGIRQRPWGKWAAEIRDPVKGVRVWLGTYPTAEAAARAYDRAARRIRGAKAKVNFPNEILVGAPAHEAPCTMAAVLPSPKKEEEPAACSCEEVKALSEELMAYESYMSFLGVPYMEGGAAAAAAPAAVGVAAEDAPAELWSFEDSYYPGPLGL

SEQ ID NO: 67709 - DNA, 1133 bp, Triticum aestivum
  misc_feature (1)..(1133): Ceres Seq. ID no. 13595881
aaaacccctcgaccacgaaaaccctaaaccctctccgccgccgccgccagccatggccctcttcgccgccgcccgccgcgcggcctcctcctcgctccccctcctccgcgcctccgcctccgcctcccgcggcgcggcctcccgtggcgcggccctgctccgccccctggccgccgccgcggcccggccgatgcccttctcctcggcgaccgcgctgaagccgagctccgacgacgagctcctccgcatcgtcaaggccgagatcaagttcgccgaggactgcgacgaccacgaccgggttgaggaggtcccagatagcttccctttcaaaatcagcgacaagaaggggcttaatgacatcactcttacaagaacttaccagggtgagaagatcgaggttctggtttttatgcccaacctagtcactggagacgagccagagcatgaccaggacgaggatgacaaggagaaagatgatgatcaggatgacggcgagaagcccccgaagtccagccttcccctcacagtcaccatcaccaagagtgaaggcccaagcctcgagttcacctgcacggcctatcctgacgagatcctcatcgataccttgtccgtgaagcagccctctgagaagttgggagaggactacattgcatacgagggtcctgacttcaatgacctggacgagaacctgcagagggcattccacaagtacctggagctgcgcgggatcacgcccatgacgacaaacttcctgcacgagtacatgatcaacaaggacagccgggagtacctgttttggctgaacaagctcaaggatttcgtcaagcagtaatgtagagattgcaagttatgatccctagcataaagacgagccaatgtgctttgcacatcctgttctgagaccttcgggcttcggaactccaaactgctccgtgtttagtacacgatgacgatgtgtatgcttagcatcgtgttttagattgctttttttggcagtgtggaaatgaccgggtgatgttagagttgaaaacctgggtagttcttcagatagaacacttcgttaagtagcgtgctatttttttctgaacaaataattatgctctgtgtgcgtgaaggtttacgcacagtgtttc

SEQ ID NO: 67710 - protein, 276 aa, Triticum aestivum
  peptide (1)..(276): Ceres Seq. ID no. 13595882
KPLDHENPKPSPPPPPAMALFAAARRAASSSLPLLRASASASRGAASRGAALLRPLAAAAARPMPFSSATALKPSSDDELLRIVKAEIKFAEDCDDHDRVEEVPDSFPFKISDKKGLNDITLTRTYQGEKIEVLVFMPNLVTGDEPEHDQDEDDKEKDDDQDDGEKPPKSSLPLTVTITKSEGPSLEFTCTAYPDEILIDTLSVKQPSEKLGEDYIAYEGPDFNDLDENLQRAFHKYLELRGITPMTTNFLHEYMINKDSREYLFWLNKLKDFVKQ

SEQ ID NO: 67711 - protein, 259 aa, Triticum aestivum
  peptide (1)..(259): Ceres Seq. ID no. 13595883
MALFAAARRAASSSLPLLRASASASRGAASRGAALLRPLAAAAARPMPFSSATALKPSSDDELLRIVKAEIKFAEDCDDHDRVEEVPDSFPFKISDKKGLNDITLTRTYQGEKIEVLVFMPNLVTGDEPEHDQDEDDKEKDDDQDDGEKPPKSSLPLTVTITKSEGPSLEFTCTAYPDEILIDTLSVKQPSEKLGEDYIAYEGPDFNDLDENLQRAFHKYLELRGITPMTTNFLHEYMINKDSREYLFWLNKLKDFVKQ

SEQ ID NO: 67712 - protein, 213 aa, Triticum aestivum
  peptide (1)..(213): Ceres Seq. ID no. 13595884
MPFSSATALKPSSDDELLRIVKAEIKFAEDCDDHDRVEEVPDSFPFKISDKKGLNDITLTRTYQGEKIEVLVFMPNLVTGDEPEHDQDEDDKEKDDDQDDGEKPPKSSLPLTVTITKSEGPSLEFTCTAYPDEILIDTLSVKQPSEKLGEDYIAYEGPDFNDLDENLQRAFHKYLELRGITPMTTNFLHEYMINKDSREYLFWLNKLKDFVKQ

SEQ ID NO: 67713 - DNA, 1064 bp, Triticum aestivum
  misc_feature (1)..(1064): Ceres Seq. ID no. 12613415
ataaacgccctcgccggcccctctctctctctcatccatcctcaccgccgcaatcctcaactccccaccttcacccagatccacagagcagcagagagatcgccggagtatcaggccgaggaagaagacagttcagccagcccgatctcaagtcaccatggtggtcgcgctcggccccggcaggttctacggcggcggcctcccgcgcccgcgcgtcttccccggagaccgcgtcgacccgccggcgcccgtcaccgacgcgctcctctgctgggcgcgcgacgcgcactggtccatgggcgggctcggcgccaagcgcctccgcctgcagggccgcatcgagggcaacctcgtcaagctccgccgcaccgcgcgccgcgacgctcgggtctccgccaagtccgccaagtccaaggtccgcgctgcggggcacgggcccgcccctgccaccctcgacgacgcgctcggctccgacgacgacgactccgaggacgaggcggaggtcgcggcccaggagaaggcgatgcggcgcgaggtggtggatgacgacgaggactccgagtccggtgagtccgagggcgagggggtgccgctcgtcaccatcgccgccgccgccaagaggaagcgcgtcaggaagctctccgacgagttcgaccgcatagccgccgcgcagctggagggcggcgcgaagaagaagccgctgaggaagaaggctgctgctcctgctccggccgctgaggcaccggcgaagaagtcgctgaagaggaaggcggtggcgccggcggctggggctgcggcgaggacctcaccgaagaggaaggctgctgaggcgccggcggcaaggaggacctcgccgaggtcgaagcactgatggataggtgctcgtttccatttgcaatccctgttcttggttcgtcagatcggtggctctagcgattgtggtatgatctcggagatgcagtatgctgtgtgttcgttgaaatgcttgaatggaatctagtttcatgtctctatgtatgaatcaaatccctcaaaatgtgtctgatcaaacctgagttatcctg

SEQ ID NO: 67714 - protein, 237 aa, Triticum aestivum
  peptide (1)..(237): Ceres Seq. ID no. 12613416
MVVALGPGRFYGGGLPRPRVFPGDRVDPPAPVTDALLCWARDAHWSMGGLGAKRLRLQGRIEGNLVKLRRTARRDARVSAKSAKSKVRAAGHGPAPATLDDALGSDDDDSEDEAEVAAQEKAMRREVVDDDEDSESGESEGEGVPLVTIAAAAKRKRVRKLSDEFDRIAAAQLEGGAKKKPLRKKAAAPAPAAEAPAKKSLKRKAVAPAAGAAARTSPKRKAAEAPAARRTSPRSKH

SEQ ID NO: 67715 - protein, 219 aa, Triticum aestivum
  peptide (1)..(219): Ceres Seq. ID no. 12613417
KRPRRPLSLSHPSSPPQSSTPHLHPDPQSSREIAGVSGRGRRQFSQPDLKSPWWSRSAPAGSTAAASRARASSPETASTRRRPSPTRSSAGRATRTGPWAGSAPSASACRAASRATSSSSAAPRAATLGSPPSPPSPRSALRGTGPPLPPSTTRSAPTTTTPRTRRRSRPRRRRCGARWWMTTRTPSPVSPRARGCRSSPSPPPPRGSASGSSPTSSTA

SEQ ID NO: 67716 - protein, 191 aa, Triticum aestivum
  peptide (1)..(191): Ceres Seq. ID no. 12613418
MGGLGAKRLRLQGRIEGNLVKLRRTARRDARVSAKSAKSKVRAAGHGPAPATLDDALGSDDDDSEDEAEVAAQEKAMRREVVDDDEDSESGESEGEGVPLVTIAAAAKRKRVRKLSDEFDRIAAAQLEGGAKKKPLRKKAAAPAPAAEAPAKKSLKRKAVAPAAGAAARTSPKRKAAEAPAARRTSPRSKH

SEQ ID NO: 67717 - DNA, 678 bp, Triticum aestivum
  misc_feature (1)..(678): Ceres Seq. ID no. 13654484
tagaatcactcgttccctgtccctcttcctgtgtgcggcgccgccgccgcgcacaggccacatctcctcgccctcttcctgatgtcgagtcgaggcaccagatcttcaaagcttgcctcaggaagtctcctctggccaaggatattgatctgagtgctctggccaagtacacccaagggttcagcggtgctgatatcacggaaatttgccagcgtgcttgcaaatacgccatcagggagaacatcgagaaggacatcgagagggagaggaggaggaaggacaaccctgaagccatggaggaggatgaggtggatgaggtcgctgagatcagggctgctcacttcgaggagtcgatgaagtatgcacgcaggagtgtgagcgatgccgacatccgcaagtaccaggcccttgcccagactctgcagcagtctcgtggtttcggcagcgagttccggttccctgatcagccggccgcgggccccgcctcttctgctgccgccgacccttttgcatccgctgccgcagcagctgaagatgacgacttatatagctaaattctcgttgttgtgcccttcacttacccgtgttttccttcgtatactgttatgttttgctctggtatgcaagacacggtcaaactatgtacttaaaattattattgggatgcactgatattcg

SEQ ID NO: 67718 - protein, 183 aa, Triticum aestivum
  peptide (1)..(183): Ceres Seq. ID no. 13654485
ESLVPCPSSCVRRRRRAQATSPRPLPDVESRHQIFKACLRKSPLAKDIDLSALAKYTQGFSGADITEICQRACKYAIRENIEKDIERERRRKDNPEAMEEDEVDEVAEIRAAHFEESMKYARRSVSDADIRKYQALAQTLQQSRGFGSEFRFPDQPAAGPASSAAADPFASAAAAAEDDDLYS

SEQ ID NO: 67719 - protein, 96 aa, Triticum aestivum
  peptide (1)..(96): Ceres Seq. ID no. 13654486
MPTSASTRPLPRLCSSLVVSAASSGSLISRPRAPPLLLPPTLLHPLPQQLKMTTYIAKFSLLCPSLTRVFLRILLCFALVCKTRSNYVLKIIIGMH

SEQ ID NO: 67720 - protein, 86 aa, Triticum aestivum
  peptide (1)..(86): Ceres Seq. ID no. 13654487
MEEDEVDEVAEIRAAHFEESMKYARRSVSDADIRKYQALAQTLQQSRGFGSEFRFPDQPAAGPASSAAADPFASAAAAAEDDDLYS

SEQ ID NO: 67721 - DNA, 1050 bp, Triticum aestivum
  misc_feature (1)..(1050): Ceres Seq. ID no. 14301603
gaaaccattaacaatccccaccatacacacccgcgaggctcaatcatcgcaccactggatcggcaggcaccgcagcaatggcggcagcgaccggaggcggcggcagcagtgaggaggcgctgacgctgctggggttctggacgagcccgttcgcgctgcgggcgcggttcgcgctgaacctcaagggcatcccctacgagtacgtggaggaggacctgttcggcgagcggggcaagagcccgctcctcgtcgcctccaacccggcccacggcgggaaggtgcccgtgctcatccacggcggccgccccgtcgccgagtcgctggtcatcctggagtacatcgacgaggcgttcccggagcgcctcccgcgcctcctgcccccgcccgacgacccgcacggccgcgccgccgcccggttctgggcggcctacgtcgaccagaagctgctcccgacgtgggccccgctctacggcgggaggacggccgaggagcgggcgggcgcggcgagggaggtcgtcgccgtgctggaggcgttcgagggggagctcggggacaggggcttcttcggcggggacggcgtggggctggtggacgtggcgctcggcgggttcctcgggtggctgcgcgcgtcgcaggccatgtgcggcgtgcggaccatcgaccccgccaggacgccgcggctggcggcgtgggcggagcggttcggcgcgctggacggcgtgagggagatcgtgccggacgcggcgccgctggtggagtacaacctcatgaagcgggctcgcctaggcctgccgtatcttccgccgcatcagtcgcagtaaaaaaccgctagtaaattccaaggcgtgtagctggatccatcgcgcgcaaaggaactgaactgaatttgaatctgatcccttaagccggtggattctttagttattctactgcagtagagtaacaagtctgtgttcttgtttggaactctgattttctgcgatggaccgattcaagaaatgtagccacagaactgccttctccaatggaaagaaaaaaagtagtaccatc

SEQ ID NO: 67722 - protein, 247 aa, Triticum aestivum
  peptide (1)..(247): Ceres Seq. ID no. 14301604
MAAATGGGGSSEEALTLLGFWTSPFALRARFALNLKGIPYEYVEEDLFGERGKSPLLVASNPAHGGKVPVLIHGGRPVAESLVILEYIDEAFPERLPRLLPPPDDPHGRAAARFWAAYVDQKLLPTWAPLYGGRTAEERAGAAREVVAVLEAFEGELGDRGFFGGDGVGLVDVALGGFLGWLRASQAMCGVRTIDPARTPRLAAWAERFGALDGVREIVPDAAPLVEYNLMKRARLGLPYLPPHQSQ

SEQ ID NO: 67723 - DNA, 1184 bp, Triticum aestivum
  misc_feature (1)..(1184): Ceres Seq. ID no. 13591198
acctaaccaaagccgcaccacacgtcccgaggcaggcgaaggggcagagagggagcggccatggcggcggtggtcggcgtcctcgcgctgcagggctcctacaacgagcacatggccgcgctgaggaggatcggggccaagggggtggaggtgcggaaggcggagcagctgcttggcatcgactccctcatcatccccggcggcgagagcaccaccatggccaagctcgccaacttccacaacctctttcctgcacttcgagagtttgtcggcacaggaaaacccgtatggggaacctgtgctgggctcatcttccttgctaacaaggcagtagggcagaaaacaggaggccaggagcttgttggtggactagattgtactgtccaccgtaacttttttggtagccagcttcaaagcttcgaaacagaactttcagtgccaatgcttgcagagaaggaaggagggagtcatacatgccgtggcgtatttatacgagcacctgctatcctagaagtaggccaggatgttgaagtattagccgattgccctgttcctgctggcagacccagcattacaataacatctggcgagggtttggaggaccaagtgtactccaaagatcgggtgattgttgcagttcggcaagggaacatccttgccaccgcattccacccagagctaacatcagactctagatggcatcgcctcttcttggacatggacaaagaatctcaagcaaaggccttggctgcgctatcgctatctgcatcctcaaacgatgcagatgttgggtcgaagaataaggctcctgatctacccattttcgagtagagctaggaaacccgaaatttgattatccggttggtgacaggaaaggattctgggcatttgttatgcccagtccaaagaatatttttggcgtcaaagctgtgccaatcaaaataatggccattgtgctccaaacactatgatattgctatgacaaggaggctgaccagttggattgggtctgtgtgtcagtagtacttttttcgaaaaggggtgctttattacttaaaagatttaagcattacacctggcctctgcataactgagatgcacacaaccaacgtcactgtagtactacgcgtctcgtgaatgcctgaatggtgatgtatgtttgtcatggttttcatgtcagcttg

SEQ ID NO: 67724 - protein, 256 aa, Triticum aestivum
  peptide (1)..(256): Ceres Seq. ID no. 13591199
MAAVVGVLALQGSYNEHMAALRRIGAKGVEVRKAEQLLGIDSLIIPGGESTTMAKLANFHNLFPALREFVGTGKPVWGTCAGLIFLANKAVGQKTGGQELVGGLDCTVHRNFFGSQLQSFETELSVPMLAEKEGGSHTCRGVFIRAPAILEVGQDVEVLADCPVPAGRPSITITSGEGLEDQVYSKDRVIVAVRQGNILATAFHPELTSDSRWHRLFLDMDKESQAKALAALSLSASSNDADVGSKNKAPDLPIFE

SEQ ID NO: 67725 - protein, 239 aa, Triticum aestivum
  peptide (1)..(239): Ceres Seq. ID no. 13591200
MAALRRIGAKGVEVRKAEQLLGIDSLIIPGGESTTMAKLANFHNLFPALREFVGTGKPVWGTCAGLIFLANKAVGQKTGGQELVGGLDCTVHRNFFGSQLQSFETELSVPMLAEKEGGSHTCRGVFIRAPAILEVGQDVEVLADCPVPAGRPSITITSGEGLEDQVYSKDRVIVAVRQGNILATAFHPELTSDSRWHRLFLDMDKESQAKALAALSLSASSNDADVGSKNKAPDLPIFE

SEQ ID NO: 67726 - protein, 204 aa, Triticum aestivum
  peptide (1)..(204): Ceres Seq. ID no. 13591201
MAKLANFHNLFPALREFVGTGKPVWGTCAGLIFLANKAVGQKTGGQELVGGLDCTVHRNFFGSQLQSFETELSVPMLAEKEGGSHTCRGVFIRAPAILEVGQDVEVLADCPVPAGRPSITITSGEGLEDQVYSKDRVIVAVRQGNILATAFHPELTSDSRWHRLFLDMDKESQAKALAALSLSASSNDADVGSKNKAPDLPIFE

SEQ ID NO: 67727 - DNA, 971 bp, Triticum aestivum
  misc_feature (1)..(971): Ceres Seq. ID no. 13654046
cccaacaaacctctttcccctccccgcatcccaagcctcccagctccatcgccacacgctcgaacccactcctctcacgctcaagcgcacaccgcaccaaccagagcagccatggctctcaccggcggcgccaccaccgcagcgtgcatcctcgtcctcctcgcgctcgccgacgccgcgggggcggctacccgggcgccagcgccggcgccggcgccggactgcatggaggcgttgattagcctcgcagactgcctcgactatgtgacgcccagcaccaagtcggctcggccttccaaggcttgctgcacggaggtgaagaccgccgtcggcacccccgccaccgtgaagtgcctctgcgctgccatggacgccaagacaactccgataccgatcaacatgacacgggtgctcgctctccccaccgcctgcggccaatccgcctccgtcttgaacaagtgccacgctgcacatgggccgggtggtgctcctgctgaagcaccgtcaccttcagcatccagtggcggcgcgaccgcttcaccaccgaaggcgaatgtggcggcgaggtctccgggcggctccgccaccgttctcttggcaactgtggtgacttcgctgctcgccttctattacctctgagggccaacatctcagcctctctcacgtgttatgttgcacagaccttgtgactctgcgttgcgcggtgttgtaatctgagtttactttgtttatcgggatgggttattatcatgtagtgtcgtggactgaatattgagtgcgtagtaaattgcaatgtaccgtggactgggtattttgaagtcgttgccagttatgacactttatttacttttgaatgcgcaaaaaaaaaaaaaaaaaaaaaaaaaaaaaaaaaaaaaaaaaaaaaaaaaaaaaaaaccaaaaaaaaaaaaaaaaaggtttttcgatcccgccaaccccgaggggggccccgg

SEQ ID NO: 67728 - protein, 212 aa, Triticum aestivum
  peptide (1)..(212): Ceres Seq. ID no. 13654047
PNKPLSPPRIPSLPAPSPHARTHSSHAQAHTAPTRAAMALTGGATTAACILVLLALADAAGAATRAPAPAPAPDCMEALISLADCLDYVTPSTKSARPSKACCTEVKTAVGTPATVKCLCAAMDAKTTPIPINMTRVLALPTACGQSASVLNKCHAAHGPGGAPAEAPSPSASSGGATASPPKANVAARSPGGSATVLLATVVTSLLAFYYL

SEQ ID NO: 67729 - protein, 175 aa, Triticum aestivum; identical to SEQ ID NO: 56146
  peptide (1)..(175): Ceres Seq. ID no. 13654048

SEQ ID NO: 67730 - protein, 137 aa, Triticum aestivum; identical to SEQ ID NO: 56147
  peptide (1)..(137): Ceres Seq. ID no. 13654049

SEQ ID NO: 67731 - DNA, 2296 bp, Triticum aestivum
  misc_feature (1)..(2296): Ceres Seq. ID no. 14301924
ctcccttcgcctccgagaagctcggtctcacctcacgcaccaccaacgcggcggcgttctcccctccaccgtgccgaccgaccccgagcggcgccgcggctgacccagcgcgatgtggcgccatgcagcggcccggcggtcggcgcagatccggcggctcctttccacgtccgccccctcggcgggcgccgtgcgcggcccctgcatcgtgcacaagcgcggcaccgacatcctccacgacccctggtacaacaaggacacggcgttccccctcacggagcgggaccgcctcggcctccggggcctgctcccgccgcgggtcatgtcgttcgagcagcagtacgagcgcttcataaactcgtaccattcgctggagcacaacacgcagggggagcccgattccgtggtctcgctggccaagtggaggatccttaacaggctgcacgaccggaacgagacgttgtactacagggtgctaattgacaatatcaaggatttcgcgcccataatatacacccctactgtcggcttggtctgcgaaaactacagcgggctgttcaggcgtccccgcgggatgtacttcagtgcaaaggataaaggggagatgatgtcgatgatttacaactggccagcagagaaggttgacatgatagttgtgactgacgggagtcgcattctaggtttaggtgatcttggagttcaaggcataggtatacctattggtaaacttgatgtttatgttgcagctgctggtatcaacccacagaaggttctcccaataatgcttgatgtgggaacaaataatgaagaactccttgaagacaagctatatttaggattgaggcaacctaggttggaaggagaggaatacttagctgttgtagatgagttcatggaagctgttcatgcacgctggccgaaagcaattgtgcagtttgaagacttccaaatgaaatgggcatttgaaactcttcagaggtatcggagccgattttgcatgttcaatgatgacgtgcaggggacagcaggagttgctctagctggtctacttggagctgttagagcacaaggtcgaccgctcgcagattttactaagcagaagatagttgtggtgggagctggaagtgctgggataggtgtgcttaacatggctaaacatgcaatgttaaggatgccagggacccataaaattggagaactgggtgaaggacacaatcaattctgggttctggacaaagatggccttattaccaaaagtagaaaagatctggatccagctgttgctcgttttgctagaggttatggtcctgaagaggtcgaagatctccatgagggggctagtcttgttgaagtggtcaagaaagtgaagcctcatgtccttttaggactatctggagttggcgggatatttaacgaggaggttctcaaggctatgaaagaatctgactccccctgccctgcaatttttgcaatgtccaacccaactactaaagctgaatgtacgcctgaagatgtattcaagcatgttggagaaaatgcagtatttgccagtggaagccctttcagcaatgttactttaagcaatggtagaaaaggctatgctaatcaagcaaacaacatgtatctgtttcctgggattggtttaggagcccttctgtcaggtgctcggcatatttcggatggcatgctccatgctgcagctgagtgccttgcttcatacatcacagatgatgcgattcgaaaaggaatcctctttccttcaatttcaagtatcaggcacatcaccgcacgtgtcggcgctgcagtcgcccgtgctgccgttgatgaagatctggccgagggatgctctgacttggatcctcgggacctcaggagcatgtcagagtcggatacggtggattacgtggctcggaagatgtggtaccctgtttacagcccactcgtcaacgacaaatagtgttcgacgaagcacacccgaagagacgtatcaggcacatacatttgttctgatcagtgaatacttcgctatttcggtttagctgctctacttgggagtatttcagcagatactgctgccacgtctactggctatattgttgcctcatttgtttacgttgacaggttcatcaaacattgctcaattttgggacccgttgagctacagttatgtcccatgtggtaggacttgaataaatgtcagatgttggcagtctgtctcctgcatcgtcgttgttggcgtatgtctcttgcatcgccaggtaatacgagattgcaaaccgattttgtgttccaaaac

SEQ ID NO: 67732 - protein, 614 aa, Triticum aestivum
  peptide (1)..(614): Ceres Seq. ID no. 14301925
MWRHAAARRSAQIRRLLSTSAPSAGAVRGPCIVHKRGTDILHDPWYNKDTAFPLTERDRLGLRGLLPPRVMSFEQQYERFINSYHSLEHNTQGEPDSVVSLAKWRILNRLHDRNETLYYRVLIDNIKDFAPIIYTPTVGLVCENYSGLFRRPRGMYFSAKDKGEMMSMIYNWPAEKVDMIVVTDGSRILGLGDLGVQGIGIPIGKLDVYVAAAGINPQKVLPIMLDVGTNNEELLEDKLYLGLRQPRLEGEEYLAVVDEFMEAVHARWPKAIVQFEDFQMKWAFETLQRYRSRFCMFNDDVQGTAGVALAGLLGAVRAQGRPLADFTKQKIVVVGAGSAGIGVLNMAKHAMLRMPGTHKIGELGEGHNQFWVLDKDGLITKSRKDLDPAVARFARGYGPEEVEDLHEGASLVEVVKKVKPHVLLGLSGVGGIFNEEVLKAMKESDSPCPAIFAMSNPTTKAECTPEDVFKHVGENAVFASGSPFSNVTLSNGRKGYANQANNMYLFPGIGLGALLSGARHISDGMLHAAAECLASYITDDAIRKGILFPSISSIRHITARVGAAVARAAVDEDLAEGCSDLDPRDLRSMSESDTVDYVARKMWYPVYSPLVNDK

SEQ ID NO: 67733 - protein, 544 aa, Triticum aestivum
  peptide (1)..(544): Ceres Seq. ID no. 14301926
MSFEQQYERFINSYHSLEHNTQGEPDSVVSLAKWRILNRLHDRNETLYYRVLIDNIKDFAPIIYTPTVGLVCENYSGLFRRPRGMYFSAKDKGEMMSMIYNWPAEKVDMIVVTDGSRILGLGDLGVQGIGIPIGKLDVYVAAAGINPQKVLPIMLDVGTNNEELLEDKLYLGLRQPRLEGEEYLAVVDEFMEAVHARWPKAIVQFEDFQMKWAFETLQRYRSRFCMFNDDVQGTAGVALAGLLGAVRAQGRPLADFTKQKIVVVGAGSAGIGVLNMAKHAMLRMPGTHKIGELGEGHNQFWVLDKDGLITKSRKDLDPAVARFARGYGPEEVEDLHEGASLVEVVKKVKPHVLLGLSGVGGIFNEEVLKAMKESDSPCPAIFAMSNPTTKAECTPEDVFKHVGENAVFASGSPFSNVTLSNGRKGYANQANNMYLFPGIGLGALLSGARHISDGMLHAAAECLASYITDDAIRKGILFPSISSIRHITARVGAAVARAAVDEDLAEGCSDLDPRDLRSMSESDTVDYVARKMWYPVYSPLVNDK

SEQ ID NO: 67734 - protein, 460 aa, Triticum aestivum
  peptide (1)..(460): Ceres Seq. ID no. 14301927
MYFSAKDKGEMMSMIYNWPAEKVDMIVVTDGSRILGLGDLGVQGIGIPIGKLDVYVAAAGINPQKVLPIMLDVGTNNEELLEDKLYLGLRQPRLEGEEYLAVVDEFMEAVHARWPKAIVQFEDFQMKWAFETLQRYRSRFCMFNDDVQGTAGVALAGLLGAVRAQGRPLADFTKQKIVVVGAGSAGIGVLNMAKHAMLRMPGTHKIGELGEGHNQFWVLDKDGLITKSRKDLDPAVARFARGYGPEEVEDLHEGASLVEVVKKVKPHVLLGLSGVGGIFNEEVLKAMKESDSPCPAIFAMSNPTTKAECTPEDVFKHVGENAVFASGSPFSNVTLSNGRKGYANQANNMYLFPGIGLGALLSGARHISDGMLHAAAECLASYITDDAIRKGILFPSISSIRHITARVGAAVARAAVDEDLAEGCSDLDPRDLRSMSESDTVDYVARKMWYPVYSPLVNDK

SEQ ID NO: 67735 - DNA, 1501 bp, Triticum aestivum
  misc_feature (1)..(1501): Ceres Seq. ID no. 13654054
agttacaactaacaagtgtggccatgtgcgtgctcctccccatctgggccattccccccgatctccccacttcactaaaccctacccacctcgccgccgcgtaaacccccacccatcccgccgcgcggcccatctccagcgcacaaccaacgccaacgcgaacgccgccgccgctaccgccatggcggccgcctcgagaagtcttctcgcacgcctccgccacctctccctcgccgggccccgcctccccccttgccgcctcttctccgcggagcctctcgtctcccatcccgacgacgacgatgccggcgccggcggcgagggcggaggccggatcatagaggcgcgtcctgctgtcatgggcccggattcccggcggaccggcgtgatcggcgtgaagtgcggcatgtcggcgatgtgggacaagtggggggccaaggttcccatcaccgtcctctgggtcgacgacaatgtcgtctgccaggtcaagaccgccgagaaggaggggttctacgcgctgcagctcggagcaggccaaaagaaggaaaagcatctaacaaagcctgaagtgggccactttagatcacaaggagtccctcttaagagaaaattaaaggagtttcctgttactgaggatgcacttcttcctgttggaacaaccatctcgggttcgtcattttgtacctgggcaatttgtggatgtcattggaatcacaaagggaaaaggttttgcgggtggcatgaaaagacatggttttagtgggatgcctgcatcacatggtgcttctttatcacatcgcagcatcggttctacaggtcaaagggatgctcctggcagggttttcaaaaacaggaaaatgcctgggcgcatgggtggtgttcaacgcacggtgaaaaatgtatgggtttaccaaattgaccctgccaggaacttactgtatctgaaaggccaggttcctggtcctcaaggcagctttcttttcgtcaaggactctatttacaagaaacccgacagagctttcctgccattccctacgtacttctcacaagaaggcgagttggaagacatggagccgctcattgctgatcttggtgacgtcgacccgttcatggcagcagattaagactaggacaaatttcgaagaatcccttttgctttcagtgcagtgttgacaatcccacgtgattgtctgttaaattttgcattggatatatgagtagctcctgggttacaagagttaccccgttactgacctgccagatcaatgttgttccatgtacattacctggcatatatgccagggccctgactcagttagggttttgagctgattgtttggtcgactgagtggatcttattttgtttaataagttgtgtaagctatgattcagatagatatataaaatcgaaaatctctattccgaggttactattctagtttcaaaaaaaaaaaaaaaaaagcttatcgataccgtcgacctcngaggggggggccccggt

SEQ ID NO: 67736 - protein, 252 aa, Triticum aestivum
  peptide (1)..(252): Ceres Seq. ID no. 15219611
VTTNKCGHVRAPPHLGHSPRSPHFTKPYPPRRRVNPHPSRRAAHLQRTTNANANAAAATAMAAASRSLLARLRHLSLAGPRLPPCRLFSAEPLVSHPDDDDAGAGGEGGGRIIEARPAVMGPDSRRTGVIGVKCGMSAMWDKWGAKVPITVLWVDDNVVCQVKTAEKEGFYALQLGAGQKKEKHLTKPEVGHFRSQGVPLKRKLKEFPVTEDALLPVGTTISGSSFCTWAICGCHWNHKGKRFCGWHEKTWF

SEQ ID NO: 67737 - protein, 192 aa, Triticum aestivum
  peptide (1)..(192): Ceres Seq. ID no. 15219612
MAAASRSLLARLRHLSLAGPRLPPCRLFSAEPLVSHPDDDDAGAGGEGGGRIIEARPAVMGPDSRRTGVIGVKCGMSAMWDKWGAKVPITVLWVDDNVVCQVKTAEKEGFYALQLGAGQKKEKHLTKPEVGHFRSQGVPLKRKLKEFPVTEDALLPVGTTISGSSFCTWAICGCHWNHKGKRFCGWHEKTWF

SEQ ID NO: 67738 - protein, 162 aa, Triticum aestivum
  peptide (1)..(162): Ceres Seq. ID no. 15219613
MHFFLLEQPSRVRHFVPGQFVDVIGITKGKGFAGGMKRHGFSGMPASHGASLSHRSIGSTGQRDAPGRVFKNRKMPGRMGGVQRTVKNVWVYQIDPARNLLYLKGQVPGPQGSFLFVKDSIYKKPDRAFLPFPTYFSQEGELEDMEPLIADLGDVDPFMAAD

SEQ ID NO: 67739 - DNA, 1938 bp, Triticum aestivum
  misc_feature (1)..(1938): Ceres Seq. ID no. 14303309
atatattcccactctctccgtcggcatcctcttatttttagttatcatctatcacatccgccttcttcttcccctacacgccttacgtgcaccgcgtatataatggaagcaagttaacggagggagcaccaccgggcaacacaccacgtacggcgcttcaccgaggacaagcttggaagagggatcgatcgacaatggcgtctgctgcgctcccggcggcggcggcggcagcggtcgagcccaagaagaagagcaacttcaagtacgcctgcacctgcgccctctccgcttccatggccaccgtcgtcctcggctatgacgtcggggtgatgagcggggcgtcgctctacatcaaggaggacctgcggctgacggacgtgcaggtggagatcatgatgggcatcctcagcgtctacgcgctcctcggctcgttcgccggggccaggacgtccgactggatcggccgccgctacaccgtcatcatcgccgccgccatcttcttcgccggctccttggtcatgggcttcgccgtcaactacgtcatgttcatgttcggccgcttcgtctgcggcatgggcgtcggcttcgccatcatggtcgcgcccgtctacaccgccgaggtcgccccggcctccacccgcggcctcctcacctccttcaccgaggtcttcatcaacgtcggcatcctcctcggctacgtctccaacttcgccttcgcgcgcctcccgcaccacatcaactggcgcatcatgctcggcatcggcgccgtcccctcggccttgctcgcgctcatggtgctcggcatgccggagtcgccccggtggctcgtgatgaagggccgcctcgccgacgccagggtcgtgctcgagaagacctccgacacgccagaggaggccgtggagcgccttgaccaaatcaaggctgccgccggcatcccccgcgaccttgacggcgacgtggtcgccgtgcccaagagaaaaggcggtgacgagaagcaggtgtggaaggagctcatcttttcgcccaccccggtcatgcgccgcatactgctcgcggcgctcggcgtccatttcttccagcaggcgactggctccgactcggtcgtgctctacagcccacgcgtgttcaagagcgccggcatcaccggcgacaaccacctgctcggcgtcacatgcgccatgggggtcaccaagactctcttcatccttttggccaccttccaaatcgaccgtgtcggccggcggccgctgctgctcaccagcaccgccggcatgctcgtctgtctcatcggcctcggcacgggcctcaccgtcgtgggccagcacccggacgagaagatcacgtgggcagtcggcctgtgcatcgcctccaccttggcctacgtgtccttcttctccatgggcctcggccccatcaccagcgtctacgtctccgaggtcttcccgctgcgggtgcgcgcgctcggcttcgcgctcggcgtcgcctgcaaccgcgtcaccagcgccgccatctccatgaccttcctctccttgtccaaggccatcaccatcggcggcagcttcttcctctacgccggcctcgctgcgctcggctggctttacttctacgccttcgttcccgagacgcgcgggcagccgcttgaggacatagggaagcttttcggcatgaaggacgccgccgtcgaagacgacgacaccgccaccaaagacaagcaggtgaaagcagctgtggagatgaactagctaacgtacggccggagagtgggtttcctcctaacatgcatgcatgcatgcaagggatggatcaccatccattgggggttcttttgagtttcctgctacttctttcttgggtttttgatcaaattcgtcctgttttcgggatgtttcattgtgtcttttatttttccaccaaagtgtatcagaatgtttcgtcgcc

SEQ ID NO: 67740 - protein, 515 aa, Triticum aestivum
  peptide (1)..(515): Ceres Seq. ID no. 14303310
MASAALPAAAAAAVEPKKKSNFKYACTCALSASMATVVLGYDVGVMSGASLYIKEDLRLTDVQVEIMMGILSVYALLGSFAGARTSDWIGRRYTVIIAAAIFFAGSLVMGFAVNYVMFMFGRFVCGMGVGFAIMVAPVYTAEVAPASTRGLLTSFTEVFINVGILLGYVSNFAFARLPHHINWRIMLGIGAVPSALLALMVLGMPESPRWLVMKGRLADARVVLEKTSDTPEEAVERLDQIKAAAGIPRDLDGDVVAVPKRKGGDEKQVWKELIFSPTPVMRRILLAALGVHFFQQATGSDSVVLYSPRVFKSAGITGDNHLLGVTCAMGVTKTLFILLATFQIDRVGRRPLLLTSTAGMLVCLIGLGTGLTVVGQHPDEKITWAVGLCIASTLAYVSFFSMGLGPITSVYVSEVFPLRVRALGFALGVACNRVTSAAISMTFLSLSKAITIGGSFFLYAGLAALGWLYFYAFVPETRGQPLEDIGKLFGMKDAAVEDDDTATKDKQVKAAVEMN

SEQ ID NO: 67741 - protein, 482 aa, Triticum aestivum
  peptide (1)..(482): Ceres Seq. ID no. 14303311
MATVVLGYDVGVMSGASLYIKEDLRLTDVQVEIMMGILSVYALLGSFAGARTSDWIGRRYTVIIAAAIFFAGSLVMGFAVNYVMFMFGRFVCGMGVGFAIMVAPVYTAEVAPASTRGLLTSFTEVFINVGILLGYVSNFAFARLPHHINWRIMLGIGAVPSALLALMVLGMPESPRWLVMKGRLADARVVLEKTSDTPEEAVERLDQIKAAAGIPRDLDGDVVAVPKRKGGDEKQVWKELIFSPTPVMRRILLAALGVHFFQQATGSDSVVLYSPRVFKSAGITGDNHLLGVTCAMGVTKTLFILLATFQIDRVGRRPLLLTSTAGMLVCLIGLGTGLTVVGQHPDEKITWAVGLCIASTLAYVSFFSMGLGPITSVYVSEVFPLRVRALGFALGVACNRVTSAAISMTFLSLSKAITIGGSFFLYAGLAALGWLYFYAFVPETRGQPLEDIGKLFGMKDAAVEDDDTATKDKQVKAAVEMN

SEQ ID NO: 67742 - protein, 470 aa, Triticum aestivum
  peptide (1)..(470): Ceres Seq. ID no. 14303312
MSGASLYIKEDLRLTDVQVEIMMGILSVYALLGSFAGARTSDWIGRRYTVIIAAAIFFAGSLVMGFAVNYVMFMFGRFVCGMGVGFAIMVAPVYTAEVAPASTRGLLTSFTEVFINVGILLGYVSNFAFARLPHHINWRIMLGIGAVPSALLALMVLGMPESPRWLVMKGRLADARVVLEKTSDTPEEAVERLDQIKAAAGIPRDLDGDVVAVPKRKGGDEKQVWKELIFSPTPVMRRILLAALGVHFFQQATGSDSVVLYSPRVFKSAGITGDNHLLGVTCAMGVTKTLFILLATFQIDRVGRRPLLLTSTAGMLVCLIGLGTGLTVVGQHPDEKITWAVGLCIASTLAYVSFFSMGLGPITSVYVSEVFPLRVRALGFALGVACNRVTSAAISMTFLSLSKAITIGGSFFLYAGLAALGWLYFYAFVPETRGQPLEDIGKLFGMKDAAVEDDDTATKDKQVKAAVEMN

SEQ ID NO: 67743 - DNA, 1774 bp, Triticum aestivum
  misc_feature (1)..(1774): Ceres Seq. ID no. 15178464
ccccaaaccaagcagagcctacttgtctccctccgcgaatctctccctcccacgctgatctcaatctgcccgtccctccacgggcccgcgccgcctccctccctccatccccgccgcatcgccggcggcctcagcttcgcacgctccgatggtgccgagattggtctcttgctagtgctggcggctcaacctgcagaccgcggcaccgccatggaggctccgctgacggtgcagattgtcgagttcaacaccaaggtgatgcaagaggagctgaagaagctggggctcaaggtcaaccaccatgaggccaacatcacgttcctcaagtctgagatctatgctatcgaagagtcgattgctgacctgacaattaaacgtggaaagaaggttgtagcttcaagtaatggtacatcagttcaagaagctgaacagcgtacaattgaaagcatatgtaatcaggacaagacagcagcttcgcttatatgccagctcaagaaacgtcattccacacaaatatcaacaatgccaatgatgaaagatatccttggtgttgtggctaccttaggaaaaacaaatgatgataatctaagcagcctactctcagagtacttgggaatagacaatatgcttggtctcgtttgcaagacttatgatggcataaagagtcttgaaacatatggcacagaaggcaacattgataagaaaagtggtattcatggactgggtggctcaattggaaagattctgcatgggaggtttaccgtgttttgtcttgaaaacataaggccattttctggagaagttgtgattgatgatccacaaagatatcttatgctgcgtaaaccaaggttgcctaacggggagtctcctcctggttttcttggtttcgcagtaaatatgatacttatggaccaggcatacttgagttgtctcacaccccatggccatggtcttagggagactttgttttacagtttgttttctcatttacaagtttataagactacagctgatctacggcgtgctattcccttcataaatgatggtgcggtttctctagatggtggtatattgaggcctaatggttcattctgccttggtgataggaaagatgttgaagtgaaatttactgtagctttaagctctggggattcaaacacacctggaagtatcactgaaatggaagagcaagtcaaactgaagaactgggagaaggaaaggtttgttgaggatataaaaagggaggaagatttgttaaagcaagttaaggactcattcagcaatcaaaagcaacagcttctggactatatcactcaatcgccagcgtcaaagagggtgcagggttcaccaaccattcgctcacctgcaactccgggaagtaatccatttgcagcaactcctgggcgtaacccgtttacatcaactcctggaagtcacccgtttgctacaactccgggaggcaacccatttgcagctactactcctggaggtcacccgattgcagcaactcctggaagtcacccgatcgcagcaactcctggaaatatttcgtttgcagtcaagcctccccacatgcgctgacagcgtgtaaatgtccgcatgcgatttccttttgctgggagtttgtcatgctctggttctatccatacgtaaccaactgcattttgcgaagttcttaacgctagattctagtgcacagtagggatgcgaaaagttagtacataaccaccgacttttgttcataagttggggcctgtctctggtcacttattcg

SEQ ID NO: 67744 - protein, 526 aa, Triticum aestivum
  peptide (1)..(526): Ceres Seq. ID no. 15178465
PQTKQSLLVSLRESLPPTLISICPSLHGPAPPPSLHPRRIAGGLSFARSDGAEIGLLLVLAAQPADRGTAMEAPLTVQIVEFNTKVMQEELKKLGLKVNHHEANITFLKSEIYAIEESIADLTIKRGKKVVASSNGTSVQEAEQRTIESICNQDKTAASLICQLKKRHSTQISTMPMMKDILGVVATLGKTNDDNLSSLLSEYLGIDNMLGLVCKTYDGIKSLETYGTEGNIDKKSGIHGLGGSIGKILHGRFTVFCLENIRPFSGEVVIDDPQRYLMLRKPRLPNGESPPGFLGFAVNMILMDQAYLSCLTPHGHGLRETLFYSLFSHLQVYKTTADLRRAIPFINDGAVSLDGGILRPNGSFCLGDRKDVEVKFTVALSSGDSNTPGSITEMEEQVKLKNWEKERFVEDIKREEDLLKQVKDSFSNQKQQLLDYITQSPASKRVQGSPTIRSPATPGSNPFAATPGRNPFTSTPGSHPFATTPGGNPFAATTPGGHPIAATPGSHPIAATPGNISFAVKPPHMR

SEQ ID NO: 67745 - protein, 456 aa, Triticum aestivum
  peptide (1)..(456): Ceres Seq. ID no. 15178466
MEAPLTVQIVEFNTKVMQEELKKLGLKVNHHEANITFLKSEIYAIEESIADLTIKRGKKVVASSNGTSVQEAEQRTIESICNQDKTAASLICQLKKRHSTQISTMPMMKDILGVVATLGKTNDDNLSSLLSEYLGIDNMLGLVCKTYDGIKSLETYGTEGNIDKKSGIHGLGGSIGKILHGRFTVFCLENIRPFSGEVVIDDPQRYLMLRKPRLPNGESPPGFLGFAVNMILMDQAYLSCLTPHGHGLRETLFYSLFSHLQVYKTTADLRRAIPFINDGAVSLDGGILRPNGSFCLGDRKDVEVKFTVALSSGDSNTPGSITEMEEQVKLKNWEKERFVEDIKREEDLLKQVKDSFSNQKQQLLDYITQSPASKRVQGSPTIRSPATPGSNPFAATPGRNPFTSTPGSHPFATTPGGNPFAATTPGGHPIAATPGSHPIAATPGNISFAVKPPHMR

SEQ ID NO: 67746 - protein, 440 aa, Triticum aestivum
  peptide (1)..(440): Ceres Seq. ID no. 15178467
MQEELKKLGLKVNHHEANITFLKSEIYAIEESIADLTIKRGKKVVASSNGTSVQEAEQRTIESICNQDKTAASLICQLKKRHSTQISTMPMMKDILGVVATLGKTNDDNLSSLLSEYLGIDNMLGLVCKTYDGIKSLETYGTEGNIDKKSGIHGLGGSIGKILHGRFTVFCLENIRPFSGEVVIDDPQRYLMLRKPRLPNGESPPGFLGFAVNMILMDQAYLSCLTPHGHGLRETLFYSLFSHLQVYKTTADLRRAIPFINDGAVSLDGGILRPNGSFCLGDRKDVEVKFTVALSSGDSNTPGSITEMEEQVKLKNWEKERFVEDIKREEDLLKQVKDSFSNQKQQLLDYITQSPASKRVQGSPTIRSPATPGSNPFAATPGRNPFTSTPGSHPFATTPGGNPFAATTPGGHPIAATPGSHPIAATPGNISFAVKPPHMR

SEQ ID NO: 67747 - DNA, 1414 bp, Triticum aestivum
  misc_feature (1)..(1414): Ceres Seq. ID no. 14301932
aaaaaaatttcgattcgcacactgtgcagccaaaagccgagagagagctcgagctcagctccccactccccccatccccccgaggccccaaccctaagcccctcgccgggccccaatgtcgaggccggcggccgcggccgcagcggcgctgctggttatcctcgcggcggcgggcggcgcggcggcgaagaccacgatcgagccctgctccagcgccgactcgtgcgcggcgctgctcggctactcgctctacgccgacatgaaggtctccgaggtggcggcgctcttcggcgcggacccggcggcgctgctggcggccaacgcgctcgacttcgcctcccccggcgccgccaaccggatcctccccgcggggctcctcctccgcgtccccacccgctgcgcctgcgccgacggcgtccgcaagtccgtctccgtccgctacaccgcgcgccccgccgatacgctcgccaccgtcgccgacgtcgtcttcgcgggcctcgcctccgccgaccagatccgcagcgccaacgggctcgccgaggccgacccggacgcgctgctcgacgccggccagattctcgtcgtccccttcccctgcgtctgcctcaactccaccgacaacaacctccccgccgtctacctctcctatctcgtgcgggtcggggacaccgtgcaatccatcgccgccacccacgccaccactgtcacggatctcagcaatgtgaatgccatggggagccccgtcgtggcacccggcgacatccttgcagttccattatcagcatgtgcgtctacatttcctaactttgcttcggactatggattgcttgtggcaaacgggacctatgcactaactgctggtaactgtgtagaatgcagctgtgggccaggggatctcaatctgtactgcactccagcttcattaggaacgtcatgttcaagtatgcagtgctccaatagcagtctaatgcttggtaatgtgactacccagcccaccagcggtggctgcggtgtctcgtcttgcaactatgctggcttcgttaacggaagcattaccacatcgctgtcctcgggtcttcaacctacatgccctggaccgcatcaagttcctccactcatggagccgtccaccgcggcaatccacgactcgtaccttgctccatcaccttcgccaggacctggggaggcaggtggtgctgttcccggctcgtctgaccctggagcgtcctcccattctcttgctggaagcctctcgccctcggtgcataaactgcatcaaatgatcctcattctttctctagtcttctacctgcatatgtgaattcttctgtaggaatattattggatgtatttgtatcggacggggccctcatttgggcccggtggaacctcgacggcaaggttttctggctcc

SEQ ID NO: 67748 - protein, 401 aa, Triticum aestivum
  peptide (1)..(401): Ceres Seq. ID no. 14301933
MSRPAAAAAAALLVILAAAGGAAAKTTIEPCSSADSCAALLGYSLYADMKVSEVAALFGADPAALLAANALDFASPGAANRILPAGLLLRVPTRCACADGVRKSVSVRYTARPADTLATVADVVFAGLASADQIRSANGLAEADPDALLDAGQILVVPFPCVCLNSTDNNLPAVYLSYLVRVGDTVQSIAATHATTVTDLSNVNAMGSPVVAPGDILAVPLSACASTFPNFASDYGLLVANGTYALTAGNCVECSCGPGDLNLYCTPASLGTSCSSMQCSNSSLMLGNVTTQPTSGGCGVSSCNYAGFVNGSITTSLSSGLQPTCPGPHQVPPLMEPSTAAIHDSYLAPSPSPGPGEAGGAVPGSSDPGASSHSLAGSLSPSVHKLHQMILILSLVFYLHM

SEQ ID NO: 67749 - protein, 353 aa, Triticum aestivum
  peptide (1)..(353): Ceres Seq. ID no. 14301934
MKVSEVAALFGADPAALLAANALDFASPGAANRILPAGLLLRVPTRCACADGVRKSVSVRYTARPADTLATVADVVFAGLASADQIRSANGLAEADPDALLDAGQILVVPFPCVCLNSTDNNLPAVYLSYLVRVGDTVQSIAATHATTVTDLSNVNAMGSPVVAPGDILAVPLSACASTFPNFASDYGLLVANGTYALTAGNCVECSCGPGDLNLYCTPASLGTSCSSMQCSNSSLMLGNVTTQPTSGGCGVSSCNYAGFVNGSITTSLSSGLQPTCPGPHQVPPLMEPSTAAIHDSYLAPSPSPGPGEAGGAVPGSSDPGASSHSLAGSLSPSVHKLHQMILILSLVFYLHM

SEQ ID NO: 67750 - protein, 267 aa, Triticum aestivum
  peptide (1)..(267): Ceres Seq. ID no. 14301935
KKISIRTLCSQKPRESSSSAPHSPHPPEAPTLSPSPGPNVEAGGRGRSGAAGYPRGGGRRGGEDHDRALLQRRLVRGAARLLALRRHEGLRGGGALRRGPGGAAGGQRARLRLPRRRQPDPPRGAPPPRPHPLRLRRRRPQVRLRPLHRAPRRYARHRRRRRLRGPRLRRPDPQRQRARRGRPGRAARRRPDSRRPLPLRLPQLHRQQPPRRLPLLSRAGRGHRAIHRRHPRHHCHGSQQCECHGEPRRGTRRHPCSSIISMCVYIS

SEQ ID NO: 67751 - DNA, 1132 bp, Triticum aestivum
  misc_feature (1)..(1132): Ceres Seq. ID no. 13595919
atcatcacccaacagcactcaaccagagcagagcattcgccactgtagctagcactcgcggcgtgcgggcagggacacggcgagcatgggttcgaggtacgaggtggaggtgacggtgggctcggcgcgggacctcaagaacgtcaactggcgcaacggcgacctgcagccctacgccgtgctctgggtcgacgacggccccaagtgctcctcccgcgtcgacctggacaacggcgagagcccggtctgggacgagaagctcaccgtcccgctcccgccgtccaccgcccgcctcgaggacgccgtcctccgcatcgacgtcgtccacgccaacgccggcgggggcaccaagccgctcgtggggtccgcgcgcctccctctgcgcgacgtcctcgacgacgccggcctcggcggccgcgcgtcccgcacgctccgcctcaagcgcccctccggccggccccagggccgcctcgacgtccgcgtcgccgtccgcgaggccgccgcccgctactacgaccccgcctacccgccgccctacggccagagccagccccagtcccgcgacccctacgcggccccggcgccgtacggctcgggcgggtacgggtatggccagcagcagccgtacgccgcgccgccgtccggctacccggccgcctacggcgccgccgcgccaccgcagcccgccgggtaccctgccgcctacggaggcggcgcgcagccggcgtacggcgccgctcctgcccccgcgtacgggtcggtgagtgaccctgctgcgaagaagaaggggatggggatgggggcggggctggcggtgggcgcggcggcgggggtgctgggcgggctggcgctggcggaaggggcgagctacctggaggacaagatcgaggacgacgtggcggagaaggtggaggacgacctggccggcggcggctacgacgacgacgactactagagaaaacgaaaacgatgggcacctcctgagagattgttgtacacgctggtgctgactagccagcatcttctttgcttttattctggccggatttgttgaataaatacgcgaaacaaattagcaaaaaaaaaaaaaaaaaagcttatcgataccgtcgactgtttaaacacaataaag

SEQ ID NO: 67752 - protein, 289 aa, Triticum aestivum
  peptide (1)..(289): Ceres Seq. ID no. 13595920
MGSRYEVEVTVGSARDLKNVNWRNGDLQPYAVLWVDDGPKCSSRVDLDNGESPVWDEKLTVPLPPSTARLEDAVLRIDVVHANAGGGTKPLVGSARLPLRDVLDDAGLGGRASRTLRLKRPSGRPQGRLDVRVAVREAAARYYDPAYPPPYGQSQPQSRDPYAAPAPYGSGGYGYGQQQPYAAPPSGYPAAYGAAAPPQPAGYPAAYGGGAQPAYGAAPAPAYGSVSDPAAKKKGMGMGAGLAVGAAAGVLGGLALAEGASYLEDKIEDDVAEKVEDDLAGGGYDDDDY

SEQ ID NO: 67753 - DNA, 1453 bp, Triticum aestivum
  misc_feature (1)..(1453): Ceres Seq. ID no. 14302764
attcgactcgacgccctcggttcacacacactgatcagctcagctacagcctacagagtacagacccaacccaactccgggagacaacagagcagagcacggcgagaatgctgctgaacccggcctcggaggcgctggtgctcgacagcatcaggcagcacctcatggaggacacggcggcgccggcgccggaggcgaggaggcagcggccggcctactgccgcagcgccagcttcgggagcctggtggccgaccagtggagcgagtcgctcccgttccgcgccgacgactccgacgacatggtcgtctacggcgcgctccgcgacgccttctcctgcggctggctccccgacggctccttcgccgccgtcaagccggagcccctcctgccttccccggactcctgctacgtcggcttcctcgagccggagacgcctccggccacgtccccgggagagagcgaggaggaggccgccgcggcgttcatgggcgaggcggccgcggccgcggcgagggggaagcactaccgcggggtgaggcagcggccgtggggcaagttcgcggcggagatccgggacccggccaagaacggcgcgcgcgtgtggctcggcacctacgacaccgccgaggacgccgccgtggcctacgaccgcgccgcgtaccgcatgcgcggctcccgcgccctcctcaacttcccgctccgcatcggctccgagatcgccgccgcgcacgccgcggccgcggccgccggggacaagcggccttcccccgagccggcgacctcagactcgtcgtcgtcctcctcctcctccgggtccccgaaaagaaggaagaggggcgaggccgcggccgcgtccatggccatggcgctggtgccgccgccctcgcagctgagccggccggcccaggcgtggtaccccgcggcgccggtggagcaggtggccatggcgccgcgcgcgcagcagctggtcagctaggccccgctcgccagcccccgggcgcacgatcggtcgtaaaagcacacaatgcgcaagtgcaatggattcgccagcaagtgcatggacgcgacagcaacaggagcccgcctttcactggtgcacggtgcaaggtggtgatggcaatggagagcgatggcgagcgagcgagcgagcaatcaggcaaagcaaccttggcgacggctccatttggatatttggatgggtcgagccgtcgacaacggaagataagctcggagcaactgggtgctgcaatttggcctggaatgatagttcctcctctctccactgctcggtgcaactcgcccaagtggatcaaagcgaaactgtgccagtatcggatcgtcgtggttccttctgagtcgtagggttatattttgtcactgtcagagtgcgtgtggtaaaaattacaaactcgtgaatcgtgatcgagcataatggaacttgtgaaactttac

SEQ ID NO: 67754 - protein, 324 aa, Triticum aestivum
  peptide (1)..(324): Ceres Seq. ID no. 14302765
STRRPRFTHTDQLSYSLQSTDPTQLRETTEQSTARMLLNPASEALVLDSIRQHLMEDTAAPAPEARRQRPAYCRSASFGSLVADQWSESLPFRADDSDDMVVYGALRDAFSCGWLPDGSFAAVKPEPLLPSPDSCYVGFLEPETPPATSPGESEEEAAAAFMGEAAAAAARGKHYRGVRQRPWGKFAAEIRDPAKNGARVWLGTYDTAEDAAVAYDRAAYRMRGSRALLNFPLRIGSEIAAAHAAAAAAGDKRPSPEPATSDSSSSSSSSGSPKRRKRGEAAAASMAMALVPPPSQLSRPAQAWYPAAPVEQVAMAPRAQQLVS

SEQ ID NO: 67755 - protein, 289 aa, Triticum aestivum
  peptide (1)..(289): Ceres Seq. ID no. 14302766
MLLNPASEALVLDSIRQHLMEDTAAPAPEARRQRPAYCRSASFGSLVADQWSESLPFRADDSDDMVVYGALRDAFSCGWLPDGSFAAVKPEPLLPSPDSCYVGFLEPETPPATSPGESEEEAAAAFMGEAAAAAARGKHYRGVRQRPWGKFAAEIRDPAKNGARVWLGTYDTAEDAAVAYDRAAYRMRGSRALLNFPLRIGSEIAAAHAAAAAAGDKRPSPEPATSDSSSSSSSSGSPKRRKRGEAAAASMAMALVPPPSQLSRPAQAWYPAAPVEQVAMAPRAQQLVS

SEQ ID NO: 67756 - protein, 270 aa, Triticum aestivum
  peptide (1)..(270): Ceres Seq. ID no. 14302767
MEDTAAPAPEARRQRPAYCRSASFGSLVADQWSESLPFRADDSDDMVVYGALRDAFSCGWLPDGSFAAVKPEPLLPSPDSCYVGFLEPETPPATSPGESEEEAAAAFMGEAAAAAARGKHYRGVRQRPWGKFAAEIRDPAKNGARVWLGTYDTAEDAAVAYDRAAYRMRGSRALLNFPLRIGSEIAAAHAAAAAAGDKRPSPEPATSDSSSSSSSSGSPKRRKRGEAAAASMAMALVPPPSQLSRPAQAWYPAAPVEQVAMAPRAQQLVS

SEQ ID NO: 67757 - DNA, 1401 bp, Triticum aestivum
  misc_feature (1)..(1401): Ceres Seq. ID no. 13585143
aaagctgagagcagttcgtcaataaataagttctccagaaaccccgaaaccccgcgaccaccgcctcgccgcttacacgaccgagtgcgccgacggacgacacctccactaccgcctgtcgcccctcgccgcgcgcgaccgacgcccaccgcgttacgatggtgaccgacgcggccgcgctggcggtcgtgaaggccgcgcgccccgtcttccgcggcgcccacgacggcgtggcgttcgccgcaaacgccgccttcctcgccgccggatactccttatgcgccgtcggccctgccgcgctcgccgaccccctccccgcagttgacgaggaggtgggaattgatgggtggaacactatggacaattgctatgcctttctgtactccaaggaggaggagggcaagaagaagcgcattttagtgaaatgtctagtgattgatgacttccttgctattgatgcgctggatcttgaggcacaacacaaggaaccctgcaatgttcagataaatgtgaaggatttcttctctgaagaacagcccaagaattataaggatatgtacaagaattttgcgggcttcatcaatacccttaactcaagcttgttagttgaattggatggtaagaatgctgctgctgctgccgcccagaagcctgatcttgagggcagttcatcaataaacagttctgaaaatgttctgccggatacaaggactactgaacctgctggcctgatatatcctccagtagctccgtttggtcatgatgacaccttccctgctcctggtgctggcttctaccctcacagtggtgggccgggtggtagtatgcacgttggcccaaatgatccacgcttctttccttcaaatccttttcctgctccttttggtggccctgggagtgttccacctggtgtccgttacgatccaatcggcccgcccgatgttccaggatttgaaccatctcgctttgtgaggcgttcgaggcatccaggtggaagcactcacccagacctcgagttcttccagcaaggcccagacttctgagactcggcttcatgccacctgcaccctgcgctgaatgactctgctttgtttgtgctgcgctcatgaactttttttcagtagaccctgcttgggaagttggaaacatgaatgtaaacttttgtatttaccttccagacaatgctttgtgacggttgactgtacaattgtatatagacctgtcttcgtatccctctgtgcttcttacctaaactattggtgcgactaccaacatctgcaatgtctgcctcgtagttatccagtagccccaaaatttgctcgcagtttctccgtatgcagtatcaccgcaaaatgttcctctgtatctacgggcgctccaagcgaaatcttgttttaatat

SEQ ID NO: 67758 - protein, 294 aa, Triticum aestivum
  peptide (1)..(294): Ceres Seq. ID no. 13585144
MVTDAAALAVVKAARPVFRGAHDGVAFAANAAFLAAGYSLCAVGPAALADPLPAVDEEVGIDGWNTMDNCYAFLYSKEEEGKKKRILVKCLVIDDFLAIDALDLEAQHKEPCNVQINVKDFFSEEQPKNYKDMYKNFAGFINTLNSSLLVELDGKNAAAAAAQKPDLEGSSSINSSENVLPDTRTTEPAGLIYPPVAPFGHDDTFPAPGAGFYPHSGGPGGSMHVGPNDPRFFPSNPFPAPFGGPGSVPPGVRYDPIGPPDVPGFEPSRFVRRSRHPGGSTHPDLEFFQQGPDF

SEQ ID NO: 67759 - protein, 228 aa, Triticum aestivum
  peptide (1)..(228): Ceres Seq. ID no. 13585145
MDNCYAFLYSKEEEGKKKRILVKCLVIDDFLAIDALDLEAQHKEPCNVQINVKDFFSEEQPKNYKDMYKNFAGFINTLNSSLLVELDGKNAAAAAAQKPDLEGSSSINSSENVLPDTRTTEPAGLIYPPVAPFGHDDTFPAPGAGFYPHSGGPGGSMHVGPNDPRFFPSNPFPAPFGGPGSVPPGVRYDPIGPPDVPGFEPSRFVRRSRHPGGSTHPDLEFFQQGPDF

SEQ ID NO: 67760 - protein, 162 aa, Triticum aestivum
  peptide (1)..(162): Ceres Seq. ID no. 13585146
MYKNFAGFINTLNSSLLVELDGKNAAAAAAQKPDLEGSSSINSSENVLPDTRTTEPAGLIYPPVAPFGHDDTFPAPGAGFYPHSGGPGGSMHVGPNDPRFFPSNPFPAPFGGPGSVPPGVRYDPIGPPDVPGFEPSRFVRRSRHPGGSTHPDLEFFQQGPDF

SEQ ID NO: 67761 - DNA, 1474 bp, Triticum aestivum
  misc_feature (1)..(1474): Ceres Seq. ID no. 13654431
gttagaaaatttccagccctgcccctccccggcgccggcgaccaccgccgcagccgccacctcctccaggagcgccggcgtcgcccgtccgcacccggcggcggcggcggaggcagcgatggcgaggcaagaggccgtgggggccgccacgggggtggacttccacctgccggacgagatcctggccgtgatccccactgacccgtacgagcagctggacgtcgcccgcaagatcacctccatggccatcgcgtcccgcgtctcccgcctcgaggccgacgtcgcgcgcctccgcagggacctcgccgaccgcgaccgcggcgaggccgacctccgcgcccgcctcgccgactccgacgcccgcctcctcgccgcgctcgacgagaacgcgaagctggtgaaggagagggacacgctcgccctgacggccaagaagctgtcgaggaacttggcaaagttagaggcatttaagaagcagttgatgaaatcgctgagtgaagataatttattgcaattgtcagaaacaggtgaagatcgtgatgtagatgcagaaaataatgggaccgctcgaattccttcctggaaagatgaagtttcaagcagtcacacctcttcaaatacttccagcagatccacaatcaccgaatcagcccaaggataccagttctcaatcacaccatatgtagccccccaaataactcctggttcaacaccaattatttcatcctctagtggttccccactagcatattcaactggtccatccactccgaagttctattctggtccaacatcgcctacaagatcacgttctgaagaccaatcggcattttcatcatggaatggatcaagtcatcagtattcagcccctgtctctcctcaacgccgctcatttgcagggcgacctcgtatagatggaaaggaattcttccgacaagcacggacacgactatcttatgagcaatttggagcattcttggcaaatattaaggaatttaatgcacagaaacaatcgcgagaggacaccttgtcgaaagcagaggagatttttggaacagagcacaaagacttgtacatttctttccagaatatgcttaaccgcaaccaatcgtgaacctgtcataggctgccgtatttcttcttttgaacaagctggtttagttcatcggtatgtctcttcggtttaaacgacggtaccattctgctggggtaataattcctatgccaggccatctgtttccaagagagcgtgtatcgttggagttctcgttgatcacaagatcatctccttagaaatctgtgcataggccattgtagttttggtgtggccatcctcaataacatgatgtaaatgggtatggtcatgcatgcattcaacaaggaaaagtttcttttctttttgcgaacaagtggaagttgagactgtcagatatattggtctgtgtaattgacttgtgaattgaagctcgttttc

SEQ ID NO: 67762 - protein, 370 aa, Triticum aestivum
  peptide (1)..(370): Ceres Seq. ID no. 15219652
LENFQPCPSPAPATTAAAATSSRSAGVARPHPAAAAEAAMARQEAVGAATGVDFHLPDEILAVIPTDPYEQLDVARKITSMAIASRVSRLEADVARLRRDLADRDRGEADLRARLADSDARLLAALDENAKLVKERDTLALTAKKLSRNLAKLEAFKKQLMKSLSEDNLLQLSETGEDRDVDAENNGTARIPSWKDEVSSSHTSSNTSSRSTITESAQGYQFSITPYVAPQITPGSTPIISSSSGSPLAYSTGPSTPKFYSGPTSPTRSRSEDQSAFSSWNGSSHQYSAPVSPQRRSFAGRPRIDGKEFFRQARTRLSYEQFGAFLANIKEFNAQKQSREDTLSKAEEIFGTEHKDLYISFQNMLNRNQS

SEQ ID NO: 67763 - protein, 331 aa, Triticum aestivum
  peptide (1)..(331): Ceres Seq. ID no. 15219653
MARQEAVGAATGVDFHLPDEILAVIPTDPYEQLDVARKITSMAIASRVSRLEADVARLRRDLADRDRGEADLRARLADSDARLLAALDENAKLVKERDTLALTAKKLSRNLAKLEAFKKQLMKSLSEDNLLQLSETGEDRDVDAENNGTARIPSWKDEVSSSHTSSNTSSRSTITESAQGYQFSITPYVAPQITPGSTPIISSSSGSPLAYSTGPSTPKFYSGPTSPTRSRSEDQSAFSSWNGSSHQYSAPVSPQRRSFAGRPRIDGKEFFRQARTRLSYEQFGAFLANIKEFNAQKQSREDTLSKAEEIFGTEHKDLYISFQNMLNRNQS

SEQ ID NO: 67764 - protein, 290 aa, Triticum aestivum
  peptide (1)..(290): Ceres Seq. ID no. 15219654
MAIASRVSRLEADVARLRRDLADRDRGEADLRARLADSDARLLAALDENAKLVKERDTLALTAKKLSRNLAKLEAFKKQLMKSLSEDNLLQLSETGEDRDVDAENNGTARIPSWKDEVSSSHTSSNTSSRSTITESAQGYQFSITPYVAPQITPGSTPIISSSSGSPLAYSTGPSTPKFYSGPTSPTRSRSEDQSAFSSWNGSSHQYSAPVSPQRRSFAGRPRIDGKEFFRQARTRLSYEQFGAFLANIKEFNAQKQSREDTLSKAEEIFGTEHKDLYISFQNMLNRNQS

SEQ ID NO: 67765 - DNA, 2068 bp, Triticum aestivum
  misc_feature (1)..(2068): Ceres Seq. ID no. 14303297
accaaaccagcacacgtcaacggaacagcttagcaaaatccccaccaaggtgtagaatattccccaaaaccccacgtcccctccctctgccgccgctcccactccaccagtgtgccacccggatcgatcgatcgattgacagcgatggacacccacatcggctccgtcgacgggccgtcgccggcggcggtgaacggcgcggtcggctgcccggcgtccgcgccggggtgcccgatcatgtcctcccaccccgtggtcttcgccgtgcccggggacttcaacctcacgctgctcgaccacctcgtcgacgagcccgggctgcgcctcgtcggctgctgcaacgagctcaacgctggctacgcggccgacggctacgcgcgggcccgcggcgtcggcgcctgcgcggtcaccttcaccgtcggcggcctcagcgtgctcaacgccatcgccggcgcctacagcgagaacctgcccgtcatctgcatcgccggcgggcccaactccaacgactacggcaccaaccgcatcctccaccacaccatcggcatcccggacttctcgcaggagctgcgctgcttccagaccgtcacctgccaccaggcggtggtgaccaacctggacgacgcgcacgagcagatcgacacggccatcgccacggcgctcagggagagcaagccggtgtacctcagcatcagctgcaacctccccgggctacctcaccccaccttcacccgtgacccagtccctttcttcctcgcccccaagatgagcaacaagatggggctcgaggctgcagtggaggcaaccgtcgagttcctgaacaaggcggtgaagccagtgcttgtcgccggccccaaactgcgcgtggccaaggcggggaaggccttcgtcgaccttgtggacgccagtggctatgcctatgctataatgccatcggccaagggctttgtgccagagacgcacccccacttcctcggcacctactggggcgccgtcagcacggccttctgcgccgagatcgtcgagtcggccgacgcctacctcttcgcaggccccatcttcaacgactacagctctgttggctactcgttcctgctcaagaaggacaaggccatcatcgtgcagcctgagcgtgtcatcgtcgggaacggcccggcattcggctgcgtcatgatgaaggagtacctgtctgcattggccaagcgggttcagaagaacaccaccgcctacgagaactacaagaggatcttcgtgcctgagggccatccgctgaagggcgaggcgaacgagccgctgcgtgtcaatgtgctcttcaagcacatccaggacatgctgacgggtgatagtgcagtgctcgctgagaccggtgactcctggttcaactgccagaagctcaagctgcccgagggctgcgggtatgaattccaaatgcagtatggctcgattggatggtcagtgggtgcattgctcgggtacgcgcaaggggcgagtgacaagcgtgtcatagcctgcattggtgatgggagcttccaggtgacagcacaggatgtgtcaactatgctgcggtgcgaacagaacagcataatcttcctgatcaacaatggcgggtacacgatcgaggtggagatccacgacgggccttacaatgtcatcaagaactggaactacaccgcccttgtggaggccatccacaacggggagggcaaatgctggactgccaaggtgaagtgcgaggaggagctgacggcggcgatagagacggcgctgggggagaagaaggactctctgtgcttcatcgaggtgatcgcgcacaaggacgacaccagcaaagagcttctggaatggggctccagggtctctgctgccaactccaggccacccaacccccagtagaccaagcacgcctgcatcactagtagtcgcatccagcagcacgttgccatcaaataatgttgaacagtttatctttgctcttctgttatgttcttagttttgtgcctactagttacttgtgagctgtggccatcgcctgtgttctatcctgccaatgctaagaagatcatgagat

SEQ ID NO: 67766 - protein, 582 aa, Triticum aestivum
  peptide (1)..(582): Ceres Seq. ID no. 14303298
MDTHIGSVDGPSPAAVNGAVGCPASAPGCPIMSSHPVVFAVPGDFNLTLLDHLVDEPGLRLVGCCNELNAGYAADGYARARGVGACAVTFTVGGLSVLNAIAGAYSENLPVICIAGGPNSNDYGTNRILHHTIGIPDFSQELRCFQTVTCHQAVVTNLDDAHEQIDTAIATALRESKPVYLSISCNLPGLPHPTFTRDPVPFFLAPKMSNKMGLEAAVEATVEFLNKAVKPVLVAGPKLRVAKAGKAFVDLVDASGYAYAIMPSAKGFVPETHPHFLGTYWGAVSTAFCAEIVESADAYLFAGPIFNDYSSVGYSFLLKKDKAIIVQPERVIVGNGPAFGCVMMKEYLSALAKRVQKNTTAYENYKRIFVPEGHPLKGEANEPLRVNVLFKHIQDMLTGDSAVLAETGDSWFNCQKLKLPEGCGYEFQMQYGSIGWSVGALLGYAQGASDKRVIACIGDGSFQVTAQDVSTMLRCEQNSIIFLINNGGYTIEVEIHDGPYNVIKNWNYTALVEAIHNGEGKCWTAKVKCEEELTAAIETALGEKKDSLCFIEVIAHKDDTSKELLEWGSRVSAANSRPPNPQ

SEQ ID NO: 67767 - protein, 551 aa, Triticum aestivum
  peptide (1)..(551): Ceres Seq. ID no. 14303299
MSSHPVVFAVPGDFNLTLLDHLVDEPGLRLVGCCNELNAGYAADGYARARGVGACAVTFTVGGLSVLNAIAGAYSENLPVICIAGGPNSNDYGTNRILHHTIGIPDFSQELRCFQTVTCHQAVVTNLDDAHEQIDTAIATALRESKPVYLSISCNLPGLPHPTFTRDPVPFFLAPKMSNKMGLEAAVEATVEFLNKAVKPVLVAGPKLRVAKAGKAFVDLVDASGYAYAIMPSAKGFVPETHPHFLGTYWGAVSTAFCAEIVESADAYLFAGPIFNDYSSVGYSFLLKKDKAIIVQPERVIVGNGPAFGCVMMKEYLSALAKRVQKNTTAYENYKRIFVPEGHPLKGEANEPLRVNVLFKHIQDMLTGDSAVLAETGDSWFNCQKLKLPEGCGYEFQMQYGSIGWSVGALLGYAQGASDKRVIACIGDGSFQVTAQDVSTMLRCEQNSIIFLINNGGYTIEVEIHDGPYNVIKNWNYTALVEAIHNGEGKCWTAKVKCEEELTAAIETALGEKKDSLCFIEVIAHKDDTSKELLEWGSRVSAANSRPPNPQ

SEQ ID NO: 67768 - protein, 375 aa, Triticum aestivum
  peptide (1)..(375): Ceres Seq. ID no. 14303300
MSNKMGLEAAVEATVEFLNKAVKPVLVAGPKLRVAKAGKAFVDLVDASGYAYAIMPSAKGFVPETHPHFLGTYWGAVSTAFCAEIVESADAYLFAGPIFNDYSSVGYSFLLKKDKAIIVQPERVIVGNGPAFGCVMMKEYLSALAKRVQKNTTAYENYKRIFVPEGHPLKGEANEPLRVNVLFKHIQDMLTGDSAVLAETGDSWFNCQKLKLPEGCGYEFQMQYGSIGWSVGALLGYAQGASDKRVIACIGDGSFQVTAQDVSTMLRCEQNSIIFLINNGGYTIEVEIHDGPYNVIKNWNYTALVEAIHNGEGKCWTAKVKCEEELTAAIETALGEKKDSLCFIEVIAHKDDTSKELLEWGSRVSAANSRPPNPQ

SEQ ID NO: 67769 - DNA, 1232 bp, Triticum aestivum
  misc_feature (1)..(1232): Ceres Seq. ID no. 15226126
gaaagaatccaccttattgcccagtgcatcgttttttgactagtcctcgtcgtggttaacaccgcaccaaccaagctgaggagttgaagttcgagacattctcgactgccggctgccgccccctcttctacggctccacttccaagtgccaaagcggccacgccacaaccacaacaatggcgcttccagcgacctcgtggctgctcatctccctcctcctcgccgtgacgccagcccctagcacctgtgaggagagcgtgcgcatcgcgggcgcaggcggcttgctgcagtgctacccggcgccggcgctcaccaacgccactaacggcacggcgtttcgcgccaccctgctcccgctcctcggctctctcccctccgccgccgcgcccacgggcttcgcctccctacggtccgtcactcgcggggagcgcgcgttggcgcgggggctctgcttcggcaactccacggtgccgtccgagtgcgcccggtgcctgtccgccgcggctgggaacctcacagctggctgcggcgccaccagccggcgccccggcatctggagcgaccggtgcttcgtcggctacgccgacaccaacgcatcctcgtcaaacgaagacggcttccgcgcgcgcgtcctcctcccgggcgacgacgccgtccctcgctctgtggccagcaccaaatccttctactacgcccacctgcacgatgtactcgtcgccatggagaaggacgtggcgcggcgcgcggccgcgaacatctccgggccgcggatgctggccacagcggaggagaccaactccgacagcgcggtgagcagaacagtgcacgttctggcgcagtgcgggagggaccgcacggcggcggcctgcgtccggtgcctacagaactcggtgcaggccgtgcactgggacctcaacgctgcccgcgtcgacggtggcgtggcggccgcggtggtgggcttcaactgctacatgcggtttgaggtctccactgcagtgggtggcgacactatcactggcgttatgctactggtggcattcgtgctatgtatatttacaggaggcgcatgtgggtgtttgtgtcctgtaccctgatgaagttgagaaagaaggataaaattcgttgcaacgatatcagagatcaggaacgcaataaaaccttatgttccaattaagtttcttattgcatactctgtatatcttaatgggaaacgcttcctctcagtagtctgc

SEQ ID NO: 67770 - protein, 305 aa, Triticum aestivum
  peptide (1)..(305): Ceres Seq. ID no. 15226127
MALPATSWLLISLLLAVTPAPSTCEESVRIAGAGGLLQCYPAPALTNATNGTAFRATLLPLLGSLPSAAAPTGFASLRSVTRGERALARGLCFGNSTVPSECARCLSAAAGNLTAGCGATSRRPGIWSDRCFVGYADTNASSSNEDGFRARVLLPGDDAVPRSVASTKSFYYAHLHDVLVAMEKDVARRAAANISGPRMLATAEETNSDSAVSRTVHVLAQCGRDRTAAACVRCLQNSVQAVHWDLNAARVDGGVAAAVVGFNCYMRFEVSTAVGGDTITGVMLLVAFVLCIFTGGACGCLCPVP

SEQ ID NO: 67771 - DNA, 1101 bp, Triticum aestivum
  misc_feature (1)..(1101): Ceres Seq. ID no. 15173621
gccaagagcacttgccaatcacttgcaccccaaaagaagtttttgccgagagcacttgccaatcacttgcacctcaaaaggctttcttgctgccacagctgaatccatggcgaaatgcgggctgctgctcctgttcattgcgttcctcttgccggcggcacgtgcgacatcgtgccaccccgatgacctccgtgcgctacggggcttcgccggaaacctcagcggtggggctgtcctcctccgtgctgcctggtccggtgcctcctgctgcgtctgggaaggcgtgaactgcgatggcactagcggccgtgtcacggcgctgcggctccctgggcacggccttgtggggctcatcccaggagcatccttggcaggccttgcacggctagaggagctcaaccttgccaacaacaaactggtcggcaccatcccatcatggattggcgagcttgatcacctttgctacttggatctgtcggataattcattggttggcgaggtacccaagagtttgatacggctcaagggtcttgtcatcgctggtcattcactaggtatggtttttactaacatgccattgtatgtgaagcgtaatagaagaacacttgatgaacaaccaaatacaatatctgggagcaacaacactgtcagatctgggagcaccaacgttgtttctgggaatgacaacactgtcatatccgggaataacaacaatgtggctgggagcaacaacactgtcataaccgggaacgacaataccgtaactggtagcaaccatgttgtatctggggacaaacatatcgtgactgacaataacaatgccgtatccgggaacgacaataatgtatccgggagcttccataccgtatccgggagccacaatactgtatctgggaccaacaacactgtatctgggagcaaccatgtcgtatctgggagcaacaaggtcgtaggagatgaatgatttgtaagtgaattgtttgcatcttccttgacggagctcatgtggttgtccaatttcagtgtagcccacaatcacttgggtggggtcaatagtgttatgtaacttcatggatatatatagcatcttatttctacttt

SEQ ID NO: 67772 - protein, 320 aa, Triticum aestivum
  peptide (1)..(320): Ceres Seq. ID no. 15173622
PRALANHLHPKRSFCREHLPITCTSKGFLAATAESMAKCGLLLLFIAFLLPAARATSCHPDDLRALRGFAGNLSGGAVLLRAAWSGASCCVWEGVNCDGTSGRVTALRLPGHGLVGLIPGASLAGLARLEELNLANNKLVGTIPSWIGELDHLCYLDLSDNSLVGEVPKSLIRLKGLVIAGHSLGMVFTNMPLYVKRNRRTLDEQPNTISGSNNTVRSGSTNVVSGNDNTVISGNNNNVAGSNNTVITGNDNTVTGSNHVVSGDKHIVTDNNNAVSGNDNNVSGSFHTVSGSHNTVSGTNNTVSGSNHVVSGSNKVVGDE

SEQ ID NO: 67773 - protein, 285 aa, Triticum aestivum
  peptide (1)..(285): Ceres Seq. ID no. 15173623
MAKCGLLLLFIAFLLPAARATSCHPDDLRALRGFAGNLSGGAVLLRAAWSGASCCVWEGVNCDGTSGRVTALRLPGHGLVGLIPGASLAGLARLEELNLANNKLVGTIPSWIGELDHLCYLDLSDNSLVGEVPKSLIRLKGLVIAGHSLGMVFTNMPLYVKRNRRTLDEQPNTISGSNNTVRSGSTNVVSGNDNTVISGNNNNVAGSNNTVITGNDNTVTGSNHVVSGDKHIVTDNNNAVSGNDNNVSGSFHTVSGSHNTVSGTNNTVSGSNHVVSGSNKVVGDE

SEQ ID NO: 67774 - DNA, 1440 bp, Triticum aestivum
  misc_feature (1)..(1440): Ceres Seq. ID no. 13662367
atcagaaatccaaagccaaaaaccactctctaaacccgacacaaaaactcaagcccgaacccaagaaagcttccttcccgagacgagatcaagatggctcccgagctggccggcaagatgaccgccaaggccgccgtggcggcggccaagcccgcgacgaaggcgtacgtgacgttcctggcgggggcgggggactactggatgggcgtggtggggcttgccaagggcctgcgcaaggttgggtcggcctacccgctggtggtggccgtgctgcccgacgtgcccgagctccaccgcaagatcctcgtctcccagggctgcatcgtccgcgagatcgctcccgtgtacccgcccgagaaccacacccagtttgccatggcctactacgtcatcaactactccaagctccgcatctgggagtttgtggagtacgagaggatggtgtacctcgacgccgacatccaggtgttcgacaacatcgacgagttgtttgatctgcccaaggggcatttctacgccgtgatggactgcttctgcgagaagacgtggagccacaccccgcagtaccagatcggctactgccagcagtgtcccgacaaggtgacgtggccggccgccgagatgggcccgccgccggcgctctacttcaacgccggcatgttcgtgcacgagcccagcatggccaccgccaaggcgctccttgacaccctccgcgtgacgccgacgaccccattcgcggagcaggatttcctcaacatgttcttcagggagcagtacaagccgatcccgctggtctacaaccttgttctggcgatgctctggaggcacccggagaacgtgcagctggagaaggtcaaggtggtgcactactgcgctgcgggatcgaagccatggaggttcacgggcaaagaggagaacatggacagggaggacatcaagatcctcgccaggaactggtgggacatctacaacgacgagagcctcgatttcaagggcctgcccgccctggccgccgacgccgacgagctcgaggcggcggccaagaagccgctccgcgcggcgcttgcggaagccggcaccgtcaagtacgtcaccgcgccctcggctgcgtgatccccggttgcctagctccggcccgtgccactgtggtcatcaaagcaggaagccgggcacctataagcatttgcattttggtattttgcgtctgttcggttccaagttagcagtatcatttcaagtttaagataggatcgaaagagtccacgtatgtgaatatcctcgaccctttgtgaagtagagtgctgagtcgtcctgtatgaaagaattatgtgtgaatcaataggaagctttaaaaattatggcatatatttttcacgtcaaaaaaaaaaaaaaaaaaaaaaaaggagggggggggagggaaaaaaaaaaaaaaaagagctt

SEQ ID NO: 67775 - protein, 339 aa, Triticum aestivum
  peptide (1)..(339): Ceres Seq. ID no. 13662368
MAPELAGKMTAKAAVAAAKPATKAYVTFLAGAGDYWMGVVGLAKGLRKVGSAYPLVVAVLPDVPELHRKILVSQGCIVREIAPVYPPENHTQFAMAYYVINYSKLRIWEFVEYERMVYLDADIQVFDNIDELFDLPKGHFYAVMDCFCEKTWSHTPQYQIGYCQQCPDKVTWPAAEMGPPPALYFNAGMFVHEPSMATAKALLDTLRVTPTTPFAEQDFLNMFFREQYKPIPLVYNLVLAMLWRHPENVQLEKVKVVHYCAAGSKPWRFTGKEENMDREDIKILARNWWDIYNDESLDFKGLPALAADADELEAAAKKPLRAALAEAGTVKYVTAPSAA

SEQ ID NO: 67776 - protein, 331 aa, Triticum aestivum
  peptide (1)..(331): Ceres Seq. ID no. 13662369
MTAKAAVAAAKPATKAYVTFLAGAGDYWMGVVGLAKGLRKVGSAYPLVVAVLPDVPELHRKILVSQGCIVREIAPVYPPENHTQFAMAYYVINYSKLRIWEFVEYERMVYLDADIQVFDNIDELFDLPKGHFYAVMDCFCEKTWSHTPQYQIGYCQQCPDKVTWPAAEMGPPPALYFNAGMFVHEPSMATAKALLDTLRVTPTTPFAEQDFLNMFFREQYKPIPLVYNLVLAMLWRHPENVQLEKVKVVHYCAAGSKPWRFTGKEENMDREDIKILARNWWDIYNDESLDFKGLPALAADADELEAAAKKPLRAALAEAGTVKYVTAPSAA

SEQ ID NO: 67777 - protein, 303 aa, Triticum aestivum
  peptide (1)..(303): Ceres Seq. ID no. 13662370
MGVVGLAKGLRKVGSAYPLVVAVLPDVPELHRKILVSQGCIVREIAPVYPPENHTQFAMAYYVINYSKLRIWEFVEYERMVYLDADIQVFDNIDELFDLPKGHFYAVMDCFCEKTWSHTPQYQIGYCQQCPDKVTWPAAEMGPPPALYFNAGMFVHEPSMATAKALLDTLRVTPTTPFAEQDFLNMFFREQYKPIPLVYNLVLAMLWRHPENVQLEKVKVVHYCAAGSKPWRFTGKEENMDREDIKILARNWWDIYNDESLDFKGLPALAADADELEAAAKKPLRAALAEAGTVKYVTAPSAA

SEQ ID NO: 67778 - DNA, 1446 bp, Triticum aestivum
  misc_feature (1)..(1446): Ceres Seq. ID no. 13595926
acagacacccaacggcatcatcatcatcaccgccaccgccacttcttctagatagctcctggtaccgccgtgccgtcattagccgcgggagcagagcctggacgagtcccagatcggtcggcaccgggaggcattcaggtaggcgggcaggcaggagtgggagctagattaagcgcagtgcgccggcatgggcgccgggattaggatcttggcggcggcgctcctggcgctcgcggccgtcggcggcgcgacggcgcagctccggcagggctactactccgccagctgccccaacgtggaggccatcgtgcaggccgcggtcgccctcaaggtccagcagacgcccgtcgccgtcggtgccaccgtccgcctcttcttccacgactgcttcgtccagggatgcgacgcgtcggtcatcatcgtgtcgtcggggaacaacacggcggagaaggaccacgtgagcaacctctccctcgccggcgacggcttcgacaccgtcatcaaggccaaggcggccgtggacacgcagtgccccagccccaacctggtgtcctgcgcggacatcctcaccatggccacccgggacgtcatcagcctggccggcggcccggcgtaccccgtggagctggggaggctggacgggctggtgtcgacggcgagcaacgtggacgggaacctgccgccgccgtccttcaacctcgaccagctgacggccatgttcgccgccaacaacctgtcccaggsccgacatgattgcgctctccgcggcgcacacagtggggttcgcgcactgcgggacgttcacgggccggatccagacggcggcggtggacccgacgatggaccccgggtacgcgtcgcagctgctggcggcgtgcccggccggggtggaccccaacgtggcgctggagatcgacccggtgacgccgcacgccttcgacaaccagtacttcatcaacctgcagaaggggatgggcctgctcacctccgaccaggtcctctacgccgacgtccggtcgcgccccaccgtcgacgcctgggcggccaacagctccgacttccaggccgccttcgtcgccgccatgaccaacctcggccgcgtcggggtcaagacggacccggcgctcggcaacatccgccgcgactgcgccgtgctcaacagctgattggttggttattgcattcgctgaagctggagaccaagatgcagtacaacctcgatcgatgcttggggatgtcatcaactgttcatagttagctgggccgctcgatggggtggcgctgagattataatacaagtagctttcaggacacaagtctagttctaatccatcagaaggttaatggttgaggagtctgttgagttgagcatcatcgattacctagagtcgaatgtattcaatgtgtgcgtaatattggagcgagatttattcgaacattttctcc

SEQ ID NO: 67779 - protein, 356 aa, Triticum aestivum
  peptide (1)..(356): Ceres Seq. ID no. 15221701
  misc_feature (186)..(186): Xaa is any aa, unknown or other
MGAGIRILAAALLALAAVGGATAQLRQGYYSASCPNVEAIVQAAVALKVQQTPVAVGATVRLFFHDCFVQGCDASVIIVSSGNNTAEKDHVSNLSLAGDGFDTVIKAKAAVDTQCPSPNLVSCADILTMATRDVISLAGGPAYPVELGRLDGLVSTASNVDGNLPPPSFNLDQLTAMFAANNLSQXRHDCALRGAHSGVRALRDVHGPDPDGGGGPDDGPRVRVAAAGGVPGRGGPQRGAGDRPGDAARLRQPVLHQPAEGDGPAHLRPGPLRRRPVAPHRRRLGGQQLRLPGRLRRRHDQPRPRRGQDGPGARQHPPRLRRAQQLIGWLLHSLKLETKMQYNLDRCLGMSSTVHS

SEQ ID NO: 67780 - protein, 228 aa, Triticum aestivum
  peptide (1)..(228): Ceres Seq. ID no. 15221702
  misc_feature (58)..(58): Xaa is any aa, unknown or other
MATRDVISLAGGPAYPVELGRLDGLVSTASNVDGNLPPPSFNLDQLTAMFAANNLSQXRHDCALRGAHSGVRALRDVHGPDPDGGGGPDDGPRVRVAAAGGVPGRGGPQRGAGDRPGDAARLRQPVLHQPAEGDGPAHLRPGPLRRRPVAPHRRRLGGQQLRLPGRLRRRHDQPRPRRGQDGPGARQHPPRLRRAQQLIGWLLHSLKLETKMQYNLDRCLGMSSTVHS

SEQ ID NO: 67781 - protein, 180 aa, Triticum aestivum
  peptide (1)..(180): Ceres Seq. ID no. 15221703
  misc_feature (10)..(10): Xaa is any aa, unknown or other
MFAANNLSQXRHDCALRGAHSGVRALRDVHGPDPDGGGGPDDGPRVRVAAAGGVPGRGGPQRGAGDRPGDAARLRQPVLHQPAEGDGPAHLRPGPLRRRPVAPHRRRLGGQQLRLPGRLRRRHDQPRPRRGQDGPGARQHPPRLRRAQQLIGWLLHSLKLETKMQYNLDRCLGMSSTVHS

SEQ ID NO: 67782 - DNA, 1515 bp, Triticum aestivum
  misc_feature (1)..(1515): Ceres Seq. ID no. 12465151
accgatcattttggcgggagagcagcagttggccgcctccactctccactttcccgcgcagagtaaatcagcaatggacggcggctccggctcctccttccaggccgtagcggcggctgccgccatggagatggaggagtacctcaactggaagaagaacgcgccggtgctctacgacctcgtcatgtcccacccgctcgagtggccctcgctcaccgtccagtggctcccctcggggtcgccggcctccgcccgctcccaccgcctcgtcctcggcacccacgcctccgacgactccgccaaccacctcatgctcgtcgacgccgtgctcccgctcccgccgcgcctggccgccgcggccgccgccgaggaccgcgccgtcccggccccgtccgtgtccatcggccgctcggcgccgcatcagggcgaggtcaaccgcgcccggtgcatgccgcagcggccgtacaccgtggccaccaagacctgcgtcgatgaggtgcacgtgtaccacctcggggaggacggtgagaagggcggcgcggatgtcgtgctcaggggccatggcgcggaggggtatgggctggcgtggagcgccacgaaggaggggttcctgctgagcggctcgtatgataagaagatttgcctgtgggatctcaaggccgggaatggagccccggttctggacgcgcagcaggtgtttgaggctcatgaggatgttgttgaagatgttgcttggcaccttaaggatgaaaacctatttggatctgttggcgatgactgcaagttcatgatgtgggacctgcgtacgaacaaaccagaacaatctatagttgcgcaccaaaaggaagttaactctctgtccttcaatccatttaatgaatggatcttggctacagcatctggtgatggaactattaagctgtttgaccagcgaaaactatctagaagcttgcatgctttcgacaaccatgagggcgaggttttccaggttgagtggaatccaaacatggagactgtattagcatcccatgctgcagacaaaagggtgatgatatgggacgttaacaggatcggcgaggagcaggcggacgaggacgcgggcgacgggccaccggagctgcttttcgtccacggcgggcacacggccaagatctcggagctgtcgtggaaccccagcgagaagtgggtggtggccagcgtggcggaggacaacgtgctgcagatctgggagatggccgagagcatatacagcgacgacaacagcaacaacgccaacagcgcctcgtgcctgtccacataagaagacgccgccaaccaacttcttccctgatgtgtggacgatggccgatggggacatggctcgttcgtagtctttgggtggacgcgtcgcgtgcggtttacttgtagtgcctcgtgcggtttcgtcgcttaattagcagctgctgctatcgtttggcgcctagatcctgtagacatggatggatggagaagtgactctggaatatttgtgcgtcc

SEQ ID NO: 67783 - protein, 432 aa, Triticum aestivum
  peptide (1)..(432): Ceres Seq. ID no. 12465152
PIILAGEQQLAASTLHFPAQSKSAMDGGSGSSFQAVAAAAAMEMEEYLNWKKNAPVLYDLVMSHPLEWPSLTVQWLPSGSPASARSHRLVLGTHASDDSANHLMLVDAVLPLPPRLAAAAAAEDRAVPAPSVSIGRSAPHQGEVNRARCMPQRPYTVATKTCVDEVHVYHLGEDGEKGGADVVLRGHGAEGYGLAWSATKEGFLLSGSYDKKICLWDLKAGNGAPVLDAQQVFEAHEDVVEDVAWHLKDENLFGSVGDDCKFMMWDLRTNKPEQSIVAHQKEVNSLSFNPFNEWILATASGDGTIKLFDQRKLSRSLHAFDNHEGEVFQVEWNPNMETVLASHAADKRVMIWDVNRIGEEQADEDAGDGPPELLFVHGGHTAKISELSWNPSEKWVVASVAEDNVLQIWEMAESIYSDDNSNNANSASCLST

SEQ ID NO: 67784 - protein, 408 aa, Triticum aestivum
  peptide (1)..(408): Ceres Seq. ID no. 12465153
MDGGSGSSFQAVAAAAAMEMEEYLNWKKNAPVLYDLVMSHPLEWPSLTVQWLPSGSPASARSHRLVLGTHASDDSANHLMLVDAVLPLPPRLAAAAAAEDRAVPAPSVSIGRSAPHQGEVNRARCMPQRPYTVATKTCVDEVHVYHLGEDGEKGGADVVLRGHGAEGYGLAWSATKEGFLLSGSYDKKICLWDLKAGNGAPVLDAQQVFEAHEDVVEDVAWHLKDENLFGSVGDDCKFMMWDLRTNKPEQSIVAHQKEVNSLSFNPFNEWILATASGDGTIKLFDQRKLSRSLHAFDNHEGEVFQVEWNPNMETVLASHAADKRVMIWDVNRIGEEQADEDAGDGPPELLFVHGGHTAKISELSWNPSEKWVVASVAEDNVLQIWEMAESIYSDDNSNNANSASCLST

SEQ ID NO: 67785 - protein, 391 aa, Triticum aestivum
  peptide (1)..(391): Ceres Seq. ID no. 12465154
MEMEEYLNWKKNAPVLYDLVMSHPLEWPSLTVQWLPSGSPASARSHRLVLGTHASDDSANHLMLVDAVLPLPPRLAAAAAAEDRAVPAPSVSIGRSAPHQGEVNRARCMPQRPYTVATKTCVDEVHVYHLGEDGEKGGADVVLRGHGAEGYGLAWSATKEGFLLSGSYDKKICLWDLKAGNGAPVLDAQQVFEAHEDVVEDVAWHLKDENLFGSVGDDCKFMMWDLRTNKPEQSIVAHQKEVNSLSFNPFNEWILATASGDGTIKLFDQRKLSRSLHAFDNHEGEVFQVEWNPNMETVLASHAADKRVMIWDVNRIGEEQADEDAGDGPPELLFVHGGHTAKISELSWNPSEKWVVASVAEDNVLQIWEMAESIYSDDNSNNANSASCLST

SEQ ID NO: 67786 - DNA, 1824 bp, Triticum aestivum
  misc_feature (1)..(1824): Ceres Seq. ID no. 14301912
ctcccaaacccgacactccaacccctaccgagaggtgcacgaggaggccgcccaccaccaccaccaccaccacccaccatggccatggcgacggcgctccgcaagctctccgcccgcggccagcccctctcccgcctcacgccgctctactccatggcgtctctgccggcgacggaggagagatccgcagtcacctggcccaagcagttgaacgcgccgctggaggaggtcgaccccgagattgccgacatcatcgagctcgagaaggcccgccaatggaaggggctggagctcatcccgtcggagaacttcacctccctctcggtgatgcaggcggtgggatccgtcatgaccaacaagtacagcgaggggtaccccggcgcgagatactacggtggaaacgaatacattgatatggccgagacgctgtgccagaaacgtgctttggaggctttcaatttggacccagagaagtggggagtgaatgtgcaacctctatcgggttcacctgccaacttccatgtatacactgctctgctgaagccacatgatagaattatggctctggatcttcctcacggtggacatctttcccatggttaccagactgacacaaagaaaatctcagcagtttcaatattctttgagacaatgccttacagactggatgaaagcactggcttgattgattatggccagttggagaaaagtgccgttctttttaggccaaagttgattgttgctggtgctagtgcatatgcccgcctttatgattataaccgcatgcggaagatctgtgacaagcagaaggcagttcttctcgcagacatggcacatatcagtgggctagttgctgctggtgtcattccgtctccttttgagtatgcagatgtggtgactaccactacccacaagtctctccgtggtccacgtggagccatgatctttttccggaagggggtgaaagaaataaacaaacaagggaaggaggttaagtatgattttgaggacaaaatcaatgctgctgtcttcccaggtctgcaaggtggaccccataaccatactattactggcctggccgttgcgcttaagcaggcaactactcaggagtacagagcttatcaagagcaagttatgagtaactctgctagatttgctgagagcttgacttcaaaaggttacgacattgtctctggtgggactgataaccatttagttttggtgaacctcaagaaaaagggaatagatggttcacgtgtggagaaggttttagaaaatgtgcatattgcagcaaacaagaacacggttcctggtgatgtttcagctatggtacccggaggcatcaggatgggaacccccgcacttacatcaagaggatttgttgaggaggacttcgccaaggttgctgacttcttcgattcggcagtgaacttggccttgaaggttaaagctgcagcagcaggtaccaaactgaaggactttgttgccacattgcaatccgacagcaacatccaagctgaaattgcaaagcttcgccacgatgtggaggaatatgcgaaacaattcccaacaattggattcgagaaggagaccatgaagtacaagaactaagaactgctatgtttcaacagcaaggaagcaaacaagaagcacagtttgaggacaagtcatgtaaacaatagatccacgatgaagcgccaccttatgtaaaagtaatccaatcattttacagaatatgggaactttgtcgatagtttcttattgcaggcacatactgtaagatgcttcgctgatatgctatatgaaccgccatccttcttggac

SEQ ID NO: 67787 - protein, 536 aa, Triticum aestivum
  peptide (1)..(536): Ceres Seq. ID no. 14301913
LPNPTLQPLPRGARGGRPPPPPPPPTMAMATALRKLSARGQPLSRLTPLYSMASLPATEERSAVTWPKQLNAPLEEVDPEIADIIELEKARQWKGLELIPSENFTSLSVMQAVGSVMTNKYSEGYPGARYYGGNEYIDMAETLCQKRALEAFNLDPEKWGVNVQPLSGSPANFHVYTALLKPHDRIMALDLPHGGHLSHGYQTDTKKISAVSIFFETMPYRLDESTGLIDYGQLEKSAVLFRPKLIVAGASAYARLYDYNRMRKICDKQKAVLLADMAHISGLVAAGVIPSPFEYADVVTTTTHKSLRGPRGAMIFFRKGVKEINKQGKEVKYDFEDKINAAVFPGLQGGPHNHTITGLAVALKQATTQEYRAYQEQVMSNSARFAESLTSKGYDIVSGGTDNHLVLVNLKKKGIDGSRVEKVLENVHIAANKNTVPGDVSAMVPGGIRMGTPALTSRGFVEEDFAKVADFFDSAVNLALKVKAAAAGTKLKDFVATLQSDSNIQAEIAKLRHDVEEYAKQFPTIGFEKETMKYKN

SEQ ID NO: 67788 - protein, 510 aa, Triticum aestivum
  peptide (1)..(510): Ceres Seq. ID no. 14301914
MAMATALRKLSARGQPLSRLTPLYSMASLPATEERSAVTWPKQLNAPLEEVDPEIADIIELEKARQWKGLELIPSENFTSLSVMQAVGSVMTNKYSEGYPGARYYGGNEYIDMAETLCQKRALEAFNLDPEKWGVNVQPLSGSPANFHVYTALLKPHDRIMALDLPHGGHLSHGYQTDTKKISAVSIFFETMPYRLDESTGLIDYGQLEKSAVLFRPKLIVAGASAYARLYDYNRMRKICDKQKAVLLADMAHISGLVAAGVIPSPFEYADVVTTTTHKSLRGPRGAMIFFRKGVKEINKQGKEVKYDFEDKINAAVFPGLQGGPHNHTITGLAVALKQATTQEYRAYQEQVMSNSARFAESLTSKGYDIVSGGTDNHLVLVNLKKKGIDGSRVEKVLENVHIAANKNTVPGDVSAMVPGGIRMGTPALTSRGFVEEDFAKVADFFDSAVNLALKVKAAAAGTKLKDFVATLQSDSNIQAEIAKLRHDVEEYAKQFPTIGFEKETMKYKN

SEQ ID NO: 67789 - protein, 508 aa, Triticum aestivum
  peptide (1)..(508): Ceres Seq. ID no. 14301915
MATALRKLSARGQPLSRLTPLYSMASLPATEERSAVTWPKQLNAPLEEVDPEIADIIELEKARQWKGLELIPSENFTSLSVMQAVGSVMTNKYSEGYPGARYYGGNEYIDMAETLCQKRALEAFNLDPEKWGVNVQPLSGSPANFHVYTALLKPHDRIMALDLPHGGHLSHGYQTDTKKISAVSIFFETMPYRLDESTGLIDYGQLEKSAVLFRPKLIVAGASAYARLYDYNRMRKICDKQKAVLLADMAHISGLVAAGVIPSPFEYADVVTTTTHKSLRGPRGAMIFFRKGVKEINKQGKEVKYDFEDKINAAVFPGLQGGPHNHTITGLAVALKQATTQEYRAYQEQVMSNSARFAESLTSKGYDIVSGGTDNHLVLVNLKKKGIDGSRVEKVLENVHIAANKNTVPGDVSAMVPGGIRMGTPALTSRGFVEEDFAKVADFFDSAVNLALKVKAAAAGTKLKDFVATLQSDSNIQAEIAKLRHDVEEYAKQFPTIGFEKETMKYKN

SEQ ID NO: 67790 - DNA, 1792 bp, Triticum aestivum
  misc_feature (1)..(1792): Ceres Seq. ID no. 14308053
aaagaatttcagacagctaaacaaactcggccgcccagcttcctcctcctcctcctccccctccttcccctcgacctgctggtgaccgccgtctgccttctccgacgaatctccccgcgagttcggcctagctccacagggagtctcgaatctcccctttgccgctgagtcgaggaagaagatcggctcgggttcgcttgctcgttcgctcgaggacgagattcagcggcgggactgattgattgattgggcgtgagcgagagcggatgaaggggaagggcggggcgctcgacaggaggtcgtctgcgaggtggaggctgctgctgctctgcgccttcagctttgggctcggcatgctcttcaccaaccgcttctggacagcaccaagtaccaataaccacatcatgtcccaacacaggagacaagaccaggagttgcaacttgtgtcagaggattgcaatacaaagaggaagcatggggagcacaaggatataatgggagaggtaaccaggacccatgaagccatacaattgttggataagtcaatctcaacgctgcagatggagcttgcagcaaagcgaagcacgttggaactggtccgttctggtgtgccagtaacttcagaaactagtcaaccaaggaaaaaagcattcgttgtcgttggagttaacaccgctttcagtagccgcaagcgtcgtgattcagtcagggagacatggatgcctcaaggtgagaagctgctgcagcttgaagaacagaagggaatagttatccgcttcactataggccatagtgctacatccaatagtatattggacaaagcaatagatgcagaagatgaacagcatcacgactttcttagactggaccatgtcgaggggtatcatgaactctccgcaaagacaaaaatcttcttctccacgtccgtgggcatttgggatgctgactttttcgtcaaggtcgatgatgatgtgcatgtgaacttaggaatgcttgccactacccttgcgaggcataaagcgaaaccaagaacttatattggctgcatgaagtcaggcccagttctggctgacaagaatctgaagtaccatgaacctgaggcctggaaatttggggaggatggaaacaagtattttcgccatgctactggacagatatatgctatctcaaaagatcttgcgacctatatctcaataaatcaacctatcttacacaagtatgcgaacgaagatgtatcacttgggtcatggtttatcgggttagaggttaatcatattgatgaaaggaacatgtgctgcggaactccaccagactgtgagtggaaagggcaagctggcaatatctgcgtggcatcctttgattggagctgcagcggcatatgcaagtccgtcgagagactcaaggatgtacatgctcgatgcggcgaaggcgattcttctgtttggagtgatctaatctagctaataccctccctggcgtaaatatgtagcatcctcagtaaaccctgacgatcgtgcctcagtggctacaactgaaatgaccgaaattgcacaacaggtccgcagatggactatatttctggtagttcggtctgaggcaacacatgtagtgtagatgatacttgttcagtcgttgagagatctcagtagatgggaattgctttgtgccatcacctgtgacgtcagtagtgttagaagagagaccaaagcgagcgagttacacagctgctgtgtaccacagattaggggaaaacatctactgcaaattttgatcaattcttttgatgtcggtt

SEQ ID NO: 67791 - protein, 397 aa, Triticum aestivum
  peptide (1)..(397): Ceres Seq. ID no. 14308054
MKGKGGALDRRSSARWRLLLLCAFSFGLGMLFTNRFWTAPSTNNHIMSQHRRQDQELQLVSEDCNTKRKHGEHKDIMGEVTRTHEAIQLLDKSISTLQMELAAKRSTLELVRSGVPVTSETSQPRKKAFVVVGVNTAFSSRKRRDSVRETWMPQGEKLLQLEEQKGIVIRFTIGHSATSNSILDKAIDAEDEQHHDFLRLDHVEGYHELSAKTKIFFSTSVGIWDADFFVKVDDDVHVNLGMLATTLARHKAKPRTYIGCMKSGPVLADKNLKYHEPEAWKFGEDGNKYFRHATGQIYAISKDLATYISINQPILHKYANEDVSLGSWFIGLEVNHIDERNMCCGTPPDCEWKGQAGNICVASFDWSCSGICKSVERLKDVHARCGEGDSSVWSDLI

SEQ ID NO: 67792 - protein, 368 aa, Triticum aestivum
  peptide (1)..(368): Ceres Seq. ID no. 14308055
MLFTNRFWTAPSTNNHIMSQHRRQDQELQLVSEDCNTKRKHGEHKDIMGEVTRTHEAIQLLDKSISTLQMELAAKRSTLELVRSGVPVTSETSQPRKKAFVVVGVNTAFSSRKRRDSVRETWMPQGEKLLQLEEQKGIVIRFTIGHSATSNSILDKAIDAEDEQHHDFLRLDHVEGYHELSAKTKIFFSTSVGIWDADFFVKVDDDVHVNLGMLATTLARHKAKPRTYIGCMKSGPVLADKNLKYHEPEAWKFGEDGNKYFRHATGQIYAISKDLATYISINQPILHKYANEDVSLGSWFIGLEVNHIDERNMCCGTPPDCEWKGQAGNICVASFDWSCSGICKSVERLKDVHARCGEGDSSVWSDLI

SEQ ID NO: 67793 - protein, 351 aa, Triticum aestivum
  peptide (1)..(351): Ceres Seq. ID no. 14308056
MSQHRRQDQELQLVSEDCNTKRKHGEHKDIMGEVTRTHEAIQLLDKSISTLQMELAAKRSTLELVRSGVPVTSETSQPRKKAFVVVGVNTAFSSRKRRDSVRETWMPQGEKLLQLEEQKGIVIRFTIGHSATSNSILDKAIDAEDEQHHDFLRLDHVEGYHELSAKTKIFFSTSVGIWDADFFVKVDDDVHVNLGMLATTLARHKAKPRTYIGCMKSGPVLADKNLKYHEPEAWKFGEDGNKYFRHATGQIYAISKDLATYISINQPILHKYANEDVSLGSWFIGLEVNHIDERNMCCGTPPDCEWKGQAGNICVASFDWSCSGICKSVERLKDVHARCGEGDSSVWSDLI

SEQ ID NO: 67794 - DNA, 1533 bp, Triticum aestivum
  misc_feature (1)..(1533): Ceres Seq. ID no. 14302824
ctctttcggtcttggaatccttcctccctcccttccctccgtgtcgcccgcgctccgcctaccggatcgcaattccgcatcgccccgccgcagccccagccccagccccggccaggcccccatggcgaggcgatccgccccgctcctccgccgcctggtctcctccgcgccgcccctcccgggccacggcggcggcgcgcgccgcacggtcacctacatgccccgcccgggcgatggcaccccgcgccccgtcacgctcatcccgggcgacggcatcggacccctcgtcaccggcgccgtggagcaggtcatggaggccatgcacgcgcccgtctacttcgagtcctacgacgtccacggcgacatgcccgccgtgccgcccgccgtcatcgaatccatccgccgcaacaaggtctgcctcaagggcggcctcgccacccccgtcggcgggggcgtctcctccctcaacatgcagctccgcaaggagctcgacctcttcgcctccctcgtcaactgcgccaacgtccccggcctgcccaccaggcaccagaacgtcgacatcgtcgtcatcagggagaacaccgagggcgagtactcgggcctcgagcacgaggtcgtcccgggggtcgtcgagagcctcaaggtgatcacgaagttttgctccgagaggattgccaaatatgccttcgagtatgcttaccttaactaccggaagaaagtcacagcagtgcataaagcaaacatcatgaaacttgctgatggtttgttcttggagtcttgccgtgagattgctgctaaatatccaagtattgagtataatgaaatcattgttgacaactgctgcatgcaacttgtttcaaggcctgagcaatttgatgttatggttacgcctaacctttacggcaatttggttgccaacacagctgcaggtcttgttggaggaacaggtgtcatgccaggaggtaatgtaggtcaggatcatgccatcttcgagcaaggtgcttctgcaggaaatgtgggaaatgacaatcttgtagagcagcagaaagcaaaccctgtcgccctgctcctgtcgtctgctatgatgttgaggcatttgcagttcccgtcgttcgctgaccgtctggaaactgcggtgaagcgggtcattgcagatggcaagtacaggacaaaggatctgggcggcaccagcaccacccaggaagttactgatgcagtgatcgctaatctggattaggtacctgatgcacgcctgaagaatcgattcttttggaggactggtttaaaggtcccaactcctgagtgctattttttccgtacagcattagatcggcaattatgtttgagaaataattgaggaacccacgaggattattcttcccactatactttgtagcaaggcaaaacaccttgtgttgcagaggggatagctggctaccttaaatttaaacggcatgtattgaaagtttattctcagttcttattcgtggttatcactcccatggaaccggaaatctggtcctctttttcagt

SEQ ID NO: 67795 - protein, 411 aa, Triticum aestivum
  peptide (1)..(411): Ceres Seq. ID no. 14302825
SFGLGILPPSLPSVSPALRLPDRNSASPRRSPSPSPGQAPMARRSAPLLRRLVSSAPPLPGHGGGARRTVTYMPRPGDGTPRPVTLIPGDGIGPLVTGAVEQVMEAMHAPVYFESYDVHGDMPAVPPAVIESIRRNKVCLKGGLATPVGGGVSSLNMQLRKELDLFASLVNCANVPGLPTRHQNVDIVVIRENTEGEYSGLEHEVVPGVVESLKVITKFCSERIAKYAFEYAYLNYRKKVTAVHKANIMKLADGLFLESCREIAAKYPSIEYNEIIVDNCCMQLVSRPEQFDVMVTPNLYGNLVANTAAGLVGGTGVMPGGNVGQDHAIFEQGASAGNVGNDNLVEQQKANPVALLLSSAMMLRHLQFPSFADRLETAVKRVIADGKYRTKDLGGTSTTQEVTDAVIANLD

SEQ ID NO: 67796 - protein, 371 aa, Triticum aestivum
  peptide (1)..(371): Ceres Seq. ID no. 14302826
MARRSAPLLRRLVSSAPPLPGHGGGARRTVTYMPRPGDGTPRPVTLIPGDGIGPLVTGAVEQVMEAMHAPVYFESYDVHGDMPAVPPAVIESIRRNKVCLKGGLATPVGGGVSSLNMQLRKELDLFASLVNCANVPGLPTRHQNVDIVVIRENTEGEYSGLEHEVVPGVVESLKVITKFCSERIAKYAFEYAYLNYRKKVTAVHKANIMKLADGLFLESCREIAAKYPSIEYNEIIVDNCCMQLVSRPEQFDVMVTPNLYGNLVANTAAGLVGGTGVMPGGNVGQDHAIFEQGASAGNVGNDNLVEQQKANPVALLLSSAMMLRHLQFPSFADRLETAVKRVIADGKYRTKDLGGTSTTQEVTDAVIANLD

SEQ ID NO: 67797 - protein, 339 aa, Triticum aestivum
  peptide (1)..(339): Ceres Seq. ID no. 14302827
MPRPGDGTPRPVTLIPGDGIGPLVTGAVEQVMEAMHAPVYFESYDVHGDMPAVPPAVIESIRRNKVCLKGGLATPVGGGVSSLNMQLRKELDLFASLVNCANVPGLPTRHQNVDIVVIRENTEGEYSGLEHEVVPGVVESLKVITKFCSERIAKYAFEYAYLNYRKKVTAVHKANIMKLADGLFLESCREIAAKYPSIEYNEIIVDNCCMQLVSRPEQFDVMVTPNLYGNLVANTAAGLVGGTGVMPGGNVGQDHAIFEQGASAGNVGNDNLVEQQKANPVALLLSSAMMLRHLQFPSFADRLETAVKRVIADGKYRTKDLGGTSTTQEVTDAVIANLD

SEQ ID NO: 67798 - DNA, 865 bp, Triticum aestivum
  misc_feature (1)..(865): Ceres Seq. ID no. 12584376
atccatccattcattctcctaccgaactctcagcctctcacacaactacaacgccgcaaaagagcatcaatcaaaatccagcagatcatcaagaggagcagcaaatccatctccatgggagcagggatgaagcgcgcgagggaggaggagccaaccgtctcgctggcgctgtccctcagcacagactcctcggcgtcgaccacgacgtcggacgactcgggcaccggtgcggctacgccggcggcgcccgggaagaggacaaggcggaggagagtagtggcgacgtcaggggaaggggacttcgtctgcaagacttgcggccgggccttcgagacgttccaggcgctgggcggccaccggaccagccacctccgcggccgccacgggctggagctcggcgtcggcgttgccagggccatcaaggagcggcaaaggcgcgaggacaggcagcagcacgactgccacatctgcgggctgggcttcgagacgggccaggcgctcggcggccacatgcgtcggcaccgcgaggagatggcgctcgaccggtgggtcgcgctgtcggatcaggaggcggggcaccaggccgccgccgaccggctgcctgtcttgctcgagctgttcgtctagttggctaggtggatatctctgtttcttactacagtataatccaggacttgtacatgtcttttgaatcaggtaggttacgatagaatatgttattgctggttagcatttccgctcgtgggattttgctcggaatcggttcgttttcttaaccgatcgactggggatttagatacactttgtgcttacattagacaaaaaattgttttgttctatatgcaattgacagattcttgcactt

SEQ ID NO: 67799 - protein, 210 aa, Triticum aestivum
  peptide (1)..(210): Ceres Seq. ID no. 12584377
PSIHSPTELSASHTTTTPQKSINQNPADHQEEQQIHLHGSRDEAREGGGANRLAGAVPQHRLLGVDHDVGRLGHRCGYAGGAREEDKAEESSGDVRGRGLRLQDLRPGLRDVPGAGRPPDQPPPRPPRAGARRRRCQGHQGAAKARGQAAARLPHLRAGLRDGPGARRPHASAPRGDGARPVGRAVGSGGGAPGRRRPAACLARAVRLVG

SEQ ID NO: 67800 - protein, 208 aa, Triticum aestivum
  peptide (1)..(208): Ceres Seq. ID no. 12584378
IHPFILLPNSQPLTQLQRRKRASIKIQQIIKRSSKSISMGAGMKRAREEEPTVSLALSLSTDSSASTTTSDDSGTGAATPAAPGKRTRRRRVVATSGEGDFVCKTCGRAFETFQALGGHRTSHLRGRHGLELGVGVARAIKERQRREDRQQHDCHICGLGFETGQALGGHMRRHREEMALDRWVALSDQEAGHQAAADRLPVLLELFV

SEQ ID NO: 67801 - protein, 170 aa, Triticum aestivum
  peptide (1)..(170): Ceres Seq. ID no. 12584379
MGAGMKRAREEEPTVSLALSLSTDSSASTTTSDDSGTGAATPAAPGKRTRRRRVVATSGEGDFVCKTCGRAFETFQALGGHRTSHLRGRHGLELGVGVARAIKERQRREDRQQHDCHICGLGFETGQALGGHMRRHREEMALDRWVALSDQEAGHQAAADRLPVLLELFV

SEQ ID NO: 67802 - DNA, 1005 bp, Triticum aestivum
  misc_feature (1)..(1005): Ceres Seq. ID no. 12624943
ctccctccccgcagccaaatcgagatctctctcccccgtccctctcccacccccaccccacccccgccggccggccgtccgcggcgacgagcccaccagaggaaacatggcgtcggcgctctcctccctccgctacggcgacagcctgtcggtggtggccatctcgggcgccacggcggtgctctgcgaggccatctcctggctcctcatctaccgcaccgccacctacaactccctccgcgcctccatcgagcgccactcccgcaagctcgactccatgaagtccatctcctcgggcgccggcggcgccgcgccctcctcccagccggcctcctcgcgggccaagaagatggaccgcgtcgagtccagcctcaaggacgcctcgcgggagctctccctcgccaagctcaagtccggtgccgtcgtcgccgccgtgctcttcgtcgtcttcggcctcctcaactcgctcttcgagggccgcgccgtcgccaagctgcccttcgcgcccgtcccgctcgtgcagcgcatgagccaccgcggcctgcccgggaacgaccccaccgactgcgccatggtcttcctctacttcctctgctccatgagcatacggacaaacctccagaagctgctcggcttcacgccgccccgcgcggccgcgggggccggcggtggcctcttcgccatgcccgatcccaaagccaattgagcttgatgatcccctcttctatacatacatgtgatgcacctggtctgaagcaaagcatctgagttggtctcccggaaagagttgctgccctgaaaggaagataaataacctacctagtcgctcagaggagaaacactgcaagacactgtaacgacacaattcattttttccacccatgataagcaggcgtgaaccgtgcgtaggctggctgtatcgatcatgaacattctcgagttcacccgaagcaatctgttgccgggtttgtcgtagggttgtactttatcatcagtcgttctagt

SEQ ID NO: 67803 - protein, 255 aa, Triticum aestivum
  peptide (1)..(255): Ceres Seq. ID no. 12624944
LPPRSQIEISLPRPSPTPTPPPPAGRPRRRAHQRKHGVGALLPPLRRQPVGGGHLGRHGGALRGHLLAPHLPHRHLQLPPRLHRAPLPQARLHEVHLLGRRRRRALLPAGLLAGQEDGPRRVQPQGRLAGALPRQAQVRCRRRRRALRRLRPPQLALRGPRRRQAALRARPARAAHEPPRPARERPHRLRHGLPLLPLLHEHTDKPPEAARLHAAPRGRGGRRWPLRHARSQSQLSLMIPSSIHTCDAPGLKQSI

SEQ ID NO: 67804 - protein, 234 aa, Triticum aestivum
  peptide (1)..(234): Ceres Seq. ID no. 12624945
SLPAAKSRSLSPVPLPPPPHPRRPAVRGDEPTRGNMASALSSLRYGDSLSVVAISGATAVLCEAISWLLIYRTATYNSLRASIERHSRKLDSMKSISSGAGGAAPSSQPASSRAKKMDRVESSLKDASRELSLAKLKSGAVVAAVLFVVFGLLNSLFEGRAVAKLPFAPVPLVQRMSHRGLPGNDPTDCAMVFLYFLCSMSIRTNLQKLLGFTPPRAAAGAGGGLFAMPDPKAN

SEQ ID NO: 67805 - protein, 199 aa, Triticum aestivum
  peptide (1)..(199): Ceres Seq. ID no. 12624946
MASALSSLRYGDSLSVVAISGATAVLCEAISWLLIYRTATYNSLRASIERHSRKLDSMKSISSGAGGAAPSSQPASSRAKKMDRVESSLKDASRELSLAKLKSGAVVAAVLFVVFGLLNSLFEGRAVAKLPFAPVPLVQRMSHRGLPGNDPTDCAMVFLYFLCSMSIRTNLQKLLGFTPPRAAAGAGGGLFAMPDPKAN

SEQ ID NO: 67806 - DNA, 1172 bp, Triticum aestivum
  misc_feature (1)..(1172): Ceres Seq. ID no. 13582807
aaacacctagaacatcctattccaaaacttccacccttcaccgccgccagcgccacagcctccaagccctcgatctcccccatcggagctccctgcccacaaccccccacccccacccaaccatggcggaccgcggcggcgagcgtggtggcgaccgcggaggcgagcgcggcgggttcggccgcggcttcgggcgcggcgggcgcggggaccgtggcgggcgccgcggcggtcgtcgtggcccccgccaggaggaggagaagtgggtgcccgtcaccaagctcggccgcctcgtcaaggagggccgcttcaccaagatggaggagctctacctccactcgctccccatcaaggagcaccagatcgtggagcagctctgcccggggctcaaggacgaggtgatgaagatcacccccgtgcagaagcagacccgcgccggccagcggacccgcttcaaggcgttcgtcgtcgtcggcgacagcaacggccacgtcgggctcggcgtcaagtgcgccaaggaggtggccacggccatccgcggcgccatcatcctcgccaagctctccatcgtgcccgtcaggaggggctactgggggaacaagatcggcctgccccacaccgtgccctgcaaggtcaccggcaagtgcggctctgtcaccgtgcgcatggtgcccgccccgaggggttccgggatcgtcgccgcgcgcgtccccaagaaggtgctccagttcgctggtattgatgatgtcttcacttcctcgcgtggatccaccaagacccttggcaacttcgtcaaggcaaccttcgactgcctgatgaagacctatggattcctcacccctgacttctggagggagacgaccttcaccaaggcgccataccaggagttcaccgacattttggtgaagccgaccaaggccctgatgcttgatgcaccagccgagaagatcgaagcttaggatgtcggtgtaaagggtttttacaagctgagagctgtctaatgcactttgctttatttagttattaatactttgaatcgtgctgtttcaggatgtctctttttgccgtcaagtgttggtttgtggaactatgctactctcttttatcgtcaatggaagctacataattatggcaatcgatcttttttatctatagatgcttggcttctacct

SEQ ID NO: 67807 - protein, 318 aa, Triticum aestivum
  peptide (1)..(318): Ceres Seq. ID no. 15222751
TPRTSYSKTSTLHRRQRHSLQALDLPHRSSLPTTPHPHPTMADRGGERGGDRGGERGGFGRGFGRGGRGDRGGRRGGRRGPRQEEEKWVPVTKLGRLVKEGRFTKMEELYLHSLPIKEHQIVEQLCPGLKDEVMKITPVQKQTRAGQRTRFKAFVVVGDSNGHVGLGVKCAKEVATAIRGAIILAKLSIVPVRRGYWGNKIGLPHTVPCKVTGKCGSVTVRMVPAPRGSGIVAARVPKKVLQFAGIDDVFTSSRGSTKTLGNFVKATFDCLMKTYGFLTPDFWRETTFTKAPYQEFTDILVKPTKALMLDAPAEKIEA

SEQ ID NO: 67808 - protein, 278 aa, Triticum aestivum
  peptide (1)..(278): Ceres Seq. ID no. 15222752
MADRGGERGGDRGGERGGFGRGFGRGGRGDRGGRRGGRRGPRQEEEKWVPVTKLGRLVKEGRFTKMEELYLHSLPIKEHQIVEQLCPGLKDEVMKITPVQKQTRAGQRTRFKAFVVVGDSNGHVGLGVKCAKEVATAIRGAIILAKLSIVPVRRGYWGNKIGLPHTVPCKVTGKCGSVTVRMVPAPRGSGIVAARVPKKVLQFAGIDDVFTSSRGSTKTLGNFVKATFDCLMKTYGFLTPDFWRETTFTKAPYQEFTDILVKPTKALMLDAPAEKIEA

SEQ ID NO: 67809 - protein, 213 aa, Triticum aestivum
  peptide (1)..(213): Ceres Seq. ID no. 15222753
MEELYLHSLPIKEHQIVEQLCPGLKDEVMKITPVQKQTRAGQRTRFKAFVVVGDSNGHVGLGVKCAKEVATAIRGAIILAKLSIVPVRRGYWGNKIGLPHTVPCKVTGKCGSVTVRMVPAPRGSGIVAARVPKKVLQFAGIDDVFTSSRGSTKTLGNFVKATFDCLMKTYGFLTPDFWRETTFTKAPYQEFTDILVKPTKALMLDAPAEKIEA

SEQ ID NO: 67810 - DNA, 1540 bp, Triticum aestivum
  misc_feature (1)..(1540): Ceres Seq. ID no. 13595932
gaaattttccattcccccacccgcccttcacttcccttcacccgtcgctctcagccccgcagcgctagctagggttgggatcgatttggggcctagggttaggtcagtttctccatggcggcggcggcggcggcggaggggtccggggcagagggccgcggcgaggccgccgccggcggcaggcggcagcagcagcaggggctggcggagcgccggatgctccggtcccagtaccacgccatgaagaccctcatcaacgaggagagggatgacatggcgaaggaggactccgacaagttcgcctccatcatcacgcaggtggagagcttgcacgagcaagtgcagagacccagggagcaagtagcggatgcagaggctctgctagatattacaaccacgctggtaaaatccgtgaggtcccagtcaagtgaaggaatcacaccttctgatttcgtaacagcattgctgaagaaatttgggcagcaagcaacccttgattccgagcctgtctcgttgcgctgggctgatgttgggctttctgcttcacatgtcttcagggctgcgcctggatgctgcaccatgcttggacccatggatacagaagtaaagcagcggaagctttcagttgttagtagaaaaagaagtgccaggccaactgaaaatacttgtcctgaagagcttgctgattcttctgagggagcaaagacagacactgaccggaatgtgactgttgtatttgatatcctgaggaaaaataagcgtgcgaggctggagacccttgttttgaacagacaatcatttgcccaaacggttgagaatgtttttgcattgtctttcctagttaaagatggcagggtggcaataaacattgatgacaatgggcaccatatagtctatccacgaaatgcacctgctgctagtgccatagcgtcaggagaagtgtcctacagccattttgttttcagatatgattacagagattggaagcttatgaaagaagtcgttcctgaagggcaagaactgatgccgcacaggaccgcgcacagcctctcttctgaagagcgagaacagctggagccgtgtgcgcaacgaacaccgataaggaaactttgccggaaccggggtttggttcttcaggagcagatggttgttgcagagacacccgaggaggacagaagctccaaacgcaagcgtctattcatagatcaggagtgatcatgcctgcttgaaatgccttgtgccgcggtctacgctgtgtctgtatgtaggaggtatttgcctgattaacgtacccattgtagaacaaggtgtgccatagcaccgcttgtgctagttcttaccttgagacgagattcctccgggagaggaaagagggcaatagaaatgtaagctcaatagaaatgctactgtagttctttagatcagtcggcttaaataatgttcttggaatcggacttgtataatgtcgctcagagtaatatgcttgtgctgatagagaaaaagaaaaggtttgcttctagctgagccaaagttcctattc

SEQ ID NO: 67811 - protein, 366 aa, Triticum aestivum
  peptide (1)..(366): Ceres Seq. ID no. 13595933
MAAAAAAEGSGAEGRGEAAAGGRRQQQQGLAERRMLRSQYHAMKTLINEERDDMAKEDSDKFASIITQVESLHEQVQRPREQVADAEALLDITTTLVKSVRSQSSEGITPSDFVTALLKKFGQQATLDSEPVSLRWADVGLSASHVFRAAPGCCTMLGPMDTEVKQRKLSVVSRKRSARPTENTCPEELADSSEGAKTDTDRNVTVVFDILRKNKRARLETLVLNRQSFAQTVENVFALSFLVKDGRVAINIDDNGHHIVYPRNAPAASAIASGEVSYSHFVFRYDYRDWKLMKEVVPEGQELMPHRTAHSLSSEEREQLEPCAQRTPIRKLCRNRGLVLQEQMVVAETPEEDRSSKRKRLFIDQE

SEQ ID NO: 67812 - protein, 332 aa, Triticum aestivum
  peptide (1)..(332): Ceres Seq. ID no. 13595934
MLRSQYHAMKTLINEERDDMAKEDSDKFASIITQVESLHEQVQRPREQVADAEALLDITTTLVKSVRSQSSEGITPSDFVTALLKKFGQQATLDSEPVSLRWADVGLSASHVFRAAPGCCTMLGPMDTEVKQRKLSVVSRKRSARPTENTCPEELADSSEGAKTDTDRNVTVVFDILRKNKRARLETLVLNRQSFAQTVENVFALSFLVKDGRVAINIDDNGHHIVYPRNAPAASAIASGEVSYSHFVFRYDYRDWKLMKEVVPEGQELMPHRTAHSLSSEEREQLEPCAQRTPIRKLCRNRGLVLQEQMVVAETPEEDRSSKRKRLFIDQE

SEQ ID NO: 67813 - protein, 324 aa, Triticum aestivum
  peptide (1)..(324): Ceres Seq. ID no. 13595935
MKTLINEERDDMAKEDSDKFASIITQVESLHEQVQRPREQVADAEALLDITTTLVKSVRSQSSEGITPSDFVTALLKKFGQQATLDSEPVSLRWADVGLSASHVFRAAPGCCTMLGPMDTEVKQRKLSVVSRKRSARPTENTCPEELADSSEGAKTDTDRNVTVVFDILRKNKRARLETLVLNRQSFAQTVENVFALSFLVKDGRVAINIDDNGHHIVYPRNAPAASAIASGEVSYSHFVFRYDYRDWKLMKEVVPEGQELMPHRTAHSLSSEEREQLEPCAQRTPIRKLCRNRGLVLQEQMVVAETPEEDRSSKRKRLFIDQE

SEQ ID NO: 67814 - DNA, 1016 bp, Triticum aestivum
  misc_feature (1)..(1016): Ceres Seq. ID no. 13654441
atactgaatcacacggaaccttgaggcacacccacgggagaaaatggcagacacaggagacgagctgaagctgctgggcatgtgggcgagcccgtacgtggtcagggtgcagctcgcactccgcctcaagggcgtgagctacgagtacgtcgaggaggacctcgccaacaagagcgagctcttcctccgctccaacccggttcacaagacggtcccgatcctcatccacaacggcaagcccgtctgcgagtcccaggtcatcctccagtacatcgacgaggccttcgccggcgtcggcccgcccctcctccccgccgacccctacgagcgcgccgtcgcgcgcttctgggccgcctacgtcgaggacaagctgctggcgccgtgggggaaggtgttcagggtgaccaccgacgaggagagggccgagtggacgcggcagacggcggcggccctgggtcctctggaggatggcctcagggagtgctccaaggggaaggggttcttcggcggcgactgcgtcgggtacgtcgacgtcctgctcggcagcatggtgccgtgggtgcgcgccaccgagaggctctccggcgacaagttagtcgacgccggcaaggccccgctgctggcggcatggatggaccgcattagcgagctcgacgccgccaaggcggtcttccaggacgtcgacagggtggttgagtacgccgggggaatacagacccggctttccgccgcggctgcaagcacccaataaagcggcatggcgacatggtgcgtggctgatgcaaggagaaaatagccaagtgtgcaattagctgaaattattaaactggccacgtttctgtttcctttttcccgaataatggcgtcgtttctcaggaacacataacatacaagcatgtgatattaccagtttaaaaacttgtgtggtcatcgtgacagctcctcctctgtttttaagggatatttacatttttgtccttggctttgtcacattagtggggtttgtcttttgtttt

SEQ ID NO: 67815 - protein, 235 aa, Triticum aestivum
  peptide (1)..(235): Ceres Seq. ID no. 13654442
MADTGDELKLLGMWASPYVVRVQLALRLKGVSYEYVEEDLANKSELFLRSNPVHKTVPILIHNGKPVCESQVILQYIDEAFAGVGPPLLPADPYERAVARFWAAYVEDKLLAPWGKVFRVTTDEERAEWTRQTAAALGPLEDGLRECSKGKGFFGGDCVGYVDVLLGSMVPWVRATERLSGDKLVDAGKAPLLAAWMDRISELDAAKAVFQDVDRVVEYAGGIQTRLSAAAASTQ

SEQ ID NO: 67816 - protein, 223 aa, Triticum aestivum
  peptide (1)..(223): Ceres Seq. ID no. 13654443
MWASPYVVRVQLALRLKGVSYEYVEEDLANKSELFLRSNPVHKTVPILIHNGKPVCESQVILQYIDEAFAGVGPPLLPADPYERAVARFWAAYVEDKLLAPWGKVFRVTTDEERAEWTRQTAAALGPLEDGLRECSKGKGFFGGDCVGYVDVLLGSMVPWVRATERLSGDKLVDAGKAPLLAAWMDRISELDAAKAVFQDVDRVVEYAGGIQTRLSAAAASTQ

SEQ ID NO: 67817 - DNA, 1968 bp, Triticum aestivum
  misc_feature (1)..(1968): Ceres Seq. ID no. 13596261
aaagggaccggcgctcgcggcgaccaggaaggcaaggaacgcgtccggttcttggataagcggaggcgcggcaccgcaccgcacgcggcattcgtcaatataagaaggccgccgggggtgggaggcggagggacaactccgtctacacaagcgcgcgcgcacccaccaaagtcttctgccgatttcttcgtctccgctctcctcgtgttcgggttgttggccgagcgacagttgggattctgtagaggaggttgaaagtacttgaaacaaatggggattggggatgcatcacctagtgaaaaccagtctgcacacaaggaacagagggatgagaccacgccacttctcccggtcaaggcggaagaggaagatgggatccatgagttcaatggagcgtctttctcgggtgcagttttcaatctgtcgacaaccatcgtgggggctggaattatggccctgccagcaagtatcaagatgctaggcattatccctggtattttgatgatcatccttgtggcattgctcactgaggcatcaattgacatgatggtcaggtgcagccaccaggccaagattacatcctatggctggctcatgggtgactcttttggtcaatgggggaggattgcactgcaagcatctgtggtcataaacaacgttggcgtcatgattgtatacatgattatcatcggtgatgtgctatcgggaacatctacaactggtgttcatcaccggggtatctttgaggggtggtttgggcctcatttctggaattctcgtccagttgttctccttgccacaactatttttgtgtttgctccattggtgagctttaagcgattggattcattgagatacacatctgctctgtcagttgctcttgctgtggtttttgttgtcatcactgctggaattgctattctcagactgatagaagggaccgcggagattcccaaactcttccctgagatacatgaactcaattccatctgggaactctttacagctgtgccggttcttgtcactgcctatatttgccactacaatgttcacagcatcgataacgaactggaagatagaagtcagactaagccaattgtgcgaacttcattggctctctgttcaagtgtttatgttgcaacaagcttctttgcatatttactcttcggcgagggtaccctctccgatgtgctcgctaattttgactctgaccttcatattccattcagctctgtcttcaatgatatagtcagagtgagctatgtagtccatgtcatgctggtcttccctatagtcttctttgcccttaggctcaacctggatggactcctcttccccacctcaaggcacatttctcatgacaaccgaaggtttatcattatcaccgtctcactcctcgctgtgatttatcttgctgccaacttcataccaagcatctgggatgcgttccagttcaccggtgctacagctgctgtcctgattggtttcatctttcctgccatgatcatactgagggattcttatgggattgcaaccaagcgcgacaaggttttagctgtaaccatgattgtgcttgctgtgctctccaattcagtggccctgtacagcgatgcgatgagcatcttctacaggaaggtggaggcctagtctgctccatgcctccatactccaagggaataagtccaatgcacatgcacaattcggagtgattattgagctttagttagtatattgcgcagtcaagcaatgtgatttcatggtggccactaatttttgttttggacacttgagaggattttgtttgctgcatttgtctagttccttgaacatgtaatccggctcagcatctagatgagcaatttgtgatctggtcgcaggtgtttgtatttattggcaagaacaagatttttatttacttttgggggtcatgtacatgttcatattcggtcatcttgaaattgatgtttg

SEQ ID NO: 67818 - protein, 458 aa, Triticum aestivum
  peptide (1)..(458): Ceres Seq. ID no. 13596262
MGIGDASPSENQSAHKEQRDETTPLLPVKAEEEDGIHEFNGASFSGAVFNLSTTIVGAGIMALPASIKMLGIIPGILMIILVALLTEASIDMMVRCSHQAKITSYGWLMGDSFGQWGRIALQASVVINNVGVMIVYMIIIGDVLSGTSTTGVHHRGIFEGWFGPHFWNSRPVVLLATTIFVFAPLVSFKRLDSLRYTSALSVALAVVFVVITAGIAILRLIEGTAEIPKLFPEIHELNSIWELFTAVPVLVTAYICHYNVHSIDNELEDRSQTKPIVRTSLALCSSVYVATSFFAYLLFGEGTLSDVLANFDSDLHIPFSSVFNDIVRVSYVVHVMLVFPIVFFALRLNLDGLLFPTSRHISHDNRRFIIITVSLLAVIYLAANFIPSIWDAFQFTGATAAVLIGFIFPAMIILRDSYGIATKRDKVLAVTMIVLAVLSNSVALYSDAMSIFYRKVEA

SEQ ID NO: 67819 - protein, 398 aa, Triticum aestivum
  peptide (1)..(398): Ceres Seq. ID no. 13596263
MALPASIKMLGIIPGILMIILVALLTEASIDMMVRCSHQAKITSYGWLMGDSFGQWGRIALQASVVINNVGVMIVYMIIIGDVLSGTSTTGVHHRGIFEGWFGPHFWNSRPVVLLATTIFVFAPLVSFKRLDSLRYTSALSVALAVVFVVITAGIAILRLIEGTAEIPKLFPEIHELNSIWELFTAVPVLVTAYICHYNVHSIDNELEDRSQTKPIVRTSLALCSSVYVATSFFAYLLFGEGTLSDVLANFDSDLHIPFSSVFNDIVRVSYVVHVMLVFPIVFFALRLNLDGLLFPTSRHISHDNRRFIIITVSLLAVIYLAANFIPSIWDAFQFTGATAAVLIGFIFPAMIILRDSYGIATKRDKVLAVTMIVLAVLSNSVALYSDAMSIFYRKVEA

SEQ ID NO: 67820 - protein, 390 aa, Triticum aestivum
  peptide (1)..(390): Ceres Seq. ID no. 13596264
MLGIIPGILMIILVALLTEASIDMMVRCSHQAKITSYGWLMGDSFGQWGRIALQASVVINNVGVMIVYMIIIGDVLSGTSTTGVHHRGIFEGWFGPHFWNSRPVVLLATTIFVFAPLVSFKRLDSLRYTSALSVALAVVFVVITAGIAILRLIEGTAEIPKLFPEIHELNSIWELFTAVPVLVTAYICHYNVHSIDNELEDRSQTKPIVRTSLALCSSVYVATSFFAYLLFGEGTLSDVLANFDSDLHIPFSSVFNDIVRVSYVVHVMLVFPIVFFALRLNLDGLLFPTSRHISHDNRRFIIITVSLLAVIYLAANFIPSIWDAFQFTGATAAVLIGFIFPAMIILRDSYGIATKRDKVLAVTMIVLAVLSNSVALYSDAMSIFYRKVEA

SEQ ID NO: 67821 - DNA, 2016 bp, Triticum aestivum
  misc_feature (1)..(2016): Ceres Seq. ID no. 13582783
ggtaatccatttgaaatgactagaaagacaaatatttcggaacggaggaagtacatgacactcttatactcgcaagagttcaattctattctactcgagaagacactcactccctgtgagaaattctaaaaggaaatgcttttacactgcatgaaagctcgaaaactggctacatcagagccttgaaattgcaggccaggcatcagatcacgaaaggcattacactgttggtggcggtcctccctccaaccaactccaaaggtttgcaatacatatagcatgtaagcagcagcttcctatatatttgatgagttctctttccgcagcttggctggcctctccttgtgcgattctgcatatctcctcttcttgttggctcttcttcttttgcgctcagcttgtgtaagctccacgtcttctttaatatcccctttcccttcaaaaacttcttcgggagcgagcattgcggcatctgaaacagctacaggtgcaacctcttccattgctagagcaggtatattaacttgtatggacatatcctcaatgaccggctttggggcaaagtggaaatgagagagcgcatccaacttcaagcatatcctcttaaataaatcatttgcctcattcttcagttcatctgaaatagcaagtgtggcaggtgcaatgccagttttttccttaaactcatcctcatactgttcagcaagaccctttttgctcttgttttcatccatctccttttgctgctttggaactttatacggcaaggttgaaggcttttcaacatcatcaaaatgaccctccgcaattcttttctttatcatctcttcgagagaagctgtgacttcctccgtgattactggggcaggtcttacattatgctcaaaatcaagatccacttccagggcactatttttgggcctcctggaagcatcaacctctccctgcatgatccatttactgggttcaagactagctttctccattaggtctatttggttacgcatcttcaagagccccttttcatgagttgaaagaccttgttcatcctctaatgctggaccatcatttacatcatccttctcaatgtcatccacttccatttcatgcaattcatccttgaagtggactttctttgtgaaaccatttctcttcttgacttgttgcttactgctttcctcaaaaaaatcctcataccttatatctccgccagatttccccacaccctcttcatcatcagactcaaaatcttccaaatccaaatcgtcatcttcatcatcacccccatcatcttcatccacatcctcctcatcactatcgtcctccatcaagttcacacttgccttcttcttctctcctcccttggaacccccaccgtactcctgctcctccccctcctccataaacttttccaggtccttcatcttcaggaacctgtcctccaccccgttccctttcttcgcccctagctcctccgtttcttcatcctccccctcctccgattccaactcgtcatccgtgtcctccaggccaccctcatcctcctcctccgattcgtcaccctctccatcctcctcctcgtctgacgggccctccacggcttcagcgggcttggacggcggaggagtagccaacggctgcgcaggcggttggtgctcgaggcggcggagctggcggtggaggtgggggaggagggggcgggagagcagctcgctctgggaccaaatctgctcggcgtcgaagttggggccggcgaggaggttggggaggggcggcggctgcacgggggagacaacggcgagcgacgagtggaagtgcttcagagccgcccgggcggcggcggcgaggtccgcggacggggagaggtagacggacgggtcggcgcgccgcagctgctgcagcgccacctcgcccttctccgcggcaagcggctcgtccaaatccatggccattgccgtggtggccgggagcgaattggttgactggagtatgtggaggcgacgctgggaaagagag

SEQ ID NO: 67822 - protein, 260 aa, Triticum aestivum
  peptide (1)..(260): Ceres Seq. ID no. 13582784
MSSTSISCNSSLKWTFFVKPFLFLTCCLLLSSKKSSYLISPPDFPTPSSSSDSKSSKSKSSSSSSPPSSSSTSSSSLSSSIKFTLAFFFSPPLEPPPYSCSSPSSINFSRSFIFRNLSSTPFPFFAPSSSVSSSSPSSDSNSSSVSSRPPSSSSSDSSPSPSSSSSDGPSTASAGLDGGGVANGCAGGWCSRRRSWRWRWGRRGRESSSLWDQICSASKLGPARRLGRGGGCTGETTASDEWKCFRAARAAAARSADGER

SEQ ID NO: 67823 - DNA, 768 bp, Triticum aestivum
  misc_feature (1)..(768): Ceres Seq. ID no. 15178530
agcgcgtccccattccgatccgttggcttcctgttcatacattctcccctcccggcgccgcctccagcctagggtttcctcccgccgtccgccgccatggctcgccgcagcggaggaggaaggtcttcccgccctgctccacgtgctgctccagtgagaaacccaccagcgccagcccgtcaagctcctccacctgctactacccagaatagcggtggtggtatcatgagtggaattgggtccaccattgctcagggcatggctttcggtactggcagtgccatggcgcacagggctgttgatgctgtgatgggtccccgcaccattcagcatgagactgttgtcggtgaggctgctgcatctatgactccaatggacaatgctgctgatgacaagtgtggcaacccttccaaggccttccaagattgcatcaaccactacggaagcgacatcagcaagtgccagttctacctcgacatgctgaacgagtgccgccgtggaggagcaggagctggtgcaactctttaagctactatctttgcttgattgcggcttaattggtcggaacctgttttcagtcatgatgatgatgatatatatctcctaaataattcattggcaatattatgaacctatgccacagcttatgtctattacctaccctagtttgtggtctctgttgtcctgggagtatttccttgtattgatgttggaattaccttcatggcagtgggtttataaatatggagtttaaaaaaaaaaaaaaaa

SEQ ID NO: 67824 - protein, 143 aa, Triticum aestivum; identical to SEQ ID NO: 63821
  peptide (1)..(143): Ceres Seq. ID no. 15178531

SEQ ID NO: 67825 - protein, 100 aa, Triticum aestivum; identical to SEQ ID NO: 63822
  peptide (1)..(100): Ceres Seq. ID no. 15178532

SEQ ID NO: 67826 - protein, 89 aa, Triticum aestivum; identical to SEQ ID NO: 63823
  peptide (1)..(89): Ceres Seq. ID no. 15178533

SEQ ID NO: 67827 - DNA, 885 bp, Triticum aestivum
  misc_feature (1)..(885): Ceres Seq. ID no. 12614051
cacgcacgcacccgagccccacaattcccatcccccactccactccccaccgaaaaaccatggcgcggcggagcggcatgctcctcctactcgccgcggccgccctgcttgccctcggcgcgggcgccgccgtgccgccgtcgtgcgagcgcatcgagtgcccggcgtacgacgtggtggacagcgccaacgggttcgagatccggcggtacaaggacgccatgtgggtgtccaccgcgcccatcgaggacatctcgctcgtcgacgccacccgctccggcttcctccagcttttcaagtacatccaggggaagaacgcctacaacgagacgatcgagatgacggcgccggtgctgacgcgggtggcgcccagcgacgggcccttctgcgtctcctccttcgtggtcagcttctacgtgccggcgaagaaccaggcggacccgccgccggccgagggcctgcacgtgcagaggtgggccggggcgaggtacgcggccgtgcgccggttcggcggcttcgtggccgacgccgacgtcggcaagcaggccgcgctgctcgacgccagcctgcaggggaccaggtgggccgccgccgtgtccgacggccgcaaggccgacccggcgtccgagtacaccgtggcgcagtacaactcgccgttcgagttcagcggcagggtcaacgagatctggatgctcttcgacaccatggccgcgtctgacatgtaactggctagatcaatcagtgaactcgtatatgagtgtcttgtcttttaagcttctatataaccggacgaataatggtggtgccttataaactgcttaagcgaaatagtgaactgttttgcgctgtatggacttgcgagcaataaagtgcctcttttggtgc

SEQ ID NO: 67828 - protein, 240 aa, Triticum aestivum
  peptide (1)..(240): Ceres Seq. ID no. 12614052
RTHPSPTIPIPHSTPHRKTMARRSGMLLLLAAAALLALGAGAAVPPSCERIECPAYDVVDSANGFEIRRYKDAMWVSTAPIEDISLVDATRSGFLQLFKYIQGKNAYNETIEMTAPVLTRVAPSDGPFCVSSFVVSFYVPAKNQADPPPAEGLHVQRWAGARYAAVRRFGGFVADADVGKQAALLDASLQGTRWAAAVSDGRKADPASEYTVAQYNSPFEFSGRVNEIWMLFDTMAASDM

SEQ ID NO: 67829 - protein, 238 aa, Triticum aestivum
  peptide (1)..(238): Ceres Seq. ID no. 12614053
THAPEPHNSHPPLHSPPKNHGAAERHAPPTRRGRPACPRRGRRRAAVVRAHRVPGVRRGGQRQRVRDPAVQGRHVGVHRAHRGHLARRRHPLRLPPAFQVHPGEERLQRDDRDDGAGADAGGAQRRALLRLLLRGQLLRAGEEPGGPAAGRGPARAEVGRGEVRGRAPVRRLRGRRRRRQAGRAARRQPAGDQVGRRRVRRPQGRPGVRVHRGAVQLAVRVQRQGQRDLDALRHHGRV

SEQ ID NO: 67830 - protein, 221 aa, Triticum aestivum
  peptide (1)..(221): Ceres Seq. ID no. 12614054
MARRSGMLLLLAAAALLALGAGAAVPPSCERIECPAYDVVDSANGFEIRRYKDAMWVSTAPIEDISLVDATRSGFLQLFKYIQGKNAYNETIEMTAPVLTRVAPSDGPFCVSSFVVSFYVPAKNQADPPPAEGLHVQRWAGARYAAVRRFGGFVADADVGKQAALLDASLQGTRWAAAVSDGRKADPASEYTVAQYNSPFEFSGRVNEIWMLFDTMAASDM

SEQ ID NO: 67831 - DNA, 867 bp, Triticum aestivum
  misc_feature (1)..(867): Ceres Seq. ID no. 13596128
aacaatctacatttgacttccagcagaggaagcgagccaagatgggcacaccggcggccgtcagggtgatcggcgccttcgacagcccgtttagccaccgcgccgaggtcgccctgtgcctcaagggcgttccctacgagctcatcctggaggagctccacaacaagagcgagctgctgcttacgagcaaccccgtccacaagaaggtgcccgtgctcctccacggcgaccgcaccatctgcgagtcgctcatcatcgtcgagtacgttgacgagaccttcgacgggccggcgcttctcccaacggacccctacgaccgtgccactgcccgcttgtggtcccgcttcatcgatgacaagtgctcgaagccgttctggctggcgatgtggactgatggggaagcgcagaaggggttcacgaaggagatcaaggagaacttcgcgctcctggaggcgcagctcgagggtaagaggttcttcggcggcggcaccattggcctcgtcgacatagccgcctgcgggttcgcgcactggctcaccgtctgcgaggaggtttctggcgtgacactggtcacggccgaggagttccctcgcctgtgccgctgggccaaagagtatgcctccgacgagaaggtcagagcgtgcctgccggacagggcgcagatgctcgcccatttcacggccaacaaggagatgttcatggccatggcaaagtcaatgctgccaaaataatgtgatgtatgttgatgtggaagtggatgcgtgcatgaaagatatcgtagcccagagcgcatggtcgtcatgtgatggaataaagaaaaagcatttactagtattaatcagtcatctgatttatttattatttctc

SEQ ID NO: 67832 - protein, 242 aa, Triticum aestivum
  peptide (1)..(242): Ceres Seq. ID no. 13596129
QSTFDFQQRKRAKMGTPAAVRVIGAFDSPFSHRAEVALCLKGVPYELILEELHNKSELLLTSNPVHKKVPVLLHGDRTICESLIIVEYVDETFDGPALLPTDPYDRATARLWSRFIDDKCSKPFWLAMWTDGEAQKGFTKEIKENFALLEAQLEGKRFFGGGTIGLVDIAACGFAHWLTVCEEVSGVTLVTAEEFPRLCRWAKEYASDEKVRACLPDRAQMLAHFTANKEMFMAMAKSMLPK

SEQ ID NO: 67833 - protein, 229 aa, Triticum aestivum
  peptide (1)..(229): Ceres Seq. ID no. 13596130
MGTPAAVRVIGAFDSPFSHRAEVALCLKGVPYELILEELHNKSELLLTSNPVHKKVPVLLHGDRTICESLIIVEYVDETFDGPALLPTDPYDRATARLWSRFIDDKCSKPFWLAMWTDGEAQKGFTKEIKENFALLEAQLEGKRFFGGGTIGLVDIAACGFAHWLTVCEEVSGVTLVTAEEFPRLCRWAKEYASDEKVRACLPDRAQMLAHFTANKEMFMAMAKSMLPK

SEQ ID NO: 67834 - DNA, 1083 bp, Triticum aestivum
  misc_feature (1)..(1083): Ceres Seq. ID no. 13595993
acctagaacatcctaatcgaaaaaacaaaaacaaacgcgagcgagacccttgcctcaagacctcctccgccccacctccctcctcctactcggcccgtcgtccacgccgagggagccgtcgggcatggcggcgacggcagatccgcgggcgaagccgccggccgcgccctcgacgcaccacctcgagccgtgggcgcgcccgcagcagccgccgcctctaccccaccgcgttgagtcgccctcggggggtgcgtcgggcgcccgcgatcgccgccgctcgtcgtctcactcccaccgcggggccgacgccggagacgacggcgggatcgaggggctccgcgtgaagctcatgggccacctgcgcgacgcggccgaccggcttcgcgtgccccagaaaagtcctcccctgcccccgccgcccccaccgaccaagccgaaggagcccgagccagaccgcatggcgcggcctccaccccccacggagccgccacaggagaacgtcgcggacaagccgtggaagctgcgggaacgcacgcggcggcggccggccgcgctgtcgtcgtcatggccggcggcgccgactccgccgtcgcgacggcgcaagcgggcccctttctcggtggccctggagccggaggagatcgaggaggacatctacgcgctgacgggcggccggccgcggcggcggccgaggaagcggccgcgcgccgtacagcggcagctcgattcgctcttccccgggctctggctggccgaggtcaccgccgacgactacaaggtgcccgacgacgagtagccgctccctcccgccggcgactacaaggttccgacgacgaagctcatggcatcacctccgcgcgtcgtaggacaggtagcccgaatttatagtaacttggagtagctaggcgtagacgcgtggtcgcgtggagcgagccggtcatgtactcgtgttcaccagttattattaagtttattacaacaaaaaaaaaactccagctaccgactttccttgtcataaaaaaaaaaaaaaaaaagcttatcgatacacgtcgactgtttaaacacaatmragggggggcccgg

SEQ ID NO: 67835 - protein, 223 aa, Triticum aestivum
  peptide (1)..(223): Ceres Seq. ID no. 15221724
MAATADPRAKPPAAPSTHHLEPWARPQQPPPLPHRVESPSGGASGARDRRRSSSHSHRGADAGDDGGIEGLRVKLMGHLRDAADRLRVPQKSPPLPPPPPPTKPKEPEPDRMARPPPPTEPPQENVADKPWKLRERTRRRPAALSSSWPAAPTPPSRRRKRAPFSVALEPEEIEEDIYALTGGRPRRRPRKRPRAVQRQLDSLFPGLWLAEVTADDYKVPDDE

SEQ ID NO: 67836 - protein, 148 aa, Triticum aestivum
  peptide (1)..(148): Ceres Seq. ID no. 15221725
MGHLRDAADRLRVPQKSPPLPPPPPPTKPKEPEPDRMARPPPPTEPPQENVADKPWKLRERTRRRPAALSSSWPAAPTPPSRRRKRAPFSVALEPEEIEEDIYALTGGRPRRRPRKRPRAVQRQLDSLFPGLWLAEVTADDYKVPDDE

SEQ ID NO: 67837 - protein, 113 aa, Triticum aestivum
  peptide (1)..(113): Ceres Seq. ID no. 15221726
LEHPNRKNKNKRERDPCLKTSSAPPPSSYSARRPRRGSRRAWRRRQIRGRSRRPRPRRTTSSRGRARSSRRLYPTALSRPRGVRRAPAIAAARRLTPTAGPTPETTAGSRGSA

SEQ ID NO: 67838 - DNA, 1644 bp, Triticum aestivum
  misc_feature (1)..(1644): Ceres Seq. ID no. 13596131
gcaaaaggaccaaactcacgcgacgacgaagaaagaagcggagaccggagatcgagatcgccggtgggagagatggagccgagacgagcgatccaccgcagatccggcgcgctcctcctcctcctcgccgctgtattcgcggcggccgccggcgcctccgcctccgccatcggcgacaggtgcgccgcctgcaaagccgtcgcggctgagctagagattggaatatcaagtgagaaaccaagaaaccacttggacttgcgtaacaggttaaattcgaaaggtcagcgcgaggggaaggtcatcgattacagagtcagtgagcttcggattgtagagcttctggatgacctatgtgataagatgcaagactatacgctgcagaagttggaatcaggcgaaaaagaatgggtgaaagtaccaagctggagcagttttcaaactgataagaaagctgcagcacgagcacactccaaaaatctatccagttactgtggaaggttactggaggaaactgaggacgagcttgctgagtggataaaaacaagctcggcagaatccgcggacgtgagccaggccctttgccaggatattagcaaacactgccagttaacaagtgctacagccccggtcgacgatgaactataacagcacgtgttagctccccgtatttactcgacaaagaaaagcagatgaatgcctgagaagcgtcaaagaagaagctccagtaggatatgaggctgtgatgtcttagcgtctgcatttttacacactcgcattgttgtcttaaagagggacttgcagattttcacatatgattactgatgtattgagaacattcaaactttgaggaatttctgcatgctgaattacagttagcagcatggtatgattcgctgaactaatctgaattcaacaatgcgagtgaggtatcatggacctcgaactgttaagccactagctgctttctacagtgatgtttcaggcatcagtgcatcagtagagtcaaccaatggggaggccatgccacacccgttagatgaaattgagccaaaaaaggatgttgaaccggagaattgtccattctggtgggcgcgttcgcccgaaaatatactgcagcaggatacatatctagcactggcagcttcttttgtaatcctgcggttgctgtatcttctattcccaaggatagtttctgcagcaaaatgggcatggaggaggcatactctgtttgcgaacttgatgggcgtgcatgaatatttcttcacctacctcgagcaagcaagacagaaattgagtaggttatacccttcgaagcgagggaatttacaggagggggcaaggaatgccactgcctgggcctccaaatcattagcatctgtgtcaatcggagaaccaagcactatcggaaggacgaactccacgaatgaactgaggtgaagtgtaaacttttttgtccgcagggatattatgtacagtagagtgatgaggatatgagcaccaagaatctgttgtaaccagctttgttagctattgtaacatcatcattagaataagcacctcccccagtattgttgccattataaccttgtcttgaatagctgttgcccaaacatattcttggaggaaaaaggtttgacgtgttcc

SEQ ID NO: 67839 - protein, 214 aa, Triticum aestivum
  peptide (1)..(214): Ceres Seq. ID no. 13596132
AKGPNSRDDEERSGDRRSRSPVGEMEPRRAIHRRSGALLLLLAAVFAAAAGASASAIGDRCAACKAVAAELEIGISSEKPRNHLDLRNRLNSKGQREGKVIDYRVSELRIVELLDDLCDKMQDYTLQKLESGEKEWVKVPSWSSFQTDKKAAARAHSKNLSSYCGRLLEETEDELAEWIKTSSAESADVSQALCQDISKHCQLTSATAPVDDEL

SEQ ID NO: 67840 - protein, 190 aa, Triticum aestivum
  peptide (1)..(190): Ceres Seq. ID no. 13596133
MEPRRAIHRRSGALLLLLAAVFAAAAGASASAIGDRCAACKAVAAELEIGISSEKPRNHLDLRNRLNSKGQREGKVIDYRVSELRIVELLDDLCDKMQDYTLQKLESGEKEWVKVPSWSSFQTDKKAAARAHSKNLSSYCGRLLEETEDELAEWIKTSSAESADVSQALCQDISKHCQLTSATAPVDDEL

SEQ ID NO: 67841 - protein, 173 aa, Triticum aestivum
  peptide (1)..(173): Ceres Seq. ID no. 13596134
MRVRYHGPRTVKPLAAFYSDVSGISASVESTNGEAMPHPLDEIEPKKDVEPENCPFWWARSPENILQQDTYLALAASFVILRLLYLLFPRIVSAAKWAWRRHTLFANLMGVHEYFFTYLEQARQKLSRLYPSKRGNLQEGARNATAWASKSLASVSIGEPSTIGRTNSTNELR

SEQ ID NO: 67842 - DNA, 828 bp, Triticum aestivum
  misc_feature (1)..(828): Ceres Seq. ID no. 13596179
acacacgaaagcaacagccagcgatcgagacagcaagagaagctcactcagctcagctaccaccagtcccggtcacagcaatcggcatggccagcaagtcggcgtccctgctgatcctcgcggcgctggtggccgcggcgtgcctcacggagctgggctcggcggcgcgcggcgtgccggcggagaagcccgcggaggacgatgtgaagcggccggacacgttccaggaggggacggtgctgatcccggggatcgggcggtacgagctgggcacccactacatccccgacatcggcgggctggaccacagcatcccggccgccgccagtggacagttcatccccggcgccgacgacacctgggtgcccaaccccggctttgagattcccaaccccttccgcccccgctccgactctccctgatgggccgagccggccggccgccagcacgtccacgccaacgcccaccgtccgcccacacgttgcacccgtccatctacttggtagagctagcctgctacaaatcattttccgctagctttttggttgctacaataaaatagctgctgctacatggccatgcatgcatgtgtctgcgactgcgttcgcgccgtcgacgtctcgtgtttgattgaagtgtacgtgtagtcgtgtatgggatatggacggatgcgtaggaagcatccatcgcatgtctcgcttggtttgttgttgccagtgtaatgtgtttcagttcagtaagttttttgaatgataaaaaaaaaaaaaaaaaagcttatcgataccgtcgatccttcgakgkggggcccgktaaacmcaataaagtggg

SEQ ID NO: 67843 - protein, 139 aa, Triticum aestivum
  peptide (1)..(139): Ceres Seq. ID no. 15221789
TRKQQPAIETAREAHSAQLPPVPVTAIGMASKSASLLILAALVAAACLTELGSAARGVPAEKPAEDDVKRPDTFQEGTVLIPGIGRYELGTHYIPDIGGLDHSIPAAASGQFIPGADDTWVPNPGFEIPNPFRPRSDSP

SEQ ID NO: 67844 - protein, 126 aa, Triticum aestivum
  peptide (1)..(126): Ceres Seq. ID no. 15221790
HTKATASDRDSKRSSLSSATTSPGHSNRHGQQVGVPADPRGAGGRGVPHGAGLGGARRAGGEARGGRCEAAGHVPGGDGADPGDRAVRAGHPLHPRHRRAGPQHPGRRQWTVHPRRRRHLGAQPRL

SEQ ID NO: 67845 - protein, 111 aa, Triticum aestivum
  peptide (1)..(111): Ceres Seq. ID no. 15221791
MASKSASLLILAALVAAACLTELGSAARGVPAEKPAEDDVKRPDTFQEGTVLIPGIGRYELGTHYIPDIGGLDHSIPAAASGQFIPGADDTWVPNPGFEIPNPFRPRSDSP

SEQ ID NO: 67846 - DNA, 749 bp, Triticum aestivum
  misc_feature (1)..(749): Ceres Seq. ID no. 13582851
atctgccgatctcccccgttccccacctcccccttcccgtcgggccgtagccaccgcaccgcccccgatggcctcctccgctgccggcgccggcaagtcactgatccagacattccgcaagttcttcaagaagccgtgggagatcaccggcccgtgctcctcgcccgagtaccgcagcgcggtcccgggtgcgctcgagtaccgtcaaaccctgcccggccacccttcgcgaggactccctcagggccgtcatccccacctccgactcggagaccgtgttcgacatcaagtactacccgcgcgactgcggccgcaaccgcccgcccgtccgccgcaccctcctccgcaagcccgatctcgagcgctacatggccgccaagcagttcgaccccgccaaggacttccccgtcccctacgtcaattctgctgtcgagtacagcgaagtcggcggcggctacaccaagtgatccaggtcttgtggtcaagctgcagcagaagctgcactcacttcatttccgcttttccttgaaagtcccttcctcttttgtttcggagaaaaatttctggttgtaaaagatgatggtggcaataatatggctcttggggagtaaaccggatgcacctaccttgtaagttgtgttccaaaagtcagccagcctaatgctgatttgtggtttaattaaatttatgaaaaactcaaatcttctgctggaatccgtacatgatctactttcactgcgttttgacag

SEQ ID NO: 67847 - protein, 190 aa, Triticum aestivum
  peptide (1)..(190): Ceres Seq. ID no. 13582852
ICRSPPFPTSPFPSGRSHRTAPDGLLRCRRRQVTDPDIPQVLQEAVGDHRPVLLARVPQRGPGCARVPSNPARPPFARTPSGPSSPPPTRRPCSTSSTTRATAAATARPSAAPSSASPISSATWPPSSSTPPRTSPSPTSILLSSTAKSAAATPSDPGLVVKLQQKLHSLHFRFSLKVPSSFVSEKNFWL

SEQ ID NO: 67848 - protein, 175 aa, Triticum aestivum
  peptide (1)..(175): Ceres Seq. ID no. 13582853
SADLPRSPPPPSRRAVATAPPPMASSAAGAGKSLIQTFRKFFKKPWEITGPCSSPEYRSAVPGALEYRQTLPGHPSRGLPQGRHPHLRLGDRVRHQVLPARLRPQPPARPPHPPPQARSRALHGRQAVRPRQGLPRPLRQFCCRVQRSRRRLHQVIQVLWSSCSRSCTHFISAFP

SEQ ID NO: 67849 - protein, 153 aa, Triticum aestivum
  peptide (1)..(153): Ceres Seq. ID no. 13582854
MASSAAGAGKSLIQTFRKFFKKPWEITGPCSSPEYRSAVPGALEYRQTLPGHPSRGLPQGRHPHLRLGDRVRHQVLPARLRPQPPARPPHPPPQARSRALHGRQAVRPRQGLPRPLRQFCCRVQRSRRRLHQVIQVLWSSCSRSCTHFISAFP

SEQ ID NO: 67850 - DNA, 996 bp, Triticum aestivum
  misc_feature (1)..(996): Ceres Seq. ID no. 13654321
gtcagcaagcaacattaactcacttgttgagctccacactccagctccagcgcagccgcagagtgcagagtgagtgagtgggcatgggcgaggaggccaattgcgacgccgtgatggaggacggcaacggcaacgacaacggcaaggccaaggagaacggccacgccacagccgttgtggccatgccggacgtcaaggccaaggccgaggacgccgtggtggcgccgggtgacccccgcctgcagggcatctccgacgccatccgcgtcgtcccgcacttccccaagcaaggcatcatgttcaacgacatcacgacgctcctgctgcggcccggggtgttcaaggacgccctggacatgtttgtggagcgctaccgcggcatgggcatcgccgccgtcgccgggattgaggcgagaggatttatatttggccccgcgattgcactagccatcggtgccaagttcattccgttgcgcaagcctaagaaactcccaggtgaggtgatttctgagacctatgttctcgaatacggaactgattgtctggagatgcatgttggtgctatcgaaccccgtgagcgtgttttgatagttgatgatctggttgcaactggtgggacactttgtgctgctataaatcttctggaacgtgctggagctgatgtcgttgagtgtgcttgtctcattgggctccctaaatttaaggatttttacaagctcaacgggaagcctgtctatgtactggtggagtctctggaatatgaaaaataagaaaccggtgaccaggtgagggacgcatcatggcttcatcctgctgcggtagtattagggagtgggggaggttagggagcggtacgtgaatggatgggtgtagtctttgtaggctgagtggtttcttcaactgtactgaagagcttcttccttgtgctcgggagaaatgatcgttagctgagacgcgagtcctgtagttccattattatcattggttattattatt

SEQ ID NO: 67851 - protein, 228 aa, Triticum aestivum
  peptide (1)..(228): Ceres Seq. ID no. 15219640
MGEEANCDAVMEDGNGNDNGKAKENGHATAVVAMPDVKAKAEDAVVAPGDPRLQGISDAIRVVPHFPKQGIMFNDITTLLLRPGVFKDALDMFVERYRGMGIAAVAGIEARGFIFGPAIALAIGAKFIPLRKPKKLPGEVISETYVLEYGTDCLEMHVGAIEPRERVLIVDDLVATGGTLCAAINLLERAGADVVECACLIGLPKFKDFYKLNGKPVYVLVESLEYEK

SEQ ID NO: 67852 - protein, 218 aa, Triticum aestivum
  peptide (1)..(218): Ceres Seq. ID no. 15219641
MEDGNGNDNGKAKENGHATAVVAMPDVKAKAEDAVVAPGDPRLQGISDAIRVVPHFPKQGIMFNDITTLLLRPGVFKDALDMFVERYRGMGIAAVAGIEARGFIFGPAIALAIGAKFIPLRKPKKLPGEVISETYVLEYGTDCLEMHVGAIEPRERVLIVDDLVATGGTLCAAINLLERAGADVVECACLIGLPKFKDFYKLNGKPVYVLVESLEYEK

SEQ ID NO: 67853 - protein, 195 aa, Triticum aestivum
  peptide (1)..(195): Ceres Seq. ID no. 15219642
MPDVKAKAEDAVVAPGDPRLQGISDAIRVVPHFPKQGIMFNDITTLLLRPGVFKDALDMFVERYRGMGIAAVAGIEARGFIFGPAIALAIGAKFIPLRKPKKLPGEVISETYVLEYGTDCLEMHVGAIEPRERVLIVDDLVATGGTLCAAINLLERAGADVVECACLIGLPKFKDFYKLNGKPVYVLVESLEYEK

SEQ ID NO: 67854 - DNA, 821 bp, Triticum aestivum
  misc_feature (1)..(821): Ceres Seq. ID no. 12584129
accggagaaggcgccttcctcttctccccaaaccttctcttctccgcgttccatccgtcctcatcatggctgtagagggggccgggaagggggtgtcatcgatgtgctgttcaagcggcgagttgcagcggaggggcgcgggcaagaggatgctatcgagggttcttgcggatagtgttgatcgttctgggttgttggagtgggccaaatacctgacgacgggtaagatagaggtgctgtacaagcagtggatgctcggctgcgaccataaggctgtaccattctccacaacaaaaagtcaaagtgggcatgtttcttctgtctttaaacttgtgcactatgagctggtgttgcaatgcttgaagaagttgcctggcgttgttgtgcaagatataccttatagaacaagccgtgctgttcaaaatgctggcacaaactgcgcttctgataaagaagttgacgagcttctcataaagctgcccggtcgattacgagatgcacttctataccattccaacttgaaggtgtgaaatttgagcttcagaggcaagggcgctgccttattacatatgagatggggcttggcaagactctccaagtgagcatattgtattttgtgtataactatcgtgcggatagtttatatgcagaaaattgtttgttccacggtgttacaacttgtaaaatacagtaaattggcttatggatattgagcgcactgatattgagcttgcatcaatacattttgggcagtaacagattagaattttatgtctattttactgaacagttaattatatagcatttgctttttagacctt

SEQ ID NO: 67855 - protein, 175 aa, Triticum aestivum
  peptide (1)..(175): Ceres Seq. ID no. 12584130
RRRRLPLLPKPSLLRVPSVLIMAVEGAGKGVSSMCCSSGELQRRGAGKRMLSRVLADSVDRSGLLEWAKYLTTGKIEVLYKQWMLGCDHKAVPFSTTKSQSGHVSSVFKLVHYELVLQCLKKLPGVVVQDIPYRTSRAVQNAGTNCASDKEVDELLIKLPGRLRDALLYHSNLKV

SEQ ID NO: 67856 - protein, 154 aa, Triticum aestivum
  peptide (1)..(154): Ceres Seq. ID no. 12584131
MAVEGAGKGVSSMCCSSGELQRRGAGKRMLSRVLADSVDRSGLLEWAKYLTTGKIEVLYKQWMLGCDHKAVPFSTTKSQSGHVSSVFKLVHYELVLQCLKKLPGVVVQDIPYRTSRAVQNAGTNCASDKEVDELLIKLPGRLRDALLYHSNLKV

SEQ ID NO: 67857 - protein, 142 aa, Triticum aestivum
  peptide (1)..(142): Ceres Seq. ID no. 12584132
MCCSSGELQRRGAGKRMLSRVLADSVDRSGLLEWAKYLTTGKIEVLYKQWMLGCDHKAVPFSTTKSQSGHVSSVFKLVHYELVLQCLKKLPGVVVQDIPYRTSRAVQNAGTNCASDKEVDELLIKLPGRLRDALLYHSNLKV

SEQ ID NO: 67858 - DNA, 1180 bp, Triticum aestivum
  misc_feature (1)..(1180): Ceres Seq. ID no. 13654322
aatccccgaccagactcgtcgctccctgacccttcccctccaacgccgaagccctaacacgcagctccggcggctgagctcgcagtccgccccctcgcaccttcgtccccagcgcgcgcgcacccccacggccaaccacgcggcgaggcgcatcctccttcgacccccgacgaagcaggcggggagcctgacgcggccccgcgcggccttggccagatgacgaggaccagcggcgcgaacggcggcgggcagcaggggtcggggaagctcccgcgtaagcgcttctaccgggcgcgcgcgcacagcaacccgctcagcgactcgcacttcccgatcccgatagcgcccgacgacgtcgacctctcgcagcactacccgcgctacttcccggccgacaagggcgagcacggtgatggggacggggacgcggaggcgccccggatccgcttcgctgacgtcgggtgcgggtttggtgggctgctcgtcgggctctcgccgctcttccccgacaagctaatgatcggcatggagctgagggacaaggtgactgagtatgtcaaagagagggttctggctttgagagcatcaaatccaggacagtatgacaacatatccgttgtgcgcaccaattcaatgaaatacattcctaactactttggaaaggctcagctctccaaaatgttcttcctgttccctgatcctcacttcaaggagaagaaccaccggaggagggtgattagcatgcatttgctcgatgaatacgcttacgtgatggaagtgggaggaatcatatacactattactgatgtagaggagcttggtatatggatgcgcacatgtctggagaaacacccactcttccaagctgttccagaggaagagataaaagtcgatccagttgtgaagctactgtctagtgccaccgaagaaggccagaaggtcgcgaggaatggagggcagactttccaggccatcttcaggcgcatctccttgcaagaggaataagcaattttggaacttactaagctcttagcacagtgtactttcctggacttcgctagatggatttgtgccatttctatacatttttgtagcatgatttcactatgcagtagtcttacgtagcgctgctatctcaaatgtttggctctactttacaaaaaaattctggaagattgct

SEQ ID NO: 67859 - protein, 262 aa, Triticum aestivum
  peptide (1)..(262): Ceres Seq. ID no. 13654323
MTRTSGANGGGQQGSGKLPRKRFYRARAHSNPLSDSHFPIPIAPDDVDLSQHYPRYFPADKGEHGDGDGDAEAPRIRFADVGCGFGGLLVGLSPLFPDKLMIGMELRDKVTEYVKERVLALRASNPGQYDNISVVRTNSMKYIPNYFGKAQLSKMFFLFPDPHFKEKNHRRRVISMHLLDEYAYVMEVGGIIYTITDVEELGIWMRTCLEKHPLFQAVPEEEIKVDPVVKLLSSATEEGQKVARNGGQTFQAIFRRISLQEE

SEQ ID NO: 67860 - protein, 162 aa, Triticum aestivum
  peptide (1)..(162): Ceres Seq. ID no. 13654324
MIGMELRDKVTEYVKERVLALRASNPGQYDNISVVRTNSMKYIPNYFGKAQLSKMFFLFPDPHFKEKNHRRRVISMHLLDEYAYVMEVGGIIYTITDVEELGIWMRTCLEKHPLFQAVPEEEIKVDPVVKLLSSATEEGQKVARNGGQTFQAIFRRISLQEE

SEQ ID NO: 67861 - protein, 159 aa, Triticum aestivum
  peptide (1)..(159): Ceres Seq. ID no. 13654325
MELRDKVTEYVKERVLALRASNPGQYDNISVVRTNSMKYIPNYFGKAQLSKMFFLFPDPHFKEKNHRRRVISMHLLDEYAYVMEVGGIIYTITDVEELGIWMRTCLEKHPLFQAVPEEEIKVDPVVKLLSSATEEGQKVARNGGQTFQAIFRRISLQEE

SEQ ID NO: 67862 - DNA, 1115 bp, Triticum aestivum
  misc_feature (1)..(1115): Ceres Seq. ID no. 12592883
ctactgaataaacgccagaggcggcggcaccacgaaagcgaagccccctccccgtctacagtctctccacgcggggcacagatcaccactcgccgccgcacctccacgccggcggatatggagcgcgccggcgccgcgccgggggtccctgcggcaggggagggcgcggcggcggcggccgcagcgccgaccccggtggcaggggcaggggtggtgaaggggaggtcctgcaagggctgcctcttctactcgtcggtgctcaggtccaaagggcgcggccccgtctgcgtcggcgtcacccgcggcatcccccaagttcctgatcgtatggttggagaaattgagctgggagctatccaagaaggtcgcaacctttccaacttcaaatatgcatgtgctggatattccatatacctagatgacaaggatacctctacagtgaagggagagaagcatgcagagctccctatctgtgttggagttgagctattgacagacagagctccaactaaacaagctccagctcacgtaactaaacaagctccaggtcacatgaaaaaagaagctactcaagcacatggacacaaacctgcgctgacacaagccgatttcataaccaaatttcagaggaatgctggacttgtggccagtggtgtggtcaggaacatgaataaaattgggacttacgtcaaagacacggtggatgacatcctgtacccataccgcaagcgtcccaagtaaaacctagctcttgttctccttcaatcctggagtagaatagagaaaaatgtgggagcatgtaatctattacttccggagacactggcgcaggagtagcctcgcttggtttctgaggctgtggctgggatttcactgcctgtcagttcatgcctaacgctagcaggctgttgtatgcctgcctgttttggattcttgccatgttcctttggtagagcctctccgctccccagcttgcaatgcgatcttcattctgctggttcctccagcaatgtataggatgcaatgtaacaaagctataaaggagctcatcttttgcctatttgaggctatcctttggagaataataaattaataataggccgtcatttggctcc

SEQ ID NO: 67863 - protein, 246 aa, Triticum aestivum
  peptide (1)..(246): Ceres Seq. ID no. 12592884
LLNKRQRRRHHESEAPSPSTVSPRGAQITTRRRTSTPADMERAGAAPGVPAAGEGAAAAAAAPTPVAGAGVVKGRSCKGCLFYSSVLRSKGRGPVCVGVTRGIPQVPDRMVGEIELGAIQEGRNLSNFKYACAGYSIYLDDKDTSTVKGEKHAELPICVGVELLTDRAPTKQAPAHVTKQAPGHMKKEATQAHGHKPALTQADFITKFQRNAGLVASGVVRNMNKIGTYVKDTVDDILYPYRKRPK

SEQ ID NO: 67864 - protein, 207 aa, Triticum aestivum
  peptide (1)..(207): Ceres Seq. ID no. 12592885
MERAGAAPGVPAAGEGAAAAAAAPTPVAGAGVVKGRSCKGCLFYSSVLRSKGRGPVCVGVTRGIPQVPDRMVGEIELGAIQEGRNLSNFKYACAGYSIYLDDKDTSTVKGEKHAELPICVGVELLTDRAPTKQAPAHVTKQAPGHMKKEATQAHGHKPALTQADFITKFQRNAGLVASGVVRNMNKIGTYVKDTVDDILYPYRKRPK

SEQ ID NO: 67865 - protein, 137 aa, Triticum aestivum
  peptide (1)..(137): Ceres Seq. ID no. 12592886
MVGEIELGAIQEGRNLSNFKYACAGYSIYLDDKDTSTVKGEKHAELPICVGVELLTDRAPTKQAPAHVTKQAPGHMKKEATQAHGHKPALTQADFITKFQRNAGLVASGVVRNMNKIGTYVKDTVDDILYPYRKRPK

SEQ ID NO: 67866 - DNA, 786 bp, Triticum aestivum
  misc_feature (1)..(786): Ceres Seq. ID no. 12584296
aggccgtctgctccgaagctcctcctcccccgcatctctcctttcgcccccacctctctccggcgcacggctccgacgcgatggccgccccactccggcgggtcttcccctccctcggccgggccctgctctcgcctacgccggcgcggatgctctccgcggaggcctccgatgccctcgtggagatcaagcccggggagatcggcatggtctccgggatccccgaggagcacctccgccgcaaggttctaatctattcaccagctaggactgcatctcagcaaggttctggcaaagtcgggaggtggaaaatcaatttcgtgtcaacccaaaagtgggagaacccattgatgggatggacatcgactggtgatccgtatgctaatgttggtgaagctggacttacgtttgacagtgccgaatcagcgaaggcatttgctgaaaagcacggatgggaatatgtggttaggaagcgccatacacctcttctgaagcccaaaacgtatgcagagaacttcaagtggaagggccccccgaagacggaggaagcagcctaagctgtggatttgtatgttgtctggagattttcataagatgttgttttcccctgccgctcgtgctgatttcactttgttcaatacctgtcgtgcaatatgagctagaacatgtctccattaaacgtgtaataagcacgcattgcaactgaactcgtcgctcatctcatcaaaatgcttgttattagccttgcctgtaaaattccccttcacacagaatttcttggctact

SEQ ID NO: 67867 - protein, 184 aa, Triticum aestivum
  peptide (1)..(184): Ceres Seq. ID no. 12584297
AVCSEAPPPPHLSFRPHLSPAHGSDAMAAPLRRVFPSLGRALLSPTPARMLSAEASDALVEIKPGEIGMVSGIPEEHLRRKVLIYSPARTASQQGSGKVGRWKINFVSTQKWENPLMGWTSTGDPYANVGEAGLTFDSAESAKAFAEKHGWEYVVRKRHTPLLKPKTYAENFKWKGPPKTEEAA

SEQ ID NO: 67868 - protein, 158 aa, Triticum aestivum
  peptide (1)..(158): Ceres Seq. ID no. 12584298
MAAPLRRVFPSLGRALLSPTPARMLSAEASDALVEIKPGEIGMVSGIPEEHLRRKVLIYSPARTASQQGSGKVGRWKINFVSTQKWENPLMGWTSTGDPYANVGEAGLTFDSAESAKAFAEKHGWEYVVRKRHTPLLKPKTYAENFKWKGPPKTEEAA

SEQ ID NO: 67869 - protein, 135 aa, Triticum aestivum
  peptide (1)..(135): Ceres Seq. ID no. 12584299
MLSAEASDALVEIKPGEIGMVSGIPEEHLRRKVLIYSPARTASQQGSGKVGRWKINFVSTQKWENPLMGWTSTGDPYANVGEAGLTFDSAESAKAFAEKHGWEYVVRKRHTPLLKPKTYAENFKWKGPPKTEEAA

SEQ ID NO: 67870 - DNA, 957 bp, Triticum aestivum
  misc_feature (1)..(957): Ceres Seq. ID no. 13591072
acttgaatgcccttgcgacgtctcctatcatggctatctataaacgccggccggccacaccatgccttctcctcctcctcctcctcctcctcgtcaacagctagccagcaagaagcagagcagctcagaaccgagcacagaccgaagcggagccaaacgaaagaagggatctaacctagccagccggcgatcgaccgagagatggcgcggtggtgtcagctggcggcggtgctgctcgccgtgtcgatggcggcgtcgacgacggtggcgcaggacgcgctgcagaccaagtgccaggaggacctgcagaagctgtcagactgcatggactacgcgacggggcacgaggacacgccgtcggccaagtgctgcgaggacacggcggacacgcagaagtcgcggcccgagtgcctctgctccatcatccagcaggtgcacagcggcagccacggcgtgcagcagctcggcctccgcttcgaccgcctcctggcccagcccgccgcctgcaagctccccaacgccaacgtttccctctgcatcaacctgctgcacctgaccccgagctcgccagactacgctctcttcgcaaatgcttccaagattactccgtccactgccgcgccagcgagagacaccgccgacggcttcaaggttccgacggggctcggttatggcgtcgtggcggcggccgtcgtctctgctgtcttctcatccatcttctgatttttggacaagcacacgctcttttatcctctccctttcttctatccttcatgtttgtttacataactctgcaagttcccacacaacgacacgatgctttagatgatctatatctactcacgtggtaagaggattcgttcggatgacttactcttgttttaccccagacaagtagatggaaagttgagacttgtgtttcttcatgtggaagtgatggtttgtagtaatatcctg

SEQ ID NO: 67871 - protein, 173 aa, Triticum aestivum
  peptide (1)..(173): Ceres Seq. ID no. 13591073
MARWCQLAAVLLAVSMAASTTVAQDALQTKCQEDLQKLSDCMDYATGHEDTPSAKCCEDTADTQKSRPECLCSIIQQVHSGSHGVQQLGLRFDRLLAQPAACKLPNANVSLCINLLHLTPSSPDYALFANASKITPSTAAPARDTADGFKVPTGLGYGVVAAAVVSAVFSSIF

SEQ ID NO: 67872 - protein, 164 aa, Triticum aestivum
  peptide (1)..(164): Ceres Seq. ID no. 13591074
MPSPPPPPPPRQQLASKKQSSSEPSTDRSGAKRKKGSNLASRRSTERWRGGVSWRRCCSPCRWRRRRRWRRTRCRPSARRTCRSCQTAWTTRRGTRTRRRPSAARTRRTRRSRGPSASAPSSSRCTAAATACSSSASASTASWPSPPPASSPTPTFPSASTCCT

SEQ ID NO: 67873 - protein, 158 aa, Triticum aestivum
  peptide (1)..(158): Ceres Seq. ID no. 13591075
MAASTTVAQDALQTKCQEDLQKLSDCMDYATGHEDTPSAKCCEDTADTQKSRPECLCSIIQQVHSGSHGVQQLGLRFDRLLAQPAACKLPNANVSLCINLLHLTPSSPDYALFANASKITPSTAAPARDTADGFKVPTGLGYGVVAAAVVSAVFSSIF

SEQ ID NO: 67874 - DNA, 1286 bp, Triticum aestivum
  misc_feature (1)..(1286): Ceres Seq. ID no. 13654238
agaacatcctaatcgaaaaaaccgctccccgccgccggttcagtcccctccgccggcggcgagatgtccttcttcttccgcgcggcgtcgcggccgcgttcgtcgcagcaagacctcgtgcgctccatcaaggactccctcctcgcgctcgacaccaagaccggcgccaaggcccttgaagatgttgagaaaaacatattcaccttgagacagacactttctggtgatggagaagttgaaccaaaccaggatcatgtgttacagatagcccttgaaatttgcaaggagggtgtcctttctctttttgttcagaacctgccttcgctgggttgggagggtagaaaggatcttgcccactgctggtgcattttgttgaggcagaaggttgatgaaagtcactgctgcgtgcagtatatcgaaaatcatgttgatcttctagatttccttgttgtatgctacaagaacttggaagtcgcattgaactgtggaaacatgttgcgagaatgcataaaatatccctcacttgcaaaatatatattggagtcaaatagcttcgagttgtttttccagtatgttgaattgccaaactttgatattgcttctgatgctctgaatacgttcaaggatttgctcactagacatgaagatgcagtctccgagtttctcatttcccattatgaacagttctttgaactctacaaaaggcttttaacttcagataattatgtgacaagaagacaatcagtgaagtttctttcagagtttctgttggaggccccaaatgctcagataatgaagcggtacattttggaagttcgttacttgaacattatgatgggtctactaaaggattcaagcaaaaatatcaggatatgttcctttcacatatttaaggtatttgttgccaatccaaacaagcctcgtgatatcattcaagttttggtagacaaccacaaagaattattgaagttactccatgctcttcctgcaagcaagggtgaagatgaacaacttgacgaggagcgagacttaattatcaaggaaatcgagaagctcgtgctcttgtcagtatagaccctcaagaaattcaaaattaccctttgaaaaaaaaaacagtggtcgagaaaggcaatccatttcttcctgtgtaatgtgataccctgtatagaattgtctagtgttgttatcatatttacagaaacagctcgtcattccacaagagcatgaagcattgctgcatgcatatatggttcaaacaaatctgccgcaccagattcgatatatat

SEQ ID NO: 67875 - protein, 336 aa, Triticum aestivum
  peptide (1)..(336): Ceres Seq. ID no. 15219632
MSFFFRAASRPRSSQQDLVRSIKDSLLALDTKTGAKALEDVEKNIFTLRQTLSGDGEVEPNQDHVLQIALEICKEGVLSLFVQNLPSLGWEGRKDLAHCWCILLRQKVDESHCCVQYIENHVDLLDFLVVCYKNLEVALNCGNMLRECIKYPSLAKYILESNSFELFFQYVELPNFDIASDALNTFKDLLTRHEDAVSEFLISHYEQFFELYKRLLTSDNYVTRRQSVKFLSEFLLEAPNAQIMKRYILEVRYLNIMMGLLKDSSKNIRICSFHIFKVFVANPNKPRDIIQVLVDNHKELLKLLHALPASKGEDEQLDEERDLIIKEIEKLVLLSV

SEQ ID NO: 67876 - protein, 193 aa, Triticum aestivum
  peptide (1)..(193): Ceres Seq. ID no. 15219633
MLRECIKYPSLAKYILESNSFELFFQYVELPNFDIASDALNTFKDLLTRHEDAVSEFLISHYEQFFELYKRLLTSDNYVTRRQSVKFLSEFLLEAPNAQIMKRYILEVRYLNIMMGLLKDSSKNIRICSFHIFKVFVANPNKPRDIIQVLVDNHKELLKLLHALPASKGEDEQLDEERDLIIKEIEKLVLLSV

SEQ ID NO: 67877 - DNA, 1321 bp, Triticum aestivum
  misc_feature (1)..(1321): Ceres Seq. ID no. 13596362
cacactccatgcactagtactctgcaggcactgagctcatcaaggtagcttagctaggatcaatggcgtcgagcaggacagcagcgatgctggtcctcgtggccgcggtgctgtgccctgcagccttgtccaagccgtcggcggcgttcatctctatgcccaccgaccacgtcggtggccgtattcctcccgtctcccccgccgatggactcgccttcgacttccatgccgactcctgcccgcagttgcaggacgtggtgcgctccgccgtggagaccgcgctccagagggagatcgccctcgccgccggcctccttcgcatcttcttccacgactgcttccctcagggctgtgacgcgtcggtccttctgacgggagacggcagcgagctccagttgccgccgaatctgacgctccaaccgcgggcgctgcagctcattgagtccatccgtgcccaggtgcacgccgcctgcggacccgtcgtctcctgcgccgacatcacggccctcgccacccgcgatgccgttgccttctccgggggtcagggctacgacgtgccgctcggcaggctcgacagcctcgcgccggcgccgagctcggccgtcttcgatctcccccaggccagctccaacgcctccacgctcatcgacgtcttcgagacccgcaacctcgacaatgtcgacctcgtcacgctctcaggtggccacaccatcgggaagggccactgcagctccttctccaaccgcttctccgaggactccgacttcgtccgaagcctcgcctccaactgctccagcgacttcaaccggctgcaggacctcgacgtcaccaccccggacgtgttcgacatcaagtacttcaccaacctgcaacagggaaagggggtgttcacctccgaccagaagctcaccgcggactggcgcaccgaatgggttgtcaacggctttgccgggaaccactggtggttcttcggccagtttgctgcttccatgaccaagctcgggaatctccaggggccccaaggaaacgtcggcgagatccgtcgcaacagctgcttcgtgcgcaatggacagagcatcctcaccaccaccagcgacgaggggctcgccgcctctgcttgagatcaccgatgttagcgagattaatgtcttaataagagctcgctagctaatgtagcccatgttattctagatttactcttgtttaaaatcatattatggcactttgttctgggactcctaaaaggcgcgcttcgcctcggtgtgctataattcttttatagggccaaaaaaaaaaaaaaaaaagcttatcgataccgtcg

SEQ ID NO: 67878 - protein, 352 aa, Triticum aestivum
  peptide (1)..(352): Ceres Seq. ID no. 13596363
MASSRTAAMLVLVAAVLCPAALSKPSAAFISMPTDHVGGRIPPVSPADGLAFDFHADSCPQLQDVVRSAVETALQREIALAAGLLRIFFHDCFPQGCDASVLLTGDGSELQLPPNLTLQPRALQLIESIRAQVHAACGPVVSCADITALATRDAVAFSGGQGYDVPLGRLDSLAPAPSSAVFDLPQASSNASTLIDVFETRNLDNVDLVTLSGGHTIGKGHCSSFSNRFSEDSDFVRSLASNCSSDFNRLQDLDVTTPDVFDIKYFTNLQQGKGVFTSDQKLTADWRTEWVVNGFAGNHWWFFGQFAASMTKLGNLQGPQGNVGEIRRNSCFVRNGQSILTTTSDEGLAASA

SEQ ID NO: 67879 - protein, 344 aa, Triticum aestivum
  peptide (1)..(344): Ceres Seq. ID no. 13596364
MLVLVAAVLCPAALSKPSAAFISMPTDHVGGRIPPVSPADGLAFDFHADSCPQLQDVVRSAVETALQREIALAAGLLRIFFHDCFPQGCDASVLLTGDGSELQLPPNLTLQPRALQLIESIRAQVHAACGPVVSCADITALATRDAVAFSGGQGYDVPLGRLDSLAPAPSSAVFDLPQASSNASTLIDVFETRNLDNVDLVTLSGGHTIGKGHCSSFSNRFSEDSDFVRSLASNCSSDFNRLQDLDVTTPDVFDIKYFTNLQQGKGVFTSDQKLTADWRTEWVVNGFAGNHWWFFGQFAASMTKLGNLQGPQGNVGEIRRNSCFVRNGQSILTTTSDEGLAASA

SEQ ID NO: 67880 - protein, 321 aa, Triticum aestivum
  peptide (1)..(321): Ceres Seq. ID no. 13596365
MPTDHVGGRIPPVSPADGLAFDFHADSCPQLQDVVRSAVETALQREIALAAGLLRIFFHDCFPQGCDASVLLTGDGSELQLPPNLTLQPRALQLIESIRAQVHAACGPVVSCADITALATRDAVAFSGGQGYDVPLGRLDSLAPAPSSAVFDLPQASSNASTLIDVFETRNLDNVDLVTLSGGHTIGKGHCSSFSNRFSEDSDFVRSLASNCSSDFNRLQDLDVTTPDVFDIKYFTNLQQGKGVFTSDQKLTADWRTEWVVNGFAGNHWWFFGQFAASMTKLGNLQGPQGNVGEIRRNSCFVRNGQSILTTTSDEGLAASA

SEQ ID NO: 67881 - DNA, 1406 bp, Triticum aestivum
  misc_feature (1)..(1406): Ceres Seq. ID no. 13654451
agaacatcctaatcgaaaaattccaagcaccacctgctcctctcctccaacccacgcgcccacgcacgcactaactacctcccttccccggagctcggcggagagacaagaagccaagccaccgctacgtacgccatgggcgaggacaagaaggagaagccgggcaaggcagacggtggcgaccagaagaaggacgccgcggcggcggcccagcccatcgtgctcaaggtcgacttgcattgcgccggctgcgccaccaaggttaagcgggccatcaagaacgcccctggcgtggagtcggttaagactgacacggcggccaacaaggtggtcgtcaccggcgccgcggacgcggcggagatcaaagagcgcatcgaggccaggaccaagaagcccgttcaaatcgtctccgccggagccgcctcgcccaacaaggacaacaaggagaaagacaaggacaagaagcccgacgccggcgataagccggagaaagagaagagcaaggcagcagacaaggagaagggcggtgccggtgccggtgctgakmawaaagagaawaawgtggawaccgccgacaagcccaaggaggaggagaagaaaccaaaggagcccaaagaggagacggtgacgctcaagatcaggctgcactgcgacggctgcatcgaccgcatcaagcggcgcgtcaacaagatcaaaggagtgaaggaagtgacggtggacgctgccaaggacctggtgaaggtgactggcaccatggacgcagccgccctgccgggctacctcagggacaagctcagtcggccggtggaggtggtcacccccggcaagaaggacggcgacaagaaagacgacggggagaagaagaaggacaagggcgctggcgagggcggcgaaaagaagaaggacggcggtggcggcggcgaggacaagaaggacaagtccgcggcgtccgtggcgccgatgcccatggcggacccgagcatgtaccagatgcccccacagtacggctacatgccgtaccccccggcgcccgtcggctactacggccccgccgccccgccgccgaaccccggcttctacccgaacgccgggccccagtacccgccgccctacgcgacgtaccccgcccacgcgccccagatgttcagcgacgagaaccccaacgcctgctccgtcatgtgagcagccacgccacgccacgccacgagccgacgagcacgacgcgaagcccaggctcgctgccgcagcatcagttatcaaaccagagaagcacggcctgggcttagcgcgcggtaccattagcctagctagcagctggtagttagcttagcgcaccgagaattagcagacatgtaaatggcgacagcgatcccgtcccgcgatgttaatgtaatgttccacgatcc

SEQ ID NO: 67882 - protein, 348 aa, Triticum aestivum
  peptide (1)..(348): Ceres Seq. ID no. 15219655
  misc_feature (137)..(137): Xaa is any aa, unknown or other
  misc_feature (138)..(138): Xaa is any aa, unknown or other
  misc_feature (141)..(141): Xaa is any aa, unknown or other
  misc_feature (142)..(142): Xaa is any aa, unknown or other
  misc_feature (144)..(144): Xaa is any aa, unknown or other
MGEDKKEKPGKADGGDQKKDAAAAAQPIVLKVDLHCAGCATKVKRAIKNAPGVESVKTDTAANKVVVTGAADAAEIKERIEARTKKPVQIVSAGAASPNKDNKEKDKDKKPDAGDKPEKEKSKAADKEKGGAGAGAXXKEXXVXTADKPKEEEKKPKEPKEETVTLKIRLHCDGCIDRIKRRVNKIKGVKEVTVDAAKDLVKVTGTMDAAALPGYLRDKLSRPVEVVTPGKKDGDKKDDGEKKKDKGAGEGGEKKKDGGGGGEDKKDKSAASVAPMPMADPSMYQMPPQYGYMPYPPAPVGYYGPAAPPPNPGFYPNAGPQYPPPYATYPAHAPQMFSDENPNACSVM

SEQ ID NO: 67883 - protein, 208 aa, Triticum aestivum
  peptide (1)..(208): Ceres Seq. ID no. 15219656
  misc_feature (182)..(182): Xaa is any aa, unknown or other
  misc_feature (183)..(183): Xaa is any aa, unknown or other
  misc_feature (186)..(186): Xaa is any aa, unknown or other
  misc_feature (187)..(187): Xaa is any aa, unknown or other
  misc_feature (189)..(189): Xaa is any aa, unknown or other
EHPNRKIPSTTCSSPPTHAPTHALTTSLPRSSAERQEAKPPLRTPWARTRRRSRARQTVATRRRTPRRRPSPSCSRSTCIAPAAPPRLSGPSRTPLAWSRLRLTRRPTRWSSPAPRTRRRSKSASRPGPRSPFKSSPPEPPRPTRTTRRKTRTRSPTPAISRRKRRARQQTRRRAVPVPVLXXKRXXWXPPTSPRRRRRNQRSPKRRR

SEQ ID NO: 67884 - DNA, 1419 bp, Triticum aestivum; identical to SEQ ID NO: 65792
  misc_feature (1)..(1419): Ceres Seq. ID no. 13654452

SEQ ID NO: 67885 - protein, 358 aa, Triticum aestivum; identical to SEQ ID NO: 65793
  peptide (1)..(358): Ceres Seq. ID no. 15219657

SEQ ID NO: 67886 - protein, 332 aa, Triticum aestivum; identical to SEQ ID NO: 65794
  peptide (1)..(332): Ceres Seq. ID no. 15219658

SEQ ID NO: 67887 - protein, 258 aa, Triticum aestivum; identical to SEQ ID NO: 65795
  peptide (1)..(258): Ceres Seq. ID no. 15219659

SEQ ID NO: 67888 - DNA, 1316 bp, Triticum aestivum
  misc_feature (1)..(1316): Ceres Seq. ID no. 15225352
ttttttcttgacgcccccaaaaccctagccgcttcttctctctgcccactccccgcgcgagccacagacggccgccgcctcacaccgctgagacctcctcctccccagtcaagcgcgagagtataccccagaataacaccaccatggccggcggcaagatccagaagaagcgacacggcggaggtggcggcggcggcggcgcgcggctgcagggcgggatcccgttcgagaagtccaagggccagcacatcctgcggaacccggcgctggtggactccatcatcgccaaggccggcctcaagccgaccgacaccgtcctcgagatcgggcccggaacgggaaatctcaccaagcggctgctcgaggccggcgtcaaggccgttgtcgccgtcgagctcgacccgcggatggttctcgagctgagccgccggttccaggggcaccccctctcctcacgcctcaaggttatccaaggagatgttcttaaatgtgatcttccgtacttcgatatctgcgtggcaaacatcccataccagatatcgtccccccttacattcaagcttctgtcacaccgtccgatcttcaggtgtgctgtgatcatgtttcaacgtgaatttgccatgagacttgtagcacagcctggagacactctgtactgccgtctgtcagtgaacgtgcagctcctatctcgcgtgtcacatctgctgaaggttgggcggaataacttcaggcctccacccaaggtagattcttcagttgttcgcatcgagccaaggaaacccctccctcctgtcagcttcaaagagtgggatggacttgtaaggatttgtttcaatcggaaaaacaaaactctgggctcccttttcaagcagaagcgcgtccttgagttgctagagaagaattacaagacaatgcaatctctccaacttgcccaagaatctgaaatgggcgaggagaagatgtcacctgatgatgttgcggtgctagccaatatggtcgaggacctgagcatggagatgagtgatgagaaagaggacgacgacatggaaatggatgatgctgacgtggcagatggccgtgctagcttcagagaaaagattatgggtatattgcagcagggtgattttgcagagaagaggtcttccaagctgagccaagttgatttcctctacttgctgtctctgttcaacaaagcaggtatacatttttcgtgagggcccgcttagtcagctagcttgagatggatcttgaaaagccatgtttattttttggtttatgttatgtaagtcctatataagttaaaagtcatctttgtg

SEQ ID NO: 67889 - protein, 356 aa, Triticum aestivum
  peptide (1)..(356): Ceres Seq. ID no. 15225353
MAGGKIQKKRHGGGGGGGGARLQGGIPFEKSKGQHILRNPALVDSIIAKAGLKPTDTVLEIGPGTGNLTKRLLEAGVKAVVAVELDPRMVLELSRRFQGHPLSSRLKVIQGDVLKCDLPYFDICVANIPYQISSPLTFKLLSHRPIFRCAVIMFQREFAMRLVAQPGDTLYCRLSVNVQLLSRVSHLLKVGRNNFRPPPKVDSSVVRIEPRKPLPPVSFKEWDGLVRICFNRKNKTLGSLFKQKRVLELLEKNYKTMQSLQLAQESEMGEEKMSPDDVAVLANMVEDLSMEMSDEKEDDDMEMDDADVADGRASFREKIMGILQQGDFAEKRSSKLSQVDFLYLLSLFNKAGIHFS

SEQ ID NO: 67890 - protein, 268 aa, Triticum aestivum
  peptide (1)..(268): Ceres Seq. ID no. 15225354
MVLELSRRFQGHPLSSRLKVIQGDVLKCDLPYFDICVANIPYQISSPLTFKLLSHRPIFRCAVIMFQREFAMRLVAQPGDTLYCRLSVNVQLLSRVSHLLKVGRNNFRPPPKVDSSVVRIEPRKPLPPVSFKEWDGLVRICFNRKNKTLGSLFKQKRVLELLEKNYKTMQSLQLAQESEMGEEKMSPDDVAVLANMVEDLSMEMSDEKEDDDMEMDDADVADGRASFREKIMGILQQGDFAEKRSSKLSQVDFLYLLSLFNKAGIHFS

SEQ ID NO: 67891 - protein, 204 aa, Triticum aestivum
  peptide (1)..(204): Ceres Seq. ID no. 15225355
MFQREFAMRLVAQPGDTLYCRLSVNVQLLSRVSHLLKVGRNNFRPPPKVDSSVVRIEPRKPLPPVSFKEWDGLVRICFNRKNKTLGSLFKQKRVLELLEKNYKTMQSLQLAQESEMGEEKMSPDDVAVLANMVEDLSMEMSDEKEDDDMEMDDADVADGRASFREKIMGILQQGDFAEKRSSKLSQVDFLYLLSLFNKAGIHFS

SEQ ID NO: 67892 - DNA, 554 bp, Triticum aestivum
  misc_feature (1)..(554): Ceres Seq. ID no. 13596273
aaaccagcaagcttcacacacttccttccttcctgttgtggctcctgtacatgcgcgctagcctcgcctcgtacgcgcaagacctcgccatgcctgccttggacgtcatgccggagaaggcccaccacccggccatgtcgccgtcgcaccacggccacgggtgggacgccagcggcgcccccacccccatgcacaagaggctggacggcaaggtggccattgtcaccggcggcgcgcggggcatcggggaggccatcgtcaggctcttcgtcaagcacggcgccaaggtggtcatcgcggacatcgacgacgccgccggcgaggcgctggccgcctcgctcggcccgcacgtcgccttcgtgcgctgcgacgtgtccgtggaggaggacgtggagcgcgccgtcgaccgcgccgtgtcgcgctacggccgcctcgacgtcttctgcaacaacgccggggtgctgggccgccagaacagcgccgccaagagcatcctcacgttcgacgccggcgagttcgaccgcgtgctccgcgtnnncgcgctgggcaccgcg

SEQ ID NO: 67893 - protein, 184 aa, Triticum aestivum
  peptide (1)..(184): Ceres Seq. ID no. 13596274
  misc_feature (178)..(178): Xaa is any aa, unknown or other
  misc_feature (179)..(179): Xaa is any aa, unknown or other
TSKLHTLPSFLLWLLYMRASLASYAQDLAMPALDVMPEKAHHPAMSPSHHGHGWDASGAPTPMHKRLDGKVAIVTGGARGIGEAIVRLFVKHGAKVVIADIDDAAGEALAASLGPHVAFVRCDVSVEEDVERAVDRAVSRYGRLDVFCNNAGVLGRQNSAAKSILTFDAGEFDRVLRXXALGTA

SEQ ID NO: 67894 - protein, 184 aa, Triticum aestivum
  peptide (1)..(184): Ceres Seq. ID no. 13596275
  misc_feature (179)..(179): Xaa is any aa, unknown or other
  misc_feature (180)..(180): Xaa is any aa, unknown or other
KPASFTHFLPSCCGSCTCALASPRTRKTSPCLPWTSCRRRPTTRPCRRRTTATGGTPAAPPPPCTRGWTARWPLSPAARGASGRPSSGSSSSTAPRWSSRTSTTPPARRWPPRSARTSPSCAATCPWRRTWSAPSTAPCRATAASTSSATTPGCWAARTAPPRASSRSTPASSTACSAXXRWAP

SEQ ID NO: 67895 - protein, 168 aa, Triticum aestivum
  peptide (1)..(168): Ceres Seq. ID no. 13596276
  misc_feature (162)..(162): Xaa is any aa, unknown or other
  misc_feature (163)..(163): Xaa is any aa, unknown or other
MRASLASYAQDLAMPALDVMPEKAHHPAMSPSHHGHGWDASGAPTPMHKRLDGKVAIVTGGARGIGEAIVRLFVKHGAKVVIADIDDAAGEALAASLGPHVAFVRCDVSVEEDVERAVDRAVSRYGRLDVFCNNAGVLGRQNSAAKSILTFDAGEFDRVLRXXALGTA

SEQ ID NO: 67896 - DNA, 968 bp, Triticum aestivum
  misc_feature (1)..(968): Ceres Seq. ID no. 13596277
ctttttttcccctcctcccgttgcctccacgcctccgagccagccagacacgcgagagggtagaccgcggcggcgaggcctcctgctttgcgcctagggttttgattcgatcccccccgccgccgccgccgcctgccggatggccatggagagggagctcatggagaccttcgaggccgccaagaaggccgccgacgccgccgccgaggaggccgacggctcctcccccgaggccgagcgctgcctcgacgccctgcgccgcctccgcgagttccgcgtcaacaccgacgtcctcgtctccacgcaggttggcaaacgtcttcggtacctgacgaagcaccctaactcagacatacaggcggtggctgcagacctttttgggtactggaagaaggttgttattgaagagacaggaaagaaaaacggcacaccagcaaatggaaaatcaaacaactctgcagctaaggctgagaaacctcagcccatgaaggttgaaaggaagtcagcgaacgtgaaggttgaaaagaactctacgtcgacgactgtgaagactgaaaagaatgcaactgtgaagactgaaaaggattctatgtcggcaagtgtgaagattgagaagactgtgaatagtgattccaaagtccaagttaaggtagagaaggtttcaaaggaagttagcagaacatctgaaacaaagaaaccatcttctgttccaaatggtcccccaaagctgacatcccttgtcagatgcaacgatgctgctcgagataaatacagggagcttcttgttgacgccttcgtcaaggtttccaaggaaactagtgatgatgacagagaggaaataagagatctcctggaccaggtaaatgcatgcgacccatatagagttgctgtgacagtggagtcggcgctgtttgagaggatagggcgttccaccgggacccacaaggtgaaatacaggtcgatactgt

SEQ ID NO: 67897 - protein, 276 aa, Triticum aestivum
  peptide (1)..(276): Ceres Seq. ID no. 13596278
MAMERELMETFEAAKKAADAAAEEADGSSPEAERCLDALRRLREFRVNTDVLVSTQVGKRLRYLTKHPNSDIQAVAADLFGYWKKVVIEETGKKNGTPANGKSNNSAAKAEKPQPMKVERKSANVKVEKNSTSTTVKTEKNATVKTEKDSMSASVKIEKTVNSDSKVQVKVEKVSKEVSRTSETKKPSSVPNGPPKLTSLVRCNDAARDKYRELLVDAFVKVSKETSDDDREEIRDLLDQVNACDPYRVAVTVESALFERIGRSTGTHKVKYRSIL

SEQ ID NO: 67898 - protein, 274 aa, Triticum aestivum
  peptide (1)..(274): Ceres Seq. ID no. 13596279
MERELMETFEAAKKAADAAAEEADGSSPEAERCLDALRRLREFRVNTDVLVSTQVGKRLRYLTKHPNSDIQAVAADLFGYWKKVVIEETGKKNGTPANGKSNNSAAKAEKPQPMKVERKSANVKVEKNSTSTTVKTEKNATVKTEKDSMSASVKIEKTVNSDSKVQVKVEKVSKEVSRTSETKKPSSVPNGPPKLTSLVRCNDAARDKYRELLVDAFVKVSKETSDDDREEIRDLLDQVNACDPYRVAVTVESALFERIGRSTGTHKVKYRSIL

SEQ ID NO: 67899 - protein, 269 aa, Triticum aestivum
  peptide (1)..(269): Ceres Seq. ID no. 13596280
METFEAAKKAADAAAEEADGSSPEAERCLDALRRLREFRVNTDVLVSTQVGKRLRYLTKHPNSDIQAVAADLFGYWKKVVIEETGKKNGTPANGKSNNSAAKAEKPQPMKVERKSANVKVEKNSTSTTVKTEKNATVKTEKDSMSASVKIEKTVNSDSKVQVKVEKVSKEVSRTSETKKPSSVPNGPPKLTSLVRCNDAARDKYRELLVDAFVKVSKETSDDDREEIRDLLDQVNACDPYRVAVTVESALFERIGRSTGTHKVKYRSIL

SEQ ID NO: 67900 - DNA, 739 bp, Triticum aestivum
  misc_feature (1)..(739): Ceres Seq. ID no. 12584242
agatctcgccatccatcccaagtcgtccgtcgtcggctactgccacttcccccgaagaggacctcactccccaccccagcccagccctccccgcccgctgcacagtccaaatccccgctccggccggcgaccgaccgaggatgcccgcctccatgcccaagctgctcttcctcctcctcctcctcctcgccgcggccgcccactcttcaccggaggtgccggatgcggcgggagcggggtccgagcaggcggcggtgcgcatggtgccgatggccccggctggggggtcggggttcagcggggtggtgctgaacgagacgcggcggcggctggggagcttccagctctgcgcgccctgcacctgctgcggcgggcccaggggcgtctgcgtcctctccccgtgctgctacgccatcaactgcaacatccccaaccgccccttcggattctgctccttcacgcccaggtcatgcgactgcctccactgcaacgtctgagctctgctgccgagtgtgatgaatgagggtaatgttgagagcgatagtaagtattttagagtgatgagggtgggagaaaaaacgacatgatagcatgagagttcccccaacccgaatgcttgccgatttgttattgttttagccctatagccattttgctaccgaattgttattaagtatatggtgtagctgctacctctcgatggaattggttggttattagcaaagagttggtgaattgg

SEQ ID NO: 67901 - protein, 173 aa, Triticum aestivum
  peptide (1)..(173): Ceres Seq. ID no. 12584243
DLAIHPKSSVVGYCHFPRRGPHSPPQPSPPRPLHSPNPRSGRRPTEDARLHAQAALPPPPPPRRGRPLFTGGAGCGGSGVRAGGGAHGADGPGWGVGVQRGGAERDAAAAGELPALRALHLLRRAQGRLRPLPVLLRHQLQHPQPPLRILLLHAQVMRLPPLQRLSSAAECDE

SEQ ID NO: 67902 - protein, 164 aa, Triticum aestivum
  peptide (1)..(164): Ceres Seq. ID no. 12584244
ISPSIPSRPSSATATSPEEDLTPHPSPALPARCTVQIPAPAGDRPRMPASMPKLLFLLLLLLAAAAHSSPEVPDAAGAGSEQAAVRMVPMAPAGGSGFSGVVLNETRRRLGSFQLCAPCTCCGGPRGVCVLSPCCYAINCNIPNRPFGFCSFTPRSCDCLHCNV

SEQ ID NO: 67903 - protein, 118 aa, Triticum aestivum
  peptide (1)..(118): Ceres Seq. ID no. 12584245
MPASMPKLLFLLLLLLAAAAHSSPEVPDAAGAGSEQAAVRMVPMAPAGGSGFSGVVLNETRRRLGSFQLCAPCTCCGGPRGVCVLSPCCYAINCNIPNRPFGFCSFTPRSCDCLHCNV

SEQ ID NO: 67904 - DNA, 952 bp, Triticum aestivum
  misc_feature (1)..(952): Ceres Seq. ID no. 12587236
cttgggattttgccgctcccgcccccgctcctccccggccgcgccgcgcctcgtctcgccggcccggcgaccacaggcaggcagtccaagaccaggatggcggcgtgccccgccgcgaccacggctcgcgtgggagcagcgcacggaggaggcctctggaggagaagcgggaggagcccgagcctcctcccgcgcccggcccgtagcacgagcaccacggcgcgcgcctcggagctacagcaggcccccgcccccgcccccgccccggccgccgccgtcccgacccacaaggtcaccgtccacgaccgggagcgcggggtcgtccaccagttcgtcgtgccccaggaccagtacattctgcacaccgcggaggcacaggacatcacgctcccattcgcctgccgccatggttgctgcactagctgcgctgttaggataaaatcagggcaaataagacagcctgaagctctcggaatatctgccgacttaagagagcagggctatgctttgttatgtgttggctacccatcctctgatcttgaagttgaaacgcaagatgaagacgaggtatattggctccagtttggaagatactttgcgcgggggcctgttgatagagatgattacgcgctagagcttgcaatgggagacgagtgaaacgtgcctaacagcggtacggtttttaagctgcggtttgtaggttatatagagttgcaaaaaagacttgatttgcaagtggagaaagaaaagaaaagaaaagagaaagacccctctgctcaatgttgtgtttttgcaaatttgctgtgcaaatgtatatgcttcttgcagagatgccatcctttttgctcctctgtattcccagtagacaaagaacgctatggactgtatgtatgtaaaaagctgtgaacttgtagtacctacttatttagcacctcaactcaatcttgagtgg

SEQ ID NO: 67905 - protein, 218 aa, Triticum aestivum
  peptide (1)..(218): Ceres Seq. ID no. 12587237
LGILPLPPPLLPGRAAPRLAGPATTGRQSKTRMAACPAATTARVGAAHGGGLWRRSGRSPSLLPRPARSTSTTARASELQQAPAPAPAPAAAVPTHKVTVHDRERGVVHQFVVPQDQYILHTAEAQDITLPFACRHGCCTSCAVRIKSGQIRQPEALGISADLREQGYALLCVGYPSSDLEVETQDEDEVYWLQFGRYFARGPVDRDDYALELAMGDE

SEQ ID NO: 67906 - protein, 186 aa, Triticum aestivum
  peptide (1)..(186): Ceres Seq. ID no. 12587238
MAACPAATTARVGAAHGGGLWRRSGRSPSLLPRPARSTSTTARASELQQAPAPAPAPAAAVPTHKVTVHDRERGVVHQFVVPQDQYILHTAEAQDITLPFACRHGCCTSCAVRIKSGQIRQPEALGISADLREQGYALLCVGYPSSDLEVETQDEDEVYWLQFGRYFARGPVDRDDYALELAMGDE

SEQ ID NO: 67907 - protein, 145 aa, Triticum aestivum
  peptide (1)..(145): Ceres Seq. ID no. 12587239
LGFCRSRPRSSPAAPRLVSPARRPQAGSPRPGWRRAPPRPRLAWEQRTEEASGGEAGGARASSRARPVARAPRRAPRSYSRPPPPPPPRPPPSRPTRSPSTTGSAGSSTSSSCPRTSTFCTPRRHRTSRSHSPAAMVAALAALLG

SEQ ID NO: 67908 - DNA, 1386 bp, Triticum aestivum
  misc_feature (1)..(1386): Ceres Seq. ID no. 15226556
acctgtctattccccaacaactggactccaacctcctcctcgcaccctcctcgtcccgtcgaatccatcgaggcgagggaaaaaaagagaggagaggttagggttccgaatggactatcctggaaggttctagaagcgtacgctcgttgggagggctccgggcggtgcgctgcagtggttgatggaggaggagaaggccagggggttgtcctcggcggcctcgccgctgatcccgccgacatcctcggagatcgacctcgaggccggtgccggggaccagctccagtgccggatctgcctcgagaccgacgggagagacttcatcgcgccctgcaagtgcaaggggacatccaagtacgtgcaccgcgactgcctcgaccactggagagcggtcaaggagggatttgcattttctcattgcaccacctgcaaggctccttattacttgagggttcatgtccacactgacaggaaatggcgaacactaaagtttcgtttctttgttactagagatatattattcatctttgctctagtccagtttgttatctctgcattggcttatttggtacattttattgatgggtaccagcaatattggctgaggacggcctggggtttcgataatgaagttactttttattatatatgtggagctttgttgttttttgctttactcgggttatcaggatgcttcataacgtgttatgaccgaagagtacggagtgacttggctcagccttgtcgagaactgtgcctctgttgctgccagccagggatgtgtgcagattgccatcttcctggcacactttgcatgtggactgactgcaccacatgctttgaaggctgtgcaactacagccggggagtgtggtggttgcttgggaggtgcaggggaagcagggttaccattgctcctcatcatgggagtaatcgtgctcgggctcttcacggttgtcggcatcttctatagcgttctggtggcaactatggtagggcagaggatctggcaaagacactaccacatccttgcgaaacgaatgctaacaaaggagtacgttgtggaagatgttgacggtgaacgtgcagattggtctccgccgccactccctgcagagcacgtccagcagctcaaatccctgggactcctatagcccatgacatggagctgatggctgttgatgatgaccttaagttgaggaccagcaccacgcactgccccagctgtacaggaagcacatactaagccgatggcagggcatctcttgtatccgcaatttgcgcagcccaacatggtgcgatatcatcgttcctttttgtacattgtaacagggaaacttaccacgccttgatttttatacaaatgagtcaactcgtgcccgtctag

SEQ ID NO: 67909 - protein, 323 aa, Triticum aestivum
  peptide (1)..(323): Ceres Seq. ID no. 15226557
MEEEKARGLSSAASPLIPPTSSEIDLEAGAGDQLQCRICLETDGRDFIAPCKCKGTSKYVHRDCLDHWRAVKEGFAFSHCTTCKAPYYLRVHVHTDRKWRTLKFRFFVTRDILFIFALVQFVISALAYLVHFIDGYQQYWLRTAWGFDNEVTFYYICGALLFFALLGLSGCFITCYDRRVRSDLAQPCRELCLCCCQPGMCADCHLPGTLCMWTDCTTCFEGCATTAGECGGCLGGAGEAGLPLLLIMGVIVLGLFTVVGIFYSVLVATMVGQRIWQRHYHILAKRMLTKEYVVEDVDGERADWSPPPLPAEHVQQLKSLGLL

SEQ ID NO: 67910 - DNA, 549 bp, Triticum aestivum
  misc_feature (1)..(549): Ceres Seq. ID no. 13654459
cgaaaacagtccagactacacccggtgagcgccctttccctcttccccgacctcccatcccttctccgtgcgttcgccgctgctttgccctagctgggtggcaggcggcccacgaaattcttggacagagattagtagatttcccggccccggccgggggaagataaggatagtctccttcggcgaggttggaattaggccccactgagcgcccccagccatgagttgcgggagatctgaaaacactaccagaaaatgcaggacgcgttcaacacctggtgaaacgatgtatctacatactgcagatgctaaaaagatcacccactaccaagctaatctaccaacaacaatggatcgcgatatcggcgcctaccctgtgaagcaccactttccgtctcctatagtttcttggatagaagacctttctagctttggcgatgttccttttagtcatgatactgaatacgtggatgatcaatcaacaccttcatttgggcagtcttttgcatctagcaatttgcatgacatgcaaatatcagtgagattgac

SEQ ID NO: 67911 - protein, 109 aa, Triticum aestivum
  peptide (1)..(109): Ceres Seq. ID no. 13654460
MSCGRSENTTRKCRTRSTPGETMYLHTADAKKITHYQANLPTTMDRDIGAYPVKHHFPSPIVSWIEDLSSFGDVPFSHDTEYVDDQSTPSFGQSFASSNLHDMQISVRL

SEQ ID NO: 67912 - protein, 87 aa, Triticum aestivum
  peptide (1)..(87): Ceres Seq. ID no. 13654461
MYLHTADAKKITHYQANLPTTMDRDIGAYPVKHHFPSPIVSWIEDLSSFGDVPFSHDTEYVDDQSTPSFGQSFASSNLHDMQISVRL

SEQ ID NO: 67913 - protein, 66 aa, Triticum aestivum
  peptide (1)..(66): Ceres Seq. ID no. 13654462
MDRDIGAYPVKHHFPSPIVSWIEDLSSFGDVPFSHDTEYVDDQSTPSFGQSFASSNLHDMQISVRL

SEQ ID NO: 67914 - DNA, 1378 bp, Triticum aestivum
  misc_feature (1)..(1378): Ceres Seq. ID no. 13654314
atcattcactcatcaaacgcgacgcacagagacagagggagagggtccgctgtacttgcatccttccctgcccccttcccctctcctccaagtccagaaatccgttcccctctcccccctccctccctctcgtctgcacccgagacgctcctctagatcagttcctcggtgcggttacctctcgccggaagccaagccaccatggtgtcgccggacgctatccgcaccgtcatcggcgtcataggcaatgcaaccgccctggtgctcttcctatccccagtgccgacgttcatccaaatctggaagaagaagacggtggagcagtactcggcggtgccgtacctggcgacgctgctcaactgcatgatgtgggtgctctacgggctcccgctggtgcacccgcacagcatgctcgtcatcaccatcaacggcaccggcatgctcatcgagctcacctacgtcgccctcttcctcaccttctccgtcggcgccgcccgccgccgagtcctcctcctgctggtcgccgaggtcgccttcgtcgccgcggtcggcgcgctcgtcctctccctcggccacaaacacgagcgcaggtccatggtcgtcggcatcctctgcgtcctattcggcaccggcatgtacgccgcgccgctttccgtcatgaaaatggtgatccagaccaagagcgtggagtacatgcccctgttcttgtccgtggcctcgctcgtcaatggcatctgatggactgcctacgccctcatcaagttaggcctctacatcaccatccccaacgggctgggcgtgatgttcgctgtggggcagatcatcctgtacggcatctactacaagtcgacgcagcagatcctggaggcccgtaagcgcaaggccgaccaggtgcccatgaccgaggtcgtcgtcgacggcaagagcggcagcgccaccaactcaggcgccgccaacggccactactagaagcaataccactactattaactcccgattgaagcgccttcataaatcaccttagctaattctcccatgaatcatgtacgtacgctgcgcgcccagggctcctgtgcactgtcgcgtcttcttgtgcgctctactacccttgaaagacctgttcttcatcttgtctcctttatgcctaccgtgcgtacggccgctactgtcaatcagacggctaaccgcgaccctggttggcgaatccgcgaccctggttggcggatcactggtgttcttggttttctggaagaactatgacagtccaaaggggacggcgtgttgagtttttcttatacatgttattatactactactgtttttgtttgtatttgttttggccgggaatactactactgttttgttgttgcagttgtcg

SEQ ID NO: 67915 - protein, 290 aa, Triticum aestivum
  peptide (1)..(290): Ceres Seq. ID no. 13654315
HSLIKRDAQRQRERVRCTCILPCPLPLSSKSRNPFPSPPSLPLVCTRDAPLDQFLGAVTSRRKPSHHGVAGRYPHRHRRHRQCNRPGALPIPSADVHPNLEEEDGGAVLGGAVPGDAAQLHDVGALRAPAGAPAQHARHHHQRHRHAHRAHLRRPLPHLLRRRRPPPSPPPAGRRGRLRRRGRRARPLPRPQTRAQVHGRRHPLRPIRHRHVRRAAFRHENGDPDQERGVHAPVLVRGLARQWHLMDCLRPHQVRPLHHHPQRAGRDVRCGADHPVRHLLQVDAADPGGP

SEQ ID NO: 67916 - protein, 178 aa, Triticum aestivum
  peptide (1)..(178): Ceres Seq. ID no. 13654316
MVSPDAIRTVIGVIGNATALVLFLSPVPTFIQIWKKKTVEQYSAVPYLATLLNCMMWVLYGLPLVHPHSMLVITINGTGMLIELTYVALFLTFSVGAARRRVLLLLVAEVAFVAAVGALVLSLGHKHERRSMVVGILCVLFGTGMYAAPLSVMKMVIQTKSVEYMPLFLSVASLVNGI

SEQ ID NO: 67917 - DNA, 1385 bp, Triticum aestivum
  misc_feature (1)..(1385): Ceres Seq. ID no. 12614389
aaaaaagaaataaaaaatcacgccctcccctcccctcccctccccgcagccgcagcgaacctcggcgatggcggcggcggcggacgaggcgtggtgccgggagacggttccccgggtgatggagctggtgagcccgcgcctcccccagcgcgacgcctgcgccctgctctcagtcagcccctggtgccaccgcgccctcgccgccaaccccaagctctgggaggtgctcgacctgcacgagatgaagaaagctggcgagcggctcatttcggcgcttacactggcaaggtatcgccatctcaaggtcgtgaaccttgaattcgctcaagatattgaggaccggcattttctccatctgaaagaaacgggtgctatcttactggaagagttggaactcctgaacctgaatgcatgtcagaagatctctgatacagggattggatctgccaccagtctttgtcctaatctccgggccctgtcgatctattggattgttggattgacagacgcaagcattgaacacgctgtgaagaactgcaagcagataatcgacttgaatctgagtggctgtaagaatatctcagatagaggaatacagctagttgccgataattatcaaggactacagaagttggacataaccaggtgcattaagttgactgatgatgcattgcaaaaagttcttgagaaatgctctgctcttgaaagcttgaacatgtatgccctttcaagttttaccgacaaggcttatacaaaaattggatatttagccaacctgacatttctagacctatgtggggcccagaacctaactgacgacggtcttagcagtatatcaagatgcggaagtttgacatatctcaatttatcttggtgcgtacgtgttactgatgttggggtggtagctatcgcacaaggttgtcggtcccttgaactactaagtttattcggaatacttggagtaactgatgcctgcctggaggctttgtcaaaatcttgcccaaatagtctcacgactctggatgtaaatggctgtactggtattaagaggaggagccgggacgacctgatccaactgttcccacgattgagttgcttcaaggtgcacagctagaaacaacggcttgggcttttgtagaattatcattaccctggctggcactcgaaaaagcatatgcggaagtgtctggcgctggagaaacagagcagcacgacagagtttttgccgcctgctggttccttgattctatgctgatgtgagagagatcgcaggacctgtacaatcgattttcgtaatatgtgtggcgtctctcggttacattgttacaaaaattaaaaaccatgacgcacttattttctacatgaccaaagtcatcttttcttcg

SEQ ID NO: 67918 - protein, 348 aa, Triticum aestivum
  peptide (1)..(348): Ceres Seq. ID no. 12614390
MAAAADEAWCRETVPRVMELVSPRLPQRDACALLSVSPWCHRALAANPKLWEVLDLHEMKKAGERLISALTLARYRHLKVVNLEFAQDIEDRHFLHLKETGAILLEELELLNLNACQKISDTGIGSATSLCPNLRALSIYWIVGLTDASIEHAVKNCKQIIDLNLSGCKNISDRGIQLVADNYQGLQKLDITRCIKLTDDALQKVLEKCSALESLNMYALSSFTDKAYTKIGYLANLTFLDLCGAQNLTDDGLSSISRCGSLTYLNLSWCVRVTDVGVVAIAQGCRSLELLSLFGILGVTDACLEALSKSCPNSLTTLDVNGCTGIKRRSRDDLIQLFPRLSCFKVHS

SEQ ID NO: 67919 - protein, 331 aa, Triticum aestivum
  peptide (1)..(331): Ceres Seq. ID no. 12614391
MELVSPRLPQRDACALLSVSPWCHRALAANPKLWEVLDLHEMKKAGERLISALTLARYRHLKVVNLEFAQDIEDRHFLHLKETGAILLEELELLNLNACQKISDTGIGSATSLCPNLRALSIYWIVGLTDASIEHAVKNCKQIIDLNLSGCKNISDRGIQLVADNYQGLQKLDITRCIKLTDDALQKVLEKCSALESLNMYALSSFTDKAYTKIGYLANLTFLDLCGAQNLTDDGLSSISRCGSLTYLNLSWCVRVTDVGVVAIAQGCRSLELLSLFGILGVTDACLEALSKSCPNSLTTLDVNGCTGIKRRSRDDLIQLFPRLSCFKVHS

SEQ ID NO: 67920 - protein, 290 aa, Triticum aestivum
  peptide (1)..(290): Ceres Seq. ID no. 12614392
MKKAGERLISALTLARYRHLKVVNLEFAQDIEDRHFLHLKETGAILLEELELLNLNACQKISDTGIGSATSLCPNLRALSIYWIVGLTDASIEHAVKNCKQIIDLNLSGCKNISDRGIQLVADNYQGLQKLDITRCIKLTDDALQKVLEKCSALESLNMYALSSFTDKAYTKIGYLANLTFLDLCGAQNLTDDGLSSISRCGSLTYLNLSWCVRVTDVGVVAIAQGCRSLELLSLFGILGVTDACLEALSKSCPNSLTTLDVNGCTGIKRRSRDDLIQLFPRLSCFKVHS

SEQ ID NO: 67921 - DNA, 1357 bp, Triticum aestivum
  misc_feature (1)..(1357): Ceres Seq. ID no. 12614549
ccgcaggctcccagcacaaacaactgctaagcccactttgatggtgaatcgagccgttttgccgcagcaccatcgtcgacttgtagggatcaagggccagcgtcaacgcctttgaaagaaatcgaaggaattagggctactaataattcaggtggtgcgtagatcacaagaaggcgacggttaaggaagatcgaggatgccaaagcagcggcacgggaaacgcctaggcgctcttgagctagagcctcggcctcggcaggatcacctgtaccttgtctttgatgactggtcgttcggatataccatccgcaaggtaaatacgtcgaatcgcttcaatccccccgtgcagcgcttgcctcggcctttcttcaaattggaggcgccgcacgagtctccggagtacttcgcgtcagcctttggcactaggattttgctgatgcatcccagggatcctgcgggtcataacttgtccggcagcttcttccccatgttggacgtccgctcgcggagtctcacctttggccctgggctcgagtttccgattcatcccgtctatctcgccgtcggcaataagctattcattattgccgaagcctcttttgagatgctctacttggatccacaatctggctccgagtggtcgtgggaactgctcccacatccgccattccagatttacgacgtctgctcgtacgctttgtacggacattctctccttgtgagcaccgagaacgaagcctttgctgccaccttcacctttgacacggtaaaaagttcatggaaacaacttggcaagtgggtgctgcctttcgagggtcgtggtcacttcgaccctctcctgggcgcatttgttgggctctcgaaagacccagacaccctcggccaactcatttgctgctacatgcacacctccgacactggccacacccttgagttgaagctcagcaaggagaagctgttcagcgaggacccagccttgaggcacataggcgccacccttgtgtacatggaaagccagagcaaattctgcctcgtagaatgtgtctccattgttgacgacagtgctgatcaggagctcaaggaagaggaagacctgccccaatctggctgctgtctttgttgtttgactacattctatctctgtcatgacatgaatggagacccgacgaccggcaggagctgtatggtgcagtactacgaagtgcctagagcaacctctatgttgttcctccaagatcctgttgcattttggatgtaaaatgctaaaatcatgttatgatgaccgagttcctatgtttatttttcactcagttgtgactgctgcatttctatgttttaataatgtgtttactcgtct

SEQ ID NO: 67922 - protein, 353 aa, Triticum aestivum
  peptide (1)..(353): Ceres Seq. ID no. 12614550
MPKQRHGKRLGALELEPRPRQDHLYLVFDDWSFGYTIRKVNTSNRFNPPVQRLPRPFFKLEAPHESPEYFASAFGTRILLMHPRDPAGHNLSGSFFPMLDVRSRSLTFGPGLEFPIHPVYLAVGNKLFIIAEASFEMLYLDPQSGSEWSWELLPHPPFQIYDVCSYALYGHSLLVSTENEAFAATFTFDTVKSSWKQLGKWVLPFEGRGHFDPLLGAFVGLSKDPDTLGQLICCYMHTSDTGHTLELKLSKEKLFSEDPALRHIGATLVYMESQSKFCLVECVSIVDDSADQELKEEEDLPQSGCCLCCLTTFYLCHDMNGDPTTGRSCMVQYYEVPRATSMLFLQDPVAFWM

SEQ ID NO: 67923 - protein, 273 aa, Triticum aestivum
  peptide (1)..(273): Ceres Seq. ID no. 12614551
MHPRDPAGHNLSGSFFPMLDVRSRSLTFGPGLEFPIHPVYLAVGNKLFIIAEASFEMLYLDPQSGSEWSWELLPHPPFQIYDVCSYALYGHSLLVSTENEAFAATFTFDTVKSSWKQLGKWVLPFEGRGHFDPLLGAFVGLSKDPDTLGQLICCYMHTSDTGHTLELKLSKEKLFSEDPALRHIGATLVYMESQSKFCLVECVSIVDDSADQELKEEEDLPQSGCCLCCLTTFYLCHDMNGDPTTGRSCMVQYYEVPRATSMLFLQDPVAFWM

SEQ ID NO: 67924 - protein, 256 aa, Triticum aestivum
  peptide (1)..(256): Ceres Seq. ID no. 12614552
MLDVRSRSLTFGPGLEFPIHPVYLAVGNKLFIIAEASFEMLYLDPQSGSEWSWELLPHPPFQIYDVCSYALYGHSLLVSTENEAFAATFTFDTVKSSWKQLGKWVLPFEGRGHFDPLLGAFVGLSKDPDTLGQLICCYMHTSDTGHTLELKLSKEKLFSEDPALRHIGATLVYMESQSKFCLVECVSIVDDSADQELKEEEDLPQSGCCLCCLTTFYLCHDMNGDPTTGRSCMVQYYEVPRATSMLFLQDPVAFWM

SEQ ID NO: 67925 - DNA, 1723 bp, Triticum aestivum
  misc_feature (1)..(1723): Ceres Seq. ID no. 14313536
aaaaaaccctgcccctctctgtttttctctctccctccgaggtttttagggtttcgcatccgcatcagccgccgccggaaccggggaggcggcgatacgtcgcgatgcagccaacataccagccgccaatgaacggccagcacgcgcctcagccgaaggcctctggggctccgccgcctcctctgcagcaggcacccccgccgcagcagtactaccaggcgccgccgcagtactaccagcagggacccccgccggcgatgtggggccacccgcagcagcatatgcctccgcagtacgcgcctccgccgcagcagtacgcgcctcagcctcctcagcagtacgcgccgccgccgcagcattacgcgccgccgccgccgcagtacggagcgcagatggctggcgggccgcctcccggaggcgaggatatcaggtcgctgtggatcggagatctccagtactggatggatgagacctacctctacaacgcctttgcgcctgtggggccgcagcaggtcacctcagtgaaaattatccgcaacaaacatactgggcagcctgagggttatggttttattgaatttcaatctcgagctgctgcggaatatgctcttgggacctttaatgggcagatgatgcctaatgttgaacaagttttcaagctaaactgggcttcttgtagtgctggtgacaagcggggtgacgatggttctgatcacacaatatttgttggtgatttggctgctgatgttactgacgccatgttggaagagatattcaaagccacctacccatcagttaaaggtgctaatgttgttactgacagggccactggtcgctccaaaggatatggttttgtacgttttggagatctaaatgagcagacacgtgctatgactgagatgaatggagtgctattgtctacaagacaaatgaggattgggcctgcagctaacaagaagaatatgggtactcagcagacatattcaactaatgcagggtaccagagctctcaagtaaatgaggcggcgaatgatcccaacaatactacaatctttgtgggcgggttagattccaatatagatgagaactatctaaggcaagtttttactccatatggcgaagttggttatgtgaagattcctgtaggcaagcgttgtggatttgtccaatttaccagcagggcgtgcgctgagcaggccatcagtgcgctgaatgggtctcagattggtagttccaatgttcgtctttcatggggccgtagccaaaacaaacaggctccccagcaggatgcaaaccagggtaatggcaacagctactatggatatcaacagggtcctgatgcatactatggtgcacccaatgtgcaagatcctagcatgcaaaactatggatactctggttatggcagttacgagcagcaacagcagccatctcagcagcagcaacctcctcagcagcagccaccacagcagcaacagcagcagcccccacagcagtgaccattgaggcaatggagcgcaatcacagattcagagctgcatgaactgaatgctaccgcgtcatgagttatcgtataggtgtccttgtttgtaagatgggtcgtatctagtagtactttgaccgttgggcagtagctctagttctattcagtgcttctcttggttttaaattatcaaactatgtccatgactgagttaagcttttaatgttattttggatcacc

SEQ ID NO: 67926 - protein, 498 aa, Triticum aestivum
  peptide (1)..(498): Ceres Seq. ID no. 14313537
KTLPLSVFLSPSEVFRVSHPHQPPPEPGRRRYVAMQPTYQPPMNGQHAPQPKASGAPPPPLQQAPPPQQYYQAPPQYYQQGPPPAMWGHPQQHMPPQYAPPPQQYAPQPPQQYAPPPQHYAPPPPQYGAQMAGGPPPGGEDIRSLWIGDLQYWMDETYLYNAFAPVGPQQVTSVKIIRNKHTGQPEGYGFIEFQSRAAAEYALGTFNGQMMPNVEQVFKLNWASCSAGDKRGDDGSDHTIFVGDLAADVTDAMLEEIFKATYPSVKGANVVTDRATGRSKGYGFVRFGDLNEQTRAMTEMNGVLLSTRQMRIGPAANKKNMGTQQTYSTNAGYQSSQVNEAANDPNNTTIFVGGLDSNIDENYLRQVFTPYGEVGYVKIPVGKRCGFVQFTSRACAEQAISALNGSQIGSSNVRLSWGRSQNKQAPQQDANQGNGNSYYGYQQGPDAYYGAPNVQDPSMQNYGYSGYGSYEQQQQPSQQQQPPQQQPPQQQQQQPPQQ

SEQ ID NO: 67927 - protein, 464 aa, Triticum aestivum
  peptide (1)..(464): Ceres Seq. ID no. 14313538
MQPTYQPPMNGQHAPQPKASGAPPPPLQQAPPPQQYYQAPPQYYQQGPPPAMWGHPQQHMPPQYAPPPQQYAPQPPQQYAPPPQHYAPPPPQYGAQMAGGPPPGGEDIRSLWIGDLQYWMDETYLYNAFAPVGPQQVTSVKIIRNKHTGQPEGYGFIEFQSRAAAEYALGTFNGQMMPNVEQVFKLNWASCSAGDKRGDDGSDHTIFVGDLAADVTDAMLEEIFKATYPSVKGANVVTDRATGRSKGYGFVRFGDLNEQTRAMTEMNGVLLSTRQMRIGPAANKKNMGTQQTYSTNAGYQSSQVNEAANDPNNTTIFVGGLDSNIDENYLRQVFTPYGEVGYVKIPVGKRCGFVQFTSRACAEQAISALNGSQIGSSNVRLSWGRSQNKQAPQQDANQGNGNSYYGYQQGPDAYYGAPNVQDPSMQNYGYSGYGSYEQQQQPSQQQQPPQQQPPQQQQQQPPQQ

SEQ ID NO: 67928 - protein, 456 aa, Triticum aestivum
  peptide (1)..(456): Ceres Seq. ID no. 14313539
MNGQHAPQPKASGAPPPPLQQAPPPQQYYQAPPQYYQQGPPPAMWGHPQQHMPPQYAPPPQQYAPQPPQQYAPPPQHYAPPPPQYGAQMAGGPPPGGEDIRSLWIGDLQYWMDETYLYNAFAPVGPQQVTSVKIIRNKHTGQPEGYGFIEFQSRAAAEYALGTFNGQMMPNVEQVFKLNWASCSAGDKRGDDGSDHTIFVGDLAADVTDAMLEEIFKATYPSVKGANVVTDRATGRSKGYGFVRFGDLNEQTRAMTEMNGVLLSTRQMRIGPAANKKNMGTQQTYSTNAGYQSSQVNEAANDPNNTTIFVGGLDSNIDENYLRQVFTPYGEVGYVKIPVGKRCGFVQFTSRACAEQAISALNGSQIGSSNVRLSWGRSQNKQAPQQDANQGNGNSYYGYQQGPDAYYGAPNVQDPSMQNYGYSGYGSYEQQQQPSQQQQPPQQQPPQQQQQQPPQQ

SEQ ID NO: 67929 - DNA, 1358 bp, Triticum aestivum
  misc_feature (1)..(1358): Ceres Seq. ID no. 13596315
gattgattccagaagaggtagtctgctcggcgaatttcatcccctaggaatccttctccttccttccttgggacgagcagggagggccgtggacatggaggattcctcctcctacttgccggggccggcggcggatttcgtcgactacctgggccccgacacctccgccaccgtcttcaccatgctccaccaccccgccgacctcgcacgcgcatccgccgtctcccgatcctggcgacaattcgttatcgacaaccagttcagcaagctgcagtgcctgcgggcctgcccggagctctccaccttcaccaccgtccacctcaccaccaccaccaccaccaccaccagaaacccctctcaatgccaggaccaggacaccgccgagaagctccaccgggtgtacacgcacctcgcccacggcctcctctcgccctacaaccccagggactgcatcatccactgcatcggcgcctccagcaccgacaacttccccaacgagaccatcgagaacaccctcgaccccgtcgaccaccttgactccaacaggccatcctactggtccagcgccggccagagggaccccgccgtgcccgagtgcctcatatatcgcctccaggccgatctctgcctcgttcacgagatcaagctgcagccattcaaagcgtttttccagcatggcgacccgatatattcgccaaagagcatccgggtccagatgggctatccaagctcaccgctacgccctgaagcactcgtctctgatgaaaatgaaggccagttgattgatgatacaaactatgtctggacctacacatctccagaattcccaatgctgcaggaaaatgttttgcaatccttcaagttaccacacccggttctctgtattggcggggtggtcaaggttgagcttcttgggagggttcagaaacaggcaatcgatggtctctactacatatgcatatctcatgtccaaataatggggaaggcactctcacgagacctcggggtcgttcctcgcgggaacggcctcgtcctgaactactatctgcatccccatacatgcggcgttccccgcagcgagtcgtcacgggacaatgggcgcagcaggtggcagggcttggcgtcgaggatctggcattctggcacggcgcgaaggataggagggctgaaccaaacgctgctgagcagactgtttggcggtccgttgcggcttgtggtcgtagcggacgaatcggaaggggaggaggaggatgatcttccttagaaggaaggaaggagctcaagggtcttatttgatttgatttgattttctgcacatatataaaagagtgactgtccttttgtggtgctgtgctgtg

SEQ ID NO: 67930 - protein, 420 aa, Triticum aestivum
  peptide (1)..(420): Ceres Seq. ID no. 13596316
IDSRRGSLLGEFHPLGILLLPSLGRAGRAVDMEDSSSYLPGPAADFVDYLGPDTSATVFTMLHHPADLARASAVSRSWRQFVIDNQFSKLQCLRACPELSTFTTVHLTTTTTTTTRNPSQCQDQDTAEKLHRVYTHLAHGLLSPYNPRDCIIHCIGASSTDNFPNETIENTLDPVDHLDSNRPSYWSSAGQRDPAVPECLIYRLQADLCLVHEIKLQPFKAFFQHGDPIYSPKSIRVQMGYPSSPLRPEALVSDENEGQLIDDTNYVWTYTSPEFPMLQENVLQSFKLPHPVLCIGGVVKVELLGRVQKQAIDGLYYICISHVQIMGKALSRDLGVVPRGNGLVLNYYLHPHTCGVPRSESSRDNGRSRWQGLASRIWHSGTARRIGGLNQTLLSRLFGGPLRLVVVADESEGEEEDDLP

SEQ ID NO: 67931 - protein, 389 aa, Triticum aestivum
  peptide (1)..(389): Ceres Seq. ID no. 13596317
MEDSSSYLPGPAADFVDYLGPDTSATVFTMLHHPADLARASAVSRSWRQFVIDNQFSKLQCLRACPELSTFTTVHLTTTTTTTTRNPSQCQDQDTAEKLHRVYTHLAHGLLSPYNPRDCIIHCIGASSTDNFPNETIENTLDPVDHLDSNRPSYWSSAGQRDPAVPECLIYRLQADLCLVHEIKLQPFKAFFQHGDPIYSPKSIRVQMGYPSSPLRPEALVSDENEGQLIDDTNYVWTYTSPEFPMLQENVLQSFKLPHPVLCIGGVVKVELLGRVQKQAIDGLYYICISHVQIMGKALSRDLGVVPRGNGLVLNYYLHPHTCGVPRSESSRDNGRSRWQGLASRIWHSGTARRIGGLNQTLLSRLFGGPLRLVVVADESEGEEEDDLP

SEQ ID NO: 67932 - protein, 360 aa, Triticum aestivum
  peptide (1)..(360): Ceres Seq. ID no. 13596318
MLHHPADLARASAVSRSWRQFVIDNQFSKLQCLRACPELSTFTTVHLTTTTTTTTRNPSQCQDQDTAEKLHRVYTHLAHGLLSPYNPRDCIIHCIGASSTDNFPNETIENTLDPVDHLDSNRPSYWSSAGQRDPAVPECLIYRLQADLCLVHEIKLQPFKAFFQHGDPIYSPKSIRVQMGYPSSPLRPEALVSDENEGQLIDDTNYVWTYTSPEFPMLQENVLQSFKLPHPVLCIGGVVKVELLGRVQKQAIDGLYYICISHVQIMGKALSRDLGVVPRGNGLVLNYYLHPHTCGVPRSESSRDNGRSRWQGLASRIWHSGTARRIGGLNQTLLSRLFGGPLRLVVVADESEGEEEDDLP

SEQ ID NO: 67933 - DNA, 2259 bp, Triticum aestivum
  misc_feature (1)..(2259): Ceres Seq. ID no. 13596319
ctagcagcgcccattaaaaaaatgaataccacgctgagggaggcctcttcctcgctcgatcccgaccgatccccgcgcagtgggggccacgcctctccatgacgcaagggccgacgtcactcctcccggtctgggcgcggacgactgcgcgaaggcccagtagtcgacgccagtcgctccacgccaccaccgcagaggccatggatggagaagacgcgcaccacaggccctcttcctcctcctcgtccggcggcccctttctctccggcctctgcgccgccgcgctccgccgcaagcccatctccgcgcgcgcctctgccgccgcctccggcgagggcctcgtgcggcagctcggcgtcctcgagctcgtgctcctcgggatcggcgcgtccatcggtgccggcatcttcgtcatcaccggaaccggcgcccgcgacgccggcccaggtgttacaatcagttttgctctcgctggagctgcgtgtgtgctcaatgcattgtgctatgctgaactggcatctcgttttcctgccgtggtcgggggagcatacttgtacacatatgcagcgtttaatgaactcacggccttcttggttttcacccagttgatgcttgattaccatattggggctgcaagcattgctcgtagcctagcaagctattttatccaattcttggagctgattccttctgtgaaaggcaatgttccgagttggattgggcatggagaagagttttttggtggtgtcgtttcagttaacatattggctccaatccttcttgtcatcctgactgtgatcctatgccgcggtgtcaaagaatcatctgcagtgaatacctttatgactacattgaagataatcatcgtcatagtcgttntatttgctggtgtgtttgaggtggatgtatcaaactggtcaccatttatgccgaatggtttcaaagctgttgtaaccggatctacagtagtcttctttgcatatgttggattcgatgcagttgctaattctgccgaggaagctaaaaacccacagcgggacttgcctattggcatcctaggaagccttctggcatgtgtcatcctatatgttgctgtatgcttggtgattactggaatgttgccatatacattactgggtgaagatgctcccttggctgaggctttttctgcaaaggggctgaaatttgtaactgttttgatcagcattggagctgttgctggtcttactacaacacttcttgttggtctgtatgttcagtcacgtttgtatcttggacttggaagggatggcctactaccttcaatattttctaaagttcatccaacactgcatactcctctgcactctcagatctgggttggttgtgttgcagcagtcttagctggcctctttaatgtgcatgcactctctcatattctctcagttggcacactgacaggctactcggttgtatcagcttgtgtgatcacacttcgatggagcgacaaagcaactaattctcgctcccttggaaaattttcaatctggcaggagggtgttttttgtcttgtcatagtggctctctgtggtttcatagcaggaatatcctaccggtttagctattctattgccttcatcatcatagcttttctgatagctacagtcggcagtttttctctgctgtttcgacaggtgtatgttcctgtggacccacctcgcttttcttgtcctggagttcctatggttccgattgtctctgttttcttcaatatgtttttgtttgctcagctacatgaagaagcttggtacagatttgtcatccttagtctcatcgcggtgggggtatatgctggatatggtcagtacaacgctgttccgtctacttcggaccactcgtctgttgcgtatcatggagtgccttcggaagccccatgatctattgcaagcctccaagtttatctgaaaatccatgtaccattggatcgtcaggggaggccatggccgtaagcctacctgtattgctcgaagccgtatgtgtagtatgttctccatagttccatatgtacatctgtatgatattttggaggtcagccaccatatcatttaccaatgaaatgacagcgaaagttttgttgagcaggatacacacacacagacacaccaaagattcacttggaaaggctttgaaagtcacgattgaaagctttatgtacttgtagtattacagttcataacttcatacatgtacttaattcatctgaaaaaaaacttagttcgc

SEQ ID NO: 67934 - protein, 605 aa, Triticum aestivum
  peptide (1)..(605): Ceres Seq. ID no. 15221835
  misc_feature (261)..(261): Xaa is any aa, unknown or other
MTQGPTSLLPVWARTTARRPSSRRQSLHATTAEAMDGEDAHHRPSSSSSSGGPFLSGLCAAALRRKPISARASAAASGEGLVRQLGVLELVLLGIGASIGAGIFVITGTGARDAGPGVTISFALAGAACVLNALCYAELASRFPAVVGGAYLYTYAAFNELTAFLVFTQLMLDYHIGAASIARSLASYFIQFLELIPSVKGNVPSWIGHGEEFFGGVVSVNILAPILLVILTVILCRGVKESSAVNTFMTTLKIIIVIVVXFAGVFEVDVSNWSPFMPNGFKAVVTGSTVVFFAYVGFDAVANSAEEAKNPQRDLPIGILGSLLACVILYVAVCLVITGMLPYTLLGEDAPLAEAFSAKGLKFVTVLISIGAVAGLTTTLLVGLYVQSRLYLGLGRDGLLPSIFSKVHPTLHTPLHSQIWVGCVAAVLAGLFNVHALSHILSVGTLTGYSVVSACVITLRWSDKATNSRSLGKFSIWQEGVFCLVIVALCGFIAGISYRFSYSIAFIIIAFLIATVGSFSLLFRQVYVPVDPPRFSCPGVPMVPIVSVFFNMFLFAQLHEEAWYRFVILSLIAVGVYAGYGQYNAVPSTSDHSSVAYHGVPSEAP

SEQ ID NO: 67935 - protein, 571 aa, Triticum aestivum
  peptide (1)..(571): Ceres Seq. ID no. 15221836
  misc_feature (227)..(227): Xaa is any aa, unknown or other
MDGEDAHHRPSSSSSSGGPFLSGLCAAALRRKPISARASAAASGEGLVRQLGVLELVLLGIGASIGAGIFVITGTGARDAGPGVTISFALAGAACVLNALCYAELASRFPAVVGGAYLYTYAAFNELTAFLVFTQLMLDYHIGAASIARSLASYFIQFLELIPSVKGNVPSWIGHGEEFFGGVVSVNILAPILLVILTVILCRGVKESSAVNTFMTTLKIIIVIVVXFAGVFEVDVSNWSPFMPNGFKAVVTGSTVVFFAYVGFDAVANSAEEAKNPQRDLPIGILGSLLACVILYVAVCLVITGMLPYTLLGEDAPLAEAFSAKGLKFVTVLISIGAVAGLTTTLLVGLYVQSRLYLGLGRDGLLPSIFSKVHPTLHTPLHSQIWVGCVAAVLAGLFNVHALSHILSVGTLTGYSVVSACVITLRWSDKATNSRSLGKFSIWQEGVFCLVIVALCGFIAGISYRFSYSIAFIIIAFLIATVGSFSLLFRQVYVPVDPPRFSCPGVPMVPIVSVFFNMFLFAQLHEEAWYRFVILSLIAVGVYAGYGQYNAVPSTSDHSSVAYHGVPSEAP

SEQ ID NO: 67936 - protein, 435 aa, Triticum aestivum
  peptide (1)..(435): Ceres Seq. ID no. 15221837
  misc_feature (91)..(91): Xaa is any aa, unknown or other
MLDYHIGAASIARSLASYFIQFLELIPSVKGNVPSWIGHGEEFFGGVVSVNILAPILLVILTVILCRGVKESSAVNTFMTTLKIIIVIVVXFAGVFEVDVSNWSPFMPNGFKAVVTGSTVVFFAYVGFDAVANSAEEAKNPQRDLPIGILGSLLACVILYVAVCLVITGMLPYTLLGEDAPLAEAFSAKGLKFVTVLISIGAVAGLTTTLLVGLYVQSRLYLGLGRDGLLPSIFSKVHPTLHTPLHSQIWVGCVAAVLAGLFNVHALSHILSVGTLTGYSVVSACVITLRWSDKATNSRSLGKFSIWQEGVFCLVIVALCGFIAGISYRFSYSIAFIIIAFLIATVGSFSLLFRQVYVPVDPPRFSCPGVPMVPIVSVFFNMFLFAQLHEEAWYRFVILSLIAVGVYAGYGQYNAVPSTSDHSSVAYHGVPSEAP

SEQ ID NO: 67937 - DNA, 1154 bp, Triticum aestivum
  misc_feature (1)..(1154): Ceres Seq. ID no. 12614145
atcccctcccccattcccttctcccccctcccactccgccatggcctccttcgtttccgcctcctccaccaccacagcactcctctgctccgcccctcccgcctcccgcggcgggctcgtggtggcgtgggcggccccggcccggcgcgcgctcgcggctcctctgcgcgcggcagcggcgcaggggtcggccaactccgcgccggtcatgatggagagcaaggtcaagaagaggaacaagaagggcgccggcgccgggggcctccccgccgccatcgacgtcgagatccgggaggccgagcagtacctcgccaccgacgggcaggaacctactccagaagacttcccctttgaaatggttgatgaagatgggatgagcgtggttattctgaaaagggactacaaggatgagaagattgaggtcattgtcagcatgcctaacgtggaaggggatcctgagtttgatgaagatgacgagggcgatgatgaggatgctgccaaggacgatgacgatgaagatgaggacggccaagaaagtagcctttctatgaaggtgatagtctccaaggaatctggcccgaacctcgagttcacctgcacagccttccacgaggagatcaccattgacgacatgatgatagcagagaaaacagagtctgattcagagaaattcccctttgagggccctgagttcaccgagcttcctccgaacgtgcagaagggcctgttcaagttcctggaggtacgaggtgtgacgctgacgaccaccaacttcatgcacgattacatgattaccaagcagaccaaggagtacgtccggtggatgaccaagctcaagggtttggttcagtagtgacgttgaacagatggccttgccccgtgactcgacagcaaaatttggtagtgtagccttctagcacgcgtagcaagagcactaagaaccctgcaaaaccagtagtttgaagtgtatctgtagtcctgtatcagcagctagctaggcagagtgagttccatttgtgttcttctggagctggccggtgaaaatcctgtaggaaggtggttactagtagcgatgaaacaagacttcctgagcttaatacaagctgtgtttctgatacttttatgcttaaatatatccggtaatgactgttgtt

SEQ ID NO: 67938 - protein, 283 aa, Triticum aestivum
  peptide (1)..(283): Ceres Seq. ID no. 12614146
SPPPFPSPPSHSAMASFVSASSTTTALLCSAPPASRGGLVVAWAAPARRALAAPLRAAAAQGSANSAPVMMESKVKKRNKKGAGAGGLPAAIDVEIREAEQYLATDGQEPTPEDFPFEMVDEDGMSVVILKRDYKDEKIEVIVSMPNVEGDPEFDEDDEGDDEDAAKDDDDEDEDGQESSLSMKVIVSKESGPNLEFTCTAFHEEITIDDMMIAEKTESDSEKFPFEGPEFTELPPNVQKGLFKFLEVRGVTLTTTNFMHDYMITKQTKEYVRWMTKLKGLVQ

SEQ ID NO: 67939 - protein, 270 aa, Triticum aestivum
  peptide (1)..(270): Ceres Seq. ID no. 12614147
MASFVSASSTTTALLCSAPPASRGGLVVAWAAPARRALAAPLRAAAAQGSANSAPVMMESKVKKRNKKGAGAGGLPAAIDVEIREAEQYLATDGQEPTPEDFPFEMVDEDGMSVVILKRDYKDEKIEVIVSMPNVEGDPEFDEDDEGDDEDAAKDDDDEDEDGQESSLSMKVIVSKESGPNLEFTCTAFHEEITIDDMMIAEKTESDSEKFPFEGPEFTELPPNVQKGLFKFLEVRGVTLTTTNFMHDYMITKQTKEYVRWMTKLKGLVQ

SEQ ID NO: 67940 - protein, 214 aa, Triticum aestivum
  peptide (1)..(214): Ceres Seq. ID no. 12614148
MMESKVKKRNKKGAGAGGLPAAIDVEIREAEQYLATDGQEPTPEDFPFEMVDEDGMSVVILKRDYKDEKIEVIVSMPNVEGDPEFDEDDEGDDEDAAKDDDDEDEDGQESSLSMKVIVSKESGPNLEFTCTAFHEEITIDDMMIAEKTESDSEKFPFEGPEFTELPPNVQKGLFKFLEVRGVTLTTTNFMHDYMITKQTKEYVRWMTKLKGLVQ

SEQ ID NO: 67941 - DNA, 1486 bp, Triticum aestivum
  misc_feature (1)..(1486): Ceres Seq. ID no. 13596180
agagttcagaacactgccactgaaacacagaagcaaatatgcagagcaccgtcgtgctttacacatggatggtcaggggccacctccaccccatgacacagttcgcccaccatctcgccgcacatggcgttcctgtcaccgtcgccgtcgccgacgtcccgtctataggcaagtcctctgagaccattgccggcctcgccgcatcctatccttccgtctccttccacctactcccgccgtcggcgacccgttccgcccagacggctgaccccgatgccgatccattcatcgcccttgtcgccgacctccgcgccaccaactctgccctcctcgccttcctgaggcccctcccgtccctcaaggctctagtcaccgacttcttctgcgcctacgggtttgatgccgccgcagagctcggcgtcccggcctaccttttcttcacctccgctgcgtcggtccttgctgcctacctgcacatccccgtcatgcgctccactgtctccttccgggacatggggcgctccctgctgcacttccccggagtccacccaattccggcgtctgacttgccggaagtgctgctcgaccgcggcgacagccagtacaagacaatccttagccttatggagcagctgccaagatctaagggcattctgtcgaacacgttcgagtggctggagccccgcgccgtcaaggcgataaaagacgggactccctgtcccggcgagtcagtaccgaaactgttctgcgtcggtccattggtcggcgaggagaggggaagcgccgtgaagcacgaatgcctgagatggctagacaagcagccagcgcggagcgtggtattcctctgcttcgggagcgcgagctcggtgcccgcagagcagttaaaggagatcgccgtgggactggagaagagcgggcacgcgttcttatgggccgtgcgagcgcccgttgcgccggacgccgacgcgacgaagcggttcgaggggcgggccgaggcggcggtggagccgctgctgccggagggattcttggacaggacgaggggacgcgggatggtggtttcctcctgggcgccgcaagtggaggtgctccggcacccggcgaccggcgcgttcgtgacgcattgcggatggaactcgacgctagagggtgttgtagccggggtgccgatgctgtgctggcccatgtacgcggagcagaggatgaacaaggtgttcgtcgtggaggagatgaaactcggggtggccatgagcggctacgacgaggggatagttaaagcggatgaggtagaggggaaggtgagactgatcatggagtccgagcaaggggaggagatcagggaacggatgacgatggcacaagtgattgctgccaatgcgctggaaagcggtggatcttcggcggcagcatttgttgacttcgtggataatctgaagatttcgatattcgattgaatcgttgactctgtagtggaattttcaaactg

SEQ ID NO: 67942 - protein, 471 aa, Triticum aestivum
  peptide (1)..(471): Ceres Seq. ID no. 15221792
MQSTVVLYTWMVRGHLHPMTQFAHHLAAHGVPVTVAVADVPSIGKSSETIAGLAASYPSVSFHLLPPSATRSAQTADPDADPFIALVADLRATNSALLAFLRPLPSLKALVTDFFCAYGFDAAAELGVPAYLFFTSAASVLAAYLHIPVMRSTVSFRDMGRSLLHFPGVHPIPASDLPEVLLDRGDSQYKTILSLMEQLPRSKGILSNTFEWLEPRAVKAIKDGTPCPGESVPKLFCVGPLVGEERGSAVKHECLRWLDKQPARSVVFLCFGSASSVPAEQLKEIAVGLEKSGHAFLWAVRAPVAPDADATKRFEGRAEAAVEPLLPEGFLDRTRGRGMVVSSWAPQVEVLRHPATGAFVTHCGWNSTLEGVVAGVPMLCWPMYAEQRMNKVFVVEEMKLGVAMSGYDEGIVKADEVEGKVRLIMESEQGEEIRERMTMAQVIAANALESGGSSAAAFVDFVDNLKISIFD

SEQ ID NO: 67943 - protein, 461 aa, Triticum aestivum
  peptide (1)..(461): Ceres Seq. ID no. 15221793
MVRGHLHPMTQFAHHLAAHGVPVTVAVADVPSIGKSSETIAGLAASYPSVSFHLLPPSATRSAQTADPDADPFIALVADLRATNSALLAFLRPLPSLKALVTDFFCAYGFDAAAELGVPAYLFFTSAASVLAAYLHIPVMRSTVSFRDMGRSLLHFPGVHPIPASDLPEVLLDRGDSQYKTILSLMEQLPRSKGILSNTFEWLEPRAVKAIKDGTPCPGESVPKLFCVGPLVGEERGSAVKHECLRWLDKQPARSVVFLCFGSASSVPAEQLKEIAVGLEKSGHAFLWAVRAPVAPDADATKRFEGRAEAAVEPLLPEGFLDRTRGRGMVVSSWAPQVEVLRHPATGAFVTHCGWNSTLEGVVAGVPMLCWPMYAEQRMNKVFVVEEMKLGVAMSGYDEGIVKADEVEGKVRLIMESEQGEEIRERMTMAQVIAANALESGGSSAAAFVDFVDNLKISIFD

SEQ ID NO: 67944 - protein, 453 aa, Triticum aestivum
  peptide (1)..(453): Ceres Seq. ID no. 15221794
MTQFAHHLAAHGVPVTVAVADVPSIGKSSETIAGLAASYPSVSFHLLPPSATRSAQTADPDADPFIALVADLRATNSALLAFLRPLPSLKALVTDFFCAYGFDAAAELGVPAYLFFTSAASVLAAYLHIPVMRSTVSFRDMGRSLLHFPGVHPIPASDLPEVLLDRGDSQYKTILSLMEQLPRSKGILSNTFEWLEPRAVKAIKDGTPCPGESVPKLFCVGPLVGEERGSAVKHECLRWLDKQPARSVVFLCFGSASSVPAEQLKEIAVGLEKSGHAFLWAVRAPVAPDADATKRFEGRAEAAVEPLLPEGFLDRTRGRGMVVSSWAPQVEVLRHPATGAFVTHCGWNSTLEGVVAGVPMLCWPMYAEQRMNKVFVVEEMKLGVAMSGYDEGIVKADEVEGKVRLIMESEQGEEIRERMTMAQVIAANALESGGSSAAAFVDFVDNLKISIFD

SEQ ID NO: 67945 - DNA, 523 bp, Triticum aestivum
  misc_feature (1)..(523): Ceres Seq. ID no. 12584310
atcggacctgcccagaccagccaacagtgagctagctagctagcgagatgagagttgcggtggtgggcggcggggtgagcgggctgacggcggcacaggagctcgcggcgagcggtggcgcacgtgtcaccgtgtacgagaaggaggactggcttggagggggtgccaggaccgtggccgtcggtgacggcccctgcctcgtccgcctcgacctttgccccatggtcttcaagcaggcaacatgccccaacatgatgcaatggttagagttgcttggggtggagattgaaagatcggagttatctttctcagtgagcacaaaattggataacggcagacaatgcgaatggagcactagcaatggtatctcgagcctttttgcacaaaagagcaatgcattgaggcctagcttttggtgcactatccgtgagatactcaagttcaagagtgatgtgcttaggtacctgnagtatcatgaaaaataaccatcatcttggccgaaatgaaactttggggcagtttg

SEQ ID NO: 67946 - protein, 145 aa, Triticum aestivum
  peptide (1)..(145): Ceres Seq. ID no. 12584311
  misc_feature (141)..(141): Xaa is any aa, unknown or other
MRVAVVGGGVSGLTAAQELAASGGARVTVYEKEDWLGGGARTVAVGDGPCLVRLDLCPMVFKQATCPNMMQWLELLGVEIERSELSFSVSTKLDNGRQCEWSTSNGISSLFAQKSNALRPSFWCTIREILKFKSDVLRYLXYHEK

SEQ ID NO: 67947 - protein, 87 aa, Triticum aestivum
  peptide (1)..(87): Ceres Seq. ID no. 12584312
  misc_feature (83)..(83): Xaa is any aa, unknown or other
MVFKQATCPNMMQWLELLGVEIERSELSFSVSTKLDNGRQCEWSTSNGISSLFAQKSNALRPSFWCTIREILKFKSDVLRYLXYHEK

SEQ ID NO: 67948 - protein, 77 aa, Triticum aestivum
  peptide (1)..(77): Ceres Seq. ID no. 12584313
  misc_feature (73)..(73): Xaa is any aa, unknown or other
MMQWLELLGVEIERSELSFSVSTKLDNGRQCEWSTSNGISSLFAQKSNALRPSFWCTIREILKFKSDVLRYLXYHEK

SEQ ID NO: 67949 - DNA, 720 bp, Triticum aestivum
  misc_feature (1)..(720): Ceres Seq. ID no. 12584327
cgaaaagcaacaagggcagctcgcatttcgccgctcaccgagccctcgaggcgcgctatccatggccacgtactacccttccggcgcctccgcgctcctgctccccgtcccgcgaacccgcgccgcctttccgcagatgtttcccggtccggcttccgggaggagctctccctgtgcagctgttcggccgcagcggaggggaagggaagcggtgggcgtcgtgcgagcatgcttcaatcctttcggggacgaacgcatcctccgggaggccttgaaggagccagttgcattcatgggtggcgtgtttgctggtctcttgaggcttgacctgaatgaggatcctctcaaggagtgggtaactcgaacggtagaggcttctggaatagctgaagagaatagtgctgaggaatcaaatgagggagctcaaaatgatggaccccaacaaattgagattgagtgagtgtcatggaatattgttaccaggagaaagctatggatactgccattttgctaggtcaatgagcaatgaagtcttgccaccaatattttcaaactgggagaaacataggcttgcgtgtcttgacatgacagtgcagacaatggtgttattttacaagccttgacaattcatgcttgttcagcactgtacctttatcaagattgtcttcagcactgtacttttttcactgttcgattccagtttcctcagttggttcgggt

SEQ ID NO: 67950 - protein, 152 aa, Triticum aestivum
  peptide (1)..(152): Ceres Seq. ID no. 12584328
EKQQGQLAFRRSPSPRGALSMATYYPSGASALLLPVPRTRAAFPQMFPGPASGRSSPCAAVRPQRRGREAVGVVRACFNPFGDERILREALKEPVAFMGGVFAGLLRLDLNEDPLKEWVTRTVEASGIAEENSAEESNEGAQNDGPQQIEIE

SEQ ID NO: 67951 - protein, 132 aa, Triticum aestivum
  peptide (1)..(132): Ceres Seq. ID no. 12584329
MATYYPSGASALLLPVPRTRAAFPQMFPGPASGRSSPCAAVRPQRRGREAVGVVRACFNPFGDERILREALKEPVAFMGGVFAGLLRLDLNEDPLKEWVTRTVEASGIAEENSAEESNEGAQNDGPQQIEIE

SEQ ID NO: 67952 - protein, 108 aa, Triticum aestivum
  peptide (1)..(108): Ceres Seq. ID no. 12584330
RKATRAARISPLTEPSRRAIHGHVLPFRRLRAPAPRPANPRRLSADVSRSGFREELSLCSCSAAAEGKGSGGRRASMLQSFRGRTHPPGGLEGASCIHGWRVCWSLEA

SEQ ID NO: 67953 - DNA, 980 bp, Triticum aestivum
  misc_feature (1)..(980): Ceres Seq. ID no. 13583037
cccgattacttcagccgccggccgccgccactgccgccagcctcggccagagcttctccgtcccctacccctacagaccgcgatctcgtcctgaaccaccggccgcgactgctgctccgcttgctctcccccgtcggagatccgcccggagcgactttcgtctttctgggtagtgccgacgctacagaaagcccaaacccggaaacagagaagacgacgccacatctacatttgcactcccacgcttaaagccggaggcggcgtaggaagcagcgatagccatggcgtcgtcgttggcaacggcaccggctgctgtacgtgaaatgcagagcgaccttgagtcccaggccaacgccctcagcaagatccagaaagacatctccaagaaccacgaggtccgcaagcagttcaccatccaggtcggcgagaatgaactcgtcctcaaggagctggagctgctgaatgaaggggcaaacgtgtacaagctgattgggccagtgttggtcaagcaggacaatgcagaggcgaaggccaacatcaagaagcgcatcgagtacatcacggctgagctagagagaatggatcgggcgctcaaggacttggaggagaaacagaatagcaagaaggaatcgataatcaagctgcaacagaagatgcaggctgtacaagcgaaggctcaggcgtaaatgaagggttccctgcattagggcctttgtcctcccaaatgttgggtcgtgttatctatcccctaaaaaggtgaaagaaatctgtagtgttcagagattgagagaagttcaaggtttgtgtagtgagagattttgtttgggagtggatacttggttgaagatgtacctcttgctggtttctagtaatatgcttgaaatgacttttattttgagaaggaattggatcaatcttttcatgtaccattttatttcttctatctttgcttatgttgattaatagattcatttttagcg

SEQ ID NO: 67954 - protein, 134 aa, Triticum aestivum
  peptide (1)..(134): Ceres Seq. ID no. 13583038
MASSLATAPAAVREMQSDLESQANALSKIQKDISKNHEVRKQFTIQVGENELVLKELELLNEGANVYKLIGPVLVKQDNAEAKANIKKRIEYITAELERMDRALKDLEEKQNSKKESIIKLQQKMQAVQAKAQA

SEQ ID NO: 67955 - protein, 120 aa, Triticum aestivum
  peptide (1)..(120): Ceres Seq. ID no. 13583039
MQSDLESQANALSKIQKDISKNHEVRKQFTIQVGENELVLKELELLNEGANVYKLIGPVLVKQDNAEAKANIKKRIEYITAELERMDRALKDLEEKQNSKKESIIKLQQKMQAVQAKAQA

SEQ ID NO: 67956 - protein, 82 aa, Triticum aestivum
  peptide (1)..(82): Ceres Seq. ID no. 13583040
PDYFSRRPPPLPPASARASPSPTPTDRDLVLNHRPRLLLRLLSPVGDPPGATFVFLGSADATESPNPETEKTTPHLHLHSHA

SEQ ID NO: 67957 - DNA, 1126 bp, Triticum aestivum
  misc_feature (1)..(1126): Ceres Seq. ID no. 14302493
ccccccagctccaaccagccagaccatccaaccaacgccgcaccgcaacaacaaccgccgcgcacgcgccgagcacggtcgaacacttgccatggctcccaagaacgcgctccccgtcgccgtcgccgccgccgcggacgccggcatggagcccaggttccgcggcgtgcgcaagcggccgtggggcaggtacgcggcggagatccgcgacccggccaggaaggcccgcgtctggctcggcaccttcgacaccgccgaggccgcggcccgcgcctacgacgccgccgcgctccactaccgcgggcccaaggccaagaccaacttccccgtcggcaccgtcgccgccttcgcccacgtcccgctcccgccgcccaaggcgctggccgtcagccccagcagcagcaccgtcgagtcttcgtcccgggacacgccggccgcggcgcccgccgctcctgctgctgctgcccccgcgcccccgccggcgctcgacctgagcctggcgatgccggccatggtggcggcgcagccgttcctgttcctggaccccagggtcgcggtgaccgtggccgtggccgcgccggcgccggccccctgccggtcagcggcgatcagcggcatgaacaaggtggcgtcccgcgaggaagagcagagcgacaccgggtcgtcgtcatccgtggtggacgcctcgccggccgtgggcgtggggttcgacctgaacctgccgccgccggtggagatggcgtaggagatggaccgatctcggtcgcccgatgacgacgcggcccggaagtaaagcaaagcgctctcgtggtagaatttaaagtttagaagaatggcgtgtacttactagtaagaggttaatcggccgtttaattgccaggatcgatccatcgatgggtaagggtaagtaggtgtacatagatcgcgtgcgtgcgttttttgcatggggaggcaggtaggatgaaacacatccatctatctgctcccaatgttacttacaatttccttaaaagcaagggaaaaaaagacaaaaaggaagaagccagtagtagagcattttgttcttcagtgtacaatatttgatctctgtctctcggattaatgtgaaatttatgatttccattcc

SEQ ID NO: 67958 - protein, 257 aa, Triticum aestivum
  peptide (1)..(257): Ceres Seq. ID no. 14302494
PPSSNQPDHPTNAAPQQQPPRTRRARSNTCHGSQERAPRRRRRRRGRRHGAQVPRRAQAAVGQVRGGDPRPGQEGPRLARHLRHRRGRGPRLRRRRAPLPRAQGQDQLPRRHRRRLRPRPAPAAQGAGRQPQQQHRRVFVPGHAGRGARRSCCCCPRAPAGARPEPGDAGHGGGAAVPVPGPQGRGDRGRGRAGAGPLPVSGDQRHEQGGVPRGRAERHRVVVIRGGRLAGRGRGVRPEPAAAGGDGVGDGPISVAR

SEQ ID NO: 67959 - protein, 247 aa, Triticum aestivum
  peptide (1)..(247): Ceres Seq. ID no. 14302495
PPAPTSQTIQPTPHRNNNRRARAEHGRTLAMAPKNALPVAVAAAADAGMEPRFRGVRKRPWGRYAAEIRDPARKARVWLGTFDTAEAAARAYDAAALHYRGPKAKTNFPVGTVAAFAHVPLPPPKALAVSPSSSTVESSSRDTPAAAPAAPAAAAPAPPPALDLSLAMPAMVAAQPFLFLDPRVAVTVAVAAPAPAPCRSAAISGMNKVASREEEQSDTGSSSSVVDASPAVGVGFDLNLPPPVEMA

SEQ ID NO: 67960 - protein, 217 aa, Triticum aestivum
  peptide (1)..(217): Ceres Seq. ID no. 14302496
MAPKNALPVAVAAAADAGMEPRFRGVRKRPWGRYAAEIRDPARKARVWLGTFDTAEAAARAYDAAALHYRGPKAKTNFPVGTVAAFAHVPLPPPKALAVSPSSSTVESSSRDTPAAAPAAPAAAAPAPPPALDLSLAMPAMVAAQPFLFLDPRVAVTVAVAAPAPAPCRSAAISGMNKVASREEEQSDTGSSSSVVDASPAVGVGFDLNLPPPVEMA

SEQ ID NO: 67961 - DNA, 908 bp, Triticum aestivum
  misc_feature (1)..(908): Ceres Seq. ID no. 13591023
attcaaccatggaagccatggcgtcatcgtcgtcggcggctaagcctaagcccagcaccaccctccgcgtggccgccttcagcggctccctccgcaagggctcgtggcacggcggcctcatccgcgcggccgaggagctgtgcgaggagtccatcccggagctgcaaatcgaccacgtcgacatctccggcctgcccatgtccaacccggacctggagacggacgacggcgacggcttcccgccggacgtcgaggcgttccgggacagggtccgcgccgccgactgctttctcttcgcctcgcccgagtacaactactccgtgaccgccacgctgaagaacgcgctggactgggcgtcgaggggcacgcacaagtgctgggcggacaaggccgcggccatcgtctccgcgggcggcagctgcggcgggggcagggcggcgttccacctccgccagatcggggtgttcctggacatccacttcatcaacaagccggagctccaggtcagggcgtacgaggacccgcccaagtttgacgccgacgggaacctcgtcgacgccgagacgagggagcggctcaagcaggtgctcctctcgctgcaggccttcgcgctccggctccagcactaactagcaggagcggaggactgagcgaagaagaaacttggcaccgtgcgattacctaaacgttaatctgcattttcctttgcgtgttggatatgtaggtacttttgactatttcactttcttttaggggttacttttcacttttgttgggcggaatacattttgctctgtattcgtgcaccagtctttatgtggttctgtaagaaagagtaagctgctgtaaacagtgtgtttgtaagaaatcacgcaagtaccctttttataaacgtttcgttaagtttt

SEQ ID NO: 67962 - protein, 208 aa, Triticum aestivum
  peptide (1)..(208): Ceres Seq. ID no. 13591024
STMEAMASSSSAAKPKPSTTLRVAAFSGSLRKGSWHGGLIRAAEELCEESIPELQIDHVDISGLPMSNPDLETDDGDGFPPDVEAFRDRVRAADCFLFASPEYNYSVTATLKNALDWASRGTHKCWADKAAAIVSAGGSCGGGRAAFHLRQIGVFLDIHFINKPELQVRAYEDPPKFDADGNLVDAETRERLKQVLLSLQAFALRLQH

SEQ ID NO: 67963 - protein, 206 aa, Triticum aestivum
  peptide (1)..(206): Ceres Seq. ID no. 13591025
MEAMASSSSAAKPKPSTTLRVAAFSGSLRKGSWHGGLIRAAEELCEESIPELQIDHVDISGLPMSNPDLETDDGDGFPPDVEAFRDRVRAADCFLFASPEYNYSVTATLKNALDWASRGTHKCWADKAAAIVSAGGSCGGGRAAFHLRQIGVFLDIHFINKPELQVRAYEDPPKFDADGNLVDAETRERLKQVLLSLQAFALRLQH

SEQ ID NO: 67964 - protein, 203 aa, Triticum aestivum
  peptide (1)..(203): Ceres Seq. ID no. 13591026
MASSSSAAKPKPSTTLRVAAFSGSLRKGSWHGGLIRAAEELCEESIPELQIDHVDISGLPMSNPDLETDDGDGFPPDVEAFRDRVRAADCFLFASPEYNYSVTATLKNALDWASRGTHKCWADKAAAIVSAGGSCGGGRAAFHLRQIGVFLDIHFINKPELQVRAYEDPPKFDADGNLVDAETRERLKQVLLSLQAFALRLQH

SEQ ID NO: 67965 - DNA, 748 bp, Triticum aestivum
  misc_feature (1)..(748): Ceres Seq. ID no. 12614157
atcttacctcgagcgaggcaaccggcagcagcctccgctgccagagtgccggtgggcgcgcgatgcaccagctttccctggccgcgcggccgccggcgccgcagtctcagtgttctcggagtaggacggcgtgccgctgtagcctgaagcaggcgcctgcctctctcgccgtggccgcaagacggtgcgctgccgcgccgctcttggccgcgtcgctcctcctcgccgccgccgccgcgtctcctggcattcctgccggtactccaccagcgtttgcccaatcccaaggcgcggcgctgttccggaaagcgtgcatcgggtgccacgacacgggagggaacatcctacagccgggcgccaccctctccatgaaggatcttgagaggaacggagttgccacggaggaagagatatacaacatcacttactacgggaagggaaggatgccgggttatggagagcaatgcacgccgagagggcagtgtaccttcggcccccggctgcctgaagaggatatcaagatgcttgcagcatttgtcaaatcgcaagcagagaacgggtggccaaagatcgacggtgatgtcgagtgatccgattagggttgaacacgaggtgctggctccatttcgcgaggaggctgaaaccataactgttgatgaggttaaattttttttttttttttgactcgcaaactgtagaacaattgttctaagtaattttatattaataaaatgaaaatagttattcg

SEQ ID NO: 67966 - protein, 195 aa, Triticum aestivum
  peptide (1)..(195): Ceres Seq. ID no. 12614158
LTSSEATGSSLRCQSAGGRAMHQLSLAARPPAPQSQCSRSRTACRCSLKQAPASLAVAARRCAAAPLLAASLLLAAAAASPGIPAGTPPAFAQSQGAALFRKACIGCHDTGGNILQPGATLSMKDLERNGVATEEEIYNITYYGKGRMPGYGEQCTPRGQCTFGPRLPEEDIKMLAAFVKSQAENGWPKIDGDVE

SEQ ID NO: 67967 - protein, 175 aa, Triticum aestivum
  peptide (1)..(175): Ceres Seq. ID no. 12614159
MHQLSLAARPPAPQSQCSRSRTACRCSLKQAPASLAVAARRCAAAPLLAASLLLAAAAASPGIPAGTPPAFAQSQGAALFRKACIGCHDTGGNILQPGATLSMKDLERNGVATEEEIYNITYYGKGRMPGYGEQCTPRGQCTFGPRLPEEDIKMLAAFVKSQAENGWPKIDGDVE

SEQ ID NO: 67968 - DNA, 596 bp, Triticum aestivum
  misc_feature (1)..(596): Ceres Seq. ID no. 13590767
gaacatcctaatcgaaaaactcaagccagcaagcaagaagcacacaggaagctcctagccaacaccaatcaaagcctccatccaatcccaagcaacctcgaggatgtcttgctgcggaggaaactgcggctgcggcagcgcctgcaagtgcggcaacggctgcggcggctgcaacatgtacccggaggttgaggccgccggcgccaccctcctcgtctccgccaccgccacccacaaggcgagctcgggcgggatggagatggcggcggagaacggcggctgcggctgcacccagtgcaagtgcggcaccagctgcggctgctcctgctgcagctgctagatctatcatcggtcatgcatgcaccgcgcgcatcatatctatgatctatctacaatctacttaccatgtaacgccacctgatcgagggtctttgtatgtatgtaagcacctgccagcatgagcagagcaggtgcactgccatgcatgtaaaccgacccctaaataaaatctcccgtggtttaaccagaaaaaaaaaaaaaaaaaagcttatcgataccgtcgacctcgagggggggmccggyacccarttcgccct

SEQ ID NO: 67969 - protein, 78 aa, Triticum aestivum
  peptide (1)..(78): Ceres Seq. ID no. 15221004
MSCCGGNCGCGSACKCGNGCGGCNMYPEVEAAGATLLVSATATHKASSGGMEMAAENGGCGCTQCKCGTSCGCSCCSC

SEQ ID NO: 67970 - protein, 63 aa, Triticum aestivum
  peptide (1)..(63): Ceres Seq. ID no. 15221005
EHPNRKTQASKQEAHRKLLANTNQSLHPIPSNLEDVLLRRKLRLRQRLQVRQRLRRLQHVPGG

SEQ ID NO: 67971 - protein, 54 aa, Triticum aestivum
  peptide (1)..(54): Ceres Seq. ID no. 15221006
MYPEVEAAGATLLVSATATHKASSGGMEMAAENGGCGCTQCKCGTSCGCSCCSC

SEQ ID NO: 67972 - DNA, 1060 bp, Triticum aestivum
  misc_feature (1)..(1060): Ceres Seq. ID no. 13596269
aaattcgatccgtaatagcgttttttcgcgtactcccgagaccccaatcttttccccctctcgtcgcatcggcggcggcgacaggacatcgggcggcggcggcggcggcggcggctggacagccgcagaacgaaggaagggctcccctgtagcgccgttcctcgtcccgatccgcacggatccgccccacctaagggccccgtgcacaaggagcaaagatgataaaccttttcaagatcaaggggcagaagaacgaagaggcagccaactcgaaaggggggcctcccgtcaagaagcaaagtcctggggaattacgtctccataaagatattgctgaacttaaccttccaaagacaactaaaatttcctttccaaatggaaaggatgatctcatgaactttgaagccactctacgacctgatgaaggatactacgtaggtgggacatttactttcaccttccaagtatctccttcctaccctcacgaggctctgaaggtcaagtgcaagaccaaggtttaccatcctaatattgacctagaaggaaatgtctgcctgaacattctgcgtgaagactggaagcctgtcttgaacatcaacaccataatatatggcttaaaccttcttttctcacaacccaatgacgaggaccccttgaatcatgaagccgcggccgtcctccgagacaacccacagaagttccagagaaatgttcaaacggcgatgtcgggaggctatgttgataacacccatttcccaaggtgcaagtaaggtctgctatgtggagctctggttccgactcttgcccagttgccctgaatgcccttgcacagtctgaaggatgtggcatgtacccaggaaatgtatcgcatttgtgttagacgtgactgttattatgcttgtttggtggatgtaccggagtcatgcatgttgaagaaacatgctaagcagaaacaaaaacctcgcctgttattcagctgaaaagttggcggaagtgttccaagcgcagcaatcatatgagcatataactgaattatgaaaaataaaagagtctctgggcc

SEQ ID NO: 67973 - protein, 183 aa, Triticum aestivum
  peptide (1)..(183): Ceres Seq. ID no. 13596270
MINLFKIKGQKNEEAANSKGGPPVKKQSPGELRLHKDIAELNLPKTTKISFPNGKDDLMNFEATLRPDEGYYVGGTFTFTFQVSPSYPHEALKVKCKTKVYHPNIDLEGNVCLNILREDWKPVLNINTIIYGLNLLFSQPNDEDPLNHEAAAVLRDNPQKFQRNVQTAMSGGYVDNTHFPRCK

SEQ ID NO: 67974 - protein, 125 aa, Triticum aestivum
  peptide (1)..(125): Ceres Seq. ID no. 13596271
MNFEATLRPDEGYYVGGTFTFTFQVSPSYPHEALKVKCKTKVYHPNIDLEGNVCLNILREDWKPVLNINTIIYGLNLLFSQPNDEDPLNHEAAAVLRDNPQKFQRNVQTAMSGGYVDNTHFPRCK

SEQ ID NO: 67975 - protein, 107 aa, Triticum aestivum
  peptide (1)..(107): Ceres Seq. ID no. 13596272
NSIRNSVFSRTPETPIFSPSRRIGGGDRTSGGGGGGGGWTAAERRKGSPVAPFLVPIRTDPPHLRAPCTRSKDDKPFQDQGAEERRGSQLERGASRQEAKSWGITSP

SEQ ID NO: 67976 - DNA, 1613 bp, Triticum aestivum
  misc_feature (1)..(1613): Ceres Seq. ID no. 13596321
atgatcgcctatttaagcttctcctgttctcgcccaccctgccccatcccattcccactctctcccagcagcggcggcagcggcacgtcgtcgtcctcctccccctcgccgtccgcgcgtccgtccaacagaggctgggaaccttaaagcggaacagggttcatggagggtggaggcgcaagaaatgtttctgcagcggcagcacagacaaaggaaagtgcggatgacggctcctgcaagccactgcctccttgctgtgtcaaggcgcaggctgctgtggcggaatctgaggccaagtgccacgctaccgtggtgtctgggtggttcacaggaacccggtcacgctctggcaaaccaagcaaagcgcagtacttcaacaatccaatgtggcctggggaggctcattcgttgaaagtagagaagattttgtaccaggggaaatcgccataccaagaagttttagtatttgagtcttcaacctatgggaatgtccttgtgcttgatggaattgttcagctcactgacaaggatgaatgtgcataccaggaaatggttactcaccttgcactgtgctcaattccatctcctaaaaatgttttggttgtcggaggtggtgatggtggtgtactacgagaaatagccaagcatgattcagtggagagtatagacatatgtgagattgatcagctagttattgatgtttgtaaagattttttcccacgtctatatgttggatataaagaccctcgtgtcaaacttcatgttggtgatgctgtggagttcttgagaaactctccagaaggaaaatatgatgccattattgttgattcatcagatccaattgggccagctcaggaacttgtggagaagcccttttttcagacaattgctagggctttaaagcctggcggtgttctttctaatctagctgaaagtatgtggctgcacacacatctaatccaggatatgctttctatctgtcgagaggtattcaagggtggcgtgcactatgcctgggcaagtgttccaacatatcctagtggtgtcattggatttttgctatgtgcgaaggaaggtccaccggtggacttcttaactcctgtgaatccaatcgagaaaattgaaggagctactaaagatggacgagagatgagattttacaattcagagattcataaggctgcttttattctgccaacgtttgtaaagagggagctggaggcatataactcttccactgaaaaggagagaccggagaagccaaccgcaaaaccagtgaagatgaaggtaatgcgggacagcgctattaccgcttcctagaccgcgggcggacacctgtgtgctatccatcttccccgatgagacccgccgcacctgtatatccacgttccacgcctgtcctttgctaccaaattttattcaatagttacatgattgtgtggtgctctagcatagttgcgtgacacaactgagggtgtaatatcactaaatgtgtatggtgtgttgcagttggtgaataaaggagcaaacagaaggggatgtgtgatgtgtttcccttatctgtaacatgtatgatgtttcattgttgcgtgagttctcgtggtgcaagtacc

SEQ ID NO: 67977 - protein, 385 aa, Triticum aestivum
  peptide (1)..(385): Ceres Seq. ID no. 13596322
MEGGGARNVSAAAAQTKESADDGSCKPLPPCCVKAQAAVAESEAKCHATVVSGWFTGTRSRSGKPSKAQYFNNPMWPGEAHSLKVEKILYQGKSPYQEVLVFESSTYGNVLVLDGIVQLTDKDECAYQEMVTHLALCSIPSPKNVLVVGGGDGGVLREIAKHDSVESIDICEIDQLVIDVCKDFFPRLYVGYKDPRVKLHVGDAVEFLRNSPEGKYDAIIVDSSDPIGPAQELVEKPFFQTIARALKPGGVLSNLAESMWLHTHLIQDMLSICREVFKGGVHYAWASVPTYPSGVIGFLLCAKEGPPVDFLTPVNPIEKIEGATKDGREMRFYNSEIHKAAFILPTFVKRELEAYNSSTEKERPEKPTAKPVKMKVMRDSAITAS

SEQ ID NO: 67978 - protein, 311 aa, Triticum aestivum
  peptide (1)..(311): Ceres Seq. ID no. 13596323
MWPGEAHSLKVEKILYQGKSPYQEVLVFESSTYGNVLVLDGIVQLTDKDECAYQEMVTHLALCSIPSPKNVLVVGGGDGGVLREIAKHDSVESIDICEIDQLVIDVCKDFFPRLYVGYKDPRVKLHVGDAVEFLRNSPEGKYDAIIVDSSDPIGPAQELVEKPFFQTIARALKPGGVLSNLAESMWLHTHLIQDMLSICREVFKGGVHYAWASVPTYPSGVIGFLLCAKEGPPVDFLTPVNPIEKIEGATKDGREMRFYNSEIHKAAFILPTFVKRELEAYNSSTEKERPEKPTAKPVKMKVMRDSAITAS

SEQ ID NO: 67979 - protein, 256 aa, Triticum aestivum
  peptide (1)..(256): Ceres Seq. ID no. 13596324
MVTHLALCSIPSPKNVLVVGGGDGGVLREIAKHDSVESIDICEIDQLVIDVCKDFFPRLYVGYKDPRVKLHVGDAVEFLRNSPEGKYDAIIVDSSDPIGPAQELVEKPFFQTIARALKPGGVLSNLAESMWLHTHLIQDMLSICREVFKGGVHYAWASVPTYPSGVIGFLLCAKEGPPVDFLTPVNPIEKIEGATKDGREMRFYNSEIHKAAFILPTFVKRELEAYNSSTEKERPEKPTAKPVKMKVMRDSAITAS

SEQ ID NO: 67980 - DNA, 674 bp, Triticum aestivum
  misc_feature (1)..(674): Ceres Seq. ID no. 13654360
tttttttggttggttgatgcaaagttgcctagctacgcttgcagattaactatcaagccccatggtcgttgtcgtctacttataagcatccattgctggaccgtcagaccttcaagtagctaggagctccagttggtttgcttgctttgattggcgatgaacggtgcggcgctagacaacgtgatccggcggctgctggaggtgcggcgggggcggccggggaagcagcaagtgcagcaggtgcagctgggcgagggggagatccggcagctctgcgccgccgccaaggacgtcttcatgcgccagcccaacctgctccagctcgacgcccccatcaagatcgccggtgacatccacggtcagtacacggacctgctgcggctgtttgagctgggcggcttcccgccgcagcacaagtacctgttcctgggcgactacgtggaccgcggcaagcagagcatcgagaccatctgcctgctgctcgcctacaagctccggtacccggagcacttcttcctcctccgcggcaaccacgagtgcgcctccgtcaaccgcgtctacggcttctacgacgagtgcaagcgccgctactccgtccgtctctggcgccacttctccgactgcttcaactgcatgcccgtcgccgccctcgtcgagtcgcgcatcctctgcat

SEQ ID NO: 67981 - protein, 172 aa, Triticum aestivum
  peptide (1)..(172): Ceres Seq. ID no. 13654361
MNGAALDNVIRRLLEVRRGRPGKQQVQQVQLGEGEIRQLCAAAKDVFMRQPNLLQLDAPIKIAGDIHGQYTDLLRLFELGGFPPQHKYLFLGDYVDRGKQSIETICLLLAYKLRYPEHFFLLRGNHECASVNRVYGFYDECKRRYSVRLWRHFSDCFNCMPVAALVESRILC

SEQ ID NO: 67982 - protein, 125 aa, Triticum aestivum
  peptide (1)..(125): Ceres Seq. ID no. 13654362
MRQPNLLQLDAPIKIAGDIHGQYTDLLRLFELGGFPPQHKYLFLGDYVDRGKQSIETICLLLAYKLRYPEHFFLLRGNHECASVNRVYGFYDECKRRYSVRLWRHFSDCFNCMPVAALVESRILC

SEQ ID NO: 67983 - DNA, 1217 bp, Triticum aestivum
  misc_feature (1)..(1217): Ceres Seq. ID no. 12613701
aactgggaccaatgtgggcggttgtataaacgagtaggcgtgccgcacagagcaagcaagaggccgcgcgcagcacagtgccgcagccgctgcaagacgcaaagagagagccaagccttttccctttcggaaaggacagacagagtcgaggtaccgcggctagggatggggttcctcccgctgcttcaggtcgtcctcctggccgccgcggcggcggcgagggctccggcggcgcgggcgtggggcgaggagggccacttcatgacctgcaagatcgccgagggttttttgacgagcgaggcgtcggcggcggtgaaggggctcctgccggagtgggccaacggcgagctcgcggcggcgtgctcgtggccggacgccgtgcggcgccaaatgccgtggtccagctccctgcacttcgccgacacccccggcgactgcaagttcagctacgccagggactgccacggcacgaaaggggagaaggacatgtgcgtggtgggaggcatcaacaactacactgccgcgctccaagactcatcaagcccgtataatcggacggagagcctgctgttcctgtcgcacttcctgggcgacatccaccagcccatgcactgcggccgcaccgccgacctcggcggcaacaccatcgtcgtcacttggtacaacacgaccaagaccaaccttcacaaggtgtgggatgagaaggtcatcgaaacggccatgaacaggttctacaaggacgaccgaagcgccatgatccaggccatcaagctcaaccttaccaacgagtggtctaaagaagagaatcagtgggcggcgtgctatactcgaaccacaacctgtgctgacaagtacgcagaggagagtgcggagctgtcgtgccccgcgtacgtgggcgctgagcaaggctccaacttggaagatgagtacttcttctcggcgctcccggtggttcagaagaggattgcccagggaggcgtcaggctgggtgcgatcctcaaccagatcttcagtgggaagaacaacagcagcattcagagcagctaaggtccattagacgaaactaacgaatgagattgtgcaaggggttagcccaaacgttatgaaggagaataaggttatcatgttcgtctgaccatgttgacttcatactatgtaagtgagttggtcagtgcgtacttctgtaatcgaatccagtatttcctgaatgtgatgat

SEQ ID NO: 67984 - protein, 348 aa, Triticum aestivum
  peptide (1)..(348): Ceres Seq. ID no. 12613702
NWDQCGRLYKRVGVPHRASKRPRAAQCRSRCKTQRESQAFSLSERTDRVEVPRLGMGFLPLLQVVLLAAAAAARAPAARAWGEEGHFMTCKIAEGFLTSEASAAVKGLLPEWANGELAAACSWPDAVRRQMPWSSSLHFADTPGDCKFSYARDCHGTKGEKDMCVVGGINNYTAALQDSSSPYNRTESLLFLSHFLGDIHQPMHCGRTADLGGNTIVVTWYNTTKTNLHKVWDEKVIETAMNRFYKDDRSAMIQAIKLNLTNEWSKEENQWAACYTRTTTCADKYAEESAELSCPAYVGAEQGSNLEDEYFFSALPVVQKRIAQGGVRLGAILNQIFSGKNNSSIQSS

SEQ ID NO: 67985 - protein, 293 aa, Triticum aestivum
  peptide (1)..(293): Ceres Seq. ID no. 12613703
MGFLPLLQVVLLAAAAAARAPAARAWGEEGHFMTCKIAEGFLTSEASAAVKGLLPEWANGELAAACSWPDAVRRQMPWSSSLHFADTPGDCKFSYARDCHGTKGEKDMCVVGGINNYTAALQDSSSPYNRTESLLFLSHFLGDIHQPMHCGRTADLGGNTIVVTWYNTTKTNLHKVWDEKVIETAMNRFYKDDRSAMIQAIKLNLTNEWSKEENQWAACYTRTTTCADKYAEESAELSCPAYVGAEQGSNLEDEYFFSALPVVQKRIAQGGVRLGAILNQIFSGKNNSSIQSS

SEQ ID NO: 67986 - protein, 261 aa, Triticum aestivum
  peptide (1)..(261): Ceres Seq. ID no. 12613704
MTCKIAEGFLTSEASAAVKGLLPEWANGELAAACSWPDAVRRQMPWSSSLHFADTPGDCKFSYARDCHGTKGEKDMCVVGGINNYTAALQDSSSPYNRTESLLFLSHFLGDIHQPMHCGRTADLGGNTIVVTWYNTTKTNLHKVWDEKVIETAMNRFYKDDRSAMIQAIKLNLTNEWSKEENQWAACYTRTTTCADKYAEESAELSCPAYVGAEQGSNLEDEYFFSALPVVQKRIAQGGVRLGAILNQIFSGKNNSSIQSS

SEQ ID NO: 67987 - DNA, 1112 bp, Triticum aestivum
  misc_feature (1)..(1112): Ceres Seq. ID no. 13596325
tttttctttcaagcaagcaagcaagcaagcagaggagagggaccgggaccgggagtgagaggaagtcgagctcttttcttcgtcgacgctggtttttggcccctgactgctggtcgagatgtcgaagatggcggacgagaaggtgatttcggcgccggcgaccggcggaggagaggacgggctgatcgcaggggacctgtcagccacggaggcgcgtgtccgtccgttggagacgctgctgcgcgccgcgcctctggggctctgcgtcgccgccatggccgtcatgctccgcgacacgcagaccaacgagtacggcaccgtctcctactccgacctcggcggattcaagtacctggtttatgccaacgggctgtgcgcggcctactycctggtctccgcgttctacactgccgtgccgcggccggcgaccctgtcccgctcctggatcgtcttcctcctagatcaggtgttcacgtacctgatcctggcggccggcgcggcgtcggcagagctactctacctggcgtacaacggcgacaaggaggtgacgtggagcgaggcgtgcggcgtgttcggcggcttctgcaggcaggcccggacgtcggtggccatcaccttcggctccgtcgtctgctacatcctcctctccctcatctcgtcctaccgcctcttcagcgcctacgacgcacccatgccctcgctcggcaacaagggcgtcgagatcgctgccttcccgcgctgagccgagaggatccctagctgctgtgccttggctactcgatgacgggtcaaaactcaaaacacgtacgtacgtagtagtatcgctgtgtgtgtaggcgaacgaaataatctgtaagggctcatagttaatttcaagctacatatagtgcatctgcctctcttctttttactttattctatatataccgtactagctttgaatcttctgctgtgaggctgtggtggattcattgatgcgttccaaaaatgcgaacctagttccgttgcaggcacccaagtgatctatgtaactacgatgagcttcctaatttaaggagttcagttgcttgtaaggtgcttgaagcaaagcaaaatcaatactcttttcgttc

SEQ ID NO: 67988 - protein, 252 aa, Triticum aestivum
  peptide (1)..(252): Ceres Seq. ID no. 15221840
  misc_feature (129)..(129): Xaa is any aa, unknown or other
FFFQASKQASRGEGPGPGVRGSRALFFVDAGFWPLTAGRDVEDGGREGDFGAGDRRRRGRADRRGPVSHGGACPSVGDAAARRASGALRRRHGRHAPRHADQRVRHRLLLRPRRIQVPGLCQRAVRGLXPGLRVLHCRAAAGDPVPLLDRLPPRSGVHVPDPGGRRGVGRATLPGVQRRQGGDVERGVRRVRRLLQAGPDVGGHHLRLRRLLHPPLPHLVLPPLQRLRRTHALARQQGRRDRCLPALSREDP

SEQ ID NO: 67989 - protein, 207 aa, Triticum aestivum
  peptide (1)..(207): Ceres Seq. ID no. 15221841
  misc_feature (90)..(90): Xaa is any aa, unknown or other
MSKMADEKVISAPATGGGEDGLIAGDLSATEARVRPLETLLRAAPLGLCVAAMAVMLRDTQTNEYGTVSYSDLGGFKYLVYANGLCAAYXLVSAFYTAVPRPATLSRSWIVFLLDQVFTYLILAAGAASAELLYLAYNGDKEVTWSEACGVFGGFCRQARTSVAITFGSVVCYILLSLISSYRLFSAYDAPMPSLGNKGVEIAAFPR

SEQ ID NO: 67990 - protein, 204 aa, Triticum aestivum
  peptide (1)..(204): Ceres Seq. ID no. 15221842
  misc_feature (87)..(87): Xaa is any aa, unknown or other
MADEKVISAPATGGGEDGLIAGDLSATEARVRPLETLLRAAPLGLCVAAMAVMLRDTQTNEYGTVSYSDLGGFKYLVYANGLCAAYXLVSAFYTAVPRPATLSRSWIVFLLDQVFTYLILAAGAASAELLYLAYNGDKEVTWSEACGVFGGFCRQARTSVAITFGSVVCYILLSLISSYRLFSAYDAPMPSLGNKGVEIAAFPR

SEQ ID NO: 67991 - DNA, 1045 bp, Triticum aestivum
  misc_feature (1)..(1045): Ceres Seq. ID no. 13596373
aaaactcgcaaagcccgtagcaaactcgcaatctctcaaacaagctcatggccacctcggcgatcacatccccagcggcgccggaagcgacgctgcccctggccggccgcgtggccatcgtcaccggcgcgtcccgcgggatcgggcgcggcatcgcgacccacctgtcgtccctcggcgccagcctggtcctcgggtacgcctccagctctcagcaggcggacgcgctggccgctgagctcccgcgcgccgtggcggtgaaggccgacgtctcggacgaggcgggcgtccggtccctctttgacgccgcggagaccgccttcggcggcccggcgcacatcctcgtggcctgcgctggccagggcatcgggacctacccgtccctcgccaacaccgccacctcggacttcgacaacgtgttcgccgtgaacacccgaggtgcgtttctgtgcctgcgcgaggcggcgaaccggctgcaccgcgggggcgggggccggatcgtggccgtgtcctcgacgctggcggcgacgctgctccccggctacgcggcgtacgtggcgtctaaggcggccgtggaggcgatggtgcgggtggccgcgaaggagctcgggtcggcacgggtgacggtgaactgcatcgcgccggggccggtggcgacggagctcttcttcgacgggaagagcgaggaggcggtggagaggttcagggctgggcacccgatggggcggcttggggaggtcggcgacatcgcgcctgcggtggggttcctctgcaccgacgcggccgagtgggtgaacggccaggtcattcggctcaacggcggcattgcttaattcattggcgtggctgtcgctctgtttctccctttcaaacggatatctccgttttcttaaaaaattgctgtgcctgtttttttgttggaggattgtgattagctgcttttggtgcttgaataaagaagaaaacacaatgatatggtgtactccgtaaactattgtaggtgctcagagttgcatgtatcttttttatgaaagaagttgcacgc

SEQ ID NO: 67992 - protein, 261 aa, Triticum aestivum
  peptide (1)..(261): Ceres Seq. ID no. 13596374
MATSAITSPAAPEATLPLAGRVAIVTGASRGIGRGIATHLSSLGASLVLGYASSSQQADALAAELPRAVAVKADVSDEAGVRSLFDAAETAFGGPAHILVACAGQGIGTYPSLANTATSDFDNVFAVNTRGAFLCLREAANRLHRGGGGRIVAVSSTLAATLLPGYAAYVASKAAVEAMVRVAAKELGSARVTVNCIAPGPVATELFFDGKSEEAVERFRAGHPMGRLGEVGDIAPAVGFLCTDAAEWVNGQVIRLNGGIA

SEQ ID NO: 67993 - DNA, 1297 bp, Triticum aestivum
  misc_feature (1)..(1297): Ceres Seq. ID no. 13654367
aacggagagaatggccggcgacgtcgcgcgcagggagctccgggcgcgcgtgggggcgatgccgtgggcggtgcggctccagctgcgcgcgctcgaggccgccgtcgacgccacgcagcgccgggacggcaccgtcaaccgcttcctcttctcgctgctcgtggaccgccaggcgcccgccaaccccgcgcgcgccgacgccgggggcgtccgctccgtggacgtcaccgtcgacgcgtccaccggcgtgcgggcccgcgtctactttacggccggggcgggggcggaggcagacgcgtcgccgcgccccgtgatcgtctacttccacggcggcggcttcacggtgttctccgcggccacccggccctacgacgagctctgccgcaccatgtgccgcgagacgggcgccgtcgtcgtgtccgtgacctaccgcctcgcgcccgagcaccgctaccccgcggcctacgacgacggggaggccgccctccggtacctcgccaccaccggcctgcccgccgaggtccccgtccgcgtcgacctctcccgctgcttcctcgccggcgacagcgccggcgccaacatcgcgcaccacgtggcccagcgctggacggcggcacccgcgacaacgcctccagccgtccacctcgccggcctcctgctcctgtcctcctacttcggcggagaggaccggaccgagtcggagcaagcgctggagggcgtggccccgatcgtgaacctccgccggtccgacttctggtggaaggcgtacttgccggagggcgccgaccgaaaccacccggccgcgcacgtgacgggcgaggccggcccggagccggagctgccggatgcgttcccgcgggcgatggtggtcgtcggcgggctcgacccgctccaggactgggggaggcggtacgccggcatgctgcgccggaagggcaaggaggtgcgcgtgatggagttcacggaggctgtacacgccttctacttcttcccggcgctgcccgagaccggcaagctcgtcgcggagatctcggcgttcgtggagagcaccgcgccgagctcgaccgcctagagaactagagacgatgattaggacaactcgtcgtggatctcgtacgtccccgtctctgctgatgttatattgttggctgatagcctatttcactgtcgaagtcgctgcgagcagccgcgtctgttaaattattacactgtggtgtataagttcgagttgccatctcgatattttctttgtgcaacatgtggcatgggtgatggggacatggcagtgatggcacct

SEQ ID NO: 67994 - protein, 359 aa, Triticum aestivum
  peptide (1)..(359): Ceres Seq. ID no. 13654368
NGENGRRRRAQGAPGARGGDAVGGAAPAARARGRRRRHAAPGRHRQPLPLLAARGPPGARQPRARRRRGRPLRGRHRRRVHRRAGPRLLYGRGGGGGRRVAAPRDRLLPRRRLHGVLRGHPALRRALPHHVPRDGRRRRVRDLPPRARAPLPRGLRRRGGRPPVPRHHRPARRGPRPRRPLPLLPRRRQRRRQHRAPRGPALDGGTRDNASSRPPRRPPAPVLLLRRRGPDRVGASAGGRGPDREPPPVRLLVEGVLAGGRRPKPPGRARDGRGRPGAGAAGCVPAGDGGRRRARPAPGLGEAVRRHAAPEGQGGARDGVHGGCTRLLLLPGAARDRQARRGDLGVRGEHRAELDRLEN

SEQ ID NO: 67995 - protein, 356 aa, Triticum aestivum
  peptide (1)..(356): Ceres Seq. ID no. 13654369
TERMAGDVARRELRARVGAMPWAVRLQLRALEAAVDATQRRDGTVNRFLFSLLVDRQAPANPARADAGGVRSVDVTVDASTGVRARVYFTAGAGAEADASPRPVIVYFHGGGFTVFSAATRPYDELCRTMCRETGAVVVSVTYRLAPEHRYPAAYDDGEAALRYLATTGLPAEVPVRVDLSRCFLAGDSAGANIAHHVAQRWTAAPATTPPAVHLAGLLLLSSYFGGEDRTESEQALEGVAPIVNLRRSDFWWKAYLPEGADRNHPAAHVTGEAGPEPELPDAFPRAMVVVGGLDPLQDWGRRYAGMLRRKGKEVRVMEFTEAVHAFYFFPALPETGKLVAEISAFVESTAPSSTA

SEQ ID NO: 67996 - protein, 353 aa, Triticum aestivum
  peptide (1)..(353): Ceres Seq. ID no. 13654370
MAGDVARRELRARVGAMPWAVRLQLRALEAAVDATQRRDGTVNRFLFSLLVDRQAPANPARADAGGVRSVDVTVDASTGVRARVYFTAGAGAEADASPRPVIVYFHGGGFTVFSAATRPYDELCRTMCRETGAVVVSVTYRLAPEHRYPAAYDDGEAALRYLATTGLPAEVPVRVDLSRCFLAGDSAGANIAHHVAQRWTAAPATTPPAVHLAGLLLLSSYFGGEDRTESEQALEGVAPIVNLRRSDFWWKAYLPEGADRNHPAAHVTGEAGPEPELPDAFPRAMVVVGGLDPLQDWGRRYAGMLRRKGKEVRVMEFTEAVHAFYFFPALPETGKLVAEISAFVESTAPSSTA

SEQ ID NO: 67997 - DNA, 929 bp, Triticum aestivum
  misc_feature (1)..(929): Ceres Seq. ID no. 13596185
acgaaggcaaagcgaacacacaaacccaaacccaaacccacccacttctcctctcaagccttcgcctgccaccgacgccacccaagcccccaaccctagcgaggactgaaagaggaggaggcggcggcaaccccgtcgaccggaggggagatggtgttcttcgcgctgctcgtgggggcagagctcgacggcctcaccaacctgcagccccgcggcggctgcgacgaccccagctacccttactacttcaagctgcggtgcgagagctgcggagagacgagcgccaagaccacctgcgtctccctcaacgaggtcgtcgaactgcccaccggcaaaggcacctccaatctcctccagaagtgcaagttatgttcgagggatggatcagttgtgatgattcctgggcagggaacaccactgactgctgagcagagccagaaaggagagatgacttgtttgatggtctttgaatgcagaggctatgaacctattgagttcgcttttggtaatggctggaaggctgaatctgtacatgggacaccatttgacattgatctttctgaaggagagtttgatgagtatgatgagaagggagagtgccctgtcgctctatccaagctgcagtcaacattcaaagtggtgaagaagcagggttttcatgggaagaccagatatgtctaagatccagtttctcttgggctcttcaaacattggagtcagagatgtgtaaagcgcatctacaaagttgaatcctcgatgttgattttgtatttgaactaagttcatgcccatgattcggtggatttgccatgaatttggttaagcttgcagtgatgtggcctcctgtttggaaaaattgaatattctgcctatcagtggtttcaaacttagatctatggctctaccatatcaatcataaaattatttag

SEQ ID NO: 67998 - protein, 176 aa, Triticum aestivum
  peptide (1)..(176): Ceres Seq. ID no. 13596186
MVFFALLVGAELDGLTNLQPRGGCDDPSYPYYFKLRCESCGETSAKTTCVSLNEVVELPTGKGTSNLLQKCKLCSRDGSVVMIPGQGTPLTAEQSQKGEMTCLMVFECRGYEPIEFAFGNGWKAESVHGTPFDIDLSEGEFDEYDEKGECPVALSKLQSTFKVVKKQGFHGKTRYV

SEQ ID NO: 67999 - protein, 141 aa, Triticum aestivum
  peptide (1)..(141): Ceres Seq. ID no. 13596187
EGKANTQTQTQTHPLLLSSLRLPPTPPKPPTLARTERGGGGGNPVDRRGDGVLRAARGGRARRPHQPAAPRRLRRPQLPLLLQAAVRELRRDERQDHLRLPQRGRRTAHRQRHLQSPPEVQVMFEGWISCDDSWAGNTTDC

SEQ ID NO: 68000 - protein, 95 aa, Triticum aestivum
  peptide (1)..(95): Ceres Seq. ID no. 13596188
MIPGQGTPLTAEQSQKGEMTCLMVFECRGYEPIEFAFGNGWKAESVHGTPFDIDLSEGEFDEYDEKGECPVALSKLQSTFKVVKKQGFHGKTRYV

SEQ ID NO: 68001 - DNA, 1296 bp, Triticum aestivum
  misc_feature (1)..(1296): Ceres Seq. ID no. 13503500
aaggtaacgcgtctctgttcatctcacctcaccacgcgcgtacactttctctctcccctccctccctttattagatctctctcgctcaacaaaattcctcaactcgagctccctgaccgcaaccactcaaccacccagcaggcccagcaccaccgcgtctaagcaggtgccgcctccgcctccgcgtccttgtctgcggcggctgcaatggccgaccgcgtctaccccgccgccaagcccactccgccgcccccaatggccaacggaggcggcggcccggcggcgcccaagccgcagatgtaccagcgccccatctacaggccgcaggggcaggcgaagagcaggcgcgggcggtcctgccggtgcagcttgtgctgctgcttctgctgggcactgctggtggtcgtcctcctcgcgctagtcgccgcggccgcgggcggcgccttctacgtgctctaccggccgcaacgccccagcttcaccgtctcctctgtccgcctcagcacgttcaacctctcctcctccaccaccgcgcccgtcctcaccgactccatccagctcaccgtcaccgccaagaaccccaacaagaagctcgtctatttctacgacgacttctcattctcggccgccaccgccgccaacgcagtcccgctcggggacgccaccgtgcccgggttcgcgcatgatgccggcaacaccaccgttttcactgcgaccatcaccgccgctggtgtcaccgtagaccccagcggcgccggctctgaccttaagatgtccggcgctttctccgtcgctatagatgccgacacgcgggccggcgtcaaggtcggcagcctcaagaccaagaagatgggcatccaggtgcactgcgagggcatcaaggtgacgccacccagtccacctccgccagcgccgaagaaggtaaaggggaagaatggcaccgccctggcgcctgcgcctgcgttggacaacgccgagacgaccgcgatggtgagcaccgccgcgcactcgtgcaaggtcagagtccgtgtgaagatctggaagtggaccttctaggtataatgccaactttagggactgccatgcaaaacattcaggaaacatatatttttcactttatattggaaagtagagaccatgaatatcgtcggtgtaaattccctcaaagttgattctatttttgttcttgtttggaattttcttaaacatatttttggtggatgtataacttggtgatttgttatttgtaagattacggttcgaatgaaaaaaaaaaaaaaaaaagcttatcgatac

SEQ ID NO: 68002 - protein, 282 aa, Triticum aestivum
  peptide (1)..(282): Ceres Seq. ID no. 13503501
MADRVYPAAKPTPPPPMANGGGGPAAPKPQMYQRPIYRPQGQAKSRRGRSCRCSLCCCFCWALLVVVLLALVAAAAGGAFYVLYRPQRPSFTVSSVRLSTFNLSSSTTAPVLTDSIQLTVTAKNPNKKLVYFYDDFSFSAATAANAVPLGDATVPGFAHDAGNTTVFTATITAAGVTVDPSGAGSDLKMSGAFSVAIDADTRAGVKVGSLKTKKMGIQVHCEGIKVTPPSPPPPAPKKVKGKNGTALAPAPALDNAETTAMVSTAAHSCKVRVRVKIWKWTF

SEQ ID NO: 68003 - protein, 266 aa, Triticum aestivum
  peptide (1)..(266): Ceres Seq. ID no. 13503502
MANGGGGPAAPKPQMYQRPIYRPQGQAKSRRGRSCRCSLCCCFCWALLVVVLLALVAAAAGGAFYVLYRPQRPSFTVSSVRLSTFNLSSSTTAPVLTDSIQLTVTAKNPNKKLVYFYDDFSFSAATAANAVPLGDATVPGFAHDAGNTTVFTATITAAGVTVDPSGAGSDLKMSGAFSVAIDADTRAGVKVGSLKTKKMGIQVHCEGIKVTPPSPPPPAPKKVKGKNGTALAPAPALDNAETTAMVSTAAHSCKVRVRVKIWKWTF

SEQ ID NO: 68004 - protein, 252 aa, Triticum aestivum
  peptide (1)..(252): Ceres Seq. ID no. 13503503
MYQRPIYRPQGQAKSRRGRSCRCSLCCCFCWALLVVVLLALVAAAAGGAFYVLYRPQRPSFTVSSVRLSTFNLSSSTTAPVLTDSIQLTVTAKNPNKKLVYFYDDFSFSAATAANAVPLGDATVPGFAHDAGNTTVFTATITAAGVTVDPSGAGSDLKMSGAFSVAIDADTRAGVKVGSLKTKKMGIQVHCEGIKVTPPSPPPPAPKKVKGKNGTALAPAPALDNAETTAMVSTAAHSCKVRVRVKIWKWTF

SEQ ID NO: 68005 - DNA, 940 bp, Triticum aestivum
  misc_feature (1)..(940): Ceres Seq. ID no. 13596338
gagaaaggaacggctgccgtcccctgcctgcaaccgcaactcaaccagtcagtcgccattactcttgtttctcatcacccaccgcgagcgcgaagcaggaggagcagcaccatgctggggcatctagtcgggctggtgaaggtgcgggtgacgcgcggggtgaacctcgccatccgcgacctccgctccagcgacccctacgtcgtcgtccgcatgggcaagcagaagctgaagacgcgagttgtaaggaagagtatcaatccggagtggaacgatgaactgaccctctccatcgaagatcctaccattcctgtcaaactggacgtgttcgacaaggacacattcttcgacgacccgatgggcaacgcggagctggacatcggcccgctggtggaggccgcgaggatgagggtccagctgcagggcgtcgctgacaacaccgtggtgaagaagctggtgcccaaccggcagaactgcctcgccgagcagagcgccatctacctgtccgagggcacggtgaagcaggacgtggtgctcaggctgaggaacgtcgagtgcggggaggtcgagctccagctccagtggatcgacatccccggctccaagggcgtatcaggcttttaattagctctctgtgcactctctgctgtttgcagagttctttctcaagtgaaaagctggagtaaattctgattagaatccaagcttaagttaggatttagattatgtgcgatagatgactgtgtggtcgaacttcctaagatggactgaaaaaggaagaactggtggcaggggcgcaaaaattctcagaaaaaaaaaaaaaaaaaaaaaaaaaaaaaaaaaaaaaaaaaaaaaaaaaaaaaaaaaaaaaaaaaaaaaaaaargaaaaaaaaaaaaaaaaaggtttwtcgatmccgccvacccccgggggggggcccgg

SEQ ID NO: 68006 - protein, 207 aa, Triticum aestivum
  peptide (1)..(207): Ceres Seq. ID no. 15221843
EKGTAAVPCLQPQLNQSVAITLVSHHPPRARSRRSSTMLGHLVGLVKVRVTRGVNLAIRDLRSSDPYVVVRMGKQKLKTRVVRKSINPEWNDELTLSIEDPTIPVKLDVFDKDTFFDDPMGNAELDIGPLVEAARMRVQLQGVADNTVVKKLVPNRQNCLAEQSAIYLSEGTVKQDVVLRLRNVECGEVELQLQWIDIPGSKGVSGF

SEQ ID NO: 68007 - protein, 170 aa, Triticum aestivum
  peptide (1)..(170): Ceres Seq. ID no. 15221844
MLGHLVGLVKVRVTRGVNLAIRDLRSSDPYVVVRMGKQKLKTRVVRKSINPEWNDELTLSIEDPTIPVKLDVFDKDTFFDDPMGNAELDIGPLVEAARMRVQLQGVADNTVVKKLVPNRQNCLAEQSAIYLSEGTVKQDVVLRLRNVECGEVELQLQWIDIPGSKGVSGF

SEQ ID NO: 68008 - protein, 136 aa, Triticum aestivum
  peptide (1)..(136): Ceres Seq. ID no. 15221845
MGKQKLKTRVVRKSINPEWNDELTLSIEDPTIPVKLDVFDKDTFFDDPMGNAELDIGPLVEAARMRVQLQGVADNTVVKKLVPNRQNCLAEQSAIYLSEGTVKQDVVLRLRNVECGEVELQLQWIDIPGSKGVSGF

SEQ ID NO: 68009 - DNA, 1059 bp, Triticum aestivum
  misc_feature (1)..(1059): Ceres Seq. ID no. 13596339
cctgcctctgcgtcttcctctgcttcctcttctcctcccaatccaatccttgtagaatcttccaccggcgcccgggtaagatgaacggcctcctcgtgtccccgtgcacaaggccgcccctgctccgccccttcccgagcccggccacccgtctcctacccgccagaaccctagttcttcgcccgctccgcctcccccgtggcgtctgtgcgtcccctcctcccccgcgcgccgccgccgccgctgcgtctgcagtgggcggccttctggcgccgctcgaggttggcctgcgcagcatcaacctcgcgccgctgcgcccgccggttgcggcggccatgtcggcggccgtgcgctggctgggggtctaccgggaggttctgcttgtcggggtgctcttctcctggtttcccaacatcccctgggaccgccagcccttctccgctctgcgagacctctgcgacccttttctcgccctctgccgcgaggtcgtgccgcccgtcttcggccgcaagctcgatctcagcccgctcgtcgccttcatggcgatagacatcctcatcatgatccttcgcccacagccacgcatgtgatggaattgaaggatagtcgttggtatgttaagatccactatggttttgtcgttgctggatattacaagataagaagtggtggttgaatgatctttagcaagggtagcagaatttgagtgattttgagacgttttgtagacaagtgtagcttccttgataaaacttctgccaagtagatatgtgctagctacagtctttgtgattctgctctgttcccagacggatttgtctatgatatggcaacacggatctgcatgtagtgagcgattcagagaactgaatcgaaagctgagccattcctgaacggtttgcgagagaatcccaaactagcttaggcaggctcattaatgtgcatggtctacttttttcttctttttccttccaccatgaggatcttatctccttttctgacttggctaatgtgtttacctccagagccacttgttctggttgagtgttgatatactcg

SEQ ID NO: 68010 - protein, 195 aa, Triticum aestivum
  peptide (1)..(195): Ceres Seq. ID no. 13596340
CLCVFLCFLFSSQSNPCRIFHRRPGKMNGLLVSPCTRPPLLRPFPSPATRLLPARTLVLRPLRLPRGVCASPPPPRAAAAAASAVGGLLAPLEVGLRSINLAPLRPPVAAAMSAAVRWLGVYREVLLVGVLFSWFPNIPWDRQPFSALRDLCDPFLALCREVVPPVFGRKLDLSPLVAFMAIDILIMILRPQPRM

SEQ ID NO: 68011 - protein, 169 aa, Triticum aestivum
  peptide (1)..(169): Ceres Seq. ID no. 13596341
MNGLLVSPCTRPPLLRPFPSPATRLLPARTLVLRPLRLPRGVCASPPPPRAAAAAASAVGGLLAPLEVGLRSINLAPLRPPVAAAMSAAVRWLGVYREVLLVGVLFSWFPNIPWDRQPFSALRDLCDPFLALCREVVPPVFGRKLDLSPLVAFMAIDILIMILRPQPRM

SEQ ID NO: 68012 - DNA, 1194 bp, Triticum aestivum
  misc_feature (1)..(1194): Ceres Seq. ID no. 15225069
agtacttcgacgacccacctcagagcaggaccgcatcgccttcctcctcgtccccgcgcctcccacccgccggccggaaggggagacgaaggcgaagcgcagccaagatgccgcagcggcactcgaagaacaacaacgacctcgccttcttcacctacgaggagaagcggaagctcgggtacggcacccagcgggagcggctcggcaaggactccatcaagcccttcgatgcctgctgcctctgcctcaagccgctcatcgacccgctcgcctgccccaagggccacaccttctgcaaggagtgcatcctcgagtgcctcctcgcgcagaagaaggacatcaagcgcaagcttatagctcatgactcccagaaaaagcaagagaaggaagaggaggaggagaagctggtgctgcaaaagtccaaggaattggatgcttttgatcagcagaatcatggagcagtcccccagtactatgatcgcagcggttcccaagacaagaatggttttcatggagccaacagtgtgaagactacctccttcgaagaggaagccctacgcaccatgaaggcgttctggcttccgtcagctacacccgaagctactgtcaaggtagatgctccttctactgacacaatctgtcccgaggggcaggagaagctcaagctgaaatcactcttccctatttctttcaccgaggagaacgctcgtcagaagagcaataagtcagtggagaaaagctacatctgccccagctgcaagtccaatctcacaaacacaatgtccctggtggcgatcagcacctgtggccatgtcttctgcaagaagtgctcggacaagttcatagcaacagataaggtctgcttaatgtgcagcaaaccgtgcaaagagaggaatttgattaatttagagaaaggaggaacgggtttcgctgcacacgatgaccacctagaggcaaagaacttcaagcatttagggagtggttctggactaggattggtgaagcctgctcctaaggcatagccttcaattatgtaactgttgttgtataatgctgtcagtcatcgttgtggcacgaatatatgtaacctggattttttaaatgttttgatatcttttgatatgtatgatctggaacaaacgatactcaggtttttcatccaagtgataatgtgcttgcggttttgctccatgc

SEQ ID NO: 68013 - protein, 339 aa, Triticum aestivum
  peptide (1)..(339): Ceres Seq. ID no. 15225070
YFDDPPQSRTASPSSSSPRLPPAGRKGRRRRSAAKMPQRHSKNNNDLAFFTYEEKRKLGYGTQRERLGKDSIKPFDACCLCLKPLIDPLACPKGHTFCKECILECLLAQKKDIKRKLIAHDSQKKQEKEEEEEKLVLQKSKELDAFDQQNHGAVPQYYDRSGSQDKNGFHGANSVKTTSFEEEALRTMKAFWLPSATPEATVKVDAPSTDTICPEGQEKLKLKSLFPISFTEENARQKSNKSVEKSYICPSCKSNLTNTMSLVAISTCGHVFCKKCSDKFIATDKVCLMCSKPCKERNLINLEKGGTGFAAHDDHLEAKNFKHLGSGSGLGLVKPAPKA

SEQ ID NO: 68014 - protein, 304 aa, Triticum aestivum
  peptide (1)..(304): Ceres Seq. ID no. 15225071
MPQRHSKNNNDLAFFTYEEKRKLGYGTQRERLGKDSIKPFDACCLCLKPLIDPLACPKGHTFCKECILECLLAQKKDIKRKLIAHDSQKKQEKEEEEEKLVLQKSKELDAFDQQNHGAVPQYYDRSGSQDKNGFHGANSVKTTSFEEEALRTMKAFWLPSATPEATVKVDAPSTDTICPEGQEKLKLKSLFPISFTEENARQKSNKSVEKSYICPSCKSNLTNTMSLVAISTCGHVFCKKCSDKFIATDKVCLMCSKPCKERNLINLEKGGTGFAAHDDHLEAKNFKHLGSGSGLGLVKPAPKA

SEQ ID NO: 68015 - DNA, 1708 bp, Triticum aestivum
  misc_feature (1)..(1708): Ceres Seq. ID no. 13654539
aggaagagaagagatcagatcagatctcatctcagtctcctctgctcaggtcgccggcgatggcgatggcgccgtccctccgcaccaccgtcctgctcctcctcttcctcctcgccgcctcttctcaggcggaggcggcacaagcggcggaggacggcatccgggtcctctccgccgagaaaaggatcgacctcaccggccccattgtcaaggtcttcctcaccctcaaggtccagaacgccgccaccggcgccgacgcctcacacgtcctcatcgccttcacgcctgccgaggccgaccacctcgccatcgtcaaggccacccgggccgagggcaagcgcaagaagaaggcctacatcccgctcccagtaacacccgccgacgccgccaccgccgctcccaacggcgcccgcctctactccatctcccttcccagcccactaaaacccgccgagaccaccacggtggaggtcttctacgtgctcacccactccctcgagcccttccctgccgagatcacccagtccgagtcccagctcgtctactaccgcgacagcgccgtcatcctctcgccgtaccatgtccaggagcagggcacctacgtcaagacgcccagcagcagggtcgagtccttcaccagggccgaccccaccagccgctcgggccctgatgtcaaatacggcgcgtacagcaaccagctcccatacgcctactcgcccatcattctgcattatgagaacaaccatgcgtttgctgtcgtcgaggagctcgtgcgcaaggtggagatctcccactgggggaacgtccaggtcaccgagcactacaagttgaagcatggcggtgccaagcacaaaggagtcttttcaaggctcgagtatcaggctaggcaatctatcagcggagcgtcatcatttaagaatcttcttgcaaggttgcctccacgagttcattcagtctactatcgtgatgagattggtaacatctcctcatcccatctgcgcagtgattcatacaagtcagaactagaaattgaaccaagatatccgctttttggtgggtggcactgcactttcaccatcggctatggtatgccactgcaagatttcctgtttgaatcggctgatggccgacgctttgccaatcttacatttggatgccctctactgaatactgtggttgataatcttaccatcaaggttgtgcttcccgagggatcgaaaagcccgcaggctgttgttcctttcgagaccgagcaacatcttgagactagctattcatacctggatgttgtggggaggacgacagtggtgataaagaagaaaaacgtagtaggagagcacaatgttccattccaggtgtactacgagttcagtcccatcttcatgctggcggagccgctgatgctggtgaccgcagtgctgctcttgttcgcggcgtgcattgtctatcttcacacggatctgtccatcgcgaaatcgcaggcctcctgaaggaggagtagctgcaaactagtcgttgtgatgaagtaattgatggtggtgaaacattagctttggggagttttgtagaagaagcaagcatgacgataattgattgctgtaggaactttgactcttttttttttattttcctgtggaagaaaaagaaaaatcacaattggattggatgttgagcaacaacttggttagtctgatcaagatacgttttt

SEQ ID NO: 68016 - protein, 495 aa, Triticum aestivum
  peptide (1)..(495): Ceres Seq. ID no. 15219664
EEKRSDQISSQSPLLRSPAMAMAPSLRTTVLLLLFLLAASSQAEAAQAAEDGIRVLSAEKRIDLTGPIVKVFLTLKVQNAATGADASHVLIAFTPAEADHLAIVKATRAEGKRKKKAYIPLPVTPADAATAAPNGARLYSISLPSPLKPAETTTVEVFYVLTHSLEPFPAEITQSESQLVYYRDSAVILSPYHVQEQGTYVKTPSSRVESFTRADPTSRSGPDVKYGAYSNQLPYAYSPIILHYENNHAFAVVEELVRKVEISHWGNVQVTEHYKLKHGGAKHKGVFSRLEYQARQSISGASSFKNLLARLPPRVHSVYYRDEIGNISSSHLRSDSYKSELEIEPRYPLFGGWHCTFTIGYGMPLQDFLFESADGRRFANLTFGCPLLNTVVDNLTIKVVLPEGSKSPQAVVPFETEQHLETSYSYLDVVGRTTVVIKKKNVVGEHNVPFQVYYEFSPIFMLAEPLMLVTAVLLLFAACIVYLHTDLSIAKSQAS

SEQ ID NO: 68017 - protein, 476 aa, Triticum aestivum
  peptide (1)..(476): Ceres Seq. ID no. 15219665
MAMAPSLRTTVLLLLFLLAASSQAEAAQAAEDGIRVLSAEKRIDLTGPIVKVFLTLKVQNAATGADASHVLIAFTPAEADHLAIVKATRAEGKRKKKAYIPLPVTPADAATAAPNGARLYSISLPSPLKPAETTTVEVFYVLTHSLEPFPAEITQSESQLVYYRDSAVILSPYHVQEQGTYVKTPSSRVESFTRADPTSRSGPDVKYGAYSNQLPYAYSPIILHYENNHAFAVVEELVRKVEISHWGNVQVTEHYKLKHGGAKHKGVFSRLEYQARQSISGASSFKNLLARLPPRVHSVYYRDEIGNISSSHLRSDSYKSELEIEPRYPLFGGWHCTFTIGYGMPLQDFLFESADGRRFANLTFGCPLLNTVVDNLTIKVVLPEGSKSPQAVVPFETEQHLETSYSYLDVVGRTTVVIKKKNVVGEHNVPFQVYYEFSPIFMLAEPLMLVTAVLLLFAACIVYLHTDLSIAKSQAS

SEQ ID NO: 68018 - protein, 474 aa, Triticum aestivum
  peptide (1)..(474): Ceres Seq. ID no. 15219666
MAPSLRTTVLLLLFLLAASSQAEAAQAAEDGIRVLSAEKRIDLTGPIVKVFLTLKVQNAATGADASHVLIAFTPAEADHLAIVKATRAEGKRKKKAYIPLPVTPADAATAAPNGARLYSISLPSPLKPAETTTVEVFYVLTHSLEPFPAEITQSESQLVYYRDSAVILSPYHVQEQGTYVKTPSSRVESFTRADPTSRSGPDVKYGAYSNQLPYAYSPIILHYENNHAFAVVEELVRKVEISHWGNVQVTEHYKLKHGGAKHKGVFSRLEYQARQSISGASSFKNLLARLPPRVHSVYYRDEIGNISSSHLRSDSYKSELEIEPRYPLFGGWHCTFTIGYGMPLQDFLFESADGRRFANLTFGCPLLNTVVDNLTIKVVLPEGSKSPQAVVPFETEQHLETSYSYLDVVGRTTVVIKKKNVVGEHNVPFQVYYEFSPIFMLAEPLMLVTAVLLLFAACIVYLHTDLSIAKSQAS

SEQ ID NO: 68019 - DNA, 891 bp, Triticum aestivum
  misc_feature (1)..(891): Ceres Seq. ID no. 13596295
aaaaccctagcgccacaaccagacggcaggtaagggaggaggagagcggcggcgaagatggtgtcgctgaagctgcagaagcgcctggcctcgagcgtcctcaagtgcggcaagggcaaggtctggctcgaccccaatgaggtcaacgagatctccatggccaactcccggcagaacatccggaagctggtaaaggatggtttcatcatcaggaagcctcagaagatccactccaggtctcgtgcaaggagggcacatgaggccaagcagaagggccgtcactctggatatggtaagcgtaggggtaccagggaggctaggctccccaccaagatcctgtggatgcggaggatgcgcgtcctgaggcgccttctgcgcaagtaccgtgaggccaagaagatcgacaagcacatgtaccatgacatgtacctgaaggtcaagggtaacatgttcaagaacaagagggtcctcatggagagtatccacaagtccaaggctgagaaggcaagagagaagaccctctctgatcagtttgaggccaagcgcgccaagagcaaggcaagcagggagaggaagcatgccaggagggaggagagattggctcagggccccagagatcatgcaccagcaccagcggctgcagctccagctccagcagcagcggcaccaaagaaggccaaggccaagaagtgaaggtctgacatgaagctttagctttctggtatcatgaagggttagcctgattttggagcatctgaagttcagaactgttttctgtgcaatatctgtgtgccgcgtatgagataccttaaatatcatatcgtgtttgttctgttggatgttgcttatgcagagtttctttaaacatttcggttcaccgaacctagtttt

SEQ ID NO: 68020 - protein, 211 aa, Triticum aestivum
  peptide (1)..(211): Ceres Seq. ID no. 13596296
MVSLKLQKRLASSVLKCGKGKVWLDPNEVNEISMANSRQNIRKLVKDGFIIRKPQKIHSRSRARRAHEAKQKGRHSGYGKRRGTREARLPTKILWMRRMRVLRRLLRKYREAKKIDKHMYHDMYLKVKGNMFKNKRVLMESIHKSKAEKAREKTLSDQFEAKRAKSKASRERKHARREERLAQGPRDHAPAPAAAAPAPAAAAPKKAKAKK

SEQ ID NO: 68021 - protein, 178 aa, Triticum aestivum
  peptide (1)..(178): Ceres Seq. ID no. 13596297
MANSRQNIRKLVKDGFIIRKPQKIHSRSRARRAHEAKQKGRHSGYGKRRGTREARLPTKILWMRRMRVLRRLLRKYREAKKIDKHMYHDMYLKVKGNMFKNKRVLMESIHKSKAEKAREKTLSDQFEAKRAKSKASRERKHARREERLAQGPRDHAPAPAAAAPAPAAAAPKKAKAKK

SEQ ID NO: 68022 - protein, 116 aa, Triticum aestivum
  peptide (1)..(116): Ceres Seq. ID no. 13596298
MRRMRVLRRLLRKYREAKKIDKHMYHDMYLKVKGNMFKNKRVLMESIHKSKAEKAREKTLSDQFEAKRAKSKASRERKHARREERLAQGPRDHAPAPAAAAPAPAAAAPKKAKAKK

SEQ ID NO: 68023 - DNA, 578 bp, Triticum aestivum
  misc_feature (1)..(578): Ceres Seq. ID no. 13596299
aaaccctagctcgttccccttctagccttaaaccttcttcccccatctcacgaaaaagggcaacatctaagcggcggcggcggcgggcggtgaccatggcggagctgaagcggctgtcggagagccgcgacctaacccgcatcgagcggataggtgcgcactcccacatccgggggctggggctggactcctccatcgaggcccgcgatgcctcggaggggatggtcggccagctccccgcgcgccgcgccgctggactcatcctccagctcatccgccaggggaagatcgccggccgcgccgtcctcctcgcagggcagccggggaccggcaagaccgccctcgccatgggcatcgccaagtcgctcggcgccgagacgcccttcgcctccgtcgctgcctccgagctcttctccctcgacctctccaagaccgaggcgctcacccaggcgttccgccgcgccattggcgttcgcatcaaggaggaagcggagatcattgagggcgaggtcgttgagatctcaatcgaccgccctgtctccgccagtagctcgggcataccttcaggtgctaccgcg

SEQ ID NO: 68024 - protein, 192 aa, Triticum aestivum
  peptide (1)..(192): Ceres Seq. ID no. 13596300
TLARSPSSLKPSSPISRKRATSKRRRRRAVTMAELKRLSESRDLTRIERIGAHSHIRGLGLDSSIEARDASEGMVGQLPARRAAGLILQLIRQGKIAGRAVLLAGQPGTGKTALAMGIAKSLGAETPFASVAASELFSLDLSKTEALTQAFRRAIGVRIKEEAEIIEGEVVEISIDRPVSASSSGIPSGATA

SEQ ID NO: 68025 - protein, 161 aa, Triticum aestivum
  peptide (1)..(161): Ceres Seq. ID no. 13596301
MAELKRLSESRDLTRIERIGAHSHIRGLGLDSSIEARDASEGMVGQLPARRAAGLILQLIRQGKIAGRAVLLAGQPGTGKTALAMGIAKSLGAETPFASVAASELFSLDLSKTEALTQAFRRAIGVRIKEEAEIIEGEVVEISIDRPVSASSSGIPSGATA

SEQ ID NO: 68026 - protein, 123 aa, Triticum aestivum
  peptide (1)..(123): Ceres Seq. ID no. 13596302
MPRRGWSASSPRAAPLDSSSSSSARGRSPAAPSSSQGSRGPARPPSPWASPSRSAPRRPSPPSLPPSSSPSTSPRPRRSPRRSAAPLAFASRRKRRSLRARSLRSQSTALSPPVARAYLQVLP

SEQ ID NO: 68027 - DNA, 1247 bp, Triticum aestivum
  misc_feature (1)..(1247): Ceres Seq. ID no. 13596354
ccgtatatcccaacccaaccccagcaaaagcagtccgcgacttgcgagcagagtacacgacgcgaccgcgagccaaaccctaccgcgaacacgtcggcgatgagctcctccaacggcaacggcgggaagaagccggcaccgtccggcgggcgcgggggcatccgcaccctcgccgacatcaaccgcggcccctccgggttcccaggcgcaggcggcagcggcagcgactccgatgagccccaggagtactacaccggcggcgagaagagtgggatgcttgttcaagatccaacaaggagaaataatgtggactcaatctttgagcaagctagagtgatgggtgctcagcaagttccactgccttcttttgaaggccaatcttccagctcaaccagctttgcaggaacaggtcgtctgctttcaggggatgcgcagacagcaccagctgctcctcaaccaccgcaggatgttcttcacaatatacatttctggaacaatggtttcacagtagatgatggtccactaagagcctatgaggacgctgcaaatgcagacttcattgagagcatcaagaagtcccagtgcccccaagagctggagcctgctgatcgaaggacagctgtccatgtcaatgttataaaacgacatggagattatgaggaacctgcaaggcctcgatcagctttccagggtgttggtagaacccttggtgggtcttcagcagatgagagtcctgcaccagctcctgtgacacaagagccccacggtgctcccaggtcaattggcatagttgtggacgactcgcagccctttacatccatacagctaaggttagcggacggcactcgcatggtcgctcggtttaaccttaaccacaccgtgggcgacatcaggtctttcattgatgcatcccgcccaggagctgcgcggccgtatcagttgcagactggcttcccacccaagcagctgactgaccctacgcagactgttgaccaagctggactcaagaactccgttatcatgcagaagatgtagttctcaccgagctggatctgtcgcacagaatgtctttccgatgcaattattaaattagtgctgctgaatggtttatcatgtccactagatactgcactttgcatgcaacctgtgatgtactggttgttttgtcgataaacgtcagtggagtctatattcgtcttgctaccaattatgaatgtctatcaaagttaatgaatgtccggttgtct

SEQ ID NO: 68028 - protein, 344 aa, Triticum aestivum
  peptide (1)..(344): Ceres Seq. ID no. 13596355
PYIPTQPQQKQSATCEQSTRRDREPNPTANTSAMSSSNGNGGKKPAPSGGRGGIRTLADINRGPSGFPGAGGSGSDSDEPQEYYTGGEKSGMLVQDPTRRNNVDSIFEQARVMGAQQVPLPSFEGQSSSSTSFAGTGRLLSGDAQTAPAAPQPPQDVLHNIHFWNNGFTVDDGPLRAYEDAANADFIESIKKSQCPQELEPADRRTAVHVNVIKRHGDYEEPARPRSAFQGVGRTLGGSSADESPAPAPVTQEPHGAPRSIGIVVDDSQPFTSIQLRLADGTRMVARFNLNHTVGDIRSFIDASRPGAARPYQLQTGFPPKQLTDPTQTVDQAGLKNSVIMQKM

SEQ ID NO: 68029 - protein, 311 aa, Triticum aestivum
  peptide (1)..(311): Ceres Seq. ID no. 13596356
MSSSNGNGGKKPAPSGGRGGIRTLADINRGPSGFPGAGGSGSDSDEPQEYYTGGEKSGMLVQDPTRRNNVDSIFEQARVMGAQQVPLPSFEGQSSSSTSFAGTGRLLSGDAQTAPAAPQPPQDVLHNIHFWNNGFTVDDGPLRAYEDAANADFIESIKKSQCPQELEPADRRTAVHVNVIKRHGDYEEPARPRSAFQGVGRTLGGSSADESPAPAPVTQEPHGAPRSIGIVVDDSQPFTSIQLRLADGTRMVARFNLNHTVGDIRSFIDASRPGAARPYQLQTGFPPKQLTDPTQTVDQAGLKNSVIMQKM

SEQ ID NO: 68030 - protein, 253 aa, Triticum aestivum
  peptide (1)..(253): Ceres Seq. ID no. 13596357
MLVQDPTRRNNVDSIFEQARVMGAQQVPLPSFEGQSSSSTSFAGTGRLLSGDAQTAPAAPQPPQDVLHNIHFWNNGFTVDDGPLRAYEDAANADFIESIKKSQCPQELEPADRRTAVHVNVIKRHGDYEEPARPRSAFQGVGRTLGGSSADESPAPAPVTQEPHGAPRSIGIVVDDSQPFTSIQLRLADGTRMVARFNLNHTVGDIRSFIDASRPGAARPYQLQTGFPPKQLTDPTQTVDQAGLKNSVIMQKM

SEQ ID NO: 68031 - DNA, 1704 bp, Triticum aestivum
  misc_feature (1)..(1704): Ceres Seq. ID no. 12627133
acagtagaccacggtcacggacagcggcgacctccttcacagcgtcgctttgccgccggccgtagaaaccctgcaccgccgccgtttggtttcgaattgaatcgggctctgttgatgggcagcttgcgcgctccgcctcagctcgccggcggtaccagccttggtcgcggttaccggccctgtcttgcctcctccggggtccccaaatccaaagtgctgagtgttagctgcccgatgaagtcctataggctgtccgatctcagcgatgccgaggttagcggcctcaaggcgcgccctcgcattgacttcacctccattttcagcacggtgaatccgattgttgaagatgtgcgcgtcagaggtgatgctgcggttaaggattatacagaaaagtttgacaaggtcactctcgataatgccgttgtgcgtgttagcgatctcccagatgcagagcttgatccagctgttaaggaagcctttgatgtggcgtatgacaacatttatgccttccatgtttcacaaaagtcgccagaaaagacagttgagaatatgaaaggcgtgagatgtaaaaggataacaagatgcattggttctgtcgggctgtatgttccagggggcactgcagtcttgccttcaactgcattgatgcttgctgtgcctgcacagattgctggatgcaaaactgtagttcttgccacaccccctagttgtgatggtagcatatgtaaggaggttctttactgtgccaaaaaagctggtgttacacacatactaaaagctgggggagctcaggcaatctccgctatggcatggggaaccgcatcatgcccaaaggttgagaaaatatttggtcctggcaaccagtatgtcacagctgctaaaatgattcttcagaacagcgaagctatggtctctatagacatgcctgctggcccttcagaagttctggtaattgctgacaaatatgccaacccagttcatgttgccgctgatctgctatctcaggcagaacatggcccagatagtcaggttgttctagttattgctggagatggtgttgatttaggtgccattgaagcagaagttagcaagcagtgcgatgctcttcctagaggcgactttgcttccaaagcacttggccacagtttcactgtgtttgccagagatatggttgaggcattatcgttctcaaatatgtatgctcctgagcatttgatcatcaacgtaaaggatgctgagcaatgggaggagctcatcgagaacgcagggtcagttttcttgggacaatggacccccgagagcgtgggtgactatgccagtgggacgaaccacgtcctcccaacctacggttacgcgaggatgtacagcggtgtgtcgctgaactctttcctcaagtacatcactgttcaatccctgactgaagaagggctgagaaggctgggcccctacgtcgcaaagatggcagaagtcgaagggctagaagcgcacaagcgagctgttaccctcagactgcaagaggtcgaagccactgtaactgtgtaaactgttagcatggtctgttgtgccagtctatttgatgcttggggactgatatttttcttcatttttatcggatggaacttgccagagtttaaggtgaagaatacgaagctgtttcatggaataatgctacttatgtcgatctgttaaatgaataaacttgtg

SEQ ID NO: 68032 - protein, 513 aa, Triticum aestivum
  peptide (1)..(513): Ceres Seq. ID no. 12627134
TVDHGHGQRRPPSQRRFAAGRRNPAPPPFGFELNRALLMGSLRAPPQLAGGTSLGRGYRPCLASSGVPKSKVLSVSCPMKSYRLSDLSDAEVSGLKARPRIDFTSIFSTVNPIVEDVRVRGDAAVKDYTEKFDKVTLDNAVVRVSDLPDAELDPAVKEAFDVAYDNIYAFHVSQKSPEKTVENMKGVRCKRITRCIGSVGLYVPGGTAVLPSTALMLAVPAQIAGCKTVVLATPPSCDGSICKEVLYCAKKAGVTHILKAGGAQAISAMAWGTASCPKVEKIFGPGNQYVTAAKMILQNSEAMVSIDMPAGPSEVLVIADKYANPVHVAADLLSQAEHGPDSQVVLVIAGDGVDLGAIEAEVSKQCDALPRGDFASKALGHSFTVFARDMVEALSFSNMYAPEHLIINVKDAEQWEELIENAGSVFLGQWTPESVGDYASGTNHVLPTYGYARMYSGVSLNSFLKYITVQSLTEEGLRRLGPYVAKMAEVEGLEAHKRAVTLRLQEVEATVTV

SEQ ID NO: 68033 - protein, 475 aa, Triticum aestivum
  peptide (1)..(475): Ceres Seq. ID no. 12627135
MGSLRAPPQLAGGTSLGRGYRPCLASSGVPKSKVLSVSCPMKSYRLSDLSDAEVSGLKARPRIDFTSIFSTVNPIVEDVRVRGDAAVKDYTEKFDKVTLDNAVVRVSDLPDAELDPAVKEAFDVAYDNIYAFHVSQKSPEKTVENMKGVRCKRITRCIGSVGLYVPGGTAVLPSTALMLAVPAQIAGCKTVVLATPPSCDGSICKEVLYCAKKAGVTHILKAGGAQAISAMAWGTASCPKVEKIFGPGNQYVTAAKMILQNSEAMVSIDMPAGPSEVLVIADKYANPVHVAADLLSQAEHGPDSQVVLVIAGDGVDLGAIEAEVSKQCDALPRGDFASKALGHSFTVFARDMVEALSFSNMYAPEHLIINVKDAEQWEELIENAGSVFLGQWTPESVGDYASGTNHVLPTYGYARMYSGVSLNSFLKYITVQSLTEEGLRRLGPYVAKMAEVEGLEAHKRAVTLRLQEVEATVTV

SEQ ID NO: 68034 - protein, 435 aa, Triticum aestivum
  peptide (1)..(435): Ceres Seq. ID no. 12627136
MKSYRLSDLSDAEVSGLKARPRIDFTSIFSTVNPIVEDVRVRGDAAVKDYTEKFDKVTLDNAVVRVSDLPDAELDPAVKEAFDVAYDNIYAFHVSQKSPEKTVENMKGVRCKRITRCIGSVGLYVPGGTAVLPSTALMLAVPAQIAGCKTVVLATPPSCDGSICKEVLYCAKKAGVTHILKAGGAQAISAMAWGTASCPKVEKIFGPGNQYVTAAKMILQNSEAMVSIDMPAGPSEVLVIADKYANPVHVAADLLSQAEHGPDSQVVLVIAGDGVDLGAIEAEVSKQCDALPRGDFASKALGHSFTVFARDMVEALSFSNMYAPEHLIINVKDAEQWEELIENAGSVFLGQWTPESVGDYASGTNHVLPTYGYARMYSGVSLNSFLKYITVQSLTEEGLRRLGPYVAKMAEVEGLEAHKRAVTLRLQEVEATVTV

SEQ ID NO: 68035 - DNA, 797 bp, Triticum aestivum
  misc_feature (1)..(797): Ceres Seq. ID no. 12584421
aacagggaagcgaaggcggcggcgcgggcgacgagcggagacgacgactgccggctgccgccttctctccggccaaagaaaccataggtggcaggaggatggaggtgaagctcaaggacctcgtcccggcagcgactaacacagtgaacacgacgttcatcgtggttgacaaggcgccacgcccgacccacgcaaacgcgcacggcagggaggagacatgcccgtcactagtggctgacgagacggcagcggtgcatttccttctgtggggcaccgagtgcgatgccttcgagtctggggacatcgtgcggctcacgagtggcatcttctcgtaccatagaggcaacaacctgttcttgcgcgccgggaagcgaggacgaatggagaaggtgggcgagttcaccatgatgttcgtcgagacgcccaacatgagcgaggtgaggtgggggcccgatccaggcgacccaaggaagatggtgcaggaggctgtcgtgtcgccctactcccaagtcttcaagccgctgcattgatgcctatcatttcaggcttccagctcattgttgctaagtctcattaaatcatatgcaatagtgcaatactaaccgtggtagtaaattatgcaacactaaccacttgctgagttttgtatgctttctccttaaaatgtcactgggccatcgttctaatgtcttgagatgtttctcatgtaaacggagctcatagaagatttagctagccaaaagtatatcccaagctgtgttgatgtgaacaacagtgtactttttccctgaaatgtc

SEQ ID NO: 68036 - protein, 175 aa, Triticum aestivum
  peptide (1)..(175): Ceres Seq. ID no. 12584422
QGSEGGGAGDERRRRLPAAAFSPAKETIGGRRMEVKLKDLVPAATNTVNTTFIVVDKAPRPTHANAHGREETCPSLVADETAAVHFLLWGTECDAFESGDIVRLTSGIFSYHRGNNLFLRAGKRGRMEKVGEFTMMFVETPNMSEVRWGPDPGDPRKMVQEAVVSPYSQVFKPLH

SEQ ID NO: 68037 - protein, 143 aa, Triticum aestivum
  peptide (1)..(143): Ceres Seq. ID no. 12584423
MEVKLKDLVPAATNTVNTTFIVVDKAPRPTHANAHGREETCPSLVADETAAVHFLLWGTECDAFESGDIVRLTSGIFSYHRGNNLFLRAGKRGRMEKVGEFTMMFVETPNMSEVRWGPDPGDPRKMVQEAVVSPYSQVFKPLH

SEQ ID NO: 68038 - DNA, 613 bp, Triticum aestivum
  misc_feature (1)..(613): Ceres Seq. ID no. 12584462
atagattccaaagccagccaaccatctaatcagtaatggaggggctcatcccgttcgtctacaaggccatcaaggagcggcgcacccggagctactccaggtgcggctcggcgcgcggcgccgccgtcgcggacgaggacgacgtctgggagcagcagaagcagcagtgggcggcggcggacggcgcggggagggaggcggggcaccggcggcaccggtcgctggaggagctggccggcgaggtgggctccgcggcgcccgagtggccggcccgcggggcgatgcgccggggccggagcgccaggatcttctcctgcatcggcggcatgtgatcaatacgtatgaatgatacgtgctgctggtgctctgcctgctttgtttagctactactttagccgtgcctgtaaggtaaggttcatggtgatttgaagacgaagagtagtacgtagaagagtctgtgtggtgcgcgcgtgttgtgtgtactccagccaaagtgtatatacatgggtttgatgatgctgaagatgtaaaaactggtggtgcatgctcgtttgagcctgtccaaccgatggtactgcacgaatggactcgtttgcaagctacgtgttcaggg

SEQ ID NO: 68039 - protein, 98 aa, Triticum aestivum
  peptide (1)..(98): Ceres Seq. ID no. 12584463
MEGLIPFVYKAIKERRTRSYSRCGSARGAAVADEDDVWEQQKQQWAAADGAGREAGHRRHRSLEELAGEVGSAAPEWPARGAMRRGRSARIFSCIGGM

SEQ ID NO: 68040 - DNA, 1245 bp, Triticum aestivum
  misc_feature (1)..(1245): Ceres Seq. ID no. 13598327
acacacaggcagaatatggagaccaagcagagcacagaagggaaatggtcgcacgggaagaccatgccggtgaagaacgtccaggcgctggccgcggacgcggcggagctgacggaggaggccatcaagcggtacatcaggccggcgagggccgacgatgtcgtcgttgctgctcacggcgataatagcagccagagcattcctgtgatcgaccttggtaggctccttgatccccggagctatcagctggaggcggccaggctcaggtccgcatgtgaggagtggggcttcttccaggtgaaaaaccatgaaattcctgacacagttcttgaaaacatgaggaacgacctcgagcacttcttcaggcttcccctcgatgagaagaacagatttggccagttgcctggagacctccaaggctatggccaagcatttgttgagtccgaacatcaaacgctcgactggtgtgacaggctttacctagtgacccagccacctcacgatcgtgaaatgagaccatggcctacaactcctgtcagcttcagggaatccattgagtcgtactcctctgagctgatgagggtgactggctcgctcatggcaatcatcgctagaaacctaggcgttgatctccccagtgatacatacgtgagtcaggcattgaggatgacctactaccctgcatgccccgtggctcatgataaggttttggggatttcaccacattccgacatttctatgctaacgctggtatgggagttgaatatggtgggagggctccagatcaagagacaagatgcatgggtgccggtaaaaccccacccccaaggcattggtggtgaatgttggtgactttcttgagataatgacaaacggaaagtaccaaagcattgagcacagggtcaccgttaatcctcacaaggagaggatgtccatttctgcttttcacctcccaaagtttgatatgagcgtgggcccattatctgaaatagttggggccgagctcaagaaatacaagaccctgagggtggacgaggttgctaaggttgttttctcgagcaaacttgacggcaagaaaaccaaggactatgccatgcttagagtctgagtctacaagagcagaaacttggagcagaaatttcgacagccgtatataggcctgaaacatttgcgctgctccattttggtcatggttaattggccgatgtatatgaatgtgaactaataaatgtatccagatgtgag

SEQ ID NO: 68041 - protein, 283 aa, Triticum aestivum
  peptide (1)..(283): Ceres Seq. ID no. 15222308
THRQNMETKQSTEGKWSHGKTMPVKNVQALAADAAELTEEAIKRYIRPARADDVVVAAHGDNSSQSIPVIDLGRLLDPRSYQLEAARLRSACEEWGFFQVKNHEIPDTVLENMRNDLEHFFRLPLDEKNRFGQLPGDLQGYGQAFVESEHQTLDWCDRLYLVTQPPHDREMRPWPTTPVSFRESIESYSSELMRVTGSLMAIIARNLGVDLPSDTYVSQALRMTYYPACPVAHDKVLGISPHSDISMLTLVWELNMVGGLQIKRQDAWVPVKPHPQGIGGECW

SEQ ID NO: 68042 - protein, 278 aa, Triticum aestivum
  peptide (1)..(278): Ceres Seq. ID no. 15222309
METKQSTEGKWSHGKTMPVKNVQALAADAAELTEEAIKRYIRPARADDVVVAAHGDNSSQSIPVIDLGRLLDPRSYQLEAARLRSACEEWGFFQVKNHEIPDTVLENMRNDLEHFFRLPLDEKNRFGQLPGDLQGYGQAFVESEHQTLDWCDRLYLVTQPPHDREMRPWPTTPVSFRESIESYSSELMRVTGSLMAIIARNLGVDLPSDTYVSQALRMTYYPACPVAHDKVLGISPHSDISMLTLVWELNMVGGLQIKRQDAWVPVKPHPQGIGGECW

SEQ ID NO: 68043 - protein, 262 aa, Triticum aestivum
  peptide (1)..(262): Ceres Seq. ID no. 15222310
MPVKNVQALAADAAELTEEAIKRYIRPARADDVVVAAHGDNSSQSIPVIDLGRLLDPRSYQLEAARLRSACEEWGFFQVKNHEIPDTVLENMRNDLEHFFRLPLDEKNRFGQLPGDLQGYGQAFVESEHQTLDWCDRLYLVTQPPHDREMRPWPTTPVSFRESIESYSSELMRVTGSLMAIIARNLGVDLPSDTYVSQALRMTYYPACPVAHDKVLGISPHSDISMLTLVWELNMVGGLQIKRQDAWVPVKPHPQGIGGECW

SEQ ID NO: 68044 - DNA, 1600 bp, Triticum aestivum
  misc_feature (1)..(1600): Ceres Seq. ID no. 13591190
agagcagagcagaacttgaagcagaacagagccaaaaccaacccaaaaagcatttcgtgctaggacagtgaagccatggagaagaccgttgtcctgtaccctggcgtcggcgtcggccacctggtgccgatggtggaggtcgccaagctgttcctcaagcacggcctggccgtcaccgtggtgctcatcgatccgcaggtcgagtccacggacttctccgccgccgtcgcccgcgcgagggcctccaacccctccgtcgccttccacgtcctgccgccgccgcccgccgattccaactccaacagcgcgcccacgcaccccgtcatccagattttccggctcctgaaatccatgaacgctcccctcctcgacttcctccgctcgctgccctccgtcgacgcactcgtcctcgacatgttctgcgtcgacgcccaagatgtcgcggccgagctcaagctgccggtctactacttctacgcgtcggccgccgccgatctcgcgctcttcttcaacctgccgagcaagctcgccggcagtaaggtaaaggagctcggcgactctatcatcactttcccgggtgttcctccgttaaaggcttcggacttacccgaagtcacccacaacgatgaagtactcaaggccatctcaggcatgttcgaccgaatgccagatgccaacggaattctcattaattccttcgagtcgctggagacgcgggcggtgcgcgctctcaaggacgggctctgcgtccctggtcgtgccacgccgccggtctactgcatcgggccgttggtttcgggaggcggagacaaggagcacgagtgcctccggtggctggacgcgcagccggaccagagcgtggtgttcctctccttcggcagcatgggcacgttctccggtaagcagctcgaggagattgcaactggattagaaaagtcaggggagagattcctgtgggtcgtgcggagcccgcgcaatcccgactacaagtacggcgattcgctgccggagcccgatctcgacgcgctcatgccggaagggttcttggagaggaccaaggacagagggctcgtgatcaagtcttgggcgccgcaggtggaggtcctgcgccacagggcgaccggcgcattcatgacgcactgcggctggaactcgacgctggagggcatcacggcagggttgccgctgctgtgctggccgctgtacgcggagcagaaggtgaacaaggtgcacatagtggagggaatgaagctcggggtggagatgagaggctacaacgaagaggtggttaaggccgaggaagtggaggagaaggtcaggtgggttatggcgtccgagggcggcaaggcgctcagggagcgggtggcggcggcgaaggatgcagctgccgaggcgctcaaggaagggggctcgtccgacttggcgtttgtccaattcctcaacgacctggacacttccatagccccaaccgtgcagcattgatgtgaaacttgtaatctttatttaatgttcgattcgtagtagcgggctatctcattttgatattatatgcggactaagtttatttccgaaccctttcgcagctactgttggtttgttc

SEQ ID NO: 68045 - protein, 468 aa, Triticum aestivum
  peptide (1)..(468): Ceres Seq. ID no. 13591191
MEKTVVLYPGVGVGHLVPMVEVAKLFLKHGLAVTVVLIDPQVESTDFSAAVARARASNPSVAFHVLPPPPADSNSNSAPTHPVIQIFRLLKSMNAPLLDFLRSLPSVDALVLDMFCVDAQDVAAELKLPVYYFYASAAADLALFFNLPSKLAGSKVKELGDSIITFPGVPPLKASDLPEVTHNDEVLKAISGMFDRMPDANGILINSFESLETRAVRALKDGLCVPGRATPPVYCIGPLVSGGGDKEHECLRWLDAQPDQSVVFLSFGSMGTFSGKQLEEIATGLEKSGERFLWVVRSPRNPDYKYGDSLPEPDLDALMPEGFLERTKDRGLVIKSWAPQVEVLRHRATGAFMTHCGWNSTLEGITAGLPLLCWPLYAEQKVNKVHIVEGMKLGVEMRGYNEEVVKAEEVEEKVRWVMASEGGKALRERVAAAKDAAAEALKEGGSSDLAFVQFLNDLDTSIAPTVQH

SEQ ID NO: 68046 - protein, 450 aa, Triticum aestivum
  peptide (1)..(450): Ceres Seq. ID no. 13591192
MVEVAKLFLKHGLAVTVVLIDPQVESTDFSAAVARARASNPSVAFHVLPPPPADSNSNSAPTHPVIQIFRLLKSMNAPLLDFLRSLPSVDALVLDMFCVDAQDVAAELKLPVYYFYASAAADLALFFNLPSKLAGSKVKELGDSIITFPGVPPLKASDLPEVTHNDEVLKAISGMFDRMPDANGILINSFESLETRAVRALKDGLCVPGRATPPVYCIGPLVSGGGDKEHECLRWLDAQPDQSVVFLSFGSMGTFSGKQLEEIATGLEKSGERFLWVVRSPRNPDYKYGDSLPEPDLDALMPEGFLERTKDRGLVIKSWAPQVEVLRHRATGAFMTHCGWNSTLEGITAGLPLLCWPLYAEQKVNKVHIVEGMKLGVEMRGYNEEVVKAEEVEEKVRWVMASEGGKALRERVAAAKDAAAEALKEGGSSDLAFVQFLNDLDTSIAPTVQH

SEQ ID NO: 68047 - protein, 376 aa, Triticum aestivum
  peptide (1)..(376): Ceres Seq. ID no. 13591193
MNAPLLDFLRSLPSVDALVLDMFCVDAQDVAAELKLPVYYFYASAAADLALFFNLPSKLAGSKVKELGDSIITFPGVPPLKASDLPEVTHNDEVLKAISGMFDRMPDANGILINSFESLETRAVRALKDGLCVPGRATPPVYCIGPLVSGGGDKEHECLRWLDAQPDQSVVFLSFGSMGTFSGKQLEEIATGLEKSGERFLWVVRSPRNPDYKYGDSLPEPDLDALMPEGFLERTKDRGLVIKSWAPQVEVLRHRATGAFMTHCGWNSTLEGITAGLPLLCWPLYAEQKVNKVHIVEGMKLGVEMRGYNEEVVKAEEVEEKVRWVMASEGGKALRERVAAAKDAAAEALKEGGSSDLAFVQFLNDLDTSIAPTVQH

SEQ ID NO: 68048 - DNA, 1338 bp, Triticum aestivum
  misc_feature (1)..(1338): Ceres Seq. ID no. 13596375
cccccctccagttcgcacgagaccwttacctwgaacatsytwatcagaaaaccccaaaccctgaaaaggtcacgccgccgctgcgactccggccgccggcctcccctcctagatggaacctcagcaagagtcgaccgtcgacggccgcaagaggcggcgtagaggaggagtcgggaaacgccagaaggattcttcttgctcacaacaggcacctccgcctgcccctccagtggatgcggcctcccccctggagaagcggcgtcgcaaggccggcgaggccgccgcaatacccaaggggcgcaagcctgcgagcctactcgaaaagatgcgtgcaaggttatctggaggtcatttcagaatgttaaacgagaaactgtacacttgcagtggccaggatgcatttgactactttaaaaacgagcctgagctttttgacgtgtatcatgcaggatatcaagagcagatgtcacattggccagagcagccagttaatgtgataatcaagtggttgaagagtcataacaaatcatggaccgttgctgattttggatgtggcaatgcagcagttgctaaaaacgtgaagaacaaggtcttctccatcgatcttgtttcagatgacccttcagtgattgcttgtgatatggctcataccccattggagccatcctctgtagatgtggcgatattctgtctttctttgatgggaaccaactttccgagttatctacaggaagctaacagagtcctcaagccaagtggttggcttcttattgcggaagtgaggagtaggctagacccgaacaccggaggtgctgatcctgataagttctccgaagccatcagccagcttggcttttcccttgtttcgaaggatgagaagaacaaaatgtttgtcctgttttatttcaggaaaaaggaaaagagcaaggtggcgaaaaacattgaatggccccagttgaaaccttgcttatacaagcggcgatgatctcatcctccactatggtcgctccagacctcttccagagtgtggttaaattaatcgatgtcttgtgctaaactagtcatccttttctactcctatttcttttacctttgggcagctgtatgttcaaagaatcagaccacaccagatatgacctagtaagcgctgtaactcgaggcagtttagaagtgtattattatacagttctgaatctgcttcatatcttctttcctgggccttgtaaacgagtggaggataagttcaacaaagggcattatttctgcgttacttattatatttgatactccctctgtaaagaaatataagatcgtttaactcgaggcatgatttctttg

SEQ ID NO: 68049 - protein, 290 aa, Triticum aestivum
  peptide (1)..(290): Ceres Seq. ID no. 15221850
MEPQQESTVDGRKRRRRGGVGKRQKDSSCSQQAPPPAPPVDAASPLEKRRRKAGEAAAIPKGRKPASLLEKMRARLSGGHFRMLNEKLYTCSGQDAFDYFKNEPELFDVYHAGYQEQMSHWPEQPVNVIIKWLKSHNKSWTVADFGCGNAAVAKNVKNKVFSIDLVSDDPSVIACDMAHTPLEPSSVDVAIFCLSLMGTNFPSYLQEANRVLKPSGWLLIAEVRSRLDPNTGGADPDKFSEAISQLGFSLVSKDEKNKMFVLFYFRKKEKSKVAKNIEWPQLKPCLYKRR

SEQ ID NO: 68050 - protein, 219 aa, Triticum aestivum
  peptide (1)..(219): Ceres Seq. ID no. 15221851
MRARLSGGHFRMLNEKLYTCSGQDAFDYFKNEPELFDVYHAGYQEQMSHWPEQPVNVIIKWLKSHNKSWTVADFGCGNAAVAKNVKNKVFSIDLVSDDPSVIACDMAHTPLEPSSVDVAIFCLSLMGTNFPSYLQEANRVLKPSGWLLIAEVRSRLDPNTGGADPDKFSEAISQLGFSLVSKDEKNKMFVLFYFRKKEKSKVAKNIEWPQLKPCLYKRR

SEQ ID NO: 68051 - protein, 208 aa, Triticum aestivum
  peptide (1)..(208): Ceres Seq. ID no. 15221852
MLNEKLYTCSGQDAFDYFKNEPELFDVYHAGYQEQMSHWPEQPVNVIIKWLKSHNKSWTVADFGCGNAAVAKNVKNKVFSIDLVSDDPSVIACDMAHTPLEPSSVDVAIFCLSLMGTNFPSYLQEANRVLKPSGWLLIAEVRSRLDPNTGGADPDKFSEAISQLGFSLVSKDEKNKMFVLFYFRKKEKSKVAKNIEWPQLKPCLYKRR

SEQ ID NO: 68052 - DNA, 1456 bp, Triticum aestivum
  misc_feature (1)..(1456): Ceres Seq. ID no. 13502973
accattacctagaacaycctamtcsarwwcacacacgcacaacacaagaaaccgcaggaaaaataataccaagccgaccaatcatggctcgcccccgcctccggctgctcctcgtcgccgccgccgtcctcctcctcctccacccggccctctcctcggcggcggaggggctggaggaccccctcatcgagcaggtggtcgggggcgacgcggagaacgagctggagctcaacgcggaggcgcacttcgcgagcttcgtccggcggttcggcaagtcctacagggacgccgacgagcacgcgcaccggctctccgtgttcagggacaacctccgccgcgcgcgccgccaccagcgcctcgacccctccgcggtgcacggcatcaccaagttctccgacctcacccccgacgagttccgggagcgcttcctcggcctccgcaagtcccgccggagcttcctcaaggggatctccgggtcggcgcacgacgcgccggccctccccaccgacggcctccccacagagttcgactggcgcgagcacggcgcggtcggcccagtcaaggaccagggttcgtgcgggtcgtgctggtccttcagtacgtcgggggcgctggagggtgccaactacctcgccaccggaaagctggaggtgctcagcgagcagcagctggtcgactgcgaccaccagtgtgacccgtcagaaccacgcgcatgtgatgcgggatgcaatggtggcttgatgactacagctttcagctatctcgcaaaagccggtggcttagaaaccgagaaggattacccatacactgggaggaacagtgcctgcaagtttgacaaatccaaaattgctgctcaagttaagaattttagtactgttgctattgacgaagatcagattgccgctaaccttgtgaaacatggcccacttgcaattggtatcaatgcagtattcatgcaaacgtacattggtggtgtctcatgcccatacatctgcggaaggcatcttgatcatggtgttctcctggttggctatggatcagctggttacgcaccgctccgcttcaaggagaaaccatactggatcataaagaactcatggggcgaaaactggggcgagagcgggtactacaagatctgcaggggtccgcatgtcaaaaacaagtgcggtgtcgattccatggtctccacggttaccgccatccatacctctaagaaggaataagatcttgtagtactcagtctggattgcctatagacatgcttgtgtgccaggactaggtattccatgatggttattccagtattgccttgcaattcgtaaccagtaaatatgtgaaacttctcttgattgctgtaatgtatctctgggttgctatgtattgctacgcagttcttggaacatggtagcagatatttgttgccatcattaatgtatataatctggtgttctggttg

SEQ ID NO: 68053 - protein, 406 aa, Triticum aestivum
  peptide (1)..(406): Ceres Seq. ID no. 15223212
  misc_feature (5)..(5): Xaa is any aa, unknown or other
  misc_feature (7)..(7): Xaa is any aa, unknown or other
  misc_feature (8)..(8): Xaa is any aa, unknown or other
  misc_feature (9)..(9): Xaa is any aa, unknown or other
HYLEXPXXXHTRTTQETAGKIIPSRPIMARPRLRLLLVAAAVLLLLHPALSSAAEGLEDPLIEQVVGGDAENELELNAEAHFASFVRRFGKSYRDADEHAHRLSVFRDNLRRARRHQRLDPSAVHGITKFSDLTPDEFRERFLGLRKSRRSFLKGISGSAHDAPALPTDGLPTEFDWREHGAVGPVKDQGSCGSCWSFSTSGALEGANYLATGKLEVLSEQQLVDCDHQCDPSEPRACDAGCNGGLMTTAFSYLAKAGGLETEKDYPYTGRNSACKFDKSKIAAQVKNFSTVAIDEDQIAANLVKHGPLAIGINAVFMQTYIGGVSCPYICGRHLDHGVLLVGYGSAGYAPLRFKEKPYWIIKNSWGENWGESGYYKICRGPHVKNKCGVDSMVSTVTAIHTSKKE

SEQ ID NO: 68054 - protein, 379 aa, Triticum aestivum
  peptide (1)..(379): Ceres Seq. ID no. 15223213
MARPRLRLLLVAAAVLLLLHPALSSAAEGLEDPLIEQVVGGDAENELELNAEAHFASFVRRFGKSYRDADEHAHRLSVFRDNLRRARRHQRLDPSAVHGITKFSDLTPDEFRERFLGLRKSRRSFLKGISGSAHDAPALPTDGLPTEFDWREHGAVGPVKDQGSCGSCWSFSTSGALEGANYLATGKLEVLSEQQLVDCDHQCDPSEPRACDAGCNGGLMTTAFSYLAKAGGLETEKDYPYTGRNSACKFDKSKIAAQVKNFSTVAIDEDQIAANLVKHGPLAIGINAVFMQTYIGGVSCPYICGRHLDHGVLLVGYGSAGYAPLRFKEKPYWIIKNSWGENWGESGYYKICRGPHVKNKCGVDSMVSTVTAIHTSKKE

SEQ ID NO: 68055 - protein, 230 aa, Triticum aestivum
  peptide (1)..(230): Ceres Seq. ID no. 15223214
  misc_feature (6)..(6): Xaa is any aa, unknown or other
  misc_feature (7)..(7): Xaa is any aa, unknown or other
  misc_feature (8)..(8): Xaa is any aa, unknown or other
  misc_feature (9)..(9): Xaa is any aa, unknown or other
  misc_feature (10)..(10): Xaa is any aa, unknown or other
PLPRTXXXXXHTHNTRNRRKNNTKPTNHGSPPPPAAPRRRRRPPPPPPGPLLGGGGAGGPPHRAGGRGRRGERAGAQRGGALRELRPAVRQVLQGRRRARAPALRVQGQPPPRAPPPAPRPLRGARHHQVLRPHPRRVPGALPRPPQVPPELPQGDLRVGARRAGPPHRRPPHRVRLARARRGRPSQGPGFVRVVLVLQYVGGAGGCQLPRHRKAGGAQRAAAGRLRPPV

SEQ ID NO: 68056 - DNA, 1492 bp, Triticum aestivum
  misc_feature (1)..(1492): Ceres Seq. ID no. 13596376
ctcactcacgtcgcctctctgccagccctcgacatggcgcgttccactcgtctcgtcgcttccaccgccacggctctcctcctcctcctcctgtcggcgtgctcgtgccgcgcggccggcgacagcccgagcgccgtggtgctggcggtgaggaaggacggcgcgacggggcagtacctgacgggcttccggcagcgcacgccccaggtgccggtgacggccgtgctcgacctcggcggcggcacgctctgggtggactgcgacgccgggtacgtgtcctcgtcctacgcgcgcgtgccgtgcgcgtccaagctgtgccgcctcgccaagaccggcgcctgcgccaccagctgcgtcggcaagccatccccggggtgcctcaacgatacctgcggcgggttcccggagaacaccgtcacgcgcgtcagcaccggcgggaacctcatcacggacgtgctgtcggtgtccaccaccttccgcccggggccggggccgctcgccaccgcgccggcgtttctgttcacgtgcggagccacgttcctgaccgagggcctggccgccggcgccaccggcatggcgtcgctcagccgcgcccgcttcgcgctcccgacgcagctcgccgccgccttccgcttctcccgcaagttcgcgctctgcctcacttcgacctccgcggccggggccgtcgtcttcggcgacgcgccctacgcgttccagcccggggtggacctctccaagtcgctcctctacaccccgctgctcgtcaacaacgtgagcaccgccggcgtctccggcgagaaggacaagtcgaacgagtacttcatcggcgtgacggccatcaaggtgaacgggcgcgccgtgccgctgaacgcctcgctgctggtcatcgacaagcagggcggcggcggcaccaagctcagcacggtggcgccctacaccgtgctggagacctccatccacaaggcggtcacggacgcgttcgcggcggagacggccatgatcccccgggtgcgggccgtggcgccgttcaagctctgctacgacgggagcaaggtggggagcacgcgcgtgggcccggccgtgccgaccgtcgagctggtgctgcagagcgaggccgcgtcgtgggtggtgttcggggccaactcgatggtggccgtcaagggcggcgcgctgtgccttggcgtggtggacggcggcgcggccccgcggacgtcggtggtggtcgggggccacatgatggaggacaacctgctggagttcgatctgcagcggtcgcggctcgggttcagctcctccctgctcttccgccagaccacctgcaacaacttccgccttgggtagaaagaaacaaatggcatccggatgggatcgcagaagatgatctgggcgcttgcgtcaagcagactgcaatcgaaatttgtttgtgtgttgtgtttccccttgggttctgttttggctgtttgaataatcaacaggagatcgaacgattgtc

SEQ ID NO: 68057 - protein, 496 aa, Triticum aestivum
  peptide (1)..(496): Ceres Seq. ID no. 13596377
HSRRLSASPRHGAFHSSRRFHRHGSPPPPPVGVLVPRGRRQPERRGAGGEEGRRDGAVPDGLPAAHAPGAGDGRARPRRRHALGGLRRRVRVLVLRARAVRVQAVPPRQDRRLRHQLRRQAIPGVPQRYLRRVPGEHRHARQHRREPHHGRAVGVHHLPPGAGAARHRAGVSVHVRSHVPDRGPGRRRHRHGVAQPRPLRAPDAARRRLPLLPQVRALPHFDLRGRGRRLRRRALRVPARGGPLQVAPLHPAARQQREHRRRLRREGQVERVLHRRDGHQGERARRAAERLAAGHRQAGRRRHQAQHGGALHRAGDLHPQGGHGRVRGGDGHDPPGAGRGAVQALLRREQGGEHARGPGRADRRAGAAERGRVVGGVRGQLDGGRQGRRAVPWRGGRRRGPADVGGGRGPHDGGQPAGVRSAAVAARVQLLPALPPDHLQQLPPWVERNKWHPDGIAEDDLGACVKQTAIEICLCVVFPLGFCFGCLNNQQEIERL

SEQ ID NO: 68058 - protein, 446 aa, Triticum aestivum
  peptide (1)..(446): Ceres Seq. ID no. 13596378
LTHVASLPALDMARSTRLVASTATALLLLLLSACSCRAAGDSPSAVVLAVRKDGATGQYLTGFRQRTPQVPVTAVLDLGGGTLWVDCDAGYVSSSYARVPCASKLCRLAKTGACATSCVGKPSPGCLNDTCGGFPENTVTRVSTGGNLITDVLSVSTTFRPGPGPLATAPAFLFTCGATFLTEGLAAGATGMASLSRARFALPTQLAAAFRFSRKFALCLTSTSAAGAVVFGDAPYAFQPGVDLSKSLLYTPLLVNNVSTAGVSGEKDKSNEYFIGVTAIKVNGRAVPLNASLLVIDKQGGGGTKLSTVAPYTVLETSIHKAVTDAFAAETAMIPRVRAVAPFKLCYDGSKVGSTRVGPAVPTVELVLQSEAASWVVFGANSMVAVKGGALCLGVVDGGAAPRTSVVVGGHMMEDNLLEFDLQRSRLGFSSSLLFRQTTCNNFRLG

SEQ ID NO: 68059 - protein, 435 aa, Triticum aestivum
  peptide (1)..(435): Ceres Seq. ID no. 13596379
MARSTRLVASTATALLLLLLSACSCRAAGDSPSAVVLAVRKDGATGQYLTGFRQRTPQVPVTAVLDLGGGTLWVDCDAGYVSSSYARVPCASKLCRLAKTGACATSCVGKPSPGCLNDTCGGFPENTVTRVSTGGNLITDVLSVSTTFRPGPGPLATAPAFLFTCGATFLTEGLAAGATGMASLSRARFALPTQLAAAFRFSRKFALCLTSTSAAGAVVFGDAPYAFQPGVDLSKSLLYTPLLVNNVSTAGVSGEKDKSNEYFIGVTAIKVNGRAVPLNASLLVIDKQGGGGTKLSTVAPYTVLETSIHKAVTDAFAAETAMIPRVRAVAPFKLCYDGSKVGSTRVGPAVPTVELVLQSEAASWVVFGANSMVAVKGGALCLGVVDGGAAPRTSVVVGGHMMEDNLLEFDLQRSRLGFSSSLLFRQTTCNNFRLG

SEQ ID NO: 68060 - DNA, 681 bp, Triticum aestivum
  misc_feature (1)..(681): Ceres Seq. ID no. 13654517
gcacacactctccgcgacaccgtaatccccggcccctccggcgattccccactctctcagccccgatccactccgccgccgcgccagctcgccatggctgccgccgacgaggcgcagggcttccgcccgctggacgaggcgtcgctggtggcctacatccgggcgaccccggcgctggccgccagcctcggcggccgcgtcgacgacctcgccgtcaaggaggtcggcgacggcaacctcaacttcgtctacatcgtctcctccgacgccggctccgtcgtcgtcaagcaggcgctgccgtacatccgctgcgtgggggactcgtggccgatgacgagggagcgggcctactttgaggcctccgcgctgcgggagcacggccgcctctgcccggaccacgtcccggaggtctaccacttcgaccgcgccatgtcgctcatcgggatgcgctacatcaagccgccccacatcatcctccgcaagggcctcatcgccggcgtcgagtaccccctcctcgccgagcacatgtccgactacatggccaagaccctcttcttcacctccctcctctacaactccaccaccgagcacaagaagcaagttgctcgctactgcgagaacgtggagatgtgcaggctcacggagctgtttaaacacaataaagttggaactggagggggg

SEQ ID NO: 68061 - protein, 227 aa, Triticum aestivum
  peptide (1)..(227): Ceres Seq. ID no. 13654518
AHTLRDTVIPGPSGDSPLSQPRSTPPPRQLAMAAADEAQGFRPLDEASLVAYIRATPALAASLGGRVDDLAVKEVGDGNLNFVYIVSSDAGSVVVKQALPYIRCVGDSWPMTRERAYFEASALREHGRLCPDHVPEVYHFDRAMSLIGMRYIKPPHIILRKGLIAGVEYPLLAEHMSDYMAKTLFFTSLLYNSTTEHKKQVARYCENVEMCRLTELFKHNKVGTGGG

SEQ ID NO: 68062 - protein, 196 aa, Triticum aestivum
  peptide (1)..(196): Ceres Seq. ID no. 13654519
MAAADEAQGFRPLDEASLVAYIRATPALAASLGGRVDDLAVKEVGDGNLNFVYIVSSDAGSVVVKQALPYIRCVGDSWPMTRERAYFEASALREHGRLCPDHVPEVYHFDRAMSLIGMRYIKPPHIILRKGLIAGVEYPLLAEHMSDYMAKTLFFTSLLYNSTTEHKKQVARYCENVEMCRLTELFKHNKVGTGGG

SEQ ID NO: 68063 - protein, 117 aa, Triticum aestivum
  peptide (1)..(117): Ceres Seq. ID no. 13654520
THSPRHRNPRPLRRFPTLSAPIHSAAAPARHGCRRRGAGLPPAGRGVAGGLHPGDPGAGRQPRRPRRRPRRQGGRRRQPQLRLHRLLRRRLRRRQAGAAVHPLRGGLVADDEGAGLL

SEQ ID NO: 68064 - DNA, 1688 bp, Triticum aestivum
  misc_feature (1)..(1688): Ceres Seq. ID no. 14301471
agcaatttggcctagactagagtttatctcttgcatttccccgcgcgtagcagcaagcacaagaggagagatcgcgcatttatttacagagctgttgggagaatccaggaggaagtcgaagtactccggtccggccaagaagggggagacagagcgggggaggacgccggggcgccgagtttggggagaggaggagatggagacggacagcccgcggagcccggaggcggagatcgggcaccgggtggaggacctgtgggaggtggcgcagccgcagctgtccccgtcggagaagctcaactcctgcttcgaggacatccccgtcgccgccttcccgcgcacccacccctcgcaagtgatcgagataccttcggatgccagccttgctgatactgttgagacattgtccaagaataaaattttgagtgcacccataagaaacgtcgatgctccagaggatgctacttggatagacaaatacatcggtattgtggaatttgctggtattgcaatgtggttgcttcatcagtctgatgcttcaggtaatggaacagctggttctgcagttggatcacctgtggtcaatctagcatctaggttaggctctttcacattcagaagaacgtcatctggcagggtagaaaccactactgattcagaatcagatgaagctgcatcagtgggtggaagcttttttgaaacccttacttcctctgagttctacaagaacacaaaggttggcgatatctcaggaagcttccgatgggcgccatttcttgccctgcagacatctgacacattcctcactatgctgcttcttctatccaagtacaggatgaagagcctccccgtggtagatatgggggggaatcagattgagaatatcattacacaatcttccgttgtgcacatgcttgcagagtgtgttggactatcttggtttgaaagctggggaactaagaaactctgtgaactgggtcttcctctgatgaagccatacagacttgttaaggtaaatgaagaccagccagtcctaaaagccttccaactaatgagggaaaagggggttggtggtgtgcctgttatggacacaaatggaacaaaagcaattggtaacattagcatcagagatgtccaatatcttcttagtgcccccaagatatacaaacaatacaggacaatctcagccaaggatttccttaccgcggtccggcaccatctccaggagcagcacgaagcgtcgccgttgctgcacgacgtgatcacatgcaaaagagacgacgtgatcaaggaaatcatactgaagctggactcgaccaagatccacaggatctacgtggtcgacgacaagggggataccgagggggtgatcacgctgagggacataatctccaagctggtgcacgagccacggcattactttggggatttcttcgacggcgtcgtccccctacccgcaaacagtaccgtatgacaaaactctgtgatagtatgtacaaaaaatgtacattatctttttgctcattccccatcttcttcttaagttgtggttgctgttgctgttgctgtggagagacctctgtggggagtactaatgaagaaccaatggggtggatgacagtgtgcgttgaataatctgagaattgcctgagctttgcgatgagaatgatgatgcctttcttctttcg

SEQ ID NO: 68065 - protein, 490 aa, Triticum aestivum
  peptide (1)..(490): Ceres Seq. ID no. 14301472
AIWPRLEFISCISPRVAASTRGEIAHLFTELLGESRRKSKYSGPAKKGETERGRTPGRRVWGEEEMETDSPRSPEAEIGHRVEDLWEVAQPQLSPSEKLNSCFEDIPVAAFPRTHPSQVIEIPSDASLADTVETLSKNKILSAPIRNVDAPEDATWIDKYIGIVEFAGIAMWLLHQSDASGNGTAGSAVGSPVVNLASRLGSFTFRRTSSGRVETTTDSESDEAASVGGSFFETLTSSEFYKNTKVGDISGSFRWAPFLALQTSDTFLTMLLLLSKYRMKSLPVVDMGGNQIENIITQSSVVHMLAECVGLSWFESWGTKKLCELGLPLMKPYRLVKVNEDQPVLKAFQLMREKGVGGVPVMDTNGTKAIGNISIRDVQYLLSAPKIYKQYRTISAKDFLTAVRHHLQEQHEASPLLHDVITCKRDDVIKEIILKLDSTKIHRIYVVDDKGDTEGVITLRDIISKLVHEPRHYFGDFFDGVVPLPANSTV

SEQ ID NO: 68066 - protein, 425 aa, Triticum aestivum
  peptide (1)..(425): Ceres Seq. ID no. 14301473
METDSPRSPEAEIGHRVEDLWEVAQPQLSPSEKLNSCFEDIPVAAFPRTHPSQVIEIPSDASLADTVETLSKNKILSAPIRNVDAPEDATWIDKYIGIVEFAGIAMWLLHQSDASGNGTAGSAVGSPVVNLASRLGSFTFRRTSSGRVETTTDSESDEAASVGGSFFETLTSSEFYKNTKVGDISGSFRWAPFLALQTSDTFLTMLLLLSKYRMKSLPVVDMGGNQIENIITQSSVVHMLAECVGLSWFESWGTKKLCELGLPLMKPYRLVKVNEDQPVLKAFQLMREKGVGGVPVMDTNGTKAIGNISIRDVQYLLSAPKIYKQYRTISAKDFLTAVRHHLQEQHEASPLLHDVITCKRDDVIKEIILKLDSTKIHRIYVVDDKGDTEGVITLRDIISKLVHEPRHYFGDFFDGVVPLPANSTV

SEQ ID NO: 68067 - protein, 320 aa, Triticum aestivum
  peptide (1)..(320): Ceres Seq. ID no. 14301474
MWLLHQSDASGNGTAGSAVGSPVVNLASRLGSFTFRRTSSGRVETTTDSESDEAASVGGSFFETLTSSEFYKNTKVGDISGSFRWAPFLALQTSDTFLTMLLLLSKYRMKSLPVVDMGGNQIENIITQSSVVHMLAECVGLSWFESWGTKKLCELGLPLMKPYRLVKVNEDQPVLKAFQLMREKGVGGVPVMDTNGTKAIGNISIRDVQYLLSAPKIYKQYRTISAKDFLTAVRHHLQEQHEASPLLHDVITCKRDDVIKEIILKLDSTKIHRIYVVDDKGDTEGVITLRDIISKLVHEPRHYFGDFFDGVVPLPANSTV

SEQ ID NO: 68068 - DNA, 595 bp, Triticum aestivum
  misc_feature (1)..(595): Ceres Seq. ID no. 13596380
cgcaactcctttgcacagtcaccggtctgtactgtacctgggagtataatggaacaaccaaacagtgagaaggatgagcacgagctcagccttgacctcaccctccgcgtgagctcggcagctgaggcggagcagggcggcttcttcctctgcgtctactgcgaccgcaagttccgcagctcgcaggcgcttggtggccaccagaacgcgcacaagcacgagcgcagcctcgcccaccgccggcgggagatggccgccgccacgggtgcacacggggccggaacgcgcgcgcatgcggcgcaggacgagaggcccaggtatgtttccgccggtgatttcgtcgagccttccgctgggaaggcggggaggacggaggcaagtccgtggaaggttgctgctgctcccatgactgatgatgtggacctgtcgctcaggctatgatcgatctcttcttctagctagttgagtttctctcatggaattccgacctgcgcgcgcgtcgcgccgtattttgggctcctatttcttgtgtattctccgatcaatctgactgaatgtacttaccgaaattttcttcaaatatatgtgtgccgcc

SEQ ID NO: 68069 - protein, 146 aa, Triticum aestivum
  peptide (1)..(146): Ceres Seq. ID no. 13596381
RNSFAQSPVCTVPGSIMEQPNSEKDEHELSLDLTLRVSSAAEAEQGGFFLCVYCDRKFRSSQALGGHQNAHKHERSLAHRRREMAAATGAHGAGTRAHAAQDERPRYVSAGDFVEPSAGKAGRTEASPWKVAAAPMTDDVDLSLRL

SEQ ID NO: 68070 - protein, 130 aa, Triticum aestivum
  peptide (1)..(130): Ceres Seq. ID no. 13596382
MEQPNSEKDEHELSLDLTLRVSSAAEAEQGGFFLCVYCDRKFRSSQALGGHQNAHKHERSLAHRRREMAAATGAHGAGTRAHAAQDERPRYVSAGDFVEPSAGKAGRTEASPWKVAAAPMTDDVDLSLRL

SEQ ID NO: 68071 - DNA, 1474 bp, Triticum aestivum
  misc_feature (1)..(1474): Ceres Seq. ID no. 13596370
attattcttaaccctctcgccccgcctccccgtctcctcctccggtcgcccaaccgagcaggggtgtcgccattgttgtcgcctctcacccgcaggccgcctccgcgtccgtcactaggccacgagacctaggatcccccgccccctcgctgtgacctcgccgcgatgtggtggagggcggtggccagggctcgccgccggatcccgggagcgcggcccgtgtcgacggcggcggcggggaagagcggccgcgaggtggtggtgccgcggttcggcgggccggaggtgctgcagctgaggcagggggtgcccgcgcccgatctgaagcccggcgaggtgcttgtgcgcgcgcgcgccgtctccatcaaccccctcgacttgcgaatgcgggctggctatggccgttgcatattcgagccactcctacctctcatcattggccgggacatcagtggtgaagtcgcagctacagggacttctgtgtcgtcattctatattgggcaagaagtgtttggtgccttgcatccaacagcgattagagggacatgtgctgattatgcagttctttcacaggatgagcttacttctaaaccatctacgctcactcatgtggaggccagtgcaattccctttgctgcgttgactgcgtggcgtgctttatatggtactgctggaatttctaaaggacaaagattacttgtgcttggtggaggaggagcagttgggctttctgctgttcagcttgcggtagctgcagggtgtagtgtttcagctacctgtggagcccaaagtattgagcaagttttggcagccggtgctgaaaaggctattgattacgccactgaggatactgaatcaacagttacaggaaagtttgatgctgtgttagacacaataggagtagctgaaactgaaagaattggtattaatcttctgagaagaggcggacattatatgacccttcagggagaggcagcttcactagcagatagatatggattatatgtgggacttcctgctgctaccgctactttactgaagaaacagatgcagtatcgttgttctcatgggatagagtactggtggacatacatgagagctgatcctgacggtctccatgagatccagaggctgtccggagctggaaaactacagatacctgtggagaagacttttcctatcagccaagtaagagaagctcatgaggccaaggagaaaagactggtgcctggcaaggtggttctagagttcgactagtgttagcaggggttcgtccgacgatcacggaaggaccgacgttccttcttaattgtaccatgatgtttattttttgtctttctcccaaagaaaagtcgtgcggctttgaagctctaaatttgctcgttctctaggtagtactacagggttattttgtcggggtttagtgtaaatgcagtaaataatgatatgcaatacgaagagacttatttcagtg

SEQ ID NO: 68072 - protein, 363 aa, Triticum aestivum
  peptide (1)..(363): Ceres Seq. ID no. 13596371
MWWRAVARARRRIPGARPVSTAAAGKSGREVVVPRFGGPEVLQLRQGVPAPDLKPGEVLVRARAVSINPLDLRMRAGYGRCIFEPLLPLIIGRDISGEVAATGTSVSSFYIGQEVFGALHPTAIRGTCADYAVLSQDELTSKPSTLTHVEASAIPFAALTAWRALYGTAGISKGQRLLVLGGGGAVGLSAVQLAVAAGCSVSATCGAQSIEQVLAAGAEKAIDYATEDTESTVTGKFDAVLDTIGVAETERIGINLLRRGGHYMTLQGEAASLADRYGLYVGLPAATATLLKKQMQYRCSHGIEYWWTYMRADPDGLHEIQRLSGAGKLQIPVEKTFPISQVREAHEAKEKRLVPGKVVLEFD

SEQ ID NO: 68073 - protein, 290 aa, Triticum aestivum
  peptide (1)..(290): Ceres Seq. ID no. 13596372
MRAGYGRCIFEPLLPLIIGRDISGEVAATGTSVSSFYIGQEVFGALHPTAIRGTCADYAVLSQDELTSKPSTLTHVEASAIPFAALTAWRALYGTAGISKGQRLLVLGGGGAVGLSAVQLAVAAGCSVSATCGAQSIEQVLAAGAEKAIDYATEDTESTVTGKFDAVLDTIGVAETERIGINLLRRGGHYMTLQGEAASLADRYGLYVGLPAATATLLKKQMQYRCSHGIEYWWTYMRADPDGLHEIQRLSGAGKLQIPVEKTFPISQVREAHEAKEKRLVPGKVVLEFD

SEQ ID NO: 68074 - DNA, 1599 bp, Triticum aestivum
  misc_feature (1)..(1599): Ceres Seq. ID no. 14313567
acacacgcgcgcgcgcacacgcaagaaccgcccaagccgaacacacaagcaaagggagggacagcgcgcgagatcgagatgaaggtggaggtggtggacacgacgctggtgacgccgagcgagccgacgccgcggcacacgctgtggctctccaacctcgacctcgccgtgcccaagacgcacacgccgctcgtctactactacccggcgccccccgccggcgacggcggcgagaagcaggaagagttcttcgcgccggagaggctgcgggaggcgctggcgagggcgctggtgccgttctacccgctggcagggcggatggcgacgggccccgagggccggctcgagatcgactgcaacggcgagggcgcgctgttcgtcgtcgcgcgggccgacttcaccggcgacgagatgttccgggacttcgagccctccccggaggcgcgccgcctgctcgtccccttcgccgcctccggcgacccgccctgcctcctcgccatggtccaggtgacgttcctcaagtgcggcggcgtggccgtgggcacgggcatgcaccacgtgaccatggacggcgcgggcgcgatccagttcatccggacgtggacgaccctggcgcgcggcctggacgccgcgtccgtgcacccgtccccgccggtgcacgaccgcacggtgctgcgcgcgcgctctcccccgcatgccaccttcgagcacccggtctactccccgagcaacctcaacggcctgccccgccccttcgtcacccgcgtctacgccgtgtcccccaagctcctcgccggcatcaagtccagctgcgcgcccggcgtgtccacctactgcgcgctcaccgcgcacctgtggcgcgccatgtgcgtggcccgcgggctggcccccgacgccgagtcgcggctgcgcgtgccggccaacatccggcagcgcctgcgcccgcagctgccggccaactacttcggcaacgccatcgtgcgggacctggtgacggtgcgcgtcggcgacgtgctgtcgcagccgctggggttcgtggcggagcggatcaagcgcgcggtggcgcgggtggacgacgccttcgtgcgctccgtcatcgactacctggaggtggagtcggagaagggcagccaggcggcgcgcgggcagttcatgccggagacggacctgtgggtggtgagctggctgggcatgcccatccacgacgccgacttcggctggggctgccccaagttcgtggcgccggcgcagatgttcggcagcggcacggcctacgtcacgcaggcgcccgacaaggacgacggcgtgtccgtgctgttcgcgctcgagccagagtacctgcagtgcttcgagaaggccttctacggggagtgaccgaccaaagccttctacggtgatgcgcctttcaaagagccacttgggagttgggatctcgagtccgtcgatagtgtggagtgctgtatcataacgcaacagatactgcggaagtgtcgaggttgctgcttgtttctcgcgcctttcttcactgctactatgtgacattgtgggctaactattatctatacaaagtctaaatgaaaatggcctcaggtttagctc

SEQ ID NO: 68075 - protein, 464 aa, Triticum aestivum
  peptide (1)..(464): Ceres Seq. ID no. 14313568
TRARAHARTAQAEHTSKGRDSARDRDEGGGGGHDAGDAERADAAAHAVALQPRPRRAQDAHAARLLLPGAPRRRRRREAGRVLRAGEAAGGAGEGAGAVLPAGRADGDGPRGPARDRLQRRGRAVRRRAGRLHRRRDVPGLRALPGGAPPARPLRRLRRPALPPRHGPGDVPQVRRRGRGHGHAPRDHGRRGRDPVHPDVDDPGARPGRRVRAPVPAGARPHGAARALSPACHLRAPGLLPEQPQRPAPPLRHPRLRRVPQAPRRHQVQLRARRVHLLRAHRAPVARHVRGPRAGPRRRVAAARAGQHPAAPAPAAAGQLLRQRHRAGPGDGARRRRAVAAAGVRGGADQARGGAGGRRLRALRHRLPGGGVGEGQPGGARAVHAGDGPVGGELAGHAHPRRRLRLGLPQVRGAGADVRQRHGLRHAGARQGRRRVRAVRARARVPAVLREGLLRGVTDQSLLR

SEQ ID NO: 68076 - protein, 457 aa, Triticum aestivum
  peptide (1)..(457): Ceres Seq. ID no. 14313569
THARAHTQEPPKPNTQAKGGTAREIEMKVEVVDTTLVTPSEPTPRHTLWLSNLDLAVPKTHTPLVYYYPAPPAGDGGEKQEEFFAPERLREALARALVPFYPLAGRMATGPEGRLEIDCNGEGALFVVARADFTGDEMFRDFEPSPEARRLLVPFAASGDPPCLLAMVQVTFLKCGGVAVGTGMHHVTMDGAGAIQFIRTWTTLARGLDAASVHPSPPVHDRTVLRARSPPHATFEHPVYSPSNLNGLPRPFVTRVYAVSPKLLAGIKSSCAPGVSTYCALTAHLWRAMCVARGLAPDAESRLRVPANIRQRLRPQLPANYFGNAIVRDLVTVRVGDVLSQPLGFVAERIKRAVARVDDAFVRSVIDYLEVESEKGSQAARGQFMPETDLWVVSWLGMPIHDADFGWGCPKFVAPAQMFGSGTAYVTQAPDKDDGVSVLFALEPEYLQCFEKAFYGE

SEQ ID NO: 68077 - protein, 431 aa, Triticum aestivum
  peptide (1)..(431): Ceres Seq. ID no. 14313570
MKVEVVDTTLVTPSEPTPRHTLWLSNLDLAVPKTHTPLVYYYPAPPAGDGGEKQEEFFAPERLREALARALVPFYPLAGRMATGPEGRLEIDCNGEGALFVVARADFTGDEMFRDFEPSPEARRLLVPFAASGDPPCLLAMVQVTFLKCGGVAVGTGMHHVTMDGAGAIQFIRTWTTLARGLDAASVHPSPPVHDRTVLRARSPPHATFEHPVYSPSNLNGLPRPFVTRVYAVSPKLLAGIKSSCAPGVSTYCALTAHLWRAMCVARGLAPDAESRLRVPANIRQRLRPQLPANYFGNAIVRDLVTVRVGDVLSQPLGFVAERIKRAVARVDDAFVRSVIDYLEVESEKGSQAARGQFMPETDLWVVSWLGMPIHDADFGWGCPKFVAPAQMFGSGTAYVTQAPDKDDGVSVLFALEPEYLQCFEKAFYGE

SEQ ID NO: 68078 - DNA, 1098 bp, Triticum aestivum
  misc_feature (1)..(1098): Ceres Seq. ID no. 13589024
aaacaacctagaacatcctaatcgaaaaaaaccctttcgaaagaatccccaaatctcgcacgctccaaaggcccgaaaccctagctctctgctttcatccccgccaccgtccccatggcgccagggctcaaacgcttcaccgacgtcgcggcagacggcacgccccgcctcgacgacgccgccggcgaggagctcgtgtgcgtggagcgcgccgcctcggtcgccctcggcagccgcgcgccggagcccccgggaaccctcttcatcaccaccaggagggtgatttggctcagcggggcggagaagggcaaaggatacgcggtgggcttcctggacatcacgctccacgcagtgtcgcgcgacccggaggcgtacccctcgccgtgcctctacactcagattgaagccaaagctgactctgatgaagaggatggtgattttgactctgaagcaggtggtgactcacagctaccaaaaatctctgagatgcgtattatattggcagatgctgcccaactagattcactttttaatgccttctgccattgtgctgaactgaaccctgatcctactgctgaagaaaatgaagacagtgacttgttccatggtggggatatgaccaatggtggttggattcatggcgatgaagatgaacacatggttgatggaatcgaccctgagttttttattcccaacccgataggtcaaaatggtggagatgacctcagttcttcagtacttgagcttcaaatcaatgaccagcgtttcgaggatgcggatgaagaggaggcccatgaaaatgggcattagaagcagatatatgctcgttttacttatcatgatcctcgtgaggaccatgtcattagtttggttgaagattgctgtagatgcagcttggttcgcctcatgctgttgtgtcccacactttccttttgtcctttaatagacgctgctataggatcgaggactctgagggcaaccgtgtagagttgcgtcgatggtaacttttatgggagaaggtcttgcttactggtcaagaatgtaacatgtagagcttggtggagaatccgattgatggatttcaataacttttgatct

SEQ ID NO: 68079 - protein, 231 aa, Triticum aestivum
  peptide (1)..(231): Ceres Seq. ID no. 13589025
MAPGLKRFTDVAADGTPRLDDAAGEELVCVERAASVALGSRAPEPPGTLFITTRRVIWLSGAEKGKGYAVGFLDITLHAVSRDPEAYPSPCLYTQIEAKADSDEEDGDFDSEAGGDSQLPKISEMRIILADAAQLDSLFNAFCHCAELNPDPTAEENEDSDLFHGGDMTNGGWIHGDEDEHMVDGIDPEFFIPNPIGQNGGDDLSSSVLELQINDQRFEDADEEEAHENGH

SEQ ID NO: 68080 - DNA, 1859 bp, Triticum aestivum
  misc_feature (1)..(1859): Ceres Seq. ID no. 13654528
attcttcttctctctccccaccgcctcccccttcctcgtcctcctctctcagtccgaagccgattacttagcagcttgccttcgtctttctctcctgcggttcctggagctacgtcttctcggcccctgccctttggttcgccgctccgctcccccccttctgccgcaaagggggacactcatggcgagtctagtagttctggcatcgctgcttgccgtaattgggctcgcgcagggggaggcgcaatgtgcgcggtacagcgggcggccgcggccacatagcgtgaccatcactgagtttggggccgtcggcgacggcctgaccgtcaatacggtgcccttccagaacgccatcttctacctgcggtcctttgccgacaagggcggcgcacagctgtacgtgcccaaggggcggtggctcaccggcagcttcaacctcaccagccacctcacccttttcctggagaaggacgctgtcatcatcggcaccgaggatgtgacacaatggccaattgtggaacctttgccatcatatggccaaggaattgatcttccgggtgcaaggcatcgcagcttaataaatgggcacaatgttaccgatgtcataattacagggaacagtggaatcgtagacggccagggtttgatatggtggaattggtttcgctcaaataaattgaactatagccggcctcatcttgtggagtttgaggattcggaagaaattgtgatttcgaacttgacatttttagattctccagcatggggtatacatcctgtgtattgcagcaatgtaacaatccgtaatgtcacaatcgagactggattggatgctccactcaccaatggaattgtcccagattcatgctcgaatatgtgcattgaggacagcagaattagcgtcggtcatgatgccatctcattaaaaagtgggtgggacaactatggcattacatttggaaggccaacctcagacattcacattagtagagtggatctgcaagcctcactgggagctgctcttgcatttggcagtgagatgtctggtgggatctcggatgttcatgttgatcaccttcatattcatggttcatccaaaggtatatccttcaggaccgcaccaggccgtggtggttatataagggatgcgatagtatcagatgtccaaatggaagacgtccatgttgcaatcgagttcaccggcgattggtcaagccatcctgatgaacattttgatttgtctgcactcccggagatcagtggaatcaccttaaaagacatggttggaaaaaacatttcgtttgcaggagttttgtcgggaatcgatggcgatcctttcaccaatatctgcctctccaatatcaatttcaccatagctgattcagcgcattctgcctcttggtcttgctccaacatttctggatactccgagtcggtatttcccgaggcttgttccgacctccacagtcaatcatcaaattcctccatctgctcatccacccttagctaccatgcccttgcgacagcgtaaatgcatatagcacccaatattcatcctttcatgtttctgtccatgtacaatctggagacatctagctctagcttcatcgccatctttcccccaaaaaaattctcttccgttataggtgcatcaaagaatcatcgggcttcgtacagtcagctttgaggctcataatacaaaattttggctggcgtccttgatgagtccagagaggtgtttccttgtacagttacatttgttcattcaatctgtaagaaattttgtccggtaggttgtcgagtccaaagagttggtttatattgctgtttattttattgccatatataaaataaacatt

SEQ ID NO: 68081 - protein, 509 aa, Triticum aestivum
  peptide (1)..(509): Ceres Seq. ID no. 13654529
FFFSLPTASPFLVLLSQSEADYLAACLRLSLLRFLELRLLGPCPLVRRSAPPLLPQRGTLMASLVVLASLLAVIGLAQGEAQCARYSGRPRPHSVTITEFGAVGDGLTVNTVPFQNAIFYLRSFADKGGAQLYVPKGRWLTGSFNLTSHLTLFLEKDAVIIGTEDVTQWPIVEPLPSYGQGIDLPGARHRSLINGHNVTDVIITGNSGIVDGQGLIWWNWFRSNKLNYSRPHLVEFEDSEEIVISNLTFLDSPAWGIHPVYCSNVTIRNVTIETGLDAPLTNGIVPDSCSNMCIEDSRISVGHDAISLKSGWDNYGITFGRPTSDIHISRVDLQASLGAALAFGSEMSGGISDVHVDHLHIHGSSKGISFRTAPGRGGYIRDAIVSDVQMEDVHVAIEFTGDWSSHPDEHFDLSALPEISGITLKDMVGKNISFAGVLSGIDGDPFTNICLSNINFTIADSAHSASWSCSNISGYSESVFPEACSDLHSQSSNSSICSSTLSYHALATA

SEQ ID NO: 68082 - protein, 449 aa, Triticum aestivum
  peptide (1)..(449): Ceres Seq. ID no. 13654530
MASLVVLASLLAVIGLAQGEAQCARYSGRPRPHSVTITEFGAVGDGLTVNTVPFQNAIFYLRSFADKGGAQLYVPKGRWLTGSFNLTSHLTLFLEKDAVIIGTEDVTQWPIVEPLPSYGQGIDLPGARHRSLINGHNVTDVIITGNSGIVDGQGLIWWNWFRSNKLNYSRPHLVEFEDSEEIVISNLTFLDSPAWGIHPVYCSNVTIRNVTIETGLDAPLTNGIVPDSCSNMCIEDSRISVGHDAISLKSGWDNYGITFGRPTSDIHISRVDLQASLGAALAFGSEMSGGISDVHVDHLHIHGSSKGISFRTAPGRGGYIRDAIVSDVQMEDVHVAIEFTGDWSSHPDEHFDLSALPEISGITLKDMVGKNISFAGVLSGIDGDPFTNICLSNINFTIADSAHSASWSCSNISGYSESVFPEACSDLHSQSSNSSICSSTLSYHALATA

SEQ ID NO: 68083 - DNA, 1008 bp, Triticum aestivum
  misc_feature (1)..(1008): Ceres Seq. ID no. 13654531
aaccgccgccgtctgcccgtctgcacgcccatggccaccctcgcgccacgccccgacctcctcctcgtcgctctgagaaggtcccgcgctaggacgcttcgcgtccgcgccgccgccgtcccacgtgcccgccgtcctccggtgccaccgcaggcagcgcggcgcgtcttcctcggcctcggcgccgctttcgtcgaccagctcgcccgcatggcctccggtggtgccccgtcccgctcgttcgtggccgcggcgcggccaaggcagggggtctccccggtcgaagagattttgaagaatgtggagtggccggacgagttccctttcaagcccgacgacttcggccgcttcgacgagtcatcagatactgtgttctattcggctccccgttttgtcacgcacattgacgacccagcaatcagagcgctcacaaaatactactcgcaagttcttcctccaagcaacactccaggcgtggccatcctggacatgtgcagtagctgggtgagccattatccagctgggtacaagcaagagaagatcgtagggatgggtatgaatgaaaacgagctgaaaaagaatccggttttgacacagtatgttgtgcaagacctcaatttgaatccgaagcttccttttgacgataacacctttgatgttataacgaacgtggttagtgtagactacttgacaaaaccaatggatgtttttaaagagatgagacgaatacttaaaccatctggattagctatcatgagcttttcaaatcgctgcttttggacaaaagctatatccatttggacatcaactggtgatgctgaccatgcttggatagttggtgcatactaccattatgctggagggttcgagccccctgaggctgttgatatatctcccaatccaggacaaacagatccgatgtacattgtttgctctagaaagaaaactgcttaattaaatatattttgtatcggaattttgcttaaaagaccaaatactagctgacgc

SEQ ID NO: 68084 - protein, 317 aa, Triticum aestivum
  peptide (1)..(317): Ceres Seq. ID no. 13654532
NRRRLPVCTPMATLAPRPDLLLVALRRSRARTLRVRAAAVPRARRPPVPPQAARRVFLGLGAAFVDQLARMASGGAPSRSFVAAARPRQGVSPVEEILKNVEWPDEFPFKPDDFGRFDESSDTVFYSAPRFVTHIDDPAIRALTKYYSQVLPPSNTPGVAILDMCSSWVSHYPAGYKQEKIVGMGMNENELKKNPVLTQYVVQDLNLNPKLPFDDNTFDVITNVVSVDYLTKPMDVFKEMRRILKPSGLAIMSFSNRCFWTKAISIWTSTGDADHAWIVGAYYHYAGGFEPPEAVDISPNPGQTDPMYIVCSRKKTA

SEQ ID NO: 68085 - protein, 307 aa, Triticum aestivum
  peptide (1)..(307): Ceres Seq. ID no. 13654533
MATLAPRPDLLLVALRRSRARTLRVRAAAVPRARRPPVPPQAARRVFLGLGAAFVDQLARMASGGAPSRSFVAAARPRQGVSPVEEILKNVEWPDEFPFKPDDFGRFDESSDTVFYSAPRFVTHIDDPAIRALTKYYSQVLPPSNTPGVAILDMCSSWVSHYPAGYKQEKIVGMGMNENELKKNPVLTQYVVQDLNLNPKLPFDDNTFDVITNVVSVDYLTKPMDVFKEMRRILKPSGLAIMSFSNRCFWTKAISIWTSTGDADHAWIVGAYYHYAGGFEPPEAVDISPNPGQTDPMYIVCSRKKTA

SEQ ID NO: 68086 - protein, 247 aa, Triticum aestivum
  peptide (1)..(247): Ceres Seq. ID no. 13654534
MASGGAPSRSFVAAARPRQGVSPVEEILKNVEWPDEFPFKPDDFGRFDESSDTVFYSAPRFVTHIDDPAIRALTKYYSQVLPPSNTPGVAILDMCSSWVSHYPAGYKQEKIVGMGMNENELKKNPVLTQYVVQDLNLNPKLPFDDNTFDVITNVVSVDYLTKPMDVFKEMRRILKPSGLAIMSFSNRCFWTKAISIWTSTGDADHAWIVGAYYHYAGGFEPPEAVDISPNPGQTDPMYIVCSRKKTA

SEQ ID NO: 68087 - DNA, 802 bp, Triticum aestivum
  misc_feature (1)..(802): Ceres Seq. ID no. 12614534
acggcgaaacaccccagaaatcccacccgtctccacccagataatcgcgagagatatttcgtcccggacgcgtccgccccgacgaccgaccgacaaacagcgcaaaagtaggagggagaggatgagcaccatggcgatgtcggcgctgaacccggacgcgcccatgttcatcccggcggcgttcaagaaggtggaggactactcgcccgagtggtgggagctcgtcaagaccaccgcctggttccgcgaccactggttccgccagcaccagctctacgaggacctcgccgacaacgtggacgtggacgacgtcgccgccctcctccccgacgactccgtcgacctgctcgacgccgacgacctcttctactccccgccgtcgccccagccccagcccgacttctaccactacaaaccagcagggttcggcggcgacatggacgcggtgctcaagacgctgagcctgaactcgccgaggggcggcggccccgcagcagcctgggcgccgatgaggcacgccgagaagccagcgcagcacgtcagccccagggccggcggtgccgcccgccgcgccatccaccagcctcgctagagctaaacgagtgctgctgccgccgctgctgctgtgtagtgtaaccttgagttcagttcagtcgggttcagtctagtctctccctgcatctgtgtatacagctgaaaaatgaaggggaaaacaaactgcaggcccctgcttgctagctagtgatttcccttcccttgtagcttccctcccgtgttcagaaatgggtcaagaacaaaagct

SEQ ID NO: 68088 - protein, 196 aa, Triticum aestivum
  peptide (1)..(196): Ceres Seq. ID no. 12614535
RRNTPEIPPVSTQIIARDISSRTRPPRRPTDKQRKSRRERMSTMAMSALNPDAPMFIPAAFKKVEDYSPEWWELVKTTAWFRDHWFRQHQLYEDLADNVDVDDVAALLPDDSVDLLDADDLFYSPPSPQPQPDFYHYKPAGFGGDMDAVLKTLSLNSPRGGGPAAAWAPMRHAEKPAQHVSPRAGGAARRAIHQPR

SEQ ID NO: 68089 - protein, 156 aa, Triticum aestivum
  peptide (1)..(156): Ceres Seq. ID no. 12614536
MSTMAMSALNPDAPMFIPAAFKKVEDYSPEWWELVKTTAWFRDHWFRQHQLYEDLADNVDVDDVAALLPDDSVDLLDADDLFYSPPSPQPQPDFYHYKPAGFGGDMDAVLKTLSLNSPRGGGPAAAWAPMRHAEKPAQHVSPRAGGAARRAIHQPR

SEQ ID NO: 68090 - protein, 153 aa, Triticum aestivum
  peptide (1)..(153): Ceres Seq. ID no. 12614537
MAMSALNPDAPMFIPAAFKKVEDYSPEWWELVKTTAWFRDHWFRQHQLYEDLADNVDVDDVAALLPDDSVDLLDADDLFYSPPSPQPQPDFYHYKPAGFGGDMDAVLKTLSLNSPRGGGPAAAWAPMRHAEKPAQHVSPRAGGAARRAIHQPR

SEQ ID NO: 68091 - DNA, 588 bp, Triticum aestivum
  misc_feature (1)..(588): Ceres Seq. ID no. 12624963
agttcactcaaacacagccacgcaacactatcactcaaacacagccgcacaagctagacttacctcctcagtagtataccggagcctcccagctagcaatatggcaaagtgcatcgccgtcgcgctcctgctactggtggcgctcgcgtactgcgacgggagggagctgaaccagaaggaccaggcactggcaacggcacgcggtgccggtgccgccggtggcggcgttggcgaggagaagattttggggttgcctgacctgccgcctgtgggaaccgttaccggtaccagcaccactaacggcccgctggtggcgcttcctgccattcccgggatccctgctcacccatgatcacctctagttcatgttctggcttacaagatgaagctcacctcgtgactttagacttcaaggctgtagcttaacatcgcccggaaggcaaacaccggcgtttcgctgatgtccatgttccttttaatgggcgtctgtatcaactatcctcgtctgtaattcttttcggtccgctttcctgtatttttcgatccttgatgtgctacatgtataaatgctactttcttcgcagtgtt

SEQ ID NO: 68092 - protein, 116 aa, Triticum aestivum
  peptide (1)..(116): Ceres Seq. ID no. 12624964
VHSNTATQHYHSNTAAQARLTSSVVYRSLPASNMAKCIAVALLLLVALAYCDGRELNQKDQALATARGAGAAGGGVGEEKILGLPDLPPVGTVTGTSTTNGPLVALPAIPGIPAHP

SEQ ID NO: 68093 - protein, 83 aa, Triticum aestivum
  peptide (1)..(83): Ceres Seq. ID no. 12624965
MAKCIAVALLLLVALAYCDGRELNQKDQALATARGAGAAGGGVGEEKILGLPDLPPVGTVTGTSTTNGPLVALPAIPGIPAHP

SEQ ID NO: 68094 - DNA, 1400 bp, Triticum aestivum
  misc_feature (1)..(1400): Ceres Seq. ID no. 13654468
atcgaataattaatcccgaggcgtcttgaaaaatatatcccaggatggcgatgtcgacggcgacgcggatgctggcgcgccgcgccgcccccgccctcctccgctccgccgccagccccggcctcctccgctcccccgccgccggcacaggccccagccccgccctcgcgctgccggcgctgctgcaggcgcaaggccggtggtaccgcgcatcaggaggggacccgtcaccgtcgttctacgagccgccgccgaccccggccaacctgggcctgagcatcgtcccggagaagaaggcgttcgtggtggagcgctttggcaagtacctcaagacactgtcgtcggggatccacctcctgatgcccggcgtggaccgcatcgcctacgtgcactcgctcaaggaggaggcaatccccatcccggacaactcggcaatcacaaaggacaacgtctcgatacagatcggaggagtgctatacgtcaagatcgtcgacccctacaaggcctcgtacggcgtggagaaccccatctatgctgtcatccagcttgcgcagacaaccatgaggagtgaacttggcaagattaccctcgacaagacctttgaggagagggacacgctcaacaccaacattgtgaagtcaatcaatgaggcagcagaaacttggggtttgaagtgtcttcgctacgaaatcagggacatcactcctccagatggagtcaagaaggccatggagatgcaggcagcagcagagcgcaagaaacgtgctcagatcctcgagtctgaaggtgctatgatggagaatgcaaacaaagcaaagggtgaagctgaagcgattcttgccaggtcacaggccactgctgaagggatcaggatggtctcggagtcgtttaaaactgaangcagcacagaggctggcagcttgaggattgctgaacagtacatcagagcattcagtgaactggctagaaatacgaacacgatgcttcttcccagagacgcagtcacaccggggccaatgattgctcagggccctccagatatgcacccacacgtacaagcagaaactgaccctgggaagccccagccccagccagcggggggcggtggcggcagaagaggctgatttgcccctcgggatgccatccatgagcgacctcggggcctttccgcacaagaagtaaagtagtgagtgtggaatcttgttgatgaggccctttttttttcttcttcttttctgttagggaggaatgaatagctagactggatagatagattggtagggaggcagcgcaactttgtcatgagtgaagatttactgattaggtcggtcgtttggtcggataaaacacaatactctgttggttagggacagctttgagagcaagctttttgtctgtct

SEQ ID NO: 68095 - protein, 359 aa, Triticum aestivum
  peptide (1)..(359): Ceres Seq. ID no. 13654469
  misc_feature (286)..(286): Xaa is any aa, unknown or other
MAMSTATRMLARRAAPALLRSAASPGLLRSPAAGTGPSPALALPALLQAQGRWYRASGGDPSPSFYEPPPTPANLGLSIVPEKKAFVVERFGKYLKTLSSGIHLLMPGVDRIAYVHSLKEEAIPIPDNSAITKDNVSIQIGGVLYVKIVDPYKASYGVENPIYAVIQLAQTTMRSELGKITLDKTFEERDTLNTNIVKSINEAAETWGLKCLRYEIRDITPPDGVKKAMEMQAAAERKKRAQILESEGAMMENANKAKGEAEAILARSQATAEGIRMVSESFKTEXSTEAGSLRIAEQYIRAFSELARNTNTMLLPRDAVTPGPMIAQGPPDMHPHVQAETDPGKPQPQPAGGGGGRRG

SEQ ID NO: 68096 - protein, 357 aa, Triticum aestivum
  peptide (1)..(357): Ceres Seq. ID no. 13654470
  misc_feature (284)..(284): Xaa is any aa, unknown or other
MSTATRMLARRAAPALLRSAASPGLLRSPAAGTGPSPALALPALLQAQGRWYRASGGDPSPSFYEPPPTPANLGLSIVPEKKAFVVERFGKYLKTLSSGIHLLMPGVDRIAYVHSLKEEAIPIPDNSAITKDNVSIQIGGVLYVKIVDPYKASYGVENPIYAVIQLAQTTMRSELGKITLDKTFEERDTLNTNIVKSINEAAETWGLKCLRYEIRDITPPDGVKKAMEMQAAAERKKRAQILESEGAMMENANKAKGEAEAILARSQATAEGIRMVSESFKTEXSTEAGSLRIAEQYIRAFSELARNTNTMLLPRDAVTPGPMIAQGPPDMHPHVQAETDPGKPQPQPAGGGGGRRG

SEQ ID NO: 68097 - protein, 351 aa, Triticum aestivum
  peptide (1)..(351): Ceres Seq. ID no. 13654471
  misc_feature (278)..(278): Xaa is any aa, unknown or other
MLARRAAPALLRSAASPGLLRSPAAGTGPSPALALPALLQAQGRWYRASGGDPSPSFYEPPPTPANLGLSIVPEKKAFVVERFGKYLKTLSSGIHLLMPGVDRIAYVHSLKEEAIPIPDNSAITKDNVSIQIGGVLYVKIVDPYKASYGVENPIYAVIQLAQTTMRSELGKITLDKTFEERDTLNTNIVKSINEAAETWGLKCLRYEIRDITPPDGVKKAMEMQAAAERKKRAQILESEGAMMENANKAKGEAEAILARSQATAEGIRMVSESFKTEXSTEAGSLRIAEQYIRAFSELARNTNTMLLPRDAVTPGPMIAQGPPDMHPHVQAETDPGKPQPQPAGGGGGRRG

SEQ ID NO: 68098 - DNA, 897 bp, Triticum aestivum
  misc_feature (1)..(897): Ceres Seq. ID no. 12583993
ccacacccaagaagcgctccatagctacaccaccaccaagctgatagcaagcaagcaagcattgacaaatccaccatggcgaggcttcagctttccgtcgtggcggcctgcgccgtcctcctcgcgctcgccgccccctccctcgccggcgaccccgacatgctccaggacgtctgcgtcgccgacctggcatccccgatcaagatcaacgggttcccatgcaaggcgaacatcacggccgacgacttcttcttcgccggactcaagaaggccggcaacaccaacaacccggctggttcggtcgtcactgcggctaacgtgctgtcattccccggggtgaacacgctcggcgtgtccatggcgcgcatcgactacgccgtgggagggcagaacccgccacacacccacccgcgcgccaccgagatcatcttcgtcaccgagggaaccctggaggtgggattcatcaccaccgctaacaagctcttcactaaggtcgtcaccgtcggagaggtgttcgtcttcccgcgagggctcgtgcacttccagcagaacaggggcaactgctctgcctccgtcatcgccgccttcaacagccagcttcagggcacccaagccatcgccaccacgctcttggctgccacaccaccagtgccaaccgacgtgctggccaaggccttcagggttgataacgaagacatcgacgccgtcaaggccaggttcaactagggagcctctgccgtctcgcaactctccatccatttcggaagaaaagaatcgtttgtttgttactgaataaatggtattcaagtcatcaagtgagctgtagcgtgtagttgatttgttgttgtgtatgttacatttgttcatctttgagataataaaacttgcttctgtttc

SEQ ID NO: 68099 - protein, 216 aa, Triticum aestivum
  peptide (1)..(216): Ceres Seq. ID no. 12583994
MARLQLSVVAACAVLLALAAPSLAGDPDMLQDVCVADLASPIKINGFPCKANITADDFFFAGLKKAGNTNNPAGSVVTAANVLSFPGVNTLGVSMARIDYAVGGQNPPHTHPRATEIIFVTEGTLEVGFITTANKLFTKVVTVGEVFVFPRGLVHFQQNRGNCSASVIAAFNSQLQGTQAIATTLLAATPPVPTDVLAKAFRVDNEDIDAVKARFN

SEQ ID NO: 68100 - protein, 188 aa, Triticum aestivum
  peptide (1)..(188): Ceres Seq. ID no. 12583995
MLQDVCVADLASPIKINGFPCKANITADDFFFAGLKKAGNTNNPAGSVVTAANVLSFPGVNTLGVSMARIDYAVGGQNPPHTHPRATEIIFVTEGTLEVGFITTANKLFTKVVTVGEVFVFPRGLVHFQQNRGNCSASVIAAFNSQLQGTQAIATTLLAATPPVPTDVLAKAFRVDNEDIDAVKARFN

SEQ ID NO: 68101 - protein, 122 aa, Triticum aestivum
  peptide (1)..(122): Ceres Seq. ID no. 12583996
MARIDYAVGGQNPPHTHPRATEIIFVTEGTLEVGFITTANKLFTKVVTVGEVFVFPRGLVHFQQNRGNCSASVIAAFNSQLQGTQAIATTLLAATPPVPTDVLAKAFRVDNEDIDAVKARFN

SEQ ID NO: 68102 - DNA, 1401 bp, Triticum aestivum
  misc_feature (1)..(1401): Ceres Seq. ID no. 12625108
aacttcaaccccccacgccactcgccaacgcctccgccgtccactcgccttctcgccgccacttgctctgctcaccgcgagcgcgtgcgtgcgtgcgcgcccccggagcgacgatggccgccgcactgccaccgtcgccgcccgccgccctcgcggcgctgctgctcctggtgatgctttcgccggccgcggcgcgcgtccctggcgtgtacaccggcggcgactggcagagcgcgcacgccaccttctacggcggcagcgacgcctccggcaccatgggcggcgcgtgcgggtacgggaacctgtacagccaagggtacggggtgaacaacgcggcgctgagcacggcgctgttcaacgaggggcagaggtgcggcgcctgcttcgagatccggtgcgagaaccagcctgggtgggcgtggtgcctcccggggaggccgtccatcgtcgtcaccgccaccaacttctgcccgcccaactacgcgctcccctccgacgacggcggctggtgcaacccgccccgcccccacttcgacctcgccatgcccatgttcctccacatggcgcagtaccgcgccggcatcgtccccgtctcctaccgccgggtggcgtgccggaagtctggcggggtgcggttcacgatcaacgggttcaggtacttcaacctggtgctgatcacgaacgtggcgggggcgggggacctggtgcgggccagcgtgaaggggtccagcaccgggtggatgcccatgtcccgcaactggggccagaactggcagtccaacgccatcctcgtcggccaggccctctccttccgcgtcaccgccagcgaccgccgcacctccacctcctggaacgccgcgccgcagagctggcgcttcggacagaccttcgagggcaagaacttcagggtctgatcccaccgtgaccttcccttcctcttctccggcgacggtcggcggcatgggcgggaggttcatcgtcttatatataaacgagtactactactacatactagtgggtgagtaattactacagtgagcgagtgagcggtctgtgttggtgtgtttttcccgtccttggtgcgtggcctgtgaatgcatatgcaaggtgcaagcaggttgataccagtagtagcagtaaaagtctagtcttgattagggtaaagaggtgatggttgctgggtactgaagtgtggagtggtggctgaagtggctgcaaagctgcagctgaagatgggagcggcgagtgtagcccgcagctgctgcttctccggtgtcgtcccgtcccgtgtcgtgtcatctttgtctccatggcacgctgctggctgttactagtactatttatcaatcgatcaatcatggacctgatttatatgtctatctatcagcttgatgattccct

SEQ ID NO: 68103 - protein, 307 aa, Triticum aestivum
  peptide (1)..(307): Ceres Seq. ID no. 12625109
TSTPHATRQRLRRPLAFSPPLALLTASACVRARPRSDDGRRTATVAARRPRGAAAPGDAFAGRGARPWRVHRRRLAERARHLLRRQRRLRHHGRRVRVREPVQPRVRGEQRGAEHGAVQRGAEVRRLLRDPVREPAWVGVVPPGEAVHRRHRHQLLPAQLRAPLRRRRLVQPAPPPLRPRHAHVPPHGAVPRRHRPRLLPPGGVPEVWRGAVHDQRVQVLQPGADHERGGGGGPGAGQREGVQHRVDAHVPQLGPELAVQRHPRRPGPLLPRHRQRPPHLHLLERRAAELALRTDLRGQELQGLIPP

SEQ ID NO: 68104 - protein, 303 aa, Triticum aestivum
  peptide (1)..(303): Ceres Seq. ID no. 12625110
LQPPTPLANASAVHSPSRRHLLCSPRARACVRAPGATMAAALPPSPPAALAALLLLVMLSPAAARVPGVYTGGDWQSAHATFYGGSDASGTMGGACGYGNLYSQGYGVNNAALSTALFNEGQRCGACFEIRCENQPGWAWCLPGRPSIVVTATNFCPPNYALPSDDGGWCNPPRPHFDLAMPMFLHMAQYRAGIVPVSYRRVACRKSGGVRFTINGFRYFNLVLITNVAGAGDLVRASVKGSSTGWMPMSRNWGQNWQSNAILVGQALSFRVTASDRRTSTSWNAAPQSWRFGQTFEGKNFRV

SEQ ID NO: 68105 - protein, 266 aa, Triticum aestivum
  peptide (1)..(266): Ceres Seq. ID no. 12625111
MAAALPPSPPAALAALLLLVMLSPAAARVPGVYTGGDWQSAHATFYGGSDASGTMGGACGYGNLYSQGYGVNNAALSTALFNEGQRCGACFEIRCENQPGWAWCLPGRPSIVVTATNFCPPNYALPSDDGGWCNPPRPHFDLAMPMFLHMAQYRAGIVPVSYRRVACRKSGGVRFTINGFRYFNLVLITNVAGAGDLVRASVKGSSTGWMPMSRNWGQNWQSNAILVGQALSFRVTASDRRTSTSWNAAPQSWRFGQTFEGKNFRV

SEQ ID NO: 68106 - DNA, 1030 bp, Triticum aestivum
  misc_feature (1)..(1030): Ceres Seq. ID no. 13582815
aacccaatatacacggagaagagatcgtcatcatccgccaaaccagatcggctcggctgcttcctcttcttcaacttcgcagaatcgctggtcttctcgtcctctagttaagtccctcgacagcaatgggaggaggcaacgacggtcatgggtacccacccggtggccaggggggataccctccgcaagggtacccgccgcagcagggaggttaccctccacagcaaggatacccgcctgcacctggagcttacccacctgcacctggggcataccctcctgcacctggggcataccctcctgcgcccggagcgggtggcagtgacggggagaaggggctcctctccaacatcatgcacggtgttgccggtgctcatggtggtggccatggctacccatctggtggccacgggtaccccccgcagcagcatggataccctcagcaaggctaccctcctcagcatggctacccaccgcaacagcatggctaccctccacagcagcatggctatccccctgctggctaccctggctcatctggtcacagtggtagccatggaggaggaggcatgggcatgggcggcatgctagctggaggcgcagcagctgctgccgccgcttacggagcacacaagatttctcacggcggccacggtggaggtggacacatgatgggaggcatgatgggcggccatggaggctatggcggcgggtacggccaccacggcggcaagttcaagcacgggaagcacggccacggcaagttcaagcacggcaagcatgggaagcacggcatgttcggcggcggcggaaagttcaagaagtggaagtaatgcgctagctagtagcttcaccatggctgatgaatcaaaaaaatacctaaactcttcgtgtaggcttccagaacttggtttggtcagggaaagcctttgagatgtatctaagcagggtgtggtgtggttgctgcccggatctcgtggagcttccatcctttcctctatatgatttggcactctagtctgcgtctgtg

SEQ ID NO: 68107 - protein, 235 aa, Triticum aestivum; identical to SEQ ID NO: 51294
  peptide (1)..(235): Ceres Seq. ID no. 13582816

SEQ ID NO: 68108 - protein, 159 aa, Triticum aestivum; identical to SEQ ID NO: 51295
  peptide (1)..(159): Ceres Seq. ID no. 13582817

SEQ ID NO: 68109 - protein, 147 aa, Triticum aestivum; identical to SEQ ID NO: 51296
  peptide (1)..(147): Ceres Seq. ID no. 13582818

SEQ ID NO: 68110 - DNA, 1289 bp, Triticum aestivum
  misc_feature (1)..(1289): Ceres Seq. ID no. 14313540
atcttttccaagcgcagaggcaaagttgtgcacgaggagggcgtgcggcatcggccaactgcagcgcagcggcgccggcggatcttctctccccgcgccgtcccggagtgctccgtccgtgccagtaagcaaaacctacaggattagaagaagccacaatggaaggaagcatcagcggtccgtcagagaaaagggttgccgtggtgaccggagggaaccgggggatggggctggagatatgccggcagcttgcggggcacgggctcgccgtcgtcttgacggcgagggacgacaagaggggcgctgaggcagccgaaacgctccgggaggaggggctatcggacgtcgcgtttcatcagctggagatcagcgagcccgccagtgccgctcgtctggctgctttcgtaaagaagaagttcggcaagcttgacatactggtcaacaatgccggagtgctcggggtgaccacggacgtcggcgacccggcgacccttcaggaaacgcttgcaggcaaggatgggatggagagagccgaatggctgaggcaacggaccacacagaccacccaggatgcagaggactgcctgaggatcaactaccacggcaacaagaccgtcacggaagccctcctcccgctcctccgatcatcctccgacggcagaattgtcaacgtaacctcagcctgggggctgctcaggtatttcagcggcgacgagctccggcgggagctggacgacgtcgcaaacctcacgacgcagcggctcgacgagatgtcggacctgttcctcgaggacctgggcaagggcaatggcgcgctggagcgccgcgggtggccggccgacccggtctacgcggcctacatggcgtccaaggcgctggtgtgcgcctacaccagggtgatcgccagggaggagggcgccgcgctgcgggtcaactgcgtgcaccccggatacgtcgtcaccgggatgaacgactacaccggcgtgctcacggccgcggagggcgccgccgccgcggttgcagttgcactcgcggagaaggggggcgtcaccggcgcctacttcgaccgcactgaactcggagcgtcctttgtgtgatttctccgtggagcagttgtgacataagtatatctagaattatgttatctttgcaataacacaatgtcatgagttgttccagatatggagaattatgttgtgttcacttttttttctctccgctctcagaagtactctccgttcactattatatgatgttctaacttttttataaatcagatgtttttagac

SEQ ID NO: 68111 - protein, 312 aa, Triticum aestivum
  peptide (1)..(312): Ceres Seq. ID no. 14313541
MEGSISGPSEKRVAVVTGGNRGMGLEICRQLAGHGLAVVLTARDDKRGAEAAETLREEGLSDVAFHQLEISEPASAARLAAFVKKKFGKLDILVNNAGVLGVTTDVGDPATLQETLAGKDGMERAEWLRQRTTQTTQDAEDCLRINYHGNKTVTEALLPLLRSSSDGRIVNVTSAWGLLRYFSGDELRRELDDVANLTTQRLDEMSDLFLEDLGKGNGALERRGWPADPVYAAYMASKALVCAYTRVIAREEGAALRVNCVHPGYVVTGMNDYTGVLTAAEGAAAAVAVALAEKGGVTGAYFDRTELGASFV

SEQ ID NO: 68112 - protein, 290 aa, Triticum aestivum
  peptide (1)..(290): Ceres Seq. ID no. 14313542
MGLEICRQLAGHGLAVVLTARDDKRGAEAAETLREEGLSDVAFHQLEISEPASAARLAAFVKKKFGKLDILVNNAGVLGVTTDVGDPATLQETLAGKDGMERAEWLRQRTTQTTQDAEDCLRINYHGNKTVTEALLPLLRSSSDGRIVNVTSAWGLLRYFSGDELRRELDDVANLTTQRLDEMSDLFLEDLGKGNGALERRGWPADPVYAAYMASKALVCAYTRVIAREEGAALRVNCVHPGYVVTGMNDYTGVLTAAEGAAAAVAVALAEKGGVTGAYFDRTELGASFV

SEQ ID NO: 68113 - protein, 191 aa, Triticum aestivum
  peptide (1)..(191): Ceres Seq. ID no. 14313543
MERAEWLRQRTTQTTQDAEDCLRINYHGNKTVTEALLPLLRSSSDGRIVNVTSAWGLLRYFSGDELRRELDDVANLTTQRLDEMSDLFLEDLGKGNGALERRGWPADPVYAAYMASKALVCAYTRVIAREEGAALRVNCVHPGYVVTGMNDYTGVLTAAEGAAAAVAVALAEKGGVTGAYFDRTELGASFV

SEQ ID NO: 68114 - DNA, 1603 bp, Triticum aestivum
  misc_feature (1)..(1603): Ceres Seq. ID no. 13662301
ctcttgtctatgcagcttgcttcccctatctattttctagagggagggggagagagggacaaccaagatccaaatcttggccagcgactcgatcggatctccagccgacgccggcgaccatggctcgccatcacctccttctcttcctccctcttctcgcgcttgccttctcctttgtcatcgccgcccctgagagacagggagatgccgcggccttcatcgatggcgcatcgcaccgctacctgagggatcagccagaggaccaggccacgtccatgtcacttggtgaagtttctgcagctgtttctgtcttgcttggttttgcaccacctgccattcttcctgcaccttcttctgcaaagttaaacaagctgctactcccaaacccatttgacagacctcgttctgttttcttgatgcaacttgatggatcccatgactatgttaatggcttcatatctgatgccggcagtatttacaaaaccaagattgatggtgcaaaaagtgctgctatagagctttcagataaggatgaattgattgtcattcgttcggatgaatcttctggattagatgttcttgataacgaactcgccaacttggcaacctggttggcgggatcctatcagaaagctgatagcaaattaaacattcccttgaagagtggaaacagtcttactttgttcctcactaaggaagcagacgttgaatttgcatccagcttgatctcccttcttaaaaccatcgaaaggggtattcaggttcacgaagatttctcaggaggcatggtgagccctgcagagttattagtatgccacttcacgggcattaaggctctggaagatgaatatggttccgcagaaattgttaagcagggagctgaagtagttcagacagctctcacaaaagcatttgatcaattgcagggagcatataatggaaaaattgttggactggtaatatccgctaaggaggcttcaacatccttggcatccatcatcgatgcaccgtcttcattgcatatctcaagacggcttgcagaagcatctaaaactaatgctacagcttctatagctgctatatatcttgttagattgagtcttgcatggattacagggatcatccttctcgtctcaactctcattgggatttgcttgctcatgaacatgccgcttacgagggacacactcctatattcaaatgccaagattgattagtttgtgctacatacgaattttcacacgatgacatgaaagttttcaacagtcatgcttggtttttcctttggatcctggggtttacagtaggaacgtgagtgtgggcttgctgttcatgcagtgtagcataaaaatactgttgctatgtccttcatttagaatcatactgccactgcctgtttgggcttctcatgtttttccgtaaataaataacaatattcgagtggggtttattttgttaatatcggtcatgattgtatttttgcaaaaagcagtatctgaataaattcgccactcgaatattcattgggatatattttgtcttcatatatgacgttaaatgatttattgagttgaaatttcatataaattgattaatcatatgt

SEQ ID NO: 68115 - protein, 404 aa, Triticum aestivum
  peptide (1)..(404): Ceres Seq. ID no. 13662302
LVYAACFPYLFSRGRGREGQPRSKSWPATRSDLQPTPATMARHHLLLFLPLLALAFSFVIAAPERQGDAAAFIDGASHRYLRDQPEDQATSMSLGEVSAAVSVLLGFAPPAILPAPSSAKLNKLLLPNPFDRPRSVFLMQLDGSHDYVNGFISDAGSIYKTKIDGAKSAAIELSDKDELIVIRSDESSGLDVLDNELANLATWLAGSYQKADSKLNIPLKSGNSLTLFLTKEADVEFASSLISLLKTIERGIQVHEDFSGGMVSPAELLVCHFTGIKALEDEYGSAEIVKQGAEVVQTALTKAFDQLQGAYNGKIVGLVISAKEASTSLASIIDAPSSLHISRRLAEASKTNATASIAAIYLVRLSLAWITGIILLVSTLIGICLLMNMPLTRDTLLYSNAKID

SEQ ID NO: 68116 - protein, 365 aa, Triticum aestivum
  peptide (1)..(365): Ceres Seq. ID no. 13662303
MARHHLLLFLPLLALAFSFVIAAPERQGDAAAFIDGASHRYLRDQPEDQATSMSLGEVSAAVSVLLGFAPPAILPAPSSAKLNKLLLPNPFDRPRSVFLMQLDGSHDYVNGFISDAGSIYKTKIDGAKSAAIELSDKDELIVIRSDESSGLDVLDNELANLATWLAGSYQKADSKLNIPLKSGNSLTLFLTKEADVEFASSLISLLKTIERGIQVHEDFSGGMVSPAELLVCHFTGIKALEDEYGSAEIVKQGAEVVQTALTKAFDQLQGAYNGKIVGLVISAKEASTSLASIIDAPSSLHISRRLAEASKTNATASIAAIYLVRLSLAWITGIILLVSTLIGICLLMNMPLTRDTLLYSNAKID

SEQ ID NO: 68117 - protein, 313 aa, Triticum aestivum
  peptide (1)..(313): Ceres Seq. ID no. 13662304
MSLGEVSAAVSVLLGFAPPAILPAPSSAKLNKLLLPNPFDRPRSVFLMQLDGSHDYVNGFISDAGSIYKTKIDGAKSAAIELSDKDELIVIRSDESSGLDVLDNELANLATWLAGSYQKADSKLNIPLKSGNSLTLFLTKEADVEFASSLISLLKTIERGIQVHEDFSGGMVSPAELLVCHFTGIKALEDEYGSAEIVKQGAEVVQTALTKAFDQLQGAYNGKIVGLVISAKEASTSLASIIDAPSSLHISRRLAEASKTNATASIAAIYLVRLSLAWITGIILLVSTLIGICLLMNMPLTRDTLLYSNAKID

SEQ ID NO: 68118 - DNA, 1179 bp, Triticum aestivum
  misc_feature (1)..(1179): Ceres Seq. ID no. 13598708
acacacagcgacctactatctcataagcctataccatccgttgagccacacccaactccgccatggcgaacccctccaatttccagatcactccccgcgccgcgttcgtggagagcaacgagctcaacttccgcagtctgtacctgttccacacttccctcggcgcaaaccagacccagtccaccgtaatagacccgaatgctagtaccggtttgggtcagacggctgttaacaactgggcgatatgtgatagccctagccccggtgccaccgtcgttgcacgtgcacatggcctgcatatctatgccggtaactggcagaacaccttcagcataacctttgaagttgaaaggtttaaggggtcaacgcttcaggtgatggggatatctgttgaggaaggtgagtgggctattgttggtggcacaggacagttcgcaatggcaaacggtgtcatatacaaaaagttccatgagcagaggagcgacggtaacatcatagaactcactgtccacgcgttctgtccagtgctgaaaggctcgccgagccttctcacaaagcttgggccatggggtggaagtggagggtcagataaagacatcgttgaggcaccaaggcgtctagagagcatcacagttagcagcggctcgattattgattcaatcaaattttcttatgttgaccaagctggccagaagcacacaagtggaccctggggaggatccggaggaaatccgaacacgatcgtactcggggcttctgagtttgtgaaggaagtttctggaacatacggcatttatgacgcagaccaacacaacataataatgtcactgaaattcatcaccaatgtgaaggcttatgggcctttcggagaagcgaatggaacccctttcaccatacctgtggaaaacaatagcagcatagtgggcttcttcgggcgtagtgggatatatctcgatgcgcttggtgtctacgtgcgcccgctctaagcaacaacagctaatgttcttattttcggcgtttgtttctcatttcaaataagaagatgggatcgttgtcctttctcatccggaagatcctatgtagccacccggacttttaggtccctttgttgtgatgaataaaaatatcagttttcttacaaaaaaaaaaaaaaaaaagcttatcgataccgtcgacctc

SEQ ID NO: 68119 - protein, 307 aa, Triticum aestivum
  peptide (1)..(307): Ceres Seq. ID no. 13598709
MANPSNFQITPRAAFVESNELNFRSLYLFHTSLGANQTQSTVIDPNASTGLGQTAVNNWAICDSPSPGATVVARAHGLHIYAGNWQNTFSITFEVERFKGSTLQVMGISVEEGEWAIVGGTGQFAMANGVIYKKFHEQRSDGNIIELTVHAFCPVLKGSPSLLTKLGPWGGSGGSDKDIVEAPRRLESITVSSGSIIDSIKFSYVDQAGQKHTSGPWGGSGGNPNTIVLGASEFVKEVSGTYGIYDADQHNIIMSLKFITNVKAYGPFGEANGTPFTIPVENNSSIVGFFGRSGIYLDALGVYVRPL

SEQ ID NO: 68120 - protein, 202 aa, Triticum aestivum
  peptide (1)..(202): Ceres Seq. ID no. 13598710
MGISVEEGEWAIVGGTGQFAMANGVIYKKFHEQRSDGNIIELTVHAFCPVLKGSPSLLTKLGPWGGSGGSDKDIVEAPRRLESITVSSGSIIDSIKFSYVDQAGQKHTSGPWGGSGGNPNTIVLGASEFVKEVSGTYGIYDADQHNIIMSLKFITNVKAYGPFGEANGTPFTIPVENNSSIVGFFGRSGIYLDALGVYVRPL

SEQ ID NO: 68121 - protein, 182 aa, Triticum aestivum
  peptide (1)..(182): Ceres Seq. ID no. 13598711
MANGVIYKKFHEQRSDGNIIELTVHAFCPVLKGSPSLLTKLGPWGGSGGSDKDIVEAPRRLESITVSSGSIIDSIKFSYVDQAGQKHTSGPWGGSGGNPNTIVLGASEFVKEVSGTYGIYDADQHNIIMSLKFITNVKAYGPFGEANGTPFTIPVENNSSIVGFFGRSGIYLDALGVYVRPL

SEQ ID NO: 68122 - DNA, 669 bp, Triticum aestivum
  misc_feature (1)..(669): Ceres Seq. ID no. 13585156
gagtttacccgacgccaccccctcttttctttcccccttcctcttcaactcccgtctcacctctcccgacgccgaaccgaatcgcagcagcggcagccggagaagaagagatcgagcgccagcagccatgtccggcatggaggaggaggagaacgccgccgagctcaagatcggcgaagagttcctgaaggccaagtgcctgatgaactgcgaggtggcgataatcctggagcacaagtgggagcagctgcagcacatgtcggacggcggcgccgaccaggtctcgcaggtcttcgagaagtcgcaggcctacgtcaagcgcttcagccgctacaagaaccccgacgcggtccgccaggtccgcgagacgctctcccgctacagcctcgtcgagttcgagctctgcaccctcgggaacctctgccccgacaccgccgacgaggccaaggcgctcgtcccctccctcgtccccggcggcaggttcgacagcgacgaccgggtcgacaagatgctcaacgacctctccctcatcaagaagttcgagtagtagcccccataatatgctcttcttgtcttcctccagtgatatgtttaagcttcagattatctccttttattgcgctatgatcataagacatcagtgtcagtctcaaatgaatggagttaatt

SEQ ID NO: 68123 - protein, 208 aa, Triticum aestivum
  peptide (1)..(208): Ceres Seq. ID no. 13585157
EFTRRHPLFSFPLPLQLPSHLSRRRTESQQRQPEKKRSSASSHVRHGGGGERRRAQDRRRVPEGQVPDELRGGDNPGAQVGAAAAHVGRRRRPGLAGLREVAGLRQALQPLQEPRRGPPGPRDALPLQPRRVRALHPREPLPRHRRRGQGARPLPRPRRQVRQRRPGRQDAQRPLPHQEVRVVAPIICSSCLPPVICLSFRLSPFIAL

SEQ ID NO: 68124 - protein, 181 aa, Triticum aestivum
  peptide (1)..(181): Ceres Seq. ID no. 13585158
SLPDATPSFLSPFLFNSRLTSPDAEPNRSSGSRRRRDRAPAAMSGMEEEENAAELKIGEEFLKAKCLMNCEVAIILEHKWEQLQHMSDGGADQVSQVFEKSQAYVKRFSRYKNPDAVRQVRETLSRYSLVEFELCTLGNLCPDTADEAKALVPSLVPGGRFDSDDRVDKMLNDLSLIKKFE

SEQ ID NO: 68125 - protein, 139 aa, Triticum aestivum
  peptide (1)..(139): Ceres Seq. ID no. 13585159
MSGMEEEENAAELKIGEEFLKAKCLMNCEVAIILEHKWEQLQHMSDGGADQVSQVFEKSQAYVKRFSRYKNPDAVRQVRETLSRYSLVEFELCTLGNLCPDTADEAKALVPSLVPGGRFDSDDRVDKMLNDLSLIKKFE

SEQ ID NO: 68126 - DNA, 1032 bp, Triticum aestivum
  misc_feature (1)..(1032): Ceres Seq. ID no. 13596366
aacaagctccattcatctattcttcgtctccaccgatccctttggtagaccaaccagcagcagctctcggctcacctctccctgctcctcgatctatctagtctagtcttcagtgtggccatggcgaaggtgcacccgaacctggccgtgccgtctctggggatggcggcggcggcggcggcccgcgacgacgagccggtgacactgacggtgtggcgcaagtcgctgctcttcaactgccgggggttcacggtgttcgacgccagcggcaacctggtgtaccgcgtggacatctacgcgtccgactcccgcgccgaggtggtgctcatggacgccgcggggcggccggtgctcaccgtccgccgcaagaaggccatcagcctcatgggcgaccagtggctggtgttccccggcgaggagacgcgcgcgccgccgctctacgcggtgaagcgcacgccgcagtacatgcgcggcggcggcaagtcgacggcgcacgtggcggcgtgcgcgggcggcgcgcggtacgaggtggaggggtcgtacgcgcggcggtgctgcgcggtgtacgacgagcagcggcgcgcggtggtggaggtgcagcccaaggaggcggtgggcacggacgtgttccggatggtggtgcggccggcgggcatggacgtgtcgctggccatggccgtcgtgctcgcgctggaccagatgctcgggaggccggggctgctcaggagctggtcctcgtagcgccactgagactgggtcgcctccttcggtttgcctccttcgatttccgaaattgtttgggcccgagagcagaacagctcccatgtgccccccttctctctcttttttttgtttcctttttggaaactttctctttgatatatatgaaggtctatgtgcatcgaaatccttcttgaggtgtatggttttgttcatttttactgtaataaaaccatgcattttgtaaagattattaaagtgggatgaaactgtattactcctatacttctataaaagaagtcacactaggcc

SEQ ID NO: 68127 - protein, 206 aa, Triticum aestivum
  peptide (1)..(206): Ceres Seq. ID no. 13596367
MAKVHPNLAVPSLGMAAAAAARDDEPVTLTVWRKSLLFNCRGFTVFDASGNLVYRVDIYASDSRAEVVLMDAAGRPVLTVRRKKAISLMGDQWLVFPGEETRAPPLYAVKRTPQYMRGGGKSTAHVAACAGGARYEVEGSYARRCCAVYDEQRRAVVEVQPKEAVGTDVFRMVVRPAGMDVSLAMAVVLALDQMLGRPGLLRSWSS

SEQ ID NO: 68128 - protein, 192 aa, Triticum aestivum
  peptide (1)..(192): Ceres Seq. ID no. 13596368
MAAAAAARDDEPVTLTVWRKSLLFNCRGFTVFDASGNLVYRVDIYASDSRAEVVLMDAAGRPVLTVRRKKAISLMGDQWLVFPGEETRAPPLYAVKRTPQYMRGGGKSTAHVAACAGGARYEVEGSYARRCCAVYDEQRRAVVEVQPKEAVGTDVFRMVVRPAGMDVSLAMAVVLALDQMLGRPGLLRSWSS

SEQ ID NO: 68129 - protein, 137 aa, Triticum aestivum
  peptide (1)..(137): Ceres Seq. ID no. 13596369
MDAAGRPVLTVRRKKAISLMGDQWLVFPGEETRAPPLYAVKRTPQYMRGGGKSTAHVAACAGGARYEVEGSYARRCCAVYDEQRRAVVEVQPKEAVGTDVFRMVVRPAGMDVSLAMAVVLALDQMLGRPGLLRSWSS

SEQ ID NO: 68130 - DNA, 1107 bp, Triticum aestivum
  misc_feature (1)..(1107): Ceres Seq. ID no. 14301526
aaccaagattcaaagaatccaatccagtccaatccatcttctctttgccactcttctccgccggagctgctgccaaagtctctgtctttctctgtgtccgtccagtagatgagcatggcggcgacggcggccacggccacgccctggccctccacctcctcctccgtcctcgcccctcgcacccgccaccacgccacccgcagcccccgcgccctccgctccggcttcctcggccgcgccctcaccctcgccgcccccacagaccgcccctcccccgtctccgtctccgtgcgcgcggcctgggacggccccctctcctcggcgcgcctcatcatgcagggccgcaacgtcaagctgacggagaagctcaaggagcacatcgaggacaaggtggggcgcgcggtgcacaaccacgcgcacctggtgcgggaggtggacgtgcgcctctccgcccgcggcggcgacctcagcaagggccccaagctctcccgctgcgaggtcacgctcttcacgcgccgccacggcgtcgtgcgcgcagaggaggaggaggagtcatcctactcctccatcgacgccgccgccgccgtcgtcaagcgcaagctgaggaagatcaaggagaaggagaccgacgtgcgccacctcaagggcaccaaggagtggcaggcctccgggctgtccgacgtggaagacgagtcggaggcagaggagctggaggatgacgacgatgacgagctcgtggaggtcatcggcgccgaggacgaggagaccgtgctcaccaaggttgtgcgcaccaaggtgttcgagatggcgccgctgacggtggatgaggcgctggagcagctggagaacgtcgaccacgacttctacgccttcaggaacgagcagacaggggaggtgaacatcctgtacaagaggaaggagggagggttcgggctcatcatccccaagcaggacggccatgtcgacaaggccaccgtcaacgccaaggagaaggagcaccccgtcgccggctgacgtctcctctccatgacaccaagtggatcactagctgtagctgcattagtcggtctgttttttccctgatgataataatggtggtgggtgtcc

SEQ ID NO: 68131 - protein, 301 aa, Triticum aestivum
  peptide (1)..(301): Ceres Seq. ID no. 14301527
MSMAATAATATPWPSTSSSVLAPRTRHHATRSPRALRSGFLGRALTLAAPTDRPSPVSVSVRAAWDGPLSSARLIMQGRNVKLTEKLKEHIEDKVGRAVHNHAHLVREVDVRLSARGGDLSKGPKLSRCEVTLFTRRHGVVRAEEEEESSYSSIDAAAAVVKRKLRKIKEKETDVRHLKGTKEWQASGLSDVEDESEAEELEDDDDDELVEVIGAEDEETVLTKVVRTKVFEMAPLTVDEALEQLENVDHDFYAFRNEQTGEVNILYKRKEGGFGLIIPKQDGHVDKATVNAKEKEHPVAG

SEQ ID NO: 68132 - protein, 299 aa, Triticum aestivum
  peptide (1)..(299): Ceres Seq. ID no. 14301528
MAATAATATPWPSTSSSVLAPRTRHHATRSPRALRSGFLGRALTLAAPTDRPSPVSVSVRAAWDGPLSSARLIMQGRNVKLTEKLKEHIEDKVGRAVHNHAHLVREVDVRLSARGGDLSKGPKLSRCEVTLFTRRHGVVRAEEEEESSYSSIDAAAAVVKRKLRKIKEKETDVRHLKGTKEWQASGLSDVEDESEAEELEDDDDDELVEVIGAEDEETVLTKVVRTKVFEMAPLTVDEALEQLENVDHDFYAFRNEQTGEVNILYKRKEGGFGLIIPKQDGHVDKATVNAKEKEHPVAG

SEQ ID NO: 68133 - protein, 238 aa, Triticum aestivum
  peptide (1)..(238): Ceres Seq. ID no. 14301529
PRFKESNPVQSIFSLPLFSAGAAAKVSVFLCVRPVDEHGGDGGHGHALALHLLLRPRPSHPPPRHPQPPRPPLRLPRPRPHPRRPHRPPLPRLRLRARGLGRPPLLGAPHHAGPQRQADGEAQGAHRGQGGARGAQPRAPGAGGGRAPLRPRRRPQQGPQALPLRGHALHAPPRRRARRGGGGVILLLHRRRRRRRQAQAEEDQGEGDRRAPPQGHQGVAGLRAVRRGRRVGGRGAGG

SEQ ID NO: 68134 - DNA, 1374 bp, Triticum aestivum
  misc_feature (1)..(1374): Ceres Seq. ID no. 14302287
acacaccactccttcccctcccctgatctccccgccgcgccgatccccccaccagcgcagcagccatggcgaccgcctacaacctccggtcccgcgacgagccggacgacttcgacgagttcgactccacgccctacggcggcggctacgacctcttcgtcaccttcggccgcccgctcccgccctccgacgagacctgctacccctgctccgccccctccacctcctacgacgcgccccactacgccgccgaggagccctccccctacgcccaccaccagaagccgcagcccgcctacggcttccgcccccagaacgagcagcagcagcagccttcctacggccgcgaggacgacgactccggctacgtatccaagcccaagcccaagccccagcccgcgtacggcttccgcccccaggcggaggaggagcagcgcccgtcctacggcggcggcggggaggaggatgactccggctacggatccaagccgcagcccgcctacggcttccgcccccagcaggaggagcagccggcctacggctccggctacgggtccaagccccagcgctcccaggaggacacctacggatctggctacggccggaagccgcagcaggaggagcccgcctacgggtccgggtacggctccggctacgggaggaagccgcaggccgaggagagctacggatctgggtacgggaacacgacgcagccggaggagggctacggctccggctacgggtccaagccgcaggtggagcagacctacggcgggtcggagtacggctctgggtacggaaggaagccgcaggtggaggagagctatgggtcggggtacggaagcaggccgcaggggggagaggagtatggtagtgctgggtatggtgggaggaagactgaggaggagggctatggtggttctgggtatggatctgggaggaaggtgcaagaggaggatgaaggtgcctatggctctggtgggtaccagaagcccaagccgtatggagaggagactcaggcttcgtatggtggtgggtatgagaagcccagctacggcggggggaactatggccgcaagaagcaggatgacgactctgatgatgagaagaagaaccgttacgcgaagcgcgatgactcggatgatgagaaggagcgttacgagaagcaccaccaccaccgccgccacaactacgacgactaagcatccagcatggtcttgacctgctgccatcgcccccacatctcgctactacacgaataaagattggtcttgtttcccttgttggtgccggatcattcccctcttttatgaacttgtatgactgcaacctaaagtgtgctatgtgggtggtttatatgtttgaactatctcc

SEQ ID NO: 68135 - protein, 406 aa, Triticum aestivum
  peptide (1)..(406): Ceres Seq. ID no. 14302288
THHSFPSPDLPAAPIPPPAQQPWRPPTTSGPATSRTTSTSSTPRPTAAATTSSSPSAARSRPPTRPATPAPPPPPPTTRPTTPPRSPPPTPTTRSRSPPTASAPRTSSSSSLPTAARTTTPATYPSPSPSPSPRTASAPRRRRSSARPTAAAGRRMTPATDPSRSPPTASAPSRRSSRPTAPATGPSPSAPRRTPTDLATAGSRSRRSPPTGPGTAPATGGSRRPRRATDLGTGTRRSRRRATAPATGPSRRWSRPTAGRSTALGTEGSRRWRRAMGRGTEAGRRGERSMVVLGMVGGRLRRRAMVVLGMDLGGRCKRRMKVPMALVGTRSPSRMERRLRLRMVVGMRSPATAGGTMAARSRMTTLMMRRRTVTRSAMTRMMRRSVTRSTTTTAATTTTTKHPAWS

SEQ ID NO: 68136 - protein, 378 aa, Triticum aestivum
  peptide (1)..(378): Ceres Seq. ID no. 14302289
MATAYNLRSRDEPDDFDEFDSTPYGGGYDLFVTFGRPLPPSDETCYPCSAPSTSYDAPHYAAEEPSPYAHHQKPQPAYGFRPQNEQQQQPSYGREDDDSGYVSKPKPKPQPAYGFRPQAEEEQRPSYGGGGEEDDSGYGSKPQPAYGFRPQQEEQPAYGSGYGSKPQRSQEDTYGSGYGRKPQQEEPAYGSGYGSGYGRKPQAEESYGSGYGNTTQPEEGYGSGYGSKPQVEQTYGGSEYGSGYGRKPQVEESYGSGYGSRPQGGEEYGSAGYGGRKTEEEGYGGSGYGSGRKVQEEDEGAYGSGGYQKPKPYGEETQASYGGGYEKPSYGGGNYGRKKQDDDSDDEKKNRYAKRDDSDDEKERYEKHHHHRRHNYDD

SEQ ID NO: 68137 - protein, 251 aa, Triticum aestivum
  peptide (1)..(251): Ceres Seq. ID no. 14302290
MTPATDPSRSPPTASAPSRRSSRPTAPATGPSPSAPRRTPTDLATAGSRSRRSPPTGPGTAPATGGSRRPRRATDLGTGTRRSRRRATAPATGPSRRWSRPTAGRSTALGTEGSRRWRRAMGRGTEAGRRGERSMVVLGMVGGRLRRRAMVVLGMDLGGRCKRRMKVPMALVGTRSPSRMERRLRLRMVVGMRSPATAGGTMAARSRMTTLMMRRRTVTRSAMTRMMRRSVTRSTTTTAATTTTTKHPAWS

SEQ ID NO: 68138 - DNA, 1476 bp, Triticum aestivum
  misc_feature (1)..(1476): Ceres Seq. ID no. 13598282
cccgctgcctattagaacccggcctcgctgcctccacaggcagccgccagtgctcaactgcggcagctaaaactcgattttatccccggaaaatagatcgcctctagtcagcggcggcgccgccgcttcgcttctcggcttgctcggctggtttctctgtaaaaatggtcaatgcacagatggtgagtgggtacttggacaattcgttcaatgcactcatggtttctggtggcggtgagagtggacagacacagaatggtggcacggacaccaccttgtcaggttggaaggacctccccatggagcttctgctgaggatcatatcagtagctggagatgacaggatggccattgtagcctccggtgtttgtaccgggtggcgtgatgcactaggatggggagccacgagtctctccttctcgtggtgccaggaccacatgaatgagttggtgatatcactggcccacaaatttacaaagcttcaagtcctttctctaaggcaaatcaagcctcagcttgaagacagtgcagtggaggctgtagcaaattcttgtcatgatttgcgcgagttggatctgagcagaagcttcaggcttagtgatcggtccttgtatgctctggcacatgggtgccctcaccttacaaggctgaacatcagtggatgttccaatttcagtgatgctgctttgatctacctcactagtcagtgcaagaacttgaaatgcttgaatctgtgcgggtgtgtgcgggcagcatccgacagagcattgcaggccatagcccgcaactgtagtcagctgcaatctttgaaccttggttggtgcgatactgtcactgacgggggagtcactagcttggcatcaggatgtcctgaacttagggccgtcgacttgtgtggctgtgttcttataacagatgagagcgtggttgctcttgcaaacggctgcccacacctgcgttccctggggctgtactactgccagaacatcaccaaccgggccatgtactcgctggccgagaacagccgcatcaggagcaagggcatgagctgggacacggccaagagcagccgcggccgcgacgacaaggacggcctcgccagcctcaacatcagccagtgcaccgcgctgacgcccccgaccgtgcaggcggtgtgcgactccttcccggcgctccacacgtgcccggagaggcactccctcatcatcagcggctgcctgagcctcaccgccgtgcactgcgcgtgcgcccaccaccggcaccgcgccggggccgggagagccatcctgtcaaaccatgcctactgaggtccctccctgtgtggatcatggcagggttctgagatcccggcatggccgagtttgtatcgtgctgtatcagcgaacgtgaagtggaaccgaaggtgcggtggaagtctgtgtgtctgtacttggacattaacaaaatgagttctccgaagaatatgtgagccttgcc

SEQ ID NO: 68139 - protein, 380 aa, Triticum aestivum
  peptide (1)..(380): Ceres Seq. ID no. 13598283
MVNAQMVSGYLDNSFNALMVSGGGESGQTQNGGTDTTLSGWKDLPMELLLRIISVAGDDRMAIVASGVCTGWRDALGWGATSLSFSWCQDHMNELVISLAHKFTKLQVLSLRQIKPQLEDSAVEAVANSCHDLRELDLSRSFRLSDRSLYALAHGCPHLTRLNISGCSNFSDAALIYLTSQCKNLKCLNLCGCVRAASDRALQAIARNCSQLQSLNLGWCDTVTDGGVTSLASGCPELRAVDLCGCVLITDESVVALANGCPHLRSLGLYYCQNITNRAMYSLAENSRIRSKGMSWDTAKSSRGRDDKDGLASLNISQCTALTPPTVQAVCDSFPALHTCPERHSLIISGCLSLTAVHCACAHHRHRAGAGRAILSNHAY

SEQ ID NO: 68140 - protein, 375 aa, Triticum aestivum
  peptide (1)..(375): Ceres Seq. ID no. 13598284
MVSGYLDNSFNALMVSGGGESGQTQNGGTDTTLSGWKDLPMELLLRIISVAGDDRMAIVASGVCTGWRDALGWGATSLSFSWCQDHMNELVISLAHKFTKLQVLSLRQIKPQLEDSAVEAVANSCHDLRELDLSRSFRLSDRSLYALAHGCPHLTRLNISGCSNFSDAALIYLTSQCKNLKCLNLCGCVRAASDRALQAIARNCSQLQSLNLGWCDTVTDGGVTSLASGCPELRAVDLCGCVLITDESVVALANGCPHLRSLGLYYCQNITNRAMYSLAENSRIRSKGMSWDTAKSSRGRDDKDGLASLNISQCTALTPPTVQAVCDSFPALHTCPERHSLIISGCLSLTAVHCACAHHRHRAGAGRAILSNHAY

SEQ ID NO: 68141 - protein, 362 aa, Triticum aestivum
  peptide (1)..(362): Ceres Seq. ID no. 13598285
MVSGGGESGQTQNGGTDTTLSGWKDLPMELLLRIISVAGDDRMAIVASGVCTGWRDALGWGATSLSFSWCQDHMNELVISLAHKFTKLQVLSLRQIKPQLEDSAVEAVANSCHDLRELDLSRSFRLSDRSLYALAHGCPHLTRLNISGCSNFSDAALIYLTSQCKNLKCLNLCGCVRAASDRALQAIARNCSQLQSLNLGWCDTVTDGGVTSLASGCPELRAVDLCGCVLITDESVVALANGCPHLRSLGLYYCQNITNRAMYSLAENSRIRSKGMSWDTAKSSRGRDDKDGLASLNISQCTALTPPTVQAVCDSFPALHTCPERHSLIISGCLSLTAVHCACAHHRHRAGAGRAILSNHAY

SEQ ID NO: 68142 - DNA, 1377 bp, Triticum aestivum
  misc_feature (1)..(1377): Ceres Seq. ID no. 12614610
tccttcggccccgcagcttttctctctcctcaccgtcgcgcgtgtgcccctcctttctgtctctctctcctccgcgcgcgctccctcactctcctcccatccgtctaatggaggccctcgccggcgccgccgcctcgtccgcgctcctcccggccttccccgcccaccagcctcactcccgcgtggcgctccgcgcccgcccctgcggcccccttcgcgcggccgccggcggcggaggcaaggacgacgccgccaagccgaacgggacccccgtcgtcaagttgaaggttgatccaagtcaaaacggagctcttggtccggtcacaactgacaagtcacgcacgacctcatcaaccaattcaactccggactccagtggatccagagctggcttgttcagaacccctatatctggtggtgtgcagagtgcaacttttgcccatggtttacctccaccggctttggctgttcgcaatttaatggaacaggcacgatttgctcatctatgcactgtcatgtctggcatgcatcatcgacgtgctggatatccatttggttcacttgttgactttgctaatgactcaatgggccacccaatattttctctgtcgcccttagcaatccacactagaaacttgctctctgatccaagatgcacacttgttgtccaggtacctggatggagtggattgtctaatgctcgtgtcacaatatttggtgatgtctaccctttgccagctgagcaacaggaatgggcacataagcaatatgttgcaaaacaccaacaatgggcgtctcaacagtggggaaatttttactactacaggatgcagaatatcagcgacatatattttattggaggctttggcactgttgcatgggtagatgtgaaacagtatgaaactattcaacctgacaagatagcagttgacggcggcgaacaaagcttaaaggagttgaacgctattttctctaaaccacttagagagttcatgtctgctgaaggggaggttgacgatgctgctcttatatccgtagacagcaaagggatagacattcgggttcgccagggtgcacagttcaacatccagagacttgcatttgatgtaccatacaaggtggagactctagaggaggccaagagagcactccataagataatcaagacaagcagcaaataagccgaagcgcacacgacctgcacttggtttcaccagccctacaagcccacgccgtgagtcgacaaaaataaccaaggatatgtaatctagcgtacacagacgcaaaataagatgatttctctttaataatgagaaactccctggcaagtccccatatagtgtgtacccatatgcttgtatcgcttgaactgtagtg

SEQ ID NO: 68143 - protein, 392 aa, Triticum aestivum
  peptide (1)..(392): Ceres Seq. ID no. 12614611
LRPRSFSLSSPSRVCPSFLSLSPPRALPHSPPIRLMEALAGAAASSALLPAFPAHQPHSRVALRARPCGPLRAAAGGGGKDDAAKPNGTPVVKLKVDPSQNGALGPVTTDKSRTTSSTNSTPDSSGSRAGLFRTPISGGVQSATFAHGLPPPALAVRNLMEQARFAHLCTVMSGMHHRRAGYPFGSLVDFANDSMGHPIFSLSPLAIHTRNLLSDPRCTLVVQVPGWSGLSNARVTIFGDVYPLPAEQQEWAHKQYVAKHQQWASQQWGNFYYYRMQNISDIYFIGGFGTVAWVDVKQYETIQPDKIAVDGGEQSLKELNAIFSKPLREFMSAEGEVDDAALISVDSKGIDIRVRQGAQFNIQRLAFDVPYKVETLEEAKRALHKIIKTSSK

SEQ ID NO: 68144 - protein, 357 aa, Triticum aestivum
  peptide (1)..(357): Ceres Seq. ID no. 12614612
MEALAGAAASSALLPAFPAHQPHSRVALRARPCGPLRAAAGGGGKDDAAKPNGTPVVKLKVDPSQNGALGPVTTDKSRTTSSTNSTPDSSGSRAGLFRTPISGGVQSATFAHGLPPPALAVRNLMEQARFAHLCTVMSGMHHRRAGYPFGSLVDFANDSMGHPIFSLSPLAIHTRNLLSDPRCTLVVQVPGWSGLSNARVTIFGDVYPLPAEQQEWAHKQYVAKHQQWASQQWGNFYYYRMQNISDIYFIGGFGTVAWVDVKQYETIQPDKIAVDGGEQSLKELNAIFSKPLREFMSAEGEVDDAALISVDSKGIDIRVRQGAQFNIQRLAFDVPYKVETLEEAKRALHKIIKTSSK

SEQ ID NO: 68145 - protein, 233 aa, Triticum aestivum
  peptide (1)..(233): Ceres Seq. ID no. 12614613
MEQARFAHLCTVMSGMHHRRAGYPFGSLVDFANDSMGHPIFSLSPLAIHTRNLLSDPRCTLVVQVPGWSGLSNARVTIFGDVYPLPAEQQEWAHKQYVAKHQQWASQQWGNFYYYRMQNISDIYFIGGFGTVAWVDVKQYETIQPDKIAVDGGEQSLKELNAIFSKPLREFMSAEGEVDDAALISVDSKGIDIRVRQGAQFNIQRLAFDVPYKVETLEEAKRALHKIIKTSSK

SEQ ID NO: 68146 - DNA, 1387 bp, Triticum aestivum
  misc_feature (1)..(1387): Ceres Seq. ID no. 13596281
ccttcagccccaaatccctatcccaaatttccaaggaatcatggcgcgctgctccccgccgctgctgcgccgcttcttctgctgcgccgccaaatctgcctcggccacatccgccgccgccggcaccaagaagaagaacatcgtcttcttgggatctccccaggtggcggcctcggtcctggacacgttgttggccgcgtccagctcccccgactccgcattccaggtcgctgccgtcgtgacgcagccgccggccgccaagaacagggggaggaagctgttgccgtcggccgtcgcgcagctcgcgctcgagcgtgggttccctggcgacctcatcttcacccccgagcgcgctggggaggagtcctttctgtctgacttgaagggggtgaaaccagaactttgcatcactgctgcttacgggaacattttgccacagaggtttcttgacatcccaccatgtgcaggtacagttaatatacacccaagtttgttgcctctatatcgtggtgcagctcctgtgcagagggcattgcaggatggtgttgcagaaacaggtgtttcccttgcatatactatccgtgccttggatgcaggtccagtgattgcttgtgaaaggttttctgtcgatgaatgcatcaaggcaccagagctgcttgctatactattcaatatagggtccaagctactgctggatgaactaccatccgttcttgatggttcagctaagcaaaaggcgaagccacaagatgactccaaagctacactggcgcccaagatgaattcggacgagtcctggctgacatttgacgaagaagctaaagttctccataacaaggtgcgagcatttgcaggatggcctggaacccgtgcaaaattgcaacttatgaaccaaaatggcgaacctgatgttctagacatcaaggttatcagtacgaacgtttccacgtcatgtgacaaagtcggagacgaaaacgaaatactattctcagggaactcactgctcgttccttgcagtgggtcaacttggcttgaggtcttggagcttcagctacctggaaagaaggtaaccacagctcgggacttctggaatggtttgcgtggtcagaagctgttaaaatcaacatagagggaaatctgcattcattttgcagcacatgtgcaaaggatgcaaatgccacgacggccatatgccgtgctcggtttagatgcatcttgcaggattaaagggctgttgacatttatccttagagaaatttgcaggggagcaaaaagatggtcttaatttttgtaaagaaaattatttagattttttgccctaactttttttttacaaatcaataatttttcaaaaaaaaaaaaaaaaaagcttatcgataccgtcgac

SEQ ID NO: 68147 - protein, 375 aa, Triticum aestivum
  peptide (1)..(375): Ceres Seq. ID no. 13596282
LQPQIPIPNFQGIMARCSPPLLRRFFCCAAKSASATSAAAGTKKKNIVFLGSPQVAASVLDTLLAASSSPDSAFQVAAVVTQPPAAKNRGRKLLPSAVAQLALERGFPGDLIFTPERAGEESFLSDLKGVKPELCITAAYGNILPQRFLDIPPCAGTVNIHPSLLPLYRGAAPVQRALQDGVAETGVSLAYTIRALDAGPVIACERFSVDECIKAPELLAILFNIGSKLLLDELPSVLDGSAKQKAKPQDDSKATLAPKMNSDESWLTFDEEAKVLHNKVRAFAGWPGTRAKLQLMNQNGEPDVLDIKVISTNVSTSCDKVGDENEILFSGNSLLVPCSGSTWLEVLELQLPGKKVTTARDFWNGLRGQKLLKST

SEQ ID NO: 68148 - protein, 362 aa, Triticum aestivum
  peptide (1)..(362): Ceres Seq. ID no. 13596283
MARCSPPLLRRFFCCAAKSASATSAAAGTKKKNIVFLGSPQVAASVLDTLLAASSSPDSAFQVAAVVTQPPAAKNRGRKLLPSAVAQLALERGFPGDLIFTPERAGEESFLSDLKGVKPELCITAAYGNILPQRFLDIPPCAGTVNIHPSLLPLYRGAAPVQRALQDGVAETGVSLAYTIRALDAGPVIACERFSVDECIKAPELLAILFNIGSKLLLDELPSVLDGSAKQKAKPQDDSKATLAPKMNSDESWLTFDEEAKVLHNKVRAFAGWPGTRAKLQLMNQNGEPDVLDIKVISTNVSTSCDKVGDENEILFSGNSLLVPCSGSTWLEVLELQLPGKKVTTARDFWNGLRGQKLLKST

SEQ ID NO: 68149 - DNA, 2258 bp, Triticum aestivum
  misc_feature (1)..(2258): Ceres Seq. ID no. 13590780
aaacaaacccttcyswwaaccagccgccgccactatatgcttatctgcctccgacgaggcctctccctcctccggcagcgccagccccggctcccgccccgcctcctcctccacctctccgccgagccgatgggcgacccggccgtcgcgccggacgccgcctacctggaggcggtgacgcagaagcggatccgcatcttcgaggagatccaggcccggcaggccctcgagcgcctcaacatcggcggcgaccccatcagagtaactttgcctgatggtgcgataaaggaaggcaagaagtggatatcgaccccgatggatatcgcctcggggatatcaactgggctggccgctagctgcctgatagcgcaggtgaatggtgtgctctgggacatgacgaggccattggaaggcgactgtgacttgaagctgttcaagttcgacagcaacgaagggcgtgacacgttctggcactcgagtgctcatattcttggagagtccatcgagagggtgtatggctgcaagttgtgcattggaccttgtactacaagaggagagggtttttactacgacgcccactacaaggacttgacactgaatgatacacactttggtctcattgacaagcaagctaaaaaggctgttgcggagaagcaaccatttgaacgcattgaagtctccagagcagaagctcttgaagtttttgcggaaaatgaatttaaggttgaaataattaacgaattgcccgaggacaagaccattacagtatacagatgtggtcctttggtcgacctttgccgtggcccgcacatcccaaatacttcctttgttaaagctttcgcttgcctcaaggcttcagcatcatactggagaggaaaagcagaccgtgaaagcctgcagagagtatatggaatctctttccctgattctaaacgtctcaaggaatatcaacatatgatagaggaagctaagaaacgcgatcataggttattggggcagtcccagaaactcttctttttccatccacttagcccaggtagctgcttcttccttccaaatggcgctataatatataacaaattgatggattttttgcgcaaggagtatagagagagaggctaccaagaggttctgagtccaaatatttacaacatgcaactttgggaaacctctggacatgctgcaaactacaaggacaacatgtttgtttttgagatcgagaaacaagaatttggccttaagccaatgaattgtcctggccattgcctaatgtttggacacgaggttcgatcgtatagagagttgcctctccgcatggctgattttggagttctgcacagaaatgaacttagtggtgcacttacaggtttgacacgtgtcagaagattccaacaggacgatgcccatattttttgcacggagagccaaatcaaggatgaagttcggtcttgcttggagttcattgattatgtttataaaatatttgggtttgaatacgagctggagttatcaacgagaccagagaagtatttaggtgacattgagacctggaacaaagcagagcaacaactgacagaagcattgaatgagtttgggaagccatggaagataaatgaagcagatggtgctttctatggcccgaaaatagatattggtgtgtttgatgccctcaagaggaaatttcagtgtgcaactctacagctcgattttcagctgccacttcgcttcaagttgacttattctgcagaggacgaagccaagcttgagaggcctgtaatgatacacagggcaatactaggatcagttgaaaggatgtttgccattcttttggagcactataacggtaaatggccgttgtggttaagcccccgacaagccattgtttgctgtgtatctgccaattcactaacatatgcaaaagaggttcatgctcagatacgtgcagctggttttcatgttgacattgacatgactgatagaacaattcaaaagaaggtgcgggaggctcagttagcccaattcaactatattctagtcgtcggcgcaaaagaggcagagtctggaaaggtctctctgagggtaagagacagggcagacctatccacagagaacattgctgacgtcatcgcacgttttaatgatgaagttgcgtctttccagtgatttttaagtcgcttcatcttcttttgttaagacatctactgcacaacccacattgtaatttggtgaagtgtgaggtgaatgaaaatcgtgatact

SEQ ID NO: 68150 - protein, 720 aa, Triticum aestivum
  peptide (1)..(720): Ceres Seq. ID no. 15221007
  misc_feature (5)..(5): Xaa is any aa, unknown or other
  misc_feature (6)..(6): Xaa is any aa, unknown or other
KQTLXXTSRRHYMLICLRRGLSLLRQRQPRLPPRLLLHLSAEPMGDPAVAPDAAYLEAVTQKRIRIFEEIQARQALERLNIGGDPIRVTLPDGAIKEGKKWISTPMDIASGISTGLAASCLIAQVNGVLWDMTRPLEGDCDLKLFKFDSNEGRDTFWHSSAHILGESIERVYGCKLCIGPCTTRGEGFYYDAHYKDLTLNDTHFGLIDKQAKKAVAEKQPFERIEVSRAEALEVFAENEFKVEIINELPEDKTITVYRCGPLVDLCRGPHIPNTSFVKAFACLKASASYWRGKADRESLQRVYGISFPDSKRLKEYQHMIEEAKKRDHRLLGQSQKLFFFHPLSPGSCFFLPNGAIIYNKLMDFLRKEYRERGYQEVLSPNIYNMQLWETSGHAANYKDNMFVFEIEKQEFGLKPMNCPGHCLMFGHEVRSYRELPLRMADFGVLHRNELSGALTGLTRVRRFQQDDAHIFCTESQIKDEVRSCLEFIDYVYKIFGFEYELELSTRPEKYLGDIETWNKAEQQLTEALNEFGKPWKINEADGAFYGPKIDIGVFDALKRKFQCATLQLDFQLPLRFKLTYSAEDEAKLERPVMIHRAILGSVERMFAILLEHYNGKWPLWLSPRQAIVCCVSANSLTYAKEVHAQIRAAGFHVDIDMTDRTIQKKVREAQLAQFNYILVVGAKEAESGKVSLRVRDRADLSTENIADVIARFNDEVASFQ

SEQ ID NO: 68151 - protein, 708 aa, Triticum aestivum
  peptide (1)..(708): Ceres Seq. ID no. 15221008
MLICLRRGLSLLRQRQPRLPPRLLLHLSAEPMGDPAVAPDAAYLEAVTQKRIRIFEEIQARQALERLNIGGDPIRVTLPDGAIKEGKKWISTPMDIASGISTGLAASCLIAQVNGVLWDMTRPLEGDCDLKLFKFDSNEGRDTFWHSSAHILGESIERVYGCKLCIGPCTTRGEGFYYDAHYKDLTLNDTHFGLIDKQAKKAVAEKQPFERIEVSRAEALEVFAENEFKVEIINELPEDKTITVYRCGPLVDLCRGPHIPNTSFVKAFACLKASASYWRGKADRESLQRVYGISFPDSKRLKEYQHMIEEAKKRDHRLLGQSQKLFFFHPLSPGSCFFLPNGAIIYNKLMDFLRKEYRERGYQEVLSPNIYNMQLWETSGHAANYKDNMFVFEIEKQEFGLKPMNCPGHCLMFGHEVRSYRELPLRMADFGVLHRNELSGALTGLTRVRRFQQDDAHIFCTESQIKDEVRSCLEFIDYVYKIFGFEYELELSTRPEKYLGDIETWNKAEQQLTEALNEFGKPWKINEADGAFYGPKIDIGVFDALKRKFQCATLQLDFQLPLRFKLTYSAEDEAKLERPVMIHRAILGSVERMFAILLEHYNGKWPLWLSPRQAIVCCVSANSLTYAKEVHAQIRAAGFHVDIDMTDRTIQKKVREAQLAQFNYILVVGAKEAESGKVSLRVRDRADLSTENIADVIARFNDEVASFQ

SEQ ID NO: 68152 - protein, 677 aa, Triticum aestivum
  peptide (1)..(677): Ceres Seq. ID no. 15221009
MGDPAVAPDAAYLEAVTQKRIRIFEEIQARQALERLNIGGDPIRVTLPDGAIKEGKKWISTPMDIASGISTGLAASCLIAQVNGVLWDMTRPLEGDCDLKLFKFDSNEGRDTFWHSSAHILGESIERVYGCKLCIGPCTTRGEGFYYDAHYKDLTLNDTHFGLIDKQAKKAVAEKQPFERIEVSRAEALEVFAENEFKVEIINELPEDKTITVYRCGPLVDLCRGPHIPNTSFVKAFACLKASASYWRGKADRESLQRVYGISFPDSKRLKEYQHMIEEAKKRDHRLLGQSQKLFFFHPLSPGSCFFLPNGAIIYNKLMDFLRKEYRERGYQEVLSPNIYNMQLWETSGHAANYKDNMFVFEIEKQEFGLKPMNCPGHCLMFGHEVRSYRELPLRMADFGVLHRNELSGALTGLTRVRRFQQDDAHIFCTESQIKDEVRSCLEFIDYVYKIFGFEYELELSTRPEKYLGDIETWNKAEQQLTEALNEFGKPWKINEADGAFYGPKIDIGVFDALKRKFQCATLQLDFQLPLRFKLTYSAEDEAKLERPVMIHRAILGSVERMFAILLEHYNGKWPLWLSPRQAIVCCVSANSLTYAKEVHAQIRAAGFHVDIDMTDRTIQKKVREAQLAQFNYILVVGAKEAESGKVSLRVRDRADLSTENIADVIARFNDEVASFQ

SEQ ID NO: 68153 - DNA, 1351 bp, Triticum aestivum
  misc_feature (1)..(1351): Ceres Seq. ID no. 13595944
gctacacctttgttaacgaaccgcactgccgccgtccccgtctgcctccggccatcaaccatggcgaggagttccatggccgcggtgctcgccgtcctggccgtggcggcgctccggtgcgcgccggccgccgcggagctcccgctggtggagcacccggccaagaacgacgggtcgctcagcctgctcgtcatcggggactggggccgcaacggcacctacaaccaatccagggtcgcggaccagatggggaaggtcggggagaggctggacatcgacttcgtggtctccaccggcgacaacttctacgaggacggcctcacgggcgttcatgaccagcagttcgaggaatccttcaccaatatctacaccgcccagagcttgcagaagccgtggtatctcgttcttggaaaccatgactaccggggcaatgcgcttgcacagcttgacccagtcatgcgcaagctcgatgagcgattcgtttgcatgagatcattcattgtcaatgcagagatcgtggagttcttcttcatcgacactactccattccagctcaagtactggactcaccctaaagacagtcactatgactggagaggagtggcgcctcgagaaaactacatagctaatctgctgaaggatttggatgaggcaatgaagaaatcaactgcaaagtggaagatcgctattgggcatcataccatcaggagcgtcagtgatcatggggacaccaaggagctcctgcaattgcttcttccagtcctcaaggttaacggcatcgacttctacatcaatgggcacgaccactgcctggaacacattagcagcagagacagtccgatccaatacttcactagcggaggcggttcaaaagcatggaggggagtctaccagccaaatgatgataagctccagttcttttatgatgggcaagggttcatgtccctccagctaaaccaggaccaagctgacttcatcttttatgatgtttctgggaaagtcttgtacaagtggagctcgcgcaaaacaaactacttccagccctccatctatgtcactgcagaatgagggagatgcagatcatggcaggagaattagtttggtagcgctatttgtgaaagaaattgaatgtgccactgtggtaacagtggtaaaggtaatagattggtatttagtatggtgtgtggttcagcgctgaagaaatattgaactggctgtgaattgtctacaataaaggagcagagatgctcagtatggtgtccattggttctgatgcatacataagtcgcagggatctattgatgcgatgtgcatttagagaaatatatgcataaactctaatattgtaccc

SEQ ID NO: 68154 - protein, 355 aa, Triticum aestivum
  peptide (1)..(355): Ceres Seq. ID no. 15221712
ATPLLTNRTAAVPVCLRPSTMARSSMAAVLAVLAVAALRCAPAAAELPLVEHPAKNDGSLSLLVIGDWGRNGTYNQSRVADQMGKVGERLDIDFVVSTGDNFYEDGLTGVHDQQFEESFTNIYTAQSLQKPWYLVLGNHDYRGNALAQLDPVMRKLDERFVCMRSFIVNAEIVEFFFIDTTPFQLKYWTHPKDSHYDWRGVAPRENYIANLLKDLDEAMKKSTAKWKIAIGHHTIRSVSDHGDTKELLQLLLPVLKVNGIDFYINGHDHCLEHISSRDSPIQYFTSGGGSKAWRGVYQPNDDKLQFFYDGQGFMSLQLNQDQADFIFYDVSGKVLYKWSSRKTNYFQPSIYVTAE

SEQ ID NO: 68155 - protein, 335 aa, Triticum aestivum
  peptide (1)..(335): Ceres Seq. ID no. 15221713
MARSSMAAVLAVLAVAALRCAPAAAELPLVEHPAKNDGSLSLLVIGDWGRNGTYNQSRVADQMGKVGERLDIDFVVSTGDNFYEDGLTGVHDQQFEESFTNIYTAQSLQKPWYLVLGNHDYRGNALAQLDPVMRKLDERFVCMRSFIVNAEIVEFFFIDTTPFQLKYWTHPKDSHYDWRGVAPRENYIANLLKDLDEAMKKSTAKWKIAIGHHTIRSVSDHGDTKELLQLLLPVLKVNGIDFYINGHDHCLEHISSRDSPIQYFTSGGGSKAWRGVYQPNDDKLQFFYDGQGFMSLQLNQDQADFIFYDVSGKVLYKWSSRKTNYFQPSIYVTAE

SEQ ID NO: 68156 - protein, 330 aa, Triticum aestivum
  peptide (1)..(330): Ceres Seq. ID no. 15221714
MAAVLAVLAVAALRCAPAAAELPLVEHPAKNDGSLSLLVIGDWGRNGTYNQSRVADQMGKVGERLDIDFVVSTGDNFYEDGLTGVHDQQFEESFTNIYTAQSLQKPWYLVLGNHDYRGNALAQLDPVMRKLDERFVCMRSFIVNAEIVEFFFIDTTPFQLKYWTHPKDSHYDWRGVAPRENYIANLLKDLDEAMKKSTAKWKIAIGHHTIRSVSDHGDTKELLQLLLPVLKVNGIDFYINGHDHCLEHISSRDSPIQYFTSGGGSKAWRGVYQPNDDKLQFFYDGQGFMSLQLNQDQADFIFYDVSGKVLYKWSSRKTNYFQPSIYVTAE

SEQ ID NO: 68157 - DNA, 1300 bp, Triticum aestivum
  misc_feature (1)..(1300): Ceres Seq. ID no. 13595945
aaaagggaagcaggcatattctattgctgggagtagaacttgggcggcatggatcagcttgacgagcaatcgttcctggacgagctcatgtcgctgcgccgggaggaggcgccgtcgccggctccgtggcaggcgtatccgggcagcggcatgatgacgacgagcgacctcctcttctacggcggcgagggcaccaccgaggcgagcagcggcatggactttgccgggccgtttcagcagcccatggcgccaccgccggccacatctccgcaccggccgcacgagaagttcaacttcgactgcctcagcgaagtatgcaacccttacggcagctgcgtcggcggcgtacctaagcctggggtcgtccacgcggctggccaggcgtatgccctccaggatgccatggcgcagaacggcacgagtggcggcaagctgcatcacggtggtggcaggtcgtcgtcgtccccggcgccgttcgtgttcgcaggtgtcgccggggagagctcggagatgaccaggggcgccttctccggcgcccacgctagaagcaagctcaacggtggcactacgtccaagaacctcatggcggaaaggcggcgccggaagcgtctcaacgaccgcctctccatgctccgctccatcgtgcccaagattaccaagatggataggacctcgatcctcggggacaccatagactacgtgaatgagctaaccgagcggatccaaaccctcgaggaggagatcggcgccacgccggaggatctgaacctgctgaacaccacgaagaatttctccagcggtagcagtgaggagatgccgatgaggaattccaccaagtttgtcatcgagaagcagggcgacggtggaacgaggatcgacatctgctgcgccacaagccccggcgtgctgatctcgacggtgagcgcgctggaggtgttggggctggagatcgaacagtgcgtcgtcagctgcttcggcgacttcgccatgcaggcatcctgctcacaagaggaagggaggagccgtgtgacaagaaccgacgagatcaagcaggcattgttcacgagtgcaggctatggaggaaggtgtctgtagtagtagttgtaattttgtaatattcgtctgtgagttctctgttgaatagtagtggttatgtaaaaaaaattgaatagtagtactatctaaagttcagctgtttgtgaccagattgtaatagttgggtgtgtgtccgtgagtataatgcatgcatgtatgtatcattgtatggagtggagtattgggatttggccgacatgaaaag

SEQ ID NO: 68158 - protein, 348 aa, Triticum aestivum
  peptide (1)..(348): Ceres Seq. ID no. 13595946
MDQLDEQSFLDELMSLRREEAPSPAPWQAYPGSGMMTTSDLLFYGGEGTTEASSGMDFAGPFQQPMAPPPATSPHRPHEKFNFDCLSEVCNPYGSCVGGVPKPGVVHAAGQAYALQDAMAQNGTSGGKLHHGGGRSSSSPAPFVFAGVAGESSEMTRGAFSGAHARSKLNGGTTSKNLMAERRRRKRLNDRLSMLRSIVPKITKMDRTSILGDTIDYVNELTERIQTLEEEIGATPEDLNLLNTTKNFSSGSSEEMPMRNSTKFVIEKQGDGGTRIDICCATSPGVLISTVSALEVLGLEIEQCVVSCFGDFAMQASCSQEEGRSRVTRTDEIKQALFTSAGYGGRCL

SEQ ID NO: 68159 - protein, 335 aa, Triticum aestivum
  peptide (1)..(335): Ceres Seq. ID no. 13595947
MSLRREEAPSPAPWQAYPGSGMMTTSDLLFYGGEGTTEASSGMDFAGPFQQPMAPPPATSPHRPHEKFNFDCLSEVCNPYGSCVGGVPKPGVVHAAGQAYALQDAMAQNGTSGGKLHHGGGRSSSSPAPFVFAGVAGESSEMTRGAFSGAHARSKLNGGTTSKNLMAERRRRKRLNDRLSMLRSIVPKITKMDRTSILGDTIDYVNELTERIQTLEEEIGATPEDLNLLNTTKNFSSGSSEEMPMRNSTKFVIEKQGDGGTRIDICCATSPGVLISTVSALEVLGLEIEQCVVSCFGDFAMQASCSQEEGRSRVTRTDEIKQALFTSAGYGGRCL

SEQ ID NO: 68160 - protein, 314 aa, Triticum aestivum
  peptide (1)..(314): Ceres Seq. ID no. 13595948
MMTTSDLLFYGGEGTTEASSGMDFAGPFQQPMAPPPATSPHRPHEKFNFDCLSEVCNPYGSCVGGVPKPGVVHAAGQAYALQDAMAQNGTSGGKLHHGGGRSSSSPAPFVFAGVAGESSEMTRGAFSGAHARSKLNGGTTSKNLMAERRRRKRLNDRLSMLRSIVPKITKMDRTSILGDTIDYVNELTERIQTLEEEIGATPEDLNLLNTTKNFSSGSSEEMPMRNSTKFVIEKQGDGGTRIDICCATSPGVLISTVSALEVLGLEIEQCVVSCFGDFAMQASCSQEEGRSRVTRTDEIKQALFTSAGYGGRCL

SEQ ID NO: 68161 - DNA, 1383 bp, Triticum aestivum
  misc_feature (1)..(1383): Ceres Seq. ID no. 13595998
aaaaatccattcaaagcgctctgctctctgccccgcccgccggctcatctccgcgcgcagaggcagcgtcgcagcgagcacacaccaccttcgatccctcctcctcctcctcctcctcctgcttcttctctcgcgtacacggctgcgcgtgtgacgatggcgaggacgtcgtcgtcgccgacggcgacgaggctgccgctgctgcttgtgctgctgtcgtcgctggccttgcaggcggcggcgcagaagtacaatgcggtgtacagcttcggcgactcgatcacggacacggggaacctgtgcaccaacgggcggccctcggcgatcaccttcacgcagccgccctacggggagacctacttcgggagccccacctgccgctgctccgacggccgcgtcatcgtcgacttcctcagcaccaagtacggcctccccttcctgcccccctccaagtccacctycgccgacttcaaaaagggcgccaacatggscatcaccggcgccaccgscatggacgcccccttcttycgytcctcggctcgnnntctccgacaagatctggaacaacgggcccatcagcttccagctccannnnnnggttccagaccatcacctcctccgtctgcggcagcagctgcaagagctacctggcgaactcgctcttcatcttcggggagttcggggggaacgactacaacgcgatgctgttcggcaactacaacacggaccaggcgagcacgtacgcgccgcagatcgtggacaccatcggcgccggcgtggagaagctggtcgcgatgggggccgtggacgtggtggtgccgggggtgctccccatcggctgcttccccatctacctcaccatctacggcacctccagcgccgccgactacgacgccctcggctgcctcaagaagttcaacgacctctccacgtaccacaacagcctgctgcaggccaaggtgtccgccctccaggccaagtacaagtcggcgcgcatcatgtacgccgacttctacgccggggtctacgacatggtccggagccccagcaaatacgggttcagctcggtgtttgaggcgtgctgcgggtcggggggaggcaagtacaactacgccaacagcgcgcggtgcggcatgtccggcgcctccgcctgcgccagcccggcgtcccacctcagctgggacggcatccacctcaccgaggccgcctacaagcagatcaccgacggctggctcaacggcgccttctgccacccaggcatcacccactagccagtcactcccactggtcgatcaatcagcttatgcatcgtcgtccatggatccatcattaatcaatcaatcgattatattattattattattattattaaaaaaaaaaaaa

SEQ ID NO: 68162 - protein, 461 aa, Triticum aestivum
  peptide (1)..(461): Ceres Seq. ID no. 15221730
  misc_feature (154)..(154): Xaa is any aa, unknown or other
  misc_feature (164)..(164): Xaa is any aa, unknown or other
  misc_feature (170)..(170): Xaa is any aa, unknown or other
  misc_feature (176)..(176): Xaa is any aa, unknown or other
  misc_feature (177)..(177): Xaa is any aa, unknown or other
  misc_feature (181)..(181): Xaa is any aa, unknown or other
  misc_feature (182)..(182): Xaa is any aa, unknown or other
  misc_feature (198)..(198): Xaa is any aa, unknown or other
  misc_feature (199)..(199): Xaa is any aa, unknown or other
KNPFKALCSLPRPPAHLRAQRQRRSEHTPPSIPPPPPPPPASSLAYTAARVTMARTSSSPTATRLPLLLVLLSSLALQAAAQKYNAVYSFGDSITDTGNLCTNGRPSAITFTQPPYGETYFGSPTCRCSDGRVIVDFLSTKYGLPFLPPSKSTXADFKKGANMXITGATXMDAPFXXSSAXXLRQDLEQRAHQLPAPXXGSRPSPPPSAAAAARATWRTRSSSSGSSGGTTTTRCCSATTTRTRRARTRRRSWTPSAPAWRSWSRWGPWTWWCRGCSPSAASPSTSPSTAPPAPPTTTPSAASRSSTTSPRTTTACCRPRCPPSRPSTSRRASCTPTSTPGSTTWSGAPANTGSARCLRRAAGRGEASTTTPTARGAACPAPPPAPARRPTSAGTASTSPRPPTSRSPTAGSTAPSATQASPTSQSLPLVDQSAYASSSMDPSLINQSIILLLLLLLKKKK

SEQ ID NO: 68163 - protein, 422 aa, Triticum aestivum
  peptide (1)..(422): Ceres Seq. ID no. 15221731
  misc_feature (153)..(153): Xaa is any aa, unknown or other
  misc_feature (163)..(163): Xaa is any aa, unknown or other
  misc_feature (169)..(169): Xaa is any aa, unknown or other
  misc_feature (176)..(176): Xaa is any aa, unknown or other
  misc_feature (177)..(177): Xaa is any aa, unknown or other
  misc_feature (181)..(181): Xaa is any aa, unknown or other
  misc_feature (197)..(197): Xaa is any aa, unknown or other
  misc_feature (198)..(198): Xaa is any aa, unknown or other
  misc_feature (199)..(199): Xaa is any aa, unknown or other
KSIQSALLSAPPAGSSPRAEAASQRAHTTFDPSSSSSSSCFFSRVHGCACDDGEDVVVADGDEAAAAACAAVVAGLAGGGAEVQCGVQLRRLDHGHGEPVHQRAALGDHLHAAALRGDLLREPHLPLLRRPRHRRLPQHQVRPPLPAPLQVHXRRLQKGRQHXHHRRHXHGRPLLXXLGSXSPTRSGTTGPSASSSXXXFQTITSSVCGSSCKSYLANSLFIFGEFGGNDYNAMLFGNYNTDQASTYAPQIVDTIGAGVEKLVAMGAVDVVVPGVLPIGCFPIYLTIYGTSSAADYDALGCLKKFNDLSTYHNSLLQAKVSALQAKYKSARIMYADFYAGVYDMVRSPSKYGFSSVFEACCGSGGGKYNYANSARCGMSGASACASPASHLSWDGIHLTEAAYKQITDGWLNGAFCHPGITH

SEQ ID NO: 68164 - protein, 409 aa, Triticum aestivum
  peptide (1)..(409): Ceres Seq. ID no. 15221732
  misc_feature (102)..(102): Xaa is any aa, unknown or other
  misc_feature (112)..(112): Xaa is any aa, unknown or other
  misc_feature (118)..(118): Xaa is any aa, unknown or other
  misc_feature (124)..(124): Xaa is any aa, unknown or other
  misc_feature (125)..(125): Xaa is any aa, unknown or other
  misc_feature (129)..(129): Xaa is any aa, unknown or other
  misc_feature (130)..(130): Xaa is any aa, unknown or other
  misc_feature (146)..(146): Xaa is any aa, unknown or other
  misc_feature (147)..(147): Xaa is any aa, unknown or other
MARTSSSPTATRLPLLLVLLSSLALQAAAQKYNAVYSFGDSITDTGNLCTNGRPSAITFTQPPYGETYFGSPTCRCSDGRVIVDFLSTKYGLPFLPPSKSTXADFKKGANMXITGATXMDAPFXXSSAXXLRQDLEQRAHQLPAPXXGSRPSPPPSAAAAARATWRTRSSSSGSSGGTTTTRCCSATTTRTRRARTRRRSWTPSAPAWRSWSRWGPWTWWCRGCSPSAASPSTSPSTAPPAPPTTTPSAASRSSTTSPRTTTACCRPRCPPSRPSTSRRASCTPTSTPGSTTWSGAPANTGSARCLRRAAGRGEASTTTPTARGAACPAPPPAPARRPTSAGTASTSPRPPTSRSPTAGSTAPSATQASPTSQSLPLVDQSAYASSSMDPSLINQSIILLLLLLLKKKK

SEQ ID NO: 68165 - DNA, 1839 bp, Triticum aestivum
  misc_feature (1)..(1839): Ceres Seq. ID no. 15170670
cctccttcctcctccccctcgcttcttcacggaatccaaaccccaaacaccagccatggcgatggcgtcctttcgcccccttcctctcgcgctcctgctcgccgcgtgcctctccgcgctcgtgctggccgtggcgcacgcgcggaccccacggctggagcccaccatccggctgccgtcgcagcgcgccggcgggcaggaggacgatggctccatcgggaccaggtgggccgtcctcatcgccggctccaacggctactacaactaccgccaccaggcggatatctgccacgcctaccagatcatgaagaagggtggtctcaaggatgagaacatcatcgtattcatgtacgatgacattgcgcacaacccggagaacccgaggccgggcgtcatcatcaaccacccccagggtggagatgtctatgctggggtccctaaggactacactggaaaggaggttaatgtcaagaacttctttgctgtcctgctcggtaataaaaccgcggtgagtggtgggaacggcaaagttgtggacagtggccctaatgatcacatttttgtgttttacagtgaccatgggggtcctggggtccttgggatgcctacctatccatacctttacggtgacgatcttgtagatgtcctgaagaaaaagcacgctgctggaacctacaaaagcctggtattttaccttgaagcctgcgaatctgggagcatctttgagggacttctgccaaatgacatcggtgtctatgcgaccaccgcttcgaatgcagaggaaagcagttggggaacgtattgccccggcgagtacccgagccctccgccggaatatgacacttgcttgggcgacctgtacagcatttcttggatggaagacagtgatgtccacaacctgagaactgaatctctcaagcagcagtataacctggtcaagaagagaacggcagctcaggactcatacagctatggttcccatgtgatgcaatacggttctttggacctgaatgctgaacatttgttctcgtacattgggtcaaaccctgctaacgagaacactacatttgttgaagataacgcactgccatcattctcaagagctgttaatcagagggatgctgatcttgtttatttctggcagaagtaccggaaattggccgagagctcccctgagaaaaacgatgctcggaagcaattgcttgaaatgatgggtcatagatctcatattgacaacagcatcgagctgattggaaaccttctgtttggttctgcgggtggtccgatggttctaaaggctgttcgcccagctggtgagcctcttgttgatgactggagttgtctcaagtctacggtgcgcacttttgaatcacaatgtggctcactggcgcagtatggaatgaagcacatgcggccctttgcaaacatctgcaatgccggcattgttcctgaagcgacggcaaaggttgctgctcaggcatgcacgagcatcccaaccaacccctggagtgccacacacaagggttttagtgcttaaaccagaggtgaagcaacttggtccctatctcagctattgtaccatataccaaagtccccttcctattcacacagggttagtagtgcttgaacggacgaaccttagatgaataaataagaattatggcattacttcagctattccaccacaccaaattaccttggttgtgtccaacttatagtgtacatatacccgtagtagaaaggtgatttcctgtgattactgtacatactcgtgatagtttgtgatcagatgtgtagctcgcaattccatatatgaagaatgcaatcgctgctatttgc

SEQ ID NO: 68166 - protein, 511 aa, Triticum aestivum
  peptide (1)..(511): Ceres Seq. ID no. 15170671
LLPPPPRFFTESKPQTPAMAMASFRPLPLALLLAACLSALVLAVAHARTPRLEPTIRLPSQRAGGQEDDGSIGTRWAVLIAGSNGYYNYRHQADICHAYQIMKKGGLKDENIIVFMYDDIAHNPENPRPGVIINHPQGGDVYAGVPKDYTGKEVNVKNFFAVLLGNKTAVSGGNGKVVDSGPNDHIFVFYSDHGGPGVLGMPTYPYLYGDDLVDVLKKKHAAGTYKSLVFYLEACESGSIFEGLLPNDIGVYATTASNAEESSWGTYCPGEYPSPPPEYDTCLGDLYSISWMEDSDVHNLRTESLKQQYNLVKKRTAAQDSYSYGSHVMQYGSLDLNAEHLFSYIGSNPANENTTFVEDNALPSFSRAVNQRDADLVYFWQKYRKLAESSPEKNDARKQLLEMMGHRSHIDNSIELIGNLLFGSAGGPMVLKAVRPAGEPLVDDWSCLKSTVRTFESQCGSLAQYGMKHMRPFANICNAGIVPEATAKVAAQACTSIPTNPWSATHKGFSA

SEQ ID NO: 68167 - protein, 493 aa, Triticum aestivum
  peptide (1)..(493): Ceres Seq. ID no. 15170672
MAMASFRPLPLALLLAACLSALVLAVAHARTPRLEPTIRLPSQRAGGQEDDGSIGTRWAVLIAGSNGYYNYRHQADICHAYQIMKKGGLKDENIIVFMYDDIAHNPENPRPGVIINHPQGGDVYAGVPKDYTGKEVNVKNFFAVLLGNKTAVSGGNGKVVDSGPNDHIFVFYSDHGGPGVLGMPTYPYLYGDDLVDVLKKKHAAGTYKSLVFYLEACESGSIFEGLLPNDIGVYATTASNAEESSWGTYCPGEYPSPPPEYDTCLGDLYSISWMEDSDVHNLRTESLKQQYNLVKKRTAAQDSYSYGSHVMQYGSLDLNAEHLFSYIGSNPANENTTFVEDNALPSFSRAVNQRDADLVYFWQKYRKLAESSPEKNDARKQLLEMMGHRSHIDNSIELIGNLLFGSAGGPMVLKAVRPAGEPLVDDWSCLKSTVRTFESQCGSLAQYGMKHMRPFANICNAGIVPEATAKVAAQACTSIPTNPWSATHKGFSA

SEQ ID NO: 68168 - protein, 491 aa, Triticum aestivum
  peptide (1)..(491): Ceres Seq. ID no. 15170673
MASFRPLPLALLLAACLSALVLAVAHARTPRLEPTIRLPSQRAGGQEDDGSIGTRWAVLIAGSNGYYNYRHQADICHAYQIMKKGGLKDENIIVFMYDDIAHNPENPRPGVIINHPQGGDVYAGVPKDYTGKEVNVKNFFAVLLGNKTAVSGGNGKVVDSGPNDHIFVFYSDHGGPGVLGMPTYPYLYGDDLVDVLKKKHAAGTYKSLVFYLEACESGSIFEGLLPNDIGVYATTASNAEESSWGTYCPGEYPSPPPEYDTCLGDLYSISWMEDSDVHNLRTESLKQQYNLVKKRTAAQDSYSYGSHVMQYGSLDLNAEHLFSYIGSNPANENTTFVEDNALPSFSRAVNQRDADLVYFWQKYRKLAESSPEKNDARKQLLEMMGHRSHIDNSIELIGNLLFGSAGGPMVLKAVRPAGEPLVDDWSCLKSTVRTFESQCGSLAQYGMKHMRPFANICNAGIVPEATAKVAAQACTSIPTNPWSATHKGFSA

SEQ ID NO: 68169 - DNA, 551 bp, Triticum aestivum
  misc_feature (1)..(551): Ceres Seq. ID no. 13590591
agaaaagaataccgcctccctaaaaaaactaggaaaaacagtctcctcaccggtccgtcgtcctcgccgtcgccctacccatctcgccggcgccgtcggggacccgcggggagcatggatgccatggaggaggatacgcctccagcgctaccgccaccgccaccgcctacgacgggcgcgaagcagccgccgtacaaggatcctgacgacgggaggcagcggttcctactggagctggagttcatccagtgcctcgccaaccccatctacatcaactatctagcgcagaatcggtactttgaggatgaggcgttcatcgggtatctcaagtacctcaagtattggcagcgtccggagtacatcaaatacataatgtatccgcactgccttttctttcttgagcttctccaaaatgcaaatttccgaaacgcaatggcacatccagcaaacaaggaagttgctcataggcagcaatatttcttctggaaaaactacaggaacaatagactgaagcacattctgccgcgttcttcttccgaaccaacttctgc

SEQ ID NO: 68170 - protein, 183 aa, Triticum aestivum
  peptide (1)..(183): Ceres Seq. ID no. 13590592
RKEYRLPKKTRKNSLLTGPSSSPSPYPSRRRRRGPAGSMDAMEEDTPPALPPPPPPTTGAKQPPYKDPDDGRQRFLLELEFIQCLANPIYINYLAQNRYFEDEAFIGYLKYLKYWQRPEYIKYIMYPHCLFFLELLQNANFRNAMAHPANKEVAHRQQYFFWKNYRNNRLKHILPRSSSEPTS

SEQ ID NO: 68171 - protein, 145 aa, Triticum aestivum
  peptide (1)..(145): Ceres Seq. ID no. 13590593
MDAMEEDTPPALPPPPPPTTGAKQPPYKDPDDGRQRFLLELEFIQCLANPIYINYLAQNRYFEDEAFIGYLKYLKYWQRPEYIKYIMYPHCLFFLELLQNANFRNAMAHPANKEVAHRQQYFFWKNYRNNRLKHILPRSSSEPTS

SEQ ID NO: 68172 - protein, 142 aa, Triticum aestivum
  peptide (1)..(142): Ceres Seq. ID no. 13590594
MEEDTPPALPPPPPPTTGAKQPPYKDPDDGRQRFLLELEFIQCLANPIYINYLAQNRYFEDEAFIGYLKYLKYWQRPEYIKYIMYPHCLFFLELLQNANFRNAMAHPANKEVAHRQQYFFWKNYRNNRLKHILPRSSSEPTS

SEQ ID NO: 68173 - DNA, 1497 bp, Triticum aestivum
  misc_feature (1)..(1497): Ceres Seq. ID no. 13595999
acacctgctctcccccttcattaaaaactgcccatttatttatcaattccggcgaccctcctcccaccggcgacgactaggacgaggcaccgccggcaatcatgtgcggcggcgcgatcctcaaggacctcaaggtccccgcgccgacgcggaaggtgacggcggcggtgctgtggcccgagaagaacaagcccaagcgggccgacggcgtggcccggcgcctcgcggggctcggccggcgcggggggctcgggctggacgacggcgacgtggacttcgaggccgacttcgaggagttcgaggccgactccggggactccgacgtggagctcaggcgcgccggggttgctgggaaggacggccacgacgtggtcgtcgagatcaagcccttattcgccgtcaagaggtccctctcccaagatgacttaagcaccatgactactgctggttttgatggtcctgcacaaaggtcagcaaaaaggaagagaaagaacgagttcaggggtatccgccagcgcccctggggtaagtgggctgctgaaatcagagatcctagcaagggtgtccgtgtctggcttggtactttcaacagtgctgaagaagctgcaagagcttatgatgttgaagcacgaaggatccgtggcaagaagrccaaggttaactttccagaggaactaacagttcatcagaagcgccgtgcttgccctgctgctcctaaagttcycaagtcaagcgcagcacaggaacctaccgtcataccagcagtcaacaaccttgccaacccaaatgctttcgtctacccgcctgctgactttgcatcaaagcagccacttgttcagcctgacaacgtgccatatgttcccgcaattaactctgctgcccctgttgaagctcctgttatgaatatgtactctgaccagggaagcaactcctttggctgctctgacttgggctgggagtatgacaccaagactccagatatatcatccattgctcccatttccaccattgctgaaggaacagagtctgcacttctccagagtaacacctacaacccagcagtgattgccgaaggagctgaatctgcgcttgtccagagcaacacctacaactcagtggtgcctcctgttatggagaacaatgctgtcgattttgagccttggatgaggtttcttgttgatgatggcgtggatgagccgatagatagccttctgaattttgatgtgcctcaggatgtcgttggcaacatggacctttggagcttcgatgacatgcccatctgtggcgaaattttctgagggattcaaacccctgtatatcaggacaaagggaataagactatgggagattgggaagcaccctgttgtcacctttggttagtatatgcctatgtgcaagcttagatgcaaaaaagccgcatcttgagttgtagtcgaccctttccctagttgactgtcaatgaaccgttgtcatttatgagtctgatgaaccgttgcc

SEQ ID NO: 68174 - protein, 398 aa, Triticum aestivum
  peptide (1)..(398): Ceres Seq. ID no. 15221733
  misc_feature (184)..(184): Xaa is any aa, unknown or other
  misc_feature (208)..(208): Xaa is any aa, unknown or other
MCGGAILKDLKVPAPTRKVTAAVLWPEKNKPKRADGVARRLAGLGRRGGLGLDDGDVDFEADFEEFEADSGDSDVELRRAGVAGKDGHDVVVEIKPLFAVKRSLSQDDLSTMTTAGFDGPAQRSAKRKRKNEFRGIRQRPWGKWAAEIRDPSKGVRVWLGTFNSAEEAARAYDVEARRIRGKKXKVNFPEELTVHQKRRACPAAPKVXKSSAAQEPTVIPAVNNLANPNAFVYPPADFASKQPLVQPDNVPYVPAINSAAPVEAPVMNMYSDQGSNSFGCSDLGWEYDTKTPDISSIAPISTIAEGTESALLQSNTYNPAVIAEGAESALVQSNTYNSVVPPVMENNAVDFEPWMRFLVDDGVDEPIDSLLNFDVPQDVVGNMDLWSFDDMPICGEIF

SEQ ID NO: 68175 - protein, 287 aa, Triticum aestivum
  peptide (1)..(287): Ceres Seq. ID no. 15221734
  misc_feature (73)..(73): Xaa is any aa, unknown or other
  misc_feature (97)..(97): Xaa is any aa, unknown or other
MTTAGFDGPAQRSAKRKRKNEFRGIRQRPWGKWAAEIRDPSKGVRVWLGTFNSAEEAARAYDVEARRIRGKKXKVNFPEELTVHQKRRACPAAPKVXKSSAAQEPTVIPAVNNLANPNAFVYPPADFASKQPLVQPDNVPYVPAINSAAPVEAPVMNMYSDQGSNSFGCSDLGWEYDTKTPDISSIAPISTIAEGTESALLQSNTYNPAVIAEGAESALVQSNTYNSVVPPVMENNAVDFEPWMRFLVDDGVDEPIDSLLNFDVPQDVVGNMDLWSFDDMPICGEIF

SEQ ID NO: 68176 - DNA, 1335 bp, Triticum aestivum
  misc_feature (1)..(1335): Ceres Seq. ID no. 15226254
acacccacccaccccctcctccttacttgacctagaacctggcctcgggccgacgcctcctgctccctctcgctgtcgcgtctcccggcgatcctctccgtcgacgccccggctagccgccatcgtttcccggcgaccagatcgacggcaatcccatcctccttgatctccctctcgggcgtcgggagatctacgtggggacatgcataagctggggagaggaagccgcgacaaggtgcaacagttcatggccataactggtgcaagcgagaaggtcgcccttcaggcactgaaagctagtgattggcacttagaagggtcttttgattatttctacagccagccacagatttctgtgaccaattctcgacatctttacagcagatacaaagaacgtgatgctgatatgatcatggtggagggcacatctcaactttgcaacgacctgttggtggatcctcaggatgttgtcatgcttgtcatatcatggcacatgaaagctgccacaatgtgtgaatttactcgccaggaattcattgatggtctgcagtcaattggggtagattcaattgagaagctccgtgagaaacttccatcactgcgagctgagataaaggacgataataagttccgtgagatatacaactttgcatttgcttgggctagggaaaagggtcagaaatcccttccactggagacagctattggaatgtggaggttgctgtttgctgaaaggcattggcccttaatcgatcactggtgtcagtttctccaggtcaggcataacaaagccatctctagggacacatggtctcagctgttggaatttgttaagacaattgatccacagttatccaattatgacgaagaaggtgcttggccctacctaattgatgaatttgtggagtacctaaccgagaatggatgcgttcagcgtaacaagtgaaccattcgaggctgcattctgacttggatatcatgatttggtggtacaaacatgattcatgtcgatcaatagaatatttatctttggatgtcggcattgttccagctccccttcacaaagcagatgatgtcgtttggtggaatctacttgcgcaggggtgatttcactggctaggattgcaaactatctatctggtttgtattttgtgctgcacctatctgctacagcatacccaaaatagttattggtttactgctgaatgggcgatgggtctatagttcatgtaggtctaggtatgaggtaatgcgaacttgtgctatcggtattgatcgattgttgccagatggggcacctttctatgaggtaatgcaaacttgtgatatctttcg

SEQ ID NO: 68177 - protein, 247 aa, Triticum aestivum
  peptide (1)..(247): Ceres Seq. ID no. 15226255
MHKLGRGSRDKVQQFMAITGASEKVALQALKASDWHLEGSFDYFYSQPQISVTNSRHLYSRYKERDADMIMVEGTSQLCNDLLVDPQDVVMLVISWHMKAATMCEFTRQEFIDGLQSIGVDSIEKLREKLPSLRAEIKDDNKFREIYNFAFAWAREKGQKSLPLETAIGMWRLLFAERHWPLIDHWCQFLQVRHNKAISRDTWSQLLEFVKTIDPQLSNYDEEGAWPYLIDEFVEYLTENGCVQRNK

SEQ ID NO: 68178 - protein, 232 aa, Triticum aestivum
  peptide (1)..(232): Ceres Seq. ID no. 15226256
MAITGASEKVALQALKASDWHLEGSFDYFYSQPQISVTNSRHLYSRYKERDADMIMVEGTSQLCNDLLVDPQDVVMLVISWHMKAATMCEFTRQEFIDGLQSIGVDSIEKLREKLPSLRAEIKDDNKFREIYNFAFAWAREKGQKSLPLETAIGMWRLLFAERHWPLIDHWCQFLQVRHNKAISRDTWSQLLEFVKTIDPQLSNYDEEGAWPYLIDEFVEYLTENGCVQRNK

SEQ ID NO: 68179 - protein, 179 aa, Triticum aestivum
  peptide (1)..(179): Ceres Seq. ID no. 15226257
MIMVEGTSQLCNDLLVDPQDVVMLVISWHMKAATMCEFTRQEFIDGLQSIGVDSIEKLREKLPSLRAEIKDDNKFREIYNFAFAWAREKGQKSLPLETAIGMWRLLFAERHWPLIDHWCQFLQVRHNKAISRDTWSQLLEFVKTIDPQLSNYDEEGAWPYLIDEFVEYLTENGCVQRNK

SEQ ID NO: 68180 - DNA, 1323 bp, Triticum aestivum
  misc_feature (1)..(1323): Ceres Seq. ID no. 14302291
attcgactccacaccctcggttcacacacagtgatcagctcagctacagcctacagagcacagacccaaccccgggagacaacagagcacggcgaggatgctgctgaacccggcctcggaggcgatggtgctggacagcatcaggcagcacctcatggaggacacggcggctccggcgccggaggcgaggaggcagaggccggcctactgccgcagcgccagcttcgggagcctggtggccgaccagtggagcgagtcgctcccgttccgcgcggacgactccgacgacatggtcgtctacggcgcgctccgcgacgccttctcctgcggctggctccccgacggctccttcgccgccgtcaagccggagcccctcctgccttccccggactcctgctatgtcggcttcctcgagccggagacgcctccggccacgtccccgggcgggagcgaggaggaggccgccgcggcgttcatgggcgaggaggcggccgcggccgtggcgagggggaagcactaccgcggggtgaggcagcggccgtggggcaagttcgcggcggagatccgggacccggccaagaacggcgcccgcgtgtggctcggcacctacgacaccgccgaggacgccgccgtggcctacgaccgcgccgcgtaccgcatgcgcggctcccgcgcgctcctcaacttcccgctccgcatcggctccgagatcgccgccgcgcacgccgcggccgcggccgccggcgacaagcggccgtcgcccgagcccgcgacatcggactcgtcatcctcctcgtcctcctccgggtccccgaaaaggaggaagagaggcgaggccgcggccgcgtccatggccatggcgctggtgccgccgtcctcgcagttgagccggccggcccacgcgtggtaccccgccgtgccggcggagcaggtggccatggcgccgtgcgtgcagcagctggtcagctaggccccgctctccagcccccgggcgcacgatcgtgaaagacaatgcgcaagtgcagtggattcgccagcaagtgcatggacgcgacagcaacaggagcccgcctttcactgttgcacggtgcaaggtggtgatggcaatggagtgcgatacctatcgagcgagcaggcaaagcaaccttggcgacggctccatttggatagatatttggatatttgatggcaatggaagataagctctcggagcaactgggcgctgcaatttggtctggaacgatagttcctcctctggctgctcggtgcaactcgcccaagtgggtcaaagcgaaactgtgctagtatcgggttgtcgtggtt

SEQ ID NO: 68181 - protein, 334 aa, Triticum aestivum
  peptide (1)..(334): Ceres Seq. ID no. 14302292
IRLHTLGSHTVISSATAYRAQTQPRETTEHGEDAAEPGLGGDGAGQHQAAPHGGHGGSGAGGEEAEAGLLPQRQLREPGGRPVERVAPVPRGRLRRHGRLRRAPRRLLLRLAPRRLLRRRQAGAPPAFPGLLLCRLPRAGDASGHVPGRERGGGRRGVHGRGGGRGRGEGEALPRGEAAAVGQVRGGDPGPGQERRPRVARHLRHRRGRRRGLRPRRVPHARLPRAPQLPAPHRLRDRRRARRGRGRRRQAAVARARDIGLVILLVLLRVPEKEEERRGRGRVHGHGAGAAVLAVEPAGPRVVPRRAGGAGGHGAVRAAAGQLGPALQPPGARS

SEQ ID NO: 68182 - protein, 290 aa, Triticum aestivum
  peptide (1)..(290): Ceres Seq. ID no. 14302293
MLLNPASEAMVLDSIRQHLMEDTAAPAPEARRQRPAYCRSASFGSLVADQWSESLPFRADDSDDMVVYGALRDAFSCGWLPDGSFAAVKPEPLLPSPDSCYVGFLEPETPPATSPGGSEEEAAAAFMGEEAAAAVARGKHYRGVRQRPWGKFAAEIRDPAKNGARVWLGTYDTAEDAAVAYDRAAYRMRGSRALLNFPLRIGSEIAAAHAAAAAAGDKRPSPEPATSDSSSSSSSSGSPKRRKRGEAAAASMAMALVPPSSQLSRPAHAWYPAVPAEQVAMAPCVQQLVS

SEQ ID NO: 68183 - protein, 281 aa, Triticum aestivum
  peptide (1)..(281): Ceres Seq. ID no. 14302294
MVLDSIRQHLMEDTAAPAPEARRQRPAYCRSASFGSLVADQWSESLPFRADDSDDMVVYGALRDAFSCGWLPDGSFAAVKPEPLLPSPDSCYVGFLEPETPPATSPGGSEEEAAAAFMGEEAAAAVARGKHYRGVRQRPWGKFAAEIRDPAKNGARVWLGTYDTAEDAAVAYDRAAYRMRGSRALLNFPLRIGSEIAAAHAAAAAAGDKRPSPEPATSDSSSSSSSSGSPKRRKRGEAAAASMAMALVPPSSQLSRPAHAWYPAVPAEQVAMAPCVQQLVS

SEQ ID NO: 68184 - DNA, 1180 bp, Triticum aestivum
  misc_feature (1)..(1180): Ceres Seq. ID no. 12613576
gatcgatcgagtcgattctcgcgcagagcttgagagagatcggaggcgatgggaggcggcagcatggggatccgcgcggccgccagggccgccttcatcggcggctaccgctccgcctcgaacgcccgccgctccgccctgccctcctcctccgccgccgcggccgacacccgccccgtctccacggccaccaccttcgacgactggtacatccccgaccgcgaggtgttcggccccgtgccctcccacgaggaggccatggccgccaccctcgacctcagggacgccttcgagattgccaagattgattcccatggtggccgcctggatatctccaagacacatatctcccatgatggccttgatgatcccacaaaggttgctcaggaaacatttcaggatcatctccattcagaagcatctaagcatgaagagaagcatgacagtttatccgttgcctctggatcctctgcacgtgttattgaagccttcaccatgctacacgagagtcctgaagctcaggatgttgttgcttcgcttgcttctgataagaatgtctgggaagctgtgatgaagaacaagaaacttgtggagttttacaagacaaacctcagcgagtcatccagtgtcactgacgaagctgagcagagcgacgccgagagctcgcagagcagcaatggtgtcgtctcgccggcagatgcattcagtgattacattcagatgatgaaggcgttcgtgtcggagatggtgacgaatctttcgagcataatgcaggacctggtggccacgtcagacgagggccagagcaaggggaggttgaagaccctgatcatcaactccaagaaggatttcacaaatggcccgtcgtccttcgtgctcctggccatcgcgtctattctggtcgttttgctcaagcgtgcatagttctaaataaaacaaaggagctggcagagtggttgttctgagtttagtttcgtttcagctttttgagacagacaggatttgatcttctttttctacttattagttcatcaaatggtcgattctacgcactgtacaggtcgacgttaagtcttttcaagggtttatctggtggctgtgtgttcacctggggatgaacatgttctgcatgatgtttagctgttactgcaactttatatgatggagtttagttttcttt

SEQ ID NO: 68185 - protein, 291 aa, Triticum aestivum
  peptide (1)..(291): Ceres Seq. ID no. 12613577
MGGGSMGIRAAARAAFIGGYRSASNARRSALPSSSAAAADTRPVSTATTFDDWYIPDREVFGPVPSHEEAMAATLDLRDAFEIAKIDSHGGRLDISKTHISHDGLDDPTKVAQETFQDHLHSEASKHEEKHDSLSVASGSSARVIEAFTMLHESPEAQDVVASLASDKNVWEAVMKNKKLVEFYKTNLSESSSVTDEAEQSDAESSQSSNGVVSPADAFSDYIQMMKAFVSEMVTNLSSIMQDLVATSDEGQSKGRLKTLIINSKKDFTNGPSSFVLLAIASILVVLLKRA

SEQ ID NO: 68186 - protein, 286 aa, Triticum aestivum
  peptide (1)..(286): Ceres Seq. ID no. 12613578
MGIRAAARAAFIGGYRSASNARRSALPSSSAAAADTRPVSTATTFDDWYIPDREVFGPVPSHEEAMAATLDLRDAFEIAKIDSHGGRLDISKTHISHDGLDDPTKVAQETFQDHLHSEASKHEEKHDSLSVASGSSARVIEAFTMLHESPEAQDVVASLASDKNVWEAVMKNKKLVEFYKTNLSESSSVTDEAEQSDAESSQSSNGVVSPADAFSDYIQMMKAFVSEMVTNLSSIMQDLVATSDEGQSKGRLKTLIINSKKDFTNGPSSFVLLAIASILVVLLKRA

SEQ ID NO: 68187 - protein, 221 aa, Triticum aestivum
  peptide (1)..(221): Ceres Seq. ID no. 12613579
MAATLDLRDAFEIAKIDSHGGRLDISKTHISHDGLDDPTKVAQETFQDHLHSEASKHEEKHDSLSVASGSSARVIEAFTMLHESPEAQDVVASLASDKNVWEAVMKNKKLVEFYKTNLSESSSVTDEAEQSDAESSQSSNGVVSPADAFSDYIQMMKAFVSEMVTNLSSIMQDLVATSDEGQSKGRLKTLIINSKKDFTNGPSSFVLLAIASILVVLLKRA

SEQ ID NO: 68188 - DNA, 1303 bp, Triticum aestivum
  misc_feature (1)..(1303): Ceres Seq. ID no. 13596000
aacaaaccaaccgccaacacttccattccaggcatcaaccatggcttctcctcggcatctgatgaagctttcggctgctcttctcctcctctgtgttggcgtgtgtgtggctcgcaacagtgacttctccattgtcggctactcggaggaggacctgtcgtccaacgacagactcgtcgagctgtttgagaagtggctggccaagcaccagaaggcgtacgcgagcttcgaggagaagctgcacaagttcgaggtgttcaaggacaacctgaagcacatcgacaagatcaaccgggaagtgaccagctactggctcggcctcaacgagtttgccgacctcaccaacgtcgagttcaaggccgcctacctcggcctcaatgctgctccggctcgtcggggcagcagccgaagcttcaggtacgaggacgtgagtgccagcgacctgcccaagtctgtggactggaggaagaagggcgcggtgacagaggtgaagaaccaggggcagtgcggcagctgctgggccttctcgacggtggcggcagtggaagggatcaacgccatcgtgacaggcaacctgactgcgctgtcggagcaggagctcatcgactgcagcgtcgatggcaacagtggctgcaatggcggcttgatggactacgccttctcctacatcgcgtccagtggcgggctacacaccgaggaggcgtacccctacctcatggaggaaggcagctgcggcgacggtaagaaggccgagtccaaggcggtgacgatcagcggcttcgaggacgtgccggccaatgacgagcaggcgctgatcaaggctctcgcccaccagcccgtctccgtcgccatcgaggcctccggcaggcacttccagttctacagcgggggagttttcgacggtccttgcggcgcgcagctagatcacggcgtggcggcggtcgggtacgggtcggacaaggggaagggccacgactacatcatcgtgaggaactcgtggggtgcggactggggcgagaagggttacatcaggatgaagaggggcaccagcaacggcgagggcctctgcggcatcaacaagatggcctcctacccaaccaaggacaagtgatgttccagcctcaaatcctgcatccagaggattgaagatttgaaccatccttgagagtccttgttcccgatctttgcatttccctgctttttctttcacgtttttccttttctcaatggttcctttcggttaatgcgacgaacatggactgaaataataaaatttatttccaagtttctattgagattgccc

SEQ ID NO: 68189 - protein, 369 aa, Triticum aestivum
  peptide (1)..(369): Ceres Seq. ID no. 13596001
TNQPPTLPFQASTMASPRHLMKLSAALLLLCVGVCVARNSDFSIVGYSEEDLSSNDRLVELFEKWLAKHQKAYASFEEKLHKFEVFKDNLKHIDKINREVTSYWLGLNEFADLTNVEFKAAYLGLNAAPARRGSSRSFRYEDVSASDLPKSVDWRKKGAVTEVKNQGQCGSCWAFSTVAAVEGINAIVTGNLTALSEQELIDCSVDGNSGCNGGLMDYAFSYIASSGGLHTEEAYPYLMEEGSCGDGKKAESKAVTISGFEDVPANDEQALIKALAHQPVSVAIEASGRHFQFYSGGVFDGPCGAQLDHGVAAVGYGSDKGKGHDYIIVRNSWGADWGEKGYIRMKRGTSNGEGLCGINKMASYPTKDK

SEQ ID NO: 68190 - protein, 356 aa, Triticum aestivum
  peptide (1)..(356): Ceres Seq. ID no. 13596002
MASPRHLMKLSAALLLLCVGVCVARNSDFSIVGYSEEDLSSNDRLVELFEKWLAKHQKAYASFEEKLHKFEVFKDNLKHIDKINREVTSYWLGLNEFADLTNVEFKAAYLGLNAAPARRGSSRSFRYEDVSASDLPKSVDWRKKGAVTEVKNQGQCGSCWAFSTVAAVEGINAIVTGNLTALSEQELIDCSVDGNSGCNGGLMDYAFSYIASSGGLHTEEAYPYLMEEGSCGDGKKAESKAVTISGFEDVPANDEQALIKALAHQPVSVAIEASGRHFQFYSGGVFDGPCGAQLDHGVAAVGYGSDKGKGHDYIIVRNSWGADWGEKGYIRMKRGTSNGEGLCGINKMASYPTKDK

SEQ ID NO: 68191 - protein, 349 aa, Triticum aestivum
  peptide (1)..(349): Ceres Seq. ID no. 13596003
MKLSAALLLLCVGVCVARNSDFSIVGYSEEDLSSNDRLVELFEKWLAKHQKAYASFEEKLHKFEVFKDNLKHIDKINREVTSYWLGLNEFADLTNVEFKAAYLGLNAAPARRGSSRSFRYEDVSASDLPKSVDWRKKGAVTEVKNQGQCGSCWAFSTVAAVEGINAIVTGNLTALSEQELIDCSVDGNSGCNGGLMDYAFSYIASSGGLHTEEAYPYLMEEGSCGDGKKAESKAVTISGFEDVPANDEQALIKALAHQPVSVAIEASGRHFQFYSGGVFDGPCGAQLDHGVAAVGYGSDKGKGHDYIIVRNSWGADWGEKGYIRMKRGTSNGEGLCGINKMASYPTKDK

SEQ ID NO: 68192 - DNA, 1532 bp, Triticum aestivum
  misc_feature (1)..(1532): Ceres Seq. ID no. 13654122
aaagaaaggcttggcgaagaggttaacgaatcgatcttctccgagttttttgtcctcgaggaatttagcaccgctcgggattctcaggccatgatgatcggtgtcgcaggcttcagccggcacatcggccagctcttgagtaaaagcaacgggtttattgcggcgtccctgtccgcggcgagctgcgcggacgaggcggagaaggccgagggggcggggtgccgggacgacgcggcggcgctgaggctcaaatggattgccatggcggcgatactggtgtccggcgtgatgggcgtgggcctgtcgctcgtggggcggaagcggcggacggtgcagaccggcagcgctgtcttcgtggccgccaaggctttcgcggccggcgtgatcctggccacggggttcgttcacatgctgcacgacgccgagcacgcgctctccaacccctgcctcccggccgcgccctggcggcggttcccgttccccgggttcgtcgccatgctcgctgctcttgccacgctggtgctcgacgtcctggtcaccaggttctacgagaccaagcaccgtgcggaggtagctcgggtcaaggctgacgccgctgccgcactcgccgccgcgtccacctccgccagcgacgaagacatcaccgtggtcaccgtcgtcgagggtgagcacaaggtcccgctcttgcaagcccactcccattcccacgcgcagtcgcatggtcacgagctggtgcaaccacaaggacgcgagggggaggtgtcagaccacgtgcgctccgtcgtggtatcacagatactggaaatggggattgtgtcgcactcggtgatcattgggctgtcgcttggtgtgtctcggagcccctgcacaatcaggccactggtggcagcgctctcattccaccagttcttcgagggatttgccctcggtgggtgcattgcgcaggctcagtttaagaacctttcggcagttatgatggcgtccttttttgccattacaacaccaactggtatcgccgctggggccggtttgtcctcattttacaacgccaatagccccagggctctagtggtcgaaggcatcctcgactctgtgtcggccggcatactcatatacatggcgctggtggatctaatcgcagccgatttcttgggtgggaagatgacagggtcgccacggcagcaagtgatggcctatgtcgccctgttcctaggtgcgctctccatgtcatcgcttgcagtttgggcctgaaccggtttaatgagatgaaggtagcggatgacgcctacgtcccaacatactgcctgtgatacatgtacataactaatgcatgtgcctgtgttcatatgattgcatacatacatcagataacgtgcccttgtttttgatgggcatgagagaacagcgccggtggaaacgcctgagcattgcctctgtatatactagatgaatccccgtgcgttgctgcgggatattttgtgctaaaatttctaatgtggagagatacgccatgtaaagaaaaatagtgactt

SEQ ID NO: 68193 - protein, 416 aa, Triticum aestivum
  peptide (1)..(416): Ceres Seq. ID no. 13654123
KERLGEEVNESIFSEFFVLEEFSTARDSQAMMIGVAGFSRHIGQLLSKSNGFIAASLSAASCADEAEKAEGAGCRDDAAALRLKWIAMAAILVSGVMGVGLSLVGRKRRTVQTGSAVFVAAKAFAAGVILATGFVHMLHDAEHALSNPCLPAAPWRRFPFPGFVAMLAALATLVLDVLVTRFYETKHRAEVARVKADAAAALAAASTSASDEDITVVTVVEGEHKVPLLQAHSHSHAQSHGHELVQPQGREGEVSDHVRSVVVSQILEMGIVSHSVIIGLSLGVSRSPCTIRPLVAALSFHQFFEGFALGGCIAQAQFKNLSAVMMASFFAITTPTGIAAGAGLSSFYNANSPRALVVEGILDSVSAGILIYMALVDLIAADFLGGKMTGSPRQQVMAYVALFLGALSMSSLAVWA

SEQ ID NO: 68194 - protein, 386 aa, Triticum aestivum
  peptide (1)..(386): Ceres Seq. ID no. 13654124
MMIGVAGFSRHIGQLLSKSNGFIAASLSAASCADEAEKAEGAGCRDDAAALRLKWIAMAAILVSGVMGVGLSLVGRKRRTVQTGSAVFVAAKAFAAGVILATGFVHMLHDAEHALSNPCLPAAPWRRFPFPGFVAMLAALATLVLDVLVTRFYETKHRAEVARVKADAAAALAAASTSASDEDITVVTVVEGEHKVPLLQAHSHSHAQSHGHELVQPQGREGEVSDHVRSVVVSQILEMGIVSHSVIIGLSLGVSRSPCTIRPLVAALSFHQFFEGFALGGCIAQAQFKNLSAVMMASFFAITTPTGIAAGAGLSSFYNANSPRALVVEGILDSVSAGILIYMALVDLIAADFLGGKMTGSPRQQVMAYVALFLGALSMSSLAVWA

SEQ ID NO: 68195 - protein, 385 aa, Triticum aestivum
  peptide (1)..(385): Ceres Seq. ID no. 13654125
MIGVAGFSRHIGQLLSKSNGFIAASLSAASCADEAEKAEGAGCRDDAAALRLKWIAMAAILVSGVMGVGLSLVGRKRRTVQTGSAVFVAAKAFAAGVILATGFVHMLHDAEHALSNPCLPAAPWRRFPFPGFVAMLAALATLVLDVLVTRFYETKHRAEVARVKADAAAALAAASTSASDEDITVVTVVEGEHKVPLLQAHSHSHAQSHGHELVQPQGREGEVSDHVRSVVVSQILEMGIVSHSVIIGLSLGVSRSPCTIRPLVAALSFHQFFEGFALGGCIAQAQFKNLSAVMMASFFAITTPTGIAAGAGLSSFYNANSPRALVVEGILDSVSAGILIYMALVDLIAADFLGGKMTGSPRQQVMAYVALFLGALSMSSLAVWA

SEQ ID NO: 68196 - DNA, 1824 bp, Triticum aestivum
  misc_feature (1)..(1824): Ceres Seq. ID no. 12613725
atcggagcctgctcgcccgcgcacactcggaagacgacgcagacgccgccatgggggacgccgtcgctggcgccgtcgactaccgcggccggcccgcctcccgcgccgccaccggcggctggaagtcctcggtgttcgtcatggcaatggagatcgccgagcggttcgcgtacaagggcgtggcggcgaacctcatcacgtacctcacggggccgctgggccagcccatggcgcgcgcggcggcgtccatcgacgcgtggaagggcgtctcccagatgctgccgctgccggtggcctgcgtcgccgacgcctggctcggccgctaccgggccatcgtcctcgcctccatcctcttcgtcgtgagcatgggcacgctgtcgctgtcgtcggcgttccacatcttccgctccggcggccacgtggccgtcttctacgtcgcgctctacctggtggcgctgggcgagggcgcgcacaagccctgcgcgcaggcgttcgcggccgaccagttcgacgagaaggaccccaaggagaacgtggcaaggagctccttcttcaactggtggtacttcggcatgtgcgccggcaccgccgtcaccaccatggtctccagctacgtccaggacaacgtcggctggggcctcggcttcggtatcccctgcatcgtcatcctcgtctccctcgccgtcttcctcattggcaccccctcctaccgctactacaccaccaaggagcccagccccgtcgcccgcgtcggcaaggcgctcctggtgctgatcaagagctggagatcgaagcaccgcaccaatccggcgagcggcaaggtggaggcccataagaactccgacgaggacctcgtggaggaggtgagtagcgtcttccgcctgctgcccatctgggcctcctgcataatctacgccatcatcttctcccagacctccaccttcttcaccaagcaggcggccacgctggaccgccggatcggccccaacttcaaggtgccgccggcggcgctgcagaccttcatcagcgtcagcatcgtggccttcatcccggtctacgaccgtctcttcgtgccgctcgcgcgccgctacacggggcggcccacgggcatcaccatgctgcagagggtcggcgccggcctctccctctccctcgtcgccgtcgtgctctcggcgctcgtggagatgaagcggctcgccgtcgccagggacgccggcctgctggacgcccccaaggcttctcaccttcccatgacgctctggtggatggtgccgcagtacgtcctcatcggcgtctccgacgtgttcgccatgatcggcctccaggagttcttctacgaccaggtccccgacgccgtgcgcagcctcggcctcgcgctcttcctcagcatcttcggcgtcggccacctcctcagcagcttcctcatctccgtcatcgacagggccacggccaggcgcggcgccagctggttctccaacaacctcaaccgcgcgcacctcgactacttctactggctgctcgccgggctctgcgtcgtcgagctcgtcgccttcttcttcttctcgcgagcctatgtctacaagaagaagagcgacgatggcgattacaggggaggtgatgctgatgctacattggtgtaacttattaattcgggttagtactacgccgtgcgaaattttcaaaacaagtacagtacaaaattttcagattgtttgttatagagtgcgctcgcggtagattgtcataaattttggggtttaaaaacacactcaaaacggatcttttcttaactgaacctgaatgaatcattcgacttttctttgc

SEQ ID NO: 68197 - protein, 545 aa, Triticum aestivum
  peptide (1)..(545): Ceres Seq. ID no. 12613726
RSLLARAHSEDDADAAMGDAVAGAVDYRGRPASRAATGGWKSSVFVMAMEIAERFAYKGVAANLITYLTGPLGQPMARAAASIDAWKGVSQMLPLPVACVADAWLGRYRAIVLASILFVVSMGTLSLSSAFHIFRSGGHVAVFYVALYLVALGEGAHKPCAQAFAADQFDEKDPKENVARSSFFNWWYFGMCAGTAVTTMVSSYVQDNVGWGLGFGIPCIVILVSLAVFLIGTPSYRYYTTKEPSPVARVGKALLVLIKSWRSKHRTNPASGKVEAHKNSDEDLVEEVSSVFRLLPIWASCIIYAIIFSQTSTFFTKQAATLDRRIGPNFKVPPAALQTFISVSIVAFIPVYDRLFVPLARRYTGRPTGITMLQRVGAGLSLSLVAVVLSALVEMKRLAVARDAGLLDAPKASHLPMTLWWMVPQYVLIGVSDVFAMIGLQEFFYDQVPDAVRSLGLALFLSIFGVGHLLSSFLISVIDRATARRGASWFSNNLNRAHLDYFYWLLAGLCVVELVAFFFFSRAYVYKKKSDDGDYRGGDADATLV

SEQ ID NO: 68198 - protein, 529 aa, Triticum aestivum
  peptide (1)..(529): Ceres Seq. ID no. 12613727
MGDAVAGAVDYRGRPASRAATGGWKSSVFVMAMEIAERFAYKGVAANLITYLTGPLGQPMARAAASIDAWKGVSQMLPLPVACVADAWLGRYRAIVLASILFVVSMGTLSLSSAFHIFRSGGHVAVFYVALYLVALGEGAHKPCAQAFAADQFDEKDPKENVARSSFFNWWYFGMCAGTAVTTMVSSYVQDNVGWGLGFGIPCIVILVSLAVFLIGTPSYRYYTTKEPSPVARVGKALLVLIKSWRSKHRTNPASGKVEAHKNSDEDLVEEVSSVFRLLPIWASCIIYAIIFSQTSTFFTKQAATLDRRIGPNFKVPPAALQTFISVSIVAFIPVYDRLFVPLARRYTGRPTGITMLQRVGAGLSLSLVAVVLSALVEMKRLAVARDAGLLDAPKASHLPMTLWWMVPQYVLIGVSDVFAMIGLQEFFYDQVPDAVRSLGLALFLSIFGVGHLLSSFLISVIDRATARRGASWFSNNLNRAHLDYFYWLLAGLCVVELVAFFFFSRAYVYKKKSDDGDYRGGDADATLV

SEQ ID NO: 68199 - protein, 499 aa, Triticum aestivum
  peptide (1)..(499): Ceres Seq. ID no. 12613728
MAMEIAERFAYKGVAANLITYLTGPLGQPMARAAASIDAWKGVSQMLPLPVACVADAWLGRYRAIVLASILFVVSMGTLSLSSAFHIFRSGGHVAVFYVALYLVALGEGAHKPCAQAFAADQFDEKDPKENVARSSFFNWWYFGMCAGTAVTTMVSSYVQDNVGWGLGFGIPCIVILVSLAVFLIGTPSYRYYTTKEPSPVARVGKALLVLIKSWRSKHRTNPASGKVEAHKNSDEDLVEEVSSVFRLLPIWASCIIYAIIFSQTSTFFTKQAATLDRRIGPNFKVPPAALQTFISVSIVAFIPVYDRLFVPLARRYTGRPTGITMLQRVGAGLSLSLVAVVLSALVEMKRLAVARDAGLLDAPKASHLPMTLWWMVPQYVLIGVSDVFAMIGLQEFFYDQVPDAVRSLGLALFLSIFGVGHLLSSFLISVIDRATARRGASWFSNNLNRAHLDYFYWLLAGLCVVELVAFFFFSRAYVYKKKSDDGDYRGGDADATLV

SEQ ID NO: 68200 - DNA, 734 bp, Triticum aestivum
  misc_feature (1)..(734): Ceres Seq. ID no. 13595953
tctattcactccgtcgctcggcgccctagagcaagaacatggcgatcgcgatctcgcaggaggccttcgatgacatggtccgggagaacatggaggacctcggaatggaccccgacgaggccctcgccgacgccgtcgacgccctcaccctccagggcgccaacctctccgggatcatcaggcgcgtgcctggggacgccgtggcggaggaggtgaacccggtgatgcgggtgctggacgaactgaaggcctctgccagtggtaggtcgggggaggatcttgacaggctggtctctttgctcgacgagttgctcgagctgtgctccggcgagggggcggagaatgcggccgtggcggcacggaacggtggcgtggaggcgctcgtcgccctgtgcgcttcggctggggttatgcaggaggggctgcttgcttcgggcttgaaggcgctgagctccctgatccgtgatgttgggagcactgaaaagttcaggcaaagccaagggcccaaaattgtcatggatatcttgaaaggagccctggaaaattcagatatactcgatggtggttttagtgtcatggcagcggcatctgctggcaatgaagttgtgaaagacgcctttatggacttgaaggtcgatgaactcattctggaggttatgaggaacaaatnnnntagtaaantgcaaagcgtgtatgatgccatacgtgttctgttgacacccgatgataaccga

SEQ ID NO: 68201 - protein, 232 aa, Triticum aestivum
  peptide (1)..(232): Ceres Seq. ID no. 13595954
  misc_feature (211)..(211): Xaa is any aa, unknown or other
  misc_feature (212)..(212): Xaa is any aa, unknown or other
  misc_feature (215)..(215): Xaa is any aa, unknown or other
MAIAISQEAFDDMVRENMEDLGMDPDEALADAVDALTLQGANLSGIIRRVPGDAVAEEVNPVMRVLDELKASASGRSGEDLDRLVSLLDELLELCSGEGAENAAVAARNGGVEALVALCASAGVMQEGLLASGLKALSSLIRDVGSTEKFRQSQGPKIVMDILKGALENSDILDGGFSVMAAASAGNEVVKDAFMDLKVDELILEVMRNKXXSKXQSVYDAIRVLLTPDDNR

SEQ ID NO: 68202 - protein, 220 aa, Triticum aestivum
  peptide (1)..(220): Ceres Seq. ID no. 13595955
  misc_feature (199)..(199): Xaa is any aa, unknown or other
  misc_feature (200)..(200): Xaa is any aa, unknown or other
  misc_feature (203)..(203): Xaa is any aa, unknown or other
MVRENMEDLGMDPDEALADAVDALTLQGANLSGIIRRVPGDAVAEEVNPVMRVLDELKASASGRSGEDLDRLVSLLDELLELCSGEGAENAAVAARNGGVEALVALCASAGVMQEGLLASGLKALSSLIRDVGSTEKFRQSQGPKIVMDILKGALENSDILDGGFSVMAAASAGNEVVKDAFMDLKVDELILEVMRNKXXSKXQSVYDAIRVLLTPDDNR

SEQ ID NO: 68203 - protein, 215 aa, Triticum aestivum
  peptide (1)..(215): Ceres Seq. ID no. 13595956
  misc_feature (194)..(194): Xaa is any aa, unknown or other
  misc_feature (195)..(195): Xaa is any aa, unknown or other
  misc_feature (198)..(198): Xaa is any aa, unknown or other
MEDLGMDPDEALADAVDALTLQGANLSGIIRRVPGDAVAEEVNPVMRVLDELKASASGRSGEDLDRLVSLLDELLELCSGEGAENAAVAARNGGVEALVALCASAGVMQEGLLASGLKALSSLIRDVGSTEKFRQSQGPKIVMDILKGALENSDILDGGFSVMAAASAGNEVVKDAFMDLKVDELILEVMRNKXXSKXQSVYDAIRVLLTPDDNR

SEQ ID NO: 68204 - DNA, 1246 bp, Triticum aestivum
  misc_feature (1)..(1246): Ceres Seq. ID no. 13596350
agaacatcctaatcgaaaaacgagaagccacagggaggcgaaccgaaagcaaaaccgcaggactagcaggagagacagagatcccccgaaccctaaccctaccagcacctcccgtcgccggttgagatggcgatggacgcggagcggaggcaggcggagctgatcgagcagttctcggcgcaggcggcggcgctctcctcggctcctcagctggcggcgctcgtgctcgaggccacctcccacccggcgctctttgccttctccgagctcctcacccttccagccctctccaagctaacgggcacgcagtacgcctcgtcgctggacctgctccgcctcttcgcctacggcaccctcaaggactacaagagtaattctagcgccctccctgcattgttgcctgatcaagcccggaagctgaagcaactcagcgtgctaactttggctgagtcaaccaaggtacttccatatgatcagctcatgcaagagctagacgtttccaatgtgagagaacttgaagatttcctcatcaacgagtgcatgtactcaggtattgtcagaggcaagttggaccaactgcggcggtgctttgaagtacaatttgcagctggaagggacctcacacctgatcagctaaccaacatgattgagaccttgtctgactggttgggaacatcagataatttattacaccacattcaggagaaaatcaagtgggctgatacaacaagtgaattgaacaagaagcaccagaaagaatttgaagacagagtggaagaagccaagaagtcagtcaaggcagacaatgacttacgggggcatgacgactttctctctgaatctggaggaataatggattttgaggaggaccgcatccgaccaaaaaggaggcgacaaccaatggcgtagtttgactgaagtatcacacctatggtccctgctcgcagaagtgccgatgctgttcttgagacattttgtcaccggagtttaggagcatcaattagggtgcttcccatgaagcgagtctctgttgagaaaacgcttgtttttggtatgagatgttacaaagagatgatttactgccgtatttatttagtagcacgaagggcatatgggtgacttcgcactgtaaagattatggttctgaaaagtttggtgacctaaggtgttcgccaaaaaaaaaaaaaaaaaagcttatcgataccgtcgactgtttaaacacaataaagtgggaactggagggggg

SEQ ID NO: 68205 - protein, 260 aa, Triticum aestivum
  peptide (1)..(260): Ceres Seq. ID no. 13596351
MAMDAERRQAELIEQFSAQAAALSSAPQLAALVLEATSHPALFAFSELLTLPALSKLTGTQYASSLDLLRLFAYGTLKDYKSNSSALPALLPDQARKLKQLSVLTLAESTKVLPYDQLMQELDVSNVRELEDFLINECMYSGIVRGKLDQLRRCFEVQFAAGRDLTPDQLTNMIETLSDWLGTSDNLLHHIQEKIKWADTTSELNKKHQKEFEDRVEEAKKSVKADNDLRGHDDFLSESGGIMDFEEDRIRPKRRRQPMA

SEQ ID NO: 68206 - protein, 258 aa, Triticum aestivum
  peptide (1)..(258): Ceres Seq. ID no. 13596352
MDAERRQAELIEQFSAQAAALSSAPQLAALVLEATSHPALFAFSELLTLPALSKLTGTQYASSLDLLRLFAYGTLKDYKSNSSALPALLPDQARKLKQLSVLTLAESTKVLPYDQLMQELDVSNVRELEDFLINECMYSGIVRGKLDQLRRCFEVQFAAGRDLTPDQLTNMIETLSDWLGTSDNLLHHIQEKIKWADTTSELNKKHQKEFEDRVEEAKKSVKADNDLRGHDDFLSESGGIMDFEEDRIRPKRRRQPMA

SEQ ID NO: 68207 - protein, 142 aa, Triticum aestivum
  peptide (1)..(142): Ceres Seq. ID no. 13596353
MQELDVSNVRELEDFLINECMYSGIVRGKLDQLRRCFEVQFAAGRDLTPDQLTNMIETLSDWLGTSDNLLHHIQEKIKWADTTSELNKKHQKEFEDRVEEAKKSVKADNDLRGHDDFLSESGGIMDFEEDRIRPKRRRQPMA

SEQ ID NO: 68208 - DNA, 1591 bp, Triticum aestivum
  misc_feature (1)..(1591): Ceres Seq. ID no. 13590671
ccttctcttgttggcgtcgcctccatccggctcggcttcttccacccgtacccgtagattgatttccatccgggtcccttccgttccacggcaagtatccgtcgcacgattcaggtcccccccctcgccgtcgtccatggcgctgcagtacgtggaggcgcagcggcaggcgcggccggacctcgccgactggtacgccgacctcgccgacctctaccagcgcaagctctggcaccagctcaccctcaagctcgaccaattcctccagatcccggccgcacagactggcgacacgctcatacagctctacaacaacttcatctccgatttcgaaacaaagatcaatttgctcaaacttgcccagtttgccgtcatagcctcgcgccaatatcccgacaaggatgccgccatcgccttcctcgaggggataatcgccaagcttcgcgaaaccagggagctgcggatcaatgagcctatccttcatgtcaagatgcagattgcggcaattcacctcgacaaagggaaccacaaggagtgcaagaacctgctggaggaagggaagaccaccctggatggcatgactgatgtggatcctacggtccacgctagcttctactggatatcgtctcagtaccataagtcgctccaagagtttgctgagttctataagaacgcgcttctctatctggcctacacaaccgtagggtctctctcagggtcattcaagctggacttggcatttgacctttcccttgcagccttgctgggggacaacatctacaacttcggggaattgttagctcaccctattatcaatagtcttattgggaccaaggtggagtgggtctatcacatgttacaagcgttcaacaccggcaacctagctctctaccaagagctttgtggggttcacaatgctgctcttagtgcacagcctgcattggtgcagaatgaacagaaactgcttgagaagatcaatattctgtgtctgatggagataatcttcagccggccatcagaagatagaactatcccattaagtgttattgccaagcagactaagctttcaaccagcgaagtggaatgtcttcttatgaagagcctctcggttcatctcatagaaggaatcatcgatgaagtcgacagcacggttcatgtttcgtgggtccagcctagagtacttggcatcccacaggtgaaggcgttgcgtgagcgcctggactcgtgggtcggcaaagtgcataccacactgttgtccatcgaggcagagacccccgatctcgtggcggcttagcttgttggccaaaaatgattctgaataggctttggttgtcagcaaggcggcggtgtaaaacgagagaccatctggctgtgctgcgcgtgctagctgctcttttcttgataacgaaaacttgttgccttgggtgtcctattggtctggacttgtaacttccttctatcatcacggatcgaaacagagaaatcataccggcagagggtgtcactagttttttcctgttgaactttataatctgtaatccagcggtttgacattttttcttcttccattgtgctatggacatggactcgc

SEQ ID NO: 68209 - protein, 430 aa, Triticum aestivum
  peptide (1)..(430): Ceres Seq. ID no. 13590672
LLLLASPPSGSASSTRTRRLISIRVPSVPRQVSVARFRSPPSPSSMALQYVEAQRQARPDLADWYADLADLYQRKLWHQLTLKLDQFLQIPAAQTGDTLIQLYNNFISDFETKINLLKLAQFAVIASRQYPDKDAAIAFLEGIIAKLRETRELRINEPILHVKMQIAAIHLDKGNHKECKNLLEEGKTTLDGMTDVDPTVHASFYWISSQYHKSLQEFAEFYKNALLYLAYTTVGSLSGSFKLDLAFDLSLAALLGDNIYNFGELLAHPIINSLIGTKVEWVYHMLQAFNTGNLALYQELCGVHNAALSAQPALVQNEQKLLEKINILCLMEIIFSRPSEDRTIPLSVIAKQTKLSTSEVECLLMKSLSVHLIEGIIDEVDSTVHVSWVQPRVLGIPQVKALRERLDSWVGKVHTTLLSIEAETPDLVAA

SEQ ID NO: 68210 - protein, 385 aa, Triticum aestivum
  peptide (1)..(385): Ceres Seq. ID no. 13590673
MALQYVEAQRQARPDLADWYADLADLYQRKLWHQLTLKLDQFLQIPAAQTGDTLIQLYNNFISDFETKINLLKLAQFAVIASRQYPDKDAAIAFLEGIIAKLRETRELRINEPILHVKMQIAAIHLDKGNHKECKNLLEEGKTTLDGMTDVDPTVHASFYWISSQYHKSLQEFAEFYKNALLYLAYTTVGSLSGSFKLDLAFDLSLAALLGDNIYNFGELLAHPIINSLIGTKVEWVYHMLQAFNTGNLALYQELCGVHNAALSAQPALVQNEQKLLEKINILCLMEIIFSRPSEDRTIPLSVIAKQTKLSTSEVECLLMKSLSVHLIEGIIDEVDSTVHVSWVQPRVLGIPQVKALRERLDSWVGKVHTTLLSIEAETPDLVAA

SEQ ID NO: 68211 - protein, 267 aa, Triticum aestivum
  peptide (1)..(267): Ceres Seq. ID no. 13590674
MQIAAIHLDKGNHKECKNLLEEGKTTLDGMTDVDPTVHASFYWISSQYHKSLQEFAEFYKNALLYLAYTTVGSLSGSFKLDLAFDLSLAALLGDNIYNFGELLAHPIINSLIGTKVEWVYHMLQAFNTGNLALYQELCGVHNAALSAQPALVQNEQKLLEKINILCLMEIIFSRPSEDRTIPLSVIAKQTKLSTSEVECLLMKSLSVHLIEGIIDEVDSTVHVSWVQPRVLGIPQVKALRERLDSWVGKVHTTLLSIEAETPDLVAA

SEQ ID NO: 68212 - DNA, 1564 bp, Triticum aestivum
  misc_feature (1)..(1564): Ceres Seq. ID no. 13596004
aaaaacaaacaaaaggcggacccaactccccctcctccaccttccccggagcgcaaatctcccctcccaatccccacccccgtcggtagccgatcgcgtcgacgatgctgggcgccgcgaggagatccggatgcgtgctggggcaactgatgcagaccctccgcccggcggcgtcggcggccacggcggcgaggagctactccgcgaccccgaaggagatgactgtgcgtgaagcattgaattccgcccttgacgaggagatgtctgccgacccttctgttttcttaatgggagaagaggttggagagtaccaaggtgcgtacaagataacaaagggtttgctggacaagtatggtcctgatagggttctcgatacaccaatcacagaggctggttttactggcattggcgttggtgctgcctaccaaggtcttagacctgtagtagagttcatgacatttaacttctcgatgcaggcaattgatcacatcatcaattcagctgccaaatcaaactacatgtcagctggtcagatatccgttcctattgtttttcgaggaccaaatggggcagctgctggagttggtgctcaacactcgcagtgctatgcagcatggtatgcccatgttccaggattgaaggtcctaactccttattctgcagaagatgctcgtggcttgctaaaagcagcaatcagggatccagaccctgtagttttcctggaaaatgaactactctatggtgaatcgtttcctattaaggctgaagtacttgattctagcttcagtgtcccaatcggcaaagctaagatagaacgggaaggaaaagatgttacaattactgcattctctaagatggttgggtatgctcttcaggcggcagagatactgtccaaggagggaatcagtgctgaggtgatcaaccttcggtcaattagaccattggatagagctgctatcaatgcatccgttaggaaaaccaacagattggtaaccgtcgaagaaggctttccacaacatggtgttggtgctgaaatatgcatgtccgtagtggaggacagctttgagtatcttgatgcaccagttgagaggattgccggagctgatgtacctatgccctatgcggcaaaccttgaaagattggcagttccacaggttgaggacatcgtccgtgctgcaaagcgagcttgctacagatcatcatgaatggcggcaaccgcctaagcacaaatgcacgttttgtttatcggccttcttctttgttccttgtccagaaaagatgtactgaatcgcataattgtatcccccaactcttgtgagctaattttgtagatctgcatgcattgttgattccaatctgtcggcggcagtcggatgactgcattcagttcatggttcatcctgaggcgtttgaatcgtgcaacttctggaggtttacatcactgagggatgtctcaataacatgtatgtaactgaattacagacgttcacatgattttgctgtggcttaggccgatctgtaagtgtgatcaatatcgcggagaaaactggaacattgaaatgct

SEQ ID NO: 68213 - protein, 366 aa, Triticum aestivum
  peptide (1)..(366): Ceres Seq. ID no. 13596005
MLGAARRSGCVLGQLMQTLRPAASAATAARSYSATPKEMTVREALNSALDEEMSADPSVFLMGEEVGEYQGAYKITKGLLDKYGPDRVLDTPITEAGFTGIGVGAAYQGLRPVVEFMTFNFSMQAIDHIINSAAKSNYMSAGQISVPIVFRGPNGAAAGVGAQHSQCYAAWYAHVPGLKVLTPYSAEDARGLLKAAIRDPDPVVFLENELLYGESFPIKAEVLDSSFSVPIGKAKIEREGKDVTITAFSKMVGYALQAAEILSKEGISAEVINLRSIRPLDRAAINASVRKTNRLVTVEEGFPQHGVGAEICMSVVEDSFEYLDAPVERIAGADVPMPYAANLERLAVPQVEDIVRAAKRACYRSS

SEQ ID NO: 68214 - protein, 351 aa, Triticum aestivum
  peptide (1)..(351): Ceres Seq. ID no. 13596006
MQTLRPAASAATAARSYSATPKEMTVREALNSALDEEMSADPSVFLMGEEVGEYQGAYKITKGLLDKYGPDRVLDTPITEAGFTGIGVGAAYQGLRPVVEFMTFNFSMQAIDHIINSAAKSNYMSAGQISVPIVFRGPNGAAAGVGAQHSQCYAAWYAHVPGLKVLTPYSAEDARGLLKAAIRDPDPVVFLENELLYGESFPIKAEVLDSSFSVPIGKAKIEREGKDVTITAFSKMVGYALQAAEILSKEGISAEVINLRSIRPLDRAAINASVRKTNRLVTVEEGFPQHGVGAEICMSVVEDSFEYLDAPVERIAGADVPMPYAANLERLAVPQVEDIVRAAKRACYRSS

SEQ ID NO: 68215 - protein, 328 aa, Triticum aestivum
  peptide (1)..(328): Ceres Seq. ID no. 13596007
MTVREALNSALDEEMSADPSVFLMGEEVGEYQGAYKITKGLLDKYGPDRVLDTPITEAGFTGIGVGAAYQGLRPVVEFMTFNFSMQAIDHIINSAAKSNYMSAGQISVPIVFRGPNGAAAGVGAQHSQCYAAWYAHVPGLKVLTPYSAEDARGLLKAAIRDPDPVVFLENELLYGESFPIKAEVLDSSFSVPIGKAKIEREGKDVTITAFSKMVGYALQAAEILSKEGISAEVINLRSIRPLDRAAINASVRKTNRLVTVEEGFPQHGVGAEICMSVVEDSFEYLDAPVERIAGADVPMPYAANLERLAVPQVEDIVRAAKRACYRSS

SEQ ID NO: 68216 - DNA, 605 bp, Triticum aestivum
  misc_feature (1)..(605): Ceres Seq. ID no. 15224958
aggctttgagtccattttgggaccggttcaggggatagatacagcagcaagtccaacaacggtagtagtaacaaagatggaggagtaccaggggcagcacggtcacgccgtcgacgagtacggcgaccccgtggccgggcacggcaaccctgtggcaccctccgccgccggcgcgttcacgggcgccggcgggcagctccagcacggcagggaggagcacaagaccggcgggatactgcaccgctccggcagctccagctccagctcgtcttctgaggacgacggcatgggcgggaggaggaagaagggcgtcaaggagaagctcccgggtggccacaaagacaaccagcagcacatggccgcgggaactggagctggcggggcttatgggcagcacacggccgcgggaactggggccggcggagactacggccagcatgggcacgcaggaatggccggcgccggcgccggcgagaagaagggactcgtggacaagatcaaggagaagctgcccggacagcactgagctgccggccccggctggctgtccgctgcctactagtcctcttgagctaaggctcgagctgaataaaaacaaattgagg

SEQ ID NO: 68217 - protein, 174 aa, Triticum aestivum
  peptide (1)..(174): Ceres Seq. ID no. 15224959
GFESILGPVQGIDTAASPTTVVVTKMEEYQGQHGHAVDEYGDPVAGHGNPVAPSAAGAFTGAGGQLQHGREEHKTGGILHRSGSSSSSSSSEDDGMGGRRKKGVKEKLPGGHKDNQQHMAAGTGAGGAYGQHTAAGTGAGGDYGQHGHAGMAGAGAGEKKGLVDKIKEKLPGQH

SEQ ID NO: 68218 - protein, 149 aa, Triticum aestivum
  peptide (1)..(149): Ceres Seq. ID no. 15224960
MEEYQGQHGHAVDEYGDPVAGHGNPVAPSAAGAFTGAGGQLQHGREEHKTGGILHRSGSSSSSSSSEDDGMGGRRKKGVKEKLPGGHKDNQQHMAAGTGAGGAYGQHTAAGTGAGGDYGQHGHAGMAGAGAGEKKGLVDKIKEKLPGQH

SEQ ID NO: 68219 - DNA, 1335 bp, Triticum aestivum
  misc_feature (1)..(1335): Ceres Seq. ID no. 13654187
aaaaaccgcaacccccaccccaccccaccccaccccacccaccacagcaacgagggcaagcgtgcgtcaacatcagacgactcgtcccggattgtgattcgcggaggcgtttcccggcgcccagatgagctcacggatggccggatcggtcctcctccgccgcgccggcgccggcgccagccgcctcttcgccaccaccccgtctccggcggccagggccgtcctcggtggaggtgagggcgcgtgggtgcggctgatgtccacctccgcggcctcgcaggtcaaggacgaggcggccaaggcggtcaaggcggaggcggccaaggcggtcaaggcggaggcggccaagggcgacggggagaagaaggaggtggccatcagcagctactgggggatcgagcagtcgaagaagctggtgcgcgaggacggcaccgagtggaagtggtcttgcttcaggccatgggagacgtacaccgcggacacgtcgatcgatctgaccaagcaccacgtgcccaacacgatgctcgacaagatcgcctactacaccgtcaagtccctgcgcttccccaccgacatcttcttccagaggaggtatggctgccgcgcaatgatgctggagactgttgccgcagtgccggggatggtgggcggcatgctcctccacctgcgctcgctccggcgcttcgagcagagcggcggctggatccgcgcgctgctggaggaggccgagaacgagcgcatgcacctcatgaccttcatggaggtggcgcagcccaggtggtacgagcgcgccctcgtcatcgccgtccagggcgtcttcttcaacgcctacttcttcggctacctcatctcgcccaagttcgcgcaccgcgtcgtcgggtacctcgaggaggaggccgtccactcctacacggagttcctcaaggacctcgacgacggcaagatcgacaacgtccccgccccggccatcgccatcgactactggcgcctccctgccaacgccaccctcaaggacgtggtcaccgtggtgcgcgccgacgaggctcaccaccgcgacgtcaaccacttcgcatcggacgtgtactaccagggtatgcagctgaaggccaccccggccccgatcggataccactgaggctggccgtgttctgctgaattttgcatcgctactattactactactaccaagcaaatgagtgtttcgttttgaaggcagaggaaatgagagctctttagctgtataggatgttgcaattgttgctcgtttggtaactattccgtactgagaaataagcagtgtgcttgtcagttacgtatctaggatattgttgaacc

SEQ ID NO: 68220 - protein, 336 aa, Triticum aestivum
  peptide (1)..(336): Ceres Seq. ID no. 13654188
MSSRMAGSVLLRRAGAGASRLFATTPSPAARAVLGGGEGAWVRLMSTSAASQVKDEAAKAVKAEAAKAVKAEAAKGDGEKKEVAISSYWGIEQSKKLVREDGTEWKWSCFRPWETYTADTSIDLTKHHVPNTMLDKIAYYTVKSLRFPTDIFFQRRYGCRAMMLETVAAVPGMVGGMLLHLRSLRRFEQSGGWIRALLEEAENERMHLMTFMEVAQPRWYERALVIAVQGVFFNAYFFGYLISPKFAHRVVGYLEEEAVHSYTEFLKDLDDGKIDNVPAPAIAIDYWRLPANATLKDVVTVVRADEAHHRDVNHFASDVYYQGMQLKATPAPIGYH

SEQ ID NO: 68221 - protein, 332 aa, Triticum aestivum
  peptide (1)..(332): Ceres Seq. ID no. 13654189
MAGSVLLRRAGAGASRLFATTPSPAARAVLGGGEGAWVRLMSTSAASQVKDEAAKAVKAEAAKAVKAEAAKGDGEKKEVAISSYWGIEQSKKLVREDGTEWKWSCFRPWETYTADTSIDLTKHHVPNTMLDKIAYYTVKSLRFPTDIFFQRRYGCRAMMLETVAAVPGMVGGMLLHLRSLRRFEQSGGWIRALLEEAENERMHLMTFMEVAQPRWYERALVIAVQGVFFNAYFFGYLISPKFAHRVVGYLEEEAVHSYTEFLKDLDDGKIDNVPAPAIAIDYWRLPANATLKDVVTVVRADEAHHRDVNHFASDVYYQGMQLKATPAPIGYH

SEQ ID NO: 68222 - protein, 292 aa, Triticum aestivum
  peptide (1)..(292): Ceres Seq. ID no. 13654190
MSTSAASQVKDEAAKAVKAEAAKAVKAEAAKGDGEKKEVAISSYWGIEQSKKLVREDGTEWKWSCFRPWETYTADTSIDLTKHHVPNTMLDKIAYYTVKSLRFPTDIFFQRRYGCRAMMLETVAAVPGMVGGMLLHLRSLRRFEQSGGWIRALLEEAENERMHLMTFMEVAQPRWYERALVIAVQGVFFNAYFFGYLISPKFAHRVVGYLEEEAVHSYTEFLKDLDDGKIDNVPAPAIAIDYWRLPANATLKDVVTVVRADEAHHRDVNHFASDVYYQGMQLKATPAPIGYH

SEQ ID NO: 68223 - DNA, 1654 bp, Triticum aestivum
  misc_feature (1)..(1654): Ceres Seq. ID no. 13595961
accaagcaaagctgaatcagaacactccaatgtcaacgccaagaagggtggtcgtcgtcgccggccagagcctaagccacctcatctccatgctggagttcgccgcgatgtgcctccgtcgcggcctcgcggtgaccgtcgccgtcccggacccgtccctcaccgccccggccttccgctccaccatcggccggtacgcctcccggctccccaccctctccgtccactccctccctccccctcccgccctcgacgccgcctccgctgccgcccacccgttcatccgcatgcaggccgcctcccgctcccaggcacctgtcctgcgggacttcctccatagcctccccgacgtccacgcgctcgtggccgacatgctcgccgtctgtgacctcgacgtagccacggagctgggcatcccggggcacctgttcttctccacaggcgccgccagcctctccgtcttcctccaattgcctttgttttgctccgggcgcgccggaaacttgaaagatctcggcgacacgcccgtgtcgttccccggcatgtccccgatgccggcgtctcacttggtcgacgcggtgctcgacagagggacggacctctacgcgactgtgctggacgtattcggtcggatcgcgggtgcgcgcggcattctggtgaataccttcgacgcgctggagggctcagcggtgtcggcgcttagagacgggcgctgcctgcgcggccgcgccacgccgccagtttactgcgtcgggccgttgatcgcggagggggaagaggaggaggaaagacacccatgcctcccgtggctggacgcgcagcccgagcgtagcgtcgtgttcctctgcttcggcagccgatgcacggtgtcgctccagcagatcggtgagatggccaaggggctggagaagtccgggcacaggttcttgtgggtgctgcgcgcgcctcctgccttcgccgcagccggcggcggaccggacgcggcgctgtctcttctcccggaggggttcttggcccggaccgcggacaggggcttcgtggtgactgcgtcctgggtgcctcaggtggaggtgctgcgtcactcatccactggtgcgttcgtaacccactgtggatggaactcgacgctggaggcggtggtcgccggtgtgccaatggtgtgctggccgttggtagccgagcagtggatgaacaaggtgtacattgtccaagatatgaaggttggcgtggaggtgagagggtataagcgcgggggccttgtcagggccgacgatgttgacgcggcggttaggcagatcatggacatggagccggagagacggcgagcactcgaggaacggatcatggcggtaaagaagagcgctcaagcagtatggaaggaagatggctcctcctgtaccgcgttcaccgagtttatgatgcaaacggagtaaccattgtaatcattagcagcaactatccatgaagcaaatggagtgatcattagtttatgaagcaaagggacatcagcagcagatgcttaggtgtgggtaaggatatgtaagttgcacgttgcagcattgcgcaccattgggttgtaattaagcttgaattatatgagtatagtccaatctgttggtccaaaaaaaaaaaaaaaaaagcttatcgataccgt

SEQ ID NO: 68224 - protein, 476 aa, Triticum aestivum
  peptide (1)..(476): Ceres Seq. ID no. 13595962
QAKLNQNTPMSTPRRVVVVAGQSLSHLISMLEFAAMCLRRGLAVTVAVPDPSLTAPAFRSTIGRYASRLPTLSVHSLPPPPALDAASAAAHPFIRMQAASRSQAPVLRDFLHSLPDVHALVADMLAVCDLDVATELGIPGHLFFSTGAASLSVFLQLPLFCSGRAGNLKDLGDTPVSFPGMSPMPASHLVDAVLDRGTDLYATVLDVFGRIAGARGILVNTFDALEGSAVSALRDGRCLRGRATPPVYCVGPLIAEGEEEEERHPCLPWLDAQPERSVVFLCFGSRCTVSLQQIGEMAKGLEKSGHRFLWVLRAPPAFAAAGGGPDAALSLLPEGFLARTADRGFVVTASWVPQVEVLRHSSTGAFVTHCGWNSTLEAVVAGVPMVCWPLVAEQWMNKVYIVQDMKVGVEVRGYKRGGLVRADDVDAAVRQIMDMEPERRRALEERIMAVKKSAQAVWKEDGSSCTAFTEFMMQTE

SEQ ID NO: 68225 - protein, 467 aa, Triticum aestivum
  peptide (1)..(467): Ceres Seq. ID no. 13595963
MSTPRRVVVVAGQSLSHLISMLEFAAMCLRRGLAVTVAVPDPSLTAPAFRSTIGRYASRLPTLSVHSLPPPPALDAASAAAHPFIRMQAASRSQAPVLRDFLHSLPDVHALVADMLAVCDLDVATELGIPGHLFFSTGAASLSVFLQLPLFCSGRAGNLKDLGDTPVSFPGMSPMPASHLVDAVLDRGTDLYATVLDVFGRIAGARGILVNTFDALEGSAVSALRDGRCLRGRATPPVYCVGPLIAEGEEEEERHPCLPWLDAQPERSVVFLCFGSRCTVSLQQIGEMAKGLEKSGHRFLWVLRAPPAFAAAGGGPDAALSLLPEGFLARTADRGFVVTASWVPQVEVLRHSSTGAFVTHCGWNSTLEAVVAGVPMVCWPLVAEQWMNKVYIVQDMKVGVEVRGYKRGGLVRADDVDAAVRQIMDMEPERRRALEERIMAVKKSAQAVWKEDGSSCTAFTEFMMQTE

SEQ ID NO: 68226 - protein, 447 aa, Triticum aestivum
  peptide (1)..(447): Ceres Seq. ID no. 13595964
MLEFAAMCLRRGLAVTVAVPDPSLTAPAFRSTIGRYASRLPTLSVHSLPPPPALDAASAAAHPFIRMQAASRSQAPVLRDFLHSLPDVHALVADMLAVCDLDVATELGIPGHLFFSTGAASLSVFLQLPLFCSGRAGNLKDLGDTPVSFPGMSPMPASHLVDAVLDRGTDLYATVLDVFGRIAGARGILVNTFDALEGSAVSALRDGRCLRGRATPPVYCVGPLIAEGEEEEERHPCLPWLDAQPERSVVFLCFGSRCTVSLQQIGEMAKGLEKSGHRFLWVLRAPPAFAAAGGGPDAALSLLPEGFLARTADRGFVVTASWVPQVEVLRHSSTGAFVTHCGWNSTLEAVVAGVPMVCWPLVAEQWMNKVYIVQDMKVGVEVRGYKRGGLVRADDVDAAVRQIMDMEPERRRALEERIMAVKKSAQAVWKEDGSSCTAFTEFMMQTE

SEQ ID NO: 68227 - DNA, 965 bp, Triticum aestivum
  misc_feature (1)..(965): Ceres Seq. ID no. 13654535
aaaccatcgtcactcacgacagaaacagaaataggaagacgagagaacagaagagccagagacactaaaacgaaatggcatcctcctcttccttccttctcattgctgcacttcttgcgttggtctcatggcaggccactgcttttgatcctagcccactccaggacttttgtgtcgccgacatgaattcaccagtccgtgtcaatgggtttgtttgcaagaacccgttggaggttaatgcagatgacttcttcaaggcggccaacctcgacaagcctagggtgcccaacaaggttggatccaacgtcactttgatcaacgccatgcagattgctggactcaacaccctcggcatctcaattgcacgcatcgactatgctcccttgggtcaaaacccaccacacacgcaccctcgcgccactgagatcctcacggtgctcgaggggacactgtatgttggatttgtcacatccaaccagcccgcccccaacagaaacaagttcctctccaaggtgctcaacaaaggtgatgtgtttgtcttccccgtggggctcatccacttccaattcaaccccaacccccaccagcctgctgttgcaattgccgcgctaagcagccagaacccaggggctatcacaattgccaatgcagtgtttgggtcagacccaccaatatcagatgatgttcttgccaaggcatttcaggtggaaaagaatacaattgactatctccaggctcagttctgggagaacaaccactactaagtcagacctttgttaattagccggaagaccagtgcacaagcgaaggacatggttgagttcctagatatgcatcctaatctataaaataaatggagcatatgtcatgccattgtgtgtctgtaatcagtgaatgtatttctaccttctgaataattgacaatattgtatttatcacactaatatgatctcatttgcttcttt

SEQ ID NO: 68228 - protein, 229 aa, Triticum aestivum
  peptide (1)..(229): Ceres Seq. ID no. 13654536
MASSSSFLLIAALLALVSWQATAFDPSPLQDFCVADMNSPVRVNGFVCKNPLEVNADDFFKAANLDKPRVPNKVGSNVTLINAMQIAGLNTLGISIARIDYAPLGQNPPHTHPRATEILTVLEGTLYVGFVTSNQPAPNRNKFLSKVLNKGDVFVFPVGLIHFQFNPNPHQPAVAIAALSSQNPGAITIANAVFGSDPPISDDVLAKAFQVEKNTIDYLQAQFWENNHY

SEQ ID NO: 68229 - protein, 193 aa, Triticum aestivum
  peptide (1)..(193): Ceres Seq. ID no. 13654537
MNSPVRVNGFVCKNPLEVNADDFFKAANLDKPRVPNKVGSNVTLINAMQIAGLNTLGISIARIDYAPLGQNPPHTHPRATEILTVLEGTLYVGFVTSNQPAPNRNKFLSKVLNKGDVFVFPVGLIHFQFNPNPHQPAVAIAALSSQNPGAITIANAVFGSDPPISDDVLAKAFQVEKNTIDYLQAQFWENNHY

SEQ ID NO: 68230 - protein, 146 aa, Triticum aestivum
  peptide (1)..(146): Ceres Seq. ID no. 13654538
MQIAGLNTLGISIARIDYAPLGQNPPHTHPRATEILTVLEGTLYVGFVTSNQPAPNRNKFLSKVLNKGDVFVFPVGLIHFQFNPNPHQPAVAIAALSSQNPGAITIANAVFGSDPPISDDVLAKAFQVEKNTIDYLQAQFWENNHY

SEQ ID NO: 68231 - DNA, 1723 bp, Triticum aestivum
  misc_feature (1)..(1723): Ceres Seq. ID no. 13595965
ctagccgccgccactgcaccggcgcctcccccgccccactgactggcttcctagggctgccctccgcccgcttcttcaccggcgcgttggtcgcgaccccgccaccccgccaccctcgccagcgctggtccctgcacggacggcacgaacgccgccgccccgtacaagatactgcaccgactccgcagcccgtcctcgtcctagggcagaccccacccccgcggctccgctttcttagcactctcgccgtcgcgccgccgggagccaggcatgacgacgcgtatcgcgcccggcgtgggcgcgaacctcctcgggcagcactcggcggagcgcaaccaggacgccaccacctacgtcggcaacctcgacccgcaggtttccgaggaattactgtgggagttgtttgtccaagcaggccctgttgttaatgtctatgtcccgaaagacagagttacaaatctacaccagggctatgggtttgtagaatttaggagtgaggaagatgcagattatgctattaagattttgaacatgctcaaattgtatggaaagccaataagagtaaacaaggcttcccaagacaagaagagcttggatgtgggtgcgaatctttttattggcaatcttgatccggaagtcgatgagaagcttctctatgacaccttcagtgcatttggtgtgattgtgaccaaccctaagataatgcgggaccctgaaactggaaattctcgagggtttggctttgtgagctatgactcctttgaatcatctgatcaagctatagaggccatgaacaaccagcatttatgtaatcggccaatcactgtctcatatgcttacaagaaagacacgaaaggagagcgccatggcacaccagcagagaggttgcttgcggcgaacaacccaggatctcagaagcataggccacacacaatgtttgcaactgctccgccaacccaagggcttcaaaacggtggtgttggtgcacctgtgccacggccttttgccaatgggaatgtcccaggacagatgcaacatgtcagaccgccgccgccacctgttggtcaataccctcccatgcagatgcatggacagcctgcctggcctggtcctccacagaatatgcaacaagtaccacctccgatgcaacagcagcttcaatacaggcttccagggatgcccccgccgccgcaaaacatgatgcccccaccgcaaaacatgatgccgccacctcatcacatggccaggccgccgccgccacctcccaatatgcaagctccacctatgtggaggccacccccacccccacaacaaggtggtggaatgccgccacctccaatgtccatgccacctcctccaccgccaccttctggttaaaaatacaaatgggtgtcttccatgggttaatttggcgcgcagcagttgtagaccaagggtgttaaaagtctttcatatattgtcatgtaacttgcagcactaggagaatatcagaattgagagaattagcggacggtgatacaaaatgcgtggcttttgtgattgcatgtacggtacctgccttgtgggtgctgctgctgtgtgctctgcttaggacaattatggaccgtgatctgcgctatctctttacattgttattactgacagaatcgtgttttaaacaggcccctggtgattgacagttgtcgcgcataaaaaaaaaaaaaaaaaagcttatcgataccgt

SEQ ID NO: 68232 - protein, 368 aa, Triticum aestivum
  peptide (1)..(368): Ceres Seq. ID no. 13595966
MTTRIAPGVGANLLGQHSAERNQDATTYVGNLDPQVSEELLWELFVQAGPVVNVYVPKDRVTNLHQGYGFVEFRSEEDADYAIKILNMLKLYGKPIRVNKASQDKKSLDVGANLFIGNLDPEVDEKLLYDTFSAFGVIVTNPKIMRDPETGNSRGFGFVSYDSFESSDQAIEAMNNQHLCNRPITVSYAYKKDTKGERHGTPAERLLAANNPGSQKHRPHTMFATAPPTQGLQNGGVGAPVPRPFANGNVPGQMQHVRPPPPPVGQYPPMQMHGQPAWPGPPQNMQQVPPPMQQQLQYRLPGMPPPPQNMMPPPQNMMPPPHHMARPPPPPPNMQAPPMWRPPPPPQQGGGMPPPPMSMPPPPPPPSG

SEQ ID NO: 68233 - protein, 281 aa, Triticum aestivum
  peptide (1)..(281): Ceres Seq. ID no. 13595967
MLKLYGKPIRVNKASQDKKSLDVGANLFIGNLDPEVDEKLLYDTFSAFGVIVTNPKIMRDPETGNSRGFGFVSYDSFESSDQAIEAMNNQHLCNRPITVSYAYKKDTKGERHGTPAERLLAANNPGSQKHRPHTMFATAPPTQGLQNGGVGAPVPRPFANGNVPGQMQHVRPPPPPVGQYPPMQMHGQPAWPGPPQNMQQVPPPMQQQLQYRLPGMPPPPQNMMPPPQNMMPPPHHMARPPPPPPNMQAPPMWRPPPPPQQGGGMPPPPMSMPPPPPPPSG

SEQ ID NO: 68234 - protein, 224 aa, Triticum aestivum
  peptide (1)..(224): Ceres Seq. ID no. 13595968
MRDPETGNSRGFGFVSYDSFESSDQAIEAMNNQHLCNRPITVSYAYKKDTKGERHGTPAERLLAANNPGSQKHRPHTMFATAPPTQGLQNGGVGAPVPRPFANGNVPGQMQHVRPPPPPVGQYPPMQMHGQPAWPGPPQNMQQVPPPMQQQLQYRLPGMPPPPQNMMPPPQNMMPPPHHMARPPPPPPNMQAPPMWRPPPPPQQGGGMPPPPMSMPPPPPPPSG

SEQ ID NO: 68235 - DNA, 1250 bp, Triticum aestivum
  misc_feature (1)..(1250): Ceres Seq. ID no. 13654191
ctcccccctccacgtctcgctagaaacgcacgcacacgcgtatagtagcagtgtagcaccaacgggcagtcgggcactagctagctccttcgagtccgatcgatcggatcggcatgacgctggatgccctgtgcgcggccggcgacgtcctcgtctacgacaccttcaacgcggcggcggccgtgagtgccgcgccggccgagagcagcctcctcttctgcgacgtcgccggagcggcatggatggcggggtctgctgccgctgaggcgccggctgtgaccatagtgccggtggaagaaggggagaaggcgcaggggaggaggaagcggcggcggcgggcgaggagctgcaagaatcgcgaggacgccgagagccagcggatgacccacattgccgtcgagcgcaaccgccgccgccagatgaacgagtacctcgccgtgctccgctccctcatgccggagtcctacgcccaccggggcgaccaagcatccattgtcggcggcgccatcgatttcgtcaaggagctcgagcagctgctgcagtccctggaggcgcagaagcgcacgctcctcgcccagccgcagcaggagcacaagccgctgcccatccgtgacgcgatgccatcgtcgagcaaaacggtcacggccgcggcgacaactacgacgagcagcggcagcggcgagggcaagcaggcgtcggcgatgcgcgaggggatgggtccgccgttcgcggggttcttcacgtacccacagtacgtgtgtcgcctcccgccgcgggacgacgccgacgaccgcgccggggcggcggacatcgaggtgacgctggtggagacgcacgccaacgtccgggtgatggcgccgcggcggccggggcagctgctcaggatggtcgccgggatggaggcgctcaggctcaccgtgctgcacctcaacgtcaccacgctcggctcgctcgcgctctactccctcagcgtcaaggtggaggaagggtgcgggccgacgacggcggacgacatcgccgcggcggtgcaccatgtgctctgcctcgtcgacgccgaggcgacgtcgcagcggctgctcgccggtgggcagcaggagattttaagttagctaggtggaccggggcaacgccggcaagcttgccgtctgaggcaggggtagtaatttgtaaagtgtagtggacctctacgaggctttggagcatggttaataagagcatgtgcagccggactttgcaaatccgcacgcctg

SEQ ID NO: 68236 - protein, 331 aa, Triticum aestivum
  peptide (1)..(331): Ceres Seq. ID no. 13654192
MTLDALCAAGDVLVYDTFNAAAAVSAAPAESSLLFCDVAGAAWMAGSAAAEAPAVTIVPVEEGEKAQGRRKRRRRARSCKNREDAESQRMTHIAVERNRRRQMNEYLAVLRSLMPESYAHRGDQASIVGGAIDFVKELEQLLQSLEAQKRTLLAQPQQEHKPLPIRDAMPSSSKTVTAAATTTTSSGSGEGKQASAMREGMGPPFAGFFTYPQYVCRLPPRDDADDRAGAADIEVTLVETHANVRVMAPRRPGQLLRMVAGMEALRLTVLHLNVTTLGSLALYSLSVKVEEGCGPTTADDIAAAVHHVLCLVDAEATSQRLLAGGQQEILS

SEQ ID NO: 68237 - protein, 288 aa, Triticum aestivum
  peptide (1)..(288): Ceres Seq. ID no. 13654193
MAGSAAAEAPAVTIVPVEEGEKAQGRRKRRRRARSCKNREDAESQRMTHIAVERNRRRQMNEYLAVLRSLMPESYAHRGDQASIVGGAIDFVKELEQLLQSLEAQKRTLLAQPQQEHKPLPIRDAMPSSSKTVTAAATTTTSSGSGEGKQASAMREGMGPPFAGFFTYPQYVCRLPPRDDADDRAGAADIEVTLVETHANVRVMAPRRPGQLLRMVAGMEALRLTVLHLNVTTLGSLALYSLSVKVEEGCGPTTADDIAAAVHHVLCLVDAEATSQRLLAGGQQEILS

SEQ ID NO: 68238 - protein, 242 aa, Triticum aestivum
  peptide (1)..(242): Ceres Seq. ID no. 13654194
MTHIAVERNRRRQMNEYLAVLRSLMPESYAHRGDQASIVGGAIDFVKELEQLLQSLEAQKRTLLAQPQQEHKPLPIRDAMPSSSKTVTAAATTTTSSGSGEGKQASAMREGMGPPFAGFFTYPQYVCRLPPRDDADDRAGAADIEVTLVETHANVRVMAPRRPGQLLRMVAGMEALRLTVLHLNVTTLGSLALYSLSVKVEEGCGPTTADDIAAAVHHVLCLVDAEATSQRLLAGGQQEILS

SEQ ID NO: 68239 - DNA, 2304 bp, Triticum aestivum
  misc_feature (1)..(2304): Ceres Seq. ID no. 12465083
ggatctcacctctgccccttttctccatcctccgactcgccgccgccgccgggagccgacccaacaagcccgagcgccagccatggccatcggatctctcctcgcctcgcggctggccaggtccggccacgccctcgccacgcgcgccatcgctcaggctccccggacccacaatcatcatcacgcgacgtctcccctgctctccaggctcggagccgtggcccgcgctttcagctcaaggcccgccgccgccgatgtcatcgggatcgatttgggcacgacgaactcatgtgtctccgtcatggaaggaaagacaccacgggtgattgagaatgctgaaggtgcgaggacaacgccctccattgttgccacaaacagcaaaggcgagatcttgattggcatcactgccagtcgacaggcagtgacaaatgccgagaacacagttcgtgggtccaagcgcctgattggtagagcttttgatgacccccaaacacagaaggaaatgaagatggtgccttacaagattgtcaggggaacaaatggtgatgcctgggtggagatggctgggaagtcatactccccgagtcagattggtgcgtttgttcttaccaagatgaaggaaactgcagaggcttaccttggcaagtcggtctccaaggctgttattacagtcccagcttatttcaatgatgcccagcgtcaggccaccaaggatgctggtaggattgctgggttggaggtgatgaggattatcaatgagcccactgctgcagctctgtcgtatggaatgaacaacaaggagggcctgattgctgtatttgacttgggcggtggaacatttgatgtatcaatccttgagatttctaatggcgtttttgaggtcaaggcgaccaatggagatactttccttggtggtgaggactttgatgctacattgctcaactacctggttagtgaatataagaactctgacaacattgatctgagcaaggacaagttggccctgcaaaggctcagggaagctgctgagaaggcgaaggttgagctttcctcaactccacagactgaaatcaatctccccttcatcacagcagatgcctctggtgcgaagcatttcaacattaccttgaccagatcaaagtttgagtctcttgtgggcaacctcattgagagaactcgcatcccatgtacaaactgcctcaaggatgctggtgtttctgcaaaggagattgatgaggttctactggttggtggtatgacaagggtgccaaaggtccaggatattgtttctcagatattcggcaagtcgccaagcaagggtgtcaatcctgatgaggctgttgccatgggagctgccattcagggtggcattttgaggggtgatgtgaaggagctcttgctgctggatgtcacgcccctttcccttggtattgagactcttggaggcatcttcacaaggctaatcaacaggaacactacaattccaaccaagaagagccagaccttctccactgctgcagataaccagacgcaggttggaatcaaggtgcttcagggtgagagggagatggccacagataacaagcttcttggtgaattccagcttgaaggcattccaccggccccgaggggtatgccacagattgaggtcacttttgacattgatgccaatggtattgtcaaggtgtcagcaaaggacaagtccactggcaaagagcaggatatcaccatcaaatcttcaggtggtttgtctgacagtgacatcgagaagatggtgaaggaggcggagctaaattctcagagggatcaggaaaggaagtcgttgattgacctcaggaactctgcagataccaccatctacagcattgagaagagcgtcagcgagtacaaagacaaggtccctgctgaagttgtcacggagatccagtctgctgtctctgatctgagagcagcaatggctggcgacgattcggacgccatcaagcagaagctggaggcggcgaacaaggcagtctcaaagattggacagcacatgcagggtggtggcggcgctgccgccggcgacagcggcagcagtggtggtggcgaccagactccggaagctgaataccaggaccccaaggaggccaagatgtagatttgttctgcatcaggtttcttctacttttttgtgtacccagtttaggaagttaatatctttatcctacctccgtctgcttaggtttctaagagggctacgacgatacctgtaacattttggcaattgttcgaattgcggataaattgtgagaggagcaaactcat

SEQ ID NO: 68240 - protein, 711 aa, Triticum aestivum
  peptide (1)..(711): Ceres Seq. ID no. 12465084
DLTSAPFLHPPTRRRRREPTQQARAPAMAIGSLLASRLARSGHALATRAIAQAPRTHNHHHATSPLLSRLGAVARAFSSRPAAADVIGIDLGTTNSCVSVMEGKTPRVIENAEGARTTPSIVATNSKGEILIGITASRQAVTNAENTVRGSKRLIGRAFDDPQTQKEMKMVPYKIVRGTNGDAWVEMAGKSYSPSQIGAFVLTKMKETAEAYLGKSVSKAVITVPAYFNDAQRQATKDAGRIAGLEVMRIINEPTAAALSYGMNNKEGLIAVFDLGGGTFDVSILEISNGVFEVKATNGDTFLGGEDFDATLLNYLVSEYKNSDNIDLSKDKLALQRLREAAEKAKVELSSTPQTEINLPFITADASGAKHFNITLTRSKFESLVGNLIERTRIPCTNCLKDAGVSAKEIDEVLLVGGMTRVPKVQDIVSQIFGKSPSKGVNPDEAVAMGAAIQGGILRGDVKELLLLDVTPLSLGIETLGGIFTRLINRNTTIPTKKSQTFSTAADNQTQVGIKVLQGEREMATDNKLLGEFQLEGIPPAPRGMPQIEVTFDIDANGIVKVSAKDKSTGKEQDITIKSSGGLSDSDIEKMVKEAELNSQRDQERKSLIDLRNSADTTIYSIEKSVSEYKDKVPAEVVTEIQSAVSDLRAAMAGDDSDAIKQKLEAANKAVSKIGQHMQGGGGAAAGDSGSSGGGDQTPEAEYQDPKEAKM

SEQ ID NO: 68241 - protein, 684 aa, Triticum aestivum
  peptide (1)..(684): Ceres Seq. ID no. 12465085
MAIGSLLASRLARSGHALATRAIAQAPRTHNHHHATSPLLSRLGAVARAFSSRPAAADVIGIDLGTTNSCVSVMEGKTPRVIENAEGARTTPSIVATNSKGEILIGITASRQAVTNAENTVRGSKRLIGRAFDDPQTQKEMKMVPYKIVRGTNGDAWVEMAGKSYSPSQIGAFVLTKMKETAEAYLGKSVSKAVITVPAYFNDAQRQATKDAGRIAGLEVMRIINEPTAAALSYGMNNKEGLIAVFDLGGGTFDVSILEISNGVFEVKATNGDTFLGGEDFDATLLNYLVSEYKNSDNIDLSKDKLALQRLREAAEKAKVELSSTPQTEINLPFITADASGAKHFNITLTRSKFESLVGNLIERTRIPCTNCLKDAGVSAKEIDEVLLVGGMTRVPKVQDIVSQIFGKSPSKGVNPDEAVAMGAAIQGGILRGDVKELLLLDVTPLSLGIETLGGIFTRLINRNTTIPTKKSQTFSTAADNQTQVGIKVLQGEREMATDNKLLGEFQLEGIPPAPRGMPQIEVTFDIDANGIVKVSAKDKSTGKEQDITIKSSGGLSDSDIEKMVKEAELNSQRDQERKSLIDLRNSADTTIYSIEKSVSEYKDKVPAEVVTEIQSAVSDLRAAMAGDDSDAIKQKLEAANKAVSKIGQHMQGGGGAAAGDSGSSGGGDQTPEAEYQDPKEAKM

SEQ ID NO: 68242 - protein, 611 aa, Triticum aestivum
  peptide (1)..(611): Ceres Seq. ID no. 12465086
MEGKTPRVIENAEGARTTPSIVATNSKGEILIGITASRQAVTNAENTVRGSKRLIGRAFDDPQTQKEMKMVPYKIVRGTNGDAWVEMAGKSYSPSQIGAFVLTKMKETAEAYLGKSVSKAVITVPAYFNDAQRQATKDAGRIAGLEVMRIINEPTAAALSYGMNNKEGLIAVFDLGGGTFDVSILEISNGVFEVKATNGDTFLGGEDFDATLLNYLVSEYKNSDNIDLSKDKLALQRLREAAEKAKVELSSTPQTEINLPFITADASGAKHFNITLTRSKFESLVGNLIERTRIPCTNCLKDAGVSAKEIDEVLLVGGMTRVPKVQDIVSQIFGKSPSKGVNPDEAVAMGAAIQGGILRGDVKELLLLDVTPLSLGIETLGGIFTRLINRNTTIPTKKSQTFSTAADNQTQVGIKVLQGEREMATDNKLLGEFQLEGIPPAPRGMPQIEVTFDIDANGIVKVSAKDKSTGKEQDITIKSSGGLSDSDIEKMVKEAELNSQRDQERKSLIDLRNSADTTIYSIEKSVSEYKDKVPAEVVTEIQSAVSDLRAAMAGDDSDAIKQKLEAANKAVSKIGQHMQGGGGAAAGDSGSSGGGDQTPEAEYQDPKEAKM

SEQ ID NO: 68243 - DNA, 851 bp, Triticum aestivum
  misc_feature (1)..(851): Ceres Seq. ID no. 12613614
acaacttgggtcccccggcggtttcctccttcctctcggacaaaaccaaacgaaccaagatacaaacttcttcttcttcttcttcttcctccggcggatctcatcttcagatcacatccaagcagcgcaagcaggagacgagacgcgctccctcgctcgctccaccgtccacaaccaaaccaggcaaagggcagcgatgacgttcgacaaggtggaggagctgcggccgggcacctacggccacaacctccagctccgggtgctcagctccaagcccgtcgtcctccacaggccgcagggcggcagggccggcggcaacatgcgcatcgccgagtgcatcgtcggcgacgacaccggcgtcgtcgtattcaccgcccgcaacgagcaagtggacgtcatgaagcccggggctgtcgtggaggcgaggaaggcgagggtggacatgtacaaggggtcgatgcgcctggccgtggacaagtgggggacgctcaaggccgccgagagccctgcggacttcaaggtgaaggaggacaacaatgtgtccttggtcgagtttgagctcatcactgtgatgcagtgattgaagagggctcctcctcccccttgcctaggaggaggaggaggaggaggaggcagaggaggctcagcagctgttaggctgagcacaaagcaataagtcggccaatcatggctcatgttcttcaccccctcccccctctctctgtttactctttatttgctgaaagttttgctagtcctgctaccttggattaattgtcgttagtaataccatatatgtttgtgaggagttacaaaaaaaaaaaaaaaaaagcttatcgataccgtcgacc

SEQ ID NO: 68244 - protein, 192 aa, Triticum aestivum
  peptide (1)..(192): Ceres Seq. ID no. 12613615
QLGSPGGFLLPLGQNQTNQDTNFFFFFFFLRRISSSDHIQAAQAGDETRSLARSTVHNQTRQRAAMTFDKVEELRPGTYGHNLQLRVLSSKPVVLHRPQGGRAGGNMRIAECIVGDDTGVVVFTARNEQVDVMKPGAVVEARKARVDMYKGSMRLAVDKWGTLKAAESPADFKVKEDNNVSLVEFELITVMQ

SEQ ID NO: 68245 - protein, 185 aa, Triticum aestivum
  peptide (1)..(185): Ceres Seq. ID no. 12613616
TTWVPRRFPPSSRTKPNEPRYKLLLLLLLPPADLIFRSHPSSASRRRDALPRSLHRPQPNQAKGSDDVRQGGGAAAGHLRPQPPAPGAQLQARRPPQAAGRQGRRQHAHRRVHRRRRHRRRRIHRPQRASGRHEARGCRGGEEGEGGHVQGVDAPGRGQVGDAQGRREPCGLQGEGGQQCVLGRV

SEQ ID NO: 68246 - protein, 127 aa, Triticum aestivum
  peptide (1)..(127): Ceres Seq. ID no. 12613617
MTFDKVEELRPGTYGHNLQLRVLSSKPVVLHRPQGGRAGGNMRIAECIVGDDTGVVVFTARNEQVDVMKPGAVVEARKARVDMYKGSMRLAVDKWGTLKAAESPADFKVKEDNNVSLVEFELITVMQ

SEQ ID NO: 68247 - DNA, 732 bp, Triticum aestivum
  misc_feature (1)..(732): Ceres Seq. ID no. 12613751
atctacttgtagtacgtgttctttcccctccaccgcggccagagaaggaggagcatcgatccatggcgcgcttcttcggccgcctgtgggacagagctcaaggcaagctggatgttgtgaggatatgtgagaaggtgttcgacgaactggccgtcctcaacgccgagaagaacgccaagctcctggacgtcaaaaatctccacgtcgccaccctcatggtttacaactccatcaacaagcaactggtgggacctcacaaggaccctccatgcatgcaggtcgtcaaggagaaagcggagggcttccgcgacaaggggataacgcagcaggagttccgggagctgatcatggagtgggtgaggatcgacctccgcctcgtcctcgccaacaaggccgcggtggccgtcctggcggcaccgctgctcgccgtcacggccaagaacgccggcaggcaggtgccgaggatgagggacgcggtggataaggtgcccacgccgctgctcttcgtcgtcttctccgccgggctcatgctcctgcaggacatcagggcaggcaagcagtgaacacctgaaccggacgcggtgagcaatgcgcgatgtatttaagatgagtgtgcacctttactggaaatttgtatgcaggcagctcggtgtgaaaaatttgtagccaaagaaagtggtaaagggccgtacgtaatggcattcaatcttaatatggttatcaggcggctcc

SEQ ID NO: 68248 - protein, 186 aa, Triticum aestivum
  peptide (1)..(186): Ceres Seq. ID no. 12613752
LLVVRVLSPPPRPEKEEHRSMARFFGRLWDRAQGKLDVVRICEKVFDELAVLNAEKNAKLLDVKNLHVATLMVYNSINKQLVGPHKDPPCMQVVKEKAEGFRDKGITQQEFRELIMEWVRIDLRLVLANKAAVAVLAAPLLAVTAKNAGRQVPRMRDAVDKVPTPLLFVVFSAGLMLLQDIRAGKQ

SEQ ID NO: 68249 - protein, 166 aa, Triticum aestivum
  peptide (1)..(166): Ceres Seq. ID no. 12613753
MARFFGRLWDRAQGKLDVVRICEKVFDELAVLNAEKNAKLLDVKNLHVATLMVYNSINKQLVGPHKDPPCMQVVKEKAEGFRDKGITQQEFRELIMEWVRIDLRLVLANKAAVAVLAAPLLAVTAKNAGRQVPRMRDAVDKVPTPLLFVVFSAGLMLLQDIRAGKQ

SEQ ID NO: 68250 - protein, 115 aa, Triticum aestivum
  peptide (1)..(115): Ceres Seq. ID no. 12613754
MVYNSINKQLVGPHKDPPCMQVVKEKAEGFRDKGITQQEFRELIMEWVRIDLRLVLANKAAVAVLAAPLLAVTAKNAGRQVPRMRDAVDKVPTPLLFVVFSAGLMLLQDIRAGKQ

SEQ ID NO: 68251 - DNA, 781 bp, Triticum aestivum
  misc_feature (1)..(781): Ceres Seq. ID no. 13582876
aaaaaaaactcgctattctcaaaaaagaaaaaagaaaaactcgctgttcttgctctcggccggctgtactgctgctgctccttgagctctccgccctctcccggtctccccaatcgccccgccgccgcggcctccttgctgcctgcgtccgcttccgaccttccgtgctccgtcttctcctcgtcttccccgctcccacctccgcgctgccctcgaggatggaagagccgctgcggtacaagttcgggccgtataagattgacgcgagggaggtcttccacgccacgcccctcacctacgccatggtcaacctccgccccctcctccctggtcatgtgctcgtgtgccccaaacgtgaggtgaaacgatttgctgatctaagttctgatgagactagtgatttgtgggtaactgcaaaagaagttggtgcaaagctcgagcagtaccacaaagcttcttccatcacattcgcgattcaggatggtcctcaggctggccaaacagttgcccatgtccacatccacgtcatccccaggaagaaaggagattttgagaaaaacgatgaaatatatgatgcgattgacgtgaaagagaaggaaatgaaggagaagcttgacctggacgtcgaaagaaaagatagaagcatggaagaaatggctcatgaggccaccgagtaccgcgctcttttctcctagccagatagatgtatttctgatgaactctctaattatcatccgctgccactcttgcctaaaataagccttgtgactgcttgtcctcg

SEQ ID NO: 68252 - protein, 230 aa, Triticum aestivum
  peptide (1)..(230): Ceres Seq. ID no. 13582877
KKLAILKKEKRKTRCSCSRPAVLLLLLELSALSRSPQSPRRRGLLAACVRFRPSVLRLLLVFPAPTSALPSRMEEPLRYKFGPYKIDAREVFHATPLTYAMVNLRPLLPGHVLVCPKREVKRFADLSSDETSDLWVTAKEVGAKLEQYHKASSITFAIQDGPQAGQTVAHVHIHVIPRKKGDFEKNDEIYDAIDVKEKEMKEKLDLDVERKDRSMEEMAHEATEYRALFS

SEQ ID NO: 68253 - protein, 158 aa, Triticum aestivum
  peptide (1)..(158): Ceres Seq. ID no. 13582878
MEEPLRYKFGPYKIDAREVFHATPLTYAMVNLRPLLPGHVLVCPKREVKRFADLSSDETSDLWVTAKEVGAKLEQYHKASSITFAIQDGPQAGQTVAHVHIHVIPRKKGDFEKNDEIYDAIDVKEKEMKEKLDLDVERKDRSMEEMAHEATEYRALFS

SEQ ID NO: 68254 - protein, 130 aa, Triticum aestivum
  peptide (1)..(130): Ceres Seq. ID no. 13582879
MVNLRPLLPGHVLVCPKREVKRFADLSSDETSDLWVTAKEVGAKLEQYHKASSITFAIQDGPQAGQTVAHVHIHVIPRKKGDFEKNDEIYDAIDVKEKEMKEKLDLDVERKDRSMEEMAHEATEYRALFS

SEQ ID NO: 68255 - DNA, 810 bp, Triticum aestivum
  misc_feature (1)..(810): Ceres Seq. ID no. 13582830
cttctttctccttccctgcccaccagtccaccgccgccgcctctccccccatccccctctcccacctcctccggcgtcggccagcaagcagccatggcgagccccgcgcgcatcgacgtggataagctgagcgtggagcagctcaaggcgctcaaggagcagaccgatctggaggtcaatctcctccaggacagcctatccaagatccgcaccgccgccacccgcctcgagaacgccacggccgccctccacgagctctccctccgcccccaagggaagaagctgctcgtgccgctcacggcgtccctctacgtgcccggcacgctcgacgacgccgagaaggtcctcgtcgacgttggcaccggctactacattgagaaaactatgactcaaggaaaagaatactgtgaaaggaaaattaatttgctgaagtccaacttcgatgaactacttgagatggcgaccaaaaagaagagcatagcagatgaaatgggcatgtttctgcaagccaagctgaggcaggcatcaccgagctcgagttcgtgagagcggaatgcgcgccctgtcccttgctttgttgccttgttggagcgccggggtggttcgctcactcgcagccctcagggaacataggaggttctttagctgttttggccgtgtgtgcaaggttctctgagatgatttactgaaacagcctgctccatcgtcagacttcatcctcgagtaatttggaattcggtatcaaacgtgtgtgtcttggatgcacaatctgctttaatggctttgacaatcaattatgagtttgttgct

SEQ ID NO: 68256 - protein, 181 aa, Triticum aestivum
  peptide (1)..(181): Ceres Seq. ID no. 13582831
LLSPSLPTSPPPPPLPPSPSPTSSGVGQQAAMASPARIDVDKLSVEQLKALKEQTDLEVNLLQDSLSKIRTAATRLENATAALHELSLRPQGKKLLVPLTASLYVPGTLDDAEKVLVDVGTGYYIEKTMTQGKEYCERKINLLKSNFDELLEMATKKKSIADEMGMFLQAKLRQASPSSSS

SEQ ID NO: 68257 - protein, 150 aa, Triticum aestivum
  peptide (1)..(150): Ceres Seq. ID no. 13582832
MASPARIDVDKLSVEQLKALKEQTDLEVNLLQDSLSKIRTAATRLENATAALHELSLRPQGKKLLVPLTASLYVPGTLDDAEKVLVDVGTGYYIEKTMTQGKEYCERKINLLKSNFDELLEMATKKKSIADEMGMFLQAKLRQASPSSSS

SEQ ID NO: 68258 - DNA, 1030 bp, Triticum aestivum
  misc_feature (1)..(1030): Ceres Seq. ID no. 13596009
gaataaaagtctacttcccccggttccgttccgttccgtttctcaggttctctttcctcacaccatcgacacgaatcgaccctgagtccccaatcgaatctcactgagtcccgagtcggtcgaaccgaatccctctcatccccgttgatcgcccacgcccaacattcggggaggaggaatagcggaggaggaggccaaggaccgccgccgccgccgccgccatggccgcgctgccggtgatgaagctggggacgctgctcctgcggacgctgtccaagcctatcgctaaccgcctcaagagccaggccgccgtccaccccaagtttcgcgacttcatcatcagcatcgcccagacaaaccatcgtatcactacaaggatacaaaggcgcatttatgggcatgctactaatgtggctatcagacctttagatgaggagaaggcagtacaagttgctacagatctcattggagaaggcttcatcttttcggttgctgtcgctgctttaattttcgaggtgcaaagaagtgctaggtcagaggctagaaaggaggaagctcgtaaacaggaacttgaggaactgagacaaaaggaagagattttagctaaagatttagaagatctcaagctgaagctggctgaacttgagcgcctcgccaaaggccggggcctttctggaatattgaacttcaaaggtgtcaatgcagcagatagcagcaaggaagcaacacctgcttgatttatcgattcaactttggtcaggagaaagggggatgttgtgttgttgagtttatgcacaaagcacctcacaattggctaattggtttcttctgtcacagttctttgatattatagccatgcccattctttgggtgaatggatcaaattttatggtggttgatccattagacatcctgaaataatagagtgattgtgtgaggaaaaagcccgggtacttttgggtaagtgaccgcagaacaagatataaagatgaatgtattcttactttgggcctttggctcgctgtytaac

SEQ ID NO: 68259 - protein, 171 aa, Triticum aestivum
  peptide (1)..(171): Ceres Seq. ID no. 15221738
MAALPVMKLGTLLLRTLSKPIANRLKSQAAVHPKFRDFIISIAQTNHRITTRIQRRIYGHATNVAIRPLDEEKAVQVATDLIGEGFIFSVAVAALIFEVQRSARSEARKEEARKQELEELRQKEEILAKDLEDLKLKLAELERLAKGRGLSGILNFKGVNAADSSKEATPA

SEQ ID NO: 68260 - protein, 165 aa, Triticum aestivum
  peptide (1)..(165): Ceres Seq. ID no. 15221739
MKLGTLLLRTLSKPIANRLKSQAAVHPKFRDFIISIAQTNHRITTRIQRRIYGHATNVAIRPLDEEKAVQVATDLIGEGFIFSVAVAALIFEVQRSARSEARKEEARKQELEELRQKEEILAKDLEDLKLKLAELERLAKGRGLSGILNFKGVNAADSSKEATPA

SEQ ID NO: 68261 - DNA, 1072 bp, Triticum aestivum
  misc_feature (1)..(1072): Ceres Seq. ID no. 13585188
agaacatcctaatcgaaaagcaaaagctactcaagaattgacccaacccacccggccttctcctaccaaccaagcagctccaaacaccaagaaatccacagaaaccgagatctctctctccccgacccgacggatccctggttgttgttgtagctgggcaatggcgaccgacgcgatcctggagaccatcaagcctcggcggagcccgtggctggaggacctcccagtgacgaatgggggcgcagcgaagggcggcaaggtcaacctgtccgggatgcgccggcgcgtgtcgtcgtccttgtcattgagcctccagccgctgtcctcgtcttcgtccgcggcgttccggcgcgcgcggtcgatgccgtcgatcaaggcgctggcggcggcgggcgcggtgcggcagtggtgggagtgggggctcggttgggtgatgacccggaagccctccttcgcgcgtggcctcgagatgagcgatgacgaggccgccctgctcgggtgccactgccgcggcacgctccggcacgtcttctacaaggcacgcgccgaggtgcgccgcctccttggccgcgacggccgcccgctcggaggcgtcgccgcgcaggacttcaggtacgactccgtcagctacgctcagaacttcgacaacggcgacgtcgacgccagatgctagctgctgcgccggcgcacgcatggattcggacgccgccaatcgtgccgaaagtgaaggtatacatggctcgattaatggctacgaactatatcttcttggacgtggcaataaaccgaattgtttgcaagacactagcagcatatagcacggcgtgtgtgtgtgtgtgttttggcggaacgatcgcagatgatccagcagcgagtgatgcgcactgttcagggaccagatgtatatttcttccactcttctttcttgtgtttttccgagtcttttcttggatacatccgtccctacaatgtaatcgagcccgtggatcgggatggggatcctgagctggctaaatgtacatgttgctgtaacacattgcaaaagcaaatcaataagcattcctggaacctg

SEQ ID NO: 68262 - protein, 223 aa, Triticum aestivum
  peptide (1)..(223): Ceres Seq. ID no. 13585189
EHPNRKAKATQELTQPTRPSPTNQAAPNTKKSTETEISLSPTRRIPGCCCSWAMATDAILETIKPRRSPWLEDLPVTNGGAAKGGKVNLSGMRRRVSSSLSLSLQPLSSSSSAAFRRARSMPSIKALAAAGAVRQWWEWGLGWVMTRKPSFARGLEMSDDEAALLGCHCRGTLRHVFYKARAEVRRLLGRDGRPLGGVAAQDFRYDSVSYAQNFDNGDVDARC

SEQ ID NO: 68263 - protein, 170 aa, Triticum aestivum
  peptide (1)..(170): Ceres Seq. ID no. 13585190
MATDAILETIKPRRSPWLEDLPVTNGGAAKGGKVNLSGMRRRVSSSLSLSLQPLSSSSSAAFRRARSMPSIKALAAAGAVRQWWEWGLGWVMTRKPSFARGLEMSDDEAALLGCHCRGTLRHVFYKARAEVRRLLGRDGRPLGGVAAQDFRYDSVSYAQNFDNGDVDARC

SEQ ID NO: 68264 - protein, 132 aa, Triticum aestivum
  peptide (1)..(132): Ceres Seq. ID no. 13585191
MRRRVSSSLSLSLQPLSSSSSAAFRRARSMPSIKALAAAGAVRQWWEWGLGWVMTRKPSFARGLEMSDDEAALLGCHCRGTLRHVFYKARAEVRRLLGRDGRPLGGVAAQDFRYDSVSYAQNFDNGDVDARC

SEQ ID NO: 68265 - DNA, 1135 bp, Triticum aestivum
  misc_feature (1)..(1135): Ceres Seq. ID no. 14301534
atggcagtttgatctcatctcctcctcctcctcctccaccgccgcacgccacccccatccccatccccaccggagccgactgcggcggagcggagcgcaccggagatcttccttctttccttgtcggtaaggttctgtggccatgtctgacagcgagaaagaggtgccagtggaagtggaagaaggcgccacccgcggggccgactgggaggtcgtcacgctcaccgcgtccacctacgccgccgcgcccagcgggccagaaggagcagcagagggcaagaggctcggcgacggcaacgacggccgcgcctcgtccaccacgctgctcatgtcggaccacttcgtgttcccacccagcgagcacgagaacctgcccatagagaccgccctgctcgacccgcctcaggagagcaccagcgtggacgacgccggcttcaagaacgtcggtgggggctacgatgatgggtccgagacggtcaagtactatgacgaggggaagagcctgtcggtgcatgatgccgagatgatgatgggtgacgtggctgagttccacgcccaagatgacggacgcggttacgttgtccatgatgatgatgatgactcccaggacaagtctgatgcgcctctggacagcagcagcagcaagggccgtggctctggtgccccctgccagtgctggttgaagaagcacatgtcatgcctgtatgaccaggccaaggagaccaatcatctctggggtgcggttgtcgtggctgccctggttggccttgtcatcttgtggcgcaaagacaagttgcacatgagctgccttaaatggcgctctcgctcggcagtcagttaatgatccaatccgaattcctggactggtgggtctgtttgtggtcttcttcgtcgatacaatctctgacgagtcttcgcagatcgccctggaagtcattataaccaagaagaagatggccatgccaatatgattcgtgacaatgacgaaaggggtctctagttgtaataatatcaagtttgacagggtattttcttgttgccaggcttgtgagatgccaaagtttcttattgctcttgtacccatagtcgtcgtacctttgcactgtttaatacgaacggcgcgccctttcaagct

SEQ ID NO: 68266 - protein, 232 aa, Triticum aestivum
  peptide (1)..(232): Ceres Seq. ID no. 14301535
MSDSEKEVPVEVEEGATRGADWEVVTLTASTYAAAPSGPEGAAEGKRLGDGNDGRASSTTLLMSDHFVFPPSEHENLPIETALLDPPQESTSVDDAGFKNVGGGYDDGSETVKYYDEGKSLSVHDAEMMMGDVAEFHAQDDGRGYVVHDDDDDSQDKSDAPLDSSSSKGRGSGAPCQCWLKKHMSCLYDQAKETNHLWGAVVVAALVGLVILWRKDKLHMSCLKWRSRSAVS

SEQ ID NO: 68267 - protein, 170 aa, Triticum aestivum
  peptide (1)..(170): Ceres Seq. ID no. 14301536
MSDHFVFPPSEHENLPIETALLDPPQESTSVDDAGFKNVGGGYDDGSETVKYYDEGKSLSVHDAEMMMGDVAEFHAQDDGRGYVVHDDDDDSQDKSDAPLDSSSSKGRGSGAPCQCWLKKHMSCLYDQAKETNHLWGAVVVAALVGLVILWRKDKLHMSCLKWRSRSAVS

SEQ ID NO: 68268 - protein, 125 aa, Triticum aestivum
  peptide (1)..(125): Ceres Seq. ID no. 14301537
GSLISSPPPPPPPPHATPIPIPTGADCGGAERTGDLPSFLVGKVLWPCLTARKRCQWKWKKAPPAGPTGRSSRSPRPPTPPRPAGQKEQQRARGSATATTAAPRPPRCSCRTTSCSHPASTRTCP

SEQ ID NO: 68269 - DNA, 1052 bp, Triticum aestivum
  misc_feature (1)..(1052): Ceres Seq. ID no. 13598314
aatcgaaaacattcagacccatcccagccaaaagcacctggccatcagcgttccttctcctagctttgtctcagttgtcttccggtcttctgctctgctctttggactaatggcccatgggaagaggtctaggcagcaggccgagtcgacctcggtcagcctgctggacctggacagcggcgacatggcgcgcatcctgctgctcttctccggccaccaccagcaccacgcccactacgggccttcgtcgcctgagagggtgttcgagtgcaagacctgcaaccggcggttcccgtccttccaggcgctcggtgggcaccgcgccagccacaagaagccgcgcctggcggacggcgccggcgccgagccgcccaagcccaaggtgcacggctgctccatctgcgggctcgagttcgccgtcggccaggcgctcggcggccacatgcgccgccaccgcgctgtcgcggcggcagggcccggcgtcgggcttgggctcagcctcggcctcggtctcgggccgaacgaggacggcaacaagaaggcggcggcggcggccgagctggcgctcgacctgaacgagccggcactggaggaggagccggccgatcgcgccatgcttgggctcgccgtgggattccggccccgtggtggttgactttcgacgttaggttgaacagaagaaatttgcgtctgaaccatacaaattttttgtagttcaatactatttgcattgagctgctcgagaagtcaacgacccttggaacattagaaatgctggctcgcgtatagtataacatttctaaagtctcaggggcaggggctctatatttacaaggtttgacttctggcggtatttgtagtactagacgggtttttctcttctgctccccctttttccacggggagttcagtttttttatgctccttggccttgaggcatatctactacggagtacgtatgaatatggttgtaaacctctcgaattacgcgaatattatacaaggattaaaaaaaaaaaaaaaaaagcttatcgatrccgtcgamacwcaat

SEQ ID NO: 68270 - protein, 217 aa, Triticum aestivum
  peptide (1)..(217): Ceres Seq. ID no. 15222302
IENIQTHPSQKHLAISVPSPSFVSVVFRSSALLFGLMAHGKRSRQQAESTSVSLLDLDSGDMARILLLFSGHHQHHAHYGPSSPERVFECKTCNRRFPSFQALGGHRASHKKPRLADGAGAEPPKPKVHGCSICGLEFAVGQALGGHMRRHRAVAAAGPGVGLGLSLGLGLGPNEDGNKKAAAAAELALDLNEPALEEEPADRAMLGLAVGFRPRGG

SEQ ID NO: 68271 - protein, 181 aa, Triticum aestivum
  peptide (1)..(181): Ceres Seq. ID no. 15222303
MAHGKRSRQQAESTSVSLLDLDSGDMARILLLFSGHHQHHAHYGPSSPERVFECKTCNRRFPSFQALGGHRASHKKPRLADGAGAEPPKPKVHGCSICGLEFAVGQALGGHMRRHRAVAAAGPGVGLGLSLGLGLGPNEDGNKKAAAAAELALDLNEPALEEEPADRAMLGLAVGFRPRGG

SEQ ID NO: 68272 - protein, 156 aa, Triticum aestivum
  peptide (1)..(156): Ceres Seq. ID no. 15222304
MARILLLFSGHHQHHAHYGPSSPERVFECKTCNRRFPSFQALGGHRASHKKPRLADGAGAEPPKPKVHGCSICGLEFAVGQALGGHMRRHRAVAAAGPGVGLGLSLGLGLGPNEDGNKKAAAAAELALDLNEPALEEEPADRAMLGLAVGFRPRGG

SEQ ID NO: 68273 - DNA, 1438 bp, Triticum aestivum
  misc_feature (1)..(1438): Ceres Seq. ID no. 13596284
aaacgacctgccacttccagttctgctattactttagccacttgctgcgcacatctcggtgagctcgccactccggtggcggcggcggcgggcggagggaagaaaatggcaccgccgcggcgcgtgtgcgtgaccggcggcggcgggttcatcgcctcgtggctcgtcaagctgctcctctcccgcggctacgccgtccacgccaccctccgggacccatgtgaccccaagaatgtccacctcaagcagatggacgaggcccgggagaatctgcacctgctcaaggccgacgtgctcgactacgacgcgctaacacgtgcgtttgagggatgtgagggggtcttccacctcgccactccggtgcctgaagataagattgctgatcctgagtcagaagtattggctcctgctgtgaaaggtacttcaaatgtgctgaaggcctgctcagctatgaaggttcagaaggttattgtcttgtcatccaatgctgctgttgattttaacccgaattggcctcaagacagactcaaagatgagagtagctggtcagacaaagatttctgccaggagaatgaggactggtattctgttgccaagattgtggccgaacaggcatccttggaatattcagagaaacatggattaaatgttgttacgctttgccctcctttggtttttggcccattgttgcagcctactgttagaawaccagtagcaaattcttaatctatgttattaatggaggacctgacgtgatgagcaacaagctgtggcacattgtagacgtccgtgatgtcgcggatgccttgctgcttgtgtacgagaaggccgaatcgtctgggagatacatttgcgcgccgaatagcgtctgcacaaaggacttggtggacttgctgaggaagatgtacccacagtacagctatgtgaacaacatcgacgcggaccgtaaagcgccgctgtcatcgcagaagctgaaggatctgggctggaagccgaggaagctggaggagacgctctcggacagcgtgggctgctacgagaaggccggccttctgcagggttccgctgcgcgtcattgccggcttccgcatctgttccgtctggctggtgatcagtgaatgtaccgtggtgactggtgctttgttttcatatggtcggacttctgtaagctgtagtgtcgctggacggagcctcgcaacagcaacaatggtcgaacctcttcctttgcatccacaaataagcagctatccctgctgtatctgccgccccctgtctgtcacctccggaaatggacaaagtgtaaaacaagcagagcagagacgaaatgcatgtacttcctccgttcctaaataagtactatctctttctagagatttgtataagtgactacatacagagcaaaatgagtgaatctacactctaaattatgtttacatcc

SEQ ID NO: 68274 - protein, 241 aa, Triticum aestivum
  peptide (1)..(241): Ceres Seq. ID no. 15221824
  misc_feature (236)..(236): Xaa is any aa, unknown or other
KRPATSSSAITLATCCAHLGELATPVAAAAGGGKKMAPPRRVCVTGGGGFIASWLVKLLLSRGYAVHATLRDPCDPKNVHLKQMDEARENLHLLKADVLDYDALTRAFEGCEGVFHLATPVPEDKIADPESEVLAPAVKGTSNVLKACSAMKVQKVIVLSSNAAVDFNPNWPQDRLKDESSWSDKDFCQENEDWYSVAKIVAEQASLEYSEKHGLNVVTLCPPLVFGPLLQPTVRXPVANS

SEQ ID NO: 68275 - protein, 206 aa, Triticum aestivum
  peptide (1)..(206): Ceres Seq. ID no. 15221825
  misc_feature (201)..(201): Xaa is any aa, unknown or other
MAPPRRVCVTGGGGFIASWLVKLLLSRGYAVHATLRDPCDPKNVHLKQMDEARENLHLLKADVLDYDALTRAFEGCEGVFHLATPVPEDKIADPESEVLAPAVKGTSNVLKACSAMKVQKVIVLSSNAAVDFNPNWPQDRLKDESSWSDKDFCQENEDWYSVAKIVAEQASLEYSEKHGLNVVTLCPPLVFGPLLQPTVRXPVANS

SEQ ID NO: 68276 - protein, 158 aa, Triticum aestivum
  peptide (1)..(158): Ceres Seq. ID no. 15221826
  misc_feature (153)..(153): Xaa is any aa, unknown or other
MDEARENLHLLKADVLDYDALTRAFEGCEGVFHLATPVPEDKIADPESEVLAPAVKGTSNVLKACSAMKVQKVIVLSSNAAVDFNPNWPQDRLKDESSWSDKDFCQENEDWYSVAKIVAEQASLEYSEKHGLNVVTLCPPLVFGPLLQPTVRXPVANS

SEQ ID NO: 68277 - DNA, 1290 bp, Triticum aestivum
  misc_feature (1)..(1290): Ceres Seq. ID no. 15225786
aattccttccagtcccccctctctctctcctccctacaattcacaattcgaaggcgcatccttgccccggtaagcggcggcggcgagtctacaggtttcctggggcggaggcgatggcggccgcaggcaagttcaaccggagtaacccggcggtgaagcggatcctgcaggaggtgaaggagatgcagtctaatccttcccccgatttcatggccttgcccctcgaggaggacatttttgagtggcaatttgctatcctggggcctcgagacagcgaatttgagggaggaatctaccacgggaggatccagttgccctcagactacccgttcaagccgccatccttcatgctgctcacgccaagtggaagattcgagattcagaagaagatatgtttgagcatatcaaattaccaccccgaacactggcagccatcatggagtgtacgcacagcactagtagcattgattgctttcatgccaacaaatcctggtggggcattgggttcactggactacaaaaaggaagatagacgagcgcttgccatcaaatcacgtgaaacaccaccaaaattcggctccccagaacgccaaagtgtaattgacgagatccatgagcaaatgctcagtaaagctccacctgttcctcaactgctgacaattggctctgaagaggagactaacaagacggcacccgacacttctggtgaacatgctgtcaaggcagcagaaggtgtcaacacttctggcagcagctctggttctgctaatgatactgaccttccaaagcctgattcagagtcagaagttgcagaaaacattgccagagctcaggcagatgtaatccccagggacagcggtccgagagttgttacagcaccgcagaaccccgttgtcacaatccagaagccaaagcatgacaggttgttgacgttggctgcatttgggctgactcttgctatcatggccctcgtgataaagaagttcttcaaaatcaatggtctggctggttacattgagggcaagttttaggtaggtttgtgcgtaagttgatataagaggagcgcctgcattatgcgtctgagcggctatgttatccttaccatatcttatataaaccacctaagaaatgtaaatggttattgtctagctatagatgaagtgaggtggtggtaccacccgtaccctactgtatgtagcactgatggaatacatgatatttcattatatgtgtgcgtgtgtggcttaagttgtaacgtttgttctggatgaagggcctcttggttactgc

SEQ ID NO: 68278 - protein, 342 aa, Triticum aestivum
  peptide (1)..(342): Ceres Seq. ID no. 15225787
FLPVPPLSLLPTIHNSKAHPCPGKRRRRVYRFPGAEAMAAAGKFNRSNPAVKRILQEVKEMQSNPSPDFMALPLEEDIFEWQFAILGPRDSEFEGGIYHGRIQLPSDYPFKPPSFMLLTPSGRFEIQKKICLSISNYHPEHWQPSWSVRTALVALIAFMPTNPGGALGSLDYKKEDRRALAIKSRETPPKFGSPERQSVIDEIHEQMLSKAPPVPQLLTIGSEEETNKTAPDTSGEHAVKAAEGVNTSGSSSGSANDTDLPKPDSESEVAENIARAQADVIPRDSGPRVVTAPQNPVVTIQKPKHDRLLTLAAFGLTLAIMALVIKKFFKINGLAGYIEGKF

SEQ ID NO: 68279 - protein, 305 aa, Triticum aestivum
  peptide (1)..(305): Ceres Seq. ID no. 15225788
MAAAGKFNRSNPAVKRILQEVKEMQSNPSPDFMALPLEEDIFEWQFAILGPRDSEFEGGIYHGRIQLPSDYPFKPPSFMLLTPSGRFEIQKKICLSISNYHPEHWQPSWSVRTALVALIAFMPTNPGGALGSLDYKKEDRRALAIKSRETPPKFGSPERQSVIDEIHEQMLSKAPPVPQLLTIGSEEETNKTAPDTSGEHAVKAAEGVNTSGSSSGSANDTDLPKPDSESEVAENIARAQADVIPRDSGPRVVTAPQNPVVTIQKPKHDRLLTLAAFGLTLAIMALVIKKFFKINGLAGYIEGKF

SEQ ID NO: 68280 - protein, 282 aa, Triticum aestivum
  peptide (1)..(282): Ceres Seq. ID no. 15225789
MQSNPSPDFMALPLEEDIFEWQFAILGPRDSEFEGGIYHGRIQLPSDYPFKPPSFMLLTPSGRFEIQKKICLSISNYHPEHWQPSWSVRTALVALIAFMPTNPGGALGSLDYKKEDRRALAIKSRETPPKFGSPERQSVIDEIHEQMLSKAPPVPQLLTIGSEEETNKTAPDTSGEHAVKAAEGVNTSGSSSGSANDTDLPKPDSESEVAENIARAQADVIPRDSGPRVVTAPQNPVVTIQKPKHDRLLTLAAFGLTLAIMALVIKKFFKINGLAGYIEGKF

SEQ ID NO: 68281 - DNA, 1288 bp, Triticum aestivum
  misc_feature (1)..(1288): Ceres Seq. ID no. 13598301
cttccccgccccattcgtcactgatcccccttctagaacctcccagaagccgaacgagagagcccgcaggggcggcgcacgggcatggcgatggcgacgcacacgggggtcgccgcctccaaggtcctcatcctcgtcggcgcaggcctgacgggatcgatcgtgcttcggaatggccgcttgtcggatgtattggcggagctccaggagctcatgaagggcgtaaatcaaggagaaggctcgagcgcatatgacatggctcttatccaagctcagattcggcatttagcccaagaagtcagagatttaactttgtcaaagcccattaccatattgagcggcaaatcggactcgggaggcagtttatcgtcctacatactgccagcagctgcagttggagcattaggttattgctatatgtggtgtaagggatggtccttgtcagatgtcatgtttgtcacaaaacgcaatatggccagtgctgtcgatagcatgtcgaagcaattggagcaagtttcatcagcactagcagcaaccaaaagacatctaacaaaacgccttgagaatttggatggcaaaatggacgaacaagtggaggtctccaaacaaatacggaatgaggtcactgatgttaaaactgatctgtcccaaattggctttgacgttgaagcaattcaacagatggtagctggactggaagagaagattgagttgcttgacaataaacaggatgcggctaatgctggtatatggtatctctgccgaatggcaggaggtataaaagagggaataaatgccaagtttttccaagaagcggatgaaaaactcaagctcttggacctggctcatactgaaaagaagccggtgaagggtctggagttatttctggagagcaccaaggaagtcaaggcactcgactccaagcctaagaccatcgtgcagattgatgccaagaaaccgatgaaggcgttcgacgtgcctgtgaagagcgctgcggtgcacaggtcaaacaggttcttaattcgcaaggaaggcctcgcactgtgatggacgccttcccgtgctgcttgcgatgtacattgcgttcttgcttgatttgtttggtagaaaatatagaagaataacctgcatcccgagtggtgattttccaggatagacaggttgatacgtctcaaggcaatttgtatttgttcctttgtattttttgggtcatttcatgttctggtctgaagttgctcgcttgtaaacaagtgaagaaataaataattaaaatacgttttgcattctc

SEQ ID NO: 68282 - protein, 320 aa, Triticum aestivum
  peptide (1)..(320): Ceres Seq. ID no. 15222293
MAMATHTGVAASKVLILVGAGLTGSIVLRNGRLSDVLAELQELMKGVNQGEGSSAYDMALIQAQIRHLAQEVRDLTLSKPITILSGKSDSGGSLSSYILPAAAVGALGYCYMWCKGWSLSDVMFVTKRNMASAVDSMSKQLEQVSSALAATKRHLTKRLENLDGKMDEQVEVSKQIRNEVTDVKTDLSQIGFDVEAIQQMVAGLEEKIELLDNKQDAANAGIWYLCRMAGGIKEGINAKFFQEADEKLKLLDLAHTEKKPVKGLELFLESTKEVKALDSKPKTIVQIDAKKPMKAFDVPVKSAAVHRSNRFLIRKEGLAL

SEQ ID NO: 68283 - protein, 318 aa, Triticum aestivum
  peptide (1)..(318): Ceres Seq. ID no. 15222294
MATHTGVAASKVLILVGAGLTGSIVLRNGRLSDVLAELQELMKGVNQGEGSSAYDMALIQAQIRHLAQEVRDLTLSKPITILSGKSDSGGSLSSYILPAAAVGALGYCYMWCKGWSLSDVMFVTKRNMASAVDSMSKQLEQVSSALAATKRHLTKRLENLDGKMDEQVEVSKQIRNEVTDVKTDLSQIGFDVEAIQQMVAGLEEKIELLDNKQDAANAGIWYLCRMAGGIKEGINAKFFQEADEKLKLLDLAHTEKKPVKGLELFLESTKEVKALDSKPKTIVQIDAKKPMKAFDVPVKSAAVHRSNRFLIRKEGLAL

SEQ ID NO: 68284 - protein, 277 aa, Triticum aestivum
  peptide (1)..(277): Ceres Seq. ID no. 15222295
MKGVNQGEGSSAYDMALIQAQIRHLAQEVRDLTLSKPITILSGKSDSGGSLSSYILPAAAVGALGYCYMWCKGWSLSDVMFVTKRNMASAVDSMSKQLEQVSSALAATKRHLTKRLENLDGKMDEQVEVSKQIRNEVTDVKTDLSQIGFDVEAIQQMVAGLEEKIELLDNKQDAANAGIWYLCRMAGGIKEGINAKFFQEADEKLKLLDLAHTEKKPVKGLELFLESTKEVKALDSKPKTIVQIDAKKPMKAFDVPVKSAAVHRSNRFLIRKEGLAL

SEQ ID NO: 68285 - DNA, 1253 bp, Triticum aestivum
  misc_feature (1)..(1253): Ceres Seq. ID no. 13654231
cttatctcggcgccggagcccacgaccgcttccccgctcaccaccccaaccccgaaatatcccccaattccgacgcgaccgcggaaccctagccccccggcaatcttcgctggacccggagagccgctccggcgccatggcatccccggaaggatcaaactgggtattcgactgccccctcatggacgaccttgctgccgccgacttcgccgcggcatccgcaggaggcttctactggaccccgccgatgcagccgcagatgcacactcttgcgcaggccgtctccgccaccccggctcccaatccctgtgctgaaatcaatagctctgtttcggtggactgggaccatgccaaaggacaaccgaaaaataaacgtcctaggtcagaaactggtgctcaacctagctccaaagcatgcagggagaaagtgagaagggacaagctaaacgagaggttcttggaattgggtgctgtcttggatccggggaaaacacctaaaatcgacaaatgtgctatattaaatgatgctatccgtgcggtaactgaattgcgtagtgaagcagagaagttgaaggattccaatgagtctctccaagagaagattagagagctaaaggctgagaagaatgagctacgagatgagaagcaaaagttgaaggcggagaaagagagcctggagcagcagattaagttcatgaatgcccgtcagagcctcgtaccacacccttctgtcatcccagctgctgcattcgctgccgcccaaggccaagcggcagggcacaagctgatgatgcctgtgatgagctacccaggatttcccatgtggcagttcatgccgccttcagatgttgatacctccgatgaccccaagtcatgccctccggttgcataagccagcaaaaatcatttgcctcatctatctcatggggaaggatggctaaaaagccgtccgttaaattatatcttagtcgtcagtgttactatgcagaagccgtttagtgttactatatgtagttaaatcaagaaccgaactgaagcgtcgtcgttgtatcacccgggaacatttgattatcttgtgaaaccgttgtatattgttagtaaataaataccatccgttgaagcaaatggcgcttggacgccatagcattaccgacttgttactttgttcgacatgttgcccgtgatttttgacctataacataaatatgttgtgctgcaggtcaaaataaaaataaaaatatataggttgtgct

SEQ ID NO: 68286 - protein, 296 aa, Triticum aestivum
  peptide (1)..(296): Ceres Seq. ID no. 13654232
LSRRRSPRPLPRSPPQPRNIPQFRRDRGTLAPRQSSLDPESRSGAMASPEGSNWVFDCPLMDDLAAADFAAASAGGFYWTPPMQPQMHTLAQAVSATPAPNPCAEINSSVSVDWDHAKGQPKNKRPRSETGAQPSSKACREKVRRDKLNERFLELGAVLDPGKTPKIDKCAILNDAIRAVTELRSEAEKLKDSNESLQEKIRELKAEKNELRDEKQKLKAEKESLEQQIKFMNARQSLVPHPSVIPAAAFAAAQGQAAGHKLMMPVMSYPGFPMWQFMPPSDVDTSDDPKSCPPVA

SEQ ID NO: 68287 - protein, 251 aa, Triticum aestivum
  peptide (1)..(251): Ceres Seq. ID no. 13654233
MASPEGSNWVFDCPLMDDLAAADFAAASAGGFYWTPPMQPQMHTLAQAVSATPAPNPCAEINSSVSVDWDHAKGQPKNKRPRSETGAQPSSKACREKVRRDKLNERFLELGAVLDPGKTPKIDKCAILNDAIRAVTELRSEAEKLKDSNESLQEKIRELKAEKNELRDEKQKLKAEKESLEQQIKFMNARQSLVPHPSVIPAAAFAAAQGQAAGHKLMMPVMSYPGFPMWQFMPPSDVDTSDDPKSCPPVA

SEQ ID NO: 68288 - protein, 236 aa, Triticum aestivum
  peptide (1)..(236): Ceres Seq. ID no. 13654234
MDDLAAADFAAASAGGFYWTPPMQPQMHTLAQAVSATPAPNPCAEINSSVSVDWDHAKGQPKNKRPRSETGAQPSSKACREKVRRDKLNERFLELGAVLDPGKTPKIDKCAILNDAIRAVTELRSEAEKLKDSNESLQEKIRELKAEKNELRDEKQKLKAEKESLEQQIKFMNARQSLVPHPSVIPAAAFAAAQGQAAGHKLMMPVMSYPGFPMWQFMPPSDVDTSDDPKSCPPVA

SEQ ID NO: 68289 - DNA, 1666 bp, Triticum aestivum
  misc_feature (1)..(1666): Ceres Seq. ID no. 13591174
aacgatcccttctccctcttccagatccattcctctcccagccccaggcctcgctcgcctcccccgttgggacggagagagctcggaagggcagggagccatgggttcctgggtccttcttgctgtggttctcgggtccttggtgggagctgcgcgcggctccgagccgtggtcgaacggcacgcaggtctactccaccaatgccaactccggcagcggcagcaacggcgccttcgtcgccctcactctcatccagtccgcggccgccaagggagccgtatgcttggatggaagtttaccgggttaccacctacaccggggatctggatcagggtcaaacaattggcttgtcaatctggagggtggaggatggtgcaatgatgttaaaagctgtgtgttccgcaagggcagtcggcgtgggtcatcgaaccacatggagaggcaactccagtttacaggcataatgagtaacaggcctgaagaaaatcctgatttctacaactggaacagagtgaaggttcggtattgtgatggtggatccttcaccggtgatggggctgacgcggcttcaggcctttatttccgaggtcagcgtatttggcaggctgctatcgatgacttgatggcccaaggaatgcgttctgctagtcaggcccttctttcgggatgctctgctgggggtgcttctgccatacttcactgtgatgagttccgtggaatgtttccatcaaataccagagtcaagtgcctcgctgatgctggaatgttccttgactctgttgacattgcgggtcgtcgagaaatgagagatttgttcaatggcattgtgagattgcagggttctggaagaagcttgcctcggtcttgtacctctcgcatggataaaacctcatgctttttcccgcagaacgtgttgccaaatattcaaactccgacttttatcttgaacactgcttacgacgtgtggcagcttcaagagagtttggctcccagaacggctgatccccggggtctatggcaaagttgcaagcagaattacgcctcttgcaatagcaatcagcttcagtttttaaatggcttcaggaatgaaatgcttaacgctgtgaagggtttctctgggtcagggcagaatggggtgtttatcaactcttgtttcgcccactgccagagcgagagacaggatacatggtactcaagcaagtctcctcgtcttggcaacaagagaatcgcagaagcggtcggtgactggttcttcgagaggggcaacgccaagtacaccgactgcgcgtacccttgtgacggcacgtgccatcaccttgtgttcaaagggaggcatctctaatacgatcatatcctttgataccagcagctgaagtgctgaaaacccagcgagtgggtacaaccgaaaaaaggaaggtatagatagaagaagatgggtgcaagttggtggcttgcccggcgtccatcgcctcagatatgatagggcagggcctcacatgcaaacgcgatgaggtcctctgcgttattttagtttcatatatcgtcgattctttccattgccaattgctactccctcgatgtatctgaatatttgaaccacactggtgtataaccttacatgttcatgtattgaatgtggtaatatgaaattatgaataatgtgctt

SEQ ID NO: 68290 - protein, 446 aa, Triticum aestivum
  peptide (1)..(446): Ceres Seq. ID no. 15221028
TIPSPSSRSIPLPAPGLARLPRWDGESSEGQGAMGSWVLLAVVLGSLVGAARGSEPWSNGTQVYSTNANSGSGSNGAFVALTLIQSAAAKGAVCLDGSLPGYHLHRGSGSGSNNWLVNLEGGGWCNDVKSCVFRKGSRRGSSNHMERQLQFTGIMSNRPEENPDFYNWNRVKVRYCDGGSFTGDGADAASGLYFRGQRIWQAAIDDLMAQGMRSASQALLSGCSAGGASAILHCDEFRGMFPSNTRVKCLADAGMFLDSVDIAGRREMRDLFNGIVRLQGSGRSLPRSCTSRMDKTSCFFPQNVLPNIQTPTFILNTAYDVWQLQESLAPRTADPRGLWQSCKQNYASCNSNQLQFLNGFRNEMLNAVKGFSGSGQNGVFINSCFAHCQSERQDTWYSSKSPRLGNKRIAEAVGDWFFERGNAKYTDCAYPCDGTCHHLVFKGRHL

SEQ ID NO: 68291 - protein, 413 aa, Triticum aestivum
  peptide (1)..(413): Ceres Seq. ID no. 15221029
MGSWVLLAVVLGSLVGAARGSEPWSNGTQVYSTNANSGSGSNGAFVALTLIQSAAAKGAVCLDGSLPGYHLHRGSGSGSNNWLVNLEGGGWCNDVKSCVFRKGSRRGSSNHMERQLQFTGIMSNRPEENPDFYNWNRVKVRYCDGGSFTGDGADAASGLYFRGQRIWQAAIDDLMAQGMRSASQALLSGCSAGGASAILHCDEFRGMFPSNTRVKCLADAGMFLDSVDIAGRREMRDLFNGIVRLQGSGRSLPRSCTSRMDKTSCFFPQNVLPNIQTPTFILNTAYDVWQLQESLAPRTADPRGLWQSCKQNYASCNSNQLQFLNGFRNEMLNAVKGFSGSGQNGVFINSCFAHCQSERQDTWYSSKSPRLGNKRIAEAVGDWFFERGNAKYTDCAYPCDGTCHHLVFKGRHL

SEQ ID NO: 68292 - protein, 302 aa, Triticum aestivum
  peptide (1)..(302): Ceres Seq. ID no. 15221030
MERQLQFTGIMSNRPEENPDFYNWNRVKVRYCDGGSFTGDGADAASGLYFRGQRIWQAAIDDLMAQGMRSASQALLSGCSAGGASAILHCDEFRGMFPSNTRVKCLADAGMFLDSVDIAGRREMRDLFNGIVRLQGSGRSLPRSCTSRMDKTSCFFPQNVLPNIQTPTFILNTAYDVWQLQESLAPRTADPRGLWQSCKQNYASCNSNQLQFLNGFRNEMLNAVKGFSGSGQNGVFINSCFAHCQSERQDTWYSSKSPRLGNKRIAEAVGDWFFERGNAKYTDCAYPCDGTCHHLVFKGRHL

SEQ ID NO: 68293 - DNA, 1379 bp, Triticum aestivum
  misc_feature (1)..(1379): Ceres Seq. ID no. 13598313
ccacaccatcgtcttatctcggggcctaagagccagaggaatcatttccttcttctccatccttccgtccagccttgttggtttcactgtgccgtcgatcggcatggcgaggaaatgctcgagctgcggccacaatggccacaactcgaggacctgcggcgggcaccgaggcgttgagagcggcggcggcggtgggctgaggctgtttggggtgcagctgcaggtgggcgccgcgcctctcaagaagagcttcagcatggagtgcctgtcgtcgaccgcgtcggcctactacgcggcggccgcggccgtgggtgtcgccgcgtccaactcgtcgtcgtccgtgtcgtcgtcgtcgtcgctcgtctcggtggaggagagcccggagaagatgggccacgggtacctctccgacgggctcatgggcagggctcaagagaggaagaaaggggttccatggaccgaggacgagcaccggaggttcctggccggcctggagaagctcgggaaaggcgactggcgaggcatctcccggcacttcgtcaccacacgcacgccgacgcaggtcgccagccacgcccagaagtacttcctccggcaggccggcctcgcgcagaagaagcggcggtccagcctcttcgacgtcgtggagaaaaatggcgacaggggagccaccgagcgtcgtcacaggctgaaacccgatgccaccagctccgtggacgcgatggggttaacgttccctgctctttccctgggcgccagccggccgaggccggacgcggcgctaccgccgtgcctgactctgatgccgagctgctcgccgccgtcgtcgatgatcggcgcaccgtcagcgagccgtgcaccgaagctccctccttccctgggcctggtggcaaatgcgaatcctcctcggcaggcgcctgacctggagctcaagatctcgtccacggccgcccggaagaccgaccagcaggccggtgctgccgccggttcgtcgccatcgccgaggacgccctttttcggaaccatcagggtcacctagagcgagcaaaagaccacccaccggagcgacggcttaaaagagatctttccgtagacgacgacgacgacgaagaagaacagcaacaagaagaaagagcttttgctagtggcgtgctacattaaacagtagtatgtcagtcagtgtgcgtgtgttgctggcatggcattaagaaatgccatcaccgatccatccataaccatcctgtattatcaccatcacaaggcccaactttactggcctaatttagccatgcaaataaacaaggaacgggcctcattggcatcaaaaaaaaaaaaaaaaaagcttatcgataccgtcgacctgtttaaacacaataaag

SEQ ID NO: 68294 - protein, 345 aa, Triticum aestivum
  peptide (1)..(345): Ceres Seq. ID no. 15222299
HTIVLSRGLRARGIISFFSILPSSLVGFTVPSIGMARKCSSCGHNGHNSRTCGGHRGVESGGGGGLRLFGVQLQVGAAPLKKSFSMECLSSTASAYYAAAAAVGVAASNSSSSVSSSSSLVSVEESPEKMGHGYLSDGLMGRAQERKKGVPWTEDEHRRFLAGLEKLGKGDWRGISRHFVTTRTPTQVASHAQKYFLRQAGLAQKKRRSSLFDVVEKNGDRGATERRHRLKPDATSSVDAMGLTFPALSLGASRPRPDAALPPCLTLMPSCSPPSSMIGAPSASRAPKLPPSLGLVANANPPRQAPDLELKISSTAARKTDQQAGAAAGSSPSPRTPFFGTIRVT

SEQ ID NO: 68295 - protein, 311 aa, Triticum aestivum
  peptide (1)..(311): Ceres Seq. ID no. 15222300
MARKCSSCGHNGHNSRTCGGHRGVESGGGGGLRLFGVQLQVGAAPLKKSFSMECLSSTASAYYAAAAAVGVAASNSSSSVSSSSSLVSVEESPEKMGHGYLSDGLMGRAQERKKGVPWTEDEHRRFLAGLEKLGKGDWRGISRHFVTTRTPTQVASHAQKYFLRQAGLAQKKRRSSLFDVVEKNGDRGATERRHRLKPDATSSVDAMGLTFPALSLGASRPRPDAALPPCLTLMPSCSPPSSMIGAPSASRAPKLPPSLGLVANANPPRQAPDLELKISSTAARKTDQQAGAAAGSSPSPRTPFFGTIRVT

SEQ ID NO: 68296 - protein, 260 aa, Triticum aestivum
  peptide (1)..(260): Ceres Seq. ID no. 15222301
MECLSSTASAYYAAAAAVGVAASNSSSSVSSSSSLVSVEESPEKMGHGYLSDGLMGRAQERKKGVPWTEDEHRRFLAGLEKLGKGDWRGISRHFVTTRTPTQVASHAQKYFLRQAGLAQKKRRSSLFDVVEKNGDRGATERRHRLKPDATSSVDAMGLTFPALSLGASRPRPDAALPPCLTLMPSCSPPSSMIGAPSASRAPKLPPSLGLVANANPPRQAPDLELKISSTAARKTDQQAGAAAGSSPSPRTPFFGTIRVT

SEQ ID NO: 68297 - DNA, 1269 bp, Triticum aestivum
  misc_feature (1)..(1269): Ceres Seq. ID no. 13596175
accgtctcagataacttaggattttcggtctcagattgtgaggagcggctcatcgacctctgccaactgccatcgcacttgctgttggagctcgtggactcgtggtgcgccctcatggaagggcccgtcctccccaacctgccaaacacgagggtcgccgtcgtcaccggagggaacaaagggatcggcttcgaggtgtgccgccagctggccagcggcggcgtcacggtcgtcttgacggcccgggacgagacgaggggcggggaggccgtcgagaggctcaatgcgctgggactctctggtgtcatcttccatcggctggagatcacggacgcttcgagcgccgcgacgctggctggttttctcaaggcccgctttggcaagcttgacattctggtgaataatgccgcagttggtggggttgagtacggccaagaattcgatacgaacgaggaaaagttcggtggcatggatttccaccagagagttgagtggatgttgaagaacgcacgggagcccatcgacagcgcgaagaacagcgtgcagacgaactactatggcacgaagcatgtaatcgaagccctgctgcctctgcttcaatcttcgtccgtgggaagaatagtgaacgtctcctccaattatggactgctaagacatatcggcagcgaggaggtgaggcaggagctcaacgacgtcgacaacctgacagaggggaggctagacgagctgctggagaagttcatgaaagacttcgaggccggcgcgctggagccgcacgggtggcccacaaagttctcggcgtacaaggtggccaaggccgccatgaacgcctactcgaggatcctggcgaggaggcaccctgagctgcgcgtcaactgcgcgcaccctggcttcgtcaagaccgacatgagcatggggtccggggtcctgacgccggaggagggcgcacgtaacttggtgaaggtggcgctgctgcctgacggcgggccgaccggcgcgtatttcgccatgggcgaggaggcgccgttcgtgtgaggtaccggcggtacgtgcgtgcgtgccgtacggttactgcttggatgcgttaaaaaaaaataagatgtgtcatctatcttttttcgacaaagggtgaggttcacagcggcagcgtccgccacctccaatgcatgacacgtgttcagtgagggctcgtataccgtccttcattgaacgcgcttttgcaacagaggtaatgtttctgaaacatatgtgatattgcagtagtttacg

SEQ ID NO: 68298 - protein, 344 aa, Triticum aestivum
  peptide (1)..(344): Ceres Seq. ID no. 13596176
TVSDNLGFSVSDCEERLIDLCQLPSHLLLELVDSWCALMEGPVLPNLPNTRVAVVTGGNKGIGFEVCRQLASGGVTVVLTARDETRGGEAVERLNALGLSGVIFHRLEITDASSAATLAGFLKARFGKLDILVNNAAVGGVEYGQEFDTNEEKFGGMDFHQRVEWMLKNAREPIDSAKNSVQTNYYGTKHVIEALLPLLQSSSVGRIVNVSSNYGLLRHIGSEEVRQELNDVDNLTEGRLDELLEKFMKDFEAGALEPHGWPTKFSAYKVAKAAMNAYSRILARRHPELRVNCAHPGFVKTDMSMGSGVLTPEEGARNLVKVALLPDGGPTGAYFAMGEEAPFV

SEQ ID NO: 68299 - protein, 306 aa, Triticum aestivum
  peptide (1)..(306): Ceres Seq. ID no. 13596177
MEGPVLPNLPNTRVAVVTGGNKGIGFEVCRQLASGGVTVVLTARDETRGGEAVERLNALGLSGVIFHRLEITDASSAATLAGFLKARFGKLDILVNNAAVGGVEYGQEFDTNEEKFGGMDFHQRVEWMLKNAREPIDSAKNSVQTNYYGTKHVIEALLPLLQSSSVGRIVNVSSNYGLLRHIGSEEVRQELNDVDNLTEGRLDELLEKFMKDFEAGALEPHGWPTKFSAYKVAKAAMNAYSRILARRHPELRVNCAHPGFVKTDMSMGSGVLTPEEGARNLVKVALLPDGGPTGAYFAMGEEAPFV

SEQ ID NO: 68300 - protein, 188 aa, Triticum aestivum
  peptide (1)..(188): Ceres Seq. ID no. 13596178
MDFHQRVEWMLKNAREPIDSAKNSVQTNYYGTKHVIEALLPLLQSSSVGRIVNVSSNYGLLRHIGSEEVRQELNDVDNLTEGRLDELLEKFMKDFEAGALEPHGWPTKFSAYKVAKAAMNAYSRILARRHPELRVNCAHPGFVKTDMSMGSGVLTPEEGARNLVKVALLPDGGPTGAYFAMGEEAPFV

SEQ ID NO: 68301 - DNA, 1462 bp, Triticum aestivum
  misc_feature (1)..(1462): Ceres Seq. ID no. 15178668
ggttaccgcatcgtcgccaggacaagccgccagccagcccaacccaaaccaccggaccggagcagcagccgacgcctcacaaccgccgccgcgcaggcagacgagccagcgggagggagccatggatcggtaccagagggtggagaagccgcgggaggaggtgcccatcaaggagaacgagatccgcatcaccacccagggcaggatgcgcaactacatcacctacgccaccaccctcttccaggataagggttgcgatgaagttgtattcaaggcgatgggaagggccataaacaaaactgtgatgattgcagaattgatcaagaggagaattgtgggtctccatcaaaacactgccactgaatccactgatattactgacacatgggagccactggaggaaggcctacttccgcttgagacaacaaggcatgtgtctatgattactataactctttcaaagaaggagctggacacgtcatctgtcggataccaatctcctctgcctgctgacaaggtgaagccgtttgttgaatacgagaatgaagaagatgcgcactcacctcctgggcgaggaagaggccgtggccgaggccgtggaaggggaatgggaaggggtagagatgcacgtgggaatggatacatggagtatgctgatggtggatgggaaaatgagcatgctcctacctatgcaggcaatgggtatgctgaccatggtccagcttatgagggtaatgggtatgctcgtggtagaggccgtggtttcaggggccgtggcagaagaggtggctatggtggtcagcctgattatcagcatgatggagggtattatgatgaggcaccagcgccaccccgaggtgggggccgtggtttcagggggcgtggcaggagaggcggctatggtggtggccagcctgattatcagcaagacggaggttattacgaggaggctccttttcctgcaccagctggaggtcgtggtcgaggccgtggccgtgggagaggcggcccagctcggggcagagggcgcggtggcaatgccaatggcaacatggtgtatgccgccgcttcgggcgcataagcagtccgcagctcgctgccgtcgttagttggatgcctgctccaagcatgaatatgtatcatctgtgttgtttatctgtgatgacatatatactttgtataagcctgtcattcgttgggaatgaggccagattttgatctttgactagatttgtaggggtagcaccgttatgattgtgctttgttttctcaaagtagatgtcagactaattgtagctaccagttggtaaaggtttagagcagggcattctttcaatttttacataaacgaagtctttgttctctgttacattgtgccaatttcgtttggtgtcctgtctttgaaatgtaagttcaatttagtgggtacttacaatttgatttctgaaaaaaaaaaaaaaaa

SEQ ID NO: 68302 - protein, 359 aa, Triticum aestivum
  peptide (1)..(359): Ceres Seq. ID no. 15178669
VTASSPGQAASQPNPNHRTGAAADASQPPPRRQTSQREGAMDRYQRVEKPREEVPIKENEIRITTQGRMRNYITYATTLFQDKGCDEVVFKAMGRAINKTVMIAELIKRRIVGLHQNTATESTDITDTWEPLEEGLLPLETTRHVSMITITLSKKELDTSSVGYQSPLPADKVKPFVEYENEEDAHSPPGRGRGRGRGRGRGMGRGRDARGNGYMEYADGGWENEHAPTYAGNGYADHGPAYEGNGYARGRGRGFRGRGRRGGYGGQPDYQHDGGYYDEAPAPPRGGGRGFRGRGRRGGYGGGQPDYQQDGGYYEEAPFPAPAGGRGRGRGRGRGGPARGRGRGGNANGNMVYAAASGA

SEQ ID NO: 68303 - protein, 319 aa, Triticum aestivum
  peptide (1)..(319): Ceres Seq. ID no. 15178670
MDRYQRVEKPREEVPIKENEIRITTQGRMRNYITYATTLFQDKGCDEVVFKAMGRAINKTVMIAELIKRRIVGLHQNTATESTDITDTWEPLEEGLLPLETTRHVSMITITLSKKELDTSSVGYQSPLPADKVKPFVEYENEEDAHSPPGRGRGRGRGRGRGMGRGRDARGNGYMEYADGGWENEHAPTYAGNGYADHGPAYEGNGYARGRGRGFRGRGRRGGYGGQPDYQHDGGYYDEAPAPPRGGGRGFRGRGRRGGYGGGQPDYQQDGGYYEEAPFPAPAGGRGRGRGRGRGGPARGRGRGGNANGNMVYAAASGA

SEQ ID NO: 68304 - protein, 291 aa, Triticum aestivum
  peptide (1)..(291): Ceres Seq. ID no. 15178671
MRNYITYATTLFQDKGCDEVVFKAMGRAINKTVMIAELIKRRIVGLHQNTATESTDITDTWEPLEEGLLPLETTRHVSMITITLSKKELDTSSVGYQSPLPADKVKPFVEYENEEDAHSPPGRGRGRGRGRGRGMGRGRDARGNGYMEYADGGWENEHAPTYAGNGYADHGPAYEGNGYARGRGRGFRGRGRRGGYGGQPDYQHDGGYYDEAPAPPRGGGRGFRGRGRRGGYGGGQPDYQQDGGYYEEAPFPAPAGGRGRGRGRGRGGPARGRGRGGNANGNMVYAAASGA

SEQ ID NO: 68305 - DNA, 1312 bp, Triticum aestivum
  misc_feature (1)..(1312): Ceres Seq. ID no. 13662323
atcacatcgtctcaccaagcagcagctagctaagctaagcctagccaaagcttctctagcttcggtagtccaggaaacatgaggctcgcggtggttctcctctgcgccctggtggccgtccaggtcgcgctcctcgccgccccggcggaggccggcgagctggtggtcgggtactacgacaagaaatgcaggggcgtggagaacgtcgtccagtggcacgtcaggagggcgctcaagaccaaccgccgcgccggtgccgccctcgtccgcctcctcttccacgactgcttcgtcaggggttgcgatgcctctgtgctccttgacgcgtcccccgagaaccctcacccggagaaggaggcgccggtgaacatcgggctggccgccttcgacctcctggaggagatcaaggcggccgtcgaggacaggtgccccggcgtggtgtcctgctctgacatcctcatttacgcagcccgtgacgcggcccacgccctcagcaatggcaacatccacttcgacgtccctgccgggcgcctcgacggcctcgtctcctcggggccgccgaggcccaggcggagctcccggactccaccttcaccgtgcagcagctcatcgacaayttcgcacgcaaggacttcgacgtggaggagctggtcatcytgtccggcgcgcactccatcggcgtcggccactgctcctccttcaccggccgcctcaccgcgccgccggagcagatcaacccggcctaccgcaaccttctcaaccacaagtgccaccagggcgccaacccggccgtcgtcaacaacgtccgcgatgaggactacgagacggtgtccaagttcatgcccgggttcaccagccgggtgcgcaagatcagcgacttcctcgacaacaccttctaccacaacaacctcgccaggatcgtcagcttcaactccgactggcagctcatgacccacaccgaggccaggggccacgtccacgagtacgccgacaacgccacgctctgggacggcgacttcgcggaatccctgctcaagctcagcaagctgtccatgcccgccgggagcaagggcggcatcaggaagaagtgcagcatcgccacccaccctctctactaaacaagtcgtatgcatgcatgaacaaggtcgatccaacgaagaagagaacctttgcccctggcggtgtgcggatttcttcaataatcatgtgatttttctggttcaatccattcttttgattcccattggttgtgtattttatttatggcaacatatatgtatcacggaaataaagttacggtctttcaaatgct

SEQ ID NO: 68306 - protein, 290 aa, Triticum aestivum
  peptide (1)..(290): Ceres Seq. ID no. 15220168
  misc_feature (180)..(180): Xaa is any aa, unknown or other
  misc_feature (193)..(193): Xaa is any aa, unknown or other
MRLAVVLLCALVAVQVALLAAPAEAGELVVGYYDKKCRGVENVVQWHVRRALKTNRRAGAALVRLLFHDCFVRGCDASVLLDASPENPHPEKEAPVNIGLAAFDLLEEIKAAVEDRCPGVVSCSDILIYAARDAAHALSNGNIHFDVPAGRLDGLVSSGPPRPRRSSRTPPSPCSSSSTXSHARTSTWRSWSXCPARTPSASATAPPSPAASPRRRSRSTRPTATFSTTSATRAPTRPSSTTSAMRTTRRCPSSCPGSPAGCARSATSSTTPSTTTTSPGSSASTPTGSS

SEQ ID NO: 68307 - DNA, 1493 bp, Triticum aestivum
  misc_feature (1)..(1493): Ceres Seq. ID no. 13596056
ctctcaaagcagtcaaccagccgcagctcctccctcattccaaagggccacggtctacggtttactctcaccaacccaccacccatcagcatggccgagcgtctcgccgcagccgccaccctccgcgccgccgctccgtccggccgcttcccggtcggccgccgcgccgggccatccagctctgccttcttcccctcctcatcctcgtcctccccggctctccgcctcgtcagcctccgcgccgcgtcgtctcggccctcccagaaggccaagtcggcggggagggggcgatcggtgaggtgcatagcagcggcgtcggacgcggcacagctgaaggccgcgcgcgaggacatcagggagctgctcaacacaacccactgccaccccatcctggttcgtttgggttggcatgattctggcacatatgacaaaaatattaaggactggccagaacgaggtggggctaatggaagtttaagatttgacgttgaactgaagcatggagccaatgccggtttggtaaatgctctaaagcttgtgcaacctatcaaggacaaatacccgagtataacttatgcggatttattccagttggcaagtgctacagcaattgaggaagctggtggcccaaagattccaatgaaatatggacgggttgatgtcacaggacctgagcagtgtccacctgaagggaagcttcctgatgctggcccgagtgctcctgctgaccacttgaggctggtattctacagaatgggccttgatgacaaggaaatcgttgctttgtctggggcacatacacttggaaggtctaggcccgaacggagtggctgggggaaacctgaaacaaaatatactaaaaatggtcctggtgcacctggtggacaatcatggacagctgaatggctgaagtttgataacagttacttcaaggagataaaagagaaaagagatcaggatcttcttgtgttgcctacagatgctgcattatttgaggacccagcattcaaggtctatgcagagaaatatgcagcagacgaagaagcattctttaatgactatgcggaggctcatgctaaactgagcagcctgggtgcaaagtttgatcctgccgagggattctcattggatgattagcgcggcgcgttagccagagaacccttgaagcagccaaacacacttccaaaaggaccagaggacggcacaacctaatcaccatcgttcctctccagcttggtgtcaccatactacaggacgaggcattttcccaacttattatcatatatgtacaagatagagattttcctttccagcttggtcaaattgttagatttggcaattgaggtgcaaaaataatacaggcatgcaaacaaatctgagccattcattcatgtgaacctgctccgatgacaaattcgtttcattcaaaaatttatcacatgatgctttgcctgccaaaaaaaaaaraacgggaggggggaaagcttatcgat

SEQ ID NO: 68308 - protein, 378 aa, Triticum aestivum
  peptide (1)..(378): Ceres Seq. ID no. 15221752
LSKQSTSRSSSLIPKGHGLRFTLTNPPPISMAERLAAAATLRAAAPSGRFPVGRRAGPSSSAFFPSSSSSSPALRLVSLRAASSRPSQKAKSAGRGRSVRCIAAASDAAQLKAAREDIRELLNTTHCHPILVRLGWHDSGTYDKNIKDWPERGGANGSLRFDVELKHGANAGLVNALKLVQPIKDKYPSITYADLFQLASATAIEEAGGPKIPMKYGRVDVTGPEQCPPEGKLPDAGPSAPADHLRLVFYRMGLDDKEIVALSGAHTLGRSRPERSGWGKPETKYTKNGPGAPGGQSWTAEWLKFDNSYFKEIKEKRDQDLLVLPTDAALFEDPAFKVYAEKYAADEEAFFNDYAEAHAKLSSLGAKFDPAEGFSLDD

SEQ ID NO: 68309 - protein, 348 aa, Triticum aestivum
  peptide (1)..(348): Ceres Seq. ID no. 15221753
MAERLAAAATLRAAAPSGRFPVGRRAGPSSSAFFPSSSSSSPALRLVSLRAASSRPSQKAKSAGRGRSVRCIAAASDAAQLKAAREDIRELLNTTHCHPILVRLGWHDSGTYDKNIKDWPERGGANGSLRFDVELKHGANAGLVNALKLVQPIKDKYPSITYADLFQLASATAIEEAGGPKIPMKYGRVDVTGPEQCPPEGKLPDAGPSAPADHLRLVFYRMGLDDKEIVALSGAHTLGRSRPERSGWGKPETKYTKNGPGAPGGQSWTAEWLKFDNSYFKEIKEKRDQDLLVLPTDAALFEDPAFKVYAEKYAADEEAFFNDYAEAHAKLSSLGAKFDPAEGFSLDD

SEQ ID NO: 68310 - DNA, 1796 bp, Triticum aestivum
  misc_feature (1)..(1796): Ceres Seq. ID no. 13654142
aaactgcaaaattccccaacagacgaccatgaagcttcggctgcgttccatggacgcgcgcggcggcgtcgctgagacgcaccgcgtgcagctgccggacacggccgtgctcgccgatgtgaagtccttcctcgccgccaagctctccgccgcgcagcccgtccccgccgagtccgtccgcctctccctcaaccgctcgcaggagctctgttcaccggacccctcagccaccctcgccgccctcggcctcgcatccggtgacctcctctatttcacgctctccgcagaattattatcgcagccaccgcctcctcaaacacttccccggaaccctagcccggatacagcctccatcgggcaaattgcttccggttcccaatctcctggggaggccggtggatcctcgtcaccgccgcaaaatctacacatacagcctgtctcttcgtcgctgccgcaaaatctacacatagagcctatctcttcgccgaggccgcgagccctccacgtggagcctattttgcccgtggcatctgatccgcccgatgtggtgatggcggaggccgtccacgcacccaagagcttgtcgagccttgtgattgggattctcaagcgggagatggaggcggaggatgctggatgcgcaaatggtacagttatccatcgcctagctgtgtccctgcaggcagctcttgtcgatgctggcttccttgcggagaatccgatggggtctcgccccggattgctgaaggactgggcctcgggtgcagcggcaacactgaccgtaaagtacaccctaccggagcttgtcgccatgctacctgagggtgaagaggggaagacagtggttttgaactgctcattgatgccaaattttgtgatgatatatgggtgtgtgcctggggcatgctcagaagtgcgcagattgtgcttggagttaccaaagctggcgccgctgctatatctggatagcaatgaagtgggtgcaacagaggagaaggagattcttgagctttggagggtgctgaaggatgagctgtgtcttccgctgatgatatctttgtgccaactcaacgggttgcgcttgccgccgtgcttgatggcattgccaggtgatctgaaggctaaagtcttggagtttgttcctggtgttgatcttgcaagggttcagtgcgcatgcaaggaattgcaggatcttgcagcagatgataatctttggaagatgaggcttgaactggagatgagtccttctagcaagggttctggatggagcggagattggaagcaaaggtttgtggcagcttggaaggtggacaacagtaggaggcatcacaagagaccacccagcccaaggttttcgggctatggttgggggatcggtacacgtaacccacttaacttcccagtaattggtggtgattcggaccgtctgccctttataaatcacaatatccttgggcgtagttttggaaatcagcggaggaacatctcgcccaactgcaatttcgagggtcatcgccaagggtttccttgatttaagttttcactagtatctcaagtatgcaatgcataggctgccttgtacatgtttataagttgcatgccagtgctcttatcctcgtgaacttttttgtctgtatcttagatcctatgtcttgtcgttttccggttattccttgctatgacaccaaagtacttctgctctgatctagccaacgccatgatcaattatgtaataaatagtttggacttatggtactgagagcttaactttgctctctatacatgtttcggtatct

SEQ ID NO: 68311 - protein, 509 aa, Triticum aestivum
  peptide (1)..(509): Ceres Seq. ID no. 13654143
NCKIPQQTTMKLRLRSMDARGGVAETHRVQLPDTAVLADVKSFLAAKLSAAQPVPAESVRLSLNRSQELCSPDPSATLAALGLASGDLLYFTLSAELLSQPPPPQTLPRNPSPDTASIGQIASGSQSPGEAGGSSSPPQNLHIQPVSSSLPQNLHIEPISSPRPRALHVEPILPVASDPPDVVMAEAVHAPKSLSSLVIGILKREMEAEDAGCANGTVIHRLAVSLQAALVDAGFLAENPMGSRPGLLKDWASGAAATLTVKYTLPELVAMLPEGEEGKTVVLNCSLMPNFVMIYGCVPGACSEVRRLCLELPKLAPLLYLDSNEVGATEEKEILELWRVLKDELCLPLMISLCQLNGLRLPPCLMALPGDLKAKVLEFVPGVDLARVQCACKELQDLAADDNLWKMRLELEMSPSSKGSGWSGDWKQRFVAAWKVDNSRRHHKRPPSPRFSGYGWGIGTRNPLNFPVIGGDSDRLPFINHNILGRSFGNQRRNISPNCNFEGHRQGFP

SEQ ID NO: 68312 - protein, 500 aa, Triticum aestivum
  peptide (1)..(500): Ceres Seq. ID no. 13654144
MKLRLRSMDARGGVAETHRVQLPDTAVLADVKSFLAAKLSAAQPVPAESVRLSLNRSQELCSPDPSATLAALGLASGDLLYFTLSAELLSQPPPPQTLPRNPSPDTASIGQIASGSQSPGEAGGSSSPPQNLHIQPVSSSLPQNLHIEPISSPRPRALHVEPILPVASDPPDVVMAEAVHAPKSLSSLVIGILKREMEAEDAGCANGTVIHRLAVSLQAALVDAGFLAENPMGSRPGLLKDWASGAAATLTVKYTLPELVAMLPEGEEGKTVVLNCSLMPNFVMIYGCVPGACSEVRRLCLELPKLAPLLYLDSNEVGATEEKEILELWRVLKDELCLPLMISLCQLNGLRLPPCLMALPGDLKAKVLEFVPGVDLARVQCACKELQDLAADDNLWKMRLELEMSPSSKGSGWSGDWKQRFVAAWKVDNSRRHHKRPPSPRFSGYGWGIGTRNPLNFPVIGGDSDRLPFINHNILGRSFGNQRRNISPNCNFEGHRQGFP

SEQ ID NO: 68313 - protein, 493 aa, Triticum aestivum
  peptide (1)..(493): Ceres Seq. ID no. 13654145
MDARGGVAETHRVQLPDTAVLADVKSFLAAKLSAAQPVPAESVRLSLNRSQELCSPDPSATLAALGLASGDLLYFTLSAELLSQPPPPQTLPRNPSPDTASIGQIASGSQSPGEAGGSSSPPQNLHIQPVSSSLPQNLHIEPISSPRPRALHVEPILPVASDPPDVVMAEAVHAPKSLSSLVIGILKREMEAEDAGCANGTVIHRLAVSLQAALVDAGFLAENPMGSRPGLLKDWASGAAATLTVKYTLPELVAMLPEGEEGKTVVLNCSLMPNFVMIYGCVPGACSEVRRLCLELPKLAPLLYLDSNEVGATEEKEILELWRVLKDELCLPLMISLCQLNGLRLPPCLMALPGDLKAKVLEFVPGVDLARVQCACKELQDLAADDNLWKMRLELEMSPSSKGSGWSGDWKQRFVAAWKVDNSRRHHKRPPSPRFSGYGWGIGTRNPLNFPVIGGDSDRLPFINHNILGRSFGNQRRNISPNCNFEGHRQGFP

SEQ ID NO: 68314 - DNA, 1556 bp, Triticum aestivum
  misc_feature (1)..(1556): Ceres Seq. ID no. 15226246
ctcgagcgagtttccacgattttgcttgcgctacaacaacaacatgtcggtgctcccggagcccaccctagccggggtggcgcgagagctggcaaccctcgccgcgccgctctggctcgccgccctcgtcggcctgctcatcggctgggcctggcgcccgcgctgggcagcagcggtcgtcgacgtcgccgtcgccggccagcaccaccacgagcccgtcgccaaccacttggccgtcgtgcctagagctaagccggcctcggtggagccggtgacggaggaggaggaattggctgtcagcaccccggacctcatgcacctccgcagggtcgtcgaggagaaggacggcggccccgcctggacgcacatcatggaccgcaccctcccgacattccgctaccaggcctggaagagagaaccccagaacggaacgccgcagtaccgcagcagcaccatcttcgaagacgcgtcgcccgatgtcgtcagggatttcttctgggacgatgacttccggatcagcaacacctgggacgacatgctccttgagcacgacacgctggaggagtgcacgaagacggggacgatggttgttcgctgggtcaggaagtttccgttcttctgcagcgacagggagtatgttatcggtcgcaggatatgggcatctggaaagacctactactgcgttaccaagagcgtgcctcgtccctctgttccaaggtgcagcaaacctcgccgtgtggacctgtattactctagctggtgcatccgtccagttgaatcaagaaacggtgatggggcaatgacggcatgcgaggtgctcctgtttcatcacgaagacatgggtatcccatggagcatcgcgaagctcggcgtgcagcagggtatgtggggctgcgtcaaacggatcgagcctggcctacgggcataccagaccgcaagggcctccggcgagcccatctcgaaatgcgctgcaatggcacatgccaacacaaagtttgtcgccgacgagctcaccgcttcagagaacaacaccgaggccggttcgaccagcaacaacgcccaagccgagaagccgaagcactggacgggcaacctacccaaggtcttcgtgataggcagcgtggtcgccctggcttgcaccttcgacaaggggctactgaccaaggccctcgtgttcggaacggcgagaaggtttgcaggaccaggaagaagataggaaccaaacatcgacgatccatgacgcgcatttgttccgatgcacaaccgagcgagcgatgctacccggtattatttccggtcctgagacgctcgtgcttgcagatgaggacgaggacggcgtttgctcatgctagagagcatctgtaagcaggcttgtgtacatactgctgtagctgcagtctgtgaagctgagagctgattaggatatggaaccatgatgataatgagactgaattgtattggatgctgagacatggccatcatcatcattatgatgatgatgtactacaatgaataaggctcatattttggaggtgctataaaaacatagtgctttt

SEQ ID NO: 68315 - protein, 404 aa, Triticum aestivum
  peptide (1)..(404): Ceres Seq. ID no. 15226247
SSEFPRFCLRYNNNMSVLPEPTLAGVARELATLAAPLWLAALVGLLIGWAWRPRWAAAVVDVAVAGQHHHEPVANHLAVVPRAKPASVEPVTEEEELAVSTPDLMHLRRVVEEKDGGPAWTHIMDRTLPTFRYQAWKREPQNGTPQYRSSTIFEDASPDVVRDFFWDDDFRISNTWDDMLLEHDTLEECTKTGTMVVRWVRKFPFFCSDREYVIGRRIWASGKTYYCVTKSVPRPSVPRCSKPRRVDLYYSSWCIRPVESRNGDGAMTACEVLLFHHEDMGIPWSIAKLGVQQGMWGCVKRIEPGLRAYQTARASGEPISKCAAMAHANTKFVADELTASENNTEAGSTSNNAQAEKPKHWTGNLPKVFVIGSVVALACTFDKGLLTKALVFGTARRFAGPGRR

SEQ ID NO: 68316 - protein, 390 aa, Triticum aestivum
  peptide (1)..(390): Ceres Seq. ID no. 15226248
MSVLPEPTLAGVARELATLAAPLWLAALVGLLIGWAWRPRWAAAVVDVAVAGQHHHEPVANHLAVVPRAKPASVEPVTEEEELAVSTPDLMHLRRVVEEKDGGPAWTHIMDRTLPTFRYQAWKREPQNGTPQYRSSTIFEDASPDVVRDFFWDDDFRISNTWDDMLLEHDTLEECTKTGTMVVRWVRKFPFFCSDREYVIGRRIWASGKTYYCVTKSVPRPSVPRCSKPRRVDLYYSSWCIRPVESRNGDGAMTACEVLLFHHEDMGIPWSIAKLGVQQGMWGCVKRIEPGLRAYQTARASGEPISKCAAMAHANTKFVADELTASENNTEAGSTSNNAQAEKPKHWTGNLPKVFVIGSVVALACTFDKGLLTKALVFGTARRFAGPGRR

SEQ ID NO: 68317 - protein, 300 aa, Triticum aestivum
  peptide (1)..(300): Ceres Seq. ID no. 15226249
MHLRRVVEEKDGGPAWTHIMDRTLPTFRYQAWKREPQNGTPQYRSSTIFEDASPDVVRDFFWDDDFRISNTWDDMLLEHDTLEECTKTGTMVVRWVRKFPFFCSDREYVIGRRIWASGKTYYCVTKSVPRPSVPRCSKPRRVDLYYSSWCIRPVESRNGDGAMTACEVLLFHHEDMGIPWSIAKLGVQQGMWGCVKRIEPGLRAYQTARASGEPISKCAAMAHANTKFVADELTASENNTEAGSTSNNAQAEKPKHWTGNLPKVFVIGSVVALACTFDKGLLTKALVFGTARRFAGPGRR

SEQ ID NO: 68318 - DNA, 2094 bp, Triticum aestivum
  misc_feature (1)..(2094): Ceres Seq. ID no. 13654353
cccactagcactggagtattttggtgccttgcgtgtaaaatttctggtgctcccgtcttcttgatcccctccctccatggtcaagacctcaccttggaatggggaccctcatcggaaaagtaatggtcgtccatttttacaacgaggggtggataatcttctcctccttctcctcctccctgtataaaagggcctcctcctctgcccaactcatccagagcaacacttgttgccaagacagacaccagtctgctctgccctgcctcttgaaccaaaacagagcatccaagaggaggcagagagaggtagaagaagaagtagaagatggcgctcctcctccttgtgctggtcggcgttgtggtcggcgtggtgctggcgagcagcctgctgctgcgctggaacgaggtcaggtacggcaacggcaggaggaaggatggcgatggctgcttgccgccggggacaatgggctggccgctgttcggcgagaccaccgagttcctcaagcagggccccagcttcatgaagcagaggaggctcaggtacgggaggctgttccggacgcacatcctggggtgccccacggtggtgtgcatggacccggagctcaaccgccgcatgctgctgcagggcgagtccggcggcctcgtccccggctacccgcagtccatgctcgacatcctcggccgcaacaacatcgccgccgtgcacggcccgctccaccgcctcatgcgcggcgccatgctcggcctcgtccgccccgccgcgctccgcaccagcctcctccccaagatcgacgccttcatgcgcgaccacctccatggatgggcaggcagtgtcgtcgacgtccaggccaagaccaaggagatggccttgctgtccgcactccagcagatcgccggcatcacggctggcccactctctgacgccctcaaaacagagctatgcagcctggtgctcggcaccatctcgttgccgatcaaccttccgggaaccagctactaccagggcttccaggcaaggacgaagcttgtgtccatgctagagcagatgatcgcggagcggcggtcctctggtgatgctcacgatgacatgctggatgctctcttgagaagcggcgacgatgggacccgggagaaactcactgatgagcagatcatcgacttgctcatcgccctcatctactctggatacgagacgatgtcgaccacttcgatgatggctgtcaagtacctgtcggaccacccgcgagctcttgatgaactcaggagagagcatcttgatatcaggaaggggaaatcgccggaggaagccatcagttatgaagatttgaagtccatggccttcactcgagctgtcatttctgagacactaagattagctacagtcgtcaatgggctcctgaggaaaacaactcaggatgtggaaatgaatgggtatgtcattccaaaagggtggagaatctatgtttacaccagggagataaactacgacccattcatgtatcctgacccgatgactttcaatccgtggaggtggctggagaagaacatggaatcgcacccgcacttcatgttgttcggaggaggcggccggatgtgccccggaaaggaggtgggcacggccgagatcgcgacttttctccactatttcgtgacccgatacagatggcaggaagaaggcaagaacacgatcttgaaattcccccgggtggaggctcccaacgggttacatatccgagttcaagattactgattttgcaacatacattttgcagagtttaggtagatagggcccagactgaggcgacgagagtgcgattctgcaccgacggaaagattagatcagccttgtaagaaaataggaaacataggtatagtgtaggtattataggtttagtaggcaattgacgtagaaggccacaagaggcaactatgttcttccttgtgatcaattacatatgcatgataagcatcacaaaatatatgtgatatgtctggtgacttgaatctgataagcagttatacatatatgtgtatatctggtgccttgaatcgatgataagcagcaccatatatacgagatatgaggtgactt

SEQ ID NO: 68319 - protein, 475 aa, Triticum aestivum
  peptide (1)..(475): Ceres Seq. ID no. 13654354
MALLLLVLVGVVVGVVLASSLLLRWNEVRYGNGRRKDGDGCLPPGTMGWPLFGETTEFLKQGPSFMKQRRLRYGRLFRTHILGCPTVVCMDPELNRRMLLQGESGGLVPGYPQSMLDILGRNNIAAVHGPLHRLMRGAMLGLVRPAALRTSLLPKIDAFMRDHLHGWAGSVVDVQAKTKEMALLSALQQIAGITAGPLSDALKTELCSLVLGTISLPINLPGTSYYQGFQARTKLVSMLEQMIAERRSSGDAHDDMLDALLRSGDDGTREKLTDEQIIDLLIALIYSGYETMSTTSMMAVKYLSDHPRALDELRREHLDIRKGKSPEEAISYEDLKSMAFTRAVISETLRLATVVNGLLRKTTQDVEMNGYVIPKGWRIYVYTREINYDPFMYPDPMTFNPWRWLEKNMESHPHFMLFGGGGRMCPGKEVGTAEIATFLHYFVTRYRWQEEGKNTILKFPRVEAPNGLHIRVQDY

SEQ ID NO: 68320 - protein, 429 aa, Triticum aestivum
  peptide (1)..(429): Ceres Seq. ID no. 13654355
MGWPLFGETTEFLKQGPSFMKQRRLRYGRLFRTHILGCPTVVCMDPELNRRMLLQGESGGLVPGYPQSMLDILGRNNIAAVHGPLHRLMRGAMLGLVRPAALRTSLLPKIDAFMRDHLHGWAGSVVDVQAKTKEMALLSALQQIAGITAGPLSDALKTELCSLVLGTISLPINLPGTSYYQGFQARTKLVSMLEQMIAERRSSGDAHDDMLDALLRSGDDGTREKLTDEQIIDLLIALIYSGYETMSTTSMMAVKYLSDHPRALDELRREHLDIRKGKSPEEAISYEDLKSMAFTRAVISETLRLATVVNGLLRKTTQDVEMNGYVIPKGWRIYVYTREINYDPFMYPDPMTFNPWRWLEKNMESHPHFMLFGGGGRMCPGKEVGTAEIATFLHYFVTRYRWQEEGKNTILKFPRVEAPNGLHIRVQDY

SEQ ID NO: 68321 - protein, 410 aa, Triticum aestivum
  peptide (1)..(410): Ceres Seq. ID no. 13654356
MKQRRLRYGRLFRTHILGCPTVVCMDPELNRRMLLQGESGGLVPGYPQSMLDILGRNNIAAVHGPLHRLMRGAMLGLVRPAALRTSLLPKIDAFMRDHLHGWAGSVVDVQAKTKEMALLSALQQIAGITAGPLSDALKTELCSLVLGTISLPINLPGTSYYQGFQARTKLVSMLEQMIAERRSSGDAHDDMLDALLRSGDDGTREKLTDEQIIDLLIALIYSGYETMSTTSMMAVKYLSDHPRALDELRREHLDIRKGKSPEEAISYEDLKSMAFTRAVISETLRLATVVNGLLRKTTQDVEMNGYVIPKGWRIYVYTREINYDPFMYPDPMTFNPWRWLEKNMESHPHFMLFGGGGRMCPGKEVGTAEIATFLHYFVTRYRWQEEGKNTILKFPRVEAPNGLHIRVQDY

SEQ ID NO: 68322 - DNA, 1450 bp, Triticum aestivum
  misc_feature (1)..(1450): Ceres Seq. ID no. 14302059
ctttatccaccccatccaaatccccgattcctccaaccctcccagaccgcaatggccgccgccgccgccgccgccgccgagccctcctccgccgacagccgccgctacgtcgtgggctacgcgctcgcgcccaagaagcagaacagcttcatcaagccctcgctcatctcccgcgcggcggcgcgcggcgtggacctcgtccccgtcgacgacgcgcggcccctcgccgaccagggccccttcgacctcgtcatccacaagctctacggccacgactggcgcgcccagctccaggccttctccgcccgctacccctccgtccccgtcgtcgacccgccccacgccatcgaccgcctccacaaccgcatctccatgctccaggtcgtctccgagctcgacgtcccgctcaccgacgccgcctccgcctccgctgacggcgaaggccaccgccacaccttcggcatccccagccaggtcgtcgtctacgacgccgccgcgctcgccgactcgggcctcctcgccgcgctccgcttcccgctcatcgccaagcccctcgtcgccgacggcagcgccaagtcgcacaagatgtccctcgtctaccaccgagaggggctccgcaagctccgcccgccgctcgtcctgcaggagttcgtcaaccacggcggcgtcatattcaaggtttacgtcgtcggcggccacgtcacctgcgtcaagcgccgcagcctaccggacgtctccaaggagatcctcgaggacgccgccgccgagggcaccatctccttctcgcaggtatccaatctccccaatcagcgcacggccgaggagtactacgaggacatgcggctcgaggacgccgtcatgccgcccactgatttcgtcaacgagatcgcaggcgggctccgccgtgccctgggcctgcagctcttcaacttcgacatgatccgggatgttcgtgccgggaaccggtatctcgtcattgacatcaactacttccccggttacgcgaagatgcccggctacgagattgtccttactgatttcttctgggatatggttcacaaggacgacgtggccctcaaggaggaggagcagcagagcaatcatgctgttgtgaaatgagatggatttgctcggcatagcttgctcgcaaacctgcaattctttcatgtctgggggaaatgtgaggtggcaggatggttacaagactcgaggggaataacgagcaaccaattaggatggggagatggggattaacaggttctggatttacttgggtttcaaccagccgcaagcggaggacctgcaatgtaaatcctctctccttgctcctgtcataccggttgtttaggtatctttctgttcttcgtaatttgcttcacccagtttagttagaacaaaagtgggggaacagaagccaagttctgaagaagatatatttgttctggaaaac

SEQ ID NO: 68323 - protein, 372 aa, Triticum aestivum
  peptide (1)..(372): Ceres Seq. ID no. 14302060
LYPPHPNPRFLQPSQTAMAAAAAAAAEPSSADSRRYVVGYALAPKKQNSFIKPSLISRAAARGVDLVPVDDARPLADQGPFDLVIHKLYGHDWRAQLQAFSARYPSVPVVDPPHAIDRLHNRISMLQVVSELDVPLTDAASASADGEGHRHTFGIPSQVVVYDAAALADSGLLAALRFPLIAKPLVADGSAKSHKMSLVYHREGLRKLRPPLVLQEFVNHGGVIFKVYVVGGHVTCVKRRSLPDVSKEILEDAAAEGTISFSQVSNLPNQRTAEEYYEDMRLEDAVMPPTDFVNEIAGGLRRALGLQLFNFDMIRDVRAGNRYLVIDINYFPGYAKMPGYEIVLTDFFWDMVHKDDVALKEEEQQSNHAVVK

SEQ ID NO: 68324 - protein, 355 aa, Triticum aestivum
  peptide (1)..(355): Ceres Seq. ID no. 14302061
MAAAAAAAAEPSSADSRRYVVGYALAPKKQNSFIKPSLISRAAARGVDLVPVDDARPLADQGPFDLVIHKLYGHDWRAQLQAFSARYPSVPVVDPPHAIDRLHNRISMLQVVSELDVPLTDAASASADGEGHRHTFGIPSQVVVYDAAALADSGLLAALRFPLIAKPLVADGSAKSHKMSLVYHREGLRKLRPPLVLQEFVNHGGVIFKVYVVGGHVTCVKRRSLPDVSKEILEDAAAEGTISFSQVSNLPNQRTAEEYYEDMRLEDAVMPPTDFVNEIAGGLRRALGLQLFNFDMIRDVRAGNRYLVIDINYFPGYAKMPGYEIVLTDFFWDMVHKDDVALKEEEQQSNHAVVK

SEQ ID NO: 68325 - protein, 312 aa, Triticum aestivum
  peptide (1)..(312): Ceres Seq. ID no. 14302062
FIHPIQIPDSSNPPRPQWPPPPPPPPSPPPPTAAATSWATRSRPRSRTASSSPRSSPARRRAAWTSSPSTTRGPSPTRAPSTSSSTSSTATTGAPSSRPSPPATPPSPSSTRPTPSTASTTASPCSRSSPSSTSRSPTPPPPPLTAKATATPSASPARSSSTTPPRSPTRASSPRSASRSSPSPSSPTAAPSRTRCPSSTTERGSASSARRSSCRSSSTTAASYSRFTSSAATSPASSAAAYRTSPRRSSRTPPPRAPSPSRRYPISPISARPRSTTRTCGSRTPSCRPLISSTRSQAGSAVPWACSSSTST

SEQ ID NO: 68326 - DNA, 670 bp, Triticum aestivum
  misc_feature (1)..(670): Ceres Seq. ID no. 13598286
gaaactacgaatgccttccggggtagcgaacccgccgcatgtctctccgcctcctcctcccacctcgcggcagcctacgcctcctttcccctctccatcgccaccagaccccaaggcctccgccctttcgaacgactgccaccggcgtcccacagagggcctctagtttcttcagtatccctatccgcgccttcaccagtatctccggcatggctgctgggacgcagcagcagaccgtggaggttagggagagcgtggagctgacggaggaggaggagcggatcttcgctaggctgctggacgtcgtccgccacttcggactcggcacccagctccgcgtcgccgggggatgggtccgggacaagctattggggaaaggctctgctgacattgacattgcacttgataatatgacgggccaaaatttctgtgagagagtaaatgagtactcaaaattcatgggtgaagagcagaaaggaatcggcgttatccagtgcaaccctgatcaatccaagcacctggaaactgcaagaatgcttatatatggcatatggattgattttgtcaacttgaggtccgaaaagtacgctgaaaacagtcgtattcctactgtggagattggaacagccaaagaagatgcactcccgcaggactaaaacatcatagctta

SEQ ID NO: 68327 - protein, 205 aa, Triticum aestivum
  peptide (1)..(205): Ceres Seq. ID no. 13598287
MSLRLLLPPRGSLRLLSPLHRHQTPRPPPFRTTATGVPQRASSFFSIPIRAFTSISGMAAGTQQQTVEVRESVELTEEEERIFARLLDVVRHFGLGTQLRVAGGWVRDKLLGKGSADIDIALDNMTGQNFCERVNEYSKFMGEEQKGIGVIQCNPDQSKHLETARMLIYGIWIDFVNLRSEKYAENSRIPTVEIGTAKEDALPQD

SEQ ID NO: 68328 - protein, 148 aa, Triticum aestivum
  peptide (1)..(148): Ceres Seq. ID no. 13598288
MAAGTQQQTVEVRESVELTEEEERIFARLLDVVRHFGLGTQLRVAGGWVRDKLLGKGSADIDIALDNMTGQNFCERVNEYSKFMGEEQKGIGVIQCNPDQSKHLETARMLIYGIWIDFVNLRSEKYAENSRIPTVEIGTAKEDALPQD

SEQ ID NO: 68329 - DNA, 1235 bp, Triticum aestivum
  misc_feature (1)..(1235): Ceres Seq. ID no. 13595983
gtcgtgctgcaattgagatcgactcgtcggtggccgacccctcggcggcgagcaccggggttagggtttaggggcctggatccatggctcggcccatgggatccagcggcttcgaggctgccctagccgtgtgccccgccgccgcccaggcctactccaagtactgcggtattgtatctggatgcacaaatgcgaacccaagggaagggttggcggatctttcacgaactatagataatatggaaggaatgagggatggaatatttggtgatattcacaagctcatgtcagttcttgagttcgatgatgtgagccaattcaattccttctatgattttgtcttcttcatttctcgtgaaaatggccaaaagaatattactgttcagaaggctcttgcagcatggaggatagttcttgttggaaggttccgattgcttgaccggtggtgtaactttgttgagaagtaccaacgtcacaacatttctgaggacgcctggcagcagctactagctttcagcaggtgtgtaaacgaggatctggaaggttatgatccaaaaggtgcttggcctgtcataattgatgattttgtggagcacatgcacagaatctaccgccctagtgactgctccagtgcaatggaatcacaatgcagcatttccaatacatttagaggtctaaatctattacctggatcaaagaggaaatgccctactcagtttaactccagtgaagagagcgtagagctctcagaagctcttagacactctgtccaacttaccccgtcgaagcgacttaaggaaagttctgcgcctactagatatggtgtttgggagcgagacgcaagtacccctttctttaacagcacaccagattgtcgcgaggacatgaatttacagaactcaagaggctgccttcagaactcacctcgtgttattgaggatggtttttcaaaagggttcgaaggttgcatttcaatgaaatgctcattttagtgcaatgaggaatgcatggcatcatcatttatgactgcccgttactccatatatttctgttttgcgtcaacaccattttgtatttgtacttaaagtcagtttcccagtggtgatattattttgtacacaaacagtgatgttatacatgtctgctatcgcagagaaaacggcttgtgattgttctttccaaaaaaaaaaaaaaaaaagsttatcgataccgtcgacctccaggaggcacccgcc

SEQ ID NO: 68330 - protein, 302 aa, Triticum aestivum
  peptide (1)..(302): Ceres Seq. ID no. 15221718
MARPMGSSGFEAALAVCPAAAQAYSKYCGIVSGCTNANPREGLADLSRTIDNMEGMRDGIFGDIHKLMSVLEFDDVSQFNSFYDFVFFISRENGQKNITVQKALAAWRIVLVGRFRLLDRWCNFVEKYQRHNISEDAWQQLLAFSRCVNEDLEGYDPKGAWPVIIDDFVEHMHRIYRPSDCSSAMESQCSISNTFRGLNLLPGSKRKCPTQFNSSEESVELSEALRHSVQLTPSKRLKESSAPTRYGVWERDASTPFFNSTPDCREDMNLQNSRGCLQNSPRVIEDGFSKGFEGCISMKCSF

SEQ ID NO: 68331 - protein, 298 aa, Triticum aestivum
  peptide (1)..(298): Ceres Seq. ID no. 15221719
MGSSGFEAALAVCPAAAQAYSKYCGIVSGCTNANPREGLADLSRTIDNMEGMRDGIFGDIHKLMSVLEFDDVSQFNSFYDFVFFISRENGQKNITVQKALAAWRIVLVGRFRLLDRWCNFVEKYQRHNISEDAWQQLLAFSRCVNEDLEGYDPKGAWPVIIDDFVEHMHRIYRPSDCSSAMESQCSISNTFRGLNLLPGSKRKCPTQFNSSEESVELSEALRHSVQLTPSKRLKESSAPTRYGVWERDASTPFFNSTPDCREDMNLQNSRGCLQNSPRVIEDGFSKGFEGCISMKCSF

SEQ ID NO: 68332 - protein, 250 aa, Triticum aestivum
  peptide (1)..(250): Ceres Seq. ID no. 15221720
MEGMRDGIFGDIHKLMSVLEFDDVSQFNSFYDFVFFISRENGQKNITVQKALAAWRIVLVGRFRLLDRWCNFVEKYQRHNISEDAWQQLLAFSRCVNEDLEGYDPKGAWPVIIDDFVEHMHRIYRPSDCSSAMESQCSISNTFRGLNLLPGSKRKCPTQFNSSEESVELSEALRHSVQLTPSKRLKESSAPTRYGVWERDASTPFFNSTPDCREDMNLQNSRGCLQNSPRVIEDGFSKGFEGCISMKCSF

SEQ ID NO: 68333 - DNA, 1295 bp, Triticum aestivum
  misc_feature (1)..(1295): Ceres Seq. ID no. 13596358
caaaaaccctagcgcatgcaccttgccggtccggccccgagacgcattccggaaacctccggaacgccgcaatggtttggtttcagtgcgaagactgcggcgagaacctcaagaagcccaagcttgccggccacttccgctcatgctccgcctacaagctttcctgcatcgactgcggcgcagtcttcggccaggacaccgtccagacgcacacccagtgcatctccgaggccgagaagtatggtcccaaggaactgaacaagccgtccagcaatgcacagggtaagccagacaagccaaagccaaatgccgatgttgatatcaatgttgggttgtcgacacgccctccttggttctgcagcctatgcaatacaactaccaccagcaagcaaactctcttggggcatgctgatggcaggaaacatagggcaaaagcaaaagcctttcatgcttctcagaagcaagaaaatggagctgaacaaactccaagcgacaaggaaactggtggagcaccaacaacagcatctacagaactaaatgacgggaagggtgctgacagtgaaagagatgctgacgaggatgttgtgaagagaaagagaacagatagcacaacctcggaggagccagataatgcaaaaagacaaaatttatcgaacttgaagactggagaggcgacacaatctgaaaatggagaagcggaactcaaaacaaagagcaaaagtgctgcagaagaactggtcaatgatgccaatcatcaagatattaagaagcagaaaatcaagtggaagaaaattattacgaagatactagagatgaattcggatggagctatgaagttaaagaagctacaaaagctagttatcagggaagttttagaatgtggtctgttgaaagataaggaacagctgcatgctctgttgatggacaagatagcttcgagctccaggttttctgtggacgggaagaacattagattggtggccaagaatgaagaatcatagtccctgacattttcttgtgctctatttaagatgttactaaaatttgagggaaaatgataccggcaatattatttttttagctgtcaattttggatttgttgtgcctctatcatttccagagaactgttccaagatacagaaactttgtgcttgatttttttttttttggaacagtgggaccaaaccgattttgtagctccagatgctgtgaacttttccggtatactgtatttggcaaggcaactcgtttgcaaattgacaactatatacgcaatcaagaaatgcgagctgccg

SEQ ID NO: 68334 - protein, 332 aa, Triticum aestivum
  peptide (1)..(332): Ceres Seq. ID no. 15221846
KTLAHAPCRSGPETHSGNLRNAAMVWFQCEDCGENLKKPKLAGHFRSCSAYKLSCIDCGAVFGQDTVQTHTQCISEAEKYGPKELNKPSSNAQGKPDKPKPNADVDINVGLSTRPPWFCSLCNTTTTSKQTLLGHADGRKHRAKAKAFHASQKQENGAEQTPSDKETGGAPTTASTELNDGKGADSERDADEDVVKRKRTDSTTSEEPDNAKRQNLSNLKTGEATQSENGEAELKTKSKSAAEELVNDANHQDIKKQKIKWKKIITKILEMNSDGAMKLKKLQKLVIREVLECGLLKDKEQLHALLMDKIASSSRFSVDGKNIRLVAKNEES

SEQ ID NO: 68335 - protein, 309 aa, Triticum aestivum
  peptide (1)..(309): Ceres Seq. ID no. 15221847
MVWFQCEDCGENLKKPKLAGHFRSCSAYKLSCIDCGAVFGQDTVQTHTQCISEAEKYGPKELNKPSSNAQGKPDKPKPNADVDINVGLSTRPPWFCSLCNTTTTSKQTLLGHADGRKHRAKAKAFHASQKQENGAEQTPSDKETGGAPTTASTELNDGKGADSERDADEDVVKRKRTDSTTSEEPDNAKRQNLSNLKTGEATQSENGEAELKTKSKSAAEELVNDANHQDIKKQKIKWKKIITKILEMNSDGAMKLKKLQKLVIREVLECGLLKDKEQLHALLMDKIASSSRFSVDGKNIRLVAKNEES

SEQ ID NO: 68336 - DNA, 1445 bp, Triticum aestivum
  misc_feature (1)..(1445): Ceres Seq. ID no. 13596087
ggtttgaagcaaaccggccggccaccaaccaaccaacgctcccgaatctatcccatcatatcatatcaaaccttccgccgccggcgagctactcgcagcgccggacagcccggcccacttgttctggttctctccctcctctgcccctccgccgcgagctccaacggagaggggaggaagaagcaaagcctcggacatggcacgcgtcctccctctggacatcgagcccggggaggcgcccagagctggtgagacggttgctagcacgccaagctcttcagctgtggtgtcatgcaatagaattgagcattctgagcaaaacataaaggacgacgaatacacgatgctgatgacgccaactcaacatgcaacagctgacaacaacacagaaattttacctcagcaacccaagtcaagtcacttcagttggtggatgacagctctgcttgtctgcttccttcttataatggcaacttatatctttgtgaaatttggagccccctttgcctttgagaaggttctttttccaatcatgaaatgggaagcaagtgcctttggtcgtccagtattggctcttgtcctcgtcgcgtctttggctatcttcccactcattttagtcccctctggaccttctatgtggttagcaggaatgatcttcggttatggctggggtttcgtgattattattgttgggactactcttggcatggttggagcatattggatcggctcattgttccgcgagcgactacatgcatggttaaagagatggcctcagcagatagctctaataaagcttgctggcgaagggagttggttccaccagtttcgagtggttgcgctattcagagtctcaccgtttccatactcgatttttaactatgccgtggccgtgacagaaatcaaattcagcccttatgtatgtggttcagttgccggaatgacacctgaggcattcatctatatctacagcgggcggttgatacgtacgctggccgatgtgaagtatggcaagcataagttgactactgtggagataatctacagcataatctcgttcatcgctgccgctgccctcacggtcgccttcacagtttacgccaagaagtcgctgaacaacataaaaggcccagatgatatctcagaggaccaccaacctgctgctggctctgctggggtgactgcactaaaaaatggccatcaggacgtgcatatcctgtagctttgtttacatgtcgtatgatgtctgtattcattcaattcatcagagaaaataggtagctaggctctgacagcaggtggatgcacctgtcttctaactagatvaatatgtatggttttactgcttgattagtttcatgtggttgatcacccaacatgtattttggccttgttgttggctactggaaatttggccttctcttgaggtgcacatattttttgtc

SEQ ID NO: 68337 - protein, 341 aa, Triticum aestivum
  peptide (1)..(341): Ceres Seq. ID no. 15221765
MARVLPLDIEPGEAPRAGETVASTPSSSAVVSCNRIEHSEQNIKDDEYTMLMTPTQHATADNNTEILPQQPKSSHFSWWMTALLVCFLLIMATYIFVKFGAPFAFEKVLFPIMKWEASAFGRPVLALVLVASLAIFPLILVPSGPSMWLAGMIFGYGWGFVIIIVGTTLGMVGAYWIGSLFRERLHAWLKRWPQQIALIKLAGEGSWFHQFRVVALFRVSPFPYSIFNYAVAVTEIKFSPYVCGSVAGMTPEAFIYIYSGRLIRTLADVKYGKHKLTTVEIIYSIISFIAAAALTVAFTVYAKKSLNNIKGPDDISEDHQPAAGSAGVTALKNGHQDVHIL

SEQ ID NO: 68338 - protein, 292 aa, Triticum aestivum
  peptide (1)..(292): Ceres Seq. ID no. 15221766
MLMTPTQHATADNNTEILPQQPKSSHFSWWMTALLVCFLLIMATYIFVKFGAPFAFEKVLFPIMKWEASAFGRPVLALVLVASLAIFPLILVPSGPSMWLAGMIFGYGWGFVIIIVGTTLGMVGAYWIGSLFRERLHAWLKRWPQQIALIKLAGEGSWFHQFRVVALFRVSPFPYSIFNYAVAVTEIKFSPYVCGSVAGMTPEAFIYIYSGRLIRTLADVKYGKHKLTTVEIIYSIISFIAAAALTVAFTVYAKKSLNNIKGPDDISEDHQPAAGSAGVTALKNGHQDVHIL

SEQ ID NO: 68339 - protein, 290 aa, Triticum aestivum
  peptide (1)..(290): Ceres Seq. ID no. 15221767
MTPTQHATADNNTEILPQQPKSSHFSWWMTALLVCFLLIMATYIFVKFGAPFAFEKVLFPIMKWEASAFGRPVLALVLVASLAIFPLILVPSGPSMWLAGMIFGYGWGFVIIIVGTTLGMVGAYWIGSLFRERLHAWLKRWPQQIALIKLAGEGSWFHQFRVVALFRVSPFPYSIFNYAVAVTEIKFSPYVCGSVAGMTPEAFIYIYSGRLIRTLADVKYGKHKLTTVEIIYSIISFIAAAALTVAFTVYAKKSLNNIKGPDDISEDHQPAAGSAGVTALKNGHQDVHIL

SEQ ID NO: 68340 - DNA, 1491 bp, Triticum aestivum
  misc_feature (1)..(1491): Ceres Seq. ID no. 13595984
gctcgtctctgccgatacttcacacaagaaagatgagatcgccggcaactcttccactactatcttccgatcgtttggtcgccatggcgccgtgacctcgccgtgcttcagcgatggccccgcgctggacctctgatgaccagacaagacggaccgaccgcaccgtgactccgacagccactccgtggtggtaatcagtggagtgccgccaccgtcgatcaaaatctttgacctcccgcatccaccgccagttctgtctccctgcaagcaaatctcagccgccattgctcagcttctgagcagcggagcggatccgagatggagcccatccctctgctcacgccgtacaagatgggccagttcgagctgtcgcaccgggtcgtgctggcgcccatgacgcggcagcgcgcctacggcggcgtgccgcagccgcacgccgccctctactactcccagcgcgccacccccggcggcctcctcatctccgaggccacgcgcgtcgcgccggcaaggcaggacgaggagccggcctcgttcagggacatgccgggggtctgggcgccggagcaggtcgaggcgtggaggcccgtggtcgacgccgtgcacgccgagggcgccgtcttcttctgccagctctggcacgccgcggccgcccccggcgacgccgtcagggaaaggcagcaggtgagcccgcagatgagctatgatggccgccgcgaggagctcacgtcgccgaggagggtggcagctgaggacgcgcccggcgtcgtcgacgcgttcagacgcgccgccaggaacgccatcgatgccggcttcgacggcgtcgagctccaaggcaccaacggctacttcgtcgtcgacggcggtggcccggagagtcgctgccggttcgcgctggaggtggtggacgccgtggcgcgggagatcggcggccaccgcctgggcctgcgactggaccagttcaccgcagagccggacgagcacgcgctggcgctccatgtcgtcagccggctcaacgacctcggcgtgctctactgccacatgatcgagcccaaggtggacggccggcggcgcgtgtcccggcggctgctgccttacagggaggcgttcggcggcacgttcatcgccagcggcgggtacgggcgggaggagggcgacgcggccgtcggcgaggggtacgccgacctggtggcgtacgggcggctcttcctggcgaacccggacctgccgaggaggttcgagctcggcgcgccgctcaacgactgcgtcagcgccaccttctacggcgccggcgccggcgccgcccaccccgccgtcggatacactgattacccgttcctagaatgatcgatgattgtgctcggatgttcttttcggcgtaaacaatcgaccatgatttgcctcctcagtgttgtatatatgatagtactaattttatggggattaagttcatcaaaaaaaaaaaaaaaaaagcttatcgataccgtcgac

SEQ ID NO: 68341 - protein, 342 aa, Triticum aestivum
  peptide (1)..(342): Ceres Seq. ID no. 13595985
MEPIPLLTPYKMGQFELSHRVVLAPMTRQRAYGGVPQPHAALYYSQRATPGGLLISEATRVAPARQDEEPASFRDMPGVWAPEQVEAWRPVVDAVHAEGAVFFCQLWHAAAAPGDAVRERQQVSPQMSYDGRREELTSPRRVAAEDAPGVVDAFRRAARNAIDAGFDGVELQGTNGYFVVDGGGPESRCRFALEVVDAVAREIGGHRLGLRLDQFTAEPDEHALALHVVSRLNDLGVLYCHMIEPKVDGRRRVSRRLLPYREAFGGTFIASGGYGREEGDAAVGEGYADLVAYGRLFLANPDLPRRFELGAPLNDCVSATFYGAGAGAAHPAVGYTDYPFLE

SEQ ID NO: 68342 - protein, 331 aa, Triticum aestivum
  peptide (1)..(331): Ceres Seq. ID no. 13595986
MGQFELSHRVVLAPMTRQRAYGGVPQPHAALYYSQRATPGGLLISEATRVAPARQDEEPASFRDMPGVWAPEQVEAWRPVVDAVHAEGAVFFCQLWHAAAAPGDAVRERQQVSPQMSYDGRREELTSPRRVAAEDAPGVVDAFRRAARNAIDAGFDGVELQGTNGYFVVDGGGPESRCRFALEVVDAVAREIGGHRLGLRLDQFTAEPDEHALALHVVSRLNDLGVLYCHMIEPKVDGRRRVSRRLLPYREAFGGTFIASGGYGREEGDAAVGEGYADLVAYGRLFLANPDLPRRFELGAPLNDCVSATFYGAGAGAAHPAVGYTDYPFLE

SEQ ID NO: 68343 - protein, 317 aa, Triticum aestivum
  peptide (1)..(317): Ceres Seq. ID no. 13595987
MTRQRAYGGVPQPHAALYYSQRATPGGLLISEATRVAPARQDEEPASFRDMPGVWAPEQVEAWRPVVDAVHAEGAVFFCQLWHAAAAPGDAVRERQQVSPQMSYDGRREELTSPRRVAAEDAPGVVDAFRRAARNAIDAGFDGVELQGTNGYFVVDGGGPESRCRFALEVVDAVAREIGGHRLGLRLDQFTAEPDEHALALHVVSRLNDLGVLYCHMIEPKVDGRRRVSRRLLPYREAFGGTFIASGGYGREEGDAAVGEGYADLVAYGRLFLANPDLPRRFELGAPLNDCVSATFYGAGAGAAHPAVGYTDYPFLE

SEQ ID NO: 68344 - DNA, 1148 bp, Triticum aestivum
  misc_feature (1)..(1148): Ceres Seq. ID no. 12614573
acaaagctggaccagaccagaccagaggcaggcagcattcgcagcagcagaagaagacgacgcagccgccaccgccaccgccaccaccgccgacgcgcgcagagctcgacactcgagagaggctgacgagggcgacgacgccggtggccatgtcggcggagacggagcggagctccacggagtcgtccgcggcgtccgggctcgacttcgaggacaccgcgctcacgctcaccctgcgcctccccggcgaccccgaccgcaagcgcggcgcctcctcctcctcctcctgctccctcgccgaccgctcctccctcctcgccgaggctccgccggcccccaaggagcgggtggttggctggccgccggtgaggtcgttccgcaagaacgcgctcgagaacgtcgccgccgggtccaccagggcggccgccgcgccggccaagttcgtcaaggtggccgtcgatggcgcgccctacctgcgcaaggtgaacctgcgggactacgccggctacgaccagctcctccgcgcgctccagggcaagttctgctcccacttcaccatcaggaagttcgccaacgacgagatgaagctggtggacgcggtgaacgggacggagtacgtgcccacctacgaggacaaggacggcgactggatgctcgtcggcgacgtcccctggaagatgtttgaggaagcctgccaacgcgtccgcctgatgaagaactccgaggccgtgaacgtagcacccagagctgcccggtgaggcacgccgcgtggcccttacgaacggtgctgccggaaaggaggaggaggctttgctctgccgaggagataggaatgtgtacagctatcggttaccactttgggtttacttgatgctcttgggtcgtgaaaagttgctggtttcattactcgtctgtagcagcaccactatagtctctactactacatatagaagatggtgatggtcaaagtactgggagcttgaaatatacgcctttacatatagtttgtttgtttgtctcttgatgaataagaccaagcttgcagaaactcggcgttctctgctgtttgcgcgcacccgtcgcgaggtcgcctgtgatgccgcaggcaacgcctttggctttgccttggtagagtttatttttgtgtc

SEQ ID NO: 68345 - protein, 251 aa, Triticum aestivum
  peptide (1)..(251): Ceres Seq. ID no. 12614574
KAGPDQTRGRQHSQQQKKTTQPPPPPPPPPTRAELDTRERLTRATTPVAMSAETERSSTESSAASGLDFEDTALTLTLRLPGDPDRKRGASSSSSCSLADRSSLLAEAPPAPKERVVGWPPVRSFRKNALENVAAGSTRAAAAPAKFVKVAVDGAPYLRKVNLRDYAGYDQLLRALQGKFCSHFTIRKFANDEMKLVDAVNGTEYVPTYEDKDGDWMLVGDVPWKMFEEACQRVRLMKNSEAVNVAPRAAR

SEQ ID NO: 68346 - protein, 227 aa, Triticum aestivum
  peptide (1)..(227): Ceres Seq. ID no. 12614575
QSWTRPDQRQAAFAAAEEDDAAATATATTADARRARHSREADEGDDAGGHVGGDGAELHGVVRGVRARLRGHRAHAHPAPPRRPRPQARRLLLLLLLPRRPLLPPRRGSAGPQGAGGWLAAGEVVPQERARERRRRVHQGGRRAGQVRQGGRRWRALPAQGEPAGLRRLRPAPPRAPGQVLLPLHHQEVRQRRDEAGGRGERDGVRAHLRGQGRRLDARRRRPLEDV

SEQ ID NO: 68347 - protein, 202 aa, Triticum aestivum
  peptide (1)..(202): Ceres Seq. ID no. 12614576
MSAETERSSTESSAASGLDFEDTALTLTLRLPGDPDRKRGASSSSSCSLADRSSLLAEAPPAPKERVVGWPPVRSFRKNALENVAAGSTRAAAAPAKFVKVAVDGAPYLRKVNLRDYAGYDQLLRALQGKFCSHFTIRKFANDEMKLVDAVNGTEYVPTYEDKDGDWMLVGDVPWKMFEEACQRVRLMKNSEAVNVAPRAAR

SEQ ID NO: 68348 - DNA, 1517 bp, Triticum aestivum
  misc_feature (1)..(1517): Ceres Seq. ID no. 13654241
atggcatgcgctatatcttcctccccaaagtttgtcggaattacaaaacagcccccgtactcttcctccccacctctcgcctaccgttcgcgtcctccgcccgaggcctccacgggagcgccggagcgcacgcctgatctccccgcctcctcctcccggcaccgcggccccggctcctagcccgcctcacgatcgggggacgaggcacgagtaggagggcgagggtgcgaggagatgcagagggaccgaggcgtctcggcggccgctgggggcgccggtgagaggaagcggataggcgaggcgatggacaggtcctccccgtcgacgtcctgggggttctccggcggacgcgagagggaccggatcgccgccggcaagcagccggaggtgccccgctccggcggcggatccaccgccatgtccaagggcaagttgtccgatggagaatcggatactgacagtgaagaatcagatctcagtggttctgatggagaagatacatcgtggatttcatggttctgtagcttgcgaggcaatgagtttttctgtgaagttgatgacgattacatacaagacgatttcaatctctgtgggctaagcggtcaagttccatattatgaatatgctcttgatctgatattggatgtcgagtcttcacatggtgatatgttcacagaagagcagaatgaacttattgaatcagctgctgagatgctttatggattgattcatgttcgatatattcttacaagtaaaggattggctgcaatgttggataaatacaagaattatgactttggcagatgtccaagagtgcactgcagcggccagccatgccttccagttggccagtcggacattcctcgttctagtaatgtgaaaatttactgcccaaagtgtgaagatctctactatccgagatccaaatatcaaagcaacattgacggagcttactttgggacaacgtttcctcacttgtttctgatgacgtacccacatttgaagccccagaaaccgtcacagcagtacgtccccaaggtttttggcttcaaacttcataagccataacaagtttgaagactgaaggtgcaaaaggttcatagcagagttgtctgatatgtcacgctgcacatcacttccaagctgctcatttgtgcgcgtggcgcagtttagcacttggttcagttggttacccgtggcttggccgaaaccgacctgacctctggctgatttcccttgtcctccgttttcgctctcgcctgacgttctgatttgatccttgtggcttgtttagtgtagtagatttcttctatcctgttctttatactcattattatatttgagtttggcagttgctaaaagaaggcagttcgtaacagtgttatgtctctgctgtgtatttttcattttgttttacattaggttcctttgccaaaatgtgatggtaatggtaatctgaaacattcgatccggctattcttattcttcacctgcaactgagtttgtatggaaagttt

SEQ ID NO: 68349 - protein, 277 aa, Triticum aestivum
  peptide (1)..(277): Ceres Seq. ID no. 13654242
MQRDRGVSAAAGGAGERKRIGEAMDRSSPSTSWGFSGGRERDRIAAGKQPEVPRSGGGSTAMSKGKLSDGESDTDSEESDLSGSDGEDTSWISWFCSLRGNEFFCEVDDDYIQDDFNLCGLSGQVPYYEYALDLILDVESSHGDMFTEEQNELIESAAEMLYGLIHVRYILTSKGLAAMLDKYKNYDFGRCPRVHCSGQPCLPVGQSDIPRSSNVKIYCPKCEDLYYPRSKYQSNIDGAYFGTTFPHLFLMTYPHLKPQKPSQQYVPKVFGFKLHKP

SEQ ID NO: 68350 - protein, 254 aa, Triticum aestivum
  peptide (1)..(254): Ceres Seq. ID no. 13654243
MDRSSPSTSWGFSGGRERDRIAAGKQPEVPRSGGGSTAMSKGKLSDGESDTDSEESDLSGSDGEDTSWISWFCSLRGNEFFCEVDDDYIQDDFNLCGLSGQVPYYEYALDLILDVESSHGDMFTEEQNELIESAAEMLYGLIHVRYILTSKGLAAMLDKYKNYDFGRCPRVHCSGQPCLPVGQSDIPRSSNVKIYCPKCEDLYYPRSKYQSNIDGAYFGTTFPHLFLMTYPHLKPQKPSQQYVPKVFGFKLHKP

SEQ ID NO: 68351 - protein, 216 aa, Triticum aestivum
  peptide (1)..(216): Ceres Seq. ID no. 13654244
MSKGKLSDGESDTDSEESDLSGSDGEDTSWISWFCSLRGNEFFCEVDDDYIQDDFNLCGLSGQVPYYEYALDLILDVESSHGDMFTEEQNELIESAAEMLYGLIHVRYILTSKGLAAMLDKYKNYDFGRCPRVHCSGQPCLPVGQSDIPRSSNVKIYCPKCEDLYYPRSKYQSNIDGAYFGTTFPHLFLMTYPHLKPQKPSQQYVPKVFGFKLHKP

SEQ ID NO: 68352 - DNA, 1198 bp, Triticum aestivum
  misc_feature (1)..(1198): Ceres Seq. ID no. 13654155
ctagaacatcctaatcgaaaattatttgattactttgatttttctctatggaattctgaaatctgaggcgagtttgtgttagattgtgcctgggggcttgattagattgtttcgagatggcggcgtgccggggattcttcgagtgcctgctcaggctgctcaactttttcctcaccgtcgccggccttgccatggtcggctacgggatctacctgctcgtggagtggatgaggatctccggcggtggcgaaggggcaccgccgtctccggccccgccggctgagttgcttacgtttggccgcccgatgctcacggtcgtggcccttggagaaggaggcagtttcttcgacaagctacccaaagcatggttcatctatttgttcattggtgttggtgctgttatcttcatcgtttctctatttggctgcattggagcagggacaaggaatacgtgttgcttgtgttgttattctttcttggtcatattattaatccttgctgaggctggaggtgctgcattcatattctttgaccatagctggaaagatgtaattccagtggataagacacaaaactttgatgccatgtataactttctgaatgaaaactggaagattgcaagatgggttgctcttggtgttgttgtttttgaggtattgcttttcttgttagctcttgctatcagggcaatgaacaaacctgccgagtatgacagtgatgatgaaatcattggaactgttcgaagcactagcatccgtcagcctcttatccattcccagaatgctccggctactggtgttcccgtcccaacacttgatcaacgtgcgagcagaaatgatgcatggagccaaaggatgcgagagaagtatggtctggacacaagccaatttacttacaacccatcagatgcaaccagatatcagcaaaatggggcacctccagctgaagaaaggagccgttgcatcgtaatgtgaaaatccttcacgacgtcatccaaattgatggttcttgaacaggccatctcagcttgcacagtttggctataccgtgttgttcagagtggtgtatgaatagaggtccttttaccttaatgctcatcttatctgctgtcttctgaacaactccatgcacctgtaatttttgtgtgaacgagtattggccgttgatatctcattatatttcatgttttcctcggatt

SEQ ID NO: 68353 - protein, 285 aa, Triticum aestivum
  peptide (1)..(285): Ceres Seq. ID no. 15219620
MAACRGFFECLLRLLNFFLTVAGLAMVGYGIYLLVEWMRISGGGEGAPPSPAPPAELLTFGRPMLTVVALGEGGSFFDKLPKAWFIYLFIGVGAVIFIVSLFGCIGAGTRNTCCLCCYSFLVILLILAEAGGAAFIFFDHSWKDVIPVDKTQNFDAMYNFLNENWKIARWVALGVVVFEVLLFLLALAIRAMNKPAEYDSDDEIIGTVRSTSIRQPLIHSQNAPATGVPVPTLDQRASRNDAWSQRMREKYGLDTSQFTYNPSDATRYQQNGAPPAEERSRCIVM

SEQ ID NO: 68354 - protein, 260 aa, Triticum aestivum
  peptide (1)..(260): Ceres Seq. ID no. 15219621
MVGYGIYLLVEWMRISGGGEGAPPSPAPPAELLTFGRPMLTVVALGEGGSFFDKLPKAWFIYLFIGVGAVIFIVSLFGCIGAGTRNTCCLCCYSFLVILLILAEAGGAAFIFFDHSWKDVIPVDKTQNFDAMYNFLNENWKIARWVALGVVVFEVLLFLLALAIRAMNKPAEYDSDDEIIGTVRSTSIRQPLIHSQNAPATGVPVPTLDQRASRNDAWSQRMREKYGLDTSQFTYNPSDATRYQQNGAPPAEERSRCIVM

SEQ ID NO: 68355 - protein, 248 aa, Triticum aestivum
  peptide (1)..(248): Ceres Seq. ID no. 15219622
MRISGGGEGAPPSPAPPAELLTFGRPMLTVVALGEGGSFFDKLPKAWFIYLFIGVGAVIFIVSLFGCIGAGTRNTCCLCCYSFLVILLILAEAGGAAFIFFDHSWKDVIPVDKTQNFDAMYNFLNENWKIARWVALGVVVFEVLLFLLALAIRAMNKPAEYDSDDEIIGTVRSTSIRQPLIHSQNAPATGVPVPTLDQRASRNDAWSQRMREKYGLDTSQFTYNPSDATRYQQNGAPPAEERSRCIVM

SEQ ID NO: 68356 - DNA, 1222 bp, Triticum aestivum
  misc_feature (1)..(1222): Ceres Seq. ID no. 14302096
atacttttcagagttgtggcatcgaacacattgtggaaggccttacaccgcagacgccccgcgccgcgtcaagaacacagaggacaaagcacggtctgggagagccagagcaacagcagcggcgaggctccagccatggcggtgagcaacaacatcacggcgtgcgtgacactgatggcgctcatctgcgcggtccccgtcatcgcctcgggggtgtggttcgcgtcggcgcagggggaggagtgcgcgcggctggcgcgctggcccgtggccatcctgggtggcctcatcctgctggcggcgctggcgggcttcgtcggcgcctactggaaccgccgccgcctcctcgccttctacctcttcgccatggcggcgctcatcgccctcctcatcgcgctcctcgtcttcgccttcgcggtcacccgcggctccggcgcctacccggtgctcggccgcgagtacgacgagtaccgcctcgacggcttctccatgtggctgcgcgggtacgtcgaccccgcccggtgggaggggatcaggtcctgcctcgccgtctctgacacctgcaagaagctcgcccgacaggccggctacgtcactgccgaccagttctaccagtcccgcctcacgccgctccagtcgggctgctgcaagcccctgtcggtgtgcgggttcgggtacgtgagcccgacggtgtggacaaacccggcgcggcccgcgtcggacccggactgcggcctgtggagcaacgacccggcgcagctgtgctacgagtgcgagtcgtgccgcgcgggcctcctggcggcgctgcggagccagtggcacaaggccaacatcgcgctcgtcgtcgccaccgtctcgctcgtcttcctctacctcatcggctgcagtgcctacaagaacgcgcacgccgaggccatctaccaccgctacaagtggtgattcccatttcccatcccatcccatcactgagaaccaaccgccatcgccagtttgcccatgtaatagactagtatgtttgcttcatactgtactgtattattattagtagcttggtaactggtagtaagctagtaggggaagatgggaacttcagattcatggtttgcccatgcatgtatcgtgaagaattttagcgagatgcatgcgctcttggtgttgatgtgaatgttgtttgtaatatgcagtagagatgttcttcagatttatggttaagaattttagt

SEQ ID NO: 68357 - protein, 312 aa, Triticum aestivum
  peptide (1)..(312): Ceres Seq. ID no. 14302097
ILFRVVASNTLWKALHRRRPAPRQEHRGQSTVWESQSNSSGEAPAMAVSNNITACVTLMALICAVPVIASGVWFASAQGEECARLARWPVAILGGLILLAALAGFVGAYWNRRRLLAFYLFAMAALIALLIALLVFAFAVTRGSGAYPVLGREYDEYRLDGFSMWLRGYVDPARWEGIRSCLAVSDTCKKLARQAGYVTADQFYQSRLTPLQSGCCKPLSVCGFGYVSPTVWTNPARPASDPDCGLWSNDPAQLCYECESCRAGLLAALRSQWHKANIALVVATVSLVFLYLIGCSAYKNAHAEAIYHRYKW

SEQ ID NO: 68358 - protein, 267 aa, Triticum aestivum
  peptide (1)..(267): Ceres Seq. ID no. 14302098
MAVSNNITACVTLMALICAVPVIASGVWFASAQGEECARLARWPVAILGGLILLAALAGFVGAYWNRRRLLAFYLFAMAALIALLIALLVFAFAVTRGSGAYPVLGREYDEYRLDGFSMWLRGYVDPARWEGIRSCLAVSDTCKKLARQAGYVTADQFYQSRLTPLQSGCCKPLSVCGFGYVSPTVWTNPARPASDPDCGLWSNDPAQLCYECESCRAGLLAALRSQWHKANIALVVATVSLVFLYLIGCSAYKNAHAEAIYHRYKW

SEQ ID NO: 68359 - protein, 254 aa, Triticum aestivum
  peptide (1)..(254): Ceres Seq. ID no. 14302099
MALICAVPVIASGVWFASAQGEECARLARWPVAILGGLILLAALAGFVGAYWNRRRLLAFYLFAMAALIALLIALLVFAFAVTRGSGAYPVLGREYDEYRLDGFSMWLRGYVDPARWEGIRSCLAVSDTCKKLARQAGYVTADQFYQSRLTPLQSGCCKPLSVCGFGYVSPTVWTNPARPASDPDCGLWSNDPAQLCYECESCRAGLLAALRSQWHKANIALVVATVSLVFLYLIGCSAYKNAHAEAIYHRYKW

SEQ ID NO: 68360 - DNA, 966 bp, Triticum aestivum
  misc_feature (1)..(966): Ceres Seq. ID no. 14302271
cacgaaaatcattttcgcaactctcggagcgcaccaccaccaacttcttctgcgcaaaaggagagaaatagagaaaccaccaccaaaccccaagagcgagctcggtgcgcgcgcgcgcgagagagagagagagagagagagagagagagagagagaaacagaggaggcggcgccgagcgagcgcgatcccctcctcctcccccgtcgcgtgatcatggccatggccgcctccagatcgctctgggcctcccgcgccgcctcctacctcaagatctccgccttccccagggccttctccaccgtgctgaaggatctgaagtatgctgaaacccatgaatgggtaaaggttgatggtgattccgcaaccgttgggattacagaccatgcccaggaccatttgggtgatgttgtatatgtggagctgccagaagttggcgcttctgtatctcagggaacaaactttggtgctgttgaaagtgtgaaggcaaccagtgacatcaactcgccggtgtctggagaggtcattgcagtgaatgacgaactactagagaaaccagcattggtcaatggagatccatatgagggcggctggatcatcaaggtcaaggtcagcgatgcaggtgagctcaactcactgatggacgacaagaagtactcaaaattctgcgaggaagaggacagcaagcattaagcatggtggattctgaaagagaatctgcgcttcgacactcataggtgtttgtcatgtgctgttgggcactttgtaccacctgctttctcagcccagaaaggatcaaaacatggaataaatggcatttgcctaccctacaagggcttgcgagatccgaaatctgtatatcactcgagttcctttttcttgttgccatggtttcatctctgatttaagctctgttctgattagttggtattcaaattctaaatgcatacgtactgatgatgctacac

SEQ ID NO: 68361 - protein, 229 aa, Triticum aestivum
  peptide (1)..(229): Ceres Seq. ID no. 14302272
TKIIFATLGAHHHQLLLRKRREIEKPPPNPKSELGARARERERERERERERETEEAAPSERDPLLLPRRVIMAMAASRSLWASRAASYLKISAFPRAFSTVLKDLKYAETHEWVKVDGDSATVGITDHAQDHLGDVVYVELPEVGASVSQGTNFGAVESVKATSDINSPVSGEVIAVNDELLEKPALVNGDPYEGGWIIKVKVSDAGELNSLMDDKKYSKFCEEEDSKH

SEQ ID NO: 68362 - protein, 158 aa, Triticum aestivum
  peptide (1)..(158): Ceres Seq. ID no. 14302273
MAMAASRSLWASRAASYLKISAFPRAFSTVLKDLKYAETHEWVKVDGDSATVGITDHAQDHLGDVVYVELPEVGASVSQGTNFGAVESVKATSDINSPVSGEVIAVNDELLEKPALVNGDPYEGGWIIKVKVSDAGELNSLMDDKKYSKFCEEEDSKH

SEQ ID NO: 68363 - protein, 156 aa, Triticum aestivum
  peptide (1)..(156): Ceres Seq. ID no. 14302274
MAASRSLWASRAASYLKISAFPRAFSTVLKDLKYAETHEWVKVDGDSATVGITDHAQDHLGDVVYVELPEVGASVSQGTNFGAVESVKATSDINSPVSGEVIAVNDELLEKPALVNGDPYEGGWIIKVKVSDAGELNSLMDDKKYSKFCEEEDSKH

SEQ ID NO: 68364 - DNA, 462 bp, Triticum aestivum
  misc_feature (1)..(462): Ceres Seq. ID no. 13654250
cccaaaccccatccatcccttcctcctcccgagcagcctcctcgccgacgaaagtgccggagagctttccagaaggtcagggggagggatgggcgagttcgacgactactgggcgcgggcgtacaggggcgaccccgcggtgccgcactccgacccgcagcggctcatctccacctggaccggcgccttcnccctcggcgccgccgcctgcgtccaccaccacgtctccggcctcgcctccaacatcaagtcccttccccacagctggcangacatgacaatgatgctcgatcagaagcgctggaagaaaattcttgacaagaagcagcaacaagcttaagttccataaccttcaccgnttgggccacagttggaagagctttctatcttgctngttgggcatggcanaggaagttcttgcatcagtntggtattaggatagagtttttctacctcttgttt

SEQ ID NO: 68365 - protein, 112 aa, Triticum aestivum
  peptide (1)..(112): Ceres Seq. ID no. 13654251
  misc_feature (64)..(64): Xaa is any aa, unknown or other
  misc_feature (90)..(90): Xaa is any aa, unknown or other
PNPIHPFLLPSSLLADESAGELSRRSGGGMGEFDDYWARAYRGDPAVPHSDPQRLISTWTGAFXLGAAACVHHHVSGLASNIKSLPHSWXDMTMMLDQKRWKKILDKKQQQA

SEQ ID NO: 68366 - protein, 105 aa, Triticum aestivum
  peptide (1)..(105): Ceres Seq. ID no. 13654252
  misc_feature (64)..(64): Xaa is any aa, unknown or other
  misc_feature (91)..(91): Xaa is any aa, unknown or other
PKPHPSLPPPEQPPRRRKCRRAFQKVRGRDGRVRRLLGAGVQGRPRGAALRPAAAHLHLDRRLXPRRRRLRPPPRLRPRLQHQVPSPQLAXHDNDARSEALEENS

SEQ ID NO: 68367 - protein, 91 aa, Triticum aestivum
  peptide (1)..(91): Ceres Seq. ID no. 13654253
  misc_feature (63)..(63): Xaa is any aa, unknown or other
  misc_feature (90)..(90): Xaa is any aa, unknown or other
QTPSIPSSSRAASSPTKVPESFPEGQGEGWASSTTTGRGRTGATPRCRTPTRSGSSPPGPAPXPSAPPPASTTTSPASPPTSSPFPTAGXT

SEQ ID NO: 68368 - protein, 83 aa, Triticum aestivum
  peptide (1)..(83): Ceres Seq. ID no. 13654254
  misc_feature (35)..(35): Xaa is any aa, unknown or other
  misc_feature (61)..(61): Xaa is any aa, unknown or other
MGEFDDYWARAYRGDPAVPHSDPQRLISTWTGAFXLGAAACVHHHVSGLASNIKSLPHSWXDMTMMLDQKRWKKILDKKQQQA

SEQ ID NO: 68369 - DNA, 1147 bp, Triticum aestivum
  misc_feature (1)..(1147): Ceres Seq. ID no. 13596265
ctcacccaatacccacgagaacctctagctaccgtagcttagctgagcttcctagctgtagccatggccaagtatttccagagtgctcctgttagcaatgaagcattgaagcacaaggagattctgttggacggcctgtacatgcaccaggaccttgacggatcaccaaatcagaaccagaaaactatagtgaatcctaacctccctctgcagtttggctgcacagtggctaatgactggaccatatatgatggccttggccccgataagaagcttgttgcgcgtgcacaagggccacatatgggggcaggagtagccaaaggaagctggttcatatgtttcaacatggtgttcgtcgatgacaggtttgcgggttccagccttaaggtgctcggacattttgaagagccggtagaaggtgagtgggcaatccttggcgggacaggagagtttgcctatgcacaaggtgtggtcaccttcaagaaactccaggacggaagcactagggtcagacagcttcagatacgtgccatctgcctcagctttccatcgtcactttcaatgcctacgaagatggggccatggggtggaaatggaggctccattcaagacatcaccacaggaaccccgatgcgcctgcaaagtgtgacactcagcagcgagagcagctggattgtctctcttgcatttacttatattgacaaacttggaaagaggcgcaacgaaggcccctggggtcctgacaaagggaacagtcaaaccatcgagttcggacctaaagaatatgtgacggaaatatcagggacaattgacaatgtcatatcgtcacttgttatcacgacaaacatcaaaaagtatggaccgtttgggcatgagaagggcaaccgtttcagcgccgccgtgccagaaaacacatgtgttgtgggattctttgccaggaccgggaatgctcttgatgccattggcgtttaccacggacccatagtggtttgaactggatttaatgctgctttgctttagtttatggcaatctcatgcgagttcattttaagggaaagtgtgtttgttccacatttgttttccagcaataacatggcaagggtcatgcttacgtctgtgatccatgtctctctagtgcaagagtctt

SEQ ID NO: 68370 - protein, 309 aa, Triticum aestivum
  peptide (1)..(309): Ceres Seq. ID no. 13596266
MAKYFQSAPVSNEALKHKEILLDGLYMHQDLDGSPNQNQKTIVNPNLPLQFGCTVANDWTIYDGLGPDKKLVARAQGPHMGAGVAKGSWFICFNMVFVDDRFAGSSLKVLGHFEEPVEGEWAILGGTGEFAYAQGVVTFKKLQDGSTRVRQLQIRAICLSFPSSLSMPTKMGPWGGNGGSIQDITTGTPMRLQSVTLSSESSWIVSLAFTYIDKLGKRRNEGPWGPDKGNSQTIEFGPKEYVTEISGTIDNVISSLVITTNIKKYGPFGHEKGNRFSAAVPENTCVVGFFARTGNALDAIGVYHGPIVV

SEQ ID NO: 68371 - protein, 283 aa, Triticum aestivum
  peptide (1)..(283): Ceres Seq. ID no. 13596267
MHQDLDGSPNQNQKTIVNPNLPLQFGCTVANDWTIYDGLGPDKKLVARAQGPHMGAGVAKGSWFICFNMVFVDDRFAGSSLKVLGHFEEPVEGEWAILGGTGEFAYAQGVVTFKKLQDGSTRVRQLQIRAICLSFPSSLSMPTKMGPWGGNGGSIQDITTGTPMRLQSVTLSSESSWIVSLAFTYIDKLGKRRNEGPWGPDKGNSQTIEFGPKEYVTEISGTIDNVISSLVITTNIKKYGPFGHEKGNRFSAAVPENTCVVGFFARTGNALDAIGVYHGPIVV

SEQ ID NO: 68372 - protein, 230 aa, Triticum aestivum
  peptide (1)..(230): Ceres Seq. ID no. 13596268
MGAGVAKGSWFICFNMVFVDDRFAGSSLKVLGHFEEPVEGEWAILGGTGEFAYAQGVVTFKKLQDGSTRVRQLQIRAICLSFPSSLSMPTKMGPWGGNGGSIQDITTGTPMRLQSVTLSSESSWIVSLAFTYIDKLGKRRNEGPWGPDKGNSQTIEFGPKEYVTEISGTIDNVISSLVITTNIKKYGPFGHEKGNRFSAAVPENTCVVGFFARTGNALDAIGVYHGPIVV

SEQ ID NO: 68373 - DNA, 1617 bp, Triticum aestivum
  misc_feature (1)..(1617): Ceres Seq. ID no. 13596089
aaagaaaccaaggacagagctgaaacatggagaccacggtccccgcggccacagccaccaccagctcgagctccggccacggagccggcggcggtgctgcgagagtcctgctcctcccgtacccgggggcgcagggccacaccaacccgatgctccagctcggccgccgcctggcgtaccacggcctccgccccacactcgtcgccacccgctacgtgctctccaccaccccgccccccggcgcgcccttcggcgtggccgccatctccgacggctgcgacgccggcggcatggcctcgtgcccggacatggcggagtacgtctcgcggctggcggccgtgggctccgagacgctgcgggagctcctcctgtcggaggcgcgcgcggggcggcccgtgcgcgtgctggtgtacgacgctcacctggcgtgggcgcggcgggtggcgcaggcgtccggcgtcgcggccgcggccttcttctcccagccgtgcgcggtggacgtcgtctacggggagctgtgggcggggcggctggcgctgccggcgacggacgggcgcgcgctgctcgcgagaggagcgctaggcgtggagctggggccggaggacatgccgccgttcgcggcggtgccggagtcgcagccaacgttcctcaaggtgtcagttgggcagttcgaggggctggaggacgccgacgacgtgctcgtcaactcattccgcgacctcgagccaaaggaggtagagtacatggagttaacatggagagcgaagatggttggcccaaccttgccatcattctacctcgacgatgatcgcctaccatccaataaatcatacggtttcgactttttcaacggtgatgcactgtgcatggattggctagagaagcaaagcaattcatccgttgtgctggtgtcctatgggactgtctctgattatgatgcaacccaactagaggagcttggcaatggactgtgcaattccggaaaaccttttctttgggttgtaaggtccaacgaggaacacaagttatccaaagaactcaaggaaaaatgtgaggagattggattaattgtctcatggtgcccccagcttgaggttcttgcacatagggctattggttgctttgttacccattgtggatggaactcgacattagaggcacttgctaatggtgtacctctagtgggtattccgcattgggctgaccaacccaccattgcaaagtatgtggagagtgcatggagcatgggtgtgcgtgtacggaaggacaataatggatatctaaagctagaggaggtcgagaggtgcattagagaggtgatggatatagagaaaaaggatgagtacaaaagaaatgctgtgaagtggatgcaaaaggccaaggaggcaatgcaggaaggaggaagttcagacaagaatatcgctgaatttgctaccaagtattcatcaatataaagtttgaacaatgttttacttcaatataagcaagtaggcagtgattttggccctacagaagtttagagtggccgacattttccatatgtaattgtagtgatatcttcttcacatttagaagtatgctggactttttatatatatacgacatgcgattttttct

SEQ ID NO: 68374 - protein, 475 aa, Triticum aestivum
  peptide (1)..(475): Ceres Seq. ID no. 15221771
METTVPAATATTSSSSGHGAGGGAARVLLLPYPGAQGHTNPMLQLGRRLAYHGLRPTLVATRYVLSTTPPPGAPFGVAAISDGCDAGGMASCPDMAEYVSRLAAVGSETLRELLLSEARAGRPVRVLVYDAHLAWARRVAQASGVAAAAFFSQPCAVDVVYGELWAGRLALPATDGRALLARGALGVELGPEDMPPFAAVPESQPTFLKVSVGQFEGLEDADDVLVNSFRDLEPKEVEYMELTWRAKMVGPTLPSFYLDDDRLPSNKSYGFDFFNGDALCMDWLEKQSNSSVVLVSYGTVSDYDATQLEELGNGLCNSGKPFLWVVRSNEEHKLSKELKEKCEEIGLIVSWCPQLEVLAHRAIGCFVTHCGWNSTLEALANGVPLVGIPHWADQPTIAKYVESAWSMGVRVRKDNNGYLKLEEVERCIREVMDIEKKDEYKRNAVKWMQKAKEAMQEGGSSDKNIAEFATKYSSI

SEQ ID NO: 68375 - protein, 434 aa, Triticum aestivum
  peptide (1)..(434): Ceres Seq. ID no. 15221772
MLQLGRRLAYHGLRPTLVATRYVLSTTPPPGAPFGVAAISDGCDAGGMASCPDMAEYVSRLAAVGSETLRELLLSEARAGRPVRVLVYDAHLAWARRVAQASGVAAAAFFSQPCAVDVVYGELWAGRLALPATDGRALLARGALGVELGPEDMPPFAAVPESQPTFLKVSVGQFEGLEDADDVLVNSFRDLEPKEVEYMELTWRAKMVGPTLPSFYLDDDRLPSNKSYGFDFFNGDALCMDWLEKQSNSSVVLVSYGTVSDYDATQLEELGNGLCNSGKPFLWVVRSNEEHKLSKELKEKCEEIGLIVSWCPQLEVLAHRAIGCFVTHCGWNSTLEALANGVPLVGIPHWADQPTIAKYVESAWSMGVRVRKDNNGYLKLEEVERCIREVMDIEKKDEYKRNAVKWMQKAKEAMQEGGSSDKNIAEFATKYSSI

SEQ ID NO: 68376 - protein, 387 aa, Triticum aestivum
  peptide (1)..(387): Ceres Seq. ID no. 15221773
MASCPDMAEYVSRLAAVGSETLRELLLSEARAGRPVRVLVYDAHLAWARRVAQASGVAAAAFFSQPCAVDVVYGELWAGRLALPATDGRALLARGALGVELGPEDMPPFAAVPESQPTFLKVSVGQFEGLEDADDVLVNSFRDLEPKEVEYMELTWRAKMVGPTLPSFYLDDDRLPSNKSYGFDFFNGDALCMDWLEKQSNSSVVLVSYGTVSDYDATQLEELGNGLCNSGKPFLWVVRSNEEHKLSKELKEKCEEIGLIVSWCPQLEVLAHRAIGCFVTHCGWNSTLEALANGVPLVGIPHWADQPTIAKYVESAWSMGVRVRKDNNGYLKLEEVERCIREVMDIEKKDEYKRNAVKWMQKAKEAMQEGGSSDKNIAEFATKYSSI

SEQ ID NO: 68377 - DNA, 1671 bp, Triticum aestivum
  misc_feature (1)..(1671): Ceres Seq. ID no. 13596090
agcgagtgagctcccacctccctccctcccctcctctctgctcccaccaccaaaccctccgatccaaaccctctctcacctcgcatgcggccgcgccccccgaggcggcggcgcagctgaccccttcccaccgccgctcccggagcccgccggcatgggcggggtcacgtccaccatcgccgcgcgcttcgccttcttcccgcccacgccgccctcctacacgctcgtcgccgacgcggccaccggccgcctcctcatccccgagatctcccggccccccgcgcgccgccggaggcgggacggcggcggggactcctcctcaggtgccgccgcagcagccgaggaggaggacgccacggaggtggtgcgcctccgcacgcgccgcgggaacgagatcgtcgccgtctacgtgcgccacgcgcgggcctccgccacgctgctctactcccacggcaacgccgccgacctcggccagatgtacggcctcttcgtcgagctcagccgccgcctccgcgtcaacattttcgggtatgattatgctggttatgggaggtctacagggaagcccactgagtataatacatatgcagacattgaagcagcatataactgcctcaaggaaaaatatggtgtgccagatgaggatataattttgtatggacaatctgttggaagtggtccaaccattgatcttgcttcacggttgccaaatttgcgagctgtggttcttcacagtcctattttatctggactgagagtgctatatccagtcaaaaaaactttttggtttgacatttacaagaatgtcgacaaaatcagcctggtgaattgtccagttcttgtcattcatggcacgtcagatgatgttgttgattggtcccatggaaagcagctatgggagctttgcaaggtgaaacattcgcctttgtggctaagtggcggtgggcactgcaaccttgagctgtatcctgactacatcaggcacttgaagaagtttgtgtcgagccttggcaaaaaatcaacgaaacctgacttgaaagagttaccagcaacagaagacacatctcgcaaagacgcagaatctgtgtcctcggacaaaccccaagaagctgcaaagtgccgacagatctcgcggaagagcttagatagtagagttgggaaatccaaaacggtggatgttcctgaaaagccacgaatgagctcagatgacgttgacaagtttaggaggagaagatgcttggtttggtgatctatgatatgacgtctgcacagttcatggagtagtttccgaacaccatggaatggggatcaagcaactgtgtcatactgtatagcgaggaacaacgccgacagttcccgcagtagagggataatagctgtgttaaatgtgggagaagaagaatgaggacgctggtgaataagctgttatttatcaaagagggtacgtctcaacgtggtaactttctcggttaattaacctgtattgcaacccccagtggtggtaggatttccatcatgtaaaagtgtaccgtgttattgtctgtaatcacgagggacaaggatagaacatttgcggccactttgcggcgcagtctaaagtcttggagcaatcacaagaagcaacatattctagtctggatatgcaaatatagtgttcatgaaaaaaaaaaa

SEQ ID NO: 68378 - protein, 415 aa, Triticum aestivum
  peptide (1)..(415): Ceres Seq. ID no. 13596091
ASELPPPSLPSSLLPPPNPPIQTLSHLACGRAPRGGGAADPFPPPLPEPAGMGGVTSTIAARFAFFPPTPPSYTLVADAATGRLLIPEISRPPARRRRRDGGGDSSSGAAAAAEEEDATEVVRLRTRRGNEIVAVYVRHARASATLLYSHGNAADLGQMYGLFVELSRRLRVNIFGYDYAGYGRSTGKPTEYNTYADIEAAYNCLKEKYGVPDEDIILYGQSVGSGPTIDLASRLPNLRAVVLHSPILSGLRVLYPVKKTFWFDIYKNVDKISLVNCPVLVIHGTSDDVVDWSHGKQLWELCKVKHSPLWLSGGGHCNLELYPDYIRHLKKFVSSLGKKSTKPDLKELPATEDTSRKDAESVSSDKPQEAAKCRQISRKSLDSRVGKSKTVDVPEKPRMSSDDVDKFRRRRCLVW

SEQ ID NO: 68379 - protein, 364 aa, Triticum aestivum
  peptide (1)..(364): Ceres Seq. ID no. 13596092
MGGVTSTIAARFAFFPPTPPSYTLVADAATGRLLIPEISRPPARRRRRDGGGDSSSGAAAAAEEEDATEVVRLRTRRGNEIVAVYVRHARASATLLYSHGNAADLGQMYGLFVELSRRLRVNIFGYDYAGYGRSTGKPTEYNTYADIEAAYNCLKEKYGVPDEDIILYGQSVGSGPTIDLASRLPNLRAVVLHSPILSGLRVLYPVKKTFWFDIYKNVDKISLVNCPVLVIHGTSDDVVDWSHGKQLWELCKVKHSPLWLSGGGHCNLELYPDYIRHLKKFVSSLGKKSTKPDLKELPATEDTSRKDAESVSSDKPQEAAKCRQISRKSLDSRVGKSKTVDVPEKPRMSSDDVDKFRRRRCLVW

SEQ ID NO: 68380 - protein, 257 aa, Triticum aestivum
  peptide (1)..(257): Ceres Seq. ID no. 13596093
MYGLFVELSRRLRVNIFGYDYAGYGRSTGKPTEYNTYADIEAAYNCLKEKYGVPDEDIILYGQSVGSGPTIDLASRLPNLRAVVLHSPILSGLRVLYPVKKTFWFDIYKNVDKISLVNCPVLVIHGTSDDVVDWSHGKQLWELCKVKHSPLWLSGGGHCNLELYPDYIRHLKKFVSSLGKKSTKPDLKELPATEDTSRKDAESVSSDKPQEAAKCRQISRKSLDSRVGKSKTVDVPEKPRMSSDDVDKFRRRRCLVW

SEQ ID NO: 68381 - DNA, 1861 bp, Triticum aestivum
  misc_feature (1)..(1861): Ceres Seq. ID no. 13654166
aaactcgcttcccaatcccagctccttttatctatctatctattctgaggtgaggggtggggaggaggggattggctgcctgcaagcaatggcggtcaatgaggaggaggaggggacttcgccgctgctgatcaaggcggagcgccggcaccacccgggctgcccgggctgcgaccacgaccggaggaaggagctccgcaccgggctaccttacaaggaattctcctacgtctggatgatctgtcttaccaccgctttaccaatatcgtcactgttccccttcttgtatttcatgataagagacttgcatgttgcaaaaagaacagaagatattgggttctatgctgggtttgtaggtgcttcttttatgtttggtagatgtttgacttcaactctttggggaatagcagcagatcgtattgggaggaagcctgttgttgtgtttggcattctctctgtggtgatatttaatactttgtttgggcttagcgtcacctattggatggcaatagctacaaggtttctccttggcgctttaaatggcttacttggaccaatgaaggcttatgctattgaagtttgccgacctgaacatgaacctctagcactatcacttgtcagcacggcatggggaataggtctcatcattggtcctgctcttggaggctaccttgcactgcctgcagagaaatacccaaatatattttcacctgactcattatttggaaggttcccgtacttcttaccatgcttgtgcacatcagtctttgctgccattgttctgataagctgcatatggatgccggagacgttacacaagcataaagtcagtgatgatggaaatcaaagtgttgaagctttggaggcccatctgattgatccaaaagaggaggttggacaaagtaatagttcgaataccaagaagagcttattcaagaattggccattgatgtcatctataattgtttattgcgtcttctccttccacgatatggcttatacagaggtgttctctctatgggctgaaagtgacaggaagtatggtggactgagtttatcatctgaagatgtaggtcaaacacttgcaattacaggtgccagtcttcttgtgtatcaactatttatgtacccatccatcattaaagttcttggacctatcaaatcttctcagatcgcagctgttctgtgcatacctattctctttgcctacccctatatgacgtacctgtcaggacctggattatcgatcgtactgaatattgcatcagtcataaaaaataatcttggtgttactatcatcacaggcactttcatccttcaaaacaatgccgtgcctcagaaccaaagaggagcagcaaatggattagccatgactggaatgtcctttttcaaggcagttgcccctgcaggtgccggcattgtgttctcgtgggcgcagaaacgccagcatgctttcttctttccaggtgatcagatggtgttctttctgctaaacatcatcgagctccttggacttgtcctcacattcagacccttcctggccgtgccagagcagtatgaaagaaattagtctttattattatagaattttgtggattgttaatgagacgatgacgactcatgcggccccgcagctgcgaggagctcaagggcgcccttgcaccaggataagaggtgattacctgtacttgtgtgtaacatctatgttgtagcagcatctcagagtggaaggtggtgcatatatacatgtttgtctggtatatagatggtggtggccagttaagttggttgtttgccattagttaggtagcaacatttgtaaaactactgtacaatgcaagagactgtactagctgggaag

SEQ ID NO: 68382 - protein, 522 aa, Triticum aestivum
  peptide (1)..(522): Ceres Seq. ID no. 15219623
NSLPNPSSFYLSIYSEVRGGEEGIGCLQAMAVNEEEEGTSPLLIKAERRHHPGCPGCDHDRRKELRTGLPYKEFSYVWMICLTTALPISSLFPFLYFMIRDLHVAKRTEDIGFYAGFVGASFMFGRCLTSTLWGIAADRIGRKPVVVFGILSVVIFNTLFGLSVTYWMAIATRFLLGALNGLLGPMKAYAIEVCRPEHEPLALSLVSTAWGIGLIIGPALGGYLALPAEKYPNIFSPDSLFGRFPYFLPCLCTSVFAAIVLISCIWMPETLHKHKVSDDGNQSVEALEAHLIDPKEEVGQSNSSNTKKSLFKNWPLMSSIIVYCVFSFHDMAYTEVFSLWAESDRKYGGLSLSSEDVGQTLAITGASLLVYQLFMYPSIIKVLGPIKSSQIAAVLCIPILFAYPYMTYLSGPGLSIVLNIASVIKNNLGVTIITGTFILQNNAVPQNQRGAANGLAMTGMSFFKAVAPAGAGIVFSWAQKRQHAFFFPGDQMVFFLLNIIELLGLVLTFRPFLAVPEQYERN

SEQ ID NO: 68383 - protein, 493 aa, Triticum aestivum
  peptide (1)..(493): Ceres Seq. ID no. 15219624
MAVNEEEEGTSPLLIKAERRHHPGCPGCDHDRRKELRTGLPYKEFSYVWMICLTTALPISSLFPFLYFMIRDLHVAKRTEDIGFYAGFVGASFMFGRCLTSTLWGIAADRIGRKPVVVFGILSVVIFNTLFGLSVTYWMAIATRFLLGALNGLLGPMKAYAIEVCRPEHEPLALSLVSTAWGIGLIIGPALGGYLALPAEKYPNIFSPDSLFGRFPYFLPCLCTSVFAAIVLISCIWMPETLHKHKVSDDGNQSVEALEAHLIDPKEEVGQSNSSNTKKSLFKNWPLMSSIIVYCVFSFHDMAYTEVFSLWAESDRKYGGLSLSSEDVGQTLAITGASLLVYQLFMYPSIIKVLGPIKSSQIAAVLCIPILFAYPYMTYLSGPGLSIVLNIASVIKNNLGVTIITGTFILQNNAVPQNQRGAANGLAMTGMSFFKAVAPAGAGIVFSWAQKRQHAFFFPGDQMVFFLLNIIELLGLVLTFRPFLAVPEQYERN

SEQ ID NO: 68384 - protein, 444 aa, Triticum aestivum
  peptide (1)..(444): Ceres Seq. ID no. 15219625
MICLTTALPISSLFPFLYFMIRDLHVAKRTEDIGFYAGFVGASFMFGRCLTSTLWGIAADRIGRKPVVVFGILSVVIFNTLFGLSVTYWMAIATRFLLGALNGLLGPMKAYAIEVCRPEHEPLALSLVSTAWGIGLIIGPALGGYLALPAEKYPNIFSPDSLFGRFPYFLPCLCTSVFAAIVLISCIWMPETLHKHKVSDDGNQSVEALEAHLIDPKEEVGQSNSSNTKKSLFKNWPLMSSIIVYCVFSFHDMAYTEVFSLWAESDRKYGGLSLSSEDVGQTLAITGASLLVYQLFMYPSIIKVLGPIKSSQIAAVLCIPILFAYPYMTYLSGPGLSIVLNIASVIKNNLGVTIITGTFILQNNAVPQNQRGAANGLAMTGMSFFKAVAPAGAGIVFSWAQKRQHAFFFPGDQMVFFLLNIIELLGLVLTFRPFLAVPEQYERN

SEQ ID NO: 68385 - DNA, 858 bp, Triticum aestivum
  misc_feature (1)..(858): Ceres Seq. ID no. 13590249
attaaaaggtggccgccgccgccgcccacccccaccacacacagagagaacacacgcaaggagcacgaggaggaggcaagggaagccgccgccgccgccccgtccctcctcgccggcccgccgcgacaggtttcaagatgtcaacctgcacgtttgcgacctcctgcgtgctcttgggcaatgctcgaacaaccgatgccccccagaaagcggtcaagagccgcctgagcttccttggccgaggcgccgtgcaggtgccgagcctgaggtcctcctctttcaagaagctggacgtctccgcggcggccacgtacaaggtgaagctggtgaccccggagggggacgagcacgagtttgaggcgccggacgacacctacatcctggactcggcggagacggcgggggtggagctgccctactcgtgccgggcgggggcatgctcgacctgcgcgggcaagattgaggcgggcgcggtggaccagtcggacgggtcgttcctggacgacgcgcagcaggagggctacgtgctgacgtgcgtcgcctaccccaagtcggactgcgtcatccacacccacaaggagggggacctgtattagggggcgtgccgtgctccgcccacatctctggtgccagttggttgtgtgttgggtagaagaagaaggtgtgtctgtctgtaaaaccttgatggttgtttatccccttcctggctgctgcctgtgtgcgtgcgtgctttggtcgttggtcggaggtggttaagattgttgggtgaagccactacacccacggatggagaaggcgaataaaatgagggaacagctcgctgtgactgtgacggcattataaagcggtttcatggtc

SEQ ID NO: 68386 - protein, 152 aa, Triticum aestivum
  peptide (1)..(152): Ceres Seq. ID no. 13590250
MSTCTFATSCVLLGNARTTDAPQKAVKSRLSFLGRGAVQVPSLRSSSFKKLDVSAAATYKVKLVTPEGDEHEFEAPDDTYILDSAETAGVELPYSCRAGACSTCAGKIEAGAVDQSDGSFLDDAQQEGYVLTCVAYPKSDCVIHTHKEGDLY

SEQ ID NO: 68387 - protein, 118 aa, Triticum aestivum
  peptide (1)..(118): Ceres Seq. ID no. 13590251
LKGGRRRRPPPPHTERTHARSTRRRQGKPPPPPRPSSPARRDRFQDVNLHVCDLLRALGQCSNNRCPPESGQEPPELPWPRRRAGAEPEVLLFQEAGRLRGGHVQGEAGDPGGGRARV

SEQ ID NO: 68388 - DNA, 1306 bp, Triticum aestivum
  misc_feature (1)..(1306): Ceres Seq. ID no. 12613953
ataaaatcctccccgttccatctcggccctcttctctcccaaccctcccccccttcaccgccgccgccacccccccgccgcgagctccgccgccccaatctccccgcggcagccatggcgaacatgcaggagtcgctcgccctggtgggcacgatgcgcggccacaacgacgtggtgacggcgatcgccgcgccgatcgacaactcgccctacatcgtgtccggctcccgcgacaagtcgctgctggtctgggacctcaccaacccggtgccgtccctcggcgacggcaccgtcggcaccgactacgccgtgcccttccgccgcctcaccggccacggccacttcgtccaggacgtggtcatcagctccgacggccagttcgcgctctccggctcctgggacggcgagctccgcctctgggacctctccaccggcctcaccacccgccgcttcgtcggccacaccaaggacgtcatctcggtcgccttctccgtcgacaaccgccagatcgtctccgcctcccgcgacaacaccatcaagctctggaacaccctcggcgagtgcaagtacaccatcggcggcgacatgggcggcggcgagggccacaccggctgggtctcgtgcgtcaggttctcccccaacatccagcagcccaccatcgtctccggctcctgggacaagaccgtcaaggtctggaatctcaccaactgcaagctccgctccaccctcgccggccacggtggctacgtgaacgccgtcgccgtcagccccgatggctcgctctgcgcctccggcggcaaggacggcgtcacgctgctctgggacctgtccgaggggaagaggctgtaccagctggaagccggctccatcatccatgcgctctgcttctcgcccaaccgctactggctctgcgctgcgacagaggaatctgtcaagatctgggacctcgagtccaagcatgtcgtgcaggacctcaagccagaagtgcaggtctccaagaaccagatgctgtactgcacaagcttgagctggagcgcggacggaagcaccctctacaccggatacaccgacgggaccatcagggtcttcaagatccaagccgggttcgccggatacgcgtaggggtcttgctggccagagaggttgtaatgcccgtcaagtttttgactgttctgaggcaacattgtctgcctggtactttcagcttgagttactgtttactttctgcttaggtgatttgttgatgagcacattatgaggtactatggaagacgatccgtttcgcaccagggtttttgctgctttc

SEQ ID NO: 68389 - protein, 409 aa, Triticum aestivum
  peptide (1)..(409): Ceres Seq. ID no. 12613954
KILPVPSRPSSLPTLPPFTAAATPPPRAPPPQSPRGSHGEHAGVARPGGHDARPQRRGDGDRRADRQLALHRVRLPRQVAAGLGPHQPGAVPRRRHRRHRLRRALPPPHRPRPLRPGRGHQLRRPVRALRLLGRRAPPLGPLHRPHHPPLRRPHQGRHLGRLLRRQPPDRLRLPRQHHQALEHPRRVQVHHRRRHGRRRGPHRLGLVRQVLPQHPAAHHRLRLLGQDRQGLESHQLQAPLHPRRPRWLRERRRRQPRWLALRLRRQGRRHAALGPVRGEEAVPAGSRLHHPCALLLAQPLLALRCDRGICQDLGPRVQACRAGPQARSAGLQEPDAVLHKLELERGRKHPLHRIHRRDHQGLQDPSRVRRIRVGVLLAREVVMPVKFLTVLRQHCLPGTFSLSYCLLSA

SEQ ID NO: 68390 - protein, 373 aa, Triticum aestivum
  peptide (1)..(373): Ceres Seq. ID no. 12613955
IKSSPFHLGPLLSQPSPPSPPPPPPRRELRRPNLPAAAMANMQESLALVGTMRGHNDVVTAIAAPIDNSPYIVSGSRDKSLLVWDLTNPVPSLGDGTVGTDYAVPFRRLTGHGHFVQDVVISSDGQFALSGSWDGELRLWDLSTGLTTRRFVGHTKDVISVAFSVDNRQIVSASRDNTIKLWNTLGECKYTIGGDMGGGEGHTGWVSCVRFSPNIQQPTIVSGSWDKTVKVWNLTNCKLRSTLAGHGGYVNAVAVSPDGSLCASGGKDGVTLLWDLSEGKRLYQLEAGSIIHALCFSPNRYWLCAATEESVKIWDLESKHVVQDLKPEVQVSKNQMLYCTSLSWSADGSTLYTGYTDGTIRVFKIQAGFAGYA

SEQ ID NO: 68391 - protein, 335 aa, Triticum aestivum
  peptide (1)..(335): Ceres Seq. ID no. 12613956
MANMQESLALVGTMRGHNDVVTAIAAPIDNSPYIVSGSRDKSLLVWDLTNPVPSLGDGTVGTDYAVPFRRLTGHGHFVQDVVISSDGQFALSGSWDGELRLWDLSTGLTTRRFVGHTKDVISVAFSVDNRQIVSASRDNTIKLWNTLGECKYTIGGDMGGGEGHTGWVSCVRFSPNIQQPTIVSGSWDKTVKVWNLTNCKLRSTLAGHGGYVNAVAVSPDGSLCASGGKDGVTLLWDLSEGKRLYQLEAGSIIHALCFSPNRYWLCAATEESVKIWDLESKHVVQDLKPEVQVSKNQMLYCTSLSWSADGSTLYTGYTDGTIRVFKIQAGFAGYA

SEQ ID NO: 68392 - DNA, 1869 bp, Triticum aestivum
  misc_feature (1)..(1869): Ceres Seq. ID no. 12614124
caacacacatcatccaatcaacgcacatcacttcctcttataacacagttaaccatggataaggcatacattgccatcctctccttcgccttcctcttcctgatccactacattctaggcaaggtcaccaatggcaggcacagcaagggcgccgtccagctgccgccgagcccccgggccatcccgttcctcggccacctccacctcctggagaagccgttccacgccgctctgtgcggcctcgccaagcgcctcggccccgtcttctcgctgcgcctcggctcgcgccgcgcggtggtggtgtcctcgccggagtgcgccagggagtgcttcacggagcacgacgtgatcttcgccgaccggccccagttcccctcgcagctgctcgtgtccttcgacggcatcgcgctctccacgtccagctacggcccgcactggcgcaacctccgtcgcgtcgccgccgtgcagctgctctctgcgcaccgcgtcgcctgcatgtcgggcgtgatcgggggcgaggtgcgcgccatggcgcgccggcttttccgggccgccgcggcgtcccccgacggcgccgcgcgggtcgagctgaagcggaggctcttcgagctctccctcagcgtgctcatggagaccatcgcccagaccaaggggacccggccggaggccgacgccgacacggacatgtccctggaggcccaggagttcaagaaggtggtggacgagatcatcccgcacatcggcgccgccaacctgtgggactacctgccggtgctgcggtggttcgacgtgttcggagtgaggaacaagatccttgccgcggtgagcaggagggacgccttcatgctgcatctcatcgacaacgagcgccggaggcttgacgatggcggcgccgaaggcgacaagaagagcatgatcgccgtgctgctcactctgcagaagacggagccagaggtgtacaccgataccatgatcatggctctctgcgcgaatttattcggggctggaacggagaccacgtcgacgacgacggagtgggcgatgtcgctgctgctgaaccacccggcggccctcaaagaggcgcaggccgagatcgacgcggccgtggggacctcccggctggtgaccgccgacgacgtgccccggctggcctacctgcagtgcatcgtgagcgagacgctgcggctgtacccggcggcaccgatgctgctgccgcaccagtcctcggctgactgcaaggtcggcggctacaacgtgccgagcggcacgatgctgatggtgaacgcgtacgccatccaccgggacccggcggcgtgggagcggccgctggagttcgtcccggagcggttcgaggacgggaaggccgaggggcggttcatgatcccgttcgggatgggccggcggcggtgccccggagagacgctggcgctgcggactatcggcatggtgctggccacgctggtgcagtgcttcgactgggagcgcgtggacggcgcggaggtggacatgacggagggcggcgggctcaccatccccaaggccgtgccgctcgaggccgtgtgcaggccgcgcccggccatgcgcgacgtgcttgagagcctctgatctgacaatccaacttcgttcttggcatcataaaatgcatggactggtggcgtgctgatgtagtagtaaataaagtcgtgacccttgtgtgagcagagtcaagctagctatcatcctatgcagtaaattacaggtaagtgtcggggttttgtgagaactagctaaactatctaggtagcgctcgtggatcgtgatagtaccaagccagcaatttgtaatttagtttgtatcaagaatgttgtgtatgggataacaaattatttc

SEQ ID NO: 68393 - protein, 534 aa, Triticum aestivum
  peptide (1)..(534): Ceres Seq. ID no. 12614125
QHTSSNQRTSLPLITQLTMDKAYIAILSFAFLFLIHYILGKVTNGRHSKGAVQLPPSPRAIPFLGHLHLLEKPFHAALCGLAKRLGPVFSLRLGSRRAVVVSSPECARECFTEHDVIFADRPQFPSQLLVSFDGIALSTSSYGPHWRNLRRVAAVQLLSAHRVACMSGVIGGEVRAMARRLFRAAAASPDGAARVELKRRLFELSLSVLMETIAQTKGTRPEADADTDMSLEAQEFKKVVDEIIPHIGAANLWDYLPVLRWFDVFGVRNKILAAVSRRDAFMLHLIDNERRRLDDGGAEGDKKSMIAVLLTLQKTEPEVYTDTMIMALCANLFGAGTETTSTTTEWAMSLLLNHPAALKEAQAEIDAAVGTSRLVTADDVPRLAYLQCIVSETLRLYPAAPMLLPHQSSADCKVGGYNVPSGTMLMVNAYAIHRDPAAWERPLEFVPERFEDGKAEGRFMIPFGMGRRRCPGETLALRTIGMVLATLVQCFDWERVDGAEVDMTEGGGLTIPKAVPLEAVCRPRPAMRDVLESL

SEQ ID NO: 68394 - protein, 516 aa, Triticum aestivum
  peptide (1)..(516): Ceres Seq. ID no. 12614126
MDKAYIAILSFAFLFLIHYILGKVTNGRHSKGAVQLPPSPRAIPFLGHLHLLEKPFHAALCGLAKRLGPVFSLRLGSRRAVVVSSPECARECFTEHDVIFADRPQFPSQLLVSFDGIALSTSSYGPHWRNLRRVAAVQLLSAHRVACMSGVIGGEVRAMARRLFRAAAASPDGAARVELKRRLFELSLSVLMETIAQTKGTRPEADADTDMSLEAQEFKKVVDEIIPHIGAANLWDYLPVLRWFDVFGVRNKILAAVSRRDAFMLHLIDNERRRLDDGGAEGDKKSMIAVLLTLQKTEPEVYTDTMIMALCANLFGAGTETTSTTTEWAMSLLLNHPAALKEAQAEIDAAVGTSRLVTADDVPRLAYLQCIVSETLRLYPAAPMLLPHQSSADCKVGGYNVPSGTMLMVNAYAIHRDPAAWERPLEFVPERFEDGKAEGRFMIPFGMGRRRCPGETLALRTIGMVLATLVQCFDWERVDGAEVDMTEGGGLTIPKAVPLEAVCRPRPAMRDVLESL

SEQ ID NO: 68395 - protein, 369 aa, Triticum aestivum
  peptide (1)..(369): Ceres Seq. ID no. 12614127
MSGVIGGEVRAMARRLFRAAAASPDGAARVELKRRLFELSLSVLMETIAQTKGTRPEADADTDMSLEAQEFKKVVDEIIPHIGAANLWDYLPVLRWFDVFGVRNKILAAVSRRDAFMLHLIDNERRRLDDGGAEGDKKSMIAVLLTLQKTEPEVYTDTMIMALCANLFGAGTETTSTTTEWAMSLLLNHPAALKEAQAEIDAAVGTSRLVTADDVPRLAYLQCIVSETLRLYPAAPMLLPHQSSADCKVGGYNVPSGTMLMVNAYAIHRDPAAWERPLEFVPERFEDGKAEGRFMIPFGMGRRRCPGETLALRTIGMVLATLVQCFDWERVDGAEVDMTEGGGLTIPKAVPLEAVCRPRPAMRDVLESL

SEQ ID NO: 68396 - DNA, 1223 bp, Triticum aestivum
  misc_feature (1)..(1223): Ceres Seq. ID no. 13596359
aactccactccgccgcgataagccctagcctccacctccgtctccatggcgaccaccaccaccctttcccacccgctctccgtgcccatcgccgggggccgcgtccggcgctgccccctcaccctgctcgccccggcccgcgcggccccccggcggccgacgcccctcctcgtcgcccgcgccaagcgcaccaacaactccagcgctgccccgaagcgagaggcggacgaggaggttgaggtggaggaggagctgccgtggatccaggacaaggcgctggacctcgtggagttcaccggcaccgtcacgcaggccatccccggcccccgcgtcggctccagccccgtgccgtggctcctcgctgtgccgctcgcctacgtcggcgtctccttcgccctcgccgccgtccgcaccttccgcaggttcacctccccgcgcactcagaagaagaagagggtgaccaagaatatattcttgttgaagtcactagacgagttgtttcagaagggcagggaagcagtggattttccagctcttcaagaactaatgcaaaagacaggatttgacatggatgatgtagtaagaaagtacatccgatacacactgaatgaaaaacaattcaatcctgatgtggttgtggatctcatacatcttaggaaagcatcgatgttagaagataatgaagttgctgaaattctgaatgagatatctagacgaattgttcgggaaaaaggtccaatagttatggacttatctgggtttacagagcaaggttttaagcggaagcttgctgtgcaaacattgttcggaaaaatcatgtacttatcagagctcccagagttctgttcccgggacggctcgcttgttgtcaaagaaatctttggagttacagacgaggatgcagacagccttcgcagtcgtaccctttctgaagctggtgatatcgagtcgttagaaaggatggtcgaagattctgatgaacatggtaccccatcatcatcttgaagtatgttagtggttggatacttatcatctttgagttttgtcaatggttgaagaagagagggttgtcctggatagttgactgcaagttttgtaaatctaccttctactaggattgtagcttctggcagtatctcggacctgtctaccacctgactaaaacaaggaagttgttgagagaatggtagcagtgagtttatataaagcgacaattgttaact

SEQ ID NO: 68397 - protein, 319 aa, Triticum aestivum
  peptide (1)..(319): Ceres Seq. ID no. 13596360
MATTTTLSHPLSVPIAGGRVRRCPLTLLAPARAAPRRPTPLLVARAKRTNNSSAAPKREADEEVEVEEELPWIQDKALDLVEFTGTVTQAIPGPRVGSSPVPWLLAVPLAYVGVSFALAAVRTFRRFTSPRTQKKKRVTKNIFLLKSLDELFQKGREAVDFPALQELMQKTGFDMDDVVRKYIRYTLNEKQFNPDVVVDLIHLRKASMLEDNEVAEILNEISRRIVREKGPIVMDLSGFTEQGFKRKLAVQTLFGKIMYLSELPEFCSRDGSLVVKEIFGVTDEDADSLRSRTLSEAGDIESLERMVEDSDEHGTPSSS

SEQ ID NO: 68398 - DNA, 530 bp, Triticum aestivum
  misc_feature (1)..(530): Ceres Seq. ID no. 13654264
aagggaagttggcagaagctagagaagaattgaaactagcaaaactcttagagaagcgtcttgaagcccctcaacaagacagtgaggatggtgcacatgagttagccacagcagctgttcagcagagcaattcgatccagcagtctgccagcgtcaccactcacaccaatccgttgacctatgcccctccagcacaggaaaacaagtcggttgagcctcaaaaagcaatgtccagccgagaccgtctcagaatccaacgtgaatccctcactcacaagcgcaacgccctgaagttgaggagagaaggaaagactgcggaagcagatgcggaattcgaattggccaagtcactagagagccaactggaagagtcagatagccagggttcgaactctggaggaaagtctgaagcaagtgacgcgtttgtggaagatcttattgatcctcaaatgatgtctgccctgaaatccatcggcnggagcgcagctgacctgttcacgcaatctccgagccctcaacctttggtgaaa

SEQ ID NO: 68399 - protein, 176 aa, Triticum aestivum
  peptide (1)..(176): Ceres Seq. ID no. 13654265
  misc_feature (159)..(159): Xaa is any aa, unknown or other
GKLAEAREELKLAKLLEKRLEAPQQDSEDGAHELATAAVQQSNSIQQSASVTTHTNPLTYAPPAQENKSVEPQKAMSSRDRLRIQRESLTHKRNALKLRREGKTAEADAEFELAKSLESQLEESDSQGSNSGGKSEASDAFVEDLIDPQMMSALKSIGXSAADLFTQSPSPQPLVK

SEQ ID NO: 68400 - protein, 101 aa, Triticum aestivum
  peptide (1)..(101): Ceres Seq. ID no. 13654266
  misc_feature (84)..(84): Xaa is any aa, unknown or other
MSSRDRLRIQRESLTHKRNALKLRREGKTAEADAEFELAKSLESQLEESDSQGSNSGGKSEASDAFVEDLIDPQMMSALKSIGXSAADLFTQSPSPQPLVK

SEQ ID NO: 68401 - DNA, 1257 bp, Triticum aestivum
  misc_feature (1)..(1257): Ceres Seq. ID no. 13595992
acctaacccattcaagtcgatcaatcatcagcaaaaaaaacactatagtaacaactgacagcgtgagggcgctcgcaatggcgagccgtttgggagtcgtgctggctttagcggctgtcgtccttcttgccgccgcgggggccgccgccgggcaatccacgccacggccacccaacgcccagggcccgaagccgaagccgaagccgatgaaggtcaagtgcaccgagaaccgcaaggagaacccctactgtttcaaccggaacatggactgccccgccaactgcccccagtcctgctaccccgactgcaacacatgcaaacccgtctgcgtctgcaacaccccgggggcgtgcggcgacccgcggttcataggtggtgacggcaacgccttctacttccacggacgcagggacgccgacttctgcgtcgtctccgaccgcgaccttcacatcaacgcgcacttcatcggcaagagcggccacagtggcatgtcccgggacttcacctggatccaggccatcgctgtgctcttcgacggccaccgcctctacctcggcgccaggaagaccggcacctgggacgacgccgtcgagcacctggacatcaccctggacggcgagcctgtctaccttcccgctgacctcatcgaaggcgccaagtggacgtccagccgcgtgcccgagctgtcggtgacccgcaccaaggcggccaacggcgtcctcgtcaccgtcgccggaaagttcagcgtcagggccaacgccgtgcccatcaccgaggaggaatcgagggtgcaccgctacggtgtcaccgccgatgactgcctcgcgcacctcgagctggcgttcaagttcgacgcgctcaccgacgacgtccacggtgtggtcggacagacgtaccgctccgactacgtcaaccatttcgacgtgagggcctccatgcccaccatgggaggagatgccaccttcaccacctccagcctgttcgccgccgactgcagcgtggcgcgctatggagtcagccgtggaaacgacggtgccgcggtgctatctgagctcgctggtgtcacctgcgccagcggcatggacggcaaaggtgtcgtgtgcaagaagtaaaacgcttctgccatgcatatggcgagtgcccgtgtatgtctgcatgcatgcatggttgacaagtacacacagaaataagcaaaggacatacattaatgtgtttggaacttgtaactttatcaagaaatagtatgcgtccgtttgc

SEQ ID NO: 68402 - protein, 369 aa, Triticum aestivum
  peptide (1)..(369): Ceres Seq. ID no. 15221721
LTHSSRSIISKKNTIVTTDSVRALAMASRLGVVLALAAVVLLAAAGAAAGQSTPRPPNAQGPKPKPKPMKVKCTENRKENPYCFNRNMDCPANCPQSCYPDCNTCKPVCVCNTPGACGDPRFIGGDGNAFYFHGRRDADFCVVSDRDLHINAHFIGKSGHSGMSRDFTWIQAIAVLFDGHRLYLGARKTGTWDDAVEHLDITLDGEPVYLPADLIEGAKWTSSRVPELSVTRTKAANGVLVTVAGKFSVRANAVPITEEESRVHRYGVTADDCLAHLELAFKFDALTDDVHGVVGQTYRSDYVNHFDVRASMPTMGGDATFTTSSLFAADCSVARYGVSRGNDGAAVLSELAGVTCASGMDGKGVVCKK

SEQ ID NO: 68403 - protein, 344 aa, Triticum aestivum
  peptide (1)..(344): Ceres Seq. ID no. 15221722
MASRLGVVLALAAVVLLAAAGAAAGQSTPRPPNAQGPKPKPKPMKVKCTENRKENPYCFNRNMDCPANCPQSCYPDCNTCKPVCVCNTPGACGDPRFIGGDGNAFYFHGRRDADFCVVSDRDLHINAHFIGKSGHSGMSRDFTWIQAIAVLFDGHRLYLGARKTGTWDDAVEHLDITLDGEPVYLPADLIEGAKWTSSRVPELSVTRTKAANGVLVTVAGKFSVRANAVPITEEESRVHRYGVTADDCLAHLELAFKFDALTDDVHGVVGQTYRSDYVNHFDVRASMPTMGGDATFTTSSLFAADCSVARYGVSRGNDGAAVLSELAGVTCASGMDGKGVVCKK

SEQ ID NO: 68404 - protein, 301 aa, Triticum aestivum
  peptide (1)..(301): Ceres Seq. ID no. 15221723
MKVKCTENRKENPYCFNRNMDCPANCPQSCYPDCNTCKPVCVCNTPGACGDPRFIGGDGNAFYFHGRRDADFCVVSDRDLHINAHFIGKSGHSGMSRDFTWIQAIAVLFDGHRLYLGARKTGTWDDAVEHLDITLDGEPVYLPADLIEGAKWTSSRVPELSVTRTKAANGVLVTVAGKFSVRANAVPITEEESRVHRYGVTADDCLAHLELAFKFDALTDDVHGVVGQTYRSDYVNHFDVRASMPTMGGDATFTTSSLFAADCSVARYGVSRGNDGAAVLSELAGVTCASGMDGKGVVCKK

SEQ ID NO: 68405 - DNA, 727 bp, Triticum aestivum
  misc_feature (1)..(727): Ceres Seq. ID no. 12584185
gacaaaaatcacgtgaggggatccttggagacgctctcatagcagagaggccgacgaacggtgaggtcaaaatcccgagcgaagagagaggcgggcaggaaagatggcggcggccgcactgcgtccggcgatcctccgccacatccgactctcgcccgccacggcggcccctctcgccgccgccgccgcggccggccggcccctcgccctcgcgccgtggctcgcgcggccaatgtcctcacacgacgcccacctcacccgcgacgaggtcgtcggccgcgtcctcgacgtcctcaagtgccaccccaaggtcgagccctccaaggtgacccccgaggcgcacttcgagaaggatctggggctggacagcctggacacggtggaggtggtgatggcgatcgaggaagagttcaagctcgagatccccgacttggaggctgacaagatcaactcgcttccgctcgccatcgagtatgtcgccaaccaccccatggccggctgagtgcccacccttccgattgccgaccgtgccagggtgaggcattttctcgtttctgtttggggatgatgaataattgcctggagttgttcaggaaaactggtccctggtgctccgcaatgtgtcggtcgctattggtcttggatgcaactgtaacattccgcagtgtcgctgatgaactggccttgttggtcgcacgcttgtttttgtagtatatctgtttaatcc

SEQ ID NO: 68406 - protein, 132 aa, Triticum aestivum
  peptide (1)..(132): Ceres Seq. ID no. 12584186
MAAAALRPAILRHIRLSPATAAPLAAAAAAGRPLALAPWLARPMSSHDAHLTRDEVVGRVLDVLKCHPKVEPSKVTPEAHFEKDLGLDSLDTVEVVMAIEEEFKLEIPDLEADKINSLPLAIEYVANHPMAG

SEQ ID NO: 68407 - protein, 108 aa, Triticum aestivum
  peptide (1)..(108): Ceres Seq. ID no. 12584187
QKSREGILGDALIAERPTNGEVKIPSEERGGQERWRRPHCVRRSSATSDSRPPRRPLSPPPPRPAGPSPSRRGSRGQCPHTTPTSPATRSSAASSTSSSATPRSSPPR

SEQ ID NO: 68408 - protein, 89 aa, Triticum aestivum
  peptide (1)..(89): Ceres Seq. ID no. 12584188
MSSHDAHLTRDEVVGRVLDVLKCHPKVEPSKVTPEAHFEKDLGLDSLDTVEVVMAIEEEFKLEIPDLEADKINSLPLAIEYVANHPMAG

SEQ ID NO: 68409 - DNA, 775 bp, Triticum aestivum
  misc_feature (1)..(775): Ceres Seq. ID no. 12598299
aaatcagacaaaacacgatggcatcagcagcgccattctccggcaccggcagtctccttcgcctgacaaaaccaggaacgccacagccccagttcttctcccctccgccgtctcgctcccacttccaccttcgaacccgccccgccaaggcaaagagcccaatcgccggagccatcgcctcctcttccatggcggcagcccagccccagacgtgcgacggccaacaacaacgggcggaggaggccatgaagctgctgttcgtcgagatgggcgtcgggtacgaccagcacggacaggacatcacctccgccgcggtgcgcgcctgcaaggatgccatctcctccaactccatccccgccttccgccgcgggtcgataccaggggtgaacagtgaacagatgaaactgcagatcaagctgggtgtcccgaggccggtgcagcatctgttggactttgagagaatcaaggccgtcttcccctatggtgagatcaccagctgcgaggtcattgacggcgggatgatctgttcaagtggaacatgcatcgaagcaatgggagataaaaacgatgactgctacattgtcaatgctgcagtttacgtcggttactaatgctagcctggaggaattgttgtattggaacagtggaaaacttgaaaaaaaaacctggccgggagaggggaactggaaattctcgtaggcaataagtatgtataactgttatgaacagagaaagggtcaaaatagggggaggccatgaagcctcccggtagtcc

SEQ ID NO: 68410 - protein, 202 aa, Triticum aestivum
  peptide (1)..(202): Ceres Seq. ID no. 12598300
IRQNTMASAAPFSGTGSLLRLTKPGTPQPQFFSPPPSRSHFHLRTRPAKAKSPIAGAIASSSMAAAQPQTCDGQQQRAEEAMKLLFVEMGVGYDQHGQDITSAAVRACKDAISSNSIPAFRRGSIPGVNSEQMKLQIKLGVPRPVQHLLDFERIKAVFPYGEITSCEVIDGGMICSSGTCIEAMGDKNDDCYIVNAAVYVGY

SEQ ID NO: 68411 - protein, 197 aa, Triticum aestivum
  peptide (1)..(197): Ceres Seq. ID no. 12598301
MASAAPFSGTGSLLRLTKPGTPQPQFFSPPPSRSHFHLRTRPAKAKSPIAGAIASSSMAAAQPQTCDGQQQRAEEAMKLLFVEMGVGYDQHGQDITSAAVRACKDAISSNSIPAFRRGSIPGVNSEQMKLQIKLGVPRPVQHLLDFERIKAVFPYGEITSCEVIDGGMICSSGTCIEAMGDKNDDCYIVNAAVYVGY

SEQ ID NO: 68412 - protein, 140 aa, Triticum aestivum
  peptide (1)..(140): Ceres Seq. ID no. 12598302
MAAAQPQTCDGQQQRAEEAMKLLFVEMGVGYDQHGQDITSAAVRACKDAISSNSIPAFRRGSIPGVNSEQMKLQIKLGVPRPVQHLLDFERIKAVFPYGEITSCEVIDGGMICSSGTCIEAMGDKNDDCYIVNAAVYVGY

SEQ ID NO: 68413 - DNA, 899 bp, Triticum aestivum
  misc_feature (1)..(899): Ceres Seq. ID no. 13654167
cactcccctgtctgtctccaagtccaagatcacaccgcgctttcttccttccccgtcgccgatccagacgaagcgccgcacgccggttcccttcacccccgcccgccaacgtctccggccaggttggatccatggcggaaaagaaggtcgtgctgaagctggacctgcacgacgacaagcagaagcagagggctctcaaggtcgtctccactctccacggcatcgaccagatcgccgtggacatgaaggaccagaagatgacggtggtgggcaccgtcgaccccgtggacctcgtcggcaggctgcgcagcaagctcttccccacggcgcagatgctctccgtcggcccggccaaggaggagaagaaggacggcggcgccaagaaggacgacggcaagaaggatggcgacaagaaggagccgatcccggtgtacacgccgtggtacccgccgccgccgccgctgtaccacccgcacccgtactaccacaaccacagcgccgaggaggaccccagctcctgcgtcatctgctgatcggcgcgcgccgctcccttgtacattttgtagctggccgtgtgctctgctgcctgccggtcgaccatgcctgctacggtgatcgacggcgtgcaccatacttaaggccgtttaaggattttgcgccagtgatccggctgctgtgcttgtgcatctgcttagtttataaagtgcagatatggaatttattagtgtgtagtgtagaattactactagatagaactgctggagttggattttgagtgaaagttcaccgagtgctctgctctccaatgtgataacagagtagtgaaataattagattaagtgctctgctctctggtgtggaaagaaaatagtgaagcccaataaataaattgaaggtgc

SEQ ID NO: 68414 - protein, 257 aa, Triticum aestivum
  peptide (1)..(257): Ceres Seq. ID no. 13654168
TPLSVSKSKITPRFLPSPSPIQTKRRTPVPFTPARQRLRPGWIHGGKEGRAEAGPARRQAEAEGSQGRLHSPRHRPDRRGHEGPEDDGGGHRRPRGPRRQAAQQALPHGADALRRPGQGGEEGRRRQEGRRQEGWRQEGADPGVHAVVPAAAAAVPPAPVLPQPQRRGGPQLLRHLLIGARRSLVHFVAGRVLCCLPVDHACYGDRRRAPYLRPFKDFAPVIRLLCLCICLVYKVQIWNLLVCSVELLLDRTAGVGF

SEQ ID NO: 68415 - protein, 176 aa, Triticum aestivum
  peptide (1)..(176): Ceres Seq. ID no. 13654169
LPCLSPSPRSHRAFFLPRRRSRRSAARRFPSPPPANVSGQVGSMAEKKVVLKLDLHDDKQKQRALKVVSTLHGIDQIAVDMKDQKMTVVGTVDPVDLVGRLRSKLFPTAQMLSVGPAKEEKKDGGAKKDDGKKDGDKKEPIPVYTPWYPPPPPLYHPHPYYHNHSAEEDPSSCVIC

SEQ ID NO: 68416 - protein, 133 aa, Triticum aestivum
  peptide (1)..(133): Ceres Seq. ID no. 13654170
MAEKKVVLKLDLHDDKQKQRALKVVSTLHGIDQIAVDMKDQKMTVVGTVDPVDLVGRLRSKLFPTAQMLSVGPAKEEKKDGGAKKDDGKKDGDKKEPIPVYTPWYPPPPPLYHPHPYYHNHSAEEDPSSCVIC

SEQ ID NO: 68417 - DNA, 1130 bp, Triticum aestivum
  misc_feature (1)..(1130): Ceres Seq. ID no. 13654553
actgcacactaccacactccccactctcccacgccacgccgactagcttcctccattaccctcctcctttgcttgcccagacctcggcgaggctccggcgagagagcgagagcgaaagctcccttccgctgctgcaatggcggttcctctggtgctcatgctcttggtcgccatgttcaccggctcagatgcgatgtactgcgtgtgcaagtcggacgcgaacccggtggcgatgcagaaggccatcgactacgcgtgcggcaagggcgccgactgcacccagatcacctccagcgggccctgcttccagccctcctccgtcgtcgcccactgctcctacgcctgcaacagctactaccagaagaacgccggcatgggcgccacctgcgatttcatgggcgtcgccaccctcaccggcgccgaccccagcgccggatcctgcaagtaccccgccagcgctagcggcgtcggcactggagcaggcaccggcaccggcggcatgggaaccggcggcacagggacaggcaccggaggcatgggaaccggcaccggaaccagcaccggaacgggcacgggcgtcggcaccggcaccagcaccggcggcatggggagcatgaccccgccgggcgcgaccagctccgggatgccggggagccccttcggcggcggcgcgtacggcccgtctggcatgaaccaggactacagcgcagccgtggtcggtcgccgcgtggccgtcgcggggctcctcgtggcggcagccgcgccgctcctcctccacttcatctgatgcggtggtgaccactggttggccggcggaaaggcgcgtcggcaatgctggcgggtgcgacgccggattcggtgggcacgccccgccgcttttgtgtccggctcgctctctcgcctgcctttccggcgtctgcgtcgttttgatggttcgatcggacgtactagtagcgtagtgtctgtctgtctgtccatgagtgctagtactcttattaagctgaccaccccatgtggtgtttgtaccggtgcgggtcgtggtagagttgatgagatctggtaggggattctttcttccttctcgtagcggtgacggtgttccgagacatataattatgtgttgtcgttcc

SEQ ID NO: 68418 - protein, 216 aa, Triticum aestivum
  peptide (1)..(216): Ceres Seq. ID no. 13654554
MAVPLVLMLLVAMFTGSDAMYCVCKSDANPVAMQKAIDYACGKGADCTQITSSGPCFQPSSVVAHCSYACNSYYQKNAGMGATCDFMGVATLTGADPSAGSCKYPASASGVGTGAGTGTGGMGTGGTGTGTGGMGTGTGTSTGTGTGVGTGTSTGGMGSMTPPGATSSGMPGSPFGGGAYGPSGMNQDYSAAVVGRRVAVAGLLVAAAAPLLLHFI

SEQ ID NO: 68419 - protein, 209 aa, Triticum aestivum
  peptide (1)..(209): Ceres Seq. ID no. 13654555
MLLVAMFTGSDAMYCVCKSDANPVAMQKAIDYACGKGADCTQITSSGPCFQPSSVVAHCSYACNSYYQKNAGMGATCDFMGVATLTGADPSAGSCKYPASASGVGTGAGTGTGGMGTGGTGTGTGGMGTGTGTSTGTGTGVGTGTSTGGMGSMTPPGATSSGMPGSPFGGGAYGPSGMNQDYSAAVVGRRVAVAGLLVAAAAPLLLHFI

SEQ ID NO: 68420 - protein, 204 aa, Triticum aestivum
  peptide (1)..(204): Ceres Seq. ID no. 13654556
MFTGSDAMYCVCKSDANPVAMQKAIDYACGKGADCTQITSSGPCFQPSSVVAHCSYACNSYYQKNAGMGATCDFMGVATLTGADPSAGSCKYPASASGVGTGAGTGTGGMGTGGTGTGTGGMGTGTGTSTGTGTGVGTGTSTGGMGSMTPPGATSSGMPGSPFGGGAYGPSGMNQDYSAAVVGRRVAVAGLLVAAAAPLLLHFI

SEQ ID NO: 68421 - DNA, 1408 bp, Triticum aestivum
  misc_feature (1)..(1408): Ceres Seq. ID no. 13596097
gccaacagtccaataaaagggactgcacccatcagtgtaaaaacaagcagcagtcaggcttcaatacaagcagactagtacgtagtacacgcaaggcagctcttctagttcttaggtgtgtgtagtacgtgcatcgatcctgtttgtttgatcctcatagagctacctactcgatcgcaccacttgaaattgcagccaaggccttgtagcacacccaagctagctagcagagcatttggtatttgaattggccgggaggaactatggtgctggacaagcaagacaggagcagagtcctggtaattggtggcacaggtcacattgggaagcacatcgttgctgcgagtgtccgccgcgacaacccgacctgtgtcctcattagggatgctgcaccggcttatctggccaaggcgcagctcctcaagagcttcattgattccggtgttgctctcatcaagggggatttatttgaccacgacagcctcgtaaatgccatcaagggtgcagatgccgtgatctcggccgtggggacctgtcagctcgacgagcagacgaggattgtcatggccatcaaggaggctggcaatgtcattaagaggttcctgccgtctgagttcggctctgacccagagcgggttcacaccgtggatccagcggccacactatacgctggtaaaatcagccttcgccgtctgatcgaggcggagggtatacctcatacatatgtctgctgcaacgggttcgccgaaacctaccttgtgagcatcggcgatgttacggctcttggcgctggtcctcggtccgacaagatcactgtcctaggcgatggagttgcaaaaggggtgtttgtggtggaagaggacatagctgcctacacggtgagagcgatcgaggatacgaggaccctgaacaagatcctgtacatgaggccgccggcgaacatcgtgtcccacaacgagctcatcgcactgtgggagaagaaagcgggaaggactttccagatcgctcgcatcccagagccggatctcctcaagttgatcaaggaggcggcataccctctcaacatgatgctgtcccactcgctctccgtcttggtgaggggcgaccaagccaacttcgacatcgagccgtcctttggtgttgaggccaccgagctgtaccctgacgtgaagtacaccaccgtcgacgagtacctggaccgcctcctctgacacttcttggctggatggagcactaaagatgatagagcagtggcctctccaaatgcaatgatgcgtgtgtcttgtgtgcaaattcaccagaaagaaaagaagaacctctgcgttccttgctaaaaaacatgatttgtggccgtgcataggctagtttatatatctttcctaataataaagggattatngcttntgcc

SEQ ID NO: 68422 - protein, 315 aa, Triticum aestivum
  peptide (1)..(315): Ceres Seq. ID no. 13596098
MVLDKQDRSRVLVIGGTGHIGKHIVAASVRRDNPTCVLIRDAAPAYLAKAQLLKSFIDSGVALIKGDLFDHDSLVNAIKGADAVISAVGTCQLDEQTRIVMAIKEAGNVIKRFLPSEFGSDPERVHTVDPAATLYAGKISLRRLIEAEGIPHTYVCCNGFAETYLVSIGDVTALGAGPRSDKITVLGDGVAKGVFVVEEDIAAYTVRAIEDTRTLNKILYMRPPANIVSHNELIALWEKKAGRTFQIARIPEPDLLKLIKEAAYPLNMMLSHSLSVLVRGDQANFDIEPSFGVEATELYPDVKYTTVDEYLDRLL

SEQ ID NO: 68423 - protein, 215 aa, Triticum aestivum
  peptide (1)..(215): Ceres Seq. ID no. 13596099
MAIKEAGNVIKRFLPSEFGSDPERVHTVDPAATLYAGKISLRRLIEAEGIPHTYVCCNGFAETYLVSIGDVTALGAGPRSDKITVLGDGVAKGVFVVEEDIAAYTVRAIEDTRTLNKILYMRPPANIVSHNELIALWEKKAGRTFQIARIPEPDLLKLIKEAAYPLNMMLSHSLSVLVRGDQANFDIEPSFGVEATELYPDVKYTTVDEYLDRLL

SEQ ID NO: 68424 - DNA, 1210 bp, Triticum aestivum
  misc_feature (1)..(1210): Ceres Seq. ID no. 14313544
acatcgatgagaaaaaggcagccaaggcgcacacttccaccacacaacgcgcgctttacgagagcagggaaccagaggggaactcgtgcttagctttcctgtagcttcgtttgcaccatccatggccgatccagccgaggagaccgtcgccgcgcccccgccgaccccggcagctcccgccgagggcgccccgccgctgtcggcggagccgccggctagcaccgacgcctcgccggagaaggcggccccgcctgcgcctgcgccggacacgacggtgaggtcccgggggttcaggctgctcggcgaggacacctccgtgcacaaggtgctcggtggcggtaaaactgctgatgtactgttatggaaggacaagaaaacaactgctgtagtgatcggtggcacaactgtcatatgggttttatttgaagtgcttgattaccatctcttaactctgctatcccatgtgatgattggtgtcctggccatcttgttcgtgtggtcgaaagctatgaccttcatcaagaagagtccgccagatattcctgtagtcgagatacctgaagacctcgctgtgaatgtatcacgggcactacgcagcgatgtcaacagatcacttcacttgttgcgcgagattgcaatggggcatgatctgaagaaattccttggtgtgattgctggtctctgggttctgtcagaagttggaagctgctgtgatttcctcaccttgatatatattgctgtcctgatgatccacacggtgccgatcttgtacgacaagtaccaggacaaggtggatcacttcgccggaaaggcccataccgaggcgtgcaagcactacgaggtgctggaccagaaggttctgagcaagataccccgaggaccggcgaaaaccaagaagacctagaatgctgggtgtctcgtgagtgcatgctgggtcgcttgtggttccgtgatcatatgcgtaatgcgacgagacgtcactcgtcttacggtcttgccttctgctcagcattgtattagctatttgtatatgcaactctgaaaacttcgaactgctacctttctactatcgcagtcgcttgtagatacctgtcctgttacttgtgtgtacgtgcggcagatgtgttctcgtgtggatgttcttagtgaaaacctgaatggatgttcttgaaagaaaataacctgctgaatactactggactattaatcc

SEQ ID NO: 68425 - protein, 260 aa, Triticum aestivum; identical to SEQ ID NO: 59269
  peptide (1)..(260): Ceres Seq. ID no. 14313545

SEQ ID NO: 68426 - protein, 145 aa, Triticum aestivum; identical to SEQ ID NO: 59270
  peptide (1)..(145): Ceres Seq. ID no. 14313546

SEQ ID NO: 68427 - protein, 131 aa, Triticum aestivum
  peptide (1)..(131): Ceres Seq. ID no. 14313547
MTFIKKSPPDIPVVEIPEDLAVNVSRALRSDVNRSLHLLREIAMGHDLKKFLGVIAGLWVLSEVGSCCDFLTLIYIAVLMIHTVPILYDKYQDKVDHFAGKAHTEACKHYEVLDQKVLSKIPRGPAKTKKT

SEQ ID NO: 68428 - DNA, 1529 bp, Triticum aestivum
  misc_feature (1)..(1529): Ceres Seq. ID no. 14303576
atctgcgccttctggtgagagtacgtgtgttggttgttcttgcaggcacttgcacgcgtggtcaccatggagctgccccacgccgcgctcgcgctgatcgtcgccgcggccgccacgctctccgtcgcagtggcctacgacccgctggatcccaacgggaacatcaccatcaaatgggacgttctctcgtggacgccagacggatacgtcgcgacggtgacgatcaacaacttccagacgtaccggcagatcatggcgccggggtggacggtggggtggacgtgggcgaagcgggaggtgatctggtccatggtgggcgcgcaggccacggagcagggcgactgctccaagttcaaggccaacctcccgcactcgtgcaagcgcacccccgccgtcgtcgacctgctcccgggcgtgccctacaaccagcagatcgccaactgctgccgcggcggcgtcgtctccgcctacggccaggacccgtccggcgccgtgtcctccttccaggtcagcgtcggccaggccggcaccaccaaccgcaccgtcaaggtccccaagaacttcaccctcctcggccccggcccaggctacacctgcggccccgccaaggtcgtcccctccaccgtcttcctcaccgccgaccaccgccgcaagacccaggccctcatgacgtggaacgtgacgtgcacctactcgcagcacctggcgtccaagtacccgacctgctgcgtctccttctcctccttctacaacgacaccatcgtgccctgcgccaagtgcgcgtgcggctgcgagcacaagacctgcgcccgcagcgagcgggactcgaagcggctcatgtcggcgtcggggaagagcagcgcgcacgcggtcaccgcggtgcgcgggcacgtgaaccggcagagcgcggcgccgctgctgcagtgcacgacccacatgtgccccgtgcgcgtccactggcacgtcaagctcaactaccacgactactggcgcgccaaggtgaccgtcaccaacttcaactaccgcaccaactacaccggctggacgctcgtcgcccagcaccccaacctcgacaacatcaccgaggtcttcagcttcgactacaagcccgtcgtctcctacggctccatcaatgatacggcgctgttctacgggatgaagttcttcaacgaccagctcatggaggcggggccgtacgggaacgtgcagtcggaggtgctgatgcgcaaggacgccagcacattcacgttcaggcaggggtgggcgttcccgcggaagatctacttcaacggcgacgagtgccggatgccgccgccggactcctacccttacctgcccaactccgcgccggcgtcgctcgtgagctccgcctccgtcgtcgtcgccttcttggttctactcatggcatgagcgtcggaggcggccatgatgttttgcctgtagatcataggagaacgttttgggcttcaaggttgagatcggtggtgttttaatctggatataattaaacgcaagtttttccccattac

SEQ ID NO: 68429 - protein, 447 aa, Triticum aestivum
  peptide (1)..(447): Ceres Seq. ID no. 14303577
MELPHAALALIVAAAATLSVAVAYDPLDPNGNITIKWDVLSWTPDGYVATVTINNFQTYRQIMAPGWTVGWTWAKREVIWSMVGAQATEQGDCSKFKANLPHSCKRTPAVVDLLPGVPYNQQIANCCRGGVVSAYGQDPSGAVSSFQVSVGQAGTTNRTVKVPKNFTLLGPGPGYTCGPAKVVPSTVFLTADHRRKTQALMTWNVTCTYSQHLASKYPTCCVSFSSFYNDTIVPCAKCACGCEHKTCARSERDSKRLMSASGKSSAHAVTAVRGHVNRQSAAPLLQCTTHMCPVRVHWHVKLNYHDYWRAKVTVTNFNYRTNYTGWTLVAQHPNLDNITEVFSFDYKPVVSYGSINDTALFYGMKFFNDQLMEAGPYGNVQSEVLMRKDASTFTFRQGWAFPRKIYFNGDECRMPPPDSYPYLPNSAPASLVSSASVVVAFLVLLMA

SEQ ID NO: 68430 - protein, 385 aa, Triticum aestivum
  peptide (1)..(385): Ceres Seq. ID no. 14303578
MAPGWTVGWTWAKREVIWSMVGAQATEQGDCSKFKANLPHSCKRTPAVVDLLPGVPYNQQIANCCRGGVVSAYGQDPSGAVSSFQVSVGQAGTTNRTVKVPKNFTLLGPGPGYTCGPAKVVPSTVFLTADHRRKTQALMTWNVTCTYSQHLASKYPTCCVSFSSFYNDTIVPCAKCACGCEHKTCARSERDSKRLMSASGKSSAHAVTAVRGHVNRQSAAPLLQCTTHMCPVRVHWHVKLNYHDYWRAKVTVTNFNYRTNYTGWTLVAQHPNLDNITEVFSFDYKPVVSYGSINDTALFYGMKFFNDQLMEAGPYGNVQSEVLMRKDASTFTFRQGWAFPRKIYFNGDECRMPPPDSYPYLPNSAPASLVSSASVVVAFLVLLMA

SEQ ID NO: 68431 - protein, 377 aa, Triticum aestivum
  peptide (1)..(377): Ceres Seq. ID no. 14303579
LRLLVRVRVLVVLAGTCTRGHHGAAPRRARADRRRGRHALRRSGLRPAGSQREHHHQMGRSLVDARRIRRDGDDQQLPDVPADHGAGVDGGVDVGEAGGDLVHGGRAGHGAGRLLQVQGQPPALVQAHPRRRRPAPGRALQPADRQLLPRRRRLRLRPGPVRRRVLLPGQRRPGRHHQPHRQGPQELHPPRPRPRLHLRPRQGRPLHRLPHRRPPPQDPGPHDVERDVHLLAAPGVQVPDLLRLLLLLLQRHHRALRQVRVRLRAQDLRPQRAGLEAAHVGVGEEQRARGHRGARAREPAERGAAAAVHDPHVPRARPLARQAQLPRLLARQGDRHQLQLPHQLHRLDARRPAPQPRQHHRGLQLRLQARRLLRLHQ

SEQ ID NO: 68432 - DNA, 541 bp, Triticum aestivum
  misc_feature (1)..(541): Ceres Seq. ID no. 13589020
aactcccggtcccggacgacctgcttggctgcgcgcgtctcgataccacctaccccgtcgccgtcagagcctcttcccacgcgccgctcccctgtccccgcaccccccgccgccgccgccgccgctccccgggacgagatggaggtcgctgccgctgccgccgccgtcgccgtcccgaggcacaaggtgaagaagcagattaacctcttctactgcgccgagtgcgaggagctcgccctcaaggtcgccgccgcctccgacgccatccagctccagtctatcaactggaggaacttccccgacgggttcccgaacctcttcatcaacaacgcgcacgacatccgggggcaagacgttggcnttcttggcttctttaagttggccgggaatcatttttgaacagatttccgtattcttcgcgcttgcccaagctcttnatcgcctccttcacgctcgtgctgnccttcttcccaaccggtaccttcgagcgcgtcgaggaggagggcgacgtcgccaccggcttcacgctcgcgcgcatcct

SEQ ID NO: 68433 - protein, 132 aa, Triticum aestivum
  peptide (1)..(132): Ceres Seq. ID no. 13589021
  misc_feature (121)..(121): Xaa is any aa, unknown or other
NSRSRTTCLAARVSIPPTPSPSEPLPTRRSPVPAPPAAAAAAPRDEMEVAAAAAAVAVPRHKVKKQINLFYCAECEELALKVAAASDAIQLQSINWRNFPDGFPNLFINNAHDIRGQDVGXLGFFKLAGNHF

SEQ ID NO: 68434 - protein, 86 aa, Triticum aestivum
  peptide (1)..(86): Ceres Seq. ID no. 13589022
  misc_feature (75)..(75): Xaa is any aa, unknown or other
MEVAAAAAAVAVPRHKVKKQINLFYCAECEELALKVAAASDAIQLQSINWRNFPDGFPNLFINNAHDIRGQDVGXLGFFKLAGNHF

SEQ ID NO: 68435 - protein, 66 aa, Triticum aestivum
  peptide (1)..(66): Ceres Seq. ID no. 13589023
LPVPDDLLGCARLDTTYPVAVRASSHAPLPCPRTPRRRRRRSPGRDGGRCRCRRRRRPEAQGEEAD

SEQ ID NO: 68436 - DNA, 1410 bp, Triticum aestivum
  misc_feature (1)..(1410): Ceres Seq. ID no. 14313551
aggcttgtggtgctcccatcccatggcgccgtggctgctgctcccctccttcccgtggcctcccccgccccctcccggctcctcctctggccgcggcggcggaggcggtggaggcgacggcggagattggaagcccaacgtcgtcacggccatcgccggcgtccacctcggccgctccctccgccgtcgcctcgccggcctcctctgctcgccggaggtgcggtctcttgatgtcttaccgagaataggtgacatttggtttggaggatcacagccacttgacacacagcaccttcttgggacgctgggaaatgtgttctccacatcgtttgtttgcagttctgcttttttcggtgggaataggtcaggtgggagatacgtcggtagcggaaatttgcagcccagacggtctcatgggatcaactcgaagaagaggctgtggactaatgtccttcttgctgttaacatcctggcttatatcgctcagatagcatcgcaaggaaagcttcttatgtggggagcaaaggtcaacagcctgattgatagaggggagttttggcgtttggctacatcaacaattcttcatggaaatcttactcatcttgctttcaattgtttttctttgaattcgattggccctactgtggagctcgttactggtcctaaaagatttcttgctgtttatttcacttccgcactggcaggttcactaatgagttatcgctattgtcaatcaccttctgttggcgcatcaggggccatttttggactggttggtgcctatgctgtttatacatggaggcacagaaagcttttggggcatggaagggaaagtttagagcagatcgcacgtgtggtcatcttaaacatgggtatgggtctcctttcaaggggcattgacaactggggtcatctaggaggcttgctcgggggagtggctgcggcatggtttcttggtccagcttggcaaaatcagtatgtaccaaaggagggaagaatggtgttcaaagacagggcacccattcaccagctaataggcagtaaacgatcgcggtaacagcgtgtatgataaccgtgctcctatttttactgtgtatattagctgagaaacgtgggagaggaaggataaaagaaagtaagaaggaagatcgagacaacataccaagcaaagggagcagccgaaaaccatggctgatacctagttttgcagaagaaatcacccaccatgtccatgtgtggcggctgctgagctagctctagctcagaggagaagagcagtgcctctcgagctagttggtgtgtttggatcatttgcaactgttacacttgtgacagggtaggtcaggcgatactgacaattgtattttacgtacatgtttatttatcaagcattgctagcgcctcgttgat

SEQ ID NO: 68437 - protein, 351 aa, Triticum aestivum
  peptide (1)..(351): Ceres Seq. ID no. 14313552
GLWCSHPMAPWLLLPSFPWPPPPPPGSSSGRGGGGGGGDGGDWKPNVVTAIAGVHLGRSLRRRLAGLLCSPEVRSLDVLPRIGDIWFGGSQPLDTQHLLGTLGNVFSTSFVCSSAFFGGNRSGGRYVGSGNLQPRRSHGINSKKRLWTNVLLAVNILAYIAQIASQGKLLMWGAKVNSLIDRGEFWRLATSTILHGNLTHLAFNCFSLNSIGPTVELVTGPKRFLAVYFTSALAGSLMSYRYCQSPSVGASGAIFGLVGAYAVYTWRHRKLLGHGRESLEQIARVVILNMGMGLLSRGIDNWGHLGGLLGGVAAAWFLGPAWQNQYVPKEGRMVFKDRAPIHQLIGSKRSR

SEQ ID NO: 68438 - protein, 344 aa, Triticum aestivum
  peptide (1)..(344): Ceres Seq. ID no. 14313553
MAPWLLLPSFPWPPPPPPGSSSGRGGGGGGGDGGDWKPNVVTAIAGVHLGRSLRRRLAGLLCSPEVRSLDVLPRIGDIWFGGSQPLDTQHLLGTLGNVFSTSFVCSSAFFGGNRSGGRYVGSGNLQPRRSHGINSKKRLWTNVLLAVNILAYIAQIASQGKLLMWGAKVNSLIDRGEFWRLATSTILHGNLTHLAFNCFSLNSIGPTVELVTGPKRFLAVYFTSALAGSLMSYRYCQSPSVGASGAIFGLVGAYAVYTWRHRKLLGHGRESLEQIARVVILNMGMGLLSRGIDNWGHLGGLLGGVAAAWFLGPAWQNQYVPKEGRMVFKDRAPIHQLIGSKRSR

SEQ ID NO: 68439 - protein, 181 aa, Triticum aestivum
  peptide (1)..(181): Ceres Seq. ID no. 14313554
MWGAKVNSLIDRGEFWRLATSTILHGNLTHLAFNCFSLNSIGPTVELVTGPKRFLAVYFTSALAGSLMSYRYCQSPSVGASGAIFGLVGAYAVYTWRHRKLLGHGRESLEQIARVVILNMGMGLLSRGIDNWGHLGGLLGGVAAAWFLGPAWQNQYVPKEGRMVFKDRAPIHQLIGSKRSR

SEQ ID NO: 68440 - DNA, 1425 bp, Triticum aestivum
  misc_feature (1)..(1425): Ceres Seq. ID no. 13662335
ctacttcaaatagacttggaatgggccattagtacgagttggtgtggtgtgcatcgcgatctatggacatggacatggaggagcctccccacctgttcctgtgccccatctccatggagctcatgcaggagcccgtcacggtgtccaccggcgtcacctacgaccgccgcagcatcgagcgctggctcttctcgtacggccgggccacctgcccggccaccatgcagccgctcgccaaccttgacctcaccccgaaccacaccctcgcgcgcgtcatctcctcctggctcgaccgcggctccccttcctcctcctcctcgtcttcgtcgtcgccgtccacgtcgtcgctgtcgagtccggtccacgagctggggacgccgctgacgaggatgctggaggaggagcggctgcggtcggcgctgggcgacctcgaggagacgccgttcaaggtgaccgcgctcaagagcatgcggagctgcatggcgggcgacgtggccatgcagatcatcttcgtcgcctcgggcggcgttgaggcggtcggccgcgtgatggcgcaggcgctggccgagagcggcgcgggaggcgacttctccgcgttcacggtgtgcgaggaggccgccgcggtgctcgccgcgctcccgctctccgacaaggcgtcggtggggctcgttcttgcgccggagtgcctgaggcccgtcatggcgttgctccagcgcggcagcgcggaggcgaggttgcacgccatggacatcctcaccaagatctccagtgccggcgccggtgaccactggactgccggcatcgacgtcgacgacgtgctcaagtccctcctcgagctcctgtctgacgaggtctccgcgcgcctcagctcgcgcgcgctcgacgtgctgctggacgtcgtggagcggtcgccgagcgggcgcgccaaggccgtggaggtcggcgcggtgcacgtcctcgtcgagctcctcgtcgtggacgccgacgaccgccacgtcgccgagcggatactgctgcttctcaagcggctgtgcaagtgccccgagggccgcctcgccttcgccgagcacgacctgtcggtcgcggccgtggcgaggacaatgctgagggtgtcggatctggccacgcagctggccgtcaaggtgctgtggctcgtgtccatggtggcgcagtcggagaaggtgctcgaggacatggtgctcaccggcgccgtggcgaagctgctggggctgctgcacgtcgagagcgcgccgtccacgaagcaaaagacggtgaggatggtgaggatccacggcgtgttctggaggcagtacccttgcttccccaccgacctcaaggattacttgaggttgctcgattgatttgttcattagttccagataatctgcaagaaaagtgaacaaaaaccgtgaattttcttatagt

SEQ ID NO: 68441 - protein, 432 aa, Triticum aestivum
  peptide (1)..(432): Ceres Seq. ID no. 13662336
MDMDMEEPPHLFLCPISMELMQEPVTVSTGVTYDRRSIERWLFSYGRATCPATMQPLANLDLTPNHTLARVISSWLDRGSPSSSSSSSSSPSTSSLSSPVHELGTPLTRMLEEERLRSALGDLEETPFKVTALKSMRSCMAGDVAMQIIFVASGGVEAVGRVMAQALAESGAGGDFSAFTVCEEAAAVLAALPLSDKASVGLVLAPECLRPVMALLQRGSAEARLHAMDILTKISSAGAGDHWTAGIDVDDVLKSLLELLSDEVSARLSSRALDVLLDVVERSPSGRAKAVEVGAVHVLVELLVVDADDRHVAERILLLLKRLCKCPEGRLAFAEHDLSVAAVARTMLRVSDLATQLAVKVLWLVSMVAQSEKVLEDMVLTGAVAKLLGLLHVESAPSTKQKTVRMVRIHGVFWRQYPCFPTDLKDYLRLLD

SEQ ID NO: 68442 - protein, 430 aa, Triticum aestivum
  peptide (1)..(430): Ceres Seq. ID no. 13662337
MDMEEPPHLFLCPISMELMQEPVTVSTGVTYDRRSIERWLFSYGRATCPATMQPLANLDLTPNHTLARVISSWLDRGSPSSSSSSSSSPSTSSLSSPVHELGTPLTRMLEEERLRSALGDLEETPFKVTALKSMRSCMAGDVAMQIIFVASGGVEAVGRVMAQALAESGAGGDFSAFTVCEEAAAVLAALPLSDKASVGLVLAPECLRPVMALLQRGSAEARLHAMDILTKISSAGAGDHWTAGIDVDDVLKSLLELLSDEVSARLSSRALDVLLDVVERSPSGRAKAVEVGAVHVLVELLVVDADDRHVAERILLLLKRLCKCPEGRLAFAEHDLSVAAVARTMLRVSDLATQLAVKVLWLVSMVAQSEKVLEDMVLTGAVAKLLGLLHVESAPSTKQKTVRMVRIHGVFWRQYPCFPTDLKDYLRLLD

SEQ ID NO: 68443 - protein, 428 aa, Triticum aestivum
  peptide (1)..(428): Ceres Seq. ID no. 13662338
MEEPPHLFLCPISMELMQEPVTVSTGVTYDRRSIERWLFSYGRATCPATMQPLANLDLTPNHTLARVISSWLDRGSPSSSSSSSSSPSTSSLSSPVHELGTPLTRMLEEERLRSALGDLEETPFKVTALKSMRSCMAGDVAMQIIFVASGGVEAVGRVMAQALAESGAGGDFSAFTVCEEAAAVLAALPLSDKASVGLVLAPECLRPVMALLQRGSAEARLHAMDILTKISSAGAGDHWTAGIDVDDVLKSLLELLSDEVSARLSSRALDVLLDVVERSPSGRAKAVEVGAVHVLVELLVVDADDRHVAERILLLLKRLCKCPEGRLAFAEHDLSVAAVARTMLRVSDLATQLAVKVLWLVSMVAQSEKVLEDMVLTGAVAKLLGLLHVESAPSTKQKTVRMVRIHGVFWRQYPCFPTDLKDYLRLLD

SEQ ID NO: 68444 - DNA, 1559 bp, Triticum aestivum
  misc_feature (1)..(1559): Ceres Seq. ID no. 13654557
agcctctccccccgccgccgcccaagccgctaccctttcctcctccccgccgccgccgccgccatggccaccaccgcgcgcccgctcgtctccgtcaaggctctggacggggacatggcaaccgacgcggccggcgtcccgatgccgcacgtcatgaaggcgccgatccgccccgacgtcatcaccttcgtccacaggctcgtctcctgcaacagccgccagccctacgccgtctcccgcaaggccggtcaccagacctcggccgagtcctggggcacgggtcgcgccgtctcgcgtatcccgcgtgtcggcggtggcggtacccaccgcgccggccagggagccttcggcaacatgtgccgtggcggacgcatgttcgcgcccacccggatctggcgcaagtggcaccgtcgcgtcaacgtccgcctccgccgcgtcgccgtcgcctccgccctcgccgccaccgccgtcccggccatcgtcaccgcccgcggccaccgcatcgagtccgtccccgagttcccgctcgtcgtctccgactcggccgagggcatcgagaagaccgcccaggccatcaaggtcctcaagcagctgggcgcctacgccgacgccgagaaggccaagctgtccgtgggcatccgccccggcaagggtaagatgcgcaaccgcaggtacatcaaccgcaagggccccctcatcgtctacggcaccgagggctccaagatcgtcaaggccttccgcaacctccctggtgtggatgttgccaacgtcgagcgcctcaacttgctcgaccttgcccctggtggccaccttggccggtttgtgatctggaccgagtctgccttcaagaagctggacgaggtgtacggctcctttgaggcgtcttcctccaagaagaagggcttcgttctccccaggcccaagatgaccaatgctgaccttggccgcctcatcaactctgatgaggtccagtctgtggtgaagcccatcaacaaggaggtcaagcgcagggaggccaggaagaaccctctgaagaacgctgctgccgtcctcaagctgaacccctattttggaactgcccgcaggatggcagttcttgctgaggcagcccgtgttaaggccaggaaggagaagatcaactccaagaggaccaagctcagcgcggaggaggcatctaagatcaaggctgctgggaaggcctggtaccagaccatgatctctgacagcgactacactgagttcgacgtcttctccaagtggctcggcgtcagccagtgatcatctagttgtagtagcagtctatcgtcctaccttaagagaccctaaagtatgattttgtgtcatgttatcgtttatctggagtctgagacatcttgctgttttggtagctgtttatctcaagtgttttatctatggacgcattttgggagacatgttatatggcatgctttatcgtcgtcgagttcttagttcagattttgagtcgtgtttttcatatatactttgttatgaatgcgaaataatttttggcattgtgaagttttgtggttggcataccc

SEQ ID NO: 68445 - protein, 425 aa, Triticum aestivum
  peptide (1)..(425): Ceres Seq. ID no. 13654558
SLSPRRRPSRYPFLLPAAAAAMATTARPLVSVKALDGDMATDAAGVPMPHVMKAPIRPDVITFVHRLVSCNSRQPYAVSRKAGHQTSAESWGTGRAVSRIPRVGGGGTHRAGQGAFGNMCRGGRMFAPTRIWRKWHRRVNVRLRRVAVASALAATAVPAIVTARGHRIESVPEFPLVVSDSAEGIEKTAQAIKVLKQLGAYADAEKAKLSVGIRPGKGKMRNRRYINRKGPLIVYGTEGSKIVKAFRNLPGVDVANVERLNLLDLAPGGHLGRFVIWTESAFKKLDEVYGSFEASSSKKKGFVLPRPKMTNADLGRLINSDEVQSVVKPINKEVKRREARKNPLKNAAAVLKLNPYFGTARRMAVLAEAARVKARKEKINSKRTKLSAEEASKIKAAGKAWYQTMISDSDYTEFDVFSKWLGVSQ

SEQ ID NO: 68446 - protein, 404 aa, Triticum aestivum
  peptide (1)..(404): Ceres Seq. ID no. 13654559
MATTARPLVSVKALDGDMATDAAGVPMPHVMKAPIRPDVITFVHRLVSCNSRQPYAVSRKAGHQTSAESWGTGRAVSRIPRVGGGGTHRAGQGAFGNMCRGGRMFAPTRIWRKWHRRVNVRLRRVAVASALAATAVPAIVTARGHRIESVPEFPLVVSDSAEGIEKTAQAIKVLKQLGAYADAEKAKLSVGIRPGKGKMRNRRYINRKGPLIVYGTEGSKIVKAFRNLPGVDVANVERLNLLDLAPGGHLGRFVIWTESAFKKLDEVYGSFEASSSKKKGFVLPRPKMTNADLGRLINSDEVQSVVKPINKEVKRREARKNPLKNAAAVLKLNPYFGTARRMAVLAEAARVKARKEKINSKRTKLSAEEASKIKAAGKAWYQTMISDSDYTEFDVFSKWLGVSQ

SEQ ID NO: 68447 - protein, 387 aa, Triticum aestivum
  peptide (1)..(387): Ceres Seq. ID no. 13654560
MATDAAGVPMPHVMKAPIRPDVITFVHRLVSCNSRQPYAVSRKAGHQTSAESWGTGRAVSRIPRVGGGGTHRAGQGAFGNMCRGGRMFAPTRIWRKWHRRVNVRLRRVAVASALAATAVPAIVTARGHRIESVPEFPLVVSDSAEGIEKTAQAIKVLKQLGAYADAEKAKLSVGIRPGKGKMRNRRYINRKGPLIVYGTEGSKIVKAFRNLPGVDVANVERLNLLDLAPGGHLGRFVIWTESAFKKLDEVYGSFEASSSKKKGFVLPRPKMTNADLGRLINSDEVQSVVKPINKEVKRREARKNPLKNAAAVLKLNPYFGTARRMAVLAEAARVKARKEKINSKRTKLSAEEASKIKAAGKAWYQTMISDSDYTEFDVFSKWLGVSQ

SEQ ID NO: 68448 - DNA, 2074 bp, Triticum aestivum
  misc_feature (1)..(2074): Ceres Seq. ID no. 13598312
aaccgcaaccgcaaccgctccgcccggcatctcgcctcgtcgcacttccctccagccccacacccagccagcacccggagacgagacgtgtacgtgcgcgtagcaccaacccgagcccagcggtgcgccgcagaaacaggcaggcagcggtgcgcggcgggacggaaggccagggtgacgtgcgggcgcgggccgggccagaggcctaagtagcgagcagcgccgatcgacggaccgaccggtcatgccgagcgcgctggggagcggcttcgccgggtcggtgaggctcaagtacgtgaagctggggtaccagtacctggtgaaccacttcctgacgctgctgctggtgccggtcatggcggccacggcgctcgagctggcgcgcctcggccccggcgagctgctcgcgctctggcgcgccctcgacctcgacctcgtgcacatcctctgctccgccttcctcgtcgtcttcgtcgccaccgtctacttcatgtcccgccccaggcccgtcttcctcgtcgactactgctgctacaagccctcccccagcttccgggtgcccttcaccaccttcatggagcacatcaagctcatctccaacaacgacaagagcctgcgcttccagacccgcatcctcgagcgctccgggctcggcgaggagacctgcctcccgccggccaaccactacatcccgcccaaccccagcatggaggcgtcgcgcgccgaggcgcagctcgtcatcttcaacgccatcgacgacctcgtccgccgcacgggcctcaagcccaaggacatcgacatcctcgtcgtcaactgcagcctcttctccccgacgccctccctctccgccatgatcatcaacaagtacaagctccgcagcaacatccgcagcttcaacctctccggcatgggatgcagcgccgggctcatctccatcgacctcgcgcgcgacatgctccaggtgcatcccaactcgaacgctctggtgatctcgacggagatcatcacgcccaacttctaccacgggagccggcgggacatgctgctgcccaactgcctgttccggatgggcgcggcggcgatcctgctgtccaaccggcggcgggaggcgcggcgcgccaagtacaggctggtgcacgtggtgcgcacgcacaagggcgcggacgaccgcgcgtaccggtgcgtgtacgaggaggaggacgacgaggggcactcgggcatctcgctctccaaggagctcatggccatcgccggcgaggcgctcaagtccaacatcaccaccatgggcccgctggtgctgcccatgtcggagcagctgctcttcttcttccgcctggtggggcgcaaggtgatcaacagcaagtggaagccctacatcccggacttcaagctggcgttcgagcacttctgcatccacgccggcggccgcgccgtcatcgacgagctgcagaagaacctggagctgtcgccgcggcacgtggaggcgtcgcgcatgacgctgcaccggttcggcaacacctccagcagctcgctctggtacgagctcgcctacatcgaggccaagggccgcatgcgcaagggcgaccgcgtgtggcagatcggcttcggcagcggcttcaagtgcaacagcgccgtctggaagtgcctccgcaccgtcaagacgcccaccgacgggccctgggacgactgcatccagcgctaccccgtccacatcccggaggtcgtcaagctgtgaggcgtcatcgacgacgagctcggctcgccgccggcggccgtgccctgcatctgcatgtacgtgccccccaaaacctggagctctgtgggggccccgaccaaattaaaccaatctctttctcctttgctctctttcttccttttctttttctagtattttcttcgccataaattaaattacatggatactcgtgggatgcgtcacacaaggaggggatcattcacagggagattaatcggctacccgaatatttatattggacgacgctaacgtgggcgtggttgttaaattgtttgtgtcacgaaattccactgcagtgaaagggataattacattggc

SEQ ID NO: 68449 - protein, 496 aa, Triticum aestivum
  peptide (1)..(496): Ceres Seq. ID no. 15222296
MPSALGSGFAGSVRLKYVKLGYQYLVNHFLTLLLVPVMAATALELARLGPGELLALWRALDLDLVHILCSAFLVVFVATVYFMSRPRPVFLVDYCCYKPSPSFRVPFTTFMEHIKLISNNDKSLRFQTRILERSGLGEETCLPPANHYIPPNPSMEASRAEAQLVIFNAIDDLVRRTGLKPKDIDILVVNCSLFSPTPSLSAMIINKYKLRSNIRSFNLSGMGCSAGLISIDLARDMLQVHPNSNALVISTEIITPNFYHGSRRDMLLPNCLFRMGAAAILLSNRRREARRAKYRLVHVVRTHKGADDRAYRCVYEEEDDEGHSGISLSKELMAIAGEALKSNITTMGPLVLPMSEQLLFFFRLVGRKVINSKWKPYIPDFKLAFEHFCIHAGGRAVIDELQKNLELSPRHVEASRMTLHRFGNTSSSSLWYELAYIEAKGRMRKGDRVWQIGFGSGFKCNSAVWKCLRTVKTPTDGPWDDCIQRYPVHIPEVVKL

SEQ ID NO: 68450 - protein, 459 aa, Triticum aestivum
  peptide (1)..(459): Ceres Seq. ID no. 15222297
MAATALELARLGPGELLALWRALDLDLVHILCSAFLVVFVATVYFMSRPRPVFLVDYCCYKPSPSFRVPFTTFMEHIKLISNNDKSLRFQTRILERSGLGEETCLPPANHYIPPNPSMEASRAEAQLVIFNAIDDLVRRTGLKPKDIDILVVNCSLFSPTPSLSAMIINKYKLRSNIRSFNLSGMGCSAGLISIDLARDMLQVHPNSNALVISTEIITPNFYHGSRRDMLLPNCLFRMGAAAILLSNRRREARRAKYRLVHVVRTHKGADDRAYRCVYEEEDDEGHSGISLSKELMAIAGEALKSNITTMGPLVLPMSEQLLFFFRLVGRKVINSKWKPYIPDFKLAFEHFCIHAGGRAVIDELQKNLELSPRHVEASRMTLHRFGNTSSSSLWYELAYIEAKGRMRKGDRVWQIGFGSGFKCNSAVWKCLRTVKTPTDGPWDDCIQRYPVHIPEVVKL

SEQ ID NO: 68451 - protein, 414 aa, Triticum aestivum
  peptide (1)..(414): Ceres Seq. ID no. 15222298
MSRPRPVFLVDYCCYKPSPSFRVPFTTFMEHIKLISNNDKSLRFQTRILERSGLGEETCLPPANHYIPPNPSMEASRAEAQLVIFNAIDDLVRRTGLKPKDIDILVVNCSLFSPTPSLSAMIINKYKLRSNIRSFNLSGMGCSAGLISIDLARDMLQVHPNSNALVISTEIITPNFYHGSRRDMLLPNCLFRMGAAAILLSNRRREARRAKYRLVHVVRTHKGADDRAYRCVYEEEDDEGHSGISLSKELMAIAGEALKSNITTMGPLVLPMSEQLLFFFRLVGRKVINSKWKPYIPDFKLAFEHFCIHAGGRAVIDELQKNLELSPRHVEASRMTLHRFGNTSSSSLWYELAYIEAKGRMRKGDRVWQIGFGSGFKCNSAVWKCLRTVKTPTDGPWDDCIQRYPVHIPEVVKL

SEQ ID NO: 68452 - DNA, 1874 bp, Triticum aestivum
  misc_feature (1)..(1874): Ceres Seq. ID no. 13596189
cctaatcgaaaaccacccacgcgcgcaccagccaccccccactatggcggcggcggcggcggcgtctccagccaccgcgccctcctccttcccctccgcccgcgcccacaagccgacgctcctctccctccgcgtctcgaccaagctcagagcccccgcggccgcggcggcatcggcggcatccgacccggccccggccttcaggtccgtcacggccttcgcgccggcgacggtggcgaacctcggcccgggcttcgacttcctgggctgcgcggtcgccgacgcctcgctctccctcggcgacacagtcacggccaccctcgacccctcgctgcccgccggcgcggtcgccatctcctgcatcacctccccgtcccgcccccgcctcgccgaccgcctctcccgcgacccgctccgcaactgcgcgggcatcgccgccgtcgccgcgctgcgggccctcggcgtgcgctcgcacggcgtctccctcagcctcgccaagggcctgccgctcggctccgggctcggctcctcggccgcgtccgcggccgccgccgccaaggccgtcgacgcgctcttcgggtccctgctcccccgcgacggcctcgtgctcgccggcctcgagtccgagaaggccgtcagcggcttccacgccgacaacatcgcgccggccatcctcggcggattcgtcatggtgcggagctacgacccgttctgcctcgtgtcgctgccctgcccgccggcgctccgcctctgcttcgtgctcgtcaccccggactttgaggcgccgacgagcaagatgcgcgccgcgctgccgaagaacatcgccatgggccaccacgtgcgcaactccagccaggccgccgcgctcgtcgccggcgtgctgcagggcgacgccgccctcatcggctccgcgatgtcgtccgacttcattgtcgagcccaccagggcgcccctgatacctggcatggccgcggtgaaggccgccgctcttgaagccggagcgctggggtgtaccatcagcggagcaggcccgaccgcagtagctgtcattgagggagaggagaagggggaggaggtcgcccggaggatgatcgacgccttcctgtcggtcggcaagctgaaagcgaccgccaccgtcgctcagctcgacagagccggcgccagggtcatctccacctcaaatttggagtagaagctagagagactttggtgctccgttcccattcgtgtatcggcctgacggcaagggggaagggagatgcggtataacgttgggttgcatctaggcgggggcaaggatggacatgaagacggtggaccaggcggtgagggcgagggcggcgacgaggtaggtccagaggaaaacgaccgagcactcctcctgggcgacgtcgtagagctgcgccatggtgctgatgctcatcgcgggcggcagcgcgaactggagcatgagcacatactggtacagcgggtccggcggcaggaagccgagctccctcgccgtcctcaccaccacgatcccgaccaccggcaggatcatgtagcgcacgcagacgatggccgcgatcacccaccgcgacatggtcgtcttgcgcaggcctgccagaccattattcagtttcagatggtctgacacagacagacagacagacagagattcagttgttgtttacctttggtgaggttccctccaaggatgagaatcacacaggggatggtgccatctctgcaacaaacaatggcataacatttcagtcagtagatgcactgcatgtgtatgccgtgttgaactgtaaaatgaattggacagcaaaaaaaaaaaaaaaaaagcttatcgataccgyckacctckagggrgsscccgagtacccaat

SEQ ID NO: 68453 - protein, 396 aa, Triticum aestivum
  peptide (1)..(396): Ceres Seq. ID no. 15221795
LIENHPRAHQPPPTMAAAAAASPATAPSSFPSARAHKPTLLSLRVSTKLRAPAAAAASAASDPAPAFRSVTAFAPATVANLGPGFDFLGCAVADASLSLGDTVTATLDPSLPAGAVAISCITSPSRPRLADRLSRDPLRNCAGIAAVAALRALGVRSHGVSLSLAKGLPLGSGLGSSAASAAAAAKAVDALFGSLLPRDGLVLAGLESEKAVSGFHADNIAPAILGGFVMVRSYDPFCLVSLPCPPALRLCFVLVTPDFEAPTSKMRAALPKNIAMGHHVRNSSQAAALVAGVLQGDAALIGSAMSSDFIVEPTRAPLIPGMAAVKAAALEAGALGCTISGAGPTAVAVIEGEEKGEEVARRMIDAFLSVGKLKATATVAQLDRAGARVISTSNLE

SEQ ID NO: 68454 - protein, 382 aa, Triticum aestivum
  peptide (1)..(382): Ceres Seq. ID no. 15221796
MAAAAAASPATAPSSFPSARAHKPTLLSLRVSTKLRAPAAAAASAASDPAPAFRSVTAFAPATVANLGPGFDFLGCAVADASLSLGDTVTATLDPSLPAGAVAISCITSPSRPRLADRLSRDPLRNCAGIAAVAALRALGVRSHGVSLSLAKGLPLGSGLGSSAASAAAAAKAVDALFGSLLPRDGLVLAGLESEKAVSGFHADNIAPAILGGFVMVRSYDPFCLVSLPCPPALRLCFVLVTPDFEAPTSKMRAALPKNIAMGHHVRNSSQAAALVAGVLQGDAALIGSAMSSDFIVEPTRAPLIPGMAAVKAAALEAGALGCTISGAGPTAVAVIEGEEKGEEVARRMIDAFLSVGKLKATATVAQLDRAGARVISTSNLE

SEQ ID NO: 68455 - protein, 259 aa, Triticum aestivum
  peptide (1)..(259): Ceres Seq. ID no. 15221797
PNRKPPTRAPATPHYGGGGGGVSSHRALLLPLRPRPQADAPLPPRLDQAQSPRGRGGIGGIRPGPGLQVRHGLRAGDGGEPRPGLRLPGLRGRRRLALPRRHSHGHPRPLAARRRGRHLLHHLPVPPPPRRPPLPRPAPQLRGHRRRRRAAGPRRALARRLPQPRQGPAARLRARLLGRVRGRRRQGRRRALRVPAPPRRPRARRPRVREGRQRLPRRQHRAGHPRRIRHGAELRPVLPRVAALPAGAPPLLRARHPGL

SEQ ID NO: 68456 - DNA, 1487 bp, Triticum aestivum
  misc_feature (1)..(1487): Ceres Seq. ID no. 13598278
gaggtcgacggtatcgataagcttttttttttttttttttctgaatagtatgttttttattaactcaatggtacgtagcacttgatttctctgtgtttcctagaatgaaacaatgtcttacgaaatgcttgttactctattcttatatgtcctgtacttttgaaattagaaaaataattactacaccacccccatactccatagacagaatttgccggtcttcaagggttagccagctcgaggtctccggttttcctcgccatctgctgctgcagcagctggttcttctgcgccgccgccttcttctgctggaccttctcgccatacatgtaggaggcaaagccccagaggcagagcaccagcgcgatgccctttggcccgtcgaacttctcgtggaggaagatgacggcgaggacctcggagagcggcaggaggacggcgaccatgatgccggcgaggagcgaagaggcgcaagtgacgagccccacgacgcccaggttgagcagctgccacgccacggcaccccatacgagcactaggtagtacttggtctcgccgagcccgaatgccgccgcctcgatcggcagcgcgttgaagtcgctcttgatggccatgccgagcaggcacaccatcgtgccggcgaggcccatcatggcctgcatctgcatcaccgtggagtagggtggcggcgcgctcgcggctggtcccctccgccgcccaaaccgctccatggcgacctcaacgagcggcagcacgagcccggcgagcgcggccgccgcgatggcctcgccgaacccggtccagtacgtcttggatggctcgcccgccggcttcccggacccgggaccgacgccgagcaccgcgggaccgatggtgagcagcaggacggcgttggcagagaagggcgtgaagcggagcccgacgaagaggaacgcgaacacggcggtgaaggcgagctgcgtcgccagtagcaaggacgacgtggacagcggcagcgcctgcgaccccatcgcatacacgaagcacgacacggcgtacaagctgcctagcacgacggccgcgccaacgaggcgaggcgggaggaggaggttgacgatgccgtggcggcggccgcggaagatggagacgcacaggggcgggaggaggagcggccagccggagatctggaccagcgcggagagccacaggcgttgcccgccgtggacgaagtagacccgcagcaggagcggcccgctggagccgatgaggacgaggcaggcgctgaatatgaccagcggtgaaggccggtagcgagccggcgaggcggccgtggcgcggggcggcgaggcgcttggcgtctttgctgcttcctgcatggccgggctggcactagcagttgtgatcgccatgatccgtcttagcttagctgcaagtatgtttgtactgctactttgctgtttcttggatgccctctctaatcctcccgcacagatgggatgagagcttgt

SEQ ID NO: 68457 - protein, 160 aa, Triticum aestivum
  peptide (1)..(160): Ceres Seq. ID no. 13598279
MATSTSGSTSPASAAAAMASPNPVQYVLDGSPAGFPDPGPTPSTAGPMVSSRTALAEKGVKRSPTKRNANTAVKASCVASSKDDVDSGSACDPIAYTKHDTAYKLPSTTAAPTRRGGRRRLTMPWRRPRKMETHRGGRRSGQPEIWTSAESHRRCPPWTK

SEQ ID NO: 68458 - protein, 144 aa, Triticum aestivum
  peptide (1)..(144): Ceres Seq. ID no. 13598280
MKQCLTKCLLLYSYMSCTFEIRKIITTPPPYSIDRICRSSRVSQLEVSGFPRHLLLQQLVLLRRRLLLLDLLAIHVGGKAPEAEHQRDALWPVELLVEEDDGEDLGERQEDGDHDAGEERRGASDEPHDAQVEQLPRHGTPYEH

SEQ ID NO: 68459 - protein, 143 aa, Triticum aestivum
  peptide (1)..(143): Ceres Seq. ID no. 13598281
MASPNPVQYVLDGSPAGFPDPGPTPSTAGPMVSSRTALAEKGVKRSPTKRNANTAVKASCVASSKDDVDSGSACDPIAYTKHDTAYKLPSTTAAPTRRGGRRRLTMPWRRPRKMETHRGGRRSGQPEIWTSAESHRRCPPWTK

SEQ ID NO: 68460 - DNA, 1094 bp, Triticum aestivum
  misc_feature (1)..(1094): Ceres Seq. ID no. 12614195
atctcatcctctctctctcacacacacacaaaaccactacaggcatccatcacgattccttgcctacgcctcctcatggcggctgccaccggcgccaagcagcagcatccgcacccagctccaccaccgggggcaacggtggtggaccccaagttcgagtgggcggagaaggccggcacctacgtgctccgcctcaccctgaccggcttcaggaaggacgacttccgggtgcaggtcgacggcgcgggccggctcaccatccgcggcaccaggccgggcgcctccctccacaaggtcttccagctgccctccgccgccagcctcgacgacatcgccggccgcttcgaggccggtgtgctcacgctcaccatgcccaagcgtgccggtgcgcccaaggaggagggtgcgccaacagagcaggtcgacggcgacgggaagaggagagacgccggcggtgagaagaaggtgcctgaacccgcaccttccggtgatgcggctcccacatccatcgaggagatcagaacgaagcccaaggaagagcagcagaggccgaagaaggaaaaagaactggatcccaaggctccccaggcggcagcagctgcgcagacaccggagaagcaagcaccgaatccaacctccagcgacaagaccatggcggtggttgaccgggagtgcctggcagagacggtgaggcgacgcggcgaggaagagagggcctaggctgctgcggcggcgacggccatggaagctagagcagagcaggagaagaaggcggcggccacggcgtgcagccgctggaaagagcgcatgacggaaggcctggggcagctgacggacatgaagtgggcggagagcgcaatggagatggcgaggaagaacaaggaggtggtggccgtcggagtcgccgccttcacactcggcttcttcgtctcccagaggctcttcaagaagtgagtagctatatggagcatgaacatgtcacatacaccaacagtgagtaatacgtacgggctagtattgtgtggttataatgtacattgactgaacaaccatgtaaaaaggtatttgtgtataatcaaagtgggtgtacattg

SEQ ID NO: 68461 - protein, 239 aa, Triticum aestivum
  peptide (1)..(239): Ceres Seq. ID no. 12614196
ISSSLSHTHTKPLQASITIPCLRLLMAAATGAKQQHPHPAPPPGATVVDPKFEWAEKAGTYVLRLTLTGFRKDDFRVQVDGAGRLTIRGTRPGASLHKVFQLPSAASLDDIAGRFEAGVLTLTMPKRAGAPKEEGAPTEQVDGDGKRRDAGGEKKVPEPAPSGDAAPTSIEEIRTKPKEEQQRPKKEKELDPKAPQAAAAAQTPEKQAPNPTSSDKTMAVVDRECLAETVRRRGEEERA

SEQ ID NO: 68462 - protein, 214 aa, Triticum aestivum
  peptide (1)..(214): Ceres Seq. ID no. 12614197
MAAATGAKQQHPHPAPPPGATVVDPKFEWAEKAGTYVLRLTLTGFRKDDFRVQVDGAGRLTIRGTRPGASLHKVFQLPSAASLDDIAGRFEAGVLTLTMPKRAGAPKEEGAPTEQVDGDGKRRDAGGEKKVPEPAPSGDAAPTSIEEIRTKPKEEQQRPKKEKELDPKAPQAAAAAQTPEKQAPNPTSSDKTMAVVDRECLAETVRRRGEEERA

SEQ ID NO: 68463 - protein, 151 aa, Triticum aestivum
  peptide (1)..(151): Ceres Seq. ID no. 12614198
LILSLSHTHKTTTGIHHDSLPTPPHGGCHRRQAAASAPSSTTGGNGGGPQVRVGGEGRHLRAPPHPDRLQEGRLPGAGRRRGPAHHPRHQAGRLPPQGLPAALRRQPRRHRRPLRGRCAHAHHAQACRCAQGGGCANRAGRRRREEERRRR

SEQ ID NO: 68464 - DNA, 1490 bp, Triticum aestivum
  misc_feature (1)..(1490): Ceres Seq. ID no. 13502983
gtgctctgctgccacccccaaatctcctccccactcccgaatcaaatcccccgtcacctccgccaccaccccaccccacctatccccaccgccggcgcgagcacgggagcgcgagcgcgagcggagcgatggccggcgcgggatcctcgtcgggcggctcgggcggcggcggggggagggagggcgactgggactgcggcggctgcggcaaccgcaactacgccttccgctccctctgcaaccgctgcaagcagccgcgcctcctcgtcgaccccaacaccccgcgcgactccaagtggctcccccgcgccggcgactggatctgcaacggttgcagtaacaataattatgcatccagaaagaactgcaagaagtgcaacctgcccaaggaggaagcagcgatgccgcagttatcaatgggaggaatgatgccagcctatgcagattatatggccagggtacaggagattgccaatgctgggtataagatgaactttggcaatccagctatgcagcagcagctactcgcaaacgcaaactggccctatgggatggctggtagatatggtatgcaatcgtctgcttggccgttcgccggcaacagcacaaatcagtttcaaggtgttccaaaggactggcgtagtggtgactggctctgcagctgtggattccataactattcatctcgtgctcagtgcaaagagtgtaatgcacctgtcccatcaggcatggcctctacaaccatgaaatccacaggagcagatagttcttcaacattaggtaataagcgtttggcatcagaggagcttgctaatgactgggataataaaaggctaaatccaggaaatgctaattatccactttcagcagcaggctcagataatttatttatgggtcaaggtgctggaaacaataatggccagacaacttattctgcatatgacaatggaaactcaatggcatctggacaaattccagggatgtctggtgtagttggtaaaggagcaaaatggcgtgaaggagactggttgtgcaccaactgcagcaatcataactacgcatctcgtgcattttgtaacagatgcaaaactgcgaaagagtcttcggttcatccgggtgcgctataataatagctttgcttgtacttttgcgaccaagttattgaagcgggtgtggagtctcctggttctgccacggctgatcggtcgctgccgtcgccaggattgttgttatgtttgtggtttggccctgcagtacttatgctgctgttaaaattgttctgtctgaatctaatattgtttgtgggagtttgcatttgtctacgccgagcactagaataaaacgtttcctgtatgtcgaagtgtaccatctgttttttgtttttgtgtgtgcgtgtgcaacgatttgatttgttcttcagtacctcaacagctatgatgtaatgtaatgctggatctatttcatgtggcaatgctggattttattgtttt

SEQ ID NO: 68465 - protein, 374 aa, Triticum aestivum
  peptide (1)..(374): Ceres Seq. ID no. 13502984
ALLPPPNLLPTPESNPPSPPPPPHPTYPHRRREHGSASASGAMAGAGSSSGGSGGGGGREGDWDCGGCGNRNYAFRSLCNRCKQPRLLVDPNTPRDSKWLPRAGDWICNGCSNNNYASRKNCKKCNLPKEEAAMPQLSMGGMMPAYADYMARVQEIANAGYKMNFGNPAMQQQLLANANWPYGMAGRYGMQSSAWPFAGNSTNQFQGVPKDWRSGDWLCSCGFHNYSSRAQCKECNAPVPSGMASTTMKSTGADSSSTLGNKRLASEELANDWDNKRLNPGNANYPLSAAGSDNLFMGQGAGNNNGQTTYSAYDNGNSMASGQIPGMSGVVGKGAKWREGDWLCTNCSNHNYASRAFCNRCKTAKESSVHPGAL

SEQ ID NO: 68466 - protein, 332 aa, Triticum aestivum
  peptide (1)..(332): Ceres Seq. ID no. 13502985
MAGAGSSSGGSGGGGGREGDWDCGGCGNRNYAFRSLCNRCKQPRLLVDPNTPRDSKWLPRAGDWICNGCSNNNYASRKNCKKCNLPKEEAAMPQLSMGGMMPAYADYMARVQEIANAGYKMNFGNPAMQQQLLANANWPYGMAGRYGMQSSAWPFAGNSTNQFQGVPKDWRSGDWLCSCGFHNYSSRAQCKECNAPVPSGMASTTMKSTGADSSSTLGNKRLASEELANDWDNKRLNPGNANYPLSAAGSDNLFMGQGAGNNNGQTTYSAYDNGNSMASGQIPGMSGVVGKGAKWREGDWLCTNCSNHNYASRAFCNRCKTAKESSVHPGAL

SEQ ID NO: 68467 - protein, 241 aa, Triticum aestivum
  peptide (1)..(241): Ceres Seq. ID no. 13502986
MPQLSMGGMMPAYADYMARVQEIANAGYKMNFGNPAMQQQLLANANWPYGMAGRYGMQSSAWPFAGNSTNQFQGVPKDWRSGDWLCSCGFHNYSSRAQCKECNAPVPSGMASTTMKSTGADSSSTLGNKRLASEELANDWDNKRLNPGNANYPLSAAGSDNLFMGQGAGNNNGQTTYSAYDNGNSMASGQIPGMSGVVGKGAKWREGDWLCTNCSNHNYASRAFCNRCKTAKESSVHPGAL

SEQ ID NO: 68468 - DNA, 1129 bp, Triticum aestivum
  misc_feature (1)..(1129): Ceres Seq. ID no. 13595979
ctacaccatcacacaatatccagaaccatctcactgccaacctccgccatggcgttccgacgccctctcgctctccacccgctcgtgatcgccttcgtgctggtctcctgtctcgccggcgccgccacggcgaagcagacgggccagctgaccgtgttctggggccggaacgccggcgagggcacgctgcgcgaggcctgcgacacggggctctactccaccgtcgtcatctccttctacagcgtcttcgggcacggccgctactggggcgacctctctggccaccctctcgccggcgtcggtgccgacatcaagcactgccagtccacgaacatcctcgtcctcctctccatcggcgggcccgggaacggctactccctcccgtcctccgcctccgccgcagccgtcgccgacaacctctggaacgcgcacctcggcgggcgccggaacggcgtgtaccgcccgttcggcgacgccgccgtcgacggcatcgacttctacatcgaccagggcgcccccgaccactacgacgagctggccagccgcctcgacgggtacaaccggttctaccgcggccggaagggtgtgcgcctgacggcgacgccgcggtgcgggttgcccgaccgccgcctgggggcggcgctccggacggggctgttcgagcgcatccacgtcaggttctacggcaatgacacatgctcgctggggaagggcgggacgtacggcgtggtagagcagtgggagaagtggacggcggcgttcccaaggacccaggtgtacctgggcctcgcgccggcggagagcggcgtgccggagggggcgcagggcaccgtcgccgtttacctcaagtacctctactacgacctgctgcccaaggtgcagaaggcgaacaactatggcggggtcatggtctgggacagattcgccgacaagaagacacgctggagcagcgtcgtcaacggatgggcctgatcgtttatatcgctagctggtttacagctacggatccgagtatatactacttctactgtgtatgcgtgtgtatgaataaaacggcatccatatgataatgatatatggatgtgaactcaagttgtttcttgttctagtcaatgagataaggaatatg

SEQ ID NO: 68469 - protein, 323 aa, Triticum aestivum
  peptide (1)..(323): Ceres Seq. ID no. 13595980
LHHHTISRTISLPTSAMAFRRPLALHPLVIAFVLVSCLAGAATAKQTGQLTVFWGRNAGEGTLREACDTGLYSTVVISFYSVFGHGRYWGDLSGHPLAGVGADIKHCQSTNILVLLSIGGPGNGYSLPSSASAAAVADNLWNAHLGGRRNGVYRPFGDAAVDGIDFYIDQGAPDHYDELASRLDGYNRFYRGRKGVRLTATPRCGLPDRRLGAALRTGLFERIHVRFYGNDTCSLGKGGTYGVVEQWEKWTAAFPRTQVYLGLAPAESGVPEGAQGTVAVYLKYLYYDLLPKVQKANNYGGVMVWDRFADKKTRWSSVVNGWA

SEQ ID NO: 68470 - protein, 307 aa, Triticum aestivum
  peptide (1)..(307): Ceres Seq. ID no. 13595981
MAFRRPLALHPLVIAFVLVSCLAGAATAKQTGQLTVFWGRNAGEGTLREACDTGLYSTVVISFYSVFGHGRYWGDLSGHPLAGVGADIKHCQSTNILVLLSIGGPGNGYSLPSSASAAAVADNLWNAHLGGRRNGVYRPFGDAAVDGIDFYIDQGAPDHYDELASRLDGYNRFYRGRKGVRLTATPRCGLPDRRLGAALRTGLFERIHVRFYGNDTCSLGKGGTYGVVEQWEKWTAAFPRTQVYLGLAPAESGVPEGAQGTVAVYLKYLYYDLLPKVQKANNYGGVMVWDRFADKKTRWSSVVNGWA

SEQ ID NO: 68471 - protein, 229 aa, Triticum aestivum
  peptide (1)..(229): Ceres Seq. ID no. 13595982
TPSHNIQNHLTANLRHGVPTPSRSPPARDRLRAGLLSRRRRHGEADGPADRVLGPERRRGHAARGLRHGALLHRRHLLLQRLRARPLLGRPLWPPSRRRRCRHQALPVHEHPRPPLHRRARERLLPPVLRLRRSRRRQPLERAPRRAPERRVPPVRRRRRRRHRLLHRPGRPRPLRRAGQPPRRVQPVLPRPEGCAPDGDAAVRVARPPPGGGAPDGAVRAHPRQVLRQ

SEQ ID NO: 68472 - DNA, 1484 bp, Triticum aestivum
  misc_feature (1)..(1484): Ceres Seq. ID no. 13589016
gttgcttcctctccctttccatttccttccttgtcctttcctccaatcgaattggttccccaaatcttagggttagggtttcgtctattccgtaccttcctcccatattagcgcgtctggtccctgagcttgctttgcgcgtgggatgatgggcactgccgtggacctaggacggaggcagggcgacagccgcttctacgacgctgccagggctcgacgagggcaccatcacggccttcccaagtcgagacatatgatggacgacagtgatgaagatttccgtgattccagcagtgatggtagcagtgattatgaacatgtaagggccaaacactttgctcaggaaggcttctcaagggatgttggtgaatctggagttactcatggccgcttgctctttcagtacctcgagtttgattctccgttttgccgtgaacctttcactgataagatttctagcctttcagctagatttccaggattgaggacccttaggagttgtgatttatcagcgcggagttggatgagcatcgcttggtacccaatttatcgtatccctactggaccaacattaaaagatttagatgcctgctttctcactttccatcagctttcaaattgcccgcaaggagataatctgtgggctcctgatagcacaccaaacataccactcccagtttttggtttggcttcctacaagtttagcaactcagtctggtcctcaactgatggtgattggaaactggctagctgcttaaggcaagctgctgccgactggctgagagacagccgtgccggccatccagattatcagttctttgtctcccgtggtgcatacaacaggtagtgacaccaaatctgtgctttccgcagagctcatgaaagaatgtccgaagagtgtcttgtgaacatgattaagttctgagtgactgactggttgactgcttccaaatctcatgcatgttaccacaagatttgaagcttggatgcatacatccaaccgatgctggaaaaagaggtcgcggcagtttccccttctcctctcttccaccgccccttttgagagtcgctcatccccggctggcccgatctgatgcctcgtccgtcggcgacgctggctggcgatggctgctggaaaaagaggtcgcggcagtttccccttctcctctcttccaccgcccccttttgagagtcactcatccccggccggcccgatctggtgcctcgtccgtcggcgatgctggctggcgatggctgaggagaggtccctggttcttccatatgtatattagagtagcagtagacttagttagacttggctttatgccgtggtgtggcctcatgccagtcgggatacctgctgctagaccttgtgagcagagtctggtggtggctgtgattcacacttatatttgagcttaaagtctgagtgtataccgaattaggcttttccttcgatcggtttatgtcagagttcacactac

SEQ ID NO: 68473 - protein, 233 aa, Triticum aestivum
  peptide (1)..(233): Ceres Seq. ID no. 13589017
MMGTAVDLGRRQGDSRFYDAARARRGHHHGLPKSRHMMDDSDEDFRDSSSDGSSDYEHVRAKHFAQEGFSRDVGESGVTHGRLLFQYLEFDSPFCREPFTDKISSLSARFPGLRTLRSCDLSARSWMSIAWYPIYRIPTGPTLKDLDACFLTFHQLSNCPQGDNLWAPDSTPNIPLPVFGLASYKFSNSVWSSTDGDWKLASCLRQAAADWLRDSRAGHPDYQFFVSRGAYNR

SEQ ID NO: 68474 - protein, 232 aa, Triticum aestivum
  peptide (1)..(232): Ceres Seq. ID no. 13589018
MGTAVDLGRRQGDSRFYDAARARRGHHHGLPKSRHMMDDSDEDFRDSSSDGSSDYEHVRAKHFAQEGFSRDVGESGVTHGRLLFQYLEFDSPFCREPFTDKISSLSARFPGLRTLRSCDLSARSWMSIAWYPIYRIPTGPTLKDLDACFLTFHQLSNCPQGDNLWAPDSTPNIPLPVFGLASYKFSNSVWSSTDGDWKLASCLRQAAADWLRDSRAGHPDYQFFVSRGAYNR

SEQ ID NO: 68475 - protein, 197 aa, Triticum aestivum
  peptide (1)..(197): Ceres Seq. ID no. 13589019
MMDDSDEDFRDSSSDGSSDYEHVRAKHFAQEGFSRDVGESGVTHGRLLFQYLEFDSPFCREPFTDKISSLSARFPGLRTLRSCDLSARSWMSIAWYPIYRIPTGPTLKDLDACFLTFHQLSNCPQGDNLWAPDSTPNIPLPVFGLASYKFSNSVWSSTDGDWKLASCLRQAAADWLRDSRAGHPDYQFFVSRGAYNR

SEQ ID NO: 68476 - DNA, 1257 bp, Triticum aestivum
  misc_feature (1)..(1257): Ceres Seq. ID no. 13596048
acaacaaccagcgcagcgagcaccacagacaccaagaatctttcacacagtctcacgcacgcagagccagtcgcacattttcggcgatggaggtgacccccaaccacacgcaggccgtgagcgggtgggcggccatggagccctccggcgaggtggtgcccttcgccttcaagcgccgggagaacggcgtggacgacgtcaccatcaaggtgcactactgcggcatgtgccacaccgacctccacttcatcaacaacgactggggcatcaccatgtaccccctcgtgcccggccacgagatcaccggcgttgtcacccgcgtcggcgccaacgtctccggcttccgccccggcgaccgcgtcggcgtcggctgcatcgccgcctcctgcctcgactgcgaccactgccgccgctccgaggagaactactgcgacaaggtcgcgctcacctacaacggcatcttctgggacggcagcgtcacctacggcggctactccagcatgctcgtcgcgcacaagcgcttcctcgtgcgcatcccggacgccctcccgctggacgccgccgcgccgctgctgtgcgccgggatcaccgtgtacagccccatgaagcagcacgggatgcttcaggctggcaggaggctcggcgtggtcgggctgggcgggctcggccacgtcgccgtcaagttcggcaaggcgttcgggctcaaggtcaccgtcatcagcacgtcgccggccaaggagcgggaggcgagggagagcctcaaggccgacgacttcgtcctcagcaccgacgagaagcagatgcaggccatggctcggagcctggactacgtgatcgacacggtgtcggcgcagcactcgctggggcccatcctggagctgctcaaggtgaacgggaagctggtgctggtggcggcgccggacaagcccgtggagctgccgtccttcccgctcatcttcgggaagaggacggtgagcgggagcatgacaggcggcatgaaggagacgcaggagatgatggacctgtgcggggagcacggcatcaccgctgacatcgagctcgtctccaccgatgggatcaacgacgcgttggccaggctcgcacgcaacgacgtccgctaccgcttcgtcgtcgacgttgccgggagtggctccaggctctagctgtttgtttaaattattggtgatttggacgcatggttcaacgtagattctgggcttctgtcagaaagaaagcatgggtacctgtttcattttc

SEQ ID NO: 68477 - protein, 386 aa, Triticum aestivum
  peptide (1)..(386): Ceres Seq. ID no. 15221749
NNQRSEHHRHQESFTQSHARRASRTFSAMEVTPNHTQAVSGWAAMEPSGEVVPFAFKRRENGVDDVTIKVHYCGMCHTDLHFINNDWGITMYPLVPGHEITGVVTRVGANVSGFRPGDRVGVGCIAASCLDCDHCRRSEENYCDKVALTYNGIFWDGSVTYGGYSSMLVAHKRFLVRIPDALPLDAAAPLLCAGITVYSPMKQHGMLQAGRRLGVVGLGGLGHVAVKFGKAFGLKVTVISTSPAKEREARESLKADDFVLSTDEKQMQAMARSLDYVIDTVSAQHSLGPILELLKVNGKLVLVAAPDKPVELPSFPLIFGKRTVSGSMTGGMKETQEMMDLCGEHGITADIELVSTDGINDALARLARNDVRYRFVVDVAGSGSRL

SEQ ID NO: 68478 - protein, 358 aa, Triticum aestivum
  peptide (1)..(358): Ceres Seq. ID no. 15221750
MEVTPNHTQAVSGWAAMEPSGEVVPFAFKRRENGVDDVTIKVHYCGMCHTDLHFINNDWGITMYPLVPGHEITGVVTRVGANVSGFRPGDRVGVGCIAASCLDCDHCRRSEENYCDKVALTYNGIFWDGSVTYGGYSSMLVAHKRFLVRIPDALPLDAAAPLLCAGITVYSPMKQHGMLQAGRRLGVVGLGGLGHVAVKFGKAFGLKVTVISTSPAKEREARESLKADDFVLSTDEKQMQAMARSLDYVIDTVSAQHSLGPILELLKVNGKLVLVAAPDKPVELPSFPLIFGKRTVSGSMTGGMKETQEMMDLCGEHGITADIELVSTDGINDALARLARNDVRYRFVVDVAGSGSRL

SEQ ID NO: 68479 - protein, 349 aa, Triticum aestivum
  peptide (1)..(349): Ceres Seq. ID no. 15221751
QQPAQRAPQTPRIFHTVSRTQSQSHIFGDGGDPQPHAGRERVGGHGALRRGGALRLQAPGERRGRRHHQGALLRHVPHRPPLHQQRLGHHHVPPRARPRDHRRCHPRRRQRLRLPPRRPRRRRLHRRLLPRLRPLPPLRGELLRQGRAHLQRHLLGRQRHLRRLLQHARRAQALPRAHPGRPPAGRRRAAAVRRDHRVQPHEAARDASGWQEARRGRAGRARPRRRQVRQGVRAQGHRHQHVAGQGAGGEGEPQGRRLRPQHRREADAGHGSEPGLRDRHGVGAALAGAHPGAAQGEREAGAGGGAGQARGAAVLPAHLREEDGEREHDRRHEGDAGDDGPVRGARHHR

SEQ ID NO: 68480 - DNA, 595 bp, Triticum aestivum
  misc_feature (1)..(595): Ceres Seq. ID no. 13596190
aaaagacggagcggcggactctcctgcaatacatactccgccgccgccgccgccgccgccgcgatgcttctcttccacaagcaactgttctcgctccgtctcccagcttcacccgtgatcttctctctccgtcgggccctcttgtccacctcggcggccaccgacgccccgccggccccattcgccgtcgacgactacctcgtcaccacctgcggcctcacgccggagcaagccctcaaggccgccaagcacgtctcccactgcaagtccacctccaacgccgagtccgtcctcgcctacctcgccggccccaccctccgcttctccaaggccgacatcgcccacatcgtcgcccgcgacccgcggatcctcaactgcagcgtcgacgacaccctcaaggcccgcgtcgccatcttacgcggctatggcctctccgaagaccacgtccggaccttcctccgcatgacccccggcgtcttccgctccgtcagcatccaggagaagctcgggttctggttgcccttcctggggtcgccggagaagttcatccgcatcctcaagggcaactattacctgctcacgtcggacctcgagc

SEQ ID NO: 68481 - protein, 198 aa, Triticum aestivum
  peptide (1)..(198): Ceres Seq. ID no. 13596191
KRRSGGLSCNTYSAAAAAAAAMLLFHKQLFSLRLPASPVIFSLRRALLSTSAATDAPPAPFAVDDYLVTTCGLTPEQALKAAKHVSHCKSTSNAESVLAYLAGPTLRFSKADIAHIVARDPRILNCSVDDTLKARVAILRGYGLSEDHVRTFLRMTPGVFRSVSIQEKLGFWLPFLGSPEKFIRILKGNYYLLTSDLE

SEQ ID NO: 68482 - protein, 197 aa, Triticum aestivum
  peptide (1)..(197): Ceres Seq. ID no. 13596192
KTERRTLLQYILRRRRRRRRDASLPQATVLAPSPSFTRDLLSPSGPLVHLGGHRRPAGPIRRRRLPRHHLRPHAGASPQGRQARLPLQVHLQRRVRPRLPRRPHPPLLQGRHRPHRRPRPADPQLQRRRHPQGPRRHLTRLWPLRRPRPDLPPHDPRRLPLRQHPGEARVLVALPGVAGEVHPHPQGQLLPAHVGPR

SEQ ID NO: 68483 - protein, 177 aa, Triticum aestivum
  peptide (1)..(177): Ceres Seq. ID no. 13596193
MLLFHKQLFSLRLPASPVIFSLRRALLSTSAATDAPPAPFAVDDYLVTTCGLTPEQALKAAKHVSHCKSTSNAESVLAYLAGPTLRFSKADIAHIVARDPRILNCSVDDTLKARVAILRGYGLSEDHVRTFLRMTPGVFRSVSIQEKLGFWLPFLGSPEKFIRILKGNYYLLTSDLE

SEQ ID NO: 68484 - DNA, 1488 bp, Triticum aestivum
  misc_feature (1)..(1488): Ceres Seq. ID no. 13596194
gaccctaaaccattcctcttctccacttcccctatcccttctttgctcgtggaaaaagctcgacctgctaatggcggcggcggcggacttcacgcagagcaagcaggccatgtcgtacgcgctctgcaagcacctgaacctcgatccgaatagcatatccagtacacttatcaaggagaatgatattgcgagcctattctcacatatcgtgacctcaccgcaggatgaggtcaagaagtgggttgagttctccagcaattttgttctaagtgatggagaacagcatgcattacttggtaatttgaatcaacatttgtcccagatgtcggtactattagctggtttcaaaccatcagcggcggacattattgtgtttgcaaccgtgcatgttttcatgtgtcatcttagtgacagtgagttgcagaaatatccaaatatattgcggtggatggactacattcagaatgttgttgattttggtatgacactgcaaaagataaacttgacgaaatctatcttcaacccacctgcacctgcaccttctcacccaaagaaagctgataaaggagatggtgatccaaattccaagaaagctgtttcaggacagaaggttgcggataagtcagatgtagctgctgactccaaaaaggctgcaggggagaataaggttcctggggataaggcaaatcctacttctaccaaaaacaacaaaccttctggggataaaaagaaagtccaagagaagactgccggcaaaacagaggcagctgcagagaaagctccacagaaaagtgcagaaaaggattctgagtgcagtgttagtatcctgaatatacaggtcggagttattcgcaaagcatggaaacatccatcagctgacagtcttctggtggaggagatagatttgggagatggcaatgtgcgtcaagttgttagtggtcttgcgaagttcttcagcccagatgaacttgttaatcgccatgttgtcttgatcacgaatgtgaagcctgggaagctgcgcgatgtaatgtctgctggattggtcttgtgtgcttcaaataaagatcatacagtcgtggagcctttgattcctccggaaggtgccaagcttggagaacgcatttcttttgctgggtttgatgggaagccggaagatgttctaaacccaaagaagaaacaattggacaagataacacctcatctccgtaccgacgagaatggaattgcaacgttccgaggggtaccattcactacatcagccggtctgtgtagatcctcagttccgaatgccgatgttaagtgagcaactcgttaagcatgctgatttcaaacattgatgtgctaagacacatgcagatgtaccattttgtcgtaatgcacatattaaatgttaccatatgttaacagagttgtcagttcttgacttttaatatctgaaaacaaattttgttttgtctatgcgcaaaaaggaaaaaaatggccctgatg

SEQ ID NO: 68485 - protein, 433 aa, Triticum aestivum
  peptide (1)..(433): Ceres Seq. ID no. 13596195
TLNHSSSPLPLSLLCSWKKLDLLMAAAADFTQSKQAMSYALCKHLNLDPNSISSTLIKENDIASLFSHIVTSPQDEVKKWVEFSSNFVLSDGEQHALLGNLNQHLSQMSVLLAGFKPSAADIIVFATVHVFMCHLSDSELQKYPNILRWMDYIQNVVDFGMTLQKINLTKSIFNPPAPAPSHPKKADKGDGDPNSKKAVSGQKVADKSDVAADSKKAAGENKVPGDKANPTSTKNNKPSGDKKKVQEKTAGKTEAAAEKAPQKSAEKDSECSVSILNIQVGVIRKAWKHPSADSLLVEEIDLGDGNVRQVVSGLAKFFSPDELVNRHVVLITNVKPGKLRDVMSAGLVLCASNKDHTVVEPLIPPEGAKLGERISFAGFDGKPEDVLNPKKKQLDKITPHLRTDENGIATFRGVPFTTSAGLCRSSVPNADVK

SEQ ID NO: 68486 - protein, 410 aa, Triticum aestivum
  peptide (1)..(410): Ceres Seq. ID no. 13596196
MAAAADFTQSKQAMSYALCKHLNLDPNSISSTLIKENDIASLFSHIVTSPQDEVKKWVEFSSNFVLSDGEQHALLGNLNQHLSQMSVLLAGFKPSAADIIVFATVHVFMCHLSDSELQKYPNILRWMDYIQNVVDFGMTLQKINLTKSIFNPPAPAPSHPKKADKGDGDPNSKKAVSGQKVADKSDVAADSKKAAGENKVPGDKANPTSTKNNKPSGDKKKVQEKTAGKTEAAAEKAPQKSAEKDSECSVSILNIQVGVIRKAWKHPSADSLLVEEIDLGDGNVRQVVSGLAKFFSPDELVNRHVVLITNVKPGKLRDVMSAGLVLCASNKDHTVVEPLIPPEGAKLGERISFAGFDGKPEDVLNPKKKQLDKITPHLRTDENGIATFRGVPFTTSAGLCRSSVPNADVK

SEQ ID NO: 68487 - protein, 397 aa, Triticum aestivum
  peptide (1)..(397): Ceres Seq. ID no. 13596197
MSYALCKHLNLDPNSISSTLIKENDIASLFSHIVTSPQDEVKKWVEFSSNFVLSDGEQHALLGNLNQHLSQMSVLLAGFKPSAADIIVFATVHVFMCHLSDSELQKYPNILRWMDYIQNVVDFGMTLQKINLTKSIFNPPAPAPSHPKKADKGDGDPNSKKAVSGQKVADKSDVAADSKKAAGENKVPGDKANPTSTKNNKPSGDKKKVQEKTAGKTEAAAEKAPQKSAEKDSECSVSILNIQVGVIRKAWKHPSADSLLVEEIDLGDGNVRQVVSGLAKFFSPDELVNRHVVLITNVKPGKLRDVMSAGLVLCASNKDHTVVEPLIPPEGAKLGERISFAGFDGKPEDVLNPKKKQLDKITPHLRTDENGIATFRGVPFTTSAGLCRSSVPNADVK

SEQ ID NO: 68488 - DNA, 1367 bp, Triticum aestivum
  misc_feature (1)..(1367): Ceres Seq. ID no. 13596198
ccaacgcacaccaaacaaaaacaacaacaacaagatcaccggcgcatcccatcccagagcaaccacacacgcagacaagcaagaatggcgatcgccgtgagcgggcaatggactcgcctgcggacgctcggctgcggcgcgtcgggggccgtggtcaccctggcggccgacgccgcgtcgggggagctgttcgcggtcaagtccgtgcgcgcggcggacgcggcgcagctgagccgggagcaggggatcctctccgggctctcctcgccgcacgtcgtgggctgcatcggcggcggcggcgaccgcgacggctcctaccacctcttcctcgagttcgcccccggcggctcgctcgccgacgaggccgcgaggaatgggggccgcctggaggagcgcgccatccgggcgtacgcggcggacgtcctgcgcgggctcgcctacatccacggcaagtcgctcgtgcacggcgacgtcaagtcgaggaacgtagtgatcggcgccgacgggcgcgccatgatcgccgacttcgggtgcgcgagggccctcggttcggccgggccgatcggaggcacgccggcgttcatggccccggaggtggcacgaggcgaagagcaggggccggccgccgacgtgtgggctctcggctgcacggtcgtcgagatggccaccgggcgcgccccgtggggcgagatggacaacgtccttgccgccgtccaccggattgggtacacggacgccgtgccggaggtgccgacgtggctgtcagcggaggcgaagagtttcctcgccatgtgcttcgcgaggaacgcccgcgaccggtgcacggcggcgcagctcctggagcacccgttcgtggcattgcaggcaggagaggccaaggccaggtgggtgtctcccaagagcacgctcgacgcagcattctgggaatcggagaccgacgaggaagaggaggaggaggaggaggtttcggagagcccgtccgagaggatcaagtcattgtcgtgctccgtcttgccggactgggactccgacgaaggctggatcgacgtgctcggcgagcagtgcgaagcttgcgattcaccagcagcaaccaaggggccagctgatgtgtccagcagggcgccaagcaaagtgctcgggtccccggcggtgccagctgaagacgtagctgtcgtcggcaccctttcaagtgatgaacatgaagtggacgcagaggatgagcctttcggtgacgataccatcctggccgctgatccttcggtggaccgccagaaccaagtgtgttcgagctcagatagagatgtactttcatcatcacatgtaccctgtaataatcgagttcttgcaatagaaaagtttcgttttcc

SEQ ID NO: 68489 - protein, 455 aa, Triticum aestivum
  peptide (1)..(455): Ceres Seq. ID no. 13596199
PTHTKQKQQQQDHRRIPSQSNHTRRQARMAIAVSGQWTRLRTLGCGASGAVVTLAADAASGELFAVKSVRAADAAQLSREQGILSGLSSPHVVGCIGGGGDRDGSYHLFLEFAPGGSLADEAARNGGRLEERAIRAYAADVLRGLAYIHGKSLVHGDVKSRNVVIGADGRAMIADFGCARALGSAGPIGGTPAFMAPEVARGEEQGPAADVWALGCTVVEMATGRAPWGEMDNVLAAVHRIGYTDAVPEVPTWLSAEAKSFLAMCFARNARDRCTAAQLLEHPFVALQAGEAKARWVSPKSTLDAAFWESETDEEEEEEEEVSESPSERIKSLSCSVLPDWDSDEGWIDVLGEQCEACDSPAATKGPADVSSRAPSKVLGSPAVPAEDVAVVGTLSSDEHEVDAEDEPFGDDTILAADPSVDRQNQVCSSSDRDVLSSSHVPCNNRVLAIEKFRF

SEQ ID NO: 68490 - protein, 427 aa, Triticum aestivum
  peptide (1)..(427): Ceres Seq. ID no. 13596200
MAIAVSGQWTRLRTLGCGASGAVVTLAADAASGELFAVKSVRAADAAQLSREQGILSGLSSPHVVGCIGGGGDRDGSYHLFLEFAPGGSLADEAARNGGRLEERAIRAYAADVLRGLAYIHGKSLVHGDVKSRNVVIGADGRAMIADFGCARALGSAGPIGGTPAFMAPEVARGEEQGPAADVWALGCTVVEMATGRAPWGEMDNVLAAVHRIGYTDAVPEVPTWLSAEAKSFLAMCFARNARDRCTAAQLLEHPFVALQAGEAKARWVSPKSTLDAAFWESETDEEEEEEEEVSESPSERIKSLSCSVLPDWDSDEGWIDVLGEQCEACDSPAATKGPADVSSRAPSKVLGSPAVPAEDVAVVGTLSSDEHEVDAEDEPFGDDTILAADPSVDRQNQVCSSSDRDVLSSSHVPCNNRVLAIEKFRF

SEQ ID NO: 68491 - protein, 367 aa, Triticum aestivum
  peptide (1)..(367): Ceres Seq. ID no. 13596201
NAHQTKTTTTRSPAHPIPEQPHTQTSKNGDRRERAMDSPADARLRRVGGRGHPGGRRRVGGAVRGQVRARGGRGAAEPGAGDPLRALLAARRGLHRRRRRPRRLLPPLPRVRPRRLARRRGREEWGPPGGARHPGVRGGRPARARLHPRQVARARRRQVEERSDRRRRARHDRRLRVREGPRFGRADRRHAGVHGPGGGTRRRAGAGRRRVGSRLHGRRDGHRARPVGRDGQRPCRRPPDWVHGRRAGGADVAVSGGEEFPRHVLREERPRPVHGGAAPGAPVRGIAGRRGQGQVGVSQEHARRSILGIGDRRGRGGGGGGFGEPVREDQVIVVLRLAGLGLRRRLDRRARRAVRSLRFTSSNQGAS

SEQ ID NO: 68492 - DNA, 1492 bp, Triticum aestivum
  misc_feature (1)..(1492): Ceres Seq. ID no. 13596202
ctcctcaattcggaggaagcgagggctcgcgcccgatcgggttggtggctcgccgcgatggcgaccgacgccggcgccgccgacaggagctccgtcttccgcaagctccgcgccaaatccgacaataagatgtgcttcgactgcaacgccaagaaccccacctgggcctccgttacctacggcgtcttcctctgcatcgactgctccgccgtccaccgcagcctcggcgtccacgtctccttcgtcaggtcaacaaatttggattcatggaccccagaacagttgaaaatgatggtttatgggggaaacaaccgtgcacaagctttctttaagcagcatggttggactgatggtggaaagatcgaggcaaagtacacttcaagagctgctgacttatacagacagttgctcctcaaagaggtttctaaaagttcgacagaagatggcaataatagtgggccgccctccccagtcgcagcttctcagacttcaagccaagcagctgcatttcctgatttcaaactggtagaggtgccgaaagaagttgtgaatgagcctgagtctgaaattattcgttcacctaaagctcctacccattcattcaagaagccaatcggtggaaagaagcctggaagtaagactggtggacttggtgcgcgcaagcttacgacaaagccaagtgaaagcctctatgagcagaaacctgaagagccagctcctgccctgccatcggtggctgaaagcactacagctaggagcaaatctcatacttcccgatttgaatatgtggaaaatgtaccttctgctgggagcagctctgcggaaaaccaggcatttgggcatgttgcgcccccaaagtcttcaaactttttcggtgaatatgggatggacagtggatatcacaagaaatctacttctggtgcatccaaaatgcaggttgaggaaagtagtgaagcaagacagaagttctcaaatgcaaagtctatttcatcttctcagtttttcggtgatcaaaccaatttagaaaaagagggccaaatctccctccaaaaattctctgggtcctctgccatttcaagtgctgatctgtttggccaacaagcgaacaattctaatgcggatctgagtgcttcggatttgatcaacagaatctccttccaggccactcaggacttgacctctctcaagagcatggctgggcagactgggaagaagctgacatctatggcgtccaacatcatatctgatcttgatcggatcctctgagctgaatttacatatcacaggtcttcgatggtccgcctctcctgattgttactgcatgacaacagatttgtggtggtggctctgtatatgagtccataggaatcttaaaacttaaactcggtagagaaagaatgaggattttatcacaaatgctttctggctaaagtcgtaatagcatttggagtttcgtggggaaaaaaaaaaaaaaaaagcttatcgataccgt

SEQ ID NO: 68493 - protein, 421 aa, Triticum aestivum
  peptide (1)..(421): Ceres Seq. ID no. 15221798
LLNSEEARARARSGWWLAAMATDAGAADRSSVFRKLRAKSDNKMCFDCNAKNPTWASVTYGVFLCIDCSAVHRSLGVHVSFVRSTNLDSWTPEQLKMMVYGGNNRAQAFFKQHGWTDGGKIEAKYTSRAADLYRQLLLKEVSKSSTEDGNNSGPPSPVAASQTSSQAAAFPDFKLVEVPKEVVNEPESEIIRSPKAPTHSFKKPIGGKKPGSKTGGLGARKLTTKPSESLYEQKPEEPAPALPSVAESTTARSKSHTSRFEYVENVPSAGSSSAENQAFGHVAPPKSSNFFGEYGMDSGYHKKSTSGASKMQVEESSEARQKFSNAKSISSSQFFGDQTNLEKEGQISLQKFSGSSAISSADLFGQQANNSNADLSASDLINRISFQATQDLTSLKSMAGQTGKKLTSMASNIISDLDRIL

SEQ ID NO: 68494 - protein, 402 aa, Triticum aestivum
  peptide (1)..(402): Ceres Seq. ID no. 15221799
MATDAGAADRSSVFRKLRAKSDNKMCFDCNAKNPTWASVTYGVFLCIDCSAVHRSLGVHVSFVRSTNLDSWTPEQLKMMVYGGNNRAQAFFKQHGWTDGGKIEAKYTSRAADLYRQLLLKEVSKSSTEDGNNSGPPSPVAASQTSSQAAAFPDFKLVEVPKEVVNEPESEIIRSPKAPTHSFKKPIGGKKPGSKTGGLGARKLTTKPSESLYEQKPEEPAPALPSVAESTTARSKSHTSRFEYVENVPSAGSSSAENQAFGHVAPPKSSNFFGEYGMDSGYHKKSTSGASKMQVEESSEARQKFSNAKSISSSQFFGDQTNLEKEGQISLQKFSGSSAISSADLFGQQANNSNADLSASDLINRISFQATQDLTSLKSMAGQTGKKLTSMASNIISDLDRIL

SEQ ID NO: 68495 - protein, 378 aa, Triticum aestivum
  peptide (1)..(378): Ceres Seq. ID no. 15221800
MCFDCNAKNPTWASVTYGVFLCIDCSAVHRSLGVHVSFVRSTNLDSWTPEQLKMMVYGGNNRAQAFFKQHGWTDGGKIEAKYTSRAADLYRQLLLKEVSKSSTEDGNNSGPPSPVAASQTSSQAAAFPDFKLVEVPKEVVNEPESEIIRSPKAPTHSFKKPIGGKKPGSKTGGLGARKLTTKPSESLYEQKPEEPAPALPSVAESTTARSKSHTSRFEYVENVPSAGSSSAENQAFGHVAPPKSSNFFGEYGMDSGYHKKSTSGASKMQVEESSEARQKFSNAKSISSSQFFGDQTNLEKEGQISLQKFSGSSAISSADLFGQQANNSNADLSASDLINRISFQATQDLTSLKSMAGQTGKKLTSMASNIISDLDRIL

SEQ ID NO: 68496 - DNA, 1341 bp, Triticum aestivum
  misc_feature (1)..(1341): Ceres Seq. ID no. 14313548
atttctgttaggatgcgtatctgagtttgttattcctttttctgtttctgttaagcgtggcaggaggcgaggcggaggaggaggagaagatagagacgcaacccacgcgcggctagctagggtttgttccatctcccccctctctcgctcgctccctctctctcccgaggagcggaggaaggcggagggccggaggaggaagagaggcgggggatgtcgtcgtcgaactcgccgtgcgcggcgtgcaagctgctgaggcgcaagtgcacgcaggggtgcgtgttcgcgccctacttcccgccggaccagccggccaagttcgccaacgtgcacaaggtgttcggcgccagcaacgtctccaagctgctcaacgagatccccgtggcgcagcgggaggacgccgtcaactcgctcgcctacgaggccgaggcgcgcctgcgcgaccccgtctacggctgcgtcgcctacatctccgtcctccagctcaagatcaagcaggtgcgcgaggagatcgccaacgcgcgcaaggagctcgccggctacatcggccaggcagcctacgcgcccgtcgtccccgtgcagcacccccacgcgcagtacgccgccgccggcatgggcctcgtccagccccacccgcacccgcaccagcagatggcgatgcagcagcagcagcacccgtaccaccagcagcagatcgccgaggcgcagcacctggcggccgtcgtcgaggtggcgcgcgccgggcagcagcagcagcagcagcagcatcaccaccagcaccagcagcacgagatgatgatgatgcgccagacctacgccaacgtccacggcggggccgccgccgggccaacggtggccgtcgagcctccccagcaggccgcggcctacgacggcaccgccccgttcctcatccagcagcaagcgtcgccttccgccctgacctaccgcatggaggagccgtccccgccgccgcagtcctcgggccactcccacgtcgacatgtcccacgcgtcgcagcagcagcgtcatcagcacacggacggcagcgacgaggggagcgggggcgccccgacggcctgatggccatgctcccgcctccttcgcctccctgtgtcgatatttcccccctagctttttttccacggtttctttgatgttcgtttgttgggcacgagtcttttcgtcttcttgatcatatgatatcgaactggcatcgccatggctccccggaaagcatatccatggctcccggaggcggacaagctggtgatcttgctcaagcatatccatggcacactcagaacgatgtcactgttgcattagtttgtgtttggattcatc

SEQ ID NO: 68497 - protein, 288 aa, Triticum aestivum
  peptide (1)..(288): Ceres Seq. ID no. 14313549
MSSSNSPCAACKLLRRKCTQGCVFAPYFPPDQPAKFANVHKVFGASNVSKLLNEIPVAQREDAVNSLAYEAEARLRDPVYGCVAYISVLQLKIKQVREEIANARKELAGYIGQAAYAPVVPVQHPHAQYAAAGMGLVQPHPHPHQQMAMQQQQHPYHQQQIAEAQHLAAVVEVARAGQQQQQQQHHHQHQQHEMMMMRQTYANVHGGAAAGPTVAVEPPQQAAAYDGTAPFLIQQQASPSALTYRMEEPSPPPQSSGHSHVDMSHASQQQRHQHTDGSDEGSGGAPTA

SEQ ID NO: 68498 - protein, 155 aa, Triticum aestivum
  peptide (1)..(155): Ceres Seq. ID no. 14313550
MGLVQPHPHPHQQMAMQQQQHPYHQQQIAEAQHLAAVVEVARAGQQQQQQQHHHQHQQHEMMMMRQTYANVHGGAAAGPTVAVEPPQQAAAYDGTAPFLIQQQASPSALTYRMEEPSPPPQSSGHSHVDMSHASQQQRHQHTDGSDEGSGGAPTA

SEQ ID NO: 68499 - DNA, 1491 bp, Triticum aestivum
  misc_feature (1)..(1491): Ceres Seq. ID no. 13596203
aacatcctaatcgaaaaatcaagggttttcctcctctcctctcctctcatagccttcgccgcttcaccgctgctgccttccctccctcgcaagcctcctccgcgtcgccgccgcccgcccgcccgatccgccatggcttccgacccgaacaaagattccaaatcggaggggctgtctgaggcaaaaaagggggcttccccgacagctggtgcaggccttcccagtccttttgatttttccaacatgagcagcttgcttaatgatccatctataagggagatggctgagcaaatcgccagcgaccctgtattcaaccagatggctgagcagcttcagaaaagtgcgcagggtgcaggggaacagggtgttccaaatttggatcctcaagcatacatggaaaccatgacacaagttatgcagaatcctcagtttatgtcaatggcggagcgtcttgggaatactcttatgcaggatcctgcaatgtccagtatgcttgagaacttgactagtccagctcacaaagagcagcttgaagagcgaatggcccgtatcaaggatgatccgtctttgaagccaattcttgatgagatagagcgtggtggtccatctgcaatggtgaagtactggaatgaccctgagattcttcaaaagattggccaggctatgtcattgaacttcccagtagatgctgctacttccactgtactatctggacctcaagaaactgatgaagaaggcgaggatgatgatgagtccattgtccataacaccgccagtgtcggtgatgcagagggtctgaagaaagcattagatggtggagcaaacaaggatgaagaagatttggagggaagaagggccttgcattttgcatgtggatacggcgagttgaagtgtgcagaaatccttctggaggcaggcgctgcagttgacgcactggataagaacaagaacaccccgctgcactatgccgctggatacggtcggaaggaatgcgtggatcttctcttgaagcacggcgctgctgtcacgctccaaaatctggatgggaagacccccatcgaggtggccaagctcaacagccagggcgaggtggtgaagctgcttgagcaggacgtgttcctatgaagcaaaaccctcagacccgccgcccatcgatcctaaaactctccctttggttcgggactctcggcggtgtcatatcctggcatggtgttggttgctttccctcggtttacttagttggtagctctcgcatgtaacctgtgtggccttgcggtgctacttaacaagagtccatcttctccgttggtttgatcctgctgtgcaaccctgttcttggtccatctccatgcacgggggatatgggttcgctgtgggagatgtcaggggtgatgatgattgcgtatatacccctttcgtgaatatttcttggtgttgaaaatgatacgtgaggtgcaaattttgtttaatctgttgtttaggctttctgct

SEQ ID NO: 68500 - protein, 374 aa, Triticum aestivum
  peptide (1)..(374): Ceres Seq. ID no. 13596204
NILIEKSRVFLLSSPLIAFAASPLLPSLPRKPPPRRRRPPARSAMASDPNKDSKSEGLSEAKKGASPTAGAGLPSPFDFSNMSSLLNDPSIREMAEQIASDPVFNQMAEQLQKSAQGAGEQGVPNLDPQAYMETMTQVMQNPQFMSMAERLGNTLMQDPAMSSMLENLTSPAHKEQLEERMARIKDDPSLKPILDEIERGGPSAMVKYWNDPEILQKIGQAMSLNFPVDAATSTVLSGPQETDEEGEDDDESIVHNTASVGDAEGLKKALDGGANKDEEDLEGRRALHFACGYGELKCAEILLEAGAAVDALDKNKNTPLHYAAGYGRKECVDLLLKHGAAVTLQNLDGKTPIEVAKLNSQGEVVKLLEQDVFL

SEQ ID NO: 68501 - protein, 330 aa, Triticum aestivum
  peptide (1)..(330): Ceres Seq. ID no. 13596205
MASDPNKDSKSEGLSEAKKGASPTAGAGLPSPFDFSNMSSLLNDPSIREMAEQIASDPVFNQMAEQLQKSAQGAGEQGVPNLDPQAYMETMTQVMQNPQFMSMAERLGNTLMQDPAMSSMLENLTSPAHKEQLEERMARIKDDPSLKPILDEIERGGPSAMVKYWNDPEILQKIGQAMSLNFPVDAATSTVLSGPQETDEEGEDDDESIVHNTASVGDAEGLKKALDGGANKDEEDLEGRRALHFACGYGELKCAEILLEAGAAVDALDKNKNTPLHYAAGYGRKECVDLLLKHGAAVTLQNLDGKTPIEVAKLNSQGEVVKLLEQDVFL

SEQ ID NO: 68502 - protein, 293 aa, Triticum aestivum
  peptide (1)..(293): Ceres Seq. ID no. 13596206
MSSLLNDPSIREMAEQIASDPVFNQMAEQLQKSAQGAGEQGVPNLDPQAYMETMTQVMQNPQFMSMAERLGNTLMQDPAMSSMLENLTSPAHKEQLEERMARIKDDPSLKPILDEIERGGPSAMVKYWNDPEILQKIGQAMSLNFPVDAATSTVLSGPQETDEEGEDDDESIVHNTASVGDAEGLKKALDGGANKDEEDLEGRRALHFACGYGELKCAEILLEAGAAVDALDKNKNTPLHYAAGYGRKECVDLLLKHGAAVTLQNLDGKTPIEVAKLNSQGEVVKLLEQDVFL

SEQ ID NO: 68503 - DNA, 1539 bp, Triticum aestivum
  misc_feature (1)..(1539): Ceres Seq. ID no. 14303635
atctttctctctccccctctctcccacagcacatgcgcgtcgcccgccgacacccgcacccacagcagccagagcagcagcggcagcaatggagcatcggggcctgcttctcgtcctcgccgccgcgctgtgcctcgcgggcgccgccgacgccaggcacgccaagaagtcgtaccaggccgtcttcagcttcggggactcgctctccgacgccggcaacctcatcgtcgacggcatccccaaggccctcaccaccgcgcgcgcgccctacggcatgaccttcttcggccgccccaccggccgctgctccaacggccgcgtcgtcgtcgacttcctcgccgagcatttcgggctgccgctgccgccggcgtcgcaggcgcatggcaaggacttcaagaagggggccaacttcgccatcaccggcgccacggcgctggagtactccttcttcaaggcgcatggcatcgaccagcgcatttggaacaccggctccatcaacacccagatcggctggctccagaagatgaagccgtcgctttgcaagtcggagaaagagtgcaaggactacttcagcaagtccctgtttgtggtgggagagtttggggggaacgactacaacgctcctctcttctccggcgtcgccttctccgatgtgaagacctacgtgccgctggtcgccaaagccatcgccaacggcgtcgagaaattgatcgagcttggcgcgacagacctgttggtgcctggaattcttccgatcgggtgcttcccattgtacctgactctctacaacagcagcaagaagtcggactacaacgcgcgcaccgggtgcctccggagatacaaccgcctggccttccaccacaacagagagctcaagcagcagcttgaccagcttcagaagaagtacccaaagacgaaaatcatgtacggcgattacttcaaagctgcaatgcagtttgtcgtcagccccgggaaattcggtttcagcacggcagtgcaggcatgctgcggcgccggagggtcgggcgcctacaacttcaacctgaagaagaagtgcggcgaggcgggcgcgagcgtgtgctccaacccgtcggcgtacgtgagctgggacggcatccacatgaccgaggccgcctaccgcatggtcgccaacggctggctgaatggcccctatgcctctcccccgatcatgaagtgaaaatccagatggttagccctgtatgtacgtaacgttgctgctgctgctgctgatgatgatgatgatggaggggatcgacggatatgcagagcgcttcaggcgctggagatgttaagttatgatgatgggtaaaatcgctcagtctgttcgttgagagtttgtataaaccgtgccggtatagatatgtttttccagctgaaaagctctagtagtacacatgtacgtaccttgtatgacatgctacctgattcttattcatttaccaagacttgcataagaataaattattaaatattatggaagcaagaggatcagaattgtgcgtttgcgcttcctgaacc

SEQ ID NO: 68504 - protein, 398 aa, Triticum aestivum
  peptide (1)..(398): Ceres Seq. ID no. 14303636
SFSLPLSPTAHARRPPTPAPTAARAAAAAMEHRGLLLVLAAALCLAGAADARHAKKSYQAVFSFGDSLSDAGNLIVDGIPKALTTARAPYGMTFFGRPTGRCSNGRVVVDFLAEHFGLPLPPASQAHGKDFKKGANFAITGATALEYSFFKAHGIDQRIWNTGSINTQIGWLQKMKPSLCKSEKECKDYFSKSLFVVGEFGGNDYNAPLFSGVAFSDVKTYVPLVAKAIANGVEKLIELGATDLLVPGILPIGCFPLYLTLYNSSKKSDYNARTGCLRRYNRLAFHHNRELKQQLDQLQKKYPKTKIMYGDYFKAAMQFVVSPGKFGFSTAVQACCGAGGSGAYNFNLKKKCGEAGASVCSNPSAYVSWDGIHMTEAAYRMVANGWLNGPYASPPIMK

SEQ ID NO: 68505 - protein, 369 aa, Triticum aestivum
  peptide (1)..(369): Ceres Seq. ID no. 14303637
MEHRGLLLVLAAALCLAGAADARHAKKSYQAVFSFGDSLSDAGNLIVDGIPKALTTARAPYGMTFFGRPTGRCSNGRVVVDFLAEHFGLPLPPASQAHGKDFKKGANFAITGATALEYSFFKAHGIDQRIWNTGSINTQIGWLQKMKPSLCKSEKECKDYFSKSLFVVGEFGGNDYNAPLFSGVAFSDVKTYVPLVAKAIANGVEKLIELGATDLLVPGILPIGCFPLYLTLYNSSKKSDYNARTGCLRRYNRLAFHHNRELKQQLDQLQKKYPKTKIMYGDYFKAAMQFVVSPGKFGFSTAVQACCGAGGSGAYNFNLKKKCGEAGASVCSNPSAYVSWDGIHMTEAAYRMVANGWLNGPYASPPIMK

SEQ ID NO: 68506 - protein, 307 aa, Triticum aestivum
  peptide (1)..(307): Ceres Seq. ID no. 14303638
MTFFGRPTGRCSNGRVVVDFLAEHFGLPLPPASQAHGKDFKKGANFAITGATALEYSFFKAHGIDQRIWNTGSINTQIGWLQKMKPSLCKSEKECKDYFSKSLFVVGEFGGNDYNAPLFSGVAFSDVKTYVPLVAKAIANGVEKLIELGATDLLVPGILPIGCFPLYLTLYNSSKKSDYNARTGCLRRYNRLAFHHNRELKQQLDQLQKKYPKTKIMYGDYFKAAMQFVVSPGKFGFSTAVQACCGAGGSGAYNFNLKKKCGEAGASVCSNPSAYVSWDGIHMTEAAYRMVANGWLNGPYASPPIMK

SEQ ID NO: 68507 - DNA, 1267 bp, Triticum aestivum
  misc_feature (1)..(1267): Ceres Seq. ID no. 13596208
aaccatcgttcacccccaattccaccttcacctctctccaccgccggcgtccggcgaccgccgcttgccggcctaccggcgatggaccgcgcatccacttgatggatccgtcggcggcagggcctgcgccaccacgggccgccccgggcagaggggcggacccagcggagcggcgcaggcggtggtgcgggatcacagtccgcggggccctcgtgatgctcttccccatcgccgtgtcattcctcttctcctttatcttcggcatcgctggcctcctcctcggcgggctctcctccaacgcgtccgtctccatgccctccacctgccgcatcctctctaccggcctggacattcggtcatctaaggtttgcgagcttggactgttgaactataaagctaagcatgtattttacccctcgagtaatcgaagattccgctgccatgatgactattactgggcttcggtttttgaggttgaatacacagaatatttttctggtcaaacatcttatgcaatggcagaagctccaaaagaggctcttcctcacaattgccggcctgattttggtgctgtatggtcaacaacagcaaagttcaaggtcaatgaatcatacaagtgcaggtacacactggggagtaccaaagctgacatttgttcagacaagctattcaattgcactgctgagaatccttcaataattgaaatgctgaaaaggatttttgtactgttttcaaagttctgcaagtcaaaagatttcagttcgtggtggatgcttggatatgcggcagcaggggtcgtggcgggcgtgctgagttccatactcatcacaatagcagtaagaatcctgcgaggagtgttccttgctgccgccaggcgggctgtgagaaaccatagcatcagggtgtttgcttaccgtttcaagcgggcgtgccttcttgttgcgtatatatctttcgttggctggatcaccttgcagtacagcaaaatggttgggttgaaggagcttgtgctggacttcaaactcttggagaggttcttgtaaaatgtaaacgggtttcggcaatgtatgtcaaataagccgatccccttgtgtgatgtaacctagtgtaacttatcctgccttgcttcgatatgcagccgcccatgaacaggtggatgaatcatgggtagctagtagctacagtgggcatggagtaactcccatctgttgtaacctgcaatgcaacatgtatcacaatcatcgtaatgacagtttggggggcttgg

SEQ ID NO: 68508 - protein, 346 aa, Triticum aestivum
  peptide (1)..(346): Ceres Seq. ID no. 13596209
PSFTPNSTFTSLHRRRPATAACRPTGDGPRIHLMDPSAAGPAPPRAAPGRGADPAERRRRWCGITVRGALVMLFPIAVSFLFSFIFGIAGLLLGGLSSNASVSMPSTCRILSTGLDIRSSKVCELGLLNYKAKHVFYPSSNRRFRCHDDYYWASVFEVEYTEYFSGQTSYAMAEAPKEALPHNCRPDFGAVWSTTAKFKVNESYKCRYTLGSTKADICSDKLFNCTAENPSIIEMLKRIFVLFSKFCKSKDFSSWWMLGYAAAGVVAGVLSSILITIAVRILRGVFLAAARRAVRNHSIRVFAYRFKRACLLVAYISFVGWITLQYSKMVGLKELVLDFKLLERFL

SEQ ID NO: 68509 - protein, 313 aa, Triticum aestivum
  peptide (1)..(313): Ceres Seq. ID no. 13596210
MDPSAAGPAPPRAAPGRGADPAERRRRWCGITVRGALVMLFPIAVSFLFSFIFGIAGLLLGGLSSNASVSMPSTCRILSTGLDIRSSKVCELGLLNYKAKHVFYPSSNRRFRCHDDYYWASVFEVEYTEYFSGQTSYAMAEAPKEALPHNCRPDFGAVWSTTAKFKVNESYKCRYTLGSTKADICSDKLFNCTAENPSIIEMLKRIFVLFSKFCKSKDFSSWWMLGYAAAGVVAGVLSSILITIAVRILRGVFLAAARRAVRNHSIRVFAYRFKRACLLVAYISFVGWITLQYSKMVGLKELVLDFKLLERFL

SEQ ID NO: 68510 - protein, 275 aa, Triticum aestivum
  peptide (1)..(275): Ceres Seq. ID no. 13596211
MLFPIAVSFLFSFIFGIAGLLLGGLSSNASVSMPSTCRILSTGLDIRSSKVCELGLLNYKAKHVFYPSSNRRFRCHDDYYWASVFEVEYTEYFSGQTSYAMAEAPKEALPHNCRPDFGAVWSTTAKFKVNESYKCRYTLGSTKADICSDKLFNCTAENPSIIEMLKRIFVLFSKFCKSKDFSSWWMLGYAAAGVVAGVLSSILITIAVRILRGVFLAAARRAVRNHSIRVFAYRFKRACLLVAYISFVGWITLQYSKMVGLKELVLDFKLLERFL

SEQ ID NO: 68511 - DNA, 1154 bp, Triticum aestivum
  misc_feature (1)..(1154): Ceres Seq. ID no. 15227004
atccacacagcgctccgctctcataccccatcacgacattcacagtcgatcaagtcacaacccatgatgcaccgtgctacgatcatcgcgctgatctgctgcctcgtggccggcggcagggcgcgcgcacagccgttcgactacccggcggcgaggctctccacgacctgggccaacacggacgccgccctgccgcaccacgtcgtctacaccgacggctccgtggcgcgggccgccctgctgcggctcaacccggcgggcctcggcccctcctacgccttcggcttcttctgcaccgccagtcaaccgcgcggcaacggccccgcggccccgtgcacggagttcctgctcggcgtcgccgtcgtctactgcaacagcggcgcgggcatgacgttcgtcacggccggcgtcccgcaggtcgtctggtcggccaaccgcggcagccccgtcagtgagggcgccaccacggagctcacgccggagggcgacctggttctcaggtcgggccccggcggagcggtcttgtggtccaccggcaccaagggccggtccgtcgccggggcgcgcatcggcagcgacggcaacctggtgctgttcgacgggcgcaacgccacggtgtggcagtcgttcgaccaccccacgaacgcgctcctcgtcgggcagtctctgaagcacggcgcgcggctcaccgccaacgcgtcgacggcggactggcgcgacggcaggctctacctcgccgtggacgacgatggactgaacgcctacgtcaacgccacgccgccgcagcgctactaccacctcagcctcagcgagaccgcatccggcgcctacgcgacgtacaccaacggcagcctcacggtgtccgcccggcccggtgcgccgccgctggccgccatccagctgcccaccgtgggcgccggcacggtgcagtacatgcggctggagcacgacggccacctccggatctacgagtggcgctcgggctgggcgccggtgtacgacgtgctcaagtctgctacgacctgatgaatcctgagcaccatacatacatacatacatacatcaaggcatatggctatgtcctagaaaaatatgacacgaataaagttctgcgacatgtatgtacaaattccattatataaaaagaatgacag

SEQ ID NO: 68512 - protein, 341 aa, Triticum aestivum
  peptide (1)..(341): Ceres Seq. ID no. 15227005
IHTALRSHTPSRHSQSIKSQPMMHRATIIALICCLVAGGRARAQPFDYPAARLSTTWANTDAALPHHVVYTDGSVARAALLRLNPAGLGPSYAFGFFCTASQPRGNGPAAPCTEFLLGVAVVYCNSGAGMTFVTAGVPQVVWSANRGSPVSEGATTELTPEGDLVLRSGPGGAVLWSTGTKGRSVAGARIGSDGNLVLFDGRNATVWQSFDHPTNALLVGQSLKHGARLTANASTADWRDGRLYLAVDDDGLNAYVNATPPQRYYHLSLSETASGAYATYTNGSLTVSARPGAPPLAAIQLPTVGAGTVQYMRLEHDGHLRIYEWRSGWAPVYDVLKSATT

SEQ ID NO: 68513 - protein, 320 aa, Triticum aestivum
  peptide (1)..(320): Ceres Seq. ID no. 15227006
MMHRATIIALICCLVAGGRARAQPFDYPAARLSTTWANTDAALPHHVVYTDGSVARAALLRLNPAGLGPSYAFGFFCTASQPRGNGPAAPCTEFLLGVAVVYCNSGAGMTFVTAGVPQVVWSANRGSPVSEGATTELTPEGDLVLRSGPGGAVLWSTGTKGRSVAGARIGSDGNLVLFDGRNATVWQSFDHPTNALLVGQSLKHGARLTANASTADWRDGRLYLAVDDDGLNAYVNATPPQRYYHLSLSETASGAYATYTNGSLTVSARPGAPPLAAIQLPTVGAGTVQYMRLEHDGHLRIYEWRSGWAPVYDVLKSATT

SEQ ID NO: 68514 - protein, 319 aa, Triticum aestivum
  peptide (1)..(319): Ceres Seq. ID no. 15227007
MHRATIIALICCLVAGGRARAQPFDYPAARLSTTWANTDAALPHHVVYTDGSVARAALLRLNPAGLGPSYAFGFFCTASQPRGNGPAAPCTEFLLGVAVVYCNSGAGMTFVTAGVPQVVWSANRGSPVSEGATTELTPEGDLVLRSGPGGAVLWSTGTKGRSVAGARIGSDGNLVLFDGRNATVWQSFDHPTNALLVGQSLKHGARLTANASTADWRDGRLYLAVDDDGLNAYVNATPPQRYYHLSLSETASGAYATYTNGSLTVSARPGAPPLAAIQLPTVGAGTVQYMRLEHDGHLRIYEWRSGWAPVYDVLKSATT

SEQ ID NO: 68515 - DNA, 1621 bp, Triticum aestivum
  misc_feature (1)..(1621): Ceres Seq. ID no. 13596216
gtaagattaaacaacgccggagggagcggagaggggaaacaaaacaaaagccttgccttgctcctcctccgggcgggcgattcggctccggcgccgcaaggtgcttcgcttcgcttctcgccttgctccgatccttggcctgcccgcctcctccggccgtcgccgtcgtccccagggttcgctgctcggctccaagcaagctaggtcaattgctatatcagccacacttttaagcgttgaaggtcaccactagcccattggcttgatgggcgtcgaggagcaacatgtgcagcaaccagacagtgggggaaagcctgatgccgtcaagccaccaactccggtacacggtcataaaccgagcaacccccgtatatcaacctgcagcgccgacaaggacgacggcctctctctttgccgggtgtgccactgcgtggagcctgatctgagaggcgagtctgctctgggtttcctaggcattgtaccgccttcgccagacccctcggtcgacaaggacccaagcaatgacaccaccaaaacttccaccaccaaggatgctcccaagtttctcgagttcataagccccgagggggagatcttcaagtgcgccaccgacatcgaatcaggccatttgcagcggcaagacgatgtcgtgaacctcggatgctcttgcaagaatgagctcgccctcgcgcactacgcgtgcgcgctcaagtggttcatcagccacgggtccaccgtgtgcgagatttgcggaaatgtcgctacaaacgtgaggcccgaggatttcaacatggtgctcgcctccttgaaggactacgaagctctgagggaaaggacgtctaccggggatctctcctacttgcactacagggcggacgcgttcgtcgatccggtcgcccttgccgcagtacggagacagcggctttgtgagatatcatcatggttcaaccctcacaatacacatttcgtgttttctcagaggcacaatgaagaagtgccagttagcccaagtaataattctgtagactatagtgttacggctgcaagggcagcacatgcgaggcggaagtttgggagtagtggagcttttgttgctatcgctctgggttttgttcttcttgcatggtttgttgctccacatgttggcaagagagcggctgcaatcattcttcatatgcttctgggaggcctctgctcactgactataataatctcactaagatttgttagtcttcccgaggatccagtttgggtcgatacgatgctgggcgatcctgttcgtgtcctggttcctcgtgtttggagtgtgggcctctcgaacccgcaccgcccgccgcgcgtcatgatgatatcgagtgtgccctcagtcagtcgtcgtgaggaattaggaccgcgtcgcaagagtagcgtccacgagagcgttaggtaccgcacccctgtctatattcgccgcgagctataccatggacgtactattttttctttagctggagtatgtgagatgtacaacatgtttgggcaagaaaacaaggggagttatgttactgagtgttgtggtttcagacatagctggagtggtactggtctggccagtgttgcaaaacaatacagtaatgtgtgt

SEQ ID NO: 68516 - protein, 452 aa, Triticum aestivum
  peptide (1)..(452): Ceres Seq. ID no. 15221804
MGVEEQHVQQPDSGGKPDAVKPPTPVHGHKPSNPRISTCSADKDDGLSLCRVCHCVEPDLRGESALGFLGIVPPSPDPSVDKDPSNDTTKTSTTKDAPKFLEFISPEGEIFKCATDIESGHLQRQDDVVNLGCSCKNELALAHYACALKWFISHGSTVCEICGNVATNVRPEDFNMVLASLKDYEALRERTSTGDLSYLHYRADAFVDPVALAAVRRQRLCEISSWFNPHNTHFVFSQRHNEEVPVSPSNNSVDYSVTAARAAHARRKFGSSGAFVAIALGFVLLAWFVAPHVGKRAAAIILHMLLGGLCSLTIIISLRFVSLPEDPVWVDTMLGDPVRVLVPRVWSVGLSNPHRPPRVMMISSVPSVSRREELGPRRKSSVHESVRYRTPVYIRRELYHGRTIFSLAGVCEMYNMFGQENKGSYVTECCGFRHSWSGTGLASVAKQYSNVC

SEQ ID NO: 68517 - protein, 277 aa, Triticum aestivum
  peptide (1)..(277): Ceres Seq. ID no. 15221805
MVLASLKDYEALRERTSTGDLSYLHYRADAFVDPVALAAVRRQRLCEISSWFNPHNTHFVFSQRHNEEVPVSPSNNSVDYSVTAARAAHARRKFGSSGAFVAIALGFVLLAWFVAPHVGKRAAAIILHMLLGGLCSLTIIISLRFVSLPEDPVWVDTMLGDPVRVLVPRVWSVGLSNPHRPPRVMMISSVPSVSRREELGPRRKSSVHESVRYRTPVYIRRELYHGRTIFSLAGVCEMYNMFGQENKGSYVTECCGFRHSWSGTGLASVAKQYSNVC

SEQ ID NO: 68518 - DNA, 1486 bp, Triticum aestivum
  misc_feature (1)..(1486): Ceres Seq. ID no. 12614253
agaacatcctaatcgaaaaatagttgatgcgctccccgcagttgccatcctagctgaacgcggcggacagcacgcccaacggtgccgccaccgccgccgccgtcgccttcgaagcccccgccctcgtgatggaaccctcgttcgatgacgtccccgaggtcgtcggctggatgtcgtcgatggtcgaccgcggcggccgcgcgagccaggagagccaccgcctgttcctggcgcggcgcacggcgctcgagatgctgcgggaccgcggatacagcgtgccggagtccgagctcgcccgcacgctcccggagttccgcgcgtggtgggcaccggagcccgagatcgagcgcctcaccttttccaccttcctcgcctccgaccactccgacaaggtgaaaattctattctgcggaccagaacctgtcagaatcgcaactatccagaagatatatgaccagattgaaggagagaacttgtccagacttattttgatattgcagggaaagataatgcctagagctaaagagtctgttaaggagaaattcacatttaaagtagatatttttcaggtcaatgagttactggttaacattagtaagcatgccctgaagccaaagcatgaagtgttgactgcagaagaaaaggccaggctcctgaagaagtacaatgtgcaggattcacagctccctcgcatgctagagaccgatcctgttgctcgctactatggcctcggcaagggaaccgtgcttaaagttacatatgacagtgagcttactgggaaccatgtgacataccgatgtattttctgagggctgcatgtgtttccatggatgaaaggtgtagcaagctgtttgtacaatcgtgttagctctatgctgattcattggcctgaaggtatttggaacttcaggcgtgttacaccgagcatggtctcactggattcaagcagtatccgtttactagagctagcataggttttacatacaaatcagatgtcagaaacccgattaagatgaagaaccaagaaaggaaaaaagattggctgtcaaataatcttttttcagctaacaactgtggtttggtctgcttgtcttggttaaaatttcgtcatctgccgcctttcttttgtggatgttgctgctctcaccgctgctgttatccgtggggttgctgctgctgatggtatcgccgctgctgttgtccgtggggttactgctgctgatggtaatggtatcgctgctgctgctgctgttgtttgtggggttggtctcgctgttgcttagcaggtcttcgtcctggtggcagtgctctttgcatctgcttttcattatgtggggcttgagcttgctcatgtctgatagccgtactggtttcaggaagaactcatttgctccttcctccaggcatctgattcagaacaaacaaaacagcaattgtcagagttcattctaagatcctgctactatattctaagatcgtctacttc

SEQ ID NO: 68519 - protein, 226 aa, Triticum aestivum
  peptide (1)..(226): Ceres Seq. ID no. 12614254
MEPSFDDVPEVVGWMSSMVDRGGRASQESHRLFLARRTALEMLRDRGYSVPESELARTLPEFRAWWAPEPEIERLTFSTFLASDHSDKVKILFCGPEPVRIATIQKIYDQIEGENLSRLILILQGKIMPRAKESVKEKFTFKVDIFQVNELLVNISKHALKPKHEVLTAEEKARLLKKYNVQDSQLPRMLETDPVARYYGLGKGTVLKVTYDSELTGNHVTYRCIF

SEQ ID NO: 68520 - protein, 212 aa, Triticum aestivum
  peptide (1)..(212): Ceres Seq. ID no. 12614255
MSSMVDRGGRASQESHRLFLARRTALEMLRDRGYSVPESELARTLPEFRAWWAPEPEIERLTFSTFLASDHSDKVKILFCGPEPVRIATIQKIYDQIEGENLSRLILILQGKIMPRAKESVKEKFTFKVDIFQVNELLVNISKHALKPKHEVLTAEEKARLLKKYNVQDSQLPRMLETDPVARYYGLGKGTVLKVTYDSELTGNHVTYRCIF

SEQ ID NO: 68521 - protein, 209 aa, Triticum aestivum
  peptide (1)..(209): Ceres Seq. ID no. 12614256
MVDRGGRASQESHRLFLARRTALEMLRDRGYSVPESELARTLPEFRAWWAPEPEIERLTFSTFLASDHSDKVKILFCGPEPVRIATIQKIYDQIEGENLSRLILILQGKIMPRAKESVKEKFTFKVDIFQVNELLVNISKHALKPKHEVLTAEEKARLLKKYNVQDSQLPRMLETDPVARYYGLGKGTVLKVTYDSELTGNHVTYRCIF

SEQ ID NO: 68522 - DNA, 2151 bp, Triticum aestivum
  misc_feature (1)..(2151): Ceres Seq. ID no. 13596218
atgctcgaagcccaaatcctctcggtctctcacccactcgccagaggcagacacgacgagggcgacggcgatggcctcgccgaagctggccgccggcgacggcagctacgacttccacctccgctcgctctccgccgcgtcacgggactccgccgcggccgccgatcccgcctccgaccccaacctcctccagtctgtgcggatggtgttcgagatgtgcaaggtggccaagggggccaacgacgagatggtggcgcgggcgttccccgtgatgaacaagctcttccagcgctgcgccgccgcgcccacgctctccacggcctccaccggcgtgctgctgctgaccattctgcagttcttcctggactttggggaggcggtcttgcacgatgctgatggtagcttgaaaaccttcttccgctcttgcttaagtagggagttttcagaccctattgtcgcagaacgaacgctggaattcctgatagcgaacaagacgaagatcttgaactgcttccccaccttggttccacagttcttcccattgctgctgaagttgattgcatcaaatggtgataggttggataagaagttctcagaagtgatcccattgatgatgtcagcaggatcttttcttcctctcttcctgtcccttatggatctgccaatgttagtggtagcactggaaaaggtggaaagaagttctggaactctcatcggtagtagtttagctactatacagaagagtgctgctcctgagatgctccttgcactgatggatgaggcatatactggctcctcaatagaagatcaaagtggcaattcaggttctgatgacagtggtcgtctagaccttgcggacccaatgttccttgaccttctaaaagacgagaatgatggcattgctgcaaaacattggacatcccctacgatatcttcaacgttacaagctgcacttaacagcccacagtctgacagattaaaacagtcactgaaaatggcacctcgctttcttactgtatattttgcgacagcattgcgggacgtcaacaactcactcttgtgtgctctgattccagttgctatgtcaagatatgctgcgatgttccctgacaaggaattttctttcgaggtgaggaaaaagctgtcggatttcttattagctgcattccagcgctcccctgacatcattgcgctactaaagaagcctattactgatagacttggggaggcccatggtaatcctgcaaagatggaattggcattgcatttatgttgggccattggtgagcatggagcaggagggataaagcacaaagatgtagcacgtgaactatttgaaaatctggagttgctattatacgaaaacctggcaactagtcgtctgggattaagtcaagatccagggttcgattctatgggtgcaagctctagaaagtcatcccaagctaggctcctctgctttgtggtgactgccattgcgaagctagcaacttgccataacgagctgcttccaagagcacgtgtgtcattggctaaggtcgctcggtccaggacctcagacaggcgagtctggcagcgcgcctgtgactatttagggctcatgaatgaaccagccatttgtttgtctgtactgggaccatccactgcccaaggaaatggtcctgggattgtgaactggagcgaaggaggaaccaagatggtagctcacattccgttttaccttttagcagaacagaaaggtccaccatctcatgatttttcatatgcggacctcctccccgcagaatgagaacaccgtcatgagtagcatggatccatgcaatgattctcttgcaaacgccatgtgcacagagatcattggtgatcatggcctgctgaagatgattcaagtgccaacgccttcttttatccagttcatcttttcgatcgagaagtgctggccctttggtctgaggagttcctgtactgttgtagtttctgggatctggctggtttcaactgtgcagtttgtgggggtgtagatggtattcagaaacgctcaatgttgtatacatggaatgatttgtcagtgtatgtactgaaagggaagcagtgttgtaaattaagatatctgatggtgcacatctggaaatggaaagattgttctttgtg

SEQ ID NO: 68523 - protein, 595 aa, Triticum aestivum
  peptide (1)..(595): Ceres Seq. ID no. 15221809
CSKPKSSRSLTHSPEADTTRATAMASPKLAAGDGSYDFHLRSLSAASRDSAAAADPASDPNLLQSVRMVFEMCKVAKGANDEMVARAFPVMNKLFQRCAAAPTLSTASTGVLLLTILQFFLDFGEAVLHDADGSLKTFFRSCLSREFSDPIVAERTLEFLIANKTKILNCFPTLVPQFFPLLLKLIASNGDRLDKKFSEVIPLMMSAGSFLPLFLSLMDLPMLVVALEKVERSSGTLIGSSLATIQKSAAPEMLLALMDEAYTGSSIEDQSGNSGSDDSGRLDLADPMFLDLLKDENDGIAAKHWTSPTISSTLQAALNSPQSDRLKQSLKMAPRFLTVYFATALRDVNNSLLCALIPVAMSRYAAMFPDKEFSFEVRKKLSDFLLAAFQRSPDIIALLKKPITDRLGEAHGNPAKMELALHLCWAIGEHGAGGIKHKDVARELFENLELLLYENLATSRLGLSQDPGFDSMGASSRKSSQARLLCFVVTAIAKLATCHNELLPRARVSLAKVARSRTSDRRVWQRACDYLGLMNEPAICLSVLGPSTAQGNGPGIVNWSEGGTKMVAHIPFYLLAEQKGPPSHDFSYADLLPAE

SEQ ID NO: 68524 - protein, 572 aa, Triticum aestivum
  peptide (1)..(572): Ceres Seq. ID no. 15221810
MASPKLAAGDGSYDFHLRSLSAASRDSAAAADPASDPNLLQSVRMVFEMCKVAKGANDEMVARAFPVMNKLFQRCAAAPTLSTASTGVLLLTILQFFLDFGEAVLHDADGSLKTFFRSCLSREFSDPIVAERTLEFLIANKTKILNCFPTLVPQFFPLLLKLIASNGDRLDKKFSEVIPLMMSAGSFLPLFLSLMDLPMLVVALEKVERSSGTLIGSSLATIQKSAAPEMLLALMDEAYTGSSIEDQSGNSGSDDSGRLDLADPMFLDLLKDENDGIAAKHWTSPTISSTLQAALNSPQSDRLKQSLKMAPRFLTVYFATALRDVNNSLLCALIPVAMSRYAAMFPDKEFSFEVRKKLSDFLLAAFQRSPDIIALLKKPITDRLGEAHGNPAKMELALHLCWAIGEHGAGGIKHKDVARELFENLELLLYENLATSRLGLSQDPGFDSMGASSRKSSQARLLCFVVTAIAKLATCHNELLPRARVSLAKVARSRTSDRRVWQRACDYLGLMNEPAICLSVLGPSTAQGNGPGIVNWSEGGTKMVAHIPFYLLAEQKGPPSHDFSYADLLPAE

SEQ ID NO: 68525 - protein, 528 aa, Triticum aestivum
  peptide (1)..(528): Ceres Seq. ID no. 15221811
MVFEMCKVAKGANDEMVARAFPVMNKLFQRCAAAPTLSTASTGVLLLTILQFFLDFGEAVLHDADGSLKTFFRSCLSREFSDPIVAERTLEFLIANKTKILNCFPTLVPQFFPLLLKLIASNGDRLDKKFSEVIPLMMSAGSFLPLFLSLMDLPMLVVALEKVERSSGTLIGSSLATIQKSAAPEMLLALMDEAYTGSSIEDQSGNSGSDDSGRLDLADPMFLDLLKDENDGIAAKHWTSPTISSTLQAALNSPQSDRLKQSLKMAPRFLTVYFATALRDVNNSLLCALIPVAMSRYAAMFPDKEFSFEVRKKLSDFLLAAFQRSPDIIALLKKPITDRLGEAHGNPAKMELALHLCWAIGEHGAGGIKHKDVARELFENLELLLYENLATSRLGLSQDPGFDSMGASSRKSSQARLLCFVVTAIAKLATCHNELLPRARVSLAKVARSRTSDRRVWQRACDYLGLMNEPAICLSVLGPSTAQGNGPGIVNWSEGGTKMVAHIPFYLLAEQKGPPSHDFSYADLLPAE

SEQ ID NO: 68526 - DNA, 1720 bp, Triticum aestivum
  misc_feature (1)..(1720): Ceres Seq. ID no. 13596219
ctggtcggagaggagcagcagagatggccggagccggggaagacgacgcagctcctcctcccccttctccagatcgacagcagcccatggaagaggcggcggcggcggccaagcggagccggtcggagaaccaccatggcctcgccgacgggccgtccttccggatggaggaccttccggcggaggttcagccggttataatctcactgctcccactgaaagaggccgtgaggacgagcattgtttcaagaagttggacaacgctctggagattccactgcgacctatgttttgatgtggattctaacaccgatgacaattccgctcatcaggtcaatggcactggcaccaatgaccaatccactaatcggtataataccaaaataacacgggcaaagttcatggagactgtaaattccgttattcaacggcatagtgggataggaatcaataagttcagtatcagctgtgacctgcacaaagaggactctcatcatcttgacaagtggattcggtttgccgcttcatcaaaggcaaaaataatagattttcatcggaagatatctgattaccgagttgaagaagctccccactttcctcttgaggccttagatgctcaaggtagctcatttgtgcagtccttgtctctcgccagtgtttctataaagccacgctcaggaatatgccgctttacaatactcagaaggcttgttttgagctctgttcagatatttggagattttccaggcttgcttgcaaaatgttcaagacttgaggacttagagatcaaatggtgttctggtgtggatgacttaatcgtaccacacacactcgataaacttcaacatttgctgattgccggaatggacgtccagatggttgagtttcatgctactgatcttgctcactttgagtacaaaggccgagtaacccctatagtgcttcatggttgcttaaaactagagaaggcaacaattgcgtttgaggcctctaatgtactgccccatgcattcaatgtaattccaagcatttccccagtgaagatattaattgtgcgagcttttatatcaaaatatggacagtccctggagctgccattaagaccacagggcatgtttatgcatctgaggcatatgacttgtaaaattatcgtccttgctagagatgtaaatgactataatggagttcttcaactggcccattggttggacagtgcaccgcgactggagacattggacttgcatatgtcctatctgaggtccggtgctttcgtaagtgccgaggtggcgggagtggaagctccctgtatgcgtcgccatgatcatctcaagacggtcttcatgagtgggtttcagtgttacaagtctcagattgagctggcgtgctgtatcctgggaaatgcttctgttcttgagcagctgacagtagaagcaatatggggtgatgatgattacaggcggatctgtgaatgggcagaggtaacctcgaagcgctttggtaaggtgatcactgtcttagatgccccccttaacagtgagtaaaccaatccttttcgcatgtacacgctgtcaattaatctcgtgtagtctgcagtatgcagcattcagtgtagctgggagaatgcccctctagactgtactgactgttttggtgtctacaaatggaatctgtagggcttttgcccctcttaataaaaaacaagtaatctctggttcatcgt

SEQ ID NO: 68527 - protein, 512 aa, Triticum aestivum
  peptide (1)..(512): Ceres Seq. ID no. 13596220
GRRGAAEMAGAGEDDAAPPPPSPDRQQPMEEAAAAAKRSRSENHHGLADGPSFRMEDLPAEVQPVIISLLPLKEAVRTSIVSRSWTTLWRFHCDLCFDVDSNTDDNSAHQVNGTGTNDQSTNRYNTKITRAKFMETVNSVIQRHSGIGINKFSISCDLHKEDSHHLDKWIRFAASSKAKIIDFHRKISDYRVEEAPHFPLEALDAQGSSFVQSLSLASVSIKPRSGICRFTILRRLVLSSVQIFGDFPGLLAKCSRLEDLEIKWCSGVDDLIVPHTLDKLQHLLIAGMDVQMVEFHATDLAHFEYKGRVTPIVLHGCLKLEKATIAFEASNVLPHAFNVIPSISPVKILIVRAFISKYGQSLELPLRPQGMFMHLRHMTCKIIVLARDVNDYNGVLQLAHWLDSAPRLETLDLHMSYLRSGAFVSAEVAGVEAPCMRRHDHLKTVFMSGFQCYKSQIELACCILGNASVLEQLTVEAIWGDDDYRRICEWAEVTSKRFGKVITVLDAPLNSE

SEQ ID NO: 68528 - protein, 505 aa, Triticum aestivum
  peptide (1)..(505): Ceres Seq. ID no. 13596221
MAGAGEDDAAPPPPSPDRQQPMEEAAAAAKRSRSENHHGLADGPSFRMEDLPAEVQPVIISLLPLKEAVRTSIVSRSWTTLWRFHCDLCFDVDSNTDDNSAHQVNGTGTNDQSTNRYNTKITRAKFMETVNSVIQRHSGIGINKFSISCDLHKEDSHHLDKWIRFAASSKAKIIDFHRKISDYRVEEAPHFPLEALDAQGSSFVQSLSLASVSIKPRSGICRFTILRRLVLSSVQIFGDFPGLLAKCSRLEDLEIKWCSGVDDLIVPHTLDKLQHLLIAGMDVQMVEFHATDLAHFEYKGRVTPIVLHGCLKLEKATIAFEASNVLPHAFNVIPSISPVKILIVRAFISKYGQSLELPLRPQGMFMHLRHMTCKIIVLARDVNDYNGVLQLAHWLDSAPRLETLDLHMSYLRSGAFVSAEVAGVEAPCMRRHDHLKTVFMSGFQCYKSQIELACCILGNASVLEQLTVEAIWGDDDYRRICEWAEVTSKRFGKVITVLDAPLNSE

SEQ ID NO: 68529 - protein, 484 aa, Triticum aestivum
  peptide (1)..(484): Ceres Seq. ID no. 13596222
MEEAAAAAKRSRSENHHGLADGPSFRMEDLPAEVQPVIISLLPLKEAVRTSIVSRSWTTLWRFHCDLCFDVDSNTDDNSAHQVNGTGTNDQSTNRYNTKITRAKFMETVNSVIQRHSGIGINKFSISCDLHKEDSHHLDKWIRFAASSKAKIIDFHRKISDYRVEEAPHFPLEALDAQGSSFVQSLSLASVSIKPRSGICRFTILRRLVLSSVQIFGDFPGLLAKCSRLEDLEIKWCSGVDDLIVPHTLDKLQHLLIAGMDVQMVEFHATDLAHFEYKGRVTPIVLHGCLKLEKATIAFEASNVLPHAFNVIPSISPVKILIVRAFISKYGQSLELPLRPQGMFMHLRHMTCKIIVLARDVNDYNGVLQLAHWLDSAPRLETLDLHMSYLRSGAFVSAEVAGVEAPCMRRHDHLKTVFMSGFQCYKSQIELACCILGNASVLEQLTVEAIWGDDDYRRICEWAEVTSKRFGKVITVLDAPLNSE

SEQ ID NO: 68530 - DNA, 1313 bp, Triticum aestivum
  misc_feature (1)..(1313): Ceres Seq. ID no. 13654549
gaaagttggcaggcacgatctctctccacccccttggactctcctctgctcctcctctccctccccacggcgccatggagcggctcatctccaggacggcggtctccccggcccagccccggatccacctgcccggcagatcccccttcctcaccacccgccgcgccgcctccgcctccgcgggtgctgggagcgccgcgccgtggacccggctgtgcgcgcagccgccgcgcctaggtgccgcggtcgccgctgcggcgcggcatgacggtgcttcggccccggcgcccgtggaggaggtggctgcggcggcggcagctgggcctccgtggaagctgctcgggagcctgctccccaaggcttctactgctgcccttgtcctgcttatgacacttactgcaagtgccttgcactctagcattccccatcctgcctatgcatcggcgcaaccagtaatcaaatctggtggactcctctcagcagagttattgagcagcggctgggctggtttcttcgcgggccgcttacataccttatccgggcctgaccatcttgtcgcattggcaccactatcaattgggagatcaagactggagagtggactagtcggtgccctttggggctgtggtcatgatgctggacaaataatttttggcctgctcttcttgctactcaaggatcgtttgcacattgaggttctccgtatatggggaacaagagttgtaggtctgacccttcttatgataggcgcgacgggcatccgggaagcttcagaggttcaagagtcggggctaattctggagggtgtagacatgaatggcagtgagcccttgcaacaggcccctgctgttgctcccaggaagaagaaagttggcttcacaacatttgccaccggagtcatccatggcctccagccagatgcgctgctgatggtcttgcccgctcttgctctgccgtcacgctttgccggcgcggcctacctcggtatgttcttggtcgggactgtattttcgatgggtagctacactgcttttgtaggttcttgtagtgaggctctaaaggataggatacctaagataacggagaagctgacctgggctgcttcccttgtagctgtatgcttggggttagctcttttagttgggcagttctttgggttcaccctatattgattcatgtcctaggttcttgttactacttggcaacattgttttgattgttatttgttatgtttacggcagttgagctcagactacgacacggttggtattcttagactgcaacttatactatgttactacatgtttttgggg

SEQ ID NO: 68531 - protein, 389 aa, Triticum aestivum
  peptide (1)..(389): Ceres Seq. ID no. 13654550
KLAGTISLHPLGLSSAPPLPPHGAMERLISRTAVSPAQPRIHLPGRSPFLTTRRAASASAGAGSAAPWTRLCAQPPRLGAAVAAAARHDGASAPAPVEEVAAAAAAGPPWKLLGSLLPKASTAALVLLMTLTASALHSSIPHPAYASAQPVIKSGGLLSAELLSSGWAGFFAGRLHTLSGPDHLVALAPLSIGRSRLESGLVGALWGCGHDAGQIIFGLLFLLLKDRLHIEVLRIWGTRVVGLTLLMIGATGIREASEVQESGLILEGVDMNGSEPLQQAPAVAPRKKKVGFTTFATGVIHGLQPDALLMVLPALALPSRFAGAAYLGMFLVGTVFSMGSYTAFVGSCSEALKDRIPKITEKLTWAASLVAVCLGLALLVGQFFGFTLY

SEQ ID NO: 68532 - protein, 365 aa, Triticum aestivum
  peptide (1)..(365): Ceres Seq. ID no. 13654551
MERLISRTAVSPAQPRIHLPGRSPFLTTRRAASASAGAGSAAPWTRLCAQPPRLGAAVAAAARHDGASAPAPVEEVAAAAAAGPPWKLLGSLLPKASTAALVLLMTLTASALHSSIPHPAYASAQPVIKSGGLLSAELLSSGWAGFFAGRLHTLSGPDHLVALAPLSIGRSRLESGLVGALWGCGHDAGQIIFGLLFLLLKDRLHIEVLRIWGTRVVGLTLLMIGATGIREASEVQESGLILEGVDMNGSEPLQQAPAVAPRKKKVGFTTFATGVIHGLQPDALLMVLPALALPSRFAGAAYLGMFLVGTVFSMGSYTAFVGSCSEALKDRIPKITEKLTWAASLVAVCLGLALLVGQFFGFTLY

SEQ ID NO: 68533 - protein, 261 aa, Triticum aestivum
  peptide (1)..(261): Ceres Seq. ID no. 13654552
MTLTASALHSSIPHPAYASAQPVIKSGGLLSAELLSSGWAGFFAGRLHTLSGPDHLVALAPLSIGRSRLESGLVGALWGCGHDAGQIIFGLLFLLLKDRLHIEVLRIWGTRVVGLTLLMIGATGIREASEVQESGLILEGVDMNGSEPLQQAPAVAPRKKKVGFTTFATGVIHGLQPDALLMVLPALALPSRFAGAAYLGMFLVGTVFSMGSYTAFVGSCSEALKDRIPKITEKLTWAASLVAVCLGLALLVGQFFGFTLY

SEQ ID NO: 68534 - DNA, 1904 bp, Triticum aestivum
  misc_feature (1)..(1904): Ceres Seq. ID no. 13654409
acgcataaccgccgtgccgtgtttctggggatcgacatcgcacgcacgcacctggcacctccctccccgaatccatccatcccaccgctcttttagcagctgcccccgttgcttgcgtccaactcaaccccactcctccgcctcccccctctcccatctgctgccgctgctctgctctgctctgctcgcccctacccgcgatcgccgcggccagcccgccatggacgaggagtacgacgtgatcgtgctgggcacggggctcaaggagtgcatcctcagcggcctcctctccgtcgacggcctcaaggttttgcacatggatagaaatgactactatggaggagattccacctccctcaacttgaaccagctctggaagaagttcaggggggaagaaaaaccaccggcgcatttaggtgcgagcagagactacaatgtagacatggttccaaagtttatgatggcgaacggaactttggttcgtactctcattcacactgatgtaacgaagtatctgtctttcaaagctgttgatggaagctttgtcttcagcaaagggaagattcacaaggttcctgccactgacatggaggctctaaaatcccctttaatgggcatatttgagaaacgtagagcaaggaacttcttcatttatgtccaagattacaatgatgctgatccaagaacacatcaaggattggaccttacaaggatgacaactagagaattgatcgcgaaacacggattgagtgatgatactatagatttcattggccatgcgcttgctcttcacagggacgatcgctacctaagcgagccagcaattgatactgttaaaagaatgaaactctattctgagtctcttgcacggttccaaggaggctcaccttatatttacccattgtatgggttgggtgagctgccacaggcttttgcacgtctaagtgctgtttatggtggcacttatatgttaaataagccagagtgcaaggttgaatttgatatggaggggaaagtgtgtggtgttacatcagaaggtgaaactgccaagtgcaagaaggttgtctgtgatccttcttacttggccaacaaggtaaggaagattggaaaagttgcacgagcaattgctattatgagccacccaattccaaatgcaaatgattcccactcgattcagattattttaccacaaaagcaacttgggcgcaagtcagacatgtatgtcttctgttgctcgtacacccacaatgtcgcaccaaaagggaagttcattgcatttgtgtctgcagaagcagagactgataacccacagtccgaactaaagcctggaatcgatctacttggtccagtagatgaattgttttttgatatgtatgacagatatgaacccgtcaatgaaccttctcttgataattgctttgtctcatcgagttatgatgccactactcactttgagacaactgtcacagatgttcttaatatgtacacactgattactggaaagactgttgatcttagcgttgatctcagcgctgccagcgctgcagaagagtactagatctcatcaaaccaagcattttcttcaagactatactaaatggaggaacaccaccggaatcctactgcaggatggtcatgtgtgacatgagctgcatactgcgtagggggttcaggtgcgtagggggttcaggtccacgcctgccagcagcactatgcgaaattattatatgtggaatggtgctgatttccttcgttaacttccatattgatccactgggttgtaaacgttattctatcgtaacgatggctttagcatgttcatgttcgtcttgttgatgtattctacagttatacatattggtgtcttggatgtattttccttccgagtaaggtcaatgtggttt

SEQ ID NO: 68535 - protein, 518 aa, Triticum aestivum
  peptide (1)..(518): Ceres Seq. ID no. 15219649
RITAVPCFWGSTSHARTWHLPPRIHPSHRSFSSCPRCLRPTQPHSSASPLSHLLPLLCSALLAPTRDRRGQPAMDEEYDVIVLGTGLKECILSGLLSVDGLKVLHMDRNDYYGGDSTSLNLNQLWKKFRGEEKPPAHLGASRDYNVDMVPKFMMANGTLVRTLIHTDVTKYLSFKAVDGSFVFSKGKIHKVPATDMEALKSPLMGIFEKRRARNFFIYVQDYNDADPRTHQGLDLTRMTTRELIAKHGLSDDTIDFIGHALALHRDDRYLSEPAIDTVKRMKLYSESLARFQGGSPYIYPLYGLGELPQAFARLSAVYGGTYMLNKPECKVEFDMEGKVCGVTSEGETAKCKKVVCDPSYLANKVRKIGKVARAIAIMSHPIPNANDSHSIQIILPQKQLGRKSDMYVFCCSYTHNVAPKGKFIAFVSAEAETDNPQSELKPGIDLLGPVDELFFDMYDRYEPVNEPSLDNCFVSSSYDATTHFETTVTDVLNMYTLITGKTVDLSVDLSAASAAEEY

SEQ ID NO: 68536 - protein, 445 aa, Triticum aestivum
  peptide (1)..(445): Ceres Seq. ID no. 15219650
MDEEYDVIVLGTGLKECILSGLLSVDGLKVLHMDRNDYYGGDSTSLNLNQLWKKFRGEEKPPAHLGASRDYNVDMVPKFMMANGTLVRTLIHTDVTKYLSFKAVDGSFVFSKGKIHKVPATDMEALKSPLMGIFEKRRARNFFIYVQDYNDADPRTHQGLDLTRMTTRELIAKHGLSDDTIDFIGHALALHRDDRYLSEPAIDTVKRMKLYSESLARFQGGSPYIYPLYGLGELPQAFARLSAVYGGTYMLNKPECKVEFDMEGKVCGVTSEGETAKCKKVVCDPSYLANKVRKIGKVARAIAIMSHPIPNANDSHSIQIILPQKQLGRKSDMYVFCCSYTHNVAPKGKFIAFVSAEAETDNPQSELKPGIDLLGPVDELFFDMYDRYEPVNEPSLDNCFVSSSYDATTHFETTVTDVLNMYTLITGKTVDLSVDLSAASAAEEY

SEQ ID NO: 68537 - protein, 413 aa, Triticum aestivum
  peptide (1)..(413): Ceres Seq. ID no. 15219651
MDRNDYYGGDSTSLNLNQLWKKFRGEEKPPAHLGASRDYNVDMVPKFMMANGTLVRTLIHTDVTKYLSFKAVDGSFVFSKGKIHKVPATDMEALKSPLMGIFEKRRARNFFIYVQDYNDADPRTHQGLDLTRMTTRELIAKHGLSDDTIDFIGHALALHRDDRYLSEPAIDTVKRMKLYSESLARFQGGSPYIYPLYGLGELPQAFARLSAVYGGTYMLNKPECKVEFDMEGKVCGVTSEGETAKCKKVVCDPSYLANKVRKIGKVARAIAIMSHPIPNANDSHSIQIILPQKQLGRKSDMYVFCCSYTHNVAPKGKFIAFVSAEAETDNPQSELKPGIDLLGPVDELFFDMYDRYEPVNEPSLDNCFVSSSYDATTHFETTVTDVLNMYTLITGKTVDLSVDLSAASAAEEY

SEQ ID NO: 68538 - DNA, 1133 bp, Triticum aestivum
  misc_feature (1)..(1133): Ceres Seq. ID no. 14316043
cagatcaaacacctagggtttggttcgtgagagagaagagagggtgcgatgaagcttgcggggctcaagtcggtggacggagctcacgaggactcgatctgggcggccgcgtgggtgcccgctgctgaccaccgccccacggcgctgctcctcaccggctccatcgacgagaccgtccgcgcctggcaacccgacgacctcgccgccgcgtcccccccggcgggagggcacgcgctcggagtgatatccctcgcggcgcatcctgccggggtcatagccgccgcggtctccatcgacagccacgtccgcgtcttcgacgtcgactccggcgcatccgtcgccacgctcgatgccgcgccctccgaggtctggggcgtccagttccaccccaagggtgttgctctggctgcagctggtggtggcagtggatcagtaaaactctgggacacggagaagtggcaacctattgccagccttcctgttccgcgtccagagggagcccgcgctgataaaacaggcagcggcaagtttgttctttcagtggcctggagtccagatggcaagctcttagcatgtggatccatggatggcacgattgcggtgtatgatgcggtccgcatgaagttcctccaccacctggaggggcaccacatgccagtgaggtccatggtgttctcgccggtggacccccacgtgctcttgaccggatgtgacgactcccacatccacatctacgatgccaaggagaagggcctgatcggggccatgtcgggtcatgcgagctgggtgctgagcatcgacgtgagcccggatggcatggcggtggcgacaggctccagcgaccgcaccgtccggctctgggacatcaatgcgagggcgtcagttcagaccatgagcaaccactcagaccaggtctgggccgttgcattccggccgccgggaggggaaggagtccgtgctggccggctcgccagcgcttcggatgacaagagcatctccctgtacgattactcctagttttacagatttggcgagctgtgatacagccctctgttattgccgtctgttgtaccatgacctgtaccactgtacgatgctgactaaagccgacacttgcaagttgagcgggtttt

SEQ ID NO: 68539 - protein, 322 aa, Triticum aestivum
  peptide (1)..(322): Ceres Seq. ID no. 14316044
MKLAGLKSVDGAHEDSIWAAAWVPAADHRPTALLLTGSIDETVRAWQPDDLAAASPPAGGHALGVISLAAHPAGVIAAAVSIDSHVRVFDVDSGASVATLDAAPSEVWGVQFHPKGVALAAAGGGSGSVKLWDTEKWQPIASLPVPRPEGARADKTGSGKFVLSVAWSPDGKLLACGSMDGTIAVYDAVRMKFLHHLEGHHMPVRSMVFSPVDPHVLLTGCDDSHIHIYDAKEKGLIGAMSGHASWVLSIDVSPDGMAVATGSSDRTVRLWDINARASVQTMSNHSDQVWAVAFRPPGGEGVRAGRLASASDDKSISLYDYS

SEQ ID NO: 68540 - DNA, 1449 bp, Triticum aestivum
  misc_feature (1)..(1449): Ceres Seq. ID no. 13654490
taaaaatccaaatcgccgcctcccaccaccaatccgtccctcacatggctgcgctccactcggcggcggggccgcgtagtccgtctgcgtagcgatcggaacgtagtgtttcggtggtgcgcgccgggttgccttatcggagttcgtgggtgttgactatcagggcgagcggatggacgccgacggtcgcctccggcgcgcgctcgccgccttcgggggcggagacgtgtgggacctcgtcgatgccgcgctcgccgcggccgcgccagccgacctccgcgcgcgtcgtgacgggatcgtggagcggctctacgccggggcccgctgccgcaattgcgatgcccccgagagtccaccgcagccgccgcgtcagccggccgaggccgcttctccggcctggcaggaggaggaggaggaggaggaggaggtggccgacgtggatggcctcggcctggaggaggagaccgacgagggcggcggcttggagagcaagatcctggcgatcaaggatttcttggaggaccccgaccagtcggaggaggagctcgtgagcctgctgcagaacctggcagacatggacatcacctacaaggctctccaggagacggacatcggccgacatgtgaatggcctgcgcaagcacccttcgggtgacgtccggcagttagtgaagctgctcgtcaggaaatggaaggagatagtggacggctgggtgcggctccacaactttggtggtgacggtggaaattcgatcctannngatggtgactctcgtgagaggactcaaggcaaaaggctaccaaaatgcccgggtttcagacttcaagtatacgcccagcccaccacagaggcacagtggtttgagttcagagcggtctaggaataacaatgggttcgagtcgacactggagaggcatagagcaagcccagctcctacgtatcatacgaagcagaacaatggcaataactattcaactacttcgtcatctgctccagctagggcgatgagggagcagaaggataatcatttggacgagaagctcgattcagccagaaagaggcttcaagaaaattaccaggaagcacaaaatgcgaaaaaacagaggacaatgcaagtgctggatatccacgacatacccaagccgaaaaataaaaacaccttcatccgcaagcctggtggaggtggcctccctggccgacatcggtgacctggtgaacatgcaaattcttagccgcggcaaggttcaaaatgaaaaataaattgagcacgaaaggtttatgtttgttctttttttagttacactctggtccgctgaaatattgtccagcacaaccaagtcaagatataatactagtactactgataaaaggaccaaggttatatatttgagaatttgtgctgtagcttgttttttttaagaggtctcttgaatgtacctggaagtattc

SEQ ID NO: 68541 - protein, 235 aa, Triticum aestivum
  peptide (1)..(235): Ceres Seq. ID no. 15219660
  misc_feature (196)..(196): Xaa is any aa, unknown or other
MDADGRLRRALAAFGGGDVWDLVDAALAAAAPADLRARRDGIVERLYAGARCRNCDAPESPPQPPRQPAEAASPAWQEEEEEEEEVADVDGLGLEEETDEGGGLESKILAIKDFLEDPDQSEEELVSLLQNLADMDITYKALQETDIGRHVNGLRKHPSGDVRQLVKLLVRKWKEIVDGWVRLHNFGGDGGNSILXDGDSRERTQGKRLPKCPGFRLQVYAQPTTEAQWFEFRAV

SEQ ID NO: 68542 - protein, 148 aa, Triticum aestivum
  peptide (1)..(148): Ceres Seq. ID no. 15219661
MVTLVRGLKAKGYQNARVSDFKYTPSPPQRHSGLSSERSRNNNGFESTLERHRASPAPTYHTKQNNGNNYSTTSSSAPARAMREQKDNHLDEKLDSARKRLQENYQEAQNAKKQRTMQVLDIHDIPKPKNKNTFIRKPGGGGLPGRHR

SEQ ID NO: 68543 - DNA, 1367 bp, Triticum aestivum
  misc_feature (1)..(1367): Ceres Seq. ID no. 13598340
cctaatcgaaaaattcaccaaacaatccttgaaatcgacccaagccgctctccctgtcaggtgagccgcgccgccagtctccggcgaccccgagccccaacaatcccatctccggccacaggagctccagggttcctctctccatctggtcctccgctacgccccgaatcgatggagattagggccccgccgacgagcctcaggctcgcgacgccgccttcaaccgccagcttccgcccggtcgccctccggacctccttcctcagcggcagcgtttctcttcgagctgtgcaagtacgtcaatcaaatgtcaacagatttaagtgcaacgccatacggagtaacctcttcgatagactaactagggttgtcaggtcctatgcaaatgcaattctgagttcatttgaagaccctgagaagatcctagatcaagcggtcttggagatgaatgatgatttaataaagatgcggcaagccactgcacaggtcttggcatctcaaaagaggcttgagaacaagtacaaagctgccgaacaagctgatgctgattggtatcggagggctcaacttgctcttcaaaagggtgaagaggatcttgctcgtgaagcccttaaacggcgtaaatcatatgctgaaaatgcaagctcgttaaaggcccagcttgatcagcagaagagtgtcgtcgaaaatcttgtttcaaataccaggcttcttgagagcaagatagcagaggccaagcagaaaaaggataccctaaaagcctgtgctcaatcagcaaagaccgcaacaaaagtgagtgaaatgctggggaatgtgaatacaagtggtgccttgtcagcgtttgagaagatggaggagaaagttatgactatggaatcccaagctgaggcacttggtcaattaggagctgatgatctagaaggaaagtttgcaatgcttgagactacatcggttgacgatgatcttgcacaaatgagaaaagaactgtccgggagatctttgaagggcgaactccctccgggcagagccgcagccagcaaatcaggtagccccttccgagacacagagattgagaaggagctaaatgagctgcggaagaaggccaaagagtattagattttatttacaggccatgtccgtgtcccggggcttgatgaaacctcctacccgaagaaccccagaagttatataggcttgcagatttcagcaatgtgcatctgaaacctccggtgtacttttttttgggggtaaaggtatatgggtgcgtgaagagttctcttgcaattttcctgtgtatgtcattgtactttgtacagttaatcttgtcaccataatgcaaatcattacacccccttttgagcttagct

SEQ ID NO: 68544 - protein, 371 aa, Triticum aestivum
  peptide (1)..(371): Ceres Seq. ID no. 13598341
PNRKIHQTILEIDPSRSPCQVSRAASLRRPRAPTIPSPATGAPGFLSPSGPPLRPESMEIRAPPTSLRLATPPSTASFRPVALRTSFLSGSVSLRAVQVRQSNVNRFKCNAIRSNLFDRLTRVVRSYANAILSSFEDPEKILDQAVLEMNDDLIKMRQATAQVLASQKRLENKYKAAEQADADWYRRAQLALQKGEEDLAREALKRRKSYAENASSLKAQLDQQKSVVENLVSNTRLLESKIAEAKQKKDTLKACAQSAKTATKVSEMLGNVNTSGALSAFEKMEEKVMTMESQAEALGQLGADDLEGKFAMLETTSVDDDLAQMRKELSGRSLKGELPPGRAAASKSGSPFRDTEIEKELNELRKKAKEY

SEQ ID NO: 68545 - protein, 314 aa, Triticum aestivum
  peptide (1)..(314): Ceres Seq. ID no. 13598342
MEIRAPPTSLRLATPPSTASFRPVALRTSFLSGSVSLRAVQVRQSNVNRFKCNAIRSNLFDRLTRVVRSYANAILSSFEDPEKILDQAVLEMNDDLIKMRQATAQVLASQKRLENKYKAAEQADADWYRRAQLALQKGEEDLAREALKRRKSYAENASSLKAQLDQQKSVVENLVSNTRLLESKIAEAKQKKDTLKACAQSAKTATKVSEMLGNVNTSGALSAFEKMEEKVMTMESQAEALGQLGADDLEGKFAMLETTSVDDDLAQMRKELSGRSLKGELPPGRAAASKSGSPFRDTEIEKELNELRKKAKEY

SEQ ID NO: 68546 - protein, 223 aa, Triticum aestivum
  peptide (1)..(223): Ceres Seq. ID no. 13598343
MNDDLIKMRQATAQVLASQKRLENKYKAAEQADADWYRRAQLALQKGEEDLAREALKRRKSYAENASSLKAQLDQQKSVVENLVSNTRLLESKIAEAKQKKDTLKACAQSAKTATKVSEMLGNVNTSGALSAFEKMEEKVMTMESQAEALGQLGADDLEGKFAMLETTSVDDDLAQMRKELSGRSLKGELPPGRAAASKSGSPFRDTEIEKELNELRKKAKEY

SEQ ID NO: 68547 - DNA, 1660 bp, Triticum aestivum
  misc_feature (1)..(1660): Ceres Seq. ID no. 14302321
gttccatttcatttctgtttcggaggaaaggtccagaagcgccgccgccgccgcagcagcgacacgctccctacggcatggcgccggcgtacctggcgaccatacccgcgctccggcgcgcggcgcggcgggccccggcggcgctgttctcgtcggggatcgtcgccggcgacaagcccgttctggtgcgcgatttcgtgaggtcggcgctctacgaccccaaccacggctacttctccaagcggtcggggcccgtcggcgtgctcgactccgccatccgcttccacaagctcgacgggaggaatgcgtacatgaagcatcttgataagctgtataagatgcatgatatctcttggtttactccagtggagctttttaagccatggtatgcctatgcaatagctgcgtcaatccttcgcacggctaatctttcagtcccattgaagatatatgaaatcggaggtggatccgggacatgtgcaaagtgcgtacttgattacatgatgttaaatgccccgccaaaagtctacaataatatgaaatacatctcagtagagattagctcctcccttgctgaaaagcagttggaaactgtcggtgaagtgcagagccatttgtcaaagttcacagtggagcatcgtgatgcaactgacgtagctggatggggcagcaaggatcctcaaccatgctgggtgctaatgcttgaggtacttgacaatctacctcatgaccttgtctattcaccagatcaggtctctccatggatggaggtgtggattgaaaaagtaaatggcagttcacaagtctgtgaggtctacaaaccattgcaagacccattagtttcctgctgcagtgagattgttggcatgaatgaagagaatccatctttgagagaaaaactatcattcgctgcaaaaggactcatctcaaaagtattcccgaagcctcggagagcttggttaccaaccggatgcttgaaactactggatactttgcatcaagctttgccaagtatgtcccttattgcttcagacttcagttatcttcctgatgttagcatacctggcgatagagctccattggtttcttcaaagaaggatgggaaaactttggatcatcccaactatcttgatgcacggggcgatgcagatatcttcttcccaaccgatttcttgctgttggagcagatcgaccaccactgctctggtttctcgaaagaccagatgaatcgtggtgcatttaaacctgtgaagagtaggagaacaatcatacttgattcggctgcctttatggaggagtttgggttgccactgaagacgaggaccaaagatggatacaatccacttcttgatgatttcaggaacacaaagttctatctcagtgtgcctacccacaacaagtagtagtccagcatgcctgcgtcgcttcttctgtttgccatgaggcgctgcattagacgccagtgaatacctaatatgcaactcagtaatcaatttgtcagagcaggttatttatgttttttttcctgtagaagaccgaaattcttaggttggtcaaatttgaggccacagttcaacttcaggcatgctgccgccttttctatgtttgattgatggcacggaagtgaataataccatttgaggccacagttcaattcact

SEQ ID NO: 68548 - protein, 466 aa, Triticum aestivum
  peptide (1)..(466): Ceres Seq. ID no. 14302322
SISFLFRRKGPEAPPPPQQRHAPYGMAPAYLATIPALRRAARRAPAALFSSGIVAGDKPVLVRDFVRSALYDPNHGYFSKRSGPVGVLDSAIRFHKLDGRNAYMKHLDKLYKMHDISWFTPVELFKPWYAYAIAASILRTANLSVPLKIYEIGGGSGTCAKCVLDYMMLNAPPKVYNNMKYISVEISSSLAEKQLETVGEVQSHLSKFTVEHRDATDVAGWGSKDPQPCWVLMLEVLDNLPHDLVYSPDQVSPWMEVWIEKVNGSSQVCEVYKPLQDPLVSCCSEIVGMNEENPSLREKLSFAAKGLISKVFPKPRRAWLPTGCLKLLDTLHQALPSMSLIASDFSYLPDVSIPGDRAPLVSSKKDGKTLDHPNYLDARGDADIFFPTDFLLLEQIDHHCSGFSKDQMNRGAFKPVKSRRTIILDSAAFMEEFGLPLKTRTKDGYNPLLDDFRNTKFYLSVPTHNK

SEQ ID NO: 68549 - protein, 441 aa, Triticum aestivum
  peptide (1)..(441): Ceres Seq. ID no. 14302323
MAPAYLATIPALRRAARRAPAALFSSGIVAGDKPVLVRDFVRSALYDPNHGYFSKRSGPVGVLDSAIRFHKLDGRNAYMKHLDKLYKMHDISWFTPVELFKPWYAYAIAASILRTANLSVPLKIYEIGGGSGTCAKCVLDYMMLNAPPKVYNNMKYISVEISSSLAEKQLETVGEVQSHLSKFTVEHRDATDVAGWGSKDPQPCWVLMLEVLDNLPHDLVYSPDQVSPWMEVWIEKVNGSSQVCEVYKPLQDPLVSCCSEIVGMNEENPSLREKLSFAAKGLISKVFPKPRRAWLPTGCLKLLDTLHQALPSMSLIASDFSYLPDVSIPGDRAPLVSSKKDGKTLDHPNYLDARGDADIFFPTDFLLLEQIDHHCSGFSKDQMNRGAFKPVKSRRTIILDSAAFMEEFGLPLKTRTKDGYNPLLDDFRNTKFYLSVPTHNK

SEQ ID NO: 68550 - protein, 363 aa, Triticum aestivum
  peptide (1)..(363): Ceres Seq. ID no. 14302324
MKHLDKLYKMHDISWFTPVELFKPWYAYAIAASILRTANLSVPLKIYEIGGGSGTCAKCVLDYMMLNAPPKVYNNMKYISVEISSSLAEKQLETVGEVQSHLSKFTVEHRDATDVAGWGSKDPQPCWVLMLEVLDNLPHDLVYSPDQVSPWMEVWIEKVNGSSQVCEVYKPLQDPLVSCCSEIVGMNEENPSLREKLSFAAKGLISKVFPKPRRAWLPTGCLKLLDTLHQALPSMSLIASDFSYLPDVSIPGDRAPLVSSKKDGKTLDHPNYLDARGDADIFFPTDFLLLEQIDHHCSGFSKDQMNRGAFKPVKSRRTIILDSAAFMEEFGLPLKTRTKDGYNPLLDDFRNTKFYLSVPTHNK

SEQ ID NO: 68551 - DNA, 1634 bp, Triticum aestivum
  misc_feature (1)..(1634): Ceres Seq. ID no. 13654273
atgtttcgtgaatacagtgaccaaactgaaccctagagccaagtttagttactgtagatgtaattttctccgatgctccagatacgcctgagcaggatcggctcgtcggactccggggccgcggcctctggcgcggcggctggggcgtccggtggcgccccggcgaagtccgccgccgcggcggctggcggtgccccggagtcggtgactgtcgcttgccccgaccacctggtcatcgcagacctcgccgtggcgaagagcctcggcgccgtcacaaactccgccatcgctgcgacgcgcgccatcggccgccgctcccgccggcccctcggcgagcgcgtccacatctgctcccgctgcgagttccccatcgccattaatggccgcctcatttcttgcgaacatgcattctgtttagcctgtgcaagaagtgattccagctgctatctttgtgatgagcgcattcagaagattcagactgtgaaaatgatggaagggatttttatctgcgctgcacctatgtgcctcaagtctttccttaagaaagcggaatttatgactcatgtacctgaagctcatgcaaatctcctccaaactaacacggagaaggaagaacgtaatgaaccagatgctcctaacatctcccgtgcttctggaggagatgctcaaaggcaatctcaaatgcctgagatatctaccgcacgtgctcctccaaggcggggtgtttcacccacttcaagttctcacatgcaagagcgtgaagaccgatctcggtatcaccagtccagggagagggagcacaccccactaaggccccctatgctaagcaaaccaccatcattccatggtcgccactatccaccaggtgatactcggtccgaaaacaacacacctcaaggatttgaccgttcttacagctgggcccatgatggtacacctggtgcaactccacttcgccaagaacctgaccatggtactcaagacaagcagcaagtgatgcctaattcacctttcatgttctctccaatgcatcctcatcagcaaaacttcatgatgcatatgaatatgaatcagcctttaatccccagctcatcattcagctaccctgtccaacaagatgggaatccgcagtacttcagtgctcctttccagatgcaactgcaagatgccggatcagatcaaggttcagcgtcggtgcctgaggggcttcagcgcccatggggcatggggttgatgggcaatccatctcagggaggtggcggcatggccttcatgccaactggtttcgggatgatgccagacagctcgatgaatccaggcatgcaaggtagggattttcaaggccaagctgatcgtggcgacggaaggggcatccaagaacagttacctatggtgatgcaaatgcagatgtcgctccccccacctccccctacacaacccccgtccgctggacagcagtctttcaacagaacttgatgagttttttgcgtgccaattttatggctgctgccaaaatcgtgctgtactgcgttgggaaattgcaattttgccaccttggcatgtaactgatgagcactcgatggcagcctatgttgtgctaaaaacgatgcaatttaatctgagttgtcatatgc

SEQ ID NO: 68552 - protein, 467 aa, Triticum aestivum
  peptide (1)..(467): Ceres Seq. ID no. 13654274
MLQIRLSRIGSSDSGAAASGAAAGASGGAPAKSAAAAAGGAPESVTVACPDHLVIADLAVAKSLGAVTNSAIAATRAIGRRSRRPLGERVHICSRCEFPIAINGRLISCEHAFCLACARSDSSCYLCDERIQKIQTVKMMEGIFICAAPMCLKSFLKKAEFMTHVPEAHANLLQTNTEKEERNEPDAPNISRASGGDAQRQSQMPEISTARAPPRRGVSPTSSSHMQEREDRSRYHQSREREHTPLRPPMLSKPPSFHGRHYPPGDTRSENNTPQGFDRSYSWAHDGTPGATPLRQEPDHGTQDKQQVMPNSPFMFSPMHPHQQNFMMHMNMNQPLIPSSSFSYPVQQDGNPQYFSAPFQMQLQDAGSDQGSASVPEGLQRPWGMGLMGNPSQGGGGMAFMPTGFGMMPDSSMNPGMQGRDFQGQADRGDGRGIQEQLPMVMQMQMSLPPPPPTQPPSAGQQSFNRT

SEQ ID NO: 68553 - protein, 329 aa, Triticum aestivum
  peptide (1)..(329): Ceres Seq. ID no. 13654275
MMEGIFICAAPMCLKSFLKKAEFMTHVPEAHANLLQTNTEKEERNEPDAPNISRASGGDAQRQSQMPEISTARAPPRRGVSPTSSSHMQEREDRSRYHQSREREHTPLRPPMLSKPPSFHGRHYPPGDTRSENNTPQGFDRSYSWAHDGTPGATPLRQEPDHGTQDKQQVMPNSPFMFSPMHPHQQNFMMHMNMNQPLIPSSSFSYPVQQDGNPQYFSAPFQMQLQDAGSDQGSASVPEGLQRPWGMGLMGNPSQGGGGMAFMPTGFGMMPDSSMNPGMQGRDFQGQADRGDGRGIQEQLPMVMQMQMSLPPPPPTQPPSAGQQSFNRT

SEQ ID NO: 68554 - protein, 328 aa, Triticum aestivum
  peptide (1)..(328): Ceres Seq. ID no. 13654276
MEGIFICAAPMCLKSFLKKAEFMTHVPEAHANLLQTNTEKEERNEPDAPNISRASGGDAQRQSQMPEISTARAPPRRGVSPTSSSHMQEREDRSRYHQSREREHTPLRPPMLSKPPSFHGRHYPPGDTRSENNTPQGFDRSYSWAHDGTPGATPLRQEPDHGTQDKQQVMPNSPFMFSPMHPHQQNFMMHMNMNQPLIPSSSFSYPVQQDGNPQYFSAPFQMQLQDAGSDQGSASVPEGLQRPWGMGLMGNPSQGGGGMAFMPTGFGMMPDSSMNPGMQGRDFQGQADRGDGRGIQEQLPMVMQMQMSLPPPPPTQPPSAGQQSFNRT

SEQ ID NO: 68555 - DNA, 834 bp, Triticum aestivum
  misc_feature (1)..(834): Ceres Seq. ID no. 12584190
acaccacaccattgccactctcgtcctcctccagtccggcctccgctgtattggactgcaccggcgccggtgccggccgggctgcagaccggtcgactccttcgccttgcccggcctcctcgcagacacggctttggagattcaaagaatttacgttactagacaattcatgcatatatgaagtcctacttgtaggtgagcctagcagtgctattcttatgtgcagtatggcacggacaactgcagatcaggcaatggcgacacgtaagttggtcgtaaaggtcgtcggtgctcacggcctggcacacagcaagaggggtttacccagtgcatttgttgtgctttcgtttgattctcagcagttccgcacgagtgtcaaggagaataatgagaacccggtatggaacgacaccttctgcttcaacgtgttggatcgacccaagattcatgagctagttcttcaagtttgtgtgtatgacaccaatacgtctgttcaaggcgaaatgtctttgattggaaaagtcaaagtaaatggggcctcattccggccctgtgacaaaggaccatcaaattatccgctgaggcttgggaatgttaaacatacatggcgcatacgtgacagaagaggatcttcagagatagttcagaggtagtttaactaggatatgatatctattcggtcgtaaccaagtctatctcttgcttttctttctcctcaagttgtatcccgattctctcttatcttctcaaccaactcatgtatgcgcctcagggttattgcacccctgctatataacacgtagcacgtcgcccaagatagggtaagacgtttcc

SEQ ID NO: 68556 - protein, 216 aa, Triticum aestivum
  peptide (1)..(216): Ceres Seq. ID no. 12584191
TTPLPLSSSSSPASAVLDCTGAGAGRAADRSTPSPCPASSQTRLWRFKEFTLLDNSCIYEVLLVGEPSSAILMCSMARTTADQAMATRKLVVKVVGAHGLAHSKRGLPSAFVVLSFDSQQFRTSVKENNENPVWNDTFCFNVLDRPKIHELVLQVCVYDTNTSVQGEMSLIGKVKVNGASFRPCDKGPSNYPLRLGNVKHTWRIRDRRGSSEIVQR

SEQ ID NO: 68557 - protein, 144 aa, Triticum aestivum
  peptide (1)..(144): Ceres Seq. ID no. 12584192
MCSMARTTADQAMATRKLVVKVVGAHGLAHSKRGLPSAFVVLSFDSQQFRTSVKENNENPVWNDTFCFNVLDRPKIHELVLQVCVYDTNTSVQGEMSLIGKVKVNGASFRPCDKGPSNYPLRLGNVKHTWRIRDRRGSSEIVQR

SEQ ID NO: 68558 - protein, 141 aa, Triticum aestivum
  peptide (1)..(141): Ceres Seq. ID no. 12584193
MARTTADQAMATRKLVVKVVGAHGLAHSKRGLPSAFVVLSFDSQQFRTSVKENNENPVWNDTFCFNVLDRPKIHELVLQVCVYDTNTSVQGEMSLIGKVKVNGASFRPCDKGPSNYPLRLGNVKHTWRIRDRRGSSEIVQR

SEQ ID NO: 68559 - DNA, 532 bp, Triticum aestivum
  misc_feature (1)..(532): Ceres Seq. ID no. 13596434
agcaagcagctgatccgagttaaccattagccaaaagtaatcttgcttttccatttcccgagagagctcagttcgtgtctgcactccagtccagtgtttgtttgagcagcagccatggcctccaaccaggacaaggcaagctaccgcgccggcgaggccaaggcccacaccgaggagaaggccggacaggtgaccggcgcggccaaggacgaggcgtgcgacgccaaggaccgggcgtcgggcgcggcggggcaagcgacggggaaggggcagggcgccgtggaggccacgaagcagaaggccggcgaggcggggcagaagacgtccgagacggcgcaggccggcaaggaccgggccgccgagggcaaggaccggaccggcagctacctcggccacgcgaccgaggggaccaagcagaaggcctccgaggcgacggggtacacgcaggacagggcttccgacgcggcgcagtacaccaaggactccgccgtcgccggcaaggacaagaccggcagcgtcctcagccaggccc

SEQ ID NO: 68560 - protein, 139 aa, Triticum aestivum
  peptide (1)..(139): Ceres Seq. ID no. 13596435
MASNQDKASYRAGEAKAHTEEKAGQVTGAAKDEACDAKDRASGAAGQATGKGQGAVEATKQKAGEAGQKTSETAQAGKDRAAEGKDRTGSYLGHATEGTKQKASEATGYTQDRASDAAQYTKDSAVAGKDKTGSVLSQA

SEQ ID NO: 68561 - DNA, 1421 bp, Triticum aestivum
  misc_feature (1)..(1421): Ceres Seq. ID no. 13596394
attcccaggcacatcccatttccaatcccccacccttcctctctctctcccccgcccctagccgtcgccggagagagagagggacgcggccgcgggagaagaaggagggaagatgatgatgacacgggcctccatgggggccatggagggcgcggcgctggacgaggtggtgcggcgattggtcgagggcggccgcggcgggcggcaggtgcagctgtccgaggcggagatccggcagctctgcgtcgacgccaagcgggttttcctgtcccagccgaacctcctccgcatccaggcccccgtcaagatctgcggtgatatccatggtcagtttgttgatcttctgaggttgtttgatttgggtggttatcctccaacctcaacctatgtattcctcggagactacgtagatagaggcaaacagagcttggaaactatatgcttactgctggcctacaaaataaggtaccctgacaaggttttcctgttaaggggtaaccatgaagatgcaaaaatcaacagagtttatggtttctatgatgaatgcaagaggaggttcaatgttcgactgtggaagatattctctgattgcttcaactgcctgcctattgcagcactcattgacgacaagatactgtgcatgcatggtggcctttcacctgaactgactaacctggaccaaataaaggatattgagaggccggctgagattcctgattatggtctcctgtgtgatttgctttggtctgatcctagccctgacggagaagggtggggggagagtgacagaggtgtttcatgtacgtttggtgcagatatgcttatagagttcttggagaaaaatgatcttgatcttatctgccgagcccatcaggtggtagaagatggttatgagttcttcgcacagcggagattagtcaccatcttctcagctccaaattactgcggggaattcgataatgtaggtgctctgttgagcatagatgaaaatctaatgtgctcatttcaaatcttgaagccaaatgaaacaggcacatcgcgggtaaaaagacaaattccaaataagccagcaaccgggggaagtgcctgatctgatcaacatccattccttcaatattagcatcgtcggctcgaagggggtgatctgatctattgtttggatccaccatggcatggcaatattcatccaccagccaattgtcttgcttaaccaccctttgccgagcatttgtaaatgtccattggctctgcactcgttttctctgtacagaattaggccggatttaacagcaccacctattctggttgttcttcctggttgcgcggcatctgtttttgtaagttacttttgtggtacatttttgcctgtggatgttgatagcttctgtttgtgagcatctattatttgccttatgtttgtc

SEQ ID NO: 68562 - protein, 325 aa, Triticum aestivum
  peptide (1)..(325): Ceres Seq. ID no. 13596395
MMMTRASMGAMEGAALDEVVRRLVEGGRGGRQVQLSEAEIRQLCVDAKRVFLSQPNLLRIQAPVKICGDIHGQFVDLLRLFDLGGYPPTSTYVFLGDYVDRGKQSLETICLLLAYKIRYPDKVFLLRGNHEDAKINRVYGFYDECKRRFNVRLWKIFSDCFNCLPIAALIDDKILCMHGGLSPELTNLDQIKDIERPAEIPDYGLLCDLLWSDPSPDGEGWGESDRGVSCTFGADMLIEFLEKNDLDLICRAHQVVEDGYEFFAQRRLVTIFSAPNYCGEFDNVGALLSIDENLMCSFQILKPNETGTSRVKRQIPNKPATGGSA

SEQ ID NO: 68563 - protein, 324 aa, Triticum aestivum
  peptide (1)..(324): Ceres Seq. ID no. 13596396
MMTRASMGAMEGAALDEVVRRLVEGGRGGRQVQLSEAEIRQLCVDAKRVFLSQPNLLRIQAPVKICGDIHGQFVDLLRLFDLGGYPPTSTYVFLGDYVDRGKQSLETICLLLAYKIRYPDKVFLLRGNHEDAKINRVYGFYDECKRRFNVRLWKIFSDCFNCLPIAALIDDKILCMHGGLSPELTNLDQIKDIERPAEIPDYGLLCDLLWSDPSPDGEGWGESDRGVSCTFGADMLIEFLEKNDLDLICRAHQVVEDGYEFFAQRRLVTIFSAPNYCGEFDNVGALLSIDENLMCSFQILKPNETGTSRVKRQIPNKPATGGSA

SEQ ID NO: 68564 - protein, 323 aa, Triticum aestivum
  peptide (1)..(323): Ceres Seq. ID no. 13596397
MTRASMGAMEGAALDEVVRRLVEGGRGGRQVQLSEAEIRQLCVDAKRVFLSQPNLLRIQAPVKICGDIHGQFVDLLRLFDLGGYPPTSTYVFLGDYVDRGKQSLETICLLLAYKIRYPDKVFLLRGNHEDAKINRVYGFYDECKRRFNVRLWKIFSDCFNCLPIAALIDDKILCMHGGLSPELTNLDQIKDIERPAEIPDYGLLCDLLWSDPSPDGEGWGESDRGVSCTFGADMLIEFLEKNDLDLICRAHQVVEDGYEFFAQRRLVTIFSAPNYCGEFDNVGALLSIDENLMCSFQILKPNETGTSRVKRQIPNKPATGGSA

SEQ ID NO: 68565 - DNA, 1728 bp, Triticum aestivum
  misc_feature (1)..(1728): Ceres Seq. ID no. 12614670
atcaagtacacagttcactatcatctagcctttcttcccccatctctctcgagaaacaaagcaatggttcttggactgctggtgagttccccagccacggtgctatggagcctcctgggcctggcgcttctctggcaggtcaagcggctggttgactacacgtggtggcggccacggcggctccagcgggcgctgcgtgcgcagggcctccgcgggacgccgtaccgcttccccgtcggcgacctcggcgactacgggcggcagggcaaagaggcgtcgtccagggcgctgccgctgcggtgccatgacatacgcgcccacgtcgcgccgtacctctgcaacaccgtccgggagcacggcaagacgtgcgtctcctggttcggccccgtccccaaggtgaccatcgccgaccccggcgtcacccgggaggtgatgtccaacaagttcggccacttcgagaagctccagttcccgacgctgaccaggctcctcgctggcggcgtcgcggtctatgagggtgagaagtgggtcaagcacaggaggatccttaacccggcgttccatatcgagaagctcaagttcatgatgccagcattctctgcatgctgtgaagagcttgtgagcagatggactcagtcccttggttctgacggttggtgtgaggtggatgtctgcccagagtttcaaaccctcaccggagatgtcatctcacgaaccgcgttcggcagcagctacctcgaaggtagacggattttcgagctgcaatctgtgcaagccgaccgcattgtggctgaagttaagaagatcttcattcctggttatatgtccttgcctaccaagaagaacagactgatgcgtcagactaataacgagattgaacccattctacgaggtctaattgaaaaaagaatgcaatccatgcaacaaggagaaagcaccaaggatgatttactcggcttaatgcttgagtcaaacatgaggggaacagatgacaagggtcaacccatcctaggaatgacaattgaagaagtgatagaggaatgcaaattgttctattttgcagggtccgagacaacatctgtattgctcacctggacaatgatcgtactggccatgcaccccgagtggcaagaccgtgcaagggaggaggtccttggcctatttgagaagaagaagcccgagtatgacggctttagcaaactcaaaaccgtgaccatgattctttacgaggttctccgtctttatccgccggccgttgcattcatgcgaaaaacatacaaggagatagagattgaaagcatcacctaccctgccggtgtgatcatcgagcttcctgtgctgcttatccaccatgacccagacatatggggaagcgatgtgcatgagttcaagccagaaaggtttgctgatgggatcgccaaggcatccaaggatcctggtgccttcctcccatttggttggggtccacggatctgcatcggtcagaattttgctctgcttgaggccaagatggctttgtgcatgatccttcaacatttcgaattcgaccttggcccgacgtattctcatatgctgcataaccagaaaatgttgcgccccatgcatggtgcacaaattaagctcagggcaatatgacggtcagtattatagcagtgtgcatgatgtcattttattacatagtgtttagtggttggccatgtaataagctttcatacctacaaatgtttg

SEQ ID NO: 68566 - protein, 544 aa, Triticum aestivum
  peptide (1)..(544): Ceres Seq. ID no. 12614671
IKYTVHYHLAFLPPSLSRNKAMVLGLLVSSPATVLWSLLGLALLWQVKRLVDYTWWRPRRLQRALRAQGLRGTPYRFPVGDLGDYGRQGKEASSRALPLRCHDIRAHVAPYLCNTVREHGKTCVSWFGPVPKVTIADPGVTREVMSNKFGHFEKLQFPTLTRLLAGGVAVYEGEKWVKHRRILNPAFHIEKLKFMMPAFSACCEELVSRWTQSLGSDGWCEVDVCPEFQTLTGDVISRTAFGSSYLEGRRIFELQSVQADRIVAEVKKIFIPGYMSLPTKKNRLMRQTNNEIEPILRGLIEKRMQSMQQGESTKDDLLGLMLESNMRGTDDKGQPILGMTIEEVIEECKLFYFAGSETTSVLLTWTMIVLAMHPEWQDRAREEVLGLFEKKKPEYDGFSKLKTVTMILYEVLRLYPPAVAFMRKTYKEIEIESITYPAGVIIELPVLLIHHDPDIWGSDVHEFKPERFADGIAKASKDPGAFLPFGWGPRICIGQNFALLEAKMALCMILQHFEFDLGPTYSHMLHNQKMLRPMHGAQIKLRAI

SEQ ID NO: 68567 - protein, 523 aa, Triticum aestivum
  peptide (1)..(523): Ceres Seq. ID no. 12614672
MVLGLLVSSPATVLWSLLGLALLWQVKRLVDYTWWRPRRLQRALRAQGLRGTPYRFPVGDLGDYGRQGKEASSRALPLRCHDIRAHVAPYLCNTVREHGKTCVSWFGPVPKVTIADPGVTREVMSNKFGHFEKLQFPTLTRLLAGGVAVYEGEKWVKHRRILNPAFHIEKLKFMMPAFSACCEELVSRWTQSLGSDGWCEVDVCPEFQTLTGDVISRTAFGSSYLEGRRIFELQSVQADRIVAEVKKIFIPGYMSLPTKKNRLMRQTNNEIEPILRGLIEKRMQSMQQGESTKDDLLGLMLESNMRGTDDKGQPILGMTIEEVIEECKLFYFAGSETTSVLLTWTMIVLAMHPEWQDRAREEVLGLFEKKKPEYDGFSKLKTVTMILYEVLRLYPPAVAFMRKTYKEIEIESITYPAGVIIELPVLLIHHDPDIWGSDVHEFKPERFADGIAKASKDPGAFLPFGWGPRICIGQNFALLEAKMALCMILQHFEFDLGPTYSHMLHNQKMLRPMHGAQIKLRAI

SEQ ID NO: 68568 - protein, 400 aa, Triticum aestivum
  peptide (1)..(400): Ceres Seq. ID no. 12614673
MSNKFGHFEKLQFPTLTRLLAGGVAVYEGEKWVKHRRILNPAFHIEKLKFMMPAFSACCEELVSRWTQSLGSDGWCEVDVCPEFQTLTGDVISRTAFGSSYLEGRRIFELQSVQADRIVAEVKKIFIPGYMSLPTKKNRLMRQTNNEIEPILRGLIEKRMQSMQQGESTKDDLLGLMLESNMRGTDDKGQPILGMTIEEVIEECKLFYFAGSETTSVLLTWTMIVLAMHPEWQDRAREEVLGLFEKKKPEYDGFSKLKTVTMILYEVLRLYPPAVAFMRKTYKEIEIESITYPAGVIIELPVLLIHHDPDIWGSDVHEFKPERFADGIAKASKDPGAFLPFGWGPRICIGQNFALLEAKMALCMILQHFEFDLGPTYSHMLHNQKMLRPMHGAQIKLRAI

SEQ ID NO: 68569 - DNA, 1354 bp, Triticum aestivum
  misc_feature (1)..(1354): Ceres Seq. ID no. 13654574
agaatcatcattcctttcatttcatttcattgtgcaccaccaacccaacccagagactcctcagagtaatcgagccggccatcttgcttcgttccatggcgtctctgcttctcaagggcgtgcacaagcgtctgggcctgcccactatctccatctcctgctcctccgccgacgccaccaacatcatcgcctccaccggcaccggcgccgtcgttggcagcagcggccgggccatcgaccgccactcgccgcggctccgcgacccacaccgctcctccacctccaagccgcccagaccaagcaccagcaccaaagactcggtgtcctcagaggaccccaagcagcagcagcagcagcacggcagcaagaagaagaagaagagcaccacggctggtgctgctgcagatgggagaaggtcttcggagaagaggctggtcagcccggccacctcctccaggttcctcctcaactcctcccgcctgcagtccgacgacctcgacgtcctcgcgctgcccccgcctccgccgccgtccttcatcgacgcgttgcccgtcggcgaagggaagccgaagccgccgtccttcatcgacgcgttcccggccgacgcctccctgccggttccctctgccaaggacgcgccgccgtcgactgtgcaccaagcagagtcctcgtcgtcagggacgtcctcctctgcttcgtcgtcgtcggagatcacggccgtccaagacccggagcagcacaaggcggcggcgctggtgcggtcgtcctcgacggcggcggcgaggacgacgcaggtggtggtgctgcgcgtgtcgctgcactgcaaggggtgcgcgggcaaggtgaagaagcacatcgccaagatggagggggtgacgtcgttcgacatcgacatcccgagcaagaaggtgacggtggtcggcgacgtgacgccgctgggggtgctcaccagcgtctccaaggtgaagcccgcgcagttctggccgtcgcagccgtgccccccgcatgcctccgcttccttctgaacgcgccaacctgtgatctccgctctctctgaatcacaagaagatacggggtcgtagctggtcgagtggtcttccatggtggaccactcgcgcgctgcgcgcaggcgatcgaagtgcgtagtagaacgtcgagaaagatgggcagatgccacgcacgtagtacctccatatttctttccttttttttcttgaaagaaacggtattgaagctcctccatatctcaatgcctgtattctgaattgagatatactcatcctacagtttctgtagtacaaaatggagtaataatcagggccgtacaaaatggagtaatactcatcctacagtt

SEQ ID NO: 68570 - protein, 351 aa, Triticum aestivum
  peptide (1)..(351): Ceres Seq. ID no. 13654575
ESSFLSFHFIVHHQPNPETPQSNRAGHLASFHGVSASQGRAQASGPAHYLHLLLLRRRHQHHRLHRHRRRRWQQRPGHRPPLAAAPRPTPLLHLQAAQTKHQHQRLGVLRGPQAAAAAARQQEEEEEHHGWCCCRWEKVFGEEAGQPGHLLQVPPQLLPPAVRRPRRPRAAPASAAVLHRRVARRRREAEAAVLHRRVPGRRLPAGSLCQGRAAVDCAPSRVLVVRDVLLCFVVVGDHGRPRPGAAQGGGAGAVVLDGGGEDDAGGGAARVAALQGVRGQGEEAHRQDGGGDVVRHRHPEQEGDGGRRRDAAGGAHQRLQGEARAVLAVAAVPPACLRFLLNAPTCDLRSL

SEQ ID NO: 68571 - protein, 340 aa, Triticum aestivum
  peptide (1)..(340): Ceres Seq. ID no. 13654576
NHHSFHFISLCTTNPTQRLLRVIEPAILLRSMASLLLKGVHKRLGLPTISISCSSADATNIIASTGTGAVVGSSGRAIDRHSPRLRDPHRSSTSKPPRPSTSTKDSVSSEDPKQQQQQHGSKKKKKSTTAGAAADGRRSSEKRLVSPATSSRFLLNSSRLQSDDLDVLALPPPPPPSFIDALPVGEGKPKPPSFIDAFPADASLPVPSAKDAPPSTVHQAESSSSGTSSSASSSSEITAVQDPEQHKAAALVRSSSTAAARTTQVVVLRVSLHCKGCAGKVKKHIAKMEGVTSFDIDIPSKKVTVVGDVTPLGVLTSVSKVKPAQFWPSQPCPPHASASF

SEQ ID NO: 68572 - protein, 309 aa, Triticum aestivum
  peptide (1)..(309): Ceres Seq. ID no. 13654577
MASLLLKGVHKRLGLPTISISCSSADATNIIASTGTGAVVGSSGRAIDRHSPRLRDPHRSSTSKPPRPSTSTKDSVSSEDPKQQQQQHGSKKKKKSTTAGAAADGRRSSEKRLVSPATSSRFLLNSSRLQSDDLDVLALPPPPPPSFIDALPVGEGKPKPPSFIDAFPADASLPVPSAKDAPPSTVHQAESSSSGTSSSASSSSEITAVQDPEQHKAAALVRSSSTAAARTTQVVVLRVSLHCKGCAGKVKKHIAKMEGVTSFDIDIPSKKVTVVGDVTPLGVLTSVSKVKPAQFWPSQPCPPHASASF

SEQ ID NO: 68573 - DNA, 1999 bp, Triticum aestivum
  misc_feature (1)..(1999): Ceres Seq. ID no. 13596100
acctagaacatcctaatcgaaaacacaagtttgttccgggaggccaccgtcgcggtctagttggtcgcgcaccctatatataccgagccgcccgccgaggccaactcacgcttccggctccggcgcctcggtccaactcacaccaaaggcgatcgacacgcgagtacgtctcgagatccatggagtctgcgccggcggcggccttcatggagcgggagcgcctcacggcggaggtgacattctccggggacgcgcaggcggcggcctcgtccgagggcgccgagcggctgcccaccagcatcatcatcaagatccggcgccgcctcccggacttcgcccgctccgtcaacctcaagtacgtcaggctcgggctccgccacggcggcagcctcacgtcctacctgcccatgctgtgcgtgccggtgctcgccgcggccgcctactccttcgtccgcctcgacgtcatctacctctccatcgacctgctcagctgcgtcgcctggctcggcaccgccatgctgctgctcaccgtctactacttcaagcggcctcgcccggtctacctcgtcgagttcgcgtgctacaagccggaggaccagaacaagatcaccaaggaggccttcctcgacatgaccgagagcaccggctgcttcaatgacgagacgctcgcgttccagaccaagatcaccacccgctccgcgctcggcgacgagacgtacctgccccccggcgtccaggcgcgcccgccgaggctcaacatggccgaggcgcggctggaggccgaggcggtcatgttcggctgcctggacgctctgttcgagtccaccgggatcgacccgcgccgcgacgtgcgcatcctcatcgtcaactgcagcctcttcaacccgacgccgtcgctggcgtccatgatcatccaccattacaagatgcgggaggacgtcaagtcgttcaacctgggcggcatggggtgcagcgccggcctcatcgccatcgacctcgccaaggacatgctccaggccaaccccaacgcgtacgcggtcgtcctcagcaccgagaacatcaccctcaactggtacttcgggaacgaccgctccatgctgctctccaactgcatcttccgcatgggcggcgcggcggctctgctctcgaaccggcgcgcggacgccgggcgcgccaagtaccgcctcctgcacacggtccggacgcacaagggcgccacggacgagtgcttcaagtgcgtgtaccagcgcgaggacgacgtgggcaaggtgggcgtgtcgctggcgcgggagctcatgacggtggccggcgacgcgctcaagaccaacatcaccacgctggggccgctggtgctgcccctgagcgagcagctcaagttcctcaagtcgctgatgatgcgccgggtgttccgcgccaagggcgtgcggccctacatccccaacttccggcgagccttcgagcacttctgcgtgcacgccggcgggcgggcggtgctggaggaggtgcagcgcagcctgagcctggaggacaaggacatggagccgagcaggtgcgcgctgcaccggttcggcaacaccagcagcagctcgctgtggtacgagctggcctacgccgaggccaagggccgggtgaagcgcggcaaccgcgtgtggcagatcggcttcgggtccgggttcaagtgcaacagcgcggtgtggcgcgcgctccgcgacgtgccggccgtgtcgcccccggggccggaggagaaggcctgcaacccgtgggcggactgcgtcgccaagtacccgcccaaggcctacgtctgacgatacattactacgccgccgccgcatgactccacacgaagattacatgattcttttctcctatactttttctgcatttcgtttcccgtaggtggctgtacctcaggttccatgggcgagcagtgccgttgttttcagcttttgtacttcaagtgtgaattataaacgacaaatatatacgacgaggtttcatt

SEQ ID NO: 68574 - protein, 600 aa, Triticum aestivum
  peptide (1)..(600): Ceres Seq. ID no. 13596101
LEHPNRKHKFVPGGHRRGLVGRAPYIYRAARRGQLTLPAPAPRSNSHQRRSTREYVSRSMESAPAAAFMERERLTAEVTFSGDAQAAASSEGAERLPTSIIIKIRRRLPDFARSVNLKYVRLGLRHGGSLTSYLPMLCVPVLAAAAYSFVRLDVIYLSIDLLSCVAWLGTAMLLLTVYYFKRPRPVYLVEFACYKPEDQNKITKEAFLDMTESTGCFNDETLAFQTKITTRSALGDETYLPPGVQARPPRLNMAEARLEAEAVMFGCLDALFESTGIDPRRDVRILIVNCSLFNPTPSLASMIIHHYKMREDVKSFNLGGMGCSAGLIAIDLAKDMLQANPNAYAVVLSTENITLNWYFGNDRSMLLSNCIFRMGGAAALLSNRRADAGRAKYRLLHTVRTHKGATDECFKCVYQREDDVGKVGVSLARELMTVAGDALKTNITTLGPLVLPLSEQLKFLKSLMMRRVFRAKGVRPYIPNFRRAFEHFCVHAGGRAVLEEVQRSLSLEDKDMEPSRCALHRFGNTSSSSLWYELAYAEAKGRVKRGNRVWQIGFGSGFKCNSAVWRALRDVPAVSPPGPEEKACNPWADCVAKYPPKAYV

SEQ ID NO: 68575 - protein, 541 aa, Triticum aestivum
  peptide (1)..(541): Ceres Seq. ID no. 13596102
MESAPAAAFMERERLTAEVTFSGDAQAAASSEGAERLPTSIIIKIRRRLPDFARSVNLKYVRLGLRHGGSLTSYLPMLCVPVLAAAAYSFVRLDVIYLSIDLLSCVAWLGTAMLLLTVYYFKRPRPVYLVEFACYKPEDQNKITKEAFLDMTESTGCFNDETLAFQTKITTRSALGDETYLPPGVQARPPRLNMAEARLEAEAVMFGCLDALFESTGIDPRRDVRILIVNCSLFNPTPSLASMIIHHYKMREDVKSFNLGGMGCSAGLIAIDLAKDMLQANPNAYAVVLSTENITLNWYFGNDRSMLLSNCIFRMGGAAALLSNRRADAGRAKYRLLHTVRTHKGATDECFKCVYQREDDVGKVGVSLARELMTVAGDALKTNITTLGPLVLPLSEQLKFLKSLMMRRVFRAKGVRPYIPNFRRAFEHFCVHAGGRAVLEEVQRSLSLEDKDMEPSRCALHRFGNTSSSSLWYELAYAEAKGRVKRGNRVWQIGFGSGFKCNSAVWRALRDVPAVSPPGPEEKACNPWADCVAKYPPKAYV

SEQ ID NO: 68576 - protein, 532 aa, Triticum aestivum
  peptide (1)..(532): Ceres Seq. ID no. 13596103
MERERLTAEVTFSGDAQAAASSEGAERLPTSIIIKIRRRLPDFARSVNLKYVRLGLRHGGSLTSYLPMLCVPVLAAAAYSFVRLDVIYLSIDLLSCVAWLGTAMLLLTVYYFKRPRPVYLVEFACYKPEDQNKITKEAFLDMTESTGCFNDETLAFQTKITTRSALGDETYLPPGVQARPPRLNMAEARLEAEAVMFGCLDALFESTGIDPRRDVRILIVNCSLFNPTPSLASMIIHHYKMREDVKSFNLGGMGCSAGLIAIDLAKDMLQANPNAYAVVLSTENITLNWYFGNDRSMLLSNCIFRMGGAAALLSNRRADAGRAKYRLLHTVRTHKGATDECFKCVYQREDDVGKVGVSLARELMTVAGDALKTNITTLGPLVLPLSEQLKFLKSLMMRRVFRAKGVRPYIPNFRRAFEHFCVHAGGRAVLEEVQRSLSLEDKDMEPSRCALHRFGNTSSSSLWYELAYAEAKGRVKRGNRVWQIGFGSGFKCNSAVWRALRDVPAVSPPGPEEKACNPWADCVAKYPPKAYV

SEQ ID NO: 68577 - DNA, 928 bp, Triticum aestivum
  misc_feature (1)..(928): Ceres Seq. ID no. 13591302
acacacacacgcctcacactctctcatcagatcagccacagagtcacacaagcactagcttcagctagccagcctcagccactccgggcattttcttgcatccacgacggcaatggccaccgctgatgtccagaacccgacggccgcgctgacggaggaggcgcccacggtggagacgccggtggccgccgaggaggccccgaagacggaggaggtccccgcgccggcggaggccgaggtcgaggcgtctgcccccgtcgaggttgaggcgaccaaggaggaggcgccgggcgccgctgagacggaggaggccaaggagaccgagccagcagctgcggccgagccggaggccgaggcgcccaaagagccagaggcgccagccgtggtcgagacagagaccaaggaggccgtggcagaggccgagccggcggtggtcgaggaggtgaaggaggaggccgcgcctgctgccgagccagaagcaccggccgtcgccgaggaagcaccggctgcagcggaggaggcccccgcggccgtggcagaggagccggccgccgcggtggccagcgtcagcgtgtgaggcgcgcacagagacagaggaggggctggctgggtcagcgtccacggcggcggccgtgtgctcctacgtggcacggccagtcagccagtggagtggagttctactttttactaggtgtggagtgggagtgctatgcgcggggtcgcgtgacgcgggctaaataaaagtgttgtcggggccagtcgacgcccagtgtcggtcagcggcagcgagcgagcgagcgacgcagtgcggtgccactctcgccggcccccgtggctggctgcgtctgcttagctgcagctttgtagtggtgtgtgtcacagtgtcagttccacctatgatcgatcggtatcctatccggtttgtgtc

SEQ ID NO: 68578 - protein, 154 aa, Triticum aestivum
  peptide (1)..(154): Ceres Seq. ID no. 13591303
MATADVQNPTAALTEEAPTVETPVAAEEAPKTEEVPAPAEAEVEASAPVEVEATKEEAPGAAETEEAKETEPAAAAEPEAEAPKEPEAPAVVETETKEAVAEAEPAVVEEVKEEAAPAAEPEAPAVAEEAPAAAEEAPAAVAEEPAAAVASVSV

SEQ ID NO: 68579 - DNA, 1407 bp, Triticum aestivum
  misc_feature (1)..(1407): Ceres Seq. ID no. 12613979
attgactcttttgcccctgcctctgaaactcaacgatttgggagttctccaccctcgccgccgccgccgcctgcatcccgggggagagcgagggtctgggtatggacgtggggtcctgcaacctcggcggcaacgccgacgcggtggagttctgcccgcaccgccccttccgccacatcctggcggccgccacgtacacgctgcaggagcaggcgggggaggagcagcagcagcaggaccgcgcgggcaccgtgtcgctcttctccgtcgacgctggcgctgaggacgagccccgacgtctccggctgctccacacggtggagaccgccggcgtcttcgacatgaagtggagccccacggcgccgctgctcgcgcaggccgacgcccacggccgcctcgtgctccggcgcctcgagcatgaagacggctcggacgaaggtgttgttctcacagacgtggttgctggaaacatttcttcatcaatgtgcttgtatgtcgactggaaccaaaatgccgattccctggccgttgcattatcagatggttcactgtctgtggttcccatgagagaggaccgcctggaggtatcagaacaatggactgctcatcagtatgaagtttggacatgttatttcgatcgtgcaagaccacacttgttgtacagtggatcggacgactgctcttacggttgctgggatttgcgggaaagcctatcgaatgctgtgtttcggaataagaagactcatactatgggtgtgtgttgcattgctcagaacccattggaggggaatatgctactcactggaagctatgatgaatttctcagagttcgggacatgagatcaatgatgaaacctgtgaacgagaagtccctgaatttaggaggtggtgtatggaggttgaaatatcatcctaatattgcagatgtagtattggctgcatgcatgcacaacggttttgccattgttaaagcaggggctggagatgctaccataatggaaacatattgcaagcatgagtccttagcatatggtgcagattggcagactagtgaagcagcggaacataacacaaattcttcagttattgctacttgttcattttatgaccgccttctccgtgtgtggcaaccagagaacctagtcaaccacccaacctctaaggcgtaaaacatcattatgcccagttgaagcatcaatatggcatggaccaacctattccctgaatgaaccaaattgatttcattcaggtagctctttgaatttatgttaatttatttcaaatggtgagcttatagtagtatgatgtctaatttatagctaggcattcacagtaatcagtatttgttgtaagcttccacaaaactttgaagttatctgttcatgttatttgagcacaaactgtttt

SEQ ID NO: 68580 - protein, 355 aa, Triticum aestivum
  peptide (1)..(355): Ceres Seq. ID no. 12613980
MDVGSCNLGGNADAVEFCPHRPFRHILAAATYTLQEQAGEEQQQQDRAGTVSLFSVDAGAEDEPRRLRLLHTVETAGVFDMKWSPTAPLLAQADAHGRLVLRRLEHEDGSDEGVVLTDVVAGNISSSMCLYVDWNQNADSLAVALSDGSLSVVPMREDRLEVSEQWTAHQYEVWTCYFDRARPHLLYSGSDDCSYGCWDLRESLSNAVFRNKKTHTMGVCCIAQNPLEGNMLLTGSYDEFLRVRDMRSMMKPVNEKSLNLGGGVWRLKYHPNIADVVLAACMHNGFAIVKAGAGDATIMETYCKHESLAYGADWQTSEAAEHNTNSSVIATCSFYDRLLRVWQPENLVNHPTSKA

SEQ ID NO: 68581 - protein, 275 aa, Triticum aestivum
  peptide (1)..(275): Ceres Seq. ID no. 12613981
MKWSPTAPLLAQADAHGRLVLRRLEHEDGSDEGVVLTDVVAGNISSSMCLYVDWNQNADSLAVALSDGSLSVVPMREDRLEVSEQWTAHQYEVWTCYFDRARPHLLYSGSDDCSYGCWDLRESLSNAVFRNKKTHTMGVCCIAQNPLEGNMLLTGSYDEFLRVRDMRSMMKPVNEKSLNLGGGVWRLKYHPNIADVVLAACMHNGFAIVKAGAGDATIMETYCKHESLAYGADWQTSEAAEHNTNSSVIATCSFYDRLLRVWQPENLVNHPTSKA

SEQ ID NO: 68582 - protein, 228 aa, Triticum aestivum
  peptide (1)..(228): Ceres Seq. ID no. 12613982
MCLYVDWNQNADSLAVALSDGSLSVVPMREDRLEVSEQWTAHQYEVWTCYFDRARPHLLYSGSDDCSYGCWDLRESLSNAVFRNKKTHTMGVCCIAQNPLEGNMLLTGSYDEFLRVRDMRSMMKPVNEKSLNLGGGVWRLKYHPNIADVVLAACMHNGFAIVKAGAGDATIMETYCKHESLAYGADWQTSEAAEHNTNSSVIATCSFYDRLLRVWQPENLVNHPTSKA

SEQ ID NO: 68583 - DNA, 1043 bp, Triticum aestivum
  misc_feature (1)..(1043): Ceres Seq. ID no. 13654578
atctctctccccttcccgtccccgcttgctcctcctgctcctgccgatcgctcatggattccaagccccaagccccgccgtcggagggcgcggcgtacccgcgcatgtccccggaggacctcgcgccgccgccgccgccggtcgtggcgcccgcgggctccaacccctacgtgctgtcctcgccctcctccggaccgcccgccaagagcaccaaggagaatctgagggagatgttcggctcggtggggaagaggttcagcgaggccgcgcgcaagaccgagggcatcgccggcgacgtctggcagcacttgaaaactgggcctagcattacggatgctgcaatggggaggatcgctcaggtatccaaggtcatatcggaagggggatacgacaagatattccagcagacgtttgagtgcttgcctgacgagaagctcaagaaggcgtacgcgtgctacctctcgacctctcatggtccgataatgggcgtcttatacgtctccaccgccaagcttgcattctgtagtgacagccccgtggcatatgtcactgaggataatcagaccgcgtcagccatttacaagatagttgtacctgtacctcacctgagatcagtcactcctaccgcaagtcaacagaaccctgcggagaggtacatccaggtcgtttctgtcgataaccatgacttctggttcatgggcttcgtgaactatgacagcgctgtgaagtgtctccaggatgctgctcgtggtggcgcctagacatcacttccccgtcgcatgtatccgttgtgatggcccatgttgatgtctatagaccattcttgtgtattttggttcaaatttctggcttaaataagcagtgcattcatgtatcagtattcagtagtgtggatacttttctggcccaagtgtgttgtaaatatcagaggaatcttaagctttgtttgctgccctcattcttgcactgcaaattatgtgtattatgagccaaagatgctcctgccagtgccttgataacttgaggttagtgcatgcttcaac

SEQ ID NO: 68584 - protein, 252 aa, Triticum aestivum
  peptide (1)..(252): Ceres Seq. ID no. 13654579
LSPLPVPACSSCSCRSLMDSKPQAPPSEGAAYPRMSPEDLAPPPPPVVAPAGSNPYVLSSPSSGPPAKSTKENLREMFGSVGKRFSEAARKTEGIAGDVWQHLKTGPSITDAAMGRIAQVSKVISEGGYDKIFQQTFECLPDEKLKKAYACYLSTSHGPIMGVLYVSTAKLAFCSDSPVAYVTEDNQTASAIYKIVVPVPHLRSVTPTASQQNPAERYIQVVSVDNHDFWFMGFVNYDSAVKCLQDAARGGA

SEQ ID NO: 68585 - protein, 235 aa, Triticum aestivum
  peptide (1)..(235): Ceres Seq. ID no. 13654580
MDSKPQAPPSEGAAYPRMSPEDLAPPPPPVVAPAGSNPYVLSSPSSGPPAKSTKENLREMFGSVGKRFSEAARKTEGIAGDVWQHLKTGPSITDAAMGRIAQVSKVISEGGYDKIFQQTFECLPDEKLKKAYACYLSTSHGPIMGVLYVSTAKLAFCSDSPVAYVTEDNQTASAIYKIVVPVPHLRSVTPTASQQNPAERYIQVVSVDNHDFWFMGFVNYDSAVKCLQDAARGGA

SEQ ID NO: 68586 - protein, 218 aa, Triticum aestivum
  peptide (1)..(218): Ceres Seq. ID no. 13654581
MSPEDLAPPPPPVVAPAGSNPYVLSSPSSGPPAKSTKENLREMFGSVGKRFSEAARKTEGIAGDVWQHLKTGPSITDAAMGRIAQVSKVISEGGYDKIFQQTFECLPDEKLKKAYACYLSTSHGPIMGVLYVSTAKLAFCSDSPVAYVTEDNQTASAIYKIVVPVPHLRSVTPTASQQNPAERYIQVVSVDNHDFWFMGFVNYDSAVKCLQDAARGGA

SEQ ID NO: 68587 - DNA, 1360 bp, Triticum aestivum
  misc_feature (1)..(1360): Ceres Seq. ID no. 12614739
aaccgccgtccgccggccgattcgactcctcccgcgaagcgccgtccatcttcgccgcccgtgccatgtcgcgccccgccggcaatccctcgtacgccgccgagctcggcgctgccaagaaggccgtcgccctcgccgcccgcctatgccagacggtgcagcaggaaattgtgcaatcagacatccaatccaaggcggataagactcctgtgaccgtagctgattatggatctcaagtactggtaagtgttgtgttaaatatggaagtaacttctggttccttttctatggtggccgaggaggactcagaagacttgagaaaggatggcgctgaagaaattctggagcgcattactgatcttgtaaacaaaactctcgctgaggatggttcatacaaccttttattatctaaggaagctatcctctctgcaattgataccgggaagtccgagggaggtccatctggccgacattgggttctagatccaattgatgggactaaaggattcgtgagaggaggccaatatgccattgcactggcactgcttgatgaaggcagggttgtcttgggtgcgttgggatgtccaaatcttccttttacatcagtaagtaacctcagtggtagctcaacaggagatcaaactggggccctcttttcagcggcaatcggttgtggtgctgaagtacagtcgttagatggctctccaccacaaaagattagtttttgtaccatcgacaatccagccaatgcctcgttctttgaatcctatgaaggagcgcactcgatgcgtgattttactggctgtgtagtggagaaacttggtgtccaagctcctccagtcagaatagatagccaagcaaaatatggtgctctggcccgtggggatggtgccatttactggcgttttccgcacgagggttacagggaaacgatatgggatcatgcagccggctcaattgtcgtcacagaagctggaggtgtagttaaagatgcctcaggaaacgatctcgatttctcgaaaggcagatttcttgatcgtgacacaggcatcattgctacaaataaacagttgatgccatcagtcctgaagtgtgtccaggaggcaatcaaggagaaaaaacaggcctcttccccattgtagaaggttcttgaaccttccctgttgtggaagttggattggtccaaaataatgatcgctatgctactccttattcatttgttcacactgtttatgtgtaactggccttttattggaaataaatacaacccttgttatacaatatctgtacatatccaaggagtggctgataggcagccatgacctgaaagaaactgaataaagatagaaatttcctgcgg

SEQ ID NO: 68588 - protein, 379 aa, Triticum aestivum
  peptide (1)..(379): Ceres Seq. ID no. 12614740
PPSAGRFDSSREAPSIFAARAMSRPAGNPSYAAELGAAKKAVALAARLCQTVQQEIVQSDIQSKADKTPVTVADYGSQVLVSVVLNMEVTSGSFSMVAEEDSEDLRKDGAEEILERITDLVNKTLAEDGSYNLLLSKEAILSAIDTGKSEGGPSGRHWVLDPIDGTKGFVRGGQYAIALALLDEGRVVLGALGCPNLPFTSVSNLSGSSTGDQTGALFSAAIGCGAEVQSLDGSPPQKISFCTIDNPANASFFESYEGAHSMRDFTGCVVEKLGVQAPPVRIDSQAKYGALARGDGAIYWRFPHEGYRETIWDHAAGSIVVTEAGGVVKDASGNDLDFSKGRFLDRDTGIIATNKQLMPSVLKCVQEAIKEKKQASSPL

SEQ ID NO: 68589 - protein, 358 aa, Triticum aestivum
  peptide (1)..(358): Ceres Seq. ID no. 12614741
MSRPAGNPSYAAELGAAKKAVALAARLCQTVQQEIVQSDIQSKADKTPVTVADYGSQVLVSVVLNMEVTSGSFSMVAEEDSEDLRKDGAEEILERITDLVNKTLAEDGSYNLLLSKEAILSAIDTGKSEGGPSGRHWVLDPIDGTKGFVRGGQYAIALALLDEGRVVLGALGCPNLPFTSVSNLSGSSTGDQTGALFSAAIGCGAEVQSLDGSPPQKISFCTIDNPANASFFESYEGAHSMRDFTGCVVEKLGVQAPPVRIDSQAKYGALARGDGAIYWRFPHEGYRETIWDHAAGSIVVTEAGGVVKDASGNDLDFSKGRFLDRDTGIIATNKQLMPSVLKCVQEAIKEKKQASSPL

SEQ ID NO: 68590 - protein, 293 aa, Triticum aestivum
  peptide (1)..(293): Ceres Seq. ID no. 12614742
MEVTSGSFSMVAEEDSEDLRKDGAEEILERITDLVNKTLAEDGSYNLLLSKEAILSAIDTGKSEGGPSGRHWVLDPIDGTKGFVRGGQYAIALALLDEGRVVLGALGCPNLPFTSVSNLSGSSTGDQTGALFSAAIGCGAEVQSLDGSPPQKISFCTIDNPANASFFESYEGAHSMRDFTGCVVEKLGVQAPPVRIDSQAKYGALARGDGAIYWRFPHEGYRETIWDHAAGSIVVTEAGGVVKDASGNDLDFSKGRFLDRDTGIIATNKQLMPSVLKCVQEAIKEKKQASSPL

SEQ ID NO: 68591 - DNA, 1235 bp, Triticum aestivum
  misc_feature (1)..(1235): Ceres Seq. ID no. 13596108
tcctcttcctctcaggcgcccacctcctcccctgcctgcggctcaagcttccgttcccctccaggcctcgcgcgcagaggcagggcggcggcgttcagttgtcttctcggcggcgggcgggcaggcatgggcgccagcgggggcggggaagacaagcccttcaatttcctccagatcctctgcgagggcgtcatagccggaggagctgccggggtcgtggttgaaacggctctgtaccccatcgacaccatcaagaccaggcttcaggctgctcgagctggaagtcaaatccaatggaaaggcctgtattccggactaggtggaaatcttgtcggtgttctcccggcttctgctctgtttgtgggaatatatgagccaactaaacggaagctactggacatgtttcctgaaaatttgagtgctgttgctcatcttactgcaggtgctgttggagggttgggtgcttctctcattcgtgttcccacagaggtggtcaaacaaaggatgcaaactggtcaattcaggactgcgcctgatgctgttcgtctcatagttgccaaggaaggatttagaggtctttttgctggttatggttcatttttacttcgagatcttccgtttgatgccattcaattctgcatatatgagcaacttcgaattggttacaagcttatggcaaagagggagctgaaggatccagagaatgcactaattggtgcttttgccggtgcgattactggcgctataacgacccccctcgatgttctgaagacaaggttgatgattcaggggcaaacgaagcaatactccggaatcgtaagctgtgctaagacgatcttgagagaggaaggcccaggggcattcttgaagggcatcgagccgcgagttctgtggatcggcatcggtgggtccatcttcttcggcgtgctggagaagaccaagtcggtgctcgctgagcggagcagccgcaaggctgcgctggcggagaaggacgagtgaaccaaccgaccaaaccaactgtgcatcctatgctgactcactctacaccattacccgttccttaaacctgaagttttgctccaagtttatgtggtgggctttgcatttctcgttccagaactataaggcatacaatcagtttcaagagtctgttttgacgtcggcgatggttatgatcctttatgagtccctgtaaacattactctcctttaataaagtttagcagattgttcttc

SEQ ID NO: 68592 - protein, 332 aa, Triticum aestivum
  peptide (1)..(332): Ceres Seq. ID no. 15221774
SSSSQAPTSSPACGSSFRSPPGLARRGRAAAFSCLLGGGRAGMGASGGGEDKPFNFLQILCEGVIAGGAAGVVVETALYPIDTIKTRLQAARAGSQIQWKGLYSGLGGNLVGVLPASALFVGIYEPTKRKLLDMFPENLSAVAHLTAGAVGGLGASLIRVPTEVVKQRMQTGQFRTAPDAVRLIVAKEGFRGLFAGYGSFLLRDLPFDAIQFCIYEQLRIGYKLMAKRELKDPENALIGAFAGAITGAITTPLDVLKTRLMIQGQTKQYSGIVSCAKTILREEGPGAFLKGIEPRVLWIGIGGSIFFGVLEKTKSVLAERSSRKAALAEKDE

SEQ ID NO: 68593 - protein, 290 aa, Triticum aestivum
  peptide (1)..(290): Ceres Seq. ID no. 15221775
MGASGGGEDKPFNFLQILCEGVIAGGAAGVVVETALYPIDTIKTRLQAARAGSQIQWKGLYSGLGGNLVGVLPASALFVGIYEPTKRKLLDMFPENLSAVAHLTAGAVGGLGASLIRVPTEVVKQRMQTGQFRTAPDAVRLIVAKEGFRGLFAGYGSFLLRDLPFDAIQFCIYEQLRIGYKLMAKRELKDPENALIGAFAGAITGAITTPLDVLKTRLMIQGQTKQYSGIVSCAKTILREEGPGAFLKGIEPRVLWIGIGGSIFFGVLEKTKSVLAERSSRKAALAEKDE

SEQ ID NO: 68594 - protein, 199 aa, Triticum aestivum
  peptide (1)..(199): Ceres Seq. ID no. 15221776
MFPENLSAVAHLTAGAVGGLGASLIRVPTEVVKQRMQTGQFRTAPDAVRLIVAKEGFRGLFAGYGSFLLRDLPFDAIQFCIYEQLRIGYKLMAKRELKDPENALIGAFAGAITGAITTPLDVLKTRLMIQGQTKQYSGIVSCAKTILREEGPGAFLKGIEPRVLWIGIGGSIFFGVLEKTKSVLAERSSRKAALAEKDE

SEQ ID NO: 68595 - DNA, 1684 bp, Triticum aestivum
  misc_feature (1)..(1684): Ceres Seq. ID no. 14303557
caccctcccccgctcctcctcctcgggctccgccgcccccgcctccgcctccccgaatcccagccctagcggccggcgagcgcggcgatgggcgccgtcgcctccacggtggcggcgcgcttcgccttcttcccgccctccccgccgtcgtacggcgtcgagcccccgccctcgccggccgcggccgccgcggacggcgcggtggtggagctcagcggggtgccccggcggggcggcgtggaggcgcggcggctgccgaccaagcgcggctcggaggtggtggccatgtacgtgcgccagcccggggcgcgcctcacgctgctctactcccacggcaacgcggccgacctgggccagatgtacgagctcttcgtcgagctcagctcgcacctcaacgtcaacctcatgggttatgattattctggatatgggcaatcatctgggaagccaagtgagcagaacacttatgcagacatagaggccgcttataggtgtctcatagaaacttatggggcctccgaggaaaacatcattctgtatggtcaatcagttggcagtggccctactttagatttggcatctcgtttgcctcatttgagagcagtggttctacatagcccaatttcgtctggcttgagagtaatgtatcctgtgaaacatacatactggtttgacatatataagaacattgacaaagttgcattggtcaaatgccccgtgttagtaatccatggtacggctgatgatgttgttgactgttctcatgggagagcactgtgggaactatccaaagtgaagtatgagcctttgtgggtcaaaggtgggaaccattgtaatttggaactctatcccgaatacattaagcacctaaagaagttcatcacagccatagagaagtccccaccactgaaagatgattctccagaaagttcaggcccttcagatcttgaaacaggatctgaaagtatggagagttcaagaaaaagcacggatgtgagggacaaatcaaggtcaagcactgatcacaggcggagtacagatcgacgggagaaaccaaggagcagcatagataggaaggataaaggcagaaagagtgtagatcatcctgacaaaccacgggctagtgtggatcaatctgataagccacggaaaagcattgaccgctttggagggatgatgaggtcggttaaattgtgcaatattgactgcttcaaagtaacttccacttccgggagctgaaaatagtggaaggttagttttgatagtatctgtatttatttcatctgtataatctattcaattgggtgtttttagttttgctgtggaaggtgtattgatttgggtgagggttatgcacactgaattgtttcgtgagaagaaatgatcattcattcccgaccccctgagttttcaaagccattcatttggcacatcaacaatgctactcccacggagtatgaagcaacaccattgttacactgtacataagttgttgtatcattacactgtcttagtttttctttttcatagaaacatttgatagataactaaactgggaatttgtgtcttccctctggaaagaagttctcttcaaaaatggatttctgtcacttgattgctttgtcatggagcttgaacttgaaatgaatcactggatcattcaatgtaatcatcatctttgttc

SEQ ID NO: 68596 - protein, 383 aa, Triticum aestivum
  peptide (1)..(383): Ceres Seq. ID no. 14303558
MGAVASTVAARFAFFPPSPPSYGVEPPPSPAAAAADGAVVELSGVPRRGGVEARRLPTKRGSEVVAMYVRQPGARLTLLYSHGNAADLGQMYELFVELSSHLNVNLMGYDYSGYGQSSGKPSEQNTYADIEAAYRCLIETYGASEENIILYGQSVGSGPTLDLASRLPHLRAVVLHSPISSGLRVMYPVKHTYWFDIYKNIDKVALVKCPVLVIHGTADDVVDCSHGRALWELSKVKYEPLWVKGGNHCNLELYPEYIKHLKKFITAIEKSPPLKDDSPESSGPSDLETGSESMESSRKSTDVRDKSRSSTDHRRSTDRREKPRSSIDRKDKGRKSVDHPDKPRASVDQSDKPRKSIDRFGGMMRSVKLCNIDCFKVTSTSGS

SEQ ID NO: 68597 - protein, 317 aa, Triticum aestivum
  peptide (1)..(317): Ceres Seq. ID no. 14303559
MYVRQPGARLTLLYSHGNAADLGQMYELFVELSSHLNVNLMGYDYSGYGQSSGKPSEQNTYADIEAAYRCLIETYGASEENIILYGQSVGSGPTLDLASRLPHLRAVVLHSPISSGLRVMYPVKHTYWFDIYKNIDKVALVKCPVLVIHGTADDVVDCSHGRALWELSKVKYEPLWVKGGNHCNLELYPEYIKHLKKFITAIEKSPPLKDDSPESSGPSDLETGSESMESSRKSTDVRDKSRSSTDHRRSTDRREKPRSSIDRKDKGRKSVDHPDKPRASVDQSDKPRKSIDRFGGMMRSVKLCNIDCFKVTSTSGS

SEQ ID NO: 68598 - protein, 293 aa, Triticum aestivum
  peptide (1)..(293): Ceres Seq. ID no. 14303560
MYELFVELSSHLNVNLMGYDYSGYGQSSGKPSEQNTYADIEAAYRCLIETYGASEENIILYGQSVGSGPTLDLASRLPHLRAVVLHSPISSGLRVMYPVKHTYWFDIYKNIDKVALVKCPVLVIHGTADDVVDCSHGRALWELSKVKYEPLWVKGGNHCNLELYPEYIKHLKKFITAIEKSPPLKDDSPESSGPSDLETGSESMESSRKSTDVRDKSRSSTDHRRSTDRREKPRSSIDRKDKGRKSVDHPDKPRASVDQSDKPRKSIDRFGGMMRSVKLCNIDCFKVTSTSGS

SEQ ID NO: 68599 - DNA, 1811 bp, Triticum aestivum
  misc_feature (1)..(1811): Ceres Seq. ID no. 13654583
atttctgccaaagtggaaccggggaggcagcgagactgggactggtgcgtagtggaggagctgatttctccaagcgggcagtggcaatggcgtgctacgccgctctcctgcaccagccgcccgcctcgccgtccccgtgcacctcaggccgcgccggctcctgccgtgtccgtccgcccccactcctccagcgccgagcccttcccctgtctgtgcgcgctcggatctccccccgctgctcctacgccgcagccggagaaagcgccggagcgggcgccggggaacagcccgcggcggcgctccggagagtgctggggacgccgggcgcccaccaggcgcccgcttgctacgacgcgctcagcgcccgcctcgtcgagcgcgcggggttcagggcctgcttcacgagcggcttctcaatatctgctgcaaggcttggattaccagatgttggtctcatctcctatggtgaaatgatagatcaagggcgtttaatcactgaagcagtatcgatacctgtcattggtgatgctgataatggttatggaaactgtatgaatgtcaagaggacagtgaaaggatttattaatgctggttttgctggaattattcttgaagatcaggtgtcaccaaaagcatgtggacatacacaaggaaggaaagttgtctcaagagaggaagcgattatgcacataaaagccgctgtagatgccaggaaggagagtggctctgacattgttattgtggcaaggacagattctcgtcaagctttgtctcttgatgaagcgttgtggagagcacgagcttttgctgatgctggagcagatgttctatttattgatgcccttgcctcaagggaagagatgatggcgttttgtgcagtttcacctggagttccaaaaatggccaacatgttagaaggtggtggtaaaactcctatattgagccctcttgaacttgaagaaattggttacaaaatcatagcctacccattatctctaattggggtatcaatgcgtgcaatggaggatgctcttgttgctataaaaggtggccgcatacctcctccaagtagcttgccatcatttgaggagatcaaggatacgctagggtttaaccgttattatgaagaggaaaagcgatacgttgcatcaccagctcaatcatccttttggagtgttataggtaattatgattatacaagtgaagctagcagttcaggagacaccaagtccaggactgagaaatcacaagaacctattattgacatactgccacagctctatgatcctggttccgctggaggcagaggtccttcaggtgggatgtggtcccgcacacttcgattgaagattacaggaagagatggggtccagaaaattgatgccaggatacctgctggattcttagaagggatgacaaaagttattccaggcctggctggaactaatatcatggaaaggcttcggaacgcgcctatggattcggacaacccccagaacgggcagatactgcttgattttgaggacggcaggggagataggatccaggttttcatcgcgtgagcgtgttgttcgttgttgtcgtcccggcatccgatactcagacgagcgtcatgttccgtttgagtagtataagcaaatggctgttacttggtagtagttggtaggcccttgctgcctacatccagttatgtaaactccgcatcatactgcatgcatccagaactagtcttcctgtaaccttcctcgtctcatggatgcggaagttaaattcgaataaaacaagttatggaaaaggtattcctctatgcg

SEQ ID NO: 68600 - protein, 519 aa, Triticum aestivum
  peptide (1)..(519): Ceres Seq. ID no. 13654584
FCQSGTGEAARLGLVRSGGADFSKRAVAMACYAALLHQPPASPSPCTSGRAGSCRVRPPPLLQRRALPLSVRARISPRCSYAAAGESAGAGAGEQPAAALRRVLGTPGAHQAPACYDALSARLVERAGFRACFTSGFSISAARLGLPDVGLISYGEMIDQGRLITEAVSIPVIGDADNGYGNCMNVKRTVKGFINAGFAGIILEDQVSPKACGHTQGRKVVSREEAIMHIKAAVDARKESGSDIVIVARTDSRQALSLDEALWRARAFADAGADVLFIDALASREEMMAFCAVSPGVPKMANMLEGGGKTPILSPLELEEIGYKIIAYPLSLIGVSMRAMEDALVAIKGGRIPPPSSLPSFEEIKDTLGFNRYYEEEKRYVASPAQSSFWSVIGNYDYTSEASSSGDTKSRTEKSQEPIIDILPQLYDPGSAGGRGPSGGMWSRTLRLKITGRDGVQKIDARIPAGFLEGMTKVIPGLAGTNIMERLRNAPMDSDNPQNGQILLDFEDGRGDRIQVFIA

SEQ ID NO: 68601 - protein, 491 aa, Triticum aestivum
  peptide (1)..(491): Ceres Seq. ID no. 13654585
MACYAALLHQPPASPSPCTSGRAGSCRVRPPPLLQRRALPLSVRARISPRCSYAAAGESAGAGAGEQPAAALRRVLGTPGAHQAPACYDALSARLVERAGFRACFTSGFSISAARLGLPDVGLISYGEMIDQGRLITEAVSIPVIGDADNGYGNCMNVKRTVKGFINAGFAGIILEDQVSPKACGHTQGRKVVSREEAIMHIKAAVDARKESGSDIVIVARTDSRQALSLDEALWRARAFADAGADVLFIDALASREEMMAFCAVSPGVPKMANMLEGGGKTPILSPLELEEIGYKIIAYPLSLIGVSMRAMEDALVAIKGGRIPPPSSLPSFEEIKDTLGFNRYYEEEKRYVASPAQSSFWSVIGNYDYTSEASSSGDTKSRTEKSQEPIIDILPQLYDPGSAGGRGPSGGMWSRTLRLKITGRDGVQKIDARIPAGFLEGMTKVIPGLAGTNIMERLRNAPMDSDNPQNGQILLDFEDGRGDRIQVFIA

SEQ ID NO: 68602 - protein, 363 aa, Triticum aestivum
  peptide (1)..(363): Ceres Seq. ID no. 13654586
MIDQGRLITEAVSIPVIGDADNGYGNCMNVKRTVKGFINAGFAGIILEDQVSPKACGHTQGRKVVSREEAIMHIKAAVDARKESGSDIVIVARTDSRQALSLDEALWRARAFADAGADVLFIDALASREEMMAFCAVSPGVPKMANMLEGGGKTPILSPLELEEIGYKIIAYPLSLIGVSMRAMEDALVAIKGGRIPPPSSLPSFEEIKDTLGFNRYYEEEKRYVASPAQSSFWSVIGNYDYTSEASSSGDTKSRTEKSQEPIIDILPQLYDPGSAGGRGPSGGMWSRTLRLKITGRDGVQKIDARIPAGFLEGMTKVIPGLAGTNIMERLRNAPMDSDNPQNGQILLDFEDGRGDRIQVFIA

SEQ ID NO: 68603 - DNA, 1624 bp, Triticum aestivum
  misc_feature (1)..(1624): Ceres Seq. ID no. 14303592
cataagcgcccagccatcggtcagctcacaccaccctagctctccggcgaacgaccgataagtacccgtcgggatgggcgaggcaagctccgacgccgccgccaaggctgcggccgtgcgggctgtcgcagtctcccgggtcgcgccctcggtgctgggggaggtgcagcgcgttgaactttccttcttcgattcgccgtgggtcgtgctgccgccgatccagcgggtgttcctgtacgagcttggggatgccgacggcttcccgacggtggtggagcggctcaagcgcgctctcgcggacaccctggcgcactacctgcccctggcggggatgctcgagtacgcggtggagaccggggacgccttcgtggactgcactcacgccggggtcgccttcctggaggccgagggcgatatggacgtgcagcgtctagccggcgacgaggcgcacgacatcctggcattcctgagcctggtgccggagctggatgcccgggtgctcccggcgcccgtgctgtcagtgcaggccactcgtctaagcggcggcctggcggtgggcctgtccgtgcaccacgtagtcgcggacggacgcgccgtttggcgattcatggaggcctggtcttccgcttcccgcgagggctccccggtcaccaaggtcctcggcccgccgcactacggccgggaggtcatccagcaccccaacggcgacgagctcgcccgcgacatgctaaagaccgtcgcgcccaatctccctgtggtgagggggcagtacgatttcagccagcggttcctgcgggcgcgccggacattctacctcggcgccgacgacatccagtcgctcaggcggcggatcgacgacctcgcctcggacgagtctgctaccggtggcgacgcgcccaagccgaaaccggtgtcgacgttcgtggcgctggcggcactgagctggacggcgttcgttcgatccaaggggctcggcgcaggggacgacacgtacctcatgttcctcgccgacctgcgctcccgcctcgacccgccagtcagcgaggcttacctgggcaactgcgtgcgcgcgtgcctggcgagctgcgccgacgcggcggacctcctcggccagtccggcatcctccgcgcggcgcgggccgtgcaggcggcggtggccgagatggaggcggcgccgctgtccgggacggacaaggggtggatgcagatgctgatgcggctgccgtttcagcggatgaccaacgtggcggcgagccctcggttccgggcctacgaggcggccgacttcgggttcgggaagcccgcgcgcgtggagctggtgtccatgaaccacgacggcgagatggtgctagtcggcggccggcgcgacggcgaggtgcaagcctccgtgtccatcgacccggcgcacatggacgcattcaaggcctgcatcctcggctagacaaactcaaaaaattagctagtagccacgtccgtacgccgtcgaacttgcatagatccaataaatacaacaagtagcatgagtcatgcaccaattctgtttccattcctgtaatgatcgatcgtttatcgtcgtttcgactatttgggttctagttcaccggatgaattgtcacaagaaagg

SEQ ID NO: 68604 - protein, 455 aa, Triticum aestivum
  peptide (1)..(455): Ceres Seq. ID no. 14303593
MGEASSDAAAKAAAVRAVAVSRVAPSVLGEVQRVELSFFDSPWVVLPPIQRVFLYELGDADGFPTVVERLKRALADTLAHYLPLAGMLEYAVETGDAFVDCTHAGVAFLEAEGDMDVQRLAGDEAHDILAFLSLVPELDARVLPAPVLSVQATRLSGGLAVGLSVHHVVADGRAVWRFMEAWSSASREGSPVTKVLGPPHYGREVIQHPNGDELARDMLKTVAPNLPVVRGQYDFSQRFLRARRTFYLGADDIQSLRRRIDDLASDESATGGDAPKPKPVSTFVALAALSWTAFVRSKGLGAGDDTYLMFLADLRSRLDPPVSEAYLGNCVRACLASCADAADLLGQSGILRAARAVQAAVAEMEAAPLSGTDKGWMQMLMRLPFQRMTNVAASPRFRAYEAADFGFGKPARVELVSMNHDGEMVLVGGRRDGEVQASVSIDPAHMDAFKACILG

SEQ ID NO: 68605 - protein, 369 aa, Triticum aestivum
  peptide (1)..(369): Ceres Seq. ID no. 14303594
MLEYAVETGDAFVDCTHAGVAFLEAEGDMDVQRLAGDEAHDILAFLSLVPELDARVLPAPVLSVQATRLSGGLAVGLSVHHVVADGRAVWRFMEAWSSASREGSPVTKVLGPPHYGREVIQHPNGDELARDMLKTVAPNLPVVRGQYDFSQRFLRARRTFYLGADDIQSLRRRIDDLASDESATGGDAPKPKPVSTFVALAALSWTAFVRSKGLGAGDDTYLMFLADLRSRLDPPVSEAYLGNCVRACLASCADAADLLGQSGILRAARAVQAAVAEMEAAPLSGTDKGWMQMLMRLPFQRMTNVAASPRFRAYEAADFGFGKPARVELVSMNHDGEMVLVGGRRDGEVQASVSIDPAHMDAFKACILG

SEQ ID NO: 68606 - protein, 341 aa, Triticum aestivum
  peptide (1)..(341): Ceres Seq. ID no. 14303595
MDVQRLAGDEAHDILAFLSLVPELDARVLPAPVLSVQATRLSGGLAVGLSVHHVVADGRAVWRFMEAWSSASREGSPVTKVLGPPHYGREVIQHPNGDELARDMLKTVAPNLPVVRGQYDFSQRFLRARRTFYLGADDIQSLRRRIDDLASDESATGGDAPKPKPVSTFVALAALSWTAFVRSKGLGAGDDTYLMFLADLRSRLDPPVSEAYLGNCVRACLASCADAADLLGQSGILRAARAVQAAVAEMEAAPLSGTDKGWMQMLMRLPFQRMTNVAASPRFRAYEAADFGFGKPARVELVSMNHDGEMVLVGGRRDGEVQASVSIDPAHMDAFKACILG

SEQ ID NO: 68607 - DNA, 1287 bp, Triticum aestivum
  misc_feature (1)..(1287): Ceres Seq. ID no. 14302267
accgcggcccaacaatctcaccaaccggagcctagcaaactttcaacacgttggcccgctactcttctcctgtcctgtccaccagccgaaactcagagctccgagctccgcctctgactccacctccggccacggcgggcaccatggcgccaacggtggagatcaggaatctcaccttcacctacccgggaatcgacggcaagccgccgcccggagcaccgcccctcatcgaggacgtctgcttctccctcgaagccggtcagcgctgccttctcgtcggctccaacggcgcaggtaagacaacgatactgaagatactgggcgggaagcacatggtggatccgagcatggttggggtcctgggaaggtcggccttccacgacacggcgcttacctcctccggagacctctgctaccttggcggcgagtggaggcgcgatgttgcctttgccggctaccaggtgaatatacagatggacatttcggcagagaaaatgctatttggtgtcactggcgttgatcctcagagaagagatgagcttatcaagattttggatgttgaccttacctggcggatgcacaaggcatcagatggtcagaggagaagagtccagatttgcatgggacttctcaagccattcaaggttcttcttcttgatgagataacagttgatcttgatgtgttggcaagagcaaatctgttgacatatctaaagaaggaatgtgcggaacaaggtgcaacaattatctatgccacacatatcttcgatggcctggatgactggccaactcacattgtctatgttgctcatgggaagttgcaactagcgctgccattagaaaaggtgaaagaaatgagccagttatcgctcatgagaacagtagagcgctggctgaggaaagagagggacgaagacaggaggaagagaaaggagcggaaggagaaaggcctcccggcattcgacaaggtcattgaggggagcagagtagtgaacaacgggtgggcagcaggaaggctcacttcgacgatagccggggaagataacttttctttcagttcaaacagcgttcttcggtagtaatcccacactgcactttggttcttgagatgatgaataacagtcctatagcaccacactcgagggattttggcggtaacagcaacattcttgcacaaaaggaacagagaatttgacaaaccatgcacccctgctgcatgtatacgacaatgtactctgaatctatgatactgggcgtcgattattattgtttgattttttttctgcg

SEQ ID NO: 68608 - protein, 311 aa, Triticum aestivum
  peptide (1)..(311): Ceres Seq. ID no. 14302268
MAPTVEIRNLTFTYPGIDGKPPPGAPPLIEDVCFSLEAGQRCLLVGSNGAGKTTILKILGGKHMVDPSMVGVLGRSAFHDTALTSSGDLCYLGGEWRRDVAFAGYQVNIQMDISAEKMLFGVTGVDPQRRDELIKILDVDLTWRMHKASDGQRRRVQICMGLLKPFKVLLLDEITVDLDVLARANLLTYLKKECAEQGATIIYATHIFDGLDDWPTHIVYVAHGKLQLALPLEKVKEMSQLSLMRTVERWLRKERDEDRRKRKERKEKGLPAFDKVIEGSRVVNNGWAAGRLTSTIAGEDNFSFSSNSVLR

SEQ ID NO: 68609 - protein, 248 aa, Triticum aestivum
  peptide (1)..(248): Ceres Seq. ID no. 14302269
MVDPSMVGVLGRSAFHDTALTSSGDLCYLGGEWRRDVAFAGYQVNIQMDISAEKMLFGVTGVDPQRRDELIKILDVDLTWRMHKASDGQRRRVQICMGLLKPFKVLLLDEITVDLDVLARANLLTYLKKECAEQGATIIYATHIFDGLDDWPTHIVYVAHGKLQLALPLEKVKEMSQLSLMRTVERWLRKERDEDRRKRKERKEKGLPAFDKVIEGSRVVNNGWAAGRLTSTIAGEDNFSFSSNSVLR

SEQ ID NO: 68610 - protein, 243 aa, Triticum aestivum
  peptide (1)..(243): Ceres Seq. ID no. 14302270
MVGVLGRSAFHDTALTSSGDLCYLGGEWRRDVAFAGYQVNIQMDISAEKMLFGVTGVDPQRRDELIKILDVDLTWRMHKASDGQRRRVQICMGLLKPFKVLLLDEITVDLDVLARANLLTYLKKECAEQGATIIYATHIFDGLDDWPTHIVYVAHGKLQLALPLEKVKEMSQLSLMRTVERWLRKERDEDRRKRKERKEKGLPAFDKVIEGSRVVNNGWAAGRLTSTIAGEDNFSFSSNSVLR

SEQ ID NO: 68611 - DNA, 1888 bp, Triticum aestivum
  misc_feature (1)..(1888): Ceres Seq. ID no. 13596398
actctcctctgcacatctctcctccccccctcccccacgacgcggcaaaaacagggaggagagagggcgagagagggagcccgagcccgaatccctgcgatccccccctcccggtcggaggatccggcgatcagccatgaacgagaaggcctccgtctccaaggagctcaacgccaggcacaagaagatattggaaggccttctgcggttgccggagaacagagaatgtgcagactgcaagtcaaagggtcctcgatgggcaagtgtcaatcttgggatcttcgtatgcatgcagtgttctggaattcatagaagccttggggtacacatatcaaaggtaaggtctgctactctggatacatggttgccagagcaagttgcatttattcaatcaatgggaaatgaaaaggcaaatggctattgggaagcagagctgccccctaattatgacagggttgggatagagaacttcatccgtgcaaaatacgaggacaagaggtggataccgaggaatggaacatcaaaactgccctctagtgctcgagatgagaagagctctgaatctcaggccagtcatgctaacaggggtgggcacgctcaaaaaccttcatttgagcaacatcgtgtttcaccagctgctacgaaaagaactgttccagtggcttctaggatgcacacgcaggcatcacctcagccaaaagcagaactaccagttcccaaggttgcttcgcctcctcagccagcaaaatctcctgctaaagttgatgtgacacccccaaaagttcatcagccatcggttgcaccccctcctaaagttgactatgccattgacctctttaacatgttatcgatggacggaacaactgagaaagaaccagtgtcatcttccaatgatgataatgcttgggatggcttccagtctgcagaaccagcacctaactccgagaaaaaggatactgctaagccagtagaaagtaaggcccagtctacatcgggaatcgaagacttatttaaagactcgccagctgtggcagcgtcttcagctccagttgcttccaaatcaaacccacagacagatatcatgagtctgtttgagaagtcgaatatggtatcaccatttgctatccatcagcagcagcttgcttttatgacccagcaacaagctttactgatggctgctcttaaatctggaaatgcaccccaaatggttcctgggaatgcaccccaaatggttcccgggaatgctagtgtgctaaatgctaatggttctaatgcccctaatggaagcttgccttcccatagctggccaaatctaggttatcagaaccctgcatctattccagcagcagcaccacaaaatggtgtcgccaaggctgggaacaacaatcaggacttcttttctggtaacttcggttttggttcgccgggcaagccagcaaatggggccacaaccgcaggtgctaacaagagcgcatccacccctacctcttctaccctgccctctcaatcaggcaaagagtacgatttttcctcattaacgcaaggaatgttctcgaagcgatgagtggcttgcaatacttggaaatggatgaggcctccattgggcgcagatttagggagaagttggggggaagcttgtacactgttttaccgaggcagctttgccaattgtggatacatagttacatcaccttgtgggccaacaagtgcggatatggcagaaaactgctcatgttgtttcctacagctgaatagtcgcattgttacagtgatgccaaagaacttcaaacagaggattccccttttctcttgttcagggtgtagttgcaataccatatgtcgattactttgtattgtacgccaataattttattccgttgtgttccat

SEQ ID NO: 68612 - protein, 520 aa, Triticum aestivum
  peptide (1)..(520): Ceres Seq. ID no. 15221860
LSSAHLSSPPPPRRGKNREERGREREPEPESLRSPPPGRRIRRSAMNEKASVSKELNARHKKILEGLLRLPENRECADCKSKGPRWASVNLGIFVCMQCSGIHRSLGVHISKVRSATLDTWLPEQVAFIQSMGNEKANGYWEAELPPNYDRVGIENFIRAKYEDKRWIPRNGTSKLPSSARDEKSSESQASHANRGGHAQKPSFEQHRVSPAATKRTVPVASRMHTQASPQPKAELPVPKVASPPQPAKSPAKVDVTPPKVHQPSVAPPPKVDYAIDLFNMLSMDGTTEKEPVSSSNDDNAWDGFQSAEPAPNSEKKDTAKPVESKAQSTSGIEDLFKDSPAVAASSAPVASKSNPQTDIMSLFEKSNMVSPFAIHQQQLAFMTQQQALLMAALKSGNAPQMVPGNAPQMVPGNASVLNANGSNAPNGSLPSHSWPNLGYQNPASIPAAAPQNGVAKAGNNNQDFFSGNFGFGSPGKPANGATTAGANKSASTPTSSTLPSQSGKEYDFSSLTQGMFSKR

SEQ ID NO: 68613 - protein, 475 aa, Triticum aestivum
  peptide (1)..(475): Ceres Seq. ID no. 15221861
MNEKASVSKELNARHKKILEGLLRLPENRECADCKSKGPRWASVNLGIFVCMQCSGIHRSLGVHISKVRSATLDTWLPEQVAFIQSMGNEKANGYWEAELPPNYDRVGIENFIRAKYEDKRWIPRNGTSKLPSSARDEKSSESQASHANRGGHAQKPSFEQHRVSPAATKRTVPVASRMHTQASPQPKAELPVPKVASPPQPAKSPAKVDVTPPKVHQPSVAPPPKVDYAIDLFNMLSMDGTTEKEPVSSSNDDNAWDGFQSAEPAPNSEKKDTAKPVESKAQSTSGIEDLFKDSPAVAASSAPVASKSNPQTDIMSLFEKSNMVSPFAIHQQQLAFMTQQQALLMAALKSGNAPQMVPGNAPQMVPGNASVLNANGSNAPNGSLPSHSWPNLGYQNPASIPAAAPQNGVAKAGNNNQDFFSGNFGFGSPGKPANGATTAGANKSASTPTSSTLPSQSGKEYDFSSLTQGMFSKR

SEQ ID NO: 68614 - protein, 424 aa, Triticum aestivum
  peptide (1)..(424): Ceres Seq. ID no. 15221862
MQCSGIHRSLGVHISKVRSATLDTWLPEQVAFIQSMGNEKANGYWEAELPPNYDRVGIENFIRAKYEDKRWIPRNGTSKLPSSARDEKSSESQASHANRGGHAQKPSFEQHRVSPAATKRTVPVASRMHTQASPQPKAELPVPKVASPPQPAKSPAKVDVTPPKVHQPSVAPPPKVDYAIDLFNMLSMDGTTEKEPVSSSNDDNAWDGFQSAEPAPNSEKKDTAKPVESKAQSTSGIEDLFKDSPAVAASSAPVASKSNPQTDIMSLFEKSNMVSPFAIHQQQLAFMTQQQALLMAALKSGNAPQMVPGNAPQMVPGNASVLNANGSNAPNGSLPSHSWPNLGYQNPASIPAAAPQNGVAKAGNNNQDFFSGNFGFGSPGKPANGATTAGANKSASTPTSSTLPSQSGKEYDFSSLTQGMFSKR

SEQ ID NO: 68615 - DNA, 1092 bp, Triticum aestivum
  misc_feature (1)..(1092): Ceres Seq. ID no. 13654590
ggacgaccccgacgcgccaccacctgctcctcccggcggctgcctgctcgactcgattccccaaccgcagcagggtcaacgacagaacctatcgcgcgatgggcttgggactgagattgccgttcttcctactcctcttgctgctggtcagcctgggagccgcacaaggccggagcacagtttttcttgatatccaggaggaggctcgaggctctggtcaaatcatcaaggatcaactaactttgagcaaaattcccgtgcgtgttgagaggggcagcccactatgcccagcttgtgagaagtttacagaggaagctcttagctatcttagtcagaaacaatcacaagataagatgatggaggtccttcatgaagcttgttctcagacattctcgttggaaaagaagtgtgttgagtttgtggactcctatgcaactctcttatttgccaagatcgctgagatcaagccagaagagttctgcaaacgaaatggcctctgcagggacaatgctcttctgtctggtgtgagaagtgagagcacatgcgtgttttgccaccacctcatggatgaagttttgtccaaactgaaggatcctgatgctgagtttgagataattcaaattctcctcaaggagtgcaagaagatcgaaggtcatgaacagcagtgcaaacgactggtcctgcaatacatccctctcatcctggtgaacggagagaagttcctcgagaagaacgatatatgtaccattgtccaagcgtgcgatgctggcaaaaagacaatggtcgggccattctccgaggagggtttgttgcgtgatgcatgaaggtagaaagaccacaccaggctgcgtaaacccagacgaaacattatgcactagttcttccttgttgtacataggtgtccaaaaattcgtctggcttttgccttgtactgctgctcctgcattctgtggatgctttgtattataaagggagcggcatgacaaacagtttattatgtcaacttgaagccgtgttgtacttattacttcgtcagtgtttaatttgtaatgacatttgaacaactgtagatactaaatcgagtttcagtcg

SEQ ID NO: 68616 - protein, 273 aa, Triticum aestivum
  peptide (1)..(273): Ceres Seq. ID no. 13654591
TTPTRHHLLLPAAACSTRFPNRSRVNDRTYRAMGLGLRLPFFLLLLLLVSLGAAQGRSTVFLDIQEEARGSGQIIKDQLTLSKIPVRVERGSPLCPACEKFTEEALSYLSQKQSQDKMMEVLHEACSQTFSLEKKCVEFVDSYATLLFAKIAEIKPEEFCKRNGLCRDNALLSGVRSESTCVFCHHLMDEVLSKLKDPDAEFEIIQILLKECKKIEGHEQQCKRLVLQYIPLILVNGEKFLEKNDICTIVQACDAGKKTMVGPFSEEGLLRDA

SEQ ID NO: 68617 - protein, 241 aa, Triticum aestivum
  peptide (1)..(241): Ceres Seq. ID no. 13654592
MGLGLRLPFFLLLLLLVSLGAAQGRSTVFLDIQEEARGSGQIIKDQLTLSKIPVRVERGSPLCPACEKFTEEALSYLSQKQSQDKMMEVLHEACSQTFSLEKKCVEFVDSYATLLFAKIAEIKPEEFCKRNGLCRDNALLSGVRSESTCVFCHHLMDEVLSKLKDPDAEFEIIQILLKECKKIEGHEQQCKRLVLQYIPLILVNGEKFLEKNDICTIVQACDAGKKTMVGPFSEEGLLRDA

SEQ ID NO: 68618 - protein, 156 aa, Triticum aestivum
  peptide (1)..(156): Ceres Seq. ID no. 13654593
MMEVLHEACSQTFSLEKKCVEFVDSYATLLFAKIAEIKPEEFCKRNGLCRDNALLSGVRSESTCVFCHHLMDEVLSKLKDPDAEFEIIQILLKECKKIEGHEQQCKRLVLQYIPLILVNGEKFLEKNDICTIVQACDAGKKTMVGPFSEEGLLRDA

SEQ ID NO: 68619 - DNA, 1198 bp, Triticum aestivum
  misc_feature (1)..(1198): Ceres Seq. ID no. 13596109
aaagaaaaagtccacgccacctcactgcagggcacgccgtcgcgcggagccagccagggcggtcgccgccggccgcgaccatggccgacggcaagcgcagcgtcgcggagaccttctccagactccgggagcgcggcaagacggcattcatcccattcatcaccgccggtgaccctgatttggcgaccacatcaaaggcgcttaggatcctagactcctgcggctcaaacgtgatcgagctcggcgtgccctactcggatccgttagctgatggtccagtcattcaggctgcagcatcccgtgcgcttaagaaaggcactaagctcggttctgtcttggcgatgctcacggaggttataccagagctctcttgtccaatagttctcttcacatactacaacccgattctaaaaaatggggtgcgaaacttcatggctaagattaagcaagctggtgtacatggtcttgtcgtacctgatcttcctttggaggagacaacattgttgaggagcgaggccactatgcataacatagagctggtgctacttacaacaccaaccacaccaacagagaggatgaaggaaatcacaaaagcttcagaaggattcgtttatcttgtgagtgctgtcggagttacaggtgcacgctcaaatgtaaacttacgcgttgagcatcttcttaaggagatcaagcaggttacagacaaacctgtggctgttggctttggcatatcaactccagagcatgcgaagcagattgcgggctggggagcggatggtgtgattattggcagtgcgattgttagacagttgggcgaagccgcttctccggaagaaggactgagaagaatagaagagtacgccaagagcatcaaggcggctattccatgagatgggcagttccatcatgaacaagccaattagtagatcgtaagcatgtcgtttatcatctggtagtctgcttgatggacctggaatctgtagttcgtctggcatatttgattccagtgctcaaaacaattatatctttgtgtgttagaatcacaacatgaattaacaaggtaatctggaaatggtacgaagctcgatttctgttgtgaggaaacattgtgagatgtagtgttcttatgtggaaatatggaatgttagaatttggaaggacttgtcctgagaggagcaacaggataagtccatggtgc

SEQ ID NO: 68620 - protein, 295 aa, Triticum aestivum
  peptide (1)..(295): Ceres Seq. ID no. 15221777
RKSPRHLTAGHAVARSQPGRSPPAATMADGKRSVAETFSRLRERGKTAFIPFITAGDPDLATTSKALRILDSCGSNVIELGVPYSDPLADGPVIQAAASRALKKGTKLGSVLAMLTEVIPELSCPIVLFTYYNPILKNGVRNFMAKIKQAGVHGLVVPDLPLEETTLLRSEATMHNIELVLLTTPTTPTERMKEITKASEGFVYLVSAVGVTGARSNVNLRVEHLLKEIKQVTDKPVAVGFGISTPEHAKQIAGWGADGVIIGSAIVRQLGEAASPEEGLRRIEEYAKSIKAAIP

SEQ ID NO: 68621 - protein, 269 aa, Triticum aestivum
  peptide (1)..(269): Ceres Seq. ID no. 15221778
MADGKRSVAETFSRLRERGKTAFIPFITAGDPDLATTSKALRILDSCGSNVIELGVPYSDPLADGPVIQAAASRALKKGTKLGSVLAMLTEVIPELSCPIVLFTYYNPILKNGVRNFMAKIKQAGVHGLVVPDLPLEETTLLRSEATMHNIELVLLTTPTTPTERMKEITKASEGFVYLVSAVGVTGARSNVNLRVEHLLKEIKQVTDKPVAVGFGISTPEHAKQIAGWGADGVIIGSAIVRQLGEAASPEEGLRRIEEYAKSIKAAIP

SEQ ID NO: 68622 - protein, 182 aa, Triticum aestivum
  peptide (1)..(182): Ceres Seq. ID no. 15221779
MLTEVIPELSCPIVLFTYYNPILKNGVRNFMAKIKQAGVHGLVVPDLPLEETTLLRSEATMHNIELVLLTTPTTPTERMKEITKASEGFVYLVSAVGVTGARSNVNLRVEHLLKEIKQVTDKPVAVGFGISTPEHAKQIAGWGADGVIIGSAIVRQLGEAASPEEGLRRIEEYAKSIKAAIP

SEQ ID NO: 68623 - DNA, 1353 bp, Triticum aestivum
  misc_feature (1)..(1353): Ceres Seq. ID no. 13596492
attcgaaaaccttcctcgcgaaaccccagccccgctcctccgctccaccccccacctcccctggtccctcgcgagagcaggtccgggtcgcgtctccggcggcggagaagcaagacaagggcggcggagatgtcggtcagcaacatagggatgatggacggcgcctacttcgtggggcggaacgagatcctcgcctggatcaacactaccctgcagctcggcctcgccaaggtcgaggaggcggcgtcgggcgcggtggcgtcccagctcatggacgcggcgcaccccggggcggtgcccatgcacaaggtcaacttcgacgccaagaacgagtacgacatgatccagaactacaaggtcctgcaggatgtgttcaacaagctgaagatcaccaagcacattgaggttaataagctcatcaaaggaaggcccctagacaacctggagttcatgcagtggatgaaaagatactgtgattctgttaatggtggattcatgaccagctacaatgcttccgagagaagagaaagcagcaagggtgggaaagacaccaacagaaggacatcagggacttcccaggcgcctgccaagtctgcatccgccacccacaaagctcagcctccgtcgcacgcagctaagcgggccaacgggcatgcttcaaatgctccacagcggtgcgcaaagccgcctccagcttatgatgcacagatgaccgagctgaaactccttgttgatagcgccgagaaagagagagatttctatttctctaagctgcgggacgttgagatcttgtgccagagccccgaggttgagcatttaccgattgcgaaggctatccagaagatactctatgcttcggaggacgacccctcgacggtggcggaagcccaggcagagatggtggcgcagcagaaccagatgcagcagcagccaatgctgagccccatcctggaggcgtccgaggccccaagcatcacccccaaggattcttccgaggagagcttgaggcaggaagcagcggcagcacacaagaggaagagcatctcggacctggaggagttcgagatggggtcgagctccaggatgaggctctcagacgtctcggacgtgcagctgtgcggctcaccgttgatgagcttcacctgaaagaaaggagggaccgaattgcaggggctgagttgatgtcattgccggttatgacttgtgggtttatcttgtgttgtttcgtttgttgtttggtgtcataatgtgtgtgctcttgtggagctggagttgaacctgcctttgactgtgatcgatctgccacagcatttgtggccttctgcaacatgttattattgaatagcctctttt

SEQ ID NO: 68624 - protein, 381 aa, Triticum aestivum
  peptide (1)..(381): Ceres Seq. ID no. 13596493
IRKPSSRNPSPAPPLHPPPPLVPRESRSGSRLRRRRSKTRAAEMSVSNIGMMDGAYFVGRNEILAWINTTLQLGLAKVEEAASGAVASQLMDAAHPGAVPMHKVNFDAKNEYDMIQNYKVLQDVFNKLKITKHIEVNKLIKGRPLDNLEFMQWMKRYCDSVNGGFMTSYNASERRESSKGGKDTNRRTSGTSQAPAKSASATHKAQPPSHAAKRANGHASNAPQRCAKPPPAYDAQMTELKLLVDSAEKERDFYFSKLRDVEILCQSPEVEHLPIAKAIQKILYASEDDPSTVAEAQAEMVAQQNQMQQQPMLSPILEASEAPSITPKDSSEESLRQEAAAAHKRKSISDLEEFEMGSSSRMRLSDVSDVQLCGSPLMSFT

SEQ ID NO: 68625 - protein, 338 aa, Triticum aestivum
  peptide (1)..(338): Ceres Seq. ID no. 13596494
MSVSNIGMMDGAYFVGRNEILAWINTTLQLGLAKVEEAASGAVASQLMDAAHPGAVPMHKVNFDAKNEYDMIQNYKVLQDVFNKLKITKHIEVNKLIKGRPLDNLEFMQWMKRYCDSVNGGFMTSYNASERRESSKGGKDTNRRTSGTSQAPAKSASATHKAQPPSHAAKRANGHASNAPQRCAKPPPAYDAQMTELKLLVDSAEKERDFYFSKLRDVEILCQSPEVEHLPIAKAIQKILYASEDDPSTVAEAQAEMVAQQNQMQQQPMLSPILEASEAPSITPKDSSEESLRQEAAAAHKRKSISDLEEFEMGSSSRMRLSDVSDVQLCGSPLMSFT

SEQ ID NO: 68626 - protein, 331 aa, Triticum aestivum
  peptide (1)..(331): Ceres Seq. ID no. 13596495
MMDGAYFVGRNEILAWINTTLQLGLAKVEEAASGAVASQLMDAAHPGAVPMHKVNFDAKNEYDMIQNYKVLQDVFNKLKITKHIEVNKLIKGRPLDNLEFMQWMKRYCDSVNGGFMTSYNASERRESSKGGKDTNRRTSGTSQAPAKSASATHKAQPPSHAAKRANGHASNAPQRCAKPPPAYDAQMTELKLLVDSAEKERDFYFSKLRDVEILCQSPEVEHLPIAKAIQKILYASEDDPSTVAEAQAEMVAQQNQMQQQPMLSPILEASEAPSITPKDSSEESLRQEAAAAHKRKSISDLEEFEMGSSSRMRLSDVSDVQLCGSPLMSFT

SEQ ID NO: 68627 - DNA, 1751 bp, Triticum aestivum
  misc_feature (1)..(1751): Ceres Seq. ID no. 15224709
atcaccttgactgagatcgggacgaggcaatggcgtctccgagattcaagcccgtggaggagtgcagctccgaggggaggtcggggcagacggtggccgcagacttcgacggcacgctgctccgctcctccaacgccttcccctactacctcctggtggcgctggaggccggcagcgtcctccgcgccgtggcgctgctcctgtcggtgcccttcgtgtacgtgacctacatcttcttctccgagtcgctggccatcagcaccctggtgtacatctccgtggccgggctcaaggtgcggagcatcgagatggcggcgcggtcggtgctgcccaagttctacgcgcaggacgtgcacccggagagctggcgggtgttccggtccttcggcaagcggtacatcatcacggccagccccagggtcatggtggagcccttcgccagggagttcctcggcgccgaccgggtggtgggcacggagctggaggtgggcaagtccggcaaggccacggggttcatggtgaagcccggggtgctcgtcggggagcacaagaagcaggccgtggtgaaggagctgggcgacgcggtgcccgacgtcggcatgggcaacagggccaccgatttcaacttcatgtccatatgcaaggaagcctaccttgtcacgtcgaggaagtacagcccggtgcccaagaaccagctgctgacgcccctcatcctccacgacggccgcctcgtgcagcgcccgacgccgctggtggcgctcgtcaccttcctctggatgccgttcggcttcgccctcgccctcctccgcgtgtacatcaacctgcccctcccggagcgcatcgtcttctacatctaccacatgatgggcatccggctcatcgtgaaggggaccccgccgccgccgcccaagaaggggagcccgggcgtgctcttcgtgtgcaaccaccgcaccgtgctggaccccatcgaggtcgccgtcgcgctcggccgcaaggtgagctgcgtgacctacagcatctccaagttctcggagctcatctcgccgatcaaggcggtggcgctgacgcgggagcgcgacaaggacgccgagaacatccggcggctgctggaggagggcgacctggtgatctgccccgagggcaccacctgccgggagccctacctgctgcgcttcagcgcgctcttcgccgagctcacggaccgcatcgtgccggtggcgatcaacaccagggagcacatgttccacggctccaccgtgcgcgggttcaagctcatggacccctacttcttcttcatgaacccgcggccggtctacgaggtcaccttcctcaacatgctgcccaaggagctcacctgcggcgggggcaagtcgcccatcgaggtcgccaactacatccagaagacgctcagcgaccagctcggcttcgagtgcaccaccatcacccgcaaggagaagtacggcatactggccggcaccgacgggcgcgtcccgtccaagaacaaggacaaggagaagaactagcggatctctcgggctggactgcctcgcgtcgcgccggctacagtggttgatcgtggttgttgttgtttacagtttactatgattaattgtttgttatttgtcagatcactcaccgtttccaggaaactaaaaggaccgtgtcgtcgtgtattagcttgaggtcacaattgtcttgtaccaataattgtttcttcgccaaaaggatgagtaattatatggacgatttcc

SEQ ID NO: 68628 - protein, 497 aa, Triticum aestivum
  peptide (1)..(497): Ceres Seq. ID no. 15224710
MASPRFKPVEECSSEGRSGQTVAADFDGTLLRSSNAFPYYLLVALEAGSVLRAVALLLSVPFVYVTYIFFSESLAISTLVYISVAGLKVRSIEMAARSVLPKFYAQDVHPESWRVFRSFGKRYIITASPRVMVEPFAREFLGADRVVGTELEVGKSGKATGFMVKPGVLVGEHKKQAVVKELGDAVPDVGMGNRATDFNFMSICKEAYLVTSRKYSPVPKNQLLTPLILHDGRLVQRPTPLVALVTFLWMPFGFALALLRVYINLPLPERIVFYIYHMMGIRLIVKGTPPPPPKKGSPGVLFVCNHRTVLDPIEVAVALGRKVSCVTYSISKFSELISPIKAVALTRERDKDAENIRRLLEEGDLVICPEGTTCREPYLLRFSALFAELTDRIVPVAINTREHMFHGSTVRGFKLMDPYFFFMNPRPVYEVTFLNMLPKELTCGGGKSPIEVANYIQKTLSDQLGFECTTITRKEKYGILAGTDGRVPSKNKDKEKN

SEQ ID NO: 68629 - protein, 404 aa, Triticum aestivum
  peptide (1)..(404): Ceres Seq. ID no. 15224711
MAARSVLPKFYAQDVHPESWRVFRSFGKRYIITASPRVMVEPFAREFLGADRVVGTELEVGKSGKATGFMVKPGVLVGEHKKQAVVKELGDAVPDVGMGNRATDFNFMSICKEAYLVTSRKYSPVPKNQLLTPLILHDGRLVQRPTPLVALVTFLWMPFGFALALLRVYINLPLPERIVFYIYHMMGIRLIVKGTPPPPPKKGSPGVLFVCNHRTVLDPIEVAVALGRKVSCVTYSISKFSELISPIKAVALTRERDKDAENIRRLLEEGDLVICPEGTTCREPYLLRFSALFAELTDRIVPVAINTREHMFHGSTVRGFKLMDPYFFFMNPRPVYEVTFLNMLPKELTCGGGKSPIEVANYIQKTLSDQLGFECTTITRKEKYGILAGTDGRVPSKNKDKEKN

SEQ ID NO: 68630 - protein, 366 aa, Triticum aestivum
  peptide (1)..(366): Ceres Seq. ID no. 15224712
MVEPFAREFLGADRVVGTELEVGKSGKATGFMVKPGVLVGEHKKQAVVKELGDAVPDVGMGNRATDFNFMSICKEAYLVTSRKYSPVPKNQLLTPLILHDGRLVQRPTPLVALVTFLWMPFGFALALLRVYINLPLPERIVFYIYHMMGIRLIVKGTPPPPPKKGSPGVLFVCNHRTVLDPIEVAVALGRKVSCVTYSISKFSELISPIKAVALTRERDKDAENIRRLLEEGDLVICPEGTTCREPYLLRFSALFAELTDRIVPVAINTREHMFHGSTVRGFKLMDPYFFFMNPRPVYEVTFLNMLPKELTCGGGKSPIEVANYIQKTLSDQLGFECTTITRKEKYGILAGTDGRVPSKNKDKEKN

SEQ ID NO: 68631 - DNA, 1767 bp, Triticum aestivum
  misc_feature (1)..(1767): Ceres Seq. ID no. 13662391
tttttagccgatcagtatcctccacaagaaaaaaaatactataagcgcaatagaaaaatagtgatccctcaataagaaaatcaagaaaagatttccttttcttcttgggctcccttccaccaccaacctcttctccggccggccgagttgtcccgctccggctgcgtcttctccggcgagaggtgtagctaggttgcctgctcttcctttgagcggtctcctcccggcagggctgaggagatctctcgggacctcgggactggggcgtgtatgatggggatttcgcttatgccgatgaagacgcccacgcggcttctgtggagcaccagcttcttccgccacaagctcgccgccatgatcgcctcctcgtcctgcttcttataagagcccctccgccgcgcagcagctgtatatatacgtctttttcatttgattccgccccccgttcgatcgacaaccaaccaaggcaacttcttgaagctttctctgcgatggagcccggccggctcatcttcaacacgtcgggctccggcaacggacagatgctcttcatggactgcggcgccggcggcatcgccggcgcggccggcatgttccatcgaggggtgagaccggtcctcggcggcatggaagaagggcgcggcgtgaagcggcccttcttcacctcgccggatgacatgctcgaggaggagtactacgacgagcagctcccggagaagaagcggcgcctcaccccggagcaggtccacctgctggagaggagcttcgaggaggagaataagctggagccggagaggaagacggagctggcccgcaagctcgggctgcagccacgccaggtggccgtctggttccagaaccgccgcgcccggtggaagacaaagacgctggagcgcgacttcgaccgcctcaaggcgtccttcgacgccctccgggccgaccacgacgccctcctccaggacaaccaccggctccggtcacaggtggtaacgttgaccgagaagatgcaagataaggaggcgccggaaggcagcttcggtgcagccgtcgacgccttggagccggagcaggcggcggcggaggcgaaggcttccttggccaacgccgaggaacatgccgcggcagcggaggcgttcgaggtggtgcagcagcagctgcatgtgaaggacgaggagaggctgagcccggggagcggcgggagcgcggtgctggacgcgagggacgcgctgctcgggagcggatgcggtctcgccggcgtggtggacagcagcgtggactcgtactgcttcccggggggcgccggcggcgacgagtaccacgagtgcgtgatgggccccgtggcgggcggcatccagtcggaggaggacgacggcgcgggcagcgacgagggctgcagctactaccccgacgacgccgccgtcttcttcgccgccgcgcaagggcacggccaccatcacacggacgacgacgatcagcaggacgacggccagatcagctactggatgtggaactaggctcgcgcacgcatcaagaagcgtgcgtgcgtgcgccgtggaatcgatcaatttcggagtatatcagtaaaagaaatcgtggcgttttgttttctctccttgtatgcttcccgctgtaatcttgggtcactacgatcgaccaagttgtatgcatatgcattgtactacgagttagggtaatacatcggtggtaaaatctgtcgtgatgtacgggaaataagtgaacggagtcagagcctcattcttatggcac

SEQ ID NO: 68632 - protein, 340 aa, Triticum aestivum
  peptide (1)..(340): Ceres Seq. ID no. 13662392
MEPGRLIFNTSGSGNGQMLFMDCGAGGIAGAAGMFHRGVRPVLGGMEEGRGVKRPFFTSPDDMLEEEYYDEQLPEKKRRLTPEQVHLLERSFEEENKLEPERKTELARKLGLQPRQVAVWFQNRRARWKTKTLERDFDRLKASFDALRADHDALLQDNHRLRSQVVTLTEKMQDKEAPEGSFGAAVDALEPEQAAAEAKASLANAEEHAAAAEAFEVVQQQLHVKDEERLSPGSGGSAVLDARDALLGSGCGLAGVVDSSVDSYCFPGGAGGDEYHECVMGPVAGGIQSEEDDGAGSDEGCSYYPDDAAVFFAAAQGHGHHHTDDDDQQDDGQISYWMWN

SEQ ID NO: 68633 - protein, 323 aa, Triticum aestivum
  peptide (1)..(323): Ceres Seq. ID no. 13662393
MLFMDCGAGGIAGAAGMFHRGVRPVLGGMEEGRGVKRPFFTSPDDMLEEEYYDEQLPEKKRRLTPEQVHLLERSFEEENKLEPERKTELARKLGLQPRQVAVWFQNRRARWKTKTLERDFDRLKASFDALRADHDALLQDNHRLRSQVVTLTEKMQDKEAPEGSFGAAVDALEPEQAAAEAKASLANAEEHAAAAEAFEVVQQQLHVKDEERLSPGSGGSAVLDARDALLGSGCGLAGVVDSSVDSYCFPGGAGGDEYHECVMGPVAGGIQSEEDDGAGSDEGCSYYPDDAAVFFAAAQGHGHHHTDDDDQQDDGQISYWMWN

SEQ ID NO: 68634 - protein, 320 aa, Triticum aestivum
  peptide (1)..(320): Ceres Seq. ID no. 13662394
MDCGAGGIAGAAGMFHRGVRPVLGGMEEGRGVKRPFFTSPDDMLEEEYYDEQLPEKKRRLTPEQVHLLERSFEEENKLEPERKTELARKLGLQPRQVAVWFQNRRARWKTKTLERDFDRLKASFDALRADHDALLQDNHRLRSQVVTLTEKMQDKEAPEGSFGAAVDALEPEQAAAEAKASLANAEEHAAAAEAFEVVQQQLHVKDEERLSPGSGGSAVLDARDALLGSGCGLAGVVDSSVDSYCFPGGAGGDEYHECVMGPVAGGIQSEEDDGAGSDEGCSYYPDDAAVFFAAAQGHGHHHTDDDDQQDDGQISYWMWN

SEQ ID NO: 68635 - DNA, 1404 bp, Triticum aestivum
  misc_feature (1)..(1404): Ceres Seq. ID no. 12614942
atcatcagtctccactctccacccatctcagcaaaaaagaagctagcacagctccacacaccatggcagccatggccaccaccgcctccagcctcctcaagacctccttctccggcgtccgcctcccggcggcggcccgcaccccgtcctgcgtcgccaccccgcgcgccggcgccatctgcaactccatctcctcctccaccccaccctacgacctcaacgccttcaagttcagccccatcaaggagtccatcgtctcccgcgagatgacccgccgctacatgaccgacatgatcacctacgccgacaccgacgtcgtcatcgtcggcgccggatccgcggggctgtcctgcgcgtacgagctctccaaggacccctccatcagcatcgccatcatcgagcagtccgtgtcccccggcggcggcgcgtggctcggcggccagctcttctccgccatggtcgtgcgcaagccggcgcacctcttcctcgacgagctcaacatcgagtacgacgagcaggaggactacgtcgtcatcaagcacgccgcgctcttcacctccaccgtcatgagccgcctcctcgcgcgccccaacgtcaagctcttcaacgccgtcgccgtggaggacctcatcgtcaaggaggaccgcgtcgccggcgtcgtcaccaactgggcgctcgtctccatgaaccacgacacacagtcctgcatggaccccaacgtcatggaggccaaggtcgtggtgagctcctgcggccacgacgggcccttcggcgccaccggggtcaagcggctccaggacatcggcatgatccaggcggtgcccgggatgaaggcgctcgacatgaacacggccgaggatgccatcgtgcgcctcacccgcgaggttgtccccggcatgattgtcaccggcatggaggtcgccgagatcgacggcgccccgagaatgggcccgaccttcggcgccatgatgatctccggccagaaggcggcgcacctggcgctcaaggccctcggccggccgaacggcatcgacgggacgctcaagaacgtgaccccggcgctgcacccggagatgatcctggcggcgaccaacaacggcgacatcgtggacgcctaagcaaagcaatgagccacggacaccaaggcgtacgtacgctggtgtttgggggcgcaagatcaataagatggttcggtgaaacggaggatgcttagggacgagggcttgtctttgtgatttgtcagactcgtgtttaattccgatgtttgtctttagttttcttgtgttagcgtattttgttcatgccacctgcccgccatgtgctctgccctgcctctgcctcgcggcagttccatggatgatgaatccttctggaacaagaggagggaataaaaaggttgagtcc

SEQ ID NO: 68636 - protein, 371 aa, Triticum aestivum
  peptide (1)..(371): Ceres Seq. ID no. 12614943
HQSPLSTHLSKKEASTAPHTMAAMATTASSLLKTSFSGVRLPAAARTPSCVATPRAGAICNSISSSTPPYDLNAFKFSPIKESIVSREMTRRYMTDMITYADTDVVIVGAGSAGLSCAYELSKDPSISIAIIEQSVSPGGGAWLGGQLFSAMVVRKPAHLFLDELNIEYDEQEDYVVIKHAALFTSTVMSRLLARPNVKLFNAVAVEDLIVKEDRVAGVVTNWALVSMNHDTQSCMDPNVMEAKVVVSSCGHDGPFGATGVKRLQDIGMIQAVPGMKALDMNTAEDAIVRLTREVVPGMIVTGMEVAEIDGAPRMGPTFGAMMISGQKAAHLALKALGRPNGIDGTLKNVTPALHPEMILAATNNGDIVDA

SEQ ID NO: 68637 - protein, 351 aa, Triticum aestivum
  peptide (1)..(351): Ceres Seq. ID no. 12614944
MAAMATTASSLLKTSFSGVRLPAAARTPSCVATPRAGAICNSISSSTPPYDLNAFKFSPIKESIVSREMTRRYMTDMITYADTDVVIVGAGSAGLSCAYELSKDPSISIAIIEQSVSPGGGAWLGGQLFSAMVVRKPAHLFLDELNIEYDEQEDYVVIKHAALFTSTVMSRLLARPNVKLFNAVAVEDLIVKEDRVAGVVTNWALVSMNHDTQSCMDPNVMEAKVVVSSCGHDGPFGATGVKRLQDIGMIQAVPGMKALDMNTAEDAIVRLTREVVPGMIVTGMEVAEIDGAPRMGPTFGAMMISGQKAAHLALKALGRPNGIDGTLKNVTPALHPEMILAATNNGDIVDA

SEQ ID NO: 68638 - protein, 348 aa, Triticum aestivum
  peptide (1)..(348): Ceres Seq. ID no. 12614945
MATTASSLLKTSFSGVRLPAAARTPSCVATPRAGAICNSISSSTPPYDLNAFKFSPIKESIVSREMTRRYMTDMITYADTDVVIVGAGSAGLSCAYELSKDPSISIAIIEQSVSPGGGAWLGGQLFSAMVVRKPAHLFLDELNIEYDEQEDYVVIKHAALFTSTVMSRLLARPNVKLFNAVAVEDLIVKEDRVAGVVTNWALVSMNHDTQSCMDPNVMEAKVVVSSCGHDGPFGATGVKRLQDIGMIQAVPGMKALDMNTAEDAIVRLTREVVPGMIVTGMEVAEIDGAPRMGPTFGAMMISGQKAAHLALKALGRPNGIDGTLKNVTPALHPEMILAATNNGDIVDA

SEQ ID NO: 68639 - DNA, 1389 bp, Triticum aestivum
  misc_feature (1)..(1389): Ceres Seq. ID no. 13596496
atcccacacgccccacccctattccgccgcctcccttctctcttctcctcactccctctcgccgcagagaagatggcgtccgacggcagcggcgttgtcacggtgtacggcagcggcaacaacggcgccggtacgcagctggagcccaagtcgtccccgttctctgtcaaggtgggcctggcccagatgctccgcggcggcgtcatcatggacgtcgtcaacgccgagcaggcgcgcatcgccgaggaggccggcgcctgcgccgtcatggcgctcgagcgcgtccccgccgacatccgcgcccagggcggcgtcgcccgcatgtccgacccgggcctcatccgcgaaatcaagcgcgccgtcaccatccctgtcatggccaaggcccgcatcgggcacttcgtcgaggcccagatcctcgagtccatcggcgtcgactacgtggacgagagcgaggtcctcacgctcgccgacgacgcccaccacatcaacaagcacaacttccgcgtccccttcgtctgcggctgccgcaacctgggcgaggccctccgccgcatccgcgagggcgccgccatgatccgcaccaagggcgaggccggcaccggcaatgtcatcgaggccgtccgccacgtccgctccgtcatgggcgacgtgcgtgccctccgcagcatggacgacgacgaggtattcacctatgccaagagcatcgccgcaccgtacgacctcgtcatgcagaccaagcagctcggccgcctgcccgtcgtccagttcgccgccggcggggtcgccacgccggccgatgcggccctcatgatgcagctcggctgcgacggtgtcttcgtcggctccggtgtcttcaagagcggcgaccccgcgcgccgcgcgcgcgccatcgtgcaggccgtcacccactacagcgaccctaatgtgctcgccgaggtgagctgcgacctcggtgaggccatggtgggcatcaacctctccgatcccaaggtcgagcgctttgcggcgcgctccgagtgatctttgttggccaccgtcaataccagctcccaaaataatactccatggatcaatgataaggacaaaaaagaagtacttagaaacgattcctagttattatcatgtgatttcttcatgatgatcattctagctccgataacaattcaagcggtagcaagcatgcacctccagtcagtcagtcggtcagtcgctcgctttatatatgtacacacatgttgtcgtcttccatttcatttctgttgttgttaacacaagttaagtatccatccatccttttcctccgtgttctcttgctactatgcattttgctgtttcagattcgttgttgtttctctgatcgattttgctactgttgttgccaattgc

SEQ ID NO: 68640 - protein, 340 aa, Triticum aestivum
  peptide (1)..(340): Ceres Seq. ID no. 15221893
IPHAPPLFRRLPSLFSSLPLAAEKMASDGSGVVTVYGSGNNGAGTQLEPKSSPFSVKVGLAQMLRGGVIMDVVNAEQARIAEEAGACAVMALERVPADIRAQGGVARMSDPGLIREIKRAVTIPVMAKARIGHFVEAQILESIGVDYVDESEVLTLADDAHHINKHNFRVPFVCGCRNLGEALRRIREGAAMIRTKGEAGTGNVIEAVRHVRSVMGDVRALRSMDDDEVFTYAKSIAAPYDLVMQTKQLGRLPVVQFAAGGVATPADAALMMQLGCDGVFVGSGVFKSGDPARRARAIVQAVTHYSDPNVLAEVSCDLGEAMVGINLSDPKVERFAARSE

SEQ ID NO: 68641 - protein, 316 aa, Triticum aestivum
  peptide (1)..(316): Ceres Seq. ID no. 15221894
MASDGSGVVTVYGSGNNGAGTQLEPKSSPFSVKVGLAQMLRGGVIMDVVNAEQARIAEEAGACAVMALERVPADIRAQGGVARMSDPGLIREIKRAVTIPVMAKARIGHFVEAQILESIGVDYVDESEVLTLADDAHHINKHNFRVPFVCGCRNLGEALRRIREGAAMIRTKGEAGTGNVIEAVRHVRSVMGDVRALRSMDDDEVFTYAKSIAAPYDLVMQTKQLGRLPVVQFAAGGVATPADAALMMQLGCDGVFVGSGVFKSGDPARRARAIVQAVTHYSDPNVLAEVSCDLGEAMVGINLSDPKVERFAARSE

SEQ ID NO: 68642 - protein, 307 aa, Triticum aestivum
  peptide (1)..(307): Ceres Seq. ID no. 15221895
PTRPTPIPPPPFSLLLTPSRRREDGVRRQRRCHGVRQRQQRRRYAAGAQVVPVLCQGGPGPDAPRRRHHGRRQRRAGAHRRGGRRLRRHGARARPRRHPRPGRRRPHVRPGPHPRNQARRHHPCHGQGPHRALRRGPDPRVHRRRLRGRERGPHARRRRPPHQQAQLPRPLRLRLPQPGRGPPPHPRGRRHDPHQGRGRHRQCHRGRPPRPLRHGRRACPPQHGRRRGIHLCQEHRRTVRPRHADQAARPPARRPVRRRRGRHAGRCGPHDAARLRRCLRRLRCLQERRPRAPRARHRAGRHPLQRP

SEQ ID NO: 68643 - DNA, 988 bp, Triticum aestivum
  misc_feature (1)..(988): Ceres Seq. ID no. 12584561
aattcccagcacaaccgggagaaacacggaagcggacgccggggcacgctcgccggggaggccaccatggacatggacagcgtggagtgcctctccctcccggacgcctccatggacgtagacgacgtcgacagccaccagcaccagcaccaccaccacagcatcccgatccatcccgtgcacctcgccgctaacgggggcgtcggaggacgcgcgttcgcgaagatgaacgccgggggcgcggccggggccgggggagtgggtgctaccgcgggcgccaccggcgggccaccggcgaccagcgtacacgaattgctcgagtgtcctgtctgcaccaactccatgttcccgcccatccaccaggtcaacttgctattgacaaaatggatgaaagagctagaaaaaatattctatgggaacattgtgaaatatgatactgcaataagcccagaagcaagccaggatgatcttgtaaatgtcatctggaggaatgtgtacgctgacgaaggttcagagcccatggacgcagctgctacccctgctgtccaggcattggcaagatatactcggagggaggcaacttgcctatcattgacagataaagaagctgtgttctctggcaacttcaagtttacggccgttttgccaaccgtcctcagcccagtgaagcgacggcgatgagcgttggcattggtagatcagtattccatatgaaggctgactggtatacatggacaaggaagactggaagtcctatcatcattacaaataataggaaatttccagtatttatttatgcacgaatctcagcatttcgggccattttggtggctaaacctgcctctagctagaaatctcctttatgtttatcctctatgagcattgcattgatggctgcccttcggaatggagcacacggtggaaacgttttcctggttgaatgcgtgtactagtattttaccattttcattgctgatttggacttgag

SEQ ID NO: 68644 - protein, 226 aa, Triticum aestivum
  peptide (1)..(226): Ceres Seq. ID no. 12584562
NSQHNREKHGSGRRGTLAGEATMDMDSVECLSLPDASMDVDDVDSHQHQHHHHSIPIHPVHLAANGGVGGRAFAKMNAGGAAGAGGVGATAGATGGPPATSVHELLECPVCTNSMFPPIHQVNLLLTKWMKELEKIFYGNIVKYDTAISPEASQDDLVNVIWRNVYADEGSEPMDAAATPAVQALARYTRREATCLSLTDKEAVFSGNFKFTAVLPTVLSPVKRRR

SEQ ID NO: 68645 - protein, 204 aa, Triticum aestivum
  peptide (1)..(204): Ceres Seq. ID no. 12584563
MDMDSVECLSLPDASMDVDDVDSHQHQHHHHSIPIHPVHLAANGGVGGRAFAKMNAGGAAGAGGVGATAGATGGPPATSVHELLECPVCTNSMFPPIHQVNLLLTKWMKELEKIFYGNIVKYDTAISPEASQDDLVNVIWRNVYADEGSEPMDAAATPAVQALARYTRREATCLSLTDKEAVFSGNFKFTAVLPTVLSPVKRRR

SEQ ID NO: 68646 - protein, 202 aa, Triticum aestivum
  peptide (1)..(202): Ceres Seq. ID no. 12584564
MDSVECLSLPDASMDVDDVDSHQHQHHHHSIPIHPVHLAANGGVGGRAFAKMNAGGAAGAGGVGATAGATGGPPATSVHELLECPVCTNSMFPPIHQVNLLLTKWMKELEKIFYGNIVKYDTAISPEASQDDLVNVIWRNVYADEGSEPMDAAATPAVQALARYTRREATCLSLTDKEAVFSGNFKFTAVLPTVLSPVKRRR

SEQ ID NO: 68647 - DNA, 1300 bp, Triticum aestivum
  misc_feature (1)..(1300): Ceres Seq. ID no. 13596110
cccactcaaagcaccaaccctagctcccgcacccccgcaccctcgccgcagccatggcggaagaagccgccgccaccgcctccgcctccgccaccaacttcgaggtggacctgggccacctcctggcctacgacccctcgcaccacctcgccgccggcgccgcgtcctcccgggcggagctgcgggacgagtgcctgcggaaggccacggagctcgcgcaggccgtcgccaacgccctcttctcgctgcccgccaccgagggccgcgacggccctgtcgtccgcctcccgccgcccaccaaccgcctaccccgcgagaagcacttgccaaggccaaagcctcctaccaagtgggagcagttcgcaaagtcgaaagggattatcaagcacaagaagaacaagcgtgcatgggatgagcaaactaattcctggaagcggacgtatggctatgatcgtgttaatgatgacagagacgttcccatcattgaagccaaattgacagacgagcctggtgttgatccttttgctcaaagaagggaagagaagaagggcagggtcgataaacaagaaaagaacagacttgggaatttgaagaatgctgcaaaagttggtgctctgccaagtcatatacagctcgctgccacgtccgtgcccatcacaggaactaaagctgatctgccaagaaaagctaagaaggaagacctcgagaatgtcgctggtatggcttctgcagcaacggctagcggtggaaagtttgataaaaagttgcctggtgagaaacctctaaagaaggctggcaaaaacagaaagttcctccctgttgttgaagggaaaggaatgggcaacctagagaaacagcaaaacgacaagatcctgaacagtctactggccaagaacttcgaggaaccattggatgtcagcaaggcaatcacgatgtacaaggtgaagaaggacaacaagaggaggaaagacaagcaatcatcgtcgtcgtccggatcaaataagttgaagccccagaagaaaatccacaagaaatcttcaaagaaaagcgcttaggtccttccacatcatcgttgagacatgccgtgctgtaggcggcgagcgcagtctccaagcatcaaggatagtcttggcaaattttgtatggtcattgtcctgtttaagtcccaagggagaaatatagttattccggttaccactggttatgatatggcgcaagaagctgagtgccgtgatgacatagctgtacacgtattgtattttcagaagtttgggaaatgtttctggaaagctttgttggc

SEQ ID NO: 68648 - protein, 333 aa, Triticum aestivum
  peptide (1)..(333): Ceres Seq. ID no. 13596111
MAEEAAATASASATNFEVDLGHLLAYDPSHHLAAGAASSRAELRDECLRKATELAQAVANALFSLPATEGRDGPVVRLPPPTNRLPREKHLPRPKPPTKWEQFAKSKGIIKHKKNKRAWDEQTNSWKRTYGYDRVNDDRDVPIIEAKLTDEPGVDPFAQRREEKKGRVDKQEKNRLGNLKNAAKVGALPSHIQLAATSVPITGTKADLPRKAKKEDLENVAGMASAATASGGKFDKKLPGEKPLKKAGKNRKFLPVVEGKGMGNLEKQQNDKILNSLLAKNFEEPLDVSKAITMYKVKKDNKRRKDKQSSSSSGSNKLKPQKKIHKKSSKKSA

SEQ ID NO: 68649 - DNA, 1887 bp, Triticum aestivum
  misc_feature (1)..(1887): Ceres Seq. ID no. 15226950
aaaaaacaacccgtgggcagcagcagcttctctgcatacaccaagaagtcgcctcccttgctttccttcctccagcagtgcgcgcccctcctctcgagatcttccccgagttcctgagatctggttgtaagcagccaagatggtgaagatctgctgcatcggagctggctacgtcggcggcccaaccatggccgtcattgccatcaagtgcccggcgatcgaggttgttgtcgtcgacatctccaagccccgcattgacgcctggaacagcgacaccctccccatctacgagcccggcctcgacgacgttgtcaaggcctgcaggggcaagaacctcttcttcagcactgatgttgagaagcatgtcgccgaggccgacatcatctttgtgtccgtgaacacccccaccaagacccgcggcctgggagccggcaaggccgccgacctcacctactgggagagcgccgcccggatgatcgccgacgtgtccaagtcggacaagatcgtcgtcgagaagtccaccgtgcctgtcaagaccgccgaggccatcgagaagatcctgacccacaacagcaagggcatcaactaccagatcctgtccaacccggagttcctcgccgagggcacggcgatcgaggacctgttcaagcccgacagggtgctcatcggcggccgggagacccccgggggccagaaggccgtccaggccctcaaggaggtgtacgcccactgggtgcccgaggcgaacatcatcaccaccaacctgtggtcggccgagctctccaagctggccgccaacgcgttcctggcgcagaggatctcgtccgtgaacgccatgtcggcgctgtgcgaggccaccggcgccaacgtgtcggaggtgtcgtacgccatcggcaaggactcgcggatcgggcccaagttcctgaacgccagcgtggggttcggcgggtcgtgcttccagaaggacatcctgaacctggtgtacatctgcgagtgcaacggcctgccggaggtggccaactactggaagcaggtgatcaagatcaacgactaccagaagagccggttcgtgaaccgggtggtgtcgtccatgttcaacacggtgtccggcaagaagatcgcggtgctcgggttcgcgttcaagaaggacacgggcgacacccgggagacgccggcgatcgacgtgtgcaagggcctggtgggcgacaaggcccaggtgagcatctacgacccgcaggtgacggaggagcagatccagcgggacctggccatgaacaagttcgactgggaccacccgatgcacctgcagccgaccagccccacggcggtgaagcaggtgagcgtggtgtgggacgcgtacgaggcctgcaagggcgcccacggcgtgtgcatcctcaccgagtgggacgagttcaagaagctcgactaccagaagatcttcgacaacatgcagaagccggccttcgtcttcgacggccgcaacgtggtcgacgccgagaagctcagggagatgggcttcatcgtctactccatcggcaagccgctcgacggctggctcaaggacatgcccgccgtggcctaagttcacctcgtcgccccgccggatcggaggaagagcaagaagtggtttgaccatcattcattatttatagtttgcattttgcaggagaagcatctacattttctctgtcggccataaaattttagcaaatcttcatgtcttgtcaagtttcgattcgatacatgtttgcgtctgtagatcttacttataatcaaatcctcgggcccctgtgctgcctgaggaggttttccgttgtatcccatgaacgaactttgtagcctgttttgctgaaatcattacagaatcaatgtgttttttcgccaaac

SEQ ID NO: 68650 - protein, 480 aa, Triticum aestivum
  peptide (1)..(480): Ceres Seq. ID no. 15226951
MVKICCIGAGYVGGPTMAVIAIKCPAIEVVVVDISKPRIDAWNSDTLPIYEPGLDDVVKACRGKNLFFSTDVEKHVAEADIIFVSVNTPTKTRGLGAGKAADLTYWESAARMIADVSKSDKIVVEKSTVPVKTAEAIEKILTHNSKGINYQILSNPEFLAEGTAIEDLFKPDRVLIGGRETPGGQKAVQALKEVYAHWVPEANIITTNLWSAELSKLAANAFLAQRISSVNAMSALCEATGANVSEVSYAIGKDSRIGPKFLNASVGFGGSCFQKDILNLVYICECNGLPEVANYWKQVIKINDYQKSRFVNRVVSSMFNTVSGKKIAVLGFAFKKDTGDTRETPAIDVCKGLVGDKAQVSIYDPQVTEEQIQRDLAMNKFDWDHPMHLQPTSPTAVKQVSVVWDAYEACKGAHGVCILTEWDEFKKLDYQKIFDNMQKPAFVFDGRNVVDAEKLREMGFIVYSIGKPLDGWLKDMPAVA

SEQ ID NO: 68651 - protein, 464 aa, Triticum aestivum
  peptide (1)..(464): Ceres Seq. ID no. 15226952
MAVIAIKCPAIEVVVVDISKPRIDAWNSDTLPIYEPGLDDVVKACRGKNLFFSTDVEKHVAEADIIFVSVNTPTKTRGLGAGKAADLTYWESAARMIADVSKSDKIVVEKSTVPVKTAEAIEKILTHNSKGINYQILSNPEFLAEGTAIEDLFKPDRVLIGGRETPGGQKAVQALKEVYAHWVPEANIITTNLWSAELSKLAANAFLAQRISSVNAMSALCEATGANVSEVSYAIGKDSRIGPKFLNASVGFGGSCFQKDILNLVYICECNGLPEVANYWKQVIKINDYQKSRFVNRVVSSMFNTVSGKKIAVLGFAFKKDTGDTRETPAIDVCKGLVGDKAQVSIYDPQVTEEQIQRDLAMNKFDWDHPMHLQPTSPTAVKQVSVVWDAYEACKGAHGVCILTEWDEFKKLDYQKIFDNMQKPAFVFDGRNVVDAEKLREMGFIVYSIGKPLDGWLKDMPAVA

SEQ ID NO: 68652 - protein, 369 aa, Triticum aestivum
  peptide (1)..(369): Ceres Seq. ID no. 15226953
MIADVSKSDKIVVEKSTVPVKTAEAIEKILTHNSKGINYQILSNPEFLAEGTAIEDLFKPDRVLIGGRETPGGQKAVQALKEVYAHWVPEANIITTNLWSAELSKLAANAFLAQRISSVNAMSALCEATGANVSEVSYAIGKDSRIGPKFLNASVGFGGSCFQKDILNLVYICECNGLPEVANYWKQVIKINDYQKSRFVNRVVSSMFNTVSGKKIAVLGFAFKKDTGDTRETPAIDVCKGLVGDKAQVSIYDPQVTEEQIQRDLAMNKFDWDHPMHLQPTSPTAVKQVSVVWDAYEACKGAHGVCILTEWDEFKKLDYQKIFDNMQKPAFVFDGRNVVDAEKLREMGFIVYSIGKPLDGWLKDMPAVA

SEQ ID NO: 68653 - DNA, 1174 bp, Triticum aestivum
  misc_feature (1)..(1174): Ceres Seq. ID no. 13590940
acccctttcccttcgcctccaaaccccagcggcagaaccttatcccctgcgagtcttatccccctctgcaatggcggccaccctcttctccaccgcgctctcgcaccacttcatcccgctcccctccgccgccaggcccgccgccgcctcggcctccttcgcctgcggcccgctgcgcgccgtgtcggcgctgctggcgccgcggaggcggctcctgctgcccgtggccgtggccgtgtcgtccgagttcgggacggaggacgccgaggaggagcagagcgagggcgagggcggcggcgactccgaggccgagtactccgaggacctcaaggtcttcgtcggcaacctccccttcaccgtggacagcgcgcagctcgccgggctcttcgagcaggccggctccgtcgagatggtcgaggttgtatacgatagaatgaccggacggagccgtggatttggattcgtcacaatgggttcagctgaggaagttgctgccgccgttgagcaattcaatggctatacgttccaaggaagacctctcagggttaactccggaccaccaccacccagagatgaattcgcacccagaacaccgaggaccatgggcggcggtggcggcggcggcagctttgattcagctaacaagctctacgtcggaaacctatcctggggtgttgacaactcaacgctcgagaacctgttcagcgaacaaggaaaggtgcttgatgctaaggtcatctatgaccgcgacagtggcaggtcgaggggtttcggtttcgtcacctatggctctgccgacgaggtcaacaatgcgatctcaaacctcgacggcgtggaccttgacggcaggcagatccgggttaccgtcgcagagtcgaagccgagggagcaaaggcggttttaagagatcctgacgctggttagagattaatcatgtgttccgtaagtgttagtttgtagtttctactactattttctcgcggttgatgagagagactgggaagtgaatttgtataccggaagatttttgtcagccgtgcaactcgttgcgcctcttgatagaaaaagtagaaattttgtcaaagtcattcttatatgcttagcagcagagatgatgtacgataccattaaaaacccatctgaatgtttgttgatgctgtgtatggctctctcc

SEQ ID NO: 68654 - protein, 300 aa, Triticum aestivum
  peptide (1)..(300): Ceres Seq. ID no. 15221016
PLSLRLQTPAAEPYPLRVLSPSAMAATLFSTALSHHFIPLPSAARPAAASASFACGPLRAVSALLAPRRRLLLPVAVAVSSEFGTEDAEEEQSEGEGGGDSEAEYSEDLKVFVGNLPFTVDSAQLAGLFEQAGSVEMVEVVYDRMTGRSRGFGFVTMGSAEEVAAAVEQFNGYTFQGRPLRVNSGPPPPRDEFAPRTPRTMGGGGGGGSFDSANKLYVGNLSWGVDNSTLENLFSEQGKVLDAKVIYDRDSGRSRGFGFVTYGSADEVNNAISNLDGVDLDGRQIRVTVAESKPREQRRF

SEQ ID NO: 68655 - protein, 277 aa, Triticum aestivum
  peptide (1)..(277): Ceres Seq. ID no. 15221017
MAATLFSTALSHHFIPLPSAARPAAASASFACGPLRAVSALLAPRRRLLLPVAVAVSSEFGTEDAEEEQSEGEGGGDSEAEYSEDLKVFVGNLPFTVDSAQLAGLFEQAGSVEMVEVVYDRMTGRSRGFGFVTMGSAEEVAAAVEQFNGYTFQGRPLRVNSGPPPPRDEFAPRTPRTMGGGGGGGSFDSANKLYVGNLSWGVDNSTLENLFSEQGKVLDAKVIYDRDSGRSRGFGFVTYGSADEVNNAISNLDGVDLDGRQIRVTVAESKPREQRRF

SEQ ID NO: 68656 - protein, 164 aa, Triticum aestivum
  peptide (1)..(164): Ceres Seq. ID no. 15221018
MVEVVYDRMTGRSRGFGFVTMGSAEEVAAAVEQFNGYTFQGRPLRVNSGPPPPRDEFAPRTPRTMGGGGGGGSFDSANKLYVGNLSWGVDNSTLENLFSEQGKVLDAKVIYDRDSGRSRGFGFVTYGSADEVNNAISNLDGVDLDGRQIRVTVAESKPREQRRF

SEQ ID NO: 68657 - DNA, 988 bp, Triticum aestivum
  misc_feature (1)..(988): Ceres Seq. ID no. 12627129
atcaatcaatccgcggaatctatcccccccgcagcagacgccatggccgccgcaccgacgccgcagcccttgctcccggtgaccaacccctcctccgggggcggcggctctgccccgtccgccggcagcggcctcaccgactccgcgctcgccacgccggccttccggctcttcctcagcagggtctccgacacggcgcggcgctcgctcgccgaccgccgcccctggacggagctcatcgaccgctcggccatctcgcggccggactccctctccgaggccacctcgcgattgcgccgcaacctgggctacttccgcgtcaactacgccgccgtggtggccttctccctcgcggcctccctcctggcgcaccccttctcgctgctcgtcctcctcggcatcctcggcgcctggtgcttcctctacgtcttccgcgcgcccgaccagcccgtcgtgctcttcggccgcaccttcaccgaccgggagacgctgctcggcctcgtcgtctcgtcgctgctcgccttcttcctcacgtccgtcgcctcgctcatcatctccggcctgctcgtcggcggcgcgctggtggcggtgcacggcgcgttccgcatgcccgaggacctcttcctcgacgactcgagctctgtgtcaagcggcaacacttcccacaggctgctctccttcctcgcgtcgcccggatctggtgtttgagcctgcgcgagatctggtagccttcttgcatcaacgagttcatctcaagtctgagtctaatttcgcgagatctgattttggttttaatatgtatctccagttattcaaagatccgcgtgaagctgtattctctcgtatttgaccagatgttaagcattagcaaattgatcactgtgcactatgaatcgattgagcgttagcaaattgatccgcattattagctgtattcgctcgtatttaaccagattgttcatatacaggttttatggtttccactgtg

SEQ ID NO: 68658 - protein, 241 aa, Triticum aestivum
  peptide (1)..(241): Ceres Seq. ID no. 12627130
QSIRGIYPPRSRRHGRRTDAAALAPGDQPLLRGRRLCPVRRQRPHRLRARHAGLPALPQQGLRHGAALARRPPPLDGAHRPLGHLAAGLPLRGHLAIAPQPGLLPRQLRRRGGLLPRGLPPGAPLLAARPPRHPRRLVLPLRLPRARPARRALRPHLHRPGDAARPRRLVAARLLPHVRRLAHHLRPARRRRAGGGARRVPHARGPLPRRLELCVKRQHFPQAALLPRVARIWCLSLREIW

SEQ ID NO: 68659 - protein, 235 aa, Triticum aestivum
  peptide (1)..(235): Ceres Seq. ID no. 12627131
INQSAESIPPAADAMAAAPTPQPLLPVTNPSSGGGGSAPSAGSGLTDSALATPAFRLFLSRVSDTARRSLADRRPWTELIDRSAISRPDSLSEATSRLRRNLGYFRVNYAAVVAFSLAASLLAHPFSLLVLLGILGAWCFLYVFRAPDQPVVLFGRTFTDRETLLGLVVSSLLAFFLTSVASLIISGLLVGGALVAVHGAFRMPEDLFLDDSSSVSSGNTSHRLLSFLASPGSGV

SEQ ID NO: 68660 - protein, 221 aa, Triticum aestivum
  peptide (1)..(221): Ceres Seq. ID no. 12627132
MAAAPTPQPLLPVTNPSSGGGGSAPSAGSGLTDSALATPAFRLFLSRVSDTARRSLADRRPWTELIDRSAISRPDSLSEATSRLRRNLGYFRVNYAAVVAFSLAASLLAHPFSLLVLLGILGAWCFLYVFRAPDQPVVLFGRTFTDRETLLGLVVSSLLAFFLTSVASLIISGLLVGGALVAVHGAFRMPEDLFLDDSSSVSSGNTSHRLLSFLASPGSGV

SEQ ID NO: 68661 - DNA, 1443 bp, Triticum aestivum
  misc_feature (1)..(1443): Ceres Seq. ID no. 13654285
agaacatcctaatcgaaaaaacttcccccaaccaaaagacagcaccgtgtgttctcgtgtgtatatgtctatggcctaatcgagaccatggacgttaccggggacgccggtggaggtcgccgccccaacttccccctgcagctcctcgagaagaaggaggagcatccgtgctccatctccccggctgctgggctcgggacgaatgggtcggcgacgggggagctgcaggtgcggaaggcggcaccgcctaagcggaccacgagcaaggaccggcatacgaaggtggacgggcgcggccgccgcatccggatgccggcgatctgcgcggcgcgggtgttccagctgacgcgggaactggggcacaagacggacggcgagaccatcgagtggctcctgcagcaggcggagcccgctgtgattgcggccaccggcacaggcaccatcccggccaacttcacatctctcaacatctccctccgctcctccggctccatgctctccaccatacccgcccacctccgcgccgccggcctgccggggtctcgctttggaggtggcccatgggcggacgcgtgggaccgcttcgtcggtctcgggttcggcggtggcctcgagagcccggcctccaccaccacctcgtcgtcgtccccgctgctgctgagcttccactccggaagcgtcggcctcgacgtttcgccgtcgtcggcgacggctgcggccaacacggaactgtccaggaagcggcgttgggagcaagaaatgcagcagcagcagcaacaacatcatcaccaccaacagcaacagcagcaacagtaccagcaacagatggccgggtacacgcagagccaaatgccgggcactgtgtggatggtgccgacgagcaacgcccaggccgccggagcggcgcctgccggtggcggcgagtcgatctggacgttcccgcaacccggaagcggcggcggcggcggctcggcgaccgtgtaccgcggcgtgccgagcgggctacatttcatgaacatccccgcgccgatggcagtgcacgcgcagcagctgggactcggccaggccggcggcggcggatcagcagcagcgggcgaggggcacatggggatcctcgccgcgctcaacgcgtaccgtgggcagcatgcagcggcgtcggaggtcaccgtggcggggcacaatggagcagctgaagggactactcaccatcaacatcagaatcagcatcagcatctgcagcacgggggtggcgagccgaacgagagcatgagcggcagcgactcgtaggacttcgtgaccgctggtccgttcgacagctttggcttaccaattttcgtctttggatttgttcttctttggtttgtttctgttcttgactcgatcgcttgttatggctttgttccttctccaaattcttgcacggttcatacgattgcaacttgc

SEQ ID NO: 68662 - protein, 399 aa, Triticum aestivum
  peptide (1)..(399): Ceres Seq. ID no. 15219637
MDVTGDAGGGRRPNFPLQLLEKKEEHPCSISPAAGLGTNGSATGELQVRKAAPPKRTTSKDRHTKVDGRGRRIRMPAICAARVFQLTRELGHKTDGETIEWLLQQAEPAVIAATGTGTIPANFTSLNISLRSSGSMLSTIPAHLRAAGLPGSRFGGGPWADAWDRFVGLGFGGGLESPASTTTSSSSPLLLSFHSGSVGLDVSPSSATAAANTELSRKRRWEQEMQQQQQQHHHHQQQQQQQYQQQMAGYTQSQMPGTVWMVPTSNAQAAGAAPAGGGESIWTFPQPGSGGGGGSATVYRGVPSGLHFMNIPAPMAVHAQQLGLGQAGGGGSAAAGEGHMGILAALNAYRGQHAAASEVTVAGHNGAAEGTTHHQHQNQHQHLQHGGGEPNESMSGSDS

SEQ ID NO: 68663 - protein, 325 aa, Triticum aestivum
  peptide (1)..(325): Ceres Seq. ID no. 15219638
MPAICAARVFQLTRELGHKTDGETIEWLLQQAEPAVIAATGTGTIPANFTSLNISLRSSGSMLSTIPAHLRAAGLPGSRFGGGPWADAWDRFVGLGFGGGLESPASTTTSSSSPLLLSFHSGSVGLDVSPSSATAAANTELSRKRRWEQEMQQQQQQHHHHQQQQQQQYQQQMAGYTQSQMPGTVWMVPTSNAQAAGAAPAGGGESIWTFPQPGSGGGGGSATVYRGVPSGLHFMNIPAPMAVHAQQLGLGQAGGGGSAAAGEGHMGILAALNAYRGQHAAASEVTVAGHNGAAEGTTHHQHQNQHQHLQHGGGEPNESMSGSDS

SEQ ID NO: 68664 - protein, 264 aa, Triticum aestivum
  peptide (1)..(264): Ceres Seq. ID no. 15219639
MLSTIPAHLRAAGLPGSRFGGGPWADAWDRFVGLGFGGGLESPASTTTSSSSPLLLSFHSGSVGLDVSPSSATAAANTELSRKRRWEQEMQQQQQQHHHHQQQQQQQYQQQMAGYTQSQMPGTVWMVPTSNAQAAGAAPAGGGESIWTFPQPGSGGGGGSATVYRGVPSGLHFMNIPAPMAVHAQQLGLGQAGGGGSAAAGEGHMGILAALNAYRGQHAAASEVTVAGHNGAAEGTTHHQHQNQHQHLQHGGGEPNESMSGSDS

SEQ ID NO: 68665 - DNA, 1242 bp, Triticum aestivum
  misc_feature (1)..(1242): Ceres Seq. ID no. 14302299
gcatagctcacatcacatcaatacatcaccaccaccaccaccctcctctctcctctccctccctctctcctcgtagacaccttctccttctaggtctccttgcctgtgcaggctccagcacgtacactcaaggaccgacgacgacgatgcggcttagctgcaacggctgccgcgtgctgcggaagggctgcagcgaggactgcagcatccgcccctgcctgcagtggatcaagagccccgaggcgcaggccaacgccaccgtcttcctcgccaagttctacggccgcgcggggctcatgaacctcatcaacgccggcacggacgacagcctccgccccggcatcttccgctcgctcctctacgaggcctgcggccggatcgtcaaccccatatacggctccgtcggcctgctctggtccaacaactggcagatgtgccaggccgccgtcgaggccgtcctcagcggcaagcccatcgtccaggtctcctccgaggatgccgccgccgaccggacaccgccgctcaaggcgtacgacatccgccacgtctccacctcgccagccgccgacgggaggctccacaaggtcgccaagccgggtcgcacccgcttcaagcgcgcgtcctccgcctcgtcccaccacaacccgtccagcgactccaacaacaagcccaagcccaagccgcagcctcagacgcgggcgcccacggcggaggaggagctggatcgtcaacaccgcaaggagatggaggagggcgcgtcccagcgtgctccgagccacgaatcctccgacagccgacacgaggaccccgtggagccacactgccagcaagaggcgtccgcagacacggaggccgaggcggggtcgcacgtcagccaggcggagcaggagcaggagcagagcacagagccggccgcagagcacgcggaggaggtcgaaaaggaggaggacgaagaactagcgctcgagcttacgcttggattcgctcccgtcgcagtacggccggccggatttcacctgagcgtccggaccgcggcggagccggctttcgtcgggctccggttcctctaaaagcacatttaccttgtgaaaagaatatagagctatttgatggactcttttacctttaattggaaaaaaattaggtccgttagttcgtttttgtttcatggttgcaatgagtgtacagacaatagctccctcatggccaagatttttccaataaaaaatgtgttttgctgac

SEQ ID NO: 68666 - protein, 355 aa, Triticum aestivum
  peptide (1)..(355): Ceres Seq. ID no. 14302300
IAHITSIHHHHHHPPLSSPSLSPRRHLLLLGLLACAGSSTYTQGPTTTMRLSCNGCRVLRKGCSEDCSIRPCLQWIKSPEAQANATVFLAKFYGRAGLMNLINAGTDDSLRPGIFRSLLYEACGRIVNPIYGSVGLLWSNNWQMCQAAVEAVLSGKPIVQVSSEDAAADRTPPLKAYDIRHVSTSPAADGRLHKVAKPGRTRFKRASSASSHHNPSSDSNNKPKPKPQPQTRAPTAEEELDRQHRKEMEEGASQRAPSHESSDSRHEDPVEPHCQQEASADTEAEAGSHVSQAEQEQEQSTEPAAEHAEEVEKEEDEELALELTLGFAPVAVRPAGFHLSVRTAAEPAFVGLRFL

SEQ ID NO: 68667 - protein, 307 aa, Triticum aestivum
  peptide (1)..(307): Ceres Seq. ID no. 14302301
MRLSCNGCRVLRKGCSEDCSIRPCLQWIKSPEAQANATVFLAKFYGRAGLMNLINAGTDDSLRPGIFRSLLYEACGRIVNPIYGSVGLLWSNNWQMCQAAVEAVLSGKPIVQVSSEDAAADRTPPLKAYDIRHVSTSPAADGRLHKVAKPGRTRFKRASSASSHHNPSSDSNNKPKPKPQPQTRAPTAEEELDRQHRKEMEEGASQRAPSHESSDSRHEDPVEPHCQQEASADTEAEAGSHVSQAEQEQEQSTEPAAEHAEEVEKEEDEELALELTLGFAPVAVRPAGFHLSVRTAAEPAFVGLRFL

SEQ ID NO: 68668 - protein, 257 aa, Triticum aestivum
  peptide (1)..(257): Ceres Seq. ID no. 14302302
MNLINAGTDDSLRPGIFRSLLYEACGRIVNPIYGSVGLLWSNNWQMCQAAVEAVLSGKPIVQVSSEDAAADRTPPLKAYDIRHVSTSPAADGRLHKVAKPGRTRFKRASSASSHHNPSSDSNNKPKPKPQPQTRAPTAEEELDRQHRKEMEEGASQRAPSHESSDSRHEDPVEPHCQQEASADTEAEAGSHVSQAEQEQEQSTEPAAEHAEEVEKEEDEELALELTLGFAPVAVRPAGFHLSVRTAAEPAFVGLRFL

SEQ ID NO: 68669 - DNA, 625 bp, Triticum aestivum
  misc_feature (1)..(625): Ceres Seq. ID no. 13596497
aaggagaaatctgctcgtcgtggtctctcttgtggagtgcggtttctaaattcgagagagaagagagtcctacccgctcctatctcctcttgcgagtccaatcgcgaggatagggatggagagctccaacggcaagccgccgcggggagaggaagaggggaaggcggcggggtcgatcggaggccacgagtcgctgcacaggctcctcgagtccaatctccctcccgagctcttcaaggaggcaagccggttgcttttggggttgaattgtgcacaccctcttgaggctatttccctgcctggggccaccactgatcttgctggagcgcataatttcgatgtgcaggcattccgttttaacgctgacaaagagcatatgagacagccgcggattgttcgagttggcttaattcagaactcaattgctgttccaacgacttgtcattttgctgatcaaaagaagtctatcatggagaaagtaaaaccccatcatagacgcagctgttgcttctggtgtcaatattttgtgcttacaggaagcctggannntgccatttgccttctgcacgcgtgaaaaacgatggtgtgagtttgctgagcctgttgatggagaatctactcagtt

SEQ ID NO: 68670 - protein, 152 aa, Triticum aestivum
  peptide (1)..(152): Ceres Seq. ID no. 13596498
  misc_feature (144)..(144): Xaa is any aa, unknown or other
  misc_feature (145)..(145): Xaa is any aa, unknown or other
MESSNGKPPRGEEEGKAAGSIGGHESLHRLLESNLPPELFKEASRLLLGLNCAHPLEAISLPGATTDLAGAHNFDVQAFRFNADKEHMRQPRIVRVGLIQNSIAVPTTCHFADQKKSIMEKVKPHHRRSCCFWCQYFVLTGSLXXAICLLHA

SEQ ID NO: 68671 - protein, 94 aa, Triticum aestivum
  peptide (1)..(94): Ceres Seq. ID no. 13596499
KEKSARRGLSCGVRFLNSREKRVLPAPISSCESNREDRDGELQRQAAAGRGRGEGGGVDRRPRVAAQAPRVQSPSRALQGGKPVAFGVELCTPS

SEQ ID NO: 68672 - DNA, 1641 bp, Triticum aestivum
  misc_feature (1)..(1641): Ceres Seq. ID no. 13596115
ccagctctccctctcgctcccggcggcggctgcctcgtcggagtcgcccctcgacggcggctagcctcgtcggacgcgctcctcgacggcggtgcgagcctccctgcgcggtctctggggattcttgcagaacttgagtacagtcctgttgggttcatcaccagctgttaaagagtgattcagtgatagagaccataacaggtggcagtggtaagcttagaggagatgtaccgtggtgggcttgaccgcttcaagaaagctcaggccttggagccgttctcggtgcagcagtctggttccggcgcaaagagcgtgccccctgcggtgaaagtgcagccagctccgttggtgccgccgcaaagctcacatcttggtcccagccagagtcagcatgctccgcagagtgctggctcaagcatgggcgggcaagaagctgctggggctcccagacccgccgggacacagtttggtggtgggcagtcgacgtggcaaccgccggactgggcaattgagccgcgccctggggtttactatcttgaggtgatgaaggatgggaatgccattgataggatcaatctggacaagaagaggcatatatttgggaggcaggtgcctgcttgcgagattgtcttggaccatcagtctgtctcacgccaacatgctgctgtcgttccacacaaaaatggaagcatctatgttatcgatttaggatctgtccatggtacatttgttgcaaacgagagattaaccaaggacaaccctgttgaacttgaagttggacagtcacttcgctttgctgcatcaaccagggcgtatgttctacgaaagaacacagctgcttttttccccactcaaagtctcccttcagatgtgagtttgccgtctcctccagactctgacgatgaagacgccgttgttgcatacaatacaatacttaatcgctatggtgttagcaaatcagacgtgccattgaagagaaaaggttcttctggggatgcttctgcttctgctgtaaatgatgacaaccaggcagtcggtagaccatcaaagagaatcagaaagcggagagtgtcatttagagatcaggttggtggagagcttattcaggtggttgggatttctgatggtgcagatgttgaaactgaaccaggcccagtaggtgtgaaggaaggcagtcttgttgggaagtacgagtctcttgtacaggtcactgtcataccaaaaggaaaggagcaaacttcgtcaaaggacagtgcctcccacagtggggtaacagataagctacaacatatgcttaacaaagttaaaagcacatccagaggtggtatgtatgatgacctttacggggactctgttccagcaaaactgggatcatcatgggcgtacaaatcagatggccagccagagcaagtcaaagttgttgatgaaaagaagtctagcagggacgttggtgcaaatccagctgatgatagtgatgatgacttgtttggcgactagttattttgtcacatttccagttagtagtgaattgccttgattacaaacacatggcagcagaaatgttatgtttgccttgggtattttgctttgttctacatgattgtatcctgctgtgaatcaaggtaatctcttttttgcctc

SEQ ID NO: 68673 - protein, 423 aa, Triticum aestivum
  peptide (1)..(423): Ceres Seq. ID no. 15221780
MYRGGLDRFKKAQALEPFSVQQSGSGAKSVPPAVKVQPAPLVPPQSSHLGPSQSQHAPQSAGSSMGGQEAAGAPRPAGTQFGGGQSTWQPPDWAIEPRPGVYYLEVMKDGNAIDRINLDKKRHIFGRQVPACEIVLDHQSVSRQHAAVVPHKNGSIYVIDLGSVHGTFVANERLTKDNPVELEVGQSLRFAASTRAYVLRKNTAAFFPTQSLPSDVSLPSPPDSDDEDAVVAYNTILNRYGVSKSDVPLKRKGSSGDASASAVNDDNQAVGRPSKRIRKRRVSFRDQVGGELIQVVGISDGADVETEPGPVGVKEGSLVGKYESLVQVTVIPKGKEQTSSKDSASHSGVTDKLQHMLNKVKSTSRGGMYDDLYGDSVPAKLGSSWAYKSDGQPEQVKVVDEKKSSRDVGANPADDSDDDLFGD

SEQ ID NO: 68674 - protein, 359 aa, Triticum aestivum
  peptide (1)..(359): Ceres Seq. ID no. 15221781
MGGQEAAGAPRPAGTQFGGGQSTWQPPDWAIEPRPGVYYLEVMKDGNAIDRINLDKKRHIFGRQVPACEIVLDHQSVSRQHAAVVPHKNGSIYVIDLGSVHGTFVANERLTKDNPVELEVGQSLRFAASTRAYVLRKNTAAFFPTQSLPSDVSLPSPPDSDDEDAVVAYNTILNRYGVSKSDVPLKRKGSSGDASASAVNDDNQAVGRPSKRIRKRRVSFRDQVGGELIQVVGISDGADVETEPGPVGVKEGSLVGKYESLVQVTVIPKGKEQTSSKDSASHSGVTDKLQHMLNKVKSTSRGGMYDDLYGDSVPAKLGSSWAYKSDGQPEQVKVVDEKKSSRDVGANPADDSDDDLFGD

SEQ ID NO: 68675 - protein, 317 aa, Triticum aestivum
  peptide (1)..(317): Ceres Seq. ID no. 15221782
MKDGNAIDRINLDKKRHIFGRQVPACEIVLDHQSVSRQHAAVVPHKNGSIYVIDLGSVHGTFVANERLTKDNPVELEVGQSLRFAASTRAYVLRKNTAAFFPTQSLPSDVSLPSPPDSDDEDAVVAYNTILNRYGVSKSDVPLKRKGSSGDASASAVNDDNQAVGRPSKRIRKRRVSFRDQVGGELIQVVGISDGADVETEPGPVGVKEGSLVGKYESLVQVTVIPKGKEQTSSKDSASHSGVTDKLQHMLNKVKSTSRGGMYDDLYGDSVPAKLGSSWAYKSDGQPEQVKVVDEKKSSRDVGANPADDSDDDLFGD

SEQ ID NO: 68676 - DNA, 1388 bp, Triticum aestivum
  misc_feature (1)..(1388): Ceres Seq. ID no. 13654715
atgcccttaggattcactcctgcgtgcgacacgccgaagcgagcaaccaaaagcaacctgaaatgttactcttgcttgcccaactcaagtcaaccatagctagctaaaatggtgctccactcagctatagctgcctagcaagctcagttccacgtctcgatctacctctctatatttaatttgcctccaaaatccatctatatatatatcgttttcgagctaaacaacacttcatccaaacaagcaaaggcaaatacccaagcggagctgcgaatagaaggctagaagccaacaatggcgccgctcgcacccgggaggccaccagcctgcctcctaacccttctctccgtcgtcgcggccctatccctggccgcgccgggcctggcggcggggaagaccggccaggtgacggtgttctggggacggaacaaggccgaggggtccctgcgcgaggcctgcgactccggcatgtacaccatggtcaccatctctttcctcgacgtcttcggcgccaacggaaagtaccaccttgacctctccggccacgacctctccgccgtcggcgccgacatcaagcactgccagtccaagggcgtccccgtctccctctccatcggcggctacggcgcccgctactcgctcccgtccaaccgctccgcgctcgacctcttcgaccacctctgggactcctacttcggcgggtccaagccgggcgtgccccgccccttgggcgacgcgtggctcgacggcgtcgacctcttcctggagcacggcacgccggcggaccgctacgacgtgctggcgctggagctggcgaagcacaacatccgcggcggcccggggaagccgctgcacctgacggcgacggtccggtgcgggtacccgccggcggcgcacgtggggcgagcgctggcgacggggatcttcgagcgcgtccacgtgaggatctacgaggagagcgacaaggcgtgcaaccagtacggggcgtgggaggaggcgtgggacaggtggacggcggcgtacccggccacccggttcttcatcgggctcacggcggacgacaagtcgtaccagtggatacaccccaagaacgtctactacggcatcacgccggtggtgcagaagaaggagaactatggcggggtcatgctctgggaccgatacttcgacaagcagagcgactacagtagctacatcaagtactacgcctgatcggagctatacttccacaagccacgctgcatgttgcatcaccgtcgatttgattttgatgtgttgttgcatacttgcaagcgagaataaagtgaggcttgtacttggataaataattgaacagattggtcgcacagttatggtttagttatcagctccatgactctctttttttc

SEQ ID NO: 68677 - protein, 305 aa, Triticum aestivum
  peptide (1)..(305): Ceres Seq. ID no. 13654716
MAPLAPGRPPACLLTLLSVVAALSLAAPGLAAGKTGQVTVFWGRNKAEGSLREACDSGMYTMVTISFLDVFGANGKYHLDLSGHDLSAVGADIKHCQSKGVPVSLSIGGYGARYSLPSNRSALDLFDHLWDSYFGGSKPGVPRPLGDAWLDGVDLFLEHGTPADRYDVLALELAKHNIRGGPGKPLHLTATVRCGYPPAAHVGRALATGIFERVHVRIYEESDKACNQYGAWEEAWDRWTAAYPATRFFIGLTADDKSYQWIHPKNVYYGITPVVQKKENYGGVMLWDRYFDKQSDYSSYIKYYA

SEQ ID NO: 68678 - protein, 247 aa, Triticum aestivum
  peptide (1)..(247): Ceres Seq. ID no. 13654717
MYTMVTISFLDVFGANGKYHLDLSGHDLSAVGADIKHCQSKGVPVSLSIGGYGARYSLPSNRSALDLFDHLWDSYFGGSKPGVPRPLGDAWLDGVDLFLEHGTPADRYDVLALELAKHNIRGGPGKPLHLTATVRCGYPPAAHVGRALATGIFERVHVRIYEESDKACNQYGAWEEAWDRWTAAYPATRFFIGLTADDKSYQWIHPKNVYYGITPVVQKKENYGGVMLWDRYFDKQSDYSSYIKYYA

SEQ ID NO: 68679 - protein, 244 aa, Triticum aestivum
  peptide (1)..(244): Ceres Seq. ID no. 13654718
MVTISFLDVFGANGKYHLDLSGHDLSAVGADIKHCQSKGVPVSLSIGGYGARYSLPSNRSALDLFDHLWDSYFGGSKPGVPRPLGDAWLDGVDLFLEHGTPADRYDVLALELAKHNIRGGPGKPLHLTATVRCGYPPAAHVGRALATGIFERVHVRIYEESDKACNQYGAWEEAWDRWTAAYPATRFFIGLTADDKSYQWIHPKNVYYGITPVVQKKENYGGVMLWDRYFDKQSDYSSYIKYYA

SEQ ID NO: 68680 - DNA, 1288 bp, Triticum aestivum
  misc_feature (1)..(1288): Ceres Seq. ID no. 13662420
ccaaagcagttggtcgctcgctcgctcgctcgccaccgccgcgttggacttttccctcgccggagaaaccgccgcgaccacagccgcaaccgccgcagccgcctccggaggaggagggtagtaccaccagggaaggaggaggccatggcggggaggtacgaccgcaaccccttcgacgaggatgacgtcaaccccttcgcgggaggaggtgtacctccggcttctaattctcggatgccacctcttcctcacgagcctgctggattctataatgatcgtgctgctaccgtggacatacctcttggttcatcgaaggacttgaagcaaaaggagaaagaactgcagtcgaaggaggctgagcttaacaaacgggaaagagaacttaaaagaagggaagaagctgcagctagagctggtattgtcattgaaaccaaaaactggccaccatttatgcccatcattcatcatgacatttcaaatgagataccaatccacctacaaaggatgcagtaccttgcattttgttcattgttgggattgacgttatgcctcttttggaacatcattgcaactaccgcagcatggattaaaggggcaggtgttgtcatctggttgctagcaatcatctacttcatctctggtgtccctggggcgtatgtgttatggtatcggccgctttataatgcaatgaggactgaaagcgctctgaagtttggatggttttttctgctgtacttgatccatataatattctgcatctggtcagctgtgtctcccccatttcctttcaaaggaaaatctatcgctgggtttttgcctgcaattgacgtcataggcagtaatgttattgtggggatattttattttgttggattcggactgttctgccttgaagcactgctcagcattgtggtgatccagcaagtatacatgtacttccgtggaagtggaaaggctgcgcagatgaggcaagaggcagcacgcggtgccatgagatcggccttctgatagagcggtctcgttgatgaatggatgagaataggatgtgccaatcgttgatggcgtcttgtctttgtacatccctatacatatctctgtgcgtggctgtctggctgagagagaatacttgtagctatagatcttcgtgcattcttgtaatatatatgagtgcttcatttctttcctaggccccagatccatgtgctttatatgtagcttaatcttttgggagatacaacttccaacatcactattctgacgagcttgcttgcaatgtcactgtattatg

SEQ ID NO: 68681 - protein, 335 aa, Triticum aestivum
  peptide (1)..(335): Ceres Seq. ID no. 13662421
PKQLVARSLARHRRVGLFPRRRNRRDHSRNRRSRLRRRRVVPPGKEEAMAGRYDRNPFDEDDVNPFAGGGVPPASNSRMPPLPHEPAGFYNDRAATVDIPLGSSKDLKQKEKELQSKEAELNKRERELKRREEAAARAGIVIETKNWPPFMPIIHHDISNEIPIHLQRMQYLAFCSLLGLTLCLFWNIIATTAAWIKGAGVVIWLLAIIYFISGVPGAYVLWYRPLYNAMRTESALKFGWFFLLYLIHIIFCIWSAVSPPFPFKGKSIAGFLPAIDVIGSNVIVGIFYFVGFGLFCLEALLSIVVIQQVYMYFRGSGKAAQMRQEAARGAMRSAF

SEQ ID NO: 68682 - protein, 287 aa, Triticum aestivum
  peptide (1)..(287): Ceres Seq. ID no. 13662422
MAGRYDRNPFDEDDVNPFAGGGVPPASNSRMPPLPHEPAGFYNDRAATVDIPLGSSKDLKQKEKELQSKEAELNKRERELKRREEAAARAGIVIETKNWPPFMPIIHHDISNEIPIHLQRMQYLAFCSLLGLTLCLFWNIIATTAAWIKGAGVVIWLLAIIYFISGVPGAYVLWYRPLYNAMRTESALKFGWFFLLYLIHIIFCIWSAVSPPFPFKGKSIAGFLPAIDVIGSNVIVGIFYFVGFGLFCLEALLSIVVIQQVYMYFRGSGKAAQMRQEAARGAMRSAF

SEQ ID NO: 68683 - protein, 257 aa, Triticum aestivum
  peptide (1)..(257): Ceres Seq. ID no. 13662423
MPPLPHEPAGFYNDRAATVDIPLGSSKDLKQKEKELQSKEAELNKRERELKRREEAAARAGIVIETKNWPPFMPIIHHDISNEIPIHLQRMQYLAFCSLLGLTLCLFWNIIATTAAWIKGAGVVIWLLAIIYFISGVPGAYVLWYRPLYNAMRTESALKFGWFFLLYLIHIIFCIWSAVSPPFPFKGKSIAGFLPAIDVIGSNVIVGIFYFVGFGLFCLEALLSIVVIQQVYMYFRGSGKAAQMRQEAARGAMRSAF

SEQ ID NO: 68684 - DNA, 1619 bp, Triticum aestivum
  misc_feature (1)..(1619): Ceres Seq. ID no. 13503499
acccacgccacgctcgcgctcaaagcctggtcggtaacagagccaaggtgccatttctcgacccccctctccacatacctctcctagctagctacccatccgcttccacttggccatttcccatcccacatcctgcttgcttccggagctcatcagcatcgcttggcctaaggctcgcttcaactgcctgctcttctcagctcatcccctgctggtgtagcatttggagtctcggagactttgaattggctcgccaagaacgagtcctatggaagaaagctccatgaaaagagaagccatgcctcgactcctggatctcatcccggacgagaaagaatggagcctgagaggaggagcgccagggcagggcaggtcaaaaaacacaggcttcgggagcgacgaggacgagaaactggagctgaagcttggccttccaggcctcgtacaagaggagccagcggccagctcaagagagaagagggtgcatcaggagagcccggccctctaccttgggtacccccctagacactccacggccaccacaacgacgaccaccaccggagcaaagagggggttcctggacacggttgaggccaaagcacaaggttatgagaaggagcaggcgagagcagcaacatgtgggaaggaactggcgatggaggaaaatacagaggccgtcggtgagaggaagaaagggtgctgtcccccaccaccaccagcacatgcccctcctgctacacctgcgcgcaacatcggcaacagaccgcaggcgcggggaagaggggctgcaggtccagtggtcggctggcctccaatccggtcattcaggagaaaccttgcaagcactagtgcatccaaacagccccctgaaccacaaatcggtgaagccgatgccaaggccgtgcttgactgcaagaaaagccctcttgtgaaaatcaacatggatgggatccccattggaaggaaagttgatcttgcagcatgtgacagctacgggagactttcattggctgtcaaagatctcttccacgggtttcttcaagtgcaaagggacccgtcgaaggttgaccgtacacagcaaggagcagatgaaaaaatattttcgcagttgctagacgggtccggtgaatatactctagtttacgaagacagtgaaggagacaggatgctggttggggatgtcccttggaatgtgtttgtttcaaccgctaaaaggctgagggttctgagaagctcagagctttcccatgatctgattggagctactcctgagagagcagcaaatggctgaaatggtgacaccttttcaaccatttggaatgttgctcactgaagccgtaaactaaaggaactcctaagaagcaggggagacctaaatcctgtggtcagtttggagatcgttatcctttttgaggattagtagtttggtaacctttttttcttgtagtgagatgaattagcataccgcagatgcatggagatatcctgcctattttgtaaattaggctaccttgtatttaacgctatagttctcgattcagttacatagatttggcgcctattttctctgacaaatttgtaacctgacatgcaaatctgttcatgacaaaagaggaccc

SEQ ID NO: 68685 - protein, 340 aa, Triticum aestivum
  peptide (1)..(340): Ceres Seq. ID no. 15223236
MEESSMKREAMPRLLDLIPDEKEWSLRGGAPGQGRSKNTGFGSDEDEKLELKLGLPGLVQEEPAASSREKRVHQESPALYLGYPPRHSTATTTTTTTGAKRGFLDTVEAKAQGYEKEQARAATCGKELAMEENTEAVGERKKGCCPPPPPAHAPPATPARNIGNRPQARGRGAAGPVVGWPPIRSFRRNLASTSASKQPPEPQIGEADAKAVLDCKKSPLVKINMDGIPIGRKVDLAACDSYGRLSLAVKDLFHGFLQVQRDPSKVDRTQQGADEKIFSQLLDGSGEYTLVYEDSEGDRMLVGDVPWNVFVSTAKRLRVLRSSELSHDLIGATPERAANG

SEQ ID NO: 68686 - protein, 335 aa, Triticum aestivum
  peptide (1)..(335): Ceres Seq. ID no. 15223237
MKREAMPRLLDLIPDEKEWSLRGGAPGQGRSKNTGFGSDEDEKLELKLGLPGLVQEEPAASSREKRVHQESPALYLGYPPRHSTATTTTTTTGAKRGFLDTVEAKAQGYEKEQARAATCGKELAMEENTEAVGERKKGCCPPPPPAHAPPATPARNIGNRPQARGRGAAGPVVGWPPIRSFRRNLASTSASKQPPEPQIGEADAKAVLDCKKSPLVKINMDGIPIGRKVDLAACDSYGRLSLAVKDLFHGFLQVQRDPSKVDRTQQGADEKIFSQLLDGSGEYTLVYEDSEGDRMLVGDVPWNVFVSTAKRLRVLRSSELSHDLIGATPERAANG

SEQ ID NO: 68687 - protein, 330 aa, Triticum aestivum
  peptide (1)..(330): Ceres Seq. ID no. 15223238
MPRLLDLIPDEKEWSLRGGAPGQGRSKNTGFGSDEDEKLELKLGLPGLVQEEPAASSREKRVHQESPALYLGYPPRHSTATTTTTTTGAKRGFLDTVEAKAQGYEKEQARAATCGKELAMEENTEAVGERKKGCCPPPPPAHAPPATPARNIGNRPQARGRGAAGPVVGWPPIRSFRRNLASTSASKQPPEPQIGEADAKAVLDCKKSPLVKINMDGIPIGRKVDLAACDSYGRLSLAVKDLFHGFLQVQRDPSKVDRTQQGADEKIFSQLLDGSGEYTLVYEDSEGDRMLVGDVPWNVFVSTAKRLRVLRSSELSHDLIGATPERAANG

SEQ ID NO: 68688 - DNA, 1438 bp, Triticum aestivum
  misc_feature (1)..(1438): Ceres Seq. ID no. 14302283
ctacaaaacacacgccaccaccctattcctgcctctccactcctcccctctcccctcctcttctcttctctccactgcccaacttttgctatagacaagaaagaacctaagctaggtagctttcctccagagcagagcaatggccatgcatcctcttgcccaggggcacccgcaagcctggccatggggggtagccatgtacacgaacatacactaccaccaccagtacgagagagagcacctgttcgagaaatcctttacgcccagtgacgtgggcaagctcaacaggctggtgatccccaagcagcacgcggagaggtacttccccctcaacggcggagactcccccggtgacaaggacctgctcctgtctttcgaggacgaggccggcaagccgtggcggttccggtactcgtactggacgagcagccagagctacgttctcaccaagggctggagcaggtacgtcaaggagaagcagcttgacgccggagacatcgtgcacttcgagagggtgcgcggccttggcacaggcgaccggctcttcatccactgcaggcgccgtggcgagagcgcgccgccaccacctgtccgcgtacctccgcccgctctgaacgccggggagcagcagccttggagcccgatgtgctatagcacatcaggatcataccctaccagccctgccaactcccatgcctatcgccgctccgtggagcaagatcacagcgagatgctgcatgcaggtgactcgccgagagaggcagacccaagagcagcacggcatcggggccgccgtcgagacgtctacggctgtttggcgtcaacctcgactgcggtccggagccagaggcagaggcagcaacgccaatgtacggctacacccaccagagcccctacgctgcagcagtggccacggtgccaacttactggggcagttcataagatggtgaggtctgaagccatgctcgagtatcctaacaaccagcagtgaaactagtcactactcccaccagccagcctactagctatgctactctggactgagtgacaggcttgaattgaactctggaagaggaagtggaagtggaagatcccttgtttcccgggcaatcttccttccatccacagagtgccctttttttttcctgttttctttcttctggtcttccagagaccctattcgatcacagtacggggcccttagcaggtggcaggtttcaggaaacgtcaggttgaaaaggtgagggaagtgggagagatagagggatggtgacacacatgaaaaacaaaagggcatgcttagcaagcatgcatgtatgtatgtgtcatctgtatgtactgggtccaagaacaaaccatgaagttgatgtatcctctccagcctcctcaagaaacaaagtcatatcccccatgggccatggccatggagattttgtcc

SEQ ID NO: 68689 - protein, 283 aa, Triticum aestivum
  peptide (1)..(283): Ceres Seq. ID no. 14302284
MAMHPLAQGHPQAWPWGVAMYTNIHYHHQYEREHLFEKSFTPSDVGKLNRLVIPKQHAERYFPLNGGDSPGDKDLLLSFEDEAGKPWRFRYSYWTSSQSYVLTKGWSRYVKEKQLDAGDIVHFERVRGLGTGDRLFIHCRRRGESAPPPPVRVPPPALNAGEQQPWSPMCYSTSGSYPTSPANSHAYRRSVEQDHSEMLHAGDSPREADPRAARHRGRRRDVYGCLASTSTAVRSQRQRQQRQCTATPTRAPTLQQWPRCQLTGAVHKMVRSEAMLEYPNNQQ

SEQ ID NO: 68690 - protein, 281 aa, Triticum aestivum
  peptide (1)..(281): Ceres Seq. ID no. 14302285
MHPLAQGHPQAWPWGVAMYTNIHYHHQYEREHLFEKSFTPSDVGKLNRLVIPKQHAERYFPLNGGDSPGDKDLLLSFEDEAGKPWRFRYSYWTSSQSYVLTKGWSRYVKEKQLDAGDIVHFERVRGLGTGDRLFIHCRRRGESAPPPPVRVPPPALNAGEQQPWSPMCYSTSGSYPTSPANSHAYRRSVEQDHSEMLHAGDSPREADPRAARHRGRRRDVYGCLASTSTAVRSQRQRQQRQCTATPTRAPTLQQWPRCQLTGAVHKMVRSEAMLEYPNNQQ

SEQ ID NO: 68691 - protein, 264 aa, Triticum aestivum
  peptide (1)..(264): Ceres Seq. ID no. 14302286
MYTNIHYHHQYEREHLFEKSFTPSDVGKLNRLVIPKQHAERYFPLNGGDSPGDKDLLLSFEDEAGKPWRFRYSYWTSSQSYVLTKGWSRYVKEKQLDAGDIVHFERVRGLGTGDRLFIHCRRRGESAPPPPVRVPPPALNAGEQQPWSPMCYSTSGSYPTSPANSHAYRRSVEQDHSEMLHAGDSPREADPRAARHRGRRRDVYGCLASTSTAVRSQRQRQQRQCTATPTRAPTLQQWPRCQLTGAVHKMVRSEAMLEYPNNQQ

SEQ ID NO: 68692 - DNA, 1854 bp, Triticum aestivum
  misc_feature (1)..(1854): Ceres Seq. ID no. 15176087
attatcgagcttctgcttcccaccttcttctcatagtagctgtctgttcgatccgtcaaatccggccagccgatcttcaataagctgcaccactgccaactagtactgccaaccccacggacggatccaagagagagcggccggccatggaagacgccgtcctcctcaccgtggccaccaccgtgtccatcctctgctgcacgctactcctccgtgcagctcgctcccatcactccaagtccaagctcgtcaccaccgtcccgccgccttccccgtggcggctcccgctcgtgggcaacctgcaccagctcgcgggcggccgcctcccgcaccgcacgctgtccgccctcgccgccgcccacggccccgtcatgctcctccgcctcggccaggtcccggccgtcgtcgtgtcctcgcccgacgccgcgcgggaggtgatgctggagcaggaccacgtcttcgccacccgcccgtcgctcgccatcccctccaagctcttctacggctgcaccgacgtcgccttcgccccggacggcccctactggctgcacgcgcggaagacgtgcgtgctccacctcctcagccccgccagggtgcgggcctaccgcgccgtccgggaggaggaggtgggcgcgctcctggacaaggtccggcggcaggcgcgcgtcgtgaacctgagcgagctcctcgccgggtttgccaaggacgtgatcgggcggatcgtgttcggggcgagcgccgccacgcgcgccgacaggtggggcgccaaggtggacgcgctgctggaggagggcaacgcgctgctcggaacgttccacgtcggcgactacttcccgagactggcgtgggtcggcgccctggacggcaccgacgccaaggtcggcaaggcgttcgacaggatcgacgccgttctcgaggagatcgtcgacgccgcggagagacgaatgggccgagtccacggaggagacgcgctggggctgcacgacagcaccttcgtcgacgtgctgctgtctctcggcaacaacacctccggcaacggcaccggcggcgcgtccccggagcggcggttcacgagggacaacgtcaaggggctcctagcgaatctcttcggggcaggggcagactccaccatcatcgtgctcgaatgggccatggcagagctgctccgcaacaaggaggccatggagaagctacaagacgagctaaggagtagatccgtaagcaccaactccgatatgatcaccgaagaagatttacaggggatggtctacctgaaagcggtgataaaggagacaatgcggctgcaccctcccgggccgctgctgatcccccgcgaggccatggagtccgcgaggatccagcagtacgacgtgccgagcaagaccatggtgatcgtcaacgcgtgggccatcggaagggacccgggcagctgggagtctccggaggagttccgaccggagaggttcctcggcaccggcggcgaggtggacttccggggccggcatttccagctcgtgccgttcggttccgggaggagggtgtgcccggggatcaacttcaccatgtccatcatggaggttgcgattgccaacctcgtcggccggttcgactgggcgctgccggagggcgcggcagcggcggtggacatggaggaggcgcctgggatcacctcacggaagagggttccgcttcacgtcttggctacaccgcgggcgcaggcatcgtgcaatcacgacgtgtagttcggaattcatattgtgctcctccaaatggttctagcaatttgaaggctcatttctttaacaatactttttgtattaatatcaagaagatataagtatgcttgtcctcttc

SEQ ID NO: 68693 - protein, 531 aa, Triticum aestivum
  peptide (1)..(531): Ceres Seq. ID no. 15176088
MEDAVLLTVATTVSILCCTLLLRAARSHHSKSKLVTTVPPPSPWRLPLVGNLHQLAGGRLPHRTLSALAAAHGPVMLLRLGQVPAVVVSSPDAAREVMLEQDHVFATRPSLAIPSKLFYGCTDVAFAPDGPYWLHARKTCVLHLLSPARVRAYRAVREEEVGALLDKVRRQARVVNLSELLAGFAKDVIGRIVFGASAATRADRWGAKVDALLEEGNALLGTFHVGDYFPRLAWVGALDGTDAKVGKAFDRIDAVLEEIVDAAERRMGRVHGGDALGLHDSTFVDVLLSLGNNTSGNGTGGASPERRFTRDNVKGLLANLFGAGADSTIIVLEWAMAELLRNKEAMEKLQDELRSRSVSTNSDMITEEDLQGMVYLKAVIKETMRLHPPGPLLIPREAMESARIQQYDVPSKTMVIVNAWAIGRDPGSWESPEEFRPERFLGTGGEVDFRGRHFQLVPFGSGRRVCPGINFTMSIMEVAIANLVGRFDWALPEGAAAAVDMEEAPGITSRKRVPLHVLATPRAQASCNHDV

SEQ ID NO: 68694 - protein, 456 aa, Triticum aestivum
  peptide (1)..(456): Ceres Seq. ID no. 15176089
MLLRLGQVPAVVVSSPDAAREVMLEQDHVFATRPSLAIPSKLFYGCTDVAFAPDGPYWLHARKTCVLHLLSPARVRAYRAVREEEVGALLDKVRRQARVVNLSELLAGFAKDVIGRIVFGASAATRADRWGAKVDALLEEGNALLGTFHVGDYFPRLAWVGALDGTDAKVGKAFDRIDAVLEEIVDAAERRMGRVHGGDALGLHDSTFVDVLLSLGNNTSGNGTGGASPERRFTRDNVKGLLANLFGAGADSTIIVLEWAMAELLRNKEAMEKLQDELRSRSVSTNSDMITEEDLQGMVYLKAVIKETMRLHPPGPLLIPREAMESARIQQYDVPSKTMVIVNAWAIGRDPGSWESPEEFRPERFLGTGGEVDFRGRHFQLVPFGSGRRVCPGINFTMSIMEVAIANLVGRFDWALPEGAAAAVDMEEAPGITSRKRVPLHVLATPRAQASCNHDV

SEQ ID NO: 68695 - protein, 434 aa, Triticum aestivum
  peptide (1)..(434): Ceres Seq. ID no. 15176090
MLEQDHVFATRPSLAIPSKLFYGCTDVAFAPDGPYWLHARKTCVLHLLSPARVRAYRAVREEEVGALLDKVRRQARVVNLSELLAGFAKDVIGRIVFGASAATRADRWGAKVDALLEEGNALLGTFHVGDYFPRLAWVGALDGTDAKVGKAFDRIDAVLEEIVDAAERRMGRVHGGDALGLHDSTFVDVLLSLGNNTSGNGTGGASPERRFTRDNVKGLLANLFGAGADSTIIVLEWAMAELLRNKEAMEKLQDELRSRSVSTNSDMITEEDLQGMVYLKAVIKETMRLHPPGPLLIPREAMESARIQQYDVPSKTMVIVNAWAIGRDPGSWESPEEFRPERFLGTGGEVDFRGRHFQLVPFGSGRRVCPGINFTMSIMEVAIANLVGRFDWALPEGAAAAVDMEEAPGITSRKRVPLHVLATPRAQASCNHDV

SEQ ID NO: 68696 - DNA, 885 bp, Triticum aestivum
  misc_feature (1)..(885): Ceres Seq. ID no. 13585222
ccccacgactcaaatcgatccgcttcccctttcccgaatcgccaaatccgctcgccgccgtcgccgtaaaaaccctctccccgcctccgctaaccccaccgccgcggagagatggtgctgtgggagatcacggccatcaccgcctacttcctcggcctccgccgcacctaccgcctcgcgctccgcggccagcgccgcctcatcgggcccaaccaccccaggctccgcgacttcgtctacaggcggacacgttctatattcgacgtcgcagtctcagtgcacaagaacattcaggagagggacttggaagttggtcggaacgtcggaaacgcggtccttcgctggctcgaccgcatgaagccatcagcacagatccgcccccaccctccaggcccgccaggctcccccccggagcaactcaggcacctttcgaccatgaataaggccgtaggagctcagaagcctgcctcaaagacctcgacgcacgactcgagcggcaagatgctgttctcgcccctgaacatccggcccaagtccttccctatcctccccacgatgatgcagtccaccaggatcagcgcgagcaaccagtgcaggcgcctctccagctcgccgttcccgtccgtcaccgccaggaggaaggacatgatggagggtgtcttccggaaggacatcgcccagctaatggtgtaagggatgtctgtaggtagccgtactgctttctgtgactctgaatattgtttactcgactggaatttggcctggagcagaactcatcactagccctgtaataatggtggagtgctgaacataatcgctgttgctccgcctgttttgtggccaatatacattttctaacaaatcatcatacgatgagacttaggt

SEQ ID NO: 68697 - protein, 193 aa, Triticum aestivum
  peptide (1)..(193): Ceres Seq. ID no. 13585223
MVLWEITAITAYFLGLRRTYRLALRGQRRLIGPNHPRLRDFVYRRTRSIFDVAVSVHKNIQERDLEVGRNVGNAVLRWLDRMKPSAQIRPHPPGPPGSPPEQLRHLSTMNKAVGAQKPASKTSTHDSSGKMLFSPLNIRPKSFPILPTMMQSTRISASNQCRRLSSSPFPSVTARRKDMMEGVFRKDIAQLMV

SEQ ID NO: 68698 - protein, 146 aa, Triticum aestivum
  peptide (1)..(146): Ceres Seq. ID no. 13585224
PRLKSIRFPFPESPNPLAAVAVKTLSPPPLTPPPRRDGAVGDHGHHRLLPRPPPHLPPRAPRPAPPHRAQPPQAPRLRLQADTFYIRRRSLSAQEHSGEGLGSWSERRKRGPSLARPHEAISTDPPPPSRPARLPPGATQAPFDHE

SEQ ID NO: 68699 - protein, 118 aa, Triticum aestivum
  peptide (1)..(118): Ceres Seq. ID no. 13585225
PTTQIDPLPLSRIAKSARRRRRKNPLPASANPTAAERWCCGRSRPSPPTSSASAAPTASRSAASAASSGPTTPGSATSSTGGHVLYSTSQSQCTRTFRRGTWKLVGTSETRSFAGSTA

SEQ ID NO: 68700 - DNA, 1643 bp, Triticum aestivum
  misc_feature (1)..(1643): Ceres Seq. ID no. 14313563
atgctacaagcagttctacaacactgtacggacgcaggaattcaatggcggttgactccatggaatcggtggccttcgtcgcggtgcccttcccggcgcagggccacctgaaccagctcatgcacctctccctgctggccgcgtcgcgggggctctccgtgcactacgcggcgcccgcggcgcacctccggcaggcccgctcgcgcctgcacggctgggatccgcaggccctcggctccctccagttccacgacctcggcgtctccacgttcgagtccccggcgcccgacccgaccgccccgtgccccttcccgaaccacctcatgtccatgtggcagaccttcaccaccgccgcgcgcgccccgctcgccgccctcctggagagcctctcggccacccaccgccgcgtggtcgtcgtgcacgacaggctcaactccttcgccgccgtcgaggcggcgcggctgagcaacggcgagtcgttcgcgctgcagtgcgtggccatctcgtacaacatcgggtggctggacaccgagcacccgctcctgcgcgacaacgacctccagttccaccccatcgacgcctgcatgtccaaggagttcctggagtacgtcttccagacggagaaggagatggaggaacaggggggcgtgcccaccgccggcatggtcatgaacacgtgccgcgcactcgagggcgacttcatggacgccattgcggcccacccggtgttcaaggaccagaagctcttcgcagttgggccactgaacccgctgctggacgcgagcgcccggacgccggcgacgacgcggcacgactgcatggagtggctcgacaagcagccgccgtcatcggtgctctacgtgtccttcgggacgacgtcgtctctcctgggagagcaaatcgcggagctggcagcggcactcaagggcagcaagcagaggttcatctgggtattgcgcgaggctgaccgtgccgacatattcaaggagcccggcgagagcctgcacgacaagctgctctctgagttcactaaagaaaccgaggggactgggctggtgatcaccgggtgggcgccgcagctggagatcctggcgcacggcgccacggcggcattcatgagccactgcggctggaactcgaccatggagagcctgagccacggcaagccgattctggcatggccaatgcattccgaccagccgtgggacgcggagcttctctgcaagtacctcaaggccgggctcctggtgaggccatgggagaagcacagcgaggtggtgccggcggcggccatccaggaggtgatcgaggaggcgatgctcacggacaaagggatggcggtgcggcagcgggcgaaggtgctcggcgaggccgttcgcgccgccgtggcagacggcggctcctcgagcaaaggcctcgacgacttcgttgcttacgtcacgaggtgatcagcgtatctgtgcgtgccatagacagatacgcattgggcggtttgatcattgcttcggatgtgtttgaaactttgaatcatgctttctacgaaagctggatttcagtatacaatgatttgtcgttttcaatgtattcatctactactcatttttaattacacacaagggccgagaagaaagatttggaggaac

SEQ ID NO: 68701 - protein, 481 aa, Triticum aestivum
  peptide (1)..(481): Ceres Seq. ID no. 14313564
ATSSSTTLYGRRNSMAVDSMESVAFVAVPFPAQGHLNQLMHLSLLAASRGLSVHYAAPAAHLRQARSRLHGWDPQALGSLQFHDLGVSTFESPAPDPTAPCPFPNHLMSMWQTFTTAARAPLAALLESLSATHRRVVVVHDRLNSFAAVEAARLSNGESFALQCVAISYNIGWLDTEHPLLRDNDLQFHPIDACMSKEFLEYVFQTEKEMEEQGGVPTAGMVMNTCRALEGDFMDAIAAHPVFKDQKLFAVGPLNPLLDASARTPATTRHDCMEWLDKQPPSSVLYVSFGTTSSLLGEQIAELAAALKGSKQRFIWVLREADRADIFKEPGESLHDKLLSEFTKETEGTGLVITGWAPQLEILAHGATAAFMSHCGWNSTMESLSHGKPILAWPMHSDQPWDAELLCKYLKAGLLVRPWEKHSEVVPAAAIQEVIEEAMLTDKGMAVRQRAKVLGEAVRAAVADGGSSSKGLDDFVAYVTR

SEQ ID NO: 68702 - protein, 467 aa, Triticum aestivum
  peptide (1)..(467): Ceres Seq. ID no. 14313565
MAVDSMESVAFVAVPFPAQGHLNQLMHLSLLAASRGLSVHYAAPAAHLRQARSRLHGWDPQALGSLQFHDLGVSTFESPAPDPTAPCPFPNHLMSMWQTFTTAARAPLAALLESLSATHRRVVVVHDRLNSFAAVEAARLSNGESFALQCVAISYNIGWLDTEHPLLRDNDLQFHPIDACMSKEFLEYVFQTEKEMEEQGGVPTAGMVMNTCRALEGDFMDAIAAHPVFKDQKLFAVGPLNPLLDASARTPATTRHDCMEWLDKQPPSSVLYVSFGTTSSLLGEQIAELAAALKGSKQRFIWVLREADRADIFKEPGESLHDKLLSEFTKETEGTGLVITGWAPQLEILAHGATAAFMSHCGWNSTMESLSHGKPILAWPMHSDQPWDAELLCKYLKAGLLVRPWEKHSEVVPAAAIQEVIEEAMLTDKGMAVRQRAKVLGEAVRAAVADGGSSSKGLDDFVAYVTR

SEQ ID NO: 68703 - protein, 462 aa, Triticum aestivum
  peptide (1)..(462): Ceres Seq. ID no. 14313566
MESVAFVAVPFPAQGHLNQLMHLSLLAASRGLSVHYAAPAAHLRQARSRLHGWDPQALGSLQFHDLGVSTFESPAPDPTAPCPFPNHLMSMWQTFTTAARAPLAALLESLSATHRRVVVVHDRLNSFAAVEAARLSNGESFALQCVAISYNIGWLDTEHPLLRDNDLQFHPIDACMSKEFLEYVFQTEKEMEEQGGVPTAGMVMNTCRALEGDFMDAIAAHPVFKDQKLFAVGPLNPLLDASARTPATTRHDCMEWLDKQPPSSVLYVSFGTTSSLLGEQIAELAAALKGSKQRFIWVLREADRADIFKEPGESLHDKLLSEFTKETEGTGLVITGWAPQLEILAHGATAAFMSHCGWNSTMESLSHGKPILAWPMHSDQPWDAELLCKYLKAGLLVRPWEKHSEVVPAAAIQEVIEEAMLTDKGMAVRQRAKVLGEAVRAAVADGGSSSKGLDDFVAYVTR

SEQ ID NO: 68704 - DNA, 1487 bp, Triticum aestivum
  misc_feature (1)..(1487): Ceres Seq. ID no. 13596167
cccccctcccgttccaactttattgtgtttaaacatccatcgcttcttccccgaggaagaaaggaaccgccatggcggaggagtgctgcagcgcggacctgctggagtggatcggccctgacgtctcagcatgcgtcttcggccgccttgaccaccccgccgaccttgtccgcgccgccgctgtctccagaacctggcgcagatgcgtggtcgagagcggcttgagcaagagcctttgcctgcggctgtgccccgaggtcgccaccgtcgccgcggcggcagaggtgaccagatcgccgccttcaaccgcctcccccgagtcaggccacgagagggactacaggatatactccaacctcgccggcgcctacgtctccgactccggcgagccctccgcggaatgcatcttgcactgtatcggcgcctcaagcaccgacgacttcccaattgagaccatggagaacaccctcgacgaggaggagataatcaatttccgcccgtcctattggtcgagcggcggggcggacgaccccgaggcgccggagagccttacctacaggctcaactctgacatctgcattgtcgatgaggttcgggtgcgaccgtaccaagccttttttcaggatggtgaccctatatactcttcaaagatggtgcgatttcggatgggccattacaagcttccgcgaggatcagagacgtttgtaatggatgattatgagaataagatggtaaatactgatgaaaaatatatgtggacttacacttcgccagagttccctatgttacagaaaaacgaactacaatccttcaagctcccacgcccagtcctttgcattggtggtgtggtgatgattgaactcttgggcagagtacagaaacaagaagcagatgatatgtactacatatgtgtttgccatgctgaagtgatggggcgttcactctcaccacttttcatggttgacatctcggatcctgaaggttattcaatcctcaagtacttaccgggtgccaaagacctatccatcgatgactttttgcaagatgataccaaagactcgccggagtggcactatcttgttgatagatacaggcagatgaatcacagagcagtagtagtgagtgcacttctggagcctgtacattacatgcatgatgtaggtggcatctcagacgatgatcatgaggatgatgtaggtggcatctcagacgatgattatcttgagtagatttgcgtgctggactgcagctacaactctgccgtggttttactctttgtagtttagtgaacacctctgaactctgcaagcctttgttgcaaacatttctgaagcctcggttctcgaacctagaggacctgatcgagacaagttgcgcttatggtttgcaactctgctcaagcttgcttgtgttttctcttgtgtttttcgtttagtggtgaatatttgtcatatactacttttcaaataaatgccgtttgcggatgg

SEQ ID NO: 68705 - protein, 385 aa, Triticum aestivum
  peptide (1)..(385): Ceres Seq. ID no. 13596168
MAEECCSADLLEWIGPDVSACVFGRLDHPADLVRAAAVSRTWRRCVVESGLSKSLCLRLCPEVATVAAAAEVTRSPPSTASPESGHERDYRIYSNLAGAYVSDSGEPSAECILHCIGASSTDDFPIETMENTLDEEEIINFRPSYWSSGGADDPEAPESLTYRLNSDICIVDEVRVRPYQAFFQDGDPIYSSKMVRFRMGHYKLPRGSETFVMDDYENKMVNTDEKYMWTYTSPEFPMLQKNELQSFKLPRPVLCIGGVVMIELLGRVQKQEADDMYYICVCHAEVMGRSLSPLFMVDISDPEGYSILKYLPGAKDLSIDDFLQDDTKDSPEWHYLVDRYRQMNHRAVVVSALLEPVHYMHDVGGISDDDHEDDVGGISDDDYLE

SEQ ID NO: 68706 - protein, 257 aa, Triticum aestivum
  peptide (1)..(257): Ceres Seq. ID no. 13596169
MENTLDEEEIINFRPSYWSSGGADDPEAPESLTYRLNSDICIVDEVRVRPYQAFFQDGDPIYSSKMVRFRMGHYKLPRGSETFVMDDYENKMVNTDEKYMWTYTSPEFPMLQKNELQSFKLPRPVLCIGGVVMIELLGRVQKQEADDMYYICVCHAEVMGRSLSPLFMVDISDPEGYSILKYLPGAKDLSIDDFLQDDTKDSPEWHYLVDRYRQMNHRAVVVSALLEPVHYMHDVGGISDDDHEDDVGGISDDDYLE

SEQ ID NO: 68707 - protein, 192 aa, Triticum aestivum
  peptide (1)..(192): Ceres Seq. ID no. 13596170
MVRFRMGHYKLPRGSETFVMDDYENKMVNTDEKYMWTYTSPEFPMLQKNELQSFKLPRPVLCIGGVVMIELLGRVQKQEADDMYYICVCHAEVMGRSLSPLFMVDISDPEGYSILKYLPGAKDLSIDDFLQDDTKDSPEWHYLVDRYRQMNHRAVVVSALLEPVHYMHDVGGISDDDHEDDVGGISDDDYLE

SEQ ID NO: 68708 - DNA, 719 bp, Triticum aestivum
  misc_feature (1)..(719): Ceres Seq. ID no. 15172660
tagaacatcctaaccgaaaataccgcagccgccacacacgacgaacaccggaacgaagcagatcggcggcgcgtcactccaatcaccggttcataaaatggcgacggtttcggattctctggtctgggagctcgtcaggaagaacaactgcttcctgatcaagcagttcggcaacagcaatgccaaggtccagttcagcaaggagcccaacaacctctacaatgtccactcctacaagtactctggcctggcaaacaagaagactgtgacagtgcagccagctgctgagaaggagatgactgtggtcctctccacaaccaagtcaaagaagcagaacaagcctgccgcgttcacccacaagactgtcatgcgcaaggagttccgcaagatggccaaggctgtcaagaaccaggtcagtgataactactataggcctgacttgaccaagcctgctcttgcaagactgagtgcagtttaccgcagcctccaggttgccaagtccggtgtcaagaagaagaacaggcagtaagcactgaggggccaatgagcttgttttgtggatccgttggtttatgtttccagctttttagatttgttctaaaagtatggaggttgaatatgatgaatggtgtgtgctgcatactggcacaagttttctcagtaggttctatatctgtacccatgactatgttgtgaagcctcttgaaatcatttccacg

SEQ ID NO: 68709 - protein, 143 aa, Triticum aestivum
  peptide (1)..(143): Ceres Seq. ID no. 15172661
MATVSDSLVWELVRKNNCFLIKQFGNSNAKVQFSKEPNNLYNVHSYKYSGLANKKTVTVQPAAEKEMTVVLSTTKSKKQNKPAAFTHKTVMRKEFRKMAKAVKNQVSDNYYRPDLTKPALARLSAVYRSLQVAKSGVKKKNRQ

SEQ ID NO: 68710 - protein, 77 aa, Triticum aestivum
  peptide (1)..(77): Ceres Seq. ID no. 15172662
MTVVLSTTKSKKQNKPAAFTHKTVMRKEFRKMAKAVKNQVSDNYYRPDLTKPALARLSAVYRSLQVAKSGVKKKNRQ

SEQ ID NO: 68711 - DNA, 688 bp, Triticum aestivum
  misc_feature (1)..(688): Ceres Seq. ID no. 13662405
cactttccccacctctcaggccaagcaaacgcacaccaggcgaggcaacgcaaagaagcaggcaggcagccatgtcgtactacgaccggcgcggggagtcgtcggtgctggaggcgttcacgctgtcgccgctgccgtacccggtgatcctgatcctgatgatggtgacgctgctgctgggggcgtcgtggttcttctcgtacgaggacttcatggaggaggcgtcggagcagttcagctggttcctgctgggcgtgcccatcgcgctcgtcctcctcatccgctggatctcctccgtcgacaccttcgagggctacttcgggttctaccccaccgagagccgctggagggggtacccggccgcgccctccgagggcagctccccctggggcgtcgccatggtcgtcgtcctcctgctcctcctcgccagcttccactccaccttccaggacatgtggaagccttgatggaatgatcgatgctccgatccatacctcgtatgtacgtgtatgtgtgtatgtatgtaattccatcgtatcgatctgtagtacacctacgaatgattgttgcttccaccttccaggcggttgctgcacctgcacgtatgtgtgccttgcttttcctcctgtactgtacatagatgaaggttatattctgctagctgaaaaactatagagcttgagtgtcg

SEQ ID NO: 68712 - protein, 157 aa, Triticum aestivum
  peptide (1)..(157): Ceres Seq. ID no. 13662406
TFPTSQAKQTHTRRGNAKKQAGSHVVLRPARGVVGAGGVHAVAAAVPGDPDPDDGDAAAGGVVVLLVRGLHGGGVGAVQLVPAGRAHRARPPHPLDLLRRHLRGLLRVLPHREPLEGVPGRALRGQLPLGRRHGRRPPAPPRQLPLHLPGHVEALME

SEQ ID NO: 68713 - protein, 154 aa, Triticum aestivum
  peptide (1)..(154): Ceres Seq. ID no. 13662407
LSPPLRPSKRTPGEATQRSRQAAMSYYDRRGESSVLEAFTLSPLPYPVILILMMVTLLLGASWFFSYEDFMEEASEQFSWFLLGVPIALVLLIRWISSVDTFEGYFGFYPTESRWRGYPAAPSEGSSPWGVAMVVVLLLLLASFHSTFQDMWKP

SEQ ID NO: 68714 - protein, 131 aa, Triticum aestivum
  peptide (1)..(131): Ceres Seq. ID no. 13662408
MSYYDRRGESSVLEAFTLSPLPYPVILILMMVTLLLGASWFFSYEDFMEEASEQFSWFLLGVPIALVLLIRWISSVDTFEGYFGFYPTESRWRGYPAAPSEGSSPWGVAMVVVLLLLLASFHSTFQDMWKP

SEQ ID NO: 68715 - DNA, 709 bp, Triticum aestivum
  misc_feature (1)..(709): Ceres Seq. ID no. 13598351
aacgccccgagaacgagaactcctgtgctgtgctgcccctctctctctccccccactgagtctcctgtgctgcccccgctgacctgcggccaccgacggcgagtggaggcggacgacgggttcccgccgcgggctcttcggcggcgccgcgtcagggctcgcgcgggctggtgctgatttgagggagattcggggccggggccggagccggcgcggcctctggggatggggtggctttcctgctgcaagcggtcgaacggggcccaacccggcaggaagaagaagaaggacacgacatggcggatcttctcactcaaggagcttcagttggcgaccaacaatttcaactacgataacaagcttggtgaaggtggattcggcagtgtctactggggccagctctgggacggatcacagattgcggtgaaaaggctcaagagttggagcaacaaggctgaaaaggagtctgctgtcgaggtcgaggttttggcacgagtgcggcataagagcctcttgagcttacgtggatattgcgctgaaggccaggagcgcctgatagtctacgactatatgcagaacctgagcttgcactctcacctgcacggacagcatgcagctgaatgccatcttggttgggagcgaagaatgaacatcgccattgattcggcnnnaggcatcgcttatcttcatcaccatgcgatcccacata

SEQ ID NO: 68716 - protein, 161 aa, Triticum aestivum
  peptide (1)..(161): Ceres Seq. ID no. 13598352
  misc_feature (148)..(148): Xaa is any aa, unknown or other
  misc_feature (149)..(149): Xaa is any aa, unknown or other
MGWLSCCKRSNGAQPGRKKKKDTTWRIFSLKELQLATNNFNYDNKLGEGGFGSVYWGQLWDGSQIAVKRLKSWSNKAEKESAVEVEVLARVRHKSLLSLRGYCAEGQERLIVYDYMQNLSLHSHLHGQHAAECHLGWERRMNIAIDSXXGIAYLHHHAIPH

SEQ ID NO: 68717 - DNA, 1474 bp, Triticum aestivum
  misc_feature (1)..(1474): Ceres Seq. ID no. 13654329
atttcttgtattttgtggattgttggcccaataaacccaatgagagggagcgtgggcgtcatctccgtccaataaaaaaaggatgcgtgggcgaagaggagaatcaaagcaactactcctggcagcagcagctagccagctacccctgcttgctttgctttgcttccccgtcgaggaagaagaagatggggggcgtgggcgtctcccttgcgctgctcgccgccgtcgtcctctccgccgctgctgctgccccgcagctagcgggagcagccaaggcagagcattccctaggaatcatccagaaggacatcattcagacggtcaacaagcatcccaatgccgggtggacggctggacacaacccctacttcgcaaactacactattgagcaattcaagcatatcctgggtgtgaagccaacgcctccgggtttgctcgctggtgttccaatccaaacccatccagaatcagtggatctccccaaggagtttgacgctagaactcaatggtccagttgcagcacaattgggaacatacttgatcaaggtcactgtggtgcctgttgggcctttgctgccgtggaagctctccaggatcgtttctgtattcatctcaacatgagcgtcacactttcggtcaatgacctactggcttgctgtggttttctgtgtggtagcggttgtaatggaggatatcctatcagcgcatggcgctacttccgtcgcagtggtatcgtcactgaggagtgcgatccatacttcgatcagactggttgccagcatcctggatgcgagccagcttatcctacaccaaaatgtcaaaggaaatgcaaggtgcagaaccaagtgtggaaggaaaagaagcatttcagtgttaatgcgtacagagtacattctgatccccatgacatcatggcagaggtctacaaaaatggccctgtagaagttgctttcaccgtttatgaggacttcgcacactacaagtcaggagtgtacaagcacatcacaggtggcgtgatgggaggtcacgccgtcaagttgattggttggggaaccagtgatgctggcgaggattactggcttcttgcaaatcagtggaacagaggctggggtgatgacgggtacttcaagatcataaggggcaagaatgaatgtggcatcgaagaagatgttactgccggtatgccctcgacaaagaacacggccagaaacaatgatgtcgcctttggaacggccatactttgagcagcgccctggttacaaacacggttgaagttagctgtttgcatgtcaaatgaagccagtaaattagctttgatggttccaggatactgtattatgtacactagcgcaaacgctgatatgttgctgaaacaacaccttgttcagaaacaaaagggagtaataataataccaacaaaaccataaggctgtcatctcgaaaaaaaaaawaavgctgtcatctcgataccgtc

SEQ ID NO: 68718 - protein, 413 aa, Triticum aestivum
  peptide (1)..(413): Ceres Seq. ID no. 15219643
FLYFVDCWPNKPNERERGRHLRPIKKGCVGEEENQSNYSWQQQLASYPCLLCFASPSRKKKMGGVGVSLALLAAVVLSAAAAAPQLAGAAKAEHSLGIIQKDIIQTVNKHPNAGWTAGHNPYFANYTIEQFKHILGVKPTPPGLLAGVPIQTHPESVDLPKEFDARTQWSSCSTIGNILDQGHCGACWAFAAVEALQDRFCIHLNMSVTLSVNDLLACCGFLCGSGCNGGYPISAWRYFRRSGIVTEECDPYFDQTGCQHPGCEPAYPTPKCQRKCKVQNQVWKEKKHFSVNAYRVHSDPHDIMAEVYKNGPVEVAFTVYEDFAHYKSGVYKHITGGVMGGHAVKLIGWGTSDAGEDYWLLANQWNRGWGDDGYFKIIRGKNECGIEEDVTAGMPSTKNTARNNDVAFGTAIL

SEQ ID NO: 68719 - protein, 352 aa, Triticum aestivum
  peptide (1)..(352): Ceres Seq. ID no. 15219644
MGGVGVSLALLAAVVLSAAAAAPQLAGAAKAEHSLGIIQKDIIQTVNKHPNAGWTAGHNPYFANYTIEQFKHILGVKPTPPGLLAGVPIQTHPESVDLPKEFDARTQWSSCSTIGNILDQGHCGACWAFAAVEALQDRFCIHLNMSVTLSVNDLLACCGFLCGSGCNGGYPISAWRYFRRSGIVTEECDPYFDQTGCQHPGCEPAYPTPKCQRKCKVQNQVWKEKKHFSVNAYRVHSDPHDIMAEVYKNGPVEVAFTVYEDFAHYKSGVYKHITGGVMGGHAVKLIGWGTSDAGEDYWLLANQWNRGWGDDGYFKIIRGKNECGIEEDVTAGMPSTKNTARNNDVAFGTAIL

SEQ ID NO: 68720 - protein, 208 aa, Triticum aestivum
  peptide (1)..(208): Ceres Seq. ID no. 15219645
MSVTLSVNDLLACCGFLCGSGCNGGYPISAWRYFRRSGIVTEECDPYFDQTGCQHPGCEPAYPTPKCQRKCKVQNQVWKEKKHFSVNAYRVHSDPHDIMAEVYKNGPVEVAFTVYEDFAHYKSGVYKHITGGVMGGHAVKLIGWGTSDAGEDYWLLANQWNRGWGDDGYFKIIRGKNECGIEEDVTAGMPSTKNTARNNDVAFGTAIL

SEQ ID NO: 68721 - DNA, 1451 bp, Triticum aestivum
  misc_feature (1)..(1451): Ceres Seq. ID no. 13596433
tccacctcgcctcgtcgtccgcccacggtctaatccgattcaaacgcaccgcttcctcgtgtccgaactaagccccaatcccgtcaccaccgccgctggtgctcggcgcgatggcgcagaaggacgccgccaatggcaacggcgccaccacgcgcccgccgcccactccctcccccatccgcttctccaagttcttccaggccaacatgcggatcctggtcaccggcggagctggcttcatcggctcgcacctcgtcgacaagctcatggagaacgagaagaacgaggtcattgttgctgacaactttttcactgggtcaaaagacaacctgaagaagtggatcggacaccctagatttgaactcatccgtcacgatgtcaccgaaccactgctcgtggaggttgaccaaatctaccaccttgcttgtcctgcctcaccaatcttctacaagcacaaccctgtcaagaccatcaagacgaatgtcattggaaccttgaacatgcttggacttgcaaagagagttggagctagaatattgttgacttcgacctctgaagtttatggtgatccccttgagcatcctcagacggaggcatactggggcaatgttaacccaattggagtcaggagctgctacgatgagggtaagcgtgtagctgagacactgatgttcgactaccacaggcagcatggcattgagatccgtattgccaggattttcaacacctacggacctaggatgaacattgatgatggccgtgttgttagtaacttcattgctcaggccattcgtggtgaagcactgactgtccagaagcctggaacacagactaggagcttctgctacgtcgctgatatggtcaatggtcttatgaagctgatgaatggagacaacaccggacccattaacattgggaacccaggtgaattcaccatgctggaacttgccgagaatgtgaaggagttgatcaacccagaagtgacagtgacgatgactgagaacactcctgatgaccctcgccagaggaagcctgacatcaccaaggccaaggaggttctcgactgggagcccaaggtcgtcctgcgcgacggcttggtgctcatggaggacgatttcagggagcgcttggcagtgcccaagaagaccaaggcctaagccccctccccgcgtttggcgtacaacatcaccaatttgccagagcatactcatagttgggtgggttcgtcaatattcgttgctgcgtttcgttacggaatttgagttccaataaaccaattacaccttcgttgttcacttgaaagattgtattattagaaacttcatacaaggcctggctgtttgtattaccgtctctttttgtggaacttgtgctccttacgttttagcctatgcacttccctaaatcaattatagcaatgttggtgccattttgggtttgttattaatttg

SEQ ID NO: 68722 - protein, 348 aa, Triticum aestivum
  peptide (1)..(348): Ceres Seq. ID no. 15221872
MAQKDAANGNGATTRPPPTPSPIRFSKFFQANMRILVTGGAGFIGSHLVDKLMENEKNEVIVADNFFTGSKDNLKKWIGHPRFELIRHDVTEPLLVEVDQIYHLACPASPIFYKHNPVKTIKTNVIGTLNMLGLAKRVGARILLTSTSEVYGDPLEHPQTEAYWGNVNPIGVRSCYDEGKRVAETLMFDYHRQHGIEIRIARIFNTYGPRMNIDDGRVVSNFIAQAIRGEALTVQKPGTQTRSFCYVADMVNGLMKLMNGDNTGPINIGNPGEFTMLELAENVKELINPEVTVTMTENTPDDPRQRKPDITKAKEVLDWEPKVVLRDGLVLMEDDFRERLAVPKKTKA

SEQ ID NO: 68723 - protein, 316 aa, Triticum aestivum
  peptide (1)..(316): Ceres Seq. ID no. 15221873
MRILVTGGAGFIGSHLVDKLMENEKNEVIVADNFFTGSKDNLKKWIGHPRFELIRHDVTEPLLVEVDQIYHLACPASPIFYKHNPVKTIKTNVIGTLNMLGLAKRVGARILLTSTSEVYGDPLEHPQTEAYWGNVNPIGVRSCYDEGKRVAETLMFDYHRQHGIEIRIARIFNTYGPRMNIDDGRVVSNFIAQAIRGEALTVQKPGTQTRSFCYVADMVNGLMKLMNGDNTGPINIGNPGEFTMLELAENVKELINPEVTVTMTENTPDDPRQRKPDITKAKEVLDWEPKVVLRDGLVLMEDDFRERLAVPKKTKA

SEQ ID NO: 68724 - protein, 296 aa, Triticum aestivum
  peptide (1)..(296): Ceres Seq. ID no. 15221874
MENEKNEVIVADNFFTGSKDNLKKWIGHPRFELIRHDVTEPLLVEVDQIYHLACPASPIFYKHNPVKTIKTNVIGTLNMLGLAKRVGARILLTSTSEVYGDPLEHPQTEAYWGNVNPIGVRSCYDEGKRVAETLMFDYHRQHGIEIRIARIFNTYGPRMNIDDGRVVSNFIAQAIRGEALTVQKPGTQTRSFCYVADMVNGLMKLMNGDNTGPINIGNPGEFTMLELAENVKELINPEVTVTMTENTPDDPRQRKPDITKAKEVLDWEPKVVLRDGLVLMEDDFRERLAVPKKTKA

SEQ ID NO: 68725 - DNA, 1410 bp, Triticum aestivum
  misc_feature (1)..(1410): Ceres Seq. ID no. 14316032
tgagttcccagcgccctcagagccacagactcgagcgcgcccccatcctgctccccaaccaagaagcgagacgacggtgaccagtccccagaggccagagcgcactcccatcccatggatctgcagaccttcgtgctgagggtgaccatccactgccatggctgcaagaagaaggtccggaaggtgctcaagagcgtcgaaggcgtgcaggacgtgaaggtggatgcccagctgcacaaggtgatggtgaccggcaccgtggacgccgagacgctcatcaagaggctcaacaagtctggcaagcaggccctgccatggcaacacacgcctgccaagaatcccgaccctgcgccagccgacgcccccgcgccggccgaggacggcagcaaggatgctgctgtggccgacaagaagccggcggaggagccgcaggccgacagctcagacaagaagccggagcaggagacggcctcggagaagaagccggagcaggagacggcctcggagaagaagcctgagacggagaaggaagcagagtctgagaagaaggctgacaaggaggaggcgaaaccaagcgacgaggcaaagaaagacggcggcgagggcgcggcggccgagcccaaacccaaagcaaagggcaccgagcccgccgccgctgcaaaggaggccggcgatgacgagggcgaggcgaagaagaaacagagcaagcccaaggacgcggataggtccctggccccagcgccggcgccggcccatgcgccgaggtacgcgcaccaggaattcaacgcgccgcagccggtgatgagctacaacatggcgcagccgagagcgagcgtgtcccactacgcgccgcagccggagcagggctactcgcagcagcagcaggccgggtactcctcctcctcctccatgatggtgacgcagcacccaccgccaccggcgcagcaggcctactcccagcaggcgcagccaatgcagcaatggtcgccgtcctacctctacatgccgtacccgcacgcgtcgccggagtcctactaccaggactactacagcccgcccgggacgcacgcgtcgccgccgcccccgccgccgctccaggactcgtaccgcctattcgacgacgagaaccccaactcgtgcagcgtcatgtgatctgatcacggctccggccaccggcggaaaagtagaggcggccgtcctcataatcgtaatagagacggacctctctggttgtaggtagagtagcttgttactctcttcgattgggaggtcaaagctctccttgaccaatcctttttcttctcacttcttcctctttaatttcttcttttgttattgctactattactgttctaaatagagcatgtaattgtaatttacatgtagaatagtagcatcaatgagatctcc

SEQ ID NO: 68726 - protein, 345 aa, Triticum aestivum
  peptide (1)..(345): Ceres Seq. ID no. 14316033
MDLQTFVLRVTIHCHGCKKKVRKVLKSVEGVQDVKVDAQLHKVMVTGTVDAETLIKRLNKSGKQALPWQHTPAKNPDPAPADAPAPAEDGSKDAAVADKKPAEEPQADSSDKKPEQETASEKKPEQETASEKKPETEKEAESEKKADKEEAKPSDEAKKDGGEGAAAEPKPKAKGTEPAAAAKEAGDDEGEAKKKQSKPKDADRSLAPAPAPAHAPRYAHQEFNAPQPVMSYNMAQPRASVSHYAPQPEQGYSQQQQAGYSSSSSMMVTQHPPPPAQQAYSQQAQPMQQWSPSYLYMPYPHASPESYYQDYYSPPGTHASPPPPPPLQDSYRLFDDENPNSCSVM

SEQ ID NO: 68727 - protein, 302 aa, Triticum aestivum
  peptide (1)..(302): Ceres Seq. ID no. 14316034
MVTGTVDAETLIKRLNKSGKQALPWQHTPAKNPDPAPADAPAPAEDGSKDAAVADKKPAEEPQADSSDKKPEQETASEKKPEQETASEKKPETEKEAESEKKADKEEAKPSDEAKKDGGEGAAAEPKPKAKGTEPAAAAKEAGDDEGEAKKKQSKPKDADRSLAPAPAPAHAPRYAHQEFNAPQPVMSYNMAQPRASVSHYAPQPEQGYSQQQQAGYSSSSSMMVTQHPPPPAQQAYSQQAQPMQQWSPSYLYMPYPHASPESYYQDYYSPPGTHASPPPPPPLQDSYRLFDDENPNSCSVM

SEQ ID NO: 68728 - DNA, 1211 bp, Triticum aestivum
  misc_feature (1)..(1211): Ceres Seq. ID no. 14303535
actttggtcttccacgcccacttccagttccccacactcgcctccatcttcttctcttcgagatgcttcttaggattgcgtcgtctccggccgccgtcgccgcggctagccagctctctgcgtcaagcccggcccacggttatgcgaggctgccgccgttagcgaaagtgtcgtcgacggcgtgcagggccgcggggaaggggaaaaaagaggaggtactcctcagcggtgtgatgttccagccgttcgaggagctcaagggggagctttcgctcgtgccgcaggccgagggccagtcgctcgccaggcaaaagttcgtcgacgaatgcgaggccgccatcaacgagcagatcaatgtggagtacaatgcctcgtacgcgtaccactccctctacgcctacttcgaccgggacaatgttgctctcaagggctttgccaagttctttagggaatcgagcgacgaggagagggaacacgcggagatgcttatggagtaccagaacagacgtggagggcgggtgaggctccagtctatcgtgaccccattgacagagttcgaccactctgagaaaggggatgctctgtatgcaatggagttggctctagctcttgaaaagctcgtgaatgagaagctgcacaacctgcactctgtggcaacaaggtgcaacgatcctcagctgagcgactttgttgagagtcaatttcttcaggagcaggttgtcgccgtgaagaagatctccgagtacgtgacgcagcttaggagaatcggcaaagggcacggggtgtggcactttgatcggatgctgctcgaagaagaggcctagagatcaggccatgaatatgcattgctgctcaggggaagatgcatgtaggtcacaactcacaactgtcaagtagtggatcagccaaccactgtggatgtgtttcttgggtttttcagtgggtttattgagtcgtatgtaaggttttgcgtcctccaaaagaacatggcgcactgaaagtacttcctccgttccaaactactcgtcgcagaaatggatgtatttagaactaaaatacatctagatacacccatacctgcgacaagtaattcggaacggagggagtagtaagtagtagaacatgtgaactatgttacttctgtgcatgtgctgccagtggatacatttgaaattcgcaataaagccaggactatatgtagggtcttgggt

SEQ ID NO: 68729 - protein, 273 aa, Triticum aestivum
  peptide (1)..(273): Ceres Seq. ID no. 14303536
FGLPRPLPVPHTRLHLLLFEMLLRIASSPAAVAAASQLSASSPAHGYARLPPLAKVSSTACRAAGKGKKEEVLLSGVMFQPFEELKGELSLVPQAEGQSLARQKFVDECEAAINEQINVEYNASYAYHSLYAYFDRDNVALKGFAKFFRESSDEEREHAEMLMEYQNRRGGRVRLQSIVTPLTEFDHSEKGDALYAMELALALEKLVNEKLHNLHSVATRCNDPQLSDFVESQFLQEQVVAVKKISEYVTQLRRIGKGHGVWHFDRMLLEEEA

SEQ ID NO: 68730 - protein, 253 aa, Triticum aestivum
  peptide (1)..(253): Ceres Seq. ID no. 14303537
MLLRIASSPAAVAAASQLSASSPAHGYARLPPLAKVSSTACRAAGKGKKEEVLLSGVMFQPFEELKGELSLVPQAEGQSLARQKFVDECEAAINEQINVEYNASYAYHSLYAYFDRDNVALKGFAKFFRESSDEEREHAEMLMEYQNRRGGRVRLQSIVTPLTEFDHSEKGDALYAMELALALEKLVNEKLHNLHSVATRCNDPQLSDFVESQFLQEQVVAVKKISEYVTQLRRIGKGHGVWHFDRMLLEEEA

SEQ ID NO: 68731 - protein, 196 aa, Triticum aestivum
  peptide (1)..(196): Ceres Seq. ID no. 14303538
MFQPFEELKGELSLVPQAEGQSLARQKFVDECEAAINEQINVEYNASYAYHSLYAYFDRDNVALKGFAKFFRESSDEEREHAEMLMEYQNRRGGRVRLQSIVTPLTEFDHSEKGDALYAMELALALEKLVNEKLHNLHSVATRCNDPQLSDFVESQFLQEQVVAVKKISEYVTQLRRIGKGHGVWHFDRMLLEEEA

SEQ ID NO: 68732 - DNA, 1241 bp, Triticum aestivum
  misc_feature (1)..(1241): Ceres Seq. ID no. 13654605
gttaccaccatcctcggcttctctgacgcgccatctccaccgtccgccgtcaatccccaccgcgccacagccgccgcccagatggccgcggctggcggcttctcccccctctccggcaccctcctccgccgccgcatacccctccaccatcaccgccgcttcctctccatcgcggccgctgcctcggaagcccccgcgcctgcccccaccccgtcccagccgccgccgccgccgcgtccacgcggaaaggggtacttccccaagaagaacgagatcctcgagctgacctgcgaggggctcgccttcaaggggaagggcgtctgcaaggtcgacggctcctccttcgtcctgctctgcgacggcgctctccccggcgagcgcctcgtggctcgcgtccgtcgcctccgccgcggcgccttcgccgaggccgccaagctcaagaccctctcgccccaccacgacgccgtcgaggccccctgccccctcgccgccgactgcggcggctgcaagagccagtccctcgcctactctgcgcaaatccaccacaagtacgtccaggtccgcgacctgctggtaaatttcggcaagtttgaccccaggaagctggagagctcggattcagacgccgtccttaagcccatcgtgccgtgcgacgagatatttcggtacaggaacaagatggagttctcgtttgggacgaagaggtggatgaaaagggagtggaaggaggagaaagaggaggtgtcgaagggggaagagttggagactgatggttattcacttggcctccatgcaccagggttctttgacaaggtgcttcacgtcgagacgtgcttgctgcacagtgagccggcagataagactaaagatgaagctagtgaagcaaatgaaaaaggagacatgggctttgatggagaatatgcacatgacactggtgatggtgaaacaatagaaggtggctatgactatgctgattacaacaacgatggctatgctgatggtggtgatgctggagcctacgaggattacgatgggattgattactaatatagtactaaaattctgagaaaacagcccaacaaaataagtcttggtcaaccggaaggggtttatttggacaatgtattatactacctccgtaccaaaatattagctgtttctttaggcgagttttgtagcacaaagaagttccaattaatgatataccgaggcactgcacagtgaagtactccctccgtccc

SEQ ID NO: 68733 - protein, 348 aa, Triticum aestivum
  peptide (1)..(348): Ceres Seq. ID no. 15219686
VTTILGFSDAPSPPSAVNPHRATAAAQMAAAGGFSPLSGTLLRRRIPLHHHRRFLSIAAAASEAPAPAPTPSQPPPPPRPRGKGYFPKKNEILELTCEGLAFKGKGVCKVDGSSFVLLCDGALPGERLVARVRRLRRGAFAEAAKLKTLSPHHDAVEAPCPLAADCGGCKSQSLAYSAQIHHKYVQVRDLLVNFGKFDPRKLESSDSDAVLKPIVPCDEIFRYRNKMEFSFGTKRWMKREWKEEKEEVSKGEELETDGYSLGLHAPGFFDKVLHVETCLLHSEPADKTKDEASEANEKGDMGFDGEYAHDTGDGETIEGGYDYADYNNDGYADGGDAGAYEDYDGIDY

SEQ ID NO: 68734 - protein, 321 aa, Triticum aestivum
  peptide (1)..(321): Ceres Seq. ID no. 15219687
MAAAGGFSPLSGTLLRRRIPLHHHRRFLSIAAAASEAPAPAPTPSQPPPPPRPRGKGYFPKKNEILELTCEGLAFKGKGVCKVDGSSFVLLCDGALPGERLVARVRRLRRGAFAEAAKLKTLSPHHDAVEAPCPLAADCGGCKSQSLAYSAQIHHKYVQVRDLLVNFGKFDPRKLESSDSDAVLKPIVPCDEIFRYRNKMEFSFGTKRWMKREWKEEKEEVSKGEELETDGYSLGLHAPGFFDKVLHVETCLLHSEPADKTKDEASEANEKGDMGFDGEYAHDTGDGETIEGGYDYADYNNDGYADGGDAGAYEDYDGIDY

SEQ ID NO: 68735 - DNA, 958 bp, Triticum aestivum
  misc_feature (1)..(958): Ceres Seq. ID no. 12614289
cagcgactagaatatcccggcccgaaacagcaaggtctctctctcgcgctcgcctctctcctcctcgtcttcggcggcggcgacggcggtggcgatgctgtccggcgacgttcccccgaaccagaccgtctacttcaggaacctcaacgagaaggtcaagaaagaagagctgaagagatcactttatgcattgtgctctcagtatggaaggatagtggatgttgtggccttgaaaactcataaactgagggggcaagcctgggtggcattcagtgaaattacagcggctaccaacgctttccggggcctacaggacttcgatttttacggcaaaaaaatgcgggtacaatatgcaaaaacaaagtctgactgttttgcaaaagcagatgggtcttatgctcctaaagagaaaaggaagaagcaagaggagaaagctgctgagaaaaaacggcgaactgaagatgggcaacaacctggtgctagtgctcctgttgccccaagcaatggaactggtcatcaaccttctcgttttgccaagcctccgcaagagccagctgctccgccgaacaacatcctcttcctccagaacatgccggaccagaccacgagcatgatgctccagatcctgttccagcaataccctggtttccgggaggtgcggatgatcgaagccaagccaggcattgcttttgtggagtacgaggatgagaaccagtccatggttgcaatggaagccctccagggtttcaagatcagcccagagaacccaatggccatctcatacgccaaaaagtgaaaacgatccatgtgatctcggaaccggccaaaagaaatctgtaactgtaagattttccaccttaagctttcaagctgctgtgctgtgcttgtgctggctttctaaccctgtatttcttggaagtgacttgcttgttgtttaagaagttaaaaagtatgtgct

SEQ ID NO: 68736 - protein, 233 aa, Triticum aestivum; identical to SEQ ID NO: 52006
  peptide (1)..(233): Ceres Seq. ID no. 12614290

SEQ ID NO: 68737 - protein, 152 aa, Triticum aestivum; identical to SEQ ID NO: 52007
  peptide (1)..(152): Ceres Seq. ID no. 12614291

SEQ ID NO: 68738 - DNA, 984 bp, Triticum aestivum
  misc_feature (1)..(984): Ceres Seq. ID no. 13596420
acaccaaccaccacctcctccgaggcacgaagtccaccacgcccccgcccgccccgcagccggccggcgacgatgtgcaccctggagcggcgcggccgggtcttcgtcctcaccctgacgggcgaggaccagcaccggctgggccacccgctcatcgccgccatccgctccgcgctggccgaggtcctggccgcggcccaggcccagccgcagggcccgggggcggccctggtgacggtcgccgagggccgcttcttctccaacgggctcgacatcgggtgggcgggcacctcccgcgcgcggctcggggagctcgtcgacgcgctccgccccgtcgccgccgacctgctggccctccccatgcccaccgtcgccgccgtcacgggccacgcctccgccgccggcttcctcctcgcgctctgccacgactaccgcgtcatgcgcgccgaccgcggcgtgctctacatgagcgaggtcgacatcggcctccccctcccgccctacttcgtgcacgtgctccgcgccaagatctcccaggcgcaggccctgcgggacgtggtgctgcgcgggaagaagctccgggcgcccgaggccagggagatgggcgtcgtcgacgtcgtctgccccggcgcccccgagaccgccgccgaggccctcaagctcgccgagcagctcgccgccaggaagtgggacggcgccgtgtacgcgtcgattaggatgtccatgttccccgatgcgtgcagggccgtcgggatcgccgtggagagcgacgaggagaagagcaggcacttcgcctccaggctctgatcaggacacagattggagagtgtctatgtaacctgaaatctctcttggtattctgcacctgtacattgatcagccatcggtgctctgtatgaagcaagcagtacatacttctgcagacgttgtatctccttgctttgggagcatgaaataaacacaacgcttgtgtacgactgttgg

SEQ ID NO: 68739 - protein, 268 aa, Triticum aestivum
  peptide (1)..(268): Ceres Seq. ID no. 13596421
TPTTTSSEARSPPRPRPPRSRPATMCTLERRGRVFVLTLTGEDQHRLGHPLIAAIRSALAEVLAAAQAQPQGPGAALVTVAEGRFFSNGLDIGWAGTSRARLGELVDALRPVAADLLALPMPTVAAVTGHASAAGFLLALCHDYRVMRADRGVLYMSEVDIGLPLPPYFVHVLRAKISQAQALRDVVLRGKKLRAPEAREMGVVDVVCPGAPETAAEALKLAEQLAARKWDGAVYASIRMSMFPDACRAVGIAVESDEEKSRHFASRL

SEQ ID NO: 68740 - protein, 244 aa, Triticum aestivum
  peptide (1)..(244): Ceres Seq. ID no. 13596422
MCTLERRGRVFVLTLTGEDQHRLGHPLIAAIRSALAEVLAAAQAQPQGPGAALVTVAEGRFFSNGLDIGWAGTSRARLGELVDALRPVAADLLALPMPTVAAVTGHASAAGFLLALCHDYRVMRADRGVLYMSEVDIGLPLPPYFVHVLRAKISQAQALRDVVLRGKKLRAPEAREMGVVDVVCPGAPETAAEALKLAEQLAARKWDGAVYASIRMSMFPDACRAVGIAVESDEEKSRHFASRL

SEQ ID NO: 68741 - protein, 237 aa, Triticum aestivum
  peptide (1)..(237): Ceres Seq. ID no. 13596423
TNHHLLRGTKSTTPPPAPQPAGDDVHPGAARPGLRPHPDGRGPAPAGPPAHRRHPLRAGRGPGRGPGPAAGPGGGPGDGRRGPLLLQRARHRVGGHLPRAARGARRRAPPRRRRPAGPPHAHRRRRHGPRLRRRLPPRALPRLPRHARRPRRALHERGRHRPPPPALLRARAPRQDLPGAGPAGRGAAREEAPGARGQGDGRRRRRLPRRPRDRRRGPQARRAARRQEVGRRRVRVD

SEQ ID NO: 68742 - DNA, 1421 bp, Triticum aestivum
  misc_feature (1)..(1421): Ceres Seq. ID no. 13598353
aaaaaaaaaaaaagtatttttcccgtcgttacttcacttccggtgttccctcccctgctggcggctgccggggagcgcagccgcaccagccagccatgaagcgcttcttccagcccgtactcaaggacggatcccccgccaagaagaggcccgccggagccgcgatctctgactgcgttgatggccgcgcccccaccgcggccgacgccggcggggacggccctcccggcgaggagccacgcaggttcatcacgtggaacgccaacagccttctgctccggatgaagagcgactggcccgcgttctgtcagttcgtcgcccgcctcgaccccgacgtcatctgcgtccaggaagtgcggatgccagcagctggttccaaaggggcacctaaaaatcctagtgagctaaaagacgacacaacgtcgtcacgcgaagaaaaacagacagtgctgcgtgctttgtcgagctcacctttcaaagactaccgtgtgtggtggtccctttcagattcaaaatatgcaggcacagctgtgtttatgaagaagaagtttgaaccaaagaaagtgtcattcaacttggatagaacatctactaagcatgatgcagacggtcgtgtcatcattgtggaatttgaatcattcttgttgctaaacacatatgctccaaacaacgggtggaaagaggaggaaaattcatttcaaagaagaagaaagtgggataaaagaatgtcggagtttgttcaacaagtagacaagcccttaatctggtgcggagacctgaacgttagtcatgacgaaatcgatgtcagccatcctgatttttttagcgatgctaagctcaatggatatatccctccaaataaagaggactgtggacagccaggattcacccttgcagagagacagcgctttggcaatatattgtcccagggaaagctggtagatgcttacagatacctgcacaaagaaaaagacatggagtgtggcttctcttggtctgggaatccagttgggaagtaccgaggaaagagaatgcggattgactattttgttatttcagaagggttgaaagacagaattgtttcatgtgaaatgcatggtcatggaattgaactggaaggattttatggaagtgatcactgtcctgtttcacttgtgctctccaaagaagcagcggaagcaccagaatcgaagagctccagctaacttctgtgtttttctcgaaccggacaccatggattattagattattattaggtcagttgaagcgcttggcctatcatgagctatttaaacattttttatgacctgtaggccactactgcggcgcaccctctagtccggatctggattggaattagagttcaactcttactgtgatcagctattggtatctaagttcagatttctaagagttgttcc

SEQ ID NO: 68743 - protein, 400 aa, Triticum aestivum
  peptide (1)..(400): Ceres Seq. ID no. 13598354
KKKKYFSRRYFTSGVPSPAGGCRGAQPHQPAMKRFFQPVLKDGSPAKKRPAGAAISDCVDGRAPTAADAGGDGPPGEEPRRFITWNANSLLLRMKSDWPAFCQFVARLDPDVICVQEVRMPAAGSKGAPKNPSELKDDTTSSREEKQTVLRALSSSPFKDYRVWWSLSDSKYAGTAVFMKKKFEPKKVSFNLDRTSTKHDADGRVIIVEFESFLLLNTYAPNNGWKEEENSFQRRRKWDKRMSEFVQQVDKPLIWCGDLNVSHDEIDVSHPDFFSDAKLNGYIPPNKEDCGQPGFTLAERQRFGNILSQGKLVDAYRYLHKEKDMECGFSWSGNPVGKYRGKRMRIDYFVISEGLKDRIVSCEMHGHGIELEGFYGSDHCPVSLVLSKEAAEAPESKSSS

SEQ ID NO: 68744 - protein, 369 aa, Triticum aestivum
  peptide (1)..(369): Ceres Seq. ID no. 13598355
MKRFFQPVLKDGSPAKKRPAGAAISDCVDGRAPTAADAGGDGPPGEEPRRFITWNANSLLLRMKSDWPAFCQFVARLDPDVICVQEVRMPAAGSKGAPKNPSELKDDTTSSREEKQTVLRALSSSPFKDYRVWWSLSDSKYAGTAVFMKKKFEPKKVSFNLDRTSTKHDADGRVIIVEFESFLLLNTYAPNNGWKEEENSFQRRRKWDKRMSEFVQQVDKPLIWCGDLNVSHDEIDVSHPDFFSDAKLNGYIPPNKEDCGQPGFTLAERQRFGNILSQGKLVDAYRYLHKEKDMECGFSWSGNPVGKYRGKRMRIDYFVISEGLKDRIVSCEMHGHGIELEGFYGSDHCPVSLVLSKEAAEAPESKSSS

SEQ ID NO: 68745 - protein, 307 aa, Triticum aestivum
  peptide (1)..(307): Ceres Seq. ID no. 13598356
MKSDWPAFCQFVARLDPDVICVQEVRMPAAGSKGAPKNPSELKDDTTSSREEKQTVLRALSSSPFKDYRVWWSLSDSKYAGTAVFMKKKFEPKKVSFNLDRTSTKHDADGRVIIVEFESFLLLNTYAPNNGWKEEENSFQRRRKWDKRMSEFVQQVDKPLIWCGDLNVSHDEIDVSHPDFFSDAKLNGYIPPNKEDCGQPGFTLAERQRFGNILSQGKLVDAYRYLHKEKDMECGFSWSGNPVGKYRGKRMRIDYFVISEGLKDRIVSCEMHGHGIELEGFYGSDHCPVSLVLSKEAAEAPESKSSS

SEQ ID NO: 68746 - DNA, 1728 bp, Triticum aestivum
  misc_feature (1)..(1728): Ceres Seq. ID no. 13662416
agcgttctactcctctcttttgtttcccctcgacggcggcggcggcggcggcaaccagggtttagaggaggagaagcttgctcggcgcaaaaccctagccccgcaccttcatctacggattcatcgcgcctctgcagcgcatccttgccgagtgccccgcctcgctgcatcggcggtcgcgatgagggtgaaggtgatatcgcgctcgaccgacgacttcacgcgcgagcgcagccaggacctgcagaaagtattccgcaattatgatccagcactccgtagtcaagagaaagctgttgagtacactcgagcccttaatgctgcaaagttagagaagatatttgccaggccatttattggagcaatggatggtcacattgatgctgtttcgtgcatggcgaagaactccaattatgtgaaagctatgttttctggctcgatggatggggatattcgactatgggacattgctgcaaggaagacagtctgccagttccctggacaccagggtgctgtgagaggtttggcaacatctaccgacggcgatcttctgatatcctgtggtgttgattgcactgttcgactctggaaagatcctatgcgtaagatgatggacactaatgatgctattggagatgcttcccagccgtcagcagtctatacatggaagcatgcattttggggtgttgaccaccagtgggatcgtaatgttttcgcaactgtaggtgctcaggtagatatatgggaccataacaggtcggagccaataaataccttcgaatggggtaaagatacagttctttctgtgcggtttaatcctggagaacctgatgttttacttacatcatctagtgatcggagtttaacactttttgacctgcgcatgtcatccccagctagaaagttaatcatgaagacaaggtgcaattcagtttgctggaaccctagggagcccatgaacttcactgctgcaaacgaagatacaaactgttattcttttgatgctagaaagctgaatgaagccaaggttgttcacaagggtcatgtttcagcagtgatggatgttgattacaacccaacaggacgggaatttgttactggttcctacgatagaacggtacggatcttcaattataacggtgatcatagcagggagatataccatactaagaggatgcaaagggtgttttgtgtgaaatacacatatgatgggacctatctagtttctggcagtgatgacacaaatcttcgtctgtggaagtccaaagcttcagaacaattgggagttattcttccaagggaacgcaaaaagcaagaatatcttgatgctgtcaaggcgcggtataatcaccttccagaaatcaggcggattgacaaacataagcacttgcccaagccgatctacaaggcaggcaagataaggcgcgccatgattgaagcagaaagccggaaagaagaaagaaggcgagcgcacagtgctccagggagcaggactatgcagcccttcagaaagagaaggctcatcacagaagttgagtagggtgggatctgaccatcgcgaggccaaacaaagtggcattacgttggagtattatttttggtcgagtgtgagtgatgggaagctgggaacatatttattatgtgtagtgtcatgttgttacttgcaaaccttggacaacgtaccggattacttttgagaaggaaataaagaggacttgttgtatgggc

SEQ ID NO: 68747 - protein, 512 aa, Triticum aestivum
  peptide (1)..(512): Ceres Seq. ID no. 13662417
AFYSSLLFPLDGGGGGGNQGLEEEKLARRKTLAPHLHLRIHRASAAHPCRVPRLAASAVAMRVKVISRSTDDFTRERSQDLQKVFRNYDPALRSQEKAVEYTRALNAAKLEKIFARPFIGAMDGHIDAVSCMAKNSNYVKAMFSGSMDGDIRLWDIAARKTVCQFPGHQGAVRGLATSTDGDLLISCGVDCTVRLWKDPMRKMMDTNDAIGDASQPSAVYTWKHAFWGVDHQWDRNVFATVGAQVDIWDHNRSEPINTFEWGKDTVLSVRFNPGEPDVLLTSSSDRSLTLFDLRMSSPARKLIMKTRCNSVCWNPREPMNFTAANEDTNCYSFDARKLNEAKVVHKGHVSAVMDVDYNPTGREFVTGSYDRTVRIFNYNGDHSREIYHTKRMQRVFCVKYTYDGTYLVSGSDDTNLRLWKSKASEQLGVILPRERKKQEYLDAVKARYNHLPEIRRIDKHKHLPKPIYKAGKIRRAMIEAESRKEERRRAHSAPGSRTMQPFRKRRLITEVE

SEQ ID NO: 68748 - protein, 452 aa, Triticum aestivum
  peptide (1)..(452): Ceres Seq. ID no. 13662418
MRVKVISRSTDDFTRERSQDLQKVFRNYDPALRSQEKAVEYTRALNAAKLEKIFARPFIGAMDGHIDAVSCMAKNSNYVKAMFSGSMDGDIRLWDIAARKTVCQFPGHQGAVRGLATSTDGDLLISCGVDCTVRLWKDPMRKMMDTNDAIGDASQPSAVYTWKHAFWGVDHQWDRNVFATVGAQVDIWDHNRSEPINTFEWGKDTVLSVRFNPGEPDVLLTSSSDRSLTLFDLRMSSPARKLIMKTRCNSVCWNPREPMNFTAANEDTNCYSFDARKLNEAKVVHKGHVSAVMDVDYNPTGREFVTGSYDRTVRIFNYNGDHSREIYHTKRMQRVFCVKYTYDGTYLVSGSDDTNLRLWKSKASEQLGVILPRERKKQEYLDAVKARYNHLPEIRRIDKHKHLPKPIYKAGKIRRAMIEAESRKEERRRAHSAPGSRTMQPFRKRRLITEVE

SEQ ID NO: 68749 - protein, 391 aa, Triticum aestivum
  peptide (1)..(391): Ceres Seq. ID no. 13662419
MDGHIDAVSCMAKNSNYVKAMFSGSMDGDIRLWDIAARKTVCQFPGHQGAVRGLATSTDGDLLISCGVDCTVRLWKDPMRKMMDTNDAIGDASQPSAVYTWKHAFWGVDHQWDRNVFATVGAQVDIWDHNRSEPINTFEWGKDTVLSVRFNPGEPDVLLTSSSDRSLTLFDLRMSSPARKLIMKTRCNSVCWNPREPMNFTAANEDTNCYSFDARKLNEAKVVHKGHVSAVMDVDYNPTGREFVTGSYDRTVRIFNYNGDHSREIYHTKRMQRVFCVKYTYDGTYLVSGSDDTNLRLWKSKASEQLGVILPRERKKQEYLDAVKARYNHLPEIRRIDKHKHLPKPIYKAGKIRRAMIEAESRKEERRRAHSAPGSRTMQPFRKRRLITEVE

SEQ ID NO: 68750 - DNA, 1370 bp, Triticum aestivum
  misc_feature (1)..(1370): Ceres Seq. ID no. 13596227
atcaccagtaaagcagcaagtaattccactctcgccgccgcagccagccagcctccggcgctctctcggacgctcccgcatacgtacaagcaaaagcaaccagagccagccatgtgccccggggcgccggtcgcggcggcggcgtcggacaagagcgtgtgcgtgatggacgcgtccggcccgctgggccacgcgctcgtgcaccgcctcctccgccggggctacaccgtccacgccgccacctacggccactcgctcgacgcgctcgcgctgctcgccgccgccggccacgacgaggaccggctcaagctcttccgcgccgaccccttcgactaccacaccatcgccgacgccgtccgcggctgctccggcctcttctgcatgttcaacacccacgaggaccaggcgggctgcgacgaggttatggtggaggtggaggtccgggcggcgcagaacgtgctggaggcgtgcgcgcagacggtgaccatggagagggtggtcttcacctcctccgtcaccgccgtcgtctggaaggacgaccacaagctggtcgacgcctttgacgagaggaactggagcgacctcaacctctgcaggaaacgcaagttgtggcacgctctggcaaagacgctgtcggagaagacggcctgggccttggccatggacagaggggtggacatggtggccatcaacgccggcctgctcaccgggccggggctctcctccgcccacccctgcctcaagggggtcccggagatgtacgagcacggcgtcctcgtcaccgtcgacgccgacttcctcgccgacgcccacgtggctgcctacgagtgccccacggcgttcggccgctacctctgcttcaacaatgtcgtgtgcaggcctgaggacgccctccagttcgctcagatgctcaccccgtccgctccatgctacccgccaagtgacgagctgaaggtgatcccgcagaggattcagaacaagaagctgaacaacctgatggtggagtttgccagtgccatatacggggacttggattagggattccattattcattcgtttacctcacaagggcagctagggttgtattctttatgtacctaaatatctgtattctttttcctcctgaaaagggaaatatggttggtcagatgtacaaatctgtacgaggccaagcatgccgcatgtattccactcttaccaggctggtaagagcatttgagccagtgcttagcaaggtagtaatccttaggtccaccaaaagggaaaataagtctgcagttatgttactgccttgtacagcagcaatatatgaatatatgatggtgaacaaatgttgaaaaaaaaaaaaaaaaaagcttatcgataccgt

SEQ ID NO: 68751 - protein, 345 aa, Triticum aestivum
  peptide (1)..(345): Ceres Seq. ID no. 15221812
ITSKAASNSTLAAAASQPPALSRTLPHTYKQKQPEPAMCPGAPVAAAASDKSVCVMDASGPLGHALVHRLLRRGYTVHAATYGHSLDALALLAAAGHDEDRLKLFRADPFDYHTIADAVRGCSGLFCMFNTHEDQAGCDEVMVEVEVRAAQNVLEACAQTVTMERVVFTSSVTAVVWKDDHKLVDAFDERNWSDLNLCRKRKLWHALAKTLSEKTAWALAMDRGVDMVAINAGLLTGPGLSSAHPCLKGVPEMYEHGVLVTVDADFLADAHVAAYECPTAFGRYLCFNNVVCRPEDALQFAQMLTPSAPCYPPSDELKVIPQRIQNKKLNNLMVEFASAIYGDLD

SEQ ID NO: 68752 - protein, 308 aa, Triticum aestivum
  peptide (1)..(308): Ceres Seq. ID no. 15221813
MCPGAPVAAAASDKSVCVMDASGPLGHALVHRLLRRGYTVHAATYGHSLDALALLAAAGHDEDRLKLFRADPFDYHTIADAVRGCSGLFCMFNTHEDQAGCDEVMVEVEVRAAQNVLEACAQTVTMERVVFTSSVTAVVWKDDHKLVDAFDERNWSDLNLCRKRKLWHALAKTLSEKTAWALAMDRGVDMVAINAGLLTGPGLSSAHPCLKGVPEMYEHGVLVTVDADFLADAHVAAYECPTAFGRYLCFNNVVCRPEDALQFAQMLTPSAPCYPPSDELKVIPQRIQNKKLNNLMVEFASAIYGDLD

SEQ ID NO: 68753 - protein, 290 aa, Triticum aestivum
  peptide (1)..(290): Ceres Seq. ID no. 15221814
MDASGPLGHALVHRLLRRGYTVHAATYGHSLDALALLAAAGHDEDRLKLFRADPFDYHTIADAVRGCSGLFCMFNTHEDQAGCDEVMVEVEVRAAQNVLEACAQTVTMERVVFTSSVTAVVWKDDHKLVDAFDERNWSDLNLCRKRKLWHALAKTLSEKTAWALAMDRGVDMVAINAGLLTGPGLSSAHPCLKGVPEMYEHGVLVTVDADFLADAHVAAYECPTAFGRYLCFNNVVCRPEDALQFAQMLTPSAPCYPPSDELKVIPQRIQNKKLNNLMVEFASAIYGDLD

SEQ ID NO: 68754 - DNA, 1264 bp, Triticum aestivum
  misc_feature (1)..(1264): Ceres Seq. ID no. 13596436
aaaaacaaaatccacaaaagatcttgcagaaattaaaaataggaaacggaaacgcccccctctctctcttccagctcctcctccacgccaccccgattcgatcactccccgagcagaatccccccgattcgatcaccggcgaggagaggagggaggggatgaggaagcgggagcgggagaacccgtgcgggatctgcgggcactaccacaagtacgaggagggggagccgtgcggggtgtgcggccaccgcccgccggcgctggggcccgccgggccggcggccgcgccgcggcaggagtcggcgttcccctcggagatactcaaggacttcctcttcctcggcagctacgacaacgcctcccgctccgagctcctcaagaccatcggcatctcccacatcctcaacactgtacccttatgccaaaacctttaccggaactcttttacttatcactgccttcaagacgacaagactttgcagtttgatgatgcaatccaattcctagaacaatgcgagagggataaagcacgagtgctagtccattgcatgtcagggaaaagtaggtcagctgcatttgttgtagccttcttgatgaagtccagaggctggcgacttgcacaatgttttcagtgggtgaaagaacggaggccacaagtgcaactggctgatgcggcacagcagcagttgattgagtatgagcagaagcttttcagttgcaatgttgctccaacggattcattcccttctcttggatttggttttccgaagccgtctggtgatgtccaggtgcctatctttaaccagcaggctccagggtccatctttgagcgggtcagcccgaataacatcccgagtaatttcacatttggggccaccgaagctaagctcccggatggcagtaacttcggtgtggtcaacttggctgggactgatagcatgatggacagctcctaggttactactattgcaatgctataaacggatgagctgcccatttagtcagatttcttggaacattttgaatttctgggaaggaaggttgcattctttgtacgaggcttcttacaatatgtgcaagcattttggccgttgtgatgttctgcagtttaacatgcacgtgcgcttttgttcaactttgtagagtaattcaggtgaactgaaattacgctagaaagtttgagtagaagtatcatatgtggctgttaaattgtacagattcgtgtgtcaagaaagtacagctcaaaatctatacatgttgcccc

SEQ ID NO: 68755 - protein, 317 aa, Triticum aestivum
  peptide (1)..(317): Ceres Seq. ID no. 13596437
KQNPQKILQKLKIGNGNAPLSLFQLLLHATPIRSLPEQNPPDSITGEERREGMRKRERENPCGICGHYHKYEEGEPCGVCGHRPPALGPAGPAAAPRQESAFPSEILKDFLFLGSYDNASRSELLKTIGISHILNTVPLCQNLYRNSFTYHCLQDDKTLQFDDAIQFLEQCERDKARVLVHCMSGKSRSAAFVVAFLMKSRGWRLAQCFQWVKERRPQVQLADAAQQQLIEYEQKLFSCNVAPTDSFPSLGFGFPKPSGDVQVPIFNQQAPGSIFERVSPNNIPSNFTFGATEAKLPDGSNFGVVNLAGTDSMMDSS

SEQ ID NO: 68756 - protein, 265 aa, Triticum aestivum
  peptide (1)..(265): Ceres Seq. ID no. 13596438
MRKRERENPCGICGHYHKYEEGEPCGVCGHRPPALGPAGPAAAPRQESAFPSEILKDFLFLGSYDNASRSELLKTIGISHILNTVPLCQNLYRNSFTYHCLQDDKTLQFDDAIQFLEQCERDKARVLVHCMSGKSRSAAFVVAFLMKSRGWRLAQCFQWVKERRPQVQLADAAQQQLIEYEQKLFSCNVAPTDSFPSLGFGFPKPSGDVQVPIFNQQAPGSIFERVSPNNIPSNFTFGATEAKLPDGSNFGVVNLAGTDSMMDSS

SEQ ID NO: 68757 - protein, 161 aa, Triticum aestivum
  peptide (1)..(161): Ceres Seq. ID no. 13596439
KTKSTKDLAEIKNRKRKRPPLSLPAPPPRHPDSITPRAESPRFDHRRGEEGGDEEAGAGEPVRDLRALPQVRGGGAVRGVRPPPAGAGARRAGGRAAAGVGVPLGDTQGLPLPRQLRQRLPLRAPQDHRHLPHPQHCTLMPKPLPELFYLSLPSRRQDFAV

SEQ ID NO: 68758 - DNA, 1344 bp, Triticum aestivum
  misc_feature (1)..(1344): Ceres Seq. ID no. 13598319
aaaaactcaccaagcaaacacttgagctaaccatatctagtccatatcctctcccaagctagctcgaagcagcaatggcgaaatctttcaccttattagcgctacttagcgcactggttgtcctctcacttcttgtgagccccattgcttgttcccgcaagctccccaggcctgcaaccaaggcccacaagaaccacaccgctgctaccccttcgtcgtctgccgcttatggctccggcggctggttagccggcggcgcgacgtattacggcgcccccaacggcgacggaagcgacggtggcgcgtgtggctaccagagcgctgtcggcaaccggccgttctcgtcgatgatcgccgccggcaacccgtcgctctacagagatggcaagggctgcggagcgtgctacgaggttaaatgcacaggcaaccaggcatgctccggccagccggcgaccgtcgtcatcaccgacgagtgccccgccggggccgcttgcctcggtgaggccgcccacttcgacatgagcggcacctccatgggcgccatggcgaagcctggcatggccgacaaactccgggccggcggtatcatcaagatccagtacaagagggtgccatgcaagtaccctggcatgaacattgccttcaaggtggaccagggctccaacccctactacctggaggtcctgatcgaattcgaggacgacgacggcgacctcaacgccgtggacctcatggaggccaactgcggcacctggacgcccatggcgcagaactggggcgcgctgtaccgcctcaactccaacaccggcaagccgctgcgcgggcccttctcgctccggctcacctccgactccggcaggaagctcgtcgtcaacaacgtcatccccgccagctggaaggccggagccacctaccgctccttggttaactacccctaagttacagcctcatcaactttttttcactgcgccgtacgtgcttggctagtaaccaagaagtgcagtgcagagtgtggtcgtggtaatttagaaccgcgggttaatttctaccgcggggattgtatttatacgaatatgcgtccgggaacggcaggaggctgtgtcagaggaggaggagcaggccatgcaaagattgtgccagctcttccctccatggtctctcggcgctcccctagtgatgcgtgtcgtcgatttgtatgtattttgtttctcttcctctgttttgtcgatgaggagaaaagcttgtagtgcagtgcaaactaaagttgcacgccgatgtatcaagttgtgtgagtgtgtttttggagcccaatccttgagagaaatgaacttttaccatcagatc

SEQ ID NO: 68759 - protein, 287 aa, Triticum aestivum
  peptide (1)..(287): Ceres Seq. ID no. 13598320
MAKSFTLLALLSALVVLSLLVSPIACSRKLPRPATKAHKNHTAATPSSSAAYGSGGWLAGGATYYGAPNGDGSDGGACGYQSAVGNRPFSSMIAAGNPSLYRDGKGCGACYEVKCTGNQACSGQPATVVITDECPAGAACLGEAAHFDMSGTSMGAMAKPGMADKLRAGGIIKIQYKRVPCKYPGMNIAFKVDQGSNPYYLEVLIEFEDDDGDLNAVDLMEANCGTWTPMAQNWGALYRLNSNTGKPLRGPFSLRLTSDSGRKLVVNNVIPASWKAGATYRSLVNYP

SEQ ID NO: 68760 - protein, 196 aa, Triticum aestivum
  peptide (1)..(196): Ceres Seq. ID no. 13598321
MIAAGNPSLYRDGKGCGACYEVKCTGNQACSGQPATVVITDECPAGAACLGEAAHFDMSGTSMGAMAKPGMADKLRAGGIIKIQYKRVPCKYPGMNIAFKVDQGSNPYYLEVLIEFEDDDGDLNAVDLMEANCGTWTPMAQNWGALYRLNSNTGKPLRGPFSLRLTSDSGRKLVVNNVIPASWKAGATYRSLVNYP

SEQ ID NO: 68761 - DNA, 1753 bp, Triticum aestivum
  misc_feature (1)..(1753): Ceres Seq. ID no. 13590666
atttttccactctcactccccgcagtcccccgctcgaagcctccaaaaccctaccgaactccgccccgccagccatggcgccgccccccacctccggcccgcagcagcggcggctcctccaggcggcggccgacggcgacctccgcctcttcaagagcatcgcgagcgcgctggacggcgggaagggccgcgtcaaggaggcggtggaggccgtcaggaattgcggcgccggggcgctgcacaccgccgccggccgcgggaggaccccgatgtgcgcgtacttggtggaggagcttggcgtggacgtcaatgctgcagacgacaaaggtgctacacctctgacttatgcacttcgttggcgggctgtggatactgtgaggtatctctttgatcatggtgccgatgcagaaaagcctggtgaacaaggttttacccctcttcatgtggcagctggagcaggattgtgtgaaatgatagaagtcttgctctcaaaaggagctgatgttaattgcttttcttaccgtgggacactactgcattctgctattatcggaaagcaggttgctgccgtgaagctcttgttggatcatcatgcggattgtaacaagccagtgtccctacattatacacctcttatcgctgctctccatgcccgctcgctgaaatgtgtgaagcttctgattgaggcgggtgctgatgcgaagggtgttcctccgctaacccccttagtagttgctgcaaatgacggtttaactgatttctacgaacctttacttcgggttggtgctgatcctgatgttcgtgatgatggaggtcagctgccaatagagattgctgcacgtaacaatagacggaaagatgttgagatcctttttccagtaacatctcatattccctatgtgcgtgattggagtgttgatgggatacttgcttatgtcaaatcagtgccgaaggaggaggatgacccgttatacaaaatggggccagcttatctgaaactggaaggaaccaaggcttacaagagaaaagattatgtttctgcaataaatttctactccatggcaatcaagcttaaccctggagatgtaaccttgcattcaaataagagcctttgctggattaacctgggggaaggagacaaggccttggaggacgccgagttttgcaggatgatacggcctgattggccaaaggcctgttacaggcaaggggctgcccaaatgttattgaagaactatgaaaaggcatgtgaagcattccaagatggtctgaagttggacccaacaaatgttgagattgagaatgcattacgtgtgcggttcagggaaccggaggtgagacaatgcgacatgaagcaggctagtatggacgtactcctccttgcgtattccggtgtggttgcagtaaggcctgtgaaatgcccaacacacagtgctcaagacccgatttgcggcagcgtggatgaatgtgtccaagaatgcggcgatgaaggctaccattttgggatgtgcagccattgcaaatgtttctgcttcaactgcacctcatcacttgacgctaaaccggcacccggagccttgagtccttgaacgagtacgcacctaatctaaaaagctgcatcaataaacaaaaattgatatccttttcctttgtttttcttctttggtcctttgtatgtggatggtcaaagaggatcttgtgttctatatatattaacgtgggatagcggaacccattcagccgatttgtatgg

SEQ ID NO: 68762 - protein, 528 aa, Triticum aestivum
  peptide (1)..(528): Ceres Seq. ID no. 15220995
FSTLTPRSPPLEASKTLPNSAPPAMAPPPTSGPQQRRLLQAAADGDLRLFKSIASALDGGKGRVKEAVEAVRNCGAGALHTAAGRGRTPMCAYLVEELGVDVNAADDKGATPLTYALRWRAVDTVRYLFDHGADAEKPGEQGFTPLHVAAGAGLCEMIEVLLSKGADVNCFSYRGTLLHSAIIGKQVAAVKLLLDHHADCNKPVSLHYTPLIAALHARSLKCVKLLIEAGADAKGVPPLTPLVVAANDGLTDFYEPLLRVGADPDVRDDGGQLPIEIAARNNRRKDVEILFPVTSHIPYVRDWSVDGILAYVKSVPKEEDDPLYKMGPAYLKLEGTKAYKRKDYVSAINFYSMAIKLNPGDVTLHSNKSLCWINLGEGDKALEDAEFCRMIRPDWPKACYRQGAAQMLLKNYEKACEAFQDGLKLDPTNVEIENALRVRFREPEVRQCDMKQASMDVLLLAYSGVVAVRPVKCPTHSAQDPICGSVDECVQECGDEGYHFGMCSHCKCFCFNCTSSLDAKPAPGALSP

SEQ ID NO: 68763 - protein, 504 aa, Triticum aestivum
  peptide (1)..(504): Ceres Seq. ID no. 15220996
MAPPPTSGPQQRRLLQAAADGDLRLFKSIASALDGGKGRVKEAVEAVRNCGAGALHTAAGRGRTPMCAYLVEELGVDVNAADDKGATPLTYALRWRAVDTVRYLFDHGADAEKPGEQGFTPLHVAAGAGLCEMIEVLLSKGADVNCFSYRGTLLHSAIIGKQVAAVKLLLDHHADCNKPVSLHYTPLIAALHARSLKCVKLLIEAGADAKGVPPLTPLVVAANDGLTDFYEPLLRVGADPDVRDDGGQLPIEIAARNNRRKDVEILFPVTSHIPYVRDWSVDGILAYVKSVPKEEDDPLYKMGPAYLKLEGTKAYKRKDYVSAINFYSMAIKLNPGDVTLHSNKSLCWINLGEGDKALEDAEFCRMIRPDWPKACYRQGAAQMLLKNYEKACEAFQDGLKLDPTNVEIENALRVRFREPEVRQCDMKQASMDVLLLAYSGVVAVRPVKCPTHSAQDPICGSVDECVQECGDEGYHFGMCSHCKCFCFNCTSSLDAKPAPGALSP

SEQ ID NO: 68764 - protein, 439 aa, Triticum aestivum
  peptide (1)..(439): Ceres Seq. ID no. 15220997
MCAYLVEELGVDVNAADDKGATPLTYALRWRAVDTVRYLFDHGADAEKPGEQGFTPLHVAAGAGLCEMIEVLLSKGADVNCFSYRGTLLHSAIIGKQVAAVKLLLDHHADCNKPVSLHYTPLIAALHARSLKCVKLLIEAGADAKGVPPLTPLVVAANDGLTDFYEPLLRVGADPDVRDDGGQLPIEIAARNNRRKDVEILFPVTSHIPYVRDWSVDGILAYVKSVPKEEDDPLYKMGPAYLKLEGTKAYKRKDYVSAINFYSMAIKLNPGDVTLHSNKSLCWINLGEGDKALEDAEFCRMIRPDWPKACYRQGAAQMLLKNYEKACEAFQDGLKLDPTNVEIENALRVRFREPEVRQCDMKQASMDVLLLAYSGVVAVRPVKCPTHSAQDPICGSVDECVQECGDEGYHFGMCSHCKCFCFNCTSSLDAKPAPGALSP

SEQ ID NO: 68765 - DNA, 888 bp, Triticum aestivum
  misc_feature (1)..(888): Ceres Seq. ID no. 12614779
acggacacacacacgcacacacacatacctcgtcggacctcgtcggttccttccgcaggagatcggcatgggagctgagcagcagcagcagcagaccgccgggggcagcaggttcgccgcggcgtttggcctgctgcgccagtacatgaaggaccagcctgggggcggcgtggtcaccgtgggcctcatgccgggcggcggcgacggcgtcgaggcggtcgcgccggaggagaggatccggaccatggagctcttcccccagcaggccggcatggtcagggactcgcgcgaaaggacggggccggagagggcgccgctgaccatcttctacgccgggaggacggtggtgttcgacgacttccccgccgagaaggccaaggagctcatgcagctcgccggctccttcggcgcgctgccggccgcctccgacgccggcgccgagcccgtctgccagaacgcgccggggcagccttgctttgcagacctgccgatcgcgaggaaggcgtcgctccataggttcctggagaagaggaagagcaggctggccgcggcagatccgtaccctgcgccggtggcggcgccaggggctgggacggccggcaagcctgtgccggaggacggcggcgcgccgtggctcggcgtcaactccgcgctccagctcaactgaaggatttgacgagccggggagaggaacaaatcactgccttgctgcttctccacgtagtagtatatacagtactactctactactacgtggatccttgattgttgccgtttttatcttactaccacgcccgttaattggctgcgtcagggtaattaactgcgtggcgccggctaaatatatatcctgggttaagtagtataagtatgttcttcatctgtttg

SEQ ID NO: 68766 - protein, 221 aa, Triticum aestivum
  peptide (1)..(221): Ceres Seq. ID no. 12614780
RTHTRTHTYLVGPRRFLPQEIGMGAEQQQQQTAGGSRFAAAFGLLRQYMKDQPGGGVVTVGLMPGGGDGVEAVAPEERIRTMELFPQQAGMVRDSRERTGPERAPLTIFYAGRTVVFDDFPAEKAKELMQLAGSFGALPAASDAGAEPVCQNAPGQPCFADLPIARKASLHRFLEKRKSRLAAADPYPAPVAAPGAGTAGKPVPEDGGAPWLGVNSALQLN

SEQ ID NO: 68767 - protein, 199 aa, Triticum aestivum
  peptide (1)..(199): Ceres Seq. ID no. 12614781
MGAEQQQQQTAGGSRFAAAFGLLRQYMKDQPGGGVVTVGLMPGGGDGVEAVAPEERIRTMELFPQQAGMVRDSRERTGPERAPLTIFYAGRTVVFDDFPAEKAKELMQLAGSFGALPAASDAGAEPVCQNAPGQPCFADLPIARKASLHRFLEKRKSRLAAADPYPAPVAAPGAGTAGKPVPEDGGAPWLGVNSALQLN

SEQ ID NO: 68768 - protein, 173 aa, Triticum aestivum
  peptide (1)..(173): Ceres Seq. ID no. 12614782
MKDQPGGGVVTVGLMPGGGDGVEAVAPEERIRTMELFPQQAGMVRDSRERTGPERAPLTIFYAGRTVVFDDFPAEKAKELMQLAGSFGALPAASDAGAEPVCQNAPGQPCFADLPIARKASLHRFLEKRKSRLAAADPYPAPVAAPGAGTAGKPVPEDGGAPWLGVNSALQLN

SEQ ID NO: 68769 - DNA, 1481 bp, Triticum aestivum
  misc_feature (1)..(1481): Ceres Seq. ID no. 13596440
acaactcctgctccggcacccccttccctccccagccttctccaccgctctccctcccccctcgtcggcggcgaaaatctccggatccatcccggcctccgttccatcgccaccctctccacccgcaagggtttaattctgaggggaatttccgagcatttcctgcctgcctacggcgtaaatacaggtctgcgggctgtcctgcttcgtctcgcggtcttcgatgcgtggtggaggcaacacggataggatgcagcaggttcagcacacggttcagacgcacggatatggactggccagaaagcacacttatgactgggtcgttcttacgctcctagctgcggccgtggtcgtcttgcattatgctccgccgtttaatcggttcgttgggaaggatatgatggctgatattaggtacccggtgaaacagagtactgtgccagcatgggctgttcctgtaatctctatgctgtgtccagtgcttgttttcgtagcggtgtatgttgctagaagggacgtctatgaccttcaccacgcaacgctaggtgttattttcgctgtgctgatcactgccgcgttcactgatgtgataaagactgcagtagggagaccaaggccagacttcttttggcggtgttttcctgatggaaggcaggtatatgatcaagtgacaggtggtgtgatttgccatggcgagaaaggtttcttaaccgatgggcgcaagagttttcctagtggacacacgtcgtggtcttttgctggacttggatttttgtcactatacttatctggcaaaattaaggcgtttgatcgcaaaggtcatgtggcaaaactttgcatcgtgattcttcctcttcttcttgcttcgcttgttggggtttctagaatagacaactatcggcaccactgggaggatgtgcttgtcggtggcctgattggatatatcatggcagtgctgtgctatctgcacttctttcctcctccatatcaccatcaaggttggggtccctatgcgtacttccacatgctggaagagcttgaggtgcacaattcaaataatgcacaaaaccagcagtctgcaggtgagcatcatatcggattgaccggccaacaccataacgggagatcaagaaatgatttggaatctggaagtgtgtaactcacccctctgtggaaccgactagcataccttgtacagtaagcatgcgttaaaaacttttttatgtgtgcactaagcaagtattaggagtttagaactagatatgtgctatctccccctcatgtttgtgtacaaaagtcattcgctcagtatattctgacctagttgttctagggccacctgttgtatctaaatgatgtgttaacgtcgtagaccgtgtgagtggccggtggacgtactgagtacgaacttattccgctgttcaacaagcacaactgagcgatgataatgacaagcatatctagagccattgaacattccc

SEQ ID NO: 68770 - protein, 311 aa, Triticum aestivum
  peptide (1)..(311): Ceres Seq. ID no. 13596441
MRGGGNTDRMQQVQHTVQTHGYGLARKHTYDWVVLTLLAAAVVVLHYAPPFNRFVGKDMMADIRYPVKQSTVPAWAVPVISMLCPVLVFVAVYVARRDVYDLHHATLGVIFAVLITAAFTDVIKTAVGRPRPDFFWRCFPDGRQVYDQVTGGVICHGEKGFLTDGRKSFPSGHTSWSFAGLGFLSLYLSGKIKAFDRKGHVAKLCIVILPLLLASLVGVSRIDNYRHHWEDVLVGGLIGYIMAVLCYLHFFPPPYHHQGWGPYAYFHMLEELEVHNSNNAQNQQSAGEHHIGLTGQHHNGRSRNDLESGSV

SEQ ID NO: 68771 - protein, 302 aa, Triticum aestivum
  peptide (1)..(302): Ceres Seq. ID no. 13596442
MQQVQHTVQTHGYGLARKHTYDWVVLTLLAAAVVVLHYAPPFNRFVGKDMMADIRYPVKQSTVPAWAVPVISMLCPVLVFVAVYVARRDVYDLHHATLGVIFAVLITAAFTDVIKTAVGRPRPDFFWRCFPDGRQVYDQVTGGVICHGEKGFLTDGRKSFPSGHTSWSFAGLGFLSLYLSGKIKAFDRKGHVAKLCIVILPLLLASLVGVSRIDNYRHHWEDVLVGGLIGYIMAVLCYLHFFPPPYHHQGWGPYAYFHMLEELEVHNSNNAQNQQSAGEHHIGLTGQHHNGRSRNDLESGSV

SEQ ID NO: 68772 - protein, 253 aa, Triticum aestivum
  peptide (1)..(253): Ceres Seq. ID no. 13596443
MMADIRYPVKQSTVPAWAVPVISMLCPVLVFVAVYVARRDVYDLHHATLGVIFAVLITAAFTDVIKTAVGRPRPDFFWRCFPDGRQVYDQVTGGVICHGEKGFLTDGRKSFPSGHTSWSFAGLGFLSLYLSGKIKAFDRKGHVAKLCIVILPLLLASLVGVSRIDNYRHHWEDVLVGGLIGYIMAVLCYLHFFPPPYHHQGWGPYAYFHMLEELEVHNSNNAQNQQSAGEHHIGLTGQHHNGRSRNDLESGSV

SEQ ID NO: 68773 - DNA, 955 bp, Triticum aestivum
  misc_feature (1)..(955): Ceres Seq. ID no. 14302111
aaccaatcaactgaccaaccaccacgagccaagagccaacccacaccactctgtgtctgtactcagcgcgagctcacgggctccacaatgcctcgctccggcgctctccccctcctcgccgcgctggtcctcgccttggcggccgcggcggcggcgtcggcctcgaactcgaagggcgctccggcggccaccgacttcatccgcaagtcgtgccgcgagacgcagtacccgtcggtgtgcatgcagagcctgtcgtcgtacggcaaaccgccgccgcgcagcccgcaggagctggcgcgcgcggcgctgtcggtgagcgcggaccgcgcgcggtcggcgtcggcgtacgtggggcggatctgcgggccgggcctccgcagcggcagcggcgccaaggcgaagagcagccccgcgcgcgactgcctggagaacatggcggacagcgtgggccacctgcgcgacgcggccaaggagctggacgggagcctgggccgggccgggtcgccggcgttcaggtggcacctgagcaacgtgcagacctggtgcagcgcggcgctcaccgacgagaacacctgcctcgacgggctctcccgcggcgtggacgccggcacgcgcgccgccatccggagcaaggtcgtggaggtcgcccaggtcaccagcaacgccctggcgctcgtcaacaaggtcgggtccgggcactagcccggcccgtcccaggcccatccccactcgtttcgccttgctacgtactactacgcgcgtacgcatggcagctcgaatcctggtgctctataatcttgggtcatgtactactgtattccagtttcgatgtgttcttgctgtgctgtaaaatgtacttagctaagacaatcaattaagagtgtaattaatgataaggtggcgaaactaagccaaagtgtgtgttctcttgctagctatagcttttgattaacat

SEQ ID NO: 68774 - protein, 233 aa, Triticum aestivum
  peptide (1)..(233): Ceres Seq. ID no. 14302112
NQSTDQPPRAKSQPTPLCVCTQRELTGSTMPRSGALPLLAALVLALAAAAAASASNSKGAPAATDFIRKSCRETQYPSVCMQSLSSYGKPPPRSPQELARAALSVSADRARSASAYVGRICGPGLRSGSGAKAKSSPARDCLENMADSVGHLRDAAKELDGSLGRAGSPAFRWHLSNVQTWCSAALTDENTCLDGLSRGVDAGTRAAIRSKVVEVAQVTSNALALVNKVGSGH

SEQ ID NO: 68775 - protein, 204 aa, Triticum aestivum
  peptide (1)..(204): Ceres Seq. ID no. 14302113
MPRSGALPLLAALVLALAAAAAASASNSKGAPAATDFIRKSCRETQYPSVCMQSLSSYGKPPPRSPQELARAALSVSADRARSASAYVGRICGPGLRSGSGAKAKSSPARDCLENMADSVGHLRDAAKELDGSLGRAGSPAFRWHLSNVQTWCSAALTDENTCLDGLSRGVDAGTRAAIRSKVVEVAQVTSNALALVNKVGSGH

SEQ ID NO: 68776 - protein, 153 aa, Triticum aestivum
  peptide (1)..(153): Ceres Seq. ID no. 14302114
MQSLSSYGKPPPRSPQELARAALSVSADRARSASAYVGRICGPGLRSGSGAKAKSSPARDCLENMADSVGHLRDAAKELDGSLGRAGSPAFRWHLSNVQTWCSAALTDENTCLDGLSRGVDAGTRAAIRSKVVEVAQVTSNALALVNKVGSGH

SEQ ID NO: 68777 - DNA, 1268 bp, Triticum aestivum
  misc_feature (1)..(1268): Ceres Seq. ID no. 12593499
aatcgaaaagatcgggacggtaccggtacgggagtccgccaatttccggcgcgcgggaaaatttcccgcactcgcgctcgagcctcgcccgctataagaaagaatcgcaccaccacggtttcctgctccacttcccccacttccgccgcctcccaccgaatgggccgcaagaggagggctagggtttccagcgacagcgacggcgacgacgtcgagatgaacggcgatgagcccgcccccgccgccgcggagagcaagagcctctacgagatattaggggttgcgagcacagcttcacaacaggagataaaaaaggcatatcacaagttggccttgcgtcttcacccagataagaatcctggagatgaggaagccaacgaaaaatttcagcagctgcaaaaggtgatatctattcttggagatcaggagaaaagggcattgtatgatgagactggaattactgatgatgatgcactggttggagaagctgcagacaatctccaagcgtacttcagaacagtgtacagaaaggtcacagaggctgacattgaagaatttgaagctaagtatagagggtcagactctgagaaaaaggatttaaaggaactgtacacaaaatttaagggcaacatgaacagactcttctgctcaatgatttgctcagatgccaagcttgattctcaccgcttcaaagatataattgatcaggcaattgctgaaggcgaggtgaagtccaccaaagtgtatgcgaaatgggctaaaaagatctctgagatagaaccacccacaaacccattggagaggagagtgaagaaaaagaagagccaggagagcgacctcatcctggcgatctcgcagcgcagggaacagaggaaggagcggtttgactctgttctgtcatctataatgtccaagtgtgatgacaacaaggcgggcagctcagagcccacggaggaggagtttgagcgcgctcggcagaggcttgagaagaagcgcaccaaggggcgcaaatggtatgaatcttgacatgcatgcgcaaatgatatgaatcttgacatgcatgcaggcccttcgagaaaagatgggtgttgagtggagtggagtggaggggttgtgtcgcaactgtagtgtcgctttgttttatgagtgggcgtgtgtataagtaactgaatgcaagtgtggtgtggttttagatgtgaacaactgtggaagtgtcctgtcccatgaatgaaatgaaatccccggcatggccaggtgatagtctgtcc

SEQ ID NO: 68778 - protein, 341 aa, Triticum aestivum
  peptide (1)..(341): Ceres Seq. ID no. 12593500
NRKDRDGTGTGVRQFPARGKISRTRARASPAIRKNRTTTVSCSTSPTSAASHRMGRKRRARVSSDSDGDDVEMNGDEPAPAAAESKSLYEILGVASTASQQEIKKAYHKLALRLHPDKNPGDEEANEKFQQLQKVISILGDQEKRALYDETGITDDDALVGEAADNLQAYFRTVYRKVTEADIEEFEAKYRGSDSEKKDLKELYTKFKGNMNRLFCSMICSDAKLDSHRFKDIIDQAIAEGEVKSTKVYAKWAKKISEIEPPTNPLERRVKKKKSQESDLILAISQRREQRKERFDSVLSSIMSKCDDNKAGSSEPTEEEFERARQRLEKKRTKGRKWYES

SEQ ID NO: 68779 - protein, 288 aa, Triticum aestivum
  peptide (1)..(288): Ceres Seq. ID no. 12593501
MGRKRRARVSSDSDGDDVEMNGDEPAPAAAESKSLYEILGVASTASQQEIKKAYHKLALRLHPDKNPGDEEANEKFQQLQKVISILGDQEKRALYDETGITDDDALVGEAADNLQAYFRTVYRKVTEADIEEFEAKYRGSDSEKKDLKELYTKFKGNMNRLFCSMICSDAKLDSHRFKDIIDQAIAEGEVKSTKVYAKWAKKISEIEPPTNPLERRVKKKKSQESDLILAISQRREQRKERFDSVLSSIMSKCDDNKAGSSEPTEEEFERARQRLEKKRTKGRKWYES

SEQ ID NO: 68780 - protein, 269 aa, Triticum aestivum
  peptide (1)..(269): Ceres Seq. ID no. 12593502
MNGDEPAPAAAESKSLYEILGVASTASQQEIKKAYHKLALRLHPDKNPGDEEANEKFQQLQKVISILGDQEKRALYDETGITDDDALVGEAADNLQAYFRTVYRKVTEADIEEFEAKYRGSDSEKKDLKELYTKFKGNMNRLFCSMICSDAKLDSHRFKDIIDQAIAEGEVKSTKVYAKWAKKISEIEPPTNPLERRVKKKKSQESDLILAISQRREQRKERFDSVLSSIMSKCDDNKAGSSEPTEEEFERARQRLEKKRTKGRKWYES

SEQ ID NO: 68781 - DNA, 1637 bp, Triticum aestivum
  misc_feature (1)..(1637): Ceres Seq. ID no. 13661452
aacccgcgtgctctcgccgcctcctcctccctccccccgcggcgtcgccgaacgaaaccctagctccgtcgcgcccgcccgcgccgtcgtctcgccggagagcggagagggcggagagggagagggagcgggaggcggggatggggaagaagaagaagcgggtggagaaggtgttctgctactactgcgaccgggagttcgacgacgagaagatcctggtgcagcaccagaaggccaagcacttcaagtgccacgtctgccacaagaagctctcgaccgccggcggcatggccatccacgtcctccaggtccacaaggagtccgtcaccaaggttccgaatgccaagcccgagagggattccaccgagatcgagatcttcggcatgcaggggatcccctccgacgtgctcgccgcccactatggggaagaggaagatccttcatcaaaggtggccaaagtagaagtgccgacaataagacctcctattatgcctaattatccgctaggcatgccttttcctcctcggccttatggtgcagcccgccctatgtataatcctgcaatgatggtccgacctccgatttggcctcttcagcagccgcaaccttggtttgctcaacaaccaccggtttcagttcccccaatgatggctgggcaagcaccacagcaaccactattccccattcaaaacatgcccaatcctatgatgacatcagcacctgctaatttacttcagacatcatacgctatgcccaccacaggggttccttcacctgttgcccctcaggcttcccagcttttgtttcccgttaacaccagtggcaatggagcagcaaattcgtcattcagctcgtcaatttcacctgcaactattgcagcaaattctccagcatcagttggtactgcaggatatggctatgtagctaataaccatggtacaggagggccagcaattggacagccacctgcacctgccactaatagtaaaacgtctgctactcaaccagctacgagtgaggtctatctggtgtgggatgatgaagcaatgtcaatggaggaaagaaggttggcgctgcccatgtaccaggtgcatgacgaaactagccagatgagctcggttgatgcagcgttcgatcgaagaatatcagatattacattttctagacaattgacataaacaagctgcgcctggtgttcagtaaacagcttgatgcgattcaccaacgggctcacccgtgcatccatgggagggacgccgtgcaatcggtggtcctggatcccccctgttgttgatctacttagttagtgactggagctaccgcagtggaaagattgtgttggtctgacttggagattttgattcaacatcgtttgtcctgtcttttcgtaccgagagtggaaacctgttagacctagaagtcatttgttccgttgtcgattgactgacgatatgagtatcttcagctctgtaaacctgacgatgagattagcagtgtcttttcagcggctgtgctgctgttgagtaccatatgttgttggcaccgtcattttgccttccgcagcgtgatcatgtatccatggctagcaaaagcaaaagaggtgttgcttgtttcagcaaatttctcatagggaatgc

SEQ ID NO: 68782 - protein, 391 aa, Triticum aestivum
  peptide (1)..(391): Ceres Seq. ID no. 15218781
PACSRRLLLPPPAASPNETLAPSRPPAPSSRRRAERAEREREREAGMGKKKKRVEKVFCYYCDREFDDEKILVQHQKAKHFKCHVCHKKLSTAGGMAIHVLQVHKESVTKVPNAKPERDSTEIEIFGMQGIPSDVLAAHYGEEEDPSSKVAKVEVPTIRPPIMPNYPLGMPFPPRPYGAARPMYNPAMMVRPPIWPLQQPQPWFAQQPPVSVPPMMAGQAPQQPLFPIQNMPNPMMTSAPANLLQTSYAMPTTGVPSPVAPQASQLLFPVNTSGNGAANSSFSSSISPATIAANSPASVGTAGYGYVANNHGTGGPAIGQPPAPATNSKTSATQPATSEVYLVWDDEAMSMEERRLALPMYQVHDETSQMSSVDAAFDRRISDITFSRQLT

SEQ ID NO: 68783 - protein, 345 aa, Triticum aestivum
  peptide (1)..(345): Ceres Seq. ID no. 15218782
MGKKKKRVEKVFCYYCDREFDDEKILVQHQKAKHFKCHVCHKKLSTAGGMAIHVLQVHKESVTKVPNAKPERDSTEIEIFGMQGIPSDVLAAHYGEEEDPSSKVAKVEVPTIRPPIMPNYPLGMPFPPRPYGAARPMYNPAMMVRPPIWPLQQPQPWFAQQPPVSVPPMMAGQAPQQPLFPIQNMPNPMMTSAPANLLQTSYAMPTTGVPSPVAPQASQLLFPVNTSGNGAANSSFSSSISPATIAANSPASVGTAGYGYVANNHGTGGPAIGQPPAPATNSKTSATQPATSEVYLVWDDEAMSMEERRLALPMYQVHDETSQMSSVDAAFDRRISDITFSRQLT

SEQ ID NO: 68784 - protein, 296 aa, Triticum aestivum
  peptide (1)..(296): Ceres Seq. ID no. 15218783
MAIHVLQVHKESVTKVPNAKPERDSTEIEIFGMQGIPSDVLAAHYGEEEDPSSKVAKVEVPTIRPPIMPNYPLGMPFPPRPYGAARPMYNPAMMVRPPIWPLQQPQPWFAQQPPVSVPPMMAGQAPQQPLFPIQNMPNPMMTSAPANLLQTSYAMPTTGVPSPVAPQASQLLFPVNTSGNGAANSSFSSSISPATIAANSPASVGTAGYGYVANNHGTGGPAIGQPPAPATNSKTSATQPATSEVYLVWDDEAMSMEERRLALPMYQVHDETSQMSSVDAAFDRRISDITFSRQLT

SEQ ID NO: 68785 - DNA, 1426 bp, Triticum aestivum
  misc_feature (1)..(1426): Ceres Seq. ID no. 13495341
atcactcatcacaccaacctaaacgaacctttcctgaagcggcggcacggcggcggcgcggccaaaacccgccgaatccagctcgccgcggtggtcgtcaccctccaccgctccctctccgcgcggcgacaccatttaaacctcgccgcctgccgccgcttttttcctcccagatgcttcccccaatctccaccatcccacccacctttccccttccccaccccgccttcacaaaacctagcctcccttaccacctccgctcgccctccctcctggcaaccttctcctcctccgcggcgggtcgggcctgcgggatagcgggccgttggatgggctcggttcgagcctcgccctctgaggcggggggctgggcggtggctgcggcgggtaaggagggggtggacatggagcggctggtggcggtggcgcagagcgcggcggatgcggcgggggaggtgctcaggaagtacttcaggcagcgcttcgagatcatcgacaaagaggaccacagtcccgtcacgatcgctgatagagaagcagaagaagcaatgacctcagtcatactgaagagctttcctactcatgctgttttcggtgaggagaacggttggaggtgtgcagagaagtctgctgactatgtttgggtcttggaccccatagatggaacaaagagcttcataactgggaagcctctttttggtacgcttattgcgcttcttcacaatggaaagccggttatgggcattattgatcagccaatcttgagagagagatgggttggggtggacgggaagaaaactaccttaaatggacaagaaatatctgtccgtccttgcaatgtactggagcaagcttacttatatactacgagtccacatctctttgaaggagatgctgaagatgcattcattcgtgtacgagacaaggtgaaagtcccattgtatggctgtgattgttatgcttatgctctcctggcttctggttttgtggatcttgttgttgaatctggattgaagccatacgattttctctcgctggtaccggtgattgaaggagctgggggctcaataactgattgggaagggaacaagctccactggcctgtctcttcggaatctcggccaacaagtttcaacgtggtggcagccggagattcccatgtccatgggcaggccctggcagcgttgcggtggcgctagcctgcctgcagcacggggcggctcctattgtttatttagaaggctgcaactgttattcatctatccaataaaactgagtctgtacgcttcctcagtgggtaaagcaagttgttcacggtgcaccctttactcaataatgatcagtggtttcttgttgtgtgttatgatcagccgttatgtactcagttactcaagtcatttgatgatcgctgagcgacttgattgcc

SEQ ID NO: 68786 - protein, 398 aa, Triticum aestivum
  peptide (1)..(398): Ceres Seq. ID no. 15222951
HSSHQPKRTFPEAAARRRRGQNPPNPARRGGRHPPPLPLRAATPFKPRRLPPLFSSQMLPPISTIPPTFPLPHPAFTKPSLPYHLRSPSLLATFSSSAAGRACGIAGRWMGSVRASPSEAGGWAVAAAGKEGVDMERLVAVAQSAADAAGEVLRKYFRQRFEIIDKEDHSPVTIADREAEEAMTSVILKSFPTHAVFGEENGWRCAEKSADYVWVLDPIDGTKSFITGKPLFGTLIALLHNGKPVMGIIDQPILRERWVGVDGKKTTLNGQEISVRPCNVLEQAYLYTTSPHLFEGDAEDAFIRVRDKVKVPLYGCDCYAYALLASGFVDLVVESGLKPYDFLSLVPVIEGAGGSITDWEGNKLHWPVSSESRPTSFNVVAAGDSHVHGQALAALRWR

SEQ ID NO: 68787 - protein, 341 aa, Triticum aestivum
  peptide (1)..(341): Ceres Seq. ID no. 15222952
MLPPISTIPPTFPLPHPAFTKPSLPYHLRSPSLLATFSSSAAGRACGIAGRWMGSVRASPSEAGGWAVAAAGKEGVDMERLVAVAQSAADAAGEVLRKYFRQRFEIIDKEDHSPVTIADREAEEAMTSVILKSFPTHAVFGEENGWRCAEKSADYVWVLDPIDGTKSFITGKPLFGTLIALLHNGKPVMGIIDQPILRERWVGVDGKKTTLNGQEISVRPCNVLEQAYLYTTSPHLFEGDAEDAFIRVRDKVKVPLYGCDCYAYALLASGFVDLVVESGLKPYDFLSLVPVIEGAGGSITDWEGNKLHWPVSSESRPTSFNVVAAGDSHVHGQALAALRWR

SEQ ID NO: 68788 - protein, 289 aa, Triticum aestivum
  peptide (1)..(289): Ceres Seq. ID no. 15222953
MGSVRASPSEAGGWAVAAAGKEGVDMERLVAVAQSAADAAGEVLRKYFRQRFEIIDKEDHSPVTIADREAEEAMTSVILKSFPTHAVFGEENGWRCAEKSADYVWVLDPIDGTKSFITGKPLFGTLIALLHNGKPVMGIIDQPILRERWVGVDGKKTTLNGQEISVRPCNVLEQAYLYTTSPHLFEGDAEDAFIRVRDKVKVPLYGCDCYAYALLASGFVDLVVESGLKPYDFLSLVPVIEGAGGSITDWEGNKLHWPVSSESRPTSFNVVAAGDSHVHGQALAALRWR

SEQ ID NO: 68789 - DNA, 1341 bp, Triticum aestivum
  misc_feature (1)..(1341): Ceres Seq. ID no. 13596228
aagtattaaaagcttgagagggattcggagaccatttgcaaggatgtgttcttcgtacttgaccgtgcaatcatatgcaatgatgtgtcttctcgtcaggtagaagtagctagctggagatcgagcgagcatggatgactcgaacatgttcatccagtgggcaatggagacgcttgagcaggagcaggacggcgccgccaccggacacgtcttcccgtcgtcactcctagagctcgacaactcggcggcgctgcagaacggcacgcacatggcggcccaccgacacggagccaccgacagctggagctcaggcgacagtggcgccgcggtggccgtggagaacgacggctggtcgtccaactgcagcaccaactacccggccgcgagctggaacttcatctcggccataccgcagccgcccagcattatcgaggccaccccgagcccacccgcagctcccagccacgtcgtgccggagctggcgcacaggtcgccaccgtcgaggaaatcctcaggcgycagtacagggacggtgccgaccgtgcaggaacacgtcatggcggagcggaagcgccgggagaagatcaaccgacgcttcatcgagctctccaccgtcatccccggcctcaagaagatggacaaggcgaccatcttgtcggacgccgtgaggtacgtcaaggagcagcaggagaagctcaaggcactccaggaccgtgacgcgaggagcatcgactcggtggtgctagtgaagaggccgtgcatctccaacggcgatgatggctgcccgtcaccgccgccgtcagcagcagctggaggaggtccgccgacgacaagggtcacgttgccggagatcgaggcgaggatctcggagagcaatgtgatgatgaggatccactgccaggacggcaaaggggtccttgtcacgttgctcgccgaggtcgaggggctccaccttagcatcacacataccaatgtcgtgtctttcccggcttccactctgatcattaacctcatggccaagttagacgagggcttcgccgtcacagcggacgacattgtatggaagctcgactctgctttgcgcggacatcatagcggcaaatgatagttctagctaggagaggaccaataaacatgaagacgcaaaggcttaagaagcggcaagcaggcagctcatgtccaattagcatgttcaattagtgcgtgtgtgtgcgcgcgcgtgcattgtgagttacactaatagtgaccagtgtgaatctcgggcacatgttcaatttagcatgttaccgttttttgggtgcatctgtacgtgtcactacagcatcaaggcgttgatttttt

SEQ ID NO: 68790 - protein, 324 aa, Triticum aestivum
  peptide (1)..(324): Ceres Seq. ID no. 15221815
  misc_feature (130)..(130): Xaa is any aa, unknown or other
MDDSNMFIQWAMETLEQEQDGAATGHVFPSSLLELDNSAALQNGTHMAAHRHGATDSWSSGDSGAAVAVENDGWSSNCSTNYPAASWNFISAIPQPPSIIEATPSPPAAPSHVVPELAHRSPPSRKSSGXSTGTVPTVQEHVMAERKRREKINRRFIELSTVIPGLKKMDKATILSDAVRYVKEQQEKLKALQDRDARSIDSVVLVKRPCISNGDDGCPSPPPSAAAGGGPPTTRVTLPEIEARISESNVMMRIHCQDGKGVLVTLLAEVEGLHLSITHTNVVSFPASTLIINLMAKLDEGFAVTADDIVWKLDSALRGHHSGK

SEQ ID NO: 68791 - protein, 319 aa, Triticum aestivum
  peptide (1)..(319): Ceres Seq. ID no. 15221816
  misc_feature (125)..(125): Xaa is any aa, unknown or other
MFIQWAMETLEQEQDGAATGHVFPSSLLELDNSAALQNGTHMAAHRHGATDSWSSGDSGAAVAVENDGWSSNCSTNYPAASWNFISAIPQPPSIIEATPSPPAAPSHVVPELAHRSPPSRKSSGXSTGTVPTVQEHVMAERKRREKINRRFIELSTVIPGLKKMDKATILSDAVRYVKEQQEKLKALQDRDARSIDSVVLVKRPCISNGDDGCPSPPPSAAAGGGPPTTRVTLPEIEARISESNVMMRIHCQDGKGVLVTLLAEVEGLHLSITHTNVVSFPASTLIINLMAKLDEGFAVTADDIVWKLDSALRGHHSGK

SEQ ID NO: 68792 - protein, 313 aa, Triticum aestivum
  peptide (1)..(313): Ceres Seq. ID no. 15221817
  misc_feature (119)..(119): Xaa is any aa, unknown or other
METLEQEQDGAATGHVFPSSLLELDNSAALQNGTHMAAHRHGATDSWSSGDSGAAVAVENDGWSSNCSTNYPAASWNFISAIPQPPSIIEATPSPPAAPSHVVPELAHRSPPSRKSSGXSTGTVPTVQEHVMAERKRREKINRRFIELSTVIPGLKKMDKATILSDAVRYVKEQQEKLKALQDRDARSIDSVVLVKRPCISNGDDGCPSPPPSAAAGGGPPTTRVTLPEIEARISESNVMMRIHCQDGKGVLVTLLAEVEGLHLSITHTNVVSFPASTLIINLMAKLDEGFAVTADDIVWKLDSALRGHHSGK

SEQ ID NO: 68793 - DNA, 1463 bp, Triticum aestivum
  misc_feature (1)..(1463): Ceres Seq. ID no. 14302236
gaagccatctcgtacggactccatagctcccacctccaagcacgatcaccagcgagctcccgaaccccatggcaggcggcggcgggaaggtggcgtgcgcggcgtggatccggcgccgggaggacaaggccacccgcgtcttcgcggtgcacggccggccctccccgccggccctggaggttctcggcttcgactccgggagctgctcgctctccgaggagcccctggcgaggattgtgctcggggacgatccagacgacgcgccgctcgccgtcgcggtgcaccccaccggcgacgagctcgtgtgcaccacggccaaggggtgcaggctatttaaactgatttttgaagagttcaccgttcgctttattgaaagtaaagctccagcgatcgaatctgttggactgcagaaatgtgttgccttcagcacagatggtgctaaatttgctatcggtggtgaggatgggcatctaagaatatttcattggccaagcatgaaggtgctcttagatgaacccaacgctcataaatccttcagagacatggatatcagcttagattcagagtttttagtttcatcgtctactgatggcactgcaagaatttggaagataaatgagggggtaccattggtcaacttgactcgatcttcggacgagaagattgagtgttgccgcttttctagggatggcatgaaaccgttcctgttttgcacagttgcaaaaggtagcaaagctgtgactgttgtttggaacataagtgattggtctagaattgggtacaaaagactactgggaaaacctgcctccacactttcagttagcttggatgggaaatttctggctttaggaaaccaggatggtgatttttgtgttgtggatgtaaaggagatggagatttctcactggagcaagaaggtccatcttggttcccctatatgcggaattgaattttgtcctactgaaagagttgtaatctccacatcgccacagtggggagcagagctgacaagactgaatgtgcctgctgactggaaagaatggcaaatctggctcatactcttggcgctcttccttgcatcagccgtcctgttctacgtattctaccagaactccggttccttctggagcggaacgccccgacgggacgtcatcgacctaccaagccatgcagagttctgaacgagcctcctcggtctcgtgaaaaccaaaactcctggtgaaactgttcaccagtgtgattccctttcaagcaatccagcactgcagtgttatttatttcattcataccaagagctctttctttctttactagtgtagtcaatgttgtatcaatccagtggcgcgcctatctatctggcgacgtcagtatttatcggggggaacactgtaaaatgacactgtaaatgataatagttcgagaatgtcatcgagtgttaatgggacattcaagatcgccaactg

SEQ ID NO: 68794 - protein, 370 aa, Triticum aestivum
  peptide (1)..(370): Ceres Seq. ID no. 14302237
MAGGGGKVACAAWIRRREDKATRVFAVHGRPSPPALEVLGFDSGSCSLSEEPLARIVLGDDPDDAPLAVAVHPTGDELVCTTAKGCRLFKLIFEEFTVRFIESKAPAIESVGLQKCVAFSTDGAKFAIGGEDGHLRIFHWPSMKVLLDEPNAHKSFRDMDISLDSEFLVSSSTDGTARIWKINEGVPLVNLTRSSDEKIECCRFSRDGMKPFLFCTVAKGSKAVTVVWNISDWSRIGYKRLLGKPASTLSVSLDGKFLALGNQDGDFCVVDVKEMEISHWSKKVHLGSPICGIEFCPTERVVISTSPQWGAELTRLNVPADWKEWQIWLILLALFLASAVLFYVFYQNSGSFWSGTPRRDVIDLPSHAEF

SEQ ID NO: 68795 - protein, 228 aa, Triticum aestivum
  peptide (1)..(228): Ceres Seq. ID no. 14302238
MKVLLDEPNAHKSFRDMDISLDSEFLVSSSTDGTARIWKINEGVPLVNLTRSSDEKIECCRFSRDGMKPFLFCTVAKGSKAVTVVWNISDWSRIGYKRLLGKPASTLSVSLDGKFLALGNQDGDFCVVDVKEMEISHWSKKVHLGSPICGIEFCPTERVVISTSPQWGAELTRLNVPADWKEWQIWLILLALFLASAVLFYVFYQNSGSFWSGTPRRDVIDLPSHAEF

SEQ ID NO: 68796 - protein, 212 aa, Triticum aestivum
  peptide (1)..(212): Ceres Seq. ID no. 14302239
MDISLDSEFLVSSSTDGTARIWKINEGVPLVNLTRSSDEKIECCRFSRDGMKPFLFCTVAKGSKAVTVVWNISDWSRIGYKRLLGKPASTLSVSLDGKFLALGNQDGDFCVVDVKEMEISHWSKKVHLGSPICGIEFCPTERVVISTSPQWGAELTRLNVPADWKEWQIWLILLALFLASAVLFYVFYQNSGSFWSGTPRRDVIDLPSHAEF

SEQ ID NO: 68797 - DNA, 1170 bp, Triticum aestivum
  misc_feature (1)..(1170): Ceres Seq. ID no. 12625248
atcagttagattagggtttctggtcggctagttcatacggcgaggagcacgggaagggaggcggagctcgggagaagagatgggtgcgccgaagcagaagtggacgtcggaggaggaggaggcgctgcggcgcggcgtgctcaagcatggcgctggcaagtggcgcaccatccagaaggaccccgagttcagccccgtcctttcctctcgctccaacatcgacctcaaggacaaatggaggaatttgagttttagtgcaagtggactaggttcaagggataaacaaagggttccaaggccgaaagcaccttcgtcctccccatcacctagcccgcagcttctgcttctcccagcaacgaataatgttgctgaggcttctccaccagaagattgtgaaaagagcccacaggatgacaagactccaagtccaaagtacagttccatgatcctggaagctctcggcgaactgaaagagccaaatggttcagaagttactacaatttgcaatttcatagagattgataagtcctataagctgacggattcatatgcaaaaagggctctggctccaatgaaagatccatctctaaagaagaaggattcagccaagtcatccaaggcagcaaagggtcaaggcctgtttaccgctgcgagccctgcactgggcgcggctgaagctgcagcgacgaaagtagccgatgcggaggccaaatcgcacctcgcaaacgagcacatgatggaggttgaaaggatcggcaagatggccgaggagaccgagtctctcctcgagctcgcctcagagctctacgagcgatgttcaagaggagaggtgctcacaatactgcaagtggcgcacagggagttttgatggtgttgtcgacccccgtcagctgcgcgccgacatctgctctcttgtacatggatggatggaagcgttggcccagcctgttgtcttcttgcccgcgtgttgtctctgtgttgtatcataactcgaatcaattcgttggttgtacctgagaggccattcctttcattgcctaggaatgattttaagttggtgcattttggatgctgtcctgtgttgaaatcagggaataatgtgtatctcgtcctgccgccttttcctgtatgtactctaatgcaagtttggtcatatgctccctccttggc

SEQ ID NO: 68798 - protein, 262 aa, Triticum aestivum
  peptide (1)..(262): Ceres Seq. ID no. 12625249
MGAPKQKWTSEEEEALRRGVLKHGAGKWRTIQKDPEFSPVLSSRSNIDLKDKWRNLSFSASGLGSRDKQRVPRPKAPSSSPSPSPQLLLLPATNNVAEASPPEDCEKSPQDDKTPSPKYSSMILEALGELKEPNGSEVTTICNFIEIDKSYKLTDSYAKRALAPMKDPSLKKKDSAKSSKAAKGQGLFTAASPALGAAEAAATKVADAEAKSHLANEHMMEVERIGKMAEETESLLELASELYERCSRGEVLTILQVAHREF

SEQ ID NO: 68799 - protein, 141 aa, Triticum aestivum
  peptide (1)..(141): Ceres Seq. ID no. 12625250
MILEALGELKEPNGSEVTTICNFIEIDKSYKLTDSYAKRALAPMKDPSLKKKDSAKSSKAAKGQGLFTAASPALGAAEAAATKVADAEAKSHLANEHMMEVERIGKMAEETESLLELASELYERCSRGEVLTILQVAHREF

SEQ ID NO: 68800 - DNA, 1349 bp, Triticum aestivum
  misc_feature (1)..(1349): Ceres Seq. ID no. 13596229
gtccccgtcccctcgcttccaagctactaccccgagcgcgcgagagcgagagcgagccagccagcgccacttgactccagctccttccttccctccccatccttccgtcctcggcttgcacatcacatcgcgtcaccggagccagctacgagcgcgtgagaccagcagcgggacagcatggaggggggcggcgaggggaagggccgggcggcgccggcgacggcggcggggggagggttcggagggtacgagtcggccggggaccgcaagtggtggccctggctcgtgcccaccgtcatcgtcgcctgcgtcgccgtcttcgtcgtcgagatgtgggtcaacgactgccccaggcacggcagcgcgctcggcggcggctgcgtcgcgggattcctccggcgattctccttccagccgctccgcgagaacccgctcctcgggccctcctccaccactttggggaaaatgggagctctggactggaacaaggttgtccatcagcaccaggggtggcgtctcattagctgcatctggctccatgctggcctgatccatttggttgtgaacatgctaagtctgctgtttattgggattcgtcttgagcagcaatttgggtttgttcgcattggcgctatctacctactgtctggtttcggtggcagcgtgatgtctgcactcttcctacgaaataactacatctctgttggtgcatctggagctttatttgggctgcttggatctatgctttctgagctacttatgaactggactatttactccaacaaggttgcagccataataacccttctgtttataatcgcgatcaacgtggcaatcgggatactaccgcatgctgataactttgctcacattggtggattcctgaccgggttccttttggggttcgttctgctggcaaggccacaattcggttggttggaacgcagcgagctgccccataccaatcagccccccaagtacaaaccataccaatatgtcctgtgggttgtggcactcgtcttgctgcttgtcgggttcacgctttcgttggtgatgctcttcaagggcaagaacgggaatgacggctgccactggtgccactacctgaactgtgtgccgacgtcgaggtggaagtgcgatacctaggcggttccttctttcggttttcgacgaaaacccgtagtgttgtgaggaccattttcatgcttttatgtttgtagataggaacttgttctttagtgaactctgtaaatttgtttggcaggctctgtaagtttgtaactcgagcactctccagtgatttcatgcgtgtttttgtgttaaaaaaaaaaaaaaaaaaaaaaaaaaaa

SEQ ID NO: 68801 - protein, 322 aa, Triticum aestivum
  peptide (1)..(322): Ceres Seq. ID no. 13596230
MEGGGEGKGRAAPATAAGGGFGGYESAGDRKWWPWLVPTVIVACVAVFVVEMWVNDCPRHGSALGGGCVAGFLRRFSFQPLRENPLLGPSSTTLGKMGALDWNKVVHQHQGWRLISCIWLHAGLIHLVVNMLSLLFIGIRLEQQFGFVRIGAIYLLSGFGGSVMSALFLRNNYISVGASGALFGLLGSMLSELLMNWTIYSNKVAAIITLLFIIAINVAIGILPHADNFAHIGGFLTGFLLGFVLLARPQFGWLERSELPHTNQPPKYKPYQYVLWVVALVLLLVGFTLSLVMLFKGKNGNDGCHWCHYLNCVPTSRWKCDT

SEQ ID NO: 68802 - protein, 271 aa, Triticum aestivum
  peptide (1)..(271): Ceres Seq. ID no. 13596231
MWVNDCPRHGSALGGGCVAGFLRRFSFQPLRENPLLGPSSTTLGKMGALDWNKVVHQHQGWRLISCIWLHAGLIHLVVNMLSLLFIGIRLEQQFGFVRIGAIYLLSGFGGSVMSALFLRNNYISVGASGALFGLLGSMLSELLMNWTIYSNKVAAIITLLFIIAINVAIGILPHADNFAHIGGFLTGFLLGFVLLARPQFGWLERSELPHTNQPPKYKPYQYVLWVVALVLLLVGFTLSLVMLFKGKNGNDGCHWCHYLNCVPTSRWKCDT

SEQ ID NO: 68803 - protein, 226 aa, Triticum aestivum
  peptide (1)..(226): Ceres Seq. ID no. 13596232
MGALDWNKVVHQHQGWRLISCIWLHAGLIHLVVNMLSLLFIGIRLEQQFGFVRIGAIYLLSGFGGSVMSALFLRNNYISVGASGALFGLLGSMLSELLMNWTIYSNKVAAIITLLFIIAINVAIGILPHADNFAHIGGFLTGFLLGFVLLARPQFGWLERSELPHTNQPPKYKPYQYVLWVVALVLLLVGFTLSLVMLFKGKNGNDGCHWCHYLNCVPTSRWKCDT

SEQ ID NO: 68804 - DNA, 897 bp, Triticum aestivum
  misc_feature (1)..(897): Ceres Seq. ID no. 12614309
acatcccgacgaattattttcctgaacctaattattcgcggcgctcggtcccacttcgcggcagaagaacaccgccgccgccgccgccgccgccgccgccgtcacaggaattccttgccatggagggcgttggcgcgcggttagggcgctcgtcggcccgttacggccccgcgatgacgttcaccgggcctgttaggaagtggcggaaggaatgggtcaccatctccgccgccacggccacggccacctccgccgcggcctcctccaccgggactggatctcgtggaaataacctcatcctgttcaagtggaccccgctgaacggcgccaacgaacgagatgaggagcagacggcaccggcgaagacggccacgagaaggcggctgtacgtgccggtttctgtagttcaagatcaaaggcaagaatctgccaaatctgatgatgagaacaaggctaatgatggagaaccttcatctacggaaactgagcagtctattgggaaaactaatatggatgatatacttatggatgagtcccaggcatcagatgaggttcgagattctggaaatttcgttggtggaactgatctaaatctgaacttaggtccaaaagaccccgacggtgaagatgaaggtgatacaggtgagcaacacgaggttcgaacagaacacagattgaagaggaaatctgttacccctgacctcgagatgagaatgtaacaggcggcttcatttattccttggattctttattattacagtttcccttttgggccatttatgtaattttcttgacatactgtatacgtggagagacaagtcaacagaatcacaactacatagtgaaacgcgcattgtgttgccaaataacgttaatgaaacttttctttcgttttgc

SEQ ID NO: 68805 - protein, 238 aa, Triticum aestivum
  peptide (1)..(238): Ceres Seq. ID no. 12614310
IPTNYFPEPNYSRRSVPLRGRRTPPPPPPPPPPSQEFLAMEGVGARLGRSSARYGPAMTFTGPVRKWRKEWVTISAATATATSAAASSTGTGSRGNNLILFKWTPLNGANERDEEQTAPAKTATRRRLYVPVSVVQDQRQESAKSDDENKANDGEPSSTETEQSIGKTNMDDILMDESQASDEVRDSGNFVGGTDLNLNLGPKDPDGEDEGDTGEQHEVRTEHRLKRKSVTPDLEMRM

SEQ ID NO: 68806 - protein, 199 aa, Triticum aestivum
  peptide (1)..(199): Ceres Seq. ID no. 12614311
MEGVGARLGRSSARYGPAMTFTGPVRKWRKEWVTISAATATATSAAASSTGTGSRGNNLILFKWTPLNGANERDEEQTAPAKTATRRRLYVPVSVVQDQRQESAKSDDENKANDGEPSSTETEQSIGKTNMDDILMDESQASDEVRDSGNFVGGTDLNLNLGPKDPDGEDEGDTGEQHEVRTEHRLKRKSVTPDLEMRM

SEQ ID NO: 68807 - protein, 181 aa, Triticum aestivum
  peptide (1)..(181): Ceres Seq. ID no. 12614312
MTFTGPVRKWRKEWVTISAATATATSAAASSTGTGSRGNNLILFKWTPLNGANERDEEQTAPAKTATRRRLYVPVSVVQDQRQESAKSDDENKANDGEPSSTETEQSIGKTNMDDILMDESQASDEVRDSGNFVGGTDLNLNLGPKDPDGEDEGDTGEQHEVRTEHRLKRKSVTPDLEMRM

SEQ ID NO: 68808 - DNA, 1243 bp, Triticum aestivum
  misc_feature (1)..(1243): Ceres Seq. ID no. 12614809
aacatccaatcgaaaaacacactgttaacctcggtagcagaggcatcactccacagcttgcctgcaagccatcttctccacgattccgctcacggttcatcggttgccacccgattctggtgcgccgtcgcagagcggcgaagatggccaccaaggggcgcaaggtcgtcgaggtccgtgacgcgagcaggacggacgggaagggcgacgccgcggacgtccacgtcgtccgcgaggggaagagcgaccacgacaccgccggcggcgtcggccaccgcggcgcgagcaggacggacgggcatggcgacgcgggcggcaaggtcggggacttccgcggcatcgacgggaaggactccctgaagatcgtcgcgatgcaggcgccggtcaccgtggagcgccccgtccgcggcgacctcgaggagcacgtccccaagccctatttggcgagggctttggcggctccggacatgtaccacccggaggggacgacggatgatcaccagcaccacaacatgagcgtgctgcagcagcacgtcgccttcttcgaccgcgacaacaacggcatcatctatccctgggagacttacgatggatgccgtgcggttgggttcaacgtgttcatgtccgccttcatcgcgtttctggtgaacctggtcatgagctatcccaccctgcccggttggctgccgaaccctctcttcccgatctacgtgcacaacatccacaagagcaagcacgggagtgattcggggacctatgacaaagagggccggttcatgccggtgaatttcgagaacatcttcagcaagtacgcccgcacgtacccggacaggctcagctacagggagctgtggcggatgaccgaggggtgccgggaggtgttcgatttcttcggctgggtggcgatgaagctggagtggtcgttcctgtacgtgctggctcgggacgacgaagggtacctgtcgagggaggccatccggcgcatgtacgacggcagcctcttcgagtacatggagaggcagcgcatggagcacgtcaagatgtcctagatcacagtcgacggtgaaactcgcatggtcggagctgcacccacctgtgatgctttccgtgtccgtgtgtgtgatgtacagcaggccacagatccatgcggtgtgccgctggtgtggcgaaatgaaaacataaataacgtgatatatgccatggtttaaaaaaaaaaaaaaaaaagcttatcgataccgtcgac

SEQ ID NO: 68809 - protein, 348 aa, Triticum aestivum
  peptide (1)..(348): Ceres Seq. ID no. 12614810
HPIEKHTVNLGSRGITPQLACKPSSPRFRSRFIGCHPILVRRRRAAKMATKGRKVVEVRDASRTDGKGDAADVHVVREGKSDHDTAGGVGHRGASRTDGHGDAGGKVGDFRGIDGKDSLKIVAMQAPVTVERPVRGDLEEHVPKPYLARALAAPDMYHPEGTTDDHQHHNMSVLQQHVAFFDRDNNGIIYPWETYDGCRAVGFNVFMSAFIAFLVNLVMSYPTLPGWLPNPLFPIYVHNIHKSKHGSDSGTYDKEGRFMPVNFENIFSKYARTYPDRLSYRELWRMTEGCREVFDFFGWVAMKLEWSFLYVLARDDEGYLSREAIRRMYDGSLFEYMERQRMEHVKMS

SEQ ID NO: 68810 - protein, 301 aa, Triticum aestivum
  peptide (1)..(301): Ceres Seq. ID no. 12614811
MATKGRKVVEVRDASRTDGKGDAADVHVVREGKSDHDTAGGVGHRGASRTDGHGDAGGKVGDFRGIDGKDSLKIVAMQAPVTVERPVRGDLEEHVPKPYLARALAAPDMYHPEGTTDDHQHHNMSVLQQHVAFFDRDNNGIIYPWETYDGCRAVGFNVFMSAFIAFLVNLVMSYPTLPGWLPNPLFPIYVHNIHKSKHGSDSGTYDKEGRFMPVNFENIFSKYARTYPDRLSYRELWRMTEGCREVFDFFGWVAMKLEWSFLYVLARDDEGYLSREAIRRMYDGSLFEYMERQRMEHVKMS

SEQ ID NO: 68811 - protein, 225 aa, Triticum aestivum
  peptide (1)..(225): Ceres Seq. ID no. 12614812
MQAPVTVERPVRGDLEEHVPKPYLARALAAPDMYHPEGTTDDHQHHNMSVLQQHVAFFDRDNNGIIYPWETYDGCRAVGFNVFMSAFIAFLVNLVMSYPTLPGWLPNPLFPIYVHNIHKSKHGSDSGTYDKEGRFMPVNFENIFSKYARTYPDRLSYRELWRMTEGCREVFDFFGWVAMKLEWSFLYVLARDDEGYLSREAIRRMYDGSLFEYMERQRMEHVKMS

SEQ ID NO: 68812 - DNA, 1452 bp, Triticum aestivum
  misc_feature (1)..(1452): Ceres Seq. ID no. 13598326
ctttcttttcttttcttgatctctcctccggaaattagctatccttctcctcgactcctcctcgtcgtcatggcaccactgaggggggccaagcgccggaagcggcaccccgagaaggccctgccggcgggggtgatggcgcccttgcccccgcccgacgccgccgattggtgggactccttctcccgcaggcttgcagcaggacactactccaaagactgccagaactttgagtcagtcttcaagatgtcgaggaagacattcgactacatttgcactctgattaccggggacttctcaagaaagacacagggtttcagaaatttcaggtttggagacaagatgattcttgcgttggaggatcaagtagctgttgctctgttgagactgacgactggtgagtcacttctgagcatagggaatcgctttggaatgaaccactcagcaatctcaaacatcacttggaagttcattgagtccttggaggatcacgcaatcagtcatctgaagtggcctgaccctgaggagatggcgaccatcaaagcaaagttcgaaaagctccagggcctccccaactgctgcggcgccatagacacaacacacatcctcatgtgctcttcagctcagcctaacagcaatgtctggcttgactgtgaracacarkaacagcatggtcctgcaggccgttgtcgaccccgacatgcggttcagagacgttgtcagtggctggcctgggagcatggatgactcctgcatcctgcgcacctcgggcttctacaagctgtgcgagaaaggcgggaggctggacggacaaatggagcttcctggggagccagcagggtcagtggtcagagagtacatcatcggggacacgggctaccctctccttccctggctgatgactccataccaagagcgcgatctgtctccagcaaaagcagcattcaacaagcagcacgccacggcgagaatggtggtgcagggtgctatggccaggctgaaggaaaggtggcaggtactcaagggggagctgtggaggcctgacaagcaccggctaccgaggatcatctacgcctgctgcctgctcaccaacatcatgatcgacctcggggacacacacagagaacgggcaccggcgtcgcacgaccatgatgacggttactatcagcagttcagcaatgtggccgacgacggtgcggttgcacagagggacgtgctttgccagtatgtcagcaggctaggcggcaaattgccggagtgattctcgccctctagctgcataccgtgcgcctcttcgcctatttttctctctgctcgacatgaaacaaatgatagctacagaacatagaatcgtgatctggatatttgttacccttgagacggtttgctgcgattgttattggtattattaaataggtcatagaagttgtaacctgaattgcggttactttg

SEQ ID NO: 68813 - protein, 248 aa, Triticum aestivum
  peptide (1)..(248): Ceres Seq. ID no. 15222305
  misc_feature (219)..(219): Xaa is any aa, unknown or other
  misc_feature (221)..(221): Xaa is any aa, unknown or other
  misc_feature (222)..(222): Xaa is any aa, unknown or other
LSFLFLISPPEISYPSPRLLLVVMAPLRGAKRRKRHPEKALPAGVMAPLPPPDAADWWDSFSRRLAAGHYSKDCQNFESVFKMSRKTFDYICTLITGDFSRKTQGFRNFRFGDKMILALEDQVAVALLRLTTGESLLSIGNRFGMNHSAISNITWKFIESLEDHAISHLKWPDPEEMATIKAKFEKLQGLPNCCGAIDTTHILMCSSAQPNSNVWLDCXTXXQHGPAGRCRPRHAVQRRCQWLAWEHG

SEQ ID NO: 68814 - protein, 225 aa, Triticum aestivum
  peptide (1)..(225): Ceres Seq. ID no. 15222306
  misc_feature (196)..(196): Xaa is any aa, unknown or other
  misc_feature (198)..(198): Xaa is any aa, unknown or other
  misc_feature (199)..(199): Xaa is any aa, unknown or other
MAPLRGAKRRKRHPEKALPAGVMAPLPPPDAADWWDSFSRRLAAGHYSKDCQNFESVFKMSRKTFDYICTLITGDFSRKTQGFRNFRFGDKMILALEDQVAVALLRLTTGESLLSIGNRFGMNHSAISNITWKFIESLEDHAISHLKWPDPEEMATIKAKFEKLQGLPNCCGAIDTTHILMCSSAQPNSNVWLDCXTXXQHGPAGRCRPRHAVQRRCQWLAWEHG

SEQ ID NO: 68815 - protein, 207 aa, Triticum aestivum
  peptide (1)..(207): Ceres Seq. ID no. 15222307
  misc_feature (7)..(7): Xaa is any aa, unknown or other
  misc_feature (9)..(9): Xaa is any aa, unknown or other
MSGLTVXHXNSMVLQAVVDPDMRFRDVVSGWPGSMDDSCILRTSGFYKLCEKGGRLDGQMELPGEPAGSVVREYIIGDTGYPLLPWLMTPYQERDLSPAKAAFNKQHATARMVVQGAMARLKERWQVLKGELWRPDKHRLPRIIYACCLLTNIMIDLGDTHRERAPASHDHDDGYYQQFSNVADDGAVAQRDVLCQYVSRLGGKLPE

SEQ ID NO: 68816 - DNA, 1151 bp, Triticum aestivum
  misc_feature (1)..(1151): Ceres Seq. ID no. 12614814
cttttcgcattgcagcctctcaaaacagccaaaccgaaccccaaaagctcgccgagaaacgcagaaaggagcgaagcaaaccaagcagcagcagcagcggaagaagaagaagaagcgaggagctgagccagctagcaatggcggcggacctgggcttcgaggcgaccgagctccggctcggcctgcccggcggcggcgagggggaggcgaggagctcctccggcaagaggggcttcgccgagaccatcgacctgaagctcaagctggagccggccggcgaggaggcgccggccgaggaggatcgggccgacgtggccgtggtcgccgccgcggcggcagagaaccaggaggagacggcgaccgacgccggcggagggaagatgaagaggtcgccgagccagagcagcgtcgtcaccaccgccgcgctgcccgaccccgccgagaagccgcgcgctcccaaggcgcaggtggtggggtggcctccggtccggtcgttccggaagaacatcctggcggagaagtcgtcgccggcggcagcggcggcgttcgtcaaggtgagcatggacggcgcgccctacctgcgcaaggtggacctcaacatgtacaagacctaccaggacctctccaaggccctcgagaagatgttcagctccttcaccatcggaaactgtggaactccagggatgaacggcatgaacgagagcaagctgatggatcttctcaacggatccgagtatgttccgacgtacgaggacaaggacggcgactggatgctcgtcggcgacgtcccatgggagatgttcgtcgagtcatgcaagcgccttcggataatgaagggatcagaagctattggccttgcaccaagggcgatggagaaatgcaagaacaggagctgaggagaggatgcactaaatgttatgcaagaatcaaaatacctatataaccttgcttgctcatccctgtatcatattctctgtcctaagtctaagtctgtatctcctgatcagtgaagtcattttggtttgtgatcttctcttttccagtcagtcagtcccaagtctcatcttgttatatacataagaaagaagaatccaagaacatgtgagatgtatctgtacctgtctgccacataattgtgtcttctccttttc

SEQ ID NO: 68817 - protein, 313 aa, Triticum aestivum
  peptide (1)..(313): Ceres Seq. ID no. 12614815
FSHCSLSKQPNRTPKARRETQKGAKQTKQQQQRKKKKKRGAEPASNGGGPGLRGDRAPARPARRRRGGGEELLRQEGLRRDHRPEAQAGAGRRGGAGRGGSGRRGRGRRRGGREPGGDGDRRRRREDEEVAEPEQRRHHRRAARPRREAARSQGAGGGVASGPVVPEEHPGGEVVAGGSGGVRQGEHGRRALPAQGGPQHVQDLPGPLQGPREDVQLLHHRKLWNSRDERHEREQADGSSQRIRVCSDVRGQGRRLDARRRRPMGDVRRVMQAPSDNEGIRSYWPCTKGDGEMQEQELRRGCTKCYARIKIPI

SEQ ID NO: 68818 - protein, 297 aa, Triticum aestivum
  peptide (1)..(297): Ceres Seq. ID no. 12614816
FRIAASQNSQTEPQKLAEKRRKERSKPSSSSSGRRRRSEELSQLAMAADLGFEATELRLGLPGGGEGEARSSSGKRGFAETIDLKLKLEPAGEEAPAEEDRADVAVVAAAAAENQEETATDAGGGKMKRSPSQSSVVTTAALPDPAEKPRAPKAQVVGWPPVRSFRKNILAEKSSPAAAAAFVKVSMDGAPYLRKVDLNMYKTYQDLSKALEKMFSSFTIGNCGTPGMNGMNESKLMDLLNGSEYVPTYEDKDGDWMLVGDVPWEMFVESCKRLRIMKGSEAIGLAPRAMEKCKNRS

SEQ ID NO: 68819 - protein, 252 aa, Triticum aestivum
  peptide (1)..(252): Ceres Seq. ID no. 12614817
MAADLGFEATELRLGLPGGGEGEARSSSGKRGFAETIDLKLKLEPAGEEAPAEEDRADVAVVAAAAAENQEETATDAGGGKMKRSPSQSSVVTTAALPDPAEKPRAPKAQVVGWPPVRSFRKNILAEKSSPAAAAAFVKVSMDGAPYLRKVDLNMYKTYQDLSKALEKMFSSFTIGNCGTPGMNGMNESKLMDLLNGSEYVPTYEDKDGDWMLVGDVPWEMFVESCKRLRIMKGSEAIGLAPRAMEKCKNRS

SEQ ID NO: 68820 - DNA, 548 bp, Triticum aestivum
  misc_feature (1)..(548): Ceres Seq. ID no. 13654415
aaaaaaaagtggggcgaggaagaaaccgaaacactcacacagaacaccacaccccccaccccggcgacacaccacccctcccgccccaaatctcagatcagagcgccgggagatctgccatttccgggtggagggatcgagccccgcgcttctcgattaaatcctgggctctgtatcttgtgtggatggcatttgtgcctcagagactgtagctcaccaagtgttgatttgaacctgtgaagatagagatgggttctccgagaaaatccgacaagaaggccgccttagactttgcagcatggggtttcaatatcacctcatccgttgggatcatcatggtcaacaaagccctaatggctacacatggattcagttttgccacaacattaactggccttcatttattgacaacgaccttgatgactattgtgtttcggtggttaggcctgagccagccctctcacttaccgctaccagatctgattaagttcgtaatcttttcaaatttgtcgatcgttggcatgaatgtgagcttgatgtggaattct

SEQ ID NO: 68821 - protein, 100 aa, Triticum aestivum
  peptide (1)..(100): Ceres Seq. ID no. 13654416
MGSPRKSDKKAALDFAAWGFNITSSVGIIMVNKALMATHGFSFATTLTGLHLLTTTLMTIVFRWLGLSQPSHLPLPDLIKFVIFSNLSIVGMNVSLMWNS

SEQ ID NO: 68822 - protein, 79 aa, Triticum aestivum
  peptide (1)..(79): Ceres Seq. ID no. 13654417
KKKWGEEETETLTQNTTPPTPATHHPSRPKSQIRAPGDLPFPGGGIEPRASRLNPGLCILCGWHLCLRDCSSPSVDLNL

SEQ ID NO: 68823 - protein, 71 aa, Triticum aestivum
  peptide (1)..(71): Ceres Seq. ID no. 13654418
MVNKALMATHGFSFATTLTGLHLLTTTLMTIVFRWLGLSQPSHLPLPDLIKFVIFSNLSIVGMNVSLMWNS

SEQ ID NO: 68824 - DNA, 1433 bp, Triticum aestivum
  misc_feature (1)..(1433): Ceres Seq. ID no. 14302856
taaaaccctagacaaaagctcagcggcgcagcacagcccagccgccgcgcaccacgctcttcccccctccccctccctctcccccaccctcctccgaccaccttctcccgaaacgcgcggagatgctctccgctgccttcgctgtccaccccgccgccgtcgcgccgcggctgcattcggtccgccagcgccagcaattctgcgctccaatcggcacggcgacgccaaggcggcggttgccagtggcgatgctttcggtcactaacgccgtcaccacccagagccgcgagagcgcccccgcagcgcctcgcaagctctctttcccgatactggtgaacagttgcaccgggaaaatggggaagtctgttgctgaagcagctgtgtctgctggtcttcagttagttccgatgtcattcagtgcaatagaggttcctgatggaaagctcaacatctgtgacagagatattcatattcatgatccatctgaaagtgaacgtattctccgttccattgctaaggactacccagatatgatagttgttgactacactgtgcctgatgctgttaatgccaatgctgaactttactgcaaacttggcttgccatttgtaatgggcacaactggtggaaataggcaactgttgaacaaaactgtgcaggatgcgaatgtttatgctgtgatatctccacagatggggaagcaggttgttgctttccttgctgccatggaaatcatggcagagaaattccctggtgcatttgcaggttacaaactagaggtaatggagtctcatcaagcgacaaaattggacgtttctggcactgccaaagctgtaatctcttgctttcagaagttgggtgtctcattcgacttaaacgaggtaaacttggttagggaccccgaagagcagcttgccattgttggtgtcccagaagaacatcttggagggcatgcatttcacaattaccatctcacttcgcctgatgaaacagtgtcatttgagttccagcacaatgtgtgtggccgttcaatatacgcagagggaactgttgatgccgccatgtttctccacacaaagatacgatctggggcggacaagaaattatatgatatgatcgatgtcctgagagaaggcaacatgagatgagcaggggcatttgtagggttaggaggagagcttatgcagcaaaattaggtcactgtccggatgcagcatctttgcgttgtaattggatcttagatttgttttactagttatattaactcttatttacttctcggcgaaaaaaggagtcatttggacgagataaggatgttaacttggacttgggcctctgtttgaggccagagttagctgttgttgtggcatgaatgatggaaggcaaatgcagtacgaataatatattgtggaagttgaaatagtttgctaatt

SEQ ID NO: 68825 - protein, 341 aa, Triticum aestivum
  peptide (1)..(341): Ceres Seq. ID no. 14302857
MLSAAFAVHPAAVAPRLHSVRQRQQFCAPIGTATPRRRLPVAMLSVTNAVTTQSRESAPAAPRKLSFPILVNSCTGKMGKSVAEAAVSAGLQLVPMSFSAIEVPDGKLNICDRDIHIHDPSESERILRSIAKDYPDMIVVDYTVPDAVNANAELYCKLGLPFVMGTTGGNRQLLNKTVQDANVYAVISPQMGKQVVAFLAAMEIMAEKFPGAFAGYKLEVMESHQATKLDVSGTAKAVISCFQKLGVSFDLNEVNLVRDPEEQLAIVGVPEEHLGGHAFHNYHLTSPDETVSFEFQHNVCGRSIYAEGTVDAAMFLHTKIRSGADKKLYDMIDVLREGNMR

SEQ ID NO: 68826 - protein, 299 aa, Triticum aestivum
  peptide (1)..(299): Ceres Seq. ID no. 14302858
MLSVTNAVTTQSRESAPAAPRKLSFPILVNSCTGKMGKSVAEAAVSAGLQLVPMSFSAIEVPDGKLNICDRDIHIHDPSESERILRSIAKDYPDMIVVDYTVPDAVNANAELYCKLGLPFVMGTTGGNRQLLNKTVQDANVYAVISPQMGKQVVAFLAAMEIMAEKFPGAFAGYKLEVMESHQATKLDVSGTAKAVISCFQKLGVSFDLNEVNLVRDPEEQLAIVGVPEEHLGGHAFHNYHLTSPDETVSFEFQHNVCGRSIYAEGTVDAAMFLHTKIRSGADKKLYDMIDVLREGNMR

SEQ ID NO: 68827 - protein, 264 aa, Triticum aestivum
  peptide (1)..(264): Ceres Seq. ID no. 14302859
MGKSVAEAAVSAGLQLVPMSFSAIEVPDGKLNICDRDIHIHDPSESERILRSIAKDYPDMIVVDYTVPDAVNANAELYCKLGLPFVMGTTGGNRQLLNKTVQDANVYAVISPQMGKQVVAFLAAMEIMAEKFPGAFAGYKLEVMESHQATKLDVSGTAKAVISCFQKLGVSFDLNEVNLVRDPEEQLAIVGVPEEHLGGHAFHNYHLTSPDETVSFEFQHNVCGRSIYAEGTVDAAMFLHTKIRSGADKKLYDMIDVLREGNMR

SEQ ID NO: 68828 - DNA, 1414 bp, Triticum aestivum
  misc_feature (1)..(1414): Ceres Seq. ID no. 13654649
cctctcccctcccctccctctcttttgcgcgctggcccctgccgtttcggacccgccacgctccggtcccccgctccgccgccgccgccgtccgtccccgtcgccccacctcctccgccccgtcagaggaagctgcggactggcatgacctaggggggccatggaagaggcagacaaggaccgcaattcctgcaagcgcctgcgggcggtgggcggcggcggcgactcggcggatgcgtggcggagtttccgggtggcgcgcgcggcggcgggcggcaaggaccggcacagcaaggtggtgacctcgcgcggcctccgcgaccgccgcatccggctctcggtgcagacggccattcagttctatgacatccaggaccgcctgggtgtcgaccagcccagcaaggccatcgagtggctcatccaagccgccgccaccgccatcgatggtctcccgtcgttggactgctccttcgccttccctgtcgcctccccagcagcagaagacaccgcggaggtcagcacctcggagaccagcaagggctccgtgctctcgctcgccaacggccctgccgacaatgacaatgccgctcaccaagccagtgcatacaacgggggcagtgccaatggcacgtttgccgggctcctgcactgctccaacgccgccgacaagccaatgcagcatcagcatcagcagcagcagccgacgcttgcctactacgccgccccgggttcgcacatcgcgcccatgtccttcgagatgattccccagctcaccttctcccaggaccagcagcactgccaccaccaccaccaccaccaccatgcctctgtctccttcgacaggagcacacttcagtccaacaccgtctccacgcctcagtggcccccgtcccagcacccgttcctgatgcagaggttctctgctgctccagccgagccttcgcctatgtttcccttctttcttggaggcaacaacgctgctgctgcggctgctcctgcggcggccaatgcgccggagcggaggctgcagctctgggacttcaaggaggaaaggaagacatagtttcttcttgggagattcggcggtgtaccaaactaccaagtcatatgatccattcagcacagcaaaacccagaaggagagaagatgcaaggcaacgaaggagtcggcgccatggagccgcgtggaatgcaatcgctttgctggatctccgaatcttctccgcgcggttttcgttttgccgttgtcatcctctgacctatgtttttgtgatcggaaaccaaatgtttttgagctgcactctgttgctgtgccctctatctttctccttacgaaaaagatgtttttttttaactttctggcgaggaacagaatttcgcgcttgcatggatgctggtggcgtgtactgagtggc

SEQ ID NO: 68829 - protein, 300 aa, Triticum aestivum
  peptide (1)..(300): Ceres Seq. ID no. 13654650
MEEADKDRNSCKRLRAVGGGGDSADAWRSFRVARAAAGGKDRHSKVVTSRGLRDRRIRLSVQTAIQFYDIQDRLGVDQPSKAIEWLIQAAATAIDGLPSLDCSFAFPVASPAAEDTAEVSTSETSKGSVLSLANGPADNDNAAHQASAYNGGSANGTFAGLLHCSNAADKPMQHQHQQQQPTLAYYAAPGSHIAPMSFEMIPQLTFSQDQQHCHHHHHHHHASVSFDRSTLQSNTVSTPQWPPSQHPFLMQRFSAAPAEPSPMFPFFLGGNNAAAAAAPAAANAPERRLQLWDFKEERKT

SEQ ID NO: 68830 - DNA, 1501 bp, Triticum aestivum
  misc_feature (1)..(1501): Ceres Seq. ID no. 13662360
atacctacatagtcttctgccagtttgagtactcacgacgaacgccgtccacacgccccagagcacttcgaacacgaggccgccagcgagcatgggcaagggagctggcgccgccggcgtggacgagccgctgctcccggagctctcgggcgggcacggcggcggggcgtcggtctccggcgcggtgttcaacctgtccacgagcatcatcggcgccggcattatgtcgatcccggcggcaatgcgcgtgctcggggtcgtccccgcgctcgccctcatcgcggccgtcgccctcctctccgacgtctccgtggagttcatgctgcggtacacggcctgggccagcggcacgccctcgtacgcggggatcatgggcgacgcgttcggccgccgcgccggcgccgcggcgctcaacatcttcatagccttcaccaccgccggcaccctcgtcgtctacctcatcatcataggggatgtgctgtccgggagcgtggaggggggaggcgagcacgccggggtgctgcaggagctgttcggccggcagtggtggaccggcagggagtttgtgatactggccacggccgtcgtcgttctgctgccgctggtgctcctccgccgcgtcgattcgctgaggtacacatcggcagtgtccatccttctggcggcggtgttcatgctcatcacgatggggatcgcggtctacactgtcttcaccggcactgcgaagatgccgcggatgctgccggacttctccaccctcgcgtcccccttcgagctcttcaccgccgtcccggtcatcgtcgtcgccttcaccttccacttcaacgtgcacccgatccgcgcggagctcagcaagacgtcggacatgaagtcggcggtgcgcatctcgctggtgctctgcgccgccatctacgccgcggtgggcttcttcggcttcctcctcttcggggacgccaccatgcccgacgtgctcgccaacttcgaccgcagctccggctccggcgtcccgcaggcgctcaacgacgccgcgcgcctcagctacgcgctgcacctcgtgctcgtcttcccgctcctccactactcgctccgcgtcaacgtcgacgagctcctcttcccaggccgccgcccgctggccaccgacacgcgccgcttcgtggcgctcacggccgtgctcatggcggtgctctacgtgctcgccatcgccatccccagcatctggacgctcttccagtactcgggctccacgttcgccgtctgcatatcgcttatcttccctggcgccatcgttctcagggatgttcacggaatagcgaagaggaaagacaaggcaatggcagcgatgatgatcactctggcggtgatcacgagcagcatcgccattgcttccaacgtcatgagctccatcaagggcgaagtgaaaggtgttaatgccggagctagctagcatgtacagtttcattatttatatagctataatataaatcaaaattctttcacccgc

SEQ ID NO: 68831 - protein, 450 aa, Triticum aestivum
  peptide (1)..(450): Ceres Seq. ID no. 13662361
MGKGAGAAGVDEPLLPELSGGHGGGASVSGAVFNLSTSIIGAGIMSIPAAMRVLGVVPALALIAAVALLSDVSVEFMLRYTAWASGTPSYAGIMGDAFGRRAGAAALNIFIAFTTAGTLVVYLIIIGDVLSGSVEGGGEHAGVLQELFGRQWWTGREFVILATAVVVLLPLVLLRRVDSLRYTSAVSILLAAVFMLITMGIAVYTVFTGTAKMPRMLPDFSTLASPFELFTAVPVIVVAFTFHFNVHPIRAELSKTSDMKSAVRISLVLCAAIYAAVGFFGFLLFGDATMPDVLANFDRSSGSGVPQALNDAARLSYALHLVLVFPLLHYSLRVNVDELLFPGRRPLATDTRRFVALTAVLMAVLYVLAIAIPSIWTLFQYSGSTFAVCISLIFPGAIVLRDVHGIAKRKDKAMAAMMITLAVITSSIAIASNVMSSIKGEVKGVNAGAS

SEQ ID NO: 68832 - protein, 406 aa, Triticum aestivum
  peptide (1)..(406): Ceres Seq. ID no. 13662362
MSIPAAMRVLGVVPALALIAAVALLSDVSVEFMLRYTAWASGTPSYAGIMGDAFGRRAGAAALNIFIAFTTAGTLVVYLIIIGDVLSGSVEGGGEHAGVLQELFGRQWWTGREFVILATAVVVLLPLVLLRRVDSLRYTSAVSILLAAVFMLITMGIAVYTVFTGTAKMPRMLPDFSTLASPFELFTAVPVIVVAFTFHFNVHPIRAELSKTSDMKSAVRISLVLCAAIYAAVGFFGFLLFGDATMPDVLANFDRSSGSGVPQALNDAARLSYALHLVLVFPLLHYSLRVNVDELLFPGRRPLATDTRRFVALTAVLMAVLYVLAIAIPSIWTLFQYSGSTFAVCISLIFPGAIVLRDVHGIAKRKDKAMAAMMITLAVITSSIAIASNVMSSIKGEVKGVNAGAS

SEQ ID NO: 68833 - protein, 400 aa, Triticum aestivum
  peptide (1)..(400): Ceres Seq. ID no. 13662363
MRVLGVVPALALIAAVALLSDVSVEFMLRYTAWASGTPSYAGIMGDAFGRRAGAAALNIFIAFTTAGTLVVYLIIIGDVLSGSVEGGGEHAGVLQELFGRQWWTGREFVILATAVVVLLPLVLLRRVDSLRYTSAVSILLAAVFMLITMGIAVYTVFTGTAKMPRMLPDFSTLASPFELFTAVPVIVVAFTFHFNVHPIRAELSKTSDMKSAVRISLVLCAAIYAAVGFFGFLLFGDATMPDVLANFDRSSGSGVPQALNDAARLSYALHLVLVFPLLHYSLRVNVDELLFPGRRPLATDTRRFVALTAVLMAVLYVLAIAIPSIWTLFQYSGSTFAVCISLIFPGAIVLRDVHGIAKRKDKAMAAMMITLAVITSSIAIASNVMSSIKGEVKGVNAGAS

SEQ ID NO: 68834 - DNA, 1367 bp, Triticum aestivum
  misc_feature (1)..(1367): Ceres Seq. ID no. 13596238
gaccmttwcctatraacatyctaatcgaaaaacacacacacacaccaccaccaccaccaccaccaccacacttggatcacaagatagtggttcgttgctacccacgatgagagcgttcgcgttgtttgccgtgcttgccatggcggccgccatggccgtcgccgagcagtgcggctcccaggccggcggggcgacctgccccaactgcctctgctgcagccgcttcggctggtgcggctccacctcggactactgcggcgacggatgccagagccagtgctccggttgcggcagcacgcccgtcacccccacaccctccggcggtggcggcgtgtcctccatcatctcccgcgccctcttcgaccgcatgctactgcaccgcaacgacggcgcctgccaggccaagggcttctacacctacgacgccttcgtcgcggccgccggcaccttccggggcttcagcaccacgggcagcacggacacccggaagcgcgaggtggccgccttcctggcccagacctcccacgagaccaccggtgggtgggcgacggcgccggacggagccttcgcgtggggctactgcttcaagcaggagcgtggcgccacctccaactattgcactccgagcgcgcaatggccgtgcgccccagggaagagctactacggccgtgggccgatccagctctcccacaactacaactacgggccggcaggccgggccattggggtcgatctgctgcgcaacccagacctggttgccacggacccgacggtgtcttttaagacagcgatgtggttttggatgacggcacaggcgccaaagccgtcgagccatgctgtgatcacgggccaatggagcccatcagggacggaccgggctgcagggcgggtgcccgggtttggcgtgatcaccaacatagttaacggcgggatcgagtgcgggcatgggcaggacagccgagtcgccgatcggataggattttacaagcgctactgtgacatcctcggtgttggctatggtgacaacctcgactgctacaatcagaggcccttcgcttaactaattagttatatttatataacccctccaaacaaaatacaataagagcatcctctctcatctagatgttggaagttgtaactatggttacatctcataaggaactcaataaaagcatccagtatagatgctttgtattgagggcgtgtttggttgagaagtcttatgactttttctagtcccagggactaatcaaaaaagactctctagtagagtctttttctagtccctgtagaaaaagtccctcctgtttggttcctagtgactttttctagtctctgggactaaaaagtccctggyggaatcc

SEQ ID NO: 68835 - protein, 352 aa, Triticum aestivum
  peptide (1)..(352): Ceres Seq. ID no. 15221818
  misc_feature (2)..(2): Xaa is any aa, unknown or other
  misc_feature (3)..(3): Xaa is any aa, unknown or other
  misc_feature (5)..(5): Xaa is any aa, unknown or other
  misc_feature (7)..(7): Xaa is any aa, unknown or other
TXXYXHXNRKTHTHTTTTTTTTTLGSQDSGSLLPTMRAFALFAVLAMAAAMAVAEQCGSQAGGATCPNCLCCSRFGWCGSTSDYCGDGCQSQCSGCGSTPVTPTPSGGGGVSSIISRALFDRMLLHRNDGACQAKGFYTYDAFVAAAGTFRGFSTTGSTDTRKREVAAFLAQTSHETTGGWATAPDGAFAWGYCFKQERGATSNYCTPSAQWPCAPGKSYYGRGPIQLSHNYNYGPAGRAIGVDLLRNPDLVATDPTVSFKTAMWFWMTAQAPKPSSHAVITGQWSPSGTDRAAGRVPGFGVITNIVNGGIECGHGQDSRVADRIGFYKRYCDILGVGYGDNLDCYNQRPFA

SEQ ID NO: 68836 - protein, 317 aa, Triticum aestivum
  peptide (1)..(317): Ceres Seq. ID no. 15221819
MRAFALFAVLAMAAAMAVAEQCGSQAGGATCPNCLCCSRFGWCGSTSDYCGDGCQSQCSGCGSTPVTPTPSGGGGVSSIISRALFDRMLLHRNDGACQAKGFYTYDAFVAAAGTFRGFSTTGSTDTRKREVAAFLAQTSHETTGGWATAPDGAFAWGYCFKQERGATSNYCTPSAQWPCAPGKSYYGRGPIQLSHNYNYGPAGRAIGVDLLRNPDLVATDPTVSFKTAMWFWMTAQAPKPSSHAVITGQWSPSGTDRAAGRVPGFGVITNIVNGGIECGHGQDSRVADRIGFYKRYCDILGVGYGDNLDCYNQRPFA

SEQ ID NO: 68837 - protein, 306 aa, Triticum aestivum
  peptide (1)..(306): Ceres Seq. ID no. 15221820
MAAAMAVAEQCGSQAGGATCPNCLCCSRFGWCGSTSDYCGDGCQSQCSGCGSTPVTPTPSGGGGVSSIISRALFDRMLLHRNDGACQAKGFYTYDAFVAAAGTFRGFSTTGSTDTRKREVAAFLAQTSHETTGGWATAPDGAFAWGYCFKQERGATSNYCTPSAQWPCAPGKSYYGRGPIQLSHNYNYGPAGRAIGVDLLRNPDLVATDPTVSFKTAMWFWMTAQAPKPSSHAVITGQWSPSGTDRAAGRVPGFGVITNIVNGGIECGHGQDSRVADRIGFYKRYCDILGVGYGDNLDCYNQRPFA

SEQ ID NO: 68838 - DNA, 1259 bp, Triticum aestivum
  misc_feature (1)..(1259): Ceres Seq. ID no. 13596450
aacgagctctccccgtcccggccccgctccccgccacgccaagtcgacggccgctcgccgccgcccctccctccgcctcgccgtcgccgacctcggccgttcggcccctcccgcgggtgggtgagcggcgagcctcccttgcttctctgtcctgccctgcacggcaagcaagacgagagcgatcggcgtcgggatgctgaggcggcggctgagctcccttctcctccgatccccgtgctcctccgccgtcgcctcctcaatccagcagcagcaccacctcatcctccccacccacgccgagaaaccgccggccctgaatctgctcaggctcttcacatccctagctggaaccgatggtgacaggccgttcatcgcttttgtcttagggggacctgggagtgggaaaggaacgcaatgtagtaggatcgcttcggattttggattttctcatgtgagtgctggtgaccttctgcggaatgaaatatctgctggcactgatcaaggggagtggatcctggagataataagggaagggaggattgttccatcagagataaccgttgaactggtcagaaaagcaattgaatcaagcactgctaaacgggttcttatcgatggttttccaaggtgtgaggaaaacagaatcgcctttgaaaaaataactggaactgaaccagaccttgtgcttttttttgactgtcctgaggatgagatggttaaacgtctcctaagccgtaaccagggacgagttgatgataacattgagacaatcaagaagcgtctaaaagtgttcgagagtttgaatcttcctgttgttgagtactactcttcaaggggaaaggcacacaagataaacgcaacgggaactgaagatgaaatctttgaagcagttcgcaagttgttttcctccttaaggctatgaggaggctgtcgtcgtcttccgcaggagcctgagggaattagaattgcgcctggcggaaatactcttttctttccttttacttttacatctcttagcacaataattgtacatattctgatacacggtctatgcctgtgaaaacagagggccactggtgaaacgcccagcctgctatgataaacccttaccctcacgctctcgtcgtgcgccacggtataacccatgacacgctggtatggcagcagcaaaactgctacgacgatatttttcttaccagaatatgatataattgtaraaaaaaaaaraaaaaagctctatcgataccgtcgacctcgag

SEQ ID NO: 68839 - protein, 242 aa, Triticum aestivum
  peptide (1)..(242): Ceres Seq. ID no. 15221881
MLRRRLSSLLLRSPCSSAVASSIQQQHHLILPTHAEKPPALNLLRLFTSLAGTDGDRPFIAFVLGGPGSGKGTQCSRIASDFGFSHVSAGDLLRNEISAGTDQGEWILEIIREGRIVPSEITVELVRKAIESSTAKRVLIDGFPRCEENRIAFEKITGTEPDLVLFFDCPEDEMVKRLLSRNQGRVDDNIETIKKRLKVFESLNLPVVEYYSSRGKAHKINATGTEDEIFEAVRKLFSSLRL

SEQ ID NO: 68840 - DNA, 1345 bp, Triticum aestivum
  misc_feature (1)..(1345): Ceres Seq. ID no. 15226238
atacaactactgtcaaaggtgtgcgtgcgtgcgtgagagagaacctgctttgcttttgcgtgagctgcagtgcagggcatacgggtcgggactgacccggggtggtggtggtgtatataaccagtcgtcacgcacaagaatcatcctagcccctctctctctctctgagcttctctctgcttcatcaagcgagcgaacgacccaccgctagtctgctcggaagaacggaaaggaaaagaaaagaagatggccgtctctgtccgcctcggctcctccccatccatccttctgctcccgctcctcttcctcttcaccatcccgtcgctcgcctccgcctgcgaccgctgcgcgcgccactccaaggccgcctactacacctcctcgctcaccctcgccgccggctcctgcgggtacggcacggcggccgcctccttcaacggcggcctgctcgccgccgccggcccggccctgtaccggggcggcgtcggctgcggcgcctgcttccaggtgaggtgcaaggacaagaagctctgcagcggcgccggcgccagggtcgtggtgacggaccgcgccaggatgaggacgaaccgcacggacctggtgctgagcagcccggcgttcgccgccatggcccgccccggcatggccgcgcggctcaccaagctccgcgccgtcgatgtcgagtacaagagggtgccgtgcgagtacaggggcaagaacctctcggtgcgggtggaggagcggagccgcgcgcccagcgagctcgccgtccggttcctctaccagggcggccagaccgacatcgtcgccgtcgacgtcgcgcaggtcgggtcgtcgagctggaagttcatgacgcgggagcacgggccggcgtggagcacgcggcaggcgccggcggggccgctgcagttcagggtggtggtgaccggcgggtacgacgggaagtgggtgtgggccgaccgggaggtgctgcccagccggtggcgcgccggcgaggtctacgacacgggggtccagatcaccgacgtcgcgcaggagggctgctttccatgcgacacgcaggagtggaggtgaaagcaggcaggctagtaaacaaacaaagagccaaagaagaagctgatggctcctcgttttggccgggctatgcatcacagcacaaggccacaccacaccagagatgattagtttagtctaacagttaacaccagatgatgactcatagggtcctcctgatgatccatcggccacttttgctgccgccgctcgttttcttttctctttgttttgtgagccttctgtatgtacatgagctgctgacgtgaatcaagataagtaaattaagtag

SEQ ID NO: 68841 - protein, 275 aa, Triticum aestivum
  peptide (1)..(275): Ceres Seq. ID no. 15226239
MAVSVRLGSSPSILLLPLLFLFTIPSLASACDRCARHSKAAYYTSSLTLAAGSCGYGTAAASFNGGLLAAAGPALYRGGVGCGACFQVRCKDKKLCSGAGARVVVTDRARMRTNRTDLVLSSPAFAAMARPGMAARLTKLRAVDVEYKRVPCEYRGKNLSVRVEERSRAPSELAVRFLYQGGQTDIVAVDVAQVGSSSWKFMTREHGPAWSTRQAPAGPLQFRVVVTGGYDGKWVWADREVLPSRWRAGEVYDTGVQITDVAQEGCFPCDTQEWR

SEQ ID NO: 68842 - protein, 165 aa, Triticum aestivum
  peptide (1)..(165): Ceres Seq. ID no. 15226240
MRTNRTDLVLSSPAFAAMARPGMAARLTKLRAVDVEYKRVPCEYRGKNLSVRVEERSRAPSELAVRFLYQGGQTDIVAVDVAQVGSSSWKFMTREHGPAWSTRQAPAGPLQFRVVVTGGYDGKWVWADREVLPSRWRAGEVYDTGVQITDVAQEGCFPCDTQEWR

SEQ ID NO: 68843 - protein, 148 aa, Triticum aestivum
  peptide (1)..(148): Ceres Seq. ID no. 15226241
MARPGMAARLTKLRAVDVEYKRVPCEYRGKNLSVRVEERSRAPSELAVRFLYQGGQTDIVAVDVAQVGSSSWKFMTREHGPAWSTRQAPAGPLQFRVVVTGGYDGKWVWADREVLPSRWRAGEVYDTGVQITDVAQEGCFPCDTQEWR

SEQ ID NO: 68844 - DNA, 1406 bp, Triticum aestivum
  misc_feature (1)..(1406): Ceres Seq. ID no. 12614832
gactaatcccttccatcccgcacccttcgtctaatcgtccccagcccatggaggattccaaggggagcgacggcggcggcgagaggcccggcgccgaccacaaccctatcccggatcagccgccgccgctcgctgctcccggaggagggcgcgatgccgccgcggctgctgctgctgctgcggcggcggcggcggccttggccgaggacgaggcgcggcgcccgttcacggccctcagccaggtcgacgccgacctagccctggcgcgcgtcctccaggagcaggaacgggcgtatatgatgctccggatgaacggagtcggcggcggcggcggcgagggcagcgactacgggagctcggaggccgggagctacgagtacgacgaggatgccgaggaggactacgaggaggagctcgagaaccacctccgcgtccaccaccacgagcacccaggcggtggcgagggcgatggggacgatgatctcgaggctgatggcgagggcaagggtgagggtgagggcgaggatgaaggcgagggtgacggttctgaagagagcgagtacgaggaggaggggttcgatgaggacgaggaggtggaggatgtggatctagacccggcagagtacgaggacgacgaggcttatgcgcgggcgcttcaggacgctgaggagcgtgaggttgccgcgcggcttatggctctcgctgggatcagcgattggcgggcggtggagcatgtcgaggatcagataaacgacgcgcaggattcatggcaagaggttgatccagatgagtactcttatgaggagttagttgcattgggtgaagtagttggcacagaaagtagaggtctctctgctgatacacttgcttccttaccttcagtaacttacaagacaaaagatatgcaagatggcaacacagaacaatgtgtaatttgtcgtgtggaatttgaggaaggtgaatctttggttgcacttccctgcaatcattcataccatcctgactgcattaatcagtggcttcaaataaataaggtatgccctatgtgtagcgcagaagtttctacctcagcaagcaagcaggcatgaccaacagtcgttggtaaaccaacttcatcttcagaaaagaaaagaaaaacaccagttgttggcacttggtaggagtatcgagtatgtagtggcatcattctagtatccctgatgtttaaaccaaagcaaggcagcagaatttctacagtacaaacttgcaaggggaccagggacatggagcattttttttatgccttgccgctgatgctccgcgttctcttactcttgtacactaactgtgttactaccgtcgatcaattttttcttttctcagtgtatattatgagtatcgcattaatgcattgggatttagagatt

SEQ ID NO: 68845 - protein, 361 aa, Triticum aestivum
  peptide (1)..(361): Ceres Seq. ID no. 12614833
LIPSIPHPSSNRPQPMEDSKGSDGGGERPGADHNPIPDQPPPLAAPGGGRDAAAAAAAAAAAAAALAEDEARRPFTALSQVDADLALARVLQEQERAYMMLRMNGVGGGGGEGSDYGSSEAGSYEYDEDAEEDYEEELENHLRVHHHEHPGGGEGDGDDDLEADGEGKGEGEGEDEGEGDGSEESEYEEEGFDEDEEVEDVDLDPAEYEDDEAYARALQDAEEREVAARLMALAGISDWRAVEHVEDQINDAQDSWQEVDPDEYSYEELVALGEVVGTESRGLSADTLASLPSVTYKTKDMQDGNTEQCVICRVEFEEGESLVALPCNHSYHPDCINQWLQINKVCPMCSAEVSTSASKQA

SEQ ID NO: 68846 - protein, 346 aa, Triticum aestivum
  peptide (1)..(346): Ceres Seq. ID no. 12614834
MEDSKGSDGGGERPGADHNPIPDQPPPLAAPGGGRDAAAAAAAAAAAAAALAEDEARRPFTALSQVDADLALARVLQEQERAYMMLRMNGVGGGGGEGSDYGSSEAGSYEYDEDAEEDYEEELENHLRVHHHEHPGGGEGDGDDDLEADGEGKGEGEGEDEGEGDGSEESEYEEEGFDEDEEVEDVDLDPAEYEDDEAYARALQDAEEREVAARLMALAGISDWRAVEHVEDQINDAQDSWQEVDPDEYSYEELVALGEVVGTESRGLSADTLASLPSVTYKTKDMQDGNTEQCVICRVEFEEGESLVALPCNHSYHPDCINQWLQINKVCPMCSAEVSTSASKQA

SEQ ID NO: 68847 - protein, 263 aa, Triticum aestivum
  peptide (1)..(263): Ceres Seq. ID no. 12614835
MMLRMNGVGGGGGEGSDYGSSEAGSYEYDEDAEEDYEEELENHLRVHHHEHPGGGEGDGDDDLEADGEGKGEGEGEDEGEGDGSEESEYEEEGFDEDEEVEDVDLDPAEYEDDEAYARALQDAEEREVAARLMALAGISDWRAVEHVEDQINDAQDSWQEVDPDEYSYEELVALGEVVGTESRGLSADTLASLPSVTYKTKDMQDGNTEQCVICRVEFEEGESLVALPCNHSYHPDCINQWLQINKVCPMCSAEVSTSASKQA

SEQ ID NO: 68848 - DNA, 1417 bp, Triticum aestivum
  misc_feature (1)..(1417): Ceres Seq. ID no. 12625092
gaataagtatatctcgagaaagaaaataaaaatatcacaccactagtatggcgctgctgagcccgcgtgttccgcggctgcccctcgccgcccactccgccggcgccggcgccggatccctccggtgctgcgtccgggttgctgcctccgctgcgcgatgccaagtgacggcgtcgggaagcgtggcggcgggctcctcgtcgtcgtcggagctggaggccatccggtggggcagcgccaagctgcagggagctcgcgaggagatggaggacgaggtcgtcctccgccctgactccctcctccacggcttctccttcgccgccgtcctcgacggccacgccggtttctccaccgtccagttcctgagggacgagttgttcaaggaatgcgcagccgcgttggacgggggcgcggtgcttaacaccaagaatctcgaggccatcacggactcgatcaggcgtgcctttgccaccatggacgccaacctctccacctggcttcagcaaatggataaggaagacgactctggtgccacggccacggccttgtttctgaggaacgatgtccttgttgtctcgcacattggcgactcctgcttggtcatatcgcgtggtggaagacctcagtctctgacaaattttcatcgaccatacgggaacaacaaaacatcccttgaagaggtcaagcggattagggcagcaggtggatggattcgtgatggacgcgtatgtggagacatttctgtatctcgtgcttttggagacataagatttaaaacacggaagaatgagatgctagtaaaaggagttaaagaaggaagatggactgaaaaattcgtttcacgaataaattttaaaggggatctaataatctcttcacctgacgtatctctggtggagcttggaccggatgtggaatttgttttggtagcaaccgatggtctttgggattacattaaaagcactgaagctgtagcttttgtcagagatcaactatgtcaacatggagatgtccagcgggcctgtgaggcgcttggggagaaagctctggatcggcggtcacaagacaatattagcatagtcatagctgacttggggaggacaaactggcaggagttgcccgttccaaggccaaacgtgttgttggagctaagtcaagcagttgcgactgtaggggctgtatcagtaggaatttggatttcatcgcttctcactttgcaataggcctagttaaggtcgggggtgacattttcacatcttcggctccagctgcaaatatatatgtatatccttataggtaattagtttcctgattaaactgttcagtggtatctggactgatgaaaagaagaagaaaaacttgtgctccagctgctatctggcagcgtactaccatagggacctgtgagacgcccgtc

SEQ ID NO: 68849 - protein, 391 aa, Triticum aestivum
  peptide (1)..(391): Ceres Seq. ID no. 12625093
MALLSPRVPRLPLAAHSAGAGAGSLRCCVRVAASAARCQVTASGSVAAGSSSSSELEAIRWGSAKLQGAREEMEDEVVLRPDSLLHGFSFAAVLDGHAGFSTVQFLRDELFKECAAALDGGAVLNTKNLEAITDSIRRAFATMDANLSTWLQQMDKEDDSGATATALFLRNDVLVVSHIGDSCLVISRGGRPQSLTNFHRPYGNNKTSLEEVKRIRAAGGWIRDGRVCGDISVSRAFGDIRFKTRKNEMLVKGVKEGRWTEKFVSRINFKGDLIISSPDVSLVELGPDVEFVLVATDGLWDYIKSTEAVAFVRDQLCQHGDVQRACEALGEKALDRRSQDNISIVIADLGRTNWQELPVPRPNVLLELSQAVATVGAVSVGIWISSLLTLQ

SEQ ID NO: 68850 - protein, 319 aa, Triticum aestivum
  peptide (1)..(319): Ceres Seq. ID no. 12625094
MEDEVVLRPDSLLHGFSFAAVLDGHAGFSTVQFLRDELFKECAAALDGGAVLNTKNLEAITDSIRRAFATMDANLSTWLQQMDKEDDSGATATALFLRNDVLVVSHIGDSCLVISRGGRPQSLTNFHRPYGNNKTSLEEVKRIRAAGGWIRDGRVCGDISVSRAFGDIRFKTRKNEMLVKGVKEGRWTEKFVSRINFKGDLIISSPDVSLVELGPDVEFVLVATDGLWDYIKSTEAVAFVRDQLCQHGDVQRACEALGEKALDRRSQDNISIVIADLGRTNWQELPVPRPNVLLELSQAVATVGAVSVGIWISSLLTLQ

SEQ ID NO: 68851 - protein, 249 aa, Triticum aestivum
  peptide (1)..(249): Ceres Seq. ID no. 12625095
MDANLSTWLQQMDKEDDSGATATALFLRNDVLVVSHIGDSCLVISRGGRPQSLTNFHRPYGNNKTSLEEVKRIRAAGGWIRDGRVCGDISVSRAFGDIRFKTRKNEMLVKGVKEGRWTEKFVSRINFKGDLIISSPDVSLVELGPDVEFVLVATDGLWDYIKSTEAVAFVRDQLCQHGDVQRACEALGEKALDRRSQDNISIVIADLGRTNWQELPVPRPNVLLELSQAVATVGAVSVGIWISSLLTLQ

SEQ ID NO: 68852 - DNA, 1921 bp, Triticum aestivum
  misc_feature (1)..(1921): Ceres Seq. ID no. 15170095
aaaaaaaagatccgaaacccctgacctgcgcgcctgtccatcccagcatggccgccgcctcgtcctcctcctgcggcggcgccggctgcggggcccgctgctcctcctccacctcgtcatccgtagaggatgctccggaggggattctgggccgtctctccatatccggtgccgccgcctcctgcggcaagtgcggcggcggcgccgtgttgccggaggcgtcggtctgtgcggagagtgcttgcgggcccagctgttcgggaagttcaagctcgccgtcacaagcaacgccatggttcggccaaccgactccgtcctcgtcgccttctccggcggccccgcctctagggttgctctgcaatttatacatgagatgcggtccaaggcaatcgaaagctgggacgccagcaattcgcaagccctaccggtcttcaatgtcggggtggcgttcgttgacgagagtgttttgttgtcgaagcccgaatgcgaagttgagcaggcaactgaagatattaagtcaattgtgtcgagtttgttgccgggagataacgcaatgcacattgcctctcttgatgacgtgttctccccggaatcaaaagacggtgaaggcaggctgagggagctagttggaatgattactgatgatactgggagggaggatcttcttcagtgcttgcgcatgctttcgttgcagaagattgcactggaaaatgggtacacaaagatcatgctgggatcatgtgcttctacaatagcatgtcatgtgctatctgcaacagtaaagggccaaggttattccttaccagctgatatccaatatgttgatacacggtgggaagtgcctgtcgttcttccacttcgtgattgcctggcccaagagcttagcctgctctgtgaatttgatagtttaaagacacagcaacttcttgataggccttgcagtggcatcaatggcttagtcgcatcttttgttgcacgactaagggaggagaatccttctcgtgagcatactattgtaagaactgcacaaaaacttaagccattcccttttaacaagttctcagcaaatggctatcatgatttcctgccgtcgcggctgcgtcccaagttccaggatgttgatagcgatgagtctgctttctctgaggttctctgcctgatatgtcgaagtccattcagtgaatcagaactccagaatgttgaaagcacaaggcacacgtctcagaagaaaattgatctgtatactgcttattgctgtcaaagctgtcatttccagattctaccaggaggtagagacctgtatgaccatttcttttcactactaccaaggttctggactgagagagtagatactgcatctgccagccatagctcgctaagagatcaaatagaagactatcttcttgaagacgatgatgatgggaactgacacttgttcattgagtgaatcccaaacttacttgccagaagcctgcagagattccttcctagttgggcctcacaaatcatgacataaaccaaacttgcttgggataacagtgttcgcatctagtaaggcactggtttattcagacttctgccatattcttagaattaccctccattatattttttatttaattttctggtgtacctgtaagtcctccctcaagttaaaacatgtctgaaacttgtagtgataaaggaaaccatcacttgccagcagttttgcactgatctcaaacagctgactttgggtagctgcaggctcccaacttccatgtgattacagtattctgattggtctcacctactgtaccaactatttgcctgcaagattgtaatcagatgaatttacaaaatgggtttacaacaactattgtgctgtataaacttttgtactcgcttgattataatctattacactgttgcatttgtttcg

SEQ ID NO: 68853 - protein, 475 aa, Triticum aestivum
  peptide (1)..(475): Ceres Seq. ID no. 15170096
KKRSETPDLRACPSQHGRRLVLLLRRRRLRGPLLLLHLVIRRGCSGGDSGPSLHIRCRRLLRQVRRRRRVAGGVGLCGECLRAQLFGKFKLAVTSNAMVRPTDSVLVAFSGGPASRVALQFIHEMRSKAIESWDASNSQALPVFNVGVAFVDESVLLSKPECEVEQATEDIKSIVSSLLPGDNAMHIASLDDVFSPESKDGEGRLRELVGMITDDTGREDLLQCLRMLSLQKIALENGYTKIMLGSCASTIACHVLSATVKGQGYSLPADIQYVDTRWEVPVVLPLRDCLAQELSLLCEFDSLKTQQLLDRPCSGINGLVASFVARLREENPSREHTIVRTAQKLKPFPFNKFSANGYHDFLPSRLRPKFQDVDSDESAFSEVLCLICRSPFSESELQNVESTRHTSQKKIDLYTAYCCQSCHFQILPGGRDLYDHFFSLLPRFWTERVDTASASHSSLRDQIEDYLLEDDDDGN

SEQ ID NO: 68854 - protein, 378 aa, Triticum aestivum
  peptide (1)..(378): Ceres Seq. ID no. 15170097
MVRPTDSVLVAFSGGPASRVALQFIHEMRSKAIESWDASNSQALPVFNVGVAFVDESVLLSKPECEVEQATEDIKSIVSSLLPGDNAMHIASLDDVFSPESKDGEGRLRELVGMITDDTGREDLLQCLRMLSLQKIALENGYTKIMLGSCASTIACHVLSATVKGQGYSLPADIQYVDTRWEVPVVLPLRDCLAQELSLLCEFDSLKTQQLLDRPCSGINGLVASFVARLREENPSREHTIVRTAQKLKPFPFNKFSANGYHDFLPSRLRPKFQDVDSDESAFSEVLCLICRSPFSESELQNVESTRHTSQKKIDLYTAYCCQSCHFQILPGGRDLYDHFFSLLPRFWTERVDTASASHSSLRDQIEDYLLEDDDDGN

SEQ ID NO: 68855 - protein, 351 aa, Triticum aestivum
  peptide (1)..(351): Ceres Seq. ID no. 15170098
MRSKAIESWDASNSQALPVFNVGVAFVDESVLLSKPECEVEQATEDIKSIVSSLLPGDNAMHIASLDDVFSPESKDGEGRLRELVGMITDDTGREDLLQCLRMLSLQKIALENGYTKIMLGSCASTIACHVLSATVKGQGYSLPADIQYVDTRWEVPVVLPLRDCLAQELSLLCEFDSLKTQQLLDRPCSGINGLVASFVARLREENPSREHTIVRTAQKLKPFPFNKFSANGYHDFLPSRLRPKFQDVDSDESAFSEVLCLICRSPFSESELQNVESTRHTSQKKIDLYTAYCCQSCHFQILPGGRDLYDHFFSLLPRFWTERVDTASASHSSLRDQIEDYLLEDDDDGN

SEQ ID NO: 68856 - DNA, 773 bp, Triticum aestivum
  misc_feature (1)..(773): Ceres Seq. ID no. 13598422
acgacgaggctccccacaattccctcctcctgcgaacgcatcgtatcccaagaaaccaagaaacagagcaagaaatatcatagagggagcagagtacagagagagaaagagggataagcgcttgcttgctgggagagccatggatgagatcatgaacaagatgggctcctactggctggggcagagggccaacaaagagatgtcgtcggccggtgacgacatcgagtcgctctcaaccagtgtcggggacggagcaaaatggctggtaaacaagctcaagggtaagatgcagaagccgctggcggagctgctccaggagcacgaccttccggcggggctgttcccgcgggaggccaccaactacgagttcgagccggagacgcggcggctgacggtgcacatcccggcggtctgcgaggtcggctacagggacggctccgagctgcgtttcgacaccacggtgaccggcacgctggacaagggcagcctgacgggggtggagggcctcaaagccaaggtgctcgtctgggccagggtcaccgccgtcaaggccgacgccgcaaaggtctacttcgccgtaggcatcaagaagtcgcgcagccgcgaggcatacgaggtcgtcagaggcgccatcaccgtcgacgagttctagattctagtcgcgcgctcgccgagatgattattctaccgaaataattgatcatgtgctcacactacctgctgtaagaggaggatgcttgtaaatggggattcataattcagtttcgcagctc

SEQ ID NO: 68857 - protein, 216 aa, Triticum aestivum
  peptide (1)..(216): Ceres Seq. ID no. 13598423
RRGSPQFPPPANASYPKKPRNRARNIIEGAEYRERKRDKRLLAGRAMDEIMNKMGSYWLGQRANKEMSSAGDDIESLSTSVGDGAKWLVNKLKGKMQKPLAELLQEHDLPAGLFPREATNYEFEPETRRLTVHIPAVCEVGYRDGSELRFDTTVTGTLDKGSLTGVEGLKAKVLVWARVTAVKADAAKVYFAVGIKKSRSREAYEVVRGAITVDEF

SEQ ID NO: 68858 - protein, 170 aa, Triticum aestivum
  peptide (1)..(170): Ceres Seq. ID no. 13598424
MDEIMNKMGSYWLGQRANKEMSSAGDDIESLSTSVGDGAKWLVNKLKGKMQKPLAELLQEHDLPAGLFPREATNYEFEPETRRLTVHIPAVCEVGYRDGSELRFDTTVTGTLDKGSLTGVEGLKAKVLVWARVTAVKADAAKVYFAVGIKKSRSREAYEVVRGAITVDEF

SEQ ID NO: 68859 - protein, 166 aa, Triticum aestivum
  peptide (1)..(166): Ceres Seq. ID no. 13598425
MNKMGSYWLGQRANKEMSSAGDDIESLSTSVGDGAKWLVNKLKGKMQKPLAELLQEHDLPAGLFPREATNYEFEPETRRLTVHIPAVCEVGYRDGSELRFDTTVTGTLDKGSLTGVEGLKAKVLVWARVTAVKADAAKVYFAVGIKKSRSREAYEVVRGAITVDEF

SEQ ID NO: 68860 - DNA, 2114 bp, Triticum aestivum
  misc_feature (1)..(2114): Ceres Seq. ID no. 14314100
gcctggttcaccaccaccgctgcttagcccggaagattcctcctaccctccctcgtctcgtgcgtcgtgtccaaaccccaaaccctcacgcgaagtcacgcacccccggcgacggcgatggatctccgccgcccgccgcgctcgacgtccggcggcgtcgagcccaagatccgccaggtcggcttcgtcacccctggcgtttcggccccgtccgagccgcccgccgccgccgccgcggcggtatcactgcctggcgcggccgccgggtcgcctccggcgtcggacctctccccgggctcgctctcccccgtcatgatccctcctccgcggcacgtggatcacctctcccccgactccccctctcccccggcgtccgacgtcctcctcctcgcgtcctcggcgcctcagccttcctccatgcgcttcgccgctgcatccgagttcggagaggaggattcgaggtccctggccccttccgcgggggagctagaaacaaacaagggagatttggctgaaataaggaatgaagatgctccagcgtccattccgcaaaagcagaaaccttctaaagcagagaggcgtgctattcaggaggctcagcgtgctgcgaaagctgctgcgaaggaggcaggtttatcaggaaagtcaacaggcgctgcttctggggctaatcctgcaacatccaagcaagccaagccagctaaaatttctcagaagaaagatgtgccccatgctccaagtacagttgcttctgagaagaaggttactgaacgccaaccagagagagatagaaaaaaagatgttcctcatccgagaatgcagtttgatgatgtgcatcgggtggagaaagcaaaaaaacgtgcaattgtcaaccaatcagaggctcgaaacagagttgaattgtttaggcatctgccacagtacgtccatggcactcaacttcctgacctcgagtcaaaattctttcagctggaaccaattcatccttctgtgtacaaggtcggtctccaatatttgtctggtgaggtatctggtggcaatggtcgttgcatagcaatgcttcttgcgttcagagaggcaataaaagattactccacaccgccaaataaaactctcagcagagaccttactgcaaaagtcagtagttatgtgtcattttttatcgagtgccgtccactatcaattagcatgggcaatgctatcaggttcctgaaaaacaggattgccaagctaccaattacattgtcggagtcagaagccaaggccagtcttcagtctgatattgatcgttttattaatgagaagatagttgttgcagatcaggttattgtcagtcatgccatcacaaaagtcagagacgatgatgtcttgctaacatatgggtcatcatcagttgttgaaatgattttggagcatgctcatgaacttggtaggaagttccgtgttatagtgatggattctcgtcccaagctcgaggggcaaggattactgcgtagattagtggcaaagggcattaactgcacatatactcatataaatgcagtttcatacatcatgcatgaagttacaagagtcttcttgggtgcatcctcaatattatcaaatggaacagtttattcccgagttggcacagcatccgtggctatggtggcacatgcatttggaattcctgttttggtttgctgcgaggcatacaaatttcatgagagggtgcaacttgattctatatgcgctaatgagcttggtgatccagatgtgatttcgaaaattcctgggagggcagacttgggcgatcttaagaactgggctgacaacgagaatctccaactgttaaatctcacgtatgatgcaaccccttctgattatgtgtcgatgatcataacggattatggaatgcttccacctacaagtgtgccggtcatcgtgagagagtaccgcaaggagcagctgtgggtatagatctacttgcagtgtgatcgcagttttggcaactgttgctgcctaggtgcagcatgagtggacatatacaacttgtatgtttttgagatgtgggctgtcaaacctctttgccgacttaccgttttgtctactcaaaatggtcgtctagttttgtc

SEQ ID NO: 68861 - protein, 613 aa, Triticum aestivum
  peptide (1)..(613): Ceres Seq. ID no. 14314101
MDLRRPPRSTSGGVEPKIRQVGFVTPGVSAPSEPPAAAAAAVSLPGAAAGSPPASDLSPGSLSPVMIPPPRHVDHLSPDSPSPPASDVLLLASSAPQPSSMRFAAASEFGEEDSRSLAPSAGELETNKGDLAEIRNEDAPASIPQKQKPSKAERRAIQEAQRAAKAAAKEAGLSGKSTGAASGANPATSKQAKPAKISQKKDVPHAPSTVASEKKVTERQPERDRKKDVPHPRMQFDDVHRVEKAKKRAIVNQSEARNRVELFRHLPQYVHGTQLPDLESKFFQLEPIHPSVYKVGLQYLSGEVSGGNGRCIAMLLAFREAIKDYSTPPNKTLSRDLTAKVSSYVSFFIECRPLSISMGNAIRFLKNRIAKLPITLSESEAKASLQSDIDRFINEKIVVADQVIVSHAITKVRDDDVLLTYGSSSVVEMILEHAHELGRKFRVIVMDSRPKLEGQGLLRRLVAKGINCTYTHINAVSYIMHEVTRVFLGASSILSNGTVYSRVGTASVAMVAHAFGIPVLVCCEAYKFHERVQLDSICANELGDPDVISKIPGRADLGDLKNWADNENLQLLNLTYDATPSDYVSMIITDYGMLPPTSVPVIVREYRKEQLWV

SEQ ID NO: 68862 - protein, 548 aa, Triticum aestivum
  peptide (1)..(548): Ceres Seq. ID no. 14314102
MIPPPRHVDHLSPDSPSPPASDVLLLASSAPQPSSMRFAAASEFGEEDSRSLAPSAGELETNKGDLAEIRNEDAPASIPQKQKPSKAERRAIQEAQRAAKAAAKEAGLSGKSTGAASGANPATSKQAKPAKISQKKDVPHAPSTVASEKKVTERQPERDRKKDVPHPRMQFDDVHRVEKAKKRAIVNQSEARNRVELFRHLPQYVHGTQLPDLESKFFQLEPIHPSVYKVGLQYLSGEVSGGNGRCIAMLLAFREAIKDYSTPPNKTLSRDLTAKVSSYVSFFIECRPLSISMGNAIRFLKNRIAKLPITLSESEAKASLQSDIDRFINEKIVVADQVIVSHAITKVRDDDVLLTYGSSSVVEMILEHAHELGRKFRVIVMDSRPKLEGQGLLRRLVAKGINCTYTHINAVSYIMHEVTRVFLGASSILSNGTVYSRVGTASVAMVAHAFGIPVLVCCEAYKFHERVQLDSICANELGDPDVISKIPGRADLGDLKNWADNENLQLLNLTYDATPSDYVSMIITDYGMLPPTSVPVIVREYRKEQLWV

SEQ ID NO: 68863 - protein, 513 aa, Triticum aestivum
  peptide (1)..(513): Ceres Seq. ID no. 14314103
MRFAAASEFGEEDSRSLAPSAGELETNKGDLAEIRNEDAPASIPQKQKPSKAERRAIQEAQRAAKAAAKEAGLSGKSTGAASGANPATSKQAKPAKISQKKDVPHAPSTVASEKKVTERQPERDRKKDVPHPRMQFDDVHRVEKAKKRAIVNQSEARNRVELFRHLPQYVHGTQLPDLESKFFQLEPIHPSVYKVGLQYLSGEVSGGNGRCIAMLLAFREAIKDYSTPPNKTLSRDLTAKVSSYVSFFIECRPLSISMGNAIRFLKNRIAKLPITLSESEAKASLQSDIDRFINEKIVVADQVIVSHAITKVRDDDVLLTYGSSSVVEMILEHAHELGRKFRVIVMDSRPKLEGQGLLRRLVAKGINCTYTHINAVSYIMHEVTRVFLGASSILSNGTVYSRVGTASVAMVAHAFGIPVLVCCEAYKFHERVQLDSICANELGDPDVISKIPGRADLGDLKNWADNENLQLLNLTYDATPSDYVSMIITDYGMLPPTSVPVIVREYRKEQLWV

SEQ ID NO: 68864 - DNA, 1510 bp, Triticum aestivum
  misc_feature (1)..(1510): Ceres Seq. ID no. 14302279
acccaaactgctgctctttctccccggcccttgggacttgggagtgcgtgagagtgagggactcagcaaaaccctaattttcaccccaattcgccccttccaaaccctaaccctaatacgctcgatgttgtaatcccgccgcgtttgccatggctctagaggggcccgcggagcgacgggacgagggccagcagggagggatggcgaacgggaatggcgtggctccgccgccgtcgcgcatggccggccggccgttgggggcggctgcgtactctgacaggcggctgcgcctcaatccgaacacggagcacaagccgcaggactacaccgacgtgcgcggcgagtacgcgccagccgtgtacagcgccctggagcggcacctcccgcctagcctcctcgatgccgaccgtgatgtcaagctacacttcatgcgggacatactcgcgcgctattggccccatggcgagcgaaacaaggttcataggcacaaagaatacaggcagaagatagtccacctctataagccacttcatcaagaattatacagcatgcacccttcggctttcttcttaccaacattccttgaagcagtaagaaccaatacagaagaaagcattgcaagtataatgactgaaccaattcctggtgttttttcatttgctatgttacagcccaacttttgtgacatgctattggaggaggtagagaactttgaaaagtgggttcatgcaatgaaatttaagataatgaggccaaatacaatgaataaatatggtgctgtccttgatgattttggcctggaagctatgctgaatcagttcatggaggagttcatagctccaatttctaaagttttttaccctgaggttggtggaggaacattggactctcatcatgcttttgttgttgaatatgggaaagacagagatgttgaactaggtttccatgttgatgattctgaggtcacattaaatgtttgccttggcaagcaattctcaggcggtgaattatactttcgtggcattcgttgcgagaatcatgtgaactcagaaacacagcatgaggaaatgtatgattactctcatgttcctggacgagctgtacttcaccgtggccgtcatagacatggtgctagaccgacatcatcagggctcagaatgaatctgcttttgtggtgcagaagctccgtgttcagggagatgaagaaataccagatggatttttctagctggtgcggtgagtgccagcgtgaaaagacagagaggcagattcagtgcgtcaaagcgaccaagttggcatttcttaggggtgctggaggggcaatgatttaagtcatatttactgcatgtattttatgcaatcctgtattatattaaacatcctttgatcatttggaaacatctagtataattgttgtcaaatttccagctcgtatgtttgtcagtgtcattgcatcttatgtaaatctgaactttccttctgcattgccacataagccatggtttttact

SEQ ID NO: 68865 - protein, 393 aa, Triticum aestivum
  peptide (1)..(393): Ceres Seq. ID no. 14302280
MALEGPAERRDEGQQGGMANGNGVAPPPSRMAGRPLGAAAYSDRRLRLNPNTEHKPQDYTDVRGEYAPAVYSALERHLPPSLLDADRDVKLHFMRDILARYWPHGERNKVHRHKEYRQKIVHLYKPLHQELYSMHPSAFFLPTFLEAVRTNTEESIASIMTEPIPGVFSFAMLQPNFCDMLLEEVENFEKWVHAMKFKIMRPNTMNKYGAVLDDFGLEAMLNQFMEEFIAPISKVFYPEVGGGTLDSHHAFVVEYGKDRDVELGFHVDDSEVTLNVCLGKQFSGGELYFRGIRCENHVNSETQHEEMYDYSHVPGRAVLHRGRHRHGARPTSSGLRMNLLLWCRSSVFREMKKYQMDFSSWCGECQREKTERQIQCVKATKLAFLRGAGGAMI

SEQ ID NO: 68866 - protein, 376 aa, Triticum aestivum
  peptide (1)..(376): Ceres Seq. ID no. 14302281
MANGNGVAPPPSRMAGRPLGAAAYSDRRLRLNPNTEHKPQDYTDVRGEYAPAVYSALERHLPPSLLDADRDVKLHFMRDILARYWPHGERNKVHRHKEYRQKIVHLYKPLHQELYSMHPSAFFLPTFLEAVRTNTEESIASIMTEPIPGVFSFAMLQPNFCDMLLEEVENFEKWVHAMKFKIMRPNTMNKYGAVLDDFGLEAMLNQFMEEFIAPISKVFYPEVGGGTLDSHHAFVVEYGKDRDVELGFHVDDSEVTLNVCLGKQFSGGELYFRGIRCENHVNSETQHEEMYDYSHVPGRAVLHRGRHRHGARPTSSGLRMNLLLWCRSSVFREMKKYQMDFSSWCGECQREKTERQIQCVKATKLAFLRGAGGAMI

SEQ ID NO: 68867 - protein, 363 aa, Triticum aestivum
  peptide (1)..(363): Ceres Seq. ID no. 14302282
MAGRPLGAAAYSDRRLRLNPNTEHKPQDYTDVRGEYAPAVYSALERHLPPSLLDADRDVKLHFMRDILARYWPHGERNKVHRHKEYRQKIVHLYKPLHQELYSMHPSAFFLPTFLEAVRTNTEESIASIMTEPIPGVFSFAMLQPNFCDMLLEEVENFEKWVHAMKFKIMRPNTMNKYGAVLDDFGLEAMLNQFMEEFIAPISKVFYPEVGGGTLDSHHAFVVEYGKDRDVELGFHVDDSEVTLNVCLGKQFSGGELYFRGIRCENHVNSETQHEEMYDYSHVPGRAVLHRGRHRHGARPTSSGLRMNLLLWCRSSVFREMKKYQMDFSSWCGECQREKTERQIQCVKATKLAFLRGAGGAMI

SEQ ID NO: 68868 - DNA, 753 bp, Triticum aestivum
  misc_feature (1)..(753): Ceres Seq. ID no. 12587416
cctagaacatcctaaatcgaaaaaaaagggataacttgaccgacttcgccattgacaacaatctatccgcgattcaaacaagaaacagcagcagcgacaccagcaatcgactccgcgagaacccagcaagggggaggatgaaatccttcaagaaggaattcaccctggaggagagggcgaatgagtcggccgccatgatcgccaagtaccccggcaggatccccgtgattgttgaaaggttttcaaggagtaatcttccagaaatggagaagaggaagtacctggttccttgtgacatgccagttgggcagttcattttcatcctgcgctccaggttacatctgtctccagggacggcgcttttcgtgtttgtgcgcgacaccttgccccagaccgctaacctgatgggtagcgtgtatgattcgtacaaagataagcaggatggcttcctctacatgtgttacagcagcgagaagacatttgggtgacatctgcctgactgcaatttggcgtagtgcacccaatcccagtgtacatatgtgacatcaatctcttgttaaatgttaagtgtagcagcctctgccgatctctagtttattttacttgcacgtttcacatctgtattgctcccggaaaaaaggaaaaaaaactgtattgttgtatcaccgaagtaaacttatgcccctgtgcatgatgctgcttgcgaagtcctttggcaaggatggacgtatatatgaatagaagtgttgatgt

SEQ ID NO: 68869 - protein, 116 aa, Triticum aestivum
  peptide (1)..(116): Ceres Seq. ID no. 12587417
MKSFKKEFTLEERANESAAMIAKYPGRIPVIVERFSRSNLPEMEKRKYLVPCDMPVGQFIFILRSRLHLSPGTALFVFVRDTLPQTANLMGSVYDSYKDKQDGFLYMCYSSEKTFG

SEQ ID NO: 68870 - protein, 97 aa, Triticum aestivum
  peptide (1)..(97): Ceres Seq. ID no. 12587418
MIAKYPGRIPVIVERFSRSNLPEMEKRKYLVPCDMPVGQFIFILRSRLHLSPGTALFVFVRDTLPQTANLMGSVYDSYKDKQDGFLYMCYSSEKTFG

SEQ ID NO: 68871 - protein, 74 aa, Triticum aestivum
  peptide (1)..(74): Ceres Seq. ID no. 12587419
MEKRKYLVPCDMPVGQFIFILRSRLHLSPGTALFVFVRDTLPQTANLMGSVYDSYKDKQDGFLYMCYSSEKTFG

SEQ ID NO: 68872 - DNA, 1415 bp, Triticum aestivum
  misc_feature (1)..(1415): Ceres Seq. ID no. 13655218
aaaacctccaccgcgactgcgcgatcgatcgtcatctcatctcggcgtaccactactccctcaaacttgcccccttctcgatatcctgccttctcgtttacgtgctcggcgtgtgtgctagctagaggtgctgaacgaccgacatcggccggctgccatggggcgtggcgacggacacgacgacgcgctgcggcggtggctgcgggaagcgggcgggtggctggtggtcgacggggccctgggcacggagctggaggcgcacggcgcggacctgcaggacgagctctggagcgcccggtgcctcgtctccgctccccacctcatccgcaaggtccatctggactacctcgacgcaggcgccaacatcataaccacggcctcctaccaggccacgctgcaggggttccagtcgcgaggcgtgtcgagggagcagggcgaggcgctgctccggcggagcgtgcagatcgcgcaggaggcgcgcgccatcttcgtggaaggccggtcgaaaggcccctacgccgcgcgcgatgagtacgacggcgtggcgtccagagcgcaccggcccgtgctcgtggcggcctccgtcgggagctacggggcgtacctcgcggacggctccgagtacaccggggactatggcagatccgtcaccaaggaagcgctcaagaacttccacaggaggcggctccaggtgctggcggacgcagggccggatctcatcgccttcgagaccatcccaaacaagctggaagcacaggcttacgctgagctgttggaggagaacgacatcaggattcccgcctggttctccttcacctccaaggacggggccaacgcggcgagcggtgaccccatcaccgagtgcgccgccgtcgccgactcctgcaggagggtggccgccgtcgggataaactgcacggctcccaggctaatccatggcctcgtcctctccattagcaaggtgacgagcaagccgatcgtggtgtaccccaacaccggggagacgtacgtggccgagaccaaggagtgggtggactcggctgctgctggtggtggtgttgcggggacggacttcgtgtcgtgcgtcggcaagtggaggcaggcaggagcttccctcgtgggagggtgctgcaggacgggcccggcgacggtgagggccatcgcgcgggcgctgcgggaggaggatgctgccgccgacgccgataccgacgatgactaccctgccgtggccgtcctgtagagcctataggccaccctttctacatcgaccgcgatgctggcgtagaggtgtatgtagatcgtcgttctcatggccctgttgtgatgtaaatcgttatcatggctctttttgttatgacgaagcttggttctttgatctttctaattttagtcgtattctccgctgtgttgctgtc

SEQ ID NO: 68873 - protein, 360 aa, Triticum aestivum
  peptide (1)..(360): Ceres Seq. ID no. 13655219
MGRGDGHDDALRRWLREAGGWLVVDGALGTELEAHGADLQDELWSARCLVSAPHLIRKVHLDYLDAGANIITTASYQATLQGFQSRGVSREQGEALLRRSVQIAQEARAIFVEGRSKGPYAARDEYDGVASRAHRPVLVAASVGSYGAYLADGSEYTGDYGRSVTKEALKNFHRRRLQVLADAGPDLIAFETIPNKLEAQAYAELLEENDIRIPAWFSFTSKDGANAASGDPITECAAVADSCRRVAAVGINCTAPRLIHGLVLSISKVTSKPIVVYPNTGETYVAETKEWVDSAAAGGGVAGTDFVSCVGKWRQAGASLVGGCCRTGPATVRAIARALREEDAAADADTDDDYPAVAVL

SEQ ID NO: 68874 - DNA, 689 bp, Triticum aestivum
  misc_feature (1)..(689): Ceres Seq. ID no. 12585656
ccctcccacacacctccgcctccacaccacccgtcccgacccctctcctccaaggtaagcccgcggcggcggcgagcgagcgagcggcggcgatgacgacccgcttcaagaagaaccggaagaagcgcggccacgtgtccgccgggcacgggcgtgtgggcaagcaccgcaagcatcccggaggccgcggtaacgccggagacatgcaccaccaccgcatcctcttcgacaagtaccatcccggctacttcggcaaggtcggtatgcgctacttccacaagctcagcaacaggttctacacaccgacggtcaacgtcgagaggctctggtccatggttccgtccgacaaggcggcggaggccggcggcgacaaggcccccgtggtcgacgtctcgcagttcggctacttcaaggtgctcggcaaggggatgctgccggagaagcccatcgtcgtcaaggccaagctcatctccaagatcgccgaaaagaagatcaaggccgccggcggcgcagtcgtgctcgttgcctagggttctgttcccgaccgtgccccgagatctatatctgaactattagttgtttcccgtaccagcaatttgtgttgaagaagacatcgttagtttgttatcctggttcctgtgtggtaaaccaacatcttatgagaattttgcgctatgttatgccagttt

SEQ ID NO: 68875 - protein, 175 aa, Triticum aestivum
  peptide (1)..(175): Ceres Seq. ID no. 12585657
LPHTSASTPPVPTPLLQGKPAAAASERAAAMTTRFKKNRKKRGHVSAGHGRVGKHRKHPGGRGNAGDMHHHRILFDKYHPGYFGKVGMRYFHKLSNRFYTPTVNVERLWSMVPSDKAAEAGGDKAPVVDVSQFGYFKVLGKGMLPEKPIVVKAKLISKIAEKKIKAAGGAVVLVA

SEQ ID NO: 68876 - protein, 145 aa, Triticum aestivum
  peptide (1)..(145): Ceres Seq. ID no. 12585658
MTTRFKKNRKKRGHVSAGHGRVGKHRKHPGGRGNAGDMHHHRILFDKYHPGYFGKVGMRYFHKLSNRFYTPTVNVERLWSMVPSDKAAEAGGDKAPVVDVSQFGYFKVLGKGMLPEKPIVVKAKLISKIAEKKIKAAGGAVVLVA

SEQ ID NO: 68877 - protein, 108 aa, Triticum aestivum
  peptide (1)..(108): Ceres Seq. ID no. 12585659
MHHHRILFDKYHPGYFGKVGMRYFHKLSNRFYTPTVNVERLWSMVPSDKAAEAGGDKAPVVDVSQFGYFKVLGKGMLPEKPIVVKAKLISKIAEKKIKAAGGAVVLVA

SEQ ID NO: 68878 - DNA, 920 bp, Triticum aestivum
  misc_feature (1)..(920): Ceres Seq. ID no. 12585194
agatacaaatacatcccggcgaaaatcaggcaggcggagcatggaagggaggagcacggccgccgcgatgtcgtcggagccggtgaggctcatcggctgcttcgccagcccggtggtccaccgcgccgagctggccctgcgcctcaagggcgtcccctacgagctcatcgaggaggacctcaacaacaagagcgagctgctgctgacgcacaaccccatccacaagaccgtccccgtgctcctccacggcgaccgctccatcccggagtcgctcgtcatcgtcgagtatgtcgacgaggccttccccgccggcccgccgctcctccccgtcgaccccctcgcccgtgcaaccgcccgcttctgggtccgattcctcgaagaggaggagtgcaagaagcctatgtggatcgcgctgtgggcggacggcgaggcgcaggctgcggcggcgagggagacgaaggagaagctggcgctgctggaggcgcagctgccggaggggaagaggttcttcggcggcgacgccatcggcttcctcgacatcgccgccggcggggcgctcgcgcactggatgggggtgttcgaggagatggccggggtgcggctgctcaccgaggaggcgcacccggcgctgtgccgctgggcgagggagtacagggccgacgagaccgtgcgtgggtgcctcccggacaggtcccgcgtgctcgctgccttggcggcgaggaaggatctgtatgtctccattgctaaggccatggctgcacagaagtagtagcacggttcacgaccaagaaggggatatgcatgcttgtgaccatggcgtactggtcaatgatgctgaaatcagggctatgtatacatgtcgatgcatatccatagtggatccaatgttcttggaataaaaagaagggaaaagtgcgtcc

SEQ ID NO: 68879 - protein, 255 aa, Triticum aestivum
  peptide (1)..(255): Ceres Seq. ID no. 12585195
DTNTSRRKSGRRSMEGRSTAAAMSSEPVRLIGCFASPVVHRAELALRLKGVPYELIEEDLNNKSELLLTHNPIHKTVPVLLHGDRSIPESLVIVEYVDEAFPAGPPLLPVDPLARATARFWVRFLEEEECKKPMWIALWADGEAQAAAARETKEKLALLEAQLPEGKRFFGGDAIGFLDIAAGGALAHWMGVFEEMAGVRLLTEEAHPALCRWAREYRADETVRGCLPDRSRVLAALAARKDLYVSIAKAMAAQK

SEQ ID NO: 68880 - protein, 248 aa, Triticum aestivum
  peptide (1)..(248): Ceres Seq. ID no. 12585196
RYKYIPAKIRQAEHGREEHGRRDVVGAGEAHRLLRQPGGPPRRAGPAPQGRPLRAHRGGPQQQERAAADAQPHPQDRPRAPPRRPLHPGVARHRRVCRRGLPRRPAAPPRRPPRPCNRPLLGPIPRRGGVQEAYVDRAVGGRRGAGCGGEGDEGEAGAAGGAAAGGEEVLRRRRHRLPRHRRRRGARALDGGVRGDGRGAAAHRGGAPGAVPLGEGVQGRRDRAWVPPGQVPRARCLGGEEGSVCLHC

SEQ ID NO: 68881 - protein, 242 aa, Triticum aestivum
  peptide (1)..(242): Ceres Seq. ID no. 12585197
MEGRSTAAAMSSEPVRLIGCFASPVVHRAELALRLKGVPYELIEEDLNNKSELLLTHNPIHKTVPVLLHGDRSIPESLVIVEYVDEAFPAGPPLLPVDPLARATARFWVRFLEEEECKKPMWIALWADGEAQAAAARETKEKLALLEAQLPEGKRFFGGDAIGFLDIAAGGALAHWMGVFEEMAGVRLLTEEAHPALCRWAREYRADETVRGCLPDRSRVLAALAARKDLYVSIAKAMAAQK

SEQ ID NO: 68882 - DNA, 1451 bp, Triticum aestivum
  misc_feature (1)..(1451): Ceres Seq. ID no. 13655338
aaaatttggtccagcgaacgcagagcggataccaaccaggtgagccatcaaagccgcttctcttcccctaaaacctagcccgcaaatcccaatccagcccacgcgcctcccccccaaaccctcgtccccaagctcgcgaacctcgccgccgccaccgcccgcaccaccaccggccgctccgcgcgaccgcccaccatggcgcgtaacgaggagaaggcgcagtccatgctgaaccgcttcatcacgatgaagcaggaggagaagcgcaagccccgcgagcgccggccgtacctcgcctccgagtgccgggacctcgctgacgccgaccgctggcgtggagagatcctgcgcgagatcggcgtcaaggtcgccgagatccagaacgagggcctcggggagcaccgcctccgagacctcaacgacgagatcaacaagctcctccgcgagcgcagccactgggagcgccgcatcctcgagctcggaggccgcgactactctcgcagctccaacgccgccctcatgaccgacctcgacggcaacatcgtcgccatccccaacccctccggccggggcccaggctaccgctactttggcgctgccaagaagctccccggcgtccgtgagctatttgacaagccacctgaggtccgcaagcgccgcacccgctatgagatccacaagcgcatcaatgccgggtactacggatactatgacgatgaggacggtgtgcttgagccccttgaggctgctgccgagaagcgcatgcgggacgaggttgtcacggagtggcaccgggtggagcgtgtgcggcgggaggccatgaagaatgtggtgagtggcgaggtggctgcagcaggtgggcgtggtggggaagctgctagggaggtgctgttcgaggaggtggaggaggaggttgaggaggagaggaggctggaggaagagaggatggaaagagagaagggggaagaggctgggagggagtttgtcgcacatgtgccgctccctgatgagaaggagattgagcggatggtgctagagaagaagaagaaggagctgctcagcaagtacacaagtgataccctgcaaggcgagcagaaggaggctaaggagatgctcaatgtgcaacgctaggagagatgttggccattgctgaatccttcacggtattgagacgagtgaagtgcgaggagcaatatgtgcagtgctggacaagcgttgacgcaaccctagaagatctgatgctgaaaacgctgaagggcttcgctgcaatcatgttgatcgatgtgatgtttattaccctagaatgattgatgccaaaagggtaaacctgagatagtggtggtgaaccgtcactgtgcatggatgtgctgtattcactggcactgtacaagtacatccattggctacgcatatatctaaaaaactactagaccataatgaaagcaattctg

SEQ ID NO: 68883 - protein, 311 aa, Triticum aestivum
  peptide (1)..(311): Ceres Seq. ID no. 13655339
MARNEEKAQSMLNRFITMKQEEKRKPRERRPYLASECRDLADADRWRGEILREIGVKVAEIQNEGLGEHRLRDLNDEINKLLRERSHWERRILELGGRDYSRSSNAALMTDLDGNIVAIPNPSGRGPGYRYFGAAKKLPGVRELFDKPPEVRKRRTRYEIHKRINAGYYGYYDDEDGVLEPLEAAAEKRMRDEVVTEWHRVERVRREAMKNVVSGEVAAAGGRGGEAAREVLFEEVEEEVEEERRLEEERMEREKGEEAGREFVAHVPLPDEKEIERMVLEKKKKELLSKYTSDTLQGEQKEAKEMLNVQR

SEQ ID NO: 68884 - protein, 301 aa, Triticum aestivum
  peptide (1)..(301): Ceres Seq. ID no. 13655340
MLNRFITMKQEEKRKPRERRPYLASECRDLADADRWRGEILREIGVKVAEIQNEGLGEHRLRDLNDEINKLLRERSHWERRILELGGRDYSRSSNAALMTDLDGNIVAIPNPSGRGPGYRYFGAAKKLPGVRELFDKPPEVRKRRTRYEIHKRINAGYYGYYDDEDGVLEPLEAAAEKRMRDEVVTEWHRVERVRREAMKNVVSGEVAAAGGRGGEAAREVLFEEVEEEVEEERRLEEERMEREKGEEAGREFVAHVPLPDEKEIERMVLEKKKKELLSKYTSDTLQGEQKEAKEMLNVQR

SEQ ID NO: 68885 - protein, 294 aa, Triticum aestivum
  peptide (1)..(294): Ceres Seq. ID no. 13655341
MKQEEKRKPRERRPYLASECRDLADADRWRGEILREIGVKVAEIQNEGLGEHRLRDLNDEINKLLRERSHWERRILELGGRDYSRSSNAALMTDLDGNIVAIPNPSGRGPGYRYFGAAKKLPGVRELFDKPPEVRKRRTRYEIHKRINAGYYGYYDDEDGVLEPLEAAAEKRMRDEVVTEWHRVERVRREAMKNVVSGEVAAAGGRGGEAAREVLFEEVEEEVEEERRLEEERMEREKGEEAGREFVAHVPLPDEKEIERMVLEKKKKELLSKYTSDTLQGEQKEAKEMLNVQR

SEQ ID NO: 68886 - DNA, 710 bp, Triticum aestivum
  misc_feature (1)..(710): Ceres Seq. ID no. 15173684
ctttttttgtccggccatttggtgaaccaccgagccgcatgatcgttctgcatttctccacatatatatctcgatcggcgaccgaagcgatggcgtcctcccggcgagatctgctcgtggcgctctgcgtggcggcgctcctggccgtcgggtcggagtcccacgggctggaggacttcggcagcgaggggaagacggaggcgacgcccgagatggcctccttcttcggcgccaagcccgaggccgccgtgctcccggaggcgctggacaactccatggccgccaagccggaggcggcatcggcgatgcccaccaccaccagcaccaacccgcgtgcgtccccgccgcgcagatccgtggccgtcgcggccggcgtggcctgcggcgtcgcggccctggcggtggtcggcgtggccgtcgccgtcgccttcgtggtgcgcgccaggcgcggcgagaggcgcgaggccgaggtccatctcggctaagcccgccggcttggtttcattaggggttgctcgtcaattcattagcgtcgtggtttgcgtttagttaattgcgtgtttagttcgatgatgaatgatttcttccgttcttccgctgtttgtgtgtgtgtgatggagatttggggaagcacgctgtaacataaataacgcttcattggcatgcatgttactgtgatgtctagaccttgaatgaagtatttcactagg

SEQ ID NO: 68887 - protein, 160 aa, Triticum aestivum
  peptide (1)..(160): Ceres Seq. ID no. 15173685
FFVRPFGEPPSRMIVLHFSTYISRSATEAMASSRRDLLVALCVAALLAVGSESHGLEDFGSEGKTEATPEMASFFGAKPEAAVLPEALDNSMAAKPEAASAMPTTTSTNPRASPPRRSVAVAAGVACGVAALAVVGVAVAVAFVVRARRGERREAEVHLG

SEQ ID NO: 68888 - protein, 148 aa, Triticum aestivum
  peptide (1)..(148): Ceres Seq. ID no. 15173686
MIVLHFSTYISRSATEAMASSRRDLLVALCVAALLAVGSESHGLEDFGSEGKTEATPEMASFFGAKPEAAVLPEALDNSMAAKPEAASAMPTTTSTNPRASPPRRSVAVAAGVACGVAALAVVGVAVAVAFVVRARRGERREAEVHLG

SEQ ID NO: 68889 - protein, 131 aa, Triticum aestivum
  peptide (1)..(131): Ceres Seq. ID no. 15173687
MASSRRDLLVALCVAALLAVGSESHGLEDFGSEGKTEATPEMASFFGAKPEAAVLPEALDNSMAAKPEAASAMPTTTSTNPRASPPRRSVAVAAGVACGVAALAVVGVAVAVAFVVRARRGERREAEVHLG

SEQ ID NO: 68890 - DNA, 908 bp, Triticum aestivum
  misc_feature (1)..(908): Ceres Seq. ID no. 13583691
aatcccaatcgagccctcctccccttccgccgccgccgccgccgccatgtcccgcttcgtgcggcgcctcgccggcatcccgtggcgccagatcgccggggaggcctcctccgtcggtctgctaatggcgcagggcctctgcgccgtccacgtcgtcagcgagcacgtcctcggcgtcgccttcccacggggccccagcatgctgccggcgctgaacatggcgggggacgtgctgctcaccgacaaggtgagcccgcggcgcgggtgggtggggccgggggacgtcgtgctcctcctctcgccggaggacccgcgcaagatcgtcgccaagcgcgtgctcgggatggagggcgacgaggtcacctaccccgtcgacgccggcaacagcgacgccaccaagaccgtcgtggtaccgcaaggtcatatctgggtgcagggcgacaatatctattcatctaacgactcgaggcagtttggacccgtgccttacggtctcgtaaaagggaagatgtcctatcggatttggccaccgtcaaggattggttcgattgactcaaaggagtaggacacagagtataagcgactgttcatacgatgcaaccaggccctgcatttgttggtgcatcttgatgtctaccatttgatgcttcacaattttggtccttgccccccagaagccccgttcagcgaatctatggcatgatttgattgctgtgtctcatgtcgtaacttatggtctgtgatacttgtaaagtgaactaacccgatgaacctacaagttccgggcatggctgagatcagctagtgtcttgacgttgagattgtattaaacttgtcattctcctggaccaaagcttgatgagttgtgcattgtaacatttgcttattattaaggccgttttaagcgg

SEQ ID NO: 68891 - protein, 187 aa, Triticum aestivum
  peptide (1)..(187): Ceres Seq. ID no. 13583692
IPIEPSSPSAAAAAAMSRFVRRLAGIPWRQIAGEASSVGLLMAQGLCAVHVVSEHVLGVAFPRGPSMLPALNMAGDVLLTDKVSPRRGWVGPGDVVLLLSPEDPRKIVAKRVLGMEGDEVTYPVDAGNSDATKTVVVPQGHIWVQGDNIYSSNDSRQFGPVPYGLVKGKMSYRIWPPSRIGSIDSKE

SEQ ID NO: 68892 - protein, 172 aa, Triticum aestivum
  peptide (1)..(172): Ceres Seq. ID no. 13583693
MSRFVRRLAGIPWRQIAGEASSVGLLMAQGLCAVHVVSEHVLGVAFPRGPSMLPALNMAGDVLLTDKVSPRRGWVGPGDVVLLLSPEDPRKIVAKRVLGMEGDEVTYPVDAGNSDATKTVVVPQGHIWVQGDNIYSSNDSRQFGPVPYGLVKGKMSYRIWPPSRIGSIDSKE

SEQ ID NO: 68893 - protein, 152 aa, Triticum aestivum
  peptide (1)..(152): Ceres Seq. ID no. 13583694
NPNRALLPFRRRRRRHVPLRAAPRRHPVAPDRRGGLLRRSANGAGPLRRPRRQRARPRRRLPTGPQHAAGAEHGGGRAAHRQGEPAARVGGAGGRRAPPLAGGPAQDRRQARARDGGRRGHLPRRRRQQRRHQDRRGTARSYLGAGRQYLFI

SEQ ID NO: 68894 - DNA, 622 bp, Triticum aestivum
  misc_feature (1)..(622): Ceres Seq. ID no. 12593148
aaagcaatcccaggacctccagctaatcatagcagccactcgactcgattcgattcgatctttctcggcgtctcgagctccccattcctcgatctcattccatccatggcgccgtccatctccattgccgccgcctcgccggcctcgggctggaagagcggcaggaaggccggggcggcgccggcggagggcgaggcggagaaggaggcgctgctgctgcggcgccgcaacgccgagctggagcgggaggtggcgctgctgcgggcggagctggaggccgcgcggctgcgcgccgaggccgcggaggaggccgaggagcggctgtgcgcgcagctgggcgaggccgagtgcgaggccctcgagctcgcgcgcgcctaccagggccacgtccaggagctcgcgcgggagctcgccgccgcacgcagcagataggcggagcgccgaggccgagctcgtcggtgattctttgacgatcgacgaagagacgtgtcgcgctctcgacacacgcggtgcggcggcagtatagatttctagacaaatgtaaaacgaggttaattagtattttcttgtccgagtatagattcctagcaagatgtccgagtaaaaagatggcagtgtttcc

SEQ ID NO: 68895 - protein, 174 aa, Triticum aestivum
  peptide (1)..(174): Ceres Seq. ID no. 12593149
KQSQDLQLIIAATRLDSIRSFSASRAPHSSISFHPWRRPSPLPPPRRPRAGRAAGRPGRRRRRARRRRRRCCCGAATPSWSGRWRCCGRSWRPRGCAPRPRRRPRSGCARSWARPSARPSSSRAPTRATSRSSRGSSPPHAADRRSAEAELVGDSLTIDEETCRALDTRGAAAV

SEQ ID NO: 68896 - protein, 143 aa, Triticum aestivum
  peptide (1)..(143): Ceres Seq. ID no. 12593150
KAIPGPPANHSSHSTRFDSIFLGVSSSPFLDLIPSMAPSISIAAASPASGWKSGRKAGAAPAEGEAEKEALLLRRRNAELEREVALLRAELEAARLRAEAAEEAEERLCAQLGEAECEALELARAYQGHVQELARELAAARSR

SEQ ID NO: 68897 - protein, 108 aa, Triticum aestivum
  peptide (1)..(108): Ceres Seq. ID no. 12593151
MAPSISIAAASPASGWKSGRKAGAAPAEGEAEKEALLLRRRNAELEREVALLRAELEAARLRAEAAEEAEERLCAQLGEAECEALELARAYQGHVQELARELAAARSR

SEQ ID NO: 68898 - DNA, 1691 bp, Triticum aestivum
  misc_feature (1)..(1691): Ceres Seq. ID no. 12465428
aagcaaacaaactttccttaaacccaagtagccaaagggaaagaaaaaaccccaagccatggcctcctcttccctcttcgccgccgggcgccgccttctccacttggggcgcggcaggcttctccaaggccgagtccgtccccacaatcccactcctctgctcctccctgtgcgcgccgcatcctctcctccctccaacagcgccgagaggccgccgcggcgacccccgggcctgcagtccacgctgtggccgctgggccacccggacacgcttctggtgccggagatcgagcgctgggcggagaagccccgcaaccgcctccgccccgtggagctcgagcgcatcgtcaaagagctccgcaagcgccgccgccaccgccaggccctcgaggtctccgaatggatgagtgctaagggtcatgtcagatttttgccaaaggatcatgctgttcacctggatttgatcggtcaagttcgtggaatcggagcagcagaagcctatttcaatcaactgcctgataaagataagacggagaaaccctacggtgcactcctgaactgctacacacgagaactcatggttgatgaatccttggctcattttcagaagatgaaagagctgggttttgtgttctgcagtctcccctacaacaacctcatgggcctctatactaacatagggcagcatgagaaggtcccttcagtgatagcagagatgaaaaggagtggtatcatgcctgacaacttcagctacagaatttgcataaactcttatggcacacgggcagattttttcgggatggagaacaccctggaagatatggagtgtgagcctcaaattgtagtcgattggaatacctatgccgttgcggcgagcaactacattaagggcaacctaagggagaaggcaatctctgccttaaagaaagcagaagcaaaaattgacataaaagattcagatacctacaaccacctgatgtccctctacggccagctgggggacaagtcagaggtgaagaggctgtgggcactccaaatgtcaaactgcaagaggcatattaataaggactacactacaatgcttgcaatgcttgtgagacttgatgaaattgaagaagctgaggccttgttgaaagagtgggagtcgagcgaaaacacattcgacttccatgttccgaatgtcttgatcactggataccgacagaaggacatgctggacaaggccgaagcgctgctggatgacttcttgaagaagggaaagatgcctccttcgagcagttgggccatcgtggcaatcggctatgctgagaaaggtgatgctgcgaaagcctatgagttgacaaaaaatgccctttgtgtttacgctccgaggagcggctggatcccgaggcctgcgatgattgagatgatactcaagtatcttggagacgaaggtgatctcaaggatgttgaaactttcattcaactgctgcaagctgctatgcctatgaacttagatatgaccgacgttttgtcaagggctcgtatgagagaagaaaagaaggctggagatgcagagaaggaagccctaagctcaacaaaggcatcaggataattttactgcaactctcaggaccaacttatttcaccatgtaatttatctagttagttaccggaatttatttgatattttactgagtctgaaacttgcc

SEQ ID NO: 68899 - protein, 511 aa, Triticum aestivum
  peptide (1)..(511): Ceres Seq. ID no. 12465429
MASSSLFAAGRRLLHLGRGRLLQGRVRPHNPTPLLLPVRAASSPPSNSAERPPRRPPGLQSTLWPLGHPDTLLVPEIERWAEKPRNRLRPVELERIVKELRKRRRHRQALEVSEWMSAKGHVRFLPKDHAVHLDLIGQVRGIGAAEAYFNQLPDKDKTEKPYGALLNCYTRELMVDESLAHFQKMKELGFVFCSLPYNNLMGLYTNIGQHEKVPSVIAEMKRSGIMPDNFSYRICINSYGTRADFFGMENTLEDMECEPQIVVDWNTYAVAASNYIKGNLREKAISALKKAEAKIDIKDSDTYNHLMSLYGQLGDKSEVKRLWALQMSNCKRHINKDYTTMLAMLVRLDEIEEAEALLKEWESSENTFDFHVPNVLITGYRQKDMLDKAEALLDDFLKKGKMPPSSSWAIVAIGYAEKGDAAKAYELTKNALCVYAPRSGWIPRPAMIEMILKYLGDEGDLKDVETFIQLLQAAMPMNLDMTDVLSRARMREEKKAGDAEKEALSSTKASG

SEQ ID NO: 68900 - protein, 396 aa, Triticum aestivum
  peptide (1)..(396): Ceres Seq. ID no. 12465430
MSAKGHVRFLPKDHAVHLDLIGQVRGIGAAEAYFNQLPDKDKTEKPYGALLNCYTRELMVDESLAHFQKMKELGFVFCSLPYNNLMGLYTNIGQHEKVPSVIAEMKRSGIMPDNFSYRICINSYGTRADFFGMENTLEDMECEPQIVVDWNTYAVAASNYIKGNLREKAISALKKAEAKIDIKDSDTYNHLMSLYGQLGDKSEVKRLWALQMSNCKRHINKDYTTMLAMLVRLDEIEEAEALLKEWESSENTFDFHVPNVLITGYRQKDMLDKAEALLDDFLKKGKMPPSSSWAIVAIGYAEKGDAAKAYELTKNALCVYAPRSGWIPRPAMIEMILKYLGDEGDLKDVETFIQLLQAAMPMNLDMTDVLSRARMREEKKAGDAEKEALSSTKASG

SEQ ID NO: 68901 - protein, 338 aa, Triticum aestivum
  peptide (1)..(338): Ceres Seq. ID no. 12465431
MVDESLAHFQKMKELGFVFCSLPYNNLMGLYTNIGQHEKVPSVIAEMKRSGIMPDNFSYRICINSYGTRADFFGMENTLEDMECEPQIVVDWNTYAVAASNYIKGNLREKAISALKKAEAKIDIKDSDTYNHLMSLYGQLGDKSEVKRLWALQMSNCKRHINKDYTTMLAMLVRLDEIEEAEALLKEWESSENTFDFHVPNVLITGYRQKDMLDKAEALLDDFLKKGKMPPSSSWAIVAIGYAEKGDAAKAYELTKNALCVYAPRSGWIPRPAMIEMILKYLGDEGDLKDVETFIQLLQAAMPMNLDMTDVLSRARMREEKKAGDAEKEALSSTKASG

SEQ ID NO: 68902 - DNA, 1360 bp, Triticum aestivum
  misc_feature (1)..(1360): Ceres Seq. ID no. 14303608
cccccgtcctctagctcaccgccgccgccgccgccgccgccgccgctttcttccgccatggccagccccgcggagagctctcgccggcgggaagaagaccgcactccatctccttccaggtcttcctcttctcgccccagcaagtgcaggacggcggccgagagactcaccgacgacctcctcgtggaggtcctctcgcgcgtcccggccaagtcgctctgccgcttcaagtgcgtctccaaccactggctcagcgtcatcgaccaccccgaccaccgcaagaagctgccccaaaccctcaccggcttcttccacggtagcagcaacctcgaggattggattctggaatcacctgtcctcttcaccagcgtgtcgccctcccctcccatggacacctcattcgccttcctgcccaaccaccagcagttcgatctgttagacagctgctacggtctcctcctctgccgcttgtacaacgtctcggctgaggttggcaagtgccattatgtggtgtgcaatcctgccacggagaagtgggtcctgttgccggactccggccaggacagtgtcaacgcatgtttgggcttcaacccagccctgtcttcgcatttccatgtgtttgagttggtggaggagcaggataactacatttccggagtggcagtgtattcgtcagaaaccggagtttgggtttacaaggaaaacagatggaacaaacgtgtcatgctcattgagcttcagccatcatttgtatttcttaacggctatctgcattttcaagtcgatggccatgacttttcccgttatctagctgtggtggacacggacggggaaacatggatgaacttcagtgtccctggtggcctgcttaacggttttattcaacattcacaaggccgcttgcattatgccaattttcagagagatgaacatggtggtgtctttcgactagtggtttatgttcttgagaactaccaaagcaaagaatggacattgaagcatagcgttgaaacttcatacatacttggaaggacagattactgcattgatgggtttgattggattgcgattcatccggaatgcaacttgatattcttcactattgggcaggaactcaaactcatgtgctataatatggatcgtcggcaactcaaagtgatctgcaatcttgaaggtgtcacgccgccatatctgtcatatgtgccattgtatgcagagttagaggcactgcacatttgacatcagcagtagttcatatttggtcgcactttatgttgtttgtacttgtttctgtatactatcagtggttctgttcagtgctacctccatgtgctcggttaactttgcaaaatgtttcagc

SEQ ID NO: 68903 - protein, 412 aa, Triticum aestivum
  peptide (1)..(412): Ceres Seq. ID no. 14303609
PPSSSSPPPPPPPPPLSSAMASPAESSRRREEDRTPSPSRSSSSRPSKCRTAAERLTDDLLVEVLSRVPAKSLCRFKCVSNHWLSVIDHPDHRKKLPQTLTGFFHGSSNLEDWILESPVLFTSVSPSPPMDTSFAFLPNHQQFDLLDSCYGLLLCRLYNVSAEVGKCHYVVCNPATEKWVLLPDSGQDSVNACLGFNPALSSHFHVFELVEEQDNYISGVAVYSSETGVWVYKENRWNKRVMLIELQPSFVFLNGYLHFQVDGHDFSRYLAVVDTDGETWMNFSVPGGLLNGFIQHSQGRLHYANFQRDEHGGVFRLVVYVLENYQSKEWTLKHSVETSYILGRTDYCIDGFDWIAIHPECNLIFFTIGQELKLMCYNMDRRQLKVICNLEGVTPPYLSYVPLYAELEALHI

SEQ ID NO: 68904 - protein, 393 aa, Triticum aestivum
  peptide (1)..(393): Ceres Seq. ID no. 14303610
MASPAESSRRREEDRTPSPSRSSSSRPSKCRTAAERLTDDLLVEVLSRVPAKSLCRFKCVSNHWLSVIDHPDHRKKLPQTLTGFFHGSSNLEDWILESPVLFTSVSPSPPMDTSFAFLPNHQQFDLLDSCYGLLLCRLYNVSAEVGKCHYVVCNPATEKWVLLPDSGQDSVNACLGFNPALSSHFHVFELVEEQDNYISGVAVYSSETGVWVYKENRWNKRVMLIELQPSFVFLNGYLHFQVDGHDFSRYLAVVDTDGETWMNFSVPGGLLNGFIQHSQGRLHYANFQRDEHGGVFRLVVYVLENYQSKEWTLKHSVETSYILGRTDYCIDGFDWIAIHPECNLIFFTIGQELKLMCYNMDRRQLKVICNLEGVTPPYLSYVPLYAELEALHI

SEQ ID NO: 68905 - protein, 283 aa, Triticum aestivum
  peptide (1)..(283): Ceres Seq. ID no. 14303611
MDTSFAFLPNHQQFDLLDSCYGLLLCRLYNVSAEVGKCHYVVCNPATEKWVLLPDSGQDSVNACLGFNPALSSHFHVFELVEEQDNYISGVAVYSSETGVWVYKENRWNKRVMLIELQPSFVFLNGYLHFQVDGHDFSRYLAVVDTDGETWMNFSVPGGLLNGFIQHSQGRLHYANFQRDEHGGVFRLVVYVLENYQSKEWTLKHSVETSYILGRTDYCIDGFDWIAIHPECNLIFFTIGQELKLMCYNMDRRQLKVICNLEGVTPPYLSYVPLYAELEALHI

SEQ ID NO: 68906 - DNA, 1438 bp, Triticum aestivum
  misc_feature (1)..(1438): Ceres Seq. ID no. 13655131
gtcggtcacgcgcttctcttctccctcagatcagatgagagcagagcagagcagagaatgattgattgattgattgattgattgattgcagaagaggacgggcgagctagggttccttctccttccttccttgggacgaccagagccatggacatggaggattcctcctcctgctcctcctcctcgccggcgccggcggcggacttggtcgactacctgggtcccgacacctccgtcaccgtcttcaccatgctccaccaccccgccgacctcgcacgcgcatccgccgtctcccgatcctggcgacaattcgttatcgacaaccagttcagcaagctgcagtgcctgcgggcctgcccggagctctccaccttcacccaagtcgacatcaccaccacctccggctccagaaccccggcacgccgggaccaggacaccaccaccgggtcgagcgccgaggacgagaagctccacagggtgtacacgcacctcggccacggcctcctctcgccctacaagcccagggactgcatcatccactgcatcggcgcctccagcaccgacaacttccccgacgagaccatcgagaacaccctcgagcccgtcgaccacctcgagtccaacaggccctcctactggtccagcggcggccagagggaccccgccgtgcccgagtgcctcatatatcgcctccaggccgatctctgcctcatccaagagatcaagctgcagccattcaaagcgtttttccagcatggcgatcccatatattcgccaaagagcatccgcatccagatgggctatccaaggtcaccgctacgccctgaagcacttgtctgtgatgaaaatgaaggccagttgattgatgatagaaactacgtctggacctacacatctccagaattcccaatgctgcaggaaaatgttttgcaatcctttaagttaccacggccggttctgtgtattggcggggtggtgaaggttgagcttcttgggagagttcagaaacaggcaatcgatggcctctactacatatgcatatctcatgtccaaatagtggggaaggcactgtcccgagacctgggggttgttcctcgcgggaacggcctggtcctgaactactatctggatccccgtacatgcggcgttccccgccgtgaaccgtcacgggacgatgggcgcagcaggtggcagggcctggcgtcaaggatctggcattctggcacggcgcgagggataggaggtctgaaccaaacgctgttgagtagactgtttggcggtccgttgcggctcgtggtcgtagcggacgaatcggaaggggaggaggaggaggatcttccttagaaggaaggaaggagctcaagggaggagggtcttatttgatttgatttgatcttctgcacaaaagaaacatgtgatagttacatatataagagtg

SEQ ID NO: 68907 - protein, 398 aa, Triticum aestivum
  peptide (1)..(398): Ceres Seq. ID no. 15219208
MDMEDSSSCSSSSPAPAADLVDYLGPDTSVTVFTMLHHPADLARASAVSRSWRQFVIDNQFSKLQCLRACPELSTFTQVDITTTSGSRTPARRDQDTTTGSSAEDEKLHRVYTHLGHGLLSPYKPRDCIIHCIGASSTDNFPDETIENTLEPVDHLESNRPSYWSSGGQRDPAVPECLIYRLQADLCLIQEIKLQPFKAFFQHGDPIYSPKSIRIQMGYPRSPLRPEALVCDENEGQLIDDRNYVWTYTSPEFPMLQENVLQSFKLPRPVLCIGGVVKVELLGRVQKQAIDGLYYICISHVQIVGKALSRDLGVVPRGNGLVLNYYLDPRTCGVPRREPSRDDGRSRWQGLASRIWHSGTARGIGGLNQTLLSRLFGGPLRLVVVADESEGEEEEDLP

SEQ ID NO: 68908 - protein, 396 aa, Triticum aestivum
  peptide (1)..(396): Ceres Seq. ID no. 15219209
MEDSSSCSSSSPAPAADLVDYLGPDTSVTVFTMLHHPADLARASAVSRSWRQFVIDNQFSKLQCLRACPELSTFTQVDITTTSGSRTPARRDQDTTTGSSAEDEKLHRVYTHLGHGLLSPYKPRDCIIHCIGASSTDNFPDETIENTLEPVDHLESNRPSYWSSGGQRDPAVPECLIYRLQADLCLIQEIKLQPFKAFFQHGDPIYSPKSIRIQMGYPRSPLRPEALVCDENEGQLIDDRNYVWTYTSPEFPMLQENVLQSFKLPRPVLCIGGVVKVELLGRVQKQAIDGLYYICISHVQIVGKALSRDLGVVPRGNGLVLNYYLDPRTCGVPRREPSRDDGRSRWQGLASRIWHSGTARGIGGLNQTLLSRLFGGPLRLVVVADESEGEEEEDLP

SEQ ID NO: 68909 - protein, 364 aa, Triticum aestivum
  peptide (1)..(364): Ceres Seq. ID no. 15219210
MLHHPADLARASAVSRSWRQFVIDNQFSKLQCLRACPELSTFTQVDITTTSGSRTPARRDQDTTTGSSAEDEKLHRVYTHLGHGLLSPYKPRDCIIHCIGASSTDNFPDETIENTLEPVDHLESNRPSYWSSGGQRDPAVPECLIYRLQADLCLIQEIKLQPFKAFFQHGDPIYSPKSIRIQMGYPRSPLRPEALVCDENEGQLIDDRNYVWTYTSPEFPMLQENVLQSFKLPRPVLCIGGVVKVELLGRVQKQAIDGLYYICISHVQIVGKALSRDLGVVPRGNGLVLNYYLDPRTCGVPRREPSRDDGRSRWQGLASRIWHSGTARGIGGLNQTLLSRLFGGPLRLVVVADESEGEEEEDLP

SEQ ID NO: 68910 - DNA, 1226 bp, Triticum aestivum
  misc_feature (1)..(1226): Ceres Seq. ID no. 13596944
gtgcttctaagtttgctcctagctggcttgcttgctccttgtccatgccagccacggccatggagctctccagcctgccgctagtcctgctgctctgcttgatggcgggctcgtcgacggctgccctgccggcgctgcccgggatggacagggtgcggcagcaggtcgacagggcgaacaggcacggcccgtccattgggctcgtcatgtcgtacgtcgccgaggacaccgcgctccaggcctccggctacttcaggccttggcacgtccagcccttcattgacctctacggacggaggtttcacatcgggagtattcgaggtgtgaatgttatatacgcattgacagggcaacgcaggttgaatgcagctgtcactgtacaaactctcgtcgacgtctttaccgtgtctggtattgtccattatggcacagcaggaagctctaatgattcaatgtcatttggagatgtcagtgtccccaagttagttgcttatacaggcgcttggacatggaagaagtacaaatcacttaaagaagagtcaacagaactaaactttggacaatttaacgtcccgaatggaggagagaacctgctagggtctctgaaatacagaaatgaggagctatactcagttggcaagcccatggaagaagttttctggttacctgtagattcagcatggttcaaaatagcagaaggacttaaggtcaaccttgaaagatgtaatgacactttctgcttaccaaaaacgccacaagtggttcatgggctaaaaggagcatcagccgacatgtttctagacaatgcagaataccggaagttccttttcagagaatttgcagtgtcaacaatagatgaggagagcgcagcagtggtgatgacaacaacatctcctggcgtacctgtgattgtgttccggggagtatctgatctggctggagtggaaccaacatggtcatcaacaagcctgatgaacctggcatctattaatgcactcaaagtggcagtggagttcattgctacaattggcaggcagatgtcgacaccattagcacaaagttcaaaaaactgagacaaaagagagctgacatgtccatggagcaggactgtagaatagttttaaacagcaattgggaacaaaattcagagtgataagtgacccttagcttcaaagtacacaaaacattcaacagaagaattatgtattcaatatatactcaattgt

SEQ ID NO: 68911 - protein, 356 aa, Triticum aestivum
  peptide (1)..(356): Ceres Seq. ID no. 13596945
ASKFAPSWLACSLSMPATAMELSSLPLVLLLCLMAGSSTAALPALPGMDRVRQQVDRANRHGPSIGLVMSYVAEDTALQASGYFRPWHVQPFIDLYGRRFHIGSIRGVNVIYALTGQRRLNAAVTVQTLVDVFTVSGIVHYGTAGSSNDSMSFGDVSVPKLVAYTGAWTWKKYKSLKEESTELNFGQFNVPNGGENLLGSLKYRNEELYSVGKPMEEVFWLPVDSAWFKIAEGLKVNLERCNDTFCLPKTPQVVHGLKGASADMFLDNAEYRKFLFREFAVSTIDEESAAVVMTTTSPGVPVIVFRGVSDLAGVEPTWSSTSLMNLASINALKVAVEFIATIGRQMSTPLAQSSKN

SEQ ID NO: 68912 - protein, 342 aa, Triticum aestivum
  peptide (1)..(342): Ceres Seq. ID no. 13596946
MPATAMELSSLPLVLLLCLMAGSSTAALPALPGMDRVRQQVDRANRHGPSIGLVMSYVAEDTALQASGYFRPWHVQPFIDLYGRRFHIGSIRGVNVIYALTGQRRLNAAVTVQTLVDVFTVSGIVHYGTAGSSNDSMSFGDVSVPKLVAYTGAWTWKKYKSLKEESTELNFGQFNVPNGGENLLGSLKYRNEELYSVGKPMEEVFWLPVDSAWFKIAEGLKVNLERCNDTFCLPKTPQVVHGLKGASADMFLDNAEYRKFLFREFAVSTIDEESAAVVMTTTSPGVPVIVFRGVSDLAGVEPTWSSTSLMNLASINALKVAVEFIATIGRQMSTPLAQSSKN

SEQ ID NO: 68913 - protein, 337 aa, Triticum aestivum
  peptide (1)..(337): Ceres Seq. ID no. 13596947
MELSSLPLVLLLCLMAGSSTAALPALPGMDRVRQQVDRANRHGPSIGLVMSYVAEDTALQASGYFRPWHVQPFIDLYGRRFHIGSIRGVNVIYALTGQRRLNAAVTVQTLVDVFTVSGIVHYGTAGSSNDSMSFGDVSVPKLVAYTGAWTWKKYKSLKEESTELNFGQFNVPNGGENLLGSLKYRNEELYSVGKPMEEVFWLPVDSAWFKIAEGLKVNLERCNDTFCLPKTPQVVHGLKGASADMFLDNAEYRKFLFREFAVSTIDEESAAVVMTTTSPGVPVIVFRGVSDLAGVEPTWSSTSLMNLASINALKVAVEFIATIGRQMSTPLAQSSKN

SEQ ID NO: 68914 - DNA, 1793 bp, Triticum aestivum
  misc_feature (1)..(1793): Ceres Seq. ID no. 13655298
tcctcccatttgctctgctcgctcgctcgccgccccctcctctcctccgatcctccccccacgtcccgcgccggagctggggagggaggggggaaattcacccccgcgccaggcggattccgccccggatccccgcgtcgggcaggccggccttcttacccggttaaccaagtacggtgcattctgaacggtagcctgtaactcttattgggtaattctaccacattatggcctcggttggtgcggtgcgtccttcctcgcgctttcagaatgacacgagtactagtggtgatgccgaccgacttccgaacgagatgggcaatatgagcataagggatgacagggaccctgaggatatagtagtcaacggcaatgggacggaaccaggccatattatagtcacaagcattgagggaagaaatgggcaagcaaaacagaccattagctacatggctgagcgcgtggttggtaatgggtcatttggaactgttttccaggctaagtgtcttgaaactggggagacggtggctataaagaaggttcttcaagacaagagatataagaaccgtgagctgcaaacgatgcgagttcttgaccacccaaatgttgtggctttaaagcaywrtwwwktctsraagactgagarggrggagctttacctcaacctggtgcttgagtatgtgccggagactgctcatcgtgtcattaagcattacaacaagatgaaccaacgcatgcccttgatatatgcaaaactgtacatgtatcagatatgtagatctttggcatacattcacaacagcattggagtatgccacagagacatcaagcctcaaaatcttctggtgaatccacatacacaccaattgaaattatgtgacttcggaagtgcgaaagtgttggtaaaaggagaaccaaatatttcctatatctgttcaaggtactatagagccccagagctcatatttggtgctactgaatacacaacggcaattgacgtttggtctgctggctgtgttcttgctgaactccttctaggacagcctatattccctggcgacagtggtgttgatcagcttgttgaaatcatcaaggttttaggtacccctacaagagaagaaattaagtgcatgaatccaaattatacagagtttaaattcccacaaatcaaagctcacccatggcacaagatcttccataaaagaatgcctgctgaagcagtagatcttgtctccagactcttgcaatattcaccaagcctgcgttcaactgctttggaagcattaattcatccattcttcgatgaactccgggacccaaacacccgtttaccgaacggccgttttcttcctcccctctttaactttaagccccatgagttgaagggcgtgccaatggacatcctggtgaagctcatccctgaacatgctcggaagaactgtgcctttgtaggatggtgatccgtcagacggctgcttgaagtttagttcagaacaaatccagttgtcgtctactagaaaccccaggaatttgagattgcctgcagccacacgggatataggcgatgacacatgtgattattattctttttctcgtccgagacctcgatgtcatgtattctttccccctactgccgatgtaacaaaccacccatgattctgtaagtagatgagaagtgtttcgaccgttttcccctgagctcatgtgctatgcaatgaaggatgcaccctatgtaccgccaatatttggtccagtatttgttcatggatccaggctataattcatttgtactc

SEQ ID NO: 68915 - protein, 410 aa, Triticum aestivum
  peptide (1)..(410): Ceres Seq. ID no. 15219731
  misc_feature (132)..(132): Xaa is any aa, unknown or other
  misc_feature (133)..(133): Xaa is any aa, unknown or other
  misc_feature (134)..(134): Xaa is any aa, unknown or other
  misc_feature (135)..(135): Xaa is any aa, unknown or other
  misc_feature (136)..(136): Xaa is any aa, unknown or other
  misc_feature (140)..(140): Xaa is any aa, unknown or other
  misc_feature (141)..(141): Xaa is any aa, unknown or other
MASVGAVRPSSRFQNDTSTSGDADRLPNEMGNMSIRDDRDPEDIVVNGNGTEPGHIIVTSIEGRNGQAKQTISYMAERVVGNGSFGTVFQAKCLETGETVAIKKVLQDKRYKNRELQTMRVLDHPNVVALKXXXXXKTEXXELYLNLVLEYVPETAHRVIKHYNKMNQRMPLIYAKLYMYQICRSLAYIHNSIGVCHRDIKPQNLLVNPHTHQLKLCDFGSAKVLVKGEPNISYICSRYYRAPELIFGATEYTTAIDVWSAGCVLAELLLGQPIFPGDSGVDQLVEIIKVLGTPTREEIKCMNPNYTEFKFPQIKAHPWHKIFHKRMPAEAVDLVSRLLQYSPSLRSTALEALIHPFFDELRDPNTRLPNGRFLPPLFNFKPHELKGVPMDILVKLIPEHARKNCAFVGW

SEQ ID NO: 68916 - protein, 381 aa, Triticum aestivum
  peptide (1)..(381): Ceres Seq. ID no. 15219732
  misc_feature (103)..(103): Xaa is any aa, unknown or other
  misc_feature (104)..(104): Xaa is any aa, unknown or other
  misc_feature (105)..(105): Xaa is any aa, unknown or other
  misc_feature (106)..(106): Xaa is any aa, unknown or other
  misc_feature (107)..(107): Xaa is any aa, unknown or other
  misc_feature (111)..(111): Xaa is any aa, unknown or other
  misc_feature (112)..(112): Xaa is any aa, unknown or other
MGNMSIRDDRDPEDIVVNGNGTEPGHIIVTSIEGRNGQAKQTISYMAERVVGNGSFGTVFQAKCLETGETVAIKKVLQDKRYKNRELQTMRVLDHPNVVALKXXXXXKTEXXELYLNLVLEYVPETAHRVIKHYNKMNQRMPLIYAKLYMYQICRSLAYIHNSIGVCHRDIKPQNLLVNPHTHQLKLCDFGSAKVLVKGEPNISYICSRYYRAPELIFGATEYTTAIDVWSAGCVLAELLLGQPIFPGDSGVDQLVEIIKVLGTPTREEIKCMNPNYTEFKFPQIKAHPWHKIFHKRMPAEAVDLVSRLLQYSPSLRSTALEALIHPFFDELRDPNTRLPNGRFLPPLFNFKPHELKGVPMDILVKLIPEHARKNCAFVGW

SEQ ID NO: 68917 - protein, 378 aa, Triticum aestivum
  peptide (1)..(378): Ceres Seq. ID no. 15219733
  misc_feature (100)..(100): Xaa is any aa, unknown or other
  misc_feature (101)..(101): Xaa is any aa, unknown or other
  misc_feature (102)..(102): Xaa is any aa, unknown or other
  misc_feature (103)..(103): Xaa is any aa, unknown or other
  misc_feature (104)..(104): Xaa is any aa, unknown or other
  misc_feature (108)..(108): Xaa is any aa, unknown or other
  misc_feature (109)..(109): Xaa is any aa, unknown or other
MSIRDDRDPEDIVVNGNGTEPGHIIVTSIEGRNGQAKQTISYMAERVVGNGSFGTVFQAKCLETGETVAIKKVLQDKRYKNRELQTMRVLDHPNVVALKXXXXXKTEXXELYLNLVLEYVPETAHRVIKHYNKMNQRMPLIYAKLYMYQICRSLAYIHNSIGVCHRDIKPQNLLVNPHTHQLKLCDFGSAKVLVKGEPNISYICSRYYRAPELIFGATEYTTAIDVWSAGCVLAELLLGQPIFPGDSGVDQLVEIIKVLGTPTREEIKCMNPNYTEFKFPQIKAHPWHKIFHKRMPAEAVDLVSRLLQYSPSLRSTALEALIHPFFDELRDPNTRLPNGRFLPPLFNFKPHELKGVPMDILVKLIPEHARKNCAFVGW

SEQ ID NO: 68918 - DNA, 773 bp, Triticum aestivum
  misc_feature (1)..(773): Ceres Seq. ID no. 15173496
atcaccttcaacaggctcatctaccaacccaacaaactaaaaccccacttcccaagaaaacaattcttagacaagacattgctcaaatggcatcccagctggtcgagagccaccgcgccggtgccgaggtccacaaggggagcgatatctgcaagaagaagacggtcgagcttctcgaagagctcggcctcccaaaaggcctctttcctatggatgacatcgaggaggtcgggcacaactgtgagagtgggtttgtgtggatgcttcagaagaagaagaacgagcacaccttcaacaagctcaaccagaccgtctcctatgacaccgaggtgaccgcttttgtggagaagggcaagatgaagaaggtcaccggggtcaagatcgaggaggtgtctttggtcgaggtctatgtggatgagtcttctgctgataaggtcaccgtcaagaccaacaccggtctgtctgacacccatgatgcggccgtgttcgctcccggagaatagggagctactagttaaaaaggccagaagaataaagtctgtgaatggttcggcactacagttcacatgttatgcagaaatatatgtttccgttttctttgtaatctcataaaggttgttgcatgaatgttgcttcctttcagcccatgttatgcagaaatttatgtttctgttttctttgtaatgtaataaaggatgctgcatgaatgttgcttcctttcggcccgtaagcatacgccaaatgtaatgaataacacttatccctcatcgacc

SEQ ID NO: 68919 - protein, 166 aa, Triticum aestivum
  peptide (1)..(166): Ceres Seq. ID no. 15173497
HLQQAHLPTQQTKTPLPKKTILRQDIAQMASQLVESHRAGAEVHKGSDICKKKTVELLEELGLPKGLFPMDDIEEVGHNCESGFVWMLQKKKNEHTFNKLNQTVSYDTEVTAFVEKGKMKKVTGVKIEEVSLVEVYVDESSADKVTVKTNTGLSDTHDAAVFAPGE

SEQ ID NO: 68920 - protein, 138 aa, Triticum aestivum
  peptide (1)..(138): Ceres Seq. ID no. 15173498
MASQLVESHRAGAEVHKGSDICKKKTVELLEELGLPKGLFPMDDIEEVGHNCESGFVWMLQKKKNEHTFNKLNQTVSYDTEVTAFVEKGKMKKVTGVKIEEVSLVEVYVDESSADKVTVKTNTGLSDTHDAAVFAPGE

SEQ ID NO: 68921 - protein, 110 aa, Triticum aestivum
  peptide (1)..(110): Ceres Seq. ID no. 15173499
ITFNRLIYQPNKLKPHFPRKQFLDKTLLKWHPSWSRATAPVPRSTRGAISARRRRSSFSKSSASQKASFLWMTSRRSGTTVRVGLCGCFRRRRTSTPSTSSTRPSPMTPR

SEQ ID NO: 68922 - DNA, 885 bp, Triticum aestivum
  misc_feature (1)..(885): Ceres Seq. ID no. 13596948
ctaaacctcgcaaaaccctccgccccccgctccccactccctcgccgtacaccaccgccgaagagagcgcggagagacccaccccacggcgatgtcgacggcggcggctacggtgttccgcgggtgccgggccctcatgtccccggcggcggcggcggcaaaggggggcaagaagaccgcatcggcggcggcggcggcggcgaaggggggcaagaagcccgcgccggcggccgcgaagcccaaggcggccaagaagccggtggatccgaacaatctccgcgggatcatgcggccggtgccggtctcggacgccctgcgcaagttcggcggcgccgctcacatctcccgctccggcgtactcaagatcgtctgggactacatcaaggccaatgacctccagaacccactgaacaagagggagatcatctgcgacgagaagctcaaaaccatctttccagggagggacacggttcatatgatggaggtcaccaagctcttgtcccctcatttcgtgaagagtatctaaggctgtcgagttgggggccaacgctggtgctttctgcccagggccagcgttggaatggaaggcttcttttgcgatccctgtccaagtcaaggttctactaggtagttaagttaatacggagttcagacttcagactttgtttgccatttaagggttgggggctcggtgatgcatgtaagaaggattcctcgtgttttgtggttctctcgtgccatcctgcgagggcacacccacatgcacatgcatgttgacgtggttcggtgtttttagtctgttaattccactttgcccttgtcatgtatatcatgcttctctcttggttgcagtggatggtgaatttgtgataagcaggttgtggc

SEQ ID NO: 68923 - protein, 144 aa, Triticum aestivum
  peptide (1)..(144): Ceres Seq. ID no. 13596949
MSTAAATVFRGCRALMSPAAAAAKGGKKTASAAAAAAKGGKKPAPAAAKPKAAKKPVDPNNLRGIMRPVPVSDALRKFGGAAHISRSGVLKIVWDYIKANDLQNPLNKREIICDEKLKTIFPGRDTVHMMEVTKLLSPHFVKSI

SEQ ID NO: 68924 - protein, 135 aa, Triticum aestivum
  peptide (1)..(135): Ceres Seq. ID no. 13596950
KPRKTLRPPLPTPSPYTTAEESAERPTPRRCRRRRLRCSAGAGPSCPRRRRRQRGARRPHRRRRRRRRGARSPRRRPRSPRRPRSRWIRTISAGSCGRCRSRTPCASSAAPLTSPAPAYSRSSGTTSRPMTSRTH

SEQ ID NO: 68925 - protein, 130 aa, Triticum aestivum
  peptide (1)..(130): Ceres Seq. ID no. 13596951
LNLAKPSAPRSPLPRRTPPPKRARRDPPHGDVDGGGYGVPRVPGPHVPGGGGGKGGQEDRIGGGGGGEGGQEARAGGREAQGGQEAGGSEQSPRDHAAGAGLGRPAQVRRRRSHLPLRRTQDRLGLHQGQ

SEQ ID NO: 68926 - DNA, 1386 bp, Triticum aestivum
  misc_feature (1)..(1386): Ceres Seq. ID no. 13596954
gaacatcctaatcgaaaaataggcctcttcttagaaaaaaaaagaggacagactaagcggagaatcgagggtttcggcttccttgtcatctcgccgtctccgacgccggcgaccagggagcgagacctccaacccccgtcctctcgccggctgcgtgtttccccgttccgtagaccaggtatgaagagggccgcgccgtcggaggagccggtggagctctcttccggcgacgacctgagctcggattccgacgatgaggccgggaacgggaaaggcgagaactccttccggctgcccatgtcctccaaatctgcagctccagcaaaaggtgcattgatcaggagggctgaaatgtatcaagagtacatgaagcacatcccaattcctgatcactgcagctccttgatcccatccacatcatggctgggactcggaagatcggtgaagcagttgtacgagcagcccttgcattacctcaccaacatcctcttgagacagtgggatcaacagagggttgggagcgataatgagcaccagcctctggatgctatcattcaccctatgaaagctcaagccctcatttgggccactgaagaagtccataggctgaccacctctagtgaccacttagagaaggtctgggctaaagaccccatgtatcatgctaacatagatccagtgttcccttccctaaagttgcattagcaaacatcgcaagttggaccgtcttatcctgtctattttgtttctgcctgctgtgtaatctggcacattttggttgttagcgaagtgatatgaaccatatatcactgatgttaaacgtacgatatgtcatggtcagggtctcttttaacgctgattttagctctctgaacagcgtctttgttgaagaagaagaaacctggtggtgtggatttcagtgctttgagccggcacgggtatcgtggcggaccatctatactgacagttgctcctccaaaggttgaacctaactggacttggtccactgggaaagatcgcaacgagaaggaagttctaaccgagtcttttgaagagcgggaacgcacaagggctgcagtaactgaaggagagaagcttatcggtgtgatgaacccccaaccaaggcagaccgagaaagagaaggatgctgcttcattctcacagaaggagaagcggaagagagaccgtgggcaggccagcaggggtaagaactacgtcgaggaggagaagcggctcctgagggggagtggtgtctactctggcttcgatacttgacagtgtccagaacatatgttatttgtccgtgttagcttccgtcgttactgttggtgtgtctgctgtttagttttgtcgcgaagttcactctggtcaatcggggctatgctt

SEQ ID NO: 68927 - protein, 234 aa, Triticum aestivum
  peptide (1)..(234): Ceres Seq. ID no. 13596955
EHPNRKIGLFLEKKRGQTKRRIEGFGFLVISPSPTPATRERDLQPPSSRRLRVSPFRRPGMKRAAPSEEPVELSSGDDLSSDSDDEAGNGKGENSFRLPMSSKSAAPAKGALIRRAEMYQEYMKHIPIPDHCSSLIPSTSWLGLGRSVKQLYEQPLHYLTNILLRQWDQQRVGSDNEHQPLDAIIHPMKAQALIWATEEVHRLTTSSDHLEKVWAKDPMYHANIDPVFPSLKLH

SEQ ID NO: 68928 - protein, 174 aa, Triticum aestivum
  peptide (1)..(174): Ceres Seq. ID no. 13596956
MKRAAPSEEPVELSSGDDLSSDSDDEAGNGKGENSFRLPMSSKSAAPAKGALIRRAEMYQEYMKHIPIPDHCSSLIPSTSWLGLGRSVKQLYEQPLHYLTNILLRQWDQQRVGSDNEHQPLDAIIHPMKAQALIWATEEVHRLTTSSDHLEKVWAKDPMYHANIDPVFPSLKLH

SEQ ID NO: 68929 - protein, 135 aa, Triticum aestivum
  peptide (1)..(135): Ceres Seq. ID no. 13596957
MSSKSAAPAKGALIRRAEMYQEYMKHIPIPDHCSSLIPSTSWLGLGRSVKQLYEQPLHYLTNILLRQWDQQRVGSDNEHQPLDAIIHPMKAQALIWATEEVHRLTTSSDHLEKVWAKDPMYHANIDPVFPSLKLH

SEQ ID NO: 68930 - DNA, 1818 bp, Triticum aestivum
  misc_feature (1)..(1818): Ceres Seq. ID no. 12616225
ctcgacactgcgctcctttcccctcgccagacctggccgcgtccccaccgcccccgacccctcccactcctccctggccgcgtcgactgcccggatctccgcgcccagatcgccgggacacctcctcccctggagcagctgccgtcctcaccgcgccggattcctcactctcggaatcaggtggatgctatttgcaggctggtaaagacaactaactttgttgatcctgtgcgcaagaagtaatgatccggcccagctccaaggagtcacttaattatgacaacaatagccagaaagtttatcctcaaccaattgatgaaaatatgaatcagaacatgggcagtatgattggaagaatattcaacaacatatcctctttaaaggctgcatacattcagctgcaggaagctcacaccccatatgacccggacaagatacaaactgctgataagcttgtcatagatgagctcacgagcctttcagaactcaaacatacttacagagagagaaatcctaagccagtagcagcatcacctcaagattcacgcttgctttctgaaatacaggagcagcaaaacttgttaaagacgtacgaggtcatggtaaagaagttccagtcccagatccagaatagagatactgagattacccacttacagcagcaaaccgatgaggccaaacatcggaaaacaaaactggagaagaaattgaagcaaaggggcttacttaacaaggaatcagaggaatctgatgaagaagagagctatttctctgttgagctgacaccaagcttgtttacatctactgctgataacgcataccaatcaatacatgagttctcaaagcccttgatcaacatgatgaaagctgcaggttgggatcttgatgctgctgctaacgcaattgaacctgatgtagtttacacaaggagagctcacaagaagtatgcatttgagtcttatatctgccagagaatcttcagtggtttccatcaagagaacttcttgattgacgctgctaatgccactgtttccaatgaggctttcttccatcaattccttgcagtacgagccatggatcctttggatgtattgagccaaaacccagattcagttttcggaaagttctgcagaagcaaatacctactgcttgtgcacccaaagatggaaggttctttcttcggcaacatggatcagagaaactacgtcatgagtggcgggcatccaaggacacctttctatcaggcatttctcaagttggcgaagtccatatggttgttgcacaggctggcctactctttcgacccaaaggtcagggtcttccaagtgaagaaggcaagcgagttctcagagattcacatggaaagcgttgtgaagaacatcgtcttggatgagaatgccgagaggcctagagtcgacttgatggtgatgcctggtttcttgatcgggactagcgtcatacagtctcgagtgtacctttctggtgtaaagtgtgacgactgataagtgttagggttgcctgagaagattccgggcgtctcacacatcctgcaagatcatcgtacgtcttgtatgtaatgccgcctctccaaaatgttattcgtatgaaatgtggtagcaacacctttttcgtaaaaagcatagtatgctttggtcattcgaagactgtaatgtgtgctttctctgttttgtaatgcatgtaaatcctgtcccaacgtttggtctacatataagttatgaaaaattgtcaatgtggcgtggatgtaccatctatatggtgactgtacagccatttgcaaactggcattcagttcctcgc

SEQ ID NO: 68931 - protein, 419 aa, Triticum aestivum
  peptide (1)..(419): Ceres Seq. ID no. 12616226
MIRPSSKESLNYDNNSQKVYPQPIDENMNQNMGSMIGRIFNNISSLKAAYIQLQEAHTPYDPDKIQTADKLVIDELTSLSELKHTYRERNPKPVAASPQDSRLLSEIQEQQNLLKTYEVMVKKFQSQIQNRDTEITHLQQQTDEAKHRKTKLEKKLKQRGLLNKESEESDEEESYFSVELTPSLFTSTADNAYQSIHEFSKPLINMMKAAGWDLDAAANAIEPDVVYTRRAHKKYAFESYICQRIFSGFHQENFLIDAANATVSNEAFFHQFLAVRAMDPLDVLSQNPDSVFGKFCRSKYLLLVHPKMEGSFFGNMDQRNYVMSGGHPRTPFYQAFLKLAKSIWLLHRLAYSFDPKVRVFQVKKASEFSEIHMESVVKNIVLDENAERPRVDLMVMPGFLIGTSVIQSRVYLSGVKCDD

SEQ ID NO: 68932 - protein, 392 aa, Triticum aestivum
  peptide (1)..(392): Ceres Seq. ID no. 12616227
MNQNMGSMIGRIFNNISSLKAAYIQLQEAHTPYDPDKIQTADKLVIDELTSLSELKHTYRERNPKPVAASPQDSRLLSEIQEQQNLLKTYEVMVKKFQSQIQNRDTEITHLQQQTDEAKHRKTKLEKKLKQRGLLNKESEESDEEESYFSVELTPSLFTSTADNAYQSIHEFSKPLINMMKAAGWDLDAAANAIEPDVVYTRRAHKKYAFESYICQRIFSGFHQENFLIDAANATVSNEAFFHQFLAVRAMDPLDVLSQNPDSVFGKFCRSKYLLLVHPKMEGSFFGNMDQRNYVMSGGHPRTPFYQAFLKLAKSIWLLHRLAYSFDPKVRVFQVKKASEFSEIHMESVVKNIVLDENAERPRVDLMVMPGFLIGTSVIQSRVYLSGVKCDD

SEQ ID NO: 68933 - protein, 388 aa, Triticum aestivum
  peptide (1)..(388): Ceres Seq. ID no. 12616228
MGSMIGRIFNNISSLKAAYIQLQEAHTPYDPDKIQTADKLVIDELTSLSELKHTYRERNPKPVAASPQDSRLLSEIQEQQNLLKTYEVMVKKFQSQIQNRDTEITHLQQQTDEAKHRKTKLEKKLKQRGLLNKESEESDEEESYFSVELTPSLFTSTADNAYQSIHEFSKPLINMMKAAGWDLDAAANAIEPDVVYTRRAHKKYAFESYICQRIFSGFHQENFLIDAANATVSNEAFFHQFLAVRAMDPLDVLSQNPDSVFGKFCRSKYLLLVHPKMEGSFFGNMDQRNYVMSGGHPRTPFYQAFLKLAKSIWLLHRLAYSFDPKVRVFQVKKASEFSEIHMESVVKNIVLDENAERPRVDLMVMPGFLIGTSVIQSRVYLSGVKCDD

SEQ ID NO: 68934 - DNA, 1379 bp, Triticum aestivum
  misc_feature (1)..(1379): Ceres Seq. ID no. 13598413
acgtcttctccttctctaccttctccccatcaagaacccaatccaaacctcagcttcgaacgaatcccaagcgattccccaagaggtttcattttgcgtcagatcaagcccagaatccgccactacccgccgagtgaagtagagcggcgagcggcgaggagggaccatggcgtcgttgccagaggaggaggaggccttcgagcacacgctgctggtggtgcgcgaggtgtcggtgttcaagatcccgccgcgcaccaccagcggcggctacaagtgcggcgagtggctgcagacggacaagatctggacgggccgcctccgcgtggtgtcgtgcggcgaccgctgcgagatccggctcgaggacccgggctccggggacctcttcgccgcctgcttcgtgctgcccggccagagggacagcgccgtcgagaccgtgctcgactcgtcgcgctacttcgtgctccgcatcgaggacggcagggggaagcatgccttcgtcggcctgggcttcggcgagcgcaatgaggccttcgacttcaacgtggccctgtcggatcacgagaagtatgtcaagagggagcaagataaggagaccggtggcgaggaggcagacgacagccagattgacatccacccggcagtgaatcgccggctcaaggaaggtgaaaccattaggataaacgtgaaaaacaagccatcaactggaagtggcatgctttcctctgctggcttatctggtggggccactgaaaaacctaaagcaagcatgcttcttgcaccaccgccaggtgcaaccgggaagcttcggtctccgctcccacctccccctaatgactctgcatctgcaagaatgagttctggacccaatgctggaaccagggcctcaaaagaacctaccaagaaaagcatcgaccccttttcagatatttctgctatagagcgaagcctaccctcgtctactgaactgggacaaacaaaaagcaccggtgccggatgggcagcattttgacaacagaatgccatctgctgtgtcacagacaaagaaaattgtgtgactgaaaaagtacacaaaatttctactcactggagcttgtaccctatgaaatcacatggtgaaaaatgacgatctgcatccacttggtacttgaaaaataaacctttggggaggtgctgttatctatcaaggcatcaacccgcatggattcagggagcttcgaaagtctgaatattttcctgaatagaagtgtgggtttccttgtttgtcatatttgtgtttgccagatctcatatactgatacaagaatcatactgacctccacttgtatttctgtcctgaaagattcgagagtactgtttatgcgaaaagcttgttttattct

SEQ ID NO: 68935 - protein, 280 aa, Triticum aestivum
  peptide (1)..(280): Ceres Seq. ID no. 13598414
MASLPEEEEAFEHTLLVVREVSVFKIPPRTTSGGYKCGEWLQTDKIWTGRLRVVSCGDRCEIRLEDPGSGDLFAACFVLPGQRDSAVETVLDSSRYFVLRIEDGRGKHAFVGLGFGERNEAFDFNVALSDHEKYVKREQDKETGGEEADDSQIDIHPAVNRRLKEGETIRINVKNKPSTGSGMLSSAGLSGGATEKPKASMLLAPPPGATGKLRSPLPPPPNDSASARMSSGPNAGTRASKEPTKKSIDPFSDISAIERSLPSSTELGQTKSTGAGWAAF

SEQ ID NO: 68936 - protein, 174 aa, Triticum aestivum
  peptide (1)..(174): Ceres Seq. ID no. 13598415
TSSPSLPSPHQEPNPNLSFERIPSDSPRGFILRQIKPRIRHYPPSEVERRAARRDHGVVARGGGGLRAHAAGGARGVGVQDPAAHHQRRLQVRRVAADGQDLDGPPPRGVVRRPLRDPARGPGLRGPLRRLLRAARPEGQRRRDRARLVALLRAPHRGRQGEACLRRPGLRRAQ

SEQ ID NO: 68937 - DNA, 1290 bp, Triticum aestivum
  misc_feature (1)..(1290): Ceres Seq. ID no. 13596993
atccgaatcttcccttgcaacaatcatccgtaaggccgtcatcgccttccgccccgcggccgcggggagacgcgatgcagggactccaccgccgctaccgatggatcaaggagtgggttccgcaggacctcgtcatcgccggcggcccgtgcgcgctttacaagtgggtgcgagaggataggttggctgctcttaagtccaaggacaaggaagaaggggcatgcactgcaaagcctgaccctgccactgaggttcttttcttatgcagctatgatggctgtgggaaaacttttgttgatgcaggtgctcttaggaaacatgcccacgtgcatggggagaggcagtatgtctgtcactacgagggatgtgggaagaaatttttagatagctctaagttgaagaggcattttcttattcatacaggcgagaagaacttcgtctgccctcatgaaggttgtggcaaggctttctcattggattttaatttgaaggcacacatgaaaacccattttgcggataactatcatatgtgtccatacccagaatgtggtcgaagatttacacaggaatctaaactaagggctcatttcagggcacagcatgagaagaatccaggtgggcctgtaatgaaccgcaatgcactaggagatcaccctcataacacagcgaaatctctggtaacaccaccagttccatcagctgatcgtccgtatgtctgcccttacgatgggtgtgccaaggcatacattcacgagtacaaacttaacctccatttgaagaaagagcaccccaaccactattcagatgctggtgctcaagctggtccgtcgaggggcacagtatcgaagaattcccgtagaagcaagccaaacctcacaaccagcatgccactcgccaagatctctaagcgcagcggttatacggtgccatctccagctgtcagtatccctgaggagcatcagtggccaaggaaggtgttgtacgaagatgatagtgaggagaccgaggaagagggagataaccttgaggaggggggattgagatacagagctgctagcgacggcgatgacgatgaggagacggaggaagaagaatgagagctatgggttgctgtgcacatagtttatgatcaccggactggattatagttctgcatacatgtaacaatacatattaagggtggctagttaggcagaaacttgtgggctgcatgtaggtgtctcaatttaaggctattaattaacttattaagaagggtaatagatcatcacgcttccgtgctgagaatcc

SEQ ID NO: 68938 - protein, 364 aa, Triticum aestivum
  peptide (1)..(364): Ceres Seq. ID no. 15222013
PNLPLQQSSVRPSSPSAPRPRGDAMQGLHRRYRWIKEWVPQDLVIAGGPCALYKWVREDRLAALKSKDKEEGACTAKPDPATEVLFLCSYDGCGKTFVDAGALRKHAHVHGERQYVCHYEGCGKKFLDSSKLKRHFLIHTGEKNFVCPHEGCGKAFSLDFNLKAHMKTHFADNYHMCPYPECGRRFTQESKLRAHFRAQHEKNPGGPVMNRNALGDHPHNTAKSLVTPPVPSADRPYVCPYDGCAKAYIHEYKLNLHLKKEHPNHYSDAGAQAGPSRGTVSKNSRRSKPNLTTSMPLAKISKRSGYTVPSPAVSIPEEHQWPRKVLYEDDSEETEEEGDNLEEGGLRYRAASDGDDDEETEEEE

SEQ ID NO: 68939 - protein, 340 aa, Triticum aestivum
  peptide (1)..(340): Ceres Seq. ID no. 15222014
MQGLHRRYRWIKEWVPQDLVIAGGPCALYKWVREDRLAALKSKDKEEGACTAKPDPATEVLFLCSYDGCGKTFVDAGALRKHAHVHGERQYVCHYEGCGKKFLDSSKLKRHFLIHTGEKNFVCPHEGCGKAFSLDFNLKAHMKTHFADNYHMCPYPECGRRFTQESKLRAHFRAQHEKNPGGPVMNRNALGDHPHNTAKSLVTPPVPSADRPYVCPYDGCAKAYIHEYKLNLHLKKEHPNHYSDAGAQAGPSRGTVSKNSRRSKPNLTTSMPLAKISKRSGYTVPSPAVSIPEEHQWPRKVLYEDDSEETEEEGDNLEEGGLRYRAASDGDDDEETEEEE

SEQ ID NO: 68940 - protein, 199 aa, Triticum aestivum
  peptide (1)..(199): Ceres Seq. ID no. 15222015
MKTHFADNYHMCPYPECGRRFTQESKLRAHFRAQHEKNPGGPVMNRNALGDHPHNTAKSLVTPPVPSADRPYVCPYDGCAKAYIHEYKLNLHLKKEHPNHYSDAGAQAGPSRGTVSKNSRRSKPNLTTSMPLAKISKRSGYTVPSPAVSIPEEHQWPRKVLYEDDSEETEEEGDNLEEGGLRYRAASDGDDDEETEEEE

SEQ ID NO: 68941 - DNA, 1410 bp, Triticum aestivum
  misc_feature (1)..(1410): Ceres Seq. ID no. 12625507
ctctttggagcgttctccagtctccctccctctctctctctctccctctgaatctccgtaatcactgttccattccgtggttaggagatgagcaagccacggaagaaacgcaagtatctggatgaacattgctactggaaccacacagacgagcaagataagcgtttcttcaaggttatgattggcgacttccatgagagaatggtaagctattttcagatcataccagataggtttgtccaacatttcagggggcaaacaggacgaactattaagctagtatcacgccatggttatacttttgatgttcagattaccaagaatttggagaaactagtccttgattcgggatggaaggcgtttgctcgtgcccataatttgagaacgggggactttcttgtgttcaagtatgatggcaactctgaactgaaggttttgatctttggtccgagcggttgcgagaaaattccggtgtgcaatctcaagaaaaatgctgctcctggtaaagaatggtggggaaactctgctggcattgtaaacacttgtcacaatcttcccatgaaatttccacatagtggaagacaaattaggccaagcaaggataccttaaggcaggggaatgacatcatcaatgtcagctcgtcgagctctgcttcagattcagcagaagatgatcattccctgccaggttgtatcctcgcaaatggcaccctctcgaatctaaatcaggtgcagaagaaccaacttaaagaaaaaatcagagctatgaattccgaaatccccatttatgggtgtgccataaggaagagcagtatttacggaaaaacccgcacccttgaaatatcaagaaaatatgctgaagtataccttccatttgaggaacaaatgctgacccttcagcatcatggcaagaagtgggaagtgagatgtagtgttaagaaaagcaaaggcaaaaggcttttgacaggctggaagcattttgcgtgtggcaacaacttgcagctgggagatgtctgcctctttgagctactgagaaacaaaaagaagtatgcaatgaatgtctatatcattcgcaaatccctttacaagaggaaatgagcatctgaagaaaagctagccacaagattcaagaaacagaagtagcaaaaggagttttgggtaaggccagaagagtggagccctgacaatatactaaaggaaagagctcagagtacataataaagctcaggtccagttagtttcagctgctttttgtgttatcatggatgtaatacttttaaaaccttatgtttacctttatgtttaagtggatgaactgtagtgtcagacaggacaatattatgttagaggttattgcgtggacgtactgtgggtcatgtcaggacagagttacattatggtcagttgctc

SEQ ID NO: 68942 - protein, 336 aa, Triticum aestivum
  peptide (1)..(336): Ceres Seq. ID no. 12625508
MSKPRKKRKYLDEHCYWNHTDEQDKRFFKVMIGDFHERMVSYFQIIPDRFVQHFRGQTGRTIKLVSRHGYTFDVQITKNLEKLVLDSGWKAFARAHNLRTGDFLVFKYDGNSELKVLIFGPSGCEKIPVCNLKKNAAPGKEWWGNSAGIVNTCHNLPMKFPHSGRQIRPSKDTLRQGNDIINVSSSSSASDSAEDDHSLPGCILANGTLSNLNQVQKNQLKEKIRAMNSEIPIYGCAIRKSSIYGKTRTLEISRKYAEVYLPFEEQMLTLQHHGKKWEVRCSVKKSKGKRLLTGWKHFACGNNLQLGDVCLFELLRNKKKYAMNVYIIRKSLYKRK

SEQ ID NO: 68943 - protein, 306 aa, Triticum aestivum
  peptide (1)..(306): Ceres Seq. ID no. 12625509
MIGDFHERMVSYFQIIPDRFVQHFRGQTGRTIKLVSRHGYTFDVQITKNLEKLVLDSGWKAFARAHNLRTGDFLVFKYDGNSELKVLIFGPSGCEKIPVCNLKKNAAPGKEWWGNSAGIVNTCHNLPMKFPHSGRQIRPSKDTLRQGNDIINVSSSSSASDSAEDDHSLPGCILANGTLSNLNQVQKNQLKEKIRAMNSEIPIYGCAIRKSSIYGKTRTLEISRKYAEVYLPFEEQMLTLQHHGKKWEVRCSVKKSKGKRLLTGWKHFACGNNLQLGDVCLFELLRNKKKYAMNVYIIRKSLYKRK

SEQ ID NO: 68944 - protein, 298 aa, Triticum aestivum
  peptide (1)..(298): Ceres Seq. ID no. 12625510
MVSYFQIIPDRFVQHFRGQTGRTIKLVSRHGYTFDVQITKNLEKLVLDSGWKAFARAHNLRTGDFLVFKYDGNSELKVLIFGPSGCEKIPVCNLKKNAAPGKEWWGNSAGIVNTCHNLPMKFPHSGRQIRPSKDTLRQGNDIINVSSSSSASDSAEDDHSLPGCILANGTLSNLNQVQKNQLKEKIRAMNSEIPIYGCAIRKSSIYGKTRTLEISRKYAEVYLPFEEQMLTLQHHGKKWEVRCSVKKSKGKRLLTGWKHFACGNNLQLGDVCLFELLRNKKKYAMNVYIIRKSLYKRK

SEQ ID NO: 68945 - DNA, 1315 bp, Triticum aestivum
  misc_feature (1)..(1315): Ceres Seq. ID no. 13655371
ataaaccgtagcgtagcgcgcatagcactcgcacggagacatagcacattagtatcttagcaccttgctaaaccctgaagcttagagaactcgaagcgccataaatttaatggctagcccgacgaagctcgacatggccggccatggcgacgaggtgacgaggaacaagaaggtggtgctgaggaggtacgtgacaggctacccgacggcggaggacatggaggtggtcgtcacctccgacgtccggctgcgggtgccggaggggtcggcggccgccgtggtggtcaagaacctgtacctgtcctgcgacccgtggatgcgcggccgcatgaccaagcatgacgacggcgacgccgtgccggccgaggacttcgtgcttggagaggccttggtcaatttcaccgtcggcgaggtggtcgactcgacgcacccggagttcgacgccggtgacctcgtatggggcatgagtgcatgggaggagtacaccctcatcacccaaacggagggcctgttcaagatcaaccaccccgagctgccactctcacactacacaggtgttcttggcttggcagggctcactgcatatgctggacttttcgaggttggcaagccaaagcaaggtgaaactgtttttgtgtcggcagcatctggcgccgtcggtcaggttgtcggacagctcgccaagatcgcaggatgctatgtggttggaagtgccggctccgatgagaaggtgagtctcctgaagagcaagatgggcttcgacgacgcgttcaactacaagtcggagggggacaacctcggcgcggcgctcgggcggcgcctcccggacggcatcgacgtctacttcgacaacgtgggtggtgcgacgctggacgcggcattgctgcggatgcggccgggcggcagggtggtggcgtgcgggatgatctcacagtacaatctgtcggagcaccagggggtgcgcaacctgtggtgcatcatcccaaagcgcgtccgggtggagggcttctcctgcatggactaccaccacctgtaccccaggttcgaggaggagatggccgcctatatcaacgcagggaaggtgaccgtcgcggaggacgtcgtccgagggattgagaaggcgcctgaggctctggtgggcctgttttctgggagaaatgtgggcaagctgttggttgctcttgcatgagtcgtgagtgcaagtccatggaatgatgacttctttctgtgttttattgaataagattgtacctgtgggcttataattatgatcatgtaattgtaagctacaaaaattatacacttctgttttggt

SEQ ID NO: 68946 - protein, 359 aa, Triticum aestivum
  peptide (1)..(359): Ceres Seq. ID no. 13655372
MASPTKLDMAGHGDEVTRNKKVVLRRYVTGYPTAEDMEVVVTSDVRLRVPEGSAAAVVVKNLYLSCDPWMRGRMTKHDDGDAVPAEDFVLGEALVNFTVGEVVDSTHPEFDAGDLVWGMSAWEEYTLITQTEGLFKINHPELPLSHYTGVLGLAGLTAYAGLFEVGKPKQGETVFVSAASGAVGQVVGQLAKIAGCYVVGSAGSDEKVSLLKSKMGFDDAFNYKSEGDNLGAALGRRLPDGIDVYFDNVGGATLDAALLRMRPGGRVVACGMISQYNLSEHQGVRNLWCIIPKRVRVEGFSCMDYHHLYPRFEEEMAAYINAGKVTVAEDVVRGIEKAPEALVGLFSGRNVGKLLVALA

SEQ ID NO: 68947 - protein, 351 aa, Triticum aestivum
  peptide (1)..(351): Ceres Seq. ID no. 13655373
MAGHGDEVTRNKKVVLRRYVTGYPTAEDMEVVVTSDVRLRVPEGSAAAVVVKNLYLSCDPWMRGRMTKHDDGDAVPAEDFVLGEALVNFTVGEVVDSTHPEFDAGDLVWGMSAWEEYTLITQTEGLFKINHPELPLSHYTGVLGLAGLTAYAGLFEVGKPKQGETVFVSAASGAVGQVVGQLAKIAGCYVVGSAGSDEKVSLLKSKMGFDDAFNYKSEGDNLGAALGRRLPDGIDVYFDNVGGATLDAALLRMRPGGRVVACGMISQYNLSEHQGVRNLWCIIPKRVRVEGFSCMDYHHLYPRFEEEMAAYINAGKVTVAEDVVRGIEKAPEALVGLFSGRNVGKLLVALA

SEQ ID NO: 68948 - protein, 323 aa, Triticum aestivum
  peptide (1)..(323): Ceres Seq. ID no. 13655374
MEVVVTSDVRLRVPEGSAAAVVVKNLYLSCDPWMRGRMTKHDDGDAVPAEDFVLGEALVNFTVGEVVDSTHPEFDAGDLVWGMSAWEEYTLITQTEGLFKINHPELPLSHYTGVLGLAGLTAYAGLFEVGKPKQGETVFVSAASGAVGQVVGQLAKIAGCYVVGSAGSDEKVSLLKSKMGFDDAFNYKSEGDNLGAALGRRLPDGIDVYFDNVGGATLDAALLRMRPGGRVVACGMISQYNLSEHQGVRNLWCIIPKRVRVEGFSCMDYHHLYPRFEEEMAAYINAGKVTVAEDVVRGIEKAPEALVGLFSGRNVGKLLVALA

SEQ ID NO: 68949 - DNA, 1394 bp, Triticum aestivum
  misc_feature (1)..(1394): Ceres Seq. ID no. 13655382
aacactcgccgccgtccccgacagcaagaatcgcctagcgaaaatccttgcggctcggattccggcggccgccgccgcgatgaagctcgtccaccgcaacctcacccgcaacgggcccggctccgccaagctgctgccggaggaggaggacgacctgtggcacgcgtacaatctcatcgccgtaggggacagcctccaggccgtcactgtccggaaagttctgagagattctgcttcgggaggacgtgatgcggagcgcgtgaagctaaagttggagattgtagttgagtctgtagattatgacaaggaagggaacgttttgcgcgtccgtggcaaaaatattactgagaatgatcacgtgaagattggccagtttcatactttagaacttgagctgaagagaccttttgttctacgaaaggaatattgggattggttagcacttgataccatccaacaagcatgtgatcctactgcaagtgctgatctagcagttattcttatgcaagaaggacttgcccacttattccttattgggagaagcataacagcaacaaggtcacgtattgaaacctcgattcctaggaaacatggacctgccattgctggttacgagtcggctctcaagaagttctttgagcatgttttgcaagccttgctgaagcacattgattttgaagtggtccagtgtgttgtaattgcaagcccaggttttactaaggatcagtttcgtgattacatgcatcttgaagctgcacggcgagacttgagagtaataattgagaacaaatcacgcattattcttgcacatgcaccttcaggctacaagcatagtttgaaggaagttttggacaccccaggtgtgatgtcactgataaaagatacaaaagcggcacaggaggactcagcccgagcgtgttatggacctaagcacgttgaggtcgcacatgaacgtcttgcaatacaaactcttctgatgacagatactttgtttcggaacacggacatcgctagcaggagaaagtatgtgaacttggttgagtcagtcaagaaatatggtggtacagtgcacatattttcttcgatgcatgtctccggcgaccaattggctcagttgacaggaatagcagcaatacttcgtttccccctgccagatttggaggacatcgagatgtgattagtccagacctccggagctgcctaacatttgttgtaccaacctgttaacctatagctgatcaagtgtaataataatataacagttggttctatttaggtagcaacagaaagaaattctgatgacattttaatatatccttgttgtaaatggttagctatgccacatctattggttattcttgacttaataataagggccctctccattttttttc

SEQ ID NO: 68950 - protein, 391 aa, Triticum aestivum
  peptide (1)..(391): Ceres Seq. ID no. 13655383
TLAAVPDSKNRLAKILAARIPAAAAAMKLVHRNLTRNGPGSAKLLPEEEDDLWHAYNLIAVGDSLQAVTVRKVLRDSASGGRDAERVKLKLEIVVESVDYDKEGNVLRVRGKNITENDHVKIGQFHTLELELKRPFVLRKEYWDWLALDTIQQACDPTASADLAVILMQEGLAHLFLIGRSITATRSRIETSIPRKHGPAIAGYESALKKFFEHVLQALLKHIDFEVVQCVVIASPGFTKDQFRDYMHLEAARRDLRVIIENKSRIILAHAPSGYKHSLKEVLDTPGVMSLIKDTKAAQEDSARACYGPKHVEVAHERLAIQTLLMTDTLFRNTDIASRRKYVNLVESVKKYGGTVHIFSSMHVSGDQLAQLTGIAAILRFPLPDLEDIEM

SEQ ID NO: 68951 - protein, 365 aa, Triticum aestivum
  peptide (1)..(365): Ceres Seq. ID no. 13655384
MKLVHRNLTRNGPGSAKLLPEEEDDLWHAYNLIAVGDSLQAVTVRKVLRDSASGGRDAERVKLKLEIVVESVDYDKEGNVLRVRGKNITENDHVKIGQFHTLELELKRPFVLRKEYWDWLALDTIQQACDPTASADLAVILMQEGLAHLFLIGRSITATRSRIETSIPRKHGPAIAGYESALKKFFEHVLQALLKHIDFEVVQCVVIASPGFTKDQFRDYMHLEAARRDLRVIIENKSRIILAHAPSGYKHSLKEVLDTPGVMSLIKDTKAAQEDSARACYGPKHVEVAHERLAIQTLLMTDTLFRNTDIASRRKYVNLVESVKKYGGTVHIFSSMHVSGDQLAQLTGIAAILRFPLPDLEDIEM

SEQ ID NO: 68952 - protein, 224 aa, Triticum aestivum
  peptide (1)..(224): Ceres Seq. ID no. 13655385
MQEGLAHLFLIGRSITATRSRIETSIPRKHGPAIAGYESALKKFFEHVLQALLKHIDFEVVQCVVIASPGFTKDQFRDYMHLEAARRDLRVIIENKSRIILAHAPSGYKHSLKEVLDTPGVMSLIKDTKAAQEDSARACYGPKHVEVAHERLAIQTLLMTDTLFRNTDIASRRKYVNLVESVKKYGGTVHIFSSMHVSGDQLAQLTGIAAILRFPLPDLEDIEM

SEQ ID NO: 68953 - DNA, 1116 bp, Triticum aestivum
  misc_feature (1)..(1116): Ceres Seq. ID no. 13597006
gagatctcgacttgggaactctcacaagaagacgccgagaggagaggagaggatgctgctgaggagctcctccacgccattcctgcgctccttcctcacctcctcctcctcccctacgcccccttcctccctccagctccggcgggccttctccgacggccacctcccttcgctcaacccctcctcctccggcgacaacgacagcaacagaaccaccggcctccacaccgagctctccttctctgtctacaacaccttcagcaaggccaagctggagccccaccaggagcaggagatggaggaggagcaggagcaggcgccgcagcctgagctgccggagctgccgctgttcctggcgaggggcatggggatcgaccgcctcgcctccggcctcttcaccgccggcatgggctccgaggctgccctggccaggatggccagcggggtggaccagaaggcggtgctggcgctggacgcccagtacaaggagatggtggacgagcagcccggcaacgccctgttcctacgcaactacgcgcagttcctgcacgaggtgaagtgtgactcgagaagggcggaggagtactactcgcgcgcgatgctcgccgacccaaccgacggcgagatcatgtcgcagtacgcgaagctggtgtgggcggtgcaccgcgaccacgaaaggtccctcacctacttccagaagtcggtgcaggcggccccgcgggacagccacgtcctcgcggcgtacgccagcttcctgtgggagcaggacgaggacgaggacgacgacggtggtcttgggggaggcgagcagggatcacccgggcgtgctacgcagccgaggcagctggcttccacggccgtttgactaccagggtggccgagatgggctaacgatgtgcttgctgaggatgatcatgcttgtagtattgtgtttccgtgtaacctgcaaaatgtttggacggtcgaggtgcgtgcacttgctacagaataaagaacgtaaacggttgagggaatggaaggctggacctgtaaacattggtgattccgtctgcagatgctaagttgtcactatgtttattggctaaattataggagtactaagggggtgtttgttcc

SEQ ID NO: 68954 - protein, 287 aa, Triticum aestivum
  peptide (1)..(287): Ceres Seq. ID no. 13597007
RSRLGNSHKKTPRGEERMLLRSSSTPFLRSFLTSSSSPTPPSSLQLRRAFSDGHLPSLNPSSSGDNDSNRTTGLHTELSFSVYNTFSKAKLEPHQEQEMEEEQEQAPQPELPELPLFLARGMGIDRLASGLFTAGMGSEAALARMASGVDQKAVLALDAQYKEMVDEQPGNALFLRNYAQFLHEVKCDSRRAEEYYSRAMLADPTDGEIMSQYAKLVWAVHRDHERSLTYFQKSVQAAPRDSHVLAAYASFLWEQDEDEDDDGGLGGGEQGSPGRATQPRQLASTAV

SEQ ID NO: 68955 - protein, 270 aa, Triticum aestivum
  peptide (1)..(270): Ceres Seq. ID no. 13597008
MLLRSSSTPFLRSFLTSSSSPTPPSSLQLRRAFSDGHLPSLNPSSSGDNDSNRTTGLHTELSFSVYNTFSKAKLEPHQEQEMEEEQEQAPQPELPELPLFLARGMGIDRLASGLFTAGMGSEAALARMASGVDQKAVLALDAQYKEMVDEQPGNALFLRNYAQFLHEVKCDSRRAEEYYSRAMLADPTDGEIMSQYAKLVWAVHRDHERSLTYFQKSVQAAPRDSHVLAAYASFLWEQDEDEDDDGGLGGGEQGSPGRATQPRQLASTAV

SEQ ID NO: 68956 - protein, 189 aa, Triticum aestivum
  peptide (1)..(189): Ceres Seq. ID no. 13597009
MEEEQEQAPQPELPELPLFLARGMGIDRLASGLFTAGMGSEAALARMASGVDQKAVLALDAQYKEMVDEQPGNALFLRNYAQFLHEVKCDSRRAEEYYSRAMLADPTDGEIMSQYAKLVWAVHRDHERSLTYFQKSVQAAPRDSHVLAAYASFLWEQDEDEDDDGGLGGGEQGSPGRATQPRQLASTAV

SEQ ID NO: 68957 - DNA, 1177 bp, Triticum aestivum
  misc_feature (1)..(1177): Ceres Seq. ID no. 14302454
accccccactccccatctatccccgccccgcccgtcccggatccacaccgccgccgcgatgccgtcgttcaaggccccggcgccgggcttctccgtccgcttcagcccgttccacgagcatcgcctcctcgctgccacctcgcagcacttcggtctcgtcggcaacgggcacctcctggttctcgacctctccgccgccgggcccggcgggcccggcctcaccccgctcttctccttccccacctccgacgcgctcttcgactgcgcgtggtccgagtcccacgactccctctgcgccgccgcgtcgggggacggctccgtgcggctcttcgacgtcacgctgccgccggcgcagaaccccgtccgcctcctccgggagcacgcgcgggaggtccacgggatcgactggaaccccgtccgccgcgacgccttcctctccgcctcctgggacgacaccctcaagctctggtcccccgaccgccccgcctccgtccgcaccttccgcggccacgagtactgcgtctacgccgccgcgtggtcggcccggcacccggacgtcttcgcgtcggcgtccggcgaccacacggcccgcgtctgggacgtgcgggagccggggcccaccctcgtcatcccggcccacgaccacgaggtgctctccctggattgggacaagtacgacccgtccatcctggccaccggctccgtcgacaagtcgatccgcatctgggacgtccgctcgccgcaggcgcccctcgcccagctcgcggggcacgggtacgccgtcaagcgcgtcaagttctcgccgcatcggcagggcatgctcatgtcctgctcctacgacatgacggtctgcatgtgggattaccggaaagaggacgccctgctgcaaaggtacggccaccacaccgagttcgtagctgggatcgacatgagcgtgctcaccgatgggctgctggccagcaccggctgggacgagatgatctacgtttggccatttgggagtgatcccagagcaatgtaacacaacatattttgataatctgtatcatgtctgttgagtcgatcttacattggctgtgatacatatggaatggaatggaagtaaacacctggtgagttgaagttggaataatgctacggtaccattgtttgcttcacaaattggttaagtttttag

SEQ ID NO: 68958 - protein, 339 aa, Triticum aestivum
  peptide (1)..(339): Ceres Seq. ID no. 14302455
PPTPHLSPPRPSRIHTAAAMPSFKAPAPGFSVRFSPFHEHRLLAATSQHFGLVGNGHLLVLDLSAAGPGGPGLTPLFSFPTSDALFDCAWSESHDSLCAAASGDGSVRLFDVTLPPAQNPVRLLREHAREVHGIDWNPVRRDAFLSASWDDTLKLWSPDRPASVRTFRGHEYCVYAAAWSARHPDVFASASGDHTARVWDVREPGPTLVIPAHDHEVLSLDWDKYDPSILATGSVDKSIRIWDVRSPQAPLAQLAGHGYAVKRVKFSPHRQGMLMSCSYDMTVCMWDYRKEDALLQRYGHHTEFVAGIDMSVLTDGLLASTGWDEMIYVWPFGSDPRAM

SEQ ID NO: 68959 - protein, 334 aa, Triticum aestivum
  peptide (1)..(334): Ceres Seq. ID no. 14302456
TPHSPSIPAPPVPDPHRRRDAVVQGPGAGLLRPLQPVPRASPPRCHLAALRSRRQRAPPGSRPLRRRARRARPHPALLLPHLRRALRLRVVRVPRLPLRRRVGGRLRAALRRHAAAGAEPRPPPPGARAGGPRDRLEPRPPRRLPLRLLGRHPQALVPRPPRLRPHLPRPRVLRLRRRVVGPAPGRLRVGVRRPHGPRLGRAGAGAHPRHPGPRPRGALPGLGQVRPVHPGHRLRRQVDPHLGRPLAAGAPRPARGARVRRQARQVLAASAGHAHVLLLRHDGLHVGLPERGRPAAKVRPPHRVRSWDRHERAHRWAAGQHRLGRDDLRLAIWE

SEQ ID NO: 68960 - protein, 320 aa, Triticum aestivum
  peptide (1)..(320): Ceres Seq. ID no. 14302457
MPSFKAPAPGFSVRFSPFHEHRLLAATSQHFGLVGNGHLLVLDLSAAGPGGPGLTPLFSFPTSDALFDCAWSESHDSLCAAASGDGSVRLFDVTLPPAQNPVRLLREHAREVHGIDWNPVRRDAFLSASWDDTLKLWSPDRPASVRTFRGHEYCVYAAAWSARHPDVFASASGDHTARVWDVREPGPTLVIPAHDHEVLSLDWDKYDPSILATGSVDKSIRIWDVRSPQAPLAQLAGHGYAVKRVKFSPHRQGMLMSCSYDMTVCMWDYRKEDALLQRYGHHTEFVAGIDMSVLTDGLLASTGWDEMIYVWPFGSDPRAM

SEQ ID NO: 68961 - DNA, 1152 bp, Triticum aestivum
  misc_feature (1)..(1152): Ceres Seq. ID no. 13597357
acatcctaatcgaaaagccgagagatcacaccgcagcacgcagacaaagcagacggggacagcacacggaaagagaggagagaggggagagagatcggagaggtgaccaccaccgccgcgccgagatgctggccgtgttcgaccagacggtggccaagtgcccggagggcctccgcagcccgccggcggccgggggagggggtacggcggcaggagggggcggaggcgcggccgcgctcatgaagggcttcgccgacgccaacgacgccgcggtcaccgtcagcctcggcgccgccggcgccctcgcctactcctcggccaacaagaaccccctcgtccccaggatgtttggttctgtgaacgacatattttgcctgttccaagggcatgttgagaacattggcaacctgaagcaacactatggtctgagcaagacagcaaatgaggttaccatcctgattgaggcctacagaaccctccgggacaggggcccgctcccagccagccaggtcgtgagagatctcagtggaaggttcgcttttatcctgtacgacaccgtgtcgaaatccaccttcgtcgctgctgatgctgatggcagtatccccttcttctggggcgtcgactctgaagaccaccttgtgttctctgacgacaatgagcttctcaaggcaggctgtggaaactcatttgcgccattccccaaaggctgcttctacaccacatctggagggctgcagagcttcgagcacccgctgaacgagctgaaggccgtgccacgtgtggacagccagggccagatgtgcggctccaccttcaaggtcgacagcgaggccaagaaggactcggggatccctcgcgtcggtagtgctgctgattggtctaaccactactagcttgatgacccttgttgtaaactgccaatcttgacactgaatcgctgagacaccgcactgcatctgcattttatttttgagcagtttacgacgctctagacaatgctgtttcaataaatgtactgtctgatgggtaatgatactgctgtaagtttaccgatactcgaacaaactctgatgccaccacctggtggtagaggtttatcagccaccctatatatgtctcgataaatagagttcagtgaaggcttagtttgtt

SEQ ID NO: 68962 - protein, 296 aa, Triticum aestivum
  peptide (1)..(296): Ceres Seq. ID no. 13597358
ILIEKPRDHTAARRQSRRGQHTEREERGERDRRGDHHRRAEMLAVFDQTVAKCPEGLRSPPAAGGGGTAAGGGGGAAALMKGFADANDAAVTVSLGAAGALAYSSANKNPLVPRMFGSVNDIFCLFQGHVENIGNLKQHYGLSKTANEVTILIEAYRTLRDRGPLPASQVVRDLSGRFAFILYDTVSKSTFVAADADGSIPFFWGVDSEDHLVFSDDNELLKAGCGNSFAPFPKGCFYTTSGGLQSFEHPLNELKAVPRVDSQGQMCGSTFKVDSEAKKDSGIPRVGSAADWSNHY

SEQ ID NO: 68963 - protein, 255 aa, Triticum aestivum
  peptide (1)..(255): Ceres Seq. ID no. 13597359
MLAVFDQTVAKCPEGLRSPPAAGGGGTAAGGGGGAAALMKGFADANDAAVTVSLGAAGALAYSSANKNPLVPRMFGSVNDIFCLFQGHVENIGNLKQHYGLSKTANEVTILIEAYRTLRDRGPLPASQVVRDLSGRFAFILYDTVSKSTFVAADADGSIPFFWGVDSEDHLVFSDDNELLKAGCGNSFAPFPKGCFYTTSGGLQSFEHPLNELKAVPRVDSQGQMCGSTFKVDSEAKKDSGIPRVGSAADWSNHY

SEQ ID NO: 68964 - protein, 217 aa, Triticum aestivum
  peptide (1)..(217): Ceres Seq. ID no. 13597360
MKGFADANDAAVTVSLGAAGALAYSSANKNPLVPRMFGSVNDIFCLFQGHVENIGNLKQHYGLSKTANEVTILIEAYRTLRDRGPLPASQVVRDLSGRFAFILYDTVSKSTFVAADADGSIPFFWGVDSEDHLVFSDDNELLKAGCGNSFAPFPKGCFYTTSGGLQSFEHPLNELKAVPRVDSQGQMCGSTFKVDSEAKKDSGIPRVGSAADWSNHY

SEQ ID NO: 68965 - DNA, 1782 bp, Triticum aestivum
  misc_feature (1)..(1782): Ceres Seq. ID no. 13655716
gaacatcctaatcccctttggactttggcgttatatccgtcctcgagcccctcccgtcccgtcccggccctcgccctctctcccgaccccgcctgattccagtggcgctgctgcttcttctccgccgggacagacgagacacacgctggttgcggaggagctagcggcggaggtgctttcttcatcatggagtcgcagcagcagcagcagcagatggaggcggtttctgcgccggccgcctccacgaacgggggcggggagctgatcgggtacgtggacgtgcacgtgcggagcgcgcgggacatccagaacatctgcatctaccacaagcaggacgtgtacgcgcgcctctcgctgccgggggagggcgcgccggcggcgtccacgcaggtcatcaatggcggcggccgcaacccggtgtttgaccagtccgtgcgcgtcggcgtgcgcgcgggggacgtcgacgccgcgctccgctgcgaggtctggatgctcagccgggtcaagaactacctgcaggaccagctgctgggcttcgcgctcgtgccgctcccggacgtcgtcgccgccgagggtggcacgctcgcgcgcgagttcccgctctccaccaacgacctcttccactccccggccgggttcttggagctcgagctctcgtacatcggggtcgtgcccgatgtcattcccgtctcgcccacgcccaagcctgcgctggccgatccggatgagtgcgagaacgccggcggcggagccggcgctggcgcagggaaggactacgagaacatggagttccctgacatgaatcttgtggaggaaaaccagattatgctctcggaatatgttgggctgccgtgcacggccatggaaacgcagagctccgagagcctcctgacctcggaggacgtggatggcgccgccaccgagtcccacgacgctggcgtgcgcgtcgtgcagagcttctccacggactacagcaccgccgactcggccggcgccttccggagcgagacggcagccagcagcgtgtccaccacggagtccccggccgcggccgtcccggccaccccgcagtccaacccgtccgagccgtcaggaaacgccctctcatcagcaggccagaaggagaaggcctcggacgcggcggaggtcgattcgtctcccaccgttcaggagagcccggcggtgaactcgcccagcaccgtgtctgagaacgcggtggacaagccgccgccggcgatgagcttcaacttcgcggaggaggtgcaggtgaaccagaaggagatcatggacatgtacatgaagagcatgcagcagttcacggagtcgctggccaagatgaagctcccgctggacatggacaatggcagcgacaagagcgggagcggccccgccgccgcctcgcccacggattccagcggcaccgactcgagcgcggcgacgaagaaaccgacggccggggctgcgcaggagaaatctcccaaggtgttctacggaagccgagccttcttctagttctaggaggaaggaagccggagtagtgccgccggacggaccccggactagaagatggcatttgcagccatccgtctcagctgaaaacttggtagcgcagaggaataacacttttctcatgctgttgttttacttaggcttcgtcagatcccaagacacatgcggaaattagctgccctgtatgtcttacttttaatgtatcgctactctaatgagaaatgcttggcttcttttgcttgagtatacacatctgaattacttttaattcgc

SEQ ID NO: 68966 - protein, 441 aa, Triticum aestivum
  peptide (1)..(441): Ceres Seq. ID no. 15219766
MESQQQQQQMEAVSAPAASTNGGGELIGYVDVHVRSARDIQNICIYHKQDVYARLSLPGEGAPAASTQVINGGGRNPVFDQSVRVGVRAGDVDAALRCEVWMLSRVKNYLQDQLLGFALVPLPDVVAAEGGTLAREFPLSTNDLFHSPAGFLELELSYIGVVPDVIPVSPTPKPALADPDECENAGGGAGAGAGKDYENMEFPDMNLVEENQIMLSEYVGLPCTAMETQSSESLLTSEDVDGAATESHDAGVRVVQSFSTDYSTADSAGAFRSETAASSVSTTESPAAAVPATPQSNPSEPSGNALSSAGQKEKASDAAEVDSSPTVQESPAVNSPSTVSENAVDKPPPAMSFNFAEEVQVNQKEIMDMYMKSMQQFTESLAKMKLPLDMDNGSDKSGSGPAAASPTDSSGTDSSAATKKPTAGAAQEKSPKVFYGSRAFF

SEQ ID NO: 68967 - protein, 432 aa, Triticum aestivum
  peptide (1)..(432): Ceres Seq. ID no. 15219767
MEAVSAPAASTNGGGELIGYVDVHVRSARDIQNICIYHKQDVYARLSLPGEGAPAASTQVINGGGRNPVFDQSVRVGVRAGDVDAALRCEVWMLSRVKNYLQDQLLGFALVPLPDVVAAEGGTLAREFPLSTNDLFHSPAGFLELELSYIGVVPDVIPVSPTPKPALADPDECENAGGGAGAGAGKDYENMEFPDMNLVEENQIMLSEYVGLPCTAMETQSSESLLTSEDVDGAATESHDAGVRVVQSFSTDYSTADSAGAFRSETAASSVSTTESPAAAVPATPQSNPSEPSGNALSSAGQKEKASDAAEVDSSPTVQESPAVNSPSTVSENAVDKPPPAMSFNFAEEVQVNQKEIMDMYMKSMQQFTESLAKMKLPLDMDNGSDKSGSGPAAASPTDSSGTDSSAATKKPTAGAAQEKSPKVFYGSRAFF

SEQ ID NO: 68968 - protein, 340 aa, Triticum aestivum
  peptide (1)..(340): Ceres Seq. ID no. 15219768
MLSRVKNYLQDQLLGFALVPLPDVVAAEGGTLAREFPLSTNDLFHSPAGFLELELSYIGVVPDVIPVSPTPKPALADPDECENAGGGAGAGAGKDYENMEFPDMNLVEENQIMLSEYVGLPCTAMETQSSESLLTSEDVDGAATESHDAGVRVVQSFSTDYSTADSAGAFRSETAASSVSTTESPAAAVPATPQSNPSEPSGNALSSAGQKEKASDAAEVDSSPTVQESPAVNSPSTVSENAVDKPPPAMSFNFAEEVQVNQKEIMDMYMKSMQQFTESLAKMKLPLDMDNGSDKSGSGPAAASPTDSSGTDSSAATKKPTAGAAQEKSPKVFYGSRAFF

SEQ ID NO: 68969 - DNA, 1276 bp, Triticum aestivum
  misc_feature (1)..(1276): Ceres Seq. ID no. 13598238
ttttttctcattaaaaaaaactcttggatcgatcaaaccctagagagagagatgagagagactcatcttccatggccggcggcgattcttctcccgtggcggcggcggctgcggcgagaaagtgggagtgggaccaagaagagtatcggtgcgagtcgccggagtattcattggacccgcgatacagcgagtacgaccccaagcagggtcgtttcatatacgtccgctacttcttcaacggcaaactcgacctggacgaggagtcacctgttggtcccatgcgacatactggtaaaatcttcaaagagggattccggctcaaaaattcagtcaatgttgtctccatcaagattgtttcctctgactatggctacccactctatgtctacggtaccatcatagccagggatagtctggatagaaaatgtgtctatatattccggcgcgaccaggatgattgccagctcatcagctcaaaggatgattcattgattttgactggacccaagagaggattcatggtatgcgatgatatattcttcgaaatcaatctgaaggtgaaggatgtgcatgggatgactgtcgatgatgatagactcagtaaaggcctgatggaggtggatgctatccgcaggctggaatatagtcccagatatgtggttgatacggaaacacttgtcagcatgcacagcatattagatttaaactatacattcattaggaggtcggtggagggcactgttgagatcaagaaccttgagggacctgatgaattccatgggaagattgttgcttccactaccagcattccatgcgacattgtgctacatgatagcaaagtgagtggtgcgctaactgcgggtgaaaatggagtcctacaaatggcgcgacgcgtagtaggagtctctgtggatgaggtgctggtgttgactgttgctgctgctgtcggtgatgatgagttatctgcccgcactgttcagtttactccaaggcgcaatggttacgatgatgagagtatcacctgcggggactacaagatgcttctgaaggtcacttggtcgattgtgtatttctgatgtaactcttagttattcagtcacggcagtctgccagattctctagatacttaggatgcaatgaagtttcattatgggaaccagttatggtacatgctaaaacaatatatgtattccagcgtgtattgtatctattctgactcttctccctgatgtaagctagttttactggaagtgcttgcagtacatttatgaaattc

SEQ ID NO: 68970 - protein, 334 aa, Triticum aestivum
  peptide (1)..(334): Ceres Seq. ID no. 13598239
MAGGDSSPVAAAAAARKWEWDQEEYRCESPEYSLDPRYSEYDPKQGRFIYVRYFFNGKLDLDEESPVGPMRHTGKIFKEGFRLKNSVNVVSIKIVSSDYGYPLYVYGTIIARDSLDRKCVYIFRRDQDDCQLISSKDDSLILTGPKRGFMVCDDIFFEINLKVKDVHGMTVDDDRLSKGLMEVDAIRRLEYSPRYVVDTETLVSMHSILDLNYTFIRRSVEGTVEIKNLEGPDEFHGKIVASTTSIPCDIVLHDSKVSGALTAGENGVLQMARRVVGVSVDEVLVLTVAAAVGDDELSARTVQFTPRRNGYDDESITCGDYKMLLKVTWSIVYF

SEQ ID NO: 68971 - protein, 265 aa, Triticum aestivum
  peptide (1)..(265): Ceres Seq. ID no. 13598240
MRHTGKIFKEGFRLKNSVNVVSIKIVSSDYGYPLYVYGTIIARDSLDRKCVYIFRRDQDDCQLISSKDDSLILTGPKRGFMVCDDIFFEINLKVKDVHGMTVDDDRLSKGLMEVDAIRRLEYSPRYVVDTETLVSMHSILDLNYTFIRRSVEGTVEIKNLEGPDEFHGKIVASTTSIPCDIVLHDSKVSGALTAGENGVLQMARRVVGVSVDEVLVLTVAAAVGDDELSARTVQFTPRRNGYDDESITCGDYKMLLKVTWSIVYF

SEQ ID NO: 68972 - protein, 185 aa, Triticum aestivum
  peptide (1)..(185): Ceres Seq. ID no. 13598241
MVCDDIFFEINLKVKDVHGMTVDDDRLSKGLMEVDAIRRLEYSPRYVVDTETLVSMHSILDLNYTFIRRSVEGTVEIKNLEGPDEFHGKIVASTTSIPCDIVLHDSKVSGALTAGENGVLQMARRVVGVSVDEVLVLTVAAAVGDDELSARTVQFTPRRNGYDDESITCGDYKMLLKVTWSIVYF

SEQ ID NO: 68973 - DNA, 1732 bp, Triticum aestivum
  misc_feature (1)..(1732): Ceres Seq. ID no. 13655724
cacagatagcctagagagacagggtccgcaaagcaagcaccgcccggcaaaggcaagaaagagccatccatccatccatcatccccttcctcgtgcgctgctgcctcttgcttctttcttcttcgtctagtaccaagctcaagctagatagatatccatggtttttctctccttgcttgcttgcgaattgctgcaggttgtaagtagataggtgttatacgtagtaggagctactagtagataggcggcgggtgggagaggagatgaagctccatctcctgctgaaggtcctgttcggccccgtgccggtctacttctcggcgctggccatcctcatcctgctgaccaacgcgcagtacttcgggctcggcggcgtcggcgtgccgcgcgccaccaagctggcctcctccacgcaggtggtgagcgtgatgaagtactgcgacatcttccgcggcgagtgggtgcccgacgcggaggcgccctactacaaccacaagacgtgcggcatgatccaggagcaccagaactgcctcaagtacggccgaccggacctcggcttcctcaagtggcgctggaggccgtccggctgcgagctgccgcgcttcgaccccgtccagttcctgcagttcgtccgccacaagtccctcgccttcgtcggggactccctggctcgcaaccatatgcagtccttgctctgcctcctctcacaggtggcgtatcccaaggacatctcggcgaacccgacggaccagaacaaggtgtaccactaccgggcgtacaacttcaccatcaacatgttctggtcgccgttcctggtgcgggcgcgggagcccgaccacgacgacccggcgcacacggggcactacagcctctacctggacgagccggacgacaagtgggtgtcgcaggtgccccggttcgactacgtgctggtgtcggcggccaactggttctcccgcccctcgctcttctacgagaagcggcggctgatcgggtgcagcttctgcagccggcagtacggcgtgccggacctgacgctctactactcgcagcgcaaggcgtggcgggtggcgctgcgggcgatcaacgccctggagggcaaggtgaaggcgcgggtgattgtgcggatgctgtcgcccatgtcgcacttcgagaacgggacctgggaccagggcggcaactgcaagcgcacggaaccggtccggagcaaccagacggtgatggaggggcgggacctgcagttctacacggcgcagatggaggagtaccgcgcggcggagaagaccgcgcggacaaaggggctgcggctgatgctcatggacgccacggccgccatgctgatgcggcccgacggccaccccagccggtacgggcactggcccaacgagaaggtgcagctctacaacgactgcatccattggtgcctccccggccccatcgacatctggaacgacctcttgttccagatgatgctcgtctagcccagtcccgttcccgtccatcggcacacagatctgatcaaaggatatgctccaaggcaattttgataatgaattgttccatctcatctcatctccctcctttcattcttccctactactaccagtcgatccgctttccattcctttgattgatgggtgtggtggtggtaactattgacgacgccaacttttttgtcggtcgtcacggaaagagtgagcaaaagaagctcctctccccttttcttcgtttg

SEQ ID NO: 68974 - protein, 405 aa, Triticum aestivum
  peptide (1)..(405): Ceres Seq. ID no. 15219769
MKLHLLLKVLFGPVPVYFSALAILILLTNAQYFGLGGVGVPRATKLASSTQVVSVMKYCDIFRGEWVPDAEAPYYNHKTCGMIQEHQNCLKYGRPDLGFLKWRWRPSGCELPRFDPVQFLQFVRHKSLAFVGDSLARNHMQSLLCLLSQVAYPKDISANPTDQNKVYHYRAYNFTINMFWSPFLVRAREPDHDDPAHTGHYSLYLDEPDDKWVSQVPRFDYVLVSAANWFSRPSLFYEKRRLIGCSFCSRQYGVPDLTLYYSQRKAWRVALRAINALEGKVKARVIVRMLSPMSHFENGTWDQGGNCKRTEPVRSNQTVMEGRDLQFYTAQMEEYRAAEKTARTKGLRLMLMDATAAMLMRPDGHPSRYGHWPNEKVQLYNDCIHWCLPGPIDIWNDLLFQMMLV

SEQ ID NO: 68975 - protein, 350 aa, Triticum aestivum
  peptide (1)..(350): Ceres Seq. ID no. 15219770
MKYCDIFRGEWVPDAEAPYYNHKTCGMIQEHQNCLKYGRPDLGFLKWRWRPSGCELPRFDPVQFLQFVRHKSLAFVGDSLARNHMQSLLCLLSQVAYPKDISANPTDQNKVYHYRAYNFTINMFWSPFLVRAREPDHDDPAHTGHYSLYLDEPDDKWVSQVPRFDYVLVSAANWFSRPSLFYEKRRLIGCSFCSRQYGVPDLTLYYSQRKAWRVALRAINALEGKVKARVIVRMLSPMSHFENGTWDQGGNCKRTEPVRSNQTVMEGRDLQFYTAQMEEYRAAEKTARTKGLRLMLMDATAAMLMRPDGHPSRYGHWPNEKVQLYNDCIHWCLPGPIDIWNDLLFQMMLV

SEQ ID NO: 68976 - protein, 324 aa, Triticum aestivum
  peptide (1)..(324): Ceres Seq. ID no. 15219771
MIQEHQNCLKYGRPDLGFLKWRWRPSGCELPRFDPVQFLQFVRHKSLAFVGDSLARNHMQSLLCLLSQVAYPKDISANPTDQNKVYHYRAYNFTINMFWSPFLVRAREPDHDDPAHTGHYSLYLDEPDDKWVSQVPRFDYVLVSAANWFSRPSLFYEKRRLIGCSFCSRQYGVPDLTLYYSQRKAWRVALRAINALEGKVKARVIVRMLSPMSHFENGTWDQGGNCKRTEPVRSNQTVMEGRDLQFYTAQMEEYRAAEKTARTKGLRLMLMDATAAMLMRPDGHPSRYGHWPNEKVQLYNDCIHWCLPGPIDIWNDLLFQMMLV

SEQ ID NO: 68977 - DNA, 1181 bp, Triticum aestivum
  misc_feature (1)..(1181): Ceres Seq. ID no. 13597057
agaacatcctaatcgaaaagaaccggaggaatctacccagacctaggggtcaagtagggccgtaccttaggaagtagccgttgcgaggttcgaatcgactggaatcggggggaagagcagagcaaatcatctgcggaagggtaaggattggcgtgcaggattcggagcgggagtaatctgagtaaagatggctgaagtgaggattgccagcaggacggctgtagccgatcgctctggcggtggattcttcgtcaggagggtggcgtctcccggagccgtggtggacaagggcgccgtcaagccgcttgctcgtcgggtcccgtcaccgtccagcaacaaggagaacgtgccaccagcgtgggctgcgtgggctgcacccaagaggaggagctccctgcccgagtggtacccaaggaccccactccgtgatatcacatcagtcatcaaggctgttgagaggaaaagccggctgcgagatgctgcggctcggcagcagctccagtgggatgaagaagactcctcggagcctgaggatccagcacaaacagacgagggtattcatggaagcacagcaccaacaaatgaaaccctgggtgttggctgggctaaagttgttgaaaccaccgcagcatcagcaacctgcttgggcgagggcgagagcaccacggtggtgaaggcatctgatgactgctccttgcagtctacatccagaccaagtggagaagtaggcgtggagaagcaactggccagctccatagatgcgattgagaagatggtgagccggaacctcaagcgaactgatcccgaggctactcggccttccaagaccccggctgtccagaggcgcaccctgatgtctatgcgctgagctgatgtctgctgctttcttagcggctagtcctaactaatcatggtgctcggttctctgcttgaggagtggtgttgtgctcatggttctctgcttgaggacttggggtatgggcggtggtagctgtggctctctgcttgagggcacatgtaggattacatcaccagacttgattgtgttactgtgttttgtcattcagctgatctccttgtttgttgttccactgtaactaacggtaactaataagacgatagatatggtgcatcttctgttgtggagcaaaataatatcttgttggtacgtgacatacctt

SEQ ID NO: 68978 - protein, 226 aa, Triticum aestivum
  peptide (1)..(226): Ceres Seq. ID no. 15222025
MAEVRIASRTAVADRSGGGFFVRRVASPGAVVDKGAVKPLARRVPSPSSNKENVPPAWAAWAAPKRRSSLPEWYPRTPLRDITSVIKAVERKSRLRDAAARQQLQWDEEDSSEPEDPAQTDEGIHGSTAPTNETLGVGWAKVVETTAASATCLGEGESTTVVKASDDCSLQSTSRPSGEVGVEKQLASSIDAIEKMVSRNLKRTDPEATRPSKTPAVQRRTLMSMR

SEQ ID NO: 68979 - DNA, 1300 bp, Triticum aestivum
  misc_feature (1)..(1300): Ceres Seq. ID no. 14302021
ccacccagccttcctcctctccacaccgcaggctccagggaaagggaagacctcgcctcgccttgctgccgccgaagccaccagcggagggagcatgaaggtctccgtcgtgtcccggagcggccgcgaggtcgtcaagggcggcatcgagctcaaggactcggccaaggtcgcggatctgcaggaggccatccacgccaagactaagaagtattatcctgccaggcaacggctcaccctccctgcacaacctggaaaatctggaaagccagttgtcctcaatcaaaaggccagcctatcggaatactgcgagaaaggttccggttccctgacagtggtcttcaaagatttgggcccacaggtctactacagcacgctcttcttctgggaatacgtcggccctcttatcatgtaccccatcttctattacctgcctgtctacaaatactttggatatgagggagagcgggtcatccaccctgtccagacctatgccatgtactacttctgcttccactacttcaagaggatcatggagaccttcttcgtccaccgcttcagccacgcaacttcccccgtgtcaaacgtcttcaggaactgcgcctactactggacctttggagcctacattgcctactactgcaaccacccgctttacacccccgtgagtgacctgcagatgaagattgggttcggcatcggggtcgtgtgccagatcgcaaacttctactgccacatcctgctgaggaacctcaggagcccgaccggcagcggcggctaccagatcccacggggtttcctgttcaacattgtgacatgcgcaaactacaccaccgagatctaccaatggctggggttcaacatcgccacacagaccgtggcgggctacgtcttcctcgctgtggccgctgctatcatgaccaactgggcgctcggaaagcacagccgcctgaggaagctcttcgacggtaaggacgggcggcccaagtacccccgccgatgggtgattcttcctccattcctgtgaagaagtcacggtgctcgcaaggcctgcatctggagattcaacatttattctgttccagcgttccaaagttaaaagccatcagtcgatttcactcaaacattcctactaatcgtgccttgtaccagctgtcaaacctcaattatgtagtccaaatgttcttatccaaaggatgtattttcttactccatattgttgaaaaactttctctggggtttatttacgccacaccgcgacgtgttgtcatagtcaagtccaacactaagatgattcatc

SEQ ID NO: 68980 - protein, 341 aa, Triticum aestivum
  peptide (1)..(341): Ceres Seq. ID no. 14302022
HPAFLLSTPQAPGKGKTSPRLAAAEATSGGSMKVSVVSRSGREVVKGGIELKDSAKVADLQEAIHAKTKKYYPARQRLTLPAQPGKSGKPVVLNQKASLSEYCEKGSGSLTVVFKDLGPQVYYSTLFFWEYVGPLIMYPIFYYLPVYKYFGYEGERVIHPVQTYAMYYFCFHYFKRIMETFFVHRFSHATSPVSNVFRNCAYYWTFGAYIAYYCNHPLYTPVSDLQMKIGFGIGVVCQIANFYCHILLRNLRSPTGSGGYQIPRGFLFNIVTCANYTTEIYQWLGFNIATQTVAGYVFLAVAAAIMTNWALGKHSRLRKLFDGKDGRPKYPRRWVILPPFL

SEQ ID NO: 68981 - protein, 310 aa, Triticum aestivum
  peptide (1)..(310): Ceres Seq. ID no. 14302023
MKVSVVSRSGREVVKGGIELKDSAKVADLQEAIHAKTKKYYPARQRLTLPAQPGKSGKPVVLNQKASLSEYCEKGSGSLTVVFKDLGPQVYYSTLFFWEYVGPLIMYPIFYYLPVYKYFGYEGERVIHPVQTYAMYYFCFHYFKRIMETFFVHRFSHATSPVSNVFRNCAYYWTFGAYIAYYCNHPLYTPVSDLQMKIGFGIGVVCQIANFYCHILLRNLRSPTGSGGYQIPRGFLFNIVTCANYTTEIYQWLGFNIATQTVAGYVFLAVAAAIMTNWALGKHSRLRKLFDGKDGRPKYPRRWVILPPFL

SEQ ID NO: 68982 - protein, 205 aa, Triticum aestivum
  peptide (1)..(205): Ceres Seq. ID no. 14302024
MYPIFYYLPVYKYFGYEGERVIHPVQTYAMYYFCFHYFKRIMETFFVHRFSHATSPVSNVFRNCAYYWTFGAYIAYYCNHPLYTPVSDLQMKIGFGIGVVCQIANFYCHILLRNLRSPTGSGGYQIPRGFLFNIVTCANYTTEIYQWLGFNIATQTVAGYVFLAVAAAIMTNWALGKHSRLRKLFDGKDGRPKYPRRWVILPPFL

SEQ ID NO: 68983 - DNA, 1460 bp, Triticum aestivum
  misc_feature (1)..(1460): Ceres Seq. ID no. 12586366
aaagcgaaagaaaaagtgagacctcatctctttcagctaagctcgcaatggagctcccatggggtgccctgctgctggcgctgctcaccgtctccgcctcctccgccgtcgccacgctcgccgtcaccgctccccctccggcccctgcccgtgctcctgcccccgtcaccgcccctgccccggcccatgcatctcctcaagctcaggacgctgaaggtctgctgatgaacggcaacttcgagacggcgccgaggaaggtgaacaagaccctcatcgtgggccgccactcgctgccggggtggacgctgcggggccacgtcgagtacgtgtcggcggggccgcagccgggcggcatgttcttcgcggtgccgcacggcgtgcacgcgctccgcctcggcagccacgcgtcggcgtcgcagaacgtgtccgtgcgccccggctcgctctacgcgctcaccttcgccgccacccgcacctgcgcgcaggacgaggccctgcgcatcgccgtctccccgtcgctctccgcccccgccgacgtcgccgtccgcaccctctacagcgccgacaccgccgacacctgggcctggggcttccgcgcctcctcccctgtcgcggaggtcaccttcagcaaccccggcgtgcaggaggacgccgcgtgcggcccgctcatcgacgccgtcgccatcaaggagctccccacgccctaccccaccaaagataacctgatcaagaacgacggcttcgagatcgggccgcaggtgttcaagaactcgagcgttggcgtgctgctgccgccgaagcagaaggacgtgacgtcgccgctgccgggctggatcatcgagtcgctcaaggcggtgcggtacatcgacgccgcccacttctcggtgccggcgggccagtacgcggtggagctggtggcggggcgggagagcgccatcgcgcaggtcatccgcaccgtgcccaaccgcgcctacaacctctcctacgtcgtcggcgacgccaagaacggctgccacggctccatgctcgtggaggccttcgccgccaacgtcacgcagaaggtgccgttccagtccacgggcaagggcgggttcaaggcggcgagcctcaggttcgtggccgccggagtccgcaccagggtcaccttctacagctcctactaccacaccaaggtcaccgacggcgtctcgctctgcggccccgtgctcgaccaggtcaagatcatgccgctcaagctctagtcgtctatcggagtagaccagaagctcagatcaatcctgtcgcgttgattcggcatcgtcctctcgtctactatgtagtagtagtgggtatgtaatttgtgacattgatggacctctctctaatcgtgtgccagcgtggtggaatgaattgcctgtgctgtgcgtgaacctgcgagctccgtcaatttgtttgggatttgcgtaggctttctactagtt

SEQ ID NO: 68984 - protein, 412 aa, Triticum aestivum
  peptide (1)..(412): Ceres Seq. ID no. 12586367
SERKSETSSLSAKLAMELPWGALLLALLTVSASSAVATLAVTAPPPAPARAPAPVTAPAPAHASPQAQDAEGLLMNGNFETAPRKVNKTLIVGRHSLPGWTLRGHVEYVSAGPQPGGMFFAVPHGVHALRLGSHASASQNVSVRPGSLYALTFAATRTCAQDEALRIAVSPSLSAPADVAVRTLYSADTADTWAWGFRASSPVAEVTFSNPGVQEDAACGPLIDAVAIKELPTPYPTKDNLIKNDGFEIGPQVFKNSSVGVLLPPKQKDVTSPLPGWIIESLKAVRYIDAAHFSVPAGQYAVELVAGRESAIAQVIRTVPNRAYNLSYVVGDAKNGCHGSMLVEAFAANVTQKVPFQSTGKGGFKAASLRFVAAGVRTRVTFYSSYYHTKVTDGVSLCGPVLDQVKIMPLKL

SEQ ID NO: 68985 - protein, 397 aa, Triticum aestivum
  peptide (1)..(397): Ceres Seq. ID no. 12586368
MELPWGALLLALLTVSASSAVATLAVTAPPPAPARAPAPVTAPAPAHASPQAQDAEGLLMNGNFETAPRKVNKTLIVGRHSLPGWTLRGHVEYVSAGPQPGGMFFAVPHGVHALRLGSHASASQNVSVRPGSLYALTFAATRTCAQDEALRIAVSPSLSAPADVAVRTLYSADTADTWAWGFRASSPVAEVTFSNPGVQEDAACGPLIDAVAIKELPTPYPTKDNLIKNDGFEIGPQVFKNSSVGVLLPPKQKDVTSPLPGWIIESLKAVRYIDAAHFSVPAGQYAVELVAGRESAIAQVIRTVPNRAYNLSYVVGDAKNGCHGSMLVEAFAANVTQKVPFQSTGKGGFKAASLRFVAAGVRTRVTFYSSYYHTKVTDGVSLCGPVLDQVKIMPLKL

SEQ ID NO: 68986 - protein, 338 aa, Triticum aestivum
  peptide (1)..(338): Ceres Seq. ID no. 12586369
MNGNFETAPRKVNKTLIVGRHSLPGWTLRGHVEYVSAGPQPGGMFFAVPHGVHALRLGSHASASQNVSVRPGSLYALTFAATRTCAQDEALRIAVSPSLSAPADVAVRTLYSADTADTWAWGFRASSPVAEVTFSNPGVQEDAACGPLIDAVAIKELPTPYPTKDNLIKNDGFEIGPQVFKNSSVGVLLPPKQKDVTSPLPGWIIESLKAVRYIDAAHFSVPAGQYAVELVAGRESAIAQVIRTVPNRAYNLSYVVGDAKNGCHGSMLVEAFAANVTQKVPFQSTGKGGFKAASLRFVAAGVRTRVTFYSSYYHTKVTDGVSLCGPVLDQVKIMPLKL

SEQ ID NO: 68987 - DNA, 606 bp, Triticum aestivum
  misc_feature (1)..(606): Ceres Seq. ID no. 12777119
actcgagagcgcgagcgagacttttctttccatccgcaggagatcccgacgagaaggcgaaggcgaagccggcggcgcaaccgaagcccctcatggcccgctcgtcctcgcagtcccagtcctccgtcggcggtgccggcgccgccggatcccgcccggccaccgccgggccccgcggcacgcccgccgccacggctggcatgcgccgccgacccggccgcacctcctcctccgcgtccggtggcggaggcttctccggcggcggagggaacaacatgctgcgcttttacaccgacgaggccccggggctgcgcctctccccgaccatggtgctcgtcatgtccgtctgcttcatcggcttcgtcaccgccctccacgtcttcggcaagctctaccgctcccgcaccgccgcctccgcgtccgcctgatcaacccggttcctgctcctgtttgttcttcgtttcagatcagatcagatggttttggtgtgtaacaaagaggctgtggttgctacctgacgagttagatctgccgaagtaccctacatgtttaattatggtgccctttctgtttccatttaccttgttgttgcgatgaattgtggct

SEQ ID NO: 68988 - protein, 198 aa, Triticum aestivum
  peptide (1)..(198): Ceres Seq. ID no. 12777120
TRERERDFSFHPQEIPTRRRRRSRRRNRSPSWPARPRSPSPPSAVPAPPDPARPPPGPAARPPPRLACAADPAAPPPPRPVAEASPAAEGTTCCAFTPTRPRGCASPRPWCSSCPSASSASSPPSTSSASSTAPAPPPPRPPDQPGSCSCLFFVSDQIRWFWCVTKRLWLLPDELDLPKYPTCLIMVPFLFPFTLLLR

SEQ ID NO: 68989 - protein, 163 aa, Triticum aestivum
  peptide (1)..(163): Ceres Seq. ID no. 12777121
LESASETFLSIRRRSRREGEGEAGGATEAPHGPLVLAVPVLRRRCRRRRIPPGHRRAPRHARRHGWHAPPTRPHLLLRVRWRRLLRRRREQHAALLHRRGPGAAPLPDHGARHVRLLHRLRHRPPRLRQALPLPHRRLRVRLINPVPAPVCSSFQIRSDGFGV

SEQ ID NO: 68990 - protein, 141 aa, Triticum aestivum
  peptide (1)..(141): Ceres Seq. ID no. 12777122
SRARARLFFPSAGDPDEKAKAKPAAQPKPLMARSSSQSQSSVGGAGAAGSRPATAGPRGTPAATAGMRRRPGRTSSSASGGGGFSGGGGNNMLRFYTDEAPGLRLSPTMVLVMSVCFIGFVTALHVFGKLYRSRTAASASA

SEQ ID NO: 68991 - protein, 111 aa, Triticum aestivum
  peptide (1)..(111): Ceres Seq. ID no. 12777123
MARSSSQSQSSVGGAGAAGSRPATAGPRGTPAATAGMRRRPGRTSSSASGGGGFSGGGGNNMLRFYTDEAPGLRLSPTMVLVMSVCFIGFVTALHVFGKLYRSRTAASASA

SEQ ID NO: 68992 - DNA, 1603 bp, Triticum aestivum
  misc_feature (1)..(1603): Ceres Seq. ID no. 12616843
tccaaatcgaaaaatttctaagaaaagaggtctcctgaactaaaaagaagcccttctctctcctccaaccgccggtggtcgctccgtcgctcgccatggcttccgggtcctcggccgccgcacgtcgccttctgctattgcgccaccgccgccgccacctcgttcccaatcaccacttctcttcctcctcggcggacgaagtgctggacgggggccgcgtcaagatcttcgatcgcgatctgaagcgccgacaccgggaccgggcggcgtgggcgatgcgggaaactgacccactggtagacgcggtcgccgataacctcctcgaccgcctcgaggactgcaggaaggcgttcccctcggcgctctgcctcggcggttcggccggcgccgtccgccggtcgcttcgcggccgcggtggaatcgagaaattgaccatgatggacatgtcggtagacatggtgaacaagtggcgggagttggagagtgctactgacgacggccccgagatgaactttatcgttggagatgaagagtatcttcctatgaaagagaactcccaggatttgataatgagctgtcttgggctacattggacaaatgatctacctggagcaatgatacagtgtaggttggcgttgaagcctgatggcctttttcttgcagcaattcttggcggggagactctgaaggaactaagaattgcatgcactattgctcaaatggaacgtgagggaggcatcagtcctcgaatgtcgccattagcacaagtccgtgatgcaggaaaccttttgtcaagggcaggcttcgcccttccaggagttgatgtagatcgatatacagtcaagtacaatagtgctcttgaacttgtggaacatcttagagcaatggcagaaacgaatgctctctttcaaagaagccatatattaaagagagatacagcactagctactgcagccatttaccagtcaatgtttgggttagaagatggaaccattccagcaacctttcaggtaatttacatgactgggtggaaggagcattcatcacagcaaaagcctaagagaaggggttctgccactgtatcatttggtgacataaggaaacaatttggttccaaccaagactgaagaactttatcagctatgaaaacatctctcgaggaaggaaaaggaaacccctatttgctcacaacagaacttggggtttccgaggcttcccatttgtggaaaaagtgtactctgttggttcccaccaagattcgcggaagcgttccttgcatcgcacacaatcctcctcctgtgcatctgggttgatctcgacacgccctgaaaactggaagcggatcatggagtggaagaaggagatgctatatatttgtactccgaccctagcctacgtgtttccactgtatgcaacaaatatcccatcacatggaaaatgatatttttgtagaaaaaatgttgtgatagctttcgccaaatctcattgaagttctaactgaaacttatttgctttgagttgtgaacttatttggtttggagaccttttatgttacattgtgagacatgctatccctatctatctatctatctatctatctatc

SEQ ID NO: 68993 - protein, 343 aa, Triticum aestivum
  peptide (1)..(343): Ceres Seq. ID no. 12616844
MASGSSAAARRLLLLRHRRRHLVPNHHFSSSSADEVLDGGRVKIFDRDLKRRHRDRAAWAMRETDPLVDAVADNLLDRLEDCRKAFPSALCLGGSAGAVRRSLRGRGGIEKLTMMDMSVDMVNKWRELESATDDGPEMNFIVGDEEYLPMKENSQDLIMSCLGLHWTNDLPGAMIQCRLALKPDGLFLAAILGGETLKELRIACTIAQMEREGGISPRMSPLAQVRDAGNLLSRAGFALPGVDVDRYTVKYNSALELVEHLRAMAETNALFQRSHILKRDTALATAAIYQSMFGLEDGTIPATFQVIYMTGWKEHSSQQKPKRRGSATVSFGDIRKQFGSNQD

SEQ ID NO: 68994 - protein, 283 aa, Triticum aestivum
  peptide (1)..(283): Ceres Seq. ID no. 12616845
MRETDPLVDAVADNLLDRLEDCRKAFPSALCLGGSAGAVRRSLRGRGGIEKLTMMDMSVDMVNKWRELESATDDGPEMNFIVGDEEYLPMKENSQDLIMSCLGLHWTNDLPGAMIQCRLALKPDGLFLAAILGGETLKELRIACTIAQMEREGGISPRMSPLAQVRDAGNLLSRAGFALPGVDVDRYTVKYNSALELVEHLRAMAETNALFQRSHILKRDTALATAAIYQSMFGLEDGTIPATFQVIYMTGWKEHSSQQKPKRRGSATVSFGDIRKQFGSNQD

SEQ ID NO: 68995 - protein, 230 aa, Triticum aestivum
  peptide (1)..(230): Ceres Seq. ID no. 12616846
MMDMSVDMVNKWRELESATDDGPEMNFIVGDEEYLPMKENSQDLIMSCLGLHWTNDLPGAMIQCRLALKPDGLFLAAILGGETLKELRIACTIAQMEREGGISPRMSPLAQVRDAGNLLSRAGFALPGVDVDRYTVKYNSALELVEHLRAMAETNALFQRSHILKRDTALATAAIYQSMFGLEDGTIPATFQVIYMTGWKEHSSQQKPKRRGSATVSFGDIRKQFGSNQD

SEQ ID NO: 68996 - DNA, 486 bp, Triticum aestivum
  misc_feature (1)..(486): Ceres Seq. ID no. 13584174
tcgtctccgtttgaagacaaggagcaaagttggaaaccgccgccgattccctgtcctgcccctcctcgtagcataccgcttctagtataaccttgccctccggggggcacagcctctcctccttcccctgaccacctcctcagttttttctcaccctcctcaatggcgaatctgccgccgtccctcgccgccggcccctccttcggcgcgccctccccgcccccgctcccgcccccgtccggctcgtcggccgcggcgccgcccgccggggggagggaccggaagatggtgtccgcggagcagctcgtgctcgacctctgcgacccggagctgcgcgagaacgccctcctcgagctctccaagaagcgagagatttttcaagaccttgctccactgctgtggcactcctttggcaccgttgctgcactgctccaggagattgtgtcaatctacccttcactttcacctcctactttgtcgccagtt

SEQ ID NO: 68997 - protein, 108 aa, Triticum aestivum
  peptide (1)..(108): Ceres Seq. ID no. 13584175
MANLPPSLAAGPSFGAPSPPPLPPPSGSSAAAPPAGGRDRKMVSAEQLVLDLCDPELRENALLELSKKREIFQDLAPLLWHSFGTVAALLQEIVSIYPSLSPPTLSPV

SEQ ID NO: 68998 - protein, 67 aa, Triticum aestivum
  peptide (1)..(67): Ceres Seq. ID no. 13584176
MVSAEQLVLDLCDPELRENALLELSKKREIFQDLAPLLWHSFGTVAALLQEIVSIYPSLSPPTLSPV

SEQ ID NO: 68999 - DNA, 439 bp, Triticum aestivum
  misc_feature (1)..(439): Ceres Seq. ID no. 13655451
acagctcgcccactccctacccatctcgccggcgcgcaggcggcgccgtcccaacatgggatgacgtccgccgtaaaatagggcccccacgaccaaacaaagccccgactagccaccaacatcgaaccccatgaaggcgtctatcaagttccgcgacgacgaccggccgctgatgcgggccaaggtgccgatcggcgtgctcgggctgccgttccagtccggcctctccgccggtggcgatccccgggagctccgcttcgatctctccaccgctttcgcctccgggccagctctccgcttatcgtatcgccccaacgaccctggtctccccttcgccatctccatccgcgccggtgtcggagccctcggctcccctgtccgggcccccttctccctcgccgccgagttcaacctcctctctgccaactccggatctcct

SEQ ID NO: 69000 - protein, 103 aa, Triticum aestivum
  peptide (1)..(103): Ceres Seq. ID no. 13655452
MKASIKFRDDDRPLMRAKVPIGVLGLPFQSGLSAGGDPRELRFDLSTAFASGPALRLSYRPNDPGLPFAISIRAGVGALGSPVRAPFSLAAEFNLLSANSGSP

SEQ ID NO: 69001 - protein, 89 aa, Triticum aestivum
  peptide (1)..(89): Ceres Seq. ID no. 13655453
MRAKVPIGVLGLPFQSGLSAGGDPRELRFDLSTAFASGPALRLSYRPNDPGLPFAISIRAGVGALGSPVRAPFSLAAEFNLLSANSGSP

SEQ ID NO: 69002 - DNA, 1659 bp, Triticum aestivum
  misc_feature (1)..(1659): Ceres Seq. ID no. 13597034
ctcccccctacgcacctcttgccaccgccgcagcacatccccgaaagctaggtttttatcactccacctatcatcatcgcctcggcggccgcacaacccaccctccccctcgaagccccgatctccttcacttctcctctccgtgccagatcgttgtttatgagctcgaaggagaagcccaccctcggaggccagcggattaagacccgcaagcggaatatcgcagctcctttggacccttcgtcgttctctgatgcaattgtccagatttatctggataatgctggagacctggaacttgttgccaaaagtatagagtcatcagatctcaacttctcacgttacggtgacactttctttgaggttgttttcattggtgtgcgtactcagcctggtacgattaaacccgaagaagagggagagcgccacccctattctctcattgactgtgcagcacaacgtgaagcaatattaccttatgtcctctttattcagaaaacactgcgcaggaggcctttcttaataaagagtcttgaaaatgttatgcgaaaatttctccagtctttggagttctttgaagaaaatgagagacaaaaacttgccattttcacggcacttgcattttctcagaaattatcaggtctgccacctgaaactgtctttcagccattgcttaaggacaatcttgttgccaaagggatagtgctttcattcattactgagttcttcaaggaatatctgaaggaaaatagtttggatgatctgattgcacttttaaagaaaggcaaaatggaggacaatttacttgaattttttccatcaggaaagagaacctctgaggctttgtctgagcatttcaccaaagaaggtttgactagccttgttgagtacaatagcaagaaaatgtttgaagttaagctcaaggagataaagtcaactctgaccactatgatcaatgaagaagctgaaatatctgaagtaactgaggttgtcaagcaacaggttaaagatgctaaatttcctgatatagaggttgttcgcatgctgtgggatgtgctgatggaggctgttcagtggtctggaaagaaccagcagcaaaattctaattcagcacttaggcaggtgaatgcttgggctggtcttatgaatgcattttgcacaagtggaaagctagaactggaactcatatacaaggtccagacacaatgttatgaggatgctaagttgatgaagctgttccctgaaattataagatcactgtatgatcaagatgtcctagctgaagataccatacttctttggttccgcaagggttcaaaccaaaaaggaaggcaatctttcgtgaaagctctggagcctttcgtcaaatggcttgaggaggcagaggaggaagaataaagaggcacggttgttgctttaaaatgagtatttccttataccccatgtttgcggagacggtggtcatccttttgctgcttattactgaacaaacattttatattcagatgtgagcattgctgtcatctgctatcattttcgacattattgtaccaggatttggaaggatcgttacctactttgtgttgtgtattagttgttacatggatatttatgcagagtgcacgtttaagaagaggcaaactcaagtttataactgcc

SEQ ID NO: 69003 - protein, 412 aa, Triticum aestivum
  peptide (1)..(412): Ceres Seq. ID no. 13597035
MSSKEKPTLGGQRIKTRKRNIAAPLDPSSFSDAIVQIYLDNAGDLELVAKSIESSDLNFSRYGDTFFEVVFIGVRTQPGTIKPEEEGERHPYSLIDCAAQREAILPYVLFIQKTLRRRPFLIKSLENVMRKFLQSLEFFEENERQKLAIFTALAFSQKLSGLPPETVFQPLLKDNLVAKGIVLSFITEFFKEYLKENSLDDLIALLKKGKMEDNLLEFFPSGKRTSEALSEHFTKEGLTSLVEYNSKKMFEVKLKEIKSTLTTMINEEAEISEVTEVVKQQVKDAKFPDIEVVRMLWDVLMEAVQWSGKNQQQNSNSALRQVNAWAGLMNAFCTSGKLELELIYKVQTQCYEDAKLMKLFPEIIRSLYDQDVLAEDTILLWFRKGSNQKGRQSFVKALEPFVKWLEEAEEEE

SEQ ID NO: 69004 - protein, 284 aa, Triticum aestivum
  peptide (1)..(284): Ceres Seq. ID no. 13597036
MRKFLQSLEFFEENERQKLAIFTALAFSQKLSGLPPETVFQPLLKDNLVAKGIVLSFITEFFKEYLKENSLDDLIALLKKGKMEDNLLEFFPSGKRTSEALSEHFTKEGLTSLVEYNSKKMFEVKLKEIKSTLTTMINEEAEISEVTEVVKQQVKDAKFPDIEVVRMLWDVLMEAVQWSGKNQQQNSNSALRQVNAWAGLMNAFCTSGKLELELIYKVQTQCYEDAKLMKLFPEIIRSLYDQDVLAEDTILLWFRKGSNQKGRQSFVKALEPFVKWLEEAEEEE

SEQ ID NO: 69005 - DNA, 1280 bp, Triticum aestivum
  misc_feature (1)..(1280): Ceres Seq. ID no. 13597037
aattcccctcccctctccaggtctcctcccgaaacccccaattcgaaaatcgatttggggatttcggcgtcccagatccgctcctccggccggttcgctcggccgcacgtccgatccgcgttcgcggccgccgtcggagctgctgaccggcccgcggctcgattcgtccgggggatttgttgcgggggctctcgcttgctcccgatggcgtcgtccccggtctcctactggtgctaccactgcagccgcttcgtgcgggtctccccggccaccgtcgtctgccccgactgcgacggcggcttcctcgagcagttcccgcagcctccgccgccgcgcggcggcggcggcagcggccggcgcggggccatgaacccggtgatcgtgctgcggggcggctcgctctccggcttcgagctctactacgaggacggctccggcgacgggctgcggccgctgcccggcgacgtctcgcacctcctcatggggtcggggttccaccgcctgctcgaccagttctcgaggctggaggctgccgccccgcgcccgccggcgtccaaggccgcggtggagtcgatgccgtccgtgacggtcgccgggggaggcggggcccactgcgcggtgtgccaggaggccttcgagcccggcgccgcggctcgggagatgccgtgcaagcacgtctaccaccaggactgcatcctcccctggctctccctccgcaactcctgccccatctgccgcagcgagcttccggcggcagccgtgcctgaggcggaggcggatgccgggctcaccatctggcgactcccccgcggcggattcgccgttggaaggttcgccggcgggcccagagagcaactgccggttgtctacacggagctggatggtggtttcagcaacggcgtcgggccgaggcgggtgacatggccagaaggagaagggcaggtggacggcggcgaaggtcggattcgccgtgtatttaggaacctgtttgggtgctttggccggggcggccggcctgagagttcctcgcagtcccgtagtggctgagcaatgttcttcctggtaactcactttcaattgatgatagtggtgaataagtaggagttagtataaggaggaaaccccaggtggtgagttattggttagtttgatgtaaatgaagggcttgcattccccaccttttgtctcgtttttaaaaaaaaaaaaaaaaaaaaaaaaaaaaaaaaaaaaaaaagaaaaaaaaaaaaaaaaaagcttatcgataccgtcgacctcgaggg

SEQ ID NO: 69006 - protein, 348 aa, Triticum aestivum
  peptide (1)..(348): Ceres Seq. ID no. 13597038
NSPPLSRSPPETPNSKIDLGISASQIRSSGRFARPHVRSAFAAAVGAADRPAARFVRGICCGGSRLLPMASSPVSYWCYHCSRFVRVSPATVVCPDCDGGFLEQFPQPPPPRGGGGSGRRGAMNPVIVLRGGSLSGFELYYEDGSGDGLRPLPGDVSHLLMGSGFHRLLDQFSRLEAAAPRPPASKAAVESMPSVTVAGGGGAHCAVCQEAFEPGAAAREMPCKHVYHQDCILPWLSLRNSCPICRSELPAAAVPEAEADAGLTIWRLPRGGFAVGRFAGGPREQLPVVYTELDGGFSNGVGPRRVTWPEGEGQVDGGEGRIRRVFRNLFGCFGRGGRPESSSQSRSG

SEQ ID NO: 69007 - protein, 280 aa, Triticum aestivum
  peptide (1)..(280): Ceres Seq. ID no. 13597039
MASSPVSYWCYHCSRFVRVSPATVVCPDCDGGFLEQFPQPPPPRGGGGSGRRGAMNPVIVLRGGSLSGFELYYEDGSGDGLRPLPGDVSHLLMGSGFHRLLDQFSRLEAAAPRPPASKAAVESMPSVTVAGGGGAHCAVCQEAFEPGAAAREMPCKHVYHQDCILPWLSLRNSCPICRSELPAAAVPEAEADAGLTIWRLPRGGFAVGRFAGGPREQLPVVYTELDGGFSNGVGPRRVTWPEGEGQVDGGEGRIRRVFRNLFGCFGRGGRPESSSQSRSG

SEQ ID NO: 69008 - protein, 226 aa, Triticum aestivum
  peptide (1)..(226): Ceres Seq. ID no. 13597040
MNPVIVLRGGSLSGFELYYEDGSGDGLRPLPGDVSHLLMGSGFHRLLDQFSRLEAAAPRPPASKAAVESMPSVTVAGGGGAHCAVCQEAFEPGAAAREMPCKHVYHQDCILPWLSLRNSCPICRSELPAAAVPEAEADAGLTIWRLPRGGFAVGRFAGGPREQLPVVYTELDGGFSNGVGPRRVTWPEGEGQVDGGEGRIRRVFRNLFGCFGRGGRPESSSQSRSG

SEQ ID NO: 69009 - DNA, 1232 bp, Triticum aestivum
  misc_feature (1)..(1232): Ceres Seq. ID no. 15225086
ccccaaagacggccatcatcatcgtcgcgttgccttcttcccacctcccaaaaaccctacaccccgcgacgaccaaccggcggccgccatgctcctccggcgaccacttcagacgctcaccctccccctcctccgccggcacttctccgcctccgccgcagcggtttccgccccagatcacaacatcgacgaactcctgtcgccgccgttcgactacctccctggtcacccgcggccggacgcgaagcacgacgaggtgatcttcgccgtgccgagggactcctctggccggcacttcgcggccaaggaacgcaaggctgggcgtgtgccggccatcgtcttcgagcaggagaatggccaagagggcggtaacaagcgcctcgtctcggtgccgtccaagcagatccgcaagctcgtcgaccacctcggacggtccttcttcctctcccgcctcttccgtctccaggtttggtccgagcaggccgggcagggggacctcatcgagagcgtccgcgtcctgccgcgcaaggtgcacttgcacgcaggcactgatgaacctctcaatgtgacattcatgagagcaccttcttcggcactgctcaaaatagatgttcctttaatgtacattggggaggacgcctcacctggcctcaggaaaggagcttacttcaacaccataaaacgaactgtcaagtttctctgccctgctgacatagtcccgccatacattgaagtggacctaagcgagttggatgtcgggcagaaactgctgatgcgcgatctgatagtccacccggcgctgaaattgcttcagtcgccagatcaacccatctgtagcattatagggtcaagagcccccgaccagaagaaagagaaatcaaaataactcgctccgctgtgttaactatttgcaacagaataaacttgttttgctatctatgcgagttattcagttcttgattatcccacctagaacgaatactactaggatgattttgtagcaaaagaccactgttttacctgaggaatggaagccagatgctacagataagaatacggcaggaatgtccaaatatgtttatgtgattttgttcacagaaacttcactgtgatgtattttatcagaaaatcgtttacctgttgacaatccgatggttttccattgtaggattgtgtacgtgattttctagtggtcaagcacatggaatttgcattgttgtgtcatgatctcg

SEQ ID NO: 69010 - protein, 294 aa, Triticum aestivum
  peptide (1)..(294): Ceres Seq. ID no. 15225087
PKDGHHHRRVAFFPPPKNPTPRDDQPAAAMLLRRPLQTLTLPLLRRHFSASAAAVSAPDHNIDELLSPPFDYLPGHPRPDAKHDEVIFAVPRDSSGRHFAAKERKAGRVPAIVFEQENGQEGGNKRLVSVPSKQIRKLVDHLGRSFFLSRLFRLQVWSEQAGQGDLIESVRVLPRKVHLHAGTDEPLNVTFMRAPSSALLKIDVPLMYIGEDASPGLRKGAYFNTIKRTVKFLCPADIVPPYIEVDLSELDVGQKLLMRDLIVHPALKLLQSPDQPICSIIGSRAPDQKKEKSK

SEQ ID NO: 69011 - protein, 265 aa, Triticum aestivum
  peptide (1)..(265): Ceres Seq. ID no. 15225088
MLLRRPLQTLTLPLLRRHFSASAAAVSAPDHNIDELLSPPFDYLPGHPRPDAKHDEVIFAVPRDSSGRHFAAKERKAGRVPAIVFEQENGQEGGNKRLVSVPSKQIRKLVDHLGRSFFLSRLFRLQVWSEQAGQGDLIESVRVLPRKVHLHAGTDEPLNVTFMRAPSSALLKIDVPLMYIGEDASPGLRKGAYFNTIKRTVKFLCPADIVPPYIEVDLSELDVGQKLLMRDLIVHPALKLLQSPDQPICSIIGSRAPDQKKEKSK

SEQ ID NO: 69012 - DNA, 1364 bp, Triticum aestivum
  misc_feature (1)..(1364): Ceres Seq. ID no. 13597061
agcatattcgtacgcgaccctgccgggaaagcggcttcccatctgcgggaagcggaaagaggaccggcttcgaagacggcggaggcgactcttgggtcgcgtcgtctccaatcttccactctgaccgactcccgaccgatctccgccggagcccgcacgacgccgtcgccgatggggttcgccgcccggccgctccccctgctcctgctgctcctggtcgccggcgcggccgccaccgaccagatcttcaccacctcaggtgtgccgttcgggaagaactcgcgcgagccgaggtaccgcgtggagttccaccccgtcgattcgccataccacccggagaatggccaggagtctgaaccaatgactgaccacgaggggagacagtacacctgctacctaccagtggaagaaaccaagaccatgaagtcgattgtcccacagaatgcaaccaatgttataatagaaagcgaacggaaagttaagccaaaggagccagatgaactgctggaggttctcaaagaccagtgcttctacaggcatgaaggttggtggtcttatgagttctgctattatgggaaaatccgacaggttcatgtagagaatgagaaggttatccaagagtatgttctaggtgaatatgaccctgatgcaaccgatgcttaccatgacaatcacacctccgaatctgctgatgaggaccacgtgaaagatacttctaagaggtatcatgtccacgtgtacacaaacgggactgtgtgtgatctcacagatataccacggtacacagaggttaggtttgtttgttccgagcccactgtactgatcagttcgataaaggagatatcttcctgcaagtatgttttaactgtccaaagcccaatgctctgcaagaacccgttgtttcagcaggaaaagcgcaccttcttcatccactgcaacgagtcgcttgcggaagcagaagctgaggccgccgaggacgacgactctctcccaaaagaagctcagatgtccatcgttccaaaccccgacgaattgcataactacgcagcttacgctacctgattgcccgccaatcacggtgccctcagctgatgaaagatgccgttattttggaagtacaacagcaagttggcaacatagtataactatcccctggcttgttctgtctgacgccaactagtggttacagggtactctttgagcagatatccattactgaaacagcttgagattaccttagaggaagattaagggcaaagagtgtcctgctgtactgtagtggtatataatttagtaaagggggtatttgagattcagtgacaggctttagacacatcaccaacaattttcctcttgaaatgttc

SEQ ID NO: 69013 - protein, 353 aa, Triticum aestivum
  peptide (1)..(353): Ceres Seq. ID no. 13597062
SIFVRDPAGKAASHLREAERGPASKTAEATLGSRRLQSSTLTDSRPISAGARTTPSPMGFAARPLPLLLLLLVAGAAATDQIFTTSGVPFGKNSREPRYRVEFHPVDSPYHPENGQESEPMTDHEGRQYTCYLPVEETKTMKSIVPQNATNVIIESERKVKPKEPDELLEVLKDQCFYRHEGWWSYEFCYYGKIRQVHVENEKVIQEYVLGEYDPDATDAYHDNHTSESADEDHVKDTSKRYHVHVYTNGTVCDLTDIPRYTEVRFVCSEPTVLISSIKEISSCKYVLTVQSPMLCKNPLFQQEKRTFFIHCNESLAEAEAEAAEDDDSLPKEAQMSIVPNPDELHNYAAYAT

SEQ ID NO: 69014 - protein, 296 aa, Triticum aestivum
  peptide (1)..(296): Ceres Seq. ID no. 13597063
MGFAARPLPLLLLLLVAGAAATDQIFTTSGVPFGKNSREPRYRVEFHPVDSPYHPENGQESEPMTDHEGRQYTCYLPVEETKTMKSIVPQNATNVIIESERKVKPKEPDELLEVLKDQCFYRHEGWWSYEFCYYGKIRQVHVENEKVIQEYVLGEYDPDATDAYHDNHTSESADEDHVKDTSKRYHVHVYTNGTVCDLTDIPRYTEVRFVCSEPTVLISSIKEISSCKYVLTVQSPMLCKNPLFQQEKRTFFIHCNESLAEAEAEAAEDDDSLPKEAQMSIVPNPDELHNYAAYAT

SEQ ID NO: 69015 - protein, 233 aa, Triticum aestivum
  peptide (1)..(233): Ceres Seq. ID no. 13597064
MTDHEGRQYTCYLPVEETKTMKSIVPQNATNVIIESERKVKPKEPDELLEVLKDQCFYRHEGWWSYEFCYYGKIRQVHVENEKVIQEYVLGEYDPDATDAYHDNHTSESADEDHVKDTSKRYHVHVYTNGTVCDLTDIPRYTEVRFVCSEPTVLISSIKEISSCKYVLTVQSPMLCKNPLFQQEKRTFFIHCNESLAEAEAEAAEDDDSLPKEAQMSIVPNPDELHNYAAYAT

SEQ ID NO: 69016 - DNA, 1262 bp, Triticum aestivum
  misc_feature (1)..(1262): Ceres Seq. ID no. 13598439
attttctcagaaaaccactacattctgcctctccgttctgttcttgccttgttctatttttcggctctgctgtacatggcgtcggctgcaggtgaggggaggagccgggtgctggtgataggcggcaccggctacatcggccgcttcatcgtcgccgccagcgcacgcgagggccaccccaccgccgtcctcgtccgcgacgccgcgcccgccgacccagccaaggccgccgtcctccagggattccgggatgccggcgtcgccatcgtcgagggtgatatgtatgatcatgagagcctggtgacagccattaaatcagcagatgttgtgatctcggccgtgggttatcaacagctaccggatcaaactctcattatctcggcaattaaggaagttgggcatgtaaagagattcttcccatcagagtatggtaatgatgtggatcgtaaccatgcagttgaacctgcaaagacagtattcggtgggaaagctcgtataaggcgtgccattgaggctgagggaattccctacacatatgtctcttccaacttctttgctggtcgtttcttgcgaagccttgcgcagattggggtcacggagcctccaactgagaaggttctcattatgggtgatggaaatgtaaaaggagtctttacggcggaagaagacgtgggaacctacactattaaagctgtagatgatccaaggaccctgaacaaaatcctgtatctgaggccaccaagcaacactttgtcccataacgagcttgtctcactctgggagaagaaacttggtaagacacttgagagggtgtacctcccagaagacgaactcctgaagaagattcaagggccgctgagtgtaccactggcaatcagccactctgtctggttgaagggggaccacactaactttgagatcgacccatcatttggagttgaagccactcagctttaccctgatgtgccttacattaccgtggatgaatacctaaataggttcctttaaactcctaaatcctatcgtccccaatattcatatactttgaataaatgttggaggttgtgtatttttattagaatggcacgtgaattacgtaatagtgtgagacctcaatcatgtgaggaatgcatcttgcattcccttgagcttagaatatataaaccgaggttgtataaatttggaaattttagcttgatggaacatgataccgtatgtaacagcccgggggtttacgccaaattagaaattgtttgttattt

SEQ ID NO: 69017 - protein, 335 aa, Triticum aestivum
  peptide (1)..(335): Ceres Seq. ID no. 13598440
IFSENHYILPLRSVLALFYFSALLYMASAAGEGRSRVLVIGGTGYIGRFIVAASAREGHPTAVLVRDAAPADPAKAAVLQGFRDAGVAIVEGDMYDHESLVTAIKSADVVISAVGYQQLPDQTLIISAIKEVGHVKRFFPSEYGNDVDRNHAVEPAKTVFGGKARIRRAIEAEGIPYTYVSSNFFAGRFLRSLAQIGVTEPPTEKVLIMGDGNVKGVFTAEEDVGTYTIKAVDDPRTLNKILYLRPPSNTLSHNELVSLWEKKLGKTLERVYLPEDELLKKIQGPLSVPLAISHSVWLKGDHTNFEIDPSFGVEATQLYPDVPYITVDEYLNRFL

SEQ ID NO: 69018 - protein, 310 aa, Triticum aestivum
  peptide (1)..(310): Ceres Seq. ID no. 13598441
MASAAGEGRSRVLVIGGTGYIGRFIVAASAREGHPTAVLVRDAAPADPAKAAVLQGFRDAGVAIVEGDMYDHESLVTAIKSADVVISAVGYQQLPDQTLIISAIKEVGHVKRFFPSEYGNDVDRNHAVEPAKTVFGGKARIRRAIEAEGIPYTYVSSNFFAGRFLRSLAQIGVTEPPTEKVLIMGDGNVKGVFTAEEDVGTYTIKAVDDPRTLNKILYLRPPSNTLSHNELVSLWEKKLGKTLERVYLPEDELLKKIQGPLSVPLAISHSVWLKGDHTNFEIDPSFGVEATQLYPDVPYITVDEYLNRFL

SEQ ID NO: 69019 - protein, 242 aa, Triticum aestivum
  peptide (1)..(242): Ceres Seq. ID no. 13598442
MYDHESLVTAIKSADVVISAVGYQQLPDQTLIISAIKEVGHVKRFFPSEYGNDVDRNHAVEPAKTVFGGKARIRRAIEAEGIPYTYVSSNFFAGRFLRSLAQIGVTEPPTEKVLIMGDGNVKGVFTAEEDVGTYTIKAVDDPRTLNKILYLRPPSNTLSHNELVSLWEKKLGKTLERVYLPEDELLKKIQGPLSVPLAISHSVWLKGDHTNFEIDPSFGVEATQLYPDVPYITVDEYLNRFL

SEQ ID NO: 69020 - DNA, 1467 bp, Triticum aestivum
  misc_feature (1)..(1467): Ceres Seq. ID no. 13584019
acaatatataccaggttaaaatctactgcgacggacgagtaacgaaaacggaacgacagatcctgcacgggccacataaaatccaacaatatctgaagccccgatctggatctgggggtgaggccgtgggagcgcgatggggatcagtccatcgtcgttgcgacccccatggagctcgcggcgggccgccacgaaggccgcgccccctgctgcgaccgagggcggcggcggcactcccgtccggctgccgctgccgcacgatgtggtcttcgacatcctgtcgtgggtgccggtgaagtcggcgtgccggttcaaatccgtgtgccgggagtggcgcgccctcatcaacgaccctgccttcgtcgccgcgcacaaggctcgcgcggagccgctcctcgccatcgccgccgactcgtgcgacgagccgtcgaccctgcggctcatcgacatggacggccacatcatcaaggtgatcaaaaactctcttccgattttaaggcttgtctgcagcagccctggcaacctgatgtgcgtcatcgggtatgcgctggggatagccagagtgctcaaccttgcaaccggagaggctgctgtgattgaactcacatctaactttatgggcttcggccgcgccgccccgtcgggcgcctacaagattgtctgcgttagtcccggcagcaccgagatcctcacggtaggagacggcgtgtgctggaggcaagctcagcccctgcctagcagcagcatctcgtataacagccgccctgtcgtggtcaggggtgtcatgtacttgattttagtttcacagctcaatggtgacagcgtgatctgcttcgatcttgagagcgaggagtggaagggggggatcagaggcccgccgagtagcgaacgtcagcggtgtgacgctagcttgcaggaactcaacggggccctgtgtatgctcctgccggaggtcggaaacatttaccatggaaccatgagcatatggctcctgatagattcacgcaagggggtctggatcaaggtgtactcgatccccatggacccgtctgcgtatagtctgatcacgcctttgaggatactaggtgataatggtaaactgctcttccatgtcacgcttagcttcgacgaattcgcagtgctgcaaatctacgaccctcgtcatcggacattcacggacgcgcccaaggtgcttgcgggtgacaacggcggcagtatcagcctttgcagcttgcatctggatagttttctgccggccaacgtctagtgctataaattgtacctatgtgctcgtcctggattgttttattgattgaaaaggttaatttctcaaaagaacaaggtcatactactcctttagagttgacggaaactggctatgtgtctccttggaaaacttctcaggtgggtaatattttgatgtggtgtggtgtgcttgacttgaaattggagtatcgtaatcctcag

SEQ ID NO: 69021 - protein, 376 aa, Triticum aestivum
  peptide (1)..(376): Ceres Seq. ID no. 13584020
MGISPSSLRPPWSSRRAATKAAPPAATEGGGGTPVRLPLPHDVVFDILSWVPVKSACRFKSVCREWRALINDPAFVAAHKARAEPLLAIAADSCDEPSTLRLIDMDGHIIKVIKNSLPILRLVCSSPGNLMCVIGYALGIARVLNLATGEAAVIELTSNFMGFGRAAPSGAYKIVCVSPGSTEILTVGDGVCWRQAQPLPSSSISYNSRPVVVRGVMYLILVSQLNGDSVICFDLESEEWKGGIRGPPSSERQRCDASLQELNGALCMLLPEVGNIYHGTMSIWLLIDSRKGVWIKVYSIPMDPSAYSLITPLRILGDNGKLLFHVTLSFDEFAVLQIYDPRHRTFTDAPKVLAGDNGGSISLCSLHLDSFLPANV

SEQ ID NO: 69022 - protein, 272 aa, Triticum aestivum
  peptide (1)..(272): Ceres Seq. ID no. 13584021
MDGHIIKVIKNSLPILRLVCSSPGNLMCVIGYALGIARVLNLATGEAAVIELTSNFMGFGRAAPSGAYKIVCVSPGSTEILTVGDGVCWRQAQPLPSSSISYNSRPVVVRGVMYLILVSQLNGDSVICFDLESEEWKGGIRGPPSSERQRCDASLQELNGALCMLLPEVGNIYHGTMSIWLLIDSRKGVWIKVYSIPMDPSAYSLITPLRILGDNGKLLFHVTLSFDEFAVLQIYDPRHRTFTDAPKVLAGDNGGSISLCSLHLDSFLPANV

SEQ ID NO: 69023 - protein, 246 aa, Triticum aestivum
  peptide (1)..(246): Ceres Seq. ID no. 13584022
MCVIGYALGIARVLNLATGEAAVIELTSNFMGFGRAAPSGAYKIVCVSPGSTEILTVGDGVCWRQAQPLPSSSISYNSRPVVVRGVMYLILVSQLNGDSVICFDLESEEWKGGIRGPPSSERQRCDASLQELNGALCMLLPEVGNIYHGTMSIWLLIDSRKGVWIKVYSIPMDPSAYSLITPLRILGDNGKLLFHVTLSFDEFAVLQIYDPRHRTFTDAPKVLAGDNGGSISLCSLHLDSFLPANV

SEQ ID NO: 69024 - DNA, 1381 bp, Triticum aestivum
  misc_feature (1)..(1381): Ceres Seq. ID no. 13598443
agagcaaaatcgcactctcgctttccaacacaactccctcggcagtatcgcctagtgtagcagcgcctccgttccggccagctctgctcgccgagccggccatgatgctgctgctcgcgcgcagcctccgctcccgcgtccggccccccctcgcctccgccgttagcgccgctcccttctcatcggtatcggcggccgcggcggaggcagagcgggcggtgcgggacgggcccaggaacgactggacccgtcccgagatccaggccatctacgactccccgctcctcgacctcctcttccacggggctcaggtccataggaatgtccataaatttagagaagtgcagcaatgcacacttctttcaataaagactggtgggtgcagcgaagattgttcatactgcccacagtcttcaagatacagtactggattgaaggccgagaaattaatgaagaaagatgctgtcctagaagcagcaaaaaaggcaaagcaggctgggagcacccggttttgcatgggagccgcatggagagagacaattggcaggaaaacaaatttcaaccagattcttgaatatgtcaaggacataagaggtatgggcatggaggtctgttgcaccctgggtatgctagagaaacaacaagctgaagaactcaagaaggctggacttacagcttataatcataacctagatacatcaagggaatattaccccaacattatttctacaagatcgtacgatgatagattacagactcttcagcacgtccgtgaagctggaataagcgtctgctcaggtggaattattggtcttggagaggcggaggaagaccgtgtagggctgttgcatacactggccactttgccaacacacccagagagcgttcctatcaatgcattgattgctgtcaaaggcacgcctcttcaggatcagaagcctgtagagatatgggaaatgatccgcatgattgccagcgctcggattgtgatgccaaaggcaatggtgagactttcggcagggcgagtacggttctccatgccagaacaagctctctgctttctcgctggggccaactcgatcttcgccggtgaaaagctcctgacaactgcgaacaatgactttgatgcggaccaggcaatgttcaagatccttggcctgattcccaaggctccaaactttggcgatgaagaggccacggtagcagcacccacggagagatgtgagcaagccgcttcgatgtaaaatgccgctatagattctcaagaccatatccggtgcaaaactggcaccattatctccagctagagctttgtactgtagagatcatgatattttgtagtaacttcagattcatcgaaataaaatagggggttctctgc

SEQ ID NO: 69025 - protein, 413 aa, Triticum aestivum
  peptide (1)..(413): Ceres Seq. ID no. 15222344
SKIALSLSNTTPSAVSPSVAAPPFRPALLAEPAMMLLLARSLRSRVRPPLASAVSAAPFSSVSAAAAEAERAVRDGPRNDWTRPEIQAIYDSPLLDLLFHGAQVHRNVHKFREVQQCTLLSIKTGGCSEDCSYCPQSSRYSTGLKAEKLMKKDAVLEAAKKAKQAGSTRFCMGAAWRETIGRKTNFNQILEYVKDIRGMGMEVCCTLGMLEKQQAEELKKAGLTAYNHNLDTSREYYPNIISTRSYDDRLQTLQHVREAGISVCSGGIIGLGEAEEDRVGLLHTLATLPTHPESVPINALIAVKGTPLQDQKPVEIWEMIRMIASARIVMPKAMVRLSAGRVRFSMPEQALCFLAGANSIFAGEKLLTTANNDFDADQAMFKILGLIPKAPNFGDEEATVAAPTERCEQAASM

SEQ ID NO: 69026 - protein, 380 aa, Triticum aestivum
  peptide (1)..(380): Ceres Seq. ID no. 15222345
MMLLLARSLRSRVRPPLASAVSAAPFSSVSAAAAEAERAVRDGPRNDWTRPEIQAIYDSPLLDLLFHGAQVHRNVHKFREVQQCTLLSIKTGGCSEDCSYCPQSSRYSTGLKAEKLMKKDAVLEAAKKAKQAGSTRFCMGAAWRETIGRKTNFNQILEYVKDIRGMGMEVCCTLGMLEKQQAEELKKAGLTAYNHNLDTSREYYPNIISTRSYDDRLQTLQHVREAGISVCSGGIIGLGEAEEDRVGLLHTLATLPTHPESVPINALIAVKGTPLQDQKPVEIWEMIRMIASARIVMPKAMVRLSAGRVRFSMPEQALCFLAGANSIFAGEKLLTTANNDFDADQAMFKILGLIPKAPNFGDEEATVAAPTERCEQAASM

SEQ ID NO: 69027 - protein, 379 aa, Triticum aestivum
  peptide (1)..(379): Ceres Seq. ID no. 15222346
MLLLARSLRSRVRPPLASAVSAAPFSSVSAAAAEAERAVRDGPRNDWTRPEIQAIYDSPLLDLLFHGAQVHRNVHKFREVQQCTLLSIKTGGCSEDCSYCPQSSRYSTGLKAEKLMKKDAVLEAAKKAKQAGSTRFCMGAAWRETIGRKTNFNQILEYVKDIRGMGMEVCCTLGMLEKQQAEELKKAGLTAYNHNLDTSREYYPNIISTRSYDDRLQTLQHVREAGISVCSGGIIGLGEAEEDRVGLLHTLATLPTHPESVPINALIAVKGTPLQDQKPVEIWEMIRMIASARIVMPKAMVRLSAGRVRFSMPEQALCFLAGANSIFAGEKLLTTANNDFDADQAMFKILGLIPKAPNFGDEEATVAAPTERCEQAASM

SEQ ID NO: 69028 - DNA, 1305 bp, Triticum aestivum
  misc_feature (1)..(1305): Ceres Seq. ID no. 15179764
aaagccggtcagacgacgtctgaagcagaggaggaggagacaggattgaggaacccgcgagacgaagcaggaagccagaggcgctctccaatccaagcatgtaagcgagctaatcgatcctcttccgttcttccgcgcatcctgcgattaaccctcacgctgtcttacccatgtgccatccagtccgccggtgtttctatttctcaagaatttgcgttctttttgttcttgttggcaggaggtcgtcgattaaccggccgccgacgccgaacgatgacgacgaggaggaggaggaggtagggaaggaggcttctctcggagacatcatcaacctcaagttggtggagagcggcgagaaggagcggctgatggagcttctccgggagcggctcgtagagtgcggctggagggatgacatgaaggctctctgcagggcttatgcaaggaaaaagggaagaaataatgtaacattagatgatcttattcatgttattactccaaaaggaagaggtcagtgattttcatttgtccagttaatttatttctggttgcaagaggtatgttacttagttccagcgcacattagatacgagttggaagaattgttataaaataatataaccatggcttgcatatgtccatctttgcgtaagtgtcaagcaagggaaaaagtagtgcctaaactcccaagtcaattgcttccttactgtaacaggatctgggacaaaattttggagaacgttctttttttgcacctgcttctcgcctcctatgtttgccatagatttgtgcattttttgtcaataacaatgatgctaagccctaagcaaatgtttctttcatttgtgttggttcttgttgcacgattatcattttctcctgcttctgaaacagcctcggtgcccgatgcggtgaaggcagagctgctgcagcgcatccgatcctttctcatgtcttcctcgctttggtagcccatgaatcacgccgatcggaaggcacgtgtaggaagcttgaagcatcgatcttgaacgcgtgacacttcagagaagcagcaaatatcgacataaaacggatctggtgctgtggatgtgtttcctggtcaggcatgtggttggccctgttctctgactgcaccatcaccacactgtatttgtagcgctacagtgcgcggtctcttcgatgccacttggtaatcttaattagagaactcagaatcaatgcgtctggtagtactcgcgtatctcatgtcaaacctgattgagtgatcctcatgagggaccaacaagaacagacgccacttttgtc

SEQ ID NO: 69029 - protein, 115 aa, Triticum aestivum
  peptide (1)..(115): Ceres Seq. ID no. 15179765
MACICPSLRKCQAREKVVPKLPSQLLPYCNRIWDKILENVLFLHLLLASYVCHRFVHFLSITMMLSPKQMFLSFVLVLVARLSFSPASETASVPDAVKAELLQRIRSFLMSSSLW

SEQ ID NO: 69030 - protein, 115 aa, Triticum aestivum
  peptide (1)..(115): Ceres Seq. ID no. 15179766
MCHPVRRCFYFSRICVLFVLVGRRSSINRPPTPNDDDEEEEEVGKEASLGDIINLKLVESGEKERLMELLRERLVECGWRDDMKALCRAYARKKGRNNVTLDDLIHVITPKGRGQ

SEQ ID NO: 69031 - protein, 99 aa, Triticum aestivum
  peptide (1)..(99): Ceres Seq. ID no. 15179767
KAGQTTSEAEEEETGLRNPRDEAGSQRRSPIQACKRANRSSSVLPRILRLTLTLSYPCAIQSAGVSISQEFAFFLFLLAGGRRLTGRRRRTMTTRRRRR

SEQ ID NO: 69032 - DNA, 644 bp, Triticum aestivum
  misc_feature (1)..(644): Ceres Seq. ID no. 13598755
ccccatcgccgcctcatcgccgccaggagttcgagttccccccgaaccgtcgccatggctgccgcaccagtcatgtgagcaggccaagtcccggcgcagaatctactgcgcttcattctcgattaaattattcgaatcgtttctccgttgtgttgtttttaacttggtgtttgtttctctactccaacgtgcgcagctccccgaaagaaaatctgcccccttcgctgacctccacctccgagccccctccactcttcgacggcaccaccaggttgtatgttgcatatcactgcccatatgcgcagcgcgcttggattgccaggaactacaagggtttgcaagacaagatcaagatagtcgggatcgatctcgcagacaggccggcttggtacaaggagaaggtttacccacagaacaaggtgccttcactggagcataacaacgaggtgaaaggagaaagcttggatttggtcaagtacattgacagcaatttcgatggcccagcattgctccccgatgattctgcaaagaagcagtttgccgaggagctgcttgtgtacatcgatgagttcaataaagcactatactcatccataacctccaagggagatgtggcagaggaaactgttgctgcgctggataaa

SEQ ID NO: 69033 - protein, 214 aa, Triticum aestivum
  peptide (1)..(214): Ceres Seq. ID no. 13598756
PSPPHRRQEFEFPPNRRHGCRTSHVSRPSPGAESTALHSRLNYSNRFSVVLFLTWCLFLYSNVRSSPKENLPPSLTSTSEPPPLFDGTTRLYVAYHCPYAQRAWIARNYKGLQDKIKIVGIDLADRPAWYKEKVYPQNKVPSLEHNNEVKGESLDLVKYIDSNFDGPALLPDDSAKKQFAEELLVYIDEFNKALYSSITSKGDVAEETVAALDK

SEQ ID NO: 69034 - protein, 145 aa, Triticum aestivum
  peptide (1)..(145): Ceres Seq. ID no. 13598757
PIAASSPPGVRVPPEPSPWLPHQSCEQAKSRRRIYCASFSIKLFESFLRCVVFNLVFVSLLQRAQLPERKSAPFADLHLRAPSTLRRHHQVVCCISLPICAARLDCQELQGFARQDQDSRDRSRRQAGLVQGEGLPTEQGAFTGA

SEQ ID NO: 69035 - DNA, 2084 bp, Triticum aestivum
  misc_feature (1)..(2084): Ceres Seq. ID no. 13655463
acgcgaaagcgaagccctgttgagattaaagggggaaaataaacccaaaccactcgccgaacagtacaccaacccccaccccccatccccgccgcccctgaccggcgccatggccgccgccggagagcggcgcctcctcgtcggcctcctcctcctggcccttatggtctcggcgcactgcctggacggcgcgggccaccacggcccgcgcgtgaagcggcgccgcaagaagcgcgagatccactcccccgtcaagacggtggtggtggtggtcatggagaaccgcagcttcgaccacgtcctcggctggctccgcgcctcccgccccgacatcgacgggctcaccggcacggagtccaaccgcctcaacgcgtccgacccctcctccccggagatcttcgtcaccgacaaggccggctacgtcgactcggaccccggccacggcttcgaggacatccgcgagcagatcttcggctccgccgacacctccgccgtgccgccccccatgtcgggcttcgcgcagaacgcgcgcgggatgggcctcggcatggcgcagaacgtcatgagcggattcgcgcccgactccgtccccgtctacgccgccctcgccgacgagttcgccgtcttcgaccgctggttcgcgtcggtgcccacctccacccagcccaaccggctcttcgtccactcggccacctcccacggcctcaccttcaacgcgcgcaaggacctcatcaacggcttcccgcagaagaccatcttcgacagcctcgaggaggacggcctctccttcggcatctactaccagaacatccccgccacgctcttctaccagagcctgcgccgcctcaagcacctcctcaagttccaccagtacagcctcaggttcaagctcgacgccgccaggggcaagctgcccaattacgtcgtcatcgagcagcgctacttcgattgcaaggagttccccgccaacgacgaccacccgtcgcacgacgttgccaggggacagaggtttgtcaaggaggtctacgagacgctgcgggcgagcccgcagtggaacgagacggctctcatcatcacctatgatgagcatggtggcttctatgaccatgtccccacgcccgtcgtcaaagtgcctcagcctgatgggattattggccctgacccttactacttcaagtttgatcggctcggggtgcgcgtgcccagcttcctcatctcaccctgggttgagaagggcaccgtgatccatgaaccaaatggtcctgagggaacctcacaatatgagcattcatccatccctgcgacagtaaagaagctatttaatttacgtgctaactacctgacaaagagggattcatgggctgggacctttgagagctacctcaaagtccgaaagacaccaagaactgattgtccagagaaactcccagaggttacaaagtccctgcgaccatttggtgctaatgaagataaatctctatcggagtttcaagtggagttgattcaacttgcctctcagctcaatggtgaccacgtgctcaacagctatccggatattggcaagacgatgagtgtaggcgaagcaaaccgctacgcagaggatgctgtctccagattcctggaggctggaaggatcgctcttagggctggtgcaaacgaatctgctctggtgacaatgaggcccgcgctcaccagcagagccgcaatgtccaccggcttgtcatctgaactctgatggactgttactggatactgccaacagattctgcatcacgattaccggcgctacatgggctgcaagagtacggtagcatttatgtaatgggtattagatcttgcacatggattttttgtacatatacgccatgatacttcgtatctgaagcttacttcagcgggccctcgtggtttacgctcaggagtatcacccaacgacgcaccagatgcatgccaaattccccttccggataagctgtagctggtgttgtacctattcagctctctactgtacctgcttgtatagcagttgaactgcatcgtaaggagtattgtactatgaatgattgttggatttggccacctgt

SEQ ID NO: 69036 - protein, 577 aa, Triticum aestivum
  peptide (1)..(577): Ceres Seq. ID no. 15219740
RESEALLRLKGENKPKPLAEQYTNPHPPSPPPLTGAMAAAGERRLLVGLLLLALMVSAHCLDGAGHHGPRVKRRRKKREIHSPVKTVVVVVMENRSFDHVLGWLRASRPDIDGLTGTESNRLNASDPSSPEIFVTDKAGYVDSDPGHGFEDIREQIFGSADTSAVPPPMSGFAQNARGMGLGMAQNVMSGFAPDSVPVYAALADEFAVFDRWFASVPTSTQPNRLFVHSATSHGLTFNARKDLINGFPQKTIFDSLEEDGLSFGIYYQNIPATLFYQSLRRLKHLLKFHQYSLRFKLDAARGKLPNYVVIEQRYFDCKEFPANDDHPSHDVARGQRFVKEVYETLRASPQWNETALIITYDEHGGFYDHVPTPVVKVPQPDGIIGPDPYYFKFDRLGVRVPSFLISPWVEKGTVIHEPNGPEGTSQYEHSSIPATVKKLFNLRANYLTKRDSWAGTFESYLKVRKTPRTDCPEKLPEVTKSLRPFGANEDKSLSEFQVELIQLASQLNGDHVLNSYPDIGKTMSVGEANRYAEDAVSRFLEAGRIALRAGANESALVTMRPALTSRAAMSTGLSSEL

SEQ ID NO: 69037 - protein, 541 aa, Triticum aestivum
  peptide (1)..(541): Ceres Seq. ID no. 15219741
MAAAGERRLLVGLLLLALMVSAHCLDGAGHHGPRVKRRRKKREIHSPVKTVVVVVMENRSFDHVLGWLRASRPDIDGLTGTESNRLNASDPSSPEIFVTDKAGYVDSDPGHGFEDIREQIFGSADTSAVPPPMSGFAQNARGMGLGMAQNVMSGFAPDSVPVYAALADEFAVFDRWFASVPTSTQPNRLFVHSATSHGLTFNARKDLINGFPQKTIFDSLEEDGLSFGIYYQNIPATLFYQSLRRLKHLLKFHQYSLRFKLDAARGKLPNYVVIEQRYFDCKEFPANDDHPSHDVARGQRFVKEVYETLRASPQWNETALIITYDEHGGFYDHVPTPVVKVPQPDGIIGPDPYYFKFDRLGVRVPSFLISPWVEKGTVIHEPNGPEGTSQYEHSSIPATVKKLFNLRANYLTKRDSWAGTFESYLKVRKTPRTDCPEKLPEVTKSLRPFGANEDKSLSEFQVELIQLASQLNGDHVLNSYPDIGKTMSVGEANRYAEDAVSRFLEAGRIALRAGANESALVTMRPALTSRAAMSTGLSSEL

SEQ ID NO: 69038 - protein, 523 aa, Triticum aestivum
  peptide (1)..(523): Ceres Seq. ID no. 15219742
MVSAHCLDGAGHHGPRVKRRRKKREIHSPVKTVVVVVMENRSFDHVLGWLRASRPDIDGLTGTESNRLNASDPSSPEIFVTDKAGYVDSDPGHGFEDIREQIFGSADTSAVPPPMSGFAQNARGMGLGMAQNVMSGFAPDSVPVYAALADEFAVFDRWFASVPTSTQPNRLFVHSATSHGLTFNARKDLINGFPQKTIFDSLEEDGLSFGIYYQNIPATLFYQSLRRLKHLLKFHQYSLRFKLDAARGKLPNYVVIEQRYFDCKEFPANDDHPSHDVARGQRFVKEVYETLRASPQWNETALIITYDEHGGFYDHVPTPVVKVPQPDGIIGPDPYYFKFDRLGVRVPSFLISPWVEKGTVIHEPNGPEGTSQYEHSSIPATVKKLFNLRANYLTKRDSWAGTFESYLKVRKTPRTDCPEKLPEVTKSLRPFGANEDKSLSEFQVELIQLASQLNGDHVLNSYPDIGKTMSVGEANRYAEDAVSRFLEAGRIALRAGANESALVTMRPALTSRAAMSTGLSSEL

SEQ ID NO: 69039 - DNA, 1736 bp, Triticum aestivum
  misc_feature (1)..(1736): Ceres Seq. ID no. 12593464
actgctattgttggccatggccgcctatgctgggctgttgcgcgtcgccctcgtcctcatcgccgccgccgcgacctgggcggcggcgctagacgacccggcggggcttctgcgacgggccaaggaggcggagttcatggactggatggtgggggtgcgccggcggatccacgagaaccctgagctcggctacgaggagtttgacaccagtgagctcgtgcggcgcgagctcgatgccatggggatcccctacaggcatcccttcgcggtcaccggcgtcgtcgccaccgtcggcacaggcggcccgcccttcgtcgcgcttcgggccgacatggacgcgctccctatgcaggaaagcgtggaatgggaacataagagcaaagtgcctgggaagatgcatggatgtggccatgatgcacatgttgctatgctattgggttctgctaagattcttcaggagcaccgtgacgagttgaagggtactgtagcccttcttttccaaccagctgaggaaggtggtggtggagccaagaaaatggtagaagccggagctgtggaaaacatagaggtcatgtttggacttcatgtagctgacagtgtgccgattggtgtgctggcatccagacctgggcctataatggcagggagtggattctttgaggcagtaataagtggaaagggagggcatgctgcacttcctcatcacactattgatccaatactggctgcatccaatgttattgtaagccttcagcaacttgtttcccgagaagctgaccccttggactcacaggtagtaacggttggaaagtttcaaggtggtggagccttcaatgttatccctgattcagtgacaataggtggtaccttccgagcctttatgaaggagagttttaatcaattgaagcagcgaattgaagaggtcatagtcacacaggcatctgtccagcgctgcagcgcagttgtggacttccttgacaaagataagcctttcttccctccaacaatcaacaatcctgagcttcacgatttctttgcgaaggtgtgcagtgagatggttggccccaacaacgtgagagagaagcagccactgatgggtgccgaggacttctccttctacaccgaggccgttcccaagacatactactactttgtggggatgctcaacgagactcgtggaccgcaggcgcctcatcactccccctacttcaccatcaacgaggatgcactgccctacggtgcagccatgcaagcatcgttggctgctcgctatctgcttgagcaccagcccgctaccgctgctaaggtggaacctcgcgacgagctgtagatggtgtccatgttgaatgaaacggtggaaggacaaggacgtgcacagcaattgttggttaaaaagggacgaggacctctgtatcgccaggtgattatgcaactgtttgtacataatttcctgatttcagcgcattccaagcgagcagatgaccttgtgacggcattgaagcactgcgaacatgtgtttctgtggtaggtctcgttcgttttcgcatctgcacttatccgggtctatgtgtaatctttaagtgcagtggtgagacaaaataaaacaccccgtggatgatgaatgtattgggttgttaagagttgggacagacaggaattttatagcatgattccatcctttagtagcaagaaatggtcgaaaatatattccagcaaaaagaaaaaagaaacggttg

SEQ ID NO: 69040 - protein, 442 aa, Triticum aestivum
  peptide (1)..(442): Ceres Seq. ID no. 12593465
LLLLAMAAYAGLLRVALVLIAAAATWAAALDDPAGLLRRAKEAEFMDWMVGVRRRIHENPELGYEEFDTSELVRRELDAMGIPYRHPFAVTGVVATVGTGGPPFVALRADMDALPMQESVEWEHKSKVPGKMHGCGHDAHVAMLLGSAKILQEHRDELKGTVALLFQPAEEGGGGAKKMVEAGAVENIEVMFGLHVADSVPIGVLASRPGPIMAGSGFFEAVISGKGGHAALPHHTIDPILAASNVIVSLQQLVSREADPLDSQVVTVGKFQGGGAFNVIPDSVTIGGTFRAFMKESFNQLKQRIEEVIVTQASVQRCSAVVDFLDKDKPFFPPTINNPELHDFFAKVCSEMVGPNNVREKQPLMGAEDFSFYTEAVPKTYYYFVGMLNETRGPQAPHHSPYFTINEDALPYGAAMQASLAARYLLEHQPATAAKVEPRDEL

SEQ ID NO: 69041 - protein, 437 aa, Triticum aestivum
  peptide (1)..(437): Ceres Seq. ID no. 12593466
MAAYAGLLRVALVLIAAAATWAAALDDPAGLLRRAKEAEFMDWMVGVRRRIHENPELGYEEFDTSELVRRELDAMGIPYRHPFAVTGVVATVGTGGPPFVALRADMDALPMQESVEWEHKSKVPGKMHGCGHDAHVAMLLGSAKILQEHRDELKGTVALLFQPAEEGGGGAKKMVEAGAVENIEVMFGLHVADSVPIGVLASRPGPIMAGSGFFEAVISGKGGHAALPHHTIDPILAASNVIVSLQQLVSREADPLDSQVVTVGKFQGGGAFNVIPDSVTIGGTFRAFMKESFNQLKQRIEEVIVTQASVQRCSAVVDFLDKDKPFFPPTINNPELHDFFAKVCSEMVGPNNVREKQPLMGAEDFSFYTEAVPKTYYYFVGMLNETRGPQAPHHSPYFTINEDALPYGAAMQASLAARYLLEHQPATAAKVEPRDEL

SEQ ID NO: 69042 - protein, 397 aa, Triticum aestivum
  peptide (1)..(397): Ceres Seq. ID no. 12593467
MDWMVGVRRRIHENPELGYEEFDTSELVRRELDAMGIPYRHPFAVTGVVATVGTGGPPFVALRADMDALPMQESVEWEHKSKVPGKMHGCGHDAHVAMLLGSAKILQEHRDELKGTVALLFQPAEEGGGGAKKMVEAGAVENIEVMFGLHVADSVPIGVLASRPGPIMAGSGFFEAVISGKGGHAALPHHTIDPILAASNVIVSLQQLVSREADPLDSQVVTVGKFQGGGAFNVIPDSVTIGGTFRAFMKESFNQLKQRIEEVIVTQASVQRCSAVVDFLDKDKPFFPPTINNPELHDFFAKVCSEMVGPNNVREKQPLMGAEDFSFYTEAVPKTYYYFVGMLNETRGPQAPHHSPYFTINEDALPYGAAMQASLAARYLLEHQPATAAKVEPRDEL

SEQ ID NO: 69043 - DNA, 1422 bp, Triticum aestivum
  misc_feature (1)..(1422): Ceres Seq. ID no. 13591068
ctagaacatcctaatcgaaaaatatatctacccgtagcgtgcccacgaaccacaccacagcacaccaaccgcgcgccactgatccatcaactccactccactagctacgtaccttccgaccgagcagccagagagatggagaggatggtgatgaggctggtgaggaacaagcagtccctccgccagctgcaaggggccgccgccggcggcctagcgtcgtcgtcctccgcctcctcgaccgccggcgccgccgcgtcctccttctccaccctgcagcagcagcaggaggaccaccccggagtgctcaacatcagggacaccgccgcccacctcatcggccggacgccgctggtgtacctgaacaaggtgacggaggggtgcggcgcccgcgtcgccgccaagctcgagttcctccagccttccttcagcgtcaaggacaggccagcaatctccatgatcgaagacgcggagaagaaggggctgataaccccaggcaagacgacgctgatcgagcccacatccgggaacatgggcatcggcctggcgttcatggcagcactcaaagggtacgagctcgtgctgacgatgccatcatacaccagcctcgagaggagggtggtcatgaaggccttcggtgcgcagctcgtgctcactgacccggccaaggggatgggaggcaccgtcaggaaagcaacccagctctatgagaaccatcccagcgccttcatgctccagcagttcgagaatcccgccaacgtccaggtgcactacgagactaccggtccggagatatgggaggacacgctcgggcaggtcgacatcttcgtcatgggaatcggcagcggcggcaccgtcaccggcgtcggcaagtacctcaaggagaagaaccccaacgcaaagatctatggagttgaacctgccgaagcaaatgtcctgaacggtggcaagccagggcctcacctcatcactggaaatggagttggatttaagccagatattttggatatggatataatggagaaggttctagaggtgaaaagcgaggacgccgttacgatggcgcaacagttggcactgcaggagggcctgctggtggggatatcatcaggagccaacacagtggctgcgatcgaactcgcaaagaggccagaaaacaaagggaagctcatcgtgactgttcatccgagcgcgggagagcgatacttatcgtcggcgctattcgagggtctgaggaaggaggctgaggcaatgcagccagtgccagtggactaagttggagctatacaatgcatgtagaataaattcactgcaaccatgttgcaagtgctagtcatacctcatttgtgattcttcagtttgttcatcatgtggaagtcgtgtaaacaacagttcaaatggttgaaaaaaggactttacctctcc

SEQ ID NO: 69044 - protein, 423 aa, Triticum aestivum
  peptide (1)..(423): Ceres Seq. ID no. 13591069
LEHPNRKIYLPVACPRTTPQHTNRAPLIHQLHSTSYVPSDRAAREMERMVMRLVRNKQSLRQLQGAAAGGLASSSSASSTAGAAASSFSTLQQQQEDHPGVLNIRDTAAHLIGRTPLVYLNKVTEGCGARVAAKLEFLQPSFSVKDRPAISMIEDAEKKGLITPGKTTLIEPTSGNMGIGLAFMAALKGYELVLTMPSYTSLERRVVMKAFGAQLVLTDPAKGMGGTVRKATQLYENHPSAFMLQQFENPANVQVHYETTGPEIWEDTLGQVDIFVMGIGSGGTVTGVGKYLKEKNPNAKIYGVEPAEANVLNGGKPGPHLITGNGVGFKPDILDMDIMEKVLEVKSEDAVTMAQQLALQEGLLVGISSGANTVAAIELAKRPENKGKLIVTVHPSAGERYLSSALFEGLRKEAEAMQPVPVD

SEQ ID NO: 69045 - protein, 378 aa, Triticum aestivum
  peptide (1)..(378): Ceres Seq. ID no. 13591070
MERMVMRLVRNKQSLRQLQGAAAGGLASSSSASSTAGAAASSFSTLQQQQEDHPGVLNIRDTAAHLIGRTPLVYLNKVTEGCGARVAAKLEFLQPSFSVKDRPAISMIEDAEKKGLITPGKTTLIEPTSGNMGIGLAFMAALKGYELVLTMPSYTSLERRVVMKAFGAQLVLTDPAKGMGGTVRKATQLYENHPSAFMLQQFENPANVQVHYETTGPEIWEDTLGQVDIFVMGIGSGGTVTGVGKYLKEKNPNAKIYGVEPAEANVLNGGKPGPHLITGNGVGFKPDILDMDIMEKVLEVKSEDAVTMAQQLALQEGLLVGISSGANTVAAIELAKRPENKGKLIVTVHPSAGERYLSSALFEGLRKEAEAMQPVPVD

SEQ ID NO: 69046 - protein, 375 aa, Triticum aestivum
  peptide (1)..(375): Ceres Seq. ID no. 13591071
MVMRLVRNKQSLRQLQGAAAGGLASSSSASSTAGAAASSFSTLQQQQEDHPGVLNIRDTAAHLIGRTPLVYLNKVTEGCGARVAAKLEFLQPSFSVKDRPAISMIEDAEKKGLITPGKTTLIEPTSGNMGIGLAFMAALKGYELVLTMPSYTSLERRVVMKAFGAQLVLTDPAKGMGGTVRKATQLYENHPSAFMLQQFENPANVQVHYETTGPEIWEDTLGQVDIFVMGIGSGGTVTGVGKYLKEKNPNAKIYGVEPAEANVLNGGKPGPHLITGNGVGFKPDILDMDIMEKVLEVKSEDAVTMAQQLALQEGLLVGISSGANTVAAIELAKRPENKGKLIVTVHPSAGERYLSSALFEGLRKEAEAMQPVPVD

SEQ ID NO: 69047 - DNA, 1096 bp, Triticum aestivum
  misc_feature (1)..(1096): Ceres Seq. ID no. 13656068
gagcccaatccgggcactggaaatttctagcatcgcgacggtttaaggaagcatcgcgacgtctaatcgtggcccccctctaacaccttttgccgagacgagattctcttccgcagccgcccccgtcgacgtcgccgtcgccgtcttttgccaccgcgatgcctcggtattattgcgattactgcgacacttatctgacccatgactcgccatctgtccgtaagcaacacaatgctggatataaacacaaggcaaatgttcgtaactactatcagcaattcgaggagcagcaaactcaaagtttgattgatcaaaggataaaggaacacctgggacaagctgcagcgttccaagttggcgctcctttcaaccaacatcttcttcaatatccaggaaatatgccccgtccccgtcttccgattctgcccacacccatgatgcaacatggttatcctcaacatcaacaacctggtgggccatttgcaaggcctcctattttaccagttcctggggctccaggttatcctggtgctccaaccatgccgcagcacgggggccctcctggttcaatgcctatgcaggtggcacctcccccaaggcctccgacactaccacctccaacatttggggccccaggtgcacccatgtccaacaacgcatcacctccaggtcctccaccgatgtatcaaccaaatcaaccaccaactgcaggctcaacttctggcgctccacccctggccccagcggcccctccacaggctgcattctcctatgcacaatcgaatgaaggcaaccactgatctgttccttggtggttatcaaatgagattcgaagaacagccgtaacttggaagttgatgcttcctgcctgtctgtctcctgaatttcggaggcagtctgtctcttgaaatttggagaattgttaagaaaggcttcctgcagtagtattttttgtattttaggtggtgtaacctttacttcttaatacaccgacttcgtattagtttcttgcccttgaaacttgataatggatataacccatggatggcgtacttgatgtagtacatatttgtcattaaaacaaatttatttgttg

SEQ ID NO: 69048 - protein, 213 aa, Triticum aestivum
  peptide (1)..(213): Ceres Seq. ID no. 13656069
MPRYYCDYCDTYLTHDSPSVRKQHNAGYKHKANVRNYYQQFEEQQTQSLIDQRIKEHLGQAAAFQVGAPFNQHLLQYPGNMPRPRLPILPTPMMQHGYPQHQQPGGPFARPPILPVPGAPGYPGAPTMPQHGGPPGSMPMQVAPPPRPPTLPPPTFGAPGAPMSNNASPPGPPPMYQPNQPPTAGSTSGAPPLAPAAPPQAAFSYAQSNEGNH

SEQ ID NO: 69049 - protein, 133 aa, Triticum aestivum
  peptide (1)..(133): Ceres Seq. ID no. 13656070
MPRPRLPILPTPMMQHGYPQHQQPGGPFARPPILPVPGAPGYPGAPTMPQHGGPPGSMPMQVAPPPRPPTLPPPTFGAPGAPMSNNASPPGPPPMYQPNQPPTAGSTSGAPPLAPAAPPQAAFSYAQSNEGNH

SEQ ID NO: 69050 - protein, 133 aa, Triticum aestivum
  peptide (1)..(133): Ceres Seq. ID no. 13656071
MVILNINNLVGHLQGLLFYQFLGLQVILVLQPCRSTGALLVQCLCRWHLPQGLRHYHLQHLGPQVHPCPTTHHLQVLHRCINQINHQLQAQLLALHPWPQRPLHRLHSPMHNRMKATTDLFLGGYQMRFEEQP

SEQ ID NO: 69051 - DNA, 1148 bp, Triticum aestivum
  misc_feature (1)..(1148): Ceres Seq. ID no. 12617960
ggagatctttgcgtgaccgcgcagccaagggggaaaagaaagaaaaggaaaaccaaccagaagaaaagctcgggaggagagcgtggggggactagggagcatggcggagcacaaggaggagccggtggcggagtccatgatggacaagatctccgacaagttccacggtggggactcgtcgtcgtcgtcctcggactcggacgacgagaagaaggggtcggcggcgggcgtcaaggccaagatctaccgcctcttcggccgcgagaagcccgtccacgccgtcctcggcggcggcaagcctgctgatcttgttctatggaggaacaagaaggtctccggaggggtgcttgctggcgctactgccatctggctgctgttcgaggtcatggagtaccatctgctcaccttggtgggccactgcctcatcctctccctggcaaccctcttcctctattccaatgtctgcattttcatccacaagtctcccccgaacatccctgaggtgaaaatcccggaggacatgactgtaaacattgcactatcactgcggcatgagatcaaccggggcttctttaccttgagagagactggtcatggtcgtgatctgaagaaattcctcattgtgattggagggctctggcttctttctgttcttgggagctactgcaactttttgacactgtcatatatagtctttgtggtgctgtacactgtgccagttctgtatgagaagtacgatgacaaggtggatgcttttggtgagaaggccatgatcgaattgaagaagtattatgccatctttgaagagaaggtcctgtcgaagatcccgaagaacaagaagcactagatcacaagagttaccctgccgcgtattgccatctgtgttaatctcaacttgttgcctcattttgaaggatggttctgtgtcattgcgtctgtctttagttaatactacttgatactagtacatatagatgtggtgtgctaatccttttgtgaagtggagtcatgccagctgaagattgttgatcttcttttttttgtttatttttcaactttcagcatggttactctatntgggagccggaaatgttatggcattacctgttntagtgcctagtgatatactactgcgtagtgatttatcc

SEQ ID NO: 69052 - protein, 248 aa, Triticum aestivum
  peptide (1)..(248): Ceres Seq. ID no. 12617961
MAEHKEEPVAESMMDKISDKFHGGDSSSSSSDSDDEKKGSAAGVKAKIYRLFGREKPVHAVLGGGKPADLVLWRNKKVSGGVLAGATAIWLLFEVMEYHLLTLVGHCLILSLATLFLYSNVCIFIHKSPPNIPEVKIPEDMTVNIALSLRHEINRGFFTLRETGHGRDLKKFLIVIGGLWLLSVLGSYCNFLTLSYIVFVVLYTVPVLYEKYDDKVDAFGEKAMIELKKYYAIFEEKVLSKIPKNKKH

SEQ ID NO: 69053 - protein, 236 aa, Triticum aestivum
  peptide (1)..(236): Ceres Seq. ID no. 12617962
MMDKISDKFHGGDSSSSSSDSDDEKKGSAAGVKAKIYRLFGREKPVHAVLGGGKPADLVLWRNKKVSGGVLAGATAIWLLFEVMEYHLLTLVGHCLILSLATLFLYSNVCIFIHKSPPNIPEVKIPEDMTVNIALSLRHEINRGFFTLRETGHGRDLKKFLIVIGGLWLLSVLGSYCNFLTLSYIVFVVLYTVPVLYEKYDDKVDAFGEKAMIELKKYYAIFEEKVLSKIPKNKKH

SEQ ID NO: 69054 - protein, 235 aa, Triticum aestivum
  peptide (1)..(235): Ceres Seq. ID no. 12617963
MDKISDKFHGGDSSSSSSDSDDEKKGSAAGVKAKIYRLFGREKPVHAVLGGGKPADLVLWRNKKVSGGVLAGATAIWLLFEVMEYHLLTLVGHCLILSLATLFLYSNVCIFIHKSPPNIPEVKIPEDMTVNIALSLRHEINRGFFTLRETGHGRDLKKFLIVIGGLWLLSVLGSYCNFLTLSYIVFVVLYTVPVLYEKYDDKVDAFGEKAMIELKKYYAIFEEKVLSKIPKNKKH

SEQ ID NO: 69055 - DNA, 1480 bp, Triticum aestivum
  misc_feature (1)..(1480): Ceres Seq. ID no. 14302772
acctacctactgcctccattcccaccacagctagcttcagcttttagctaagctctacttccctcccgagctaagcatcttcttgatttctcggtgatcggattcggatggacagcgcaagaagctgcctcgtggacgacgtgagcagcggcgcgtccacgggcaagaaggcctctccgtccccggccgcgccggcgaccaagccgctgcagcgcgtgggcagcggggccagcgcggtcatggacgcgccggagcccggcgccgaggcggactccggccgcgtcggcaggctgccgtcctccaagtacaagggcgtggtgccgcagcccaacgggcgctggggcgcgcagatctacgagcgccaccagcgcgtctggctcggcaccttcacgggggaggccgaggctgcgcgcgcctacgacgcggcggcgcagcgcttccgcggccgcgacgcagtcaccaacttccgctcgctcaccgagtccgacccggaggacgccgccgagctccgcttcctcgctgcccgctccaaggccgaggtcgtcgacatgctgcgcaagcacacctatcccgacgagctcgctcagtacaagcgcgcctacttcgccgccgctgcggcgtcctcccctacatcgtcctcggtgcctcccgcctcgtcgccctcttcggcggcttcgccctcgccggcggcgcggcgcgagcacctgttcgacaagacggtcacgcccagcgacgtggggaagctgaaccggcttgtgataccgaagcagcacgccgagaagcactttcctctccagcttccttccgccggcgccgccgtgtccggcgagtgcaagggcatgcttctcaacttcgacgactcggccggcaaggtgtggaggttccggtactcgtactggaacagcagccagagctacgtgctcaccaagggctggagccgctttgtcaaggagaagggcctgcacgccggcgacgccgtcgggttctaccgctctgcctcaggcagcaaccagctcttcatcgactgcaagctccggtccaagaccacgacgatgacgacgactttcgtcaacgcggcggccgccccgtcgccggcacccgtgatgaggaccgtgcgactcttcggcgtcgaccttctcacggcgccggcgccgagtcacgtgcccgagcacgaggactgcagcatggtgcccaagacaagcaagagatccatggacgccaacgcagcggccactccggcgcacgcggtctggaagaagcggtgcatagacttcgcgctgacctagccagctagcgtttttcctccatggttgctttgcttgcctccaaatttccatgttagtagcttagagctcttgatcggtccaagtgtttgccttttttttcctcttcttctcatacacaagttagctctaaatccagtcttctttaattaatctactgtaaattaagcccgttctcgaaatggcaagtgttcacc

SEQ ID NO: 69056 - protein, 392 aa, Triticum aestivum
  peptide (1)..(392): Ceres Seq. ID no. 14302773
MDSARSCLVDDVSSGASTGKKASPSPAAPATKPLQRVGSGASAVMDAPEPGAEADSGRVGRLPSSKYKGVVPQPNGRWGAQIYERHQRVWLGTFTGEAEAARAYDAAAQRFRGRDAVTNFRSLTESDPEDAAELRFLAARSKAEVVDMLRKHTYPDELAQYKRAYFAAAAASSPTSSSVPPASSPSSAASPSPAARREHLFDKTVTPSDVGKLNRLVIPKQHAEKHFPLQLPSAGAAVSGECKGMLLNFDDSAGKVWRFRYSYWNSSQSYVLTKGWSRFVKEKGLHAGDAVGFYRSASGSNQLFIDCKLRSKTTTMTTTFVNAAAAPSPAPVMRTVRLFGVDLLTAPAPSHVPEHEDCSMVPKTSKRSMDANAAATPAHAVWKKRCIDFALT

SEQ ID NO: 69057 - protein, 348 aa, Triticum aestivum
  peptide (1)..(348): Ceres Seq. ID no. 14302774
MDAPEPGAEADSGRVGRLPSSKYKGVVPQPNGRWGAQIYERHQRVWLGTFTGEAEAARAYDAAAQRFRGRDAVTNFRSLTESDPEDAAELRFLAARSKAEVVDMLRKHTYPDELAQYKRAYFAAAAASSPTSSSVPPASSPSSAASPSPAARREHLFDKTVTPSDVGKLNRLVIPKQHAEKHFPLQLPSAGAAVSGECKGMLLNFDDSAGKVWRFRYSYWNSSQSYVLTKGWSRFVKEKGLHAGDAVGFYRSASGSNQLFIDCKLRSKTTTMTTTFVNAAAAPSPAPVMRTVRLFGVDLLTAPAPSHVPEHEDCSMVPKTSKRSMDANAAATPAHAVWKKRCIDFALT

SEQ ID NO: 69058 - protein, 245 aa, Triticum aestivum
  peptide (1)..(245): Ceres Seq. ID no. 14302775
MLRKHTYPDELAQYKRAYFAAAAASSPTSSSVPPASSPSSAASPSPAARREHLFDKTVTPSDVGKLNRLVIPKQHAEKHFPLQLPSAGAAVSGECKGMLLNFDDSAGKVWRFRYSYWNSSQSYVLTKGWSRFVKEKGLHAGDAVGFYRSASGSNQLFIDCKLRSKTTTMTTTFVNAAAAPSPAPVMRTVRLFGVDLLTAPAPSHVPEHEDCSMVPKTSKRSMDANAAATPAHAVWKKRCIDFALT

SEQ ID NO: 69059 - DNA, 1434 bp, Triticum aestivum
  misc_feature (1)..(1434): Ceres Seq. ID no. 13662855
aacgctccccgcaaccctccaaaccaaagccccccaccgctctctcgcccccacccataaacccccgccgcccagatcctcctcctcctccctcctccccgtcgccgcgccgccgccgccatgcatcccgacgccacctccccctcccaccgcatcgcccgcgtcgccgcgcacctcaacccgacacgcccgcagatggaggagggcgcggcgctgaggcccgcggcgtgccgcgccaagggcggcgcgccggggttcaaggtggcggtggtgggcgcggccgggggcatcggccagtcgctgtcgctgctcatgaagatgaacccgctcgtctccgtgctccacctctacgacgtcgtcaacacgcccggggtcaccgccgacgtcagccacatggacaccagcgccgtggtgcgcggcttcattggccaacaacagcttgaggcagcacttacaggaatggatcttgtcatcatccctgccggcctcccaagaaaaccaggaatgacaagggatgatctgttcaacaaaaatgctgggatcgttcgctcgatctgtgaaggcgttgccaagagctgtcctaatgctattgtgaatttgatcagcaaccctgtgaactcaaccgtccccattgctgcggaggttttcaagagagctggaacttactgtcccaagcgtctccttggagtgacaacacttgatgtagcgagggctaatacctttgtggcggaagtgcttggagttgatccaagagaagtcaatgttccagttgttggcgggcatgcaggggtcactatattacccctcctgtcacaggtcagccccccatgctcattcactccagatgaaatcagctatttgactaaccgcatacagaacggtggtacagaagttgtggaggcaaaggctggagcaggctctgcaactttgtcaatggcttttgctgctgcaaaattcgccgacgcgtgcctgcgaggaatgcgcggagatgctggcatcgtggagtgttcatacgtcgcatctgaggtgacagagctgccgttcttcgcatcgaaggtgaggttaggtcgtggtggagccgaagagattctccctcttgggccattgaatgactttgagagggccggcctggagaaggcgaagaaggagctgagcgagagcattgagaagggcgtgtcgttcatgaacaagtgagatcgtacgaatggaccgtccccgacctatacagatatgcaaagactaaagaaagagtgatatagtgctccaatacctgtaaagccacccctgcatgtgcaagacagtactagtactcctttagctgcactgagccttttcccccgtcgtggaatataaatcatgtactcgtactagacaagaacgtatacttttgtgaatagctggaccgaacatgtttacagccaaaaaaaaaaaaaa

SEQ ID NO: 69060 - protein, 357 aa, Triticum aestivum
  peptide (1)..(357): Ceres Seq. ID no. 15220192
MHPDATSPSHRIARVAAHLNPTRPQMEEGAALRPAACRAKGGAPGFKVAVVGAAGGIGQSLSLLMKMNPLVSVLHLYDVVNTPGVTADVSHMDTSAVVRGFIGQQQLEAALTGMDLVIIPAGLPRKPGMTRDDLFNKNAGIVRSICEGVAKSCPNAIVNLISNPVNSTVPIAAEVFKRAGTYCPKRLLGVTTLDVARANTFVAEVLGVDPREVNVPVVGGHAGVTILPLLSQVSPPCSFTPDEISYLTNRIQNGGTEVVEAKAGAGSATLSMAFAAAKFADACLRGMRGDAGIVECSYVASEVTELPFFASKVRLGRGGAEEILPLGPLNDFERAGLEKAKKELSESIEKGVSFMNK

SEQ ID NO: 69061 - protein, 332 aa, Triticum aestivum
  peptide (1)..(332): Ceres Seq. ID no. 15220193
MEEGAALRPAACRAKGGAPGFKVAVVGAAGGIGQSLSLLMKMNPLVSVLHLYDVVNTPGVTADVSHMDTSAVVRGFIGQQQLEAALTGMDLVIIPAGLPRKPGMTRDDLFNKNAGIVRSICEGVAKSCPNAIVNLISNPVNSTVPIAAEVFKRAGTYCPKRLLGVTTLDVARANTFVAEVLGVDPREVNVPVVGGHAGVTILPLLSQVSPPCSFTPDEISYLTNRIQNGGTEVVEAKAGAGSATLSMAFAAAKFADACLRGMRGDAGIVECSYVASEVTELPFFASKVRLGRGGAEEILPLGPLNDFERAGLEKAKKELSESIEKGVSFMNK

SEQ ID NO: 69062 - protein, 293 aa, Triticum aestivum
  peptide (1)..(293): Ceres Seq. ID no. 15220194
MKMNPLVSVLHLYDVVNTPGVTADVSHMDTSAVVRGFIGQQQLEAALTGMDLVIIPAGLPRKPGMTRDDLFNKNAGIVRSICEGVAKSCPNAIVNLISNPVNSTVPIAAEVFKRAGTYCPKRLLGVTTLDVARANTFVAEVLGVDPREVNVPVVGGHAGVTILPLLSQVSPPCSFTPDEISYLTNRIQNGGTEVVEAKAGAGSATLSMAFAAAKFADACLRGMRGDAGIVECSYVASEVTELPFFASKVRLGRGGAEEILPLGPLNDFERAGLEKAKKELSESIEKGVSFMNK

SEQ ID NO: 69063 - DNA, 1034 bp, Triticum aestivum
  misc_feature (1)..(1034): Ceres Seq. ID no. 12626028
cttccatttcaggcctccagcctccgatctataccccgatcgagcctcgccggacggaggcgccccccatgccacagccctagcggcgtcaatctcaccagcccaaaccccgccgcccgcccgccatgttcggcgtcgtgttcccggaccacaccttcccgctggacgccaccgccttcgcgcaggtcgcgccggcctcctggctcctcgacctctccacgctgtccctcccctccgcgccccgctccgccgtcgtcttcctgctcccgcccgccgcggccgcgctgcccccgggcaaggccgtcgccgtctactaccaggcggccgccaaccgccccttcgccttcctcggcgcgctcggccccgcgcgcccctccgccgccctccagctcccggaggccggggacgagccggagccccctgccgggcccgccaagctgggcgtcgccgtggaggacgccgccgcgctgccctcgccccccgacgagcagcgcgccgagcgcgtcgcgctccgcgtcggcgagaacctcttcaatttcatgcagtccttctgcgccgccgacggcggcaagctggtggtgcccacggatatcctggaccgctggttccgcaagttccaggagagggccaagaaggatcccacctatctgaaaagctttgacttctgaaaccaaagctttaggtattccttactccattcttaggttccttgggtgcgaattggtacaggaatgcttagtctcattgcagtactcctgtaccaattggtgcggagtaggagttacaagggcgacaccacctccctggtagtttaagatcgtgatctacaagaggggctgagagggagatgtcctaaaaagtgtagtgttcttgggcctcttagttcgtcagctatgagatctggtgttaattttcattgtttgtgcgagttcatgacgttgattgcagcataatatgaatatgccccggtgagatgtgtgctgatagaagcttgatgttaaatatattatccctttatggaaaaatgttgtttt

SEQ ID NO: 69064 - protein, 219 aa, Triticum aestivum
  peptide (1)..(219): Ceres Seq. ID no. 12626029
FHFRPPASDLYPDRASPDGGAPHATALAASISPAQTPPPARHVRRRVPGPHLPAGRHRLRAGRAGLLAPRPLHAVPPLRAPLRRRLPAPARRGRAAPGQGRRRLLPGGRQPPLRLPRRARPRAPLRRPPAPGGRGRAGAPCRARQAGRRRGGRRRAALAPRRAARRARRAPRRREPLQFHAVLLRRRRRQAGGAHGYPGPLVPQVPGEGQEGSHLSEKL

SEQ ID NO: 69065 - protein, 216 aa, Triticum aestivum
  peptide (1)..(216): Ceres Seq. ID no. 12626030
LPFQASSLRSIPRSSLAGRRRPPCHSPSGVNLTSPNPAARPPCSASCSRTTPSRWTPPPSRRSRRPPGSSTSPRCPSPPRPAPPSSSCSRPPRPRCPRARPSPSTTRRPPTAPSPSSARSAPRAPPPPSSSRRPGTSRSPLPGPPSWASPWRTPPRCPRPPTSSAPSASRSASARTSSISCSPSAPPTAASWWCPRISWTAGSASSRRGPRRIPPI

SEQ ID NO: 69066 - protein, 180 aa, Triticum aestivum
  peptide (1)..(180): Ceres Seq. ID no. 12626031
MFGVVFPDHTFPLDATAFAQVAPASWLLDLSTLSLPSAPRSAVVFLLPPAAAALPPGKAVAVYYQAAANRPFAFLGALGPARPSAALQLPEAGDEPEPPAGPAKLGVAVEDAAALPSPPDEQRAERVALRVGENLFNFMQSFCAADGGKLVVPTDILDRWFRKFQERAKKDPTYLKSFDF

SEQ ID NO: 69067 - DNA, 804 bp, Triticum aestivum
  misc_feature (1)..(804): Ceres Seq. ID no. 13656012
gctcggcgcagccgcacccttccgcaagaaagaaaggggaggggaggggagaacagaataaacatcagacccgcaaagaggaggagcgaaacagcatccctgccttcctccacgcccgtagggtttccggatcggaggagcccaagccgccgcagccatggttcgcggatcgctcgggaggttggcgtcgcgcaccctctccgtcgccggcaaatggcagcaccagcagctccgccgcctcaacatccacgagtaccagggcgcggagttgatggggaagttcgggatcaacgtgcccaagggcgccgtggtggggtcagtgcaggaggtcaaggaagttttgaagaacgtcttccccagtgagaaagagatagttgtgaaaagccaaatccttgccggtggccgtggattgggaactttcaaaagtggactaaagggtggtgttcatattgttaaggctgaggaggctgaaagccttgcagctaaaatgcttaaccaggtcctggtaacaaaacaaactggtccacaggggaaggttgtgggcaagctcattatagcttgtgctgagggaggaacgagtattgaagatcttgcagagaagttccctgataagatcgttaaggttcctgttgatgtattcaagggaatcactgatgaggatgagattaggttccggctgaagagtgagaggtggaagactggtaccatttgtatagcttgtgtgataaaaagactagacattttgggtgtacactcctccgtgttggtgttgccacccgtgaacataaacactgcctgtatgtt

SEQ ID NO: 69068 - protein, 215 aa, Triticum aestivum
  peptide (1)..(215): Ceres Seq. ID no. 13656013
MVRGSLGRLASRTLSVAGKWQHQQLRRLNIHEYQGAELMGKFGINVPKGAVVGSVQEVKEVLKNVFPSEKEIVVKSQILAGGRGLGTFKSGLKGGVHIVKAEEAESLAAKMLNQVLVTKQTGPQGKVVGKLIIACAEGGTSIEDLAEKFPDKIVKVPVDVFKGITDEDEIRFRLKSERWKTGTICIACVIKRLDILGVHSSVLVLPPVNINTACM

SEQ ID NO: 69069 - protein, 177 aa, Triticum aestivum
  peptide (1)..(177): Ceres Seq. ID no. 13656014
MGKFGINVPKGAVVGSVQEVKEVLKNVFPSEKEIVVKSQILAGGRGLGTFKSGLKGGVHIVKAEEAESLAAKMLNQVLVTKQTGPQGKVVGKLIIACAEGGTSIEDLAEKFPDKIVKVPVDVFKGITDEDEIRFRLKSERWKTGTICIACVIKRLDILGVHSSVLVLPPVNINTACM

SEQ ID NO: 69070 - protein, 120 aa, Triticum aestivum
  peptide (1)..(120): Ceres Seq. ID no. 13656015
ARRSRTLPQERKGRGGENRINIRPAKRRSETASLPSSTPVGFPDRRSPSRRSHGSRIAREVGVAHPLRRRQMAAPAAPPPQHPRVPGRGVDGEVRDQRAQGRRGGVSAGGQGSFEERLPQ

SEQ ID NO: 69071 - DNA, 1393 bp, Triticum aestivum
  misc_feature (1)..(1393): Ceres Seq. ID no. 13597747
atattcttcttcttctcccctttgcttcttccagaagctccctgaaagtccaggcccgatcccccatggcctccggcgaaggcaccggagattcgaacgctgcgggggcagggatggaggtgccggaggtggagttgtgcctcgacctcacgagctgccagctgcacgatctgagtgaggtggagatcccgcccaccctggaggagctggaccttacggcgaaccgtctcaccgcagtcgacccccggatcggccacctccctcgcctccgcaaactctcgttccgccagaatctcctcgacgacgacgccgtcgcgcccctcttcacctgggatgccatcgctggcttacaggagatagtccttagagataacaagcttataaagatccccgatgccagcatcttcaagggtcttctggtgtttgatgtttctttcaatgagttgtcgtccttaaatgggttatccaaggtttccagcacagtgaaagaactctacttttcgaagaatgaggttccaaagatggaagaacttgaacatttccatgcattagaattgcttgaacttggtagcaacagattaagggtgatggaaaatctggaaactttgacaaatctacaggagttatggctcggaagaaaccggatccggactatcaacttatgtgggttgaaatcaatcaaaaaaataagtctgcaaagcaacaggctaacttcaatgaatggcttacaagaatgtgttgcgttagaggaactgtatctcagccataatggaatccaaaagatggaaggcctttctatgttacagaaccttcgtgttttagatgtttcatctaacaaactaaccgctatcgaagatattgagccattaaccaggttagaggacttgtggttgaatgacaaccaaataccatcactgtctgggatagaatctgctttgtctggttcacgagagaaactgaccaccatatatcttgagagaaatccttgtgcaaaaactcccaactattcatccacattgaaggaaatgtttccaaatcttgagcaaattgattcagatatgctagcgtgaaacaggttgactcactttctcagattgttgaagttagtcgaaatatgtgttgtgtttctacaggaagaaagcagtcatccagttcagaacagacaacataagctcccggtcaagtagcgctgcagtttgtactggtgatctgaatggattattgccaactttatttgaaaggcccgtcctgaagttgggtcatttcctgccgagatctataaaaactgaacttatgtgataaagccatcctatggtccatgactccatgctcgtgccacgttgcaagggatgatgtatttgttttcccttttcccttgagtgatttttcagtt

SEQ ID NO: 69072 - protein, 355 aa, Triticum aestivum
  peptide (1)..(355): Ceres Seq. ID no. 13597748
ILLLLPFASSRSSLKVQARSPMASGEGTGDSNAAGAGMEVPEVELCLDLTSCQLHDLSEVEIPPTLEELDLTANRLTAVDPRIGHLPRLRKLSFRQNLLDDDAVAPLFTWDAIAGLQEIVLRDNKLIKIPDASIFKGLLVFDVSFNELSSLNGLSKVSSTVKELYFSKNEVPKMEELEHFHALELLELGSNRLRVMENLETLTNLQELWLGRNRIRTINLCGLKSIKKISLQSNRLTSMNGLQECVALEELYLSHNGIQKMEGLSMLQNLRVLDVSSNKLTAIEDIEPLTRLEDLWLNDNQIPSLSGIESALSGSREKLTTIYLERNPCAKTPNYSSTLKEMFPNLEQIDSDMLA

SEQ ID NO: 69073 - protein, 334 aa, Triticum aestivum
  peptide (1)..(334): Ceres Seq. ID no. 13597749
MASGEGTGDSNAAGAGMEVPEVELCLDLTSCQLHDLSEVEIPPTLEELDLTANRLTAVDPRIGHLPRLRKLSFRQNLLDDDAVAPLFTWDAIAGLQEIVLRDNKLIKIPDASIFKGLLVFDVSFNELSSLNGLSKVSSTVKELYFSKNEVPKMEELEHFHALELLELGSNRLRVMENLETLTNLQELWLGRNRIRTINLCGLKSIKKISLQSNRLTSMNGLQECVALEELYLSHNGIQKMEGLSMLQNLRVLDVSSNKLTAIEDIEPLTRLEDLWLNDNQIPSLSGIESALSGSREKLTTIYLERNPCAKTPNYSSTLKEMFPNLEQIDSDMLA

SEQ ID NO: 69074 - protein, 318 aa, Triticum aestivum
  peptide (1)..(318): Ceres Seq. ID no. 13597750
MEVPEVELCLDLTSCQLHDLSEVEIPPTLEELDLTANRLTAVDPRIGHLPRLRKLSFRQNLLDDDAVAPLFTWDAIAGLQEIVLRDNKLIKIPDASIFKGLLVFDVSFNELSSLNGLSKVSSTVKELYFSKNEVPKMEELEHFHALELLELGSNRLRVMENLETLTNLQELWLGRNRIRTINLCGLKSIKKISLQSNRLTSMNGLQECVALEELYLSHNGIQKMEGLSMLQNLRVLDVSSNKLTAIEDIEPLTRLEDLWLNDNQIPSLSGIESALSGSREKLTTIYLERNPCAKTPNYSSTLKEMFPNLEQIDSDMLA

SEQ ID NO: 69075 - DNA, 1250 bp, Triticum aestivum
  misc_feature (1)..(1250): Ceres Seq. ID no. 13503557
aaacccgctcgagatctatcccaattctcgacctcacatcccctgctcgactcgacttcgtttaaacccaaaccctaatctcgacagagcctaaaccctagctcgggcggcggcggcggcggtcatggacggcggcggaggcatggggcccgtcggcggcggggtgggaggcatggtgggacccgtcggcgtcggcggcgggggcggcgggagcgacgtggagctcgtcagcaaaacgctgcagttcgagcacaagctcttctacttcgatctgaaggagaacccgcgggggaggtacctcaagatctccgagaagacgtccaccacgcgctccaccatcatcgtgcccatcgccggcgtcgcctggttcctcgacctcttcgactattacatccgcaccgacgagcgcgacgtcttcagcaaggagctacgcctcgacactaaggtgttctacttcgatattggggagaacaagagaggccgctaccttaaggtttcggaggcatctgtcaatagaaaccgtagcacgataattgttccggctggtagctctggcgaagaaggttgggaagcatttaggaatgtactgttagaaatcaatgacgaagcttcccgactctatgttcttccaaatcatccaagtcagcaacacctggaacctccagagcgccttcctggcctttctgacgatgttggtgctggatttatagctgggcatggcagccaatctgcatctgtacccgaggtagacgttgatgggcctcctattgaagaatttagtggcatggggctgtctaaggtgataagggcagatcagaaaaggtttttctttgacctgggcagcaacaacaggggccattatttgaggatttccgaggtcgctggagctgatcgttcgtcgataatcttgccactttctggtttgaagcagttccatgagatggtgggacactttgtagatataatgaaggacagacttgaaggaatgacgggcgcgaacgtgcgcactgtcgagcccagccagagatgattagctcgaccttgtggcacttactgctgttatgcctcctctaggatttgtgtaagtgatgtggtgtgtggttgcgtagatcacgcagtattaattcgtctgatggggataataatgtttgatgtttagttttttctttcttctgaattccgtggcgaggattgatttgcttgggaccttttctgttgaggaataataagcagtataatgttcgtgggtg

SEQ ID NO: 69076 - protein, 301 aa, Triticum aestivum
  peptide (1)..(301): Ceres Seq. ID no. 13503558
MDGGGGMGPVGGGVGGMVGPVGVGGGGGGSDVELVSKTLQFEHKLFYFDLKENPRGRYLKISEKTSTTRSTIIVPIAGVAWFLDLFDYYIRTDERDVFSKELRLDTKVFYFDIGENKRGRYLKVSEASVNRNRSTIIVPAGSSGEEGWEAFRNVLLEINDEASRLYVLPNHPSQQHLEPPERLPGLSDDVGAGFIAGHGSQSASVPEVDVDGPPIEEFSGMGLSKVIRADQKRFFFDLGSNNRGHYLRISEVAGADRSSIILPLSGLKQFHEMVGHFVDIMKDRLEGMTGANVRTVEPSQR

SEQ ID NO: 69077 - protein, 295 aa, Triticum aestivum
  peptide (1)..(295): Ceres Seq. ID no. 13503559
MGPVGGGVGGMVGPVGVGGGGGGSDVELVSKTLQFEHKLFYFDLKENPRGRYLKISEKTSTTRSTIIVPIAGVAWFLDLFDYYIRTDERDVFSKELRLDTKVFYFDIGENKRGRYLKVSEASVNRNRSTIIVPAGSSGEEGWEAFRNVLLEINDEASRLYVLPNHPSQQHLEPPERLPGLSDDVGAGFIAGHGSQSASVPEVDVDGPPIEEFSGMGLSKVIRADQKRFFFDLGSNNRGHYLRISEVAGADRSSIILPLSGLKQFHEMVGHFVDIMKDRLEGMTGANVRTVEPSQR

SEQ ID NO: 69078 - protein, 285 aa, Triticum aestivum
  peptide (1)..(285): Ceres Seq. ID no. 13503560
MVGPVGVGGGGGGSDVELVSKTLQFEHKLFYFDLKENPRGRYLKISEKTSTTRSTIIVPIAGVAWFLDLFDYYIRTDERDVFSKELRLDTKVFYFDIGENKRGRYLKVSEASVNRNRSTIIVPAGSSGEEGWEAFRNVLLEINDEASRLYVLPNHPSQQHLEPPERLPGLSDDVGAGFIAGHGSQSASVPEVDVDGPPIEEFSGMGLSKVIRADQKRFFFDLGSNNRGHYLRISEVAGADRSSIILPLSGLKQFHEMVGHFVDIMKDRLEGMTGANVRTVEPSQR

SEQ ID NO: 69079 - DNA, 1343 bp, Triticum aestivum
  misc_feature (1)..(1343): Ceres Seq. ID no. 12625899
ctcttctctttgtggaagaagatgctgctcttgtgcaagagctccgtgctcgccgtcctgctcctccacgccctctctctgcccgcctcggcgctcgccgtcgggctcgggcggcgccaccgccgcgacgtcctgcccgggcccaagggctgcgacgtcttcagcggcagctgggtccgcgacgacggctccgccgaggctgcctacaccggctacaagtgcccggtcatcgacgcggagttcaactgccagctctacggccggccggactccgactacctccggtaccgctggaagccggccagctgcgagctacccaggtttgacggcgcagactttttgacgcggatgaaggggaagacggtgatgttcgtgggggattcgctgggccgtaaccagtgggagtcgctcgtctgcctgctgcacgccgccgcaccgcagtcgccgtcgcagctcgtctccgccgaccctctctatacctacaggttcatggagtacgagctggtggtgtctttctaccgcgcgccgtacctggtggacatcgacgtggtgcaggggaaacgggtcctcatgctcgacgacatcgccgagaacgcccaggcatggcgcggcgccgacgtgctctccttcaactccggccactggtggacgcacaccggcgcgcttcaggggtgggattacatgggggagggcgggcggtactcggaggacatggataggatggtggcgttccagcgcgggatgaccacatgggccaactgggtggacctcaacgtcgacccggccaagacccgtgtcttcttccagtccatgtcccccacccactacagctccaaggagtggcccaacccggtgtccaagaactgctacggagagacggtcccattggctgggctcaactccacggcgcagccgatgggccaggagcaggtgacgaaaacggtgctgcagggcatgaaaagcccggtccgtttgctcgacatcacggcgctgtcggcgctgcggaaggacgcgcacccgtcggtttacagcggcgacttctcgccggcgcagcgcggcaaccccgccggctccgccgactgcagccactggtgcctcccgggcctaccggacacctggaaccagctcttctacaccttgctcttctaccaatagcaaccgtactggacctgcatttggccagatgctgcagctgcagtgttggtattaattattttcctctgattccgctgtggatgtgtcatgtgagcggtataggtagacatgattgatgaggatgtacattgatctttgaatgacaaacagtagcccacacgtttgattagtaatagcaaacatgcccc

SEQ ID NO: 69080 - protein, 384 aa, Triticum aestivum
  peptide (1)..(384): Ceres Seq. ID no. 12625900
LFSLWKKMLLLCKSSVLAVLLLHALSLPASALAVGLGRRHRRDVLPGPKGCDVFSGSWVRDDGSAEAAYTGYKCPVIDAEFNCQLYGRPDSDYLRYRWKPASCELPRFDGADFLTRMKGKTVMFVGDSLGRNQWESLVCLLHAAAPQSPSQLVSADPLYTYRFMEYELVVSFYRAPYLVDIDVVQGKRVLMLDDIAENAQAWRGADVLSFNSGHWWTHTGALQGWDYMGEGGRYSEDMDRMVAFQRGMTTWANWVDLNVDPAKTRVFFQSMSPTHYSSKEWPNPVSKNCYGETVPLAGLNSTAQPMGQEQVTKTVLQGMKSPVRLLDITALSALRKDAHPSVYSGDFSPAQRGNPAGSADCSHWCLPGLPDTWNQLFYTLLFYQ

SEQ ID NO: 69081 - protein, 377 aa, Triticum aestivum
  peptide (1)..(377): Ceres Seq. ID no. 12625901
MLLLCKSSVLAVLLLHALSLPASALAVGLGRRHRRDVLPGPKGCDVFSGSWVRDDGSAEAAYTGYKCPVIDAEFNCQLYGRPDSDYLRYRWKPASCELPRFDGADFLTRMKGKTVMFVGDSLGRNQWESLVCLLHAAAPQSPSQLVSADPLYTYRFMEYELVVSFYRAPYLVDIDVVQGKRVLMLDDIAENAQAWRGADVLSFNSGHWWTHTGALQGWDYMGEGGRYSEDMDRMVAFQRGMTTWANWVDLNVDPAKTRVFFQSMSPTHYSSKEWPNPVSKNCYGETVPLAGLNSTAQPMGQEQVTKTVLQGMKSPVRLLDITALSALRKDAHPSVYSGDFSPAQRGNPAGSADCSHWCLPGLPDTWNQLFYTLLFYQ

SEQ ID NO: 69082 - protein, 268 aa, Triticum aestivum
  peptide (1)..(268): Ceres Seq. ID no. 12625902
MKGKTVMFVGDSLGRNQWESLVCLLHAAAPQSPSQLVSADPLYTYRFMEYELVVSFYRAPYLVDIDVVQGKRVLMLDDIAENAQAWRGADVLSFNSGHWWTHTGALQGWDYMGEGGRYSEDMDRMVAFQRGMTTWANWVDLNVDPAKTRVFFQSMSPTHYSSKEWPNPVSKNCYGETVPLAGLNSTAQPMGQEQVTKTVLQGMKSPVRLLDITALSALRKDAHPSVYSGDFSPAQRGNPAGSADCSHWCLPGLPDTWNQLFYTLLFYQ

SEQ ID NO: 69083 - DNA, 1355 bp, Triticum aestivum
  misc_feature (1)..(1355): Ceres Seq. ID no. 13598574
aacaagaaaggtctcctccccaccaccccaccaagaaaccgaagtcgtcacactcgcagtcactggctcactccactccgcgcaccctcactctcgctcgctccgtccgtctccgtccggcgagcccgcccgcgcctgcggcgatggccgtgagcaacaacatcacggcgtgcctcaacttcctggccctaatctgcaccatcccggtggtggccacgggcctctggttcgcctccaagcagggcgccgagtgcgcgcggctggcgcgctggcccgtggccatcctcggcgtgctcctcctcctcgtcgccctcgcgggcttcgtcggcgcctactggaaccgccagggcctgctggccgcctacctcttcgccatggcggccctcatcacgctcctcctggcgctcctcgtcttcgccttcgccgtcacccacggctccggggcgtacgacgtgcccggccgcgcctaccgcgagtaccgcctcgagggcttctctggctggctgcgcgggtatgttgctggggatccccggcggtgggaggggatcagggcgtgcctcgtcgcgtcggacacctgcaagaagctcaccatggagaccgccttcttcatcgcccccgagcagttctaccagtccgacctctccccgctccagtccggctgctgcaagccgccgacggcgtgcgggtacgcgtacgtgtccccgacggtgtgggccagcccggcaaacccggcggcggacgcggactgcggcgcctggagcaacgacccgcggcagctctgctactggtgcgaatcctgcaaggccggcatgctgggcaccctgcgcgaccagtggcgccgggccaacgtggcgctcgtcgccgccaccgtcgcgctcctcgtcgtntacgtcatcggctgcagcgccttcaagaacgcccagaccgaggacctcttccgccgctacaagtggagcaacaacacctgacgctgatagatgtaccaatcccgaacgaaggaaggagttctctggtggcagtaccagtgctagtatgctgacattgtgcactagtatgattatcggacgaaccagtgtagattatgtagtgggaagtactaaggttgaaagaagtttcactctcgtgagttgtatttggccactagacctggtgcattcgctagtgccatggtttatggctagagctatagtgtggtgagatttctcggttttcaggtcggttaatggagacattttcacccaaaattctcgatgaaatgcagtgtacgttcagatttgtgattgtttcaaggcaaaaataaataaatcatgattgtgataaaaaaaaaaaaaaaaaagcttatcgataccgtcgac

SEQ ID NO: 69084 - protein, 345 aa, Triticum aestivum
  peptide (1)..(345): Ceres Seq. ID no. 15222375
  misc_feature (296)..(296): Xaa is any aa, unknown or other
TRKVSSPPPHQETEVVTLAVTGSLHSAHPHSRSLRPSPSGEPARACGDGREQQHHGVPQLPGPNLHHPGGGHGPLVRLQAGRRVRAAGALARGHPRRAPPPRRPRGLRRRLLEPPGPAGRLPLRHGGPHHAPPGAPRLRLRRHPRLRGVRRARPRLPRVPPRGLLWLAARVCCWGSPAVGGDQGVPRRVGHLQEAHHGDRLLHRPRAVLPVRPLPAPVRLLQAADGVRVRVRVPDGVGQPGKPGGGRGLRRLEQRPAAALLLVRILQGRHAGHPARPVAPGQRGARRRHRRAPRRXRHRLQRLQERPDRGPLPPLQVEQQHLTLIDVPIPNEGRSSLVAVPVLVC

SEQ ID NO: 69085 - protein, 321 aa, Triticum aestivum
  peptide (1)..(321): Ceres Seq. ID no. 15222376
  misc_feature (295)..(295): Xaa is any aa, unknown or other
QERSPPHHPTKKPKSSHSQSLAHSTPRTLTLARSVRLRPASPPAPAAMAVSNNITACLNFLALICTIPVVATGLWFASKQGAECARLARWPVAILGVLLLLVALAGFVGAYWNRQGLLAAYLFAMAALITLLLALLVFAFAVTHGSGAYDVPGRAYREYRLEGFSGWLRGYVAGDPRRWEGIRACLVASDTCKKLTMETAFFIAPEQFYQSDLSPLQSGCCKPPTACGYAYVSPTVWASPANPAADADCGAWSNDPRQLCYWCESCKAGMLGTLRDQWRRANVALVAATVALLVXYVIGCSAFKNAQTEDLFRRYKWSNNT

SEQ ID NO: 69086 - protein, 274 aa, Triticum aestivum
  peptide (1)..(274): Ceres Seq. ID no. 15222377
  misc_feature (248)..(248): Xaa is any aa, unknown or other
MAVSNNITACLNFLALICTIPVVATGLWFASKQGAECARLARWPVAILGVLLLLVALAGFVGAYWNRQGLLAAYLFAMAALITLLLALLVFAFAVTHGSGAYDVPGRAYREYRLEGFSGWLRGYVAGDPRRWEGIRACLVASDTCKKLTMETAFFIAPEQFYQSDLSPLQSGCCKPPTACGYAYVSPTVWASPANPAADADCGAWSNDPRQLCYWCESCKAGMLGTLRDQWRRANVALVAATVALLVXYVIGCSAFKNAQTEDLFRRYKWSNNT

SEQ ID NO: 69087 - DNA, 1164 bp, Triticum aestivum
  misc_feature (1)..(1164): Ceres Seq. ID no. 13584797
aaaggcaactagacgctgagagctccctcctgcttacccgtgccggcggccgccgccgcaagcccagaggagggagcaacgccggcgcctggatcccccgagtgccgccgccgacccgtcccgtactccggccgtcgcccatcggctgcagcatcttggccctcgcgcgcctccgctgccgcttcctctccgccccgcctcagctgatggacatgtctggtccaagatggaagaagggcaaagacggcaaggatttcgcagctctggcagcagcccaacccatgtcaagcattgttgccaagctccagtcttcactggaaggatcaaagctcgtggcgactttatctagcaggggcggggatgcggttcttggcgtgaacccgcaggaagccgcgcttctgaaccgcgccgcctttggccgggcactggaaaatgtcggggccgagaaacagtggttccagctgggcgctgaggaggtcttctaccttcaccatgctttggagtgcatcgtggtcgagtcggcgaacaaggatctgatgagccaaggggagctgtgggatcacttgtgctccgcatcagagtcgtttcctgagatgtacagggcgtactcgcatctcaggtcgaagaactgggtggtgcggtcaggtttgcagtatggtacggatttcgtcgcttaccgtcatcaccccgcgctcgtccactcggagtttgctgtggttgtggttccggaaggatcggggttcggcggtaggtgtggccgcctgaaggtgtggtctgatctactgtgcgcgctccgagcttctggcagtgtggccaagacgctgctggttctgacaatctccagcaatgtctgtgaactgagatccccagattgtttggaacggttggttgttcatgaaagaactattacaaggtggatagcccagcagtgccgtgagcagcgatgtaaaccgtgcagagaagaagcatatacggaagaacaagatcacgcaggagaaactgtagtgttcaactattggggtctagtactaggtttcacagttctttctagcctgcttgtatacaagctgagattccgacaatcaagctaaatatttctctgtactcctattggtgatgtttaacttctcatcttattgcaatcctgtgccggtagtcttgtgc

SEQ ID NO: 69088 - protein, 362 aa, Triticum aestivum
  peptide (1)..(362): Ceres Seq. ID no. 13584798
RQLDAESSLLLTRAGGRRRKPRGGSNAGAWIPRVPPPTRPVLRPSPIGCSILALARLRCRFLSAPPQLMDMSGPRWKKGKDGKDFAALAAAQPMSSIVAKLQSSLEGSKLVATLSSRGGDAVLGVNPQEAALLNRAAFGRALENVGAEKQWFQLGAEEVFYLHHALECIVVESANKDLMSQGELWDHLCSASESFPEMYRAYSHLRSKNWVVRSGLQYGTDFVAYRHHPALVHSEFAVVVVPEGSGFGGRCGRLKVWSDLLCALRASGSVAKTLLVLTISSNVCELRSPDCLERLVVHERTITRWIAQQCREQRCKPCREEAYTEEQDHAGETVVFNYWGLVLGFTVLSSLLVYKLRFRQSS

SEQ ID NO: 69089 - protein, 294 aa, Triticum aestivum
  peptide (1)..(294): Ceres Seq. ID no. 13584799
MDMSGPRWKKGKDGKDFAALAAAQPMSSIVAKLQSSLEGSKLVATLSSRGGDAVLGVNPQEAALLNRAAFGRALENVGAEKQWFQLGAEEVFYLHHALECIVVESANKDLMSQGELWDHLCSASESFPEMYRAYSHLRSKNWVVRSGLQYGTDFVAYRHHPALVHSEFAVVVVPEGSGFGGRCGRLKVWSDLLCALRASGSVAKTLLVLTISSNVCELRSPDCLERLVVHERTITRWIAQQCREQRCKPCREEAYTEEQDHAGETVVFNYWGLVLGFTVLSSLLVYKLRFRQSS

SEQ ID NO: 69090 - protein, 292 aa, Triticum aestivum
  peptide (1)..(292): Ceres Seq. ID no. 13584800
MSGPRWKKGKDGKDFAALAAAQPMSSIVAKLQSSLEGSKLVATLSSRGGDAVLGVNPQEAALLNRAAFGRALENVGAEKQWFQLGAEEVFYLHHALECIVVESANKDLMSQGELWDHLCSASESFPEMYRAYSHLRSKNWVVRSGLQYGTDFVAYRHHPALVHSEFAVVVVPEGSGFGGRCGRLKVWSDLLCALRASGSVAKTLLVLTISSNVCELRSPDCLERLVVHERTITRWIAQQCREQRCKPCREEAYTEEQDHAGETVVFNYWGLVLGFTVLSSLLVYKLRFRQSS

SEQ ID NO: 69091 - DNA, 1225 bp, Triticum aestivum
  misc_feature (1)..(1225): Ceres Seq. ID no. 12626036
tagaccaaagcctcgcacccaaatccgcaaagaaagaaagcaagcaagccaaacaaacgacgtttcagccaagaagaagacatgggggagcggcgcagtgacgaccgacgccaggagcccacggtggccagggcggacggccccccgattcccgccgacgagtccgacgacgagttcgagttctccttcgggagccgggagcctgccacgggcggcgccgcggccgacgagctcttcgccgacggccgcatcaggccgttctacccggtgttcggccgggtcttcgacgacgcgcacgtgccgtcggcgcccggccggaggccgctgggccggctgttcctcgaggaggcgcggaactcgtccgtcgggtccacgtcctcgtcctcctcctccgccgccacggacgccggggacctcgacggcgcgtccccggacagctactgcgtctggacgcccggcgcctcggccgcgtcctcgccggcgcggtcgccgcggaagagcggatccacggggtccttgtcgcggtggcgccgcgtcagcgacctcgtcgtcggccgcagccacagcgacggcagggacaagttccgattcctttccgcgccgccctcgcccgccagggagcagcccaaggggaagccacgaggccgggacagcaaagccgccaccgagctcgacacggtggccgccagccaccggcagttctacggcactaaggcctcccccggcgcggcgcggcggacgttcttgccgtaccggcaggatctcgtcggcctcttctccgcgcccaaggggctcagccggagccaatacttctgacttccaagctggcgcgtcccccgccccgccgtggagaaccagtttcaaaatgtgagatttcacatttgggttgaagtttcgaacttttgacccgggagcaactttgtgttcgtaaatggcgatggtaatactggattgttgcacgggattgagctagtccaaaaagacgaggcgtcaagtcagagcaagggaaatgtgaggcctaaattttggatccagtctgggataccgggctctccaagtcaatgtgaagttgtgatcgacatgtgaacatagtactaggaccaaaaaaaggactgtataggagattaaaatacacgtggaagctcagaaaagttttgtagtaatcatgtgttacctgtacatgcatgtatattgtactaccagaataatagattttttttcttgc

SEQ ID NO: 69092 - protein, 289 aa, Triticum aestivum
  peptide (1)..(289): Ceres Seq. ID no. 12626037
RPKPRTQIRKERKQASQTNDVSAKKKTWGSGAVTTDARSPRWPGRTAPRFPPTSPTTSSSSPSGAGSLPRAAPRPTSSSPTAASGRSTRCSAGSSTTRTCRRRPAGGRWAGCSSRRRGTRPSGPRPRPPPPPPRTPGTSTARPRTATASGRPAPRPRPRRRGRRGRADPRGPCRGGAASATSSSAAATATAGTSSDSFPRRPRPPGSSPRGSHEAGTAKPPPSSTRWPPATGSSTALRPPPARRGGRSCRTGRISSASSPRPRGSAGANTSDFQAGASPAPPWRTSFKM

SEQ ID NO: 69093 - protein, 244 aa, Triticum aestivum
  peptide (1)..(244): Ceres Seq. ID no. 12626038
MGERRSDDRRQEPTVARADGPPIPADESDDEFEFSFGSREPATGGAAADELFADGRIRPFYPVFGRVFDDAHVPSAPGRRPLGRLFLEEARNSSVGSTSSSSSSAATDAGDLDGASPDSYCVWTPGASAASSPARSPRKSGSTGSLSRWRRVSDLVVGRSHSDGRDKFRFLSAPPSPAREQPKGKPRGRDSKAATELDTVAASHRQFYGTKASPGAARRTFLPYRQDLVGLFSAPKGLSRSQYF

SEQ ID NO: 69094 - DNA, 1569 bp, Triticum aestivum
  misc_feature (1)..(1569): Ceres Seq. ID no. 13656091
gaaagccggctcttgctcttgttcttcgtcttcctctacactgcatatttacacatgcaagaattgagaagcacaacaaagagcgcgcagagctaattaagctaagctaggtaaacaaggtagtccacttggttgcaggatggcgtgggtgagggacatgaagacgaagctcgaggacgccgagctgccggacaaggtgcagagatggccgaagcactgcattttcagcgtcccaccgcgcttcaagatggtcgacagcagcgtctacaagccgcagactgtgtctctcggcccattccatcatggcgctcaggacctgaaatccatggaggagcacaagttgagggctgtccgtcacctcctggcccgggacagctacataacctcccttgacgaccttgtcagggccgtggaagaggtggccgacgagctggaggactcctacatggacctaagtggagagtggcgtggcaaggagaacaggggcaagttcctcgagatgatgatcacggacggctgcttcctgctggaggtgatgaggacggacgcgacccaaaaggaggactccgttgtaaagggctatgcgcacgaccccgtcttcagctggtatggcatacaacacatcaagccgttcgtccaacgtgacatgctcttggtagagaaccagctgccactcaggttgctccagagaatcgttgccatggaggaaacgcactctccgaggcagaacacagattccataaattgcatggtgctcaagttcctggggcagaaagatgcacagcccagatatgagttgggactccacccgctcgacatctaccggacgagccagttcaggggcatccaagagcatattaacactgccagttgtctgatgatccatcatcaacatatgatgcgggaggagacccatcgtccacagagacccctggcccgatctgcgcgggagctgaccgaggcagggatccggttactgcccatagagacaagccgcctcaacgatttccggttcgataggagtgatgggacgctccaaatgcccaagatccacgtgcatgactccaccgcctacatgttccgcaacatgatggcgttcgaggtgctgcgcgtcggcaccaccaacgacgtgacggcgtacgtcatgtttctcaaggacatcgtcgactccgcctacgatgttcgcctgctggtgaggaacggggtcctggagcacgaccttgccaacgacaacgccgtggtgaggctcttcaacggcctcaccagggacgtgacaaggaactgggagaatcagctggcgtacatgaaggtgcgtgaagacgtggagaactactgcatgacccaccaccgcaccaactgcgtgcgcctctttctcaatcaatcctgggcctacctcatgaccaagtacttgagcaacccctggacattccttggcctcgtcaccgccaccttgctcctcgtcgcagatatcgtgcaggccgtgtatgcagtcaaatcgtacaaagagggcaaatgaatgtattaatcagaagcatttcatacatttgttgtttttattcaattgttttg

SEQ ID NO: 69095 - protein, 458 aa, Triticum aestivum
  peptide (1)..(458): Ceres Seq. ID no. 13656092
MAWVRDMKTKLEDAELPDKVQRWPKHCIFSVPPRFKMVDSSVYKPQTVSLGPFHHGAQDLKSMEEHKLRAVRHLLARDSYITSLDDLVRAVEEVADELEDSYMDLSGEWRGKENRGKFLEMMITDGCFLLEVMRTDATQKEDSVVKGYAHDPVFSWYGIQHIKPFVQRDMLLVENQLPLRLLQRIVAMEETHSPRQNTDSINCMVLKFLGQKDAQPRYELGLHPLDIYRTSQFRGIQEHINTASCLMIHHQHMMREETHRPQRPLARSARELTEAGIRLLPIETSRLNDFRFDRSDGTLQMPKIHVHDSTAYMFRNMMAFEVLRVGTTNDVTAYVMFLKDIVDSAYDVRLLVRNGVLEHDLANDNAVVRLFNGLTRDVTRNWENQLAYMKVREDVENYCMTHHRTNCVRLFLNQSWAYLMTKYLSNPWTFLGLVTATLLLVADIVQAVYAVKSYKEGK

SEQ ID NO: 69096 - protein, 452 aa, Triticum aestivum
  peptide (1)..(452): Ceres Seq. ID no. 13656093
MKTKLEDAELPDKVQRWPKHCIFSVPPRFKMVDSSVYKPQTVSLGPFHHGAQDLKSMEEHKLRAVRHLLARDSYITSLDDLVRAVEEVADELEDSYMDLSGEWRGKENRGKFLEMMITDGCFLLEVMRTDATQKEDSVVKGYAHDPVFSWYGIQHIKPFVQRDMLLVENQLPLRLLQRIVAMEETHSPRQNTDSINCMVLKFLGQKDAQPRYELGLHPLDIYRTSQFRGIQEHINTASCLMIHHQHMMREETHRPQRPLARSARELTEAGIRLLPIETSRLNDFRFDRSDGTLQMPKIHVHDSTAYMFRNMMAFEVLRVGTTNDVTAYVMFLKDIVDSAYDVRLLVRNGVLEHDLANDNAVVRLFNGLTRDVTRNWENQLAYMKVREDVENYCMTHHRTNCVRLFLNQSWAYLMTKYLSNPWTFLGLVTATLLLVADIVQAVYAVKSYKEGK

SEQ ID NO: 69097 - protein, 422 aa, Triticum aestivum
  peptide (1)..(422): Ceres Seq. ID no. 13656094
MVDSSVYKPQTVSLGPFHHGAQDLKSMEEHKLRAVRHLLARDSYITSLDDLVRAVEEVADELEDSYMDLSGEWRGKENRGKFLEMMITDGCFLLEVMRTDATQKEDSVVKGYAHDPVFSWYGIQHIKPFVQRDMLLVENQLPLRLLQRIVAMEETHSPRQNTDSINCMVLKFLGQKDAQPRYELGLHPLDIYRTSQFRGIQEHINTASCLMIHHQHMMREETHRPQRPLARSARELTEAGIRLLPIETSRLNDFRFDRSDGTLQMPKIHVHDSTAYMFRNMMAFEVLRVGTTNDVTAYVMFLKDIVDSAYDVRLLVRNGVLEHDLANDNAVVRLFNGLTRDVTRNWENQLAYMKVREDVENYCMTHHRTNCVRLFLNQSWAYLMTKYLSNPWTFLGLVTATLLLVADIVQAVYAVKSYKEGK

SEQ ID NO: 69098 - DNA, 1378 bp, Triticum aestivum
  misc_feature (1)..(1378): Ceres Seq. ID no. 13597697
agcagatatttaatccgtttgcgtgccacggcagccatggcgagcgcgcccaatggggtcgcggcctttcacgtgctgccgctgcccgtcgggggccaggtggtgtngcgagaccaatcatatcccgctcccactcgcgacacctgtgctccctgacgcgtgtcccttgcgcgtccttgtataaaaccaacctgcttgccgccgtggtctactcgcaccgcgccgagaaagtagcactcagcgtaactgagactagtcgctgccgttctcttctgcttccgccgaggcgtctggtgtatgatggagaggaagggagggtgctgcttggcgccgaggtacgcagccggggcccaggcaggccaggggtggcacatgggaagggccatgctgaagtttaggcccatcgcgccaaagccggcggtgatggcgcctgcgccgatgccggccgtgcccgctgggaaggggaaggggagacggaaggcggttgcagggccagggggtaccgggaggaggggacggaagcccaagaagcaggccacggtggctgcaccgacgacgcaaaagttggactacgtgcaggacaagcctttgtcctcgccgtcctcctcctcgtcggggatgacgtccgtcgactcgtcgcctcctccacccctgccgctcatgcctgtgctgccggcagaggaggggttcggtggggcggcgccggtggcgaatctggcgcctgcccacgttgccggactggtcctgccgccgcaggcgctgcggcaagcggtgtcctgggtgacggttgaggacgtcacaggcatctggcgcgacggcgaggcgccgtacgctgcggcctgcggcggcgacgaggccccaacgttcgtgtccgaccagtgcggccgcgtcacgtggacaaacgtggctttcaaccgggcagtgtccggtagggaggacgtagacgcagccatggccccgtcggcggccgcttccgaggtgcgggtggtgctcgccgccaaggatggcgcccccgtgccggcgtggggctcctgtgccggtttcacctgtcgggtgcgcgtcccgtacgcatgccctcgccgaggttccctcgtggccccgtgcgacgtgtggcggctagacgctggtggctacctctggcggctcgaccttcaggccaccctcagcctctccctcggcggcttcatttgactgcgtacgcattccatgtacggagacgtatgaaccaatcaaaatcatgtgttagtctgcgctatgattatggtattgatttagcggtcatgactcattaccggatttggtatactcttattatgaactgaactgtagagtagtttaagaagaggggtagagatgcaagtgcaaaagatttctttcc

SEQ ID NO: 69099 - protein, 297 aa, Triticum aestivum
  peptide (1)..(297): Ceres Seq. ID no. 13597698
MMERKGGCCLAPRYAAGAQAGQGWHMGRAMLKFRPIAPKPAVMAPAPMPAVPAGKGKGRRKAVAGPGGTGRRGRKPKKQATVAAPTTQKLDYVQDKPLSSPSSSSSGMTSVDSSPPPPLPLMPVLPAEEGFGGAAPVANLAPAHVAGLVLPPQALRQAVSWVTVEDVTGIWRDGEAPYAAACGGDEAPTFVSDQCGRVTWTNVAFNRAVSGREDVDAAMAPSAAASEVRVVLAAKDGAPVPAWGSCAGFTCRVRVPYACPRRGSLVAPCDVWRLDAGGYLWRLDLQATLSLSLGGFI

SEQ ID NO: 69100 - protein, 296 aa, Triticum aestivum
  peptide (1)..(296): Ceres Seq. ID no. 13597699
MERKGGCCLAPRYAAGAQAGQGWHMGRAMLKFRPIAPKPAVMAPAPMPAVPAGKGKGRRKAVAGPGGTGRRGRKPKKQATVAAPTTQKLDYVQDKPLSSPSSSSSGMTSVDSSPPPPLPLMPVLPAEEGFGGAAPVANLAPAHVAGLVLPPQALRQAVSWVTVEDVTGIWRDGEAPYAAACGGDEAPTFVSDQCGRVTWTNVAFNRAVSGREDVDAAMAPSAAASEVRVVLAAKDGAPVPAWGSCAGFTCRVRVPYACPRRGSLVAPCDVWRLDAGGYLWRLDLQATLSLSLGGFI

SEQ ID NO: 69101 - protein, 272 aa, Triticum aestivum
  peptide (1)..(272): Ceres Seq. ID no. 13597700
MGRAMLKFRPIAPKPAVMAPAPMPAVPAGKGKGRRKAVAGPGGTGRRGRKPKKQATVAAPTTQKLDYVQDKPLSSPSSSSSGMTSVDSSPPPPLPLMPVLPAEEGFGGAAPVANLAPAHVAGLVLPPQALRQAVSWVTVEDVTGIWRDGEAPYAAACGGDEAPTFVSDQCGRVTWTNVAFNRAVSGREDVDAAMAPSAAASEVRVVLAAKDGAPVPAWGSCAGFTCRVRVPYACPRRGSLVAPCDVWRLDAGGYLWRLDLQATLSLSLGGFI

SEQ ID NO: 69102 - DNA, 1188 bp, Triticum aestivum
  misc_feature (1)..(1188): Ceres Seq. ID no. 12586854
gtcgcagaacagtccgccacgcgaacaccacagcccaaacctcgcgaaccaaaccctgcacagcagatggcgcccgtggcgggcagcagcttctttcaggaagcgcggctcccggagcagcgggccgtcgagggcgtcgccttccccgcggtgctcgtcccgaccgccgggcccccggggccgggagaggggagcctcgacgagttcctggccgccgtgcggtcggagcgggcgtcccgggtggagccgctgctgcgggaggcaggggcggtgctgctgcgggggttccccgcgcggacggcggcggacttcgacgccgccgtggaggcgttcgggtacgaggagctgccgtacgtcggcggcgcggcgccccggaccaacgtggtggggcgggtgttcaccgccaacgagtcgccgcccgaccagaagatccccttccaccatgagatggcgcaggttccgacttttccggcaaaactgttcttcttctgtgaggtagaaccaaaaagtggtggagagacaccaatagtgctgagccactatgtgtataagaggatgaaggaaaacttccctgaatttgtggagaaattggagaagcatggcctgatatacacaagggtattgggagagggtgacgacccatcttctccaatcggccgtggatggcaatctacatttctcactaaagataaatccgttgccgaggaaagggctgcgaagcttgggatgaagctggaatggacccacgacggggttaaaacagtgatgggtccaataccagcagtcaagtgggacgagagccgagggaggaagatatggttcaacagcatggtcgccgcctacacagggtggaaggacgcccgcaatgatccagttaaggccgtcaccttcggcgacggctcgcccttgcccgccgatgtcatagaggaatgtggcaagatcctagaagaagaatgcgtcgcggttccatggcagcaaggtgacatccttctcatcgacaactgggcggtgctgcactcacggcggtcctttgagcccccacggcgcgtacttgcttctctctgtaaatagcatgtaaatgttcgacattagagatgaggctttgctcgggattgatccgcacttctgcgggttgtatgtaccatgtacgtgatcggatttgcacatacaaaactggaataattttgt

SEQ ID NO: 69103 - protein, 356 aa, Triticum aestivum
  peptide (1)..(356): Ceres Seq. ID no. 12586855
VAEQSATRTPQPKPREPNPAQQMAPVAGSSFFQEARLPEQRAVEGVAFPAVLVPTAGPPGPGEGSLDEFLAAVRSERASRVEPLLREAGAVLLRGFPARTAADFDAAVEAFGYEELPYVGGAAPRTNVVGRVFTANESPPDQKIPFHHEMAQVPTFPAKLFFFCEVEPKSGGETPIVLSHYVYKRMKENFPEFVEKLEKHGLIYTRVLGEGDDPSSPIGRGWQSTFLTKDKSVAEERAAKLGMKLEWTHDGVKTVMGPIPAVKWDESRGRKIWFNSMVAAYTGWKDARNDPVKAVTFGDGSPLPADVIEECGKILEEECVAVPWQQGDILLIDNWAVLHSRRSFEPPRRVLASLCK

SEQ ID NO: 69104 - protein, 334 aa, Triticum aestivum
  peptide (1)..(334): Ceres Seq. ID no. 12586856
MAPVAGSSFFQEARLPEQRAVEGVAFPAVLVPTAGPPGPGEGSLDEFLAAVRSERASRVEPLLREAGAVLLRGFPARTAADFDAAVEAFGYEELPYVGGAAPRTNVVGRVFTANESPPDQKIPFHHEMAQVPTFPAKLFFFCEVEPKSGGETPIVLSHYVYKRMKENFPEFVEKLEKHGLIYTRVLGEGDDPSSPIGRGWQSTFLTKDKSVAEERAAKLGMKLEWTHDGVKTVMGPIPAVKWDESRGRKIWFNSMVAAYTGWKDARNDPVKAVTFGDGSPLPADVIEECGKILEEECVAVPWQQGDILLIDNWAVLHSRRSFEPPRRVLASLCK

SEQ ID NO: 69105 - protein, 207 aa, Triticum aestivum
  peptide (1)..(207): Ceres Seq. ID no. 12586857
MAQVPTFPAKLFFFCEVEPKSGGETPIVLSHYVYKRMKENFPEFVEKLEKHGLIYTRVLGEGDDPSSPIGRGWQSTFLTKDKSVAEERAAKLGMKLEWTHDGVKTVMGPIPAVKWDESRGRKIWFNSMVAAYTGWKDARNDPVKAVTFGDGSPLPADVIEECGKILEEECVAVPWQQGDILLIDNWAVLHSRRSFEPPRRVLASLCK

SEQ ID NO: 69106 - DNA, 1140 bp, Triticum aestivum
  misc_feature (1)..(1140): Ceres Seq. ID no. 13585461
aatcgagcacgccgtccacttccgaggtcgcgtgcgtggatagggtttgcttcgccgccgtcccgccgactgcgcctccccggccctcatcgtcgcgccaccgccggggagaccaggccaccaccagccgagccaccgatcgatcgatcgaccgaggcggtgatggcgcaccagatccccaaggtcgcgcacaccctcgtcgagatcgccgaggtcgcgcgctacgcctacgagcaccgctccggccacgctccggaccacgacggcgccacggcgctggccgccgacggggaggaggccgcgcggctgcgggcggagaacgccgtcctccgcgcccgcctcgcggacgacctcgccctccttcgcgagcttcagggcgcgccctttgtttcccaggagtgccctcccgacttgcataatcgtcttgtagcatcagtcaacaatgctggcttccttgctcatcttgagaaagtacgagacgagccgctgcatcaacataccaaactatctattggcggtgtgacagaggtggatattggagatattccttacactaaagatgaggggaagactgggtcatggctcttggtttcctgtgacactgctgggggcaatttggaggaaattagtggaattgatgacgaaaattatgtgatggttaatgaagatgacatcgtcgatgctattgctacctttgttgctaggtgcattcttgaagatccaaagtccaagtcattatcatcgaaagagctgcaaaaagctgttgcatcggcattgagcagcatgacagaccggaagaaatggataagtttctgggaggctggaaaggtgatttacatactggcaacttgggggatcacaatagcagggctgtacaggagtcgtgctgtcctgaagatggcagccaaaggagctgtcgtctccaccaaatttatcatgaaggcattgtgaggtgccaagtgccgaatagtggcatcatgatcacacgcaacggtcagcaagttgtaaatacaaactcatcgtgtcaactgtacatatgtgttgtgtgatatgatttatctgagaactattcgttggtcagatgtgctgtaacttctgaaatgataacgatttctctcatcgtgtatgaataatgggggc

SEQ ID NO: 69107 - protein, 316 aa, Triticum aestivum
  peptide (1)..(316): Ceres Seq. ID no. 13585462
NRARRPLPRSRAWIGFASPPSRRLRLPGPHRRATAGETRPPPAEPPIDRSTEAVMAHQIPKVAHTLVEIAEVARYAYEHRSGHAPDHDGATALAADGEEAARLRAENAVLRARLADDLALLRELQGAPFVSQECPPDLHNRLVASVNNAGFLAHLEKVRDEPLHQHTKLSIGGVTEVDIGDIPYTKDEGKTGSWLLVSCDTAGGNLEEISGIDDENYVMVNEDDIVDAIATFVARCILEDPKSKSLSSKELQKAVASALSSMTDRKKWISFWEAGKVIYILATWGITIAGLYRSRAVLKMAAKGAVVSTKFIMKAL

SEQ ID NO: 69108 - protein, 262 aa, Triticum aestivum
  peptide (1)..(262): Ceres Seq. ID no. 13585463
MAHQIPKVAHTLVEIAEVARYAYEHRSGHAPDHDGATALAADGEEAARLRAENAVLRARLADDLALLRELQGAPFVSQECPPDLHNRLVASVNNAGFLAHLEKVRDEPLHQHTKLSIGGVTEVDIGDIPYTKDEGKTGSWLLVSCDTAGGNLEEISGIDDENYVMVNEDDIVDAIATFVARCILEDPKSKSLSSKELQKAVASALSSMTDRKKWISFWEAGKVIYILATWGITIAGLYRSRAVLKMAAKGAVVSTKFIMKAL

SEQ ID NO: 69109 - DNA, 426 bp, Triticum aestivum
  misc_feature (1)..(426): Ceres Seq. ID no. 13655970
acaagcccaccaccattgcactcgaaagcttcagctcaagctcaagctccacatcaacaatggcgagcagcagctcaatgctggccgtcctagccaccctggccctgctgctctccccagccgcctcagccctgtcgtccacgctgtccccggacttccacgcggagacgtgcccgcagctggacggcatcgtgcgcgcggcggtgcaggccgccctcacgagcgaaatcgccatcgccgctggcctcgtccgcatctacttccacgactgcttcccgcagggctgcgacgcctccatcctcctcaactccacctccgcccgcgagacggcgctgggccccaacctcagcatccagccgcgcgccatgcagctcgtcgagtccatccgctccacggcgcacgccgcctgcgggcccgttgtctcct

SEQ ID NO: 69110 - protein, 141 aa, Triticum aestivum
  peptide (1)..(141): Ceres Seq. ID no. 13655971
QAHHHCTRKLQLKLKLHINNGEQQLNAGRPSHPGPAALPSRLSPVVHAVPGLPRGDVPAAGRHRARGGAGRPHERNRHRRWPRPHLLPRLLPAGLRRLHPPQLHLRPRDGAGPQPQHPAARHAARRVHPLHGARRLRARCL

SEQ ID NO: 69111 - protein, 141 aa, Triticum aestivum
  peptide (1)..(141): Ceres Seq. ID no. 13655972
KPTTIALESFSSSSSSTSTMASSSSMLAVLATLALLLSPAASALSSTLSPDFHAETCPQLDGIVRAAVQAALTSEIAIAAGLVRIYFHDCFPQGCDASILLNSTSARETALGPNLSIQPRAMQLVESIRSTAHAACGPVVS

SEQ ID NO: 69112 - protein, 122 aa, Triticum aestivum
  peptide (1)..(122): Ceres Seq. ID no. 13655973
MASSSSMLAVLATLALLLSPAASALSSTLSPDFHAETCPQLDGIVRAAVQAALTSEIAIAAGLVRIYFHDCFPQGCDASILLNSTSARETALGPNLSIQPRAMQLVESIRSTAHAACGPVVS

SEQ ID NO: 69113 - DNA, 2241 bp, Triticum aestivum
  misc_feature (1)..(2241): Ceres Seq. ID no. 12626078
aacgttctagaatcttcacaaaccctcaacaaggttcccctccctcccctcccctgctccccctctgttcctccgccccctcatcgcagccgcctctctcccgaccaaaagccctagctagctagacccaccccatccatggcgaccatccccaccaccggctccgcctccctcctccggggctccgccgccctccagagggacgggaggtcaaccaggccgtcgtcggcggccaggccgctgccggggcgacgcgcgcgctcgttgtcggtcgtgcgcgcctccgccaaggacatcgccttcgaccaggcgtcgcgctccgccctccaggccggcgtcgagaagctcgccgccgccgtcggcgtcaccctcggccccagaggaaggaatgtcgttttggacgagtttggcagccccaaagtggtcaatgatggagttacaatcgcccgggctattgagcttgctgatcccatggagaatgctggtgctgctttgattcgtgaagttgctagcaagacaaatgactcggcgggtgatgggaccacgaccgcatctgttctggctcgtgagatcattaaactgggattgctgagtgttacctcaggggcaaatccagtgtcaattaagaagggcatagataagactgtgcaaagtttagttgaggaactcgagaagaagtcacgacctgtgaagggcagcggggacattaaagctattgctgccatatctgctggaaatgatgactttattggtaccatgatcgcggaggctattaacaaagttggccctgatggtgtcctctcgattgagtcatcatcgtcgtttgagaccactgttgaagttgaagaaggaatggagattgacagaggatacatctctcctcagtttgtcacaaactctgagaagtcagttgttgagtttgaaaacgctagagttcttgtcactgatcagaagatttcctcaatcaaagaaatccttcctttgttggagcaaactacgcagttgagagcaccacttctcataattgcagaggacgtatctggtgaggctttggcaactctagttgtcaacaagcttagaggaattctgaatgtagctgcgattaaagctcctggttttggtgaaaggcgcaaggctctccttcaggacattgccattgttacaggtgctgaatttcaagccaaagatcttggccaactgatcgagcagacaacagtggagcagctcggcatagccaggaaggtgacaatctccgggtcatccacaaccataatagcagatgttgccaccaaggatgagatccaggccagaatcgcacagctgaagagagagctttctcagacagactccacatatgattctgagaagctggcagagagaatagcaaagctctctggcggagttgccgtgatcaaggttggagctgcaaccgagacggagctcgaggaccgcaagctccgcatagaggatgccaagaatgcaacttttgcagccattgaggaaggtatagtacctggaggtggtgcggcctatgttcacctgtccacatttgtaccagccatcaaggagaagctggatgaccctgaggagcgcctcggtgctgatatcattcagaaggctctagtggcacccgcatcgttgatagcacacaatgcgggagtcgaaggggaggtgatcgtggagaaaatcaaggacagcgagtgggagtttggatacaacgcgatgaccgacaagcatgagaacctggtagaggctggcgtcatcgaccccgcgaaggtgacgaggtgtgccctgcagaacgcggcgtcggtggccggaatggtcctgaccacgcaggcgatcgtcgtggagaagcctagcaagaaggcccccgcgcccgccgggatgccccagggcatgatgtagaagcgcaatgatacgtagcaacctgggggcatgcaattttaggggcagtgggagtgatcatttctccaagggagataactgtgggtacctcgagaaatcattggtgtgtaatggatagtgatgacctgttctattgtctatttggtaccgctaatatcgtgaaaactattttgcctagctgagtttgagaagagtaataaatgagtaaagttgagcatgcccctgatttttctcttgattgtttgatctgggattttaggcaacaactggatgttctctctaggggaatgaaagcatgtaggcaggcagctttggctcaaagcctgaacacttttt

SEQ ID NO: 69114 - protein, 588 aa, Triticum aestivum
  peptide (1)..(588): Ceres Seq. ID no. 12626079
MATIPTTGSASLLRGSAALQRDGRSTRPSSAARPLPGRRARSLSVVRASAKDIAFDQASRSALQAGVEKLAAAVGVTLGPRGRNVVLDEFGSPKVVNDGVTIARAIELADPMENAGAALIREVASKTNDSAGDGTTTASVLAREIIKLGLLSVTSGANPVSIKKGIDKTVQSLVEELEKKSRPVKGSGDIKAIAAISAGNDDFIGTMIAEAINKVGPDGVLSIESSSSFETTVEVEEGMEIDRGYISPQFVTNSEKSVVEFENARVLVTDQKISSIKEILPLLEQTTQLRAPLLIIAEDVSGEALATLVVNKLRGILNVAAIKAPGFGERRKALLQDIAIVTGAEFQAKDLGQLIEQTTVEQLGIARKVTISGSSTTIIADVATKDEIQARIAQLKRELSQTDSTYDSEKLAERIAKLSGGVAVIKVGAATETELEDRKLRIEDAKNATFAAIEEGIVPGGGAAYVHLSTFVPAIKEKLDDPEERLGADIIQKALVAPASLIAHNAGVEGEVIVEKIKDSEWEFGYNAMTDKHENLVEAGVIDPAKVTRCALQNAASVAGMVLTTQAIVVEKPSKKAPAPAGMPQGMM

SEQ ID NO: 69115 - protein, 477 aa, Triticum aestivum
  peptide (1)..(477): Ceres Seq. ID no. 12626080
MENAGAALIREVASKTNDSAGDGTTTASVLAREIIKLGLLSVTSGANPVSIKKGIDKTVQSLVEELEKKSRPVKGSGDIKAIAAISAGNDDFIGTMIAEAINKVGPDGVLSIESSSSFETTVEVEEGMEIDRGYISPQFVTNSEKSVVEFENARVLVTDQKISSIKEILPLLEQTTQLRAPLLIIAEDVSGEALATLVVNKLRGILNVAAIKAPGFGERRKALLQDIAIVTGAEFQAKDLGQLIEQTTVEQLGIARKVTISGSSTTIIADVATKDEIQARIAQLKRELSQTDSTYDSEKLAERIAKLSGGVAVIKVGAATETELEDRKLRIEDAKNATFAAIEEGIVPGGGAAYVHLSTFVPAIKEKLDDPEERLGADIIQKALVAPASLIAHNAGVEGEVIVEKIKDSEWEFGYNAMTDKHENLVEAGVIDPAKVTRCALQNAASVAGMVLTTQAIVVEKPSKKAPAPAGMPQGMM

SEQ ID NO: 69116 - protein, 382 aa, Triticum aestivum
  peptide (1)..(382): Ceres Seq. ID no. 12626081
MIAEAINKVGPDGVLSIESSSSFETTVEVEEGMEIDRGYISPQFVTNSEKSVVEFENARVLVTDQKISSIKEILPLLEQTTQLRAPLLIIAEDVSGEALATLVVNKLRGILNVAAIKAPGFGERRKALLQDIAIVTGAEFQAKDLGQLIEQTTVEQLGIARKVTISGSSTTIIADVATKDEIQARIAQLKRELSQTDSTYDSEKLAERIAKLSGGVAVIKVGAATETELEDRKLRIEDAKNATFAAIEEGIVPGGGAAYVHLSTFVPAIKEKLDDPEERLGADIIQKALVAPASLIAHNAGVEGEVIVEKIKDSEWEFGYNAMTDKHENLVEAGVIDPAKVTRCALQNAASVAGMVLTTQAIVVEKPSKKAPAPAGMPQGMM

SEQ ID NO: 69117 - DNA, 1851 bp, Triticum aestivum
  misc_feature (1)..(1851): Ceres Seq. ID no. 13597826
atctatccaggtccagccgagcccatggcggccaagcacctgctctcccgcgcccgcctcctcctcacccgccaccgcagccgccccaccatcctcccgcccgcgctcacccgcctcctcttcggcgggacaaccacccccgccgagccggaggacgacgacaaggccagggcccgggcggcggcggcggcggcggccgtcgccctggacgccaagagggccaagcgggaaggctccgacgacgacgacgagggcgccgggctgccctggacgtcctggcggcccgacgtggcctggctgaccaaggcactcgagcccgcgctgcagctctacaagcactacaactggaagccattcgcctctgacaacatccccgcaagcacccgcacttttagcgagatcataagtgacctccagcacagcaaggtgagcatacaggactggagcctcagtgatcttaccgtcggtctctacctcatttaccttacccaagcttccgcaaagaatgctcaagccttcaagggcgttcagatttcctccaataagaaggttcaagaactaatttatcaccttgaacttgcaaaaggttgctataagggcagtgccactgggcttgcaaagcatagcatgctccggccaaggaatgttttaaagtttgtgaaagattctagtatctttagacctggatattacatcggcatcgatccacgtgctaaactggtcatccttgggattcgtgggacccatacggtttatgaccttgtcaccgatttggttgcattgagcgataagaaggtatcacctaaaggtttctcaacacactttggaacctacgaggccgctcgatggtacctacgccatgagttgagcatcatcagaaaatgtttggaaaaacacaaggactacaagttgcggttggtaggtcactcccttggaggagcttcagctgcattgcttgctataatgttaaggaagaagtcgaaggaggagcttggatttagtcccgacatagtttcagctgttggatttggagtcccaccctgtgtatcgagagagatagccgagagttgcgcaagctatgtcaccactgttgtattgcaggatgatatagttcctaggttaagtgcagcttcactggcaagattgcgaaatgagataattgaaacagattgggccaaagttttggagaaggaagattggaagcatatagtggatatcgtgaccaatgctaagctagttgtttcgtccatccaagacgtggcaaacaaacttgccgattacgccaaagttgtaacatcagctagctccggtgatgccgcgaaagaccagccccgtcttcagggcccgacgaaagttttgaagcctgacggtgaagaagacgtctatgtgcctgaggatctcttcctcccagggacgctgtattacctccagagggacgtcgagaatataaatggcgttgaggacgagtcgtacacgctctggagaggcaacgccggggagaatttccagcggatactgttgtctggcaatttgatgtctgatcacaaatgcgatagcatacagtacgcgctcagagatgtgctcaagactctgcccctccctctgcccctgcaggaggattgatactaccaagttccaaagcttatgcagaaagcgggcttcgcaaaaatcgagtgttttgttgtacagttttaggttatgcaagggattgccaagaatgacaaagtgctaggaaactctcaagttgcagttcagagtttctggtgctgatctaggtgtagtacacctcttctttttttacaagaggtatatatagtgtaactctttgaaacttgagataaaagggtgacg

SEQ ID NO: 69118 - protein, 540 aa, Triticum aestivum
  peptide (1)..(540): Ceres Seq. ID no. 13597827
IYPGPAEPMAAKHLLSRARLLLTRHRSRPTILPPALTRLLFGGTTTPAEPEDDDKARARAAAAAAAVALDAKRAKREGSDDDDEGAGLPWTSWRPDVAWLTKALEPALQLYKHYNWKPFASDNIPASTRTFSEIISDLQHSKVSIQDWSLSDLTVGLYLIYLTQASAKNAQAFKGVQISSNKKVQELIYHLELAKGCYKGSATGLAKHSMLRPRNVLKFVKDSSIFRPGYYIGIDPRAKLVILGIRGTHTVYDLVTDLVALSDKKVSPKGFSTHFGTYEAARWYLRHELSIIRKCLEKHKDYKLRLVGHSLGGASAALLAIMLRKKSKEELGFSPDIVSAVGFGVPPCVSREIAESCASYVTTVVLQDDIVPRLSAASLARLRNEIIETDWAKVLEKEDWKHIVDIVTNAKLVVSSIQDVANKLADYAKVVTSASSGDAAKDQPRLQGPTKVLKPDGEEDVYVPEDLFLPGTLYYLQRDVENINGVEDESYTLWRGNAGENFQRILLSGNLMSDHKCDSIQYALRDVLKTLPLPLPLQED

SEQ ID NO: 69119 - protein, 532 aa, Triticum aestivum
  peptide (1)..(532): Ceres Seq. ID no. 13597828
MAAKHLLSRARLLLTRHRSRPTILPPALTRLLFGGTTTPAEPEDDDKARARAAAAAAAVALDAKRAKREGSDDDDEGAGLPWTSWRPDVAWLTKALEPALQLYKHYNWKPFASDNIPASTRTFSEIISDLQHSKVSIQDWSLSDLTVGLYLIYLTQASAKNAQAFKGVQISSNKKVQELIYHLELAKGCYKGSATGLAKHSMLRPRNVLKFVKDSSIFRPGYYIGIDPRAKLVILGIRGTHTVYDLVTDLVALSDKKVSPKGFSTHFGTYEAARWYLRHELSIIRKCLEKHKDYKLRLVGHSLGGASAALLAIMLRKKSKEELGFSPDIVSAVGFGVPPCVSREIAESCASYVTTVVLQDDIVPRLSAASLARLRNEIIETDWAKVLEKEDWKHIVDIVTNAKLVVSSIQDVANKLADYAKVVTSASSGDAAKDQPRLQGPTKVLKPDGEEDVYVPEDLFLPGTLYYLQRDVENINGVEDESYTLWRGNAGENFQRILLSGNLMSDHKCDSIQYALRDVLKTLPLPLPLQED

SEQ ID NO: 69120 - protein, 331 aa, Triticum aestivum
  peptide (1)..(331): Ceres Seq. ID no. 13597829
MLRPRNVLKFVKDSSIFRPGYYIGIDPRAKLVILGIRGTHTVYDLVTDLVALSDKKVSPKGFSTHFGTYEAARWYLRHELSIIRKCLEKHKDYKLRLVGHSLGGASAALLAIMLRKKSKEELGFSPDIVSAVGFGVPPCVSREIAESCASYVTTVVLQDDIVPRLSAASLARLRNEIIETDWAKVLEKEDWKHIVDIVTNAKLVVSSIQDVANKLADYAKVVTSASSGDAAKDQPRLQGPTKVLKPDGEEDVYVPEDLFLPGTLYYLQRDVENINGVEDESYTLWRGNAGENFQRILLSGNLMSDHKCDSIQYALRDVLKTLPLPLPLQED

SEQ ID NO: 69121 - DNA, 3007 bp, Triticum aestivum
  misc_feature (1)..(3007): Ceres Seq. ID no. 14302220
ctccaaaacaaaagccccgaagaaaccccaccaaactcctccatcctccgctcccatttccttcgtgccgtccgcctccgccgtctcgtctgccacccctcgccaccccctctcctccccaaggagcgcagccgcggagcccctcgcccccgtctcccatggcggcctctctcctccacgcagccgcctcctccccgctcgcgggcccctacccggccgcccgcgcggccttccgccccctcgcttcctccccattcctgcgcctcgcgcgctcctctcccgaccgccgtgcccgactggacttcccgctccgggcgctctcgggtggcgctcgcctctccaccggagtggccgccctccgtcctcgccgcttcgtcgccgccctcgcgggggaggaaccgatgagttcagaattgggtgatgacaaggaaaaggaaacggaaaagatcgaaatagagcctgaggaggcccaggaagtgtggagggaaatgctcaagcagttcaaggccgaggccatccgaatgcaggccctgacaacgcaggcatacgatgtctactccaagagggcgagggaggtgctgttagaggcctcagagaagctaaggatccaggcagataaagcacaaaaggacctgaccattatcgctgcagaggttggtgaggaggggcaggaatatctacagctggcagctaagaactccccagattcaatcaaggatatcaccgagacaatcaatgcagttggcaacctcaatgggccatcagagtataaggattatcatgtcggcatttcatttggtacctttcttactgtaggaggtttcctgaacttcatgctaactggaagtacatctgcaattcgctttggctttgttcttggctttgcactattggctctgggtatctcaagtttgagatcacaaagagcaggcggtcgtcagcctcgtcttctgctgaaagggcaagctgctattgcaagcgttatcttcttcaaggacttgtcagttttcttcaggtatgggtggtttccaaatgttttcgcggtccttctcagtggaatggtggcgaccttttacattcatcgcattgtgactggtggccacaaaggtcgcgcggagagcagttcagataactaatggttatacaacacacttggatgaatcatatgtccgcggaaacttgggttctgaagattgatggtgacccttcgccttaaggtttccttctttcatcagccttcaactcaggcacactctgtggtgtctctgaactcttaagtggttctatacagtgatacctggactcacaagacttgcctcgcatactcgcccctcacctttgttgctttcctcgtgtaatatagatgctgccccataagcagaataaggaatggcccttgaaggtctctagtatgtatcaatctgttcatcatttatgttgtttatttatgcaacgtagttgtaacacattgaatatccagtgaaatcccgaaaatcggtctgtcccaaaaaaaaaaaaaaaaagcttttttttttttttttttgatatctattccccccagatgtatgtatcagttcatgctacagatggagatggacagccgaatatgccgataaatatggcttacagtttcgacgagtcctacaattcagtagtgtagaaattatttctgaaccgaagaaaaccaggaaccattgcctggcctgcaatctcgagtagccgtcccaatcctcgatctgttctcagaccctcctccgtccgtcgcagctccagatttccttccccatggctccgatcaagatcggtatcaacggtttcggccggatcggcaggcttgtggccagggttgcgctccagagccccgatgtcgagctcgtcgccgtcaacgaccccttcatcaccaccgactacatgacctacatgttcaagtatgacactgtccacggacagtggaagcaccatgaagttaaggtgaaggactccaagacccttctcttcggtgagaaggaggttgctgtgtttggctgcaggaaccctgaggagatcccatgggctgctgctggtgctgagtacgttgttgagtccaccggtgttttcaccgacaaggacaaggctgcagctcacattaagggtggtgccaagaaggtcatcatttctgctcccagcaaggatgctcccatgtttgtctgtggtgtcaatgagaaggaatacaagtctgacatcgacattgtctccaacgctagctgcaccactaactgccttgctcctcttgctaaggttatcaatgacaggtttggcattgttgagggtttgatgaccacagttcatgccatgactgcaacccagaagactgttgatggtccttccagcaaggactggagaggtggaagggctgccagcttcaacatcattccaagcagcactggtgccgcaaaggctgttggcaaggtgctcccagagcttaacggaaagttgactggaatggccttccgtgttcccactgttgatgtttctgttgttgatctgactgttagacttgcgaagccagcaacctatgatcagattaaggctgctatcaaggaggagtctgagggaaacctcaagggcattttgggttacgttgatgaggaccttgtttccactgactttcagggtgacaacaggtccagcatcttcgatgccaaggccgggattgctctgaacgacaactttgtcaagcttgtctcctggtacgacaacgagtggggatacagcacccgcgtggtcgacctcatccgtcacatgcacagcaccaagtaaatgagaggcatgaagatacaggggagagtggtttgccccagaggagtgttcaaagcctcttcttctgagaataaatttttgtatggaattatgtcagctaaaaaccttttattggatgtatcctgatggttggtcacattttggtggtattatgtacttgcttgaactaaatcatgagtcattttcactcatcttctttggttatcat

SEQ ID NO: 69122 - protein, 377 aa, Triticum aestivum
  peptide (1)..(377): Ceres Seq. ID no. 14302221
PKQKPRRNPTKLLHPPLPFPSCRPPPPSRLPPLATPSPPQGAQPRSPSPPSPMAASLLHAAASSPLAGPYPAARAAFRPLASSPFLRLARSSPDRRARLDFPLRALSGGARLSTGVAALRPRRFVAALAGEEPMSSELGDDKEKETEKIEIEPEEAQEVWREMLKQFKAEAIRMQALTTQAYDVYSKRAREVLLEASEKLRIQADKAQKDLTIIAAEVGEEGQEYLQLAAKNSPDSIKDITETINAVGNLNGPSEYKDYHVGISFGTFLTVGGFLNFMLTGSTSAIRFGFVLGFALLALGISSLRSQRAGGRQPRLLLKGQAAIASVIFFKDLSVFFRYGWFPNVFAVLLSGMVATFYIHRIVTGGHKGRAESSSDN

SEQ ID NO: 69123 - protein, 337 aa, Triticum aestivum; identical to SEQ ID NO: 56415
  peptide (1)..(337): Ceres Seq. ID no. 14302222

SEQ ID NO: 69124 - protein, 325 aa, Triticum aestivum
  peptide (1)..(325): Ceres Seq. ID no. 14302223
MAASLLHAAASSPLAGPYPAARAAFRPLASSPFLRLARSSPDRRARLDFPLRALSGGARLSTGVAALRPRRFVAALAGEEPMSSELGDDKEKETEKIEIEPEEAQEVWREMLKQFKAEAIRMQALTTQAYDVYSKRAREVLLEASEKLRIQADKAQKDLTIIAAEVGEEGQEYLQLAAKNSPDSIKDITETINAVGNLNGPSEYKDYHVGISFGTFLTVGGFLNFMLTGSTSAIRFGFVLGFALLALGISSLRSQRAGGRQPRLLLKGQAAIASVIFFKDLSVFFRYGWFPNVFAVLLSGMVATFYIHRIVTGGHKGRAESSSDN

SEQ ID NO: 69125 - DNA, 1629 bp, Triticum aestivum
  misc_feature (1)..(1629): Ceres Seq. ID no. 13597648
agcgcgagacctctcccgcaagcaaacccaaatcggccgccgtcccctctcctcctccgcccacccccgccgccggtgccgcctcctcgcgagatcccgaccatggagggcagcagcggcctcgacgcggcgatcgagtcgctcctgaacacggagaagcagtgccgcctcgccggggatgtggccggcacccggaaggccgccgtcgacatcgtcgagctctgcttcaaggacgccgcctggaagacgctcaacgaccagatcgtcgtcctctccaagcggaggggccagctcaaacaggctattactgctgttgttcagaaagcgatggagtacattgacgtgacaccagacgtggagacacgtattgagcttatcaaaacattgagcagtgtcgctgctggaaaaatatatgtggagatagagagagctagattgatcaaaagacttgcaaaaattaaagaggagcagggaaagattgatgaagctgctgaaatcatgcaggaagttgctgttgaaacatttggctcgatggcaaagacagagaaacttgcattcattctggagcaggttcggctatgcctggatcgtcaagattatgtgcgcgcacaaattttatccaggaagattagccctagggtctttgatgcggatacatcaaaggacaaaaagaagccaaaggaaggcgataatatggttcaggaagcccctgcagatgtaccttcactcttagaactgaagcgcatctactatgaactgatgattcgctattactcacataacaatgattacctggaaatctgccgttgctacaagtcgatctatgaaattccatcaataaaagaggatccagcaaagtggacaccgattcttaggaagatctgttggttcttggtgctggcacctcatgatccaatgcagtcaagccttctcaatgctacactagaggataaaaacctttctgagatcccaaatttcagattactactgaagcaagttgttactatggaggtgatccagtggacaaagttgtgggaattcttcaaggatgaatacgagaacgagaagaatctccttggaggagctttaggcacaaaagctgcggaggatttgaagctgaggatcattgaacataatatcttggttgtttcaaagtactattcgaggattaccctgaagaggctggcggatcttctttgcttgagcctgcaggaggcggagaagcatatctcggacatggtgaactcaaaggctctgattgccaagatcgacagaccgatggggatcgtgtccttccggacggcccaggacagcaacggggtgctcaactcgtgggcgtcgaacctggagaagctcctggacctggtggagaagagctgcccccaaatacacaaggagacgatgatccccaaggcggtgttgaaagcctgaagtgaaccattttgaactgaatggccttgtttaggttgtgtgcgtagtagactttctgtggatctgaattcactttcactgtatgggtaaaactattctctctgctcaagtgggcgtcgcctgtttgctttgggaacttgtgtgcgaaccggtctggaaatactgtaaccccagggaatgacgaatactatttgctgt

SEQ ID NO: 69126 - protein, 476 aa, Triticum aestivum
  peptide (1)..(476): Ceres Seq. ID no. 13597649
SARPLPQANPNRPPSPLLLRPPPPPVPPPREIPTMEGSSGLDAAIESLLNTEKQCRLAGDVAGTRKAAVDIVELCFKDAAWKTLNDQIVVLSKRRGQLKQAITAVVQKAMEYIDVTPDVETRIELIKTLSSVAAGKIYVEIERARLIKRLAKIKEEQGKIDEAAEIMQEVAVETFGSMAKTEKLAFILEQVRLCLDRQDYVRAQILSRKISPRVFDADTSKDKKKPKEGDNMVQEAPADVPSLLELKRIYYELMIRYYSHNNDYLEICRCYKSIYEIPSIKEDPAKWTPILRKICWFLVLAPHDPMQSSLLNATLEDKNLSEIPNFRLLLKQVVTMEVIQWTKLWEFFKDEYENEKNLLGGALGTKAAEDLKLRIIEHNILVVSKYYSRITLKRLADLLCLSLQEAEKHISDMVNSKALIAKIDRPMGIVSFRTAQDSNGVLNSWASNLEKLLDLVEKSCPQIHKETMIPKAVLKA

SEQ ID NO: 69127 - protein, 442 aa, Triticum aestivum
  peptide (1)..(442): Ceres Seq. ID no. 13597650
MEGSSGLDAAIESLLNTEKQCRLAGDVAGTRKAAVDIVELCFKDAAWKTLNDQIVVLSKRRGQLKQAITAVVQKAMEYIDVTPDVETRIELIKTLSSVAAGKIYVEIERARLIKRLAKIKEEQGKIDEAAEIMQEVAVETFGSMAKTEKLAFILEQVRLCLDRQDYVRAQILSRKISPRVFDADTSKDKKKPKEGDNMVQEAPADVPSLLELKRIYYELMIRYYSHNNDYLEICRCYKSIYEIPSIKEDPAKWTPILRKICWFLVLAPHDPMQSSLLNATLEDKNLSEIPNFRLLLKQVVTMEVIQWTKLWEFFKDEYENEKNLLGGALGTKAAEDLKLRIIEHNILVVSKYYSRITLKRLADLLCLSLQEAEKHISDMVNSKALIAKIDRPMGIVSFRTAQDSNGVLNSWASNLEKLLDLVEKSCPQIHKETMIPKAVLKA

SEQ ID NO: 69128 - protein, 367 aa, Triticum aestivum
  peptide (1)..(367): Ceres Seq. ID no. 13597651
MEYIDVTPDVETRIELIKTLSSVAAGKIYVEIERARLIKRLAKIKEEQGKIDEAAEIMQEVAVETFGSMAKTEKLAFILEQVRLCLDRQDYVRAQILSRKISPRVFDADTSKDKKKPKEGDNMVQEAPADVPSLLELKRIYYELMIRYYSHNNDYLEICRCYKSIYEIPSIKEDPAKWTPILRKICWFLVLAPHDPMQSSLLNATLEDKNLSEIPNFRLLLKQVVTMEVIQWTKLWEFFKDEYENEKNLLGGALGTKAAEDLKLRIIEHNILVVSKYYSRITLKRLADLLCLSLQEAEKHISDMVNSKALIAKIDRPMGIVSFRTAQDSNGVLNSWASNLEKLLDLVEKSCPQIHKETMIPKAVLKA

SEQ ID NO: 69129 - DNA, 1628 bp, Triticum aestivum
  misc_feature (1)..(1628): Ceres Seq. ID no. 13598601
ctcttcctcctctcgccccccgccgccgccatcccttccttatagagacagcgtgtaggcgccgggcgagcaggccaccaccgcaaccctagccagccagcccgactaacgccgccggttggagaggactagctattgctgctcgagagagagagatgtcgtcgggacggtacatggcctactcgccctccccgtccaccacgccgcactccccgcgcatctccggcctccgcgcctcctccgccgccgtcgccgaccaggagaagtaccttgcggagctgctcgcggagcgccacaagctgaacccgttcgtcccagtgctccctcatagcatacggttgctgaatcaagaaattttacgtgtttccacactattggagaacgcctcccttttaaaccaaagtggctttgaacatggtagtccactaacatcgggaggattatattcaaatggagcagcaactgatatgaatggatggacatcagcatttcaatcagaaagttcatcagcttatagttggcttggagggtctcaaggcagctcatctggactaattgtcaagaaaacaatgagggttgatattccagtagacaaatatccaacatacaacttcgttggtcgcatccttggtcccagaggaaattccttgaagcgagtggaggcaactactgactgccgtgtgcttataagaggccggggtagcattaaagatccagctcgggaggaaatgatgcgtggaaagccaggatatgaacatctgaatgaacccctacatatattggtcgaggcagagctgcctgttgaaattattgatgctcgtctgatgcaagcccgcgagatccttgaggatctgttaaggccaatgcaggacgagtctcaggacttcttcaagaagcagcagctccgggagcttgcaatgctcaatggcaccctccgtgaggaagggatgcaaagatctggttccgcatcccctttccacaacagccttggaatgaagagggccaagacaagggggtaaaaggccacgagtaccatgggagaagcaatcatctgtcctgagacggaaactgagtatgcctatgggtttgccttcgtggctaatggcgcaaaaatggtctcgcaccgctagcgtcggagcagcccgtacttgataatacatatgcctggagtcgtgttcgctgctactggagaggtttggttatggcaagactgggtgtcgactgtcgagctatatatcgggttgtgcaagaaagtggtttgtgtattgctatgagctatgactggggttttgatttatggttcttgtgcttgtatttgaacttttgaagaatgttatctggttaagttatttgggattgaaatgatgttgtaatctgttacagttatagtattgcttaataatagatggatattgtaataanaaaaaaaaaaaaaaaaaaaaaaaaaaaaaaaaaaaaaaaaaaaaaaaaaaaaaaaaaaaaaaaaaaaaaaaaaaaaaaaaaaaaaaaaaaaaaaaaaagtttttttcaacccccccaccccaaaggggggccccgaacccaattcccccaaaaaagaaacaaaaaaacccccccccctggcccgccttttaaaaacgcggaaatgg

SEQ ID NO: 69130 - protein, 287 aa, Triticum aestivum
  peptide (1)..(287): Ceres Seq. ID no. 13598602
MSSGRYMAYSPSPSTTPHSPRISGLRASSAAVADQEKYLAELLAERHKLNPFVPVLPHSIRLLNQEILRVSTLLENASLLNQSGFEHGSPLTSGGLYSNGAATDMNGWTSAFQSESSSAYSWLGGSQGSSSGLIVKKTMRVDIPVDKYPTYNFVGRILGPRGNSLKRVEATTDCRVLIRGRGSIKDPAREEMMRGKPGYEHLNEPLHILVEAELPVEIIDARLMQAREILEDLLRPMQDESQDFFKKQQLRELAMLNGTLREEGMQRSGSASPFHNSLGMKRAKTRG

SEQ ID NO: 69131 - protein, 281 aa, Triticum aestivum
  peptide (1)..(281): Ceres Seq. ID no. 13598603
MAYSPSPSTTPHSPRISGLRASSAAVADQEKYLAELLAERHKLNPFVPVLPHSIRLLNQEILRVSTLLENASLLNQSGFEHGSPLTSGGLYSNGAATDMNGWTSAFQSESSSAYSWLGGSQGSSSGLIVKKTMRVDIPVDKYPTYNFVGRILGPRGNSLKRVEATTDCRVLIRGRGSIKDPAREEMMRGKPGYEHLNEPLHILVEAELPVEIIDARLMQAREILEDLLRPMQDESQDFFKKQQLRELAMLNGTLREEGMQRSGSASPFHNSLGMKRAKTRG

SEQ ID NO: 69132 - protein, 183 aa, Triticum aestivum
  peptide (1)..(183): Ceres Seq. ID no. 13598604
MNGWTSAFQSESSSAYSWLGGSQGSSSGLIVKKTMRVDIPVDKYPTYNFVGRILGPRGNSLKRVEATTDCRVLIRGRGSIKDPAREEMMRGKPGYEHLNEPLHILVEAELPVEIIDARLMQAREILEDLLRPMQDESQDFFKKQQLRELAMLNGTLREEGMQRSGSASPFHNSLGMKRAKTRG

SEQ ID NO: 69133 - DNA, 1106 bp, Triticum aestivum
  misc_feature (1)..(1106): Ceres Seq. ID no. 15225495
aacatttcgtctccgcacgcgcgccagaggaagaagaccgcggaggaggagagaaagcgcgcgcgagaggaggaagaacatgttcatccagaaggcatggaggacggcagcgttcgggctctatggcttcacccagttcaccaaatccggcttcgtggaacacgccaagaaatttagagaggaggatatgcagatccggttggatgggaaaaattgcctggtaactggagcaaattctggcctaggttatgcgacagctcagggcttggcttctcatggcgccactgtctatatgctttgccgtaacaaagaaaggggagagactgctctgaatgaaataagatccaaaactggcaatatgaatgttcatctggagatatgtgacctttcatcaattaacgaagtcaagacatttgccacaaaattctcttcattggagaagccacttcatgtccttgttaacaacgccggcttactagagcacaagcgtacgactacatcggaaggtttggagctcaattttgctgtgaatgtggcagcaacatacactttaacagagctagtgatgccactgttggaaaaagcagcacctgatgctcgtgtcattacagttgcttcaggagggatgtacactgagccactgaacacgaatttacaatacagcgaaagcgaatttgacgggacaaaacaatatgctcgtaacaagagagttcaggttgctctcaccgaatggtgggctgagaaatacagcaacaagggagtgggtttctactccatgcatccaggatgggctgatacacctggagtctcgaagagcttgccgggactatcagagaagctatcaggaaacctgagatcgaacgaagaaggggctgacacagtggtctggttggctttgcaacccaaggagaagttagtcccaggggctttctacttcgaccgggccgaagcgcaaaaacatttgaagtatgctgggactgcagcatcccatgagcagataggttcgattgttgacagcattcgctccatctgtaacctacctgctaacccacaagtttatcagtgaagggatggaagtcctggacaaaaataaaattgaaattctg

SEQ ID NO: 69134 - protein, 354 aa, Triticum aestivum
  peptide (1)..(354): Ceres Seq. ID no. 15225496
TFRLRTRARGRRPRRRRESARERRKNMFIQKAWRTAAFGLYGFTQFTKSGFVEHAKKFREEDMQIRLDGKNCLVTGANSGLGYATAQGLASHGATVYMLCRNKERGETALNEIRSKTGNMNVHLEICDLSSINEVKTFATKFSSLEKPLHVLVNNAGLLEHKRTTTSEGLELNFAVNVAATYTLTELVMPLLEKAAPDARVITVASGGMYTEPLNTNLQYSESEFDGTKQYARNKRVQVALTEWWAEKYSNKGVGFYSMHPGWADTPGVSKSLPGLSEKLSGNLRSNEEGADTVVWLALQPKEKLVPGAFYFDRAEAQKHLKYAGTAASHEQIGSIVDSIRSICNLPANPQVYQ

SEQ ID NO: 69135 - protein, 328 aa, Triticum aestivum
  peptide (1)..(328): Ceres Seq. ID no. 15225497
MFIQKAWRTAAFGLYGFTQFTKSGFVEHAKKFREEDMQIRLDGKNCLVTGANSGLGYATAQGLASHGATVYMLCRNKERGETALNEIRSKTGNMNVHLEICDLSSINEVKTFATKFSSLEKPLHVLVNNAGLLEHKRTTTSEGLELNFAVNVAATYTLTELVMPLLEKAAPDARVITVASGGMYTEPLNTNLQYSESEFDGTKQYARNKRVQVALTEWWAEKYSNKGVGFYSMHPGWADTPGVSKSLPGLSEKLSGNLRSNEEGADTVVWLALQPKEKLVPGAFYFDRAEAQKHLKYAGTAASHEQIGSIVDSIRSICNLPANPQVYQ

SEQ ID NO: 69136 - protein, 292 aa, Triticum aestivum
  peptide (1)..(292): Ceres Seq. ID no. 15225498
MQIRLDGKNCLVTGANSGLGYATAQGLASHGATVYMLCRNKERGETALNEIRSKTGNMNVHLEICDLSSINEVKTFATKFSSLEKPLHVLVNNAGLLEHKRTTTSEGLELNFAVNVAATYTLTELVMPLLEKAAPDARVITVASGGMYTEPLNTNLQYSESEFDGTKQYARNKRVQVALTEWWAEKYSNKGVGFYSMHPGWADTPGVSKSLPGLSEKLSGNLRSNEEGADTVVWLALQPKEKLVPGAFYFDRAEAQKHLKYAGTAASHEQIGSIVDSIRSICNLPANPQVYQ

SEQ ID NO: 69137 - DNA, 1801 bp, Triticum aestivum
  misc_feature (1)..(1801): Ceres Seq. ID no. 13584744
aaacgattgatcaattccctctgagaaagaaagcaattgcctaattttcccgtctgctgaggaaatccgtgctgtcctgaggaaatccgggttggggatttgccaaatttcttgatttcagccctattgttggggctgccgaggccggattatgagatgggcttcttgtcgtgcctattccggtgccccgaggaggaggagcgggtggtgaaggagcacgatgacgacgaggactccggcggaatcgaccatggagtcgcctcagagtcatcagaaagtgccccactgaagactgaatccgcacatatggaaggaatccagagaaatggcacacataatgaggcgacgatcttcactttgcgtgagcttgttgatgctaccaaaaacttcagcaaggattttcagttggggcgaggaggatttggttgtgtgtataaagcatatctgaatgatggtcaggttgttgcagtcaaacaacttgatctaaatgggcttcaggggaaccgagaattccttgtggaggttctcatgctcaacctcttgcatcaccctaaccttgtcaatttgatagggtactgtgttgacggtgatcaacgcttgcttgtttatgaatatatgccattgggatcactagaagaccatctacacgaccttccacccaataaagaacctctagattggacaacacggatgaagatagctgctggcgcagctgctggtttggaatacctacatgataaggcaaatccaccagttatttaccgagatattaagccatcaaacattcttctttctgaaaggtatcatgcgaagttgtccgactttggacttgctaaacttggtcctgtgggtgataagactcatgtgacaacccgtgtcatggggacttatggctattgtgctcctgagtacgccgcgactggacagctaacggttaagtctgacatctatagttttggtgtggtgttcctcgagctaattacaggacgaagggcactcgatagcaatcggcctcgtgaggaacaggacttggtctcatgggctcgtccattgttcaaagaccaaaggaaatttccaaagatggctgatcctttgttgcgtggccgctttccaaagaggggtttgtaccaggccttggctattgcagcgatgtgtttgcaggagaagtcaaggaatcgccctctgattagggaagttgctgctgctctctcctatttgtcatcacaaacatacgatgggaatgacgctgctgttcgccgttaccttgatggcccttcagcatcaaaagtgtcagacgatcaggttaaccaagatgatgctttggctagtcaacatggagctcaaacgtcgatgcatgaccgtatgaatgacttcgtcccagaaggaaaagaacattgcaggagtggctccaaccgtggaggacggggcagggttgttccaaacggtgtcgacagagaccgcgcacttgcagatgcgaatgtctgggccgaggcttggagacgccatgagaaggcaagcaaagtgcgtgtaaccgatgaaatcctcggatagtgagctgagctctgcttgatgttttggcatgctggcgattttgaagagagcgttgttaggagaggaggaataatgcgcagcgaggtgtgtagtactgcaccaccagagtgagcgctcgcaaggtttcaccggtggagcctgtcactgtcacgtccaccatcgtttcgctgcatacattacacggtctgaatttcacatgtaggtattgtttcaggggctttgtaaataaatgtaataacccccttaattg

SEQ ID NO: 69138 - protein, 464 aa, Triticum aestivum
  peptide (1)..(464): Ceres Seq. ID no. 13584745
MGFLSCLFRCPEEEERVVKEHDDDEDSGGIDHGVASESSESAPLKTESAHMEGIQRNGTHNEATIFTLRELVDATKNFSKDFQLGRGGFGCVYKAYLNDGQVVAVKQLDLNGLQGNREFLVEVLMLNLLHHPNLVNLIGYCVDGDQRLLVYEYMPLGSLEDHLHDLPPNKEPLDWTTRMKIAAGAAAGLEYLHDKANPPVIYRDIKPSNILLSERYHAKLSDFGLAKLGPVGDKTHVTTRVMGTYGYCAPEYAATGQLTVKSDIYSFGVVFLELITGRRALDSNRPREEQDLVSWARPLFKDQRKFPKMADPLLRGRFPKRGLYQALAIAAMCLQEKSRNRPLIREVAAALSYLSSQTYDGNDAAVRRYLDGPSASKVSDDQVNQDDALASQHGAQTSMHDRMNDFVPEGKEHCRSGSNRGGRGRVVPNGVDRDRALADANVWAEAWRRHEKASKVRVTDEILG

SEQ ID NO: 69139 - protein, 414 aa, Triticum aestivum
  peptide (1)..(414): Ceres Seq. ID no. 13584746
MEGIQRNGTHNEATIFTLRELVDATKNFSKDFQLGRGGFGCVYKAYLNDGQVVAVKQLDLNGLQGNREFLVEVLMLNLLHHPNLVNLIGYCVDGDQRLLVYEYMPLGSLEDHLHDLPPNKEPLDWTTRMKIAAGAAAGLEYLHDKANPPVIYRDIKPSNILLSERYHAKLSDFGLAKLGPVGDKTHVTTRVMGTYGYCAPEYAATGQLTVKSDIYSFGVVFLELITGRRALDSNRPREEQDLVSWARPLFKDQRKFPKMADPLLRGRFPKRGLYQALAIAAMCLQEKSRNRPLIREVAAALSYLSSQTYDGNDAAVRRYLDGPSASKVSDDQVNQDDALASQHGAQTSMHDRMNDFVPEGKEHCRSGSNRGGRGRVVPNGVDRDRALADANVWAEAWRRHEKASKVRVTDEILG

SEQ ID NO: 69140 - protein, 340 aa, Triticum aestivum
  peptide (1)..(340): Ceres Seq. ID no. 13584747
MLNLLHHPNLVNLIGYCVDGDQRLLVYEYMPLGSLEDHLHDLPPNKEPLDWTTRMKIAAGAAAGLEYLHDKANPPVIYRDIKPSNILLSERYHAKLSDFGLAKLGPVGDKTHVTTRVMGTYGYCAPEYAATGQLTVKSDIYSFGVVFLELITGRRALDSNRPREEQDLVSWARPLFKDQRKFPKMADPLLRGRFPKRGLYQALAIAAMCLQEKSRNRPLIREVAAALSYLSSQTYDGNDAAVRRYLDGPSASKVSDDQVNQDDALASQHGAQTSMHDRMNDFVPEGKEHCRSGSNRGGRGRVVPNGVDRDRALADANVWAEAWRRHEKASKVRVTDEILG

SEQ ID NO: 69141 - DNA, 873 bp, Triticum aestivum
  misc_feature (1)..(873): Ceres Seq. ID no. 15226827
atcaaattggtcgcgagtttgcgtgccgatctacctctaaccttctcctccgcattgcacctgcgaacggcgggcagatccatggcggcgctggcgtcaaggatggcgctgcagtccagggcggcgttggcctcgaggatggcgcagctgcagtccaaggcggccgaggcgacgaggttcgcggccaagcacgggggtgcgctgcagtccgaggcggcaagcttcgcggccaagcacggggccactctgcagtccaaggcgtccgaggcggcaagcttcgcggccaagcacgggggcgcgctgcagtccaaggcgtccgaggcggcaagcatcgcggccaagcacggggccacgctgcagtccaaggcgtccaaggcggcgagcttcgcggccaagcaagggagcgcgatgcagtccaaggcggccgaggcggcgagctccgcggccaagcaagggcgcgagtaccacaagacgctcatggagaggaacaggcagtacgtcgtcgacccgcccaccgtcgaaaagtgccaggagctctccaagcagctcttctacacccgcctcgccagcattcctggccgttacgaggctttctggaaagaggttgatgctgtaaagctcttgctgaaaaacagaaaggacctgaaggctgagcaagccggggttgccgcattgtttggcattgagttgtatgcatggcttcgtgccggtgagtttattggtagaggatttaccctcacaggttgatcgctgacgtctagcatgagcgcacattattagtctacatacatttgccgtctagctatgagcgtacattgttagtctacatttgccatcggatacagtgttcgttgatcaaaaaaaaaaaaaaaa

SEQ ID NO: 69142 - protein, 248 aa, Triticum aestivum
  peptide (1)..(248): Ceres Seq. ID no. 15226828
IKLVASLRADLPLTFSSALHLRTAGRSMAALASRMALQSRAALASRMAQLQSKAAEATRFAAKHGGALQSEAASFAAKHGATLQSKASEAASFAAKHGGALQSKASEAASIAAKHGATLQSKASKAASFAAKQGSAMQSKAAEAASSAAKQGREYHKTLMERNRQYVVDPPTVEKCQELSKQLFYTRLASIPGRYEAFWKEVDAVKLLLKNRKDLKAEQAGVAALFGIELYAWLRAGEFIGRGFTLTG

SEQ ID NO: 69143 - protein, 221 aa, Triticum aestivum
  peptide (1)..(221): Ceres Seq. ID no. 15226829
MAALASRMALQSRAALASRMAQLQSKAAEATRFAAKHGGALQSEAASFAAKHGATLQSKASEAASFAAKHGGALQSKASEAASIAAKHGATLQSKASKAASFAAKQGSAMQSKAAEAASSAAKQGREYHKTLMERNRQYVVDPPTVEKCQELSKQLFYTRLASIPGRYEAFWKEVDAVKLLLKNRKDLKAEQAGVAALFGIELYAWLRAGEFIGRGFTLTG

SEQ ID NO: 69144 - protein, 214 aa, Triticum aestivum
  peptide (1)..(214): Ceres Seq. ID no. 15226830
MALQSRAALASRMAQLQSKAAEATRFAAKHGGALQSEAASFAAKHGATLQSKASEAASFAAKHGGALQSKASEAASIAAKHGATLQSKASKAASFAAKQGSAMQSKAAEAASSAAKQGREYHKTLMERNRQYVVDPPTVEKCQELSKQLFYTRLASIPGRYEAFWKEVDAVKLLLKNRKDLKAEQAGVAALFGIELYAWLRAGEFIGRGFTLTG

SEQ ID NO: 69145 - DNA, 978 bp, Triticum aestivum
  misc_feature (1)..(978): Ceres Seq. ID no. 13663965
gaaaccaaaaaaccctcgttccccactctggactgccctcctcctccctcggcggtttgttcatcgcctctgccgaaaaatcaaacccaaaaccaagaaagggggcgaaaatggctgaggcgaactcgtacgaggagcagcgcaggaggcaggtggaggagaacaagcggaagctggaggagctgcgcctgcaccacctctccgccgccgtccgcgaggccgccgtcaagcccaagctgaagaggaaggccccgaagccgtgggacgccgccgatgacgccccgccccggcgttccggccgtatcgccaccctccccgagcagcccgactatcgcgacaatctgggcaccgggaaaccacggcagcagaaggaagtaaagcctgatcatgcgtacgccatcgccaaggccgaagagctacaggatgagctaggctccgactacccgacctttgtcaaacccatgccacagtctcttacctcgctgcatatcccggcacagttcagcatggagcatctcccggacaatggcatgagaatggttttggtggatgaggaggaggaggagtttaaggtgagctatcgtccacacagtagcagtcttgtcgccgggtggagcgagtttgccatcgacaatgagctagttgaaggtgattgcttggtgttccagctgatcaagagggcattgttcaaggtctacatattcagggcaagttcgtactatgaaaatgagcattaatggagcagccggcaggctcctggttgcttcatgtcaacttgtgttgaactagcacagttcagaaatctgcactatctcagcggttagttatgtatgtatggctactgtcaggcattattagaatctctcgtgtgattgcaagtcgtatggtaactgtcggcatcttgtaaagtttgtcatgcgacggcaagtgtgaaacttgacatgtgatacccatcatggttgatatcctattgattcg

SEQ ID NO: 69146 - protein, 244 aa, Triticum aestivum
  peptide (1)..(244): Ceres Seq. ID no. 13663966
NQKTLVPHSGLPSSSLGGLFIASAEKSNPKPRKGAKMAEANSYEEQRRRQVEENKRKLEELRLHHLSAAVREAAVKPKLKRKAPKPWDAADDAPPRRSGRIATLPEQPDYRDNLGTGKPRQQKEVKPDHAYAIAKAEELQDELGSDYPTFVKPMPQSLTSLHIPAQFSMEHLPDNGMRMVLVDEEEEEFKVSYRPHSSSLVAGWSEFAIDNELVEGDCLVFQLIKRALFKVYIFRASSYYENEH

SEQ ID NO: 69147 - protein, 208 aa, Triticum aestivum
  peptide (1)..(208): Ceres Seq. ID no. 13663967
MAEANSYEEQRRRQVEENKRKLEELRLHHLSAAVREAAVKPKLKRKAPKPWDAADDAPPRRSGRIATLPEQPDYRDNLGTGKPRQQKEVKPDHAYAIAKAEELQDELGSDYPTFVKPMPQSLTSLHIPAQFSMEHLPDNGMRMVLVDEEEEEFKVSYRPHSSSLVAGWSEFAIDNELVEGDCLVFQLIKRALFKVYIFRASSYYENEH

SEQ ID NO: 69148 - DNA, 1528 bp, Triticum aestivum
  misc_feature (1)..(1528): Ceres Seq. ID no. 14313344
gtcaccctgtttgtccagtggacttccaactccagtctgacttcatcttcttcccaaaatcaaagaagcagcagaaatgcaggggtagcagctcacgccatgtccaaatccaaatccaaatagcttcgcctccgataggtggaggcggctactctgataggaggagaaggaagcaaaggagggaggcagcagaactgcagaagcaccatggtttccctctggcacacctccgtcattgtccttgtgctcctattcctcggaggatctgatgccaacccagctgcccgtcgacacggtcagctggatgtaaaccacaagaagaagccactacagacatccagaccttacaacattgcccacaggggttccaatggcgaaatacccgaagagacagctgcagcatatttgagggcaatcgaggaaggtgcagacttcatagagactgatatacttgcatcaaaggacggacatctgatatgtttccatgatgtaatcctggatgccacgacggacatcgtgaaccgtaccgagtttgctggcaggaagagaacctatgatgtccagggatttaagttgactgggtggtttatcgtggattttactttaagagaactgaaatcactgagggtgaaacagcgctacaatttcagggatcaacagtataattggaagtacaatattcttacatttgatgagtttattttgattgcacttcatgctgatagggtggtcggaatatacccagagatcaagaatcctattttcatcaaccagcatgtcaagtggtcaggtggcaagaagtttgaggacaagtttgtcgggacgcttctcaagcatggctacaaaggcaaatatatgtctaaagattggctcaagaagccactattcatccaatcctttgctccaacttcactaatttacatctcaaacatgacaaatgctccaaaactgcttctaatatacgataccacagttccaactcaagataccaaccagtcacactatgagataacttcgaacggctatctcgcgttcataaggaagtatgtaattgggattgggccatggaaggatacaattatccccccaaagaataaccatctaggccctgcaaccaatcttgtggcacgggcacacactctgaatcttcaggtgcatccgtacacattcagaaatgagaactcattcctgcacttcgacttccatcaagacccttatgctgaatatgagtactggctcagagaaatcggagtcgacgcgctgttcaccgatttcacgggcagcttgcacaagtaccaggagtggacagctccacacgaaaagaaggaaaagaagtgcagaggatctcctgcatgagatcgccaagacgctgaaggttgatgttcactaaagcttaggttgccaagtctgtatacctcctccctttcaggagctatttcattgttgtcagtaccgagaaaatgaactggttaataccattctatgtaattgcttcctataaatcacgagcagagcatcatagagttcg

SEQ ID NO: 69149 - protein, 382 aa, Triticum aestivum
  peptide (1)..(382): Ceres Seq. ID no. 14313345
MVSLWHTSVIVLVLLFLGGSDANPAARRHGQLDVNHKKKPLQTSRPYNIAHRGSNGEIPEETAAAYLRAIEEGADFIETDILASKDGHLICFHDVILDATTDIVNRTEFAGRKRTYDVQGFKLTGWFIVDFTLRELKSLRVKQRYNFRDQQYNWKYNILTFDEFILIALHADRVVGIYPEIKNPIFINQHVKWSGGKKFEDKFVGTLLKHGYKGKYMSKDWLKKPLFIQSFAPTSLIYISNMTNAPKLLLIYDTTVPTQDTNQSHYEITSNGYLAFIRKYVIGIGPWKDTIIPPKNNHLGPATNLVARAHTLNLQVHPYTFRNENSFLHFDFHQDPYAEYEYWLREIGVDALFTDFTGSLHKYQEWTAPHEKKEKKCRGSPA

SEQ ID NO: 69150 - DNA, 1216 bp, Triticum aestivum
  misc_feature (1)..(1216): Ceres Seq. ID no. 13502979
acgcaggcacgcggctgtccccgtccgcgtggcctccaactcgactcgttccctttccttccttcttcccctcgtctccccaaccagaaacctaaacagaatcccaacccacccccgcagccaatcccaccggacgccagtcagccaaccccaatctcgactcctccgccgcctgaatccggttccgagtccatatttgaggtgccaccatgttcaacaggttatttgggaagcccaaggagcaggccaacgccggcgcgttggccactttggataagttaaacgagactcttgatatgctggagaagaaagagaaagtgttagagaaaaaagcaggcgctgagcttgagagggccaaggaattctcaaaagcaaagaataaaagagcggctatccaatcattgaagaggaaaaaactttatgagcagcaaattgagcagcttgggaatttccagttgagaatccatgatcagatgatcatgttagaagctgctaaagctacaacagagactgttgatgcattgaggactggagctaaagctatgaaagcgatgcaaaaagcaacaaatatcgatgatgtcgacaagactatggacgaaattaatgaacagacagaaaacatgaaacaaatacaagatgctctgtcagctcctcttggagcttctgctgattttgacgaggatgaactggaagcggagctggaagagttggagggagcagagttggaatcccaactactggagcctgttgtaactattcctattcatacgacgcccgtcccaggcaaggcgcaaccaactcgccctgctccacagaaagcatcggctgaggaggatgagcttgctgcactgcaagctgaaatggcattgtgatcaggcccccagtgaatgaagaggtgaaatgtacaaatgattggctggacggtacgctgtcgcaggcgagtcctggctacacatatatttgcccgtgtgtataatctttggtgggagacatttggcgaacagaggcaggaaaggctgctccagtccagtgtttatctagttgtttgattgaaggtctgtttcccggacataatttttggcacggtcagctccattccaggtcgtgtgcaatgctcattgttgtggcacactatttactgttgacccgtattatctcttgccatgtaaaccaagttatctcattccagtgtttgctaatttggtgtgttgacggg

SEQ ID NO: 69151 - protein, 220 aa, Triticum aestivum
  peptide (1)..(220): Ceres Seq. ID no. 13502980
MFNRLFGKPKEQANAGALATLDKLNETLDMLEKKEKVLEKKAGAELERAKEFSKAKNKRAAIQSLKRKKLYEQQIEQLGNFQLRIHDQMIMLEAAKATTETVDALRTGAKAMKAMQKATNIDDVDKTMDEINEQTENMKQIQDALSAPLGASADFDEDELEAELEELEGAELESQLLEPVVTIPIHTTPVPGKAQPTRPAPQKASAEEDELAALQAEMAL

SEQ ID NO: 69152 - protein, 191 aa, Triticum aestivum
  peptide (1)..(191): Ceres Seq. ID no. 13502981
MLEKKEKVLEKKAGAELERAKEFSKAKNKRAAIQSLKRKKLYEQQIEQLGNFQLRIHDQMIMLEAAKATTETVDALRTGAKAMKAMQKATNIDDVDKTMDEINEQTENMKQIQDALSAPLGASADFDEDELEAELEELEGAELESQLLEPVVTIPIHTTPVPGKAQPTRPAPQKASAEEDELAALQAEMAL

SEQ ID NO: 69153 - protein, 132 aa, Triticum aestivum
  peptide (1)..(132): Ceres Seq. ID no. 13502982
MIMLEAAKATTETVDALRTGAKAMKAMQKATNIDDVDKTMDEINEQTENMKQIQDALSAPLGASADFDEDELEAELEELEGAELESQLLEPVVTIPIHTTPVPGKAQPTRPAPQKASAEEDELAALQAEMAL

SEQ ID NO: 69154 - DNA, 979 bp, Triticum aestivum
  misc_feature (1)..(979): Ceres Seq. ID no. 13656436
cagttggtctaaaatcgggctggcctgctggagcctggtcctctcccagcgcattgttgattgattcacgtcaagagcgagcgagacgccaagaactcggacggggaagtcgtgaggccgcctgcctccgcccgcccaggactcgatctcgatccccgccgacaagccgatcccccgtcctcctgcccgcgagagagaccggacgccgcgggagcgcccagatcccgccatgaatcccgagtatgattacctcttcaagcttttgcttattggagactcaggtgttggcaagtcatgtctgctgttaagatttgctgacgactcatacctggatagttacatcagtactattggagttgattttaaaatacggaccgtggagcaggacggaaagactatcaagttgcaaatctgggacactgctgggcaagaacgttttagaactattaccagcagctactaccgaggggcccatgggattattatcgtctatgatgtgacagaccaagatagcttcaacaatgtgaagcagtggctcaacgagattgaccgctatgccagtgagaatgtgaacaagcttctcgtggggaacaaatgtgatctggctgacaaaagagctgtgtcatatgaaacagcaaaggcatttgctgatgagattggcattccattcatggagaccagtgcaaagaacgccctgaatgttgaacaggccttcatggccatggctgcttcgatcaaggataggatggcgagccagccagccgcaaacaacgctcgcccagctactgtacagatccgcgggcaacctgtcgagcagaaggccagctgttgctcttcttagaaaaccatgcaaacttgttgatgctccgtcacctttatacatgttttcttatttgtttttacttgttatctttattcttttctttctagtgtacctgccttctgaaattgtgtaacttggatgaatatatatcttctt

SEQ ID NO: 69155 - protein, 203 aa, Triticum aestivum
  peptide (1)..(203): Ceres Seq. ID no. 15219223
MNPEYDYLFKLLLIGDSGVGKSCLLLRFADDSYLDSYISTIGVDFKIRTVEQDGKTIKLQIWDTAGQERFRTITSSYYRGAHGIIIVYDVTDQDSFNNVKQWLNEIDRYASENVNKLLVGNKCDLADKRAVSYETAKAFADEIGIPFMETSAKNALNVEQAFMAMAASIKDRMASQPAANNARPATVQIRGQPVEQKASCCSS

SEQ ID NO: 69156 - DNA, 1948 bp, Triticum aestivum
  misc_feature (1)..(1948): Ceres Seq. ID no. 14301518
gatctcccatccccccaccctatcgaaaccattcccaagcaaaacaccctgcgcgatcccaaaccctagccatggcgaccggggcggcggcgaagactccgaccaagccatcggcccccgcggcgcccaagaccccggccaagcccgcgccctcggccgcggcgacggcggcgaagactcccgcaaggcccccgtcctcggcggcggcgacggcgaagaccccggccaggtccgtctcccgcgcgcggttcgcgcacgcctccgagaactccgaccccaacatcctcgcctcccctccccggaccacgtccaagacccccgccaagcccgccgccgccgccaccttctccgcctccgtcaggaagaagcgtgccacgcccgccccgccgccgccggtcccgcagcgccgcttcctcgtggcgaagaagggagcgcatcggcggaggcaagccggcgcgagcggaggaggcggccagttcgacttcgacaagtgccgcgaggccgcccgcgaggcgctgcgcgcgtcgcacgaggagttcttcctcaaggagcgcgcggtgtccgcggccagcgaggagcaggagtcgcagaaggaggaggaagcggccgaagatgacgcaaacagtgccgctgttgtcgaggagggggagggagcggaggtggcggatttggaggggagcggcaaagttagagcgattcggagcagagtcatggccaaggcgatgaacagcgtgccagatgctggggcgggccgtgtcaagcacctggtgcatgccttcgagagcctgctctccatctccggggccactgctgactccgaacgggcaggcgaggaggcctgggcgctgcctggattgcagccatggaacgaggggagtgggctcgccggtggcagtgttctcctcgtccgatttcatgagcatgggaccaaccagactttgcagttcactcgatggcaagagcaacagatctagctgggacagccagaccggaggacgcaggagccggcggaactcatccgaatcactaaggagcagctggaataaaaagctcaaggtcactagccagcatcccttcaagctgagaacagagcaaaggggaagagctaaagaacaacagtttattcagaaagtccaggaaatgctaattgaggatgagaagaagcgcatacatattgctcaaggacttccgtggacaacagatgagcctgagtgcttgattaagccaccagtcaaggaaagaacagagccagtcgaccttgttctacatagtgatgtgcgcgcagttgaacgtgctgaatttgatcaatatgtgtcagagaagaccaagttcggtgaggaattaagattggagcgggaacgtcaacaaaagttagaggaggaagaaatgataagacagctgaggaaagagcttgttcctaaagcacagccaatgccgtattttgatcggccattcatccccaaaaagtcatcaaagacaataacaattccgaaggagccaaactttcatctccggcctgaaaggttatcatgcgatgcatggtcactggaaagctgaagacatggccccgcaagcaacatgaatgtcagctgcatctagcaagagccgcagagcagcatcatcaacacgcatgatttagatgctcctcattctttcaagtgcctagcttcttcttaacgtctccatgcgcaacgagactcggtctttgtggcttgggtgatctccaacttctgttctgtgtacatgcgtttatgcatatcgatagctctgtgcttcagatgcatcctccacctccagggttaaaacagcttgttgtacaagagaccgcagatgggaaattcaaggatgaatttctgtggtcttgtattcctaagttgattgccaaaaaccccgaaataccaatgtgttgatatatatgtggattttgaaaaaaaatctctattttctg

SEQ ID NO: 69157 - protein, 323 aa, Triticum aestivum
  peptide (1)..(323): Ceres Seq. ID no. 14301519
SPIPPPYRNHSQAKHPARSQTLAMATGAAAKTPTKPSAPAAPKTPAKPAPSAAATAAKTPARPPSSAAATAKTPARSVSRARFAHASENSDPNILASPPRTTSKTPAKPAAAATFSASVRKKRATPAPPPPVPQRRFLVAKKGAHRRRQAGASGGGGQFDFDKCREAAREALRASHEEFFLKERAVSAASEEQESQKEEEAAEDDANSAAVVEEGEGAEVADLEGSGKVRAIRSRVMAKAMNSVPDAGAGRVKHLVHAFESLLSISGATADSERAGEEAWALPGLQPWNEGSGLAGGSVLLVRFHEHGTNQTLQFTRWQEQQI

SEQ ID NO: 69158 - protein, 300 aa, Triticum aestivum
  peptide (1)..(300): Ceres Seq. ID no. 14301520
MATGAAAKTPTKPSAPAAPKTPAKPAPSAAATAAKTPARPPSSAAATAKTPARSVSRARFAHASENSDPNILASPPRTTSKTPAKPAAAATFSASVRKKRATPAPPPPVPQRRFLVAKKGAHRRRQAGASGGGGQFDFDKCREAAREALRASHEEFFLKERAVSAASEEQESQKEEEAAEDDANSAAVVEEGEGAEVADLEGSGKVRAIRSRVMAKAMNSVPDAGAGRVKHLVHAFESLLSISGATADSERAGEEAWALPGLQPWNEGSGLAGGSVLLVRFHEHGTNQTLQFTRWQEQQI

SEQ ID NO: 69159 - protein, 272 aa, Triticum aestivum
  peptide (1)..(272): Ceres Seq. ID no. 14301521
MLGRAVSSTWCMPSRACSPSPGPLLTPNGQARRPGRCLDCSHGTRGVGSPVAVFSSSDFMSMGPTRLCSSLDGKSNRSSWDSQTGGRRSRRNSSESLRSSWNKKLKVTSQHPFKLRTEQRGRAKEQQFIQKVQEMLIEDEKKRIHIAQGLPWTTDEPECLIKPPVKERTEPVDLVLHSDVRAVERAEFDQYVSEKTKFGEELRLERERQQKLEEEEMIRQLRKELVPKAQPMPYFDRPFIPKKSSKTITIPKEPNFHLRPERLSCDAWSLES

SEQ ID NO: 69160 - DNA, 1390 bp, Triticum aestivum
  misc_feature (1)..(1390): Ceres Seq. ID no. 13657369
aggcgttcccctgccgccgcctcctatgtgaacatcttcttcacatctcccaccgcagcagtctcctggcgccgcctccgatctttgcatcttcttcacatctatctccggatataccaaaacaaggaggaagtagagaggaaggggtgtcatggctagccggtttgtgaatctcgcggtcaagcacatgaacggccgccatattcctttcagcatacaccgtattaatccggcagatttcttttacccaaccggatcgccagttcccaaacaaggttcagcttttgtaccaccggacgaaattcagctgcctccggccaccatcgccttcgactggccctcccggcagggccaaccctgctcaatggatttcatggccttcggcgccaaccgggataagatcgtcgccgtggacagcatagggtgctcctacctttacgacgctcccgtacgcagtatcagcaccaatatgcccatgatgcccacgtgcatgctacaacccatgtccattgctgtcggtgacaacggcctgttagttatgagtaaagccgatcaccagttcgtggctctgaatgatggctgcgaccccaattccagatatttattaccaatgtctggctggtactggcagtccctcaagccgcctcccttccccagccgctcctaccaccagaacgagaaaggcagtcaccatccatttgaagtcagctcttacacggtagttggcaattcacagttctgggtgtccacagtgggtgcaggcacgttttcctttgatatgaacagcggtgcgtggatgaaggctggcaattgggagctgccattcagaggtcgtgccgagtatgtccccgagcacaatctctggtttggcatgtttggcaaagacgaccagctttgcgcatctgacctcattgccgtgtccgcagtgagctcaccagtgccacatatactttggaaagagctggtttggccgaaagattggaagctcaggtcgacccacctcctgcctcttggttctagcagactctgcattgccaggttcttcctaacttcagatgatgacaaggaagagaacatgtcagactataagcgcagcacaacaaataattttggggtgctcacgggggtggaagtggtgtctgatgaaggaggactgcgcattatccatcacaagtccattcgcttcgatttcggcctcagcattgctagtgtgctgtgatacgttgactcctctagtgcaggtgagtttatttatatccggaacctgctgtagcacacctttcttttccatcctttgctcaaacgcactacaaaagcttgtccttttagcactatggaaaacgctttctttgctggaacataatgcctcaatcaaataaaaagttcttag

SEQ ID NO: 69161 - protein, 355 aa, Triticum aestivum
  peptide (1)..(355): Ceres Seq. ID no. 15220606
MASRFVNLAVKHMNGRHIPFSIHRINPADFFYPTGSPVPKQGSAFVPPDEIQLPPATIAFDWPSRQGQPCSMDFMAFGANRDKIVAVDSIGCSYLYDAPVRSISTNMPMMPTCMLQPMSIAVGDNGLLVMSKADHQFVALNDGCDPNSRYLLPMSGWYWQSLKPPPFPSRSYHQNEKGSHHPFEVSSYTVVGNSQFWVSTVGAGTFSFDMNSGAWMKAGNWELPFRGRAEYVPEHNLWFGMFGKDDQLCASDLIAVSAVSSPVPHILWKELVWPKDWKLRSTHLLPLGSSRLCIARFFLTSDDDKEENMSDYKRSTTNNFGVLTGVEVVSDEGGLRIIHHKSIRFDFGLSIASVL

SEQ ID NO: 69162 - protein, 343 aa, Triticum aestivum
  peptide (1)..(343): Ceres Seq. ID no. 15220607
MNGRHIPFSIHRINPADFFYPTGSPVPKQGSAFVPPDEIQLPPATIAFDWPSRQGQPCSMDFMAFGANRDKIVAVDSIGCSYLYDAPVRSISTNMPMMPTCMLQPMSIAVGDNGLLVMSKADHQFVALNDGCDPNSRYLLPMSGWYWQSLKPPPFPSRSYHQNEKGSHHPFEVSSYTVVGNSQFWVSTVGAGTFSFDMNSGAWMKAGNWELPFRGRAEYVPEHNLWFGMFGKDDQLCASDLIAVSAVSSPVPHILWKELVWPKDWKLRSTHLLPLGSSRLCIARFFLTSDDDKEENMSDYKRSTTNNFGVLTGVEVVSDEGGLRIIHHKSIRFDFGLSIASVL

SEQ ID NO: 69163 - protein, 284 aa, Triticum aestivum
  peptide (1)..(284): Ceres Seq. ID no. 15220608
MDFMAFGANRDKIVAVDSIGCSYLYDAPVRSISTNMPMMPTCMLQPMSIAVGDNGLLVMSKADHQFVALNDGCDPNSRYLLPMSGWYWQSLKPPPFPSRSYHQNEKGSHHPFEVSSYTVVGNSQFWVSTVGAGTFSFDMNSGAWMKAGNWELPFRGRAEYVPEHNLWFGMFGKDDQLCASDLIAVSAVSSPVPHILWKELVWPKDWKLRSTHLLPLGSSRLCIARFFLTSDDDKEENMSDYKRSTTNNFGVLTGVEVVSDEGGLRIIHHKSIRFDFGLSIASVL

SEQ ID NO: 69164 - DNA, 2100 bp, Triticum aestivum
  misc_feature (1)..(2100): Ceres Seq. ID no. 13657008
acctagaacatcctaatcgaaaaccctccccgcgttcccacaccgccacgcgcatacagactccacagccccgcactgttcctcgagctggagcgtgggctcgcgtagcctcgcccgttcatgagcggcggcgagtcggcggcctcgcgcgagggggattgtaggcaatgaggctgtacatcacggcggcggccgccgacgacgacgcgacgaagccgaaggcgccgcagcagctgcaggcggcgcggcgaggttaccgttccgttgtggtcacggggctcctggccggcgttctcctcttccgcgccgcgctcctcgccatcgagaccggcgcctccctctgcccttccgccaccggttgctcggactggagcgcggggctcgggcgctggctctacggcggcggcggcgacgcgacggaggaatttatgaaagagtggaagagaagccacagggtagctaccctgttggaccccgtggtggtggaagcggcaccagattccttggacgatctcatggtggagatggacaccattctggcgtcctatgatcggcttgacatggaggccgtggtggtcaagataatggccatgctgctaaagatggaccggaagctcaagtcgtcaagaatccgaactctgttcaaccggcacctggcctcgctcggcatccccaagagcatgcactgcctggcgctgcggctggccgaggagttcgcggtgaactccgcggcccgctccccggtaccgttgccgcagtacgcccctcgcctcaccgacgcctctcgcatccacgtctgcctcgtcaccgacaacgttcttgcggccgccgtcgccgtggcgtctgccgtccggagctcggccggtccgtcgaggctcgtgttccacgtcgtcaccgacaagaagagctacgtcccgatgcactcgtggttcgcgctgcacccggtctctccggcggtcgtcgaggtcaagggcctccaccagttcgactggcgcgacggcgatgccatcgcctctgtcatgaggaccatcgacgaggtccagaagagctcgctggattaccaccagctgtgtgatggatcggtggagagggagtacagaaggcttgaggccaccaagccaagcacgttttcgatcctcaactatctcaaaatccatctcccagagttcttcccggagctcccgagggtgatactgctcgacgacgacgtcttggtgcgcaaggatctggccgggctgtgggagcaggatctggacgggaacatcatgggcgcggtcggcgcgcaccggcccggcgcagacggtggcatctgcatcgagaggacgctcagcgagcacctcaacttctctgaccctgcagtgtcgtcgctaggcctcgacggttcgaactgcacgtggtcttggggcgccaccatcgtcgacctcgacgcttggcgaggagcgaacgtcaccgagacgtaccagctatggctgcaaaagaaccgcgaatcggggttcaggctgtggaagatgggatcgctgccgccggctctgatagcgttcgacggccgggtgcaggcgatcgagccgctgtggcacctgccggacctcggctggcgcatgcccgacgccgagctgctgcagctctccgccgtcctgcatttcagcgggccgcggaagccgtggctggaggtggcgttcccggagctgcgggagctgtggctcgggcacttgaataactcggacagcttcctacgaggctgtggcgtagtggaatgacggtaatggaacagggagaagattcaagctggaaaaggggatacgtacagtgatccggtgcaagaatcgggtgcggcgctgggtttgtgaggagagggaagtaggtgctgccttcagcctttcctcgacctggctctgccatgtttgctggtttaatgccactgagtagaaactactcatggcgtatacatatatataactgggatatttatttgttattagttacaaaacggaaagtggaaattgcagaagttgtagccacgagataatttttctttggctccaatgatgaactcactgtatggaactatggttcatttaagagtcaaatacattactggtg

SEQ ID NO: 69165 - protein, 529 aa, Triticum aestivum
  peptide (1)..(529): Ceres Seq. ID no. 15219227
MRLYITAAAADDDATKPKAPQQLQAARRGYRSVVVTGLLAGVLLFRAALLAIETGASLCPSATGCSDWSAGLGRWLYGGGGDATEEFMKEWKRSHRVATLLDPVVVEAAPDSLDDLMVEMDTILASYDRLDMEAVVVKIMAMLLKMDRKLKSSRIRTLFNRHLASLGIPKSMHCLALRLAEEFAVNSAARSPVPLPQYAPRLTDASRIHVCLVTDNVLAAAVAVASAVRSSAGPSRLVFHVVTDKKSYVPMHSWFALHPVSPAVVEVKGLHQFDWRDGDAIASVMRTIDEVQKSSLDYHQLCDGSVEREYRRLEATKPSTFSILNYLKIHLPEFFPELPRVILLDDDVLVRKDLAGLWEQDLDGNIMGAVGAHRPGADGGICIERTLSEHLNFSDPAVSSLGLDGSNCTWSWGATIVDLDAWRGANVTETYQLWLQKNRESGFRLWKMGSLPPALIAFDGRVQAIEPLWHLPDLGWRMPDAELLQLSAVLHFSGPRKPWLEVAFPELRELWLGHLNNSDSFLRGCGVVE

SEQ ID NO: 69166 - protein, 442 aa, Triticum aestivum
  peptide (1)..(442): Ceres Seq. ID no. 15219228
MKEWKRSHRVATLLDPVVVEAAPDSLDDLMVEMDTILASYDRLDMEAVVVKIMAMLLKMDRKLKSSRIRTLFNRHLASLGIPKSMHCLALRLAEEFAVNSAARSPVPLPQYAPRLTDASRIHVCLVTDNVLAAAVAVASAVRSSAGPSRLVFHVVTDKKSYVPMHSWFALHPVSPAVVEVKGLHQFDWRDGDAIASVMRTIDEVQKSSLDYHQLCDGSVEREYRRLEATKPSTFSILNYLKIHLPEFFPELPRVILLDDDVLVRKDLAGLWEQDLDGNIMGAVGAHRPGADGGICIERTLSEHLNFSDPAVSSLGLDGSNCTWSWGATIVDLDAWRGANVTETYQLWLQKNRESGFRLWKMGSLPPALIAFDGRVQAIEPLWHLPDLGWRMPDAELLQLSAVLHFSGPRKPWLEVAFPELRELWLGHLNNSDSFLRGCGVVE

SEQ ID NO: 69167 - protein, 413 aa, Triticum aestivum
  peptide (1)..(413): Ceres Seq. ID no. 15219229
MVEMDTILASYDRLDMEAVVVKIMAMLLKMDRKLKSSRIRTLFNRHLASLGIPKSMHCLALRLAEEFAVNSAARSPVPLPQYAPRLTDASRIHVCLVTDNVLAAAVAVASAVRSSAGPSRLVFHVVTDKKSYVPMHSWFALHPVSPAVVEVKGLHQFDWRDGDAIASVMRTIDEVQKSSLDYHQLCDGSVEREYRRLEATKPSTFSILNYLKIHLPEFFPELPRVILLDDDVLVRKDLAGLWEQDLDGNIMGAVGAHRPGADGGICIERTLSEHLNFSDPAVSSLGLDGSNCTWSWGATIVDLDAWRGANVTETYQLWLQKNRESGFRLWKMGSLPPALIAFDGRVQAIEPLWHLPDLGWRMPDAELLQLSAVLHFSGPRKPWLEVAFPELRELWLGHLNNSDSFLRGCGVVE

SEQ ID NO: 69168 - DNA, 1085 bp, Triticum aestivum
  misc_feature (1)..(1085): Ceres Seq. ID no. 13656286
tccaacattattccctgtctcacccaagctgtcctgccccgcctcgcggcagcaaacagcaatacctgcagctgccggccaccaccaaccgcgccacgccatttaccaccatataatcatcactcaccccaaggcttgtcgggagcgaagccaagccagtcttgtgttggaagaacagagcagcagcttgcagatcgagagttcgggagaggcaatggcgacttcgttccaggggacgaccaccaagtgcaacgcctgcgacaagacggtgtacctcgtcgacaagctcaccgccgacaaccgggtctaccacaaggcctgcttcaggtgccaccactgcaagggcaccctcaagctcgcaaattacaactcgttcgaaggagtgctctactgcaggcctcactttgaccagctcttcaagaggaccgggagcctggacaagagcttcgaaggcactccaaaggttgtcaagccagaaaggaatgttgggaatgagaatgctactaaagtctccagcgcatttgctggcactagagagaaatgttttggatgcagcaagacagtctatccaattgagagggttactgtgaataacactatgtaccacaagagctgcttcaaatgctgccatggagggtgcaccatcagcccttcgaattacatcgcgcacgagggcaagctcttctgcaagcaccaccacacccagctgatcaaagagaagggtaatttcagccagctcgagaacgaccacgacaagacatcacagagtgccgggtcagtggatgatgaagactcggagtattagtcagtccttgaggatatccagagatgaataacgagcccttctgcatttgcaccagagcagtatatctttctgctgtgtggttcttttgagtttttccaatcgagatcaagtgcattccgaagacaattatgttattgccttgtacgcatgtaaaccttgttatatccgagtcaaaatatctctacctggttcgacgacgtctatgcgcatacaagcaagagaattgtaagttgattttwaactcamawrawaraaamatgccacctttaaaaaaaaaaaa

SEQ ID NO: 69169 - protein, 267 aa, Triticum aestivum
  peptide (1)..(267): Ceres Seq. ID no. 15219819
PTLFPVSPKLSCPASRQQTAIPAAAGHHQPRHAIYHHIIITHPKACRERSQASLVLEEQSSSLQIESSGEAMATSFQGTTTKCNACDKTVYLVDKLTADNRVYHKACFRCHHCKGTLKLANYNSFEGVLYCRPHFDQLFKRTGSLDKSFEGTPKVVKPERNVGNENATKVSSAFAGTREKCFGCSKTVYPIERVTVNNTMYHKSCFKCCHGGCTISPSNYIAHEGKLFCKHHHTQLIKEKGNFSQLENDHDKTSQSAGSVDDEDSEY

SEQ ID NO: 69170 - protein, 196 aa, Triticum aestivum
  peptide (1)..(196): Ceres Seq. ID no. 15219820
MATSFQGTTTKCNACDKTVYLVDKLTADNRVYHKACFRCHHCKGTLKLANYNSFEGVLYCRPHFDQLFKRTGSLDKSFEGTPKVVKPERNVGNENATKVSSAFAGTREKCFGCSKTVYPIERVTVNNTMYHKSCFKCCHGGCTISPSNYIAHEGKLFCKHHHTQLIKEKGNFSQLENDHDKTSQSAGSVDDEDSEY

SEQ ID NO: 69171 - protein, 135 aa, Triticum aestivum
  peptide (1)..(135): Ceres Seq. ID no. 15219821
SNIIPCLTQAVLPRLAAANSNTCSCRPPPTAPRHLPPYNHHSPQGLSGAKPSQSCVGRTEQQLADREFGRGNGDFVPGDDHQVQRLRQDGVPRRQAHRRQPGLPQGLLQVPPLQGHPQARKLQLVRRSALLQASL

SEQ ID NO: 69172 - DNA, 874 bp, Triticum aestivum
  misc_feature (1)..(874): Ceres Seq. ID no. 12619532
tgacatacaagaggtggaggaggtgaagagtcagtacacttcctttgaaatagcaagaggaagagacctagggatcaacaggctcgagatatcaacagcaaccctggagcctcagcagttatggaccaaaaatgtccttgagaagctcgccaccgatgctcagggtctgctaatcatccaagcaagcatcgaggaagtgaagcagaaaatcgagggaacttccaagggcaaatctcccatgagctcagagtacagcagcatcagggctcagctgcaggagatcgagggctctgtcttggaacagataggtttcaacagcagtttgacaaagaaggccgagaattatcctgcattcgaggtgaatgccgacctagagggctattccagcagaaggaagatctccgagcaggtgcagaaagggtcggagaaggtggcgaggctggacctcgagctccagaagatacagtacgtgctgctgaagctcgaggaagagcatgagttcaagagggtcaaggtctccgagaagcggtcgcggctgctcttgagggactacgtgtacgcaaagaaggacaagaatgacgccgggcagaagaagaagagtagggtgcccttctgcggctgtgtgcgccccaaaacagtgactgagtcttgattcggagtccgcagcaagcaatgtctttagtatctcttctgtaatgggttgcatgataatgttaacaaggagctcatgcattcggagttttgtccttgttcagaaatgccccctagtttaactagttaatcctactgatacttttatgaatcgaagcattttgtaattccgttgcccttcgctgtttctctgtgtctgcaatgaagatatatgagaatcttc

SEQ ID NO: 69173 - protein, 216 aa, Triticum aestivum
  peptide (1)..(216): Ceres Seq. ID no. 12619533
DIQEVEEVKSQYTSFEIARGRDLGINRLEISTATLEPQQLWTKNVLEKLATDAQGLLIIQASIEEVKQKIEGTSKGKSPMSSEYSSIRAQLQEIEGSVLEQIGFNSSLTKKAENYPAFEVNADLEGYSSRRKISEQVQKGSEKVARLDLELQKIQYVLLKLEEEHEFKRVKVSEKRSRLLLRDYVYAKKDKNDAGQKKKSRVPFCGCVRPKTVTES

SEQ ID NO: 69174 - protein, 137 aa, Triticum aestivum
  peptide (1)..(137): Ceres Seq. ID no. 12619534
MSSEYSSIRAQLQEIEGSVLEQIGFNSSLTKKAENYPAFEVNADLEGYSSRRKISEQVQKGSEKVARLDLELQKIQYVLLKLEEEHEFKRVKVSEKRSRLLLRDYVYAKKDKNDAGQKKKSRVPFCGCVRPKTVTES

SEQ ID NO: 69175 - DNA, 1124 bp, Triticum aestivum
  misc_feature (1)..(1124): Ceres Seq. ID no. 13496281
acagtcacaccgagcgagagagaaaataaagggggctcgtcgggctcgtgcagggtcgagagagaaaaaaaagagagagagctcgctcattcccattcccatcccatcccctcccctcgtcggagccgcgccgccgcccgccaatccgccgccgccgcccatgtcaaagacgccggggaagacgccgcggacgcccaggcggatcctggagtcctacaccatcaagggatccgacggcgtcatccgccctggggactctgtgctgatgaaggcgcccgacacatcaaagcctccgtatgtggccaagattgaggaaatcgaggcagcaggacctcggggcgcaaatgtcaaggttaaagtgcgctggtactaccgaccagaggagtctattggtgggcgcaggccattccatggcgaaaaggaggtgttcctctctgaccaccaagatgtgcagagtgctgacaccatagagtgcaagtgcaacgtttacagcttccgggactacaccaagctttctgctgtcaatcctgaggactatttttgccgcttcgagtacaagtcaatcacaggcagctttgtgcctgatcgcattgctgtgttttgtaagtgtgagatgccatacaaccctgatgatcttatgatccagtgtgaggaatgctctgattggtttcaccctgcttgtattggaaagaccatcaaagaagcaaagaaacttgagaattttacatgcgaaggttgtgttgctgaaaatggaaatggaaatggagtcaagaacgaaaattcccatgaatctactggtgaatcagatgagaagcaggtgcagtcgaagcggcgacggcggtgaaggcgaaggcgatctgggcggaagtcctccatctcttcacgcatgtgttgcggtggatgtacattgctgtttccagtttgatgtagaacgaacctgtattgagagtgtcttctagagtctggcaatcggccagtttgcgactttgcatatccatgtggacctaccagttagagggagtcatttttctctcttcttttttccatcccccttgtgttgacatggacaatggtgtgcttgaacgtcctttcttcattgactagaaaagaggatttcaactttc

SEQ ID NO: 69176 - protein, 280 aa, Triticum aestivum
  peptide (1)..(280): Ceres Seq. ID no. 15222984
QSHRAREKIKGARRARAGSREKKKRESSLIPIPIPSPPLVGAAPPPANPPPPPMSKTPGKTPRTPRRILESYTIKGSDGVIRPGDSVLMKAPDTSKPPYVAKIEEIEAAGPRGANVKVKVRWYYRPEESIGGRRPFHGEKEVFLSDHQDVQSADTIECKCNVYSFRDYTKLSAVNPEDYFCRFEYKSITGSFVPDRIAVFCKCEMPYNPDDLMIQCEECSDWFHPACIGKTIKEAKKLENFTCEGCVAENGNGNGVKNENSHESTGESDEKQVQSKRRRR

SEQ ID NO: 69177 - protein, 227 aa, Triticum aestivum
  peptide (1)..(227): Ceres Seq. ID no. 15222985
MSKTPGKTPRTPRRILESYTIKGSDGVIRPGDSVLMKAPDTSKPPYVAKIEEIEAAGPRGANVKVKVRWYYRPEESIGGRRPFHGEKEVFLSDHQDVQSADTIECKCNVYSFRDYTKLSAVNPEDYFCRFEYKSITGSFVPDRIAVFCKCEMPYNPDDLMIQCEECSDWFHPACIGKTIKEAKKLENFTCEGCVAENGNGNGVKNENSHESTGESDEKQVQSKRRRR

SEQ ID NO: 69178 - protein, 192 aa, Triticum aestivum
  peptide (1)..(192): Ceres Seq. ID no. 15222986
MKAPDTSKPPYVAKIEEIEAAGPRGANVKVKVRWYYRPEESIGGRRPFHGEKEVFLSDHQDVQSADTIECKCNVYSFRDYTKLSAVNPEDYFCRFEYKSITGSFVPDRIAVFCKCEMPYNPDDLMIQCEECSDWFHPACIGKTIKEAKKLENFTCEGCVAENGNGNGVKNENSHESTGESDEKQVQSKRRRR

SEQ ID NO: 69179 - DNA, 1282 bp, Triticum aestivum
  misc_feature (1)..(1282): Ceres Seq. ID no. 14301595
actctctgcaaagaaagttcacgtatgtcacgcgttgatgatattctgagaaactgcatgcagctggtggatttgaggctgaaagatttaagttgtcgccaacctgcttttcatatctttggtcctaactcaaagttaaagagtctgcaattggacaactacaacactgtgggtgtctacctgggtttggtgccttatcttgaaacatttgcttgtcgtggtcagccaactatactacactatggcttggtgcctcggcttaggcatgtgagtttgaacttcttgcaaactggagatgacggcaagaatgattcctctggtagcaacaggacatatcgactaagcaaattctttttaggggcgccgccaccgctagagtgccttgttctgcagttaagagggcgtcaggtaagtagcttttcctgaaatgatctctttcatattggtcatgacattgcatcagtaagacagtactaaattatcacttcatttatgcagatgtggatggaactaaccgccattcccgaccagctcagtcatctcaagaaactattcattgcaaacgtgccaatgaactgggatacattctggattctccacctacttgctgccgcacctgccttggagtcgctccatgttcattttgacaacaactcagagaaggcgggtgccacaggatcaccagatgtgcaagtggaacaccatcagcgctactatcacctgaaagaactcgtggtcatcggcttcggcggggcggcgtggcagacaggctttgtgaagcagatcatccaggcatcgccgatcctggagcgcgtccgcctgctggacgggcacgtcgtggaggacgaagatcgggagctcgtcggcctggacattgtgcgccgccgccgggagtggcacgagtgcgagagatcggaggtgctcgacgaactgacggacgggatcagttcgccgcatctcgagatagttctggaatgactttcggcagaagtgttgctgtgccggcggtggccttccgttctgtagggcttgcagctgtatgccatggcctaatgattatgtgttatgctggctctcaagatagatcaacatgtgtttgtatcgggtatcttgcgctttacttttgctcgattatccaaaggacggatgtagctagctgttgagatgattgattccgtggtgctcatggtgtggcttgactaggcaaaattaccacttgcacgcgcctaaaagatattttcctttcctttctgatagaagcaaaaagatctgcggcatcccc

SEQ ID NO: 69180 - protein, 161 aa, Triticum aestivum
  peptide (1)..(161): Ceres Seq. ID no. 14301596
MQMWMELTAIPDQLSHLKKLFIANVPMNWDTFWILHLLAAAPALESLHVHFDNNSEKAGATGSPDVQVEHHQRYYHLKELVVIGFGGAAWQTGFVKQIIQASPILERVRLLDGHVVEDEDRELVGLDIVRRRREWHECERSEVLDELTDGISSPHLEIVLE

SEQ ID NO: 69181 - protein, 159 aa, Triticum aestivum
  peptide (1)..(159): Ceres Seq. ID no. 14301597
MWMELTAIPDQLSHLKKLFIANVPMNWDTFWILHLLAAAPALESLHVHFDNNSEKAGATGSPDVQVEHHQRYYHLKELVVIGFGGAAWQTGFVKQIIQASPILERVRLLDGHVVEDEDRELVGLDIVRRRREWHECERSEVLDELTDGISSPHLEIVLE

SEQ ID NO: 69182 - protein, 157 aa, Triticum aestivum
  peptide (1)..(157): Ceres Seq. ID no. 14301598
MELTAIPDQLSHLKKLFIANVPMNWDTFWILHLLAAAPALESLHVHFDNNSEKAGATGSPDVQVEHHQRYYHLKELVVIGFGGAAWQTGFVKQIIQASPILERVRLLDGHVVEDEDRELVGLDIVRRRREWHECERSEVLDELTDGISSPHLEIVLE

SEQ ID NO: 69183 - DNA, 992 bp, Triticum aestivum
  misc_feature (1)..(992): Ceres Seq. ID no. 13656581
atcgttccctcctcctcccgttcgtttcctcagcgcctccaccacacactcagcgcccgatacccatcaccagccccgagtcgctgctttgcctccccgccatggccacctctgcttcctcccctccgtcgccggccggtcaccagcaagggcccgcaaccgcaaccgcgcccatggtcgctgttgcctcgtgcctcctcgcgcgcacccatagagcttcgccgcgccacctcgctcatgtcttgccggcttcctccgcctctgaactcgtcggccgtcgcgcctccagccgccagcacccctctgccgcaggccccgtgctccctccgctcgtctattcctcgccctcgccgcacttcgcgggtagccgcaccgcactggaccagcgcgccaccaggtgcagccatgggcaccgttttcctcaagcaacagccgccgttcggcctcgggccggtaagatcctgcaaccccacgtcgaggtcgccgttcccggccttcccctcacccgtcatcgccgcatccgacgggagctggccagaggccgccctttctcgcgtcagcctcctctgcattgagcgccgctgcctccgccccgtgccgttgacctcctatagcctcttgtttgttgtgtgcatcgctgcccacgactccggtagcaccttcgggtcctccttcgtcgaagggcactccccaacatcgtttcttcgttttggatcatgccaagtccgactacgacctgaacgactacacgatgaccccgaagaacatggattcgtcaagttctctttgacatgagtaccactaccgccgcccgaacaactacaaaccgaaatgccatgttcctctccgaacgtgtacgactaccgatgagtacctctaccgatgtcgtgtagcactactttcgtctgcactgcatcaaactcgtccgccccgaattgcacgcttcgaaggtataaacccgagacaacgccgaacaaatacatatgtgttgt

SEQ ID NO: 69184 - protein, 264 aa, Triticum aestivum
  peptide (1)..(264): Ceres Seq. ID no. 13656582
IVPSSSRSFPQRLHHTLSARYPSPAPSRCFASPPWPPLLPPLRRRPVTSKGPQPQPRPWSLLPRASSRAPIELRRATSLMSCRLPPPLNSSAVAPPAASTPLPQAPCSLRSSIPRPRRTSRVAAPHWTSAPPGAAMGTVFLKQQPPFGLGPVRSCNPTSRSPFPAFPSPVIAASDGSWPEAALSRVSLLCIERRCLRPVPLTSYSLLFVVCIAAHDSGSTFGSSFVEGHSPTSFLRFGSCQVRLRPERLHDDPEEHGFVKFSLT

SEQ ID NO: 69185 - protein, 190 aa, Triticum aestivum
  peptide (1)..(190): Ceres Seq. ID no. 13656583
RSLLLPFVSSAPPPHTQRPIPITSPESLLCLPAMATSASSPPSPAGHQQGPATATAPMVAVASCLLARTHRASPRHLAHVLPASSASELVGRRASSRQHPSAAGPVLPPLVYSSPSPHFAGSRTALDQRATRCSHGHRFPQATAAVRPRAGKILQPHVEVAVPGLPLTRHRRIRRELARGRPFSRQPPLH

SEQ ID NO: 69186 - protein, 185 aa, Triticum aestivum
  peptide (1)..(185): Ceres Seq. ID no. 13656584
MSCRLPPPLNSSAVAPPAASTPLPQAPCSLRSSIPRPRRTSRVAAPHWTSAPPGAAMGTVFLKQQPPFGLGPVRSCNPTSRSPFPAFPSPVIAASDGSWPEAALSRVSLLCIERRCLRPVPLTSYSLLFVVCIAAHDSGSTFGSSFVEGHSPTSFLRFGSCQVRLRPERLHDDPEEHGFVKFSLT

SEQ ID NO: 69187 - protein, 157 aa, Triticum aestivum
  peptide (1)..(157): Ceres Seq. ID no. 13656585
MATSASSPPSPAGHQQGPATATAPMVAVASCLLARTHRASPRHLAHVLPASSASELVGRRASSRQHPSAAGPVLPPLVYSSPSPHFAGSRTALDQRATRCSHGHRFPQATAAVRPRAGKILQPHVEVAVPGLPLTRHRRIRRELARGRPFSRQPPLH

SEQ ID NO: 69188 - DNA, 1416 bp, Triticum aestivum
  misc_feature (1)..(1416): Ceres Seq. ID no. 14303528
gaaaaaaaaaaagactagacggtggcggaaaatggcgtgcggtctcctgccgctgctccacggccccctctcctctccgcctcgtcccctcgtcccctcccgctccccctccctcctcgcgcccgggaccctgcccctagcccctcgccggagcagggtttcgcgtcacctgtcccctgcccctccgcgcgcgctcccggacattgccgcggcggcggcgggcctccgggacgcggtcgccggcgccttccaggcgtccccgcctacgtggagctcggctgccacaaccaacgtcgccatcttcgtcgcgggcacgccgctgctcctctccggcctctccgcctccggcatcgcggccgcctacgtcctcggcaccctcacgtggcgcgcatttggggcccgggcttacctcctcgtcgccgcctacttcgtggtgggcacagcagtgaccaagttaaagataaaacaaaaagaagctttgggagtggctgagaaaaaaggaggaaggagaggtcctggtagtgttattggttctagtgctgctggttgtgtctgtgctctcctatcagtatataatgtgggcaggggagcattcgcggaactctggacacttggctttgttgcaagtttctgtactaaactcagtgatacagtttccagtgaaatagggaaggcatatggaagaacaacttacctagtgacaacatttaagattgttccaagaggtacagaaggtgcagtcagtgttgagggcactcttgctggaattgtagcatcaacgtttctggcagggattggttatattttggggcaggtaaatctaccacagggtgtgctatgtgttcttgcatcccagattgcaaattttggcgagagtttgattggcgcaacgctgcaggataaggaaggttttgaatggctgaacaatgatgttgtcaacgtggtcaatatctcggccggcgccgttttggctgctctaatgcagcagctgctagtgagctggcgctcatgatctttgtttcctgacttttctccagtgcatccgctctcgtagtttcttagcggtataagcagctggcatttgcttgtggaactctcaagtcgcaattgagtggatgcacgtgcttctcctttgtgacacatcttcctgtacttctaattctagcttaaggcctgttcccgttcgctccactccgcggagctccaggagctcggtttgagctgctccgtggaaataagctgcagtttcctccgctccgggggcgcagtccagggatcggagaggaaccgaacaggcctttagtaacattgatttgtggaagtaaaacactctctgccagagcatcatatgttcaagaaatactgagctggctggcgtgctactagctactactccaaacaatgatcattctacac

SEQ ID NO: 69189 - protein, 336 aa, Triticum aestivum
  peptide (1)..(336): Ceres Seq. ID no. 14303529
KKKKTRRWRKMACGLLPLLHGPLSSPPRPLVPSRSPSLLAPGTLPLAPRRSRVSRHLSPAPPRALPDIAAAAAGLRDAVAGAFQASPPTWSSAATTNVAIFVAGTPLLLSGLSASGIAAAYVLGTLTWRAFGARAYLLVAAYFVVGTAVTKLKIKQKEALGVAEKKGGRRGPGSVIGSSAAGCVCALLSVYNVGRGAFAELWTLGFVASFCTKLSDTVSSEIGKAYGRTTYLVTTFKIVPRGTEGAVSVEGTLAGIVASTFLAGIGYILGQVNLPQGVLCVLASQIANFGESLIGATLQDKEGFEWLNNDVVNVVNISAGAVLAALMQQLLVSWRS

SEQ ID NO: 69190 - protein, 326 aa, Triticum aestivum
  peptide (1)..(326): Ceres Seq. ID no. 14303530
MACGLLPLLHGPLSSPPRPLVPSRSPSLLAPGTLPLAPRRSRVSRHLSPAPPRALPDIAAAAAGLRDAVAGAFQASPPTWSSAATTNVAIFVAGTPLLLSGLSASGIAAAYVLGTLTWRAFGARAYLLVAAYFVVGTAVTKLKIKQKEALGVAEKKGGRRGPGSVIGSSAAGCVCALLSVYNVGRGAFAELWTLGFVASFCTKLSDTVSSEIGKAYGRTTYLVTTFKIVPRGTEGAVSVEGTLAGIVASTFLAGIGYILGQVNLPQGVLCVLASQIANFGESLIGATLQDKEGFEWLNNDVVNVVNISAGAVLAALMQQLLVSWRS

SEQ ID NO: 69191 - DNA, 1273 bp, Triticum aestivum
  misc_feature (1)..(1273): Ceres Seq. ID no. 13663074
attctcctccccgctcgctcctatcctcccccatgccgccgcccccttccccccgctcgcctctgccgcctcctctccttccccgcacgtccggcctaccccctcctccctcctcctccatcctccctcattcgtcatcacggcagaccatctcccgtcacttgggccccatgctggcggccgggtcggggtggaggcgcagcagggctgcaggggccctacgtgtactacctctacagccagtacgggttcgacaagggcgacatcggccgcctcttcatcgccggctttggctcctccatgctcttcggcaccatcgtcgggtcgctcgccgacaagcagggaaggaagagggcgtgcatcacctacatcctcagctgcatcacgaagcactcgccgcagtacaggattctgatgataggccgtgtgcttggaggcattgcaacatcgctgctcttctcggcattcgagtcgtggctcgtggcggagcacaacaagggagagttgactgatgtacatgagacccaggcgaaaatgagtgtgctagcggaggctccagggatgcagggtgatagggcccagtctatgctccggttgtgttgttggggaagcttcggacgggatttagataaggaaaaggagtcccgtgcgaaatcgagcgtcctggtgttgggactgatgatccgcacttgttgtctaaatgcagaacatgcgcattgcagtgctttctatcagtaccgacgaccacaaatgggatggatcgagcaaccaagactcagagtgtggttgacagtgcggcctgctcccaaccctgcagataactctgggtttgaactggaaccttgtgtcatttggtgcaatgggtaattttgttcacagtacttgcttatgaagttaaagttggcatatatgcctgcccatgaacaagtctattgatacatgttttttaaagcacacatgttagtgggtctccgtgtcatttgcgtacatgatttcaaatggatccatttgcgtacatgatttcaaatggatccatttgcgtacatgatttcaaatggatctttgcgaatatggtagcaagtattttgtgctatgaaattaaaatgtgtacatacatctcatcgtagacaacaatccaacatgtttcttannaaaaaaaaaaaaaaaaaaaaaaaaaaaaaaaaaaaaaaaaaaaaaaaaaaaaaaaaaaaaaaaaaagaaaaaaaaaaaaaaaaaggtttatcgataccgccaacctcaagggggggcccgg

SEQ ID NO: 69192 - protein, 288 aa, Triticum aestivum
  peptide (1)..(288): Ceres Seq. ID no. 13663075
ILLPARSYPPPCRRPLPPARLCRLLSFPARPAYPLLPPPPSSLIRHHGRPSPVTWAPCWRPGRGGGAAGLQGPYVYYLYSQYGFDKGDIGRLFIAGFGSSMLFGTIVGSLADKQGRKRACITYILSCITKHSPQYRILMIGRVLGGIATSLLFSAFESWLVAEHNKGELTDVHETQAKMSVLAEAPGMQGDRAQSMLRLCCWGSFGRDLDKEKESRAKSSVLVLGLMIRTCCLNAEHAHCSAFYQYRRPQMGWIEQPRLRVWLTVRPAPNPADNSGFELEPCVIWCNG

SEQ ID NO: 69193 - protein, 188 aa, Triticum aestivum
  peptide (1)..(188): Ceres Seq. ID no. 13663076
MLFGTIVGSLADKQGRKRACITYILSCITKHSPQYRILMIGRVLGGIATSLLFSAFESWLVAEHNKGELTDVHETQAKMSVLAEAPGMQGDRAQSMLRLCCWGSFGRDLDKEKESRAKSSVLVLGLMIRTCCLNAEHAHCSAFYQYRRPQMGWIEQPRLRVWLTVRPAPNPADNSGFELEPCVIWCNG

SEQ ID NO: 69194 - protein, 169 aa, Triticum aestivum
  peptide (1)..(169): Ceres Seq. ID no. 13663077
SPPRSLLSSPMPPPPSPRSPLPPPLLPRTSGLPPPPSSSILPHSSSRQTISRHLGPMLAAGSGWRRSRAAGALRVLPLQPVRVRQGRHRPPLHRRLWLLHALRHHRRVARRQAGKEEGVHHLHPQLHHEALAAVQDSDDRPCAWRHCNIAALLGIRVVARGGAQQGRVD

SEQ ID NO: 69195 - DNA, 1219 bp, Triticum aestivum
  misc_feature (1)..(1219): Ceres Seq. ID no. 13656382
gaaaacccgttcgttccgcagaaattcaaaatccaaatcccacccccacccccacctcccctcgccggcggcgaccgaccgaccgaccgatcgatccatggcgccggccgacgtcaaggacgcgtcccctcctccccgccccccgcctccccccgccgggccggcgctccccggcggcgcggaggagtacgtgcgcggctccatcgaggccgccctcggcctccccgtgccggaccgctctatccgcgccaagctcgcggcctacgaggacctgcgccgccgcctccaggaccgcgtcttcgcgctcgaggaggacctccacgccgccgcccgccgcatcgacctcctcaagaacgagtcggcgatgaacgcggaggggatccggcgctgcgtggaggagaaggaggccgtggcggccgcgcgcgatcagctcgccgcccacgccgccaggctcgagaaggagtgcgggctctacgagcgcgacctcgagcgcgccatggagtcctgcgacgagctcgccagggagagcgacgacctgcgcaaccgcctccgtgacgcccccgaccttactgaacaagtccaagcgctgcagagggacaaggagatactcaagaccaacctgaacaaagcagaggaggaggttaagttgctgtttgaggagaacagagccctcgacgaagcaaacaagaggctgctgtgcttgctggagaaggagcagaagcatcggtccgaaagaaagcactccgccagtaattccaccaagaaacgcaagtcgtcgagcctgaaggacacgagcccggtcagcctggccatcgatttcaacagtgcggacgcgtcgaggcagcccctgttgcccttgcagccaaactctccggactgcagggtgcataagaagtgaagctggccgtcccggcattctcctctggatggcttaaactgaagtgaactgaacaactaccccttagctaggcatcgtcgcttgctgcttgcctgatcgatctgactaacttgctgggttaatttggttggttcttgtcggtagaacctcctcggtcatatgtagttcttcttccgcttgtgttggcagctgcctgtgtctatcatatcatgatcctttcatgacaaaattagtagtattatcttagtagttttgtgtctggtgatgggcgtgtaaggctctgattcgacgcttattgtggccagttcgtcgtgcctctgc

SEQ ID NO: 69196 - protein, 298 aa, Triticum aestivum
  peptide (1)..(298): Ceres Seq. ID no. 13656383
KTRSFRRNSKSKSHPHPHLPSPAATDRPTDRSMAPADVKDASPPPRPPPPPAGPALPGGAEEYVRGSIEAALGLPVPDRSIRAKLAAYEDLRRRLQDRVFALEEDLHAAARRIDLLKNESAMNAEGIRRCVEEKEAVAAARDQLAAHAARLEKECGLYERDLERAMESCDELARESDDLRNRLRDAPDLTEQVQALQRDKEILKTNLNKAEEEVKLLFEENRALDEANKRLLCLLEKEQKHRSERKHSASNSTKKRKSSSLKDTSPVSLAIDFNSADASRQPLLPLQPNSPDCRVHKK

SEQ ID NO: 69197 - protein, 266 aa, Triticum aestivum
  peptide (1)..(266): Ceres Seq. ID no. 13656384
MAPADVKDASPPPRPPPPPAGPALPGGAEEYVRGSIEAALGLPVPDRSIRAKLAAYEDLRRRLQDRVFALEEDLHAAARRIDLLKNESAMNAEGIRRCVEEKEAVAAARDQLAAHAARLEKECGLYERDLERAMESCDELARESDDLRNRLRDAPDLTEQVQALQRDKEILKTNLNKAEEEVKLLFEENRALDEANKRLLCLLEKEQKHRSERKHSASNSTKKRKSSSLKDTSPVSLAIDFNSADASRQPLLPLQPNSPDCRVHKK

SEQ ID NO: 69198 - protein, 184 aa, Triticum aestivum
  peptide (1)..(184): Ceres Seq. ID no. 13656385
ENPFVPQKFKIQIPPPPPPPLAGGDRPTDRSIHGAGRRQGRVPSSPPPASPRRAGAPRRRGGVRARLHRGRPRPPRAGPLYPRQARGLRGPAPPPPGPRLRARGGPPRRRPPHRPPQERVGDERGGDPALRGGEGGRGGRARSARRPRRQAREGVRALRARPRARHGVLRRARQGERRPAQPPP

SEQ ID NO: 69199 - DNA, 790 bp, Triticum aestivum
  misc_feature (1)..(790): Ceres Seq. ID no. 12619917
acccagcaacaacacagagcacttggttcccagcttgcctaggttgaagttgacagagcgagcgaaagtagaggagagactcgcagcctcgcaccagcaagctagcttcgcccgccatggccttccgcgacgcggcccgcaagccgctcctgtggctcctcccggccacgctcatcctggcgaccggcggcggcgagcgcgacgccgcccggcggcggctctacgcccccaccctgctggccgcgtggctggtcctcggcgtcgtcacggcggtgctggccgccaacggagggaggatcatgcgcttcgcccgctggaagaggctgctgctccgcggggggctgctgctcgccctcggcctcaacgccttctgcatcttcctcgccctcgacgccgtcgccgaccggctcctgggcgagcagggccccgtctccttcgccgtggctcgcgtcgtgtgcgccctcaccgccgccgccgcgcacctcgacttcggatgggtcgccgtccacggggagtagagcagcgagtcgttacttgttagccgaccggccggcggagactgattagtagtatgtggtcgagtgacttatttttgatgcgtattgttctagtagcaggcattgtgcgcaaattgttaggctgtgtcttcaaagttgatgtccggccttctgccggacacagatcaacatgcatgtagtgtgagaagtgagtatttatgtgtttaagctagtatttttacactgtgtttaagttaagctaaggatttggttaacccccggttggtggcctg

SEQ ID NO: 69200 - protein, 179 aa, Triticum aestivum
  peptide (1)..(179): Ceres Seq. ID no. 12619918
PSNNTEHLVPSLPRLKLTERAKVEERLAASHQQASFARHGLPRRGPQAAPVAPPGHAHPGDRRRRARRRPAAALRPHPAGRVAGPRRRHGGAGRQRREDHALRPLEEAAAPRGAAARPRPQRLLHLPRPRRRRRPAPGRAGPRLLRRGSRRVRPHRRRRAPRLRMGRRPRGVEQRVVTC

SEQ ID NO: 69201 - protein, 133 aa, Triticum aestivum
  peptide (1)..(133): Ceres Seq. ID no. 12619919
MAFRDAARKPLLWLLPATLILATGGGERDAARRRLYAPTLLAAWLVLGVVTAVLAANGGRIMRFARWKRLLLRGGLLLALGLNAFCIFLALDAVADRLLGEQGPVSFAVARVVCALTAAAAHLDFGWVAVHGE

SEQ ID NO: 69202 - DNA, 1198 bp, Triticum aestivum
  misc_feature (1)..(1198): Ceres Seq. ID no. 13656486
aaaaaaaaaaaccaaaggccagacccagaccagaccgctcacgccgcaccgcacgcgctgcacgggcacccaacacaagcccttctccgatcgtgctcgctcgccgccggtactagtctagtagagcagcggggaggagctccgagatgagggcgccgcggaggccgatggcggtggtgctcagctgggtgcggaggcagccgcccaaggtcaaggccttcctcgccgtcgtcgcgggcatgaccgcgctcgtcttcatccgcttcatcgtccacgaccacgacaacctcttcgtcgccgccgaggccgcgcacgcgctcggcatcgccgtgctcatctacaagctcaccaaggagaagacctgcgctggactttcactcaagtctcaggatttgacagcattgttcctggccgttaggttgtattgcagctttgttatggagtatgacatccatacaatactggattcagctacactagtagctactctttttgtcatttacatgattcggttcagactgaggtcaacttatatgctggacaaggacaattttgcattgtactacgtggttgtaccatgttgtgtgctggcatttattgctcatccttcaacatcacatatcatgatcaataggatctgctgggccttctgtgtttacttggaagctgtttcagtgctgccccagttgcgcttgatgcagaatacaaagattgttgaaccattcacagctcattatgtgtttgcgttgggtgtggcaaggttccttagctgtgcacactgggtccttcaggtcttggatactcgtggcagattattgactgctctgggctatggcttttggccatcgatggtgctcctctctgaaatcgtccagacgttcatccttgcagatttctgctactactatgtgaagagtcttgctggcggacaactagtgctgcgacttccttctggggtggtgtaaaatctggtgcacaactcatttgttcggtgctgtgtcttactgttgaacagtggctctgcttctggcgcccaaccttctctcttctcatgtgggatggattcaagagtcttgtttgccttttctttttccagttataaactgtttggtgaaaattgtaccggagactgttggtcgtgaagcttaggctgttgagaatactatctatagctgactatttatccagactagttttc

SEQ ID NO: 69203 - protein, 272 aa, Triticum aestivum
  peptide (1)..(272): Ceres Seq. ID no. 13656487
MRAPRRPMAVVLSWVRRQPPKVKAFLAVVAGMTALVFIRFIVHDHDNLFVAAEAAHALGIAVLIYKLTKEKTCAGLSLKSQDLTALFLAVRLYCSFVMEYDIHTILDSATLVATLFVIYMIRFRLRSTYMLDKDNFALYYVVVPCCVLAFIAHPSTSHIMINRICWAFCVYLEAVSVLPQLRLMQNTKIVEPFTAHYVFALGVARFLSCAHWVLQVLDTRGRLLTALGYGFWPSMVLLSEIVQTFILADFCYYYVKSLAGGQLVLRLPSGVV

SEQ ID NO: 69204 - protein, 265 aa, Triticum aestivum
  peptide (1)..(265): Ceres Seq. ID no. 13656488
MAVVLSWVRRQPPKVKAFLAVVAGMTALVFIRFIVHDHDNLFVAAEAAHALGIAVLIYKLTKEKTCAGLSLKSQDLTALFLAVRLYCSFVMEYDIHTILDSATLVATLFVIYMIRFRLRSTYMLDKDNFALYYVVVPCCVLAFIAHPSTSHIMINRICWAFCVYLEAVSVLPQLRLMQNTKIVEPFTAHYVFALGVARFLSCAHWVLQVLDTRGRLLTALGYGFWPSMVLLSEIVQTFILADFCYYYVKSLAGGQLVLRLPSGVV

SEQ ID NO: 69205 - protein, 241 aa, Triticum aestivum
  peptide (1)..(241): Ceres Seq. ID no. 13656489
MTALVFIRFIVHDHDNLFVAAEAAHALGIAVLIYKLTKEKTCAGLSLKSQDLTALFLAVRLYCSFVMEYDIHTILDSATLVATLFVIYMIRFRLRSTYMLDKDNFALYYVVVPCCVLAFIAHPSTSHIMINRICWAFCVYLEAVSVLPQLRLMQNTKIVEPFTAHYVFALGVARFLSCAHWVLQVLDTRGRLLTALGYGFWPSMVLLSEIVQTFILADFCYYYVKSLAGGQLVLRLPSGVV

SEQ ID NO: 69206 - DNA, 1497 bp, Triticum aestivum
  misc_feature (1)..(1497): Ceres Seq. ID no. 13656501
cacccccacccgcatcctcctccctccccccaagctgcaattcacctccgaattcggtcgcccatggcaccgcggctgctctgatcctacccacctaccccctccccctcccctcccctcccctcccagctgctctcccttcccctctcgtttgaaaatggcaatgctggtggatcctccgaatggcatgggaaaccaagggaagcactattactcaatgtggcaaaccttgtttgagattgacaccaagtatgtgcctatcaaacccataggccgaggagcttatggaatagtttgctcatccataaaccgtgagacaaacgagaaagtagcgataaagaagatacataatgtattcgacaaccgtgtggatgcactaaggaccttgcgggagctgaaactcctccggcatctccgccatgagaatgttatttctttgaaggatataatgatgcctgtacaaaggaggagctttaaggatgtgtacttggtttatgagctcatggatacagacctgcatcagataatcaaatcgcctcaggggctttccaacgaccactgccaatattttctttttcagttgcttcgaggactgaaatacctccattcagcagagatactccacagagacctaaaacctgggaacctactggtgaatgcaaactgtgatctgaagatatgcgattttggtcttgcacgtacaaacagtagtaaaggccagtttatgactgaatatgtcgtcacccgctggtatagggctcctgagttgctgctttgctgcgacaactacggcacttccattgatgtttggtctgttggctgcatctttgctgagctacttggccgcaagcctattttccccgggacagagtgcctaaatcagctaaaactgatagtcaatgttcttggcacgatgagcgagtctgacctggagttcatcgacaacccaaaggcccgcagatatatcaagaccctcccctacactcctggtgttccacttgcaagtatgtacccacatgcacaccctctggccatcgatctattacagaagatgctcatcttcgaccctaccaaaagggtcagtgttacccaggcccttgagcacccttacatgtctcctctgtatgacccaagtgcaaaccctcccgcgcaagtgcccatcgatctcgacatagatgagaacatcagctcagagatgatcagggaaatgatgtggcaggagatgcttcactaccaccctgaagccgccacggcagtaaacatgtgacgacgatcttgcagtgccctgggaagaacccggcaggctcactccttttttcctcgaaaagactactgcgattatcgcacctattaagtaaccacgacgtgcagtgtggagaggtatctccgtgtaaatatgcagtgcgataagaaccgcatatggatagttcttgttatggaccactttggtgtatgtatactgttgtgttgttgtataagctcatgaaagaactgttg

SEQ ID NO: 69207 - protein, 421 aa, Triticum aestivum
  peptide (1)..(421): Ceres Seq. ID no. 13656502
TPTRILLPPPKLQFTSEFGRPWHRGCSDPTHLPPPPPLPSPPSCSPFPSRLKMAMLVDPPNGMGNQGKHYYSMWQTLFEIDTKYVPIKPIGRGAYGIVCSSINRETNEKVAIKKIHNVFDNRVDALRTLRELKLLRHLRHENVISLKDIMMPVQRRSFKDVYLVYELMDTDLHQIIKSPQGLSNDHCQYFLFQLLRGLKYLHSAEILHRDLKPGNLLVNANCDLKICDFGLARTNSSKGQFMTEYVVTRWYRAPELLLCCDNYGTSIDVWSVGCIFAELLGRKPIFPGTECLNQLKLIVNVLGTMSESDLEFIDNPKARRYIKTLPYTPGVPLASMYPHAHPLAIDLLQKMLIFDPTKRVSVTQALEHPYMSPLYDPSANPPAQVPIDLDIDENISSEMIREMMWQEMLHYHPEAATAVNM

SEQ ID NO: 69208 - protein, 369 aa, Triticum aestivum
  peptide (1)..(369): Ceres Seq. ID no. 13656503
MAMLVDPPNGMGNQGKHYYSMWQTLFEIDTKYVPIKPIGRGAYGIVCSSINRETNEKVAIKKIHNVFDNRVDALRTLRELKLLRHLRHENVISLKDIMMPVQRRSFKDVYLVYELMDTDLHQIIKSPQGLSNDHCQYFLFQLLRGLKYLHSAEILHRDLKPGNLLVNANCDLKICDFGLARTNSSKGQFMTEYVVTRWYRAPELLLCCDNYGTSIDVWSVGCIFAELLGRKPIFPGTECLNQLKLIVNVLGTMSESDLEFIDNPKARRYIKTLPYTPGVPLASMYPHAHPLAIDLLQKMLIFDPTKRVSVTQALEHPYMSPLYDPSANPPAQVPIDLDIDENISSEMIREMMWQEMLHYHPEAATAVNM

SEQ ID NO: 69209 - protein, 367 aa, Triticum aestivum
  peptide (1)..(367): Ceres Seq. ID no. 13656504
MLVDPPNGMGNQGKHYYSMWQTLFEIDTKYVPIKPIGRGAYGIVCSSINRETNEKVAIKKIHNVFDNRVDALRTLRELKLLRHLRHENVISLKDIMMPVQRRSFKDVYLVYELMDTDLHQIIKSPQGLSNDHCQYFLFQLLRGLKYLHSAEILHRDLKPGNLLVNANCDLKICDFGLARTNSSKGQFMTEYVVTRWYRAPELLLCCDNYGTSIDVWSVGCIFAELLGRKPIFPGTECLNQLKLIVNVLGTMSESDLEFIDNPKARRYIKTLPYTPGVPLASMYPHAHPLAIDLLQKMLIFDPTKRVSVTQALEHPYMSPLYDPSANPPAQVPIDLDIDENISSEMIREMMWQEMLHYHPEAATAVNM

SEQ ID NO: 69210 - DNA, 781 bp, Triticum aestivum
  misc_feature (1)..(781): Ceres Seq. ID no. 12619783
ccattcacactcctcctcccgcaccataccatcaatcaaggtgctcgagggacataggatcagaagaaagacgggaggatggatcggtacgaggtggtgagggacatcgggtccgggaacttcggggtggcgaagctggtgcgggacacgcccacggtatacgcacgtacagctcgatcgcaatggcgtcgctcgtcgccgtccagccggtcgccgtgcggggcctggccggcagctccatctccggccgcaagctcgccgtccggcccgcctccgccgccgtctcccgctccacccgcagggctcgcggggcggcggtggtggccaagtacggggagaagagcgtctacttcgacctggacgacatcgccaacacgacggggcagtgggacctgtacggcagcgacgcggcgtcgccctacaacggcctgcagagcaagttcttcaacaccttcgccgcgcccttcaccaagcgagggctgctgctcaaggtcctgctgctcggcggcggctccctgctcgcctacgtcagcgccaccgcctcccccgacctgctccccatcaagaaggggccccagctgccccccaccccggggccacgtggcaagatctaagtagatctgcaatcaaggccttcttcctcctctcgcctcgtgcttgtgtaccatggatctgatggattcccccctatggccctatctatgtcctctgttgatacttgatctttgtactacttcgtatcagtaattggaaagatgctgcttgcatgatgcatgcaatt

SEQ ID NO: 69211 - protein, 203 aa, Triticum aestivum
  peptide (1)..(203): Ceres Seq. ID no. 12619784
IHTPPPAPYHQSRCSRDIGSEERREDGSVRGGEGHRVRELRGGEAGAGHAHGIRTYSSIAMASLVAVQPVAVRGLAGSSISGRKLAVRPASAAVSRSTRRARGAAVVAKYGEKSVYFDLDDIANTTGQWDLYGSDAASPYNGLQSKFFNTFAAPFTKRGLLLKVLLLGGGSLLAYVSATASPDLLPIKKGPQLPPTPGPRGKI

SEQ ID NO: 69212 - protein, 179 aa, Triticum aestivum
  peptide (1)..(179): Ceres Seq. ID no. 12619785
MDRYEVVRDIGSGNFGVAKLVRDTPTVYARTARSQWRRSSPSSRSPCGAWPAAPSPAASSPSGPPPPPSPAPPAGLAGRRWWPSTGRRASTSTWTTSPTRRGSGTCTAATRRRPTTACRASSSTPSPRPSPSEGCCSRSCCSAAAPCSPTSAPPPPPTCSPSRRGPSCPPPRGHVARSK

SEQ ID NO: 69213 - protein, 143 aa, Triticum aestivum
  peptide (1)..(143): Ceres Seq. ID no. 12619786
MASLVAVQPVAVRGLAGSSISGRKLAVRPASAAVSRSTRRARGAAVVAKYGEKSVYFDLDDIANTTGQWDLYGSDAASPYNGLQSKFFNTFAAPFTKRGLLLKVLLLGGGSLLAYVSATASPDLLPIKKGPQLPPTPGPRGKI

SEQ ID NO: 69214 - DNA, 1775 bp, Triticum aestivum
  misc_feature (1)..(1775): Ceres Seq. ID no. 14307980
atatcgaacgcaacaatgcacctcgtcgccatggatatccctctcccgttgctcctctccaccttggccgttgccgtgaccatatgctatgtcctcttcttccgtgctgacaaggggcgcgcgccgctgccgcccgggccgaggggctggccggtgctggggaacctcccgcagctcggcggcaagacgcaccagaccatgcacgagatgtccaaggtgtacgggcccgtgctccggctccggttcggcagctccgtcgtggtggtggccgggtcggccgccgtggccgagcagttcctccgcacccacgacgccaagttcagcagccggccgcccaactccggcggcgagcacatggcgtacaactaccaggacgtggtgttcgcgccctacggcccccggtggcgcgcgatgaggaaggtgtgcgccgtgaacctcttctcggcccgcgcgctcgacgacctccgcgggttccgcgagcgggaggccgcgctcatggtgaggtccctcgctgatgccgctgctaccggcggggtggtggcggtcggcaaggcggcgaacgtgtgcacgaccaacgctctctcgcgggcggcggtggggctccgggtgttcgccgcggccggcgccgagcttggcgccaaggagttcaaggagatcgtgctggaggtgatggaggtgggcggcgtgctcaacgtcggggacttcgtgccggctctccggtggctcgacccgcagggtgttgttgccaggttgaagaaactgcaccgccggttcgacgacatgatgaacgggatcatcgccgagagaagggccggaggtagcacggccggcgaggagaaggaaggtaaggacctgctcggcttgctgctcgccatggtgcaggaagacaagtccctcaccggcggcgaggaggacaggatcacggacacggacgtcaaggcgctcatactgaacttgttcgtggcgggcacggagacgacgtcgacgatagtggagtgggcggtggcggagctgatccggcacccggacatgctgaagcgggcgcaggaggagatggacgccgtcgtgggccgggacaggctcgtctcggagtccgacctgccgcgcctcacgttcctgaacgcggtcatcaaggagaccttccggctgcacccgtcgacgccgctctcgctgccgcggatggcctccgaggagtgcgaggtcgccggctaccgcatccccaagggcacggagctgctggtcaacgtgtggggcatcgcccgcgacccggccctgtggcccgacccgctcgagttccggcccgcccggttcctcccgggagggacccacgccgacgtcgacgtcaaggggggcgacttcgggctgatcccgttcggggccggccggcggatctgcgcgggcctcagctggggcctgcgggtggtcaccgtgacggcggccacgctcgtgcactcgttcgactgggagctgccggcgggccagacgcccgacaagctcaacatggaggaggccttctctctgctgctgcagcgggccgtgccgctgatggcccacccggtgcccaggctgctcccgtcggcgtacgaaattgcataaacaaagacagagggaagcgcgccactgatttgtcgtgatgatctatggaggagaagctccagttgtgctatgtattgttgtcgatgggggtgtgcctcatcgttttcaactaaaatagttccacatgtaacttctgtactgtttttagatatagcatggaaaataacattttatgtatc

SEQ ID NO: 69215 - protein, 531 aa, Triticum aestivum
  peptide (1)..(531): Ceres Seq. ID no. 14307981
ISNATMHLVAMDIPLPLLLSTLAVAVTICYVLFFRADKGRAPLPPGPRGWPVLGNLPQLGGKTHQTMHEMSKVYGPVLRLRFGSSVVVVAGSAAVAEQFLRTHDAKFSSRPPNSGGEHMAYNYQDVVFAPYGPRWRAMRKVCAVNLFSARALDDLRGFREREAALMVRSLADAAATGGVVAVGKAANVCTTNALSRAAVGLRVFAAAGAELGAKEFKEIVLEVMEVGGVLNVGDFVPALRWLDPQGVVARLKKLHRRFDDMMNGIIAERRAGGSTAGEEKEGKDLLGLLLAMVQEDKSLTGGEEDRITDTDVKALILNLFVAGTETTSTIVEWAVAELIRHPDMLKRAQEEMDAVVGRDRLVSESDLPRLTFLNAVIKETFRLHPSTPLSLPRMASEECEVAGYRIPKGTELLVNVWGIARDPALWPDPLEFRPARFLPGGTHADVDVKGGDFGLIPFGAGRRICAGLSWGLRVVTVTAATLVHSFDWELPAGQTPDKLNMEEAFSLLLQRAVPLMAHPVPRLLPSAYEIA

SEQ ID NO: 69216 - protein, 526 aa, Triticum aestivum
  peptide (1)..(526): Ceres Seq. ID no. 14307982
MHLVAMDIPLPLLLSTLAVAVTICYVLFFRADKGRAPLPPGPRGWPVLGNLPQLGGKTHQTMHEMSKVYGPVLRLRFGSSVVVVAGSAAVAEQFLRTHDAKFSSRPPNSGGEHMAYNYQDVVFAPYGPRWRAMRKVCAVNLFSARALDDLRGFREREAALMVRSLADAAATGGVVAVGKAANVCTTNALSRAAVGLRVFAAAGAELGAKEFKEIVLEVMEVGGVLNVGDFVPALRWLDPQGVVARLKKLHRRFDDMMNGIIAERRAGGSTAGEEKEGKDLLGLLLAMVQEDKSLTGGEEDRITDTDVKALILNLFVAGTETTSTIVEWAVAELIRHPDMLKRAQEEMDAVVGRDRLVSESDLPRLTFLNAVIKETFRLHPSTPLSLPRMASEECEVAGYRIPKGTELLVNVWGIARDPALWPDPLEFRPARFLPGGTHADVDVKGGDFGLIPFGAGRRICAGLSWGLRVVTVTAATLVHSFDWELPAGQTPDKLNMEEAFSLLLQRAVPLMAHPVPRLLPSAYEIA

SEQ ID NO: 69217 - protein, 521 aa, Triticum aestivum
  peptide (1)..(521): Ceres Seq. ID no. 14307983
MDIPLPLLLSTLAVAVTICYVLFFRADKGRAPLPPGPRGWPVLGNLPQLGGKTHQTMHEMSKVYGPVLRLRFGSSVVVVAGSAAVAEQFLRTHDAKFSSRPPNSGGEHMAYNYQDVVFAPYGPRWRAMRKVCAVNLFSARALDDLRGFREREAALMVRSLADAAATGGVVAVGKAANVCTTNALSRAAVGLRVFAAAGAELGAKEFKEIVLEVMEVGGVLNVGDFVPALRWLDPQGVVARLKKLHRRFDDMMNGIIAERRAGGSTAGEEKEGKDLLGLLLAMVQEDKSLTGGEEDRITDTDVKALILNLFVAGTETTSTIVEWAVAELIRHPDMLKRAQEEMDAVVGRDRLVSESDLPRLTFLNAVIKETFRLHPSTPLSLPRMASEECEVAGYRIPKGTELLVNVWGIARDPALWPDPLEFRPARFLPGGTHADVDVKGGDFGLIPFGAGRRICAGLSWGLRVVTVTAATLVHSFDWELPAGQTPDKLNMEEAFSLLLQRAVPLMAHPVPRLLPSAYEIA

SEQ ID NO: 69218 - DNA, 1395 bp, Triticum aestivum
  misc_feature (1)..(1395): Ceres Seq. ID no. 13656783
gtcactctcctccctcccccgcccacagcccccacaccagaccagcgcggcagccgccatggatccaccaaccagcgctgcccaccacagccccgacgacgaggcggccgccttcttccgcgcggcgccgcccctccgcgaccgcgacgccgtcgccgccagcctcgccgccttcgtcgcccgccaccgcgcacgctccgccgccggcgccggcgcaggaggaggaggagggcccccggcggtggcgggggtggtctgcgtcacctccggcggcaccacggtgcccctggagcagcgctgcgtgcgctacatcgacaacttcagctccggccagcgcggggccgcgtccaccgagtatttcctaaaggccggttacgccgtcatcttcgtccaccgccgcgggagcaagcagccttactgcaggtttcttccggaggactcttttctcgaccttttcgagctcggcgaaggatcagagatccaagtcccagagtctcacaccacggtggtcaagacagcgatcagcagttatcgcaaggcaatcgatgaaggtctacttctgaaacttcctttcaccacaatttttgagtaccttcagttactgcagcttgtatccactgctatgaattgcttggagcgccatggaatgttttattgtgcagctgcagtgtctgacttctatgttccatgggagagtatggctaaacataaaatccagtcagcaggtggccctttgaacatgcagctcagtcaagttcctaagatgcttttcatcctcagaaaccattgggccccttctgcattttgtgtatccttcaagctcgagacggatccagacatccttatacagaaggcagaggcggctttgagaaagtatggtatgaatgtggtggtggcgaatgagctagcgaactacaaagacgtggttgtcatggtcacaagcagcgggaagacgaccgtgagcaggcggagcaaggaagatgacctggaagagcagctcattggtctcctggttaagatgcattcagatcacactaagcagtccaatccggaccaagagaaatgagctgttgtcttgatgaataaggagttgctacaagttattgtgctcattggtctcctggtttaattcacgtaccagtaagtggagtagcattctctcttgagaatcgcacgcgcgatcatctcccttatcccttatgttgtgctacaccgtctgtgatgcctgtctttatcgacgtcggcggtggtttggattggacaagtctcaccaattcaaaccccaaatctgaaatgtgtatattttgagagattcaaatttgattaatgggaatctaggctccttcgcctggactgcataatctaccataggtaggttacagcagcttcaaatgg

SEQ ID NO: 69219 - protein, 354 aa, Triticum aestivum
  peptide (1)..(354): Ceres Seq. ID no. 13656784
SLSSLPRPQPPHQTSAAAAMDPPTSAAHHSPDDEAAAFFRAAPPLRDRDAVAASLAAFVARHRARSAAGAGAGGGGGPPAVAGVVCVTSGGTTVPLEQRCVRYIDNFSSGQRGAASTEYFLKAGYAVIFVHRRGSKQPYCRFLPEDSFLDLFELGEGSEIQVPESHTTVVKTAISSYRKAIDEGLLLKLPFTTIFEYLQLLQLVSTAMNCLERHGMFYCAAAVSDFYVPWESMAKHKIQSAGGPLNMQLSQVPKMLFILRNHWAPSAFCVSFKLETDPDILIQKAEAALRKYGMNVVVANELANYKDVVVMVTSSGKTTVSRRSKEDDLEEQLIGLLVKMHSDHTKQSNPDQEK

SEQ ID NO: 69220 - protein, 335 aa, Triticum aestivum
  peptide (1)..(335): Ceres Seq. ID no. 13656785
MDPPTSAAHHSPDDEAAAFFRAAPPLRDRDAVAASLAAFVARHRARSAAGAGAGGGGGPPAVAGVVCVTSGGTTVPLEQRCVRYIDNFSSGQRGAASTEYFLKAGYAVIFVHRRGSKQPYCRFLPEDSFLDLFELGEGSEIQVPESHTTVVKTAISSYRKAIDEGLLLKLPFTTIFEYLQLLQLVSTAMNCLERHGMFYCAAAVSDFYVPWESMAKHKIQSAGGPLNMQLSQVPKMLFILRNHWAPSAFCVSFKLETDPDILIQKAEAALRKYGMNVVVANELANYKDVVVMVTSSGKTTVSRRSKEDDLEEQLIGLLVKMHSDHTKQSNPDQEK

SEQ ID NO: 69221 - protein, 182 aa, Triticum aestivum
  peptide (1)..(182): Ceres Seq. ID no. 13656786
VTLLPPPPTAPTPDQRGSRHGSTNQRCPPQPRRRGGRLLPRGAAPPRPRRRRRQPRRLRRPPPRTLRRRRRRRRRRRAPGGGGGGLRHLRRHHGAPGAALRALHRQLQLRPARGRVHRVFPKGRLRRHLRPPPREQAALLQVSSGGLFSRPFRARRRIRDPSPRVSHHGGQDSDQQLSQGNR

SEQ ID NO: 69222 - DNA, 2050 bp, Triticum aestivum
  misc_feature (1)..(2050): Ceres Seq. ID no. 14301486
aatttccaaggagaatgcaggagcatgttctttccttcggcgatctcagagttgcatttcccagcaggcatcctgacatagtttgaaactccatcacctctcggcaagcaacaacggatacgatccagcacgggagctggtgctgttcaccgcccccagctacctacctgctgccgacctttatctctgcagaagatcgatggaaacccaggaaggcgatgcgcataggtccgaatccgatgctcacaaagtgaaagggagaggtggattcgtagccctgccgttcatcatagcaaatgaaatgttggagaaagttgcggggttcgggctcaacaccaacatgatcatgtacctcaccaagcagtaccacctgagcaacgtcaccgccggagcgacgctcttcgtgtgggctgcggcggcaaatttcgcgcccattcccggcgcgctcatagccgacatgtacacaggccgattcatggccatctcgctaggctccatcgcgtgcctaacaggggtcgttttcctatggctgagcgccatgatacccggagcacggccaccgccgtgcggcgtcggccttgccggggagcagtgcgcgcccccggggccgaggcaccttgcgtggctgatcgccggcttcacgttcctgtccatcggcgccggcggcatccggccgtgctccatggccttcggcgcggaccagttctcccggcaccccaaggagaggaggtcgaggatcctgcaggcctacttcaacgcctactacgcgtccatcggggtggccttcacggtcgccgtcaccgtgatcgtctacgtgcaggacaacgtcgggtggaaggccgggttcgccgttccgatgggcctcatgatgctctccgcggtgagcttcctcctgggctcccgcctctacgtcaaggagaaggggtccaagcaaatgttcgccgggataggcgccgccctcgtggcggcgatcaggaactacagggtgcagctgccggcgaagacggaggacggcgtgtaccatcatctcaaggactgcaagctcactgtccccacagacaggttgaggttcctgaacaaggcctgcatcatcagcaacaacgggggcgtggacttacccggcactggcgcggcggcctcagagcgtgatggcaacgttggcggcaggaggctgtgcacggtggaccaggtggagcagctcaagtcggccgtccggatcctgccgatctggtcgtccaccgtgttcctggcgcaggccatgagccagaactacgccgtgctgcaggccaacgagatggaccggcgcatcggcgtgggccagttccgcgtgccgggctgctccctcaccatgttcaacatggtgaccatgtcgctgtggtcgggcagctacgacaggtggatcgcgccggcgctgcgacgggtgacgggcgacccgcgggggctcaccatgaagcagcgcgtcggcgtgggcctgctgctggccaccgcggcgatggccgtgtccggcgcggtggagggcgcgcggcgcaggctggagctggccggcggcggcggcgccggcatgtcggcgttctggctggtgccgcagttcgcgctcatggggctggcggaggcgttcggcgtgatcggggagctcgagttcttctacacggagctgcccaagagcatggccagcttcagcatggcgctgctctacatggccatgggggtgggcaacctggtcaacagcctgatcgtcaaggtggtggacgacgcgagcaggcgcggggggaggacgagctggctctccagcgatctcaacgcgggccactacgactactactactggctgctcgccggtttgggcgccgtcaacttcgtgtacttcctctggtgcgcctggaagtacggcgaggaggggaagaacgtggagtgggaggagggtgaaggtgagagggaacggccgatggcctagttttgtaatgctgagctcgggtgtcacaatgaggccatttttaacgtgagtctgaactcagagggcaaaaaccgcaggttgcggggttggttctcc

SEQ ID NO: 69223 - protein, 584 aa, Triticum aestivum
  peptide (1)..(584): Ceres Seq. ID no. 14301487
METQEGDAHRSESDAHKVKGRGGFVALPFIIANEMLEKVAGFGLNTNMIMYLTKQYHLSNVTAGATLFVWAAAANFAPIPGALIADMYTGRFMAISLGSIACLTGVVFLWLSAMIPGARPPPCGVGLAGEQCAPPGPRHLAWLIAGFTFLSIGAGGIRPCSMAFGADQFSRHPKERRSRILQAYFNAYYASIGVAFTVAVTVIVYVQDNVGWKAGFAVPMGLMMLSAVSFLLGSRLYVKEKGSKQMFAGIGAALVAAIRNYRVQLPAKTEDGVYHHLKDCKLTVPTDRLRFLNKACIISNNGGVDLPGTGAAASERDGNVGGRRLCTVDQVEQLKSAVRILPIWSSTVFLAQAMSQNYAVLQANEMDRRIGVGQFRVPGCSLTMFNMVTMSLWSGSYDRWIAPALRRVTGDPRGLTMKQRVGVGLLLATAAMAVSGAVEGARRRLELAGGGGAGMSAFWLVPQFALMGLAEAFGVIGELEFFYTELPKSMASFSMALLYMAMGVGNLVNSLIVKVVDDASRRGGRTSWLSSDLNAGHYDYYYWLLAGLGAVNFVYFLWCAWKYGEEGKNVEWEEGEGERERPMA

SEQ ID NO: 69224 - protein, 550 aa, Triticum aestivum
  peptide (1)..(550): Ceres Seq. ID no. 14301488
MLEKVAGFGLNTNMIMYLTKQYHLSNVTAGATLFVWAAAANFAPIPGALIADMYTGRFMAISLGSIACLTGVVFLWLSAMIPGARPPPCGVGLAGEQCAPPGPRHLAWLIAGFTFLSIGAGGIRPCSMAFGADQFSRHPKERRSRILQAYFNAYYASIGVAFTVAVTVIVYVQDNVGWKAGFAVPMGLMMLSAVSFLLGSRLYVKEKGSKQMFAGIGAALVAAIRNYRVQLPAKTEDGVYHHLKDCKLTVPTDRLRFLNKACIISNNGGVDLPGTGAAASERDGNVGGRRLCTVDQVEQLKSAVRILPIWSSTVFLAQAMSQNYAVLQANEMDRRIGVGQFRVPGCSLTMFNMVTMSLWSGSYDRWIAPALRRVTGDPRGLTMKQRVGVGLLLATAAMAVSGAVEGARRRLELAGGGGAGMSAFWLVPQFALMGLAEAFGVIGELEFFYTELPKSMASFSMALLYMAMGVGNLVNSLIVKVVDDASRRGGRTSWLSSDLNAGHYDYYYWLLAGLGAVNFVYFLWCAWKYGEEGKNVEWEEGEGERERPMA

SEQ ID NO: 69225 - protein, 537 aa, Triticum aestivum
  peptide (1)..(537): Ceres Seq. ID no. 14301489
MIMYLTKQYHLSNVTAGATLFVWAAAANFAPIPGALIADMYTGRFMAISLGSIACLTGVVFLWLSAMIPGARPPPCGVGLAGEQCAPPGPRHLAWLIAGFTFLSIGAGGIRPCSMAFGADQFSRHPKERRSRILQAYFNAYYASIGVAFTVAVTVIVYVQDNVGWKAGFAVPMGLMMLSAVSFLLGSRLYVKEKGSKQMFAGIGAALVAAIRNYRVQLPAKTEDGVYHHLKDCKLTVPTDRLRFLNKACIISNNGGVDLPGTGAAASERDGNVGGRRLCTVDQVEQLKSAVRILPIWSSTVFLAQAMSQNYAVLQANEMDRRIGVGQFRVPGCSLTMFNMVTMSLWSGSYDRWIAPALRRVTGDPRGLTMKQRVGVGLLLATAAMAVSGAVEGARRRLELAGGGGAGMSAFWLVPQFALMGLAEAFGVIGELEFFYTELPKSMASFSMALLYMAMGVGNLVNSLIVKVVDDASRRGGRTSWLSSDLNAGHYDYYYWLLAGLGAVNFVYFLWCAWKYGEEGKNVEWEEGEGERERPMA

SEQ ID NO: 69226 - DNA, 1599 bp, Triticum aestivum
  misc_feature (1)..(1599): Ceres Seq. ID no. 13656519
acgatcacacgacaccgcttccgtcctcttcgatctccagaagccccgcgagtaaaggattcaatcccctccccaccctccacctcgccgccgccgccgccgccccctccgtctccgctcgagcttgtcagtccgcctcgtcctcctccttcggttctgcccgcccgtcgaccagattgattctctcttcttcttcgtcgtcgtcttcttggtctgccgctgccgcttggaatcccaaggccttggttgatcaatcctgtgaccctggaagaagatcgaagggcgtcgcgtggtgacatggtgatggtgagcgtgcagcagagccccatggtgcggtcggaggaggacctgggcccgccgtggctgcggccgctgctgggcacgagcttcttcgtgccatgcccggcgcacccggacctgagcaagaacgagtgcaacttcttctgcctcggctgcaaccacgccgccggcgcgctctgctcctactgcgtccccgcgcaccgcgaccaccacgtcgtccagatacggcgttcgtcgtaccacaacgtgatccgggtgtcggaggtggggaagctgatcgacatcgcgcacgtgcagacgtacgtgatcaacagcgccaagatcgtgttcctcaacggccggccgcaggccaggcccggcaagggcgtcaccaacacctgtgagatttgctgccgcagcctcccggactcgttccgcttctgctccctcggatgcaagctcggggggatgcagtgggacccgaccctgacatttgccatccggcccaagcgtagccaggactccggcggagaagggtacggctccgaggacgactcgttcagcccgaggaagcagctccggagggccgggttcgagctgggacggttcgaccggagcgtccggtggtctgacgacgagggcagcaagtccaacacccggccgatgacaccaaccacgccgccgatcagccggtgccggccgtccaggaggaagggcatcccccaccgtgccccgttctacggttagactaccggtggaaaccactctcaaaagtgacaatgctactactagtattgcaatgcaatgtgtgtcggttgggacttgggcctgagtagtgaagtgatccagttagtagatcactagctaggtattagctatagcatgcatggtatatatacttgtatatatatacatatacatacacacaataatgtaggtggagtgtgtgtaaatatgatatgttggcaaaggttgccaattcgcataagggcatgcatgggggcatggcgcggtgccctagtatttcatgcagaaaataaggtgaagaacgacgaagaaaggggtggtaagaaacacagctaatagaaacatagctagggtttttagcttgggtagggtcgagattgatatgtgaaaagtgataaatcatcatgtatatgtctcggtttgtagtggttaatttggctgtctaccccacccaatgtgtttattagcgttgcggtgtgtagttaattcaaggttcggcaacttacaggaacataataatttgtatatacagttatattggtattggcagaagaaagataaggactttgcctc

SEQ ID NO: 69227 - protein, 242 aa, Triticum aestivum
  peptide (1)..(242): Ceres Seq. ID no. 15220588
MVMVSVQQSPMVRSEEDLGPPWLRPLLGTSFFVPCPAHPDLSKNECNFFCLGCNHAAGALCSYCVPAHRDHHVVQIRRSSYHNVIRVSEVGKLIDIAHVQTYVINSAKIVFLNGRPQARPGKGVTNTCEICCRSLPDSFRFCSLGCKLGGMQWDPTLTFAIRPKRSQDSGGEGYGSEDDSFSPRKQLRRAGFELGRFDRSVRWSDDEGSKSNTRPMTPTTPPISRCRPSRRKGIPHRAPFYG

SEQ ID NO: 69228 - protein, 240 aa, Triticum aestivum
  peptide (1)..(240): Ceres Seq. ID no. 15220589
MVSVQQSPMVRSEEDLGPPWLRPLLGTSFFVPCPAHPDLSKNECNFFCLGCNHAAGALCSYCVPAHRDHHVVQIRRSSYHNVIRVSEVGKLIDIAHVQTYVINSAKIVFLNGRPQARPGKGVTNTCEICCRSLPDSFRFCSLGCKLGGMQWDPTLTFAIRPKRSQDSGGEGYGSEDDSFSPRKQLRRAGFELGRFDRSVRWSDDEGSKSNTRPMTPTTPPISRCRPSRRKGIPHRAPFYG

SEQ ID NO: 69229 - protein, 232 aa, Triticum aestivum
  peptide (1)..(232): Ceres Seq. ID no. 15220590
MVRSEEDLGPPWLRPLLGTSFFVPCPAHPDLSKNECNFFCLGCNHAAGALCSYCVPAHRDHHVVQIRRSSYHNVIRVSEVGKLIDIAHVQTYVINSAKIVFLNGRPQARPGKGVTNTCEICCRSLPDSFRFCSLGCKLGGMQWDPTLTFAIRPKRSQDSGGEGYGSEDDSFSPRKQLRRAGFELGRFDRSVRWSDDEGSKSNTRPMTPTTPPISRCRPSRRKGIPHRAPFYG

SEQ ID NO: 69230 - DNA, 963 bp, Triticum aestivum
  misc_feature (1)..(963): Ceres Seq. ID no. 14303660
accaaatatctctctgattgcattgcctccctgcctggctacatttgacttgcttccatccattcgatccactcaactcaaggaagatctactgcactcccgcccatactagccgaggttcgttgggtaggataagatcatcgatggaggatgtgtggaaggacatgtcgctgtgctccaccccgctcgcgctacagtcctaccacctccactccccggccgccgctccctaccgcggcgccgctgtctacccccaggactacctggccggcgcggttccgcaaccgccccgcacgccgccgccggctcacacggcgctcaccctggagttcacctgccccggggggaccagcgctgccaacacggccaccagctccggcgacgacccagccggctgccactttggcttctccgcgtccggaggcggcagcaggagggccgtggtccagccggcggtgggcggcgaccggcggcagcgccggatggtcaagaaccgggagtcggcggcgcggtcgcgggcgcggaagcaggcccacaccaacgagatggagctggagctggagcagctgcgccgggagaacaggatgcttatccagcgcgagcaggacttcatcaacgatcgcttggcgaaggcggcgcaggtagccgtcccggactgcagcagcagcagcagcagctggaggaggaacactagtagcagtaccctccagcagccgcagaggtgccgctccgcccctgcaccatgatcgtcgcggcggccatcgactctagcagcggcagcttcattccacttactagtacaacggattgattgtccaagctagctagatgacttgattagcattgtactacgcgttaaccaagtactatgtatgtaatctagcagtagcctacttccttgcaaaattaagcaagcatgtagctcgacgatggatggaagttaagctaagctagtactcaacc

SEQ ID NO: 69231 - protein, 200 aa, Triticum aestivum
  peptide (1)..(200): Ceres Seq. ID no. 14303661
MEDVWKDMSLCSTPLALQSYHLHSPAAAPYRGAAVYPQDYLAGAVPQPPRTPPPAHTALTLEFTCPGGTSAANTATSSGDDPAGCHFGFSASGGGSRRAVVQPAVGGDRRQRRMVKNRESAARSRARKQAHTNEMELELEQLRRENRMLIQREQDFINDRLAKAAQVAVPDCSSSSSSWRRNTSSSTLQQPQRCRSAPAP

SEQ ID NO: 69232 - protein, 193 aa, Triticum aestivum
  peptide (1)..(193): Ceres Seq. ID no. 14303662
MSLCSTPLALQSYHLHSPAAAPYRGAAVYPQDYLAGAVPQPPRTPPPAHTALTLEFTCPGGTSAANTATSSGDDPAGCHFGFSASGGGSRRAVVQPAVGGDRRQRRMVKNRESAARSRARKQAHTNEMELELEQLRRENRMLIQREQDFINDRLAKAAQVAVPDCSSSSSSWRRNTSSSTLQQPQRCRSAPAP

SEQ ID NO: 69233 - protein, 164 aa, Triticum aestivum
  peptide (1)..(164): Ceres Seq. ID no. 14303663
MCGRTCRCAPPRSRYSPTTSTPRPPLPTAAPLSTPRTTWPARFRNRPARRRRLTRRSPWSSPAPGGPALPTRPPAPATTQPAATLASPRPEAAAGGPWSSRRWAATGGSAGWSRTGSRRRGRGRGSRPTPTRWSWSWSSCAGRTGCLSSASRTSSTIAWRRRRR

SEQ ID NO: 69234 - DNA, 1885 bp, Triticum aestivum
  misc_feature (1)..(1885): Ceres Seq. ID no. 14308011
agggacagaccagaacaacccaaccgcacccgttccagagcgcgatcacacaacagagcggtaacagtttcccgggcagttcccgccccggccggcgccatggacttcgtcttcgtggagaagctcctcgcgggcctcctcgcggccgtggtgggcgccatcgtggtgtccaagatccggggccgcaagctgaggctgccgccgggccccttcccggtccccatcttcggcaactggctgcaggtcggcgacgacctgaaccaccgcaacctggcggcgatggcccgcaagttcggcgaggtcttcctcctccgcatgggccagcgcaacctggtggtggtctcctctccgccgctcgcccgcgaggtgctccacacgcagggcgtggagttcgggtcccgcacccgcaacgtggtgttcgacatcttcacgggcgagggccaagacatggtgttcaccgtgtacggtgaccactggcgcaagatgcggcgcatcatgacggtgcccttcttcaccaacaaggtggtgcagcagtaccggcccgggtgggaggccgaggcggccttcgtcatcgacaacgtccgcgccgaccccagggccgccacagagggcgtcgtgctccgccgccacctgcagctcatgatgtacaacaacatgtaccgcatcatgttcgaccggcggttcgagagcatggacgacccgctgttcctccggctccgggcgctcaacggcgagcgcagccgcctcgcgcaaagcttcgagtacaactacggcgacttcatccccatcctccgccccttcctccgcggctacctcaggctctgcaaggaggtcaaggagacccgcctcaagctcttcaaggattacttcctggacgagaggaagaagctggtgagcaccaaggccatggacaacaacggtgggctcaagtgcgccattgatcacatcctggaggctgagcagaagggggagatcaacgaggacaacgtcctctacatcatcgagaacatcaacgtcgcagcgatcgagacgacgctgtggtcgatcgagtgggggctggcagagctggtgaaccacccggagatccagcagaagcttcgcgacgaaatggacgcggtgctgggcgcggggcaccagatcacggagccggagacgcacaagctcccctacctgcaggcggtgatcaaggagacgctccggctgcgcatggccatcccgctgctggtgccccacatgaacctccacgacgccaagctcgccggctacaacatccccgccgagagcaagatcctcgtcaacgcctggttcctcgccaacaacccggagcagtggaagcggcccgacgagttccggccggagcgcttcctggaggaggagaagcacgtggaggccaacggcaacgacttcaggtacctgcccttcggcgtcggccgccggagctgccccggcatcatcctcgcgctgcccatcctcggcatcaccatcggccgcctcgtccagaacttcgtgctcacgccgccgcccggccaggacaagctcgacaccacggagaagggcggccagttcagcctccacatcctcaagcactccaccatcgtcgccaagcccagagtgttctagagcagcgacgtacgtgctctggagtttggacttccagcattttggtttggtggtgttgtactttcacgattgttcgctcgtcctaagtatacttgattatagtatccgtcacagagtagacacacgtttcgttaatgttatccgcaagaaaacagaggagctgaagaaatgtcgaacggggaggaaaagactggacgatttccgtcagatgtactcctgatgctgccataaattaaatcctcaaaatattgatgattttttcacg

SEQ ID NO: 69235 - protein, 539 aa, Triticum aestivum
  peptide (1)..(539): Ceres Seq. ID no. 14308012
RDRPEQPNRTRSRARSHNRAVTVSRAVPAPAGAMDFVFVEKLLAGLLAAVVGAIVVSKIRGRKLRLPPGPFPVPIFGNWLQVGDDLNHRNLAAMARKFGEVFLLRMGQRNLVVVSSPPLAREVLHTQGVEFGSRTRNVVFDIFTGEGQDMVFTVYGDHWRKMRRIMTVPFFTNKVVQQYRPGWEAEAAFVIDNVRADPRAATEGVVLRRHLQLMMYNNMYRIMFDRRFESMDDPLFLRLRALNGERSRLAQSFEYNYGDFIPILRPFLRGYLRLCKEVKETRLKLFKDYFLDERKKLVSTKAMDNNGGLKCAIDHILEAEQKGEINEDNVLYIIENINVAAIETTLWSIEWGLAELVNHPEIQQKLRDEMDAVLGAGHQITEPETHKLPYLQAVIKETLRLRMAIPLLVPHMNLHDAKLAGYNIPAESKILVNAWFLANNPEQWKRPDEFRPERFLEEEKHVEANGNDFRYLPFGVGRRSCPGIILALPILGITIGRLVQNFVLTPPPGQDKLDTTEKGGQFSLHILKHSTIVAKPRVF

SEQ ID NO: 69236 - protein, 506 aa, Triticum aestivum
  peptide (1)..(506): Ceres Seq. ID no. 14308013
MDFVFVEKLLAGLLAAVVGAIVVSKIRGRKLRLPPGPFPVPIFGNWLQVGDDLNHRNLAAMARKFGEVFLLRMGQRNLVVVSSPPLAREVLHTQGVEFGSRTRNVVFDIFTGEGQDMVFTVYGDHWRKMRRIMTVPFFTNKVVQQYRPGWEAEAAFVIDNVRADPRAATEGVVLRRHLQLMMYNNMYRIMFDRRFESMDDPLFLRLRALNGERSRLAQSFEYNYGDFIPILRPFLRGYLRLCKEVKETRLKLFKDYFLDERKKLVSTKAMDNNGGLKCAIDHILEAEQKGEINEDNVLYIIENINVAAIETTLWSIEWGLAELVNHPEIQQKLRDEMDAVLGAGHQITEPETHKLPYLQAVIKETLRLRMAIPLLVPHMNLHDAKLAGYNIPAESKILVNAWFLANNPEQWKRPDEFRPERFLEEEKHVEANGNDFRYLPFGVGRRSCPGIILALPILGITIGRLVQNFVLTPPPGQDKLDTTEKGGQFSLHILKHSTIVAKPRVF

SEQ ID NO: 69237 - protein, 446 aa, Triticum aestivum
  peptide (1)..(446): Ceres Seq. ID no. 14308014
MARKFGEVFLLRMGQRNLVVVSSPPLAREVLHTQGVEFGSRTRNVVFDIFTGEGQDMVFTVYGDHWRKMRRIMTVPFFTNKVVQQYRPGWEAEAAFVIDNVRADPRAATEGVVLRRHLQLMMYNNMYRIMFDRRFESMDDPLFLRLRALNGERSRLAQSFEYNYGDFIPILRPFLRGYLRLCKEVKETRLKLFKDYFLDERKKLVSTKAMDNNGGLKCAIDHILEAEQKGEINEDNVLYIIENINVAAIETTLWSIEWGLAELVNHPEIQQKLRDEMDAVLGAGHQITEPETHKLPYLQAVIKETLRLRMAIPLLVPHMNLHDAKLAGYNIPAESKILVNAWFLANNPEQWKRPDEFRPERFLEEEKHVEANGNDFRYLPFGVGRRSCPGIILALPILGITIGRLVQNFVLTPPPGQDKLDTTEKGGQFSLHILKHSTIVAKPRVF

SEQ ID NO: 69238 - DNA, 498 bp, Triticum aestivum
  misc_feature (1)..(498): Ceres Seq. ID no. 13656369
tccccccacactccccggccgccgccgccggcctcgtcagtcgcagatcccccaaccaccagcgaagccgccgctcaccgccgactggcccacatggccgcctctatcgccgccgccgcgtccgtctcccacctcctcctcgggccgaaacccaagcccacaaccccgccccgcctctccctcctcccccgcaggcgctccggagccgccggggccatctccgcctccgcgtccgcggcctccgacttcctcgccccggtcccgtccctcaagtcccgcctcgccgccggcgacaccctctacggcctcttcctcctctccttctcccccacgctcgccgagatcgccgcgctcgccggctacgactacgtggtcgtcgacatggagcacgggccgggcggcatcacggaggccctcgcctgcctccgcgccctcgacgccgcccgcacccccgccgtcctccgcctcccggtgttaaacacaataaagtgggaacgg

SEQ ID NO: 69239 - protein, 166 aa, Triticum aestivum
  peptide (1)..(166): Ceres Seq. ID no. 13656370
SPHTPRPPPPASSVADPPTTSEAAAHRRLAHMAASIAAAASVSHLLLGPKPKPTTPPRLSLLPRRRSGAAGAISASASAASDFLAPVPSLKSRLAAGDTLYGLFLLSFSPTLAEIAALAGYDYVVVDMEHGPGGITEALACLRALDAARTPAVLRLPVLNTIKWER

SEQ ID NO: 69240 - protein, 165 aa, Triticum aestivum
  peptide (1)..(165): Ceres Seq. ID no. 13656371
PPHSPAAAAGLVSRRSPNHQRSRRSPPTGPHGRLYRRRRVRLPPPPRAETQAHNPAPPLPPPPQALRSRRGHLRLRVRGLRLPRPGPVPQVPPRRRRHPLRPLPPLLLPHARRDRRARRLRLRGRRHGARAGRHHGGPRLPPRPRRRPHPRRPPPPGVKHNKVGT

SEQ ID NO: 69241 - protein, 158 aa, Triticum aestivum
  peptide (1)..(158): Ceres Seq. ID no. 13656372
PPTLPGRRRRPRQSQIPQPPAKPPLTADWPTWPPLSPPPRPSPTSSSGRNPSPQPRPASPSSPAGAPEPPGPSPPPRPRPPTSSPRSRPSSPASPPATPSTASSSSPSPPRSPRSPRSPATTTWSSTWSTGRAASRRPSPASAPSTPPAPPPSSASRC

SEQ ID NO: 69242 - protein, 135 aa, Triticum aestivum
  peptide (1)..(135): Ceres Seq. ID no. 13656373
MAASIAAAASVSHLLLGPKPKPTTPPRLSLLPRRRSGAAGAISASASAASDFLAPVPSLKSRLAAGDTLYGLFLLSFSPTLAEIAALAGYDYVVVDMEHGPGGITEALACLRALDAARTPAVLRLPVLNTIKWER

SEQ ID NO: 69243 - DNA, 1266 bp, Triticum aestivum
  misc_feature (1)..(1266): Ceres Seq. ID no. 14301898
cactccacatcccactccaaagctttgcttggctctcccgtacctgacctctccttccatcgaggcaatcccagtgctcctcctcccctctatcgtccatggactgctctagttccaaagagacgccaccgcacaaggcgtggtggaccggcgagacggtggcggtggtgacgggggccaaccgtggcattgggcacgcgctggccgcgcgcctggcggagcaggggctgtccgtggtgctcacggcgcgggacgaggcccgcggggaggccgccgccgccgagctccgcgccaggggtctcccgtccgtgcggttccgccgcctcgacgtcaccgactccgcctctgtcgccgccttcgcctcctggatccgcgacgatgtcggcggcctcgacattctggtgaacaatgccggggtatcgttcaacgagatcgacaccaactcggtggagcatgctgagacggtcctcaagaccaacttttacggagccaagatgctcatcgaggcgctcctgccccttttccgtcgatcctctgggaccagccggatcctgaacctcagctcccagcttggccttctcaataaggtgagggacccgtcgttgaggagcatgctgctggacgagggcaggctgacggagcagcaggtcgaggccatggcgtcgcggttcctggcgcaggtgaaggacgggacgtggcaggaccacgggtggccggccgtgtggacggactacgcggtctccaagctggccctcaacgcctactcccgcctcctcgccgcgcggctgcggggggccgtagctgtcaactgcttctgccccgggttcacgcggacagacatgacgcgggggtggggcaagcgcaccgccgaggaggccggccgcgtcgccgcggggctcgcgctgctgccccccgccgacctccccacaggcaagttcttcaagtggtccacgccgcagctctactccaagctctgacgacgacaccgcgcgctgcatggcggagctgtgcgtagctgcacgcttacgatttggcaagaaaaagatggccgtttgtcccaaaatgcaactccatctcctcaccaagcttgatgcctccgaactatcacgcccgtacagttctcgaagattcgtgctcgtcttttgacaggatagcctatcaccctccactttgtagaacagagcatgtagaaacaaaaaagctctcctcccttcctgctgtaacagagcatgtaccacaaataattcttaattgtgtttacaaagt

SEQ ID NO: 69244 - protein, 292 aa, Triticum aestivum
  peptide (1)..(292): Ceres Seq. ID no. 14301899
MDCSSSKETPPHKAWWTGETVAVVTGANRGIGHALAARLAEQGLSVVLTARDEARGEAAAAELRARGLPSVRFRRLDVTDSASVAAFASWIRDDVGGLDILVNNAGVSFNEIDTNSVEHAETVLKTNFYGAKMLIEALLPLFRRSSGTSRILNLSSQLGLLNKVRDPSLRSMLLDEGRLTEQQVEAMASRFLAQVKDGTWQDHGWPAVWTDYAVSKLALNAYSRLLAARLRGAVAVNCFCPGFTRTDMTRGWGKRTAEEAGRVAAGLALLPPADLPTGKFFKWSTPQLYSKL

SEQ ID NO: 69245 - protein, 160 aa, Triticum aestivum
  peptide (1)..(160): Ceres Seq. ID no. 14301900
MLIEALLPLFRRSSGTSRILNLSSQLGLLNKVRDPSLRSMLLDEGRLTEQQVEAMASRFLAQVKDGTWQDHGWPAVWTDYAVSKLALNAYSRLLAARLRGAVAVNCFCPGFTRTDMTRGWGKRTAEEAGRVAAGLALLPPADLPTGKFFKWSTPQLYSKL

SEQ ID NO: 69246 - DNA, 1297 bp, Triticum aestivum
  misc_feature (1)..(1297): Ceres Seq. ID no. 14301693
attaatttctttcctccagtcttctctgacctccctctcccccccaccctgcgcaagtgcacagtgggtcagtgccgcggcgagctccctcccccagcctcggcctccccgcccgatctggtcgccccccgcccgcggacgcgccccccgccaaaccctagggcctcgccgcgccgccgcgcgaaggggcgcctcgctgcgccgctcgcccgcgatggaccccgccccgcagctcaaggccgagccctggcgcccgccgccccgcgccggcgcggccggcgggcgcgcggcgggggaggcctcctccgccgtcacgggccagagcagcggcagccgcccgcggaggaggcagcgggagcctcccgcgtccgaggacgactcggcctccgccaggcctgtctccacctccggcggcggcggcggcggccaggatttgactgatgcagaagcaaagcgtttcaaggcaaataaatccagtgatgataatggtagtgtcagaaaagatgctgaagctgattcaagaaatgctagtaaggctgttgaccaaaatcccccgccaccaaagcaagatttcatccatgtgagggcaagaaggggtcaagcaactgacagccatagccttgcagaaagggcacggcgtgagaaaataaccgagcggatgaaaattctccaagatcttgtccctggatgtaataaggttattgggaaagcatcagtccttgatgagataatcaattatgtccaagctttggaacgccaaattgagttcctgtccatgaagctcgaggcggttaacgcccatgcccatgctcacaacggagttgaaacatttccaactaaagacttcgctgcgccggcatacaacacagctccagggttaacatttgacccgcaaacaccaagggagtacgcccagggctcgccggctgcagaatggcttcacatgcagattggtggcacctacgaaagagtgacgtgagcagaacaaaagtccagggtggcgcccaacaaagcgtgccatgaatcctcggccaagcaacccccactttcataccgtagatcatttttttttgcgccaccatctcgttccaaatgcggttttattcatagtttttggagctgtaattgccggtagagacgtcagacatgtatttagagagaaccgccgagcacggtgcctttttgttttgaccttcggattcaggactgttcctcatgtattcgcaaccttcatgtattccatggatttctgtagctggtaatcattcttaagatgaaaggaagcgacttttttttt

SEQ ID NO: 69247 - protein, 325 aa, Triticum aestivum
  peptide (1)..(325): Ceres Seq. ID no. 14301694
LISFLQSSLTSLSPPPCASAQWVSAAASSLPQPRPPRPIWSPPARGRAPRQTLGPRRAAARRGASLRRSPAMDPAPQLKAEPWRPPPRAGAAGGRAAGEASSAVTGQSSGSRPRRRQREPPASEDDSASARPVSTSGGGGGGQDLTDAEAKRFKANKSSDDNGSVRKDAEADSRNASKAVDQNPPPPKQDFIHVRARRGQATDSHSLAERARREKITERMKILQDLVPGCNKVIGKASVLDEIINYVQALERQIEFLSMKLEAVNAHAHAHNGVETFPTKDFAAPAYNTAPGLTFDPQTPREYAQGSPAAEWLHMQIGGTYERVT

SEQ ID NO: 69248 - protein, 254 aa, Triticum aestivum
  peptide (1)..(254): Ceres Seq. ID no. 14301695
MDPAPQLKAEPWRPPPRAGAAGGRAAGEASSAVTGQSSGSRPRRRQREPPASEDDSASARPVSTSGGGGGGQDLTDAEAKRFKANKSSDDNGSVRKDAEADSRNASKAVDQNPPPPKQDFIHVRARRGQATDSHSLAERARREKITERMKILQDLVPGCNKVIGKASVLDEIINYVQALERQIEFLSMKLEAVNAHAHAHNGVETFPTKDFAAPAYNTAPGLTFDPQTPREYAQGSPAAEWLHMQIGGTYERVT

SEQ ID NO: 69249 - DNA, 1762 bp, Triticum aestivum
  misc_feature (1)..(1762): Ceres Seq. ID no. 13664123
cgtattgaggtgatgcgttccctctgcaaggttttggactcaaacttcgaagataagttaaaagaactgggtcaatggaggagcttgacgagggaacgatagaatggaaaacggtcgagagcagattagagcggacgatacagacgctacttgaggtcagagatgagagatataagcagctgaaagagtgtgggactaaggtcatacaacagtggaaatcaaacgatgcaccagcatcaagaatcgttgatttttcagaagccttagcattttatgatgctgcatcggcaacagagtcatccacacagctcactggaagcaaagctctcaacatcgattcaattaagaatataaataaggaaattcttttgcaaaactcactagagctgaagaaattgaaaggaaagtttgacaggctcaagaataagttgttttctctgattcacaagaaccatcttcagttgagtctggcggattttgtttttgaaatgaaagttgagtcgaataaagattatttttctgcatgcaagaagttgaaagaggcgatctcaaatgtcaaagctcaggttgttaagaggaaggaaataattatgagaacagagatgctgaaattggctatagatcaatcaatgcccctggcaaatatcgaagggttcatccaagtgatcaaaagacaggtggatgtgttggttcaggatgaagggaaaccttacatttatgattgtgaagatataaattcaattctcgataagctccaatctattgcttctgagaagaaggctccgcaaaattcaggttccaagctgagaataaaagaacttgttccggaaaagggaatgcaggagaaagcttcaggaacctcaagagcaagttttagtctgtctgctgctaatgcgggtaaggaatctcgagagaagcccgcagcatgtctgagatcaagctcaaggctcaaggagaagcgaactcaaccggaactgcgaggaacaatgagtctgtctgtccaagtccttccacagcaggaatcatcaagctcccaaagtggagaagaagatcactcaggggaaacctcaagagcgagttccagtctgtctgctgctaatgcgttcaaggaatctggtgctgctgctcaaaagaagcccgcagctggtctgagatcaagttcgaggctcaaggagaagcaagctcaaccaaaactgcaaagaaagacgagagtgtctgtccaagtctttccacagcaggaatcatcaagctcccaaagtggagaagaagatcactcaggggaaagctcgctgcctgttgaaccgcaattgatagcttcattgccaccacatccaaggcagcccaggactcgaagagtggaaataccacctggtgaaggatgacaaaagctgacaaggtccgcaacttgatggaagtgaacatccaaaataaggggccagggctaggcgtaaggaattaaaaagcaacaaaaaacagagtgaatccaccagagtgagtgaatcggtagaagagggggcaataacatgaataacatacaagatccagaagcaagtctgttgtaggaatcttttgccaacaaacagaagattttgcgctgtaggaatcatgtagcgatcagatcagatgcagtagtcaaaattttgccaacagtagccaaaaattttctacttttttttgttgctcgcctgatttttcmcatatatggtcagatgcagtggggatttttttcgaaagtttttgccctgcagttgatttactgccc

SEQ ID NO: 69250 - protein, 435 aa, Triticum aestivum
  peptide (1)..(435): Ceres Seq. ID no. 15220727
MEELDEGTIEWKTVESRLERTIQTLLEVRDERYKQLKECGTKVIQQWKSNDAPASRIVDFSEALAFYDAASATESSTQLTGSKALNIDSIKNINKEILLQNSLELKKLKGKFDRLKNKLFSLIHKNHLQLSLADFVFEMKVESNKDYFSACKKLKEAISNVKAQVVKRKEIIMRTEMLKLAIDQSMPLANIEGFIQVIKRQVDVLVQDEGKPYIYDCEDINSILDKLQSIASEKKAPQNSGSKLRIKELVPEKGMQEKASGTSRASFSLSAANAGKESREKPAACLRSSSRLKEKRTQPELRGTMSLSVQVLPQQESSSSQSGEEDHSGETSRASSSLSAANAFKESGAAAQKKPAAGLRSSSRLKEKQAQPKLQRKTRVSVQVFPQQESSSSQSGEEDHSGESSLPVEPQLIASLPPHPRQPRTRRVEIPPGEG

SEQ ID NO: 69251 - protein, 297 aa, Triticum aestivum
  peptide (1)..(297): Ceres Seq. ID no. 15220728
MKVESNKDYFSACKKLKEAISNVKAQVVKRKEIIMRTEMLKLAIDQSMPLANIEGFIQVIKRQVDVLVQDEGKPYIYDCEDINSILDKLQSIASEKKAPQNSGSKLRIKELVPEKGMQEKASGTSRASFSLSAANAGKESREKPAACLRSSSRLKEKRTQPELRGTMSLSVQVLPQQESSSSQSGEEDHSGETSRASSSLSAANAFKESGAAAQKKPAAGLRSSSRLKEKQAQPKLQRKTRVSVQVFPQQESSSSQSGEEDHSGESSLPVEPQLIASLPPHPRQPRTRRVEIPPGEG

SEQ ID NO: 69252 - protein, 263 aa, Triticum aestivum
  peptide (1)..(263): Ceres Seq. ID no. 15220729
MRTEMLKLAIDQSMPLANIEGFIQVIKRQVDVLVQDEGKPYIYDCEDINSILDKLQSIASEKKAPQNSGSKLRIKELVPEKGMQEKASGTSRASFSLSAANAGKESREKPAACLRSSSRLKEKRTQPELRGTMSLSVQVLPQQESSSSQSGEEDHSGETSRASSSLSAANAFKESGAAAQKKPAAGLRSSSRLKEKQAQPKLQRKTRVSVQVFPQQESSSSQSGEEDHSGESSLPVEPQLIASLPPHPRQPRTRRVEIPPGEG

SEQ ID NO: 69253 - DNA, 1623 bp, Triticum aestivum
  misc_feature (1)..(1623): Ceres Seq. ID no. 13653980
acacattacatgttccattccagtgcacgtaccgcccactgcagtttctgcaaacgtttaaaaaacaaggtagtactagtaggagtatgaccagggggggacgaatctgtacgggatcgcggcgagattcacccggcgccaccctcccctccctgtaacgtcgttatacaagtgtacttatctcgggggaccctataagggaggcggctcgggcagctccaagcgccagcgaaccaaccacgaggacacggcgagatgcagcgcgccgcggcctccctcgcctcctcccgctccgcggctgcctgggcgtgctcctccacctcgcgccatgccatcgcctcctgctcggccaccgcccgccgcgacgccgtcgtgcctctccggattcgcgggcagcagcaggttcccctccactccatgtccctgtcgctgctctcgcggagacggcctgcgcggacggcaaaagcggcggctgctgcggcggaactggcaccggcgtcggacgaggtggccgcgggcggcggcattgccggcacggtgcagctcggcgccatgatcgtcgcctggtacctcctcaacatctacttcaacatctacaacaagcaggttctccaggtgctgccattgccgctcccctacaccatcaccgccttccagctcgccttcggctcgctcgtcatcttcttcatgtgggccacaaagctccaccccgtgcccaagctctccgccgcacagctggccaagatcgcgccgctggccgccgggcacatgctgggcacggtgttcaccaacatgagcctgggcaaggtagccgtctccttcacgcacaccgtcaaggcgtccgagcccttcttcaccgtgctgctctccgccttcttcctcggtgaggtgccgtcgccgctggtgctgggctcgctggtgccgatcgtcggcggcgtcgccctggcatcgctgaccgaggtctccttcaactgggtcggattctggagcgccatggcgtcgaatctgctcaaccagaccaggaatgtgctcagcaagcgcctcctcggcggcgaagaggaggagttcatggacgacataaacctcttctcggtgatcaccgtgctgtccttcctcctatccttgcctctgatgatctttgcagaaggggtcagcttctccccagcgttcctccagagcaccggcctgaacctgcaggagctgtgcgtgagggcggccctggccggcctctgcttccatggctaccagaagctgtcgtacatgatcctggcgagggtgtcgcccgtgacccactccgtggccaactgcgtcaagcgtgtggtggtcatcgtctcctccgtcctcttcttccggacgcccatctcgcctgtcaacgcactggggactggtgcggcacttgcgggagtttacctgtactccaggctcaagaaaacaaagccaaagagctcatgaagacattctgatacaggtttttgtggtacaagattaaatcgatatagttattcagagagaaaatgtattgagataggttgtacagaacttgccacggccagtagtacacttgtactacaggccacagcagcttctttcagtagtaacaggaccaaactgctggtcttgaag

SEQ ID NO: 69254 - protein, 398 aa, Triticum aestivum
  peptide (1)..(398): Ceres Seq. ID no. 13653981
MQRAAASLASSRSAAAWACSSTSRHAIASCSATARRDAVVPLRIRGQQQVPLHSMSLSLLSRRRPARTAKAAAAAAELAPASDEVAAGGGIAGTVQLGAMIVAWYLLNIYFNIYNKQVLQVLPLPLPYTITAFQLAFGSLVIFFMWATKLHPVPKLSAAQLAKIAPLAAGHMLGTVFTNMSLGKVAVSFTHTVKASEPFFTVLLSAFFLGEVPSPLVLGSLVPIVGGVALASLTEVSFNWVGFWSAMASNLLNQTRNVLSKRLLGGEEEEFMDDINLFSVITVLSFLLSLPLMIFAEGVSFSPAFLQSTGLNLQELCVRAALAGLCFHGYQKLSYMILARVSPVTHSVANCVKRVVVIVSSVLFFRTPISPVNALGTGAALAGVYLYSRLKKTKPKSS

SEQ ID NO: 69255 - protein, 344 aa, Triticum aestivum
  peptide (1)..(344): Ceres Seq. ID no. 13653982
MSLSLLSRRRPARTAKAAAAAAELAPASDEVAAGGGIAGTVQLGAMIVAWYLLNIYFNIYNKQVLQVLPLPLPYTITAFQLAFGSLVIFFMWATKLHPVPKLSAAQLAKIAPLAAGHMLGTVFTNMSLGKVAVSFTHTVKASEPFFTVLLSAFFLGEVPSPLVLGSLVPIVGGVALASLTEVSFNWVGFWSAMASNLLNQTRNVLSKRLLGGEEEEFMDDINLFSVITVLSFLLSLPLMIFAEGVSFSPAFLQSTGLNLQELCVRAALAGLCFHGYQKLSYMILARVSPVTHSVANCVKRVVVIVSSVLFFRTPISPVNALGTGAALAGVYLYSRLKKTKPKSS

SEQ ID NO: 69256 - protein, 299 aa, Triticum aestivum
  peptide (1)..(299): Ceres Seq. ID no. 13653983
MIVAWYLLNIYFNIYNKQVLQVLPLPLPYTITAFQLAFGSLVIFFMWATKLHPVPKLSAAQLAKIAPLAAGHMLGTVFTNMSLGKVAVSFTHTVKASEPFFTVLLSAFFLGEVPSPLVLGSLVPIVGGVALASLTEVSFNWVGFWSAMASNLLNQTRNVLSKRLLGGEEEEFMDDINLFSVITVLSFLLSLPLMIFAEGVSFSPAFLQSTGLNLQELCVRAALAGLCFHGYQKLSYMILARVSPVTHSVANCVKRVVVIVSSVLFFRTPISPVNALGTGAALAGVYLYSRLKKTKPKSS

SEQ ID NO: 69257 - DNA, 1864 bp, Triticum aestivum
  misc_feature (1)..(1864): Ceres Seq. ID no. 13502947
accaccaccaccaattcgcaacctctcctcccccgttctcctcattgtcctcgcgccccgctccgctccgacggccaaccgctccacacaccactagcctgcctgcctgcctgccgccaaggcaagatggtgaagatctgctgccttggggctggctatgtgggtggcccaacaatggcggtcattgccctcaagtgtcctgacattcaggtggttgtggtagatatcaccaagtcccggattgatgcctggaacagtgacacactgccaatctatgagcctggccttgatgaagtcgtgaagcagtgccgtggaaagaacctcttcttcagcaatgacattgagaagcatgttagtgaagctgacatcatctttgtgtcggtaaacaccccaaccaagacccgtggtcttggagctggtaaggctgctgatctcacttactgggaaagtgcagctcgcatgattgctgatgtggccaaatcagacaagatcgtggtggagaagtccactgttccagtcaagactgctgaggcaattgagaagatcttgacccacaacagcaatggcatcaacttccagatcctctccaacccggagttccttgctgagggtactgctatccaagacctatttaaccctgaccgtgttcttattggaggacgtgagacccctgaaggtcagaaggctgttcagacgctgaaggctgtgtatgcgcattgggttcctgaggatcagattctgacaaccaacttatggtctgcggagctgtcgaagcttgcagccaatgcgttcttggcccagaggatctcctctgtgaatgccatgtcagccctctgcgaggccactggtgcaaatgtttctgaggtgtcctatgccgtgggcaaggactctaggattggcccaaagtttttgaatgccagtgttggatttggaggctcttgcttccagaaggatatcctcaacctggtttacatctgtgagtgcaatggcctcccagaggtcgccaactactggaagcaggtgatcaagatcaatgactaccagaagagccggttcgtgaaccgtgttgtttcctctatgttcaacacggttgcgaacaagaagattgcggtgcttggttttgcattcaagaaggatactggtgacactagggagactccagctattgatgtctgcaagggtctgcttggtgacaaggctaagatcagcatttatgatcctcaggtgactgaagaccaaatccagcgtgaccttgcgatgaacaaatttgactgggaccaccctgttcatctccagccaatgagccccaccactacaaagcaagtctcggttacctgggatgcatatgaggcgaccaaggatgcccatggcatctgcatcatgactgagtgggatgagttcaagactctggactacaaaaagatctacaacagcatgcagaagcccgcctttgtttttgatggccgcaacgttgttgactctgagaagctgagggagattggcttcattgtctactccattggcaagccactcgacggttggctcaaggacatgcctgctgtggcttaaataaactctgataaagggaggagatccgcctcgggtgaatccatgagcagctatcgatagggattcagcttgttatttctctttatagtcgctgtttatcttgtgccagaaaatcagatgtcatttatttttcttccttgagtgtttcttcggggtttacagtgttagaatggtatagtcactgggatgtgccattcctttggtccattgtcacagctttgtagctaatgtctgttgttgcatctttatcatgttactggtgttcatcctgctggttatacatgtggcttcagat

SEQ ID NO: 69258 - protein, 522 aa, Triticum aestivum
  peptide (1)..(522): Ceres Seq. ID no. 15223206
TTTTNSQPLLPRSPHCPRAPLRSDGQPLHTPLACLPACRQGKMVKICCLGAGYVGGPTMAVIALKCPDIQVVVVDITKSRIDAWNSDTLPIYEPGLDEVVKQCRGKNLFFSNDIEKHVSEADIIFVSVNTPTKTRGLGAGKAADLTYWESAARMIADVAKSDKIVVEKSTVPVKTAEAIEKILTHNSNGINFQILSNPEFLAEGTAIQDLFNPDRVLIGGRETPEGQKAVQTLKAVYAHWVPEDQILTTNLWSAELSKLAANAFLAQRISSVNAMSALCEATGANVSEVSYAVGKDSRIGPKFLNASVGFGGSCFQKDILNLVYICECNGLPEVANYWKQVIKINDYQKSRFVNRVVSSMFNTVANKKIAVLGFAFKKDTGDTRETPAIDVCKGLLGDKAKISIYDPQVTEDQIQRDLAMNKFDWDHPVHLQPMSPTTTKQVSVTWDAYEATKDAHGICIMTEWDEFKTLDYKKIYNSMQKPAFVFDGRNVVDSEKLREIGFIVYSIGKPLDGWLKDMPAVA

SEQ ID NO: 69259 - protein, 480 aa, Triticum aestivum
  peptide (1)..(480): Ceres Seq. ID no. 15223207
MVKICCLGAGYVGGPTMAVIALKCPDIQVVVVDITKSRIDAWNSDTLPIYEPGLDEVVKQCRGKNLFFSNDIEKHVSEADIIFVSVNTPTKTRGLGAGKAADLTYWESAARMIADVAKSDKIVVEKSTVPVKTAEAIEKILTHNSNGINFQILSNPEFLAEGTAIQDLFNPDRVLIGGRETPEGQKAVQTLKAVYAHWVPEDQILTTNLWSAELSKLAANAFLAQRISSVNAMSALCEATGANVSEVSYAVGKDSRIGPKFLNASVGFGGSCFQKDILNLVYICECNGLPEVANYWKQVIKINDYQKSRFVNRVVSSMFNTVANKKIAVLGFAFKKDTGDTRETPAIDVCKGLLGDKAKISIYDPQVTEDQIQRDLAMNKFDWDHPVHLQPMSPTTTKQVSVTWDAYEATKDAHGICIMTEWDEFKTLDYKKIYNSMQKPAFVFDGRNVVDSEKLREIGFIVYSIGKPLDGWLKDMPAVA

SEQ ID NO: 69260 - protein, 464 aa, Triticum aestivum
  peptide (1)..(464): Ceres Seq. ID no. 15223208
MAVIALKCPDIQVVVVDITKSRIDAWNSDTLPIYEPGLDEVVKQCRGKNLFFSNDIEKHVSEADIIFVSVNTPTKTRGLGAGKAADLTYWESAARMIADVAKSDKIVVEKSTVPVKTAEAIEKILTHNSNGINFQILSNPEFLAEGTAIQDLFNPDRVLIGGRETPEGQKAVQTLKAVYAHWVPEDQILTTNLWSAELSKLAANAFLAQRISSVNAMSALCEATGANVSEVSYAVGKDSRIGPKFLNASVGFGGSCFQKDILNLVYICECNGLPEVANYWKQVIKINDYQKSRFVNRVVSSMFNTVANKKIAVLGFAFKKDTGDTRETPAIDVCKGLLGDKAKISIYDPQVTEDQIQRDLAMNKFDWDHPVHLQPMSPTTTKQVSVTWDAYEATKDAHGICIMTEWDEFKTLDYKKIYNSMQKPAFVFDGRNVVDSEKLREIGFIVYSIGKPLDGWLKDMPAVA

SEQ ID NO: 69261 - DNA, 933 bp, Triticum aestivum
  misc_feature (1)..(933): Ceres Seq. ID no. 13654038
ggccctctctggtcagatcaaatcgagcctgcccttctcgctcgcgtccccactccatttccctttcccccgaggaggctgccgccgtgacctgagagcacacgcacgcaccatgtggcgccgcctccaaaccctagcccccgccctccaccgcgctgccgccgcagccggcgcggccccctccccggccagcgcccgggccgctcccctctccacggcggtcgcggccttccgccgcactgggcccctcctctctgcggacaagccggcggcggcagggacgagtgtggaggacgtcatgcccatagccacggggttggagcgcgaggagctcgaggcggagctccaggggaagaagcgcttcgacatggatcctcctgtcggtcccttcggtaccaaggaggcaccagccgtcattgagtcctattttgacaagagaatagtaggttgccctggtgatgaaggagaggatgagcatgacgtcatatggttctggttgaaaaaagatgagccacatgaatgcccagtctgctcacaatactttgtgcttaaggtcattggtgatggtggaaatccagatgggcatgatgatgatgatgatggtcatcaccactaaggatgcctcgtggttctgaaaataagaattttatgaggcatatgatttcgcttacgcgttctaagcaccagactgctccacggcatccttgtttatgaatatacatttggccatcaagcaggcggtagttgtcgccttaggtttttttgtggaaacaaaactcttttcagatttgtccagtgcatgtgttatggagcatcatcaaataagagatgactgcagagaatttttacttttgctactgagtggccatcgggtgtgatggacctgaccaattcaatcatgcaagaatttatgctgtgcggtttgcagggggg

SEQ ID NO: 69262 - protein, 204 aa, Triticum aestivum
  peptide (1)..(204): Ceres Seq. ID no. 15219608
ALSGQIKSSLPFSLASPLHFPFPRGGCRRDLRAHARTMWRRLQTLAPALHRAAAAAGAAPSPASARAAPLSTAVAAFRRTGPLLSADKPAAAGTSVEDVMPIATGLEREELEAELQGKKRFDMDPPVGPFGTKEAPAVIESYFDKRIVGCPGDEGEDEHDVIWFWLKKDEPHECPVCSQYFVLKVIGDGGNPDGHDDDDDGHHH

SEQ ID NO: 69263 - protein, 167 aa, Triticum aestivum
  peptide (1)..(167): Ceres Seq. ID no. 15219609
MWRRLQTLAPALHRAAAAAGAAPSPASARAAPLSTAVAAFRRTGPLLSADKPAAAGTSVEDVMPIATGLEREELEAELQGKKRFDMDPPVGPFGTKEAPAVIESYFDKRIVGCPGDEGEDEHDVIWFWLKKDEPHECPVCSQYFVLKVIGDGGNPDGHDDDDDGHHH

SEQ ID NO: 69264 - protein, 105 aa, Triticum aestivum
  peptide (1)..(105): Ceres Seq. ID no. 15219610
MPIATGLEREELEAELQGKKRFDMDPPVGPFGTKEAPAVIESYFDKRIVGCPGDEGEDEHDVIWFWLKKDEPHECPVCSQYFVLKVIGDGGNPDGHDDDDDGHHH

SEQ ID NO: 69265 - DNA, 1705 bp, Triticum aestivum
  misc_feature (1)..(1705): Ceres Seq. ID no. 13595885
ctaatcgaaaaacccgcttttccctttttctctcatctagaacccccaagaccgggctcactcgccccctcggacctgctagggatggcacgcgccgctgccgccaacctgcgtggcctggtcggcattgcagcggcgggccggaggcgggtgaccgcctccgtcgcgccaccccgcgcgtcgcccggcgggcgcgcattccgggccgtggcctcaggctccgggggcaggacgactcctgaatcctcctcttcgtcctcgccggccctaccacagctgcagccgcggcgcggcttggcgacgagacgagcggtgctgcgtaacttgattagcggcggcttagagagtgaggatggtaagctgagctgcggatattcaagttttaaagggaggagacctactatggaggatcgctacgatgtaaagttcgctaaaatgaagggacagtcagttagcttgtttggtgtatttgatggtcatgcaggagcacttgccgctgaatatctaaaggaacatctgcttgacaaccttatcgagcatcctcagttcctgagaaacccaaagcttgctctgaagacgaccttcctgaaaactgatgctgatttcttagagtcggtaaccactccttatagggaggatggttcgactgctttggctgctgttctggttggtgaccaaatttatgtagcaaatgttggtgattcacgtgctatcgctttaaaaggtggcaaagctatcccactctcagatgaccataaacctaacttaaaggatgagagaacgagaattgagaatgctggaggtggtgttagttatgatggttttacttggagggttgatggaattctggcaatgtcccgtgcatttggcaaccgttcattgaagaattatgtgatagcagagcctgacattcaggaaacgcaggtcagcagtgacttggaatacctggttctcgctacagatggtctttgggatgtcgtgcaaaatgaggatgttatttcacttatgagagcaacggacgagcctgaggtggcggcagtgaagctgacggaaatggcccactctcggcacagctcagacaacattacatgcattgtggtgggatttcaccactgaacagcgtatgatacgtgaccgatattggtggcagtgaagttttttcacttcctctctgatctatggctggtataagacttccaacggctgtgaaagaaactggccaattgttggatctttttgtagggaattttttgcatctgattatcacttagtgaaattgcatcagatccgttaggagttgggtccacaaaatcaacaaaatggagaaggcctagggcatactactactaccactacaccacaacatcatcatatctttataattgaaggagtgtggagtattttctttagtgttttgtgttcagtttagtttattcacaaaaccgaggtctacatggcatactcatgtcatgagatcctaaattggatctagaacttgcaaactacatatttctttgttgcttttatgcaccacgctgaaatatgtatatctgaagtacaaagattatccggaatcttttactctagtattttttttgcgaataaatcttttactctagtatgctggacaaaattcaaaaattaacactagacatgtgttattcagattcgcaccttctgattgtactctatttatttcaaagtg

SEQ ID NO: 69266 - protein, 371 aa, Triticum aestivum
  peptide (1)..(371): Ceres Seq. ID no. 13595886
LIEKPAFPFFSHLEPPRPGSLAPSDLLGMARAAAANLRGLVGIAAAGRRRVTASVAPPRASPGGRAFRAVASGSGGRTTPESSSSSSPALPQLQPRRGLATRRAVLRNLISGGLESEDGKLSCGYSSFKGRRPTMEDRYDVKFAKMKGQSVSLFGVFDGHAGALAAEYLKEHLLDNLIEHPQFLRNPKLALKTTFLKTDADFLESVTTPYREDGSTALAAVLVGDQIYVANVGDSRAIALKGGKAIPLSDDHKPNLKDERTRIENAGGGVSYDGFTWRVDGILAMSRAFGNRSLKNYVIAEPDIQETQVSSDLEYLVLATDGLWDVVQNEDVISLMRATDEPEVAAVKLTEMAHSRHSSDNITCIVVGFHH

SEQ ID NO: 69267 - protein, 343 aa, Triticum aestivum
  peptide (1)..(343): Ceres Seq. ID no. 13595887
MARAAAANLRGLVGIAAAGRRRVTASVAPPRASPGGRAFRAVASGSGGRTTPESSSSSSPALPQLQPRRGLATRRAVLRNLISGGLESEDGKLSCGYSSFKGRRPTMEDRYDVKFAKMKGQSVSLFGVFDGHAGALAAEYLKEHLLDNLIEHPQFLRNPKLALKTTFLKTDADFLESVTTPYREDGSTALAAVLVGDQIYVANVGDSRAIALKGGKAIPLSDDHKPNLKDERTRIENAGGGVSYDGFTWRVDGILAMSRAFGNRSLKNYVIAEPDIQETQVSSDLEYLVLATDGLWDVVQNEDVISLMRATDEPEVAAVKLTEMAHSRHSSDNITCIVVGFHH

SEQ ID NO: 69268 - protein, 237 aa, Triticum aestivum
  peptide (1)..(237): Ceres Seq. ID no. 13595888
MEDRYDVKFAKMKGQSVSLFGVFDGHAGALAAEYLKEHLLDNLIEHPQFLRNPKLALKTTFLKTDADFLESVTTPYREDGSTALAAVLVGDQIYVANVGDSRAIALKGGKAIPLSDDHKPNLKDERTRIENAGGGVSYDGFTWRVDGILAMSRAFGNRSLKNYVIAEPDIQETQVSSDLEYLVLATDGLWDVVQNEDVISLMRATDEPEVAAVKLTEMAHSRHSSDNITCIVVGFHH

SEQ ID NO: 69269 - DNA, 1258 bp, Triticum aestivum
  misc_feature (1)..(1258): Ceres Seq. ID no. 13596304
aaaaacaaccaagaaatctcacgacgcgtcctcctcccactcctctcctcccccctctcgccatggccggccgcctcctcgccgcccctctcctcctctttgtgctcctccagctccccgtgccgtcccaggtgcgcgcgtacccgctcgcggcggcacactctggtcggtgcccaaggccggaggagaggccgccgccgttcctccaggggctccggcgaacctgccgcacctcgacggaggggcacccggccgaggaggttaatggggaggaacttatcagagagttgggtggaaaggagtacactgctgtcctcttctatgcatcatggtgccctttctctcatagaatgagaccaatcttcgacgatcttagctcaatgtatccacatattaagcacttggctgtagaacagtccaacgtgatgccaacagttttatcaagatatggtgtccgcagccttccttctatactaatagctcatgagtcatatgcattttggcctcttgttgccaaagatctcaactcactggtcaacttctactctgctgttactggacaagaaccagttgcatatcttggtccacggaagtggatcacaaccgaaagaagcacacagtatgtgaagctttggaatggttcagtcagcgaatcagtgaagggcgagccctacctagcattcagcatcttctttatttgcctaagggtgttctcgttcttcttcccaaagttcttcgcctgcatcaaaggcttgtgggcccaatacttccggcacgccaactttggagtccttgccaaattgacgcagctgctcgaatgtgtgccccatgccgtggatgtaaggaagatgtggagcaaatggaggctcatggttggagccataaacatgagagtctgggcatcatctctagcttcggtgtctcttggtgggcaatcttctccccgagctgctagattggattgatggtttggattttaatgtcgggcgggagagcatgcgggctgtttgaattgcgctggatgtggaagctcctataactcacatgaacatgtagtgaaacatcttgtttgtagcatgtaaatcttagggatactgttgagcctgtgtagaccacactgtaacattaatcatgagtaccaattgtcatagtttttgagcaactgggcacacatcataagcccttttactatttttcacatgtaatctgcaattgcagtatgttcatctgtcttgtactaataagtgaaagacattcc

SEQ ID NO: 69270 - protein, 320 aa, Triticum aestivum
  peptide (1)..(320): Ceres Seq. ID no. 13596305
KQPRNLTTRPPPTPLLPPLAMAGRLLAAPLLLFVLLQLPVPSQVRAYPLAAAHSGRCPRPEERPPPFLQGLRRTCRTSTEGHPAEEVNGEELIRELGGKEYTAVLFYASWCPFSHRMRPIFDDLSSMYPHIKHLAVEQSNVMPTVLSRYGVRSLPSILIAHESYAFWPLVAKDLNSLVNFYSAVTGQEPVAYLGPRKWITTERSTQYVKLWNGSVSESVKGEPYLAFSIFFICLRVFSFFFPKFFACIKGLWAQYFRHANFGVLAKLTQLLECVPHAVDVRKMWSKWRLMVGAINMRVWASSLASVSLGGQSSPRAARLD

SEQ ID NO: 69271 - protein, 300 aa, Triticum aestivum
  peptide (1)..(300): Ceres Seq. ID no. 13596306
MAGRLLAAPLLLFVLLQLPVPSQVRAYPLAAAHSGRCPRPEERPPPFLQGLRRTCRTSTEGHPAEEVNGEELIRELGGKEYTAVLFYASWCPFSHRMRPIFDDLSSMYPHIKHLAVEQSNVMPTVLSRYGVRSLPSILIAHESYAFWPLVAKDLNSLVNFYSAVTGQEPVAYLGPRKWITTERSTQYVKLWNGSVSESVKGEPYLAFSIFFICLRVFSFFFPKFFACIKGLWAQYFRHANFGVLAKLTQLLECVPHAVDVRKMWSKWRLMVGAINMRVWASSLASVSLGGQSSPRAARLD

SEQ ID NO: 69272 - protein, 204 aa, Triticum aestivum
  peptide (1)..(204): Ceres Seq. ID no. 13596307
MRPIFDDLSSMYPHIKHLAVEQSNVMPTVLSRYGVRSLPSILIAHESYAFWPLVAKDLNSLVNFYSAVTGQEPVAYLGPRKWITTERSTQYVKLWNGSVSESVKGEPYLAFSIFFICLRVFSFFFPKFFACIKGLWAQYFRHANFGVLAKLTQLLECVPHAVDVRKMWSKWRLMVGAINMRVWASSLASVSLGGQSSPRAARLD

SEQ ID NO: 69273 - DNA, 1541 bp, Triticum aestivum
  misc_feature (1)..(1541): Ceres Seq. ID no. 13595916
cttagactcgcctcgcctcccttctttgctcagtcttctcggatctccggctcaaattcgtctcccgaatccccagttccaggttctcggaggagggggggaaaccatgggcagcttcgccaagctggccaagaggtgcgtggagacggaggcgccggtcatggtgaagatacaagagctgcttcgaggggccacggatgtgatgtcgcttgcgcagggaattgtttattggcaacctcctgagacagccctgaacaaggtcaaggaaattgtatgggaaccagcaaccagtaaatatggtgctgatgatggccttcccgagcttcgagaagcacttctcgagaagcttcgcagagagaataagctaaccaagtcatctgttatggtgaccgctggtgcaaatcaggcttttgtaaacctggttctgaccctttgcgatgctggtgattcagttgtcatgttcgcaccatactatttcaattccttcatgtcattccagatgactggcgtcactgatatattagttggtgctagcaatcccaagactcttcatcctgatgttgattggttggagaaggtgctgaaagaaaataaccctatccctaaacttgttactgttgtcaatccgggaaacccatctggagcttttattcccaagcctatgctacagagaatttcagacctgtgcaggaatgctggtgcatggctggtggttgacaacacctatgagtacttcatgtatgataaaatggagcactactgcctagaggatgatcatattgtcaaccttttctcgttctcaaaggcttatggcatgatggggtggcgagtaggatacattgcatatccaagtgaagccgatggtttccacgcgcagctccttaaggtgcaagataacatacctatctgtgcttccatcatcgggcagcgcctggctctatactcattggaggccggcccagagtggatcagggaaagggtgaatgatctcgtgaaaaaccgcgagctgcttgtggaagcaatgtctccccttggtgaggatgctgtcaagggtggggagggtgccatctatctctgggctaaactaccagataactgttcagacgactttgaggttgtcaggtggctcgcgaccaagcacggcgtcgcagtgatccccgggagcgccagcggaggccccggatacatccgtgtttcttttggaggactgaaagaagaagacacaaggctcgccggcgagaggctaaggcggggattgcaagagctggtgaccgatgggatggtacagtaacaacagcccaccgtatgtaagacagtaagagtacatttctacattcagatcacacaagtccgattttttcgacgatatgattctgctgggattagttcattcagaggagcaaaagcaccatatatccaagtcttttgtatcttacagaatcaccatgctggaggtgcccaataggaatggcaattggtgtagtgagaattggggcaaaataaaaagccatccagtggtgtcgtaaacacaataaagtggg

SEQ ID NO: 69274 - protein, 429 aa, Triticum aestivum
  peptide (1)..(429): Ceres Seq. ID no. 15221689
LDSPRLPSLLSLLGSPAQIRLPNPQFQVLGGGGETMGSFAKLAKRCVETEAPVMVKIQELLRGATDVMSLAQGIVYWQPPETALNKVKEIVWEPATSKYGADDGLPELREALLEKLRRENKLTKSSVMVTAGANQAFVNLVLTLCDAGDSVVMFAPYYFNSFMSFQMTGVTDILVGASNPKTLHPDVDWLEKVLKENNPIPKLVTVVNPGNPSGAFIPKPMLQRISDLCRNAGAWLVVDNTYEYFMYDKMEHYCLEDDHIVNLFSFSKAYGMMGWRVGYIAYPSEADGFHAQLLKVQDNIPICASIIGQRLALYSLEAGPEWIRERVNDLVKNRELLVEAMSPLGEDAVKGGEGAIYLWAKLPDNCSDDFEVVRWLATKHGVAVIPGSASGGPGYIRVSFGGLKEEDTRLAGERLRRGLQELVTDGMVQ

SEQ ID NO: 69275 - protein, 394 aa, Triticum aestivum
  peptide (1)..(394): Ceres Seq. ID no. 15221690
MGSFAKLAKRCVETEAPVMVKIQELLRGATDVMSLAQGIVYWQPPETALNKVKEIVWEPATSKYGADDGLPELREALLEKLRRENKLTKSSVMVTAGANQAFVNLVLTLCDAGDSVVMFAPYYFNSFMSFQMTGVTDILVGASNPKTLHPDVDWLEKVLKENNPIPKLVTVVNPGNPSGAFIPKPMLQRISDLCRNAGAWLVVDNTYEYFMYDKMEHYCLEDDHIVNLFSFSKAYGMMGWRVGYIAYPSEADGFHAQLLKVQDNIPICASIIGQRLALYSLEAGPEWIRERVNDLVKNRELLVEAMSPLGEDAVKGGEGAIYLWAKLPDNCSDDFEVVRWLATKHGVAVIPGSASGGPGYIRVSFGGLKEEDTRLAGERLRRGLQELVTDGMVQ

SEQ ID NO: 69276 - protein, 376 aa, Triticum aestivum
  peptide (1)..(376): Ceres Seq. ID no. 15221691
MVKIQELLRGATDVMSLAQGIVYWQPPETALNKVKEIVWEPATSKYGADDGLPELREALLEKLRRENKLTKSSVMVTAGANQAFVNLVLTLCDAGDSVVMFAPYYFNSFMSFQMTGVTDILVGASNPKTLHPDVDWLEKVLKENNPIPKLVTVVNPGNPSGAFIPKPMLQRISDLCRNAGAWLVVDNTYEYFMYDKMEHYCLEDDHIVNLFSFSKAYGMMGWRVGYIAYPSEADGFHAQLLKVQDNIPICASIIGQRLALYSLEAGPEWIRERVNDLVKNRELLVEAMSPLGEDAVKGGEGAIYLWAKLPDNCSDDFEVVRWLATKHGVAVIPGSASGGPGYIRVSFGGLKEEDTRLAGERLRRGLQELVTDGMVQ

SEQ ID NO: 69277 - DNA, 1960 bp, Triticum aestivum
  misc_feature (1)..(1960): Ceres Seq. ID no. 14301920
ataccaagtgaggaagaaaaacgacaccaaattatacgagcatctccatctcctctcccctcgcgcaaagggaggagggagaggccatccactccacggcgccgatcgatcggagcagcggagaggacggcgcgcgcgtcggcgatgcggaagggcccgtcgcggtcggggtcggcgcggcaccagcagttccgcgcccgtgccaagacccgcgtcgacgacctccaggacatgttctccggcctccagtacgcccgcaaggaggcccgctccaccgacgccgtcctcctcgaggcccagctccaccagatgctccgcgagtggcgcgccgagctcagcgtcccgtcccccgcctcctccctccaggcagggaacaacaaccgggacccgtcggatccgccgtccgagacaccgcggccgccgcagctggcgccggccgaggaggaggacgacgccaccagcaagctcgtcgagcagaagccccggccgtccgctaatcagactcacaagcacccgcggggagaccaggacatgaagccggagccgcgcgaggaagcgatcgcgcatccagtgacggtggcgcagcagccgccgtcgctgggtccgggagtcatcaccactccagctagtgccgggttccacgatcagatgtactatgtgaaccaggagcttagtgttgaggattttctttacgacgatgattacaagataaaccttcctgggtccaatccagaaatcctcaataaccttgaagggattggtcatcaagaatatctgcagttcaatttgccacaagagttgccccctaatgcatatcttgatatgaacaactatgggcagaatgctgnagatggtttcctccacatgtcagacttgctcacaacaatgtctccagcacctgcttcatttctgaggccaaagtgcgctctctgggactgccctcgtcctgctcaaggatctgaaagctggcaagattactgcagcatgtaccatgctgaattggccgtgaaggaagagggccctccaggcacaatgcctgtgatccgcccgagaggtattgatctaaaagatggccctttgtttgctgctcttagtgcgaaaatccaaggaaagcatgtcggtgttcctgtctgtgaaggggctgcaactacgaagtccccttggaatgcacctgaacttttcgacctttacatctttgaaggtgaatctatgagagaatggcttttctttgacaaaccaagaagggcattcgacagtggaaaccggaagcaaaggtcactgccagattacaacggccgtggctggcatgaatcaaggaagcaggtgatgaaagactttgggggtctaaagaggtcatactacatggatccacagccatccagcagctacgaatggcacctctatgagtacgagatcaatgaccgcgacgcttttgccttataccggctcgaattcaagtcttcggaagcaaagaagagtgctaagtcaaaattcacttgcagtccactgattgaaatccagcagcaaatggtcaggctgagcgcagacggtcacgtggagaacaagcggactgcccgtgtgcggacacaggatgtcagcacaaacatctacccggttcagaacaacacggctcaggccagtgctccggacgcttaccaggcagcgtcgcaggtggaccagatgacgtttttgaacggcagtgttgtttatgggcctcatctcccatatggctactcgaccgaaggaggtgacttctattggaactcaaatgacggggcttgataaaaccatcttcgacttgtggcatattttcggcttcaagttctaaccgtatcagctgtaattaaggggtctactttattggcaatggcctccataatttctattgggaatggcctccgtgattctaactgtaatggttgggccaaatttaaatttacaggaaacgtctctttgaggc

SEQ ID NO: 69278 - protein, 593 aa, Triticum aestivum
  peptide (1)..(593): Ceres Seq. ID no. 14301921
  misc_feature (283)..(283): Xaa is any aa, unknown or other
IPSEEEKRHQIIRASPSPLPSRKGRRERPSTPRRRSIGAAERTARASAMRKGPSRSGSARHQQFRARAKTRVDDLQDMFSGLQYARKEARSTDAVLLEAQLHQMLREWRAELSVPSPASSLQAGNNNRDPSDPPSETPRPPQLAPAEEEDDATSKLVEQKPRPSANQTHKHPRGDQDMKPEPREEAIAHPVTVAQQPPSLGPGVITTPASAGFHDQMYYVNQELSVEDFLYDDDYKINLPGSNPEILNNLEGIGHQEYLQFNLPQELPPNAYLDMNNYGQNAXDGFLHMSDLLTTMSPAPASFLRPKCALWDCPRPAQGSESWQDYCSMYHAELAVKEEGPPGTMPVIRPRGIDLKDGPLFAALSAKIQGKHVGVPVCEGAATTKSPWNAPELFDLYIFEGESMREWLFFDKPRRAFDSGNRKQRSLPDYNGRGWHESRKQVMKDFGGLKRSYYMDPQPSSSYEWHLYEYEINDRDAFALYRLEFKSSEAKKSAKSKFTCSPLIEIQQQMVRLSADGHVENKRTARVRTQDVSTNIYPVQNNTAQASAPDAYQAASQVDQMTFLNGSVVYGPHLPYGYSTEGGDFYWNSNDGA

SEQ ID NO: 69279 - protein, 545 aa, Triticum aestivum
  peptide (1)..(545): Ceres Seq. ID no. 14301922
  misc_feature (235)..(235): Xaa is any aa, unknown or other
MRKGPSRSGSARHQQFRARAKTRVDDLQDMFSGLQYARKEARSTDAVLLEAQLHQMLREWRAELSVPSPASSLQAGNNNRDPSDPPSETPRPPQLAPAEEEDDATSKLVEQKPRPSANQTHKHPRGDQDMKPEPREEAIAHPVTVAQQPPSLGPGVITTPASAGFHDQMYYVNQELSVEDFLYDDDYKINLPGSNPEILNNLEGIGHQEYLQFNLPQELPPNAYLDMNNYGQNAXDGFLHMSDLLTTMSPAPASFLRPKCALWDCPRPAQGSESWQDYCSMYHAELAVKEEGPPGTMPVIRPRGIDLKDGPLFAALSAKIQGKHVGVPVCEGAATTKSPWNAPELFDLYIFEGESMREWLFFDKPRRAFDSGNRKQRSLPDYNGRGWHESRKQVMKDFGGLKRSYYMDPQPSSSYEWHLYEYEINDRDAFALYRLEFKSSEAKKSAKSKFTCSPLIEIQQQMVRLSADGHVENKRTARVRTQDVSTNIYPVQNNTAQASAPDAYQAASQVDQMTFLNGSVVYGPHLPYGYSTEGGDFYWNSNDGA

SEQ ID NO: 69280 - protein, 516 aa, Triticum aestivum
  peptide (1)..(516): Ceres Seq. ID no. 14301923
  misc_feature (206)..(206): Xaa is any aa, unknown or other
MFSGLQYARKEARSTDAVLLEAQLHQMLREWRAELSVPSPASSLQAGNNNRDPSDPPSETPRPPQLAPAEEEDDATSKLVEQKPRPSANQTHKHPRGDQDMKPEPREEAIAHPVTVAQQPPSLGPGVITTPASAGFHDQMYYVNQELSVEDFLYDDDYKINLPGSNPEILNNLEGIGHQEYLQFNLPQELPPNAYLDMNNYGQNAXDGFLHMSDLLTTMSPAPASFLRPKCALWDCPRPAQGSESWQDYCSMYHAELAVKEEGPPGTMPVIRPRGIDLKDGPLFAALSAKIQGKHVGVPVCEGAATTKSPWNAPELFDLYIFEGESMREWLFFDKPRRAFDSGNRKQRSLPDYNGRGWHESRKQVMKDFGGLKRSYYMDPQPSSSYEWHLYEYEINDRDAFALYRLEFKSSEAKKSAKSKFTCSPLIEIQQQMVRLSADGHVENKRTARVRTQDVSTNIYPVQNNTAQASAPDAYQAASQVDQMTFLNGSVVYGPHLPYGYSTEGGDFYWNSNDGA

SEQ ID NO: 69281 - DNA, 1482 bp, Triticum aestivum
  misc_feature (1)..(1482): Ceres Seq. ID no. 14301916
gagagagagatgaaggtctgtaccctcgcttaaacactctcgcctacccggctcgaccccccctcccatcttctccttcgccaagaacaccaccgcagccaccacgatcgatctcgtgctcgtgcgcggtgcgctggagcggcggctggggtgggcggtggccgccatgatcccgtgaaggaggaggggaggggatagataggtggctgtgtgacaaaggggccggatcgatgtacaagaaccagctgcaggagctggcgcagaggagctgcttcagcctgccgtcgtacgtgtgcacgcgggaggggcccgaccatgcgccccgcttcaaggccaccgtcaccttcaacggcgagaccttccacgggcccacctgctgcaccacgctccgccaggccgagcacgccgccgccgaggtcgcgctcgcccgcctctccacccgcgggccatccacctacctcaccgccagagtcctcgacgagaccggggtgtacaagaacctgctgcaggagacagcgcaccgggcggggctgaagctgccggcctacaccaccgtgcgctccggcccgggccactcgccggtcttcgcctccagcgtggagctcgctggcctcagcttcgccggcgacgccgccaggaccaagaagcaggcggagaagaacgctgccatgaccgcctggtccgcccttaagcagatgccggaggcgcgcaaggagcccggcaacggctgtgtcggcgaggagcaggagcactggtcgtagccagagtgctcgccgccctgaagcagcgctgcgatgtcaatgcggcgtcgcccttaccgaagcagcactgcctcgccggctcttcttcgtcctctgctccgaacccgtcgctctacagccaccaatggctgcctctgagctcccatgctgcacagcccaggacgcgccacgtgcagccgcagccggccggccccaggatactgcctccgctgcacatgctgcagcgaccggcgccgtccacctcccgtcacggcggcgagctggagcggcagaggaggatcgatgcggccgagctggtgcagatgctggagagggccatggtgacgaacagagaagaggcaatgccgtcggcgccgtgctactacccgcacgtcccggcgtaccaccacgccggcgcggcgccaagatacttcgccgcgggcggattccactcgccggcgatggcagtgagcgtgcggtcggtgatcccgatgtgctccgcgccgccttcgccgccgcagccggccgcggccaccaaggatgaccatgatgatgaccggaacgacccggcagcacctgcagagcactaggcggcgaggcgtgagctcgcggctgccaggttttgaagatcaagaagacgaggaaagattccgaggttcagtagctatatgatgagatcagtctggttgtagaagggaattttgatcgcaagttcctctgtctaagcttgtgtaagtgaccg

SEQ ID NO: 69282 - protein, 176 aa, Triticum aestivum
  peptide (1)..(176): Ceres Seq. ID no. 14301917
MYKNQLQELAQRSCFSLPSYVCTREGPDHAPRFKATVTFNGETFHGPTCCTTLRQAEHAAAEVALARLSTRGPSTYLTARVLDETGVYKNLLQETAHRAGLKLPAYTTVRSGPGHSPVFASSVELAGLSFAGDAARTKKQAEKNAAMTAWSALKQMPEARKEPGNGCVGEEQEHWS

SEQ ID NO: 69283 - protein, 132 aa, Triticum aestivum
  peptide (1)..(132): Ceres Seq. ID no. 14301918
MAASELPCCTAQDAPRAAAAGRPQDTASAAHAAATGAVHLPSRRRAGAAEEDRCGRAGADAGEGHGDEQRRGNAVGAVLLPARPGVPPRRRGAKILRRGRIPLAGDGSERAVGDPDVLRAAFAAAAGRGHQG

SEQ ID NO: 69284 - protein, 117 aa, Triticum aestivum
  peptide (1)..(117): Ceres Seq. ID no. 14301919
MLQRPAPSTSRHGGELERQRRIDAAELVQMLERAMVTNREEAMPSAPCYYPHVPAYHHAGAAPRYFAAGGFHSPAMAVSVRSVIPMCSAPPSPPQPAAATKDDHDDDRNDPAAPAEH

SEQ ID NO: 69285 - DNA, 1143 bp, Triticum aestivum
  misc_feature (1)..(1143): Ceres Seq. ID no. 15227260
gaacctcaccaaaaaaaaagcccgcaccacctctcctcccccgccgccaccgccggcaaccaccggatccggagaagaaagaggcagcgcccggcgaagcgaagcgggggaagagatggtgggcactccgtcctcgccggtggtgaacgtgtacccgctcgccaactacacgttcggcaccaaggaggccaagatggagaaggacacctccgtcgccgaccgcctcgctcgcatgaaggtcaactacatgaaagaaggaatgcgaacaagtgttgaagcaatcctattggtgcaagagcacaaccacccccacatactgttgttgcaaattggaaacacattttgcaaacttcccggtggacggttgaagcctggagaaagtgaaattgagggcctgaaaaggaagctgtgcagcaagcttgcagttaactcaccttcctttccacctaactggcaggttggagagtgtgttgctgaatggtggaggccaaactttgaaaccgtgatgtatccttactgccctccacatataacaaagcccaaggagtgcaagaagcttttcattgttcacctaactgaaagggagtatttcgctgttccaaggaacttgaagctacttgctgttccactgtttgaactatatgacaatgttcagcggtacggaccagtgatttccaccatcccgcagcagctgtccaggttccagttcaacatggtgagctcgtaatcaatggtggcgatgagatgcgaggattagtcgagtataagatgtactgagatggatcttggacgaagcaccaaactactagatgctgatcaacttagcatgactcgttatttagtcgccgattttcataaactagatgctcattccgactgccttttatttggcgacgcgtgctgttaatgaagctcaggctggttagatacgtggtgtattattgtttggatggtaatcggttgttcctccggtgcggtgcggtgcgctaatctgttcctgtgtacgtactgtaggcgatggccggagatgtatgcctgtaacgtacgtacgtaggcgatgtatgcctgtaattgctatggtctgctgtagtactagtggctacggtgcatgggttcgtcgtcactgacgctatgcattttagg

SEQ ID NO: 69286 - protein, 241 aa, Triticum aestivum
  peptide (1)..(241): Ceres Seq. ID no. 15227261
NLTKKKARTTSPPPPPPPATTGSGEERGSARRSEAGEEMVGTPSSPVVNVYPLANYTFGTKEAKMEKDTSVADRLARMKVNYMKEGMRTSVEAILLVQEHNHPHILLLQIGNTFCKLPGGRLKPGESEIEGLKRKLCSKLAVNSPSFPPNWQVGECVAEWWRPNFETVMYPYCPPHITKPKECKKLFIVHLTEREYFAVPRNLKLLAVPLFELYDNVQRYGPVISTIPQQLSRFQFNMVSS

SEQ ID NO: 69287 - protein, 203 aa, Triticum aestivum
  peptide (1)..(203): Ceres Seq. ID no. 15227262
MVGTPSSPVVNVYPLANYTFGTKEAKMEKDTSVADRLARMKVNYMKEGMRTSVEAILLVQEHNHPHILLLQIGNTFCKLPGGRLKPGESEIEGLKRKLCSKLAVNSPSFPPNWQVGECVAEWWRPNFETVMYPYCPPHITKPKECKKLFIVHLTEREYFAVPRNLKLLAVPLFELYDNVQRYGPVISTIPQQLSRFQFNMVSS

SEQ ID NO: 69288 - protein, 177 aa, Triticum aestivum
  peptide (1)..(177): Ceres Seq. ID no. 15227263
MEKDTSVADRLARMKVNYMKEGMRTSVEAILLVQEHNHPHILLLQIGNTFCKLPGGRLKPGESEIEGLKRKLCSKLAVNSPSFPPNWQVGECVAEWWRPNFETVMYPYCPPHITKPKECKKLFIVHLTEREYFAVPRNLKLLAVPLFELYDNVQRYGPVISTIPQQLSRFQFNMVSS

SEQ ID NO: 69289 - DNA, 1993 bp, Triticum aestivum
  misc_feature (1)..(1993): Ceres Seq. ID no. 13595900
gctcaaaccctagctaccaatccccgcaattcctcccctggcccaggttcctccgtagctggatgcccccaacctaggcggcggctcggtggcgtgtgtgcgtgcgcggccgccgatggagccgcgcgtgggtaacaagtaccgcctcggccgcaagctcggcagcggctcgttcggggagatctacctcggtactaacgtgcagaccaacgaggaggtcgcgattaagcttgaaaatgtgaagacaaagcatcctcagttgctgtatgagtcaaagttgtacagagtactgcagggcggaactgggatttcaaatgtcaagtggtttggtgttgagggtgactacaatgttcttgttatggatgtgttggggccaagccttgaagatcttttcagcttttgcaacagaaaactgtcgctcaaaactgttctgatgcttgctgatcaaatgatcaaccgagttgaatttatacattcaaagtccttcttgcatcgagatataaagccagacaattttctcatgggccttggaaagagagcaaatcaggtatatatgattgactttggactggcaaagaaatatagggacacgtcaacgcaccagcacattccataccgggagaacaaaaatttgactgggacagctcgatatgcgagtgtaagcacccatctcggaattgaacaaagcagaagggatgacatggagtctcttggatatgtactcatgtacttcttgagaggaagtctcccatggcagggtttaaaagccggtacgaagaaacaaaagtatgagaaaatcagcgaacggaagattgccacttcaattgaggctttgtgtcgtggatacccttctgaatttcagtcattcttccattactgccgcgcactgcgttttgaagacagtccagactatcaatacctgaagagattgttcagagatctttttattcgagagggattccagtttgattatgtttttgactggaccattcttaaataccagcagtcacaaatgaccagtgctccaccacgtgctattgccgctgctgcaggacaaagctcggggatggctccaattgcaagtaataatagactgtcagccaccgaagagggaagaagtgggtggtcagatgatcctacacgacgtcaagttccacctacaggaataaatgcaggcagcttagcgaaacagaagtcaccagttagaccagatgtgtccgcaccaaaggaagctgtgttgtccagttcgacttttttgggtcggtcaggcgtgtcctcaaggcgacctgctgtttgtagtagccgagatttgccaagcagtgaggctgaaccatcgcgtagtcgtgcaccagacgtgagtccagggacgttccagagaaactcagccccacggaggacctcacagacgcttgactactctgaccccaggcacaagtctaacagcaacaactacgagtccactataaggggcatccggggcctaaatttcaatgccaacgataggatccactactagtatcttctggatcctaaaaagcatgtataatatgtgatctgctgaagttaaagtggggagtgaggccatactttccgagctactctcctaccatagtaccatgtgatccacaagctacgtgctggagcggtgaggcagtttactgacgcaaagaaacgggggctggctggcaaaataaagggtctgcgacagccatggccctaaaatagcacgttgggcctatgttttagcctctctgtacaggttttcttttgtgcgttgagatgttgctttcgtacttttcacataatattatgttttaagatatttaccttactgtcatgtctagtatgtttacattggaatgccttgttggcttgagcaggtaaaaaaaaaaaaaaaaaaaaaaaaaaaaaaaaaaaaaaaaaaaaaaaaaagaaaaaaaaaaaaaaaaaagcttatcgataccgtcgacctcgagggggggcccggtaccca

SEQ ID NO: 69290 - protein, 466 aa, Triticum aestivum
  peptide (1)..(466): Ceres Seq. ID no. 13595901
MEPRVGNKYRLGRKLGSGSFGEIYLGTNVQTNEEVAIKLENVKTKHPQLLYESKLYRVLQGGTGISNVKWFGVEGDYNVLVMDVLGPSLEDLFSFCNRKLSLKTVLMLADQMINRVEFIHSKSFLHRDIKPDNFLMGLGKRANQVYMIDFGLAKKYRDTSTHQHIPYRENKNLTGTARYASVSTHLGIEQSRRDDMESLGYVLMYFLRGSLPWQGLKAGTKKQKYEKISERKIATSIEALCRGYPSEFQSFFHYCRALRFEDSPDYQYLKRLFRDLFIREGFQFDYVFDWTILKYQQSQMTSAPPRAIAAAAGQSSGMAPIASNNRLSATEEGRSGWSDDPTRRQVPPTGINAGSLAKQKSPVRPDVSAPKEAVLSSSTFLGRSGVSSRRPAVCSSRDLPSSEAEPSRSRAPDVSPGTFQRNSAPRRTSQTLDYSDPRHKSNSNNYESTIRGIRGLNFNANDRIHY

SEQ ID NO: 69291 - protein, 385 aa, Triticum aestivum
  peptide (1)..(385): Ceres Seq. ID no. 13595902
MDVLGPSLEDLFSFCNRKLSLKTVLMLADQMINRVEFIHSKSFLHRDIKPDNFLMGLGKRANQVYMIDFGLAKKYRDTSTHQHIPYRENKNLTGTARYASVSTHLGIEQSRRDDMESLGYVLMYFLRGSLPWQGLKAGTKKQKYEKISERKIATSIEALCRGYPSEFQSFFHYCRALRFEDSPDYQYLKRLFRDLFIREGFQFDYVFDWTILKYQQSQMTSAPPRAIAAAAGQSSGMAPIASNNRLSATEEGRSGWSDDPTRRQVPPTGINAGSLAKQKSPVRPDVSAPKEAVLSSSTFLGRSGVSSRRPAVCSSRDLPSSEAEPSRSRAPDVSPGTFQRNSAPRRTSQTLDYSDPRHKSNSNNYESTIRGIRGLNFNANDRIHY

SEQ ID NO: 69292 - protein, 360 aa, Triticum aestivum
  peptide (1)..(360): Ceres Seq. ID no. 13595903
MLADQMINRVEFIHSKSFLHRDIKPDNFLMGLGKRANQVYMIDFGLAKKYRDTSTHQHIPYRENKNLTGTARYASVSTHLGIEQSRRDDMESLGYVLMYFLRGSLPWQGLKAGTKKQKYEKISERKIATSIEALCRGYPSEFQSFFHYCRALRFEDSPDYQYLKRLFRDLFIREGFQFDYVFDWTILKYQQSQMTSAPPRAIAAAAGQSSGMAPIASNNRLSATEEGRSGWSDDPTRRQVPPTGINAGSLAKQKSPVRPDVSAPKEAVLSSSTFLGRSGVSSRRPAVCSSRDLPSSEAEPSRSRAPDVSPGTFQRNSAPRRTSQTLDYSDPRHKSNSNNYESTIRGIRGLNFNANDRIHY

SEQ ID NO: 69293 - DNA, 1314 bp, Triticum aestivum
  misc_feature (1)..(1314): Ceres Seq. ID no. 13595922
aaaaaccggcagcgcgcgttcttgctcgggtctcgtctcggaagaaagattccagcaccgagagctcgaggccgacgactcaccttttggaaaggcggggttcttctgaggaccttgcatctccagtagatcgggcgcgtccactgttcccaggaccagagcatcgcacttggcaaagcagaggagaagatggacgctcgcggcggagacgcatcggccattgccctgctgctgtgcgcttgctttctcaccgcccttgcatgtgacagcaatggtgccaagtttgcgtacagcggtcctcttggccccgatcactgggggggattggaccccaacttcacgcgctgcgccatggggacgtaccagtctccggttgatatcaagaccagcgacgtggtttacaacccgatgctggggcctcttcacagggaatacaccgctgcgaatgctaccctcgtagacaacatcttcaacatcgcgctgcgatgcgaggatgctgctgggacggtgcagatcgacggggtgaagtacaagctggacaatatccattggcactctccttcagagcacaccatcaacggcgagaggtttgcggtggagcagcacatggttcacttcagtgacgacggcaacatatccgttgtgtcgatcctgtaccggctcggcaggccagaccctttcctcatgcagctgcaggataagctatcggagctctacgtggaggcctgcagggccgagaaaggtgctccgatccccaccggagtagtaaacatgtggcagctgcggcgttacgccaacatgtactaccggtacgtcgggtcgctgaccacgccgccgtgcaccgagaacatcatctggaacatccacggcagggtgagggagatggcgttggggcaggctgccgccctgatcgcgcccctggaggaaggctaccggcgcaacaacaggccgacgcagccgctcaacggccgcaccgtgcagttctaccgcaggttctggaagaagaaggggagcgggaagccgtaagggctggtcgatgcgcctcgatcgatgtttggagatgatgatgatgctgcagtctctctcgtctttgctctcggttcaggacaaagttatagtagtcgtttatctatctgcaagtcgtgttagcatataggtctgctttataggtttgctttatcgcttatcggtcttactctgaatttggttaagtgttaggtctttcgtgtctgtaaatgcgtccgggagggttgatgtgatcgatccttcttttgtctacaaaaaaagttaagctaatcaagaaagtttcactcc

SEQ ID NO: 69294 - protein, 278 aa, Triticum aestivum
  peptide (1)..(278): Ceres Seq. ID no. 13595923
MDARGGDASAIALLLCACFLTALACDSNGAKFAYSGPLGPDHWGGLDPNFTRCAMGTYQSPVDIKTSDVVYNPMLGPLHREYTAANATLVDNIFNIALRCEDAAGTVQIDGVKYKLDNIHWHSPSEHTINGERFAVEQHMVHFSDDGNISVVSILYRLGRPDPFLMQLQDKLSELYVEACRAEKGAPIPTGVVNMWQLRRYANMYYRYVGSLTTPPCTENIIWNIHGRVREMALGQAAALIAPLEEGYRRNNRPTQPLNGRTVQFYRRFWKKKGSGKP

SEQ ID NO: 69295 - protein, 224 aa, Triticum aestivum
  peptide (1)..(224): Ceres Seq. ID no. 13595924
MGTYQSPVDIKTSDVVYNPMLGPLHREYTAANATLVDNIFNIALRCEDAAGTVQIDGVKYKLDNIHWHSPSEHTINGERFAVEQHMVHFSDDGNISVVSILYRLGRPDPFLMQLQDKLSELYVEACRAEKGAPIPTGVVNMWQLRRYANMYYRYVGSLTTPPCTENIIWNIHGRVREMALGQAAALIAPLEEGYRRNNRPTQPLNGRTVQFYRRFWKKKGSGKP

SEQ ID NO: 69296 - protein, 205 aa, Triticum aestivum
  peptide (1)..(205): Ceres Seq. ID no. 13595925
MLGPLHREYTAANATLVDNIFNIALRCEDAAGTVQIDGVKYKLDNIHWHSPSEHTINGERFAVEQHMVHFSDDGNISVVSILYRLGRPDPFLMQLQDKLSELYVEACRAEKGAPIPTGVVNMWQLRRYANMYYRYVGSLTTPPCTENIIWNIHGRVREMALGQAAALIAPLEEGYRRNNRPTQPLNGRTVQFYRRFWKKKGSGKP

SEQ ID NO: 69297 - DNA, 1430 bp, Triticum aestivum
  misc_feature (1)..(1430): Ceres Seq. ID no. 13598272
aaaaaaacctagatgccacaccctatcccagccgcagccgccgccgccgtcgccgccgccgccgctgcaaccgccgccttcgattccgtgaaattggaggggaagacaattggatctgtctgccgcaggaggagtggggagaaatagattgaaggcgcgacagttcctgaatgttgtgatggagaggtatggcactggcggtgccggtggcagcttgtatacggtcagtcgcatcgacgccaaggaacacctcttctaccgatccacggccgaagcacaggcagcagaaaaatcaaggttcgatatggagtgcatctggcgaatgcctacgtccaggctcaggttcgaagcataccgctcggatgacaagaggctcaatttcctgcccttctatggacgacgcagcggcggcgatagcaagatgctctgcatggacgccgctggccacaccgtgctctgtgatgccgctggcctctctgtcatgccggctccctgccttaacgaacccaaggttgacagccctgtttctttctccatcacccgcaccaacgtggaaacccccaatcgcgccgatgctctctacgtcctcgacagatttgtcacgagccgcaactccttcaacttcgaggcactcatgtttggcgagaagacctgggactgggttcggcttccaccgccgccctatgtcaacaacccggcctacaactccacatccatccagtcctacacgctcctggctgatggctccaccatttgcatctcctcccctcggcacagcctcgtcggcacctactgcttcgacacgattagctgtaagtggagcaaggctggccgctgggcgcttcccttgtacggccgggctgagcatgtacctgagctgggcaacctctggttcggcatggccgacaacagcccccacaatttttccgcattggacctctccaacctagacggggctccaaagttgcttcaagactggcaagaccttgacccgcctgaggattgggtgcagatgaggtgcagcctgctgtacctgggcgcgggcaagttttgcataaccaaattcttcaacatcggggacccagacacagaggacaacacaaccgctgctgtgctcaccggagtggaggtgctgtgtggagtttctggtggggaggtggtgcacggaggatcgtccgaactccagatgatcaagcacaagtcttttatcagctatgacggcatccagtgcgtcctctgaaatacgtactagggaagtcgttaaaacgagagcaaatgaattatgagcattttagaagacggccgagtggttgttttcgttgcagctgtttccattggaagccttgttcgttttgtggatctattttccgctgggattgggttgatctccaccatttcttctgctagagaaatatagtcctagcactttt

SEQ ID NO: 69298 - protein, 353 aa, Triticum aestivum
  peptide (1)..(353): Ceres Seq. ID no. 13598273
MERYGTGGAGGSLYTVSRIDAKEHLFYRSTAEAQAAEKSRFDMECIWRMPTSRLRFEAYRSDDKRLNFLPFYGRRSGGDSKMLCMDAAGHTVLCDAAGLSVMPAPCLNEPKVDSPVSFSITRTNVETPNRADALYVLDRFVTSRNSFNFEALMFGEKTWDWVRLPPPPYVNNPAYNSTSIQSYTLLADGSTICISSPRHSLVGTYCFDTISCKWSKAGRWALPLYGRAEHVPELGNLWFGMADNSPHNFSALDLSNLDGAPKLLQDWQDLDPPEDWVQMRCSLLYLGAGKFCITKFFNIGDPDTEDNTTAAVLTGVEVLCGVSGGEVVHGGSSELQMIKHKSFISYDGIQCVL

SEQ ID NO: 69299 - protein, 311 aa, Triticum aestivum
  peptide (1)..(311): Ceres Seq. ID no. 13598274
MECIWRMPTSRLRFEAYRSDDKRLNFLPFYGRRSGGDSKMLCMDAAGHTVLCDAAGLSVMPAPCLNEPKVDSPVSFSITRTNVETPNRADALYVLDRFVTSRNSFNFEALMFGEKTWDWVRLPPPPYVNNPAYNSTSIQSYTLLADGSTICISSPRHSLVGTYCFDTISCKWSKAGRWALPLYGRAEHVPELGNLWFGMADNSPHNFSALDLSNLDGAPKLLQDWQDLDPPEDWVQMRCSLLYLGAGKFCITKFFNIGDPDTEDNTTAAVLTGVEVLCGVSGGEVVHGGSSELQMIKHKSFISYDGIQCVL

SEQ ID NO: 69300 - protein, 305 aa, Triticum aestivum
  peptide (1)..(305): Ceres Seq. ID no. 13598275
MPTSRLRFEAYRSDDKRLNFLPFYGRRSGGDSKMLCMDAAGHTVLCDAAGLSVMPAPCLNEPKVDSPVSFSITRTNVETPNRADALYVLDRFVTSRNSFNFEALMFGEKTWDWVRLPPPPYVNNPAYNSTSIQSYTLLADGSTICISSPRHSLVGTYCFDTISCKWSKAGRWALPLYGRAEHVPELGNLWFGMADNSPHNFSALDLSNLDGAPKLLQDWQDLDPPEDWVQMRCSLLYLGAGKFCITKFFNIGDPDTEDNTTAAVLTGVEVLCGVSGGEVVHGGSSELQMIKHKSFISYDGIQCVL

SEQ ID NO: 69301 - DNA, 1442 bp, Triticum aestivum
  misc_feature (1)..(1442): Ceres Seq. ID no. 15169607
gaccaagcccagcccataccggcagccacctccgtcgtcgtcggtactgacgcggcacgagccggcgaatccgacaggccccctacctctcgctcgccgcgagatcccgcgtccatggcggtcggcatcgcgctcctgctcgaccttgcggcccgcgcgccccgctcctccgcctcgctccactcgcacgccgccttctccgccgccgccgccgccgccgccgcggcagccctgtccgcctccggcgtacccctctccgcgcggccattcttcggttttccaggattcactgttgctcattgtgatgctggtgcaacttatggatcgattgatagtcctgatcttgccaatgatcttaatgagaagatacatgactcgattcatgatctccaattaccgataaaagaatacccgttggagctgaagccgcttttgtatgcatttggctttaagcatttgagtatgacgactattagggcctttttattatactatttaccacttctggagcctcgtccgcccactgatgacgatgacgatgacgatctgcttcaagatgattcagagaggccgccggttgacctggttactcccttccataattcattgaagcaaatcgctcgcgagatttctgttgtaacaacaagaagagtattcgaaaggattgcggtttgtcatgtttcacaaagaacagcatggaagcttctcaaagatgctgcaaaatcatcgaagaggaaagctctgagggggatgtcaattccagaatacacatactgtgttgccagaacaactttccgagcgcatgcattgggagtagctgctacttgggttgtacaatctgtcgtccaggtctacaaatgttttattcgtcaacctgataatgatgacgaattgttcgacgagaaggaaaaactcagattgtttgcgagaaggatctatagtgtaaccatcaaatgtggtttctctttggtttttgcctcgattggagcaggcctcggcgtccttctgcatccagtgcatggacaatggattggttgtatccttggagattttgcaggaccagttgttgctatccttattttcgagaagttacagttcccgctagaaggttaaagaccaccatctcctgctacaaagttaagaaacccaggtcatccgaccttgtttctagcctgcctggttttcgaagaacatgaagtggagctccttggccttgagtctaccctttcaggatattcattggcctaacttggagctcaaagttgatgaataactatgcatgcatggttaatagcttttcgtggcacaatgcctttgggtattgtgtaatgcttacttttggcacatttaataactagctactgtacttcgttgccgtgctttacattttgaactcaaaggaacatttctgtccactggtttgctaaatttctacagtaagc

SEQ ID NO: 69302 - protein, 370 aa, Triticum aestivum
  peptide (1)..(370): Ceres Seq. ID no. 15169608
DQAQPIPAATSVVVGTDAARAGESDRPPTSRSPRDPASMAVGIALLLDLAARAPRSSASLHSHAAFSAAAAAAAAAALSASGVPLSARPFFGFPGFTVAHCDAGATYGSIDSPDLANDLNEKIHDSIHDLQLPIKEYPLELKPLLYAFGFKHLSMTTIRAFLLYYLPLLEPRPPTDDDDDDDLLQDDSERPPVDLVTPFHNSLKQIAREISVVTTRRVFERIAVCHVSQRTAWKLLKDAAKSSKRKALRGMSIPEYTYCVARTTFRAHALGVAATWVVQSVVQVYKCFIRQPDNDDELFDEKEKLRLFARRIYSVTIKCGFSLVFASIGAGLGVLLHPVHGQWIGCILGDFAGPVVAILIFEKLQFPLEG

SEQ ID NO: 69303 - protein, 332 aa, Triticum aestivum
  peptide (1)..(332): Ceres Seq. ID no. 15169609
MAVGIALLLDLAARAPRSSASLHSHAAFSAAAAAAAAAALSASGVPLSARPFFGFPGFTVAHCDAGATYGSIDSPDLANDLNEKIHDSIHDLQLPIKEYPLELKPLLYAFGFKHLSMTTIRAFLLYYLPLLEPRPPTDDDDDDDLLQDDSERPPVDLVTPFHNSLKQIAREISVVTTRRVFERIAVCHVSQRTAWKLLKDAAKSSKRKALRGMSIPEYTYCVARTTFRAHALGVAATWVVQSVVQVYKCFIRQPDNDDELFDEKEKLRLFARRIYSVTIKCGFSLVFASIGAGLGVLLHPVHGQWIGCILGDFAGPVVAILIFEKLQFPLEG

SEQ ID NO: 69304 - protein, 216 aa, Triticum aestivum
  peptide (1)..(216): Ceres Seq. ID no. 15169610
MTTIRAFLLYYLPLLEPRPPTDDDDDDDLLQDDSERPPVDLVTPFHNSLKQIAREISVVTTRRVFERIAVCHVSQRTAWKLLKDAAKSSKRKALRGMSIPEYTYCVARTTFRAHALGVAATWVVQSVVQVYKCFIRQPDNDDELFDEKEKLRLFARRIYSVTIKCGFSLVFASIGAGLGVLLHPVHGQWIGCILGDFAGPVVAILIFEKLQFPLEG

SEQ ID NO: 69305 - DNA, 1198 bp, Triticum aestivum
  misc_feature (1)..(1198): Ceres Seq. ID no. 15176085
ctgataggcgatagcgataccattccttcctccacggagcgatggaagacacgacgccgcccgctgacgagaggccgctggtgctcctggggcagccgctcttcccggagttcgccaccgcgctggccggccgcttccggttcgtcctggtcgcggacgccgacgccgcgaccctggcccaggggagggcgctgctcatcgggctcaacccggtcacggacgaccacctggccgcgctcccggcgctcgggctcgtggcgggcatctccgtgggcgtcaaccacgtcgacctcgccgcctgccggcgccgcgggatcgccgtcaccaacgcaggcgccgccttcgcggtcgacacggccgactacggcgtcgggctcgtcgtcgccgtgctccgccggttggccgccgccgaggcccacgtccgggccggcaggtgggcggccgacggcgactatcctctcaccaccaaggtgagcggcaagcgggtggggatcgtggggctgggcaacatcggctcccgcatcgcgcggcgtctcgccgccttcggctgcgccgtctcctacaactcgaggtcgcccaagccgtcggcgccgtacgagttcgtcccggccgtgcgcgacatcgccgccggcagcgacgtgctggtgctatcctgcgcgctgacggaggagacgaggcacgtggtgaaccgggaggtgatggaggcgctggggaaggccggcgtactggtgaacgtcggccgcggcggcctcgtggacgagccggagctggtccgctgcctgcaggagggcgtcatcggcggcgccggcttggacgtgttcgagagcgagccggacgtgccgccggagctcttctccatggacaacgtcgtgctttcggcgcacagagccgtggccacgccggagtccatccgcggcacgatcgagctcgtcgcggccaacctcgacgccttcttcgcagggaagccactgctcagccccgtggagctctgagacaaccgccgccgccggagggttcttacaaggacgctgtcgtgagcggcggcaactagtgtgatcttgccgtccacggcggtaacgaataataagagaggacgtgacaaggcagctggtagaggcgaagcattggcttagggcgacgccatcctgtattttcctatctgtacacgatgtcatgtgaattatatcgacttgctgcc

SEQ ID NO: 69306 - protein, 316 aa, Triticum aestivum
  peptide (1)..(316): Ceres Seq. ID no. 15176086
MEDTTPPADERPLVLLGQPLFPEFATALAGRFRFVLVADADAATLAQGRALLIGLNPVTDDHLAALPALGLVAGISVGVNHVDLAACRRRGIAVTNAGAAFAVDTADYGVGLVVAVLRRLAAAEAHVRAGRWAADGDYPLTTKVSGKRVGIVGLGNIGSRIARRLAAFGCAVSYNSRSPKPSAPYEFVPAVRDIAAGSDVLVLSCALTEETRHVVNREVMEALGKAGVLVNVGRGGLVDEPELVRCLQEGVIGGAGLDVFESEPDVPPELFSMDNVVLSAHRAVATPESIRGTIELVAANLDAFFAGKPLLSPVEL

SEQ ID NO: 69307 - DNA, 1580 bp, Triticum aestivum
  misc_feature (1)..(1580): Ceres Seq. ID no. 13596244
ggttctgacccccgattcggtccgtcgattgtgatttcccctcgatttcgtgcgggattagtggccggaattaatcgccatgacggcgtcgtcgccgatggtgctgtccctcctgctcttcgcctcgctcacggcgctgctcgtcctggcccctcgcacggcgtcgccgccgctgccgctggccgtggtggttggggacgaggaggcgccgccggccgccgctggtggtgctgcggggatcagcggcggaggggcgggagttgaggagggaccggaggacctcgcgctataccggcgcgtgacgctcgacgccggcgagggcgcggcggtggcgtccaaggtggcgttcatgttcctgaccaactccgacctcaccttcgcgccgctttgggagcgcttcttcgcggggcacgctgaccagttcaacgtctacgtgcacgcagacccggcggtgcggctgcggctcccccctacgccttccttccggggccgcttcgtcgcggccaagccgacgcggcgcggggacccgagcctcatcgctgcggcgcggcggctgcttgtcgccgcgctactcgacgacccggccaacgcctacttcgcgctgctctcgcagcactgcgtcccgctccactccttcccgcggctctacgaggcgctcttcccgcccaaggccgcgcaccaccaccgcctcccgagctatatcgaggtgctcaccggcgagccccagatgcccgcgcgctacgtggcgcgcggtgacgacgccatgctcccggaggtgcccttcgaccggttccgcatcggctcccagttcttcacgctggcccgccgccacgccgtgctagtcgtccgcgagcgccgtctctggcgaaagtttagggagccgtgcctgccggagtcgcagggctcgtgctacccggaggagcactatttcccgacgcttctcgacatggccgaccccgccggctgcacccggtacacgctcacgcgcgtcaactggaccgacagcttcgagggccacccgcacacgtattccgcgccagaggtgtcgccgcggctcatcgccgagctacgccagtccaacagctccacctatgagcacatgttcgcgcgcaagttcgcgcccgactgccttggcccgctcatggccatcgccgacaccgtcatcttcaaagattgatcgatgcggtgctctgcatcatagatacacgtaggaggtctatccgttgagagttgcgcgtgcgagaagacgaaagcagtgtcgttattctccgttgaatcttcacacggttcagactggtgctttgcctctgtgccctccaccgttcttctcctcctggtacttctatgtagacttaagtggcaacaacctaatgcaaagcggcaggtgttgcatctgatggtcagtccatccatccactgtatttttcctacctcgtgcggctgcctaaggctgctgttctgttgaaatgcgtaaaaggatggattgtggcggtgttctgttcagctgaaactgaaaaggaactttgtaccggtttatttcagcttgtgtacataaccaaggaataaaataatcattctgc

SEQ ID NO: 69308 - protein, 365 aa, Triticum aestivum
  peptide (1)..(365): Ceres Seq. ID no. 13596245
MTASSPMVLSLLLFASLTALLVLAPRTASPPLPLAVVVGDEEAPPAAAGGAAGISGGGAGVEEGPEDLALYRRVTLDAGEGAAVASKVAFMFLTNSDLTFAPLWERFFAGHADQFNVYVHADPAVRLRLPPTPSFRGRFVAAKPTRRGDPSLIAAARRLLVAALLDDPANAYFALLSQHCVPLHSFPRLYEALFPPKAAHHHRLPSYIEVLTGEPQMPARYVARGDDAMLPEVPFDRFRIGSQFFTLARRHAVLVVRERRLWRKFREPCLPESQGSCYPEEHYFPTLLDMADPAGCTRYTLTRVNWTDSFEGHPHTYSAPEVSPRLIAELRQSNSSTYEHMFARKFAPDCLGPLMAIADTVIFKD

SEQ ID NO: 69309 - protein, 359 aa, Triticum aestivum
  peptide (1)..(359): Ceres Seq. ID no. 13596246
MVLSLLLFASLTALLVLAPRTASPPLPLAVVVGDEEAPPAAAGGAAGISGGGAGVEEGPEDLALYRRVTLDAGEGAAVASKVAFMFLTNSDLTFAPLWERFFAGHADQFNVYVHADPAVRLRLPPTPSFRGRFVAAKPTRRGDPSLIAAARRLLVAALLDDPANAYFALLSQHCVPLHSFPRLYEALFPPKAAHHHRLPSYIEVLTGEPQMPARYVARGDDAMLPEVPFDRFRIGSQFFTLARRHAVLVVRERRLWRKFREPCLPESQGSCYPEEHYFPTLLDMADPAGCTRYTLTRVNWTDSFEGHPHTYSAPEVSPRLIAELRQSNSSTYEHMFARKFAPDCLGPLMAIADTVIFKD

SEQ ID NO: 69310 - protein, 275 aa, Triticum aestivum
  peptide (1)..(275): Ceres Seq. ID no. 13596247
MFLTNSDLTFAPLWERFFAGHADQFNVYVHADPAVRLRLPPTPSFRGRFVAAKPTRRGDPSLIAAARRLLVAALLDDPANAYFALLSQHCVPLHSFPRLYEALFPPKAAHHHRLPSYIEVLTGEPQMPARYVARGDDAMLPEVPFDRFRIGSQFFTLARRHAVLVVRERRLWRKFREPCLPESQGSCYPEEHYFPTLLDMADPAGCTRYTLTRVNWTDSFEGHPHTYSAPEVSPRLIAELRQSNSSTYEHMFARKFAPDCLGPLMAIADTVIFKD

SEQ ID NO: 69311 - DNA, 1452 bp, Triticum aestivum
  misc_feature (1)..(1452): Ceres Seq. ID no. 13598276
aatttttttcatttcattctcggcggcctagtcctctccctttccctccccatcaccttggtcttcctcctcgattcgatccgaacccatccgattcggaagagaggtggtgatgccgcttgtggaatcgcctcaatggcgccggaaggccaccgatttcttctcttcatctagcttcaagctgaagcaggcagggcaatctgcaggggataatatagctgatgttgccggtaaggttggaacagtggtgaagagtcggtgggctatcttccaggatgctagacagcgaccgccaccaccaggagatactgtgcaggagcgcttcatctctgctgctgccaacactggagtgattctgaggaagggcatttcagagacaaaggagaaggtcgcggtgggaaaggtcaaagttgaagaggctgccaaaaaaactgcggacaaaagcaaaactattttgaacaatattgaacgctggcagaagggagttgcgagcaatgacgtttttggtgttcctgttgaagccactgtacaacgggagcaatctggtaaagctgtgcctctgatactggtgaggtgtgcagaccacttggttatatcaggcttgagtaatgagtacttgttcaaatctgaaggcggcagaaaagttcttcagcaactagtttcactttacaatgaggattcgggtgcatctttgcctgatggtgttagccctattgatgtagctgcactgatcaagtgctaccttgccagcatccccgaaccacttacaacatttgctctttatgatgagcttaaagatgcgagggttagcattgatgatcttaagaacatactgaagaagcttccaaatgtgaactacatgacactagaatttgttacagcattgctactaagagtaagccgtaaatcagcactcaacaagatggactcttgtacccttgctgtggagttcgcacctttgatcatatggcagcaaggggattctggaacagatttgcggaatcatctcagattcacactgaaaccacctccaaaaattgtggacacgacgacaagtaccactacatgggacttgctagatgaggatgatgtggatgcttcgtcgcaaatccccttggacgatggttcgcctccagactatggtgctattgaggtgatccagtgcttgattgagcatcacaatcccatattcacggatgcaaacgagactgtatggagatgacctgacctggccggctcctctttagatttctgtggtatttagctcgtgctatgtacaagttccaggtagtaggatggagtggagtgccgcgaataagtctagtctcggggacaagcattttggtccaaactttttttgtcttgttttgtgggagtaaaagtaggaactgtatatattaattgtccacatggcagagttgtcttgtgggatttgcctcgacatggctcgtc

SEQ ID NO: 69312 - protein, 369 aa, Triticum aestivum
  peptide (1)..(369): Ceres Seq. ID no. 15222287
MPLVESPQWRRKATDFFSSSSFKLKQAGQSAGDNIADVAGKVGTVVKSRWAIFQDARQRPPPPGDTVQERFISAAANTGVILRKGISETKEKVAVGKVKVEEAAKKTADKSKTILNNIERWQKGVASNDVFGVPVEATVQREQSGKAVPLILVRCADHLVISGLSNEYLFKSEGGRKVLQQLVSLYNEDSGASLPDGVSPIDVAALIKCYLASIPEPLTTFALYDELKDARVSIDDLKNILKKLPNVNYMTLEFVTALLLRVSRKSALNKMDSCTLAVEFAPLIIWQQGDSGTDLRNHLRFTLKPPPKIVDTTTSTTTWDLLDEDDVDASSQIPLDDGSPPDYGAIEVIQCLIEHHNPIFTDANETVWR

SEQ ID NO: 69313 - DNA, 1035 bp, Triticum aestivum
  misc_feature (1)..(1035): Ceres Seq. ID no. 13598268
aacatcctaatcgaaaaaaaagcacggttcatcccgatcgaagaggaccaaaaaggcccaaacccactcccatcccctcgtcacgcgtctcccggacccttcctcgtctctctctctctgaacaccccacccagccgaccaaatcgccgcacgagggcgcgccatggagccggcggtggagaggaaggtgcccgagcaggaggagcagctgcagccgtcgcacgcccgggccgaggacgcgccgcccgccgccgtcgaggaggaggacgaggcggaggcggaggagagcgagcgccgcaaccgcgagctcaaggccggcctccatcccctcaggcgcaagctcgtgctctggtacacccgccggacgcccgggacgaggtcgcagtcgtacgaggacaacatcaaaaagatcgtcgatttcagcactgtcgagtcgttctgggtttgctactgccacctcgcacgcccgtcctccctcccgagccccacggacctgcatcttttcaaagagggtgtccgtccactctgggaggatcctgcaaatcggaatggtggcaagtggattatacggttcaagaaggctgtttctgggcgtttctgggaggatttggtgctggttctagcgggtgatcaacttgattatagtgatgatgtttgtggcattgtgctaagttgtcgtttcaatgaagacatcctgagcgtctggaatcggaatgcatcagaccaccaggctgtgatgacattaagagactcgattaagaggcacttgaagctgccacacacctatctgatggagtacaaaccacatgacgcctctctgcgagacaactcgtcctacaggaacacatggctgagaggttaagctttatgtcgtcaaaactagtcatggccctcgttccgaactacagtaaatccttgtggatttccagttctgacgtttcaacccagccatgatgtatgattactctttgtcatgctactatgtactctccaaatttcaaatgctgaagtatcgacttttataaaaaaaaaaaa

SEQ ID NO: 69314 - protein, 232 aa, Triticum aestivum
  peptide (1)..(232): Ceres Seq. ID no. 13598269
MEPAVERKVPEQEEQLQPSHARAEDAPPAAVEEEDEAEAEESERRNRELKAGLHPLRRKLVLWYTRRTPGTRSQSYEDNIKKIVDFSTVESFWVCYCHLARPSSLPSPTDLHLFKEGVRPLWEDPANRNGGKWIIRFKKAVSGRFWEDLVLVLAGDQLDYSDDVCGIVLSCRFNEDILSVWNRNASDHQAVMTLRDSIKRHLKLPHTYLMEYKPHDASLRDNSSYRNTWLRG

SEQ ID NO: 69315 - protein, 209 aa, Triticum aestivum
  peptide (1)..(209): Ceres Seq. ID no. 13598270
NILIEKKARFIPIEEDQKGPNPLPSPRHASPGPFLVSLSLNTPPSRPNRRTRARHGAGGGEEGARAGGAAAAVARPGRGRAARRRRGGGRGGGGGERAPQPRAQGRPPSPQAQARALVHPPDARDEVAVVRGQHQKDRRFQHCRVVLGLLLPPRTPVLPPEPHGPASFQRGCPSTLGGSCKSEWWQVDYTVQEGCFWAFLGGFGAGSSG

SEQ ID NO: 69316 - protein, 206 aa, Triticum aestivum
  peptide (1)..(206): Ceres Seq. ID no. 13598271
HPNRKKSTVHPDRRGPKRPKPTPIPSSRVSRTLPRLSLSEHPTQPTKSPHEGAPWSRRWRGRCPSRRSSCSRRTPGPRTRRPPPSRRRTRRRRRRASAATASSRPASIPSGASSCSGTPAGRPGRGRSRTRTTSKRSSISALSSRSGFATATSHARPPSRAPRTCIFSKRVSVHSGRILQIGMVASGLYGSRRLFLGVSGRIWCWF

SEQ ID NO: 69317 - DNA, 1427 bp, Triticum aestivum
  misc_feature (1)..(1427): Ceres Seq. ID no. 13598277
ccggacccaaacaaacaaccctagccttccgcgtcgcccacgcgcgcctcgcctccgccgcttttctctccgccccggaaacagactcgccgcctcccatcccattgccgtcctcctcgccggccgatggcgctggagacgcggaagctctacgtcggcggcctcccgccgtcggcgcagcaggaagaactccaggagcacttcagccgctacggcgaggtgctgcgcgtccgtgtcgtccgcgactgggagacgggccagtgccgcggcttcgcgttcgtcgagtttgccgacgacgagggcccgcgcgccgcgcttcaggagaaggagaaggccaaccatgtcttcggcgaccgcacggtggatgttaaacgagctcggaccaggccaatgcgataccaaaatgagcaatcattctaccaatacactttaaatcagagcccaattcagagcccaattcagagcccagttcacaaccagtggtacactcagtcttctagtaacaactcatatgctggtaatggtcatagaacttgtgatccaaacaaggtctttgttggtgggctacgaggtaatgttaccaaggagcacctccagagctattttgagaagtttggtagaataacagatgttgttgtgatacgcgagggggctagtcagagatcaagaggctttggtttcattacatttgattcagaggaggctatggtaaatgtcttggagagtaaattccatgacttgaacggtacaaaggttgaaactaagagagctattcccaagggtcatagctactaccaggataggctacaatataatcctatgatatggaatggcaacaatcctcccattggctttgctggagcatacccacctcacatgcagcatattgttaataatcattatgtgatgcctatgccacaatacatgtgcttaccagagtatgtctacatgatgaatggaggagtccccttgacaaggcaaggttcactctatacaggctacggaacacaaattggatatggttatgatcatgtgaatacaaatcgttttggtgctcaacttggggaagctaaaagtgataacaaattgattgaagacataacagagcaacaagtggacctaccagctaccaggcaagaaactttgggcatggatgaccaggctactgttacaacattgtaatgatggacagcaacttgttatctgggaactcggcaactgtgaagaacttgagatgaaattctttggtgacaatacgtgtgtggaaatcctgcgttactttggaccttgtgtacattgcaaccggcaatagaccctcccgcaccatgtttaaactctatgttactgccgttccattttttttggtgacgaacctgttttgaaattggtctgggttacacatgttacctgtgcgtggttatctgctc

SEQ ID NO: 69318 - protein, 351 aa, Triticum aestivum
  peptide (1)..(351): Ceres Seq. ID no. 15222288
MALETRKLYVGGLPPSAQQEELQEHFSRYGEVLRVRVVRDWETGQCRGFAFVEFADDEGPRAALQEKEKANHVFGDRTVDVKRARTRPMRYQNEQSFYQYTLNQSPIQSPIQSPVHNQWYTQSSSNNSYAGNGHRTCDPNKVFVGGLRGNVTKEHLQSYFEKFGRITDVVVIREGASQRSRGFGFITFDSEEAMVNVLESKFHDLNGTKVETKRAIPKGHSYYQDRLQYNPMIWNGNNPPIGFAGAYPPHMQHIVNNHYVMPMPQYMCLPEYVYMMNGGVPLTRQGSLYTGYGTQIGYGYDHVNTNRFGAQLGEAKSDNKLIEDITEQQVDLPATRQETLGMDDQATVTTL

SEQ ID NO: 69319 - protein, 263 aa, Triticum aestivum
  peptide (1)..(263): Ceres Seq. ID no. 15222289
MRYQNEQSFYQYTLNQSPIQSPIQSPVHNQWYTQSSSNNSYAGNGHRTCDPNKVFVGGLRGNVTKEHLQSYFEKFGRITDVVVIREGASQRSRGFGFITFDSEEAMVNVLESKFHDLNGTKVETKRAIPKGHSYYQDRLQYNPMIWNGNNPPIGFAGAYPPHMQHIVNNHYVMPMPQYMCLPEYVYMMNGGVPLTRQGSLYTGYGTQIGYGYDHVNTNRFGAQLGEAKSDNKLIEDITEQQVDLPATRQETLGMDDQATVTTL

SEQ ID NO: 69320 - DNA, 808 bp, Arabidopsis thaliana
  misc_feature (1)..(808): Ceres Seq. ID no. 4904750
  misc_feature (1)..(808): Ortholog of  Ceres SEQ ID NO 13599581 as cited in SEQ ID NO 0
aactcgacacatcgagtcaactcgctaccagcactgatcggtttcccaattccgtccaccgtaactgccgtatccagccgttaacggccggctccgaagaagagtcctccgatcataaacggcgcgtttctcgggatccgaaagcgtgcaatacgctgcgtggatcttcatgaaatcgtccgccgacgagttatcccgactatttctcgctacatcgggatgacagatcctggctagtcgccggtaagctgatttgatctcttgactcgtcgagccgacgggaatttcaaggatctcgtagagagacgcggttgctgaaaatcgctgcgggatttggcgtaatctcggtagatcttcggcgcaggtgtaggacgcggtggttgtagaaagcgacggcgagatccgggaaatgcgtgacggtggtgaagtagaagagaacgacggagaagaagaagaagaagaagagagaaatggagtagcgaagaaggttggggaagaagaaagcatcgtgaaacgacggcgtttttgtttgtcttttggtttaagttccgatttgggttttgtgatgcagtgtgatttgagatgagaaattagaaaggtttatttataggggaagaagtgattagtacgtataacgtttagttagcttttaaataattgaagattaggcagattaatgtatcttgtccggttaagcaaaatcgaaccgggttgggtcagtgtgttttcggatcttgagaaagctgagtcagactaaaaggcttatccacagttgtaaataatgggagaagtgagataagattcaacg

SEQ ID NO: 69321 - protein, 58 aa, Arabidopsis thaliana; identical to SEQ ID NO: 268
  peptide (1)..(58): Ceres Seq. ID no. 4904751

SEQ ID NO: 69322 - protein, 56 aa, Arabidopsis thaliana
  peptide (1)..(56): Ceres Seq. ID no. 4904752
LDTSSQLATSTDRFPNSVHRNCRIQPLTAGSEEESSDHKRRVSRDPKACNTLRGSS

SEQ ID NO: 69323 - DNA, 760 bp, Arabidopsis thaliana
  misc_feature (1)..(760): Ceres Seq. ID no. 4904829
  misc_feature (1)..(760): Ortholog of  Ceres SEQ ID NO 12609863 as cited in SEQ ID NO 52056
  misc_feature (1)..(760): Ortholog of  Ceres SEQ ID NO 13661859 as cited in SEQ ID NO 61611
aaaaatttagacaaatatttctttaactccaacacaaaagtacacatagcattaggttattcctaagatttctgggcttctggtcctaaaatcccattcactactgacgtagcgacaagaactccgacgaactcagccgccacgacggctccagcttgtgtcaatccattaaagctaaccgccgtcacgatttccttctctgccgtctctacacctctctccgccgcttctaatcctttctccgccgcatcaacgcctttctccgccgtctcaaagccttctttcacgatctccaccgcttcttcttctgctttcttcagtttctttcttataccaaataacggaatattctccgccattgatgcaggctgaagtcccgtcactaccgtcgctgccgtcaacgaaaataacagattcctgcgagaggcgccggtcagcgagaacgaagaaagcgcgggtttgttagaatgcgccgctcgtgggctaacatgcgcggttcttgcgcaacgcgcctgaagagctccactgccgccgctgagtaaagaaagcgaaacagtcgaagccattttttagatgatctcacaagaaacgaaaaaagctctcagatgtgaaatagaaaatacgaaaagttttgataatatataagataacaaaataatttcattgtcaattgacgtgacacgtcatctccattgagattctttgataaatgggtataaaaaagattataattaaagaataataaaacattttgtacgtt

SEQ ID NO: 69324 - protein, 34 aa, Arabidopsis thaliana
  peptide (1)..(34): Ceres Seq. ID no. 4904830
MQAEVPSLPSLPSTKITDSCERRRSARTKKARVC

SEQ ID NO: 69325 - DNA, 1092 bp, Arabidopsis thaliana
  misc_feature (1)..(1092): Ceres Seq. ID no. 4905118
  misc_feature (1)..(1092): Ortholog of  Ceres SEQ ID NO 12396837 as cited in SEQ ID NO 240
aaaataatattaattttctcggcgaggcttgcagcgtggtcggcagtcagcttctccaatgagagttgtttgcttgggactccgagatctgtggatctattggatgctctgtcttataaagtgtcggcgaaggctctggtctcattatgtttcctgttgcttgtagcggatccgtggttgtttgtctcactctgttttgctagtccggtaagcagactttccaacctttcttcatagcctttttgttagggttagacggaatcgcttttgttgggttcttgagttggctgtaacagtttcagagatagtatcgtttagcttctcttcttcttcgacggtctgggatgttgaaaaggcaatgtctttccggttttagttgtttaagtttcgttttgtctctggctgttttggatagaagatgggattcccattttatgctttttgatgaatgaacgaatgctcgttgtggtgattatctggcctacaagttcttttgtattcttgggagatttctttggttcactctggttcgatcttctgctgctcctgattcttcgagaatggtgttacccggtgtggattttttgctccttgtctctgcatttcagatctgatcgagatctggtcctatggttttgcttctatctaggtgtaaaatgtcgccttgtctccgacgtcaccgtatccggaagaaagtgtgaggttccatgtgtggttctgtctttgcggattatgaagattagcataggagttctgttacttttaggcagtttggcatctttagaggaggattagattatcgatggttggccacgggcatcttcgatatgtactatcaaaggatctcttgaagtatgctttccttgttgggttggtttatggtcccatttggtcgagtgttttgttttggtctgttcttgtagtggggttcttctgctttcattatatgtttgtatcggtttgtagccttgtagtattgtttctttgcttcccttacatagggctttagactccagagatatctttgttttctgctagcatatggttgtaatcttccaaatatccttcatggtttttaataaaatctagatg

SEQ ID NO: 69326 - protein, 116 aa, Arabidopsis thaliana
  peptide (1)..(116): Ceres Seq. ID no. 4905119
MNERMLVVVIIWPTSSFVFLGDFFGSLWFDLLLLLILREWCYPVWIFCSLSLHFRSDRDLVLWFCFYLGVKCRLVSDVTVSGRKCEVPCVVLSLRIMKISIGVLLLLGSLASLEED

SEQ ID NO: 69327 - protein, 112 aa, Arabidopsis thaliana
  peptide (1)..(112): Ceres Seq. ID no. 4905120
MLVVVIIWPTSSFVFLGDFFGSLWFDLLLLLILREWCYPVWIFCSLSLHFRSDRDLVLWFCFYLGVKCRLVSDVTVSGRKCEVPCVVLSLRIMKISIGVLLLLGSLASLEED

SEQ ID NO: 69328 - protein, 78 aa, Arabidopsis thaliana
  peptide (1)..(78): Ceres Seq. ID no. 4905121
KIILIFSARLAAWSAVSFSNESCLLGTPRSVDLLDALSYKVSAKALVSLCFLLLVADPWLFVSLCFASPVSRLSNLSS

SEQ ID NO: 69329 - DNA, 664 bp, Arabidopsis thaliana
  misc_feature (1)..(664): Ceres Seq. ID no. 4906357
  misc_feature (1)..(664): Ortholog of  Ceres SEQ ID NO 12589775 as cited in SEQ ID NO 0
ccaacactcgtaagtagtcctccttcatcattcatgcatatgtatatcagagtgaccattcacggctattaatgggtttcttaattgatcatatatgtgtgtatatatatatatagttattgtagcaactactacggccagtttgcggagcctaccgagatttgcgactggtgccgcagcgacgaccggaagctgagcaacgttgctagacatggcggttcttcttcaaagaagccttcttcttcggttaaatatgaaaatgacttctcaaacagatcggaatattcgcccggccaccggatcaagcataacaataaccgtcacgatcaagtagccaagggcgttgctggagatggaggcggagttacgtcgcctaagacggccacacgaaggtacaagcttctcaaagatgtcatgtgttagttccacctaaacgagaggtattagaagacttactataatcatactactctttcgagactgtgtgattaaattatgtataattagactacggagagagcaaattaaaaaagaaaacgtcgttgtttgttttcatccttttttcctttttactttgtgtttatatatatgaaatgaatgtgtgtttggcgtgagcttgtgttttcttaatcaccatataagctattaataactgcaatttgcg

SEQ ID NO: 69330 - protein, 40 aa, Arabidopsis thaliana
  peptide (1)..(40): Ceres Seq. ID no. 4906358
MAVLLQRSLLLRLNMKMTSQTDRNIRPATGSSITITVTIK

SEQ ID NO: 69331 - protein, 33 aa, Arabidopsis thaliana
  peptide (1)..(33): Ceres Seq. ID no. 4906359
MCVYIYIVIVATTTASLRSLPRFATGAAATTGS

SEQ ID NO: 69332 - DNA, 997 bp, Arabidopsis thaliana
  misc_feature (1)..(997): Ceres Seq. ID no. 4907033
  misc_feature (1)..(997): Ortholog of  Ceres SEQ ID NO 12466401 as cited in SEQ ID NO 20698
gaattagacacattttaaagaagtttcagattttagaacttacagagccagagccaatagtgatctgcgagaagctaagatcaatcggagaagaagtgacatgaacaccaaagaaagtaccagtgttacggtacaacattctcagtgtcgcgttcatagtgatcatatcagttcctatacctccagcatcttgtccagcttgaaccttaagttgctcaaacgttatactctgcaaaattcaattctacaaacgtaagcacgactctagatctgaaatctgatctcgatctactaagtcaactctcacaaaccttaacagagatcttaggtttctgaggtttagcagctgcataaagaatcaaagagaagaaagcaaagagtagagagaatccaacaatgaaagctaaaacataacatcgacgaggcaaagcttcttgttctctatctccatcatcaagaagaccttcttcttcaatcatagcgaactgtttttctccagcgtggcccttacgttttgagccgttgatcttggagaagcggcttgaggaagagtgagaatgtggtggagatcccatcgggctggtgagtaccggtgttgagtggaatgatgttgctgttttctccccatcgtgggagtcacgtgatggagattggacgaagtaggctggtcgacggggagatctagtcggcgatgaagctgagaggcttgtcacctcggagtcggtcttcgcgtgcatcttgagattggaatggaagatgaacaagtagaagatgagaggttatgtgatgtttgtatttatgtattgaattatttagtcaatgagtggatttgagggccatttgcccattgctttgtatattaccgtaacgcattatagcatcatgatcgcttttttttttttttttttaatacgattggtaatcaaaatttaagtcacctagtatatagttgttgaaataggcaaaaagatatttgtagtaactttttgactttttt

SEQ ID NO: 69333 - protein, 51 aa, Arabidopsis thaliana; identical to SEQ ID NO: 257
  peptide (1)..(51): Ceres Seq. ID no. 4907034

SEQ ID NO: 69334 - protein, 33 aa, Arabidopsis thaliana; identical to SEQ ID NO: 258
  peptide (1)..(33): Ceres Seq. ID no. 4907035

SEQ ID NO: 69335 - protein, 37 aa, Arabidopsis thaliana
  peptide (1)..(37): Ceres Seq. ID no. 4907036
MSGFEGHLPIALYITVTHYSIMIAFFFFFLIRLVIKI

SEQ ID NO: 69336 - DNA, 1231 bp, Arabidopsis thaliana
  misc_feature (1)..(1231): Ceres Seq. ID no. 4909962
  misc_feature (1)..(1231): Ortholog of  Ceres SEQ ID NO 12394606 as cited in SEQ ID NO 201
aggagcctctgtaattttgtagtagtctgtccgattcttctcaacgatttttgtattcatcgagtcaattgttcctgtgttttcattgattagatcttgtgaatatagtctttatagctttggttagagttttcttattggttaatgatgataaatccaaaggcttgtttttcaaacattcgcagtggccgcctaagagctttcgcctttcgccaggcttgagagttaatgctgttttatccttccttggatgtctgaaacttttgtatctaaacctgtattgttttgttttctattagggttttagatttgggactaagttattcaatgtcccattagcagaattgatttctcttagtgcttaataggattgaacaaagtccctcaaatcttgatccatctgtcactttgtcagcagtcttaattggtttcttgctgatcattatatgatgggaaataacatataatctcgattttgattaattggtagaattgcttaatattggtcgatgaggataagatgaaggcttgtttctcaaaacattcgcagtggccgcctaaggctttcgcctttcgccgggcttgagagcttatgatgtttttatccttccttggatgtctgagaccaattatgttttagttagatgattgttgctgttagttttcggttgatgaggattatattaaggcttgtttctcaaaacattcgcagtggccgcctaaagctttcgcctttcgccaggcttgagagctaatgcagctttatccttccttggatgtctgaaaccgatgaatgttttaattctcgtttttatgtttttgtctgtaagaaagatcaatgatgataaacttaaggcttgtttctcaaaacattcgcagtggccgcctaaagctttcgcctttcgccgggcttgagagttaatgcagcttttatccttccttggatgtctgagatctttattcactctatcgattatcttgtctgtttaggttattccttctagtagattattatcgtctattttttgtgttgaatttgcaggtaatttcttggtggtagcttcttcgctttactggcttttggagaaagagttccttacgtttcctgtaatttcctttaatctgtaaaaatcattgtcagatttatttacaatctgtaaagagttctttgttgtaaacaattttgttcattggtgatgaaattttgttctcattatgaattttatttgtg

SEQ ID NO: 69337 - protein, 41 aa, Arabidopsis thaliana
  peptide (1)..(41): Ceres Seq. ID no. 4909963
MNVLILVFMFLSVRKINDDKLKACFSKHSQWPPKAFAFRRA

SEQ ID NO: 69338 - protein, 36 aa, Arabidopsis thaliana
  peptide (1)..(36): Ceres Seq. ID no. 4909964
MIVAVSFRLMRIILRLVSQNIRSGRLKLSPFARLES

SEQ ID NO: 69339 - protein, 33 aa, Arabidopsis thaliana
  peptide (1)..(33): Ceres Seq. ID no. 4909965
MFLSVRKINDDKLKACFSKHSQWPPKAFAFRRA

SEQ ID NO: 69340 - DNA, 722 bp, Arabidopsis thaliana
  misc_feature (1)..(722): Ceres Seq. ID no. 4914446
  misc_feature (1)..(722): Ortholog of  Ceres SEQ ID NO 15174329 as cited in SEQ ID NO 0
attcaaaagtgtataatttggaaactggaatattctttcatgggaagtctggccgaagaaggcggcgacctccttcttcctcgtggcggtgtctccggtggtgccaaaaccggggaaggactttgcagcggtgataaaggcgttgtaagtgtagaaacctctagcaggacaagcggcatcattcctatgcttaagcatatcatcgaactgagaacttgaaatgatgcccgaaagatcgccggtgggtccaggaggagtaccaccgggagtgcactggctttggcagccaggctgcttacagtatggttcggtgttaccgcaccagccgaactcgctgcagcatagaccgttggggcagagtgctcctccagcttggcgaccacattgctcggccgaggataatgataggagaagtgaaaagatgagaaagagaaaaagattagtcttcattttgttcaatgttctatggttttctttttgtggaggcatgaaagatatatatagatccaattaatgaatgttttatcacatcaaattctatctttttccatagtttattgtttgttatgtctatggagtgtggctatggggaacaaacagtatttggtaggtttgtttttgattatatttattttccttccgtcattgttgctaggttagatattgatttgtttttttgggggattatcatgttaattccaagtaatgagaactttctatgt

SEQ ID NO: 69341 - protein, 97 aa, Arabidopsis thaliana; identical to SEQ ID NO: 308
  peptide (1)..(97): Ceres Seq. ID no. 4914447

SEQ ID NO: 69342 - protein, 96 aa, Arabidopsis thaliana; identical to SEQ ID NO: 309
  peptide (1)..(96): Ceres Seq. ID no. 4914448

SEQ ID NO: 69343 - protein, 72 aa, Arabidopsis thaliana
  peptide (1)..(72): Ceres Seq. ID no. 4914449
IQKCIIWKLEYSFMGSLAEEGGDLLLPRGGVSGGAKTGEGLCSGDKGVVSVETSSRTSGIIPMLKHIIELRT

SEQ ID NO: 69344 - protein, 59 aa, Arabidopsis thaliana
  peptide (1)..(59): Ceres Seq. ID no. 4914450
MGSLAEEGGDLLLPRGGVSGGAKTGEGLCSGDKGVVSVETSSRTSGIIPMLKHIIELRT

SEQ ID NO: 69345 - DNA, 1520 bp, Arabidopsis thaliana
  misc_feature (1)..(1520): Ceres Seq. ID no. 4944075
  misc_feature (1)..(1520): Ortholog of  Ceres SEQ ID NO 15178797 as cited in SEQ ID NO 1152
ataaggaaatcagggtttttctcttctttttttttttgtttaaaccaatctggttttacttttcaagtttggatataaacccaaatcgaatcgagaaaccataccaaaccactcagagattccgttatccatatttcccctgtttttccattaaggtaggattaatccatcaaataaaacattttgaaaatgtgctatgaatacatcaaatgagaggtttggttcatgttttattaatcaatccgaataacattacatatttgtctatattattgactcaaatatattttttcgtaatcctagagataagcttggtttacttgcaaatttcaagaggagcaccacacaaacacttgttgtgaaaataggaataagaatcaaatgtctgaagtttccctccagttgggatgtgtccacacagtttgttgtagctaacattgaagaactgaagaggagcttcagtccactgcaccggaatattcccagtgatcccattgtggttcaagtccaagataccaagtgttttagggatatcaacctttgagatatcgaactggaacatgtttcttgataagtcaatagaccaggttgttttgttggaaccaaacaacatcgaagcatcaccttggagcttgttgcgggataaatcgatccggttaaagtcgatgttgcctaatgatttgggtattggaccggagagctggttatgtgataggcgaaggtcagggactgttcctggaaacgacccaaatgactctggtatggaacctacaacataaagatcgttgtttagacaagacactgaatgatgtaataaaggaaaagatcgttctttacctgtaagtttgttcctgctaagttcaagagccaagattttaggtaacgtagagagagaacttggaatggaaccagagagatcattgaaggaaagttctaagaactcgagattcttgagctgacttataaagtcaggaattggacctgtcagattcgtccagctgagcctgagcattcggaggttcttgagtttggcgatggtgggttggattgtaccggtgaggttagagagtttgcggaagacaagggtctcaagatacggcaagtcaccgacttcagccgggatctgaccggagatctggccggagaatatggttaaggcggtaacacggtggttaacggtggcgtcgccgcactcaaggcagtaccaggagcaacagtcggtttgagggtcccatgaagcgaggtgataagggttgtttagagatttcttgatcttgaggagggtgtttttgtcattttggttacagagatctttagacaaacaggtcgtgaggaatgtgaacaagaacaagagacacaatgtcgctgtcttatccatggtgttggttttgaattttgatggaaagtgttagtgatacatatacatactatatagtgagtgatatagacttagagagacggattcgatttgatctctgtttccacatggaccgtaataatagtcaatacatatcatatag

SEQ ID NO: 69346 - protein, 72 aa, Arabidopsis thaliana; identical to SEQ ID NO: 301
  peptide (1)..(72): Ceres Seq. ID no. 4944076

SEQ ID NO: 69347 - protein, 65 aa, Arabidopsis thaliana
  peptide (1)..(65): Ceres Seq. ID no. 4944077
KEIRVFLFFFFLFKPIWFYFSSLDINPNRIEKPYQTTQRFRYPYFPCFSIKVGLIHQIKHFENVL

SEQ ID NO: 69348 - protein, 55 aa, Arabidopsis thaliana; identical to SEQ ID NO: 303
  peptide (1)..(55): Ceres Seq. ID no. 4944078

SEQ ID NO: 69349 - DNA, 650 bp, Arabidopsis thaliana
  misc_feature (1)..(650): Ceres Seq. ID no. 4955540
  misc_feature (1)..(650): Ortholog of  Ceres SEQ ID NO 12396837 as cited in SEQ ID NO 240
aaaataatattaattttctcggcgaggcttgcagcgtggtcggcagtcagcttctccaatgagagttgtttgcttgggactccgagatctgtggatctattggatgctctgtcttataaagtgtcggcgaaggctctggtctcattatgtttcctgttgcttgtagcggatccgtggttgtttgtctcactctgttttgctagtccggtgtaaaatgtcgccttgtctccgacgtcaccgtatccggaagaaagtgtgaggttccatgtgtggttctgtctttgcggattatgaagattagcataggagttctgttacttttaggcagtttggcatctttagaggaggattagattatcgatggttggccacgggcatcttcgatatgtactatcaaaggatctcttgaagtatgctttccttgttgggttggtttatggtcccatttggtcgagtgttttgttttggtctgttcttgtagtggggttcttctgctttcattatatgtttgtatcggtttgtagccttgtagtattgtttctttgcttcccttacatagggctttagactccagagatatctttgttttctgctagcatatggttgtaatcttccaaatatccttcatggtttttaataaaatctagatg

SEQ ID NO: 69350 - protein, 70 aa, Arabidopsis thaliana
  peptide (1)..(70): Ceres Seq. ID no. 4955541
KIILIFSARLAAWSAVSFSNESCLLGTPRSVDLLDALSYKVSAKALVSLCFLLLVADPWLFVSLCFASPV

SEQ ID NO: 69351 - protein, 68 aa, Arabidopsis thaliana
  peptide (1)..(68): Ceres Seq. ID no. 4955542
MVGHGHLRYVLSKDLLKYAFLVGLVYGPIWSSVLFWSVLVVGFFCFHYMFVSVCSLVVLFLCFPYIGL

SEQ ID NO: 69352 - protein, 35 aa, Arabidopsis thaliana
  peptide (1)..(35): Ceres Seq. ID no. 4955543
MRVVCLGLRDLWIYWMLCLIKCRRRLWSHYVSCCL

SEQ ID NO: 69353 - DNA, 673 bp, Arabidopsis thaliana
  misc_feature (1)..(673): Ceres Seq. ID no. 4975571
  misc_feature (1)..(673): Ortholog of  Ceres SEQ ID NO 13648511 as cited in SEQ ID NO 179
aatgatgggcgactgtgaatcatatagggtgaccattgccagcgtttgagctcgtcgtgtgccgtcgacgttcccagcggaagaagcacatctgatggtccaagagatactcctgccatcaacgaaaaccggtgagaagaaaccaaaggtggtgttggtgctagtccagatctagagctttttgataagttgatgaagtcttgctctgatgtttgagaagaggagctgttggactgttgtgaattttcttgttttgggttcgaagacagagatgcatccaagatctgagtcagatcggagccaatagagcatcgatatactcttccgtcacaaagaaaactttcagtgaagaagctcacataaaaaaggagatttagatattttgagagatttgagataacggaggaagattcaatgaagataaagcttatatagaacacatgaaggttgatgggagttgataagtcccgacgccggcaatcggaaccacccccggcgtcagagagcatggttgtcgagagtgtctcgatttcggtgcctaggagctttttaagtcaccaagactagaaaaaaaaattcacatgttatttttgtacaaatactaaaatgtaatactagttgaactttacatatatgtttatgaaggcaaatcttaacaaactcaaagatttgt

SEQ ID NO: 69354 - protein, 38 aa, Arabidopsis thaliana
  peptide (1)..(38): Ceres Seq. ID no. 4975572
MGVDKSRRRQSEPPPASESMVVESVSISVPRSFLSHQD

SEQ ID NO: 69355 - protein, 32 aa, Arabidopsis thaliana
  peptide (1)..(32): Ceres Seq. ID no. 4975573
MFEKRSCWTVVNFLVLGSKTEMHPRSESDRSQ

SEQ ID NO: 69356 - DNA, 819 bp, Arabidopsis thaliana
  misc_feature (1)..(819): Ceres Seq. ID no. 4996238
  misc_feature (1)..(819): Ortholog of  Ceres SEQ ID NO 15179609 as cited in SEQ ID NO 0
acatcatctgcaataacttgagcttctttagtcgttgggaaaacacctcctccttcaatacatttatcaacatcaaattcatctctccgactaaaataagcattccctttcttacctacacttatcacaacacagtctattcctctctgcttcaactcttgaactcgcagagtagctttcttggtcactgcattgttgaaaccaccacacaatcctttatcgccagtaacaacaaccaaagcaactctcttcacgggtctaacaatgctcagaggaaaatcaatgtcttctaattgagcagattggttaattgagtagagaatctccacaagagtttcagtgaaaggtctaccctttatgactgcatcttgagctcgacgaactctagctgccgccacgagtctcatcgcttccgttatcttctgggtattcttcacactgtcgattcgttctcgtaactctcggattccagctcgaatttgaattgagggcaacggagatctcgacgaaatccggtttggtgtcagtgattgaaacggataataacgaactggtttcaaggtagctatgaaagagtaggactctgagctcgaagccgaattcgaattcgaaggagacgacaagagccaagaggtcgagatcgaacctgtcattttcgtttgggaaagaagaccctgaacttgagaggtttaagatttcatcttctcgtgaagaaatgagcaaagaaagagaacttgaggggttttctgtaattatcatgtttattaggggtcagtatataaaaattactacaaaagtcaaaattagagtttttgtttt

SEQ ID NO: 69357 - protein, 96 aa, Arabidopsis thaliana
  peptide (1)..(96): Ceres Seq. ID no. 4996239
IICNNLSFFSRWENTSSFNTFINIKFISPTKISIPFLTYTYHNTVYSSLLQLLNSQSSFLGHCIVETTTQSFIASNNNQSNSLHGSNNAQRKINVF

SEQ ID NO: 69358 - DNA, 1400 bp, Arabidopsis thaliana
  misc_feature (1)..(1400): Ceres Seq. ID no. 5671021
  misc_feature (1)..(1400): Ortholog of  Ceres SEQ ID NO 13656435 as cited in SEQ ID NO 65853
gtggcatcttaatcaaattcttcttcgccttcactttcaattgtctctccaatatcctcaccagatctgaaaccggcaccggcgacgtgtttccgaggttaaacactctcaattgcgccggacctctcttcttccctccactccctgtactcttctccgccgtatctagcgccgctaaacatcccttcactatatcgtctatgtaagtgaaatccctagccaccgttccgtgattcgccgattcgaatatcgaaatcgatttgccttttagaatatctttagtgaagaagaaatacgccatgtctggtcttccccaaggtccatacacggtgaaaaatcttaatccggttagagataatccatagatgtggttgtaggtatgtgcgatctcttcgccggcttttttagtggcggcgtataaactcgccggttgatctgttttatctttctccgagaacggaactttggtgttgagtccgtagacggagctagacgaagcccagactatagcaggttgtggattcacagatttgcagatctcgaggagattgacgaatccggcgatgttgctatgaacgtacgagctagggttttccattgcgtaccgtacaccagcttgagctgctaaatgcataacgtgtgtgaaggagacgatcttgaatagcttacggagtaattcgacgtcgtttatgtctccttctacgatgaagatcccacttctctcgagtaaagctcgtcttgctcgtttcagagatggatcgtagtaatcgttgaagttgtcgaggccgattacgccgtctccgcggcgttttaatgcggcggagacgtgtgttccgacgaaaccagctgctccggttactaaaactgtgattccgttgtttgttgaggttcggattcgagctgaggatctgagacgtttttcccaagctggtcctccgtaggtgttggttcggagtgaacggcgagatggatcggacggtgaagaagggttaatggacggtggagatcggaggaagagtagagagatgagacagaggaggaagaaggagaaaaatgcaaactttgtgagagaagattggaatctgagacgatgcaagtaggaagatttctccatcttgaatttgcctgggcttgaagaacatggggattgaagattttagagatccaaatcatagggaaaatatgaagaagagagtcaaaaaaattactgtaaaaatttgttgactcttctaaagatttgttgtcgagtcttgaaatttgattggtgagatactaatactccaagattttcgggaagccactcgtcccaaaagttttgaatttgaaccaaagttttaaacttttgttaatagatttgttttgcggatagttgctaaatacaaaaatggactctaaatttg

SEQ ID NO: 69359 - protein, 67 aa, Arabidopsis thaliana; identical to SEQ ID NO: 250
  peptide (1)..(67): Ceres Seq. ID no. 5671022

SEQ ID NO: 69360 - protein, 35 aa, Arabidopsis thaliana
  peptide (1)..(35): Ceres Seq. ID no. 5671023
MDGGDRRKSREMRQRRKKEKNANFVREDWNLRRCK

SEQ ID NO: 69361 - DNA, 524 bp, Arabidopsis thaliana
  misc_feature (1)..(524): Ceres Seq. ID no. 5677702
  misc_feature (1)..(524): Ortholog of  Ceres SEQ ID NO 15226744 as cited in SEQ ID NO 61720
atttatctgcagttgctggttattgtttgcatgtattcaataatgtttatctggttcactgaaactgtttttttttttggcagtcattgttttacaacgcgcaaacacaactcctttcaagacctgcagttgtggagaaaatagtcgaacttggaacagtctcgttggggaactcatatcaatcggttcttaaatccggcttcagcgacaaaaaatcggatcgtgcaaccagagtttccttcaagtatagcgcttcaagaggggtttatggtacaccaaccttctacgttaacgggtttgtattgtctgatgctgcttccccttcaaattttggaggatggaagaaaatcattgatcctctggttcaagcacatgagatggaagataacttcattcccttcctttgaagattttaagtgcttttgctgtgtcaattgtcatggtataatactatctgtaatgtatagactttctcaaaacctgtatgttgctcattgtaaatttgtaataaaggaaagtgatcc

SEQ ID NO: 69362 - protein, 85 aa, Arabidopsis thaliana; identical to SEQ ID NO: 261
  peptide (1)..(85): Ceres Seq. ID no. 5677703

SEQ ID NO: 69363 - protein, 71 aa, Arabidopsis thaliana; identical to SEQ ID NO: 262
  peptide (1)..(71): Ceres Seq. ID no. 5677704

SEQ ID NO: 69364 - protein, 50 aa, Arabidopsis thaliana; identical to SEQ ID NO: 263
  peptide (1)..(50): Ceres Seq. ID no. 5677705

SEQ ID NO: 69365 - DNA, 1678 bp, Arabidopsis thaliana
  misc_feature (1)..(1678): Ceres Seq. ID no. 5678455
  misc_feature (1)..(1678): Ortholog of  Ceres SEQ ID NO 14315257 as cited in SEQ ID NO 52552
  misc_feature (1)..(1678): Ortholog of  Ceres SEQ ID NO 13597843 as cited in SEQ ID NO 64850
atcttagattcaagagatattcttagtgacgtcttgaataaactttagaagagcaacgtgcgaagatccaccgtccattaaagctacgtgactcttctcgctcatctccttcactctactcctcacgtcactatcctgctccatcaaacaccggatccctctctctatctcctctgccgtcatcaactcatcatccgccgccatgaaatctcctcggaaactatttcggacctccaccgctagccctagctcctcaaccatctcgaacgcgttaacttgttgctctgcgtaaagcggccacgtagccatcggaactccgaaccatagactctctagcgtcgagttccatccacaatgcgacacgaaccctccgatcgcaggatttgctagaatggcgctttgtggagcccaacctacaatctttcctatctctgccgtccgttccaagaatccttccgggagaatttcctcaagattcgtaaattcttcgggaggtcctatcgatccttttggttgagcacgacgaagagaccagacaaagcggtgaccacttcgctcaagcgcgattgcgatttctttagcttggccctcacggaaacctcccatgcttccgaaacagaggaaaacaacggatttacgtggctgctcgtctagccaccgtaggatctccgattgcttatcgtcagatgaatttggaccgttgattttaagattcataaccggtccaactgtgtacaccgtaggcagaggactatctacgccggagaaaaacttcatagcttgaggctcaagctcagcgaatgtatttaccaaaatacctttagtttctcggaatcttctggtttgtctaaacataaccggtaaccactccttggttaatagaaccgaggggaaacacttaaccggtaaaggacgagtcaaacaaggaacttccagctcagtagtgtccgagtccttgaggtcactaacgtcatagttcttaacgtcgtaaaggtattcaacatgaacttgcaatccaagaaacgttgcgttggatgtgtaaaacatgtaactgggaacaccaaactcattagcgacatcaatcatcatcatgcaaaacatatccaccacgaatccagcaagacgcgacggcgaatctggtggacccgggtcagtaagtttttccaccgtggctttgacctgcggcttgaagttatcaatgtagtcgaaaaaatgtggtttggtgtcatcggagtctggtttatcagggacggagagaacgttgtagctaagacgttcttcagaatcagaggagagagaagcgatgtaagaagaagagttactgctactaaatccatgcatctgagggatgatgatgatggtgatggagagatggtcgtcacggtcaacatgaagcttagctacctccactaatggccggagatgtccgtcaccaggtgatggttgaagatgtttcggtgaagagataagattcgtctttagcatacatgacatgtggtacttggacatctactgatgttagtttaacttttgtcacaggccatacaatcttgatcttcagacttcaacgttagtacgttacgttagtatttttttcttttaattgtcagctatatactgcactatcatacaattaaaggtaaccgacgtttaattcattgagattttgttggcatgt

SEQ ID NO: 69366 - protein, 136 aa, Arabidopsis thaliana
  peptide (1)..(136): Ceres Seq. ID no. 5678456
MNLQSKKRCVGCVKHVTGNTKLISDINHHHAKHIHHESSKTRRRIWWTRVSKFFHRGFDLRLEVINVVEKMWFGVIGVWFIRDGENVVAKTFFRIRGERSDVRRRVTATKSMHLRDDDDGDGEMVVTVNMKLSYLH

SEQ ID NO: 69367 - DNA, 1135 bp, Arabidopsis thaliana
  misc_feature (1)..(1135): Ceres Seq. ID no. 5679824
  misc_feature (1)..(1135): Ortholog of  Ceres SEQ ID NO 13648449 as cited in SEQ ID NO 171
atgcgtcttcatcgctgctcgccatcgccggccaccggggttgccgctgatgcgattcgatccagtgggaacttttgtcaccttgcctcttctctctttcctaacactcaaatctctcctcagccttcagatagatagtctttgaagcaaaccaaaggtgaaaactgttctgcagttggtgatgacaagaagaatcacaagcttttgacttatgtttgagaatcatcatgggacaaggcttccgcaatcgaaatgggactttttcagcagcatcctagaaagactctttgcctttatcgcttcacctagacaacgagcaaggataactccatcctccatggctgagcaacctccttgtccgatatcaggagtcattgggtgaagtgcatctcctgcaacgcacacgttgtcttttgtgatgtttgaccatagcagttcccatggaggtcggtacttcagttgagacatcaccatgctatcaagatcagtggtctccaccacattcttaatgttttcagagaagaagaaacatactcggattctggaaacagcatctctgtgggaggagttcctgcagaaattgttccaaccacccatctgcagcaaaatcaaagatgagtccccttttttactgagctgattatatatgaatagtaataatagtgttagtttgatacccttcaaggcgatcatggagactgcgaatatgctgagaaacgccgagagcttccatggccttccaagcattgaaccaagtggtaaatgcaaatcctgtcgctctcagtgtctccgaagattccagcaccatgcttctgatcccaagcctgtgacacacaccactttagttaacttactctgcttaataacaactcaaaaggcacgccacacacacctgtgtagtccaacagcggtggaaaggccggagataccggcgccaacgatgatgatatctgggctgccttcttcttccatggtgcgttgatgatcttagaaagaaagctctgtttttcttcctctctagtatttatttttaactttcaagtaaacaaaaagaaatgtggttgaagttggcaagtcaaacaaggcaccccgttctaggcaggcggctacagtcatcaaatatcgaatctttaat

SEQ ID NO: 69368 - protein, 111 aa, Arabidopsis thaliana; identical to SEQ ID NO: 295
  peptide (1)..(111): Ceres Seq. ID no. 5679825

SEQ ID NO: 69369 - protein, 96 aa, Arabidopsis thaliana; identical to SEQ ID NO: 296
  peptide (1)..(96): Ceres Seq. ID no. 5679826

SEQ ID NO: 69370 - protein, 91 aa, Arabidopsis thaliana; identical to SEQ ID NO: 297
  peptide (1)..(91): Ceres Seq. ID no. 5679827

SEQ ID NO: 69371 - DNA, 1627 bp, Arabidopsis thaliana
  misc_feature (1)..(1627): Ceres Seq. ID no. 6432518
  misc_feature (1)..(1627): Ortholog of  Ceres SEQ ID NO 15177258 as cited in SEQ ID NO 51386
aaacaaaaaaaaaaacagagagagagatacttacggcttgggggataccgaggatggcgaagagagttaaagcaccagctgtgacgttaccaggtggacctgttttagcgccgccgtgatctcgtcggtgattctcagcttgtttcgtaaccacaaccgtcatggccaagcaaatggcgaggatgaagttaacaataccccaaagccttttagctcctcccaatttccgaccaatccattcaacaccaagagacatgaaaccaagaacaatagcgttaagcataagccccaaagcaccagctctgactccgtcgttgtaaagcttcttagaggctgcggttgcggttgcgtctgagtttcctccgtacacctcacggcccatccaatcagtgtcgaagagaaggaaagggaaccaagcgatccagtttagtgcagtgactataagaagcatccacatgggtctttttagttccttgaaagctccgaagatttctccgaaaaacggaacgttggaggcttttccatcggctgttggctctggcgtccatggcttctccttcacgtaacagagagatacgaaagtgactatgaggagaagcgttatggataggaaaaaacacgttttgaggtttgcgcagtagagatcgcatgactcagtcatcgtgaaaggcacaactttgtagagatttctgtaagatcccgcagcgtaacccaaaacgtttccaaccgccatgaaaaacgagaaaaacgcgtttgcggttcgcgttttcttagcgttccctgctgataaatcagccaagaaagctctgcagggtccttgtaaggtgttgttagccacgtcaagaatccaaaacccgagagcgaatatcgctatggctcgcgttttcggcggtttgtcaagctgatcgcccatgctgtgacctatatcggcagcgtaaccgataaggaaaacagcaacggtgactaaaccagctccagcgacgatgaagggacgacgacggccgaatcttgaggtgcaacggtcactgtggtaaccgacgataggctgaacaagcataccggagattggaccacagagccaaatcagagaagcccatttatgtgggattccgagtagctgcacgtaaggagtcaacagagataactgtaaagcccaaccgaactgtacaccggcggcaatggaagacaccgatatgatcttacgaagccgttccggctgatctaactcacccgtctgcgtttccaacgcagacgcaccatttgcagctttctccattggatggctgaccatatttgacaaaccaagaaagtaagaaaaaaaagaaatttctttgagagggtttttggtggttgttgcggtggttgtagtggtggaggaagaggaagagtggagaggtatttataggaagagaaggataggattatccgaagaggagacagtgaagttaagagagccttgaggcatagaaaagagaaaacagagctgtgtctatagcgtagggtatcttcgtgacacgtgtctgtcgtatattatttttttctgttttgtatttaattattttcttcttttttagcgtaatatattattttctgtttttggaacttaaatcttttagattttaccttc

SEQ ID NO: 69372 - protein, 57 aa, Arabidopsis thaliana
  peptide (1)..(57): Ceres Seq. ID no. 6432519
MKNEKNAFAVRVFLAFPADKSAKKALQGPCKVLLATSRIQNPRANIAMARVFGGLSS

SEQ ID NO: 69373 - protein, 52 aa, Arabidopsis thaliana
  peptide (1)..(52): Ceres Seq. ID no. 6432520
MAKQMARMKLTIPQSLLAPPNFRPIHSTPRDMKPRTIALSISPKAPALTPSL

SEQ ID NO: 69374 - protein, 48 aa, Arabidopsis thaliana
  peptide (1)..(48): Ceres Seq. ID no. 6432521
MARMKLTIPQSLLAPPNFRPIHSTPRDMKPRTIALSISPKAPALTPSL

SEQ ID NO: 69375 - DNA, 1169 bp, Arabidopsis thaliana
  misc_feature (1)..(1169): Ceres Seq. ID no. 6432908
  misc_feature (1)..(1169): Ortholog of  Ceres SEQ ID NO 15168366 as cited in SEQ ID NO 60199
aagtcttggaatcttcgggacgtttcttgttgctctctttgactttcttgaagtatttgtttatgttttcccatttctctttgcatctctttgagttcctgttgaatcctaaccttctcattcccgctgatatctcttcccacaatggtccttttggtccgttttcttgatatttcgaatcaagattcgtcctcagctttatcaatgcttctatctccactttcggccaccgcgacgagctcgctgaagctgcaggagtcatattctgatcaccaccattgtccgttttcgttgtgtctaacgtcgacacaaccgcttgaattggctgcggaagcggagcaggaggttgcggtggaggagaccgttgaggcggttgctgctgattgttgttattaagctgcattgatggtcgaacttgttgcggctgaggctgcggttgtggctgattcggttgtttctctgacagtttttgaagaaaggccataacagcagcgtcttttgcagcggacatagagcgttcttgagctaagatctcgtgctcgcggttgattctggcaatctcttgaactctccaagactcttctctaaccaatctctcgtgttctcgcttttcaacagcttccaagaatttgcgttgaagctcttcctgtttatcaactacttgtttcatcaaccgctcgaaaaacaccttccatttcctcttccttttcttccttgtagtcgcagttccaccacccatctccatgtcagaagaagtcgaataagaagacgaagacgatgtagaattatccgatagaaaatcaccggagatgtttggaaacgaaggtacattaatctgctgagtatacggaggaattgatgaagaaggaagcgtcggcataactgtcgttaccggaggaggagttgaaaatatggagctgttgttgttgttgttgttgttgttgttgttgttttgctgtggtcgaagaggcgtttgttgttgatgatggtggagtgaggttgtagattgagactcgagagcttctaattgatcaaagaagcgataagttttgccttcggattttccggtacgaccttctttggttcgtttgtggtatttgtaaacgttctcgaatttctctttgcatttctttgcgtttcttatgtaaccatgctccgccattttccta

SEQ ID NO: 69376 - protein, 83 aa, Arabidopsis thaliana; identical to SEQ ID NO: 253
  peptide (1)..(83): Ceres Seq. ID no. 6432909

SEQ ID NO: 69377 - protein, 63 aa, Arabidopsis thaliana; identical to SEQ ID NO: 254
  peptide (1)..(63): Ceres Seq. ID no. 6432910

SEQ ID NO: 69378 - protein, 55 aa, Arabidopsis thaliana; identical to SEQ ID NO: 255
  peptide (1)..(55): Ceres Seq. ID no. 6432911

SEQ ID NO: 69379 - DNA, 264 bp, Arabidopsis thaliana
  misc_feature (1)..(264): Ceres Seq. ID no. 6437954
  misc_feature (1)..(264): Ortholog of  Ceres SEQ ID NO 13646302 as cited in SEQ ID NO 155
atggtgaacacaaaaattgtagccttgttaatggtggtgatgatggtaacaatgggaatggagaacattttggttcaggcaaatcgtcgtcatcatcattctccttccccttttccttcatctgattttgatgatagtggttcaaaatctccttctccttcaccaaaatcaaaagaaaagtcatcaacatattgcatgattggctgttcttttgagaagtgctttcaccatggaaaaagctcaagtaagtttggatctgcttag

SEQ ID NO: 69380 - protein, 87 aa, Arabidopsis thaliana
  peptide (1)..(87): Ceres Seq. ID no. 6437955
MVNTKIVALLMVVMMVTMGMENILVQANRRHHHSPSPFPSSDFDDSGSKSPSPSPKSKEKSSTYCMIGCSFEKCFHHGKSSSKFGSA

SEQ ID NO: 69381 - protein, 77 aa, Arabidopsis thaliana
  peptide (1)..(77): Ceres Seq. ID no. 6437956
MVVMMVTMGMENILVQANRRHHHSPSPFPSSDFDDSGSKSPSPSPKSKEKSSTYCMIGCSFEKCFHHGKSSSKFGSA

SEQ ID NO: 69382 - protein, 74 aa, Arabidopsis thaliana
  peptide (1)..(74): Ceres Seq. ID no. 6437957
MMVTMGMENILVQANRRHHHSPSPFPSSDFDDSGSKSPSPSPKSKEKSSTYCMIGCSFEKCFHHGKSSSKFGSA

SEQ ID NO: 69383 - DNA, 2082 bp, Arabidopsis thaliana
  misc_feature (1)..(2082): Ceres Seq. ID no. 12658521
  misc_feature (1)..(2082): Ortholog of  Ceres SEQ ID NO 12611506 as cited in SEQ ID NO 56600
atggattctgatgtgaggaggaagattaacaacactactcagggttcgtccccttctccgaagccctccaagttctctgtgtaccggaaccctgctctcgccgccgcttccaccgccaacagcatccgtccttcgaaatccgttcttctattcatattcttgctctctatcgcttccgctttctctctcatctccttcatggccggggagaaatggttgaccaatgctttaacattcgggaaaatatcccaagaggcagcttatgtcactgtaaaagcgtggcaggggctggtgactttgttttgtattggagcaatgatggctttgtccaaaggcatatctttgcacagagcaaagtttgctgctcgaggagaaactaaatctttctctaaagaaaccaaagatcagttttctttatcaaatcgtcagcttgaacttcttgggataaagaaaaaagctgaccagagtgtatcagaatttccaaagagtcgtcctgcattgaaacctgcacagtcattggagccgcttgtcccaatacaccatcaaactcttactggttcagctcataagtcttctggtggtggtgataagctgaattcccgtaatggaagccagattagttcatttagcactccctcaaaacaaatgggttcaccgtctatgtatcttgtcccttctagctcaccagtttcttctaaccgtctttcgtcgggtcaggataaggctgtctctagtccttggtctggtagacgaagttctgcaaaagacataactaccgaggagcagcttgagcagcttttggcagaaatagatgagaaaatcactgagtcggctgggaagatgcgtacgcctccaccaacagttgggagttttgccatggctagcccgagtacagttggtggttcaactggtgcatctggggctactaggagtacaccactaagacctgtcaggatgtctcctggcgctcagaaatttacgactcccccaaagaaaggagagggtgatttccccaacccaatgtccttagaaagggctatcgaaggttttattcatctaggtgtctatcctcagatagaagactggcgtgaccgactaaggcaatggtgttcctcagtgttgctcaaacctctgcttaacaaggttgaaaccagtcatattcaggtaatgcaaacagcatcaaagcttggtgttaatgtcacagttagtcaagttggaagtgatttgccaacaaatggaaccgctacaactgccttaccggttgatcgaacgaaggggtggcagccatcttactctctcgatgaagatgctcttcttcaccaattacgcgctaatcttgtacaggctattgatgcttccatgcaaaagctgcgtacagagaaccagcagtttcagcaacagcaacaacaacagcaacagcaagcggcactaatccctgtcatgcaggaatgtgttgatgctataagtgaacatcggaggcttcagggcttaatgaaaggagagtgggttaagggcctacttccgcgcagcagtattccagcagattacacagtgcaaagaatccgagcactcgcggaaggaacttgtgtgaagaactatgagtacaatggaggggcagatactcgtgagaaaaacaagaaatggagcctggagcctccaaccgattctcatctgcttctgtacttgttttgtgccttcttggaacacccaaagtggatgttacatttggaccctagctcttatacagggactcaggcgagcaagaaccctttattcttaggggttctgcctccaaaagagagattcccagagaagtacattgctgtggtatcgggtgtaccttcgacacttcatcctggtgcatgtgtgcttgcagtagacaagcaaagcccacccacatttgccttgtactgggataagaaagtgcagtttactcttcagggaagaacagcgctatgggactctatgttgttgatatgccacagaatcaaggtgggatacggaggtgttgttcgtgggatgaatctgggttcttcagcccttaacatcctccaagttgttgattccgacactgacgattaa

SEQ ID NO: 69384 - protein, 693 aa, Arabidopsis thaliana
  peptide (1)..(693): Ceres Seq. ID no. 12658522
MDSDVRRKINNTTQGSSPSPKPSKFSVYRNPALAAASTANSIRPSKSVLLFIFLLSIASAFSLISFMAGEKWLTNALTFGKISQEAAYVTVKAWQGLVTLFCIGAMMALSKGISLHRAKFAARGETKSFSKETKDQFSLSNRQLELLGIKKKADQSVSEFPKSRPALKPAQSLEPLVPIHHQTLTGSAHKSSGGGDKLNSRNGSQISSFSTPSKQMGSPSMYLVPSSSPVSSNRLSSGQDKAVSSPWSGRRSSAKDITTEEQLEQLLAEIDEKITESAGKMRTPPPTVGSFAMASPSTVGGSTGASGATRSTPLRPVRMSPGAQKFTTPPKKGEGDFPNPMSLERAIEGFIHLGVYPQIEDWRDRLRQWCSSVLLKPLLNKVETSHIQVMQTASKLGVNVTVSQVGSDLPTNGTATTALPVDRTKGWQPSYSLDEDALLHQLRANLVQAIDASMQKLRTENQQFQQQQQQQQQQAALIPVMQECVDAISEHRRLQGLMKGEWVKGLLPRSSIPADYTVQRIRALAEGTCVKNYEYNGGADTREKNKKWSLEPPTDSHLLLYLFCAFLEHPKWMLHLDPSSYTGTQASKNPLFLGVLPPKERFPEKYIAVVSGVPSTLHPGACVLAVDKQSPPTFALYWDKKVQFTLQGRTALWDSMLLICHRIKVGYGGVVRGMNLGSSALNILQVVDSDTDD

SEQ ID NO: 69385 - protein, 627 aa, Arabidopsis thaliana
  peptide (1)..(627): Ceres Seq. ID no. 12658523
MAGEKWLTNALTFGKISQEAAYVTVKAWQGLVTLFCIGAMMALSKGISLHRAKFAARGETKSFSKETKDQFSLSNRQLELLGIKKKADQSVSEFPKSRPALKPAQSLEPLVPIHHQTLTGSAHKSSGGGDKLNSRNGSQISSFSTPSKQMGSPSMYLVPSSSPVSSNRLSSGQDKAVSSPWSGRRSSAKDITTEEQLEQLLAEIDEKITESAGKMRTPPPTVGSFAMASPSTVGGSTGASGATRSTPLRPVRMSPGAQKFTTPPKKGEGDFPNPMSLERAIEGFIHLGVYPQIEDWRDRLRQWCSSVLLKPLLNKVETSHIQVMQTASKLGVNVTVSQVGSDLPTNGTATTALPVDRTKGWQPSYSLDEDALLHQLRANLVQAIDASMQKLRTENQQFQQQQQQQQQQAALIPVMQECVDAISEHRRLQGLMKGEWVKGLLPRSSIPADYTVQRIRALAEGTCVKNYEYNGGADTREKNKKWSLEPPTDSHLLLYLFCAFLEHPKWMLHLDPSSYTGTQASKNPLFLGVLPPKERFPEKYIAVVSGVPSTLHPGACVLAVDKQSPPTFALYWDKKVQFTLQGRTALWDSMLLICHRIKVGYGGVVRGMNLGSSALNILQVVDSDTDD

SEQ ID NO: 69386 - protein, 588 aa, Arabidopsis thaliana
  peptide (1)..(588): Ceres Seq. ID no. 12658524
MMALSKGISLHRAKFAARGETKSFSKETKDQFSLSNRQLELLGIKKKADQSVSEFPKSRPALKPAQSLEPLVPIHHQTLTGSAHKSSGGGDKLNSRNGSQISSFSTPSKQMGSPSMYLVPSSSPVSSNRLSSGQDKAVSSPWSGRRSSAKDITTEEQLEQLLAEIDEKITESAGKMRTPPPTVGSFAMASPSTVGGSTGASGATRSTPLRPVRMSPGAQKFTTPPKKGEGDFPNPMSLERAIEGFIHLGVYPQIEDWRDRLRQWCSSVLLKPLLNKVETSHIQVMQTASKLGVNVTVSQVGSDLPTNGTATTALPVDRTKGWQPSYSLDEDALLHQLRANLVQAIDASMQKLRTENQQFQQQQQQQQQQAALIPVMQECVDAISEHRRLQGLMKGEWVKGLLPRSSIPADYTVQRIRALAEGTCVKNYEYNGGADTREKNKKWSLEPPTDSHLLLYLFCAFLEHPKWMLHLDPSSYTGTQASKNPLFLGVLPPKERFPEKYIAVVSGVPSTLHPGACVLAVDKQSPPTFALYWDKKVQFTLQGRTALWDSMLLICHRIKVGYGGVVRGMNLGSSALNILQVVDSDTDD

SEQ ID NO: 69387 - DNA, 741 bp, Arabidopsis thaliana
  misc_feature (1)..(741): Ceres Seq. ID no. 1809983
  misc_feature (1)..(741): Ortholog of  Ceres SEQ ID NO 15225341 as cited in SEQ ID NO 55222
atgatttcctcaattaaaccggttttaccttccttaactgcaatcgtcggcattgggatctatttcgcaatttggtgggcattgaacggtgtgttcaataactacaacaagaaggttttgaatgcttttccttacttgtggctaactttgacgctttctcttgcttgtggctctttgatgatgcttgtctcttgggtggctttggcgcatacaattggacatgttgaagcgatagtgagatgtgctcttgctgctgttatggagctcaacttcaatatgatagggtttatgggggcaatgatatcgaatttggcgtttgtgtttcgtaacatattctcaaagaagggaatgaaggggaagtcagtgagtgtgatgaattactatgcttgcttatctatgatgtctcttctcattgttactcctttcgccaattctgtggaaggtccccaaatgtgggctgatggttggcaaaacgatgtctctaaatcggaccaaactttgtctagtaagtgggtagtggcacatagtgttttctaccatttgtataatcaagtctcatacattcctcgttgcctcaatcatcatcttccaaaccctcttaaacatgtcaatgccctgggtgctgccatcgcgattcttggaactttcatttattctcagataaaaaatagagtgaagaaaaatcatattctgcttgttctttgtctaggaatgcttgaacctttagtgataactctatga

SEQ ID NO: 69388 - protein, 246 aa, Arabidopsis thaliana
  peptide (1)..(246): Ceres Seq. ID no. 1809984
MISSIKPVLPSLTAIVGIGIYFAIWWALNGVFNNYNKKVLNAFPYLWLTLTLSLACGSLMMLVSWVALAHTIGHVEAIVRCALAAVMELNFNMIGFMGAMISNLAFVFRNIFSKKGMKGKSVSVMNYYACLSMMSLLIVTPFANSVEGPQMWADGWQNDVSKSDQTLSSKWVVAHSVFYHLYNQVSYIPRCLNHHLPNPLKHVNALGAAIAILGTFIYSQIKNRVKKNHILLVLCLGMLEPLVITL

SEQ ID NO: 69389 - protein, 187 aa, Arabidopsis thaliana
  peptide (1)..(187): Ceres Seq. ID no. 1809985
MMLVSWVALAHTIGHVEAIVRCALAAVMELNFNMIGFMGAMISNLAFVFRNIFSKKGMKGKSVSVMNYYACLSMMSLLIVTPFANSVEGPQMWADGWQNDVSKSDQTLSSKWVVAHSVFYHLYNQVSYIPRCLNHHLPNPLKHVNALGAAIAILGTFIYSQIKNRVKKNHILLVLCLGMLEPLVITL

SEQ ID NO: 69390 - protein, 186 aa, Arabidopsis thaliana
  peptide (1)..(186): Ceres Seq. ID no. 1809986
MLVSWVALAHTIGHVEAIVRCALAAVMELNFNMIGFMGAMISNLAFVFRNIFSKKGMKGKSVSVMNYYACLSMMSLLIVTPFANSVEGPQMWADGWQNDVSKSDQTLSSKWVVAHSVFYHLYNQVSYIPRCLNHHLPNPLKHVNALGAAIAILGTFIYSQIKNRVKKNHILLVLCLGMLEPLVITL

SEQ ID NO: 69391 - DNA, 471 bp, Arabidopsis thaliana
  misc_feature (1)..(471): Ceres Seq. ID no. 1810029
  misc_feature (1)..(471): Ortholog of  Ceres SEQ ID NO 13660394 as cited in SEQ ID NO 66895
atggaggagactatactggtcggtgatgacctaatgacgggtcctccatctcctgttatccctcctgaaattgcttcacatgtgcttgaaggtgttgatttgtgcgatgggattttgaggaatctattcctgtgtatgtctatgtatcctcggtttggtttgcaaatcaatgatattgaaccattttgccaagatgagcttgcattgtatcgacaatgtgctgaaaagagggacaaaatattgagagttagacttcaagagagcgaacacaagttaggattgtctatgcccattgaactcgctaaggaaaggattacgcagcttgaagctgaagccacatcttttgagagaaaaagactggagtcactgaagcagggaatggagaacaggaacaaggttgaacatgaacataaccaacaccatgatcagtccccaaaaccttctgctccaaaaagatggttcttttggtga

SEQ ID NO: 69392 - protein, 156 aa, Arabidopsis thaliana
  peptide (1)..(156): Ceres Seq. ID no. 1810030
MEETILVGDDLMTGPPSPVIPPEIASHVLEGVDLCDGILRNLFLCMSMYPRFGLQINDIEPFCQDELALYRQCAEKRDKILRVRLQESEHKLGLSMPIELAKERITQLEAEATSFERKRLESLKQGMENRNKVEHEHNQHHDQSPKPSAPKRWFFW

SEQ ID NO: 69393 - protein, 145 aa, Arabidopsis thaliana
  peptide (1)..(145): Ceres Seq. ID no. 1810031
MTGPPSPVIPPEIASHVLEGVDLCDGILRNLFLCMSMYPRFGLQINDIEPFCQDELALYRQCAEKRDKILRVRLQESEHKLGLSMPIELAKERITQLEAEATSFERKRLESLKQGMENRNKVEHEHNQHHDQSPKPSAPKRWFFW

SEQ ID NO: 69394 - protein, 111 aa, Arabidopsis thaliana
  peptide (1)..(111): Ceres Seq. ID no. 1810032
MSMYPRFGLQINDIEPFCQDELALYRQCAEKRDKILRVRLQESEHKLGLSMPIELAKERITQLEAEATSFERKRLESLKQGMENRNKVEHEHNQHHDQSPKPSAPKRWFFW

SEQ ID NO: 69395 - DNA, 1119 bp, Arabidopsis thaliana
  misc_feature (1)..(1119): Ceres Seq. ID no. 1810688
  misc_feature (1)..(1119): Ortholog of  Ceres SEQ ID NO 13624708 as cited in SEQ ID NO 0
atgaaggtggattttttagtcataaaggttgaaaaactatcttctttgagagttttttatttttttttatttttttttgagagcaaatatgtcgaagatcagaagattaaagatgcaaaattattgcaacttgactttgataccataagattagcaactaatgacttctctccttacaaccatcttggtgaaggtggtttcggtgcagtttataagggcgtccttgattccggggaagagatagctgtgaaaagattgtcaatgaaatcaggacaaggagacaatgagttcgtaaacgaagtctcattggttgcgaaacttcaacatcgtaatcttgttaggcttttaggtttctgttttaaaggagaagaacgacttctcatctatgagttctttaagaacacaagcctcgaaaaaagaatgatcttagattgggaaaaacgttataggataatctcaggtgttgctcgaggtcttctctatctccatgaagattctcatttcaaaattattcatagagatatgaaagctagcaatgttctattggacgatgcaatgaatccgaaaatcgcagattttgggatggtaaaattgtttaatactgaccaaacaagtcagaccatgtttacaagcaaagttgcaggaacttacggttacatggctcctgagtatgcaatgagtgggcaattctcggtgaaaaccgacgtatttagtttcggtgtactagtccttgagatcattaaaggtaagaaaaacaattggtctccggaagaacaaagctcattattcctccttagctatgtgtggaaatgctggagagaaggagaagtgttgaacattgtggatccaagtttgattgaaacaagaggtctaagtgatgagatcaggaaatgcattcacattggtttgttgtgtgttcaggagaatccagggagtagaccaacaatggcttctattgttagaatgctcaatgcaaattctttcactttaccgagacccttgcaacccgctttttactcaggagttgtagactcatcgtcaagagacaacaatcatacaagaaacccgcgtattgcgtctttgaatgatgttacaattacggagttagatcctcgttga

SEQ ID NO: 69396 - protein, 372 aa, Arabidopsis thaliana
  peptide (1)..(372): Ceres Seq. ID no. 1810689
MKVDFLVIKVEKLSSLRVFYFFLFFFESKYVEDQKIKDAKLLQLDFDTIRLATNDFSPYNHLGEGGFGAVYKGVLDSGEEIAVKRLSMKSGQGDNEFVNEVSLVAKLQHRNLVRLLGFCFKGEERLLIYEFFKNTSLEKRMILDWEKRYRIISGVARGLLYLHEDSHFKIIHRDMKASNVLLDDAMNPKIADFGMVKLFNTDQTSQTMFTSKVAGTYGYMAPEYAMSGQFSVKTDVFSFGVLVLEIIKGKKNNWSPEEQSSLFLLSYVWKCWREGEVLNIVDPSLIETRGLSDEIRKCIHIGLLCVQENPGSRPTMASIVRMLNANSFTLPRPLQPAFYSGVVDSSSRDNNHTRNPRIASLNDVTITELDPR

SEQ ID NO: 69397 - protein, 285 aa, Arabidopsis thaliana
  peptide (1)..(285): Ceres Seq. ID no. 1810690
MKSGQGDNEFVNEVSLVAKLQHRNLVRLLGFCFKGEERLLIYEFFKNTSLEKRMILDWEKRYRIISGVARGLLYLHEDSHFKIIHRDMKASNVLLDDAMNPKIADFGMVKLFNTDQTSQTMFTSKVAGTYGYMAPEYAMSGQFSVKTDVFSFGVLVLEIIKGKKNNWSPEEQSSLFLLSYVWKCWREGEVLNIVDPSLIETRGLSDEIRKCIHIGLLCVQENPGSRPTMASIVRMLNANSFTLPRPLQPAFYSGVVDSSSRDNNHTRNPRIASLNDVTITELDPR

SEQ ID NO: 69398 - protein, 232 aa, Arabidopsis thaliana
  peptide (1)..(232): Ceres Seq. ID no. 1810691
MILDWEKRYRIISGVARGLLYLHEDSHFKIIHRDMKASNVLLDDAMNPKIADFGMVKLFNTDQTSQTMFTSKVAGTYGYMAPEYAMSGQFSVKTDVFSFGVLVLEIIKGKKNNWSPEEQSSLFLLSYVWKCWREGEVLNIVDPSLIETRGLSDEIRKCIHIGLLCVQENPGSRPTMASIVRMLNANSFTLPRPLQPAFYSGVVDSSSRDNNHTRNPRIASLNDVTITELDPR

SEQ ID NO: 69399 - DNA, 1167 bp, Arabidopsis thaliana
  misc_feature (1)..(1167): Ceres Seq. ID no. 1811011
  misc_feature (1)..(1167): Ortholog of  Ceres SEQ ID NO 13659759 as cited in SEQ ID NO 67663
atggcaaagagagcgttgttgataggaatcaactatccaggaaccacggaggagctacaaggctgcgtcaatgacgtccatagaatgcataagtgtctcgttgaccggttcggattcgcggaggaagatatcactgtgctgattgacaccgacgaatcttacactcaacccacaggaaagaacatccgtcaggctttgtcggagctcataaagccagcaaaatccggtgacgttttattcgtgcattacagcggacacggcacgagagtcccaccggaaacaggggaagaggatgatacagatgatgatttcagggatttagtggaacaagttccagagggatgtcagataactatcgtatcagactcttgtcacagcggcgggctcattgatgaagctaaggaacagatcggagagagtaccacgacgaagccaaatcgagaatccaaagtttcttcttttgaattcgagtttaaaaactgtttgcatagcatttttgtgaaactgcttgctttttgtggaatcggaagttctcatgtagagacgcgcgagatcgtagaagtaggcgagggagatgaagttgtcagatcaaggtatctgccgttggagaggtttattgaacttctcaaacaacaaactgggcaagacaatatcgagattgggaaaatcagacccaccctttttgatgtctttggtgaagattcgagcccgaagataaagaagttcatgaaagtgattcttaccaagctaaggaaaacaaatgaccaaagtacgctacttggtaagatcgaagaaagtgctcgagggtatatagaagagacgctgaacgatgaacactacatgaaacccgcaatgcaggcacaagtgaagagcgatcgtgagatttatggaggaagatcaagcaacggattgtttcctgaccgagggattctgttgagtggatgtcaaacagatgagacatcagcagatgttaagaagaaaggagaagcgtttggagcgtttagtaatgccatccaaatggttttgtcagagactgatcataaagataagattacaaacaaggaaatggtattgagggcaagagagattctgaagaaacagatgtttattcagagaccaggattgtattgcaatgaccgctttgtgaatgctccgtttatatgctaa

SEQ ID NO: 69400 - protein, 388 aa, Arabidopsis thaliana
  peptide (1)..(388): Ceres Seq. ID no. 1811012
MAKRALLIGINYPGTTEELQGCVNDVHRMHKCLVDRFGFAEEDITVLIDTDESYTQPTGKNIRQALSELIKPAKSGDVLFVHYSGHGTRVPPETGEEDDTDDDFRDLVEQVPEGCQITIVSDSCHSGGLIDEAKEQIGESTTTKPNRESKVSSFEFEFKNCLHSIFVKLLAFCGIGSSHVETREIVEVGEGDEVVRSRYLPLERFIELLKQQTGQDNIEIGKIRPTLFDVFGEDSSPKIKKFMKVILTKLRKTNDQSTLLGKIEESARGYIEETLNDEHYMKPAMQAQVKSDREIYGGRSSNGLFPDRGILLSGCQTDETSADVKKKGEAFGAFSNAIQMVLSETDHKDKITNKEMVLRAREILKKQMFIQRPGLYCNDRFVNAPFIC

SEQ ID NO: 69401 - protein, 360 aa, Arabidopsis thaliana
  peptide (1)..(360): Ceres Seq. ID no. 1811013
MHKCLVDRFGFAEEDITVLIDTDESYTQPTGKNIRQALSELIKPAKSGDVLFVHYSGHGTRVPPETGEEDDTDDDFRDLVEQVPEGCQITIVSDSCHSGGLIDEAKEQIGESTTTKPNRESKVSSFEFEFKNCLHSIFVKLLAFCGIGSSHVETREIVEVGEGDEVVRSRYLPLERFIELLKQQTGQDNIEIGKIRPTLFDVFGEDSSPKIKKFMKVILTKLRKTNDQSTLLGKIEESARGYIEETLNDEHYMKPAMQAQVKSDREIYGGRSSNGLFPDRGILLSGCQTDETSADVKKKGEAFGAFSNAIQMVLSETDHKDKITNKEMVLRAREILKKQMFIQRPGLYCNDRFVNAPFIC

SEQ ID NO: 69402 - DNA, 1107 bp, Arabidopsis thaliana
  misc_feature (1)..(1107): Ceres Seq. ID no. 1811014
  misc_feature (1)..(1107): Ortholog of  Ceres SEQ ID NO 13659759 as cited in SEQ ID NO 67663
atggccaagaaagctttactgattgggatcaactacgtgggaaccaaggcagagctacgaggctgcgtcaacgatgtccgtcggatgcggataagcctcgtcgaacggtacggattctccgaggagaacatcaaaatgttgattgatactgatagttcttcgatcaaaccgaccggtaagaacatcagacaggcgttgttagatctcgttgaaccggctaaatcgggtgatgttctcttcgtccattacagtggacatgggactaggttacccgcggaaactggagaagatgatgatactggttacgatgagtgtattgttccttccgatatgaatctcatcaccgatgatgatttcagggatcttgtggatatggtgccaaaggattgtcccatcacaatcatatctgactcttgtcacagtggcggtctcatagatgaagccaaagagcagataggagagagcacgaagaagaagaaagactctggagactcttcaacgatcaacaaggagacagaagcagagataattgaagtgggaaacagatctctgccattggagactttgattgatatgctgaagcaagaaacaggcaacgatgatatcgaagtggggaaaatcaggacaacccttttcgatatgtttggagatgattcaagtccaaaggtgaagaagtttatgaatgtgattctaagcaacctacaagagactactactactattcaaactgtttcagatgaggtattgggatcagttgagaacctagctcaagagtttctggagcagaagcttagcgacgatgtgaaacccgcgatccaagatgtgtatgcaggtgctataaatggtgcacttcctgataatggtatactgatcagtggttgccaaactgatcaaacttcttcagacgcaagcccaccgggtcacccggaattggcttatggagcactaaccaatgctatacagattataattggggagactaaaggtaagattagtaacaaagatcttgttttgaaggctaggaagcttcttaggaaacagggctttgatcaacgaccgggactgtattgcaatgatgcttatgtcaatgctcggtttatatgttga

SEQ ID NO: 69403 - protein, 368 aa, Arabidopsis thaliana
  peptide (1)..(368): Ceres Seq. ID no. 1811015
MAKKALLIGINYVGTKAELRGCVNDVRRMRISLVERYGFSEENIKMLIDTDSSSIKPTGKNIRQALLDLVEPAKSGDVLFVHYSGHGTRLPAETGEDDDTGYDECIVPSDMNLITDDDFRDLVDMVPKDCPITIISDSCHSGGLIDEAKEQIGESTKKKKDSGDSSTINKETEAEIIEVGNRSLPLETLIDMLKQETGNDDIEVGKIRTTLFDMFGDDSSPKVKKFMNVILSNLQETTTTIQTVSDEVLGSVENLAQEFLEQKLSDDVKPAIQDVYAGAINGALPDNGILISGCQTDQTSSDASPPGHPELAYGALTNAIQIIIGETKGKISNKDLVLKARKLLRKQGFDQRPGLYCNDAYVNARFIC

SEQ ID NO: 69404 - protein, 340 aa, Arabidopsis thaliana
  peptide (1)..(340): Ceres Seq. ID no. 1811016
MRISLVERYGFSEENIKMLIDTDSSSIKPTGKNIRQALLDLVEPAKSGDVLFVHYSGHGTRLPAETGEDDDTGYDECIVPSDMNLITDDDFRDLVDMVPKDCPITIISDSCHSGGLIDEAKEQIGESTKKKKDSGDSSTINKETEAEIIEVGNRSLPLETLIDMLKQETGNDDIEVGKIRTTLFDMFGDDSSPKVKKFMNVILSNLQETTTTIQTVSDEVLGSVENLAQEFLEQKLSDDVKPAIQDVYAGAINGALPDNGILISGCQTDQTSSDASPPGHPELAYGALTNAIQIIIGETKGKISNKDLVLKARKLLRKQGFDQRPGLYCNDAYVNARFIC

SEQ ID NO: 69405 - protein, 323 aa, Arabidopsis thaliana
  peptide (1)..(323): Ceres Seq. ID no. 1811017
MLIDTDSSSIKPTGKNIRQALLDLVEPAKSGDVLFVHYSGHGTRLPAETGEDDDTGYDECIVPSDMNLITDDDFRDLVDMVPKDCPITIISDSCHSGGLIDEAKEQIGESTKKKKDSGDSSTINKETEAEIIEVGNRSLPLETLIDMLKQETGNDDIEVGKIRTTLFDMFGDDSSPKVKKFMNVILSNLQETTTTIQTVSDEVLGSVENLAQEFLEQKLSDDVKPAIQDVYAGAINGALPDNGILISGCQTDQTSSDASPPGHPELAYGALTNAIQIIIGETKGKISNKDLVLKARKLLRKQGFDQRPGLYCNDAYVNARFIC

SEQ ID NO: 69406 - DNA, 1389 bp, Arabidopsis thaliana
  misc_feature (1)..(1389): Ceres Seq. ID no. 1814012
  misc_feature (1)..(1389): Ortholog of  Ceres SEQ ID NO 15171144 as cited in SEQ ID NO 60227
atgcctgtggtgagaacgagagcgaaatgttcgattcccgtcacaaaccctaatccaacagtcggaggaggaaactcaaacgtctcgatctacgagaaatgcagagaagacaggatcaaggagaatcttcagaggatgaagaatctcggaatcatggatctctctctcaaactcaaatccgagatccgacccgccaaaaggcgttacggtaactctaatgccaatccgggtcgagaaacatctcctattcagctttccgtctcctctagacgatcctcaagggtttttagagaaatcatttcgctgttttataatcagattgaagcaggagccgccagtttctcggagatcctcgaggtaatctcttcattgaagaacgctacaccagtttcctacgcagaggaacctgaactgaagaagggtaaagtgtctaaagaagagattgttttgtgggtaggagaaggcgtaaggccagagatttacactgaggagcatgagaaactgttaggtaacacagaacgaacttgggagctttttgttgatggttgtgacaaaaatgggaaacggatttatgaccctgttagaggaaagtgttgccaccagtgcaggattgaggctaatgtgtttaatggttactgtggattttacaggcagaagacgctaggttatcatacccaatgcagccagtgtaaccattctgttcgaggtcaattctgtggagattgtttatacatgagatatggagaacatgttcttgaagctctggaaaatccggactggatttgtccagtctgtcgcgatatctgcaactgcagtttctgtcgtacaaaaaaagggtggctcccaactggtgcagcttacaggaagattcaaaagttaatggctttccctttgaatttcttttgttctcagatacataaactcgggtataagtctgttgcacattatctgattcaaaccaaccaacagtcagaaacaagtgaggatgatgaaactgatgctcctgcagatagtcaagcttcagaaggagatcatctccttctcataactgatgggattcaggacaatcaaattgacgaaaatctcgatgatgatgatggctcaaacaagaatccggattcagctagaaagtcattatgcttcttgtcgtctgggaacaaccaaacttcagtgactgatggtgatctcaagccattagatgtgaaagaggtggatccagcaactcctgtgatcatcgatcttgaggctcagtgcagtgaaactgagaggatggctaactctgcaaacaaagagaaccgagaaacaagaagcaagcgaaagatgtctgctgaaccaaacccaaatagtattggtggaagactgagacagcgtcgtaagattcaagcttga

SEQ ID NO: 69407 - protein, 462 aa, Arabidopsis thaliana
  peptide (1)..(462): Ceres Seq. ID no. 1814013
MPVVRTRAKCSIPVTNPNPTVGGGNSNVSIYEKCREDRIKENLQRMKNLGIMDLSLKLKSEIRPAKRRYGNSNANPGRETSPIQLSVSSRRSSRVFREIISLFYNQIEAGAASFSEILEVISSLKNATPVSYAEEPELKKGKVSKEEIVLWVGEGVRPEIYTEEHEKLLGNTERTWELFVDGCDKNGKRIYDPVRGKCCHQCRIEANVFNGYCGFYRQKTLGYHTQCSQCNHSVRGQFCGDCLYMRYGEHVLEALENPDWICPVCRDICNCSFCRTKKGWLPTGAAYRKIQKLMAFPLNFFCSQIHKLGYKSVAHYLIQTNQQSETSEDDETDAPADSQASEGDHLLLITDGIQDNQIDENLDDDDGSNKNPDSARKSLCFLSSGNNQTSVTDGDLKPLDVKEVDPATPVIIDLEAQCSETERMANSANKENRETRSKRKMSAEPNPNSIGGRLRQRRKIQA

SEQ ID NO: 69408 - protein, 417 aa, Arabidopsis thaliana
  peptide (1)..(417): Ceres Seq. ID no. 1814014
MKNLGIMDLSLKLKSEIRPAKRRYGNSNANPGRETSPIQLSVSSRRSSRVFREIISLFYNQIEAGAASFSEILEVISSLKNATPVSYAEEPELKKGKVSKEEIVLWVGEGVRPEIYTEEHEKLLGNTERTWELFVDGCDKNGKRIYDPVRGKCCHQCRIEANVFNGYCGFYRQKTLGYHTQCSQCNHSVRGQFCGDCLYMRYGEHVLEALENPDWICPVCRDICNCSFCRTKKGWLPTGAAYRKIQKLMAFPLNFFCSQIHKLGYKSVAHYLIQTNQQSETSEDDETDAPADSQASEGDHLLLITDGIQDNQIDENLDDDDGSNKNPDSARKSLCFLSSGNNQTSVTDGDLKPLDVKEVDPATPVIIDLEAQCSETERMANSANKENRETRSKRKMSAEPNPNSIGGRLRQRRKIQA

SEQ ID NO: 69409 - protein, 411 aa, Arabidopsis thaliana
  peptide (1)..(411): Ceres Seq. ID no. 1814015
MDLSLKLKSEIRPAKRRYGNSNANPGRETSPIQLSVSSRRSSRVFREIISLFYNQIEAGAASFSEILEVISSLKNATPVSYAEEPELKKGKVSKEEIVLWVGEGVRPEIYTEEHEKLLGNTERTWELFVDGCDKNGKRIYDPVRGKCCHQCRIEANVFNGYCGFYRQKTLGYHTQCSQCNHSVRGQFCGDCLYMRYGEHVLEALENPDWICPVCRDICNCSFCRTKKGWLPTGAAYRKIQKLMAFPLNFFCSQIHKLGYKSVAHYLIQTNQQSETSEDDETDAPADSQASEGDHLLLITDGIQDNQIDENLDDDDGSNKNPDSARKSLCFLSSGNNQTSVTDGDLKPLDVKEVDPATPVIIDLEAQCSETERMANSANKENRETRSKRKMSAEPNPNSIGGRLRQRRKIQA

SEQ ID NO: 69410 - DNA, 462 bp, Arabidopsis thaliana
  misc_feature (1)..(462): Ceres Seq. ID no. 1814020
  misc_feature (1)..(462): Ortholog of  Ceres SEQ ID NO 13599613 as cited in SEQ ID NO 0
atgaaacattatgttcttgttcacggcggttgccacggcgcatggtgctggtacaaggtcaaaccggtgctggaagcttcaggccaccgtgtaaccgttgttgatcttacggcttctggtgtgaacatgagcaaagtggaagagattcagactttggcggattacgctaagccgttgcttgaagttctcgagtcgtttggttcagaggataaggttatcctcgttgcacatagcctcggagggatatcagttggtcttgcagctgacatgtttcctagtaagatctctgttgctgtcttcataacctctttcatgcctgatacaacgaatccacacctttttatgttttcgaaaagtgtacttagccaagaagatgtatcaactttctccagtcgaagaattagtagtagcaaacttcagctttcaactaccatgataggcaaagatgtttcatcggggtga

SEQ ID NO: 69411 - protein, 153 aa, Arabidopsis thaliana
  peptide (1)..(153): Ceres Seq. ID no. 1814021
MKHYVLVHGGCHGAWCWYKVKPVLEASGHRVTVVDLTASGVNMSKVEEIQTLADYAKPLLEVLESFGSEDKVILVAHSLGGISVGLAADMFPSKISVAVFITSFMPDTTNPHLFMFSKSVLSQEDVSTFSSRRISSSKLQLSTTMIGKDVSSG

SEQ ID NO: 69412 - protein, 111 aa, Arabidopsis thaliana
  peptide (1)..(111): Ceres Seq. ID no. 1814022
MSKVEEIQTLADYAKPLLEVLESFGSEDKVILVAHSLGGISVGLAADMFPSKISVAVFITSFMPDTTNPHLFMFSKSVLSQEDVSTFSSRRISSSKLQLSTTMIGKDVSSG

SEQ ID NO: 69413 - DNA, 1950 bp, Arabidopsis thaliana
  misc_feature (1)..(1950): Ceres Seq. ID no. 1814123
  misc_feature (1)..(1950): Ortholog of  Ceres SEQ ID NO 13655640 as cited in SEQ ID NO 63844
atgttctctaaagtttccattcttctcttttccctcgcatccctactcttgttccgatcaaccacaggcatcgaattcatctacaactccaatttcaccacaaccaacacacttctcctcggcaacgccactgttaaatctccaccgtcgatcctcaccctcaccaaccaaaccactttctccatcggacgtggcctctacccttcaagaatcaacgcctcctcctcctctgcctcgccgttacctttcgccacatcattcatcttctccatggctccttttaaacacctctctcctggccacggcttcgccttcgtcttccttcctttctccgaaacctccgccgcaagctcatctcagcatctcggcctcttcaacttcaccaataacggtgaccccaatagccgaatcttcgccgttgaattcgatgttttcgctaaccaagagttcaacgacatcaacgacaaccacgtcggcgtcgacgtcaattctctcacttccgttgcatctgaaactgcaggtttctatggaggcagagacggccagagattcacggagctgaagcttaacagtggcgagaattatcaggcgtggatcgagtttaatgggtcagcgatcaatgtcacgatggctagagctagctctagaaagcccataagaccactcataagcattccattaaatctcactggagtcttacttgatgatatgttcgttggattcactgcctccacaggacaactagtgcagagccataggattctctcatggagttttagtaactccaatttctccattggtgactctgttttgaagtctaaaggcttcattgctggggtctctagtggtgttgtgttgcagagactagaaggagacgtggaagattgggaaacagagtattggcctcacagagtgcaatacaaagatgttttggaagcaacaaaagggttttccgatgagaacatgatcggatacggagggaattctaaagtgtacaggggagtgttggaaggtaaagaagttgcggttaagagaataatgatgagtcctcgagagagcgttggcgcgacgagtgagttcttagctgaggtctcgagcttagggaggttgagacacaagaatatagttggactaaaaggttggtctaagaaaggaggagagagtctgatattgatttacgagtatatggagaatggaagtgtcgataagcggatatttgattgtaacgagatgttgaattgggaggaaagaatgagagtgataagagacctagcctcagggatgttgtatctacacgaagggtgggagacaaaggtgttacatagagatataaagtcaagcaatgtgttgcttgacaaggatatgaacgcgagggtaggtgattttgggttggctaagttgcagaacactagtaaagagatggttagcacgacacatgttgttggaacagcgggttatatggcgcctgagttggttaagacagggagagcatcagcgcaaaccgatgtgtatagctttggagtgtttgtgttggaggtagtgtgtggaaggaggccaatagaggaaggaagagaagggatagtggaatggatatggggactaatggagaaagacaaagtggttgatggtttagacgagagaataaaggcgaatggagtgttcgtggtcgaggaagtggagatggctctgagaataggactgttgtgtgtgcatcctgatccgagagtgcgtccgaagatgagacaagtggtgcagatattggaacaagggagattagtggaggatggtggtgaaagggaaataagcttgttggagagagtgaagagctcttacttgttggaaactggtgagggaagcagacaacaacatcccacgttccaagatgtatggaattcgtcttcttattctaattccttccaaacttatgattctattcttcatggaaggtga

SEQ ID NO: 69414 - protein, 649 aa, Arabidopsis thaliana
  peptide (1)..(649): Ceres Seq. ID no. 1814124
MFSKVSILLFSLASLLLFRSTTGIEFIYNSNFTTTNTLLLGNATVKSPPSILTLTNQTTFSIGRGLYPSRINASSSSASPLPFATSFIFSMAPFKHLSPGHGFAFVFLPFSETSAASSSQHLGLFNFTNNGDPNSRIFAVEFDVFANQEFNDINDNHVGVDVNSLTSVASETAGFYGGRDGQRFTELKLNSGENYQAWIEFNGSAINVTMARASSRKPIRPLISIPLNLTGVLLDDMFVGFTASTGQLVQSHRILSWSFSNSNFSIGDSVLKSKGFIAGVSSGVVLQRLEGDVEDWETEYWPHRVQYKDVLEATKGFSDENMIGYGGNSKVYRGVLEGKEVAVKRIMMSPRESVGATSEFLAEVSSLGRLRHKNIVGLKGWSKKGGESLILIYEYMENGSVDKRIFDCNEMLNWEERMRVIRDLASGMLYLHEGWETKVLHRDIKSSNVLLDKDMNARVGDFGLAKLQNTSKEMVSTTHVVGTAGYMAPELVKTGRASAQTDVYSFGVFVLEVVCGRRPIEEGREGIVEWIWGLMEKDKVVDGLDERIKANGVFVVEEVEMALRIGLLCVHPDPRVRPKMRQVVQILEQGRLVEDGGEREISLLERVKSSYLLETGEGSRQQHPTFQDVWNSSSYSNSFQTYDSILHGR

SEQ ID NO: 69415 - protein, 559 aa, Arabidopsis thaliana
  peptide (1)..(559): Ceres Seq. ID no. 1814125
MAPFKHLSPGHGFAFVFLPFSETSAASSSQHLGLFNFTNNGDPNSRIFAVEFDVFANQEFNDINDNHVGVDVNSLTSVASETAGFYGGRDGQRFTELKLNSGENYQAWIEFNGSAINVTMARASSRKPIRPLISIPLNLTGVLLDDMFVGFTASTGQLVQSHRILSWSFSNSNFSIGDSVLKSKGFIAGVSSGVVLQRLEGDVEDWETEYWPHRVQYKDVLEATKGFSDENMIGYGGNSKVYRGVLEGKEVAVKRIMMSPRESVGATSEFLAEVSSLGRLRHKNIVGLKGWSKKGGESLILIYEYMENGSVDKRIFDCNEMLNWEERMRVIRDLASGMLYLHEGWETKVLHRDIKSSNVLLDKDMNARVGDFGLAKLQNTSKEMVSTTHVVGTAGYMAPELVKTGRASAQTDVYSFGVFVLEVVCGRRPIEEGREGIVEWIWGLMEKDKVVDGLDERIKANGVFVVEEVEMALRIGLLCVHPDPRVRPKMRQVVQILEQGRLVEDGGEREISLLERVKSSYLLETGEGSRQQHPTFQDVWNSSSYSNSFQTYDSILHGR

SEQ ID NO: 69416 - protein, 440 aa, Arabidopsis thaliana
  peptide (1)..(440): Ceres Seq. ID no. 1814126
MARASSRKPIRPLISIPLNLTGVLLDDMFVGFTASTGQLVQSHRILSWSFSNSNFSIGDSVLKSKGFIAGVSSGVVLQRLEGDVEDWETEYWPHRVQYKDVLEATKGFSDENMIGYGGNSKVYRGVLEGKEVAVKRIMMSPRESVGATSEFLAEVSSLGRLRHKNIVGLKGWSKKGGESLILIYEYMENGSVDKRIFDCNEMLNWEERMRVIRDLASGMLYLHEGWETKVLHRDIKSSNVLLDKDMNARVGDFGLAKLQNTSKEMVSTTHVVGTAGYMAPELVKTGRASAQTDVYSFGVFVLEVVCGRRPIEEGREGIVEWIWGLMEKDKVVDGLDERIKANGVFVVEEVEMALRIGLLCVHPDPRVRPKMRQVVQILEQGRLVEDGGEREISLLERVKSSYLLETGEGSRQQHPTFQDVWNSSSYSNSFQTYDSILHGR

SEQ ID NO: 69417 - DNA, 1218 bp, Arabidopsis thaliana
  misc_feature (1)..(1218): Ceres Seq. ID no. 1814205
  misc_feature (1)..(1218): Ortholog of  Ceres SEQ ID NO 12578784 as cited in SEQ ID NO 20729
  misc_feature (1)..(1218): Ortholog of  Ceres SEQ ID NO 13658847 as cited in SEQ ID NO 66674
atgcagaaacggagaacggtgaaggaatctacgaagataagaaatggtaaaggtatggattccggcgaaaagaagagatctgagaagagattgatgaagttcgaggagttacctaggtatttgaaagataacgagttcatacacaatcattatcgatgtgagtggtcaatcaaagaaactttcctcagcgctttctcatggcacaatgagactctcaacatctggacgcatttgtgtggatttgcgatatttacttggatgatggttgtgagttcaatggagacgacggagcttggcctcgccggctttgttagccttctctccgggaaaattaaacaaatttcaatctttttgggggatttgtgggtcctaatgacagagcaacaattcgctggccatggccgtcaatggcaatgtcaaaagatgtttacttctccagcgatcaaactctgcatcacttccatgtcacacctcttcgcctgtcactccagacggttcaacctcttcttctggcgtctagactacgctggaatctccctcatgatcgtctgttcattcttcgcacctatctactatgcattctcatgccacacttactggcgactcttctacctctcatcgatctcaatcctcggtctcctcgccatcttcactctcctctctccatcactctcagctccacgtttcagatctttcagagcagctctgttcctaacaatgggattttctggcgtaataccagccacacatgtgctttaccttcataaggatcacccaaacgtgcttatagctctcgtatatgaacttgcgatggctgtgttgtatgcaacaggagcagcgttttatgttacccgcatacctgaaagatggaagcctggggcttttgatattgcaggacatagccatcagatattccatgtgtttgtagtcttaggagctcttgctcatagtgttgccagtcttcttatcatggattttcgacgggcttctccttcttcatcgatgaatcccaaactcagaacagcgatcgcagatcgagcgacgattgtgttggggactttgattcgcaagatgggtcgttcttcgtttgatttctctgaaaagtctctccttttcgacattatcgtgacgccattagcaaagcttcggagtttgttgtcgttaggacagaatgagacgaagctactgtgttgtaagctaaagactgagggtgcttag

SEQ ID NO: 69418 - protein, 405 aa, Arabidopsis thaliana
  peptide (1)..(405): Ceres Seq. ID no. 1814206
MQKRRTVKESTKIRNGKGMDSGEKKRSEKRLMKFEELPRYLKDNEFIHNHYRCEWSIKETFLSAFSWHNETLNIWTHLCGFAIFTWMMVVSSMETTELGLAGFVSLLSGKIKQISIFLGDLWVLMTEQQFAGHGRQWQCQKMFTSPAIKLCITSMSHLFACHSRRFNLFFWRLDYAGISLMIVCSFFAPIYYAFSCHTYWRLFYLSSISILGLLAIFTLLSPSLSAPRFRSFRAALFLTMGFSGVIPATHVLYLHKDHPNVLIALVYELAMAVLYATGAAFYVTRIPERWKPGAFDIAGHSHQIFHVFVVLGALAHSVASLLIMDFRRASPSSSMNPKLRTAIADRATIVLGTLIRKMGRSSFDFSEKSLLFDIIVTPLAKLRSLLSLGQNETKLLCCKLKTEGA

SEQ ID NO: 69419 - protein, 387 aa, Arabidopsis thaliana
  peptide (1)..(387): Ceres Seq. ID no. 1814207
MDSGEKKRSEKRLMKFEELPRYLKDNEFIHNHYRCEWSIKETFLSAFSWHNETLNIWTHLCGFAIFTWMMVVSSMETTELGLAGFVSLLSGKIKQISIFLGDLWVLMTEQQFAGHGRQWQCQKMFTSPAIKLCITSMSHLFACHSRRFNLFFWRLDYAGISLMIVCSFFAPIYYAFSCHTYWRLFYLSSISILGLLAIFTLLSPSLSAPRFRSFRAALFLTMGFSGVIPATHVLYLHKDHPNVLIALVYELAMAVLYATGAAFYVTRIPERWKPGAFDIAGHSHQIFHVFVVLGALAHSVASLLIMDFRRASPSSSMNPKLRTAIADRATIVLGTLIRKMGRSSFDFSEKSLLFDIIVTPLAKLRSLLSLGQNETKLLCCKLKTEGA

SEQ ID NO: 69420 - protein, 374 aa, Arabidopsis thaliana
  peptide (1)..(374): Ceres Seq. ID no. 1814208
MKFEELPRYLKDNEFIHNHYRCEWSIKETFLSAFSWHNETLNIWTHLCGFAIFTWMMVVSSMETTELGLAGFVSLLSGKIKQISIFLGDLWVLMTEQQFAGHGRQWQCQKMFTSPAIKLCITSMSHLFACHSRRFNLFFWRLDYAGISLMIVCSFFAPIYYAFSCHTYWRLFYLSSISILGLLAIFTLLSPSLSAPRFRSFRAALFLTMGFSGVIPATHVLYLHKDHPNVLIALVYELAMAVLYATGAAFYVTRIPERWKPGAFDIAGHSHQIFHVFVVLGALAHSVASLLIMDFRRASPSSSMNPKLRTAIADRATIVLGTLIRKMGRSSFDFSEKSLLFDIIVTPLAKLRSLLSLGQNETKLLCCKLKTEGA

SEQ ID NO: 69421 - DNA, 1470 bp, Arabidopsis thaliana
  misc_feature (1)..(1470): Ceres Seq. ID no. 1814280
  misc_feature (1)..(1470): Ortholog of  Ceres SEQ ID NO 13504578 as cited in SEQ ID NO 59850
atgaaaggaaaccaaaaagactcatcggagaaacccatatgggatcggagctcatcgggtatatccatgacccgacccggtcgattaataatctggctcatcctcttcatctccgtcacttacatcatctacactctcaagatcgtctccactacacacccttgcgaagatctaacctccgagtcaattctccaacaaagaccggagaaaaaagcggttacagtaacggttaaggcggttccggcggagcaagaagcaacggatctaaaccatgtggttttcggtattgctgcgtcgtcgaagctatggaaacaaaggaaagagtatatcaagatttggtataagccaaagaaaatgagaggctacgtgtggttagacgaagaggtaaagataaaatccgaaaccggagatcaagaaagtctcccgtcggtgagaatctccggtgatacgtcgtcgtttccttatactaacaaacaaggacaccgatcagcgattaggatctcgaggattgtttcggaaacgttgatgagtcttgattctgagtcgaagaagaacgtgaggtggttcgtgatgggtgatgatgatacgatgtattatatagggagcttgtcggaatctcatttgcagaacattattttctcttatggaatggcttatggtggaggaggttttgcgattagttatccattggctgtggctttgagtaagatgcaagatcagtgtattcagaggtatccggctttgtatggttctgatgatcggatgcaagcttgtatggctgagcttggtgttccattgactaaagagatcggttttcaccaatacgacgttcatgggaatctcttcggcctcctagctgcccatccgataacaccgtttgtatcgatgcaccatcttgatgttgtggaaccgatttttccaaacatgactcgtgttcgcgctatcaagaaactaaccacaccgatgaagattgattcggctgcgcttctccaacaatcaatatgctatgacaaacacaaaagctggactatttcagtctcgtggggatttgcggtccaggtgttccgtggatcattctctccccgggaaatggaaatgccatctagaactttcttgaattggtacaaaagagcggattacaccgcctacgcattcaatactaggcccgtgagtcgcaatcattgccaaaaaccgtttgtttttcacatgtcgagtgcaaaatttgacccgcagttgaacacgacggttagcgaatacacgagacatcgggttccgcaaccggcttgtcgatgggatatggctaacccagaggagatcaacactatagtcgtctacaaaaaacccgatcctcacctatggaacagatcacctagaagaaactgttgcagagtattacaaacaaagaggaataatacattatggatcaatgttggtgtatgtagagcaggtgaagtcactgaagtaaagtaa

SEQ ID NO: 69422 - protein, 489 aa, Arabidopsis thaliana
  peptide (1)..(489): Ceres Seq. ID no. 1814281
MKGNQKDSSEKPIWDRSSSGISMTRPGRLIIWLILFISVTYIIYTLKIVSTTHPCEDLTSESILQQRPEKKAVTVTVKAVPAEQEATDLNHVVFGIAASSKLWKQRKEYIKIWYKPKKMRGYVWLDEEVKIKSETGDQESLPSVRISGDTSSFPYTNKQGHRSAIRISRIVSETLMSLDSESKKNVRWFVMGDDDTMYYIGSLSESHLQNIIFSYGMAYGGGGFAISYPLAVALSKMQDQCIQRYPALYGSDDRMQACMAELGVPLTKEIGFHQYDVHGNLFGLLAAHPITPFVSMHHLDVVEPIFPNMTRVRAIKKLTTPMKIDSAALLQQSICYDKHKSWTISVSWGFAVQVFRGSFSPREMEMPSRTFLNWYKRADYTAYAFNTRPVSRNHCQKPFVFHMSSAKFDPQLNTTVSEYTRHRVPQPACRWDMANPEEINTIVVYKKPDPHLWNRSPRRNCCRVLQTKRNNTLWINVGVCRAGEVTEVK

SEQ ID NO: 69423 - protein, 467 aa, Arabidopsis thaliana
  peptide (1)..(467): Ceres Seq. ID no. 1814282
MTRPGRLIIWLILFISVTYIIYTLKIVSTTHPCEDLTSESILQQRPEKKAVTVTVKAVPAEQEATDLNHVVFGIAASSKLWKQRKEYIKIWYKPKKMRGYVWLDEEVKIKSETGDQESLPSVRISGDTSSFPYTNKQGHRSAIRISRIVSETLMSLDSESKKNVRWFVMGDDDTMYYIGSLSESHLQNIIFSYGMAYGGGGFAISYPLAVALSKMQDQCIQRYPALYGSDDRMQACMAELGVPLTKEIGFHQYDVHGNLFGLLAAHPITPFVSMHHLDVVEPIFPNMTRVRAIKKLTTPMKIDSAALLQQSICYDKHKSWTISVSWGFAVQVFRGSFSPREMEMPSRTFLNWYKRADYTAYAFNTRPVSRNHCQKPFVFHMSSAKFDPQLNTTVSEYTRHRVPQPACRWDMANPEEINTIVVYKKPDPHLWNRSPRRNCCRVLQTKRNNTLWINVGVCRAGEVTEVK

SEQ ID NO: 69424 - protein, 371 aa, Arabidopsis thaliana
  peptide (1)..(371): Ceres Seq. ID no. 1814283
MRGYVWLDEEVKIKSETGDQESLPSVRISGDTSSFPYTNKQGHRSAIRISRIVSETLMSLDSESKKNVRWFVMGDDDTMYYIGSLSESHLQNIIFSYGMAYGGGGFAISYPLAVALSKMQDQCIQRYPALYGSDDRMQACMAELGVPLTKEIGFHQYDVHGNLFGLLAAHPITPFVSMHHLDVVEPIFPNMTRVRAIKKLTTPMKIDSAALLQQSICYDKHKSWTISVSWGFAVQVFRGSFSPREMEMPSRTFLNWYKRADYTAYAFNTRPVSRNHCQKPFVFHMSSAKFDPQLNTTVSEYTRHRVPQPACRWDMANPEEINTIVVYKKPDPHLWNRSPRRNCCRVLQTKRNNTLWINVGVCRAGEVTEVK

SEQ ID NO: 69425 - DNA, 2829 bp, Arabidopsis thaliana
  misc_feature (1)..(2829): Ceres Seq. ID no. 1814302
  misc_feature (1)..(2829): Ortholog of  Ceres SEQ ID NO 13581686 as cited in SEQ ID NO 57695
atgtcaatgtcattttccggcgggactcacaacgatcgttggggctccgatttagcttccgccggagaattcacccaaagctttccatccttaccagcaacatactcaccctcaccctcctcctcctcctcctccggcgaagagctcctagaagtaacaatcgaattcccaagcggcgtaataataaacatcgactccgttaccggaaccggcaccgatatttcaggtaccgatctagagatcacctcttgctcggattccggttcaggatcaaggtcgcttagcttaggatggagcgcgtcgtcggagagactgacggcggggacgaactcaaagcagcagatccagaagatctcacggcgtggttacggttattcgtctcggtctgcaccggaaccggtggttccacacagaggcgaaattaccgattcggttaatctccctcgagctttatctcagcgaccaactagacctaatcgggatggatcgggtacagagagagcgattcatggtttgaaattcataagcagcaaagaaaatggaatcgttgattggaacgatgttcaaaacaatttcgctcatctttctaaagatggttatcttttcaaaagtgattttgctcattgcataggtttggagaatgaaaattccaaagagtttgcagacgagttgttcgacgcattgtgtaggagaagaagaataatggttgataagatcaatcttcaagaattatacgagttttggtaccaaattacagacgaaagcttcgattctcgtcttcaaatcttcttcaacatgtattgttatcaattatcatcaaatcttgttaaacatattgatcaacatattattatactaagtgcatcggcaaataatctatcgaggttgcgagaacgagcagaggaatatgccgcactgatcatggaagaacttgcaccagatggactctattctcagtacatagagttaaaggacctagagatactgctactagagaaggacatatctcatagttacagcctaccgttcagccagacgagccgagccttaagccagaacctaaaggatagaagatggagaatgagcagaaacttgctttactctttgcaagataattggaagaggatttgggttttgacattgtggtttgtgatcatggcctggttatttatgtggaaatgctatcagtacaaacacaaagacgcattccatgtaatgggttactgccttgtcatggcaaaaggcgcagctgagacactgaaattcaacatggctcttattcttttgccggtctgtagaaataccatcacctatctcagatccaccgctttgtcccactcagtgcctttcgatgactgcattaattttcacaagacgatctctgtagcaatcattagtgcaatgcttcttcatgcaaccagccacctcgcctgtgacttcccaaggattctagcatctactgatacagattacaaaagatacttggttaagtactttggtgtgaccagacccacatactttggtttggtgaatactcctgtgggaatcactggaattataatggttgcttttatgttaattgcattcacattagccagtagaagatgcaggcggaacttaactaagttgccgaagccatttgacaaactaaccggatataatgccttctggtattcacatcacttacttctaactgtttacgtccttttagtcatccacggtgtttccctctatctcgagcataaatggtaccgcaaaacggtatggatgtatcttgctgtaccagttttactctatgttggtgagaggatctttagatttttccgttccaggctttacacagtcgaaatctgtaaggttgtaatttatcccggaaacgttgttgtgctacgcatgtctaagcctacatcatttgattacaagagtggacaatatgtatttgttcagtgtccatcagtatcaaaatttgagtggcatccattttctattacttcttcccctggagatgattatctcagcattcacattcgtcagcgcggtgattggacagaagggattaagaaggcattctcagtggtatgtcatgcccctgaagctggaaaaagcggacttctcagagcagatgtaccaaaccaaagaagttttccagagctgttgatagatggaccttatggcgctccagcgcaagaccattggaagtatgatgtggtattactggttggccttggaatcggcgcaacacctttcgttagcattttgagagatctactcaataacattattaagcaacaggaacaagctgaatgcatctcaggtagttgtagtaacagcaacatctcgtcggatcacagtttcagttgcttaaactcagaagctgcgagtcggattccgcaaactcaacggaagacgctgaataccaagaatgcttacttttactgggtaacacgagaacaaggctcgttcgattggttcaaagaaatcatgaacgagattgctgattcagatagaaagggtgttattgagatgcacaactacttgactagcgtctacgaagaaggagatactcgatccaatcttctcactatgatccaaacgttaaaccatgccaaaaatggcgtcgacattttttcaggaaccaaggtaaggacacattttgggaggccaaaatggaagaaagttttatcaaagattagcaccaaacataggaacgcaagaattggagtgttctattgtggagttccaagtttggggaaggaactttcaacactctgccatgaatttaaccagacgggaattaccaggttcgatttccacaaagaacagttctaa

SEQ ID NO: 69426 - protein, 942 aa, Arabidopsis thaliana
  peptide (1)..(942): Ceres Seq. ID no. 1814303
MSMSFSGGTHNDRWGSDLASAGEFTQSFPSLPATYSPSPSSSSSSGEELLEVTIEFPSGVIINIDSVTGTGTDISGTDLEITSCSDSGSGSRSLSLGWSASSERLTAGTNSKQQIQKISRRGYGYSSRSAPEPVVPHRGEITDSVNLPRALSQRPTRPNRDGSGTERAIHGLKFISSKENGIVDWNDVQNNFAHLSKDGYLFKSDFAHCIGLENENSKEFADELFDALCRRRRIMVDKINLQELYEFWYQITDESFDSRLQIFFNMYCYQLSSNLVKHIDQHIIILSASANNLSRLRERAEEYAALIMEELAPDGLYSQYIELKDLEILLLEKDISHSYSLPFSQTSRALSQNLKDRRWRMSRNLLYSLQDNWKRIWVLTLWFVIMAWLFMWKCYQYKHKDAFHVMGYCLVMAKGAAETLKFNMALILLPVCRNTITYLRSTALSHSVPFDDCINFHKTISVAIISAMLLHATSHLACDFPRILASTDTDYKRYLVKYFGVTRPTYFGLVNTPVGITGIIMVAFMLIAFTLASRRCRRNLTKLPKPFDKLTGYNAFWYSHHLLLTVYVLLVIHGVSLYLEHKWYRKTVWMYLAVPVLLYVGERIFRFFRSRLYTVEICKVVIYPGNVVVLRMSKPTSFDYKSGQYVFVQCPSVSKFEWHPFSITSSPGDDYLSIHIRQRGDWTEGIKKAFSVVCHAPEAGKSGLLRADVPNQRSFPELLIDGPYGAPAQDHWKYDVVLLVGLGIGATPFVSILRDLLNNIIKQQEQAECISGSCSNSNISSDHSFSCLNSEAASRIPQTQRKTLNTKNAYFYWVTREQGSFDWFKEIMNEIADSDRKGVIEMHNYLTSVYEEGDTRSNLLTMIQTLNHAKNGVDIFSGTKVRTHFGRPKWKKVLSKISTKHRNARIGVFYCGVPSLGKELSTLCHEFNQTGITRFDFHKEQF

SEQ ID NO: 69427 - protein, 940 aa, Arabidopsis thaliana
  peptide (1)..(940): Ceres Seq. ID no. 1814304
MSFSGGTHNDRWGSDLASAGEFTQSFPSLPATYSPSPSSSSSSGEELLEVTIEFPSGVIINIDSVTGTGTDISGTDLEITSCSDSGSGSRSLSLGWSASSERLTAGTNSKQQIQKISRRGYGYSSRSAPEPVVPHRGEITDSVNLPRALSQRPTRPNRDGSGTERAIHGLKFISSKENGIVDWNDVQNNFAHLSKDGYLFKSDFAHCIGLENENSKEFADELFDALCRRRRIMVDKINLQELYEFWYQITDESFDSRLQIFFNMYCYQLSSNLVKHIDQHIIILSASANNLSRLRERAEEYAALIMEELAPDGLYSQYIELKDLEILLLEKDISHSYSLPFSQTSRALSQNLKDRRWRMSRNLLYSLQDNWKRIWVLTLWFVIMAWLFMWKCYQYKHKDAFHVMGYCLVMAKGAAETLKFNMALILLPVCRNTITYLRSTALSHSVPFDDCINFHKTISVAIISAMLLHATSHLACDFPRILASTDTDYKRYLVKYFGVTRPTYFGLVNTPVGITGIIMVAFMLIAFTLASRRCRRNLTKLPKPFDKLTGYNAFWYSHHLLLTVYVLLVIHGVSLYLEHKWYRKTVWMYLAVPVLLYVGERIFRFFRSRLYTVEICKVVIYPGNVVVLRMSKPTSFDYKSGQYVFVQCPSVSKFEWHPFSITSSPGDDYLSIHIRQRGDWTEGIKKAFSVVCHAPEAGKSGLLRADVPNQRSFPELLIDGPYGAPAQDHWKYDVVLLVGLGIGATPFVSILRDLLNNIIKQQEQAECISGSCSNSNISSDHSFSCLNSEAASRIPQTQRKTLNTKNAYFYWVTREQGSFDWFKEIMNEIADSDRKGVIEMHNYLTSVYEEGDTRSNLLTMIQTLNHAKNGVDIFSGTKVRTHFGRPKWKKVLSKISTKHRNARIGVFYCGVPSLGKELSTLCHEFNQTGITRFDFHKEQF

SEQ ID NO: 69428 - protein, 708 aa, Arabidopsis thaliana
  peptide (1)..(708): Ceres Seq. ID no. 1814305
MVDKINLQELYEFWYQITDESFDSRLQIFFNMYCYQLSSNLVKHIDQHIIILSASANNLSRLRERAEEYAALIMEELAPDGLYSQYIELKDLEILLLEKDISHSYSLPFSQTSRALSQNLKDRRWRMSRNLLYSLQDNWKRIWVLTLWFVIMAWLFMWKCYQYKHKDAFHVMGYCLVMAKGAAETLKFNMALILLPVCRNTITYLRSTALSHSVPFDDCINFHKTISVAIISAMLLHATSHLACDFPRILASTDTDYKRYLVKYFGVTRPTYFGLVNTPVGITGIIMVAFMLIAFTLASRRCRRNLTKLPKPFDKLTGYNAFWYSHHLLLTVYVLLVIHGVSLYLEHKWYRKTVWMYLAVPVLLYVGERIFRFFRSRLYTVEICKVVIYPGNVVVLRMSKPTSFDYKSGQYVFVQCPSVSKFEWHPFSITSSPGDDYLSIHIRQRGDWTEGIKKAFSVVCHAPEAGKSGLLRADVPNQRSFPELLIDGPYGAPAQDHWKYDVVLLVGLGIGATPFVSILRDLLNNIIKQQEQAECISGSCSNSNISSDHSFSCLNSEAASRIPQTQRKTLNTKNAYFYWVTREQGSFDWFKEIMNEIADSDRKGVIEMHNYLTSVYEEGDTRSNLLTMIQTLNHAKNGVDIFSGTKVRTHFGRPKWKKVLSKISTKHRNARIGVFYCGVPSLGKELSTLCHEFNQTGITRFDFHKEQF

SEQ ID NO: 69429 - DNA, 1191 bp, Arabidopsis thaliana
  misc_feature (1)..(1191): Ceres Seq. ID no. 1814454
  misc_feature (1)..(1191): Ortholog of  Ceres SEQ ID NO 13647395 as cited in SEQ ID NO 20370
atggaagtgatatggatgttcttaatctgttgcatctttggtatcataattataagtcatagcaatgactttgtcgaagctaagagcctttctaaagttgaagatttagaaatcgagaagagactaaggactatcaacaaacctgctgtcaagatcatcaaggttttaatatatcttcataaccatgttattgttctctatatattatacaatttaagtatagatggagaaagatacggatgtgtggatttcttcaagcaaccagcatttgatcacccttcaatgaagaatcacacataccattacaagatgcgtccaatatggaaaggaatgagagaaagaaagacaaacaataccaattttggttacctatgggagaatggtgtgggttgtcccattggtaccgtccccatgcaaagagtcactaaagaagatctattgagattagactcatttggcgataattataaacctcgtggctcttggaattataccactgatgattctaatagtaacaaccagaaacattttgcggtggctcggacggttggctcagacaagaggttcaatggagcaacaatggatctttgtttaaccgctcctaaggttaggctaaaccaatacagtgcttctcgacttcacattcagattggaaatgatttcctccaaaccggctttacttcaggtgaaaaatcatgttacaatagctactgcgacgttggaatgatacttgttcgtcaagatattccacttggtatggcattatcgccagtgtctgttcgtggtgctaggacaactcattatggagtcttcggtctaattaaggaccaaataaatggaaattggtggttgcaatttggtaatgctgcagaggaaattggattttggccgtcgagtaggtttcatcaaagctctggaaatttggtggagtggggtggagaagtgtacagcgcatcactgccgagtcctcaaatgggatttgggtattttgttgatggtcaaatgcgctacgatgcatatatcaaacggatatctgtaatcgacggttttaataagattgaccgcaaagtggcatataccgaaaaatttgtggacgacactcgtggctaccaagttatagacaaatacaatattcccggatactcaatactcggtcatataatgttttacggtggtccggggaatctctga

SEQ ID NO: 69430 - protein, 396 aa, Arabidopsis thaliana
  peptide (1)..(396): Ceres Seq. ID no. 1814455
MEVIWMFLICCIFGIIIISHSNDFVEAKSLSKVEDLEIEKRLRTINKPAVKIIKVLIYLHNHVIVLYILYNLSIDGERYGCVDFFKQPAFDHPSMKNHTYHYKMRPIWKGMRERKTNNTNFGYLWENGVGCPIGTVPMQRVTKEDLLRLDSFGDNYKPRGSWNYTTDDSNSNNQKHFAVARTVGSDKRFNGATMDLCLTAPKVRLNQYSASRLHIQIGNDFLQTGFTSGEKSCYNSYCDVGMILVRQDIPLGMALSPVSVRGARTTHYGVFGLIKDQINGNWWLQFGNAAEEIGFWPSSRFHQSSGNLVEWGGEVYSASLPSPQMGFGYFVDGQMRYDAYIKRISVIDGFNKIDRKVAYTEKFVDDTRGYQVIDKYNIPGYSILGHIMFYGGPGNL

SEQ ID NO: 69431 - protein, 391 aa, Arabidopsis thaliana
  peptide (1)..(391): Ceres Seq. ID no. 1814456
MFLICCIFGIIIISHSNDFVEAKSLSKVEDLEIEKRLRTINKPAVKIIKVLIYLHNHVIVLYILYNLSIDGERYGCVDFFKQPAFDHPSMKNHTYHYKMRPIWKGMRERKTNNTNFGYLWENGVGCPIGTVPMQRVTKEDLLRLDSFGDNYKPRGSWNYTTDDSNSNNQKHFAVARTVGSDKRFNGATMDLCLTAPKVRLNQYSASRLHIQIGNDFLQTGFTSGEKSCYNSYCDVGMILVRQDIPLGMALSPVSVRGARTTHYGVFGLIKDQINGNWWLQFGNAAEEIGFWPSSRFHQSSGNLVEWGGEVYSASLPSPQMGFGYFVDGQMRYDAYIKRISVIDGFNKIDRKVAYTEKFVDDTRGYQVIDKYNIPGYSILGHIMFYGGPGNL

SEQ ID NO: 69432 - protein, 302 aa, Arabidopsis thaliana
  peptide (1)..(302): Ceres Seq. ID no. 1814457
MKNHTYHYKMRPIWKGMRERKTNNTNFGYLWENGVGCPIGTVPMQRVTKEDLLRLDSFGDNYKPRGSWNYTTDDSNSNNQKHFAVARTVGSDKRFNGATMDLCLTAPKVRLNQYSASRLHIQIGNDFLQTGFTSGEKSCYNSYCDVGMILVRQDIPLGMALSPVSVRGARTTHYGVFGLIKDQINGNWWLQFGNAAEEIGFWPSSRFHQSSGNLVEWGGEVYSASLPSPQMGFGYFVDGQMRYDAYIKRISVIDGFNKIDRKVAYTEKFVDDTRGYQVIDKYNIPGYSILGHIMFYGGPGNL

SEQ ID NO: 69433 - DNA, 1764 bp, Arabidopsis thaliana
  misc_feature (1)..(1764): Ceres Seq. ID no. 1814512
  misc_feature (1)..(1764): Ortholog of  Ceres SEQ ID NO 12586556 as cited in SEQ ID NO 64667
  misc_feature (1)..(1764): Ortholog of  Ceres SEQ ID NO 13660894 as cited in SEQ ID NO 67475
atgtactcaaaactcgaccatccggaatcagcccgactcgttctccgactcactcctgcacgaaacgtcgtctcttggacttcacttatctccggacttgctcagaacggtcatttctccaccgctttggttgaattcttcgagatgcgacgagaagctgtggcttctctgcgtttacccgttactgggaagcagattcatgcgcttgctgtgaagtgtggtaggatacttgatgtgtttgttgggtgtagtgcttttgatatgtattgcaaaactaggcttagagatgatgcacggaagttgttcgatgaaattcctgagaggaaccttgaaacttggaatgcttttatatctaactctgtgactgatggaaggcctagggaagctattgaagcgtttattgagtttagaaggattgatgggcacccgaattcgataactttttgtgctttccttaatgcttgttcggattggttacacttgaatctaggaatgcagttacacgggcttgtgttacgaagtgggtttgatacagacgtctctatacgtagcagtgagattatctttactgaaatgggaactaaaaatgctgtttcttggtgttcattggttgctgcatatgtgcagaatcatgaggatgagaaggcgtctgtattatatttacgctcaaggaaggatattgttgagacctctgattttatgatatcaagtgttctgagtgcgtgtgctggtatggctggtcttgagttgggaagatcgatacatgctcacgctgtgaaggcgtgtgttgaaaggactatatttgttggaagtgccctcgttgacatgtatggaaaatgtggatgtatagaagattcagaacaagcgtttgatgagatgcctgagaagaacttagtgactcggaattcattgatcggaggatatgctcatcagggtcaggttgatatggcattggctttatttgaagaaatggcaccacgtggatgtggggctgtggaaaatggtatgaagatatttgattcgatgaggagtacttatggcattgagccaggggctgagcattattcatgcatcgtggacatgctagggcgagcgggaatggtagaacgggcttatgaattcataaagaaaatgccaattcaaccgacaatttcggtttggggtgctcttcagaatgcttgtaggatgcatggtaagccacagctgggattactagcagctgagaaccttttcaaactcgaccctaaggattcaggcaaccacgttctgctttccaatacgtttgcagcggctgggaggtgggcggaagccaacaccgtaagagaggagctgaaaggcgtagggatcaagaaaggagccggatacagttggatcacagtgaagaaccaagtccatgcctttcaagccaaggacagatcccacatactgaacaaagaaattcaaacaacgctggccaagctaaggaacgaaatggaagctgcagggtacaaacccgacctgaaactctcgctttacgatctggaggaagaagaaaaagcagcagaagtctcgcaccacagtgagaaactggctctagcatttggattgttatctttaccactcagtgtcccaatcagaatcaccaagaaccttagaatctgcggagattgccacagcttcttcaagtttgtctctgggagtgttaaacgagagatcattgtgagagacaataaccggtttcatcggtttaaagatgggatatgttcttgtaaggattattggtaa

SEQ ID NO: 69434 - protein, 587 aa, Arabidopsis thaliana
  peptide (1)..(587): Ceres Seq. ID no. 1814513
MYSKLDHPESARLVLRLTPARNVVSWTSLISGLAQNGHFSTALVEFFEMRREAVASLRLPVTGKQIHALAVKCGRILDVFVGCSAFDMYCKTRLRDDARKLFDEIPERNLETWNAFISNSVTDGRPREAIEAFIEFRRIDGHPNSITFCAFLNACSDWLHLNLGMQLHGLVLRSGFDTDVSIRSSEIIFTEMGTKNAVSWCSLVAAYVQNHEDEKASVLYLRSRKDIVETSDFMISSVLSACAGMAGLELGRSIHAHAVKACVERTIFVGSALVDMYGKCGCIEDSEQAFDEMPEKNLVTRNSLIGGYAHQGQVDMALALFEEMAPRGCGAVENGMKIFDSMRSTYGIEPGAEHYSCIVDMLGRAGMVERAYEFIKKMPIQPTISVWGALQNACRMHGKPQLGLLAAENLFKLDPKDSGNHVLLSNTFAAAGRWAEANTVREELKGVGIKKGAGYSWITVKNQVHAFQAKDRSHILNKEIQTTLAKLRNEMEAAGYKPDLKLSLYDLEEEEKAAEVSHHSEKLALAFGLLSLPLSVPIRITKNLRICGDCHSFFKFVSGSVKREIIVRDNNRFHRFKDGICSCKDYW

SEQ ID NO: 69435 - protein, 539 aa, Arabidopsis thaliana
  peptide (1)..(539): Ceres Seq. ID no. 1814514
MRREAVASLRLPVTGKQIHALAVKCGRILDVFVGCSAFDMYCKTRLRDDARKLFDEIPERNLETWNAFISNSVTDGRPREAIEAFIEFRRIDGHPNSITFCAFLNACSDWLHLNLGMQLHGLVLRSGFDTDVSIRSSEIIFTEMGTKNAVSWCSLVAAYVQNHEDEKASVLYLRSRKDIVETSDFMISSVLSACAGMAGLELGRSIHAHAVKACVERTIFVGSALVDMYGKCGCIEDSEQAFDEMPEKNLVTRNSLIGGYAHQGQVDMALALFEEMAPRGCGAVENGMKIFDSMRSTYGIEPGAEHYSCIVDMLGRAGMVERAYEFIKKMPIQPTISVWGALQNACRMHGKPQLGLLAAENLFKLDPKDSGNHVLLSNTFAAAGRWAEANTVREELKGVGIKKGAGYSWITVKNQVHAFQAKDRSHILNKEIQTTLAKLRNEMEAAGYKPDLKLSLYDLEEEEKAAEVSHHSEKLALAFGLLSLPLSVPIRITKNLRICGDCHSFFKFVSGSVKREIIVRDNNRFHRFKDGICSCKDYW

SEQ ID NO: 69436 - protein, 500 aa, Arabidopsis thaliana
  peptide (1)..(500): Ceres Seq. ID no. 1814515
MYCKTRLRDDARKLFDEIPERNLETWNAFISNSVTDGRPREAIEAFIEFRRIDGHPNSITFCAFLNACSDWLHLNLGMQLHGLVLRSGFDTDVSIRSSEIIFTEMGTKNAVSWCSLVAAYVQNHEDEKASVLYLRSRKDIVETSDFMISSVLSACAGMAGLELGRSIHAHAVKACVERTIFVGSALVDMYGKCGCIEDSEQAFDEMPEKNLVTRNSLIGGYAHQGQVDMALALFEEMAPRGCGAVENGMKIFDSMRSTYGIEPGAEHYSCIVDMLGRAGMVERAYEFIKKMPIQPTISVWGALQNACRMHGKPQLGLLAAENLFKLDPKDSGNHVLLSNTFAAAGRWAEANTVREELKGVGIKKGAGYSWITVKNQVHAFQAKDRSHILNKEIQTTLAKLRNEMEAAGYKPDLKLSLYDLEEEEKAAEVSHHSEKLALAFGLLSLPLSVPIRITKNLRICGDCHSFFKFVSGSVKREIIVRDNNRFHRFKDGICSCKDYW

SEQ ID NO: 69437 - DNA, 1977 bp, Arabidopsis thaliana
  misc_feature (1)..(1977): Ceres Seq. ID no. 1814536
  misc_feature (1)..(1977): Ortholog of  Ceres SEQ ID NO 13646680 as cited in SEQ ID NO 20737
atggatacccctcagaagagtattactcagatcggaactccaatttccaaatccagattcgaggattctccagtgttcaattacataaacagtttgtctccaataagaccagtcagatccataccaaatcctaaccaatttagctctctgaatttcacttcccctccctctgttttcacttcacctcacctaacttcttctcacaaagaatccagattcttcaaaactcacaactcttcttcttctgatcctaccaattccgttgaatctcaagaagacgagtctacttctcatgaagaagttccagcagaaggagaagatacaaaaggtcttaacatagatgattgcatgcgagaagaagcttcagttgaaacgaatcttgatgattccgttgcttcaccgtgtggtggaaatactactgatctttcgcttgttccttacgctcctactcgaggagaggatggttcttgtgaggataatggaatggagctgcagaagatgcatgataatgttcaggggaaaactgaaactccggattgggaaagtttgattgcagatgcttctgagctgttaatctttgactcacctgatgcttctgaggcttttagatgctttatgatgcagagagcatcaaactctgaagcacgttttagaaatggtgtggagaagcaaacaatgcagcacgattcaaacaaggaaccggagtccgcgaatgcgattccttatgaggtaaactcaggagtaatatcacaagctgtttcactcttgcaccgtggtataagaagacgttgtcttgactttgagatgcccgggaataagcaaacatcaagtgagaataacaccgcggcttgtgaatcctcttcgagatgtgttgtaccgagtattggtcttcatctaaatgccattttaatgtcttcaaaggactgtaaaaccaatgttactcaagattactcatgttctgcgaatatacaagtgggtttacaaaggtccatctctacactgcaagattctttggaccaaacagaaaatgaaatccgggaagatgcagatcaagatgttcctgttgaaccagctttgcaagagttaaatttgagcagccctaagaagaagagttactgtgaatgctttgctgctggagtctattgcatagagccatgttcatgtatagactgcttcaataaacctatccatgaagacgttgtcctggcgactcgcaaacagattgaatctcggaatccacttgcatttgctcctaaagtcattaggaactctgactcagttcaagaaaccggggatgatgcaagcaaaactccagcttctgcgcgccataaacgtggctgcaactgcaagaaatcaaactgtctgaagaaatactgtgaatgctatcagggtggtgtgggctgttccataaactgtagatgtgaaggatgtaagaacgcattcggccggaaagatgggtcttccattgacatggaagccgaacaagaagaggaaaatgaaacatctgagaaaagcagaacagccaaaagccaacaaaacactgaggttttaatgagaaaggacatgagttctgctctacctacgacaccaacgccgatttacagaccagaactggttcaactacctttctcatcatctaagaacaggatgcctcctccacagtctcttcttggaggtggatcttcctcagggatatttaacagtcaatatctaagaaaaccagacattagtttgtctcaatccagaatcgagaagtcattcgagacagtcgcagttgatggagctgaacaaatgcctgagattctcatccattcccctatacctaacatcaagagtgtctctcccaacggaaagagggtctctcctcctcatatggaatcatctagctcaggctcaatcttagggagaagaaatggcgggcggaaactgatattgcagtcgattccatcgtttccttctctcactccccaacactga

SEQ ID NO: 69438 - protein, 658 aa, Arabidopsis thaliana
  peptide (1)..(658): Ceres Seq. ID no. 1814537
MDTPQKSITQIGTPISKSRFEDSPVFNYINSLSPIRPVRSIPNPNQFSSLNFTSPPSVFTSPHLTSSHKESRFFKTHNSSSSDPTNSVESQEDESTSHEEVPAEGEDTKGLNIDDCMREEASVETNLDDSVASPCGGNTTDLSLVPYAPTRGEDGSCEDNGMELQKMHDNVQGKTETPDWESLIADASELLIFDSPDASEAFRCFMMQRASNSEARFRNGVEKQTMQHDSNKEPESANAIPYEVNSGVISQAVSLLHRGIRRRCLDFEMPGNKQTSSENNTAACESSSRCVVPSIGLHLNAILMSSKDCKTNVTQDYSCSANIQVGLQRSISTLQDSLDQTENEIREDADQDVPVEPALQELNLSSPKKKSYCECFAAGVYCIEPCSCIDCFNKPIHEDVVLATRKQIESRNPLAFAPKVIRNSDSVQETGDDASKTPASARHKRGCNCKKSNCLKKYCECYQGGVGCSINCRCEGCKNAFGRKDGSSIDMEAEQEEENETSEKSRTAKSQQNTEVLMRKDMSSALPTTPTPIYRPELVQLPFSSSKNRMPPPQSLLGGGSSSGIFNSQYLRKPDISLSQSRIEKSFETVAVDGAEQMPEILIHSPIPNIKSVSPNGKRVSPPHMESSSSGSILGRRNGGRKLILQSIPSFPSLTPQH

SEQ ID NO: 69439 - protein, 542 aa, Arabidopsis thaliana
  peptide (1)..(542): Ceres Seq. ID no. 1814538
MREEASVETNLDDSVASPCGGNTTDLSLVPYAPTRGEDGSCEDNGMELQKMHDNVQGKTETPDWESLIADASELLIFDSPDASEAFRCFMMQRASNSEARFRNGVEKQTMQHDSNKEPESANAIPYEVNSGVISQAVSLLHRGIRRRCLDFEMPGNKQTSSENNTAACESSSRCVVPSIGLHLNAILMSSKDCKTNVTQDYSCSANIQVGLQRSISTLQDSLDQTENEIREDADQDVPVEPALQELNLSSPKKKSYCECFAAGVYCIEPCSCIDCFNKPIHEDVVLATRKQIESRNPLAFAPKVIRNSDSVQETGDDASKTPASARHKRGCNCKKSNCLKKYCECYQGGVGCSINCRCEGCKNAFGRKDGSSIDMEAEQEEENETSEKSRTAKSQQNTEVLMRKDMSSALPTTPTPIYRPELVQLPFSSSKNRMPPPQSLLGGGSSSGIFNSQYLRKPDISLSQSRIEKSFETVAVDGAEQMPEILIHSPIPNIKSVSPNGKRVSPPHMESSSSGSILGRRNGGRKLILQSIPSFPSLTPQH

SEQ ID NO: 69440 - protein, 497 aa, Arabidopsis thaliana
  peptide (1)..(497): Ceres Seq. ID no. 1814539
MELQKMHDNVQGKTETPDWESLIADASELLIFDSPDASEAFRCFMMQRASNSEARFRNGVEKQTMQHDSNKEPESANAIPYEVNSGVISQAVSLLHRGIRRRCLDFEMPGNKQTSSENNTAACESSSRCVVPSIGLHLNAILMSSKDCKTNVTQDYSCSANIQVGLQRSISTLQDSLDQTENEIREDADQDVPVEPALQELNLSSPKKKSYCECFAAGVYCIEPCSCIDCFNKPIHEDVVLATRKQIESRNPLAFAPKVIRNSDSVQETGDDASKTPASARHKRGCNCKKSNCLKKYCECYQGGVGCSINCRCEGCKNAFGRKDGSSIDMEAEQEEENETSEKSRTAKSQQNTEVLMRKDMSSALPTTPTPIYRPELVQLPFSSSKNRMPPPQSLLGGGSSSGIFNSQYLRKPDISLSQSRIEKSFETVAVDGAEQMPEILIHSPIPNIKSVSPNGKRVSPPHMESSSSGSILGRRNGGRKLILQSIPSFPSLTPQH

SEQ ID NO: 69441 - DNA, 1563 bp, Arabidopsis thaliana
  misc_feature (1)..(1563): Ceres Seq. ID no. 1814621
  misc_feature (1)..(1563): Ortholog of  Ceres SEQ ID NO 13504578 as cited in SEQ ID NO 59850
atgaaccaaacgagacgtaagagacgacctgattcatctctctctagactcgattctctttcgccggaaatgctctttccggccaaatctccgtcgctaacttcttctcgcatcagaaacatcttcttattactcatcttttgtttcatcatctacatcatcttctcctacggcaccaatttccgccgtgaacagatttcatcaatcgctcgatcgttatctgtgttctccactcgtcgccgtcacttactcttctcgatcgccgcttctcacgactcttggctccgtcgtagctcgtacgttcgtctctggtactctcctgaatctacacgcgccgtcgtgtttctcgatcgcggtggattggagtccgatctaactcttcctcctgtgattgtctctaaagacgtttctaggtttccttataatttccctggtggtctccgatcggcgattcgtgtggctcgtgttgttaaagagacggttgatagaggagataaagatgtgcggtggtttgttttcggtgatgatgatactgtcttctttgtagataatttggtgacggttttatctaagtatgatcaccggaagtggttttacgtcggaagtaattcggagttttatgatcagaatgttaggtattcgtttgatatggcgtttggtggtggtggatttgctattagtgcttcgcttgcgaaggttttagctaaggttttggattcttgtttgatgaggtattcacatatgtatggaagtgattctaggatcttctcttgcgtcgctgagcttggtgttacattaactcatgaacctggatttcatcagattgatgtcagagggaacatatttggtctgctatgtgcgcaccctttatctccattggtatctcttcatcacttggatgcagttgatccgttttttccaaaaaggaacaggacagaatccgtggctcatcttatcggagctgcaagttttgattccgggaggattttacagcagagtgtttgttatgattctttgaacacagtgactgtttcggttgtgtggggttacgcggttcaagtttatgaaggaaataaacttcttccggatcttctcacactgcaaaagacattttctacatggaggagagggtcaggggtccaaagcaactatatgttcagtacaagagaatatccgagggatccatgtgggagaccgctcgtctttttcttggacagtgtaggatcagatggaactgagggaacatggagtaactataacatccatagagttggacactgtcacagagcagaagctgttgagcgtctagaacgcatcagagttctgtctcctaaactggaacgcaacgttgaacaggtaggatttataaatactgatcgcttctctgttaaagtaccttcaattttgcctggattcacctttttttttggtttcctgaaaataaaatgtcagatgggtttgcctcgccgccaatgttgtgacatctcatcgccatataataagtcaatggtcattaatataaggcaatgcatgccggatgagctaatcgccatgaacacttag

SEQ ID NO: 69442 - protein, 520 aa, Arabidopsis thaliana
  peptide (1)..(520): Ceres Seq. ID no. 1814622
MNQTRRKRRPDSSLSRLDSLSPEMLFPAKSPSLTSSRIRNIFLLLIFCFIIYIIFSYGTNFRREQISSIARSLSVFSTRRRHLLFSIAASHDSWLRRSSYVRLWYSPESTRAVVFLDRGGLESDLTLPPVIVSKDVSRFPYNFPGGLRSAIRVARVVKETVDRGDKDVRWFVFGDDDTVFFVDNLVTVLSKYDHRKWFYVGSNSEFYDQNVRYSFDMAFGGGGFAISASLAKVLAKVLDSCLMRYSHMYGSDSRIFSCVAELGVTLTHEPGFHQIDVRGNIFGLLCAHPLSPLVSLHHLDAVDPFFPKRNRTESVAHLIGAASFDSGRILQQSVCYDSLNTVTVSVVWGYAVQVYEGNKLLPDLLTLQKTFSTWRRGSGVQSNYMFSTREYPRDPCGRPLVFFLDSVGSDGTEGTWSNYNIHRVGHCHRAEAVERLERIRVLSPKLERNVEQVGFINTDRFSVKVPSILPGFTFFFGFLKIKCQMGLPRRQCCDISSPYNKSMVINIRQCMPDELIAMNT

SEQ ID NO: 69443 - protein, 497 aa, Arabidopsis thaliana
  peptide (1)..(497): Ceres Seq. ID no. 1814623
MLFPAKSPSLTSSRIRNIFLLLIFCFIIYIIFSYGTNFRREQISSIARSLSVFSTRRRHLLFSIAASHDSWLRRSSYVRLWYSPESTRAVVFLDRGGLESDLTLPPVIVSKDVSRFPYNFPGGLRSAIRVARVVKETVDRGDKDVRWFVFGDDDTVFFVDNLVTVLSKYDHRKWFYVGSNSEFYDQNVRYSFDMAFGGGGFAISASLAKVLAKVLDSCLMRYSHMYGSDSRIFSCVAELGVTLTHEPGFHQIDVRGNIFGLLCAHPLSPLVSLHHLDAVDPFFPKRNRTESVAHLIGAASFDSGRILQQSVCYDSLNTVTVSVVWGYAVQVYEGNKLLPDLLTLQKTFSTWRRGSGVQSNYMFSTREYPRDPCGRPLVFFLDSVGSDGTEGTWSNYNIHRVGHCHRAEAVERLERIRVLSPKLERNVEQVGFINTDRFSVKVPSILPGFTFFFGFLKIKCQMGLPRRQCCDISSPYNKSMVINIRQCMPDELIAMNT

SEQ ID NO: 69444 - protein, 304 aa, Arabidopsis thaliana
  peptide (1)..(304): Ceres Seq. ID no. 1814624
MAFGGGGFAISASLAKVLAKVLDSCLMRYSHMYGSDSRIFSCVAELGVTLTHEPGFHQIDVRGNIFGLLCAHPLSPLVSLHHLDAVDPFFPKRNRTESVAHLIGAASFDSGRILQQSVCYDSLNTVTVSVVWGYAVQVYEGNKLLPDLLTLQKTFSTWRRGSGVQSNYMFSTREYPRDPCGRPLVFFLDSVGSDGTEGTWSNYNIHRVGHCHRAEAVERLERIRVLSPKLERNVEQVGFINTDRFSVKVPSILPGFTFFFGFLKIKCQMGLPRRQCCDISSPYNKSMVINIRQCMPDELIAMNT

SEQ ID NO: 69445 - DNA, 1023 bp, Arabidopsis thaliana
  misc_feature (1)..(1023): Ceres Seq. ID no. 1814805
  misc_feature (1)..(1023): Ortholog of  Ceres SEQ ID NO 12364737 as cited in SEQ ID NO 51089
  misc_feature (1)..(1023): Ortholog of  Ceres SEQ ID NO 13595567 as cited in SEQ ID NO 56760
  misc_feature (1)..(1023): Ortholog of  Ceres SEQ ID NO 13597380 as cited in SEQ ID NO 64054
  misc_feature (1)..(1023): Ortholog of  Ceres SEQ ID NO 12625474 as cited in SEQ ID NO 64169
  misc_feature (1)..(1023): Ortholog of  Ceres SEQ ID NO 13597502 as cited in SEQ ID NO 64681
  misc_feature (1)..(1023): Ortholog of  Ceres SEQ ID NO 15180805 as cited in SEQ ID NO 0
atgtcgttgcttgtatttctttgccaaattatagtattatcggtcttgttcttctccgaggtgtgccttgccggtaaaaaaattccagcaaattttgtgttcggagattcattggtggatgccggaaacaacaactacttagccacattgtcaaaggctaattatgttcctaatgggatcgattttggatcacctactggtcgattcactaacggaagaacaatcgtcgatatcgtatatcaagcattaggttccgacgagttaactccaccatacttagcaccaacaacaagcggatctctcattctcaatggcgttaattatgcttcgggcggaagtggaattctcaattccaccggaaaattatttagattgtaccaattgggtgcgaggaaaatcgtggtgattaatattggtcccatcggttgtataccattcgagagagagtctgatccagccgctggaaataactgtttggccgaacctaatgaggtattatttctgaaattttacactcgagtgtgtgttgaattcgaacttcatttccacaagtttctctacaatagactcatttcagaccccatcggttgtataccgttcgagagagagtctgacccaatggctggatatgaatgttctgtcgaacctaatgaagtggctcaaatgtataatctcaagctgaaaatactcgtcgaggagttaaacaataatctacaaggttcaagattcgtctacggtgacgtttttcgcattgtttatgatattatacaaaattattcatcttacggttttgagagtgagaagattccttgttgttcgttagttgggaaagtaggtgggctgattccatgcggcccgccttcaaaagtatgtatggaccgttccaaatatgtattttgggatccttaccatcctaccgaagctgctaacatcatcattgctaggcgtctactctccggcgacacctccgatatttatccgatcaatctccggcaactcgctaacctcaagatatatgcatga

SEQ ID NO: 69446 - protein, 340 aa, Arabidopsis thaliana
  peptide (1)..(340): Ceres Seq. ID no. 1814806
MSLLVFLCQIIVLSVLFFSEVCLAGKKIPANFVFGDSLVDAGNNNYLATLSKANYVPNGIDFGSPTGRFTNGRTIVDIVYQALGSDELTPPYLAPTTSGSLILNGVNYASGGSGILNSTGKLFRLYQLGARKIVVINIGPIGCIPFERESDPAAGNNCLAEPNEVLFLKFYTRVCVEFELHFHKFLYNRLISDPIGCIPFERESDPMAGYECSVEPNEVAQMYNLKLKILVEELNNNLQGSRFVYGDVFRIVYDIIQNYSSYGFESEKIPCCSLVGKVGGLIPCGPPSKVCMDRSKYVFWDPYHPTEAANIIIARRLLSGDTSDIYPINLRQLANLKIYA

SEQ ID NO: 69447 - DNA, 1224 bp, Arabidopsis thaliana
  misc_feature (1)..(1224): Ceres Seq. ID no. 1815028
  misc_feature (1)..(1224): Ortholog of  Ceres SEQ ID NO 14311287 as cited in SEQ ID NO 53177
atggtggtgatgatgaaggcaactcgagggacgagagatccagatctacttgggctaatgttcgtacatcatcaattcctcttctgcgttatcagttttttttatttattgttgagagattttgaatttctgttgaacgattcttcttctggaatctggacatggtcgcaggtggtttccgaaacccaggctcttccttacctgcaaaaagcctttaatattcagcattttgatttccccacgcaggaggaccaggaagagaatacatatgcggctaaagtgagcgagaaacaagacttctcgaaggagcaatggcaagattacaaacgcccagcaagtgaacaacactactcagacgaagttgaaacttatggaaacctagaaccctcacaactagagctctcaggtctctcagaagcttgcaacaaactgtgggagctcgatttaaaccgccttgttcctggaaggattatcaaatcgactgcggagatgggaaaagggtccatgagagagctgatatggctgaaggactactgttctcttggattctgttcattgcttgacaactacaaccccaacgaaggttacaaagaagtggtcacagaagaagagaggcaagagcaagcggctttcattgaagaaattagcagaacctctgtgatcaagtaccttcacaggtaccttgtgctcaaggacgtcgctcctggaagctacttagagttcaagagaatgttgacaagtctctggttcgatctgtatggccgcggaggtacatctggctcatcttctgcgtttgagcatgtctttgtaggtgagatcaaacaatctggtgggaacaagtctctggattccataactggcttcagtacttcaaaaccggtgactgaccgagaaaccacacttttgcttcgtatgcagcctgattcagagactcagctgctaacaatccaattcgagtggaacggtgttctaaaatcagtctcaagtactctagttggagtaagtccagagttcgagttggctctatacaccatgtgtttcttcatgggcacagaagataaccacattcagttgggtccatacaatgtcaatgtcaaatgttaccgacttggcaacaaccgtatcgcgctcagctttccccattgcagaatcttgaaacctctcttgatggctctggtcacaaaatatctgccccttgcgcagtactgtattgaattattgtga

SEQ ID NO: 69448 - protein, 407 aa, Arabidopsis thaliana
  peptide (1)..(407): Ceres Seq. ID no. 1815029
MVVMMKATRGTRDPDLLGLMFVHHQFLFCVISFFYLLLRDFEFLLNDSSSGIWTWSQVVSETQALPYLQKAFNIQHFDFPTQEDQEENTYAAKVSEKQDFSKEQWQDYKRPASEQHYSDEVETYGNLEPSQLELSGLSEACNKLWELDLNRLVPGRIIKSTAEMGKGSMRELIWLKDYCSLGFCSLLDNYNPNEGYKEVVTEEERQEQAAFIEEISRTSVIKYLHRYLVLKDVAPGSYLEFKRMLTSLWFDLYGRGGTSGSSSAFEHVFVGEIKQSGGNKSLDSITGFSTSKPVTDRETTLLLRMQPDSETQLLTIQFEWNGVLKSVSSTLVGVSPEFELALYTMCFFMGTEDNHIQLGPYNVNVKCYRLGNNRIALSFPHCRILKPLLMALVTKYLPLAQYCIELL

SEQ ID NO: 69449 - protein, 404 aa, Arabidopsis thaliana
  peptide (1)..(404): Ceres Seq. ID no. 1815030
MMKATRGTRDPDLLGLMFVHHQFLFCVISFFYLLLRDFEFLLNDSSSGIWTWSQVVSETQALPYLQKAFNIQHFDFPTQEDQEENTYAAKVSEKQDFSKEQWQDYKRPASEQHYSDEVETYGNLEPSQLELSGLSEACNKLWELDLNRLVPGRIIKSTAEMGKGSMRELIWLKDYCSLGFCSLLDNYNPNEGYKEVVTEEERQEQAAFIEEISRTSVIKYLHRYLVLKDVAPGSYLEFKRMLTSLWFDLYGRGGTSGSSSAFEHVFVGEIKQSGGNKSLDSITGFSTSKPVTDRETTLLLRMQPDSETQLLTIQFEWNGVLKSVSSTLVGVSPEFELALYTMCFFMGTEDNHIQLGPYNVNVKCYRLGNNRIALSFPHCRILKPLLMALVTKYLPLAQYCIELL

SEQ ID NO: 69450 - protein, 403 aa, Arabidopsis thaliana
  peptide (1)..(403): Ceres Seq. ID no. 1815031
MKATRGTRDPDLLGLMFVHHQFLFCVISFFYLLLRDFEFLLNDSSSGIWTWSQVVSETQALPYLQKAFNIQHFDFPTQEDQEENTYAAKVSEKQDFSKEQWQDYKRPASEQHYSDEVETYGNLEPSQLELSGLSEACNKLWELDLNRLVPGRIIKSTAEMGKGSMRELIWLKDYCSLGFCSLLDNYNPNEGYKEVVTEEERQEQAAFIEEISRTSVIKYLHRYLVLKDVAPGSYLEFKRMLTSLWFDLYGRGGTSGSSSAFEHVFVGEIKQSGGNKSLDSITGFSTSKPVTDRETTLLLRMQPDSETQLLTIQFEWNGVLKSVSSTLVGVSPEFELALYTMCFFMGTEDNHIQLGPYNVNVKCYRLGNNRIALSFPHCRILKPLLMALVTKYLPLAQYCIELL

SEQ ID NO: 69451 - DNA, 1116 bp, Arabidopsis thaliana
  misc_feature (1)..(1116): Ceres Seq. ID no. 1815137
  misc_feature (1)..(1116): Ortholog of  Ceres SEQ ID NO 13654989 as cited in SEQ ID NO 63117
  misc_feature (1)..(1116): Ortholog of  Ceres SEQ ID NO 13584744 as cited in SEQ ID NO 69137
atggagaaagagaaaaaaaacataagaggaagagagttcttgcaaaagtcagctccagaattaacgacgagaaagacaactttgtcgttcaatctcccaacaccaagatctctgccatctccaacgagtatcaaagacttgtacacagacagagaacaaaatcaaaatcaaaacctgagggttttttctttcaaggaactgagtgacgccacttgtgagtttagcaggaagctaaagatcggagaaggtggctttggtagtgtctataaagccaccattaacaatcccaccgtaggagattctcattcttctccacttaccgtagccgttaagaaactcaatagacaaagtctacagggtcacaagcaatggctagcagaggttcactttttgggagtggtgaatcaccctaacgttgtgaggctcttagggtattgctcagaggacagagagagacttttggtttacgagttgatgtctaatcgcagcttggaggatcatctcttcactctaagaaccttaacgttgtcgtggaaacaaaggctcgagatcatgcttggtgcagctcaaggattggcttatttgcacgaaatccaggtaatatacagagacttcaaatcatcaaatgtgctattaaatgaagaattccatccgaaattatccgattttggtctcgctagagaaggtcccgaaggagacaatactcacgttacaaccgcaagagttggaacagacggctatgccgctcccgagtatgtaataaccggtcacctcaagacacattgcgatgtatatagctttggagttgttttgtacgaaattatcactggtcgtcgcacattggaacgaatgaaacctttagctgaacaaaagcttctagaatgggtcaaaaaatatcctattaatagcaaaagattcaaaatgatcgttgactccaagctatgcaataagtatccaattgctatggtcaggagagtggctaaattggctgatcattgtgtgaacaagatcgataaagaaagacctaccatggcctttgtcgtcgaaagtcttacgaatatcattgaggaatcaaattctgaagatatgggaagttctgttggcattagaggctag

SEQ ID NO: 69452 - protein, 371 aa, Arabidopsis thaliana
  peptide (1)..(371): Ceres Seq. ID no. 1815138
MEKEKKNIRGREFLQKSAPELTTRKTTLSFNLPTPRSLPSPTSIKDLYTDREQNQNQNLRVFSFKELSDATCEFSRKLKIGEGGFGSVYKATINNPTVGDSHSSPLTVAVKKLNRQSLQGHKQWLAEVHFLGVVNHPNVVRLLGYCSEDRERLLVYELMSNRSLEDHLFTLRTLTLSWKQRLEIMLGAAQGLAYLHEIQVIYRDFKSSNVLLNEEFHPKLSDFGLAREGPEGDNTHVTTARVGTDGYAAPEYVITGHLKTHCDVYSFGVVLYEIITGRRTLERMKPLAEQKLLEWVKKYPINSKRFKMIVDSKLCNKYPIAMVRRVAKLADHCVNKIDKERPTMAFVVESLTNIIEESNSEDMGSSVGIRG

SEQ ID NO: 69453 - protein, 213 aa, Arabidopsis thaliana
  peptide (1)..(213): Ceres Seq. ID no. 1815139
MSNRSLEDHLFTLRTLTLSWKQRLEIMLGAAQGLAYLHEIQVIYRDFKSSNVLLNEEFHPKLSDFGLAREGPEGDNTHVTTARVGTDGYAAPEYVITGHLKTHCDVYSFGVVLYEIITGRRTLERMKPLAEQKLLEWVKKYPINSKRFKMIVDSKLCNKYPIAMVRRVAKLADHCVNKIDKERPTMAFVVESLTNIIEESNSEDMGSSVGIRG

SEQ ID NO: 69454 - protein, 187 aa, Arabidopsis thaliana
  peptide (1)..(187): Ceres Seq. ID no. 1815140
MLGAAQGLAYLHEIQVIYRDFKSSNVLLNEEFHPKLSDFGLAREGPEGDNTHVTTARVGTDGYAAPEYVITGHLKTHCDVYSFGVVLYEIITGRRTLERMKPLAEQKLLEWVKKYPINSKRFKMIVDSKLCNKYPIAMVRRVAKLADHCVNKIDKERPTMAFVVESLTNIIEESNSEDMGSSVGIRG

SEQ ID NO: 69455 - DNA, 1095 bp, Arabidopsis thaliana
  misc_feature (1)..(1095): Ceres Seq. ID no. 1815216
  misc_feature (1)..(1095): Ortholog of  Ceres SEQ ID NO 12612408 as cited in SEQ ID NO 54155
atggcggatgttaaggactcagtgattaccaagtacggaatcgtagggattggtatgatgggaagagaacatctcatcaatcttcaccatctccgtgaccaaggcctcgccgtcgtttgcatcgccgatcctcaccctccttcacagctcctggccattgaactcgctcaatcttttggatgggagcttaaggttttctcaggacacgaggagttgctcaagagtgagctgtgtgacgttattgttgtctcttctccaaatatgactcatcatcagattcttatggacattatcaattattcaaaaccgcatcatgttcttgttgagaagcctttatgcaccacagttgcagattgcaaacaggttttggaggctgcaaagaaaaggtcagatatggtggtgcaagttgggttggagtacagatacatgccgccagttgctaagctaatagaacaagtaaaaggcagagactttggtaatgtcaagatggtagcaatccgagaacatagattccctttcttggttaaggtaggcttaaacaagatgggactatggaccttagtggagaaatgctgccacttctttgatctaatgaggctctttgccggtgcaaatcctgtctgtgtgatggcttctggaggcatggatgtgaaccacaaggatgaagtttatggtggaaaggtgcctgatataattgataacgcatatgttattattgagtttgacaatggatgtcgtgggatgctcgatctttgcatgtttgctgaaggaagcaaaaacgagcaagaaatttctgttactggtgacattggaaagggggaggcacttgttccagagggtatagttcgatctggcagtcgtattggaggaagagaacacgttcaaacaataaaagcagaagatgaaagaataaaatatgaagggttgcatcacgggtcaagttacttggaacacctcaccttcttatcagcaatcagaggtgaaggaatagcagctgttgatttggaagacggattgatggctgttgccatgggagttgctgcacagctctccattcaggagcgccgctatgtaaccattgacgaggtcttgtga

SEQ ID NO: 69456 - protein, 364 aa, Arabidopsis thaliana
  peptide (1)..(364): Ceres Seq. ID no. 1815217
MADVKDSVITKYGIVGIGMMGREHLINLHHLRDQGLAVVCIADPHPPSQLLAIELAQSFGWELKVFSGHEELLKSELCDVIVVSSPNMTHHQILMDIINYSKPHHVLVEKPLCTTVADCKQVLEAAKKRSDMVVQVGLEYRYMPPVAKLIEQVKGRDFGNVKMVAIREHRFPFLVKVGLNKMGLWTLVEKCCHFFDLMRLFAGANPVCVMASGGMDVNHKDEVYGGKVPDIIDNAYVIIEFDNGCRGMLDLCMFAEGSKNEQEISVTGDIGKGEALVPEGIVRSGSRIGGREHVQTIKAEDERIKYEGLHHGSSYLEHLTFLSAIRGEGIAAVDLEDGLMAVAMGVAAQLSIQERRYVTIDEVL

SEQ ID NO: 69457 - protein, 346 aa, Arabidopsis thaliana
  peptide (1)..(346): Ceres Seq. ID no. 1815218
MMGREHLINLHHLRDQGLAVVCIADPHPPSQLLAIELAQSFGWELKVFSGHEELLKSELCDVIVVSSPNMTHHQILMDIINYSKPHHVLVEKPLCTTVADCKQVLEAAKKRSDMVVQVGLEYRYMPPVAKLIEQVKGRDFGNVKMVAIREHRFPFLVKVGLNKMGLWTLVEKCCHFFDLMRLFAGANPVCVMASGGMDVNHKDEVYGGKVPDIIDNAYVIIEFDNGCRGMLDLCMFAEGSKNEQEISVTGDIGKGEALVPEGIVRSGSRIGGREHVQTIKAEDERIKYEGLHHGSSYLEHLTFLSAIRGEGIAAVDLEDGLMAVAMGVAAQLSIQERRYVTIDEVL

SEQ ID NO: 69458 - protein, 345 aa, Arabidopsis thaliana
  peptide (1)..(345): Ceres Seq. ID no. 1815219
MGREHLINLHHLRDQGLAVVCIADPHPPSQLLAIELAQSFGWELKVFSGHEELLKSELCDVIVVSSPNMTHHQILMDIINYSKPHHVLVEKPLCTTVADCKQVLEAAKKRSDMVVQVGLEYRYMPPVAKLIEQVKGRDFGNVKMVAIREHRFPFLVKVGLNKMGLWTLVEKCCHFFDLMRLFAGANPVCVMASGGMDVNHKDEVYGGKVPDIIDNAYVIIEFDNGCRGMLDLCMFAEGSKNEQEISVTGDIGKGEALVPEGIVRSGSRIGGREHVQTIKAEDERIKYEGLHHGSSYLEHLTFLSAIRGEGIAAVDLEDGLMAVAMGVAAQLSIQERRYVTIDEVL

SEQ ID NO: 69459 - DNA, 951 bp, Arabidopsis thaliana
  misc_feature (1)..(951): Ceres Seq. ID no. 1815443
  misc_feature (1)..(951): Ortholog of  Ceres SEQ ID NO 12583421 as cited in SEQ ID NO 56410
  misc_feature (1)..(951): Ortholog of  Ceres SEQ ID NO 13596876 as cited in SEQ ID NO 62696
atgtcttcttcgtctcctcctttctgttccggtggaagtcggaaggagctccgagataaagaaattacgagtaagagtgatgatacacaggcgagttatgttttaggatctaaatttgtggacccgacacgtgttcttcaactttcatggctaccaaggaatgtatgttttactgcttcaaattttaggggtctgaagcaatttggtatgtatagggtctttctataccgcgggttcttgtcggaggaagagtgtgatcatctgatatctctgagaaaggagactacagaggtttactcagtggatgctgatggaaagacgcaacttgatccagtagttgctgggattgaagaaaaagtttctgcgtggactttcctcccaggaggtctcttttcttgtggccaaactgctggcttatgtttctctcttgacgcacatttttcagaaaatggcggctctatcaaggtaagaagttacacttctgagaagtcaggaaagaagttggattattttggagaggaacctagctccgtattgcatgaatctttgctggcaaccgtcgttctctacctctcaaacacaactcaaggaggagagcttctcttcccaaattcagagatgaaacccaaaaacagttgcttggagggcggtaacattttaagaccagtaaaaggaaacgcaattctgttcttcaccaggctcttgaatgcatctttggatgggaaaagcactcatttgaggtgccctgtggtgaaaggagaactgttagtggcaacaaaactgatctatgcgaagaaacaagcaagaattgaggagagtggggaatgcagtgatgaagacgaaaactgtggacgatgggctaagcttggggagtgcaagaaaaaccctgtctatatgattggctctcctgattactacggtacctgcagaaagagttgtaacgcttgttga

SEQ ID NO: 69460 - protein, 316 aa, Arabidopsis thaliana
  peptide (1)..(316): Ceres Seq. ID no. 1815444
MSSSSPPFCSGGSRKELRDKEITSKSDDTQASYVLGSKFVDPTRVLQLSWLPRNVCFTASNFRGLKQFGMYRVFLYRGFLSEEECDHLISLRKETTEVYSVDADGKTQLDPVVAGIEEKVSAWTFLPGGLFSCGQTAGLCFSLDAHFSENGGSIKVRSYTSEKSGKKLDYFGEEPSSVLHESLLATVVLYLSNTTQGGELLFPNSEMKPKNSCLEGGNILRPVKGNAILFFTRLLNASLDGKSTHLRCPVVKGELLVATKLIYAKKQARIEESGECSDEDENCGRWAKLGECKKNPVYMIGSPDYYGTCRKSCNAC

SEQ ID NO: 69461 - protein, 247 aa, Arabidopsis thaliana
  peptide (1)..(247): Ceres Seq. ID no. 1815445
MYRVFLYRGFLSEEECDHLISLRKETTEVYSVDADGKTQLDPVVAGIEEKVSAWTFLPGGLFSCGQTAGLCFSLDAHFSENGGSIKVRSYTSEKSGKKLDYFGEEPSSVLHESLLATVVLYLSNTTQGGELLFPNSEMKPKNSCLEGGNILRPVKGNAILFFTRLLNASLDGKSTHLRCPVVKGELLVATKLIYAKKQARIEESGECSDEDENCGRWAKLGECKKNPVYMIGSPDYYGTCRKSCNAC

SEQ ID NO: 69462 - DNA, 771 bp, Arabidopsis thaliana
  misc_feature (1)..(771): Ceres Seq. ID no. 1815508
  misc_feature (1)..(771): Ortholog of  Ceres SEQ ID NO 13655598 as cited in SEQ ID NO 64077
atgagaagaatgattccaacatcgttttcaagtaagtttcaaggagtactaagtatgaatgcgttgagatgttatgtatcagagtttatctcaaccttcttcttcgtcctcgcagccgttggttctgtcatgtcttcaaggaaattgatggctggtgatgtgtctggtccgtttggtgttttaataccggcgattgctaatgcgttggcgttatcatcgtcagtttacatctcttggaacgtctctggtggtcatgtgaatccagcggttacgtttgcgatggctgttgctggtcggattagcgttccaaccgctatgttttattggacttctcagatgattgcctctgttatggcttgccttgttcttaaagtaaccgtcatggaacagcacgtaccgatttataagattgctggagaaatgactggatttggagcatctgttcttgaaggtgttttagctttcgtcttggtttatactgtgttcacggctagcgatcccagacgtgggctacctttagcagtgggacctatatttatagggtttgttgcgggagccaatgttctagccgctggtccattctctggaggttcaatgaatcctgcgtgtgcctttgggtcggcgatggtttacggaagctttaagaaccaagctgtgtattgggttgggcctctgcttggaggagccacagctgctttagtgtatgataacgtggtggtccctgtagaagatgatcgtggttcatctactggtgatgccattggtgtgtaa

SEQ ID NO: 69463 - protein, 256 aa, Arabidopsis thaliana
  peptide (1)..(256): Ceres Seq. ID no. 1815509
MRRMIPTSFSSKFQGVLSMNALRCYVSEFISTFFFVLAAVGSVMSSRKLMAGDVSGPFGVLIPAIANALALSSSVYISWNVSGGHVNPAVTFAMAVAGRISVPTAMFYWTSQMIASVMACLVLKVTVMEQHVPIYKIAGEMTGFGASVLEGVLAFVLVYTVFTASDPRRGLPLAVGPIFIGFVAGANVLAAGPFSGGSMNPACAFGSAMVYGSFKNQAVYWVGPLLGGATAALVYDNVVVPVEDDRGSSTGDAIGV

SEQ ID NO: 69464 - protein, 253 aa, Arabidopsis thaliana
  peptide (1)..(253): Ceres Seq. ID no. 1815510
MIPTSFSSKFQGVLSMNALRCYVSEFISTFFFVLAAVGSVMSSRKLMAGDVSGPFGVLIPAIANALALSSSVYISWNVSGGHVNPAVTFAMAVAGRISVPTAMFYWTSQMIASVMACLVLKVTVMEQHVPIYKIAGEMTGFGASVLEGVLAFVLVYTVFTASDPRRGLPLAVGPIFIGFVAGANVLAAGPFSGGSMNPACAFGSAMVYGSFKNQAVYWVGPLLGGATAALVYDNVVVPVEDDRGSSTGDAIGV

SEQ ID NO: 69465 - protein, 238 aa, Arabidopsis thaliana
  peptide (1)..(238): Ceres Seq. ID no. 1815511
MNALRCYVSEFISTFFFVLAAVGSVMSSRKLMAGDVSGPFGVLIPAIANALALSSSVYISWNVSGGHVNPAVTFAMAVAGRISVPTAMFYWTSQMIASVMACLVLKVTVMEQHVPIYKIAGEMTGFGASVLEGVLAFVLVYTVFTASDPRRGLPLAVGPIFIGFVAGANVLAAGPFSGGSMNPACAFGSAMVYGSFKNQAVYWVGPLLGGATAALVYDNVVVPVEDDRGSSTGDAIGV

SEQ ID NO: 69466 - DNA, 603 bp, Arabidopsis thaliana
  misc_feature (1)..(603): Ceres Seq. ID no. 1815672
  misc_feature (1)..(603): Ortholog of  Ceres SEQ ID NO 14305540 as cited in SEQ ID NO 60089
atggcgccggtcaacctccgtacgaatctctccgtgcgcaggaccgtacggtgtatggcgaacccgaggagagttaagatggtggctaagcagataatgagagaactctccgacatgcttctaacagacacggttttacaacacgctgtcttacctgaagctgcacttggagctgaccgctacctctcttctctcaccaccattagcgatgttgaagtctctaatgatttgcaggtgatgagaaaccctaattggaaactcttgtgtaatgtggttaaagtatatgtatccgtgtttggagatgatagagggaaagacgttgcaattgcggggttgaaatcgaaagctaagtacgttaggagtgagcttgggaagcgaatgaagttgagattgacgcctgaggtcaggtttattgaggatgaagccatggaaagaggaagcaggaaactgaattggagactgtttcaggtaattgcaatactggacaaaataaaagctgagaaaggaagcggtgaagggaaaacagaaccatctgactcaacagaagatgatcaagattgggaagtggatgaccccgacgaagacataatctatgtaaagtaa

SEQ ID NO: 69467 - protein, 200 aa, Arabidopsis thaliana
  peptide (1)..(200): Ceres Seq. ID no. 1815673
MAPVNLRTNLSVRRTVRCMANPRRVKMVAKQIMRELSDMLLTDTVLQHAVLPEAALGADRYLSSLTTISDVEVSNDLQVMRNPNWKLLCNVVKVYVSVFGDDRGKDVAIAGLKSKAKYVRSELGKRMKLRLTPEVRFIEDEAMERGSRKLNWRLFQVIAILDKIKAEKGSGEGKTEPSDSTEDDQDWEVDDPDEDIIYVK

SEQ ID NO: 69468 - protein, 182 aa, Arabidopsis thaliana
  peptide (1)..(182): Ceres Seq. ID no. 1815674
MANPRRVKMVAKQIMRELSDMLLTDTVLQHAVLPEAALGADRYLSSLTTISDVEVSNDLQVMRNPNWKLLCNVVKVYVSVFGDDRGKDVAIAGLKSKAKYVRSELGKRMKLRLTPEVRFIEDEAMERGSRKLNWRLFQVIAILDKIKAEKGSGEGKTEPSDSTEDDQDWEVDDPDEDIIYVK

SEQ ID NO: 69469 - protein, 174 aa, Arabidopsis thaliana
  peptide (1)..(174): Ceres Seq. ID no. 1815675
MVAKQIMRELSDMLLTDTVLQHAVLPEAALGADRYLSSLTTISDVEVSNDLQVMRNPNWKLLCNVVKVYVSVFGDDRGKDVAIAGLKSKAKYVRSELGKRMKLRLTPEVRFIEDEAMERGSRKLNWRLFQVIAILDKIKAEKGSGEGKTEPSDSTEDDQDWEVDDPDEDIIYVK

SEQ ID NO: 69470 - DNA, 1683 bp, Arabidopsis thaliana
  misc_feature (1)..(1683): Ceres Seq. ID no. 1815696
  misc_feature (1)..(1683): Ortholog of  Ceres SEQ ID NO 15175771 as cited in SEQ ID NO 55443
atggctgagaccaaacctgaaatagagatgtcggaggaagagaggaagatagtgaagataagctcgctgaagaagaaagcgataaatgcatccaacagattcaagaactccttcaagaaaaaaggtcggagaagcagcagcagagtcatgtccgttccgattgaggacgacattgacgcagaagatcttcaagctcttgatgcttttcgtcaagctcttatccttgacgagcttttgccatccaaactcgatgatctccacatgatgcttcgatttttgagagcaagaaagtttgacattgagaaagctaagcaaatgtggagtgacatgatccaatggaggaaagatttcggcgctgacacaatcattgaggattttgatttcgaagaaattgatgaagtgatgaagcactaccctcaaggctatcatggagttgacaaggaaggcagaccagtttacattgagagactaggtcaaatcgatgctaacaagctactccaagtgacaacaatggaccggtacgtgaaatatcatgtcaaagagttcgagaagactttcaaggtcaagttcccttcttgttctgtagcagcaaataaacacattgatcagagcacaacaattcttgacgtgcaaggcgtgggtcttaagaacttcagcaaatctgcaagagagcttcttcaaaggctttgcaagattgacaatgaaaattaccctgagactttgaaccggatgtttatcatcaatgctggttctggattccggctcttgtggagcacagttaagtcgtttcttgatcccaagaccacagcaaagattcatgttcttgggaacaaatatcatagcaaattgctcgaggtcatcgatgctagtgaattgcctgagttctttggaggtgcttgcacttgtgaagacaaaggaggttgtatgcgctctgacaaaggtccatggaatgatcctgaagttctcaagatcgctataaaccgtgaagctaagtgttcaccgatttcagaagatgaacacaagcatgtagaccaaggaagatcaacttcaggtttcgaaagtcttgagagaatcaagaagaaaaccgatgaagataatgtgtatgagaagcaaattgcaaccattgacaagtcaatggatatggcatggcttgccaaaactcagaaagctgaaaactttccaatctctaaaggtataactaaactcatgaaaggggcacccaagaaaggagatggattacttgtgggaggggtcatggcctttgtgatgggaatagttgcaatggttaggctatcaaaagacgttccacgcaaactcaccgaggctgctttatatggaaactcagtctgttatgaggaatctacaaagtctaagcagaatcaaggtcaattcgcagcaccagtctcgagctctgaatatatgttgatggtgaaacgtatggctgagctggaagataagtgcatgttccttgacttgaaacctgctcatgtcgaatctgagaaagaagagaaacttcaggccgcgcttaatcgcgttcaagtgcttgagcaagagttgactgagaccaagaaggctttggaagaagcacttgtgagccagaaggagattttggcatacatcgagaaaaagaagaagaagaagaagctggtaagaacaaaacattcacacacatcggttatttaa

SEQ ID NO: 69471 - protein, 560 aa, Arabidopsis thaliana
  peptide (1)..(560): Ceres Seq. ID no. 1815697
MAETKPEIEMSEEERKIVKISSLKKKAINASNRFKNSFKKKGRRSSSRVMSVPIEDDIDAEDLQALDAFRQALILDELLPSKLDDLHMMLRFLRARKFDIEKAKQMWSDMIQWRKDFGADTIIEDFDFEEIDEVMKHYPQGYHGVDKEGRPVYIERLGQIDANKLLQVTTMDRYVKYHVKEFEKTFKVKFPSCSVAANKHIDQSTTILDVQGVGLKNFSKSARELLQRLCKIDNENYPETLNRMFIINAGSGFRLLWSTVKSFLDPKTTAKIHVLGNKYHSKLLEVIDASELPEFFGGACTCEDKGGCMRSDKGPWNDPEVLKIAINREAKCSPISEDEHKHVDQGRSTSGFESLERIKKKTDEDNVYEKQIATIDKSMDMAWLAKTQKAENFPISKGITKLMKGAPKKGDGLLVGGVMAFVMGIVAMVRLSKDVPRKLTEAALYGNSVCYEESTKSKQNQGQFAAPVSSSEYMLMVKRMAELEDKCMFLDLKPAHVESEKEEKLQAALNRVQVLEQELTETKKALEEALVSQKEILAYIEKKKKKKKLVRTKHSHTSVI

SEQ ID NO: 69472 - protein, 551 aa, Arabidopsis thaliana
  peptide (1)..(551): Ceres Seq. ID no. 1815698
MSEEERKIVKISSLKKKAINASNRFKNSFKKKGRRSSSRVMSVPIEDDIDAEDLQALDAFRQALILDELLPSKLDDLHMMLRFLRARKFDIEKAKQMWSDMIQWRKDFGADTIIEDFDFEEIDEVMKHYPQGYHGVDKEGRPVYIERLGQIDANKLLQVTTMDRYVKYHVKEFEKTFKVKFPSCSVAANKHIDQSTTILDVQGVGLKNFSKSARELLQRLCKIDNENYPETLNRMFIINAGSGFRLLWSTVKSFLDPKTTAKIHVLGNKYHSKLLEVIDASELPEFFGGACTCEDKGGCMRSDKGPWNDPEVLKIAINREAKCSPISEDEHKHVDQGRSTSGFESLERIKKKTDEDNVYEKQIATIDKSMDMAWLAKTQKAENFPISKGITKLMKGAPKKGDGLLVGGVMAFVMGIVAMVRLSKDVPRKLTEAALYGNSVCYEESTKSKQNQGQFAAPVSSSEYMLMVKRMAELEDKCMFLDLKPAHVESEKEEKLQAALNRVQVLEQELTETKKALEEALVSQKEILAYIEKKKKKKKLVRTKHSHTSVI

SEQ ID NO: 69473 - protein, 511 aa, Arabidopsis thaliana
  peptide (1)..(511): Ceres Seq. ID no. 1815699
MSVPIEDDIDAEDLQALDAFRQALILDELLPSKLDDLHMMLRFLRARKFDIEKAKQMWSDMIQWRKDFGADTIIEDFDFEEIDEVMKHYPQGYHGVDKEGRPVYIERLGQIDANKLLQVTTMDRYVKYHVKEFEKTFKVKFPSCSVAANKHIDQSTTILDVQGVGLKNFSKSARELLQRLCKIDNENYPETLNRMFIINAGSGFRLLWSTVKSFLDPKTTAKIHVLGNKYHSKLLEVIDASELPEFFGGACTCEDKGGCMRSDKGPWNDPEVLKIAINREAKCSPISEDEHKHVDQGRSTSGFESLERIKKKTDEDNVYEKQIATIDKSMDMAWLAKTQKAENFPISKGITKLMKGAPKKGDGLLVGGVMAFVMGIVAMVRLSKDVPRKLTEAALYGNSVCYEESTKSKQNQGQFAAPVSSSEYMLMVKRMAELEDKCMFLDLKPAHVESEKEEKLQAALNRVQVLEQELTETKKALEEALVSQKEILAYIEKKKKKKKLVRTKHSHTSVI

SEQ ID NO: 69474 - DNA, 2025 bp, Arabidopsis thaliana
  misc_feature (1)..(2025): Ceres Seq. ID no. 1815726
  misc_feature (1)..(2025): Ortholog of  Ceres SEQ ID NO 13655640 as cited in SEQ ID NO 63844
  misc_feature (1)..(2025): Ortholog of  Ceres SEQ ID NO 13657138 as cited in SEQ ID NO 65923
  misc_feature (1)..(2025): Ortholog of  Ceres SEQ ID NO 13584744 as cited in SEQ ID NO 69137
atggcggactcaccggtggattcatctcctgcccctgaaacctcaaatgggacaccaccgtcaaacggaacatcgccgtctaatgagtcatcgccgccaacaccaccttcttcaccaccaccatcatcaatatctgctcctccgccagatatctccgcttctttttcaccgccgcctgcaccaccaacgcaagaaacgtcacctcctacatctccgtcctcatcgccgcctgttgtagctaatccgtcaccgcagactccagagaatccttctccacctgcacctgaaggctcaactcctgtaacgccacctgcaccaccacaaacaccgtcgaaccaatcaccggaaagaccaactcctccttctcctggtgccaatgatgaccgaaacagaaccaatggcggaaacaacaacagagacggctccacaccatcaccaccgtcgtcagggaacagaacttccggtgacggtggctcaccttcaccacctcggtcgataagccctcctcagaatagtggagattcagactcatcatcggggcttttgcttctacttgcagtgtgtatttgcatctgttgcaacaggaagaagaagaagaaatctcctcaggtcaaccacatgcactactacaataacaatccttatggaggagcaccctcaggtaatggtggttattacaagggaacacctcaagatcatgtggtgaatatggctggtcaaggaggtgggaattggggtccacagcaacctgtgtctggtcctcacagtgatgcttccaacttaaccggtcgaactgctataccgtcacctcaagctgcaactcttggtcacaaccaaagcactttcacatacgatgaactgtccattgcaacagaaggtttcgctcagtcaaatttgctaggacaaggaggatttgggtatgttcataaaggagttctgcctagtggcaaagaagttgcagtgaagagtcttaaacttggaagtggacaaggggaacgcgagtttcaagcagaggttgatatcattagccgtgtccatcatcgtcatctcgtttctcttgttggatattgcatctctggtggtcaaagacttttggtttatgagtttatacctaacaacactcttgaatttcatcttcatggaaagggtcgtccggttttggattggcctacaagagtgaagattgcattgggatcagctagaggccttgcatatttgcatgaagactgtaagaaaatctttatctcacatatttgcatcagtcaccctcgcattatccacagagatatcaaagctgcaaacattcttcttgatttcagttttgagaccaaggtggcagattttggattggctaagctatctcaagacaactatactcatgtctccactcgcgtcatgggaacttttggatacttagctccagagtatgcatcaagcggaaagttatccgacaaatctgatgttttctcatttggagtaatgcttcttgagctcataaccggaagacctcctctggatctaactggagaaatggaagatagcttggtagattgggcaaggcctttgtgtttgaaagcagctcaagatggagattacaaccaattggctgatccacgtctagagctaaactacagtcatcaagagatggttcaaatggcttcttgtgcagctgcagcaatcagacattcagcaagaagacggcctaagatgagccaggttcaaaaactcataccacttgttggttctattattgtacgagcactagaaggagatatgtcaatggatgatctaagtgagggaacaagaccaggacaaagcacgtacttgagccccgggagcgtgagctcagagtatgacgcaagctcgtacacggcagacatgaaaaagttcaagaaactggcgttagagaataaagaatatcaaagcagtgaatatggtggaacaagtgagtatggcttaaacccttctgcttcaagtagtgaagaaatgaatagaggctcaatgaaacgcaatcctcagctttga

SEQ ID NO: 69475 - protein, 674 aa, Arabidopsis thaliana
  peptide (1)..(674): Ceres Seq. ID no. 1815727
MADSPVDSSPAPETSNGTPPSNGTSPSNESSPPTPPSSPPPSSISAPPPDISASFSPPPAPPTQETSPPTSPSSSPPVVANPSPQTPENPSPPAPEGSTPVTPPAPPQTPSNQSPERPTPPSPGANDDRNRTNGGNNNRDGSTPSPPSSGNRTSGDGGSPSPPRSISPPQNSGDSDSSSGLLLLLAVCICICCNRKKKKKSPQVNHMHYYNNNPYGGAPSGNGGYYKGTPQDHVVNMAGQGGGNWGPQQPVSGPHSDASNLTGRTAIPSPQAATLGHNQSTFTYDELSIATEGFAQSNLLGQGGFGYVHKGVLPSGKEVAVKSLKLGSGQGEREFQAEVDIISRVHHRHLVSLVGYCISGGQRLLVYEFIPNNTLEFHLHGKGRPVLDWPTRVKIALGSARGLAYLHEDCKKIFISHICISHPRIIHRDIKAANILLDFSFETKVADFGLAKLSQDNYTHVSTRVMGTFGYLAPEYASSGKLSDKSDVFSFGVMLLELITGRPPLDLTGEMEDSLVDWARPLCLKAAQDGDYNQLADPRLELNYSHQEMVQMASCAAAAIRHSARRRPKMSQVQKLIPLVGSIIVRALEGDMSMDDLSEGTRPGQSTYLSPGSVSSEYDASSYTADMKKFKKLALENKEYQSSEYGGTSEYGLNPSASSSEEMNRGSMKRNPQL

SEQ ID NO: 69476 - protein, 468 aa, Arabidopsis thaliana
  peptide (1)..(468): Ceres Seq. ID no. 1815728
MHYYNNNPYGGAPSGNGGYYKGTPQDHVVNMAGQGGGNWGPQQPVSGPHSDASNLTGRTAIPSPQAATLGHNQSTFTYDELSIATEGFAQSNLLGQGGFGYVHKGVLPSGKEVAVKSLKLGSGQGEREFQAEVDIISRVHHRHLVSLVGYCISGGQRLLVYEFIPNNTLEFHLHGKGRPVLDWPTRVKIALGSARGLAYLHEDCKKIFISHICISHPRIIHRDIKAANILLDFSFETKVADFGLAKLSQDNYTHVSTRVMGTFGYLAPEYASSGKLSDKSDVFSFGVMLLELITGRPPLDLTGEMEDSLVDWARPLCLKAAQDGDYNQLADPRLELNYSHQEMVQMASCAAAAIRHSARRRPKMSQVQKLIPLVGSIIVRALEGDMSMDDLSEGTRPGQSTYLSPGSVSSEYDASSYTADMKKFKKLALENKEYQSSEYGGTSEYGLNPSASSSEEMNRGSMKRNPQL

SEQ ID NO: 69477 - protein, 438 aa, Arabidopsis thaliana
  peptide (1)..(438): Ceres Seq. ID no. 1815729
MAGQGGGNWGPQQPVSGPHSDASNLTGRTAIPSPQAATLGHNQSTFTYDELSIATEGFAQSNLLGQGGFGYVHKGVLPSGKEVAVKSLKLGSGQGEREFQAEVDIISRVHHRHLVSLVGYCISGGQRLLVYEFIPNNTLEFHLHGKGRPVLDWPTRVKIALGSARGLAYLHEDCKKIFISHICISHPRIIHRDIKAANILLDFSFETKVADFGLAKLSQDNYTHVSTRVMGTFGYLAPEYASSGKLSDKSDVFSFGVMLLELITGRPPLDLTGEMEDSLVDWARPLCLKAAQDGDYNQLADPRLELNYSHQEMVQMASCAAAAIRHSARRRPKMSQVQKLIPLVGSIIVRALEGDMSMDDLSEGTRPGQSTYLSPGSVSSEYDASSYTADMKKFKKLALENKEYQSSEYGGTSEYGLNPSASSSEEMNRGSMKRNPQL

SEQ ID NO: 69478 - DNA, 1158 bp, Arabidopsis thaliana
  misc_feature (1)..(1158): Ceres Seq. ID no. 1815740
  misc_feature (1)..(1158): Ortholog of  Ceres SEQ ID NO 13594345 as cited in SEQ ID NO 58043
  misc_feature (1)..(1158): Ortholog of  Ceres SEQ ID NO 13597574 as cited in SEQ ID NO 64677
  misc_feature (1)..(1158): Ortholog of  Ceres SEQ ID NO 13597843 as cited in SEQ ID NO 64850
  misc_feature (1)..(1158): Ortholog of  Ceres SEQ ID NO 13597678 as cited in SEQ ID NO 65375
  misc_feature (1)..(1158): Ortholog of  Ceres SEQ ID NO 13662880 as cited in SEQ ID NO 65422
  misc_feature (1)..(1158): Ortholog of  Ceres SEQ ID NO 12779098 as cited in SEQ ID NO 67698
  misc_feature (1)..(1158): Ortholog of  Ceres SEQ ID NO 13591190 as cited in SEQ ID NO 68044
  misc_feature (1)..(1158): Ortholog of  Ceres SEQ ID NO 13595961 as cited in SEQ ID NO 68223
atggagaaaagagtagagaagagaaggatagtgttggttccacttccattactaggacatttcactccgatgatgcaactcggccaagcccttatcttgaagggattctcaattatagttcctcagggagaattcaatcgagtaaactcttcgcagaagttccctgctgaggagttgaagcttcccaatttcatcttcagtactcaaactgctacacataaagtttgctgcaatgttttaagcaaacttaatgccaagaagtacttgatcgacatggaagagcatgacgtgcaaaacaaggtagtggaaaatatgcatccattaagatacaaagacttaccaactgcaacatttggagaactagaaccttttttggagctctgtagagatgtagtcaacaaaagaacagcctctgctgttatcatcaacaccgtgacctgtctagagagctcgtctctcacaaggctgcaacaagaactccaaattccggtgtatccattaggccctcttcacattacagattcatcgacaggatttactgtgctgcaagaggataggagctgcgttgaatggctgaacaagcagaaaccaaggtctgtcatatacataagtttaggaagcatggttctcatggaaaccaaggagatgttagagatggcttggggaatgttgaatagcaaccaacctttcttatgggtcatccgacctggatctgtctcaggctccgaggggatagagtcattgccagaggaagtcagtaagatggttttagagaaaggatacattgtgaaatgggcaccacaaatagaagtactaggacatccctcagtgggaggcttttggagccactgtggatggaactcaacactcgagagcattgtggaaggagttccaatgatttgcaggccttatcaaggcgagcagatgttaaatgcaatatatctagagagtgtatggagaatagggattcaggtaggaggtgaactggaaagaggagccgtcgagagagctgtgaagaggttgattgtggataaagaaggtgcaagcatgagggagagaacccttgttttaaaagagaagctcaaagcctctattagaggtggaggctcctcatgcaatgcattagatgagcttgtcaagcacttgaagacagagtga

SEQ ID NO: 69479 - protein, 385 aa, Arabidopsis thaliana
  peptide (1)..(385): Ceres Seq. ID no. 1815741
MEKRVEKRRIVLVPLPLLGHFTPMMQLGQALILKGFSIIVPQGEFNRVNSSQKFPAEELKLPNFIFSTQTATHKVCCNVLSKLNAKKYLIDMEEHDVQNKVVENMHPLRYKDLPTATFGELEPFLELCRDVVNKRTASAVIINTVTCLESSSLTRLQQELQIPVYPLGPLHITDSSTGFTVLQEDRSCVEWLNKQKPRSVIYISLGSMVLMETKEMLEMAWGMLNSNQPFLWVIRPGSVSGSEGIESLPEEVSKMVLEKGYIVKWAPQIEVLGHPSVGGFWSHCGWNSTLESIVEGVPMICRPYQGEQMLNAIYLESVWRIGIQVGGELERGAVERAVKRLIVDKEGASMRERTLVLKEKLKASIRGGGSSCNALDELVKHLKTE

SEQ ID NO: 69480 - protein, 362 aa, Arabidopsis thaliana
  peptide (1)..(362): Ceres Seq. ID no. 1815742
MMQLGQALILKGFSIIVPQGEFNRVNSSQKFPAEELKLPNFIFSTQTATHKVCCNVLSKLNAKKYLIDMEEHDVQNKVVENMHPLRYKDLPTATFGELEPFLELCRDVVNKRTASAVIINTVTCLESSSLTRLQQELQIPVYPLGPLHITDSSTGFTVLQEDRSCVEWLNKQKPRSVIYISLGSMVLMETKEMLEMAWGMLNSNQPFLWVIRPGSVSGSEGIESLPEEVSKMVLEKGYIVKWAPQIEVLGHPSVGGFWSHCGWNSTLESIVEGVPMICRPYQGEQMLNAIYLESVWRIGIQVGGELERGAVERAVKRLIVDKEGASMRERTLVLKEKLKASIRGGGSSCNALDELVKHLKTE

SEQ ID NO: 69481 - protein, 361 aa, Arabidopsis thaliana
  peptide (1)..(361): Ceres Seq. ID no. 1815743
MQLGQALILKGFSIIVPQGEFNRVNSSQKFPAEELKLPNFIFSTQTATHKVCCNVLSKLNAKKYLIDMEEHDVQNKVVENMHPLRYKDLPTATFGELEPFLELCRDVVNKRTASAVIINTVTCLESSSLTRLQQELQIPVYPLGPLHITDSSTGFTVLQEDRSCVEWLNKQKPRSVIYISLGSMVLMETKEMLEMAWGMLNSNQPFLWVIRPGSVSGSEGIESLPEEVSKMVLEKGYIVKWAPQIEVLGHPSVGGFWSHCGWNSTLESIVEGVPMICRPYQGEQMLNAIYLESVWRIGIQVGGELERGAVERAVKRLIVDKEGASMRERTLVLKEKLKASIRGGGSSCNALDELVKHLKTE

SEQ ID NO: 69482 - DNA, 1014 bp, Arabidopsis thaliana
  misc_feature (1)..(1014): Ceres Seq. ID no. 1815760
  misc_feature (1)..(1014): Ortholog of  Ceres SEQ ID NO 13655640 as cited in SEQ ID NO 63844
atgtttgcaggtatatttctaagaatgggagcagcattaagatcaatgtatgtgaacagcaagtatgaagaagtacgagaagaatgggaggaagattacagtcctcagaggttttcttacaaagctctctacaaagcaaccaaagggttcaaagagagcgagttattcggtacagaggctaacgggacagtctacaaaggaaagctctcttctaatgcacagattgctgtaaagagagtttctttagatgcagaacaagataccaaacaccttgtttctcagattgttggtattgggaagttaaggcacaagaaccttgtgcagctcttaggatactgcagaagaaaaggtgaattactcttggtctatgattatatgccttatggaaatcttgatgatttcttgtttaatgaggaaaggcctaatctaagttggtcacaaaggtttcatataatcaaaggagttgcttcagctcttctttatttgcatgaacagatcgttcttcaccgagatgtaaaagccgcaaatgtactcttggatgaggatttaaacgggcgactagattacggtctagcaagatttggtacaaacaggaacccaatgctaggaagcgtaggttatgtggctccagagctaataataacaggaatgccgacaaccaaagccgatgtttattcattcggagcattactacttgagtttgcttgtggaagaatgttcattgagtatccagggaagcctgaagagtttaacttaatcagctgggtgtgtcaatgctggaaaagagggaacttggttggcgcccgagacgctagattggaaggagactacgtctgcaaggagatagagatggtactaaagcttggtctactatgtgcacagtacaatccagaggataggcctagtatgtcccaagtggtaaactatcttgaaggaaatgatgttttgcctgagatgcctccagacactcctgggatcagtattccaacaccgtaccatgaagttcttgcgtag

SEQ ID NO: 69483 - protein, 337 aa, Arabidopsis thaliana
  peptide (1)..(337): Ceres Seq. ID no. 1815761
MFAGIFLRMGAALRSMYVNSKYEEVREEWEEDYSPQRFSYKALYKATKGFKESELFGTEANGTVYKGKLSSNAQIAVKRVSLDAEQDTKHLVSQIVGIGKLRHKNLVQLLGYCRRKGELLLVYDYMPYGNLDDFLFNEERPNLSWSQRFHIIKGVASALLYLHEQIVLHRDVKAANVLLDEDLNGRLDYGLARFGTNRNPMLGSVGYVAPELIITGMPTTKADVYSFGALLLEFACGRMFIEYPGKPEEFNLISWVCQCWKRGNLVGARDARLEGDYVCKEIEMVLKLGLLCAQYNPEDRPSMSQVVNYLEGNDVLPEMPPDTPGISIPTPYHEVLA

SEQ ID NO: 69484 - protein, 329 aa, Arabidopsis thaliana
  peptide (1)..(329): Ceres Seq. ID no. 1815762
MGAALRSMYVNSKYEEVREEWEEDYSPQRFSYKALYKATKGFKESELFGTEANGTVYKGKLSSNAQIAVKRVSLDAEQDTKHLVSQIVGIGKLRHKNLVQLLGYCRRKGELLLVYDYMPYGNLDDFLFNEERPNLSWSQRFHIIKGVASALLYLHEQIVLHRDVKAANVLLDEDLNGRLDYGLARFGTNRNPMLGSVGYVAPELIITGMPTTKADVYSFGALLLEFACGRMFIEYPGKPEEFNLISWVCQCWKRGNLVGARDARLEGDYVCKEIEMVLKLGLLCAQYNPEDRPSMSQVVNYLEGNDVLPEMPPDTPGISIPTPYHEVLA

SEQ ID NO: 69485 - protein, 322 aa, Arabidopsis thaliana
  peptide (1)..(322): Ceres Seq. ID no. 1815763
MYVNSKYEEVREEWEEDYSPQRFSYKALYKATKGFKESELFGTEANGTVYKGKLSSNAQIAVKRVSLDAEQDTKHLVSQIVGIGKLRHKNLVQLLGYCRRKGELLLVYDYMPYGNLDDFLFNEERPNLSWSQRFHIIKGVASALLYLHEQIVLHRDVKAANVLLDEDLNGRLDYGLARFGTNRNPMLGSVGYVAPELIITGMPTTKADVYSFGALLLEFACGRMFIEYPGKPEEFNLISWVCQCWKRGNLVGARDARLEGDYVCKEIEMVLKLGLLCAQYNPEDRPSMSQVVNYLEGNDVLPEMPPDTPGISIPTPYHEVLA

SEQ ID NO: 69486 - DNA, 1974 bp, Arabidopsis thaliana
  misc_feature (1)..(1974): Ceres Seq. ID no. 1815764
  misc_feature (1)..(1974): Ortholog of  Ceres SEQ ID NO 12586556 as cited in SEQ ID NO 64667
  misc_feature (1)..(1974): Ortholog of  Ceres SEQ ID NO 13660894 as cited in SEQ ID NO 67475
atgtttctgtctcaccctcctcaagtaatacaaccaacttatcatacagttaacttcttacctcgctctcctctgaagccaccgtcgtgttccgttgctttaaacaatccttcaatttcctccggcgccggagctaaaatctctaataatcagctaattcaatcattgtgcaaagagggtaaacttaaacaagcgattcgcgtcttgtctcaggaatctagcccaagtcaacagacttacgagcttctgattctctgctgcggtcatcggagctctctttctgatgctctacgtgttcatcgacatattctggataatgggtctgatcaagatccttttttggctacgaagcttattggtatgtactcggatttgggttctgtggattatgcacggaaggtgttcgataaaacgcgtaagagaactatatatgtctggaacgctttgtttcgagcccttacgttagcaggtcatggagaagaagtgttgggtttgtattggaagatgaataggattggagttgagtcagataggttcacatacacttatgttctcaaggcttgtgttgcatcggaatgcacggtgaatcatctgatgaaagggaaagagattcatgcacatcttactcgacgaggttacagttctcatgtttacattatgactacgttggtggacatgtatgctagatttggctgtgtggattatgccagctatgtgtttgggggaatgccggtgaggaacgttgtttcttggagcgctatgatcgcctgctatgcaaagaacgggaaagcttttgaagctctgaggactttccgtgaaatgatgagagaaaccaaagattcatctccgaattctgtgactatggttagtgtgcttcaagcttgtgcttcgcttgcggctttagagcaagggaaattgattcatgggtacatactcagacgggggcttgactccatattgccagtgatcagtgctcttgtgacgatgtatggtagatgcggtaagcttgaagtgggacaaagagtatttgatcgaatgcatgaccgggatgttgtgtcctggaattccttgatatcaagctatggcgttcacgggtatggaaaaaaagcaattcagatatttgaagagatgctcgccaacggggcttccccaactcccgtaacatttgtcagcgttttgggagcttgcagccacgagggtcttgttgaagaaggaaagagactgtttgaaacaatgtggagagaccatgggataaaaccacaaatcgaacattatgcttgtatggttgatctgttaggtcgggcgaataggttagacgaggcagcaaagatggtacaagacatgaggactgaaccagggcctaaggtttggggttcccttcttggttcttgtagaattcacggtaatgttgagcttgcagagcgggcgagtagaaggctctttgcgcttgaaccaaaaaatgcagggaactatgtgttgttggcagacatttacgcggaagctcagatgtgggatgaggttaagagagtgaagaagcttctagaacacaggggactgcagaagctgcctggtcgatgctggatggaagtgaggaggaaaatgtactcgtttgtctcggttgatgagtttaaccctcttatggaacagattcatgctttcttggttaagttagccgaagatatgaaggagaaagggtacataccacagaccaaaggagttctgtatgagcttgaaacagaagaaaaagagaggatagtgttgggacacagtgagaaacttgcgttggcgtttgggctgataaatacatcgaaaggagaaccaatcagaatcacgaagaacttgcgtttgtgcgaggactgtcacttgtttacaaagttcatctcgaagtttatggagaaagagattctagtcagagatgtgaaccggtttcatcgattcaagaatggagtgtgttcttgtggagattactggtaa

SEQ ID NO: 69487 - protein, 657 aa, Arabidopsis thaliana
  peptide (1)..(657): Ceres Seq. ID no. 1815765
MFLSHPPQVIQPTYHTVNFLPRSPLKPPSCSVALNNPSISSGAGAKISNNQLIQSLCKEGKLKQAIRVLSQESSPSQQTYELLILCCGHRSSLSDALRVHRHILDNGSDQDPFLATKLIGMYSDLGSVDYARKVFDKTRKRTIYVWNALFRALTLAGHGEEVLGLYWKMNRIGVESDRFTYTYVLKACVASECTVNHLMKGKEIHAHLTRRGYSSHVYIMTTLVDMYARFGCVDYASYVFGGMPVRNVVSWSAMIACYAKNGKAFEALRTFREMMRETKDSSPNSVTMVSVLQACASLAALEQGKLIHGYILRRGLDSILPVISALVTMYGRCGKLEVGQRVFDRMHDRDVVSWNSLISSYGVHGYGKKAIQIFEEMLANGASPTPVTFVSVLGACSHEGLVEEGKRLFETMWRDHGIKPQIEHYACMVDLLGRANRLDEAAKMVQDMRTEPGPKVWGSLLGSCRIHGNVELAERASRRLFALEPKNAGNYVLLADIYAEAQMWDEVKRVKKLLEHRGLQKLPGRCWMEVRRKMYSFVSVDEFNPLMEQIHAFLVKLAEDMKEKGYIPQTKGVLYELETEEKERIVLGHSEKLALAFGLINTSKGEPIRITKNLRLCEDCHLFTKFISKFMEKEILVRDVNRFHRFKNGVCSCGDYW

SEQ ID NO: 69488 - protein, 537 aa, Arabidopsis thaliana
  peptide (1)..(537): Ceres Seq. ID no. 1815766
MYSDLGSVDYARKVFDKTRKRTIYVWNALFRALTLAGHGEEVLGLYWKMNRIGVESDRFTYTYVLKACVASECTVNHLMKGKEIHAHLTRRGYSSHVYIMTTLVDMYARFGCVDYASYVFGGMPVRNVVSWSAMIACYAKNGKAFEALRTFREMMRETKDSSPNSVTMVSVLQACASLAALEQGKLIHGYILRRGLDSILPVISALVTMYGRCGKLEVGQRVFDRMHDRDVVSWNSLISSYGVHGYGKKAIQIFEEMLANGASPTPVTFVSVLGACSHEGLVEEGKRLFETMWRDHGIKPQIEHYACMVDLLGRANRLDEAAKMVQDMRTEPGPKVWGSLLGSCRIHGNVELAERASRRLFALEPKNAGNYVLLADIYAEAQMWDEVKRVKKLLEHRGLQKLPGRCWMEVRRKMYSFVSVDEFNPLMEQIHAFLVKLAEDMKEKGYIPQTKGVLYELETEEKERIVLGHSEKLALAFGLINTSKGEPIRITKNLRLCEDCHLFTKFISKFMEKEILVRDVNRFHRFKNGVCSCGDYW

SEQ ID NO: 69489 - protein, 489 aa, Arabidopsis thaliana
  peptide (1)..(489): Ceres Seq. ID no. 1815767
MNRIGVESDRFTYTYVLKACVASECTVNHLMKGKEIHAHLTRRGYSSHVYIMTTLVDMYARFGCVDYASYVFGGMPVRNVVSWSAMIACYAKNGKAFEALRTFREMMRETKDSSPNSVTMVSVLQACASLAALEQGKLIHGYILRRGLDSILPVISALVTMYGRCGKLEVGQRVFDRMHDRDVVSWNSLISSYGVHGYGKKAIQIFEEMLANGASPTPVTFVSVLGACSHEGLVEEGKRLFETMWRDHGIKPQIEHYACMVDLLGRANRLDEAAKMVQDMRTEPGPKVWGSLLGSCRIHGNVELAERASRRLFALEPKNAGNYVLLADIYAEAQMWDEVKRVKKLLEHRGLQKLPGRCWMEVRRKMYSFVSVDEFNPLMEQIHAFLVKLAEDMKEKGYIPQTKGVLYELETEEKERIVLGHSEKLALAFGLINTSKGEPIRITKNLRLCEDCHLFTKFISKFMEKEILVRDVNRFHRFKNGVCSCGDYW

SEQ ID NO: 69490 - DNA, 3516 bp, Arabidopsis thaliana
  misc_feature (1)..(3516): Ceres Seq. ID no. 1815799
  misc_feature (1)..(3516): Ortholog of  Ceres SEQ ID NO 13593889 as cited in SEQ ID NO 53305
  misc_feature (1)..(3516): Ortholog of  Ceres SEQ ID NO 13581959 as cited in SEQ ID NO 56156
atggcacatgaacccagtagcccaagttcgaatcttgtttctaatccggccaatctttcagcttctgggttagattatagctctgatttgagtaataagcgtgtctctgatggaattatttctgggtttgggagtgagcaggtaagtattgatgctacgaatagaaacaatccaaatttaggcaataaaagaagtgatatggatgatgaagaattggaaaaggtgaagtttttatgtagctacaatggaaagataatccctagaccaagtgatggcatgttacgttacgttggtggtcaaacaaggatcgttagtgttaaaaagaatgtgagatttgatgaatttgagcaaaagatgattcaggtttatggtcaccctgttgttgttaagtatcagcttcctgatgaggatcttgatgctttggtttctgtttcatctagtgaagatattgataatatgatggaggagtttgagaagttggtagagagatcttctgatgggtcagggaagttgagagtttttttgtttgatgcttcttcgtctgaggtggatgattctttcggaatattggagtatggtgatggagttgatattgggcagagatatgtagaggctgtgaatggtgttgttgtgagtaaggaaagtgtagctagtggtagttctaatccgaattctgattttagtggcgtggatgttgttgatagcttgggcgttggtcagagtgattttgtcgcaactacttggacctcgagtaatttttcacctcagacttatcatagtaatgtatcaagacttgttcctcctgatccacgctcttctgcttatgttgtgccaatgactgtccacgccgatccgcctcattcttttcagcttgagactgtttcagagaaaccaatagttggtaagatgcagcagcaacaacaggggtatactacaccatctgaacatcatccaccggcctatgttgaatctcgccaagaagctttaagacaaccagatattgttcattcacctatccagcttttgccaagtagtacttctttgttctcccaacaaccttttcaagatagtcctttaagtgtctcatcccaccagttccttcctgctgctcacatgtcaatggctcccttgaattctcagattagttccacaccagttttgattaacccggtaatgcaaacccaagaaaatctgttggggaactatcatgctgctcaaaagttagtaccgcttcctacagagccaagaaacactgcatatcaaggtacgatttctcctggtataccatttgatggttatggcgggtctcaagttccaccatctaaccatgttgttctccccgatggaagtttctatcaacaagtaactatggctgaaagttttcaaagggtaaatgattgtcatatgtgccagacatcttttcctcatatgcattctgatccgattatgcgggagggaaatgatggttctacaatgtatgtgccatatgtgagctcagctttctatgcttctcgtccagatgatatcatgagaatccaacaaacggataagtttacgggtcaacaaagcttcctcaatcattcaaatcatcaagaaagagatactttacataacgccaatcttgccactgctcaggtcgagactactgaaccttttgtcaatgagatagtaagagatgttccgataaaagttcaagtaactaggcagcagcaacatcccgtagacccttcagtagcatatgcacaatgccgagaactaagtggattggtggataatgttaacatacatgctcctgaaatatatagcaattgtcagaatttcatctcaccagttgacaaaattgggaaagaagatattatgggtaccagttctcaacaaatggcaaggaagaatatgttcttacatgacacctctggtcagtctccagtaagtccaaacatagatcacactgattcagctaagaggctaacaagagtagttcttccaggccatgaatctcagcctaaggaatcatgtgtgccaacacagtctcccttattaggcaatcctggtttgtatctacaatcattggttggaggtcagcagttcgattcagcggaagcgcagtccagcaatcccgcttatgacgttgttgaatctacatttgatgctgcaaacttaccatcatccttatcatcaaatcctgatgctgctaatttaccatcatccttgtcatctagtgttggtggtgcagaccacaaagaatcatcaaaatcactttttagtaaccaggacccatggaatttgcaaactaactcaaacgaggatgtcaaacctgatctacttaattcttcgaaagttatccttgagaatgatctgttgattggtctttggttctctctgaaaggctccgaggaggagcacatcaaacaagaacttcagaatgttgctgaaggagtcgccgcttctgtgttacagtcaagcacaccttcatatcatgaacctccaattaaggtggatgagtatgcttttaattcgaaaggagaagtttcacgtaatgatgaaatgaaacagcagtctacacacttcaaggatatcaggaaccaacttctagaaagactgaatttcggatattctggttctgattcgctggatcagttgcagattataaaggacagcgaccttgaggaattgcgagaactaggatctggcacatttggcacagtttatcatgggaaatggcgaggcactgatgttgcaatcaaaaggatcaatgatcgatgttttgctggcaaaccatctgagcaagaacgaatgatcgatgacttttggaatgaggcacagaacctagctggcttgcaccatcctaacgtcgttgctttttatggggttgtgctggattcacctggaggttctgtggcaacagttacagagtatatggtcaatggttctttacgaaatgcgttgcagaagaatgttaggaattttgataggtgcaagcgtcaactgatcgctatggacattgcttttgggatggagtatttgcatggaaagaagatagtacactttgatcttaaaagtgacaacctgctcgtcaatctcagggatcctcatcgcccaatttgcaaggttggggatttgggtctctcaaaggtgaaatgtcagacattaatatcaggtggtgttcggggaacacttccatggatggcacccgagcttctaaatggaaccagtagccttgtttctgagaaggtcgatgtgttttcattcggaattgtcctctgggaacttttcaccggtgaagaaccttacgccgacttgcactatggagcgatcataggtggtatagttagtaatacgctacggccgcagattcccgacttttgtgacatggactggaaattgctgatggagagatgttggtctgcagaaccatcagagaggccaagcttcactgagatcgtgaacgaactacggaccatggctacaaagcttccttccaaagaacaaggctcaacacagggaccacaatcttaa

SEQ ID NO: 69491 - protein, 1171 aa, Arabidopsis thaliana
  peptide (1)..(1171): Ceres Seq. ID no. 1815800
MAHEPSSPSSNLVSNPANLSASGLDYSSDLSNKRVSDGIISGFGSEQVSIDATNRNNPNLGNKRSDMDDEELEKVKFLCSYNGKIIPRPSDGMLRYVGGQTRIVSVKKNVRFDEFEQKMIQVYGHPVVVKYQLPDEDLDALVSVSSSEDIDNMMEEFEKLVERSSDGSGKLRVFLFDASSSEVDDSFGILEYGDGVDIGQRYVEAVNGVVVSKESVASGSSNPNSDFSGVDVVDSLGVGQSDFVATTWTSSNFSPQTYHSNVSRLVPPDPRSSAYVVPMTVHADPPHSFQLETVSEKPIVGKMQQQQQGYTTPSEHHPPAYVESRQEALRQPDIVHSPIQLLPSSTSLFSQQPFQDSPLSVSSHQFLPAAHMSMAPLNSQISSTPVLINPVMQTQENLLGNYHAAQKLVPLPTEPRNTAYQGTISPGIPFDGYGGSQVPPSNHVVLPDGSFYQQVTMAESFQRVNDCHMCQTSFPHMHSDPIMREGNDGSTMYVPYVSSAFYASRPDDIMRIQQTDKFTGQQSFLNHSNHQERDTLHNANLATAQVETTEPFVNEIVRDVPIKVQVTRQQQHPVDPSVAYAQCRELSGLVDNVNIHAPEIYSNCQNFISPVDKIGKEDIMGTSSQQMARKNMFLHDTSGQSPVSPNIDHTDSAKRLTRVVLPGHESQPKESCVPTQSPLLGNPGLYLQSLVGGQQFDSAEAQSSNPAYDVVESTFDAANLPSSLSSNPDAANLPSSLSSSVGGADHKESSKSLFSNQDPWNLQTNSNEDVKPDLLNSSKVILENDLLIGLWFSLKGSEEEHIKQELQNVAEGVAASVLQSSTPSYHEPPIKVDEYAFNSKGEVSRNDEMKQQSTHFKDIRNQLLERLNFGYSGSDSLDQLQIIKDSDLEELRELGSGTFGTVYHGKWRGTDVAIKRINDRCFAGKPSEQERMIDDFWNEAQNLAGLHHPNVVAFYGVVLDSPGGSVATVTEYMVNGSLRNALQKNVRNFDRCKRQLIAMDIAFGMEYLHGKKIVHFDLKSDNLLVNLRDPHRPICKVGDLGLSKVKCQTLISGGVRGTLPWMAPELLNGTSSLVSEKVDVFSFGIVLWELFTGEEPYADLHYGAIIGGIVSNTLRPQIPDFCDMDWKLLMERCWSAEPSERPSFTEIVNELRTMATKLPSKEQGSTQGPQS

SEQ ID NO: 69492 - protein, 1105 aa, Arabidopsis thaliana
  peptide (1)..(1105): Ceres Seq. ID no. 1815801
MDDEELEKVKFLCSYNGKIIPRPSDGMLRYVGGQTRIVSVKKNVRFDEFEQKMIQVYGHPVVVKYQLPDEDLDALVSVSSSEDIDNMMEEFEKLVERSSDGSGKLRVFLFDASSSEVDDSFGILEYGDGVDIGQRYVEAVNGVVVSKESVASGSSNPNSDFSGVDVVDSLGVGQSDFVATTWTSSNFSPQTYHSNVSRLVPPDPRSSAYVVPMTVHADPPHSFQLETVSEKPIVGKMQQQQQGYTTPSEHHPPAYVESRQEALRQPDIVHSPIQLLPSSTSLFSQQPFQDSPLSVSSHQFLPAAHMSMAPLNSQISSTPVLINPVMQTQENLLGNYHAAQKLVPLPTEPRNTAYQGTISPGIPFDGYGGSQVPPSNHVVLPDGSFYQQVTMAESFQRVNDCHMCQTSFPHMHSDPIMREGNDGSTMYVPYVSSAFYASRPDDIMRIQQTDKFTGQQSFLNHSNHQERDTLHNANLATAQVETTEPFVNEIVRDVPIKVQVTRQQQHPVDPSVAYAQCRELSGLVDNVNIHAPEIYSNCQNFISPVDKIGKEDIMGTSSQQMARKNMFLHDTSGQSPVSPNIDHTDSAKRLTRVVLPGHESQPKESCVPTQSPLLGNPGLYLQSLVGGQQFDSAEAQSSNPAYDVVESTFDAANLPSSLSSNPDAANLPSSLSSSVGGADHKESSKSLFSNQDPWNLQTNSNEDVKPDLLNSSKVILENDLLIGLWFSLKGSEEEHIKQELQNVAEGVAASVLQSSTPSYHEPPIKVDEYAFNSKGEVSRNDEMKQQSTHFKDIRNQLLERLNFGYSGSDSLDQLQIIKDSDLEELRELGSGTFGTVYHGKWRGTDVAIKRINDRCFAGKPSEQERMIDDFWNEAQNLAGLHHPNVVAFYGVVLDSPGGSVATVTEYMVNGSLRNALQKNVRNFDRCKRQLIAMDIAFGMEYLHGKKIVHFDLKSDNLLVNLRDPHRPICKVGDLGLSKVKCQTLISGGVRGTLPWMAPELLNGTSSLVSEKVDVFSFGIVLWELFTGEEPYADLHYGAIIGGIVSNTLRPQIPDFCDMDWKLLMERCWSAEPSERPSFTEIVNELRTMATKLPSKEQGSTQGPQS

SEQ ID NO: 69493 - protein, 1079 aa, Arabidopsis thaliana
  peptide (1)..(1079): Ceres Seq. ID no. 1815802
MLRYVGGQTRIVSVKKNVRFDEFEQKMIQVYGHPVVVKYQLPDEDLDALVSVSSSEDIDNMMEEFEKLVERSSDGSGKLRVFLFDASSSEVDDSFGILEYGDGVDIGQRYVEAVNGVVVSKESVASGSSNPNSDFSGVDVVDSLGVGQSDFVATTWTSSNFSPQTYHSNVSRLVPPDPRSSAYVVPMTVHADPPHSFQLETVSEKPIVGKMQQQQQGYTTPSEHHPPAYVESRQEALRQPDIVHSPIQLLPSSTSLFSQQPFQDSPLSVSSHQFLPAAHMSMAPLNSQISSTPVLINPVMQTQENLLGNYHAAQKLVPLPTEPRNTAYQGTISPGIPFDGYGGSQVPPSNHVVLPDGSFYQQVTMAESFQRVNDCHMCQTSFPHMHSDPIMREGNDGSTMYVPYVSSAFYASRPDDIMRIQQTDKFTGQQSFLNHSNHQERDTLHNANLATAQVETTEPFVNEIVRDVPIKVQVTRQQQHPVDPSVAYAQCRELSGLVDNVNIHAPEIYSNCQNFISPVDKIGKEDIMGTSSQQMARKNMFLHDTSGQSPVSPNIDHTDSAKRLTRVVLPGHESQPKESCVPTQSPLLGNPGLYLQSLVGGQQFDSAEAQSSNPAYDVVESTFDAANLPSSLSSNPDAANLPSSLSSSVGGADHKESSKSLFSNQDPWNLQTNSNEDVKPDLLNSSKVILENDLLIGLWFSLKGSEEEHIKQELQNVAEGVAASVLQSSTPSYHEPPIKVDEYAFNSKGEVSRNDEMKQQSTHFKDIRNQLLERLNFGYSGSDSLDQLQIIKDSDLEELRELGSGTFGTVYHGKWRGTDVAIKRINDRCFAGKPSEQERMIDDFWNEAQNLAGLHHPNVVAFYGVVLDSPGGSVATVTEYMVNGSLRNALQKNVRNFDRCKRQLIAMDIAFGMEYLHGKKIVHFDLKSDNLLVNLRDPHRPICKVGDLGLSKVKCQTLISGGVRGTLPWMAPELLNGTSSLVSEKVDVFSFGIVLWELFTGEEPYADLHYGAIIGGIVSNTLRPQIPDFCDMDWKLLMERCWSAEPSERPSFTEIVNELRTMATKLPSKEQGSTQGPQS

SEQ ID NO: 69494 - DNA, 1428 bp, Arabidopsis thaliana
  misc_feature (1)..(1428): Ceres Seq. ID no. 1815803
  misc_feature (1)..(1428): Ortholog of  Ceres SEQ ID NO 13593889 as cited in SEQ ID NO 53305
  misc_feature (1)..(1428): Ortholog of  Ceres SEQ ID NO 13581959 as cited in SEQ ID NO 56156
  misc_feature (1)..(1428): Ortholog of  Ceres SEQ ID NO 15171809 as cited in SEQ ID NO 57329
atggatggagaggttacttcttggattaggagagcaaatttctctcatactgtttgttatcgtatgattacgccgagtttagaatctatgccttttactgtaaaccaagagaagatgcagaggaatccagttactaataagaagagatctgtttctccgttgcctcatatggctctttctgatgcttttatcgaagcaaagtctgatattaagaggttttctactccacatcctagaagagtggaaccagagaagggaatgaaggccaagtcgtcgtcccgcaaagattcttctgagaaaaaatcagttaatctacggtccctgtctcactcgggtcctattagggatcttagtacgcagaaagttaaagagaggggaaagagcaagatagataagaagtcttcaaagtctgttgactatagaggttctaaagtaagttctgcaggagtgcttgaagaatgcctcattgatgtgtctaagttgtcttatggggataggtttgctcacgggaaatatagccagatttatcatggtgaatatgaaggcaaagctgttgctctgaagattatcacagcgcctgaggatagtgacgacatattcttgggagctcgtttagaaaaagagtttatcgtggaagccactcttttatctcgactaagccatccaaatgtcgttaagtttgttggagtgaatactggaaactgtatcatcacagagtatgtacctcgagggtctttaagatcatatctgcacaagctcgagcagaaatcccttcctttggaacagctaatcgattttggtctggatattgctaaaggaatggaatatattcactcaagagagatagttcatcaggatctgaagccagaaaacgtgttgatcgacaatgactttcacttgaagattgctgactttggcatagcgtgcgaggaggagtactgtgatgttttgggggataacataggaacttataggtggatggcacctgaagttttaaaacggataccacatggacggaagtgcgatgtttatagttttggacttcttttatgggaaatggtagctggagcacttccatatgaggagatgaaatttgctgaacaaattgcctacgcagttatatacaagaaaattaggccagttataccgacggattgtccagcggccatgaaagagctgatcgagcgatgttggtcatcgcaaacagacaagagaccggaattctggcagattgtcaaagtgttggaacatttcaagaagtctctaacaagcgaaggaaaacttaatcttttacctagccagatctgtccagaactaaagaaatgtcctaaattctggattcatatattcggatcattccaccaccacagcagcggtggcggcagcagcagcaacaactcagccttacctaagcctaaattcgcttga

SEQ ID NO: 69495 - protein, 475 aa, Arabidopsis thaliana
  peptide (1)..(475): Ceres Seq. ID no. 1815804
MDGEVTSWIRRANFSHTVCYRMITPSLESMPFTVNQEKMQRNPVTNKKRSVSPLPHMALSDAFIEAKSDIKRFSTPHPRRVEPEKGMKAKSSSRKDSSEKKSVNLRSLSHSGPIRDLSTQKVKERGKSKIDKKSSKSVDYRGSKVSSAGVLEECLIDVSKLSYGDRFAHGKYSQIYHGEYEGKAVALKIITAPEDSDDIFLGARLEKEFIVEATLLSRLSHPNVVKFVGVNTGNCIITEYVPRGSLRSYLHKLEQKSLPLEQLIDFGLDIAKGMEYIHSREIVHQDLKPENVLIDNDFHLKIADFGIACEEEYCDVLGDNIGTYRWMAPEVLKRIPHGRKCDVYSFGLLLWEMVAGALPYEEMKFAEQIAYAVIYKKIRPVIPTDCPAAMKELIERCWSSQTDKRPEFWQIVKVLEHFKKSLTSEGKLNLLPSQICPELKKCPKFWIHIFGSFHHHSSGGGSSSNNSALPKPKFA

SEQ ID NO: 69496 - protein, 454 aa, Arabidopsis thaliana
  peptide (1)..(454): Ceres Seq. ID no. 1815805
MITPSLESMPFTVNQEKMQRNPVTNKKRSVSPLPHMALSDAFIEAKSDIKRFSTPHPRRVEPEKGMKAKSSSRKDSSEKKSVNLRSLSHSGPIRDLSTQKVKERGKSKIDKKSSKSVDYRGSKVSSAGVLEECLIDVSKLSYGDRFAHGKYSQIYHGEYEGKAVALKIITAPEDSDDIFLGARLEKEFIVEATLLSRLSHPNVVKFVGVNTGNCIITEYVPRGSLRSYLHKLEQKSLPLEQLIDFGLDIAKGMEYIHSREIVHQDLKPENVLIDNDFHLKIADFGIACEEEYCDVLGDNIGTYRWMAPEVLKRIPHGRKCDVYSFGLLLWEMVAGALPYEEMKFAEQIAYAVIYKKIRPVIPTDCPAAMKELIERCWSSQTDKRPEFWQIVKVLEHFKKSLTSEGKLNLLPSQICPELKKCPKFWIHIFGSFHHHSSGGGSSSNNSALPKPKFA

SEQ ID NO: 69497 - protein, 446 aa, Arabidopsis thaliana
  peptide (1)..(446): Ceres Seq. ID no. 1815806
MPFTVNQEKMQRNPVTNKKRSVSPLPHMALSDAFIEAKSDIKRFSTPHPRRVEPEKGMKAKSSSRKDSSEKKSVNLRSLSHSGPIRDLSTQKVKERGKSKIDKKSSKSVDYRGSKVSSAGVLEECLIDVSKLSYGDRFAHGKYSQIYHGEYEGKAVALKIITAPEDSDDIFLGARLEKEFIVEATLLSRLSHPNVVKFVGVNTGNCIITEYVPRGSLRSYLHKLEQKSLPLEQLIDFGLDIAKGMEYIHSREIVHQDLKPENVLIDNDFHLKIADFGIACEEEYCDVLGDNIGTYRWMAPEVLKRIPHGRKCDVYSFGLLLWEMVAGALPYEEMKFAEQIAYAVIYKKIRPVIPTDCPAAMKELIERCWSSQTDKRPEFWQIVKVLEHFKKSLTSEGKLNLLPSQICPELKKCPKFWIHIFGSFHHHSSGGGSSSNNSALPKPKFA

SEQ ID NO: 69498 - DNA, 1626 bp, Arabidopsis thaliana
  misc_feature (1)..(1626): Ceres Seq. ID no. 1816083
  misc_feature (1)..(1626): Ortholog of  Ceres SEQ ID NO 13654989 as cited in SEQ ID NO 63117
  misc_feature (1)..(1626): Ortholog of  Ceres SEQ ID NO 13584744 as cited in SEQ ID NO 69137
atgttacattgtcattataaccgcagaaaagatggaactccgttcaatacatcgattataacaccaccgcctccgcctgtggttgatcctcctcccgctactcaccgtgctcctcctgttccccgtatccctcctgtttctggtgttcccccagcaccttttgctccttttgctccactgcaaccacaacaacatccaccaccatcaccacctctggtctggtcaccaccttcttctgataatggaggaggagatccctggaactctgtgtcagggcaacctaccttgcaaatatcacctccttcaggttcaggatcaggaaaattctggtccactcaaagaatcattctagtagtttcttcagtggccataattgttcttgtatccggtttgtgtgttacactttggagatgttgcagaagtaaaatatataaccgatattacagtggagctcgtaaagatttacaacgaccatacttcaataagcctccatctcaaccaacccccactatgggaaaagtttctcgggagcctatggttaagcctttcgatggatatggagctggagacaggaaatatgggtatccaatgccacagcgggctgaagagagccggagagcaatgcctcctacttcatattataataaggatgttaatacacctcaaaagccgctgcaacaaccaccgaggcagttccagtccaatgatactgcttcaaagagagcggctcatttccccccgggcttgaattcctcatcttctgctactgttttcaccattgcttcacttcagcaatacacaaataatttctcagaagagaatataatcggggaagggtcgattggtaatgtctacagagctgagcttcgtcatggaaagtttcttgcggtgaagaagctgagcaataccatcaacagaacacagagtgacggcgaattcctcaatctagtctccaatgtgttgaagcttaaacgcggtcatatattggagcttcttggttactgtaacgagtttggtcaaaggttacttgtgtatgagtactgtcctaatggatcacttcaagatgcactacatttggatcgcaagttgcacaagaagctcacttggaatgtacgtataaatattgcattaggagcttcaaaggcattgcagtttcttcatgaggtatgtcaaccgccggttgttcaccagaatttcaagtcttccaaggttcttcttgatggaaagctctcagtacgtgttgcagacagcggtttggcttatatgttaccaccacgcccaacgagtcagatggcgggttatgccgctcctgaggttgagtatggaagctacacttgtcagagcgacgtatttagccttggggttgtaatgttagaactgctcactggacgcagaccatttgacaggacaaggccgaggggacatcaaacactagctcagtgggcgattcctcggcttcatgacatcgatgcgttgacaagaatggttgatccgtcattacacggagcgtatccaatgaaatcattgtcacgttttgcagatatcatatcacgttcactgcagatggaaccaggatttagaccgccgatatcagaaatagtccaagatcttcaacatatgatctaa

SEQ ID NO: 69499 - protein, 541 aa, Arabidopsis thaliana
  peptide (1)..(541): Ceres Seq. ID no. 1816084
MLHCHYNRRKDGTPFNTSIITPPPPPVVDPPPATHRAPPVPRIPPVSGVPPAPFAPFAPLQPQQHPPPSPPLVWSPPSSDNGGGDPWNSVSGQPTLQISPPSGSGSGKFWSTQRIILVVSSVAIIVLVSGLCVTLWRCCRSKIYNRYYSGARKDLQRPYFNKPPSQPTPTMGKVSREPMVKPFDGYGAGDRKYGYPMPQRAEESRRAMPPTSYYNKDVNTPQKPLQQPPRQFQSNDTASKRAAHFPPGLNSSSSATVFTIASLQQYTNNFSEENIIGEGSIGNVYRAELRHGKFLAVKKLSNTINRTQSDGEFLNLVSNVLKLKRGHILELLGYCNEFGQRLLVYEYCPNGSLQDALHLDRKLHKKLTWNVRINIALGASKALQFLHEVCQPPVVHQNFKSSKVLLDGKLSVRVADSGLAYMLPPRPTSQMAGYAAPEVEYGSYTCQSDVFSLGVVMLELLTGRRPFDRTRPRGHQTLAQWAIPRLHDIDALTRMVDPSLHGAYPMKSLSRFADIISRSLQMEPGFRPPISEIVQDLQHMI

SEQ ID NO: 69500 - protein, 371 aa, Arabidopsis thaliana
  peptide (1)..(371): Ceres Seq. ID no. 1816085
MGKVSREPMVKPFDGYGAGDRKYGYPMPQRAEESRRAMPPTSYYNKDVNTPQKPLQQPPRQFQSNDTASKRAAHFPPGLNSSSSATVFTIASLQQYTNNFSEENIIGEGSIGNVYRAELRHGKFLAVKKLSNTINRTQSDGEFLNLVSNVLKLKRGHILELLGYCNEFGQRLLVYEYCPNGSLQDALHLDRKLHKKLTWNVRINIALGASKALQFLHEVCQPPVVHQNFKSSKVLLDGKLSVRVADSGLAYMLPPRPTSQMAGYAAPEVEYGSYTCQSDVFSLGVVMLELLTGRRPFDRTRPRGHQTLAQWAIPRLHDIDALTRMVDPSLHGAYPMKSLSRFADIISRSLQMEPGFRPPISEIVQDLQHMI

SEQ ID NO: 69501 - protein, 363 aa, Arabidopsis thaliana
  peptide (1)..(363): Ceres Seq. ID no. 1816086
MVKPFDGYGAGDRKYGYPMPQRAEESRRAMPPTSYYNKDVNTPQKPLQQPPRQFQSNDTASKRAAHFPPGLNSSSSATVFTIASLQQYTNNFSEENIIGEGSIGNVYRAELRHGKFLAVKKLSNTINRTQSDGEFLNLVSNVLKLKRGHILELLGYCNEFGQRLLVYEYCPNGSLQDALHLDRKLHKKLTWNVRINIALGASKALQFLHEVCQPPVVHQNFKSSKVLLDGKLSVRVADSGLAYMLPPRPTSQMAGYAAPEVEYGSYTCQSDVFSLGVVMLELLTGRRPFDRTRPRGHQTLAQWAIPRLHDIDALTRMVDPSLHGAYPMKSLSRFADIISRSLQMEPGFRPPISEIVQDLQHMI

SEQ ID NO: 69502 - DNA, 1596 bp, Arabidopsis thaliana
  misc_feature (1)..(1596): Ceres Seq. ID no. 1816091
  misc_feature (1)..(1596): Ortholog of  Ceres SEQ ID NO 13594958 as cited in SEQ ID NO 55996
atgtttcagggatatgacttgttgaatcaactggaaccatttatccatcagatattaacatatgctcagcaatcaaaagaacagtctaagattgaacaagatcgactagcaagacgcattcaagaattcaggacccagtctgaattagacagccaacagctggtcgctaatgcagagtcgtctggtgctaacgggaaccgtgttggtgggaatatcccttacaaaaataccgaaacaagtttaacagcagacaaggaaggatctcatcatcactatagtggatcatctgaccataatactggagtttttggtcgatttcgggcaagacataatcgatcaggttcgctcactgagggcagcttaggctataatactattgatcttcgcacttctttgataaaactagacgcagaagacatggatcttcgtctctgtttcagaattatttctcctcaaaaaacttacacacttcaggctgaaaatggagcagataggatggactgggtaaataagatcacaaaagctatagggacgcttctcaattctcattttctgcaacagtcacctgtgcgatacttggataaagacaactccagttctgctcctgctaatgctgtcgtctccggggatcaaattcgacataatgattcaagacaaaatatcggggatgatgtctcaacaatactcagaggacttccgggaaataatgcatgtgcagagtgcaatgctcctgagcccgattgggcatcgttaaatcttggagttttgttgtgcattcaatgctctggtgttcacaggaatctcggggttcatatatccaaggtgaggtccctctcattagatgtgaaagtgtgggagccaacgatcttggacttatttagaaatttgggtaatgtatactgtaattcactgtgggagggactacttcaccttgacgatgactgcgaagacggatcagcattgtcgcatgcttcagtttcaaaaccatgtccagaagattcctttagtgtgaaggagaaatacattctaggaaagtacctggagaaagcattagtcatcaaggatgaaagtgaagcaaacctttctgctgcgagtagaatatgggaagctgttcaaagcagaaacatacgagaaatctatcgacttatagttactactggggatgtaaatatcatcaataccaagtttgatgatataactgatatcgatgcatatcaccatattgatgcagcagagaaagcagtaaagaaaagacatgatccaactgtatgtcagagaattaaagaatccaacgaaccaagaagctgtcttcaaggatgctccttgctccatgtggcttgtcacattggtgactctgtcttgcttgaattgttgttgcagtttggtgctgacctaaacataagagattatcacggaaggactccgttgcaccattgcatatcatcagggaaccacaaatttgcaaagattctactgcgaagaggagcacgtccgtcgatagaggacgatggagggctaagcgttctagaaagagcgatggaaatgggagcgataactgatgaagagctctttcttctcttagccgagtgcgcataa

SEQ ID NO: 69503 - protein, 531 aa, Arabidopsis thaliana
  peptide (1)..(531): Ceres Seq. ID no. 1816092
MFQGYDLLNQLEPFIHQILTYAQQSKEQSKIEQDRLARRIQEFRTQSELDSQQLVANAESSGANGNRVGGNIPYKNTETSLTADKEGSHHHYSGSSDHNTGVFGRFRARHNRSGSLTEGSLGYNTIDLRTSLIKLDAEDMDLRLCFRIISPQKTYTLQAENGADRMDWVNKITKAIGTLLNSHFLQQSPVRYLDKDNSSSAPANAVVSGDQIRHNDSRQNIGDDVSTILRGLPGNNACAECNAPEPDWASLNLGVLLCIQCSGVHRNLGVHISKVRSLSLDVKVWEPTILDLFRNLGNVYCNSLWEGLLHLDDDCEDGSALSHASVSKPCPEDSFSVKEKYILGKYLEKALVIKDESEANLSAASRIWEAVQSRNIREIYRLIVTTGDVNIINTKFDDITDIDAYHHIDAAEKAVKKRHDPTVCQRIKESNEPRSCLQGCSLLHVACHIGDSVLLELLLQFGADLNIRDYHGRTPLHHCISSGNHKFAKILLRRGARPSIEDDGGLSVLERAMEMGAITDEELFLLLAECA

SEQ ID NO: 69504 - protein, 392 aa, Arabidopsis thaliana
  peptide (1)..(392): Ceres Seq. ID no. 1816093
MDLRLCFRIISPQKTYTLQAENGADRMDWVNKITKAIGTLLNSHFLQQSPVRYLDKDNSSSAPANAVVSGDQIRHNDSRQNIGDDVSTILRGLPGNNACAECNAPEPDWASLNLGVLLCIQCSGVHRNLGVHISKVRSLSLDVKVWEPTILDLFRNLGNVYCNSLWEGLLHLDDDCEDGSALSHASVSKPCPEDSFSVKEKYILGKYLEKALVIKDESEANLSAASRIWEAVQSRNIREIYRLIVTTGDVNIINTKFDDITDIDAYHHIDAAEKAVKKRHDPTVCQRIKESNEPRSCLQGCSLLHVACHIGDSVLLELLLQFGADLNIRDYHGRTPLHHCISSGNHKFAKILLRRGARPSIEDDGGLSVLERAMEMGAITDEELFLLLAECA

SEQ ID NO: 69505 - protein, 366 aa, Arabidopsis thaliana
  peptide (1)..(366): Ceres Seq. ID no. 1816094
MDWVNKITKAIGTLLNSHFLQQSPVRYLDKDNSSSAPANAVVSGDQIRHNDSRQNIGDDVSTILRGLPGNNACAECNAPEPDWASLNLGVLLCIQCSGVHRNLGVHISKVRSLSLDVKVWEPTILDLFRNLGNVYCNSLWEGLLHLDDDCEDGSALSHASVSKPCPEDSFSVKEKYILGKYLEKALVIKDESEANLSAASRIWEAVQSRNIREIYRLIVTTGDVNIINTKFDDITDIDAYHHIDAAEKAVKKRHDPTVCQRIKESNEPRSCLQGCSLLHVACHIGDSVLLELLLQFGADLNIRDYHGRTPLHHCISSGNHKFAKILLRRGARPSIEDDGGLSVLERAMEMGAITDEELFLLLAECA

SEQ ID NO: 69506 - DNA, 1716 bp, Arabidopsis thaliana
  misc_feature (1)..(1716): Ceres Seq. ID no. 1816550
  misc_feature (1)..(1716): Ortholog of  Ceres SEQ ID NO 12637732 as cited in SEQ ID NO 0
atggttttttccgttgcaacaagctctgttacgaacccaaagctccatcatcaccaccatcttagtgacttcaacagaaacagagtatctacatctctcaagataatgaactcgaagaatcacacaaacccaagaaagtgtgagtgttttgatctctacgatcaattaattccatacaagaaagcttggtcatggcaaaaaagcattctcaatgagaaaaaagctttgattgataaaaaccaagagtgttcagattcattaattatactacaacatccttctgtttacacaatgggaactggaagctcagagaattatctcaatttcgacataaagaatgctcctttcgatgtttatagaacagaacgtggtggtgaagttacttatcatggtcctggtcagctagttatgtatcctataatcaatctacggaatcacaaaatggatcttcattggtacttaaggaagcttgaggaagtagttattcgtgttctttcttcggctttcgccatcaatgcttctcgtctcgacggttttactggagtttgggttggcaacaaaaaaatggcggcgataggtattcgtgtgtcgaaatggatgacatatcatggtctagctcttaatgttacaacagatttaacaccctttaactccatagttccatgtgggataaggaaccgtggggttggaagcgtaaagggtttgattgaggatggagaacattataataagcttgaagatttgcagttgttagatatagctcatgagtcgttactaaaggaattctctgaagtttttcagcttcagatggaaaagcaaacacttacaagtgatttatgggatggtggttatgcaggaaaccttttgtggaccagtgattttattggcagtttgttaagttgtttgttttcttgtagatatgtgtgtgagagatttgatttctctatttctctctccaaagaaagcttatctgcttcttggattgaccacaaagggatggctctggaagctgctttctccatgagtttttgctccttctctgtccctaaagcaatcttctgtgagagagaaacttcatcttttcaacgaatcacctcgagagcaaagggaattgcgggtgagagtcaagttcaaagctctgatggagttgagactcaagtcaaggaaacttctcccaaagtatttgataaactgcctgaaagaaatttagatacttggagcggtggcagagaaacagcaagaggactttcaggttcagtagtaagaaacactgtacgaaaagatactactttacgacatatctcaccttctagtcattcaacaaaggttagaggagataagccagagatttcagggggtgagaagaaagctattgtagatagaagcaaggcctacgtaaagctgaaatctttagggaaagaagtgagagacgcaggctatgtaccagagactaagtatgttcttcacgacattgatgaagaagctaaagagaaagccttgatgcatcatagtgaacggttagctattgctttcgggattataaacactcctccagggacgacaataagggtgatgaagaatctgaggatatgtggagattgccataacttcataaagatattatcgagtatcgaagatagagagatcattgtaagagataacaagaggttccatcattttagagatggtaactgctcttgtggagattattggtag

SEQ ID NO: 69507 - protein, 571 aa, Arabidopsis thaliana
  peptide (1)..(571): Ceres Seq. ID no. 1816551
MVFSVATSSVTNPKLHHHHHLSDFNRNRVSTSLKIMNSKNHTNPRKCECFDLYDQLIPYKKAWSWQKSILNEKKALIDKNQECSDSLIILQHPSVYTMGTGSSENYLNFDIKNAPFDVYRTERGGEVTYHGPGQLVMYPIINLRNHKMDLHWYLRKLEEVVIRVLSSAFAINASRLDGFTGVWVGNKKMAAIGIRVSKWMTYHGLALNVTTDLTPFNSIVPCGIRNRGVGSVKGLIEDGEHYNKLEDLQLLDIAHESLLKEFSEVFQLQMEKQTLTSDLWDGGYAGNLLWTSDFIGSLLSCLFSCRYVCERFDFSISLSKESLSASWIDHKGMALEAAFSMSFCSFSVPKAIFCERETSSFQRITSRAKGIAGESQVQSSDGVETQVKETSPKVFDKLPERNLDTWSGGRETARGLSGSVVRNTVRKDTTLRHISPSSHSTKVRGDKPEISGGEKKAIVDRSKAYVKLKSLGKEVRDAGYVPETKYVLHDIDEEAKEKALMHHSERLAIAFGIINTPPGTTIRVMKNLRICGDCHNFIKILSSIEDREIIVRDNKRFHHFRDGNCSCGDYW

SEQ ID NO: 69508 - protein, 536 aa, Arabidopsis thaliana
  peptide (1)..(536): Ceres Seq. ID no. 1816552
MNSKNHTNPRKCECFDLYDQLIPYKKAWSWQKSILNEKKALIDKNQECSDSLIILQHPSVYTMGTGSSENYLNFDIKNAPFDVYRTERGGEVTYHGPGQLVMYPIINLRNHKMDLHWYLRKLEEVVIRVLSSAFAINASRLDGFTGVWVGNKKMAAIGIRVSKWMTYHGLALNVTTDLTPFNSIVPCGIRNRGVGSVKGLIEDGEHYNKLEDLQLLDIAHESLLKEFSEVFQLQMEKQTLTSDLWDGGYAGNLLWTSDFIGSLLSCLFSCRYVCERFDFSISLSKESLSASWIDHKGMALEAAFSMSFCSFSVPKAIFCERETSSFQRITSRAKGIAGESQVQSSDGVETQVKETSPKVFDKLPERNLDTWSGGRETARGLSGSVVRNTVRKDTTLRHISPSSHSTKVRGDKPEISGGEKKAIVDRSKAYVKLKSLGKEVRDAGYVPETKYVLHDIDEEAKEKALMHHSERLAIAFGIINTPPGTTIRVMKNLRICGDCHNFIKILSSIEDREIIVRDNKRFHHFRDGNCSCGDYW

SEQ ID NO: 69509 - protein, 474 aa, Arabidopsis thaliana
  peptide (1)..(474): Ceres Seq. ID no. 1816553
MGTGSSENYLNFDIKNAPFDVYRTERGGEVTYHGPGQLVMYPIINLRNHKMDLHWYLRKLEEVVIRVLSSAFAINASRLDGFTGVWVGNKKMAAIGIRVSKWMTYHGLALNVTTDLTPFNSIVPCGIRNRGVGSVKGLIEDGEHYNKLEDLQLLDIAHESLLKEFSEVFQLQMEKQTLTSDLWDGGYAGNLLWTSDFIGSLLSCLFSCRYVCERFDFSISLSKESLSASWIDHKGMALEAAFSMSFCSFSVPKAIFCERETSSFQRITSRAKGIAGESQVQSSDGVETQVKETSPKVFDKLPERNLDTWSGGRETARGLSGSVVRNTVRKDTTLRHISPSSHSTKVRGDKPEISGGEKKAIVDRSKAYVKLKSLGKEVRDAGYVPETKYVLHDIDEEAKEKALMHHSERLAIAFGIINTPPGTTIRVMKNLRICGDCHNFIKILSSIEDREIIVRDNKRFHHFRDGNCSCGDYW

SEQ ID NO: 69510 - DNA, 2031 bp, Arabidopsis thaliana
  misc_feature (1)..(2031): Ceres Seq. ID no. 1816918
  misc_feature (1)..(2031): Ortholog of  Ceres SEQ ID NO 15176941 as cited in SEQ ID NO 55559
  misc_feature (1)..(2031): Ortholog of  Ceres SEQ ID NO 13595658 as cited in SEQ ID NO 59888
  misc_feature (1)..(2031): Ortholog of  Ceres SEQ ID NO 13662324 as cited in SEQ ID NO 62162
atgtataaaccaaactcttcacctactctttatattatacgtttaaaatctctgcaatatatcttgaatttttttttgttatatgtagcaatgtcaaggagctttacgatagaaaacaaatgccaatacaccatatggcctgcaacctacggctataggagatcactagaaacaaccggttttgttcttgagaaaggagagacgcgtaccatcaaagcgccgtcatcatggataggtcgtttctggggtaggacactctgctccaccaactcaacagggggtttctcatgtgccacgggagactgcacctccggaaaaatcaagtgcctcggtatccccatagatccaacaacagtggtcgagtttaacctcgcttcttacggtgtcgactattatgtcgtcaacgtcttcaatggttacaacctccctttgcttgtgacccccgagaacaaaaactgcagaagcattgaatgcgttattgacatgaacgagacatgtccctcggagctaatggtgaacagtagtggccttggatcgcaccatccaatagcctgcatgaccacttgtcagagataccagttgccagagctttgctgtatcggactctcttctggggtggtcgtaccaccgggaatatgcaagcggacgatctactcgcggacattcaataacgtgtgcccaagcgcttatagttacgcctacgacgttgataacagcagtttcacttgtccaaacttctccaactttgtcatcacgttttgtccgtctagctcaacggtcccagaggcaggaaacatcaatagctcaacggtcccagaggcaggaaacatcaaaactggaacagaagcaaaaggagtttcatcagtattggctacaatgatcattattgtgattgtgggaaaggttagagcaaataatatgagaaagagtgatttgaatgagaagaacatggaagcagtggtaatgttgaaacgatttagttatgtacaagtcaagaagatgacaaaatcatttgagaatgttcttgggaaagggggatttggaactgtctataaagggaagttacctgatggcagccgagatgttgcagtgaagatcttgaaggagtcaaacgaggatggagaagacttcatcaatgaaatagctagcatgagtaggacatctcatgctaatatcgtttctctacttggattctgttatgaagggaggaagaaagctataatttacgagttgatgccgaatggatccctcgacaagttcatctccaagaatatgtcggcgaagatggaatggaaaacgttatacaacattgcggtaggtgtgtctcatggcctagaatacttgcatagccattgtgtatcaaggattgtacatttcgatataaagccacagaacatactcatagatggagacttatgccctaagatttcggatttcggtcttgctaagctttgcaaaaataatgaaagcatcatttcaatgctacatgcaagaggcaccatagggtacattgctccagaagtgttctcccagaattttggaggagtttctcataagtctgatgtgtatagttatggaatggtggttcttgagatgattggagcaaggaacataggaagagctcaaaatgctggatccagtaatacttcaatgtactttccagattggatttataaagatcttgagaaaggagaaatcatgagttttttggcagatcaaataaccgaagaagaagatgagaagatagtaaagaaaatggtattggtgggtctgtggtgtattcagaccaatccatatgatcgtccaccaatgagcaaagttgttgaaatgttagagggaagtctagaggctctccagattccacctaagcctcttttatgtttacccgcaataacagctccaataacagttgatgaagacattcaagagacttcaagcttcttgaaaccaagtcaagatacttcatattattccgaacaaatagttcaagatattgtagaagagaatcaagatagctcaagatcttcctaa

SEQ ID NO: 69511 - protein, 676 aa, Arabidopsis thaliana
  peptide (1)..(676): Ceres Seq. ID no. 1816919
MYKPNSSPTLYIIRLKSLQYILNFFLLYVAMSRSFTIENKCQYTIWPATYGYRRSLETTGFVLEKGETRTIKAPSSWIGRFWGRTLCSTNSTGGFSCATGDCTSGKIKCLGIPIDPTTVVEFNLASYGVDYYVVNVFNGYNLPLLVTPENKNCRSIECVIDMNETCPSELMVNSSGLGSHHPIACMTTCQRYQLPELCCIGLSSGVVVPPGICKRTIYSRTFNNVCPSAYSYAYDVDNSSFTCPNFSNFVITFCPSSSTVPEAGNINSSTVPEAGNIKTGTEAKGVSSVLATMIIIVIVGKVRANNMRKSDLNEKNMEAVVMLKRFSYVQVKKMTKSFENVLGKGGFGTVYKGKLPDGSRDVAVKILKESNEDGEDFINEIASMSRTSHANIVSLLGFCYEGRKKAIIYELMPNGSLDKFISKNMSAKMEWKTLYNIAVGVSHGLEYLHSHCVSRIVHFDIKPQNILIDGDLCPKISDFGLAKLCKNNESIISMLHARGTIGYIAPEVFSQNFGGVSHKSDVYSYGMVVLEMIGARNIGRAQNAGSSNTSMYFPDWIYKDLEKGEIMSFLADQITEEEDEKIVKKMVLVGLWCIQTNPYDRPPMSKVVEMLEGSLEALQIPPKPLLCLPAITAPITVDEDIQETSSFLKPSQDTSYYSEQIVQDIVEENQDSSRSS

SEQ ID NO: 69512 - protein, 646 aa, Arabidopsis thaliana
  peptide (1)..(646): Ceres Seq. ID no. 1816920
MSRSFTIENKCQYTIWPATYGYRRSLETTGFVLEKGETRTIKAPSSWIGRFWGRTLCSTNSTGGFSCATGDCTSGKIKCLGIPIDPTTVVEFNLASYGVDYYVVNVFNGYNLPLLVTPENKNCRSIECVIDMNETCPSELMVNSSGLGSHHPIACMTTCQRYQLPELCCIGLSSGVVVPPGICKRTIYSRTFNNVCPSAYSYAYDVDNSSFTCPNFSNFVITFCPSSSTVPEAGNINSSTVPEAGNIKTGTEAKGVSSVLATMIIIVIVGKVRANNMRKSDLNEKNMEAVVMLKRFSYVQVKKMTKSFENVLGKGGFGTVYKGKLPDGSRDVAVKILKESNEDGEDFINEIASMSRTSHANIVSLLGFCYEGRKKAIIYELMPNGSLDKFISKNMSAKMEWKTLYNIAVGVSHGLEYLHSHCVSRIVHFDIKPQNILIDGDLCPKISDFGLAKLCKNNESIISMLHARGTIGYIAPEVFSQNFGGVSHKSDVYSYGMVVLEMIGARNIGRAQNAGSSNTSMYFPDWIYKDLEKGEIMSFLADQITEEEDEKIVKKMVLVGLWCIQTNPYDRPPMSKVVEMLEGSLEALQIPPKPLLCLPAITAPITVDEDIQETSSFLKPSQDTSYYSEQIVQDIVEENQDSSRSS

SEQ ID NO: 69513 - protein, 515 aa, Arabidopsis thaliana
  peptide (1)..(515): Ceres Seq. ID no. 1816921
MNETCPSELMVNSSGLGSHHPIACMTTCQRYQLPELCCIGLSSGVVVPPGICKRTIYSRTFNNVCPSAYSYAYDVDNSSFTCPNFSNFVITFCPSSSTVPEAGNINSSTVPEAGNIKTGTEAKGVSSVLATMIIIVIVGKVRANNMRKSDLNEKNMEAVVMLKRFSYVQVKKMTKSFENVLGKGGFGTVYKGKLPDGSRDVAVKILKESNEDGEDFINEIASMSRTSHANIVSLLGFCYEGRKKAIIYELMPNGSLDKFISKNMSAKMEWKTLYNIAVGVSHGLEYLHSHCVSRIVHFDIKPQNILIDGDLCPKISDFGLAKLCKNNESIISMLHARGTIGYIAPEVFSQNFGGVSHKSDVYSYGMVVLEMIGARNIGRAQNAGSSNTSMYFPDWIYKDLEKGEIMSFLADQITEEEDEKIVKKMVLVGLWCIQTNPYDRPPMSKVVEMLEGSLEALQIPPKPLLCLPAITAPITVDEDIQETSSFLKPSQDTSYYSEQIVQDIVEENQDSSRSS

SEQ ID NO: 69514 - DNA, 525 bp, Arabidopsis thaliana
  misc_feature (1)..(525): Ceres Seq. ID no. 1817049
  misc_feature (1)..(525): Ortholog of  Ceres SEQ ID NO 14316390 as cited in SEQ ID NO 60116
atggatgtttcaggaagcttgaattgcgttgttgtggcggtagatggaagcgaggtgagtatggaagctctgaggtgggctctagacaacctcaagctctcttcgtcttcttccgattcatcattcgtcgtgctccacgtccagccgtcgccttctgtagccgccggcgtgagtcccggcaccatacctttcggtggtcccagtggtcttgaggttcctgctttcactgctgcaatcgagcaacaccagaagcggatcaccgacaccatcctcgaacacgctagtcaaatttgtgctgaaaaatctgtgagtagagtgaatgtgaaaacacaagtggttattggggatcccaagtataaaatctgcgaagctgtagagaatttgcatgctgatcttcttgtcatgggctcccgggcttatggccgcattaagagaatgtttctgggaagtgtaagcaactactgcaccaaccacgcccattgtcctgttgtgataatcaaaccaaaagaggattcttctgcataa

SEQ ID NO: 69515 - protein, 174 aa, Arabidopsis thaliana
  peptide (1)..(174): Ceres Seq. ID no. 1817050
MDVSGSLNCVVVAVDGSEVSMEALRWALDNLKLSSSSSDSSFVVLHVQPSPSVAAGVSPGTIPFGGPSGLEVPAFTAAIEQHQKRITDTILEHASQICAEKSVSRVNVKTQVVIGDPKYKICEAVENLHADLLVMGSRAYGRIKRMFLGSVSNYCTNHAHCPVVIIKPKEDSSA

SEQ ID NO: 69516 - protein, 154 aa, Arabidopsis thaliana
  peptide (1)..(154): Ceres Seq. ID no. 1817051
MEALRWALDNLKLSSSSSDSSFVVLHVQPSPSVAAGVSPGTIPFGGPSGLEVPAFTAAIEQHQKRITDTILEHASQICAEKSVSRVNVKTQVVIGDPKYKICEAVENLHADLLVMGSRAYGRIKRMFLGSVSNYCTNHAHCPVVIIKPKEDSSA

SEQ ID NO: 69517 - DNA, 1569 bp, Arabidopsis thaliana
  misc_feature (1)..(1569): Ceres Seq. ID no. 1817349
  misc_feature (1)..(1569): Ortholog of  Ceres SEQ ID NO 14303500 as cited in SEQ ID NO 54123
  misc_feature (1)..(1569): Ortholog of  Ceres SEQ ID NO 14303141 as cited in SEQ ID NO 65752
atgtcttatcctctctccacaagctcccgttggatcgtcgacgagaacggtctacgggtaaagctcgtgtgtgcgaactggccatcacacctccagcccgttgtagcggaagggctgagcaaacaaccagtggacgcagtggccaagaagatagtggaaatgggtttcaattgtgttaggttaacttggccgttggatttgatgactaatgagacattggctaataatgtcacagtaagacaatcttttcaaagccttggtcttaatgatgacattgttggcttccaaactaacaacccctccattattgatctccccctcattgaagcttacaagacggtagttactacattaggaaacaacgatgtgatggtgatattagacaaccacctaactaaaccagggtggtgctgcgccaacgacgatggtaacggtttcttcggtgaccagttcttcgatcctaccgtatgggttgccgctttaaagaaaatggctgcgaccttcaacggtgtctctaatgttgttggcatgagtctaaggaatgaacttagagggcctaaacaaaacgttaacgattggttcaagtatatgcaacaaggagcggaagcagttcattcagcaaacaacaaggtacttgtaatcctctccggtctcagcttcgacgctgatctctcctttgttaggtctcgacccgtaaagctatccttcaccggaaaactcgtcttcgagctccattggtattctttcagtgacggaaactcgtgggctgccaataaccctaacgatatatgtggtcgagttctaaaccggattggaaacggtggcggttatctccttaaccaaggctttccgttgttcctaagcgaattcggtatagatgaaagaggagtaaacaccaatgataaccggtattttgggtgtttaaccggttgggccgcggaaaatgacgttgattggtcgctatgggctcttactggaagctattacttaagacaaggcaaagtcggtatgaatgagtattacggtgtgttggattcggattggataagtgttcggaattcgagtttcttgcaaaagatctcttttcttcaatctccgcttcaaggaccgggccctcgaactgatgcttacaatctggtttttcatcccttaaccggactctgcatagtacgatctcttgatgacccaaaaatgcttactcttggtccatgcaatagctccgaaccatggagctatactaagaaagccttaagaatcaaagaccagcaattgtgtttacagagcaacggaccaaaaaacccggttacgatgactcggactagttgttcgacatccggatcaaaatggcagaccatctcggcctcaaggatgcacttggcttcgacaacaagtaacaagacttctctttgccttgacgtggacacagcgaacaatgtcgtggctaatgcttgcaagtgtctgagcaaagacaaatcgtgtgagccaatgagccaatggtttaagattatcaaagccacaaggccattgaagagctcgagattgtataaagagatctcgtctatgctgtaa

SEQ ID NO: 69518 - protein, 522 aa, Arabidopsis thaliana
  peptide (1)..(522): Ceres Seq. ID no. 1817350
MSYPLSTSSRWIVDENGLRVKLVCANWPSHLQPVVAEGLSKQPVDAVAKKIVEMGFNCVRLTWPLDLMTNETLANNVTVRQSFQSLGLNDDIVGFQTNNPSIIDLPLIEAYKTVVTTLGNNDVMVILDNHLTKPGWCCANDDGNGFFGDQFFDPTVWVAALKKMAATFNGVSNVVGMSLRNELRGPKQNVNDWFKYMQQGAEAVHSANNKVLVILSGLSFDADLSFVRSRPVKLSFTGKLVFELHWYSFSDGNSWAANNPNDICGRVLNRIGNGGGYLLNQGFPLFLSEFGIDERGVNTNDNRYFGCLTGWAAENDVDWSLWALTGSYYLRQGKVGMNEYYGVLDSDWISVRNSSFLQKISFLQSPLQGPGPRTDAYNLVFHPLTGLCIVRSLDDPKMLTLGPCNSSEPWSYTKKALRIKDQQLCLQSNGPKNPVTMTRTSCSTSGSKWQTISASRMHLASTTSNKTSLCLDVDTANNVVANACKCLSKDKSCEPMSQWFKIIKATRPLKSSRLYKEISSML

SEQ ID NO: 69519 - protein, 469 aa, Arabidopsis thaliana
  peptide (1)..(469): Ceres Seq. ID no. 1817351
MGFNCVRLTWPLDLMTNETLANNVTVRQSFQSLGLNDDIVGFQTNNPSIIDLPLIEAYKTVVTTLGNNDVMVILDNHLTKPGWCCANDDGNGFFGDQFFDPTVWVAALKKMAATFNGVSNVVGMSLRNELRGPKQNVNDWFKYMQQGAEAVHSANNKVLVILSGLSFDADLSFVRSRPVKLSFTGKLVFELHWYSFSDGNSWAANNPNDICGRVLNRIGNGGGYLLNQGFPLFLSEFGIDERGVNTNDNRYFGCLTGWAAENDVDWSLWALTGSYYLRQGKVGMNEYYGVLDSDWISVRNSSFLQKISFLQSPLQGPGPRTDAYNLVFHPLTGLCIVRSLDDPKMLTLGPCNSSEPWSYTKKALRIKDQQLCLQSNGPKNPVTMTRTSCSTSGSKWQTISASRMHLASTTSNKTSLCLDVDTANNVVANACKCLSKDKSCEPMSQWFKIIKATRPLKSSRLYKEISSML

SEQ ID NO: 69520 - protein, 455 aa, Arabidopsis thaliana
  peptide (1)..(455): Ceres Seq. ID no. 1817352
MTNETLANNVTVRQSFQSLGLNDDIVGFQTNNPSIIDLPLIEAYKTVVTTLGNNDVMVILDNHLTKPGWCCANDDGNGFFGDQFFDPTVWVAALKKMAATFNGVSNVVGMSLRNELRGPKQNVNDWFKYMQQGAEAVHSANNKVLVILSGLSFDADLSFVRSRPVKLSFTGKLVFELHWYSFSDGNSWAANNPNDICGRVLNRIGNGGGYLLNQGFPLFLSEFGIDERGVNTNDNRYFGCLTGWAAENDVDWSLWALTGSYYLRQGKVGMNEYYGVLDSDWISVRNSSFLQKISFLQSPLQGPGPRTDAYNLVFHPLTGLCIVRSLDDPKMLTLGPCNSSEPWSYTKKALRIKDQQLCLQSNGPKNPVTMTRTSCSTSGSKWQTISASRMHLASTTSNKTSLCLDVDTANNVVANACKCLSKDKSCEPMSQWFKIIKATRPLKSSRLYKEISSML

SEQ ID NO: 69521 - DNA, 1005 bp, Arabidopsis thaliana
  misc_feature (1)..(1005): Ceres Seq. ID no. 1817433
  misc_feature (1)..(1005): Ortholog of  Ceres SEQ ID NO 13581701 as cited in SEQ ID NO 51151
  misc_feature (1)..(1005): Ortholog of  Ceres SEQ ID NO 14315491 as cited in SEQ ID NO 57026
atgggttgcgtctcatctaacctcctaaaccacgacgaagacttctctcaaatcggcggtggaagctccgccttcggtcaccacatcgtcaaactaacctccaccacttatggtcttctcacactcgatcctcctcctcctccttctcctcctatgacgccgccggagaaattcacagtcgatacaaaatctaagtcaatatggtctgagccaagggtgataaagtcggaaccggagattattaactcttgggagttaatgtctggtctcgacggagagagtttccgattcacgccacttcctaagactccggtgaagtataaagtgtttggtggagagaacaaagagaattcagatcctagtcggagaaaccctagaaaaaacttgaacgacgaggttttgaaaccgctagatctgaacagagaggattcggattctaattcgagaagccctagaaaatcgtttaaaccgttagatttgaaattggatgagaaatttgagaggatttgtccaccaggaggagagaatcgtgtggtgatgtacacgacgtcgttgcgaggtgttcgtcaaacgtttgaggcgtgtaacgctgtgagagcggcggtggagagttttggtgttgtggtttgcgagagagatgtgtcgatggatagaaggtttagagaagagcttgtgagtctaatggcgaagagagttggggatgagggagtggctgcattgccgcctcgggtttttgtgaagggaaggtacattggtggaggagaggaagtgttgagactagttgaggaaggttctttcggagagctgatcagcgggattccgagaaagaaagcgggaggatgcgagagcggcgcgtgtgatggttgcggcggtttgtttttcttgccgtgttttcggtgtaatggaagctgtaagatggtgaaaggatggggtagtgcttcggtggttgtgagatgtaatgagtgtaatgagaatggtcttgttccatgtcctatttgcagttga

SEQ ID NO: 69522 - protein, 334 aa, Arabidopsis thaliana
  peptide (1)..(334): Ceres Seq. ID no. 1817434
MGCVSSNLLNHDEDFSQIGGGSSAFGHHIVKLTSTTYGLLTLDPPPPPSPPMTPPEKFTVDTKSKSIWSEPRVIKSEPEIINSWELMSGLDGESFRFTPLPKTPVKYKVFGGENKENSDPSRRNPRKNLNDEVLKPLDLNREDSDSNSRSPRKSFKPLDLKLDEKFERICPPGGENRVVMYTTSLRGVRQTFEACNAVRAAVESFGVVVCERDVSMDRRFREELVSLMAKRVGDEGVAALPPRVFVKGRYIGGGEEVLRLVEEGSFGELISGIPRKKAGGCESGACDGCGGLFFLPCFRCNGSCKMVKGWGSASVVVRCNECNENGLVPCPICS

SEQ ID NO: 69523 - protein, 283 aa, Arabidopsis thaliana
  peptide (1)..(283): Ceres Seq. ID no. 1817435
MTPPEKFTVDTKSKSIWSEPRVIKSEPEIINSWELMSGLDGESFRFTPLPKTPVKYKVFGGENKENSDPSRRNPRKNLNDEVLKPLDLNREDSDSNSRSPRKSFKPLDLKLDEKFERICPPGGENRVVMYTTSLRGVRQTFEACNAVRAAVESFGVVVCERDVSMDRRFREELVSLMAKRVGDEGVAALPPRVFVKGRYIGGGEEVLRLVEEGSFGELISGIPRKKAGGCESGACDGCGGLFFLPCFRCNGSCKMVKGWGSASVVVRCNECNENGLVPCPICS

SEQ ID NO: 69524 - protein, 248 aa, Arabidopsis thaliana
  peptide (1)..(248): Ceres Seq. ID no. 1817436
MSGLDGESFRFTPLPKTPVKYKVFGGENKENSDPSRRNPRKNLNDEVLKPLDLNREDSDSNSRSPRKSFKPLDLKLDEKFERICPPGGENRVVMYTTSLRGVRQTFEACNAVRAAVESFGVVVCERDVSMDRRFREELVSLMAKRVGDEGVAALPPRVFVKGRYIGGGEEVLRLVEEGSFGELISGIPRKKAGGCESGACDGCGGLFFLPCFRCNGSCKMVKGWGSASVVVRCNECNENGLVPCPICS

SEQ ID NO: 69525 - DNA, 858 bp, Arabidopsis thaliana
  misc_feature (1)..(858): Ceres Seq. ID no. 1817754
  misc_feature (1)..(858): Ortholog of  Ceres SEQ ID NO 15179026 as cited in SEQ ID NO 0
atgggtgtatttcctgcgtttggagcatggatcaatcagaattctcaacagcctcttgaggaagatcccaagagctctgagcatgttgaatctaagtcggcatcagagatggataatggtcctgctaagatgaaaaaatactatgacgaagatgagtgggagaggcaagataaactttggacagctgcagagaagaagcatccatggaaagatgcccctcctaaggttaaggtgacaacaaaaaagggtatatgccatatgcacatagaattgacattggggttgcctcctgatggagtcttcgaacttttcactaatccacataacggaccaaacaccgaaccacttctgaaaagcaaatcaagaaaggttttgaaggacgatggaccgaggcagatcgcgaaggtgaagaaagctgtggcctggaacttcagtgggaggtctattgctatccccataagtctaattgtcgatgaaaacagaagagatcttacagcgaaatataaaaaagagaaaatgatgttcatgaaagtattcgagggtagctataaagtggagcctgtatacgtagattcagtacgcttatgcaagaacaagaagccgaagagtgtagatgaatacaagaaatgtagtggcggacaaggaaagattgcatcgaaagtgacaatggaccaatattttcagccatatcctccttttaatctaccgccattttcttggttcattcgtgatatcaccatcaagaataccaagagtgtgctagagagacttcaaagttggagtttcagtattcgaaatccgggtgtaatcatgtcaaccaacaaacatggaaaaacagaagtttctcctaaacagtaa

SEQ ID NO: 69526 - protein, 285 aa, Arabidopsis thaliana
  peptide (1)..(285): Ceres Seq. ID no. 1817755
MGVFPAFGAWINQNSQQPLEEDPKSSEHVESKSASEMDNGPAKMKKYYDEDEWERQDKLWTAAEKKHPWKDAPPKVKVTTKKGICHMHIELTLGLPPDGVFELFTNPHNGPNTEPLLKSKSRKVLKDDGPRQIAKVKKAVAWNFSGRSIAIPISLIVDENRRDLTAKYKKEKMMFMKVFEGSYKVEPVYVDSVRLCKNKKPKSVDEYKKCSGGQGKIASKVTMDQYFQPYPPFNLPPFSWFIRDITIKNTKSVLERLQSWSFSIRNPGVIMSTNKHGKTEVSPKQ

SEQ ID NO: 69527 - protein, 249 aa, Arabidopsis thaliana
  peptide (1)..(249): Ceres Seq. ID no. 1817756
MDNGPAKMKKYYDEDEWERQDKLWTAAEKKHPWKDAPPKVKVTTKKGICHMHIELTLGLPPDGVFELFTNPHNGPNTEPLLKSKSRKVLKDDGPRQIAKVKKAVAWNFSGRSIAIPISLIVDENRRDLTAKYKKEKMMFMKVFEGSYKVEPVYVDSVRLCKNKKPKSVDEYKKCSGGQGKIASKVTMDQYFQPYPPFNLPPFSWFIRDITIKNTKSVLERLQSWSFSIRNPGVIMSTNKHGKTEVSPKQ

SEQ ID NO: 69528 - protein, 242 aa, Arabidopsis thaliana
  peptide (1)..(242): Ceres Seq. ID no. 1817757
MKKYYDEDEWERQDKLWTAAEKKHPWKDAPPKVKVTTKKGICHMHIELTLGLPPDGVFELFTNPHNGPNTEPLLKSKSRKVLKDDGPRQIAKVKKAVAWNFSGRSIAIPISLIVDENRRDLTAKYKKEKMMFMKVFEGSYKVEPVYVDSVRLCKNKKPKSVDEYKKCSGGQGKIASKVTMDQYFQPYPPFNLPPFSWFIRDITIKNTKSVLERLQSWSFSIRNPGVIMSTNKHGKTEVSPKQ

SEQ ID NO: 69529 - DNA, 1038 bp, Arabidopsis thaliana
  misc_feature (1)..(1038): Ceres Seq. ID no. 1817809
  misc_feature (1)..(1038): Ortholog of  Ceres SEQ ID NO 14314567 as cited in SEQ ID NO 52335
atggaaacaagcgacagaattagccctggtggtggtataggagcagaagttccatcagcgtatcatatggctccgagaccttcagatagccctgctaaccagtttatggggttgtctctccctcccatggaagccccaatgccttcttcaggggaagcctcagggaagaagaggagaggcagacctcgtaaatatgaagctaatggtgctcctttgccttcttcatcagttcctcttgtgaagaaacgagtaagaggcaagctcaatggttttgatatgaagaagatgcataagaccattgggttccattcttctggtgaaaggtttggtgttggtggtggtgttggtggtggtgttggatcaaatttcacgccgcatgtaatcacagtgaacactggtgaggtatgtatattagaagaaaaaggccctaaactttcacttgggaggagatttgatattactatgagaatcatctccttttcacaacaaggaccacgagctatttgtatcttatcagcaaatggagtgatatcaaacgttactcttcgccaacccgattcttgcggtggtactctcacctacgagggtcggtttgagatactgtctctgtctggttcattcatggaaacagagaatcaaggttcaaaaggtcggtctggtggcatgagtgtatctttggccggtcctgatggtcgtgttgtcggtggcggtgtcgctggcctgctcattgccgccactcctattcaggtgactcatgaatctaacaacaacgtttacgttgttgttggcagttttataacgagtgatcaacaagatcatcagaaaccgaggaagcaaagagtcgagcatgcccctgcagcagtcatgtcagtgcctcctcctccttctcctcctcctccggcggcttctgttttctcaccgacaaacccggacagagagcagccgccatcttcattcggtatctccagctggaccaacggacaggacatgccgagaaactcagccactgacatcaacatatctttaccagtcgactga

SEQ ID NO: 69530 - protein, 345 aa, Arabidopsis thaliana
  peptide (1)..(345): Ceres Seq. ID no. 1817810
METSDRISPGGGIGAEVPSAYHMAPRPSDSPANQFMGLSLPPMEAPMPSSGEASGKKRRGRPRKYEANGAPLPSSSVPLVKKRVRGKLNGFDMKKMHKTIGFHSSGERFGVGGGVGGGVGSNFTPHVITVNTGEVCILEEKGPKLSLGRRFDITMRIISFSQQGPRAICILSANGVISNVTLRQPDSCGGTLTYEGRFEILSLSGSFMETENQGSKGRSGGMSVSLAGPDGRVVGGGVAGLLIAATPIQVTHESNNNVYVVVGSFITSDQQDHQKPRKQRVEHAPAAVMSVPPPPSPPPPAASVFSPTNPDREQPPSSFGISSWTNGQDMPRNSATDINISLPVD

SEQ ID NO: 69531 - protein, 323 aa, Arabidopsis thaliana
  peptide (1)..(323): Ceres Seq. ID no. 1817811
MAPRPSDSPANQFMGLSLPPMEAPMPSSGEASGKKRRGRPRKYEANGAPLPSSSVPLVKKRVRGKLNGFDMKKMHKTIGFHSSGERFGVGGGVGGGVGSNFTPHVITVNTGEVCILEEKGPKLSLGRRFDITMRIISFSQQGPRAICILSANGVISNVTLRQPDSCGGTLTYEGRFEILSLSGSFMETENQGSKGRSGGMSVSLAGPDGRVVGGGVAGLLIAATPIQVTHESNNNVYVVVGSFITSDQQDHQKPRKQRVEHAPAAVMSVPPPPSPPPPAASVFSPTNPDREQPPSSFGISSWTNGQDMPRNSATDINISLPVD

SEQ ID NO: 69532 - protein, 310 aa, Arabidopsis thaliana
  peptide (1)..(310): Ceres Seq. ID no. 1817812
MGLSLPPMEAPMPSSGEASGKKRRGRPRKYEANGAPLPSSSVPLVKKRVRGKLNGFDMKKMHKTIGFHSSGERFGVGGGVGGGVGSNFTPHVITVNTGEVCILEEKGPKLSLGRRFDITMRIISFSQQGPRAICILSANGVISNVTLRQPDSCGGTLTYEGRFEILSLSGSFMETENQGSKGRSGGMSVSLAGPDGRVVGGGVAGLLIAATPIQVTHESNNNVYVVVGSFITSDQQDHQKPRKQRVEHAPAAVMSVPPPPSPPPPAASVFSPTNPDREQPPSSFGISSWTNGQDMPRNSATDINISLPVD

SEQ ID NO: 69533 - DNA, 846 bp, Arabidopsis thaliana
  misc_feature (1)..(846): Ceres Seq. ID no. 1817900
  misc_feature (1)..(846): Ortholog of  Ceres SEQ ID NO 15179380 as cited in SEQ ID NO 0
atggtgaatgagaagaagatgctcccaaaacgcatcatactaatgcgtcacggtgagtcagccggtaacatcgacgcaggggcttacgcgaccacacccgatcacaagatccctctaacggaagaaggaagagcgcaagcgcgtgaggccgggaagaaaatgagagccctcatatcaacccaaagcggcggtgcgtgtggagagaattggcgcgtgtacttctacgtgtcgccttacgagagaacgaggacgactttgagggaagtaggaaaaggattctcgaggaagcgcgtgataggagtgagggaagagtgtaggatcagagaacaagattttgggaattttcaagtggaagagaggatgagagttgtgaaggagacgagggaacgtttcggtagatttttctatcgttttcccgaaggtgaatccgccgccgacgtctacgatcgtgtttctagttttctggagtctatgtggagagacgtggacatgaacaggcatcaagtggatccatcaagtgaactaaacctagtgattgtgtcccacggactgacatctcgagtgtttctaacaaaatggttcaagtggacggtggcagagttcgagcggttgaataactttgggaactgcgagttcagagtgatggagttgggtgcgagcggagagtacactttcgcgatacaccacagtgaagaagagatgttggattggggcatgtctaaagatatgattgatgatcaaaaggatcgtgttgatgggtgtcgtgtaacaacatcaaacgattcttgttcattgcatctcaatgagtattttgatttgttagatgtcactgatgatgaagaatga

SEQ ID NO: 69534 - protein, 281 aa, Arabidopsis thaliana
  peptide (1)..(281): Ceres Seq. ID no. 1817901
MVNEKKMLPKRIILMRHGESAGNIDAGAYATTPDHKIPLTEEGRAQAREAGKKMRALISTQSGGACGENWRVYFYVSPYERTRTTLREVGKGFSRKRVIGVREECRIREQDFGNFQVEERMRVVKETRERFGRFFYRFPEGESAADVYDRVSSFLESMWRDVDMNRHQVDPSSELNLVIVSHGLTSRVFLTKWFKWTVAEFERLNNFGNCEFRVMELGASGEYTFAIHHSEEEMLDWGMSKDMIDDQKDRVDGCRVTTSNDSCSLHLNEYFDLLDVTDDEE

SEQ ID NO: 69535 - protein, 275 aa, Arabidopsis thaliana
  peptide (1)..(275): Ceres Seq. ID no. 1817902
MLPKRIILMRHGESAGNIDAGAYATTPDHKIPLTEEGRAQAREAGKKMRALISTQSGGACGENWRVYFYVSPYERTRTTLREVGKGFSRKRVIGVREECRIREQDFGNFQVEERMRVVKETRERFGRFFYRFPEGESAADVYDRVSSFLESMWRDVDMNRHQVDPSSELNLVIVSHGLTSRVFLTKWFKWTVAEFERLNNFGNCEFRVMELGASGEYTFAIHHSEEEMLDWGMSKDMIDDQKDRVDGCRVTTSNDSCSLHLNEYFDLLDVTDDEE

SEQ ID NO: 69536 - protein, 267 aa, Arabidopsis thaliana
  peptide (1)..(267): Ceres Seq. ID no. 1817903
MRHGESAGNIDAGAYATTPDHKIPLTEEGRAQAREAGKKMRALISTQSGGACGENWRVYFYVSPYERTRTTLREVGKGFSRKRVIGVREECRIREQDFGNFQVEERMRVVKETRERFGRFFYRFPEGESAADVYDRVSSFLESMWRDVDMNRHQVDPSSELNLVIVSHGLTSRVFLTKWFKWTVAEFERLNNFGNCEFRVMELGASGEYTFAIHHSEEEMLDWGMSKDMIDDQKDRVDGCRVTTSNDSCSLHLNEYFDLLDVTDDEE

SEQ ID NO: 69537 - DNA, 1263 bp, Arabidopsis thaliana
  misc_feature (1)..(1263): Ceres Seq. ID no. 1817993
  misc_feature (1)..(1263): Ortholog of  Ceres SEQ ID NO 13654989 as cited in SEQ ID NO 63117
  misc_feature (1)..(1263): Ortholog of  Ceres SEQ ID NO 13584744 as cited in SEQ ID NO 69137
atgatgaagctttgtccttgtttcatcaacccgcatcagcttggacctaattcgcctagagattcatttgacgaaggtcttacagcttatagaggccatagccgtaaactttttgcactgttcacatttcgctcacatcggaaaggaagctgcaggcagaagtatataacggaagagataaagaagtatgggaacgtgaagaactgcggtcgaatcttcaaattcaaggagctaatagctgcaaccgacaatttcagcatggattgtatgattggtgaaggcggttttggaagagtctacaaagggtttctcaccagcctcaatcaggtggtggctgtaaagaggcttgataggaatgggttgcaaggaacaagagagttctttgcagaagtaatggtattgagtctggctcaacatccaaaccttgtcaatctcattggctattgcgtcgaagacgagcaacgagtcctcgtttatgaattcatgcctaacggatctttggaagatcatttgttcgacttaccagaagggtcaccaagtctagactggttcaccagaatgcggatagtgcacggagcagcgaaagggctcgagtacttgcacgactacgcagatcctcctgtgatctaccgcgatttcaaagcttcaaacatattgttacaatctgacttcaactcaaagctatcggatttcgggttagctagacttggaccaactgaaggcaaagatcatgtgtccacaagagtcatgggaacatacggatactgtgcccctgaatatgcgatgaccggtcaactcactgctaaatccgatgtctacagtttcggtgttgtccttcttgagatcatttccggaagacgagctattgatggcgatagaccaactgaagaacaaaacttgatctcttgggtatttcatcaagcaagagtcttgttaacatatttgtgttgttgcttgagaagaaagaaaccgatgaaagtctttttttttttggtttggcaggcggaaccgttgttgaaagatagaaggatgtttgcgcagattgtggatccaaatctagatgggaactacccagtaaaagggttgcatcaagctctagcgattgcagcgatgtgtttgcaagaagaagcagagactaggccattgatgggagatgtggtcacagcacttgagttcttggctaagcctatagaggtggttgataacactaacactactcctgcctctcctactcagacatcatcatctgattcatcaaactaa

SEQ ID NO: 69538 - protein, 420 aa, Arabidopsis thaliana
  peptide (1)..(420): Ceres Seq. ID no. 1817994
MMKLCPCFINPHQLGPNSPRDSFDEGLTAYRGHSRKLFALFTFRSHRKGSCRQKYITEEIKKYGNVKNCGRIFKFKELIAATDNFSMDCMIGEGGFGRVYKGFLTSLNQVVAVKRLDRNGLQGTREFFAEVMVLSLAQHPNLVNLIGYCVEDEQRVLVYEFMPNGSLEDHLFDLPEGSPSLDWFTRMRIVHGAAKGLEYLHDYADPPVIYRDFKASNILLQSDFNSKLSDFGLARLGPTEGKDHVSTRVMGTYGYCAPEYAMTGQLTAKSDVYSFGVVLLEIISGRRAIDGDRPTEEQNLISWVFHQARVLLTYLCCCLRRKKPMKVFFFLVWQAEPLLKDRRMFAQIVDPNLDGNYPVKGLHQALAIAAMCLQEEAETRPLMGDVVTALEFLAKPIEVVDNTNTTPASPTQTSSSDSSN

SEQ ID NO: 69539 - protein, 419 aa, Arabidopsis thaliana
  peptide (1)..(419): Ceres Seq. ID no. 1817995
MKLCPCFINPHQLGPNSPRDSFDEGLTAYRGHSRKLFALFTFRSHRKGSCRQKYITEEIKKYGNVKNCGRIFKFKELIAATDNFSMDCMIGEGGFGRVYKGFLTSLNQVVAVKRLDRNGLQGTREFFAEVMVLSLAQHPNLVNLIGYCVEDEQRVLVYEFMPNGSLEDHLFDLPEGSPSLDWFTRMRIVHGAAKGLEYLHDYADPPVIYRDFKASNILLQSDFNSKLSDFGLARLGPTEGKDHVSTRVMGTYGYCAPEYAMTGQLTAKSDVYSFGVVLLEIISGRRAIDGDRPTEEQNLISWVFHQARVLLTYLCCCLRRKKPMKVFFFLVWQAEPLLKDRRMFAQIVDPNLDGNYPVKGLHQALAIAAMCLQEEAETRPLMGDVVTALEFLAKPIEVVDNTNTTPASPTQTSSSDSSN

SEQ ID NO: 69540 - protein, 334 aa, Arabidopsis thaliana
  peptide (1)..(334): Ceres Seq. ID no. 1817996
MDCMIGEGGFGRVYKGFLTSLNQVVAVKRLDRNGLQGTREFFAEVMVLSLAQHPNLVNLIGYCVEDEQRVLVYEFMPNGSLEDHLFDLPEGSPSLDWFTRMRIVHGAAKGLEYLHDYADPPVIYRDFKASNILLQSDFNSKLSDFGLARLGPTEGKDHVSTRVMGTYGYCAPEYAMTGQLTAKSDVYSFGVVLLEIISGRRAIDGDRPTEEQNLISWVFHQARVLLTYLCCCLRRKKPMKVFFFLVWQAEPLLKDRRMFAQIVDPNLDGNYPVKGLHQALAIAAMCLQEEAETRPLMGDVVTALEFLAKPIEVVDNTNTTPASPTQTSSSDSSN

SEQ ID NO: 69541 - DNA, 1872 bp, Arabidopsis thaliana
  misc_feature (1)..(1872): Ceres Seq. ID no. 1818292
  misc_feature (1)..(1872): Ortholog of  Ceres SEQ ID NO 14313943 as cited in SEQ ID NO 54725
  misc_feature (1)..(1872): Ortholog of  Ceres SEQ ID NO 12465428 as cited in SEQ ID NO 68898
atggtttcttttttacctaatctgtttcgtctgtgtgttttgatctttacaaaagcagatcagtgccggcggcgatattgtccgaggataaaacatgtttgctctttccaaggttttgcggagagtctccgcctaggagcttgcaatgctgtctactctaagctagatataccattgggagaaagaaacattgctattgaatcaaacgctttgattcatgataaacacgaagctttgcctagattttatgagctctcttggtcttcctctaccggaagacgttcactttcctcggacgctggagctaaaactaccggagatgacgatgacctcgaagacaagaatgtagaccttgcaactccagacgagactagtagtgatagtgaagatggtgaggagttttccggtgatgaaggggatattgaaggagcagagctggaactacatgtcccggaaagcaagagaccatcggagatgtttaaggccattgtttctgtctcaggtctgtctgtagggagtgctcttgataagtgggttgaacaaggaaaggataccaaccgtaaagagtttgaaagtgcgatgctacaactccgtaaacgtcggatgtttgggagagcattgcagatgacagaatggttagacgaaaataagcagtttgaaatggaggagagagattatgcttgtcggcttgatctgatttccaaggtacgtggctggtacaagggagaagcttatatcaaaacaatcccggaatctttcagaggggaattggtctaccgaaccctcctggcgaatcatgtggcaactagcaatgtgagaacagctgaagcagttttcaacaaaatgaaggacttgggattccctctgtcaacattcacctgtaatcagatgcttattctttacaaaagggtcgacaagaagaaaatagccgatgtgttattgctgttggagaaggaaaatctgaagccgaatcttaacacatacaaaatcctgattgataccaaaggatcatcaaatgacataactgggatggaacaaattgtggagacaatgaaaagtgaaggtgttgagcttgaccttcgtgcacgagctctcattgcaagacactatgcatcagctgggcttaaagagaaggctgagaaagtgctgaaagagatggaaggtgaaagcttggaggaaaatcggcatatgtgcaaggatttgctttccgtctatggctatctccagagggaggatgaagtgcgcagagtttggaagatctgtgaagaaaacccccgttataacgaggtccttgctgcaatcttggcttttggaaagatcgataaagtcaaagatgcagaggcggtttttgagaaggtgttgaagatgtcccatagagtttcttctaatgtttactccgttctcttgagggtttacgtggatcacaagatggtctcagagggtaaggatcttgttaagcagatgtcagacagcgggtgcaatattggggccttaacatgggatgcagtgatcaagctctatgtggaagccggggaagtagaaaaggctgagtcttcactgagcaaggcaatacagtcgaaacagattaaaccgttgatgagctccttcatgtacttaatgcacgagtatgtgagaaggggtgatgttcataacacagagaaaatcttccagaggatgaagcaagctggctatcaatctcgcttctgggcgtaccaaacccttatccaagcttatgtcaatgccaaagctccagcttatggaatgaaggaaagaatgaaagctgataacatcttcccaaataaaagattagctgctcaactcgctaaagccgatcccttcaagaagacccctctctcggatctccttgattga

SEQ ID NO: 69542 - protein, 623 aa, Arabidopsis thaliana
  peptide (1)..(623): Ceres Seq. ID no. 1818293
MVSFLPNLFRLCVLIFTKADQCRRRYCPRIKHVCSFQGFAESLRLGACNAVYSKLDIPLGERNIAIESNALIHDKHEALPRFYELSWSSSTGRRSLSSDAGAKTTGDDDDLEDKNVDLATPDETSSDSEDGEEFSGDEGDIEGAELELHVPESKRPSEMFKAIVSVSGLSVGSALDKWVEQGKDTNRKEFESAMLQLRKRRMFGRALQMTEWLDENKQFEMEERDYACRLDLISKVRGWYKGEAYIKTIPESFRGELVYRTLLANHVATSNVRTAEAVFNKMKDLGFPLSTFTCNQMLILYKRVDKKKIADVLLLLEKENLKPNLNTYKILIDTKGSSNDITGMEQIVETMKSEGVELDLRARALIARHYASAGLKEKAEKVLKEMEGESLEENRHMCKDLLSVYGYLQREDEVRRVWKICEENPRYNEVLAAILAFGKIDKVKDAEAVFEKVLKMSHRVSSNVYSVLLRVYVDHKMVSEGKDLVKQMSDSGCNIGALTWDAVIKLYVEAGEVEKAESSLSKAIQSKQIKPLMSSFMYLMHEYVRRGDVHNTEKIFQRMKQAGYQSRFWAYQTLIQAYVNAKAPAYGMKERMKADNIFPNKRLAAQLAKADPFKKTPLSDLLD

SEQ ID NO: 69543 - protein, 465 aa, Arabidopsis thaliana
  peptide (1)..(465): Ceres Seq. ID no. 1818294
MFKAIVSVSGLSVGSALDKWVEQGKDTNRKEFESAMLQLRKRRMFGRALQMTEWLDENKQFEMEERDYACRLDLISKVRGWYKGEAYIKTIPESFRGELVYRTLLANHVATSNVRTAEAVFNKMKDLGFPLSTFTCNQMLILYKRVDKKKIADVLLLLEKENLKPNLNTYKILIDTKGSSNDITGMEQIVETMKSEGVELDLRARALIARHYASAGLKEKAEKVLKEMEGESLEENRHMCKDLLSVYGYLQREDEVRRVWKICEENPRYNEVLAAILAFGKIDKVKDAEAVFEKVLKMSHRVSSNVYSVLLRVYVDHKMVSEGKDLVKQMSDSGCNIGALTWDAVIKLYVEAGEVEKAESSLSKAIQSKQIKPLMSSFMYLMHEYVRRGDVHNTEKIFQRMKQAGYQSRFWAYQTLIQAYVNAKAPAYGMKERMKADNIFPNKRLAAQLAKADPFKKTPLSDLLD

SEQ ID NO: 69544 - protein, 430 aa, Arabidopsis thaliana
  peptide (1)..(430): Ceres Seq. ID no. 1818295
MLQLRKRRMFGRALQMTEWLDENKQFEMEERDYACRLDLISKVRGWYKGEAYIKTIPESFRGELVYRTLLANHVATSNVRTAEAVFNKMKDLGFPLSTFTCNQMLILYKRVDKKKIADVLLLLEKENLKPNLNTYKILIDTKGSSNDITGMEQIVETMKSEGVELDLRARALIARHYASAGLKEKAEKVLKEMEGESLEENRHMCKDLLSVYGYLQREDEVRRVWKICEENPRYNEVLAAILAFGKIDKVKDAEAVFEKVLKMSHRVSSNVYSVLLRVYVDHKMVSEGKDLVKQMSDSGCNIGALTWDAVIKLYVEAGEVEKAESSLSKAIQSKQIKPLMSSFMYLMHEYVRRGDVHNTEKIFQRMKQAGYQSRFWAYQTLIQAYVNAKAPAYGMKERMKADNIFPNKRLAAQLAKADPFKKTPLSDLLD

SEQ ID NO: 69545 - DNA, 2853 bp, Arabidopsis thaliana
  misc_feature (1)..(2853): Ceres Seq. ID no. 1818328
  misc_feature (1)..(2853): Ortholog of  Ceres SEQ ID NO 15225873 as cited in SEQ ID NO 54927
atgagcacccagaagcaagtggtgactattcgggacctggtagatgaagccaagaaacgaattgtaatcgtggtcatatgcgtcgtcggactttcctacctcatgtccctgacaagttcatcggttttggttaaccttactcctgctgtgttattgatcatcctttttcgttattacactctcgatagtgaaatgaaaagaaaagctgcagcttacaccaacaagccatcgtcgtctctgaatgcaccaactctaaacaaaacacctgaactccctaaagcagctccacggtctgactggagaagcaaagtgaactctcaagtcgttgaggatgcaattgatcactttactcgtcacctcatttctgaatgggttctggatctttggtactctcgaattacaccggataagcaaggtcctgaagaactggtgtttattattaacgatgttcttggggaactttcacggcggtttagaaatgtaaatcttattgatctattgacaagggatttgattgatattatatgtcgccgtgtggagcttttccgcgagtgtcaagcaaagattgagagacaacaaaggagaagcctcagttttgaagacagagactcagaactaagacgtgtgatggccagtgaagataaattgcaccctgctttgttctctcctgaatccgagcataaggttctgcaacatatagtgaacagtctcattttagtaacatttaggccagaggatctgcactgtgcttttttccactataccgtgagggagctttttgcttgctgtgtgatccgaccagtcctaaacctagccaatcctcggttcataaatgagaggattgaagctgctgtaatgtcaaggataaagactactatcagatctagtgctgcagaagaggcttctcagtctgaagatctctcaaatgtttctcctgatcatttttctagatatatggacccctctgtcacaggtgttgagcttgtgcagttgaaaaatgaacagcaaaaaaattctaaaaagaaaagcgctacagataaacagcatgtaaaagagctctctaaagatccattgctttctatggacactcgatcttcccgatcgtggaactctttcccctcaacatccaaaataggtgatggtagtaaagatcctcaaggacatcgaggaggagagggttggggtgacgtgttagacatgatgtcacaaaggaaaactgagacccttgctcctgagcatcttgaaagcgtgtgggcaaaaggaagaaactataaaaagaaggaaggtgggaaagttgatgagcgcgtgcccccgagatggtctagcaaggctggtgactgcaatgaaaacactgtgaatgcaagagagtccagtcagcgtaaagttgtaaatacagacagtcatttatcaagttattcctctgctgaagaggatgaggagcaaacaaagagtagtcattcttatacatccgaggatgaggaaacggtaacaggtctaaacagtcctgggactcgtgtctgggatggtcgaacgaagaaaaatcttggtgtttcacggatacaccatccacttgaaaattcaggccgttctttaaaaaagaccagtaaagggcatgaacgttatcagcaagtacccggtcatcaatctggcaggaagagatccagaatttctggtcatattatagacgatgatgatagtgatgattctgaagatggttctttgactagatcatacagtggaatgtctgcaacgtcatctacatcatacgtttcagcggcagaaagtgaccttcccaatgcccctaaaagttctttgttggttgattcctttgcgaagttgagatgtgaggttctgggtgccaatattgtgaagggtagttctaagatgtttgctgtgtattcagttgcagtcacagatgaaagtaatcatagctggtctatcaaaagaagatttcgacattttgaggagcttcaccgacggctaaaagtgtttcctgagtacaaacttcatttaccgccaaagcatttcctatcaacaggcgtggacatacctgttatccaagagcgatgtgtactacttgacgagtatatcaagctacaacgaatttcaggatcaattgaagtttgggacttcctcagtgtggattctcagacttatgcgttctcaagttccttctcaatcattgagacgctaacagttaaacctgtcaataagacatctactgtcgctacaaatatagcaagtatgactcaggcagcaccaggtccgcttcctcggagggaaaatctgagttctgagaatgggatatcgggtcaaaatatgaggaataacgttatggtggatgatgtaaagtcaaaagtgaaaaatcttggaaatgatcatgtgaagacacctgatgtagatgtgagaaaccgcaaagagaatggcgggctaaaagtgggtactcaacatgccgatgatgtggcctgcgctggcctgcccaccgagtgggttcctccaaagctaacattacccttgctagacttagtagatgttgtctttcaactccaggagggtgggtggatcaggcggaaagctttttgggttgccaaacagatacttcaacttgggatgggggacgcattggacgattgggtacttgaaaaaatttgtcttttgcggcggggaactgtagttgcttctggaattcaacgggttgaacagatactatggccggatggtgtattcatgacaaagcatccaaaaaggcagcaacaatccagcatttctgaagaggagcagaaacaagaagcagagagacgagcaaagtttgttcatgagctgatgatcggtaatgagcgtcctgttatctga

SEQ ID NO: 69546 - protein, 950 aa, Arabidopsis thaliana
  peptide (1)..(950): Ceres Seq. ID no. 1818329
MSTQKQVVTIRDLVDEAKKRIVIVVICVVGLSYLMSLTSSSVLVNLTPAVLLIILFRYYTLDSEMKRKAAAYTNKPSSSLNAPTLNKTPELPKAAPRSDWRSKVNSQVVEDAIDHFTRHLISEWVLDLWYSRITPDKQGPEELVFIINDVLGELSRRFRNVNLIDLLTRDLIDIICRRVELFRECQAKIERQQRRSLSFEDRDSELRRVMASEDKLHPALFSPESEHKVLQHIVNSLILVTFRPEDLHCAFFHYTVRELFACCVIRPVLNLANPRFINERIEAAVMSRIKTTIRSSAAEEASQSEDLSNVSPDHFSRYMDPSVTGVELVQLKNEQQKNSKKKSATDKQHVKELSKDPLLSMDTRSSRSWNSFPSTSKIGDGSKDPQGHRGGEGWGDVLDMMSQRKTETLAPEHLESVWAKGRNYKKKEGGKVDERVPPRWSSKAGDCNENTVNARESSQRKVVNTDSHLSSYSSAEEDEEQTKSSHSYTSEDEETVTGLNSPGTRVWDGRTKKNLGVSRIHHPLENSGRSLKKTSKGHERYQQVPGHQSGRKRSRISGHIIDDDDSDDSEDGSLTRSYSGMSATSSTSYVSAAESDLPNAPKSSLLVDSFAKLRCEVLGANIVKGSSKMFAVYSVAVTDESNHSWSIKRRFRHFEELHRRLKVFPEYKLHLPPKHFLSTGVDIPVIQERCVLLDEYIKLQRISGSIEVWDFLSVDSQTYAFSSSFSIIETLTVKPVNKTSTVATNIASMTQAAPGPLPRRENLSSENGISGQNMRNNVMVDDVKSKVKNLGNDHVKTPDVDVRNRKENGGLKVGTQHADDVACAGLPTEWVPPKLTLPLLDLVDVVFQLQEGGWIRRKAFWVAKQILQLGMGDALDDWVLEKICLLRRGTVVASGIQRVEQILWPDGVFMTKHPKRQQQSSISEEEQKQEAERRAKFVHELMIGNERPVI

SEQ ID NO: 69547 - protein, 916 aa, Arabidopsis thaliana
  peptide (1)..(916): Ceres Seq. ID no. 1818330
MSLTSSSVLVNLTPAVLLIILFRYYTLDSEMKRKAAAYTNKPSSSLNAPTLNKTPELPKAAPRSDWRSKVNSQVVEDAIDHFTRHLISEWVLDLWYSRITPDKQGPEELVFIINDVLGELSRRFRNVNLIDLLTRDLIDIICRRVELFRECQAKIERQQRRSLSFEDRDSELRRVMASEDKLHPALFSPESEHKVLQHIVNSLILVTFRPEDLHCAFFHYTVRELFACCVIRPVLNLANPRFINERIEAAVMSRIKTTIRSSAAEEASQSEDLSNVSPDHFSRYMDPSVTGVELVQLKNEQQKNSKKKSATDKQHVKELSKDPLLSMDTRSSRSWNSFPSTSKIGDGSKDPQGHRGGEGWGDVLDMMSQRKTETLAPEHLESVWAKGRNYKKKEGGKVDERVPPRWSSKAGDCNENTVNARESSQRKVVNTDSHLSSYSSAEEDEEQTKSSHSYTSEDEETVTGLNSPGTRVWDGRTKKNLGVSRIHHPLENSGRSLKKTSKGHERYQQVPGHQSGRKRSRISGHIIDDDDSDDSEDGSLTRSYSGMSATSSTSYVSAAESDLPNAPKSSLLVDSFAKLRCEVLGANIVKGSSKMFAVYSVAVTDESNHSWSIKRRFRHFEELHRRLKVFPEYKLHLPPKHFLSTGVDIPVIQERCVLLDEYIKLQRISGSIEVWDFLSVDSQTYAFSSSFSIIETLTVKPVNKTSTVATNIASMTQAAPGPLPRRENLSSENGISGQNMRNNVMVDDVKSKVKNLGNDHVKTPDVDVRNRKENGGLKVGTQHADDVACAGLPTEWVPPKLTLPLLDLVDVVFQLQEGGWIRRKAFWVAKQILQLGMGDALDDWVLEKICLLRRGTVVASGIQRVEQILWPDGVFMTKHPKRQQQSSISEEEQKQEAERRAKFVHELMIGNERPVI

SEQ ID NO: 69548 - protein, 886 aa, Arabidopsis thaliana
  peptide (1)..(886): Ceres Seq. ID no. 1818331
MKRKAAAYTNKPSSSLNAPTLNKTPELPKAAPRSDWRSKVNSQVVEDAIDHFTRHLISEWVLDLWYSRITPDKQGPEELVFIINDVLGELSRRFRNVNLIDLLTRDLIDIICRRVELFRECQAKIERQQRRSLSFEDRDSELRRVMASEDKLHPALFSPESEHKVLQHIVNSLILVTFRPEDLHCAFFHYTVRELFACCVIRPVLNLANPRFINERIEAAVMSRIKTTIRSSAAEEASQSEDLSNVSPDHFSRYMDPSVTGVELVQLKNEQQKNSKKKSATDKQHVKELSKDPLLSMDTRSSRSWNSFPSTSKIGDGSKDPQGHRGGEGWGDVLDMMSQRKTETLAPEHLESVWAKGRNYKKKEGGKVDERVPPRWSSKAGDCNENTVNARESSQRKVVNTDSHLSSYSSAEEDEEQTKSSHSYTSEDEETVTGLNSPGTRVWDGRTKKNLGVSRIHHPLENSGRSLKKTSKGHERYQQVPGHQSGRKRSRISGHIIDDDDSDDSEDGSLTRSYSGMSATSSTSYVSAAESDLPNAPKSSLLVDSFAKLRCEVLGANIVKGSSKMFAVYSVAVTDESNHSWSIKRRFRHFEELHRRLKVFPEYKLHLPPKHFLSTGVDIPVIQERCVLLDEYIKLQRISGSIEVWDFLSVDSQTYAFSSSFSIIETLTVKPVNKTSTVATNIASMTQAAPGPLPRRENLSSENGISGQNMRNNVMVDDVKSKVKNLGNDHVKTPDVDVRNRKENGGLKVGTQHADDVACAGLPTEWVPPKLTLPLLDLVDVVFQLQEGGWIRRKAFWVAKQILQLGMGDALDDWVLEKICLLRRGTVVASGIQRVEQILWPDGVFMTKHPKRQQQSSISEEEQKQEAERRAKFVHELMIGNERPVI

SEQ ID NO: 69549 - DNA, 777 bp, Arabidopsis thaliana
  misc_feature (1)..(777): Ceres Seq. ID no. 1818332
  misc_feature (1)..(777): Ortholog of  Ceres SEQ ID NO 14313522 as cited in SEQ ID NO 63547
  misc_feature (1)..(777): Ortholog of  Ceres SEQ ID NO 13597471 as cited in SEQ ID NO 65101
  misc_feature (1)..(777): Ortholog of  Ceres SEQ ID NO 13597481 as cited in SEQ ID NO 65171
atggctgcttccgatgattcctctcactatttcaccgagtttaccttgtctgagattgtagacatggagaatctgtataaggagctcggtgaccaatctctccacaaagatttctgtcaaactgttgcctctacttttagttgttctgtgaatcggaatggcaaatcctctataacctggaaacaggtacagatttggttccaggagaagctgaagcatcaaagccaaccaaaatccaaaactttgccatctccccctttgcagattcatgacttatctaatcccagttcttatgcttcaaatgcctcaaatgctacctttgttgggaattctacctttgttcaaacacgaaaaggcaaggcctctgatttagctgatctggcttttgaggctaaatcagcgcgggactacgcgtggtatgacgtgtcttcgttccttacttatagagttcttcgcactggtgaactggaagtgcgtgtacggttttctgggttcgacaaccgacacgatgagtgggtaaacgtcaaaacatcagtgcgtgagcggtctattcctgtagaaccatcagagtgtgggagagtgaacgttggagacctgcttctatgtttccaagaaagagaggatcaagcactctactgtgatggtcatgttttgaatatcaagagagggattcatgatcacgcgagatgtaactgcgtgtttcttgttcgctacgagcttgacaatacagaggaatcgctgggactagaaagaatttgccgccgccctgaagagtaa

SEQ ID NO: 69550 - protein, 258 aa, Arabidopsis thaliana
  peptide (1)..(258): Ceres Seq. ID no. 1818333
MAASDDSSHYFTEFTLSEIVDMENLYKELGDQSLHKDFCQTVASTFSCSVNRNGKSSITWKQVQIWFQEKLKHQSQPKSKTLPSPPLQIHDLSNPSSYASNASNATFVGNSTFVQTRKGKASDLADLAFEAKSARDYAWYDVSSFLTYRVLRTGELEVRVRFSGFDNRHDEWVNVKTSVRERSIPVEPSECGRVNVGDLLLCFQEREDQALYCDGHVLNIKRGIHDHARCNCVFLVRYELDNTEESLGLERICRRPEE

SEQ ID NO: 69551 - protein, 237 aa, Arabidopsis thaliana
  peptide (1)..(237): Ceres Seq. ID no. 1818334
MENLYKELGDQSLHKDFCQTVASTFSCSVNRNGKSSITWKQVQIWFQEKLKHQSQPKSKTLPSPPLQIHDLSNPSSYASNASNATFVGNSTFVQTRKGKASDLADLAFEAKSARDYAWYDVSSFLTYRVLRTGELEVRVRFSGFDNRHDEWVNVKTSVRERSIPVEPSECGRVNVGDLLLCFQEREDQALYCDGHVLNIKRGIHDHARCNCVFLVRYELDNTEESLGLERICRRPEE

SEQ ID NO: 69552 - DNA, 1353 bp, Arabidopsis thaliana
  misc_feature (1)..(1353): Ceres Seq. ID no. 1818450
  misc_feature (1)..(1353): Ortholog of  Ceres SEQ ID NO 13654989 as cited in SEQ ID NO 63117
  misc_feature (1)..(1353): Ortholog of  Ceres SEQ ID NO 13584744 as cited in SEQ ID NO 69137
atgtctatattcaatcctgattcaatcaacaacgagctatcgaaaccaacatcgatctttggtctaaagctttgggtcgtcatcggaattttactaggatctcttatagtcatcgctctcttctttctctccctctgtttaacctctcgccggagaaaccgtaagccacgtcacgccgatttcgcatccgcagccgtagcaacgccgccgatttcaaaggagattcaggagatcgttagacctcctgcgcaagaccattgccatccgacgcagcccgttgcggcggagattcaagtggatatagggaagaccgagcaccgtgttgtgttctcggatcgagtctcgagtggtgaaagcagaggaacggttagtgaaacggcgtcgtattcagggagtggttgtgttggacctgaggtttcgcatcttggttggggaagatggtatactcttagagagcttgaagcagctactaatggattgtgtgaagagaatgtgatcggagaaggaggttatgggattgtttatagtgggattttaactgatggaactaaagtcgctgtcaagaatctgcttaacaacaggggtcaagctgagaaggagtttagagtggaagtggaagctatcgggcgtgtaaggcataagaatctcgttaggctattaggatactgcgtcgaaggagcatacaggatgctcgtgtatgactacgtcgataatggcaacttggagcaatggattcatggggatgttggtgataaaagtccgttgacttgggatattcgtatgaacataatactttgcatggcgaaaggattggcctatctgcatgagggtcttgaaccgaaagtcgttcatcgggacataaaatctagtaatattttgcttgatcgtcaatggaatgctaaggtatcagattttggacttgctaagctcttgttctccgagagcagctacgtgacaacccgagtaatgggaacttttggatatgttgcgcctgagtatgcttgcaccggaatgttgacagaaaagagtgatatctatagttttgggatattaatcatggagataatcaccggaagaaatcctgtcgattatagtcgacctcaaggagaggtgaatttggttgagtggctgaaaacaatggttggaaaccgaaggtctgaggaagtagtcgatccaaaaatacccgaaccgcccacttcaaaagctcttaaacgcgtgttgctcgtcgcgctgcgttgtgtggatccggacgcgaataagagacctaaaatgggtcatattatacacatgcttgaagctgaagacttgttctatcgtgacgtaagtcttataatcgtattaatgaacatttga

SEQ ID NO: 69553 - protein, 450 aa, Arabidopsis thaliana
  peptide (1)..(450): Ceres Seq. ID no. 1818451
MSIFNPDSINNELSKPTSIFGLKLWVVIGILLGSLIVIALFFLSLCLTSRRRNRKPRHADFASAAVATPPISKEIQEIVRPPAQDHCHPTQPVAAEIQVDIGKTEHRVVFSDRVSSGESRGTVSETASYSGSGCVGPEVSHLGWGRWYTLRELEAATNGLCEENVIGEGGYGIVYSGILTDGTKVAVKNLLNNRGQAEKEFRVEVEAIGRVRHKNLVRLLGYCVEGAYRMLVYDYVDNGNLEQWIHGDVGDKSPLTWDIRMNIILCMAKGLAYLHEGLEPKVVHRDIKSSNILLDRQWNAKVSDFGLAKLLFSESSYVTTRVMGTFGYVAPEYACTGMLTEKSDIYSFGILIMEIITGRNPVDYSRPQGEVNLVEWLKTMVGNRRSEEVVDPKIPEPPTSKALKRVLLVALRCVDPDANKRPKMGHIIHMLEAEDLFYRDVSLIIVLMNI

SEQ ID NO: 69554 - DNA, 2358 bp, Arabidopsis thaliana
  misc_feature (1)..(2358): Ceres Seq. ID no. 1818571
  misc_feature (1)..(2358): Ortholog of  Ceres SEQ ID NO 12638191 as cited in SEQ ID NO 674
  misc_feature (1)..(2358): Ortholog of  Ceres SEQ ID NO 13504578 as cited in SEQ ID NO 59850
  misc_feature (1)..(2358): Ortholog of  Ceres SEQ ID NO 14303105 as cited in SEQ ID NO 66589
atgggagatcaaaaaacactttcttacgacaaatctaataaacccttttattcttcttcttcatctccatgttccttcacagccatcgtcgtcttcttgatcttcgtctcatatctcttatactcattcagtttcatctcttttctaaacccatattcaccttctaaatcccccaattctctcctcgtacccgttatccgtctcgggtcgggtcaaacacctgaggaacaaacggagctcaaacacatagtcttcggaatcgccgcgtcttcagatctatggaagcatcgtagagaatacgtgaaaacatggtggaaacctaacggagtcatgaacggcgccgtttggctcgacaaacccatcaacgacaccgtttcttcttcatcagctttgcctcagatcagaatctcttccgacacgtcgagtttcaagtaccgttaccgtaacggtcacagatcagcgatcaggatcacgagaatcgtgtccgagacggtgaggatgttaaacggaacggaagcggagagaaacgtgaggtgggttgtgatgggtgacgacgataccgtgtttttcacggaaaatcttgttagggttttgagaaagtacgatcataaacagttttattacatcggagctccgtccgagagtcatttgcagaatcttcatcagttttcttatggaatggcgtacggtggaggagggtttgctataagttatccattagccaaggttttggagaagatgcaagatcggtgtatcgagagatactccgatttgtacggatccgatgatcggattcatgcttgtatggctgagcttggtgttcctctcactaaagaagttggattccatcagtttgatgtatacgggaatctcttagggctattatctgtccatccacaagcaccaatagtatcaatccatcacctagacgtagtggatcctatattcccaaaaacaaaccgagtcaacgcattaaagaagctaatgatcccagcgaaactcgattcagcgagtcttgtccaacaatcggtatgctatgataagagtcatcagtggacaatgtcaatctcgtggggatacacagttcaaatcacgcgtacgtatatgccagcaaggatgatggaagtgcctactcgcacttttaatgattggcacttacgtagcgatttcactaatcttgcattcaacacacgtccggtaacatggacggattgtcagcgtcctcgtgtgttttatttctctcatgcgtttagtaactcttcttcttctgatacaacgacgattagccaatacttgaggcacgacgaatggtatcctaaatgtgaatggggaatcgcggatccttccgagatcaatcagatatttgtctacaaaaagcctactccggataggtggagcaaggttgttattaggtttgttcctagtaaagattcgaactttgcattcgttaatgctattgaagttatctctgcgcctaaggatttgattggtgacgttgcaacctctgtatctcatgatgggactgagaaattcaatggtttagctaaacaagcaatggaggttgtgtatagagtcaatgttggtggtagaaaagttactccttttaatgacacattgtggaggacttgggttactgatgaaggattcttgaaaaccggtgatgggtcgtctgagaaaagttacttcaccgggaggattaagtataggcgtggaggggcgagtcgtgaagttggtcctgataatgtttacaacactgctcgtgttggtaaaagaagcaatggattggttgatatgagttggggtttcaaggtgaatgtgggttacaagtatctcatccggatgcatttctgtgacatagctagcaaatctctcggcaggctttatttcaatgtctacattaacgggaacttggcgtatgaagatttcgatatctcatacgctgcggataatgtccttgcttctccgtattacattgatttcgtggtggatgctactgctgatgacaacaacccttcaggatcgtcgataaccgttagtgttggaccatcaaacaagactagtgttgatggaaatggagtggatgcgatattgaacggtgttgagatcatgaagatgaataactcgatgggtagtcttgatgggtatgtttcaacagagatgattctgagtacttgcccaaataggagaaacctgagcatatttatcgcaatgttggcgtttatgtgtatatttatgagcttctacattgtgactcaaagaaagagagttaaggatcagtatggctggacaaagctgtccatggacgtgcttgaagataattccaagtcagggaatcaatttacagcaagaaaggcttga

SEQ ID NO: 69555 - protein, 785 aa, Arabidopsis thaliana
  peptide (1)..(785): Ceres Seq. ID no. 1818572
MGDQKTLSYDKSNKPFYSSSSSPCSFTAIVVFLIFVSYLLYSFSFISFLNPYSPSKSPNSLLVPVIRLGSGQTPEEQTELKHIVFGIAASSDLWKHRREYVKTWWKPNGVMNGAVWLDKPINDTVSSSSALPQIRISSDTSSFKYRYRNGHRSAIRITRIVSETVRMLNGTEAERNVRWVVMGDDDTVFFTENLVRVLRKYDHKQFYYIGAPSESHLQNLHQFSYGMAYGGGGFAISYPLAKVLEKMQDRCIERYSDLYGSDDRIHACMAELGVPLTKEVGFHQFDVYGNLLGLLSVHPQAPIVSIHHLDVVDPIFPKTNRVNALKKLMIPAKLDSASLVQQSVCYDKSHQWTMSISWGYTVQITRTYMPARMMEVPTRTFNDWHLRSDFTNLAFNTRPVTWTDCQRPRVFYFSHAFSNSSSSDTTTISQYLRHDEWYPKCEWGIADPSEINQIFVYKKPTPDRWSKVVIRFVPSKDSNFAFVNAIEVISAPKDLIGDVATSVSHDGTEKFNGLAKQAMEVVYRVNVGGRKVTPFNDTLWRTWVTDEGFLKTGDGSSEKSYFTGRIKYRRGGASREVGPDNVYNTARVGKRSNGLVDMSWGFKVNVGYKYLIRMHFCDIASKSLGRLYFNVYINGNLAYEDFDISYAADNVLASPYYIDFVVDATADDNNPSGSSITVSVGPSNKTSVDGNGVDAILNGVEIMKMNNSMGSLDGYVSTEMILSTCPNRRNLSIFIAMLAFMCIFMSFYIVTQRKRVKDQYGWTKLSMDVLEDNSKSGNQFTARKA

SEQ ID NO: 69556 - protein, 675 aa, Arabidopsis thaliana
  peptide (1)..(675): Ceres Seq. ID no. 1818573
MNGAVWLDKPINDTVSSSSALPQIRISSDTSSFKYRYRNGHRSAIRITRIVSETVRMLNGTEAERNVRWVVMGDDDTVFFTENLVRVLRKYDHKQFYYIGAPSESHLQNLHQFSYGMAYGGGGFAISYPLAKVLEKMQDRCIERYSDLYGSDDRIHACMAELGVPLTKEVGFHQFDVYGNLLGLLSVHPQAPIVSIHHLDVVDPIFPKTNRVNALKKLMIPAKLDSASLVQQSVCYDKSHQWTMSISWGYTVQITRTYMPARMMEVPTRTFNDWHLRSDFTNLAFNTRPVTWTDCQRPRVFYFSHAFSNSSSSDTTTISQYLRHDEWYPKCEWGIADPSEINQIFVYKKPTPDRWSKVVIRFVPSKDSNFAFVNAIEVISAPKDLIGDVATSVSHDGTEKFNGLAKQAMEVVYRVNVGGRKVTPFNDTLWRTWVTDEGFLKTGDGSSEKSYFTGRIKYRRGGASREVGPDNVYNTARVGKRSNGLVDMSWGFKVNVGYKYLIRMHFCDIASKSLGRLYFNVYINGNLAYEDFDISYAADNVLASPYYIDFVVDATADDNNPSGSSITVSVGPSNKTSVDGNGVDAILNGVEIMKMNNSMGSLDGYVSTEMILSTCPNRRNLSIFIAMLAFMCIFMSFYIVTQRKRVKDQYGWTKLSMDVLEDNSKSGNQFTARKA

SEQ ID NO: 69557 - protein, 619 aa, Arabidopsis thaliana
  peptide (1)..(619): Ceres Seq. ID no. 1818574
MLNGTEAERNVRWVVMGDDDTVFFTENLVRVLRKYDHKQFYYIGAPSESHLQNLHQFSYGMAYGGGGFAISYPLAKVLEKMQDRCIERYSDLYGSDDRIHACMAELGVPLTKEVGFHQFDVYGNLLGLLSVHPQAPIVSIHHLDVVDPIFPKTNRVNALKKLMIPAKLDSASLVQQSVCYDKSHQWTMSISWGYTVQITRTYMPARMMEVPTRTFNDWHLRSDFTNLAFNTRPVTWTDCQRPRVFYFSHAFSNSSSSDTTTISQYLRHDEWYPKCEWGIADPSEINQIFVYKKPTPDRWSKVVIRFVPSKDSNFAFVNAIEVISAPKDLIGDVATSVSHDGTEKFNGLAKQAMEVVYRVNVGGRKVTPFNDTLWRTWVTDEGFLKTGDGSSEKSYFTGRIKYRRGGASREVGPDNVYNTARVGKRSNGLVDMSWGFKVNVGYKYLIRMHFCDIASKSLGRLYFNVYINGNLAYEDFDISYAADNVLASPYYIDFVVDATADDNNPSGSSITVSVGPSNKTSVDGNGVDAILNGVEIMKMNNSMGSLDGYVSTEMILSTCPNRRNLSIFIAMLAFMCIFMSFYIVTQRKRVKDQYGWTKLSMDVLEDNSKSGNQFTARKA

SEQ ID NO: 69558 - DNA, 1242 bp, Arabidopsis thaliana
  misc_feature (1)..(1242): Ceres Seq. ID no. 1818595
  misc_feature (1)..(1242): Ortholog of  Ceres SEQ ID NO 13594317 as cited in SEQ ID NO 57796
atggacagtgtaattaggtttaggaacagtatcaagatcaacagatctcgtgcttactacaaatcagaggagtcagatatcacggaaggagttgtgccatcggctgatggctcagctgaagctattttagttgaaggaaatctacagaacgcatctccatggtggcagcagtttcctagacgctgggtgatcgtcttgttatgcttttcgtcttttcttctttgcaatatggaccgtgtgaacatgagcattgcaattcttcccatgtcacaagaatataactggagtagtgcaactgttggcttaattcagtcctctttcttctggggctatttacttactcagattctgggaggtatatgggcagataagtttggcgggaagggtgttgcaatgcctgctatgaacaacatgctttctaaatggatccctgtctcagagagaagcagatcgcttgcactggtctatagtggcatgtatcttggttccgtcacaggattggcattctctcctatgctaatcaccaagttcggatggccatctgttttctactcgtttggctccctcggaagtatatggtttttgctatggctaaaatttgcatatagctctcccaaggatgacccggacctaagtgaagaagaaaaaaaggttatactgggaggtagcaaaccaagggaacctgttacagtgattccatggaagctaatactgtctaaacccccagtctgggctctcataatttcccacttctgccataattggggaactttcatactattgacatggatgcccacatattacaatcaggcacggagttcagcttcagttatatccttactgtttaatattttttgtgaacaagtcttgaagttcaacctcactgaatccgggctactatgcgttttgccatggctaaccatggctgtttttgctaatattggaggttggattgctgatactcttgtgagcagaggtctttcaattacaaacggctctgatgcattctctcagtcgggtctctactctaatcatcaagacattggcccacgatacgctggtgtactcttaggactatcaaacacagcaggagtcctagctggtgtctttggcactgcagctactggttacatcctccaacgaggttcatgggatgatgtgttcaaagtagcagttgcactgtatctaattggaactctggtctggaacttgttcgcaaccggagaaaaaattctcgactag

SEQ ID NO: 69559 - protein, 413 aa, Arabidopsis thaliana; identical to SEQ ID NO: 46014
  peptide (1)..(413): Ceres Seq. ID no. 1818596

SEQ ID NO: 69560 - protein, 337 aa, Arabidopsis thaliana
  peptide (1)..(337): Ceres Seq. ID no. 1818597
MDRVNMSIAILPMSQEYNWSSATVGLIQSSFFWGYLLTQILGGIWADKFGGKGVAMPAMNNMLSKWIPVSERSRSLALVYSGMYLGSVTGLAFSPMLITKFGWPSVFYSFGSLGSIWFLLWLKFAYSSPKDDPDLSEEEKKVILGGSKPREPVTVIPWKLILSKPPVWALIISHFCHNWGTFILLTWMPTYYNQARSSASVISLLFNIFCEQVLKFNLTESGLLCVLPWLTMAVFANIGGWIADTLVSRGLSITNGSDAFSQSGLYSNHQDIGPRYAGVLLGLSNTAGVLAGVFGTAATGYILQRGSWDDVFKVAVALYLIGTLVWNLFATGEKILD

SEQ ID NO: 69561 - protein, 332 aa, Arabidopsis thaliana
  peptide (1)..(332): Ceres Seq. ID no. 1818598
MSIAILPMSQEYNWSSATVGLIQSSFFWGYLLTQILGGIWADKFGGKGVAMPAMNNMLSKWIPVSERSRSLALVYSGMYLGSVTGLAFSPMLITKFGWPSVFYSFGSLGSIWFLLWLKFAYSSPKDDPDLSEEEKKVILGGSKPREPVTVIPWKLILSKPPVWALIISHFCHNWGTFILLTWMPTYYNQARSSASVISLLFNIFCEQVLKFNLTESGLLCVLPWLTMAVFANIGGWIADTLVSRGLSITNGSDAFSQSGLYSNHQDIGPRYAGVLLGLSNTAGVLAGVFGTAATGYILQRGSWDDVFKVAVALYLIGTLVWNLFATGEKILD

SEQ ID NO: 69562 - DNA, 2481 bp, Arabidopsis thaliana
  misc_feature (1)..(2481): Ceres Seq. ID no. 1818829
  misc_feature (1)..(2481): Ortholog of  Ceres SEQ ID NO 14307018 as cited in SEQ ID NO 59674
atggaggaaattgaagaaggaagcagcaacaacagcataagacgtgttggtaccggaagtagtgaccggagatgggttgatggaagcgaggtagactctgaaacgccgctgttttcagaaatcagagatagagactatagttttgggaatttgaggagaagattaatgaaaaaacccaaaagagctgattctcttgatgttgaagctatggaaattgcaggttctcatggtcacaatctcaaggatttgtcacttttgactacacttggaatagcgtttcagacgttaggtgttgtgtatggtgatatgggaacaagtcctttgtatgtgttcagtgatgtgtttagtaaagttcctataagatcagaagttgatgttcttggagctttgtctctcgttatctacactattgctgtgattcctttggcaaagtatgtatttgtagtccttaaagctaacgacaatggcgaaggtaatgcttccgcaccgatgtgtttagtaaagtatgcaaaggtgaataagctgccaaatcaacaacctgcggatgagcagatctcgagttttaggcttaaactcccaactcctgagctggaaagagctctggggattaaagaagctttggagacaaaagggtatttgaaaactcttcttttgcttttagtcctaatgggaacttccatgattattggcgatggaattctaacaccagctatgtcagtgatgtctgcaatgagtggtctacaaggtgaagttaaaggatttggaacaaatgcattggttatgtcttcgattgtgattctcgtggctttgttcagcatacaacggtttgggacgggtaaagttggttttctatttgctccagttctggcgctctggttcttctctcttggtgctattggaatctataatctgttgaagtatgacttcactgtcataagagcactaaacccgttttatatcgttttgttcttcaacaagaatagcaaacaggcttggtctgctcttggtggatgtgtcttatgcataacaggagctgaagcaatgtttgcagatttaggacatttctcagttcgttctatacagatggcatttacttgcgtggtgttcccatgccttctcttagcttacatgggtcaagctgcttatctaacaaagcatcccgaggcctcagctcgcatattctatgattcagttccaaagagtttgttctggccggtgtttgtgattgcaacattagctgctatgatagctagccaagccatgatctccgcgactttctcatgcgtcaaacaagccatggctctcggttgctttccaaggctgaagataatccacacttctaagaaacggataggtcaaatctatataccagttatcaactggttcttgatgatcatgtgcattcttgtcgtctccatcttcagaagcacaacccacattgccaatgcttacggcatagcagaggtaggtgtaatgatggttagcacagttttggtaactctagtgatgcttcttatttggcaaaccaatatatttctcgccctttgctttccccttatatttggatcagtggagaccatttacttgctagctgttctcaccaagatattggaaggcggttgggttccgctagtattcgccactttcttcctcactgtaatgtacatttggaactacggaagtgtactcaagtaccaaagcgaggtcagggaaagaatctccatggattttatgcgtgagctcggttcaactcttgggaccattcgaatccctgggattggactcctttataacgagcttgtccaaggtataccttccatttttggacagttcttgctcactcttcctgcgattcactcaacaatcatctttgtctgcatcaaatatgttcctgtcccggttgttcctcaagaagagaggttcctcttcagacgggtttgtcctaaggactaccatatgttcaggtgcattgcgaggtatggttacaaagatgtcagaaaagaagattctagagtctttgaacagcttcttattgaaagtctagagaagttcttgagatgtgaagcattagaggatgctctagagagcactctgaatgattttgatcccgatagagtttccgttgcaagtgatacttacacggacgacctcatggctcctctcatccaccgtgcaaagcgttctgagccagagcaagagttggattcagaggttttgccatcttcaagcgtagggtcgtctatggaggaagatccagctctggaatatgaacttgcggctttgagagaagccacagactcggggctaacgtatttactggctcatggagatgtaagggcgaagaagaattcgattttcgtgaagaagcttgtgattaattacttctatgcgtttctaaggagaaattgcagagctggagctgcgaatctcactgttcctcatatgaacatcttgcaagctgggatgacttatatggtctag

SEQ ID NO: 69563 - protein, 826 aa, Arabidopsis thaliana
  peptide (1)..(826): Ceres Seq. ID no. 1818830
MEEIEEGSSNNSIRRVGTGSSDRRWVDGSEVDSETPLFSEIRDRDYSFGNLRRRLMKKPKRADSLDVEAMEIAGSHGHNLKDLSLLTTLGIAFQTLGVVYGDMGTSPLYVFSDVFSKVPIRSEVDVLGALSLVIYTIAVIPLAKYVFVVLKANDNGEGNASAPMCLVKYAKVNKLPNQQPADEQISSFRLKLPTPELERALGIKEALETKGYLKTLLLLLVLMGTSMIIGDGILTPAMSVMSAMSGLQGEVKGFGTNALVMSSIVILVALFSIQRFGTGKVGFLFAPVLALWFFSLGAIGIYNLLKYDFTVIRALNPFYIVLFFNKNSKQAWSALGGCVLCITGAEAMFADLGHFSVRSIQMAFTCVVFPCLLLAYMGQAAYLTKHPEASARIFYDSVPKSLFWPVFVIATLAAMIASQAMISATFSCVKQAMALGCFPRLKIIHTSKKRIGQIYIPVINWFLMIMCILVVSIFRSTTHIANAYGIAEVGVMMVSTVLVTLVMLLIWQTNIFLALCFPLIFGSVETIYLLAVLTKILEGGWVPLVFATFFLTVMYIWNYGSVLKYQSEVRERISMDFMRELGSTLGTIRIPGIGLLYNELVQGIPSIFGQFLLTLPAIHSTIIFVCIKYVPVPVVPQEERFLFRRVCPKDYHMFRCIARYGYKDVRKEDSRVFEQLLIESLEKFLRCEALEDALESTLNDFDPDRVSVASDTYTDDLMAPLIHRAKRSEPEQELDSEVLPSSSVGSSMEEDPALEYELAALREATDSGLTYLLAHGDVRAKKNSIFVKKLVINYFYAFLRRNCRAGAANLTVPHMNILQAGMTYMV

SEQ ID NO: 69564 - protein, 771 aa, Arabidopsis thaliana
  peptide (1)..(771): Ceres Seq. ID no. 1818831
MKKPKRADSLDVEAMEIAGSHGHNLKDLSLLTTLGIAFQTLGVVYGDMGTSPLYVFSDVFSKVPIRSEVDVLGALSLVIYTIAVIPLAKYVFVVLKANDNGEGNASAPMCLVKYAKVNKLPNQQPADEQISSFRLKLPTPELERALGIKEALETKGYLKTLLLLLVLMGTSMIIGDGILTPAMSVMSAMSGLQGEVKGFGTNALVMSSIVILVALFSIQRFGTGKVGFLFAPVLALWFFSLGAIGIYNLLKYDFTVIRALNPFYIVLFFNKNSKQAWSALGGCVLCITGAEAMFADLGHFSVRSIQMAFTCVVFPCLLLAYMGQAAYLTKHPEASARIFYDSVPKSLFWPVFVIATLAAMIASQAMISATFSCVKQAMALGCFPRLKIIHTSKKRIGQIYIPVINWFLMIMCILVVSIFRSTTHIANAYGIAEVGVMMVSTVLVTLVMLLIWQTNIFLALCFPLIFGSVETIYLLAVLTKILEGGWVPLVFATFFLTVMYIWNYGSVLKYQSEVRERISMDFMRELGSTLGTIRIPGIGLLYNELVQGIPSIFGQFLLTLPAIHSTIIFVCIKYVPVPVVPQEERFLFRRVCPKDYHMFRCIARYGYKDVRKEDSRVFEQLLIESLEKFLRCEALEDALESTLNDFDPDRVSVASDTYTDDLMAPLIHRAKRSEPEQELDSEVLPSSSVGSSMEEDPALEYELAALREATDSGLTYLLAHGDVRAKKNSIFVKKLVINYFYAFLRRNCRAGAANLTVPHMNILQAGMTYMV

SEQ ID NO: 69565 - protein, 757 aa, Arabidopsis thaliana
  peptide (1)..(757): Ceres Seq. ID no. 1818832
MEIAGSHGHNLKDLSLLTTLGIAFQTLGVVYGDMGTSPLYVFSDVFSKVPIRSEVDVLGALSLVIYTIAVIPLAKYVFVVLKANDNGEGNASAPMCLVKYAKVNKLPNQQPADEQISSFRLKLPTPELERALGIKEALETKGYLKTLLLLLVLMGTSMIIGDGILTPAMSVMSAMSGLQGEVKGFGTNALVMSSIVILVALFSIQRFGTGKVGFLFAPVLALWFFSLGAIGIYNLLKYDFTVIRALNPFYIVLFFNKNSKQAWSALGGCVLCITGAEAMFADLGHFSVRSIQMAFTCVVFPCLLLAYMGQAAYLTKHPEASARIFYDSVPKSLFWPVFVIATLAAMIASQAMISATFSCVKQAMALGCFPRLKIIHTSKKRIGQIYIPVINWFLMIMCILVVSIFRSTTHIANAYGIAEVGVMMVSTVLVTLVMLLIWQTNIFLALCFPLIFGSVETIYLLAVLTKILEGGWVPLVFATFFLTVMYIWNYGSVLKYQSEVRERISMDFMRELGSTLGTIRIPGIGLLYNELVQGIPSIFGQFLLTLPAIHSTIIFVCIKYVPVPVVPQEERFLFRRVCPKDYHMFRCIARYGYKDVRKEDSRVFEQLLIESLEKFLRCEALEDALESTLNDFDPDRVSVASDTYTDDLMAPLIHRAKRSEPEQELDSEVLPSSSVGSSMEEDPALEYELAALREATDSGLTYLLAHGDVRAKKNSIFVKKLVINYFYAFLRRNCRAGAANLTVPHMNILQAGMTYMV

SEQ ID NO: 69566 - DNA, 1035 bp, Arabidopsis thaliana
  misc_feature (1)..(1035): Ceres Seq. ID no. 1819036
  misc_feature (1)..(1035): Ortholog of  Ceres SEQ ID NO 12336358 as cited in SEQ ID NO 20733
  misc_feature (1)..(1035): Ortholog of  Ceres SEQ ID NO 12623467 as cited in SEQ ID NO 60951
  misc_feature (1)..(1035): Ortholog of  Ceres SEQ ID NO 14309133 as cited in SEQ ID NO 0
atggtgatgatgaagaagcttttgtcgaaccgtttgttcaatatgtcaaaaacggcgtcgcaaagtctcatgaactgtcgtacttcgtcttcttcttcgttagccatgcgaactagggttcctaaagatataggagaagccacgattgatccagagcctggagatttgacgatttctcagaggtttttgaataaattctccatgaatgggattgatacgacttcgaagatgtctattggggagagtctgatggagaagcttaaagaaatggatatgaacaaggatcggattcgattagacggactttctcatccgaaggaggagacgttagggcttactgtgcaagacgtgaagaagttgctaagagcagcagagatcgaagttattaaaacgaagctgatggagacaggaaaaatctggattcgttactcagatttcttaggtgtttgtagtgattcttctttggatccttctcaaggagctttgatcgctaagatgcttgatgattcaggaaacgttatcgttatgggaaactctgtttgtttaagacctcatcaggtcttgtgtgttgatcagttaaccaaatccatagaggggcttcttcctttatcacaaatccataacccgaatgacccaagaagaaaggagctaaatgagcttgaagctataaagacggtcattgaccaaaaagcacattctttggtgagaagagagctttgggctggtttgggttacttgatcatccaaaccgcagggtttatgaggctaacgttttgggacctgacatgggatgttatggaaccgatctgtttctatgtctcatcggtatatttcatggcgggttacacatttttcctcaagacatcgagagagccttcctttcaaggtttttaccaaagcaggtttgaggctaaacaaaggaaactgatgcaatctgaggattttgatgttgggaggtatgatgagctgaaaaagctgtttaatcccaagccttcaggtgctgttcccaagattcttggatctctacagaattga

SEQ ID NO: 69567 - protein, 344 aa, Arabidopsis thaliana
  peptide (1)..(344): Ceres Seq. ID no. 1819037
MVMMKKLLSNRLFNMSKTASQSLMNCRTSSSSSLAMRTRVPKDIGEATIDPEPGDLTISQRFLNKFSMNGIDTTSKMSIGESLMEKLKEMDMNKDRIRLDGLSHPKEETLGLTVQDVKKLLRAAEIEVIKTKLMETGKIWIRYSDFLGVCSDSSLDPSQGALIAKMLDDSGNVIVMGNSVCLRPHQVLCVDQLTKSIEGLLPLSQIHNPNDPRRKELNELEAIKTVIDQKAHSLVRRELWAGLGYLIIQTAGFMRLTFWDLTWDVMEPICFYVSSVYFMAGYTFFLKTSREPSFQGFYQSRFEAKQRKLMQSEDFDVGRYDELKKLFNPKPSGAVPKILGSLQN

SEQ ID NO: 69568 - protein, 342 aa, Arabidopsis thaliana
  peptide (1)..(342): Ceres Seq. ID no. 1819038
MMKKLLSNRLFNMSKTASQSLMNCRTSSSSSLAMRTRVPKDIGEATIDPEPGDLTISQRFLNKFSMNGIDTTSKMSIGESLMEKLKEMDMNKDRIRLDGLSHPKEETLGLTVQDVKKLLRAAEIEVIKTKLMETGKIWIRYSDFLGVCSDSSLDPSQGALIAKMLDDSGNVIVMGNSVCLRPHQVLCVDQLTKSIEGLLPLSQIHNPNDPRRKELNELEAIKTVIDQKAHSLVRRELWAGLGYLIIQTAGFMRLTFWDLTWDVMEPICFYVSSVYFMAGYTFFLKTSREPSFQGFYQSRFEAKQRKLMQSEDFDVGRYDELKKLFNPKPSGAVPKILGSLQN

SEQ ID NO: 69569 - protein, 341 aa, Arabidopsis thaliana
  peptide (1)..(341): Ceres Seq. ID no. 1819039
MKKLLSNRLFNMSKTASQSLMNCRTSSSSSLAMRTRVPKDIGEATIDPEPGDLTISQRFLNKFSMNGIDTTSKMSIGESLMEKLKEMDMNKDRIRLDGLSHPKEETLGLTVQDVKKLLRAAEIEVIKTKLMETGKIWIRYSDFLGVCSDSSLDPSQGALIAKMLDDSGNVIVMGNSVCLRPHQVLCVDQLTKSIEGLLPLSQIHNPNDPRRKELNELEAIKTVIDQKAHSLVRRELWAGLGYLIIQTAGFMRLTFWDLTWDVMEPICFYVSSVYFMAGYTFFLKTSREPSFQGFYQSRFEAKQRKLMQSEDFDVGRYDELKKLFNPKPSGAVPKILGSLQN

SEQ ID NO: 69570 - DNA, 1212 bp, Arabidopsis thaliana
  misc_feature (1)..(1212): Ceres Seq. ID no. 1819132
  misc_feature (1)..(1212): Ortholog of  Ceres SEQ ID NO 15179287 as cited in SEQ ID NO 0
atggaagaaaagctgccaaaatcgctcaagaatctcgatttgaatacgaatcgtggtcgtggaccagagaataagattcttgtttcagcttatgtatcttcgtcacgtaagcctcgctttcgacaatctttcttttctcgagctcggttaaaattgggttctgagaatggattactgaatttgggtctaagcatggctggtggaatgtctccactgaaatcaaaacctccatctcttgtgagctcatgtcttggtgttattgggaagcatttggaggatatgattcgttgtttagctgaaatctctgttatatttcctgcagacatcaagatgtcgattgcagcaattgctagaagaaaaaagctgctggatgatgatgtgattatctgtttggctgacagttcctgggaaattctagatgttagcggttcagatgttacgaattttggcttagctaaagtggcagaaatctgcaaatctctccgagctgtggacattaggtattatagttgcttgctaagaatttactctggtcttgctggttctttagtttggggcttctgtatgttggataagtggtgctcccggtgcaacaaaatctcatccatgggcgtcttagagcttgtacaacactgcagatcattggagactcttagatgcgggggatgcccaagcagtgagtccacggcacgcagatctttgagtatttttaagccaaacttgagtaatgttgaaggagaaacatgggaagaaatagacacttcagagattggccatggtggtcaatcattgcgttggcttgtttggccacgaattgataaggattcactggagatgttatcctcggagtgtccaagaatagtggtaaatcccaagccatcacttgtcgcgtacagagcagacgaggttcctcgagaagcactaccagatgttgcactggacgaaccatttgtcaaagatattgatcctaagacgtgggttgttactggagttgtgcagaagcccacatctttcccgttaagcaatgaactgtcaatagcagagaagttcagactagcatttgcagagagagatgcaagaatggcccctaaacgtgcaaagaatgcaaggcaacgtcaacgtcgtgctgagagggattggatgatgtcaagcgacgaagccaaagcaatggtttttgcatcaaaggctaccagatctttgcacaagagttaa

SEQ ID NO: 69571 - protein, 403 aa, Arabidopsis thaliana
  peptide (1)..(403): Ceres Seq. ID no. 1819133
MEEKLPKSLKNLDLNTNRGRGPENKILVSAYVSSSRKPRFRQSFFSRARLKLGSENGLLNLGLSMAGGMSPLKSKPPSLVSSCLGVIGKHLEDMIRCLAEISVIFPADIKMSIAAIARRKKLLDDDVIICLADSSWEILDVSGSDVTNFGLAKVAEICKSLRAVDIRYYSCLLRIYSGLAGSLVWGFCMLDKWCSRCNKISSMGVLELVQHCRSLETLRCGGCPSSESTARRSLSIFKPNLSNVEGETWEEIDTSEIGHGGQSLRWLVWPRIDKDSLEMLSSECPRIVVNPKPSLVAYRADEVPREALPDVALDEPFVKDIDPKTWVVTGVVQKPTSFPLSNELSIAEKFRLAFAERDARMAPKRAKNARQRQRRAERDWMMSSDEAKAMVFASKATRSLHKS

SEQ ID NO: 69572 - protein, 339 aa, Arabidopsis thaliana
  peptide (1)..(339): Ceres Seq. ID no. 1819134
MAGGMSPLKSKPPSLVSSCLGVIGKHLEDMIRCLAEISVIFPADIKMSIAAIARRKKLLDDDVIICLADSSWEILDVSGSDVTNFGLAKVAEICKSLRAVDIRYYSCLLRIYSGLAGSLVWGFCMLDKWCSRCNKISSMGVLELVQHCRSLETLRCGGCPSSESTARRSLSIFKPNLSNVEGETWEEIDTSEIGHGGQSLRWLVWPRIDKDSLEMLSSECPRIVVNPKPSLVAYRADEVPREALPDVALDEPFVKDIDPKTWVVTGVVQKPTSFPLSNELSIAEKFRLAFAERDARMAPKRAKNARQRQRRAERDWMMSSDEAKAMVFASKATRSLHKS

SEQ ID NO: 69573 - protein, 335 aa, Arabidopsis thaliana
  peptide (1)..(335): Ceres Seq. ID no. 1819135
MSPLKSKPPSLVSSCLGVIGKHLEDMIRCLAEISVIFPADIKMSIAAIARRKKLLDDDVIICLADSSWEILDVSGSDVTNFGLAKVAEICKSLRAVDIRYYSCLLRIYSGLAGSLVWGFCMLDKWCSRCNKISSMGVLELVQHCRSLETLRCGGCPSSESTARRSLSIFKPNLSNVEGETWEEIDTSEIGHGGQSLRWLVWPRIDKDSLEMLSSECPRIVVNPKPSLVAYRADEVPREALPDVALDEPFVKDIDPKTWVVTGVVQKPTSFPLSNELSIAEKFRLAFAERDARMAPKRAKNARQRQRRAERDWMMSSDEAKAMVFASKATRSLHKS

SEQ ID NO: 69574 - DNA, 1317 bp, Arabidopsis thaliana
  misc_feature (1)..(1317): Ceres Seq. ID no. 1819204
  misc_feature (1)..(1317): Ortholog of  Ceres SEQ ID NO 14313897 as cited in SEQ ID NO 59695
  misc_feature (1)..(1317): Ortholog of  Ceres SEQ ID NO 13660049 as cited in SEQ ID NO 67010
atgaatactaataaccagagagataaccattatcccaacattcctaattcaccaagggattacaattatactcctagctctccaacagctcgcattcgacaccgcaggcgatcaagcgaggtgaacagaagcaatgtaagcagagtaagcaatttgttacttggtgataagaacaagtacagatcaatgtggataaggacatgctcatctctctggatgctcggtggagttgtgtttataatctacatgggtcatctctacatttgggctatggttgtggttatacagatattcatggccaaagagctcttctttcttcgcagaagagctcatgaagaacgtcgcttacccggtttctggctcttgaattggcacttcttcttcacggctatgttgtttgtctatggacgcatcattcaacagcagctagtcaacacggtttcttcagatagattcatatacaagcttgtgagtggtcttatcaagtaccagatggttatttgctacttcttgtacatcgcaggtctcatatggtttatccttacattgaagaataagatgtataagtatcagtttgggcaatacgcttggacacatatgatccttatcgttgtctttactcaatcttctttcaccgtcgccaatatttttgaagggatcttctggtttcttctaccagcagcactgattgctatgaacgatgtagcagcttacttcttcggtttctatttcgggaaaactccgctcatcaagttgtctccaaagaaaacatgggaaggtttcatcggagcatcagttgcaactataatctctgcatttatttttgctaatgtcttaggccagttccaatggcttacatgtccaaggaaggatttttcaactggttggcttcattgtgatccaggccctctcttcaggccagagtattacccatttccctcttggattactccattttctccatggaaagggatctcgaccctgcctgtccaatggcatgctttttctctcggtctattcgcatccattatggcgccttttggtggcttcttcgcaagcggtttcaaaagagctttcaagatcaaggatttcggagacagcataccaggacatggaggatttactgacagaatggattgccaaatggttatggcggttttcgcatacatctacatccaatctttcattgttaatcgggactacagtgtcgagatgatcctagaccagatatcgaggagcctgggacacgaggagcagaaaatgctttatgaaaagctcggagacattcttcaacataagttgcaagggaggttttaa

SEQ ID NO: 69575 - protein, 438 aa, Arabidopsis thaliana
  peptide (1)..(438): Ceres Seq. ID no. 1819205
MNTNNQRDNHYPNIPNSPRDYNYTPSSPTARIRHRRRSSEVNRSNVSRVSNLLLGDKNKYRSMWIRTCSSLWMLGGVVFIIYMGHLYIWAMVVVIQIFMAKELFFLRRRAHEERRLPGFWLLNWHFFFTAMLFVYGRIIQQQLVNTVSSDRFIYKLVSGLIKYQMVICYFLYIAGLIWFILTLKNKMYKYQFGQYAWTHMILIVVFTQSSFTVANIFEGIFWFLLPAALIAMNDVAAYFFGFYFGKTPLIKLSPKKTWEGFIGASVATIISAFIFANVLGQFQWLTCPRKDFSTGWLHCDPGPLFRPEYYPFPSWITPFSPWKGISTLPVQWHAFSLGLFASIMAPFGGFFASGFKRAFKIKDFGDSIPGHGGFTDRMDCQMVMAVFAYIYIQSFIVNRDYSVEMILDQISRSLGHEEQKMLYEKLGDILQHKLQGRF

SEQ ID NO: 69576 - protein, 376 aa, Arabidopsis thaliana
  peptide (1)..(376): Ceres Seq. ID no. 1819206
MWIRTCSSLWMLGGVVFIIYMGHLYIWAMVVVIQIFMAKELFFLRRRAHEERRLPGFWLLNWHFFFTAMLFVYGRIIQQQLVNTVSSDRFIYKLVSGLIKYQMVICYFLYIAGLIWFILTLKNKMYKYQFGQYAWTHMILIVVFTQSSFTVANIFEGIFWFLLPAALIAMNDVAAYFFGFYFGKTPLIKLSPKKTWEGFIGASVATIISAFIFANVLGQFQWLTCPRKDFSTGWLHCDPGPLFRPEYYPFPSWITPFSPWKGISTLPVQWHAFSLGLFASIMAPFGGFFASGFKRAFKIKDFGDSIPGHGGFTDRMDCQMVMAVFAYIYIQSFIVNRDYSVEMILDQISRSLGHEEQKMLYEKLGDILQHKLQGRF

SEQ ID NO: 69577 - protein, 366 aa, Arabidopsis thaliana
  peptide (1)..(366): Ceres Seq. ID no. 1819207
MLGGVVFIIYMGHLYIWAMVVVIQIFMAKELFFLRRRAHEERRLPGFWLLNWHFFFTAMLFVYGRIIQQQLVNTVSSDRFIYKLVSGLIKYQMVICYFLYIAGLIWFILTLKNKMYKYQFGQYAWTHMILIVVFTQSSFTVANIFEGIFWFLLPAALIAMNDVAAYFFGFYFGKTPLIKLSPKKTWEGFIGASVATIISAFIFANVLGQFQWLTCPRKDFSTGWLHCDPGPLFRPEYYPFPSWITPFSPWKGISTLPVQWHAFSLGLFASIMAPFGGFFASGFKRAFKIKDFGDSIPGHGGFTDRMDCQMVMAVFAYIYIQSFIVNRDYSVEMILDQISRSLGHEEQKMLYEKLGDILQHKLQGRF

SEQ ID NO: 69578 - DNA, 1095 bp, Arabidopsis thaliana
  misc_feature (1)..(1095): Ceres Seq. ID no. 1819255
  misc_feature (1)..(1095): Ortholog of  Ceres SEQ ID NO 15171681 as cited in SEQ ID NO 57645
atgaggaataatcctgtccttccggtttccgatcctcccctcgccggtgagaatgatagcgatggtaaaggtgtcgatgatcggcttttcaaaggatctgccatgaccaaacgtggagcttatgctgctctttcttacatggcttgtgctggtaatttcctcgatttcacttgtatcattgattcgaatcacgtgttttggagtagagtccagttctggaagatcatctctttcacagctgctgattctttttctattgatagtgcctcaacctttgtgccagtgaagacattgtttcacacccttcctctagcaatagcatatcttttgtacatggttgtattactctgctcgtgcgtgctggctttcgtcttaaactactgcattttccttaacaccactctcaattcagctttgacgcagacaatttgtggcaatatgaaggatctattcacggttggactaggctggatgctctttggaggactcccattcgacctgatgaatgtgattggacagctttttggtttcttcggcccgggaaaatcaaattttctcaataatcaatctatggacgttccaccacgccgctctttggctgcgtctctctcgcctctccggctaatcgatggactccctcgtcggaggagtttcaattataatcagatgcctgaagagcccatcaaactcactgttctcaagcttgatggatcttcctttggtattcaagtgttgaagacagcgacagtaggggagctcaagatggcagtagaagctgcgttttctcacttgcccatctcaggccctggcaagatctcatggttctcaaccacaccggaaacccggaaaaagaacgtaataagggaagttgaagaagacggtgttgttgactccatccctcggagccaaccaagctttctagcaactgtattgggaggtttgctctcttacaagtcgacgccaagtcaacgaggtactaaatacagaaacgtgactgcaagtagagtttttaacaaactcattgcaaggtttcgtttcaagtgtaattccgagaaggatgtgtggaacagaaaaaaactcatatccgaaacctaa

SEQ ID NO: 69579 - protein, 364 aa, Arabidopsis thaliana
  peptide (1)..(364): Ceres Seq. ID no. 1819256
MRNNPVLPVSDPPLAGENDSDGKGVDDRLFKGSAMTKRGAYAALSYMACAGNFLDFTCIIDSNHVFWSRVQFWKIISFTAADSFSIDSASTFVPVKTLFHTLPLAIAYLLYMVVLLCSCVLAFVLNYCIFLNTTLNSALTQTICGNMKDLFTVGLGWMLFGGLPFDLMNVIGQLFGFFGPGKSNFLNNQSMDVPPRRSLAASLSPLRLIDGLPRRRSFNYNQMPEEPIKLTVLKLDGSSFGIQVLKTATVGELKMAVEAAFSHLPISGPGKISWFSTTPETRKKNVIREVEEDGVVDSIPRSQPSFLATVLGGLLSYKSTPSQRGTKYRNVTASRVFNKLIARFRFKCNSEKDVWNRKKLISET

SEQ ID NO: 69580 - protein, 330 aa, Arabidopsis thaliana
  peptide (1)..(330): Ceres Seq. ID no. 1819257
MTKRGAYAALSYMACAGNFLDFTCIIDSNHVFWSRVQFWKIISFTAADSFSIDSASTFVPVKTLFHTLPLAIAYLLYMVVLLCSCVLAFVLNYCIFLNTTLNSALTQTICGNMKDLFTVGLGWMLFGGLPFDLMNVIGQLFGFFGPGKSNFLNNQSMDVPPRRSLAASLSPLRLIDGLPRRRSFNYNQMPEEPIKLTVLKLDGSSFGIQVLKTATVGELKMAVEAAFSHLPISGPGKISWFSTTPETRKKNVIREVEEDGVVDSIPRSQPSFLATVLGGLLSYKSTPSQRGTKYRNVTASRVFNKLIARFRFKCNSEKDVWNRKKLISET

SEQ ID NO: 69581 - protein, 318 aa, Arabidopsis thaliana
  peptide (1)..(318): Ceres Seq. ID no. 1819258
MACAGNFLDFTCIIDSNHVFWSRVQFWKIISFTAADSFSIDSASTFVPVKTLFHTLPLAIAYLLYMVVLLCSCVLAFVLNYCIFLNTTLNSALTQTICGNMKDLFTVGLGWMLFGGLPFDLMNVIGQLFGFFGPGKSNFLNNQSMDVPPRRSLAASLSPLRLIDGLPRRRSFNYNQMPEEPIKLTVLKLDGSSFGIQVLKTATVGELKMAVEAAFSHLPISGPGKISWFSTTPETRKKNVIREVEEDGVVDSIPRSQPSFLATVLGGLLSYKSTPSQRGTKYRNVTASRVFNKLIARFRFKCNSEKDVWNRKKLISET

SEQ ID NO: 69582 - DNA, 1140 bp, Arabidopsis thaliana
  misc_feature (1)..(1140): Ceres Seq. ID no. 1819289
  misc_feature (1)..(1140): Ortholog of  Ceres SEQ ID NO 13584744 as cited in SEQ ID NO 69137
atgggaaagattcttcatcttcttcttcttcttcttaaggtctctgttcttgaattcatcattagtgtttctgcttttacttcacctgcttcacagccttctctttctcctgtttacacttccatggcttccttttctccagggatccacatgggcaaaggccaagaacacaagttagatgcacacaagaaacttctaatcgctctcataatcacctcatcttctctaggactaatacttgtatcttgtttatgcttttgggtttattggtctaagaaatctcccaaaaacaccaagaactcaggtaataatcatcttaacattaagaatgagaacaaatctgcaaaactttacatttgtaacaagattctgtatcagtttcttcattgtgatctctctgttttgatatctaaatggtttcatgcggaagaaggtgagagtaggatttcattatccaagaagggctttgtgcagtccttcgattacaagacactagagaaagcaacaggcggtttcaaagacggtaatcttataggacgaggcgggttcggagatgtttacaaggcctgtttaggcaacaacactctagcagcagtcaaaaagatcgaaaacgttagtcaagaagcaaaacgagaatttcaggtaccaaaacaaaacacaactgttgagtatctccacgagcgttgtcgtcctccggttatccacagagatcttaaatcgtcaaatattctccttgattcttccttcaacgccaagatttcggattttggtcttgcggtaatggtgggggctcacggcaaaaacaacattaaactatcaggaacacttggttatgttgctccagaatatctcctagatggaaaattgacggataagagtgatgtttatgcgtttggtgtggttttacttgaactcttgttaggaagacggccggttgagaaattgagttcggttcagtgtcaatctcttgtcacttggatagcattggttaatgagtgtaccgtttcgaaaaatttgcaggcaatgccccaacttacggatagatcaaagcttccgaaaatcgtggatccggttatcaaagatacaatggatcataagcacttataccaggtttgcgtcatcttttgtctttgtgtttag

SEQ ID NO: 69583 - protein, 379 aa, Arabidopsis thaliana
  peptide (1)..(379): Ceres Seq. ID no. 1819290
MGKILHLLLLLLKVSVLEFIISVSAFTSPASQPSLSPVYTSMASFSPGIHMGKGQEHKLDAHKKLLIALIITSSSLGLILVSCLCFWVYWSKKSPKNTKNSGNNHLNIKNENKSAKLYICNKILYQFLHCDLSVLISKWFHAEEGESRISLSKKGFVQSFDYKTLEKATGGFKDGNLIGRGGFGDVYKACLGNNTLAAVKKIENVSQEAKREFQVPKQNTTVEYLHERCRPPVIHRDLKSSNILLDSSFNAKISDFGLAVMVGAHGKNNIKLSGTLGYVAPEYLLDGKLTDKSDVYAFGVVLLELLLGRRPVEKLSSVQCQSLVTWIALVNECTVSKNLQAMPQLTDRSKLPKIVDPVIKDTMDHKHLYQVCVIFCLCV

SEQ ID NO: 69584 - protein, 338 aa, Arabidopsis thaliana
  peptide (1)..(338): Ceres Seq. ID no. 1819291
MASFSPGIHMGKGQEHKLDAHKKLLIALIITSSSLGLILVSCLCFWVYWSKKSPKNTKNSGNNHLNIKNENKSAKLYICNKILYQFLHCDLSVLISKWFHAEEGESRISLSKKGFVQSFDYKTLEKATGGFKDGNLIGRGGFGDVYKACLGNNTLAAVKKIENVSQEAKREFQVPKQNTTVEYLHERCRPPVIHRDLKSSNILLDSSFNAKISDFGLAVMVGAHGKNNIKLSGTLGYVAPEYLLDGKLTDKSDVYAFGVVLLELLLGRRPVEKLSSVQCQSLVTWIALVNECTVSKNLQAMPQLTDRSKLPKIVDPVIKDTMDHKHLYQVCVIFCLCV

SEQ ID NO: 69585 - protein, 329 aa, Arabidopsis thaliana
  peptide (1)..(329): Ceres Seq. ID no. 1819292
MGKGQEHKLDAHKKLLIALIITSSSLGLILVSCLCFWVYWSKKSPKNTKNSGNNHLNIKNENKSAKLYICNKILYQFLHCDLSVLISKWFHAEEGESRISLSKKGFVQSFDYKTLEKATGGFKDGNLIGRGGFGDVYKACLGNNTLAAVKKIENVSQEAKREFQVPKQNTTVEYLHERCRPPVIHRDLKSSNILLDSSFNAKISDFGLAVMVGAHGKNNIKLSGTLGYVAPEYLLDGKLTDKSDVYAFGVVLLELLLGRRPVEKLSSVQCQSLVTWIALVNECTVSKNLQAMPQLTDRSKLPKIVDPVIKDTMDHKHLYQVCVIFCLCV

SEQ ID NO: 69586 - DNA, 693 bp, Arabidopsis thaliana
  misc_feature (1)..(693): Ceres Seq. ID no. 1819360
  misc_feature (1)..(693): Ortholog of  Ceres SEQ ID NO 13599287 as cited in SEQ ID NO 338
  misc_feature (1)..(693): Ortholog of  Ceres SEQ ID NO 14314817 as cited in SEQ ID NO 52571
  misc_feature (1)..(693): Ortholog of  Ceres SEQ ID NO 15174056 as cited in SEQ ID NO 0
atggctttctcttacgcatcattctctacacccttcaatggtttcgctgcaaatccgtctccgattacttccgcttttctcggcccatcattgagattctccaccagaacatcaaaaactcggaatccgagtaatggggtttcagtgaaatcgtcaaatagtcataggtttctagtcaaatctaaaaatttcagtgtctatgcaagggctgcagcagagaagtctgttcacgatttcactgtaaaggacatcgatggtaatgatgtttctctggacaaattcaaaggaaaacctttgttgatcgttaacgttgcgtcaagatgtggtttgacatcatcaaattactcagagctttctcaactgtacgaaaaatacaagaaccaaggatttgagattcttgctttcccttgcaatcaatttggaggtcaagaacccggttcaaaccctgagatcaagcaatttgcttgcacccggttcaaagcagagttccctatattcgacaaggttgatgtgaatggaccaagcacagctccaatctacaagttcttgaaatccaatgctggtggtttccttggtgatatcatcaaatggaactttgagaaattcttggttgataaaaagggcaaagttgtcgagagataccctcccacaacttctcctttccaaatcgaggtaccaaattcaaaactctaa

SEQ ID NO: 69587 - protein, 230 aa, Arabidopsis thaliana
  peptide (1)..(230): Ceres Seq. ID no. 1819361
MAFSYASFSTPFNGFAANPSPITSAFLGPSLRFSTRTSKTRNPSNGVSVKSSNSHRFLVKSKNFSVYARAAAEKSVHDFTVKDIDGNDVSLDKFKGKPLLIVNVASRCGLTSSNYSELSQLYEKYKNQGFEILAFPCNQFGGQEPGSNPEIKQFACTRFKAEFPIFDKVDVNGPSTAPIYKFLKSNAGGFLGDIIKWNFEKFLVDKKGKVVERYPPTTSPFQIEVPNSKL

SEQ ID NO: 69588 - DNA, 1221 bp, Arabidopsis thaliana
  misc_feature (1)..(1221): Ceres Seq. ID no. 1819452
  misc_feature (1)..(1221): Ortholog of  Ceres SEQ ID NO 14312333 as cited in SEQ ID NO 54757
  misc_feature (1)..(1221): Ortholog of  Ceres SEQ ID NO 15168584 as cited in SEQ ID NO 57127
atgcaagagttagactcttctaacgatgaatgggtgaaagaacttgaaggagagaacgaggaatcgaaattcacagggaggagattagttaaaaagtcgatttctgttcctgaattggtagacgaagttgaagaagatctcgacgattttacagaacctgcggatgattttaatgacaaagtagggaagaagagacagaggaagaagaaagatgagtctggtcttgagaagacaaaaaagaacaagaagcaaaattccgaagaggttcaagagatgtgggattcaattacgaacaacactaactcacagtatggtgataaggtcgtagtaaaacctcctaagaaaaaagatgaagatgctgaggagataaaaaaactgttcagtcttaggaaaaagaagagcaagtgcgataaaacctccatggagattgggatgcaagtagaacaagtgatggcgaatcttgaaatcgcggtagaagacgacgtaatttgtaacagagaaggaaaacccgccattaataaactcatgaagttacctcttctcaatgaaactctctcaaagaaacctcttcaaggtgagttcttagaccatggagtacttaaccttctcaagaattggctcgagccgcttcctgatggtagcttgccgaatataaacatccgcagtgccgttttgatgattctcaacgattttcgtatcgatcttgatcaagactctagaagagaacagttgatcaagagcggtctcgggaaggtcataatgttcttatcaaaatcagatgaagaaactacacctaataggagactcgctaatgatataatcaacaaatggggccgtatcatttataataagagcacaagatatgataacatgtttactcaggaggaacttgatgagcaacggcaaatactattaagaagacagaccaaaacagctcctaaggtgtctggaacaagagctagagactttaatacagatattgacctttatgagctaggaacttggacaggaagagcaagagcaaaaataccaacaacaatgtcgatggactttaagatccgtcctccatcgaaggttgacattaaccaagaagaggaaccttgttccaagtggcaaatggaaaaaagacataaaaacaagcagcaaaagaacatcaggaaagggggcatgcaagcattgaagcttagtgtagacggacgcactatgctcaagtacttgtag

SEQ ID NO: 69589 - protein, 406 aa, Arabidopsis thaliana
  peptide (1)..(406): Ceres Seq. ID no. 1819453
MQELDSSNDEWVKELEGENEESKFTGRRLVKKSISVPELVDEVEEDLDDFTEPADDFNDKVGKKRQRKKKDESGLEKTKKNKKQNSEEVQEMWDSITNNTNSQYGDKVVVKPPKKKDEDAEEIKKLFSLRKKKSKCDKTSMEIGMQVEQVMANLEIAVEDDVICNREGKPAINKLMKLPLLNETLSKKPLQGEFLDHGVLNLLKNWLEPLPDGSLPNINIRSAVLMILNDFRIDLDQDSRREQLIKSGLGKVIMFLSKSDEETTPNRRLANDIINKWGRIIYNKSTRYDNMFTQEELDEQRQILLRRQTKTAPKVSGTRARDFNTDIDLYELGTWTGRARAKIPTTMSMDFKIRPPSKVDINQEEEPCSKWQMEKRHKNKQQKNIRKGGMQALKLSVDGRTMLKYL

SEQ ID NO: 69590 - protein, 315 aa, Arabidopsis thaliana
  peptide (1)..(315): Ceres Seq. ID no. 1819454
MWDSITNNTNSQYGDKVVVKPPKKKDEDAEEIKKLFSLRKKKSKCDKTSMEIGMQVEQVMANLEIAVEDDVICNREGKPAINKLMKLPLLNETLSKKPLQGEFLDHGVLNLLKNWLEPLPDGSLPNINIRSAVLMILNDFRIDLDQDSRREQLIKSGLGKVIMFLSKSDEETTPNRRLANDIINKWGRIIYNKSTRYDNMFTQEELDEQRQILLRRQTKTAPKVSGTRARDFNTDIDLYELGTWTGRARAKIPTTMSMDFKIRPPSKVDINQEEEPCSKWQMEKRHKNKQQKNIRKGGMQALKLSVDGRTMLKYL

SEQ ID NO: 69591 - protein, 266 aa, Arabidopsis thaliana
  peptide (1)..(266): Ceres Seq. ID no. 1819455
MEIGMQVEQVMANLEIAVEDDVICNREGKPAINKLMKLPLLNETLSKKPLQGEFLDHGVLNLLKNWLEPLPDGSLPNINIRSAVLMILNDFRIDLDQDSRREQLIKSGLGKVIMFLSKSDEETTPNRRLANDIINKWGRIIYNKSTRYDNMFTQEELDEQRQILLRRQTKTAPKVSGTRARDFNTDIDLYELGTWTGRARAKIPTTMSMDFKIRPPSKVDINQEEEPCSKWQMEKRHKNKQQKNIRKGGMQALKLSVDGRTMLKYL

SEQ ID NO: 69592 - DNA, 2445 bp, Arabidopsis thaliana
  misc_feature (1)..(2445): Ceres Seq. ID no. 1819549
  misc_feature (1)..(2445): Ortholog of  Ceres SEQ ID NO 13654989 as cited in SEQ ID NO 63117
  misc_feature (1)..(2445): Ortholog of  Ceres SEQ ID NO 13584744 as cited in SEQ ID NO 69137
atgagtagatcaccagacaagcttgctcttcctcctcctcctcctcctcccccatctcgtaccgtcgttgtggctctaagtgggagcagtaaaagcaaatatgtagttacatgggcgatcgaaaaatttgctactgaaggaaatgttggcttcaagctgcttcacatccatccaatgattacttctgtacctacaccaagtaaagttccaactatgcctttagaagttcttgtgatcgaatcagataatgtggcagccgcaatagctgaagaagtgactcgggattcaatagacagaattgtcattggaggctcatcccgtagttttttctcaaggaaagctgatatttgctcggtgatatcagctttgatgccaaacttttgtacagtctatgttgtttcaaaaggtaaattgtcatgcgtccgaccatcagactcagacggaaatgctactataagagaagatggtagtgagagaacaaattcttcaagcggttcttctggtcccacctcagaaatggtgtgtatatctaattctgttaccccattttctcttctagattcatcagatgtaatgtcaagtgcgcatgactctcaatctcgtcctctatcccttccggtcaggagaatgcaacatttccctgcaattgcaggacaggcatcagttccaatggaaacgagttctgttggctcggatgaaaccaggtgcatgtctttggatgcagaggaagctagagatgtttcaagtatcaatagaagcagcacagatactacatcacgttggactcctcggcgtagagattatgaggagagaaaagaagctatgagttcttcttcgagcaaccgtgaatacgggaattttggtactaggtttagttggagtggcatgggtgtcgatactacacactctcgggcttctcaacaagcttccaacatgtctgatgctctaagtgaacaatcctatacagacaaccaggtaaacctaaactttgaggttgagaagttgagagctgagcttagacacgttcaagaaatgtatgctgtggctcaaaccgaaacctttgatgcttctcgaaagcttggtgaacttaaccaacgtcggttagaagaagccataaagcttgaagagctaaagctgaaggagtatgaagctcgagagttagcagaaaaggaaaagcagaattttgagaaggcaaggagagatgcagagagcatgagagaaagagcagagagagaaattgcgcagagaagagaagccgaaaggaaatccgcacgtgatactaaagagaaagagaagctcgagggcactctcgggtctcctcagctgcaatatcagcactttgcttgggaagaaattatggctgccacttcatcattctcagaagaactgaagatcggaatgggagcttacggagctgtttacaagtgtaatctgcatcatacaactgcagttgtcaaagttttgcagtcagctgaaaatcaactttccaaacaattccaacaagagctcgaaatcttgagcaagattaggcatccacatttggttctccttctaggagcgtgcccggagcaaggtgctttagtttatgagtacatggaaaacggtagcttggaggacagacttttccaggtcaacaacagtccgccactcccgtggtttgagcggtttaggattgcttgggaagttgcagcggctcttgtcttcctccacaaatcaaagcctaaaccaatcattcaccgtgatcttaaacctgcaaacatcttacttgatcacaactttgtcagcaaagttggagacgtgggactctcaacgatggttcaagtcgatcctctatcaactaaattcactatatacaaacaaacaagccccgtgggaacgttatgctatattgatccggaatatcagcgcactggaaggatatcatcgaaatcagatatctactcctttggaatgattcttcttcagcttctcacagcaaaacctgctattgcattgacacatttcgttgagagcgcaatggatagtaatgatgagttccttaagatcttagatcagaaagccggtaactggccgattgaagaaacccgggaattggccgcattagctttgtgttgtacagagctacgcgggaaagatagacctgatttgaaagatcagattcttccagcgctcgaaaacctaaagaaagtagctgaaaaggcaaggaactcattttccggcgtatcgacacagcctcccactcatttcatctgcccattacttaaggacgtgatgaacgagccgtgcgttgcagcagacggatacacatacgaccgtcatgcgatagaggagtggcttaaggagcacaacacatcgccgatgacggattcaccgttgcatagcaagaaccttttacccaattatactctttacacagccatcatggaatggaggtctacacgatag

SEQ ID NO: 69593 - protein, 814 aa, Arabidopsis thaliana
  peptide (1)..(814): Ceres Seq. ID no. 1819550
MSRSPDKLALPPPPPPPPSRTVVVALSGSSKSKYVVTWAIEKFATEGNVGFKLLHIHPMITSVPTPSKVPTMPLEVLVIESDNVAAAIAEEVTRDSIDRIVIGGSSRSFFSRKADICSVISALMPNFCTVYVVSKGKLSCVRPSDSDGNATIREDGSERTNSSSGSSGPTSEMVCISNSVTPFSLLDSSDVMSSAHDSQSRPLSLPVRRMQHFPAIAGQASVPMETSSVGSDETRCMSLDAEEARDVSSINRSSTDTTSRWTPRRRDYEERKEAMSSSSSNREYGNFGTRFSWSGMGVDTTHSRASQQASNMSDALSEQSYTDNQVNLNFEVEKLRAELRHVQEMYAVAQTETFDASRKLGELNQRRLEEAIKLEELKLKEYEARELAEKEKQNFEKARRDAESMRERAEREIAQRREAERKSARDTKEKEKLEGTLGSPQLQYQHFAWEEIMAATSSFSEELKIGMGAYGAVYKCNLHHTTAVVKVLQSAENQLSKQFQQELEILSKIRHPHLVLLLGACPEQGALVYEYMENGSLEDRLFQVNNSPPLPWFERFRIAWEVAAALVFLHKSKPKPIIHRDLKPANILLDHNFVSKVGDVGLSTMVQVDPLSTKFTIYKQTSPVGTLCYIDPEYQRTGRISSKSDIYSFGMILLQLLTAKPAIALTHFVESAMDSNDEFLKILDQKAGNWPIEETRELAALALCCTELRGKDRPDLKDQILPALENLKKVAEKARNSFSGVSTQPPTHFICPLLKDVMNEPCVAADGYTYDRHAIEEWLKEHNTSPMTDSPLHSKNLLPNYTLYTAIMEWRSTR

SEQ ID NO: 69594 - protein, 756 aa, Arabidopsis thaliana
  peptide (1)..(756): Ceres Seq. ID no. 1819551
MITSVPTPSKVPTMPLEVLVIESDNVAAAIAEEVTRDSIDRIVIGGSSRSFFSRKADICSVISALMPNFCTVYVVSKGKLSCVRPSDSDGNATIREDGSERTNSSSGSSGPTSEMVCISNSVTPFSLLDSSDVMSSAHDSQSRPLSLPVRRMQHFPAIAGQASVPMETSSVGSDETRCMSLDAEEARDVSSINRSSTDTTSRWTPRRRDYEERKEAMSSSSSNREYGNFGTRFSWSGMGVDTTHSRASQQASNMSDALSEQSYTDNQVNLNFEVEKLRAELRHVQEMYAVAQTETFDASRKLGELNQRRLEEAIKLEELKLKEYEARELAEKEKQNFEKARRDAESMRERAEREIAQRREAERKSARDTKEKEKLEGTLGSPQLQYQHFAWEEIMAATSSFSEELKIGMGAYGAVYKCNLHHTTAVVKVLQSAENQLSKQFQQELEILSKIRHPHLVLLLGACPEQGALVYEYMENGSLEDRLFQVNNSPPLPWFERFRIAWEVAAALVFLHKSKPKPIIHRDLKPANILLDHNFVSKVGDVGLSTMVQVDPLSTKFTIYKQTSPVGTLCYIDPEYQRTGRISSKSDIYSFGMILLQLLTAKPAIALTHFVESAMDSNDEFLKILDQKAGNWPIEETRELAALALCCTELRGKDRPDLKDQILPALENLKKVAEKARNSFSGVSTQPPTHFICPLLKDVMNEPCVAADGYTYDRHAIEEWLKEHNTSPMTDSPLHSKNLLPNYTLYTAIMEWRSTR

SEQ ID NO: 69595 - protein, 743 aa, Arabidopsis thaliana
  peptide (1)..(743): Ceres Seq. ID no. 1819552
MPLEVLVIESDNVAAAIAEEVTRDSIDRIVIGGSSRSFFSRKADICSVISALMPNFCTVYVVSKGKLSCVRPSDSDGNATIREDGSERTNSSSGSSGPTSEMVCISNSVTPFSLLDSSDVMSSAHDSQSRPLSLPVRRMQHFPAIAGQASVPMETSSVGSDETRCMSLDAEEARDVSSINRSSTDTTSRWTPRRRDYEERKEAMSSSSSNREYGNFGTRFSWSGMGVDTTHSRASQQASNMSDALSEQSYTDNQVNLNFEVEKLRAELRHVQEMYAVAQTETFDASRKLGELNQRRLEEAIKLEELKLKEYEARELAEKEKQNFEKARRDAESMRERAEREIAQRREAERKSARDTKEKEKLEGTLGSPQLQYQHFAWEEIMAATSSFSEELKIGMGAYGAVYKCNLHHTTAVVKVLQSAENQLSKQFQQELEILSKIRHPHLVLLLGACPEQGALVYEYMENGSLEDRLFQVNNSPPLPWFERFRIAWEVAAALVFLHKSKPKPIIHRDLKPANILLDHNFVSKVGDVGLSTMVQVDPLSTKFTIYKQTSPVGTLCYIDPEYQRTGRISSKSDIYSFGMILLQLLTAKPAIALTHFVESAMDSNDEFLKILDQKAGNWPIEETRELAALALCCTELRGKDRPDLKDQILPALENLKKVAEKARNSFSGVSTQPPTHFICPLLKDVMNEPCVAADGYTYDRHAIEEWLKEHNTSPMTDSPLHSKNLLPNYTLYTAIMEWRSTR

SEQ ID NO: 69596 - DNA, 2592 bp, Arabidopsis thaliana
  misc_feature (1)..(2592): Ceres Seq. ID no. 1819565
  misc_feature (1)..(2592): Ortholog of  Ceres SEQ ID NO 13581686 as cited in SEQ ID NO 57695
atgcagagagtgagctttgaagtaaaggacacagaggcggagaagagcagcagcgagatactgagcggatctttgccgtcgacctaccgaaatccggcgatggaaaacgttggaaacgcggtggatgatggatcgagcgtgaagaacaatccgaaacttgatatgcagaaacagaacggtttggtgaagtggttcaagaagtgcttgacaatggtatctggagagagtaaggcacctcgattggaccggtcgaagtcaacggccggtcaggccttgaaagggctcaagatcatcagtaagaccgacggtaacgctgcctggaccgtcgtggagaagcggtacttgaagatcacggccaatactgatggattgctgcttcggtcgaaattcggtgaatgcatagggatgaactcaaaagaatttgccttggaattgtttgacgccttagctagaaaaagtcacttgaaaggggatgtgattactgagaccgagttgaagaaattttgggaacaaataaatgataaaagctttgattcaaggcttatcacgttctttgacttgatggataaagactcggatggtagacttacggaagacgaagttagagagatcatcaagcttagttcttctgccaatcatctgtcatgcatccaaaacaaggcagatgaatatgcagcaatgataatggaagagcttgaccctgatcatatgggatacatcatgatggagagtctaaagaaattgcttctgcaagcggaaacaaaatctgtaagcacagatattaatagtgaagaaagaaaggagctgagcgacatgctaactgagagtctcaagcctacacgtgaccctaaccatttgaggagatggtattgtcaactaagattctttgtattggatagttggcaaagagtttgggtgatagcgttatggctcacgattatggccatcctcttcgcgtacaagtatattcaatacaagaatagagcagtgtatgaagtgttggggccttgtgtgtgcttggctaaaggtgcagcagagacgctgaagctaaacatggccctaattctgttacctgtttgcagaaataccatcacatggcttagaaataagactaggttgggtgtttttgttccttttgatgacaacctcaattttcacaaggttatagcggtgggaattgcgataggagtagccatacactctgtgtcccacttggcgtgtgattttccactgctaatcgcggcaactccagcggaatacatgcctctcggaaaattcttcggagaggagcaaccaaagagatacttgcattttgtgaagtcaacagaaggaataacagggcttgtaatggttttcttgatggttattgcttttacactggctatgccttggtttagacgggggaagctagagaaaaagctaccagggccactaaagaaacttgcgagcttcaatgccttctggtacactcaccatttgttcgttatagtctacattctccttgtccttcacggatactacatatatctcaacaaggaatggtacaagaaaacgacgtggatgtacttggcagtaccagtagctctttatgcatacgagagattgatacgagcattcaggtccagcatcaggacagtaaaagtccttaagatggcagcttatcctggaaaagtattgactttgcagatgtcaaagcctacaaacttcaaatacatgagcggccaatacatgtttgtaaattgtccagcagtttcaccgtttgagtggcatccattttcaataacttctacaccacaagacgactatctgagcgttcatataaaagcattgggagattggacagaggctatccaaggagttttctcagagagtcgggaaaagatagttgagaagcatcatgttatatttcaggtgtctaagccacctccggtcggagacatgttgaatggtgcaaatagtccccgtttccccaaaattatgattgatggtccgtacggcgcaccagctcaagactacaagaagtacgaggtggtcctgctgataggtcttggcattggagccaccccgatgatcagcattatcaaggacattattaacaatacggagaccaaggaacaactcagccaaatggagaagggatcgccacaagagcaacaaggtaataaagaaactttcaagactcgaagggcttacttctactgggtaacaaaggagcagggcacatttgattggttcaagaacatcatgaacgagatcgcagaacgggacaaaagtaaagtcatagaactacacaatcattgcactagtgtctacgaagaaggagacgttcgttccgcgctcatacggatgcttcagtctcttaattatgccaagaatggtttagacattgttgctgggacaagggtcatgtcccatttcgcccgacctaattggaaaaacgtctacaaacagatagccatggatcaccctggcgctaatgttggagtgttctattgtggagcaccggtattgacgaaggagttaaggcaattagctttggaattcacacacaagaccagtactagattctctttccacaaagagaacttctaa

SEQ ID NO: 69597 - protein, 863 aa, Arabidopsis thaliana
  peptide (1)..(863): Ceres Seq. ID no. 1819566
MQRVSFEVKDTEAEKSSSEILSGSLPSTYRNPAMENVGNAVDDGSSVKNNPKLDMQKQNGLVKWFKKCLTMVSGESKAPRLDRSKSTAGQALKGLKIISKTDGNAAWTVVEKRYLKITANTDGLLLRSKFGECIGMNSKEFALELFDALARKSHLKGDVITETELKKFWEQINDKSFDSRLITFFDLMDKDSDGRLTEDEVREIIKLSSSANHLSCIQNKADEYAAMIMEELDPDHMGYIMMESLKKLLLQAETKSVSTDINSEERKELSDMLTESLKPTRDPNHLRRWYCQLRFFVLDSWQRVWVIALWLTIMAILFAYKYIQYKNRAVYEVLGPCVCLAKGAAETLKLNMALILLPVCRNTITWLRNKTRLGVFVPFDDNLNFHKVIAVGIAIGVAIHSVSHLACDFPLLIAATPAEYMPLGKFFGEEQPKRYLHFVKSTEGITGLVMVFLMVIAFTLAMPWFRRGKLEKKLPGPLKKLASFNAFWYTHHLFVIVYILLVLHGYYIYLNKEWYKKTTWMYLAVPVALYAYERLIRAFRSSIRTVKVLKMAAYPGKVLTLQMSKPTNFKYMSGQYMFVNCPAVSPFEWHPFSITSTPQDDYLSVHIKALGDWTEAIQGVFSESREKIVEKHHVIFQVSKPPPVGDMLNGANSPRFPKIMIDGPYGAPAQDYKKYEVVLLIGLGIGATPMISIIKDIINNTETKEQLSQMEKGSPQEQQGNKETFKTRRAYFYWVTKEQGTFDWFKNIMNEIAERDKSKVIELHNHCTSVYEEGDVRSALIRMLQSLNYAKNGLDIVAGTRVMSHFARPNWKNVYKQIAMDHPGANVGVFYCGAPVLTKELRQLALEFTHKTSTRFSFHKENF

SEQ ID NO: 69598 - protein, 830 aa, Arabidopsis thaliana
  peptide (1)..(830): Ceres Seq. ID no. 1819567
MENVGNAVDDGSSVKNNPKLDMQKQNGLVKWFKKCLTMVSGESKAPRLDRSKSTAGQALKGLKIISKTDGNAAWTVVEKRYLKITANTDGLLLRSKFGECIGMNSKEFALELFDALARKSHLKGDVITETELKKFWEQINDKSFDSRLITFFDLMDKDSDGRLTEDEVREIIKLSSSANHLSCIQNKADEYAAMIMEELDPDHMGYIMMESLKKLLLQAETKSVSTDINSEERKELSDMLTESLKPTRDPNHLRRWYCQLRFFVLDSWQRVWVIALWLTIMAILFAYKYIQYKNRAVYEVLGPCVCLAKGAAETLKLNMALILLPVCRNTITWLRNKTRLGVFVPFDDNLNFHKVIAVGIAIGVAIHSVSHLACDFPLLIAATPAEYMPLGKFFGEEQPKRYLHFVKSTEGITGLVMVFLMVIAFTLAMPWFRRGKLEKKLPGPLKKLASFNAFWYTHHLFVIVYILLVLHGYYIYLNKEWYKKTTWMYLAVPVALYAYERLIRAFRSSIRTVKVLKMAAYPGKVLTLQMSKPTNFKYMSGQYMFVNCPAVSPFEWHPFSITSTPQDDYLSVHIKALGDWTEAIQGVFSESREKIVEKHHVIFQVSKPPPVGDMLNGANSPRFPKIMIDGPYGAPAQDYKKYEVVLLIGLGIGATPMISIIKDIINNTETKEQLSQMEKGSPQEQQGNKETFKTRRAYFYWVTKEQGTFDWFKNIMNEIAERDKSKVIELHNHCTSVYEEGDVRSALIRMLQSLNYAKNGLDIVAGTRVMSHFARPNWKNVYKQIAMDHPGANVGVFYCGAPVLTKELRQLALEFTHKTSTRFSFHKENF

SEQ ID NO: 69599 - protein, 809 aa, Arabidopsis thaliana
  peptide (1)..(809): Ceres Seq. ID no. 1819568
MQKQNGLVKWFKKCLTMVSGESKAPRLDRSKSTAGQALKGLKIISKTDGNAAWTVVEKRYLKITANTDGLLLRSKFGECIGMNSKEFALELFDALARKSHLKGDVITETELKKFWEQINDKSFDSRLITFFDLMDKDSDGRLTEDEVREIIKLSSSANHLSCIQNKADEYAAMIMEELDPDHMGYIMMESLKKLLLQAETKSVSTDINSEERKELSDMLTESLKPTRDPNHLRRWYCQLRFFVLDSWQRVWVIALWLTIMAILFAYKYIQYKNRAVYEVLGPCVCLAKGAAETLKLNMALILLPVCRNTITWLRNKTRLGVFVPFDDNLNFHKVIAVGIAIGVAIHSVSHLACDFPLLIAATPAEYMPLGKFFGEEQPKRYLHFVKSTEGITGLVMVFLMVIAFTLAMPWFRRGKLEKKLPGPLKKLASFNAFWYTHHLFVIVYILLVLHGYYIYLNKEWYKKTTWMYLAVPVALYAYERLIRAFRSSIRTVKVLKMAAYPGKVLTLQMSKPTNFKYMSGQYMFVNCPAVSPFEWHPFSITSTPQDDYLSVHIKALGDWTEAIQGVFSESREKIVEKHHVIFQVSKPPPVGDMLNGANSPRFPKIMIDGPYGAPAQDYKKYEVVLLIGLGIGATPMISIIKDIINNTETKEQLSQMEKGSPQEQQGNKETFKTRRAYFYWVTKEQGTFDWFKNIMNEIAERDKSKVIELHNHCTSVYEEGDVRSALIRMLQSLNYAKNGLDIVAGTRVMSHFARPNWKNVYKQIAMDHPGANVGVFYCGAPVLTKELRQLALEFTHKTSTRFSFHKENF

SEQ ID NO: 69600 - DNA, 1161 bp, Arabidopsis thaliana
  misc_feature (1)..(1161): Ceres Seq. ID no. 1819837
  misc_feature (1)..(1161): Ortholog of  Ceres SEQ ID NO 13597334 as cited in SEQ ID NO 64244
atggcttccttcaaccactttgtgttactgcttctgttaataatcactcttattctatccgctgaagcaactaaggaacgccgagcaataccatcaaaggcagaaaggaatgaaatgaagagacaactcaaagctatcaacaagcctgcaatcaagagtttcaagactgaacatggtgatatattcgattgtatcgatattcacaaacaactagcatttgatcatcacctactaaaaaaccactctgttcagctaaggccaacaacagtacctgaatatatcactggaaacaacatttcagagagttttagtcttttgcaagaaggtataagctgtccagatggcacagtaattgtaaaaaggactacaatgcaagatcttatgcatgcacaacgtttgaaatccatgggattcgagggcccgagaccttttctcacagagacaaacaacatgaattttaatggaaaattctacgatgcaagagctgattatggaccgaacccttttgctggagttgcaggaaacattaacatatggaaaccaaaaatcttgcaagatcaagttagtattggatacatggcagttagtggggggcctattgaagaagatttcgccagcatttcagttggatggattttacatggaagcagtactggcggctgctacggcatgtcatgtcctggatttgtgcaagttagcaagactataccagttggtgccgttcttcaaccattttccatctataatggtcgacaatatgaattgcgtttaggcttgtttcaggatagtggcacgggaaattggtggtttgtatttaaagaggagattattggatactggccagcatcattgttcaagtcctggatggaatctaacagcgcaaattatgcatcttggggagggcaagtgtatagccctatcagagagaagagtccacctatgggaagtggtcattggcctagtgagggctttcataaagctgcttttattagtggcctcaaactcttcgatggtcacgggaaagtttataatccaggacgcgggacagtgaaggtacatgagagcagaccaatctgttacaaagccagatatgttcatgatgttgataaaccttggttaaaatctgtttactttggaggtcctggagggtgcatagggtaa

SEQ ID NO: 69601 - protein, 386 aa, Arabidopsis thaliana
  peptide (1)..(386): Ceres Seq. ID no. 1819838
MASFNHFVLLLLLIITLILSAEATKERRAIPSKAERNEMKRQLKAINKPAIKSFKTEHGDIFDCIDIHKQLAFDHHLLKNHSVQLRPTTVPEYITGNNISESFSLLQEGISCPDGTVIVKRTTMQDLMHAQRLKSMGFEGPRPFLTETNNMNFNGKFYDARADYGPNPFAGVAGNINIWKPKILQDQVSIGYMAVSGGPIEEDFASISVGWILHGSSTGGCYGMSCPGFVQVSKTIPVGAVLQPFSIYNGRQYELRLGLFQDSGTGNWWFVFKEEIIGYWPASLFKSWMESNSANYASWGGQVYSPIREKSPPMGSGHWPSEGFHKAAFISGLKLFDGHGKVYNPGRGTVKVHESRPICYKARYVHDVDKPWLKSVYFGGPGGCIG

SEQ ID NO: 69602 - protein, 348 aa, Arabidopsis thaliana
  peptide (1)..(348): Ceres Seq. ID no. 1819839
MKRQLKAINKPAIKSFKTEHGDIFDCIDIHKQLAFDHHLLKNHSVQLRPTTVPEYITGNNISESFSLLQEGISCPDGTVIVKRTTMQDLMHAQRLKSMGFEGPRPFLTETNNMNFNGKFYDARADYGPNPFAGVAGNINIWKPKILQDQVSIGYMAVSGGPIEEDFASISVGWILHGSSTGGCYGMSCPGFVQVSKTIPVGAVLQPFSIYNGRQYELRLGLFQDSGTGNWWFVFKEEIIGYWPASLFKSWMESNSANYASWGGQVYSPIREKSPPMGSGHWPSEGFHKAAFISGLKLFDGHGKVYNPGRGTVKVHESRPICYKARYVHDVDKPWLKSVYFGGPGGCIG

SEQ ID NO: 69603 - protein, 263 aa, Arabidopsis thaliana
  peptide (1)..(263): Ceres Seq. ID no. 1819840
MQDLMHAQRLKSMGFEGPRPFLTETNNMNFNGKFYDARADYGPNPFAGVAGNINIWKPKILQDQVSIGYMAVSGGPIEEDFASISVGWILHGSSTGGCYGMSCPGFVQVSKTIPVGAVLQPFSIYNGRQYELRLGLFQDSGTGNWWFVFKEEIIGYWPASLFKSWMESNSANYASWGGQVYSPIREKSPPMGSGHWPSEGFHKAAFISGLKLFDGHGKVYNPGRGTVKVHESRPICYKARYVHDVDKPWLKSVYFGGPGGCIG

SEQ ID NO: 69604 - DNA, 1731 bp, Arabidopsis thaliana
  misc_feature (1)..(1731): Ceres Seq. ID no. 1820081
  misc_feature (1)..(1731): Ortholog of  Ceres SEQ ID NO 12613725 as cited in SEQ ID NO 68196
atggatcaaaaagttagacagtttgaggtttgcactcaagacggtagcgttgatcgtcacggcaatccagctatccgagctaataccggcaaatggctcactgctattctcattctaggagtgaatttggttctgtttctgactcgagtgatgggacaagacaatgcagaagcggctaataatgttagtaaatggacaggaactgtctatatcttctctttgcttggtgctttcctcagtgactcttattggggacgttacaagacttgtgctatctttcaagcaagtttcgttgcagggttgatgatgttatctttatctactggtgcgttattgcttgaaccaagtggttgtggagttgaagattcgccgtgtaagcctcattcgacgtttaagacggttctgttttatctgtcggtgtatctaatcgcgttagggtatggtggttatcagccgaacatagctacttttggagctgatcagtttgatgcggaggattccgttgaaggacactcgaaaatcgcgtttttcagttacttttacttggctctgaatcttggatcgctcttctcaaatactgtcttgggttactttgaggatcaaggggaatggccgcttggattttgggcgtctgctggctctgcttttgcggggttagtgcttttcttgattggcacgccaaagtaccgacactttacgcctagagagagtccttggtctagattctgccaagtgttggttgctgcaacaagaaaggctaagattgatgtgcaccatgaagagttgaatctctatgattctgagactcaatacactggagataagaagattcttcataccaaaggcttcagattcttggatagagctgctattgttacacctgatgatgaggctgagaaagtagagagcggatcgaaatacgatccatggaggctctgctcggtgactcaagtcgaagaagtgaaatgtgtattaagactcttaccaatctggctctgcaccatcctctactctgtggttttcacccaaatggcttcactgttcgttgtgcaaggagcagcgatgaagacaaacatcaaaaacttccggattccagcttcaagcatgtctagtttcgacattctcagtgtcgccttcttcatcttcgcatacaggcggtttcttgatccactctttgcaagacttaacaaaacagaacgcaacaaaggtctcactgagcttcagaggatggggattgggcttgtgattgcgataatggcgatgatttccgcaggaatcgtagagatacacagactgaaaaataaggaaccggaaagtgctacttcgatctcaagctccagcactttgagcattttttggcaagtacctcagtacatgttgataggtgcatcagaagtgttcatgtacgttggtcaactcgagttcttcaacagccaagcaccaaccgggctaaagagctttgcaagcgcgctatgtatggcttcaatatctcttgggaactatgtaagcagtttgttagtttccattgtcatgaagatctctacaacagatgatgtgcatggctggattcctgaaaatctcaacaaaggacacttggagagattctacttccttttagctggtctaaccgctgctgatttcgtggtttacttgatttgtgccaaatggtacaagtatattaaatctgaagcaagtttctctgagtccgtaactgaagaggaggaagtctga

SEQ ID NO: 69605 - protein, 576 aa, Arabidopsis thaliana
  peptide (1)..(576): Ceres Seq. ID no. 1820082
MDQKVRQFEVCTQDGSVDRHGNPAIRANTGKWLTAILILGVNLVLFLTRVMGQDNAEAANNVSKWTGTVYIFSLLGAFLSDSYWGRYKTCAIFQASFVAGLMMLSLSTGALLLEPSGCGVEDSPCKPHSTFKTVLFYLSVYLIALGYGGYQPNIATFGADQFDAEDSVEGHSKIAFFSYFYLALNLGSLFSNTVLGYFEDQGEWPLGFWASAGSAFAGLVLFLIGTPKYRHFTPRESPWSRFCQVLVAATRKAKIDVHHEELNLYDSETQYTGDKKILHTKGFRFLDRAAIVTPDDEAEKVESGSKYDPWRLCSVTQVEEVKCVLRLLPIWLCTILYSVVFTQMASLFVVQGAAMKTNIKNFRIPASSMSSFDILSVAFFIFAYRRFLDPLFARLNKTERNKGLTELQRMGIGLVIAIMAMISAGIVEIHRLKNKEPESATSISSSSTLSIFWQVPQYMLIGASEVFMYVGQLEFFNSQAPTGLKSFASALCMASISLGNYVSSLLVSIVMKISTTDDVHGWIPENLNKGHLERFYFLLAGLTAADFVVYLICAKWYKYIKSEASFSESVTEEEEV

SEQ ID NO: 69606 - protein, 526 aa, Arabidopsis thaliana
  peptide (1)..(526): Ceres Seq. ID no. 1820083
MGQDNAEAANNVSKWTGTVYIFSLLGAFLSDSYWGRYKTCAIFQASFVAGLMMLSLSTGALLLEPSGCGVEDSPCKPHSTFKTVLFYLSVYLIALGYGGYQPNIATFGADQFDAEDSVEGHSKIAFFSYFYLALNLGSLFSNTVLGYFEDQGEWPLGFWASAGSAFAGLVLFLIGTPKYRHFTPRESPWSRFCQVLVAATRKAKIDVHHEELNLYDSETQYTGDKKILHTKGFRFLDRAAIVTPDDEAEKVESGSKYDPWRLCSVTQVEEVKCVLRLLPIWLCTILYSVVFTQMASLFVVQGAAMKTNIKNFRIPASSMSSFDILSVAFFIFAYRRFLDPLFARLNKTERNKGLTELQRMGIGLVIAIMAMISAGIVEIHRLKNKEPESATSISSSSTLSIFWQVPQYMLIGASEVFMYVGQLEFFNSQAPTGLKSFASALCMASISLGNYVSSLLVSIVMKISTTDDVHGWIPENLNKGHLERFYFLLAGLTAADFVVYLICAKWYKYIKSEASFSESVTEEEEV

SEQ ID NO: 69607 - protein, 475 aa, Arabidopsis thaliana
  peptide (1)..(475): Ceres Seq. ID no. 1820084
MMLSLSTGALLLEPSGCGVEDSPCKPHSTFKTVLFYLSVYLIALGYGGYQPNIATFGADQFDAEDSVEGHSKIAFFSYFYLALNLGSLFSNTVLGYFEDQGEWPLGFWASAGSAFAGLVLFLIGTPKYRHFTPRESPWSRFCQVLVAATRKAKIDVHHEELNLYDSETQYTGDKKILHTKGFRFLDRAAIVTPDDEAEKVESGSKYDPWRLCSVTQVEEVKCVLRLLPIWLCTILYSVVFTQMASLFVVQGAAMKTNIKNFRIPASSMSSFDILSVAFFIFAYRRFLDPLFARLNKTERNKGLTELQRMGIGLVIAIMAMISAGIVEIHRLKNKEPESATSISSSSTLSIFWQVPQYMLIGASEVFMYVGQLEFFNSQAPTGLKSFASALCMASISLGNYVSSLLVSIVMKISTTDDVHGWIPENLNKGHLERFYFLLAGLTAADFVVYLICAKWYKYIKSEASFSESVTEEEEV

SEQ ID NO: 69608 - DNA, 3723 bp, Arabidopsis thaliana
  misc_feature (1)..(3723): Ceres Seq. ID no. 1820394
  misc_feature (1)..(3723): Ortholog of  Ceres SEQ ID NO 14303197 as cited in SEQ ID NO 66883
atggcttctcaaatgccctttacaacaatatcaagaaagatatcatgtatgaagttgttgcctctttgccctcttcagttgtcaacaacgcaaacacctacaacaattcccatgtctctttccttctataagaatgaactttctgatgatacaccttgtcaaagtgggtacactgattacatatcttttcaagtccccgatgagaccttcccagagatttcaaactgtattggcatagctaagggttataagcagaattccaacaatgagaaaaatggttatacttctctggaagccgttttgttatctgtacctaatggctacacttgtgttgatttgtctctctacaaggataaagaactggttttattattgaataagacaaatacagattccgaaggctcgggagaagcatgcatgatggttgtacaaactggtgacctcgcattcatttccatttcaggatctagttctctaaaccagtgggagctagaggatttgaaggtattgctaatttcaagcattaacatcgacggctcgattgtgaacctggaaatggagaatgaaaaggttcgcaaagtaccacattctgtcattgctcctctagcagtaagcgcttcaagaggagtggcttgtgtttttgctgaaagaagacgagctttggtgtacatattggaagaagatgaagatgaagaaatctctgatgaaaactcaactaaggaagcaagacgaaattctctctctttctctaagctctacgccaccgtcacggaggttgtcttgttttgtctcatggagaatgatcaattcatgtgtccgactgatataatcaccggcatagtgtttattgatggtgaattggctatgttgactttgactgccgacggggagttacggtggacagagtatggactccggcagtatttgtcgatgaagaaggatgttcttggtttcatcgtcgaaggtaagcagattagagtaaaagccgtggttgagaaagaggcaggaggaatctgctgcggacaatttggtggagacttcgtgaggaaagatttcgtctttgagcctctcatcgatcaaaatggatggtgctataagcttcgtcaataccttgattctctcggtcggccaaagagattgcttgtgtttgtgaacccgtttggcgggaagaaatcggcgagagagatttttgttaaggaagtgaagcctttgtttgaagatgctgatgttcaacttgagattcaagaaactaagtatcagttgcatgcaaaggaatttgttaagtccatggatgtgtcaaaatatgatggtattgtttgtgtcagcggcgacggtatccttgttgaggttgtaaatggactgctcgaaagagcagactggagaaatgccttaaaattgcctattggaatggtccctgcaggaactggtaatggcatgataaagtcattgttggacacagttgggcttcgatgctgtgcaaatagtgctaccatttctattatccgaggtcataaacgttctgtagatgttgctacaattgcacaagggaataccaaattcttcagtgtcttgatgcttgcttggggtttaatagctgatatagacatcgagtcagagaagttcagatggatgggaagtgctcgtattgacttttatgtatgtttagttgacaaatttgacaattattgcattgcagttgttaaattgctggctcttcagaggataatatgtttaagacgatacaatggacgaattttatttctaccggctcctgggtttgaaggctatggacagccagccagttgcagtctataccaagagccacatgttagtgataaagaggtcgggtaccaaggacctgaaactaaatttgaagatctagaatggagggaaatgaaaggcccatttgttacgatatggcttcacaatgttccctggggttctgagaacactttgactgctcctgctgcaaagttttctgatggctacctggacttgattgtcttgaaaaactgccctaagcttgtcctgctctcacttatgagacagacgagtagtggaacacatgttgagtcaccatatatagtgtatataaagcttactgtcgaaaaggtgaaggcatttgtgctggagccgggtgcacttgtagacgaaccagacaaggaaggaatcatagattcagatggagaggttttggcaagaggaaaaagaacatataaatgtgatcaaaaggccttgatgtcttacgacaagcttcaagtaacagttgatcaagaaagattgttctgtaaattttgtataagccagagggagctagtacttgctaagctctcaccaacgacgaaactcgtctccctccatcttgctatggatcgtcagccggagagggagaatgatgaactaccatctccggcgataatttccgaccgagttctggtaaatggtgttgtcacgccgttaacgttgaccgccgagggagagctacgatcgacggaatctggacggcggaaatcgacgttggcaaaagaaatcctgagtttcgtcgtggaaggtaacaaggttagagtaaagaccttggttgagaaaggaggaggaatttgctgtagaggaagtgctggagattatgcgaggaacgatttcgttttcgagcctctctctgatgaatctagaaagctttggtccgataagttccatcaacacctcgtctctctcggtcggccaaagaaattgcttgtgtttgtgaatccgtttggcgggaagaaaacagcgagaaagatatttcaagaggaagtaaagccattgtttgaagatgcaaatattcaacttgagattcaagaaaccaagtatcagttgcatgcaaaggaaattgttaggtccatggatgtatcaaaatacgatggtattgtttgtgttagcggtgacggtatccttgttgaggttgtaaatggactgcttgaaagagaagactggaagactgccataaaattgccgatcggaatggtccctgcaggtcgtacacgttctctagatgtagcaactatctcacaagggactaccaaattcttcagtgtcttgatgcttgcttggggtttagtggctgatatagacatcgagtcagagaaattcagatggatgggtagtgctcgctttgatatctatgtatgtttagttgaacatttgaaaattttctgcaatgcatgttttaatatgcgttactcaactaagttactggtggaggttgaacaaaaaaaaaaaaaaaaagagattggtcttcagaggataatatgcttaagacaataccatggacgaattctatttgtgccagctcctgggttcgaaagctatgggcaacgagccagttgcagtatagataaagagccatctggtagtgataagacactcgtataccaaggacctgatagtaaacttgaaaatctggattggagagaaatgaaaggcccatttgtttcagtatggcttcataatgttccctggggtgctgagaacactttggctgctcctgacgctaaggtgaaggcattcgtactggagccaggtgcacgcatagacgaaccagacaaggaaggaatcatagattcagatggagaagttttggcaagaggaagaaaatcgtacaaatgtgatcaaaaggctttgatgtcttacgacaagcttcaaataagtgttgatcaaggtttagccactctcttctctcctgaataa

SEQ ID NO: 69609 - protein, 1240 aa, Arabidopsis thaliana
  peptide (1)..(1240): Ceres Seq. ID no. 1820395
MASQMPFTTISRKISCMKLLPLCPLQLSTTQTPTTIPMSLSFYKNELSDDTPCQSGYTDYISFQVPDETFPEISNCIGIAKGYKQNSNNEKNGYTSLEAVLLSVPNGYTCVDLSLYKDKELVLLLNKTNTDSEGSGEACMMVVQTGDLAFISISGSSSLNQWELEDLKVLLISSINIDGSIVNLEMENEKVRKVPHSVIAPLAVSASRGVACVFAERRRALVYILEEDEDEEISDENSTKEARRNSLSFSKLYATVTEVVLFCLMENDQFMCPTDIITGIVFIDGELAMLTLTADGELRWTEYGLRQYLSMKKDVLGFIVEGKQIRVKAVVEKEAGGICCGQFGGDFVRKDFVFEPLIDQNGWCYKLRQYLDSLGRPKRLLVFVNPFGGKKSAREIFVKEVKPLFEDADVQLEIQETKYQLHAKEFVKSMDVSKYDGIVCVSGDGILVEVVNGLLERADWRNALKLPIGMVPAGTGNGMIKSLLDTVGLRCCANSATISIIRGHKRSVDVATIAQGNTKFFSVLMLAWGLIADIDIESEKFRWMGSARIDFYVCLVDKFDNYCIAVVKLLALQRIICLRRYNGRILFLPAPGFEGYGQPASCSLYQEPHVSDKEVGYQGPETKFEDLEWREMKGPFVTIWLHNVPWGSENTLTAPAAKFSDGYLDLIVLKNCPKLVLLSLMRQTSSGTHVESPYIVYIKLTVEKVKAFVLEPGALVDEPDKEGIIDSDGEVLARGKRTYKCDQKALMSYDKLQVTVDQERLFCKFCISQRELVLAKLSPTTKLVSLHLAMDRQPERENDELPSPAIISDRVLVNGVVTPLTLTAEGELRSTESGRRKSTLAKEILSFVVEGNKVRVKTLVEKGGGICCRGSAGDYARNDFVFEPLSDESRKLWSDKFHQHLVSLGRPKKLLVFVNPFGGKKTARKIFQEEVKPLFEDANIQLEIQETKYQLHAKEIVRSMDVSKYDGIVCVSGDGILVEVVNGLLEREDWKTAIKLPIGMVPAGRTRSLDVATISQGTTKFFSVLMLAWGLVADIDIESEKFRWMGSARFDIYVCLVEHLKIFCNACFNMRYSTKLLVEVEQKKKKKEIGLQRIICLRQYHGRILFVPAPGFESYGQRASCSIDKEPSGSDKTLVYQGPDSKLENLDWREMKGPFVSVWLHNVPWGAENTLAAPDAKVKAFVLEPGARIDEPDKEGIIDSDGEVLARGRKSYKCDQKALMSYDKLQISVDQGLATLFSPE

SEQ ID NO: 69610 - protein, 1236 aa, Arabidopsis thaliana
  peptide (1)..(1236): Ceres Seq. ID no. 1820396
MPFTTISRKISCMKLLPLCPLQLSTTQTPTTIPMSLSFYKNELSDDTPCQSGYTDYISFQVPDETFPEISNCIGIAKGYKQNSNNEKNGYTSLEAVLLSVPNGYTCVDLSLYKDKELVLLLNKTNTDSEGSGEACMMVVQTGDLAFISISGSSSLNQWELEDLKVLLISSINIDGSIVNLEMENEKVRKVPHSVIAPLAVSASRGVACVFAERRRALVYILEEDEDEEISDENSTKEARRNSLSFSKLYATVTEVVLFCLMENDQFMCPTDIITGIVFIDGELAMLTLTADGELRWTEYGLRQYLSMKKDVLGFIVEGKQIRVKAVVEKEAGGICCGQFGGDFVRKDFVFEPLIDQNGWCYKLRQYLDSLGRPKRLLVFVNPFGGKKSAREIFVKEVKPLFEDADVQLEIQETKYQLHAKEFVKSMDVSKYDGIVCVSGDGILVEVVNGLLERADWRNALKLPIGMVPAGTGNGMIKSLLDTVGLRCCANSATISIIRGHKRSVDVATIAQGNTKFFSVLMLAWGLIADIDIESEKFRWMGSARIDFYVCLVDKFDNYCIAVVKLLALQRIICLRRYNGRILFLPAPGFEGYGQPASCSLYQEPHVSDKEVGYQGPETKFEDLEWREMKGPFVTIWLHNVPWGSENTLTAPAAKFSDGYLDLIVLKNCPKLVLLSLMRQTSSGTHVESPYIVYIKLTVEKVKAFVLEPGALVDEPDKEGIIDSDGEVLARGKRTYKCDQKALMSYDKLQVTVDQERLFCKFCISQRELVLAKLSPTTKLVSLHLAMDRQPERENDELPSPAIISDRVLVNGVVTPLTLTAEGELRSTESGRRKSTLAKEILSFVVEGNKVRVKTLVEKGGGICCRGSAGDYARNDFVFEPLSDESRKLWSDKFHQHLVSLGRPKKLLVFVNPFGGKKTARKIFQEEVKPLFEDANIQLEIQETKYQLHAKEIVRSMDVSKYDGIVCVSGDGILVEVVNGLLEREDWKTAIKLPIGMVPAGRTRSLDVATISQGTTKFFSVLMLAWGLVADIDIESEKFRWMGSARFDIYVCLVEHLKIFCNACFNMRYSTKLLVEVEQKKKKKEIGLQRIICLRQYHGRILFVPAPGFESYGQRASCSIDKEPSGSDKTLVYQGPDSKLENLDWREMKGPFVSVWLHNVPWGAENTLAAPDAKVKAFVLEPGARIDEPDKEGIIDSDGEVLARGRKSYKCDQKALMSYDKLQISVDQGLATLFSPE

SEQ ID NO: 69611 - protein, 1224 aa, Arabidopsis thaliana
  peptide (1)..(1224): Ceres Seq. ID no. 1820397
MKLLPLCPLQLSTTQTPTTIPMSLSFYKNELSDDTPCQSGYTDYISFQVPDETFPEISNCIGIAKGYKQNSNNEKNGYTSLEAVLLSVPNGYTCVDLSLYKDKELVLLLNKTNTDSEGSGEACMMVVQTGDLAFISISGSSSLNQWELEDLKVLLISSINIDGSIVNLEMENEKVRKVPHSVIAPLAVSASRGVACVFAERRRALVYILEEDEDEEISDENSTKEARRNSLSFSKLYATVTEVVLFCLMENDQFMCPTDIITGIVFIDGELAMLTLTADGELRWTEYGLRQYLSMKKDVLGFIVEGKQIRVKAVVEKEAGGICCGQFGGDFVRKDFVFEPLIDQNGWCYKLRQYLDSLGRPKRLLVFVNPFGGKKSAREIFVKEVKPLFEDADVQLEIQETKYQLHAKEFVKSMDVSKYDGIVCVSGDGILVEVVNGLLERADWRNALKLPIGMVPAGTGNGMIKSLLDTVGLRCCANSATISIIRGHKRSVDVATIAQGNTKFFSVLMLAWGLIADIDIESEKFRWMGSARIDFYVCLVDKFDNYCIAVVKLLALQRIICLRRYNGRILFLPAPGFEGYGQPASCSLYQEPHVSDKEVGYQGPETKFEDLEWREMKGPFVTIWLHNVPWGSENTLTAPAAKFSDGYLDLIVLKNCPKLVLLSLMRQTSSGTHVESPYIVYIKLTVEKVKAFVLEPGALVDEPDKEGIIDSDGEVLARGKRTYKCDQKALMSYDKLQVTVDQERLFCKFCISQRELVLAKLSPTTKLVSLHLAMDRQPERENDELPSPAIISDRVLVNGVVTPLTLTAEGELRSTESGRRKSTLAKEILSFVVEGNKVRVKTLVEKGGGICCRGSAGDYARNDFVFEPLSDESRKLWSDKFHQHLVSLGRPKKLLVFVNPFGGKKTARKIFQEEVKPLFEDANIQLEIQETKYQLHAKEIVRSMDVSKYDGIVCVSGDGILVEVVNGLLEREDWKTAIKLPIGMVPAGRTRSLDVATISQGTTKFFSVLMLAWGLVADIDIESEKFRWMGSARFDIYVCLVEHLKIFCNACFNMRYSTKLLVEVEQKKKKKEIGLQRIICLRQYHGRILFVPAPGFESYGQRASCSIDKEPSGSDKTLVYQGPDSKLENLDWREMKGPFVSVWLHNVPWGAENTLAAPDAKVKAFVLEPGARIDEPDKEGIIDSDGEVLARGRKSYKCDQKALMSYDKLQISVDQGLATLFSPE

SEQ ID NO: 69612 - DNA, 648 bp, Arabidopsis thaliana
  misc_feature (1)..(648): Ceres Seq. ID no. 1820406
  misc_feature (1)..(648): Ortholog of  Ceres SEQ ID NO 14304378 as cited in SEQ ID NO 52577
atggaagaagaaactctacaagtcttcttcttctctcatcctctcttctccattttcataactctctacagtctaatcctcatctatttccccaatgatttgcttcgaatctttctctcccctgttcttctcatctccggagctctccttctctctcttctccgtctcggatcgacccgagaacctaacacccaacccgataaaagctacgaggagtctgaagaacctaaggtttttctggttcgtgaatccgatttgatgggtggttttgtggaatggaacttgagagcaccattggaagtgattcacgaagcttacgaagatgaagaagaggaagaagaagaagaagatccgacccggtttagaaaaatggagagattcccatcgttgtcactctgttacccagaatcagattcggaatcggattctgcttcctcgtcagaattcaatttcccggaaatcggtgactggaactcgccggaaaatatgggattcagatgggaagaagacgagggtggaataggatgtgaaggtttgattgagataaagctcgatcattatagccataataggaagatgatgagtaaaacagagattgattttcatgcagaggaagatggtttgatcgagatcgatctttttccatga

SEQ ID NO: 69613 - protein, 215 aa, Arabidopsis thaliana
  peptide (1)..(215): Ceres Seq. ID no. 1820407
MEEETLQVFFFSHPLFSIFITLYSLILIYFPNDLLRIFLSPVLLISGALLLSLLRLGSTREPNTQPDKSYEESEEPKVFLVRESDLMGGFVEWNLRAPLEVIHEAYEDEEEEEEEEDPTRFRKMERFPSLSLCYPESDSESDSASSSEFNFPEIGDWNSPENMGFRWEEDEGGIGCEGLIEIKLDHYSHNRKMMSKTEIDFHAEEDGLIEIDLFP

SEQ ID NO: 69614 - protein, 129 aa, Arabidopsis thaliana
  peptide (1)..(129): Ceres Seq. ID no. 1820408
MGGFVEWNLRAPLEVIHEAYEDEEEEEEEEDPTRFRKMERFPSLSLCYPESDSESDSASSSEFNFPEIGDWNSPENMGFRWEEDEGGIGCEGLIEIKLDHYSHNRKMMSKTEIDFHAEEDGLIEIDLFP

SEQ ID NO: 69615 - DNA, 2148 bp, Arabidopsis thaliana
  misc_feature (1)..(2148): Ceres Seq. ID no. 1820476
  misc_feature (1)..(2148): Ortholog of  Ceres SEQ ID NO 14313893 as cited in SEQ ID NO 54646
  misc_feature (1)..(2148): Ortholog of  Ceres SEQ ID NO 13656797 as cited in SEQ ID NO 65756
  misc_feature (1)..(2148): Ortholog of  Ceres SEQ ID NO 13658498 as cited in SEQ ID NO 66557
  misc_feature (1)..(2148): Ortholog of  Ceres SEQ ID NO 15227053 as cited in SEQ ID NO 0
atgaagagcacgaacgacgaatctccttccttgggatacgacttcgccggagttagcatcaaggacggaaaatctaagccgccggcgccggtaatatgttacgatggcttgttcggagggagagacgtgattagaatcgtgctattggtcacgaccgtgacactttcttgtctattattctacaaatctgcaaacaatccactcaatatggtgttttctccatggaagaccgattgttatgcttccaaacttacaaacgagtcttcctcaaaaacggaaccaaagaaggagccggtttcagaactagagagagtattgatgaatgcggctatggaagataacacggtgatcataacggcgttaaaccaagcatgggccgaaccaaactctacattcgatgtgtttcgagagagttttaaagtcggaatagaaacggagaggttattgaagcatgtgatcgcggtttgcttggatatcaaggcatatgatcagtgcctaaaggttcatcctcattgctatttgatcaacgccacagattcagaccaactctcaggtccgaatcggtttatgacgcctggttacttgaaacttatttggcggcgaatggatcttcttaggcaagttattggtttagggtacaacttcatattcacggatgcagatatattatggcttcgagacccatttcctcgtttttttccggatgctgattttcaaataacatgcgatgattacaatggaagaccatcggacaaaaagaatcacgtgaactccggatttacatacgtcaaggcaaacaacaaaacttcaaaattttacaaatattggattagatcgagtcggaaatttcctggaaaacacgatcaagatgtgttcaacttcataaaaaacgatcttcacgtcgagaaacttgggataaagatgaggtttttcgataccgtttactttggagggttttgtcagccgagccgagacatcaatgtggtcaacacaatgcatgctaattgttgtattggcttggacaacaaagtgaataatcttaaggcagctctcgaagattggaaacgatatgtgtcactaaacacgaccgtgtccgagactaaatggaatattccgcctagttttcttgattatggatctgcgatcggacaaaaagaagtaaagaaaatcctggttttggttctaggtttagctgcttgtcttcttctttacaaaacagcttatcctcttcatcaagagctcgatgttaacaatctcagctctcgtcctttgctcgatcacacctcttcgtcttctccactaacaagatcaaaatcgatcagttttagggaagttctggagaatgcatcaacagagaatcgaacagttattgtaacaacgttgaaccaagcatgggcagagccaaactctctgttcgatctatttcttgagagttttcgtatcggacaaggaacaaagaagttacttcaacatgtggttgtggtttgcttggattccaaggcatttgctcgctgctcacaacttcaccctaattgctactatttgaaaaccacagggactgatttctccggcgagaaactctttgctactcctgattacctcaaaatgatgtggcgaagaatcgagcttctcacacaagtgctagaaatgggatacaacttcatcttcacggatgcggatataatgtggcttcgagatccatttcctcggctgtatcctgatggagattttcaaatggcatgtgatcgattcttcggtgatcctcatgactcagacaattgggtaaacggaggattcacttacgtgaaatcaaaccacagaagcatcgagttctacaaattttggtacaattctcgtcttgattatccgaagatgcatgaccaagatgtgttcaaccaaatcaaacacaaggctttagtctcagagattggaatccaaatgagattctttgatacggtttactttggtgggttttgtcaaacgagcagagacataaacttggtgtgtaccatgcatgctaattgttgtgtaggattagcgaagaagcttcatgatcttaatcttgttcttgatgactggagaaactatttgtctttgtctgaaccagttaaaaacacaacttggagtgttcctatgaagtgtacatga

SEQ ID NO: 69616 - protein, 715 aa, Arabidopsis thaliana
  peptide (1)..(715): Ceres Seq. ID no. 1820477
MKSTNDESPSLGYDFAGVSIKDGKSKPPAPVICYDGLFGGRDVIRIVLLVTTVTLSCLLFYKSANNPLNMVFSPWKTDCYASKLTNESSSKTEPKKEPVSELERVLMNAAMEDNTVIITALNQAWAEPNSTFDVFRESFKVGIETERLLKHVIAVCLDIKAYDQCLKVHPHCYLINATDSDQLSGPNRFMTPGYLKLIWRRMDLLRQVIGLGYNFIFTDADILWLRDPFPRFFPDADFQITCDDYNGRPSDKKNHVNSGFTYVKANNKTSKFYKYWIRSSRKFPGKHDQDVFNFIKNDLHVEKLGIKMRFFDTVYFGGFCQPSRDINVVNTMHANCCIGLDNKVNNLKAALEDWKRYVSLNTTVSETKWNIPPSFLDYGSAIGQKEVKKILVLVLGLAACLLLYKTAYPLHQELDVNNLSSRPLLDHTSSSSPLTRSKSISFREVLENASTENRTVIVTTLNQAWAEPNSLFDLFLESFRIGQGTKKLLQHVVVVCLDSKAFARCSQLHPNCYYLKTTGTDFSGEKLFATPDYLKMMWRRIELLTQVLEMGYNFIFTDADIMWLRDPFPRLYPDGDFQMACDRFFGDPHDSDNWVNGGFTYVKSNHRSIEFYKFWYNSRLDYPKMHDQDVFNQIKHKALVSEIGIQMRFFDTVYFGGFCQTSRDINLVCTMHANCCVGLAKKLHDLNLVLDDWRNYLSLSEPVKNTTWSVPMKCT

SEQ ID NO: 69617 - protein, 646 aa, Arabidopsis thaliana
  peptide (1)..(646): Ceres Seq. ID no. 1820478
MVFSPWKTDCYASKLTNESSSKTEPKKEPVSELERVLMNAAMEDNTVIITALNQAWAEPNSTFDVFRESFKVGIETERLLKHVIAVCLDIKAYDQCLKVHPHCYLINATDSDQLSGPNRFMTPGYLKLIWRRMDLLRQVIGLGYNFIFTDADILWLRDPFPRFFPDADFQITCDDYNGRPSDKKNHVNSGFTYVKANNKTSKFYKYWIRSSRKFPGKHDQDVFNFIKNDLHVEKLGIKMRFFDTVYFGGFCQPSRDINVVNTMHANCCIGLDNKVNNLKAALEDWKRYVSLNTTVSETKWNIPPSFLDYGSAIGQKEVKKILVLVLGLAACLLLYKTAYPLHQELDVNNLSSRPLLDHTSSSSPLTRSKSISFREVLENASTENRTVIVTTLNQAWAEPNSLFDLFLESFRIGQGTKKLLQHVVVVCLDSKAFARCSQLHPNCYYLKTTGTDFSGEKLFATPDYLKMMWRRIELLTQVLEMGYNFIFTDADIMWLRDPFPRLYPDGDFQMACDRFFGDPHDSDNWVNGGFTYVKSNHRSIEFYKFWYNSRLDYPKMHDQDVFNQIKHKALVSEIGIQMRFFDTVYFGGFCQTSRDINLVCTMHANCCVGLAKKLHDLNLVLDDWRNYLSLSEPVKNTTWSVPMKCT

SEQ ID NO: 69618 - protein, 609 aa, Arabidopsis thaliana
  peptide (1)..(609): Ceres Seq. ID no. 1820479
MNAAMEDNTVIITALNQAWAEPNSTFDVFRESFKVGIETERLLKHVIAVCLDIKAYDQCLKVHPHCYLINATDSDQLSGPNRFMTPGYLKLIWRRMDLLRQVIGLGYNFIFTDADILWLRDPFPRFFPDADFQITCDDYNGRPSDKKNHVNSGFTYVKANNKTSKFYKYWIRSSRKFPGKHDQDVFNFIKNDLHVEKLGIKMRFFDTVYFGGFCQPSRDINVVNTMHANCCIGLDNKVNNLKAALEDWKRYVSLNTTVSETKWNIPPSFLDYGSAIGQKEVKKILVLVLGLAACLLLYKTAYPLHQELDVNNLSSRPLLDHTSSSSPLTRSKSISFREVLENASTENRTVIVTTLNQAWAEPNSLFDLFLESFRIGQGTKKLLQHVVVVCLDSKAFARCSQLHPNCYYLKTTGTDFSGEKLFATPDYLKMMWRRIELLTQVLEMGYNFIFTDADIMWLRDPFPRLYPDGDFQMACDRFFGDPHDSDNWVNGGFTYVKSNHRSIEFYKFWYNSRLDYPKMHDQDVFNQIKHKALVSEIGIQMRFFDTVYFGGFCQTSRDINLVCTMHANCCVGLAKKLHDLNLVLDDWRNYLSLSEPVKNTTWSVPMKCT

SEQ ID NO: 69619 - DNA, 921 bp, Arabidopsis thaliana
  misc_feature (1)..(921): Ceres Seq. ID no. 1820484
  misc_feature (1)..(921): Ortholog of  Ceres SEQ ID NO 15224520 as cited in SEQ ID NO 58188
  misc_feature (1)..(921): Ortholog of  Ceres SEQ ID NO 12777206 as cited in SEQ ID NO 60246
atggatcttgccccagaggagcttcaatttctcaacaaaagaggaattctacgtgaatcaacatcaatcccacaatattctctaaaaaccttttacctcataaccctaaccctaattttccctctctccttcgcaatcctagcccattctctcttcacacaaccaatcttagctcagatcgatacatacccacaagccgatcaatctcaactccaacatgaatggaccgtcctcctcgttttccaattctgctacatcatcttcctcttcgccttctctcttctctccacagccgccgttgtcttcaccgtcgcttctctttacaccggaaagcctgtttctttctcctccacaatgtcagcgatacctctcgtcctcaaaagattgttcataacattcctctgggtctctcttttgatgcttgcgtacaacaccgtgttcttgatcttcttggtcacgttaatcgtagctgttgatttacagaacgtggttttagctgtgttttcgttggtagtgatctttgttctgtttcttgtagttcatgtttatatgacagctttgtggcatttagctagtgtagtctctgttcttgaaccgatttacggtttggctgcgatgaagaagagttatgagttgcttaaagggaagactcttatggcttgttcgatggttttcatctatcttgttcattgtggattcattgctggagtttttggagcagtggtggttcgtggtggtgatgattacggaattttcgctagaatcgtcgctggtggattcttgagtgtgttttactatgtttgcaagagttttcatcatcaggagattgataaatccgctttgcacgatcatctcggtgggtatctcggtgaatatgtgcctcttaagagcaacattcaaatggagaactttgaagtttga

SEQ ID NO: 69620 - protein, 306 aa, Arabidopsis thaliana
  peptide (1)..(306): Ceres Seq. ID no. 1820485
MDLAPEELQFLNKRGILRESTSIPQYSLKTFYLITLTLIFPLSFAILAHSLFTQPILAQIDTYPQADQSQLQHEWTVLLVFQFCYIIFLFAFSLLSTAAVVFTVASLYTGKPVSFSSTMSAIPLVLKRLFITFLWVSLLMLAYNTVFLIFLVTLIVAVDLQNVVLAVFSLVVIFVLFLVVHVYMTALWHLASVVSVLEPIYGLAAMKKSYELLKGKTLMACSMVFIYLVHCGFIAGVFGAVVVRGGDDYGIFARIVAGGFLSVFYYVCKSFHHQEIDKSALHDHLGGYLGEYVPLKSNIQMENFEV

SEQ ID NO: 69621 - protein, 188 aa, Arabidopsis thaliana
  peptide (1)..(188): Ceres Seq. ID no. 1820486
MSAIPLVLKRLFITFLWVSLLMLAYNTVFLIFLVTLIVAVDLQNVVLAVFSLVVIFVLFLVVHVYMTALWHLASVVSVLEPIYGLAAMKKSYELLKGKTLMACSMVFIYLVHCGFIAGVFGAVVVRGGDDYGIFARIVAGGFLSVFYYVCKSFHHQEIDKSALHDHLGGYLGEYVPLKSNIQMENFEV

SEQ ID NO: 69622 - protein, 167 aa, Arabidopsis thaliana
  peptide (1)..(167): Ceres Seq. ID no. 1820487
MLAYNTVFLIFLVTLIVAVDLQNVVLAVFSLVVIFVLFLVVHVYMTALWHLASVVSVLEPIYGLAAMKKSYELLKGKTLMACSMVFIYLVHCGFIAGVFGAVVVRGGDDYGIFARIVAGGFLSVFYYVCKSFHHQEIDKSALHDHLGGYLGEYVPLKSNIQMENFEV

SEQ ID NO: 69623 - DNA, 2679 bp, Arabidopsis thaliana
  misc_feature (1)..(2679): Ceres Seq. ID no. 1820499
  misc_feature (1)..(2679): Ortholog of  Ceres SEQ ID NO 13584744 as cited in SEQ ID NO 69137
atggccaaggccaagcaggttcgtttcatcagcatagattgtgggtcaccccctaatattaactatgtagacactgatactggtatcagttacacctgggatgcacctttcatcaacgctggagtaaatctgaacgtctctgaagaatacggttacccgaaaaacccggttttgcctttcccgcttgctgatgtaagatcttttcctcaaggaaacaggaactgttacaccttaaccccctccgatggaaaagggaatctttatctcatcagagcttcgtttatgtatggaaactacgatggtaaaaatgctttacctgagtttgatctctacgtaaacgtgaatttctggacctcggtgaaactcagaaatgcttctgagaacgtcatcaaggagatcctcagctttgcagagtcagatacaatatatgtttgccttgtgaacaaaggtaaaggaactccttttatttcagcgttggagcttcgaccaatgaacagctccatctatggaactgagtttggaagaaatgtctcattggtactctatcaaagatgggatacaggatatttgaatggaacaggacggtaccaaaaggatacatatgatcgtatttggtctccgtactctccagtgtcttggaatacaactatgactactgggtatatcgatatttttcagtctggttataggccaccagatgaagttattaagacagctgcttcgcctaaaagtgacgatgaaccattggaactgtcttggacatcaagcgatccagatactcggttttatgcgtacctttattttgcagaacttgaaaatctcaagaggaatgagagcagagaaatcaagatattctggaatgggtcgcctgtttcaggagcttttaacccctctcctgagtattcaatgacagtgtctaactcacgagctttcactggtaaagatcactggatttctgttcagaagaccgcagagtcaacgcgtccaccaatactcaatgctattgagattttttcagcacaatctctggatgaattttacaccagaattgacgatgttcaagccatagaaagcataaaatcaacgtataaagtgaataagatttggactggtgatccttgctctcccagactcttcccttgggaagttttgctgatgagcttgtttctgtattttgctgcgagaagaaatcttagttcaagtggattacatggaccaatagcgttcgcatttagaaatctctcccttcttgagtcattggatttatcaaacaacaacctcaaaggaattgtgccggaatttttggctgatctaaaatatctgaagtccctgaatttgaaaggaaataacttgactgggtttatcccaagatctcttaggaaaagagcaacggctaatggacttgcactcagtgtcgatgaacaaaacatttgtcactcacgttcatgtcgggacgggaacagaatcatggtgccaatagttgtatccacattagtgattattctcattgccgccttggctatcatatgcatcatgcgaagggaaagcaaaataatgtattcaggagcatattcaggaccacttctgccttcgggaaagagaaggttcacatatagtgaagtctctagtattacaaacaacttcaataaagtgattggtaaaggagggtttggtattgtgtaccttggttcccttgaagatggaactgaaattgctgtaaagatgatcaacgattcttcttttggaaaatctaaaggatcttcatcatcatcatcatcatcccaggtctccaaagaattccaagtcgaggcggagcttcttttgacagtccatcaccggaacttagcttcgtttgttggatactgcgatgatggtcgcagtatggctctcatctacgagtacatggccaatggcaacttgcaagattatctttcaagtgagaatgcagaggatcttagttgggaaaagagactccatatagccatagactctgcacaagggttggagtatcttcatcatggctgcaggccaccaatagtacacagagacgttaaaacagcaaacattcttttaaacgataacttggaagccaagatcgctgatttcgggctttctaaggtcttccctgaggatgatctcagccacgttgtgactgctgtcatgggcactcctggctatgtcgatcctgagtactacaacacgtttaagctaaacgagaagagcgacgtgtacagctttgggatcgtcctccttgaactcataaccggcaagagatccataatgaaaactgacgacggagaaaaaatgaacgttgttcactacgtcgagcctttcctcaaaatgggagacatagatggtgtcgtggatccacggcttcacggcgacttctcctcaaactcggcttggaaatttgtggaagtggcaatgtcttgcgtcagagacagaggaaccaacagaccaaacacaaaccagatcgtgtctgacttgaaacagtgcttagctgccgagctagctcgtgagccaaaaagcaatcatgagaagaaggaagtagtgaaagagaagtacacgaagaccaagtcgacggttcagaattatagcagcaatgaatataatagctcatctggatcggtttcactttcttttggagattactccacgtttggcccaatggcaaggtag

SEQ ID NO: 69624 - protein, 892 aa, Arabidopsis thaliana
  peptide (1)..(892): Ceres Seq. ID no. 1820500
MAKAKQVRFISIDCGSPPNINYVDTDTGISYTWDAPFINAGVNLNVSEEYGYPKNPVLPFPLADVRSFPQGNRNCYTLTPSDGKGNLYLIRASFMYGNYDGKNALPEFDLYVNVNFWTSVKLRNASENVIKEILSFAESDTIYVCLVNKGKGTPFISALELRPMNSSIYGTEFGRNVSLVLYQRWDTGYLNGTGRYQKDTYDRIWSPYSPVSWNTTMTTGYIDIFQSGYRPPDEVIKTAASPKSDDEPLELSWTSSDPDTRFYAYLYFAELENLKRNESREIKIFWNGSPVSGAFNPSPEYSMTVSNSRAFTGKDHWISVQKTAESTRPPILNAIEIFSAQSLDEFYTRIDDVQAIESIKSTYKVNKIWTGDPCSPRLFPWEVLLMSLFLYFAARRNLSSSGLHGPIAFAFRNLSLLESLDLSNNNLKGIVPEFLADLKYLKSLNLKGNNLTGFIPRSLRKRATANGLALSVDEQNICHSRSCRDGNRIMVPIVVSTLVIILIAALAIICIMRRESKIMYSGAYSGPLLPSGKRRFTYSEVSSITNNFNKVIGKGGFGIVYLGSLEDGTEIAVKMINDSSFGKSKGSSSSSSSSQVSKEFQVEAELLLTVHHRNLASFVGYCDDGRSMALIYEYMANGNLQDYLSSENAEDLSWEKRLHIAIDSAQGLEYLHHGCRPPIVHRDVKTANILLNDNLEAKIADFGLSKVFPEDDLSHVVTAVMGTPGYVDPEYYNTFKLNEKSDVYSFGIVLLELITGKRSIMKTDDGEKMNVVHYVEPFLKMGDIDGVVDPRLHGDFSSNSAWKFVEVAMSCVRDRGTNRPNTNQIVSDLKQCLAAELAREPKSNHEKKEVVKEKYTKTKSTVQNYSSNEYNSSSGSVSLSFGDYSTFGPMAR

SEQ ID NO: 69625 - protein, 798 aa, Arabidopsis thaliana
  peptide (1)..(798): Ceres Seq. ID no. 1820501
MYGNYDGKNALPEFDLYVNVNFWTSVKLRNASENVIKEILSFAESDTIYVCLVNKGKGTPFISALELRPMNSSIYGTEFGRNVSLVLYQRWDTGYLNGTGRYQKDTYDRIWSPYSPVSWNTTMTTGYIDIFQSGYRPPDEVIKTAASPKSDDEPLELSWTSSDPDTRFYAYLYFAELENLKRNESREIKIFWNGSPVSGAFNPSPEYSMTVSNSRAFTGKDHWISVQKTAESTRPPILNAIEIFSAQSLDEFYTRIDDVQAIESIKSTYKVNKIWTGDPCSPRLFPWEVLLMSLFLYFAARRNLSSSGLHGPIAFAFRNLSLLESLDLSNNNLKGIVPEFLADLKYLKSLNLKGNNLTGFIPRSLRKRATANGLALSVDEQNICHSRSCRDGNRIMVPIVVSTLVIILIAALAIICIMRRESKIMYSGAYSGPLLPSGKRRFTYSEVSSITNNFNKVIGKGGFGIVYLGSLEDGTEIAVKMINDSSFGKSKGSSSSSSSSQVSKEFQVEAELLLTVHHRNLASFVGYCDDGRSMALIYEYMANGNLQDYLSSENAEDLSWEKRLHIAIDSAQGLEYLHHGCRPPIVHRDVKTANILLNDNLEAKIADFGLSKVFPEDDLSHVVTAVMGTPGYVDPEYYNTFKLNEKSDVYSFGIVLLELITGKRSIMKTDDGEKMNVVHYVEPFLKMGDIDGVVDPRLHGDFSSNSAWKFVEVAMSCVRDRGTNRPNTNQIVSDLKQCLAAELAREPKSNHEKKEVVKEKYTKTKSTVQNYSSNEYNSSSGSVSLSFGDYSTFGPMAR

SEQ ID NO: 69626 - protein, 729 aa, Arabidopsis thaliana
  peptide (1)..(729): Ceres Seq. ID no. 1820502
MNSSIYGTEFGRNVSLVLYQRWDTGYLNGTGRYQKDTYDRIWSPYSPVSWNTTMTTGYIDIFQSGYRPPDEVIKTAASPKSDDEPLELSWTSSDPDTRFYAYLYFAELENLKRNESREIKIFWNGSPVSGAFNPSPEYSMTVSNSRAFTGKDHWISVQKTAESTRPPILNAIEIFSAQSLDEFYTRIDDVQAIESIKSTYKVNKIWTGDPCSPRLFPWEVLLMSLFLYFAARRNLSSSGLHGPIAFAFRNLSLLESLDLSNNNLKGIVPEFLADLKYLKSLNLKGNNLTGFIPRSLRKRATANGLALSVDEQNICHSRSCRDGNRIMVPIVVSTLVIILIAALAIICIMRRESKIMYSGAYSGPLLPSGKRRFTYSEVSSITNNFNKVIGKGGFGIVYLGSLEDGTEIAVKMINDSSFGKSKGSSSSSSSSQVSKEFQVEAELLLTVHHRNLASFVGYCDDGRSMALIYEYMANGNLQDYLSSENAEDLSWEKRLHIAIDSAQGLEYLHHGCRPPIVHRDVKTANILLNDNLEAKIADFGLSKVFPEDDLSHVVTAVMGTPGYVDPEYYNTFKLNEKSDVYSFGIVLLELITGKRSIMKTDDGEKMNVVHYVEPFLKMGDIDGVVDPRLHGDFSSNSAWKFVEVAMSCVRDRGTNRPNTNQIVSDLKQCLAAELAREPKSNHEKKEVVKEKYTKTKSTVQNYSSNEYNSSSGSVSLSFGDYSTFGPMAR

SEQ ID NO: 69627 - DNA, 1116 bp, Arabidopsis thaliana
  misc_feature (1)..(1116): Ceres Seq. ID no. 1820842
  misc_feature (1)..(1116): Ortholog of  Ceres SEQ ID NO 15175496 as cited in SEQ ID NO 56127
  misc_feature (1)..(1116): Ortholog of  Ceres SEQ ID NO 13596474 as cited in SEQ ID NO 62169
  misc_feature (1)..(1116): Ortholog of  Ceres SEQ ID NO 13596969 as cited in SEQ ID NO 63375
  misc_feature (1)..(1116): Ortholog of  Ceres SEQ ID NO 13597519 as cited in SEQ ID NO 64759
  misc_feature (1)..(1116): Ortholog of  Ceres SEQ ID NO 13597870 as cited in SEQ ID NO 64982
  misc_feature (1)..(1116): Ortholog of  Ceres SEQ ID NO 13656123 as cited in SEQ ID NO 65212
  misc_feature (1)..(1116): Ortholog of  Ceres SEQ ID NO 13595926 as cited in SEQ ID NO 67778
atgtctgtctctattccggtcttaatgaagagactttgtctgtataactctctctctctctttctttttcacctctttccctcaccctctctggctctctcattctctgttgagttgaacttactaaaagcacaaatggtttgggcaaatgctaagatgaggctagctttgtctcttgttacggttttcttcggcatctctcttgctaatcttgaagtcggattttactccaatacatgccctcaagccgagtcaatcgttaagagggttgtctcaggggctgctctttccgaccctaacctcccagccatacttctacggctccatttccatgattgctttgttgagggatgtgatggctcgatcctcgtgaacaacggagcaatctctgaaaagaatgcatttggacatgaaggcgttagaggatttgagatagtagaagccgtcaaagccgagcttgaagctgcatgccccggtgttgtctcctgctcagacattgttgccttggctgcacgtgatgccatatctttggcgaatggaccggcgtatgaggtgccaactgggcggagagatggtcgggtttcgaacatgtcattggctaaggacatgccggaggtgagtgactcgattgagatactaaaggctaagttcatgcagaaaggactcaacgccaaagacctcgtgcttctcagtgctgctcacactatcggaacaacggcctgcttcttcatgtccaaacggctctatgatttcttacctggtggccaacctgacccgactatcaatccaacattcctacccgaattaaccactcagtgcccacaaaatggtgacataaacgtccgtttaccaattgaccggttcagcgaacggctattcgacaagcagattctgcaaaacataaaggatggttttgctgtgcttcagaccgacgcaggtctttacgaggatgtaacgaccagacaggtcgtggattcctatcttgggatgctaaatccattctttgggccaacattcgagtctgatttcgttaaggcgatcgtaaagatggggaagattggtgtgaagactggtttcaaaggggagattcgacgggtttgctcggccttcaattga

SEQ ID NO: 69628 - protein, 371 aa, Arabidopsis thaliana
  peptide (1)..(371): Ceres Seq. ID no. 1820843
MSVSIPVLMKRLCLYNSLSLFLFHLFPSPSLALSFSVELNLLKAQMVWANAKMRLALSLVTVFFGISLANLEVGFYSNTCPQAESIVKRVVSGAALSDPNLPAILLRLHFHDCFVEGCDGSILVNNGAISEKNAFGHEGVRGFEIVEAVKAELEAACPGVVSCSDIVALAARDAISLANGPAYEVPTGRRDGRVSNMSLAKDMPEVSDSIEILKAKFMQKGLNAKDLVLLSAAHTIGTTACFFMSKRLYDFLPGGQPDPTINPTFLPELTTQCPQNGDINVRLPIDRFSERLFDKQILQNIKDGFAVLQTDAGLYEDVTTRQVVDSYLGMLNPFFGPTFESDFVKAIVKMGKIGVKTGFKGEIRRVCSAFN

SEQ ID NO: 69629 - protein, 363 aa, Arabidopsis thaliana
  peptide (1)..(363): Ceres Seq. ID no. 1820844
MKRLCLYNSLSLFLFHLFPSPSLALSFSVELNLLKAQMVWANAKMRLALSLVTVFFGISLANLEVGFYSNTCPQAESIVKRVVSGAALSDPNLPAILLRLHFHDCFVEGCDGSILVNNGAISEKNAFGHEGVRGFEIVEAVKAELEAACPGVVSCSDIVALAARDAISLANGPAYEVPTGRRDGRVSNMSLAKDMPEVSDSIEILKAKFMQKGLNAKDLVLLSAAHTIGTTACFFMSKRLYDFLPGGQPDPTINPTFLPELTTQCPQNGDINVRLPIDRFSERLFDKQILQNIKDGFAVLQTDAGLYEDVTTRQVVDSYLGMLNPFFGPTFESDFVKAIVKMGKIGVKTGFKGEIRRVCSAFN

SEQ ID NO: 69630 - protein, 326 aa, Arabidopsis thaliana
  peptide (1)..(326): Ceres Seq. ID no. 1820845
MVWANAKMRLALSLVTVFFGISLANLEVGFYSNTCPQAESIVKRVVSGAALSDPNLPAILLRLHFHDCFVEGCDGSILVNNGAISEKNAFGHEGVRGFEIVEAVKAELEAACPGVVSCSDIVALAARDAISLANGPAYEVPTGRRDGRVSNMSLAKDMPEVSDSIEILKAKFMQKGLNAKDLVLLSAAHTIGTTACFFMSKRLYDFLPGGQPDPTINPTFLPELTTQCPQNGDINVRLPIDRFSERLFDKQILQNIKDGFAVLQTDAGLYEDVTTRQVVDSYLGMLNPFFGPTFESDFVKAIVKMGKIGVKTGFKGEIRRVCSAFN

SEQ ID NO: 69631 - DNA, 1680 bp, Arabidopsis thaliana
  misc_feature (1)..(1680): Ceres Seq. ID no. 1820945
  misc_feature (1)..(1680): Ortholog of  Ceres SEQ ID NO 12586556 as cited in SEQ ID NO 64667
  misc_feature (1)..(1680): Ortholog of  Ceres SEQ ID NO 13660894 as cited in SEQ ID NO 67475
atgtatttgccggagaaatcagttcttctggaattgatcagccgatgcagctctcttcgcgttttcaaacagatacagactcaattgattactcgtgatcttcttcgtgatgacttaatcatcaacaaagtcgtgacctttctgggcaaatccgcagattttgcatcttacagctctgtaattctccacagtatccgttctgtgttgagctctttctcatacaacacgcttttatcaagctatgcagtttgtgataaaccaagagtgacgatttttgcttacaaaacatttgtgagtaatgggttttcaccggacatgttcacgtttcctccagtttttaaggcttgtgggaagttttcagggatcagagaagggaaacagattcatggaattgttacgaagatgggtttttacgatgatatctatgtgcaaaactcgcttgttcatttttatggtgtgtgtggagaatcaaggaatgcatgtaaagtgttcggtgaaatgcctgtgagagatgttgtttcgtggactgggattataactggtttcacgaggactgggttgtataaggaagctttggatacgttttcaaagatggatgttgagcctaatttggctacgtatgtttgtgtattggtctcaagtgggcgggtagggtgtttaagtttagggaaaggaatccatgggttgatcttaaaaagggcatctttgatcagcttagagactggtaatgctcttatagatatgtatgtgaaatgtgagcaattgtctgatgcgatgagagtttttggtgagttggaaaagaaagataaagtttcttggaatagtatgattagtgggttggttcactgtgaaagatctaaggaggcgattgacttgttttctctgatgcaaacgtcttctggtataaagccagatgggcatatacttacaagtgttctctctgcgtgtgctagcttaggagctgtggatcacggaagatgggttcatgagtatattttaaccgctggaatcaaatgggatacgcatattggaactgccattgttgatatgtatgcaaaatgtggctacatcgaaacagctttggagattttcaacggaattagaagtaagaatgtgtttacttggaatgctctgttaggtggtttagctatccatgggcatggacttgaatcccttagatactttgaagaaatggttaagctaggttttaagccgaacctggtaacttttctcgcggctctaaatgcttgttgccacacaggtttagtcgatgaagggagaagatatttccataaaatgaaaagcagagaatacaatctatttcctaagctagaacattatggatgcatgattgatttgctttgtagagctggattgttagatgaagcattggaactcgtcaaagcaatgccggttaaaccggatgtacgtatatgtggagctattcttagtgcttgtaagaatagagggacattaatggagcttcctaaagagatattagatagttttttagatattgagtttgaagatagtggtgtttatgtgttgctgtctaatatttttgctgctaatagaagatgggatgatgttgcgagaatcaggaggttgatgaaggtaaaaggtatctcgaaggttccaggatcaagttatatagagaagtttatgactttagaccaatga

SEQ ID NO: 69632 - protein, 559 aa, Arabidopsis thaliana
  peptide (1)..(559): Ceres Seq. ID no. 1820946
MYLPEKSVLLELISRCSSLRVFKQIQTQLITRDLLRDDLIINKVVTFLGKSADFASYSSVILHSIRSVLSSFSYNTLLSSYAVCDKPRVTIFAYKTFVSNGFSPDMFTFPPVFKACGKFSGIREGKQIHGIVTKMGFYDDIYVQNSLVHFYGVCGESRNACKVFGEMPVRDVVSWTGIITGFTRTGLYKEALDTFSKMDVEPNLATYVCVLVSSGRVGCLSLGKGIHGLILKRASLISLETGNALIDMYVKCEQLSDAMRVFGELEKKDKVSWNSMISGLVHCERSKEAIDLFSLMQTSSGIKPDGHILTSVLSACASLGAVDHGRWVHEYILTAGIKWDTHIGTAIVDMYAKCGYIETALEIFNGIRSKNVFTWNALLGGLAIHGHGLESLRYFEEMVKLGFKPNLVTFLAALNACCHTGLVDEGRRYFHKMKSREYNLFPKLEHYGCMIDLLCRAGLLDEALELVKAMPVKPDVRICGAILSACKNRGTLMELPKEILDSFLDIEFEDSGVYVLLSNIFAANRRWDDVARIRRLMKVKGISKVPGSSYIEKFMTLDQ

SEQ ID NO: 69633 - protein, 454 aa, Arabidopsis thaliana
  peptide (1)..(454): Ceres Seq. ID no. 1820947
MFTFPPVFKACGKFSGIREGKQIHGIVTKMGFYDDIYVQNSLVHFYGVCGESRNACKVFGEMPVRDVVSWTGIITGFTRTGLYKEALDTFSKMDVEPNLATYVCVLVSSGRVGCLSLGKGIHGLILKRASLISLETGNALIDMYVKCEQLSDAMRVFGELEKKDKVSWNSMISGLVHCERSKEAIDLFSLMQTSSGIKPDGHILTSVLSACASLGAVDHGRWVHEYILTAGIKWDTHIGTAIVDMYAKCGYIETALEIFNGIRSKNVFTWNALLGGLAIHGHGLESLRYFEEMVKLGFKPNLVTFLAALNACCHTGLVDEGRRYFHKMKSREYNLFPKLEHYGCMIDLLCRAGLLDEALELVKAMPVKPDVRICGAILSACKNRGTLMELPKEILDSFLDIEFEDSGVYVLLSNIFAANRRWDDVARIRRLMKVKGISKVPGSSYIEKFMTLDQ

SEQ ID NO: 69634 - protein, 425 aa, Arabidopsis thaliana
  peptide (1)..(425): Ceres Seq. ID no. 1820948
MGFYDDIYVQNSLVHFYGVCGESRNACKVFGEMPVRDVVSWTGIITGFTRTGLYKEALDTFSKMDVEPNLATYVCVLVSSGRVGCLSLGKGIHGLILKRASLISLETGNALIDMYVKCEQLSDAMRVFGELEKKDKVSWNSMISGLVHCERSKEAIDLFSLMQTSSGIKPDGHILTSVLSACASLGAVDHGRWVHEYILTAGIKWDTHIGTAIVDMYAKCGYIETALEIFNGIRSKNVFTWNALLGGLAIHGHGLESLRYFEEMVKLGFKPNLVTFLAALNACCHTGLVDEGRRYFHKMKSREYNLFPKLEHYGCMIDLLCRAGLLDEALELVKAMPVKPDVRICGAILSACKNRGTLMELPKEILDSFLDIEFEDSGVYVLLSNIFAANRRWDDVARIRRLMKVKGISKVPGSSYIEKFMTLDQ

SEQ ID NO: 69635 - DNA, 1947 bp, Arabidopsis thaliana
  misc_feature (1)..(1947): Ceres Seq. ID no. 1821173
  misc_feature (1)..(1947): Ortholog of  Ceres SEQ ID NO 15180683 as cited in SEQ ID NO 0
atgcctttactattcctctggtttttcctcacgagcactagtcttgtctctgcacttcaaactcttccatgcataaacacaacctactttatacctaattcgacttacgacacaaaccgtcgcgttattctctcattgcttccttctaatgtcacatcacactttggcttcttcaacggttcaataggtcaagctcctaacagagtatatgccgtaggcatgtgtcttccaggtactgaagaagagagttgcataggttgtctcttgtctgcttccaatacattattagaaacctgcctcaccgaagaaaatgctcttatctggatcgcaaacagaactatttgtatgatccgatactccgatacttcctttgttggttcgttcgagttagagccgcatcgtgaattcctcagtattcatggttacaaaacgaatgaaacagaattcaatacagtatggagtagattaactcaacgtatggtacaagaagcttcctcaagcacagatgcaacatggtctggtgctaagtactatacagctgatgtagccgccttgcctgattcgcagactctctatgcaatgatgcaatgcactcctgatttgtctccggctgagtgtaatctctgtttaacagaaagcgttgttaactatcagagttgttgccttggacgtcaaggcggctctatcgttaggctaagttgcgctttccgggcagagttatatccatttggtggagcttttactgttatgacagcaagacctttgtcacaacctccaccgtcattaatcaagaaaggtgaattctttgcaaaatttatgagtaattcacaagaacctcggaaagttttcaacggaaactattgctgcaattgttgttcccattatagtggtcgctatcatcttcttgctggtattacgactctacacttccaacaactcgattttaagacaattgaagttgcaactgaaaattttgcaaagactaacaagctaggtcaaggtggatttggagaagtttacaagggcacgttagttaatggaacagaagttgcagtgaagaggctatcgaaaacatccgaacaaggtgcacaagagttcaagaacgaggttgttcttgtcgccaaacttcagcataggaatcttgttaagcttcttgggtactgtctggaaccagaggagaaaatacttgtttacgagtttgtccccaacaagagcctagactacttcctttttgatcctacaaagcaagggcagttagactggacaaaacgatacaacattatcggaggaatcactcgaggaattctatatcttcatcaagattcacgactaacaatcatacaccgtgatctcaaagccagcaacattcttctagatgccgatatgatcccgaaaatcgctgattttggaatggcgaggatatctggaatagaccaaagtgtagctaacacaaaaaggatagctggaactttcggttacatgcctccagaatacgtgatccatggccagttctcgatgaaatctgatgtctatagcttcggtgttttgattcttgagattatatgtggcaagaagaatagaagcttttaccaagcagatactaaagctgaaaatttggtcacctatgtttggaggttgtggacaaacggatcaccattagagctcgtggatctaaccatatcagagaattgtcaaacagaagaagttataagatgcatccacatcgcactcctatgtgttcaagaagatcctaaagatcgtcccaacttgtcaacaatcatgatgatgctcactaacagttccctcattttatctgttcctcaaccacctggattctttgttccgcaaaacaaagaacgtgatagctttttgtcgagccaatttacaatgggatgtacttctcagactaaaaatgatgtaaccattacaaatctagatcctcgttga

SEQ ID NO: 69636 - protein, 648 aa, Arabidopsis thaliana
  peptide (1)..(648): Ceres Seq. ID no. 1821174
MPLLFLWFFLTSTSLVSALQTLPCINTTYFIPNSTYDTNRRVILSLLPSNVTSHFGFFNGSIGQAPNRVYAVGMCLPGTEEESCIGCLLSASNTLLETCLTEENALIWIANRTICMIRYSDTSFVGSFELEPHREFLSIHGYKTNETEFNTVWSRLTQRMVQEASSSTDATWSGAKYYTADVAALPDSQTLYAMMQCTPDLSPAECNLCLTESVVNYQSCCLGRQGGSIVRLSCAFRAELYPFGGAFTVMTARPLSQPPPSLIKKGEFFAKFMSNSQEPRKVFNGNYCCNCCSHYSGRYHLLAGITTLHFQQLDFKTIEVATENFAKTNKLGQGGFGEVYKGTLVNGTEVAVKRLSKTSEQGAQEFKNEVVLVAKLQHRNLVKLLGYCLEPEEKILVYEFVPNKSLDYFLFDPTKQGQLDWTKRYNIIGGITRGILYLHQDSRLTIIHRDLKASNILLDADMIPKIADFGMARISGIDQSVANTKRIAGTFGYMPPEYVIHGQFSMKSDVYSFGVLILEIICGKKNRSFYQADTKAENLVTYVWRLWTNGSPLELVDLTISENCQTEEVIRCIHIALLCVQEDPKDRPNLSTIMMMLTNSSLILSVPQPPGFFVPQNKERDSFLSSQFTMGCTSQTKNDVTITNLDPR

SEQ ID NO: 69637 - protein, 575 aa, Arabidopsis thaliana
  peptide (1)..(575): Ceres Seq. ID no. 1821175
MCLPGTEEESCIGCLLSASNTLLETCLTEENALIWIANRTICMIRYSDTSFVGSFELEPHREFLSIHGYKTNETEFNTVWSRLTQRMVQEASSSTDATWSGAKYYTADVAALPDSQTLYAMMQCTPDLSPAECNLCLTESVVNYQSCCLGRQGGSIVRLSCAFRAELYPFGGAFTVMTARPLSQPPPSLIKKGEFFAKFMSNSQEPRKVFNGNYCCNCCSHYSGRYHLLAGITTLHFQQLDFKTIEVATENFAKTNKLGQGGFGEVYKGTLVNGTEVAVKRLSKTSEQGAQEFKNEVVLVAKLQHRNLVKLLGYCLEPEEKILVYEFVPNKSLDYFLFDPTKQGQLDWTKRYNIIGGITRGILYLHQDSRLTIIHRDLKASNILLDADMIPKIADFGMARISGIDQSVANTKRIAGTFGYMPPEYVIHGQFSMKSDVYSFGVLILEIICGKKNRSFYQADTKAENLVTYVWRLWTNGSPLELVDLTISENCQTEEVIRCIHIALLCVQEDPKDRPNLSTIMMMLTNSSLILSVPQPPGFFVPQNKERDSFLSSQFTMGCTSQTKNDVTITNLDPR

SEQ ID NO: 69638 - protein, 533 aa, Arabidopsis thaliana
  peptide (1)..(533): Ceres Seq. ID no. 1821176
MIRYSDTSFVGSFELEPHREFLSIHGYKTNETEFNTVWSRLTQRMVQEASSSTDATWSGAKYYTADVAALPDSQTLYAMMQCTPDLSPAECNLCLTESVVNYQSCCLGRQGGSIVRLSCAFRAELYPFGGAFTVMTARPLSQPPPSLIKKGEFFAKFMSNSQEPRKVFNGNYCCNCCSHYSGRYHLLAGITTLHFQQLDFKTIEVATENFAKTNKLGQGGFGEVYKGTLVNGTEVAVKRLSKTSEQGAQEFKNEVVLVAKLQHRNLVKLLGYCLEPEEKILVYEFVPNKSLDYFLFDPTKQGQLDWTKRYNIIGGITRGILYLHQDSRLTIIHRDLKASNILLDADMIPKIADFGMARISGIDQSVANTKRIAGTFGYMPPEYVIHGQFSMKSDVYSFGVLILEIICGKKNRSFYQADTKAENLVTYVWRLWTNGSPLELVDLTISENCQTEEVIRCIHIALLCVQEDPKDRPNLSTIMMMLTNSSLILSVPQPPGFFVPQNKERDSFLSSQFTMGCTSQTKNDVTITNLDPR

SEQ ID NO: 69639 - DNA, 3723 bp, Arabidopsis thaliana
  misc_feature (1)..(3723): Ceres Seq. ID no. 1821185
  misc_feature (1)..(3723): Ortholog of  Ceres SEQ ID NO 14312351 as cited in SEQ ID NO 55278
  misc_feature (1)..(3723): Ortholog of  Ceres SEQ ID NO 13655237 as cited in SEQ ID NO 62892
atggtatctgatgcagatgcttccacatcttcatcttccattgatattatgccttctgctaatattcaaaatgatgtccctgaaccttctgttcacacatcgcataggagaacacgaaagcctgcttatcttcaagattactactgtcattcagtagcttctttaaccattcatgatatttcccagtttctctcttatgaaaaagtttctccactttaccattctttcttggtttgtattgccaaagctaaagaaccctcaacctacaatgaagcgaaagaatttcttgtgtggtgtggtgctatggatgatgaaattggtgcaatggagactactcacacttgggaaatctgtactctacctcccaataagaagcctattggttgcaaatgggtgtataagataaaatacaactcggatggcaccattgaacgttataaggcacggttggttgccaagggttacacacagcaggaaggtatcgattttattgagactttctctccagtctgcaaactcacatctgtcaagctcattcttgcgatctctgccatctataattttactcttcatcaactggacatttccaatgcgttccttaatggtgatttggatgaagagatctatatgaagcttcctcctggatatgctgctagacagggggactctctccctcccaatgctgtgtgttacctcaagaagtccatttatgggcttaaacaagcctccagacaatggtttttaaagttttctgttacactcattggttttggttttgtgcagtcccattctgaccatacctacttcttgaagatcactgctacacttttcttatgtgtcttagtgtatgttgacgacatcatcatttgcagtaacaatgatgcagctgttgatgagttgaagtcccagctgaaaagttgttttaaactcagggatcttggccctttgaaatactttcttggcttagaaattgctagatccgctgctggcattaacatttgtcaaagaaagtatgcattggatcttttggatgaaacaggtctcttgggttgtaagccgtctagtgttcctatggatcccagcgtcactttctctgctcattcaggtggtgactttgtggatgctaaagcttacagacgtctcattggtcgcctcatgtatcttcagattactcgtcttgacatcagctttgcagtcaacaagctcagtcaattctctgaagctcctcgccttgcacatcaacaggctgtcatgaagattctgcattacattaaaggcactgttggtcaaggtctgttttattcttctcaagctgaaatgcaacttcaagttttctctgatgcttcatttcagtcatgcaaggacactagacgctctacaaatggttattgtatgtttttgggaacttctctcatttcctggaaatccaagaagcagcaggtggtctccaagtcttctgctgaagctgagtatcgtgctctctcttttgctacagatgagatgatgtggttagctcaattcttcagggaactccagcttcctctctccaagcctacacttctcttctgtgacaacactgcagcaattcacatcgccaccaatgcagttttccacgagcgcaccaaacacatcgaaagtgactgccacagcgttcgtgagagatccgtttaccaagccactctatcctactcctttcaagcttatgatgagcaagatgggtttacagagtatctttctcccatcttgagggggactattatgtatatagtttcaatgtttggtttagctggtttagaggctctgatctgtttcattttccttttccttttctcattcctcactagcttcaaagcttctgctcaaaatcctttttacctaaatcatgattgtccaaataggacaacttactcaagtaacagcacttactccaccaatctcaaaacccttttgtcctcttttgcttcccgcaacgcctcttactccaccggattccaaaacatcagggcgggacaaacccccgacagggtcaccggacttttcctttgtcgcggagacctatccccggaagtttgcagtaactgcgttgccttctccgttaacgaatcgttaactcggtgtccaaatcagagagaagctgtgttctattacgaagagtgcatactcagatactctcacaagaattttctatcgacagttacatacgaaggagaacttatcatgaggaaccccaataatatttcttctattcaaaatcaaagagaccagtttatagatttggttcaatctaatatgaaccaagctgccaatgaagcagccaacagttctagaaaattctctacgataaagaccgaattgacctcactccagactttgtatgggcttgttcaatgcactcctgatctcgcaagacaagattgctttagctgtctgacaagttccatcaatagaatgatgccactttttagaattggagcaagacagttttggccaagttgtaattcaaggtacgagctttacgcgttctacaacgaaaccgccattggaacaccatcaccaccaccactgtttccggggtctacgcctccgttgacatccccttcaatacctgctttagttggttattgtttccttgcacagagaacaaagaagacttttgacacagcatctgcatcggaggtaggagatgatatggcaaccgcagactcactacagctcgactatagaacaatccaaactgcaacaaatgattttgcagagagtaataagattggtcgaggtggttttggtgaggtttacaagggtacattttcaaatgggaaagaagttgcggtgaagagattgtcgaaaaattcaagacaaggcgaagcggagttcaagaccgaggttgttgtagttgccaagcttcaacacagaaatttggttaggcttcttggattttcattacaaggagaggaaagaattttggtctacgagtatatgcctaacaaaagccttgattgcttactatttgaccctacaaagcaaactcagctggactggatgcagcgatacaatatcattggaggaattgctcgggggattctatatcttcatcaagattcacggctcacaatcatacaccgtgaccttaaagcaagtaacattctcctagatgcggatataaatccgaaaattgcagattttggaatggctaggatcttcggattggaccaaacccaggataacacaagccgaatagttggtacctacggttacatggctcccgagtatgcgatgcatggccaattctcaatgaaatctgatgtctatagcttcggagtgttagttcttgagattataagtggtaggaagaatagtagcttcgacgagtcagacggcgcacaagacttgctcacacatacttggaggctttggactaacagaacagcattagacctcgtggatccacttatagcaaataactgccagaatagcgaagtggttcgatgcatccatatcggtcttttatgtgttcaagaagatcctgcaaagcgtccgacaatatcaaccgttttcatgatgctcactagtaatactgtgaccttaccagtgcctcggcaaccagggtttttcattcaaagtagtcccgtaaaggacccgactgattcagatcagtctaccacgaccaagtctactccagcatctattgacgatgaattgatcactgatttatatccgcgctaa

SEQ ID NO: 69640 - protein, 1240 aa, Arabidopsis thaliana
  peptide (1)..(1240): Ceres Seq. ID no. 1821186
MVSDADASTSSSSIDIMPSANIQNDVPEPSVHTSHRRTRKPAYLQDYYCHSVASLTIHDISQFLSYEKVSPLYHSFLVCIAKAKEPSTYNEAKEFLVWCGAMDDEIGAMETTHTWEICTLPPNKKPIGCKWVYKIKYNSDGTIERYKARLVAKGYTQQEGIDFIETFSPVCKLTSVKLILAISAIYNFTLHQLDISNAFLNGDLDEEIYMKLPPGYAARQGDSLPPNAVCYLKKSIYGLKQASRQWFLKFSVTLIGFGFVQSHSDHTYFLKITATLFLCVLVYVDDIIICSNNDAAVDELKSQLKSCFKLRDLGPLKYFLGLEIARSAAGINICQRKYALDLLDETGLLGCKPSSVPMDPSVTFSAHSGGDFVDAKAYRRLIGRLMYLQITRLDISFAVNKLSQFSEAPRLAHQQAVMKILHYIKGTVGQGLFYSSQAEMQLQVFSDASFQSCKDTRRSTNGYCMFLGTSLISWKSKKQQVVSKSSAEAEYRALSFATDEMMWLAQFFRELQLPLSKPTLLFCDNTAAIHIATNAVFHERTKHIESDCHSVRERSVYQATLSYSFQAYDEQDGFTEYLSPILRGTIMYIVSMFGLAGLEALICFIFLFLFSFLTSFKASAQNPFYLNHDCPNRTTYSSNSTYSTNLKTLLSSFASRNASYSTGFQNIRAGQTPDRVTGLFLCRGDLSPEVCSNCVAFSVNESLTRCPNQREAVFYYEECILRYSHKNFLSTVTYEGELIMRNPNNISSIQNQRDQFIDLVQSNMNQAANEAANSSRKFSTIKTELTSLQTLYGLVQCTPDLARQDCFSCLTSSINRMMPLFRIGARQFWPSCNSRYELYAFYNETAIGTPSPPPLFPGSTPPLTSPSIPALVGYCFLAQRTKKTFDTASASEVGDDMATADSLQLDYRTIQTATNDFAESNKIGRGGFGEVYKGTFSNGKEVAVKRLSKNSRQGEAEFKTEVVVVAKLQHRNLVRLLGFSLQGEERILVYEYMPNKSLDCLLFDPTKQTQLDWMQRYNIIGGIARGILYLHQDSRLTIIHRDLKASNILLDADINPKIADFGMARIFGLDQTQDNTSRIVGTYGYMAPEYAMHGQFSMKSDVYSFGVLVLEIISGRKNSSFDESDGAQDLLTHTWRLWTNRTALDLVDPLIANNCQNSEVVRCIHIGLLCVQEDPAKRPTISTVFMMLTSNTVTLPVPRQPGFFIQSSPVKDPTDSDQSTTTKSTPASIDDELITDLYPR

SEQ ID NO: 69641 - protein, 1224 aa, Arabidopsis thaliana
  peptide (1)..(1224): Ceres Seq. ID no. 1821187
MPSANIQNDVPEPSVHTSHRRTRKPAYLQDYYCHSVASLTIHDISQFLSYEKVSPLYHSFLVCIAKAKEPSTYNEAKEFLVWCGAMDDEIGAMETTHTWEICTLPPNKKPIGCKWVYKIKYNSDGTIERYKARLVAKGYTQQEGIDFIETFSPVCKLTSVKLILAISAIYNFTLHQLDISNAFLNGDLDEEIYMKLPPGYAARQGDSLPPNAVCYLKKSIYGLKQASRQWFLKFSVTLIGFGFVQSHSDHTYFLKITATLFLCVLVYVDDIIICSNNDAAVDELKSQLKSCFKLRDLGPLKYFLGLEIARSAAGINICQRKYALDLLDETGLLGCKPSSVPMDPSVTFSAHSGGDFVDAKAYRRLIGRLMYLQITRLDISFAVNKLSQFSEAPRLAHQQAVMKILHYIKGTVGQGLFYSSQAEMQLQVFSDASFQSCKDTRRSTNGYCMFLGTSLISWKSKKQQVVSKSSAEAEYRALSFATDEMMWLAQFFRELQLPLSKPTLLFCDNTAAIHIATNAVFHERTKHIESDCHSVRERSVYQATLSYSFQAYDEQDGFTEYLSPILRGTIMYIVSMFGLAGLEALICFIFLFLFSFLTSFKASAQNPFYLNHDCPNRTTYSSNSTYSTNLKTLLSSFASRNASYSTGFQNIRAGQTPDRVTGLFLCRGDLSPEVCSNCVAFSVNESLTRCPNQREAVFYYEECILRYSHKNFLSTVTYEGELIMRNPNNISSIQNQRDQFIDLVQSNMNQAANEAANSSRKFSTIKTELTSLQTLYGLVQCTPDLARQDCFSCLTSSINRMMPLFRIGARQFWPSCNSRYELYAFYNETAIGTPSPPPLFPGSTPPLTSPSIPALVGYCFLAQRTKKTFDTASASEVGDDMATADSLQLDYRTIQTATNDFAESNKIGRGGFGEVYKGTFSNGKEVAVKRLSKNSRQGEAEFKTEVVVVAKLQHRNLVRLLGFSLQGEERILVYEYMPNKSLDCLLFDPTKQTQLDWMQRYNIIGGIARGILYLHQDSRLTIIHRDLKASNILLDADINPKIADFGMARIFGLDQTQDNTSRIVGTYGYMAPEYAMHGQFSMKSDVYSFGVLVLEIISGRKNSSFDESDGAQDLLTHTWRLWTNRTALDLVDPLIANNCQNSEVVRCIHIGLLCVQEDPAKRPTISTVFMMLTSNTVTLPVPRQPGFFIQSSPVKDPTDSDQSTTTKSTPASIDDELITDLYPR

SEQ ID NO: 69642 - protein, 1139 aa, Arabidopsis thaliana
  peptide (1)..(1139): Ceres Seq. ID no. 1821188
MDDEIGAMETTHTWEICTLPPNKKPIGCKWVYKIKYNSDGTIERYKARLVAKGYTQQEGIDFIETFSPVCKLTSVKLILAISAIYNFTLHQLDISNAFLNGDLDEEIYMKLPPGYAARQGDSLPPNAVCYLKKSIYGLKQASRQWFLKFSVTLIGFGFVQSHSDHTYFLKITATLFLCVLVYVDDIIICSNNDAAVDELKSQLKSCFKLRDLGPLKYFLGLEIARSAAGINICQRKYALDLLDETGLLGCKPSSVPMDPSVTFSAHSGGDFVDAKAYRRLIGRLMYLQITRLDISFAVNKLSQFSEAPRLAHQQAVMKILHYIKGTVGQGLFYSSQAEMQLQVFSDASFQSCKDTRRSTNGYCMFLGTSLISWKSKKQQVVSKSSAEAEYRALSFATDEMMWLAQFFRELQLPLSKPTLLFCDNTAAIHIATNAVFHERTKHIESDCHSVRERSVYQATLSYSFQAYDEQDGFTEYLSPILRGTIMYIVSMFGLAGLEALICFIFLFLFSFLTSFKASAQNPFYLNHDCPNRTTYSSNSTYSTNLKTLLSSFASRNASYSTGFQNIRAGQTPDRVTGLFLCRGDLSPEVCSNCVAFSVNESLTRCPNQREAVFYYEECILRYSHKNFLSTVTYEGELIMRNPNNISSIQNQRDQFIDLVQSNMNQAANEAANSSRKFSTIKTELTSLQTLYGLVQCTPDLARQDCFSCLTSSINRMMPLFRIGARQFWPSCNSRYELYAFYNETAIGTPSPPPLFPGSTPPLTSPSIPALVGYCFLAQRTKKTFDTASASEVGDDMATADSLQLDYRTIQTATNDFAESNKIGRGGFGEVYKGTFSNGKEVAVKRLSKNSRQGEAEFKTEVVVVAKLQHRNLVRLLGFSLQGEERILVYEYMPNKSLDCLLFDPTKQTQLDWMQRYNIIGGIARGILYLHQDSRLTIIHRDLKASNILLDADINPKIADFGMARIFGLDQTQDNTSRIVGTYGYMAPEYAMHGQFSMKSDVYSFGVLVLEIISGRKNSSFDESDGAQDLLTHTWRLWTNRTALDLVDPLIANNCQNSEVVRCIHIGLLCVQEDPAKRPTISTVFMMLTSNTVTLPVPRQPGFFIQSSPVKDPTDSDQSTTTKSTPASIDDELITDLYPR

SEQ ID NO: 69643 - DNA, 327 bp, Arabidopsis thaliana
  misc_feature (1)..(327): Ceres Seq. ID no. 1821237
  misc_feature (1)..(327): Ortholog of  Ceres SEQ ID NO 12578784 as cited in SEQ ID NO 20729
atgggcagcaacacatgtggtggatgcggagaaagggcagtcagtaatgaggcagaaaggagcattatccaagatattgttacagcagtgattgtgactcgaagagaagatatatatttgacaggttatgagattttgatgggtttgctttatgggttaggagctctggtttatgcaactaggatcccagagagatggatgccgggtaaattcgatatagcaggacatagccatcagttgtttcatgttctggtagttgctggtgcgttcacgcactatagagctgggctagtgtatcttaagtggagagatattgaaggatgttga

SEQ ID NO: 69644 - protein, 108 aa, Arabidopsis thaliana
  peptide (1)..(108): Ceres Seq. ID no. 1821238
MGSNTCGGCGERAVSNEAERSIIQDIVTAVIVTRREDIYLTGYEILMGLLYGLGALVYATRIPERWMPGKFDIAGHSHQLFHVLVVAGAFTHYRAGLVYLKWRDIEGC

SEQ ID NO: 69645 - protein, 62 aa, Arabidopsis thaliana
  peptide (1)..(62): Ceres Seq. ID no. 1821239
MGLLYGLGALVYATRIPERWMPGKFDIAGHSHQLFHVLVVAGAFTHYRAGLVYLKWRDIEGC

SEQ ID NO: 69646 - DNA, 1203 bp, Arabidopsis thaliana
  misc_feature (1)..(1203): Ceres Seq. ID no. 1821317
  misc_feature (1)..(1203): Ortholog of  Ceres SEQ ID NO 15177336 as cited in SEQ ID NO 51374
atggaggtctcttaccaaaaccccattgaagcagcgactattccagtgcaaatagccgtcgctgagccagtcgctacacccaatcctcctccttgcctccacgagaacaaattcctcgtatctgtggaggtctgcttaaagccttcaagcacggctcgtctagaggatgtccagagagctgtagaacggtttgtatcacattttctcatctattataatggactggttttgattcctgcagacgacttgttcctagttgataatgtgcaaaggatatgcatttgtgatacagatggacaacctgctagctttaacgaatggattctacccgcaaaggagtttgatggcttatgggaaagcctaatatatgaatctggacttaagcaaaggttactacgttatgctgcgagtgcattgctgttcacccagaagggtgttaacccaaatctcgtttcatggaacaggattattcttttgcacggaccaccagggactggcaaaacatccctttgcaaagcgttggctcaaaagctttcaatccggtgcaactccagatatccacattgccaattgattgaagtcaatgctcactctctatttagtaaatggttctctgaaagtggcaagctggttgccaagcttttccaaaaaatccaagagatggtggaggaagatggaaatctggtatttgttttgatcgatgaagtagaaagtcttgctgctgctcgaaaagctgcattgtctggctcagaaccgtcagattctatccgggttgtgaatgcactactcacccaaatggacaaattgaaatcagcaccgaatgtgataatccttacaacatcaaacataactactgctattgatgttgctttcgtggatcgagctgacataaaagcttatgttggccctccaactcttcatgttcgttatgaaatattaaggtcttgtgttgaggaattaataagtaaagggatcatatcaagtttccagtcagtgaaaataaaactgagaatactcttaaaaaaagcaagtatgaattgggatcaacttcttgatgtacagggtttaagtgggagatcattgaggaagcttccgtttttagcgcacgcagcacttgcagatccatatagccatgatccaagtaatttcttgtgtacaatgatagaaacagctaagagagagaagtctgaacaacctgaatga

SEQ ID NO: 69647 - protein, 400 aa, Arabidopsis thaliana
  peptide (1)..(400): Ceres Seq. ID no. 1821318
MEVSYQNPIEAATIPVQIAVAEPVATPNPPPCLHENKFLVSVEVCLKPSSTARLEDVQRAVERFVSHFLIYYNGLVLIPADDLFLVDNVQRICICDTDGQPASFNEWILPAKEFDGLWESLIYESGLKQRLLRYAASALLFTQKGVNPNLVSWNRIILLHGPPGTGKTSLCKALAQKLSIRCNSRYPHCQLIEVNAHSLFSKWFSESGKLVAKLFQKIQEMVEEDGNLVFVLIDEVESLAAARKAALSGSEPSDSIRVVNALLTQMDKLKSAPNVIILTTSNITTAIDVAFVDRADIKAYVGPPTLHVRYEILRSCVEELISKGIISSFQSVKIKLRILLKKASMNWDQLLDVQGLSGRSLRKLPFLAHAALADPYSHDPSNFLCTMIETAKREKSEQPE

SEQ ID NO: 69648 - DNA, 2487 bp, Arabidopsis thaliana
  misc_feature (1)..(2487): Ceres Seq. ID no. 1821391
  misc_feature (1)..(2487): Ortholog of  Ceres SEQ ID NO 13600301 as cited in SEQ ID NO 1010
atgggttgtacaagttctaagcttgacgatcttccggcggttgctctttgccgtgaacgctgtgctttcttagaagctgctattcatcaacgttacgctttagctgaatcacacgtggcttacactcattcgcttcgagaaatcggtcactctctccatcttttcatcaatcaccaccaccgtttcgtcgcttccggcggcgctaacgtcggtgattctcctcgacttaatcttcctcctcagagaaaaggtgaccttgacgacgaagcaacaaattccccaaaaaaacaaaagcttgcttcttctcaccacaaccacaaccacgctcactcgggttccggttctgattcgggtcatctcgaattcgattcagattccgacgaagatgaagaagacgacgacgacttggatttggattcgttgcatcaccactctcctccccaccaccatctcggcaatttccctattcccgaatcagcaccaatgggcggatacatggaacaacaaccgggttatataaacccgtacccgaatccagatatgatggggcatccttactctggaggaggaagttatatgcacatgaattacatgaagaacaaatccatgcctccttcagttgtctatgagcaaagaccaactagtcctcaacgagtctacataggcgaatcatcatcttcatatccatatcctcctcaaaattcatattttggatactcaaatccagtacccggacccggaccaggatactacggttcttcttctgcttctacaactgctgcagcaacaaaaccgccaccacctccaccgtcgccgcctaggtctaacggttgggattttttgaatccctttgatacttattatcctccgtatactccgagtcgagattcgagagagttaagagaagaagaaggtataccggatttagaagacgatgattcacattacgaagttgttaaagaagtttacggcaaaccaaaattcgccgccggtggtggtcaccaaccaaatcccgccgccgtacacatgatgagggaagagtccccgtctccgccgcttgataaatccggtgctagtactagcggtggaggtgatgtcggagatgcatctgcgtatcagtctagaccaagtgtgtcggtggagaaagaagggatggagtatgaagttcacgttgttgagaagaaggttgttgaagatgaggaacggcggagtaatgccacggcgacacgtggtggtggtggaggaggagggccacgtgcggtgcctgaagttgcgaaagagattgagaatcaattcgtgaaagctgcagagtcaggaagtgagattgctaagttacttgaagttgggaagcatccttatggtcgtaaacatggaacttcttcgtctgctgctgctgctgttgtgccacctacttatgcagatattgaagaagagcttgcttcgaggtcgaggaatctttcttcgacgttgcacaagctccatctttgggagaagaagctttatcatgaagtcaaggccgaggagaaactgcgtctagctcacgagaaaaagcttaggaagctaaagcgtttggatcaaagaggtgccgaggctatcaaagtagataaaacgcggaaattagtgagagatatgtccacaaaaatacggattgcgattcaggttgtcgacaaaatatccgtgacgattaataagataagagacgaagacctgtggccgcaactgaatgcattgattcaagggcttacaagaatgtggaaaacaatgcttgaatgtcatcaaagtcaatgtcaagctattagggaagcacaaggtttaggcccgataagagcaagcaagaaactaggcgatgaacatctagaagcgacgagtttgcttggacatgaacttattaattggatattgggattctctagctgggttagtgcgcagaagggttatgtaaaagagttgaataaatggctcatgaaatgtcttctgtatgaacctgaggaaacacctgatgggatagttcccttttcacctggtaggattggggctccacctatctttgtcatctgtaaccaatggtctcaagctctggataggatatctgagaaggaagttattgaggcaatgcgtagtttcactacaagtgtgcttcagctttgggaacaagatcggttagatacgatgatgacggggcatggtgattcagagaagaaagtcaggaacatggacagagaagaacagaggatacagagagagattcaagcattggaaaagaaaatgattcttgtggcaccgggtgatggtaacagtctttcgatatccggcaacgttgtttaccaaagcgatactagcagcgatagtttacaaggtagtttgcaacggatttttgaagctatggagagattcactgctgaatcgatgagagcttatgaggatctcttagagcgcaccaatgaagaaactgcaccacgggaacttgaggaagaagaggaggagtaa

SEQ ID NO: 69649 - protein, 828 aa, Arabidopsis thaliana
  peptide (1)..(828): Ceres Seq. ID no. 1821392
MGCTSSKLDDLPAVALCRERCAFLEAAIHQRYALAESHVAYTHSLREIGHSLHLFINHHHRFVASGGANVGDSPRLNLPPQRKGDLDDEATNSPKKQKLASSHHNHNHAHSGSGSDSGHLEFDSDSDEDEEDDDDLDLDSLHHHSPPHHHLGNFPIPESAPMGGYMEQQPGYINPYPNPDMMGHPYSGGGSYMHMNYMKNKSMPPSVVYEQRPTSPQRVYIGESSSSYPYPPQNSYFGYSNPVPGPGPGYYGSSSASTTAAATKPPPPPPSPPRSNGWDFLNPFDTYYPPYTPSRDSRELREEEGIPDLEDDDSHYEVVKEVYGKPKFAAGGGHQPNPAAVHMMREESPSPPLDKSGASTSGGGDVGDASAYQSRPSVSVEKEGMEYEVHVVEKKVVEDEERRSNATATRGGGGGGGPRAVPEVAKEIENQFVKAAESGSEIAKLLEVGKHPYGRKHGTSSSAAAAVVPPTYADIEEELASRSRNLSSTLHKLHLWEKKLYHEVKAEEKLRLAHEKKLRKLKRLDQRGAEAIKVDKTRKLVRDMSTKIRIAIQVVDKISVTINKIRDEDLWPQLNALIQGLTRMWKTMLECHQSQCQAIREAQGLGPIRASKKLGDEHLEATSLLGHELINWILGFSSWVSAQKGYVKELNKWLMKCLLYEPEETPDGIVPFSPGRIGAPPIFVICNQWSQALDRISEKEVIEAMRSFTTSVLQLWEQDRLDTMMTGHGDSEKKVRNMDREEQRIQREIQALEKKMILVAPGDGNSLSISGNVVYQSDTSSDSLQGSLQRIFEAMERFTAESMRAYEDLLERTNEETAPRELEEEEEE

SEQ ID NO: 69650 - protein, 667 aa, Arabidopsis thaliana
  peptide (1)..(667): Ceres Seq. ID no. 1821393
MGGYMEQQPGYINPYPNPDMMGHPYSGGGSYMHMNYMKNKSMPPSVVYEQRPTSPQRVYIGESSSSYPYPPQNSYFGYSNPVPGPGPGYYGSSSASTTAAATKPPPPPPSPPRSNGWDFLNPFDTYYPPYTPSRDSRELREEEGIPDLEDDDSHYEVVKEVYGKPKFAAGGGHQPNPAAVHMMREESPSPPLDKSGASTSGGGDVGDASAYQSRPSVSVEKEGMEYEVHVVEKKVVEDEERRSNATATRGGGGGGGPRAVPEVAKEIENQFVKAAESGSEIAKLLEVGKHPYGRKHGTSSSAAAAVVPPTYADIEEELASRSRNLSSTLHKLHLWEKKLYHEVKAEEKLRLAHEKKLRKLKRLDQRGAEAIKVDKTRKLVRDMSTKIRIAIQVVDKISVTINKIRDEDLWPQLNALIQGLTRMWKTMLECHQSQCQAIREAQGLGPIRASKKLGDEHLEATSLLGHELINWILGFSSWVSAQKGYVKELNKWLMKCLLYEPEETPDGIVPFSPGRIGAPPIFVICNQWSQALDRISEKEVIEAMRSFTTSVLQLWEQDRLDTMMTGHGDSEKKVRNMDREEQRIQREIQALEKKMILVAPGDGNSLSISGNVVYQSDTSSDSLQGSLQRIFEAMERFTAESMRAYEDLLERTNEETAPRELEEEEEE

SEQ ID NO: 69651 - protein, 663 aa, Arabidopsis thaliana
  peptide (1)..(663): Ceres Seq. ID no. 1821394
MEQQPGYINPYPNPDMMGHPYSGGGSYMHMNYMKNKSMPPSVVYEQRPTSPQRVYIGESSSSYPYPPQNSYFGYSNPVPGPGPGYYGSSSASTTAAATKPPPPPPSPPRSNGWDFLNPFDTYYPPYTPSRDSRELREEEGIPDLEDDDSHYEVVKEVYGKPKFAAGGGHQPNPAAVHMMREESPSPPLDKSGASTSGGGDVGDASAYQSRPSVSVEKEGMEYEVHVVEKKVVEDEERRSNATATRGGGGGGGPRAVPEVAKEIENQFVKAAESGSEIAKLLEVGKHPYGRKHGTSSSAAAAVVPPTYADIEEELASRSRNLSSTLHKLHLWEKKLYHEVKAEEKLRLAHEKKLRKLKRLDQRGAEAIKVDKTRKLVRDMSTKIRIAIQVVDKISVTINKIRDEDLWPQLNALIQGLTRMWKTMLECHQSQCQAIREAQGLGPIRASKKLGDEHLEATSLLGHELINWILGFSSWVSAQKGYVKELNKWLMKCLLYEPEETPDGIVPFSPGRIGAPPIFVICNQWSQALDRISEKEVIEAMRSFTTSVLQLWEQDRLDTMMTGHGDSEKKVRNMDREEQRIQREIQALEKKMILVAPGDGNSLSISGNVVYQSDTSSDSLQGSLQRIFEAMERFTAESMRAYEDLLERTNEETAPRELEEEEEE

SEQ ID NO: 69652 - DNA, 3096 bp, Arabidopsis thaliana
  misc_feature (1)..(3096): Ceres Seq. ID no. 1821395
  misc_feature (1)..(3096): Ortholog of  Ceres SEQ ID NO 15170741 as cited in SEQ ID NO 58530
atggaaggtggtcgtggtggtggagatggcaatttcttaccaaactctaactttggtgtattctctgactccgctatggatatggatttcatggatgaactcttgtttgatggatgttggcttgagacaactgatggtaagagcttgaagcagaccatgggacaacaagtatccgattctactaccatgaatgacaacaacaacaactcgtacctttacggttatcaatatgctgagaacctttcacaagatcatatctccaacgaagaaacagggagaaagtttcctccaataccaccgggctttctcaagatcgaggatctctccaatcaagtaccttttgaccagtctgcagttatgagttctgcacaagcagagaagtttctccttgaagaatctgagggaggaagaagatattggattgctccaagaacaagccaaggtccttcttcatcagtgaaagagagattagtacaagctatagagggtcttaacgaggaggtgcaagataaagacttcctcatacagatatggctaccaattcaacaagaaggcaagaactttctcacaacttcggagcagccacacttcttcaacccgaaatactcgagtcttaaaagatatagagatgtttcagtggcttataatttcctggctgatgaggattctaaagagtctgttggtctccccggtcgtgtttttcttaagaaactacctgagtggacacctgatgtgcggttctttagaagcgaagagtatccgcggatcaaagaagcagagcaatgtgatgttcgtggatcattagcccttcctgtgtttgaaagaggtagtggaacttgtttgggtgttgttgagattgttacaacaactcagaagatgaattacaggccagagcttgataatatctgtaaagctctcgagtctgttaatctaaggagttcaagaagcttgaatcccccaagcagagaggtgtgtaaaaatggtctcctaaatcaaacccttacttcatcaatacatagaaacaatgaattttggttgctaaatgtcatatgccctttttgtttcagtttctgcagagtatatgacctgcctctggctttaacgtgggcaccgtgtgctcggcaaggcaaagttggatcccgccattctgatgagaacttctctgagtgtgtttcaactgttgatgatgcttgcattgtccctgaccatcagagtcgtcattttctagaggcatgttctgaacaccatctgcttcaaggggaaggcattgtaggaaaagcattcaacgcaaccaaactgtttttcgtgcccgaagtaaccacttttagcaagaccaactaccctcttgcacaccatgctaagatctctggtctacatgctgctttagcagtcccattgaaaaacaaattcaatagttcggttgagtttgtgttggagtttttctttccaaaagcttgccttgacaccgaagcacaacaagatatgctcaagtctctgtctgcgacccttcagcaggatttcaggagcttaaatcttttcattgataaagagcttgagctagaagttgtatttcccgttagagaggaagttgtttttgcagagaacccacttatcaacgcaggaaccggagaggatatgaaaccattgcctttggaagaaatttctcaggaagattcttcatggatctcacacatgataaaggcaaatgagaaaggtaaaggcgtgtcactttcttgggagtaccaaaaagaagagccaaaagaagagtttatgcttacatctggatgggataacaatcagattggatcaggccacaataactttctttcagaagctgagcagtttcaaaaggtgacaaattcaggactcagaatcgacatggatccaagttttgaatcagcttcctttggtgttgggcagacattactaggcagtagaagaccaggtgagaagagaagaacaaaaacagaaaagacaattggtttagaagttcttcgacaatactttgcaggaagcctcaaagatgcagccaagagcattggtgaaagtgatgattcattcacgcagtttcattttcatgttgcagtttgtccaactaccttgaaaagaatatgcagacaacacgggataacacgatggccttcccggaagatcaagaaagtggggcattcattaaagaaactccaacttgttatagactctgttcaaggtgttcaaggttctattcaacttgattcattctatacaagtttcccagaattaagctccccacatatgtctggtactggcacttccttcaagaatccaaatgctcaaacggagaacggtgtttcagcacagggaactgctgcagctccaaagtcaccaccatcatcttcttgtagccacagctctggttcaagcacctgttgttcaactggagctaatcaaagtaccaatactgggactacctcaaatactgtaaccactctgatggctgaaaatgctagcgcgatcttgaagagagctcgtagcgaagtgagacttcataccatgaatcaggatgaaacaaagtccctctctagaaccctgagccacaaaacattcagtgagcatcctcttttcgaaaatccacctcggttaccggagaatagtagcaggaagttgaaagctggaggggcctcaaaagtgaaagccacatttggtgaagccaaacatgagattgctaggcgttttaacatagataatattgcaccctttgatcttaagtacctggatgatgacaaggaatgggttcttctgacatgtgaagcggatctcgaggaatgtatcgacatttatagatcatcacagagccgcacgatcaagataagtgttcatgaagcttctcaagtcaagctgggaggaatatgtgttcaagagagagaaccacctagtggagtgatcttccaagttcctaaccagagtatctctgttaaatcctcaaatcagtatttgttaaagaaacaagtaagcctgcagacaaaaggttctcgttttggtttgtttttgtttctttctgattcagtgagtgacacaaaggaagatattgatcctgaacctatcattgccacctaa

SEQ ID NO: 69653 - protein, 1031 aa, Arabidopsis thaliana
  peptide (1)..(1031): Ceres Seq. ID no. 1821396
MEGGRGGGDGNFLPNSNFGVFSDSAMDMDFMDELLFDGCWLETTDGKSLKQTMGQQVSDSTTMNDNNNNSYLYGYQYAENLSQDHISNEETGRKFPPIPPGFLKIEDLSNQVPFDQSAVMSSAQAEKFLLEESEGGRRYWIAPRTSQGPSSSVKERLVQAIEGLNEEVQDKDFLIQIWLPIQQEGKNFLTTSEQPHFFNPKYSSLKRYRDVSVAYNFLADEDSKESVGLPGRVFLKKLPEWTPDVRFFRSEEYPRIKEAEQCDVRGSLALPVFERGSGTCLGVVEIVTTTQKMNYRPELDNICKALESVNLRSSRSLNPPSREVCKNGLLNQTLTSSIHRNNEFWLLNVICPFCFSFCRVYDLPLALTWAPCARQGKVGSRHSDENFSECVSTVDDACIVPDHQSRHFLEACSEHHLLQGEGIVGKAFNATKLFFVPEVTTFSKTNYPLAHHAKISGLHAALAVPLKNKFNSSVEFVLEFFFPKACLDTEAQQDMLKSLSATLQQDFRSLNLFIDKELELEVVFPVREEVVFAENPLINAGTGEDMKPLPLEEISQEDSSWISHMIKANEKGKGVSLSWEYQKEEPKEEFMLTSGWDNNQIGSGHNNFLSEAEQFQKVTNSGLRIDMDPSFESASFGVGQTLLGSRRPGEKRRTKTEKTIGLEVLRQYFAGSLKDAAKSIGESDDSFTQFHFHVAVCPTTLKRICRQHGITRWPSRKIKKVGHSLKKLQLVIDSVQGVQGSIQLDSFYTSFPELSSPHMSGTGTSFKNPNAQTENGVSAQGTAAAPKSPPSSSCSHSSGSSTCCSTGANQSTNTGTTSNTVTTLMAENASAILKRARSEVRLHTMNQDETKSLSRTLSHKTFSEHPLFENPPRLPENSSRKLKAGGASKVKATFGEAKHEIARRFNIDNIAPFDLKYLDDDKEWVLLTCEADLEECIDIYRSSQSRTIKISVHEASQVKLGGICVQEREPPSGVIFQVPNQSISVKSSNQYLLKKQVSLQTKGSRFGLFLFLSDSVSDTKEDIDPEPIIAT

SEQ ID NO: 69654 - protein, 1006 aa, Arabidopsis thaliana
  peptide (1)..(1006): Ceres Seq. ID no. 1821397
MDMDFMDELLFDGCWLETTDGKSLKQTMGQQVSDSTTMNDNNNNSYLYGYQYAENLSQDHISNEETGRKFPPIPPGFLKIEDLSNQVPFDQSAVMSSAQAEKFLLEESEGGRRYWIAPRTSQGPSSSVKERLVQAIEGLNEEVQDKDFLIQIWLPIQQEGKNFLTTSEQPHFFNPKYSSLKRYRDVSVAYNFLADEDSKESVGLPGRVFLKKLPEWTPDVRFFRSEEYPRIKEAEQCDVRGSLALPVFERGSGTCLGVVEIVTTTQKMNYRPELDNICKALESVNLRSSRSLNPPSREVCKNGLLNQTLTSSIHRNNEFWLLNVICPFCFSFCRVYDLPLALTWAPCARQGKVGSRHSDENFSECVSTVDDACIVPDHQSRHFLEACSEHHLLQGEGIVGKAFNATKLFFVPEVTTFSKTNYPLAHHAKISGLHAALAVPLKNKFNSSVEFVLEFFFPKACLDTEAQQDMLKSLSATLQQDFRSLNLFIDKELELEVVFPVREEVVFAENPLINAGTGEDMKPLPLEEISQEDSSWISHMIKANEKGKGVSLSWEYQKEEPKEEFMLTSGWDNNQIGSGHNNFLSEAEQFQKVTNSGLRIDMDPSFESASFGVGQTLLGSRRPGEKRRTKTEKTIGLEVLRQYFAGSLKDAAKSIGESDDSFTQFHFHVAVCPTTLKRICRQHGITRWPSRKIKKVGHSLKKLQLVIDSVQGVQGSIQLDSFYTSFPELSSPHMSGTGTSFKNPNAQTENGVSAQGTAAAPKSPPSSSCSHSSGSSTCCSTGANQSTNTGTTSNTVTTLMAENASAILKRARSEVRLHTMNQDETKSLSRTLSHKTFSEHPLFENPPRLPENSSRKLKAGGASKVKATFGEAKHEIARRFNIDNIAPFDLKYLDDDKEWVLLTCEADLEECIDIYRSSQSRTIKISVHEASQVKLGGICVQEREPPSGVIFQVPNQSISVKSSNQYLLKKQVSLQTKGSRFGLFLFLSDSVSDTKEDIDPEPIIAT

SEQ ID NO: 69655 - protein, 1004 aa, Arabidopsis thaliana
  peptide (1)..(1004): Ceres Seq. ID no. 1821398
MDFMDELLFDGCWLETTDGKSLKQTMGQQVSDSTTMNDNNNNSYLYGYQYAENLSQDHISNEETGRKFPPIPPGFLKIEDLSNQVPFDQSAVMSSAQAEKFLLEESEGGRRYWIAPRTSQGPSSSVKERLVQAIEGLNEEVQDKDFLIQIWLPIQQEGKNFLTTSEQPHFFNPKYSSLKRYRDVSVAYNFLADEDSKESVGLPGRVFLKKLPEWTPDVRFFRSEEYPRIKEAEQCDVRGSLALPVFERGSGTCLGVVEIVTTTQKMNYRPELDNICKALESVNLRSSRSLNPPSREVCKNGLLNQTLTSSIHRNNEFWLLNVICPFCFSFCRVYDLPLALTWAPCARQGKVGSRHSDENFSECVSTVDDACIVPDHQSRHFLEACSEHHLLQGEGIVGKAFNATKLFFVPEVTTFSKTNYPLAHHAKISGLHAALAVPLKNKFNSSVEFVLEFFFPKACLDTEAQQDMLKSLSATLQQDFRSLNLFIDKELELEVVFPVREEVVFAENPLINAGTGEDMKPLPLEEISQEDSSWISHMIKANEKGKGVSLSWEYQKEEPKEEFMLTSGWDNNQIGSGHNNFLSEAEQFQKVTNSGLRIDMDPSFESASFGVGQTLLGSRRPGEKRRTKTEKTIGLEVLRQYFAGSLKDAAKSIGESDDSFTQFHFHVAVCPTTLKRICRQHGITRWPSRKIKKVGHSLKKLQLVIDSVQGVQGSIQLDSFYTSFPELSSPHMSGTGTSFKNPNAQTENGVSAQGTAAAPKSPPSSSCSHSSGSSTCCSTGANQSTNTGTTSNTVTTLMAENASAILKRARSEVRLHTMNQDETKSLSRTLSHKTFSEHPLFENPPRLPENSSRKLKAGGASKVKATFGEAKHEIARRFNIDNIAPFDLKYLDDDKEWVLLTCEADLEECIDIYRSSQSRTIKISVHEASQVKLGGICVQEREPPSGVIFQVPNQSISVKSSNQYLLKKQVSLQTKGSRFGLFLFLSDSVSDTKEDIDPEPIIAT

SEQ ID NO: 69656 - DNA, 813 bp, Arabidopsis thaliana
  misc_feature (1)..(813): Ceres Seq. ID no. 1821427
  misc_feature (1)..(813): Ortholog of  Ceres SEQ ID NO 13584646 as cited in SEQ ID NO 60715
atggaacttaacagatctgaagcagacgaagcaaaggccgagaccactcccaccggtggagccaccagctcagccacagcctctggctcttcctccggacgtcgtccacgtggtcgtcctgcaggttccaaaaacaaacccaaacctccgacgattataactagagatagtcctaacgtccttagatcacacgttcttgaagtcacctccggttcggacatatccgaggcagtctccacctacgccactcgtcgcggctgcggcgtttgcattataagcggcacgggtgcggtcactaacgtcacgatacggcaacctgcggctccggctggtggaggtgtgattaccctgcatggtcggtttgacattttgtctttgaccggtactgcgcttccaccgcctgcaccaccgggagcaggaggtttgacggtgtatctagccggaggtcaaggacaagttgtaggagggaatgtggctggttcgttaattgcttcgggaccggtagtgttgatggctgcttcttttgcaaacgcagtttatgataggttaccgattgaagaggaagaaaccccaccgccgagaaccaccggggtgcagcagcagcagccggaggcgtctcagtcgtcggaggttacggggagtggggcccaggcgtgtgagtcaaacctccaaggtggaaatggtggaggaggtgttgctttctacaatcttggaatgaatatgaacaattttcaattctccgggggagatatttacggtatgagcggcggtagcggaggaggtggtggcggtgcgactagacccgcgttttag

SEQ ID NO: 69657 - protein, 270 aa, Arabidopsis thaliana
  peptide (1)..(270): Ceres Seq. ID no. 1821428
MELNRSEADEAKAETTPTGGATSSATASGSSSGRRPRGRPAGSKNKPKPPTIITRDSPNVLRSHVLEVTSGSDISEAVSTYATRRGCGVCIISGTGAVTNVTIRQPAAPAGGGVITLHGRFDILSLTGTALPPPAPPGAGGLTVYLAGGQGQVVGGNVAGSLIASGPVVLMAASFANAVYDRLPIEEEETPPPRTTGVQQQQPEASQSSEVTGSGAQACESNLQGGNGGGGVAFYNLGMNMNNFQFSGGDIYGMSGGSGGGGGGATRPAF

SEQ ID NO: 69658 - DNA, 1401 bp, Arabidopsis thaliana
  misc_feature (1)..(1401): Ceres Seq. ID no. 1821441
  misc_feature (1)..(1401): Ortholog of  Ceres SEQ ID NO 15176433 as cited in SEQ ID NO 59539
atgaggatgaacaaaattttacttgtttttgtgtttctaagcattgccactgtaatcaatagtggaacaacaagcaactttgtccgcacagctcaaccatcaactgagatgtctctcgaaacttttccatctccggctggtcataatgctccggaacaggttcatatcgtccaaggagattacaatggacgtggtataatcatatcgtgggtgacccccttaaacctagctggttcaaacgtggttacttattggaaggcagttgatggtgatgtgaaaccgaaaaagaagagaggtcatgcctctacctcgtcttaccgattttatgactatacttctggttttcttcatcacgccacaattaaaggactcgagtatgataccaaatacatctatgaggttggaactgatggatccgttagacaattttccttcactagtcctccaaaggttggacctgacgttccatacactttcggcattattggtgatcttggacaaactttagcttctaacgagacattatatcattacatgtcaaaccctaaaggccaagctgttctcttccctggagacttatcttacgcagatgaccatccaaaccatgatcagagaaagtgggattcgtggggaagattcgtggagccttgtgctgcttaccaaaccttcatctatgctgccgggaatcacgaaattgattttgtcccaaacattggggagcctcatgccttcaagccctacattcaccgttatcataacgcctacaaggcctcgaagagcatatctcctctttggtactctattagacgtgcatctgctcacatcatcgtcctctcctcttattctgcctacggaaaatacacacctcaatacgtgtggctcgagcaagagttgaagaaggtgaacagagaagagactccatggcttattgtcatggttcactcgccgtggtacaacagtaataactaccattacatggaaggtgagagcatgagagcaatgtttgagtcgtggttcgttaacagcaaggttgatttggttttgtctggtcacgtccattcctatgagagatccgaacgtgtctccaatattaaatacaacatcaccaatggcttgagctatcctgtgaaagacccttctgctccaatctacatcactatcggagatggaggaaacattgaaggaatcgcaaatagttttactgatccgcaaccgagctattcggcgtatagagaagctagttttggtcatgcagttttggagatttacaatagaactcacgcatactacacatggcataggaaccaagacaatgaacctgttgccgctgattcaattatgttgcataacagatatttctttccagtagaggaattagaatctggcaacactagggcctaa

SEQ ID NO: 69659 - protein, 466 aa, Arabidopsis thaliana
  peptide (1)..(466): Ceres Seq. ID no. 1821442
MRMNKILLVFVFLSIATVINSGTTSNFVRTAQPSTEMSLETFPSPAGHNAPEQVHIVQGDYNGRGIIISWVTPLNLAGSNVVTYWKAVDGDVKPKKKRGHASTSSYRFYDYTSGFLHHATIKGLEYDTKYIYEVGTDGSVRQFSFTSPPKVGPDVPYTFGIIGDLGQTLASNETLYHYMSNPKGQAVLFPGDLSYADDHPNHDQRKWDSWGRFVEPCAAYQTFIYAAGNHEIDFVPNIGEPHAFKPYIHRYHNAYKASKSISPLWYSIRRASAHIIVLSSYSAYGKYTPQYVWLEQELKKVNREETPWLIVMVHSPWYNSNNYHYMEGESMRAMFESWFVNSKVDLVLSGHVHSYERSERVSNIKYNITNGLSYPVKDPSAPIYITIGDGGNIEGIANSFTDPQPSYSAYREASFGHAVLEIYNRTHAYYTWHRNQDNEPVAADSIMLHNRYFFPVEELESGNTRA

SEQ ID NO: 69660 - protein, 464 aa, Arabidopsis thaliana
  peptide (1)..(464): Ceres Seq. ID no. 1821443
MNKILLVFVFLSIATVINSGTTSNFVRTAQPSTEMSLETFPSPAGHNAPEQVHIVQGDYNGRGIIISWVTPLNLAGSNVVTYWKAVDGDVKPKKKRGHASTSSYRFYDYTSGFLHHATIKGLEYDTKYIYEVGTDGSVRQFSFTSPPKVGPDVPYTFGIIGDLGQTLASNETLYHYMSNPKGQAVLFPGDLSYADDHPNHDQRKWDSWGRFVEPCAAYQTFIYAAGNHEIDFVPNIGEPHAFKPYIHRYHNAYKASKSISPLWYSIRRASAHIIVLSSYSAYGKYTPQYVWLEQELKKVNREETPWLIVMVHSPWYNSNNYHYMEGESMRAMFESWFVNSKVDLVLSGHVHSYERSERVSNIKYNITNGLSYPVKDPSAPIYITIGDGGNIEGIANSFTDPQPSYSAYREASFGHAVLEIYNRTHAYYTWHRNQDNEPVAADSIMLHNRYFFPVEELESGNTRA

SEQ ID NO: 69661 - protein, 430 aa, Arabidopsis thaliana
  peptide (1)..(430): Ceres Seq. ID no. 1821444
MSLETFPSPAGHNAPEQVHIVQGDYNGRGIIISWVTPLNLAGSNVVTYWKAVDGDVKPKKKRGHASTSSYRFYDYTSGFLHHATIKGLEYDTKYIYEVGTDGSVRQFSFTSPPKVGPDVPYTFGIIGDLGQTLASNETLYHYMSNPKGQAVLFPGDLSYADDHPNHDQRKWDSWGRFVEPCAAYQTFIYAAGNHEIDFVPNIGEPHAFKPYIHRYHNAYKASKSISPLWYSIRRASAHIIVLSSYSAYGKYTPQYVWLEQELKKVNREETPWLIVMVHSPWYNSNNYHYMEGESMRAMFESWFVNSKVDLVLSGHVHSYERSERVSNIKYNITNGLSYPVKDPSAPIYITIGDGGNIEGIANSFTDPQPSYSAYREASFGHAVLEIYNRTHAYYTWHRNQDNEPVAADSIMLHNRYFFPVEELESGNTRA

SEQ ID NO: 69662 - DNA, 1602 bp, Arabidopsis thaliana
  misc_feature (1)..(1602): Ceres Seq. ID no. 1821688
  misc_feature (1)..(1602): Ortholog of  Ceres SEQ ID NO 14315430 as cited in SEQ ID NO 57618
  misc_feature (1)..(1602): Ortholog of  Ceres SEQ ID NO 13623344 as cited in SEQ ID NO 0
atggctggagtattagctggggattgttcattcggtgagagtggtgtttcatcttactccaggaattccaatgaaaagcaggacgaggttgcccgctggtattttggaagaaaagaaattgaagaaaattcaccttcaaggttggatagtattgacttaaagaaggaaacatacctccgcaagtcatactgtacatttttgcaggatttaggcatgagattaaaagtaacagtattaagattattactgagtcctttttccatgttgtcctccctcctcacccagacgattgctacagtctgcatgttccttgcgggaaaagtggaagaaactcctaggccgttaaaagatgttattgttgtctcctatgagataatacacaagaaggatcctactactgcacagaaaatcaagcaaaaggaagtatatgagcaacaaaaagagcttatactaaatggagaaaagattgtactttctacgctgggatttgacttcaatgtttatcatccttataagcctcttgtagaagcgataaagaaatttaaggtcgcacagaatgctctggcccaagttgcatggaattttgttaacgatggtctgcggacgtcactctgcctgcaatttaagcctcaccacattgcggcgggagcaatttttcttgctgcgaagttccttaaagtgaaattaccatcagatggagagaaggtctggtggcaagaatttgatgtcacacctcgacaactagaggatgttagcaaccaaatgcttgagctctatgagcaaaaccgtgttcctgcatctcaagtaagcgaagtcgaaagtagtgtaggtggaggatcagctcatcatgttgggtctaggccatcagcacgtctaactcatgaacattcaaattctgataatctcgggggctcgacaaaagctacacaaaaccggagcaatgataatgggagtggtgaggcaggtagtgtcatcaccgagcagaagggggaaagagatacagaaacgaaagatagcatgcatactgaaagtcatccagcccataagtctagatcgggagttgaggcacctggggaggataaaatagagaaagcaggtgcacattttccagaagatgataaatctagaattgttggtacagctgatgtcacggtcagccaatccccaaaagacataaaaatgtttagagataaggtgaaggccaaactagaggcgaagaaggtccaaggtgaaaagacgagaaagaaggatttggtggatgaggatgatttgatagaaagagaactggaagacgtggaattagctgttgaggatgacaaagatatacaaaacaaaagctccatgggtacagaacatggcgagattcttgatggaaacaacttggtggtcaataccgaggaaggtgaaatgatagatgatgtttcttcaacaatgcctagccggaagagaaaaatggaaagtccttgtgaaaaacagttaggagaaggaaagagacgacacgacaacagtgagaatgtggaagaaggtcagaagacaaacccaggaggaagtagtcatagttatggtgacagagagccaagaagacactcccaagagaggtag

SEQ ID NO: 69663 - protein, 533 aa, Arabidopsis thaliana
  peptide (1)..(533): Ceres Seq. ID no. 1821689
MAGVLAGDCSFGESGVSSYSRNSNEKQDEVARWYFGRKEIEENSPSRLDSIDLKKETYLRKSYCTFLQDLGMRLKVTVLRLLLSPFSMLSSLLTQTIATVCMFLAGKVEETPRPLKDVIVVSYEIIHKKDPTTAQKIKQKEVYEQQKELILNGEKIVLSTLGFDFNVYHPYKPLVEAIKKFKVAQNALAQVAWNFVNDGLRTSLCLQFKPHHIAAGAIFLAAKFLKVKLPSDGEKVWWQEFDVTPRQLEDVSNQMLELYEQNRVPASQVSEVESSVGGGSAHHVGSRPSARLTHEHSNSDNLGGSTKATQNRSNDNGSGEAGSVITEQKGERDTETKDSMHTESHPAHKSRSGVEAPGEDKIEKAGAHFPEDDKSRIVGTADVTVSQSPKDIKMFRDKVKAKLEAKKVQGEKTRKKDLVDEDDLIERELEDVELAVEDDKDIQNKSSMGTEHGEILDGNNLVVNTEEGEMIDDVSSTMPSRKRKMESPCEKQLGEGKRRHDNSENVEEGQKTNPGGSSHSYGDREPRRHSQER

SEQ ID NO: 69664 - protein, 462 aa, Arabidopsis thaliana
  peptide (1)..(462): Ceres Seq. ID no. 1821690
MRLKVTVLRLLLSPFSMLSSLLTQTIATVCMFLAGKVEETPRPLKDVIVVSYEIIHKKDPTTAQKIKQKEVYEQQKELILNGEKIVLSTLGFDFNVYHPYKPLVEAIKKFKVAQNALAQVAWNFVNDGLRTSLCLQFKPHHIAAGAIFLAAKFLKVKLPSDGEKVWWQEFDVTPRQLEDVSNQMLELYEQNRVPASQVSEVESSVGGGSAHHVGSRPSARLTHEHSNSDNLGGSTKATQNRSNDNGSGEAGSVITEQKGERDTETKDSMHTESHPAHKSRSGVEAPGEDKIEKAGAHFPEDDKSRIVGTADVTVSQSPKDIKMFRDKVKAKLEAKKVQGEKTRKKDLVDEDDLIERELEDVELAVEDDKDIQNKSSMGTEHGEILDGNNLVVNTEEGEMIDDVSSTMPSRKRKMESPCEKQLGEGKRRHDNSENVEEGQKTNPGGSSHSYGDREPRRHSQER

SEQ ID NO: 69665 - protein, 446 aa, Arabidopsis thaliana
  peptide (1)..(446): Ceres Seq. ID no. 1821691
MLSSLLTQTIATVCMFLAGKVEETPRPLKDVIVVSYEIIHKKDPTTAQKIKQKEVYEQQKELILNGEKIVLSTLGFDFNVYHPYKPLVEAIKKFKVAQNALAQVAWNFVNDGLRTSLCLQFKPHHIAAGAIFLAAKFLKVKLPSDGEKVWWQEFDVTPRQLEDVSNQMLELYEQNRVPASQVSEVESSVGGGSAHHVGSRPSARLTHEHSNSDNLGGSTKATQNRSNDNGSGEAGSVITEQKGERDTETKDSMHTESHPAHKSRSGVEAPGEDKIEKAGAHFPEDDKSRIVGTADVTVSQSPKDIKMFRDKVKAKLEAKKVQGEKTRKKDLVDEDDLIERELEDVELAVEDDKDIQNKSSMGTEHGEILDGNNLVVNTEEGEMIDDVSSTMPSRKRKMESPCEKQLGEGKRRHDNSENVEEGQKTNPGGSSHSYGDREPRRHSQER

SEQ ID NO: 69666 - DNA, 1260 bp, Arabidopsis thaliana
  misc_feature (1)..(1260): Ceres Seq. ID no. 1822185
  misc_feature (1)..(1260): Ortholog of  Ceres SEQ ID NO 13598368 as cited in SEQ ID NO 62140
atgaagaggaagaagaaagaggaggaggaggagaagttgatagtgactagagaattcgcgaagagatggcgagatctgagcggtcaaaaccattggaaagggatgttacagccgttggatcaagatctccgggaatatatcatacattatggtgagatggctcaggctggttacgatactttcaatatcaacaccgaatctcagttcgccggtgctagcatctactctagaaaagacttcttcgccaaggttggtttagagatagcacacccgtacacaaagtacaaagtgacgaagtttatatacgcgacatccgatatccacgtgcctgagtcattcttattgttcccaatttcacgtgagggatggtcaaaggaatcaaattggatgggttacgtggcggtaacagacgaccaaggcacggcacttcttggtcggagagatatcgtggtttcttggagaggctcagtgcaaccacttgaatgggtcgaagacttcgagtttggtttagtcaacgccataaaaatcttcggtgaaagaaacgatcaagtacaaattcatcaaggttggtattcaatctacatgtctcaagatgaacgatcaccttttactaagaccaatgctcgtgaccaggtattgcgagaggttggaagattgttggagaagtataaggacgaagaagttagtataactatatgtggtcatagtcttggagctgcactcgcgacgcttagtgccactgatattgtggctaatggttataaccgaccaaagagccgtcctgacaagtcttgtcctgttactgcctttgtctttgctagtcctcgtgttggggattcagactttaggaaactcttttccggattggaagatatccgagtgttacggacaaggaatctaccggacgtaattccgatctatccaccgataggttactccgaggtaggagatgagtttccaatagacacaagaaagtcaccatacatgaaatctcctggaaacctcgcaacctttcactgcttagagggttacttgcatggcgttgccgggactcaaggaacgaacaaagctgacttattcagactcgatgtggaaagagccatcggattggtcaataaatcagtggatgggttaaaagacgagtgtatggtcccagggaaatggagggttcttaaaaacaaaggtatggcccaacaagacgatggatcttgggagttagtggaccatgagattgatgataatgaagatttggatttctga

SEQ ID NO: 69667 - protein, 419 aa, Arabidopsis thaliana
  peptide (1)..(419): Ceres Seq. ID no. 1822186
MKRKKKEEEEEKLIVTREFAKRWRDLSGQNHWKGMLQPLDQDLREYIIHYGEMAQAGYDTFNINTESQFAGASIYSRKDFFAKVGLEIAHPYTKYKVTKFIYATSDIHVPESFLLFPISREGWSKESNWMGYVAVTDDQGTALLGRRDIVVSWRGSVQPLEWVEDFEFGLVNAIKIFGERNDQVQIHQGWYSIYMSQDERSPFTKTNARDQVLREVGRLLEKYKDEEVSITICGHSLGAALATLSATDIVANGYNRPKSRPDKSCPVTAFVFASPRVGDSDFRKLFSGLEDIRVLRTRNLPDVIPIYPPIGYSEVGDEFPIDTRKSPYMKSPGNLATFHCLEGYLHGVAGTQGTNKADLFRLDVERAIGLVNKSVDGLKDECMVPGKWRVLKNKGMAQQDDGSWELVDHEIDDNEDLDF

SEQ ID NO: 69668 - protein, 385 aa, Arabidopsis thaliana
  peptide (1)..(385): Ceres Seq. ID no. 1822187
MLQPLDQDLREYIIHYGEMAQAGYDTFNINTESQFAGASIYSRKDFFAKVGLEIAHPYTKYKVTKFIYATSDIHVPESFLLFPISREGWSKESNWMGYVAVTDDQGTALLGRRDIVVSWRGSVQPLEWVEDFEFGLVNAIKIFGERNDQVQIHQGWYSIYMSQDERSPFTKTNARDQVLREVGRLLEKYKDEEVSITICGHSLGAALATLSATDIVANGYNRPKSRPDKSCPVTAFVFASPRVGDSDFRKLFSGLEDIRVLRTRNLPDVIPIYPPIGYSEVGDEFPIDTRKSPYMKSPGNLATFHCLEGYLHGVAGTQGTNKADLFRLDVERAIGLVNKSVDGLKDECMVPGKWRVLKNKGMAQQDDGSWELVDHEIDDNEDLDF

SEQ ID NO: 69669 - protein, 367 aa, Arabidopsis thaliana
  peptide (1)..(367): Ceres Seq. ID no. 1822188
MAQAGYDTFNINTESQFAGASIYSRKDFFAKVGLEIAHPYTKYKVTKFIYATSDIHVPESFLLFPISREGWSKESNWMGYVAVTDDQGTALLGRRDIVVSWRGSVQPLEWVEDFEFGLVNAIKIFGERNDQVQIHQGWYSIYMSQDERSPFTKTNARDQVLREVGRLLEKYKDEEVSITICGHSLGAALATLSATDIVANGYNRPKSRPDKSCPVTAFVFASPRVGDSDFRKLFSGLEDIRVLRTRNLPDVIPIYPPIGYSEVGDEFPIDTRKSPYMKSPGNLATFHCLEGYLHGVAGTQGTNKADLFRLDVERAIGLVNKSVDGLKDECMVPGKWRVLKNKGMAQQDDGSWELVDHEIDDNEDLDF

SEQ ID NO: 69670 - DNA, 1698 bp, Arabidopsis thaliana
  misc_feature (1)..(1698): Ceres Seq. ID no. 1822197
  misc_feature (1)..(1698): Ortholog of  Ceres SEQ ID NO 13660894 as cited in SEQ ID NO 67475
atgttttcgttatcgttaatccaaccgcgtctccggatttcagagattccggtgactcaatcctacaaatctccgacgatatgttacagtagcgattcaagaactaagcgagaggaacagagacacgtgagattacctgggtttcgattagtttctggaaagagagcatctttcgattcgggttttagtggtttcaaaggagagaatgtgaatcaggatgattcgtcttctttcgatagcgaaagagttgattatgctctgttagcggagtggctacagtcttctaatgggatgcgactcattaaaaggatccatgcgatggcgttgaaacttggtgatttggtttatgcacgtaaagtgttcgacagtatgcctgagaaaaatactgttacttggactgctatgattgatgggtatttgaagtatggtcttgaggatgaggcttttgcactgtttgaggattatgtgaagcatggaatacgttttacgaacgagaggatgtttgtgtgtttgttgaatctgtgtagtaggagagcagagtttgagttagggagacaagttcatggtaatatggtgaaagttggagtggggaatctcattgtggagagttctcttgtttatttttatgcgcaatgcggtgaattgacaagtgcgttacgagcttttgatatgatggaggagaaagatgtgatatcttggactgctgttatatcggcgtgttcgagaaaagggcatggaattaaagctataggcatgtttatcggaatgttgaatcactggtttttgcctaacgagtttacggtgtgcagtattttgaaggcttgtagtgaggagaaagcgttaagattcggaaggcaagtacacagcttggttgttaagaggatgataaagacagatgtttttgtgggaacttcgctgatggacatgtatgctaagtgtggggagatttctgattgcagaaaagtgtttgatggaatgagtaatagaaacacggtcacatggacttcgattatagctgctcatgctcgggaaggttttggtgaggaagctatcagcctcttccggataatgaagaggcggcatttgattgctaacaatttgacagtagaacttcatgcacagattatcaagaattcgatcgaaaagaatgtctatataggaagtactttggtgtggctgtattgtaaatgcggagaatctcgtgacgctttcaatgttctccagcaattgccatctagagatgtggtttcatggaccgctatgatctctggatgttcgagcttaggacatgaatcggaagcgctagacttcttgaaagagatgattcaagaaggtgtagagccaaacccatttacatactcctcggctttaaaagcttgtgcgaattcagaatctcttcttatcggtagatcaatccattccattgcaaagaagaatcatgctctatcaaatgtctttgtgggaagtgctttgattcacattatgcctgagaagaacttggtttcatggaaggcgatgataatgggttatgcgaggaatgggttttgcagggaagcattgaagctaatgtatagaatggaggcagagggatttgaagttgatgattatatatttgcaacaattctctctacttgtggagatattgagctcgatgaagctgttgaatcttctgcaacttgttacttggagacatcttga

SEQ ID NO: 69671 - protein, 565 aa, Arabidopsis thaliana
  peptide (1)..(565): Ceres Seq. ID no. 1822198
MFSLSLIQPRLRISEIPVTQSYKSPTICYSSDSRTKREEQRHVRLPGFRLVSGKRASFDSGFSGFKGENVNQDDSSSFDSERVDYALLAEWLQSSNGMRLIKRIHAMALKLGDLVYARKVFDSMPEKNTVTWTAMIDGYLKYGLEDEAFALFEDYVKHGIRFTNERMFVCLLNLCSRRAEFELGRQVHGNMVKVGVGNLIVESSLVYFYAQCGELTSALRAFDMMEEKDVISWTAVISACSRKGHGIKAIGMFIGMLNHWFLPNEFTVCSILKACSEEKALRFGRQVHSLVVKRMIKTDVFVGTSLMDMYAKCGEISDCRKVFDGMSNRNTVTWTSIIAAHAREGFGEEAISLFRIMKRRHLIANNLTVELHAQIIKNSIEKNVYIGSTLVWLYCKCGESRDAFNVLQQLPSRDVVSWTAMISGCSSLGHESEALDFLKEMIQEGVEPNPFTYSSALKACANSESLLIGRSIHSIAKKNHALSNVFVGSALIHIMPEKNLVSWKAMIMGYARNGFCREALKLMYRMEAEGFEVDDYIFATILSTCGDIELDEAVESSATCYLETS

SEQ ID NO: 69672 - protein, 468 aa, Arabidopsis thaliana
  peptide (1)..(468): Ceres Seq. ID no. 1822199
MRLIKRIHAMALKLGDLVYARKVFDSMPEKNTVTWTAMIDGYLKYGLEDEAFALFEDYVKHGIRFTNERMFVCLLNLCSRRAEFELGRQVHGNMVKVGVGNLIVESSLVYFYAQCGELTSALRAFDMMEEKDVISWTAVISACSRKGHGIKAIGMFIGMLNHWFLPNEFTVCSILKACSEEKALRFGRQVHSLVVKRMIKTDVFVGTSLMDMYAKCGEISDCRKVFDGMSNRNTVTWTSIIAAHAREGFGEEAISLFRIMKRRHLIANNLTVELHAQIIKNSIEKNVYIGSTLVWLYCKCGESRDAFNVLQQLPSRDVVSWTAMISGCSSLGHESEALDFLKEMIQEGVEPNPFTYSSALKACANSESLLIGRSIHSIAKKNHALSNVFVGSALIHIMPEKNLVSWKAMIMGYARNGFCREALKLMYRMEAEGFEVDDYIFATILSTCGDIELDEAVESSATCYLETS

SEQ ID NO: 69673 - protein, 459 aa, Arabidopsis thaliana
  peptide (1)..(459): Ceres Seq. ID no. 1822200
MALKLGDLVYARKVFDSMPEKNTVTWTAMIDGYLKYGLEDEAFALFEDYVKHGIRFTNERMFVCLLNLCSRRAEFELGRQVHGNMVKVGVGNLIVESSLVYFYAQCGELTSALRAFDMMEEKDVISWTAVISACSRKGHGIKAIGMFIGMLNHWFLPNEFTVCSILKACSEEKALRFGRQVHSLVVKRMIKTDVFVGTSLMDMYAKCGEISDCRKVFDGMSNRNTVTWTSIIAAHAREGFGEEAISLFRIMKRRHLIANNLTVELHAQIIKNSIEKNVYIGSTLVWLYCKCGESRDAFNVLQQLPSRDVVSWTAMISGCSSLGHESEALDFLKEMIQEGVEPNPFTYSSALKACANSESLLIGRSIHSIAKKNHALSNVFVGSALIHIMPEKNLVSWKAMIMGYARNGFCREALKLMYRMEAEGFEVDDYIFATILSTCGDIELDEAVESSATCYLETS

SEQ ID NO: 69674 - DNA, 1170 bp, Arabidopsis thaliana
  misc_feature (1)..(1170): Ceres Seq. ID no. 1822330
  misc_feature (1)..(1170): Ortholog of  Ceres SEQ ID NO 12609146 as cited in SEQ ID NO 52118
  misc_feature (1)..(1170): Ortholog of  Ceres SEQ ID NO 13594056 as cited in SEQ ID NO 55691
  misc_feature (1)..(1170): Ortholog of  Ceres SEQ ID NO 13638136 as cited in SEQ ID NO 58644
  misc_feature (1)..(1170): Ortholog of  Ceres SEQ ID NO 13596868 as cited in SEQ ID NO 62806
  misc_feature (1)..(1170): Ortholog of  Ceres SEQ ID NO 12587035 as cited in SEQ ID NO 63605
  misc_feature (1)..(1170): Ortholog of  Ceres SEQ ID NO 14301886 as cited in SEQ ID NO 64201
  misc_feature (1)..(1170): Ortholog of  Ceres SEQ ID NO 13595885 as cited in SEQ ID NO 69265
  misc_feature (1)..(1170): Ortholog of  Ceres SEQ ID NO 12566239 as cited in SEQ ID NO 0
  misc_feature (1)..(1170): Ortholog of  Ceres SEQ ID NO 13599119 as cited in SEQ ID NO 0
  misc_feature (1)..(1170): Ortholog of  Ceres SEQ ID NO 15179992 as cited in SEQ ID NO 0
atgtcactcctcaaaagtagaaatcgttcttcgaatataaatctgcagtttagatgtgtgattatatgtttgcgcattggcatcattcctagaaatgtgactgtagatgctgctgctgctgctattaattttaatgaacactctaatatgtacagtcagaacgggaagttcagctatggatatgcaagctctcccggtaaaagatcttctatggaggacttctatgaaactaggatcgacggcgttgaaggggaaatagttggtctatttggagtctttgatggacatggaggtgcacgtgcagctgaatatgtgaagcaaaatctcttcagtaacctgatcaggcatccaaagttcatctctgataccacagctgcaatagctgatgcatacaaccaaacagactcagagtttcttaaatcagaaaatagtcagaacagagatgctggttcaacggcgtcaacagccatcttagttggtgaccgtttacttgttgcaaatgtaggggactctagagctgtaatatgcagaggtggcaatgctattgctgtatcccgagatcacaagcctgatcaaagtgacgagcgccaaagaattgaggatgcaggaggatttgtcatgtgggctggaacatggagagttggaggagttcttgctgtttctcgtgcatttggcgataggttgttgaagcagtatgttgttgctgatccggagatacaggtattgactttttgccaaaatctcctcctatatattaaaaatgccactttgttattaacaattgaacataacctgcattggatttcaatagttagctacttgaatggcactttacaaaacttccttcgttcactcattagcataaatggaaaatttcaggaggaaaaagttgatagctctctcgagtttctcattcttgcaagtgatggtctctgggacgttgtatctaacgaggaagccgtaggcatgatcaaggcgatagaagatcccgaggaaggtgcaaagagactgatgatggaagcttaccaaagaggaagtgcagacaacataacttgtgtcgtcgtacgtttcttttcagaccaagcaggaggaataggttccagcagcaccaatatcccaatagatcatggtatcgtacctgaccgaatctccggtgactcatcaacctag

SEQ ID NO: 69675 - protein, 389 aa, Arabidopsis thaliana
  peptide (1)..(389): Ceres Seq. ID no. 1822331
MSLLKSRNRSSNINLQFRCVIICLRIGIIPRNVTVDAAAAAINFNEHSNMYSQNGKFSYGYASSPGKRSSMEDFYETRIDGVEGEIVGLFGVFDGHGGARAAEYVKQNLFSNLIRHPKFISDTTAAIADAYNQTDSEFLKSENSQNRDAGSTASTAILVGDRLLVANVGDSRAVICRGGNAIAVSRDHKPDQSDERQRIEDAGGFVMWAGTWRVGGVLAVSRAFGDRLLKQYVVADPEIQVLTFCQNLLLYIKNATLLLTIEHNLHWISIVSYLNGTLQNFLRSLISINGKFQEEKVDSSLEFLILASDGLWDVVSNEEAVGMIKAIEDPEEGAKRLMMEAYQRGSADNITCVVVRFFSDQAGGIGSSSTNIPIDHGIVPDRISGDSST

SEQ ID NO: 69676 - protein, 340 aa, Arabidopsis thaliana
  peptide (1)..(340): Ceres Seq. ID no. 1822332
MYSQNGKFSYGYASSPGKRSSMEDFYETRIDGVEGEIVGLFGVFDGHGGARAAEYVKQNLFSNLIRHPKFISDTTAAIADAYNQTDSEFLKSENSQNRDAGSTASTAILVGDRLLVANVGDSRAVICRGGNAIAVSRDHKPDQSDERQRIEDAGGFVMWAGTWRVGGVLAVSRAFGDRLLKQYVVADPEIQVLTFCQNLLLYIKNATLLLTIEHNLHWISIVSYLNGTLQNFLRSLISINGKFQEEKVDSSLEFLILASDGLWDVVSNEEAVGMIKAIEDPEEGAKRLMMEAYQRGSADNITCVVVRFFSDQAGGIGSSSTNIPIDHGIVPDRISGDSST

SEQ ID NO: 69677 - protein, 319 aa, Arabidopsis thaliana
  peptide (1)..(319): Ceres Seq. ID no. 1822333
MEDFYETRIDGVEGEIVGLFGVFDGHGGARAAEYVKQNLFSNLIRHPKFISDTTAAIADAYNQTDSEFLKSENSQNRDAGSTASTAILVGDRLLVANVGDSRAVICRGGNAIAVSRDHKPDQSDERQRIEDAGGFVMWAGTWRVGGVLAVSRAFGDRLLKQYVVADPEIQVLTFCQNLLLYIKNATLLLTIEHNLHWISIVSYLNGTLQNFLRSLISINGKFQEEKVDSSLEFLILASDGLWDVVSNEEAVGMIKAIEDPEEGAKRLMMEAYQRGSADNITCVVVRFFSDQAGGIGSSSTNIPIDHGIVPDRISGDSST

SEQ ID NO: 69678 - DNA, 1464 bp, Arabidopsis thaliana
  misc_feature (1)..(1464): Ceres Seq. ID no. 1822921
  misc_feature (1)..(1464): Ortholog of  Ceres SEQ ID NO 14310097 as cited in SEQ ID NO 20591
atggagatggatgaagatatggaaatcgagccaatggtgtttgaggttaaagagatcgatctggagtacgaatttgatgcggcgaggtggtacgattttactcgggaagagttaccggaggagtctcaagccgctgagttctggtttcactctgctccgtcgtacgctccttctccttttgtaacaaaactgttactaagagaggaggtttatgatgacaagacggaggcatctacgagatcagaggatgaggaagtcgttgcagatgtttgtgataagtataaaggaacctttcagcaaccaaatcatttagccacagattttaataagacaggaagtagaatgcgttctgggattttttcctcccaacaacaacaaggttgtaatttgaagaaagttccaaatcagcccatatggaaagggccgacggttagcaatcacaaacacactgataaaccaaaattccgagctaagtcaagcatcagaccaactccaaggagctcaacattaatgagacctactgctagccaattagcaaaacaaaataatgccagtaaattccatatgcaagtggatcaaagtcatgataaaggaagttgtgggacatctgggactgaagttcaagcgtctaaaagacagaagcttgatggaggtcttcttcgtaaggttgctgatacaaagcaggaaatgagttttgtccacaagatccccaagaaggatacaactcttgataaaaacgctcaacatgccaggacaaagattactatcccacaggagcctgattttgctacatcacagagggctcacaggatacggcacaagaatgatgcgaagttagaacaagagcaaccagctgtatatagattcaaagcacgtccatttaaccgaaagatatttgatgctccttcattgcccatccggaaaaagagcactccgaaactaccagaattccaagaatttcatttgaagacttcagaaagggctatgcaacattcatcagcagtaacaacacggtctcatgcgtataaggagtcagacaaatctattataactgatatgcttgacggtgataacagagaaagtaggagaccaagcggtatggatatatctaagcatgatgtctcagaaggaagtcacgtttttaaagctcgtcctctgaacaagaagatactttcaagcagaggagacatgggcattttcaaaaatagcaagcgagaaacaacagtacctttggtatggcagtcttaccaattattctttgcacttgatcttctgctctccataaaatccgagatacagccaaacgatggatctcgcacaagattatttcaaccaaaggtaacaagaatggcagcggcaaaaccagtctcttcagctggacaacaaatgcaatttggtaatagtggaataactcctgaaacaaaccagcaatggacagctaggaggaacttaggcattcgctga

SEQ ID NO: 69679 - protein, 487 aa, Arabidopsis thaliana
  peptide (1)..(487): Ceres Seq. ID no. 1822922
MEMDEDMEIEPMVFEVKEIDLEYEFDAARWYDFTREELPEESQAAEFWFHSAPSYAPSPFVTKLLLREEVYDDKTEASTRSEDEEVVADVCDKYKGTFQQPNHLATDFNKTGSRMRSGIFSSQQQQGCNLKKVPNQPIWKGPTVSNHKHTDKPKFRAKSSIRPTPRSSTLMRPTASQLAKQNNASKFHMQVDQSHDKGSCGTSGTEVQASKRQKLDGGLLRKVADTKQEMSFVHKIPKKDTTLDKNAQHARTKITIPQEPDFATSQRAHRIRHKNDAKLEQEQPAVYRFKARPFNRKIFDAPSLPIRKKSTPKLPEFQEFHLKTSERAMQHSSAVTTRSHAYKESDKSIITDMLDGDNRESRRPSGMDISKHDVSEGSHVFKARPLNKKILSSRGDMGIFKNSKRETTVPLVWQSYQLFFALDLLLSIKSEIQPNDGSRTRLFQPKVTRMAAAKPVSSAGQQMQFGNSGITPETNQQWTARRNLGIR

SEQ ID NO: 69680 - protein, 485 aa, Arabidopsis thaliana
  peptide (1)..(485): Ceres Seq. ID no. 1822923
MDEDMEIEPMVFEVKEIDLEYEFDAARWYDFTREELPEESQAAEFWFHSAPSYAPSPFVTKLLLREEVYDDKTEASTRSEDEEVVADVCDKYKGTFQQPNHLATDFNKTGSRMRSGIFSSQQQQGCNLKKVPNQPIWKGPTVSNHKHTDKPKFRAKSSIRPTPRSSTLMRPTASQLAKQNNASKFHMQVDQSHDKGSCGTSGTEVQASKRQKLDGGLLRKVADTKQEMSFVHKIPKKDTTLDKNAQHARTKITIPQEPDFATSQRAHRIRHKNDAKLEQEQPAVYRFKARPFNRKIFDAPSLPIRKKSTPKLPEFQEFHLKTSERAMQHSSAVTTRSHAYKESDKSIITDMLDGDNRESRRPSGMDISKHDVSEGSHVFKARPLNKKILSSRGDMGIFKNSKRETTVPLVWQSYQLFFALDLLLSIKSEIQPNDGSRTRLFQPKVTRMAAAKPVSSAGQQMQFGNSGITPETNQQWTARRNLGIR

SEQ ID NO: 69681 - protein, 481 aa, Arabidopsis thaliana
  peptide (1)..(481): Ceres Seq. ID no. 1822924
MEIEPMVFEVKEIDLEYEFDAARWYDFTREELPEESQAAEFWFHSAPSYAPSPFVTKLLLREEVYDDKTEASTRSEDEEVVADVCDKYKGTFQQPNHLATDFNKTGSRMRSGIFSSQQQQGCNLKKVPNQPIWKGPTVSNHKHTDKPKFRAKSSIRPTPRSSTLMRPTASQLAKQNNASKFHMQVDQSHDKGSCGTSGTEVQASKRQKLDGGLLRKVADTKQEMSFVHKIPKKDTTLDKNAQHARTKITIPQEPDFATSQRAHRIRHKNDAKLEQEQPAVYRFKARPFNRKIFDAPSLPIRKKSTPKLPEFQEFHLKTSERAMQHSSAVTTRSHAYKESDKSIITDMLDGDNRESRRPSGMDISKHDVSEGSHVFKARPLNKKILSSRGDMGIFKNSKRETTVPLVWQSYQLFFALDLLLSIKSEIQPNDGSRTRLFQPKVTRMAAAKPVSSAGQQMQFGNSGITPETNQQWTARRNLGIR

SEQ ID NO: 69682 - DNA, 882 bp, Arabidopsis thaliana
  misc_feature (1)..(882): Ceres Seq. ID no. 1822951
  misc_feature (1)..(882): Ortholog of  Ceres SEQ ID NO 15175492 as cited in SEQ ID NO 56277
  misc_feature (1)..(882): Ortholog of  Ceres SEQ ID NO 13582350 as cited in SEQ ID NO 56734
  misc_feature (1)..(882): Ortholog of  Ceres SEQ ID NO 12476493 as cited in SEQ ID NO 58163
  misc_feature (1)..(882): Ortholog of  Ceres SEQ ID NO 12617090 as cited in SEQ ID NO 64005
atggatccaccattcaacgaaatatacaataaccttttgtataatcagatcacaaagaaagataacgatgtttctgaaataccctttagcttctcagtcacagccgtcgtcgaggaggtggagcttcctgtgattgacgtcagccgtttgattgatggagccgaggaggagagagagaaatgtaaggaagcgattgcgagagcttcgagggagtggggattttttcaagtgataaaccatggaatatcaatggatgtgttggagaagatgagacaagagcaaattagggtctttagagagccttttgacaagaaaagtaactcaacaatggagaaatttgcttcggaatcagaggcattagcatatatgttggcagaggttcttgcagaaaaatctggacaaaattcaagtttcttcaaagaaaactgtgtgagaaatacatgttatctaaggatgaaccgatatccaccttgtcccaaaccatcggaggtgtacggattaatgccacacacggacagtgatttcctcacaatcttgtatcaagatcaagtcggaggactccaacttatcaaagacaatagatggatcgctgttaaacctaatcctaaagctctcattatcaatattggtgacttatttcaggcatggagcaatggcatgtacaaaagtgttgaacaccgtgtgatgacgaacccaaaggtggagagattctcaacggcttattttatgtgtccatcatacgacgccgttatagagtgttcaagtgatcgtcctgcttatagaaatttcagcttcagagaattcagacaacaagttcaagaagatgttaagaagtttggttttaaagttggccttcctaggttccttaatcacgtctactaa

SEQ ID NO: 69683 - protein, 293 aa, Arabidopsis thaliana
  peptide (1)..(293): Ceres Seq. ID no. 1822952
MDPPFNEIYNNLLYNQITKKDNDVSEIPFSFSVTAVVEEVELPVIDVSRLIDGAEEEREKCKEAIARASREWGFFQVINHGISMDVLEKMRQEQIRVFREPFDKKSNSTMEKFASESEALAYMLAEVLAEKSGQNSSFFKENCVRNTCYLRMNRYPPCPKPSEVYGLMPHTDSDFLTILYQDQVGGLQLIKDNRWIAVKPNPKALIINIGDLFQAWSNGMYKSVEHRVMTNPKVERFSTAYFMCPSYDAVIECSSDRPAYRNFSFREFRQQVQEDVKKFGFKVGLPRFLNHVY

SEQ ID NO: 69684 - protein, 210 aa, Arabidopsis thaliana
  peptide (1)..(210): Ceres Seq. ID no. 1822953
MDVLEKMRQEQIRVFREPFDKKSNSTMEKFASESEALAYMLAEVLAEKSGQNSSFFKENCVRNTCYLRMNRYPPCPKPSEVYGLMPHTDSDFLTILYQDQVGGLQLIKDNRWIAVKPNPKALIINIGDLFQAWSNGMYKSVEHRVMTNPKVERFSTAYFMCPSYDAVIECSSDRPAYRNFSFREFRQQVQEDVKKFGFKVGLPRFLNHVY

SEQ ID NO: 69685 - protein, 204 aa, Arabidopsis thaliana
  peptide (1)..(204): Ceres Seq. ID no. 1822954
MRQEQIRVFREPFDKKSNSTMEKFASESEALAYMLAEVLAEKSGQNSSFFKENCVRNTCYLRMNRYPPCPKPSEVYGLMPHTDSDFLTILYQDQVGGLQLIKDNRWIAVKPNPKALIINIGDLFQAWSNGMYKSVEHRVMTNPKVERFSTAYFMCPSYDAVIECSSDRPAYRNFSFREFRQQVQEDVKKFGFKVGLPRFLNHVY

SEQ ID NO: 69686 - DNA, 687 bp, Arabidopsis thaliana
  misc_feature (1)..(687): Ceres Seq. ID no. 1822975
  misc_feature (1)..(687): Ortholog of  Ceres SEQ ID NO 13583590 as cited in SEQ ID NO 62482
atgatcagattcgcgagaccaaaacctataattgactcagtgagttacaatcttctccagaaatgttacgctagtggaacccccaaaggaaaatcgaagctgaagacaggccaatcattgaaacgcaacaaactcacaatcaaaaaaggcggtggaaacggcggtggcagaggtggtgatgaggtggataagggaaaaggaagaatctcagatcaatgcataaacgctccttgtcctgttcgttacctgagacctaaggaaagagagcgagaagcgagacgagagaagctagggctaatcagtaaagcgaggcaaaaagagattgattttcagaagaaaggtggatcctttacgatgggagttactactgcgccgatgaggattgggactccaggattggattacatttcgttagggatttttacggaagatgagttaccaaagtataaggttacagtggaggatgggattagacttgcgaaagagtatagtagagtgcttatgagagagcatagagcgagacgtgtagcggagattagtttgatgaagatgaggaacgctgcggttgaggcattgccggagaatttgaagaaggcggctttagtgcgtgatttgactccgtttccggtgagtcgaggtacggtacgcttactccacctattgaagggtatttggagaggattatga

SEQ ID NO: 69687 - protein, 228 aa, Arabidopsis thaliana
  peptide (1)..(228): Ceres Seq. ID no. 1822976
MIRFARPKPIIDSVSYNLLQKCYASGTPKGKSKLKTGQSLKRNKLTIKKGGGNGGGRGGDEVDKGKGRISDQCINAPCPVRYLRPKEREREARREKLGLISKARQKEIDFQKKGGSFTMGVTTAPMRIGTPGLDYISLGIFTEDELPKYKVTVEDGIRLAKEYSRVLMREHRARRVAEISLMKMRNAAVEALPENLKKAALVRDLTPFPVSRGTVRLLHLLKGIWRGL

SEQ ID NO: 69688 - DNA, 1134 bp, Arabidopsis thaliana
  misc_feature (1)..(1134): Ceres Seq. ID no. 1823009
  misc_feature (1)..(1134): Ortholog of  Ceres SEQ ID NO 13647016 as cited in SEQ ID NO 20325
  misc_feature (1)..(1134): Ortholog of  Ceres SEQ ID NO 13657872 as cited in SEQ ID NO 66357
atggatttgaatataaacaagacgacccctgttcttagtgaccctactacaccagtaagtaaaacaagacttggatcatccttcccttcagggagattcatgatgaattctagaaagaagattcctaaactcgatgatgttcgatctaacggttggttggacgcgatgatatcttcgtctccaccgcgtaaaaggcttgtcaaggatttcaatattgagattgctcctgaagatgatttttctcaacgggcctggatgctcaagtatccttcagcgattacctcgtttgcgcatattgcagctcaagcaaagaacaagaagatagctgtgtttctagattatgatggaacactttctccaatagtcgatgaccctgatcgcgccatcatgtctgatgcgatgcgtgctgctgtgaaagatgtcgccaagtacttcccaacagcaataattagtggtagaagccgtgacaaggtttaccaattggtagggctaaccgaactctattacgcgggtagtcacgggatggacattatgactcctgtaaatccaaatggatcccctgaagaccctaattgtataaaaaccactgaccaacagggtgaggaggtaaacctctttcagcctgctaaagagttcatacccgtcattgaagaggtttataataacctcgttgagataactaaatgtatcaaaggtgcaaaagtagagaaccataagttttgtacttctgtacattaccgtaatgttgacgagaaggactggccacttgttgctcaacgcgttcatgaccacctgaaacgataccctcgtttgcgtataactcacggtagaaaggttttagaggtgcgtcctgtgattgagtggaacaaaggaaaagcagtagagtttctgttagagtctctcggattaagcaacaacgatgagttcctcccaatcttcatcggagatgacaagaccgatgaagatgcattcaaggtactgagggaagggaacagaggatttggaatattggtatcgtctgtaccaaaagaaagcaatgcattttactctcttagagacccttccgaggtgaagaagtttctcaagactttggtgaaatgggggaagatggaaagttcaaaaacaagtttttga

SEQ ID NO: 69689 - protein, 377 aa, Arabidopsis thaliana
  peptide (1)..(377): Ceres Seq. ID no. 1823010
MDLNINKTTPVLSDPTTPVSKTRLGSSFPSGRFMMNSRKKIPKLDDVRSNGWLDAMISSSPPRKRLVKDFNIEIAPEDDFSQRAWMLKYPSAITSFAHIAAQAKNKKIAVFLDYDGTLSPIVDDPDRAIMSDAMRAAVKDVAKYFPTAIISGRSRDKVYQLVGLTELYYAGSHGMDIMTPVNPNGSPEDPNCIKTTDQQGEEVNLFQPAKEFIPVIEEVYNNLVEITKCIKGAKVENHKFCTSVHYRNVDEKDWPLVAQRVHDHLKRYPRLRITHGRKVLEVRPVIEWNKGKAVEFLLESLGLSNNDEFLPIFIGDDKTDEDAFKVLREGNRGFGILVSSVPKESNAFYSLRDPSEVKKFLKTLVKWGKMESSKTSF

SEQ ID NO: 69690 - protein, 344 aa, Arabidopsis thaliana
  peptide (1)..(344): Ceres Seq. ID no. 1823011
MMNSRKKIPKLDDVRSNGWLDAMISSSPPRKRLVKDFNIEIAPEDDFSQRAWMLKYPSAITSFAHIAAQAKNKKIAVFLDYDGTLSPIVDDPDRAIMSDAMRAAVKDVAKYFPTAIISGRSRDKVYQLVGLTELYYAGSHGMDIMTPVNPNGSPEDPNCIKTTDQQGEEVNLFQPAKEFIPVIEEVYNNLVEITKCIKGAKVENHKFCTSVHYRNVDEKDWPLVAQRVHDHLKRYPRLRITHGRKVLEVRPVIEWNKGKAVEFLLESLGLSNNDEFLPIFIGDDKTDEDAFKVLREGNRGFGILVSSVPKESNAFYSLRDPSEVKKFLKTLVKWGKMESSKTSF

SEQ ID NO: 69691 - protein, 343 aa, Arabidopsis thaliana
  peptide (1)..(343): Ceres Seq. ID no. 1823012
MNSRKKIPKLDDVRSNGWLDAMISSSPPRKRLVKDFNIEIAPEDDFSQRAWMLKYPSAITSFAHIAAQAKNKKIAVFLDYDGTLSPIVDDPDRAIMSDAMRAAVKDVAKYFPTAIISGRSRDKVYQLVGLTELYYAGSHGMDIMTPVNPNGSPEDPNCIKTTDQQGEEVNLFQPAKEFIPVIEEVYNNLVEITKCIKGAKVENHKFCTSVHYRNVDEKDWPLVAQRVHDHLKRYPRLRITHGRKVLEVRPVIEWNKGKAVEFLLESLGLSNNDEFLPIFIGDDKTDEDAFKVLREGNRGFGILVSSVPKESNAFYSLRDPSEVKKFLKTLVKWGKMESSKTSF

SEQ ID NO: 69692 - DNA, 1293 bp, Arabidopsis thaliana
  misc_feature (1)..(1293): Ceres Seq. ID no. 1823154
  misc_feature (1)..(1293): Ortholog of  Ceres SEQ ID NO 14304871 as cited in SEQ ID NO 54194
  misc_feature (1)..(1293): Ortholog of  Ceres SEQ ID NO 13597751 as cited in SEQ ID NO 60721
atggctgtggctcgtataaagcttataaggaacaagagattagttgtggtgaagcaaatgaggcgtgacatcgctgttcttcttcaatccggtcaagatgccactgctcgaatcagagttgagcatgtgataagggaacagaacattcaggcagcaaacgaaatcattgagcttttctgtgaacttattgtttctcgtctcactatcatcactaagcaaaagcaatgtcctgtggatcttaaggaaggtattgctagtttgatttttgctgcgcctagatgctctgaaattcctgagcttggagatcttagagacatctttgcgaagaaatatgggaaagattttgtatctgctgctactgatttgcgtcctagctgcggtgttaaccggatgttgattgataagctttcggttagaaatcccggtggagaatacaaactgaaaatcatgaaggaaattgcaaaggaattccaggttgattgggatactacagagacagagcaagaacttctcaaacctcaagaagaaagcatagacgggccacgtaagtttgttagcgcttcaagcttaccagttaatcgtgcagctatcaacgagcctattgatcctaccaaagcagtgccaagatcgactagtagcatgagcatcaacacgcattatcatgacaccgagtcagcagcggaagcagctacagaattagccaaacaggcagttgcagcagcacaagtagcctccttattagctaccagaagagacagcagcaacaaggagttctctgtatcttctgatcattcaacacaccagaaggattcacagtacatggatcatcatcatcatcatccaggttcaagaagacaatcacgagactccgaaacaagttcctattacgcaaaacctggtgcagaaaacagaggaatgggtaggagacacagctacaacaatccgggtattaatgaatctgactacgaggaagagtataccaataccgaagcagaagcaaaagaaacaatgaggaggagacacagctacaaccctcgatcagttcctcctcctgcaacttctgagatcaagtttgatgagtcagactactacgaggaagagacagagccagatgaaccatcacagggtcgtgtttcttctctcccgccaaaccgagcaccgcctcaggctcctcagtccggtgagtccagacaggactcgagcggtcaccaggttcacccaaaactgcctgactatgatattttggctgcacgttttgaagcaatcagacacagtaaagggccattgatctga

SEQ ID NO: 69693 - protein, 430 aa, Arabidopsis thaliana
  peptide (1)..(430): Ceres Seq. ID no. 1823155
MAVARIKLIRNKRLVVVKQMRRDIAVLLQSGQDATARIRVEHVIREQNIQAANEIIELFCELIVSRLTIITKQKQCPVDLKEGIASLIFAAPRCSEIPELGDLRDIFAKKYGKDFVSAATDLRPSCGVNRMLIDKLSVRNPGGEYKLKIMKEIAKEFQVDWDTTETEQELLKPQEESIDGPRKFVSASSLPVNRAAINEPIDPTKAVPRSTSSMSINTHYHDTESAAEAATELAKQAVAAAQVASLLATRRDSSNKEFSVSSDHSTHQKDSQYMDHHHHHPGSRRQSRDSETSSYYAKPGAENRGMGRRHSYNNPGINESDYEEEYTNTEAEAKETMRRRHSYNPRSVPPPATSEIKFDESDYYEEETEPDEPSQGRVSSLPPNRAPPQAPQSGESRQDSSGHQVHPKLPDYDILAARFEAIRHSKGPLI

SEQ ID NO: 69694 - protein, 411 aa, Arabidopsis thaliana
  peptide (1)..(411): Ceres Seq. ID no. 1823156
MRRDIAVLLQSGQDATARIRVEHVIREQNIQAANEIIELFCELIVSRLTIITKQKQCPVDLKEGIASLIFAAPRCSEIPELGDLRDIFAKKYGKDFVSAATDLRPSCGVNRMLIDKLSVRNPGGEYKLKIMKEIAKEFQVDWDTTETEQELLKPQEESIDGPRKFVSASSLPVNRAAINEPIDPTKAVPRSTSSMSINTHYHDTESAAEAATELAKQAVAAAQVASLLATRRDSSNKEFSVSSDHSTHQKDSQYMDHHHHHPGSRRQSRDSETSSYYAKPGAENRGMGRRHSYNNPGINESDYEEEYTNTEAEAKETMRRRHSYNPRSVPPPATSEIKFDESDYYEEETEPDEPSQGRVSSLPPNRAPPQAPQSGESRQDSSGHQVHPKLPDYDILAARFEAIRHSKGPLI

SEQ ID NO: 69695 - protein, 300 aa, Arabidopsis thaliana
  peptide (1)..(300): Ceres Seq. ID no. 1823157
MLIDKLSVRNPGGEYKLKIMKEIAKEFQVDWDTTETEQELLKPQEESIDGPRKFVSASSLPVNRAAINEPIDPTKAVPRSTSSMSINTHYHDTESAAEAATELAKQAVAAAQVASLLATRRDSSNKEFSVSSDHSTHQKDSQYMDHHHHHPGSRRQSRDSETSSYYAKPGAENRGMGRRHSYNNPGINESDYEEEYTNTEAEAKETMRRRHSYNPRSVPPPATSEIKFDESDYYEEETEPDEPSQGRVSSLPPNRAPPQAPQSGESRQDSSGHQVHPKLPDYDILAARFEAIRHSKGPLI

SEQ ID NO: 69696 - DNA, 1512 bp, Arabidopsis thaliana
  misc_feature (1)..(1512): Ceres Seq. ID no. 1823172
  misc_feature (1)..(1512): Ortholog of  Ceres SEQ ID NO 14307724 as cited in SEQ ID NO 53951
atggaaggtctcgattcagtcttcttgtctaatcaaaccacacaccaaccggttcgatctgcgagtcttccttcaagaatccatccactctctgttaaactcagaacagctttgagccggctcagtatctggcggagatcttcttcctcaatctcggtttcagcttcgtttgggtatgagacggttctcgttggactcgtgaacctcactgagctctacggttgcgtgcatgagctacttgagtctccttacgtgaaacacactcttcttcatcaccaggaagggaaacttctggacgaatctttagatggatctgttctgttgctcgacgtgtatgaggggacacgggaggtgattgtagcgatgagagaacacgtgacgaatctcaaatctgctcttcgtaggaaaggtagcttagagaaggaggcgaaagcatactttaacttgcggaagaaggcaaagaaagaaatctctaaacagattaatgcactcaagaaaatggaaaccagagatatttccaccaacacagatcaagattcagcgatagcatccacgagtgttctgagagagacaatccaaatcactgtctcgatgttcagacatcttttgttgttcctatcaacaataccaccaccaccatcgcccgcaatattcaagactaccatagggcttttgtcgattcctttcgtatcgccatcattatcagataaatctctgattctgataaaggaaatgaagagtcttgatgatgtctttctgggttctattttggattcgagaaaaactttattcgaagtagaaacaatggagaacgagaagatgaggagagatgtagttgaagatggttttcgtgatctggaggcagaactggactctgtttccaagtgtctagttaaaaacagagttttgttccttaacatcctcaatcttgtttgtgagatatcgcagcaccactcaagccgtgaatttgggtccatgtcttggaaaggaggccgaggaaaaccaaaaggatatggcggcgattatggcaagcctgagccttttgtgattttccctgaaattacgttacctgatccaaaatcaatctcaacagactcgcaattagttgtagttcaaagctactttactttcaataagttttggatgaattctccttatcacttatgcgatggtggtgtttctaagaaagagaaagcgagtttagatattgagagacctgataacttctctaaagaacttgttggagatactcgaagagaacaacggcctgtgaagagagctaaatggagtcaagaagctgatttgcagaaattggatgtgtttgagaagcttgagtctaagtttaagactcaaggcaatgaagagaaagaagacggagaagatgatgaacaagttgtggaatcagaaggagaagaatcagataacggagattatgatcagaatcaagactttgatgatgatgaagacgattataatcatgaggaggatggtggatttgaagaggtgtattaa

SEQ ID NO: 69697 - protein, 503 aa, Arabidopsis thaliana
  peptide (1)..(503): Ceres Seq. ID no. 1823173
MEGLDSVFLSNQTTHQPVRSASLPSRIHPLSVKLRTALSRLSIWRRSSSSISVSASFGYETVLVGLVNLTELYGCVHELLESPYVKHTLLHHQEGKLLDESLDGSVLLLDVYEGTREVIVAMREHVTNLKSALRRKGSLEKEAKAYFNLRKKAKKEISKQINALKKMETRDISTNTDQDSAIASTSVLRETIQITVSMFRHLLLFLSTIPPPPSPAIFKTTIGLLSIPFVSPSLSDKSLILIKEMKSLDDVFLGSILDSRKTLFEVETMENEKMRRDVVEDGFRDLEAELDSVSKCLVKNRVLFLNILNLVCEISQHHSSREFGSMSWKGGRGKPKGYGGDYGKPEPFVIFPEITLPDPKSISTDSQLVVVQSYFTFNKFWMNSPYHLCDGGVSKKEKASLDIERPDNFSKELVGDTRREQRPVKRAKWSQEADLQKLDVFEKLESKFKTQGNEEKEDGEDDEQVVESEGEESDNGDYDQNQDFDDDEDDYNHEEDGGFEEVY

SEQ ID NO: 69698 - protein, 382 aa, Arabidopsis thaliana
  peptide (1)..(382): Ceres Seq. ID no. 1823174
MREHVTNLKSALRRKGSLEKEAKAYFNLRKKAKKEISKQINALKKMETRDISTNTDQDSAIASTSVLRETIQITVSMFRHLLLFLSTIPPPPSPAIFKTTIGLLSIPFVSPSLSDKSLILIKEMKSLDDVFLGSILDSRKTLFEVETMENEKMRRDVVEDGFRDLEAELDSVSKCLVKNRVLFLNILNLVCEISQHHSSREFGSMSWKGGRGKPKGYGGDYGKPEPFVIFPEITLPDPKSISTDSQLVVVQSYFTFNKFWMNSPYHLCDGGVSKKEKASLDIERPDNFSKELVGDTRREQRPVKRAKWSQEADLQKLDVFEKLESKFKTQGNEEKEDGEDDEQVVESEGEESDNGDYDQNQDFDDDEDDYNHEEDGGFEEVY

SEQ ID NO: 69699 - protein, 337 aa, Arabidopsis thaliana
  peptide (1)..(337): Ceres Seq. ID no. 1823175
METRDISTNTDQDSAIASTSVLRETIQITVSMFRHLLLFLSTIPPPPSPAIFKTTIGLLSIPFVSPSLSDKSLILIKEMKSLDDVFLGSILDSRKTLFEVETMENEKMRRDVVEDGFRDLEAELDSVSKCLVKNRVLFLNILNLVCEISQHHSSREFGSMSWKGGRGKPKGYGGDYGKPEPFVIFPEITLPDPKSISTDSQLVVVQSYFTFNKFWMNSPYHLCDGGVSKKEKASLDIERPDNFSKELVGDTRREQRPVKRAKWSQEADLQKLDVFEKLESKFKTQGNEEKEDGEDDEQVVESEGEESDNGDYDQNQDFDDDEDDYNHEEDGGFEEVY

SEQ ID NO: 69700 - DNA, 2754 bp, Arabidopsis thaliana
  misc_feature (1)..(2754): Ceres Seq. ID no. 1823206
  misc_feature (1)..(2754): Ortholog of  Ceres SEQ ID NO 15226780 as cited in SEQ ID NO 55159
atgttcgtgaagaagttggtcgagatagcagccaagaagcctggaggaagttcatcagaaggactgagagctaatgacgttgagccacgtatcgctctgcattacggaatcccttcaggttctcacttgtttgcttatgatccatttcagaagatcctcgccgtttccaccaattatgttggagattcttctggtaatgtatcagtgtttaagatcgaacaagattctaatcaagttatacaactggagtacaccataccttacctagcatcaaatggaagcagagtttcagttggctatagcaatggagatattctaatatggagcattccttccaaaggagaatgctcgccagagagttctgctatgatttgcaagcttaacctcggatacaaatccgaaaagataccaatagcttctctgaaatgggtttatgctgaagggaaggcaagccgggtttatgtcattggatcatcctcaaactcgttgcaggtggttttgttgaatgagcaaaccgaaactcggatgattaagctgggacttcatgtttctgagccttgtgctgatatggagatgatcatagctgatgttaatgaacagagcaagcataaacaagattttctgtttgttcttggaaagtctggacgtgtctatgcttacgatgattatatgattgagaagtatctgattcagtctcagtccaaatcatctccttccctcccaaaggaaactgtggttaagctgccattttcagattcaagcagcattaccgtaggaaaattcctcacaaatccttcacacttactcaatctatcagatgaggattatgctcagctggcgaaagatgctgtgccgtttcttccttttcatacagttccaaaggaaagttcccgttctgcacattttcctggtttcacaaaggttaagaatgtttacatcacaggacactgtgacggaaccattagtgtatgggacatgacctgttcttttcccattcttgtcttgtttctgaaagaacagatagatcaagatgtatcttcacgcggaaatgcggcattgacagctttacattatgacagcaactcaagacttcttgtttctggtgatcataacggaatggttcgcctttataggttcaaacctgagccatacctaacagaaaacagttttatccctttccaaggaagcttaaagaaaggaaataaccatattgttcaaagtgttaagtacatcaagcttactggttccataacctgtattcagaagagccaaaactcaaaacatctcgctattggatcagatcaaggacatgattctttagttgaggtgattgatgcgttaacaccggtttacttacaggtttctctggttgacattgaggaagcaaatgtgttatacacaaaacacattgcaagtgatatatgtccagggatcatctccttgcaattcgagagttgcattgtgcaaggcttcgagaagaacgtgttagtggttgctatgagagactcgtcggtttttgctctggacagcgacacgggaaatatgattggaaccaacatgattaagcctaaaaagccattcaaggttctgtatatgcagatcctagatggaaagcaagatacttcaggaaatggatttgatacgagcagagagagcacagttgaggagatctcgataaggcagccttcggttttggtttgttcggagaaagctatatatatctactccttggctcacgttgtccagggagtgaagaaggtcctccacaagaaaaagttcagttcttcacccatttgctcagcttccacattctatggaacctctggtgttggtcttacacttgttttcacagatggaactgttgagataaggtctttgccagaactctcccagctaaaacaaacttccattagaggcttcacatattcttcaccaaaaccaaactcgttaccagagattaccatatccgcttcttgggatggagatctagtcatggtgaatggagatgatgaacttattgttagctcagttttacctcaaaaggaaacttttaggcttgtcgagtccatgaatcgagtttacaagaaagataactcggtttgtcacgaaggaatcatcacatcatcatctccaagggaaaagaagagtatgtttggttctgttttcaagactaaatcaaagcgcacaactgatacagaaccagaaagctccaaggaaacgatcgaggagctgtctaaaatcttctctacagctaatttcccctggaacaacaatgttgagaatagtagagagatcaatacaattactagggtggaagatgaagaagagttggacatagatgacattgacattgacgatcatcatcctaatcaacaacaacaagagaagcctaaagaacaagggatattgtcagggcttagtaaacagaagatggcgaataggtttagtaatttcaaaggtaagctgaaacagatggcagctaagaatgagaagagtgttgtaaccaatgacgagaagcatgaggagaaaaacggcgccacagttgatcagatcaagaagaaatacgggtttacctcgtccgatgaaatgggagctgccaaaatggctcagagcaaacttcaagacaacctgaaaaagttacagggaattagcttgaggacgacggaaatggaagatactgcaaagtctttctcctctacggcaaaggaactactaaacgctgttgagttcaataaacagagctcaaaatcttag

SEQ ID NO: 69701 - protein, 917 aa, Arabidopsis thaliana
  peptide (1)..(917): Ceres Seq. ID no. 1823207
MFVKKLVEIAAKKPGGSSSEGLRANDVEPRIALHYGIPSGSHLFAYDPFQKILAVSTNYVGDSSGNVSVFKIEQDSNQVIQLEYTIPYLASNGSRVSVGYSNGDILIWSIPSKGECSPESSAMICKLNLGYKSEKIPIASLKWVYAEGKASRVYVIGSSSNSLQVVLLNEQTETRMIKLGLHVSEPCADMEMIIADVNEQSKHKQDFLFVLGKSGRVYAYDDYMIEKYLIQSQSKSSPSLPKETVVKLPFSDSSSITVGKFLTNPSHLLNLSDEDYAQLAKDAVPFLPFHTVPKESSRSAHFPGFTKVKNVYITGHCDGTISVWDMTCSFPILVLFLKEQIDQDVSSRGNAALTALHYDSNSRLLVSGDHNGMVRLYRFKPEPYLTENSFIPFQGSLKKGNNHIVQSVKYIKLTGSITCIQKSQNSKHLAIGSDQGHDSLVEVIDALTPVYLQVSLVDIEEANVLYTKHIASDICPGIISLQFESCIVQGFEKNVLVVAMRDSSVFALDSDTGNMIGTNMIKPKKPFKVLYMQILDGKQDTSGNGFDTSRESTVEEISIRQPSVLVCSEKAIYIYSLAHVVQGVKKVLHKKKFSSSPICSASTFYGTSGVGLTLVFTDGTVEIRSLPELSQLKQTSIRGFTYSSPKPNSLPEITISASWDGDLVMVNGDDELIVSSVLPQKETFRLVESMNRVYKKDNSVCHEGIITSSSPREKKSMFGSVFKTKSKRTTDTEPESSKETIEELSKIFSTANFPWNNNVENSREINTITRVEDEEELDIDDIDIDDHHPNQQQQEKPKEQGILSGLSKQKMANRFSNFKGKLKQMAAKNEKSVVTNDEKHEEKNGATVDQIKKKYGFTSSDEMGAAKMAQSKLQDNLKKLQGISLRTTEMEDTAKSFSSTAKELLNAVEFNKQSSKS

SEQ ID NO: 69702 - protein, 795 aa, Arabidopsis thaliana
  peptide (1)..(795): Ceres Seq. ID no. 1823208
MICKLNLGYKSEKIPIASLKWVYAEGKASRVYVIGSSSNSLQVVLLNEQTETRMIKLGLHVSEPCADMEMIIADVNEQSKHKQDFLFVLGKSGRVYAYDDYMIEKYLIQSQSKSSPSLPKETVVKLPFSDSSSITVGKFLTNPSHLLNLSDEDYAQLAKDAVPFLPFHTVPKESSRSAHFPGFTKVKNVYITGHCDGTISVWDMTCSFPILVLFLKEQIDQDVSSRGNAALTALHYDSNSRLLVSGDHNGMVRLYRFKPEPYLTENSFIPFQGSLKKGNNHIVQSVKYIKLTGSITCIQKSQNSKHLAIGSDQGHDSLVEVIDALTPVYLQVSLVDIEEANVLYTKHIASDICPGIISLQFESCIVQGFEKNVLVVAMRDSSVFALDSDTGNMIGTNMIKPKKPFKVLYMQILDGKQDTSGNGFDTSRESTVEEISIRQPSVLVCSEKAIYIYSLAHVVQGVKKVLHKKKFSSSPICSASTFYGTSGVGLTLVFTDGTVEIRSLPELSQLKQTSIRGFTYSSPKPNSLPEITISASWDGDLVMVNGDDELIVSSVLPQKETFRLVESMNRVYKKDNSVCHEGIITSSSPREKKSMFGSVFKTKSKRTTDTEPESSKETIEELSKIFSTANFPWNNNVENSREINTITRVEDEEELDIDDIDIDDHHPNQQQQEKPKEQGILSGLSKQKMANRFSNFKGKLKQMAAKNEKSVVTNDEKHEEKNGATVDQIKKKYGFTSSDEMGAAKMAQSKLQDNLKKLQGISLRTTEMEDTAKSFSSTAKELLNAVEFNKQSSKS

SEQ ID NO: 69703 - protein, 742 aa, Arabidopsis thaliana
  peptide (1)..(742): Ceres Seq. ID no. 1823209
MIKLGLHVSEPCADMEMIIADVNEQSKHKQDFLFVLGKSGRVYAYDDYMIEKYLIQSQSKSSPSLPKETVVKLPFSDSSSITVGKFLTNPSHLLNLSDEDYAQLAKDAVPFLPFHTVPKESSRSAHFPGFTKVKNVYITGHCDGTISVWDMTCSFPILVLFLKEQIDQDVSSRGNAALTALHYDSNSRLLVSGDHNGMVRLYRFKPEPYLTENSFIPFQGSLKKGNNHIVQSVKYIKLTGSITCIQKSQNSKHLAIGSDQGHDSLVEVIDALTPVYLQVSLVDIEEANVLYTKHIASDICPGIISLQFESCIVQGFEKNVLVVAMRDSSVFALDSDTGNMIGTNMIKPKKPFKVLYMQILDGKQDTSGNGFDTSRESTVEEISIRQPSVLVCSEKAIYIYSLAHVVQGVKKVLHKKKFSSSPICSASTFYGTSGVGLTLVFTDGTVEIRSLPELSQLKQTSIRGFTYSSPKPNSLPEITISASWDGDLVMVNGDDELIVSSVLPQKETFRLVESMNRVYKKDNSVCHEGIITSSSPREKKSMFGSVFKTKSKRTTDTEPESSKETIEELSKIFSTANFPWNNNVENSREINTITRVEDEEELDIDDIDIDDHHPNQQQQEKPKEQGILSGLSKQKMANRFSNFKGKLKQMAAKNEKSVVTNDEKHEEKNGATVDQIKKKYGFTSSDEMGAAKMAQSKLQDNLKKLQGISLRTTEMEDTAKSFSSTAKELLNAVEFNKQSSKS

SEQ ID NO: 69704 - DNA, 1545 bp, Arabidopsis thaliana
  misc_feature (1)..(1545): Ceres Seq. ID no. 1823437
  misc_feature (1)..(1545): Ortholog of  Ceres SEQ ID NO 14307156 as cited in SEQ ID NO 54069
  misc_feature (1)..(1545): Ortholog of  Ceres SEQ ID NO 13599044 as cited in SEQ ID NO 0
atgcatctgattaatgcggtggcggcggcgaggattttatccggaatcggacaatctaacggtaataacggaggagaagcgattccgtttggatcgtttgagtggatcacttacgccggaatatcttgtttcctcgtactcttcgccgggattatgtctggtcttactttgggacttatgtctcttggtcttgtcgagcttgagattcttcaacgtagtggtactcctaatgagaagaaacaagccgctgcgatttttccggttgttcagaaacagcatcagcttttagtgacactgcttctgtgtaatgctatggctatggaggggcttcctatatatttggataagttattcaatgaatacgttgcgattattctttctgtcacattcgttcttgcttacggtgaggttattcctcaagcgatatgcactaggtatggactcgcggttggagcgaattttgtctggcttgtccgcattttaatgactctctgctatccgattgcctttcccattggcaaggtaaatatagtgtgtttggtcaagaatgttttggaatgtagtctgattttagatttggtgctgggacacaatgatgctttatttaggcgggctcagttgaaagctcttgtatccattcacagccaagaggctggtaagggaggtgagcttacacatgatgagacgacaatcattagtggagctcttgatttgactgagaagactgcacaagaagccatgacaccaattgagtctaccttctccttggatgtaaattcaaaattggattgggaagctatggggaagattctggcacgaggccatagccgcgttcctgtctactctgggaatccgaaaaacgttatcggacttctcttggtaatgttgctgactcttattttgcatgtttcaatggtggcttatcatgtttctgcaaactctaatcaagaaattgttctgttttctagggttccagctgatatgcctctctatgatatactgaatgagtttcaaaagggaagcagtcacatggctgcagttgtgaaggttaaggggaaaagcaaagtcccaccttcaactttgcttgaagaacacactgatgaaagcaatgactccgacttgactgcacctttgttactaaaacgagagggaaaccatgacaatgtcattgtcacaatcgacaaggctaatggacaatctttctttcaaaacaacgagagtggacctcacgggttttcacatacttcagaggctatcgaggatggtgaggtaattggtatcatcactttagaagatgtctttgaagaacttttgcaagaagagattgtggatgaaactgatgaatatgttgacgtacataaaaggattcgagtagcagcagcagcggctgcttcatcaatagcgagagctccttcaagccggaagttgcttgcgcaaaagggaactggaggacaaaataagcaagggcagacgaataaagttcctggtcaggaacaagataaaatgcttggaactattaccgagccgattcgaagaaacaactga

SEQ ID NO: 69705 - protein, 514 aa, Arabidopsis thaliana
  peptide (1)..(514): Ceres Seq. ID no. 1823438
MHLINAVAAARILSGIGQSNGNNGGEAIPFGSFEWITYAGISCFLVLFAGIMSGLTLGLMSLGLVELEILQRSGTPNEKKQAAAIFPVVQKQHQLLVTLLLCNAMAMEGLPIYLDKLFNEYVAIILSVTFVLAYGEVIPQAICTRYGLAVGANFVWLVRILMTLCYPIAFPIGKVNIVCLVKNVLECSLILDLVLGHNDALFRRAQLKALVSIHSQEAGKGGELTHDETTIISGALDLTEKTAQEAMTPIESTFSLDVNSKLDWEAMGKILARGHSRVPVYSGNPKNVIGLLLVMLLTLILHVSMVAYHVSANSNQEIVLFSRVPADMPLYDILNEFQKGSSHMAAVVKVKGKSKVPPSTLLEEHTDESNDSDLTAPLLLKREGNHDNVIVTIDKANGQSFFQNNESGPHGFSHTSEAIEDGEVIGIITLEDVFEELLQEEIVDETDEYVDVHKRIRVAAAAAASSIARAPSSRKLLAQKGTGGQNKQGQTNKVPGQEQDKMLGTITEPIRRNN

SEQ ID NO: 69706 - protein, 463 aa, Arabidopsis thaliana
  peptide (1)..(463): Ceres Seq. ID no. 1823439
MSGLTLGLMSLGLVELEILQRSGTPNEKKQAAAIFPVVQKQHQLLVTLLLCNAMAMEGLPIYLDKLFNEYVAIILSVTFVLAYGEVIPQAICTRYGLAVGANFVWLVRILMTLCYPIAFPIGKVNIVCLVKNVLECSLILDLVLGHNDALFRRAQLKALVSIHSQEAGKGGELTHDETTIISGALDLTEKTAQEAMTPIESTFSLDVNSKLDWEAMGKILARGHSRVPVYSGNPKNVIGLLLVMLLTLILHVSMVAYHVSANSNQEIVLFSRVPADMPLYDILNEFQKGSSHMAAVVKVKGKSKVPPSTLLEEHTDESNDSDLTAPLLLKREGNHDNVIVTIDKANGQSFFQNNESGPHGFSHTSEAIEDGEVIGIITLEDVFEELLQEEIVDETDEYVDVHKRIRVAAAAAASSIARAPSSRKLLAQKGTGGQNKQGQTNKVPGQEQDKMLGTITEPIRRNN

SEQ ID NO: 69707 - protein, 455 aa, Arabidopsis thaliana
  peptide (1)..(455): Ceres Seq. ID no. 1823440
MSLGLVELEILQRSGTPNEKKQAAAIFPVVQKQHQLLVTLLLCNAMAMEGLPIYLDKLFNEYVAIILSVTFVLAYGEVIPQAICTRYGLAVGANFVWLVRILMTLCYPIAFPIGKVNIVCLVKNVLECSLILDLVLGHNDALFRRAQLKALVSIHSQEAGKGGELTHDETTIISGALDLTEKTAQEAMTPIESTFSLDVNSKLDWEAMGKILARGHSRVPVYSGNPKNVIGLLLVMLLTLILHVSMVAYHVSANSNQEIVLFSRVPADMPLYDILNEFQKGSSHMAAVVKVKGKSKVPPSTLLEEHTDESNDSDLTAPLLLKREGNHDNVIVTIDKANGQSFFQNNESGPHGFSHTSEAIEDGEVIGIITLEDVFEELLQEEIVDETDEYVDVHKRIRVAAAAAASSIARAPSSRKLLAQKGTGGQNKQGQTNKVPGQEQDKMLGTITEPIRRNN

SEQ ID NO: 69708 - DNA, 1449 bp, Arabidopsis thaliana
  misc_feature (1)..(1449): Ceres Seq. ID no. 1823509
  misc_feature (1)..(1449): Ortholog of  Ceres SEQ ID NO 15177184 as cited in SEQ ID NO 58157
atggagaaacccatctccatcacgacggggaagtttcggaccaacaacaacaacaatcataacaatgtctggttcgttgttccactcttctttatcctctgtttcgttctcctctgtttcgactactctgctctcttcaccgacacagacgaaaccgctttctcaattcccgacgttacccagaaatcaacatcctctgaattcacgaaagatgacaacttttctcgatttcccgacgacccatctcctgattcttcctgctccggtcggtatatttacgttcatgaacttccgtatagattcaatggtgatttgcttgataattgctttaagattactagaggaaccgagaaagatatttgtccttacatcgaaaactatggttttggtcctgtcattaagaattacgagaatgtgttgttgaaacaaagttggtttacgaccaatcagttcatgctcgaggtgatattccacaacaagatgataaattacagatgtttgactaatgattcgtcactagcgtctgcggttttcgtgccgttttacgcaggtcttgatatgagtaggtatctttggggtttcaacattacgaaagagtggggtcgaatgtctggtagagaccatttcttggtttcaggaaggattgcttgggatttcaggagacagactgataacgaatctgattggggaagcaagcttcggttcttacccgagtcgcggaacatgtcgatgttgtccatcgaatcgagttcttggaagaatgattacgctattccgtatccgacttgtttccatccaagatcagtggatgagattgtggagtggcaggagctaatgaggtctcgaaaacgcgagtatctattcacctttgcgggtgctccaaggcctgaatataaagactcggttcgagggaagattatagatgagtgtttggagtcaaagaagcaatgttacttgctagactgtaactatgggaatgtgaattgtgacaaccctgtcaatgtgatgaaggttttcaggaactcggtgttttgtcttcagccaccgggctgcattccggtgttcttccatccagggacagcgtacgctcaatacaagtggcatttgcccaagaatcactcgagttactcggtttatctaccggttaaggatgtgaaggagtggaatatcaaaatcaaggagaggttgattgagattccagaggaaagagtggtgaggttgagagaagaggttataaggttgataccgaaggttgtctacgctgatccgaagtacggatcggatgggagtgaagatgcatttgagttggctgtgaagggaatgttggagaggattgaagaagtgagagagatgatgagacaagggaaagatggtagtgatgggtttgatgatagagatgattataagtatactttttctccatatgaagaacctcaagttttggcttaa

SEQ ID NO: 69709 - protein, 482 aa, Arabidopsis thaliana
  peptide (1)..(482): Ceres Seq. ID no. 1823510
MEKPISITTGKFRTNNNNNHNNVWFVVPLFFILCFVLLCFDYSALFTDTDETAFSIPDVTQKSTSSEFTKDDNFSRFPDDPSPDSSCSGRYIYVHELPYRFNGDLLDNCFKITRGTEKDICPYIENYGFGPVIKNYENVLLKQSWFTTNQFMLEVIFHNKMINYRCLTNDSSLASAVFVPFYAGLDMSRYLWGFNITKEWGRMSGRDHFLVSGRIAWDFRRQTDNESDWGSKLRFLPESRNMSMLSIESSSWKNDYAIPYPTCFHPRSVDEIVEWQELMRSRKREYLFTFAGAPRPEYKDSVRGKIIDECLESKKQCYLLDCNYGNVNCDNPVNVMKVFRNSVFCLQPPGCIPVFFHPGTAYAQYKWHLPKNHSSYSVYLPVKDVKEWNIKIKERLIEIPEERVVRLREEVIRLIPKVVYADPKYGSDGSEDAFELAVKGMLERIEEVREMMRQGKDGSDGFDDRDDYKYTFSPYEEPQVLA

SEQ ID NO: 69710 - protein, 331 aa, Arabidopsis thaliana
  peptide (1)..(331): Ceres Seq. ID no. 1823511
MLEVIFHNKMINYRCLTNDSSLASAVFVPFYAGLDMSRYLWGFNITKEWGRMSGRDHFLVSGRIAWDFRRQTDNESDWGSKLRFLPESRNMSMLSIESSSWKNDYAIPYPTCFHPRSVDEIVEWQELMRSRKREYLFTFAGAPRPEYKDSVRGKIIDECLESKKQCYLLDCNYGNVNCDNPVNVMKVFRNSVFCLQPPGCIPVFFHPGTAYAQYKWHLPKNHSSYSVYLPVKDVKEWNIKIKERLIEIPEERVVRLREEVIRLIPKVVYADPKYGSDGSEDAFELAVKGMLERIEEVREMMRQGKDGSDGFDDRDDYKYTFSPYEEPQVLA

SEQ ID NO: 69711 - protein, 322 aa, Arabidopsis thaliana
  peptide (1)..(322): Ceres Seq. ID no. 1823512
MINYRCLTNDSSLASAVFVPFYAGLDMSRYLWGFNITKEWGRMSGRDHFLVSGRIAWDFRRQTDNESDWGSKLRFLPESRNMSMLSIESSSWKNDYAIPYPTCFHPRSVDEIVEWQELMRSRKREYLFTFAGAPRPEYKDSVRGKIIDECLESKKQCYLLDCNYGNVNCDNPVNVMKVFRNSVFCLQPPGCIPVFFHPGTAYAQYKWHLPKNHSSYSVYLPVKDVKEWNIKIKERLIEIPEERVVRLREEVIRLIPKVVYADPKYGSDGSEDAFELAVKGMLERIEEVREMMRQGKDGSDGFDDRDDYKYTFSPYEEPQVLA

SEQ ID NO: 69712 - DNA, 1386 bp, Arabidopsis thaliana
  misc_feature (1)..(1386): Ceres Seq. ID no. 1823594
  misc_feature (1)..(1386): Ortholog of  Ceres SEQ ID NO 13657138 as cited in SEQ ID NO 65923
  misc_feature (1)..(1386): Ortholog of  Ceres SEQ ID NO 13584744 as cited in SEQ ID NO 69137
atgggtgaagaaaagaggagaatttcaggaagatcagtttcacttccatcgatagacatattactagacgagaaaccaggttggccatttcttaaaagagcaagtttagggacaccacaacaagttcacaaatggcacacacgaaaagtctcagtggtcaattgggtcatgagcttacctgaacggtttccaaatcatcaacagactctaaactatgagacaagcttgataaagaaacaaatcaaggacatattgagagacaataacaaatggttcaactacaatgttcttaggaaagcaacatcagatttctctcaagagaatgtgattgggaaaggaggatgcaacgaagtgtaccgagggattcttgaagatggaaaaggcattgcagtgaaaatcttgaagtcatcatctaaagaagcaatgacaaatttcgttcatgaaatcaacattatctcttctttgagtcaccaaaacatctcaccgttacttggtgtttgtgtccaagacaatgaactaatctccgtttacaatctttcaaacacaggaagtttagaagaaacccttcacggtaagcaaaagggaaagtatgtattatcatgggaagagagattcaagatagctatcgggttggcggaagcattagactatcttcataaccgatgttctaagccagtgattcatagagatgtcaaaacttctaacgtccttctatcacttgagctccaacctcagctgtcagattttggtctgtcgatgtggggaccgacaacatcttctcgatattcgatacaaggtgatgtggtgggaacatttggatatcttgcaccggagtacttcatgtatggaaaagtcagtgataaagttgatgtttacgcctttggagtggttctgcttgaactcatttctggaagaaatcctatttcacctcagaatcctagaggacaagagagtttgcataagcaacacttcgtgaaacctaagaaaagataccttggaatgcaggcaaagcctttgattgataccggaaatttaaaagtactgttggatccagacgttacagatatattcgacgagtctcagtttcaaagaatggtacttgctgcttcacattgcctcacaagatcagccacacatcgtcccaatataagacaaatactgaggctactaagagatgaaaacgaagccgggaaatggattatggaagaagaaggaaatgaagattgcttcgatgacgaggtttacccgaattccagcacagaattacacttaaaccttgcgatgcttgaggtggaagacgatgaaactgcatcaatcagcagcatggagagaagtaacaacagccttttttcttctacttgttcatctagggagcttcaaacataa

SEQ ID NO: 69713 - protein, 461 aa, Arabidopsis thaliana
  peptide (1)..(461): Ceres Seq. ID no. 1823595
MGEEKRRISGRSVSLPSIDILLDEKPGWPFLKRASLGTPQQVHKWHTRKVSVVNWVMSLPERFPNHQQTLNYETSLIKKQIKDILRDNNKWFNYNVLRKATSDFSQENVIGKGGCNEVYRGILEDGKGIAVKILKSSSKEAMTNFVHEINIISSLSHQNISPLLGVCVQDNELISVYNLSNTGSLEETLHGKQKGKYVLSWEERFKIAIGLAEALDYLHNRCSKPVIHRDVKTSNVLLSLELQPQLSDFGLSMWGPTTSSRYSIQGDVVGTFGYLAPEYFMYGKVSDKVDVYAFGVVLLELISGRNPISPQNPRGQESLHKQHFVKPKKRYLGMQAKPLIDTGNLKVLLDPDVTDIFDESQFQRMVLAASHCLTRSATHRPNIRQILRLLRDENEAGKWIMEEEGNEDCFDDEVYPNSSTELHLNLAMLEVEDDETASISSMERSNNSLFSSTCSSRELQT

SEQ ID NO: 69714 - protein, 405 aa, Arabidopsis thaliana
  peptide (1)..(405): Ceres Seq. ID no. 1823596
MSLPERFPNHQQTLNYETSLIKKQIKDILRDNNKWFNYNVLRKATSDFSQENVIGKGGCNEVYRGILEDGKGIAVKILKSSSKEAMTNFVHEINIISSLSHQNISPLLGVCVQDNELISVYNLSNTGSLEETLHGKQKGKYVLSWEERFKIAIGLAEALDYLHNRCSKPVIHRDVKTSNVLLSLELQPQLSDFGLSMWGPTTSSRYSIQGDVVGTFGYLAPEYFMYGKVSDKVDVYAFGVVLLELISGRNPISPQNPRGQESLHKQHFVKPKKRYLGMQAKPLIDTGNLKVLLDPDVTDIFDESQFQRMVLAASHCLTRSATHRPNIRQILRLLRDENEAGKWIMEEEGNEDCFDDEVYPNSSTELHLNLAMLEVEDDETASISSMERSNNSLFSSTCSSRELQT

SEQ ID NO: 69715 - protein, 320 aa, Arabidopsis thaliana
  peptide (1)..(320): Ceres Seq. ID no. 1823597
MTNFVHEINIISSLSHQNISPLLGVCVQDNELISVYNLSNTGSLEETLHGKQKGKYVLSWEERFKIAIGLAEALDYLHNRCSKPVIHRDVKTSNVLLSLELQPQLSDFGLSMWGPTTSSRYSIQGDVVGTFGYLAPEYFMYGKVSDKVDVYAFGVVLLELISGRNPISPQNPRGQESLHKQHFVKPKKRYLGMQAKPLIDTGNLKVLLDPDVTDIFDESQFQRMVLAASHCLTRSATHRPNIRQILRLLRDENEAGKWIMEEEGNEDCFDDEVYPNSSTELHLNLAMLEVEDDETASISSMERSNNSLFSSTCSSRELQT

SEQ ID NO: 69716 - DNA, 636 bp, Arabidopsis thaliana
  misc_feature (1)..(636): Ceres Seq. ID no. 1823640
  misc_feature (1)..(636): Ortholog of  Ceres SEQ ID NO 13594828 as cited in SEQ ID NO 56431
  misc_feature (1)..(636): Ortholog of  Ceres SEQ ID NO 14316363 as cited in SEQ ID NO 57222
  misc_feature (1)..(636): Ortholog of  Ceres SEQ ID NO 15177754 as cited in SEQ ID NO 57945
  misc_feature (1)..(636): Ortholog of  Ceres SEQ ID NO 13594354 as cited in SEQ ID NO 58082
  misc_feature (1)..(636): Ortholog of  Ceres SEQ ID NO 14316408 as cited in SEQ ID NO 58228
  misc_feature (1)..(636): Ortholog of  Ceres SEQ ID NO 13528075 as cited in SEQ ID NO 60188
  misc_feature (1)..(636): Ortholog of  Ceres SEQ ID NO 13600483 as cited in SEQ ID NO 0
atggcgaccaaagtttacatagtgtatgtgaaaattatcttctgtctgagtggtgccattgacaatttgaaattagctcaagagattaggaaaggtgctgcttctgttgatggtgttgaagccatactctggcaggtacccgaaacgctccaagaagatgtgctctctaaaatgagtgcaccaccaaagagtgatgctcctattatcaccccaaacgagctcgctgaggctgatggatttatcttcggcttcccaacgaggtttggtatgatggctgctcagttcaaggcatttttagatgcgaccggcggcctttggaggactcagcaactcgccggtaaaccagccggaatcttctacagcacagggtcccaaggtggtggtcaagaaaccaccgcattaactgccattactcagctggttcatcacgggatgatctttgtcccgattggctacacatttggtgccggaatgtttgagatggaaaatgtgaaaggtggaagcccgtacggggcgggaacatttgccggagatgggtcgagacagccaacggaactggagttggggcaagcatttcaccaagggaagtacattgccgccataagtaagaagctcaagggacctgctgctgcttag

SEQ ID NO: 69717 - protein, 211 aa, Arabidopsis thaliana
  peptide (1)..(211): Ceres Seq. ID no. 1823641
MATKVYIVYVKIIFCLSGAIDNLKLAQEIRKGAASVDGVEAILWQVPETLQEDVLSKMSAPPKSDAPIITPNELAEADGFIFGFPTRFGMMAAQFKAFLDATGGLWRTQQLAGKPAGIFYSTGSQGGGQETTALTAITQLVHHGMIFVPIGYTFGAGMFEMENVKGGSPYGAGTFAGDGSRQPTELELGQAFHQGKYIAAISKKLKGPAAA

SEQ ID NO: 69718 - protein, 154 aa, Arabidopsis thaliana
  peptide (1)..(154): Ceres Seq. ID no. 1823642
MSAPPKSDAPIITPNELAEADGFIFGFPTRFGMMAAQFKAFLDATGGLWRTQQLAGKPAGIFYSTGSQGGGQETTALTAITQLVHHGMIFVPIGYTFGAGMFEMENVKGGSPYGAGTFAGDGSRQPTELELGQAFHQGKYIAAISKKLKGPAAA

SEQ ID NO: 69719 - protein, 122 aa, Arabidopsis thaliana
  peptide (1)..(122): Ceres Seq. ID no. 1823643
MMAAQFKAFLDATGGLWRTQQLAGKPAGIFYSTGSQGGGQETTALTAITQLVHHGMIFVPIGYTFGAGMFEMENVKGGSPYGAGTFAGDGSRQPTELELGQAFHQGKYIAAISKKLKGPAAA

SEQ ID NO: 69720 - DNA, 2061 bp, Arabidopsis thaliana
  misc_feature (1)..(2061): Ceres Seq. ID no. 1823746
  misc_feature (1)..(2061): Ortholog of  Ceres SEQ ID NO 12586556 as cited in SEQ ID NO 64667
  misc_feature (1)..(2061): Ortholog of  Ceres SEQ ID NO 13660894 as cited in SEQ ID NO 67475
atggttatggacttgaagcttatagcagcaggattacgtcattgtgggaaagtacaagcctttaagcgtggagaatcaattcaagctcatgtaatcaagcaagggatctctcaaaatgtgtttatagcgaataacgtgatctcaatgtatgtggatttcaggttgttgagtgatgcacataaagtgttcgatgaaatgtctgagagaaatattgtaacttggacaacgatggtttctgggtatacgagtgatggaaaacccaataaagctattgagttatacagaagaatgttagactccgaagaagaagcggcgaacgagtttatgtattctgcggttttgaaagcttgtgggttagtgggtgatattcagctggggattttggtttatgaaagaattggtaaagagaatttgagaggtgatgttgttttgatgaatagtgttgttgatatgtatgttaagaatgggagacttatcgaagctaatagcagttttaaggagattttacggcctagttcgacttcgtggaacactcttatttctggttattgtaaagctggtttgatggatgaagcggttactttgttccatcgaatgccgcagccaaatgtcgtgtcttggaactgtttgatatcgggatttgtcgataagggtagtcctcgtgcgttggagtttttagttaggatgcagagagaaggacttgtgttagacggttttgctttaccatgtggtcttaaagcttgtagttttggtggcttattaacaatgggtaaacagctgcattgttgtgtcgtaaagtcgggtctagagtctagcccgttcgcaatatctgctcttattgatatgtactcgaactgtggctctctaatatatgcagctgatgtttttcatcaggaaaaactggccgttaatagtagtgtcgcggtttggaattctatgctctctggatttttgataaatgaggagaatgaagcagcattatggctgcttttgcagatatatcagtcagatttgtgttttgattcctacactctaagtggtgccttaaagatatgtatcaactatgtcaacttaagactcgggcttcaagtacatagtttagttgtagtaagtggttatgagttggattacatcgtaggaagtattcttgttgatttacatgcaaatgttgggaatatacaagatgcacataaactgtttcataggcttccaaataaagatatcatcgctttctctggcttgatacgaggctgtgtgaaatcagggttcaattctttagcattttatctgttcagggaattaatcaagttgggactcgatgctgaccagttcatcgtctcaaatattcttaaagtttgttcaagtttagcatctcttggatggggtaagcaaattcatgggttgtgtataaagaaaggttatgaatcagaacctgtcacagcgacagcactagtagatatgtatgtaaaatgtggtgagatagataatggtgtagtgttgtttgatggtatgttagaaagagatgttgtctcttggacagggataattgttggattcggacaaaacggacgagtcgaagaagcgtttcggtatttccacaagatgataaatattggaattgaaccaaataaggtaacttttttggggcttctttctgcttgccgacattctggactacttgaagaagcaagatcaaccctcgaaacgatgaaatctgaatatggtcttgaaccgtatctagagcattattattgtgtagttgatcttcttggtcaagccgggctgttccaagaggctaacgaattgataaataaaatgccgttggagcccgacaaaacaatatggacgtctctgctcactgcttgcggaactcacaagaatgccggactggttactgtaattgctgagaaattactcaaggggtttccggatgatccatcggtttatacatctctttcgaatgcttatgctacgttaggcatgtgggatcagttaagtaaagtgagagaagctgctaagaagctaggggcaaaagaatctggaatgagttggataatttag

SEQ ID NO: 69721 - protein, 686 aa, Arabidopsis thaliana
  peptide (1)..(686): Ceres Seq. ID no. 1823747
MVMDLKLIAAGLRHCGKVQAFKRGESIQAHVIKQGISQNVFIANNVISMYVDFRLLSDAHKVFDEMSERNIVTWTTMVSGYTSDGKPNKAIELYRRMLDSEEEAANEFMYSAVLKACGLVGDIQLGILVYERIGKENLRGDVVLMNSVVDMYVKNGRLIEANSSFKEILRPSSTSWNTLISGYCKAGLMDEAVTLFHRMPQPNVVSWNCLISGFVDKGSPRALEFLVRMQREGLVLDGFALPCGLKACSFGGLLTMGKQLHCCVVKSGLESSPFAISALIDMYSNCGSLIYAADVFHQEKLAVNSSVAVWNSMLSGFLINEENEAALWLLLQIYQSDLCFDSYTLSGALKICINYVNLRLGLQVHSLVVVSGYELDYIVGSILVDLHANVGNIQDAHKLFHRLPNKDIIAFSGLIRGCVKSGFNSLAFYLFRELIKLGLDADQFIVSNILKVCSSLASLGWGKQIHGLCIKKGYESEPVTATALVDMYVKCGEIDNGVVLFDGMLERDVVSWTGIIVGFGQNGRVEEAFRYFHKMINIGIEPNKVTFLGLLSACRHSGLLEEARSTLETMKSEYGLEPYLEHYYCVVDLLGQAGLFQEANELINKMPLEPDKTIWTSLLTACGTHKNAGLVTVIAEKLLKGFPDDPSVYTSLSNAYATLGMWDQLSKVREAAKKLGAKESGMSWII

SEQ ID NO: 69722 - protein, 684 aa, Arabidopsis thaliana
  peptide (1)..(684): Ceres Seq. ID no. 1823748
MDLKLIAAGLRHCGKVQAFKRGESIQAHVIKQGISQNVFIANNVISMYVDFRLLSDAHKVFDEMSERNIVTWTTMVSGYTSDGKPNKAIELYRRMLDSEEEAANEFMYSAVLKACGLVGDIQLGILVYERIGKENLRGDVVLMNSVVDMYVKNGRLIEANSSFKEILRPSSTSWNTLISGYCKAGLMDEAVTLFHRMPQPNVVSWNCLISGFVDKGSPRALEFLVRMQREGLVLDGFALPCGLKACSFGGLLTMGKQLHCCVVKSGLESSPFAISALIDMYSNCGSLIYAADVFHQEKLAVNSSVAVWNSMLSGFLINEENEAALWLLLQIYQSDLCFDSYTLSGALKICINYVNLRLGLQVHSLVVVSGYELDYIVGSILVDLHANVGNIQDAHKLFHRLPNKDIIAFSGLIRGCVKSGFNSLAFYLFRELIKLGLDADQFIVSNILKVCSSLASLGWGKQIHGLCIKKGYESEPVTATALVDMYVKCGEIDNGVVLFDGMLERDVVSWTGIIVGFGQNGRVEEAFRYFHKMINIGIEPNKVTFLGLLSACRHSGLLEEARSTLETMKSEYGLEPYLEHYYCVVDLLGQAGLFQEANELINKMPLEPDKTIWTSLLTACGTHKNAGLVTVIAEKLLKGFPDDPSVYTSLSNAYATLGMWDQLSKVREAAKKLGAKESGMSWII

SEQ ID NO: 69723 - protein, 638 aa, Arabidopsis thaliana
  peptide (1)..(638): Ceres Seq. ID no. 1823749
MYVDFRLLSDAHKVFDEMSERNIVTWTTMVSGYTSDGKPNKAIELYRRMLDSEEEAANEFMYSAVLKACGLVGDIQLGILVYERIGKENLRGDVVLMNSVVDMYVKNGRLIEANSSFKEILRPSSTSWNTLISGYCKAGLMDEAVTLFHRMPQPNVVSWNCLISGFVDKGSPRALEFLVRMQREGLVLDGFALPCGLKACSFGGLLTMGKQLHCCVVKSGLESSPFAISALIDMYSNCGSLIYAADVFHQEKLAVNSSVAVWNSMLSGFLINEENEAALWLLLQIYQSDLCFDSYTLSGALKICINYVNLRLGLQVHSLVVVSGYELDYIVGSILVDLHANVGNIQDAHKLFHRLPNKDIIAFSGLIRGCVKSGFNSLAFYLFRELIKLGLDADQFIVSNILKVCSSLASLGWGKQIHGLCIKKGYESEPVTATALVDMYVKCGEIDNGVVLFDGMLERDVVSWTGIIVGFGQNGRVEEAFRYFHKMINIGIEPNKVTFLGLLSACRHSGLLEEARSTLETMKSEYGLEPYLEHYYCVVDLLGQAGLFQEANELINKMPLEPDKTIWTSLLTACGTHKNAGLVTVIAEKLLKGFPDDPSVYTSLSNAYATLGMWDQLSKVREAAKKLGAKESGMSWII

SEQ ID NO: 69724 - DNA, 1005 bp, Arabidopsis thaliana
  misc_feature (1)..(1005): Ceres Seq. ID no. 1823895
  misc_feature (1)..(1005): Ortholog of  Ceres SEQ ID NO 14311207 as cited in SEQ ID NO 60304
atgatggatgagtttatggatcttagaccagtgaagtacacagagcacaagactgttatcagaaagtacactaaaaagtcgtctatggagaggaagaccagtgttcgtgactcggccaggttggttcgggtctcaatgacggatcgtgacgccactgattcatcaagcgacgaggaagagtttctgttccctcgaagacgtgtcaagagattgattaacgagatcagagtcgagcctagcagctcttccaccggcgacgtctctgcttctccgacgaaggaccggaaaagaatcaacgttgattctacggttcaaaagccctctgtttccggccaaaaccagaagaagtaccgcggcgtgagacagcgaccatggggaaaatgggcggcggagattcgtgatcctgagcaacgccggagaatctggctcggtacttttgcaacggcggaggaagctgccatcgtctacgacaacgcagcaatcaaacttcgtggccctgatgctcttaccaacttcaccgtacaaccagaaccagaaccggtacaagaacaagaacaagaaccggagagcaacatgtcggtttcgatatcagaatcaatggacgattctcaacatctatcatctccgacatcggttctcaactaccaaacatatgtctcggaggaaccaatcgatagtcttatcaaaccggttaaacaagagtttcttgaaccagaacaagagccaataagctggcatcttggagaaggtaatactaatactaatgatgattcatttccattggacattacatttctcgacaactatttcaatgaatcattaccagacatctccatcttcgatcaacctatgtctcctattcaaccaacagagaatgatttcttcaacgaccttatgttattcgatagcaacgcagaagaatactactcctccgagatcaaagagattggttcatcgttcaacgatcttgatgattctttgatatccgatctcttacttgtgtga

SEQ ID NO: 69725 - protein, 334 aa, Arabidopsis thaliana
  peptide (1)..(334): Ceres Seq. ID no. 1823896
MMDEFMDLRPVKYTEHKTVIRKYTKKSSMERKTSVRDSARLVRVSMTDRDATDSSSDEEEFLFPRRRVKRLINEIRVEPSSSSTGDVSASPTKDRKRINVDSTVQKPSVSGQNQKKYRGVRQRPWGKWAAEIRDPEQRRRIWLGTFATAEEAAIVYDNAAIKLRGPDALTNFTVQPEPEPVQEQEQEPESNMSVSISESMDDSQHLSSPTSVLNYQTYVSEEPIDSLIKPVKQEFLEPEQEPISWHLGEGNTNTNDDSFPLDITFLDNYFNESLPDISIFDQPMSPIQPTENDFFNDLMLFDSNAEEYYSSEIKEIGSSFNDLDDSLISDLLLV

SEQ ID NO: 69726 - protein, 333 aa, Arabidopsis thaliana
  peptide (1)..(333): Ceres Seq. ID no. 1823897
MDEFMDLRPVKYTEHKTVIRKYTKKSSMERKTSVRDSARLVRVSMTDRDATDSSSDEEEFLFPRRRVKRLINEIRVEPSSSSTGDVSASPTKDRKRINVDSTVQKPSVSGQNQKKYRGVRQRPWGKWAAEIRDPEQRRRIWLGTFATAEEAAIVYDNAAIKLRGPDALTNFTVQPEPEPVQEQEQEPESNMSVSISESMDDSQHLSSPTSVLNYQTYVSEEPIDSLIKPVKQEFLEPEQEPISWHLGEGNTNTNDDSFPLDITFLDNYFNESLPDISIFDQPMSPIQPTENDFFNDLMLFDSNAEEYYSSEIKEIGSSFNDLDDSLISDLLLV

SEQ ID NO: 69727 - protein, 329 aa, Arabidopsis thaliana
  peptide (1)..(329): Ceres Seq. ID no. 1823898
MDLRPVKYTEHKTVIRKYTKKSSMERKTSVRDSARLVRVSMTDRDATDSSSDEEEFLFPRRRVKRLINEIRVEPSSSSTGDVSASPTKDRKRINVDSTVQKPSVSGQNQKKYRGVRQRPWGKWAAEIRDPEQRRRIWLGTFATAEEAAIVYDNAAIKLRGPDALTNFTVQPEPEPVQEQEQEPESNMSVSISESMDDSQHLSSPTSVLNYQTYVSEEPIDSLIKPVKQEFLEPEQEPISWHLGEGNTNTNDDSFPLDITFLDNYFNESLPDISIFDQPMSPIQPTENDFFNDLMLFDSNAEEYYSSEIKEIGSSFNDLDDSLISDLLLV

SEQ ID NO: 69728 - DNA, 1491 bp, Arabidopsis thaliana
  misc_feature (1)..(1491): Ceres Seq. ID no. 1824171
  misc_feature (1)..(1491): Ortholog of  Ceres SEQ ID NO 12465151 as cited in SEQ ID NO 67782
atggaaagcgaagcagcagcgactgttcaagccaccaggccgagaagagcacctaggactccggtgacagccattttgacggataagagaagacggaaacctaagagcaacaacgagtctcagttaccatttttgctacagcagagtcaaaaggccaccgttgacgacacttactctcagtggaagactcttcttcccattctctatgattcgtttgttaatcataccctcgtctggccctctctctcttgcagatgggggccacagcttgagcaagcaggttctaagactcaacgtctctatctctcggaacaaacgaatggcagtgtgcctaatactttggtcatagccaattgcgaaactgttaataggcaggtaattagtttttctctaccaaagcttcttaatgaaaaggcacactctccatttgtgaagaagtacaagaccatcatccaccctggagaggtcaacagaattagggaactccctcaaaatagcaagattgtagctactcacaccgacagtcctgatattctcatttggaacactgagactcaaccagaccggtatgctgtgcttggagctccagattctcgtccagatttgttactaattgggcaccaggatgatgctgaatttgctcttgcaatgtgcccaaccgaaccttttgttctctctggaggcaaggacaagtccgttattttgtggaatatccaagaccatatcacaatggctggttcggattccaaatcccctggatccagcttcaagcagactggtgaaggtagtgataaaactggtggtccttctgttggccctcgaggcatatataatggccacaaagatactgttgaagacgtggcattctgtccatctagtgcacaagaattctgcagtgttggtgacgattcttgccttatgctatgggacgcaagaactggcactagtcctgccatgaaggttgagaaggcacatgatgctgatcttcactgtgtcgattggaatcctcatgacaataatctgatcctgactgggtcagcagataacactgtccgtgtgtttgaccgccgaaaccttacctcaaatggagttggttcacctgtttacaaatttgaaggccacagagctgctgttctttgtgttcagtggtctcctgataaatcatctgtttttgggagttctgcagaagatggtctcttgaacatatgggattgtgatagggttggcaagaagtctgagcgtgcaaccaaaactcctgatgggcttttcttccagcatgctggtcacagggacaaagtggtcgacttccactggagcctattgaacccttggactattgtcagtgtttctgataattgtgagagtatcggtggaggtggtacattgcagatatggcggatgagtgacttgatttacagaccggaagatgaagtcctgacagagctagagaaattcaagtcacatgttttcacatgtacctccaagtcttga

SEQ ID NO: 69729 - protein, 496 aa, Arabidopsis thaliana
  peptide (1)..(496): Ceres Seq. ID no. 1824172
MESEAAATVQATRPRRAPRTPVTAILTDKRRRKPKSNNESQLPFLLQQSQKATVDDTYSQWKTLLPILYDSFVNHTLVWPSLSCRWGPQLEQAGSKTQRLYLSEQTNGSVPNTLVIANCETVNRQVISFSLPKLLNEKAHSPFVKKYKTIIHPGEVNRIRELPQNSKIVATHTDSPDILIWNTETQPDRYAVLGAPDSRPDLLLIGHQDDAEFALAMCPTEPFVLSGGKDKSVILWNIQDHITMAGSDSKSPGSSFKQTGEGSDKTGGPSVGPRGIYNGHKDTVEDVAFCPSSAQEFCSVGDDSCLMLWDARTGTSPAMKVEKAHDADLHCVDWNPHDNNLILTGSADNTVRVFDRRNLTSNGVGSPVYKFEGHRAAVLCVQWSPDKSSVFGSSAEDGLLNIWDCDRVGKKSERATKTPDGLFFQHAGHRDKVVDFHWSLLNPWTIVSVSDNCESIGGGGTLQIWRMSDLIYRPEDEVLTELEKFKSHVFTCTSKS

SEQ ID NO: 69730 - protein, 280 aa, Arabidopsis thaliana
  peptide (1)..(280): Ceres Seq. ID no. 1824173
MCPTEPFVLSGGKDKSVILWNIQDHITMAGSDSKSPGSSFKQTGEGSDKTGGPSVGPRGIYNGHKDTVEDVAFCPSSAQEFCSVGDDSCLMLWDARTGTSPAMKVEKAHDADLHCVDWNPHDNNLILTGSADNTVRVFDRRNLTSNGVGSPVYKFEGHRAAVLCVQWSPDKSSVFGSSAEDGLLNIWDCDRVGKKSERATKTPDGLFFQHAGHRDKVVDFHWSLLNPWTIVSVSDNCESIGGGGTLQIWRMSDLIYRPEDEVLTELEKFKSHVFTCTSKS

SEQ ID NO: 69731 - protein, 253 aa, Arabidopsis thaliana
  peptide (1)..(253): Ceres Seq. ID no. 1824174
MAGSDSKSPGSSFKQTGEGSDKTGGPSVGPRGIYNGHKDTVEDVAFCPSSAQEFCSVGDDSCLMLWDARTGTSPAMKVEKAHDADLHCVDWNPHDNNLILTGSADNTVRVFDRRNLTSNGVGSPVYKFEGHRAAVLCVQWSPDKSSVFGSSAEDGLLNIWDCDRVGKKSERATKTPDGLFFQHAGHRDKVVDFHWSLLNPWTIVSVSDNCESIGGGGTLQIWRMSDLIYRPEDEVLTELEKFKSHVFTCTSKS

SEQ ID NO: 69732 - DNA, 4218 bp, Arabidopsis thaliana
  misc_feature (1)..(4218): Ceres Seq. ID no. 1824332
  misc_feature (1)..(4218): Ortholog of  Ceres SEQ ID NO 13598140 as cited in SEQ ID NO 61443
atggagaagcaagatcaaacaagcagagaagagattctgaagaagataatggattcattgggacaagacggtgtaccttcaaaaaccgtcctcgttggtgaagctggtatagggaagacatggcttgcaaaagaagtcagccaacgtgttactcaagaaaagtacaatgtcctctggttacacctgaacaaaaagattgaagacgagaagtcgctttacgagattctagctgctcagttgtcgataatttacgagtttgaagaaggcgaagaacctgatgagcttgattatccattggagagcttgaaagagaagattaaagaagagatgatcaaacacaagaaggataatcttctgttgattttggatgatgaaggaagtatgacaactgaagaagatgtgatgcaagaattaaacctccaagattttcttaaggagtactcggctgtgaagattctagtcacaagaagagatgaaagagaggagaaagaatccacaacgatcaaagtcggtccgcttacagaaaaggagtcattggacttactccacgatgccgaggacttacttacatcatttacctctgaagattggcctgttctgctaaagagactttgcgataacaaagagatcaaagaacctactttgatgtcttgcattttaagcaagagcaagggcttaccagctgcgatcgttgtcttaatcaagtctttaaacagcattaagtcgatgtctgcgaagcagaggaagatctttaaagaactgattctatcttccaagtcattagatgaagcagctgcttccaagaacgctatagatcgcagccgctacaatcctgtcttgcaattaagctacgagctgttaaagcctgacgagacggtcaaacgtccggtgattgcttgcttttggcatatcttggacttctacaagtactctggatgcgcttactaccgtgacctaatagtgcattggatgcttgaagggtattttgatccggttaagtcagttgacaaagcttaccaagaaggacattccattttaatggactttatgaacagaggaatcttgaaaatacaagaagacaacatggtggttccagagttctccatgagcaacctattagatcttcaagattgtggattctttggaagatcttctcttggatttgacagagtttacggtggagacaagagaaaggggctagggaaaatcatcttgatcgatgatatgatacagacaattcaatcgaagaagaagaatatcacgacgattatcgctagcggaaaccgtttacgtagagaggttcatgggaagttctttgagaaaccagagatgcaagatcttgaagttgtagtcctctttgagccaacgttccatgaacttgttctgtctttatctaagctaaagaaactccgagtacttgttatcagagactgtgatctaatcgataacatcgataagctcagtggtcttcaaggcctacatgttcttgaagtctctggtgctagctctctagttaacatccctgatgatttcttcaagaacatgactcagcttcaaagccttaatctttcgggacttgcaatcaaatcttcgccttccacaatcgaaaagctaagcatgcttcgttgcttcatcctaaggcactgctctgagctacaagatctgcctaacttcattgtggaaacaagaaaacttgaagttattgacattcacggagctaggaaacttgagtcttactttgatagagttaaagattggaaggactataaaggcaagaacaagaactttgctcagcttcagctgcttgaacacctagacttctcagagactaaaatcatccgtctgccgatatttcatctcaaagactctactaacgatttcagtactatgccaatcttgacccggctcttgctgagaaactgtacaaggcttaagagattgccacagcttaggcctttgactaatcttcagattcttgatgcatgtggtgctacagacttagtggagatgcttgaagtgtgtttagaggagaagaaagagcttaggatcctcgatatgtcaaagacaagtcttcccgagttagccgacacgattgctgatgttgtcaatctcaataagcttctgttaaggaattgctcactgattgaagagcttccaagcattgagaaactgacacaccttgaagttttcgacgtttctggttgcattaagttgaagaatatcaatggatcctttggggagatgtcttacctccatgaagtgaatctttcagaaactaatcttagtgagttacctgacaaaatctcagagctatctaaccttaaggagctcatcataagaaaatgttccaagctaaagactcttccaaaccttgagaagctaacaaatcttgagatcttcgatgtttcgggctgcaccgagttggaaacaatcgagggatcattcgagaatctgtcttgcctccacaaagtgaatctttcggaaactaatcttggtgagttacctaacaaaatctcagagctatctaacctcaaagagctcatcctaagaaactgttctaagctaaaggctcttccaaatcttgagaagctaacacatctagtgatcttcgatgtttcgggatgcaccaatctggataaaatcgaggaatcattcgagagtatgtcttacctttgcgagagcatcctctgttcttcaaaacgtattgttctcgcggattcgagttgtatagagcgagaccagtggagccaaataaaagagtgtttaacaagtaagtcagagggctctagcttctctaatgtaggggaaaaaacccgcgagaaacttctttatcacggcaatagatacagagttattgatcctgaagttcctttgaatatcgatattgttgacatcaaaagatccactgatcttaaaacagagtatatagccaaagcagagtatgtctctatagcagagaatggatccaaaagcgtatcttctctcttcgacgagttgcagatggcatcggtaaaaggttgttgggtagagaggtgcaagaacatggatgttctcttcgaatcagatgaacaactagagaaagagaaatcatcatcaccatcattgcagactctttggatctcaaatcttccattgctaacaagcttatacagtagtaaaggaggattcattttcaagaaccttaagaagctaagcgtagattgttgtccaagcatcaaatggctattcccggagattcctgataaccttgagattcttcgtgtgaagttctgtgataagttggagagattgtttgaagtaaaagcaggagaattatcgaagcttcgtaagcttcaccttcttgatttgcctgttttatcagtacttggagctaatttcccgaatctggagaaatgcacaattgagaaatgtccgaaattgaaagctagagaagatgaaccgaggattggagcaaggattacagatgaaatttcagaggatcaacctcacaagaatactattgggcctgaaacccaaactcctacccagcccacaaaagctacagacacaatctttcgaatagttattcctgattggaacttgatggaaccaataaatcaaaagactttccgtcctaagaagagcgcaccatcaggaaccaagggagcagagcttcgaaagcatatagatgcaactttaggtagtggtaatcttagagaagccgtcaaacttcctccgggagaggatttaaacgaatggcttgcagttaacactgtggatttcttcaatcaggtgaatctgttatttggtacacttaccgagttttgcaccccggagaactgttctacaatgactgctggtcccaagtacgaatacagatgggccgatggtgtacaaatcaagaagcctattgaggtttcagctccaaagtatgttgaatacttgatggattggatcgagacacaactcgatgatgagaccatatttcctcaaaaacttggtgcagcttttcctccaaacttcaaggaagtggtgaagacaatctttaaacgactattccgagtttacgcacacatataccactctcatttccagaaaatagttagtctcaaagaggaagctcatctcaacacttgcttcaaacacttcatcctcttcactcatgagtttgttctcattgacaagaaagaactcgctcctcttcaagaactcatagaatctatcattgcaccttactaa

SEQ ID NO: 69733 - protein, 1405 aa, Arabidopsis thaliana
  peptide (1)..(1405): Ceres Seq. ID no. 1824333
MEKQDQTSREEILKKIMDSLGQDGVPSKTVLVGEAGIGKTWLAKEVSQRVTQEKYNVLWLHLNKKIEDEKSLYEILAAQLSIIYEFEEGEEPDELDYPLESLKEKIKEEMIKHKKDNLLLILDDEGSMTTEEDVMQELNLQDFLKEYSAVKILVTRRDEREEKESTTIKVGPLTEKESLDLLHDAEDLLTSFTSEDWPVLLKRLCDNKEIKEPTLMSCILSKSKGLPAAIVVLIKSLNSIKSMSAKQRKIFKELILSSKSLDEAAASKNAIDRSRYNPVLQLSYELLKPDETVKRPVIACFWHILDFYKYSGCAYYRDLIVHWMLEGYFDPVKSVDKAYQEGHSILMDFMNRGILKIQEDNMVVPEFSMSNLLDLQDCGFFGRSSLGFDRVYGGDKRKGLGKIILIDDMIQTIQSKKKNITTIIASGNRLRREVHGKFFEKPEMQDLEVVVLFEPTFHELVLSLSKLKKLRVLVIRDCDLIDNIDKLSGLQGLHVLEVSGASSLVNIPDDFFKNMTQLQSLNLSGLAIKSSPSTIEKLSMLRCFILRHCSELQDLPNFIVETRKLEVIDIHGARKLESYFDRVKDWKDYKGKNKNFAQLQLLEHLDFSETKIIRLPIFHLKDSTNDFSTMPILTRLLLRNCTRLKRLPQLRPLTNLQILDACGATDLVEMLEVCLEEKKELRILDMSKTSLPELADTIADVVNLNKLLLRNCSLIEELPSIEKLTHLEVFDVSGCIKLKNINGSFGEMSYLHEVNLSETNLSELPDKISELSNLKELIIRKCSKLKTLPNLEKLTNLEIFDVSGCTELETIEGSFENLSCLHKVNLSETNLGELPNKISELSNLKELILRNCSKLKALPNLEKLTHLVIFDVSGCTNLDKIEESFESMSYLCESILCSSKRIVLADSSCIERDQWSQIKECLTSKSEGSSFSNVGEKTREKLLYHGNRYRVIDPEVPLNIDIVDIKRSTDLKTEYIAKAEYVSIAENGSKSVSSLFDELQMASVKGCWVERCKNMDVLFESDEQLEKEKSSSPSLQTLWISNLPLLTSLYSSKGGFIFKNLKKLSVDCCPSIKWLFPEIPDNLEILRVKFCDKLERLFEVKAGELSKLRKLHLLDLPVLSVLGANFPNLEKCTIEKCPKLKAREDEPRIGARITDEISEDQPHKNTIGPETQTPTQPTKATDTIFRIVIPDWNLMEPINQKTFRPKKSAPSGTKGAELRKHIDATLGSGNLREAVKLPPGEDLNEWLAVNTVDFFNQVNLLFGTLTEFCTPENCSTMTAGPKYEYRWADGVQIKKPIEVSAPKYVEYLMDWIETQLDDETIFPQKLGAAFPPNFKEVVKTIFKRLFRVYAHIYHSHFQKIVSLKEEAHLNTCFKHFILFTHEFVLIDKKELAPLQELIESIIAPY

SEQ ID NO: 69734 - protein, 1389 aa, Arabidopsis thaliana
  peptide (1)..(1389): Ceres Seq. ID no. 1824334
MDSLGQDGVPSKTVLVGEAGIGKTWLAKEVSQRVTQEKYNVLWLHLNKKIEDEKSLYEILAAQLSIIYEFEEGEEPDELDYPLESLKEKIKEEMIKHKKDNLLLILDDEGSMTTEEDVMQELNLQDFLKEYSAVKILVTRRDEREEKESTTIKVGPLTEKESLDLLHDAEDLLTSFTSEDWPVLLKRLCDNKEIKEPTLMSCILSKSKGLPAAIVVLIKSLNSIKSMSAKQRKIFKELILSSKSLDEAAASKNAIDRSRYNPVLQLSYELLKPDETVKRPVIACFWHILDFYKYSGCAYYRDLIVHWMLEGYFDPVKSVDKAYQEGHSILMDFMNRGILKIQEDNMVVPEFSMSNLLDLQDCGFFGRSSLGFDRVYGGDKRKGLGKIILIDDMIQTIQSKKKNITTIIASGNRLRREVHGKFFEKPEMQDLEVVVLFEPTFHELVLSLSKLKKLRVLVIRDCDLIDNIDKLSGLQGLHVLEVSGASSLVNIPDDFFKNMTQLQSLNLSGLAIKSSPSTIEKLSMLRCFILRHCSELQDLPNFIVETRKLEVIDIHGARKLESYFDRVKDWKDYKGKNKNFAQLQLLEHLDFSETKIIRLPIFHLKDSTNDFSTMPILTRLLLRNCTRLKRLPQLRPLTNLQILDACGATDLVEMLEVCLEEKKELRILDMSKTSLPELADTIADVVNLNKLLLRNCSLIEELPSIEKLTHLEVFDVSGCIKLKNINGSFGEMSYLHEVNLSETNLSELPDKISELSNLKELIIRKCSKLKTLPNLEKLTNLEIFDVSGCTELETIEGSFENLSCLHKVNLSETNLGELPNKISELSNLKELILRNCSKLKALPNLEKLTHLVIFDVSGCTNLDKIEESFESMSYLCESILCSSKRIVLADSSCIERDQWSQIKECLTSKSEGSSFSNVGEKTREKLLYHGNRYRVIDPEVPLNIDIVDIKRSTDLKTEYIAKAEYVSIAENGSKSVSSLFDELQMASVKGCWVERCKNMDVLFESDEQLEKEKSSSPSLQTLWISNLPLLTSLYSSKGGFIFKNLKKLSVDCCPSIKWLFPEIPDNLEILRVKFCDKLERLFEVKAGELSKLRKLHLLDLPVLSVLGANFPNLEKCTIEKCPKLKAREDEPRIGARITDEISEDQPHKNTIGPETQTPTQPTKATDTIFRIVIPDWNLMEPINQKTFRPKKSAPSGTKGAELRKHIDATLGSGNLREAVKLPPGEDLNEWLAVNTVDFFNQVNLLFGTLTEFCTPENCSTMTAGPKYEYRWADGVQIKKPIEVSAPKYVEYLMDWIETQLDDETIFPQKLGAAFPPNFKEVVKTIFKRLFRVYAHIYHSHFQKIVSLKEEAHLNTCFKHFILFTHEFVLIDKKELAPLQELIESIIAPY

SEQ ID NO: 69735 - protein, 1296 aa, Arabidopsis thaliana
  peptide (1)..(1296): Ceres Seq. ID no. 1824335
MIKHKKDNLLLILDDEGSMTTEEDVMQELNLQDFLKEYSAVKILVTRRDEREEKESTTIKVGPLTEKESLDLLHDAEDLLTSFTSEDWPVLLKRLCDNKEIKEPTLMSCILSKSKGLPAAIVVLIKSLNSIKSMSAKQRKIFKELILSSKSLDEAAASKNAIDRSRYNPVLQLSYELLKPDETVKRPVIACFWHILDFYKYSGCAYYRDLIVHWMLEGYFDPVKSVDKAYQEGHSILMDFMNRGILKIQEDNMVVPEFSMSNLLDLQDCGFFGRSSLGFDRVYGGDKRKGLGKIILIDDMIQTIQSKKKNITTIIASGNRLRREVHGKFFEKPEMQDLEVVVLFEPTFHELVLSLSKLKKLRVLVIRDCDLIDNIDKLSGLQGLHVLEVSGASSLVNIPDDFFKNMTQLQSLNLSGLAIKSSPSTIEKLSMLRCFILRHCSELQDLPNFIVETRKLEVIDIHGARKLESYFDRVKDWKDYKGKNKNFAQLQLLEHLDFSETKIIRLPIFHLKDSTNDFSTMPILTRLLLRNCTRLKRLPQLRPLTNLQILDACGATDLVEMLEVCLEEKKELRILDMSKTSLPELADTIADVVNLNKLLLRNCSLIEELPSIEKLTHLEVFDVSGCIKLKNINGSFGEMSYLHEVNLSETNLSELPDKISELSNLKELIIRKCSKLKTLPNLEKLTNLEIFDVSGCTELETIEGSFENLSCLHKVNLSETNLGELPNKISELSNLKELILRNCSKLKALPNLEKLTHLVIFDVSGCTNLDKIEESFESMSYLCESILCSSKRIVLADSSCIERDQWSQIKECLTSKSEGSSFSNVGEKTREKLLYHGNRYRVIDPEVPLNIDIVDIKRSTDLKTEYIAKAEYVSIAENGSKSVSSLFDELQMASVKGCWVERCKNMDVLFESDEQLEKEKSSSPSLQTLWISNLPLLTSLYSSKGGFIFKNLKKLSVDCCPSIKWLFPEIPDNLEILRVKFCDKLERLFEVKAGELSKLRKLHLLDLPVLSVLGANFPNLEKCTIEKCPKLKAREDEPRIGARITDEISEDQPHKNTIGPETQTPTQPTKATDTIFRIVIPDWNLMEPINQKTFRPKKSAPSGTKGAELRKHIDATLGSGNLREAVKLPPGEDLNEWLAVNTVDFFNQVNLLFGTLTEFCTPENCSTMTAGPKYEYRWADGVQIKKPIEVSAPKYVEYLMDWIETQLDDETIFPQKLGAAFPPNFKEVVKTIFKRLFRVYAHIYHSHFQKIVSLKEEAHLNTCFKHFILFTHEFVLIDKKELAPLQELIESIIAPY

SEQ ID NO: 69736 - DNA, 921 bp, Arabidopsis thaliana
  misc_feature (1)..(921): Ceres Seq. ID no. 1824515
  misc_feature (1)..(921): Ortholog of  Ceres SEQ ID NO 12611314 as cited in SEQ ID NO 56535
  misc_feature (1)..(921): Ortholog of  Ceres SEQ ID NO 15178046 as cited in SEQ ID NO 60380
  misc_feature (1)..(921): Ortholog of  Ceres SEQ ID NO 13661438 as cited in SEQ ID NO 61414
atggcagttggaataagacaaaaggaaagtgtcaacaagattgtcaagaagtttccatcaagtgagtttgttgtgatgctgtttcactacgatggtgctgtggatgaatggaaggagtttgagtggagtgacactgccattcatatttctgtagtaaaccaaaccaaatgtttgaatatgtttgtgactcttttaggtggtttgcaaagcgttttctacacccggatattgtctcagcttattcttacatttttctatgggatgaagatctcggtgttgaccattttgatgctagaagatgtggtatctaatgagatgaaaattttcaggtatgtttcaattattaaagaagaaaagcttgaaatatcacaacctgctcttgatcccaatttctctgaagtgcatcatcaacttacctcacgagacaagaaatcaagagtacatagtggaaagcataacttgttcttaaactcattaaaaaaaactctctcctacagatttgttgaaatgatggctcctgtgttttccagagcagcttggaggtgtacatggcatatgattcagaatgacttaaaccatggatggggtatagattttcagcttggatattgtgcacagggtgatcgaaccaaaaatatcggtattgttgattccgagtatatacttcatatgggtcttcctacattaggaggaggttcagctgaaaacaaggaagtaattatagttactgtgtataagcagacggattcagggaagctcgataagaccaagactccgcatgctgcagacaaatcatcatcagtgtcaactggtagaactgaggttcggaagcaaacttatgtcgagttagagacttttaaacatagatggaaaaatgctgtgaagaacgatgagtgctggatagaccgattccaaacatga

SEQ ID NO: 69737 - protein, 306 aa, Arabidopsis thaliana
  peptide (1)..(306): Ceres Seq. ID no. 1824516
MAVGIRQKESVNKIVKKFPSSEFVVMLFHYDGAVDEWKEFEWSDTAIHISVVNQTKCLNMFVTLLGGLQSVFYTRILSQLILTFFYGMKISVLTILMLEDVVSNEMKIFRYVSIIKEEKLEISQPALDPNFSEVHHQLTSRDKKSRVHSGKHNLFLNSLKKTLSYRFVEMMAPVFSRAAWRCTWHMIQNDLNHGWGIDFQLGYCAQGDRTKNIGIVDSEYILHMGLPTLGGGSAENKEVIIVTVYKQTDSGKLDKTKTPHAADKSSSVSTGRTEVRKQTYVELETFKHRWKNAVKNDECWIDRFQT

SEQ ID NO: 69738 - protein, 281 aa, Arabidopsis thaliana
  peptide (1)..(281): Ceres Seq. ID no. 1824517
MLFHYDGAVDEWKEFEWSDTAIHISVVNQTKCLNMFVTLLGGLQSVFYTRILSQLILTFFYGMKISVLTILMLEDVVSNEMKIFRYVSIIKEEKLEISQPALDPNFSEVHHQLTSRDKKSRVHSGKHNLFLNSLKKTLSYRFVEMMAPVFSRAAWRCTWHMIQNDLNHGWGIDFQLGYCAQGDRTKNIGIVDSEYILHMGLPTLGGGSAENKEVIIVTVYKQTDSGKLDKTKTPHAADKSSSVSTGRTEVRKQTYVELETFKHRWKNAVKNDECWIDRFQT

SEQ ID NO: 69739 - protein, 247 aa, Arabidopsis thaliana
  peptide (1)..(247): Ceres Seq. ID no. 1824518
MFVTLLGGLQSVFYTRILSQLILTFFYGMKISVLTILMLEDVVSNEMKIFRYVSIIKEEKLEISQPALDPNFSEVHHQLTSRDKKSRVHSGKHNLFLNSLKKTLSYRFVEMMAPVFSRAAWRCTWHMIQNDLNHGWGIDFQLGYCAQGDRTKNIGIVDSEYILHMGLPTLGGGSAENKEVIIVTVYKQTDSGKLDKTKTPHAADKSSSVSTGRTEVRKQTYVELETFKHRWKNAVKNDECWIDRFQT

SEQ ID NO: 69740 - DNA, 2892 bp, Arabidopsis thaliana
  misc_feature (1)..(2892): Ceres Seq. ID no. 1824573
  misc_feature (1)..(2892): Ortholog of  Ceres SEQ ID NO 13593889 as cited in SEQ ID NO 53305
  misc_feature (1)..(2892): Ortholog of  Ceres SEQ ID NO 13581959 as cited in SEQ ID NO 56156
atgcctcaccggactacttacttctttccgcggcagtttcccgatcgtggattcgattcgttttcgcttaagaatgatcacgacaagaagaaatcgtcgtctaacgttggagagagttttggatttcaaagagataataaatctaatggagtcggagaagattctaacaaggagaaggagagtactgtgttctcctctaatcctctgctttctaaaagctcagccgtttcagatctctttagcgatgatcgcaagtcggagaagaagcatcagcagcaactagccgctttctatgagtggttggcggagaagaaggctaatctctctaggtcatcatctactactactactcatggacgcggggtgaagcccacgcgcttctctatgtctagcgacgccgatgaggagagagagcttctgttgtcttctccggctgatcccgctccgcttcctgctacttcttcgccggattctatcattgattcggctaggacggttaacatacatgaacgaaacattgatcggagctttgacagagaggtttcgcttccccgaatgtcgagtgagagcagcttcgctggaagcttcttctccgggacgacggtggacgggaatttctccaatttctcaagtcatacagacgcaagggaaacttcgaccaccacgcttgtctcagtgaacaaagaggaagaagaagttgaggttagggaacagggcaaagagcaaagcttagcgcagaagtcaagagaaggctattacttgcaggtcacgcttgctaagtggctaagttctcaagcaaacctagcatgtgagtctgttcatatacagagcacagaatctatctcctaccgtttttgggtaagtggttgtttatcatacagtgacaagatatcagatggattttacagtatattaggaatggatccgtatctttggttgatgtgtaacaattctgaggatggcaaacgaattccatctcttttgttactcaaggagactgagccgaatgatacatcaatggaagtggttttgatagatagacgtgaggactcacgtcttaaagaactggaggataaggcacatgagctgtattgttcttcagacaacatgttagtgctcgtcgagaaacttggcagacttgttgcggtctatatgggggggaatttccaggtggagcaaggtgatctccagaaacgatggaaactggtcagcaatagactcaaggaatttcggaaatgtatcattcttcctataggtagtctaacaatgggcctttgccggcatcgtgccatcctatttaagaaattggctgattacataggtttaccatgtcggatagctcgaggttgcagatactgtaaagagagccaccaatcttcttgccttgtcaagattgacgatgacaggaagctttcaagggaatatgtagttgacctcatcggggaaccaggaaatgtccatgatccggattcctctatcaacggtgaaacacagtgtcagattccttcacctcttcaaatgagtcatcttacagatttttccaggccttgcgtgcatagtacatctccttgtcagactgtagagtcaaagacttcacgcactctttctgaaaacattcaacgttcagggagtcaaggccaagtacacaaagaatttgagttgcctgataacgcagggacagtatgttgtgctcatattgatcaaacttgctgtgcaaaagtatcatcaatggttttgacagaatctgttcttcgagctctaccacttgatataccaaaccttagtgaagaaaagattgccccacaagaaacctgcaaagaagaaaccgttctattagaagatccaacagctatgaagcagccaaacttatcagttgaaccagagatagtagaggctgacactcgaaaagataaaaaaggaaggttacctgttgacgccatctcaccttacttgactattgaaccttctttggcatcagattggctggaggtctcatggaatgaattacatatcaaagagcgtgtgggtgctggatcatttggaactgttcatcgtgctgagtggcatggatcagatgttgctgtcaagattttgtctattcaagatttccatgatgaccaattcagagaatttctcagagaggtatgtaagcaagcggttgctataatgaaacgtgttcgtcacccaaatgttgttctcttcatgggtgctgtgacagagcgaccccggttatcaataataacagaatatttgccaagaggcagtctttttcgccttatccataggccagcttctggggagttgctagatcagaggaggaggctacgtatggcattggatgtggtttgtgctattccccattatgccaaggggctcaactacctacactgtcttaatcctcctgtagtgcattgggacctgaaatctccaaatctactggttgataagaactggacagtgaaggtttgcgattttggactttcaagattcaaggcaaacactttcataccatcaaaatctgttgcaggaacacctgagtggatggctccagagtttcttagaggggaaccgacaaacgagaaatcagatgtttacagtttcggagtagtcttatgggagttgattactttgcaacagccttggaatggactcagtcctgctcaggtggttggagcagttgcattccagaacaggcggcttataattcctcccaacacctctccggttttggtatctctaatggaagcttgctgggcagatgagccgtctcagcggccagcatttggtagtatagtggacacattgaagaagctactaaagtctccggtgcagctgatccaaatgggtggagacaaaggggtaattccaactaaatcagctcccatactatag

SEQ ID NO: 69741 - protein, 963 aa, Arabidopsis thaliana
  peptide (1)..(963): Ceres Seq. ID no. 1824574
MPHRTTYFFPRQFPDRGFDSFSLKNDHDKKKSSSNVGESFGFQRDNKSNGVGEDSNKEKESTVFSSNPLLSKSSAVSDLFSDDRKSEKKHQQQLAAFYEWLAEKKANLSRSSSTTTTHGRGVKPTRFSMSSDADEERELLLSSPADPAPLPATSSPDSIIDSARTVNIHERNIDRSFDREVSLPRMSSESSFAGSFFSGTTVDGNFSNFSSHTDARETSTTTLVSVNKEEEEVEVREQGKEQSLAQKSREGYYLQVTLAKWLSSQANLACESVHIQSTESISYRFWVSGCLSYSDKISDGFYSILGMDPYLWLMCNNSEDGKRIPSLLLLKETEPNDTSMEVVLIDRREDSRLKELEDKAHELYCSSDNMLVLVEKLGRLVAVYMGGNFQVEQGDLQKRWKLVSNRLKEFRKCIILPIGSLTMGLCRHRAILFKKLADYIGLPCRIARGCRYCKESHQSSCLVKIDDDRKLSREYVVDLIGEPGNVHDPDSSINGETQCQIPSPLQMSHLTDFSRPCVHSTSPCQTVESKTSRTLSENIQRSGSQGQVHKEFELPDNAGTVCCAHIDQTCCAKVSSMVLTESVLRALPLDIPNLSEEKIAPQETCKEETVLLEDPTAMKQPNLSVEPEIVEADTRKDKKGRLPVDAISPYLTIEPSLASDWLEVSWNELHIKERVGAGSFGTVHRAEWHGSDVAVKILSIQDFHDDQFREFLREVCKQAVAIMKRVRHPNVVLFMGAVTERPRLSIITEYLPRGSLFRLIHRPASGELLDQRRRLRMALDVVCAIPHYAKGLNYLHCLNPPVVHWDLKSPNLLVDKNWTVKVCDFGLSRFKANTFIPSKSVAGTPEWMAPEFLRGEPTNEKSDVYSFGVVLWELITLQQPWNGLSPAQVVGAVAFQNRRLIIPPNTSPVLVSLMEACWADEPSQRPAFGSIVDTLKKLLKSPVQLIQMGGDKGVIPTKSAPIL

SEQ ID NO: 69742 - protein, 835 aa, Arabidopsis thaliana
  peptide (1)..(835): Ceres Seq. ID no. 1824575
MSSDADEERELLLSSPADPAPLPATSSPDSIIDSARTVNIHERNIDRSFDREVSLPRMSSESSFAGSFFSGTTVDGNFSNFSSHTDARETSTTTLVSVNKEEEEVEVREQGKEQSLAQKSREGYYLQVTLAKWLSSQANLACESVHIQSTESISYRFWVSGCLSYSDKISDGFYSILGMDPYLWLMCNNSEDGKRIPSLLLLKETEPNDTSMEVVLIDRREDSRLKELEDKAHELYCSSDNMLVLVEKLGRLVAVYMGGNFQVEQGDLQKRWKLVSNRLKEFRKCIILPIGSLTMGLCRHRAILFKKLADYIGLPCRIARGCRYCKESHQSSCLVKIDDDRKLSREYVVDLIGEPGNVHDPDSSINGETQCQIPSPLQMSHLTDFSRPCVHSTSPCQTVESKTSRTLSENIQRSGSQGQVHKEFELPDNAGTVCCAHIDQTCCAKVSSMVLTESVLRALPLDIPNLSEEKIAPQETCKEETVLLEDPTAMKQPNLSVEPEIVEADTRKDKKGRLPVDAISPYLTIEPSLASDWLEVSWNELHIKERVGAGSFGTVHRAEWHGSDVAVKILSIQDFHDDQFREFLREVCKQAVAIMKRVRHPNVVLFMGAVTERPRLSIITEYLPRGSLFRLIHRPASGELLDQRRRLRMALDVVCAIPHYAKGLNYLHCLNPPVVHWDLKSPNLLVDKNWTVKVCDFGLSRFKANTFIPSKSVAGTPEWMAPEFLRGEPTNEKSDVYSFGVVLWELITLQQPWNGLSPAQVVGAVAFQNRRLIIPPNTSPVLVSLMEACWADEPSQRPAFGSIVDTLKKLLKSPVQLIQMGGDKGVIPTKSAPIL

SEQ ID NO: 69743 - protein, 778 aa, Arabidopsis thaliana
  peptide (1)..(778): Ceres Seq. ID no. 1824576
MSSESSFAGSFFSGTTVDGNFSNFSSHTDARETSTTTLVSVNKEEEEVEVREQGKEQSLAQKSREGYYLQVTLAKWLSSQANLACESVHIQSTESISYRFWVSGCLSYSDKISDGFYSILGMDPYLWLMCNNSEDGKRIPSLLLLKETEPNDTSMEVVLIDRREDSRLKELEDKAHELYCSSDNMLVLVEKLGRLVAVYMGGNFQVEQGDLQKRWKLVSNRLKEFRKCIILPIGSLTMGLCRHRAILFKKLADYIGLPCRIARGCRYCKESHQSSCLVKIDDDRKLSREYVVDLIGEPGNVHDPDSSINGETQCQIPSPLQMSHLTDFSRPCVHSTSPCQTVESKTSRTLSENIQRSGSQGQVHKEFELPDNAGTVCCAHIDQTCCAKVSSMVLTESVLRALPLDIPNLSEEKIAPQETCKEETVLLEDPTAMKQPNLSVEPEIVEADTRKDKKGRLPVDAISPYLTIEPSLASDWLEVSWNELHIKERVGAGSFGTVHRAEWHGSDVAVKILSIQDFHDDQFREFLREVCKQAVAIMKRVRHPNVVLFMGAVTERPRLSIITEYLPRGSLFRLIHRPASGELLDQRRRLRMALDVVCAIPHYAKGLNYLHCLNPPVVHWDLKSPNLLVDKNWTVKVCDFGLSRFKANTFIPSKSVAGTPEWMAPEFLRGEPTNEKSDVYSFGVVLWELITLQQPWNGLSPAQVVGAVAFQNRRLIIPPNTSPVLVSLMEACWADEPSQRPAFGSIVDTLKKLLKSPVQLIQMGGDKGVIPTKSAPIL

SEQ ID NO: 69744 - DNA, 1845 bp, Arabidopsis thaliana
  misc_feature (1)..(1845): Ceres Seq. ID no. 1824593
  misc_feature (1)..(1845): Ortholog of  Ceres SEQ ID NO 12778278 as cited in SEQ ID NO 63035
atgtcagaggatgttgagaaatatctcaacttaaatccaccttgctcctcctcctcctcttcttcctccgccgctacattcacgaacaagtctcgaaatttcaaatcttctcccccgccgtgtccagatcatgtccttgagaacgttttagagaacgtgcttcagttcctcacttccagatgcgatcgcaacgcagtctcattggtctgcagatcgtggtatcgcgtcgaggctcagactcgattagaggtttttattggaaactgttactcgctctctcctgctcggcttattcaccggttcaagcgtgttaggtctcttgtgcttaaagggaaacctaggtttgctgattttaatctcatgcctcctaattggggagctcaattctctccttgggttgctgctacagctaaggcttatccttggctcgagaaggttcatttgaagcgtatgtttgttacggatgatgatttggctcttcttgctgagtcgtttcctgggttcaaagagcttactttggtctgctgtgaaggttttgggactagtggtattgctattgttgctaacaaatgcaggcagctaaaggtccttgatttgatggagtcagaagtcacagatgatgagttggattggatttcttgttttcctgagggtgaaactcatctggagtctttgtcttttgactgtgttgaatcccctatcaatttcaaggcattggaggagctcgtggttaggtcaccattcttgaagaaacttagaacgaacaggtttgtttcccttgaagagctgcatcgactaatggttcgagcgccgcagttaacgagtcttgggacggggtcatttagtccagacaatgtgcctcagggagaacaacaaccggattatgcagctgcttttcgtgcttgtaaatccatagtttgtctctcaggattcagggaatttagaccggaatacctcctagccatctcttcagtttgtgctaatctcacctctcttaacttcagttatgctaacatttctcctcacatgctcaagcccatcataagcaactgtcacaatatccgagtcttctgggctcttgactcgatacgtgatgaaggactacaggcagtggctgccacatgcaaggagctccgtgagcttcggattttcccttttgatcctcgtgaagacagtgaaggtcctgtctcgggagtaggcctccaagcaatttcagagggctgtaggaaactggaatctatcctgtacttttgccagaatatgaccaatggagctgtgacagccatgtcggagaactgcccgcagcttactgtgtttagactttgcataatgggtcgccataggcctgaccacgtgacaggaaagccaatggacgatggatttggtgccattgttaaaaactgcaagaagctaacccgacttgcagtatcagggttactaacagatgaagcttttagctatataggagaatatgggaaattgatccgtacgctatctgtagcgtttgctgggaacagtgacaaggctctgagatacgttcttgagggttgtcctaaactacaaaagcttgagatcagggacagtccctttggagatgttggattgcgctctggtatgcatcggtattccaatatgaggtttgtttggttgtcgtcatgtctcatatcccgtggaggctgcaggggtgtttctcatgctctgcctaatgtagtcgtggaagtatttggagccgatggtgatgatgacgaagacactgtcactggggattatgttgagacattgtacttgtatcgatcccttgatggcccaaggaaggatgctccaaagtttgtaacaattttatga

SEQ ID NO: 69745 - protein, 614 aa, Arabidopsis thaliana; identical to SEQ ID NO: 46714
  peptide (1)..(614): Ceres Seq. ID no. 1824594

SEQ ID NO: 69746 - protein, 494 aa, Arabidopsis thaliana; identical to SEQ ID NO: 46715
  peptide (1)..(494): Ceres Seq. ID no. 1824595

SEQ ID NO: 69747 - protein, 464 aa, Arabidopsis thaliana
  peptide (1)..(464): Ceres Seq. ID no. 1824596
MFVTDDDLALLAESFPGFKELTLVCCEGFGTSGIAIVANKCRQLKVLDLMESEVTDDELDWISCFPEGETHLESLSFDCVESPINFKALEELVVRSPFLKKLRTNRFVSLEELHRLMVRAPQLTSLGTGSFSPDNVPQGEQQPDYAAAFRACKSIVCLSGFREFRPEYLLAISSVCANLTSLNFSYANISPHMLKPIISNCHNIRVFWALDSIRDEGLQAVAATCKELRELRIFPFDPREDSEGPVSGVGLQAISEGCRKLESILYFCQNMTNGAVTAMSENCPQLTVFRLCIMGRHRPDHVTGKPMDDGFGAIVKNCKKLTRLAVSGLLTDEAFSYIGEYGKLIRTLSVAFAGNSDKALRYVLEGCPKLQKLEIRDSPFGDVGLRSGMHRYSNMRFVWLSSCLISRGGCRGVSHALPNVVVEVFGADGDDDEDTVTGDYVETLYLYRSLDGPRKDAPKFVTIL

SEQ ID NO: 69748 - DNA, 768 bp, Arabidopsis thaliana
  misc_feature (1)..(768): Ceres Seq. ID no. 1824647
  misc_feature (1)..(768): Ortholog of  Ceres SEQ ID NO 14304120 as cited in SEQ ID NO 58862
  misc_feature (1)..(768): Ortholog of  Ceres SEQ ID NO 13595658 as cited in SEQ ID NO 59888
  misc_feature (1)..(768): Ortholog of  Ceres SEQ ID NO 13661330 as cited in SEQ ID NO 61614
  misc_feature (1)..(768): Ortholog of  Ceres SEQ ID NO 13596025 as cited in SEQ ID NO 62024
  misc_feature (1)..(768): Ortholog of  Ceres SEQ ID NO 13662324 as cited in SEQ ID NO 62162
  misc_feature (1)..(768): Ortholog of  Ceres SEQ ID NO 12625713 as cited in SEQ ID NO 64160
  misc_feature (1)..(768): Ortholog of  Ceres SEQ ID NO 14303564 as cited in SEQ ID NO 65360
atgatcataacagtccttcattctcatgtctcattctatttcatcatccttagcttcctcttcttccatggaagtgatggtgctacaataaccatcgtaaatcgatgcagcttcaccgtgtggccgggaattttgtccaactccggaagcggcgatataggcaccaccggcttcgagctcgttcccggtggttcacgttcgttccaagctccagctagctggtcaggtcggttttgggcacgaaccggttgcaacttcaactcagacacaggacaaggcacctgcctaaccggggactgcggctctaaccaggtcgaatgtaacggtgcaggagcaaaaccgcccgctacactcgccgaattcacaatcgggtcaggtccagcagacccggcccgtaaacaagacttctacgacgtaagcctcgtggacggttacaacgttcccatgttggtggaagcaagtggcgggtcagaaggtacttgcttaaccacgggatgcgtaacggatctaaaccaaaaatgtccaacggagctccggttcgggtccgggtcagcatgcaaaagcgcgtgtgaggcttttggtagtccagaatattgttgtagtggcgcgtacgcctcacccaccgagtgtaaaccatcgatgtactcggagatattcaaatctgcgtgtccaagatcatatagctacgcgttcgacgatgctacaagtacgttcacatgcactgatgctgattacaccatcactttttgcccttccttgcctaggtag

SEQ ID NO: 69749 - protein, 255 aa, Arabidopsis thaliana
  peptide (1)..(255): Ceres Seq. ID no. 1824648
MIITVLHSHVSFYFIILSFLFFHGSDGATITIVNRCSFTVWPGILSNSGSGDIGTTGFELVPGGSRSFQAPASWSGRFWARTGCNFNSDTGQGTCLTGDCGSNQVECNGAGAKPPATLAEFTIGSGPADPARKQDFYDVSLVDGYNVPMLVEASGGSEGTCLTTGCVTDLNQKCPTELRFGSGSACKSACEAFGSPEYCCSGAYASPTECKPSMYSEIFKSACPRSYSYAFDDATSTFTCTDADYTITFCPSLPR

SEQ ID NO: 69750 - DNA, 765 bp, Arabidopsis thaliana
  misc_feature (1)..(765): Ceres Seq. ID no. 1824677
  misc_feature (1)..(765): Ortholog of  Ceres SEQ ID NO 15179607 as cited in SEQ ID NO 0
atgaactcactcgccattagagtctccaaggttctcagatcctcttcaatatctcctttagcaataagtgctgagagaggctctaagtcgtggttctctactggtcctatcgatgaaggtgtagaagaagattttgaagaaaatgttacagaaaggcctgagcttcaacctcatggagttgatcctcgtaaaggttggggatttcgcggtgttcatagggcgattatttgtgggaaagtagggcaagcaccgttacagaagatcttaaggaacgggcggacagtaacgatctttacagtaggaacaggtgggatgtttgatcagaggcttgtaggagctactaatcagccaaaaccagctcagtggcatagaatcgctgtgcacaacgaagtgcttggctcttacgctgtccaaaaactcgctaaaaactcgtcggtttatgtggaaggtgatattgagactagagtgtataatgatagcatcagcagtgaagtgaagagtatccctgagatttgcgttcgtcgtgatggtatgtatgttcatattgttgatccggaacatcaatttgttgctgagttacgattctcttgctttgttttaggtaagattcggatgatcaaatatggtgaaagcattagcaaaatctcttttgatgagctaagtaagttatcatttttcattcagctaatattcgcaaagaaaaaagagatagttgcttgtgttttaatatttgtttcacatttggcagaagaaggattgatttag

SEQ ID NO: 69751 - protein, 254 aa, Arabidopsis thaliana
  peptide (1)..(254): Ceres Seq. ID no. 1824678
MNSLAIRVSKVLRSSSISPLAISAERGSKSWFSTGPIDEGVEEDFEENVTERPELQPHGVDPRKGWGFRGVHRAIICGKVGQAPLQKILRNGRTVTIFTVGTGGMFDQRLVGATNQPKPAQWHRIAVHNEVLGSYAVQKLAKNSSVYVEGDIETRVYNDSISSEVKSIPEICVRRDGMYVHIVDPEHQFVAELRFSCFVLGKIRMIKYGESISKISFDELSKLSFFIQLIFAKKKEIVACVLIFVSHLAEEGLI

SEQ ID NO: 69752 - protein, 150 aa, Arabidopsis thaliana
  peptide (1)..(150): Ceres Seq. ID no. 1824679
MFDQRLVGATNQPKPAQWHRIAVHNEVLGSYAVQKLAKNSSVYVEGDIETRVYNDSISSEVKSIPEICVRRDGMYVHIVDPEHQFVAELRFSCFVLGKIRMIKYGESISKISFDELSKLSFFIQLIFAKKKEIVACVLIFVSHLAEEGLI

SEQ ID NO: 69753 - DNA, 1059 bp, Arabidopsis thaliana
  misc_feature (1)..(1059): Ceres Seq. ID no. 1824911
  misc_feature (1)..(1059): Ortholog of  Ceres SEQ ID NO 13655640 as cited in SEQ ID NO 63844
  misc_feature (1)..(1059): Ortholog of  Ceres SEQ ID NO 13584744 as cited in SEQ ID NO 69137
atggccgttacttcgcttctcgataccgttttccgacgtagaaagaagaagtctactgagtttataagctcagttttcgaattcgacttggacaccattaaagctgcaacaaatgatttctcagaactggttggtcgtggcggatttggttttgtttacaagggtaggcttcaaaatggacaagaaatagcagtcaagattttgtctacaagttcaattagaactgagagacagtttcataacgaacttattattttgtctaagcttaaacacaagaatctgatcaatcttcttggtttctgcactaaacgagaccaacatggtcttgtttacgagttcatgcctaactcaagcctcgattgttttatactcgacccacacagagctgctcagctaaattgggagatgtgccgaaacattattgatggcatagctcgagggctacgttaccttcatgaagaatccgggttatgggtcgttcaccgcgacattaaacctggaaacattctattggattcagatttgaaaccgaaaatagtgggatttgaattggcgaggacgatgcaacaaggtgaaaacgcagctgaaacaactgaaattgtcggtaccgtagggtatttagatccggagtacatacgaagcggacgtgtttccgtcaaatctgacgtttatgcctttggagttacaatcttgacgatcattagcagaaggaaggcttggagtgtggacggagactctctaatcaaatatgttaggagatgctggaacagaggagaagccatagatgtgatccatgaagtgatgagggaagaagaaagagaatattcgataagcgaaatcttgagatacattcacattgctttgctatgtgtggatgagaatgctgagagaaggccgaatattgataaagttctgcattggtttagttgtttctctactcctttacctgatccaacatttggtaatagatttcttgtagaggaagaaacaaattggccctggtcgccatctttatctcctggtcacagctctgtcacgtcacccatatcttcacgttaa

SEQ ID NO: 69754 - protein, 352 aa, Arabidopsis thaliana
  peptide (1)..(352): Ceres Seq. ID no. 1824912
MAVTSLLDTVFRRRKKKSTEFISSVFEFDLDTIKAATNDFSELVGRGGFGFVYKGRLQNGQEIAVKILSTSSIRTERQFHNELIILSKLKHKNLINLLGFCTKRDQHGLVYEFMPNSSLDCFILDPHRAAQLNWEMCRNIIDGIARGLRYLHEESGLWVVHRDIKPGNILLDSDLKPKIVGFELARTMQQGENAAETTEIVGTVGYLDPEYIRSGRVSVKSDVYAFGVTILTIISRRKAWSVDGDSLIKYVRRCWNRGEAIDVIHEVMREEEREYSISEILRYIHIALLCVDENAERRPNIDKVLHWFSCFSTPLPDPTFGNRFLVEEETNWPWSPSLSPGHSSVTSPISSR

SEQ ID NO: 69755 - protein, 239 aa, Arabidopsis thaliana
  peptide (1)..(239): Ceres Seq. ID no. 1824913
MPNSSLDCFILDPHRAAQLNWEMCRNIIDGIARGLRYLHEESGLWVVHRDIKPGNILLDSDLKPKIVGFELARTMQQGENAAETTEIVGTVGYLDPEYIRSGRVSVKSDVYAFGVTILTIISRRKAWSVDGDSLIKYVRRCWNRGEAIDVIHEVMREEEREYSISEILRYIHIALLCVDENAERRPNIDKVLHWFSCFSTPLPDPTFGNRFLVEEETNWPWSPSLSPGHSSVTSPISSR

SEQ ID NO: 69756 - protein, 217 aa, Arabidopsis thaliana
  peptide (1)..(217): Ceres Seq. ID no. 1824914
MCRNIIDGIARGLRYLHEESGLWVVHRDIKPGNILLDSDLKPKIVGFELARTMQQGENAAETTEIVGTVGYLDPEYIRSGRVSVKSDVYAFGVTILTIISRRKAWSVDGDSLIKYVRRCWNRGEAIDVIHEVMREEEREYSISEILRYIHIALLCVDENAERRPNIDKVLHWFSCFSTPLPDPTFGNRFLVEEETNWPWSPSLSPGHSSVTSPISSR

SEQ ID NO: 69757 - DNA, 1956 bp, Arabidopsis thaliana
  misc_feature (1)..(1956): Ceres Seq. ID no. 1825189
  misc_feature (1)..(1956): Ortholog of  Ceres SEQ ID NO 13655640 as cited in SEQ ID NO 63844
  misc_feature (1)..(1956): Ortholog of  Ceres SEQ ID NO 13657138 as cited in SEQ ID NO 65923
  misc_feature (1)..(1956): Ortholog of  Ceres SEQ ID NO 13584744 as cited in SEQ ID NO 69137
atgccgtcacgatcaatctcggcaccggttccggttcttgctccggctccgatcgtttcctctttagtcccagcagcgccgtcaggacatcagaataagacaacgcgaatctttccaccgttcgtggtggctggagccggcgccggtttctctcttttcatcactctctccgtctgtttctgtaaattcagccggaaacgttcatcacctccggcggaaaacgcttcctcttcgcctcggagaccgtcgccacgtgagttttcatattcgtctctccgtcgcgccaccggttctttctcgcaggcgaatagactaggtcagggcggatttggcgtcgtgtttcgtggaactatctccggcggcgagaatgtagctgttaaagtaatggattcaggatctcttcaaggagaaggtgagtttcagaacgagttgttcttcgccgccaagcttgactcgcctcacgttgtccctgttattggtttctctcatgatcgaaaacgacgacgtttgcttcttgtttacaagcttatggacaatggtaatctccaagacgccttgcttcaccggagatgccctgagcttatggattggaatcggaggtttttggttgccgttaacattgccgatgggattaagcatcttcatagtcttgaaccacctgtgattcatggtgatattaagcctagcaatgttctattagatagtctcttctctgccaaaatcgctgattttggtttggctaggttgaaagcagagcaagtggagattagtgtagctccggagcgtgatggtgatggatctatggttgaagaagtagagagtgtggtaactactgtgactggttatgaagattttaactttgggttggttgatcagtctccggagagtgttgctaaggttcctgggtctgtgagtgcttctcctgaggcgacgacggttgtctctgtttctccggaaatgggagagaaaacggatgaggatggtggtagtgttgtggtgatgaagaaggggaaagagagtgagagcaaagattggtggtggaagcaggagagcaatgttgaaagagggagagtgaaagagtatgtaatgcaatggattggttcagaggtaaagaaggagagaccaagcagaagtgattggattgaggcggcagctttgtcttcttcgtcaagtaagaaacttgagaagaagactagcaagagactagattggtggttgtcattggaggaagaggatgagaataagaagaagaagaagcggaggatggttagagagtggtggaaagatgagtatcgtagagaactcgctaagaaaaggaagaagaagaagaagatgactttagaagccgagttttgtagtgatgatgggagtagtagtgtgagtcaatggcggcgtggtagtggtagtggtagcagcatagattggtggttagatgggttaagtggtgaacgatggttgagagcaaggggaaatagccatgactcggtgagcggtgagatagctaagagctgcggaattagtagcacgccgagcatgagagggactgtgtgctatgcagctcctgagtactgtaacttggacaacaacgtgtcagagaaatgtgatgtctatagctacggtgttctgttgttagttctgatttccgggaggcgcccgttggagatgacgggctccgcgagtgagatacaacgggcaaacctcatgtcttgggcgaggaagttggcgagaagaggaaaacttgttgatcttgtggatcaaaagttgcaaaacttagaccaagaacaagcagtgttgtgcataaaggtggctttgttgtgtctgcaaagattaccgatttcacgaccgtcaatgaaagaggtcttgggaatgcttaaaggagaagtgaatctaccagagttgcctagtgagttctcaccatcgccaccattaaagacaacgaggaagcagcgccgttga

SEQ ID NO: 69758 - protein, 651 aa, Arabidopsis thaliana
  peptide (1)..(651): Ceres Seq. ID no. 1825190
MPSRSISAPVPVLAPAPIVSSLVPAAPSGHQNKTTRIFPPFVVAGAGAGFSLFITLSVCFCKFSRKRSSPPAENASSSPRRPSPREFSYSSLRRATGSFSQANRLGQGGFGVVFRGTISGGENVAVKVMDSGSLQGEGEFQNELFFAAKLDSPHVVPVIGFSHDRKRRRLLLVYKLMDNGNLQDALLHRRCPELMDWNRRFLVAVNIADGIKHLHSLEPPVIHGDIKPSNVLLDSLFSAKIADFGLARLKAEQVEISVAPERDGDGSMVEEVESVVTTVTGYEDFNFGLVDQSPESVAKVPGSVSASPEATTVVSVSPEMGEKTDEDGGSVVVMKKGKESESKDWWWKQESNVERGRVKEYVMQWIGSEVKKERPSRSDWIEAAALSSSSSKKLEKKTSKRLDWWLSLEEEDENKKKKKRRMVREWWKDEYRRELAKKRKKKKKMTLEAEFCSDDGSSSVSQWRRGSGSGSSIDWWLDGLSGERWLRARGNSHDSVSGEIAKSCGISSTPSMRGTVCYAAPEYCNLDNNVSEKCDVYSYGVLLLVLISGRRPLEMTGSASEIQRANLMSWARKLARRGKLVDLVDQKLQNLDQEQAVLCIKVALLCLQRLPISRPSMKEVLGMLKGEVNLPELPSEFSPSPPLKTTRKQRR

SEQ ID NO: 69759 - protein, 523 aa, Arabidopsis thaliana
  peptide (1)..(523): Ceres Seq. ID no. 1825191
MDSGSLQGEGEFQNELFFAAKLDSPHVVPVIGFSHDRKRRRLLLVYKLMDNGNLQDALLHRRCPELMDWNRRFLVAVNIADGIKHLHSLEPPVIHGDIKPSNVLLDSLFSAKIADFGLARLKAEQVEISVAPERDGDGSMVEEVESVVTTVTGYEDFNFGLVDQSPESVAKVPGSVSASPEATTVVSVSPEMGEKTDEDGGSVVVMKKGKESESKDWWWKQESNVERGRVKEYVMQWIGSEVKKERPSRSDWIEAAALSSSSSKKLEKKTSKRLDWWLSLEEEDENKKKKKRRMVREWWKDEYRRELAKKRKKKKKMTLEAEFCSDDGSSSVSQWRRGSGSGSSIDWWLDGLSGERWLRARGNSHDSVSGEIAKSCGISSTPSMRGTVCYAAPEYCNLDNNVSEKCDVYSYGVLLLVLISGRRPLEMTGSASEIQRANLMSWARKLARRGKLVDLVDQKLQNLDQEQAVLCIKVALLCLQRLPISRPSMKEVLGMLKGEVNLPELPSEFSPSPPLKTTRKQRR

SEQ ID NO: 69760 - protein, 475 aa, Arabidopsis thaliana
  peptide (1)..(475): Ceres Seq. ID no. 1825192
MDNGNLQDALLHRRCPELMDWNRRFLVAVNIADGIKHLHSLEPPVIHGDIKPSNVLLDSLFSAKIADFGLARLKAEQVEISVAPERDGDGSMVEEVESVVTTVTGYEDFNFGLVDQSPESVAKVPGSVSASPEATTVVSVSPEMGEKTDEDGGSVVVMKKGKESESKDWWWKQESNVERGRVKEYVMQWIGSEVKKERPSRSDWIEAAALSSSSSKKLEKKTSKRLDWWLSLEEEDENKKKKKRRMVREWWKDEYRRELAKKRKKKKKMTLEAEFCSDDGSSSVSQWRRGSGSGSSIDWWLDGLSGERWLRARGNSHDSVSGEIAKSCGISSTPSMRGTVCYAAPEYCNLDNNVSEKCDVYSYGVLLLVLISGRRPLEMTGSASEIQRANLMSWARKLARRGKLVDLVDQKLQNLDQEQAVLCIKVALLCLQRLPISRPSMKEVLGMLKGEVNLPELPSEFSPSPPLKTTRKQRR

SEQ ID NO: 69761 - DNA, 2184 bp, Arabidopsis thaliana
  misc_feature (1)..(2184): Ceres Seq. ID no. 1825212
  misc_feature (1)..(2184): Ortholog of  Ceres SEQ ID NO 14311156 as cited in SEQ ID NO 54767
  misc_feature (1)..(2184): Ortholog of  Ceres SEQ ID NO 14303524 as cited in SEQ ID NO 59500
  misc_feature (1)..(2184): Ortholog of  Ceres SEQ ID NO 13658778 as cited in SEQ ID NO 66511
atggagactcatagaaagaactcggtcgtcggcaacatcctccacacgtgtcatccttgccggcgcaccattccatatagaatctacgccatatttcacacgtgtggcatcatagctctcatgtatcaccatgtacactcacttgtcacagcaaacaacactcttataacatgtcttcttctcctctccgatattgttctcgccttcatgtgggcaaccacaacttccctccgcttaaacccggttcatcggaccgagtgcccggagaaatatgcagctaaaccggaggactttccaaagctggacgtgtttatatgcacggctgatccgtacaaggagcctccaatgatggttgttaacaccgctttatcggtgatggcttacgagtatccgtcagataagatctcggtgtatgtatcggacgatggaggatcgtcgttgactttctttgctcttattgaagctgctaagttctctaagcagtggttgcccttttgcaagaagaataatgttcaagatcggtctcctgaagtttatttctcttcagagtcacattctcgaagtgatgaagctgaaaaccttaagacaaacatattaaaatgtgaggtggaacagatgatgtacgaagacatgaagagtagagtagaacatgtggtggagagtggaaaagttgaaactgcgtttatcacatgcgaccaatttcgtggggtattcgatttgtggaccgacaaattcagtcgtcatgaccatcccacaattattcagctacgagtatcaggggtgatgacaaattcaccgatcattctaacactagactgtgatatgtattcgaacgacccggcaacactggttcgtgctttgtgctatttaacagatcctgaaatcaaatccggtttaggatatgtgcagtttcctcagaaatttctaggaataagcaaaaatgatatatatgcttgtgaaaacaaacgcctcttcattattaatatggttgggtttgatggtctaatgggtccaactcatgtgggaactggttgtttctttaatcgacgagctttctatggacctccatatatgttgattttaccggagataaatgaactaaagccttatcggattgcggataagtctatcaaagcccaagatgttttgtcattagcacacaatgtagcaggatgtatctatgagtacaataccaattggggatccaagattggattcagatatgggtcattagtagaagactactacacagggtttatgctccattgtgaaggatggagatcagtattttgcaacccaaaaaaagctgcattttatggagattccccaaagtgcctagttgatcttgtgggtcaacaaatccgttgggcagttgggcttttcgaaatgtccttttcaaagtatagcccaattacctatggaatcaagtcactggaccttttaatgggtttaggttattgcaactctccgtttaagccattttggtcaattcctctgaccgtctatggacttttaccacagcttgcactcatttctggagttagtgtcttccccaaggcatctgatccgtggttttggctttacatcattttattctttggggcttatgcccaagatctatcagactttttattggaaggaggaacttatcggaaatggtggaacgatcaaagaatgttgatgataaaaggactctcttcattcttctttggttttatagagttcattctcaaaaccctaaacctctccacacctaagttcaacgtcaccagtaaagccaatgatgatgacgaacagaggaagcggtacgagcaagaaatctttgatttcggaacctcttcgtccatgttcttgcccttgaccacggttgccatagtgaatctgcttgcttttgtctgggggctttatggtattctcttctgcggaggagaactctaccttgagctgatgctggtgagcttcgcggtggtgaattgcttaccgatctacggggctatggtgttgaggaaagatgatggaaaattatcaaaaagaacttgtttcttagctgggaacctccacgttggttcttattgtgtcaagttacttcgtcctcaagtaacttcaccccttaggttaattcacaacaataatacgtctggctggttcaagcggaagaaacacaatatgaatgaatctgtgtaa

SEQ ID NO: 69762 - protein, 727 aa, Arabidopsis thaliana
  peptide (1)..(727): Ceres Seq. ID no. 1825213
METHRKNSVVGNILHTCHPCRRTIPYRIYAIFHTCGIIALMYHHVHSLVTANNTLITCLLLLSDIVLAFMWATTTSLRLNPVHRTECPEKYAAKPEDFPKLDVFICTADPYKEPPMMVVNTALSVMAYEYPSDKISVYVSDDGGSSLTFFALIEAAKFSKQWLPFCKKNNVQDRSPEVYFSSESHSRSDEAENLKTNILKCEVEQMMYEDMKSRVEHVVESGKVETAFITCDQFRGVFDLWTDKFSRHDHPTIIQLRVSGVMTNSPIILTLDCDMYSNDPATLVRALCYLTDPEIKSGLGYVQFPQKFLGISKNDIYACENKRLFIINMVGFDGLMGPTHVGTGCFFNRRAFYGPPYMLILPEINELKPYRIADKSIKAQDVLSLAHNVAGCIYEYNTNWGSKIGFRYGSLVEDYYTGFMLHCEGWRSVFCNPKKAAFYGDSPKCLVDLVGQQIRWAVGLFEMSFSKYSPITYGIKSLDLLMGLGYCNSPFKPFWSIPLTVYGLLPQLALISGVSVFPKASDPWFWLYIILFFGAYAQDLSDFLLEGGTYRKWWNDQRMLMIKGLSSFFFGFIEFILKTLNLSTPKFNVTSKANDDDEQRKRYEQEIFDFGTSSSMFLPLTTVAIVNLLAFVWGLYGILFCGGELYLELMLVSFAVVNCLPIYGAMVLRKDDGKLSKRTCFLAGNLHVGSYCVKLLRPQVTSPLRLIHNNNTSGWFKRKKHNMNESV

SEQ ID NO: 69763 - protein, 687 aa, Arabidopsis thaliana
  peptide (1)..(687): Ceres Seq. ID no. 1825214
MYHHVHSLVTANNTLITCLLLLSDIVLAFMWATTTSLRLNPVHRTECPEKYAAKPEDFPKLDVFICTADPYKEPPMMVVNTALSVMAYEYPSDKISVYVSDDGGSSLTFFALIEAAKFSKQWLPFCKKNNVQDRSPEVYFSSESHSRSDEAENLKTNILKCEVEQMMYEDMKSRVEHVVESGKVETAFITCDQFRGVFDLWTDKFSRHDHPTIIQLRVSGVMTNSPIILTLDCDMYSNDPATLVRALCYLTDPEIKSGLGYVQFPQKFLGISKNDIYACENKRLFIINMVGFDGLMGPTHVGTGCFFNRRAFYGPPYMLILPEINELKPYRIADKSIKAQDVLSLAHNVAGCIYEYNTNWGSKIGFRYGSLVEDYYTGFMLHCEGWRSVFCNPKKAAFYGDSPKCLVDLVGQQIRWAVGLFEMSFSKYSPITYGIKSLDLLMGLGYCNSPFKPFWSIPLTVYGLLPQLALISGVSVFPKASDPWFWLYIILFFGAYAQDLSDFLLEGGTYRKWWNDQRMLMIKGLSSFFFGFIEFILKTLNLSTPKFNVTSKANDDDEQRKRYEQEIFDFGTSSSMFLPLTTVAIVNLLAFVWGLYGILFCGGELYLELMLVSFAVVNCLPIYGAMVLRKDDGKLSKRTCFLAGNLHVGSYCVKLLRPQVTSPLRLIHNNNTSGWFKRKKHNMNESV

SEQ ID NO: 69764 - protein, 658 aa, Arabidopsis thaliana
  peptide (1)..(658): Ceres Seq. ID no. 1825215
MWATTTSLRLNPVHRTECPEKYAAKPEDFPKLDVFICTADPYKEPPMMVVNTALSVMAYEYPSDKISVYVSDDGGSSLTFFALIEAAKFSKQWLPFCKKNNVQDRSPEVYFSSESHSRSDEAENLKTNILKCEVEQMMYEDMKSRVEHVVESGKVETAFITCDQFRGVFDLWTDKFSRHDHPTIIQLRVSGVMTNSPIILTLDCDMYSNDPATLVRALCYLTDPEIKSGLGYVQFPQKFLGISKNDIYACENKRLFIINMVGFDGLMGPTHVGTGCFFNRRAFYGPPYMLILPEINELKPYRIADKSIKAQDVLSLAHNVAGCIYEYNTNWGSKIGFRYGSLVEDYYTGFMLHCEGWRSVFCNPKKAAFYGDSPKCLVDLVGQQIRWAVGLFEMSFSKYSPITYGIKSLDLLMGLGYCNSPFKPFWSIPLTVYGLLPQLALISGVSVFPKASDPWFWLYIILFFGAYAQDLSDFLLEGGTYRKWWNDQRMLMIKGLSSFFFGFIEFILKTLNLSTPKFNVTSKANDDDEQRKRYEQEIFDFGTSSSMFLPLTTVAIVNLLAFVWGLYGILFCGGELYLELMLVSFAVVNCLPIYGAMVLRKDDGKLSKRTCFLAGNLHVGSYCVKLLRPQVTSPLRLIHNNNTSGWFKRKKHNMNESV

SEQ ID NO: 69765 - DNA, 2070 bp, Arabidopsis thaliana
  misc_feature (1)..(2070): Ceres Seq. ID no. 1825216
  misc_feature (1)..(2070): Ortholog of  Ceres SEQ ID NO 14311156 as cited in SEQ ID NO 54767
  misc_feature (1)..(2070): Ortholog of  Ceres SEQ ID NO 14303524 as cited in SEQ ID NO 59500
  misc_feature (1)..(2070): Ortholog of  Ceres SEQ ID NO 13658778 as cited in SEQ ID NO 66511
atggagcctcacagaaaacactcggtcggcgacacaaccctccacacgtgtcatccttgccggcgcaccattccatatagaatctacgccgtatttcacacgtgtggcatcatagccctcatgtatcaccatgtacactcacttctcacagcaaacacaactctaatcacgtctctccttctcctctccgatattgttctcgccttcatgtgggcaaccacaacttccctccggtataaaccggttcgccggaccgagtaccctgagaaatatgcagctgaaccggaggacttcccgaaactggacgtgtttatatgcacggctgatccgtacaaggagcctccgatgatggtggtcaacactgccttatcggtgatggcttacgagtatccgtccgataagatctcagtctacgtatcggacgatggaggttcgtcgttgactttgtttgctcttatggaggcagctaagttctctaagcattggttgcctttttgcaagaagaataatgttcaagatcggtctcctgaagtttatttctcatcaaagttacgttctcggagtgatgaagctgaaaatatcaagatgatgtacgaagacatgaagagtagagtagaacatgtggtggagagtggaaaagttgagactgcatttatcacatgcgatcaatttcgtggggtattcgatttgtggaccgacaaattcactcgtcatgaccatcccacaattattcagctacgagtgtctggagtgatgacgaattcaccgatcattctaacactagactgtgatatgtattccaacgatccagcaacaccagttcgtgccctgtgctatttaacagaccctaaaatcaaaactggtttagggtttgtgcagtttcctcaaacatttcaaggaataagcaagaacgatatatatgcatgcgcgtataagcgtctctttgagatcaatatgattgggtttgatggtttaatgggcccgaatcatgtgggaactggttgtttcttcaatcgacgaggtttttatggagctccatctaatttaattttgcctgagatagatgaacttaagcccaatcgtattgtagataagcctatcaatgctcaagatgttttagcattggctcaccgtgtagcaggatgtatctacgagcttaacaccaattggggatcaaagattggattcagatatgggtctttagtagaagactactacacagggtataggctccattgtgaaggatggagatcagttttttgcagacccaaaagagcagcattttgcggagattccccaaaaagtctaattgatgtagtgagccaacaaaagagatgggccattgggcttcttgaagttgccatctcaaggtatagccccattacctatggtgtcaaatcaatgggtctagtaacgggagtaggctattgtcaatacgcatgttgggccttttggtcacttcctcttatcgtctatggattcttgccccaacttgctctcctttatcaatctagcgtctttcccaagtcatcagatccatggttttggctttacatcgttttgttcctcggtgcatatgggcaagatctactcgactttgtattagaaggaggaacttatggcggatggtggaacgatcaaagaatgtggtcgataagaggattctcttcacacctatttggcttcatagagttcactcttaaaaccctaaacctctccacgcatggattcaacgtcacaagcaaagccaacgatgacgaagaacaaagcaagaggtatgagaaagagatttttgagttcggcccctcttcgtccatgttcttgcccttgactacggttgccatcgttaacctccttgcttttgtctgggggctttatggtcttttcgcttggggagaaggactcgtccttgagctgatgctggcgagtttcgcggtggtgaactgcttgccgatctatgaggctatggtgttgaggatagacgatggaaaattaccaaaaagggtttgtttcgtagctggaatcctcacatttgtgctgattgtgtcaggttacgtcttcctcaagtaa

SEQ ID NO: 69766 - protein, 689 aa, Arabidopsis thaliana
  peptide (1)..(689): Ceres Seq. ID no. 1825217
MEPHRKHSVGDTTLHTCHPCRRTIPYRIYAVFHTCGIIALMYHHVHSLLTANTTLITSLLLLSDIVLAFMWATTTSLRYKPVRRTEYPEKYAAEPEDFPKLDVFICTADPYKEPPMMVVNTALSVMAYEYPSDKISVYVSDDGGSSLTLFALMEAAKFSKHWLPFCKKNNVQDRSPEVYFSSKLRSRSDEAENIKMMYEDMKSRVEHVVESGKVETAFITCDQFRGVFDLWTDKFTRHDHPTIIQLRVSGVMTNSPIILTLDCDMYSNDPATPVRALCYLTDPKIKTGLGFVQFPQTFQGISKNDIYACAYKRLFEINMIGFDGLMGPNHVGTGCFFNRRGFYGAPSNLILPEIDELKPNRIVDKPINAQDVLALAHRVAGCIYELNTNWGSKIGFRYGSLVEDYYTGYRLHCEGWRSVFCRPKRAAFCGDSPKSLIDVVSQQKRWAIGLLEVAISRYSPITYGVKSMGLVTGVGYCQYACWAFWSLPLIVYGFLPQLALLYQSSVFPKSSDPWFWLYIVLFLGAYGQDLLDFVLEGGTYGGWWNDQRMWSIRGFSSHLFGFIEFTLKTLNLSTHGFNVTSKANDDEEQSKRYEKEIFEFGPSSSMFLPLTTVAIVNLLAFVWGLYGLFAWGEGLVLELMLASFAVVNCLPIYEAMVLRIDDGKLPKRVCFVAGILTFVLIVSGYVFLK

SEQ ID NO: 69767 - protein, 649 aa, Arabidopsis thaliana
  peptide (1)..(649): Ceres Seq. ID no. 1825218
MYHHVHSLLTANTTLITSLLLLSDIVLAFMWATTTSLRYKPVRRTEYPEKYAAEPEDFPKLDVFICTADPYKEPPMMVVNTALSVMAYEYPSDKISVYVSDDGGSSLTLFALMEAAKFSKHWLPFCKKNNVQDRSPEVYFSSKLRSRSDEAENIKMMYEDMKSRVEHVVESGKVETAFITCDQFRGVFDLWTDKFTRHDHPTIIQLRVSGVMTNSPIILTLDCDMYSNDPATPVRALCYLTDPKIKTGLGFVQFPQTFQGISKNDIYACAYKRLFEINMIGFDGLMGPNHVGTGCFFNRRGFYGAPSNLILPEIDELKPNRIVDKPINAQDVLALAHRVAGCIYELNTNWGSKIGFRYGSLVEDYYTGYRLHCEGWRSVFCRPKRAAFCGDSPKSLIDVVSQQKRWAIGLLEVAISRYSPITYGVKSMGLVTGVGYCQYACWAFWSLPLIVYGFLPQLALLYQSSVFPKSSDPWFWLYIVLFLGAYGQDLLDFVLEGGTYGGWWNDQRMWSIRGFSSHLFGFIEFTLKTLNLSTHGFNVTSKANDDEEQSKRYEKEIFEFGPSSSMFLPLTTVAIVNLLAFVWGLYGLFAWGEGLVLELMLASFAVVNCLPIYEAMVLRIDDGKLPKRVCFVAGILTFVLIVSGYVFLK

SEQ ID NO: 69768 - protein, 620 aa, Arabidopsis thaliana
  peptide (1)..(620): Ceres Seq. ID no. 1825219
MWATTTSLRYKPVRRTEYPEKYAAEPEDFPKLDVFICTADPYKEPPMMVVNTALSVMAYEYPSDKISVYVSDDGGSSLTLFALMEAAKFSKHWLPFCKKNNVQDRSPEVYFSSKLRSRSDEAENIKMMYEDMKSRVEHVVESGKVETAFITCDQFRGVFDLWTDKFTRHDHPTIIQLRVSGVMTNSPIILTLDCDMYSNDPATPVRALCYLTDPKIKTGLGFVQFPQTFQGISKNDIYACAYKRLFEINMIGFDGLMGPNHVGTGCFFNRRGFYGAPSNLILPEIDELKPNRIVDKPINAQDVLALAHRVAGCIYELNTNWGSKIGFRYGSLVEDYYTGYRLHCEGWRSVFCRPKRAAFCGDSPKSLIDVVSQQKRWAIGLLEVAISRYSPITYGVKSMGLVTGVGYCQYACWAFWSLPLIVYGFLPQLALLYQSSVFPKSSDPWFWLYIVLFLGAYGQDLLDFVLEGGTYGGWWNDQRMWSIRGFSSHLFGFIEFTLKTLNLSTHGFNVTSKANDDEEQSKRYEKEIFEFGPSSSMFLPLTTVAIVNLLAFVWGLYGLFAWGEGLVLELMLASFAVVNCLPIYEAMVLRIDDGKLPKRVCFVAGILTFVLIVSGYVFLK

SEQ ID NO: 69769 - DNA, 765 bp, Arabidopsis thaliana
  misc_feature (1)..(765): Ceres Seq. ID no. 1825625
  misc_feature (1)..(765): Ortholog of  Ceres SEQ ID NO 13639514 as cited in SEQ ID NO 55736
  misc_feature (1)..(765): Ortholog of  Ceres SEQ ID NO 13595560 as cited in SEQ ID NO 56738
  misc_feature (1)..(765): Ortholog of  Ceres SEQ ID NO 14312254 as cited in SEQ ID NO 59148
  misc_feature (1)..(765): Ortholog of  Ceres SEQ ID NO 13662804 as cited in SEQ ID NO 65394
  misc_feature (1)..(765): Ortholog of  Ceres SEQ ID NO 13656519 as cited in SEQ ID NO 69226
atggcgatcgaggatcaagagaacacaatccgtgaaatcaaacctaagaacagaagaatcatgggagctggtggtccggaggaagaggagaaccggtggccgccatggttgaaacctttgcttaaagagcaattctttgttcattgcaagtttcatggagactctcataagagtgaatgcaatatgtattgcttagactgcaccaatggcccactttgctctctttgtcttgctcatcacaaggatcatcgcaccattcagataaggagatcttcttatcatgatgttataagggtgaatgagatacaaaagtatcttgatataggtgggatccaaacctatgtgatcaatagtgctaaagtcgtcttcctgaatgagaggcctcagcctaggcctgggaaaggagtgaccaatacctgcaaggtttgctatcgtagcctcgttgatgatagcttccgcttctgctctcttggctgcaagtttcacctaacttctccttgcatttcagtaaactcttttctgatacttactttctctatgtttttgggaaatgaaatcaagattgctggaacatcaagaggctttgaaaagggaagggagaacctgctaatggaaacagaggattcaagtagcagcattgcaattgggaagaacattacaaatctccagagtttcagcccatcaacacctccacttactacatctagtaactgcagaatcgtcaagcgaagaaagggaattcctcaccgatctccaatgggataa

SEQ ID NO: 69770 - protein, 254 aa, Arabidopsis thaliana
  peptide (1)..(254): Ceres Seq. ID no. 1825626
MAIEDQENTIREIKPKNRRIMGAGGPEEEENRWPPWLKPLLKEQFFVHCKFHGDSHKSECNMYCLDCTNGPLCSLCLAHHKDHRTIQIRRSSYHDVIRVNEIQKYLDIGGIQTYVINSAKVVFLNERPQPRPGKGVTNTCKVCYRSLVDDSFRFCSLGCKFHLTSPCISVNSFLILTFSMFLGNEIKIAGTSRGFEKGRENLLMETEDSSSSIAIGKNITNLQSFSPSTPPLTTSSNCRIVKRRKGIPHRSPMG

SEQ ID NO: 69771 - protein, 234 aa, Arabidopsis thaliana
  peptide (1)..(234): Ceres Seq. ID no. 1825627
MGAGGPEEEENRWPPWLKPLLKEQFFVHCKFHGDSHKSECNMYCLDCTNGPLCSLCLAHHKDHRTIQIRRSSYHDVIRVNEIQKYLDIGGIQTYVINSAKVVFLNERPQPRPGKGVTNTCKVCYRSLVDDSFRFCSLGCKFHLTSPCISVNSFLILTFSMFLGNEIKIAGTSRGFEKGRENLLMETEDSSSSIAIGKNITNLQSFSPSTPPLTTSSNCRIVKRRKGIPHRSPMG

SEQ ID NO: 69772 - protein, 193 aa, Arabidopsis thaliana
  peptide (1)..(193): Ceres Seq. ID no. 1825628
MYCLDCTNGPLCSLCLAHHKDHRTIQIRRSSYHDVIRVNEIQKYLDIGGIQTYVINSAKVVFLNERPQPRPGKGVTNTCKVCYRSLVDDSFRFCSLGCKFHLTSPCISVNSFLILTFSMFLGNEIKIAGTSRGFEKGRENLLMETEDSSSSIAIGKNITNLQSFSPSTPPLTTSSNCRIVKRRKGIPHRSPMG

SEQ ID NO: 69773 - DNA, 3285 bp, Arabidopsis thaliana
  misc_feature (1)..(3285): Ceres Seq. ID no. 1825704
  misc_feature (1)..(3285): Ortholog of  Ceres SEQ ID NO 15176081 as cited in SEQ ID NO 65838
  misc_feature (1)..(3285): Ortholog of  Ceres SEQ ID NO 13660287 as cited in SEQ ID NO 67316
  misc_feature (1)..(3285): Ortholog of  Ceres SEQ ID NO 15178801 as cited in SEQ ID NO 0
atgggtatttccgctcgtatcttcgccggacatctaggcagtacacaactagccgcggcatccatcggaaacagcagcttcagcctcgtttatgccctcatgttgggcatgggtagtgcggtcgagacactatgtggacaagcgtatggtgcccaccggtacgagatgcttgggatctatctccaaagagcaaccattgtccttgctctagttggctttcccatgacaatactatacactttttcgtacccgattcttctcctcttaggcgagcctaaaacggtatcatacatgggatctttatacatcgccggactcatccctcaaatcttcgcttacgccgtctacttcacggcccaaaagttcctccaggcccaaagcgtagtggccccgagtgcgtacatctcagccgccgccctcgtcctccagatatcgctgacgtggatcaccgtttacgcaatgggccaaggcctcatggcccaaacgttttacgttataactagcgtaaggtttaaagacacttggactggttttagctggaaatcgttacatggtctttggagcttctttaaactgtctgctggctctgcggtcatgatctgtttggaactgtggtatacacagattctggttcttctcgctggtttgcttaaagatcctgcactctctctagattctctatctatctgtatgtcaatttcagcattatcattcatggtctccgttggctttaatgctgctgtaagtgtacgtacaagtaatgagcttggagcaggaaatccgaaatcggcgttattctctacatggacagcgacttttgtatccttcgtgatctccgtcgtagaggcacttgtcgtgattgcgtcacgtgacaacgtcagctacattttcacgtcggatgctgacgtggctaaggccgtctctgacctatgtccttttctcgccgtcaccattattcttaacggaatccaacctgtcttgtccggagtggcagtgggatgtggatggcagacatacgtggcatatgtgaatattggttgttactatatagttggtattccaattggatgtattctcggcttcactttcaattttcaagcaaaggggatatggaccgggatgattggaggcaccctcatgcaaacactaatcttactttacgtcacgtatcaagcagattgggataaagagcaaaatgaattaagcaatgaaattgaaaaaaccttcattgccttcttcattgctctgcgccgtcccgccttgtctctctcaaattcgcttactcatccctcgcaggttagcttcttctaccattattgctttcgcattccttctggggtaagggtttcatcatcaactttcgccaatgcaaagcttgtaactttgagaaaccacactgttaatttgcacatatattactgttccatggctggtactgataaccgccgctctcgccacgacgacgaaagccctaaaaatcccaacaagaagaagaaaggaaaccgtaatccagaaaagagtctccttatcaatcttcattcatgttccaagagaaaggatctctcagctgcattggctctttatgatgcagctatcacttccagtgacattcgcctcaaccagcaacacttccaatcccttctttacctctgctccgcgttcattagtgacccatctcttcaaaccgttgccattgaccgtggctttcaaatttttgaccgtatggttagttctgggataagtcctaatgaatcatctgtcactgcagttgcacgactagctgctgccaagggtgatggagactatgctttcaagcttgttaaagaccttgttgctgttggtggtgtatcggtccctcgtctgagaacttatgctccggctttgctctgtttctgtgatactttggaggctgaaaagggttatgaagtggaagatcacatggatgcttcaggtattgtgttggaggaggcagagatctcggctttgctaaagaagttaagagaatgtgttggctgcgttagtgaagaaacttcaaaagcaatcgaggaatggttttatggagtgaaagctagcgaagttagtgataatgggattggttctgatattgagctgcttagagcagctgttttgaaaaatgggggtgggtggcatggtcttgggtgggttggagaaggcaaatggattgtgaagaaaggtaatgttagctcagccgggaaatgtttgagctgtgatgagcatttggcttgtgttgataccaatgaggtagagactgaagattttgtgaattctttggtgactttggctatggagaggaaggcaaagatgaattcatgcgagcctatggcggatttcagtgagtttcaggagtggcttgaaaagcatggagattacgaagctatactagatggagcaaatattgggctctaccaacaaaattttgcagatggtggtttcagtctaccacagattttaagtcaattttcgactaaacgactaacttatgatatttccaaacgatttttcttatttggatggaaaaggttgaatcagcagaatcaagacatcatgaactcacctcctccttcttctaatgatggcttggcgaagcgaaaaagaggtcgaccgcgcaaagatgaaaactcaactccaaaaccggacatgaatttggtaggtaaggtggttactggtgtaatcgaaggatctttcgacgcaggctatctccttaacgttaaggttaaagacagtgacacccaactcagaggtctcgtgttcatacggggcagagtcactccgatcactccagaaaacgacgtggctcctcttgttaaaatgtacggaagagaagatatcaagaacaaccaaaccgatcattctttccctactgatcaaccaatgcaagatgctgctgtcactactactgacatggatatttctgaatcctctcgagctttggtcgtagttccacaagcgaccaatggccaagcgaaggaagctacgaaggatgaagatggagtcattgaaggacaagctgacactcggttagtggagttttttccaactccaggcacaatgatgatgactgctcaaccaaatcttgtcttggtaccgaaagagacagaacaacagaaaacaactggtgggagtcatggattcgatcttatggaagaggaaccagttcgtcaaggagagaagttgccagaggagctattacatctagagcttggaaacaagacaacattgagtgtagacaacaacatctctacaacagaggcgcctgatctataa

SEQ ID NO: 69774 - protein, 1094 aa, Arabidopsis thaliana
  peptide (1)..(1094): Ceres Seq. ID no. 1825705
MGISARIFAGHLGSTQLAAASIGNSSFSLVYALMLGMGSAVETLCGQAYGAHRYEMLGIYLQRATIVLALVGFPMTILYTFSYPILLLLGEPKTVSYMGSLYIAGLIPQIFAYAVYFTAQKFLQAQSVVAPSAYISAAALVLQISLTWITVYAMGQGLMAQTFYVITSVRFKDTWTGFSWKSLHGLWSFFKLSAGSAVMICLELWYTQILVLLAGLLKDPALSLDSLSICMSISALSFMVSVGFNAAVSVRTSNELGAGNPKSALFSTWTATFVSFVISVVEALVVIASRDNVSYIFTSDADVAKAVSDLCPFLAVTIILNGIQPVLSGVAVGCGWQTYVAYVNIGCYYIVGIPIGCILGFTFNFQAKGIWTGMIGGTLMQTLILLYVTYQADWDKEQNELSNEIEKTFIAFFIALRRPALSLSNSLTHPSQVSFFYHYCFRIPSGVRVSSSTFANAKLVTLRNHTVNLHIYYCSMAGTDNRRSRHDDESPKNPNKKKKGNRNPEKSLLINLHSCSKRKDLSAALALYDAAITSSDIRLNQQHFQSLLYLCSAFISDPSLQTVAIDRGFQIFDRMVSSGISPNESSVTAVARLAAAKGDGDYAFKLVKDLVAVGGVSVPRLRTYAPALLCFCDTLEAEKGYEVEDHMDASGIVLEEAEISALLKKLRECVGCVSEETSKAIEEWFYGVKASEVSDNGIGSDIELLRAAVLKNGGGWHGLGWVGEGKWIVKKGNVSSAGKCLSCDEHLACVDTNEVETEDFVNSLVTLAMERKAKMNSCEPMADFSEFQEWLEKHGDYEAILDGANIGLYQQNFADGGFSLPQILSQFSTKRLTYDISKRFFLFGWKRLNQQNQDIMNSPPPSSNDGLAKRKRGRPRKDENSTPKPDMNLVGKVVTGVIEGSFDAGYLLNVKVKDSDTQLRGLVFIRGRVTPITPENDVAPLVKMYGREDIKNNQTDHSFPTDQPMQDAAVTTTDMDISESSRALVVVPQATNGQAKEATKDEDGVIEGQADTRLVEFFPTPGTMMMTAQPNLVLVPKETEQQKTTGGSHGFDLMEEEPVRQGEKLPEELLHLELGNKTTLSVDNNISTTEAPDL

SEQ ID NO: 69775 - protein, 1061 aa, Arabidopsis thaliana
  peptide (1)..(1061): Ceres Seq. ID no. 1825706
MLGMGSAVETLCGQAYGAHRYEMLGIYLQRATIVLALVGFPMTILYTFSYPILLLLGEPKTVSYMGSLYIAGLIPQIFAYAVYFTAQKFLQAQSVVAPSAYISAAALVLQISLTWITVYAMGQGLMAQTFYVITSVRFKDTWTGFSWKSLHGLWSFFKLSAGSAVMICLELWYTQILVLLAGLLKDPALSLDSLSICMSISALSFMVSVGFNAAVSVRTSNELGAGNPKSALFSTWTATFVSFVISVVEALVVIASRDNVSYIFTSDADVAKAVSDLCPFLAVTIILNGIQPVLSGVAVGCGWQTYVAYVNIGCYYIVGIPIGCILGFTFNFQAKGIWTGMIGGTLMQTLILLYVTYQADWDKEQNELSNEIEKTFIAFFIALRRPALSLSNSLTHPSQVSFFYHYCFRIPSGVRVSSSTFANAKLVTLRNHTVNLHIYYCSMAGTDNRRSRHDDESPKNPNKKKKGNRNPEKSLLINLHSCSKRKDLSAALALYDAAITSSDIRLNQQHFQSLLYLCSAFISDPSLQTVAIDRGFQIFDRMVSSGISPNESSVTAVARLAAAKGDGDYAFKLVKDLVAVGGVSVPRLRTYAPALLCFCDTLEAEKGYEVEDHMDASGIVLEEAEISALLKKLRECVGCVSEETSKAIEEWFYGVKASEVSDNGIGSDIELLRAAVLKNGGGWHGLGWVGEGKWIVKKGNVSSAGKCLSCDEHLACVDTNEVETEDFVNSLVTLAMERKAKMNSCEPMADFSEFQEWLEKHGDYEAILDGANIGLYQQNFADGGFSLPQILSQFSTKRLTYDISKRFFLFGWKRLNQQNQDIMNSPPPSSNDGLAKRKRGRPRKDENSTPKPDMNLVGKVVTGVIEGSFDAGYLLNVKVKDSDTQLRGLVFIRGRVTPITPENDVAPLVKMYGREDIKNNQTDHSFPTDQPMQDAAVTTTDMDISESSRALVVVPQATNGQAKEATKDEDGVIEGQADTRLVEFFPTPGTMMMTAQPNLVLVPKETEQQKTTGGSHGFDLMEEEPVRQGEKLPEELLHLELGNKTTLSVDNNISTTEAPDL

SEQ ID NO: 69776 - protein, 1058 aa, Arabidopsis thaliana
  peptide (1)..(1058): Ceres Seq. ID no. 1825707
MGSAVETLCGQAYGAHRYEMLGIYLQRATIVLALVGFPMTILYTFSYPILLLLGEPKTVSYMGSLYIAGLIPQIFAYAVYFTAQKFLQAQSVVAPSAYISAAALVLQISLTWITVYAMGQGLMAQTFYVITSVRFKDTWTGFSWKSLHGLWSFFKLSAGSAVMICLELWYTQILVLLAGLLKDPALSLDSLSICMSISALSFMVSVGFNAAVSVRTSNELGAGNPKSALFSTWTATFVSFVISVVEALVVIASRDNVSYIFTSDADVAKAVSDLCPFLAVTIILNGIQPVLSGVAVGCGWQTYVAYVNIGCYYIVGIPIGCILGFTFNFQAKGIWTGMIGGTLMQTLILLYVTYQADWDKEQNELSNEIEKTFIAFFIALRRPALSLSNSLTHPSQVSFFYHYCFRIPSGVRVSSSTFANAKLVTLRNHTVNLHIYYCSMAGTDNRRSRHDDESPKNPNKKKKGNRNPEKSLLINLHSCSKRKDLSAALALYDAAITSSDIRLNQQHFQSLLYLCSAFISDPSLQTVAIDRGFQIFDRMVSSGISPNESSVTAVARLAAAKGDGDYAFKLVKDLVAVGGVSVPRLRTYAPALLCFCDTLEAEKGYEVEDHMDASGIVLEEAEISALLKKLRECVGCVSEETSKAIEEWFYGVKASEVSDNGIGSDIELLRAAVLKNGGGWHGLGWVGEGKWIVKKGNVSSAGKCLSCDEHLACVDTNEVETEDFVNSLVTLAMERKAKMNSCEPMADFSEFQEWLEKHGDYEAILDGANIGLYQQNFADGGFSLPQILSQFSTKRLTYDISKRFFLFGWKRLNQQNQDIMNSPPPSSNDGLAKRKRGRPRKDENSTPKPDMNLVGKVVTGVIEGSFDAGYLLNVKVKDSDTQLRGLVFIRGRVTPITPENDVAPLVKMYGREDIKNNQTDHSFPTDQPMQDAAVTTTDMDISESSRALVVVPQATNGQAKEATKDEDGVIEGQADTRLVEFFPTPGTMMMTAQPNLVLVPKETEQQKTTGGSHGFDLMEEEPVRQGEKLPEELLHLELGNKTTLSVDNNISTTEAPDL

SEQ ID NO: 69777 - DNA, 3222 bp, Arabidopsis thaliana
  misc_feature (1)..(3222): Ceres Seq. ID no. 1825766
  misc_feature (1)..(3222): Ortholog of  Ceres SEQ ID NO 15173069 as cited in SEQ ID NO 64846
atgcaacttgtggaggggggactagagaatgatgtagtttttgctctagttgttttctcgttgcagtatattcttgctagccatgagtattggaaatacaatcatggaaatatgcgttggaaagtgacactaaaagtcatcgagttgatgaaaacgtgtctcagattcagtaaattctccacaaagctgagggatgttctccttgatattttactgaacgatgcctctgttcacagtgctcttttcagaataatttgtacgactacgcaaaatttagagactatacaggtttgtgctgctcaagtgctgtcaaagttatttgccttggcagaatcatcacaactctatataataagcaatgcaggctttggtctagacaataaacagcctgctcttttagtggccatatttgattcagacgaagactcagattctagcaacgtaaaacagtcgcgcaaagatgcctcctcaattcctgactgggcttgtaaatctcgcttactgcacactatcctgcaatatgtagagagagcaaccgattttgtcgatagacacacagatatattactgggtttacttgatttcctgaaaaccctttggcaagaggctggccaatacgcaaatatgctggaaccgtttaaggcgtcaaaaaagttgtggcaggaattttccgacattatatcacaggcttctaagataaaagattcgacggttggaagtttaggcaaggaagaaatctcgaaattgttagtgaaatatcagtgtcaggcttctgttttggaaattatggcttgcaacatgtttttgtacaagaagttgctgtttgcggagtcacttaaaaagccatgtgtggagactaaaaagacagcaagtaatggagtatctccacccaaattaacttggacagctgattcagatcccaaggatatcttttcaaaatggtgtgacatatctgttttggatggcattatccagtcagtttcttccttagatggtgaaagtgaaataaacttccaagcaaaggcacgaaaacttgagggtcgtgatatcccaactggtcctttcaaagagcttttccagtttctagtggagacgagcttttgggagaaatataaacagaaaactaataaggatgtaaatatggctttgggggactgtttgtttgacactcagcaaatacagactgaattaggtattgatatttgggatttctctgagtggaagacatctaaaacaacggcagaggaaatgttgaactacatgcagagagcaaactcgatggttttactctcaacttcgcagctctctgttttgcatgcattgatttccgtcttgatactttatgaggataatatttcggtacatctaaatgctacaccttatgtgcagtctcttgaagaaagtgcagctgcggaaaggaaaatcccttctcgagtcactcttttaagcattgataaagtatgccgaaaattttgcaccacggttgattcacttgcctctctctgggatgcacccaagattgtgtttgatattcttacagcacaggcagacttgctatcccgcctattgaaatccgcaaagaaaaatctttcattatctgtatgtgcacttgtcctgagaaatgttgggcctggcctcaagatccttggtagtttgaggcattcaaatgctatattgaagaagacgataaacctcctgcttgaggtgctgctcctggttgtgggttttggttcagacaactcaaactcgagtgggatgggacatatggtgctagccaaagattttgcagaaatatctgatgctacaattggattattaccccttctctgcaacttcatggggaatcccgagtacttgactctctgcctgaccacagtagacttgattctcaggaattttttgacgccagagacatggttccctattatacagagtcaactccgcttgcagcatgttattctacagcttcaggataagaaatccacaacatccgtttcagcaatactaaaatttttcttaactattgctcaagttcatggcggtgctcagatgcttctaaattctggatttttctcgactttaagagctttgttaatggagtttccggatggaatgtctactttggtatctgacaatgaaaagggctcgctgctagaaaagacagaaaaaactcagcatatctggggaatcggtttggctgtggttactgccatggttcattctctaggatctgtttctgcaggggctgatattgtggagagtgtcatatcttactttttcttggagaaaggttacatgatctcatactatctcgctgcaccagatttcccttctgatgatcgtgacaaagtgaggctacgaagtcaacggacgtggacttcccttgcttatctgagagtaaccgagcatactctccttctgctgtgtgcattagctagccattggagatcatgggttaaaattatgaaggatatggattctccattaagagaaatgacaatacatctcttggcctttatcagcaaaggcgctcaacggcttagagagtctcagagccacatatctcatctgttatgccctccagtagcgaaagaagagtttgattcctgcaaaagaccgtctttcatcaataccaaacacggatggttttcgctagcacctttagtttgtgttgggaaacccaagatcactgcagtatctatctcgactgctctagttgttaggggagacacaacagaacatcctgggtctgttcctcaatcgcaattttcagactcagttgcgatacagatatatagagtggcttctctattgttgaaatttctgtgcttacaagcagagggtgttgttacgagggcagaggaagtgggatatgtcgatattgctcatttccctgagcttccagagccggagattttacatggtctacaggaccaagcgacggcgatagtcgctgagctatgtgataattacaaatccaaagagattccagatgaagtaaagaagttgtgccttatgctgatccaaacgacagagatgtcgttatacttggaactctgtgtagttcaggtttgcaggatccatcctgtatttgggcgtgtggataacttctccaaagacttgaaaaaactagtgaaagctgctgaggtgcatacctacttagaaccgtccatagattcactgaagaaaatagctgcgtttctgtatcctggatcactttag

SEQ ID NO: 69778 - protein, 1073 aa, Arabidopsis thaliana
  peptide (1)..(1073): Ceres Seq. ID no. 1825767
MQLVEGGLENDVVFALVVFSLQYILASHEYWKYNHGNMRWKVTLKVIELMKTCLRFSKFSTKLRDVLLDILLNDASVHSALFRIICTTTQNLETIQVCAAQVLSKLFALAESSQLYIISNAGFGLDNKQPALLVAIFDSDEDSDSSNVKQSRKDASSIPDWACKSRLLHTILQYVERATDFVDRHTDILLGLLDFLKTLWQEAGQYANMLEPFKASKKLWQEFSDIISQASKIKDSTVGSLGKEEISKLLVKYQCQASVLEIMACNMFLYKKLLFAESLKKPCVETKKTASNGVSPPKLTWTADSDPKDIFSKWCDISVLDGIIQSVSSLDGESEINFQAKARKLEGRDIPTGPFKELFQFLVETSFWEKYKQKTNKDVNMALGDCLFDTQQIQTELGIDIWDFSEWKTSKTTAEEMLNYMQRANSMVLLSTSQLSVLHALISVLILYEDNISVHLNATPYVQSLEESAAAERKIPSRVTLLSIDKVCRKFCTTVDSLASLWDAPKIVFDILTAQADLLSRLLKSAKKNLSLSVCALVLRNVGPGLKILGSLRHSNAILKKTINLLLEVLLLVVGFGSDNSNSSGMGHMVLAKDFAEISDATIGLLPLLCNFMGNPEYLTLCLTTVDLILRNFLTPETWFPIIQSQLRLQHVILQLQDKKSTTSVSAILKFFLTIAQVHGGAQMLLNSGFFSTLRALLMEFPDGMSTLVSDNEKGSLLEKTEKTQHIWGIGLAVVTAMVHSLGSVSAGADIVESVISYFFLEKGYMISYYLAAPDFPSDDRDKVRLRSQRTWTSLAYLRVTEHTLLLLCALASHWRSWVKIMKDMDSPLREMTIHLLAFISKGAQRLRESQSHISHLLCPPVAKEEFDSCKRPSFINTKHGWFSLAPLVCVGKPKITAVSISTALVVRGDTTEHPGSVPQSQFSDSVAIQIYRVASLLLKFLCLQAEGVVTRAEEVGYVDIAHFPELPEPEILHGLQDQATAIVAELCDNYKSKEIPDEVKKLCLMLIQTTEMSLYLELCVVQVCRIHPVFGRVDNFSKDLKKLVKAAEVHTYLEPSIDSLKKIAAFLYPGSL

SEQ ID NO: 69779 - protein, 1036 aa, Arabidopsis thaliana
  peptide (1)..(1036): Ceres Seq. ID no. 1825768
MRWKVTLKVIELMKTCLRFSKFSTKLRDVLLDILLNDASVHSALFRIICTTTQNLETIQVCAAQVLSKLFALAESSQLYIISNAGFGLDNKQPALLVAIFDSDEDSDSSNVKQSRKDASSIPDWACKSRLLHTILQYVERATDFVDRHTDILLGLLDFLKTLWQEAGQYANMLEPFKASKKLWQEFSDIISQASKIKDSTVGSLGKEEISKLLVKYQCQASVLEIMACNMFLYKKLLFAESLKKPCVETKKTASNGVSPPKLTWTADSDPKDIFSKWCDISVLDGIIQSVSSLDGESEINFQAKARKLEGRDIPTGPFKELFQFLVETSFWEKYKQKTNKDVNMALGDCLFDTQQIQTELGIDIWDFSEWKTSKTTAEEMLNYMQRANSMVLLSTSQLSVLHALISVLILYEDNISVHLNATPYVQSLEESAAAERKIPSRVTLLSIDKVCRKFCTTVDSLASLWDAPKIVFDILTAQADLLSRLLKSAKKNLSLSVCALVLRNVGPGLKILGSLRHSNAILKKTINLLLEVLLLVVGFGSDNSNSSGMGHMVLAKDFAEISDATIGLLPLLCNFMGNPEYLTLCLTTVDLILRNFLTPETWFPIIQSQLRLQHVILQLQDKKSTTSVSAILKFFLTIAQVHGGAQMLLNSGFFSTLRALLMEFPDGMSTLVSDNEKGSLLEKTEKTQHIWGIGLAVVTAMVHSLGSVSAGADIVESVISYFFLEKGYMISYYLAAPDFPSDDRDKVRLRSQRTWTSLAYLRVTEHTLLLLCALASHWRSWVKIMKDMDSPLREMTIHLLAFISKGAQRLRESQSHISHLLCPPVAKEEFDSCKRPSFINTKHGWFSLAPLVCVGKPKITAVSISTALVVRGDTTEHPGSVPQSQFSDSVAIQIYRVASLLLKFLCLQAEGVVTRAEEVGYVDIAHFPELPEPEILHGLQDQATAIVAELCDNYKSKEIPDEVKKLCLMLIQTTEMSLYLELCVVQVCRIHPVFGRVDNFSKDLKKLVKAAEVHTYLEPSIDSLKKIAAFLYPGSL

SEQ ID NO: 69780 - protein, 1024 aa, Arabidopsis thaliana
  peptide (1)..(1024): Ceres Seq. ID no. 1825769
MKTCLRFSKFSTKLRDVLLDILLNDASVHSALFRIICTTTQNLETIQVCAAQVLSKLFALAESSQLYIISNAGFGLDNKQPALLVAIFDSDEDSDSSNVKQSRKDASSIPDWACKSRLLHTILQYVERATDFVDRHTDILLGLLDFLKTLWQEAGQYANMLEPFKASKKLWQEFSDIISQASKIKDSTVGSLGKEEISKLLVKYQCQASVLEIMACNMFLYKKLLFAESLKKPCVETKKTASNGVSPPKLTWTADSDPKDIFSKWCDISVLDGIIQSVSSLDGESEINFQAKARKLEGRDIPTGPFKELFQFLVETSFWEKYKQKTNKDVNMALGDCLFDTQQIQTELGIDIWDFSEWKTSKTTAEEMLNYMQRANSMVLLSTSQLSVLHALISVLILYEDNISVHLNATPYVQSLEESAAAERKIPSRVTLLSIDKVCRKFCTTVDSLASLWDAPKIVFDILTAQADLLSRLLKSAKKNLSLSVCALVLRNVGPGLKILGSLRHSNAILKKTINLLLEVLLLVVGFGSDNSNSSGMGHMVLAKDFAEISDATIGLLPLLCNFMGNPEYLTLCLTTVDLILRNFLTPETWFPIIQSQLRLQHVILQLQDKKSTTSVSAILKFFLTIAQVHGGAQMLLNSGFFSTLRALLMEFPDGMSTLVSDNEKGSLLEKTEKTQHIWGIGLAVVTAMVHSLGSVSAGADIVESVISYFFLEKGYMISYYLAAPDFPSDDRDKVRLRSQRTWTSLAYLRVTEHTLLLLCALASHWRSWVKIMKDMDSPLREMTIHLLAFISKGAQRLRESQSHISHLLCPPVAKEEFDSCKRPSFINTKHGWFSLAPLVCVGKPKITAVSISTALVVRGDTTEHPGSVPQSQFSDSVAIQIYRVASLLLKFLCLQAEGVVTRAEEVGYVDIAHFPELPEPEILHGLQDQATAIVAELCDNYKSKEIPDEVKKLCLMLIQTTEMSLYLELCVVQVCRIHPVFGRVDNFSKDLKKLVKAAEVHTYLEPSIDSLKKIAAFLYPGSL

SEQ ID NO: 69781 - DNA, 1638 bp, Arabidopsis thaliana
  misc_feature (1)..(1638): Ceres Seq. ID no. 1825800
  misc_feature (1)..(1638): Ortholog of  Ceres SEQ ID NO 15179873 as cited in SEQ ID NO 66846
atgaaaatctccaaatctctctggagtgttatgatttctattctcttctatcttacttctgctccaccatttgtgatttgctcatctcttgaagtcaccattgataaccattcaccaagcaatctcaagactaaaggatccctagaacaagataagttgagtcatcaaatgataaatagcataaagcttcatggcattctcttatgggtttccatgggctttcttatgccagtggggattctcttcattagaatggccaataaagctcatgaaaatggaataaaagttaaagtgttcttctaccttcatgtcattttccagatactggcagtagttttagcaacaataggagctatactgtctttaagaacattggagaactcttttgacaacaaccatcaaagacttggtttggctctttatgctgccatgtggctccaattcttgaccggtgtcttcaagccctcaagagggagcaaaaggaggttaagatggttcttattgcattggatacttggaacaatagtgtcaatagttggcatagtaaacatatacacaggcatacaagcttatcaaaagaagacatcattaagtagagactcaagtctttggacaatcttgttcacagttcaagtcacttgtcttgtcttcttctatctatatcaagacaaatgggaacattttcaaaagcaaagagttgttcttgacgaattggatcatcaaaataataacacaaatggaagaaataaccaaagcatccaagtggtaacgagaaatgatcatgaacaaaaggtcatggttcctcagccttgtcgcaaaagtaatgcacttatttgtagagaacgagagagagaggagaacaaaatggtaggcgaagaggagacgaagaagagagtagtcactgaatcgctaggatggttaacggaatcttcgattatgccaaagaagcatcgcgccatcgaaggtgttggtccttcctcaatcatggagcttaaagctcagctctataagtctcaggaggaagctaaacagacaaaggattttacgggatccgatgctcaataccatcgcgccaaagaaaggattgccgccaaagattctttcgccgcgaaaaactccggcgtcgaaagtcgcaatttaaaggacaagcttgagcacaaagctgtaaaagatggagcagttagttatgccgcattggagaaaaaggctcagttgtatgataaacttgctagaggagagctttctgatgaagaaggtgaagagaagtactgtgttgacttctttaggaaaggaattcaacatgaagatccaaaaccatcaagcacttacaacagttccatttcagcaccacctgaagatttcaagcaagatggtgaagatgatggttcgctttttagcaccaaatttgctggacttggacatgcaattgggacagctgatgtaggtcaacacgtgcgcatggtcagggaggttcatgaggaagtcaatcaagcgagagaaaaggcaaccgagttaaagcaaaggagacaagagcaagcaacaaatcgtcgggagaaactcaaacaagcttatcttcggaagcagctcgagaaactaaaggctcaacaacaacaacaagaagatgaacaaaaaacttga

SEQ ID NO: 69782 - protein, 545 aa, Arabidopsis thaliana
  peptide (1)..(545): Ceres Seq. ID no. 1825801
MKISKSLWSVMISILFYLTSAPPFVICSSLEVTIDNHSPSNLKTKGSLEQDKLSHQMINSIKLHGILLWVSMGFLMPVGILFIRMANKAHENGIKVKVFFYLHVIFQILAVVLATIGAILSLRTLENSFDNNHQRLGLALYAAMWLQFLTGVFKPSRGSKRRLRWFLLHWILGTIVSIVGIVNIYTGIQAYQKKTSLSRDSSLWTILFTVQVTCLVFFYLYQDKWEHFQKQRVVLDELDHQNNNTNGRNNQSIQVVTRNDHEQKVMVPQPCRKSNALICREREREENKMVGEEETKKRVVTESLGWLTESSIMPKKHRAIEGVGPSSIMELKAQLYKSQEEAKQTKDFTGSDAQYHRAKERIAAKDSFAAKNSGVESRNLKDKLEHKAVKDGAVSYAALEKKAQLYDKLARGELSDEEGEEKYCVDFFRKGIQHEDPKPSSTYNSSISAPPEDFKQDGEDDGSLFSTKFAGLGHAIGTADVGQHVRMVREVHEEVNQAREKATELKQRRQEQATNRREKLKQAYLRKQLEKLKAQQQQQEDEQKT

SEQ ID NO: 69783 - protein, 535 aa, Arabidopsis thaliana
  peptide (1)..(535): Ceres Seq. ID no. 1825802
MISILFYLTSAPPFVICSSLEVTIDNHSPSNLKTKGSLEQDKLSHQMINSIKLHGILLWVSMGFLMPVGILFIRMANKAHENGIKVKVFFYLHVIFQILAVVLATIGAILSLRTLENSFDNNHQRLGLALYAAMWLQFLTGVFKPSRGSKRRLRWFLLHWILGTIVSIVGIVNIYTGIQAYQKKTSLSRDSSLWTILFTVQVTCLVFFYLYQDKWEHFQKQRVVLDELDHQNNNTNGRNNQSIQVVTRNDHEQKVMVPQPCRKSNALICREREREENKMVGEEETKKRVVTESLGWLTESSIMPKKHRAIEGVGPSSIMELKAQLYKSQEEAKQTKDFTGSDAQYHRAKERIAAKDSFAAKNSGVESRNLKDKLEHKAVKDGAVSYAALEKKAQLYDKLARGELSDEEGEEKYCVDFFRKGIQHEDPKPSSTYNSSISAPPEDFKQDGEDDGSLFSTKFAGLGHAIGTADVGQHVRMVREVHEEVNQAREKATELKQRRQEQATNRREKLKQAYLRKQLEKLKAQQQQQEDEQKT

SEQ ID NO: 69784 - protein, 489 aa, Arabidopsis thaliana
  peptide (1)..(489): Ceres Seq. ID no. 1825803
MINSIKLHGILLWVSMGFLMPVGILFIRMANKAHENGIKVKVFFYLHVIFQILAVVLATIGAILSLRTLENSFDNNHQRLGLALYAAMWLQFLTGVFKPSRGSKRRLRWFLLHWILGTIVSIVGIVNIYTGIQAYQKKTSLSRDSSLWTILFTVQVTCLVFFYLYQDKWEHFQKQRVVLDELDHQNNNTNGRNNQSIQVVTRNDHEQKVMVPQPCRKSNALICREREREENKMVGEEETKKRVVTESLGWLTESSIMPKKHRAIEGVGPSSIMELKAQLYKSQEEAKQTKDFTGSDAQYHRAKERIAAKDSFAAKNSGVESRNLKDKLEHKAVKDGAVSYAALEKKAQLYDKLARGELSDEEGEEKYCVDFFRKGIQHEDPKPSSTYNSSISAPPEDFKQDGEDDGSLFSTKFAGLGHAIGTADVGQHVRMVREVHEEVNQAREKATELKQRRQEQATNRREKLKQAYLRKQLEKLKAQQQQQEDEQKT

SEQ ID NO: 69785 - DNA, 1035 bp, Arabidopsis thaliana
  misc_feature (1)..(1035): Ceres Seq. ID no. 1825816
  misc_feature (1)..(1035): Ortholog of  Ceres SEQ ID NO 13582332 as cited in SEQ ID NO 59890
  misc_feature (1)..(1035): Ortholog of  Ceres SEQ ID NO 13598278 as cited in SEQ ID NO 68456
atgaagggggatcaagaagtacaagtcattggccaatcagttgctacaattctgggcagactatactatgaaaatggaggaaacagcaaatggctagcaacggtagttcagcttgtaggctttcctattctacttccatatcatctcttgtcagtcaaaacacatacaacaactcagagagatggcaaattaacctcacttaggaaccgtgcattagtttacatagtgcttggacttcttgtaggagcagcttgctacctatattccattggactgctttacctacctgtttctaccctttccctgatctgtgcatcacagttagccttcaccgctttcttctcttatttactcaactcacaaaaacttactcctatcattttgaattctcttttcctcctcactatatcttccaccctccttgcatttaataacgaggaatcagattccaaaaaagttacaaaaggagagtatgtcaaaggtttcgtatgcaccgttggtgcatctgctgggtttggtctactcttatccctacaacagctagcctttcgtaaagttttaaagaagcaaactttctcagaagttataaatatgataatctacatgagtctagtggccagttgtgttagcgtggtggggctttttgctagtagcgagtggaaaactttgagcagtgaaatggaaaactacaaacttgggaaggtatcctatgtcatgaacctagtgtggacagctgttacctggcaggtattctccatcggttgcacaggactgatcttcgagctttcctccctattctcaaatgcaataagcgctttgggactccccgtggttcctatcctggctgtcatcattttccatgacaaaatgaacggcttaaaggtgatttctatgattctagctatttggggtttcgtatcctatgtctaccaacaatatcttgatgaaacaaacttgaagaaaagtaatgaaataccaacaacagaatcccctgaccgaccagaagcagaagggtcaagtgagcaatcaaaataa

SEQ ID NO: 69786 - protein, 344 aa, Arabidopsis thaliana
  peptide (1)..(344): Ceres Seq. ID no. 1825817
MKGDQEVQVIGQSVATILGRLYYENGGNSKWLATVVQLVGFPILLPYHLLSVKTHTTTQRDGKLTSLRNRALVYIVLGLLVGAACYLYSIGLLYLPVSTLSLICASQLAFTAFFSYLLNSQKLTPIILNSLFLLTISSTLLAFNNEESDSKKVTKGEYVKGFVCTVGASAGFGLLLSLQQLAFRKVLKKQTFSEVINMIIYMSLVASCVSVVGLFASSEWKTLSSEMENYKLGKVSYVMNLVWTAVTWQVFSIGCTGLIFELSSLFSNAISALGLPVVPILAVIIFHDKMNGLKVISMILAIWGFVSYVYQQYLDETNLKKSNEIPTTESPDRPEAEGSSEQSK

SEQ ID NO: 69787 - DNA, 3387 bp, Arabidopsis thaliana
  misc_feature (1)..(3387): Ceres Seq. ID no. 1825820
  misc_feature (1)..(3387): Ortholog of  Ceres SEQ ID NO 13582332 as cited in SEQ ID NO 59890
  misc_feature (1)..(3387): Ortholog of  Ceres SEQ ID NO 13598278 as cited in SEQ ID NO 68456
atggaaataactcaagtaatctatgtcaatggtaagcaagatgcatctcgtagtgtagattacttgattcttttcgctaacctgttgtttttgatgttttcagatcataacaacatagaagcaaacctaacaggtcaggaggaaatgaataccaccatggaaatcgaatcttcgtccgtacctcaatcgaagaactataagaaatggcttcgtatttccatttacgtagtttactatgaaaatggtgggaagagtacatggatgggaacacttgtccaactaatcggcttccctgttctgtttctcttccgcttcttttcccaaaccaaaaatcccaaaccaacagaagcagatttcagaaagttctcttccttcaccattcttggatcagtttacatcgttactggactattagtgtctgctaactcttatatgtcctctgttggtttactatacttaccagtttctactttctccctcatcttggcctcacaattggccttcactgccttcttctcatattttctaaactcgcagaagttcacacctttcattgtgaattctctgtttctccttactatttcctctgccctcctcgtggtcaacactgattcggaaaacacagcaaaagtgtctagagtaaaatatgtgatagggataatatgtaccattggtgcttctgctgggattggattgctgctatccctggtacaactgatcctcaggaaggttttaaagaagcaaacattctcaacggtcactgacttggtcgcttaccaatctctagttgcaagctgtgtggttctcataggacttttcgcaagcggggagtggaaaactttaacaagtgagatggaaaactacaaactggggaaagtgccatacgttatgactttggcctcgatagctatttcctggcaagtctacaccattggcgtcgtgggactgatctttgagtcatcttctgtgttctccaattccataactgctgtgggattgcctatagttccagttgtagcagtgattgttttccatgataaaatgaacgcgtcaaagatcttctccatcattttagctatctggggattcatttcatttgtctatcagcactacctcgacgaaaagaagttgaagactagccacacaagtcctgtaggagatcctcatctactacctgctgaggaaggtcacacaaacatacatagtgaccagaacttagaagcaaaccttatagatcatgaggtggtaactgaatcatcatcatcagctgtgcctcaaaccgagaactataaaaggtggcttcgtgtctccatatacgtaatctttgtcctcttttgccagccactagctacaattctgggtagattgtactatgaaaatggaggaaatagcacatatgtggtaacacttcttcaactcattggcttccctgtactggttctgttccgcttcttttctcgaatcaggcaacccaaatcaacagatacaaatttcagtcagtccccttccttcaccacccttgcatcggtttacttgtgcactggactgctagtgtccgcttatgcttatttgtctgcattggccttcactgcctttttctcatatttccttaactcgcaaaagttcactcctttgatagtcagttctttgcttctcctcactgtatcctctgctcttcttgtggtcaacactgattcagaaaactcaactaatgtatctagagtacagtatgtgatcgggttcatatgtaccatcggtgcttccgctgggattggactgttactatctctgatacaaatgctcttcaggaaagttttcacgaagcatacatcctcagcagtcacggacttggccatttaccagtctctagttgcgagttgtgtagttctcataggactttttgcaagtggagagtgggaaactttgccaagtgagatgagaaactacaaactcgggaaagtgtcatatgttttgactttagcctcggcagctatttcctggcaagtctacactcttggtcttgtgggattgatcttcgagtcatcctctgtgttctccaattccataacagctgtgggattgcctatagttccagttgcggcagtgatagttttccatgatagaatggacgcatcaaaaatcttctccattattttagctatctgcggcttcctttcattcgtctatcagcactacctcgacgaaaagaagttgaatactagccacacaagtgctgtaggagatcttcatctacctgttgaggaaggtcacacaaacatacaaagtgaccagaacttagaagcaaaccttctagatcatgaggaaactgaatcattttcagtacctcaaacgaagaactgtaagaggtggctccgtgtctccatatacgcaatctttgtcatcttctgccaaccacttgctacagttctgggtagactgtactatgaaaatggagggaaaagcacatatgtggtaacacttcttcaactcattggcttccctgtactgattctcttccgcttcttttctcgaatcaggcaacccaaatcaacagatacaaatttcagtcagtccccttccttcaccacccttgcatcggtttacttgtgcactggactgctagtgtctgcttatgcttatttgtctgcagttgggttgctttacttaccagtctctactttctccctcatcttggcctcacagttggccttcactgcctttttctcatatttccttaactcgcaaaagttcactcctttgatagtcaattctttgtttctccttacggtttcctctgccctcctcgtggtcaacactgattcagaaaacacaacaaatgtatctagagtacaatatgtgattgggttcatctgtaccattggtgcttccgctgggattggattggtactatctctgatacaactgctcttcaggaaagttttcacgaagcatacatcctcagcagtcctggacttggccaattaccagtctctagttgcaacttgtgtggtactcataggactgtttgcaagtggagagtggagaactctgccaagtgagatgagaaactacaaactggggaaagtgtcatatatcttgactttggcctcagcagctattttctggcaagtatacactgttggttgtgtgggattaatcttcgagtcttcttctgtgttctccaattccataactgctgtgggactgcctatagttccagttgtagcagtgatagttttccatgataagatggatgcatcaaagattttctccatcattttagctatctggggcttcctttcatttgtctatcagcactacctcgacgaaaagaagttgaagacttgccagacaaaacctgttgaggaagaaacacaaactttatga

SEQ ID NO: 69788 - protein, 1128 aa, Arabidopsis thaliana
  peptide (1)..(1128): Ceres Seq. ID no. 1825821
MEITQVIYVNGKQDASRSVDYLILFANLLFLMFSDHNNIEANLTGQEEMNTTMEIESSSVPQSKNYKKWLRISIYVVYYENGGKSTWMGTLVQLIGFPVLFLFRFFSQTKNPKPTEADFRKFSSFTILGSVYIVTGLLVSANSYMSSVGLLYLPVSTFSLILASQLAFTAFFSYFLNSQKFTPFIVNSLFLLTISSALLVVNTDSENTAKVSRVKYVIGIICTIGASAGIGLLLSLVQLILRKVLKKQTFSTVTDLVAYQSLVASCVVLIGLFASGEWKTLTSEMENYKLGKVPYVMTLASIAISWQVYTIGVVGLIFESSSVFSNSITAVGLPIVPVVAVIVFHDKMNASKIFSIILAIWGFISFVYQHYLDEKKLKTSHTSPVGDPHLLPAEEGHTNIHSDQNLEANLIDHEVVTESSSSAVPQTENYKRWLRVSIYVIFVLFCQPLATILGRLYYENGGNSTYVVTLLQLIGFPVLVLFRFFSRIRQPKSTDTNFSQSPSFTTLASVYLCTGLLVSAYAYLSALAFTAFFSYFLNSQKFTPLIVSSLLLLTVSSALLVVNTDSENSTNVSRVQYVIGFICTIGASAGIGLLLSLIQMLFRKVFTKHTSSAVTDLAIYQSLVASCVVLIGLFASGEWETLPSEMRNYKLGKVSYVLTLASAAISWQVYTLGLVGLIFESSSVFSNSITAVGLPIVPVAAVIVFHDRMDASKIFSIILAICGFLSFVYQHYLDEKKLNTSHTSAVGDLHLPVEEGHTNIQSDQNLEANLLDHEETESFSVPQTKNCKRWLRVSIYAIFVIFCQPLATVLGRLYYENGGKSTYVVTLLQLIGFPVLILFRFFSRIRQPKSTDTNFSQSPSFTTLASVYLCTGLLVSAYAYLSAVGLLYLPVSTFSLILASQLAFTAFFSYFLNSQKFTPLIVNSLFLLTVSSALLVVNTDSENTTNVSRVQYVIGFICTIGASAGIGLVLSLIQLLFRKVFTKHTSSAVLDLANYQSLVATCVVLIGLFASGEWRTLPSEMRNYKLGKVSYILTLASAAIFWQVYTVGCVGLIFESSSVFSNSITAVGLPIVPVVAVIVFHDKMDASKIFSIILAIWGFLSFVYQHYLDEKKLKTCQTKPVEEETQTL

SEQ ID NO: 69789 - protein, 1097 aa, Arabidopsis thaliana
  peptide (1)..(1097): Ceres Seq. ID no. 1825822
MFSDHNNIEANLTGQEEMNTTMEIESSSVPQSKNYKKWLRISIYVVYYENGGKSTWMGTLVQLIGFPVLFLFRFFSQTKNPKPTEADFRKFSSFTILGSVYIVTGLLVSANSYMSSVGLLYLPVSTFSLILASQLAFTAFFSYFLNSQKFTPFIVNSLFLLTISSALLVVNTDSENTAKVSRVKYVIGIICTIGASAGIGLLLSLVQLILRKVLKKQTFSTVTDLVAYQSLVASCVVLIGLFASGEWKTLTSEMENYKLGKVPYVMTLASIAISWQVYTIGVVGLIFESSSVFSNSITAVGLPIVPVVAVIVFHDKMNASKIFSIILAIWGFISFVYQHYLDEKKLKTSHTSPVGDPHLLPAEEGHTNIHSDQNLEANLIDHEVVTESSSSAVPQTENYKRWLRVSIYVIFVLFCQPLATILGRLYYENGGNSTYVVTLLQLIGFPVLVLFRFFSRIRQPKSTDTNFSQSPSFTTLASVYLCTGLLVSAYAYLSALAFTAFFSYFLNSQKFTPLIVSSLLLLTVSSALLVVNTDSENSTNVSRVQYVIGFICTIGASAGIGLLLSLIQMLFRKVFTKHTSSAVTDLAIYQSLVASCVVLIGLFASGEWETLPSEMRNYKLGKVSYVLTLASAAISWQVYTLGLVGLIFESSSVFSNSITAVGLPIVPVAAVIVFHDRMDASKIFSIILAICGFLSFVYQHYLDEKKLNTSHTSAVGDLHLPVEEGHTNIQSDQNLEANLLDHEETESFSVPQTKNCKRWLRVSIYAIFVIFCQPLATVLGRLYYENGGKSTYVVTLLQLIGFPVLILFRFFSRIRQPKSTDTNFSQSPSFTTLASVYLCTGLLVSAYAYLSAVGLLYLPVSTFSLILASQLAFTAFFSYFLNSQKFTPLIVNSLFLLTVSSALLVVNTDSENTTNVSRVQYVIGFICTIGASAGIGLVLSLIQLLFRKVFTKHTSSAVLDLANYQSLVATCVVLIGLFASGEWRTLPSEMRNYKLGKVSYILTLASAAIFWQVYTVGCVGLIFESSSVFSNSITAVGLPIVPVVAVIVFHDKMDASKIFSIILAIWGFLSFVYQHYLDEKKLKTCQTKPVEEETQTL

SEQ ID NO: 69790 - protein, 1080 aa, Arabidopsis thaliana
  peptide (1)..(1080): Ceres Seq. ID no. 1825823
MNTTMEIESSSVPQSKNYKKWLRISIYVVYYENGGKSTWMGTLVQLIGFPVLFLFRFFSQTKNPKPTEADFRKFSSFTILGSVYIVTGLLVSANSYMSSVGLLYLPVSTFSLILASQLAFTAFFSYFLNSQKFTPFIVNSLFLLTISSALLVVNTDSENTAKVSRVKYVIGIICTIGASAGIGLLLSLVQLILRKVLKKQTFSTVTDLVAYQSLVASCVVLIGLFASGEWKTLTSEMENYKLGKVPYVMTLASIAISWQVYTIGVVGLIFESSSVFSNSITAVGLPIVPVVAVIVFHDKMNASKIFSIILAIWGFISFVYQHYLDEKKLKTSHTSPVGDPHLLPAEEGHTNIHSDQNLEANLIDHEVVTESSSSAVPQTENYKRWLRVSIYVIFVLFCQPLATILGRLYYENGGNSTYVVTLLQLIGFPVLVLFRFFSRIRQPKSTDTNFSQSPSFTTLASVYLCTGLLVSAYAYLSALAFTAFFSYFLNSQKFTPLIVSSLLLLTVSSALLVVNTDSENSTNVSRVQYVIGFICTIGASAGIGLLLSLIQMLFRKVFTKHTSSAVTDLAIYQSLVASCVVLIGLFASGEWETLPSEMRNYKLGKVSYVLTLASAAISWQVYTLGLVGLIFESSSVFSNSITAVGLPIVPVAAVIVFHDRMDASKIFSIILAICGFLSFVYQHYLDEKKLNTSHTSAVGDLHLPVEEGHTNIQSDQNLEANLLDHEETESFSVPQTKNCKRWLRVSIYAIFVIFCQPLATVLGRLYYENGGKSTYVVTLLQLIGFPVLILFRFFSRIRQPKSTDTNFSQSPSFTTLASVYLCTGLLVSAYAYLSAVGLLYLPVSTFSLILASQLAFTAFFSYFLNSQKFTPLIVNSLFLLTVSSALLVVNTDSENTTNVSRVQYVIGFICTIGASAGIGLVLSLIQLLFRKVFTKHTSSAVLDLANYQSLVATCVVLIGLFASGEWRTLPSEMRNYKLGKVSYILTLASAAIFWQVYTVGCVGLIFESSSVFSNSITAVGLPIVPVVAVIVFHDKMDASKIFSIILAIWGFLSFVYQHYLDEKKLKTCQTKPVEEETQTL

SEQ ID NO: 69791 - DNA, 921 bp, Arabidopsis thaliana
  misc_feature (1)..(921): Ceres Seq. ID no. 1825849
  misc_feature (1)..(921): Ortholog of  Ceres SEQ ID NO 15171549 as cited in SEQ ID NO 59640
atgtctctctcgtcggactccaccgttcctactgtttccacggtcaccatatcctactcagagctcaaggagagcaacatagatttgtctgcaaggattgaagaaggatttggacctaatggacttggaatcctctctgttaaagatgttcctggatattctgctttaagacagaatctacttcagcttgcacctaggttagctggtcttcctgaagaggtgaagagggagcttgaagatcctcatagtaggtataattttggttggagtcatggcaaggagaaacttgaatccgggaagcttgacatgctgaagggttcttactatgctaatcctctacaagatgtacctacgagtaattcatatgaaatacagcggtatccatcgtattgtggatcaaatatatggccaaggaattctttaccggaacttgaaggagctttcaaagctcttggtaaactgatgttcgaagttgggctaatggtagcttaccactgtgatcaatatggtcttactcgagcaatattttctagagattcagttgaagtaccttgcccagatcctgcttctggcttatacatacaaacacgatcaggtcagatcgttaaggttgtgtatggggaagatgaaatagcataccaaataggcgagacaacatcaattctgtctagtggttatctttgtgctacacctcattgtgttcgggtaatattcttcataccttcgcggatggcgccacaaggagaagaggcgcgtggtctagagcgatcgacattcgcgttgttcatgcaacctgactggtattattctgaaactaagataattacaatacatgaagagttatgtctctctgatgaagtcttgacgtttggagaatatacagagaaactgctcaacaaatactatgatacaaaaccttag

SEQ ID NO: 69792 - protein, 306 aa, Arabidopsis thaliana
  peptide (1)..(306): Ceres Seq. ID no. 1825850
MSLSSDSTVPTVSTVTISYSELKESNIDLSARIEEGFGPNGLGILSVKDVPGYSALRQNLLQLAPRLAGLPEEVKRELEDPHSRYNFGWSHGKEKLESGKLDMLKGSYYANPLQDVPTSNSYEIQRYPSYCGSNIWPRNSLPELEGAFKALGKLMFEVGLMVAYHCDQYGLTRAIFSRDSVEVPCPDPASGLYIQTRSGQIVKVVYGEDEIAYQIGETTSILSSGYLCATPHCVRVIFFIPSRMAPQGEEARGLERSTFALFMQPDWYYSETKIITIHEELCLSDEVLTFGEYTEKLLNKYYDTKP

SEQ ID NO: 69793 - protein, 204 aa, Arabidopsis thaliana
  peptide (1)..(204): Ceres Seq. ID no. 1825851
MLKGSYYANPLQDVPTSNSYEIQRYPSYCGSNIWPRNSLPELEGAFKALGKLMFEVGLMVAYHCDQYGLTRAIFSRDSVEVPCPDPASGLYIQTRSGQIVKVVYGEDEIAYQIGETTSILSSGYLCATPHCVRVIFFIPSRMAPQGEEARGLERSTFALFMQPDWYYSETKIITIHEELCLSDEVLTFGEYTEKLLNKYYDTKP

SEQ ID NO: 69794 - DNA, 558 bp, Arabidopsis thaliana
  misc_feature (1)..(558): Ceres Seq. ID no. 1826051
  misc_feature (1)..(558): Ortholog of  Ceres SEQ ID NO 13585282 as cited in SEQ ID NO 63378
atgtttccactcaattttcattacgaagatgtatcacgtcaagatccgttgctcaaaccgaatcacgccaacgttatggaagttcctggatcgtgtgaaataagagtagtaccaaaggcaccctataatttcataataaaaaatggaaaattggctatggagattccgcgcggtcagaaattcatacagacacaaaggggttcgacaggaaagtcctttcgatctaatccattcttggggtcaaataaagacaaaggatatgtaagtgacctagcacgacaaagcactctccgagggcatggaatgtctaatttttcggtcagaatctcgacagtaatgtctctattagattttccggtcgaaatacggaaaaactccattcaattctcgatggaaacggagttttgcgaattctccccggaactggaagatcatttcgagatcttcgaacatattcgggggttcaatgtgactattatcacttcggccaacacacaagatgagactttaccactgtggagcggttttttgcaaaaagatgagggggaaactcagtaa

SEQ ID NO: 69795 - protein, 185 aa, Arabidopsis thaliana
  peptide (1)..(185): Ceres Seq. ID no. 1826052
MFPLNFHYEDVSRQDPLLKPNHANVMEVPGSCEIRVVPKAPYNFIIKNGKLAMEIPRGQKFIQTQRGSTGKSFRSNPFLGSNKDKGYVSDLARQSTLRGHGMSNFSVRISTVMSLLDFPVEIRKNSIQFSMETEFCEFSPELEDHFEIFEHIRGFNVTIITSANTQDETLPLWSGFLQKDEGETQ

SEQ ID NO: 69796 - protein, 160 aa, Arabidopsis thaliana
  peptide (1)..(160): Ceres Seq. ID no. 1826053
MEVPGSCEIRVVPKAPYNFIIKNGKLAMEIPRGQKFIQTQRGSTGKSFRSNPFLGSNKDKGYVSDLARQSTLRGHGMSNFSVRISTVMSLLDFPVEIRKNSIQFSMETEFCEFSPELEDHFEIFEHIRGFNVTIITSANTQDETLPLWSGFLQKDEGETQ

SEQ ID NO: 69797 - protein, 133 aa, Arabidopsis thaliana
  peptide (1)..(133): Ceres Seq. ID no. 1826054
MEIPRGQKFIQTQRGSTGKSFRSNPFLGSNKDKGYVSDLARQSTLRGHGMSNFSVRISTVMSLLDFPVEIRKNSIQFSMETEFCEFSPELEDHFEIFEHIRGFNVTIITSANTQDETLPLWSGFLQKDEGETQ

SEQ ID NO: 69798 - DNA, 2088 bp, Arabidopsis thaliana
  misc_feature (1)..(2088): Ceres Seq. ID no. 1826426
  misc_feature (1)..(2088): Ortholog of  Ceres SEQ ID NO 12586556 as cited in SEQ ID NO 64667
  misc_feature (1)..(2088): Ortholog of  Ceres SEQ ID NO 13660894 as cited in SEQ ID NO 67475
atgattttgaagtacaatagtagttacaggttttatctttcaagtagttttctccaagctatggaagtagattgtcggcgttattacgtacgtcttcttcaatcatgcagcagcagaaatcgcgaaactttatggagacaaaccaatggattgctcttgaagaagggttttcttagttcaattgtcattgttgctaaccatctcctccaaatgtactcccggtctggtaaaatgggaattgcgcggaacttgttcgacgaaatgcctgatagaaactatttctcgtggaacactatgattgaagggtacatgaattctggggaaaagggaacgtctttgaggttttttgatatgatgccagaaagagatgggtactcttggaacgtggttgtttccgggtttgctaaagctggtgagctaagtgtcgctaggaggttattcaatgccatgccggaaaaagatgttgtgacgttgaactctctgcttcatggatatattttaaacggttatgcagaggaagctctgaggttgtttaaagaattgaattttagcgctgatgcgatcacattgacgacagttcttaaagcttgtgctgagttagaagctttgaaatgtgggaagcagatacatgctcagattctgatcggtggtgttgaatgtgactcgaaaatgaatagttctttagttaatgtgtatgcaaagtgtggtgatttgagaatggcaagctatatgctggagcagattagggaacctgatgaccattctctatctgccttaatttcaggttatgcaaattgtgggagagtgaatgagtctagaggacttttcgataggaaaagtaacagatgtgtaattctatggaactctatgatttcaggctatattgctaacaatatgaaaatggaggcattggttcttttcaatgagatgaggaatgaaacccgggaagattctcgtacgctggcagcggttataaatgcttgcatcggtttgggcttcctagagactggtaaacaaatgcattgtcatgcttgtaaatttgggttaattgatgacattgttgtagctagcactttgcttgacatgtactccaagtgtggaagcccaatggaagcttgcaaacttttcagtgaggtcgaatcctatgacactatcttacttaacagtatgatcaaggtatatttcagctgcggaagaatcgatgatgcaaaacgggtatttgagagaattgaaaataagagcttgatttcttggaactcaatgactaacggattcagtcaaaatggttgtactgttgaaactttagagtatttccatcagatgcataagctggatttgcctacagatgaggttagcctctctagtgtcattagtgcgtgtgcaagtatatcttctctcgaactcggtgagcaagtttttgcgagggcaactattgttggtcttgactctgatcaagtagtatcatcttctctcattgatctctactgcaagtgtggattcgttgagcatggcaggagagtattcgatacaatggttaaatcagatgaagtaccatggaactcaatgatatcaggttatgctacgaatggtcaaggatttgaagcgattgacttgttcaagaaaatgagtgttgctggtataagacctactcagatcacttttatggttgttctaacagcatgcaattactgtggtttagtcgaagagggacgaaaattgtttgagtcaatgaaggttgatcatggttttgttccagataaagagcatttttcatgtatggttgatcttttggctcgtgctggttatgtggaagaagctataaatcttgtagaagagatgcctttcgatgtggatggaagcatgtggtcatctattctaagaggatgtgtagcaaatggatataaagccatgggaaagaaagctgctgagaagattatagagcttgaacctgagaactcagttgcttatgtgcagttgtccgctatattcgcaacctcgggagattgggaaagctcggcgcttgtaagaaaactgatgagggagaacaatgtgacaaagaatccaggttctagttggactgattgttga

SEQ ID NO: 69799 - protein, 695 aa, Arabidopsis thaliana
  peptide (1)..(695): Ceres Seq. ID no. 1826427
MILKYNSSYRFYLSSSFLQAMEVDCRRYYVRLLQSCSSRNRETLWRQTNGLLLKKGFLSSIVIVANHLLQMYSRSGKMGIARNLFDEMPDRNYFSWNTMIEGYMNSGEKGTSLRFFDMMPERDGYSWNVVVSGFAKAGELSVARRLFNAMPEKDVVTLNSLLHGYILNGYAEEALRLFKELNFSADAITLTTVLKACAELEALKCGKQIHAQILIGGVECDSKMNSSLVNVYAKCGDLRMASYMLEQIREPDDHSLSALISGYANCGRVNESRGLFDRKSNRCVILWNSMISGYIANNMKMEALVLFNEMRNETREDSRTLAAVINACIGLGFLETGKQMHCHACKFGLIDDIVVASTLLDMYSKCGSPMEACKLFSEVESYDTILLNSMIKVYFSCGRIDDAKRVFERIENKSLISWNSMTNGFSQNGCTVETLEYFHQMHKLDLPTDEVSLSSVISACASISSLELGEQVFARATIVGLDSDQVVSSSLIDLYCKCGFVEHGRRVFDTMVKSDEVPWNSMISGYATNGQGFEAIDLFKKMSVAGIRPTQITFMVVLTACNYCGLVEEGRKLFESMKVDHGFVPDKEHFSCMVDLLARAGYVEEAINLVEEMPFDVDGSMWSSILRGCVANGYKAMGKKAAEKIIELEPENSVAYVQLSAIFATSGDWESSALVRKLMRENNVTKNPGSSWTDC

SEQ ID NO: 69800 - protein, 675 aa, Arabidopsis thaliana
  peptide (1)..(675): Ceres Seq. ID no. 1826428
MEVDCRRYYVRLLQSCSSRNRETLWRQTNGLLLKKGFLSSIVIVANHLLQMYSRSGKMGIARNLFDEMPDRNYFSWNTMIEGYMNSGEKGTSLRFFDMMPERDGYSWNVVVSGFAKAGELSVARRLFNAMPEKDVVTLNSLLHGYILNGYAEEALRLFKELNFSADAITLTTVLKACAELEALKCGKQIHAQILIGGVECDSKMNSSLVNVYAKCGDLRMASYMLEQIREPDDHSLSALISGYANCGRVNESRGLFDRKSNRCVILWNSMISGYIANNMKMEALVLFNEMRNETREDSRTLAAVINACIGLGFLETGKQMHCHACKFGLIDDIVVASTLLDMYSKCGSPMEACKLFSEVESYDTILLNSMIKVYFSCGRIDDAKRVFERIENKSLISWNSMTNGFSQNGCTVETLEYFHQMHKLDLPTDEVSLSSVISACASISSLELGEQVFARATIVGLDSDQVVSSSLIDLYCKCGFVEHGRRVFDTMVKSDEVPWNSMISGYATNGQGFEAIDLFKKMSVAGIRPTQITFMVVLTACNYCGLVEEGRKLFESMKVDHGFVPDKEHFSCMVDLLARAGYVEEAINLVEEMPFDVDGSMWSSILRGCVANGYKAMGKKAAEKIIELEPENSVAYVQLSAIFATSGDWESSALVRKLMRENNVTKNPGSSWTDC

SEQ ID NO: 69801 - protein, 625 aa, Arabidopsis thaliana
  peptide (1)..(625): Ceres Seq. ID no. 1826429
MYSRSGKMGIARNLFDEMPDRNYFSWNTMIEGYMNSGEKGTSLRFFDMMPERDGYSWNVVVSGFAKAGELSVARRLFNAMPEKDVVTLNSLLHGYILNGYAEEALRLFKELNFSADAITLTTVLKACAELEALKCGKQIHAQILIGGVECDSKMNSSLVNVYAKCGDLRMASYMLEQIREPDDHSLSALISGYANCGRVNESRGLFDRKSNRCVILWNSMISGYIANNMKMEALVLFNEMRNETREDSRTLAAVINACIGLGFLETGKQMHCHACKFGLIDDIVVASTLLDMYSKCGSPMEACKLFSEVESYDTILLNSMIKVYFSCGRIDDAKRVFERIENKSLISWNSMTNGFSQNGCTVETLEYFHQMHKLDLPTDEVSLSSVISACASISSLELGEQVFARATIVGLDSDQVVSSSLIDLYCKCGFVEHGRRVFDTMVKSDEVPWNSMISGYATNGQGFEAIDLFKKMSVAGIRPTQITFMVVLTACNYCGLVEEGRKLFESMKVDHGFVPDKEHFSCMVDLLARAGYVEEAINLVEEMPFDVDGSMWSSILRGCVANGYKAMGKKAAEKIIELEPENSVAYVQLSAIFATSGDWESSALVRKLMRENNVTKNPGSSWTDC

SEQ ID NO: 69802 - DNA, 1449 bp, Arabidopsis thaliana
  misc_feature (1)..(1449): Ceres Seq. ID no. 1827359
  misc_feature (1)..(1449): Ortholog of  Ceres SEQ ID NO 14309934 as cited in SEQ ID NO 20583
  misc_feature (1)..(1449): Ortholog of  Ceres SEQ ID NO 13654989 as cited in SEQ ID NO 63117
  misc_feature (1)..(1449): Ortholog of  Ceres SEQ ID NO 13584744 as cited in SEQ ID NO 69137
atggctggacttaagatctggcaagccatctttatcaccattgcactgatcatcattgtcgtactctctgttctttcattttgtctcatttggaaaaagaaatcaagaagatccaaaaccttaagtcttcccatcatacaaacccctgtggtgtcaaaggagatcaaggaagtcaggatcgagcatgttgtctcaacgagtagtaacttcgatcctcaggatgaaaacaacaatgaatctgacaaattcttgcttaatttggaaatggagaagaacagagagaatggtttgagtagtagccggtctggttcaggcaaagaaggttatttatgtgttgcaaaccggtctacttcatcattgtatgagatggctacaccatcaccatcacctctttctggtttacctgagtcacaccttggatggggtcattggtttactctgagagatcttgagatagcaacaaacagattctcaaaggaaaatgtgattggtgaaggaggctatggagttgtttaccgaggcgagttggtcaatgggagtcttgttgccgtgaaaaagatcctaaaccacttgggacaagcagagaaagagtttagagtagaggtagatgctataggtcatgtgcgtcacaagaacttggtacgtcttctaggatactgcattgaaggcacaaacaggatattggtttatgagtatatgaacaatgggaaccttgaagaatggcttcacggagcaatgaaacatcatggatatctaacttgggaagctcgaatgaaagttctcactggaacatccaaggctcttgcatatctacacgaggcaatcgaaccaaaagtggtgcatagagacatcaagtcgagcaacatcttgatcgatgatagattcaatgcaaagatttctgattttggccttgccaagttacttggagatgggaaaagccatgtgactactagagtcatgggaacatttgggtatgttgctcctgagtatgcgaataccggacttttgaatgaaaagagtgatgtgtacagctttggtgtcttggtcttagaagcaataaccggaagagatcctgtggattacgcgcggcctgctaatgaggtgaatttggttgagtggttgaagatgatggtaggatctaagagattagaagaagtcattgatccaaacatagcagttaggccagcgactagagcactgaaacgagtacttcttacagcacttagatgcattgatcctgattctgaaaagagacctaaaatgagtcaagttgtgcgtatgctggagtctgaggaatatcctgtaccaagagagaaaagtatgcagaaactgtataaacataagcaagaattcaacttacaggagcggagagtgcgcagaacgcaagaggaaaactcggataccgatagaagcagaccggtttcaagatcacagagcaagagactgtaa

SEQ ID NO: 69803 - protein, 482 aa, Arabidopsis thaliana
  peptide (1)..(482): Ceres Seq. ID no. 1827360
MAGLKIWQAIFITIALIIIVVLSVLSFCLIWKKKSRRSKTLSLPIIQTPVVSKEIKEVRIEHVVSTSSNFDPQDENNNESDKFLLNLEMEKNRENGLSSSRSGSGKEGYLCVANRSTSSLYEMATPSPSPLSGLPESHLGWGHWFTLRDLEIATNRFSKENVIGEGGYGVVYRGELVNGSLVAVKKILNHLGQAEKEFRVEVDAIGHVRHKNLVRLLGYCIEGTNRILVYEYMNNGNLEEWLHGAMKHHGYLTWEARMKVLTGTSKALAYLHEAIEPKVVHRDIKSSNILIDDRFNAKISDFGLAKLLGDGKSHVTTRVMGTFGYVAPEYANTGLLNEKSDVYSFGVLVLEAITGRDPVDYARPANEVNLVEWLKMMVGSKRLEEVIDPNIAVRPATRALKRVLLTALRCIDPDSEKRPKMSQVVRMLESEEYPVPREKSMQKLYKHKQEFNLQERRVRRTQEENSDTDRSRPVSRSQSKRL

SEQ ID NO: 69804 - protein, 394 aa, Arabidopsis thaliana
  peptide (1)..(394): Ceres Seq. ID no. 1827361
MEKNRENGLSSSRSGSGKEGYLCVANRSTSSLYEMATPSPSPLSGLPESHLGWGHWFTLRDLEIATNRFSKENVIGEGGYGVVYRGELVNGSLVAVKKILNHLGQAEKEFRVEVDAIGHVRHKNLVRLLGYCIEGTNRILVYEYMNNGNLEEWLHGAMKHHGYLTWEARMKVLTGTSKALAYLHEAIEPKVVHRDIKSSNILIDDRFNAKISDFGLAKLLGDGKSHVTTRVMGTFGYVAPEYANTGLLNEKSDVYSFGVLVLEAITGRDPVDYARPANEVNLVEWLKMMVGSKRLEEVIDPNIAVRPATRALKRVLLTALRCIDPDSEKRPKMSQVVRMLESEEYPVPREKSMQKLYKHKQEFNLQERRVRRTQEENSDTDRSRPVSRSQSKRL

SEQ ID NO: 69805 - protein, 360 aa, Arabidopsis thaliana
  peptide (1)..(360): Ceres Seq. ID no. 1827362
MATPSPSPLSGLPESHLGWGHWFTLRDLEIATNRFSKENVIGEGGYGVVYRGELVNGSLVAVKKILNHLGQAEKEFRVEVDAIGHVRHKNLVRLLGYCIEGTNRILVYEYMNNGNLEEWLHGAMKHHGYLTWEARMKVLTGTSKALAYLHEAIEPKVVHRDIKSSNILIDDRFNAKISDFGLAKLLGDGKSHVTTRVMGTFGYVAPEYANTGLLNEKSDVYSFGVLVLEAITGRDPVDYARPANEVNLVEWLKMMVGSKRLEEVIDPNIAVRPATRALKRVLLTALRCIDPDSEKRPKMSQVVRMLESEEYPVPREKSMQKLYKHKQEFNLQERRVRRTQEENSDTDRSRPVSRSQSKRL

SEQ ID NO: 69806 - DNA, 2415 bp, Arabidopsis thaliana
  misc_feature (1)..(2415): Ceres Seq. ID no. 1827765
  misc_feature (1)..(2415): Ortholog of  Ceres SEQ ID NO 13582534 as cited in SEQ ID NO 57409
atggggaagaagaggattgtgttctttgcttgtttgctcttgtttaccgtcctattacgttttagctatgcagggataacgacagaaagtcctttgtcagtcgaacaaacactcagctcctctaatggaatttatgaattggggtttttcagtcctaataactcccaaaatctgtatgtgggaatctggttcaagggtatcattccccgggtggttgtgtgggtggcaaatagagaaacacctactacagacacatcggcaaatcttgctatcagcagcaatggtagtcttctattgtttaatggcaaacatggtgttgtgtggtccatcggagaaaattttgcatctaatgggtctcgtgcagagcttacagacaacggaaatctagttgtcatagacaatgcttcgggaagaactttatgggaaagctttgagcactttggtgacactatgctacctttctcaagcctgatgtataatctcgccacaggtgagaagcgggtgttgacttcttggaaaactgacactgatccatcgcctggcgtatttgtgggtcagattacaccacaagtgccatcacaggtgcttattatgagaggctcgacgcgttattatagaaccggtccatgggctaaaacaaggttcacagggataccactaatggatgacacatatgcaagtccattcagccttcagcaggatgctaacgggtcaggattctttacttattttgatagaagtttcaaactttcacgtataattatatcatcagaaggatcaatgaaaaggtttcggcataatggaacggactgggaattaagctacatggctccagccaattcatgcgatatttacggtgtatgtggaccatttgggttgtgtattgtgtcagtacctttaaagtgcaaatgcttgaaaggatttgttcctcattccactgaggaatggaaaagaggaaactggactggtggttgtgcgaggcttacggaactacattgtcaaggaaactctactggcaaagatgtaaatatcttccatcctgttaccaacgtaaagcttccagacttttacgaatatgaaagttctgtggatgctgaagaatgccaccaaagttgcctccacaattgttcttgcttggcctttgcttatatccatggaatagggtgcttaatctggaaccagaacctaatggacgctgtgcaattttctgctggaggagaaattctgtccattcgtcttgcacactctgaactaggtggaaataagcgcaacaaaatcattgttgctagtactgtgagcctttctctgtttgtgatattgacttctgctgcatttggtttctggagatacagagtgaaacataaagcctatacgttaaaggatgcctggaggaatgatctgaaatcaaaggaggtcccaggtttagaattttttgagatgaataccatacaaactgccaccaataatttcagtctatcaaacaaactcggacaaggtggatttggttctgtttacaagggaaagttacaagatgggaaagaaattgctgtaaaacagctttctagcagctccggacagggaaaagaggagttcatgaatgaaatagtactgatatcaaaactccaacacagaaacttagtccgggttttgggatgttgcatcgaaggagaagagaaactactgatctatgagtttatgttgaacaaaagccttgatacttttgtctttgatgcaagaaaaaagctcgaggttgattggccaaagagatttgatatcgttcaaggtattgcacgtggacttctttatcttcaccgtgactcacgcctcaaggtaattcaccgagacctgaaggtcagcaacattcttctggatgagaaaatgaacccgaaaatatcagattttggattggctcggatgtatgagggaacccaatgtcaggacaaaactcgcagggttgtaggaactctaggatatatgtctcctgagtatgcatggaccggagtattctctgagaaatcagacatttacagcttcggagttctactgctagaaattatcatcggagagaagatctcaaggttcagctatggcgaagaaggaaaaacacttctcgcatatgcatgggaatcttggggtgaaaccaaaggaattgatcttttggaccaagatcttgctgattcatgtcgtccgttagaagttggaaggtgtgttcagattggtctgctctgtgtacaacaccaacctgcagacagaccaaacacacttgagttgctggctatgctcacgacaacatcagatcttccatcaccaaaacaacccacatttgtagtgcactctagggatgatgaatcatctctgtctaaggatttgtttaccgtcaatgagatgacacaatctatgatccttgggcgttaa

SEQ ID NO: 69807 - protein, 804 aa, Arabidopsis thaliana
  peptide (1)..(804): Ceres Seq. ID no. 1827766
MGKKRIVFFACLLLFTVLLRFSYAGITTESPLSVEQTLSSSNGIYELGFFSPNNSQNLYVGIWFKGIIPRVVVWVANRETPTTDTSANLAISSNGSLLLFNGKHGVVWSIGENFASNGSRAELTDNGNLVVIDNASGRTLWESFEHFGDTMLPFSSLMYNLATGEKRVLTSWKTDTDPSPGVFVGQITPQVPSQVLIMRGSTRYYRTGPWAKTRFTGIPLMDDTYASPFSLQQDANGSGFFTYFDRSFKLSRIIISSEGSMKRFRHNGTDWELSYMAPANSCDIYGVCGPFGLCIVSVPLKCKCLKGFVPHSTEEWKRGNWTGGCARLTELHCQGNSTGKDVNIFHPVTNVKLPDFYEYESSVDAEECHQSCLHNCSCLAFAYIHGIGCLIWNQNLMDAVQFSAGGEILSIRLAHSELGGNKRNKIIVASTVSLSLFVILTSAAFGFWRYRVKHKAYTLKDAWRNDLKSKEVPGLEFFEMNTIQTATNNFSLSNKLGQGGFGSVYKGKLQDGKEIAVKQLSSSSGQGKEEFMNEIVLISKLQHRNLVRVLGCCIEGEEKLLIYEFMLNKSLDTFVFDARKKLEVDWPKRFDIVQGIARGLLYLHRDSRLKVIHRDLKVSNILLDEKMNPKISDFGLARMYEGTQCQDKTRRVVGTLGYMSPEYAWTGVFSEKSDIYSFGVLLLEIIIGEKISRFSYGEEGKTLLAYAWESWGETKGIDLLDQDLADSCRPLEVGRCVQIGLLCVQHQPADRPNTLELLAMLTTTSDLPSPKQPTFVVHSRDDESSLSKDLFTVNEMTQSMILGR

SEQ ID NO: 69808 - protein, 654 aa, Arabidopsis thaliana
  peptide (1)..(654): Ceres Seq. ID no. 1827767
MLPFSSLMYNLATGEKRVLTSWKTDTDPSPGVFVGQITPQVPSQVLIMRGSTRYYRTGPWAKTRFTGIPLMDDTYASPFSLQQDANGSGFFTYFDRSFKLSRIIISSEGSMKRFRHNGTDWELSYMAPANSCDIYGVCGPFGLCIVSVPLKCKCLKGFVPHSTEEWKRGNWTGGCARLTELHCQGNSTGKDVNIFHPVTNVKLPDFYEYESSVDAEECHQSCLHNCSCLAFAYIHGIGCLIWNQNLMDAVQFSAGGEILSIRLAHSELGGNKRNKIIVASTVSLSLFVILTSAAFGFWRYRVKHKAYTLKDAWRNDLKSKEVPGLEFFEMNTIQTATNNFSLSNKLGQGGFGSVYKGKLQDGKEIAVKQLSSSSGQGKEEFMNEIVLISKLQHRNLVRVLGCCIEGEEKLLIYEFMLNKSLDTFVFDARKKLEVDWPKRFDIVQGIARGLLYLHRDSRLKVIHRDLKVSNILLDEKMNPKISDFGLARMYEGTQCQDKTRRVVGTLGYMSPEYAWTGVFSEKSDIYSFGVLLLEIIIGEKISRFSYGEEGKTLLAYAWESWGETKGIDLLDQDLADSCRPLEVGRCVQIGLLCVQHQPADRPNTLELLAMLTTTSDLPSPKQPTFVVHSRDDESSLSKDLFTVNEMTQSMILGR

SEQ ID NO: 69809 - protein, 647 aa, Arabidopsis thaliana
  peptide (1)..(647): Ceres Seq. ID no. 1827768
MYNLATGEKRVLTSWKTDTDPSPGVFVGQITPQVPSQVLIMRGSTRYYRTGPWAKTRFTGIPLMDDTYASPFSLQQDANGSGFFTYFDRSFKLSRIIISSEGSMKRFRHNGTDWELSYMAPANSCDIYGVCGPFGLCIVSVPLKCKCLKGFVPHSTEEWKRGNWTGGCARLTELHCQGNSTGKDVNIFHPVTNVKLPDFYEYESSVDAEECHQSCLHNCSCLAFAYIHGIGCLIWNQNLMDAVQFSAGGEILSIRLAHSELGGNKRNKIIVASTVSLSLFVILTSAAFGFWRYRVKHKAYTLKDAWRNDLKSKEVPGLEFFEMNTIQTATNNFSLSNKLGQGGFGSVYKGKLQDGKEIAVKQLSSSSGQGKEEFMNEIVLISKLQHRNLVRVLGCCIEGEEKLLIYEFMLNKSLDTFVFDARKKLEVDWPKRFDIVQGIARGLLYLHRDSRLKVIHRDLKVSNILLDEKMNPKISDFGLARMYEGTQCQDKTRRVVGTLGYMSPEYAWTGVFSEKSDIYSFGVLLLEIIIGEKISRFSYGEEGKTLLAYAWESWGETKGIDLLDQDLADSCRPLEVGRCVQIGLLCVQHQPADRPNTLELLAMLTTTSDLPSPKQPTFVVHSRDDESSLSKDLFTVNEMTQSMILGR

SEQ ID NO: 69810 - DNA, 2346 bp, Arabidopsis thaliana
  misc_feature (1)..(2346): Ceres Seq. ID no. 1827781
  misc_feature (1)..(2346): Ortholog of  Ceres SEQ ID NO 13657138 as cited in SEQ ID NO 65923
  misc_feature (1)..(2346): Ortholog of  Ceres SEQ ID NO 13584744 as cited in SEQ ID NO 69137
atgactgatgaggtagacggtgacgcatggctttcggatttagttgacgtgtcgtttctcgctactaaaacggcagaacaatcagagatgatagaaaccggcggagataaacagagctccgtcgaggaaggatgtggtggccgtacgattcttgtcggcgtgaagcttgacgctccgagcagagagttactcacttgggctctggttaaagtcgctgagcctggtgatactgtgatcgctcttcatatccttggaaatgagattgtggatcgcgcagggaactcttcgcttctctctctggttagaactttcgactctgttcttgacgtttatgaaggtttctgcaatttgaaacaggtggatctgaagctgaagctatgtcgtggttcctctgctcgaaagattttagttagggaagcgaaatcgttttctgcaacgaaagttttagttgggatttcaaaaagtcaccacgcgattcgttcatcagcttctgtagctaagtacatagcgaagaaactatcaaaggattgttgggttattgctgtaaacaatggtaaaatcttgttccaaaaggaaggttctccatcatctaccattaatcaatctcaaggaaaggaagatgttcggaggattactttgttgaatgtgcttcagagatctgttacattgaataagactactaaagtagttagccattctgaggaagattctaactctaaggaggaggaggaggatcaagcctgtggccagaatctacggcaagtcttagcggctgctcgtttggagaattgctcggtttgtggttttgattctttgtctccgaacgatacaactactcctggaaagttgtctggagcttcagattttgataggagtgaagatgatgatgagtgcaacaaagcaatggagattgtgcctgtgaatggttcagaagattcaggcggttctgtaactatgttggttaggaaattgcctgaacctagaccaggttggcctttgcttcgtcgtgctgtttctacattaggacaatctgttactcctcataagataccggtagttcaatgggctttgaagcttcctcctagggatactaagcaacttggttatgattcttctgaagataatttgtcaaccttaaacgcacttaggttctcttcaacttgccggtttttcaagtacaaggaactcgtttcagtgacatcgaatttctccgctgataattttattgggaaaggaggcagcagccgggtttttagaggttgtttgtccaatggaagagtggttgctgtgaagattctcaagcaaaccgaagatgtcttgaatgacttcgtggctgagattgagatcatcacaacattacaccataagaatattatctccctcttaggattttgctttgaagaccataaccttttacttgtatacaattatctctcaagaggaagccttgaagagaaccttcatggaaacaagaaagatccgcttgcattttgttggagcgagaggtataaagtggctgtgggagtagcagaggcattggactatctgcataatactgcttcgcaacccgtcatccacagagatgttaagtcatcaaacatactattatctgatgattttgagccacagctttctgattttggacttgcaaggtgggcgtctatatctacgacacacataatctgctctgatgtcgcgggaacttttggatacttggctccagagtacttcatgtatggtaaggtgaatgataagatagatgtgtatgcattcggcgttgttctcctcgagttactttcgggaagaaaaccgattagcagcggatgtccaaagggacaagagagtctagtcatgtgggtatgtacaactgcaaaccaattaagtcaaaaccaagctttttctatactcttattgaaaacaagtatgtatgatgttcatatacaggccaaaccaattctagatgatggaaagtattctcagttattagacccgagtttgcgggataacaacaacaataatgatgaccaaatgcagaggatggcgttagctgctactctttgtattcgacgtagtcctcaagctagaccgaaaatgagcatcgtattaaagctacttaaaggtgatgaagacacgcttgagtgggcaatgcagcaagtgaatagttcatcagaggagtcagagatgctcaaagatgagcaatgccaaagatctaacttgcaatcacaccttaacttagcacttcttgatgttgaagatgactcaatctccatgggaagcattgagcaaggtgtctctgttgaggattatctaaaaggtaggacaagccgttcttcgagcttcgactaa

SEQ ID NO: 69811 - protein, 781 aa, Arabidopsis thaliana
  peptide (1)..(781): Ceres Seq. ID no. 1827782
MTDEVDGDAWLSDLVDVSFLATKTAEQSEMIETGGDKQSSVEEGCGGRTILVGVKLDAPSRELLTWALVKVAEPGDTVIALHILGNEIVDRAGNSSLLSLVRTFDSVLDVYEGFCNLKQVDLKLKLCRGSSARKILVREAKSFSATKVLVGISKSHHAIRSSASVAKYIAKKLSKDCWVIAVNNGKILFQKEGSPSSTINQSQGKEDVRRITLLNVLQRSVTLNKTTKVVSHSEEDSNSKEEEEDQACGQNLRQVLAAARLENCSVCGFDSLSPNDTTTPGKLSGASDFDRSEDDDECNKAMEIVPVNGSEDSGGSVTMLVRKLPEPRPGWPLLRRAVSTLGQSVTPHKIPVVQWALKLPPRDTKQLGYDSSEDNLSTLNALRFSSTCRFFKYKELVSVTSNFSADNFIGKGGSSRVFRGCLSNGRVVAVKILKQTEDVLNDFVAEIEIITTLHHKNIISLLGFCFEDHNLLLVYNYLSRGSLEENLHGNKKDPLAFCWSERYKVAVGVAEALDYLHNTASQPVIHRDVKSSNILLSDDFEPQLSDFGLARWASISTTHIICSDVAGTFGYLAPEYFMYGKVNDKIDVYAFGVVLLELLSGRKPISSGCPKGQESLVMWVCTTANQLSQNQAFSILLLKTSMYDVHIQAKPILDDGKYSQLLDPSLRDNNNNNDDQMQRMALAATLCIRRSPQARPKMSIVLKLLKGDEDTLEWAMQQVNSSSEESEMLKDEQCQRSNLQSHLNLALLDVEDDSISMGSIEQGVSVEDYLKGRTSRSSSFD

SEQ ID NO: 69812 - protein, 752 aa, Arabidopsis thaliana
  peptide (1)..(752): Ceres Seq. ID no. 1827783
MIETGGDKQSSVEEGCGGRTILVGVKLDAPSRELLTWALVKVAEPGDTVIALHILGNEIVDRAGNSSLLSLVRTFDSVLDVYEGFCNLKQVDLKLKLCRGSSARKILVREAKSFSATKVLVGISKSHHAIRSSASVAKYIAKKLSKDCWVIAVNNGKILFQKEGSPSSTINQSQGKEDVRRITLLNVLQRSVTLNKTTKVVSHSEEDSNSKEEEEDQACGQNLRQVLAAARLENCSVCGFDSLSPNDTTTPGKLSGASDFDRSEDDDECNKAMEIVPVNGSEDSGGSVTMLVRKLPEPRPGWPLLRRAVSTLGQSVTPHKIPVVQWALKLPPRDTKQLGYDSSEDNLSTLNALRFSSTCRFFKYKELVSVTSNFSADNFIGKGGSSRVFRGCLSNGRVVAVKILKQTEDVLNDFVAEIEIITTLHHKNIISLLGFCFEDHNLLLVYNYLSRGSLEENLHGNKKDPLAFCWSERYKVAVGVAEALDYLHNTASQPVIHRDVKSSNILLSDDFEPQLSDFGLARWASISTTHIICSDVAGTFGYLAPEYFMYGKVNDKIDVYAFGVVLLELLSGRKPISSGCPKGQESLVMWVCTTANQLSQNQAFSILLLKTSMYDVHIQAKPILDDGKYSQLLDPSLRDNNNNNDDQMQRMALAATLCIRRSPQARPKMSIVLKLLKGDEDTLEWAMQQVNSSSEESEMLKDEQCQRSNLQSHLNLALLDVEDDSISMGSIEQGVSVEDYLKGRTSRSSSFD

SEQ ID NO: 69813 - protein, 480 aa, Arabidopsis thaliana
  peptide (1)..(480): Ceres Seq. ID no. 1827784
MEIVPVNGSEDSGGSVTMLVRKLPEPRPGWPLLRRAVSTLGQSVTPHKIPVVQWALKLPPRDTKQLGYDSSEDNLSTLNALRFSSTCRFFKYKELVSVTSNFSADNFIGKGGSSRVFRGCLSNGRVVAVKILKQTEDVLNDFVAEIEIITTLHHKNIISLLGFCFEDHNLLLVYNYLSRGSLEENLHGNKKDPLAFCWSERYKVAVGVAEALDYLHNTASQPVIHRDVKSSNILLSDDFEPQLSDFGLARWASISTTHIICSDVAGTFGYLAPEYFMYGKVNDKIDVYAFGVVLLELLSGRKPISSGCPKGQESLVMWVCTTANQLSQNQAFSILLLKTSMYDVHIQAKPILDDGKYSQLLDPSLRDNNNNNDDQMQRMALAATLCIRRSPQARPKMSIVLKLLKGDEDTLEWAMQQVNSSSEESEMLKDEQCQRSNLQSHLNLALLDVEDDSISMGSIEQGVSVEDYLKGRTSRSSSFD

SEQ ID NO: 69814 - DNA, 2265 bp, Arabidopsis thaliana
  misc_feature (1)..(2265): Ceres Seq. ID no. 1828083
  misc_feature (1)..(2265): Ortholog of  Ceres SEQ ID NO 13584744 as cited in SEQ ID NO 69137
atggctgctaagagatctatctactgtcttcttcttcttcctctgctcttgtctttactgatctggattccttcgatctccttagctgctactaaccctgatgatgttgctgcaattaacggattattcgctgcacttggagcacctgttcttcctggttggattgcttctggtggagacccatgtggtgaagcttggcaaggcattatctgcaatgtttcagatattataagcataactgtaaatgctgcaaatttgcaaggagagcttggtgacaacttagctaagttcacttctatcaggggaatagatttcagcaacaatcgcattggaggaagcataccttctactttgccggttacattgcagcatttttttctttcagctaatcagttcaccggaagcatcccggaatctctaggaacattgagttttctgaatgacatgtctttgaacgataaccttctctctggagagctacccgacgtgtttcaaaaccttgtcgggctgattaatcttgatatatcatctaacaatataagcggcacattgcctccttctatggagaatttattaactcttacaacattaaacatagagaataacctcttctctggacccataccggacaaattactaagcattccgaaattcctacatgaaggaaacccgttcaatgccacaatgatcaattccacctcgactgcaccatcattgtctccgtctctatctccaacaaaaccagctccaacgcgaccattttctggagttccacctcctccaaatgagaggaatcgagggaaagttgctgatggaccttctgattcagaaggatcgagctctgagaattcaaagggaaagaactcttcacatactaaaaagataatccttattgcattcgctggcgtcctcgtcttcataattctggttttggcaatactcttgctgttgccaaaatgtgcaagacgtagagaacatgctaacagagttttcaaaccgcatcaagttggtgctgatagaggaagcagagagaatgctctggaaaacgggactccggtactgccaccacctggtcgatctgaaaaagttcaaagagaacccttcaagaaagctggagaggaaccaaaggtcttacatgaccttgagaggctgcggagacctgcacctatatcaagacaggaaagtcaagatattgacttttcaatgttgatgcctcctcctccaccacctccaccaccaccaccacctcctcctttggatgagaaggtcacggttatgccaatcatatcacccgaaagacccgttaagaaaacttcccctaaacgcttacccttaacttctgtgaagcactattctattgcttctcttcaacaatacacggaaagcttcgctcaggaaaatctcattggctcaggcatgctcggtagtgtttatagggcccggcttcccaatggaaagttgtttgctgtcaagaagttggacaagagggcttctgaacaacaacaggatcacgaatttatcgaactagtgaacaatatagatatgattcgccactccaatatcgttgaacttgtgggttactgtgctgagcacgatcaaagactattggtctacgaatattgcagtaacggtacgttacaagacgggttgcattcagacgatgaattcaagaagaaactttcgtggaatacccgtgtcagtatggcacttggagctgctagagcccttgagtacttgcatgaggtgtgtgaaccacctatcatacacagaaacttcaaatcagccaatgttctactcgacgatgacctgagtgttcttgtctcagattgtggtttggccccactaatatcatcaggctctgtgagtcagttatcagggcaattgctagccgcttacggatatggagctccagagttcgactctggaatctatacatggcagagtgatgtatatagttttggtgttgttatgttagaactattgacgggtagaatgtcctacgatagggaccggagtagaggagagcagttcttggtgaggtgggcaatcccacagcttcatgatatcgatgcattgggcaaaatggttgatccatctcttaatggacaataccctgcaaagtcattgtcacactttgctgatataatatcccggtgtgttcagtctgaaccagaatttagaccactgatgtcagaagttgttcaagatctactagatatgatcagaagagagcgtcatggttcgggtgattctaccgcggactag

SEQ ID NO: 69815 - protein, 754 aa, Arabidopsis thaliana
  peptide (1)..(754): Ceres Seq. ID no. 1828084
MAAKRSIYCLLLLPLLLSLLIWIPSISLAATNPDDVAAINGLFAALGAPVLPGWIASGGDPCGEAWQGIICNVSDIISITVNAANLQGELGDNLAKFTSIRGIDFSNNRIGGSIPSTLPVTLQHFFLSANQFTGSIPESLGTLSFLNDMSLNDNLLSGELPDVFQNLVGLINLDISSNNISGTLPPSMENLLTLTTLNIENNLFSGPIPDKLLSIPKFLHEGNPFNATMINSTSTAPSLSPSLSPTKPAPTRPFSGVPPPPNERNRGKVADGPSDSEGSSSENSKGKNSSHTKKIILIAFAGVLVFIILVLAILLLLPKCARRREHANRVFKPHQVGADRGSRENALENGTPVLPPPGRSEKVQREPFKKAGEEPKVLHDLERLRRPAPISRQESQDIDFSMLMPPPPPPPPPPPPPPLDEKVTVMPIISPERPVKKTSPKRLPLTSVKHYSIASLQQYTESFAQENLIGSGMLGSVYRARLPNGKLFAVKKLDKRASEQQQDHEFIELVNNIDMIRHSNIVELVGYCAEHDQRLLVYEYCSNGTLQDGLHSDDEFKKKLSWNTRVSMALGAARALEYLHEVCEPPIIHRNFKSANVLLDDDLSVLVSDCGLAPLISSGSVSQLSGQLLAAYGYGAPEFDSGIYTWQSDVYSFGVVMLELLTGRMSYDRDRSRGEQFLVRWAIPQLHDIDALGKMVDPSLNGQYPAKSLSHFADIISRCVQSEPEFRPLMSEVVQDLLDMIRRERHGSGDSTAD

SEQ ID NO: 69816 - protein, 606 aa, Arabidopsis thaliana
  peptide (1)..(606): Ceres Seq. ID no. 1828085
MSLNDNLLSGELPDVFQNLVGLINLDISSNNISGTLPPSMENLLTLTTLNIENNLFSGPIPDKLLSIPKFLHEGNPFNATMINSTSTAPSLSPSLSPTKPAPTRPFSGVPPPPNERNRGKVADGPSDSEGSSSENSKGKNSSHTKKIILIAFAGVLVFIILVLAILLLLPKCARRREHANRVFKPHQVGADRGSRENALENGTPVLPPPGRSEKVQREPFKKAGEEPKVLHDLERLRRPAPISRQESQDIDFSMLMPPPPPPPPPPPPPPLDEKVTVMPIISPERPVKKTSPKRLPLTSVKHYSIASLQQYTESFAQENLIGSGMLGSVYRARLPNGKLFAVKKLDKRASEQQQDHEFIELVNNIDMIRHSNIVELVGYCAEHDQRLLVYEYCSNGTLQDGLHSDDEFKKKLSWNTRVSMALGAARALEYLHEVCEPPIIHRNFKSANVLLDDDLSVLVSDCGLAPLISSGSVSQLSGQLLAAYGYGAPEFDSGIYTWQSDVYSFGVVMLELLTGRMSYDRDRSRGEQFLVRWAIPQLHDIDALGKMVDPSLNGQYPAKSLSHFADIISRCVQSEPEFRPLMSEVVQDLLDMIRRERHGSGDSTAD

SEQ ID NO: 69817 - protein, 567 aa, Arabidopsis thaliana
  peptide (1)..(567): Ceres Seq. ID no. 1828086
MENLLTLTTLNIENNLFSGPIPDKLLSIPKFLHEGNPFNATMINSTSTAPSLSPSLSPTKPAPTRPFSGVPPPPNERNRGKVADGPSDSEGSSSENSKGKNSSHTKKIILIAFAGVLVFIILVLAILLLLPKCARRREHANRVFKPHQVGADRGSRENALENGTPVLPPPGRSEKVQREPFKKAGEEPKVLHDLERLRRPAPISRQESQDIDFSMLMPPPPPPPPPPPPPPLDEKVTVMPIISPERPVKKTSPKRLPLTSVKHYSIASLQQYTESFAQENLIGSGMLGSVYRARLPNGKLFAVKKLDKRASEQQQDHEFIELVNNIDMIRHSNIVELVGYCAEHDQRLLVYEYCSNGTLQDGLHSDDEFKKKLSWNTRVSMALGAARALEYLHEVCEPPIIHRNFKSANVLLDDDLSVLVSDCGLAPLISSGSVSQLSGQLLAAYGYGAPEFDSGIYTWQSDVYSFGVVMLELLTGRMSYDRDRSRGEQFLVRWAIPQLHDIDALGKMVDPSLNGQYPAKSLSHFADIISRCVQSEPEFRPLMSEVVQDLLDMIRRERHGSGDSTAD

SEQ ID NO: 69818 - DNA, 2559 bp, Arabidopsis thaliana
  misc_feature (1)..(2559): Ceres Seq. ID no. 1828125
  misc_feature (1)..(2559): Ortholog of  Ceres SEQ ID NO 13584744 as cited in SEQ ID NO 69137
atgattctttctgtcttcttctatatgtttttgctgcatattcgtcgattagattgttttgttgcagttcaagactccaaaacattgttcaaaggttcaacattgatcaatgacagccatggagagactcttgtttcagctggtcagagatttgagcttggcttcttcactcctaatggaagctccgacgaaagaaggtacttagggatttggttttacaatttacatccactgactgttgtctgggttgcaaatcgtgaatctccggttcttgaccgttcctgcattttcaccatctctaaagatgggaatcttgaagttattgattcaaagggaagagtgtattgggacaccggtgttaaaccttcctcagtatctgcggagagaatggtaaagctgatggataatggtaatcttgtgttgattagtgatggaaatgaagcaaatgtggtttggcagagttttcagaatcctactgatacatttctcccagggatgaggatggatgagaatatgactttatcatcatggagaagcttcaacgatccatcacatggaaatttcacctttcagatggatcaagaagaagacaaacagttcatcatttggaaaagatcaatgagatactggaaatccggaatttcgggtaaattcataggatccgacgagatgccttatgcgatttcttactttctttccaatttcacagagactgttactgttcacaatgcctctgtgcctcctctcttcacatctttgtataccaatacaaggttcaccatgagctcctctggtcaagctcagtacttcaggttagatggagaaagattctgggcacagatttgggctgaacctagagatgaatgtagtgtatacaatgcttgtggaaattttggtagctgcaacagcaagaatgaggaaatgtgtaagtgtttgccaggttttaggcctaatttcctggagaaatgggtcaagggagatttttctggtggatgttccagggagtcaaggatctgtggtaaagacggtgttgtggtgggagacatgttcttgaatctgagtgtggttgaagtaggaagtccggattcacagtttgatgcacataatgaaaaagaatgcagagcagagtgcttgaataattgccaatgccaagcttactcatatgaagaagttgatatacttcaaagcaataccaagtgctggatttggttggaggatctcaataatctcaaggaaggctatttaggtagccgcaacgttttcattcgcgtagcagttccagatataggttctcatgtagaacgaggtcgaggaagatacggggaagctaaaaccccggtggttttgatcattgtggtgacgtttacaagtgcagctattctggtcgttctgtcaagcactgcttcctatgtatttttgcaaagaagaaaagtaaacaaggaactaggaagtataccaagaggagttcatttatgtgacagtgagagacatatcaaagaattgattgaatcgggaaggtttaaacaagatgatagtcagggcatagatgttccatcttttgagctcgagaccatcctatatgcaacatccaacttctcaaatgcaaacaagctaggccaaggagggtttggaccggtttataagggaatgtttcctggagatcaagagattgctgtgaagaggctatctcgctgctcgggtcaaggactggaggaattcaagaatgaagttgttttgattgccaagctccaacaccggaatcttgttcgacttcttggctattgtgttgctggagaagagaaactgttattgtatgaatacatgccacacaaaagcttagacttcttcatcttcgaccggaagctttgccagcgattagattggaagatgcgttgtaatatcattctaggaatcgctcgtggacttctctatctgcatcaagactctagactgagaatcatccacagagatctaaaaacaagcaacattctgttagatgaagagatgaatcccaagatctctgactttggcttggctagaatatttggaggcagtgaaacatcagccaatactaatagagttgttggaacctatggatacatgtctccagagtatgctttagaaggtcttttctcattcaaatcagatgtctttagtttcggcgtggttgtgattgaaactatcagcgggaagcgtaacaccgggtttcatgaacctgagaaatctttaagccttctaggccatgcgtgggatctctggaaagcggaaagggggattgagttattggatcaggctttacaagaatcatgcgaaaccgagggattcttgaagtgcttgaacgtaggacttctctgtgtacaagaagatcctaatgatcgtcctacaatgtcaaatgttgttttcatgctcggaagcagcgaagctgctactcttcctactccaaaacaaccggcttttgttcttagacgttgcccttcatcaagcaaagcttcctcatccaccaagccagaaacttgctctgaaaatgagcttaccataactcttgaagatggaagataa

SEQ ID NO: 69819 - protein, 852 aa, Arabidopsis thaliana
  peptide (1)..(852): Ceres Seq. ID no. 1828126
MILSVFFYMFLLHIRRLDCFVAVQDSKTLFKGSTLINDSHGETLVSAGQRFELGFFTPNGSSDERRYLGIWFYNLHPLTVVWVANRESPVLDRSCIFTISKDGNLEVIDSKGRVYWDTGVKPSSVSAERMVKLMDNGNLVLISDGNEANVVWQSFQNPTDTFLPGMRMDENMTLSSWRSFNDPSHGNFTFQMDQEEDKQFIIWKRSMRYWKSGISGKFIGSDEMPYAISYFLSNFTETVTVHNASVPPLFTSLYTNTRFTMSSSGQAQYFRLDGERFWAQIWAEPRDECSVYNACGNFGSCNSKNEEMCKCLPGFRPNFLEKWVKGDFSGGCSRESRICGKDGVVVGDMFLNLSVVEVGSPDSQFDAHNEKECRAECLNNCQCQAYSYEEVDILQSNTKCWIWLEDLNNLKEGYLGSRNVFIRVAVPDIGSHVERGRGRYGEAKTPVVLIIVVTFTSAAILVVLSSTASYVFLQRRKVNKELGSIPRGVHLCDSERHIKELIESGRFKQDDSQGIDVPSFELETILYATSNFSNANKLGQGGFGPVYKGMFPGDQEIAVKRLSRCSGQGLEEFKNEVVLIAKLQHRNLVRLLGYCVAGEEKLLLYEYMPHKSLDFFIFDRKLCQRLDWKMRCNIILGIARGLLYLHQDSRLRIIHRDLKTSNILLDEEMNPKISDFGLARIFGGSETSANTNRVVGTYGYMSPEYALEGLFSFKSDVFSFGVVVIETISGKRNTGFHEPEKSLSLLGHAWDLWKAERGIELLDQALQESCETEGFLKCLNVGLLCVQEDPNDRPTMSNVVFMLGSSEAATLPTPKQPAFVLRRCPSSSKASSSTKPETCSENELTITLEDGR

SEQ ID NO: 69820 - protein, 844 aa, Arabidopsis thaliana
  peptide (1)..(844): Ceres Seq. ID no. 1828127
MFLLHIRRLDCFVAVQDSKTLFKGSTLINDSHGETLVSAGQRFELGFFTPNGSSDERRYLGIWFYNLHPLTVVWVANRESPVLDRSCIFTISKDGNLEVIDSKGRVYWDTGVKPSSVSAERMVKLMDNGNLVLISDGNEANVVWQSFQNPTDTFLPGMRMDENMTLSSWRSFNDPSHGNFTFQMDQEEDKQFIIWKRSMRYWKSGISGKFIGSDEMPYAISYFLSNFTETVTVHNASVPPLFTSLYTNTRFTMSSSGQAQYFRLDGERFWAQIWAEPRDECSVYNACGNFGSCNSKNEEMCKCLPGFRPNFLEKWVKGDFSGGCSRESRICGKDGVVVGDMFLNLSVVEVGSPDSQFDAHNEKECRAECLNNCQCQAYSYEEVDILQSNTKCWIWLEDLNNLKEGYLGSRNVFIRVAVPDIGSHVERGRGRYGEAKTPVVLIIVVTFTSAAILVVLSSTASYVFLQRRKVNKELGSIPRGVHLCDSERHIKELIESGRFKQDDSQGIDVPSFELETILYATSNFSNANKLGQGGFGPVYKGMFPGDQEIAVKRLSRCSGQGLEEFKNEVVLIAKLQHRNLVRLLGYCVAGEEKLLLYEYMPHKSLDFFIFDRKLCQRLDWKMRCNIILGIARGLLYLHQDSRLRIIHRDLKTSNILLDEEMNPKISDFGLARIFGGSETSANTNRVVGTYGYMSPEYALEGLFSFKSDVFSFGVVVIETISGKRNTGFHEPEKSLSLLGHAWDLWKAERGIELLDQALQESCETEGFLKCLNVGLLCVQEDPNDRPTMSNVVFMLGSSEAATLPTPKQPAFVLRRCPSSSKASSSTKPETCSENELTITLEDGR

SEQ ID NO: 69821 - protein, 723 aa, Arabidopsis thaliana
  peptide (1)..(723): Ceres Seq. ID no. 1828128
MVKLMDNGNLVLISDGNEANVVWQSFQNPTDTFLPGMRMDENMTLSSWRSFNDPSHGNFTFQMDQEEDKQFIIWKRSMRYWKSGISGKFIGSDEMPYAISYFLSNFTETVTVHNASVPPLFTSLYTNTRFTMSSSGQAQYFRLDGERFWAQIWAEPRDECSVYNACGNFGSCNSKNEEMCKCLPGFRPNFLEKWVKGDFSGGCSRESRICGKDGVVVGDMFLNLSVVEVGSPDSQFDAHNEKECRAECLNNCQCQAYSYEEVDILQSNTKCWIWLEDLNNLKEGYLGSRNVFIRVAVPDIGSHVERGRGRYGEAKTPVVLIIVVTFTSAAILVVLSSTASYVFLQRRKVNKELGSIPRGVHLCDSERHIKELIESGRFKQDDSQGIDVPSFELETILYATSNFSNANKLGQGGFGPVYKGMFPGDQEIAVKRLSRCSGQGLEEFKNEVVLIAKLQHRNLVRLLGYCVAGEEKLLLYEYMPHKSLDFFIFDRKLCQRLDWKMRCNIILGIARGLLYLHQDSRLRIIHRDLKTSNILLDEEMNPKISDFGLARIFGGSETSANTNRVVGTYGYMSPEYALEGLFSFKSDVFSFGVVVIETISGKRNTGFHEPEKSLSLLGHAWDLWKAERGIELLDQALQESCETEGFLKCLNVGLLCVQEDPNDRPTMSNVVFMLGSSEAATLPTPKQPAFVLRRCPSSSKASSSTKPETCSENELTITLEDGR

SEQ ID NO: 69822 - DNA, 2361 bp, Arabidopsis thaliana
  misc_feature (1)..(2361): Ceres Seq. ID no. 1828458
  misc_feature (1)..(2361): Ortholog of  Ceres SEQ ID NO 14302746 as cited in SEQ ID NO 66646
atgttgttgtttccttctacttctttacgtctcttcttctttctcttcctcttgttctcctcttgtttcttacagattagaggagatgatgatgatgatgatataagcgatgataatatcaaagtcgacccgagtctcaagttcgaaaacccaagtcttcgacaagcctacattgctcttcaatcatggaaacaagctattttctctgatccttttaacttcactgctaattggaatggctctgatgtttgttcctacaacggtatcttttgtgctccttctccttctagtccgaaaactcgagttgttgcgggtattgaccttaaccatgcggacatggctggttatttacctcgtgagcttggtcttctcactgatcttgctctctttcatctcaactcaaaccgcttttgtggagaagtacctctcacgtttaaacacatgaagcttctcttcgagcttgacttaagtaacaaccgttttgttgggaagttccctaatgttgtcttgtctttaccttccctcaagttcttggatcttcggtacaacgagtttgaaggtagtatcccttcgaagctattcgataaagagctcgacgcgatattcttaaaccataaccggtttatgtttgggatacccgaaaacatgggaaactctccggtgtctgctctagttcttgcggataatgatcttggaggttgcataccgggaagtatcggtttaatgggaaagactctcaacgagatcatcctctctaacgataacttaaccggttgcttaccaccacagattgggaatctcaagaatgtgacggttttcgatatcagtttcaaccgtttaagcggtccattgccatcaagcattggaaacatgaagagtttggaacagctcaatgttgctaacaatagattcacaggagttataccaagcagcatttgtcagctctctaaccttgagaacttcacttattcttccaacttcttcaccggtgatgccccgagatgtgtggctcttttgggagacaatgtggtggttaatggctcgatgaattgtattgatggtaaagaagatcaaagatcgtctaaagagtgttcttctccagcctcacgctctgttgattgtagtaagtttgggtgtaacaactttttctctcctccaccaccgtcttttaagatgtcacccaccgttcgagtacttcctccaccgcctccgtcttccaagatgtcgcctacatttagagcaactccgccaccgccgtcttctaagatgtcaccatcttttagagcaactccgccaccgccttcttctaaaatgtcgccttcttttagagcaactccgccaccaccttcttctaagatgtcgccttccgtcaaggcgtatcctcctcctccaccaccgccagagtatgagccatctccgcctcctccttcttccgaaatgtcaccttccgttagggcataccctccaccaccaccactatcaccaccaccaccatctcctcctccaccatacatctactcatctcctccaccaccgtcaccatctcctcctccgccatacatttactcatctcctccgcccgtagttaactgtccacccacaacacaaagtcccccacctccgaaatatgagcaaactccttcaccaagggaatactatccatcaccttcaccaccttactaccaatacacgtcttctccgccaccgcctacttactacgccactcaatctccaccgccaccaccaccgcctacttactacgctgttcaatctcccccgccaccaccaccggtatactacccacctgtaacagcaagtcctcctccaccaccggtctactatacaccggttatacaatctcctcctcctccaccggtttactattcacctgttacccaaagtcctccaccaccaccaccggtttactatcccccggtaacacaaagtccaccaccatcaccggtctactatccgccagttacccaaagtccacctcccccaccagtttattatcttccagtaactcaaagccctccaccgccatcaccagtctactatccaccggtagcaaaaagccctccaccaccatcaccagtctactatccaccggtaacacaaagcccacctccaccgtcaacaccagttgagtaccatccaccggcaagcccaaaccagtctccaccaccggagtatcaatcaccaccaccaaagggatgcaacgacagtccaagtaacgaccatcactaccaaacaccaacaccaccttctctgccgcctccatattacgaagacacacctcttccgcctatccgcggtgtctcttatgcgtctcctcctccaccatcaatcccatactactaa

SEQ ID NO: 69823 - protein, 786 aa, Arabidopsis thaliana
  peptide (1)..(786): Ceres Seq. ID no. 1828459
MLLFPSTSLRLFFFLFLLFSSCFLQIRGDDDDDDISDDNIKVDPSLKFENPSLRQAYIALQSWKQAIFSDPFNFTANWNGSDVCSYNGIFCAPSPSSPKTRVVAGIDLNHADMAGYLPRELGLLTDLALFHLNSNRFCGEVPLTFKHMKLLFELDLSNNRFVGKFPNVVLSLPSLKFLDLRYNEFEGSIPSKLFDKELDAIFLNHNRFMFGIPENMGNSPVSALVLADNDLGGCIPGSIGLMGKTLNEIILSNDNLTGCLPPQIGNLKNVTVFDISFNRLSGPLPSSIGNMKSLEQLNVANNRFTGVIPSSICQLSNLENFTYSSNFFTGDAPRCVALLGDNVVVNGSMNCIDGKEDQRSSKECSSPASRSVDCSKFGCNNFFSPPPPSFKMSPTVRVLPPPPPSSKMSPTFRATPPPPSSKMSPSFRATPPPPSSKMSPSFRATPPPPSSKMSPSVKAYPPPPPPPEYEPSPPPPSSEMSPSVRAYPPPPPLSPPPPSPPPPYIYSSPPPPSPSPPPPYIYSSPPPVVNCPPTTQSPPPPKYEQTPSPREYYPSPSPPYYQYTSSPPPPTYYATQSPPPPPPPTYYAVQSPPPPPPVYYPPVTASPPPPPVYYTPVIQSPPPPPVYYSPVTQSPPPPPPVYYPPVTQSPPPSPVYYPPVTQSPPPPPVYYLPVTQSPPPPSPVYYPPVAKSPPPPSPVYYPPVTQSPPPPSTPVEYHPPASPNQSPPPEYQSPPPKGCNDSPSNDHHYQTPTPPSLPPPYYEDTPLPPIRGVSYASPPPPSIPYY

SEQ ID NO: 69824 - protein, 674 aa, Arabidopsis thaliana
  peptide (1)..(674): Ceres Seq. ID no. 1828460
MAGYLPRELGLLTDLALFHLNSNRFCGEVPLTFKHMKLLFELDLSNNRFVGKFPNVVLSLPSLKFLDLRYNEFEGSIPSKLFDKELDAIFLNHNRFMFGIPENMGNSPVSALVLADNDLGGCIPGSIGLMGKTLNEIILSNDNLTGCLPPQIGNLKNVTVFDISFNRLSGPLPSSIGNMKSLEQLNVANNRFTGVIPSSICQLSNLENFTYSSNFFTGDAPRCVALLGDNVVVNGSMNCIDGKEDQRSSKECSSPASRSVDCSKFGCNNFFSPPPPSFKMSPTVRVLPPPPPSSKMSPTFRATPPPPSSKMSPSFRATPPPPSSKMSPSFRATPPPPSSKMSPSVKAYPPPPPPPEYEPSPPPPSSEMSPSVRAYPPPPPLSPPPPSPPPPYIYSSPPPPSPSPPPPYIYSSPPPVVNCPPTTQSPPPPKYEQTPSPREYYPSPSPPYYQYTSSPPPPTYYATQSPPPPPPPTYYAVQSPPPPPPVYYPPVTASPPPPPVYYTPVIQSPPPPPVYYSPVTQSPPPPPPVYYPPVTQSPPPSPVYYPPVTQSPPPPPVYYLPVTQSPPPPSPVYYPPVAKSPPPPSPVYYPPVTQSPPPPSTPVEYHPPASPNQSPPPEYQSPPPKGCNDSPSNDHHYQTPTPPSLPPPYYEDTPLPPIRGVSYASPPPPSIPYY

SEQ ID NO: 69825 - protein, 639 aa, Arabidopsis thaliana
  peptide (1)..(639): Ceres Seq. ID no. 1828461
MKLLFELDLSNNRFVGKFPNVVLSLPSLKFLDLRYNEFEGSIPSKLFDKELDAIFLNHNRFMFGIPENMGNSPVSALVLADNDLGGCIPGSIGLMGKTLNEIILSNDNLTGCLPPQIGNLKNVTVFDISFNRLSGPLPSSIGNMKSLEQLNVANNRFTGVIPSSICQLSNLENFTYSSNFFTGDAPRCVALLGDNVVVNGSMNCIDGKEDQRSSKECSSPASRSVDCSKFGCNNFFSPPPPSFKMSPTVRVLPPPPPSSKMSPTFRATPPPPSSKMSPSFRATPPPPSSKMSPSFRATPPPPSSKMSPSVKAYPPPPPPPEYEPSPPPPSSEMSPSVRAYPPPPPLSPPPPSPPPPYIYSSPPPPSPSPPPPYIYSSPPPVVNCPPTTQSPPPPKYEQTPSPREYYPSPSPPYYQYTSSPPPPTYYATQSPPPPPPPTYYAVQSPPPPPPVYYPPVTASPPPPPVYYTPVIQSPPPPPVYYSPVTQSPPPPPPVYYPPVTQSPPPSPVYYPPVTQSPPPPPVYYLPVTQSPPPPSPVYYPPVAKSPPPPSPVYYPPVTQSPPPPSTPVEYHPPASPNQSPPPEYQSPPPKGCNDSPSNDHHYQTPTPPSLPPPYYEDTPLPPIRGVSYASPPPPSIPYY

SEQ ID NO: 69826 - DNA, 2529 bp, Arabidopsis thaliana
  misc_feature (1)..(2529): Ceres Seq. ID no. 1828496
  misc_feature (1)..(2529): Ortholog of  Ceres SEQ ID NO 14302384 as cited in SEQ ID NO 67177
atggcaggatttaacagaaaccttactttggtgacgactcttttgatattccatcaactatgtagcaacgtatcttgctccacaagcaactcattcactagaaaccacacaatacgagagggagactcactgatcagcgaggatgaaagcttcgagcttggattcttcacccccaaaaattcgacgttaaggtatgttggaatatggtacaagaacatagaacctcaaacagttgtttgggttgcgaatagagagaagccgttgttggatcacaagggagctctaaagattgcagatgacggaaatttggtgatcgtgaacggtcaaaacgaaaccatttggtccacaaatgtcgagcccgagtcaaacaacacggttgctgttctgttcaaaacaggggatttggttctgtgttcagactcagacagaagaaaatggtattgggagagttttaacaatccaaccgacactttcttgcccggtatgagggttcgggtgaatccttcgcttggagaaaatcgcgcatttatcccgtggaaatccgagagtgatccttcaccaggaaagtattcaatggggattgatcctgtgggagcactagagattgtgatttgggaaggggaaaagagaaaatggcgtagcggaccgtggaattcggctatctttaccggtatacctgatatgctccgtttcacaaattatatttacgggtttaagctctcttctcctcctgatagagatggtagcgtgtacttcacgtatgttgcctcagatagttccgatttcttgaggttttggattaggcctgatggcgtagaagagcagttcagatggaataaggatatcaggaactggaatttgcttcaatggaaaccaagcacggaatgtgagaagtataaccgttgtggtaattacagtgtatgtgatgatagtaaggagtttgattccggtaaatgcagttgcattgatggatttgagccggttcatcaggatcaatggaacaacagggacttctcaggtggctgccaaagaagagttcctttgaactgtaatcagagtctggttgcaggtcaagaggatgggtttacggtacttaagggaataaaggtgcctgattttggatcagttgttttacataacaactcagagacctgtaaagatgtatgcgcaagggactgttcttgtaaggcttatgcgttagtagtagggatcggatgcatgatttggacccgtgatttgatcgatatggaacattttgaacgcggtggaaactctatcaacatccggctagcgggttctaaactaggtggtgggaaggaaaattcaacactttggataattgttttcagtgttataggagcattcttactaggattatgcatttggatcttatggaagtttaagaaaagccttaaagctttcttgtggaagaagaaagatatcacagtttctgatatcatagagaacagagattactcaagctcgccgatcaaagttctagtaggggatcaagttgacacacccgatttaccaatattcagttttgacagcgtagcctcagctactggagatttcgctgaagagaacaagcttggacagggcggattcggtactgtatataagggaaacttttcagaaggaagagagattgcagtgaagagactatcagggaaatctaaacaaggactagaggagttcaagaacgagatcttactaatcgcgaaactccagcatcggaatcttgttagattactaggatgttgcattgaagacaatgagaagatgcttctctatgaatatatgccaaacaagagtttggaccgctttctttttgatgagagtaaacaaggaagtttggactggagaaaacgatgggaggtcattggaggaatcgcgaggggattactttacttacatagagactcaagactaaagatcattcaccgtgacctaaaagctagcaatatcttgctagacacggaaatgaatccaaagatctcggatttcggtatggctaggatattcaactaccgacaagaccatgccaacacaatccgagtcgtcggcacatatggttatatggctccggagtatgcaatggaagggatattctcagagaaatcagatgtgtatagctttggagtgttgatattggagattgtgagtggaagaaaaaacgttagctttcgagggactgatcatggaagtctcattggttatgcgtggcatttatggagccaaggaaagacaaaagagatgatagatccaattgtgaaggacactagagacgtgacggaagcgatgagatgcatccacgtgggtatgttgtgtacacaagactcggtcattcacagaccaaacatgggttcggttttgttgatgttggagagtcaaaccagtcaacttccacccccgagacagccgaccttccactcgttcttgaactctggtgacattgaactcaactttgacggtcacgatgttgcctccgttaacgatgttactttcacaacaattgttggtagatga

SEQ ID NO: 69827 - protein, 842 aa, Arabidopsis thaliana
  peptide (1)..(842): Ceres Seq. ID no. 1828497
MAGFNRNLTLVTTLLIFHQLCSNVSCSTSNSFTRNHTIREGDSLISEDESFELGFFTPKNSTLRYVGIWYKNIEPQTVVWVANREKPLLDHKGALKIADDGNLVIVNGQNETIWSTNVEPESNNTVAVLFKTGDLVLCSDSDRRKWYWESFNNPTDTFLPGMRVRVNPSLGENRAFIPWKSESDPSPGKYSMGIDPVGALEIVIWEGEKRKWRSGPWNSAIFTGIPDMLRFTNYIYGFKLSSPPDRDGSVYFTYVASDSSDFLRFWIRPDGVEEQFRWNKDIRNWNLLQWKPSTECEKYNRCGNYSVCDDSKEFDSGKCSCIDGFEPVHQDQWNNRDFSGGCQRRVPLNCNQSLVAGQEDGFTVLKGIKVPDFGSVVLHNNSETCKDVCARDCSCKAYALVVGIGCMIWTRDLIDMEHFERGGNSINIRLAGSKLGGGKENSTLWIIVFSVIGAFLLGLCIWILWKFKKSLKAFLWKKKDITVSDIIENRDYSSSPIKVLVGDQVDTPDLPIFSFDSVASATGDFAEENKLGQGGFGTVYKGNFSEGREIAVKRLSGKSKQGLEEFKNEILLIAKLQHRNLVRLLGCCIEDNEKMLLYEYMPNKSLDRFLFDESKQGSLDWRKRWEVIGGIARGLLYLHRDSRLKIIHRDLKASNILLDTEMNPKISDFGMARIFNYRQDHANTIRVVGTYGYMAPEYAMEGIFSEKSDVYSFGVLILEIVSGRKNVSFRGTDHGSLIGYAWHLWSQGKTKEMIDPIVKDTRDVTEAMRCIHVGMLCTQDSVIHRPNMGSVLLMLESQTSQLPPPRQPTFHSFLNSGDIELNFDGHDVASVNDVTFTTIVGR

SEQ ID NO: 69828 - protein, 681 aa, Arabidopsis thaliana
  peptide (1)..(681): Ceres Seq. ID no. 1828498
MRVRVNPSLGENRAFIPWKSESDPSPGKYSMGIDPVGALEIVIWEGEKRKWRSGPWNSAIFTGIPDMLRFTNYIYGFKLSSPPDRDGSVYFTYVASDSSDFLRFWIRPDGVEEQFRWNKDIRNWNLLQWKPSTECEKYNRCGNYSVCDDSKEFDSGKCSCIDGFEPVHQDQWNNRDFSGGCQRRVPLNCNQSLVAGQEDGFTVLKGIKVPDFGSVVLHNNSETCKDVCARDCSCKAYALVVGIGCMIWTRDLIDMEHFERGGNSINIRLAGSKLGGGKENSTLWIIVFSVIGAFLLGLCIWILWKFKKSLKAFLWKKKDITVSDIIENRDYSSSPIKVLVGDQVDTPDLPIFSFDSVASATGDFAEENKLGQGGFGTVYKGNFSEGREIAVKRLSGKSKQGLEEFKNEILLIAKLQHRNLVRLLGCCIEDNEKMLLYEYMPNKSLDRFLFDESKQGSLDWRKRWEVIGGIARGLLYLHRDSRLKIIHRDLKASNILLDTEMNPKISDFGMARIFNYRQDHANTIRVVGTYGYMAPEYAMEGIFSEKSDVYSFGVLILEIVSGRKNVSFRGTDHGSLIGYAWHLWSQGKTKEMIDPIVKDTRDVTEAMRCIHVGMLCTQDSVIHRPNMGSVLLMLESQTSQLPPPRQPTFHSFLNSGDIELNFDGHDVASVNDVTFTTIVGR

SEQ ID NO: 69829 - protein, 651 aa, Arabidopsis thaliana
  peptide (1)..(651): Ceres Seq. ID no. 1828499
MGIDPVGALEIVIWEGEKRKWRSGPWNSAIFTGIPDMLRFTNYIYGFKLSSPPDRDGSVYFTYVASDSSDFLRFWIRPDGVEEQFRWNKDIRNWNLLQWKPSTECEKYNRCGNYSVCDDSKEFDSGKCSCIDGFEPVHQDQWNNRDFSGGCQRRVPLNCNQSLVAGQEDGFTVLKGIKVPDFGSVVLHNNSETCKDVCARDCSCKAYALVVGIGCMIWTRDLIDMEHFERGGNSINIRLAGSKLGGGKENSTLWIIVFSVIGAFLLGLCIWILWKFKKSLKAFLWKKKDITVSDIIENRDYSSSPIKVLVGDQVDTPDLPIFSFDSVASATGDFAEENKLGQGGFGTVYKGNFSEGREIAVKRLSGKSKQGLEEFKNEILLIAKLQHRNLVRLLGCCIEDNEKMLLYEYMPNKSLDRFLFDESKQGSLDWRKRWEVIGGIARGLLYLHRDSRLKIIHRDLKASNILLDTEMNPKISDFGMARIFNYRQDHANTIRVVGTYGYMAPEYAMEGIFSEKSDVYSFGVLILEIVSGRKNVSFRGTDHGSLIGYAWHLWSQGKTKEMIDPIVKDTRDVTEAMRCIHVGMLCTQDSVIHRPNMGSVLLMLESQTSQLPPPRQPTFHSFLNSGDIELNFDGHDVASVNDVTFTTIVGR

SEQ ID NO: 69830 - DNA, 486 bp, Arabidopsis thaliana
  misc_feature (1)..(486): Ceres Seq. ID no. 1828950
  misc_feature (1)..(486): Ortholog of  Ceres SEQ ID NO 13598758 as cited in SEQ ID NO 61555
atggatcacatagcggcagcggaggagcaaattgtaacggagaggattagaagaaaacttgaagaagttaatgcaactgctcaatcgcaactctctcctattcaagatcacatcaatttcacccttcagttgatgaatcaaacccggaaaattgatcaattgcagcaagcctatttcaaatgtgcatacgagtgctttgacagaaataggaagcaagaggagatagccaactgtgttgagcactgcagtgttccagttgtcaatgctcaacagcatttcgaaggcgaaatgtctcagtttcaggaaaggatgaacagatctctcatggtctgtcaagacaaatttgaggctgcaaagctccataagaacaggggagatgccgccaaagctatggagagttgtgtgaacacatccattgaggatagtctcgatacattgcctcatattgtgcagagaatgaagacgtcattctccattgccgactaa

SEQ ID NO: 69831 - protein, 161 aa, Arabidopsis thaliana
  peptide (1)..(161): Ceres Seq. ID no. 1828951
MDHIAAAEEQIVTERIRRKLEEVNATAQSQLSPIQDHINFTLQLMNQTRKIDQLQQAYFKCAYECFDRNRKQEEIANCVEHCSVPVVNAQQHFEGEMSQFQERMNRSLMVCQDKFEAAKLHKNRGDAAKAMESCVNTSIEDSLDTLPHIVQRMKTSFSIAD

SEQ ID NO: 69832 - protein, 117 aa, Arabidopsis thaliana
  peptide (1)..(117): Ceres Seq. ID no. 1828952
MNQTRKIDQLQQAYFKCAYECFDRNRKQEEIANCVEHCSVPVVNAQQHFEGEMSQFQERMNRSLMVCQDKFEAAKLHKNRGDAAKAMESCVNTSIEDSLDTLPHIVQRMKTSFSIAD

SEQ ID NO: 69833 - DNA, 918 bp, Arabidopsis thaliana
  misc_feature (1)..(918): Ceres Seq. ID no. 1829070
  misc_feature (1)..(918): Ortholog of  Ceres SEQ ID NO 15225233 as cited in SEQ ID NO 58014
atggaagcgagaatcatcctcctccgaattcaaatcccttggagcgctaatcgccaattctctcatcctcctttagatttccctcgttttatcagagcttcttcttcctcaacctcacagaagccgaaaacttacgaaggtccgaaaccgaggaagaatttagtagctgatttcatttccaaaaacgatgacttggttcgaagcttaccgatctacgtcgggggcgcttctcttttggccgttctctttaatcggactgtttccggtatcgctcctgttgccgatgctagcagctcacagtctagagcagatctattagcgcttggcttggctgtcaccaatctattgaccggtttagtctggttatcgattcgacctaagtcaataacacctgtaaatccgaaaggtgtggaatgcaaagttgtagaatctgatcttcctgcatcgatggtttccgagttgttatgggcttgggaatctcttaaggtagcaacatgttgtaagtctctagttattgtctacaatggaatttgccttattcaaattgggatggtagctgaatctccagaagataagaaaacagtcatagtaaagaccgataagttgatgcaaggatcggtttacagaggggttatgaaatccaaagcacgaaagaacaatgattgtttgtcagagagttacttggctaatctttctctttatcctgggagatcagagctgccatttctacctgcaaatacacaggcggtgattttgcagccgcttggagataaaggaatcgcagtcattggtggaaatacgattagaggattcacgtcttcagaccaggcttggatttcttcaattggggagaagctagatgcgacactggggagatattttgttgattctgatgagatttccagagtaacagtttga

SEQ ID NO: 69834 - protein, 305 aa, Arabidopsis thaliana
  peptide (1)..(305): Ceres Seq. ID no. 1829071
MEARIILLRIQIPWSANRQFSHPPLDFPRFIRASSSSTSQKPKTYEGPKPRKNLVADFISKNDDLVRSLPIYVGGASLLAVLFNRTVSGIAPVADASSSQSRADLLALGLAVTNLLTGLVWLSIRPKSITPVNPKGVECKVVESDLPASMVSELLWAWESLKVATCCKSLVIVYNGICLIQIGMVAESPEDKKTVIVKTDKLMQGSVYRGVMKSKARKNNDCLSESYLANLSLYPGRSELPFLPANTQAVILQPLGDKGIAVIGGNTIRGFTSSDQAWISSIGEKLDATLGRYFVDSDEISRVTV

SEQ ID NO: 69835 - protein, 156 aa, Arabidopsis thaliana
  peptide (1)..(156): Ceres Seq. ID no. 1829072
MVSELLWAWESLKVATCCKSLVIVYNGICLIQIGMVAESPEDKKTVIVKTDKLMQGSVYRGVMKSKARKNNDCLSESYLANLSLYPGRSELPFLPANTQAVILQPLGDKGIAVIGGNTIRGFTSSDQAWISSIGEKLDATLGRYFVDSDEISRVTV

SEQ ID NO: 69836 - DNA, 996 bp, Arabidopsis thaliana
  misc_feature (1)..(996): Ceres Seq. ID no. 1829109
  misc_feature (1)..(996): Ortholog of  Ceres SEQ ID NO 13639663 as cited in SEQ ID NO 57850
  misc_feature (1)..(996): Ortholog of  Ceres SEQ ID NO 15224330 as cited in SEQ ID NO 58808
atgggggttgattactacaatgtactcaacgtgaatccaagcgcaacggaagacgatctaaagaaatcgtatcgaagacttgcaatgaaatggcaccctgacaaaaaccctacttcaatcaagcaagaagctgaagctaagttcaaacaaatctccgaagcttacgatgttttaagcgatcctaacaaacgtcagatctatgatcaatatggtgaagacggacttacggcgacagaagcaacggcgtcgtctcaacaacataattactcttctggtaacaacaataattacaatgcagggtttaggtattatccacgtgatgctgaagatattttcgctgagtttttcggtgcatctgagaaagtctttgatggtggcgtcggcggtggcgggaggtttaaaagtgcggaggcgggaagtcagacgaataggaaaactccggtgaacaggaaagctccggcgattgagagtaaattggcttgtactcttgaggagttgtataaaggtgggaggaggaagatgaagatttcccgcgttgttcctgatggtcttggaaagtcaaagccagtggaagagatcttgaagatagatataacaccaggatggaagaaaggaactaagataacttttccagagaaaggaaaccaagaacccggtgttactcccgcagatctcatctttgttatagatgagaaaccgcattcggtttacaaaagagacggtaacgatcttattgtagacaagaaagtttcgcttttggaggctttaacagggatcactcttagcttaacaacactagacgggaggaatctgactatcccggttttggatatcgttaaaccgggtcaggagatagtgattcctagtgaaggaatgcccatctctaaagaaggttcaaagagaggagatctaagaatcaactttgagatatgtttcccctcgaggctaacatcggaacagaagacagatctcaagagagttcttggtggtagctga

SEQ ID NO: 69837 - protein, 331 aa, Arabidopsis thaliana
  peptide (1)..(331): Ceres Seq. ID no. 1829110
MGVDYYNVLNVNPSATEDDLKKSYRRLAMKWHPDKNPTSIKQEAEAKFKQISEAYDVLSDPNKRQIYDQYGEDGLTATEATASSQQHNYSSGNNNNYNAGFRYYPRDAEDIFAEFFGASEKVFDGGVGGGGRFKSAEAGSQTNRKTPVNRKAPAIESKLACTLEELYKGGRRKMKISRVVPDGLGKSKPVEEILKIDITPGWKKGTKITFPEKGNQEPGVTPADLIFVIDEKPHSVYKRDGNDLIVDKKVSLLEALTGITLSLTTLDGRNLTIPVLDIVKPGQEIVIPSEGMPISKEGSKRGDLRINFEICFPSRLTSEQKTDLKRVLGGS

SEQ ID NO: 69838 - protein, 303 aa, Arabidopsis thaliana
  peptide (1)..(303): Ceres Seq. ID no. 1829111
MKWHPDKNPTSIKQEAEAKFKQISEAYDVLSDPNKRQIYDQYGEDGLTATEATASSQQHNYSSGNNNNYNAGFRYYPRDAEDIFAEFFGASEKVFDGGVGGGGRFKSAEAGSQTNRKTPVNRKAPAIESKLACTLEELYKGGRRKMKISRVVPDGLGKSKPVEEILKIDITPGWKKGTKITFPEKGNQEPGVTPADLIFVIDEKPHSVYKRDGNDLIVDKKVSLLEALTGITLSLTTLDGRNLTIPVLDIVKPGQEIVIPSEGMPISKEGSKRGDLRINFEICFPSRLTSEQKTDLKRVLGGS

SEQ ID NO: 69839 - DNA, 1110 bp, Arabidopsis thaliana
  misc_feature (1)..(1110): Ceres Seq. ID no. 1829753
  misc_feature (1)..(1110): Ortholog of  Ceres SEQ ID NO 12611159 as cited in SEQ ID NO 59821
  misc_feature (1)..(1110): Ortholog of  Ceres SEQ ID NO 15180029 as cited in SEQ ID NO 0
atgggaagacattcttgttgttttaagcagaagctaagaaaaggcctttggtctcctgaagaagatgagaaacttctcaattacatcactagacatggtcatggctgttggagttctgtccctaaactcgcagcatcgtttataatgtttttatatgcgttggtggatatatatgatcaaataggtttgcaaagatgtggaaagagttgtagacttaggtggataaattatttgagaccagatttaaagagaggagctttctctcaagacgaagaaagcttgatcattgagctccatgctgcattaggcaacagatggtctcaaatcgcaacgcggttaccgggaagaacagacaacgagatcaaaaacttttggaactcatgtcttaagaagaagctgagaagaaaaggcattgacccaacaacacataaacccttaataacaaacgagcttcaatctcttaacgtcatagatcagaaactgacgtcatcagaagtagtaaagtcaacgggttcgataaacaacctacatgatcagtcaatggtcgtctcatcgcaacaaggtccatggtggttcccggcgaatacaactacgactaatcaaaactctgcgttttgctttagttcaagtaatactacaacggtttcagaccagatcgtatctttaatctcttcaatgtctacgtcatcatctccgacaccaatgacttcaaacttcagtcctgctccaaacaactgggaacaactcaactactgcaacacagtaccaagtcagagcaacagtatctacagtgccttctttggtaatcaatacacagaagctagccaaaccatgaacaataataatccactagtagatcaacatcatcatcatcaagacatgaagtcatgggcatcagagattcttcattacacagaacacaaccaaagctcagaaactgttatagaagcagaagtgaagccagacattgccaactactactggagatcagcatcatcatcgtcgtcaccaaaccaagaagctgcaacattactacacgatgctaacgtggaagtgtacggtaaaaatctacaaaagcttaataacatggtgtttgatcagagcctttag

SEQ ID NO: 69840 - protein, 369 aa, Arabidopsis thaliana
  peptide (1)..(369): Ceres Seq. ID no. 1829754
MGRHSCCFKQKLRKGLWSPEEDEKLLNYITRHGHGCWSSVPKLAASFIMFLYALVDIYDQIGLQRCGKSCRLRWINYLRPDLKRGAFSQDEESLIIELHAALGNRWSQIATRLPGRTDNEIKNFWNSCLKKKLRRKGIDPTTHKPLITNELQSLNVIDQKLTSSEVVKSTGSINNLHDQSMVVSSQQGPWWFPANTTTTNQNSAFCFSSSNTTTVSDQIVSLISSMSTSSSPTPMTSNFSPAPNNWEQLNYCNTVPSQSNSIYSAFFGNQYTEASQTMNNNNPLVDQHHHHQDMKSWASEILHYTEHNQSSETVIEAEVKPDIANYYWRSASSSSSPNQEAATLLHDANVEVYGKNLQKLNNMVFDQSL

SEQ ID NO: 69841 - protein, 321 aa, Arabidopsis thaliana
  peptide (1)..(321): Ceres Seq. ID no. 1829755
MFLYALVDIYDQIGLQRCGKSCRLRWINYLRPDLKRGAFSQDEESLIIELHAALGNRWSQIATRLPGRTDNEIKNFWNSCLKKKLRRKGIDPTTHKPLITNELQSLNVIDQKLTSSEVVKSTGSINNLHDQSMVVSSQQGPWWFPANTTTTNQNSAFCFSSSNTTTVSDQIVSLISSMSTSSSPTPMTSNFSPAPNNWEQLNYCNTVPSQSNSIYSAFFGNQYTEASQTMNNNNPLVDQHHHHQDMKSWASEILHYTEHNQSSETVIEAEVKPDIANYYWRSASSSSSPNQEAATLLHDANVEVYGKNLQKLNNMVFDQSL

SEQ ID NO: 69842 - protein, 189 aa, Arabidopsis thaliana
  peptide (1)..(189): Ceres Seq. ID no. 1829756
MVVSSQQGPWWFPANTTTTNQNSAFCFSSSNTTTVSDQIVSLISSMSTSSSPTPMTSNFSPAPNNWEQLNYCNTVPSQSNSIYSAFFGNQYTEASQTMNNNNPLVDQHHHHQDMKSWASEILHYTEHNQSSETVIEAEVKPDIANYYWRSASSSSSPNQEAATLLHDANVEVYGKNLQKLNNMVFDQSL

SEQ ID NO: 69843 - DNA, 2685 bp, Arabidopsis thaliana
  misc_feature (1)..(2685): Ceres Seq. ID no. 1829971
  misc_feature (1)..(2685): Ortholog of  Ceres SEQ ID NO 13596392 as cited in SEQ ID NO 62136
  misc_feature (1)..(2685): Ortholog of  Ceres SEQ ID NO 13654360 as cited in SEQ ID NO 67980
  misc_feature (1)..(2685): Ortholog of  Ceres SEQ ID NO 13596394 as cited in SEQ ID NO 68561
atgggctcgaagccttggctacatccagctcctcagtataaaaccctagaaaccttttgggatgatgaagacgatgctcctggtcctagatgcgctcatacacttacggctgttgcagctactaagactcacggtcctcgtcttattctcttcggcggcgccaccgctattgagggagggagttcttccgttcctgggatcaggttagctggtgttaccaatacggtgcattcttatgatattctcactaggaagtggacaaggcttaaaccggctggtgagcctccgtctcctagggctgctcacgccgcagctgcagttggcaccatggtcgtttttcagggtggcattggaccggcggggcattctactgatgatctttacgttcttgacatgactaatgataagttcaagtggcacagggtggtggttcaaggggatggtccaggccctcgctatggccatgttatggatttagtttctcagaggtatcttgttacagtcaccggaaatgatgggaaacgagctctttctgacgcttgggcactggatacagctcagaaaccatatgtatggcagagattgaacccagatggtgaccgaccaagtgctagaatgtatgcttctggcagtgctcgttctgatggcatgtttttgctctgcgggggaagagacaccttgggggcgccgttgggagatgcttatgggctactgatgcatagaaatggtcagtgggagtggactctggctccaggtgtagctccttctccaagatatcaacatgcagcggtttttgtaggtgcaagattacatgtcagtggtggtgtgctgagaggaggccgtgtaatagacgctgaagcatctgttgcaggtaatggtgatgtgcttgatactgctgccggtgtatggttggatagaaatgggcaagttacttctgcacgtggaagtaagggacaaatcgatcaagatccgtcttttgaacttatgcgacgctgtcgccatggcgcggcatcagttggtatccggatctatgtgcatggtggtctaagaggagatgtgttacttgacgattttctagttgctgaaaattcaacattccagtcagacatcagttctcctttgctagcatcagatagaacccaacaaagttctactcccaggttttcttatgccgcacgacctccttcaggctctgaaccaagcttctccatgtctgagggactgagcttggatgaaaattcgttggagaaattgacggaggcttctgcagctgaagcagaggtagctagttctgtttggcgagctgcacaactaggagctggtactctggatgaagaaccctctacctctgatgccagctcgccaattgtagaatctactactgatggtaccgcaaatgaaggagatgtcaggcttcatccgagagctgttgtggtagcaaaagagacggttggtagtctgggcggcatggtaagacagctaagcttggatcagtttcagaatgagagccgacggatggttcccatgaacaatagcgatgtgccacaacctaccaagaagttcacgagacagaagtctccgcaaggcctgcataaaaaggtcattgctgctttgttaagacctcgaaactggaaacctcctggcaataggaaatttttcttggattcttacgaagttggggaactctgttatgctgccgaacaaatatttatgcatgaacaaacggttcttcagctaaaggctcctatcaaagtatttggcgatctccatgggcaatttggcgatttaatgcgtttatttgatgaatatggatttccctcaacagctggagacatcacgtatattgactatttattcttgggagattacgttgaccggggacaacacagcctggagactataacgttgctgcttgcattgaagattgaatatccggagaatgttcacttgattcgtggaaaccacgaggctgctgacattaatgcactatttggtttccgtcttgaatgcatagaaagaatgactaagcctgctctgtacttttgccagggagagaatgatggcatctgggcgtggacaagatttaatcaactttttaattatcttcctcttgctgcactaatcgagaacaaaattatatgtatgcatggtggaattgggaggtcaatcagtacagtggaacagattgaaaagattgaaagacccataacaatggatgctggatcccttgttctaatggatttattatggtctgatcctacagagaacgatagtatcgagggtttaagaccaaacgccagaggacctggccttgtcacgtttgggcctgatagagtcacagaattctgtaagaggaataaactacagctaattatcagggcccatgaatgtgtgatggatggattcgaaagatttgcacagggacagttgattacgcttttctccgccacaaattactgcggaactgcgaacaatgcaggagctatattggtggttggcagaggattggtgattgttcccaagttaattcatcctcttccacctcccatcttatctccagagaactctccagaacattctggagacgacgcttggatgcaggagctgaatatccagagaccgccgactccaacacgaggcaggccacaaccagattttgacagaagctcgcttgcatacatctga

SEQ ID NO: 69844 - protein, 894 aa, Arabidopsis thaliana
  peptide (1)..(894): Ceres Seq. ID no. 1829972
MGSKPWLHPAPQYKTLETFWDDEDDAPGPRCAHTLTAVAATKTHGPRLILFGGATAIEGGSSSVPGIRLAGVTNTVHSYDILTRKWTRLKPAGEPPSPRAAHAAAAVGTMVVFQGGIGPAGHSTDDLYVLDMTNDKFKWHRVVVQGDGPGPRYGHVMDLVSQRYLVTVTGNDGKRALSDAWALDTAQKPYVWQRLNPDGDRPSARMYASGSARSDGMFLLCGGRDTLGAPLGDAYGLLMHRNGQWEWTLAPGVAPSPRYQHAAVFVGARLHVSGGVLRGGRVIDAEASVAGNGDVLDTAAGVWLDRNGQVTSARGSKGQIDQDPSFELMRRCRHGAASVGIRIYVHGGLRGDVLLDDFLVAENSTFQSDISSPLLASDRTQQSSTPRFSYAARPPSGSEPSFSMSEGLSLDENSLEKLTEASAAEAEVASSVWRAAQLGAGTLDEEPSTSDASSPIVESTTDGTANEGDVRLHPRAVVVAKETVGSLGGMVRQLSLDQFQNESRRMVPMNNSDVPQPTKKFTRQKSPQGLHKKVIAALLRPRNWKPPGNRKFFLDSYEVGELCYAAEQIFMHEQTVLQLKAPIKVFGDLHGQFGDLMRLFDEYGFPSTAGDITYIDYLFLGDYVDRGQHSLETITLLLALKIEYPENVHLIRGNHEAADINALFGFRLECIERMTKPALYFCQGENDGIWAWTRFNQLFNYLPLAALIENKIICMHGGIGRSISTVEQIEKIERPITMDAGSLVLMDLLWSDPTENDSIEGLRPNARGPGLVTFGPDRVTEFCKRNKLQLIIRAHECVMDGFERFAQGQLITLFSATNYCGTANNAGAILVVGRGLVIVPKLIHPLPPPILSPENSPEHSGDDAWMQELNIQRPPTPTRGRPQPDFDRSSLAYI

SEQ ID NO: 69845 - protein, 785 aa, Arabidopsis thaliana
  peptide (1)..(785): Ceres Seq. ID no. 1829973
MVVFQGGIGPAGHSTDDLYVLDMTNDKFKWHRVVVQGDGPGPRYGHVMDLVSQRYLVTVTGNDGKRALSDAWALDTAQKPYVWQRLNPDGDRPSARMYASGSARSDGMFLLCGGRDTLGAPLGDAYGLLMHRNGQWEWTLAPGVAPSPRYQHAAVFVGARLHVSGGVLRGGRVIDAEASVAGNGDVLDTAAGVWLDRNGQVTSARGSKGQIDQDPSFELMRRCRHGAASVGIRIYVHGGLRGDVLLDDFLVAENSTFQSDISSPLLASDRTQQSSTPRFSYAARPPSGSEPSFSMSEGLSLDENSLEKLTEASAAEAEVASSVWRAAQLGAGTLDEEPSTSDASSPIVESTTDGTANEGDVRLHPRAVVVAKETVGSLGGMVRQLSLDQFQNESRRMVPMNNSDVPQPTKKFTRQKSPQGLHKKVIAALLRPRNWKPPGNRKFFLDSYEVGELCYAAEQIFMHEQTVLQLKAPIKVFGDLHGQFGDLMRLFDEYGFPSTAGDITYIDYLFLGDYVDRGQHSLETITLLLALKIEYPENVHLIRGNHEAADINALFGFRLECIERMTKPALYFCQGENDGIWAWTRFNQLFNYLPLAALIENKIICMHGGIGRSISTVEQIEKIERPITMDAGSLVLMDLLWSDPTENDSIEGLRPNARGPGLVTFGPDRVTEFCKRNKLQLIIRAHECVMDGFERFAQGQLITLFSATNYCGTANNAGAILVVGRGLVIVPKLIHPLPPPILSPENSPEHSGDDAWMQELNIQRPPTPTRGRPQPDFDRSSLAYI

SEQ ID NO: 69846 - protein, 763 aa, Arabidopsis thaliana
  peptide (1)..(763): Ceres Seq. ID no. 1829974
MTNDKFKWHRVVVQGDGPGPRYGHVMDLVSQRYLVTVTGNDGKRALSDAWALDTAQKPYVWQRLNPDGDRPSARMYASGSARSDGMFLLCGGRDTLGAPLGDAYGLLMHRNGQWEWTLAPGVAPSPRYQHAAVFVGARLHVSGGVLRGGRVIDAEASVAGNGDVLDTAAGVWLDRNGQVTSARGSKGQIDQDPSFELMRRCRHGAASVGIRIYVHGGLRGDVLLDDFLVAENSTFQSDISSPLLASDRTQQSSTPRFSYAARPPSGSEPSFSMSEGLSLDENSLEKLTEASAAEAEVASSVWRAAQLGAGTLDEEPSTSDASSPIVESTTDGTANEGDVRLHPRAVVVAKETVGSLGGMVRQLSLDQFQNESRRMVPMNNSDVPQPTKKFTRQKSPQGLHKKVIAALLRPRNWKPPGNRKFFLDSYEVGELCYAAEQIFMHEQTVLQLKAPIKVFGDLHGQFGDLMRLFDEYGFPSTAGDITYIDYLFLGDYVDRGQHSLETITLLLALKIEYPENVHLIRGNHEAADINALFGFRLECIERMTKPALYFCQGENDGIWAWTRFNQLFNYLPLAALIENKIICMHGGIGRSISTVEQIEKIERPITMDAGSLVLMDLLWSDPTENDSIEGLRPNARGPGLVTFGPDRVTEFCKRNKLQLIIRAHECVMDGFERFAQGQLITLFSATNYCGTANNAGAILVVGRGLVIVPKLIHPLPPPILSPENSPEHSGDDAWMQELNIQRPPTPTRGRPQPDFDRSSLAYI

SEQ ID NO: 69847 - DNA, 2244 bp, Arabidopsis thaliana
  misc_feature (1)..(2244): Ceres Seq. ID no. 1830949
  misc_feature (1)..(2244): Ortholog of  Ceres SEQ ID NO 14311156 as cited in SEQ ID NO 54767
  misc_feature (1)..(2244): Ortholog of  Ceres SEQ ID NO 14303524 as cited in SEQ ID NO 59500
  misc_feature (1)..(2244): Ortholog of  Ceres SEQ ID NO 13658778 as cited in SEQ ID NO 66511
atggagcctcacagaaaacactcggtcggcgacacaaccctccacacgtgtcatccttgccggcgcaccattccatatagaatctacgccgtatttcacacgtgtggcatcatagccctcatgtatcaccatgtacactcacttctcacagcaaacacaactctaatcacgtctctccttctcctctccgatattgttctcgccttcatgtgggcaaccacaacttccctccggtataaaccggttcgccggaccgagtaccctgagaaatatgcagctgaaccggaggacttcccgaaactggacgtgtttatatgcacggctgatccgtacaaggagcctccgatgatggtggtcaacactgccttatcggtgatggcttacgagtatccgtccgataagatctcagtctacgtatcggacgatggaggttcgtcgttgactttgtttgctcttatggaggcagctaagttctctaagcattggttgcctttttgcaagaagaataatgttcaagatcggtctcctgaagtttatttctcatcaaagttacgttctcggagtgatgaagctgaaaatatcaagatgatgtacgaagacatgaagagtagagtagaacatgtggtggagagtggaaaagttgagactgcatttatcacatgcgatcaatttcgtggggtattcgatttgtggaccgacaaattcactcgtcatgaccatcccacaattattcaggtgctacaaaatagtgagaatgatatggacgataccaaaaaatatataatgccaaacctaatctacgtttcaagagagaagagtaaagtttcatcacatcatttcaaagccggtgctcttaataccttgctacgagtgtctggagtgatgacgaattcaccgatcattctaacactagactgtgatatgtattccaacgatccagcaacaccagttcgtgccctgtgctatttaacagaccctaaaatcaaaactggtttagggtttgtgcagtttcctcaaacatttcaaggaataagcaagaacgatatatatgcatgcgcgtataagcgtctctttgagatcaatatgattgggtttgatggtttaatgggcccgaatcatgtgggaactggttgtttcttcaatcgacgaggtttttatggagctccatctaatttaattttgcctgagatagatgaacttaagcccaatcgtattgtagataagcctatcaatgctcaagatgttttagcattggctcaccgtgtagcaggatgtatctacgagcttaacaccaattggggatcaaagtttgttataccgtataacttcattttatcattcaaaactatgcagattggattcagatatgggtctttagtagaagactactacacagggtataggctccattgtgaaggatggagatcagttttttgcagacccaaaagagcagcattttgcggagattccccaaaaagtctaattgatgtagtgagccaacaaaagagatgggccattgggcttcttgaagttgccatctcaaggtatagccccattacctatggtgtcaaatcaatgggtctagtaacgggagtaggctattgtcaatacgcatgttgggccttttggtcacttcctcttatcgtctatggattcttgccccaacttgctctcctttatcaatctagcgtctttcccaagtcatcagatccatggttttggctttacatcgttttgttcctcggtgcatatgggcaagatctactcgactttgtattagaaggaggaacttatggcggatggtggaacgatcaaagaatgtggtcgataagaggattctcttcacacctatttggcttcatagagttcactcttaaaaccctaaacctctccacgcatggattcaacgtcacaagcaaagccaacgatgacgaagaacaaagcaagaggtatgagaaagagatttttgagttcggcccctcttcgtccatgttcttgcccttgactacggttgccatcgttaacctccttgcttttgtctgggggctttatggtcttttcgcttggggagaaggactcgtccttgagctgatgctggcgagtttcgcggtggtgaactgcttgccgatctatgaggctatggtgttgaggatagacgatggaaaattaccaaaaagggtttgtttcgtagctggaatcctcacatttgtgctgattgtgtcaggttacgtcttcctcaagtaa

SEQ ID NO: 69848 - protein, 747 aa, Arabidopsis thaliana
  peptide (1)..(747): Ceres Seq. ID no. 1830950
MEPHRKHSVGDTTLHTCHPCRRTIPYRIYAVFHTCGIIALMYHHVHSLLTANTTLITSLLLLSDIVLAFMWATTTSLRYKPVRRTEYPEKYAAEPEDFPKLDVFICTADPYKEPPMMVVNTALSVMAYEYPSDKISVYVSDDGGSSLTLFALMEAAKFSKHWLPFCKKNNVQDRSPEVYFSSKLRSRSDEAENIKMMYEDMKSRVEHVVESGKVETAFITCDQFRGVFDLWTDKFTRHDHPTIIQVLQNSENDMDDTKKYIMPNLIYVSREKSKVSSHHFKAGALNTLLRVSGVMTNSPIILTLDCDMYSNDPATPVRALCYLTDPKIKTGLGFVQFPQTFQGISKNDIYACAYKRLFEINMIGFDGLMGPNHVGTGCFFNRRGFYGAPSNLILPEIDELKPNRIVDKPINAQDVLALAHRVAGCIYELNTNWGSKFVIPYNFILSFKTMQIGFRYGSLVEDYYTGYRLHCEGWRSVFCRPKRAAFCGDSPKSLIDVVSQQKRWAIGLLEVAISRYSPITYGVKSMGLVTGVGYCQYACWAFWSLPLIVYGFLPQLALLYQSSVFPKSSDPWFWLYIVLFLGAYGQDLLDFVLEGGTYGGWWNDQRMWSIRGFSSHLFGFIEFTLKTLNLSTHGFNVTSKANDDEEQSKRYEKEIFEFGPSSSMFLPLTTVAIVNLLAFVWGLYGLFAWGEGLVLELMLASFAVVNCLPIYEAMVLRIDDGKLPKRVCFVAGILTFVLIVSGYVFLK

SEQ ID NO: 69849 - protein, 707 aa, Arabidopsis thaliana
  peptide (1)..(707): Ceres Seq. ID no. 1830951
MYHHVHSLLTANTTLITSLLLLSDIVLAFMWATTTSLRYKPVRRTEYPEKYAAEPEDFPKLDVFICTADPYKEPPMMVVNTALSVMAYEYPSDKISVYVSDDGGSSLTLFALMEAAKFSKHWLPFCKKNNVQDRSPEVYFSSKLRSRSDEAENIKMMYEDMKSRVEHVVESGKVETAFITCDQFRGVFDLWTDKFTRHDHPTIIQVLQNSENDMDDTKKYIMPNLIYVSREKSKVSSHHFKAGALNTLLRVSGVMTNSPIILTLDCDMYSNDPATPVRALCYLTDPKIKTGLGFVQFPQTFQGISKNDIYACAYKRLFEINMIGFDGLMGPNHVGTGCFFNRRGFYGAPSNLILPEIDELKPNRIVDKPINAQDVLALAHRVAGCIYELNTNWGSKFVIPYNFILSFKTMQIGFRYGSLVEDYYTGYRLHCEGWRSVFCRPKRAAFCGDSPKSLIDVVSQQKRWAIGLLEVAISRYSPITYGVKSMGLVTGVGYCQYACWAFWSLPLIVYGFLPQLALLYQSSVFPKSSDPWFWLYIVLFLGAYGQDLLDFVLEGGTYGGWWNDQRMWSIRGFSSHLFGFIEFTLKTLNLSTHGFNVTSKANDDEEQSKRYEKEIFEFGPSSSMFLPLTTVAIVNLLAFVWGLYGLFAWGEGLVLELMLASFAVVNCLPIYEAMVLRIDDGKLPKRVCFVAGILTFVLIVSGYVFLK

SEQ ID NO: 69850 - protein, 678 aa, Arabidopsis thaliana
  peptide (1)..(678): Ceres Seq. ID no. 1830952
MWATTTSLRYKPVRRTEYPEKYAAEPEDFPKLDVFICTADPYKEPPMMVVNTALSVMAYEYPSDKISVYVSDDGGSSLTLFALMEAAKFSKHWLPFCKKNNVQDRSPEVYFSSKLRSRSDEAENIKMMYEDMKSRVEHVVESGKVETAFITCDQFRGVFDLWTDKFTRHDHPTIIQVLQNSENDMDDTKKYIMPNLIYVSREKSKVSSHHFKAGALNTLLRVSGVMTNSPIILTLDCDMYSNDPATPVRALCYLTDPKIKTGLGFVQFPQTFQGISKNDIYACAYKRLFEINMIGFDGLMGPNHVGTGCFFNRRGFYGAPSNLILPEIDELKPNRIVDKPINAQDVLALAHRVAGCIYELNTNWGSKFVIPYNFILSFKTMQIGFRYGSLVEDYYTGYRLHCEGWRSVFCRPKRAAFCGDSPKSLIDVVSQQKRWAIGLLEVAISRYSPITYGVKSMGLVTGVGYCQYACWAFWSLPLIVYGFLPQLALLYQSSVFPKSSDPWFWLYIVLFLGAYGQDLLDFVLEGGTYGGWWNDQRMWSIRGFSSHLFGFIEFTLKTLNLSTHGFNVTSKANDDEEQSKRYEKEIFEFGPSSSMFLPLTTVAIVNLLAFVWGLYGLFAWGEGLVLELMLASFAVVNCLPIYEAMVLRIDDGKLPKRVCFVAGILTFVLIVSGYVFLK

SEQ ID NO: 69851 - DNA, 2313 bp, Arabidopsis thaliana
  misc_feature (1)..(2313): Ceres Seq. ID no. 1830953
  misc_feature (1)..(2313): Ortholog of  Ceres SEQ ID NO 14311156 as cited in SEQ ID NO 54767
  misc_feature (1)..(2313): Ortholog of  Ceres SEQ ID NO 14303524 as cited in SEQ ID NO 59500
  misc_feature (1)..(2313): Ortholog of  Ceres SEQ ID NO 13658778 as cited in SEQ ID NO 66511
atggagactcatagaaagaactcggtcgtcggcaacatcctccacacgtgtcatccttgccggcgcaccattccatatagaatctacgccatatttcacacgtgtggcatcatagctctcatgtatcaccatgtacactcacttgtcacagcaaacaacactcttataacatgtcttcttctcctctccgatattgttctcgccttcatgtgggcaaccacaacttccctccgcttaaacccggttcatcggaccgagtgcccggagaaatatgcagctaaaccggaggactttccaaagctggacgtgtttatatgcacggctgatccgtacaaggagcctccaatgatggttgttaacaccgctttatcggtgatggcttacgagtatccgtcagataagatctcggtgtatgtatcggacgatggaggatcgtcgttgactttctttgctcttattgaagctgctaagttctctaagcagtggttgcccttttgcaagaagaataatgttcaagatcggtctcctgaagtttatttctcttcagagtcacattctcgaagtgatgaagctgaaaaccttaagacaaacatattaaaatgtgaggtggaacagatgatgtacgaagacatgaagagtagagtagaacatgtggtggagagtggaaaagttgaaactgcgtttatcacatgcgaccaatttcgtggggtattcgatttgtggaccgacaaattcagtcgtcatgaccatcccacaattattcaggtgttgcaaaatagcgagacagatatggacaataccagaaaatatataatgccaaacctaatctatgtttcaagagagaagagtaaagtttcaccacatcatttcaaagctggtgctcttaatactttgctacgagtatcaggggtgatgacaaattcaccgatcattctaacactagactgtgatatgtattcgaacgacccggcaacactggttcgtgctttgtgctatttaacagatcctgaaatcaaatccggtttaggatatgtgcagtttcctcagaaatttctaggaataagcaaaaatgatatatatgcttgtgaaaacaaacgcctcttcattattaatatggttgggtttgatggtctaatgggtccaactcatgtgggaactggttgtttctttaatcgacgagctttctatggacctccatatatgttgattttaccggagataaatgaactaaagccttatcggattgcggataagtctatcaaagcccaagatgttttgtcattagcacacaatgtagcaggatgtatctatgagtacaataccaattggggatccaagattggattcagatatgggtcattagtagaagactactacacagggtttatgctccattgtgaaggatggagatcagtattttgcaacccaaaaaaagctgcattttatggagattccccaaagtgcctagttgatcttgtgggtcaacaaatccgttgggcagttgggcttttcgaaatgtccttttcaaagtatagcccaattacctatggaatcaagtcactggaccttttaatgggtttaggttattgcaactctccgtttaagccattttggtcaattcctctgaccgtctatggacttttaccacagcttgcactcatttctggagttagtgtcttccccaaggcatctgatccgtggttttggctttacatcattttattctttggggcttatgcccaagatctatcagactttttattggaaggaggaacttatcggaaatggtggaacgatcaaagaatgttgatgataaaaggactctcttcattcttctttggttttatagagttcattctcaaaaccctaaacctctccacacctaagttcaacgtcaccagtaaagccaatgatgatgacgaacagaggaagcggtacgagcaagaaatctttgatttcggaacctcttcgtccatgttcttgcccttgaccacggttgccatagtgaatctgcttgcttttgtctgggggctttatggtattctcttctgcggaggagaactctaccttgagctgatgctggtgagcttcgcggtggtgaattgcttaccgatctacggggctatggtgttgaggaaagatgatggaaaattatcaaaaagaacttgtttcttagctgggaacctccacgttggttcttattgtgtcaagttacttcgtcctcaagtaacttcaccccttaggttaattcacaacaataatacgtctggctggttcaagcggaagaaacacaatatgaatgaatctgtgtaa

SEQ ID NO: 69852 - protein, 770 aa, Arabidopsis thaliana
  peptide (1)..(770): Ceres Seq. ID no. 1830954
METHRKNSVVGNILHTCHPCRRTIPYRIYAIFHTCGIIALMYHHVHSLVTANNTLITCLLLLSDIVLAFMWATTTSLRLNPVHRTECPEKYAAKPEDFPKLDVFICTADPYKEPPMMVVNTALSVMAYEYPSDKISVYVSDDGGSSLTFFALIEAAKFSKQWLPFCKKNNVQDRSPEVYFSSESHSRSDEAENLKTNILKCEVEQMMYEDMKSRVEHVVESGKVETAFITCDQFRGVFDLWTDKFSRHDHPTIIQVLQNSETDMDNTRKYIMPNLIYVSREKSKVSPHHFKAGALNTLLRVSGVMTNSPIILTLDCDMYSNDPATLVRALCYLTDPEIKSGLGYVQFPQKFLGISKNDIYACENKRLFIINMVGFDGLMGPTHVGTGCFFNRRAFYGPPYMLILPEINELKPYRIADKSIKAQDVLSLAHNVAGCIYEYNTNWGSKIGFRYGSLVEDYYTGFMLHCEGWRSVFCNPKKAAFYGDSPKCLVDLVGQQIRWAVGLFEMSFSKYSPITYGIKSLDLLMGLGYCNSPFKPFWSIPLTVYGLLPQLALISGVSVFPKASDPWFWLYIILFFGAYAQDLSDFLLEGGTYRKWWNDQRMLMIKGLSSFFFGFIEFILKTLNLSTPKFNVTSKANDDDEQRKRYEQEIFDFGTSSSMFLPLTTVAIVNLLAFVWGLYGILFCGGELYLELMLVSFAVVNCLPIYGAMVLRKDDGKLSKRTCFLAGNLHVGSYCVKLLRPQVTSPLRLIHNNNTSGWFKRKKHNMNESV

SEQ ID NO: 69853 - protein, 730 aa, Arabidopsis thaliana
  peptide (1)..(730): Ceres Seq. ID no. 1830955
MYHHVHSLVTANNTLITCLLLLSDIVLAFMWATTTSLRLNPVHRTECPEKYAAKPEDFPKLDVFICTADPYKEPPMMVVNTALSVMAYEYPSDKISVYVSDDGGSSLTFFALIEAAKFSKQWLPFCKKNNVQDRSPEVYFSSESHSRSDEAENLKTNILKCEVEQMMYEDMKSRVEHVVESGKVETAFITCDQFRGVFDLWTDKFSRHDHPTIIQVLQNSETDMDNTRKYIMPNLIYVSREKSKVSPHHFKAGALNTLLRVSGVMTNSPIILTLDCDMYSNDPATLVRALCYLTDPEIKSGLGYVQFPQKFLGISKNDIYACENKRLFIINMVGFDGLMGPTHVGTGCFFNRRAFYGPPYMLILPEINELKPYRIADKSIKAQDVLSLAHNVAGCIYEYNTNWGSKIGFRYGSLVEDYYTGFMLHCEGWRSVFCNPKKAAFYGDSPKCLVDLVGQQIRWAVGLFEMSFSKYSPITYGIKSLDLLMGLGYCNSPFKPFWSIPLTVYGLLPQLALISGVSVFPKASDPWFWLYIILFFGAYAQDLSDFLLEGGTYRKWWNDQRMLMIKGLSSFFFGFIEFILKTLNLSTPKFNVTSKANDDDEQRKRYEQEIFDFGTSSSMFLPLTTVAIVNLLAFVWGLYGILFCGGELYLELMLVSFAVVNCLPIYGAMVLRKDDGKLSKRTCFLAGNLHVGSYCVKLLRPQVTSPLRLIHNNNTSGWFKRKKHNMNESV

SEQ ID NO: 69854 - protein, 701 aa, Arabidopsis thaliana
  peptide (1)..(701): Ceres Seq. ID no. 1830956
MWATTTSLRLNPVHRTECPEKYAAKPEDFPKLDVFICTADPYKEPPMMVVNTALSVMAYEYPSDKISVYVSDDGGSSLTFFALIEAAKFSKQWLPFCKKNNVQDRSPEVYFSSESHSRSDEAENLKTNILKCEVEQMMYEDMKSRVEHVVESGKVETAFITCDQFRGVFDLWTDKFSRHDHPTIIQVLQNSETDMDNTRKYIMPNLIYVSREKSKVSPHHFKAGALNTLLRVSGVMTNSPIILTLDCDMYSNDPATLVRALCYLTDPEIKSGLGYVQFPQKFLGISKNDIYACENKRLFIINMVGFDGLMGPTHVGTGCFFNRRAFYGPPYMLILPEINELKPYRIADKSIKAQDVLSLAHNVAGCIYEYNTNWGSKIGFRYGSLVEDYYTGFMLHCEGWRSVFCNPKKAAFYGDSPKCLVDLVGQQIRWAVGLFEMSFSKYSPITYGIKSLDLLMGLGYCNSPFKPFWSIPLTVYGLLPQLALISGVSVFPKASDPWFWLYIILFFGAYAQDLSDFLLEGGTYRKWWNDQRMLMIKGLSSFFFGFIEFILKTLNLSTPKFNVTSKANDDDEQRKRYEQEIFDFGTSSSMFLPLTTVAIVNLLAFVWGLYGILFCGGELYLELMLVSFAVVNCLPIYGAMVLRKDDGKLSKRTCFLAGNLHVGSYCVKLLRPQVTSPLRLIHNNNTSGWFKRKKHNMNESV

SEQ ID NO: 69855 - DNA, 789 bp, Arabidopsis thaliana
  misc_feature (1)..(789): Ceres Seq. ID no. 1830981
  misc_feature (1)..(789): Ortholog of  Ceres SEQ ID NO 14304120 as cited in SEQ ID NO 58862
  misc_feature (1)..(789): Ortholog of  Ceres SEQ ID NO 13595658 as cited in SEQ ID NO 59888
  misc_feature (1)..(789): Ortholog of  Ceres SEQ ID NO 13661330 as cited in SEQ ID NO 61614
  misc_feature (1)..(789): Ortholog of  Ceres SEQ ID NO 13596025 as cited in SEQ ID NO 62024
  misc_feature (1)..(789): Ortholog of  Ceres SEQ ID NO 13662324 as cited in SEQ ID NO 62162
  misc_feature (1)..(789): Ortholog of  Ceres SEQ ID NO 12625713 as cited in SEQ ID NO 64160
  misc_feature (1)..(789): Ortholog of  Ceres SEQ ID NO 14303564 as cited in SEQ ID NO 65360
atgatcataacagtccttcattctcatgtctcattctatttcatcatccttagcttcctcttcttccatgctaaagcattgcatttggtaggaagtgatggtgctacaataaccatcgtaaatcgatgcagcttcaccgtgtggccgggaattttgtccaactccggaagcggcgatataggcaccaccggcttcgagctcgttcccggtggttcacgttcgttccaagctccagctagctggtcaggtcggttttgggcacgaaccggttgcaacttcaactcagacacaggacaaggcacctgcctaaccggggactgcggctctaaccaggtcgaatgtaacggtgcaggagcaaaaccgcccgctacactcgccgaattcacaatcgggtcaggtccagcagacccggcccgtaaacaagacttctacgacgtaagcctcgtggacggttacaacgttcccatgttggtggaagcaagtggcgggtcagaaggtacttgcttaaccacgggatgcgtaacggatctaaaccaaaaatgtccaacggagctccggttcgggtccgggtcagcatgcaaaagcgcgtgtgaggcttttggtagtccagaatattgttgtagtggcgcgtacgcctcacccaccgagtgtaaaccatcgatgtactcggagatattcaaatctgcgtgtccaagatcatatagctacgcgttcgacgatgctacaagtacgttcacatgcactgatgctgattacaccatcactttttgcccttccttgcctaggtag

SEQ ID NO: 69856 - protein, 262 aa, Arabidopsis thaliana
  peptide (1)..(262): Ceres Seq. ID no. 1830982
MIITVLHSHVSFYFIILSFLFFHAKALHLVGSDGATITIVNRCSFTVWPGILSNSGSGDIGTTGFELVPGGSRSFQAPASWSGRFWARTGCNFNSDTGQGTCLTGDCGSNQVECNGAGAKPPATLAEFTIGSGPADPARKQDFYDVSLVDGYNVPMLVEASGGSEGTCLTTGCVTDLNQKCPTELRFGSGSACKSACEAFGSPEYCCSGAYASPTECKPSMYSEIFKSACPRSYSYAFDDATSTFTCTDADYTITFCPSLPR

SEQ ID NO: 69857 - DNA, 1914 bp, Arabidopsis thaliana
  misc_feature (1)..(1914): Ceres Seq. ID no. 1832524
  misc_feature (1)..(1914): Ortholog of  Ceres SEQ ID NO 13598865 as cited in SEQ ID NO 0
atgtcgaaaaaaccgaagtctgttcatttctctacctcttctcctaaatcattcctttcttcttttccttcattcacttctctcccggcttctcctctcaaccagactttttctcagtcgatgatggaggaaaccgttgaggccgcagaatcaatcatcaagaaatgggatccgaactcaccatcctacacaaagatcatctctctgtttagtcatagcagaagagaggccaaagaattcatcagatgcatccgtgacttacgcagagccatgcactttcttatctctcagcactcaaaatctgccaagctagttcttgcacagcacctgatgcagattgctatggccaggctcgaaaaagagttcttccagattctgtcttcaaaccgagaccaacttgatcctgaatctgtctctggtcactcctccatttcaagcaattcagaatttgaagatgttatgcaatcttctgatgatgaagaagaagatgagctgaagaaggctggtgaaacgatcactaaggtcgaaaaagctgcagcacttgtgatgtcagacctcaaggtcatagcagagactatgatcagctgtggatatggtaaagagtgcataaagagctataagttgatcagaaagtcaattgtagatgaagggctacacttacttggtatcgaaaagtgcaagatctcccggttcaacagaatggactgggacgtgctcgagcatatgatcaagaactggatcaaagctgcaaagattggtgtcataacactcctccgcggagagaaacttctatgtgatcatgtcttctctgcttcaagtacaataagagagtcttgcttttacgagatagtgaacgaagcaggaatcaatcttttcaagttcccagaactcgttgcggagaaaaaaccatcgccagagaggatcttcaggctgatggatctctatgcagcaatctctgaccttagaccagacatagaactgatattccactttgactcagtagctgctgttaaaactctggtcctctcatcgctgaagaaactcaaggactcaatctacacaagtctcatggaatttgagtcaacaatacaaaaggattcttctaaagcactaactgcaggaggagggattcacaagctgactagatcaaccatgagtttcatatcatctctttctgaatacagccgtgtgttatcagagattcttgcagagcatccacttaagaaaaacacacgtatgctagaatcttatttcacagctccaatcttagaagatgaacacaacaaccacgcagtctcggtccatctagcttggctcatcttgattttcctatgcaaactagacatcaaagcagagagttacaaggatgtttccctctcttacctcttcctagtgaacaacattcagtttgtggttgataccgttcgttcaacacacctcaggaacctcctcggagacgactggctcacaaagcacgaagcaaaactcagaagctacgctgcaaactatgagatcgcagcgtgggccaatgtatacatatctttaccagagaaaacaagtagcagactatcaccagaggaagccaaaacacatttcaagaggtttcacgcggtattcgaagaagcttatatgaaacaatcatcatgtgtgataacagatgcaaaacttaggaacgagctaaaagtttccatagcaaagaaaatagtaccggaatacagagagttttacggtaagtacttgccaacgctgagtaaggagagaaacatagagatgctggtgagctttaagcctgataacttggagaactatctctcggatttgttccatggaacaccaatacttagtggctcttcttcttcttcttcctctttgtcttcttcatcttgtatctcacttggatgtgtaagaaactaa

SEQ ID NO: 69858 - protein, 637 aa, Arabidopsis thaliana
  peptide (1)..(637): Ceres Seq. ID no. 1832525
MSKKPKSVHFSTSSPKSFLSSFPSFTSLPASPLNQTFSQSMMEETVEAAESIIKKWDPNSPSYTKIISLFSHSRREAKEFIRCIRDLRRAMHFLISQHSKSAKLVLAQHLMQIAMARLEKEFFQILSSNRDQLDPESVSGHSSISSNSEFEDVMQSSDDEEEDELKKAGETITKVEKAAALVMSDLKVIAETMISCGYGKECIKSYKLIRKSIVDEGLHLLGIEKCKISRFNRMDWDVLEHMIKNWIKAAKIGVITLLRGEKLLCDHVFSASSTIRESCFYEIVNEAGINLFKFPELVAEKKPSPERIFRLMDLYAAISDLRPDIELIFHFDSVAAVKTLVLSSLKKLKDSIYTSLMEFESTIQKDSSKALTAGGGIHKLTRSTMSFISSLSEYSRVLSEILAEHPLKKNTRMLESYFTAPILEDEHNNHAVSVHLAWLILIFLCKLDIKAESYKDVSLSYLFLVNNIQFVVDTVRSTHLRNLLGDDWLTKHEAKLRSYAANYEIAAWANVYISLPEKTSSRLSPEEAKTHFKRFHAVFEEAYMKQSSCVITDAKLRNELKVSIAKKIVPEYREFYGKYLPTLSKERNIEMLVSFKPDNLENYLSDLFHGTPILSGSSSSSSSLSSSSCISLGCVRN

SEQ ID NO: 69859 - protein, 597 aa, Arabidopsis thaliana
  peptide (1)..(597): Ceres Seq. ID no. 1832526
MMEETVEAAESIIKKWDPNSPSYTKIISLFSHSRREAKEFIRCIRDLRRAMHFLISQHSKSAKLVLAQHLMQIAMARLEKEFFQILSSNRDQLDPESVSGHSSISSNSEFEDVMQSSDDEEEDELKKAGETITKVEKAAALVMSDLKVIAETMISCGYGKECIKSYKLIRKSIVDEGLHLLGIEKCKISRFNRMDWDVLEHMIKNWIKAAKIGVITLLRGEKLLCDHVFSASSTIRESCFYEIVNEAGINLFKFPELVAEKKPSPERIFRLMDLYAAISDLRPDIELIFHFDSVAAVKTLVLSSLKKLKDSIYTSLMEFESTIQKDSSKALTAGGGIHKLTRSTMSFISSLSEYSRVLSEILAEHPLKKNTRMLESYFTAPILEDEHNNHAVSVHLAWLILIFLCKLDIKAESYKDVSLSYLFLVNNIQFVVDTVRSTHLRNLLGDDWLTKHEAKLRSYAANYEIAAWANVYISLPEKTSSRLSPEEAKTHFKRFHAVFEEAYMKQSSCVITDAKLRNELKVSIAKKIVPEYREFYGKYLPTLSKERNIEMLVSFKPDNLENYLSDLFHGTPILSGSSSSSSSLSSSSCISLGCVRN

SEQ ID NO: 69860 - protein, 596 aa, Arabidopsis thaliana
  peptide (1)..(596): Ceres Seq. ID no. 1832527
MEETVEAAESIIKKWDPNSPSYTKIISLFSHSRREAKEFIRCIRDLRRAMHFLISQHSKSAKLVLAQHLMQIAMARLEKEFFQILSSNRDQLDPESVSGHSSISSNSEFEDVMQSSDDEEEDELKKAGETITKVEKAAALVMSDLKVIAETMISCGYGKECIKSYKLIRKSIVDEGLHLLGIEKCKISRFNRMDWDVLEHMIKNWIKAAKIGVITLLRGEKLLCDHVFSASSTIRESCFYEIVNEAGINLFKFPELVAEKKPSPERIFRLMDLYAAISDLRPDIELIFHFDSVAAVKTLVLSSLKKLKDSIYTSLMEFESTIQKDSSKALTAGGGIHKLTRSTMSFISSLSEYSRVLSEILAEHPLKKNTRMLESYFTAPILEDEHNNHAVSVHLAWLILIFLCKLDIKAESYKDVSLSYLFLVNNIQFVVDTVRSTHLRNLLGDDWLTKHEAKLRSYAANYEIAAWANVYISLPEKTSSRLSPEEAKTHFKRFHAVFEEAYMKQSSCVITDAKLRNELKVSIAKKIVPEYREFYGKYLPTLSKERNIEMLVSFKPDNLENYLSDLFHGTPILSGSSSSSSSLSSSSCISLGCVRN

SEQ ID NO: 69861 - DNA, 891 bp, Arabidopsis thaliana
  misc_feature (1)..(891): Ceres Seq. ID no. 1841049
  misc_feature (1)..(891): Ortholog of  Ceres SEQ ID NO 14304475 as cited in SEQ ID NO 53438
  misc_feature (1)..(891): Ortholog of  Ceres SEQ ID NO 15170555 as cited in SEQ ID NO 55313
  misc_feature (1)..(891): Ortholog of  Ceres SEQ ID NO 15224695 as cited in SEQ ID NO 65418
atgcctatagctatcaataccgagacggcaaagactcaacactatgaattaccaacagctttcttcgaacatgctcttggaagaaacatcaaatacagctgttgttactattcaaacgattcaagtagcttagaagaggcaggggaagctatgttggctctttcttgtgaaagagctaaagtggaagatggtcaaagtgttcttgatatcggatgtggctggggatctttgactttgtacattgcacgcaagtacagcaaatgcaagttaaccggtatctgcaactccaaaacgcagaaagcatttatcgatgagaaatgccggaaactcgggcttcagaatgtcgaaatcattgctgcggatattagcacttttgagcatgaagggacatacgatcggatattctccatcgaaatgttcgagcatatgaaaaactatggagagctactgaagaagataggaaactggatgaaggaagatagtcttctgtttgttcactatctctgccataagacatatgcttaccactttgaggatgtgaatgacgatgactggatcacaagacacttcttcagcggaggaacaatgccatcagcagatcttctcctatatttccaagtaatatacattataacttgtgaaaatgtttcgattatggatcattggctcgttaacgggacgcattatgcaaagacaagtgaagagtggctgaaaggaatggataaggagatagttgccgtaaaagagataatggaagtgacttatgggaaagaagaagcagtgaagtggacggtttactggagaaccttcttcatcgcgcttgctgagcttttcgcatacaacaatggagacgagtggatgattgcacacttcctcttcaagaagaaatga

SEQ ID NO: 69862 - protein, 296 aa, Arabidopsis thaliana
  peptide (1)..(296): Ceres Seq. ID no. 1841050
MPIAINTETAKTQHYELPTAFFEHALGRNIKYSCCYYSNDSSSLEEAGEAMLALSCERAKVEDGQSVLDIGCGWGSLTLYIARKYSKCKLTGICNSKTQKAFIDEKCRKLGLQNVEIIAADISTFEHEGTYDRIFSIEMFEHMKNYGELLKKIGNWMKEDSLLFVHYLCHKTYAYHFEDVNDDDWITRHFFSGGTMPSADLLLYFQVIYIITCENVSIMDHWLVNGTHYAKTSEEWLKGMDKEIVAVKEIMEVTYGKEEAVKWTVYWRTFFIALAELFAYNNGDEWMIAHFLFKKK

SEQ ID NO: 69863 - protein, 246 aa, Arabidopsis thaliana
  peptide (1)..(246): Ceres Seq. ID no. 1841051
MLALSCERAKVEDGQSVLDIGCGWGSLTLYIARKYSKCKLTGICNSKTQKAFIDEKCRKLGLQNVEIIAADISTFEHEGTYDRIFSIEMFEHMKNYGELLKKIGNWMKEDSLLFVHYLCHKTYAYHFEDVNDDDWITRHFFSGGTMPSADLLLYFQVIYIITCENVSIMDHWLVNGTHYAKTSEEWLKGMDKEIVAVKEIMEVTYGKEEAVKWTVYWRTFFIALAELFAYNNGDEWMIAHFLFKKK

SEQ ID NO: 69864 - protein, 158 aa, Arabidopsis thaliana
  peptide (1)..(158): Ceres Seq. ID no. 1841052
MFEHMKNYGELLKKIGNWMKEDSLLFVHYLCHKTYAYHFEDVNDDDWITRHFFSGGTMPSADLLLYFQVIYIITCENVSIMDHWLVNGTHYAKTSEEWLKGMDKEIVAVKEIMEVTYGKEEAVKWTVYWRTFFIALAELFAYNNGDEWMIAHFLFKKK

SEQ ID NO: 69865 - DNA, 1056 bp, Arabidopsis thaliana
  misc_feature (1)..(1056): Ceres Seq. ID no. 1843013
  misc_feature (1)..(1056): Ortholog of  Ceres SEQ ID NO 13595521 as cited in SEQ ID NO 59840
atgaaagaagctcttacgcagagctacgtcaagcaatgcgacttcgtagcagtcttcgatgctgatttccaacccgagcccgattatctcatccgcgctgtccctttccttgtccacaaccctgacgttgctctagttcaagcccgatggatatttgttaacgcgaacaaatgcttgatgacgaggatgcaagagatgtctctcaactatcatttcaaagtggaacaagaatcagggtcgactagacatgctttcttcgggtttaatggaaccgcgggtgtatggagaatatcggcaatggaagcagcaggaggatggaaatcaaggaccacagtagaggacatggacttggctgttcgtgttggtcttcatggctggaaatttgtctaccttaacgacctcacggtgagaaacgagcttccaagcaaatttaaggcctacagattccagcaacataggtggtcctgtggaccggcgaatctatttagaaaaatgacgatggagatcattttcaataagagagtatcaatttggaagaagttttatgtgatctacagctttttcttcgtaaggaaagtggcggtacacttcttgacattcttcttctactgtataattgtgccaacaagtgtcttcttccctgaaatccacatcccatcttggtctaccatttacgttccctctttgatcagtatcttccacaccctggcaactccaagatccttctacctcgtgatattttgggtcttgttcgagaatgtaatggctatgcatcgaaccaaaggtacgtgcattggcctacttgaaggaggaagagtaaacgaatgggttgtgaccgaaaaactaggagatgctttgaagagtaagctactctctcgggtagtccaaagaaaatcttgttatcaaagagtgaattccaaggaagtgatggtgggggtatacatattaggatgtgcactctatggcctgatctatgggcacacatggttacatttctatctttttcttcaggccacagcctttttcgtctccggttttggttttgtcggaacctaa

SEQ ID NO: 69866 - protein, 351 aa, Arabidopsis thaliana
  peptide (1)..(351): Ceres Seq. ID no. 1843014
MKEALTQSYVKQCDFVAVFDADFQPEPDYLIRAVPFLVHNPDVALVQARWIFVNANKCLMTRMQEMSLNYHFKVEQESGSTRHAFFGFNGTAGVWRISAMEAAGGWKSRTTVEDMDLAVRVGLHGWKFVYLNDLTVRNELPSKFKAYRFQQHRWSCGPANLFRKMTMEIIFNKRVSIWKKFYVIYSFFFVRKVAVHFLTFFFYCIIVPTSVFFPEIHIPSWSTIYVPSLISIFHTLATPRSFYLVIFWVLFENVMAMHRTKGTCIGLLEGGRVNEWVVTEKLGDALKSKLLSRVVQRKSCYQRVNSKEVMVGVYILGCALYGLIYGHTWLHFYLFLQATAFFVSGFGFVGT

SEQ ID NO: 69867 - protein, 292 aa, Arabidopsis thaliana
  peptide (1)..(292): Ceres Seq. ID no. 1843015
MTRMQEMSLNYHFKVEQESGSTRHAFFGFNGTAGVWRISAMEAAGGWKSRTTVEDMDLAVRVGLHGWKFVYLNDLTVRNELPSKFKAYRFQQHRWSCGPANLFRKMTMEIIFNKRVSIWKKFYVIYSFFFVRKVAVHFLTFFFYCIIVPTSVFFPEIHIPSWSTIYVPSLISIFHTLATPRSFYLVIFWVLFENVMAMHRTKGTCIGLLEGGRVNEWVVTEKLGDALKSKLLSRVVQRKSCYQRVNSKEVMVGVYILGCALYGLIYGHTWLHFYLFLQATAFFVSGFGFVGT

SEQ ID NO: 69868 - protein, 289 aa, Arabidopsis thaliana
  peptide (1)..(289): Ceres Seq. ID no. 1843016
MQEMSLNYHFKVEQESGSTRHAFFGFNGTAGVWRISAMEAAGGWKSRTTVEDMDLAVRVGLHGWKFVYLNDLTVRNELPSKFKAYRFQQHRWSCGPANLFRKMTMEIIFNKRVSIWKKFYVIYSFFFVRKVAVHFLTFFFYCIIVPTSVFFPEIHIPSWSTIYVPSLISIFHTLATPRSFYLVIFWVLFENVMAMHRTKGTCIGLLEGGRVNEWVVTEKLGDALKSKLLSRVVQRKSCYQRVNSKEVMVGVYILGCALYGLIYGHTWLHFYLFLQATAFFVSGFGFVGT

SEQ ID NO: 69869 - DNA, 1032 bp, Arabidopsis thaliana
  misc_feature (1)..(1032): Ceres Seq. ID no. 1989254
  misc_feature (1)..(1032): Ortholog of  Ceres SEQ ID NO 14301420 as cited in SEQ ID NO 56580
atggagaagaagaaggtgacgattccacaagtgtgtcatggccattcaagacctgttgttgatttgttctacagtccaattactcctgacggtttcttcctcatcagcgctagcaaagattcgcatccaatgttgagaaatggggaaactggagactggattggtacatttgaagggcataaaggtgcagtttggagttcttgtctggataacaatgcattacgtgctgcatctgcttctgccgatttttcagccaaactttgggatgcgttaacaggggatgtgctgcattcttttgagcacaagcatattgtccgagcatgcgccttctcagaggatacaaaatcgttgctcacaggagggtttgagaaaattcttcgtgtttttgacatgaatcggttggatgcacctcctacagaagttgataaatctcctggttctatcagaaccctcacatggcttcacagtgatcaaacaatattaagttcatgtactgatattggcggtgtaaggttatgggatgtgaggagtgggaaaattgtgcaaacgttagaaactaagtctcctgtcaccagtgctgaagtgagccaagatggacggtatataacaactgctgatgggtcaactgttaaattctgggacgctaaccattttggactagtgaagagttacgacatgccctgcaatattgaatctgcatcgttggagccaaagtctggtgaaaaatttgttgctggtggagaggatatgtgggtccgagtgtttgatttctacactggcgaagagattggatgcaacaagggacatcacggtccagtacactgcgttaggtttactcccactggtttatcctatgcctcgggatctgaagacgggacaatcagaatctggcaaacaacaccagcaaatcccgaagagaacgaaactagctcgaggagagtgaagcatagcgtggatgaagtttcaaagaagattgaaggctttcacatcaacaaagaaggaaaaaccgcagagaaaccatctgatacttaa

SEQ ID NO: 69870 - protein, 343 aa, Arabidopsis thaliana
  peptide (1)..(343): Ceres Seq. ID no. 2037535
MEKKKVTIPQVCHGHSRPVVDLFYSPITPDGFFLISASKDSHPMLRNGETGDWIGTFEGHKGAVWSSCLDNNALRAASASADFSAKLWDALTGDVLHSFEHKHIVRACAFSEDTKSLLTGGFEKILRVFDMNRLDAPPTEVDKSPGSIRTLTWLHSDQTILSSCTDIGGVRLWDVRSGKIVQTLETKSPVTSAEVSQDGRYITTADGSTVKFWDANHFGLVKSYDMPCNIESASLEPKSGEKFVAGGEDMWVRVFDFYTGEEIGCNKGHHGPVHCVRFTPTGLSYASGSEDGTIRIWQTTPANPEENETSSRRVKHSVDEVSKKIEGFHINKEGKTAEKPSDT

SEQ ID NO: 69871 - protein, 300 aa, Arabidopsis thaliana
  peptide (1)..(300): Ceres Seq. ID no. 2037536
MLRNGETGDWIGTFEGHKGAVWSSCLDNNALRAASASADFSAKLWDALTGDVLHSFEHKHIVRACAFSEDTKSLLTGGFEKILRVFDMNRLDAPPTEVDKSPGSIRTLTWLHSDQTILSSCTDIGGVRLWDVRSGKIVQTLETKSPVTSAEVSQDGRYITTADGSTVKFWDANHFGLVKSYDMPCNIESASLEPKSGEKFVAGGEDMWVRVFDFYTGEEIGCNKGHHGPVHCVRFTPTGLSYASGSEDGTIRIWQTTPANPEENETSSRRVKHSVDEVSKKIEGFHINKEGKTAEKPSDT

SEQ ID NO: 69872 - protein, 213 aa, Arabidopsis thaliana
  peptide (1)..(213): Ceres Seq. ID no. 2037537
MNRLDAPPTEVDKSPGSIRTLTWLHSDQTILSSCTDIGGVRLWDVRSGKIVQTLETKSPVTSAEVSQDGRYITTADGSTVKFWDANHFGLVKSYDMPCNIESASLEPKSGEKFVAGGEDMWVRVFDFYTGEEIGCNKGHHGPVHCVRFTPTGLSYASGSEDGTIRIWQTTPANPEENETSSRRVKHSVDEVSKKIEGFHINKEGKTAEKPSDT

SEQ ID NO: 69873 - DNA, 2124 bp, Arabidopsis thaliana
  misc_feature (1)..(2124): Ceres Seq. ID no. 1989451
  misc_feature (1)..(2124): Ortholog of  Ceres SEQ ID NO 13638292 as cited in SEQ ID NO 57738
atgttcatgatcaaatataacataaaaccaaaacaaagaaaaaagatagttgcaatgggtgtgattagaacctcaagaacgatggggttaggacagtgcatggtttatgttgtcgtcctaagtgccattgcggctacagtgacatcatacccttacacatcccctcaaactccacattacaattctccaagccatgaacacaaaatccctaagtacacaccacatccaaaaccatctatttacagctcttcaccacctccatcatactactctccttctccaaaggttgattacaagtctccaccaccatcatacgtttacagttccccaccaccaccatactactctccgtctccaaaggttgactacaagtccctaccacccccatacgtctacagttccccacccccaccatactactctccttcaccaaaggttaactacaagtctccaccgccaccatacgtctacagctctccaccaccaccatactacagtccatctccaaagggtgactacaagtctccaccacccccatacgtctacagttccccacccccaccatactactctccttctccaaaggttgactacaagtctccaccaccaccatacgtctacagctccccaccaccaccatactacagtccaactccaaaggttgactacaagtccccaccacccccatacgtctacagctccccacccccaccatactacagtccatctccaaaggttgactacaagtctccaccacccccatacgtgtacagctccccacccccaccatactactctccttcaccaaaggttaactacaagtctccaccaccaccatacgtctacggctctccaccaccaccatactacagtccatctccaaaggttgactacaagtccccaccacccccatacgtctacagttccccacccccaccatactactctccttcaccaaaggttaactacaagtctccaccaccaccatacgtctacggctctccaccaccaccatactacagtccatctccaaaggttgactacaagtccccaccacccccatacgtctacagttccccacccccaccatactactctccttctccaaaggttgactacaagtctccaccaccaccatacgtttacagctccacaccaccaccatactacagtccatcaccaaaggttgactacaagtccccaccacccccatacgtctacagttccccacccccaccatactactctccttctccaaaggttgactacaagtccccaccaccaccatacatctacagctccacaccactaccatactacagtccatctccaaaggttgactacaagtccccaccacccccatacgtctacagctccccacccccaccatactactctccttctccaaaggttgactacaagcctccaccaccaccatacgtctacagctccccaccaccaccatactacagtccatctccaaaggttgactacaagtccccaccacccccatacgtctacagcttcccacccccaccatactacagtccatctccaaaggttgactacaagtctccaccacccccatacgtctacagctctccacccccaccatactactctccttcaccaaaggttaactataagtctccaccaccaccatacgtctacagttctccaccaccaccgtactactctccttctccaaaagttgaatacaagtccccaccacccccatacatctatagttccccacctccaccatactacgctccttcaccaaaggttgactacaagtctccaccaccaccatacgtctatagctccccacccccaccatattactctccttctccaaaagttgactataagtctccacctccaccatacgtctatagctcaccaccaccaccatactactctccttctccaaaggttaactacaagtccccaccaccaccatatgtctacagctccccacctccaccgtactactccccttctcctaaggtcgactacaaatcttccccaccacaatatgtctacagctcaccacccacaccatactactctccttctcctaaagtcacttacaagtctcccccaccaccatatgtttactag

SEQ ID NO: 69874 - protein, 707 aa, Arabidopsis thaliana
  peptide (1)..(707): Ceres Seq. ID no. 2028021
MFMIKYNIKPKQRKKIVAMGVIRTSRTMGLGQCMVYVVVLSAIAATVTSYPYTSPQTPHYNSPSHEHKIPKYTPHPKPSIYSSSPPPSYYSPSPKVDYKSPPPSYVYSSPPPPYYSPSPKVDYKSLPPPYVYSSPPPPYYSPSPKVNYKSPPPPYVYSSPPPPYYSPSPKGDYKSPPPPYVYSSPPPPYYSPSPKVDYKSPPPPYVYSSPPPPYYSPTPKVDYKSPPPPYVYSSPPPPYYSPSPKVDYKSPPPPYVYSSPPPPYYSPSPKVNYKSPPPPYVYGSPPPPYYSPSPKVDYKSPPPPYVYSSPPPPYYSPSPKVNYKSPPPPYVYGSPPPPYYSPSPKVDYKSPPPPYVYSSPPPPYYSPSPKVDYKSPPPPYVYSSTPPPYYSPSPKVDYKSPPPPYVYSSPPPPYYSPSPKVDYKSPPPPYIYSSTPLPYYSPSPKVDYKSPPPPYVYSSPPPPYYSPSPKVDYKPPPPPYVYSSPPPPYYSPSPKVDYKSPPPPYVYSFPPPPYYSPSPKVDYKSPPPPYVYSSPPPPYYSPSPKVNYKSPPPPYVYSSPPPPYYSPSPKVEYKSPPPPYIYSSPPPPYYAPSPKVDYKSPPPPYVYSSPPPPYYSPSPKVDYKSPPPPYVYSSPPPPYYSPSPKVNYKSPPPPYVYSSPPPPYYSPSPKVDYKSSPPQYVYSSPPTPYYSPSPKVTYKSPPPPYVY

SEQ ID NO: 69875 - protein, 705 aa, Arabidopsis thaliana
  peptide (1)..(705): Ceres Seq. ID no. 2028022
MIKYNIKPKQRKKIVAMGVIRTSRTMGLGQCMVYVVVLSAIAATVTSYPYTSPQTPHYNSPSHEHKIPKYTPHPKPSIYSSSPPPSYYSPSPKVDYKSPPPSYVYSSPPPPYYSPSPKVDYKSLPPPYVYSSPPPPYYSPSPKVNYKSPPPPYVYSSPPPPYYSPSPKGDYKSPPPPYVYSSPPPPYYSPSPKVDYKSPPPPYVYSSPPPPYYSPTPKVDYKSPPPPYVYSSPPPPYYSPSPKVDYKSPPPPYVYSSPPPPYYSPSPKVNYKSPPPPYVYGSPPPPYYSPSPKVDYKSPPPPYVYSSPPPPYYSPSPKVNYKSPPPPYVYGSPPPPYYSPSPKVDYKSPPPPYVYSSPPPPYYSPSPKVDYKSPPPPYVYSSTPPPYYSPSPKVDYKSPPPPYVYSSPPPPYYSPSPKVDYKSPPPPYIYSSTPLPYYSPSPKVDYKSPPPPYVYSSPPPPYYSPSPKVDYKPPPPPYVYSSPPPPYYSPSPKVDYKSPPPPYVYSFPPPPYYSPSPKVDYKSPPPPYVYSSPPPPYYSPSPKVNYKSPPPPYVYSSPPPPYYSPSPKVEYKSPPPPYIYSSPPPPYYAPSPKVDYKSPPPPYVYSSPPPPYYSPSPKVDYKSPPPPYVYSSPPPPYYSPSPKVNYKSPPPPYVYSSPPPPYYSPSPKVDYKSSPPQYVYSSPPTPYYSPSPKVTYKSPPPPYVY

SEQ ID NO: 69876 - protein, 689 aa, Arabidopsis thaliana
  peptide (1)..(689): Ceres Seq. ID no. 2028023
MGVIRTSRTMGLGQCMVYVVVLSAIAATVTSYPYTSPQTPHYNSPSHEHKIPKYTPHPKPSIYSSSPPPSYYSPSPKVDYKSPPPSYVYSSPPPPYYSPSPKVDYKSLPPPYVYSSPPPPYYSPSPKVNYKSPPPPYVYSSPPPPYYSPSPKGDYKSPPPPYVYSSPPPPYYSPSPKVDYKSPPPPYVYSSPPPPYYSPTPKVDYKSPPPPYVYSSPPPPYYSPSPKVDYKSPPPPYVYSSPPPPYYSPSPKVNYKSPPPPYVYGSPPPPYYSPSPKVDYKSPPPPYVYSSPPPPYYSPSPKVNYKSPPPPYVYGSPPPPYYSPSPKVDYKSPPPPYVYSSPPPPYYSPSPKVDYKSPPPPYVYSSTPPPYYSPSPKVDYKSPPPPYVYSSPPPPYYSPSPKVDYKSPPPPYIYSSTPLPYYSPSPKVDYKSPPPPYVYSSPPPPYYSPSPKVDYKPPPPPYVYSSPPPPYYSPSPKVDYKSPPPPYVYSFPPPPYYSPSPKVDYKSPPPPYVYSSPPPPYYSPSPKVNYKSPPPPYVYSSPPPPYYSPSPKVEYKSPPPPYIYSSPPPPYYAPSPKVDYKSPPPPYVYSSPPPPYYSPSPKVDYKSPPPPYVYSSPPPPYYSPSPKVNYKSPPPPYVYSSPPPPYYSPSPKVDYKSSPPQYVYSSPPTPYYSPSPKVTYKSPPPPYVY

SEQ ID NO: 69877 - protein, 643 aa, Arabidopsis thaliana
  peptide (1)..(643): Ceres Seq. ID no. 2028024
MNTKSLSTHHIQNHLFTALHHLHHTTLLLQRLITSLHHHHTFTVPHHHHTTLRLQRLTTSPYHPHTSTVPHPHHTTLLHQRLTTSLHRHHTSTALHHHHTTVHLQRVTTSLHHPHTSTVPHPHHTTLLLQRLTTSLHHHHTSTAPHHHHTTVQLQRLTTSPHHPHTSTAPHPHHTTVHLQRLTTSLHHPHTCTAPHPHHTTLLHQRLTTSLHHHHTSTALHHHHTTVHLQRLTTSPHHPHTSTVPHPHHTTLLHQRLTTSLHHHHTSTALHHHHTTVHLQRLTTSPHHPHTSTVPHPHHTTLLLQRLTTSLHHHHTFTAPHHHHTTVHHQRLTTSPHHPHTSTVPHPHHTTLLLQRLTTSPHHHHTSTAPHHYHTTVHLQRLTTSPHHPHTSTAPHPHHTTLLLQRLTTSLHHHHTSTAPHHHHTTVHLQRLTTSPHHPHTSTASHPHHTTVHLQRLTTSLHHPHTSTALHPHHTTLLHQRLTISLHHHHTSTVLHHHRTTLLLQKLNTSPHHPHTSIVPHLHHTTLLHQRLTTSLHHHHTSIAPHPHHITLLLQKLTISLHLHHTSIAHHHHHTTLLLQRLTTSPHHHHMSTAPHLHRTTPLLLRSTTNLPHHNMSTAHHPHHTTLLLLKSLTSLPHHHMFT

SEQ ID NO: 69878 - DNA, 606 bp, Arabidopsis thaliana
  misc_feature (1)..(606): Ceres Seq. ID no. 1989481
  misc_feature (1)..(606): Ortholog of  Ceres SEQ ID NO 12609803 as cited in SEQ ID NO 51959
atgtacgggagaaaagggtatcagcttatcaaagattttgccaccggagagaagggtcagctcaaacctttcaacagcaaactctttgatgaaacaatcgaagagtgtgaccagaatcaccatcttatccagtccttgataaggaaaatgcaacaagaaggtttggatgttcagaacaacagaaacgctgaccactatggagcactaattcaccaccttgctttgatccggaacaagcgctgcctcatggcttatgtgtacaaccgagcagaaattgtgcgtgatttggcatggagagtagggcttgaacttctcgaccttccctctgaaatccaagagaagctcactacactagagaaggaatacttcaaaaaccattcggttgctctaaaatcatacatgggaaaagtaggaatcgagttgaatgtcgatatggtccctcctaaagatccttatatcaaggtcagaattttggatgatattgatgaaggaatcgtgctgagtgacaaaacaacaaattttgcccgtcattctatgcatttcctcaaacgtactgatgcggaaccatacattgctcggggccaaatggaggagctgacaggatga

SEQ ID NO: 69879 - protein, 201 aa, Arabidopsis thaliana
  peptide (1)..(201): Ceres Seq. ID no. 2028105
MYGRKGYQLIKDFATGEKGQLKPFNSKLFDETIEECDQNHHLIQSLIRKMQQEGLDVQNNRNADHYGALIHHLALIRNKRCLMAYVYNRAEIVRDLAWRVGLELLDLPSEIQEKLTTLEKEYFKNHSVALKSYMGKVGIELNVDMVPPKDPYIKVRILDDIDEGIVLSDKTTNFARHSMHFLKRTDAEPYIARGQMEELTG

SEQ ID NO: 69880 - protein, 152 aa, Arabidopsis thaliana
  peptide (1)..(152): Ceres Seq. ID no. 2028106
MQQEGLDVQNNRNADHYGALIHHLALIRNKRCLMAYVYNRAEIVRDLAWRVGLELLDLPSEIQEKLTTLEKEYFKNHSVALKSYMGKVGIELNVDMVPPKDPYIKVRILDDIDEGIVLSDKTTNFARHSMHFLKRTDAEPYIARGQMEELTG

SEQ ID NO: 69881 - protein, 119 aa, Arabidopsis thaliana
  peptide (1)..(119): Ceres Seq. ID no. 2028107
MAYVYNRAEIVRDLAWRVGLELLDLPSEIQEKLTTLEKEYFKNHSVALKSYMGKVGIELNVDMVPPKDPYIKVRILDDIDEGIVLSDKTTNFARHSMHFLKRTDAEPYIARGQMEELTG

SEQ ID NO: 69882 - DNA, 3909 bp, Arabidopsis thaliana
  misc_feature (1)..(3909): Ceres Seq. ID no. 1989489
  misc_feature (1)..(3909): Ortholog of  Ceres SEQ ID NO 13657677 as cited in SEQ ID NO 66119
atgttgaggtcacggcgttcacgttcccgtcacggtgcacaagcttgcgccgttatgtctgccgttcttcttctcgcttccgtctcacttctctacactcgtctctcactcttctcatctcactcgccgaatcacctccgctctggctccagcgaagacacagttttgttccctgattctgtcctcgtctcagattccgacgttgaaaccaccggcggaggaggaagaggatccactacctcaaccgaagacagaatcgacgagcacgacgatgcgatcgaagacgacggcgtttcgaatgaggaagatgagaatcaagacgcagagcaagagcaagaagtggatcttaatcggaacaaggctgcttcatcttctgggttttacttcgatcatgttaatggagttataagaagagctttcaataaacgatctatagatgaatgggattacgattacacaggttttagtatagattctgatagttcaggagataagagtagtagagctgcgtttggatctgatgatgttcctttagatgaatctattcgtaggaagattgttgaggttacgagtgtggaagatgccttgttgttaaaatctggtaaaaaggtctcgcctttgagacaaggttggggagattggtttgataagaaaggtgatttcttgaggagagatagaatgtttaagtcgaatattgagactttgaatccgttgaataatccaatgttgcaggatcctgatagtgttgggaatactggattgactagaggtgataaggttgtgcagaaatggaggttgaatcagattaagagaaacccttttatggcaaagaagccattgagtgttgtttcagagaagaaggaaccaaatgagtttaggttgctgagtagtgttggtgagatcaagagaggtgaacgtaagacattagacaatgatgagaaaattgagagagaggaacagaagaatgtggaatctgagaggaagcatgatgaggttacagaacatatgtatgcagatggaacaaaatggggatattatcctggtatagaaccgagtttgtcgttttcggattttatggattcgttttttagaaaggagaaatgttctatgagagtgtttatggtgtggaattcacctggttggatgtttagtgttagacatcaaagagggcttgagagcttactgtctcagcatcgagatgcttgtgttgtggttttctcagagactgttgagcttgatttcttcaggaacagctttgtgaaagatagttataaagttgctgtggcaatgcccaaccttgatgagttgctgcaggatactcctactcatgtatttgcttctgtatggtttgattggagaaaaactaagttctatcctactcactacagtgaactcgttcggcttgccgccctttataaatatggcggggtttacctcgattctgatgtgatagttttgggttcattatcgtctttgagaaatactattggcatggaggatcaggtagccggtgaatcactgaacggtgctgttatgtcattcgaaaagaaaagcccattcttacttgaatgcttgaacgagtactacttgacttacgatgataagtgtttgcgatgcaacggagcagatctcttgacccgagtagctaaacggtttttaaacgggaagaatcggcgtatgaatcaacaggagctgaacattcgaccgtcctctgttttcttcccaatcaactcacaacagatcacaaactattttgcataccctgcaatagaagatgagagatcgcagcaagacgaatcgttcaagaagatactcaatgagtccttaacgttccatttctggaacagcgtaacttcctcactgatccctgaacctgagagccttgtggctaaattgatctcttccgatcatgaatccagtgatttgtctcttccttcttctccatcatcgtcaccttctcaatgtctcgttaaatcggtctgttcattggtttgtacttcctatcttcgtcaaaaccatgtcgtatcatccccacaccgagtcaatctcgacttcgatgctaattctcttacccacgagcaagcgatcactgtggtggcttcactcgcgagcgaatctggttcgatggttgctctgtgcttcttctattgggcagtgggtttcgaaaagttccgacatttcatgagattgtatctcgtaaccgctgattctttgcttgctaatgggaatttgcagaaagctcacgaggttatgcgatgcatgcttagaaatttctcggagattgggagattgaatgaggctgttggtatggttatggatatgcagaatcaggggttaacacctagctcgataactatgaattgtgttctcgaaattgccgttgagttgggtttgattgaatatgcagagaatgtgttcgacgaaatgtctgtgagaggagtagttccggattctagttcttataagcttatggttattggttgttttagagatggtaagattcaggaagctgatagatggttaactggaatgattcaaagaggatttattcctgataacgctacatgtaccttgattctcactgcattgtgtgagaatggtttagtgaatagagcgatttggtatttccgtaagatgattgatctagggtttaagccaaacttgataaattttacgtctttgattgatgggttatgcaagaagggtagtatcaagcaggcttttgaaatgttagaggaaatggttagaaatgggtggaagccaaatgtgtatacacacacggctttaattgatgggctatgtaaaagaggatggactgagaaagcgtttaggctgttcctgaaactcgttcgtagtgatacttacaaacccaatgtgcatacttatacttcgatgattggtgggtattgcaaggaagataagttgaaccgtgcagagatgttgtttagtagaatgaaagaacagggtttgtttccgaacgtgaacacgtatacaacactcatcaatggtcactgtaaagcaggaagcttcggtagagcgtacgagttgatgaatttgatgggtgatgaaggttttatgccgaatatttatacgtataatgcagctattgacagtctctgtaagaaatcaagggcacctgaggcatatgagttgctgaataaagcattttcttgtggattagaagctgatggagttacttacactattcttattcaagaacagtgtaagcaaaatgacattaaccaagctcttgcttttttctgtcggatgaataagactggttttgaagccgatatgcgcctgaacaacatactgatagctgcattttgtaggcaaaagaaaatgaaggaaagtgagaggctttttcagttggtggtgagtcttggattgattccaacgaaggagacttatacgtctatgataagctgttattgtaaagaaggcgacattgatctggctttgaaatattttcacaacatgaagaggcatggttgtgttcctgatagcttcacttatggttcactaataagcggtctctgcaagaagtccatggtagatgaagcttgtaagctttacgaagcgatgattgacagaggtttatctcctcctgaggtaactcgagtcacattagcatatgagtattgtaagaggaatgattcagccaatgcaatgattctgcttgaacctttagataagaagctgtggattagaacggttaggacacttgttagaaagttatgtagcgagaagaaagttggagtggcagctctgttctttcagaaattgttggagaaggacagtagtgctgatcgtgttaccttagctgctttcactacagcttgttctgagtctggcaaaaacaaccttgttactgatttgactgagagaatctccagaggagtaggctag

SEQ ID NO: 69883 - protein, 1302 aa, Arabidopsis thaliana
  peptide (1)..(1302): Ceres Seq. ID no. 2028121
MLRSRRSRSRHGAQACAVMSAVLLLASVSLLYTRLSLFSSHSPNHLRSGSSEDTVLFPDSVLVSDSDVETTGGGGRGSTTSTEDRIDEHDDAIEDDGVSNEEDENQDAEQEQEVDLNRNKAASSSGFYFDHVNGVIRRAFNKRSIDEWDYDYTGFSIDSDSSGDKSSRAAFGSDDVPLDESIRRKIVEVTSVEDALLLKSGKKVSPLRQGWGDWFDKKGDFLRRDRMFKSNIETLNPLNNPMLQDPDSVGNTGLTRGDKVVQKWRLNQIKRNPFMAKKPLSVVSEKKEPNEFRLLSSVGEIKRGERKTLDNDEKIEREEQKNVESERKHDEVTEHMYADGTKWGYYPGIEPSLSFSDFMDSFFRKEKCSMRVFMVWNSPGWMFSVRHQRGLESLLSQHRDACVVVFSETVELDFFRNSFVKDSYKVAVAMPNLDELLQDTPTHVFASVWFDWRKTKFYPTHYSELVRLAALYKYGGVYLDSDVIVLGSLSSLRNTIGMEDQVAGESLNGAVMSFEKKSPFLLECLNEYYLTYDDKCLRCNGADLLTRVAKRFLNGKNRRMNQQELNIRPSSVFFPINSQQITNYFAYPAIEDERSQQDESFKKILNESLTFHFWNSVTSSLIPEPESLVAKLISSDHESSDLSLPSSPSSSPSQCLVKSVCSLVCTSYLRQNHVVSSPHRVNLDFDANSLTHEQAITVVASLASESGSMVALCFFYWAVGFEKFRHFMRLYLVTADSLLANGNLQKAHEVMRCMLRNFSEIGRLNEAVGMVMDMQNQGLTPSSITMNCVLEIAVELGLIEYAENVFDEMSVRGVVPDSSSYKLMVIGCFRDGKIQEADRWLTGMIQRGFIPDNATCTLILTALCENGLVNRAIWYFRKMIDLGFKPNLINFTSLIDGLCKKGSIKQAFEMLEEMVRNGWKPNVYTHTALIDGLCKRGWTEKAFRLFLKLVRSDTYKPNVHTYTSMIGGYCKEDKLNRAEMLFSRMKEQGLFPNVNTYTTLINGHCKAGSFGRAYELMNLMGDEGFMPNIYTYNAAIDSLCKKSRAPEAYELLNKAFSCGLEADGVTYTILIQEQCKQNDINQALAFFCRMNKTGFEADMRLNNILIAAFCRQKKMKESERLFQLVVSLGLIPTKETYTSMISCYCKEGDIDLALKYFHNMKRHGCVPDSFTYGSLISGLCKKSMVDEACKLYEAMIDRGLSPPEVTRVTLAYEYCKRNDSANAMILLEPLDKKLWIRTVRTLVRKLCSEKKVGVAALFFQKLLEKDSSADRVTLAAFTTACSESGKNNLVTDLTERISRGVG

SEQ ID NO: 69884 - protein, 1284 aa, Arabidopsis thaliana
  peptide (1)..(1284): Ceres Seq. ID no. 2028122
MSAVLLLASVSLLYTRLSLFSSHSPNHLRSGSSEDTVLFPDSVLVSDSDVETTGGGGRGSTTSTEDRIDEHDDAIEDDGVSNEEDENQDAEQEQEVDLNRNKAASSSGFYFDHVNGVIRRAFNKRSIDEWDYDYTGFSIDSDSSGDKSSRAAFGSDDVPLDESIRRKIVEVTSVEDALLLKSGKKVSPLRQGWGDWFDKKGDFLRRDRMFKSNIETLNPLNNPMLQDPDSVGNTGLTRGDKVVQKWRLNQIKRNPFMAKKPLSVVSEKKEPNEFRLLSSVGEIKRGERKTLDNDEKIEREEQKNVESERKHDEVTEHMYADGTKWGYYPGIEPSLSFSDFMDSFFRKEKCSMRVFMVWNSPGWMFSVRHQRGLESLLSQHRDACVVVFSETVELDFFRNSFVKDSYKVAVAMPNLDELLQDTPTHVFASVWFDWRKTKFYPTHYSELVRLAALYKYGGVYLDSDVIVLGSLSSLRNTIGMEDQVAGESLNGAVMSFEKKSPFLLECLNEYYLTYDDKCLRCNGADLLTRVAKRFLNGKNRRMNQQELNIRPSSVFFPINSQQITNYFAYPAIEDERSQQDESFKKILNESLTFHFWNSVTSSLIPEPESLVAKLISSDHESSDLSLPSSPSSSPSQCLVKSVCSLVCTSYLRQNHVVSSPHRVNLDFDANSLTHEQAITVVASLASESGSMVALCFFYWAVGFEKFRHFMRLYLVTADSLLANGNLQKAHEVMRCMLRNFSEIGRLNEAVGMVMDMQNQGLTPSSITMNCVLEIAVELGLIEYAENVFDEMSVRGVVPDSSSYKLMVIGCFRDGKIQEADRWLTGMIQRGFIPDNATCTLILTALCENGLVNRAIWYFRKMIDLGFKPNLINFTSLIDGLCKKGSIKQAFEMLEEMVRNGWKPNVYTHTALIDGLCKRGWTEKAFRLFLKLVRSDTYKPNVHTYTSMIGGYCKEDKLNRAEMLFSRMKEQGLFPNVNTYTTLINGHCKAGSFGRAYELMNLMGDEGFMPNIYTYNAAIDSLCKKSRAPEAYELLNKAFSCGLEADGVTYTILIQEQCKQNDINQALAFFCRMNKTGFEADMRLNNILIAAFCRQKKMKESERLFQLVVSLGLIPTKETYTSMISCYCKEGDIDLALKYFHNMKRHGCVPDSFTYGSLISGLCKKSMVDEACKLYEAMIDRGLSPPEVTRVTLAYEYCKRNDSANAMILLEPLDKKLWIRTVRTLVRKLCSEKKVGVAALFFQKLLEKDSSADRVTLAAFTTACSESGKNNLVTDLTERISRGVG

SEQ ID NO: 69885 - protein, 1076 aa, Arabidopsis thaliana
  peptide (1)..(1076): Ceres Seq. ID no. 2028123
MFKSNIETLNPLNNPMLQDPDSVGNTGLTRGDKVVQKWRLNQIKRNPFMAKKPLSVVSEKKEPNEFRLLSSVGEIKRGERKTLDNDEKIEREEQKNVESERKHDEVTEHMYADGTKWGYYPGIEPSLSFSDFMDSFFRKEKCSMRVFMVWNSPGWMFSVRHQRGLESLLSQHRDACVVVFSETVELDFFRNSFVKDSYKVAVAMPNLDELLQDTPTHVFASVWFDWRKTKFYPTHYSELVRLAALYKYGGVYLDSDVIVLGSLSSLRNTIGMEDQVAGESLNGAVMSFEKKSPFLLECLNEYYLTYDDKCLRCNGADLLTRVAKRFLNGKNRRMNQQELNIRPSSVFFPINSQQITNYFAYPAIEDERSQQDESFKKILNESLTFHFWNSVTSSLIPEPESLVAKLISSDHESSDLSLPSSPSSSPSQCLVKSVCSLVCTSYLRQNHVVSSPHRVNLDFDANSLTHEQAITVVASLASESGSMVALCFFYWAVGFEKFRHFMRLYLVTADSLLANGNLQKAHEVMRCMLRNFSEIGRLNEAVGMVMDMQNQGLTPSSITMNCVLEIAVELGLIEYAENVFDEMSVRGVVPDSSSYKLMVIGCFRDGKIQEADRWLTGMIQRGFIPDNATCTLILTALCENGLVNRAIWYFRKMIDLGFKPNLINFTSLIDGLCKKGSIKQAFEMLEEMVRNGWKPNVYTHTALIDGLCKRGWTEKAFRLFLKLVRSDTYKPNVHTYTSMIGGYCKEDKLNRAEMLFSRMKEQGLFPNVNTYTTLINGHCKAGSFGRAYELMNLMGDEGFMPNIYTYNAAIDSLCKKSRAPEAYELLNKAFSCGLEADGVTYTILIQEQCKQNDINQALAFFCRMNKTGFEADMRLNNILIAAFCRQKKMKESERLFQLVVSLGLIPTKETYTSMISCYCKEGDIDLALKYFHNMKRHGCVPDSFTYGSLISGLCKKSMVDEACKLYEAMIDRGLSPPEVTRVTLAYEYCKRNDSANAMILLEPLDKKLWIRTVRTLVRKLCSEKKVGVAALFFQKLLEKDSSADRVTLAAFTTACSESGKNNLVTDLTERISRGVG

SEQ ID NO: 69886 - DNA, 1431 bp, Arabidopsis thaliana
  misc_feature (1)..(1431): Ceres Seq. ID no. 1989637
  misc_feature (1)..(1431): Ortholog of  Ceres SEQ ID NO 12614670 as cited in SEQ ID NO 68565
atgttagagatcattacggtaagaaaagtgttcttgatcggattcttgatcttgatactgaattgggtatggagagctgtgaattgggtttggttaaggccaaagagactggagaaatatctgaagaaacaaggattctctgggaattcttatagaattttaatgggagatatgagagagagtaatcagatggatcaagttgctcactctcttcctcttcctctcgacgccgattttctccctcgcatgatgccttttctccaccacactgttctaaaacatgggaagaagtgtttcacatggtacggaccgtacccgaacgtgatagtaatggatccagagacactccgagagattatgtcaaaacacgaactctttccaaaaccaaagatcgggtcacataatcatgttttcctaagtggtcttctcaatcacgaaggtcctaaatggtccaagcatcgaagcattcttaatcctgcttttcgtattgataatttgaagagcatactaccagcatttaactcgagttgcaaagaaatgttagaagaatgggagagattagcctcagcaaaaggaacaatggaacttgattcatggactcactgtcatgacttaaccagaaacatgcttgctcgtgcttcttttggtgattcctacaaagatggtatcaagatcttcgaaatccaacaagaacagattgatcttggtctccttgctattcgagccgtctacattcctggctcaaagtttttgccaacaaagttcaacaggaggttgagagaaaccgaaagggacatgagggctatgtttaaagcgatgattgagacaaaagaggaggagataaaaagaggaagagctggtcaaaatgtgacttcttcattgtttgtttggacacttgttgctctaagccaacatcaagattggcaaaacaaagcaagagacgagatttctcaggccttcggtaacaacgaacccgatttcgaagggctaagccacctgaaagtcgtaacaatgatcctccatgaagttctacgactctattcaccagcttacttcacatgtcggataactaaacaagaagtgaagctagagagattctctttacctgaaggagttgtagtaacaataccaatgctcttggtgcaccatgattctgatctttggggagacgatgtgaaagagtttaagcccgagagattcgccaatggcgtggcgggtgcaaccaaaggaagactctccttcttgccatttagctcgggccctcggacttgtatcggtcagaacttttcgatgttgcaagctaaactcttcttggcaatggtacttcaaaggttcagtgttgaactctctccatcgtatactcatgctcctttcccagctgcaactacatttccacaacatggagctcatttgatcatccgaaaactgtag

SEQ ID NO: 69887 - protein, 476 aa, Arabidopsis thaliana
  peptide (1)..(476): Ceres Seq. ID no. 2028493
MLEIITVRKVFLIGFLILILNWVWRAVNWVWLRPKRLEKYLKKQGFSGNSYRILMGDMRESNQMDQVAHSLPLPLDADFLPRMMPFLHHTVLKHGKKCFTWYGPYPNVIVMDPETLREIMSKHELFPKPKIGSHNHVFLSGLLNHEGPKWSKHRSILNPAFRIDNLKSILPAFNSSCKEMLEEWERLASAKGTMELDSWTHCHDLTRNMLARASFGDSYKDGIKIFEIQQEQIDLGLLAIRAVYIPGSKFLPTKFNRRLRETERDMRAMFKAMIETKEEEIKRGRAGQNVTSSLFVWTLVALSQHQDWQNKARDEISQAFGNNEPDFEGLSHLKVVTMILHEVLRLYSPAYFTCRITKQEVKLERFSLPEGVVVTIPMLLVHHDSDLWGDDVKEFKPERFANGVAGATKGRLSFLPFSSGPRTCIGQNFSMLQAKLFLAMVLQRFSVELSPSYTHAPFPAATTFPQHGAHLIIRKL

SEQ ID NO: 69888 - protein, 422 aa, Arabidopsis thaliana
  peptide (1)..(422): Ceres Seq. ID no. 2028494
MGDMRESNQMDQVAHSLPLPLDADFLPRMMPFLHHTVLKHGKKCFTWYGPYPNVIVMDPETLREIMSKHELFPKPKIGSHNHVFLSGLLNHEGPKWSKHRSILNPAFRIDNLKSILPAFNSSCKEMLEEWERLASAKGTMELDSWTHCHDLTRNMLARASFGDSYKDGIKIFEIQQEQIDLGLLAIRAVYIPGSKFLPTKFNRRLRETERDMRAMFKAMIETKEEEIKRGRAGQNVTSSLFVWTLVALSQHQDWQNKARDEISQAFGNNEPDFEGLSHLKVVTMILHEVLRLYSPAYFTCRITKQEVKLERFSLPEGVVVTIPMLLVHHDSDLWGDDVKEFKPERFANGVAGATKGRLSFLPFSSGPRTCIGQNFSMLQAKLFLAMVLQRFSVELSPSYTHAPFPAATTFPQHGAHLIIRKL

SEQ ID NO: 69889 - protein, 419 aa, Arabidopsis thaliana
  peptide (1)..(419): Ceres Seq. ID no. 2028495
MRESNQMDQVAHSLPLPLDADFLPRMMPFLHHTVLKHGKKCFTWYGPYPNVIVMDPETLREIMSKHELFPKPKIGSHNHVFLSGLLNHEGPKWSKHRSILNPAFRIDNLKSILPAFNSSCKEMLEEWERLASAKGTMELDSWTHCHDLTRNMLARASFGDSYKDGIKIFEIQQEQIDLGLLAIRAVYIPGSKFLPTKFNRRLRETERDMRAMFKAMIETKEEEIKRGRAGQNVTSSLFVWTLVALSQHQDWQNKARDEISQAFGNNEPDFEGLSHLKVVTMILHEVLRLYSPAYFTCRITKQEVKLERFSLPEGVVVTIPMLLVHHDSDLWGDDVKEFKPERFANGVAGATKGRLSFLPFSSGPRTCIGQNFSMLQAKLFLAMVLQRFSVELSPSYTHAPFPAATTFPQHGAHLIIRKL

SEQ ID NO: 69890 - DNA, 846 bp, Arabidopsis thaliana
  misc_feature (1)..(846): Ceres Seq. ID no. 1989714
  misc_feature (1)..(846): Ortholog of  Ceres SEQ ID NO 14315896 as cited in SEQ ID NO 57597
atgacgacgttcaattactatttagcggagcatccaacgatcgttaacttccgttggagtccaacccaatcctacgcctccacgtggtctttcctcttcaccgccgtctcatcttacatcatcgccgccgtcactctccacctcctcctcctcataaccctctccctctctaaccgccgccgcggattctccctcggtccaatcccagctctacacagcttaaccatttccataatctccgccgtcatattcgtcggtatcctcctctccgccgcagcagagatcagagacacgcggtggctatggcgtcgcacccgcaccactgctctccaatggttcctctgctttcccgtaggtacacgcgcttcgggacgcgtgttcttctggtcatacgcgttttacctctcaagattccttcacttgttccgtactttcttctccgtgatacgacgtcgtaaactcagcttcttccagcttatcaaccagtcttctcttctctgtatctccttcctctggctcgaatattcccaatcctttcaggtggtagcgatactattaacgaccgtttcgtacgccgttgtgtacggttacaggttctggacggagattgggttgcgtggcgcgtgttttccgtttgtcggaaactgtcaagccattctgttagggtgtatgacggtttgccacgtaggcgtactctgtatacacctggtcaaacgcggcggttgtaacggtatcggtgcttggttgtttaactctgttcttaacgccgttatcacgttgctctacttgaagttttattgcaagacgcgttcaatgatgaccaaggctaatcacaacaccacataa

SEQ ID NO: 69891 - protein, 281 aa, Arabidopsis thaliana
  peptide (1)..(281): Ceres Seq. ID no. 2037343
MTTFNYYLAEHPTIVNFRWSPTQSYASTWSFLFTAVSSYIIAAVTLHLLLLITLSLSNRRRGFSLGPIPALHSLTISIISAVIFVGILLSAAAEIRDTRWLWRRTRTTALQWFLCFPVGTRASGRVFFWSYAFYLSRFLHLFRTFFSVIRRRKLSFFQLINQSSLLCISFLWLEYSQSFQVVAILLTTVSYAVVYGYRFWTEIGLRGACFPFVGNCQAILLGCMTVCHVGVLCIHLVKRGGCNGIGAWLFNSVLNAVITLLYLKFYCKTRSMMTKANHNTT

SEQ ID NO: 69892 - DNA, 1542 bp, Arabidopsis thaliana
  misc_feature (1)..(1542): Ceres Seq. ID no. 1989744
  misc_feature (1)..(1542): Ortholog of  Ceres SEQ ID NO 13638292 as cited in SEQ ID NO 57738
atgggtgtgattagaacctcaagaacgatggggttaggacagtgcatggtttatgttgtcgtcctaagtgccattgcggctacagtgacatcatacccttacacatcccctcaaactccacattacaattctccaagccatgaacacaaaatccctaagtacacaccacatccaaaaccatctatttacagctcttcaccacctccatcatactactctccttctccaaaggttgattacaagtctccaccaccatcatacgtttacagttccccaccaccaccatactactctccgtctccaaaggttgactacaagtccctaccacccccatacgtctacagttccccacccccaccatactactctccttcaccaaaggttaactacaagtctccaccgccaccatacgtctacagctctccaccaccaccatactacagtccatctccaaagggtgactacaagtctccaccacccccatacgtctacagttccccacccccaccatactactctccttctccaaaggttgactacaagtctccaccaccaccatacgtctacagctccccaccaccaccatactacagtccaactccaaaggttgactacaagtccccaccacccccatacgtctacagctccccacccccaccatactacagtccatctccaaaggttgactacaagtctccaccaccaccatacgtctacagctccccacccccaccatactactctccttcaccaaaggttaactacaagtctccaccaccaccatactacagatctccaccaccaccatactacagtccatctccaaaggttgattacaagtccccaccacccccatacgtctacagttccccacccccaccatactactctccttctccaaaggttgactacaagtctccaccaccaccatacgtctacagctccccaccaccaccatactacagtccaactccaaaggttgactacaagtccccaccacccccatacgtctacagctccccaccaccaccatactatagtccatctccaaaggttgactacaagtccccaccacccccatacgtctacagttccccacccccaccatactactctccttcaccaaaagttgactataagtctccaccaccaccatacgtctataactccccacccccaccatattactctccttctccaaaagttgactacaagtctccacctccaccatacatctataactccccacccccaccatattattctccttcaccaaaggtaaactacaaaactccaccaccaccatacgtctatagctccccaccaccaccatactactctccttctccaaaggttaactacaagtccccaccaccaccatatgtctacagctccccacctccaccgtactactccccttctccaaatgtcgactacaaatctcccccaccaccatatgtctacagctcaccacccacaccatactactctccttcttctaaagtcacttacaagtctcccccaccaccatatgtctactag

SEQ ID NO: 69893 - protein, 513 aa, Arabidopsis thaliana
  peptide (1)..(513): Ceres Seq. ID no. 2028747
MGVIRTSRTMGLGQCMVYVVVLSAIAATVTSYPYTSPQTPHYNSPSHEHKIPKYTPHPKPSIYSSSPPPSYYSPSPKVDYKSPPPSYVYSSPPPPYYSPSPKVDYKSLPPPYVYSSPPPPYYSPSPKVNYKSPPPPYVYSSPPPPYYSPSPKGDYKSPPPPYVYSSPPPPYYSPSPKVDYKSPPPPYVYSSPPPPYYSPTPKVDYKSPPPPYVYSSPPPPYYSPSPKVDYKSPPPPYVYSSPPPPYYSPSPKVNYKSPPPPYYRSPPPPYYSPSPKVDYKSPPPPYVYSSPPPPYYSPSPKVDYKSPPPPYVYSSPPPPYYSPTPKVDYKSPPPPYVYSSPPPPYYSPSPKVDYKSPPPPYVYSSPPPPYYSPSPKVDYKSPPPPYVYNSPPPPYYSPSPKVDYKSPPPPYIYNSPPPPYYSPSPKVNYKTPPPPYVYSSPPPPYYSPSPKVNYKSPPPPYVYSSPPPPYYSPSPNVDYKSPPPPYVYSSPPTPYYSPSSKVTYKSPPPPYVY

SEQ ID NO: 69894 - protein, 504 aa, Arabidopsis thaliana
  peptide (1)..(504): Ceres Seq. ID no. 2028748
MGLGQCMVYVVVLSAIAATVTSYPYTSPQTPHYNSPSHEHKIPKYTPHPKPSIYSSSPPPSYYSPSPKVDYKSPPPSYVYSSPPPPYYSPSPKVDYKSLPPPYVYSSPPPPYYSPSPKVNYKSPPPPYVYSSPPPPYYSPSPKGDYKSPPPPYVYSSPPPPYYSPSPKVDYKSPPPPYVYSSPPPPYYSPTPKVDYKSPPPPYVYSSPPPPYYSPSPKVDYKSPPPPYVYSSPPPPYYSPSPKVNYKSPPPPYYRSPPPPYYSPSPKVDYKSPPPPYVYSSPPPPYYSPSPKVDYKSPPPPYVYSSPPPPYYSPTPKVDYKSPPPPYVYSSPPPPYYSPSPKVDYKSPPPPYVYSSPPPPYYSPSPKVDYKSPPPPYVYNSPPPPYYSPSPKVDYKSPPPPYIYNSPPPPYYSPSPKVNYKTPPPPYVYSSPPPPYYSPSPKVNYKSPPPPYVYSSPPPPYYSPSPNVDYKSPPPPYVYSSPPTPYYSPSSKVTYKSPPPPYVY

SEQ ID NO: 69895 - protein, 498 aa, Arabidopsis thaliana
  peptide (1)..(498): Ceres Seq. ID no. 2028749
MVYVVVLSAIAATVTSYPYTSPQTPHYNSPSHEHKIPKYTPHPKPSIYSSSPPPSYYSPSPKVDYKSPPPSYVYSSPPPPYYSPSPKVDYKSLPPPYVYSSPPPPYYSPSPKVNYKSPPPPYVYSSPPPPYYSPSPKGDYKSPPPPYVYSSPPPPYYSPSPKVDYKSPPPPYVYSSPPPPYYSPTPKVDYKSPPPPYVYSSPPPPYYSPSPKVDYKSPPPPYVYSSPPPPYYSPSPKVNYKSPPPPYYRSPPPPYYSPSPKVDYKSPPPPYVYSSPPPPYYSPSPKVDYKSPPPPYVYSSPPPPYYSPTPKVDYKSPPPPYVYSSPPPPYYSPSPKVDYKSPPPPYVYSSPPPPYYSPSPKVDYKSPPPPYVYNSPPPPYYSPSPKVDYKSPPPPYIYNSPPPPYYSPSPKVNYKTPPPPYVYSSPPPPYYSPSPKVNYKSPPPPYVYSSPPPPYYSPSPNVDYKSPPPPYVYSSPPTPYYSPSSKVTYKSPPPPYVY

SEQ ID NO: 69896 - protein, 380 aa, Arabidopsis thaliana
  peptide (1)..(380): Ceres Seq. ID no. 2028750
MNTKSLSTHHIQNHLFTALHHLHHTTLLLQRLITSLHHHHTFTVPHHHHTTLRLQRLTTSPYHPHTSTVPHPHHTTLLHQRLTTSLHRHHTSTALHHHHTTVHLQRVTTSLHHPHTSTVPHPHHTTLLLQRLTTSLHHHHTSTAPHHHHTTVQLQRLTTSPHHPHTSTAPHPHHTTVHLQRLTTSLHHHHTSTAPHPHHTTLLHQRLTTSLHHHHTTDLHHHHTTVHLQRLITSPHHPHTSTVPHPHHTTLLLQRLTTSLHHHHTSTAPHHHHTTVQLQRLTTSPHHPHTSTAPHHHHTIVHLQRLTTSPHHPHTSTVPHPHHTTLLHQKLTISLHHHHTSITPHPHHITLLLQKLTTSLHLHHTSITPHPHHIILLHQR

SEQ ID NO: 69897 - DNA, 1047 bp, Arabidopsis thaliana
  misc_feature (1)..(1047): Ceres Seq. ID no. 2040308
  misc_feature (1)..(1047): Ortholog of  Ceres SEQ ID NO 13596944 as cited in SEQ ID NO 68910
atgggacacttcttgataggttttcttgtagttgtcttgtccgtgggaaatgttattgaagaagcaaatggtgaaatacctagaaccacattggaaaaaatagagaggatgaatcaaaagggtccttatttgggaattgtagctccaaacaactatgagcttaaccctcttctcggttctaaagcctatttcccatcttcttcgttgcctttcatcgatttcgcaggtcgaaaatttcgatttggaaaattatcaaaccaaccagtgataatcgtgatgtcgggattaggaatggtgaatgcaggagtaacaacacaattactggtgagcctctttaggctgaaaggagttttgcattatggaatcgctggaaacgcagatgttaaccttgagattggcgacgtcactattcctcaatattgggcacactctggcctttggaattggcagaggtatggagatgggattgacaacgaattagctcttgaatccggcggagactatactcgggaagttggttatctccagttttccaaatatagtaaccgaaccgataacttgcttaatcgagtttggtatcaaccggaagaaatcttcccggtcaccggaactcctgaagagcggcaacatgtgttctggattcccgttgacaagtcctacttgaaacttgcacgcaaactcgaggacacgaagctaccgcagtgtgttaacaccacatgccttcctcgaccaccgaaggtcaccatcgttaaacgtggtatgagtgcaagtgttttcatcgacaacgcagcttaccggactttcctcaactccaagtttaacgccaccgccgttgaaatggagagcgccgccgtggctctcatttcccaccagcaaaacctccctttcatcgtcatccgtgccctctccgatctcgctggcggcggctccgacgtctccaacgaggccagcatattcagcagcctcgccgcagaaaactccgtcgatattctcgttaagttcgttgctttgttgcctccacacgaaagcaagattcaatcagaatga

SEQ ID NO: 69898 - protein, 348 aa, Arabidopsis thaliana
  peptide (1)..(348): Ceres Seq. ID no. 2040309
MGHFLIGFLVVVLSVGNVIEEANGEIPRTTLEKIERMNQKGPYLGIVAPNNYELNPLLGSKAYFPSSSLPFIDFAGRKFRFGKLSNQPVIIVMSGLGMVNAGVTTQLLVSLFRLKGVLHYGIAGNADVNLEIGDVTIPQYWAHSGLWNWQRYGDGIDNELALESGGDYTREVGYLQFSKYSNRTDNLLNRVWYQPEEIFPVTGTPEERQHVFWIPVDKSYLKLARKLEDTKLPQCVNTTCLPRPPKVTIVKRGMSASVFIDNAAYRTFLNSKFNATAVEMESAAVALISHQQNLPFIVIRALSDLAGGGSDVSNEASIFSSLAAENSVDILVKFVALLPPHESKIQSE

SEQ ID NO: 69899 - protein, 312 aa, Arabidopsis thaliana
  peptide (1)..(312): Ceres Seq. ID no. 2040310
MNQKGPYLGIVAPNNYELNPLLGSKAYFPSSSLPFIDFAGRKFRFGKLSNQPVIIVMSGLGMVNAGVTTQLLVSLFRLKGVLHYGIAGNADVNLEIGDVTIPQYWAHSGLWNWQRYGDGIDNELALESGGDYTREVGYLQFSKYSNRTDNLLNRVWYQPEEIFPVTGTPEERQHVFWIPVDKSYLKLARKLEDTKLPQCVNTTCLPRPPKVTIVKRGMSASVFIDNAAYRTFLNSKFNATAVEMESAAVALISHQQNLPFIVIRALSDLAGGGSDVSNEASIFSSLAAENSVDILVKFVALLPPHESKIQSE

SEQ ID NO: 69900 - protein, 256 aa, Arabidopsis thaliana
  peptide (1)..(256): Ceres Seq. ID no. 2040311
MSGLGMVNAGVTTQLLVSLFRLKGVLHYGIAGNADVNLEIGDVTIPQYWAHSGLWNWQRYGDGIDNELALESGGDYTREVGYLQFSKYSNRTDNLLNRVWYQPEEIFPVTGTPEERQHVFWIPVDKSYLKLARKLEDTKLPQCVNTTCLPRPPKVTIVKRGMSASVFIDNAAYRTFLNSKFNATAVEMESAAVALISHQQNLPFIVIRALSDLAGGGSDVSNEASIFSSLAAENSVDILVKFVALLPPHESKIQSE

SEQ ID NO: 69901 - DNA, 1467 bp, Arabidopsis thaliana
  misc_feature (1)..(1467): Ceres Seq. ID no. 2041250
  misc_feature (1)..(1467): Ortholog of  Ceres SEQ ID NO 13504578 as cited in SEQ ID NO 59850
atgaaccaaacgagacgtaagagacgacctgattcatctctctctagactcgattctctttcgccggaaatgctctttccggccaaatctccgtcgctaacttcttctcgcatcagaaacatcttcttattactcatcttttgtttcatcatctacatcatcttctcctacggcaccaatttccgccgtgaacagatttcatcaatcgctcgatcgttatctgtgttctccactcgtcgccgtcacttactcttctcgatcgccgcttctcacgactcttggctccgtcgtagctcgtacgttcgtctctggtactctcctgaatctacacgcgccgtcgtgtttctcgatcgcggtggattggagtccgatctaactcttcctcctgtgattgtctctaaagacgtttctaggtttccttataatttccctggtggtctccgatcggcgattcgtgtggctcgtgttgttaaagagacggttgatagaggagataaagatgtgcggtggtttgttttcggtgatgatgatactgtcttctttgtagataatttggtgacggttttatctaagtatgatcaccggaagtggttttacgtcggaagtaattcggagttttatgatcagaatgttaggtattcgtttgatatggcgtttggtggtggtggatttgctattagtgcttcgcttgcgaaggttttagctaaggttttggattcttgtttgatgaggtattcacatatgtatggaagtgattctaggatcttctcttgcgtcgctgagcttggtgttacattaactcatgaacctggatttcatcagattgatgtcagagggaacatatttggtctgctatgtgcgcaccctttatctccattggtatctcttcatcacttggatgcagttgatccgttttttccaaaaaggaacaggacagaatccgtggctcatcttatcggagctgcaagttttgattccgggaggattttacagcagagtgtttgttatgattctttgaacacagtgactgtttcggttgtgtggggttacgcggttcaagtttatgaaggaaataaacttcttccggatcttctcacactgcaaaagacattttctacatggaggagagggtcaggggtccaaagcaactatatgttcagtacaagagaatatccgagggatccatgtgggagaccgctcgtctttttcttggacagtgtaggatcagatggaactgagggaacatggagtaactataacatccatagagttggacactgtcacagagcagaagctgttgagcgtctagaacgcatcagagttctgtctcctaaactggaacgcaacgttgaacagatgggtttgcctcgccgccaatgttgtgacatctcatcgccatataataagtcaatggtcattaatataaggcaatgcatgccggatgagctaatcgccatgaacacttag

SEQ ID NO: 69902 - protein, 488 aa, Arabidopsis thaliana
  peptide (1)..(488): Ceres Seq. ID no. 2041251
MNQTRRKRRPDSSLSRLDSLSPEMLFPAKSPSLTSSRIRNIFLLLIFCFIIYIIFSYGTNFRREQISSIARSLSVFSTRRRHLLFSIAASHDSWLRRSSYVRLWYSPESTRAVVFLDRGGLESDLTLPPVIVSKDVSRFPYNFPGGLRSAIRVARVVKETVDRGDKDVRWFVFGDDDTVFFVDNLVTVLSKYDHRKWFYVGSNSEFYDQNVRYSFDMAFGGGGFAISASLAKVLAKVLDSCLMRYSHMYGSDSRIFSCVAELGVTLTHEPGFHQIDVRGNIFGLLCAHPLSPLVSLHHLDAVDPFFPKRNRTESVAHLIGAASFDSGRILQQSVCYDSLNTVTVSVVWGYAVQVYEGNKLLPDLLTLQKTFSTWRRGSGVQSNYMFSTREYPRDPCGRPLVFFLDSVGSDGTEGTWSNYNIHRVGHCHRAEAVERLERIRVLSPKLERNVEQMGLPRRQCCDISSPYNKSMVINIRQCMPDELIAMNT

SEQ ID NO: 69903 - protein, 465 aa, Arabidopsis thaliana
  peptide (1)..(465): Ceres Seq. ID no. 2041252
MLFPAKSPSLTSSRIRNIFLLLIFCFIIYIIFSYGTNFRREQISSIARSLSVFSTRRRHLLFSIAASHDSWLRRSSYVRLWYSPESTRAVVFLDRGGLESDLTLPPVIVSKDVSRFPYNFPGGLRSAIRVARVVKETVDRGDKDVRWFVFGDDDTVFFVDNLVTVLSKYDHRKWFYVGSNSEFYDQNVRYSFDMAFGGGGFAISASLAKVLAKVLDSCLMRYSHMYGSDSRIFSCVAELGVTLTHEPGFHQIDVRGNIFGLLCAHPLSPLVSLHHLDAVDPFFPKRNRTESVAHLIGAASFDSGRILQQSVCYDSLNTVTVSVVWGYAVQVYEGNKLLPDLLTLQKTFSTWRRGSGVQSNYMFSTREYPRDPCGRPLVFFLDSVGSDGTEGTWSNYNIHRVGHCHRAEAVERLERIRVLSPKLERNVEQMGLPRRQCCDISSPYNKSMVINIRQCMPDELIAMNT

SEQ ID NO: 69904 - protein, 272 aa, Arabidopsis thaliana
  peptide (1)..(272): Ceres Seq. ID no. 2041253
MAFGGGGFAISASLAKVLAKVLDSCLMRYSHMYGSDSRIFSCVAELGVTLTHEPGFHQIDVRGNIFGLLCAHPLSPLVSLHHLDAVDPFFPKRNRTESVAHLIGAASFDSGRILQQSVCYDSLNTVTVSVVWGYAVQVYEGNKLLPDLLTLQKTFSTWRRGSGVQSNYMFSTREYPRDPCGRPLVFFLDSVGSDGTEGTWSNYNIHRVGHCHRAEAVERLERIRVLSPKLERNVEQMGLPRRQCCDISSPYNKSMVINIRQCMPDELIAMNT

SEQ ID NO: 69905 - DNA, 1737 bp, Arabidopsis thaliana
  misc_feature (1)..(1737): Ceres Seq. ID no. 2041423
  misc_feature (1)..(1737): Ortholog of  Ceres SEQ ID NO 15180350 as cited in SEQ ID NO 0
atggcacgtcttactctgtttctgtcttttctttctctagctttagtctctgttgtaaactgtcgtgttttaagttctgtgtctgaagataacaactcctccatcttggtctccgatggagtccaagacagatccagcaacgactttctcagtcttaatccgccaaatctttccgagagtgcttgtgttcatgtctacgggtttcttccatgtgcagacaatattgaaggatatgtcttccaagttttctcctttggttgtctattgataatcggtgaatactttttgtctaaaggaaggtctaagctctttgtcatcttcgaggtcggtttctttggcggaattatcttccctctacttacaatgttcccaagaattgcccttattctatccactggactgataggaagccgtgaaatagcaaactcgatgacgggtaataatgttgcagttactgttggatactctgtctttgctttgacaatgcaatggggagcttgtgttgtctttggcttgtctggtttgagatcagatgatcagtccataacttgtgacataagtagtccaagaagacaagttaagaagagcattaatctattgaagaacctagctggagctagcattagagcagatcctaagaacaagaaagcggcagggattatgctcctgactttattgcctttcgtcttagtcacattttcagagacatttcacataaaatcttgggatgacaatatggttttggtcacactcatattctctggttctgcaactgttctctactttgtttatttgtattttgataaagcggaccaagtgaagagcctagaatacgcgaagtttgagctcatgtcagaagttcataagcacttgcagaatttttcgcctcaaagccttataagaaatggacaactatgtcaagagagcttgaaaagtttgttcaaaaagtttgatgtcaacaaagacggaaagatccaagtatcagagttaaaagatctgacagtggactttggggtattagggagagtgaagtgtgatataaatgagcttgccactactttgcttgctgatttcgacagtaatagagatggtgagatagatgagactgaattcgccattggtatcgaaaaatggctgaaacagtacaaatttagcttcaatggcaccgagtcacaaggagaggacatagccgaggatgatggagttttgaaggtggaacaattactaaagggatgtctttttactaagttgcttacaaagagaaccttgaaagctgtcattgaagtcattatagggattactattgtcagctttcttgcaatgcctttcatgatgaatatcgaacttttgtcggtatcagctggagtgccttccttctatgttgtctttgcagtgatccctttggcaagaaacctaaagaacgctttgtctgctcacttctgtcgcaagaaagagaaagcaaaaattacatctgacacattttctgagatttatagagatgttacattgaacaatctgctggggataacaattatattggcgattgtgtacatcagaggattgacttgggattattcaacagaagttctcattattgtgatcgttggtctcataataggtgtaccggcctatgtgagatcgacttatccattttggatatgtgtcttggcctttgctctctacttcttctctcttatcctaatctatctccattccaagtctacctttaatgaataa

SEQ ID NO: 69906 - protein, 578 aa, Arabidopsis thaliana
  peptide (1)..(578): Ceres Seq. ID no. 2041424
MARLTLFLSFLSLALVSVVNCRVLSSVSEDNNSSILVSDGVQDRSSNDFLSLNPPNLSESACVHVYGFLPCADNIEGYVFQVFSFGCLLIIGEYFLSKGRSKLFVIFEVGFFGGIIFPLLTMFPRIALILSTGLIGSREIANSMTGNNVAVTVGYSVFALTMQWGACVVFGLSGLRSDDQSITCDISSPRRQVKKSINLLKNLAGASIRADPKNKKAAGIMLLTLLPFVLVTFSETFHIKSWDDNMVLVTLIFSGSATVLYFVYLYFDKADQVKSLEYAKFELMSEVHKHLQNFSPQSLIRNGQLCQESLKSLFKKFDVNKDGKIQVSELKDLTVDFGVLGRVKCDINELATTLLADFDSNRDGEIDETEFAIGIEKWLKQYKFSFNGTESQGEDIAEDDGVLKVEQLLKGCLFTKLLTKRTLKAVIEVIIGITIVSFLAMPFMMNIELLSVSAGVPSFYVVFAVIPLARNLKNALSAHFCRKKEKAKITSDTFSEIYRDVTLNNLLGITIILAIVYIRGLTWDYSTEVLIIVIVGLIIGVPAYVRSTYPFWICVLAFALYFFSLILIYLHSKSTFNE

SEQ ID NO: 69907 - protein, 457 aa, Arabidopsis thaliana
  peptide (1)..(457): Ceres Seq. ID no. 2041425
MFPRIALILSTGLIGSREIANSMTGNNVAVTVGYSVFALTMQWGACVVFGLSGLRSDDQSITCDISSPRRQVKKSINLLKNLAGASIRADPKNKKAAGIMLLTLLPFVLVTFSETFHIKSWDDNMVLVTLIFSGSATVLYFVYLYFDKADQVKSLEYAKFELMSEVHKHLQNFSPQSLIRNGQLCQESLKSLFKKFDVNKDGKIQVSELKDLTVDFGVLGRVKCDINELATTLLADFDSNRDGEIDETEFAIGIEKWLKQYKFSFNGTESQGEDIAEDDGVLKVEQLLKGCLFTKLLTKRTLKAVIEVIIGITIVSFLAMPFMMNIELLSVSAGVPSFYVVFAVIPLARNLKNALSAHFCRKKEKAKITSDTFSEIYRDVTLNNLLGITIILAIVYIRGLTWDYSTEVLIIVIVGLIIGVPAYVRSTYPFWICVLAFALYFFSLILIYLHSKSTFNE

SEQ ID NO: 69908 - protein, 435 aa, Arabidopsis thaliana
  peptide (1)..(435): Ceres Seq. ID no. 2041426
MTGNNVAVTVGYSVFALTMQWGACVVFGLSGLRSDDQSITCDISSPRRQVKKSINLLKNLAGASIRADPKNKKAAGIMLLTLLPFVLVTFSETFHIKSWDDNMVLVTLIFSGSATVLYFVYLYFDKADQVKSLEYAKFELMSEVHKHLQNFSPQSLIRNGQLCQESLKSLFKKFDVNKDGKIQVSELKDLTVDFGVLGRVKCDINELATTLLADFDSNRDGEIDETEFAIGIEKWLKQYKFSFNGTESQGEDIAEDDGVLKVEQLLKGCLFTKLLTKRTLKAVIEVIIGITIVSFLAMPFMMNIELLSVSAGVPSFYVVFAVIPLARNLKNALSAHFCRKKEKAKITSDTFSEIYRDVTLNNLLGITIILAIVYIRGLTWDYSTEVLIIVIVGLIIGVPAYVRSTYPFWICVLAFALYFFSLILIYLHSKSTFNE

SEQ ID NO: 69909 - DNA, 2520 bp, Arabidopsis thaliana
  misc_feature (1)..(2520): Ceres Seq. ID no. 2041497
  misc_feature (1)..(2520): Ortholog of  Ceres SEQ ID NO 12586556 as cited in SEQ ID NO 64667
  misc_feature (1)..(2520): Ortholog of  Ceres SEQ ID NO 13656797 as cited in SEQ ID NO 65756
  misc_feature (1)..(2520): Ortholog of  Ceres SEQ ID NO 13658498 as cited in SEQ ID NO 66557
  misc_feature (1)..(2520): Ortholog of  Ceres SEQ ID NO 13660894 as cited in SEQ ID NO 67475
atgccactttgcaataatttctccggcaatctcgtcgtcgccgttgctctcttctttgccggcgccctatatatcttcaactaccaaaactatgtcaacactctgagaacaacacagtatccggtagatgagctagaggcggccttgtatacggcagccgccggaaacaacaagacggtgataataacgatggtgaacaaagcgtacgtgaaggaggttggaagagggagtacgatgcttgatctgtttttggagagtttttgggaaggagaagggactctaccacttttggaccatctaatggtggtggcagtggatcaaacggcctatgatcgctgccgtttcaagaggcttcactgctacaagatggagactgaagatggggttgacttagagggagagaaagtattcatgtcaaaagatttcattgagatgatgtggagaaggactcgcttgatcctagacgttcttcgtcgtggctacaatgttattttcacggacacggacgtgatgtggctaaggagtccattgtctcggttaaacatgagcttggatatgcaaataagcgtggacagaattaacgtgggaggacagttgatcaacacgggattctaccacgtccggtctaacaacaagaccatctcactcttccaaaaatggtacgacatgaggctaaactcgacggggatgaaggaacaagacgttctcaagaatctcctagactccggcttcttcaaccagttaggtctcaacgttggcttccttagtaccaccgaattcagcggtttttgccaagacagtcctcacatgggcgttgtcactaccgtccatgctaactgctgcctccacatccctgccaaagtctttgatctcactcgtgttcttcgtgattggaaacgctacaaagcgtcacatgtcaacagcaaatggagccctcatcttaagtctaatgtaagcatgagaatcttcagattcacgtcaatctcaccgcggattttgccgtcgaatcattactcaacattcccgttgaaacaaaacgtgtcttctctctcaccggcgaaatacattgcgggagctttacaagaacatatcaattctccggccccaaaagctggtaagaagatacacgcagatatcatcaaaactgggtttcaaccagatttgaatatatccatcaaactactcattcttcatttaaaatgcggttgcttgagttatgcacgccaagtgttcgacgaattacccaagccaacattatcggcttacaactacatgattagtgggtacttgaagcatggattggtaaaggaattacttcttctagttcaacggatgtcatactctggggaaaaggcagatgggtacacgctttccatggttctaaaggcttctaatagtcgtggctcgactatgatactgccgcgtagcttatgtaggttggtccatgcccggattataaaatgtgatgttgagctagatgatgtgttgattactgcacttgttgatacttatgtgaagagtgggaagttggagtctgcaaggactgtgtttgaaacaatgaaagatgagaatgttgtgtgttgtacatcaatgatctcaggttacatgaatcaaggttttgtagaggatgcggaagagattttcaatactaccaaagtgaaggatattgtagtttacaatgctatggtggaaggtttcagcagatcaggtgaaactgctaagagatcagttgacatgtatatttcgatgcaacgagctggtttccatccgaatatttcaactttcgctagcgtgattggagcgtgttcggttttgacgtcccatgaagttggtcagcaagtgcacgctcagattatgaagagtggagtttacacgcatatcaaaatggggagctctttgttagacatgtatgccaaatgcggagggatcaatgatgcaagaagagtctttgaccaaatgcaagagaaaaacgtattttcgtggacttcgatgattgatggatatggaaagaatggaaaccctgaggaagcactcgaactcttcactaggatgaaggaattccgtatagaacccaattatgtaacctttcttggtgctctctctgcttgttcacattctggtttagtcgataaaggttatgagatctttgagagcatgcagagagattattccatgaaaccaaagatggaacactatgcttgcatagttgatctcatgggacgagctggagatttgaataaagctttcgaatttgctagggcgatgccggaaaggcctgactcagatatttgggcagctcttctcagttcttgtaatttgcatggtaatgttgaactcgcaagcatagctgcgagtgagcttttcaaactgaatgctgataaaagacctggagcttatttagctttatccaatgtctacgcttctaatgataaatgggacaatgtgagcaagatccgagaagtgatgaaaagaagaaggatatctaaaactattggtcgtagttggaccagcgaagattga

SEQ ID NO: 69910 - protein, 839 aa, Arabidopsis thaliana
  peptide (1)..(839): Ceres Seq. ID no. 2041498
MPLCNNFSGNLVVAVALFFAGALYIFNYQNYVNTLRTTQYPVDELEAALYTAAAGNNKTVIITMVNKAYVKEVGRGSTMLDLFLESFWEGEGTLPLLDHLMVVAVDQTAYDRCRFKRLHCYKMETEDGVDLEGEKVFMSKDFIEMMWRRTRLILDVLRRGYNVIFTDTDVMWLRSPLSRLNMSLDMQISVDRINVGGQLINTGFYHVRSNNKTISLFQKWYDMRLNSTGMKEQDVLKNLLDSGFFNQLGLNVGFLSTTEFSGFCQDSPHMGVVTTVHANCCLHIPAKVFDLTRVLRDWKRYKASHVNSKWSPHLKSNVSMRIFRFTSISPRILPSNHYSTFPLKQNVSSLSPAKYIAGALQEHINSPAPKAGKKIHADIIKTGFQPDLNISIKLLILHLKCGCLSYARQVFDELPKPTLSAYNYMISGYLKHGLVKELLLLVQRMSYSGEKADGYTLSMVLKASNSRGSTMILPRSLCRLVHARIIKCDVELDDVLITALVDTYVKSGKLESARTVFETMKDENVVCCTSMISGYMNQGFVEDAEEIFNTTKVKDIVVYNAMVEGFSRSGETAKRSVDMYISMQRAGFHPNISTFASVIGACSVLTSHEVGQQVHAQIMKSGVYTHIKMGSSLLDMYAKCGGINDARRVFDQMQEKNVFSWTSMIDGYGKNGNPEEALELFTRMKEFRIEPNYVTFLGALSACSHSGLVDKGYEIFESMQRDYSMKPKMEHYACIVDLMGRAGDLNKAFEFARAMPERPDSDIWAALLSSCNLHGNVELASIAASELFKLNADKRPGAYLALSNVYASNDKWDNVSKIREVMKRRRISKTIGRSWTSED

SEQ ID NO: 69911 - protein, 776 aa, Arabidopsis thaliana
  peptide (1)..(776): Ceres Seq. ID no. 2041499
MVNKAYVKEVGRGSTMLDLFLESFWEGEGTLPLLDHLMVVAVDQTAYDRCRFKRLHCYKMETEDGVDLEGEKVFMSKDFIEMMWRRTRLILDVLRRGYNVIFTDTDVMWLRSPLSRLNMSLDMQISVDRINVGGQLINTGFYHVRSNNKTISLFQKWYDMRLNSTGMKEQDVLKNLLDSGFFNQLGLNVGFLSTTEFSGFCQDSPHMGVVTTVHANCCLHIPAKVFDLTRVLRDWKRYKASHVNSKWSPHLKSNVSMRIFRFTSISPRILPSNHYSTFPLKQNVSSLSPAKYIAGALQEHINSPAPKAGKKIHADIIKTGFQPDLNISIKLLILHLKCGCLSYARQVFDELPKPTLSAYNYMISGYLKHGLVKELLLLVQRMSYSGEKADGYTLSMVLKASNSRGSTMILPRSLCRLVHARIIKCDVELDDVLITALVDTYVKSGKLESARTVFETMKDENVVCCTSMISGYMNQGFVEDAEEIFNTTKVKDIVVYNAMVEGFSRSGETAKRSVDMYISMQRAGFHPNISTFASVIGACSVLTSHEVGQQVHAQIMKSGVYTHIKMGSSLLDMYAKCGGINDARRVFDQMQEKNVFSWTSMIDGYGKNGNPEEALELFTRMKEFRIEPNYVTFLGALSACSHSGLVDKGYEIFESMQRDYSMKPKMEHYACIVDLMGRAGDLNKAFEFARAMPERPDSDIWAALLSSCNLHGNVELASIAASELFKLNADKRPGAYLALSNVYASNDKWDNVSKIREVMKRRRISKTIGRSWTSED

SEQ ID NO: 69912 - protein, 761 aa, Arabidopsis thaliana
  peptide (1)..(761): Ceres Seq. ID no. 2041500
MLDLFLESFWEGEGTLPLLDHLMVVAVDQTAYDRCRFKRLHCYKMETEDGVDLEGEKVFMSKDFIEMMWRRTRLILDVLRRGYNVIFTDTDVMWLRSPLSRLNMSLDMQISVDRINVGGQLINTGFYHVRSNNKTISLFQKWYDMRLNSTGMKEQDVLKNLLDSGFFNQLGLNVGFLSTTEFSGFCQDSPHMGVVTTVHANCCLHIPAKVFDLTRVLRDWKRYKASHVNSKWSPHLKSNVSMRIFRFTSISPRILPSNHYSTFPLKQNVSSLSPAKYIAGALQEHINSPAPKAGKKIHADIIKTGFQPDLNISIKLLILHLKCGCLSYARQVFDELPKPTLSAYNYMISGYLKHGLVKELLLLVQRMSYSGEKADGYTLSMVLKASNSRGSTMILPRSLCRLVHARIIKCDVELDDVLITALVDTYVKSGKLESARTVFETMKDENVVCCTSMISGYMNQGFVEDAEEIFNTTKVKDIVVYNAMVEGFSRSGETAKRSVDMYISMQRAGFHPNISTFASVIGACSVLTSHEVGQQVHAQIMKSGVYTHIKMGSSLLDMYAKCGGINDARRVFDQMQEKNVFSWTSMIDGYGKNGNPEEALELFTRMKEFRIEPNYVTFLGALSACSHSGLVDKGYEIFESMQRDYSMKPKMEHYACIVDLMGRAGDLNKAFEFARAMPERPDSDIWAALLSSCNLHGNVELASIAASELFKLNADKRPGAYLALSNVYASNDKWDNVSKIREVMKRRRISKTIGRSWTSED

SEQ ID NO: 69913 - DNA, 2493 bp, Arabidopsis thaliana
  misc_feature (1)..(2493): Ceres Seq. ID no. 2044245
  misc_feature (1)..(2493): Ortholog of  Ceres SEQ ID NO 15176941 as cited in SEQ ID NO 55559
  misc_feature (1)..(2493): Ortholog of  Ceres SEQ ID NO 13595658 as cited in SEQ ID NO 59888
  misc_feature (1)..(2493): Ortholog of  Ceres SEQ ID NO 13662324 as cited in SEQ ID NO 62162
atgacaacggcgatgatgatattcgcggttttggttacagtggtggaggtggaagcacagactgagtgcgtgagcaagatagttccctgcttcaggttcttgaacacgacaacaaagccgtcgacggattgttgcaactcgatcaaggaagcgatggagaaagattttagctgtctctgcaccatctacaacactcctggtttactcgctcagttcaacatcactacagatcaagctctcggtctcaaccttcgatgtggagtcaacactgatctatccgcttgttccggttctggtgctccaccaccaccacctgatctatttcctccaccttcagctcaaatgctccctccacctccagcaaaaggtgcttgtaagagtcgtaactttagtttgggcagttttcaacagtcacaacatttagtttggtcagatatgtacttaagatcagtatcttcgtcacctgcacctccatcgccaccttcttcatcccgaccacgtccattgccacgtccatcaatgtcaaggagctttacgatagaaaacaaatgccaatacaccatatggcctgcaacctacggctataggagatcactagaaacaaccggttttgttcttgagaaaggagagacgcgtaccatcaaagcgccgtcatcatggataggtcgtttctggggtaggacactctgctccaccaactcaacagggggtttctcatgtgccacgggagactgcacctccggaaaaatcaagtgcctcggtatccccatagatccaacaacagtggtcgagtttaacctcgcttcttacggtgtcgactattatgtcgtcaacgtcttcaatggttacaacctccctttgcttgtgacccccgagaacaaaaactgcagaagcattgaatgcgttattgacatgaacgagacatgtccctcggagctaatggtgaacagtagtggccttggatcgcaccatccaatagcctgcatgaccacttgtcagagataccagttgccagagctttgctgtatcggactctcttctggggtggtcgtaccaccgggaatatgcaagcggacgatctactcgcggacattcaataacgtgtgcccaagcgcttatagttacgcctacgacgttgataacagcagtttcacttgtccaaacttctccaactttgtcatcacgttttgtccgtctagctcaacggtcccagaggcaggaaacatcaatagctcaacggtcccagaggcaggaaacatcaaaactggaacagaagcaaaaggaaatattccattgaggttaaaactcatacttggagtttcatcagtattggctacaatgatcattattgtgattgtgggaaaggttagagcaaataatatgagaaagagtgatttgaatgagaagaacatggaagcagtggtaatgttgaaacgatttagttatgtacaagtcaagaagatgacaaaatcatttgagaatgttcttgggaaagggggatttggaactgtctataaagggaagttacctgatggcagccgagatgttgcagtgaagatcttgaaggagtcaaacgaggatggagaagacttcatcaatgaaatagctagcatgagtaggacatctcatgctaatatcgtttctctacttggattctgttatgaagggaggaagaaagctataatttacgagttgatgccgaatggatccctcgacaagttcatctccaagaatatgtcggcgaagatggaatggaaaacgttatacaacattgcggtaggtgtgtctcatggcctagaatacttgcatagccattgtgtatcaaggattgtacatttcgatataaagccacagaacatactcatagatggagacttatgccctaagatttcggatttcggtcttgctaagctttgcaaaaataatgaaagcatcatttcaatgctacatgcaagaggcaccatagggtacattgctccagaagtgttctcccagaattttggaggagtttctcataagtctgatgtgtatagttatggaatggtggttcttgagatgattggagcaaggaacataggaagagctcaaaatgctggatccagtaatacttcaatgtactttccagattggatttataaagatcttgagaaaggagaaatcatgagttttttggcagatcaaataaccgaagaagaagatgagaagatagtaaagaaaatggtattggtgggtctgtggtgtattcagaccaatccatatgatcgtccaccaatgagcaaagttgttgaaatgttagagggaagtctagaggctctccagattccacctaagcctcttttatgtttacccgcaataacagctccaataacagttgatgaagacattcaagagacttcaagcttcttgaaaccaagtcaagatacttcatattattccgaacaaatagttcaagatattgtagaagagaatcaagatagctcaagatcttcctaa

SEQ ID NO: 69914 - protein, 830 aa, Arabidopsis thaliana
  peptide (1)..(830): Ceres Seq. ID no. 2044246
MTTAMMIFAVLVTVVEVEAQTECVSKIVPCFRFLNTTTKPSTDCCNSIKEAMEKDFSCLCTIYNTPGLLAQFNITTDQALGLNLRCGVNTDLSACSGSGAPPPPPDLFPPPSAQMLPPPPAKGACKSRNFSLGSFQQSQHLVWSDMYLRSVSSSPAPPSPPSSSRPRPLPRPSMSRSFTIENKCQYTIWPATYGYRRSLETTGFVLEKGETRTIKAPSSWIGRFWGRTLCSTNSTGGFSCATGDCTSGKIKCLGIPIDPTTVVEFNLASYGVDYYVVNVFNGYNLPLLVTPENKNCRSIECVIDMNETCPSELMVNSSGLGSHHPIACMTTCQRYQLPELCCIGLSSGVVVPPGICKRTIYSRTFNNVCPSAYSYAYDVDNSSFTCPNFSNFVITFCPSSSTVPEAGNINSSTVPEAGNIKTGTEAKGNIPLRLKLILGVSSVLATMIIIVIVGKVRANNMRKSDLNEKNMEAVVMLKRFSYVQVKKMTKSFENVLGKGGFGTVYKGKLPDGSRDVAVKILKESNEDGEDFINEIASMSRTSHANIVSLLGFCYEGRKKAIIYELMPNGSLDKFISKNMSAKMEWKTLYNIAVGVSHGLEYLHSHCVSRIVHFDIKPQNILIDGDLCPKISDFGLAKLCKNNESIISMLHARGTIGYIAPEVFSQNFGGVSHKSDVYSYGMVVLEMIGARNIGRAQNAGSSNTSMYFPDWIYKDLEKGEIMSFLADQITEEEDEKIVKKMVLVGLWCIQTNPYDRPPMSKVVEMLEGSLEALQIPPKPLLCLPAITAPITVDEDIQETSSFLKPSQDTSYYSEQIVQDIVEENQDSSRSS

SEQ ID NO: 69915 - protein, 826 aa, Arabidopsis thaliana
  peptide (1)..(826): Ceres Seq. ID no. 2044247
MMIFAVLVTVVEVEAQTECVSKIVPCFRFLNTTTKPSTDCCNSIKEAMEKDFSCLCTIYNTPGLLAQFNITTDQALGLNLRCGVNTDLSACSGSGAPPPPPDLFPPPSAQMLPPPPAKGACKSRNFSLGSFQQSQHLVWSDMYLRSVSSSPAPPSPPSSSRPRPLPRPSMSRSFTIENKCQYTIWPATYGYRRSLETTGFVLEKGETRTIKAPSSWIGRFWGRTLCSTNSTGGFSCATGDCTSGKIKCLGIPIDPTTVVEFNLASYGVDYYVVNVFNGYNLPLLVTPENKNCRSIECVIDMNETCPSELMVNSSGLGSHHPIACMTTCQRYQLPELCCIGLSSGVVVPPGICKRTIYSRTFNNVCPSAYSYAYDVDNSSFTCPNFSNFVITFCPSSSTVPEAGNINSSTVPEAGNIKTGTEAKGNIPLRLKLILGVSSVLATMIIIVIVGKVRANNMRKSDLNEKNMEAVVMLKRFSYVQVKKMTKSFENVLGKGGFGTVYKGKLPDGSRDVAVKILKESNEDGEDFINEIASMSRTSHANIVSLLGFCYEGRKKAIIYELMPNGSLDKFISKNMSAKMEWKTLYNIAVGVSHGLEYLHSHCVSRIVHFDIKPQNILIDGDLCPKISDFGLAKLCKNNESIISMLHARGTIGYIAPEVFSQNFGGVSHKSDVYSYGMVVLEMIGARNIGRAQNAGSSNTSMYFPDWIYKDLEKGEIMSFLADQITEEEDEKIVKKMVLVGLWCIQTNPYDRPPMSKVVEMLEGSLEALQIPPKPLLCLPAITAPITVDEDIQETSSFLKPSQDTSYYSEQIVQDIVEENQDSSRSS

SEQ ID NO: 69916 - protein, 825 aa, Arabidopsis thaliana
  peptide (1)..(825): Ceres Seq. ID no. 2044248
MIFAVLVTVVEVEAQTECVSKIVPCFRFLNTTTKPSTDCCNSIKEAMEKDFSCLCTIYNTPGLLAQFNITTDQALGLNLRCGVNTDLSACSGSGAPPPPPDLFPPPSAQMLPPPPAKGACKSRNFSLGSFQQSQHLVWSDMYLRSVSSSPAPPSPPSSSRPRPLPRPSMSRSFTIENKCQYTIWPATYGYRRSLETTGFVLEKGETRTIKAPSSWIGRFWGRTLCSTNSTGGFSCATGDCTSGKIKCLGIPIDPTTVVEFNLASYGVDYYVVNVFNGYNLPLLVTPENKNCRSIECVIDMNETCPSELMVNSSGLGSHHPIACMTTCQRYQLPELCCIGLSSGVVVPPGICKRTIYSRTFNNVCPSAYSYAYDVDNSSFTCPNFSNFVITFCPSSSTVPEAGNINSSTVPEAGNIKTGTEAKGNIPLRLKLILGVSSVLATMIIIVIVGKVRANNMRKSDLNEKNMEAVVMLKRFSYVQVKKMTKSFENVLGKGGFGTVYKGKLPDGSRDVAVKILKESNEDGEDFINEIASMSRTSHANIVSLLGFCYEGRKKAIIYELMPNGSLDKFISKNMSAKMEWKTLYNIAVGVSHGLEYLHSHCVSRIVHFDIKPQNILIDGDLCPKISDFGLAKLCKNNESIISMLHARGTIGYIAPEVFSQNFGGVSHKSDVYSYGMVVLEMIGARNIGRAQNAGSSNTSMYFPDWIYKDLEKGEIMSFLADQITEEEDEKIVKKMVLVGLWCIQTNPYDRPPMSKVVEMLEGSLEALQIPPKPLLCLPAITAPITVDEDIQETSSFLKPSQDTSYYSEQIVQDIVEENQDSSRSS

SEQ ID NO: 69917 - DNA, 957 bp, Arabidopsis thaliana
  misc_feature (1)..(957): Ceres Seq. ID no. 2044354
  misc_feature (1)..(957): Ortholog of  Ceres SEQ ID NO 14314567 as cited in SEQ ID NO 52335
  misc_feature (1)..(957): Ortholog of  Ceres SEQ ID NO 13595437 as cited in SEQ ID NO 56562
  misc_feature (1)..(957): Ortholog of  Ceres SEQ ID NO 14315985 as cited in SEQ ID NO 57720
atggaaacaagcgacagaattagccctggtggtggtataggagcagaagttccatcagcgtatcatatggctccgagaccttcagatagccctgctaaccagtttatggggttgtctctccctcccatggaagccccaatgccttcttcaggggaagcctcagggaagaagaggagaggcagacctcgtaaatatgaagctaatggtgctcctttgccttcttcatcagttcctcttgtgaagaaacgagtaagaggcaagctcaatggttttgatatgaagaagatgcataagaccattgggttccattcttctggtgaaaggtttggtgttggtggtggtgttggtggtggtgttggatcaaatttcacgccgcatgtaatcacagtgaacactggtgaggatattactatgagaatcatctccttttcacaacaaggaccacgagctatttgtatcttatcagcaaatggagtgatatcaaacgttactcttcgccaacccgattcttgcggtggtactctcacctacgagggtcggtttgagatactgtctctgtctggttcattcatggaaacagagaatcaaggttcaaaaggtcggtctggtggcatgagtgtatctttggccggtcctgatggtcgtgttgtcggtggcggtgtcgctggcctgctcattgccgccactcctattcaggttgttgttggcagttttataacgagtgatcaacaagatcatcagaaaccgaggaagcaaagagtcgagcatgcccctgcagcagtcatgtcagtgcctcctcctccttctcctcctcctccggcggcttctgttttctcaccgacaaacccggacagagagcagccgccatcttcattcggtatctccagctggaccaacggacaggacatgccgagaaactcagccactgacatcaacatatctttaccagtcgactga

SEQ ID NO: 69918 - protein, 318 aa, Arabidopsis thaliana
  peptide (1)..(318): Ceres Seq. ID no. 2044355
METSDRISPGGGIGAEVPSAYHMAPRPSDSPANQFMGLSLPPMEAPMPSSGEASGKKRRGRPRKYEANGAPLPSSSVPLVKKRVRGKLNGFDMKKMHKTIGFHSSGERFGVGGGVGGGVGSNFTPHVITVNTGEDITMRIISFSQQGPRAICILSANGVISNVTLRQPDSCGGTLTYEGRFEILSLSGSFMETENQGSKGRSGGMSVSLAGPDGRVVGGGVAGLLIAATPIQVVVGSFITSDQQDHQKPRKQRVEHAPAAVMSVPPPPSPPPPAASVFSPTNPDREQPPSSFGISSWTNGQDMPRNSATDINISLPVD

SEQ ID NO: 69919 - protein, 296 aa, Arabidopsis thaliana
  peptide (1)..(296): Ceres Seq. ID no. 2044356
MAPRPSDSPANQFMGLSLPPMEAPMPSSGEASGKKRRGRPRKYEANGAPLPSSSVPLVKKRVRGKLNGFDMKKMHKTIGFHSSGERFGVGGGVGGGVGSNFTPHVITVNTGEDITMRIISFSQQGPRAICILSANGVISNVTLRQPDSCGGTLTYEGRFEILSLSGSFMETENQGSKGRSGGMSVSLAGPDGRVVGGGVAGLLIAATPIQVVVGSFITSDQQDHQKPRKQRVEHAPAAVMSVPPPPSPPPPAASVFSPTNPDREQPPSSFGISSWTNGQDMPRNSATDINISLPVD

SEQ ID NO: 69920 - protein, 283 aa, Arabidopsis thaliana
  peptide (1)..(283): Ceres Seq. ID no. 2044357
MGLSLPPMEAPMPSSGEASGKKRRGRPRKYEANGAPLPSSSVPLVKKRVRGKLNGFDMKKMHKTIGFHSSGERFGVGGGVGGGVGSNFTPHVITVNTGEDITMRIISFSQQGPRAICILSANGVISNVTLRQPDSCGGTLTYEGRFEILSLSGSFMETENQGSKGRSGGMSVSLAGPDGRVVGGGVAGLLIAATPIQVVVGSFITSDQQDHQKPRKQRVEHAPAAVMSVPPPPSPPPPAASVFSPTNPDREQPPSSFGISSWTNGQDMPRNSATDINISLPVD

SEQ ID NO: 69921 - DNA, 909 bp, Arabidopsis thaliana
  misc_feature (1)..(909): Ceres Seq. ID no. 2047346
  misc_feature (1)..(909): Ortholog of  Ceres SEQ ID NO 15180793 as cited in SEQ ID NO 0
atgttgtctttattctctgttgtttttacttttctagctctttttctcatccctggtctcttcatctctcggcgactaaatgttcctttgtcgttgacaaatatcctcagattcatcaaaatcatagcttctaaatacgatgatgaggaagaaaggaacgagaaacgtggtacaatgggagagaaacagaaacgagggagaaatataatgccaaagcatgtggcggttatattggacggaaacagacgttgggctgaaaaacgaggactcgggacatcggaaggccacgaggccggagcgagaaggctcatggagaatgctaaggattgtttcgctatggggacaaacactatctcactctttgctttctccaccgaaaattgggaaagaccagaggatgaagttaagtgcttgatggccttgtttgagaaatacttagcgtctgatatgccttacctccgaagtgataagatcaagatctcggttatcgggaaccgtacaaaactccccgagtcgcttctaggtttgatagaagaggtagaggaagctacaaagagttacgaagggaagaatctcattatagcaatagactatagtggaagatatgatatcttacaagcatgcaaaagtcttgcaaataaagtgaaagacgggctgattcaagtggaggacattaacgagaaggcgatggagaaagagttgttgacaaagtgtagcgaattcccaaaccctgacctgttgatcagaacaagcggagagcaaaggatcagtaacttctttttatggcaatctgcttacactgagctttactttccaactgttttgtggcctgattttggcgaagctgagtatcttgaggccttgacttggtatcagcaaaggcagaggcgattcggtcgacgagtttaa

SEQ ID NO: 69922 - protein, 302 aa, Arabidopsis thaliana
  peptide (1)..(302): Ceres Seq. ID no. 2047347
MLSLFSVVFTFLALFLIPGLFISRRLNVPLSLTNILRFIKIIASKYDDEEERNEKRGTMGEKQKRGRNIMPKHVAVILDGNRRWAEKRGLGTSEGHEAGARRLMENAKDCFAMGTNTISLFAFSTENWERPEDEVKCLMALFEKYLASDMPYLRSDKIKISVIGNRTKLPESLLGLIEEVEEATKSYEGKNLIIAIDYSGRYDILQACKSLANKVKDGLIQVEDINEKAMEKELLTKCSEFPNPDLLIRTSGEQRISNFFLWQSAYTELYFPTVLWPDFGEAEYLEALTWYQQRQRRFGRRV

SEQ ID NO: 69923 - protein, 244 aa, Arabidopsis thaliana
  peptide (1)..(244): Ceres Seq. ID no. 2047348
MGEKQKRGRNIMPKHVAVILDGNRRWAEKRGLGTSEGHEAGARRLMENAKDCFAMGTNTISLFAFSTENWERPEDEVKCLMALFEKYLASDMPYLRSDKIKISVIGNRTKLPESLLGLIEEVEEATKSYEGKNLIIAIDYSGRYDILQACKSLANKVKDGLIQVEDINEKAMEKELLTKCSEFPNPDLLIRTSGEQRISNFFLWQSAYTELYFPTVLWPDFGEAEYLEALTWYQQRQRRFGRRV

SEQ ID NO: 69924 - protein, 233 aa, Arabidopsis thaliana
  peptide (1)..(233): Ceres Seq. ID no. 2047349
MPKHVAVILDGNRRWAEKRGLGTSEGHEAGARRLMENAKDCFAMGTNTISLFAFSTENWERPEDEVKCLMALFEKYLASDMPYLRSDKIKISVIGNRTKLPESLLGLIEEVEEATKSYEGKNLIIAIDYSGRYDILQACKSLANKVKDGLIQVEDINEKAMEKELLTKCSEFPNPDLLIRTSGEQRISNFFLWQSAYTELYFPTVLWPDFGEAEYLEALTWYQQRQRRFGRRV

SEQ ID NO: 69925 - DNA, 1944 bp, Arabidopsis thaliana
  misc_feature (1)..(1944): Ceres Seq. ID no. 2047670
  misc_feature (1)..(1944): Ortholog of  Ceres SEQ ID NO 12586556 as cited in SEQ ID NO 64667
  misc_feature (1)..(1944): Ortholog of  Ceres SEQ ID NO 13660894 as cited in SEQ ID NO 67475
atgccttctttagatgttatcactccacaagcttatcttactccactggggtctcagagtatcaaccatgctaaatttttacaaatcccatggagacaatttgtcttcacaaagcctttaggtctctctaaatcaaccaaactcgacgaagccgtgacattgatagagaattcatcatcctcgccgtccaatctctccactcccgaagcttacacagaccttcttcatgcttgtatctccgctaaatcactccaccatggtataaaaatatgttctttgattctcaacaatcctagtctccgtcacaaccccaaattgctaagcaagctcattaccctattctcggtttgtcgccgattggatcttgctcggaaaatctttgacgatgtaactgattcgagtctacttactgagaaagtctgggcagctatggcgattgggtattctagaaacgggtcaccaagagacgctttgatcgtctatgtggatatgttgtgtagcttcattgagcctgggaatttttcgatatccgtggcgttgaaagcgtgcgtggatttgaaagatcttcgggttggtagaggaatccatgcccagattgtgaaacgaaaggagaaggttgaccaagtagtgtataatgtgctcttgaagctttatatggaaagtggcttatttgatgatgcacgtaaggtgttcgatggaatgtctgagagaaatgttgttacttggaattctttaatttcggtactcagtaagaaagttcgggttcatgagatgtttaatctgttcaggaagatgcaggaagagatgatcgggtttagttgggcgacgttgacgacaatattacccgcttgttcacgtgtcgctgctcttctcaccgggaaagagattcatgcacagattctgaaatcgaaagagaaacctgatgttccattgcttaattcattgatggatatgtatgggaaatgtggagaggttgagtattctcggagagtctttgatgtgatgttaactaaggatttggcttcatggaacataatgctaaactgttatgcaatcaacggaaatattgaagaagtgataaatctgtttgaatggatgatagagtcaggcgttgcaccagatgggattacctttgttgctttgttatctgggtgtagcgatacagggcttacggaatatggtctaagtttgtttgaacgcatgaaaacggagttcagagtttcaccggctttggagcattatgcttgtttggttgacatcttggggcgagctggtaagatcaaagaagcagtgaaggtgatagaaacaatgccatttaagccaagtgcgtccatttggggatcactgctcaactcttgcaggcttcatgggaatgtttcagtgggagagattgcagcaaaagagttgtttgttcttgaacctcataatccagggaactacgttatggtttctaacatatatgctgatgcaaagatgtgggacaatgtggataagattcgagagatgatgaaacaaagaggggtcaaaaaggaagctggttgcagttgggtacaggttaaagacaagattcaaatctttgttgcaggaggtggttatgagtttcgtaattctgatgagtataagaaagtatggacagaactacaagaagcaattgaaaaatccggttattcgcctaatacgagtgtggtgcttcatgatgttgatgaagaaaccaaagcaaattgggtttgtggacacagcgagagactcgcgacaacctactccctaatccacacaggtgaaggggttccaattaggattaccaagaatctcagagtatgtgcagactgtcattcatggatgaagattgtgtcacaagtaactaggagagtcatagtcctcagagacacaaaacgattccaccatttcgtcgacggaatctgctcatgtaaagactactggtga

SEQ ID NO: 69926 - protein, 647 aa, Arabidopsis thaliana
  peptide (1)..(647): Ceres Seq. ID no. 2047671
MPSLDVITPQAYLTPLGSQSINHAKFLQIPWRQFVFTKPLGLSKSTKLDEAVTLIENSSSSPSNLSTPEAYTDLLHACISAKSLHHGIKICSLILNNPSLRHNPKLLSKLITLFSVCRRLDLARKIFDDVTDSSLLTEKVWAAMAIGYSRNGSPRDALIVYVDMLCSFIEPGNFSISVALKACVDLKDLRVGRGIHAQIVKRKEKVDQVVYNVLLKLYMESGLFDDARKVFDGMSERNVVTWNSLISVLSKKVRVHEMFNLFRKMQEEMIGFSWATLTTILPACSRVAALLTGKEIHAQILKSKEKPDVPLLNSLMDMYGKCGEVEYSRRVFDVMLTKDLASWNIMLNCYAINGNIEEVINLFEWMIESGVAPDGITFVALLSGCSDTGLTEYGLSLFERMKTEFRVSPALEHYACLVDILGRAGKIKEAVKVIETMPFKPSASIWGSLLNSCRLHGNVSVGEIAAKELFVLEPHNPGNYVMVSNIYADAKMWDNVDKIREMMKQRGVKKEAGCSWVQVKDKIQIFVAGGGYEFRNSDEYKKVWTELQEAIEKSGYSPNTSVVLHDVDEETKANWVCGHSERLATTYSLIHTGEGVPIRITKNLRVCADCHSWMKIVSQVTRRVIVLRDTKRFHHFVDGICSCKDYW

SEQ ID NO: 69927 - protein, 504 aa, Arabidopsis thaliana
  peptide (1)..(504): Ceres Seq. ID no. 2047672
MAIGYSRNGSPRDALIVYVDMLCSFIEPGNFSISVALKACVDLKDLRVGRGIHAQIVKRKEKVDQVVYNVLLKLYMESGLFDDARKVFDGMSERNVVTWNSLISVLSKKVRVHEMFNLFRKMQEEMIGFSWATLTTILPACSRVAALLTGKEIHAQILKSKEKPDVPLLNSLMDMYGKCGEVEYSRRVFDVMLTKDLASWNIMLNCYAINGNIEEVINLFEWMIESGVAPDGITFVALLSGCSDTGLTEYGLSLFERMKTEFRVSPALEHYACLVDILGRAGKIKEAVKVIETMPFKPSASIWGSLLNSCRLHGNVSVGEIAAKELFVLEPHNPGNYVMVSNIYADAKMWDNVDKIREMMKQRGVKKEAGCSWVQVKDKIQIFVAGGGYEFRNSDEYKKVWTELQEAIEKSGYSPNTSVVLHDVDEETKANWVCGHSERLATTYSLIHTGEGVPIRITKNLRVCADCHSWMKIVSQVTRRVIVLRDTKRFHHFVDGICSCKDYW

SEQ ID NO: 69928 - protein, 484 aa, Arabidopsis thaliana
  peptide (1)..(484): Ceres Seq. ID no. 2047673
MLCSFIEPGNFSISVALKACVDLKDLRVGRGIHAQIVKRKEKVDQVVYNVLLKLYMESGLFDDARKVFDGMSERNVVTWNSLISVLSKKVRVHEMFNLFRKMQEEMIGFSWATLTTILPACSRVAALLTGKEIHAQILKSKEKPDVPLLNSLMDMYGKCGEVEYSRRVFDVMLTKDLASWNIMLNCYAINGNIEEVINLFEWMIESGVAPDGITFVALLSGCSDTGLTEYGLSLFERMKTEFRVSPALEHYACLVDILGRAGKIKEAVKVIETMPFKPSASIWGSLLNSCRLHGNVSVGEIAAKELFVLEPHNPGNYVMVSNIYADAKMWDNVDKIREMMKQRGVKKEAGCSWVQVKDKIQIFVAGGGYEFRNSDEYKKVWTELQEAIEKSGYSPNTSVVLHDVDEETKANWVCGHSERLATTYSLIHTGEGVPIRITKNLRVCADCHSWMKIVSQVTRRVIVLRDTKRFHHFVDGICSCKDYW

SEQ ID NO: 69929 - DNA, 1065 bp, Arabidopsis thaliana
  misc_feature (1)..(1065): Ceres Seq. ID no. 2048171
  misc_feature (1)..(1065): Ortholog of  Ceres SEQ ID NO 14303531 as cited in SEQ ID NO 67674
atggtgagtgaaacaccattgagagttactaatcgatctggagatggatcaaatggatcaaaggaagtatcgatcgcgagagagaagaatggtgaaaacgcagagatattcatcagcccgagattcaaatcagcggcggctatggcgggttgggacgaagaagatctgataatcgctagctttgtggtagatgatactcctgaaagaagttcttcaaagcgaaggagacgttccaatttgttgtttaaatcaaccccaccttctggttcttcaagaaggaatcagcgtgttaagcaaagtcttgttccgttacctgttattgatcttgataaagtaatcagacatgaagaagaaaaatctgcagagaagaagaaaaagaagagagagatggaaacagaaacaaaagaagagaagaaaatagataaagatgagaagagtttgtcagatcatgttgtgcttccttgcatagataagcttcgagatgaattgtcttgcgcgatttgtcttgagatttgctttgaacctagtactacaacttgtggacacagcttctgcaaaaagtgtttgcgatctgcggcggataagtgtggaaggaaatgccctaaatgcaggcaactaataggaaatggaagatattgtactgtcaatacggttctttggaacacaatccagcttttgttccctaaagaagtcgaagcacagagagctgcttctgctaacttgaaaggcaaggagacaccgagtcctagaaatccgaatcaaaggctaagaagcagaaacagggaaactgcattgtttcaagagaggttacaaagagaggatatttcgagattgcttgtatctgaagagagaagtgagaggagcgaaagaaggaggagaagtacaagtatgaggttggatcaaaatagggatgcagcattagcgatgcggttacagcgacaggagttcgcatcagcttttggcgcaacgacggctgaaacttcttcttcatcggtttctactctgtcgcgagcaagagctaacctgcaagctatggcgtcaagagctgttcgcaggcaaggatga

SEQ ID NO: 69930 - protein, 354 aa, Arabidopsis thaliana
  peptide (1)..(354): Ceres Seq. ID no. 2048172
MVSETPLRVTNRSGDGSNGSKEVSIAREKNGENAEIFISPRFKSAAAMAGWDEEDLIIASFVVDDTPERSSSKRRRRSNLLFKSTPPSGSSRRNQRVKQSLVPLPVIDLDKVIRHEEEKSAEKKKKKREMETETKEEKKIDKDEKSLSDHVVLPCIDKLRDELSCAICLEICFEPSTTTCGHSFCKKCLRSAADKCGRKCPKCRQLIGNGRYCTVNTVLWNTIQLLFPKEVEAQRAASANLKGKETPSPRNPNQRLRSRNRETALFQERLQREDISRLLVSEERSERSERRRRSTSMRLDQNRDAALAMRLQRQEFASAFGATTAETSSSSVSTLSRARANLQAMASRAVRRQG

SEQ ID NO: 69931 - protein, 307 aa, Arabidopsis thaliana
  peptide (1)..(307): Ceres Seq. ID no. 2048173
MAGWDEEDLIIASFVVDDTPERSSSKRRRRSNLLFKSTPPSGSSRRNQRVKQSLVPLPVIDLDKVIRHEEEKSAEKKKKKREMETETKEEKKIDKDEKSLSDHVVLPCIDKLRDELSCAICLEICFEPSTTTCGHSFCKKCLRSAADKCGRKCPKCRQLIGNGRYCTVNTVLWNTIQLLFPKEVEAQRAASANLKGKETPSPRNPNQRLRSRNRETALFQERLQREDISRLLVSEERSERSERRRRSTSMRLDQNRDAALAMRLQRQEFASAFGATTAETSSSSVSTLSRARANLQAMASRAVRRQG

SEQ ID NO: 69932 - protein, 225 aa, Arabidopsis thaliana
  peptide (1)..(225): Ceres Seq. ID no. 2048174
METETKEEKKIDKDEKSLSDHVVLPCIDKLRDELSCAICLEICFEPSTTTCGHSFCKKCLRSAADKCGRKCPKCRQLIGNGRYCTVNTVLWNTIQLLFPKEVEAQRAASANLKGKETPSPRNPNQRLRSRNRETALFQERLQREDISRLLVSEERSERSERRRRSTSMRLDQNRDAALAMRLQRQEFASAFGATTAETSSSSVSTLSRARANLQAMASRAVRRQG

SEQ ID NO: 69933 - DNA, 387 bp, Arabidopsis thaliana
  misc_feature (1)..(387): Ceres Seq. ID no. 2048175
  misc_feature (1)..(387): Ortholog of  Ceres SEQ ID NO 13648014 as cited in SEQ ID NO 20332
atggtgaaaagcatttgcatgctagaccatgtatcaggcggcggaatcaggatctcgaacgaactcaaaaacaagaaacttctttggatgcggtgttattccaaagatgacgtattaggtccaaagataataccaatcggacaacattatgaaaatctttttgatattaacttttggcatacaacgcgttttatgtgtactttgagacaaggtcctaactttagacactatcagaactttacagcattcaagcttttcgctatggcagatgaaggaggtctatgggattggagagcaagagaaaatgggatctatttaaagaaagaagctggcgagaaagttttaaacccaatttggatgcataaagagtatgcttggatttattaa

SEQ ID NO: 69934 - protein, 128 aa, Arabidopsis thaliana
  peptide (1)..(128): Ceres Seq. ID no. 2048176
MVKSICMLDHVSGGGIRISNELKNKKLLWMRCYSKDDVLGPKIIPIGQHYENLFDINFWHTTRFMCTLRQGPNFRHYQNFTAFKLFAMADEGGLWDWRARENGIYLKKEAGEKVLNPIWMHKEYAWIY

SEQ ID NO: 69935 - protein, 122 aa, Arabidopsis thaliana
  peptide (1)..(122): Ceres Seq. ID no. 2048177
MLDHVSGGGIRISNELKNKKLLWMRCYSKDDVLGPKIIPIGQHYENLFDINFWHTTRFMCTLRQGPNFRHYQNFTAFKLFAMADEGGLWDWRARENGIYLKKEAGEKVLNPIWMHKEYAWIY

SEQ ID NO: 69936 - protein, 99 aa, Arabidopsis thaliana
  peptide (1)..(99): Ceres Seq. ID no. 2048178
MRCYSKDDVLGPKIIPIGQHYENLFDINFWHTTRFMCTLRQGPNFRHYQNFTAFKLFAMADEGGLWDWRARENGIYLKKEAGEKVLNPIWMHKEYAWIY

SEQ ID NO: 69937 - DNA, 1467 bp, Arabidopsis thaliana
  misc_feature (1)..(1467): Ceres Seq. ID no. 2048304
  misc_feature (1)..(1467): Ortholog of  Ceres SEQ ID NO 13597407 as cited in SEQ ID NO 64106
atgggagacgaaccacttcttcagaaagtcaagattcaagaagacattgaatccgtaccacttcttcagaaagtcaagattcaagaagacattgaatccgttaaaggaattcgtgtaaataatgacggcgaagaggacggtcccgttactttaattctactcttcacaaccttcactgctctctgcggcaccttctcctatggcactgccgccggctttacatcaccagctcaaaccgggattatggcaggactgaacctttctttggctgagttctcattctttggggctgtcttaacaattggtggacttgtgggagccgcgatgtcgggaaaacttgctgatgtctttggtcgaagaggcgctttgggggtttcaaactcgttttgcatggccggctggcttatgattgccttctctcaggcgacttggtcccttgatatcggaagactttttctcggggtcgcagctggcgtagcttcttatgtggtaccagtctatattgttgaaatcgctcccaaaaaagttcgtggcacattctctgcgattaactcgcttgtgatgtgtgctagcgtcgccgtcacatacctccttggatcagtcatttcatggcaaaaattagctctcataagtacggttccttgtgtttttgaattcgtcggtttattcttcataccggagtctcctaggtggctgtctagaaacggtagggtgaaagaatcggaagtttcactccaacgcctacgaggaaacaacactgatatcactaaagaggctgcagaaatcaaaaaatatatggataatcttcaagaattcaaagaagatggttttttcgatctcttcaacccacgatattctcgtgtcgttactgttggaattggattgctagtactacaacaactgggaggtctcagtggctatacattttaccttagctcgatattcaaaaaatcggggtttcctaacaacgtaggagtaatgatggcgagcgtggtgcagtctgtgacaagcgttttaggaatagtaatcgtggataaatatggaagacgatcccttttaacggttgcgacgatcatgatgtgtttgggctcattaattacaggactatcgtttttgtttcagagctatggtttacttgaacattacaccccaatttcaacatttatgggagtgttggtttttctaacttcgattacaatcggaataggaggtattccatgggttatgatatctgagatgacaccgatcaatataaaaggatcagcagggacgctatgcaatttaactagctggtccagcaattggttcgtctcttacacattcaacttcctcttccagtggagctcttctggtgtgtttttcatatatacaatgatatcgggtgtgggcatcctgtttgtgatgaagatggtacccgagactcgaggtcgttcgctcgaagaaattcaagctgccattacccgataa

SEQ ID NO: 69938 - protein, 488 aa, Arabidopsis thaliana
  peptide (1)..(488): Ceres Seq. ID no. 2048305
MGDEPLLQKVKIQEDIESVPLLQKVKIQEDIESVKGIRVNNDGEEDGPVTLILLFTTFTALCGTFSYGTAAGFTSPAQTGIMAGLNLSLAEFSFFGAVLTIGGLVGAAMSGKLADVFGRRGALGVSNSFCMAGWLMIAFSQATWSLDIGRLFLGVAAGVASYVVPVYIVEIAPKKVRGTFSAINSLVMCASVAVTYLLGSVISWQKLALISTVPCVFEFVGLFFIPESPRWLSRNGRVKESEVSLQRLRGNNTDITKEAAEIKKYMDNLQEFKEDGFFDLFNPRYSRVVTVGIGLLVLQQLGGLSGYTFYLSSIFKKSGFPNNVGVMMASVVQSVTSVLGIVIVDKYGRRSLLTVATIMMCLGSLITGLSFLFQSYGLLEHYTPISTFMGVLVFLTSITIGIGGIPWVMISEMTPINIKGSAGTLCNLTSWSSNWFVSYTFNFLFQWSSSGVFFIYTMISGVGILFVMKMVPETRGRSLEEIQAAITR

SEQ ID NO: 69939 - protein, 407 aa, Arabidopsis thaliana
  peptide (1)..(407): Ceres Seq. ID no. 2048306
MAGLNLSLAEFSFFGAVLTIGGLVGAAMSGKLADVFGRRGALGVSNSFCMAGWLMIAFSQATWSLDIGRLFLGVAAGVASYVVPVYIVEIAPKKVRGTFSAINSLVMCASVAVTYLLGSVISWQKLALISTVPCVFEFVGLFFIPESPRWLSRNGRVKESEVSLQRLRGNNTDITKEAAEIKKYMDNLQEFKEDGFFDLFNPRYSRVVTVGIGLLVLQQLGGLSGYTFYLSSIFKKSGFPNNVGVMMASVVQSVTSVLGIVIVDKYGRRSLLTVATIMMCLGSLITGLSFLFQSYGLLEHYTPISTFMGVLVFLTSITIGIGGIPWVMISEMTPINIKGSAGTLCNLTSWSSNWFVSYTFNFLFQWSSSGVFFIYTMISGVGILFVMKMVPETRGRSLEEIQAAITR

SEQ ID NO: 69940 - protein, 380 aa, Arabidopsis thaliana
  peptide (1)..(380): Ceres Seq. ID no. 2048307
MSGKLADVFGRRGALGVSNSFCMAGWLMIAFSQATWSLDIGRLFLGVAAGVASYVVPVYIVEIAPKKVRGTFSAINSLVMCASVAVTYLLGSVISWQKLALISTVPCVFEFVGLFFIPESPRWLSRNGRVKESEVSLQRLRGNNTDITKEAAEIKKYMDNLQEFKEDGFFDLFNPRYSRVVTVGIGLLVLQQLGGLSGYTFYLSSIFKKSGFPNNVGVMMASVVQSVTSVLGIVIVDKYGRRSLLTVATIMMCLGSLITGLSFLFQSYGLLEHYTPISTFMGVLVFLTSITIGIGGIPWVMISEMTPINIKGSAGTLCNLTSWSSNWFVSYTFNFLFQWSSSGVFFIYTMISGVGILFVMKMVPETRGRSLEEIQAAITR

SEQ ID NO: 69941 - DNA, 2541 bp, Arabidopsis thaliana
  misc_feature (1)..(2541): Ceres Seq. ID no. 2049879
  misc_feature (1)..(2541): Ortholog of  Ceres SEQ ID NO 13600301 as cited in SEQ ID NO 1010
atgggttgtacaagttctaagcttgacgatcttccggcggttgctctttgccgtgaacgctgtgctttcttagaagctgctattcatcaacgttacgctttagctgaatcacacgtggcttacactcattcgcttcgagaaatcggtcactctctccatcttttcatcaatcaccaccaccgtttcgtcgcttccggcggcgctaacgtcggtgattctcctcgacttaatcttcctcctcagagaaaaggtgaccttgacgacgaagcaacaaattccccaaaaaaacaaaagcttgcttcttctcaccacaaccacaaccacgctcactcgggttccggttctgattcgggtcatctcgaattcgattcagattccgacgaagatgaagaagacgacgacgacttggatttggattcgttgcatcaccactctcctccccaccaccatctcggcaatttccctattcccgaatcagcaccaatgggcggatacatggaacaacaaccgggttatataaacccgtacccgaatccagatatgatggggcatccttactctggaggaggaagttatatgcacatgaattacatgaagaacaaatccatgcctccttcagttgtctatgagcaaagaccaactagtcctcaacgagtctacataggcgaatcatcatcttcatatccatatcctcctcaaaattcatattttggatactcaaatccagtacccggacccggaccaggatactacggttcttcttctgcttctacaactgctgcagcaacaaaaccgccaccacctccaccgtcgccgcctaggtctaacggttgggattttttgaatccctttgatacttattatcctccgtatactccgagtcgagattcgagagagttaagagaagaagaaggtataccggatttagaagacgatgattcacattacgaagttgttaaagaagtttacggcaaaccaaaattcgccgccggtggtggtcaccaaccaaatcccgccgccgtacacatgatgagggaagagtccccgtctccgccgcttgataaatccggtgctagtactagcggtggaggtgatgtcggagatgcatctgcgtatcagtctagaccaagtgtgtcggtggagaaagaagggatggagtatgaagttcacgttgttgagaagaaggttgttgaagatgaggaacggcggagtaatgccacggcgacacgtggtggtggtggaggaggagggccacgtgcggtgcctgaagttgcgaaagagattgagaatcaattcgtgaaagctgcagagtcaggaagtgagattgctaagttacttgaagttgggaagcatccttatggtcgtaaacatgctgcttcgaagatgttgcacggtgttactccttcgttaccttctacctctggaggaacttcttcgtctgctgctgctgctgttgtgccacctacttatgcagatattgaagaagagcttgcttcgaggtcgaggaatctttcttcgacgttgcacaagctccatctttgggagaagaagctttatcatgaagtcaaggccgaggagaaactgcgtctagctcacgagaaaaagcttaggaagctaaagcgtttggatcaaagaggtgccgaggctatcaaagtagataaaacgcggaaattagtgagagatatgtccacaaaaatacggattgcgattcaggttgtcgacaaaatatccgtgacgattaataagataagagacgaagacctgtggccgcaactgaatgcattgattcaagggcttacaagaatgtggaaaacaatgcttgaatgtcatcaaagtcaatgtcaagctattagggaagcacaaggtttaggcccgataagagcaagcaagaaactaggcgatgaacatctagaagcgacgagtttgcttggacatgaacttattaattggatattgggattctctagctgggttagtgcgcagaagggttatgtaaaagagttgaataaatggctcatgaaatgtcttctgtatgaacctgaggaaacacctgatgggatagttcccttttcacctggtaggattggggctccacctatctttgtcatctgtaaccaatggtctcaagctctggataggatatctgagaaggaagttattgaggcaatgcgtagtttcactacaagtgtgcttcagctttgggaacaagatcggttagatacgatgatgacggggcatggtgattcagagaagaaagtcaggaacatggacagagaagaacagaggatacagagagagattcaagcattggaaaagaaaatgattcttgtggcaccgggtgatggtaacagtctttcgatatccggcaacgttgtttaccaaagcgatactagcagcgatagtttacaaggtagtttgcaacggatttttgaagctatggagagattcactgctgaatcgatgagagcttatgaggatctcttagagcgcaccaatgaagaaactgcaccacgggaacttgaggaagaagaggaggagtaa

SEQ ID NO: 69942 - protein, 846 aa, Arabidopsis thaliana
  peptide (1)..(846): Ceres Seq. ID no. 2049880
MGCTSSKLDDLPAVALCRERCAFLEAAIHQRYALAESHVAYTHSLREIGHSLHLFINHHHRFVASGGANVGDSPRLNLPPQRKGDLDDEATNSPKKQKLASSHHNHNHAHSGSGSDSGHLEFDSDSDEDEEDDDDLDLDSLHHHSPPHHHLGNFPIPESAPMGGYMEQQPGYINPYPNPDMMGHPYSGGGSYMHMNYMKNKSMPPSVVYEQRPTSPQRVYIGESSSSYPYPPQNSYFGYSNPVPGPGPGYYGSSSASTTAAATKPPPPPPSPPRSNGWDFLNPFDTYYPPYTPSRDSRELREEEGIPDLEDDDSHYEVVKEVYGKPKFAAGGGHQPNPAAVHMMREESPSPPLDKSGASTSGGGDVGDASAYQSRPSVSVEKEGMEYEVHVVEKKVVEDEERRSNATATRGGGGGGGPRAVPEVAKEIENQFVKAAESGSEIAKLLEVGKHPYGRKHAASKMLHGVTPSLPSTSGGTSSSAAAAVVPPTYADIEEELASRSRNLSSTLHKLHLWEKKLYHEVKAEEKLRLAHEKKLRKLKRLDQRGAEAIKVDKTRKLVRDMSTKIRIAIQVVDKISVTINKIRDEDLWPQLNALIQGLTRMWKTMLECHQSQCQAIREAQGLGPIRASKKLGDEHLEATSLLGHELINWILGFSSWVSAQKGYVKELNKWLMKCLLYEPEETPDGIVPFSPGRIGAPPIFVICNQWSQALDRISEKEVIEAMRSFTTSVLQLWEQDRLDTMMTGHGDSEKKVRNMDREEQRIQREIQALEKKMILVAPGDGNSLSISGNVVYQSDTSSDSLQGSLQRIFEAMERFTAESMRAYEDLLERTNEETAPRELEEEEEE

SEQ ID NO: 69943 - protein, 685 aa, Arabidopsis thaliana
  peptide (1)..(685): Ceres Seq. ID no. 2049881
MGGYMEQQPGYINPYPNPDMMGHPYSGGGSYMHMNYMKNKSMPPSVVYEQRPTSPQRVYIGESSSSYPYPPQNSYFGYSNPVPGPGPGYYGSSSASTTAAATKPPPPPPSPPRSNGWDFLNPFDTYYPPYTPSRDSRELREEEGIPDLEDDDSHYEVVKEVYGKPKFAAGGGHQPNPAAVHMMREESPSPPLDKSGASTSGGGDVGDASAYQSRPSVSVEKEGMEYEVHVVEKKVVEDEERRSNATATRGGGGGGGPRAVPEVAKEIENQFVKAAESGSEIAKLLEVGKHPYGRKHAASKMLHGVTPSLPSTSGGTSSSAAAAVVPPTYADIEEELASRSRNLSSTLHKLHLWEKKLYHEVKAEEKLRLAHEKKLRKLKRLDQRGAEAIKVDKTRKLVRDMSTKIRIAIQVVDKISVTINKIRDEDLWPQLNALIQGLTRMWKTMLECHQSQCQAIREAQGLGPIRASKKLGDEHLEATSLLGHELINWILGFSSWVSAQKGYVKELNKWLMKCLLYEPEETPDGIVPFSPGRIGAPPIFVICNQWSQALDRISEKEVIEAMRSFTTSVLQLWEQDRLDTMMTGHGDSEKKVRNMDREEQRIQREIQALEKKMILVAPGDGNSLSISGNVVYQSDTSSDSLQGSLQRIFEAMERFTAESMRAYEDLLERTNEETAPRELEEEEEE

SEQ ID NO: 69944 - protein, 681 aa, Arabidopsis thaliana
  peptide (1)..(681): Ceres Seq. ID no. 2049882
MEQQPGYINPYPNPDMMGHPYSGGGSYMHMNYMKNKSMPPSVVYEQRPTSPQRVYIGESSSSYPYPPQNSYFGYSNPVPGPGPGYYGSSSASTTAAATKPPPPPPSPPRSNGWDFLNPFDTYYPPYTPSRDSRELREEEGIPDLEDDDSHYEVVKEVYGKPKFAAGGGHQPNPAAVHMMREESPSPPLDKSGASTSGGGDVGDASAYQSRPSVSVEKEGMEYEVHVVEKKVVEDEERRSNATATRGGGGGGGPRAVPEVAKEIENQFVKAAESGSEIAKLLEVGKHPYGRKHAASKMLHGVTPSLPSTSGGTSSSAAAAVVPPTYADIEEELASRSRNLSSTLHKLHLWEKKLYHEVKAEEKLRLAHEKKLRKLKRLDQRGAEAIKVDKTRKLVRDMSTKIRIAIQVVDKISVTINKIRDEDLWPQLNALIQGLTRMWKTMLECHQSQCQAIREAQGLGPIRASKKLGDEHLEATSLLGHELINWILGFSSWVSAQKGYVKELNKWLMKCLLYEPEETPDGIVPFSPGRIGAPPIFVICNQWSQALDRISEKEVIEAMRSFTTSVLQLWEQDRLDTMMTGHGDSEKKVRNMDREEQRIQREIQALEKKMILVAPGDGNSLSISGNVVYQSDTSSDSLQGSLQRIFEAMERFTAESMRAYEDLLERTNEETAPRELEEEEEE

SEQ ID NO: 69945 - DNA, 897 bp, Arabidopsis thaliana
  misc_feature (1)..(897): Ceres Seq. ID no. 2051110
  misc_feature (1)..(897): Ortholog of  Ceres SEQ ID NO 12466401 as cited in SEQ ID NO 20698
  misc_feature (1)..(897): Ortholog of  Ceres SEQ ID NO 15224731 as cited in SEQ ID NO 63650
atgacgtggccggctagatcatcgccgcaaaacacgaggaagccagtttacgtcgtgcatagcccaccgaacacagacgtagacaagatatcgaccggttcaggttttagcccattcgggtcaccccttaacgatcagggtcaggtcagcaactttcaacatcactcggtggccgagtcatcttcgtatccacgatcgtcaggaccattgagaaacgagtacagcagtgtccaagtgcatgatcttgaccgtcgaactcatgaagatgaagattacgatgaaatggacggtccggatgagaagaggagaaggataacgaggttttactcgtgcttgttgtttacgttggtgttggccttcactctcttctgtctcattttgtggggagtttccaaatctttcgcacctattgccactttgaaggaaatggtattggagaacttgaatgtgcagtccgggaacgaccaatcgggagtgctcacagatatgctaactctaaattcaacggtcaggatcttatacagaaaccccgcaactttcttcactgtccacgtcacctccgctcccctccagctcagctattcccagcttatcctcgcatccggtcagatgggagagttctctcaacgaaggaaaagcgagagaatcattgagaccaaagtatttggggatcaaattcctctgtatggaggcgtaccggctctgtttggccaacgagctgaaccggaccaagtcgttttgcctcttaacctgacttttacgttgcgagcacgagcctatgtgctcggacgattggtcaagactacgttccactcgaatatcaaatgcagcatcactttttatggcgataaacttggcaagacacttgatctctccaagtcctgttctgatcattga

SEQ ID NO: 69946 - protein, 298 aa, Arabidopsis thaliana
  peptide (1)..(298): Ceres Seq. ID no. 2051111
MTWPARSSPQNTRKPVYVVHSPPNTDVDKISTGSGFSPFGSPLNDQGQVSNFQHHSVAESSSYPRSSGPLRNEYSSVQVHDLDRRTHEDEDYDEMDGPDEKRRRITRFYSCLLFTLVLAFTLFCLILWGVSKSFAPIATLKEMVLENLNVQSGNDQSGVLTDMLTLNSTVRILYRNPATFFTVHVTSAPLQLSYSQLILASGQMGEFSQRRKSERIIETKVFGDQIPLYGGVPALFGQRAEPDQVVLPLNLTFTLRARAYVLGRLVKTTFHSNIKCSITFYGDKLGKTLDLSKSCSDH

SEQ ID NO: 69947 - protein, 204 aa, Arabidopsis thaliana
  peptide (1)..(204): Ceres Seq. ID no. 2051112
MDGPDEKRRRITRFYSCLLFTLVLAFTLFCLILWGVSKSFAPIATLKEMVLENLNVQSGNDQSGVLTDMLTLNSTVRILYRNPATFFTVHVTSAPLQLSYSQLILASGQMGEFSQRRKSERIIETKVFGDQIPLYGGVPALFGQRAEPDQVVLPLNLTFTLRARAYVLGRLVKTTFHSNIKCSITFYGDKLGKTLDLSKSCSDH

SEQ ID NO: 69948 - protein, 156 aa, Arabidopsis thaliana
  peptide (1)..(156): Ceres Seq. ID no. 2051113
MVLENLNVQSGNDQSGVLTDMLTLNSTVRILYRNPATFFTVHVTSAPLQLSYSQLILASGQMGEFSQRRKSERIIETKVFGDQIPLYGGVPALFGQRAEPDQVVLPLNLTFTLRARAYVLGRLVKTTFHSNIKCSITFYGDKLGKTLDLSKSCSDH

SEQ ID NO: 69949 - DNA, 1665 bp, Arabidopsis thaliana
  misc_feature (1)..(1665): Ceres Seq. ID no. 2051502
  misc_feature (1)..(1665): Ortholog of  Ceres SEQ ID NO 15175771 as cited in SEQ ID NO 55443
atggcggatacaatggttgctcatatggaccgacataataagatagatgttgagatctcagaagatgacaagagattaacaaagctttgctctctaaagaagaaggctataaatgcgacgaacaagtttaagcactcaatgaccaagaaaggtcgaaggcatagccgtgtggcgtgtgtctcaatcgtcgatgaaatcgatacagaagagttgcaagcggttgatgctttccgtcaagctcttattttagacgaactacttccctctaagcatgatgatcatcacatgatgcttaggttcttgagggcaagaaagtttgatctcgaaaaggctaagcaaatgtggtctgatatgcttaactggaggaaagaatatggcgcagacacgatcatggaggactttgatttcaaagaaatcgaagaagtggttaagtattatccacaaggatatcatggtgttgacaaggaaggaagacctatctatattgagaggctaggccaagttgatgccacaaagctgatgaaagtgaccacaattgataggtacgtgaagtaccatgtgaaagagttcgagaagactttcaacgtcaaattccctgcttgttccatcgctgcgaaacgacacattgatcagagcacaacgatcttggatgttcaaggcgtggggcttagtaacttcaacaaagctgcaaaagatcttcttcagagtattcagaaaatcgacaacgataactaccctgagacgctgaaccgtatgttcatcatcaatgctggttgtgggtttaggcttttatggaacacagtgaaatctttccttgacccaaagactacagcaaagattcacgttcttggcaacaaataccaaaccaaacttctagaaatcattgacgccaatgaactgcctgagttcttgggtggtaagtgcacctgcgcagacaaaggtggatgtatgcgttcagacaaaggtccatggaacgaccctgagatcttcaagttggttcagaacggtgaaggtagatgcctgcgaaggagcttgtcagggatcgaggaaaagacaatctttgagtataacaacgaaacaaagaagaaatgcgaaccagaagagactcacaagcaatctgctgcggagatggagaagaagttcatcgacacgaatgtggatgctgcagcggctgctgattggcctacaaagcttaacaaggctgaaaaaaaccctaccgaccttaaagatgtgtactcagctgtgaatccgttggagaggaaagggtacttatatggcagcgtcatggcattgctaatggggatagtgggagtgatgaggctaaccaagaacatgccaaggaggctcaccgaggcaaatgtttatagccgtgaaggcagcgccgtctaccaggacggagtgactgttatgtcgaagcaggagtatattgcgatggtgaagaagataacagatcttgaggagaaatgtaagtccatggaagctcaggctgcgttttatatggagagggagaagactctagacgctgcacttcgtcgtattgaccagctcgagcttcagttgtctgaaaccaacaaggcactagacgagacaatgacgaggcaacatgagataatggctttcatcgagaagaaaaagaagaagaagcggaagttcttattattctag

SEQ ID NO: 69950 - protein, 554 aa, Arabidopsis thaliana
  peptide (1)..(554): Ceres Seq. ID no. 2051503
MADTMVAHMDRHNKIDVEISEDDKRLTKLCSLKKKAINATNKFKHSMTKKGRRHSRVACVSIVDEIDTEELQAVDAFRQALILDELLPSKHDDHHMMLRFLRARKFDLEKAKQMWSDMLNWRKEYGADTIMEDFDFKEIEEVVKYYPQGYHGVDKEGRPIYIERLGQVDATKLMKVTTIDRYVKYHVKEFEKTFNVKFPACSIAAKRHIDQSTTILDVQGVGLSNFNKAAKDLLQSIQKIDNDNYPETLNRMFIINAGCGFRLLWNTVKSFLDPKTTAKIHVLGNKYQTKLLEIIDANELPEFLGGKCTCADKGGCMRSDKGPWNDPEIFKLVQNGEGRCLRRSLSGIEEKTIFEYNNETKKKCEPEETHKQSAAEMEKKFIDTNVDAAAAADWPTKLNKAEKNPTDLKDVYSAVNPLERKGYLYGSVMALLMGIVGVMRLTKNMPRRLTEANVYSREGSAVYQDGVTVMSKQEYIAMVKKITDLEEKCKSMEAQAAFYMEREKTLDAALRRIDQLELQLSETNKALDETMTRQHEIMAFIEKKKKKKRKFLLF

SEQ ID NO: 69951 - protein, 550 aa, Arabidopsis thaliana
  peptide (1)..(550): Ceres Seq. ID no. 2051504
MVAHMDRHNKIDVEISEDDKRLTKLCSLKKKAINATNKFKHSMTKKGRRHSRVACVSIVDEIDTEELQAVDAFRQALILDELLPSKHDDHHMMLRFLRARKFDLEKAKQMWSDMLNWRKEYGADTIMEDFDFKEIEEVVKYYPQGYHGVDKEGRPIYIERLGQVDATKLMKVTTIDRYVKYHVKEFEKTFNVKFPACSIAAKRHIDQSTTILDVQGVGLSNFNKAAKDLLQSIQKIDNDNYPETLNRMFIINAGCGFRLLWNTVKSFLDPKTTAKIHVLGNKYQTKLLEIIDANELPEFLGGKCTCADKGGCMRSDKGPWNDPEIFKLVQNGEGRCLRRSLSGIEEKTIFEYNNETKKKCEPEETHKQSAAEMEKKFIDTNVDAAAAADWPTKLNKAEKNPTDLKDVYSAVNPLERKGYLYGSVMALLMGIVGVMRLTKNMPRRLTEANVYSREGSAVYQDGVTVMSKQEYIAMVKKITDLEEKCKSMEAQAAFYMEREKTLDAALRRIDQLELQLSETNKALDETMTRQHEIMAFIEKKKKKKRKFLLF

SEQ ID NO: 69952 - protein, 546 aa, Arabidopsis thaliana
  peptide (1)..(546): Ceres Seq. ID no. 2051505
MDRHNKIDVEISEDDKRLTKLCSLKKKAINATNKFKHSMTKKGRRHSRVACVSIVDEIDTEELQAVDAFRQALILDELLPSKHDDHHMMLRFLRARKFDLEKAKQMWSDMLNWRKEYGADTIMEDFDFKEIEEVVKYYPQGYHGVDKEGRPIYIERLGQVDATKLMKVTTIDRYVKYHVKEFEKTFNVKFPACSIAAKRHIDQSTTILDVQGVGLSNFNKAAKDLLQSIQKIDNDNYPETLNRMFIINAGCGFRLLWNTVKSFLDPKTTAKIHVLGNKYQTKLLEIIDANELPEFLGGKCTCADKGGCMRSDKGPWNDPEIFKLVQNGEGRCLRRSLSGIEEKTIFEYNNETKKKCEPEETHKQSAAEMEKKFIDTNVDAAAAADWPTKLNKAEKNPTDLKDVYSAVNPLERKGYLYGSVMALLMGIVGVMRLTKNMPRRLTEANVYSREGSAVYQDGVTVMSKQEYIAMVKKITDLEEKCKSMEAQAAFYMEREKTLDAALRRIDQLELQLSETNKALDETMTRQHEIMAFIEKKKKKKRKFLLF

SEQ ID NO: 69953 - DNA, 1500 bp, Arabidopsis thaliana
  misc_feature (1)..(1500): Ceres Seq. ID no. 2051898
  misc_feature (1)..(1500): Ortholog of  Ceres SEQ ID NO 14309715 as cited in SEQ ID NO 55353
  misc_feature (1)..(1500): Ortholog of  Ceres SEQ ID NO 13595521 as cited in SEQ ID NO 59840
atgagcactatgtggagagaaacaaggaatgtattcatagttccattgttcaagtgtatagtggttatgtgtttgatcatctcgctcttagttttcgttgagagtgtttacatgaaccttgtagtactctatgtcaagttgtttaaccgaaaaccagagaaagtctacaaatgggaggcaatgcaggaggatatggagcttggtcatcaaaattatccgatggtccttgttcaaatcccaatgtacaacgaacgagaggtctttgaattatctataggtgctgcgtgcagactaacatggccatcggaccgtctaattgttcaagttttagatgattccaccgatccagcaatcatggaactggtgagcatggaatgtacaaaatgggcatcaaaagacataaatataaattatgagaggcgagagaacagaaatggctacaaggctggagctcttaagcacggcatgaggcacagttacgtcaagcagtgccaatatcttgccatctttgatgctgatttccagcccgagcccgattacctccaacgcgctatcccctttcttatccacaaccctgaggtcgctcttgtccaagctcgatggagatttgtaaacgctaacacatgcttaatgacgaggatgcaagagatgtctctgaactaccatttcatggcagagcaacaatctggatccacaagacatgctttctttggctttaatggaactgcgggagtatggagaatggtggcgatggaagaagctggaggatggaaggaccggacgacggtagaggacatggacttggccgttcgtgttggtcttctcggttggaaatttatcttcgtcaatgacctcgaggttaaaagcgagctaccaagccaatttaaggcctttcgattccaacagcatcggtggtcttgtggtccagccaatcttattaggaaaatgacgatggaaattattcacaataagagagtgaagatttggaagaagttttacgtgatctacagcttctttttcctacggaagatcgtagtccacttcttcacttatttcttttactgtgtcattcttcctacaagtgtcttccttcccgaagtaaatataccgaactggtcaactatatatgttccttctgtcatcaccctcttgagtgccattgccactccaagatcattctacctcgtgattttttgggtcttattcgaaaatgtaatggctatgcaccggaccaagggaactttgattggcttatttgaaggaggaagagtcaatgaatgggttgtcacagagaaattaggagatactcttaacactaagctacttccccagaatggacgacttccgaaaagagtaaatttgaaggagatgatgatgggtatatacatattatgttgtgcttgctacgactttgcatttggaaatgcatttttatatttgtatctcttcatgcaagccactgcttttctcatctccggagttggctttgttggaacttaa

SEQ ID NO: 69954 - protein, 499 aa, Arabidopsis thaliana
  peptide (1)..(499): Ceres Seq. ID no. 2051899
MSTMWRETRNVFIVPLFKCIVVMCLIISLLVFVESVYMNLVVLYVKLFNRKPEKVYKWEAMQEDMELGHQNYPMVLVQIPMYNEREVFELSIGAACRLTWPSDRLIVQVLDDSTDPAIMELVSMECTKWASKDININYERRENRNGYKAGALKHGMRHSYVKQCQYLAIFDADFQPEPDYLQRAIPFLIHNPEVALVQARWRFVNANTCLMTRMQEMSLNYHFMAEQQSGSTRHAFFGFNGTAGVWRMVAMEEAGGWKDRTTVEDMDLAVRVGLLGWKFIFVNDLEVKSELPSQFKAFRFQQHRWSCGPANLIRKMTMEIIHNKRVKIWKKFYVIYSFFFLRKIVVHFFTYFFYCVILPTSVFLPEVNIPNWSTIYVPSVITLLSAIATPRSFYLVIFWVLFENVMAMHRTKGTLIGLFEGGRVNEWVVTEKLGDTLNTKLLPQNGRLPKRVNLKEMMMGIYILCCACYDFAFGNAFLYLYLFMQATAFLISGVGFVGT

SEQ ID NO: 69955 - protein, 496 aa, Arabidopsis thaliana
  peptide (1)..(496): Ceres Seq. ID no. 2051900
MWRETRNVFIVPLFKCIVVMCLIISLLVFVESVYMNLVVLYVKLFNRKPEKVYKWEAMQEDMELGHQNYPMVLVQIPMYNEREVFELSIGAACRLTWPSDRLIVQVLDDSTDPAIMELVSMECTKWASKDININYERRENRNGYKAGALKHGMRHSYVKQCQYLAIFDADFQPEPDYLQRAIPFLIHNPEVALVQARWRFVNANTCLMTRMQEMSLNYHFMAEQQSGSTRHAFFGFNGTAGVWRMVAMEEAGGWKDRTTVEDMDLAVRVGLLGWKFIFVNDLEVKSELPSQFKAFRFQQHRWSCGPANLIRKMTMEIIHNKRVKIWKKFYVIYSFFFLRKIVVHFFTYFFYCVILPTSVFLPEVNIPNWSTIYVPSVITLLSAIATPRSFYLVIFWVLFENVMAMHRTKGTLIGLFEGGRVNEWVVTEKLGDTLNTKLLPQNGRLPKRVNLKEMMMGIYILCCACYDFAFGNAFLYLYLFMQATAFLISGVGFVGT

SEQ ID NO: 69956 - protein, 477 aa, Arabidopsis thaliana
  peptide (1)..(477): Ceres Seq. ID no. 2051901
MCLIISLLVFVESVYMNLVVLYVKLFNRKPEKVYKWEAMQEDMELGHQNYPMVLVQIPMYNEREVFELSIGAACRLTWPSDRLIVQVLDDSTDPAIMELVSMECTKWASKDININYERRENRNGYKAGALKHGMRHSYVKQCQYLAIFDADFQPEPDYLQRAIPFLIHNPEVALVQARWRFVNANTCLMTRMQEMSLNYHFMAEQQSGSTRHAFFGFNGTAGVWRMVAMEEAGGWKDRTTVEDMDLAVRVGLLGWKFIFVNDLEVKSELPSQFKAFRFQQHRWSCGPANLIRKMTMEIIHNKRVKIWKKFYVIYSFFFLRKIVVHFFTYFFYCVILPTSVFLPEVNIPNWSTIYVPSVITLLSAIATPRSFYLVIFWVLFENVMAMHRTKGTLIGLFEGGRVNEWVVTEKLGDTLNTKLLPQNGRLPKRVNLKEMMMGIYILCCACYDFAFGNAFLYLYLFMQATAFLISGVGFVGT

SEQ ID NO: 69957 - DNA, 336 bp, Arabidopsis thaliana
  misc_feature (1)..(336): Ceres Seq. ID no. 2052164
  misc_feature (1)..(336): Ortholog of  Ceres SEQ ID NO 13589868 as cited in SEQ ID NO 55521
atggggctttcatttgcaaagcttttcagcaggcttttcgccaagaaggagatgcgcatccttatggtgggtcttgatgctgctggtaagaccaccattttgtacaagctcaagcttggtgagattgtcaccaccatccccaccattgtactgcttgtgtttgccaacaaacaggatcttccaaacgcaatgaatgctgctgaaataactgataagcttggactccactctctccggcagcgtcactggtacatacagatcacgtgcgccaccaccggtgagggactgtacgaaggcctggactggctctccaacaacattgctaacaaagcttga

SEQ ID NO: 69958 - protein, 111 aa, Arabidopsis thaliana
  peptide (1)..(111): Ceres Seq. ID no. 2052165
MGLSFAKLFSRLFAKKEMRILMVGLDAAGKTTILYKLKLGEIVTTIPTIVLLVFANKQDLPNAMNAAEITDKLGLHSLRQRHWYIQITCATTGEGLYEGLDWLSNNIANKA

SEQ ID NO: 69959 - protein, 94 aa, Arabidopsis thaliana
  peptide (1)..(94): Ceres Seq. ID no. 2052166
MRILMVGLDAAGKTTILYKLKLGEIVTTIPTIVLLVFANKQDLPNAMNAAEITDKLGLHSLRQRHWYIQITCATTGEGLYEGLDWLSNNIANKA

SEQ ID NO: 69960 - protein, 90 aa, Arabidopsis thaliana
  peptide (1)..(90): Ceres Seq. ID no. 2052167
MVGLDAAGKTTILYKLKLGEIVTTIPTIVLLVFANKQDLPNAMNAAEITDKLGLHSLRQRHWYIQITCATTGEGLYEGLDWLSNNIANKA

SEQ ID NO: 69961 - DNA, 2331 bp, Arabidopsis thaliana
  misc_feature (1)..(2331): Ceres Seq. ID no. 2052999
  misc_feature (1)..(2331): Ortholog of  Ceres SEQ ID NO 13584744 as cited in SEQ ID NO 69137
atggctgctaagagatctatctactgtcttcttcttcttcctctgctcttgtctttactgatctggattccttcgatctccttagctgctactaaccctgatgatgttgctgcaattaacggattattcgctgcacttggagcacctgttcttcctggttggattgcttctggtggagacccatgtggtgaagcttggcaaggcattatctgcaatgtttcagatattataagcataactgtaaatgctgcaaatttgcaaggagagcttggtgacaacttagctaagttcacttctatcaggggaatagatttcagcaacaatcgcattggaggaagcataccttctactttgccggttacattgcagcatttttttctttcagctaatcagttcaccggaagcatcccggaatctctaggaacattgagttttctgaatgacatgtctttgaacgataaccttctctctggagagctacccgacgtgtttcaaaaccttgtcgggctgattaatcttgatatatcatctaacaatataagcggcacattgcctccttctatggagaatttattaactcttacaacattacgtgttcagaacaatcagctctcaggaactctggacgttcttcaaggccttcctcttcaagacttaaacatagagaataacctcttctctggacccataccggacaaattactaagcattccgaaattcctacatgaaggaaacccgttcaatgccacaatgatcaattccacctcgactgcaccatcattgtctccgtctctatctccaacaaaaccagctccaacgcgaccattttctggagttccacctcctccaaatgagaggaatcgagggaaagttgctgatggaccttctgattcagaaggatcgagctctgagaattcaaagggaaagaactcttcacatactaaaaagataatccttattgcattcgctggcgtcctcgtcttcataattctggttttggcaatactcttgctgttgccaaaatgtgcaagacgtagagaacatgctaacagagttttcaaaccgcatcaagttggtgctgatagaggaagcagagagaatgctctggaaaacgggactccggtactgccaccacctggtcgatctgaaaaagttcaaagagaacccttcaagaaagctggagaggaaccaaaggtcttacatgaccttgagaggctgcggagacctgcacctatatcaagacaggaaagtcaagatattgacttttcaatgttgatgcctcctcctccaccacctccaccaccaccaccacctcctcctttggatgagaaggtcacggttatgccaatcatatcacccgaaagacccgttaagaaaacttcccctaaacgcttacccttaacttctgtgaagcactattctattgcttctcttcaacaatacacggaaagcttcgctcaggaaaatctcattggctcaggcatgctcggtagtgtttatagggcccggcttcccaatggaaagttgtttgctgtcaagaagttggacaagagggcttctgaacaacaacaggatcacgaatttatcgaactagtgaacaatatagatatgattcgccactccaatatcgttgaacttgtgggttactgtgctgagcacgatcaaagactattggtctacgaatattgcagtaacggtacgttacaagacgggttgcattcagacgatgaattcaagaagaaactttcgtggaatacccgtgtcagtatggcacttggagctgctagagcccttgagtacttgcatgaggtgtgtgaaccacctatcatacacagaaacttcaaatcagccaatgttctactcgacgatgacctgagtgttcttgtctcagattgtggtttggccccactaatatcatcaggctctgtgagtcagttatcagggcaattgctagccgcttacggatatggagctccagagttcgactctggaatctatacatggcagagtgatgtatatagttttggtgttgttatgttagaactattgacgggtagaatgtcctacgatagggaccggagtagaggagagcagttcttggtgaggtgggcaatcccacagcttcatgatatcgatgcattgggcaaaatggttgatccatctcttaatggacaataccctgcaaagtcattgtcacactttgctgatataatatcccggtgtgttcagtctgaaccagaatttagaccactgatgtcagaagttgttcaagatctactagatatgatcagaagagagcgtcatggttcgggtgattctaccgcggactag

SEQ ID NO: 69962 - protein, 776 aa, Arabidopsis thaliana
  peptide (1)..(776): Ceres Seq. ID no. 2053000
MAAKRSIYCLLLLPLLLSLLIWIPSISLAATNPDDVAAINGLFAALGAPVLPGWIASGGDPCGEAWQGIICNVSDIISITVNAANLQGELGDNLAKFTSIRGIDFSNNRIGGSIPSTLPVTLQHFFLSANQFTGSIPESLGTLSFLNDMSLNDNLLSGELPDVFQNLVGLINLDISSNNISGTLPPSMENLLTLTTLRVQNNQLSGTLDVLQGLPLQDLNIENNLFSGPIPDKLLSIPKFLHEGNPFNATMINSTSTAPSLSPSLSPTKPAPTRPFSGVPPPPNERNRGKVADGPSDSEGSSSENSKGKNSSHTKKIILIAFAGVLVFIILVLAILLLLPKCARRREHANRVFKPHQVGADRGSRENALENGTPVLPPPGRSEKVQREPFKKAGEEPKVLHDLERLRRPAPISRQESQDIDFSMLMPPPPPPPPPPPPPPLDEKVTVMPIISPERPVKKTSPKRLPLTSVKHYSIASLQQYTESFAQENLIGSGMLGSVYRARLPNGKLFAVKKLDKRASEQQQDHEFIELVNNIDMIRHSNIVELVGYCAEHDQRLLVYEYCSNGTLQDGLHSDDEFKKKLSWNTRVSMALGAARALEYLHEVCEPPIIHRNFKSANVLLDDDLSVLVSDCGLAPLISSGSVSQLSGQLLAAYGYGAPEFDSGIYTWQSDVYSFGVVMLELLTGRMSYDRDRSRGEQFLVRWAIPQLHDIDALGKMVDPSLNGQYPAKSLSHFADIISRCVQSEPEFRPLMSEVVQDLLDMIRRERHGSGDSTAD

SEQ ID NO: 69963 - protein, 628 aa, Arabidopsis thaliana
  peptide (1)..(628): Ceres Seq. ID no. 2053001
MSLNDNLLSGELPDVFQNLVGLINLDISSNNISGTLPPSMENLLTLTTLRVQNNQLSGTLDVLQGLPLQDLNIENNLFSGPIPDKLLSIPKFLHEGNPFNATMINSTSTAPSLSPSLSPTKPAPTRPFSGVPPPPNERNRGKVADGPSDSEGSSSENSKGKNSSHTKKIILIAFAGVLVFIILVLAILLLLPKCARRREHANRVFKPHQVGADRGSRENALENGTPVLPPPGRSEKVQREPFKKAGEEPKVLHDLERLRRPAPISRQESQDIDFSMLMPPPPPPPPPPPPPPLDEKVTVMPIISPERPVKKTSPKRLPLTSVKHYSIASLQQYTESFAQENLIGSGMLGSVYRARLPNGKLFAVKKLDKRASEQQQDHEFIELVNNIDMIRHSNIVELVGYCAEHDQRLLVYEYCSNGTLQDGLHSDDEFKKKLSWNTRVSMALGAARALEYLHEVCEPPIIHRNFKSANVLLDDDLSVLVSDCGLAPLISSGSVSQLSGQLLAAYGYGAPEFDSGIYTWQSDVYSFGVVMLELLTGRMSYDRDRSRGEQFLVRWAIPQLHDIDALGKMVDPSLNGQYPAKSLSHFADIISRCVQSEPEFRPLMSEVVQDLLDMIRRERHGSGDSTAD

SEQ ID NO: 69964 - protein, 589 aa, Arabidopsis thaliana
  peptide (1)..(589): Ceres Seq. ID no. 2053002
MENLLTLTTLRVQNNQLSGTLDVLQGLPLQDLNIENNLFSGPIPDKLLSIPKFLHEGNPFNATMINSTSTAPSLSPSLSPTKPAPTRPFSGVPPPPNERNRGKVADGPSDSEGSSSENSKGKNSSHTKKIILIAFAGVLVFIILVLAILLLLPKCARRREHANRVFKPHQVGADRGSRENALENGTPVLPPPGRSEKVQREPFKKAGEEPKVLHDLERLRRPAPISRQESQDIDFSMLMPPPPPPPPPPPPPPLDEKVTVMPIISPERPVKKTSPKRLPLTSVKHYSIASLQQYTESFAQENLIGSGMLGSVYRARLPNGKLFAVKKLDKRASEQQQDHEFIELVNNIDMIRHSNIVELVGYCAEHDQRLLVYEYCSNGTLQDGLHSDDEFKKKLSWNTRVSMALGAARALEYLHEVCEPPIIHRNFKSANVLLDDDLSVLVSDCGLAPLISSGSVSQLSGQLLAAYGYGAPEFDSGIYTWQSDVYSFGVVMLELLTGRMSYDRDRSRGEQFLVRWAIPQLHDIDALGKMVDPSLNGQYPAKSLSHFADIISRCVQSEPEFRPLMSEVVQDLLDMIRRERHGSGDSTAD

SEQ ID NO: 69965 - DNA, 1449 bp, Arabidopsis thaliana
  misc_feature (1)..(1449): Ceres Seq. ID no. 2053617
  misc_feature (1)..(1449): Ortholog of  Ceres SEQ ID NO 13597546 as cited in SEQ ID NO 65017
  misc_feature (1)..(1449): Ortholog of  Ceres SEQ ID NO 13654353 as cited in SEQ ID NO 68318
atggtagaagtttatgagttattaactgtgatggtttcactcattgtggtgaagctatttcattggatatatcagtcgaagaatccgaaacctaatgaaaaactacctccagggtcgatgggttttccgatcattggagagacttttgagttcatgaagcctcatgacgcttttcagtttccaacattcatcaaggagagaatcatcagatatggaccaatttttcggacaagtttatttggagccaaagttataatctcgacggatattgaattaaatatggagatagcaaagacaaaccatgctcctggtctcacaaagagcatagcacaactctttggagaaaacaacttgttttttcagagcaaggagtctcataaacatgtccgaaacttgacattccagttgttaggttcacaaggtttgaaattgagtgtgatgcaagacatcgatctcttgactcgcacacacatggaagaaggagctaggagaggttgtcttgacgtcaaggaaatatcaagcaagattttaattgaatgccttgcaaagaaagttaccggcgacatggaaccagaggcggcgaaagaactcgcactctgttggagatgttttccgagtggctggtttagattccctctcaatcttcctgggactggtgtttataaaatgatgaaagcaagaaagaggatgcttcacttactaaaggagacaatactgaagaagagagcatcaggagaggagttaggggagttcttcaagatcatctttgaaggagcggaaacaatgagcgtagacaatgcgatcgagtacatatacaccttatttctgcttgctaacgaaacaacaccacgtattcttgcagctacaataaagctcataagtgacaaccctaaagtcatgaaggagttgcatagagagcatgagggaattgtccggggtaagactgagaaggagaccagcataacatgggaagagtacaaatctatgacatttacccaaatggtgatcaatgagtcccttaggatcacaagcacggcgccaacagtatttagaatatttgatcatgagttccaagttggttcttataaaattccagctggttggatcttcatgggctatccaaacaatcatttcaatccaaaaacttacgatgaccctttagtattcaatccatggcgttgggagggaaaagacttgggcgcgatcgtctctcggacttacattccctttggtgctggctctagacaatgtgtaggagctgagtttgctaagctgcaaatggccatttttatccatcatttgtctagagacaggtggtcaatgaagataggaaccacaatacttcgaaactttgtactcatgtttccaaatggatgtgaggttcaattcttaaaagacactgaagtggataactcgagtggttcgaatcccgattgctgcaatggataa

SEQ ID NO: 69966 - protein, 482 aa, Arabidopsis thaliana
  peptide (1)..(482): Ceres Seq. ID no. 2053618
MVEVYELLTVMVSLIVVKLFHWIYQSKNPKPNEKLPPGSMGFPIIGETFEFMKPHDAFQFPTFIKERIIRYGPIFRTSLFGAKVIISTDIELNMEIAKTNHAPGLTKSIAQLFGENNLFFQSKESHKHVRNLTFQLLGSQGLKLSVMQDIDLLTRTHMEEGARRGCLDVKEISSKILIECLAKKVTGDMEPEAAKELALCWRCFPSGWFRFPLNLPGTGVYKMMKARKRMLHLLKETILKKRASGEELGEFFKIIFEGAETMSVDNAIEYIYTLFLLANETTPRILAATIKLISDNPKVMKELHREHEGIVRGKTEKETSITWEEYKSMTFTQMVINESLRITSTAPTVFRIFDHEFQVGSYKIPAGWIFMGYPNNHFNPKTYDDPLVFNPWRWEGKDLGAIVSRTYIPFGAGSRQCVGAEFAKLQMAIFIHHLSRDRWSMKIGTTILRNFVLMFPNGCEVQFLKDTEVDNSSGSNPDCCNG

SEQ ID NO: 69967 - protein, 472 aa, Arabidopsis thaliana
  peptide (1)..(472): Ceres Seq. ID no. 2053619
MVSLIVVKLFHWIYQSKNPKPNEKLPPGSMGFPIIGETFEFMKPHDAFQFPTFIKERIIRYGPIFRTSLFGAKVIISTDIELNMEIAKTNHAPGLTKSIAQLFGENNLFFQSKESHKHVRNLTFQLLGSQGLKLSVMQDIDLLTRTHMEEGARRGCLDVKEISSKILIECLAKKVTGDMEPEAAKELALCWRCFPSGWFRFPLNLPGTGVYKMMKARKRMLHLLKETILKKRASGEELGEFFKIIFEGAETMSVDNAIEYIYTLFLLANETTPRILAATIKLISDNPKVMKELHREHEGIVRGKTEKETSITWEEYKSMTFTQMVINESLRITSTAPTVFRIFDHEFQVGSYKIPAGWIFMGYPNNHFNPKTYDDPLVFNPWRWEGKDLGAIVSRTYIPFGAGSRQCVGAEFAKLQMAIFIHHLSRDRWSMKIGTTILRNFVLMFPNGCEVQFLKDTEVDNSSGSNPDCCNG

SEQ ID NO: 69968 - protein, 443 aa, Arabidopsis thaliana
  peptide (1)..(443): Ceres Seq. ID no. 2053620
MGFPIIGETFEFMKPHDAFQFPTFIKERIIRYGPIFRTSLFGAKVIISTDIELNMEIAKTNHAPGLTKSIAQLFGENNLFFQSKESHKHVRNLTFQLLGSQGLKLSVMQDIDLLTRTHMEEGARRGCLDVKEISSKILIECLAKKVTGDMEPEAAKELALCWRCFPSGWFRFPLNLPGTGVYKMMKARKRMLHLLKETILKKRASGEELGEFFKIIFEGAETMSVDNAIEYIYTLFLLANETTPRILAATIKLISDNPKVMKELHREHEGIVRGKTEKETSITWEEYKSMTFTQMVINESLRITSTAPTVFRIFDHEFQVGSYKIPAGWIFMGYPNNHFNPKTYDDPLVFNPWRWEGKDLGAIVSRTYIPFGAGSRQCVGAEFAKLQMAIFIHHLSRDRWSMKIGTTILRNFVLMFPNGCEVQFLKDTEVDNSSGSNPDCCNG

SEQ ID NO: 69969 - DNA, 2199 bp, Arabidopsis thaliana
  misc_feature (1)..(2199): Ceres Seq. ID no. 2053819
  misc_feature (1)..(2199): Ortholog of  Ceres SEQ ID NO 13594037 as cited in SEQ ID NO 55666
  misc_feature (1)..(2199): Ortholog of  Ceres SEQ ID NO 13657707 as cited in SEQ ID NO 66407
atgtcatatggatacgacgatgaggatgcaaagaggaaaaagagatatgtaattatctctatctcctctgttcttttaatctccatggttgtcgctgttaccataggtgttagcgtcaacaagtccgataacgctggtgacgaagaaatcacaacttctgttaaagccatcaaagatgtttgtgcaccgacggattacaaagagacttgtgaggatacactaaggaaagatgcgaaggacacatcagacccgttggagctggtgaagacagcttttaacgcaacgatgaaacaaataagtgacgtggcaaagaagtcacaaactatgattgagctacaaaaggatccaagggcaaagatggcgttggatcaatgcaaggagctaatggattacgcaatcggtgagcttagtaagtcgtttgaagagttggggaagttcgagtttcataaagttgatgaggccttggttaagttgaggatttggcttagtgcgacgataagccatgagcaaacttgtcttgatgggtttcaagggacacaaggtaatgctggtgagacgataaagaaggcgttgaaaaccgcggtgcagttaacgcataacgggcttgcaatggttaccgaaatgtcgaattacttaggacaaatgcagattccggagatgaatagtagacggttgttgtcccaagagtttccttcgtggatggatgcgcgagcacgtaggctattgaacgctcctatgtccgaggtaaaacccgatatcgtggtggcgcaagacggaagtggtcagtacaagacgattaacgaggcattgaattttgtcccgaagaagaagaacacgactttcgtggttcatattaaggaaggaatctataaagagtatgttcaggtgaataggagcatgacacatctagttttcataggtgatggccccgacaaaactgtcatttctggcagcaaaagttacaaggacggtattactacctacaaaacagccaccgttgcaatcgttggagatcatttcattgccaagaacattgccttcgagaacacagccggggcaataaagcatcaagcggttgctattagggttctagcagatgagtcaatattctacaattgtaaattcgatggttaccaagacactctatatgcacattcccaccgtcagttttaccgtgactgtactatctcgggcacaatcgattttctctttggagacgcagctgcggtattccaaaactgtactttactggtgagaaagccacttctaaaccaagcatgccccattacagcccatggacgtaaagatccgcgagaatccacgggatttgttctccaaggatgtacgattgttggcgaaccggattacttggcagtcaaggaacagagcaaaacttatcttggaagaccatggaaagagtattcaagaactatcatcatgaacacgttcataccagattttgttccgccggaaggatggcaaccgtggctcggcgaattcggtcttaacacacttttctactcggaggtgcagaacactgggccgggtgcagctatcacaaaacgggttacttggccaggaatcaagaagttgagtgatgaagaaatccttaaattcactccagctcaatacatccaaggtgacgcttggattcctggtaaaggtgttccgtacatcctaggtctttttagtggaaacggttccacaaattctaccgtaactggctctagtttgtcttctaacacaacagagtcatcagattcaccttcgacggtagtaactccttcaacttctccaccagctggtcatcttggttctccatcagatacaccttcatcggtagtgtctccttcaacttctctgccagctggtcaacttggtgccccaccggctacaccatcaatggtagtgtctccttcaacttctccaccagctggtcatcttggttccccatcagatacaccttcatcgttagtttctccttcaacttctccaccagctggtcatcttggttctccatcagatacaccttcatcggtagtgactccttcagcttctccttctacttcaccatcagcttctccttctgtttcaccatcagcttttccttctgcttcaccatcagcttcaccatcagcttctccttcagtttctccttctgcttcaccatcagcttctccacaaagctcaatcggttga

SEQ ID NO: 69970 - protein, 732 aa, Arabidopsis thaliana
  peptide (1)..(732): Ceres Seq. ID no. 2053820
MSYGYDDEDAKRKKRYVIISISSVLLISMVVAVTIGVSVNKSDNAGDEEITTSVKAIKDVCAPTDYKETCEDTLRKDAKDTSDPLELVKTAFNATMKQISDVAKKSQTMIELQKDPRAKMALDQCKELMDYAIGELSKSFEELGKFEFHKVDEALVKLRIWLSATISHEQTCLDGFQGTQGNAGETIKKALKTAVQLTHNGLAMVTEMSNYLGQMQIPEMNSRRLLSQEFPSWMDARARRLLNAPMSEVKPDIVVAQDGSGQYKTINEALNFVPKKKNTTFVVHIKEGIYKEYVQVNRSMTHLVFIGDGPDKTVISGSKSYKDGITTYKTATVAIVGDHFIAKNIAFENTAGAIKHQAVAIRVLADESIFYNCKFDGYQDTLYAHSHRQFYRDCTISGTIDFLFGDAAAVFQNCTLLVRKPLLNQACPITAHGRKDPRESTGFVLQGCTIVGEPDYLAVKEQSKTYLGRPWKEYSRTIIMNTFIPDFVPPEGWQPWLGEFGLNTLFYSEVQNTGPGAAITKRVTWPGIKKLSDEEILKFTPAQYIQGDAWIPGKGVPYILGLFSGNGSTNSTVTGSSLSSNTTESSDSPSTVVTPSTSPPAGHLGSPSDTPSSVVSPSTSLPAGQLGAPPATPSMVVSPSTSPPAGHLGSPSDTPSSLVSPSTSPPAGHLGSPSDTPSSVVTPSASPSTSPSASPSVSPSAFPSASPSASPSASPSVSPSASPSASPQSSIG

SEQ ID NO: 69971 - protein, 704 aa, Arabidopsis thaliana
  peptide (1)..(704): Ceres Seq. ID no. 2053821
MVVAVTIGVSVNKSDNAGDEEITTSVKAIKDVCAPTDYKETCEDTLRKDAKDTSDPLELVKTAFNATMKQISDVAKKSQTMIELQKDPRAKMALDQCKELMDYAIGELSKSFEELGKFEFHKVDEALVKLRIWLSATISHEQTCLDGFQGTQGNAGETIKKALKTAVQLTHNGLAMVTEMSNYLGQMQIPEMNSRRLLSQEFPSWMDARARRLLNAPMSEVKPDIVVAQDGSGQYKTINEALNFVPKKKNTTFVVHIKEGIYKEYVQVNRSMTHLVFIGDGPDKTVISGSKSYKDGITTYKTATVAIVGDHFIAKNIAFENTAGAIKHQAVAIRVLADESIFYNCKFDGYQDTLYAHSHRQFYRDCTISGTIDFLFGDAAAVFQNCTLLVRKPLLNQACPITAHGRKDPRESTGFVLQGCTIVGEPDYLAVKEQSKTYLGRPWKEYSRTIIMNTFIPDFVPPEGWQPWLGEFGLNTLFYSEVQNTGPGAAITKRVTWPGIKKLSDEEILKFTPAQYIQGDAWIPGKGVPYILGLFSGNGSTNSTVTGSSLSSNTTESSDSPSTVVTPSTSPPAGHLGSPSDTPSSVVSPSTSLPAGQLGAPPATPSMVVSPSTSPPAGHLGSPSDTPSSLVSPSTSPPAGHLGSPSDTPSSVVTPSASPSTSPSASPSVSPSAFPSASPSASPSASPSVSPSASPSASPQSSIG

SEQ ID NO: 69972 - protein, 637 aa, Arabidopsis thaliana
  peptide (1)..(637): Ceres Seq. ID no. 2053822
MKQISDVAKKSQTMIELQKDPRAKMALDQCKELMDYAIGELSKSFEELGKFEFHKVDEALVKLRIWLSATISHEQTCLDGFQGTQGNAGETIKKALKTAVQLTHNGLAMVTEMSNYLGQMQIPEMNSRRLLSQEFPSWMDARARRLLNAPMSEVKPDIVVAQDGSGQYKTINEALNFVPKKKNTTFVVHIKEGIYKEYVQVNRSMTHLVFIGDGPDKTVISGSKSYKDGITTYKTATVAIVGDHFIAKNIAFENTAGAIKHQAVAIRVLADESIFYNCKFDGYQDTLYAHSHRQFYRDCTISGTIDFLFGDAAAVFQNCTLLVRKPLLNQACPITAHGRKDPRESTGFVLQGCTIVGEPDYLAVKEQSKTYLGRPWKEYSRTIIMNTFIPDFVPPEGWQPWLGEFGLNTLFYSEVQNTGPGAAITKRVTWPGIKKLSDEEILKFTPAQYIQGDAWIPGKGVPYILGLFSGNGSTNSTVTGSSLSSNTTESSDSPSTVVTPSTSPPAGHLGSPSDTPSSVVSPSTSLPAGQLGAPPATPSMVVSPSTSPPAGHLGSPSDTPSSLVSPSTSPPAGHLGSPSDTPSSVVTPSASPSTSPSASPSVSPSAFPSASPSASPSASPSVSPSASPSASPQSSIG

SEQ ID NO: 69973 - DNA, 1107 bp, Arabidopsis thaliana
  misc_feature (1)..(1107): Ceres Seq. ID no. 2122223
  misc_feature (1)..(1107): Ortholog of  Ceres SEQ ID NO 15168509 as cited in SEQ ID NO 57909
  misc_feature (1)..(1107): Ortholog of  Ceres SEQ ID NO 13594429 as cited in SEQ ID NO 58006
  misc_feature (1)..(1107): Ortholog of  Ceres SEQ ID NO 13661403 as cited in SEQ ID NO 61549
atgaatcgagatgagcatattgcaaagaaagttgaaggatcaatctctagcttctccggggagaccagtacttcctcaaaacaaatctatgttaatcccgtgaccacgaccgggacgaaatcaatggaagacgacgacgtttcactctctcttctatacaatctatctaccttacatgaaaaagtccatcagatccaatctctggtcagcttctacatggtatctactaataacattaaccaatcctcggggtcaacgtctttggccgtggctaacatcggaagtttggttcaagagatcatcacggctgcttcatccatgttatatacttgccaacaactccaaatcggatctaacaacaacaacaacgatatcgataatgatcaaaccgtagatgcaatggttttggagttttcccgacaagaaaccgacccgggtcatgattttgtgcaagagtcgaccaacctttttggtgtccaagaaagagggcagatctcgtttcccgaccagaatcttgattggtacaacaccgaaaccataaaccctaaaaaagataaacatcgttctaaaccaagttccgggagctacgatatactggagctagacgtagcggacctactagcgaaatacacgcattactgccagatttgtgggaaagggtttaagagagacgctaatctaaggatgcacatgagagcgcacggggatgagtacaagacacgtgaggccttgatcagcccaacgagccaagacaagaaaggaggatactcgttaaagaaacattactactcctgtcctcaacacgggtgtagatggaaccagaggcacgagaagtttcaaccgttgaaatctgtgatttgcgccaagaatcattacaagaggagtcattgtcccaaaatgtatatgtgcaggagatgtagtgtgaagcatttctcggttctgtctgatcttaggacacacgagaagcattgtggggatataaagtgggtttgctcttgtgggactaaattttctaggaaagacaagctgatgagccacgtttctttgtttttgggccacgtaccggcacatgggtcgtccaagccgccgacaatcaccctaaagtaa

SEQ ID NO: 69974 - protein, 368 aa, Arabidopsis thaliana
  peptide (1)..(368): Ceres Seq. ID no. 2122224
MNRDEHIAKKVEGSISSFSGETSTSSKQIYVNPVTTTGTKSMEDDDVSLSLLYNLSTLHEKVHQIQSLVSFYMVSTNNINQSSGSTSLAVANIGSLVQEIITAASSMLYTCQQLQIGSNNNNNDIDNDQTVDAMVLEFSRQETDPGHDFVQESTNLFGVQERGQISFPDQNLDWYNTETINPKKDKHRSKPSSGSYDILELDVADLLAKYTHYCQICGKGFKRDANLRMHMRAHGDEYKTREALISPTSQDKKGGYSLKKHYYSCPQHGCRWNQRHEKFQPLKSVICAKNHYKRSHCPKMYMCRRCSVKHFSVLSDLRTHEKHCGDIKWVCSCGTKFSRKDKLMSHVSLFLGHVPAHGSSKPPTITLK

SEQ ID NO: 69975 - protein, 327 aa, Arabidopsis thaliana
  peptide (1)..(327): Ceres Seq. ID no. 2122225
MEDDDVSLSLLYNLSTLHEKVHQIQSLVSFYMVSTNNINQSSGSTSLAVANIGSLVQEIITAASSMLYTCQQLQIGSNNNNNDIDNDQTVDAMVLEFSRQETDPGHDFVQESTNLFGVQERGQISFPDQNLDWYNTETINPKKDKHRSKPSSGSYDILELDVADLLAKYTHYCQICGKGFKRDANLRMHMRAHGDEYKTREALISPTSQDKKGGYSLKKHYYSCPQHGCRWNQRHEKFQPLKSVICAKNHYKRSHCPKMYMCRRCSVKHFSVLSDLRTHEKHCGDIKWVCSCGTKFSRKDKLMSHVSLFLGHVPAHGSSKPPTITLK

SEQ ID NO: 69976 - protein, 296 aa, Arabidopsis thaliana
  peptide (1)..(296): Ceres Seq. ID no. 2122226
MVSTNNINQSSGSTSLAVANIGSLVQEIITAASSMLYTCQQLQIGSNNNNNDIDNDQTVDAMVLEFSRQETDPGHDFVQESTNLFGVQERGQISFPDQNLDWYNTETINPKKDKHRSKPSSGSYDILELDVADLLAKYTHYCQICGKGFKRDANLRMHMRAHGDEYKTREALISPTSQDKKGGYSLKKHYYSCPQHGCRWNQRHEKFQPLKSVICAKNHYKRSHCPKMYMCRRCSVKHFSVLSDLRTHEKHCGDIKWVCSCGTKFSRKDKLMSHVSLFLGHVPAHGSSKPPTITLK

SEQ ID NO: 69977 - DNA, 540 bp, Arabidopsis thaliana
  misc_feature (1)..(540): Ceres Seq. ID no. 2123863
  misc_feature (1)..(540): Ortholog of  Ceres SEQ ID NO 14316390 as cited in SEQ ID NO 60116
atggatgtttcaggaagcttgaattgcgttgttgtggcggtagatggaagcgaggtgagtatggaagctctgaggtgggctctagacaacctcaagctctcttcgtcttcttccgattcatcattcgtcgtgctccacgtccagccgtcgccttctgtagccgccggcgtgagtcccggcaccatacctttcggtggtggtcttgaggttcctgctttcactgctgcaatcgagcaacaccagaagcggatcaccgacaccatcctcgaacacgctagtcaaatttgtgctgaaaaatctgtgagtagagttatttcccttgtgtcccctgtgaatgtgaaaacacaagtggttattggggatcccaagtataaaatctgcgaagctgtagagaatttgcatgctgatcttcttgtcatgggctcccgggcttatggccgcattaagagaatgtttctgggaagtgtaagcaactactgcaccaaccacgcccattgtcctgttgtgataatcaaaccaaaagaggattcttctgcataa

SEQ ID NO: 69978 - protein, 179 aa, Arabidopsis thaliana
  peptide (1)..(179): Ceres Seq. ID no. 2123864
MDVSGSLNCVVVAVDGSEVSMEALRWALDNLKLSSSSSDSSFVVLHVQPSPSVAAGVSPGTIPFGGGLEVPAFTAAIEQHQKRITDTILEHASQICAEKSVSRVISLVSPVNVKTQVVIGDPKYKICEAVENLHADLLVMGSRAYGRIKRMFLGSVSNYCTNHAHCPVVIIKPKEDSSA

SEQ ID NO: 69979 - protein, 159 aa, Arabidopsis thaliana
  peptide (1)..(159): Ceres Seq. ID no. 2123865
MEALRWALDNLKLSSSSSDSSFVVLHVQPSPSVAAGVSPGTIPFGGGLEVPAFTAAIEQHQKRITDTILEHASQICAEKSVSRVISLVSPVNVKTQVVIGDPKYKICEAVENLHADLLVMGSRAYGRIKRMFLGSVSNYCTNHAHCPVVIIKPKEDSSA

SEQ ID NO: 69980 - DNA, 1752 bp, Arabidopsis thaliana
  misc_feature (1)..(1752): Ceres Seq. ID no. 2124700
  misc_feature (1)..(1752): Ortholog of  Ceres SEQ ID NO 12613725 as cited in SEQ ID NO 68196
atggtgaattcgaatgaagaagacgaaaggagaattcttgacgttgaagaatctcttcttacacaggaggaagtgaacaatcacttgaccggattgtcttctacagctgaagatggttctattgacatttatggaaacccaccatcgaagaagaagacaggaaactggaaagcttgtccctttattcttggaaacgaatgttgtgagagattagcttactatggaattgccaagaatctaatcacttactacacaagtgaattacacgagtccaatgtttctgcagctagtgacgttatgatttggcaaggaacttgctatatcacacctctcattggagctgttatagctgattcttactggggaagatactggaccattgcttctttctctgctatttatttcattggaatggctttgttgacactctcggcttcacttccggttttaaagccagcggcatgtgctggcgttgctgcggctctatgctcaccagcaacaacggttcagtatgcggttttctttacagggctttaccttattgctcttggtactggaggtatcaaaccatgtgtatcatcttttggtgctgatcagtttgatgatactgacccgagggaacgagttagaaaagcttctttctttaactggttttacttctccatcaacattggttcatttatctcatccactttgttagtttgggttcaagaaaatgtcgggtggggactcggtttcttgattcccaccgtgtttatgggagtctctattgcgagtttcttcattggaactccgctttatcggtttcagaaaccgggaggtagtccgattactagagtttgccaagttcttgtagctgcataccgtaaattgaagcttaatctccctgaagatatctcatttctgtatgaaacacgagagaaaaactccatgattgctggaagcaggaagattcaacacactgacgctgctgttatctcagaatatgaatctaaatccggtgctttttccaacccatggaagctatgtactgtaactcaagtcgaagaagttaagactctaatccgtatgtttccaatctgggcctcggggatcgtctactcggtcctatattcacagatttccactctattcgtgcaacaaggacggtccatgaaccgaataatccgttctttcgagatccctcctgcttcattcggggttttcgacacacttatcgtgctcatatccatcccaatatatgaccgtttcctcgtaccctttgtaagacggttcacagggataccaaaagggttaactgatctgcagcgaatgggcattggtctttttctctctgtcctaagcattgcagctgcagctattgttgagacagtgcggttgcagcttgctcaagactttgttgcaatgagcatattttggcagatccctcagtacatactaatgggaatagcagaggtctttttcttcattggtcgagttgagtttttctatgatgaatctcctgatgcaatgagaagtgtatgcagcgctttggcactactcaataccgcagtcggaagctacctgagctcgttgatcctcactcttgtggcgtatttcacagctcttggaggtaaagatggttgggttccagacgaccttaataaaggacatcttgactacttcttctggcttttggtctctcttggacttgtcaacattcctgtttatgccttgatttgtgttaagcacacaaagaagaaggctttgtaa

SEQ ID NO: 69981 - protein, 583 aa, Arabidopsis thaliana
  peptide (1)..(583): Ceres Seq. ID no. 2124701
MVNSNEEDERRILDVEESLLTQEEVNNHLTGLSSTAEDGSIDIYGNPPSKKKTGNWKACPFILGNECCERLAYYGIAKNLITYYTSELHESNVSAASDVMIWQGTCYITPLIGAVIADSYWGRYWTIASFSAIYFIGMALLTLSASLPVLKPAACAGVAAALCSPATTVQYAVFFTGLYLIALGTGGIKPCVSSFGADQFDDTDPRERVRKASFFNWFYFSINIGSFISSTLLVWVQENVGWGLGFLIPTVFMGVSIASFFIGTPLYRFQKPGGSPITRVCQVLVAAYRKLKLNLPEDISFLYETREKNSMIAGSRKIQHTDAAVISEYESKSGAFSNPWKLCTVTQVEEVKTLIRMFPIWASGIVYSVLYSQISTLFVQQGRSMNRIIRSFEIPPASFGVFDTLIVLISIPIYDRFLVPFVRRFTGIPKGLTDLQRMGIGLFLSVLSIAAAAIVETVRLQLAQDFVAMSIFWQIPQYILMGIAEVFFFIGRVEFFYDESPDAMRSVCSALALLNTAVGSYLSSLILTLVAYFTALGGKDGWVPDDLNKGHLDYFFWLLVSLGLVNIPVYALICVKHTKKKAL

SEQ ID NO: 69982 - protein, 484 aa, Arabidopsis thaliana
  peptide (1)..(484): Ceres Seq. ID no. 2124702
MIWQGTCYITPLIGAVIADSYWGRYWTIASFSAIYFIGMALLTLSASLPVLKPAACAGVAAALCSPATTVQYAVFFTGLYLIALGTGGIKPCVSSFGADQFDDTDPRERVRKASFFNWFYFSINIGSFISSTLLVWVQENVGWGLGFLIPTVFMGVSIASFFIGTPLYRFQKPGGSPITRVCQVLVAAYRKLKLNLPEDISFLYETREKNSMIAGSRKIQHTDAAVISEYESKSGAFSNPWKLCTVTQVEEVKTLIRMFPIWASGIVYSVLYSQISTLFVQQGRSMNRIIRSFEIPPASFGVFDTLIVLISIPIYDRFLVPFVRRFTGIPKGLTDLQRMGIGLFLSVLSIAAAAIVETVRLQLAQDFVAMSIFWQIPQYILMGIAEVFFFIGRVEFFYDESPDAMRSVCSALALLNTAVGSYLSSLILTLVAYFTALGGKDGWVPDDLNKGHLDYFFWLLVSLGLVNIPVYALICVKHTKKKAL

SEQ ID NO: 69983 - protein, 446 aa, Arabidopsis thaliana
  peptide (1)..(446): Ceres Seq. ID no. 2124703
MALLTLSASLPVLKPAACAGVAAALCSPATTVQYAVFFTGLYLIALGTGGIKPCVSSFGADQFDDTDPRERVRKASFFNWFYFSINIGSFISSTLLVWVQENVGWGLGFLIPTVFMGVSIASFFIGTPLYRFQKPGGSPITRVCQVLVAAYRKLKLNLPEDISFLYETREKNSMIAGSRKIQHTDAAVISEYESKSGAFSNPWKLCTVTQVEEVKTLIRMFPIWASGIVYSVLYSQISTLFVQQGRSMNRIIRSFEIPPASFGVFDTLIVLISIPIYDRFLVPFVRRFTGIPKGLTDLQRMGIGLFLSVLSIAAAAIVETVRLQLAQDFVAMSIFWQIPQYILMGIAEVFFFIGRVEFFYDESPDAMRSVCSALALLNTAVGSYLSSLILTLVAYFTALGGKDGWVPDDLNKGHLDYFFWLLVSLGLVNIPVYALICVKHTKKKAL

SEQ ID NO: 69984 - DNA, 1605 bp, Arabidopsis thaliana
  misc_feature (1)..(1605): Ceres Seq. ID no. 2126383
  misc_feature (1)..(1605): Ortholog of  Ceres SEQ ID NO 15172020 as cited in SEQ ID NO 59739
atggtgaaacccttaggagaaggaacaagagatgtctctaatgttggttgtaaatcagttgatctcctcctagcttctcttggtggtcttgccgccgctgtagcagctgcttacgccggagaattactccttcgacgccggaaacttgatcaaggtgcttccatggggtataaagatgtcaaaatcgcccctttgattgagaggaaagactcaggtcgacgatcaaacctagagagattctcccactatgttgcaaggcagctcggatttgaggatccaaatgaatacccacaactatgcaaattagcaaatggatatttgttgaaaacaaaagggtatgatgagaatgtggatgagtatttggagaatgaagctgagcgtgattctctctatgttcatctccttgaagaatttgatagatgcattctcacttatttttctttcaattggacccaatcttccaacctcatctctcaggctttaagcgatgagtcggatcagaaagttccaaaactcaaggatttcgtgatggcagcaacaaggaaacagaggtttgagagagtaacaaaagatctcaaggtgaaaagggtaatttcgacattagtagaagagatgagagtcattgggagcggaagcagtgagccacactgtacggaagtaatgtctccggtggctcataacaaacgaagtcccgtccttctccttatgggcggaggaatgggcgcaggaaagagcaccgtcctcaaagatatcttcctagagtcgttttggtcggaggcacaggccgacgcggtggttatagaggcagacgcgtttaaggagacggatgtaatttatagagctcttagctctagaggtcaccacgatgatatgcttcaaactgctgaattggttcatcaatcatcaacggatgctgcatcgtccttactagtaacagcattgaacgacggacgtgatgtgataatggatggaacattgtcatgggagccattcgtcgaacaaatgatcgaaatggcaagaaacgtccacaaacaaaaatatcgaatgggcgaaggctacaaggtgtccgaagaggggacgataaccgaaaaatattgggaagaagaagaagaagaaacgaaagaaaatggcaaacaacaaaatctgaaaccttacagaatcgagctggtcggtgtggtttgtgacgcttatcttgccgtagcaagaggcatacggagagctctaatggtgaagagagcagtgagagtgaaaccacaattgaattcacacaagagatttgctaatgcattcccaaagtattgtgagcttgttgataacgctaggctttattgcaccaatgctgttggtggtcctccaaggcttatagcgtggaaagacggaaatagtaagcttctggtggatccagaggatattgattgtctaaaacgggtcagcagtctcaacccggatgcagaatccatttacgagctttatccggatccaagccaattaagcaaacccggttctgtttggaatgatgttgtgttagttccatcgaggcccaaggtccagaaggaacttagcgatgcaatcaggagaatcgaaaaggcccaaccaaaaaattga

SEQ ID NO: 69985 - protein, 534 aa, Arabidopsis thaliana
  peptide (1)..(534): Ceres Seq. ID no. 2126384
MVKPLGEGTRDVSNVGCKSVDLLLASLGGLAAAVAAAYAGELLLRRRKLDQGASMGYKDVKIAPLIERKDSGRRSNLERFSHYVARQLGFEDPNEYPQLCKLANGYLLKTKGYDENVDEYLENEAERDSLYVHLLEEFDRCILTYFSFNWTQSSNLISQALSDESDQKVPKLKDFVMAATRKQRFERVTKDLKVKRVISTLVEEMRVIGSGSSEPHCTEVMSPVAHNKRSPVLLLMGGGMGAGKSTVLKDIFLESFWSEAQADAVVIEADAFKETDVIYRALSSRGHHDDMLQTAELVHQSSTDAASSLLVTALNDGRDVIMDGTLSWEPFVEQMIEMARNVHKQKYRMGEGYKVSEEGTITEKYWEEEEEETKENGKQQNLKPYRIELVGVVCDAYLAVARGIRRALMVKRAVRVKPQLNSHKRFANAFPKYCELVDNARLYCTNAVGGPPRLIAWKDGNSKLLVDPEDIDCLKRVSSLNPDAESIYELYPDPSQLSKPGSVWNDVVLVPSRPKVQKELSDAIRRIEKAQPKN

SEQ ID NO: 69986 - protein, 480 aa, Arabidopsis thaliana
  peptide (1)..(480): Ceres Seq. ID no. 2126385
MGYKDVKIAPLIERKDSGRRSNLERFSHYVARQLGFEDPNEYPQLCKLANGYLLKTKGYDENVDEYLENEAERDSLYVHLLEEFDRCILTYFSFNWTQSSNLISQALSDESDQKVPKLKDFVMAATRKQRFERVTKDLKVKRVISTLVEEMRVIGSGSSEPHCTEVMSPVAHNKRSPVLLLMGGGMGAGKSTVLKDIFLESFWSEAQADAVVIEADAFKETDVIYRALSSRGHHDDMLQTAELVHQSSTDAASSLLVTALNDGRDVIMDGTLSWEPFVEQMIEMARNVHKQKYRMGEGYKVSEEGTITEKYWEEEEEETKENGKQQNLKPYRIELVGVVCDAYLAVARGIRRALMVKRAVRVKPQLNSHKRFANAFPKYCELVDNARLYCTNAVGGPPRLIAWKDGNSKLLVDPEDIDCLKRVSSLNPDAESIYELYPDPSQLSKPGSVWNDVVLVPSRPKVQKELSDAIRRIEKAQPKN

SEQ ID NO: 69987 - protein, 358 aa, Arabidopsis thaliana
  peptide (1)..(358): Ceres Seq. ID no. 2126386
MAATRKQRFERVTKDLKVKRVISTLVEEMRVIGSGSSEPHCTEVMSPVAHNKRSPVLLLMGGGMGAGKSTVLKDIFLESFWSEAQADAVVIEADAFKETDVIYRALSSRGHHDDMLQTAELVHQSSTDAASSLLVTALNDGRDVIMDGTLSWEPFVEQMIEMARNVHKQKYRMGEGYKVSEEGTITEKYWEEEEEETKENGKQQNLKPYRIELVGVVCDAYLAVARGIRRALMVKRAVRVKPQLNSHKRFANAFPKYCELVDNARLYCTNAVGGPPRLIAWKDGNSKLLVDPEDIDCLKRVSSLNPDAESIYELYPDPSQLSKPGSVWNDVVLVPSRPKVQKELSDAIRRIEKAQPKN

SEQ ID NO: 69988 - DNA, 1158 bp, Arabidopsis thaliana
  misc_feature (1)..(1158): Ceres Seq. ID no. 2126439
  misc_feature (1)..(1158): Ortholog of  Ceres SEQ ID NO 12364737 as cited in SEQ ID NO 51089
  misc_feature (1)..(1158): Ortholog of  Ceres SEQ ID NO 14311515 as cited in SEQ ID NO 51680
  misc_feature (1)..(1158): Ortholog of  Ceres SEQ ID NO 13595567 as cited in SEQ ID NO 56760
  misc_feature (1)..(1158): Ortholog of  Ceres SEQ ID NO 13655302 as cited in SEQ ID NO 63307
  misc_feature (1)..(1158): Ortholog of  Ceres SEQ ID NO 13597380 as cited in SEQ ID NO 64054
  misc_feature (1)..(1158): Ortholog of  Ceres SEQ ID NO 12625474 as cited in SEQ ID NO 64169
  misc_feature (1)..(1158): Ortholog of  Ceres SEQ ID NO 13597502 as cited in SEQ ID NO 64681
  misc_feature (1)..(1158): Ortholog of  Ceres SEQ ID NO 15180805 as cited in SEQ ID NO 0
atgcatgatagtgaaatattcaagtttaaagacatgatgatgatgtcttgcacagttcaaacattagtacttgttccatggtttctagtagtatttgtactcgccggtggagaagactcatccgagacgacggcaatgtttccggcgatgtttgtgttcggagactctttggtggataacggaaacaataaccacttgaactcactggctaggtccaactatctcccttacggcatcgatttcgctggaaatcaaccaaccggtcgcttctctaacggcaaaactatcgtcgatttcattggagagttgctagggctgccggagataccggcgtttatggacacggttgacggaggagtggatattctccatggtgtgaactatgcctcagctgccggaggaatcttagaggaaaccggtcgccatctgggagagagatttagcatgggaagacaagtggagaacttcgagaagacattaatggagataagtaggagcatgaggaaagagtcagtgaaggaatatatggcaaagtcattggtggtggtgtcattgggtaacaatgactacattaacaattatctgaaaccaaggctattcctctcaagctctatttacgaccctacttctttcgccgacctccttctctccaacttcaccactcatctccttgaattgtatggaaaggggtttaggaaatttgtaatagccggtgtgggtccattgggttgcataccagaccaactagccgcccaagcggctctgccaggtgaatgtgtcgaggctgtaaacgagatggctgaacttttcaacaaccgtcttgtatcgctggtggatcgtctcaattccgataacaaaaccgctagtgaagccatctttgtttacggtaatacctatggagccgccgtggatattctcaccaacccatttaattacggattcgaagtgacggatagagggtgttgtggagtagggagaaatagaggagaaataacgtgtctgccattagcggtaccatgcgctttcagagaccgacatgtgttctgggatgcatttcatccaacacaagcttttaatctcataattgctctcagagcctttaatggttccaaatccgattgttaccccattaatctttctcaactttctcgtctctaa

SEQ ID NO: 69989 - protein, 385 aa, Arabidopsis thaliana
  peptide (1)..(385): Ceres Seq. ID no. 2126440
MHDSEIFKFKDMMMMSCTVQTLVLVPWFLVVFVLAGGEDSSETTAMFPAMFVFGDSLVDNGNNNHLNSLARSNYLPYGIDFAGNQPTGRFSNGKTIVDFIGELLGLPEIPAFMDTVDGGVDILHGVNYASAAGGILEETGRHLGERFSMGRQVENFEKTLMEISRSMRKESVKEYMAKSLVVVSLGNNDYINNYLKPRLFLSSSIYDPTSFADLLLSNFTTHLLELYGKGFRKFVIAGVGPLGCIPDQLAAQAALPGECVEAVNEMAELFNNRLVSLVDRLNSDNKTASEAIFVYGNTYGAAVDILTNPFNYGFEVTDRGCCGVGRNRGEITCLPLAVPCAFRDRHVFWDAFHPTQAFNLIIALRAFNGSKSDCYPINLSQLSRL

SEQ ID NO: 69990 - protein, 374 aa, Arabidopsis thaliana
  peptide (1)..(374): Ceres Seq. ID no. 2126441
MMMMSCTVQTLVLVPWFLVVFVLAGGEDSSETTAMFPAMFVFGDSLVDNGNNNHLNSLARSNYLPYGIDFAGNQPTGRFSNGKTIVDFIGELLGLPEIPAFMDTVDGGVDILHGVNYASAAGGILEETGRHLGERFSMGRQVENFEKTLMEISRSMRKESVKEYMAKSLVVVSLGNNDYINNYLKPRLFLSSSIYDPTSFADLLLSNFTTHLLELYGKGFRKFVIAGVGPLGCIPDQLAAQAALPGECVEAVNEMAELFNNRLVSLVDRLNSDNKTASEAIFVYGNTYGAAVDILTNPFNYGFEVTDRGCCGVGRNRGEITCLPLAVPCAFRDRHVFWDAFHPTQAFNLIIALRAFNGSKSDCYPINLSQLSRL

SEQ ID NO: 69991 - protein, 373 aa, Arabidopsis thaliana
  peptide (1)..(373): Ceres Seq. ID no. 2126442
MMMSCTVQTLVLVPWFLVVFVLAGGEDSSETTAMFPAMFVFGDSLVDNGNNNHLNSLARSNYLPYGIDFAGNQPTGRFSNGKTIVDFIGELLGLPEIPAFMDTVDGGVDILHGVNYASAAGGILEETGRHLGERFSMGRQVENFEKTLMEISRSMRKESVKEYMAKSLVVVSLGNNDYINNYLKPRLFLSSSIYDPTSFADLLLSNFTTHLLELYGKGFRKFVIAGVGPLGCIPDQLAAQAALPGECVEAVNEMAELFNNRLVSLVDRLNSDNKTASEAIFVYGNTYGAAVDILTNPFNYGFEVTDRGCCGVGRNRGEITCLPLAVPCAFRDRHVFWDAFHPTQAFNLIIALRAFNGSKSDCYPINLSQLSRL

SEQ ID NO: 69992 - DNA, 1212 bp, Arabidopsis thaliana
  misc_feature (1)..(1212): Ceres Seq. ID no. 2127736
  misc_feature (1)..(1212): Ortholog of  Ceres SEQ ID NO 13659759 as cited in SEQ ID NO 67663
atggcaaagagagcgttgttgataggaatcaactatccaggaaccacggaggagctacaaggctgcgtcaatgacgtccatagaatgcataagtgtctcgttgaccggttcggattcgcggaggaagatatcactgtgctgattgacaccgacgaatcttacactcaacccacaggaaagaacatccgtcaggctttgtcggagctcataaagccagcaaaatccggtgacgttttattcgtgcattacagcggacacggcacgagagtcccaccggaaacaggggaagaggatgatacaggttttgatgagtgtattgttccttccgacttgaatccaattcctgatgatgatttcagggatttagtggaacaagttccagagggatgtcagataactatcgtatcagactcttgtcacagcggcgggctcattgatgaagctaaggaacagatcggagagagtaccacgacgaagccaaatcgagaatccaaagtttcttcttttgaattcgagtttaaaaactgtttgcatagcatttttgtgaaactgcttgctttttgtggaatcggaagttctcatgtagagacgcgcgagatcgtagaagtaggcgagggagatgaagttgtcagatcaaggtatctgccgttggagaggtttattgaacttctcaaacaacaaactgggcaagacaatatcgagattgggaaaatcagacccaccctttttgatgtctttggtgaagattcgagcccgaagataaagaagttcatgaaagtgattcttaccaagctaaggaaaacaaatgaccaaagtacgctacttggtaagatcgaagaaagtgctcgagggtatatagaagagacgctgaacgatgaacactacatgaaacccgcaatgcaggcacaagtgaagagcgatcgtgagatttatggaggaagatcaagcaacggattgtttcctgaccgagggattctgttgagtggatgtcaaacagatgagacatcagcagatgttaagaagaaaggagaagcgtttggagcgtttagtaatgccatccaaatggttttgtcagagactgatcataaagataagattacaaacaaggaaatggtattgagggcaagagagattctgaagaaacagatgtttattcagagaccaggattgtattgcaatgaccgctttgtgaatgctccgtttatatgctaa

SEQ ID NO: 69993 - protein, 403 aa, Arabidopsis thaliana
  peptide (1)..(403): Ceres Seq. ID no. 2127737
MAKRALLIGINYPGTTEELQGCVNDVHRMHKCLVDRFGFAEEDITVLIDTDESYTQPTGKNIRQALSELIKPAKSGDVLFVHYSGHGTRVPPETGEEDDTGFDECIVPSDLNPIPDDDFRDLVEQVPEGCQITIVSDSCHSGGLIDEAKEQIGESTTTKPNRESKVSSFEFEFKNCLHSIFVKLLAFCGIGSSHVETREIVEVGEGDEVVRSRYLPLERFIELLKQQTGQDNIEIGKIRPTLFDVFGEDSSPKIKKFMKVILTKLRKTNDQSTLLGKIEESARGYIEETLNDEHYMKPAMQAQVKSDREIYGGRSSNGLFPDRGILLSGCQTDETSADVKKKGEAFGAFSNAIQMVLSETDHKDKITNKEMVLRAREILKKQMFIQRPGLYCNDRFVNAPFIC

SEQ ID NO: 69994 - protein, 375 aa, Arabidopsis thaliana
  peptide (1)..(375): Ceres Seq. ID no. 2127738
MHKCLVDRFGFAEEDITVLIDTDESYTQPTGKNIRQALSELIKPAKSGDVLFVHYSGHGTRVPPETGEEDDTGFDECIVPSDLNPIPDDDFRDLVEQVPEGCQITIVSDSCHSGGLIDEAKEQIGESTTTKPNRESKVSSFEFEFKNCLHSIFVKLLAFCGIGSSHVETREIVEVGEGDEVVRSRYLPLERFIELLKQQTGQDNIEIGKIRPTLFDVFGEDSSPKIKKFMKVILTKLRKTNDQSTLLGKIEESARGYIEETLNDEHYMKPAMQAQVKSDREIYGGRSSNGLFPDRGILLSGCQTDETSADVKKKGEAFGAFSNAIQMVLSETDHKDKITNKEMVLRAREILKKQMFIQRPGLYCNDRFVNAPFIC

SEQ ID NO: 69995 - DNA, 723 bp, Arabidopsis thaliana
  misc_feature (1)..(723): Ceres Seq. ID no. 2130043
  misc_feature (1)..(723): Ortholog of  Ceres SEQ ID NO 14315042 as cited in SEQ ID NO 56959
  misc_feature (1)..(723): Ortholog of  Ceres SEQ ID NO 12608620 as cited in SEQ ID NO 60192
  misc_feature (1)..(723): Ortholog of  Ceres SEQ ID NO 15173077 as cited in SEQ ID NO 64566
  misc_feature (1)..(723): Ortholog of  Ceres SEQ ID NO 13662898 as cited in SEQ ID NO 66199
  misc_feature (1)..(723): Ortholog of  Ceres SEQ ID NO 13654314 as cited in SEQ ID NO 67914
atgacggacccccacaccgcccggacgatcgtcggaatcgttggaaacgtgatttctttcggcttgttctgcgctccaataccaacgatggtgaagatatggaagatgaaatcggtctccgagtttaagccagatccatacgtagctacggttttaaactgcatgatgtggacattttacggacttcctttcgtccagcccgacagtctcctcgtcatcaccattaatggaactggtcttttcatggaactcgtttacgtcaccatcttctttgtcttcgctacctcccctgtccgcagaaagatcacaatagctatggttatcgaggtaatattcatggcggtggtgatcttctgcacaatgtattttttgcatacaacaaagcagagatcaatgcttattgggatcttgtgcattgttttcaacgtcatcatgtatgctgctcctctcaccgtcatgaaacttgtgataaagacaaagagcgtgaaatacatgccgttcttcctatcattagccaacttcatgaacggtgtcgtttgggtcatttatgcatgtcttaaatttgacccttatattttgattccaaatggtcttggatcgctatcaggaataatccagcttataatatacataacttactataaaacaactaactggaacgatgacgatgaagataaagaaaagcgctattcgaatgctggaatcgaacttggccaggcttga

SEQ ID NO: 69996 - protein, 240 aa, Arabidopsis thaliana
  peptide (1)..(240): Ceres Seq. ID no. 2130044
MTDPHTARTIVGIVGNVISFGLFCAPIPTMVKIWKMKSVSEFKPDPYVATVLNCMMWTFYGLPFVQPDSLLVITINGTGLFMELVYVTIFFVFATSPVRRKITIAMVIEVIFMAVVIFCTMYFLHTTKQRSMLIGILCIVFNVIMYAAPLTVMKLVIKTKSVKYMPFFLSLANFMNGVVWVIYACLKFDPYILIPNGLGSLSGIIQLIIYITYYKTTNWNDDDEDKEKRYSNAGIELGQA

SEQ ID NO: 69997 - protein, 211 aa, Arabidopsis thaliana
  peptide (1)..(211): Ceres Seq. ID no. 2130045
MVKIWKMKSVSEFKPDPYVATVLNCMMWTFYGLPFVQPDSLLVITINGTGLFMELVYVTIFFVFATSPVRRKITIAMVIEVIFMAVVIFCTMYFLHTTKQRSMLIGILCIVFNVIMYAAPLTVMKLVIKTKSVKYMPFFLSLANFMNGVVWVIYACLKFDPYILIPNGLGSLSGIIQLIIYITYYKTTNWNDDDEDKEKRYSNAGIELGQA

SEQ ID NO: 69998 - protein, 205 aa, Arabidopsis thaliana
  peptide (1)..(205): Ceres Seq. ID no. 2130046
MKSVSEFKPDPYVATVLNCMMWTFYGLPFVQPDSLLVITINGTGLFMELVYVTIFFVFATSPVRRKITIAMVIEVIFMAVVIFCTMYFLHTTKQRSMLIGILCIVFNVIMYAAPLTVMKLVIKTKSVKYMPFFLSLANFMNGVVWVIYACLKFDPYILIPNGLGSLSGIIQLIIYITYYKTTNWNDDDEDKEKRYSNAGIELGQA

SEQ ID NO: 69999 - DNA, 2337 bp, Arabidopsis thaliana
  misc_feature (1)..(2337): Ceres Seq. ID no. 2130264
  misc_feature (1)..(2337): Ortholog of  Ceres SEQ ID NO 15169142 as cited in SEQ ID NO 58748
atggcgacattagcagatattggactagcagcagcgattaatattctaagtgcattgatatttctattgctatttgcaatcttgaggattcaaccattcaatgatagggtttatttccctaaatggtacttaaaaggtgttagaagcagccctgtgaattcgggtgctttcgttagcaagattatgaatttggactttcgatcatacgttcggtttttaaactggatgcctgatgctcttaagatgccagagcctgaacttattgatcatgctggtttggattctgctgtttacttgaggatttacttgattgggcttaagatctttggtccgattgcattactttcatggtcaattttagtacctgtaaattggacaagtgatggattgcagctagcaaaacttcgtaatgtaacatcgagtaatatcgataagctttcgatttcgaatgtcgaacgtggatcagacaggttttgggcacatcttgtgatggcttatgcattcacattttggacttgctatgtactaatgaaggaatatgagaaaattgctgcaatgcggttatcttttctccaatcagagaagcgacgtgctgatcaattcactgttctggttaggaacgtaccaccggactcagacgagtcgattagcgaaaacgtgcagcatttctttcttgttaaccacccagaccattatcttacacatcaggtggtgtacaatgcaaatgaattggctaaattggtagaagacaagaagaaaatgcagaattggttagattactaccagttgaagtatacaagaaacaaggaacaacggccacgggtaaagatgggatttctcgggctatggggcaaaaaagtagatgcaatggatcattatacagcagagatcgagaaacttagcgagcaaataatggaagaaaggaagaggataaagaaagatgacaaaagtgtaatgcaagcagcttttgtgtcttttaaaacgcgttggggcgctgcggtctgcgcgcagacacaacagacgaagaatccaactgaatggttaaccgaatgggctcctgaggcaagagaaatgtactggccaaatctcgcaatgccttacgtatctctcactgtaaggagatttgtaatgcacatcgccttcttcttcctcacgttctttttcatcatcccaatcgcatttgtgcaatccttagcgagtattgaaggtatcgagaaatccgctccgttcctcagtcccattgtcaaaaacaagttaatgaaatcattgatccaaggttttcttcccggtattgtcttgaagctctttttgatattcctgccaacaatattgatgatcatgtcgaaattcgaagggtttatttcaatatcatcgttagagagaagagcggcttttcgatactatattttcaaccttgtgaatgttttcctcggtagcgtaatcactggatctgcttttgaacagctcgattcttttcttaaacaatccgcaaacgacattccgcggacagttggagtcgcgataccgataaaagcaacgttctttataacgtatataatggtagacggttgggcgggtgtggcgggagaaatctttaggctgaaaccattagtcattttccatttaaagaacttcttctttgtgaaaactgaaaaggatagagaagaagctatggatccgggacagattgatttctacgctaccgagcctcggattcaactatacttcctccttggccttgtctacgctcctgtcactcctgttcttcttcctttcatcatcttcttctttggtttcgcctacctcgtcttccgtcatcagatcataaatgtgtacaatcagaagtatgagagtgcgggtgcattctggccagacgttcatggacgtataatatcggcattgatcatctcacaaatccttttgttgggattaatgagcacgaaaggaaaagttcagtccacacctttcctcctcgttctagcgattctcaccttcggttttcatcggttttgcaaaggccggtacgaatcggcattcgtcattaacccgttgcaggaagctatgattaaggatacattggaacgagcaagagaaccaaacttgaatcttaaagggtttcttcagaatgcatatgttcatcctgtttttaaagacgaagaagattcagatgaagagggactaatcgaggattcagatgacgaagattgtgtagttgtacaaaccaaacgtcaaagatcacggagaaccaccgttgcgagcagcaatgcgagccgtggctcgtcacaatcaacgccttttaatcaacttgatttgggtaaggggaaaccggagacttga

SEQ ID NO: 70000 - protein, 778 aa, Arabidopsis thaliana
  peptide (1)..(778): Ceres Seq. ID no. 2130265
MATLADIGLAAAINILSALIFLLLFAILRIQPFNDRVYFPKWYLKGVRSSPVNSGAFVSKIMNLDFRSYVRFLNWMPDALKMPEPELIDHAGLDSAVYLRIYLIGLKIFGPIALLSWSILVPVNWTSDGLQLAKLRNVTSSNIDKLSISNVERGSDRFWAHLVMAYAFTFWTCYVLMKEYEKIAAMRLSFLQSEKRRADQFTVLVRNVPPDSDESISENVQHFFLVNHPDHYLTHQVVYNANELAKLVEDKKKMQNWLDYYQLKYTRNKEQRPRVKMGFLGLWGKKVDAMDHYTAEIEKLSEQIMEERKRIKKDDKSVMQAAFVSFKTRWGAAVCAQTQQTKNPTEWLTEWAPEAREMYWPNLAMPYVSLTVRRFVMHIAFFFLTFFFIIPIAFVQSLASIEGIEKSAPFLSPIVKNKLMKSLIQGFLPGIVLKLFLIFLPTILMIMSKFEGFISISSLERRAAFRYYIFNLVNVFLGSVITGSAFEQLDSFLKQSANDIPRTVGVAIPIKATFFITYIMVDGWAGVAGEIFRLKPLVIFHLKNFFFVKTEKDREEAMDPGQIDFYATEPRIQLYFLLGLVYAPVTPVLLPFIIFFFGFAYLVFRHQIINVYNQKYESAGAFWPDVHGRIISALIISQILLLGLMSTKGKVQSTPFLLVLAILTFGFHRFCKGRYESAFVINPLQEAMIKDTLERAREPNLNLKGFLQNAYVHPVFKDEEDSDEEGLIEDSDDEDCVVVQTKRQRSRRTTVASSNASRGSSQSTPFNQLDLGKGKPET

SEQ ID NO: 70001 - protein, 717 aa, Arabidopsis thaliana
  peptide (1)..(717): Ceres Seq. ID no. 2130266
MNLDFRSYVRFLNWMPDALKMPEPELIDHAGLDSAVYLRIYLIGLKIFGPIALLSWSILVPVNWTSDGLQLAKLRNVTSSNIDKLSISNVERGSDRFWAHLVMAYAFTFWTCYVLMKEYEKIAAMRLSFLQSEKRRADQFTVLVRNVPPDSDESISENVQHFFLVNHPDHYLTHQVVYNANELAKLVEDKKKMQNWLDYYQLKYTRNKEQRPRVKMGFLGLWGKKVDAMDHYTAEIEKLSEQIMEERKRIKKDDKSVMQAAFVSFKTRWGAAVCAQTQQTKNPTEWLTEWAPEAREMYWPNLAMPYVSLTVRRFVMHIAFFFLTFFFIIPIAFVQSLASIEGIEKSAPFLSPIVKNKLMKSLIQGFLPGIVLKLFLIFLPTILMIMSKFEGFISISSLERRAAFRYYIFNLVNVFLGSVITGSAFEQLDSFLKQSANDIPRTVGVAIPIKATFFITYIMVDGWAGVAGEIFRLKPLVIFHLKNFFFVKTEKDREEAMDPGQIDFYATEPRIQLYFLLGLVYAPVTPVLLPFIIFFFGFAYLVFRHQIINVYNQKYESAGAFWPDVHGRIISALIISQILLLGLMSTKGKVQSTPFLLVLAILTFGFHRFCKGRYESAFVINPLQEAMIKDTLERAREPNLNLKGFLQNAYVHPVFKDEEDSDEEGLIEDSDDEDCVVVQTKRQRSRRTTVASSNASRGSSQSTPFNQLDLGKGKPET

SEQ ID NO: 70002 - protein, 703 aa, Arabidopsis thaliana
  peptide (1)..(703): Ceres Seq. ID no. 2130267
MPDALKMPEPELIDHAGLDSAVYLRIYLIGLKIFGPIALLSWSILVPVNWTSDGLQLAKLRNVTSSNIDKLSISNVERGSDRFWAHLVMAYAFTFWTCYVLMKEYEKIAAMRLSFLQSEKRRADQFTVLVRNVPPDSDESISENVQHFFLVNHPDHYLTHQVVYNANELAKLVEDKKKMQNWLDYYQLKYTRNKEQRPRVKMGFLGLWGKKVDAMDHYTAEIEKLSEQIMEERKRIKKDDKSVMQAAFVSFKTRWGAAVCAQTQQTKNPTEWLTEWAPEAREMYWPNLAMPYVSLTVRRFVMHIAFFFLTFFFIIPIAFVQSLASIEGIEKSAPFLSPIVKNKLMKSLIQGFLPGIVLKLFLIFLPTILMIMSKFEGFISISSLERRAAFRYYIFNLVNVFLGSVITGSAFEQLDSFLKQSANDIPRTVGVAIPIKATFFITYIMVDGWAGVAGEIFRLKPLVIFHLKNFFFVKTEKDREEAMDPGQIDFYATEPRIQLYFLLGLVYAPVTPVLLPFIIFFFGFAYLVFRHQIINVYNQKYESAGAFWPDVHGRIISALIISQILLLGLMSTKGKVQSTPFLLVLAILTFGFHRFCKGRYESAFVINPLQEAMIKDTLERAREPNLNLKGFLQNAYVHPVFKDEEDSDEEGLIEDSDDEDCVVVQTKRQRSRRTTVASSNASRGSSQSTPFNQLDLGKGKPET

SEQ ID NO: 70003 - DNA, 666 bp, Arabidopsis thaliana
  misc_feature (1)..(666): Ceres Seq. ID no. 2130361
  misc_feature (1)..(666): Ortholog of  Ceres SEQ ID NO 13598653 as cited in SEQ ID NO 65049
atggagcctgaacgtttaaaatttggaggtccaagagagttgtgcggtgctgcggatcttatatctcaattcaaactagtgcaacaccatgaattcttttgcaagaaatctcttcctgtttctttatcagattcccattatcttcataatgtggttggggacacagagatcagaaaaggagaaggaatgcaattagatcagcttattgagagcatatcacagagccgggagactaatattcgcatccagccttttgatatagatgagcttcaggagtctttccaactaaatgatatgactcctgttgaattacccccagcagagaagggagctcctacaattccgtctaagtcaaaaagtgagtcgaaagatagggacaggaaacataagaaacacaaggacagggataaagacaaagatagagagcataagaagcacaagcacaaacataaagatagaagcaaagataaagataaagacaaggaccgagacagaaagaaggacaaaaatggccaccatgattcgggtgatcattctaagaaacatcatgataagaaaaggaaacacgatggagatgaagatcttaatgacgttcagaggcacaaaaaaaacaagcataaaagctcaaagcttgatgaggtgggtgcaataagggttgctggctaa

SEQ ID NO: 70004 - protein, 221 aa, Arabidopsis thaliana
  peptide (1)..(221): Ceres Seq. ID no. 2130362
MEPERLKFGGPRELCGAADLISQFKLVQHHEFFCKKSLPVSLSDSHYLHNVVGDTEIRKGEGMQLDQLIESISQSRETNIRIQPFDIDELQESFQLNDMTPVELPPAEKGAPTIPSKSKSESKDRDRKHKKHKDRDKDKDREHKKHKHKHKDRSKDKDKDKDRDRKKDKNGHHDSGDHSKKHHDKKRKHDGDEDLNDVQRHKKNKHKSSKLDEVGAIRVAG

SEQ ID NO: 70005 - protein, 159 aa, Arabidopsis thaliana
  peptide (1)..(159): Ceres Seq. ID no. 2130363
MQLDQLIESISQSRETNIRIQPFDIDELQESFQLNDMTPVELPPAEKGAPTIPSKSKSESKDRDRKHKKHKDRDKDKDREHKKHKHKHKDRSKDKDKDKDRDRKKDKNGHHDSGDHSKKHHDKKRKHDGDEDLNDVQRHKKNKHKSSKLDEVGAIRVAG

SEQ ID NO: 70006 - protein, 123 aa, Arabidopsis thaliana
  peptide (1)..(123): Ceres Seq. ID no. 2130364
MTPVELPPAEKGAPTIPSKSKSESKDRDRKHKKHKDRDKDKDREHKKHKHKHKDRSKDKDKDKDRDRKKDKNGHHDSGDHSKKHHDKKRKHDGDEDLNDVQRHKKNKHKSSKLDEVGAIRVAG

SEQ ID NO: 70007 - DNA, 1377 bp, Arabidopsis thaliana
  misc_feature (1)..(1377): Ceres Seq. ID no. 2130895
  misc_feature (1)..(1377): Ortholog of  Ceres SEQ ID NO 13656047 as cited in SEQ ID NO 64721
atggaattcacggaggcttacaagcaaacaggtccttgttgtttctccccaaactctcgttacgtcgccgtcgccaatgattatcgtctcgtgatccgtgatacgttttcgtttcaggttgtgcaattgttttcttgcttagataaaataagctacatagaatgggctcttgattcagagtacattctttgtggtctttataaaaaaccgatgattcaagcttggtctttgactcaaccagaatggacttgcaagattgatgaaggtcctgctggtatttcatacgctaggtggagtccagatagccgtcatatactcactacgtcagagtttcagctgcggttaacggtttggtctcttttaaacacggcgtgtgttcatgttcagtggccaaagcatggttccaagggagtttcattcaatcaagatgggaagtttgcggctatatgtacacggcgtgactgtaaggattatgttaaccttttgtcttgtcaatcatgggagataatgggtagctttgctgttgataccttggacttggctgatcttgagtggtcacctgatgatagttctattgtagtgtgggattcgcctcttgaatataaggttctaatttattctccagatggtaggtgtctgtttaagtaccaggcatatgaatgtggacttggtgtcaagactgtttcctggtctccgtgtggtcagtttcttgccattggtagctatgatcaaatgttgcgggtcctgaatcaccttacttggaaaacattcgctgagttcttacacctatcaacggttcgtgcgccctgttctgcggctattttcaaggaaatcgatgaaccattacagcttgatatgtctgagttatcgttggatgaaaactttatgccaagcaattatgatgcttcagaaggctatataagtgtcaggtatgaagtcatggaattaccggtagcttttcctttccagaaacctcctgcggacaagcctaacccaaaacaaggagtcggccttctagcttggagcaaagacagccagtacatatgcacacgaaacgacagtatgcccactgctctgtggatatgggacatgcgcctcctcgaggttgcagccatcctggtccagaaggaacccatccgagcagctgtgtgggacccaacctgcacacgcctcctcctgtgcactggaagctctcacctttacatgtggactccctcgggtgctttctgtgtatgcaatccccttccgggcttctccatatcggacctcaaatggaacattgatggaagctgtctccttctcaaagacaaagatgcgttctgttgtgccacggtcccgtctctgcctgagtccagcgactacagttctgatgactga

SEQ ID NO: 70008 - protein, 458 aa, Arabidopsis thaliana
  peptide (1)..(458): Ceres Seq. ID no. 2130896
MEFTEAYKQTGPCCFSPNSRYVAVANDYRLVIRDTFSFQVVQLFSCLDKISYIEWALDSEYILCGLYKKPMIQAWSLTQPEWTCKIDEGPAGISYARWSPDSRHILTTSEFQLRLTVWSLLNTACVHVQWPKHGSKGVSFNQDGKFAAICTRRDCKDYVNLLSCQSWEIMGSFAVDTLDLADLEWSPDDSSIVVWDSPLEYKVLIYSPDGRCLFKYQAYECGLGVKTVSWSPCGQFLAIGSYDQMLRVLNHLTWKTFAEFLHLSTVRAPCSAAIFKEIDEPLQLDMSELSLDENFMPSNYDASEGYISVRYEVMELPVAFPFQKPPADKPNPKQGVGLLAWSKDSQYICTRNDSMPTALWIWDMRLLEVAAILVQKEPIRAAVWDPTCTRLLLCTGSSHLYMWTPSGAFCVCNPLPGFSISDLKWNIDGSCLLLKDKDAFCCATVPSLPESSDYSSDD

SEQ ID NO: 70009 - protein, 388 aa, Arabidopsis thaliana
  peptide (1)..(388): Ceres Seq. ID no. 2130897
MIQAWSLTQPEWTCKIDEGPAGISYARWSPDSRHILTTSEFQLRLTVWSLLNTACVHVQWPKHGSKGVSFNQDGKFAAICTRRDCKDYVNLLSCQSWEIMGSFAVDTLDLADLEWSPDDSSIVVWDSPLEYKVLIYSPDGRCLFKYQAYECGLGVKTVSWSPCGQFLAIGSYDQMLRVLNHLTWKTFAEFLHLSTVRAPCSAAIFKEIDEPLQLDMSELSLDENFMPSNYDASEGYISVRYEVMELPVAFPFQKPPADKPNPKQGVGLLAWSKDSQYICTRNDSMPTALWIWDMRLLEVAAILVQKEPIRAAVWDPTCTRLLLCTGSSHLYMWTPSGAFCVCNPLPGFSISDLKWNIDGSCLLLKDKDAFCCATVPSLPESSDYSSDD

SEQ ID NO: 70010 - protein, 289 aa, Arabidopsis thaliana
  peptide (1)..(289): Ceres Seq. ID no. 2130898
MGSFAVDTLDLADLEWSPDDSSIVVWDSPLEYKVLIYSPDGRCLFKYQAYECGLGVKTVSWSPCGQFLAIGSYDQMLRVLNHLTWKTFAEFLHLSTVRAPCSAAIFKEIDEPLQLDMSELSLDENFMPSNYDASEGYISVRYEVMELPVAFPFQKPPADKPNPKQGVGLLAWSKDSQYICTRNDSMPTALWIWDMRLLEVAAILVQKEPIRAAVWDPTCTRLLLCTGSSHLYMWTPSGAFCVCNPLPGFSISDLKWNIDGSCLLLKDKDAFCCATVPSLPESSDYSSDD

SEQ ID NO: 70011 - DNA, 1584 bp, Arabidopsis thaliana
  misc_feature (1)..(1584): Ceres Seq. ID no. 2131153
  misc_feature (1)..(1584): Ortholog of  Ceres SEQ ID NO 13657677 as cited in SEQ ID NO 66119
atggcgatgagattttttcaacttcaccgaaatcgtcttgtgaaaggtaattctggaaaagctctctcctttagccgccttttagatcttagtttctgggttcgagctttttgtaattaccgagagattttgagaaatggtcttcactctcttcagtttaatgaagctctcgatttgttcactcacatggttgagtctcgtcctcttccttcaattatcgatttcactaagttattgaatgttattgccaaaatgaagaagtttgatgttgtgatcaatctctgcgaccatctgcagataatgggagtttcacatgatctctatacttgcaatcttttgatgaattgtttctgccaatcttctcagccttatcttgcctcatcttttcttgggaagatgatgaaacttggttttgagcctgatattgtcacgtttacttctctgatcaatgggttctgtctcgggaatagaatggaggaggctatgtctatggtgaatcagatggtggagatggggattaaacctgatgttgtaatgtatacaacaatcattgatagtctttgcaaaaacgggcatgtgaattacgcgttgagccttttcgatcaaatggaaaactacgggattagaccggatgttgttatgtacacctctctcgtgaacggtctttgtaactctggtagatggagagatgctgattcattgctgaggggtatgacgaagaggaaaatcaaacctgatgtaatcactttcaatgcattgatcgatgcgtttgtgaaagaaggaaagtttttggatgctgaagaattgtacaatgagatgattcgtatgtctatagctcctaatattttcacctatacttcattgatcaatgggttttgcatggaaggttgtgtagatgaggccagacaaatgttttatttgatggaaaccaagggttgttttccagatgtagtggcttatacttctctcataaacgggttttgcaagtgtaagaaggtagatgatgcgatgaaaatcttctacgagatgtcccaaaaaggattgactgggaacactatcacttacactactcttatccaaggttttggtcaagtgggcaaacctaatgtcgcccaagaagtttttagtcatatggtttctcgtggcgtgcctcccaatattaggacctataatgttttgttacattgtctatgttataacgggaaggtaaagaaagcgttgatgatatttgaggatatgcaaaagagagaaatggatggtgtcgctcccaatatttggacttacaacgtcttgttacatggtctatgttataatgggaagctagagaaagccttgatggtattcgaggatatgcgaaagagagagatggatattggaattattacatataccatcatcattcaagggatgtgcaaggctggtaaagtgaaaaatgctgttaatttattttgtagccttccttcaaaaggagtgaagcctaatgttgtaacatatactacaatgatatcaggattgtttagggaagggttaaagcatgaagctcatgtgttgtttaggaaaatgaaagaagatggggtttcataa

SEQ ID NO: 70012 - protein, 527 aa, Arabidopsis thaliana
  peptide (1)..(527): Ceres Seq. ID no. 2131154
MAMRFFQLHRNRLVKGNSGKALSFSRLLDLSFWVRAFCNYREILRNGLHSLQFNEALDLFTHMVESRPLPSIIDFTKLLNVIAKMKKFDVVINLCDHLQIMGVSHDLYTCNLLMNCFCQSSQPYLASSFLGKMMKLGFEPDIVTFTSLINGFCLGNRMEEAMSMVNQMVEMGIKPDVVMYTTIIDSLCKNGHVNYALSLFDQMENYGIRPDVVMYTSLVNGLCNSGRWRDADSLLRGMTKRKIKPDVITFNALIDAFVKEGKFLDAEELYNEMIRMSIAPNIFTYTSLINGFCMEGCVDEARQMFYLMETKGCFPDVVAYTSLINGFCKCKKVDDAMKIFYEMSQKGLTGNTITYTTLIQGFGQVGKPNVAQEVFSHMVSRGVPPNIRTYNVLLHCLCYNGKVKKALMIFEDMQKREMDGVAPNIWTYNVLLHGLCYNGKLEKALMVFEDMRKREMDIGIITYTIIIQGMCKAGKVKNAVNLFCSLPSKGVKPNVVTYTTMISGLFREGLKHEAHVLFRKMKEDGVS

SEQ ID NO: 70013 - protein, 525 aa, Arabidopsis thaliana
  peptide (1)..(525): Ceres Seq. ID no. 2131155
MRFFQLHRNRLVKGNSGKALSFSRLLDLSFWVRAFCNYREILRNGLHSLQFNEALDLFTHMVESRPLPSIIDFTKLLNVIAKMKKFDVVINLCDHLQIMGVSHDLYTCNLLMNCFCQSSQPYLASSFLGKMMKLGFEPDIVTFTSLINGFCLGNRMEEAMSMVNQMVEMGIKPDVVMYTTIIDSLCKNGHVNYALSLFDQMENYGIRPDVVMYTSLVNGLCNSGRWRDADSLLRGMTKRKIKPDVITFNALIDAFVKEGKFLDAEELYNEMIRMSIAPNIFTYTSLINGFCMEGCVDEARQMFYLMETKGCFPDVVAYTSLINGFCKCKKVDDAMKIFYEMSQKGLTGNTITYTTLIQGFGQVGKPNVAQEVFSHMVSRGVPPNIRTYNVLLHCLCYNGKVKKALMIFEDMQKREMDGVAPNIWTYNVLLHGLCYNGKLEKALMVFEDMRKREMDIGIITYTIIIQGMCKAGKVKNAVNLFCSLPSKGVKPNVVTYTTMISGLFREGLKHEAHVLFRKMKEDGVS

SEQ ID NO: 70014 - protein, 465 aa, Arabidopsis thaliana
  peptide (1)..(465): Ceres Seq. ID no. 2131156
MVESRPLPSIIDFTKLLNVIAKMKKFDVVINLCDHLQIMGVSHDLYTCNLLMNCFCQSSQPYLASSFLGKMMKLGFEPDIVTFTSLINGFCLGNRMEEAMSMVNQMVEMGIKPDVVMYTTIIDSLCKNGHVNYALSLFDQMENYGIRPDVVMYTSLVNGLCNSGRWRDADSLLRGMTKRKIKPDVITFNALIDAFVKEGKFLDAEELYNEMIRMSIAPNIFTYTSLINGFCMEGCVDEARQMFYLMETKGCFPDVVAYTSLINGFCKCKKVDDAMKIFYEMSQKGLTGNTITYTTLIQGFGQVGKPNVAQEVFSHMVSRGVPPNIRTYNVLLHCLCYNGKVKKALMIFEDMQKREMDGVAPNIWTYNVLLHGLCYNGKLEKALMVFEDMRKREMDIGIITYTIIIQGMCKAGKVKNAVNLFCSLPSKGVKPNVVTYTTMISGLFREGLKHEAHVLFRKMKEDGVS

SEQ ID NO: 70015 - DNA, 2100 bp, Arabidopsis thaliana
  misc_feature (1)..(2100): Ceres Seq. ID no. 2133275
  misc_feature (1)..(2100): Ortholog of  Ceres SEQ ID NO 13663839 as cited in SEQ ID NO 60834
  misc_feature (1)..(2100): Ortholog of  Ceres SEQ ID NO 14313284 as cited in SEQ ID NO 67146
  misc_feature (1)..(2100): Ortholog of  Ceres SEQ ID NO 14308925 as cited in SEQ ID NO 0
atggcggacgcagaaacctttgctttccaagctgagatcaaccagttgctctccctcatcatcaataccttttactctaacaaggagatcttccttcgtgaactcatcagtaactcttctgatgctttggacaagattaggtttgagtccttgacagacaagagcaagctcgatggtcagccagagctcttcattcacatcattcccgacaagactaacaacaccttgacgattatcgatagtggtattgggatgaccaaggctgatctggtgaacaaccttggaacaattgcaagatctggaaccaaagaattcatggaggcgttggctgctggagctgatgttagcatgattggacagtttggtgttggtttctactctgcttacttggttgctgacaaggttgttgttactaccaagcacaatgacgatgagcagtacgtgtgggagtctcaggccggtggatctttcaccgtcaccagagacacctctggtgaggctcttggtagaggaactaagatggtcctttacctcaaggaagaccagatggagtacattgaggagcgaaggcttaaggatttggtgaagaagcactctgagttcatcagctacccaatctctctctggattgagaagaccattgagaaggagatctctgatgatgaagaggaggaagagaagaaggatgaggaaggcaaggttgaggaagttgatgaggagaaagaaaaggaggagaagaaaaagaagaagattaaggaggtttctcatgagtgggatttggtgaacaagcagaaaccgatttggatgaggaagccagaggagatcaacaaggaggagtacgctgctttctacaagagtttgagcaatgactgggaagagcatttggctgtgaagcatttctcagttgaaggacagcttgagttcaaagctatcctctttgttcccaagagagctccttttgatctctttgacactaagaagaagcccaacaacatcaagctctatgtccgtcgtgtcttcatcatggacaactgtgaagacatcattcctgagtaccttgggtttgtcaagggtattgttgactctgaagatcttcctctcaacatctcaagagaaacattgcagcagaacaagatcctcaaggtcatccgcaagaaccttgtgaagaagtgtcttgagctcttctttgagattgctgagaacaaggaggactacaacaagttctatgaggctttctctaagaacctgaagctcggtatccatgaggactcccaaaacagaaccaagattgctgagttgctccgttaccactcaaccaagagcggtgatgaattgaccagtctcaaggactacgtgacaaggatgaaggaaggtcagaacgatatcttctatatcactggtgagagcaagaaggctgttgagaactctccattccttgagaagctcaagaagaagggtattgaagttctctacatggttgacgctatcgatgagtatgctattggtcagctcaaggaattcgaaggaaagaagcttgtctctgcaaccaaggaaggtctgaaactggatgagactgaagacgagaagaagaagaaagaagagctcaaggagaagtttgagggactctgcaaagtgatcaaggacgttttgggagacaaggttgagaaggttatcgtctctgaccgtgttgtggactcaccctgctgtcttgtaacaggcgagtatggctggactgcaaacatggagaggatcatgaaagctcaagccttgagagacagcagcatgggtggctacatgtcgagcaagaagacaatggagattaacccagagaactccatcatggatgagctgagaaagagagctgatgcagacaagaacgacaagtctgtgaaggaccttgtacttcttctctttgagaccgctcttctcacttctggtttcagcctcgatgagcccaacactttcgggagcaggattcacaggatgttgaagcttggattgagcattgatgacgatgatgttgttgaagccgatgctgacatgcctccacttgaagatgatgccgatgctgaaggtagcaagatggaggaagttgactaa

SEQ ID NO: 70016 - protein, 699 aa, Arabidopsis thaliana; identical to SEQ ID NO: 49702
  peptide (1)..(699): Ceres Seq. ID no. 2133276

SEQ ID NO: 70017 - protein, 615 aa, Arabidopsis thaliana; identical to SEQ ID NO: 49703
  peptide (1)..(615): Ceres Seq. ID no. 2133277

SEQ ID NO: 70018 - protein, 594 aa, Arabidopsis thaliana
  peptide (1)..(594): Ceres Seq. ID no. 2133278
MEALAAGADVSMIGQFGVGFYSAYLVADKVVVTTKHNDDEQYVWESQAGGSFTVTRDTSGEALGRGTKMVLYLKEDQMEYIEERRLKDLVKKHSEFISYPISLWIEKTIEKEISDDEEEEEKKDEEGKVEEVDEEKEKEEKKKKKIKEVSHEWDLVNKQKPIWMRKPEEINKEEYAAFYKSLSNDWEEHLAVKHFSVEGQLEFKAILFVPKRAPFDLFDTKKKPNNIKLYVRRVFIMDNCEDIIPEYLGFVKGIVDSEDLPLNISRETLQQNKILKVIRKNLVKKCLELFFEIAENKEDYNKFYEAFSKNLKLGIHEDSQNRTKIAELLRYHSTKSGDELTSLKDYVTRMKEGQNDIFYITGESKKAVENSPFLEKLKKKGIEVLYMVDAIDEYAIGQLKEFEGKKLVSATKEGLKLDETEDEKKKKEELKEKFEGLCKVIKDVLGDKVEKVIVSDRVVDSPCCLVTGEYGWTANMERIMKAQALRDSSMGGYMSSKKTMEINPENSIMDELRKRADADKNDKSVKDLVLLLFETALLTSGFSLDEPNTFGSRIHRMLKLGLSIDDDDVVEADADMPPLEDDADAEGSKMEEVD

SEQ ID NO: 70019 - DNA, 420 bp, Arabidopsis thaliana
  misc_feature (1)..(420): Ceres Seq. ID no. 2133633
  misc_feature (1)..(420): Ortholog of  Ceres SEQ ID NO 13581889 as cited in SEQ ID NO 50900
  misc_feature (1)..(420): Ortholog of  Ceres SEQ ID NO 13581902 as cited in SEQ ID NO 52223
atggctcgtaccaagcagactgctagaatatccaccggaggaaaagctccgaggaagcaattagcgccaaaagcggcgagacaatctgcaccagcaacgggaggagtgaagaagccacacagattccgtccaggaactgttgcgttgagagatattaggaaataccaaaagagtaccgagattttgatcagaaagcttccgtttcagcgacttgttcgtgagatcgctcaagatttcaaaacggatctgaggtttcagagcagtgccgtcgctgctctccaggaagctgctgaggcttaccttgttgggttattcgaagatacaaacctctgtgcgattcacgcaaagagggtgacgatcatgcctaaagagatccaattagcgagaaggattagaggtgagagagctcgaggagagtga

SEQ ID NO: 70020 - protein, 139 aa, Arabidopsis thaliana
  peptide (1)..(139): Ceres Seq. ID no. 2133634
MARTKQTARISTGGKAPRKQLAPKAARQSAPATGGVKKPHRFRPGTVALRDIRKYQKSTEILIRKLPFQRLVREIAQDFKTDLRFQSSAVAALQEAAEAYLVGLFEDTNLCAIHAKRVTIMPKEIQLARRIRGERARGE

SEQ ID NO: 70021 - DNA, 672 bp, Arabidopsis thaliana
  misc_feature (1)..(672): Ceres Seq. ID no. 2133726
  misc_feature (1)..(672): Ortholog of  Ceres SEQ ID NO 13528157 as cited in SEQ ID NO 60102
atgagctcgttatcaaaaccaaacagacaatttttgtcaccaacaacaaacaaccaagacaccggcagagaacaaacaatcgcctgcgcccgagatatggttgtcttgtacaacgagtgccttaaaaaccacgcggtcagtctcggaggccacgctcttgacggctgcggtgagttcacaccaaagtcaaccaccatcctcacggaccctccgtcccttaggtgcgatgcttgtggctgccatcgcaacttccaccgtcgtagtccttctgacggcttcagtcagcaccggtcaccaccgtctccgttacagctgcagccactcgcccctgttccgaacttgcttctctctcttagctccggtttctttggaccctcggatcaagaagtcaagaacaaatttacggtggaaagggatgttaggaagactgcgatgattaagaaacataagaggacgaaattcacggcggagcagaaggtgaagatgagaggtttcgcggagagagcggggtggaagattaacggctgggatgagaagtgggtgagagagttttgtagtgaagttggaatagagagaaaagttcttaaggtttggatccacaacaataagtactttaacaacgggaggagcagagacacgacgtcctctatgtctttgaatttgaagttgtag

SEQ ID NO: 70022 - protein, 223 aa, Arabidopsis thaliana
  peptide (1)..(223): Ceres Seq. ID no. 2133727
MSSLSKPNRQFLSPTTNNQDTGREQTIACARDMVVLYNECLKNHAVSLGGHALDGCGEFTPKSTTILTDPPSLRCDACGCHRNFHRRSPSDGFSQHRSPPSPLQLQPLAPVPNLLLSLSSGFFGPSDQEVKNKFTVERDVRKTAMIKKHKRTKFTAEQKVKMRGFAERAGWKINGWDEKWVREFCSEVGIERKVLKVWIHNNKYFNNGRSRDTTSSMSLNLKL

SEQ ID NO: 70023 - protein, 191 aa, Arabidopsis thaliana
  peptide (1)..(191): Ceres Seq. ID no. 2133728
MVVLYNECLKNHAVSLGGHALDGCGEFTPKSTTILTDPPSLRCDACGCHRNFHRRSPSDGFSQHRSPPSPLQLQPLAPVPNLLLSLSSGFFGPSDQEVKNKFTVERDVRKTAMIKKHKRTKFTAEQKVKMRGFAERAGWKINGWDEKWVREFCSEVGIERKVLKVWIHNNKYFNNGRSRDTTSSMSLNLKL

SEQ ID NO: 70024 - DNA, 1080 bp, Arabidopsis thaliana
  misc_feature (1)..(1080): Ceres Seq. ID no. 2134333
  misc_feature (1)..(1080): Ortholog of  Ceres SEQ ID NO 14314526 as cited in SEQ ID NO 52420
atggcgagaagcgatgttttgatttttgtttctactcttcttctgtttctgtctctgcttacggtagctgatgcggaattggtgaaatctgacaagtttccggtagtggtgagtacttggcctttccttgaagctgttagagctgcttggagagcagttgataatgggagctctgcagtggaagctgttgttgaaggttgttctgcttgtgaagaacttcgttgtgacggtacagttgggcctggaggaagtccggatgagaatggtgagaccatgattgatgctttagtcatggatggggtgactatggaggttggagctgttgctgcaatgcggtatgttaaagacggtataagagctgcacatctagtgatgaaatactctcaacacacgttgcttgccggagaaggagcatcagcatttgcaatctccatgggtctccccggacccatgaacctaagctcccctgaatctgtaaagaagtggtcggactggaaagagaatcagtgtcaacccaatttcaggaagaatgtagtccccgcaaatgactgtggaccttacaagccaaacaatagtgctatgaatgtttttgtagacaaaagcactgaatcttgcgagatgggggcgattgagtataaacctcctcttgttggtcctcacaatcacgatacgatatcgatggctgtcattgacagaatggggcatatagctgttgggacatcgaccaatggagccacatataaaattcctggaagggttggtgatgggcctatcgtcggttcatcagcctacgctgatgatgaagtaggtggatgtggtgcaactggagatggtgacaccatgatgcgcttcctcccttgttaccaagttgtggagagcatgagacaaggaatgaaaccagaagaagctgctaaagatgcaatctcgagaatcgcaaggaagtttccagatttcgtgggagcagttgtggctgttgacaagaacggatctcacgcaggagcttgctatggctggacgtttcagtactcagtccaaaaccctgacatgaacgatgttcaagtctttacagttcttccatga

SEQ ID NO: 70025 - protein, 359 aa, Arabidopsis thaliana
  peptide (1)..(359): Ceres Seq. ID no. 2134334
MARSDVLIFVSTLLLFLSLLTVADAELVKSDKFPVVVSTWPFLEAVRAAWRAVDNGSSAVEAVVEGCSACEELRCDGTVGPGGSPDENGETMIDALVMDGVTMEVGAVAAMRYVKDGIRAAHLVMKYSQHTLLAGEGASAFAISMGLPGPMNLSSPESVKKWSDWKENQCQPNFRKNVVPANDCGPYKPNNSAMNVFVDKSTESCEMGAIEYKPPLVGPHNHDTISMAVIDRMGHIAVGTSTNGATYKIPGRVGDGPIVGSSAYADDEVGGCGATGDGDTMMRFLPCYQVVESMRQGMKPEEAAKDAISRIARKFPDFVGAVVAVDKNGSHAGACYGWTFQYSVQNPDMNDVQVFTVLP

SEQ ID NO: 70026 - protein, 268 aa, Arabidopsis thaliana
  peptide (1)..(268): Ceres Seq. ID no. 2134335
MIDALVMDGVTMEVGAVAAMRYVKDGIRAAHLVMKYSQHTLLAGEGASAFAISMGLPGPMNLSSPESVKKWSDWKENQCQPNFRKNVVPANDCGPYKPNNSAMNVFVDKSTESCEMGAIEYKPPLVGPHNHDTISMAVIDRMGHIAVGTSTNGATYKIPGRVGDGPIVGSSAYADDEVGGCGATGDGDTMMRFLPCYQVVESMRQGMKPEEAAKDAISRIARKFPDFVGAVVAVDKNGSHAGACYGWTFQYSVQNPDMNDVQVFTVLP

SEQ ID NO: 70027 - protein, 262 aa, Arabidopsis thaliana
  peptide (1)..(262): Ceres Seq. ID no. 2134336
MDGVTMEVGAVAAMRYVKDGIRAAHLVMKYSQHTLLAGEGASAFAISMGLPGPMNLSSPESVKKWSDWKENQCQPNFRKNVVPANDCGPYKPNNSAMNVFVDKSTESCEMGAIEYKPPLVGPHNHDTISMAVIDRMGHIAVGTSTNGATYKIPGRVGDGPIVGSSAYADDEVGGCGATGDGDTMMRFLPCYQVVESMRQGMKPEEAAKDAISRIARKFPDFVGAVVAVDKNGSHAGACYGWTFQYSVQNPDMNDVQVFTVLP

SEQ ID NO: 70028 - DNA, 1323 bp, Arabidopsis thaliana
  misc_feature (1)..(1323): Ceres Seq. ID no. 2134528
  misc_feature (1)..(1323): Ortholog of  Ceres SEQ ID NO 13656091 as cited in SEQ ID NO 69094
atggatccacagattgttgtagacataaagagtttaatctcagaagataatggtttgaagcttcttagagaatcagctggttcagagttatgttgcatcgtgagaatcccacagagcctcgctcgaatcaacctcaaagcttatgaaccgaagattgtctccattggtccttaccatcacggcaaagagcatctcaaaatgactcagcagcataaacgccgattcttgaagtttttcgtggctaaaatggaagaaaaaggatttgttcctcaagaattggtcaaagctgtatcgagtttggaaggagttatacgaggttcttactccgaggatctaggtttagattctgaaaacttggttcagatgatggttcttgatggttgctttatcctcacgttgttctttgttgtttccgggaaagttgaatacactaatcttgatgatccgatttttcgaatgccgtggattttgccgtcgattcgagcagatcttctccttttggaaaaccaggttccttatgttcttcttcaaactctatttgaaacatcgaagttagttacttgtagtggtttaaacgaaatcgcctttgaattctttaactactcattacaaaaaccagagaccttttgggaaaaacattatggtcttgaagcaaaacatcttcttgatttgatacgtaagacttttgttcctgttccgtctcaaagaagaatcaaagatcatagcagtaaatcgtcattcaatgatcatgaatatctcggatttgttctctctgccaagaagcttcatcttcggggaatcaaattcaaaccgaggaaaaacacagactcaatcttagacattagttatagtaatggtgtgcttcacattcctccggtagtcatggatgattttaccgcctcgatctttttaaactgtgtcgcatttgagcaattatatgctgattcatcgaaccacataacgagctacgtagctttcatggcttgtcttataaacgaagagagtgatgcatcgttccttagcgaaaggaggatcctagagaactattttggaacagaggatgaagtgtcccggttctataaacgcattggtaaagacattgccctcgacttagagaagagttacctagcaaaggtgtttgaaggagttaacgagtatacttctcaaggattccatgttcattgtgcagagtttattcatacgcatttcgatagtccatggacatttgcatcatcatttgcagcgttgttgcttcttctgtttgcggctttgcaagtcttctttgcagcttatagttatttccgtcctccaaaagaaaagtga

SEQ ID NO: 70029 - protein, 440 aa, Arabidopsis thaliana
  peptide (1)..(440): Ceres Seq. ID no. 2134529
MDPQIVVDIKSLISEDNGLKLLRESAGSELCCIVRIPQSLARINLKAYEPKIVSIGPYHHGKEHLKMTQQHKRRFLKFFVAKMEEKGFVPQELVKAVSSLEGVIRGSYSEDLGLDSENLVQMMVLDGCFILTLFFVVSGKVEYTNLDDPIFRMPWILPSIRADLLLLENQVPYVLLQTLFETSKLVTCSGLNEIAFEFFNYSLQKPETFWEKHYGLEAKHLLDLIRKTFVPVPSQRRIKDHSSKSSFNDHEYLGFVLSAKKLHLRGIKFKPRKNTDSILDISYSNGVLHIPPVVMDDFTASIFLNCVAFEQLYADSSNHITSYVAFMACLINEESDASFLSERRILENYFGTEDEVSRFYKRIGKDIALDLEKSYLAKVFEGVNEYTSQGFHVHCAEFIHTHFDSPWTFASSFAALLLLLFAALQVFFAAYSYFRPPKEK

SEQ ID NO: 70030 - protein, 374 aa, Arabidopsis thaliana
  peptide (1)..(374): Ceres Seq. ID no. 2134530
MTQQHKRRFLKFFVAKMEEKGFVPQELVKAVSSLEGVIRGSYSEDLGLDSENLVQMMVLDGCFILTLFFVVSGKVEYTNLDDPIFRMPWILPSIRADLLLLENQVPYVLLQTLFETSKLVTCSGLNEIAFEFFNYSLQKPETFWEKHYGLEAKHLLDLIRKTFVPVPSQRRIKDHSSKSSFNDHEYLGFVLSAKKLHLRGIKFKPRKNTDSILDISYSNGVLHIPPVVMDDFTASIFLNCVAFEQLYADSSNHITSYVAFMACLINEESDASFLSERRILENYFGTEDEVSRFYKRIGKDIALDLEKSYLAKVFEGVNEYTSQGFHVHCAEFIHTHFDSPWTFASSFAALLLLLFAALQVFFAAYSYFRPPKEK

SEQ ID NO: 70031 - protein, 358 aa, Arabidopsis thaliana
  peptide (1)..(358): Ceres Seq. ID no. 2134531
MEEKGFVPQELVKAVSSLEGVIRGSYSEDLGLDSENLVQMMVLDGCFILTLFFVVSGKVEYTNLDDPIFRMPWILPSIRADLLLLENQVPYVLLQTLFETSKLVTCSGLNEIAFEFFNYSLQKPETFWEKHYGLEAKHLLDLIRKTFVPVPSQRRIKDHSSKSSFNDHEYLGFVLSAKKLHLRGIKFKPRKNTDSILDISYSNGVLHIPPVVMDDFTASIFLNCVAFEQLYADSSNHITSYVAFMACLINEESDASFLSERRILENYFGTEDEVSRFYKRIGKDIALDLEKSYLAKVFEGVNEYTSQGFHVHCAEFIHTHFDSPWTFASSFAALLLLLFAALQVFFAAYSYFRPPKEK

SEQ ID NO: 70032 - DNA, 2052 bp, Arabidopsis thaliana
  misc_feature (1)..(2052): Ceres Seq. ID no. 2135104
  misc_feature (1)..(2052): Ortholog of  Ceres SEQ ID NO 13598865 as cited in SEQ ID NO 0
atggccgcaacaacaaccacggcggcgagtatcaacgccgaagccggaggtggtggtgggggagctgaagaccgtgttctcgctacggcgcaacagatcatgaaaagcctcaacacaccaaaagaggttcgtgaagatatgttacttatcttctcaagcttcgataaccgtttatcaaatatcaaaaccgcgatgacgaaccaggaagagaatcaaaacgacgctcttgtggcgcgtttagaggctgcagaatcggttattcatcggtgggatggtggtaatgattcttctcgtcactcgtcttcgtcttctggtaactatcgttcctcttcgttttctctttcgtttgatgaatctccggaggaagctaccgagtttctttcagctgttgatgagattatctctttgcttgaggatctttcgtctgagaataagcctgatatggtggatagagctgatagtgctttgcagatggctatgtctcagcttgaagatgaatttagacggattttgattcgtaacactgttcctttagacgctgagcgactctatggctcgatgcggcgtgtttcgttgtcctttgctgatggtgatgttgttgaggattttgagaattttggtttggttgctgatggagatggtagtgggagtaggaggaggttgtttcatgagagaggagggagtatagggtgtgatctttgggttgatttgattaatccaactgctgttgaagatttgaaggagattgcagagcggatgattcgcgctggttatgagaaggagtgtgttcaggtttatagttcggttaggcgtgatgctttggatgattgtttgatgattcttggtgttgagaagctgagtatagaagaagttcagaagattgattggaagtctatggatgagaagatgaagaagtggattcaagctgtgaagattactgttagggttcttcttgttggtgagaaaaagatatgtgatgagatctttagcagttcggagtcgagtaaagaggtttgctttaacgagacaactaaaagctgtgtgatgcagttgttgaatttcggagaggctgtggcgattggtagaagatcatcagagaagttgtttaggattctggacatgtatgatgcgttggctaatgtgttgcagactttagaggtgatggtcactgactgttttgtgtgtaatgagaccaagggggtgttggaagcactgggtgatgctgcgagggggacttttgttgagtttgagaataatgttcggaatgagacatcaaagagaccgacgacaaatggtgaggttcatccaatgatacgttatgtgatgaattacatgaaattgattgtggattatgcggtgaccttaaattcgcttctggagagtaatgagtcaagtggcgtatctggtgatgatagtacagaagagatgtctcctcttgcgaaaagaatattggggttgattacgtcgttggaatcaaatcttgaagataaatcaaagttgtatgaagatggtgggctgcaacatgtgttcatgatgaacaacatttactacatagttcagaaggtgaaggattctgagcttggtaaactcttgggtgatgattgggttagaaaacgaagagggcagatacgtcaatatgctaccggttacctcagggcttcctggagcagggtgctatctgctttgagggacgaaagtatgggtggaagttcaagtggtagtccgagttatggacaaagaagcaacaattcttccaagatggcgttaaaagagagattcagaggttttaatgccagctttgaagagttatacaggctgcaaacggcttggaaggtcccggatcctcaacttcgtgaagaactgagaatatctatatcagagaaagtaatcccggcttaccgggctttcttcggaaggaataggagtcaactagaaggtggtaggcatgctggaaagtacataaagtacacaccagatgacctggagagttacttaccagacctatttgaaggaaatcaattggttattcaccacccgagaaggaaaagttaa

SEQ ID NO: 70033 - protein, 683 aa, Arabidopsis thaliana
  peptide (1)..(683): Ceres Seq. ID no. 2135105
MAATTTTAASINAEAGGGGGGAEDRVLATAQQIMKSLNTPKEVREDMLLIFSSFDNRLSNIKTAMTNQEENQNDALVARLEAAESVIHRWDGGNDSSRHSSSSSGNYRSSSFSLSFDESPEEATEFLSAVDEIISLLEDLSSENKPDMVDRADSALQMAMSQLEDEFRRILIRNTVPLDAERLYGSMRRVSLSFADGDVVEDFENFGLVADGDGSGSRRRLFHERGGSIGCDLWVDLINPTAVEDLKEIAERMIRAGYEKECVQVYSSVRRDALDDCLMILGVEKLSIEEVQKIDWKSMDEKMKKWIQAVKITVRVLLVGEKKICDEIFSSSESSKEVCFNETTKSCVMQLLNFGEAVAIGRRSSEKLFRILDMYDALANVLQTLEVMVTDCFVCNETKGVLEALGDAARGTFVEFENNVRNETSKRPTTNGEVHPMIRYVMNYMKLIVDYAVTLNSLLESNESSGVSGDDSTEEMSPLAKRILGLITSLESNLEDKSKLYEDGGLQHVFMMNNIYYIVQKVKDSELGKLLGDDWVRKRRGQIRQYATGYLRASWSRVLSALRDESMGGSSSGSPSYGQRSNNSSKMALKERFRGFNASFEELYRLQTAWKVPDPQLREELRISISEKVIPAYRAFFGRNRSQLEGGRHAGKYIKYTPDDLESYLPDLFEGNQLVIHHPRRKS

SEQ ID NO: 70034 - protein, 650 aa, Arabidopsis thaliana
  peptide (1)..(650): Ceres Seq. ID no. 2135106
MKSLNTPKEVREDMLLIFSSFDNRLSNIKTAMTNQEENQNDALVARLEAAESVIHRWDGGNDSSRHSSSSSGNYRSSSFSLSFDESPEEATEFLSAVDEIISLLEDLSSENKPDMVDRADSALQMAMSQLEDEFRRILIRNTVPLDAERLYGSMRRVSLSFADGDVVEDFENFGLVADGDGSGSRRRLFHERGGSIGCDLWVDLINPTAVEDLKEIAERMIRAGYEKECVQVYSSVRRDALDDCLMILGVEKLSIEEVQKIDWKSMDEKMKKWIQAVKITVRVLLVGEKKICDEIFSSSESSKEVCFNETTKSCVMQLLNFGEAVAIGRRSSEKLFRILDMYDALANVLQTLEVMVTDCFVCNETKGVLEALGDAARGTFVEFENNVRNETSKRPTTNGEVHPMIRYVMNYMKLIVDYAVTLNSLLESNESSGVSGDDSTEEMSPLAKRILGLITSLESNLEDKSKLYEDGGLQHVFMMNNIYYIVQKVKDSELGKLLGDDWVRKRRGQIRQYATGYLRASWSRVLSALRDESMGGSSSGSPSYGQRSNNSSKMALKERFRGFNASFEELYRLQTAWKVPDPQLREELRISISEKVIPAYRAFFGRNRSQLEGGRHAGKYIKYTPDDLESYLPDLFEGNQLVIHHPRRKS

SEQ ID NO: 70035 - protein, 637 aa, Arabidopsis thaliana
  peptide (1)..(637): Ceres Seq. ID no. 2135107
MLLIFSSFDNRLSNIKTAMTNQEENQNDALVARLEAAESVIHRWDGGNDSSRHSSSSSGNYRSSSFSLSFDESPEEATEFLSAVDEIISLLEDLSSENKPDMVDRADSALQMAMSQLEDEFRRILIRNTVPLDAERLYGSMRRVSLSFADGDVVEDFENFGLVADGDGSGSRRRLFHERGGSIGCDLWVDLINPTAVEDLKEIAERMIRAGYEKECVQVYSSVRRDALDDCLMILGVEKLSIEEVQKIDWKSMDEKMKKWIQAVKITVRVLLVGEKKICDEIFSSSESSKEVCFNETTKSCVMQLLNFGEAVAIGRRSSEKLFRILDMYDALANVLQTLEVMVTDCFVCNETKGVLEALGDAARGTFVEFENNVRNETSKRPTTNGEVHPMIRYVMNYMKLIVDYAVTLNSLLESNESSGVSGDDSTEEMSPLAKRILGLITSLESNLEDKSKLYEDGGLQHVFMMNNIYYIVQKVKDSELGKLLGDDWVRKRRGQIRQYATGYLRASWSRVLSALRDESMGGSSSGSPSYGQRSNNSSKMALKERFRGFNASFEELYRLQTAWKVPDPQLREELRISISEKVIPAYRAFFGRNRSQLEGGRHAGKYIKYTPDDLESYLPDLFEGNQLVIHHPRRKS

SEQ ID NO: 70036 - DNA, 2106 bp, Arabidopsis thaliana
  misc_feature (1)..(2106): Ceres Seq. ID no. 2135111
  misc_feature (1)..(2106): Ortholog of  Ceres SEQ ID NO 12586556 as cited in SEQ ID NO 64667
  misc_feature (1)..(2106): Ortholog of  Ceres SEQ ID NO 13660894 as cited in SEQ ID NO 67475
atggagattccactctcgcgttaccagagcataagattagacgagattcgagactcttcttccaatcccaaggttctcactttcccgcgaaaattctcgttacgaggaagaagatggaagaacccatttggaagactcagttgttcttctgtagttcaaggtctgaaaccaaaaccaaagctgaaaccagaaccaattagaatcgaggttaaggaatcgaaagatcagattttggatgatacccagatcagtaaatctggtgtaacgatttgtagtcagatagagaagttggttttgtgtaatagattcagagaagcttttgaattgtttgagattctggagattcgctgtagttttaaggttggtgttagtacttatgatgctttagtggaagcttgtattcgtttgaaatcgattcggtgtgttaaaagggtttatgggtttatgatgagtaatgggtttgagccggagcagtatatgatgaacagaatcttgttgatgcatgtcaagtgtgggatgattattgatgcacgtaggttgtttgatgaaatccctgagagaaatttgtattcttattactcgattatctctgggtttgttaattttgggaattatgttgaagcttttgagttgtttaagatgatgtgggaggagctttctgattgtgagactcatacgtttgcggtgatgctacgggcctcggctggcttagggtctatttatgtggggaaacagttacacgtttgtgcgttgaagttaggagttgttgataatacctttgtctcgtgtggattgattgatatgtatagcaagtgtggggatattgaagatgctcgatgtgcttttgagtgtatgcccgagaaaactactgttgcttggaacaacgttattgcgggttatgcgcttcatggttatagtgaggaagctctgtgtttgttgtatgacatgcgagactcaggtgtgtctattgatcagttcacactttcgataatgataagaatttctacaaagcttgcaaagcttgagcttactaagcaggcacacgctagtttaattcgaaacggttttgaatcggaaatcgttgcaaacacagctcttgtagacttttatagcaaatggggtagagtagatactgctagatatgtttttgataaattgccgagaaaaaatataatctcatggaacgctttgatgggtggatatgcaaatcatggtagaggaactgatgctgttaagttgtttgagaaaatgattgcagcaaacgtcgctccaaaccatgtcacatttcttgcagttctatcagcttgtgcctattcaggtttatctgagcaaggttgggagatttttctatcgatgagtgaggttcatgggatcaaaccaagggcgatgcattatgcctgcatgattgagctgttgggtagagacggtttattagatgaagccattgcgtttatccgaagagctcctttgaaaaccacggtgaacatgtgggcagcactcttgaatgcctgtaggatgcaggaaaacttagagcttggaagagtggttgctgaaaaactctatggaatgggacccgagaagctcggaaactacgttgtgatgtataatatgtacaacagtatgggaaaaactgcagaagctgcaggggttttggagacattggagagcaaaggattaagcatgatgccggcttgtacttgggttgaggttggagatcagactcacagctttctttcaggagataggtttgattcttacaatgagacggtgaaaaggcagatataccaaaaagtggatgaactaatggaagagatttccgagtatgggtactcagaggaggagcaacaccttcttccagacgtagatgaaaaggaagaagagcgagtagggcgatatcacagcgagaaactagccatagcttacggattggtgaatacgccggaatggaatccattgcagattactcagaaccataggatatgcaaaaattgccacaaggtggttgagttcatatctttggttacaggacgagagatggtagtgagagacgcgagccggttccatcattttaaagaagggaagtgttcttgtggaggttattggtga

SEQ ID NO: 70037 - protein, 701 aa, Arabidopsis thaliana
  peptide (1)..(701): Ceres Seq. ID no. 2135112
MEIPLSRYQSIRLDEIRDSSSNPKVLTFPRKFSLRGRRWKNPFGRLSCSSVVQGLKPKPKLKPEPIRIEVKESKDQILDDTQISKSGVTICSQIEKLVLCNRFREAFELFEILEIRCSFKVGVSTYDALVEACIRLKSIRCVKRVYGFMMSNGFEPEQYMMNRILLMHVKCGMIIDARRLFDEIPERNLYSYYSIISGFVNFGNYVEAFELFKMMWEELSDCETHTFAVMLRASAGLGSIYVGKQLHVCALKLGVVDNTFVSCGLIDMYSKCGDIEDARCAFECMPEKTTVAWNNVIAGYALHGYSEEALCLLYDMRDSGVSIDQFTLSIMIRISTKLAKLELTKQAHASLIRNGFESEIVANTALVDFYSKWGRVDTARYVFDKLPRKNIISWNALMGGYANHGRGTDAVKLFEKMIAANVAPNHVTFLAVLSACAYSGLSEQGWEIFLSMSEVHGIKPRAMHYACMIELLGRDGLLDEAIAFIRRAPLKTTVNMWAALLNACRMQENLELGRVVAEKLYGMGPEKLGNYVVMYNMYNSMGKTAEAAGVLETLESKGLSMMPACTWVEVGDQTHSFLSGDRFDSYNETVKRQIYQKVDELMEEISEYGYSEEEQHLLPDVDEKEEERVGRYHSEKLAIAYGLVNTPEWNPLQITQNHRICKNCHKVVEFISLVTGREMVVRDASRFHHFKEGKCSCGGYW

SEQ ID NO: 70038 - protein, 553 aa, Arabidopsis thaliana
  peptide (1)..(553): Ceres Seq. ID no. 2135113
MMSNGFEPEQYMMNRILLMHVKCGMIIDARRLFDEIPERNLYSYYSIISGFVNFGNYVEAFELFKMMWEELSDCETHTFAVMLRASAGLGSIYVGKQLHVCALKLGVVDNTFVSCGLIDMYSKCGDIEDARCAFECMPEKTTVAWNNVIAGYALHGYSEEALCLLYDMRDSGVSIDQFTLSIMIRISTKLAKLELTKQAHASLIRNGFESEIVANTALVDFYSKWGRVDTARYVFDKLPRKNIISWNALMGGYANHGRGTDAVKLFEKMIAANVAPNHVTFLAVLSACAYSGLSEQGWEIFLSMSEVHGIKPRAMHYACMIELLGRDGLLDEAIAFIRRAPLKTTVNMWAALLNACRMQENLELGRVVAEKLYGMGPEKLGNYVVMYNMYNSMGKTAEAAGVLETLESKGLSMMPACTWVEVGDQTHSFLSGDRFDSYNETVKRQIYQKVDELMEEISEYGYSEEEQHLLPDVDEKEEERVGRYHSEKLAIAYGLVNTPEWNPLQITQNHRICKNCHKVVEFISLVTGREMVVRDASRFHHFKEGKCSCGGYW

SEQ ID NO: 70039 - protein, 552 aa, Arabidopsis thaliana
  peptide (1)..(552): Ceres Seq. ID no. 2135114
MSNGFEPEQYMMNRILLMHVKCGMIIDARRLFDEIPERNLYSYYSIISGFVNFGNYVEAFELFKMMWEELSDCETHTFAVMLRASAGLGSIYVGKQLHVCALKLGVVDNTFVSCGLIDMYSKCGDIEDARCAFECMPEKTTVAWNNVIAGYALHGYSEEALCLLYDMRDSGVSIDQFTLSIMIRISTKLAKLELTKQAHASLIRNGFESEIVANTALVDFYSKWGRVDTARYVFDKLPRKNIISWNALMGGYANHGRGTDAVKLFEKMIAANVAPNHVTFLAVLSACAYSGLSEQGWEIFLSMSEVHGIKPRAMHYACMIELLGRDGLLDEAIAFIRRAPLKTTVNMWAALLNACRMQENLELGRVVAEKLYGMGPEKLGNYVVMYNMYNSMGKTAEAAGVLETLESKGLSMMPACTWVEVGDQTHSFLSGDRFDSYNETVKRQIYQKVDELMEEISEYGYSEEEQHLLPDVDEKEEERVGRYHSEKLAIAYGLVNTPEWNPLQITQNHRICKNCHKVVEFISLVTGREMVVRDASRFHHFKEGKCSCGGYW

SEQ ID NO: 70040 - DNA, 1854 bp, Arabidopsis thaliana
  misc_feature (1)..(1854): Ceres Seq. ID no. 2136569
  misc_feature (1)..(1854): Ortholog of  Ceres SEQ ID NO 15179672 as cited in SEQ ID NO 0
atggctctgcttattatcactgccttagtttttagtagtttatggtcatctgtgtcaccagatgctcaaggggatgcattatttgcgttgaggagctcgttacgtgcatctcctgaacagcttagtgattggaaccagaatcaagtcgatccttgtacttggtctcaagttatttgtgatgacaagaaacatgttacttctgtaaccttgtcttacatgaacttctcctcgggaacactgtcttcaggaataggaatcttgacaactctcaagactcttacattgaagggaaatggaataatgggtggaataccagaatccattggaaatctgtctagcttgaccagcttagatttggaggataatcacttaactgatcgcattccatccactctcggtaatctcaagaatctacagttcttgaccttgagtaggaataaccttaatggttctatcccggattcacttacaggtctatcaaaactgataaatattctgctcgactcaaataatctcagtggtgagattcctcagagtttattcaaaatcccaaaatacaatttcacagcaaacaacttgagctgtggtggcactttcccgcaaccttgtgtaaccgagtccagtccttcaggtgattcaagcagtagaaaaactggaatcatcgctggagttgttagcggaatagcggttattctactaggattcttcttctttttcttctgcaaggataaacataaaggatataaacgagacgtatttgtggatgttgcaggaacgaactttaaaaaaggtttgatttcaggtgaagtggacagaaggattgcttttggacagttgagaagatttgcatggagagagcttcagttggctacagatgagttcagtgaaaagaatgttctcggacaaggaggctttgggaaagtttacaaaggattgctttcggatggcaccaaagtcgctgtaaaaagattgactgattttgaacgtccaggaggagatgaagctttccagagagaagttgagatgataagtgtagctgttcataggaatctgcttcgccttatcggcttttgtacaacacaaactgaacgacttttggtgtatcctttcatgcagaatctaagtgttgcatattgcttaagagagattaaacccggggatccagttctggattggttcaggaggaaacagattgcgttaggtgcagcacgaggactcgaatatcttcatgaacattgcaacccgaagatcatacacagagatgtgaaagctgcaaatgtgttactagatgaagactttgaagcagtggttggtgattttggtttagccaagttggtagatgttagaaggactaatgtaaccactcaggtccgaggaacaatgggtcatattgcaccagaatgtatatccacagggaaatcgtcagagaaaaccgatgttttcgggtacggaattatgcttctggagcttgtaactggacaaagagcaattgatttctcgcggttagaggaagaagatgatgtcttattgctagaccatgtgaagaaactggaaagagagaagagattagaagacatagtagataagaagcttgatgaggattatataaaggaagaagttgaaatgatgatacaagtagctctgctatgcacacaagcagcaccggaagaacgaccagcgatgtcggaagtagtaagaatgctagaaggagaagggcttgcagagagatgggaagagtggcagaatcttgaagtgacgagacaagaagagtttcagaggttgcagaggagatttgattggggtgaagattccattaataatcaagatgctattgaattatctggtggaagatag

SEQ ID NO: 70041 - protein, 617 aa, Arabidopsis thaliana
  peptide (1)..(617): Ceres Seq. ID no. 2136570
MALLIITALVFSSLWSSVSPDAQGDALFALRSSLRASPEQLSDWNQNQVDPCTWSQVICDDKKHVTSVTLSYMNFSSGTLSSGIGILTTLKTLTLKGNGIMGGIPESIGNLSSLTSLDLEDNHLTDRIPSTLGNLKNLQFLTLSRNNLNGSIPDSLTGLSKLINILLDSNNLSGEIPQSLFKIPKYNFTANNLSCGGTFPQPCVTESSPSGDSSSRKTGIIAGVVSGIAVILLGFFFFFFCKDKHKGYKRDVFVDVAGTNFKKGLISGEVDRRIAFGQLRRFAWRELQLATDEFSEKNVLGQGGFGKVYKGLLSDGTKVAVKRLTDFERPGGDEAFQREVEMISVAVHRNLLRLIGFCTTQTERLLVYPFMQNLSVAYCLREIKPGDPVLDWFRRKQIALGAARGLEYLHEHCNPKIIHRDVKAANVLLDEDFEAVVGDFGLAKLVDVRRTNVTTQVRGTMGHIAPECISTGKSSEKTDVFGYGIMLLELVTGQRAIDFSRLEEEDDVLLLDHVKKLEREKRLEDIVDKKLDEDYIKEEVEMMIQVALLCTQAAPEERPAMSEVVRMLEGEGLAERWEEWQNLEVTRQEEFQRLQRRFDWGEDSINNQDAIELSGGR

SEQ ID NO: 70042 - protein, 545 aa, Arabidopsis thaliana
  peptide (1)..(545): Ceres Seq. ID no. 2136571
MNFSSGTLSSGIGILTTLKTLTLKGNGIMGGIPESIGNLSSLTSLDLEDNHLTDRIPSTLGNLKNLQFLTLSRNNLNGSIPDSLTGLSKLINILLDSNNLSGEIPQSLFKIPKYNFTANNLSCGGTFPQPCVTESSPSGDSSSRKTGIIAGVVSGIAVILLGFFFFFFCKDKHKGYKRDVFVDVAGTNFKKGLISGEVDRRIAFGQLRRFAWRELQLATDEFSEKNVLGQGGFGKVYKGLLSDGTKVAVKRLTDFERPGGDEAFQREVEMISVAVHRNLLRLIGFCTTQTERLLVYPFMQNLSVAYCLREIKPGDPVLDWFRRKQIALGAARGLEYLHEHCNPKIIHRDVKAANVLLDEDFEAVVGDFGLAKLVDVRRTNVTTQVRGTMGHIAPECISTGKSSEKTDVFGYGIMLLELVTGQRAIDFSRLEEEDDVLLLDHVKKLEREKRLEDIVDKKLDEDYIKEEVEMMIQVALLCTQAAPEERPAMSEVVRMLEGEGLAERWEEWQNLEVTRQEEFQRLQRRFDWGEDSINNQDAIELSGGR

SEQ ID NO: 70043 - protein, 517 aa, Arabidopsis thaliana
  peptide (1)..(517): Ceres Seq. ID no. 2136572
MGGIPESIGNLSSLTSLDLEDNHLTDRIPSTLGNLKNLQFLTLSRNNLNGSIPDSLTGLSKLINILLDSNNLSGEIPQSLFKIPKYNFTANNLSCGGTFPQPCVTESSPSGDSSSRKTGIIAGVVSGIAVILLGFFFFFFCKDKHKGYKRDVFVDVAGTNFKKGLISGEVDRRIAFGQLRRFAWRELQLATDEFSEKNVLGQGGFGKVYKGLLSDGTKVAVKRLTDFERPGGDEAFQREVEMISVAVHRNLLRLIGFCTTQTERLLVYPFMQNLSVAYCLREIKPGDPVLDWFRRKQIALGAARGLEYLHEHCNPKIIHRDVKAANVLLDEDFEAVVGDFGLAKLVDVRRTNVTTQVRGTMGHIAPECISTGKSSEKTDVFGYGIMLLELVTGQRAIDFSRLEEEDDVLLLDHVKKLEREKRLEDIVDKKLDEDYIKEEVEMMIQVALLCTQAAPEERPAMSEVVRMLEGEGLAERWEEWQNLEVTRQEEFQRLQRRFDWGEDSINNQDAIELSGGR

SEQ ID NO: 70044 - DNA, 2145 bp, Arabidopsis thaliana
  misc_feature (1)..(2145): Ceres Seq. ID no. 2137262
  misc_feature (1)..(2145): Ortholog of  Ceres SEQ ID NO 13663060 as cited in SEQ ID NO 60964
  misc_feature (1)..(2145): Ortholog of  Ceres SEQ ID NO 13598532 as cited in SEQ ID NO 65204
  misc_feature (1)..(2145): Ortholog of  Ceres SEQ ID NO 13656849 as cited in SEQ ID NO 65764
  misc_feature (1)..(2145): Ortholog of  Ceres SEQ ID NO 13656501 as cited in SEQ ID NO 69206
atgggctgcaattgcaccaaaggaacacggcctgataatgataacgtcgataacagcaacagcattgtcagcaatgtcaatgtcaaggagagaagaagcaagcctaagaaaacccccaagaagaagaaaaaatcaaaatctgcttcttcgagcaaagacaacaatgtaggattcgaggaacgaagcaacgacaataaagaagcctccttgacgttgttgatacccattgatgccaagaaggatgatgagtccgagaagaaggtgaatctcgagagaaagtcttctagattggtgtttcagagacggcccaccggtattgaggttggtgccaacaacatagggacattgcagcaacctaagatgactagaatatgcagtgttagtaatggagaaagaggagctcaggttatggctggttggccttcatggttagcttctgttgctggcgaagctatcaatggatggattccacgaaaggctgattctttcgagaagttggaaaagattggacaagggacgtatagcagtgtgtacaaagcccgggacctagagacgaaccaattagttgcactgaagaaagtgcggtttgctaatatggatcccgacagtgttcggttcatggctagagaaataatcatccttcgaaggcttgaccatcctaatgttatgaagcttgagggtttgatcacttcaagagtatcaggaagtatgtatcttatatttgaatacatggaacacgatcttgctggcctagcttcaacccctgggattaacttctctgaggcacagattaagtgctatatgaaacagctgcttcatggtcttgaacattgtcatagccgaggtgtattgcatcgtgacatcaagggctctaatctgctgcttgaccataacaacaatctcaaaattggagatttcggtcttgccaatttttaccaaggtcaccagaagcagcctctcactagccgcgttgtaactttgtggtatcgtccacctgaactattacttggttcaacagactatggtgttacagtagatctgtggagcacaggatgcatactagctgaactctttactgggaaacctatcatgcccggtagaaccgaggtagaacaactacacaagatcttcaaactctgtggatcaccttctgaagagtattggaaaatatcaaaattgccacatgccaccatctttaaacctcaacaaccttacaagcggtgtgtagctgaaacatttaagagtcttccatcttcagctttggccctagttgaggttcttttagctgtagaaccagatgctcgtggaaccacagcttctgcccttgaaagcgagttctttactacatcgcctttggcaagtgacccatcaagtttaccaaagtaccaaccgagaaaggaaattgatgtgaaggctcaagaggaggaggcaaaacgaaagaaagacactagcagtaaacagaatgattcaaaacaagtatctagagaatctaaagctgtgccggctccagactccaatgccgagtctctgacatcaatacaaaaacgtcaagggcagcataaccaggtaagcaatagtgacaagttcaatcctggtgaagatgcagctagcttccggatagaaccactgaagagtggaactgcaaaagacggtcacactcgttatggtgtgtcctcggtgaatagaaatggagagaatgttatgatgggctcgagtcggtctcctagaaaagaactgaggacacaacggtcttttgtccaacgcggaacagcccaattgtcaagattctcaaactcggtagctgctagagatggatcacatttcgctatagcaaatccacggtggtttgaagatagttataacaataataacggaaggcaaaacggaggtgcttggtcccaacgtttggtggttaaacacaaagagtttacaaaacacaaagaatctataacggttaacggtgaaaagaaagagagaatgcactgctcagggcctttggtttctgcaggaggaaacttagatgaaatgttgaaagaacatgaaaggcagattcagttagcggttcgcaaagctcgggtggataagaagacgaatagaggcgataacagacagactcaagcgtttcttgctgcaaatggcaggtga

SEQ ID NO: 70045 - protein, 714 aa, Arabidopsis thaliana
  peptide (1)..(714): Ceres Seq. ID no. 2137263
MGCNCTKGTRPDNDNVDNSNSIVSNVNVKERRSKPKKTPKKKKKSKSASSSKDNNVGFEERSNDNKEASLTLLIPIDAKKDDESEKKVNLERKSSRLVFQRRPTGIEVGANNIGTLQQPKMTRICSVSNGERGAQVMAGWPSWLASVAGEAINGWIPRKADSFEKLEKIGQGTYSSVYKARDLETNQLVALKKVRFANMDPDSVRFMAREIIILRRLDHPNVMKLEGLITSRVSGSMYLIFEYMEHDLAGLASTPGINFSEAQIKCYMKQLLHGLEHCHSRGVLHRDIKGSNLLLDHNNNLKIGDFGLANFYQGHQKQPLTSRVVTLWYRPPELLLGSTDYGVTVDLWSTGCILAELFTGKPIMPGRTEVEQLHKIFKLCGSPSEEYWKISKLPHATIFKPQQPYKRCVAETFKSLPSSALALVEVLLAVEPDARGTTASALESEFFTTSPLASDPSSLPKYQPRKEIDVKAQEEEAKRKKDTSSKQNDSKQVSRESKAVPAPDSNAESLTSIQKRQGQHNQVSNSDKFNPGEDAASFRIEPLKSGTAKDGHTRYGVSSVNRNGENVMMGSSRSPRKELRTQRSFVQRGTAQLSRFSNSVAARDGSHFAIANPRWFEDSYNNNNGRQNGGAWSQRLVVKHKEFTKHKESITVNGEKKERMHCSGPLVSAGGNLDEMLKEHERQIQLAVRKARVDKKTNRGDNRQTQAFLAANGR

SEQ ID NO: 70046 - protein, 594 aa, Arabidopsis thaliana
  peptide (1)..(594): Ceres Seq. ID no. 2137264
MTRICSVSNGERGAQVMAGWPSWLASVAGEAINGWIPRKADSFEKLEKIGQGTYSSVYKARDLETNQLVALKKVRFANMDPDSVRFMAREIIILRRLDHPNVMKLEGLITSRVSGSMYLIFEYMEHDLAGLASTPGINFSEAQIKCYMKQLLHGLEHCHSRGVLHRDIKGSNLLLDHNNNLKIGDFGLANFYQGHQKQPLTSRVVTLWYRPPELLLGSTDYGVTVDLWSTGCILAELFTGKPIMPGRTEVEQLHKIFKLCGSPSEEYWKISKLPHATIFKPQQPYKRCVAETFKSLPSSALALVEVLLAVEPDARGTTASALESEFFTTSPLASDPSSLPKYQPRKEIDVKAQEEEAKRKKDTSSKQNDSKQVSRESKAVPAPDSNAESLTSIQKRQGQHNQVSNSDKFNPGEDAASFRIEPLKSGTAKDGHTRYGVSSVNRNGENVMMGSSRSPRKELRTQRSFVQRGTAQLSRFSNSVAARDGSHFAIANPRWFEDSYNNNNGRQNGGAWSQRLVVKHKEFTKHKESITVNGEKKERMHCSGPLVSAGGNLDEMLKEHERQIQLAVRKARVDKKTNRGDNRQTQAFLAANGR

SEQ ID NO: 70047 - protein, 578 aa, Arabidopsis thaliana
  peptide (1)..(578): Ceres Seq. ID no. 2137265
MAGWPSWLASVAGEAINGWIPRKADSFEKLEKIGQGTYSSVYKARDLETNQLVALKKVRFANMDPDSVRFMAREIIILRRLDHPNVMKLEGLITSRVSGSMYLIFEYMEHDLAGLASTPGINFSEAQIKCYMKQLLHGLEHCHSRGVLHRDIKGSNLLLDHNNNLKIGDFGLANFYQGHQKQPLTSRVVTLWYRPPELLLGSTDYGVTVDLWSTGCILAELFTGKPIMPGRTEVEQLHKIFKLCGSPSEEYWKISKLPHATIFKPQQPYKRCVAETFKSLPSSALALVEVLLAVEPDARGTTASALESEFFTTSPLASDPSSLPKYQPRKEIDVKAQEEEAKRKKDTSSKQNDSKQVSRESKAVPAPDSNAESLTSIQKRQGQHNQVSNSDKFNPGEDAASFRIEPLKSGTAKDGHTRYGVSSVNRNGENVMMGSSRSPRKELRTQRSFVQRGTAQLSRFSNSVAARDGSHFAIANPRWFEDSYNNNNGRQNGGAWSQRLVVKHKEFTKHKESITVNGEKKERMHCSGPLVSAGGNLDEMLKEHERQIQLAVRKARVDKKTNRGDNRQTQAFLAANGR

SEQ ID NO: 70048 - DNA, 2724 bp, Arabidopsis thaliana
  misc_feature (1)..(2724): Ceres Seq. ID no. 2138123
  misc_feature (1)..(2724): Ortholog of  Ceres SEQ ID NO 13657677 as cited in SEQ ID NO 66119
atgaagctcccttgcacgattcgatcaataacaagctctcattttcgcaatagctttagaaatgtgagctctgtgatcgattctgcacaagaagaatgtagaatcgctgaagataagcaattcgtcgatgctgtcaaaagaatcgtgcgagggaaacggagctgggagatcgcattgagcagtgagctagtctcgagaagattgaagactgttcatgttgaagagattctgattggaaccattgatgatcccaaattgggtttgaggtttttcaatttcctcggtttgcatcgaggattcgaccattccacggcgtcgttttgtattttgatccatgctctggtcaaagctaatctcttctggcctgcttcatcactgttgcagacgcttctgcttcgtgcgctgaagccaagtgacgtttttaatgtgctttttagttgttatgaaaaatgtaagcttagttcaagctcgagttttgatttgttgattcagcattatgtacgaagtaggagagttctagatggagttttggtgtttaagatgatgataacgaaagttagtttactgcctgaagtgagaactttgagtgctcttttacatgggttggttaagtttaggcattttggtttggcaatggagttgttcaacgatatggtcagcgtggggattcgtcctgatgtttacatttacacaggagttatacgtagcttgtgtgagttgaaagatctctctcgagctaaagaaatgattgctcatatggaggcaacaggatgtgatgtgaatatagttccatataatgtgttgatagatgggctttgtaagaagcagaaggtttgggaggctgttgggataaagaaggatttagctggaaaagatctgaaaccagatgttgtgacatattgtacattagtctacgggttatgtaaagtgcaagaatttgagatcggattggagatgatggatgagatgttatgtttgaggttcagtcctagtgaagctgcggtttcaagtttggtagaggggttaaggaagaggggaaagattgaagaggcgcttaacttggttaaaagagtagtagattttggtgtctcacctaatttatttgtgtataacgcattgattgactcattgtgcaaaggtagaaagttccacgaagctgagttgctttttgataggatggggaaaattgggttgcgtcctaatgatgtgacctattcaattttgattgatatgttttgcagaagagggaaactggatacggcacttagtttcctgggggaaatggttgatacgggtttgaaactaagtgtgtatccatacaattctttgattaacgggcactgcaagttcggtgacattagtgcagcagagggtttcatggcagagatgattaataaaaagttggagccaacagtggtaacatacacatcattaatgggtggatattgcagcaaagggaaaataaacaaggcccttaggctctatcatgagatgacagggaagggtattgcgccgagtatctatacattcaccacgcttttatcgggtctattccgtgctgggttgattcgtgatgcagtaaagctgtttaacgagatggcagaatggaatgttaagccaaacagagtgacttataatgtcatgattgaaggttattgcgaggaaggagacatgtctaaagcctttgagttcctgaaagaaatgaccgagaaaggtattgtgcctgatacatacagttatagaccgttgatacacgggctatgtctcacaggtcaagcttcggaagccaaagtgttcgtggatggccttcacaagggaaattgtgagctgaatgagatatgttataccggactcttacacggattttgcagagaaggaaaattagaagaggcgttaagcgtttgtcaggagatggtacaaagaggggtggatttggaccttgtgtgctatggtgttcttatagatggaagtttaaagcacaaagatcgaaagttgttttttggacttttaaaggagatgcatgatagaggactaaagcctgatgatgtgatttatacaagtatgattgatgcaaagagcaaaaccggagatttcaaggaagcatttggaatatgggatttgatgataaacgaagggtgtgtacctaatgaagtcacgtacactgctgttatcaacggattatgcaaagccgggtttgttaatgaagccgaggttctttgttcaaaaatgcagcctgtcagttcggttcctaaccaagtaacgtatggttgttttctcgacattctcaccaaaggagaagtagacatgcagaaagctgtggagctccataatgcaatcttgaaagggcttttagcaaacaccgctacatataatatgttgatccgcggtttttgtagacaagggagaatagaagaagcttctgagctcatcacaaggatgataggcgatggagtttcccctgattgtataacctacacaacaatgatcaatgagctttgtaggagaaacgatgtgaagaaagcgattgagttatggaactcgatgacggaaaagggtataaggccagatagagtagcgtataacaccctaatacacggttgttgtgtggcgggagaaatggggaaggcgaccgagttgaggaatgagatgttgagacaaggcttgatacctaacaacaaaaccagtagaacaactacttcgaatgacactagttctaaatcctaa

SEQ ID NO: 70049 - protein, 907 aa, Arabidopsis thaliana
  peptide (1)..(907): Ceres Seq. ID no. 2138124
MKLPCTIRSITSSHFRNSFRNVSSVIDSAQEECRIAEDKQFVDAVKRIVRGKRSWEIALSSELVSRRLKTVHVEEILIGTIDDPKLGLRFFNFLGLHRGFDHSTASFCILIHALVKANLFWPASSLLQTLLLRALKPSDVFNVLFSCYEKCKLSSSSSFDLLIQHYVRSRRVLDGVLVFKMMITKVSLLPEVRTLSALLHGLVKFRHFGLAMELFNDMVSVGIRPDVYIYTGVIRSLCELKDLSRAKEMIAHMEATGCDVNIVPYNVLIDGLCKKQKVWEAVGIKKDLAGKDLKPDVVTYCTLVYGLCKVQEFEIGLEMMDEMLCLRFSPSEAAVSSLVEGLRKRGKIEEALNLVKRVVDFGVSPNLFVYNALIDSLCKGRKFHEAELLFDRMGKIGLRPNDVTYSILIDMFCRRGKLDTALSFLGEMVDTGLKLSVYPYNSLINGHCKFGDISAAEGFMAEMINKKLEPTVVTYTSLMGGYCSKGKINKALRLYHEMTGKGIAPSIYTFTTLLSGLFRAGLIRDAVKLFNEMAEWNVKPNRVTYNVMIEGYCEEGDMSKAFEFLKEMTEKGIVPDTYSYRPLIHGLCLTGQASEAKVFVDGLHKGNCELNEICYTGLLHGFCREGKLEEALSVCQEMVQRGVDLDLVCYGVLIDGSLKHKDRKLFFGLLKEMHDRGLKPDDVIYTSMIDAKSKTGDFKEAFGIWDLMINEGCVPNEVTYTAVINGLCKAGFVNEAEVLCSKMQPVSSVPNQVTYGCFLDILTKGEVDMQKAVELHNAILKGLLANTATYNMLIRGFCRQGRIEEASELITRMIGDGVSPDCITYTTMINELCRRNDVKKAIELWNSMTEKGIRPDRVAYNTLIHGCCVAGEMGKATELRNEMLRQGLIPNNKTSRTTTSNDTSSKS

SEQ ID NO: 70050 - protein, 727 aa, Arabidopsis thaliana
  peptide (1)..(727): Ceres Seq. ID no. 2138125
MMITKVSLLPEVRTLSALLHGLVKFRHFGLAMELFNDMVSVGIRPDVYIYTGVIRSLCELKDLSRAKEMIAHMEATGCDVNIVPYNVLIDGLCKKQKVWEAVGIKKDLAGKDLKPDVVTYCTLVYGLCKVQEFEIGLEMMDEMLCLRFSPSEAAVSSLVEGLRKRGKIEEALNLVKRVVDFGVSPNLFVYNALIDSLCKGRKFHEAELLFDRMGKIGLRPNDVTYSILIDMFCRRGKLDTALSFLGEMVDTGLKLSVYPYNSLINGHCKFGDISAAEGFMAEMINKKLEPTVVTYTSLMGGYCSKGKINKALRLYHEMTGKGIAPSIYTFTTLLSGLFRAGLIRDAVKLFNEMAEWNVKPNRVTYNVMIEGYCEEGDMSKAFEFLKEMTEKGIVPDTYSYRPLIHGLCLTGQASEAKVFVDGLHKGNCELNEICYTGLLHGFCREGKLEEALSVCQEMVQRGVDLDLVCYGVLIDGSLKHKDRKLFFGLLKEMHDRGLKPDDVIYTSMIDAKSKTGDFKEAFGIWDLMINEGCVPNEVTYTAVINGLCKAGFVNEAEVLCSKMQPVSSVPNQVTYGCFLDILTKGEVDMQKAVELHNAILKGLLANTATYNMLIRGFCRQGRIEEASELITRMIGDGVSPDCITYTTMINELCRRNDVKKAIELWNSMTEKGIRPDRVAYNTLIHGCCVAGEMGKATELRNEMLRQGLIPNNKTSRTTTSNDTSSKS

SEQ ID NO: 70051 - protein, 726 aa, Arabidopsis thaliana
  peptide (1)..(726): Ceres Seq. ID no. 2138126
MITKVSLLPEVRTLSALLHGLVKFRHFGLAMELFNDMVSVGIRPDVYIYTGVIRSLCELKDLSRAKEMIAHMEATGCDVNIVPYNVLIDGLCKKQKVWEAVGIKKDLAGKDLKPDVVTYCTLVYGLCKVQEFEIGLEMMDEMLCLRFSPSEAAVSSLVEGLRKRGKIEEALNLVKRVVDFGVSPNLFVYNALIDSLCKGRKFHEAELLFDRMGKIGLRPNDVTYSILIDMFCRRGKLDTALSFLGEMVDTGLKLSVYPYNSLINGHCKFGDISAAEGFMAEMINKKLEPTVVTYTSLMGGYCSKGKINKALRLYHEMTGKGIAPSIYTFTTLLSGLFRAGLIRDAVKLFNEMAEWNVKPNRVTYNVMIEGYCEEGDMSKAFEFLKEMTEKGIVPDTYSYRPLIHGLCLTGQASEAKVFVDGLHKGNCELNEICYTGLLHGFCREGKLEEALSVCQEMVQRGVDLDLVCYGVLIDGSLKHKDRKLFFGLLKEMHDRGLKPDDVIYTSMIDAKSKTGDFKEAFGIWDLMINEGCVPNEVTYTAVINGLCKAGFVNEAEVLCSKMQPVSSVPNQVTYGCFLDILTKGEVDMQKAVELHNAILKGLLANTATYNMLIRGFCRQGRIEEASELITRMIGDGVSPDCITYTTMINELCRRNDVKKAIELWNSMTEKGIRPDRVAYNTLIHGCCVAGEMGKATELRNEMLRQGLIPNNKTSRTTTSNDTSSKS

SEQ ID NO: 70052 - DNA, 981 bp, Arabidopsis thaliana
  misc_feature (1)..(981): Ceres Seq. ID no. 2138218
  misc_feature (1)..(981): Ortholog of  Ceres SEQ ID NO 14313038 as cited in SEQ ID NO 59520
  misc_feature (1)..(981): Ortholog of  Ceres SEQ ID NO 13595464 as cited in SEQ ID NO 59792
  misc_feature (1)..(981): Ortholog of  Ceres SEQ ID NO 14316416 as cited in SEQ ID NO 60078
atgactaatggcggtagaggttccggcggcggtggtggtggcggcggcagggagtcaggcggtcgtgatttggaaattagacctggtggtatgttggttcagaaacgtaacccggatttggatcctgtcggacctccaccaccaccgatgatcagagttagaatcaagtacggtgccgtctaccatgagatcaatattagtcctcaagcttcttttggggagctaaagaagatgttgactggaccaacgggtattcatcatcaagatcagaagctaatgtataaagataaagagagggattcgaaggcgttcctcgatgtttcgggagtgaaagataaatctaagatggtgcttatagaagacccgcttagccaagagaaacggtttttggagatgaggaagattgctaaaaccgaaaaggcgtctaaagcgatatcggatattagccttgaagttgataggctcggcggacgagtttcggcttttgagatggtaactaaaaaaggagggaagattgcggagaaagatcttgtaacggttatcgaattgctgatgaatgagttgattaagttggatgcgattgtagctgaaggagatgtcaagttacaaagaaagatgcaggtgaagagagtgcagaattatgtggaaacactcgatgccttgaaggtgaaaaactccatggctaatgggcaacagaaacagtcaagtactgctcagagacttgcaccgattcaagaacataacaatgaagagagacaagaacagaaaccgatacaatcgctcatggacatgccgatacaatacaaagagaagaagcaagagattgaagaggagcctaggaattcaggggaaggaccatttgtgttagattcttctgctaaatgggaaacattcgatcatcatcccgtgacgccattgagctcgactactgcgaaaaataacgcgatcccgcccaggtttaattgggaattctttgattga

SEQ ID NO: 70053 - protein, 326 aa, Arabidopsis thaliana
  peptide (1)..(326): Ceres Seq. ID no. 2138219
MTNGGRGSGGGGGGGGRESGGRDLEIRPGGMLVQKRNPDLDPVGPPPPPMIRVRIKYGAVYHEINISPQASFGELKKMLTGPTGIHHQDQKLMYKDKERDSKAFLDVSGVKDKSKMVLIEDPLSQEKRFLEMRKIAKTEKASKAISDISLEVDRLGGRVSAFEMVTKKGGKIAEKDLVTVIELLMNELIKLDAIVAEGDVKLQRKMQVKRVQNYVETLDALKVKNSMANGQQKQSSTAQRLAPIQEHNNEERQEQKPIQSLMDMPIQYKEKKQEIEEEPRNSGEGPFVLDSSAKWETFDHHPVTPLSSTTAKNNAIPPRFNWEFFD

SEQ ID NO: 70054 - protein, 296 aa, Arabidopsis thaliana
  peptide (1)..(296): Ceres Seq. ID no. 2138220
MLVQKRNPDLDPVGPPPPPMIRVRIKYGAVYHEINISPQASFGELKKMLTGPTGIHHQDQKLMYKDKERDSKAFLDVSGVKDKSKMVLIEDPLSQEKRFLEMRKIAKTEKASKAISDISLEVDRLGGRVSAFEMVTKKGGKIAEKDLVTVIELLMNELIKLDAIVAEGDVKLQRKMQVKRVQNYVETLDALKVKNSMANGQQKQSSTAQRLAPIQEHNNEERQEQKPIQSLMDMPIQYKEKKQEIEEEPRNSGEGPFVLDSSAKWETFDHHPVTPLSSTTAKNNAIPPRFNWEFFD

SEQ ID NO: 70055 - protein, 277 aa, Arabidopsis thaliana
  peptide (1)..(277): Ceres Seq. ID no. 2138221
MIRVRIKYGAVYHEINISPQASFGELKKMLTGPTGIHHQDQKLMYKDKERDSKAFLDVSGVKDKSKMVLIEDPLSQEKRFLEMRKIAKTEKASKAISDISLEVDRLGGRVSAFEMVTKKGGKIAEKDLVTVIELLMNELIKLDAIVAEGDVKLQRKMQVKRVQNYVETLDALKVKNSMANGQQKQSSTAQRLAPIQEHNNEERQEQKPIQSLMDMPIQYKEKKQEIEEEPRNSGEGPFVLDSSAKWETFDHHPVTPLSSTTAKNNAIPPRFNWEFFD

SEQ ID NO: 70056 - DNA, 1170 bp, Arabidopsis thaliana
  misc_feature (1)..(1170): Ceres Seq. ID no. 2139038
  misc_feature (1)..(1170): Ortholog of  Ceres SEQ ID NO 15170354 as cited in SEQ ID NO 54190
  misc_feature (1)..(1170): Ortholog of  Ceres SEQ ID NO 13654989 as cited in SEQ ID NO 63117
  misc_feature (1)..(1170): Ortholog of  Ceres SEQ ID NO 13584744 as cited in SEQ ID NO 69137
atgatgaagctttgtccttgtttcatcaacccgcatcagcttggacctaattcgcctagagattcatttgacgaaggtcttacagcttatagaggccatagccgtaaactttttgcactgttcacatttcgctcacatcggaaaggaagctgcaggcagaagtatataacggaagagataaagaagtatgggaacgtgaagaactgcggtcgaatcttcaaattcaaggagctaatagctgcaaccgacaatttcagcatggattgtatgattggtgaaggcggttttggaagagtctacaaagggtttctcaccagcctcaatcaggtggtggctgtaaagaggcttgataggaatgggttgcaaggaacaagagagttctttgcagaagtaatggtattgagtctggctcaacatccaaaccttgtcaatctcattggctattgcgtcgaagacgagcaacgagtcctcgtttatgaattcatgcctaacggatctttggaagatcatttgttcgacttaccagaagggtcaccaagtctagactggttcaccagaatgcggatagtgcacggagcagcgaaagggctcgagtacttgcacgactacgcagatcctcctgtgatctaccgcgatttcaaagcttcaaacatattgttacaatctgacttcaactcaaagctatcggatttcgggttagctagacttggaccaactgaaggcaaagatcatgtgtccacaagagtcatgggaacatacggatactgtgcccctgaatatgcgatgaccggtcaactcactgctaaatccgatgtctacagtttcggtgttgtccttcttgagatcatttccggaagacgagctattgatggcgatagaccaactgaagaacaaaacttgatctcttgggcggaaccgttgttgaaagatagaaggatgtttgcgcagattgtggatccaaatctagatgggaactacccagtaaaagggttgcatcaagctctagcgattgcagcgatgtgtttgcaagaagaagcagagactaggccattgatgggagatgtggtcacagcacttgagttcttggctaagcctatagaggtggttgataacactaacactactcctgcctctcctactcagacatcatcatctgattcatcaaactaa

SEQ ID NO: 70057 - protein, 389 aa, Arabidopsis thaliana
  peptide (1)..(389): Ceres Seq. ID no. 2139039
MMKLCPCFINPHQLGPNSPRDSFDEGLTAYRGHSRKLFALFTFRSHRKGSCRQKYITEEIKKYGNVKNCGRIFKFKELIAATDNFSMDCMIGEGGFGRVYKGFLTSLNQVVAVKRLDRNGLQGTREFFAEVMVLSLAQHPNLVNLIGYCVEDEQRVLVYEFMPNGSLEDHLFDLPEGSPSLDWFTRMRIVHGAAKGLEYLHDYADPPVIYRDFKASNILLQSDFNSKLSDFGLARLGPTEGKDHVSTRVMGTYGYCAPEYAMTGQLTAKSDVYSFGVVLLEIISGRRAIDGDRPTEEQNLISWAEPLLKDRRMFAQIVDPNLDGNYPVKGLHQALAIAAMCLQEEAETRPLMGDVVTALEFLAKPIEVVDNTNTTPASPTQTSSSDSSN

SEQ ID NO: 70058 - protein, 388 aa, Arabidopsis thaliana
  peptide (1)..(388): Ceres Seq. ID no. 2139040
MKLCPCFINPHQLGPNSPRDSFDEGLTAYRGHSRKLFALFTFRSHRKGSCRQKYITEEIKKYGNVKNCGRIFKFKELIAATDNFSMDCMIGEGGFGRVYKGFLTSLNQVVAVKRLDRNGLQGTREFFAEVMVLSLAQHPNLVNLIGYCVEDEQRVLVYEFMPNGSLEDHLFDLPEGSPSLDWFTRMRIVHGAAKGLEYLHDYADPPVIYRDFKASNILLQSDFNSKLSDFGLARLGPTEGKDHVSTRVMGTYGYCAPEYAMTGQLTAKSDVYSFGVVLLEIISGRRAIDGDRPTEEQNLISWAEPLLKDRRMFAQIVDPNLDGNYPVKGLHQALAIAAMCLQEEAETRPLMGDVVTALEFLAKPIEVVDNTNTTPASPTQTSSSDSSN

SEQ ID NO: 70059 - protein, 303 aa, Arabidopsis thaliana
  peptide (1)..(303): Ceres Seq. ID no. 2139041
MDCMIGEGGFGRVYKGFLTSLNQVVAVKRLDRNGLQGTREFFAEVMVLSLAQHPNLVNLIGYCVEDEQRVLVYEFMPNGSLEDHLFDLPEGSPSLDWFTRMRIVHGAAKGLEYLHDYADPPVIYRDFKASNILLQSDFNSKLSDFGLARLGPTEGKDHVSTRVMGTYGYCAPEYAMTGQLTAKSDVYSFGVVLLEIISGRRAIDGDRPTEEQNLISWAEPLLKDRRMFAQIVDPNLDGNYPVKGLHQALAIAAMCLQEEAETRPLMGDVVTALEFLAKPIEVVDNTNTTPASPTQTSSSDSSN

SEQ ID NO: 70060 - DNA, 531 bp, Arabidopsis thaliana
  misc_feature (1)..(531): Ceres Seq. ID no. 2139394
  misc_feature (1)..(531): Ortholog of  Ceres SEQ ID NO 13660394 as cited in SEQ ID NO 66895
atggaggagactatactggtcggtgatgacctaatgacgggtcctccatctcctgttatccctcctgaaattgcttcacatgtgcttgaaggtgttgatttgtgcgatgggattttgaggaatctattcctgtgtttgcaaatcaatgatattgaaccattttgccaagatgagcttgcattgtatcgacaatgtgctgaaaagagggacaaaatattgagagttagacttcaagagagcgaacacaagttaggattgtctatgcccattgaactcgctaaggaaaggattacgcagcttgaagctgaagccacatcttttgagaggcacttgattctagcaagtggagctgaaggaatagaaggatttcgccggagatggagtttacacggtcggatgacggataccaaaaaaagactggagtcactgaagcagggaatggagaacaggaacaaggttgaacatgaacataaccaacaccatgatcagtccccaaaaccttctgctccaaaaagatggttcttttggtga

SEQ ID NO: 70061 - protein, 176 aa, Arabidopsis thaliana
  peptide (1)..(176): Ceres Seq. ID no. 2139395
MEETILVGDDLMTGPPSPVIPPEIASHVLEGVDLCDGILRNLFLCLQINDIEPFCQDELALYRQCAEKRDKILRVRLQESEHKLGLSMPIELAKERITQLEAEATSFERHLILASGAEGIEGFRRRWSLHGRMTDTKKRLESLKQGMENRNKVEHEHNQHHDQSPKPSAPKRWFFW

SEQ ID NO: 70062 - protein, 165 aa, Arabidopsis thaliana
  peptide (1)..(165): Ceres Seq. ID no. 2139396
MTGPPSPVIPPEIASHVLEGVDLCDGILRNLFLCLQINDIEPFCQDELALYRQCAEKRDKILRVRLQESEHKLGLSMPIELAKERITQLEAEATSFERHLILASGAEGIEGFRRRWSLHGRMTDTKKRLESLKQGMENRNKVEHEHNQHHDQSPKPSAPKRWFFW

SEQ ID NO: 70063 - protein, 89 aa, Arabidopsis thaliana
  peptide (1)..(89): Ceres Seq. ID no. 2139397
MPIELAKERITQLEAEATSFERHLILASGAEGIEGFRRRWSLHGRMTDTKKRLESLKQGMENRNKVEHEHNQHHDQSPKPSAPKRWFFW

SEQ ID NO: 70064 - DNA, 1719 bp, Arabidopsis thaliana
  misc_feature (1)..(1719): Ceres Seq. ID no. 2139789
  misc_feature (1)..(1719): Ortholog of  Ceres SEQ ID NO 13624195 as cited in SEQ ID NO 1018
atgagcaccagcggcaacgaaagttccggcgaccaagcctccacccttgacgatatcatgaagctgcttcaagagctctccgacaagaccgagcgacagcaaaccgcagtaacttctttatctgataagttcgtttcttttcaggaacagtgcagtgggcagctcgcggcgctcaccaccagccattctgaaataaggacagctcacaacgcgtacgcagatcgagttgacttcctgtctgccggagtgtcacgtaccgctggagttcgctcacgccttgattttcaaggagacatcagttcgagcatccaaacttcacaggcaggagcaggtcagcagactccgccacctcagttacctctcgtctctcaagttgaagttggggcaacttcaaaccagaaccaggttgtactgactaccccggcaaatcccgaccttcctattgatggagttaccgcaccaactccatcattatttcgagtagagccctcccttagacgtccgacctcagagtctccccaggagccggatggtcagctcgatgacgaaaacgacgttccaaaggttgtcccgcctccaattaccgaagaattgtctggtccaaatagtcccgaagtccctgataatcagacacctcacgactggggggcagactggagagaaccaatccgagactacatcctcaacggggtactccctaccgacaagtgggacgctcgaaagctgaagaccacttgtgctcgtttctgcgtagcagatggcattttatacagaagaatcatctcggctccggatgctatttgtattttcggggaacaaactcggactgtcataaaagaaatccacgatggaacttgtggaaaccactctggaggtcgctctttggcctttaaatgtcagaagcacgcaccgtatatccttcaacccgccgaacttctcacttcggtatcgtcaccttatccattcatgaaatggtctatggacaacattggaccacttcacgtttcaactcggggagtcagattcctacttgttctaaccgactatttctcgaagtgggttaaagctgcagcctactcaaacataactcagtttgaagttttttgtgcaaggtggcaaatccgcctcagtcggtcaacacctcgcaacccgcaagggaatggtcaggccgaggcgatgaataaaacgatcatctcgaacctcaaaaaaaaactaaatgagtataagggagcttggttcggagagttacaaaacgtgttatgggcaatccgtacaactcctaggagagctaccggtgagacccccttcgctctctttcatggaatggaagcagttatcccagccgagatcaaagtcccgagtacgagaagagtacaaaatccccagaacgaggctgcgaacaaccaaatgatggttgatatgattgatattatcgacgaacgacgcaaccaagcgttagttcggatgcaaaactatcataacgccgcagctcgatactataactcaaatgtccgaaacagatcattcgaggtcggaactctggtccttcgccgaatccagcaaaacacggctgaaaaaggagctggaaaattggggatcagttgggaaggtccttacaaaatcactcacatagtccggaacggggtctatcgtctcattaacatggaaggcaaaatagttcgcagagcatggaatgccgctcatctcaaacgtttttag

SEQ ID NO: 70065 - protein, 572 aa, Arabidopsis thaliana
  peptide (1)..(572): Ceres Seq. ID no. 2139790
MSTSGNESSGDQASTLDDIMKLLQELSDKTERQQTAVTSLSDKFVSFQEQCSGQLAALTTSHSEIRTAHNAYADRVDFLSAGVSRTAGVRSRLDFQGDISSSIQTSQAGAGQQTPPPQLPLVSQVEVGATSNQNQVVLTTPANPDLPIDGVTAPTPSLFRVEPSLRRPTSESPQEPDGQLDDENDVPKVVPPPITEELSGPNSPEVPDNQTPHDWGADWREPIRDYILNGVLPTDKWDARKLKTTCARFCVADGILYRRIISAPDAICIFGEQTRTVIKEIHDGTCGNHSGGRSLAFKCQKHAPYILQPAELLTSVSSPYPFMKWSMDNIGPLHVSTRGVRFLLVLTDYFSKWVKAAAYSNITQFEVFCARWQIRLSRSTPRNPQGNGQAEAMNKTIISNLKKKLNEYKGAWFGELQNVLWAIRTTPRRATGETPFALFHGMEAVIPAEIKVPSTRRVQNPQNEAANNQMMVDMIDIIDERRNQALVRMQNYHNAAARYYNSNVRNRSFEVGTLVLRRIQQNTAEKGAGKLGISWEGPYKITHIVRNGVYRLINMEGKIVRRAWNAAHLKRF

SEQ ID NO: 70066 - protein, 553 aa, Arabidopsis thaliana
  peptide (1)..(553): Ceres Seq. ID no. 2139791
MKLLQELSDKTERQQTAVTSLSDKFVSFQEQCSGQLAALTTSHSEIRTAHNAYADRVDFLSAGVSRTAGVRSRLDFQGDISSSIQTSQAGAGQQTPPPQLPLVSQVEVGATSNQNQVVLTTPANPDLPIDGVTAPTPSLFRVEPSLRRPTSESPQEPDGQLDDENDVPKVVPPPITEELSGPNSPEVPDNQTPHDWGADWREPIRDYILNGVLPTDKWDARKLKTTCARFCVADGILYRRIISAPDAICIFGEQTRTVIKEIHDGTCGNHSGGRSLAFKCQKHAPYILQPAELLTSVSSPYPFMKWSMDNIGPLHVSTRGVRFLLVLTDYFSKWVKAAAYSNITQFEVFCARWQIRLSRSTPRNPQGNGQAEAMNKTIISNLKKKLNEYKGAWFGELQNVLWAIRTTPRRATGETPFALFHGMEAVIPAEIKVPSTRRVQNPQNEAANNQMMVDMIDIIDERRNQALVRMQNYHNAAARYYNSNVRNRSFEVGTLVLRRIQQNTAEKGAGKLGISWEGPYKITHIVRNGVYRLINMEGKIVRRAWNAAHLKRF

SEQ ID NO: 70067 - DNA, 3294 bp, Arabidopsis thaliana
  misc_feature (1)..(3294): Ceres Seq. ID no. 2140457
  misc_feature (1)..(3294): Ortholog of  Ceres SEQ ID NO 15224539 as cited in SEQ ID NO 0
atgacggaaccagaaagattaggaggaatctccctgagttttccggtgaatgaagaagatacggtaacgacaacatcaccaaagactcttccacggaggctccgtcgtcgtcttctcgaaccgaagagtcctgtctccgccgcagagatcgattccaaactcagagaagctgatctccgtcgtcagcaatattatgaatcactatcgagtaaggcacgacctaagatgagaagtccgagatcaggaagtatagaggagcttagtcagagacttgaatcaaagcttaatgctgctgaacaaaagaggttaagtattttggagaaggagctggctcgtttggctaagatggatgaagctagacaagctgcgaagaatggacttgagcaacgagttgagaaagagcgtgatgagttagagagtaaggttgaagaaagggttttgaaggctgagaagaataggatgcttttgtttaaagctatggctcaacgaagagcggcgaagaggcagcgtgctgcgcagagtttgatgaagaaagctattcaggagacgaggtataaggagagtgtgcgtgctgcgatttatcagaagagagcagctgcagagagtaagcggatggggattttggaagcggaaaggagaagagcgaatgcgagattgactcgggtgtttggtgctgctagttctgtgcggagtcaaaaggaagctgagagaaggaaaatgaaggaccgtttagaagagcggcttcaaagggcaaagaagctgaaagcgcaatatatgaggcgaaggagaggtatggatagttgttcatcttcaagatcagaaacaatgcgaaagaaccaagtgcatcttgttaggatgttagtaagatgctggaggagatttgctaaatacaagaaatctacttttgtcttggctagagcatatcatgagttggggatcaatgaaaaatccattgagtcagtaccatttgagcagtttgccattcaaatgaactcagtttctgtaattcaaacggtcaaagcattgcttgatcgcttggagatccgactcactctatctaaggcatccaatgtggagaacattaatcatcttcttaagcacatctttccgcctgttcgaagagggaaatcacccagtcccatgagtaaaggcgagcaaaattcacccaattccaagatgggatatcaaaaacttaaaaagattgcgagatatccagctagaatttttctttgtgcctacatgatcaagcaacatcccggtgcaatttttagaggaagaggtgaacatgagattgcgcttgtggaatctgcaacttgtcttattcgggagtttgaactgctggtgaaagttatattggaaggaccagaatctaccctcccgggcaatgtatctttcgtagctcaacgtccaaaaaaattcagatctcagctagaagcatttgataaagcttggtgctcttaccttgagggttttgtagtctggaaaattaatgatgctaagcttctagaaaaagatttagccagaactcaagagtctgagctgtctgaggtatcaaaacatacttcctctcccaaaataatagacagtggcttgaatcagaagacggtaaaggcatcttctccaactaatcgggctttattctctgaaactgatggagcacgagaatcaaaagcacctgcagattcgcatcttccatcttcatcttcaccttcaccgggctcatcgaatttgtcaccctctttgaactctgggagcgaggccatttctactccaaacgtggtagctaatagctttgatgcagcgttggctagtgagaacgaagtaattgtaaatgaaattgtccatgacaatagcagtagttttgctgatagcctcgaccctaacactggggatacaagcaaccttcaggtgagggttaaggagacaatggaaaaggctttctgggatggtgtcatggaatccatgaaacagtcgcagccagacttcagctgggttattaaactcatgaaagaagtcagggatgaactctgtgagatatctcccaaagactggagacaagagattgttcaaactatcgatacggatgtgctgtcacagttactggcttctggtaatgtcgacatgggttatcttggaaatattcttgagttttcccttggcattttgctgaaactctctgctccagctaatgaagaggaaatcagggttactcaccataaactaatgacagaacttggagagatagttccaactgatggccattcgaattcgtcatatgcagtcttaatggttaaggggctacgctttgttttgcagcagattcagattctaaagaaggaaatcagcaaatctcgtttgaaactcttggagccacttcttaagggacctgctggtctggaatatctgaagaagtcattttccagtcggcatggttccccagaccaagcgtcttcctcgctaccattgacaaaacgttggcttttaagtgttcgaggagaagcagagagggagtggaaagaacacaaagatgctctttctgctgtcataaataaccactctggatcatcaggcctcccttcgaccaccatgcgaactggtggcaatgtctcctctgtttcaaaagtcaataccccttcatctccatttccaggaatcgaactgtcagagtgcaagggagaaactgtggatcttcttgttcgcattggcctgttaaaaatggtgagcgaaatcggtggtcttactttagaaactgtccctgaaacatttcaacttaacctatctaggctgagagatgttcaatcccaaatccagaaaatcactcttgtctccatcagtgttttgatcctccagcaaacactagtaagcgaaaactcatcctcgattgacatggaggctattacacggacttgcataaaccgtctttacgagatgctagacgcaaaacctgatgcaggtctttcagaaatcatggaaacactctccgagcttcttgattctaacgatgcagagacaaagaaacaagtaatcgcaaacatgcttgtgaaaagcttacaagcaggagacgcagtgttcacacatgtatcacagaccatatacctagccattagagccgcggttttggccggaaacaacacgaagagaaagcagttggtggaaacaatgctaagaaagatcggagcagcttctctctcggacaaggtcatagaggtttcagacattcttgttcttgtggcaacagtgtcacgttctgttcatggattgtggtatgaagaattgctaaagaaaccgaattaa

SEQ ID NO: 70068 - protein, 1097 aa, Arabidopsis thaliana
  peptide (1)..(1097): Ceres Seq. ID no. 2140458
MTEPERLGGISLSFPVNEEDTVTTTSPKTLPRRLRRRLLEPKSPVSAAEIDSKLREADLRRQQYYESLSSKARPKMRSPRSGSIEELSQRLESKLNAAEQKRLSILEKELARLAKMDEARQAAKNGLEQRVEKERDELESKVEERVLKAEKNRMLLFKAMAQRRAAKRQRAAQSLMKKAIQETRYKESVRAAIYQKRAAAESKRMGILEAERRRANARLTRVFGAASSVRSQKEAERRKMKDRLEERLQRAKKLKAQYMRRRRGMDSCSSSRSETMRKNQVHLVRMLVRCWRRFAKYKKSTFVLARAYHELGINEKSIESVPFEQFAIQMNSVSVIQTVKALLDRLEIRLTLSKASNVENINHLLKHIFPPVRRGKSPSPMSKGEQNSPNSKMGYQKLKKIARYPARIFLCAYMIKQHPGAIFRGRGEHEIALVESATCLIREFELLVKVILEGPESTLPGNVSFVAQRPKKFRSQLEAFDKAWCSYLEGFVVWKINDAKLLEKDLARTQESELSEVSKHTSSPKIIDSGLNQKTVKASSPTNRALFSETDGARESKAPADSHLPSSSSPSPGSSNLSPSLNSGSEAISTPNVVANSFDAALASENEVIVNEIVHDNSSSFADSLDPNTGDTSNLQVRVKETMEKAFWDGVMESMKQSQPDFSWVIKLMKEVRDELCEISPKDWRQEIVQTIDTDVLSQLLASGNVDMGYLGNILEFSLGILLKLSAPANEEEIRVTHHKLMTELGEIVPTDGHSNSSYAVLMVKGLRFVLQQIQILKKEISKSRLKLLEPLLKGPAGLEYLKKSFSSRHGSPDQASSSLPLTKRWLLSVRGEAEREWKEHKDALSAVINNHSGSSGLPSTTMRTGGNVSSVSKVNTPSSPFPGIELSECKGETVDLLVRIGLLKMVSEIGGLTLETVPETFQLNLSRLRDVQSQIQKITLVSISVLILQQTLVSENSSSIDMEAITRTCINRLYEMLDAKPDAGLSEIMETLSELLDSNDAETKKQVIANMLVKSLQAGDAVFTHVSQTIYLAIRAAVLAGNNTKRKQLVETMLRKIGAASLSDKVIEVSDILVLVATVSRSVHGLWYEELLKKPN

SEQ ID NO: 70069 - protein, 1022 aa, Arabidopsis thaliana
  peptide (1)..(1022): Ceres Seq. ID no. 2140459
MRSPRSGSIEELSQRLESKLNAAEQKRLSILEKELARLAKMDEARQAAKNGLEQRVEKERDELESKVEERVLKAEKNRMLLFKAMAQRRAAKRQRAAQSLMKKAIQETRYKESVRAAIYQKRAAAESKRMGILEAERRRANARLTRVFGAASSVRSQKEAERRKMKDRLEERLQRAKKLKAQYMRRRRGMDSCSSSRSETMRKNQVHLVRMLVRCWRRFAKYKKSTFVLARAYHELGINEKSIESVPFEQFAIQMNSVSVIQTVKALLDRLEIRLTLSKASNVENINHLLKHIFPPVRRGKSPSPMSKGEQNSPNSKMGYQKLKKIARYPARIFLCAYMIKQHPGAIFRGRGEHEIALVESATCLIREFELLVKVILEGPESTLPGNVSFVAQRPKKFRSQLEAFDKAWCSYLEGFVVWKINDAKLLEKDLARTQESELSEVSKHTSSPKIIDSGLNQKTVKASSPTNRALFSETDGARESKAPADSHLPSSSSPSPGSSNLSPSLNSGSEAISTPNVVANSFDAALASENEVIVNEIVHDNSSSFADSLDPNTGDTSNLQVRVKETMEKAFWDGVMESMKQSQPDFSWVIKLMKEVRDELCEISPKDWRQEIVQTIDTDVLSQLLASGNVDMGYLGNILEFSLGILLKLSAPANEEEIRVTHHKLMTELGEIVPTDGHSNSSYAVLMVKGLRFVLQQIQILKKEISKSRLKLLEPLLKGPAGLEYLKKSFSSRHGSPDQASSSLPLTKRWLLSVRGEAEREWKEHKDALSAVINNHSGSSGLPSTTMRTGGNVSSVSKVNTPSSPFPGIELSECKGETVDLLVRIGLLKMVSEIGGLTLETVPETFQLNLSRLRDVQSQIQKITLVSISVLILQQTLVSENSSSIDMEAITRTCINRLYEMLDAKPDAGLSEIMETLSELLDSNDAETKKQVIANMLVKSLQAGDAVFTHVSQTIYLAIRAAVLAGNNTKRKQLVETMLRKIGAASLSDKVIEVSDILVLVATVSRSVHGLWYEELLKKPN

SEQ ID NO: 70070 - protein, 982 aa, Arabidopsis thaliana
  peptide (1)..(982): Ceres Seq. ID no. 2140460
MDEARQAAKNGLEQRVEKERDELESKVEERVLKAEKNRMLLFKAMAQRRAAKRQRAAQSLMKKAIQETRYKESVRAAIYQKRAAAESKRMGILEAERRRANARLTRVFGAASSVRSQKEAERRKMKDRLEERLQRAKKLKAQYMRRRRGMDSCSSSRSETMRKNQVHLVRMLVRCWRRFAKYKKSTFVLARAYHELGINEKSIESVPFEQFAIQMNSVSVIQTVKALLDRLEIRLTLSKASNVENINHLLKHIFPPVRRGKSPSPMSKGEQNSPNSKMGYQKLKKIARYPARIFLCAYMIKQHPGAIFRGRGEHEIALVESATCLIREFELLVKVILEGPESTLPGNVSFVAQRPKKFRSQLEAFDKAWCSYLEGFVVWKINDAKLLEKDLARTQESELSEVSKHTSSPKIIDSGLNQKTVKASSPTNRALFSETDGARESKAPADSHLPSSSSPSPGSSNLSPSLNSGSEAISTPNVVANSFDAALASENEVIVNEIVHDNSSSFADSLDPNTGDTSNLQVRVKETMEKAFWDGVMESMKQSQPDFSWVIKLMKEVRDELCEISPKDWRQEIVQTIDTDVLSQLLASGNVDMGYLGNILEFSLGILLKLSAPANEEEIRVTHHKLMTELGEIVPTDGHSNSSYAVLMVKGLRFVLQQIQILKKEISKSRLKLLEPLLKGPAGLEYLKKSFSSRHGSPDQASSSLPLTKRWLLSVRGEAEREWKEHKDALSAVINNHSGSSGLPSTTMRTGGNVSSVSKVNTPSSPFPGIELSECKGETVDLLVRIGLLKMVSEIGGLTLETVPETFQLNLSRLRDVQSQIQKITLVSISVLILQQTLVSENSSSIDMEAITRTCINRLYEMLDAKPDAGLSEIMETLSELLDSNDAETKKQVIANMLVKSLQAGDAVFTHVSQTIYLAIRAAVLAGNNTKRKQLVETMLRKIGAASLSDKVIEVSDILVLVATVSRSVHGLWYEELLKKPN

SEQ ID NO: 70071 - DNA, 3150 bp, Arabidopsis thaliana
  misc_feature (1)..(3150): Ceres Seq. ID no. 2140509
  misc_feature (1)..(3150): Ortholog of  Ceres SEQ ID NO 15226780 as cited in SEQ ID NO 55159
atgttcgtgaagaagttggtcgagatagcagccaagaagcctggaggaagttcatcagaaggactgagagctaatgacgttgagccacgtatcgctctgcattacggaatcccttcaggttctcacttgtttgcttatgatccatttcagaagatcctcgccgtttccaccaaggatggtagaatcaagttgtttgggaaagatcagacccaggctttgctagtctctgaagaaacatccacaagcaggtttcttgagtttgttcagaaccaaggaatccttctcaatgtgaattccaagaaccagattgaggtttgggacttagacaagaagcttctatctcatgttcatgttttcaatggcgagatcacttctttccgggttatgcaacataccccttacttttatgttggagattcttctggtaatgtatcagtgtttaagatcgaacaagattctaatcaagttatacaactggagtacaccataccttacctagcatcaaatggctctcccattgaagcttctgaggatacttcagttgtgagcattctaccacagctaacagctgaaagcaagaggattctattggtatttagtagcgggtttatagcgttatgggacatcaaagaaagcaaaccgattctcaaaacaggagtacacggtatggtaaagcaagatacgaagaaagcgacttgtgcttgttgggtttgtccttcaggaagcagagtttcagttggctatagcaatggagatattctaatatggagcattccttccaaaggagaatgctcgccagagagttctgctatgatttgcaagcttaacctcggatacaaatccgaaaagataccaatagcttctctgaaatgggtttatgctgaagggaaggcaagccgggtttatgtcattggatcatcctcaaactcgttgcaggtggttttgttgaatgagcaaaccgaaactcggatgattaagctgggacttcatgtttctgagccttgtgctgatatggagatgatcatagctgatgttaatgaacagagcaagcataaacaagattttctgtttgttcttggaaagtctggacgtgtctatgcttacgatgattatatgattgagaagtatctgattcagtctcagtccaaatcatctccttccctcccaaaggaaactgtggttaagctgccattttcagattcaagcagcattaccgtaggaaaattcctcacaaatccttcacacttactcaatctatcagatgaggattatgctcagctggcgaaagatgctgtgccgtttcttccttttcatacagttccaaaggaaagttcccgttctgcacattttcctggtttcacaaaggttaagaatgtttacatcacaggacactgtgacggaaccattagtgtatgggacatgacctgttcttttcccattcttgtcttgtttctgaaagaacagatagatcaagatgtatcttcacgcggaaatgcggcattgacagctttacattatgacagcaactcaagacttcttgtttctggtgatcataacggaatggttcgcctttataggttcaaacctgagccatacctaacagaaaacagttttatccctttccaaggaagcttaaagaaaggaaataaccatattgttcaaagtgttaagtacatcaagcttactggttccataacctgtattcagaagagccaaaactcaaaacatctcgctattggatcagatcaaggacatgtttctctggttgacattgaggaagcaaatgtgttatacacaaaacacattgcaagtgatatatgtccagggatcatctccttgcaattcgagagttgcattgtgcaaggcttcgagaagaacgtgttagtggttgctatgagagactcgtcggtttttgctctggacagcgacacgggaaatatgattggaaccaacatgattaagcctaaaaagccattcaaggttctgtatatgcagatcctagatggaaagcaagatacttcaggaaatggatttgatacgagcagagagagcacagttgaggagatctcgataaggcagccttcggttttggtttgttcggagaaagctatatatatctactccttggctcacgttgtccagggagtgaagaaggtcctccacaagaaaaagttcagttcttcacccatttgctcagcttccacattctatggaacctctggtgttggtcttacacttgttttcacagatggaactgttgagataaggtctttgccagaactctcccagctaaaacaaacttccattagaggcttcacatattcttcaccaaaaccaaactcgttaccagagattaccatatccgcttcttgggatggagatctagtcatggtgaatggagatgatgaacttattgttagctcagttttacctcaaaaggaaacttttaggcttgtcgagtccatgaatcgagtttacaagaaagataactcggtttgtcacgaaggaatcatcacatcatcatctccaagggaaaagaagagtatgtttggttctgttttcaagactaaatcaaagcgcacaactgatacagaaccagaaagctccaaggaaacgatcgaggagctgtctaaaatcttctctacagctaatttcccctggaacaacaatgttgagaatagtagagagatcaatacaattactagggtggaagatgaagaagagttggacatagatgacattgacattgacgatcatcatcctaatcaacaacaacaagagaagcctaaagaacaagggatattgtcagggcttagtaaacagaagatggcgaataggtttagtaatttcaaaggtaagctgaaacagatggcagctaagaatgagaagagtgttgtaaccaatgacgagaagcatgaggagaaaaacggcgccacagttgatcagatcaagaagaaatacgggtttacctcgtccgatgaaatgggagctgccaaaatggctcagagcaaacttcaagacaacctgaaaaagttacagggaattagcttgaggacgacggaaatggaagatactgcaaagtctttctcctctacggcaaaggaactactaaacgctgttgagttcaataaacagagctcaaaatcttag

SEQ ID NO: 70072 - protein, 1049 aa, Arabidopsis thaliana
  peptide (1)..(1049): Ceres Seq. ID no. 2140510
MFVKKLVEIAAKKPGGSSSEGLRANDVEPRIALHYGIPSGSHLFAYDPFQKILAVSTKDGRIKLFGKDQTQALLVSEETSTSRFLEFVQNQGILLNVNSKNQIEVWDLDKKLLSHVHVFNGEITSFRVMQHTPYFYVGDSSGNVSVFKIEQDSNQVIQLEYTIPYLASNGSPIEASEDTSVVSILPQLTAESKRILLVFSSGFIALWDIKESKPILKTGVHGMVKQDTKKATCACWVCPSGSRVSVGYSNGDILIWSIPSKGECSPESSAMICKLNLGYKSEKIPIASLKWVYAEGKASRVYVIGSSSNSLQVVLLNEQTETRMIKLGLHVSEPCADMEMIIADVNEQSKHKQDFLFVLGKSGRVYAYDDYMIEKYLIQSQSKSSPSLPKETVVKLPFSDSSSITVGKFLTNPSHLLNLSDEDYAQLAKDAVPFLPFHTVPKESSRSAHFPGFTKVKNVYITGHCDGTISVWDMTCSFPILVLFLKEQIDQDVSSRGNAALTALHYDSNSRLLVSGDHNGMVRLYRFKPEPYLTENSFIPFQGSLKKGNNHIVQSVKYIKLTGSITCIQKSQNSKHLAIGSDQGHVSLVDIEEANVLYTKHIASDICPGIISLQFESCIVQGFEKNVLVVAMRDSSVFALDSDTGNMIGTNMIKPKKPFKVLYMQILDGKQDTSGNGFDTSRESTVEEISIRQPSVLVCSEKAIYIYSLAHVVQGVKKVLHKKKFSSSPICSASTFYGTSGVGLTLVFTDGTVEIRSLPELSQLKQTSIRGFTYSSPKPNSLPEITISASWDGDLVMVNGDDELIVSSVLPQKETFRLVESMNRVYKKDNSVCHEGIITSSSPREKKSMFGSVFKTKSKRTTDTEPESSKETIEELSKIFSTANFPWNNNVENSREINTITRVEDEEELDIDDIDIDDHHPNQQQQEKPKEQGILSGLSKQKMANRFSNFKGKLKQMAAKNEKSVVTNDEKHEEKNGATVDQIKKKYGFTSSDEMGAAKMAQSKLQDNLKKLQGISLRTTEMEDTAKSFSSTAKELLNAVEFNKQSSKS

SEQ ID NO: 70073 - protein, 921 aa, Arabidopsis thaliana
  peptide (1)..(921): Ceres Seq. ID no. 2140511
MQHTPYFYVGDSSGNVSVFKIEQDSNQVIQLEYTIPYLASNGSPIEASEDTSVVSILPQLTAESKRILLVFSSGFIALWDIKESKPILKTGVHGMVKQDTKKATCACWVCPSGSRVSVGYSNGDILIWSIPSKGECSPESSAMICKLNLGYKSEKIPIASLKWVYAEGKASRVYVIGSSSNSLQVVLLNEQTETRMIKLGLHVSEPCADMEMIIADVNEQSKHKQDFLFVLGKSGRVYAYDDYMIEKYLIQSQSKSSPSLPKETVVKLPFSDSSSITVGKFLTNPSHLLNLSDEDYAQLAKDAVPFLPFHTVPKESSRSAHFPGFTKVKNVYITGHCDGTISVWDMTCSFPILVLFLKEQIDQDVSSRGNAALTALHYDSNSRLLVSGDHNGMVRLYRFKPEPYLTENSFIPFQGSLKKGNNHIVQSVKYIKLTGSITCIQKSQNSKHLAIGSDQGHVSLVDIEEANVLYTKHIASDICPGIISLQFESCIVQGFEKNVLVVAMRDSSVFALDSDTGNMIGTNMIKPKKPFKVLYMQILDGKQDTSGNGFDTSRESTVEEISIRQPSVLVCSEKAIYIYSLAHVVQGVKKVLHKKKFSSSPICSASTFYGTSGVGLTLVFTDGTVEIRSLPELSQLKQTSIRGFTYSSPKPNSLPEITISASWDGDLVMVNGDDELIVSSVLPQKETFRLVESMNRVYKKDNSVCHEGIITSSSPREKKSMFGSVFKTKSKRTTDTEPESSKETIEELSKIFSTANFPWNNNVENSREINTITRVEDEEELDIDDIDIDDHHPNQQQQEKPKEQGILSGLSKQKMANRFSNFKGKLKQMAAKNEKSVVTNDEKHEEKNGATVDQIKKKYGFTSSDEMGAAKMAQSKLQDNLKKLQGISLRTTEMEDTAKSFSSTAKELLNAVEFNKQSSKS

SEQ ID NO: 70074 - protein, 827 aa, Arabidopsis thaliana
  peptide (1)..(827): Ceres Seq. ID no. 2140512
MVKQDTKKATCACWVCPSGSRVSVGYSNGDILIWSIPSKGECSPESSAMICKLNLGYKSEKIPIASLKWVYAEGKASRVYVIGSSSNSLQVVLLNEQTETRMIKLGLHVSEPCADMEMIIADVNEQSKHKQDFLFVLGKSGRVYAYDDYMIEKYLIQSQSKSSPSLPKETVVKLPFSDSSSITVGKFLTNPSHLLNLSDEDYAQLAKDAVPFLPFHTVPKESSRSAHFPGFTKVKNVYITGHCDGTISVWDMTCSFPILVLFLKEQIDQDVSSRGNAALTALHYDSNSRLLVSGDHNGMVRLYRFKPEPYLTENSFIPFQGSLKKGNNHIVQSVKYIKLTGSITCIQKSQNSKHLAIGSDQGHVSLVDIEEANVLYTKHIASDICPGIISLQFESCIVQGFEKNVLVVAMRDSSVFALDSDTGNMIGTNMIKPKKPFKVLYMQILDGKQDTSGNGFDTSRESTVEEISIRQPSVLVCSEKAIYIYSLAHVVQGVKKVLHKKKFSSSPICSASTFYGTSGVGLTLVFTDGTVEIRSLPELSQLKQTSIRGFTYSSPKPNSLPEITISASWDGDLVMVNGDDELIVSSVLPQKETFRLVESMNRVYKKDNSVCHEGIITSSSPREKKSMFGSVFKTKSKRTTDTEPESSKETIEELSKIFSTANFPWNNNVENSREINTITRVEDEEELDIDDIDIDDHHPNQQQQEKPKEQGILSGLSKQKMANRFSNFKGKLKQMAAKNEKSVVTNDEKHEEKNGATVDQIKKKYGFTSSDEMGAAKMAQSKLQDNLKKLQGISLRTTEMEDTAKSFSSTAKELLNAVEFNKQSSKS

SEQ ID NO: 70075 - DNA, 1323 bp, Arabidopsis thaliana
  misc_feature (1)..(1323): Ceres Seq. ID no. 2141877
  misc_feature (1)..(1323): Ortholog of  Ceres SEQ ID NO 13654989 as cited in SEQ ID NO 63117
  misc_feature (1)..(1323): Ortholog of  Ceres SEQ ID NO 13655640 as cited in SEQ ID NO 63844
  misc_feature (1)..(1323): Ortholog of  Ceres SEQ ID NO 13584744 as cited in SEQ ID NO 69137
atggaaggagaatccaaaggattaatcgttgggatctcactaggtttggtgattggtgttgtcttagctatctcagctttgttctgctttaggtatcatagaaaaaagtctcagattgtgaatagtggatcacgaagaagtgcaaccattcccatcagagagaatggagctgattcgtgtaatataatgtcggattcgaccattggtccggattcacctgtgaaatcttctaagaatgggaggtctgtttggcttgaagggtttagtaagaggagtaatgtcatctctgcttctggcattttggaatattcttacagggatttgcagaaagcgacgtgtaatttcacgactttgataggccaaggagcatttggacctgtctacaaagctcaaatgtctactggtgagatcgtggctgtgaaagttctagccactgattctaaacagggcgaaaaagagtttcagacagaggttatgttattgggaaggttgcatcaccgtaacctagtgaacttgattggatactgtgcagagaaaggccaacacatgcttatatatgtttacatgagtaaaggaagcttagcttctcatttatacagcgaaaaacatgaaccgctgagctgggatttgagagtatatattgctttagacgtggcacgtggtctagagtatcttcatgatggggctgttcctcctgtaatccacagagatatcaaatcttccaacatcttgctggatcaatctatgagagctcgggttgctgactttggcctctccagagaagaaatggtagacaaacatgcagctaacatcagaggaacatttggctacctcgatcccgaatacatttcaacaagaacattcaccaagaaaagcgatgtctatggcttcggagttttgcttttcgagcttatagcaggaagaaatcctcaacaaggtctaatggaattggttgagctggcggctatgaatgcagaggaaaaagtcggatgggaagagatagtagattcaagattagatgggagatatgatttacaagaagtgaatgaagtagcagcttttgcttacaaatgcatctctcgtgcacctagaaaacgtcctaacatgagggacattgttcaggttttgactcgtgttattaaagtgagacattgcagaaagcggcagaagaattctccgtcgccgtctccacggcttcctcctcctcctccgatagtggaggagtcagaaggtgagttaactgcaaacggatcattacgatcagaaattcatcggagggataattccttggacagtagtatagctgaagacgtgattttgtaa

SEQ ID NO: 70076 - protein, 440 aa, Arabidopsis thaliana
  peptide (1)..(440): Ceres Seq. ID no. 2141878
MEGESKGLIVGISLGLVIGVVLAISALFCFRYHRKKSQIVNSGSRRSATIPIRENGADSCNIMSDSTIGPDSPVKSSKNGRSVWLEGFSKRSNVISASGILEYSYRDLQKATCNFTTLIGQGAFGPVYKAQMSTGEIVAVKVLATDSKQGEKEFQTEVMLLGRLHHRNLVNLIGYCAEKGQHMLIYVYMSKGSLASHLYSEKHEPLSWDLRVYIALDVARGLEYLHDGAVPPVIHRDIKSSNILLDQSMRARVADFGLSREEMVDKHAANIRGTFGYLDPEYISTRTFTKKSDVYGFGVLLFELIAGRNPQQGLMELVELAAMNAEEKVGWEEIVDSRLDGRYDLQEVNEVAAFAYKCISRAPRKRPNMRDIVQVLTRVIKVRHCRKRQKNSPSPSPRLPPPPPIVEESEGELTANGSLRSEIHRRDNSLDSSIAEDVIL

SEQ ID NO: 70077 - protein, 378 aa, Arabidopsis thaliana
  peptide (1)..(378): Ceres Seq. ID no. 2141879
MSDSTIGPDSPVKSSKNGRSVWLEGFSKRSNVISASGILEYSYRDLQKATCNFTTLIGQGAFGPVYKAQMSTGEIVAVKVLATDSKQGEKEFQTEVMLLGRLHHRNLVNLIGYCAEKGQHMLIYVYMSKGSLASHLYSEKHEPLSWDLRVYIALDVARGLEYLHDGAVPPVIHRDIKSSNILLDQSMRARVADFGLSREEMVDKHAANIRGTFGYLDPEYISTRTFTKKSDVYGFGVLLFELIAGRNPQQGLMELVELAAMNAEEKVGWEEIVDSRLDGRYDLQEVNEVAAFAYKCISRAPRKRPNMRDIVQVLTRVIKVRHCRKRQKNSPSPSPRLPPPPPIVEESEGELTANGSLRSEIHRRDNSLDSSIAEDVIL

SEQ ID NO: 70078 - protein, 309 aa, Arabidopsis thaliana
  peptide (1)..(309): Ceres Seq. ID no. 2141880
MSTGEIVAVKVLATDSKQGEKEFQTEVMLLGRLHHRNLVNLIGYCAEKGQHMLIYVYMSKGSLASHLYSEKHEPLSWDLRVYIALDVARGLEYLHDGAVPPVIHRDIKSSNILLDQSMRARVADFGLSREEMVDKHAANIRGTFGYLDPEYISTRTFTKKSDVYGFGVLLFELIAGRNPQQGLMELVELAAMNAEEKVGWEEIVDSRLDGRYDLQEVNEVAAFAYKCISRAPRKRPNMRDIVQVLTRVIKVRHCRKRQKNSPSPSPRLPPPPPIVEESEGELTANGSLRSEIHRRDNSLDSSIAEDVIL

SEQ ID NO: 70079 - DNA, 1587 bp, Arabidopsis thaliana
  misc_feature (1)..(1587): Ceres Seq. ID no. 2142136
  misc_feature (1)..(1587): Ortholog of  Ceres SEQ ID NO 15226175 as cited in SEQ ID NO 0
atgaaagctctacgaagaatacaaacgaagtctacgtttccaaatccttcttctccgtcatctccgtggactcatttgcgttctgctttcgtccttgttacttcttcttctccagcttcttgttcttcttcttctgatccgcatcggcttaaatcgccctggtcccggagaaaagggaaaaaaccactcacacttcgccggtggagaagatgtttcacccctgagggtagaattcggaatgggggagttgatttgttgaagaaagttcggactagaggcattgatcctagcattcggtctgaggtgtggccatttcttcttggagtgtgtgatttcaatagttccgaagaagagagaggtgctacaagaacttggagaagaaaagtgtatgagagactacgcaggcagtgcaaaaggcttcaaaaacaaaacagtgggacttttaagttaaacaagatcaataaaactactcaagatgatgagcatgatagttggtctcttgcgcaagactctgaaagttcatgttctgatgatgcttgcagcgtccacgagtctcttatcagcgataaagacaacacggaagatattggctacatgagtgatgtctcatgtacgcttgacagagactataatggttcaagacacctgaactctgagtcgtcagactcagattcatctgatgagaatgattatgttcaggtcgctccttcttgtgaagggaaagatgaaaacagtacttctccatccagcatatatatttctcgtaccaaagaggattttgtgacctggcagcgtattatccgtctagacgctctccgtgcagatacagaatggactccatattctcaatcccaagctttggtttcagagaatagggcacgtcgtgctgctgaagcagttggtctaaaggattacagttatttggaaccttcgaaaatctttcacgctgcacggcttgttgctgttcttgaagcctatgccttacatgaccctgaaattggctactgccaaggaatgagtgatcttctctcccctatactctcagtcatacctgatgactacgaggcattttggtgtttcgttgggttcatgaagaaagctcgtcagaatttcagagtcgatgaggttgggatcacaaggcaactgaacatagtctcaaagattatcaaatccaaagactcacaactctacaagcatcttgagaaagtcaaggctgaagactgtttctttgtttacagaatggttcttgttatgtttagaagagagctgactctggagcaaacattgcatctctgggaagtgatttgggcagaccaagctgcaataagagctgggatggggaaatcttcctggagcagacgaataaagcagcgggctcctcccacggaggatttgttgctgtacgtggtagctgcttctgtgttgcaaaggaggaaagtcataatagagaagtacagtagcatggaggagattctccgagagtgccacaatatggtagggaaactagacgtgtggaagctcttagacgatgcacacgaccttattgttaccctccacgccaagatcgaacattctatcccacaataa

SEQ ID NO: 70080 - protein, 528 aa, Arabidopsis thaliana
  peptide (1)..(528): Ceres Seq. ID no. 2142137
MKALRRIQTKSTFPNPSSPSSPWTHLRSAFVLVTSSSPASCSSSSDPHRLKSPWSRRKGKKPLTLRRWRRCFTPEGRIRNGGVDLLKKVRTRGIDPSIRSEVWPFLLGVCDFNSSEEERGATRTWRRKVYERLRRQCKRLQKQNSGTFKLNKINKTTQDDEHDSWSLAQDSESSCSDDACSVHESLISDKDNTEDIGYMSDVSCTLDRDYNGSRHLNSESSDSDSSDENDYVQVAPSCEGKDENSTSPSSIYISRTKEDFVTWQRIIRLDALRADTEWTPYSQSQALVSENRARRAAEAVGLKDYSYLEPSKIFHAARLVAVLEAYALHDPEIGYCQGMSDLLSPILSVIPDDYEAFWCFVGFMKKARQNFRVDEVGITRQLNIVSKIIKSKDSQLYKHLEKVKAEDCFFVYRMVLVMFRRELTLEQTLHLWEVIWADQAAIRAGMGKSSWSRRIKQRAPPTEDLLLYVVAASVLQRRKVIIEKYSSMEEILRECHNMVGKLDVWKLLDDAHDLIVTLHAKIEHSIPQ

SEQ ID NO: 70081 - protein, 330 aa, Arabidopsis thaliana
  peptide (1)..(330): Ceres Seq. ID no. 2142138
MSDVSCTLDRDYNGSRHLNSESSDSDSSDENDYVQVAPSCEGKDENSTSPSSIYISRTKEDFVTWQRIIRLDALRADTEWTPYSQSQALVSENRARRAAEAVGLKDYSYLEPSKIFHAARLVAVLEAYALHDPEIGYCQGMSDLLSPILSVIPDDYEAFWCFVGFMKKARQNFRVDEVGITRQLNIVSKIIKSKDSQLYKHLEKVKAEDCFFVYRMVLVMFRRELTLEQTLHLWEVIWADQAAIRAGMGKSSWSRRIKQRAPPTEDLLLYVVAASVLQRRKVIIEKYSSMEEILRECHNMVGKLDVWKLLDDAHDLIVTLHAKIEHSIPQ

SEQ ID NO: 70082 - DNA, 3264 bp, Arabidopsis thaliana
  misc_feature (1)..(3264): Ceres Seq. ID no. 2142328
  misc_feature (1)..(3264): Ortholog of  Ceres SEQ ID NO 14313863 as cited in SEQ ID NO 54791
atggcgagtggcggaaagggggagaagatattggtttcggtaagggtaaggccgcagaacgagaaagagaaggcgaggaatgatatatgtgattgggaatgtgtaaacaacacaacaatagtatgcaataacaatttgcctgagaggtctctcttcccctctacctatacatttgacaaagtgtttggatttgattctcccacgaaacaagtctatgaagatggagcgaaggaggttgctctttgtgttctcggcggaatcaactcaagtattttcgcatatggacagacaagcagtgggaagacgtatacaatgtgtggcatcactaaatttgcaatggatgacattttttgttacattcaaaagcatacggaccgcaaatttaccctcaaattctctgcgattgagatctacaatgaagctgtgagggatctcctaagtggggataataatcaacggaggctcctcgatgatccagagagaggaaccgtcgttgagaaacttattgaggagaccatccaagacagaacacatctagaggaacttcttacagtctgtgaaactcagaggaagattggagagacctccctgaatgaagttagctctagatcacatcaaatactccggctgacaatcgaaagcactggtcgagaatattctccggatagctcaagcactcttgcagcgtccgtgtgcttcattgatctggctggaagtgaacgtgcttctcagactttatctgctggtacaagattgaaagaaggttgtcatataaacaggagtttacttactcttggaacggtcatccgcaaactaaggttcgatccatgtgatatagctcaatctcaggtggagaatttacttaaatcaacagcagaagagcggtcttctaggatggatgaacaatccatgtttagctccatggattttgatgctgatttccgaagaagaagctatgattcaacagatcttggagaacctagtatcatcaataacttaaccgagaggaactttgagtttttggaaaattctgaagaagatgatttcctgctagatgataagacccctcaattttcgaggcataacctgtatgatgactgggaagagttggttcaaataaccgacgaaagactggaagatgcatgcaaagaagttagatgcattgaacctgaagctgagcagagtagtggacaaccagcagcatgcgaaagccatgactcattagacgacattgttgataagatagctatctctgaggttctctcacctagaaaggaagaaactttaccaggtctggaacacgaacaaagctataacccttctacaggtattgagaaagccgagaatgaagacatggagattagcatacctgcagcaaaggaagaaactttaccagctctagaatacgaacaaagctataactcttatacaggtaatgagagagccgagaatgaagtcatggagattagcacacctagaaaggacgaaccattatcagctctggaatacgaacaaagctataactcttctacaagtaatgagaaagccgagaatgaagatatggagattagcacacctgcagaaaaggaaaatgttgacttatctttaaaaacaatagatgtgaatgctaagcctgagacctatgagctaactctaaagaactcggatttggagataggcccatcagttgaagctcaagaatcacaggaatctgtgaatgaagaggaacaaatgaagaatgaagagaggaaaatgagtccttccacaaagcaagctgagcaatgcttaaataaagaagaaaatgctcagtcagaacagcaatcaacggaagactgtgaattgaattcactccctattaataaccaatcagaagcaacagtcgaagtggagttaacacccaacgatgctaagttagatgaggatgcgacatctagagataagtgggagagcaaacagcaacaagaggctgataaagattgtaacgaatcatctgtctgcaaaaatattgggacagatgataatgacaacgacacttacatggctttgaaagaaaaagttaaggagatgcagaagaaaattgaataccttatgagcatgcacacagcagaacaacaacaatcaccctccttcagaagagatttcaagagtcctccagaatattttactgccaaaagaagccgaagttgcagagaaaatctcttgagtgttagatctcctcattggtttgagagtttggaagttagtaacaatacatcacctacctggagggttatgcagacaaaagcttctcctggaagacccaacacttcgagcatttcctttgattcagggagttctacctccattgatacgcgtagcctgaaagactatgatcctgagatgggcaatagcttccgtgaatttgtagcagggcttgaggaaatggcaaagaagcatcactcaattgactcgacaccggagctagattatgggattccatacgctcccacaaaaaccgaaagaatggagatcagaccggaaagccctgcagatagcgttagaggaaacgagaatgcattgccaaatcctcaggatataaataaagaaaccacagatgccaccaataatcagtcacagagagagcaggttggtgattcggtagaagaagcaaaacctaaggaaacagattccacagaggcttcccaggagaaactacaggtagctgctaatggacaatattcaatcagttcttcagactttgagagacagcaaaggaaaataattgagctttgggcagcatgcaatgtaccactggttcacagaacctacttctttttgctcttcaaaggtgatccttcagactatgtttatatggaagttgaacttcgaaggctatcttttctgaagcagacgatatctaatgacatggaaacatcaaggatgcaaacagtgaaggcactcacacgcgagaaggaatggatttccaaacaattaccaaagaagtttccatggaaccaaagaatagggctttaccaaaaatggggcgtggaggtgaactcaaagcagagaagcctgcaagtggcgcacaagctgtggaccaacacccaagatatggaccacataaaagaaagtgcttctcttgtggctaagctgcttggatttgttgagccaagtcgaatgccgaaggaaatgtttggcctcagcttgttacctagaaccgaaaacgtaaaatcatctggctggagatttaccaaatcattctctgctatacgcttgaccagatga

SEQ ID NO: 70083 - protein, 1087 aa, Arabidopsis thaliana
  peptide (1)..(1087): Ceres Seq. ID no. 2142329
MASGGKGEKILVSVRVRPQNEKEKARNDICDWECVNNTTIVCNNNLPERSLFPSTYTFDKVFGFDSPTKQVYEDGAKEVALCVLGGINSSIFAYGQTSSGKTYTMCGITKFAMDDIFCYIQKHTDRKFTLKFSAIEIYNEAVRDLLSGDNNQRRLLDDPERGTVVEKLIEETIQDRTHLEELLTVCETQRKIGETSLNEVSSRSHQILRLTIESTGREYSPDSSSTLAASVCFIDLAGSERASQTLSAGTRLKEGCHINRSLLTLGTVIRKLRFDPCDIAQSQVENLLKSTAEERSSRMDEQSMFSSMDFDADFRRRSYDSTDLGEPSIINNLTERNFEFLENSEEDDFLLDDKTPQFSRHNLYDDWEELVQITDERLEDACKEVRCIEPEAEQSSGQPAACESHDSLDDIVDKIAISEVLSPRKEETLPGLEHEQSYNPSTGIEKAENEDMEISIPAAKEETLPALEYEQSYNSYTGNERAENEVMEISTPRKDEPLSALEYEQSYNSSTSNEKAENEDMEISTPAEKENVDLSLKTIDVNAKPETYELTLKNSDLEIGPSVEAQESQESVNEEEQMKNEERKMSPSTKQAEQCLNKEENAQSEQQSTEDCELNSLPINNQSEATVEVELTPNDAKLDEDATSRDKWESKQQQEADKDCNESSVCKNIGTDDNDNDTYMALKEKVKEMQKKIEYLMSMHTAEQQQSPSFRRDFKSPPEYFTAKRSRSCRENLLSVRSPHWFESLEVSNNTSPTWRVMQTKASPGRPNTSSISFDSGSSTSIDTRSLKDYDPEMGNSFREFVAGLEEMAKKHHSIDSTPELDYGIPYAPTKTERMEIRPESPADSVRGNENALPNPQDINKETTDATNNQSQREQVGDSVEEAKPKETDSTEASQEKLQVAANGQYSISSSDFERQQRKIIELWAACNVPLVHRTYFFLLFKGDPSDYVYMEVELRRLSFLKQTISNDMETSRMQTVKALTREKEWISKQLPKKFPWNQRIGLYQKWGVEVNSKQRSLQVAHKLWTNTQDMDHIKESASLVAKLLGFVEPSRMPKEMFGLSLLPRTENVKSSGWRFTKSFSAIRLTR

SEQ ID NO: 70084 - protein, 983 aa, Arabidopsis thaliana
  peptide (1)..(983): Ceres Seq. ID no. 2142330
MCGITKFAMDDIFCYIQKHTDRKFTLKFSAIEIYNEAVRDLLSGDNNQRRLLDDPERGTVVEKLIEETIQDRTHLEELLTVCETQRKIGETSLNEVSSRSHQILRLTIESTGREYSPDSSSTLAASVCFIDLAGSERASQTLSAGTRLKEGCHINRSLLTLGTVIRKLRFDPCDIAQSQVENLLKSTAEERSSRMDEQSMFSSMDFDADFRRRSYDSTDLGEPSIINNLTERNFEFLENSEEDDFLLDDKTPQFSRHNLYDDWEELVQITDERLEDACKEVRCIEPEAEQSSGQPAACESHDSLDDIVDKIAISEVLSPRKEETLPGLEHEQSYNPSTGIEKAENEDMEISIPAAKEETLPALEYEQSYNSYTGNERAENEVMEISTPRKDEPLSALEYEQSYNSSTSNEKAENEDMEISTPAEKENVDLSLKTIDVNAKPETYELTLKNSDLEIGPSVEAQESQESVNEEEQMKNEERKMSPSTKQAEQCLNKEENAQSEQQSTEDCELNSLPINNQSEATVEVELTPNDAKLDEDATSRDKWESKQQQEADKDCNESSVCKNIGTDDNDNDTYMALKEKVKEMQKKIEYLMSMHTAEQQQSPSFRRDFKSPPEYFTAKRSRSCRENLLSVRSPHWFESLEVSNNTSPTWRVMQTKASPGRPNTSSISFDSGSSTSIDTRSLKDYDPEMGNSFREFVAGLEEMAKKHHSIDSTPELDYGIPYAPTKTERMEIRPESPADSVRGNENALPNPQDINKETTDATNNQSQREQVGDSVEEAKPKETDSTEASQEKLQVAANGQYSISSSDFERQQRKIIELWAACNVPLVHRTYFFLLFKGDPSDYVYMEVELRRLSFLKQTISNDMETSRMQTVKALTREKEWISKQLPKKFPWNQRIGLYQKWGVEVNSKQRSLQVAHKLWTNTQDMDHIKESASLVAKLLGFVEPSRMPKEMFGLSLLPRTENVKSSGWRFTKSFSAIRLTR

SEQ ID NO: 70085 - protein, 975 aa, Arabidopsis thaliana
  peptide (1)..(975): Ceres Seq. ID no. 2142331
MDDIFCYIQKHTDRKFTLKFSAIEIYNEAVRDLLSGDNNQRRLLDDPERGTVVEKLIEETIQDRTHLEELLTVCETQRKIGETSLNEVSSRSHQILRLTIESTGREYSPDSSSTLAASVCFIDLAGSERASQTLSAGTRLKEGCHINRSLLTLGTVIRKLRFDPCDIAQSQVENLLKSTAEERSSRMDEQSMFSSMDFDADFRRRSYDSTDLGEPSIINNLTERNFEFLENSEEDDFLLDDKTPQFSRHNLYDDWEELVQITDERLEDACKEVRCIEPEAEQSSGQPAACESHDSLDDIVDKIAISEVLSPRKEETLPGLEHEQSYNPSTGIEKAENEDMEISIPAAKEETLPALEYEQSYNSYTGNERAENEVMEISTPRKDEPLSALEYEQSYNSSTSNEKAENEDMEISTPAEKENVDLSLKTIDVNAKPETYELTLKNSDLEIGPSVEAQESQESVNEEEQMKNEERKMSPSTKQAEQCLNKEENAQSEQQSTEDCELNSLPINNQSEATVEVELTPNDAKLDEDATSRDKWESKQQQEADKDCNESSVCKNIGTDDNDNDTYMALKEKVKEMQKKIEYLMSMHTAEQQQSPSFRRDFKSPPEYFTAKRSRSCRENLLSVRSPHWFESLEVSNNTSPTWRVMQTKASPGRPNTSSISFDSGSSTSIDTRSLKDYDPEMGNSFREFVAGLEEMAKKHHSIDSTPELDYGIPYAPTKTERMEIRPESPADSVRGNENALPNPQDINKETTDATNNQSQREQVGDSVEEAKPKETDSTEASQEKLQVAANGQYSISSSDFERQQRKIIELWAACNVPLVHRTYFFLLFKGDPSDYVYMEVELRRLSFLKQTISNDMETSRMQTVKALTREKEWISKQLPKKFPWNQRIGLYQKWGVEVNSKQRSLQVAHKLWTNTQDMDHIKESASLVAKLLGFVEPSRMPKEMFGLSLLPRTENVKSSGWRFTKSFSAIRLTR

SEQ ID NO: 70086 - DNA, 1215 bp, Arabidopsis thaliana
  misc_feature (1)..(1215): Ceres Seq. ID no. 2142813
  misc_feature (1)..(1215): Ortholog of  Ceres SEQ ID NO 13597334 as cited in SEQ ID NO 64244
atggcttccttcaaccactttgtgttactgcttctgttaataatcactcttattctatccgctgaagcaactaaggaacgccgagcaataccatcaaaggcagaaaggaatgaaatgaagagacaactcaaagctatcaacaagcctgcaatcaagagtttcaagactgaacatggtgatatattcgattgtatcgatattcacaaacaactagcatttgatcatcacctactaaaaaaccactctgttcagctaaggccaacaacagtacctgaatatatcactggaaacaacatttcagagagttttagtcttttgcaagaaggtataagctgtccagatggcacagtaattgtaaaaaggactacaatgcaagatcttatgcatgcacaacgtttgaaatccatgggattcgagggcccgagaccttttctcacagagacaaacaacatgaattttaatggaaaattctacgatgcaagagctgattatggaccgaacccttttgctggagttgcaggaaacattaacatatggaaaccaaaaatcttgcaagatcaagttagtattggatacatggcagttagtggggggcctattgaagaagatttcgccagcatttcagttggatggattgtgaatccatcgatgcaccatggtgatcatgttcgtttatacgcctactggactttacatggaagcagtactggcggctgctacggcatgtcatgtcctggatttgtgcaagttagcaagactataccagttggtgccgttcttcaaccattttccatctataatggtcgacaatatgaattgcgtttaggcttgtttcaggatagtggcacgggaaattggtggtttgtatttaaagaggagattattggatactggccagcatcattgttcaagtcctggatggaatctaacagcgcaaattatgcatcttggggagggcaagtgtatagccctatcagagagaagagtccacctatgggaagtggtcattggcctagtgagggctttcataaagctgcttttattagtggcctcaaactcttcgatggtcacgggaaagtttataatccaggacgcgggacagtgaaggtacatgagagcagaccaatctgttacaaagccagatatgttcatgatgttgataaaccttggttaaaatctgtttactttggaggtcctggagggtgcatagggtaa

SEQ ID NO: 70087 - protein, 404 aa, Arabidopsis thaliana
  peptide (1)..(404): Ceres Seq. ID no. 2142814
MASFNHFVLLLLLIITLILSAEATKERRAIPSKAERNEMKRQLKAINKPAIKSFKTEHGDIFDCIDIHKQLAFDHHLLKNHSVQLRPTTVPEYITGNNISESFSLLQEGISCPDGTVIVKRTTMQDLMHAQRLKSMGFEGPRPFLTETNNMNFNGKFYDARADYGPNPFAGVAGNINIWKPKILQDQVSIGYMAVSGGPIEEDFASISVGWIVNPSMHHGDHVRLYAYWTLHGSSTGGCYGMSCPGFVQVSKTIPVGAVLQPFSIYNGRQYELRLGLFQDSGTGNWWFVFKEEIIGYWPASLFKSWMESNSANYASWGGQVYSPIREKSPPMGSGHWPSEGFHKAAFISGLKLFDGHGKVYNPGRGTVKVHESRPICYKARYVHDVDKPWLKSVYFGGPGGCIG

SEQ ID NO: 70088 - protein, 366 aa, Arabidopsis thaliana
  peptide (1)..(366): Ceres Seq. ID no. 2142815
MKRQLKAINKPAIKSFKTEHGDIFDCIDIHKQLAFDHHLLKNHSVQLRPTTVPEYITGNNISESFSLLQEGISCPDGTVIVKRTTMQDLMHAQRLKSMGFEGPRPFLTETNNMNFNGKFYDARADYGPNPFAGVAGNINIWKPKILQDQVSIGYMAVSGGPIEEDFASISVGWIVNPSMHHGDHVRLYAYWTLHGSSTGGCYGMSCPGFVQVSKTIPVGAVLQPFSIYNGRQYELRLGLFQDSGTGNWWFVFKEEIIGYWPASLFKSWMESNSANYASWGGQVYSPIREKSPPMGSGHWPSEGFHKAAFISGLKLFDGHGKVYNPGRGTVKVHESRPICYKARYVHDVDKPWLKSVYFGGPGGCIG

SEQ ID NO: 70089 - protein, 281 aa, Arabidopsis thaliana
  peptide (1)..(281): Ceres Seq. ID no. 2142816
MQDLMHAQRLKSMGFEGPRPFLTETNNMNFNGKFYDARADYGPNPFAGVAGNINIWKPKILQDQVSIGYMAVSGGPIEEDFASISVGWIVNPSMHHGDHVRLYAYWTLHGSSTGGCYGMSCPGFVQVSKTIPVGAVLQPFSIYNGRQYELRLGLFQDSGTGNWWFVFKEEIIGYWPASLFKSWMESNSANYASWGGQVYSPIREKSPPMGSGHWPSEGFHKAAFISGLKLFDGHGKVYNPGRGTVKVHESRPICYKARYVHDVDKPWLKSVYFGGPGGCIG

SEQ ID NO: 70090 - DNA, 1356 bp, Arabidopsis thaliana
  misc_feature (1)..(1356): Ceres Seq. ID no. 2143179
  misc_feature (1)..(1356): Ortholog of  Ceres SEQ ID NO 13594345 as cited in SEQ ID NO 58043
  misc_feature (1)..(1356): Ortholog of  Ceres SEQ ID NO 13597574 as cited in SEQ ID NO 64677
  misc_feature (1)..(1356): Ortholog of  Ceres SEQ ID NO 14302071 as cited in SEQ ID NO 66585
  misc_feature (1)..(1356): Ortholog of  Ceres SEQ ID NO 14316013 as cited in SEQ ID NO 67181
  misc_feature (1)..(1356): Ortholog of  Ceres SEQ ID NO 12779098 as cited in SEQ ID NO 67698
  misc_feature (1)..(1356): Ortholog of  Ceres SEQ ID NO 13596180 as cited in SEQ ID NO 67941
  misc_feature (1)..(1356): Ortholog of  Ceres SEQ ID NO 13591190 as cited in SEQ ID NO 68044
atggagaagagtaatggcctgcgagtgattctgtttccacttccattacaaggctgcatcaaccctatgattcagctcgccaagatcctccactcaagaggtttttcaatcactgtgatccacacttgcttcaacgcgccaaaagcttcaagccatccactcttcaccttcatacagatccaagatggcttgtctgaaacagagacaagaactcgcgacgtcaaacttctcataacacttctcaaccaaaattgcgagtctccggttcgtgaatgtttgcgtaaactgttgcaatctgccaaggaagagaaacagaggattagctgtttgatcaatgattctggttggatcttcactcaacacttagccaagagtttgaatctcatgagattggcctttaatacctataagatctccttctttcgaagccattttgttcttcctcagctccggcgtgaaatgtttcttccattacaagattcagaacaagatgatccagttgagaagtttccaccgcttagaaagaaagatcttttacggattcttgaagcagattcggtgcagggagactcgtactcggatatgattttggaaaagacaaaggcgtcttcaggtcttatattcatgtcctgtgaagagttggaccaagactcactgagtcaatcacgtgaagattttaaggttccgatatttgcgataggaccttctcatagccattttcctgcttcttctagtagcttgttcacaccggacgagacttgcatcccatggttagacagacaagaagacaaatccgtaatatacgtgagtattgggagcctcgtgaccatcaacgaaacagagctaatggagattgcttggggtctaagtaacagcgaccaaccatttttatgggtcgtccgggttggttcagtcaatggcacggaatggattgaagcaatcccggaatatttcatcaaaaggcttaatgagaagggaaagatagtgaaatgggctccacaacaagaggttctaaagcatcgagctattggaggtttcttgacacataatggttggaactcgacggttgagagtgtttgtgaaggcgtccctatgatctgtttgccttttcgttgggaccaattgttaaatgcaagatttgttagtgatgtatggatggttgggatacatctcgagggtcggattgagagggatgagatcgagagagcgataaggagattattgttggaaactgaaggagaagccatccgagagaggatacaacttcttaaggaaaaagtaggaagatcagttaaacaaaacggttcggcatatcaatctctacaaaatttgattaattatatatcatctttctag

SEQ ID NO: 70091 - protein, 451 aa, Arabidopsis thaliana
  peptide (1)..(451): Ceres Seq. ID no. 2143180
MEKSNGLRVILFPLPLQGCINPMIQLAKILHSRGFSITVIHTCFNAPKASSHPLFTFIQIQDGLSETETRTRDVKLLITLLNQNCESPVRECLRKLLQSAKEEKQRISCLINDSGWIFTQHLAKSLNLMRLAFNTYKISFFRSHFVLPQLRREMFLPLQDSEQDDPVEKFPPLRKKDLLRILEADSVQGDSYSDMILEKTKASSGLIFMSCEELDQDSLSQSREDFKVPIFAIGPSHSHFPASSSSLFTPDETCIPWLDRQEDKSVIYVSIGSLVTINETELMEIAWGLSNSDQPFLWVVRVGSVNGTEWIEAIPEYFIKRLNEKGKIVKWAPQQEVLKHRAIGGFLTHNGWNSTVESVCEGVPMICLPFRWDQLLNARFVSDVWMVGIHLEGRIERDEIERAIRRLLLETEGEAIRERIQLLKEKVGRSVKQNGSAYQSLQNLINYISSF

SEQ ID NO: 70092 - protein, 429 aa, Arabidopsis thaliana
  peptide (1)..(429): Ceres Seq. ID no. 2143181
MIQLAKILHSRGFSITVIHTCFNAPKASSHPLFTFIQIQDGLSETETRTRDVKLLITLLNQNCESPVRECLRKLLQSAKEEKQRISCLINDSGWIFTQHLAKSLNLMRLAFNTYKISFFRSHFVLPQLRREMFLPLQDSEQDDPVEKFPPLRKKDLLRILEADSVQGDSYSDMILEKTKASSGLIFMSCEELDQDSLSQSREDFKVPIFAIGPSHSHFPASSSSLFTPDETCIPWLDRQEDKSVIYVSIGSLVTINETELMEIAWGLSNSDQPFLWVVRVGSVNGTEWIEAIPEYFIKRLNEKGKIVKWAPQQEVLKHRAIGGFLTHNGWNSTVESVCEGVPMICLPFRWDQLLNARFVSDVWMVGIHLEGRIERDEIERAIRRLLLETEGEAIRERIQLLKEKVGRSVKQNGSAYQSLQNLINYISSF

SEQ ID NO: 70093 - protein, 323 aa, Arabidopsis thaliana
  peptide (1)..(323): Ceres Seq. ID no. 2143182
MRLAFNTYKISFFRSHFVLPQLRREMFLPLQDSEQDDPVEKFPPLRKKDLLRILEADSVQGDSYSDMILEKTKASSGLIFMSCEELDQDSLSQSREDFKVPIFAIGPSHSHFPASSSSLFTPDETCIPWLDRQEDKSVIYVSIGSLVTINETELMEIAWGLSNSDQPFLWVVRVGSVNGTEWIEAIPEYFIKRLNEKGKIVKWAPQQEVLKHRAIGGFLTHNGWNSTVESVCEGVPMICLPFRWDQLLNARFVSDVWMVGIHLEGRIERDEIERAIRRLLLETEGEAIRERIQLLKEKVGRSVKQNGSAYQSLQNLINYISSF

SEQ ID NO: 70094 - DNA, 1362 bp, Arabidopsis thaliana
  misc_feature (1)..(1362): Ceres Seq. ID no. 2144864
  misc_feature (1)..(1362): Ortholog of  Ceres SEQ ID NO 13654989 as cited in SEQ ID NO 63117
  misc_feature (1)..(1362): Ortholog of  Ceres SEQ ID NO 13584744 as cited in SEQ ID NO 69137
atggaaaacaaaagccatagcaaccaccaccggtaccatcatctatcatcccggagccacgagcaaaaccagcgtggcctaatttcgataaatgccataatcatcattggcatctccattatctccatattcataatccttgcaattctcctaataatcattttacttcatcgacttaaatccgcaagagtcaaagcacaagaattatcttgcaaagaaagcttcaacaacatgaacaatggtggagcttccaccaactacagctacacttctagccctgatgacatcaagagagattgtctatactcaagaaacccaacatcgttcagacaattacccccacagacaaaaagttgtaggagaagccgagccgaaggagtagaagtgtacacatacaaggaattagagattgcaacaaataatttcagcgaggagaagaaaatcggaaatggagatgtgtacaaaggagtactaagtgatggaactgttgcggccattaaaaagcttcatatgtttaatgataatgctagtaaccaaaagcatgaagaacggtcctttaggcttgaggttgatcttcttagtcgattacaatgcccatatttggtggaattacttggatattgtgcagatcaaaaccataggatcctgatatatgaatttatgcctaatggtactgtggaacatcatctccacgatcataattttaagaatctaaaggatcgacctcaaccattagattggggagctcggcttaggatcgcccttgattgcgccagagccctagagtttcttcatgagaatacaatctctactgttatccaccggaacttcaagtgtaccaacattttgttggatcaaaataatcgagctaaagtttcagatttcggattagccaaaaccggatccgataaactaaacggtgagatttcaacaagggttattggcaccacaggatatcttgctccagagtatgcctctactggaaagcttactacaaaatcagatgtttatagttatggtattgtgttactacaactcttaacgggtcgcacaccgatcgattcaagacgtccacggggacaagatgtccttgtctcttgggctcttccaagactaaccaatagagagaaaattagtgaaatggtggatccaaccatgaaaggtcaatactcacaaaaagatcttattcaggtagcagccatagcagcagtgtgtgtgcaaccagaagcaagttatagaccgttgatgacggatgttgttcactcgctcattccccttgttaaagctttcaacaaaagtactgattcttctcggtttcctagccgtagagaaagcttgtcatttgatgatattatgccatga

SEQ ID NO: 70095 - protein, 453 aa, Arabidopsis thaliana
  peptide (1)..(453): Ceres Seq. ID no. 2144865
MENKSHSNHHRYHHLSSRSHEQNQRGLISINAIIIIGISIISIFIILAILLIIILLHRLKSARVKAQELSCKESFNNMNNGGASTNYSYTSSPDDIKRDCLYSRNPTSFRQLPPQTKSCRRSRAEGVEVYTYKELEIATNNFSEEKKIGNGDVYKGVLSDGTVAAIKKLHMFNDNASNQKHEERSFRLEVDLLSRLQCPYLVELLGYCADQNHRILIYEFMPNGTVEHHLHDHNFKNLKDRPQPLDWGARLRIALDCARALEFLHENTISTVIHRNFKCTNILLDQNNRAKVSDFGLAKTGSDKLNGEISTRVIGTTGYLAPEYASTGKLTTKSDVYSYGIVLLQLLTGRTPIDSRRPRGQDVLVSWALPRLTNREKISEMVDPTMKGQYSQKDLIQVAAIAAVCVQPEASYRPLMTDVVHSLIPLVKAFNKSTDSSRFPSRRESLSFDDIMP

SEQ ID NO: 70096 - protein, 376 aa, Arabidopsis thaliana
  peptide (1)..(376): Ceres Seq. ID no. 2144866
MNNGGASTNYSYTSSPDDIKRDCLYSRNPTSFRQLPPQTKSCRRSRAEGVEVYTYKELEIATNNFSEEKKIGNGDVYKGVLSDGTVAAIKKLHMFNDNASNQKHEERSFRLEVDLLSRLQCPYLVELLGYCADQNHRILIYEFMPNGTVEHHLHDHNFKNLKDRPQPLDWGARLRIALDCARALEFLHENTISTVIHRNFKCTNILLDQNNRAKVSDFGLAKTGSDKLNGEISTRVIGTTGYLAPEYASTGKLTTKSDVYSYGIVLLQLLTGRTPIDSRRPRGQDVLVSWALPRLTNREKISEMVDPTMKGQYSQKDLIQVAAIAAVCVQPEASYRPLMTDVVHSLIPLVKAFNKSTDSSRFPSRRESLSFDDIMP

SEQ ID NO: 70097 - protein, 283 aa, Arabidopsis thaliana
  peptide (1)..(283): Ceres Seq. ID no. 2144867
MFNDNASNQKHEERSFRLEVDLLSRLQCPYLVELLGYCADQNHRILIYEFMPNGTVEHHLHDHNFKNLKDRPQPLDWGARLRIALDCARALEFLHENTISTVIHRNFKCTNILLDQNNRAKVSDFGLAKTGSDKLNGEISTRVIGTTGYLAPEYASTGKLTTKSDVYSYGIVLLQLLTGRTPIDSRRPRGQDVLVSWALPRLTNREKISEMVDPTMKGQYSQKDLIQVAAIAAVCVQPEASYRPLMTDVVHSLIPLVKAFNKSTDSSRFPSRRESLSFDDIMP

SEQ ID NO: 70098 - DNA, 3915 bp, Arabidopsis thaliana
  misc_feature (1)..(3915): Ceres Seq. ID no. 2148441
  misc_feature (1)..(3915): Ortholog of  Ceres SEQ ID NO 14304811 as cited in SEQ ID NO 53097
atggtattcaagaacaaactcttcttctcttcgaagaaatctggatcttctagtcccgatagctctaatagtcccagatctgttggctccaactctccgatacgatcagataagaagaagtctaaatccgcttccaaggatgaacctccgatccctattcctggatttgttggagttggttgcaagcagacgcagattaaagatggtttgaagaagaaggatggttcatctaagggtaaacaactttcatctgaagttcaagctcactctattggaaaatcgaacttgtctcctagttccgaggtgaagaaaccacctccgccggaagtgaaggaaggacctgcttttgtttctccaatcatggcttcgtctcttgggttgaaccggattaagacgagatccggacctttgccacaggaaagggttttcaattataggaatgatccggctacgagcaatttgtcgaagatgggtgctgatggtggtgacttgggctcgggttcagctacttctggctctggtagtggcaatagaaagaaagaagctgggagtagcaagctagggttagaagagaacatggatcgcactcgaccaagtgacaataagagtgatcgtgatagtttgtctcctgatacaggaccaccgaggagcctcagccctactttgccgccatcaggatctcgattgcagaatgtagcatcctcatcgggaactggtcgctctgagatgtcatccggtcgttctggccctctaagaaattcagacttttgcaccccagagaattcatatgaatgggaaaatcccaaagagtcagaatcgcctcgttatcaagccttacttcgtatgaccagtgctccacgaaagaggtttcctggtgacatcaaaagcttttctcatgagttgaactcaaaaggtgtacgtccctttccattatggaagcctcgtaggtcgaacaatgtggagaatctaatcgtctgtcttttccaggaagtattgaatctgattcgggcaaaatttgagaaagcaaaggaagaagtaaactctgaccttgcagtatttgcagcggacctggtgggagttcttgagaaaaatgcagaaagccatcctgagtgggaggaaacatttgaagacttgctaattttggctcgaagttgtgctatgactactcctggagatttctggcttcagtgtgaaggcattgttcaggacttagatgatagacgtcaagagcttcccccgggcgtcctcaagcagcttcatactcggatgctttttatccttaccagatgtactagattacttcagtttcataaggaaagctggggggaggaggaacaagttgtacaactacgtcagtcaagagtcttgcattctatagagaaaataccgccgagtggagcgggaaggagttacagtgctgcaaaggtaccatctaccaagaaagcttatagtcaggagcagcatggtttggactggaaggaagacgctgttgtacgctcagttccccctcttgctcctcctgaaaattatgctataaaggaatctgaatctcctgcaaacattgatagaatgtcttcctggaaaaaacttccatctccagcactgaaaactgtgaaagaagcgccagcgtcagaagagcagaatgatagcaaagttgaacctccaaatatagttgggagtcgacaaggtagggatgatgccgctgttgctattctcaactttcctccagcaaaagattctcatgaacactcctccaagcatcggcacaatatttcttggggttactggggggaacaaccccttatttcggaggaaagttcaataatgtgccgtatctgtgaggaggaagttccgacaactcatgtggaagatcactctagggtttgtacattggctgataaatatgaccagaaaggactgagtgttgatgagcgactgatggcagttgctggtacacttgacaagatagcagagaccttcaggcataaggatagcctagcagccgcagagagcccagatggtatgaaagtatccaattcacatctgactgaagaatctgatgttctctctccaaggttgagtgattggtcgcgaaaaggatcagaagacatgcttgactgttttccggaggctgataattcaatttttatggatgatctgagaggtttaccgctaatgtcatgtagaacccgttttggtcccaagtctgatcaaggtatgacaacttcatctgccagtagcatgactcctagatccccgattccgacccctaggcctgatccaattgaacagatattaggaggcaagggtacattccacgatcaagatgatattccacagatgagtgaacttgctgacattgcaaaatgtgcagcagatgccattccgggtgatgatcaatccattccattcctactgtcttgtcttgaagatctaagggttgtcatagaccgcagaaagtttgatgcacttacagtagaaacatttgggactcgcatagaaaagttgatccgtgagaaatatgtgcatatgtgtgagcttatggatgatgaaaaagttgatctactaagcactgtaattgatgaagatgctcccttagaagatgatgttgttcggagcttgaggaccagcccagtacatccgcgagatcgcacatccattgatgattttgagatcataaaaccaataagtcggggagcttttgggcgagtttttttagcgaaaaagaggacaacaggagatctattcgcaatcaaggttctgaaaaaggcagatatgattcgtaagaatgctgttgaaagtatacttgctgaacgtgatatattgatcaacgttcgcaatccttttgtggttcgtttcttctattctttcacgtgtcgtgacaacctgtatttggtgatggagtatctgaatggaggggatctgtattcgttgttgagaaatttaggttgcttagaagaagatattgtccgtgtatatattgctgaagttgtccttgctttggaatatttgcattctgagggtgttgttcaccgtgatttgaagccggataatttgttgattgcgcatgatggtcatataaagttaacagatttcgggctctctaaagttggtctcatcaacagcacagatgatctggctggtcctgctgtaagtgggacgtctctgcttgatgaggaggaatcacgattagcggcatctgaggaacaacttgaaaggcgcaagaaacggtctgctgtgggtactcctgactacttagcgccagaaattcttttagggacaggacatggtgcaactgcggattggtggtctgttggcatcattctgtttgaactcattgtgggaattccacccttcaatgcggaacatcctcagcaaatatttgataatattctcaaccgtaagataccatggcctcatgttccagaagaaatgagtgctgaagcccatgatataatagaccgatttttaacagaagatccacatcagagacttggagctagaggggcagctgaggtcaagcagcacatcttctttaaagacatcaactgggacacactagcaaggcaaaaggctgcatttgttccggcttcagagagtgcaattgacacaagttacttcagaagtcgctactcgtggaacacatcagatgagcaatttttcccaagcggtgaggttccagattatagtgatgctgatagcatgactaacagcagtggttgctcgagcaatcatcatgaagaaggggaggctgaagaatgcgaaggtcatgcagagtttgagtctggcatacctgtagattactctttcagtaatttctcgtttaagaacctctctcagttggcgtctatcaactatgatcttttatccaaaggctggaaagatgagccacaacaaattccgcatcacaagtaa

SEQ ID NO: 70099 - protein, 1304 aa, Arabidopsis thaliana
  peptide (1)..(1304): Ceres Seq. ID no. 2148442
MVFKNKLFFSSKKSGSSSPDSSNSPRSVGSNSPIRSDKKKSKSASKDEPPIPIPGFVGVGCKQTQIKDGLKKKDGSSKGKQLSSEVQAHSIGKSNLSPSSEVKKPPPPEVKEGPAFVSPIMASSLGLNRIKTRSGPLPQERVFNYRNDPATSNLSKMGADGGDLGSGSATSGSGSGNRKKEAGSSKLGLEENMDRTRPSDNKSDRDSLSPDTGPPRSLSPTLPPSGSRLQNVASSSGTGRSEMSSGRSGPLRNSDFCTPENSYEWENPKESESPRYQALLRMTSAPRKRFPGDIKSFSHELNSKGVRPFPLWKPRRSNNVENLIVCLFQEVLNLIRAKFEKAKEEVNSDLAVFAADLVGVLEKNAESHPEWEETFEDLLILARSCAMTTPGDFWLQCEGIVQDLDDRRQELPPGVLKQLHTRMLFILTRCTRLLQFHKESWGEEEQVVQLRQSRVLHSIEKIPPSGAGRSYSAAKVPSTKKAYSQEQHGLDWKEDAVVRSVPPLAPPENYAIKESESPANIDRMSSWKKLPSPALKTVKEAPASEEQNDSKVEPPNIVGSRQGRDDAAVAILNFPPAKDSHEHSSKHRHNISWGYWGEQPLISEESSIMCRICEEEVPTTHVEDHSRVCTLADKYDQKGLSVDERLMAVAGTLDKIAETFRHKDSLAAAESPDGMKVSNSHLTEESDVLSPRLSDWSRKGSEDMLDCFPEADNSIFMDDLRGLPLMSCRTRFGPKSDQGMTTSSASSMTPRSPIPTPRPDPIEQILGGKGTFHDQDDIPQMSELADIAKCAADAIPGDDQSIPFLLSCLEDLRVVIDRRKFDALTVETFGTRIEKLIREKYVHMCELMDDEKVDLLSTVIDEDAPLEDDVVRSLRTSPVHPRDRTSIDDFEIIKPISRGAFGRVFLAKKRTTGDLFAIKVLKKADMIRKNAVESILAERDILINVRNPFVVRFFYSFTCRDNLYLVMEYLNGGDLYSLLRNLGCLEEDIVRVYIAEVVLALEYLHSEGVVHRDLKPDNLLIAHDGHIKLTDFGLSKVGLINSTDDLAGPAVSGTSLLDEEESRLAASEEQLERRKKRSAVGTPDYLAPEILLGTGHGATADWWSVGIILFELIVGIPPFNAEHPQQIFDNILNRKIPWPHVPEEMSAEAHDIIDRFLTEDPHQRLGARGAAEVKQHIFFKDINWDTLARQKAAFVPASESAIDTSYFRSRYSWNTSDEQFFPSGEVPDYSDADSMTNSSGCSSNHHEEGEAEECEGHAEFESGIPVDYSFSNFSFKNLSQLASINYDLLSKGWKDEPQQIPHHK

SEQ ID NO: 70100 - protein, 1184 aa, Arabidopsis thaliana
  peptide (1)..(1184): Ceres Seq. ID no. 2148443
MASSLGLNRIKTRSGPLPQERVFNYRNDPATSNLSKMGADGGDLGSGSATSGSGSGNRKKEAGSSKLGLEENMDRTRPSDNKSDRDSLSPDTGPPRSLSPTLPPSGSRLQNVASSSGTGRSEMSSGRSGPLRNSDFCTPENSYEWENPKESESPRYQALLRMTSAPRKRFPGDIKSFSHELNSKGVRPFPLWKPRRSNNVENLIVCLFQEVLNLIRAKFEKAKEEVNSDLAVFAADLVGVLEKNAESHPEWEETFEDLLILARSCAMTTPGDFWLQCEGIVQDLDDRRQELPPGVLKQLHTRMLFILTRCTRLLQFHKESWGEEEQVVQLRQSRVLHSIEKIPPSGAGRSYSAAKVPSTKKAYSQEQHGLDWKEDAVVRSVPPLAPPENYAIKESESPANIDRMSSWKKLPSPALKTVKEAPASEEQNDSKVEPPNIVGSRQGRDDAAVAILNFPPAKDSHEHSSKHRHNISWGYWGEQPLISEESSIMCRICEEEVPTTHVEDHSRVCTLADKYDQKGLSVDERLMAVAGTLDKIAETFRHKDSLAAAESPDGMKVSNSHLTEESDVLSPRLSDWSRKGSEDMLDCFPEADNSIFMDDLRGLPLMSCRTRFGPKSDQGMTTSSASSMTPRSPIPTPRPDPIEQILGGKGTFHDQDDIPQMSELADIAKCAADAIPGDDQSIPFLLSCLEDLRVVIDRRKFDALTVETFGTRIEKLIREKYVHMCELMDDEKVDLLSTVIDEDAPLEDDVVRSLRTSPVHPRDRTSIDDFEIIKPISRGAFGRVFLAKKRTTGDLFAIKVLKKADMIRKNAVESILAERDILINVRNPFVVRFFYSFTCRDNLYLVMEYLNGGDLYSLLRNLGCLEEDIVRVYIAEVVLALEYLHSEGVVHRDLKPDNLLIAHDGHIKLTDFGLSKVGLINSTDDLAGPAVSGTSLLDEEESRLAASEEQLERRKKRSAVGTPDYLAPEILLGTGHGATADWWSVGIILFELIVGIPPFNAEHPQQIFDNILNRKIPWPHVPEEMSAEAHDIIDRFLTEDPHQRLGARGAAEVKQHIFFKDINWDTLARQKAAFVPASESAIDTSYFRSRYSWNTSDEQFFPSGEVPDYSDADSMTNSSGCSSNHHEEGEAEECEGHAEFESGIPVDYSFSNFSFKNLSQLASINYDLLSKGWKDEPQQIPHHK

SEQ ID NO: 70101 - protein, 1148 aa, Arabidopsis thaliana
  peptide (1)..(1148): Ceres Seq. ID no. 2148444
MGADGGDLGSGSATSGSGSGNRKKEAGSSKLGLEENMDRTRPSDNKSDRDSLSPDTGPPRSLSPTLPPSGSRLQNVASSSGTGRSEMSSGRSGPLRNSDFCTPENSYEWENPKESESPRYQALLRMTSAPRKRFPGDIKSFSHELNSKGVRPFPLWKPRRSNNVENLIVCLFQEVLNLIRAKFEKAKEEVNSDLAVFAADLVGVLEKNAESHPEWEETFEDLLILARSCAMTTPGDFWLQCEGIVQDLDDRRQELPPGVLKQLHTRMLFILTRCTRLLQFHKESWGEEEQVVQLRQSRVLHSIEKIPPSGAGRSYSAAKVPSTKKAYSQEQHGLDWKEDAVVRSVPPLAPPENYAIKESESPANIDRMSSWKKLPSPALKTVKEAPASEEQNDSKVEPPNIVGSRQGRDDAAVAILNFPPAKDSHEHSSKHRHNISWGYWGEQPLISEESSIMCRICEEEVPTTHVEDHSRVCTLADKYDQKGLSVDERLMAVAGTLDKIAETFRHKDSLAAAESPDGMKVSNSHLTEESDVLSPRLSDWSRKGSEDMLDCFPEADNSIFMDDLRGLPLMSCRTRFGPKSDQGMTTSSASSMTPRSPIPTPRPDPIEQILGGKGTFHDQDDIPQMSELADIAKCAADAIPGDDQSIPFLLSCLEDLRVVIDRRKFDALTVETFGTRIEKLIREKYVHMCELMDDEKVDLLSTVIDEDAPLEDDVVRSLRTSPVHPRDRTSIDDFEIIKPISRGAFGRVFLAKKRTTGDLFAIKVLKKADMIRKNAVESILAERDILINVRNPFVVRFFYSFTCRDNLYLVMEYLNGGDLYSLLRNLGCLEEDIVRVYIAEVVLALEYLHSEGVVHRDLKPDNLLIAHDGHIKLTDFGLSKVGLINSTDDLAGPAVSGTSLLDEEESRLAASEEQLERRKKRSAVGTPDYLAPEILLGTGHGATADWWSVGIILFELIVGIPPFNAEHPQQIFDNILNRKIPWPHVPEEMSAEAHDIIDRFLTEDPHQRLGARGAAEVKQHIFFKDINWDTLARQKAAFVPASESAIDTSYFRSRYSWNTSDEQFFPSGEVPDYSDADSMTNSSGCSSNHHEEGEAEECEGHAEFESGIPVDYSFSNFSFKNLSQLASINYDLLSKGWKDEPQQIPHHK

SEQ ID NO: 70102 - DNA, 636 bp, Arabidopsis thaliana
  misc_feature (1)..(636): Ceres Seq. ID no. 2148477
  misc_feature (1)..(636): Ortholog of  Ceres SEQ ID NO 14309018 as cited in SEQ ID NO 0
atgcaagatcctcatgtcccatcttctccaactatctcctccgtctcttcctccgatcttgatactgagtcaacaggatcgttcttccatgacagaagcatcacacttggaacgcttatgggatttagtttcactgcaactatgccgatgccatttagagcctcttcacgccgccacgtgtcaccttccgtcgcaatctcacgagcttctagctccaatgcaagacgcaaccaccagagaaagcgtcctccttcaaattcggctgagcctgagccgcatcgccgccgtaaatggtggcggttttgccgagatgacgatgacgacgccgccggaaatggaatccaccgtggaacaggagattcaaagcggtcatcgctcggggagtatctagaggtggaacggaggtttggagatgaagccgtttacaactccgccgaggcagagctagaggatgcggtggtggcacggtaccaagatcagcagccggtgatgggggagcgggcattgttcgctgacggaagggttcttcctccggcttcagctgaagtggttaccggagaaggaacgccggtagccacgtccctttgtagatttccggtatctttaaccggtatatgcagcggtggtggaggatga

SEQ ID NO: 70103 - protein, 211 aa, Arabidopsis thaliana
  peptide (1)..(211): Ceres Seq. ID no. 2148478
MQDPHVPSSPTISSVSSSDLDTESTGSFFHDRSITLGTLMGFSFTATMPMPFRASSRRHVSPSVAISRASSSNARRNHQRKRPPSNSAEPEPHRRRKWWRFCRDDDDDAAGNGIHRGTGDSKRSSLGEYLEVERRFGDEAVYNSAEAELEDAVVARYQDQQPVMGERALFADGRVLPPASAEVVTGEGTPVATSLCRFPVSLTGICSGGGG

SEQ ID NO: 70104 - protein, 172 aa, Arabidopsis thaliana
  peptide (1)..(172): Ceres Seq. ID no. 2148479
MGFSFTATMPMPFRASSRRHVSPSVAISRASSSNARRNHQRKRPPSNSAEPEPHRRRKWWRFCRDDDDDAAGNGIHRGTGDSKRSSLGEYLEVERRFGDEAVYNSAEAELEDAVVARYQDQQPVMGERALFADGRVLPPASAEVVTGEGTPVATSLCRFPVSLTGICSGGGG

SEQ ID NO: 70105 - protein, 164 aa, Arabidopsis thaliana
  peptide (1)..(164): Ceres Seq. ID no. 2148480
MPMPFRASSRRHVSPSVAISRASSSNARRNHQRKRPPSNSAEPEPHRRRKWWRFCRDDDDDAAGNGIHRGTGDSKRSSLGEYLEVERRFGDEAVYNSAEAELEDAVVARYQDQQPVMGERALFADGRVLPPASAEVVTGEGTPVATSLCRFPVSLTGICSGGGG

SEQ ID NO: 70106 - DNA, 1713 bp, Arabidopsis thaliana
  misc_feature (1)..(1713): Ceres Seq. ID no. 2149393
  misc_feature (1)..(1713): Ortholog of  Ceres SEQ ID NO 13597411 as cited in SEQ ID NO 64125
atggcgggacaatcacgaaaatggatgattctggtagcgacgatttggattcaagcattcaccggtacgaatttcgatttctcgacgtattcgtcgaatttgaaatcggttctagggatttcgcaagtacaattgaattatctcgccgtcgcttcggatcttggtaaagttttcggttggtcatcgggacttgcactcttgtatttccctctttggacggttcttttcgcggcggcgattatgggtttcgttggttatggtgttcaatggctcgtcatcactaacgtcatctctttgccttatattctggtgtttctgtgttgtttgctagctgggctaagtatctgttggttcaacacagtctgctttgtgctctgcatcagaaacttccctgcaaacagatcacttgcactttctctcacagtgagctttaatggtgtaagtgctgctttatacactcttgcttacaacgcaatcaatcctgtttctacagagctatacctactcttaaacgctcttgtacctctttttgtctcatttgctgcactcatccctattcttcgccaaccgcctcttgaacctcttccaccagatggagttcgaagagactctctcatgtttctattgcttaacatattagcggtcttgaacggtgtttatctgcttctctttcgttcaaagacttctgatgtaacttcagctcgtcttctctttggtggatcaatacttctcttgattcttcctctatgcctccctggtctagtctacgctcgcaattggtatctacacaacatccactccagcttccgtttagaaggttctggtttcattcttgttgatgttgatgagcttgagatgcataaaggaatggtgacacgtgaagccagccttgaaggctaccagttgcttaacgatgatgtagtgcgagctgtcaatactcctgatcagaagagtttcattgaagatgacgacggatgttgttgcacaaaggtcattacaagaaatcagcttggaatgttgggagaggaacatcctctatctttcctcttatgcagatcagatttctggctttactatatagcctatttttgcggcggcacgattggactggtttacagcaacaacctgggacagattgcacaatctttaggacaaagctctgagacaacaactcttgtcacgctttattcgtctttctcattcttcggtagattactttcagcaacaccagactatatcagagcgaaggtttattttgctagaactgggtggctagccgttgctcttttaccaaccacaattgctcttttcttgttggcatcatcaggaagcttggcagcgttacaagcaggaactgctctaatcggtctaagttcgggtttcatatttgcagcagcggtttccataacatctgagctttttggacccaatagcgttggggttaaccacaacatcctcatcacaaacataccgataggatcgttggtctacggtttcttagctgctttggtctatgaatcccatagcgtggctgggtcaaagaccgagtcggttatatgtatgggaagagactgttatctccaaacgtttatgtggtggggatgcttgtcggtgattggactagcttcaagtgttgtcttgtttctgagaaccagacgagcctatcaacgttttgaacaagatcggataacttccagcatgctctattcttag

SEQ ID NO: 70107 - protein, 570 aa, Arabidopsis thaliana
  peptide (1)..(570): Ceres Seq. ID no. 2149394
MAGQSRKWMILVATIWIQAFTGTNFDFSTYSSNLKSVLGISQVQLNYLAVASDLGKVFGWSSGLALLYFPLWTVLFAAAIMGFVGYGVQWLVITNVISLPYILVFLCCLLAGLSICWFNTVCFVLCIRNFPANRSLALSLTVSFNGVSAALYTLAYNAINPVSTELYLLLNALVPLFVSFAALIPILRQPPLEPLPPDGVRRDSLMFLLLNILAVLNGVYLLLFRSKTSDVTSARLLFGGSILLLILPLCLPGLVYARNWYLHNIHSSFRLEGSGFILVDVDELEMHKGMVTREASLEGYQLLNDDVVRAVNTPDQKSFIEDDDGCCCTKVITRNQLGMLGEEHPLSFLLCRSDFWLYYIAYFCGGTIGLVYSNNLGQIAQSLGQSSETTTLVTLYSSFSFFGRLLSATPDYIRAKVYFARTGWLAVALLPTTIALFLLASSGSLAALQAGTALIGLSSGFIFAAAVSITSELFGPNSVGVNHNILITNIPIGSLVYGFLAALVYESHSVAGSKTESVICMGRDCYLQTFMWWGCLSVIGLASSVVLFLRTRRAYQRFEQDRITSSMLYS

SEQ ID NO: 70108 - protein, 562 aa, Arabidopsis thaliana
  peptide (1)..(562): Ceres Seq. ID no. 2149395
MILVATIWIQAFTGTNFDFSTYSSNLKSVLGISQVQLNYLAVASDLGKVFGWSSGLALLYFPLWTVLFAAAIMGFVGYGVQWLVITNVISLPYILVFLCCLLAGLSICWFNTVCFVLCIRNFPANRSLALSLTVSFNGVSAALYTLAYNAINPVSTELYLLLNALVPLFVSFAALIPILRQPPLEPLPPDGVRRDSLMFLLLNILAVLNGVYLLLFRSKTSDVTSARLLFGGSILLLILPLCLPGLVYARNWYLHNIHSSFRLEGSGFILVDVDELEMHKGMVTREASLEGYQLLNDDVVRAVNTPDQKSFIEDDDGCCCTKVITRNQLGMLGEEHPLSFLLCRSDFWLYYIAYFCGGTIGLVYSNNLGQIAQSLGQSSETTTLVTLYSSFSFFGRLLSATPDYIRAKVYFARTGWLAVALLPTTIALFLLASSGSLAALQAGTALIGLSSGFIFAAAVSITSELFGPNSVGVNHNILITNIPIGSLVYGFLAALVYESHSVAGSKTESVICMGRDCYLQTFMWWGCLSVIGLASSVVLFLRTRRAYQRFEQDRITSSMLYS

SEQ ID NO: 70109 - protein, 490 aa, Arabidopsis thaliana
  peptide (1)..(490): Ceres Seq. ID no. 2149396
MGFVGYGVQWLVITNVISLPYILVFLCCLLAGLSICWFNTVCFVLCIRNFPANRSLALSLTVSFNGVSAALYTLAYNAINPVSTELYLLLNALVPLFVSFAALIPILRQPPLEPLPPDGVRRDSLMFLLLNILAVLNGVYLLLFRSKTSDVTSARLLFGGSILLLILPLCLPGLVYARNWYLHNIHSSFRLEGSGFILVDVDELEMHKGMVTREASLEGYQLLNDDVVRAVNTPDQKSFIEDDDGCCCTKVITRNQLGMLGEEHPLSFLLCRSDFWLYYIAYFCGGTIGLVYSNNLGQIAQSLGQSSETTTLVTLYSSFSFFGRLLSATPDYIRAKVYFARTGWLAVALLPTTIALFLLASSGSLAALQAGTALIGLSSGFIFAAAVSITSELFGPNSVGVNHNILITNIPIGSLVYGFLAALVYESHSVAGSKTESVICMGRDCYLQTFMWWGCLSVIGLASSVVLFLRTRRAYQRFEQDRITSSMLYS

SEQ ID NO: 70110 - DNA, 1500 bp, Arabidopsis thaliana
  misc_feature (1)..(1500): Ceres Seq. ID no. 2151501
  misc_feature (1)..(1500): Ortholog of  Ceres SEQ ID NO 14315469 as cited in SEQ ID NO 57169
  misc_feature (1)..(1500): Ortholog of  Ceres SEQ ID NO 13657008 as cited in SEQ ID NO 69164
atggtgttttactctctactcttcttcacttttcttctccgattcgtctttgttctctccaccgttgatactatcgacggcgatccctctccttgctcctctcttgcttgcttggggaaaagactaaagccaaagcttttaggaagaagggttgattctggtaatgttccagaagctatgtaccaagttttagaacagcctttaagcgaacaagaactcaaaggaagatcagatatacctcaaacacttcaagatttcatgtctgaagtcaaaagaagcaaatcagacgcaagagaatttgctcaaaagctaaaagaaatggtgacattgatggaacagagaacaagaacggctaagattcaagagtatttatatcgacatgtcgcatcaagcagcataccgaaacaacttcactgtttagctcttaaactagccaacgaacactcgataaacgcagcggcgcgtctccagcttccagaagctgagcttgtccctatgttggtagacaacaactactttcactttgtcttggcttcagacaatattcttgcagcttcggttgtggctaagtcgttggttcaaaatgctttaagacctcataagatcgttcttcacatcataacggataggaaaacttatttcccaatgcaagcttggttctcattgcatcctctgtctccagcaataattgaggtcaaggctttgcatcatttcgattggttatcgaaaggtaaagtacccgttttggaagctatggagaaagatcagagagtgaggtctcaattcagaggtggatcatcggttattgtggctaataacaaagagaacccggttgttgttgctgctaagttacaagctctcagccctaaatacaactccttgatgaatcacatccgtattcatctaccagagttgtttccaagcttaaacaaggttgtgtttctagacgatgacattgtgatccaaactgatctttcacctctttgggacattgacatgaatggaaaagtaaatggagcagtggaaacatgtagaggagaagacaagtttgtgatgtcaaagaagttcaagagttacctcaacttctcgaatccgacaattgccaaaaacttcaatccagaggaatgtgcatgggcttatggaatgaatgttttcgacctagcggcttggaggaggactaacataagctccacttactatcattggcttgacgagaacttaaaatcagacctgagtttgtggcagctgggaactttgcctcctgggctgattgctttccacggtcatgtccaaaccatagatccgttctggcatatgcttggtctcggataccaagagaccacgagctatgccgatgctgaaagtgccgctgttgttcatttcaatggaagagctaagccttggctggatatagcatttcctcatctacgtcctctctgggctaagtatcttgattcttctgacagatttatcaagagctgtcacattagagcatcatga

SEQ ID NO: 70111 - protein, 499 aa, Arabidopsis thaliana
  peptide (1)..(499): Ceres Seq. ID no. 2151502
MVFYSLLFFTFLLRFVFVLSTVDTIDGDPSPCSSLACLGKRLKPKLLGRRVDSGNVPEAMYQVLEQPLSEQELKGRSDIPQTLQDFMSEVKRSKSDAREFAQKLKEMVTLMEQRTRTAKIQEYLYRHVASSSIPKQLHCLALKLANEHSINAAARLQLPEAELVPMLVDNNYFHFVLASDNILAASVVAKSLVQNALRPHKIVLHIITDRKTYFPMQAWFSLHPLSPAIIEVKALHHFDWLSKGKVPVLEAMEKDQRVRSQFRGGSSVIVANNKENPVVVAAKLQALSPKYNSLMNHIRIHLPELFPSLNKVVFLDDDIVIQTDLSPLWDIDMNGKVNGAVETCRGEDKFVMSKKFKSYLNFSNPTIAKNFNPEECAWAYGMNVFDLAAWRRTNISSTYYHWLDENLKSDLSLWQLGTLPPGLIAFHGHVQTIDPFWHMLGLGYQETTSYADAESAAVVHFNGRAKPWLDIAFPHLRPLWAKYLDSSDRFIKSCHIRAS

SEQ ID NO: 70112 - protein, 440 aa, Arabidopsis thaliana
  peptide (1)..(440): Ceres Seq. ID no. 2151503
MYQVLEQPLSEQELKGRSDIPQTLQDFMSEVKRSKSDAREFAQKLKEMVTLMEQRTRTAKIQEYLYRHVASSSIPKQLHCLALKLANEHSINAAARLQLPEAELVPMLVDNNYFHFVLASDNILAASVVAKSLVQNALRPHKIVLHIITDRKTYFPMQAWFSLHPLSPAIIEVKALHHFDWLSKGKVPVLEAMEKDQRVRSQFRGGSSVIVANNKENPVVVAAKLQALSPKYNSLMNHIRIHLPELFPSLNKVVFLDDDIVIQTDLSPLWDIDMNGKVNGAVETCRGEDKFVMSKKFKSYLNFSNPTIAKNFNPEECAWAYGMNVFDLAAWRRTNISSTYYHWLDENLKSDLSLWQLGTLPPGLIAFHGHVQTIDPFWHMLGLGYQETTSYADAESAAVVHFNGRAKPWLDIAFPHLRPLWAKYLDSSDRFIKSCHIRAS

SEQ ID NO: 70113 - protein, 413 aa, Arabidopsis thaliana
  peptide (1)..(413): Ceres Seq. ID no. 2151504
MSEVKRSKSDAREFAQKLKEMVTLMEQRTRTAKIQEYLYRHVASSSIPKQLHCLALKLANEHSINAAARLQLPEAELVPMLVDNNYFHFVLASDNILAASVVAKSLVQNALRPHKIVLHIITDRKTYFPMQAWFSLHPLSPAIIEVKALHHFDWLSKGKVPVLEAMEKDQRVRSQFRGGSSVIVANNKENPVVVAAKLQALSPKYNSLMNHIRIHLPELFPSLNKVVFLDDDIVIQTDLSPLWDIDMNGKVNGAVETCRGEDKFVMSKKFKSYLNFSNPTIAKNFNPEECAWAYGMNVFDLAAWRRTNISSTYYHWLDENLKSDLSLWQLGTLPPGLIAFHGHVQTIDPFWHMLGLGYQETTSYADAESAAVVHFNGRAKPWLDIAFPHLRPLWAKYLDSSDRFIKSCHIRAS

SEQ ID NO: 70114 - DNA, 990 bp, Arabidopsis thaliana
  misc_feature (1)..(990): Ceres Seq. ID no. 2151908
  misc_feature (1)..(990): Ortholog of  Ceres SEQ ID NO 14308776 as cited in SEQ ID NO 55124
atgctacagaaacagtggaccccctttttctctctctctcttgctctgtttgtctttctctctcatcacttcttgtctgaaaaaatgttggaaacagaccttgaagctcggatgcaaatcctgcgtgagtctggttttcaagaaagccaaggagatgatgatacctttgctcaacgagctgaatggttttaccagggacgacctttgcttctctcactttgtctggacctgtacaacggctacgtcactctcttgggtcgttcttctcatcagaccagacttaaacccactacttctcttccgaaccagcttctccaagatgatgatgactgcatttcggacattgattccgttagtgaggtcagttctgaagttgagagcaccttatcctttcaacagatgaaagatcctactgcggtttctgagaaagtcgatgagcttgtatcccaacttgtgacagcaagcttggacaaagagattctgaaacacgagttacttcacaaggaccaacagtttcatgaagcctccaagactatagagctgttgaagaagtttgtcatgttgctggagatggagaaagaagtggctgtggaggaaaacgctaatcttggctacaaactcacttctctcttggaggagaacagagagctagccactgaggcattgttcatgaagaacgaagctgttgggcttgctaggtgtgtgcttaagatgagagatgaccactttcacaaggtctgcattctccagaaccgcatctactcgcttcaggcatctaggaactcagagcccgtctctgataaggtctcatacggatgctttggcctggataagcataagaccaaaaagaagaaggagaacaaaaccgaagagaagaagcctggattcaagtggttgaagaaactgaacaccattaacctgtttacaaagtgcagccttaacccatcggctgctgctccatcatgctgcactttcgacttgccttattag

SEQ ID NO: 70115 - protein, 329 aa, Arabidopsis thaliana
  peptide (1)..(329): Ceres Seq. ID no. 2151909
MLQKQWTPFFSLSLALFVFLSHHFLSEKMLETDLEARMQILRESGFQESQGDDDTFAQRAEWFYQGRPLLLSLCLDLYNGYVTLLGRSSHQTRLKPTTSLPNQLLQDDDDCISDIDSVSEVSSEVESTLSFQQMKDPTAVSEKVDELVSQLVTASLDKEILKHELLHKDQQFHEASKTIELLKKFVMLLEMEKEVAVEENANLGYKLTSLLEENRELATEALFMKNEAVGLARCVLKMRDDHFHKVCILQNRIYSLQASRNSEPVSDKVSYGCFGLDKHKTKKKKENKTEEKKPGFKWLKKLNTINLFTKCSLNPSAAAPSCCTFDLPY

SEQ ID NO: 70116 - protein, 301 aa, Arabidopsis thaliana
  peptide (1)..(301): Ceres Seq. ID no. 2151910
MLETDLEARMQILRESGFQESQGDDDTFAQRAEWFYQGRPLLLSLCLDLYNGYVTLLGRSSHQTRLKPTTSLPNQLLQDDDDCISDIDSVSEVSSEVESTLSFQQMKDPTAVSEKVDELVSQLVTASLDKEILKHELLHKDQQFHEASKTIELLKKFVMLLEMEKEVAVEENANLGYKLTSLLEENRELATEALFMKNEAVGLARCVLKMRDDHFHKVCILQNRIYSLQASRNSEPVSDKVSYGCFGLDKHKTKKKKENKTEEKKPGFKWLKKLNTINLFTKCSLNPSAAAPSCCTFDLPY

SEQ ID NO: 70117 - protein, 292 aa, Arabidopsis thaliana
  peptide (1)..(292): Ceres Seq. ID no. 2151911
MQILRESGFQESQGDDDTFAQRAEWFYQGRPLLLSLCLDLYNGYVTLLGRSSHQTRLKPTTSLPNQLLQDDDDCISDIDSVSEVSSEVESTLSFQQMKDPTAVSEKVDELVSQLVTASLDKEILKHELLHKDQQFHEASKTIELLKKFVMLLEMEKEVAVEENANLGYKLTSLLEENRELATEALFMKNEAVGLARCVLKMRDDHFHKVCILQNRIYSLQASRNSEPVSDKVSYGCFGLDKHKTKKKKENKTEEKKPGFKWLKKLNTINLFTKCSLNPSAAAPSCCTFDLPY

SEQ ID NO: 70118 - DNA, 1821 bp, Arabidopsis thaliana
  misc_feature (1)..(1821): Ceres Seq. ID no. 2152085
  misc_feature (1)..(1821): Ortholog of  Ceres SEQ ID NO 14303351 as cited in SEQ ID NO 54864
  misc_feature (1)..(1821): Ortholog of  Ceres SEQ ID NO 13597260 as cited in SEQ ID NO 63885
atggtaagagatgatttgcggagtgtgggaatgctgggcttaggggagtcattaatcgcattaaacgagggacatcaaattatatacctcactggtttaagctttgattccaagaaaagggaaatgaattctaacaactggctcgcgttccctctatcaccaactcactcttctttgccgcctcacattcactcttcacaaaattctcatttcaatctaggtttggtcaacgacaatatcgacaacccttttcaaaaccaaggatggaatatgatcaatccacatggtggaggcggcgaaggtggagaggttccaaaagtggctgatttcttaggagtgagcaaatcgggggatcatcacaccgatcacaacctcgtaccttataacgacattcatcaaaccaacgcctccgactactactttcaaaccaatagcttgttacctacagtcgtcacttgtgcctctaatgctcctaataattatgagcttcaagagagtgcacacaatttgcaatctctcactctctctatgggaagtactggagctgccgctgcagaagtcgccactgtgaaagcctcgccggctgagactagtgccgataatagtagcagcactaccaacacaagtggaggagccatcgttgaggctacaccgagacggactttggaaacttttggacaacgaacctctatctatcgtggagttacaagacatagatggaccggtagatatgaagctcatctttgggataatagctgtagaagagaaggacaatcaaggaaaggaagacaaggtgggtatgacaaagaagagaaagcagccagagcatatgatctagctgcacttaaatattggggtccctctactactaccaactttccgataactaactacgagaaggaagtagaggagatgaaaaacatgacgagacaagagtttgtggcttctataagaaggaaaagtagcggattctcgcgtggtgcatccatgtatcgtggagtaacaaggcatcatcaacatggaagatggcaagcaaggatcggccgagttgctggaaacaaagatctctacttgggaacattcagcacggaggaagaagcagcagaagcttatgacatagctgcgataaagtttcgaggtctaaacgcggttacaaactttgagataaatcggtatgatgtgaaagccatcctggagagcaacacacttcctataggaggtggtgcggctaaacggctcaaagaagctcaagctctagaatcatcaagaaaacgagaggaaatgatagccctcggatcaaatttccatcaatatggtgcagcgagcggctcgagctctgttgcttccagctctaggcttcagcttcaaccttaccctctaagcattcaacaaccttttgagcatcttcatcatcatcagcctttacttactctacagaacaacaacgatatctctcagtatcatgattcctttagttacattcagacgcagcttcatcttcaccaacaacaaaccaacaattacttgcagtcttctagtcacacttcacagctctacaatgcttatcttcagagtaaccctggtctgcttcatggatttgtctctgataataacaacacttcagggtttcttggaaacaatgggattggtattgggtcaagctctaccgttggatcatcggctgaggaagagtttccagccgtgaaagtcgattacgatatgcctccttccggtggagctacagggtatggaggatggaatagtggagagtctgctcaaggatcgaatccaggaggtgttttcacgatgtggaatgaataa

SEQ ID NO: 70119 - protein, 606 aa, Arabidopsis thaliana
  peptide (1)..(606): Ceres Seq. ID no. 2152086
MVRDDLRSVGMLGLGESLIALNEGHQIIYLTGLSFDSKKREMNSNNWLAFPLSPTHSSLPPHIHSSQNSHFNLGLVNDNIDNPFQNQGWNMINPHGGGGEGGEVPKVADFLGVSKSGDHHTDHNLVPYNDIHQTNASDYYFQTNSLLPTVVTCASNAPNNYELQESAHNLQSLTLSMGSTGAAAAEVATVKASPAETSADNSSSTTNTSGGAIVEATPRRTLETFGQRTSIYRGVTRHRWTGRYEAHLWDNSCRREGQSRKGRQGGYDKEEKAARAYDLAALKYWGPSTTTNFPITNYEKEVEEMKNMTRQEFVASIRRKSSGFSRGASMYRGVTRHHQHGRWQARIGRVAGNKDLYLGTFSTEEEAAEAYDIAAIKFRGLNAVTNFEINRYDVKAILESNTLPIGGGAAKRLKEAQALESSRKREEMIALGSNFHQYGAASGSSSVASSSRLQLQPYPLSIQQPFEHLHHHQPLLTLQNNNDISQYHDSFSYIQTQLHLHQQQTNNYLQSSSHTSQLYNAYLQSNPGLLHGFVSDNNNTSGFLGNNGIGIGSSSTVGSSAEEEFPAVKVDYDMPPSGGATGYGGWNSGESAQGSNPGGVFTMWNE

SEQ ID NO: 70120 - protein, 596 aa, Arabidopsis thaliana
  peptide (1)..(596): Ceres Seq. ID no. 2152087
MLGLGESLIALNEGHQIIYLTGLSFDSKKREMNSNNWLAFPLSPTHSSLPPHIHSSQNSHFNLGLVNDNIDNPFQNQGWNMINPHGGGGEGGEVPKVADFLGVSKSGDHHTDHNLVPYNDIHQTNASDYYFQTNSLLPTVVTCASNAPNNYELQESAHNLQSLTLSMGSTGAAAAEVATVKASPAETSADNSSSTTNTSGGAIVEATPRRTLETFGQRTSIYRGVTRHRWTGRYEAHLWDNSCRREGQSRKGRQGGYDKEEKAARAYDLAALKYWGPSTTTNFPITNYEKEVEEMKNMTRQEFVASIRRKSSGFSRGASMYRGVTRHHQHGRWQARIGRVAGNKDLYLGTFSTEEEAAEAYDIAAIKFRGLNAVTNFEINRYDVKAILESNTLPIGGGAAKRLKEAQALESSRKREEMIALGSNFHQYGAASGSSSVASSSRLQLQPYPLSIQQPFEHLHHHQPLLTLQNNNDISQYHDSFSYIQTQLHLHQQQTNNYLQSSSHTSQLYNAYLQSNPGLLHGFVSDNNNTSGFLGNNGIGIGSSSTVGSSAEEEFPAVKVDYDMPPSGGATGYGGWNSGESAQGSNPGGVFTMWNE

SEQ ID NO: 70121 - protein, 565 aa, Arabidopsis thaliana
  peptide (1)..(565): Ceres Seq. ID no. 2152088
MNSNNWLAFPLSPTHSSLPPHIHSSQNSHFNLGLVNDNIDNPFQNQGWNMINPHGGGGEGGEVPKVADFLGVSKSGDHHTDHNLVPYNDIHQTNASDYYFQTNSLLPTVVTCASNAPNNYELQESAHNLQSLTLSMGSTGAAAAEVATVKASPAETSADNSSSTTNTSGGAIVEATPRRTLETFGQRTSIYRGVTRHRWTGRYEAHLWDNSCRREGQSRKGRQGGYDKEEKAARAYDLAALKYWGPSTTTNFPITNYEKEVEEMKNMTRQEFVASIRRKSSGFSRGASMYRGVTRHHQHGRWQARIGRVAGNKDLYLGTFSTEEEAAEAYDIAAIKFRGLNAVTNFEINRYDVKAILESNTLPIGGGAAKRLKEAQALESSRKREEMIALGSNFHQYGAASGSSSVASSSRLQLQPYPLSIQQPFEHLHHHQPLLTLQNNNDISQYHDSFSYIQTQLHLHQQQTNNYLQSSSHTSQLYNAYLQSNPGLLHGFVSDNNNTSGFLGNNGIGIGSSSTVGSSAEEEFPAVKVDYDMPPSGGATGYGGWNSGESAQGSNPGGVFTMWNE

SEQ ID NO: 70122 - DNA, 1530 bp, Arabidopsis thaliana
  misc_feature (1)..(1530): Ceres Seq. ID no. 2152700
  misc_feature (1)..(1530): Ortholog of  Ceres SEQ ID NO 14307076 as cited in SEQ ID NO 54533
atggatttggagagtgaaagctctgttcttgaatctgttgaagataataatggtttgattggtgatcttgataaagagttgaattcaccggttgagacttctcctcttatatcaaaaggatttggtttaagaaaatggaagaggaggttaaggagagatcttgttaaggatgatacttctgtgagtatggagaatagtaaagctctgaagagggtgttgtcaggattagttgatccgaatgctaaacaaatgcatttgccaggacctgaagttagacaagatagtgttggttctgttggctcggtgaatagtgtggttggttttgtaatgggtggggagagttatggcaatggtcttgcttttgcagctggtgttgattcggataacagtgaggatcggagtagtacaatgagtcattcttgggacaaacatagaggaaaggtctcgggtgggaagagtgtgattagttcgggggatagtagtcaacaaaggaagagtagtgtagagaagagtaataaacttagaggagaaaggatcaaaattgagaaggaaaactctcattccagcatggaatctgctgactcaagaagctccaactttgtgtttatgcagggtgcttcctatagtttgagtagcagagaacaaggcggaagaagaatgatggattatgacgatgaaaatagtgatcatgacgcacatacttcgaagagaaaggataacgtggaagaagaagaagaagaaacagaagactattcacaaggagactgtgttgaagagtctcaaatcaagagcaatggttcatcagacaatctggatccattaatagtagccgtcaacagtttccagactttgcaagaagccctccaaaaagaacttcaaaaattccaagagcttgggaaagaagaacctataacatcactgcatgatggaggagaaagcagcagttgcatacacgcaggacacgaaggagctagtgaagcaagctcttcttaccggtttgggtctgaaaagatgggagaaatggaattaacttctctagattccgagatactaaacctggtgaacaatgtagagcatctggagatcaaactagaagaagcaaagcgtattctcgaggttaaagaaacacaaatccgtgaactcgaatctaccataaacgtttcagagacgtgtaacggaggaacagagatcgggatagaagacatcttccagcaaaaggtggaggcagagattgaatatatcatattctcaagatcagtgggaaacctaaagagacggatcaaactgattgaagaagagaagacattggggctatcaaagcttgataaagcagaaacaaaagctgagaatctaaagaatcaagctcaagatttacaaaaccattgtgtagagatcacagagattcaagaagtggagtgcctgaagaagagagcatttaagaccactagatgtcttcttctacagttaggcttgctctttatactgtattattctctgttaccagaaccggagattgctgttcccacatga

SEQ ID NO: 70123 - protein, 509 aa, Arabidopsis thaliana
  peptide (1)..(509): Ceres Seq. ID no. 2152701
MDLESESSVLESVEDNNGLIGDLDKELNSPVETSPLISKGFGLRKWKRRLRRDLVKDDTSVSMENSKALKRVLSGLVDPNAKQMHLPGPEVRQDSVGSVGSVNSVVGFVMGGESYGNGLAFAAGVDSDNSEDRSSTMSHSWDKHRGKVSGGKSVISSGDSSQQRKSSVEKSNKLRGERIKIEKENSHSSMESADSRSSNFVFMQGASYSLSSREQGGRRMMDYDDENSDHDAHTSKRKDNVEEEEEETEDYSQGDCVEESQIKSNGSSDNLDPLIVAVNSFQTLQEALQKELQKFQELGKEEPITSLHDGGESSSCIHAGHEGASEASSSYRFGSEKMGEMELTSLDSEILNLVNNVEHLEIKLEEAKRILEVKETQIRELESTINVSETCNGGTEIGIEDIFQQKVEAEIEYIIFSRSVGNLKRRIKLIEEEKTLGLSKLDKAETKAENLKNQAQDLQNHCVEITEIQEVECLKKRAFKTTRCLLLQLGLLFILYYSLLPEPEIAVPT

SEQ ID NO: 70124 - protein, 447 aa, Arabidopsis thaliana
  peptide (1)..(447): Ceres Seq. ID no. 2152702
MENSKALKRVLSGLVDPNAKQMHLPGPEVRQDSVGSVGSVNSVVGFVMGGESYGNGLAFAAGVDSDNSEDRSSTMSHSWDKHRGKVSGGKSVISSGDSSQQRKSSVEKSNKLRGERIKIEKENSHSSMESADSRSSNFVFMQGASYSLSSREQGGRRMMDYDDENSDHDAHTSKRKDNVEEEEEETEDYSQGDCVEESQIKSNGSSDNLDPLIVAVNSFQTLQEALQKELQKFQELGKEEPITSLHDGGESSSCIHAGHEGASEASSSYRFGSEKMGEMELTSLDSEILNLVNNVEHLEIKLEEAKRILEVKETQIRELESTINVSETCNGGTEIGIEDIFQQKVEAEIEYIIFSRSVGNLKRRIKLIEEEKTLGLSKLDKAETKAENLKNQAQDLQNHCVEITEIQEVECLKKRAFKTTRCLLLQLGLLFILYYSLLPEPEIAVPT

SEQ ID NO: 70125 - protein, 426 aa, Arabidopsis thaliana
  peptide (1)..(426): Ceres Seq. ID no. 2152703
MHLPGPEVRQDSVGSVGSVNSVVGFVMGGESYGNGLAFAAGVDSDNSEDRSSTMSHSWDKHRGKVSGGKSVISSGDSSQQRKSSVEKSNKLRGERIKIEKENSHSSMESADSRSSNFVFMQGASYSLSSREQGGRRMMDYDDENSDHDAHTSKRKDNVEEEEEETEDYSQGDCVEESQIKSNGSSDNLDPLIVAVNSFQTLQEALQKELQKFQELGKEEPITSLHDGGESSSCIHAGHEGASEASSSYRFGSEKMGEMELTSLDSEILNLVNNVEHLEIKLEEAKRILEVKETQIRELESTINVSETCNGGTEIGIEDIFQQKVEAEIEYIIFSRSVGNLKRRIKLIEEEKTLGLSKLDKAETKAENLKNQAQDLQNHCVEITEIQEVECLKKRAFKTTRCLLLQLGLLFILYYSLLPEPEIAVPT

SEQ ID NO: 70126 - DNA, 1089 bp, Arabidopsis thaliana
  misc_feature (1)..(1089): Ceres Seq. ID no. 2153201
  misc_feature (1)..(1089): Ortholog of  Ceres SEQ ID NO 14315989 as cited in SEQ ID NO 57571
atgagattagtgattcaccttcatatttttaatcctaatctcatttccgatcaaaatgtctctcatggctggcttcatcttaagagaggagagaaggagatggatgctgaaaccgtggagatgttgtcatttcgaatgccgtctatcggaagccaacctacggcatttgctgcaaaaataacggacaatccaaagaccgtggcacaactcaagtcggctgcatcgccttcacctcatagtaccgtgacgtgcggttaccaagctcatgtggcagggttctttcgaaacgtcaccgttttatggtccaagaatctcatgaatcattccctcaccgtaatggtgtcgagtttagacaatgacatgaattattgttgtaagattgatctcgtgaagccatggcagttttggagcaaaagagggtcaaagtcattcgacgtagagggaaactttgtggaggtcttttgggatcttcgatcagcaaaattggctggaaacggtagccccgaacccgtgtcagactattacgtggcagtagtttctgatgaagaggttgttttattgttgggagatttaaagcaaaaggcttataagcggaccaagtcaagaccggcattggtggaagggttcatatactttaaaaaagaaagcatatttgggaagaaaacgttttcgactcgggcaaggtttgacgaacaaagaaaggaacatgaagtggtggtggagagctctaatggagcagcggagccagagatgtggataagcgttgatgggatcgtggttgtgaacgtgaagaatctacaatggaaatttaggggaaaccaaatggtgatggtggatagaacaccggtaatggtctactatgatgttcatgattggttgtttgcaagttcggagactgcagcgagttcagggttgtttttgtttaagcctgttccggttggagcgatggtagatgagagctttagcgatgcggaggaaggagatagcggaggagggagtagtcctttgagtcgttataattcagcatcaagtggttttggaccattgcatgacttttgtttgtttctttatgcttggaaacttgaatga

SEQ ID NO: 70127 - protein, 362 aa, Arabidopsis thaliana
  peptide (1)..(362): Ceres Seq. ID no. 2153202
MRLVIHLHIFNPNLISDQNVSHGWLHLKRGEKEMDAETVEMLSFRMPSIGSQPTAFAAKITDNPKTVAQLKSAASPSPHSTVTCGYQAHVAGFFRNVTVLWSKNLMNHSLTVMVSSLDNDMNYCCKIDLVKPWQFWSKRGSKSFDVEGNFVEVFWDLRSAKLAGNGSPEPVSDYYVAVVSDEEVVLLLGDLKQKAYKRTKSRPALVEGFIYFKKESIFGKKTFSTRARFDEQRKEHEVVVESSNGAAEPEMWISVDGIVVVNVKNLQWKFRGNQMVMVDRTPVMVYYDVHDWLFASSETAASSGLFLFKPVPVGAMVDESFSDAEEGDSGGGSSPLSRYNSASSGFGPLHDFCLFLYAWKLE

SEQ ID NO: 70128 - protein, 329 aa, Arabidopsis thaliana
  peptide (1)..(329): Ceres Seq. ID no. 2153203
MDAETVEMLSFRMPSIGSQPTAFAAKITDNPKTVAQLKSAASPSPHSTVTCGYQAHVAGFFRNVTVLWSKNLMNHSLTVMVSSLDNDMNYCCKIDLVKPWQFWSKRGSKSFDVEGNFVEVFWDLRSAKLAGNGSPEPVSDYYVAVVSDEEVVLLLGDLKQKAYKRTKSRPALVEGFIYFKKESIFGKKTFSTRARFDEQRKEHEVVVESSNGAAEPEMWISVDGIVVVNVKNLQWKFRGNQMVMVDRTPVMVYYDVHDWLFASSETAASSGLFLFKPVPVGAMVDESFSDAEEGDSGGGSSPLSRYNSASSGFGPLHDFCLFLYAWKLE

SEQ ID NO: 70129 - protein, 322 aa, Arabidopsis thaliana
  peptide (1)..(322): Ceres Seq. ID no. 2153204
MLSFRMPSIGSQPTAFAAKITDNPKTVAQLKSAASPSPHSTVTCGYQAHVAGFFRNVTVLWSKNLMNHSLTVMVSSLDNDMNYCCKIDLVKPWQFWSKRGSKSFDVEGNFVEVFWDLRSAKLAGNGSPEPVSDYYVAVVSDEEVVLLLGDLKQKAYKRTKSRPALVEGFIYFKKESIFGKKTFSTRARFDEQRKEHEVVVESSNGAAEPEMWISVDGIVVVNVKNLQWKFRGNQMVMVDRTPVMVYYDVHDWLFASSETAASSGLFLFKPVPVGAMVDESFSDAEEGDSGGGSSPLSRYNSASSGFGPLHDFCLFLYAWKLE

SEQ ID NO: 70130 - DNA, 2631 bp, Arabidopsis thaliana
  misc_feature (1)..(2631): Ceres Seq. ID no. 2153549
  misc_feature (1)..(2631): Ortholog of  Ceres SEQ ID NO 13595870 as cited in SEQ ID NO 62101
  misc_feature (1)..(2631): Ortholog of  Ceres SEQ ID NO 13590241 as cited in SEQ ID NO 63878
  misc_feature (1)..(2631): Ortholog of  Ceres SEQ ID NO 13657939 as cited in SEQ ID NO 66349
atggcttgtcgtttccctctgcattcttcgtcaccttctcaattcctttcaccggaaaatcgtcagagactacccagaaattacccttcaatctcatgccaaaacaattcagctacgaacgttgtccatgaagatggtgatgataacgacaaagccaagacaaaccaagtcaatcttctcgcaataccaatcacactcactataatctccgcttctctagccaaaccgtcgttcgcggctgcgaaggtaacggagagaaagagaactcagaagaaacctcaggaggctttgacacttgaacagcttaaagcttggtccaaagatttacctgtagtttcgaatcgtataccttatactgacattttgagcttaaaagctgaaggtaagcttaagcatgtgataaagcctcctaatttaagtttgcggcaaaaggcagagcctgtgttagtagttttggaggattctagagtattaaggactgtgttgccttctttagagggtaataagaggttttgggaacaatgggatgagttagggattgatgtacaatgtgttaatgcttatactcctccggttaagagacctcctgtgccgtctccttatttaggatttttgtggaaagttcctgcttatatgttaacatgggttaagccaaagaaggagtctaaacgtgctgctgagttgaagagaatgagggaggatttcaagaggcagaggaaggaggagattgagacgatgaaagaggaaagagtgatgatggaaaagacaatgaaggcgcagaagaaacaacaggagaggaagaaaaggaaggctgttaggaagaagaaatacgaggagtctctgcgtgaggcgaggaaaaattatcgagatatggcggatatgtgggcaagattggctcaggatcctaatgtggctactgctcttggattggtattcttttatatattttaccgtgtggtggttctcaactataggaagcaaaagaaggattatgaagacaggttgaagattgagaaggcggaagcagatgagaggaagaaaatgagggagttggaaagggagatggagggaattgaggaagaggatgaggaggttgaggaaggtacaggtgagaaaaatccttacttacagatggcgatgcagttcatgaagtcaggtgcacgtgtgagacgagcatcaaataagaggttacctgagtatcttgagagaggtgtggatgtcaaatttacagatgttgctggacttgggaagattcgtcttgaacttgaggaaatcgttaagttttttactcatggagagatgtaccgcaggagaggggtcaagattccaggtggtattcttttatgtgggcctcctggggtcggaaaaactttactggcaaaagctgtagctggtgaagcaggagtcaatttcttctctatctctgcttctcagtttgtggaaatatatgttggtgttggtgcatctcgtgtccgagcattataccaagaagctagagaaaatgctccatctgtggtcttcattgatgaattggatgctgttggaagggagcgtgggttaataaagggttctggaggacaagaaagggatgccactcttaatcagctacttgtttctttagatggttttgaaggaaggggagaggtcatcaccattgcttccacaaacagaccagacattctcgatcctgcgcttgtgaggcctggacggttcgaccgcaaaatctttatccctaaacctggtcttattggacggatggaaattctgcaggttcatgctcgtaagaagccgatggctgaagatttagactatatggcagttgctagcatgacagatggcatggttggagcagagcttgctaatattgttgagatcgcggcaattaatatgatgcgtgatggaagaacagagttaacaacagatgatttgcttcaagctgcacaaatagaagaaagaggaatgttagatagaaaagacaggagcttggagacatggcgacaagttgcgatcaatgaagctgcaatggctgttgtagcagtgaactttcctgatatgaagaatatagaatttctgacaatcaaccctagagctggtagagaattgggttatgtccgggtgaagatggatcatatcaaatttaaggaaggcatgcttagtcgacaatccatcttggatcacatcactgttcagttagcaccccgtgctgcagatgaactatggtacggtgaggatcagttaagcacgatatgggctgaaacatcggataacgcaagatcagctgctcgatcattggttcttggtggtctttctgataagcatcatggcttgaataacttctgggtagctgatcgaattaacgatattgatgtggaggcattgcggatattgaacatgtgttacgagcgtgctaaagagattcttggaagaaacaggacgctcatggacgaggtggtagagaaactggttcaaaagaaaagtctaacgaaacaagaattcttcactcttgttgagctctatgggtccagtaaaccaatgccaccgagtatccttgaacttaggaagatcaaacggcttgagctagaagagatggtgctgaaactggacatgactaccgcaagaaacagttcataa

SEQ ID NO: 70131 - protein, 876 aa, Arabidopsis thaliana
  peptide (1)..(876): Ceres Seq. ID no. 2153550
MACRFPLHSSSPSQFLSPENRQRLPRNYPSISCQNNSATNVVHEDGDDNDKAKTNQVNLLAIPITLTIISASLAKPSFAAAKVTERKRTQKKPQEALTLEQLKAWSKDLPVVSNRIPYTDILSLKAEGKLKHVIKPPNLSLRQKAEPVLVVLEDSRVLRTVLPSLEGNKRFWEQWDELGIDVQCVNAYTPPVKRPPVPSPYLGFLWKVPAYMLTWVKPKKESKRAAELKRMREDFKRQRKEEIETMKEERVMMEKTMKAQKKQQERKKRKAVRKKKYEESLREARKNYRDMADMWARLAQDPNVATALGLVFFYIFYRVVVLNYRKQKKDYEDRLKIEKAEADERKKMRELEREMEGIEEEDEEVEEGTGEKNPYLQMAMQFMKSGARVRRASNKRLPEYLERGVDVKFTDVAGLGKIRLELEEIVKFFTHGEMYRRRGVKIPGGILLCGPPGVGKTLLAKAVAGEAGVNFFSISASQFVEIYVGVGASRVRALYQEARENAPSVVFIDELDAVGRERGLIKGSGGQERDATLNQLLVSLDGFEGRGEVITIASTNRPDILDPALVRPGRFDRKIFIPKPGLIGRMEILQVHARKKPMAEDLDYMAVASMTDGMVGAELANIVEIAAINMMRDGRTELTTDDLLQAAQIEERGMLDRKDRSLETWRQVAINEAAMAVVAVNFPDMKNIEFLTINPRAGRELGYVRVKMDHIKFKEGMLSRQSILDHITVQLAPRAADELWYGEDQLSTIWAETSDNARSAARSLVLGGLSDKHHGLNNFWVADRINDIDVEALRILNMCYERAKEILGRNRTLMDEVVEKLVQKKSLTKQEFFTLVELYGSSKPMPPSILELRKIKRLELEEMVLKLDMTTARNSS

SEQ ID NO: 70132 - protein, 665 aa, Arabidopsis thaliana
  peptide (1)..(665): Ceres Seq. ID no. 2153551
MLTWVKPKKESKRAAELKRMREDFKRQRKEEIETMKEERVMMEKTMKAQKKQQERKKRKAVRKKKYEESLREARKNYRDMADMWARLAQDPNVATALGLVFFYIFYRVVVLNYRKQKKDYEDRLKIEKAEADERKKMRELEREMEGIEEEDEEVEEGTGEKNPYLQMAMQFMKSGARVRRASNKRLPEYLERGVDVKFTDVAGLGKIRLELEEIVKFFTHGEMYRRRGVKIPGGILLCGPPGVGKTLLAKAVAGEAGVNFFSISASQFVEIYVGVGASRVRALYQEARENAPSVVFIDELDAVGRERGLIKGSGGQERDATLNQLLVSLDGFEGRGEVITIASTNRPDILDPALVRPGRFDRKIFIPKPGLIGRMEILQVHARKKPMAEDLDYMAVASMTDGMVGAELANIVEIAAINMMRDGRTELTTDDLLQAAQIEERGMLDRKDRSLETWRQVAINEAAMAVVAVNFPDMKNIEFLTINPRAGRELGYVRVKMDHIKFKEGMLSRQSILDHITVQLAPRAADELWYGEDQLSTIWAETSDNARSAARSLVLGGLSDKHHGLNNFWVADRINDIDVEALRILNMCYERAKEILGRNRTLMDEVVEKLVQKKSLTKQEFFTLVELYGSSKPMPPSILELRKIKRLELEEMVLKLDMTTARNSS

SEQ ID NO: 70133 - protein, 646 aa, Arabidopsis thaliana
  peptide (1)..(646): Ceres Seq. ID no. 2153552
MREDFKRQRKEEIETMKEERVMMEKTMKAQKKQQERKKRKAVRKKKYEESLREARKNYRDMADMWARLAQDPNVATALGLVFFYIFYRVVVLNYRKQKKDYEDRLKIEKAEADERKKMRELEREMEGIEEEDEEVEEGTGEKNPYLQMAMQFMKSGARVRRASNKRLPEYLERGVDVKFTDVAGLGKIRLELEEIVKFFTHGEMYRRRGVKIPGGILLCGPPGVGKTLLAKAVAGEAGVNFFSISASQFVEIYVGVGASRVRALYQEARENAPSVVFIDELDAVGRERGLIKGSGGQERDATLNQLLVSLDGFEGRGEVITIASTNRPDILDPALVRPGRFDRKIFIPKPGLIGRMEILQVHARKKPMAEDLDYMAVASMTDGMVGAELANIVEIAAINMMRDGRTELTTDDLLQAAQIEERGMLDRKDRSLETWRQVAINEAAMAVVAVNFPDMKNIEFLTINPRAGRELGYVRVKMDHIKFKEGMLSRQSILDHITVQLAPRAADELWYGEDQLSTIWAETSDNARSAARSLVLGGLSDKHHGLNNFWVADRINDIDVEALRILNMCYERAKEILGRNRTLMDEVVEKLVQKKSLTKQEFFTLVELYGSSKPMPPSILELRKIKRLELEEMVLKLDMTTARNSS

SEQ ID NO: 70134 - DNA, 1476 bp, Arabidopsis thaliana
  misc_feature (1)..(1476): Ceres Seq. ID no. 2156310
  misc_feature (1)..(1476): Ortholog of  Ceres SEQ ID NO 14309674 as cited in SEQ ID NO 55707
  misc_feature (1)..(1476): Ortholog of  Ceres SEQ ID NO 13658728 as cited in SEQ ID NO 66270
  misc_feature (1)..(1476): Ortholog of  Ceres SEQ ID NO 12465428 as cited in SEQ ID NO 68898
atgctgattcgttgcgttgcggttgcgaagacgaggttcaacaccaccggcgtagtatcaaggctcgtgtcttcacttgcagatggttcggacacgtcatcagtcgcaaatcggaatagcttgaaggagatactgagaaagaacggtccacgacgcagcgttacctctctgcttcaggaacggatcgattcgggtcatgccgtctctttatcggagctccgattgatttccaagcgtctcattagatcaaatcgttacgatctcgctctccagatgatggagtggatggagaatcaaaaagatattgaatttagtgtttatgacattgctcttagattggatttgatcatcaaaactcatggcttgaaacaaggagaggagtattttgagaagctgctacatagttctgtgtctatgagagtagcgaaatcggcttatcttccgcttcttcgtgcttatgtgaagaataaaatggttaaagaagcggaagctctaatggagaagttgaatggattagggtttcttgttactccacacccgtttaacgaaatgatgaagctttatgaagctagtggtcagtatgagaaagtagttatggttgtttcgatgatgaaagggaataagataccaagaaacgttctttcgtataatctttggatgaatgcatgttgtgaagtgtctggagttgcggctgtggaaacggtttataaggaaatggttggtgataagagtgttgaagttgggtggagttcgttgtgtactttagctaatgtttatattaagagtggttttgatgagaaggctaggttggtgcttgaggatgcggaaaagatgttgaatagaagtaataggcttggatatttctttcttatcacgctttatgcgtctttagggaataaggaaggagttgttcgtttgtgggaagtttctaaatcggtttgtggtaggattagttgtgtgaactacatatgtgtattgtcgtctttggtgaaaactggtgatcttgaagaggctgaaagggtgtttagtgagtgggaggctcaatgttttaactatgatgttagggtctccaatgttcttttgggtgcttatgtgcgtaatggagaaatccggaaagccgagtcattgcatggttgtgtgttggagagaggaggtactccaaactacaagacctgggaaatcttaatggagggatgggtgaaatgtgagaatatggagaaagccattgatgctatgcaccaagtgtttgtactaatgaggcggtgtcattggaggccatcccataacatcgtcatggcgattgccgagtactttgagaaagaggagaaaattgaagaagcaactgcatatgttagagatttgcatcgtcttggtcttgcaagcttaccattatacagattgttacttagaatgcatgaacatgccaaaagaccagcttatgatatctatgaaatgatgaagttggacaaactatga

SEQ ID NO: 70135 - protein, 491 aa, Arabidopsis thaliana
  peptide (1)..(491): Ceres Seq. ID no. 2156311
MLIRCVAVAKTRFNTTGVVSRLVSSLADGSDTSSVANRNSLKEILRKNGPRRSVTSLLQERIDSGHAVSLSELRLISKRLIRSNRYDLALQMMEWMENQKDIEFSVYDIALRLDLIIKTHGLKQGEEYFEKLLHSSVSMRVAKSAYLPLLRAYVKNKMVKEAEALMEKLNGLGFLVTPHPFNEMMKLYEASGQYEKVVMVVSMMKGNKIPRNVLSYNLWMNACCEVSGVAAVETVYKEMVGDKSVEVGWSSLCTLANVYIKSGFDEKARLVLEDAEKMLNRSNRLGYFFLITLYASLGNKEGVVRLWEVSKSVCGRISCVNYICVLSSLVKTGDLEEAERVFSEWEAQCFNYDVRVSNVLLGAYVRNGEIRKAESLHGCVLERGGTPNYKTWEILMEGWVKCENMEKAIDAMHQVFVLMRRCHWRPSHNIVMAIAEYFEKEEKIEEATAYVRDLHRLGLASLPLYRLLLRMHEHAKRPAYDIYEMMKLDKL

SEQ ID NO: 70136 - protein, 400 aa, Arabidopsis thaliana
  peptide (1)..(400): Ceres Seq. ID no. 2156312
MMEWMENQKDIEFSVYDIALRLDLIIKTHGLKQGEEYFEKLLHSSVSMRVAKSAYLPLLRAYVKNKMVKEAEALMEKLNGLGFLVTPHPFNEMMKLYEASGQYEKVVMVVSMMKGNKIPRNVLSYNLWMNACCEVSGVAAVETVYKEMVGDKSVEVGWSSLCTLANVYIKSGFDEKARLVLEDAEKMLNRSNRLGYFFLITLYASLGNKEGVVRLWEVSKSVCGRISCVNYICVLSSLVKTGDLEEAERVFSEWEAQCFNYDVRVSNVLLGAYVRNGEIRKAESLHGCVLERGGTPNYKTWEILMEGWVKCENMEKAIDAMHQVFVLMRRCHWRPSHNIVMAIAEYFEKEEKIEEATAYVRDLHRLGLASLPLYRLLLRMHEHAKRPAYDIYEMMKLDKL

SEQ ID NO: 70137 - protein, 399 aa, Arabidopsis thaliana
  peptide (1)..(399): Ceres Seq. ID no. 2156313
MEWMENQKDIEFSVYDIALRLDLIIKTHGLKQGEEYFEKLLHSSVSMRVAKSAYLPLLRAYVKNKMVKEAEALMEKLNGLGFLVTPHPFNEMMKLYEASGQYEKVVMVVSMMKGNKIPRNVLSYNLWMNACCEVSGVAAVETVYKEMVGDKSVEVGWSSLCTLANVYIKSGFDEKARLVLEDAEKMLNRSNRLGYFFLITLYASLGNKEGVVRLWEVSKSVCGRISCVNYICVLSSLVKTGDLEEAERVFSEWEAQCFNYDVRVSNVLLGAYVRNGEIRKAESLHGCVLERGGTPNYKTWEILMEGWVKCENMEKAIDAMHQVFVLMRRCHWRPSHNIVMAIAEYFEKEEKIEEATAYVRDLHRLGLASLPLYRLLLRMHEHAKRPAYDIYEMMKLDKL

SEQ ID NO: 70138 - DNA, 1068 bp, Arabidopsis thaliana
  misc_feature (1)..(1068): Ceres Seq. ID no. 2156549
  misc_feature (1)..(1068): Ortholog of  Ceres SEQ ID NO 14304475 as cited in SEQ ID NO 53438
  misc_feature (1)..(1068): Ortholog of  Ceres SEQ ID NO 15170555 as cited in SEQ ID NO 55313
  misc_feature (1)..(1068): Ortholog of  Ceres SEQ ID NO 15224695 as cited in SEQ ID NO 65418
atggagaagattattgacgtagcttatggtgcatcagtgaaggcgggtttgacgttgttggagaagaatctgttgccggatcttgtcattaggcggctcatacgtctgcttttggccagtcgtctccgttccgtttacaaacccacggcggagatgcaactctccgatctcctccgttttgttgactctctaaagaagatgcctatagctatcaataccgagacggcaaagactcaacactatgaattaccaacagctttcttcgaacatgctcttggaagaaacatcaaatacagctgttgttactattcaaacgattcaagtagcttagaagaggcaggggaagctatgttggctctttcttgtgaaagagctaaagtggaagatggtcaaagtgttcttgatatcggatgtggctggggatctttgactttgtacattgcacgcaagtacagcaaatgcaagttaaccggtatctgcaactccaaaacgcagaaagcatttatcgatgagaaatgccggaaactcgggcttcagaatgtcgaaatcattgctgcggatattagcacttttgagcatgaagggacatacgatcggatattctccatcgaaatgttcgagcatatgaaaaactatggagagctactgaagaagataggaaactggatgaaggaagatagtcttctgtttgttcactatctctgccataagacatatgcttaccactttgaggatgtgaatgacgatgactggatcacaagacacttcttcagcggaggaacaatgccatcagcagatcttctcctatatttccaagaaaatgtttcgattatggatcattggctcgttaacgggacgcattatgcaaagacaagtgaagagtggctgaaaggaatggataaggagatagttgccgtaaaagagataatggaagtgacttatgggaaagaagaagcagtgaagtggacggtttactggagaaccttcttcatcgcgcttgctgagcttttcgcatacaacaatggagacgagtggatgattgcacacttcctcttcaagaagaaatga

SEQ ID NO: 70139 - protein, 355 aa, Arabidopsis thaliana
  peptide (1)..(355): Ceres Seq. ID no. 2156550
MEKIIDVAYGASVKAGLTLLEKNLLPDLVIRRLIRLLLASRLRSVYKPTAEMQLSDLLRFVDSLKKMPIAINTETAKTQHYELPTAFFEHALGRNIKYSCCYYSNDSSSLEEAGEAMLALSCERAKVEDGQSVLDIGCGWGSLTLYIARKYSKCKLTGICNSKTQKAFIDEKCRKLGLQNVEIIAADISTFEHEGTYDRIFSIEMFEHMKNYGELLKKIGNWMKEDSLLFVHYLCHKTYAYHFEDVNDDDWITRHFFSGGTMPSADLLLYFQENVSIMDHWLVNGTHYAKTSEEWLKGMDKEIVAVKEIMEVTYGKEEAVKWTVYWRTFFIALAELFAYNNGDEWMIAHFLFKKK

SEQ ID NO: 70140 - protein, 304 aa, Arabidopsis thaliana
  peptide (1)..(304): Ceres Seq. ID no. 2156551
MQLSDLLRFVDSLKKMPIAINTETAKTQHYELPTAFFEHALGRNIKYSCCYYSNDSSSLEEAGEAMLALSCERAKVEDGQSVLDIGCGWGSLTLYIARKYSKCKLTGICNSKTQKAFIDEKCRKLGLQNVEIIAADISTFEHEGTYDRIFSIEMFEHMKNYGELLKKIGNWMKEDSLLFVHYLCHKTYAYHFEDVNDDDWITRHFFSGGTMPSADLLLYFQENVSIMDHWLVNGTHYAKTSEEWLKGMDKEIVAVKEIMEVTYGKEEAVKWTVYWRTFFIALAELFAYNNGDEWMIAHFLFKKK

SEQ ID NO: 70141 - protein, 289 aa, Arabidopsis thaliana
  peptide (1)..(289): Ceres Seq. ID no. 2156552
MPIAINTETAKTQHYELPTAFFEHALGRNIKYSCCYYSNDSSSLEEAGEAMLALSCERAKVEDGQSVLDIGCGWGSLTLYIARKYSKCKLTGICNSKTQKAFIDEKCRKLGLQNVEIIAADISTFEHEGTYDRIFSIEMFEHMKNYGELLKKIGNWMKEDSLLFVHYLCHKTYAYHFEDVNDDDWITRHFFSGGTMPSADLLLYFQENVSIMDHWLVNGTHYAKTSEEWLKGMDKEIVAVKEIMEVTYGKEEAVKWTVYWRTFFIALAELFAYNNGDEWMIAHFLFKKK

SEQ ID NO: 70142 - DNA, 846 bp, Arabidopsis thaliana
  misc_feature (1)..(846): Ceres Seq. ID no. 2157541
  misc_feature (1)..(846): Ortholog of  Ceres SEQ ID NO 12623816 as cited in SEQ ID NO 61298
atgagagctcaggttttattatgtccaacaataacagcttatggtcgtctctattgtgcgccacgtagacttcaccgctacaattcatcatcatcatcatctcagtttctgaatctcaatctctctcgcttctccggtgctctcttcttccacatggagcaattccagagtggaactggctcgagcggcaagagagggatggtggaaaatttgaagcggtacggtgtgatatcgtcgaaaagagtagctcaagttatggaggctttagatagaggtctctttgtaccagttggttcttcagcttatgttgatactcctgtacctataggttataatgctaccatttctgctccgcatatgcatgctacttgcttgcagctcttggaagataagctccaccccgggatgcgcgctttagatgtcggctcaggaaccgggtacttgactggctgttttgctttgatggttggagctgagggacgtgttgttggcgtggatcatatccctgaattggttgatatgtctatcaagaatatcgaaaagagtgttgctgcttcctttcttaagaaaggatctctctccttacatgttggggatggaagaaaaggttggcaagagtttgcaccgtatgatgcaatacacgtaggagcagcggcatcagaaatccctcagccccttttggatcagctaaaacccggtggacgaatggtgattccactaggaacctattttcaagagctcaaggtaatcgacaaaaacgaggatggttcaatcaaggtacataccgaaacttcagtccggtatgtgcccctcactagccgtgtcgaacagttaggaggattttga

SEQ ID NO: 70143 - protein, 281 aa, Arabidopsis thaliana
  peptide (1)..(281): Ceres Seq. ID no. 2157542
MRAQVLLCPTITAYGRLYCAPRRLHRYNSSSSSSQFLNLNLSRFSGALFFHMEQFQSGTGSSGKRGMVENLKRYGVISSKRVAQVMEALDRGLFVPVGSSAYVDTPVPIGYNATISAPHMHATCLQLLEDKLHPGMRALDVGSGTGYLTGCFALMVGAEGRVVGVDHIPELVDMSIKNIEKSVAASFLKKGSLSLHVGDGRKGWQEFAPYDAIHVGAAASEIPQPLLDQLKPGGRMVIPLGTYFQELKVIDKNEDGSIKVHTETSVRYVPLTSRVEQLGGF

SEQ ID NO: 70144 - protein, 230 aa, Arabidopsis thaliana
  peptide (1)..(230): Ceres Seq. ID no. 2157543
MEQFQSGTGSSGKRGMVENLKRYGVISSKRVAQVMEALDRGLFVPVGSSAYVDTPVPIGYNATISAPHMHATCLQLLEDKLHPGMRALDVGSGTGYLTGCFALMVGAEGRVVGVDHIPELVDMSIKNIEKSVAASFLKKGSLSLHVGDGRKGWQEFAPYDAIHVGAAASEIPQPLLDQLKPGGRMVIPLGTYFQELKVIDKNEDGSIKVHTETSVRYVPLTSRVEQLGGF

SEQ ID NO: 70145 - protein, 215 aa, Arabidopsis thaliana
  peptide (1)..(215): Ceres Seq. ID no. 2157544
MVENLKRYGVISSKRVAQVMEALDRGLFVPVGSSAYVDTPVPIGYNATISAPHMHATCLQLLEDKLHPGMRALDVGSGTGYLTGCFALMVGAEGRVVGVDHIPELVDMSIKNIEKSVAASFLKKGSLSLHVGDGRKGWQEFAPYDAIHVGAAASEIPQPLLDQLKPGGRMVIPLGTYFQELKVIDKNEDGSIKVHTETSVRYVPLTSRVEQLGGF

SEQ ID NO: 70146 - DNA, 912 bp, Arabidopsis thaliana
  misc_feature (1)..(912): Ceres Seq. ID no. 2157561
  misc_feature (1)..(912): Ortholog of  Ceres SEQ ID NO 14301538 as cited in SEQ ID NO 62856
atgaaaatcttgatcttgattctatcctttgtgacactctttgagatttgcgttgtggacgcatgtcgatcatactgtggaaacataaccgttgattatccgtttgggatccgaaacggatgtgggcatccagggtatagagatctattgttttgtatgaacgatgtgttgatgtttcacataagttcaggttcttatagagttttggacatcgattacgcatatcagtccataacactgcatgatcctcacatgtcgaactgcgaaaccatcgtgctcggtggcaaaggcaatggctttgaagctgaggattggagaactccatatttcaatcctacctcagataatgtctttatgttgatcggatgttctcctaaatctcctatatttcaaggcttcccggaaaagaaagtgccgtgccgcaacatctctggaatgagctgcgaagaatacatgtcatgtccagcttgggacatggtcggatacagacaaccgggtatacattccgggtcaggtccacccatgtgttgtggggtcgggttcgaatccgtaaaagcgattaatctaagtaagttggagtgtgaaggatacagtagtgcgtataatctagcacccttgaaacttagaggaccctctgattgggcttatgggatacgtgttaagtatgaactccaaggaagtgatgcgttttgtcgtgcgtgtgttgcaacttctgggacttgtggctatgaacctgctgatggtggagggcttagacatgtttgcatgtgtgacaaccataattccactacaaactgtgattcagttatatcaccaaccggtgcatcatcaagtgttcgaccaaaagctatcggatcactgatcatctacttcatagctatgaacataggctttcagagaagacagcgatga

SEQ ID NO: 70147 - protein, 303 aa, Arabidopsis thaliana
  peptide (1)..(303): Ceres Seq. ID no. 2157562
MKILILILSFVTLFEICVVDACRSYCGNITVDYPFGIRNGCGHPGYRDLLFCMNDVLMFHISSGSYRVLDIDYAYQSITLHDPHMSNCETIVLGGKGNGFEAEDWRTPYFNPTSDNVFMLIGCSPKSPIFQGFPEKKVPCRNISGMSCEEYMSCPAWDMVGYRQPGIHSGSGPPMCCGVGFESVKAINLSKLECEGYSSAYNLAPLKLRGPSDWAYGIRVKYELQGSDAFCRACVATSGTCGYEPADGGGLRHVCMCDNHNSTTNCDSVISPTGASSSVRPKAIGSLIIYFIAMNIGFQRRQR

SEQ ID NO: 70148 - protein, 251 aa, Arabidopsis thaliana
  peptide (1)..(251): Ceres Seq. ID no. 2157563
MNDVLMFHISSGSYRVLDIDYAYQSITLHDPHMSNCETIVLGGKGNGFEAEDWRTPYFNPTSDNVFMLIGCSPKSPIFQGFPEKKVPCRNISGMSCEEYMSCPAWDMVGYRQPGIHSGSGPPMCCGVGFESVKAINLSKLECEGYSSAYNLAPLKLRGPSDWAYGIRVKYELQGSDAFCRACVATSGTCGYEPADGGGLRHVCMCDNHNSTTNCDSVISPTGASSSVRPKAIGSLIIYFIAMNIGFQRRQR

SEQ ID NO: 70149 - protein, 246 aa, Arabidopsis thaliana
  peptide (1)..(246): Ceres Seq. ID no. 2157564
MFHISSGSYRVLDIDYAYQSITLHDPHMSNCETIVLGGKGNGFEAEDWRTPYFNPTSDNVFMLIGCSPKSPIFQGFPEKKVPCRNISGMSCEEYMSCPAWDMVGYRQPGIHSGSGPPMCCGVGFESVKAINLSKLECEGYSSAYNLAPLKLRGPSDWAYGIRVKYELQGSDAFCRACVATSGTCGYEPADGGGLRHVCMCDNHNSTTNCDSVISPTGASSSVRPKAIGSLIIYFIAMNIGFQRRQR

SEQ ID NO: 70150 - DNA, 2085 bp, Arabidopsis thaliana
  misc_feature (1)..(2085): Ceres Seq. ID no. 2157684
  misc_feature (1)..(2085): Ortholog of  Ceres SEQ ID NO 12586556 as cited in SEQ ID NO 64667
  misc_feature (1)..(2085): Ortholog of  Ceres SEQ ID NO 13660894 as cited in SEQ ID NO 67475
atgtcggaagcatcttgtcttgcttctcctttgctctacaccaattctggaatccattctgattctttctacgcttcgcttattgatagtgccactcataaagctcagctgaagcaaatccacgcacgtttacttgttttaggtttgcagttcagtggtttcttgatcaccaagctcattcacgctagctcttcctttggtgacattacttttgcacgccaagtgttcgacgatttacctcgtcctcaaatattcccttggaatgctataatcaggggttattcaaggaacaatcacttccaagatgctcttctcatgtattccaatatgcaactcgctcgtgtttctcctgattctttcactttccctcatcttcttaaagcttgcagcggtttgtctcatcttcagatgggtagattcgttcatgctcaggtgttcaggcttggatttgatgcggatgtgtttgttcagaacggtctcattgccttgtatgcgaaatgtaggcgtttgggatctgcgagaactgtgtttgaaggactgccattgccagagaggacgatagtctcatggactgctatcgtttcagcttatgctcagaacggtgagcctatggaggctcttgagatttttagtcagatgaggaagatggatgtgaagcctgactgggtagctcttgtcagcgttctcaatgctttcacttgcttgcaggatttgaagcaagggagatctattcatgcttctgttgtgaagatgggtcttgaaatagagcctgacttactcatctctctcaacaccatgtatgcaaaatgtggccaagttgcaactgccaagattctgtttgataagatgaagtcacctaacctgattttgtggaacgccatgatctctggctatgcgaagaacggttatgccagggaagctattgatatgtttcatgagatgatcaataaagatgttagacccgacaccatctctataacatctgccatttcggcttgcgctcaagtaggttctcttgagcaggctcgcagtatgtatgaatatgtaggcagaagtgactacagggatgacgttttcataagcagcgcattaatcgatatgtttgctaaatgtggaagtgtagaaggcgcaaggttggtttttgaccgaacacttgacagggatgttgtggtgtggagtgctatgattgttgggtatggattgcacgggcgggcaagagaagcaatcagtctgtaccgtgcaatggagcgtggtggagtacatcccaatgacgtcacttttctggggcttctcatggcctgtaaccattcaggcatggtaagagaaggctggtggtttttcaaccggatggcggatcacaaaataaatccacaacagcaacattatgcatgtgtcattgatcttctcgggcgtgctggtcatctggatcaagcttatgaagtgatcaaatgcatgccggtccagcccggtgtaacggtttggggagcactcctaagcgcttgcaagaagcatcgccacgttgaactgggagaatatgcagctcaacagcttttctcaatagacccatccaacacaggccactatgtacagctctctaatctgtatgctgcagcacgtttgtgggaccgtgttgcagaggtgcgagtgagaatgaaggagaaaggattgaacaaagacgttggatgtagctgggttgaagtaaggggaaggttggaggctttccgagtgggtgataagtcacatccgagatatgaagagatagagagacaagtagagtggatagagagtagattgaaggaaggtggatttgtggctaacaaggatgcttcattgcacgatctcaacgatgaagaagctgaagagactttgtgcagccacagcgagaggatcgcgattgcgtatgggcttataagtacaccccaaggcacaccactgcggatcacaaagaatctgagagcatgcgtaaactgtcatgctgctacaaagcttatctcgaagctagtggacagagagattgttgtgagagatacaaataggttccaccattttaaggatggagtttgttcctgtggtgattattggtaa

SEQ ID NO: 70151 - protein, 694 aa, Arabidopsis thaliana
  peptide (1)..(694): Ceres Seq. ID no. 2157685
MSEASCLASPLLYTNSGIHSDSFYASLIDSATHKAQLKQIHARLLVLGLQFSGFLITKLIHASSSFGDITFARQVFDDLPRPQIFPWNAIIRGYSRNNHFQDALLMYSNMQLARVSPDSFTFPHLLKACSGLSHLQMGRFVHAQVFRLGFDADVFVQNGLIALYAKCRRLGSARTVFEGLPLPERTIVSWTAIVSAYAQNGEPMEALEIFSQMRKMDVKPDWVALVSVLNAFTCLQDLKQGRSIHASVVKMGLEIEPDLLISLNTMYAKCGQVATAKILFDKMKSPNLILWNAMISGYAKNGYAREAIDMFHEMINKDVRPDTISITSAISACAQVGSLEQARSMYEYVGRSDYRDDVFISSALIDMFAKCGSVEGARLVFDRTLDRDVVVWSAMIVGYGLHGRAREAISLYRAMERGGVHPNDVTFLGLLMACNHSGMVREGWWFFNRMADHKINPQQQHYACVIDLLGRAGHLDQAYEVIKCMPVQPGVTVWGALLSACKKHRHVELGEYAAQQLFSIDPSNTGHYVQLSNLYAAARLWDRVAEVRVRMKEKGLNKDVGCSWVEVRGRLEAFRVGDKSHPRYEEIERQVEWIESRLKEGGFVANKDASLHDLNDEEAEETLCSHSERIAIAYGLISTPQGTPLRITKNLRACVNCHAATKLISKLVDREIVVRDTNRFHHFKDGVCSCGDYW

SEQ ID NO: 70152 - protein, 589 aa, Arabidopsis thaliana
  peptide (1)..(589): Ceres Seq. ID no. 2157686
MYSNMQLARVSPDSFTFPHLLKACSGLSHLQMGRFVHAQVFRLGFDADVFVQNGLIALYAKCRRLGSARTVFEGLPLPERTIVSWTAIVSAYAQNGEPMEALEIFSQMRKMDVKPDWVALVSVLNAFTCLQDLKQGRSIHASVVKMGLEIEPDLLISLNTMYAKCGQVATAKILFDKMKSPNLILWNAMISGYAKNGYAREAIDMFHEMINKDVRPDTISITSAISACAQVGSLEQARSMYEYVGRSDYRDDVFISSALIDMFAKCGSVEGARLVFDRTLDRDVVVWSAMIVGYGLHGRAREAISLYRAMERGGVHPNDVTFLGLLMACNHSGMVREGWWFFNRMADHKINPQQQHYACVIDLLGRAGHLDQAYEVIKCMPVQPGVTVWGALLSACKKHRHVELGEYAAQQLFSIDPSNTGHYVQLSNLYAAARLWDRVAEVRVRMKEKGLNKDVGCSWVEVRGRLEAFRVGDKSHPRYEEIERQVEWIESRLKEGGFVANKDASLHDLNDEEAEETLCSHSERIAIAYGLISTPQGTPLRITKNLRACVNCHAATKLISKLVDREIVVRDTNRFHHFKDGVCSCGDYW

SEQ ID NO: 70153 - protein, 585 aa, Arabidopsis thaliana
  peptide (1)..(585): Ceres Seq. ID no. 2157687
MQLARVSPDSFTFPHLLKACSGLSHLQMGRFVHAQVFRLGFDADVFVQNGLIALYAKCRRLGSARTVFEGLPLPERTIVSWTAIVSAYAQNGEPMEALEIFSQMRKMDVKPDWVALVSVLNAFTCLQDLKQGRSIHASVVKMGLEIEPDLLISLNTMYAKCGQVATAKILFDKMKSPNLILWNAMISGYAKNGYAREAIDMFHEMINKDVRPDTISITSAISACAQVGSLEQARSMYEYVGRSDYRDDVFISSALIDMFAKCGSVEGARLVFDRTLDRDVVVWSAMIVGYGLHGRAREAISLYRAMERGGVHPNDVTFLGLLMACNHSGMVREGWWFFNRMADHKINPQQQHYACVIDLLGRAGHLDQAYEVIKCMPVQPGVTVWGALLSACKKHRHVELGEYAAQQLFSIDPSNTGHYVQLSNLYAAARLWDRVAEVRVRMKEKGLNKDVGCSWVEVRGRLEAFRVGDKSHPRYEEIERQVEWIESRLKEGGFVANKDASLHDLNDEEAEETLCSHSERIAIAYGLISTPQGTPLRITKNLRACVNCHAATKLISKLVDREIVVRDTNRFHHFKDGVCSCGDYW

SEQ ID NO: 70154 - DNA, 1965 bp, Arabidopsis thaliana
  misc_feature (1)..(1965): Ceres Seq. ID no. 2158341
  misc_feature (1)..(1965): Ortholog of  Ceres SEQ ID NO 14307896 as cited in SEQ ID NO 66915
  misc_feature (1)..(1965): Ortholog of  Ceres SEQ ID NO 13657008 as cited in SEQ ID NO 69164
atgtcgacgatttgcagccacagagaacttaaagcttatcgtccgctgcaagataataatctacaggaggtgtatgcttcctcagctgctgcagtgcactacgatccagatctgaaagatgtgaacatagttgcgacatacagtgaccattacggcaatatacgccttggtagggtgaaaatgggggatctttcaccttcttgggttttggagaatcctgcctatcaagttagccgcaaaacaaaaggttcgcagctagttataccacgggattcatttcaaaatgatactggaatggaagataatgcaagccattctacaactaatcagactgatgaaagcgaaaatcagtttccaaacgtggattttgcaagcccagcaaaactgaagcggcagattttacgtcaggaaaggagaggtcaacgaactttagagctgatccgacaagaaaaggaaactgatgagcagatgcaagaagcagccattcagaagtcaatgagctttgaaaactcagtcatagggaaatacagtatatggaggagagactatgagagcccaaatgctgatgctatcttgaagcttatgagagaccagatcataatggcaaaagcatatgcaaatattgccaaatcaaaaaatgtaaccaatctgtacgttttcttgatgcagcagtgtggagaaaataaacgtgttataggtaaagcaacctctgatgctgaccttccttcaagcgctcttgatcaagcaaaagccatgggccatgcactctctcttgcaaaagacgagttatatgactgccatgaacttgcaaaaaagttccgggccatccttcagtccactgaacgcaaagtagatggactgaagaaaaagggaaccttcttaattcagctagctgccaaaacatttcccaagccattgcattgcctgagtctgcagctagcggcagactattttattctaggtttcaatgaagaggatgcagtgaaagaggatgtcagtcaaaagaagcttgaagatccttcgctctatcactatgcgatcttttcggataacgttctggctacatcagtggtggtgaactccactgtcttgaatgcaaaggaaccgcagaggcatgtgttccatatagtaactgacaaactgaattttggtgcaatgaagatgtggtttcgcatcaatgctcctgctgatgcgacgattcaagttgaaaacataaatgatttcaagtggctgaactcctcttactgctctgttctacggcagcttgaatctgcaaggctgaaagaatactatttcaaagcaaatcatccttcatcaatctcagctggcgcagataatctaaagtaccgcaacccaaagtatctatcgatgctgaatcatctcagattctaccttcctgaggtttatccgaagctggagaagattctgtttctagacgatgacattgtggtgcagaaggacctggcaccactatgggaaatagacatgcaaggaaaagtgaatggtgcggtggagacgtgcaaggagagcttccacagatttgacaagtacctcaacttctcaaatccaaagatttcagagaattttgacgctggtgcttgtgggtgggcatttgggatgaatatgtttgacctgaaagagtggaggaaacggaacattacagggatatatcactattggcaagacttgaatgaagacagaacactgtggaagctgggatcgttgccaccggggctgataacattttacaacctgacgtatgcaatggataggagctggcacgtactagggctgggatatgacccagcgctaaaccaaacagcaatagagaatgcagcggtagtgcattacaatgggaactacaagccatggctgggtttagcattcgccaagtacaaaccgtactggtccaagtacgttgagtacgacaacccttatctccgacggtgcgacatcaatgaatga

SEQ ID NO: 70155 - protein, 654 aa, Arabidopsis thaliana
  peptide (1)..(654): Ceres Seq. ID no. 2158342
MSTICSHRELKAYRPLQDNNLQEVYASSAAAVHYDPDLKDVNIVATYSDHYGNIRLGRVKMGDLSPSWVLENPAYQVSRKTKGSQLVIPRDSFQNDTGMEDNASHSTTNQTDESENQFPNVDFASPAKLKRQILRQERRGQRTLELIRQEKETDEQMQEAAIQKSMSFENSVIGKYSIWRRDYESPNADAILKLMRDQIIMAKAYANIAKSKNVTNLYVFLMQQCGENKRVIGKATSDADLPSSALDQAKAMGHALSLAKDELYDCHELAKKFRAILQSTERKVDGLKKKGTFLIQLAAKTFPKPLHCLSLQLAADYFILGFNEEDAVKEDVSQKKLEDPSLYHYAIFSDNVLATSVVVNSTVLNAKEPQRHVFHIVTDKLNFGAMKMWFRINAPADATIQVENINDFKWLNSSYCSVLRQLESARLKEYYFKANHPSSISAGADNLKYRNPKYLSMLNHLRFYLPEVYPKLEKILFLDDDIVVQKDLAPLWEIDMQGKVNGAVETCKESFHRFDKYLNFSNPKISENFDAGACGWAFGMNMFDLKEWRKRNITGIYHYWQDLNEDRTLWKLGSLPPGLITFYNLTYAMDRSWHVLGLGYDPALNQTAIENAAVVHYNGNYKPWLGLAFAKYKPYWSKYVEYDNPYLRRCDINE

SEQ ID NO: 70156 - protein, 594 aa, Arabidopsis thaliana
  peptide (1)..(594): Ceres Seq. ID no. 2158343
MGDLSPSWVLENPAYQVSRKTKGSQLVIPRDSFQNDTGMEDNASHSTTNQTDESENQFPNVDFASPAKLKRQILRQERRGQRTLELIRQEKETDEQMQEAAIQKSMSFENSVIGKYSIWRRDYESPNADAILKLMRDQIIMAKAYANIAKSKNVTNLYVFLMQQCGENKRVIGKATSDADLPSSALDQAKAMGHALSLAKDELYDCHELAKKFRAILQSTERKVDGLKKKGTFLIQLAAKTFPKPLHCLSLQLAADYFILGFNEEDAVKEDVSQKKLEDPSLYHYAIFSDNVLATSVVVNSTVLNAKEPQRHVFHIVTDKLNFGAMKMWFRINAPADATIQVENINDFKWLNSSYCSVLRQLESARLKEYYFKANHPSSISAGADNLKYRNPKYLSMLNHLRFYLPEVYPKLEKILFLDDDIVVQKDLAPLWEIDMQGKVNGAVETCKESFHRFDKYLNFSNPKISENFDAGACGWAFGMNMFDLKEWRKRNITGIYHYWQDLNEDRTLWKLGSLPPGLITFYNLTYAMDRSWHVLGLGYDPALNQTAIENAAVVHYNGNYKPWLGLAFAKYKPYWSKYVEYDNPYLRRCDINE

SEQ ID NO: 70157 - protein, 556 aa, Arabidopsis thaliana
  peptide (1)..(556): Ceres Seq. ID no. 2158344
MEDNASHSTTNQTDESENQFPNVDFASPAKLKRQILRQERRGQRTLELIRQEKETDEQMQEAAIQKSMSFENSVIGKYSIWRRDYESPNADAILKLMRDQIIMAKAYANIAKSKNVTNLYVFLMQQCGENKRVIGKATSDADLPSSALDQAKAMGHALSLAKDELYDCHELAKKFRAILQSTERKVDGLKKKGTFLIQLAAKTFPKPLHCLSLQLAADYFILGFNEEDAVKEDVSQKKLEDPSLYHYAIFSDNVLATSVVVNSTVLNAKEPQRHVFHIVTDKLNFGAMKMWFRINAPADATIQVENINDFKWLNSSYCSVLRQLESARLKEYYFKANHPSSISAGADNLKYRNPKYLSMLNHLRFYLPEVYPKLEKILFLDDDIVVQKDLAPLWEIDMQGKVNGAVETCKESFHRFDKYLNFSNPKISENFDAGACGWAFGMNMFDLKEWRKRNITGIYHYWQDLNEDRTLWKLGSLPPGLITFYNLTYAMDRSWHVLGLGYDPALNQTAIENAAVVHYNGNYKPWLGLAFAKYKPYWSKYVEYDNPYLRRCDINE

SEQ ID NO: 70158 - DNA, 2343 bp, Arabidopsis thaliana
  misc_feature (1)..(2343): Ceres Seq. ID no. 2160993
  misc_feature (1)..(2343): Ortholog of  Ceres SEQ ID NO 15225530 as cited in SEQ ID NO 55089
atggagtcaataaaggtttgcatgaacgcactgtgcggagcggcctctacgtcgggcgagtggaaaaaaggctggcctatgcgatccggtgatttagcttctctctgcgataagtgtgggtgtgcatacgagcaatccatattctgtgaagtgttccatgccaaggaatctggttggagagagtgtaattcatgtgacaagcgtcttcactgtggatgcattgcttctagatttatgatggagcttctagagaatggtggtgttacctgtataagttgcgccaagaaatccggactaatttctatgaatgtgagccatgaatctaacggtaaggacttcccctcatttgcttcagcagagcatgtaggcagtgttcttgagaggacaaatctcaagcacttgcttcactttcaaagaatcgaccccactcattcttctcttcaaatgaaacaagaagaatcgctgcttccttccagcctagatgctcttagacacaaaactgaaaggaaagaattgtctgcacagccaaacttgagcatttcacttggacctacgcttatgacaagcccatttcatgatgctgctgttgatgacagaagtaagactaattcgattttccaactggcccctcggtccaggcagctgcttccaaaacctgcaaattcagctcccattgctgctggcatggagcctagtgggagcctggtgtcacagattcatgtcgctcggcctcctccagaaggtcgcgggaagacccaattgcttccccgttactggcctaggattactgaccaagagctgctgcaattatctggacagtatcctcatctctcaaattccaaaattataccactctttgaaaaagttctgagtgcgagcgatgcgggtcgtattggtcgactggttcttccgaaagcatgtgcagaggcatatttcccccctatatctctacccgagggtctcccgttaaagatacaagacataaaagggaaagaatgggtgttccagttcaggttttggcctaataataacagcaggatgtacgttttggagggtgtgactccttgcatacagtccatgcagttgcaagctggtgacactgtaacattcagccgtacagaacctgaaggaaaactcgtaatgggataccgtaaagcgacgaactctacagcgacacagatgttcaagggaagcagtgaacccaatctgaacatgttttccaacagcttgaatccgggatgtggtgacatcaattggtctaaactagagaagtctgaggacatggcaaaggataacttatttcttcagtcgtccttaacttctgctaggaaacgggttcggaacattgggactaagagcaagcgtctgctcattgatagcgtagatgttctggaactgaaaataacttgggaggaggcacaggagctgttgcggcctccccaatccaccaaacccagcatctttacgctggaaaatcaagattttgaagaatatgacgaaccaccagttttcgggaagaggaccctttttgtctcacgtcaaacaggggaacaagagcaatgggtgcagtgtgatgcttgtgggaaatggcgacagctgccggtggatattcttcttccaccaaagtggtcgtgctctgataatctcttggatcctggcaggtcttcatgttccgcacctgatgaactctctccaagagaacaggatacacttgtccggcagagcaaagagttcaaaaggaggagactggcatcatcaaacgaaaagctaaaccagtcgcaggatgcatctgctctgaatagtttaggaaatgcaggcatcaccacaaccggtgaacagggggaaatcacggttgcagccacgaccaagcatccaagacaccgggcagggtgttcgtgcatcgtctgcagccaaccaccgagcggaaaaggcaaacacaagccgtcatgcacttgcactgtgtgcgaggcagtgaagagacgattcaggacgctcatgctgcggaagcggaacaaaggagaggcaggacaggcaagccagcaggcgcagtcacagtcagagtgcagggacgagacagaagtggagagcattccagcggttgaactagccgcaggggaaaacatcgacttgaactcagacccgggggcttcccgagtaagcatgatgaggcttctccaagctgcagcgtttcctctggaagcatatctgaaacaaaaggctatttccaatacagcaggagaacagcaaagcagtgatatggtcagcacagaacacggttcgtcctcagccgcacaagaaactgagaaagacacaacaaatggagctcatgatcctgtgaactaa

SEQ ID NO: 70159 - protein, 780 aa, Arabidopsis thaliana
  peptide (1)..(780): Ceres Seq. ID no. 2160994
MESIKVCMNALCGAASTSGEWKKGWPMRSGDLASLCDKCGCAYEQSIFCEVFHAKESGWRECNSCDKRLHCGCIASRFMMELLENGGVTCISCAKKSGLISMNVSHESNGKDFPSFASAEHVGSVLERTNLKHLLHFQRIDPTHSSLQMKQEESLLPSSLDALRHKTERKELSAQPNLSISLGPTLMTSPFHDAAVDDRSKTNSIFQLAPRSRQLLPKPANSAPIAAGMEPSGSLVSQIHVARPPPEGRGKTQLLPRYWPRITDQELLQLSGQYPHLSNSKIIPLFEKVLSASDAGRIGRLVLPKACAEAYFPPISLPEGLPLKIQDIKGKEWVFQFRFWPNNNSRMYVLEGVTPCIQSMQLQAGDTVTFSRTEPEGKLVMGYRKATNSTATQMFKGSSEPNLNMFSNSLNPGCGDINWSKLEKSEDMAKDNLFLQSSLTSARKRVRNIGTKSKRLLIDSVDVLELKITWEEAQELLRPPQSTKPSIFTLENQDFEEYDEPPVFGKRTLFVSRQTGEQEQWVQCDACGKWRQLPVDILLPPKWSCSDNLLDPGRSSCSAPDELSPREQDTLVRQSKEFKRRRLASSNEKLNQSQDASALNSLGNAGITTTGEQGEITVAATTKHPRHRAGCSCIVCSQPPSGKGKHKPSCTCTVCEAVKRRFRTLMLRKRNKGEAGQASQQAQSQSECRDETEVESIPAVELAAGENIDLNSDPGASRVSMMRLLQAAAFPLEAYLKQKAISNTAGEQQSSDMVSTEHGSSSAAQETEKDTTNGAHDPVN

SEQ ID NO: 70160 - protein, 773 aa, Arabidopsis thaliana
  peptide (1)..(773): Ceres Seq. ID no. 2160995
MNALCGAASTSGEWKKGWPMRSGDLASLCDKCGCAYEQSIFCEVFHAKESGWRECNSCDKRLHCGCIASRFMMELLENGGVTCISCAKKSGLISMNVSHESNGKDFPSFASAEHVGSVLERTNLKHLLHFQRIDPTHSSLQMKQEESLLPSSLDALRHKTERKELSAQPNLSISLGPTLMTSPFHDAAVDDRSKTNSIFQLAPRSRQLLPKPANSAPIAAGMEPSGSLVSQIHVARPPPEGRGKTQLLPRYWPRITDQELLQLSGQYPHLSNSKIIPLFEKVLSASDAGRIGRLVLPKACAEAYFPPISLPEGLPLKIQDIKGKEWVFQFRFWPNNNSRMYVLEGVTPCIQSMQLQAGDTVTFSRTEPEGKLVMGYRKATNSTATQMFKGSSEPNLNMFSNSLNPGCGDINWSKLEKSEDMAKDNLFLQSSLTSARKRVRNIGTKSKRLLIDSVDVLELKITWEEAQELLRPPQSTKPSIFTLENQDFEEYDEPPVFGKRTLFVSRQTGEQEQWVQCDACGKWRQLPVDILLPPKWSCSDNLLDPGRSSCSAPDELSPREQDTLVRQSKEFKRRRLASSNEKLNQSQDASALNSLGNAGITTTGEQGEITVAATTKHPRHRAGCSCIVCSQPPSGKGKHKPSCTCTVCEAVKRRFRTLMLRKRNKGEAGQASQQAQSQSECRDETEVESIPAVELAAGENIDLNSDPGASRVSMMRLLQAAAFPLEAYLKQKAISNTAGEQQSSDMVSTEHGSSSAAQETEKDTTNGAHDPVN

SEQ ID NO: 70161 - protein, 754 aa, Arabidopsis thaliana
  peptide (1)..(754): Ceres Seq. ID no. 2160996
MRSGDLASLCDKCGCAYEQSIFCEVFHAKESGWRECNSCDKRLHCGCIASRFMMELLENGGVTCISCAKKSGLISMNVSHESNGKDFPSFASAEHVGSVLERTNLKHLLHFQRIDPTHSSLQMKQEESLLPSSLDALRHKTERKELSAQPNLSISLGPTLMTSPFHDAAVDDRSKTNSIFQLAPRSRQLLPKPANSAPIAAGMEPSGSLVSQIHVARPPPEGRGKTQLLPRYWPRITDQELLQLSGQYPHLSNSKIIPLFEKVLSASDAGRIGRLVLPKACAEAYFPPISLPEGLPLKIQDIKGKEWVFQFRFWPNNNSRMYVLEGVTPCIQSMQLQAGDTVTFSRTEPEGKLVMGYRKATNSTATQMFKGSSEPNLNMFSNSLNPGCGDINWSKLEKSEDMAKDNLFLQSSLTSARKRVRNIGTKSKRLLIDSVDVLELKITWEEAQELLRPPQSTKPSIFTLENQDFEEYDEPPVFGKRTLFVSRQTGEQEQWVQCDACGKWRQLPVDILLPPKWSCSDNLLDPGRSSCSAPDELSPREQDTLVRQSKEFKRRRLASSNEKLNQSQDASALNSLGNAGITTTGEQGEITVAATTKHPRHRAGCSCIVCSQPPSGKGKHKPSCTCTVCEAVKRRFRTLMLRKRNKGEAGQASQQAQSQSECRDETEVESIPAVELAAGENIDLNSDPGASRVSMMRLLQAAAFPLEAYLKQKAISNTAGEQQSSDMVSTEHGSSSAAQETEKDTTNGAHDPVN

SEQ ID NO: 70162 - DNA, 1362 bp, Arabidopsis thaliana
  misc_feature (1)..(1362): Ceres Seq. ID no. 2162086
  misc_feature (1)..(1362): Ortholog of  Ceres SEQ ID NO 15172325 as cited in SEQ ID NO 54668
  misc_feature (1)..(1362): Ortholog of  Ceres SEQ ID NO 13662880 as cited in SEQ ID NO 65422
  misc_feature (1)..(1362): Ortholog of  Ceres SEQ ID NO 12779098 as cited in SEQ ID NO 67698
  misc_feature (1)..(1362): Ortholog of  Ceres SEQ ID NO 13596180 as cited in SEQ ID NO 67941
  misc_feature (1)..(1362): Ortholog of  Ceres SEQ ID NO 13591190 as cited in SEQ ID NO 68044
  misc_feature (1)..(1362): Ortholog of  Ceres SEQ ID NO 13595961 as cited in SEQ ID NO 68223
  misc_feature (1)..(1362): Ortholog of  Ceres SEQ ID NO 13596089 as cited in SEQ ID NO 68373
atggaagaactaggagtgaagagaaggatagtattggttccagttccagcacaaggtcatgtaactccgattatgcaactcgggaaggctctttactccaagggcttctccatcactgttgttctcacacagtataatcgagttagctcatccaaggacttctctgattttcatttcctcaccatcccaggcagcttgaccgagtctgatctcaaaaaccttggaccattcaagtttctcttcaagctcaatcaaatttgcgaggcaagcttcaagcaatgtattggtcaactattgcaggagcaaggtaatgatatcgcttgtgtcgtctacgatgagtacatgtacttctcccaagctgcagttaaagagtttcaacttcctagcgtcctcttcagcacgacaagtgctactgcctttgtctgtcgctctgttttgtctagagtcaacgcagagtcattcttgcttgacatgaaagatcccaaagtgtcagacaaggaatttccagggttgcatccgctaaggtacaaggacctgccaacttcagcatttgggccattagagagtatactcaaggtttacagtgagactgtcaacattcgaacagcttcggcagttatcatcaactcaacaagctgtctagagagctcatctttggcatggttacaaaaacaactgcaagttccagtgtatcctataggcccacttcacattgcagcttcagcgccttctagtttacttgaagaggacaggagttgccttgagtggttgaacaagcaaaaaataggctcagtgatttacataagtttgggaagcttggctctaatggaaactaaagacatgttggagatggcttggggtttacgtaatagcaaccaacctttcttatgggtgatccgaccgggttctattcccggctcggaatggacagagtctttaccggaggaattcagtaggttggtttcagaaagaggttacattgtgaaatgggcaccacagatagaagttctcagacatcctgcagtgggagggttttggagtcactgcggatggaactcgaccctagagagcatcggggaaggagttccgatgatctgtaggccttttacgggagatcagaaagtcaatgcgaggtacttagagagagtttggagaattggggttcaattggaaggagagctggataaaggaacagtggagagagctgtagagagattgattatggatgaagaaggagcagaaatgaggaagagagttatcaacttgaaagagaagcttcaagcctctgtcaagagtagaggttcctcattcagctcattagacaactttgtcaattccttaaaaatgatgaatttcatgtag

SEQ ID NO: 70163 - protein, 453 aa, Arabidopsis thaliana
  peptide (1)..(453): Ceres Seq. ID no. 2162087
MEELGVKRRIVLVPVPAQGHVTPIMQLGKALYSKGFSITVVLTQYNRVSSSKDFSDFHFLTIPGSLTESDLKNLGPFKFLFKLNQICEASFKQCIGQLLQEQGNDIACVVYDEYMYFSQAAVKEFQLPSVLFSTTSATAFVCRSVLSRVNAESFLLDMKDPKVSDKEFPGLHPLRYKDLPTSAFGPLESILKVYSETVNIRTASAVIINSTSCLESSSLAWLQKQLQVPVYPIGPLHIAASAPSSLLEEDRSCLEWLNKQKIGSVIYISLGSLALMETKDMLEMAWGLRNSNQPFLWVIRPGSIPGSEWTESLPEEFSRLVSERGYIVKWAPQIEVLRHPAVGGFWSHCGWNSTLESIGEGVPMICRPFTGDQKVNARYLERVWRIGVQLEGELDKGTVERAVERLIMDEEGAEMRKRVINLKEKLQASVKSRGSSFSSLDNFVNSLKMMNFM

SEQ ID NO: 70164 - protein, 429 aa, Arabidopsis thaliana
  peptide (1)..(429): Ceres Seq. ID no. 2162088
MQLGKALYSKGFSITVVLTQYNRVSSSKDFSDFHFLTIPGSLTESDLKNLGPFKFLFKLNQICEASFKQCIGQLLQEQGNDIACVVYDEYMYFSQAAVKEFQLPSVLFSTTSATAFVCRSVLSRVNAESFLLDMKDPKVSDKEFPGLHPLRYKDLPTSAFGPLESILKVYSETVNIRTASAVIINSTSCLESSSLAWLQKQLQVPVYPIGPLHIAASAPSSLLEEDRSCLEWLNKQKIGSVIYISLGSLALMETKDMLEMAWGLRNSNQPFLWVIRPGSIPGSEWTESLPEEFSRLVSERGYIVKWAPQIEVLRHPAVGGFWSHCGWNSTLESIGEGVPMICRPFTGDQKVNARYLERVWRIGVQLEGELDKGTVERAVERLIMDEEGAEMRKRVINLKEKLQASVKSRGSSFSSLDNFVNSLKMMNFM

SEQ ID NO: 70165 - protein, 339 aa, Arabidopsis thaliana
  peptide (1)..(339): Ceres Seq. ID no. 2162089
MYFSQAAVKEFQLPSVLFSTTSATAFVCRSVLSRVNAESFLLDMKDPKVSDKEFPGLHPLRYKDLPTSAFGPLESILKVYSETVNIRTASAVIINSTSCLESSSLAWLQKQLQVPVYPIGPLHIAASAPSSLLEEDRSCLEWLNKQKIGSVIYISLGSLALMETKDMLEMAWGLRNSNQPFLWVIRPGSIPGSEWTESLPEEFSRLVSERGYIVKWAPQIEVLRHPAVGGFWSHCGWNSTLESIGEGVPMICRPFTGDQKVNARYLERVWRIGVQLEGELDKGTVERAVERLIMDEEGAEMRKRVINLKEKLQASVKSRGSSFSSLDNFVNSLKMMNFM

SEQ ID NO: 70166 - DNA, 1218 bp, Arabidopsis thaliana
  misc_feature (1)..(1218): Ceres Seq. ID no. 2162652
  misc_feature (1)..(1218): Ortholog of  Ceres SEQ ID NO 14311103 as cited in SEQ ID NO 52897
atggaagaagataaccaagaaatacaacgtgacaatgtcggatcttcatctttctttaaaacatgtttcaacgcactcaatgctctttcaggaattggaatattatcggtaccatattcacttgctcgtggaggatggttgagtctttcacttttgttactcctagccgtaaccgccttctacacatccttactcattacaaaatgtatgaatgcggaccgcaacatcaaaacatatcccgacataggagaacgcgcatttggtagaccgggaagaatcattgtgtcagtcttcatgcacctagagctctatctagtcaccacgggtttcttgatcctcgagggcgacaatcttcacaatcttttcccgggttttaccatcgaaatgatcggattgagattgaatggcaaacaagctttcatggcgaccgtcgcctttgtcattatgccaactctatggtgggataatctcagcgtcttgtcgtatgtttctatgagtggcgttttagctacgactgtgacgcttggatcaatatcttggattggcgcatttgatgggattgggtttcatcaaaaaggaaagttgataaattggagtgggatccctactgctttgagcttatatgctttttgctatggtgcgcatccagttttgcccactttgtattcttctatgaaaagcaaacatcagttcaacaatgtcctactaatatgttttatattatgcaccataggatacacatcaatggcagttttgggctacttaatgtatggatcacaaacattatcacaaataacactgaatcttccaattcataagacgagttcgaaggtggcaatatacacaactctcgtaaacccggtagccaaatacgcactgatgatcacaccaaccgtgaacactataaaagattggtttccttcacggtactccaaaaaggcatacttacatctcttgataagcacatttttcatcataagtagtgtcgtgatcgccgagacacttcccttttttggttatatgatgtcgctggttggagcattattgagcgttacggtttctatacttctgccttgtttatgttacttgaagatctttggaaactacaagaaaattgggtgtgagactataatgttgtttggaatggtagtgatgagtgtttttgttggggtaataggtacttacattgcacttcgagatataattggtagtgtataa

SEQ ID NO: 70167 - protein, 405 aa, Arabidopsis thaliana
  peptide (1)..(405): Ceres Seq. ID no. 2162653
MEEDNQEIQRDNVGSSSFFKTCFNALNALSGIGILSVPYSLARGGWLSLSLLLLLAVTAFYTSLLITKCMNADRNIKTYPDIGERAFGRPGRIIVSVFMHLELYLVTTGFLILEGDNLHNLFPGFTIEMIGLRLNGKQAFMATVAFVIMPTLWWDNLSVLSYVSMSGVLATTVTLGSISWIGAFDGIGFHQKGKLINWSGIPTALSLYAFCYGAHPVLPTLYSSMKSKHQFNNVLLICFILCTIGYTSMAVLGYLMYGSQTLSQITLNLPIHKTSSKVAIYTTLVNPVAKYALMITPTVNTIKDWFPSRYSKKAYLHLLISTFFIISSVVIAETLPFFGYMMSLVGALLSVTVSILLPCLCYLKIFGNYKKIGCETIMLFGMVVMSVFVGVIGTYIALRDIIGSV

SEQ ID NO: 70168 - protein, 336 aa, Arabidopsis thaliana
  peptide (1)..(336): Ceres Seq. ID no. 2162654
MNADRNIKTYPDIGERAFGRPGRIIVSVFMHLELYLVTTGFLILEGDNLHNLFPGFTIEMIGLRLNGKQAFMATVAFVIMPTLWWDNLSVLSYVSMSGVLATTVTLGSISWIGAFDGIGFHQKGKLINWSGIPTALSLYAFCYGAHPVLPTLYSSMKSKHQFNNVLLICFILCTIGYTSMAVLGYLMYGSQTLSQITLNLPIHKTSSKVAIYTTLVNPVAKYALMITPTVNTIKDWFPSRYSKKAYLHLLISTFFIISSVVIAETLPFFGYMMSLVGALLSVTVSILLPCLCYLKIFGNYKKIGCETIMLFGMVVMSVFVGVIGTYIALRDIIGSV

SEQ ID NO: 70169 - protein, 307 aa, Arabidopsis thaliana
  peptide (1)..(307): Ceres Seq. ID no. 2162655
MHLELYLVTTGFLILEGDNLHNLFPGFTIEMIGLRLNGKQAFMATVAFVIMPTLWWDNLSVLSYVSMSGVLATTVTLGSISWIGAFDGIGFHQKGKLINWSGIPTALSLYAFCYGAHPVLPTLYSSMKSKHQFNNVLLICFILCTIGYTSMAVLGYLMYGSQTLSQITLNLPIHKTSSKVAIYTTLVNPVAKYALMITPTVNTIKDWFPSRYSKKAYLHLLISTFFIISSVVIAETLPFFGYMMSLVGALLSVTVSILLPCLCYLKIFGNYKKIGCETIMLFGMVVMSVFVGVIGTYIALRDIIGSV

SEQ ID NO: 70170 - DNA, 1515 bp, Arabidopsis thaliana
  misc_feature (1)..(1515): Ceres Seq. ID no. 2163825
  misc_feature (1)..(1515): Ortholog of  Ceres SEQ ID NO 13663419 as cited in SEQ ID NO 66561
atgggtcggttagtagaagctatcattgcttcgatattattgtctttgtgttttacaataacaaagtcagctccaaaatctgctctcattaccaatcttcctggtttcaacggcacttttccatctaaacactatgccgggtatgtggcaatagataaacatcgtaataagaatctatggtattactttgtggaatctgagagaaatgcttcggtagatccagttgtgctttggcttaatggtggtccaggttgctctagcatggatggatttgtctacgagcacggtccattcaatttcgaaccaaaaaagaagaactcacatcttttgcatctcaatccttatagttggtccaaggtgtccaacatcatataccttgactctccagttggtgtgggattctcttactcaaatgacaacgccgattatacaactgatgatacaaaaaccgcgtctgatactcacacattccttctcgagtggtttaaaatgtttccggagtttcagtcaaatccgttctttatatcaggagaatcatatgctggtatctatgtgccaactcttgcggccgaggttgtcaaaggaaataaaaatgcaatgagaacaaacaaaacaagcaagaatgtgacaaagccggttatcaacttcaagggatatttggtgggtaatggtgttaccgatgaggtgtttgatggtaatgctcttgttcccttcactcatggcatgggactcatctctgatgaactctatgaggaaactaaattagtgtgcaacggaacatactataccggcggccagtcaggagtgagtaaagaatgtgctggcaaacttaaaacagtgtcagatactgtgaacttattgaacttatataacattctagaaccgtgctaccacggaacatctctatccgccttagatatcgagtttctgcctaagagtctccttactctaggcaaaacagaaaagccaatggcggtgagaaagagaatgtttggtcgtgcatggcctctaggtgccgttgtgcgtccaggcattgtacctagttggtctcaactcctcgctggctttggtgttccttgcattgacgatacagttgcgaccaaatggctaaacgatccagctgtaaggaaagcggttcatgctaaagaggaaaaagcgattggaaattgggagttatgttcaagcaacctcgaatataggcacgacaccggtagcatgatcgaataccatagaaacctcactcttagtggctttcgagctctcattttcagtggagatcatgatatgtgtgtaccatatactggctctgaagcatggactaaggcaatgggatacaaagtggttgatgaatggaggccatggatgtcaaataaccaagtcgccgggtttacacaagggtatgccaataatctcacatttctaaccatcaagggtgcaggacataccgttccagaatacaaaccgcgtgaatctttggacttctatagtcgtttcctagcaggagaaaagatatag

SEQ ID NO: 70171 - protein, 504 aa, Arabidopsis thaliana
  peptide (1)..(504): Ceres Seq. ID no. 2163826
MGRLVEAIIASILLSLCFTITKSAPKSALITNLPGFNGTFPSKHYAGYVAIDKHRNKNLWYYFVESERNASVDPVVLWLNGGPGCSSMDGFVYEHGPFNFEPKKKNSHLLHLNPYSWSKVSNIIYLDSPVGVGFSYSNDNADYTTDDTKTASDTHTFLLEWFKMFPEFQSNPFFISGESYAGIYVPTLAAEVVKGNKNAMRTNKTSKNVTKPVINFKGYLVGNGVTDEVFDGNALVPFTHGMGLISDELYEETKLVCNGTYYTGGQSGVSKECAGKLKTVSDTVNLLNLYNILEPCYHGTSLSALDIEFLPKSLLTLGKTEKPMAVRKRMFGRAWPLGAVVRPGIVPSWSQLLAGFGVPCIDDTVATKWLNDPAVRKAVHAKEEKAIGNWELCSSNLEYRHDTGSMIEYHRNLTLSGFRALIFSGDHDMCVPYTGSEAWTKAMGYKVVDEWRPWMSNNQVAGFTQGYANNLTFLTIKGAGHTVPEYKPRESLDFYSRFLAGEKI

SEQ ID NO: 70172 - protein, 417 aa, Arabidopsis thaliana
  peptide (1)..(417): Ceres Seq. ID no. 2163827
MDGFVYEHGPFNFEPKKKNSHLLHLNPYSWSKVSNIIYLDSPVGVGFSYSNDNADYTTDDTKTASDTHTFLLEWFKMFPEFQSNPFFISGESYAGIYVPTLAAEVVKGNKNAMRTNKTSKNVTKPVINFKGYLVGNGVTDEVFDGNALVPFTHGMGLISDELYEETKLVCNGTYYTGGQSGVSKECAGKLKTVSDTVNLLNLYNILEPCYHGTSLSALDIEFLPKSLLTLGKTEKPMAVRKRMFGRAWPLGAVVRPGIVPSWSQLLAGFGVPCIDDTVATKWLNDPAVRKAVHAKEEKAIGNWELCSSNLEYRHDTGSMIEYHRNLTLSGFRALIFSGDHDMCVPYTGSEAWTKAMGYKVVDEWRPWMSNNQVAGFTQGYANNLTFLTIKGAGHTVPEYKPRESLDFYSRFLAGEKI

SEQ ID NO: 70173 - protein, 341 aa, Arabidopsis thaliana
  peptide (1)..(341): Ceres Seq. ID no. 2163828
MFPEFQSNPFFISGESYAGIYVPTLAAEVVKGNKNAMRTNKTSKNVTKPVINFKGYLVGNGVTDEVFDGNALVPFTHGMGLISDELYEETKLVCNGTYYTGGQSGVSKECAGKLKTVSDTVNLLNLYNILEPCYHGTSLSALDIEFLPKSLLTLGKTEKPMAVRKRMFGRAWPLGAVVRPGIVPSWSQLLAGFGVPCIDDTVATKWLNDPAVRKAVHAKEEKAIGNWELCSSNLEYRHDTGSMIEYHRNLTLSGFRALIFSGDHDMCVPYTGSEAWTKAMGYKVVDEWRPWMSNNQVAGFTQGYANNLTFLTIKGAGHTVPEYKPRESLDFYSRFLAGEKI

SEQ ID NO: 70174 - DNA, 4101 bp, Arabidopsis thaliana
  misc_feature (1)..(4101): Ceres Seq. ID no. 2171501
  misc_feature (1)..(4101): Ortholog of  Ceres SEQ ID NO 12586556 as cited in SEQ ID NO 64667
  misc_feature (1)..(4101): Ortholog of  Ceres SEQ ID NO 13660894 as cited in SEQ ID NO 67475
atgagttctgtgggtgtatttgataaggtggaaatggatgagaagtcatatttagtatacacattaacacaaacaaaacacccaacctcttccgccgtggagtctagtggtgatgaccttcctctccaacctcttttttcttgtccctatgcacgtatcagatctcataagttcaaagtagagaagaactatgatggtgttaactttttcaactttcatccattcaattcttaccctcactttccaagaacaagaaccagttatcaacaaggcgaatctttacttgattatgatcaccataacatctgtaagttccctgtagtccctctgttttggtgcaacaataaaacccctgatagtaatgaattcgagtgtggtggatgtgaagagtcaaagactagcagaagctattatgcttgtcttgaatgtggaaacaagtttcacaagcaatgtgtagagtctccacttgagatcaaacacccttcacacccttttcattctcttcgactttatagtcatccaacacatatggtgtgcatttgttgtggaagacttgtgtctaacatgttttatcattgtgtgacatgcgatttgagtatggacccgatttgtgctatggaaccaataccctttgttgtagaccatcctaaaagccatccccaccctattacctttttccctacacaagctactttggcttgcaatatttgtggccttgttaagatgcttgatcccacatacatttgtatccaatgtgtcttcgtcatccataaagattgtatgggttacccacatgtcattagaatatctcgtcaccaacaccggatctcttttgcctcttctctaccatatggaaatttgtcttgtggggtttgtcatcaacgtgttgacaacaattatggagcatattcttgtggtaaatgtgatgcttattttgttcattcaaaatgtgcatttcatagaaatgtgtgggatggaaaagaactcgaaggtgtatcagaagaagatgatataatagatgatggtgagccatttgagaggatatctgatggagtaatactccatccatatcacagtcaccatctacgacttgagatcagcaaagtttatgatgaaaataagtattgtcgagggtgttctttcccaatctacgaaggccagttctattcatgcatggaatgtgacttcatcctccatgaaagttgtgcaaatgctccacgcatgaaacgacatcccttacatccacatccacttactctaaatgttgccacaaaggagcttggtaataacgaaggcgtataccattgtaatgtttgtggtcgtgatggtactggcttcttctatgaacatcatataggcgaaagaagattccggctagacttgagatgtgcctcgattcgtgaaccatttgaatatcaatgccacaaacatcccttatgcatagcttcggagctagagaaaaaggtacgatgtcaaatatgcaaagggaaaagctattcgaaattaaattgcatggaatgcgattatattatatgttttcgttgcgctaccttcccatacaaggtaaggtacaagcacgacagtcattttcttagaattcgcgatgggaaaaaggcaagtgatgaaccagactggtgtgaggtttgcgaaggcaaaatagaagaagtaaaagaaagagagtctccgtgggacaaaagacgagaaatgcgattttataaatgcaatgactgttgcacgactcttcatgttgaatgtttacttgggagagacatgtacatgaaacctggtaatagtgtaaaagattacatttctaagcactcactaggaattgaaggtacgcaatggacagatgttcgagtctttctcaacagttcgctctcccgaccaatatgcaccggatgtatgcgccgttgtctattcccaatagttttcaaaggctacaacacaatcttttgttcttgggagtgtattggatatggcgacacagtgtttgagcatccaacaatgaccggagtttcttctgcttttggccgtcttttcaaacaagataaaacccacaagcgtgttatcggcaccggaaccaaacttacagtgacccgtcagattcttgagcatctcgaaggcggtaatgtctcgaaagccgtctctgttctctttgcttctccagagccagttagttattggctatacgagcgtcttttccgttcttgttcctcgaaagctcttgttgtgcaagcccgtaaagtccaatctcacttagtaactttctctccgttgcctccgattttcctcttgaacagagccattgaggcttatggtaaatgtgggtgtgttgatgatgcacgagagctgttcgaggaaatgcctgaacgagatggtgggtcttggaacgctgtgattactgcttgtgcgcaaaacggtgtctctgatgaggtgtttcgtatgtttcgtagaatgaatagagatggcgtacgagctacggagacttcttttgctggtgttttaaagtcatgtggtttaatcttggacttgagattattgaggcagctgcattgtgctgtggtgaagtatgggtattcggggaatgtagatttggagacttcgattgttgatgtttatgggaagtgtcgggtgatgagtgatgcgagaagagtgtttgatgagattgtaaaccctagtgatgtatcttggaatgtgattgtgcggcggtatcttgagatggggtttaatgatgaggcagtggtgatgtttttcaagatgctggagttgaatgttcgacctttgaatcacacggtttctagtgtaatgttagcttgttcgagatccttggcccttgaggtgggaaaggtaatccatgccattgctgtgaaacttagtgttgtggcagatacagttgtttctacttctgtatttgatatgtatgtaaaatgtgacagattggagagtgctcgcagagtatttgaccaaactagatctaaagatttgaaatcttggacttcggcgatgtcgggatatgcaatgagtggtttaactagagaggcaagggagctctttgatttgatgcctgaacggaatatagtctcatggaacgcaatgttgggcggatatgtacatgcccatgaatgggatgaggcactggattttctcactttgatgcgccaggagattgaaaatattgataatgtcactcttgtgtggatcctaaatgtctgctctggtatatcagatgttcaaatggggaagcaagctcatggttttatctaccgacatggatatgatacgaatgtaattgtagccaatgcacttcttgatatgtatggaaaatgcgggaccttgcagagtgccaatatttggttccgccaaatgagtgaactaagggatgaggtttcatggaatgctttattgactggtgtagctcgagttggcaggagtgaacaagccttatctttctttgaagggatgcaagtggaggccaaaccaagcaaatacacactggcaacgctcttagcaggttgtgcgaacattcctgctttaaatttaggcaaagcaatccacggattcctgatcagagatggctataaaattgatgttgttatacggggtgcaatggttgacatgtattccaaatgccgatgtttcgactatgctatcgaagtattcaaagaggcagctacacgggacttgattctatggaactctattatccgtggatgttgtcgtaatggaagaagcaaggaggtctttgagttgttcatgcttttggaaaatgaaggagttaagcctgaccatgtcacctttttgggaatcttacaagcttgcatacgtgaaggtcatgtcgaactcggttttcagtatttcagttctatgagcaccaaatatcatatatcaccacaggttgagcattatgattgtatgattgaactctactgcaagtatggatgcttgcatcagcttgaagaatttctcctcttgatgccttttgatccacctatgcaaatgttgacaaggataaatgatgcttgccaaagataccgctggtcaaagttaggagcatgggctgctaaacggcttatgaatgatcattaccttcagccaccatga

SEQ ID NO: 70175 - protein, 1366 aa, Arabidopsis thaliana
  peptide (1)..(1366): Ceres Seq. ID no. 2171502
MSSVGVFDKVEMDEKSYLVYTLTQTKHPTSSAVESSGDDLPLQPLFSCPYARIRSHKFKVEKNYDGVNFFNFHPFNSYPHFPRTRTSYQQGESLLDYDHHNICKFPVVPLFWCNNKTPDSNEFECGGCEESKTSRSYYACLECGNKFHKQCVESPLEIKHPSHPFHSLRLYSHPTHMVCICCGRLVSNMFYHCVTCDLSMDPICAMEPIPFVVDHPKSHPHPITFFPTQATLACNICGLVKMLDPTYICIQCVFVIHKDCMGYPHVIRISRHQHRISFASSLPYGNLSCGVCHQRVDNNYGAYSCGKCDAYFVHSKCAFHRNVWDGKELEGVSEEDDIIDDGEPFERISDGVILHPYHSHHLRLEISKVYDENKYCRGCSFPIYEGQFYSCMECDFILHESCANAPRMKRHPLHPHPLTLNVATKELGNNEGVYHCNVCGRDGTGFFYEHHIGERRFRLDLRCASIREPFEYQCHKHPLCIASELEKKVRCQICKGKSYSKLNCMECDYIICFRCATFPYKVRYKHDSHFLRIRDGKKASDEPDWCEVCEGKIEEVKERESPWDKRREMRFYKCNDCCTTLHVECLLGRDMYMKPGNSVKDYISKHSLGIEGTQWTDVRVFLNSSLSRPICTGCMRRCLFPIVFKGYNTIFCSWECIGYGDTVFEHPTMTGVSSAFGRLFKQDKTHKRVIGTGTKLTVTRQILEHLEGGNVSKAVSVLFASPEPVSYWLYERLFRSCSSKALVVQARKVQSHLVTFSPLPPIFLLNRAIEAYGKCGCVDDARELFEEMPERDGGSWNAVITACAQNGVSDEVFRMFRRMNRDGVRATETSFAGVLKSCGLILDLRLLRQLHCAVVKYGYSGNVDLETSIVDVYGKCRVMSDARRVFDEIVNPSDVSWNVIVRRYLEMGFNDEAVVMFFKMLELNVRPLNHTVSSVMLACSRSLALEVGKVIHAIAVKLSVVADTVVSTSVFDMYVKCDRLESARRVFDQTRSKDLKSWTSAMSGYAMSGLTREARELFDLMPERNIVSWNAMLGGYVHAHEWDEALDFLTLMRQEIENIDNVTLVWILNVCSGISDVQMGKQAHGFIYRHGYDTNVIVANALLDMYGKCGTLQSANIWFRQMSELRDEVSWNALLTGVARVGRSEQALSFFEGMQVEAKPSKYTLATLLAGCANIPALNLGKAIHGFLIRDGYKIDVVIRGAMVDMYSKCRCFDYAIEVFKEAATRDLILWNSIIRGCCRNGRSKEVFELFMLLENEGVKPDHVTFLGILQACIREGHVELGFQYFSSMSTKYHISPQVEHYDCMIELYCKYGCLHQLEEFLLLMPFDPPMQMLTRINDACQRYRWSKLGAWAAKRLMNDHYLQPP

SEQ ID NO: 70176 - protein, 1355 aa, Arabidopsis thaliana
  peptide (1)..(1355): Ceres Seq. ID no. 2171503
MDEKSYLVYTLTQTKHPTSSAVESSGDDLPLQPLFSCPYARIRSHKFKVEKNYDGVNFFNFHPFNSYPHFPRTRTSYQQGESLLDYDHHNICKFPVVPLFWCNNKTPDSNEFECGGCEESKTSRSYYACLECGNKFHKQCVESPLEIKHPSHPFHSLRLYSHPTHMVCICCGRLVSNMFYHCVTCDLSMDPICAMEPIPFVVDHPKSHPHPITFFPTQATLACNICGLVKMLDPTYICIQCVFVIHKDCMGYPHVIRISRHQHRISFASSLPYGNLSCGVCHQRVDNNYGAYSCGKCDAYFVHSKCAFHRNVWDGKELEGVSEEDDIIDDGEPFERISDGVILHPYHSHHLRLEISKVYDENKYCRGCSFPIYEGQFYSCMECDFILHESCANAPRMKRHPLHPHPLTLNVATKELGNNEGVYHCNVCGRDGTGFFYEHHIGERRFRLDLRCASIREPFEYQCHKHPLCIASELEKKVRCQICKGKSYSKLNCMECDYIICFRCATFPYKVRYKHDSHFLRIRDGKKASDEPDWCEVCEGKIEEVKERESPWDKRREMRFYKCNDCCTTLHVECLLGRDMYMKPGNSVKDYISKHSLGIEGTQWTDVRVFLNSSLSRPICTGCMRRCLFPIVFKGYNTIFCSWECIGYGDTVFEHPTMTGVSSAFGRLFKQDKTHKRVIGTGTKLTVTRQILEHLEGGNVSKAVSVLFASPEPVSYWLYERLFRSCSSKALVVQARKVQSHLVTFSPLPPIFLLNRAIEAYGKCGCVDDARELFEEMPERDGGSWNAVITACAQNGVSDEVFRMFRRMNRDGVRATETSFAGVLKSCGLILDLRLLRQLHCAVVKYGYSGNVDLETSIVDVYGKCRVMSDARRVFDEIVNPSDVSWNVIVRRYLEMGFNDEAVVMFFKMLELNVRPLNHTVSSVMLACSRSLALEVGKVIHAIAVKLSVVADTVVSTSVFDMYVKCDRLESARRVFDQTRSKDLKSWTSAMSGYAMSGLTREARELFDLMPERNIVSWNAMLGGYVHAHEWDEALDFLTLMRQEIENIDNVTLVWILNVCSGISDVQMGKQAHGFIYRHGYDTNVIVANALLDMYGKCGTLQSANIWFRQMSELRDEVSWNALLTGVARVGRSEQALSFFEGMQVEAKPSKYTLATLLAGCANIPALNLGKAIHGFLIRDGYKIDVVIRGAMVDMYSKCRCFDYAIEVFKEAATRDLILWNSIIRGCCRNGRSKEVFELFMLLENEGVKPDHVTFLGILQACIREGHVELGFQYFSSMSTKYHISPQVEHYDCMIELYCKYGCLHQLEEFLLLMPFDPPMQMLTRINDACQRYRWSKLGAWAAKRLMNDHYLQPP

SEQ ID NO: 70177 - protein, 1190 aa, Arabidopsis thaliana
  peptide (1)..(1190): Ceres Seq. ID no. 2171504
MVCICCGRLVSNMFYHCVTCDLSMDPICAMEPIPFVVDHPKSHPHPITFFPTQATLACNICGLVKMLDPTYICIQCVFVIHKDCMGYPHVIRISRHQHRISFASSLPYGNLSCGVCHQRVDNNYGAYSCGKCDAYFVHSKCAFHRNVWDGKELEGVSEEDDIIDDGEPFERISDGVILHPYHSHHLRLEISKVYDENKYCRGCSFPIYEGQFYSCMECDFILHESCANAPRMKRHPLHPHPLTLNVATKELGNNEGVYHCNVCGRDGTGFFYEHHIGERRFRLDLRCASIREPFEYQCHKHPLCIASELEKKVRCQICKGKSYSKLNCMECDYIICFRCATFPYKVRYKHDSHFLRIRDGKKASDEPDWCEVCEGKIEEVKERESPWDKRREMRFYKCNDCCTTLHVECLLGRDMYMKPGNSVKDYISKHSLGIEGTQWTDVRVFLNSSLSRPICTGCMRRCLFPIVFKGYNTIFCSWECIGYGDTVFEHPTMTGVSSAFGRLFKQDKTHKRVIGTGTKLTVTRQILEHLEGGNVSKAVSVLFASPEPVSYWLYERLFRSCSSKALVVQARKVQSHLVTFSPLPPIFLLNRAIEAYGKCGCVDDARELFEEMPERDGGSWNAVITACAQNGVSDEVFRMFRRMNRDGVRATETSFAGVLKSCGLILDLRLLRQLHCAVVKYGYSGNVDLETSIVDVYGKCRVMSDARRVFDEIVNPSDVSWNVIVRRYLEMGFNDEAVVMFFKMLELNVRPLNHTVSSVMLACSRSLALEVGKVIHAIAVKLSVVADTVVSTSVFDMYVKCDRLESARRVFDQTRSKDLKSWTSAMSGYAMSGLTREARELFDLMPERNIVSWNAMLGGYVHAHEWDEALDFLTLMRQEIENIDNVTLVWILNVCSGISDVQMGKQAHGFIYRHGYDTNVIVANALLDMYGKCGTLQSANIWFRQMSELRDEVSWNALLTGVARVGRSEQALSFFEGMQVEAKPSKYTLATLLAGCANIPALNLGKAIHGFLIRDGYKIDVVIRGAMVDMYSKCRCFDYAIEVFKEAATRDLILWNSIIRGCCRNGRSKEVFELFMLLENEGVKPDHVTFLGILQACIREGHVELGFQYFSSMSTKYHISPQVEHYDCMIELYCKYGCLHQLEEFLLLMPFDPPMQMLTRINDACQRYRWSKLGAWAAKRLMNDHYLQPP

SEQ ID NO: 70178 - DNA, 837 bp, Arabidopsis thaliana
  misc_feature (1)..(837): Ceres Seq. ID no. 2172075
  misc_feature (1)..(837): Ortholog of  Ceres SEQ ID NO 15178924 as cited in SEQ ID NO 1050
  misc_feature (1)..(837): Ortholog of  Ceres SEQ ID NO 13661768 as cited in SEQ ID NO 61427
atgtattcttcatcatctgtatcaaaacgcttcgttctagtccctattgtggtcgtggtgaccacacaactcctcctggtacgtaacgtttcttcactaaaccttaccaattcgtatcttcaccacaaatgcgtagtcaatcaagggaaatacaagccaggaagcaagtacgagaaatccctcgatgatatcatccaaagcttttcgaataaagataaagattcgtatggttttcgtaccggttacagcatgaaggcctacggtaaagaacctgatatggtctccatcacctaccagtgccgtatcgactctcgtgggcccaagtgccagtcctgcgttgtcacggccggttatgagcttcttcgtaagagatgtccgagatataaagaggcaataatatggtacgaccaatgtcttgtggagttttcttcgttagatacttctgggcagatcaattacgacgacaacttctgtatgcctagcgcgaagaacctgatcggcaattcaatctctcttgaagaaaggttgcatctcctcaacaatcttacaaagatagccgtcacgaaaatagataaaaacatagaaggtataaaaaaaccagtactgtatgcggcgggggagaagagactcgggacgaaaagtctatacggaatggtgcaatgttcggctgacttatctgttcagggttgtaatgagtgtatgttatattatatagtgcattttcaagagtgctgggaaagtaaacaaggagtaagagttttgagtagaagctgtaactttaggtatgagctttacccttttattagccccaagggttcttactataccaagttctaa

SEQ ID NO: 70179 - protein, 278 aa, Arabidopsis thaliana
  peptide (1)..(278): Ceres Seq. ID no. 2172076
MYSSSSVSKRFVLVPIVVVVTTQLLLVRNVSSLNLTNSYLHHKCVVNQGKYKPGSKYEKSLDDIIQSFSNKDKDSYGFRTGYSMKAYGKEPDMVSITYQCRIDSRGPKCQSCVVTAGYELLRKRCPRYKEAIIWYDQCLVEFSSLDTSGQINYDDNFCMPSAKNLIGNSISLEERLHLLNNLTKIAVTKIDKNIEGIKKPVLYAAGEKRLGTKSLYGMVQCSADLSVQGCNECMLYYIVHFQECWESKQGVRVLSRSCNFRYELYPFISPKGSYYTKF

SEQ ID NO: 70180 - protein, 195 aa, Arabidopsis thaliana
  peptide (1)..(195): Ceres Seq. ID no. 2172077
MKAYGKEPDMVSITYQCRIDSRGPKCQSCVVTAGYELLRKRCPRYKEAIIWYDQCLVEFSSLDTSGQINYDDNFCMPSAKNLIGNSISLEERLHLLNNLTKIAVTKIDKNIEGIKKPVLYAAGEKRLGTKSLYGMVQCSADLSVQGCNECMLYYIVHFQECWESKQGVRVLSRSCNFRYELYPFISPKGSYYTKF

SEQ ID NO: 70181 - protein, 186 aa, Arabidopsis thaliana
  peptide (1)..(186): Ceres Seq. ID no. 2172078
MVSITYQCRIDSRGPKCQSCVVTAGYELLRKRCPRYKEAIIWYDQCLVEFSSLDTSGQINYDDNFCMPSAKNLIGNSISLEERLHLLNNLTKIAVTKIDKNIEGIKKPVLYAAGEKRLGTKSLYGMVQCSADLSVQGCNECMLYYIVHFQECWESKQGVRVLSRSCNFRYELYPFISPKGSYYTKF

SEQ ID NO: 70182 - DNA, 777 bp, Arabidopsis thaliana
  misc_feature (1)..(777): Ceres Seq. ID no. 2172123
  misc_feature (1)..(777): Ortholog of  Ceres SEQ ID NO 13661768 as cited in SEQ ID NO 61427
  misc_feature (1)..(777): Ortholog of  Ceres SEQ ID NO 15179239 as cited in SEQ ID NO 0
atgtactcttcatattctctatcaaaacgcctcatttatgtccctatcctggccatccaattcctcctcgtacgcagcgtttcatcactaaaccttaccaatgagtatcttaaccacaaatgcttcgtcagtgaagggaaatataagcatggtgataagtacgagaataacctcaacgttctcaacaagaatgtcctttcttatgatcttactagcggttttctacacgtttctcatggcgagggtcctgattccgtcaccatcatattacaatgtcgtggcgactccttcgggtcgaattgccgctcttgctataccaccgccatcgacgggtttcataggagatgtcagagaaacaaagggggaattatatggtacgaccaatgttttcttgttatttctacgatcaaaccccaactcccaaggaagattgatttcaaaaacactttctcaatgcacaacccaaacaacgtgagcagtgaaccaggatcgtttgacaagatgacaagggatttcctctacaagctggtgcagaaagcctcttatccaaccgtggtcgaacaccagtctacatattatgctgcgggggagaaaaaactcgggaaaaggaagctgtatgcaatgatgcagtgtgcatcggacatattgcaatgtaaggtttgtttggaatggtgtatcagagagcttcccaagtgttgtgatggtaaacaaggagggagaattttgggtatgagttgtaatcttaggtatgagctatacccttttcttcggcgttaa

SEQ ID NO: 70183 - protein, 258 aa, Arabidopsis thaliana
  peptide (1)..(258): Ceres Seq. ID no. 2172124
MYSSYSLSKRLIYVPILAIQFLLVRSVSSLNLTNEYLNHKCFVSEGKYKHGDKYENNLNVLNKNVLSYDLTSGFLHVSHGEGPDSVTIILQCRGDSFGSNCRSCYTTAIDGFHRRCQRNKGGIIWYDQCFLVISTIKPQLPRKIDFKNTFSMHNPNNVSSEPGSFDKMTRDFLYKLVQKASYPTVVEHQSTYYAAGEKKLGKRKLYAMMQCASDILQCKVCLEWCIRELPKCCDGKQGGRILGMSCNLRYELYPFLRR

SEQ ID NO: 70184 - DNA, 1974 bp, Arabidopsis thaliana
  misc_feature (1)..(1974): Ceres Seq. ID no. 2172709
  misc_feature (1)..(1974): Ortholog of  Ceres SEQ ID NO 15176685 as cited in SEQ ID NO 58334
atgggtgggctttgttcaaggagttcatctgtaaataatgctcctggtggaacctttgcacatgttaatggtcatcatctcaataacaatgcctctgacttgaattctcattctggtgaaagtggacttaaagatgatccttctcctgttaccgagaatgttgatgataataagcatacatcggaatcgttttcgtttcctatagtctctagtggatctcatcctcaaaatatcgaggatgggattcctcggttatcgagggttttatctcagaaatctagatccactaagtctagacaagctgctgttgctaaggtttcggaagtaagctctcttttgggtagggctggtactatgggacttggtaaagctgtggatgtgttggatacactcgggagtagtatgacgaatctgaatcttagtggggggttttcttctgcgacgacggtgaaagggaataagatatcaatcttgtcttttgaagttgctaatactattgttaaaggcgccaatcttatgcattctctttcgaaagatagcattactcatttgaaagaggttgtgttaccttcagaaggtgttcagaacctgatatcgaaagacatggatgaactgttgagaattgctgctgctgataaaagggaagagttgaggattttttctggagaggtggtgcgttttgggaatcgttgcaaggatcctcaataccacaacctggatcgtttctttgacaggttgggctctgaatttacaccccagaaacacttgaaacaggaagcagagaccattatgcaccagatgatgtcatttgttcattttacagctgacttgtatcatgaactccatgcgctggataggtttgaacaagattaccaacgtaagatccaggaagaagagaacccaagcacagcacaacgaggtgtgggagataccctcgctatcttgagaactgaattaaagagtcagaagaagcatgttagaaacttaaagaaaaagtctctttggtctaggatcttggaagaggtgatggagaaactagtagatgttgtccatttcttgcatttagagattcacgaagcctttggtggtgcggatcctgataagcctgcaaatgacccgccaatcaatcataaaaaactgggctctgctggtcttgccttgcattacgcaaacatcattactcaaattgatactcttgtgtcccggtctagcactatgcctgcaagcacaagagatgctttgtaccaaggtttacccccaagcataaaatctgctttacgctccagaatacagtccttccaggttaaagaagagctcactgttcctcaaataaaagctgaaatggaaaaaacattgcagtggcttgttcctgttgctacaaacaccaccaaagcgcatcatggttttggatgggttggagaatgggcaagttccgggtcggaggcgaaccagagacctgcaggtcaaaccatactaaggatagatactcttcaccatgcagataaagaaaaaaccgaggcttacatattagacctggtggtgtggctccatcatctcgttacccaagtcagggccactacaggttatggcctaagatctcctgttaagtctccaatcagatcacctaaccagaaaacgatccaactctccagcggttcacacaacccgagtatgggtttgccattgctgactacggaggatcaagagatgcttagagatgtaagcaagcggagaaagacgccaggaataagcaagagccaagagtttgaaacggtggctaaagcacgtctttgtaagcaccataggctaagcaaaagcagtagccactcaccaatgatgggcgagatgatgaagaataagaaggatactttctcaaccagaagaccttcttctgttcccatcattgattttgacattgatcgcatgaaagctctcgatgtgattgatcgcgtggacaccattcgaagcttgtag

SEQ ID NO: 70185 - protein, 657 aa, Arabidopsis thaliana
  peptide (1)..(657): Ceres Seq. ID no. 2172710
MGGLCSRSSSVNNAPGGTFAHVNGHHLNNNASDLNSHSGESGLKDDPSPVTENVDDNKHTSESFSFPIVSSGSHPQNIEDGIPRLSRVLSQKSRSTKSRQAAVAKVSEVSSLLGRAGTMGLGKAVDVLDTLGSSMTNLNLSGGFSSATTVKGNKISILSFEVANTIVKGANLMHSLSKDSITHLKEVVLPSEGVQNLISKDMDELLRIAAADKREELRIFSGEVVRFGNRCKDPQYHNLDRFFDRLGSEFTPQKHLKQEAETIMHQMMSFVHFTADLYHELHALDRFEQDYQRKIQEEENPSTAQRGVGDTLAILRTELKSQKKHVRNLKKKSLWSRILEEVMEKLVDVVHFLHLEIHEAFGGADPDKPANDPPINHKKLGSAGLALHYANIITQIDTLVSRSSTMPASTRDALYQGLPPSIKSALRSRIQSFQVKEELTVPQIKAEMEKTLQWLVPVATNTTKAHHGFGWVGEWASSGSEANQRPAGQTILRIDTLHHADKEKTEAYILDLVVWLHHLVTQVRATTGYGLRSPVKSPIRSPNQKTIQLSSGSHNPSMGLPLLTTEDQEMLRDVSKRRKTPGISKSQEFETVAKARLCKHHRLSKSSSHSPMMGEMMKNKKDTFSTRRPSSVPIIDFDIDRMKALDVIDRVDTIRSL

SEQ ID NO: 70186 - protein, 539 aa, Arabidopsis thaliana
  peptide (1)..(539): Ceres Seq. ID no. 2172711
MGLGKAVDVLDTLGSSMTNLNLSGGFSSATTVKGNKISILSFEVANTIVKGANLMHSLSKDSITHLKEVVLPSEGVQNLISKDMDELLRIAAADKREELRIFSGEVVRFGNRCKDPQYHNLDRFFDRLGSEFTPQKHLKQEAETIMHQMMSFVHFTADLYHELHALDRFEQDYQRKIQEEENPSTAQRGVGDTLAILRTELKSQKKHVRNLKKKSLWSRILEEVMEKLVDVVHFLHLEIHEAFGGADPDKPANDPPINHKKLGSAGLALHYANIITQIDTLVSRSSTMPASTRDALYQGLPPSIKSALRSRIQSFQVKEELTVPQIKAEMEKTLQWLVPVATNTTKAHHGFGWVGEWASSGSEANQRPAGQTILRIDTLHHADKEKTEAYILDLVVWLHHLVTQVRATTGYGLRSPVKSPIRSPNQKTIQLSSGSHNPSMGLPLLTTEDQEMLRDVSKRRKTPGISKSQEFETVAKARLCKHHRLSKSSSHSPMMGEMMKNKKDTFSTRRPSSVPIIDFDIDRMKALDVIDRVDTIRSL

SEQ ID NO: 70187 - protein, 523 aa, Arabidopsis thaliana
  peptide (1)..(523): Ceres Seq. ID no. 2172712
MTNLNLSGGFSSATTVKGNKISILSFEVANTIVKGANLMHSLSKDSITHLKEVVLPSEGVQNLISKDMDELLRIAAADKREELRIFSGEVVRFGNRCKDPQYHNLDRFFDRLGSEFTPQKHLKQEAETIMHQMMSFVHFTADLYHELHALDRFEQDYQRKIQEEENPSTAQRGVGDTLAILRTELKSQKKHVRNLKKKSLWSRILEEVMEKLVDVVHFLHLEIHEAFGGADPDKPANDPPINHKKLGSAGLALHYANIITQIDTLVSRSSTMPASTRDALYQGLPPSIKSALRSRIQSFQVKEELTVPQIKAEMEKTLQWLVPVATNTTKAHHGFGWVGEWASSGSEANQRPAGQTILRIDTLHHADKEKTEAYILDLVVWLHHLVTQVRATTGYGLRSPVKSPIRSPNQKTIQLSSGSHNPSMGLPLLTTEDQEMLRDVSKRRKTPGISKSQEFETVAKARLCKHHRLSKSSSHSPMMGEMMKNKKDTFSTRRPSSVPIIDFDIDRMKALDVIDRVDTIRSL

SEQ ID NO: 70188 - DNA, 1134 bp, Arabidopsis thaliana
  misc_feature (1)..(1134): Ceres Seq. ID no. 2173491
  misc_feature (1)..(1134): Ortholog of  Ceres SEQ ID NO 15176219 as cited in SEQ ID NO 58640
  misc_feature (1)..(1134): Ortholog of  Ceres SEQ ID NO 14303413 as cited in SEQ ID NO 59769
atgagttttttcagatcaaagacttcaaaaactgaaacacaacaaccatcatcgtatggacaacaacaagacgctatgtactcatcttacggaaccgtgagtgacgaagtgttattacagattcatggatgcagagctcatctcatcaacggatccgaagctgtggagctagccgccggagacttcgagcttgtacaagtcttagacagcaacgtagccttagctatggtcgtgaggatcggaaatgacttacaatggccggtgattaaagacgagccagtggtgaaacttgactctcgtgactacctcttcacgttgccggttaaagatggagagccacttagttacggcatcacgtttttccctattgatgaaaatgacatcgtttttgtgaatagtatcgagttgctagacgatttcttgagagagaattcttgtttctcttcgtctccgtcttcttcttcgtcttcttcttcgtcttcttcttcgagtgttaacaatggaattgattggaaagagtttgcgcctaagattgaagattataacaatgttgtagctaaagctattgcaggaggtacagggcatatcattagagggatgtttaaatgcagtaatgcttacactaatcaggttcataaaggaggtgaaattatgattacgaaggctgagaaaaagaatggtgcctcgtcaaaaagaaatgcaaccacaaacaagaatcaaatcaacaagaaccttcaacgagtaaggaaattgtctagggcgacggagaaattgagcaagacaatgttgaatggtgtgggagtggtgagtggctcggtgatgggtccagttgtaaagtcgaagccagggaaagcttttttctcaatggttccaggggaggttctattggcttcacttgatgctcttaataaattactagacgctgctgaagccgcagagagacaaactctttctgctacgtccaaagctctacaagaatggttaggtgagagcgcgggagaagctacgaaagatgtactaggcacggttgggcacgcagccggcactgcgtggaacgtcttcaatatccgcaaagctttctctccttcctcttcagtcacatcggggatcctcaaaaacgcttcacgaaagtga

SEQ ID NO: 70189 - protein, 377 aa, Arabidopsis thaliana
  peptide (1)..(377): Ceres Seq. ID no. 2173492
MSFFRSKTSKTETQQPSSYGQQQDAMYSSYGTVSDEVLLQIHGCRAHLINGSEAVELAAGDFELVQVLDSNVALAMVVRIGNDLQWPVIKDEPVVKLDSRDYLFTLPVKDGEPLSYGITFFPIDENDIVFVNSIELLDDFLRENSCFSSSPSSSSSSSSSSSSSVNNGIDWKEFAPKIEDYNNVVAKAIAGGTGHIIRGMFKCSNAYTNQVHKGGEIMITKAEKKNGASSKRNATTNKNQINKNLQRVRKLSRATEKLSKTMLNGVGVVSGSVMGPVVKSKPGKAFFSMVPGEVLLASLDALNKLLDAAEAAERQTLSATSKALQEWLGESAGEATKDVLGTVGHAAGTAWNVFNIRKAFSPSSSVTSGILKNASRK

SEQ ID NO: 70190 - protein, 352 aa, Arabidopsis thaliana
  peptide (1)..(352): Ceres Seq. ID no. 2173493
MYSSYGTVSDEVLLQIHGCRAHLINGSEAVELAAGDFELVQVLDSNVALAMVVRIGNDLQWPVIKDEPVVKLDSRDYLFTLPVKDGEPLSYGITFFPIDENDIVFVNSIELLDDFLRENSCFSSSPSSSSSSSSSSSSSVNNGIDWKEFAPKIEDYNNVVAKAIAGGTGHIIRGMFKCSNAYTNQVHKGGEIMITKAEKKNGASSKRNATTNKNQINKNLQRVRKLSRATEKLSKTMLNGVGVVSGSVMGPVVKSKPGKAFFSMVPGEVLLASLDALNKLLDAAEAAERQTLSATSKALQEWLGESAGEATKDVLGTVGHAAGTAWNVFNIRKAFSPSSSVTSGILKNASRK

SEQ ID NO: 70191 - protein, 302 aa, Arabidopsis thaliana
  peptide (1)..(302): Ceres Seq. ID no. 2173494
MVVRIGNDLQWPVIKDEPVVKLDSRDYLFTLPVKDGEPLSYGITFFPIDENDIVFVNSIELLDDFLRENSCFSSSPSSSSSSSSSSSSSVNNGIDWKEFAPKIEDYNNVVAKAIAGGTGHIIRGMFKCSNAYTNQVHKGGEIMITKAEKKNGASSKRNATTNKNQINKNLQRVRKLSRATEKLSKTMLNGVGVVSGSVMGPVVKSKPGKAFFSMVPGEVLLASLDALNKLLDAAEAAERQTLSATSKALQEWLGESAGEATKDVLGTVGHAAGTAWNVFNIRKAFSPSSSVTSGILKNASRK

SEQ ID NO: 70192 - DNA, 630 bp, Arabidopsis thaliana
  misc_feature (1)..(630): Ceres Seq. ID no. 2174168
  misc_feature (1)..(630): Ortholog of  Ceres SEQ ID NO 14304408 as cited in SEQ ID NO 58051
  misc_feature (1)..(630): Ortholog of  Ceres SEQ ID NO 14314759 as cited in SEQ ID NO 59915
  misc_feature (1)..(630): Ortholog of  Ceres SEQ ID NO 13661769 as cited in SEQ ID NO 61435
  misc_feature (1)..(630): Ortholog of  Ceres SEQ ID NO 13600585 as cited in SEQ ID NO 0
atggccaaagcatataacttggacgatttaggagaaacgagtgataacagtacactagaatgtttacaaacgaacaagtgtccaattcagatgcaagactcttcctctcacgaatcgcaacgtaacctccggtcaccggtgccggagaaaaccggaaagagttctaagactaaaaatgagcaaaaaggtgtttctaaacaaccaaattttcgtggggtcagaatgagacaatggggaaaatgggtgtctgaaattagagaaccaagaaagaaatcaagaatatggctcggtactttctctacgccggagatggcggcgcgtgcacacgacgtggcggctttagccatcaaaggtggctctgcccaccttaatttcccggagctagcttaccatttgccgagaccggctagcgcggaccctaaagacattcaagaagccgccgccgcagcagctgccgttgactggaaagcaccggagtctccgtctagcaccgtgacgtcatctccagtcgccgacgacgctttctccgatcttcctgatcttttgcttgacgtgaatgatcacaacaaaaacgatggattctgggactcgtttccgtacgaagatcctttcttcttggaaaattactag

SEQ ID NO: 70193 - protein, 209 aa, Arabidopsis thaliana
  peptide (1)..(209): Ceres Seq. ID no. 2174169
MAKAYNLDDLGETSDNSTLECLQTNKCPIQMQDSSSHESQRNLRSPVPEKTGKSSKTKNEQKGVSKQPNFRGVRMRQWGKWVSEIREPRKKSRIWLGTFSTPEMAARAHDVAALAIKGGSAHLNFPELAYHLPRPASADPKDIQEAAAAAAAVDWKAPESPSSTVTSSPVADDAFSDLPDLLLDVNDHNKNDGFWDSFPYEDPFFLENY

SEQ ID NO: 70194 - protein, 179 aa, Arabidopsis thaliana
  peptide (1)..(179): Ceres Seq. ID no. 2174170
MQDSSSHESQRNLRSPVPEKTGKSSKTKNEQKGVSKQPNFRGVRMRQWGKWVSEIREPRKKSRIWLGTFSTPEMAARAHDVAALAIKGGSAHLNFPELAYHLPRPASADPKDIQEAAAAAAAVDWKAPESPSSTVTSSPVADDAFSDLPDLLLDVNDHNKNDGFWDSFPYEDPFFLENY

SEQ ID NO: 70195 - protein, 135 aa, Arabidopsis thaliana
  peptide (1)..(135): Ceres Seq. ID no. 2174171
MRQWGKWVSEIREPRKKSRIWLGTFSTPEMAARAHDVAALAIKGGSAHLNFPELAYHLPRPASADPKDIQEAAAAAAAVDWKAPESPSSTVTSSPVADDAFSDLPDLLLDVNDHNKNDGFWDSFPYEDPFFLENY

SEQ ID NO: 70196 - DNA, 3984 bp, Arabidopsis thaliana
  misc_feature (1)..(3984): Ceres Seq. ID no. 2174607
  misc_feature (1)..(3984): Ortholog of  Ceres SEQ ID NO 13599900 as cited in SEQ ID NO 531
atgggtgtcgaggattatcatgtgatagagcttgtcggtgaaggatcttttgggagggtttacaaaggaagacgcaagtataccggccagacggtggcgatgaagttcatcatgaaacaaggaaagactgacaaggatatacatagtctaaggcaagaaatcgagatattgcggaagctcaagcatgagaatatcattgaaatgctcgactcctttgaaaacgcacgagagttctgtgtcgtcactgagtttgcccaaggtgaattgtttgagattcttgaagatgacaagtgccttcccgaagagcaagttcaagcaatcgcaaagcaattggtaaaagcattagattacttgcattccaaccgtataattcaccgtgacatgaagccacaaaacattcttattggtgctggctctgtcgttaagctatgtgattttggttttgctcgagctatgtccaccaacactgtggttttgcgatccattaaaggcactccgctgtacatggcaccagagcttgtgaaagaacagccatacgatcgcactgtcgacctgtggtctcttggtgttatattgtacgagttatatgtaggtcagcctcccttctacaccaattctgtgtatgctctcattcgtcacattgttaaggatcctgtcaaatatcctgatgaaatgagtacttatttcgaaagctttttgaaaggattgctcaacaaggaaccccacagtcgattaacctggcctgctcttcgtgagcaccctttcgttaaagaaacacaagaagaagttgaagccagggaaatccatactgcagtagttgacaataaggcagcttggatgctcaaaggaaatggagggcaacagagaaatgtgttaaatgtcacagaaaagtgcgactcagtgaccctggttgaggacatgtctgctacaaaaggtctagctgacgttcagtcagatatgaagagtgctgtcaaagtaaattctccacccactgaggattttgtgggattcccaacccaagaggagataaaaagttcaggtaacccaacactggacaaattggaaaatacatcccgcactgttaaaggtgcacaagttataggtgaaaatgataaagcattggaccttgttttgctgtcactggaaagattttcaaaatcgccagattctaaaagggacaaagatgttgcttgctctgttcagtccctcaggatcatctccaatttggttgcaactcgtgccatagtttcagttggactgattgagaaaataacatgtgcactgctagactttactgacgctcttgttgggatgaaatcacccgagttcaacaacataataccaaagagtctttcagtcactaaaaacttggtagggcatgttgaaggcaataacatacatagttcttacatcaggcactggaccaaagtagtggaaatcttcatacaggtcgttagatgggaagaagagggaactggtagaattatatatgaggcctgttcttgcatcacaacaatgttatctcgagttgcccaagatcttaaatcttcaactcctgattctgtttctaaacagattttggagcatgctaacatgtctcgcatagttgatcatttgtgtctttgtctggcttcttctgggtcgagtttaacttccggctcttcgcaaatgttagcagctgcctgtgaagcttgtcgagcaatatggattctcatagatacttccgaaacattcttcaagaacgatgatgtaaacatattacctctagatgccttgcagaaccgtctctctcagcatgacataggaaacagtgagtggggtccgttatctgagaaacttgtcgatacagtgacaagagcatatctccgatcaaagcatgtgcaagttgctgttggtcattgccttcaccaacgagtggaggctccattggtttctgcaattcagctcttgtcaagatgctgccttcataatggaattctgcctagcatgctttgtggtcttcccagttcactgcctattacgaccgtagtcagtggtggagaggatggtacagttatttcagaaatattttctatactatcatacgcaacattatcaagcaaagaccagcaaacaggagaaaaagataacttcgagggcagactaaacaatctggtgttccattcatgccttatgttggcaacagttgctcaatgtttgaagttaactgggagaaattctgttctgttaatgcttacaacttctccaaagaagcatcaacatcgtctttctgctatagccaatcacattgcctcagatgataaaatcgaagcttctcttcagaatcactctgcttcagctatgcttgctctcgcatctattctcgctcttgaaaaaggatcttctgctggatcttctgtctctgagctagtggtgtctctgattcctcgagctactaagctttgttatcatcttaggcctatgccaagtaatgaaggtgaagtcatctctcattctgccaattatgccaaatggcacggacttctggatggatgtatcggtttattagaatccagattgaagtggggtggacctctagctgtgcagcagcttattgctagtggtacgccattgcttctcataaatctgttagctggcaaactttcaaatgcttccccagaggacatcaagaagacatccaaccggattggcttgtcccctattggcgttgtatggactatttcgtccatatgccactgtctttcgggtggcacaactttccgtcaggttcttgtgaaaatcgaaaccatgaagctaattacttgtttactatctgatgctcatatcaagctagtaaagagctggggaggtccggggggaggaaaagatggggtcagagagacaataaatgtgataattgatctcctagcatttccttttgttgctctgcaaagtcaaccaggttcgttatctgccacagcttctgtaaatagtggattcattctcaacattggctctcctggtgtgagagtatgcatggaagatagagatttgctaaaagctatagaagaggatatggacaaatacataatagtcctcctggaggtgggagtgccgagtttaatcctacgttgcttggatcatttggaattaaaagatttagtaaggcccgttgcttttcttgccaaaatggtgggtcgtccacgtcttgctgtagatctcgtgagcaaaggtctgttagatcctaatagaatgaaaaaattactcaaccaatcaagtccaagagaagtcatacttgatattttgatgatcatatctgatctatcgaggatggataaggctttttataaatacatcggcgaggcttctgttttacagcctttgaaagaatatcttacccatgtggatccaaatatacgtgcaaaagcttgtagtgctcttggcaatatgtgcagacacaatggatatttctacagcgctcttgcggaacatcaaatcatcggtctcctcattgatcgatgcgctgatccggacaaacgaacacagaaattcgcttgttttgctattggaaatgcggcttaccataacgacacgctgtatgaagagctaagaagatctataacgcagctagcaaacgttttgaccacggctgaagaagacaagacaaaagcaaacgcggctggtgcattgagcaaccttgtccgaaactccaacaaactctgtgaagatatagtctccaagggagctttacaaacgttactgaggctagttgcggattgctcgactcttgccttgaacccaagcaagaaagagacagcgagtgagtcaccgctcaagattgcactcttctcattggctaaaatgtgttcgaaccaccagatttgcagacagtttgtgaagtcatcagagttgttcccggtcattgcaaggcttaaacaatcccctgaggctaacattgctcactatgcttcagttattgtcgccaaagtcagtggtgagtcttaa

SEQ ID NO: 70197 - protein, 1327 aa, Arabidopsis thaliana
  peptide (1)..(1327): Ceres Seq. ID no. 2174608
MGVEDYHVIELVGEGSFGRVYKGRRKYTGQTVAMKFIMKQGKTDKDIHSLRQEIEILRKLKHENIIEMLDSFENAREFCVVTEFAQGELFEILEDDKCLPEEQVQAIAKQLVKALDYLHSNRIIHRDMKPQNILIGAGSVVKLCDFGFARAMSTNTVVLRSIKGTPLYMAPELVKEQPYDRTVDLWSLGVILYELYVGQPPFYTNSVYALIRHIVKDPVKYPDEMSTYFESFLKGLLNKEPHSRLTWPALREHPFVKETQEEVEAREIHTAVVDNKAAWMLKGNGGQQRNVLNVTEKCDSVTLVEDMSATKGLADVQSDMKSAVKVNSPPTEDFVGFPTQEEIKSSGNPTLDKLENTSRTVKGAQVIGENDKALDLVLLSLERFSKSPDSKRDKDVACSVQSLRIISNLVATRAIVSVGLIEKITCALLDFTDALVGMKSPEFNNIIPKSLSVTKNLVGHVEGNNIHSSYIRHWTKVVEIFIQVVRWEEEGTGRIIYEACSCITTMLSRVAQDLKSSTPDSVSKQILEHANMSRIVDHLCLCLASSGSSLTSGSSQMLAAACEACRAIWILIDTSETFFKNDDVNILPLDALQNRLSQHDIGNSEWGPLSEKLVDTVTRAYLRSKHVQVAVGHCLHQRVEAPLVSAIQLLSRCCLHNGILPSMLCGLPSSLPITTVVSGGEDGTVISEIFSILSYATLSSKDQQTGEKDNFEGRLNNLVFHSCLMLATVAQCLKLTGRNSVLLMLTTSPKKHQHRLSAIANHIASDDKIEASLQNHSASAMLALASILALEKGSSAGSSVSELVVSLIPRATKLCYHLRPMPSNEGEVISHSANYAKWHGLLDGCIGLLESRLKWGGPLAVQQLIASGTPLLLINLLAGKLSNASPEDIKKTSNRIGLSPIGVVWTISSICHCLSGGTTFRQVLVKIETMKLITCLLSDAHIKLVKSWGGPGGGKDGVRETINVIIDLLAFPFVALQSQPGSLSATASVNSGFILNIGSPGVRVCMEDRDLLKAIEEDMDKYIIVLLEVGVPSLILRCLDHLELKDLVRPVAFLAKMVGRPRLAVDLVSKGLLDPNRMKKLLNQSSPREVILDILMIISDLSRMDKAFYKYIGEASVLQPLKEYLTHVDPNIRAKACSALGNMCRHNGYFYSALAEHQIIGLLIDRCADPDKRTQKFACFAIGNAAYHNDTLYEELRRSITQLANVLTTAEEDKTKANAAGALSNLVRNSNKLCEDIVSKGALQTLLRLVADCSTLALNPSKKETASESPLKIALFSLAKMCSNHQICRQFVKSSELFPVIARLKQSPEANIAHYASVIVAKVSGES

SEQ ID NO: 70198 - protein, 1294 aa, Arabidopsis thaliana
  peptide (1)..(1294): Ceres Seq. ID no. 2174609
MKFIMKQGKTDKDIHSLRQEIEILRKLKHENIIEMLDSFENAREFCVVTEFAQGELFEILEDDKCLPEEQVQAIAKQLVKALDYLHSNRIIHRDMKPQNILIGAGSVVKLCDFGFARAMSTNTVVLRSIKGTPLYMAPELVKEQPYDRTVDLWSLGVILYELYVGQPPFYTNSVYALIRHIVKDPVKYPDEMSTYFESFLKGLLNKEPHSRLTWPALREHPFVKETQEEVEAREIHTAVVDNKAAWMLKGNGGQQRNVLNVTEKCDSVTLVEDMSATKGLADVQSDMKSAVKVNSPPTEDFVGFPTQEEIKSSGNPTLDKLENTSRTVKGAQVIGENDKALDLVLLSLERFSKSPDSKRDKDVACSVQSLRIISNLVATRAIVSVGLIEKITCALLDFTDALVGMKSPEFNNIIPKSLSVTKNLVGHVEGNNIHSSYIRHWTKVVEIFIQVVRWEEEGTGRIIYEACSCITTMLSRVAQDLKSSTPDSVSKQILEHANMSRIVDHLCLCLASSGSSLTSGSSQMLAAACEACRAIWILIDTSETFFKNDDVNILPLDALQNRLSQHDIGNSEWGPLSEKLVDTVTRAYLRSKHVQVAVGHCLHQRVEAPLVSAIQLLSRCCLHNGILPSMLCGLPSSLPITTVVSGGEDGTVISEIFSILSYATLSSKDQQTGEKDNFEGRLNNLVFHSCLMLATVAQCLKLTGRNSVLLMLTTSPKKHQHRLSAIANHIASDDKIEASLQNHSASAMLALASILALEKGSSAGSSVSELVVSLIPRATKLCYHLRPMPSNEGEVISHSANYAKWHGLLDGCIGLLESRLKWGGPLAVQQLIASGTPLLLINLLAGKLSNASPEDIKKTSNRIGLSPIGVVWTISSICHCLSGGTTFRQVLVKIETMKLITCLLSDAHIKLVKSWGGPGGGKDGVRETINVIIDLLAFPFVALQSQPGSLSATASVNSGFILNIGSPGVRVCMEDRDLLKAIEEDMDKYIIVLLEVGVPSLILRCLDHLELKDLVRPVAFLAKMVGRPRLAVDLVSKGLLDPNRMKKLLNQSSPREVILDILMIISDLSRMDKAFYKYIGEASVLQPLKEYLTHVDPNIRAKACSALGNMCRHNGYFYSALAEHQIIGLLIDRCADPDKRTQKFACFAIGNAAYHNDTLYEELRRSITQLANVLTTAEEDKTKANAAGALSNLVRNSNKLCEDIVSKGALQTLLRLVADCSTLALNPSKKETASESPLKIALFSLAKMCSNHQICRQFVKSSELFPVIARLKQSPEANIAHYASVIVAKVSGES
